(19) United States
(12) Patent Application Publication
(10) Pub. No.: US 2012/0070457 A1
(43) Pub. Date: Mar. 22, 2012

(54) Polypeptides from neisseria meningitidis

(75) Inventors: Sean C. Daugherty, Rosedale, MD (US); Julie C. Dunning Hotopp, Columbia, MD (US); David R. Riley, Rosedale, MD (US); Samuel V. Angiuoli, Arlington, VA (US); Heather Huot Creasy, Gaithersburg, MD (US); Todd H. Creasy, Gaithersburg, MD (US); Herve Tettelin, Ellicott City, MD (US); Duccio Medini, Perugia (IT); Emilio Siena, Colle Val D'Elsa (IT); Sonia Budroni, Martis (IT); Maria Scarselli, Siena (IT)

(73) Assignees: J. CRAIG VENTER INSTITUTE, INC., Rockville, MD (US); NOVARTIS AG, Basel (CH)

(21) Appl. No.: 13/199,782

(22) Filed: Sep. 8, 2011

Related U.S. Application Data
(60) Provisional application No. 61/403,103, filed on Sep. 10, 2010.

(51) Int. Cl. A61K 39/095; A61P 31/04; C07K 16/12; C07H 21/04; C07K 14/22; C07K 7/06

(52) U.S. Cl. 424/190.1; 530/350; 530/329; 530/387.9; 536/23.7; 536/23.53

(57) ABSTRACT

Polypeptides comprising Neisseria meningitidis amino acid sequences. Over 36000 meningococcal polypeptide sequences are disclosed. The invention also provides related polypeptides, nucleic acids, antibodies and methods. These can all be usedin medicine for treating or preventing disease and/or infection caused by N. meningitidis, such as meningococcal meningitis.

### CROSS REFERENCE TO RELATED APPLICATIONS

[0001] This application claims the benefit under 35 USC 119(e) of prior copending U.S. Provisional Patent Application No. 61/403,103, filed Sep. 10, 2010, the disclosure of which is hereby incorporated by reference in its entirety.

### TECHNICAL FIELD

[0002] This invention is in the field of Neisseria meningitidis immunology and vaccinology.

### INCORPORATION BY REFERENCE OF SEQUENCE LISTING ON ASCII TEXT FILE

[0003] The content of the following submission on ASCII text file is incorporated herein by reference in its entirety: a computer readable form (CRF) of the Sequence Listing (file name: 223002118400Sequencelisting.txt, date recorded: Sep. 2, 2011, size: 136,436 KB).

### INCORPORATION BY REFERENCE OF TABLE PROVIDED ON COMPACT DISCS

[0004] The content of the following submission on ASCII text file is incorporated herein by reference in its entirety: a computer readable form (CRF) of Table 1 (file name: 223002118400Table1.txt, date recorded: Sep. 2, 2011, size: 1,297 KB).

LENGTHY TABLES
The patent application contains a lengthy table section. A copy of the table is available in electronic form from the USPTO web site (http://seqdata.uspto.gov/?pageRequest=docDetail&DocID=US20120070457A1). An electronic copy of the table will also be available from the USPTO upon request and payment of the fee set forth in 37 CFR 1.19(b)(3).

### BACKGROUND ART

[0005] Neisseria meningitidis is a non-motile Gram-negative diplococcus that is pathogenic in humans. It colonises the pharynx and causes meningitis (and, occasionally, septicaemia in the absence of meningitis). Several genome sequences for meningococcus have been published (e.g. refs 1 & 2) and these have been mined to identify vaccine candidates. This approach has successfully led to the “universal vaccine” disclosed in reference 3.

[0006] It is an object of the invention to provide further and better polypeptides for use in the development of meningococcal vaccines. The polypeptides may also be useful for diagnostic purposes, and as targets for antibiotics.

### DISCLOSURE OF THE INVENTION

### Polypeptides

[0007] The invention provides polypeptides comprising the N. meningitidis amino acid sequences disclosed in the sequence listing as SEQ ID NOs: 1 to 36178 and 72357 to 72990.

[0008] The invention also provides polypeptides comprising amino acid sequences that have sequence identity to the N. meningitidis amino acid sequences disclosed in the sequence listing. The degree of sequence identity should be greater than 50% (e.g. 60%, 70%, 75%, 80%, 85%, 90%, 91%, 92%, 93%, 94%, 95%, 96%, 97%, 98%, 99% or more). These polypeptides include homologs, orthologs, allelic variants and functional mutants. Typically, 50% identity or more between two polypeptide sequences is considered to be an indication of functional equivalence. Identity between polypeptides is preferably determined by the Smith-Waterman homology search algorithm as implemented in the MPSRCH program (Oxford Molecular), using an affine gap search with parameters gap open penalty=12 and gap extension penalty=1.

[0009] These polypeptides may, compared to the meningococcal sequences of the sequence listing, include one or more (e.g. 1, 2, 3, 4, 5, 6, 7, 8, 9, 10, etc.; ideally fewer than 20) conservative amino acid replacements i.e. replacements of one amino acid with another which has a related side chain. Genetically-encoded amino acids are generally divided into four families: (1) acidic i.e. aspartate, glutamate; (2) basic i.e. lysine, arginine, histidine; (3) non-polar i.e. alanine, valine, leucine, isoleucine, proline, phenylalanine, methionine, tryptophan; and (4) uncharged polar i.e. glycine, asparagine, glutamine, cystine, serine, threonine, tyrosine. Phenylalanine, tryptophan, and tyrosine are sometimes classified jointly as aromatic amino acids. In general, substitution of single amino acids within these families does not have a major effect on the biological activity. The polypeptides may also include one or more (e.g. 1, 2, 3, 4, 5, 6, 7, 8, 9, 10, etc.) single amino acid deletions relative to the meningococcal sequences of the sequence listing. The polypeptides may also include one or more (e.g. 1, 2, 3, 4, 5, 6, 7, 8, 9, 10, etc.) insertions (e.g. each of 1, 2, 3, 4 or 5 amino acids) relative to the meningococcal sequences of the sequence listing.

[0010] The invention further provides polypeptides comprising fragments of the N. meningitidis amino acid sequences of the sequence listing. The fragments should comprise at least n consecutive amino acids from the sequences, where n is 6 or more (e.g. 7, 8, 9, 10, 11, 12, 13, 14, 15, 16, 17, 18, 19, 20, 22, 24, 26, 28, 30, 35, 40, 45, 50, 60, 70, 80, 90, 100 or more). Preferred fragments (particularly those which are at least 10 amino acids long) are those which are present in more than one sequence within SEQ ID NOs: 1 to 36178 or 72357 to 72990. For instance, amino acids 217-240 of SEQ ID NO: 15 are also present in SEQ ID NOs: 2253, 4529, 7532, 8506, 11119, 13289, 15743, 17631, 18199, 20589, 23114, 24374, 26153, 29120, 31620, 34033, and 34531, so this is a preferred fragment of SEQ ID NO: 15 (and, of course, also of each of SEQ ID NOs: 2253, 4529, 7532, 8506, 11119, 13289, 15743, 17631, 18199, 20589, 23114, 24374, 26153, 29120, 31620, 34033, and 34531).

[0011] The fragment may comprise at least one T-cell or, preferably, a B-cell epitope of the sequence. T- and B-cell epitopes can be identified empirically (e.g. using PEPSCAN [4,5] or similar methods), or they can be predicted (e.g. using the Jameson-Wolf antigenic index [6], matrix-based approaches [7], TEPITOPE [8], neural networks [9], OptiMer & EpiMer [10, 11], ADEPT [12], Tsites [13], hydrophilicity [14], antigenic index [15] or the methods disclosed in reference 16 etc.). Other preferred fragments are (a) the N-terminal leader peptides of the meiningococcal polypeptides of the invention, (b) the meningococcal polypeptides, but without their N-terminal leader peptides, (c) the meningococcal polypeptides, but without their N-terminal amino acid residue.

[0012] Where the invention uses an amino acid sequence which has less than 100% identity to an amino acid sequence in the sequence listing, or where it includes a fragment of an amino acid sequence in the sequence listing, it is preferred that the polypeptide of the invention should be able to bind to an antibody which binds specifically to a protein that consists of the relevant amino acid sequence from the sequence listing. For example, a variant of SEQ ID NO: 1 would still be able to bind to an antibody which was raised against SEQ ID NO: 1. As used herein, an antibody “binds specifically” to a protein when its binding affinity for that protein is at least 100-fold tighter than for human serum albumin i.e. the binding is not non-specific.

[0013] Preferred amino acid SEQ ID NOs of the invention are listed in Table 2, including polypeptides that are lipidated, that are located in the outer membrane, that are adhesins, that are located in the inner membrane, or that are located in the periplasm.

[0014] Particualrly preferred amino acid SEQ ID NOs of the invention are listed in Table 3.

[0015] Polypeptides of the invention can be prepared in many ways e.g. by chemical synthesis (in whole or in part), by digesting longer polypeptides using proteases, by translation from RNA, by purification from cell culture (e.g. from recombinant expression), from the organism itself (e.g. after bacterial culture, or direct from patients), etc. A preferred method for production of peptides <40 amino acids long involves in vitro chemical synthesis [17,18]. Solid-phase peptide synthesis is particularly preferred, such as methods based on tBoc or Fmoc [19] chemistry. Enzymatic synthesis [20] may also be used in part or in full. As an alternative to chemical synthesis, biological synthesis may be used e.g. the polypeptides may be produced by translation. This may be carried out in vitro or in vivo. Biological methods are in general restricted to the production of polypeptides based on L-amino acids, but manipulation of translation machinery (e.g. of aminoacyl tRNA molecules) can be used to allow the introduction of D-amino acids (or of other non natural amino acids, such as iodotyrosine or methylphenylalanine, azidohomoalanine, etc.) [21]. Where D-amino acids are included, however, it is preferred to use chemical synthesis. Polypeptides of the invention may have covalent modifications at the C-terminus and/or N-terminus.

[0016] Polypeptides of the invention can take various forms (e.g. native, fusions, glycosylated, non-glycosylated, lipidated, non-lipidated, phosphorylated, non-phosphorylated, myristoylated, non-myristoylated, monomeric, multimeric, particulate, denatured, etc.).

[0017] Polypeptides of the invention are preferably provided in purified or substantially purified form i.e. substantially free from other polypeptides (e.g. free from naturally-occurring polypeptides), particularly from other meningococcal or host cell polypeptides, and are generally at least about 50% pure (by weight), and usually at least about 90% pure i.e. less than about 50%, and more preferably less than about 10% (e.g. 5%) of a composition is made up of other expressed polypeptides. Polypeptides of the invention are preferably meningococcal polypeptides. Polypeptides of the invention preferably have the property indicated in Table 1 for the relevant sequence.

[0018] Polypeptides of the invention may be attached to a solid support. Polypeptides of the invention may comprise a detectable label (e.g. a radioactive or fluorescent label, or a biotin label).

[0019] The term “polypeptide” refers to amino acid polymers of any length. The polymer may be linear or branched, it may comprise modified amino acids, and it may be interrupted by non-amino acids. The terms also encompass an amino acid polymer that has been modified naturally or by intervention; for example, disulfide bond formation, glycosylation, lipidation, acetylation, phosphorylation, or any other manipulation or modification, such as conjugation with a labeling component. Also included within the definition are, for example, polypeptides containing one or more analogs of an amino acid (including, for example, unnatural amino acids, etc.), as well as other modifications known in the art. Polypeptides can occur as single chains or associated chains. Polypeptides of the invention can be naturally or non-naturally glycosylated (i.e. the polypeptide has a glycosylation pattern that differs from the glycosylation pattern found in the corresponding naturally occurring polypeptide).

[0020] The invention provides polypeptides comprising sequence -X-Y- or -Y-X-, wherein: -X- is the amino acid sequence of an polypeptide as defined above and -Y- is not an amino acid sequence of a polypeptide as defined above i.e. the invention provides fusion proteins. Where the N-terminus codon of the downstream polypeptide-coding sequence is not ATG then that codon will be translated as the standard amino acid for that codon rather than as a Met, which occurs when the codon is a start codon. The -Y- sequence will typically be short (e.g. 40 or fewer amino acids i.e. 39, 38, 37, 36, 35, 34, 33, 32, 31, 30, 29, 28, 27, 26, 25, 24, 23, 22, 21, 20, 19, 18, 17, 16, 15, 14, 13, 12, 11, 10, 9, 8, 7, 6, 5, 4, 3, 2, 1). Examples include leader sequences to direct polypeptide trafficking, or short peptide sequences which facilitate cloning or purification (e.g. histidine tags i.e. Hisₙ where n=3, 4, 5, 6, 7, 8, 9, 10 or more).

[0021] The invention provides a process for producing polypeptides of the invention, comprising the step of culturing a host cell of to the invention under conditions which induce polypeptide expression.

[0022] The invention provides a process for producing a polypeptide of the invention, wherein the polypeptide is synthesised in part or in whole using chemical means.

[0023] The invention provides a composition comprising two or more polypeptides of the invention.

[0024] The invention also provides a hybrid polypeptide represented by the formula NH₂-A-[—X-L-]ₙ-B-COOH, wherein X is a polypeptide of the invention as defined above, L is an optional linker amino acid sequence, A is an optional N-terminal amino acid sequence, B is an optional C-terminal amino acid sequence, and n is an integer greater than 1. The value of n is between 2 and x, and the value of x is typically 3, 4, 5, 6, 7, 8, 9 or 10. Preferably n is 2, 3 or 4; it is more preferably 2 or 3; most preferably, n=2. For each n instances, -X- may be the same or different. For each n instances of [—X-L-], linker amino acid sequence -L- may be present or absent. For instance, when n=2 the hybrid may be NH₂—X₁-L₁-X₂-L₂-COOH, NH₂—X₁—X₂—COOH, NH₂—X₁-L₁-X₂—COOH, NH₂—X₁—X₂-L₂-COOH, etc. Linker amino acid sequence(s) -L- will typically be short (e.g. 20 or fewer amino acids i.e. 19, 18, 17, 16, 15, 14, 13, 12, 11, 10, 9, 8, 7, 6, 5, 4, 3, 2, 1). Examples include short peptide sequences which facilitate cloning, poly-glycine linkers (i.e. Glyₙ where n=2, 3, 4, 5, 6, 7, 8, 9, 10 or more), and histidine tags (i.e. Hisₙ where n=3, 4, 5, 6, 7, 8, 9, 10 or more). Other suitable linker amino acid sequences will be apparent to those skilled in the art. -A- and -B- are optional sequences which will typically be short (e.g. 40 or fewer amino acids i.e. 39, 38, 37, 36, 35, 34, 33, 32, 31, 30, 29, 28, 27, 26, 25, 24, 23, 22, 21, 20, 19, 18, 17, 16, 15, 14, 13, 12, 11, 10, 9, 8, 7, 6, 5, 4, 3, 2, 1). Examples include leader sequences to direct polypeptide trafficking, or short peptide sequences which facilitate cloning or purification (e.g. histidine tags i.e. Hisₙ where n=3, 4, 5, 6, 7, 8, 9, 10 or more). Other suitable N-terminal and C-terminal amino acid sequences will be apparent to those skilled in the art.

[0025] Various tests can be used to assess the in vivo immunogenicity of polypeptides of the invention. For example, polypeptides can be expressed recombinantly and used to screen patient sera by immunoblot. A positive reaction between the polypeptide and patient serum indicates that the patient has previously mounted an immune response to the protein in question i.e. the protein is an immunogen. This method can also be used to identify immunodominant proteins.

### Antibodies

[0026] The invention provides antibodies that bind to polypeptides of the invention. These may be polyclonal or monoclonal and may be produced by any suitable means (e.g. by recombinant expression). To increase compatibility with the human immune system, the antibodies may be chimeric or humanised [e.g. refs. 22 & 23], or fully human antibodies may be used. The antibodies may include a detectable label (e.g. for diagnostic assays). Antibodies of the invention may be attached to a solid support. Antibodies of the invention are preferably neutralising antibodies.

[0027] Monoclonal antibodies are particularly useful in identification and purification of the individual polypeptides against which they are directed. Monoclonal antibodies of the invention may also be employed as reagents in immunoassays, radioimmunoassays (RIA) or enzyme-linked immunosorbent assays (ELISA), etc. In these applications, the antibodies can be labelled with an analytically-detectable reagent such as a radioisotope, a fluorescent molecule or an enzyme. The monoclonal antibodies produced by the above method may also be used for the molecular identification and characterization (epitope mapping) of polypeptides of the invention.

[0028] Antibodies of the invention are preferably provided in purified or substantially purified form. Typically, the antibody will be present in a composition that is substantially free of other polypeptides e.g. where less than 90% (by weight), usually less than 60% and more usually less than 50% of the composition is made up of other polypeptides.

[0029] Antibodies of the invention can be of any isotype (e.g. IgA, IgG, IgM i.e. an α, γ or μ heavy chain), but will generally be IgG. Within the IgG isotype, antibodies may be IgG1, IgG2, IgG3 or IgG4 subclass. Antibodies of the invention may have a κ or a λ light chain.

[0030] Antibodies of the invention can take various forms, including whole antibodies, antibody fragments such as F(ab′)2 and F(ab) fragments, Fv fragments (non-covalent heterodimers), single-chain antibodies such as single chain Fv molecules (scFv), minibodies, oligobodies, etc. The term “antibody” does not imply any particular origin, and includes antibodies obtained through non-conventional processes, such as phage display.

[0031] The invention provides a process for detecting polypeptides of the invention, comprising the steps of: (a) contacting an antibody of the invention with a biological sample under conditions suitable for the formation of an antibody-antigen complexes; and (b) detecting said complexes.

[0032] The invention provides a process for detecting antibodies of the invention, comprising the steps of: (a) contacting a polypeptide of the invention with a biological sample (e.g. a blood or serum sample) under conditions suitable for the formation of an antibody-antigen complexes; and (b) detecting said complexes.

### Nucleic Acids

[0033] The invention provides nucleic acid comprising the N. meningitidis nucleotide sequences of the sequence listing. These nucleic acid sequences are SEQ ID NOs: 36179-72356.

[0034] The invention also provides nucleic acid comprising nucleotide sequences having sequence identity to the N. meningitidis nucleotide sequences of the sequence listing. Identity between sequences is preferably determined by the Smith-Waterman homology search algorithm as described above.

[0035] The invention also provides nucleic acid which can hybridize to the N. meningitidis nucleic acid of the sequence listing. Hybridization reactions can be performed under conditions of different “stringency”. Conditions that increase stringency of a hybridization reaction of widely known and published in the art (e.g. page 7.52 of reference 24). Examples of relevant conditions include (in order of increasing stringency): incubation temperatures of 25° C., 37° C., 50° C., 55° C. and 68° C.; buffer concentrations of 10×SSC, 6×SSC, 1×SSC, 0.1×SSC (where SSC is 0.15 M NaCl and 15 mM citrate buffer) and their equivalents using other buffer systems; formamide concentrations of 0%, 25%, 50%, and 75%; incubation times from 5 minutes to 24 hours; 1, 2, or more washing steps; wash incubation times of 1, 2, or 15 minutes; and wash solutions of 6×SSC, 1×SSC, 0.1×SSC, or de-ionized water. Hybridization techniques and their optimization are well known in the art [e.g. see references 24-27, etc.].

[0036] In some embodiments, nucleic acid of the invention hybridizes to a target of the invention under low stringency conditions; in other embodiments it hybridizes under intermediate stringency conditions; in preferred embodiments, it hybridizes under high stringency conditions. An exemplary set of low stringency hybridization conditions is 50° C. and 10×SSC. An exemplary set of intermediate stringency hybridization conditions is 55° C. and 1×SSC. An exemplary set of high stringency hybridization conditions is 68° C. and 0.1×SSC.

[0037] Nucleic acid comprising fragments of these sequences are also provided. These should comprise at least n consecutive nucleotides from the N. meningitidis sequences, wherein n is 10 or more (e.g. 12, 14, 15, 18, 20, 25, 30, 35, 40, 50, 60, 70, 80, 90, 100, 150, 200 or more).

[0038] The invention provides nucleic acid of formula 5′-X-Y-Z-3′, wherein: -X- is a nucleotide sequence consisting of x nucleotides; -Z- is a nucleotide sequence consisting of z nucleotides; -Y- is a nucleotide sequence consisting of either (a) a fragment of one of SEQ ID NOs: 36179-72356, or (b) the complement of (a); and said nucleic acid 5′-X-Y-Z-3′ is neither (i) a fragment of one of SEQ ID NOs: 36179-72356 nor (ii) the complement of (i). The -X- and/or -Z- moieties may comprise a promoter sequence (or its complement).

[0039] The invention also provides nucleic acid encoding the polypeptides and polypeptide fragments of the invention.

[0040] The invention includes nucleic acid comprising sequences complementary to the sequences disclosed in the sequence listing (e.g. for antisense or probing, or for use as primers), as well as the sequences in the orientation actually shown.

[0041] Nucleic acids of the invention can be used in hybridisation reactions (e.g. Northern or Southern blots, or in nucleic acid microarrays or ‘gene chips’) and amplification reactions (e.g. PCR, SDA, SSSR, LCR, TMA, NASBA, etc.) and other nucleic acid techniques.

[0042] Nucleic acid according to the invention can take various forms (e.g. single-stranded, double-stranded, vectors, primers, probes, labelled etc.). Nucleic acids of the invention may be circular or branched, but will generally be linear. Unless otherwise specified or required, any embodiment of the invention that utilizes a nucleic acid may utilize both the double-stranded form and each of two complementary single-stranded forms which make up the double-stranded form. Primers and probes are generally single-stranded, as are antisense nucleic acids.

[0043] Nucleic acids of the invention are preferably provided in purified or substantially purified form i.e. substantially free from other nucleic acids (e.g. free from naturally-occurring nucleic acids), particularly from other N. meningitidis or host cell nucleic acids, generally being at least about 50% pure (by weight), and usually at least about 90% pure. Nucleic acids of the invention are preferably meningococcal nucleic acids.

[0044] Nucleic acids of the invention may be prepared in many ways e.g. by chemical synthesis (e.g. phosphoramidite synthesis of DNA) in whole or in part, by digesting longer nucleic acids using nucleases (e.g. restriction enzymes), by joining shorter nucleic acids or nucleotides (e.g. using ligases or polymerases), from genomic or cDNA libraries, etc.

[0045] Nucleic acid of the invention may be attached to a solid support (e.g. a bead, plate, filter, film, slide, microarray support, resin, etc.). Nucleic acid of the invention may be labelled e.g. with a radioactive or fluorescent label, or a biotin label. This is particularly useful where the nucleic acid is to be used in detection techniques e.g. where the nucleic acid is a primer or as a probe.

[0046] The term “nucleic acid” includes in general means a polymeric form of nucleotides of any length, which contain deoxyribonucleotides, ribonucleotides, and/or their analogs. It includes DNA, RNA, DNA/RNA hybrids. It also includes DNA or RNA analogs, such as those containing modified backbones (e.g. peptide nucleic acids (PNAs) or phosphorothioates) or modified bases. Thus the invention includes mRNA, tRNA, rRNA, ribozymes, DNA, cDNA, recombinant nucleic acids, branched nucleic acids, plasmids, vectors, probes, primers, etc. Where nucleic acid of the invention takes the form of RNA, it may or may not have a 5′ cap.

[0047] Nucleic acids of the invention which comprise meningococcal sequences may also comprise non-meningococcal sequences (e.g. in nucleic acids of formula 5′-X-Y-Z-3′, as defined above). This is particularly useful for primers, which may thus comprise a first sequence complementary to a PCAV nucleic acid target and a second sequence which is not complementary to the nucleic acid target. Any such non-complementary sequences in the primer are preferably 5′ to the complementary sequences. Typical non-complementary sequences comprise restriction sites or promoter sequences.

[0048] Nucleic acids of the invention can be prepared in many ways e.g. by chemical synthesis (at least in part), by digesting longer nucleic acids using nucleases (e.g. restriction enzymes), by joining shorter nucleic acids (e.g. using ligases or polymerases), from genomic or cDNA libraries, etc.

[0049] Nucleic acids of the invention may be part of a vector i.e. part of a nucleic acid construct designed for transduction/transfection of one or more cell types. Vectors may be, for example, “cloning vectors” which are designed for isolation, propagation and replication of inserted nucleotides, “expression vectors” which are designed for expression of a nucleotide sequence in a host cell, “viral vectors” which is designed to result in the production of a recombinant virus or virus-like particle, or “shuttle vectors”, which comprise the attributes of more than one type of vector. Preferred vectors are plasmids. A “host cell” includes an individual cell or cell culture which can be or has been a recipient of exogenous nucleic acid. Host cells include progeny of a single host cell, and the progeny may not necessarily be completely identical (in morphology or in total DNA complement) to the original parent cell due to natural, accidental, or deliberate mutation and/or change. Host cells include cells transfected or infected in vivo or in vitro with nucleic acid of the invention.

[0050] Where a nucleic acid is DNA, it will be appreciated that “U” in a RNA sequence will be replaced by “T” in the DNA. Similarly, where a nucleic acid is RNA, it will be appreciated that “T” in a DNA sequence will be replaced by “U” in the RNA.

[0051] The term “complement” or “complementary” when used in relation to nucleic acids refers to Watson-Crick base pairing. Thus the complement of C is G, the complement of G is C, the complement of A is T (or U), and the complement of T (or U) is A. It is also possible to use bases such as I (the purine inosine) e.g. to complement pyrimidines (C or T). The terms also imply a direction—the complement of 5′-ACAGT-3′ is 5′-ACTGT-3′ rather than 5′-TGTCA-3′.

[0052] Nucleic acids of the invention can be used, for example: to produce polypeptides; as hybridization probes for the detection of nucleic acid in biological samples; to generate additional copies of the nucleic acids; to generate ribozymes or antisense oligonucleotides; as single-stranded DNA primers or probes; or as triple-strand forming oligonucleotides.

[0053] The invention provides a process for producing nucleic acid of the invention, wherein the nucleic acid is synthesised in part or in whole using chemical means.

[0054] The invention provides vectors comprising nucleotide sequences of the invention (e.g. cloning or expression vectors) and host cells transformed with such vectors.

[0055] The invention also provides a kit comprising primers (e.g. PCR primers) for amplifying a template sequence contained within a Neisseria bacterium (e.g. N. meningitidis) nucleic acid sequence, the kit comprising a first primer and a second primer, wherein the first primer is substantially complementary to said template sequence and the second primer is substantially complementary to a complement of said template sequence, wherein the parts of said primers which have substantial complementarity define the termini of the template sequence to be amplified. The first primer and/or the second primer may include a detectable label (e.g. a fluorescent label).

[0056] The invention also provides a kit comprising first and second single-stranded oligonucleotides which allow amplification of a Neisseria template nucleic acid sequence contained in a single- or double-stranded nucleic acid (or mixture thereof), wherein: (a) the first oligonucleotide comprises a primer sequence which is substantially complementary to said template nucleic acid sequence; (b) the second oligonucleotide comprises a primer sequence which is substantially complementary to the complement of said template nucleic acid sequence; (c) the first oligonucleotide and/or the second oligonucleotide comprise(s) sequence which is not compementary to said template nucleic acid; and (d) said primer sequences define the termini of the template sequence to be amplified. The non-complementary sequence(s) of feature (c) are preferably upstream of (i.e. 5′ to) the primer sequences. One or both of these (c) sequences may comprise a restriction site [e.g. ref. 28] or a promoter sequence [e.g. 29]. The first oligonucleotide and/or the second oligonucleotide may include a detectable label (e.g. a fluorescent label).

[0057] The template sequence may be any part of a genome sequence.

[0058] The invention provides a process for detecting nucleic acid of the invention, comprising the steps of: (a) contacting a nucleic probe according to the invention with a biological sample under hybridising conditions to form duplexes; and (b) detecting said duplexes.

[0059] The invention provides a process for detecting N. meningitidis in a biological sample (e.g. blood), comprising the step of contacting nucleic acid according to the invention with the biological sample under hybridising conditions. The process may involve nucleic acid amplification (e.g. PCR, SDA, SSSR, LCR, TMA, NASBA, etc.) or hybridisation (e.g. microarrays, blots, hybridisation with a probe in solution etc.). PCR detection of N. meningitidis in clinical samples has been reported (e.g. see refs. 30 & 31). Clinical assays based on nucleic acid are described in general in ref. 32.

[0060] The invention provides a process for preparing a fragment of a target sequence, wherein the fragment is prepared by extension of a nucleic acid primer. The target sequence and/or the primer are nucleic acids of the invention. The primer extension reaction may involve nucleic acid amplification (e.g. PCR, SDA, SSSR, LCR, TMA, NASBA, etc.).

[0061] Nucleic acid amplification according to the invention may be quantitative and/or real-time.

[0062] For certain embodiments of the invention, nucleic acids are preferably at least 7 nucleotides in length (e.g. 8, 9, 10, 11, 12, 13, 14, 15, 16, 17, 18, 19, 20, 21, 22, 23, 24, 25, 26, 27, 28, 29, 30, 31, 32, 33, 34, 35, 36, 37, 38, 39, 40, 45, 50, 55, 60, 65, 70, 75, 80, 90, 100, 110, 120, 130, 140, 150, 160, 170, 180, 190, 200, 225, 250, 275, 300 nucleotides or longer).

[0063] For certain embodiments of the invention, nucleic acids are preferably at most 500 nucleotides in length (e.g. 450, 400, 350, 300, 250, 200, 150, 140, 130, 120, 110, 100, 90, 80, 75, 70, 65, 60, 55, 50, 45, 40, 39, 38, 37, 36, 35, 34, 33, 32, 31, 30, 29, 28, 27, 26, 25, 24, 23, 22, 21, 20, 19, 18, 17, 16, 15 nucleotides or shorter).

[0064] Primers and probes of the invention, and other nucleic acids used for hybridization, are preferably between 10 and 30 nucleotides in length (e.g. 10, 11, 12, 13, 14, 15, 16, 17, 18, 19, 20, 21, 22, 23, 24, 25, 26, 27, 28, 29, or 30 nucleotides).

### Pharmaceutical Compositions

[0065] The invention provides compositions comprising: (a) polypeptide, antibody, and/or nucleic acid of the invention; and (b) a pharmaceutically acceptable carrier. These compositions may be suitable as immunogenic compositions, for instance, or as diagnostic reagents, or as vaccines. Vaccines according to the invention may either be prophylactic (i.e. to prevent infection) or therapeutic (i.e. to treat infection), but will typically be prophylactic.

[0066] A ‘pharmaceutically acceptable carriers’ includes any carrier that does not itself induce the production of antibodies harmful to the individual receiving the composition. Suitable carriers are typically large, slowly metabolised macromolecules such as proteins, polysaccharides, polylactic acids, polyglycolic acids, polymeric amino acids, amino acid copolymers, sucrose, trehalose, lactose, and lipid aggregates (such as oil droplets or liposomes). Such carriers are well known to those of ordinary skill in the art. The vaccines may also contain diluents, such as water, saline, glycerol, etc. Additionally, auxiliary substances, such as wetting or emulsifying agents, pH buffering substances, and the like, may be present. Sterile pyrogen-free, phosphate-buffered physiologic saline is a typical carrier. A thorough discussion of pharmaceutically acceptable excipients is available in ref. 161.

[0067] Compositions of the invention may include an antimicrobial, particularly if packaged in a multiple dose format.

[0068] Compositions of the invention may comprise detergent e.g. a Tween (polysorbate), such as Tween 80. Detergents are generally present at low levels e.g. <0.01%.

[0069] Compositions of the invention may include sodium salts (e.g. sodium chloride) to give tonicity. A concentration of 10±2 mg/ml NaCl is typical.

[0070] Compositions of the invention will generally include a buffer. A phosphate buffer is typical.

[0071] Compositions of the invention may comprise a sugar alcohol (e.g. mannitol) or a disaccharide (e.g. sucrose or trehalose) e.g. at around 15-30 mg/ml (e.g. 25 mg/ml), particularly if they are to be lyophilised or if they include material which has been reconstituted from lyophilised material. The pH of a composition for lyophilisation may be adjusted to around 6.1 prior to lyophilisation.

[0072] Polypeptides of the invention may be administered in conjunction with other immunoregulatory agents. In particular, compositions will usually include a vaccine adjuvant. Adjuvants which may be used in compositions of the invention include, but are not limited to:

### A. Mineral-Containing Compositions

[0073] Mineral containing compositions suitable for use as adjuvants in the invention include mineral salts, such as aluminium salts and calcium salts. The invention includes mineral salts such as hydroxides (e.g. oxyhydroxides), phosphates (e.g. hydroxyphosphates, orthophosphates), sulphates, etc. (e.g. see chapters 8 & 9 of ref. 33), or mixtures of different mineral compounds, with the compounds taking any suitable form (e.g. gel, crystalline, amorphous, etc.), and with adsorption being preferred. The mineral containing compositions may also be formulated as a particle of metal salt [34].

[0074] A typical adjuvant is amorphous aluminium hydroxyphosphate with PO₄/Al molar ratio between 0.84 and 0.92, included at 0.6 mg A1³⁺/ml. Adsorption with a low dose of aluminium phosphate may be used e.g. between 50 and 100 μg Al³⁺ per conjugate per dose. Where there is more than one conjugate in a composition, not all conjugates need to be adsorbed.

### B. Oil Emulsions

[0075] Oil emulsion compositions suitable for use as adjuvants in the invention include squalene-in-water emulsions, such as MF59 (Chapter 10 of ref. 33; see also ref. 35; 5% Squalene, 0.5% Tween 80, and 0.5% Span 85, formulated into submicron particles using a microfluidizer) or AS03. Complete Freund's adjuvant (CFA) and incomplete Freund's adjuvant (IFA) may also be used.

### C. Saponin Formulations [Chapter 22 of Ref. 33]

[0076] Saponin formulations may also be used as adjuvants in the invention. Saponins are a heterologous group of sterol glycosides and triterpenoid glycosides that are found in the bark, leaves, stems, roots and even flowers of a wide range of plant species. Saponin from the bark of the Quillaia saponaria Molina tree have been widely studied as adjuvants. Saponin can also be commercially obtained from Smilax ornata (sarsaprilla), Gypsophilla paniculata (brides veil), and Saponaria officianalis (soap root). Saponin adjuvant formulations include purified formulations, such as QS21, as well as lipid formulations, such as ISCOMs. QS21 is marketed as Stimulon™.

[0077] Saponin compositions have been purified using HPLC and RP-HPLC. Specific purified fractions using these techniques have been identified, including QS7, QS17, QS18, QS21, QH-A, QH-B and QH-C. Preferably, the saponin is QS21. A method of production of QS21 is disclosed in ref. 36. Saponin formulations may also comprise a sterol, such as cholesterol [37].

[0078] Combinations of saponins and cholesterols can be used to form unique particles called immunostimulating complexs (ISCOMs) [chapter 23 of ref. 33]. ISCOMs typically also include a phospholipid such as phosphatidylethanolamine or phosphatidylcholine. Any known saponin can be used in ISCOMs. Preferably, the ISCOM includes one or more of QuilA, QHA & QHC. ISCOMs are further described in refs. 37-39. Optionally, ISCOMS may be devoid of additional detergent [40].

[0079] A review of the development of saponin based adjuvants can be found in refs. 41 & 42.

### D. Virosomes and Virus-Like Particles

[0080] Virosomes and virus-like particles (VLPs) can also be used as adjuvants in the invention. These structures generally contain one or more proteins from a virus optionally combined or formulated with a phospholipid. They are generally non-pathogenic, non-replicating and generally do not contain any of the native viral genome. The viral proteins may be recombinantly produced or isolated from whole viruses. These viral proteins suitable for use in virosomes or VLPs include proteins derived from influenza virus (such as HA or NA), Hepatitis B virus (such as core or capsid proteins), Hepatitis E virus, measles virus, Sindbis virus, Rotavirus, Foot-and-Mouth Disease virus, Retrovirus, Norwalk virus, human Papilloma virus, HIV, RNA-phages, Qβ-phage (such as coat proteins), GA-phage, fr-phage, AP205 phage, and Ty (such as retrotransposon Ty protein p1). VLPs are discussed further in refs. 43-48. Virosomes are discussed further in, for example, ref. 49

### E. Bacterial or Microbial Derivatives

[0081] Adjuvants suitable for use in the invention include bacterial or microbial derivatives such as non-toxic derivatives of enterobacterial lipopolysaccharide (LPS), Lipid A derivatives, immunostimulatory oligonucleotides and ADP-ribosylating toxins and detoxified derivatives thereof.

[0082] Non-toxic derivatives of LPS include monophosphoryl lipid A (MPL) and 3-O-deacylated MPL (3dMPL). 3dMPL is a mixture of 3 de-O-acylated monophosphoryl lipid A with 4, 5 or 6 acylated chains. A preferred “small particle” form of 3 De-O-acylated monophosphoryl lipid A is disclosed in ref. 50. Such “small particles” of 3dMPL are small enough to be sterile filtered through a 0.22 μm membrane [50]. Other non-toxic LPS derivatives include monophosphoryl lipid A mimics, such as aminoalkyl glucdsaminide phosphate derivatives e.g. RC-529 [51,52].

[0083] Lipid A derivatives include derivatives of lipid A from Escherichia coli such as OM-174. OM-174 is described for example in refs. 53 & 54.

[0084] Immunostimulatory oligonucleotides suitable for use as adjuvants in the invention include nucleotide sequences containing a CpG motif (a dinucleotide sequence containing an unmethylated cytosine linked by a phosphate bond to a guanosine). Double-stranded RNAs and oligonucleotides containing palindromic or poly(dG) sequences have also been shown to be immunostimulatory.

[0085] The CpG's can include nucleotide modifications/analogs such as phosphorothioate modifications and can be double-stranded or single-stranded. References 55, 56 and 57 disclose possible analog substitutions e.g. replacement of guanosine with 2′-deoxy-7-deazaguanosine. The adjuvant effect of CpG oligonucleotides is further discussed in refs. 58-63.

[0086] The CpG sequence may be directed to TLR9, such as the motif GTCGTT or TTCGTT [64]. The CpG sequence may be specific for inducing a Th1 immune response, such as a CpG-A ODN, or it may be more specific for inducing a B cell response, such a CpG-B ODN. CpG-A and CpG-B ODNs are discussed in refs. 65-67. Preferably, the CpG is a CpG-A ODN.

[0087] Preferably, the CpG oligonucleotide is constructed so that the 5′ end is accessible for receptor recognition. Optionally, two CpG oligonucleotide sequences may be attached at their 3′ ends to form “immunomers”. See, for example, refs. 64 & 68-70.

[0088] Bacterial ADP-ribosylating toxins and detoxified derivatives thereof may be used as adjuvants in the invention. Preferably, the protein is derived from E.coli (E.coli heat labile enterotoxin “LT”), cholera (“CT”), or pertussis (“PT”). The use of detoxified ADP-ribosylating toxins as mucosal adjuvants is described in ref. 71 and as parenteral adjuvants in ref. 72. The toxin or toxoid is preferably in the form of a holotoxin, comprising both A and B subunits. Preferably, the A subunit contains a detoxifying mutation; preferably the B subunit is not mutated. Preferably, the adjuvant is a detoxified LT mutant such as LT-K63, LT-R72, and LT-G192. The use of ADP-ribosylating toxins and detoxified derivaties thereof, particularly LT-K63 and LT-R72, as adjuvants can be found in refs. 73-80. Numerical reference for amino acid substitutions is preferably based on the alignments of the A and B subunits of ADP-ribosylating toxins set forth in ref. 81, specifically incorporated herein by reference in its entirety.

F. Human Immunomodulators Human immunomodulators suitable for use as adjuvants in the invention include cytokines, such as interleukins (e.g. IL-1, IL-2, IL-4, IL-5, IL-6, IL-7, IL-12 [82], etc.) [83], interferons (e.g. interferon-γ), macrophage colony stimulating factor, and tumor necrosis factor.

### G. Bioadhesives and Mucoadhesives

[0089] Bioadhesives and mucoadhesives may also be used as adjuvants in the invention. Suitable bioadhesives include esterified hyaluronic acid microspheres [84] or mucoadhesives such as cross-linked derivatives of poly(acrylic acid), polyvinyl alcohol, polyvinyl pyrollidone, polysaccharides and carboxymethylcellulose. Chitosan and derivatives thereof may also be used as adjuvants in the invention [85].

### H. Microparticles

[0090] Microparticles may also be used as adjuvants in the invention. Microparticles (i.e. a particle of ˜100 nm to ˜150 μm in diameter, more preferably ˜200 nm to ˜30 μm in diameter, and most preferably ˜500 nm to ˜10 μm in diameter) formed from materials that are biodegradable and non-toxic (e.g. a poly(a-hydroxy acid), a polyhydroxybutyric acid, a polyorthoester, a polyanhydride, a polycaprolactone, etc.), with poly(lactide-co-glycolide) are preferred, optionally treated to have a negatively-charged surface (e.g. with SDS) or a positively-charged surface (e.g. with a cationic detergent, such as CTAB).

### I. Liposomes (Chapters 13 & 14 of Ref 33)

[0091] Examples of liposome formulations suitable for use as adjuvants are described in refs. 86-88.

### J. Polyoxyethylene Ether and Polyoxyethylene Ester Formulations

[0092] Adjuvants suitable for use in the invention include polyoxyethylene ethers and polyoxyethylene esters [89]. Such formulations further include polyoxyethylene sorbitan ester surfactants in combination with an octoxynol [90] as well as polyoxyethylene alkyl ethers or ester surfactants in combination with at least one additional non-ionic surfactant such as an octoxynol [91]. Preferred polyoxyethylene ethers are selected from the following group: polyoxyethylene-9-lauryl ether (laureth 9), polyoxyethylene-9-steoryl ether, polyoxytheylene-8-steoryl ether, polyoxyethylene-4-lauryl ether, polyoxyethylene-35-lauryl ether, and polyoxyethylene-23-lauryl ether.

### K. Polyphosphazene (PCPP)

[0093] PCPP formulations are described, for example, in refs. 92 and 93.

### L. Muramyl Peptides

[0094] Examples of muramyl peptides suitable for use as adjuvants in the invention include N-acetyl-muramyl-L-threonyl-D-isoglutamine (thr-MDP), N-acetyl-normuramyl-L-alanyl-D-isoglutamine (nor-MDP), and N-acetylmuramyl-L-alanyl-D-isoglutaminyl-L-alanine-2-(1′-2′-dipalmitoyl-sn-glycero-3-hydroxyphosphoryloxy)-ethylamine MTP-PE).

### M. Imidazoquinolone Compounds.

[0095] Examples of imidazoquinolone compounds suitable for use adjuvants in the invention include Imiquamod and its homologues (e,g. “Resiquimod 3M”), described further in refs. 94 and 95.

[0096] The invention may also comprise combinations of aspects of one or more of the adjuvants identified above. For example, the following adjuvant compositions may be used in the invention: (1) a saponin and an oil-in-water emulsion [96]; (2) a saponin (e.g. QS21) +a non-toxic LPS derivative (e.g. 3dMPL) [97]; (3) a saponin (e.g. QS21) +a non-toxic LPS derivative (e.g. 3dMPL) +a cholesterol; (4) a saponin (e.g. QS21) +3dMPL +IL-12 (optionally +a sterol) [98]; (5) combinations of 3dMPL with, for example, QS21 and/or oil-in-water emulsions [99]; (6) SAF, containing 10% squalane, 0.4% Tween 80™, 5% pluronic-block polymer L121, and thr-MDP, either microfluidized into a submicron emulsion or vortexed to generate a larger particle size emulsion. (7) Ribi™ adjuvant system (RAS), (Ribi Immunochem) containing 2% squalene, 0.2% Tween 80, and one or more bacterial cell wall components from the group consisting of monophosphorylipid A (MPL), trehalose dimycolate (TDM), and cell wall skeleton (CWS), preferably MPL +CWS (Detox™); and (8) one or more mineral salts (such as an aluminum salt) +a non-toxic derivative of LPS (such as 3dMPL).

[0097] Other substances that act as immunostimulating agents are disclosed in chapter 7 of ref. 33.

[0098] The use of an aluminium hydroxide or aluminium phosphate adjuvant is particularly preferred, and antigens are generally adsorbed to these salts. Calcium phosphate is another preferred adjuvant.

[0099] The pH of compositions of the invention is preferably between 6 and 8, preferably about 7. Stable pH may be maintained by the use of a buffer. Where a composition comprises an aluminium hydroxide salt, it is preferred to use a histidine buffer [100]. The composition may be sterile and/or pyrogen-free. Compositions of the invention may be isotonic with respect to humans.

[0100] Compositions may be presented in vials, or they may be presented in ready-filled syringes. The syringes may be supplied with or without needles. A syringe will include a single dose of the composition, whereas a vial may include a single dose or multiple doses. Injectable compositions will usually be liquid solutions or suspensions. Alternatively, they may be presented in solid form (e.g. freeze-dried) for solution or suspension in liquid vehicles prior to injection.

[0101] Compositions of the invention may be packaged in unit dose form or in multiple dose form. For multiple dose forms, vials are preferred to pre-filled syringes. Effective dosage volumes can be routinely established, but a typical human dose of the composition for injection has a volume of 0.5 ml.

[0102] Where a composition of the invention is to be prepared extemporaneously prior to use (e.g. where a component is presented in lyophilised form) and is presented as a kit, the kit may comprise two vials, or it may comprise one ready-filled syringe and one vial, with the contents of the syringe being used to reactivate the contents of the vial prior to injection.

[0103] Immunogenic compositions used as vaccines comprise an immunologically effective amount of antigen(s), as well as any other components, as needed. By ‘immunologically effective amount’, it is meant that the administration of that amount to an individual, either in a single dose or as part of a series, is effective for treatment or prevention. This amount varies depending upon the health and physical condition of the individual to be treated, age, the taxonomic group of individual to be treated (e.g. non-human primate, primate, etc.), the capacity of the individual's immune system to synthesise antibodies, the degree of protection desired, the formulation of the vaccine, the treating doctor's assessment of the medical situation, and other relevant factors. It is expected that the amount will fall in a relatively broad range that can be determined through routine trials, and a typical quantity of each antigen per dose is between 1 μg and 10 mg.

### Pharmaceutical Uses

[0104] The invention also provides a method of treating a patient, comprising administering to the patient a therapeutically effective amount of a composition of the invention. The patient may either be at risk from the disease themselves or may be a pregnant woman (‘maternal immunisation’).

[0105] The invention provides nucleic acid, polypeptide, or antibody of the invention for use as medicaments (e.g. as immunogenic compositions or as vaccines) or as diagnostic reagents. It also provides the use of nucleic acid, polypeptide, or antibody of the invention in the manufacture of: (i) a medicament for treating or preventing disease and/or infection caused by N. meningitidis; (ii) a diagnostic reagent for detecting the presence of N. meningitidis or of antibodies raised against N. meningitidis; and/or (iii) a reagent which can raise antibodies against N. meningitidis. Said N. meningitidis serotype or strain, but is preferably a non-typeable N. meningitidis. Said disease may be, for instance, bacterial meningitis, meningococcal meningitis, septicaemia, meningococcemia, Waterhouse-Friderichsen syndrome, adrenal insufficiency, or disseminated intravascular coagulation.

[0106] The patient is preferably a human. Where the vaccine is for prophylactic use, the human is preferably a child (e.g. a toddler or infant); where the vaccine is for therapeutic use, the human is preferably an adult. A vaccine intended for children may also be administered to adults e.g. to assess safety, dosage, immunogenicity, etc.

[0107] One way of checking efficacy of therapeutic treatment involves monitoring meningococcal infection after administration of the composition of the invention. One way of checking efficacy of prophylactic treatment involves monitoring immune responses against an administered polypeptide after administration. Immunogenicity of compositions of the invention can be determined by administering them to test subjects (e.g. children 12-16 months age, or animal models e.g. mice, as used in a typical serum bactericidal assay) and then determining standard parameters including ELISA titres (GMT) of IgG. These immune responses will generally be determined around 4 weeks after administration of the composition, and compared to values determined before administration of the composition. Where more than one dose of the composition is administered, more than one post-administration determination may be made.

[0108] Administration of polypeptide antigens is a preferred method of treatment for inducing immunity. Administration of antibodies of the invention is another preferred method of treatment. This method of passive immunisation is particularly useful for newborn children or for pregnant women. This method will typically use monoclonal antibodies, which will be humanised or fully human.

[0109] Compositions of the invention will generally be administered directly to a patient. Direct delivery may be accomplished by parenteral injection (e.g. subcutaneously, intraperitoneally, intravenously, intramuscularly, or to the interstitial space of a tissue), or by rectal, oral, vaginal, topical, transdermal, intranasal, ocular, aural, pulmonary or other mucosal administration. Intramuscular administration to the thigh or the upper arm is preferred. Injection may be via a needle (e.g. a hypodermic needle), but needle-free injection may alternatively be used. A typical intramuscular dose is 0.5 ml.

[0110] The invention may be used to elicit systemic and/or mucosal immunity.

[0111] Dosage treatment can be a single dose schedule or a multiple dose schedule. Multiple doses may be used in a primary immunisation schedule and/or in a booster immunisation schedule. A primary dose schedule may be followed by a booster dose schedule. Suitable timing between priming doses (e.g. between 4-16 weeks), and between priming and boosting, can be routinely determined.

[0112] Bacterial infections affect various areas of the body and so compositions may be prepared in various forms. For example, the compositions may be prepared as injectables, either as liquid solutions or suspensions. Solid forms suitable for solution in, or suspension in, liquid vehicles prior to injection can also be prepared (e.g. a lyophilised composition). The composition may be prepared for topical administration e.g. as an ointment, cream or powder. The composition be prepared for oral administration e.g. as a tablet or capsule, or as a syrup (optionally flavoured). The composition may be prepared for pulmonary administration e.g. as an inhaler, using a fine powder or a spray. The composition may be prepared as a suppository or pessary. The composition may be prepared for nasal, aural or ocular administration e.g. as spray, drops, gel or powder [e.g. refs 101 & 102].

### Vesicle-Containing Compositions

[0113] An immunogenic composition of the invention may include a meningococcal outer membrane vesicle e.g. in combination with a polypeptide of the invention. In some embodiments, a vesicle and a polypeptide of the invention can be prepared separately, and then mixed to give the immunogenic composition [118]. In other embodiments, outer membrane vesicles can be prepared from a recombinant meningococcus that hyper-expresses the polypeptide of the invention. The invention also provides such hyper-expressing strains. The polypeptide expressed by these strains should be in an immunoaccessible form in the vesicles.

[0114] The outer membrane vesicles include any proteoliposomic vesicle obtained by disruption of or blebbling from a meningococcal outer membrane to form vesicles therefrom that include protein components of the outer membrane. Thus the term includes OMVs (sometimes referred to as ‘blebs’), microvesicles (MVs [103]) and ‘native OMVs’ (‘NOMVs’ [104]).

[0115] MVs and NOMVs are naturally-occurring membrane vesicles that form spontaneously during bacterial growth and are released into culture medium. MVs can be obtained by culturing Neisseria in broth culture medium, separating whole cells from the smaller MVs in the broth culture medium (e.g. by filtration or by low-speed centrifugation to pellet only the cells and not the smaller vesicles), and then collecting the MVs from the cell-depleted medium (e.g. by filtration, by differential precipitation or aggregation of MVs, by high-speed centrifugation to pellet the MVs). Strains for use in production of MVs can generally be selected on the basis of the amount of MVs produced in culture e.g. refs. 105 & 106 describe Neisseria with high MV production.

[0116] OMVs are prepared artificially from bacteria, and may be prepared using detergent treatment (e.g. with deoxycholate), or by non-detergent means (e.g. see reference 107). Techniques for forming OMVs include treating bacteria with a bile acid salt detergent (e.g. salts of lithocholic acid, chenodeoxycholic acid, ursodeoxycholic acid, deoxycholic acid, cholic acid, ursocholic acid, etc., with sodium deoxycholate [108 & 109] being preferred for treating Neisseria) at a pH sufficiently high not to precipitate the detergent [110]. Other techniques may be performed substantially in the absence of detergent [107] using techniques such as sonication, homogenisation, microfluidisation, cavitation, osmotic shock, grinding, French press, blending, etc. Methods using no or low detergent can retain useful antigens such as NspA [107]. Thus a method may use an OMV extraction buffer with about 0.5% deoxycholate or lower e.g. about 0.2%, about 0.1%, <0.05% or zero.

[0117] A useful process for OMV preparation is described in reference 111 and involves ultrafiltration on crude OMVs, rather than instead of high speed centrifugation. The process may involve a step of ultracentrifugation after the ultrafiltration takes place.

[0118] Vesicles for use with the invention can be prepared from any meningococcal strain. The vesicles will usually be from a serogroup B strain, but it is possible to prepare them from serogroups other than B (e.g. reference 110 discloses a process for serogroup A), such as A, C, W135 or Y. The strain may be of any serotype (e.g. 1, 2a, 2b, 4, 14, 15, 16, etc.), any serosubtype, and any immunotype (e.g. L1; L2; L3; L3,3,7; L10; etc.). The meningococci may be from any suitable lineage, including hyperinvasive and hypervirulent lineages e.g. any of the following seven hypervirulent lineages: subgroup I; subgroup III; subgroup IV-1; ET-5 complex; ET-37 complex; A4 cluster; lineage 3. These lineages have been defined by multilocus enzyme electrophoresis (MLEE), but multilocus sequence typing (MLST) has also been used to classify meningococci [ref. 112] e.g. the ET-37 complex is the ST-11 complex by MLST, the ET-5 complex is ST-32 (ET-5), lineage 3 is ST-41/44, etc. Vesicles can be prepared from strains having one of the following subtypes: P1.2; P1.2,5; P1.4; P1.5; P1.5,2; P1.5,c; P1.5c,10; P1.7,16; P1.7,16b; P1.7h,4; P1.9; P1.15; P1.9,15; P1.12,13; P1.13; P1.14; P1.21,16; P1.22,14.

[0119] Vesicles used with the invention may be prepared from wild-type meningococcal strains or from mutant meningococcal strains (including strains engineered to hyper-express a polypeptide of the invention). For instance, reference 113 discloses preparations of vesicles obtained from N. meningitidis with a modified fur gene. Reference 121 teaches that nspA expression should be up-regulated with concomitant porA and cps knockout. Further knockout mutants of N. meningitidis for OMV production are disclosed in references 121 to 123. Reference 114 discloses vesicles in which fHBP is upregulated. Reference 115 discloses the construction of vesicles from strains modified to express six different PorA subtypes. Mutant Neisseria with low endotoxin levels, achieved by knockout of enzymes involved in LPS biosynthesis, may also be used [116,117]. These or others mutants can all be used with the invention.

[0120] Thus a strain used with the invention may in some embodiments express more than one PorA subtype. 6-valent and 9-valent PorA strains have previously been constructed. The strain may express 2, 3, 4, 5, 6, 7, 8 or 9 of PorA subtypes: P1.7,16; P1.5-1,2-2; P1.19,15-1; P1.5-2,10; P1.12-1,13; P1.7-2,4; P1.22,14; P1.7-1,1 and/or P1.18-1,3,6. In other embodiments a strain may have been down-regulated for PorA expression e.g. in which the amount of PorA has been reduced by at least 20% (e.g. ≧30%, ≧40%, ≧50%, ≧60%, ≧70%, ≧80%, ≧90%, ≧95%, etc.), or even knocked out, relative to wild-type levels (e.g. relative to strain H44/76, as disclosed in reference 124).

[0121] In some embodiments a strain may hyper-express (relative to the corresponding wild-type strain) certain proteins. For instance, strains may hyper-express NspA, protein 287 [118], gHBP [114], TbpA and/or TbpB [119], Cu,Zn-superoxide dismutase [119], etc. As mentioned above, in some embodiments a meningococcus will hyper-express (relative to the corresponding wild-type strain) a polypeptide of the invention. Thus a gene encoding the polypeptide may be placed under the control of a promoter that leads to more expression than the wild-type strain's promoter, or the strain may be provided with a non-native polypeptide-coding sequence e.g. by integration into the chromosome or within a plasmid.

[0122] In some embodiments a strain may include one or more of the knockout and/or hyper-expression mutations disclosed in references 120 to 123. Preferred genes for down-regulation and/or knockout include: (a) Cps, CtrA, CtrB, CtrC, CtrD, FrpB, GalE, HtrB/MsbB, LbpA, LbpB, LpxK, Opa, Opc, PilC, PorB, SiaA, SiaB, SiaC, SiaD, TbpA, and/or TbpB [120]; (b) CtrA, CtrB, CtrC, CtrD, FrpB, GalE, HtrB/MsbB, LbpA, LbpB, LpxK, Opa, Opc, PhoP, PilC, PmrE, PmrF, SiaA, SiaB, SiaC, SiaD, TbpA, and/or TbpB [121]; (c) ExbB, ExbD, rmpM, CtrA, CtrB, CtrD, GalE, LbpA, LpbB, Opa, Opc, PilC, PorB, SiaA, SiaB, SiaC, SiaD, TbpA, and/or TbpB [122]; and (d) CtrA, CtrB, CtrD, FrpB, OpA, OpC, PilC, PorB, SiaD, SynA, SynB, and/or SynC [123].

[0123] Where a mutant strain is used, in some embodiments it may have one or more, or all, of the following characteristics: (i) down-regulated or knocked-out LgtB and/or GalE to truncate the meningococcal LOS; (ii) up-regulated TbpA; (iii) up-regulated NhhA; (iv) up-regulated Omp85; (v) up-regulated LbpA; (vi) up-regulated NspA; (vii) knocked-out PorA; (viii) down-regulated or knocked-out FrpB; (ix) down-regulated or knocked-out Opa; (x) down-regulated or knocked-out Opc; (xii) deleted cps gene complex. A truncated LOS can be one that does not include a sialyl-lacto-N-neotetraose epitope e.g. it might be a galactose-deficient LOS. The LOS may have no a chain.

[0124] If LOS is present in a vesicle it is possible to treat the vesicle so as to link its LOS and protein components (“intra-bleb” conjugation [123]).

[0125] The invention may be used with mixtures of vesicles from different strains. For instance, reference 124 discloses vaccine comprising multivalent meningococcal vesicle compositions, comprising a first vesicle derived from a meningococcal strain with a serosubtype prevalent in a country of use, and a second vesicle derived from a strain that need not have a serosubtype prevent in a country of use. Reference 125 also discloses useful combinations of different vesicles. A combination of vesicles from strains in each of the L2 and L3 immunotypes may be used in some embodiments.

[0126] In some embodiments of the inventin, an immunogenic composition of the invention does not include any meningococcal outer membrane vesicles.

### Further Antigenic Components of Compositions of the Invention

[0127] The invention also provides a composition comprising a polypeptide or the invention and one or more of the following further antigens:
[0128] a saccharide antigen from N. meningitidis serogroup A, C, W135 and/or Y (preferably all four), such as the oligosaccharide disclosed in ref. 126 from serogroup C [see also ref. 127] or the oligosaccharides of ref. 128.
[0129] a saccharide antigen from Streptococcus pneumoniae [e.g. 129, 130, 131].
[0130] an antigen from hepatitis A virus, such as inactivated virus [e.g. 132, 133].
[0131] an antigen from hepatitis B virus, such as the surface and/or core antigens [e.g. 133, 134].
[0132] a diphtheria antigen, such as a diphtheria toxoid [e.g. chapter 3 of ref. 135] e.g. the CRM₁₉₇ mutant [e.g. 136].
[0133] a tetanus antigen, such as a tetanus toxoid [e.g. chapter 4 of ref. 135].
[0134] an antigen from Bordetella pertussis, such as pertussis holotoxin (PT) and filamentous haemagglutinin (FHA) from B. pertussis, optionally also in combination with pertactin and/or agglutinogens 2 and 3 [e.g. refs. 137 & 138].
[0135] a saccharide antigen from Haemophilus influenzae B [e.g. 127].
[0136] polio antigen(s) [e.g. 139, 140] such as IPV.
[0137] measles, mumps and/or rubella antigens [e.g. chapters 9, 10 & 11 of ref. 135].
[0138] influenza antigen(s) [e.g. chapter 19 of ref. 135], such as the haemagglutinin and/or neuraminidase surface proteins.
[0139] an antigen from Moraxella catarrhalis [e.g. 141].
[0140] an protein antigen from Streptococcus agalactiae (group B streptococcus) [e.g. 142, 143].
[0141] a saccharide antigen from Streptococcus agalactiae (group B streptococcus).
[0142] an antigen from Streptococcus pyogenes (group A streptococcus) [e.g. 143, 144, 145].
[0143] an antigen from Staphylococcus aureus [e.g. 146].

[0144] The composition may comprise one or more of these further antigens.

[0145] Toxic protein antigens may be detoxified where necessary (e.g. detoxification of pertussis toxin by chemical and/or genetic means [138]).

[0146] Where a diphtheria antigen is included in the composition it is preferred also to include tetanus antigen and pertussis antigens. Similarly, where a tetanus antigen is included it is preferred also to include diphtheria and pertussis antigens. Similarly, where a pertussis antigen is included it is preferred also to include diphtheria and tetanus antigens. DTP combinations are thus preferred.

[0147] Saccharide antigens are preferably in the form of conjugates. Carrier proteins for the conjugates include diphtheria toxin, tetanus toxin, the N. meningitidis outer membrane protein [147], synthetic peptides [148,149], heat shock proteins [150,151], pertussis proteins [152,153], protein D from H. influenzae [154], cytokines [155], lymphokines [155], streptococcal proteins, hormones [155], growth factors [155], toxin A or B from C. difficile [156], iron-uptake proteins [157], etc. A preferred carrier protein is the CRM197 diphtheria toxoid [158].

[0148] Antigens in the composition will typically be present at a concentration of at least 1 μg/ml each. In general, the concentration of any given antigen will be sufficient to elicit an immune response against that antigen.

[0149] As an alternative to using proteins antigens in the immunogenic compositions of the invention, nucleic acid (preferably DNA e.g. in the form of a plasmid) encoding the antigen may be used.

[0150] Antigens are preferably adsorbed to an aluminium salt.

### Screening Methods

[0151] The invention provides a process for determining whether a test compound binds to a polypeptide of the invention. If a test compound binds to a polypeptide of the invention and this binding inhibits the life cycle of the N. meningitidis bacterium, then the test compound can be used as an antibiotic or as a lead compound for the design of antibiotics. The process will typically comprise the steps of contacting a test compound with a polypeptide of the invention, and determining whether the test compound binds to said polypeptide. Preferred polypeptides of the invention for use in these processes are enzymes (e.g. tRNA synthetases), membrane transporters and ribosomal polypeptides. Suitable test compounds include polypeptides, polypeptides, carbohydrates, lipids, nucleic acids (e.g. DNA, RNA, and modified forms thereof), as well as small organic compounds (e.g. MW between 200 and 2000 Da). The test compounds may be provided individually, but will typically be part of a library (e.g. a combinatorial library). Methods for detecting a binding interaction include NMR, filter-binding assays, gel-retardation assays, displacement assays, surface plasmon resonance, reverse two-hybrid etc. A compound which binds to a polypeptide of the invention can be tested for antibiotic activity by contacting the compound with GBS bacteria and then monitoring for inhibition of growth.

[0152] The invention also provides a process for preparing an active compound, such as an antibiotic, comprising steps of: (i) providing a polypeptide of the invention; (ii) identifying a compound which binds to the polypeptide; and (iii) synthesising the identified compound, thus providing the active compound.

[0153] The invention also provides a compound identified using these methods.

[0154] Preferably, the process comprises the steps of: (a) contacting a polypeptide of the invention with one or more candidate compounds to give a mixture; (b) incubating the mixture to allow polypeptide and the candidate compound(s) to interact; and (c) assessing whether the candidate compound binds to the polypeptide or modulates its activity.

[0155] Once a candidate compound has been identified in vitro as a compound that binds to a polypeptide of the invention then it may be desirable to perform further experiments to confirm the in vivo function of the compound in inhibiting bacterial growth and/or survival. Thus the method comprise the further step of contacting the compound with a N. meningitidis bacterium and assessing its effect.

[0156] The polypeptide used in the screening process may be free in solution, affixed to a solid support, located on a cell surface or located intracellularly. Preferably, the binding of a candidate compound to the polypeptide is detected by means of a label directly or indirectly associated with the candidate compound. The label may be a fluorophore, radioisotope, or other detectable label.

### General

[0157] The invention provides a computer-readable medium (e.g. a floppy disk, a hard disk, a CD-ROM, a

[0158] DVD etc.) and/or a computer memory and/or a computer database containing one or more of the sequences in the sequence listing.

[0159] The term “comprising” encompasses “including” as well as “consisting” e.g. a composition “comprising” X may consist exclusively of X or may include something additional e.g. X+Y.

[0160] The term “about” in relation to a numerical value x is optional and means, for example, x±10%.

[0161] The word “substantially” does not exclude “completely” e.g. a composition which is “substantially free” from Y may be completely free from Y. Where necessary, the word “substantially” may be omitted from the definition of the invention.

[0162] The N-terminus residues in the amino acid sequences in the sequence listing are given as the amino acid encoded by the first codon in the corresponding nucleotide sequence. Where the first codon is not ATG, it will be understood that it will be translated as methionine when the codon is a start codon, but will be translated as the indicated non-Met amino acid when the sequence is downstream of the start codon e.g. as a fusion partner. The invention specifically discloses and encompasses each of the amino acid sequences of the sequence listing having a N-terminus methionine residue (e.g. a formyl-methionine residue) in place of any indicated non-Met N-terminus residue.

[0163] Alternative start codons can be used in biology. The amino acid sequences in the sequence listing are based on particular start codons, but downstream start codons may alternatively be used. Thus the invention specifically discloses and encompasses each of the amino acid sequences of the sequence listing (and variants thereof, as disclosed herein), starting at any methionine residue in the sequence that is downstream of the N-terminal residue shown in the sequence listing and excluding the upstream residues (e.g. a fragment of SEQ ID NO: 3 which starts at residue 53 or 57, rather than at residue 1; or a fragment of SEQ ID NO: 15955 which starts at residue 74, rather than at residue 1).

[0164] As indicated in the above text, nucleic acids and polypeptides of the invention may include sequences that:
[0165] (a) are identical (i.e. 100% identical) to the sequences disclosed in the sequence listing;
[0166] (b) share sequence identity with the sequences disclosed in the sequence listing;
[0167] (c) have 1, 2, 3, 4, 5, 6, 7, 8, 9 or 10 single nucleotide or amino acid alterations (deletions, insertions, substitutions), which may be at separate locations or may be contiguous, as compared to the sequences of (a) or (b); and
[0168] (d) when aligned with a particular sequence from the sequence listing using a pairwise alignment algorithm, a moving window of x monomers (amino acids or nucleotides) moving from start (N-terminus or 5′) to end (C-terminus of 3′), such that for an alignment that extends to p monomers (where p>x) there are p−x+1 such windows, each window has at least x·y identical aligned monomers, where: x is selected from 20, 25, 30, 35, 40, 45, 50, 60, 70, 80, 90, 100, 150, 200; y is selected from 0.50, 0.60, 0.70, 0.75, 0.80, 0.85, 0.90, 0.91, 0.92, 0.93, 0.94, 0.95, 0.96, 0.97, 0.98, 0.99; and if x·y is is not an integer then it is rounded up to the nearest integer. The preferred pairwise alignment algorithm is the Needleman-Wunsch global alignment algorithm [159], using default parameters (e.g. with Gap opening penalty=10.0, and with Gap extension penalty=0.5, using the EBLOSUM62 scoring matrix). This algorithm is conveniently implemented in the needle tool in the EMBOSS package [160].

[0169] The nucleic acids and polypeptides of the invention may additionally have further sequences to the N-terminus/5′ and/or C-terminus/3′ of sequences (a) to (d); in some embodiments, however, they do not have any further sequences to the N-terminus/5′ and/or C-terminus/3′ of sequences (a) to (d).

[0170] The practice of the present invention will employ, unless otherwise indicated, conventional methods of chemistry, biochemistry, molecular biology, immunology and pharmacology, within the skill of the art. Such techniques are explained fully in the literature, e.g. references 24, 25 & 161-166, etc.

### MODES FOR CARRYING OUT THE INVENTION

[0171] 18 different strains of meningococcus are selected. Details of their clonal complex and serological typing are as follows:

| Strain | Clonal complex | Serological typing |
|---|---|---|
| A | — | — |
| B | ST-8/A4 | B:2b:P1.21,16 |
| C | — | — |
| D | ST-32/ET-5 | B:4:P1.15 |
| E | ST-11/ET-37 | B:2a:P1.5 |
| F | ST-11/ET-37 | C:2a:P1.5,2 |
| G | ST-8/A4 | B:— |
| H | ST-269 | B:NT:P1.22,9 |
| I | ST-32/ET-5 | B:15:P1.7,16 |
| J | ST-41/44/Lin.3 | B:NT:P1.5,2 |
| K | ST-11/ET-37 | B:2a:P1.5,2 |
| L | ST-269 | B:— |
| M | ST-41/44/Lin.3 | B:4:P1.7,4 |
| N | ST-213 | B:1:P1.22,14 |
| O | ST-269 | B:NT:P1.19,15 |
| P | — | — |
| Q | ST-41/44/Lin.3 | B:4:P1.7-2.4 |
| R | ST-41/44/Lin.3 | B:— |

[0172] Genome sequencing of the 18 strains identifies 36178 encoded polypeptides. These are SEQ ID NOs: 1-36178 in the sequence listing. Their gene sequences encoding these 36175 polypeptides are SEQ ID NOs: 36179-72356. These SEQ IDs are from the 18 strains as follows:

| | Total | | |
|---|---|---|---|
| Strain | polypeptides | Polypeptide SEQ ID NOs | DNA SEQ ID NOs |
| A | 1925 | 1-1925 | 36179-38103 |
| B | 2050 | 1926-3975 | 38104-40153 |
| C | 1928 | 3976-5903 | 40154-42081 |
| D | 2032 | 5904-7935 | 42082-44113 |
| E | 2009 | 7936-9944 | 44114-46122 |
| F | 1983 | 9945-11927 | 46123-48105 |
| G | 1978 | 11928-13905 | 48106-50083 |
| H | 2089 | 13906-15993 & 36176 | 50084-52171 & 72354 |
| I | 2028 | 15994-18021 | 52172-54199 |
| J | 2025 | 18022-20046 | 54200-56224 |
| K | 2023 | 20047-22069 | 56225-58247 |
| L | 2042 | 22070-24111 | 58248-60289 |
| M | 1989 | 24112-26100 | 60290-62278 |
| N | 2025 | 26101-28125 | 62279-64303 |
| O | 2025 | 28126-30150 | 64304-66328 |
| P | 2071 | 30151-32221 | 66329-68399 |
| Q | 2018 | 32222-34237 & 36177-8 | 68400-70415 & 72355-6 |
| R | 1938 | 34238-36175 | 70416-72353 |

[0173] Properties and functions of these polypeptides are listed in Table 1.

### Lipoproteins

[0174] Of the 36175 coding sequences, the following 706 SEQ ID NOs are identified as lipoproteins: 38, 44, 49, 54, 115, 138, 281, 289, 295, 325, 470, 471, 519, 575, 618, 678, 715, 978, 998, 1063, 1209, 1365, 1366, 1435, 1506, 1583, 1620, 1684, 1686, 1717, 1752, 2086, 2101, 2269, 2320, 2332, 2341, 2347, 2369, 2379, 2455, 2497, 2701, 2835, 2862, 2944, 3067, 3142, 3171, 3172, 3235, 3241, 3245, 3342, 3384, 3392, 3426, 3453, 3484, 3502, 3575, 3664, 3666, 3732, 3791, 3954, 3971, 3990, 4071, 4178, 4289, 4372, 4770, 4788, 4864, 4932, 4936, 5134, 5345, 5430, 5524, 5561, 5617, 5658, 5675, 5681, 5796, 5809, 5925, 5953, 5968, 5982, 5985, 6061, 6070, 6103, 6212, 6216, 6236, 6253, 6419, 6425, 6457, 6511, 6541, 6705, 6767, 6776, 6806, 6839, 6874, 6931, 7029, 7034, 7051, 7184, 7209, 7214, 7230, 7295, 7351, 7435, 7463, 7490, 7528, 7579, 7625, 7632, 7725, 7731, 7736, 7807, 7808, 7923, 7994, 8060, 8149, 8191, 8193, 8247, 8295, 8339, 8361, 8490, 8509, 8558, 8651, 8719, 8750, 8762, 8788, 8853, 8879, 8885, 8951, 9033, 9034, 9060, 9103, 9189, 9194, 9213, 9321, 9378, 9400, 9420, 9468, 9472, 9484, 9686, 9728, 9767, 9770, 9850, 9950, 9969, 10015, 10025, 10049, 10052, 10266, 10360, 10369, 10405, 10441, 10511, 10527, 10532, 10673, 10862, 10932, 10980, 10983, 11061, 11081, 11126, 11159, 11163, 11186, 11362, 11465, 11488, 11496, 11513, 11526, 11533, 11555, 11576, 11591, 11674, 11731, 11747, 11767, 11948, 12005, 12026, 12056, 12082, 12087, 12101, 12120, 12122, 12238, 12301, 12349, 12380, 12390, 12424, 12433, 12556, 12605, 12613, 12680, 12753, 12793, 12880, 12886, 12899, 12906, 13025, 13072, 13419, 13520, 13592, 13628, 13639, 13658, 13668, 13753, 13816, 13984, 14013, 14071, 14189, 14212, 14216, 14222, 14228, 14317, 14349, 14355, 14379, 14528, 14541, 14598, 14632, 14633, 14719, 14798, 14832, 14897, 15038, 15057, 15088, 15153, 15192, 15205, 15216, 15222, 15258, 15268, 15285, 15329, 15360, 15402, 15479, 15514, 15533, 15639, 15717, 15773, 15780, 15785, 15858, 15859, 15867, 16172, 16181, 16182, 16206, 16218, 16219, 16233, 16249, 16383, 16561, 16604, 16616, 16630, 16643, 16687, 16740, 16761, 16793, 16831, 16836, 16891, 16922, 16943, 16951, 17002, 17083, 17095, 17101, 17131, 17164, 17297, 17313, 17357, 17358, 17399, 17483, 17515, 17566, 17738, 17792, 17862, 17869, 18014, 18060, 18075, 18117, 18179, 18188, 18216, 18219, 18281, 18299, 18339, 18368, 18411, 18426, 18456, 18505, 18539, 18541, 18559, 18564, 18791, 18843, 19074, 19158, 19202, 19298, 19318, 19336, 19464, 19489, 19550, 19590, 19593, 19639, 19640, 19702, 19717, 19746, 19792, 19875, 19880, 20058, 20084, 20115, 20160, 20188, 20193, 20220, 20225, 20228, 20288, 20350, 20386, 20440, 20478, 20510, 20533, 20595, 20660, 20683, 20756, 20844, 20855, 20935, 20949, 20984, 20997, 21032, 21063, 21090, 21096, 21104, 21338, 21376, 21464, 21492, 21530, 21623, 21628, 21726, 21751, 21905, 21969, 22108, 22111, 22112, 22125, 22148, 22194, 22269, 22322, 22445, 22494, 22505, 22577, 22666, 22787, 22802, 22858, 22860, 22894, 22897, 22930, 23178, 23262, 23281, 23290, 23366, 23390, 23411, 23543, 23561, 23569, 23607, 23609, 23792, 23800, 23868, 23929, 23953, 23974, 24032, 24033, 24120, 24257, 24276, 24362, 24401, 24438, 24492, 24525, 24539, 24586, 24697, 24702, 24709, 24732, 24746, 24783, 24795, 24820, 24875, 24886, 24922, 24953, 24956, 24980, 25088, 25104, 25250, 25304, 25306, 25324, 25448, 25489, 25603, 25606, 25613, 25634, 25652, 25754, 25954, 26096, 26207, 26257, 26263, 26292, 26349, 26445, 26511, 26544, 26774, 26809, 26819, 26820, 26829, 26843, 26941, 26962, 26978, 26994, 27110, 27211, 27229, 27291, 27434, 27473, 27514, 27518, 27541, 27636, 27645, 27675, 27698, 27713, 27719, 27756, 27887, 27963, 28025, 28026, 28063, 28228, 28255, 28280, 28328, 28355, 28386, 28470, 28472, 28487, 28515, 28536, 28611, 28626, 28671, 28749, 28751, 28763, 28795, 28836, 28872, 28973, 28986, 29007, 29035, 29102, 29167, 29218, 29223, 29416, 29465, 29479, 29506, 29546, 29629, 29654, 29684, 29737, 29814, 29819, 29851, 29857, 29866, 29907, 29993, 29994, 30066, 30266, 30311, 30326, 30471, 30474, 30528, 30614, 30630, 30647, 30802, 30805, 30812, 30826, 30879, 30982, 31069, 31073, 31093, 31105, 31122, 31193, 31231, 31236, 31290, 31480, 31490, 31498, 31499, 31578, 31603, 31611, 31693, 31719, 31758, 31792, 31819, 31828, 31890, 31924, 32107, 32322, 32417, 32525, 32583, 32616, 32709, 32761, 32762, 32799, 32857, 32882, 32892, 32915, 32974, 33419, 33458, 33479, 33521, 33529, 33533, 33549, 33555, 33602, 33638, 33642, 33726, 33735, 33749, 33755, 33790, 33798, 33820, 33825, 33893, 33920, 33966, 33993, 34003, 34009, 34035, 34098, 34156, 34232, 34259, 34261, 34269, 34299, 34367, 34403, 34459, 34643, 34753, 34801, 34867, 34885, 34931, 34941, 35003, 35023, 35043, 35101, 35132, 35163, 35209, 35324, 35372, 35397, 35561, 35614, 35636, 35654, 35691, 35692, 35710, 35781, 35868, 35934, 36068, 36075, and 36153.

[0175] Lipoproteins are surface-exposed and, as such, they represent accessible immunological targets e.g. for diagnostic and for immunisation purposes. Moreover, it has been found in B. burgdorferi [167] that OspA protein is immunogenic in a lipidated form but is non-immunogenic in a non-lipidated form, and the authors concluded that post-translational lipid attachment is a critical determinant of OspA immunogenicity.

[0176] Lipoproteins of the invention are ideally provided in mature form e.g. without their leader peptides and with a N-terminus lipidated cysteine residue. The N-terminus residue may have an attached palmitoyl group e.g. to provide a tripalmitoyl-S-glyceryl-cysteine amino acid.

### Outer Membrane

[0177] As N. meningitidis is a Gram-negative bacterium, its cell wall includes an outer membrane. Of the 36175 sequences, the following 273 SEQ ID NOs are identified as being located in this outer membrane: 246, 519, 624, 824, 918, 949, 964, 987, 1078, 1207, 1332, 1366, 1427, 1534, 1599, 1694, 1991, 2101, 2276, 2379, 2465, 2950, 3067, 3280, 3290, 3363, 3542, 3552, 3712, 3944, 3957, 3960, 4004, 4319, 4722, 4783, 5318, 5345, 5364, 5430, 5436, 5482, 5590, 5593, 5617, 5650, 5651, 5729, 5787, 6103, 6280, 6760, 6835, 6836, 6915, 7118, 7211, 7542, 7726, 7731, 7930, 7932, 7994, 8134, 8157, 8324, 8667, 8879, 9211, 9415, 9549, 9699, 9798, 9919, 9929, 9930, 9977, 10126, 10165, 10279, 10288, 10302, 10367, 10368, 10454, 10456, 10504, 10516, 10527, 10563, 10664, 10673, 10805, 10928, 11019, 11251, 11410, 11488, 11576, 11666, 11677, 11702, 11781, 11824, 11862, 11918, 12007, 12088, 12147, 12602, 12605, 12906, 13076, 13353, 13811, 13843, 13903, 13904, 13905, 14169, 14349, 15111, 15217, 15232, 15316, 15337, 15445, 15485, 15575, 15748, 15780, 15804, 15834, 15954, 15955, 16075, 16262, 16470, 16633, 16687, 16975, 17419, 17478, 17515, 17768, 17876, 18019, 18020, 18037, 18146, 18406, 18537, 18756, 19074, 19187, 19382, 19470, 19822, 19880, 19893, 20084, 20656, 20742, 21090, 21242, 21526, 21536, 21641, 21695, 21786, 21830, 21929, 21949, 22060, 22062, 22224, 22426, 22509, 22608, 22836, 23015, 23262, 23373, 23417, 23569, 23904, 24028, 24109, 24111, 24610, 24618, 24699, 24702, 24737, 24858, 25090, 25324, 25726, 25961, 26045, 26098, 26100, 26164, 26191, 26443, 26459, 26994, 27518, 27585, 27660, 27701, 27797, 27973, 28051, 28122, 28124, 28432, 28705, 29007, 29241, 29453, 29499, 29518, 29546, 29784, 29805, 30036, 30067, 30094, 30149, 30150, 30227, 30375, 30614, 30873, 30930, 31603, 31950, 32081, 32103, 32112, 32114, 32116, 32195, 32254, 32457, 32774, 33118, 33466, 33480, 33521, 33541, 33642, 33683, 33938, 34105, 34236, 34237, 34328, 34330, 34359, 34834, 34846, 34949, 35132, 35692, 35745, 36005, 36018, 36144, 36153, 36168, and 36169.

[0178] In particular, the following 55 SEQ ID NOs: are identified as adhesins: 213, 397, 941, 1561, 1659, 1678, 1902, 2841, 3936, 3959, 4030, 4251, 4305, 4711, 4875, 5023, 5064, 5288, 5457, 5605, 5766, 6744, 7226, 7547, 7575, 7577, 9875, 10075, 10631, 10722, 11221, 11278, 11432, 11476, 11485, 11501, 11733, 11760, 12893, 14878, 15050, 18027, 18043, 18790, 19465, 20355, 20436, 20500, 20900, 21016, 28054, 30845, 32131, 32164, 32207.

[0179] The following 52 SEQ ID NOs are PilC-related: 3282, 3706, 6675, 7553, 9059, 9076, 10967, 12832, 14200, 14742, 17485, 17511, 18269, 18407, 20847, 21435, 22308, 22525, 25137, 25850, 27453, 27581, 28186, 30080, 31206, 34162, 34166, 34583, 36148, 39457, 39881, 42850, 43728, 45234, 45251, 47142, 49007, 50375, 50917, 53660, 53686, 54444, 54582, 57022, 57610, 58483, 58700, 61312, 62025, 63628, 63756, 64361. PilC is a known cell-surface protein.

[0180] Outer membrane proteins (OMPs) are surface-exposed and, as such, they represent accessible immunological targets e.g. for diagnostic and for immunisation purposes. OMPs are often invasins, adhesins, etc. which, if blocked, offers a means of preventing bacterial infection.

### Periplasm

[0181] As N. meningitidis is a Gram-negative bacterium, it has a periplasm between its cell cytoplasmic membrane and its outer membrane. Of the 36175 sequences, the following 364 SEQ ID NOs: are identified as being located in the periplasm: 12, 114, 172, 184, 242, 254, 314, 388, 483, 499, 503, 548, 603, 620, 649, 671, 683, 687, 691, 718, 722, 742, 745, 747, 783, 807, 810, 812, 903, 911, 1014, 1043, 1051, 1133, 1170, 1182, 1186, 1195, 1199, 1251, 1287, 1391, 1394, 1438, 1527, 1549, 1580, 1594, 1629, 1646, 1673, 1828, 2547, 2597, 2670, 2789, 2865, 2873, 2947, 3096, 3131, 3510, 3596, 3729, 3975, 4004, 4056, 4239, 4332, 4358, 4424, 4455, 4514, 4544, 4644, 4659, 4717, 4748, 4794, 4892, 4895, 4900, 4967, 5094, 5114, 5159, 5169, 5197, 5530, 5760, 5772, 5946, 5994, 6290, 6370, 6435, 6584, 6637, 6826, 6886, 6979, 7003, 7131, 7169, 7393, 7425, 7439, 7501, 7631, 7659, 7974, 8694, 8772, 8826, 8834, 8986, 8989, 8994, 9080, 9169, 9422, 9528, 9561, 9665, 9967, 10031, 10050, 10064, 10070, 10093, 10141, 10162, 10174, 10207, 10215, 10236, 10260, 10265, 10277, 10378, 10392, 10401, 10408, 10410, 10471, 10496, 10526, 10535, 10551, 10558, 10598, 10662, 10664, 10679, 10687, 10700, 10704, 10761, 10784, 10797, 10813, 10854, 10931, 10961, 10982, 11107, 11138, 11146, 11161, 11218, 11297, 11347, 11376, 11396, 11422, 11424, 11455, 11510, 11548, 11613, 11670, 11700, 11764, 11818, 11820, 11847, 12042, 12127, 12397, 12519, 12755, 12777, 12895, 13178, 13366, 13421, 13666, 13611, 13615, 13647, 14058, 14097, 14110, 14120, 14196, 14553, 14956, 15020, 15252, 15272, 15308, 15452, 15507, 15890, 15950, 16078, 16269, 16295, 16460, 16481, 16896, 16958, 17136, 17147, 17270, 17570, 17672, 17674, 17687, 18061, 18069, 18086, 18088, 18108, 18116, 18128, 18153, 18159, 18442, 18916, 19104, 19111, 19154, 19231, 19317, 19403, 19737, 19829, 19976, 20179, 20237, 20406, 20415, 20441, 20444, 20876, 20901, 20946, 20950, 21030, 21350, 21503, 21618, 21640, 21987, 22064, 22229, 22271, 22655, 22672, 22703, 22715, 23208, 23392, 23422, 23503, 23586, 23726, 23731, 23890, 24180, 24344, 24347, 24493, 24683, 24949, 25010, 25360, 25560, 25568, 25725, 25795, 25853, 25906, 26146, 26317, 26352, 26381, 26515, 26815, 26972, 27311, 27392, 27475, 27528, 27617, 27761, 27827, 28283, 28406, 28645, 28715, 28803, 29081, 29128, 29147, 29188, 29381, 29620, 29877, 29939, 30088, 30202, 30466, 30509, 30694, 30700, 30748, 31278, 31283, 31292, 31331, 31336, 31463, 31627, 31815, 32247, 32284, 32402, 32474, 32482, 33049, 33437, 33456, 33493, 33582, 33622, 33892, 33975, 34171, 34396, 34414, 34441, 34547, 34570, 34683, 34965, 34980, 35314, 35381, 35657, 35836, 35939, and 36065.

[0182] Periplasmic proteins represent useful immunological targets e.g. for diagnostic and for immunisation purposes.

### Inner Membrane

[0183] As N. meningitidis is a Gram-negative bacterium, it has an inner membrane. Of the 376175 coding sequences, the following 98 are identified as being located in the inner membrane: 98, 362, 469, 565, 787, 886, 1269, 1397, 1731, 1739, 1782, 1800, 2984, 3410, 3993, 4162, 4365, 4762, 5131, 5461, 7258, 8630, 8829, 8907, 10039, 10099, 10113, 10117, 10334, 10344, 10403, 10434, 10444, 10455, 10473, 10486, 10505, 10528, 10538, 10648, 10711, 10730, 10899, 10954, 11045, 11048, 11068, 11072, 11097, 11102, 11122, 11127, 11131, 11143, 11196, 11226, 11231, 11272, 11405, 11502, 11579, 11609, 11630, 11649, 11685, 11699, 11730, 11775, 11776, 11777, 11779, 11805, 11815, 11915, 11932, 12170, 13986, 14181, 16901, 17942, 19141, 20171, 21515, 22278, 24829, 25705, 26036, 27155, 27323, 28033, 28772, 30249, 31057, 32014, 32289, 35227, 36076, and 36085. Inner membrane proteins represent useful immunological targets e.g. for diagnostic and for immunisation purposes.

### The “Universal Vaccine” of Reference 3

[0184] The “universal vaccine” of reference 3 includes five different meningococcal antigens. By standard genome numbering from the MC58 strain these are NMB1030, NMB1870, NMB1994, NMB2091 and NMB2132. The sequence listing includes polymorphic forms of these five antigens:

| NMB | Polymorphs | SEQ ID NOs |
|---|---|---|
| 1030 | 23 | 72357-72379 |
| 1870 | 323 | 72380-72702 |
| 1994 | 74 | 72703-72776 |
| 2091 | 16 | 72777-72792 |
| 2132 | 198 | 72793-72990 |

[0185] These polymorphs can be used to replace the sequences which were used in reference 3.

[0186] It will be understood that the invention has been described by way of example only and modifications may be made whilst remaining within the scope and spirit of the invention.

### REFERENCES (The Contents of which are Hereby Incorporated by Reference)

[0187] [1] Tettelin et al. (2000) Science 287:1809-15.
[0188] [2] Parkhill et al. (2000) Nature 404:502-6.
[0189] [3] Giuliani et al. (2006) PNAS USA 10834-9.
[0190] [4] Geysen et al. (1984) PNAS USA 81:3998-4002.
[0191] [5] Carter (1994) Methods Mol Biol 36:207-23.
[0192] [6] Jameson, B A et al. 1988, CABIOS 4(1):181-186.
[0193] [7] Raddrizzani & Hammer (2000) Brief Bioinform 1(2):179-89.
[0194] [8] De Lalla et al. (1999) J. Immunol. 163:1725-29.
[0195] [9] Brusic et al. (1998) Bioinformatics 14(2):121-30
[0196] [10] Meister et al. (1995) Vaccine 13(6):581-91.
[0197] [11] Roberts et al. (1996) AIDS Res Hum Retroviruses 12(7):593-610.
[0198] [12] Maksyutov & Zagrebelnaya (1993) Comput Appl Biosci 9(3):291-7.
[0199] [13] Feller & de la Cruz (1991) Nature 349(6311):720-1.
[0200] [14] Hopp (1993) Peptide Research 6:183-190.
[0201] [15] Welling et al. (1985) FEBS Lett. 188:215-218.
[0202] [16] Davenport et al. (1995) Immunogenetics 42:392-297.
[0203] [17] Bodanszky (1993) Principles of Peptide Synthesis (ISBN: 0387564314).
[0204] [18] Fields et al. (1997) Meth Enzymol 289: Solid-Phase Peptide Synthesis. ISBN: 0121821900.
[0205] [19] Chan & White (2000) Fmoc Solid Phase Peptide Synthesis. ISBN: 0199637245.
[0206] [20] Kullmann (1987) Enzymatic Peptide Synthesis. ISBN: 0849368413.
[0207] [21] Ibba (1996) Biotechnol Genet Eng Rev 13:197-216.
[0208] [22] Breedveld (2000) Lancet 355(9205):735-740.
[0209] [23] Gorman & Clark (1990) Semin. Immunol. 2:457-466.
[0210] [24] Sambrook et al. (1989) Molecular Cloning: A Laboratory Manual.
[0211] [25] Short protocols in molecular biology (4th ed, 1999) Ausubel et al. eds. ISBN 0-471-32938-X.
[0212] [26] U.S. Pat. No. 5,707,829
[0213] [27] Current Protocols in Molecular Biology (F. M. Ausubel et al. eds., 1987) Supplement 30.
[0214] [28] EP-B-0509612.
[0215] [29] EP-B-0505012.
[0216] [30] Drakopoulou et al. (2008) FEMS Immunol Med Microbiol 53:178-82.
[0217] [31] Fernández-Rodríguez et al. (2008) Diagn Microbiol Infect Dis. 60:339-46.
[0218] [32] Tang et al. (1997) Clin. Chem. 43:2021-2038.
[0219] [33] Vaccine Design . . . (1995) eds. Powell & Newman. ISBN: 030644867X. Plenum.
[0220] [34] WO00/23105.
[0221] [35] WO90/14837.
[0222] [36] U.S. Pat. No. 5,057,540.
[0223] [37] WO96/33739.
[0224] [38] EP-A-0109942.
[0225] [39] WO96/11711.
[0226] [40] WO00/07621.
[0227] [41] Barr et al. (1998) Advanced Drug Delivery Reviews 32:247-271.
[0228] [42] Sjolanderet et al. (1998) Advanced Drug Delivery Reviews 32:321-338.
[0229] [43] Niikura et al. (2002) Virology 293:273-280.
[0230] [44] Lenz et al. (2001) J Immunol 166:5346-5355.
[0231] [45] Pinto et al. (2003) J Infect Dis 188:327-338.
[0232] [46] Gerber et al. (2001) Virol 75:4752-4760.
[0233] [47] WO03/024480
[0234] [48] WO03/024481
[0235] [49] Gluck et al. (2002) Vaccine 20:B10-B16.
[0236] [50] EP-A-0689454.
[0237] [51] Johnson et al. (1999) Bioorg Med Chem Lett 9:2273-2278.
[0238] [52] Evans et al. (2003) Expert Rev Vaccines 2:219-229.
[0239] [53] Meraldi et al. (2003) Vaccine 21:2485-2491.
[0240] [54] Pajak et al. (2003) Vaccine 21:836-842.
[0241] [55] Kandimalla et al. (2003) Nucleic Acids Research 31:2393-2400.
[0242] [56] WO02/26757.
[0243] [57] WO99/62923.
[0244] [58] Krieg (2003) Nature Medicine 9:831-835.
[0245] [59] McCluskie et al. (2002) FEMS Immunology and Medical Microbiology 32:179-185.
[0246] [60] WO98/40100.
[0247] [61] U.S. Pat. No. 6,207,646.
[0248] [62] U.S. Pat. No. 6,239,116.
[0249] [63] U.S. Pat. No. 6,429,199.
[0250] [64] Kandimalla et al. (2003) Biochemical Society Transactions 31 (part 3):654-658.
[0251] [65] Blackwell et al. (2003) J Immunol 170:4061-4068.
[0252] [66] Krieg (2002) Trends Immunol 23:64-65.
[0253] [67] WO01/95935.
[0254] [68] Kandimalla et al. (2003) BBRC 306:948-953.
[0255] [69] Bhagat et al. (2003) BBRC 300:853-861.
[0256] [70] WO03/035836.
[0257] [71] WO95/17211.
[0258] [72] WO98/42375.
[0259] [73] Beignon et al. (2002) Infect Immun 70:3012-3019.
[0260] [74] Pizza et al. (2001) Vaccine 19:2534-2541.
[0261] [75] Pizza et al. (2000) Int J Med Microbiol 290:455-461.
[0262] [76] Scharton-Kersten et al. (2000) Infect Immun 68:5306-5313.
[0263] [77] Ryan et al. (1999) Infect Immun 67:6270-6280.
[0264] [78] Partidos et al. (1999) Immunol Lett 67:209-216.
[0265] [79] Peppoloni et al. (2003) Expert Rev Vaccines 2:285-293.
[0266] [80] Pine et al. (2002) J Control Release 85:263-270.
[0267] [81] Domenighini et al. (1995) Mol Microbiol 15:1165-1167.
[0268] [82] WO99/40936.
[0269] [83] WO99/44636.
[0270] [84] Singh et al] (2001) J Cont Release 70:267-276.
[0271] [85] WO99/27960.
[0272] [86] U.S. Pat. No. 6,090,406
[0273] [87] U.S. Pat. No. 5,916,588
[0274] [88] EP-A-0626169.
[0275] [89] WO99/52549.
[0276] [90] WO01/21207.
[0277] [91] WO01/21152.
[0278] [92] Andrianov et al. (1998) Biomaterials 19:109-115.
[0279] [93] Payne et al. (1998) Adv Drug Delivery Review 31:185-196.
[0280] [94] Stanley (2002) Clin Exp Dermatol 27:571-577.
[0281] [95] Jones (2003) Curr Opin Investig Drugs 4:214-218.
[0282] [96] WO99/11241.
[0283] [97] WO94/00153.
[0284] [98] WO98/57659.
[0285] [99] European patent applications 0835318, 0735898 and 0761231.
[0286] [100] WO03/009869.
[0287] [101] Almeida & Alpar (1996) J. Drug Targeting 3:455-467.
[0288] [102] Agarwal & Mishra (1999) Indian J Exp Biol 37:6-16.
[0289] [103] WO02/09643.
[0290] [104] Katial et al. (2002) Infect. Immun. 70:702-707.
[0291] [105] U.S. Pat. No. 6,180,111.
[0292] [106] WO01/34642.
[0293] [107] WO2004/019977.
[0294] [108] European patent 0011243.
[0295] [109] Fredriksen et al. (1991) NIPH Ann. 14(2):67-80.
[0296] [110] WO01/91788.
[0297] [111] WO2005/004908.
[0298] [112] Maiden et al. (1998) PNAS USA 95:3140-3145.
[0299] [113] WO98/56901.
[0300] [114] WO2006/081259.
[0301] [115] Claassen et al. (1996) 14(10):1001-8.
[0302] [116] WO99/10497.
[0303] [117] Steeghs et al. (2001) The EMBO Journal 20:6937-6945.
[0304] [118] WO01/52885.
[0305] [119] WO00/25811.
[0306] [120] WO01/09350.
[0307] [121] WO02/09746.
[0308] [122] WO02/062378.
[0309] [123] WO2004/014417.
[0310] [124] WO03/105890.
[0311] [125] WO2006/024946
[0312] [126] Costantino et al. (1992) Vaccine 10:691-698.
[0313] [127] Costantino et al. (1999) Vaccine 17:1251-1263.
[0314] [128] WO03/007985.
[0315] [129] Watson (2000) Pediatr Infect Dis J 19:331-332.
[0316] [130] Rubin (2000) Pediatr Clin North Am 47:269-285, v.
[0317] [131] Jedrzejas (2001) Microbiol Mol Biol Rev 65:187-207.
[0318] [132] Bell (2000) Pediatr Infect Dis J 19:1187-1188.
[0319] [133] Iwarson (1995) APMIS 103:321-326.
[0320] [134] Gerlich et al. (1990) Vaccine 8 Suppl:S63-68 & 79-80.
[0321] [135] Vaccines (1988) eds. Plotkin & Mortimer. ISBN 0-7216-1946-0.
[0322] [136] Del Guidice et al. (1998) Molecular Aspects of Medicine 19:1-70.
[0323] [137] Gustafsson et al. (1996) N. Engl. J. Med. 334:349-355.
[0324] [138] Rappuoli et al. (1991)TIBTECH 9:232-238.
[0325] [139] Sutter et al. (2000) Pediatr Clin North Am 47:287-308.
[0326] [140] Zimmerman & Spann (1999) Am Fam Physician 59:113-118, 125-126.
[0327] [141] McMichael (2000) Vaccine 19 Suppl 1:S101-107.
[0328] [142] Schuchat (1999) Lancet 353(9146):51-6.
[0329] [143] WO02/34771.
[0330] [144] Dale (1999) Infect Dis Clin North Am 13:227-43, viii.
[0331] [145] Ferretti et al. (2001) PNAS USA 98: 4658-4663.
[0332] [146] Kuroda et al. (2001) Lancet 357(9264):1225-1240; see also pages 1218-1219.
[0333] [147] EP-A-0372501
[0334] [148] EP-A-0378881
[0335] [149] EP-A-0427347
[0336] [150] WO93/17712
[0337] [151] WO94/03208
[0338] [152] WO98/58668
[0339] [153] EP-A-0471177
[0340] [154] WO00/56360
[0341] [155] WO91/01146
[0342] [156] WO00/61761
[0343] [157] WO01/72337
[0344] [158] Research Disclosure, 453077 (Jan 2002)
[0345] [159] Needleman & Wunsch (1970) J. Mol. Biol. 48, 443-453.
[0346] [160] Rice et al. (2000) Trends Genet 16:276-277.
[0347] [161] Gennaro (2000) Remington: The Science and Practice of Pharmacy. 20th edition, ISBN: 0683306472.
[0348] [162] Methods In Enzymology (S. Colowick and N. Kaplan, eds., Academic Press, Inc.)
[0349] [163] Handbook of Experimental Immunology, Vols. I-IV (D. M. Weir and C. C. Blackwell, eds., 1986, Blackwell Scientific Publications)
[0350] [164] Handbook of Surface and Colloidal Chemistry (Birdi, K. S. ed., CRC Press, 1997)
[0351] [165] Molecular Biology Techniques: An Intensive Laboratory Course, (Ream et al., eds., 1998, Academic Press)
[0352] [166] PCR Introduction to Biotechniques Series 2nd ed. 1997 (Newton & Graham, Springer Verlag).
[0353] [167] Erdile et al. (1993) Infect Immun 61:81-90.

TABLE 2
a list of SEQ ID NOs of interest

12, 38, 44, 49, 54, 98, 114, 115, 138, 172, 184, 213, 242, 246, 254, 281, 289, 295, 314, 325, 362,
388, 397, 469, 470, 471, 483, 499, 503, 519, 519, 548, 565, 575, 603, 618, 620, 624, 649, 671, 678,
683, 687, 691, 715, 718, 722, 742, 745, 747, 783, 787, 807, 810, 812, 824, 886, 903, 911, 918, 941,
949, 964, 978, 987, 998, 1014, 1043, 1051, 1063, 1078, 1133, 1170, 1182, 1186, 1195, 1199, 1207,
1209, 1251, 1269, 1287, 1332, 1365, 1366, 1366, 1391, 1394, 1397, 1427, 1435, 1438, 1506, 1527,
1534, 1549, 1561, 1580, 1583, 1594, 1599, 1620, 1629, 1646, 1659, 1673, 1678, 1684, 1686, 1694,
1717, 1731, 1739, 1752, 1782, 1800, 1828, 1902, 1991, 2086, 2101, 2101, 2269, 2276, 2320, 2332,
2341, 2347, 2369, 2379, 2379, 2455, 2465, 2497, 2547, 2597, 2670, 2701, 2789, 2835, 2841, 2862,
2865, 2873, 2944, 2947, 2950, 2984, 3067, 3067, 3096, 3131, 3142, 3171, 3172, 3235, 3241, 3245,
3280, 3290, 3342, 3363, 3384, 3392, 3410, 3426, 3453, 3484, 3502, 3510, 3542, 3552, 3575, 3596,
3664, 3666, 3712, 3729, 3732, 3791, 3936, 3944, 3954, 3957, 3959, 3960, 3971, 3975, 3990, 3993,
4004, 4004, 4030, 4056, 4071, 4162, 4178, 4239, 4251, 4289, 4305, 4319, 4332, 4358, 4365, 4372,
4424, 4455, 4514, 4544, 4644, 4659, 4711, 4717, 4722, 4748, 4762, 4770, 4783, 4788, 4794, 4864,
4875, 4892, 4895, 4900, 4932, 4936, 4967, 5023, 5064, 5094, 5114, 5131, 5134, 5159, 5169, 5197,
5288, 5318, 5345, 5345, 5364, 5430, 5430, 5436, 5457, 5461, 5482, 5524, 5530, 5561, 5590, 5593,
5605, 5617, 5617, 5650, 5651, 5658, 5675, 5681, 5729, 5760, 5766, 5772, 5787, 5796, 5809, 5925,
5946, 5953, 5968, 5982, 5985, 5994, 6061, 6070, 6103, 6103, 6212, 6216, 6236, 6253, 6280, 6290,
6370, 6419, 6425, 6435, 6457, 6511, 6541, 6584, 6637, 6705, 6744, 6760, 6767, 6776, 6806, 6826,
6835, 6836, 6839, 6874, 6886, 6915, 6931, 6979, 7003, 7029, 7034, 7051, 7118, 7131, 7169, 7184,
7209, 7211, 7214, 7226, 7230, 7258, 7295, 7351, 7393, 7425, 7435, 7439, 7463, 7490, 7501, 7528,
7542, 7547, 7575, 7577, 7579, 7625, 7631, 7632, 7659, 7725, 7726, 7731, 7731, 7736, 7807, 7808,
7923, 7930, 7932, 7974, 7994, 7994, 8060, 8134, 8149, 8157, 8191, 8193, 8247, 8295, 8324, 8339,
8361, 8490, 8509, 8558, 8630, 8651, 8667, 8694, 8719, 8750, 8762, 8772, 8788, 8826, 8829, 8834,
8853, 8879, 8879, 8885, 8907, 8951, 8986, 8989, 8994, 9033, 9034, 9060, 9080, 9103, 9169, 9189,
9194, 9211, 9213, 9321, 9378, 9400, 9415, 9420, 9422, 9468, 9472, 9484, 9528, 9549, 9561, 9665,
9686, 9699, 9728, 9767, 9770, 9798, 9850, 9875, 9919, 9929, 9930, 9950, 9967, 9969, 9977, 10015,
10025, 10031, 10039, 10049, 10050, 10052, 10064, 10070, 10075, 10093, 10099, 10113, 10117,
10126, 10141, 10162, 10165, 10174, 10207, 10215, 10236, 10260, 10265, 10266, 10277, 10279,
10288, 10302, 10334, 10344, 10360, 10367, 10368, 10369, 10378, 10392, 10401, 10403, 10405,
10408, 10410, 10434, 10441, 10444, 10454, 10455, 10456, 10471, 10473, 10486, 10496, 10504,
10505, 10511, 10516, 10526, 10527, 10527, 10528, 10532, 10535, 10538, 10551, 10558, 10563,
10598, 10631, 10648, 10662, 10664, 10664, 10673, 10673, 10679, 10687, 10700, 10704, 10711,
10722, 10730, 10761, 10784, 10797, 10805, 10813, 10854, 10862, 10899, 10928, 10931, 10932,
10954, 10961, 10980, 10982, 10983, 11019, 11045, 11048, 11061, 11068, 11072, 11081, 11097,
11102, 11107, 11122, 11126, 11127, 11131, 11138, 11143, 11146, 11159, 11161, 11163, 11186,
11196, 11218, 11221, 11226, 11231, 11251, 11272, 11278, 11297, 11347, 11362, 11376, 11396,
11405, 11410, 11422, 11424, 11432, 11455, 11465, 11476, 11485, 11488, 11488, 11496, 11501,
11502, 11510, 11513, 11526, 11533, 11548, 11555, 11576, 11576, 11579, 11591, 11609, 11613,
11630, 11649, 11666, 11670, 11674, 11677, 11685, 11699, 11700, 11702, 11730, 11731, 11733,
11747, 11760, 11764, 11767, 11775, 11776, 11777, 11779, 11781, 11805, 11815, 11818, 11820,
11824, 11847, 11862, 11915, 11918, 11932, 11948, 12005, 12007, 12026, 12042, 12056, 12082,
12087, 12088, 12101, 12120, 12122, 12127, 12147, 12170, 12238, 12301, 12349, 12380, 12390,
12397, 12424, 12433, 12519, 12556, 12602, 12605, 12605, 12613, 12680, 12753, 12755, 12777,
12793, 12880, 12886, 12893, 12895, 12899, 12906, 12906, 13025, 13072, 13076, 13178, 13353,
13366, 13419, 13421, 13520, 13592, 13606, 13611, 13615, 13628, 13639, 13647, 13658, 13668,
13753, 13811, 13816, 13843, 13903, 13904, 13905, 13984, 13986, 14013, 14058, 14071, 14097,
14110, 14120, 14169, 14181, 14189, 14196, 14212, 14216, 14222, 14228, 14317, 14349, 14349,
14355, 14379, 14528, 14541, 14553, 14598, 14632, 14633, 14719, 14798, 14832, 14878, 14897,
14956, 15020, 15038, 15050, 15057, 15088, 15111, 15153, 15192, 15205, 15216, 15217, 15222,
15232, 15252, 15258, 15268, 15272, 15285, 15308, 15316, 15329, 15337, 15360, 15402, 15445,
15452, 15479, 15485, 15507, 15514, 15533, 15575, 15639, 15717, 15748, 15773, 15780, 15780,
15785, 15804, 15834, 15858, 15859, 15867, 15890, 15950, 15954, 15955, 16075, 16078, 16172,
16181, 16182, 16206, 16218, 16219, 16233, 16249, 16262, 16269, 16295, 16383, 16460, 16470,
16481, 16561, 16604, 16616, 16630, 16633, 16643, 16687, 16687, 16740, 16761, 16793, 16831,
16836, 16891, 16896, 16901, 16922, 16943, 16951, 16958, 16975, 17002, 17083, 17095, 17101,
17131, 17136, 17147, 17164, 17270, 17297, 17313, 17357, 17358, 17399, 17419, 17478, 17483,
17515, 17515, 17566, 17570, 17672, 17674, 17687, 17738, 17768, 17792, 17862, 17869, 17876,
17942, 18014, 18019, 18020, 18027, 18037, 18043, 18060, 18061, 18069, 18075, 18086, 18088,
18108, 18116, 18117, 18128, 18146, 18153, 18159, 18179, 18188, 18216, 18219, 18281, 18299,
18339, 18368, 18406, 18411, 18426, 18442, 18456, 18505, 18537, 18539, 18541, 18559, 18564,
18756, 18790, 18791, 18843, 18916, 19074, 19074, 19104, 19111, 19141, 19154, 19158, 19187,
19202, 19231, 19298, 19317, 19318, 19336, 19382, 19403, 19464, 19465, 19470, 19489, 19550,
19590, 19593, 19639, 19640, 19702, 19717, 19737, 19746, 19792, 19822, 19829, 19875, 19880,
19880, 19893, 19976, 20058, 20084, 20084, 20115, 20160, 20171, 20179, 20188, 20193, 20220,
20225, 20228, 20237, 20288, 20350, 20355, 20386, 20406, 20415, 20436, 20440, 20441, 20444,
20478, 20500, 20510, 20533, 20595, 20656, 20660, 20683, 20742, 20756, 20844, 20855, 20876,
20900, 20901, 20935, 20946, 20949, 20950, 20984, 20997, 21016, 21030, 21032, 21063, 21090,
21090, 21096, 21104, 21242, 21338, 21350, 21376, 21464, 21492, 21503, 21515, 21526, 21530,
21536, 21618, 21623, 21628, 21640, 21641, 21695, 21726, 21751, 21786, 21830, 21905, 21929,
21949, 21969, 21987, 22060, 22062, 22064, 22108, 22111, 22112, 22125, 22148, 22194, 22224,
22229, 22269, 22271, 22278, 22322, 22426, 22445, 22494, 22505, 22509, 22577, 22608, 22655,
22666, 22672, 22703, 22715, 22787, 22802, 22836, 22858, 22860, 22894, 22897, 22930, 23015,
23178, 23208, 23262, 23262, 23281, 23290, 23366, 23373, 23390, 23392, 23411, 23417, 23422,
23503, 23543, 23561, 23569, 23569, 23586, 23607, 23609, 23726, 23731, 23792, 23800, 23868,
23890, 23904, 23929, 23953, 23974, 24028, 24032, 24033, 24109, 24111, 24120, 24180, 24257,
24276, 24344, 24347, 24362, 24401, 24438, 24492, 24493, 24525, 24539, 24586, 24610, 24618,
24683, 24697, 24699, 24702, 24702, 24709, 24732, 24737, 24746, 24783, 24795, 24820, 24829,
24858, 24875, 24886, 24922, 24949, 24953, 24956, 24980, 25010, 25088, 25090, 25104, 25250,
25304, 25306, 25324, 25324, 25360, 25448, 25489, 25560, 25568, 25603, 25606, 25613, 25634,
25652, 25705, 25725, 25726, 25754, 25795, 25853, 25906, 25954, 25961, 26036, 26045, 26096,
26098, 26100, 26146, 26164, 26191, 26207, 26257, 26263, 26292, 26317, 26349, 26352, 26381,
26443, 26445, 26459, 26511, 26515, 26544, 26774, 26809, 26815, 26819, 26820, 26829, 26843,
26941, 26962, 26972, 26978, 26994, 26994, 27110, 27155, 27211, 27229, 27291, 27311, 27323,
27392, 27434, 27473, 27475, 27514, 27518, 27518, 27528, 27541, 27585, 27617, 27636, 27645,
27660, 27675, 27698, 27701, 27713, 27719, 27756, 27761, 27797, 27827, 27887, 27963, 27973,
28025, 28026, 28033, 28051, 28054, 28063, 28122, 28124, 28228, 28255, 28280, 28283, 28328,
28355, 28386, 28406, 28432, 28470, 28472, 28487, 28515, 28536, 28611, 28626, 28645, 28671,
28705, 28715, 28749, 28751, 28763, 28772, 28795, 28803, 28836, 28872, 28973, 28986, 29007,
29007, 29035, 29081, 29102, 29128, 29147, 29167, 29188, 29218, 29223, 29241, 29381, 29416,
29453, 29465, 29479, 29499, 29506, 29518, 29546, 29546, 29620, 29629, 29654, 29684, 29737,
29784, 29805, 29814, 29819, 29851, 29857, 29866, 29877, 29907, 29939, 29993, 29994, 30036,
30066, 30067, 30088, 30094, 30149, 30150, 30202, 30227, 30249, 30266, 30311, 30326, 30375,
30466, 30471, 30474, 30509, 30528, 30614, 30614, 30630, 30647, 30694, 30700, 30748, 30802,
30805, 30812, 30826, 30845, 30873, 30879, 30930, 30982, 31057, 31069, 31073, 31093, 31105,
31122, 31193, 31231, 31236, 31278, 31283, 31290, 31292, 31331, 31336, 31463, 31480, 31490,
31498, 31499, 31578, 31603, 31603, 31611, 31627, 31693, 31719, 31758, 31792, 31815, 31819,
31828, 31890, 31924, 31950, 32014, 32081, 32103, 32107, 32112, 32114, 32116, 32131, 32164,
32195, 32207, 32247, 32254, 32284, 32289, 32322, 32402, 32417, 32457, 32474, 32482, 32525,
32583, 32616, 32709, 32761, 32762, 32774, 32799, 32857, 32882, 32892, 32915, 32974, 33049,
33118, 33419, 33437, 33456, 33458, 33466, 33479, 33480, 33493, 33521, 33521, 33529, 33533,
33541, 33549, 33555, 33582, 33602, 33622, 33638, 33642, 33642, 33683, 33726, 33735, 33749,
33755, 33790, 33798, 33820, 33825, 33892, 33893, 33920, 33938, 33966, 33975, 33993, 34003,
34009, 34035, 34098, 34105, 34156, 34171, 34232, 34236, 34237, 34259, 34261, 34269, 34299,
34328, 34330, 34359, 34367, 34396, 34403, 34414, 34441, 34459, 34547, 34570, 34643, 34683,
34753, 34801, 34834, 34846, 34867, 34885, 34931, 34941, 34949, 34965, 34980, 35003, 35023,
35043, 35101, 35132, 35132, 35163, 35209, 35227, 35314, 35324, 35372, 35381, 35397, 35561,
35614, 35636, 35654, 35657, 35691, 35692, 35692, 35710, 35745, 35781, 35836, 35868, 35934,
35939, 36005, 36018, 36065, 36068, 36075, 36076, 36085, 36144, 36153, 36153, 36168, 36169.

TABLE 3
particularly preferred SEQ ID NOs in the sequence listing

| SEQ | |
|---|---|
| ID NO: | Further details |
| 2542 | This MafB-related protein has a 13mer leader peptide (with |
| | a GTG start codon), which can be removed post-translationally |
| | to provide a N-terminal cysteine. |
| 11994 | This thiosulphate sulphur transferase has a 19mer leader |
| | peptide, which can be removed post-translationally to provide |
| | a N-terminal cysteine. |
| 13348 | This haemoglobin-haptoglobin-utilization protein A has a 17mer |
| | leader peptide, which can be removed post-translationally to |
| | provide a N-terminal cysteine. |
| 13958 | This protein has a non-ATG start codon. |
| 14015 | — |
| 14530 | This protein has a 18mer leader peptide which can be removed. |
| 14709 | This protein has a 19mer leader peptide, which can be removed |
| | post-translationally to provide a N-terminal cysteine. |
| 14917 | This hemoglobin-haptoglobin utilization protein B has a 22mer |
| | leader peptide. |
| 14994 | — |
| 15162 | — |
| 15624 | This protein has a 19mer leader peptide which can be removed. |
| 15660 | This haemoglobin-haptoglobin-utilization protein has a 17mer |
| | leader peptide, which can be removed post-translationally to |
| | provide a N-terminal cysteine. |
| 15731 | — |
| 15955 | An outer membrane autotransporter barrel domain protein |
| 18039 | This protein has a TTG start codon. |
| 18256 | This protein is a hemagglutinin. |
| 18327 | This membrane protein is pilus-related. |
| 18491 | This protein has a 15mer leader peptide which can be removed. |
| 18563 | This protein has a TTG start codon. |
| 18722 | This peptidase has a 19mer leader peptide, which can be |
| | removed post-translationally to provide a N-terminal cysteine. |
| 18794 | — |
| 18976 | This protein is a hemolysin. |
| 19438 | — |
| 19570 | — |
| 19658 | — |
| 20742 | This is an outer membrane protein. |
| 20850 | This protein raises good anti-bactericidal antibodies. |
| 21500 | This protein has a TTG start codon. |
| 21873 | — |
| 24153 | This protein is a HAD-superfamily hydrolase. |
| 24810 | This protein is periplasmic |
| 25201 | — |
| 25368 | — |
| 25422 | This protein, with a GTG start codon, is hemolysin-like |
| 25433 | — |
| 25495 | — |
| 25596 | This protein has a TTG start codon and a 92% identical |
| | gonococcal homolog |
| 25615 | — |
| 28470 | This lipoprotein has a 18mer leader peptide, which can |
| | be removed post-translationally to provide a N-terminal |
| | cysteine. It is likely an adhesin. |
| 28653 | This protein has a GTG start codon. |
| 29557 | This is a membrane-bound protein |
| 29817 | This is a periplasmic protein |
| 32279 | — |
| 32363 | — |
| 32380 | — |
| 32436 | — |
| 32443 | This is a fimbrial protein with a 30mer leader peptide |
| | which can be removed. |
| 32562 | — |
| 32588 | — |
| 32616 | This lipoprotein has a 17mer leader peptide, which can be |
| | removed post-translationally to provide a N-terminal |
| | cysteine. |
| 32675 | — |
| 32708 | — |
| 32736 | This antioxidant protein has a 16mer leader peptide which can be |
| | removed. |
| 32815 | This protein binds extracellularly to lactoferrin. |
| 32856 | This MafB-related protein has a 15mer leader peptide. |
| 32895 | — |
| 32955 | — |
| 33068 | — |
| 33327 | — |
| 33368 | This protein has a 15mer leader peptide which can be removed. |
| 33638 | This is a lipoprotein. |
| 33646 | — |
| 33651 | — |
| 33652 | This protein has a GTG start codon. |
| 33676 | — |
| 33715 | — |
| 33857 | — |
| 33934 | This is a membrane protein, likely in the inner membrane. |
| 33989 | — |
| 34094 | This protein has a TTG start codon. |
| 36176 | — |
| 36177 | — |
| 36178 | — |

1. A polypeptide comprising an amino acid sequence that has at least 75% sequence identity to one or more of SEQ ID NOs: 1 to 36178 and 72357 to 72990.

2. The polypeptide of claim 1, comprising one or more of amino acid sequences SEQ ID NOs: 1 to 36178 and 72357 to 72990.

3. A polypeptide comprising a fragment of at least 7 consecutive amino acids from one or more of SEQ ID NOS: 1 to 36178 and 72357 to 72990.

4. The polypeptide of claim 3, wherein the fragment comprises a T-cell or a B-cell epitope from the SEQ ID NO: amino acid sequence.

5. An antibody that binds to the polypeptide of claim 1.

6. The antibody of claim 5, wherein the antibody is a monoclonal antibody.

7. A nucleic acid comprising a nucleotide sequence that has at least 75% sequence identity to one or more of SEQ ID NOS: 36179 to 72356.

8. The nucleic acid of claim 7, comprising an nucleotide sequence selected from SEQ ID NOS: 36179 to 72356.

9. A nucleic acid that can hybridize to the nucleic acid of claim 8 under high stringency conditions.

10. A nucleic acid comprising a fragment of 10 or more consecutive nucleotides from one or more of SEQ ID NOS: 36179 to 72356.

11. A nucleic acid encoding the antibody of claim 5.

12. A composition comprising: (a) the polypeptide of claim 1; and (b) a pharmaceutically acceptable carrier.

13. The composition of claim 12, further comprising a vaccine adjuvant.

14. A method of treating a patient, comprising administering to the patient a therapeutically effective amount of the composition of claim 12.

15. The method of claim 14 for preventing bacterial meningitis (in particular, meningococcal meningitis).

The application's sequence listing, which the Patent Office published only in electronic form, follows.

SEQUENCE LISTING (72990 sequences)

SEQ ID NO: 1 - protein, 248 aa, Neisseria meningitidis
VQPEISAQYQHRFAQAIREGEAADGLPQERLNVYIRLIRNNIHSFIDRCYTETRQYFDSEEWSRLKEGFVRDAHAQTPYFQEIPGEFLQYCQSLPLLDGILALMDFEYTQLLAEVAQIPDIPDIHYSNDSKYTPSPAAFIRQYRYDVTDDLHEAETALLIWRNAEDDVMYQTLDGFDMMLLEIMGSSALSFDTLAQTLVEFMPEDDNWKNILLGKWSGWTEQRIIIPSLSAISENMEGNSPGQNHLSA

SEQ ID NO: 2 - protein, 244 aa, Neisseria meningitidis
VLQGDVEVRTQDGAAEVWSAESGDCVFAPQQVFSVKLKTDDAEIRLSLYCAAADYFHKKYGMSATHSAVAAAQDTVPAGRALDMGCGQGRNALFLGLKGFEVTAVDHNPAALANVAELAEAEGLNVRTLEYDLNAAALQGEFDYIVATVVLMFLMPQRVPDVIADMQAHTAAGGYNLIVSAMDTADFPCPMPFPFKFKEGELKDYYRDWELDEYKEELGAMHAKDENGNPIRFKFVTMLAKKPE

SEQ ID NO: 3 - protein, 436 aa, Neisseria meningitidis
MSVTVETLENLERKVVLSLPWSEINAETDKKLKQTQRRAKIDGFRPGKAPLKMIAQMYGASAQNDVINELVQRRFHDVAVAQELKVAGFPRFEGVEEQDDKESFKVAAIFEVFPEVVIGDLSAQEVEKVTASVGDAEVDQTVEILRKQRTRFNHVEREARNGDRVIIDFEGKIDGEPFAGGASKNYAFVLGASQMLPEFEAGVVGMKAGESKDVTVNFPEDYHGKDVAGKTAVFTITLNNVSEATLPEVDADFAKALGIADGDVAKMREEVQKNVSREVERRVNEQTKESVMNALLKAVELKAPVALVNEEAARLANEMKQNFVNQGMADAANLDLPLDMFKEQAERRVSLGLILAKLVDENKLEPTEEQIKAVVANFAESYEDPQEVIDWYYADPSRLQAPTSLAVESNVVDFVLGKAKVNEKALSFDEVMGAQA

SEQ ID NO: 4 - protein, 140 aa, Neisseria meningitidis
MKITKIFTFDSSHMLDGHDGKCQNLHGHTYKLEITVSDDPVRGGPKDGMVMDFTDLKAIVKQHITDPFDHAFIYHGGNGRESQIAALLEGWNMKTLRLPCRTTAENMAVEMYDRLKNAGLNVCRVKLWETPTSCAEYEGG

SEQ ID NO: 5 - protein, 175 aa, Neisseria meningitidis
MKQKIWYTYDDIHRVIKALAEKIRNADIKYDAMIAIGGGGFIPARMLRCFLEIPIYAVTTAYYDSDNEGQVTEEVKKVQWLDPVPEALRGKNVLVVDEVDDSRVTMEFCLTELLKEDFGTIGVAVLHEKIKAKAGKIPEGIPYFSGITVEDWWINYPWDALDIDEHNRLAEAGRG

SEQ ID NO: 6 - protein, 144 aa, Neisseria meningitidis
MFLNTIQPAVGATHAGRRVGRGIGSGLGKTGGRGHKGQKSRSGGFHKVGFEGGQMPLQRRLPKRGFKSLTASANAQLRLSELESIAVNEIDILVLKQAGLIASTVSNVKVIASGEISKAVALKGIKVTKGARAAIEAVGGKIEM

SEQ ID NO: 7 - protein, 141 aa, Neisseria meningitidis
MTQETALGAALKSAVQTMSKKKQTEMIADHIYGKYDVFKRFKPLALGIDQDLIAALPQYDAALIARVLANHCRRPRYLKALARGGKRFDLNNRFKGEVTPEEQAIAQNHPFVQQALQQQSAQAAAETPSVEAEAAESSAAE

SEQ ID NO: 8 - protein, 133 aa, Neisseria meningitidis
MKDKHDSSAMRLDKWLWAARFFKTRSLAQKHIELGRVQVNGSKVKNSKTIDIGDIIDLTLNSLPYKIKVKGLNHQRRPASEARLLYEEDAKTATLREERKQLDQFSRITSAYPDGRPTKRDRRQLDRLKKGDW

SEQ ID NO: 9 - protein, 468 aa, Neisseria meningitidis
MLKSQFAGKIEAVREELAAGRSAFVFKPGEGVRYEMAAVEGAVEPAEPSLHAGSEEMPVQEVLLDELPSEEPVKPAASKTAADILAERMRNLPHEPRHTAEPASRPESEVLAKARTDAQRDAEEARYEQTNLSPDYTFDTLVEGKGNRLAAAAAQAIAESPGQSYNPFFLYGSTGLGKTHLVQAIGNELLKNRPDAKVRYMHSDDYIRSFMKAVRNNTYDVFKQQYKQYDLLIIDDIQFIKGKDRTMEEFFYLYNHFHNEKKQLILTCDVLPAKIEGMDDRLKSRFSWGLTLELEPPELEMRIAILQKKAEAAGISIEDEAALFIANLIRSNVRELEGAFNRVGASSRFMNRPVIDIDLARTALQDIIAEKHKVITADIIIDAVAKYYRIKISDVLGKKRTRNIARPRQVAMSLTKELTTLSLPSIGDSFGGRDHTTVMHGIRAVAKLREEDPELAQDYEKLLILIQN

SEQ ID NO: 10 - protein, 270 aa, Neisseria meningitidis
MDKIRVAAVQMVSGVSPETNVAAMKRLVARAAEQGADWVLLPEYWVLMGANDTDKLALAEPLGGGRFQTALSETAKECGVVLFGGTVPLQSPEAGKVMNTLLVYGRDGKRTGLYHKMHLFGFSGLGERYAEADTIRAGGEVPHLSAEGVPVAAGICYDVRFSEFFRRQLPFDVLMLPAAFTHTTGKAHWELLLRARAVENQCYVVAAAQGGLHENGRRTFGHSMIVDPWGDVLDVLPEGEGVVTADIDANRLNSVRNRLPALKYRVLDAV

SEQ ID NO: 11 - protein, 365 aa, Neisseria meningitidis
MKSVRSFIRDDIQAMSAYQIADVPPGFAKLDSMESPVHPFAGHETLLQEWQARLAAAPIHLYPNPSGSGLQEALRSAFDIPDCADIALGNGSDELIQFITMLTAKPGAAMLAAEPSFVMYRHNAALYGMDYVGVPLNGDFTLNLPAVLEAVRKHRPALTFIAYPNNPTGVCFTRAEIEAVIEASDGIVVVDEAYGAFNGDSFLPQAGSIPNLIVMRTVSKIGFAGLRIGYAAGCPEVIGELQKILPPYNMNQLSLTTAKLALQHYGIISANIDSLKNERERMFAELGKICRLNTFPSQANFITIRVPDADLLFDTLKQNRILVKKLHGAHPLLEHCLRITVGSPAQNDAVLNIIRQLYCQPTDFL

SEQ ID NO: 12 - protein, 90 aa, Neisseria meningitidis
MKQTVKWLAAALIALGLNQAVWADDVSDFRENLQAAAQGNAAAQYNLGAMYYKGRGVRQDRALAQEWYGKACQNRDQDGCGHYQRLKAGY

SEQ ID NO: 13 - protein, 231 aa, Neisseria meningitidis
MAKVSKRLKALRSSVEANKLYAIDEAIALVKKAATAKFDESVDVSFNLGVDPRKSDQVIRGSVVLPKGTGKTTRVAVFTQGANAEAAKEAGADIVGFEDLAAEIKAGNLNFDVVIASPDAMRIVGQLGTILGPRGLMPNPKVGTVTPNVAEAVKNAKAGQVQYRTDKAGIVHATIGRASFAEADLKENFDALLDAIVKAKPAAAKGQYLKKVAVSSTMGLGIRVDTSSVNN

SEQ ID NO: 14 - protein, 502 aa, Neisseria meningitidis
MTTTPANILASVDLGSNSFRLQICENNNGQLKVIDSFKQMVRFAAGLDEQKNLSAASQEQALDCLAKFGERLRGFRPEQVRAVATNTFRVAKNIADFLPKAEAALGFPIEIIAGREEARLIYTGVIHTLPPVGGKMLVIDIGGGSTEFVIGSTLNPDITESLPLGCVTYSLRFFQNKITAKDFQSAISAARNEIQRISKNMRREGWDSAVGTSGSAKSIRDVLAAEMPQEADITYKGMRALAERIIEAGSVKKAKFENLKPERIEVFAGGLAVMMAAFEEMKLDRMTVTEAALRDGVFYDLIGRGLNEDMRGQTVAEFQHRYHVSLNQAKRTAETAQTFMDSLCHAKNVTVQELALWQQYLGRAAALHEIGLDIAHTGYHKHSAYILENADMPGFSRKEQTILAQLVIGHRGDMKKMSGIIGTNEMLWYAVLSLRLAALFCRSRQDLSFPKNMQLRTDTESCGFILRIDREWLERHPLIADALEYESVQWQKINMPFKVEAV

SEQ ID NO: 15 - protein, 354 aa, Neisseria meningitidis
MTLLKNDTFLRALLKQPVEYTPIWMMRQAGRYLPEYKATRAKAGSFLDLCKNTELATEVTIQPLERFDLDAAILFSDILTVPDAMGLGLYFAEGEGPKFKRALQHEDDIAKLHVPDMEKLQYVFDAVTSIRKALDGRVPLIGFSGSPFTLACYMVEGGSSKEFRTIKTMMYSRPDLLHKILDTNAQAVTAYLNAQIDAGAQAVQIFDTWGGVLSDAAFKEFSLKYIRQIVAGLKRESEGRRVPVIVFAKGGGLWLESMAEIGADALGLDWTCNIGEARRRVGKQVALQGNFDPFALFGTPESIRTEVARILADYGHGSGHVFNLGHGINQHADPEHAKILVDTVHELSRQYHGG

SEQ ID NO: 16 - protein, 205 aa, Neisseria meningitidis
LEQDFFGRYLDSYRFSGMCAVQVGGPWLSLSEDVVCVPRDMSMSAENMALADVSADMLLFPHTLEGGIPSQILSEAHRILKPCGRLMLTGFNPYSLWGFSRWFDGERLPEKRFCLPLPELKRQLADVGFDIEFGKFMVYLPPVSSIGQIRFWRFMEKAGDRWWPQCAAVYGLVLVKRAAGVTPLPEWDGYLGGKALAAGAARVAD

SEQ ID NO: 17 - protein, 233 aa, Neisseria meningitidis
VQADLAYAAERITHNYPEPTGADKDKISTVSDYFRNIRAHSIHPRVSVGYDFGGWRIAADYASYRKWNNNKYSVNTKEVSRNNSNGNDTWQELKTENQENGSFHAVSSLGLSAIYDFKLNDKFDKFKPYIGARVAYGHVKHQVHSVRKETTTVFSKPSGSATKPGQIPSLVTKPAYHESHSISSLGLGVIAGVGFDITPKLTLDTGYRYHNWGRLENTRFKTHEVSLGVRYRF

SEQ ID NO: 18 - protein, 432 aa, Neisseria meningitidis
MAKNVVVIGAQWGDEGKGKIVDWLAEEAGGVVRFQGGHNAGHTLVVGGKKTILRLIPSGILHESLDCFIGSGVVVSPEALLGEIDELNAAGVKNVEGRLKIAPTCPLILPYHIALDQAREASRGKGKIGTTGRGIGPAYEDKVARRAIRAADLLHPEKLREKLDAVLAYYNVQLQHLHNAEPVKAEDVMAVIEKVAPRIAPMITDVSRVLNEKNKNGEKLLFEGAQGALLDIDYGTYPFVTSSNCLAGAASAGAGVGPQMLDYVLGIVKAYTTRVGSGPFPTELFDEVGAGLAERGHEFGSVTGRARRCGWFDAAALKRSIQINGISGMCITKLDVMDGVETINICVGYELPDGGKTDILPCGSDAVETCKPIYETMEGWKESTFGIKNYEELPDNAKAYLKRIEEVCGAPVAIVSTGPDREETIVLHHPFA

SEQ ID NO: 19 - protein, 166 aa, Neisseria meningitidis
MLWLGISVLGAKLMPGIWGMTRAAPLFIPHFYLTLGSIFFFIGHWNRKTDGNGWQADSEHPLLGLFAVSNVSMTLAFVGICALVHYCFSGTVQVFVFAALLKLYALKPVYWFVLQFVLMAVAYVHRCGIDRQPPSTFGGSQLRLGGLTAALMQVSVLVLLLSEIGR

SEQ ID NO: 20 - protein, 548 aa, Neisseria meningitidis
MKHFHDLPAWSKLWNHFDDSKTLHMREMFEQDPQRAERYWLQVGGLTLDYSKNRINDETMSLLFELAREAGVPERMRQMFHGEKINTTENRAVLHVALRNRTNSPIVVDGEDVMPKVNRVLQRMGEFAHEVRSGSWLGYTNQVITDVVNIGIGGSDLGPLMMCTALKPFGHPRLNMHFVSNVDGSQLRDVLSKVHPETTLFIIASKTFTTQETLTNALTAREWFLNHAGDEEAVAKHFAAVSTNQKAVAEFGIDTANMFEFWDWVGGRYSLWSAIGLPIMLYLGEENFIEMLNGAHLMDQHFINTPLERNLPVILALIGIWYINYYGGGSHVIAPYDQHLHRLPKFIQQLDMESNGKQVTLDGKAVGHETSPIIWGETGINGQHAFFQLLHQGTHITPIDLIASLEKRSNLPGHHEILLANVFAQAEAFMRGKTPDEVRAELKAQGMDEARIEELVPHKTFSGNRPTNLILMDKVNPRNMGSLIAMYEHKTFVQGIIWGINSFDQWGVELGKQLAKTILGELTGETGPQKHDSSTERLINLYLQTNRK

SEQ ID NO: 21 - protein, 57 aa, Neisseria meningitidis
MKKSLIALALSVLKPQMPEFEIKPASIGYLKQHPSMRLGKSGVAAAKRAARKRKNRR

SEQ ID NO: 22 - protein, 268 aa, Neisseria meningitidis
MKSSFVQTLTIAGSDSGGGAGIQADLKTFQMRGVFGTCVITAVTAQNTLGVSAVHLVPTETITAQIQAIREDFDIRAYKIGMLGTAEIIECVADKLKHCDFGRRVLDPVMIAKGGAPLLQDSAVAALTRLLLPDTDVLTPNLPEAEALTGVHIENRKDAERAAKILLDYGVKNVVIKGGHLNGSSSGRCTDWLFTQNETLELDSPRFPTAHTHGTGCTFSACITAELAKGLDVCKAVRTAKSYITAAISSPLEIGAGHGPVNHWAYRD

SEQ ID NO: 23 - protein, 328 aa, Neisseria meningitidis
MPASQRYACPSSTLINNHSRLFKHNLQTKRYTVSYQPYNDKRFTAFPFKTANHHDTFPFTIRIDFPPHPCPDCRIPFMGRLLLGSIRMSIIVENLTVSYRRRPAVHHVDITFEEHSMWAVFGPNGAGKSTFLKSLMGLQPIDTGSIRLDGLTRQNIAYLPQQSDIDRSQPMTVFDLAAMGLWYEIGFFRGINAVQKQRVHESLERVGMRQFAGRQIAHLSNGQFQRVLFARMLVQNAKFLLLDEPFNAVDARTTYELLDVLQKCHCGGHAIIAVLHDYEQVRAYFPNTLLLAREKIAAGATETILTEPYLAQANAKMQQQESPEWCAS

SEQ ID NO: 24 - protein, 321 aa, Neisseria meningitidis
MSYTQLTQGERYHIQYLSRHCTVTEIAKQLNRHKSTISREIRRHRTQGQQYSAEKAQRQSRTIKQRKRQPYKLDSQLIQHIDPLIRRKLSPEQVCAYLCKHHQITLHHSTIYRYLRQDKSNGSTLWQHLRICSKPYRKRYGSTWTRGKVPNRVSIENRPAIVDQKSRIGDWEADTIVGKGQKSALLTLVERVTRYTIICKLDSLKAEDTARAAVRTLKAHKDRVHTITMDNGKEFYQHTKITKALKAETYFCRPYHSWEKGLNENTNGLIRQYFPKQTDFRNISDREIRRVQDELNHRPRKTLGYETPSVLFLNLFQPLIH

SEQ ID NO: 25 - protein, 348 aa, Neisseria meningitidis
MIPATYTLSQITAQLGGEWRGEDISVTAVRPLADAQAEHISFLANPKYKAEVHDSSAGAVIVSAKAADGFEGRNLIVADDPYLYFAKVARLFSPVVKARGGIHPTAVVEPSATVPASCEIGANAYIGANTVLGEGCRILANAVVQHDCKLGDEVVLHPNAVVYYGCTLGRRVEIHSGAVIGADGFGLAFAGDSWFKIPQTGAVTLGDDVEIGSNTNIDRGAMSDTTVGNGTKIDNQVQIGHNCKIGSHTVIAAKTGISGSVTIGSYCIIGGGVGTVGHIEIADKTTIGGGTSVTHSITESGKHLAGIFPMSTHKEWARNAVYIHRLSEMNKRLKTLEQQLSDAGQDSK

SEQ ID NO: 26 - protein, 141 aa, Neisseria meningitidis
MKTARRRSRELAVQAVYQSLINRTAAPEIAKNIREMPDFAKADEELFNKLFFGTQTNAADYIQKIRPLLDRDEKDLNPIERAVLLTACHELSAMPETPYPVIINEAIEVTKTFGGTDGHKFVNGILDKLAAQIRPDEPKRR

SEQ ID NO: 27 - protein, 852 aa, Neisseria meningitidis
MPANLSSALETFKRQRDAAEAHYLKANRVSVFFREYTAAVETLLAALWVEHFQNSALCLMAVGGFGRGELYPCSDVDLAVVSPAPLSDGIQEQIARFVQTLWDCKLMPSVKSGSVGELCESVRDDITGDTAFLEARFLFGNRQTADELAKKMNAQRNVAAFVEAKLVEMEHRHAKSQGSGAVLEPNIKSCPGGLRDIHTLLWIAKAQGLATDLPDLLKQRILTRAEAGMLSHGYRRLAHIRIHLHLNAKRAEDRLLFDLQPQVAESMGYEGLNLRRQSEELMRVFYRAIKTVKQLGGILTPMLQSRVSSTPLRVTLRIDDDYIQVNNQIAARHTDIFFRRPEHIFKIVEIMQQRNDITALEPQTLRAWWGATRKINRSFYQNSENRHRFAGFFRNGNGLTQTLRFLNLYGVLGRYLPAWEKIVGLLQHDLFHIYPVDDHILTVVRNVRRLALDMHSHELPYASALMQSFEKQDILYLAAFFHDIAKGRGGDHAIQGIADARQFAADHFLTEEESDLLAWLVENHLLMSTVAQKEDIQDPSVLDAFCKRVQTHERLSALYLLTISDIRGTNPKLWNAWRASLLESLFHAAGRYLTGNGGNPHTLFGRRRQEAADLLTRAAVPEKQQKKLWNALGSAYFARHQSREILWHAANLVHDFETPIVRSRILPQSDSFQVMVFMPNGPRLFARLCRIFSRHGFDILAARAFITEHDYILDTFIVQIPSQHAPEDYPDIQSALEAELNSFIHGHTVAEISSHSRRISRRSRYMPIAPSITITPEEDYPDWYSVEITAVNRPFLLADMAEVFFAHNVSLRYAKISTLDERAEDSFTVFSPDLNNPKIQSSLKQTLLEQLS

SEQ ID NO: 28 - protein, 143 aa, Neisseria meningitidis
MKTFSAKPHEVKREWFVIDAQDKVLGRVAAEVASRLRGKHKPEYTPHVDTGDYIIVINADKLRVTGAKFEDKKYFRHSGFPGGIYERTFREMQEQFPGRALEQAVKGMLPKGPLGYAMIKKLKVYAGAEHAHAAQQPKVLELK

SEQ ID NO: 29 - protein, 468 aa, Neisseria meningitidis
MKLFQRIFATFCAVIVCAIFVASFSFWLVQNTLAENQFNQRRTIETTLMGSIISAFRARGDAGAREILTEWKDSPVSSGVYVIQGDEKKDILNRYIDSYTIERARLFAAGHPHSNLVHIEYDRFGEEYLFFTKDWDKLQARRLPSPLLIPGLPLAPIWHELIILSFIIIVGLLMAYILAGNIAKPIRILGNGMDRVANGELETRISQQVDDRDDELSHLAIQFDKMVEKLEKLVAKERHLLHHVSHEMRSPLARMQAIVGLIQAQPQKQEQYLKRLEGELTRMDTLAGELLTLSRLETSNMALEKESLKLLPFLGNLVEDNQSIAQKNGQTVTLSADGKIPENTTILANESYLYRAFDNVIRNAVNYSPEGSTILINIGQDHKHWIIDVTDNGPGVDEMQLPHIFTAFYRADSSANKPGTGLGLALTQHIIEQHCGKIIAENIKPNGLRMRFILPKKKTGSKTEKSAN

SEQ ID NO: 30 - protein, 387 aa, Neisseria meningitidis
MSEQLPVAVATETKAERKKPKKKSWIKKLSPLFWVTVIIPTVISLVYFGFFASDRFTSQSSFVVRSPKSQSSLNGLGAILQGTGFARAQDDIYTVGEYMRSRSSLDELRKILPVREFYETKGDAFSRFNGFGFRGEEEAFYQYYKNQVMINFDTVSGISTLNVTSFDALESKKINEALLKQGEALINQLNDRARADTVRYAEEVVKTAAERVKEASQNLTDYRIANGVFDLKAQSEVQMGLVSKLQDELIVIQTQLDQVKAVTPENPQIPGLQAREQSLRKEIDQQLRAISGGGHSSLSNQAAEYQRVYLENQLAEQQLAAAMTSLESAKVEADRQQLYLEVISQPSLPDLAHEPKRLYNIVATLIIGLMVYGILSLLTASIREHKN

SEQ ID NO: 31 - protein, 161 aa, Neisseria meningitidis
MFVNEKYPYAALFAGLVFLTLPFALSVHDALAFAFGRAGLLVSVSDGGFGWRGGWDGTVWFVFGVFAFLNVVVSAGLTKLAYKKMMRRHSRYALFLSGVAACAAAAVAWIFELLLGSEALGGLRGEAVSEYAFAVWLVAMLTLPKRLTRAPVQPVVFHRKK

SEQ ID NO: 32 - protein, 92 aa, Neisseria meningitidis
MLEIEIVYGLPDRQVLKTMQLAEGTTVRAAALQSGLDGIFEDLNLHSAPLGIFGKAVKDDTPLRDGDRIEVYRPLLIDPKEARRKRVQNQEE

SEQ ID NO: 33 - protein, 404 aa, Neisseria meningitidis
MSEVEYFSHFISDGKGKLLEIPQRRGKQDGVFVDWISFTFHEDTLLKVSGCPLFSDAEYMYVLSRKLEEILGFGITRKCKSRGNKFYESMYRLGSDDVDYGEVHFGGQRNTVLVELKGTGCSVASPGWELRLKQFLDDSIRTRITRIDLALDFFDGEYTPDQALLDHDNGFFDNSNQRPKSETIGTAWRNEDGSGKTFYVGRKKNSRFVRVYEKGRQLGDKESKWVRFEIQFNYGDIEIPLDILINQGSYFCGAFPICRKFKNMPVPERFDQRKKTLNLTFEHKLHYAKNAVGKLVNFMIEMGFDNSEIVESLKADSGFPKGLEPEKYALEMLRDGLKHGFIHEQPDIDLEIELDELGVIAFKNSDKFDREKRLFSPDYDVEKERKYQEYLSKVYHQNVDYDYF

SEQ ID NO: 34 - protein, 659 aa, Neisseria meningitidis
MSQLANAIRFLSADAVQKANSGHPGAPMGMAEMAETLWTKFLNHNPANPKFYNRDRFVLSNGHASMLLYSLLHLTGYNLSIEDLKNFRQLHSKTPGHPEYGYTDGVETTTGPLGQGIANAVGMALAEKILAAEFNKDGLNIVDHYTYVFMGDGCLMEGVSHEACSLAGTLGLGKLIVLYDDNNISIDGKVDGWFTENIPQRFESYGWHVVPNVNGHDTAAIQAAIEAARAETGKPSIICCKTLIGKGSANKEGSHKTHGAPLGADEIEATRKHLGWTYPAFEIPQEIYDAWNAKEQGAKLEADWNELFAQYQAKYPAEAAEFVRRMDKKLPENFDEYVQTALKEVCAKAETIATRKASQNSIEILAKELPELVGGSADLTPSNLTDWSNSVSVTRDKGGNYIHYGVREFGMGAIMNGLALHGGVKPFGATFLMFSEYERNALRMAALMKINPVFVFTHDSIGLGEDGPTHQPIEQTATLRLIPNMDVWRPCDTAESLVAWAEAVKAADHPSCLIFSRQNLKFQARSEQQLNDIKRGGYIISEAQGNAQAVIIATGSEVELALEAQKALAAQNIAVRVVSMPSTNVFDRQDAAYQATVLPEGLPRVAVEAGHADGWYKYVGLNGAVVGINRFGESAPADLLFKAFGFTVDNVVDTVKSVL

SEQ ID NO: 35 - protein, 628 aa, Neisseria meningitidis
MPSETVFQVIDMNKETRFPEHFDIPLFLKNLPKLPGVYRFFDEGGKVLYVGKAVNLKRRVSGYFQKNDHSPRIALMVKQVHHIETTITRSEAEALILENNLIKALSPKYNILFRDDKSYPYLMLSGHQYPQMAYYRGTLKKPNQYFGPYPNSNAVRDSIQVLQKVFMLRTCEDSVFEHRDRPCLLYQIKRCTAPCVGHISEEDYRDSVRQAATFLNGKTDELTRTLQHKMQTAAANLQFEEAARYRDQIQALGIMQSNQFIDSKNPNNPNDIDLLALAVSDGIVCVHWVSIRGGRHVGDKSFFPDTKNDPEPNGQDYAEAFVAQHYLGKSKPDIIINNFPVPDALKEALEGEHGKQMQFVTKTIGERKVWLKMAEQNAQMAIAQRRLQQSSQQHRIDELAKILGMDSDGLNRLECFDISHTQGEATIASCVVYDEQNIQPSQYRRYNITTAKPGDDYAAMREVLTRRYGKMQEAEANGETVKWPDVVLIDGGKGQIGVAVSVWEELGLHIPLVGIAKGPERKAGMEELILPFTGEVFRLPPHSPALHLLQTVRDESHRFAITGHRKKRDKARVTSSLGDIPGVGSKRRQALLTRFGGLRGVIAASREDLEKVEGISKALAETIYNHLH

SEQ ID NO: 36 - protein, 376 aa, Neisseria meningitidis
MFTDENMTAKEELFAWLRHMNQNKGSDLFVTTHFPPAMKLDGKITRITDEPLTAEKCMEIAFSIMSAKQAEEFSSTNECNFAISLPDTSRFRVNAMIQRGATALVFRAITSKIPKFESLNLPPVLKDVALKKRGLVIFVGGTGSGKSTSLASLIDYRNENSFGHIITIEDPIEFVHEHKNCIITQREVGVDTENWMAALKNTLRQAPDVILIGEIRDRETMDYAIAFAETGHLCMATLHANSTNQALDRIINFFPEERREQLLTDLSLNLQAFISQRLVPRDGGKGRVAAVEVLLNSPLISELIHNGNIHEIKEVMKKSTTLGMQTFDQHLYQLYEKGEISLQDALKNADSAHDLRLAVQLRSRRAQSSSPDLELL

SEQ ID NO: 37 - protein, 257 aa, Neisseria meningitidis
MPDNGRHKAGKMETTLFKPALWQIPHIGSGGETALAEKTETLKQRLHRIVGSHRDARFASSLAAEDMVITDLIAGENLNIGIFTLDTGLLHTETLNLLDRLGRAYPHLRIKRFRPVREDADRYVESKGRFAFYDSVEARRECCRIRKIEPLNRAIAGADAWLTGQRREQSATRTELPFAEYDAGRGIGKYNPIFDWSEHDVWAYILANNVPYNDLYRQGFPSIGCDPCTRPVKAGEDIRAGRWWWEGRNSKECGLHK

SEQ ID NO: 38 - protein, 159 aa, Neisseria meningitidis
MNKLFLTAAVLMLGACGFHLKGADGISPPLTYRSWHIEGGQALRFPLETALYQASGRVDDAAGAQMTLRIDSVSQNKETYTVTRAAVINEYLLILTVEAQVLKRGEPVGKPMTVSVRRVLAYADNEILGKQEEEAALWAEMRQDAAEQIVRRLTFLKAE

SEQ ID NO: 39 - protein, 275 aa, Neisseria meningitidis
MLKKFVLGGIAALVLAACGGEGGSASSSAPAQSAGASGDSLIERINNKGTVTVGTEGTYAPFTYHDKDGKLTGYDVEVTRAVAEKLGVKVEFKETQWDSMMAGLKAGRFDVVANQVGLTSPERQATFDKSDPYSWSGAVLVARNDSNIKSIDDIKGVKTAQSLTSNYGEKAKAAGADLVAVDGLAQSLTLIEQKRADATLNDELAVLDYLKKNPNAGVKIVWSAPADEKVGSGLIVNKGNDEAVAKFSTAINELKADGTLKKLGEQFFGKDISVQ

SEQ ID NO: 40 - protein, 63 aa, Neisseria meningitidis
MNTVKEYTAVRERLLNAADYLEEVRKDRKTGNIASVEFVPPKIGARGYGKFKVRYKTLVAVDL

SEQ ID NO: 41 - protein, 325 aa, Neisseria meningitidis
MCVLLQLFSCVSRLIISFYGSKRFMDILDKLVDFAQLTGSVDVQCLLGGQWSVRHETLQREGLVHIVTSGNGYLCIDGETSPRPVSTGDIVFFPRGLGHVLSHDGKCGESLQPDMRQHGAFTVKQCGNGQDMSLFCARFRYDTHADLMNGLPETVFLNIAHPSLQYVVSMLQLESEKPLTGTVSVVNALSSVLLVLILRAYLEQDKDVELSGVLKGWQDKRLGHLIQKVIDKPEDEWNVDKMVAAANMSRAQLMRRFKSRVGLSPHAFVNHIRLQKGALLLKKNPDSVLSVALSVGFQSETHFGKAFKRQYHVSPGQYRKEGGQK

SEQ ID NO: 42 - protein, 420 aa, Neisseria meningitidis
VQATEALRRVDGSTEEKIIRRAEMIDRNRMLRDTLERVRAGSFWLWVAAATFAFFTGFSGTYLLMDNQGLNFFLVLAGVLGMNTLMLAVWLAMLFLRVKVGRFFSSPATWFRGKDPVNQAVLRLYADEWRQPSVRWKIGATSHSLWLCTLLGMLVSVLLLLLVRQYTFNWESTLLGDSSSVRLVEMLAWLPAKLGFPVPDARAVIEGRLNGNIADARAWSGLLVGSIVCYGILPRLLAWVVCKILLKTSENGLDLEKPYYQAVIRRWQNKITDADTRRETVSAVSPKIVLNDAPKWAVMLETEWQDGEWFEGRLAQEWLDKGVAANREQVAALETELKQKPAQLLIGVRAQTVPDRGVLRQIVRLSEAAQGGAVVQLLAEQGLSDDLSEKLEHWRNALAECGAAWLEPDRAAQEGRLKDQ

SEQ ID NO: 43 - protein, 205 aa, Neisseria meningitidis
VVAVDIVCGPLLTLILASPKKKTKARMVDFSMVGIIQLAALVYGLHSVSLARPVIEAFEKDRINVVTAAEVAVEDLHKAPEGLQSLSWFGIRRIALKEPEDADEKNKTLDLSLKGIEPSMRPDRWLPYSDKEAEEIRKHLKPLKVLADARKTTVADILKQAGLAEGEELYYLPFTSSRQKEWIVITDKEGNTKGYAPIDGFIITP

SEQ ID NO: 44 - protein, 375 aa, Neisseria meningitidis
MTHIKPVIAALALIGLAACSGSKTEQPKLDYQSRSHRLIKLEVPPDLNNPDQGNLYRLPAGSGAVRASDLEKRRTPAVQQPADAEVLKSVKGVRLERDGSQRWLVVDGKSPAEIWPLLKAFWQENGFDIKSEEPAIGQMETEWAENRAKIPQDSLRRLFDTVGLGGIYSTGERDKFIVRIEQGKNGVSDIFFAHKAMKEVYGGKDKDTTVWQPSPSDPNLEAAFLTRFMQYLGVDGQQAENASAKNPTLPAANEMARIEGKSLIVFGDYGRNWRRTALALDRIGLTVVGQNTERHAFLVQKAPNESNAVTEQKPGLFKRLLGKGKAEKPAEQPELIVYAEPVANGSRIVLLNKDGSAYAGKDASALLGKLHSELR

SEQ ID NO: 45 - protein, 335 aa, Neisseria meningitidis
MSTFFQQTAQAMIAKHIDRFPLLKLDQVIDWQPIEQYLNRQKTRYLRDHRGRPACPLLSMFKAVLLGQWHSLSDPELEHSLITRIDFNLFCRFDELSIPDYSTLCRYRNWLAQDDTLSELLELINCQLTEKGLKVEKASAAVIDATIIQTAGSKQRQAIEVDEEGQVSGQTTPSKDSDARWIKKNGLYKLGYKQHTRTDAEGYIEKLHITPANAHECNHLSPLLEGIADGTTVYADKGYDSAENRQHLKEHQLQDGIMRKARRNRPLSEAQTKRNRYLSKTRYVVEQSFGTLHRKFRYARAAYFGLIKVSAQSHLKAMCLNLLKAANRLSVPVAA

SEQ ID NO: 46 - protein, 318 aa, Neisseria meningitidis
MNTAAIYRQYQTYVRSDKSGWALDGCSDSALIAQAKQPGLHLEMCINRFDSGITLSRMRGGGTGAFPTEIHNFSHNCALFVMVSGQNRLQMGGREYRPSAGEIWLVRGELADVSETLLPDNSGMCALHLDFSLEKLRRWHDEGLLDERLFSPQTIGRFALQRLAQNAAALTAAACPLLQRPFESDGFGLLADEAAALELSARLLRFTFRRHDNGYRRRRIDEAADILQHEFARPLTIAEIARRVGLNECYLKRYFKAQTGETVAGCLRRLRLEHALALIESGSTVQAAMHFCGYRHAGRFNEAFRRHYGFLPSDVKKC

SEQ ID NO: 47 - protein, 268 aa, Neisseria meningitidis
MKKTLTLLAVSALFAASAHAHRVWVETAHTHGGEYLKADLGYGEFPELEPIAKDRLHIFSKPMQLVTEKGKENMIQRGTYNYQYRSNRPVKDGSYLVIAEYQPTFWSKNKAGWKQAGIKEMPDASYCEQTRMFGKNIVNVGHESADTAIITKPVGQNLEIVPLDNPANIHVGERFKVRVLFRGEPLPNATVTATFDGFDTSDRSKTHKTEAQAFSDSTDDKGEVDIIPLRQGFWKANVEHKADFPDQSVCQKQANYSTLTFQIGHSHH

SEQ ID NO: 48 - protein, 210 aa, Neisseria meningitidis
MRKTKTEALKTKEHLMLAALETFYRKGIARTSLNEIAQAAGVTRGALYWHFKNKEDLFDALFQRICDDIENCIAQDAEDAEGGSWAVFRHTLLHFFERLQSNDIYYKFHNILFLKCEHTEQNAAVIAIARKHQAIWREKITAVLTEAVENQDLADDLDKETAVIFIKSTLDGLIWRWFSSCERFDLGKTAPRIIGIMMDNLENHPDLRRK

SEQ ID NO: 49 - protein, 281 aa, Neisseria meningitidis
MKNKTSSLLLWLAAIMLTACSPNKEDKTKETGASAASSPASAASSSAPQTDLQPAASAPDNVKQAESAPPSNCTDLHPATGIDDLMQQIAEHIDSDCLFALSHHELETRFGLPDSGYDNIQRLLFPDIRPEDPDYHQKIILAIEDLRYGKRTISRQAQDALMEQERRLREATLLLTQGSEETRGQGEEPKRTRYFEVSATPAYSSRHNNGLGGNFQYIGQLPGYLKIHGEMLENQSLFRLSNRERNPDKPFLDIHFDENGKITRIVVYEKNIYFNPNLGRR

SEQ ID NO: 50 - protein, 450 aa, Neisseria meningitidis
MGAFRNARLHSNNVYLIENNVFGTTCARVGCMPSKLLIAAAEARHHALHTDPFGVHLDKDSIVVNGEEVMQRVKSERDRFVGFVVADVEEWPADKRIMGSAKFIDEHTVQIDEHTQITAKSFVIATGSRPVILPQWQSLGNRLIINDDVFSWDTLPKRVAVFGPGVIGLELGQALHRLGVKVEIFGLGGIIGGISDPVVSDEANAVFGEELKLHLDAKTEVKLDADGNVEVHWEQDGEKGVFVAEYMLAAVGRRPNVDNIGLENINIEKDARGVPVADPLTMQTSIPHIFIAGDASNQLPLLHEAADQGKIAGDNAGRYPNIGGGLRRSTIGVVFTSPQIGFVGLKYAQVAAQYQADEFVIGEVSFKNQGRSRVMLVNKGHMRLYAEKATGRFIGAEIVGPAAEHLAHLLAWAHQMKMTVPQMLDMPFYHPVIEEGLRTALRDADAKLKA

SEQ ID NO: 51 - protein, 33 aa, Neisseria meningitidis
VAEHRAPFANLSASHFTTTILKIKDCLCLMKKR

SEQ ID NO: 52 - protein, 311 aa, Neisseria meningitidis
MSVLIIAEHDNKQLNPATLHAVTAAAKLGKVDLLVAGNGASSVVEFAKQVAGVEKVLVADAAHYAEGLAEELAPLVVKLAADYRYVAATATTFGKNLLPRVAALLDVPQISDLTEIVDNTTFVRPIYAGNAFETVQANAEKLVLTFRATAFDAVAAQGGNAEVINVEATPAQNLSRFVNRQLSHSDRPELTQAKVIVSGGRALGSAEKFNEVLTPLADVLGAAIGASRAAVDAEYAPNDAQVGQTGKVVAPQLYFAIGISGAIQHVAGMQDSKVIVAINKDADAPIFNVADYGLVGDLFEIVPQLTEALKN

SEQ ID NO: 53 - protein, 114 aa, Neisseria meningitidis
MIIEHNGNIHKIARMTGNKNNFLEIILSDIHENIKIKPLTIKVKGENVINILPEEVSFYVKQGVDLIYEKYKRKFFISEISFCQSDSRPSSIYAFLTFHLLEDIIKNESPSNYT

SEQ ID NO: 54 - protein, 146 aa, Neisseria meningitidis
MIKETLMRPIFLSFVLLPILITACSTPDKSARWENIGTISNGNIHTYINKDSVRKNGNLMIFQDKKVVTNLKQERFANTPAYKTAIAEWEIHCNNKTYRLSSLQLFDTKNTEISTQSYTASSLRPMSILSGTLTEKQYETVCGKKL

SEQ ID NO: 55 - protein, 241 aa, Neisseria meningitidis
MRIPLLAPDNYAFPDPAYALAWCDGLVGVSGDLDAGRLLEAYRNGVFPWFSRDGWFFWYAVGPRAVIVPERLHVPRSLAKTLRNGSYRVAVNGCFAEVVAHCAAAARPNQDGTWIAPEFQTAYLKLHEMGHAHSFECHYPDESGETRLAGGFYGVQIGRVFYGESMFALQPDASKIAFACAVPFLADLGVELIDCQQDTEHMRRFGSELLPFADFAERLRMLNAVPLKEEIGRREVVCKGL

SEQ ID NO: 56 - protein, 426 aa, Neisseria meningitidis
MYLFVASMIFIFVNQYIDVVSRVRAAWNRAEDRYFPSLHKACCKPKIGRVIVQNQGCIMSLYPIYNFSAGPAVLPEAVLETARQEMLDYNGTGFPVMAMSHRSEMFLSILHHAEQDLRQLLKVPDNYKILFLQGGATTQFNMAAMNLAHGFRTADAVVTGNWSRIAYEQMSRLTDTEIRLAAHGGEQFDYLDLPPVETWDVAPDSAFVHFAVNETVNGLQYREVPRLSEGMPPLVCDMSSEILSREFDVADYGLIYAGAQKNIGPAGVTVVIVREDLLERCPNDIPDVFNYRSHLNREGMYNTPSTYAIYMSGLVFRWLQAQGGVKKIEAVNRLKAQTLYETIDGSGGFYINRIRPNARSKMNVVFQTGDEELDRRFVLEAELQGLCLLKGYKTVGGMRASIYNAMPLEGVRALADFMRDFQRRYG

SEQ ID NO: 57 - protein, 371 aa, Neisseria meningitidis
MLKFTLHKKDGYARRGTLELNHGKIETPVFMPVGTYGSVKAMNPQNLHDIKAQIILGNTYHLWLRPGLEVIGQFGGLHGFIGWDKPILTDSGGFQVFSLSDMRKLTEEGCTFKSPINGDKLFLSPEISMKIQTVLNSDIAMQLDECTPGEATREQARKSLQMSLRWAERSKKAFEDLKNPNALFGIVQGAMYEDLREESLRGLEQFDFPGLAVGGLSVGEPKPEMYRMLRAVGPILPEHKPHYLMGVGTPEDLVYGVAHGIDMFDCVMPTRNARNGWLFTRFGDLKIKNAKHKLDKRPIDESCTCYACQNFSRAYLHHLHRAGEILGAQLNTIHNLHFYQVIMAEMRDAIEQGKFADWQAQFHENRARGTD

SEQ ID NO: 58 - protein, 514 aa, Neisseria meningitidis
MMHDCCPKCGIYIAFHRQDLGKPNLQRFTELKYCWNCHYDLSNSPCENVIFFNDEIRLQWQNWLNQIANLDYLSNTIRSRIKNIAPQIKIAKRLSHKAAEMKFSPLQGSFPNADYPLSVVQIDHTKLDIILVDDIYRKPIGRPWITLAIDVFSRMVTGFYVSFDPPSALSTGLCLAHSILSKESWLAKHGVKGRWPVWGLPRKIHLDNAKEFRGKVLEKACKQYGIEIEWRPVARPHFGGHIERLLGTILDEVHGLTGTTFANTQQRKDYASESKAALTLTEFETWLTLFICDVYHQRTHSGLGISPLAKWKSGVLGDDVSLGTGLPDKVVDETLLRLTFMPFEMRTVQQYGVVIHKITYWHDVLRPWIAATNPTNPRQARQFIFRIDPRDLSVIWFYDPDLSMYFPIPYRNSSNPVISIWELREIQRQLKNEQKQNIDENMIFTAYGRMRELEQQAQGKTKAIRRAQQRRQLDQRTRASLPMSQIDSRNIISSENEENMFDDIQPFDDLDDLS

SEQ ID NO: 59 - protein, 198 aa, Neisseria meningitidis
MKITHCKLKKKVQKELLRFFVLEVTARSAADILGIHPNSAALFYRKIRTVINHHLALAADEVFEGPVEPDESDFGGRRKGRRGRGAAGKVVVFGILKRNGRVYTVVVDNAKSETLLPVIKKKIMPDSIVYTDSLSSCDKLDVSGFIHYRINHSKEFADRQNHINGIENFWNQAKRVLRKYSGLARTFPRIGSATGCAD

SEQ ID NO: 60 - protein, 81 aa, Neisseria meningitidis
MAAPPPTKKTIRNASDRSGLFSGESAASEHTAHAHIDLPSLAHRVHRRPLRLKIKLPSVVGITTQKNELLDIPMFLYVFIW

SEQ ID NO: 61 - protein, 484 aa, Neisseria meningitidis
LRYNPPFHHSATHTVKILILGNGQVGSTVAQNLAAIPNNDVTVIDIDEKALQETGSRLDVQTVFGNGASPFTLERAGAEDADLLLALSRSDETNIVACKVAADLFNIPGRIARVRSSEYLEYLSPKLENNENGSLSIFGITETISPEQLVTEQLAGLIDCPGALQVLRFADDRVRMVIIQARRGGLLVGRSIADIAQDLPDGADCQICAVYRNNRLIVPAPQTVIIEGDEILFAAAAENIGAVIPELRPKETSTRRIMIAGGGNIGYRLAKQLEHAYNVKIIECRPRRAEWIAENLDNTLVLQGSATDETLLDNEYIDEIDVFCALTNDDESNIMSALLAKNLGAKRVIGIVNRSSYVDLLEGNKIDIVVSPHLITIGSILAHIRRGDIVAVHPIRRGTAEAIEVVAHGDKKTSAIIGRRISGIKWPEGCHIAAVVRAGTGETIMGHHTETVIQDGDHIIFFVSRRRILNELEKLIQVKMGFFG

SEQ ID NO: 62 - protein, 302 aa, Neisseria meningitidis
LTLYVSSCVLKHSNSAIIPFFRPYRQRRSIMNTIFKISALTLSAALALSACGKKEAAPASASEPAAASSAQDDTSSIGSTMQQASYAMGVDIGRSLKQMKEQGAEIDLKVFTEAMQAVYDGKEIKMTEEQAQEVMMKFLQEQQAKAVEKHKADAKANKEKGEAFLKENAAKDGVKTTASGLQYKITKQGEGKQPTKDDIVTVEYEGRLIDGTVFDSSKANGGPVTFPLSQVIPGWTEGVQLLKEGGEATFYIPSNLAYREQGAGDKIGPNATLVFDVKLVKIGAPENAPAKQPAQVDIKKVN

SEQ ID NO: 63 - protein, 233 aa, Neisseria meningitidis
MSARENILAKLKKADALPMEEPAVFDYYREKGVSWDSEAERLKHWAAAMRAVKTEIYWVTKSNWMQVFREAAEGKGLKNILLPLATEHGQIARAALADSNIEPIAFEREIDTWKTEFFTNISAGFSGAQCGIARTGTLMLFSSPEEPRTLSLVPPVHFCLFDTSKMYNEFHNAVEGEKLVENGMPTNVFLISGPSKTADIQLTLAYGAHGPRDLVILAILPDHISPADLEENA

SEQ ID NO: 64 - protein, 296 aa, Neisseria meningitidis
MSVLINKDTKVLVQGFTGKNGTFHSEQALAYGTKVVGGVTPGKGGQTHLNLPVFNTMKEAVKETGADASVIYVPAPFVLDSIVEAVDSGVGLVVVITEGVPTLDMLKAKRYLETNGNGTRLVGPNCPGVITPGECKIGIMPGHIHTPGRIGIISRSGTLTYEAVAQTTKLGLGQSTCIGIGGDPIPGMNQIDALKLFQEDPDTDAIIMIGEIGGTAEEEAAEYIQSNVTKPVVGYIAGVTAPKGKRMGHAGAIISGGKGTAEEKFAAFEKAGIAYTRSPAELGTTMLEVLKAKGLA

SEQ ID NO: 65 - protein, 201 aa, Neisseria meningitidis
MTIYFKNGFYDDTLGGISEGAVAVRAEEYAALLAGQAQGGQIAADSDGRPVLTPPRPSEYHEWDGKKWEIGEAAAAARFAEQKTATAFRLAAKADELKNSLLAGYPQVEIDSFYRQEKEALARQADNNAPTPMLAQIAATRGVELDVLIEKVIEKSARLAVAAGAIIGKRQQLEDKLNTIETAPGLDALEKEIEEWTLNIG

SEQ ID NO: 66 - protein, 122 aa, Neisseria meningitidis
MRHYEIVFIVHPDQSEQVPAMVERYKTMIAEANGKIHRLEDWGRRQLAYPINKIHKAHYVLMNIETTPEVVEELETAFRFNDAVLRHLTIKTKHAVTEASPMLGGEKAKNLLSGASEEAVAQ

SEQ ID NO: 67 - protein, 275 aa, Neisseria meningitidis
MKKTAYAFLLLIGFASAPAFAETRPADPYEGYNRAVFKFNDQADRYIFAPAARGYRKVAPKPVRAGVSNFFNNLCDVVSFGSNILRLDIKRASEDLVRVGINTTFGLGGLIDIAGAGGIPDNKNTLGDTFASWGWKNSNYFVLPVLGPSTVRDALGTGITSVYSPKNIVFRTPVGRWGTTAVSAVSTREGLLDLTDSLDEAAIDKYSYTRDLYMKVRARQTGATPAEGTEDNIDIDELVESAETGAAETAVQEDSVSETQAEAAGEAETQPGTQP

SEQ ID NO: 68 - protein, 433 aa, Neisseria meningitidis
MPSETARPLYADTCAAHTLVWFRQNLRIRDNAALCAAVAEGLPVIGIWIDDAETDNPRRAAFYRQSAAELAQGLAGRGIPLYTAASPAELVRLAVRLNIRAVIADESHTFADKLADNALWHELDKHGIALTFVNDRAVFGKTDLIPDGGTAHTDFDRYREVWLDRFSKQPPAGPDLFAAYRQPFPENLSAPPPAALSDGIFLPQNSGETAAWRQWRRFLEQADSYSVLKDFPSRKHTSLMGAYLSAGCISPRLLARESLERRLNAWADNIIRRDFFLQLALQHTDDDPSDGNPEHTLRLTLWQQGQTGIPIIDAAMRCLHKTGSLHPALRRLSADFFCHVLNLPRREGEIWFARQLTDFDAAINQGNWWLAASRHTCPDIAAASYRTDPDGTFIKRHIPELAHLSADTVHTPWRFACSVDTHGYPAYPVAGIP

SEQ ID NO: 69 - protein, 403 aa, Neisseria meningitidis
MIIDVKVPMLSESVSEGTLLEWKKKVGEAVARDEILIDIETDKVVLEVPSPQAGVLVEIVAQDGETVVADQVLARIDTAATAAAEAPAAATAAAEAPAAAPAEAAPAAAPAAAQNNAAMPAAAKLAAESGVDVNALQGSGRDGRVLKEDVQNAAAKPAAAAAPAVALPAGARPEERVPMSRLRARVAERLLASQQENAILTTFNEVNMKPIMDLRAKYKEKFEKEHGVKLGFMSFFVKAAVAALKKYPVVNASVDGKDIVYHGYFDIGIAIGSPRGLVVPILRDADQMSIADIEQAIVDYAKKAKDGKIAIEDLTGGTFSITNGGTFGSMMSTPIINPPQSAILGMHATKERAVVENGQVVVRPMMYLALSYDHRIIDGREAVLTLVAIKDALEDPARLLLDL

SEQ ID NO: 70 - protein, 160 aa, Neisseria meningitidis
MTQQRQLPSHELIMSELMMPDTANFSGNVHGGELLLLLDQVAYSCASRYSGNYCVTLSVDKVLFKEPIHIGDLVTFYAAVNYTGRTSMEIGIRVEAQNIRTGEVRHTNSCYFTMVAVKDGKPVPVPPLEILTDRQRCRYEKAKKRRDISLQASEDMSCGC

SEQ ID NO: 71 - protein, 189 aa, Neisseria meningitidis
MEILTQLGYRVIQLPAGIDESVKAGETPFAYVQRMAEEKNRTALTLFCETNGTMPDFPLITADTCVVSDGIILGKPHSQAEAIEFLNRLSGKQHTVLTAVCIHYRGKTSSRVQTNRVVFKPLSSEEISAYVQSGEPMDKAGAYAVQGIGGIFIQSIEGSFSGIMGLPVYETVSMLQDLGYRTPLSALKP

SEQ ID NO: 72 - protein, 296 aa, Neisseria meningitidis
MNPKSPLFLRLSDRLDVYLRLMRADKPIGTLLLLWPTYWALWLASDGIPDLAVLAAFTIGTFLMRSAGCVINDFADRDFDGAVERTKNRPFAQGRVKKKEALLLTAFLCLLAALCLIPLNHLTWLMSLPALFLALTYPFTKRFFPIPQLYLGLAFSFGIPMAFAAVGNSVPVEAWILFTANVLWTLAYDTVYAMADKEDDLKIGIKTSAVTFGRYDIAAVMLCHGGFTLLMAVLGAVIGAAWAYWTAIPIVLLLQYRQYAAIKSRVRQICFETFLANNRIGWVWFTAIFAHTFFAK

SEQ ID NO: 73 - protein, 159 aa, Neisseria meningitidis
MSKHTYPITPAVRVLRENGIEFEPFTYAYEEHGGTAQFARLFGKDEHLVIKTIVLQDENGKGLIVLMHGDKQISTRNLARHLGAKHIEPATPAQANKWTGYLVGGTTPFGIRTKLDIYVEQSVMDLDIIYINGGKRGFIIGIRPGDLNILNPKTIQAAV

SEQ ID NO: 74 - protein, 455 aa, Neisseria meningitidis
MPDLHTEFSRLLPADEIAELSPTLLKDQRNRFTSAPDIILQPRSVESVQTIMRFCYEHRIPVTPQGGNTGLCGAAVSENGVLLNLSKLNRIRSINLSDNCITVEAGSVLQTVQQAAEASNRLFPLSLASEGSCQIGGNIACNAGGLNVLRYGTMRDLIIGLEVVLPNGELVSHLHPLHKNTTGYDLRHLFIGSEGTLGIITAATLKLFARPSDKATAWVGIPDIESAVRLLTETQAHFAERLCSFELIGRFAAELSSEFSKLPLPTHSEWHILLELTDSLPDSNLDDRLVEFLYKKGFTDSVLAQSEQERIHMWALRENISASQRKLGTSIKHDIAIPIGRVADFVRRCAKDLEQNFKGIQIVCFGHLGDGSLHYNTFLPEILSNEVYRYENDINDAVYRNVLACNGTIAAEHGIGIIKKQWLDKVRTPAEIALMKSIKQHLDPYNIMNPGKLLP

SEQ ID NO: 75 - protein, 55 aa, Neisseria meningitidis
MVDEKLAENRKRYEQKRVIKKVSFNAETEKELLEYAQNIDFSQWVKSIIKEKIKK

SEQ ID NO: 76 - protein, 292 aa, Neisseria meningitidis
LTVRTKKTAHYTLFHSDRKPNMTTLKPALPAYLDNIRIILTRTSHPANIGSAARAMKTMGLHKLTIVAPNLMATPMTENPPVFDPEHPQSFKLPEESFILASGAADVLENATIAASLDEALADTTIACALTSRRREITAPLQTPRDLVSELLQTANRGEKVALVFGNETFGLSIEEVQACNRLMTINGNPDYFSLNLAQAVQVVCYEIFSQTGSPMTHLQQEDHAATHEQIKGMVAHMESVMNDIGFFNRRNGERLMRRMQSLFGRANTQTEDIDILRGFFNTVSHRIHKKD

SEQ ID NO: 77 - protein, 152 aa, Neisseria meningitidis
MPMAKPLKYPVSALVVLYSGDGGILLIERTHPEGFWQSVTGSLEPGETVAQTARREVWEETGILLADGQLQDWHDSTVYEIYHHWRHRYPKGVFENREHLFSAEIPRDTPIALQPEEHVSYGWFDMEEAAEKVFSPSNRRAILELGRFLGKR

SEQ ID NO: 78 - protein, 367 aa, Neisseria meningitidis
MLILQAERDSLLKPLQAVTGIVERRHTLPILSNVLIEGKGGQTKLLATDLEIQIDTAGPEGGADDFRITTNAKKFQDILRALPAGALVSLDWDDSRLTLKAGKSRFALQTLPAADFPMMNVGEDISATFSLEQERFKTMLSQVQYSMAVQDIRYYLNGLLMQVEGSQLRLVATDGHRLAYAACAIDADLPRAEVILPRKTVLELFKLLNNPDDPIQIELLDKQVRFQCNGTTIVSKVIDGKFPDFNRVIPLDNDKIFVLSRAELLGALERVSILANEKFRGARLFLQPGLLSVVCSNNEQEEAREEIEIAYQGGELEVGFNIGYLMDVLRNIHSDDMQLAFGDANRSTLFTVPNNPNFKYIVMPMRI

SEQ ID NO: 79 - protein, 431 aa, Neisseria meningitidis
VIAMIYIVLFLAAVLAVVAYNMYQENQYRKKVRDQFGHSDKDALLNSKTSHVRDGKPSGGPVMMPKPQPAVKKTAKPQDPAMRNLQEQDAVYIAKQKQAKASPFKTEIETALEESGIIGNSAHTVSEPQTGHSAPKPADAPAKPVPVPQTPAKPLITLKELSKVELPWFDVRFDFISYIALTEAKELHALPRLSNRCRYQIVGCTMDDHFQIAEPIPGIRYQAFIVGIQAVSRNGLASQEELSAFNRQVDAFAQSMGGQTLHTDLAAFIEVASALDAFCARVDQTIAIHLVSPTSISGVELRSAVTGVGFVLEDDGAFHYTDTSGSTMFSICSLNNEPFTNALLDNQSYKGFSMLLDIPHSPAGEKTFDDLFMDLAVRLSGQLNLNLVNDKMEEVSTQWLKDVRTYVLARQSEMLKVGIEPGGKTALRLFS

SEQ ID NO: 80 - protein, 716 aa, Neisseria meningitidis
MLTDLEKNAIRDHYQNIGKNLPGFRPRASQREMIAAVANAFSRTLAREEGGEPPKREGESIAVIEGPTGVGKSLAYLLAGGIMAQTRGKRLIVSSATVALQEQLVDRDLPFLVEKSGLELTFALAKGRGRYLCPYKLYQLTQSNAQQNLLGFEAPAVLWDSKPKPEELKLLRDIADEFSARRFNGDRDTWPEKIDDAIWLKVTNDRHGCLKTACPNRPECPFYLARDVLETVDVVVANHDLLLADISMGGGVILPAPENSFYCIDEAHHLPKKALSRFAAEHSWNIAVWTLEKLPQLTGKIAALTDKAELANLADEAAASLLDSLHEWQFHLAEEPSLSLGVSENDRRTNSEPTWLWEDGKIPEGLETTVSNTAIAARSLLKHVVGLNDALSAARREKEQDGALLDRLTGEFGIFIVRIEQISAVWDLLSTVPLEGEEPLAKWITRRADDKNDYIFNASPISSASHLANSLWRRAAGAVLTSATLQSLGNFNLMLRQTGLQWLPETTTLALKSPFDFEKQGELYIPPIYASPKDPEAHTAAVIEWLPKLISPTEAIGTLVLFSSRKQMQDVALRLPGDYLPLLLVQGELPKAVLLQKHHRAIEEGKASIIFGLDSFAEGLDLPGAACVQVIIAKLPFAMPDNPIEKTQNRWIEQRGGNPFIEITVPEAGIKLIQAVGRLIRTEQDYGRVTILDNRVKTQRYGQQLLAGLPPFKRIG

SEQ ID NO: 81 - protein, 290 aa, Neisseria meningitidis
VKGLDYCRQKAEESRSSFLSGFRFLTQEKRDAVTILYAFCRELDDVVDECSNPDVAQATLNWWRGDLDKVFGGAMPEHPVNQALRQVKETFKLPKYELEALIDGMQMDLVQARYGSFEELKLYCHRVAGVVGYLIARILGFSDGKTLQYADKMGLALQLTNIIRDVGEDARRGRIYLPMEEMQRFDVPASVILQCSPTGNFAELMAFQIKRARETYREAVSLLPAADKKAQKVGLVMAAVYYELLNEIDRDGAQNVLKYKIALPSPRKKRIALKTWLFGFKPRPGTPERA

SEQ ID NO: 82 - protein, 428 aa, Neisseria meningitidis
MSAIVDIFAREILDSRGNPTVECDVLLESGVMGRAAVPSGASTGQKEALELRDGDKSRYSGKGVLKAVEHVNNQIAQALIGIDANEQSYIDQIMIELDGTENKGNLGANATLAVSMAVARAAAEDSGLPLYRYLGGAGPMSLPVPMMNVINGGEHANNSLNIQEFMIMPVGAKSFREALRCGAEIFHALKKLCDSKGFPTTVGDEGGFAPNLNSHKEALQLMVEATEAAGYKAGEDVLFALDCASSEFYKDGKYHLEAEGRSYTNAEFAEYLESLVNEFPIISIEDGMDENDWEGWKLLTEKLGGKVQLVGDDLFVTNPKILAEGIEKGVANALLVKVNQIGTLSETLKAVDLAKRNRYASVMSHRSGETEDSTIADLAVATNCMQIKTGSLSRSDRMAKYNQLLRIEEELAEAADYPGKAAFYQLGK

SEQ ID NO: 83 - protein, 122 aa, Neisseria meningitidis
MRHRNGNRKLNRTSSHRAAMLRNMANSLLTHEAIVTTLPKAKELRRVVEPLITLGKKPSLANRRLAFDRTRDRDVVVKLFGDLGPRFTARNGGYVRVLKYGFRKGDNAPLALVELVDKPAAE

SEQ ID NO: 84 - protein, 215 aa, Neisseria meningitidis
MKGVYFVSGIDTDIGKTVATGVLAKQLLQQGKSVITQKPVQTGCQNIADDIAVHRKIMGKPMQEADKQGLTMPEIFSYPASPHLAARLDGRALDLDKIRTATQQLAAQYEIVLVEGAGGLMVPLTENLLTIDYIRQQGYPVILVTSGRLGSINHTLLSFAALKQYGIRLHSLVFNHIHDSRDAHIAQDSLNYLKCRLKADFSEAEWMELAKTDAV

SEQ ID NO: 85 - protein, 426 aa, Neisseria meningitidis
MSISIFLKRVIFRHHERQIMSAQSQNNHTSPLVVLTTLFFMMGFITCMNDILIPHLKEIFDLSYVQAMLIQFCFFTAYAVMSIPMGAFVGKVGYKNGVIGGFLLTAVGCLLFYPAAGSHSYAVFLGALFILASGVTLLQVAGNPYVTLLAKPGKESATLTLVQAFNALGTTIAPQIGAFLILADATQTVSKAEQISSVQIPYLGLAGLLIILAVFVKMIRLPDARKIAAEESAHNHDGKTSVWQYKHLVFGTAGIFCYVGAEVSIGSLMVNVLGYLKGLDHASAAHYLSFYWGGAMVGRFLGSAVMAKFAPNRYLAFNASAAVVLLAVAMATGSGNADVAMWSLLAIGFFNSIMFPTIFSLATKGLGKFTNAASGVLCTAIVGGAVVPVVQGWVADTYTLMSSFVVSVICYLYIVFFAVYGYRADK

SEQ ID NO: 86 - protein, 67 aa, Neisseria meningitidis
MGSFSLTHWIIVLIIVVLIFGTKKLRNVGKDLGGAVHDFKQGLNEGTDGKEAQKDDVIEHKKDEDKA

SEQ ID NO: 87 - protein, 105 aa, Neisseria meningitidis
MVVRGGIYLVSLDPTVGSEIKKTRPCVVVSPPEIHNYLKTVLIVPMTSGSRPAPFRVNVRFQDKDGLLLPEQIRAVDKARLVKHLGNLDNSTAEKLFAVLQEMFA

SEQ ID NO: 88 - protein, 585 aa, Neisseria meningitidis
LIVMIHYKITPSPLDHEWHILLTFTQDDDLPIEISLPNWVPGSYLIRDFSRHITSIHASCNGTSMPLEQIAKNRWHAAAVRGEWQIRYTVYAFDLSVRGSFLTTERGFFDGSCLFLKVEGTETLPHRLELTGIPSEWRIATTLPETGRFVFQAASYAELIDRPVEMGLIEFLDFEAAGIPHTIALSGIYPDFDRNRLVSDIKKICETELAVFSSPAPFQKYLFLLHVGDHIYGGLEHTDSTALLADRHSLPPYGMTDADDTYTTLLGLFSHEYFHAWNVKSIKPAAFVPYDLDKENYTEQLWAFEGITSYYDDLFLARSRTISPESYLNLLAQGITRVQQTRGRLRQTLAESSFTAWNKFYKPDENSPNAIVSYYQKGALAALCLDLIIRNRSNGRHSLDTLMDKLYREWRDTHSGIPEKHWQIRCQEITGLDLEDFFQKALYSTEDLPLAECLATAGVGLTFLPLPRQHGGGYAEHICPVPPAGDFGARFKQNTDHIVLTHVFNSGSAESAALCPQDKIIALDGYACTDFTAQWARYHVNAKINIHFFRAGILRQTVLTVQAAAADTAILHITDRNLLDNWLFG

SEQ ID NO: 89 - protein, 887 aa, Neisseria meningitidis
MSTQLHDVDPIETQEWLDALSSVLEYEGGERAQYLLENLVKYCRDKGVRMPHGTTTPYLNTVSVENEKGIPGDQNIEHRIRAFVRWNAAAIVLRAGKKDLELGGHIASFQSAATMYEVGFNHFWKAKGEGEEGDLVFFQGHVAPGIYARAFVEGRLTEDQLNNFRQEVDGHGLPSYPHPHLLPDFWQFPTVSMGLGPIMAIYQARFLKYLESRGLAKTKGRKVWCFCGDGEMDEPESQGAIALAAREGLDNLIFVINCNLQRLDGPVRGNGKIIQELEGNFAGAGWNVVKVIWGRRWDRLLAKDKDGILRQRMEECLDGDYQTYKSKDGAYVREHFFNTPELKTLVADMTDEQLWALNRGGHDPQKVYNAYDRAANHADGKPTVILAKTIKGYGMGASGEGQNVAHQAKKMDKASLKQFRDRFDIPVTDEQIESGDLPYLTFAPDTEEYKYLHARRDALGGYLPQRKPTQEVLEVPELSAFDAQLKSSGEREFSTTMAFVRILSTLLKDKKIGKRVVPIVPDESRTFGMEGMFRQYGIWNPKGQQYTPQDKDQLMFYKESVDGQILQEGINEPGAMADWIAAATSYANSNFAMIPFYIYYSMFGFQRVGDLAWAAGDMHARGFLLGGTAGRTTLNGEGLQHEDGHSHIQADLIPNCVSYDPTFQYEVAVIVQDGLRRMYANNEDVFYYITLMNENYTHPDMPEGAEQDILKGMYLLKAGGKGDKKVQLMGSGTILQEVIAGAELLKADFGVEADIWSCPSFNLLHRDAVEVERFNRLHPLEAEKVPFVTSKLQGHDGPVIAATDYIRSYADRIRAYIPNDYHVLGTDGFGRSDSRANLRRFFEVDRYNVAVAALSALAEQGKVSKETVQQAIEKYGIKADSAPSWKR

SEQ ID NO: 90 - protein, 385 aa, Neisseria meningitidis
MPAFWLDTEHTARPSEHTGKHTMSHISPIPEILADIKAGKMVIITDAEDRENEGDLLMAAQFVTPEAINFMIKHARGLVCLPMDGEMVEKLGLPMMTQKNGAQYGTNFTVSIEAAHGITTGISAADRALTIQTAVSPTAKPEDIVQPGHIFPLRAQKGGVLVRAGHTEAGVDLAQMNGLIPAAVICEIINDDGTMARMPELMKFAEEHKLKIGTITDLIEYRSRTESLLEDMGNAPVQTPWGEFQQHVYVDKLSGETHLALVKGTPAADTETLVRVHEPFSVMDFIQANPRHSWSLPKALERIQQAESGVVILLHRAEDGASLLDRTLPKGANQAYKWDSKSYGIGAQILVGLNVKKLRVLGQPSSFTGLTGFGLEVVGFEEAEK

SEQ ID NO: 91 - protein, 172 aa, Neisseria meningitidis
MAVFDVVEGDITRLAIDAIVNAANSSLLGGGGVDGAIHRAAGKELLEECRTLGGCRTGEAKITKGYRLPARFVIHTVGPVWFGGKQNEEAKLAQSYANSLLLARKHDLHRIAFPCISTGVYRFPAEAAARIALESLKQTLPQCPAVEKIIFCCFSKTDAEYYRALLAAEQAV

SEQ ID NO: 92 - protein, 77 aa, Neisseria meningitidis
MNRRKIYLLSVALFTLAFMLLVLLGAYLLTVGSKAFAVASFLFAFGALFGQIGSLALYLRHKSLRAAQSATKENRYV

SEQ ID NO: 93 - protein, 370 aa, Neisseria meningitidis
LLIHYILKFRRCFQIARSNSRASAGLFEIKGLESNAKRLNHHCPMRQTGIVRQYGCLKNRKIRMENQRPLLGFALALLAAMTWGTLPIAVRQVLKFVDAPTLVWVRFTVAAAVLFVLLALGGRLPKRRDFSWCSFRLLLLGVAGISANFVLIAQGLHYISPTTTQVLWQISPFTMIVVGVLVFKDRMTAAQKIGLVLLLAGLLMFFNDKFGELSGLGAYAKGVLLCAAGSMAWVCYAVAQKLLSAQFGPQQILLLIYAASAAVFLPFAEPAHIGSLDGTLAWVCFAYCCLNTLIGYGSFGEALKHWEASKVSAVTTLLPVFTVIFSLLGHYVMPDTFAAPDMNGLGYAGALVVVGGAVTAAVGDRLFKRR

SEQ ID NO: 94 - protein, 227 aa, Neisseria meningitidis
MFALLEAFFVEYGYAAVFFVLVICGFGVPIPEDLTLVTGGVISGMGYTNPHIMFAVGMLGVLAGDGIMFAAGRIWGQKILKFKPIARIMTPKRYAQVQEKFDKYGNWVLFVARFLPGLRTAVFVTAGISRKVSYLRFLIMDGLAALISVPVWIYLGEYGAHNIDWLMAKMHSLQSGIFIALGVLAAALAWFWWRKRRHYQLYRAQLSEKRAKRKAEKAAKKAAQKQQ

SEQ ID NO: 95 - protein, 687 aa, Neisseria meningitidis
MMTQTLLIELLTEELPPKALNNLGNHFAAAVAEGLEKAQLVDGAAEFTAYASPRRLAVQVKNVKAVQADQKIVKKGPAVANAMKDGAPTKALEGFARGAGAKIEDLTIVHDGKQDVYAYEYVQTGKPLGELLEDIINAAVKKLPIPKVMRWGSSTFTFVRPVHGLVVLHGGDIVNVSVLGLQSSNQTLGHRFLSNGEITIENADSYAAQMREQGKVVASFAERKAAIQTALEGQARRLNASVAADEALLDEVTALVEWPVVLEAGFEEHFLAVPQECLILTMQQNQKYFPLLDQNGKLMNRFLLVSNLQTEDPSHIIRGNERVLRARLSDAEFFYKQDQKATLESRLPKLSSVVYHNKIGSQAERIERLQSIAAHIAKALGADAAAAERAARLAKADLVTEMVGEFPELQGTMGKYYARLDGETEEIAEAVEQHYQPRFAGDNLPNGKVATAVALADKLETLVGIWGIGLIPTGDKDPYALRRAALGILRMLMQYGLDVNELIQTAFDSFPKGLLNEKTPSETADFMQARLAVLLQNDYPQDIVAAVLAKQPRRLDDVVAKLQAVAAFKQLPEAAALAAANKRVQNLLKKADAALGEVNESLLQQDEEKALFAAAQGLQPKIAAAVAEGNFQTALSELASVKPQVDAFFDGVMVMAEDAAVKQNRLNLLNRLAEQMNAVADIALLGE

SEQ ID NO: 96 - protein, 358 aa, Neisseria meningitidis
MICRKPIGHTPYFDMNKTICRTAALLISGFSYANTVIPDVSPVAQGQHVFINIPQQRLFLYTDGKLTKVYPVAVGRAMTQTNLGEHKIGAKAYNPVWYIPKSIQKERGDGVKTIAAGPDNPLGPVFVRLGDPKLGLGIHGTNAPASVPGVRSHGCVRMKSPDALEFAKTIASGSPASVIYQMAGLNEDADRNLWLAAFRDPYGKNNLDIASLKKSIAQWAKTQGKTIAPEKVDAVLKDRTGSAVCLTCGKNGKMKMPLKSLAWIQGSSSYSQAEVIEQTEETNSAEISETRTPEVPDVHTPEAQPHLNTQSDGTPTAYTEPAADSSPQVETPDQAASEPVDVLFSIDVIRQGNLRLGN

SEQ ID NO: 97 - protein, 217 aa, Neisseria meningitidis
MGLGMEIGKLIVAFLVLINPFSALSLYLDLTNGHSTKERRKVARTAAVAVFAVIAVFALIGGTLLKVLGISVGSFQVGGGILVLLIAISMMNGNDNPAKQNLGAQPDTGQARPARNAGAIAVVPIAIPITIGPGGISTVIIYASAAKTYGDITLIIAAGLVVSAICYAILIVAGKVSRLLGATGLTILNRIMGMMLAAVSVEIIVSGLKTIFPQLAG

SEQ ID NO: 98 - protein, 182 aa, Neisseria meningitidis
VSQNTPIKPWYKHVWPWILMAGPIFVVIASVAMFFVAQQHATDLVTDDYYKDGKHIDIQLHRDEEAVRRHIGVQVLISPDMNAAKVFVGGEFDGKQPLNLLLMHPTRKADDQTVALKPVGSAQNGRAEYEAVFKTLPPTNHWYVRVEDAAGVWRVENKWITSQGNAVDLTPMDKLFNNAGSK

SEQ ID NO: 99 - protein, 397 aa, Neisseria meningitidis
MFFKHIEAAPADPILGLGEAFKAETRPEKVNLGIGVYKDASGATPLVKAVKEAEKRLLESETTKNYLTIDGVADYNAQTQILLFGKDHEIIASRRAKTAQSLGGTGALRIAAEFAKRQLNAQTIWISNPTWPNHNAIAKAVGIQDKPYRYYDAAKHGLDWDGMIEDLSQAQKGDIVLLHGCCHNPTGIDPTPEQWETLAKLSAEKGWLPLFDFAYQGFGNGLEEDAYGLRVFLKHNTELLIASSYSKNFGMYNERVGAFTLVAEDEATAARAHSQVKTIIRTLYSNPASHGANTIALVLENDDLKAQWIAELDEMRGRIKAMRQKFVELLKAKGASQNFDFIIEQNGMFSFSGLTPEQVDRLKNEFAIYAVRSGRINVAGITDDNIDYLCESIVKVL

SEQ ID NO: 100 - protein, 164 aa, Neisseria meningitidis
MNNRHFAVIALGSNLENPAQQVRAALDTLSSHPDIRLKQASSLYMTAPVGYDNQPDFVNAVCTVSTTLDGIALLAELNRIEADFGRERSFRNAPRTLDLDIIDFDGISSDDPRLTLPHPRAHERSFVIRPLAEILPDFILGKHGKVAELSKRLGNQGIRLLPDK

SEQ ID NO: 101 - protein, 358 aa, Neisseria meningitidis
MQEWFQNLFAATLGLGDLGITVGLVVSVIVKIVIILIPLILTVAYLTYFERKVIGFMQLRVGPNVTGPWGLIQPFADVFKLLFKEVTRPRLSNKALFYIGPIMSLAPSFAAWAVIPFNEEWVLTNINIGLLYILMITSLSVYGVIIAGWASNSKYSFLGAMRASAQSISYEIAMSAALVCVVMVSGSMNFSDIVAAQAKGIAGGSVFSWNWLPLFPIFIVYLISAVAETNRAPFDVAEGESEIVAGHHVEYSGFAFALFFLAEYIFMILISALTSLMFLGGWLSPFPQSWGFIGTPSAFWMFVKMAAVLYWYLWIRATFPRYRYDQIMRLGWKVLIPIGFAYIVVLGVWMISPLNLWK

SEQ ID NO: 102 - protein, 335 aa, Neisseria meningitidis
MSTFFQQTAQAMIAKHIDRFPLLKLDQVIDWQPIEQYLNRQKTRYLRDHRGRPACPLLSMFKAVLLGQWHSLSDPELEHSLITRIDFNLFCRFDELSIPDYSTLCRYRNWLAQDDTLSELLELINCQLTEKGLKVEKASAAVIDATIIQTAGSKQRQAIEVDEEGQVSGQTTPSKDSDARWIKKNGLYKLGYKQHTRTDAEGYIEKLHITPANAHECNHLSPLLEGIAEGTTVYADKGYDSAENRQHLEEHQLLDGIMRKACRNRPLSEAQTKRNRYLSKPRYVVEQSFGTLHRKFRYARAAYFGLIKVSAQSHLKAMCLNLLKAANRLSAPAAA

SEQ ID NO: 103 - protein, 397 aa, Neisseria meningitidis
MSDQKNRRNALIGAAFLMATSAIGPGFLTQTATFTQALAASFGFVILLSILLDIGAQLNIWRIVAVSEKQAQDIANQVLPGAGYFLAVLIVMGGLAFNIGNVGGAGLGLNLLTGLSPETGAVISGVIAIGVFLFKEAGKVMDKFAQVMGFVMIALTVYVAWQANPPLADAAVHTFMPEKLDAMAIVTLVGGTVGGYITFAGAHRLLDAGIKGKSALPEVSQSSVRAILIASIMRIVLFLAVLGVVSQGVQLNPDNPASTPFEYAAGYIGLLIFGVVIWAASITSVIGAAYTSVSFFSGLSPSIERNKNKWIIAFIAVSTAVFSTIGKPAQVLVFVGALNGLILPISLGLILIAAYKTKIVGDYKHPLWLTVSGVIVVGLMAVLSAITISKYIGGLFG

SEQ ID NO: 104 - protein, 186 aa, Neisseria meningitidis
MNMKTLLALAVSAVCSVGVAQAHEHNTIPKGASIEVKVQQLDPVNGNKDVGTVTITESNYGLVFTPDLQGLSEGLHGFHIHENPSCEPKEKEGKLTAGLGAGGHWDPKGAKQHGYPWQDDAHLGDLPALTVLHDGTATNPVLAPRLKHLDDVRGHSIMIHTGGDNHSDHPAPLGGGGPRMACGVIK

SEQ ID NO: 105 - protein, 226 aa, Neisseria meningitidis
MIFQTVWFSDMVLSVSWIVLILILAASAPSAFRSLDRYRSALPLCTVIFSAAWCLNASAGGGQLAQMNYHLLAVNLVALMVGTSAALWLAALLMLPYCLLFAGSVGAYPPNALVLILPALVVNRLSRMLVNRLPPNIFIFIFVNGFLASAAGILLTGLVLTGILDAANAFPSEILWTTALPVFILLAWAEAFLSGISTAIFVALKPHWINTFDDNRYLKSDRSIWR

SEQ ID NO: 106 - protein, 1391 aa, Neisseria meningitidis
MNLLNLFNPLQTAGMEEEFDAIKIGIASPETIRSWSYGEVKKPETINYRTFKPERDGLFCAKIFGPVKDYECLCGKYKRLKFKGVTCEKCGVEVTLSKVRRERMGHIELAAPVAHIWFLKSLPSRLGMVLDMTLRDIERVLYFEAFVVTDPGMTPLQRRQLLTEDDYYNKLDEYGDDFDAKMGAEGIRELLRTLNVAGEIEILRQELESTGSDTKIKKIAKRLKVLEAFHRSGMKLEWMIMDVLPVLPPDLRPLVPLDGGRFATSDLNDLYRRVINRNNRLKRLLELHAPDIIVRNEKRMLQEAVDSLLDNGRRGKAMTGANKRPLKSLADMIKGKGGRFRQNLLGKRVDYSGRSVITVGPYLRLHQCGLPKKMALELFKPFIFHKLEKQGLASTVKAAKKLVEQEVPEVWDILEEVIREHPIMLNRAPTLHRLGIQAFEPILIEGKAIQLHPLVCAAFNADFDGDQMAVHVPLSLEAQMEARTLMLASNNVLSPANGEPIIVPSQDIVLGLYYMTRDRINAKGEGSLFADVKEVHRAYHTKQVELGTKITVRLREWVKNEAGEFEPVVNRYETTVGRALLSEILPKGLPFEYVNKALKKKEISKLINASFRLCGLRDTVIFADHLMYTGFGFAAKGGISIAVDDMEIPKEKAALLAEANAEVKEIEDQYRQGLVTNGERYNKVVDIWGRAGDKIAKAMMDNLSKQKVIDRAGNEVDQESFNSIYMMADSGARGSAAQIKQLSGMRGLMAKPDGSIIETPITSNFREGLTVLQYFIATHGARKGLADTALKTANSGYLTRRLVDVTQDLVVVEDDCGTSDGFVMKAVVQGGDVIEALRDRILGRVTASDVVDPSSGETLVEAGTLLTEKLVDMIDQSGVDEVKVRTPITCKTRHGLCAHCYGRDLARGKLVNAGEAVGVIAAQSIGEPGTQLTMRTFHIGGAASRAAAASQVEAKSNGTARFSSQMRYVANNKGELVVIGRSCEVVIHDDIGRERERHKVPYGAILLVQDGMAIKAGQTLATWDPHTRPMITEHAGMVKFENVEEGVTVAKQTDDVTGLSTLVVIDGKRRSSSASKLLRPTVKLLDENGVEICIPGTSTPVSMAFPVGAVITVREGQEIGKGDVLARIPQASSKTRDITGGLPRVAELFEARVPKDAGMLAEITGTVSFGKETKGKQRLIVTDVDGVAYETLISKEKQILVHDGQVVNRGETIVDGAVDPHDILRLQGIEALARYIVQEVQEVYRLQGVKISDKHIEVIIRQMLRRVNIADAGETGFITGEQVERGDVMLANEKALEEGKEPARYENVLLGITKASLSTDSFISAASFQETTRVLTEAAIMGKQDELRGLKENVIVGRLIPAGTGLTYHRSRHQQWQEVEQETAETQVTDE

SEQ ID NO: 107 - protein, 242 aa, Neisseria meningitidis
MPDYIRISRAADSLRDIKITPHFLPHTDGSCLIECGNTKVICTASIDENVPPFLRGKNQGWVTAEYGMLPASTASRMRREASAGKQSGRTQEIQRLIGRSLRAVVDMEKLGERQILIDCDVIQADGGTRTASITGAFVALQIAVGKLVSDGILSENPIREAVAAVSVGVVNGVPLLDLDYPEDSGCDSDVNIVMTASGKIIEIQGTAEDAPFSLDELGKLVALAQKGIGELLQHQQNALSAA

SEQ ID NO: 108 - protein, 93 aa, Neisseria meningitidis
MENGHRNNRSPLEKRIFYLEHSGQYLMICALSDYSKNKHTVVMANFLYPNEKMDWRNLDDLFNELVLEELQSSFMDWYPTIEEAISHHLEDFS

SEQ ID NO: 109 - protein, 221 aa, Neisseria meningitidis
MTVLSKEQVLSAFKNRKSCRHYDAARKISAEDFQFILELGRLSPSSVGSEPWQFVVVQNPEIRQAIKPFSWGMADALDTASHLVVFLAKKNARFDSPFMLESLKRRGVTEPDAMAKSLARYRAFQADDIKILDDSRALFDWCCRQTYIALGNMMTGAAMAGIDSCPVEGFNYADMERVLSRQFGLFDAAEWGVSVAATFGYRVQEIATKARRPLEETVIWA

SEQ ID NO: 110 - protein, 251 aa, Neisseria meningitidis
MIKIRNIHKTFGKNTILRGINLDVCKGQVVVILGPSGSGKTTFLRCLNALEMPEDGQIEFDNERPLKIDFSKKPSKHDILALRRKSGMVFQQYNLFPHKTALENVMEGPVAVQGKPAAQAREEALKLLEKVGLGDKVNLYPYQLSGGQQQRVGIARALAIQPELMLFDEPTSALDPELVQDVLDTMKELAQEGWTMVVVTHEIKFALEVATTVVVMDGGVIVEQGSPQDLFNHPKHERTRRFLSQIQSTKI

SEQ ID NO: 111 - protein, 169 aa, Neisseria meningitidis
MSNFEKKYILELNDALSHLNHNSTSFDLLKVLISWLSNDIVIDKFKILGYDFSKYIEMNPDDYPVEKSILNREEIIYLKNNIYRKISSGNFKFQYFVQYIRDILEYLFIEHIERVCPYCEWGEMQKLEEQNTHETVYLCTQCGCAFYNDNSQFLLKTPLTIPMKRDEFK

SEQ ID NO: 112 - protein, 513 aa, Neisseria meningitidis
MKFLDREASIAKPGFNRWLVPPAALAVHLAIGQIYAYSVFNAPLTKLIGITESAAGDWKLTTVGWIFSIALAMLGASAALFGTWMERVGPRKAIFAAACCFSLGFFVSAFGVRTHNLFLLYLGNGVIGGVGLGLGYIGPVSTLMKWFPDKPGMATGLAIMGFGGGAMLASPLSVSLMNAFSNAASVGVAETFAVLGLLYLALMMFGAFTIRVPADGWKPEGYTAPKTQNKLVSSNHVNVSQAMKTPQFWLLFWVLCLNVTAGIGVLGQASVMIQELFSETSVGRQSAVGAGAAAGFVSLLSLFNMGGRFLWSSVSDKIGRKNTYTIFFVLGSLLYFAVPSIGEGGSKALFIIGFCVIISMYGGGFAAIPAYLKDLFGTYQVGAIHGRILLAWSTAAVIGPVLVNYIRQSQIDSGIPAAQAYSVTMYIMAGLLIIGLLCNLAVKSVHEKHHEKDIKTAARSGNPDDETAISDAYLVGEKVSGGGISVWWRWALAVIPLAYGVVMVFVKALDLFS

SEQ ID NO: 113 - protein, 72 aa, Neisseria meningitidis
MAKEDTIQMQGEILETLPNATFKVKLENDHIVLGHISGKMRMHYIRISPGDKVTVELTPYDLTRARIVFRAR

SEQ ID NO: 114 - protein, 159 aa, Neisseria meningitidis
MKHILPLIAASALCISTASAHPAGEPSTPNETAMTTHTLTSKYSFDETVSRLETAIKSKGMDIFAVIDHQEAARRNGLTMQPAKVIIFGTPKAGTPLMVKDPAFALQLPLRVLVTETDGKVRAAYTDTRALIAGSRIGFDEVANTLANAEKLIQKTVGE

SEQ ID NO: 115 - protein, 217 aa, Neisseria meningitidis
MFSVPRSFLPGVFVLAALAACKPQDNSAAQAASSSASASAAENAAKPQTRGTDMRKEDIGGDFTLTDGEGKPFSLSDLKGKVVILSFGFTHCPDVCPTELLTYSDTLKQLGGQAKDVKVVFVSIDPERDTPEIIGKYAKQFNPDFIGLTATGDQNLPVIKQQYRVVSAKVNQKDDSENYLVDHSSGAYLIDKNGEVAIFSPYGSEPETIAADVRTLL

SEQ ID NO: 116 - protein, 286 aa, Neisseria meningitidis
MAKVKGGLGRGLDSLLANGADNSSGDRLTTVAVKDIRPGRYQARVQIDDEALQELADSIKAQGVIQPVIVREHGLSRYELIAGERRWRAAQIAGLTEIPAVIKTISDETALAMGLIENLQRENLNPIEEAQGLKRLADEFGLTHETIAQAVGKSRSAISNSLRLLSLPEPVQEMLYQRRLEMGHARALLTLPVVEQLELAQKAVKNGWSVREVERRSQMAHQNKRLEPKKPATADIDRLNDLLTEKLGVNAEIKTANHKKGRIILHFDTPETFDHILKQLGIDYRP

SEQ ID NO: 117 - protein, 322 aa, Neisseria meningitidis
MSEIKTDDPKRGIKLRGADKTARIPIKVVPLQEKLKKPEWIRAKLPSRKFFEIKDILREQKMHTVCEEASCPNIGECFSKGTATFMIMGDICTRRCPFCDVGHGRPNMLDPDEPRNLAESVKAMNLRYVVITSVDRDDLRDGGAQHFADCIKAIRETSPNTKIEILVPDFRGRLDIALKILAETPPDVMNHNLETHPSLYRKARPGANYQHSLDLLKRYKEMMPHIPTKSGIMVGLGETDEDVREIMRDMRAHNIEMITIGQYLQPSDGHLPVLRYVTPEQFKIFEKEAYELGFSNAAIGAMVRSSYHADEQAAEALRECEF

SEQ ID NO: 118 - protein, 113 aa, Neisseria meningitidis
MPKITVLPHTTLCPEGAVIEDAPEGKTVLDVLLDHDIEVDHACEKSCACTTCHVIIRKGFDSLEEPTELEEDLLDQAWGLEADSRLSCQAVVAGEDLIVEIPKYTINHAREEH

SEQ ID NO: 119 - protein, 191 aa, Neisseria meningitidis
LLCTQTDGDNAQKKTTTYKEQDPAKVTHYLTQPAEFSDYQRVYLDETGFDRYLFRPYARSLKGQIVKAQISGKRYQRLSLVSAQVGNRLIAPMVYQNTMTGVFFEAWFQQCLLPALTQKSVIILDNARFHRMGVLREMAEKLGHKVLPLAPYSPELNPIEKVWANIKRYLRTVLSDYARFDDALLSYFDFN

SEQ ID NO: 120 - protein, 55 aa, Neisseria meningitidis
MNEKDLIEWLEDRGELMIMKKDGEGFVIAARAPDGMWKTAEAETLAQAITLWEEV

SEQ ID NO: 121 - protein, 119 aa, Neisseria meningitidis
MPRVKRGVTARARHQKIFALAKGYRGRRKNVYRVAKQAVMKAGQYAYRDRRQRKRQFRQLWIVRINAGARENGLSYSKFMNGLKRASIEIDRKVLADLAVFDKAAFAQLVEKAKAALAA

SEQ ID NO: 122 - protein, 291 aa, Neisseria meningitidis
MAVGKEILTKIRSVQNTQKITKAMQMVSTSKMRKTQERMRLARPYAEKVRMVMSHLAQTNTDHGIPLLESHREIRRVGFILITSDKGLCGGLNANVLKKFLAQVQEYRNQGIEEEIVCLGSKGLMACQSIGLNVVASAVNLGDTPKMEMLLGPLTELFQRYEKHEIDRIHLVYSGFVNTMRQEPRMEVLLPIGENVIGDSAPKSPFSWEYRYEPTALAVLEYLVRRYLESVVYQALSDNMASEQAARMVAMKAATDNAGNAIKELRLVYNKSRQAAITTELSEIVAGAAAV

SEQ ID NO: 123 - protein, 163 aa, Neisseria meningitidis
VVRQDDLSLGLEIAGGQTYLLEQFLFQRRSLLAFKGGLRENAENIILRNNTMSDESPIIFTDSCCAKVADLIAEENNPDLKLRVFVNGGGCSGFQYGFTFDEIKNDDDFEIEKNGLVFLVDPMSYQYLVGAEIDYTESLQGSQFVIRNPNAETTCGCGSSFSV

SEQ ID NO: 124 - protein, 477 aa, Neisseria meningitidis
MNEYSQLIKHPDISLSPISDGIGVGNPATGEILAYVRNTGSDKLKNLIQKAAAAQKLWAAKTALERADILWRWYFLVKENKEALARLMTMEQGKSLTESRGEIDYAASFVRWFAEEARRIDGDVLTSVKASQKLVVLKQPVGVTAAITPWNFPSAMIARKAAPALAVGCAMIVKPASLTPLSAYALAVLAYEAGVPQDLLPVVSGSASEIGREFATNPIIRKISFTGSTEVGAKIFADSAADIKKLSLELGGNAPFIVFDDADLDKAVEGALASKFRNSGQTCVCTNRVYAQSGIYDAFCRKLSEKAAVLKLGNGLDEGVNQGPLIEEKAVEKVEQHIADALSKGAVCLTGGKRSALGGTFFEPTVLSGVTAQMAVAREETFGPLCPVFRFETEAEVIAVANDTEYGLAAYLFTADTARQWRVGEALEYGMVGINTGLISNEVAPFGGVKRSGLGREGSKYGADEYLELKYLCIDVG

SEQ ID NO: 125 - protein, 182 aa, Neisseria meningitidis
MRTIFFSGSRSISRLNPQIRERINNILSNNFDIVIGDANGADKAIQKFLQEQDYANVHIYFSGKIYRNNVGNWQFVQVDSKGTGRVFYTAKDKKMAEIADYGFILWDGKSIGSLNNIAELLQLNKPSLVYHSQTKEFFKIKSSADLENILSNIEDDVLASILEKGNTFLKSYVTKQPSLIQE

SEQ ID NO: 126 - protein, 96 aa, Neisseria meningitidis
MAKYFTETGIGVREHFDFFGEFVVSPAARSGDLALAYGLRLEAGEEGLSLAELFDKRSDSQESVECGRIDIGGFMLTAKEVDGDGNIGSMGLKVPR

SEQ ID NO: 127 - protein, 65 aa, Neisseria meningitidis
MQKVYVVQSVSTGDFLYLSPETGDIGHTKLITNADYFYDFEEAINAGLEEIGNQYEFVVFGFLKD

SEQ ID NO: 128 - protein, 172 aa, Neisseria meningitidis
MSEIINLTESGITFNLVKNNLFYIEPYIRKRRQEGIKTVEFIYLQEDNLLFVEAKQSIPNQERSPERFDEYISEIYQKWCNALNVEILGILGREDIKETIMPSAFSNLQWGSIEIKLLLVIPDVLLNYLGQLNELIKQEFNKKDTLRLISLWNISVEVINRDLAIQKGLASS

SEQ ID NO: 129 - protein, 250 aa, Neisseria meningitidis
LGVRELLGERGFRYLLALDADPAPLTEHLTRRAPLGHRLGIYAEELLAFWFANAPHAELLAHNLTVSGSDGNTQGAADFVVRLNGKPYHIELTCKYYGGGTGRLEDMRGLDPKDTLLGKAAKLTAQLGLPHTSDGIRTLRQHGLPLDVKPVSIVRGIGFFPHGFHAFEPPLNPYGWRGIYIQDWAEYGFKRQEVRYHLLDRMAYLAPARVAETETLNATEIRRIDQGLIAVLECRPDGFWHEIERIMKAV

SEQ ID NO: 130 - protein, 123 aa, Neisseria meningitidis
MPTINQLVRKGRQKPVYVNKVPALEACPQKRGVCTRVYTTTPKKPNSALRKVCKVRLTNGFEVISYIGGEGHNLQEHSVVLIRGGRVKDLPGVRYHTVRGSLDTAGVKDRKQARSKYGAKRPK

SEQ ID NO: 131 - protein, 249 aa, Neisseria meningitidis
MVLRRDFLTWCNETLQTALFKDYAPNGLQVEGREYIGKIVTSVTASRAAIDFAVEQKADLLLVHHGMFWKNELPTVTGWKKERIAALLRHDINMAGYHLPLDAHPTLGNNAQLADRLGFATEKRFGEQNLLNSGSLKQAKTLGALAAHIETVLQRKPVVIGKPEREIRRVAWCSGGAQGFFQTAIDEGVDLYLTGEISEAQYHLANETGTAFISAGHHATERYGVRALAESAAEVFGLEVCHFDENNPA

SEQ ID NO: 132 - protein, 250 aa, Neisseria meningitidis
MITLPSLNNLPSKWDEIRYWLETRVCECGVMPHPNLTECEAGQFDRDFWDNIGCAPEEYVRIRRAIRLLEARYPDSLNELVCAAIATPLGEMLAVFGNKGLCLLEFVGQKHLEQEIAAVQKALRGRFVFREDERTQLLRQELDLYFKGRLKTFATPLEQIGTEFQKQAWDALLAIPYGETRSYKEQAQRLGNPNAVRAVAAANGQNKVSILIPCHRVIGSDGKLTGYAGGLNRKQFLLALERGEVQTALF

SEQ ID NO: 133 - protein, 1082 aa, Neisseria meningitidis
MAAFKPNPINYILGLDIGIASVGWAMVEIDEDENPICLIDLGVRVFERAEVPKTGDSLAMARRLARSVRRLTRRRAHRLLRARRLLKREGVLQAADFDENGLIKSLPNTPWQLRAAALDRKLTPLEWSAVLLHLIKHRGYLSQRKNEGETADKELGALLKGVADNAHALQTGDFRTPAELALNKFEKESGHIRNQRGDYSHTFSRKDLQAELNLLFEKQKEFGNPHISDGLKEGIETLLMTQRPALSGDAVQKMLGHCTFEPAEPKAAKNTYTAERFIWLTKLNNLRILEQGSERPLTDTERTTLIDEPYRKSKLTYAQARKLLELDNTAFFKGLRYGKDNAEASTLMEMKAYHAISRALEKEGLKDKKSPLNLSPELQDEIGTAFSLFKTDEDITGRLKDRVQPEILEALLKHISFDKFVQISLKALRRIVPLMEQGKRYDEACAEIYGDHYGKKNTEEKIDLPPIPADEIRNPVVLRALSQARKVINGVVRRYGSPARIHIETAREVGKSFKDRKEIEKRQEENRKDREKAATKFREYFPNFVGEPKSKDILKLRLYEQQHGKCLYSGKEINLGRLNEKGYVEIDHALPFSRTWDDSFNNKVLVLGSENQNKGNQTPYEYFNGKDNSREWQEFKARVETSRFPRSKKQRILLQKFDEEGFKERNLNDTRYVNRFLCQFVADHMLLTGKGKRRVFASNGQITNLLRGFWGLRKVRAENDRHHALDAVVVACSTVAMQQKITRFVRYKEMNAFDGKTIDKETGEVLHQKTHFPQPWEFFAQEVMIRVFGKPDGKPEFEEADTPEKLRTLLAEKLSSRPEAVHEYVTPLFVSRAPNRKMSGQGHMETVKSAKRLDEGVSVLRVPLTQLKLKDLEKMVNREREPKLYEALKARLEAHKDDPAKAFAEPFYKYDKAGNRTQQVKAVRVEQVQKTGVWVRNHNGIADNATMVRVDVFEKGDKYYLVPIYSWQVAKGILPDRAVVQGKDEEDWQLIDDSFNFKFSLHPNDLVEVITKKARMFGYFASCHRGTGNINIRIHDLDHKIGKNGILEGIGVKTALSFQKYQIDELGKEIRPCRLKKRPPVR

SEQ ID NO: 134 - protein, 633 aa, Neisseria meningitidis
MTTPKKTAKTSGNEARELADLSEDIGIRFKYPNSERVYLQGSRDDIRVPLREIRQDDTYTAQGTEANPPIPVYDTSGVYGDPAAHIDLKQGLPHIRTAWLDERGDTEILPKLSSEYGIERAHDPKTAHLRFNQITRPRRAKAGRNVTQLHYARQGIITPEMEFVAIRERLKLDELSQKPEYAKLLKQHAGQSFGANIPTHPDQITPEFVRREIAAGRAIIPANINHPELEPMIIGRNFRVKINGNLGNSAVTSSLTEEVEKMVWSLRWGADTIMDLSTGAHIHETREWIIRNAPVPIGTVPIYQALEKTGGIAEDLTWDLFRDTLIEQAEQGVDYFTIHAGVLLRYVPMTANRLTGIVSRGGSIMAKWCLAHHRENFLYTHFDEICEIMKAYDVSFSLGDGLRPGCIADANDESQFAELHTLGELTSKAWKHDVQVMIEGPGHVPLQRVKENMTEELQHCFEAPFYTLGPLVTDIAPGYDHITSGIGAANIGWYGTAMLCYVTPKEHLGLPDKEDVRTGIITYKLAAHAADLAKGWPGAQLRDNALSKARFEFRWRDQFRLSLDPERAESFHDETLPAEGAKIAHFCSMCGPKFCSMKITQEVRDYADKQKAQRQGMEEKAVEFVKKGAKIYS

SEQ ID NO: 135 - protein, 189 aa, Neisseria meningitidis
MLFPRIIAASAQRKLSVYLKKGGLVAYPTESCYGLGCLPTLAKALGKLAHLKKRPQHKGMIVIGNQFEQLQPLLQMPSENLQDMLRKEWPAPKTFLLSAKSCVLPELRGKQRSKLAVRVPAHVGARRLCQALQTPLVSTSCNRAGKRACRTEREVRRQFGRDVWIVGGRIGRQKSPSQIIDGETGKRLR

SEQ ID NO: 136 - protein, 402 aa, Neisseria meningitidis
MTGIIHSLLDTDLYKFTMLQVVLHQFPQTHSLYEFRCRNASTVYPLADIKEDLEAELDALCRLRFTHDELGYLRSLRFIKSDFVDYLELFQLQRRFVEIGTDDKDRLNIRIEGPMIQAMFFEIFILAIVNELYFRRLETPAVIEEGERRLQAKAARLKEIAAAQNPDDPPFLISDFGTRRRYKLAWQEHVIRTLLEAAPSIVRGTSNVFLAKKLGITPIGTMAHEFLQAFQALDVRLRNFQKAALESWVHEYRGDLGVALTDVVGMDAFLRDFDLYFAKLFDGLRHDSGDPYVWGDKAYAHYQKLKIDSRTKMLTFSDGLDIERSWALHQYFKDRFKTGFGIGTNLTNDMGHTPLNIVLKLVECNGQSVAKLSDSPGKTMTNNSTFLAYLRQVFDVPEPETP

SEQ ID NO: 137 - protein, 219 aa, Neisseria meningitidis
MDTWHDALGGEKQQPYFQEILNAVRQERLSGQIIYPPAADVFNAFRLTAFDRVKAVILGQDPYHGAGQAHGLAFSVRQGIRIPPSLLNIYKELETDIEGFSIPAHGCLTAWAEQGVLLLNTVLTVRAGQAHSHALLGWERFTDTVIRQLAAHRKHLVFMLWGGYAQQKRKLIDSQNHLILTAPHPSPLSAYRGFFGCRHFSQANSYLSRHGIDPINWKL

SEQ ID NO: 138 - protein, 415 aa, Neisseria meningitidis
MLKQTTLLAACTAVAALLGGCATQQPAPVIAGNSGMQDAPSSAVYNNPYGATPYSPAPAGDAPYVPPVQSAPVYTPPAYVPPSAPAVSGTYVPSYAPVDINAATHTIVRGDTVYNISKRYHISQDDFRAWNGMTDNTLSIGQIVKVKPAGYAAPKAAAVKSRPAVPAAAQPLVQSAPVDINAATHTIVRGDTVYNISKRYHISQDDFRAWNGMTDNMLSIGQIVKVKPAGYAAPKTSAVESRPAVPAAVQTPVKPAAQPPVQSAPQPAAPAAENKAVPAPAPQSPAASPSGTRSVGGIVWQRPTQGKVVADFGGNNKGVDIAGNAGQPVLAAADGKVVYAGSGLRGYGNLVIIQHNSSFLTAYGHNQKLLVGEGQQVKRGQQVALMGNTDASRTQLHFEVRQNGKPVNPNSYIAF

SEQ ID NO: 139 - protein, 236 aa, Neisseria meningitidis
MSPVLYLIPTPLGTPDTPCLLPHEQRAVVGLTDFVVEAEKTARAHLKHLGVTMPIRELNLQTLNEHTDLKTLPELLKPLQEGRSMGIVSEAGCPAVADPGANLVALAHKHGFEVRPLVGPSSLLLALMASGANGQNFAFKGYLPSEKNERIQSLKALEQRSRQQNETQLFIETPYRNDVLLADAVENLHPETRLCTATDLTLPTQSVVSKTVADWRRMKEMPNLKKRPTIFVMYAG

SEQ ID NO: 140 - protein, 157 aa, Neisseria meningitidis
MNLDLTAQKVRLSWKDILWGYGNKYLGWADVAAYARKMTLSDHDERVFKLSLINKSNILELKPVLEDLASEMRDYSPKNWLYVLLSDVFHRKEEFEDPLGEVEKIYADFDYPEEIESFVRYMPPKDGYIPSAHTYEENIARLYSHWEHYLNNGGGQG

SEQ ID NO: 141 - protein, 295 aa, Neisseria meningitidis
MQKSKLSWFLKLMLALSLAFLYIPLVVLVIYSFNESKLVTVWGGFSTKWYGALLENDTILEAAWLSLRIAVVSSLAAVVLGMLAGYAMARIKRFRGSTLFAGMISAPMVMPDVITGLSMLLLIIQVQIFLQGSEWLQHLYFDRGFFTIFLGHTTLCMAYITVVIRSRLVELDQSLEEAAMDLGARPLKIFFVITLPLIAPAIASGFLLGITLSLDDLVITSFLSGPGSSTLPQVIFSKIKLGLDPQMNVLATILIGIIGTLVIIVNYWMMRQATKRDREAAEAYRQEKLAAEKAN

SEQ ID NO: 142 - protein, 179 aa, Neisseria meningitidis
MNIIDTAIPDVKLLEPQVFGDARGFFMETFRDEWFKTQVCERTFVQENHSKSGKGVLRGLHYQTENTQGKLVRVVVGEVFDVAVDMREGSPTFGKWAGATLSAQNQCQLWIPEGFAHGFCVLGDAAEVVYKCTDYYKPEAEQVLIWNDPTVGIGWPLQGEPNLSPKDLAGKVLAEAVTF

SEQ ID NO: 143 - protein, 264 aa, Neisseria meningitidis
LNDFLQDEQRGMVYVSPWVKFHGKMYSFQNQREIHTLIGSANLTCFWDKAERTYETMVHLDDYQIASKLREDIAQTIKQLGIPINKADKPVEFKEHNVHLEQCLGVEKISKERVEKLFTQTSQYYFELPVKTEPRSSLNRFFAEGRKNQRGFYLPRPWYEAELIVSTRFLTAEGYPKEKNFTVITDDGWQFECNTTGQNGKNFSSKGDQTIFGKWVKGRLEATGCLKTGEPVTEETLRQYGNDHFEFRSTDNPDVWLLSFKGKN

SEQ ID NO: 144 - protein, 358 aa, Neisseria meningitidis
MKPSILEKLQQLGDRLEEVTHLLGQPEATADMDNYRKLTREHAELTPVVEVFQNYRLAQSDLADAEEMLSDPEMKDFAAEEIEAAKAKIGALDTELQKLLLPKDADDDKNIFIEVRAGTGGDEAALFAGDLLRMYSRYAERNRWQVEIVSANESELGGYKEVIARIIGLGAYSRLKFESGGHRVQRVPATESQGRIHTSACTVAVMPEADELEDIELNPVDLRIDTFRASGAGGQHINKTDSAVRITHLPTGMVVECQDGRSQHANKAQAMKVLAARLNDAQKREAQAKEAAERKSLIGSGDRSERIRTYNYPQGRVTDHRINLTLHKLDFVMDGDLAEITDALIAEHQAELLAAMGD

SEQ ID NO: 145 - protein, 266 aa, Neisseria meningitidis
MSPSPFIEMKDVAFAYGDRPILKNINFSIPQGNFAAVMGGSGSGKTTLMRLITGQIRPQSGQVLIEGRDLAGFSADELYEHRRRMGVLFQHGALFTDLSVFDNIAFPMRELTRLPEAVIRDLVLLKLNAVGLRGVENLMPSELSGGMSRRVALARTIALDPEIMLYDEPFTGLDPISLGVIAHLISRVNKALRSTSVMVTHDIEKSLEIVDQVIFLAHGEIMFSGSPQEMRELDSPWVRQFVGGLADGPVAYRYPAQTSLHQDLLG

SEQ ID NO: 146 - protein, 427 aa, Neisseria meningitidis
MSKSIKLNVPGQAGLELPVLEASIGHDVVDIRGLTKNTGLFSFDPGFVSTASCESKITYIDGDQGLLYYRGYPIEQLAEKSDYLEVCYLLIYGELPTPEQKAEFDNTVRRHTMVHEQLTWFFRGFRRDAHPMAMMVGVVGALSAFYQDSLDISNPEHRKIAIYRLISKIPTIAAMCYRYSNGLPFNYPKNNLSYSENFLHMMFATPCEDYKPNPVLARALDRIFILHADHEQNASTSTVRLAGSSGANPFACIAAGIACLWGASHGGANEAVLKMLDEIGDVSNVAAYMEGVKQRKYRLMGFGHRVYRNMDPRASIMRETCYEVLKELGLEDSPKFKLAMELEQIALKDPFFIERKLYPNVDFYSGIVLSALGIPTEMFTVIFALSRSVGWISHWHEMISDPSLKIGRPRQLYTGSERRDYVPPGER

SEQ ID NO: 147 - protein, 67 aa, Neisseria meningitidis
MDVQKQYPFETVAVCVLPNHIHAIWTLPPDDADYSLLRRLIKTKFSAYSPHAKNLSAGKQRRHEHGI

SEQ ID NO: 148 - protein, 286 aa, Neisseria meningitidis
MSDLSVLSPFAVPLTAVFGLLVGSFLNVVIYRVPVMMERGWTVFAKEYLNLPLTEEESRTFNLMKPDSCCPKCRVPIRAWQNIPIVSYLLLRGKCASCQTKISIRYPLIELLTGVLFGLVAWQYGWSWITLGGLILTAFLISLTFIDADTQYLPDSMTLPLIWLGLIFNLDGGFVPLQSAVLGAVAGYGSIWLLCAVYKLIKGEIGMGNGDFKLIAALGAWLGISALPVLIFVSSLIGLVAAIVMRVAKGQHFAFGPALTVSGWIIFTANDSVWRAVNWWLTHPVL

SEQ ID NO: 149 - protein, 110 aa, Neisseria meningitidis
MQILSFQPDIAERMLEGTEGESVNENAQFVRTDNGYWIAWHEGVAALLAPDTPPGIPCFWVEGAESLEELCVMVERGEFDEVEEFDGDDDEWLETAQGCGHHGEACACGH

SEQ ID NO: 150 - protein, 107 aa, Neisseria meningitidis
MFLDDVNVFLDDLNTNPITDEWYMSNFADKHIKILESYEAFDILKQFVDYMIEEYDEKSEYEIMEILRQLKYQADTNEKFYTNTQKQKIVELYKQEISQDILNEIFR

SEQ ID NO: 151 - protein, 930 aa, Neisseria meningitidis
MSNRPTLLLVDGSSYLYRAYHAMGQNLTAPDGAPTGALYGVLNMLRRLRSEYPHDYCAVVFDAKGKNFRHQMFEEYKATRPPMPDDLRPQAEALPDLVRLTGWPVLVIGQVEADDVIGTLAKQGAEHGLRVIVSTGDKDMAQLVDERVTLVNTMSGETLDIEGVKAKFGVRPDQIRDYLALMGDKVDNVPGVEKCGPKTAVKWLEAYGSLQGVIEHASEIKGKVGENLQAALPQLPLSYDLVTIKTDVDLHAELSDGIESLRRTTPKWAQLVVDFKRWGFRTWLKEAESNMNTGSTDDLFGSDSIGEQAALNAEMPFEKQAEKAIAPEKLDYQAVTTEAQFAALLDKLSRADTIGIDTETTSLDAMNASLVGISIAFQAGEAVYIPVGHSLTAAPEQLDLQDVLGRLKPHLENPTLKKIGQNLKYDQHVFANYDIALNGIAGDAMLASYIIESHLGHGLDELSERWLGLETITYESLCGKGAKQIGFADVAIGQATEYAAQDADFALRLEAHLRAQMDEKQLEMYEKMELPVAQVLFEMERNGVQIDRAELARQSAELGAELMKLEQQAYAAAGQPFNLNSPKQLQEILFDKMGIPTKGLKKTAKGGISTNEAVLEQLAPDYPLPKIILQNRSLAKLKSTYTDKLPEMISPKDGRVHTTYAQAVAITGRLASNNPNLQNIPIRTAEGRRVRRAFTAPQGSVIVSADYSQIELRIMAHLSGDKTLIAAFQNGEDVHRRTAAEVFGIAPENVSSEQRRYAKTINFGLIYGMGQYGLAKSLGIDNISAKNFIDRYFARYPGVAEYMQRTKEQAAAQGYVETLFGRRLYLPDIRNKNANARAGAERAAINAPMQGTASDLIKRAMIDVRNWLSDGIGSKLVMQVHDELVLEVVETELDFVKEKLPQIMAKVDGGLLDVPLVAEVGVGENWEEAH

SEQ ID NO: 152 - protein, 136 aa, Neisseria meningitidis
LAMAEGQDVDLVEISPTAKPPVCKLMDYGKYKYQQAKKRDEAKKNQKQVQIKEIKFRPGTDEGDYQIKMRNINRFLADGDKVKVTLRFRGREMAHQQLGAQLLERVKEDLAEVAQIESFPKMEGRQMVMMIAPKKK

SEQ ID NO: 153 - protein, 269 aa, Neisseria meningitidis
MTALPRYSVFGNPVAHSKSPQIHQQFALQEGVDIEYERICADIGGFAQAVSTFFGTGGCGANVTVPFKQEAFHLADEHSDRALAAGAVNTLILLKNGKLRGDNTDGIGLANDITQVKNIAIEGKTILLLGAGGAVRGVIPVLKEHRPARIVIANRTRAKAEELAQLFGIEAVPMADVNGGFDIIINGTSGGLNGQIPDIPPDIFQNCALAYDMVYGCAAKPFLDFARQSGAKKTADGLGMLVGQAAASYALWRGFTPDIRPVIEYMKAM

SEQ ID NO: 154 - protein, 859 aa, Neisseria meningitidis
MRYDKLTAKFQQALAEAQSLALAADGSYLEAGFVLKALLDDQNSGAAALLAHAGVNVPQVKQRLQQHLNSLPKVSGQGGDILPSRELQAVLNLMDKAATKRGDAYIASELFLLALVQQNDAAGKILKEAGATEQNINAAIDTVRGGQNVNDANAEDQRDALKKYTLDLTQRARDGKLDPVIGRDDEIRRAIQVLQRRTKNNPVLIGEPGVGKTAIVEGLAQRIVNGEVPESLRNKRLLVLDLAALIAGAKYRGEFEERLKGVLNDLAKDDGNTLIFIDEIHTLVGAGKTDGAMDAGNMLKPALARGELHCIGATTLDEYRQYIEKDAALERRFQKVLVGEPSVEDTIAILRGLQERYEIHHGIDITDPAIVAAAELSDRYITDRFLPDKAIDLIDEAASRVKMEKETKPEAMDKIDRRLIQLRMEKAHVEKEKDDASKKRLELIDEEINGLQKEYADLDEIWKAEKAISDGAANIKKQIDEVKIKIEQAKRQGDLALASKLMYEDLEHLEKQRAAAERADTDSTKPANKLLRNNVGAEEIAEVVSRMTGIPVSKMMEGERDKLLKMEEVLHRRVVGQDEAVRAVSDAIRRSRSGLADPNKPYGSFLFLGPTGVGKTELCKALAGFLFDSEDHLIRIDMSEYMEKHAVARLIGAPPGYVGYEEGGYLTEQVRRKPYSVILLDEVEKAHPDVFNILLQVLDDGRLTDGQGRTVDFKNTVIVMTSNIGSQHIQQMGTQDYEAVKEVVMEDVKEHFRPEMINRIDEVVVFHGLDQANIRSIAKIQLKGLEKRLEKQNLRLTVSDAALDIIAKAGFDPIYGARPLKRAIQSEIENPLAKALLAGNYAPESEIRVEANGDRLKFA

SEQ ID NO: 155 - protein, 332 aa, Neisseria meningitidis
MSENKQNEVLSGYEQLKRRNRRRLVTASCLVAASCILLAAALSSGPAEQTAGETSGVENKAAGAAQTPALKSAADKPQDLAGEDKPSAADSEISEPENVGAPLVLINDRLEDSNIKGLEASEKLQQAETAKTAPKQAKQRAAEKVPATADSTDTVAVEKPKRTAETKPQKAERTAKAKPKAKETKTAEKVADKPKTAAEKTKPDTAKSDSAVKEAKKADKAESKKTAEKDRSDGKKHETAQKTDKADKTKTAEKEKSGKKAAIQAGYAEKERALSLQRKMKAAGIDSTITEIMTDNGKVYRVKSSNYKNARDAERDLNKLRVHGIAGQVTNE

SEQ ID NO: 156 - protein, 165 aa, Neisseria meningitidis
MTALTLPEDIRQQEPSVLLYTLVSAYLEHTAQTGDESLSCLSDDQHTLTAFCYLDSQVEEGGFVQLIASGYGEYIFRNPLADSLRRWKIKITPKIIDKAKSLYEKHGETIETLADGGADIESLRKQFPDFEEWDGAYYEAAEQDLPLLAEHIQSNWETFAHIGQA

SEQ ID NO: 157 - protein, 405 aa, Neisseria meningitidis
MKTVVWIVVLFAAAVGLALASGIYTGDVYIVLGQTMLRINLHAFVLGSLIAVVVWYFLFKFIIGVFNIPEKMQRFGSARKGRKAALALNKAGLAYFEGRFEKAELEASRVLVNKEAGDNRTLALMLGAHAAGQMENIELRDRYLAEIAKLPEKQQLSRYLLLAESALNRRDYEAAEANLHAAAKMNANLTRLVRLQLRYAFDRGDALQVLAKTEKLSKAGALGKSEMERYQNWAYRRQLADAADAAALKTCLKRIPDSLKNGELSVSVAEKYERLGLYADAVKWVKQHYPHNRRPELLEAFVESVRFLGEREQQKAIDFADAWLKEQPDNALLLMYLGRLAYGRKLWGKAKGYLEASIALKPSISARLVLAKVFDETGEPQKAEAQRNLVLASVAEENRPSAETH

SEQ ID NO: 158 - protein, 383 aa, Neisseria meningitidis
LEQDMSQNASVGIVTPQKIPFEVPLVLENGKTLPRFDLMIETYGELNAEKNNAVLICHALSGNHHVAGKHSAEDKYTGWWDNMVGPGKPIDTERFFVVGLNNLGGCDGSSGPLSINPETGREYGADFPLVTVKDWVKSQAALADYLSIGQWAAVVGGSLGGMQALQWAISYPERVRHALVIASAPKLSTQNIAFNDVARQAILTDPDFNEGHYRSRNTVPARGLRIARMMGHITYLAEDGLGKKFGRDLRSNGYQYGYGVEFEVESYLRYQGDKFVGRFDANTYLLMTKALDYFDPAADFGDSLTRALQNVKAKFFVASFSTDWRFAPERSHELVKALIAAQKSVQYIEVKSAHGHDAFLMEDEAYMRAVAAYMNNVYKGCQQ

SEQ ID NO: 159 - protein, 718 aa, Neisseria meningitidis
MPVPQPTAPYDPLTAEARTLLFHTASYLKPEEQAELEKAVAYAFRAHDGQTRKSGEPYITHPIAVATQLALWHMDIQGLCAGVMHDVLEDTGVTKGEMAEVFGNTIAEMVDGLSKLEKLKFEDHAEHQAESFRKLILAMTKDVRVIVVKLADRLHNMRTLGSMRPDKRRRIARETLEIYAQIANRIGLNNAYQELQDLSFQNLHPNRYETLKKAMDKSRKNRQDVVGKVLRAFGQRLVGANIEAKIKGREKNLYGIHQKMMAKKLRFAEVMDIYGFRVIVNSIPACYAALGALHTLYQPKPGRFKDYIAIPKSNGYQSLHTTLVGPYGLPIEVQIRTKEMDAVAEGGIAGHWSYKSYSKTVDQAVLHTNRWLKNILDLQASSANAIEFLEHVKVDLFPNEIYILTPKGKILTLPKGATPVDFAYAVHTDIGHKTVAARINNIMMPLRTKLKTGDSVEIITSEHAKPNPAWLNFAVSGRARSAIRQYIKNLNRHDAVVLGESLLQKALSSLLPKDVLLSDGIKEKYLADLNDKQTSFEEVLYNVGMGHTLPVYVAMHIAELAGEHFGSEVRLSSIKVDGQESGHIHFAECCHPVPGDSIRLLLVKGKGMIIHRDSCPTLLKSDPEQQLDADWENMNGQNYRVGLQVQSEDSHGLLALMAQAISDSGADIESVETPSKSQSGTEGFVEFKFLLKVKNLNQLNQIIQNLHSIPYIRKVIRS

SEQ ID NO: 160 - protein, 139 aa, Neisseria meningitidis
MYKIKCFYDQFSSGELFNYCQFLDNSSNQKINTRGTVYQYIIYVLTGDLYLQKDIDENLEFIHQAENNPNEVYSGGGQGFCWDISAEKVVFYHNEFDEEDGWPDLSCSLHTFKTALIAWNAFLQLPKSIHSVVETVIEE

SEQ ID NO: 161 - protein, 93 aa, Neisseria meningitidis
MQYVRDNEIMLNIGATATQNLQIDNDWISFSARFGGQAHDIWIPVGHVLSLFARETGEGMGFELEAYRPDTPPENTSAETAPRPAKKGLKLVK

SEQ ID NO: 162 - protein, 285 aa, Neisseria meningitidis
MARHVWQAGRFEIGLDKPKIMGIVNLTPDSFSDGGAYSQNAQTALAHAERLLKEGADILDIGGESTRLGADYVSPEEEWARVEPVLAEVAGWGVPVSLDTRRTVVMEKALALGGIDIINDVAALTDEGAVELLARQADTGICLMHMQGLPKTMQINPKYQDVVGEVARYLKARSAECIAAGIAPQRIILDPGFGSGFGKTLQHNIALMRHLPELMAETGFPLLIGVSRKSTIGELTGEANAAERVHGSVAAALASVARGAQIVRVHDVKATADALKVWEALGINL

SEQ ID NO: 163 - protein, 405 aa, Neisseria meningitidis
MEIILGIVMFTVIVLVLALMILFAKSKLVSEGDITIKVNGEKELTMPAGGKLLGALANEGIFIPSACGGGGSCGQCRVVVKSGGGDILPTELSHISKREAREGCRLSCQVNVKTDMDIEVPEEVFGVKKWECTVISNDNKATFIKELKLAIPEGEEVPFRAGGYIQIEAPPHTVAYKDFDIPEEYHEDWDKYNLWQYVSKVDEPILRAYSMASYPEEKGIIMLNVRIATPPPRVPDAPPGQMSSYIWSLKPGDKVTISGPFGEFFAKDTDAEMVFIGGGAGMAPMRSHIFDQLKRLNSKRKITFWYGARSKREMFYVEDFDQLAAEFPNFTWHVALSDPLPEDNWDGYTGFIHNVVYENHLKNHEAPEDCEFYMCGPPIMNQSVIKMLKDLGVEDENILLDDFGG

SEQ ID NO: 164 - protein, 472 aa, Neisseria meningitidis
MENILSVLVGTVNRFLWDYLLIYALLGIGLFFTLYLGAPQITKLGAGFKSVFGGLFAKGDKDDKSLSQFQALAVAISAQIGTGNVAGVATAITAGGPGAIFWMWVSAVLGMSTIFAEALLAQKYRVVSHGKYIGGPAFYITHGLTPKIGRGAARFLSGFFSIALIIALGFIGNATQANSIASAVTIAFDVPSLAVGIVLAVLAGMVVIGGVNRIANIAQFVVPFMAVVYILCAVVILFEFSDYIVPMFNHIFTAAFNPEAVLGGAAGIGMREAIRFGVARGLFSNEAGMGSTPHAHATADVKHPVQQGMAAFVGVFIDTILVCTATALIILLTDANLSGEQGAAVTQFAFNKAFPGFGSQLLAVCLTFFALTTIIGWYYFGESNIRFLFRGRHLGIYRALVLLAIVLGTLGKVDLVWSLSDMFNGFMVIPNLIALFLLRKEIRAIYDDYLAQKKAGRDLSYPYEFHEFHDKG

SEQ ID NO: 165 - protein, 227 aa, Neisseria meningitidis
MELVFIRHGQSEWNAKNLFTGWRDVKLSEQGLAEAAAAGKKLKENGYEFDIAFTSVLTRAIKTCNIVLEESDQLFVPQIKTWRLNERHYGQLQGLDKKQTAEKYGDEQVRIWRRSYDTLPPLLDKDDEFSAHKDRRYAHLPADVVPDGENLKVTLERVLPFWEDQIAPAILSGKRVLVAAHGNSLRALAKHIEGISDEDIMGLEIPTGQPLVYKLDDNLKVLEKFYL

SEQ ID NO: 166 - protein, 773 aa, Neisseria meningitidis
LHFENEIEHKILVTYVIAKVSSCYNKLVFIGTEDPIMTAISPIQDTQSATLQELREWFDSYCAALPNNDKKLVLAARSLAEAHYPADAATPYGEPLPDHFLGAAQMVHELDLLPDAVAATLLADIGRYVPDWNLLVSERCNSTVAELVKGVDEVQKLTHFARVDSLATPEERAQQAETMRKMLLAMVTDIRVVLIKLAMRTRTLQFLSNAPDSPEKRAVAKETLDIFAPLANRLGVWQLKWQLEDLGFRHQEPEKYREIALLLDEKRTERLEYIENFLNILRGELKKYNVHFEVAGRPKHIYSIYKKMVKKKLSFDGLFDIRAVRILVDTVPECYTTLGIVHSLWQPIPGEFDDYIANPKGNGYKSLHTVIVGPEDKGVEVQIRTFDMHQFNEFGVAAHWRYKEGGKGDSAYEQKIAWLRQLLDWRENMAESGKEDLAAAFKTELFNDTIYVLTPHGKVLSLPTGATPIDFAYALHSSIGDRCRGAKVEGQIVPLSTPLENGQRVEIITAKEGHPSVNWLYEGWVKSGKAISKIRAYIRQQNADTVREEGRVQIDKQLAKLTPKPNLQELAENLGFKKLDDLYTAVGQGEISNRAIQKACGTLNEPPPVPVSETTIVKQSKIKKGGKNGVLIDGEDGLMTTLAKCCKPAPPDDIVGFVTRDRGISVHRKTCPSFRHLAEHAPEKVLDASWAALQEGQVFAVDIEIRAQDRSGLLRDVSDALARHKLNVTAVQTQSRDLEASMRFTLEVKQVNDLPRVLASLGDVKGVLSVTRL

SEQ ID NO: 167 - protein, 299 aa, Neisseria meningitidis
MVAKIKKFSDSTLSVLNNGERRFYVYCLTDLKKDKILYIGKGCGNRIFEHEWVASRSQDPVSGEIIDRKLKAISKCKKLGRYIISYHLTEVEALAAESALIHFVKSVLGKKLKNKIAGHGPGGISVEELDRRFGFSSLPLNEINPDGLILAIKIHNAFDLDTDEELDYLFDNQDDANLKSRTLGNWVIGKDVASKVKYVIGVHTGLQNAVVSAYEVDGFETMVEETKNGRKQSRYRFRTTSRSEEVLAKLGLQQKCLPELKFGSGGEKAYIRPKTETETEQENIQTTPNPKIKKEKTKS

SEQ ID NO: 168 - protein, 472 aa, Neisseria meningitidis
LQRLPRLVPPRQVLCYNALPSHFLINFMSNHTSWSSKIGFVLAAAGSAIGLGAIWKFPYTAGTNGGAVFFLLFLIFTILVALPVQLAEFYIGRTGGKNAVDSFRVLRPGTQWLWVGRMGVAACFILLSFYSVVGGWVLNYVVHSFTGAVHTGADFEALFGATISNPAGSLSYQALFMLITVWVVKGGISDGIEKANRYLMPGLFILFIALAIRSLTLPGAMEGVSFLLKPNWSYFKADTMITALGQAFFALSIGVSAMITYASYLGKDQDMFRSGHTIMWMNLLVSLLAGLVIFPAVFAFGFEPSQGPGLIFIVLPAVFMKMPFGTVLFAVFMLLVVFATLTSAFSMLETVIAATIRQDERKRKKHTWLIGTAIFIIGIPSALSFGVWGEFKVFGKTIFDLWDYVISAVIMPIGALSVSIFTAWIQDKQSVLKDAGAGSTVPRAVLLLWLNTLRYLAPIAIIIVFINSLDIL

SEQ ID NO: 169 - protein, 253 aa, Neisseria meningitidis
MGNLHEGHLALVREAKKRADSVVVSIFVNRLQFGQGEDFDKYPRTLQQDADKLEAEGVAVVFAPDEKELYPNVEQRYNVEPPNLQNELCGKFRPGHFRGVATVVSKLFNIVAPDVACFGKKDYQQLAVIKGLTEDLNFDVEIVPVDTGRAEDGLALSSRNQYLSAAERDEAPRLYRELKAVAESLAQGSLDYAGLEKRAVQSLTEYGWVVDYVEIRRVDTLEVARAGDKKLVVLAAARLGTTRLIDNLEIKLP

SEQ ID NO: 170 - protein, 485 aa, Neisseria meningitidis
MSRHPAPTGEKTFFGHPFQLSTLFHIELWERFSFYGMQGILLIYLYYTADKGGLGIDKTLAGGIVGAYSGSVYLSTILGAWFADRVWGAEKTLFLSGIVVMLGHIVLAAAPGLYGLLIGLIFIALGSGGVKSTASSMVGALYEQDEMRPLRDAGFSIFYIAINIGGFLGPLLTGLLQENIGFHYGFGAAAVGMAFGLWRYSLGRKNLPHPTVPHPLSKGQGKTAAAVGIALIAALATAIKTGLVNLDNFSGILLSTVILAVIVYFTRLLTNPRVSSDNKRHIIAYIPLFLTICMFWAVWFQIYTVATVYFDETVNRTIGSFTVPVAWKDSMQSLWVILFSGLMAAMWTKMGRKQPKTPLKFAMAVFVTGASFLGFVPFISAGTPMPIAVFALIVLAITIGELMISPIALSISTKIAPPLFKTQMVALNFLAFSLGFTLGGVLFEKGYQAGDEIGFYRLLFYIGAATGFLLLLLVPKLNKMLEGTD

SEQ ID NO: 171 - protein, 294 aa, Neisseria meningitidis
MSSGNIHIHSMTGFANAAAECGSKRINLDLRAVNHRFLDIQIRMPDDLRYLESGIREKISSHIARGKVECKIQIQDAENGSQSLELNRDLVGQLAEINKDLRKHHDLAKLGVADILRFPGVLASQRENTEELAKSITELTEKALKDFTAARKREGKKLGEHLLQRLEAMEEIIDALSELFPTLLETHKEKIRARLVEAVGSIDNDRLQQEFALFIQKSDIDEEFSRLRTHIAEVRRIVTEHKGSSGKRLDFLMQELNREANTLGSKSIAAECTQASVELKVLIEQMREQVQNIE

SEQ ID NO: 172 - protein, 131 aa, Neisseria meningitidis
MPSDVGIRLQTAFKRKLNMKKILYFLIFVFSTSVWAGDAEDNLLSIQSGYRALLQKQNNLDGKIIGMQSDLEDARRRLQAAQADIARLEAEIPAAMAQKARQAEELRQIGVRLDHAWNAVYGAGGTKASGN

SEQ ID NO: 173 - protein, 132 aa, Neisseria meningitidis
MSTFFQQTAQAMIAKHIDRFPLLKLDRVIDWQLIEQYLNRQKTRYLRDHRGRPAYPLLSMFKAVLLGQWHSLSDPELEHSLITRIDFNLFCRFDELSIPDYSHQPYSGLSEKDAYAVMTGYRPFKRVRPYAV

SEQ ID NO: 174 - protein, 321 aa, Neisseria meningitidis
MSYTQLTQGERYHIQYLSRHCTVTEIAKQLNRHKSTISREIRRHRTQGQQYSAEKAQRQSQTIKQRKRQPYKLDSQLIQHIDTLIRRKLSPEQVCAYLCKHHQITLHHSTIYRYLRQDKSNGSTLWQHLRICSKPYRKRYGSTWTRGKVPNRVGIENRPAIVDQKSHIGDWEADTIVGKGQKSALLTLVERVTRYTIICKLDSLKAEDTARAAVRALKAHKDRVHTITMDNGKEFYQHTKITKALKAETYFCRPYHSWEKGLNENTNGLIRQYFPKQTDFRNISDREIRRVQDELNHRPRKTLGYETPSVLFLNLFQPLIH

SEQ ID NO: 175 - protein, 233 aa, Neisseria meningitidis
MFRIVKWLIALPVGIFIFFNAYVYGNIITYRAVAPHRTAFMSMRMKQFEQEGRDVALDYRWVPYNRISVNLKKALIASEDARFAGHGGFDWGGIQNAIRRNRNSGKVKAGGSTISQQLAKNLFLNESRSYIRKGEEAAITAMMEAVTDKDRIFELYLNSIEWHYGVFGAEAASRYFYQIPAAKLSKQQAAKLTARVPAPLYYADHPKSKRLRNKTNIVLRRMGSAELPESDTD

SEQ ID NO: 176 - protein, 309 aa, Neisseria meningitidis
MIHVSAVQAPAHIQDTGRYGHRRYGIGHAGAMDTVALAAGNILLGNDEGTAAIEIALGGIMLVFERDTPFCLTGAVYQAELDGEPVYSYWRYTARKGQTLKMVRAVQGMYGYVCVAGGFDVPEVMGSRSTDLKAGFGGHQGRMLQKGDCLPIGKGAQELSKVGIAPIPFTDTVHLVPSSEYAAFSEKGRLNLERETWTLQSDSNRMGYRFDGQPLTLSQPLEMLSHAVQAGTVQVPPGGKPIILLADAQTTGGYPKIATVAAADLGRLAQVRFGSKVKFKIIGLKEATALRRKNQVYLNQIRRITHEAG

SEQ ID NO: 177 - protein, 97 aa, Neisseria meningitidis
LRQKTVALWVQVFETDVLKPPNALSDNEWSFPMPKMKTKSSAKKRFKVLGNGGVKRAHAFKRHILTKKTTKNKRQLRGTSMVNDRDLASVAKMLPYA

SEQ ID NO: 178 - protein, 107 aa, Neisseria meningitidis
MDNCIFCKIAAKDIPAQTVYEDGEMVCFKDINPAAPVHLLLIPKVHFDSLAHAAPEHQPLLGKMMLKVPEIAKAAGLADGFKTLINTGKGGGQEVFHLHIHIMGTPV

SEQ ID NO: 179 - protein, 344 aa, Neisseria meningitidis
MSTSLSYRDAGVDIDAGDQLVENIKPFAKRTMRPEVLGDLGGFGALVEIGKKYKNPVLVSGTDGVGTKLKLAFDWDKHDTVGIDLVAMSVNDILVQGAEPLFFLDYFACGKLDVPRATDVIKGIAQGCEESGCALIGGETAEMPGMYPVGEYDLAGFAVGVVEKENVITGRSIGAGDVVLGLASNGAHSNGYSLIRKIIERDNPDLDAEFDNGKTLREAVIAPTRLYVKPILAALEKFTIKGMAHITGGGITENVPRVLPENTVAQIDAKSWELPKLFQWLQKAGNVETQEMYRTFNCGIGMVVIVAAEDADAVQGLLGEQGETVYRLGLIRERQGDEHQTQVA

SEQ ID NO: 180 - protein, 31 aa, Neisseria meningitidis
MDIVFAADGRMRRLFTLRQYFGILHRLLKNR

SEQ ID NO: 181 - protein, 335 aa, Neisseria meningitidis
MSTFFQQTAQAMIAKHIDRFPLLKLDQVIDWQPIEQYLNRQKTRYLRDHRGRPAYPLLSMFKAVLLGQWHSLSDPELEHSLITRIDFNLFCRFDELSIPDYSTLCRYRNWLAQDDTLSELLELINRQLTEKGLKIEKASAAVVDATIIQTAGSTQRQAIEVDEEGQINGQTTPSKDKDARWTKKNGLYRLGYKQHTRTDEEGYIKKLHITPANAHECKHLLPLLEGLPKGTTVYADKGYDSEENRQHLEEHQLLDGIMRKAHRKHPLSEVQTKRNRYLSKTRYVVEQSFGTLHRKFRYARAAYFGLIKVSAQSHLKAMCLNLLKAANRLSAPAAA

SEQ ID NO: 182 - protein, 160 aa, Neisseria meningitidis
MMKKILAVSALCLMTAAARAADTYGYLAVWQNPQNADDVLQVKTTKEDSTKSEAFAELEAFCKGQDTLAGIAEDEPTGCRSVVSLNNTCVALAYPKALGAMRVENAVVITSPRFTSVHQVALNQCIKKYGVQGQCGLETVYCTSSSYYGGTVRSLIQNLK

SEQ ID NO: 183 - protein, 411 aa, Neisseria meningitidis
MTISTMAQTHDTRLQKTLLFPSQQGWKSKTFLKPDSHIRLATVFSGIGAVEQAFHRLNLNHTIVFAGDIDPYVKKSYLGNYKLNEDFWHNDITQFDASKFRNQVDILVGGSPCQAFSMVGKRAGLEDTRGTLFYEFARVVDEVQPKIFIYENVKGLLNHDNGKTWKVVKSVFYSLGYDLYFQIMNSKDYGIPQHRERIFVVGFHTPPINGFQFPEKIELEHTMQDFLEDYTDSKYFLREKGVKFVTSSKNRQKRYTQINGEIALCQKANQQFNWHGDFIFQAARESEFDDFIFDVNNVEEKYYLSEKIKNYVLAGGTKNFKTSTETDLPVARPLLQTMHKMHRAGVDNYVTHNRGRIRKLTPRECLRLMGFRDDFKILVSDTQMYRQAGNSIVVDVLIAILKQMDITLYGE

SEQ ID NO: 184 - protein, 331 aa, Neisseria meningitidis
MLRKLLKWTAVFLTVSAAVFAALLFVPKDNGRAYRIKIAKNQGISSVGRKLAEDRIVFSRHVLTAAAYVLGVHNRLHTGTYRLPSEVSAWDILQKMRGGRPDSVTVQIIEGSRFSHMRKVIDATPDIEHDTKGWSNEKLMAEVAPDAFSGNPEGQFFPDSYEIDAGGSDLRIYQTAYKAMQRRLNEAWESRQDGLPYKNPYEMLIMASLVEKETGHEADRDHVASVFVNRLKIGMRLQTDPSVIYGMGAAYKGKIRKADLRRDTPYNTYTRGGLPPTPIALPGKAALDAAAHPSGEKYLYFVSKMDGTGLSQFSHDLTEHNAAVRKYILKK

SEQ ID NO: 185 - protein, 592 aa, Neisseria meningitidis
MTVLKLSHWRVLAELADGLPQHVSQLARMADMKPQQLNGFWQQMPAHIRGLLRQHDGYWRLVRPLAVFDAEGLRELGERSGFQTALKHECASSNDEILELARIAPDKAHKTICVTHLQSKGRGRQGRKWSHRLGECLMFSFGWVFDRPQYELGSLSPVAAVACRRALSRLGLKTQIKWPNDLVVGRDKLGGILIETVRAGGKTVAVVGIGINFVLPKEVENAASVQSLFQTASRRGNADAAVLLETLLAELDAVLLQYARDGFAPFVAEYQAANRDHGKAVLLLRDGETVFEGTVKGVDGQGVLHLETAEGKQTVVSGEISLRSDDRPVSVPKRRDSERFLLLDGGNSRLKWAWVENGTFATVGSAPYRDLSPLGAEWAEKADGNVRIVGCAVCGEFKKAQVQEQLARKIEWLPSSAQALGIRNHYRHPEEHGSDRWFNALGSRRFSRNACVVVSCGTAVTVDALTDDGHYLGGTIMPGFHLMKESLAVRTANLNRHAGKRYPFPTTTGNAVASGMMDAVCGSVMMMHGRLKEKTGAGKPVDVIITGGGAAKVAEALPPAFLAENTVRVADNLVIHGLLNLIAAEGGESEHT

SEQ ID NO: 186 - protein, 512 aa, Neisseria meningitidis
MWKILQACVEADVIVITQAANTGLTGGSTPDGNDYDRDIVIVNTMRMNIIQTINNNEQVVCLPGSTLNQLELLLKPLGREPHSVIGSSCIGASVLGGVCNNSGGALVQRGPAYTEMALFAQINEEGRLELVNHLGIDLGDTPEEILTNLQGHHYQNKDITQDAGKGHDHAYCEHVRQVDEPTAARFNADPARHYEASGCAGKLMVFAVRLDTFPQEKQTAVFYIGTNDINELTDIRRAALGEFESLPVSGEYIHRHAFDIADVYGKDTFYVIKKFGTHQLPKLFDLKARVDRFGKKASFLPKHFSDKAMQFVSKYLPDHLPKSMRDYRDKYEHHLILKMGGKGVDEARAFLKEYFAHHSGAFFECNAEETQAAMLHRFAVASAAIRYRAVHDDEVEDLVALDIALRRDDRDWFEKLPSEIDNKIIHKLYYGHFMCHVFHQDYIIKKGNDCMALEHEMLHLLDQRGAQYPAEHNVGHLYEAKPALKQFYRKLDPTNSFNPGIGKTSKKKNWAE

SEQ ID NO: 187 - protein, 214 aa, Neisseria meningitidis
MKLKHLLPLLLSAVLSAQAYALTEREDYLVLDKPIPQEQSGKIEVLEFFGYFCVHCHHFDPLLLKLGKALPSDAYLRTEHVVWQPEMLGLARMAAAVNLSGLKYQANPAVFKAVYEQKVHLEDRAVAGKWALSQKGFDGKKLMRVYDSPEAAAAASKMQKLTEQYGIDNTPTVIVGGKYRVIFNNGFDGGVHTIKELVAKVREERKRQPPAVQK

SEQ ID NO: 188 - protein, 159 aa, Neisseria meningitidis
MPESIFKQISLDILKLHRDSVYSLLATSGCNCQVHEAAYVNIDGKYYIALSCEPEVGEVKTGILLIEDESRNLRLSWVGSARELDRKDSVYKRALSALSRKLGRCKDRLHTAVQPFLLELVPEKGRFSVGDEEVWISRNDLVRALYPVGYSMRQAVFQI

SEQ ID NO: 189 - protein, 167 aa, Neisseria meningitidis
MALLNILQYPDERLHTVAKPVEQVDERIRKLIADMFETMYESRGIGLAATQVDVHERVVVMDLTEDRSEPRVFINPVIVEKDGETTYEEGCLSVPGIYDTVTRAERVKVEALNEKGEKFTLEADGLLAICVQHELDHLMGIVFVERLSQLKQGRIKTKLKKRQKHTI

SEQ ID NO: 190 - protein, 194 aa, Neisseria meningitidis
MHILTAGVDEAGRGPLVGSVFAAAVILPETFDLPGLTDSKKLSEKKRDALAEMIKEQAAAWYVAAATPEEIASLNILHATMLAMKRAVDGLAVRPEKIFIDGNRIPEHLDIPAEAVVKGDSKIIEISAASVLAKTARDAEMYALAQRHPQYGFDKHKGYGTKQHLEALKQYGVLPEHRRDFAPVRNLLAQQTLF

SEQ ID NO: 191 - protein, 112 aa, Neisseria meningitidis
MKKIEAIVKPFKLDDVREALTEIGITGMTVSEVKGFGRQKGHTEIYRGAEYAVDFLPKVKIELVLADDAVERAIDVIVEVARSGKIGDGKIFVLPVEEAIRIRTGERADAAV

SEQ ID NO: 192 - protein, 919 aa, Neisseria meningitidis
MKRMLFNATQAEELRVAIVDGQNLLDLDIETLGKEQRKGNIYKGIITRIEPSLEACFVDYGTDRHGFLPFKEVSRSYFQDYEGGRARIQDVLKEGMEVIVQVEKDERGNKGAALTTFISLAGRYLVLMPNNPRGGGVSRRIEGEERQELKAAMAELDIPNGMSIIARTAGIGRSAEELEWDLNYLKQLWQAIEEAGKAHHDPYLLFMESSLLIRAIRDYFRPDIGEILVDNQEVYDQVAEFMSYVMPGNIGRLKLYEDHTPLFSRFQIEHQIESAFSRSVSLPSGGAIVIDHTEALVSIDVNSARATRGADIEDTAFKTNMEAAEEVARQMRLRDLGGLVVIDFIDMENPKHQRDVENVLRDALKKDRARVQMGKLSRFGLLELSRQRLKPALGESSHVACPRCAGTGVIRGIESTALHVLRIIQEEAMKDNTGEVRAQVPVDVATFLLNEKRAELFAMEERLDVNVVLIPNIHLENPHYEINRIRTDDVEEDGEPSYKRVAEPEEDESAKPFGGEKAKAARPEPAVKGVRHTSPAPTAAPEKKTSWWDSFKAWLKRIFGGSETQAAPAAETSEKRSTANRSGSRANNRRQNPRRSKREGSKVEVREVAGKTARQEARADTAETRNNGNRRRNERGDRAAERANEAEIQSRNVQPAATVADAAPSETEVQTGKRRRNGSRNERGQTAPETAAVAETAVQTAENTPSEPHTAEDKGSKPKSERNRRERDSRDAKERRERNNQRDRRQNGKKRNIPSAAKIEQYLNIHDTADKVHSAAAHVFGETDANAPITVSIADPVAERDLPTASPAVSNGDAPVYDAAEKIRRATAAILPEGATPKAEAQEMPSETATFTAAAEQARETAQTGGLVLIETDPAALKAWAAQPEVQTGRGLRRSEQPKPSEVATVPAEEMIQVETRQG

SEQ ID NO: 193 - protein, 255 aa, Neisseria meningitidis
MALAKRIIPCLDVKDGRVVKGVNFIGLRDAGDPVEAAKRYNGEGADELTFLDITASSDNRDTILHIIEEVAGQVFIPLTVGGGVRTVADIRRLLNAGADKVSINTAAVTRPDLINEAAGFFGSQAIVAAVDAKAVNPENTRWEIFTHGGRNPTGLDAVEWAVEMQKRGAGEILLTGMDRDGTKQGFNLPLTRAVAEAVDIPVIASGGVGNVRHLIEGITEGKADAVLAAGIFHFGEIAIREAKRAMREAGIEVRL

SEQ ID NO: 194 - protein, 109 aa, Neisseria meningitidis
MGSLIIEDLQEGFGKEAVKGKEITVHYTGWLEDGTKFDSSLDRRQPLTITLGVGQVIKGWDEGFGGMKEGGKRKLTIPSEMGYGAHGAGGVIPPHATLIFEVELLKVYE

SEQ ID NO: 195 - protein, 587 aa, Neisseria meningitidis
MGFPVRKFDAVIVGGGGAGLRAALQLSKSGLNCAVLSKVFPTRSHTVAAQGGISASLGNVQEDRWDWHMYDTVKGSDWLGDQDAIEFMCRAAPEAVIELEHMGMPFDRVESGKIYQRPFGGHTAEHGKRAVERACAVADRTGHAMLHTLYQQNVRVNTQFFVEWTAQDLIRDENGDVVGVTAMEMETGEVYIFHAKAVMFATGGGGRIYASSTNAYMNTGDGLGICARAGIPLEDMEFWQFHPTGVAGAGVLITEGVRGEGGILLNADSERFMERYAPTVKDLASRDVVSRAMAMEIYEGRGCGKNKDHVLLKIDHIGAEKIMEKLPGIREISIQFAGIDPIKDPIPVVPTTHYMMGGIPTNYQGEVVVPQGDEYEVPVKGLYAAGECACASVHGANRLGTNSLLDLVVFGKAAGDSMIKFIKEQSDWKPLPADAGELTRQRIERLDNQTDGENVDALRRELQRSVQLHAGVFRTDEILSKGVREVMAIAERVKRTEIKDKSKVWNTARIEALELDNLIEVAKATLVSAEARKESRGAHASDDHPERDDENWMKHTLYHSDINTLSYKPVHTKPLSVEYIKPAKRVY

SEQ ID NO: 196 - protein, 383 aa, Neisseria meningitidis
MQTWQLPEHIADVLPTNARQLESAREQLLALFRVHGYELVQPPLMEYAHSLLTHIDAGLSLKTILVTDRLSGRQLGIRADITPQVARIDAHLLSANQGINRLCYAGPVLHAQPDGLLNMREPLQAGAEMYGFADIRGDIELIDLMLKSMKIADMGKVLLSLGHIGIFRALSDAAHLDAGQSATLLALMQDKDTGAVEAQVKAWKLDGMWAKAFSLLPRLYGGREVLSDARGRLPDLSAVGGALGELQAVCDAFPDCEIHIDLSELRVDNYHTGLLYAAYAADFHDAVARGGRYDGLGGYFGRARPATGFSFDLRSFIGRLPAIERQPAVLVDAEDAEAAREAVEALREQGQCVVIDYGIGHNVSEELAGRLKKTDGVWQVVKR

SEQ ID NO: 197 - protein, 222 aa, Neisseria meningitidis
MNHDITFLTLFLLGFFGGTHCIGMCGGLSSAFALQLPPHINRFWLILLLNTGRVSSYTAIGLILGLIGQVGVSLDQTRVLQNILYTAANLLLLFLGLYLSGISSLAAKIEKIGKPIWRNLNPILNRLLPIKSIPACLAVGILWGWLPCGLVYSASLYALGSGSAATGGLYMLAFALGTLPNLLAIGIFSLQLKKIMQNRYIRLCTGLSVSLWALWKLAVLWL

SEQ ID NO: 198 - protein, 1019 aa, Neisseria meningitidis
MFWIVLIVILLLALAGLFFVRAQSEREWMREVSAWQEKKGEKQAELPEIKDGMPDFPELALMLFHAVKTAVYWLFVGVVRFCRNYLAHESEPDRPVPPASANRADVPTASDGYSDSGNGTEEAETEEAETEEAEAAEEEAADTEDIATAVIDNRRIPFDRSIAEGLMPSESEISPVRPVFKEITLEEATRALNSAALRETKKRYIDAFEKNETAVPKVRVSDTPMEGLQIIGLDDPVLQRTYSHMFDADKEAFSESADYGFEPYFEKQHPSAFSAVKAENARNAPFRRHAGQGKGQAEAKSPDVSQGQSVSDGTAVRDARRRVSVNLKEPNKATVSAEARISRLIPESRTVVGKRDVEMPSETENVFTETVSSVGYGGPVYDETADIHIEEPAAPDAWVVEPPEVPKVPMPAIDIPPPPPVSEIYNRTYEPPSGFEQVQRSRIAETDHLADDVLNGGWQEETAAIADDGSEGVAERSSGQYLSETEAFGHDSQAVCPFENVPSERPSCRVSDTEADEGAFQSEETDAVSEHLPTTDLLLPPLFNPEATQTEEELLENSITIEEKLAEFKVKVKVVDSYSGPVITRYEIEPDVGVRGNSVLNLEKDLARSLGVASIRVVETIPGKTCMGLELPNPKRQMIRLSEIFNSPEFAESKSKLTLALGQDITGQPVVTDLGKAPHLLVAGTTGSGKSVGVNAMILSMLFKAAPEDVRMIMIDPKMLELSIYEGIPHLLAPVVTDMKLAANALNWCVNEMEKRYRLMSFMGVRNLAGFNQKIAEAAARGEKIGNPFSLTPDDPEPLEKLPFIVVVVDEFADLMMTAGKKIEELIARLAQKARAAGIHLILATQRPSVDVITGLIKANIPTRIAFQVSSKIDSRTILDQMGAENLLGQGDMLFLPPGTAYPQRVHGAFASDEEVHRVVEYLKQFGEPDYVDDILSGGSSEELPGIGRSGDGETDPMYDEAVSVVLKTRKASISGVQRALRIGYNRAARLIDQMEAEGIVSAPEHNGNRTILVPLDNA

SEQ ID NO: 199 - protein, 245 aa, Neisseria meningitidis
MALQDRTGQKVPSVVFRTRVGDTWKDVSTDDLFKGKKVVVFSLPGAFTPTCSSSHLPRYNELFGAFKENGVDAIYCVSVNDTFVMNAWAAEEESDNIYMIPDGNGEFTEGMGMLVGKEDLGFGKRSWRYSMLVNDGVVEKMFIEPEEPGDPFKVSDADTMLKFVAPDWKAQESVAIFTKPGCQFCAKAKQALQDKGLSYEEIVLGKDATVTSVRAITGKMTTPQVFIGGKYIGGSEDLEAYLAKN

SEQ ID NO: 200 - protein, 403 aa, Neisseria meningitidis
MNQLKLAVSGAQILFVAFGAMVLVPLLTGLNPALALLGAGLGTLLFQITTKRKVPIFLGSSFAFIAPIIYSVGEWGLPSTMFGLFAAGFMYFVFAALIRWRGLAAVHKLLPPVVIGPVIMVIGLSVAVAASSMAMGQADGKQVIDYTDSLILSGFTFAVTAIVSVFGSRMMKLIPILIGVASGYVLALLMGLVDTASIAHAPWFAVPHFETPQINWQAALFMLPVAVAPAIEHIGGIMAIGNVTGKDYTKDPGLDKTLAGDGLGVCVAGLIGGPPVTTYGEVTGAVMITKNSNPVIMTWAAVFAVCMAFFGKFNAFLASIPMPVMGGIMLLLFGTIASLGVKTLIDAKVDLMLPKNLVIVSSVLTTGIGGMTLKLGSFSFAGVGLCAVLAIMLNSLLPDPKES

SEQ ID NO: 201 - protein, 242 aa, Neisseria meningitidis
MTAYRIAPSILSADFARLGEEVESVIAAGADLIHFDVMDNHYVPNLTFGPMVCAALKPYASVPIDVHLMVEPVDDLIQSFAKAGASIITFHPEASRHIDRSLSLIRDMGCQAGLVLNPATPVYLLENVLDRLDMVLLMSVNPGFGGQSFIPHTLEKIRRVRAMLDRYEAQSGRHIAIEVDGGIKTDNIAAVARAGADTFVAGSAIFGKPDYKAVIDAMRAELEKSGRLNLAPMIEIEMPSEN

SEQ ID NO: 202 - protein, 72 aa, Neisseria meningitidis
MSMPEMPKWYDDDGQIVSCTEKVKVMSENMAELYQTAQDAFEDALLMGCGERQLRDYLLALIEGLENPYRKV

SEQ ID NO: 203 - protein, 258 aa, Neisseria meningitidis
MTLIHPTAVIDPKAELDSSVKVGAYTVIGPNVQIGANTEIGPHAVINGHTSIGENNRIFQFASLGEIPQDKKYRDEPTRLIIGNGNTIREFTTFNLGTVTGIGETRIGDDNWIMAYCHLAHDCVVGNHTIFANNASLAGHVTIGDYVVLGGYTLVFQFCRIGDYAMTAFAAGVHKDVPPYFMASGYRAEPAGLNSEGMRRNGFTAEQISAVKDVYKTLYHRGIPFEEAKADILRRAETQAELAVFRDFFAQSARGIIR

SEQ ID NO: 204 - protein, 65 aa, Neisseria meningitidis
MPSEKIYYGVLIFLCIASMLLSPFFYAGALKPKKAALRKDGQWKLILLSNTVAAAVLFWMWWKWF

SEQ ID NO: 205 - protein, 87 aa, Neisseria meningitidis
MANSAQARKRARQSVKQRAHNASLRTAFRTAVKKVLKAVEAGDKAAAQAVYQESVKVIDRIADKGVFHKNKAARHKSRLSAKVKALA

SEQ ID NO: 206 - protein, 140 aa, Neisseria meningitidis
MKYMINFLKKTFELMSWVLVILIIGTFYDYYQIRQYAELEKKSISNILLYAQKEKFRLESKDKYMRGGYTKYEFIFSEYSNTTFLNFINDLKKDNYLPLDGYGHGFLCRKGESISINIYPEINKFILVWGYPENLCADSN

SEQ ID NO: 207 - protein, 185 aa, Neisseria meningitidis
LQQCPKCRIQESDLQNHSEHNTMKYRRFYRNGGTYFFTVVTNKRQKILTDDAVRLALRQAVMAVRERYPFEILAWVLMPDHLHTIWRLPDNDSAYSERWRQIKRHSQYLIGGNLRLWQKRFWEYTIRDEADFAWHFDYLHFNPVKHGYVGQISDWGFSTFHRYVKQGIYPHNWGGGNADFSIGYD

SEQ ID NO: 208 - protein, 525 aa, Neisseria meningitidis
MSKAVKRLFDIIASASGLIVLSPVFLILAYLIRKNLGSPVFFIQERPGKDGKPFKMVKFRSMRDALDSDGIPLPDSERLTPFGKKLRAASLDELPELWNVLKGDMSLVGPRPLLMQYLPLYDNFQNRRHEMKPGITGWAQVNGRNALSWDEKFACDVWYTDHYSFWLDMKILFLTVKKVLIKEGISAEGEATMPYFTGNQTKEKNNILILSAGRRVELVQDFQTEAARFSDGISVFATDLNPRMSSACHVSDGSFEVPPISADSYIDSIFNLAVRENIGLIIPTIDTELQKLADERERFEAASVHIVVSDSDFIAQCRDKRKTATLFARYGIRSPEIYDRKKLVFPCFAKPYDGSRAIGAKRIDTPADLTPEVLADTKLMFCQFIDIENKFSEFTVDMYYDRQCRLKCAIPRKRLEVRSGEISKGVTCKNSLYQTLLEKMSVLQGARGCITAQFFYNEETGEFYGVEINPRFGGGFPLTYAAGGNYPSRLMREYLGDEEIPFSDDWENNLIMLRYDAKVLVHEND

SEQ ID NO: 209 - protein, 85 aa, Neisseria meningitidis
MIELKLVDESSFQAVLDLKISEADERARFVAPNVRSLADAWLYRENEDVFPRAIYWDKQVVGFLLLEIDKDEAEYFIWRIMIGQQ

SEQ ID NO: 210 - protein, 291 aa, Neisseria meningitidis
LFTSQPGISKQIKLLEEEIGIQIFIRSGKRVVSVSQPGKVVLDIAERILRDVQNIKNIGSEFTGQDSGSLTVATTHTQARYALPLIVADFVKRYPKVNLTIKQGSPAAIAQMVTSGESDLAIVTERIDDHPELGRLSCYDWTHAVIVPNDHPLLECRNPLRIEDLARFPLITYEFAFNAGSSIARAFSKARLEQPDVALAAADTDVLKTYVRLGLGVGLMAKMAYNPDTDGDLQLVDAAHLFEPSPTWIALRSDTYLRGYAYDFIQAFAPHLTREKVDRILYTPISEDFSI

SEQ ID NO: 211 - protein, 298 aa, Neisseria meningitidis
MAFENIISAADKARILAEALPYIRRFSGSVVVIKYGGNAMTEPALKEGFARDVVLLKLVGIHPVIVHGGGPQINAMLEKVGKKGKFVQGMRVTDKEAMDIVEMVLGGHVNKEIVSMINTYGGHAVGVSGRDDHFIKAKKLLIDTPEQNGVDIGQVGTVESIDTGLVKGLIERGCIPVVAPVGVGEKGEAFNINADLVAGKLAEELNAEKLLMMTNIAGVMDKTGNLLTKLTPKRIDELIADGTLYGGMLPKIASAVEAAVNGVKATHIIDGRVPNALLLEIFTDAGIGSMILGGGEDA

SEQ ID NO: 212 - protein, 124 aa, Neisseria meningitidis
MRKSRLSRYKQNKLIELFVAGVTARTAAELVGVNKSTAAYYFHRLRLLIYQNSPHLEMFDGEVEADESYFAERQNHINGIENFWNQAKRHLRKFNGIPKAHFELYLKECEWRFNNSEIKVLVPY

SEQ ID NO: 213 - protein, 498 aa, Neisseria meningitidis
VKPLRRLTNLLAACAVAAAALIQPALAADLAQDPFITDNAQRQHYEPGGKYHLFGDPRGSVSDRTGKINVIQDYTHQMGNLLIQQAAIQGNLGYTVRFSGHGYEEHAPFDNHAADSASKEQGNVNEGFTVYRLNWEGHEHHPADAYDGPKGGNYPKPTGARDEYTYHVNGTARSIKLNPTDTRSIRQRISDNYNNLGSNFSDRADEANRKMFEHNAKLDRWGNSMEFINGVAAGALNPFISAGEALGIGDILYGTRYAIDKAAMRNIAPLPAEGKFAAIGGLGSVAGFEKNTREAVDRWIQENPNAAETVEAVFNVAAAAKVAKLAKAAKPGKAAVSGDFSAAYNTRTTRKVTTETEGLNRIRQNQKNSNIHEKNYGRDNPNHINVLSGNSIQHILYGDEAGGGHLFPGKPGKTTFPQHWSASKITHEISDIVTSPKTQWYAQTGTGGKYIAKGRPARWVSYETRDGIRIRTVYEPATGKVVTAFPDRTSNPKYNPVK

SEQ ID NO: 214 - protein, 356 aa, Neisseria meningitidis
MNLISRYIIRQMAVMAVYALLAFLALYSFFEILYETGNLGKGSYGIWEMLGYTALKMPARAYELMPLAVLIGGLVSLSQLAAGSELTVIKASGMSTKKLLLILSQFGFIFAIATVALGEWVAPTLSQKAENIKAAAINGKISTGNTGIWLKEKNSIINVREMLPDHTLLGIKIWARNDKNELAEAVEADSAVLNSDGSWQLKNIRRSTLGEDKVEVSIAAEENWPISVKRNLMDVLLVKPDQMSVGELTTYIRHLQNNSQNTRIYAIAWWRKLVYPAAAWVMALVAFAFTPQTTRHGNMGLKLFGGICLGLLFHLAGRLFGFTSQLYGIPPFLAGALPTIAFALLAVWLIRKQEKR

SEQ ID NO: 215 - protein, 124 aa, Neisseria meningitidis
MKNFNVVKESLRELGIKQGFDLYEKATTEKLNSEDPLDLQWLSNYSSDWNDELEEDFDSFFQHMKEYQYAIDNEDIKSACSSLCEAMLYVGNIKNFFEFLKSDMIRLLRGESKTTDFQWPQFDE

SEQ ID NO: 216 - protein, 146 aa, Neisseria meningitidis
VNIRRAVYADCAALAALDAVCNPSAWTQRQFESALVSPSEQVFLAEKDGRLAAFIVWQNLPDESELHLIATAPECRRRGVASALLEYWFANLPEGTQRLLLEVRAGNTAAQALYAAHGFTDAGRRKNYYRTADGKTEDAVLMEKIC

SEQ ID NO: 217 - protein, 124 aa, Neisseria meningitidis
MQYLIVKYSHQIFVTITILVFNIRVFLLWKNPEKPLAGFWKALPHLNDTMLLFTGLWLMKITHFSPFNAPWLGTKILLLLAYIALGMMMMRARPRSTKFYTVYLLAMCCLACIVYLAKTKVLPF

SEQ ID NO: 218 - protein, 122 aa, Neisseria meningitidis
MRIFKNQWIVKFAKKHKISDSELLEAVERADNGLIDADLGGGVIKQRIARQGQGRSGGYRSLILFKQADRAFFVYAFAKNDRENISDKELDVYRKAAAYYLKYTRAELAALKEDGIITEIES

SEQ ID NO: 219 - protein, 169 aa, Neisseria meningitidis
MIILHTNKGDIKIELDFDKAPVTAKNFEQYVKDGFYDGVIFHRVIKGFMIQGGGMDENMNEKETRDPIQNEASNGLPNDKYTIAMARTSDPHSASAQFFINTADNAFLNFRSKELYGKTVVQDWGYAVFGKVVDGFDVVDAIEGVSTKRHGYHDDVPSEPVVIIKAEAV

SEQ ID NO: 220 - protein, 477 aa, Neisseria meningitidis
MSQYDVVVIGAGPGGYVAAIRAAQLGFKTACVDAGVNKAGNAPALGGTCLNVGCIPSKALLQSSEHFHAAQHDFAEHGITVGDVKFDAAKMIERKDAIVTKLTGGVKFLFQKNKVTSLFGTASFAGKNGDAYQIEVDNKGEKTVIEAKHVIVATGSVPRPLPQVAIDNVNVLDNEGALNLTEVPAKLGVIGSGVIGLEMGSVWNRVGSEVTILEAAPTFLAAADQQIAKEAFKYFTKEQGLSIELGVKIGDIKSEGKGVSVAYETAAGEAKTEVFDKLIVAIGRIPNTKGLNAEAVGLEKDERGFIKVDGECRTNLPNVWAIGDVVRGPMLAHKASDEGVAVAERIAGQKPHIDFNNVPFVIYTDPEIAWVGKTEEQLKAEGVEYKKGTSGFGANGRALAMGKAKGTVKVLADAKTDRILGVHMIGPVVSELVTEGVTALEFFASSEDIARIIHAHPTLSEVVHEAALAADKRALHG

SEQ ID NO: 221 - protein, 273 aa, Neisseria meningitidis
MSSPRHVFYISDRTGLTAENIGEALLNQFGNLSFKRHTHPFVDTPEKARAVVEKVNRSRQENGQRPIAFVSVVDDEIRRIIKGADAFQINFFETFLGLLEKELNTEATASEQGHHSIGNTKRYDARMEAVNFSLNHDDGVSDKNLQEADVILMGVSRSGKTPTCLYLALQYGIRAANYPLIPDDLESADLPRMVKPYRDKLFGLTIQPERLQAIRQERRPNSTYAKIDTCRSEVADAQSMFRRHGIPFANTTDKSVEELAVHILQACKLKRRF

SEQ ID NO: 222 - protein, 544 aa, Neisseria meningitidis
MIKPNLRPKLGSSALIAFLSLYSSLVLNYAFFAKVVELHPFNGTGADIFLYTMPVVLFFLSNFVFHVIALPFVHKVLIPLILVISAAVSYQEIFFNIYFNKSMLNNVLQTTAAESARLITPGYVLWIVCLGVLPALAYIAVKVKYRVWYKELLTRLVLAAVSFLCALGIAMLQYQDYASFFRNNKSVTHLIVPSNFIGAGVSKYKDWKRSNIPYTQLDMAVVQNRPAGSLRRFVVLVVGETTRAANWGLNGYSRQTTPLLAARGDEIVNFPQVRSCGTSTAHSLPCMFSTFDRTDYDEIKAEHQDNLLDIVQRAGVEVTWLENDSGCKGVCGKVPNTDVTSLNLPEYCRNGECLDNILLTKFDEALNKNDKDAVLILHTIGSHGPTYYERYTEAERKFTPTCDTNEIDKCARATLINTYDNTVLYVDQFIDKVIRKLENRDDLESVVHYVSDHGESLGENGMYLHAAPYAIAPSGQTHIPMVMWFSKAFRQHGGIDFQCLKQKAAENEYSHDHYFSTVLGLMDISNSQTYRKEMDILAACRRPR

SEQ ID NO: 223 - protein, 279 aa, Neisseria meningitidis
VKRIFLFLATNIAVLVVINIVLAVLGINSRGGAGSLLAYSAVVGFTGSIISLLMSKFIAKQSVGAEVIDTPRTEEEAWLLNTVEAQARQWNLKTPEVAIYHSPEPNAFATGASRNSSLIAVSTGLLDHMTRDEVEAVLAHEMAHVGNGDMVTLTLIQGVVNTFVVFLSRIIANLIARNNDGSQSQGTYFLVSMVFQILFGFLASLIVMWFSRQREYRADAGAAKLVGAPKMISALQRLKGNPVDLPEEMNAMGIAGDTRDSLLSTHPSLDNRIARLKSL

SEQ ID NO: 224 - protein, 740 aa, Neisseria meningitidis
MTKSTIIYTYTDEAPALATQSLLPIVQAFTRHADIDVKTSDISLSGRILAAFPEYLTEAQRVPDALAELGELVKQPDANVIKLPNISASVPQLTAAIKELQSKGFAVPDYPADPQTDEEKAVRERYDRIKGSAVNPVLREGNSDRRAPKAVKNFAKKHPHSMGAWTKDSKTHVATMQSGDFFHNEQSVTVPEATSVSIVFTDKQGNKKELRAPVALKAGEIIDATVMSKKALLAFLAEQVKDAKAKGVLFSLHMKATMMKVSDPIIFGHAVKVFFAPVFEKFGDKLAAAGVNVNNGFGNLLANLDKLDADTRAAVEAEIAAVYAANPDLAMVDSDKGITNLHVPSDVIVDASMPAMIRNSGRMWDKDGKAQDTKAVIPDSSYAGVYQATIDFCREHGAFDPTTMGTVPNVGLMAQAAEEYGSHNKTFEIEADGQVQVIDAAGKVLMQHDVEAGDIWRMCQTKDAPVKDWVQLAVNRARLSNTPAVFWLDENRPHDKSLLAKVKAYLAELDTDGLDIRVLAPEEAAKFSLGRLKNGEDTISVTGNVLRDYLTDLFPILELGTSAKMLSIVPLMNGGGMFETGAGGSAPKHVQQFLEENHLRWDSLGEFLALAVSFEHLAQKTGNAKAQVLADTLDAATEKLLLNDKSPKRKAGELDNRGSHFYLTLYWAQELAAQDKDAELKAAFTPLAAALTADEAKIVAELSAVQGKAADIGGYYAANPEKAAQVMRPSVTFNQALNAL

SEQ ID NO: 225 - protein, 581 aa, Neisseria meningitidis
MERQTDEFAQAAARAAIRFLERYAGSGSEVLANCTERLFQALQNGHSFIRLSGGEADALSALAPVVGTSAAPLILEGRRLFLGRMWQLEYDLAAEIKRLAAAGTSAPDAAGARQNLAKWFQGTGSEGQRDAAALALLQSFMVITGGPGTGKTTTVAKLLALICGEDENLPNIALAAPTGKAAAHMARALHRAINGFDAPEAVRRHLLKLEGQTVHRLLKLRPPKMQAAFNPVYPLPFDVLVIDEASMLDTALMLQLLKAVKTGARVILLGDENQLPSVGIGAVLSVLSQKTVLDGETHQRLAGFLPEHGFSVSANPPVLAQNTAHLSFSHRFGDNSGIGCLARAAVSGDEGAWALFDRFPDELEHSECSPNARVERLYRAHKAYWQAVKDGNIEAAYAGISDIVVLAAWRQDAEDFNEAYCSHVRRKMNIPEHQAYFAGEPIMIRQNDYALELFNGDIGLIMEDVGRQGSLAAYFADADGFKKVAVSCLPDFEPAFAMTVHKSQGSEYREVWLLPPSAAPSDEGDDALSGLSKELLYTAITRAREKFVFFGGEETFRQAAATVKTRQTALGSMLERVFSQE

SEQ ID NO: 226 - protein, 287 aa, Neisseria meningitidis
MSEIGLVKIYSGKVRDLYEIDDKRMLMVASDRLSAFDVILDDPIPSKGEILTQISNFWFKKLAHIMPNHFTGQTVYDVLPENEAKVLEKRAVVAKKLTPVKVEAIVRGYLAGSGWKDYQKTGSVCGIRLPEGMQEAQQLPEVIFTPSTKAAVGDHDENISFEECGRIIGKELAEEVRAKAVRLYTEAAEYAKSRGIIICDTKFEFGLDTNGTLTLMDEVLTPDSSRFWPADQYKVGTNPPSFDKQFVRDWLEQSGWNKKAPAPKVPADVIQKTVEKYREALTLLTQD

SEQ ID NO: 227 - protein, 73 aa, Neisseria meningitidis
MNFLLSKLLLGLIRFYQYCISPLIPPRCRYTPTCSQYAVEAVKKYGAFKGGRLAIKRIARCHPFGGHGHDPVP

SEQ ID NO: 228 - protein, 236 aa, Neisseria meningitidis
MTSCEPVNEQTSFNNPEPMTGFEHTVTFDFQGTKMVIPYGYLARYTQDNATKWLSDTPGQDAYSINLIEISVYYKKTDQGWVLEPYNQQNKAHFIQFLRDGLDSVDDIVIRKDACSLSTTMGERLLTYGVKKMPSAYPEYEAYEDKRHIPENPYFHEFYYIKKGENPAIITHWNNRVNQAEEDNYSTSVGSCINGFTVQYYPFIREKQQLTQQELVGYHQQVEQLVQSFVNNPSKK

SEQ ID NO: 229 - protein, 917 aa, Neisseria meningitidis
MRHLRYIYSIYGNERKIMQLHILNNPKDAALAADAEFLKQSLFNLLHEEASPLVVETVKLLSTSDDSAALIEKVLPQLDEQQTHDLTLACGLFAQILNIAEDVHHERRRQIHEEAGRGGAEGSLTETVRRLKAGKADGKSVQRQLDNTSVTAVLTAHPTEVQRQTVLSFNRRIRALLPQRERCTNADALARLRREIDTILLGLWQTSETRRHKLSVNDEINNGVSIFPMSFFEALPKLYRNMEHDFQMVYPDVCVPNILKIGGWIGGDRDGNPFVSAETLRFAFRRHADAVFRFYRGELDKLYRELPLSIRRVKVNDDVMALAALSPDEELARTEEPYRRAIAYIMARAMGKARALGLGMGCKFGFLEPYASAQEFLDDLKKLQRSLIDNGSRLLAEGRLADLIRSVSVFGFHMMPLDLRQHAGKHADVVAELFQHAGLEDYNSLNEEQKQAALLRELSHQRPLYSPFITYSDHTRHELAIFNEARKIKDEFGEDAVTQSIISNCEQPSDLLALALLLKESGLLAVENGKPQSRINIVPLFETIEALENACPVMETMFRLDWYDALLESRGNIQEIMLGYSDSNKDGGYVTSSWCLYQAELGLVELFKKYDVRMRLFHGRGGSVGRGGGPSYQAILAQPAGSVAGQIRITEQGEVITAKYADPGNAQRNLETLVAATLEASILPDKKDPDAKLMQALSDVSFKYYRELITHPDFIDYFLQTSPIQEIATLNLGSRPASRKTLARIQDLRAIPWVFSWMQNRLMLPAWYGFGSAVETLCEDKPETLAALREHAQSNPFFQAMLSNMEQVMAKTDITLAENYAGLSESPEKAAVIFGMIKEEYQRSRKALLDLLQTEELLRDNRSLARSLALRIPYLNALNGLQVAMLKRLRKEPDNPHALLMVHLTINGVAQGLRNTG

SEQ ID NO: 230 - protein, 434 aa, Neisseria meningitidis
MLENPAWDRIADVVSGEDFYRHEHRLIFRSIAKLINESRPADVITVQEDLQRNEELEAAGGFEYLITLAQNTPSAANIRRYAEIVRERSIMRQLAEVGTEIARSAYNPQGRDAGQLLDEAENKVFQIAESTAKSKQGFLEMPDLLKEVVQRIDMLYSRDNPDEVTGVPTGFIDLDKKTSGLQPGDLIIVAGRPSMGKTAFSINIAEHVAVEGKLPVAVFSMEMGGAQLVMRMLGSVGRLDQSVLKTGRLEDEHWGRLNEAVVKLSDAPVYIDETPGLTALELRARARRLARQFNNKLGLIVIDYLQLMAGSGRSDNRASELGEISRSLKALAKELQVPIIALSQLSRTVESRTDKRPMMSDLRESGAIEQDADLIMFMYRDEYYNQDSPMKGLAECIIGKHRNGPVGKIFLTWTGQFTKFDNAAYIPEEAKIED

SEQ ID NO: 231 - protein, 181 aa, Neisseria meningitidis
MGKTVTLTAGHSNTDPGAVNGSDREADLAQDMRNIVASILRNDYGLTVRTDGTGKGNMPLRDAVKLIRGSDVAIEFHTNAAVSKAATGIEALSTVKNKRWCQVLSKAVAKKTGWKLRGEDGFKPDNAGRHSRLAYAQAGGIVFEPFFISNDTDLALFKTTKWGICRAIADAIAMELGAARV

SEQ ID NO: 232 - protein, 70 aa, Neisseria meningitidis
MPAIRVKENEPFEVAMRRFKRAVEKTGLLTELRAREAYEKPTTERKRKKAAAVKRLQKRLRSQQLPPKMY

SEQ ID NO: 233 - protein, 111 aa, Neisseria meningitidis
MFKDWKEHTALVKKSFGELGKAHPKMLQAYGALEQAAAAEALDAKTRELIAIAVAITTRCESCISVHAAAAAKAGATDSEIAGALATAIALNAGAAYTYALRALEAVETQK

SEQ ID NO: 234 - protein, 144 aa, Neisseria meningitidis
LAEGQKSAVTEYYLNHGKWPGDNSSAGVATSTDIKGKYVQSVEVKNGVITATMLSSGVNNEIKGKKLSLWAKRQNGSVKWFCGQPVTRADANGANNDEVKAATGTTGTTGTTGNIDTKHLPSTCRDAASVVCIETPPTAFYKNT

SEQ ID NO: 235 - protein, 146 aa, Neisseria meningitidis
MMQTFRKISLYAATLWLGMQIMAGYIVAPVLFKMLPKMQAGEIAGVLFDILSWSGLAVWGAVLAAAFAALTRRQTALLLFLLSALAANRFLITPVIEALKYGHENWLLSFVGGSFGMWHGISSIVFMATALLSAVLSWRLSGKDAV

SEQ ID NO: 236 - protein, 160 aa, Neisseria meningitidis
MNLLTLLRPATVQDCKDIFKVHLHSVQYTCILSYNEHALKVWEGLLNTESYLPTISDPDKALWVAEYKGNIQGFFQIDCQEAQLDALYVHPLFHNLGLGTALLHQAETIAHKSGLSFLKLYASLNSVPFYLLNRYESLGSAVLQLDPSIKIKCELMRKHL

SEQ ID NO: 237 - protein, 220 aa, Neisseria meningitidis
MSNQQALVIFSGGQDSTTCLIQAIQTYGRENVQAITFQYGQRHAVELERARWIAQDLGIKQTVLDLSLMRQITHNALMDDTAAIETAENGVPNTFVDGRNALFLLYAAIYAKGQGIRHIIAGVCETDFSGYPDCRDVFVKSMNVTLNLAMDYDFQIHTPLMYLTKAQTWALADEMGALDYIREQTHTCYNGIVGGGCRECPSCILRERGLAEYLESKKAV

SEQ ID NO: 238 - protein, 51 aa, Neisseria meningitidis
MDAKHRLKKYVYHLLVAIDQLFNALTGGAADETLSSRTYRGARLAQKPKTR

SEQ ID NO: 239 - protein, 428 aa, Neisseria meningitidis
MTAQHQTPLRFITAGSVDDGKSTLIGRLLYDSKALLSDQIKTLESGKSKGLKETIDFSILTDGLEAEREQGITIDVAYRYFSTAKRKFIIADTPGHEQYTRNMVTGASTASAAVVLVDASQLDFGAQPLQLLPQTKRHSAILRQLDCPHIVVAVNKMDLLDYSEDKFNAIVEAYRRLAEQLGLKDVHFVPVSALLGDNIVYPGGNMPWYKGEPLLSILETLPGADEVSRTADDFYFPVQLVVRQDADKADDFRGYQGRIERGSVAVGQTVRIEPNGLTAEVSEIITPKGEVAQAFAGEAATLRLDRDIDVSRGDLFVDKNSPLAPQKHLEATLCWFDERPLNTARKYLLKHGTQTVPAKVGEIESVLDVRTLEQEAGAESLKMNDIAKVRINLQKPVTATPYAENTAAGSFILIDEATYGTVAAGMIL

SEQ ID NO: 240 - protein, 404 aa, Neisseria meningitidis
MDKFPKSAKLDHVCYDIRGPVHKKALQLEEEGNKILKLNIGNPAPFGFEAPDEILVDVIRNLPTSQGYCDSKGLYSARKAIVHYYQTKGLRDITVDDVYIGNGVSELITMSMQALLNDGDEILIPAPDYPLWTAAATLAGGTVRHYLCDEENGWFPNLADMEAKITPKTKAIVVINPNNPTGAVYSREILLEIAELARKHGLIIFADEIYDKILYDGAVHHHIAALAPDLLTVTFNGLSKSYRVAGFRQGWMVLNGPKHHAKGYIEGLDMLSSMRLCANTPMQHAIQTALGGYQSINEFILPGGRLLEQRNRAWELVSQIPGVSCVKPMGAMYMFPKIDTEMYRIRDDMKFVYDLLVREKVLLVQGTGFNWIKPDHFRIVTLPYVHQIEEAMGRLARFLQTYRQ

SEQ ID NO: 241 - protein, 83 aa, Neisseria meningitidis
LHIYNVEDVSDKHIPNHVLILWDDACTIAALCINDYIHAVYDFVEQAGYCRNGFPEAQGEWPKVTDRVLDDELQDKILSRKPT

SEQ ID NO: 242 - protein, 289 aa, Neisseria meningitidis
MKHIFLPALPAILPLSAYADLPLTIEDIMTDKGKWKLKTSLTYLNSENNRAELAAPVYIQTGATSFIPIPTEIQENGSNTDMLVGTLGLRYGLTGNTDIYGSGSYLWHEERKLDGNGKTRNKRMSDVSLGISHTFLKDDKNPALISFLESTVYEKSRNKASSGKSWLIGATTYKAIDPIVLSLTAAYRINGSKTLSDGIRYKSGNYLLLNPNISFAANDRISLTGGIQWLGTQPDRIDGKKETARNTSTYAHFGTGFGFTKTTALNASARFNVSGQSSSELKFGVQHTF

SEQ ID NO: 243 - protein, 207 aa, Neisseria meningitidis
MKRLTLLAFVLAAGAVSASPKADVEKGKQVAATVCAACHAADGNSGIAMYPRLAAQHTAYIYHQTIGIRDGKRTHGSAAVMKPVVMNLSDQDILNVSAFYAKQQPKSGEANPKENPELGAKIYRGGLSDKKVPACMSCHGPSGAGMPGGGSEIQAYPRLGGQHQAYIVEQMNAYKSGQRKNTIMEDIANRMSEEDLKAVANFIQGLR

SEQ ID NO: 244 - protein, 330 aa, Neisseria meningitidis
MKTHEISKDSVSLIGVAEHEAGQRLDNYLIKILKGVPKSHIHRIIRAGEVRLNKKRCKPDSRIAEGDTVRIPPVRVAEKEMPSERRAAVPARAFDVVYEDDALLVIDKPSGVAVHGGSGVSFGVIEQLRRARPEAKYLELVHRLDKDTSGLLMVAKKRSALVKLHEAIRNDHPKKIYLALGVGKLPDDNFHVKLPLFKYTGAQGEKMVRVSEDGQSAHTVFRVLSRFSDGILHGVGLSHLTLVRATLKTGRTHQIRVHLQSQGCPIAGDERYGDYQANRRLQKLGLKRMFLHASELHLNHPLTGEPLVLKAELPPDLAQFAVMLENGTKM

SEQ ID NO: 245 - protein, 480 aa, Neisseria meningitidis
MKQLAMYINGRFENDFNGEWRNVLNPSTEEAIAREPKGGKADVDRAVAAARAAQPAWERLPAVERGAYLRKIAQGIRERADELTDTIVAEGGKTKDLARVEVMFTADYLDYQAEWARRYEGEIIQSDRPRENILLFKRPLGVIAGILPWNFPFFLIARKMGPALVTGNTIVVKPSSVTPINCHIFAEIVDAVGLPAGVFNVVNGPGAEIGNALSAHPAVDMVSLTGSVEAGRQVMEAASANITKVSLELGGKAPAIVLKDADLDLAVKSILASRVGNTGQICNCAERVYVHSHLKDAFIEKMTAAMKGVRYGNPAEAEAGALEMGPLIEERAVKAVAEKVERAVKQGAKLVCGGKRAEGRGYFFEPTLLTDTDNSMDIMKEETFGPVLPVSAFDTLDQVIALANDCEFGLTSSVYTTNLNEAFYVTRRLQFGETYINRENFEAMQGFHAGWKKSGIGGADGKHGLEEYLQTQVVYLETDI

SEQ ID NO: 246 - protein, 391 aa, Neisseria meningitidis
VFKVKFYIRHAVLLWCGSLIVGCSAIPSSGPSAKKIVSLGQQSEVQIPEVELIDVNHTVAQLLYKAQINQSFTQFGDGYASAGTLNIGDVLDIMIWEAPPAVLFGGGLSSMGSGSAHQTKLPEQLVTARGTVSVPFVGDISVVGKTPGQVQEIIKGRLKKMANQPQVMVRLVQNNAANVSVIRAGNSVRMPLTAAGERVLDAVAAVGGSTANVQDTNVQLTRGNVVRTVALEDLVANPRQNILLRRGDVVTMITNPYTFTSMGAVGRTQEIGFSARGLSLSEAIGRMGGLQDRRSDARGVFVFRYTPLVELPAERQDKWIAQGYGSEAEIPTVYRVNMADAHSLFSMQRFPVKNKDVLYVSNAPLAEVQKFLSFVFSPVTSGANSINNLTN

SEQ ID NO: 247 - protein, 329 aa, Neisseria meningitidis
MKITVIGAGSWGTALALHFSQHGNRVSLWTRNADQVRQMQEARENKRGLPGFSFPETLEVCADLADALKDSGLVLIVTSVAGLRSSAELLKQYGAGHLPVLAACKGFEQDTGLLTFQVLKEVLPDNKKIGVLSGPSFAQELAKQLPCAVVLASENQEWIEELVPQLNTTVMRLYGSTDVIGVAVGGAVKNVMAIATGLSDGLEYGLNARAALVTRGLAEITRLASAMGAQPKTMMGLAGIGDLILTCTGALSRNRRVGLGLAEGKELHQVLVEIGHVSEGVSTIEEVFNTACKYQIDMPITQTLLQLIRKEMTPQQVVERLMERSARFE

SEQ ID NO: 248 - protein, 70 aa, Neisseria meningitidis
MSGIYLPRLFPPHIAERGLLYFQQGKVLDVRKTSAGHYRAEVCGSENYWVWLKLDSDLYIKDESCDCPYV

SEQ ID NO: 249 - protein, 808 aa, Neisseria meningitidis
MSAQTDPGYFFMPNHIILIGASERPYSLGERVLSNLLSTPFQGKITPVNPRHHTIAGLPAYTSLNKIPGSADLIIAVTLPDSYDTLFKTCRKKQLRHIILIQDWDSLPAAELHTAETAIRKHHGNGLNITACTTAGIQLPSLGLNISTQDGYAAGHTAILTGNAAVSRQIDNILNKLRQGTSRHISLHPGISPITSSDWLNRFGHSLHTKTAVLHHNPEEDQRKLFSAIRQFTRHTPLILHITCRTTETDRAVLHCLARHCNFLISFNADDLEAALRAQLSDLPPLSRLDILSDTPAEWLNAHAPKTLALHFPNLPHHIRNGHLTGTPTPSICHDIASRQLARPDTQAVLTILSPSGHEDYKKTARALIRLSEQTAKPLLVSSPFSDGITHFDTPTQAIRTLSYRNTAAALKQAQLDIAPPQPCRLKTPQPQNIKKALEAADPALLAEALHLPPYRHTTHNAVQFQFGSHPLYGDILTACCNGQTTAVLPPFTTLDSRHLARFAELDGTQTLDQFLHTLTVIPEYRQHILGITLNLNGGQYSSDFILKTPETHDTPKRKNTGKAAQTLEHAAAKMQSAAAYLKHKNPTAAEFLRHTSEAAAELLGSKTETGAAVPNVLAPYPAAHLKTLSLKNNTTVTITPLLPEDAEAKQQFVRSLSPEARYTRFMTHTNELPAATLARLCNPDYHCEAAWTARDADSNIVAVVRHSRLNRNECEFGITLAEHMRGSGLAQKMMELIIQTAAQQGYRTMSADILKTNTPMIKLAEKSGFTLKESDTEKNLYRAYLNLAADKTTEKTNKNLRTDHKIT

SEQ ID NO: 250 - protein, 238 aa, Neisseria meningitidis
MLFRKTTAAVLAATLMLNGCTLMLWGMNNPVSETITRKHVDKDQIRAFGVVAEDNAQLEKGSLVMMGGKYWFVVNPEDSAKLTGILKAGLDKPFQIVEDTPSYARHQALPVKLESPGSQNFSTDGLCLRYDTDRPDDIAKLKQLEFEAVELDKQTIYTRCVSAKGKYYATPQKLNADYHFEQSVPVEIYYMVKGEYTDKLKLFGNILYTPPLLILDAAGAVLALPAAALGAVVDAARK

SEQ ID NO: 251 - protein, 209 aa, Neisseria meningitidis
MSETENQALTFAKRLKADTTAVHDSVDNLVMSVQPFVSKENYIKFLKLQSVFHKAVDHIYKDAELNKAIPELEYMARYDAVTQDLKDLGEEPYKFDKELPHETGNKAIGWLYCAEGSNLGAAFLFKHAQKLDYNGEHGARHLAPHPDGRGKHWRAFVEHLNALNLTPEAEAEAIQGAREAFAFYKVVLRETFGLAADAEAPEGMMPHRH

SEQ ID NO: 252 - protein, 273 aa, Neisseria meningitidis
MNPAPKNLLFSSLLFSSLLFSSLLFSSAAQAASEDSSRSPYYVQADLAYAAERITHDYPKATGANNTSTVSDYFRNIRAHSIHPRVSVGYDFGDWRIAADYASYRKWNNNKYSVNTKEVSRNNSNGNDTWQELKTENQENGSFHAVSSLGLSAIYDFKLNDKFDKFKPYIGARVAYGHVKHQVHSVRKETTTVFSKPSGSATKPGQIPSLVTKPAYHESHSISSLGLGVIAGVGFDITPKLTLDTGYRYHNWGRLENTRFKTHEVSLGVRYRF

SEQ ID NO: 253 - protein, 426 aa, Neisseria meningitidis
MFKRSVIAMACIVALSACGGGGGGSPDVKSADTPSKPAAPVVAEKETEVKEDAPQAGSQGQGAPSTQGSQDMAAVSAENTGNGGAATTDKPKNKDEGPQNDMPQNAGNTAAQGTNQAENNQVGGSQNPAPSSNPNATNGGNFGRVDLANGVLIDGPSQNITLTHCKSDSCNGDNLLSEEAPSKSEFEQLSDEDKIKKYKKDGEKFTGLVADRLQMKGTNQYIIFYKPKTTSSARFRRSARSRRSLPAEMPLIPVNQADTLIVDGEAVSLTGHSGNIFAPEGNYRYLTYGAEKLSGGSYALSVQGEPAKGEMLAGTAVYNGEVLHFHTENGRSYPTKGRFAAKVDFGSKSVDGIIDSGDDLHMGKQKFKAAIDGNGFKGTWTENGGGDVSGRFYGPAGEEVAGKYSYRPTDAEKGGFGVFAGKKEQD

SEQ ID NO: 254 - protein, 102 aa, Neisseria meningitidis
MNKNIAAALAGALSLSLAAGAVAANKPASNATGVHKSAHGSCGASKSAEGSCGAAGSKAGEGKCGEGKCGATVKKTHKHTKASKAKAKSAEGKCGEGKCGSK

SEQ ID NO: 255 - protein, 88 aa, Neisseria meningitidis
MARMVFCVKLNKEAEGMKFPPLPNELGKRIFENVSQEAWAAWTRHQTMLINENRLSLADPRAREYLAQQMEQYFFGDGADAVQGYVPQ

SEQ ID NO: 256 - protein, 262 aa, Neisseria meningitidis
MKQAMKNWFAALLLAVPMGAAFASGGHAHYEKVDIDLRDQVSLQRGAQIFTNYCLSCHSASGMRFNRLKDIGLTDEEIKKNLMFTTDNVGDVMHSAMNPKDAAKWFGAAPPDLTLIARSKGADYLYAYMRGFYKDPTRPSGWNNTVFDKVGMPHPLWEQQGVQAVELDAKGQPVMVKDEHGEMKPKLYWESTGLHSRRLPNGKVIQKEYDAYVRDLVNYLVYMGEPAQLQRKRIGYVVMIFLFAVMLPLAYFLKKEYWKDVH

SEQ ID NO: 257 - protein, 410 aa, Neisseria meningitidis
MGLKHFLEKIEPHFLPGGKHEKWYALYEAAATIFYTSGAVTRKAAHVRDALDSKRMMILVWLALFPAMFYGMYNVGAQAFGALTPDLLQQSIANDWHYTLADALGINMSSEAGVLGKMLFGAIYFLPIYATVFAVGGFWEVLFATVRKHEINEGFFVTSILFALIVPPTLPLWQAALGISFGVVVAKEVFGGTGKNFMNPALAGRAFLFFAYPANLSGDAVWTAVDGYSGATALAQWAAHGADGLKNAVTGQTITWMDAFIGKLPGSIGEVSTLALLIGGAFIVFARIASWRIIAGVMIGMIAMSSLFNFIGSDTNAMFAMPWYWHLVVGGFAIGMLFMATDPVSASFTNVGKWWYGALIGVMCVLIRVVNPAYPEGMMLAILFANLFAPIFDYFVAQANIKRRKARSNG

SEQ ID NO: 258 - protein, 192 aa, Neisseria meningitidis
MNILLLDGGKAFGHSHGGLNRTLHKKAKEVLTALGHNVQETVIDAGYDVEAEIEKFVWMDAVIWQMPGWWMHEPWTVKKYIDEVLTAGHGKLYQSDGRHRVNPTEGYGTGGLLQGKKHMLSLTWNAPIEAFTREGDFFEGKGVDVLYMHFHKANEFLGMTRLSTFLCNDVVKNPQVEKYLADYQAHLEKVFG

SEQ ID NO: 259 - protein, 196 aa, Neisseria meningitidis
MSEKIILPVLSLGGVRLEPLDVHHETGLREAVCDGEVWKLGVTSAPHPDRVADYIGTALATRLAFAVVDEEAGRVVGTTAYYHFEPQIPRLDIGFTWYAASARRTRINTCCKIMLLDYAFDVLACRCVGWRTDILNLASQRAIERLGAEKDGVLRMHMLRKDGSVRDTVVYSMLREDWCKNREILTGRLAGYGVQV

SEQ ID NO: 260 - protein, 1302 aa, Neisseria meningitidis
MNEGEVVLTPEQIQTLYGYAFRGDTYGGWRYLANLGDRYADDAAAIVGKDTNLNGLNLWMKKGVENLWDDTVGKKTRLEKFDRVALQHFSQYVDLINENNGRLPNTSEIERSYYKAVTENGVSSSAAIDLVINRSLPDMADGYWALGLGIEAERIHNEQAVNNPNGSEWDNRKQLISALDKGFDGSFKEKPFTFLQSVIMDVTKLGVEYTIDGWQKIGGWGNGIINDLYKSVAKREWTGIFEIVNNNIKQFRDLFPNPEGWIDDGHQCFAPWVKETKKRNGKYHVYDPLALDLDGDGIETVATKGFAGALFDHRNQGIRTATGWVSADDGLLVRDLNGNGIIDNGAELFGDNTKLVDGSFAKHGYAALAELDSNGDNIINAADAAFQTLRVWQDLNQDGISQANELRTLEELGIQSLDLAYKDVNKNLGNGNTLAQQGSYTKTDGTTAKMGDLLLAADNLHSRFKDKVELTAEQAKAANLAGIGRLRDLREAAALSGDLANMLKAYSAAETKEAQLALLDNLIHKWAETDSNWGKKSPMRLSTDWTQTANEGIALTPSQVAQLKKNALVSLSDKAKAAIDAARDRIAVLDAYTGQDSSTLYYMSEEDALNIVKVTNDTYDHLAKNIYQNLLFQTRLQPYLNQISFKMENDTFTLDFSGLVQAFNHVKETNPQKAFVDLAEMLAYGELRSWYEGRRLMADYVEEAKKAGKFEDYQKVLGQETVALLAKTSGTQADDILQNVGFGHNKNVSLYGNDGNDTLIGGAGNDYLEGGSGSDTYVFGKGFGQDTVYNYDYATGRKDIIRFTDGITADMLTFTREGNHLLIKAKDGSGQVTVQSYFQNDGSGAYRIDEIHFDNGKVLDVATVKELVQQSTDGSDRLYAYQSGSTLNGGLGDDYLYGADGDDLLNGDAGNDSIYSGNGNDTLDGGEGNDALYGYNGNDVLNGGEGNDHLNGEDGNDTLIGGAGNDYLEGGSGSDTYVFGEGFGQDTVYNYDYATGRKDIIRFTDGITADMLTFTREGNHLLIKAKDDSGQVTVQSYFQNDGSGAYRIDEIHFDNGKVLDVATVKKLVQQSTDGSDRLYAYQSGNTLNGGLGDDYLYGADGDDLLNGDAGNDSIYSGNGNDTLDGGEGNDALYGYNGNDVLNGGEGNDHLNGEDGNDTLIGGAGNDYLEGGSGSDTYVFGEGFGQDTVYNYHVDKNSDTMHFKGFKAADVHFIRSGSDLVLSASEQDNVRISGFFYGENHRVDTFVFDDAAISNPDFAKYINAGNNLVQSMSVFGSNTAATGGNVDANTQSVQQPLLVTPSA

SEQ ID NO: 261 - protein, 349 aa, Neisseria meningitidis
MSSNQYIQSLELTNFTVLPNDTFEFSENLNVIVAENGCGKTHLLKILYSLLEVTSNTKNRLLKTELQKSFADKLLNVFRPDSLGRLSKRLQGRGRTEIVLKLQNGTTHSSLNFSSNSSSQVNVQSIGLKENEYTPTPIFLPSRELITLCPWFTSLYQNQSIPFEETWFDACMQLNHPLAKGPRETKIRELLEPIENAMGGKVSEEQGRFYLSLTNTGGKIEAPLVAEGLRKFVMIARLIATGALLDKGYLFWDEPEANLNPKLIKVAARIIWSLSQQGIQVFIATHSLFLLRELELLKLENNTDLPVRFFSLIASDDGTKVEQGNSINDLNTLILLDENIMQADRYLNI

SEQ ID NO: 262 - protein, 289 aa, Neisseria meningitidis
MSANEYTQIGWIGLGQMGLPMVTRLLDGGIEVGVYNRSPDKTAPISAKGAKVYGNTAELVRDYPVIFLMVSDYAAVCDILNGVRDGLAGKIIVNMSTISPTENLAVKELVESAGGQFAEAPVSGSVGPATNGTLLILFGGDETVLNPLQKVFSLVGKKTFHFGEVGKGSGAKLVLNSLLGIFGEAYSEAMLMARQFGIDTDTIVEAIGGSAMDSPMFQTKKSLWANREFPPAFALKHASKDLNLAVKELEQAGNTLPAVETVAASYRKAVEAGYGEQDVSGVYLKLAEH

SEQ ID NO: 263 - protein, 337 aa, Neisseria meningitidis
MKNKIQNQLDNIVTLNNEKFTFIDLFAGIGGFRIAMENVGGRCVFSSEWDDKARQTYQVNFNDIPYGDITLKETKAAIPSKFDVLTAGFPCQPFSIAGVSKKKSLGRETGFLDKAQGTLFFDVAEIIGKHRPKIFLLENVKNLVSHDKGNTFKVIKGTLEELDYQIFYQVMNAKYYVPQNRERIFIVGFDRQYFNKEINFNFPSPPESQPKLKQILEDDVDNSFTLSDNLWLYLQNYAKKHKAKGNGFGFGLVDLDGISRTLSARYYKDGSEILIPQKGKNPRKLTPRECSRLMGFPKDFVIDAVSKTAAYKQFGNSIAVPLVQAIAKQIINELKNE

SEQ ID NO: 264 - protein, 461 aa, Neisseria meningitidis
MSSGLVTAAYIVAAILFIFSLAGLSKQETAKQGCYSGIAGMAVALFVTVFSDNTHGLGWIIIAMLIGAAIGIYKAKKVEMTEMPELIALLHSFVGLAAVLVGFNSYIAPGNVSHDMHTIHLVEVYLGIFIGAVTFTGSLVAFGKLNGKISSSPLQLPAKHKLNALALGVSFVLLLVFVGIDGSGFILLIMTLIALAFGWHLVASIGGADMPVVVSMLNSYSGWAAAAAGFMLSNDLLIVTGALVGSSGAILSYIMCKAMNRSFVSVIAGGFGSDSGTSSSGSQEIGEYREVKAADVAEMLKGANSVIITPGYGMAVAQAQYPVAEITELLRKNGTEVRFGIHPVAGRLPGHMNVLLAEAKVPYDIVLEMDEINDDFPETDVVLVIGANDTVNPAAQTDPNSPIAGMPVLEVWKAKEVVVFKRSMNTGYAGVQNPLFFNENSVMCFGDAKKTVDDILSELKK

SEQ ID NO: 265 - protein, 253 aa, Neisseria meningitidis
MMGDSVIYYVEQADKPVNRAGERARKTFKYFWRELFWERRRIIPALDFAMVKAPFFQDGEDGEICEHMWIDDIYFDGLYIYGVLNNEPGELTNVEQGESVCVPVDDISDWMFVCNGIPYGGFTIQAMRGQMTEEERTEHDAAWGIDFGDPGQVLLVYEEKEHPENLEEHPMCRNCIDDFRQQLSQNPDFLHEQDEDGYTPLHHEAIAGNALMVQAMLEYGANPASKTSEGYTALDFARLAGWQNVADLLEPRH

SEQ ID NO: 266 - protein, 65 aa, Neisseria meningitidis
MPISLFNLTFIFRTRALLFQAKSGLIPCGLKNKIIYRLIKSGLCRLHAITFCREIGYSNERNARP

SEQ ID NO: 267 - protein, 485 aa, Neisseria meningitidis
MSEWRSFNRKGNTMNIHALLSKQWTLPPFLPKRLLLSLLILLAPNAVFWVLALLTATARPIVNLDYLPAALLIALPWRFVKITGVLAFWLAVLFDGLMMVIQLFPFMDLIGAINLVPFILTAPALYQIMTGLLLLYMLAMPFVLQKAAAKTDFRHIAACAAVVAAAGYFTGHLSYYDRGPMANIFGANNFYYAKSQAMLYTVSQNADFITAGLVDPVFLPLGNQQRAATHLNEPKSQKILFIVAESWGLPANPELQNATFAKLLAQKDRFSVWESGSFPFIGATVEGEMRELCAYGGLRGFALRRAPDEKFARCLPNRLKQEGYATFAMHGAGSSLYDRFSWYPRAGFQEIKTAENLIGKKTCAIFGGVCDSELFGEVSAFFKKHDKGLFYWMTLTSHADYPESDIFNHRLKCTEYGLPAETDLCRNFSLHTQFFDQLADLIQRPEMKGVEVIIVGDHPPPVGNLNETFRYLKQGHVAWLNFKIK

SEQ ID NO: 268 - protein, 331 aa, Neisseria meningitidis
VNLKNRHFLKLLDFTPEEITAYLDLAAELKAAKKAGREIQRMKGKNIALIFEKISTRTRCAFEVAARDQGAGVTYLEPSASQIGHKESIKDTARVLGRMYDAIEYRGFGQEVVEELAKYAGVPVFNGLTNEFHPTQMLADALTMREHSGKPLNQTAFAYVGDARYNMGNSLLILGAKLGMDVRIGAPQSLWPSEGIIAAAHAAAKETGAKITLTENAHEAVKNVDFIHTDVWVSMGEPKEVWQERIDLLKDYRVTPELMAASGNPQVKFMHCLPAFHNRETKVGEWIYETFGLNGVEVTEEIFESPASIVFDQAENRMHTIKAVMVAALGD

SEQ ID NO: 269 - protein, 642 aa, Neisseria meningitidis
MSKNQNHEEYQDDARPLTIEEQRARLRQLIIMGKERGYITYSEINDALPDDMSDADQIDNIVSMISGLGIQVTEHAPDAEDILLSDNAAVTDDDAVEEAEAALSSADSEFGRTTDPVRMYMREMGQVDLLTREDEIIIAKKIENALKNMVQAISACPGSIAEILELIEKIRKDEIRVDEVVEAIIDPNEVLLNELGLGHLETTAPEKPSNDNSDENEDDEESEEDADEISAANLAELKQKVIGHFAQIEKDYKKMIGRLEKHHSRHKDYLAYRDAIANKLLEVRFATRQIDSLSSSLRGKVENIRKLEREIRDICLDRVHMERDYFIQNFLPEITNLEWIEEEIAKGRVWSDALDRFRHAILEKQTELADMEKETRISIEELKEINKNMVSSEKETAAAKQEMIQANLRLVISIAKKYTNRGLQFLDLIQEGNIGLMKAVDKFEYRRGYKFSTYATWWIRQAITRSIADQARTIRIPVHMIETINKMNRISRQHLQETGEEPDSAKLAELMQMPEDKIRKIMKIAKEPISMETPIGDDDDSHLGDFIEDANNVAPADAAMYTSLHEVTKEILESLTPREAKVLRMRFGIDMNTDHTLEEVGRQFDVTRERIRQIEAKALRKLRHPTRSDRLRSFLDSEDSKL

SEQ ID NO: 270 - protein, 261 aa, Neisseria meningitidis
MFSGRRRSVCLDNRPLKQVESAPTGNTSFRRQNPYPKPSGIPLMNRQKVIAIDGPGASGKGTVAARVAAALGYDYLDTGALYRLTALYAQKQGVEWHDEENVSKLAKKLPAVFSGSRILLDGEDVSDGIRTEAIGMGASAVAQLPKVRAALLQRQRDFLTEKGLVADGRDTGSVVFPQAELKIFLTAESKIRAERRAKQIGIPCEGLAFERILSDIEARDEADRNRKVAPLKQQPDALLLDTSRLTIEETVKKVLDWYRKV

SEQ ID NO: 271 - protein, 704 aa, Neisseria meningitidis
MFLFSDGLQSINNNNRRKRIVKNAYIPSRGIRKIPHLSTLLPEFHIYKDGKGAEAVVGWGLRPTTHKARAFATEHQLPFIALEDGFLRSLGLGVSGYPPYSIVYDDIGIYYDTTRPSRLEQLILAADTMPSETLAQARQAMDFILQHHLSKYNHAPELSDDHPLRSPSKSETVLIIDQTFGDMAIQYGGADASTFELMFQTALNENPQADIWVKTHPDVLCGKKQGYLTQLVQQHRVHLLAEDINPISLLQNVDKVYCVTSQMGFEALLCGKPLTTFGLPWYAGWGVSDDRHPKIGSLIQTQRRAPRNLLQLFAAAYLQYSRYLNPNTGEAGSLFDVIDYLATVKRKNDKLRGELYCVGMSLWKRAVAKPFFNVPSCRLKFISSTQKLARVKLSDDARILAWGNGKEAIVRFAEQHHIPLLRMEDGFIRSVGLGSNLVPPLSLVTDDMSIYFNAETPSRLEYILQNQNFDDQDFQTALKLQKMLTENHISKYNVGSSDFTAPSTDKTVILVPGQVEDDASIRYGSPQIYRNLDLLRTVRERNPNAYIIYKPHPDVVSGNRIGHISPEDAARYADQTAEQTDILTCLQYADEVHTMTSLTGFEALLRGKKVSCYGLPFYAGWGLTQDLLPIPRRSRRLELWQLIAGTLIHYPDYIHPETHQAINAETAAQILIRQKNMQKNNNGLHRGYFAKKLGKIKQLYRSFK

SEQ ID NO: 272 - protein, 146 aa, Neisseria meningitidis
MPKATFYTHVAQVPIFTCRLIARAIRDGGRILVWSDSFGQLQELDKMLWQYEAESFIPHEIWETEEAMPSETFVLLACGGNLPRIPEGMAVLNLSDGFWNTAPVLPARVLEIVGNSLEELADARERFTAYRRSGFAIEHHGMEGKA

SEQ ID NO: 273 - protein, 264 aa, Neisseria meningitidis
MTTILAFDIETVPDVQGIRTLYELPSSLPDDEVVLFAQQKRRAQTGGDFMQHHLHQIVAISCCMRWGQDKVHVGTIGEMDDGEEVVIAKFFELIEKHTPQLVSWNGGGFDLPVLHYRSLLHGINAARYWDMGDGDFGDSRDFKWNNYISRYHQRHCDLMDLLALYQPRANVPLDDMAKLCGFPGKLGMDGSKVWDAFHAGRLKEIRNYCETDAVNTYLMYLRFCLVSGRFDADEYEMEIKRIRNYLSAQTEDKPHWAEFVQAWK

SEQ ID NO: 274 - protein, 281 aa, Neisseria meningitidis
MLSYRHAFHAGNHADMLKHFTLFLVLQYFNRKDKPYWYIDTHGGAGVYNLEGSKAQKVGEYRQGIALLRQAQNLPAELSDFAAHIQKILPSPKLYCGSPWLAQSLTRVGDKLRLFELHPTDFVHLKNNMGEAGLGKRGQVLREDGYKGLISLLPPPPRRATVLIDPPYEEKQDYRRVTETLKAALKRFESGCYLIWYPCLSREESRKLPEELKKLLPDNYLHAELHVHAPKADGFGMHGSGMFVINPPYLLAEQLAANLPALTRLLAQDEGARYLLDSKIR

SEQ ID NO: 275 - protein, 217 aa, Neisseria meningitidis
MKITHCKLKKKVQKELLRFFVLEVTARSAADILGIHPNSAALFYRKIRTVINHHLALAADEVFEGPVEPDESDFGGRRKGRRGRGAAGKVVVFGILKRNGRVYTVVVNNAKSETLLPVIKKKIMPDSIVYTDSLSSCDKLDVSGFIHYRINHSKEFADRQNHINGIENFWNQAKRVLRKYNGIDRKSFPLFLKECEFRFNFGTPSQQLKILRDWCGI

SEQ ID NO: 276 - protein, 392 aa, Neisseria meningitidis
MEFVYDVAESAVSPAVIKVIGLGGGGCNAINNMVANNVRGVEFISANTDAQSLAKNHAAKRIQLGTNLTRGLGAGANPDIGRAAAQEDREAIEEAIRGANMLFITTGMGGGTGTGSAPVVAEIAKSLGILTVAVVTRPFAYEGKRVHVAQAGLEQLKEHVDSLIIIPNDKLMTALGEDVTMREAFRAADNVLRDAVAGISEVVTCPSEIINLDFADVKTVMSNRGIAMMGSGYAQGIDRARMATDQAISSPLLDDVTLDGARGVLVNITTAPGCLKMSELSEVMKIVNQSAHPDLECKFGAAEDETMSEDAIRITIIATGLKEKGAVDFVPAREVEAVAPSKQEQSHNVEGMIRTNRGIRTMNLTAADFDNQSVLDDFEIPAILRRQHNSDK

SEQ ID NO: 277 - protein, 394 aa, Neisseria meningitidis
MAKEKFERSKPHVNVGTIGHVDHGKTTLTAALTTILAKKFGGAAKAYDQIDNAPEEKARGITINTSHVEYETETRHYAHVDCPGHADYVKNMITGAAQMDGAILVCSAADGPMPQTREHILLARQVGVPYIIVFMNKCDMVDDAELLELVEMEIRDLLSSYDFPGDDCPIVQGSALKALEGDAAYEEKIFELAAALDSYIPTPERAVDKPFLLPIEDVFSISGRGTVVTGRVERGIIHVGDEIEIVGLKETQKTTCTGVEMFRKLLDEGQAGDNVGVLLRGTKREDVERGQVLAKPGTITPHTKFKAEVYVLSKEEGGRHTPFFANYRPQFYFRTTDVTGAVTLEEGVEMVMPGENVTITVELIAPIAMEEGLRFAIREGGRTVGAGVVSSVIA

SEQ ID NO: 278 - protein, 658 aa, Neisseria meningitidis
MPRIAALPDHLVNQIAAGEVVERPANALKEIVENSIDAGATAIDVELDGGGIRLIRVSDNGSGIHPDDIELALHRHATSKIKTLNDLEHVASMGFRGEGLASIASVSRLTLTSRQEDSSHATQVKAEDGKLSSPTAAAHPVGTTIEAAELFFNTPARRKFLKSENTEYAHCATMLERLALAHPHIAFSLKRDGKPVFKLPAQSLHERIAAIVGDDFQTASLEIDSGNGALRLYGAIAKPTFAKGKTDKQYCFVNHRFVRDKVMLHAVKQAYRDVLHNALTPAFVLFLDLPPEAVDVNVHPTKTEIRFRDSRQVHQLVFHTLNKALADTRADLTESVSNAGEVLHDITGVTPAPMPSENDSENLFDSASDYPTGNKPDTRNAFGSSGKTAPMPYQAARAPQQHSLSLRESRAAMNTYAELYKKTDDIDLELSRLEQARFGNMPSETPIPKTDTPLSDGIPSQSELPPLGFAIAQLLGIYILAQAEDSLLLIDMHAAAERVNYEKMKRQRQENGKLQSQRLLIPVTFAASHEECAALADYAETLAGFGLELSDMGGNTLAVRAVPAMLGKADVVSLAKDVLGELAQVGSSQTIEEHENHILATMSCHGSVRAGRQLTLPEMNALLRDMENTPRSNQCNHGRPTWVKLTLKELDALFLRGQ

SEQ ID NO: 279 - protein, 443 aa, Neisseria meningitidis
MLFNHTASELLDLCRRTLDLAKAAGATAAEADFSESIGQSVSVRLGEIEQIEFQQDKSLDITVYVGKRKGRAGTADFSEQALRDTVRAAADIARHTAEDGCAGLADPELMAQHIGDPDLYHEWDLDTEAAVGFAKQCEQAALNEDERIENSEGAAVQTGHYQYVYGNTHGFAAHRQGTHHSISCSVVAADENGMQRDYWYDSACRHPDMDSPETIGQTAARRTLRRLGSRSIPTGSYPVLFDTTVSGGLIGHLVGALSGGALYRQSSFLIDSIGKKVLPDFLNLREEPHIPRSFRSSYFDAEGVATAPRFVIQNGIVEGYFLSSYSARKLGMQTTGNAGGAHNLYLNHTHETQSDLLKEMGTGLLVTELMGQGANTITGDYSRGAAGFWVENGVIAYPVHEITVAGRLQDMYRDIVGVADDALRRSSNKIGSILIAGMTVAGS

SEQ ID NO: 280 - protein, 182 aa, Neisseria meningitidis
MRRNLAYSLAMGADRAIHVETDAKLEPLAVAKLLKAVADKENPQIFFLGKQAIDDDANQVAQMLAALLNAAQGTFASKVQIEGDEVQIVREIDGGEETIALKLPAVISADLRLNEPRFVKLPNIMAAKKKPLEKLAPADLVADISPRLKTVKFAEPKARQAGVKVASVAELVEKLKNEAKVI

SEQ ID NO: 281 - protein, 338 aa, Neisseria meningitidis
MYRKLIALPFALLLAACGREEPPKALECANPAVLQGIRGNIQETLTQEARSFAREDGRQFVDADKIIAAAYGLAFSLEHASETQEGGRTFCIADLNITVPSETLADAEANSSLLYGETSFADIVRQKTGGNVAFKDGVLTAAVRFLPVKDGQTAFVDNTVGMAAQTLSAALLPYGVKSIVMIDGKAVKKEDAVRILSGKAREEEPSKPTPEDILEHNAAGGDADVPQAAEGAPEPEILHPDDGERADTVTVSRGEVEEARVQNQRAESEITKLWGGLDTDVQKELVGEQRKWAQEKISNCRQAAAQADRQEYAEYLKLQCDTRMTRERIQYLRGYSID

SEQ ID NO: 282 - protein, 397 aa, Neisseria meningitidis
MQNYLTPNFAFAPMIPERASGSRVWDTEGREYIDFSGGIAVNALGHCHPALVDALNAQMHKLWHISNIYTTRPAQELAQKLVANSFADKVFFCNSGAEANEAALKLARKYARDRFGGGKSEIVACINSFHGRTLFTVSVGGQPKYSKGYAPLPQGITHVPFNDIAALEAAVGEQTCAVIIEPIQGESGILPATAEYLQTARRLCDRHNALLILDEVQTGMGHTGRLFAYEHYGIVPDILSSAKALGCGFPIGAMLATEKIAAAFQPGTHGSTFGGNPMACAVGSRAFDIINAPETLHNVRSQGQKLQTALLDLGRKTGLFSQVRGMGLLLGCVLDAPYRGRASEITAAALKHGVMILVAGADVLRFAPSLLLDDEDTAEGLRRLEHVLTEFAAANRP

SEQ ID NO: 283 - protein, 282 aa, Neisseria meningitidis
VEGSYRFDTLSNGISIHGGTVTARCDFCSSRLAEPYVSFVLLLEGSLDFGINRRRFQIDADGGKIVLIAVGEEVLFSRYLYRGGKTVKMTIKGMEQWLLRPEYARFAPLLYREPVRIWNLSPNLRGLAASCLKAVPKGHLGETLRREADVLRLLSDLWDTVSDGIGPAAGQTAEADAMPSEDFSRILNAAFAGGAHQVNRLADTLNISERTLQRRMRDHFGITASEWLHHKQMQHALYLLQNGGKSIGETAYLCGYRHVSSFTQAFRQYFGSTPAETKKENR

SEQ ID NO: 284 - protein, 706 aa, Neisseria meningitidis
MAYQVLARKWRPKTFADLVGQEHVVKALQNALDEGRLHHAYLLTGTRGVGKTTIARILAKSLNCENAQHGEPCGVCQSCTQIDAGRYVDLLEIDAASNTGIDNIREVLENAQYAPTAGKYKVYIIDEVHMLSKSAFNAMLKTLEEPPEHVKFILATTDPHKVPITVLSRCLQFVLRNMTSQQVADHLAHVLDSEKIAYEPPALQLLGRAAAGSMRDALSLLDQAIALGSGKVAENDVRQMIGAVDKQYLYELLTGIINQDGAALTAKAQEMAACAVGFDNALGELAILLQQLALIQAVPNALAHDDPDSDILHRLAQTISGEQIQLYYQIAVHGKRDLGLAPDEYAGFMMTLLRMLAFAPLAAASCDANAVIENTELQSPSAQTAEKETAAKKPQPHPEAETTQTPVQTASAAAMPSEGKTAEPVSNQENNDVPPWEDAPDEAQTAAGTAQTSAKSIQTASEAETSPDNQVSKNKAADNETETSLSEVPSENPIQATPNDEAVETEAFAHEAPAEPFYGYGFPDNDCPPEDGAEIPPPDWEHAAPADAEEENNADEGSNDENNTPSAPPPEFSTENWAAIVRHFARKLGAAQMPAQHSAWTEYHPDTGLMVLAMTAEARATADKKRLDKIRDTLAQAYGLQLTLQTQDWRDEAGRETPAMQDKRVQAEDRQKAQALLEADPAAQKILQAFGAQWQPESLELAANRP

SEQ ID NO: 285 - protein, 110 aa, Neisseria meningitidis
MSSELIVHTGDAAFEQDVLKSDLPVLLDFWAPWCGPCKMIAPILDDIAAEFEGRLKVVKINIDDNEATPSRFGVRGIPTLMVFKNGDVVATKVGALAKGQLTAFVEASIA

SEQ ID NO: 286 - protein, 76 aa, Neisseria meningitidis
MNIVKKYAVKALLAAGIFTPAIVMADGFDASAIGTQVANVIMGFVAMVSAVGMAAITVILAIQGFKMAWSMIKSVK

SEQ ID NO: 287 - protein, 485 aa, Neisseria meningitidis
VLSFSHNLKKPDNFVLLLQRKALQMDGWTQTLSAQTLLGISAAAIILILILIVKFRIHALLTLVIVSLLTALATGLPTGSIVNDVLVKNFGGTLGGVALLVGLGAMLGRLVETSGGAQSLADALIRMFGEKRAPFALGVASLIFGFPIFFDAGLIVMLPIVFATARRMKQDVLPFALASIGAFSVMHVFLPPHPGPIAASEFYGANIGQVLILGLPTAFITWYFSGYMLGKVLGRTIHVPVPELLSGGTQDNDLPKEPAKAGTVVAIMLIPMLLIFLNTGVSALISEKLVSADETWVQTAKIIGSTPIALLISVLVALFVLGRKRGESGSALEKTVDGALAPVCSVILITGAGGMFGGVLRASGIGKALADSMADLGIPVLLGCFLVALALRIAQGSATVALTTAAALMAPAVTAADFTDWQLACIVLATAAGSVGCSHFNDSGFWLVGRLLDMDVPTTLKTWTVNQTLIALIGFALSALLFAIV

SEQ ID NO: 288 - protein, 306 aa, Neisseria meningitidis
MKKRVRKPAAVRSDADIAALFHAHRMKQAQQSRILNMLAVEIRPGFVLDNKRAPDIRAALLDVYGEADGKPFFLPLNLLLGFMGAHEWHKKGVAVPQLGGSIHVPFGVFSPLRGEYLDLLAHAPSTGFQTAFDIGTGSGVLAAILAKQGIPSVIGTDTNPKAVACARANIARLGFEKQVEIRETDLFPEGFADLIVCNPPWLPAKPTSAVESALYDPESAMLAAFLRDAPKHLNPDGEIRLIISDLAEHLGLRPADFLEKAFIRAGLRVADMMKTKPKHKKAANPSDPLAFARTRETTFLYRLKKA

SEQ ID NO: 289 - protein, 283 aa, Neisseria meningitidis
MIIHPQFDPVLISIGPLAVRWYALSYILGFILFTFLGRRRIAQGLSVFTKESLDDFLTWGILGVIFGGRLGYVLFYKFSDYLAHPLDIFKVWEGGMSFHGGFLGVVIAIWLFGRKHGIGFLKLMDTVAPLVPLGLASGRIGNFINGELWGRVTDINAFWAMGFPQARYEDLEAAAHNPLWAEWLQQYGMLPRHPSQLYQFALEGICLFAVVWLFSKKQRPTGQVASLFLGGYGIFRFIAEFARQPDDYLGLLTLGLSMGQWLSVPMIVLGIVGFVRFGMKKQH

SEQ ID NO: 290 - protein, 148 aa, Neisseria meningitidis
MNVSFAPLFLVTLILLGVVSNNNSITISATILLLMQQTALIQFVPLVEKHGLNLGIILLTIGVLSPLVSGKAQVPPVAEFLNFKMISAVFIGIFVAWLAGRGVPLMGQQPVLITGLLIGTVIGVAFMGGIPVGPLIAAGILSFVVGKG

SEQ ID NO: 291 - protein, 201 aa, Neisseria meningitidis
MMTLYSGITCPFSHRCRFVLYEKGMDFEIKDVDIYNKPEDLAVMNPYNQVPVLVERDLVLHESNIINEYIDERFPHPQLMPGDPVMRGRGRLVLYRMEKELFNHVQVLENPAATNKEQAKAREAIGNGLTMLAPSFSKSKYILGEDFSMIDVALAPLLWRLDHYDVKLGKSAAPLLKYAERIFQREAFIEALTPAEKAMRK

SEQ ID NO: 292 - protein, 72 aa, Neisseria meningitidis
MLDASPPQERGSRRETRSQKKASQITAFFRWLGGLVSNPATGKISHTKLWANVAAAAMTWKFVQAADAPEWL

SEQ ID NO: 293 - protein, 240 aa, Neisseria meningitidis
MKPAYFISDLHLSEKHPELTALLLRFLRSSAAGQARAVYILGDLFDFWVGDDEVSELNTSVAREIRKLSDKGVAVFFVRGNRDFLIGQDFCRQAGMTLLPDYSVLDLFGCKTLICHGDTLCTDDRAYQRFRKIVHRKRLQKLFLMLPLKWRTRLAAKIRRVSKMEKQVKPADIMDVNAAFTARQVRAFNAERLIHGHTHREHIHHENGFTRIVLGDWHNDYASILRVDGDGAVFVPLEKY

SEQ ID NO: 294 - protein, 327 aa, Neisseria meningitidis
MAAYDSLMVFTGNANPELAQRVVRHLDISLGNASVSKFSDGEVAVELLENVRGRDVFILQPTCAPTNDNLMEILTMADALKRASAGRITTAIPYFGYARQDRRPRSVRVPISAKLVANMLYSAGIDRVLTVDLHADQIQGFFDIPVDNIYATPILLNDIKQQRIENLTVVSPDIGGVVRARAVAKSLNADLAIIDKRRPKANVAEVMNIIGDIQGRTCLIVDDMIDTANTLCKAAVALKERGAERVLAYASHAVFSGEAVSRIASSEIDQVVVTDTIPLSEAAKNCDRIRQVTIAGLLAETVRRISNEESVSYLFNEEVMTGSMLLP

SEQ ID NO: 295 - protein, 251 aa, Neisseria meningitidis
LPRSTRAGARQKPNRRRLCVMSELILKCEGVGKRYRDGGLDVRVLHGLDLEIHAGESTGIIGSSGSGKSTLLHILGGLDMPSEGRVLLMGEDLRTLNQRRLGDLRNRHLGFVYQFHHLLPEFSALENVMMPLLIGKKSREEAAEAAMAMLEKVGLKHRSTHRAGELSGGERQRAAIARALVTQPKCLLADEPTGNLDRANARNVLDMMLELKTELGTGLVVVTHDDELASRFERVMVMKDGSLHPKQGANA

SEQ ID NO: 296 - protein, 172 aa, Neisseria meningitidis
LRMKMFEQEDEWVSKTQMKKQMNGLQDLGMELTKLSSDTLKKIGLDEDLYEAVVTYKKITSNGALKRQAQFIGRLMRDTDPAPIEAFLAKLRGDDAAHNAFLQRVERTRMELLADDGALTQFMSDFPHADAGKLRTLIRNTKKEQEQNKPPKNFRALFQELKTVMENGDAEI

SEQ ID NO: 297 - protein, 363 aa, Neisseria meningitidis
MNAQTLIANVAELVKTKLKPLVDDIDRKGYYPEAFMRELGAIGGFGAVGTEAEGGNGLGLATQIAVLREIGKECGATSFSAWCQAACAWYLHQTPNRAVKDKYLADILQGKVLAGTGMSNTVKHLADIEKHNLQAERVEGGYTVNGALPWVSNIGEDHIWANTAQIGGGYVMFITGGQWEGVSLQNCPEFCALEGTRTFSLNFKDVFIPDEDIIAAPEQFADYIQSIKAGFILLQIGIGAGVIDGSLGIIRLANVVNAEVNNYLNDGYDSLKTRLDGAWAETERLAGLAWSGTPDNLATLKLREAAAVLALAAAQSAALHSGAKGYLMRSPAQRRVREAMFVAIVTPAIKHLRKEIAAIEAAK

SEQ ID NO: 298 - protein, 488 aa, Neisseria meningitidis
MAEATDVVLVGGGIMSATLGVLLKELEPSWEITLIERLEDVALESSNAWNNAGTGHSALCELNYAPLGANGIIDPARALNIAEQFHVSRQFWATLVAEGKLEDNSFINAVPHMSLVMNEDHCSYLQKRYDAFKTQKLFENMEFSTDRNKISDWAPLMMRGRDENQPVAANYSAEGTDVDFGRLTRQMVKYLQGKGVKTEFNRHVEDIKRESDGAWVLKTADTRNPDGQLTLRTRFLFLGAGGGALTLLQKSGIPEGKGYGGFPVSGLFFRNSNPETAGQHNAKVYGQASVGAPPMSVPHLDTRNVDGKRHLMFGPYAGFRSNFLKQGSLMDLPLSIHMDNLYPMLCAGWANMPLTKYLLGELRKTKEERFASLLEYYPEANPDDWELITAGQRVQIIKKDSEKGGVLQFGTEIVAHADGSLAALLGASPGASTAVPLMIRLMHQCFPERAPSWEDRLKELVPGYGIKLNENPERADEIIAYTAKVLDI

SEQ ID NO: 299 - protein, 150 aa, Neisseria meningitidis
MQIILLEKIGGLGNLGDIVTVKNGYARNFLIPAGKAKRATEANMKEFEARRAELEAKQAEILADARARQEKLDGQTVTVAQKAGVDGRLFGSVTNADIAAAIVAAGIEAVKANVRLPNGPLKAVGEYEVEVALHTDAVAKITVAVVAATE

SEQ ID NO: 300 - protein, 218 aa, Neisseria meningitidis
MTIKIILIDDHTLFRSGIKALLSRQHDFEVIGEAADGLSGIKMINRLQPDVVLLDLDMPGMNGREALSQIISINPQQAVIMLTVSEDNDDLTECMRIGARGYLLKNINADFLLESIRKAAEGDNVFSPEMTAKLVKSLISPQPAQGTQALSSLTPRELEILGYLAAGHSNKIIARHLDLAESTVKVHVQNLLRKLNLSSRVQAAVYAIRHNVPQPVLE

SEQ ID NO: 301 - protein, 447 aa, Neisseria meningitidis
MFHSVNVFTGETLYRRPAQDYAEFERRLADLKMRGGAFAQLGVTERAARLQKFADRLEAEKERFAEMVCEEVGRCLHECRAEIGKSIELIRYYARLAPELLAHKTIATQASLSQVRFEPLGVVFAVMPWNYPVWQVLRFAVPAMCAGNACAVKPAPSVARVSQALFDLASDGIPLAGAWLDNQDTLKAIEHTDAMAFTGSTHTGRILAAHAGANLKKTVLELGGSNAFIVMPDADLERAAAEACYSRFRDAGQSCNAAKRIIVTEAAADRFITLFLAECAKLKMGDPKHPDTTLAPLHREDLRDRVHGQVEDAVSNGAVCLTGGKIPQGRGWFYPATVLDRVNPACRVWREEVFGPAALILRAENEEHAIALANDSPFGLGACIYTADTERAWRFAEKIQAGSVFINRHTSSDLRLPFGGVKDSGYGRELSEFGLYEFVNVKTYWQK

SEQ ID NO: 302 - protein, 117 aa, Neisseria meningitidis
MIVLHGIPNCDTVKKAKNRLAGYGLEFEFRDFKKQRPSEAEISLWLEQVPLEILLNKRGTTWRKLNALMQEEALSSKEGAVRIMSEMPSLIKRPVLEYGGKVHVGFSDESYREIFKR

SEQ ID NO: 303 - protein, 143 aa, Neisseria meningitidis
MMAFEKVEHLLPDTVLDIVDVIGLAATEQLVKAIGGARFKFGKGKVDTERLAILVEAIGEVKTHELLQVYGGEELYVPRCGKALIQLRNHRFYQEFVKLRDIDKESGLMAMTKLCPKYGISSRTGYTIINEMSRPAAQQAALF

SEQ ID NO: 304 - protein, 417 aa, Neisseria meningitidis
MQTYLVGGAVRDYLLGLPVKDRDWVVVGADAQTMLAQGFQPVGKDFPVFLHPETHEEYALARTERKTAKGYAGFSFHADKDVTLEQDLMRRDLTINAMAQDAGGKIIDPFGGQRDLAAGILRHVSPAFAEDPVRILRTARFAARYRFEIAEETIKLMRQMVENGEADALVAERVWQELAKGLMEKNPRKMIEVLRECGALKVLLPEVNALFGVPQRADYHPEIDSGIHTLMTLQRAADMGLSLPERYAALLHDLGKAKTPPDILPRHHGHDLAGVEPVREVNQRLRAPKHCAELAELVCRWHIIFHQVGQLKSQTILNVLKKTDAFRRPERFQTALNVCIADTQGRLNREHTPYPQRAHWLALLEAANQADSGKIAAECRAQGKAHLIAEQIDRMRLAQIAPLQKAFQAAQDKTEKH

SEQ ID NO: 305 - protein, 508 aa, Neisseria meningitidis
MDYPPLKGAALAWVTLSLGLAVFMEVLDTTIANVAVPVIAGNLGAATTQGTWVITSFAVANAVSVPLTGFLAKRIGEVKLFTAAAVGFVITSWLCGIAPNLQALVFFRILQGFIAGPLIPLSQSLLMASYPPAKRTLALALWAMTVVVAPVLGPIFGGWISGNWHWGWIFFINIPIGIISAWITWKHLKYRETETVKMPTDYVGLTLMVVGIGALQMMLDRGKELDWFASGEIITLGVTALVCLSYFIVWELGEKYPIVDLSLFKDRNFTVGIIATSLGFMVYMGTLTLLPLVLQTNLGYTSTWAGLAAAPVGILPVFLSPLIGRFGNKIDMRLLVTASFLTFAFTFYWRTDFYADMDIGNVIWPQFWQGVGVAMFFLPLTTITLSHMKGGQIAAAGSLSNFLRVLMGGVGVSVVSTLWERREALHHTRFAEHITPYSATLHETAAHLSQHGVSDIQTLGIINNTITQQGFIIGSNEIFMAGSLLFIIMIPVIWLAKPPFHNGGGGGH

SEQ ID NO: 306 - protein, 373 aa, Neisseria meningitidis
MSNQDFYATLGVARTATDDEIKKAYRKLAMKYHPDRNPDNKEAEEKFKEVQKAYETLSDKEKRAMYDQYGHAAFEGGGQGGFGGFGGFGGAQGFDFGDIFSQMFGGGSGRAQPDYQGEDVQVGIEITLEEAAKGVKKRINIPTYEACDVCNGSGAKPGTSPETCPTCKGSGTVHIQQAIFRMQQTCPTCHGAGKHIKEPCVKCRGAGRNKAVKTVEVNIPAGIDDGQRIRLSGEGGPGMHGAPAGDLYVTVRIRAHKIFQRDGLDLHCELPISFATAALGGELEVPTLDGKVKLTVPKETQTGRRMRVKGKGVKSLRSSATGDLYCHIVVETPVNLTDRQKELLEEFERISTGLENQTPRKKSFLDKLRDLFD

SEQ ID NO: 307 - protein, 169 aa, Neisseria meningitidis
VRRNDDITLEEIEALKPQYLVIGPGPCSPKEAGISVEAMRHFAGRLPIMGVCLGHQTIGEAFGGRIVRAKTLMHGKVSPVSHSGKGMFKGLPNPVTCTRYHSLVIERGTLPECLEITAWTEDGEIMGVRHKEYAVEGVQFHPEALLTEHGHDMLNNFLVEFQNFKPQKI

SEQ ID NO: 308 - protein, 179 aa, Neisseria meningitidis
MSQVFKDFDLSSVWESDSWADENYQEAPFTPEILAAVESELGYKLPQSFIELMAVQNGGIFVKNCFPTTQRNSWAENHVQICEVSGIGFEKEGSLCGETGQKLWLEEWEYPPIGVYFANDPSGGHALFALDYRACGKDGEPKVVFVEQESDFEIVELAPDFETFIRSLRHEDEFIDEEI

SEQ ID NO: 309 - protein, 334 aa, Neisseria meningitidis
MSIKVAINGFGRIGRLALRQIEKAHDIEVVAVNDLTPAEMLLHLFKYDSTQGRFQGTAELKDDAIVVNGKEIKVFANPNPEELPWGELGVDVVLECTGFFTNKTKAEAHIRAGARKVVISAPGGNDVKTVVYGVNQDILDGSETVISAASCTTNCLAPMAAVLQKEFGVVEGLMTTIHAYTGDQNTLDAPHRKGDLRRARAAALNIVPNSTGAAKAIGLVIPELNGKLDGSAQRVPVATGSLTELVSVLERPVTKEEINAAMKAAASESYGYNEDQIVSSDVVGIEYGSLFDATQTRVMTVGGKQLVKTVAWYDNEMSYTCQLVRTLEYFAGKI

SEQ ID NO: 310 - protein, 429 aa, Neisseria meningitidis
MKKLNTQSPDFQAGLKALLAFETAQNPETERIVADICADVQKRGDAALIEYTNKFDQTNAKSIDDLILTQADLNAAFERIPNDVQTALQTAALRVESYHQRQKMESWSYTDEDGTLLGQQITPLDRVGIYVPGGKAAYPSSVIMNAMPAHVAGVKEIIMVVPTPKGERNDIVLAAAYVAGVTKVFTVGGAQAVAALAYGTETIPQVDKITGPGNAFVAAAKRRVFGVVGIDMVAGPSEILVIADGTTPADWVAMDLFSQAEHDEIAQAILIGTSQAYLDEVEAAMDRLIETMPRRDIIEASLGNRGAMILAKDLDEACEIANYISPEHLELSVENPQEWAKKIRHAGAIFMGRYTGESLGDYCAGPNHVLPTSRTARFSSPLGTYDFQKRSSLIQVSEQGAQKLGETASVLAHGESLTAHARAAEFRMK

SEQ ID NO: 311 - protein, 90 aa, Neisseria meningitidis
MKKTGKYLIYAAAFTAFCFAFQENRSEAKQPDITLSASLCEQFNILNAKDMDAEQVSLSKECDIIESSHDWEKEYGNLNEQEMLAGIVYE

SEQ ID NO: 312 - protein, 640 aa, Neisseria meningitidis
MIEIKNLTLQRGLKVLLDKANATVNPGQRVGLIGKNGTGKSSLFALIKGEITQDGGDVSIPKNWRLASVSQETPDLDISALDYVLQGDAELQAFQTALRQAEAQNDGMKQAEYHAKLEEIDAYTAPARAAKLLNGLGFSQEEHSRPVKSFSGGWRMRLNLAQALICRADLLLLDEPTNHLDLETVLWLENHLASLPCTQIIISHDRDFLNAATTQTIELSQQKLTQYGGNYDFYQNERAQRLAQQQAAYVKQQAQIKHLQSFIDRFKAKATKAVQAQSRMKALAKLERIAPAHLDSEFSFEFYHPDHLPNPLLKLEHADLGYEGKTVLHDITLSLESGARYGLLGVNGSGKSTFIKALAGKIDLLSGSIVRSEKLNIGYFAQHQLDTIRADQSPVWHIQQLSPEMREQEIRNFLGGFNFVGDMALQKTEPFSGGEKARLALAMIIWQKPNLLLLDEPTNHLDLDMRHALTLALQSFQGALIAVSHDRSLLEATTDSFLLIDKGRLKNFDGDLNDYRQWRLAQENAAAAPAASAQSQSRKDTKRIEAQIRQEKARRGKPIQQKIDRAEKEMAQLSEIQTACEAFLAQEDAYLEANKEKLQNTLSLLAKVKTQLAQIEEVWLACQEELERIETEIEKQFAER

SEQ ID NO: 313 - protein, 185 aa, Neisseria meningitidis
MDALKLLTNRRSSKKLKHPAPDAAELEQIFQAATQVPDHGNMRPFRFTVIQGEVGLQRFRDVLKQTVAELNFGDDAMKKAEKVGNMAPMVIGVTFAPNRDVPKPKPEWEQMLTAGCAAYALQLAATAQGFDNVWITGMWVNSPLLREAFGCADKDKIIGLMMVGTPTEEVHKPKNTDLEAFVSHW

SEQ ID NO: 314 - protein, 380 aa, Neisseria meningitidis
MKKSVLAVLAALSLAACGGSEKNAVQPQADAASAANAEAAATDTLNIYNWSNYVDESTVEDFKKANNLKLTYDLYENNETLEAKMLTGKSGYDLVVPGIAFLPRQIEAGAYQKVNKDLIPNYKNIDPELLKMLETADPGNQYAVPYFSGVNTIAITAKGKELLGGKLPENGWDLLFKPEYTHKLKSCGIALWDTPSEMFPILLNYLGKDPKGSNPEDLKAAAEVLKSIRPDVKRFSPSIIDELARGDICLAAGNGGDLNLAKARSEEVKNNVGIEVLNPKGMGFWIESWLIPADAKNVANAHKYINYTLDPEIAAKNGIAVTFAPASKPAREKMPAELVNTRSIFPNEQDMKDGFVMPQMSTDAKKLSVSLWQKIKVGTN

SEQ ID NO: 315 - protein, 144 aa, Neisseria meningitidis
MPACFCPHCKTRLWVKENQLNVAQGFVVCQKCEGLFKAKDHLASTKEPIFNDLPEAVSDVKLVHRIGTRAIGKKQISRDEIAGILNGGTTLPDIPPATAATPAAAPQVTVPPAAPARQDGFNWTIATLFALIVLIMQLSYLVIL

SEQ ID NO: 316 - protein, 176 aa, Neisseria meningitidis
MQGFELEDLTLWLIRDAGEDQMWIDRWAISYPVVQMSEASAGQSIGEWQAGLRTAFERIRGKYVAVVAHGAGAAAFLAWLYQADILTRKKIANIILVPQRPDIFPDDAEHTFQRVRCPCRAALVVSEHGDVPRDWAQKQADTWNARLLVSPHSGSLNGMLGGWQWGMKLMQEMLLA

SEQ ID NO: 317 - protein, 374 aa, Neisseria meningitidis
MLSKQISNLNSSSNKPKILSLFSGCGGLDLGFHQAGYETVWANDFSHWACESFRKNIGDVIVEGDIEQIDPNNPTIPDCDIILGGFPCQDFSMIWKQPGLEGERGNLYKSFLRFVNAKKPKVFVAENVKGLLTANKKKAIQQIITDFENCGYYVQAKLYNFAEFGVPQFRERVLIVGVRLDTGFDFHHPEPTHGENTDYGLLPYVTAGQAISDIPENANNHEQLKISEQTKKRLNLIPEGGNYSDIPRDHPLYVKSMLSLVYRRMHRDKPSTTIIAAGGGGTWGYHFPEPRAFTNRERARLQSFPDNFEFMGSTTEVRRQIGNAVPPQGVVELAKAILPVFSDGYHKVNLHEKLEAEKNVFFQDRLNKIRGGKR

SEQ ID NO: 318 - protein, 361 aa, Neisseria meningitidis
MTVLREVHMSKNAQKTLLAVCSFEVQPKDGRIQLLPYGEFRAVDGRPTDVPAWYLTEENGHDVALLANSSRNQLVVDYEHQTLYKEKNGQPAPAAGWMRWLEFTPKGMFAEVEWTDKAAAAIAAKEYRYISAVFSYDTKGYVSKIFHAALTNFPALDGMDEVLAAASAQILKPETEQNPMKELLQQLFDLPDAGEEELKAALSALVEAKPKDVALSADVFAQLAEKDSRIAALTAQTAKPDLTKYAPISVVQELQSKVAALTAKQEADKGNELITAALTSGKLLPAQKEWAKGVLKQPGGLAFLTGFIENAQPVAALAGSQTGGKAPDERVAALTAEEAAAAKMLGMSGEEFVKIKESEGK

SEQ ID NO: 319 - protein, 481 aa, Neisseria meningitidis
MSTQTNFDLVLFGATGDLAMRKLLPCLYQAHVAGLLHPEGRILGVSRSELDTEGFLAKVETSSKIHVKENFSDEAWASFVERLAYLKVDVTQPDDFAALGDLVKARKETDNVVIYLSTAPKFFAQTCENLAKIGLNADNVRVVLEKPLGTDLASSQQINTDVARYFKEGQIYRIDHYLGKESLQNLLALRFANVMFEPLWNNKYIESVQLTIAEQLGVEERGEFYDITGALRDMVQNHLMQMLCMTAMEAPASLDADAVRDEKVKVIKSLKPLTVESVNENVVRGQYTAAKGMNGYLEEINVPQDSFTETYVAIKAEIENERWKGVPFYLRTGKRMAGKVAEIVLNFKDLNSHIFEGSRTAPNRLVIELQPYESVRLYTQMKTPGAGNKVETVPLATDLGKALEGRRAEAYERLLLDVINGKLALFNRRDELEAAWEYVMPILENWTNNTTPPHGYGAHSWGPEAARELLARDGHKWHEEQ

SEQ ID NO: 320 - protein, 206 aa, Neisseria meningitidis
MAVRSKSSKAWLHEHVNDHYVHMAQKDGYRARAAYKLLEINEKDKLIKPGTVLADLGSAPGSWSQVAAKLTGTSGAVFALDILPMEAIGGVSFIQGDFRENDVLAQFETLLDNRPLDLVICDMAPNMSGNAVSDQARSFYLCELALDFASQHLKTGGSFLVKVFQGAGYQEYMAAMREIFGTVQTRKPEASRNRSSEIYLLGKNKR

SEQ ID NO: 321 - protein, 200 aa, Neisseria meningitidis
MTDKISPDALIEAALLTQTEPLTEKSMRELCVPPLSQDKLIDVLAQLKTRWQDRALQLVHTQEGWRFQIVQTAFERLGSLQEQRAPRYSRAVMETLAIIAYQQPVTRGDIEGIRGVAVSQNVMQTLQDRGWIEVIGHRDTLGKPALWATTATFLSDLRLDGLEELPPLTELGELVLPDLMEMPPTDEEEPEAVPSDTLPN

SEQ ID NO: 322 - protein, 129 aa, Neisseria meningitidis
MSKTIIHTDKAPAAIGAYSQAVRAGDTVYMSGQIPLDPATMTVVGNGDFRAEARQVFQNLQAVAEAAGGTLADIVKLNAYLTDLGNFAVFNEVMAEFIAEPFPARAAVGVASLPKGVQVEAEAVLVLNA

SEQ ID NO: 323 - protein, 286 aa, Neisseria meningitidis
LKLDQVIDWQPIEQYLNRQKTRYLRDHRGRPAYPLLSMFKAVLLGQWHSLSDPELEHSLITRIDFNLFCRFDELSIPDYSTLCRYRNWLAQDDTLSELLELINCQLTEKGLKVEKASAAVIDATIIQTAGSKQRQAIEVDEEGQVSGQTTPSKDSDARWIKKNGLYKLGYKQHTRTDAEGYIEKLHITPANAHECNHLSPLLEGIADGTTVYADKGYDSAENRQHLKEHQLQDGIMRKACRNRPLTEVQTKRNRYLSKTRYVVEQSFGTLHRKFRYARAAYFGLIK

SEQ ID NO: 324 - protein, 212 aa, Neisseria meningitidis
MFQNFDLGVFLLAVLPVLLAITVREVARGYTARYWGDNTAEQYGRLTLNPLPHIDLVGTIIVPLLTLMFTPFLFGWARPIPIDSRNFRNPRLAWRCVAASGPLSNLAMAVLWGVVLVLTPYVGGAYQMPLAQMANYGILINAILFALNIIPILPWDGGIFIDTFLSAKYSQAFRKIEPYGTWIILLLMLTGVLGAFIAPIVRLVIAFVQMFV

SEQ ID NO: 325 - protein, 524 aa, Neisseria meningitidis
MFRRYLPNRQMNMVSKLDKYWQHPALYWPLLILFAAATPFTFAPYYHFWLMPLIFGAFVRLIELRPRFAVSSAYLFGLTAYTTQFYWIHTALHDVSGLPDLYAVPLTFLLPAYLALYPALCFWLWKKFTLPRGIKIGLVLPILWTLTEFARERFLTGFGWGAIGYSQITPDSPLAGFAPLGGIHMVTLATAFLGVWLVLASDNTARSGKRLLPIILIAALLAAGYTARQTDFTRPDGSRSTVALLQGNIDQTLKWREDQVIPTIQKYYEQVGKTTADIVILPETAIPVMRQNLPENILAKFAEQAQNNGSALAVGISQYTSDGNGYENAVINLTGYQENNQDGIPYYAKNHLVPFGEYKPLPFLTTPLYKMMNMPLSDFRKGGGKQSALLMKNQKIAFNICYEDGFGDELIAAAKDATLLANASNMAWYGKSNAMYQHLQQSQARAMELGRYMVRATNTGATAIISPKGNIIAQAQPDTETVLEGHIKGYVGETPYMKTGSSWWLMGILALAALILFIFRNKEH

SEQ ID NO: 326 - protein, 56 aa, Neisseria meningitidis
MYFEIYKDAKGEYRWRLKAANHEIIAQGEGYTSKQNCQHAVDLLKSTTAATPVKEV

SEQ ID NO: 327 - protein, 352 aa, Neisseria meningitidis
MTAALHIGHLSKSFQNTPVLNDISLSLDPGEILFIVGASGCGKTTLLRCLAGFEQPDFGEISLSGRTIFSKNTNLPVRERRLGYVVQEGVLFPHLTVYRNTAYGLGNGKGKTAQERQRIEAMLELTGISELAGRYPHELSGGQQQRVALARALAPDPELILLDEPFSALDEQLRRQIREDMIAALRANGKSAVFVSHDREEALQYADRIAVMKQGRILQTASPHELYRQPADLDAALFIGEGIVFPAALNADGTADCGLGRLPVQSGAPAGTRGTLLIRPEQFSLHPHSAPTASIHAVVLKTTPKARHTEISLRVGQTVLTLNLPSAPTLSDGISAVLHLDGPALFFPGNTL

SEQ ID NO: 328 - protein, 349 aa, Neisseria meningitidis
MQNNNEFKIGNRSVGYNHEPLIICEIGINHEGSLKTAFEMVDAAYNAGAEVVKHQTHIVEDEMSDEAKQVIPGNADVSIYEIMERCALNEEDEIKLKEYVESKGMIFISTPFSRAAALRLQRMDIPAYKIGSGECNNYPLIKLVASFGKPIILSTGMNSIESIKKSVEIIREAGVPYALLHCTNIYPTPYEDVRLGGMNDLSEAFPDAIIGLSDHTLDNYACLGAVALGGSILERHFTDRMDRPGPDIVCSMNPDTFKELKQGAHALKLARGGKKDTIIAGEKPTKDFAFASVVADKDIKKGELLSGDNLWVKRPGNGDFSVNEYETLFGKVAACNIRKGAQIKKTDIE

SEQ ID NO: 329 - protein, 258 aa, Neisseria meningitidis
MAKKFDKDSFSGTLIVVLAVSLICSVIVAGAVVGLKPIQEKQKLQDKQGYILSVAGLMDKNTDISKTFAERIEQRVVDLATGEYVADAPKDFSARVAGKDPAQSIQIKPEDDLAGIKSRAKYTEVYLVKGEDGKIGQIILPMHGNGLWSVMYGFVAIQPDGNTINGITYYEQGETPGLGGEIGNPLWQQKFVGKKLFDGQGKLALHVGKGAGSDKEHGVDALSGASLTSKGVQGSFAYWFGENGYIPYLNKLKSAGAQ

SEQ ID NO: 330 - protein, 140 aa, Neisseria meningitidis
MNLVKLLANNWQPIAIIALIGTGLAVSHHQGYYKSAFAKQQAVIDKMEKDKAQALLLSAQNYARELEQARAEAKKYEVKAHAVGMALAKKQAEVSRLKTENKKEIENVLTQDRKNAGGGCIDGFGHHGLQLYKRALGYGN

SEQ ID NO: 331 - protein, 259 aa, Neisseria meningitidis
MSATIPPKIIRYDSNPTDVYFFGTCVLDLFMPEAGMDAITLIEQQGIRVHFPMAQSCCGQPAYSSGHPTEAFDVAKAQLDLFPENWPIVVPSGSCGGMMKHHWPTLFKGSEYEERAVDCAGRIIEFTHFLLAIGFKPEDKGEPLKVAVHTSCAARREMNVHLSGWQLIDGMENVERIVHDHESECCGFGGTFSVKQADISGAMVTDKVAALKETGATEIISADCGCMMNIGGKIAKDEPDMPRPKHIASFLLERTGGKA

SEQ ID NO: 332 - protein, 72 aa, Neisseria meningitidis
MNEYTFSYRFNGKSWSLSIWADNPEEARAKFRAARENAHYDGEVVAKVYTFVNISWVKKLYKRTKYLMGIKE

SEQ ID NO: 333 - protein, 64 aa, Neisseria meningitidis
VMFSAAQPSIARALIYLVFWAVLPTVFTVFTITVRRRNRLMKQQEQAEFEQQRAQRQKDSGTKP

SEQ ID NO: 334 - protein, 420 aa, Neisseria meningitidis
MSNTQKQLALAKAAKKSVNTADTEEKNRALLAMADSLEAAAADILAANRQDLEAAAGNIPESMTDRLLLDGKRICAMADGIRAVAALPDPVGEILETSTLPNGLEIVKKRVAMGVIGIIYESRPNVTSDAAALALKSGSAVVLRSGKDAFQSARAIVAALKAGLAQTRIDPDALQLIEDTGREGSYEMMRAKDYLDLLIPRGGAGLIRAVVENAVVPVIETGTGIVHIYIDKDADWDKALRIVYNAKTSRPSVCNSMEVLLVHEDIAADFLPKLERLLVRDRIEAGLPPVRFRLDPQAARHIGGEAAGADDFDTEFLDYILAVKTVASVEEAVWHIETHSTHHSDGIVTENRHAADYFTTHIDSAAVYVNASTRFTDGGEFGLGCEMGISTQKLHARGPMGLKELTSYKYIVQGTGQVRE

SEQ ID NO: 335 - protein, 261 aa, Neisseria meningitidis
MGFLQGKKILITGMISERSIAYGIAKACREQGAELAFTYVVDKLEERVRKMAAELDSELVFRCDVASDDEINQVFADLGKHWDGLDGLVHSIGFAPKEALSGDFLDSISREAFNTAHEISAYSLPALAKAARPMMRGRNSAIVALSYLGAVRAIPNYNVMGMAKASLEAGIRFTAACLGKEGIRCNGISAGPIKTLAASGIADFGKLLGHVAAHNPLRRNVTIEEVGNTAAFLLSDLSSGITGEITYVDGGYSINALSTEG

SEQ ID NO: 336 - protein, 165 aa, Neisseria meningitidis
MTTTIPPRQDTFNMKTQISLAAAAITLLLSACGGSGIPSQPKGEISENRTAAFKSMMPDFSRMGKMVKGEEPYDVEKFKQAAAAFADSSKKPFTLFESDPQGNGRALPAVWSDGAKFEAEKTKFAAAVEKLNAAAQTGKLDEIKAAYGETGASCKSCHDSFRAPE

SEQ ID NO: 337 - protein, 296 aa, Neisseria meningitidis
MNSPFHNIGIVTRPNTPDIQDTAHTLITFLKQHGFTVYLDEVGIKEGCIYTQDTVGCHIVNKTELGQYCDLVAVLGGDGTFLSVAREIALRAVPIIGINQGHLGFLTQIPREYMTDKLLPVLEGKYLAEERILIEAALIREGKTAERAIALNDAVLSRGGAGQMIEFEVFVNREFVYTQRSDGLIVSTPTGSTAYSLAAGGPIMQAGLHAFTLVPICPQSMTNRPIAIPDTSEIEILVTQGGDARVHFDGQTHIDVQNLDRITIRRYRNPLRILHPTDYQYFKTLRQKLHWGEQLV

SEQ ID NO: 338 - protein, 318 aa, Neisseria meningitidis
MILTPPDTPLFLRNGNADTIAAKFLQRPAPAYRRELLPDSTGKTKVAYDFSDGISPDAPLVVLFHGLEGSSRSHYAVELMLAVRDRGWHGVVVHFRSCGGIANTAPVFYHLGDTAEIAFTLDTFAARYREIYAVGVSLGGNALAKYLGEQGENALPQAAAVISAPVDAEAAGNRFDSGITRLLYTRYFLRTLIPKARSLQGFQTAFAAGCKTLGEFDDRFTAPLHGFADRHDYYRQTSCKPLLKHVAKPLLLLNAVNDPFLPPEALPTPDEVSETVTLFQPAHGGHVGFVSSTGGRLHLQWLPQTVLSYFDSFRTNRR

SEQ ID NO: 339 - protein, 208 aa, Neisseria meningitidis
MTQERLPEFFDQAPTLTVQDPLAAFLGAAQDGILTYRYADAVRLCGHSCPTVAGAYLMVIKGLEALYGAELPQRGDIEAFMQGNRDEGTTGVTASVVQLLTGAAPETGFGGIGIQGRFARRNLLSFGAGEINGTLTLRRKDNGKTVAVSLNAAPKPFAPEMRELMPKAVGGSASAEELERFGQLWQARVKAFLTESADDPQFVIVREV

SEQ ID NO: 340 - protein, 68 aa, Neisseria meningitidis
LLTHYTKNKETQMAQYMCGPCGWIYDEELGDPEHGIAPGTKFEDIPDDWKCPECGVDKEDFYLLDFVI

SEQ ID NO: 341 - protein, 140 aa, Neisseria meningitidis
LSAVFIAPYLTAFHEQEKTFEYAELTVTAPNRSGRAIKLDADGQHYRLSCYGFDSLCTGGNIGRTIRVEQVRAVLSETVGKGFLNGVLLEYRNSGSVYSNKDFARTEDRLVEVLAQPAVFCLKLGILLLLPAIFLRLKRM

SEQ ID NO: 342 - protein, 169 aa, Neisseria meningitidis
MNLFETQSVTFAEPIEMLYACHGKVRRFCGQVAMLSDYIAENGCNQLVLQTIRQIAQYFNVAAPLHHEDEEENFFPLLLQYAPQAQESVDELLRQHIGLHDNWAAVSAEFAKLEADNAYVPDEEAFKRFVAGYDVHLAIEEPLFDMGNTFIPKEKLTEIGEIMAARRRK

SEQ ID NO: 343 - protein, 279 aa, Neisseria meningitidis
MKQLRDNKAQGSALFTLVSGIVIVIAVLYFLIKLAGSGSFGDVDATTEAATQTRIQPVGQLTMGDGIPVGERQGEQIFGKICIQCHAADSNVPNAPKLEHNGDWAPRIAQGFDTLFQHALNGFNAMPAKGGAADLTDQELKRAITYMANKSGGSFPNPDEAAPADNAASGTASAPADSAAPAEAKAEDKGAAAPAVGVDGKKVFEATCQVCHGGSIPGIPGIGKKDDWAPRIKKGKETLHKHALEGFNAMPAKGGNAGLSDDEVKAAVDYMANQSGAKF

SEQ ID NO: 344 - protein, 695 aa, Neisseria meningitidis
MHPLIFGTYPKPSRLPAPEPVPAFLRGFSFLPHAVSIPQNSDTWYKIPSFPTLKNRTRYRLKQPCLSDGIGTRKHTMPEYRSKTSTHGRNMAGARALWRATGVMETDFGKPIIAVANSFTQFVPGHVHLHNMGQLVAREIEKAGAIAKEFNTIAIDDGIAMGHSGMLYSLPSRDLIADSIEYMVNAHCADALVCISNCDKITPGMLIAAMRLNIPTIFVSGGPMEAGKVIGVANIQPERRLDLIDAMIESADDNVSNRQVEEVEQNACPTCGSCSGMFTANSMNCLTEALGLSLPGNGSYLATHAGRKELFLEAGRMIVEITKRYYEQDDETVLPRSIATKKAFENAMTMDIAMGGSTNTILHLLAVANEAGVDFKMADIDRLSRVVPCICKTAPNNHDYYMEDVHRAGGIFAILKELDKAGKLHTDVHTIHAPTLKDAIEKWDVTNPENTRAIERFKAAPGGVRTTQAFSQNRMWKTLDLDREKGCIRDVAHAYSQDGGLAVLFGNIAERGCVVKTAGVDESILKFTGRARVFESQEDAVEGILGNQIVAGDIVIIRYEGPKGGPGMQEMLYPTSYLKSKGLGKACALLTDGRFSGGTSGLSIGHASPEAAEGGAIGLVHEGDTVEIDIPNRSIHLAISDEELAARRAEMEARGSKAWKPKNRDRYVSAALRAYGAMATSADKGAVRDVAQIER

SEQ ID NO: 345 - protein, 597 aa, Neisseria meningitidis
MKNIRNFSIIAHIDHGKSTLADRFIQYCGGLDLREMSTQVLDSMDIEKERGITIKAQTAALNYKARDGQVYQLNLIDTPGHVDFSYEVSRSLSACEGALLVVDASQGVEAQTVANCYTAIDLGVEVVPVLNKIDLPAADPERVEQEIEDIIGIDAVGAVQCSAKSGIGVEDVLEEIVAKIPAPTGDENAPLQAVIVDSWFDNYVGVVMLIRVKNGTIKLKDKVRFMSTKAETQVEQLGVFTPKSVQKQELKAGEVGFLITGVKELGQAKVGDTVTLVANPATEPLPGFQEVQSQVFAGLYPVESHDYEALRDALEKLQLNDASLKFEPEVSQALGFGFRCGFLGLLHLEIVQERLEREFDMDLITTAPTVVYEVVLKNGEKIEVENPSKLPDIGSIETILEPIITATILVPQEYVGNVMTLCNQKRGVQVNMQYMGRQVMLTYDLPMNEVVMDFFDKLKSTSRGYASLDYHFKEFQPSDLIKLDIMVNGEKVDALSLIVHRQSAVHRGRELASKMRELIPRQMFDIAVQAAIGSQIIARENVKALRKNVLAKCYGGDITRKKKLLEKQKAGKRRMKQVGNVEIPQSAFLAILQVSDK

SEQ ID NO: 346 - protein, 421 aa, Neisseria meningitidis
MNTLQRRKTHQVRIDHITVGSEAPVVIQSMTNTDTADAKATALQIKELSDAGSEMVRITVNSPEAASKVAEIRRRLDDMGYATPLIGDFHFNGERLLAEFPECGKALSKYRINPGNVGKGVKGDEKFAFMIRTAAENDKAVRIGVNWGSLDQSLAKRMMDANLASSAPKPPEEVTKEALIVSALESAEKAVLLGLPEDKIILSCKVSAVQDLIQVYRELGSRCAYPLHLGLTEAGMGSKGIVASTAALSVLLQEGIGDTIRISLTPEPGSPRTQEVVVGQEILQTMGLRSFTPMVTACPGCGRTTSTVFQELAQDVQNYLRQKMSIWRTLYPGVESLNVAVMGCVVNGPGESKLADIGISLPGTGETPVAPVYVDGERKVTLKGDNIATEFLAIVEEYVKTNYGENGSKRNQNKIIPIQSL

SEQ ID NO: 347 - protein, 134 aa, Neisseria meningitidis
MRKSRLSRYKQNKLIELFVAGVTARTAAELVGVNKNTAAYYFHRLRLLIYQNSPHLEMFDGKVEADESYFAERQNHINGIGNFWNRAKRHLRKFDGIPKAHFELYLKGYERRFNNSEIKVQISILKQLVKSSLS

SEQ ID NO: 348 - protein, 125 aa, Neisseria meningitidis
METLNDIKKILINVGLYQGFDLTDPKVSEEVNHETANMKWIKDYTSDGNWDNEFKEDLKNFLDYMEVCQLALNDKNFKIASNSLFMAMIYAGNLSLIFDSIKTDISTLLSAEYKKNSFSWPSLDE

SEQ ID NO: 349 - protein, 269 aa, Neisseria meningitidis
MIQDTRPLIRVVAGILLDSDGNYLLSSRPEGKPYAGYWEFAGGKVEAGETDFQALQREFEEELGIRILAATPWLTKIHSYEHARVCLKFLWVNPDQWTGEPQSREGQAWSWQKAGDFTVAPMLPANGALLRSLSVPRRLYGSLKTGLHGENSMGAYRVLPLGSAEGSGANVLMETAQWQDRPEHADSVWMVVQTREQWRQAQEKGADAVVWRVCDDVQAQEAAEALRQGVSVPLVLAANGQTVARYGKLWLGLGAHAVVRDETIGKNHE

SEQ ID NO: 350 - protein, 257 aa, Neisseria meningitidis
MSANILAIANQKGGVGKTTTTVNLAASLASRGKRVLVVDLDPQGNATTGSGIDKASLQSGVYQVVLGDADVKSATVRSKEGGYAVLGANRALAGAEIELVQEIAREVRLKNALKAVAEDYDFILIDCPPSLTLLTLNGLVAAGGVIVPMLCEYYALEGISDLIATVRKIRQAVNPDLDITGIVRTMYDSRSRLVAEVSEQLRSHFGDLLFETVIPRNIRLAEAPSHGMPVMAYDAQAKGTKAYLALADELMARVSGK

SEQ ID NO: 351 - protein, 101 aa, Neisseria meningitidis
MITLTHYLVLGALLFGISAMGIFMNRKNVLVLMMSIELMLLAVNFNFIAFSQHLGDTAGQIFVFFVLTVAAAESAIGLAIMVLVYRNRQTIDVADLDGLKG

SEQ ID NO: 352 - protein, 203 aa, Neisseria meningitidis
MKLQQLAEEKIGVLIVFTLLVVSVGLLIEVVPLAFTKAATQPAPGVKPYNALQVAGRDIYIREGCYNCHSQMIRPFRAETERYGHYSVAGESVYDHPFQWGSKRTGPDLARVGGRYSDEWHRIHLLNPRDVVPESNMPAFPWLARNKVDVDATVANMKALRKVGTPYSDEEIAKAPEALANKSELDAVVAYLQGLGLALKNVR

SEQ ID NO: 353 - protein, 125 aa, Neisseria meningitidis
MRKSRLSRYKQNKLIELFVAGVTARTATEPDSIVYTDCYRSYDVLDVSEFSHFRINHSTHFAERQNHINGIENFWSQAKRHLRKFNGIPKAHFELYLKECEWRFNNSEIKVQISILKQLVKSSLS

SEQ ID NO: 354 - protein, 861 aa, Neisseria meningitidis
MLEAYRKAAAERAALGIPALPLTAQQTADLVELLKSPPAGEGEFLVELLAHRVPPGVDDAAKVKASFLAAVAEGSASSPLISPEYATELLGTMLGGYNIHALIELLDDDKLAPIAAKGLKHTLLMFDSFHDVQEKAEKGNKYAQEVLQSWADAEWFASRAKVPEKITVTVFKVDGETNTDDLSPAPDAWSRPDIPLHALAMLKNPRDGITPDKPGEVGPIKLLEELKAKGHPVAYVGDVVGTGSSRKSATNSVIWHTGEDIPFVPNKRFGGVCLGGKIAPIFFNTQEDSGALPIEVDVSALKMGDVVDILPYEGKIVKNGETVAEFELKSQVLLDEVQAGGRINLIIGRGLTAKAREALKLPASTAFRLPQAPAESKAGFTLAQKMVGRACGLPEGQGVRPGTYCEPRMTTVGSQDTTGPMTRDELKDLACLGFSADMVMQSFCHTAAYPKPVDVKTHKELPAFISTRGGVSLRPGDGVIHSWLNRLLLPDTVGTGGDSHTRFPIGISFPAGSGLVAFAAATGVMPLDMPESVLVRFSGKLQPGVTLRDLVNAIPLYAIKQGLLTVAKAGKKNIFSGRILEIEGLPDLKVEQAFELTDASAERSAAGCTVKLNKEPIIEYMKSNVVLMKNMIANGYQDPRTLERRIKAMEKWLANPELLEADKDAEYAAVIEINMDDIKEPIIACPNDPDDVCFMSERSGTKIDEVFIGSCMTNIGHFRAASKLLEGKADTPVRLWIAPPTKMDAKQLSDEGHYGVLGRAGARMEMPGCSLCMGNQAQVREGATVMSTSTRNFPNRLGKNTFVYLGSAELAAICSKLGKIPTVEEYQANIGIINEQGDKIYRYMNFNEIDSYNEVAETVNV

SEQ ID NO: 355 - protein, 206 aa, Neisseria meningitidis
MLTPKSCDLFNIPFFQFSQLKKYQPESIPQIKADYKENWQIWQQLIQQVAAELGAPFAPPHIERWCNGWQVRAHFFAYFKYEQYKNSAAILSILLNRRRLSVSLDWHCYKADVSPIALPDYNRWLDNFDTEKYASFDMWHGAESEYDDYRTVAQQNESDRKLQNDEDFFCIGKHIERDDLGRQDVAKWIAETVEDLLPLYEACHGK

SEQ ID NO: 356 - protein, 248 aa, Neisseria meningitidis
MSTQDLSGKIALVTGASRGIGAAIADTLAAAGAKVIGTATSESGAAAISERLAQWGGEGRVLNSAEPETVENLIADIEKTFGKLDILVNNAGITRDNLLMRMKEEEWDDIMQVNLKSVFRASKAVLRGMMKQRSGRIINITSVVGVMGNAGQTNYAAAKAGLIGFSKSMAREVGSRGITVNCVAPGFIDTDMTRALPEETRQTFTAQTALGRFGDAQDIADAVLFLASDQAKYITGQTLHVNGGMLMP

SEQ ID NO: 357 - protein, 185 aa, Neisseria meningitidis
MMQKHKCLIDFILTVASQIAYADLPLSLEELLTDKGKFKLESSISYINTERNQSEFANPIYVQTSATKIATVMAMMITPVMAQNLDSQVFDSQNVKAIQLSQAEMKETQGEFVPIIAAAAFGGALGAWEYHGANLYNHGKLGTAQGAATAAGIGAATGVAAKQGWLLLPEADWLGIWHGDRVFMH

SEQ ID NO: 358 - protein, 258 aa, Neisseria meningitidis
MNFIRSVGARTLGLIQSLGSITLFLLNILAKSGTAFVRPRLSVRQVYFAGVLSVLIVAVSGLFVGMVLGLQGYTQLSKFKSADILGYMVAASLLRELGPVLAAILFASSAGGAMTSEIGLMKTTEQLEAMNVMAVNPVARVVAPRFWAGVFSMPLLASIFNVAGIFGAYLVGVTWLGLDSGIFWSQMQNNITIHYDVINGLIKSAAFGVAVTLIAVHQGFHCVPTSEGILRASTRTVVSSALTILAVDFILTAWMFTD

SEQ ID NO: 359 - protein, 661 aa, Neisseria meningitidis
LAVEGNFGGTTQSLAVCSTIGANSVKMPTSFLYTPHRQAEFMALLQISEPGMSAAPHRHRLAAGIDLGTTNSLVATVRSGSAACLPDAEGRITLPSVVRYLENGGIEVGKTALSAQKTDPLNTVSSAKRLIGRTLADLHQNTHYLPYRFGDNQRVIELHTRQGVKTPVEVSAEILKTLKSRAEETLGGDLVGVVITVPAYFDDAQRQATKDAARLAGLNVLRLLNEPTAAAIAYGLDNASEGTFVVYDLGGGTFDVSVLQLTKGLFEVKATGGNSALGGDDFDHRLFCRLLEQNGLSQLNEQDSQLLLSLVRAAKEQLTTQTEARIQATLSDGMAIDTSISRAEFHNLTQHLVMKTLEPVTQALKDAGVGKNEVKGVIMVGGSTRMLHVQQAVATFFGQTPLDNLNPDEVVALGAAIQANVLAGNKTDGEWLLLDVTPLSLGLETYGGLAEKIIPRNSTIPTARAQDFTTFKDGQTAMTIHVVQGERELVADCRSLAKFTLRGIPPMAAGAARIRVTFQIDADGLLSVSAQEQSTGVHAQIEVKPSYGLDDDTITQMLKDSMSNAAEDMAARARAEAVVEAESLTDAVNAALELDSDLLDAEELQQIRQGIADLQGRLKDGKAEDIRAAAAKLGSITDNFAAKRMNRNIQRALTGQSVDNI

SEQ ID NO: 360 - protein, 199 aa, Neisseria meningitidis
MSELDNILAHNRQFVESGEYEKYFTDKYPERGLAVLSCMDARIIGLLPDALGLKNGDAKLIKNAGALVTHPWGSVMRSLLVAVFELKVREIMVIAHHDCGMQGLNAEEFLGRVRESRIPEDRIETLRYAGIDLDGWLTGFDNVEDSVRHTVDLIRNHPLMPRHIAVHGLVIHPVTGKLTLVVDGSVSDGMDLSEGMETS

SEQ ID NO: 361 - protein, 101 aa, Neisseria meningitidis
MPSEALSGLQTAFCFPTVYKLSLFLDRNNDLIYLKRLEDMIMGFWNGVAKAVGEGMIEAGNEHKALKMEYAEKSSEELHEIVKSDGFLKIPHGRKVRLMLF

SEQ ID NO: 362 - protein, 143 aa, Neisseria meningitidis
MTENAQDKARQAVETVVKSPELVEQILSDEYVQIMIARRFHSGPLPPPSDLAQYNDIISNGADRIMAMAEKEQAVRHETIRQDQTFNRRGQLYGFISVILILLFAVFLVWSGYPATAASLAGGTVVALAGAFVIGRSRDQGKN

SEQ ID NO: 363 - protein, 61 aa, Neisseria meningitidis
MPDEKTLKAKQAEYQRKYDQKRLMKTVSFHLEREKELVDFMQKEIPDFSNWVKSVMKEKMK

SEQ ID NO: 364 - protein, 154 aa, Neisseria meningitidis
VLSDKCVYSFFVMQNMEIGQAQCYHISPLSKETDMDIRYFGTTPRYSEAVGANGLIFLSGMVPENGETAAEQTADVLAQIDRWLAECGSDKAHVLDAVIYLRDMGDYAEMNGVWDAWVAAGRTPARACVEARLARPEWRVEIKITAMKKDAATA

SEQ ID NO: 365 - protein, 262 aa, Neisseria meningitidis
MNPQDKCWQVHRHLAEHADQRLTLVRNAPKHILLAGADADISRSLLAKRYPQAVFEEYDSRADFLAAAAAVRKGGFWQRFTGKGVVQHCQSPTAPLPEACADMLWSNLGLLAAEQILPVLHNWARALKTDGLLFFTCFGRDTFTELKCRLKENGIESRSVMFPDMHDLGDMLAENGFYDPVTDTAKLVLDYKKAETFWADMDTLGVWRAMSWNDENAARSCVGAIFEREGGLGITLETVYGHAVKKLMLPQGENVVQFFPKR

SEQ ID NO: 366 - protein, 239 aa, Neisseria meningitidis
MATLSDKTILITGASQGLGEQVAKAYAAAGATVILVARHQKKLEKVYDAIVEAGHPEPFAIRFDLMSAEEKEFNQFAATIAEATQGKLDGIVHCAGYFYALSPLDFQTVAEWVNQYRINTVAPMGLTRALFPLLKQSPDASVIFVGESHGETPKAYWGGFGASKAALNYLCKVAADEWEHFGNLRANVLVPGPINSPQRIKSHPGEAKSERKSYGDVLPAFVWWASAESKGRSGEIVYL

SEQ ID NO: 367 - protein, 118 aa, Neisseria meningitidis
MNEHNLLIFCLKDNVSISEYTEMIDWAYKNIQSETVVEITENQIIEYQNRGLWRLVSEITDNWLFGPSEGDWLIDKESILAVKEKLQNSDFSTEPLVKNIIHVLEYAIKNEKTVIFHF

SEQ ID NO: 368 - protein, 199 aa, Neisseria meningitidis
MSEKPEKIVLASGNAGKLEEFGNLFKPYSITVLPQSAFGIPECPEPYPTFVENALAKARHAAKYSGLPALADDSGICAAALNGAPGIHSARYAGDNPKSDTANNLKLAAELVGKADKSCCYVCVLVFVRHKDDPRPIIAEGVWHGQWNDTPLGQNGFGYDPYFYLPEHGKTAAELDTEVKNRESHRAQALAELLRKLAL

SEQ ID NO: 369 - protein, 249 aa, Neisseria meningitidis
MPSERKDMIKFKNVHKHFKDLHVINGVNLEIKKGEVVVVCGPSGSGKSTLIRTVNQLESIESGEIWVDGVNVADPKTDLNKIREEVGFVFQSFNLYPHLTVLENITLAPMKVKGQNAEQAEKKAMELLERVGLAHKKDAFPSQLSGGQQQRVAIARGLAMEPRVMLFDEPTSALDPEMVGEVLKVMKDLAESGMTMMCVTHEMGFAREVADRVLFVDKGQILEDETPEAFFTNPKHERAKQFLQQVMTH

SEQ ID NO: 370 - protein, 54 aa, Neisseria meningitidis
MGQVAFYEKMIELWSSKSREASEQADLAAFEFAEGELANYQEMLKRHLQTKSVE

SEQ ID NO: 371 - protein, 95 aa, Neisseria meningitidis
MTIRPLHDRVVVKRLEAEEKTASGIVLPGAAAEKPDMGEVIAVGAGKIGKDGARRPLDVKVGDKIIFGKYSGQTVKADGEELLVMREEDIFGIVE

SEQ ID NO: 372 - protein, 328 aa, Neisseria meningitidis
MQNSTTEFLKPRQIDVNTFSATRAKVSMQPFERGFGHTLGNALRRILLSSMNGFAPTEVAIAGVLHEYSTVDGIQEDVVDILLNIKGIVFKLHGRSQVQLVLKKSGSGVVSAGDIELPHDVEILNPGHVICHLADNGQIEMEIKVEQGRGYQSVSGRQVVRDENRQIGAIQLDASFSPISRVSFEVEPARVEQRTDLDKLVLDIETDGSIDPEEAVRSAARILIDQMSIFADLQGTPVEEVEEKAPPIDPVLLRPVDDLELTVRSANCLKAEDIYYIGDLIQRTETELLKTPNLGRKSLNEIKEVLASKGLTLGSKLEAWPPVGLEKP

SEQ ID NO: 373 - protein, 1071 aa, Neisseria meningitidis
MPKRTDLKSILIIGAGPIVIGQACEFDYSGAQACKALREEGYKVILVNSNPATIMTDPEMADVTYIEPIMWQTVEKIIAKERPDAILPTMGGQTALNCALDLARNGVLAKYNVELIGATEDAIDKAEDRGRFKEAMEKIGLSCPKSFVCHTMNEALAAQEQVGFPTLIRPSFTMGGSGGGIAYNKDEFLAICERGFDASPTHELLIEQSVLGWKEYEMEVVRDKNDNCIIICSIENFDPMGVHTGDSITVAPAQTLTDKEYQIMRNASLAVLREIGVDTGGSNVQFAVNPENGEMIVIEMNPRVSRSSALASKATGFPIAKVAAKLAVGFKLDELRNDITGGKTPASFEPSIDYVVTKIPRFAFEKFPAADDRLTTQMKSVGEVMAMGRTIQESFQKALRGLETGLCGFNPRSSDKAEIRRELANPGPERMLFVADAFRAGFTLEEIHEICAIDPWFLAQIEDLMKEEKAVSDGILSDLDFAALRRLKRKGFSDKRLAQLLNVSEKEVREHRYALKLHPVYKRVDTCAAEFATETAYLYSTYEEECESRPSDRKKVMILGGGPNRIGQGIEFDYCCVHAALALRESGFETIMVNCNPETVSTDFDTSDRLYFEPLTLEDVLEIVRTENPWGVIVHYGGQTPLKLANALVENGVNIIGTSADSIDAAEDRERFQKVLNDLGLRQPPNRIAHNEEEALVKAEEIGYPLVVRPSYVLGGRAMQIVHSAEALQKYMREAVQVSEDSPVLLDFFLNNAIEVDVDCVSDGKDVVIGGIMQHVEQAGIHSGDSGCSLPPYSLSEEIQDEIRRQTKAMAYALGVVGLMNVQFAVQDGVVFVLEVNPRASRTVPFVSKATGVPLAKVGARCMAGISLKEQGVEKEVVPDFYAVKEAVFPFIKFPGVDTILGPEMRSTGEVMGVGASFGEAYYKAQLGAGERLNPTGKIFLSVREEDKERVIKTAKNFQVLGYGICATRGTAQYLTEQGLIVQTINKVPEGRPHIGDALKNGEIALVVNTVSSDPQSVSDSHIIRQSALQQRVPQYTTTAGGEAMSEGAKSRDHLGVYSVQELHGRLKNRN

SEQ ID NO: 374 - protein, 76 aa, Neisseria meningitidis
MARQSFKRRKFCRFTAEKIQEVDYKQVDLLKDFISENGKIIPARITGTKAFYQRQLAVAVKRARFLALLPYTDQHK

SEQ ID NO: 375 - protein, 87 aa, Neisseria meningitidis
MSKWRGFNRKGNTMKKNAPKSFEEALSRLESLTQAMQGEMPLEDALAAYQEGNELVRYCQTKLAQVEQKLQVLDADGLKELNLESDE

SEQ ID NO: 376 - protein, 265 aa, Neisseria meningitidis
MAAVFSVCACFMCSCLVVKNTVIGSGRTKIAVPLVARDAAELSAVLEQIKNMPFDIAEFRADFLECAGSIGEILHHTQTVRDALPDKPLLFTFRRHGEGGSFPCSDDYYFKLLDALIESRLPDIIDIELFSGETAVRRAVANAQKNGIAALLCNHEFHRTPPQEEIVCRLKQMEDCGADICKIAVMPQSAEDVLTLLSATLKAKELAAKPIVTMSMGQTGAVSRLAGQVFGSSITFGSGTQNSAPGQIGVSALRATLDCLENGAD

SEQ ID NO: 377 - protein, 204 aa, Neisseria meningitidis
MRITVIITTLQSAQRKPMPWNLPIFLTWLRVLLIPVMTALFYLPFPWFAEETINLAAAVIFAVAALTDWFDGFLARLWKQTSDFGAFLDPVADKLMVAVSLLLLVKLDRTYVLFAMIIIGREITISALREWMAQMGKRNSVAVATVGKFKTAAQMLAIFLLLLNIPDFYGFNLVVIGNVLMFIASLLTVWSMLYYLKMAWKEIA

SEQ ID NO: 378 - protein, 213 aa, Neisseria meningitidis
MTDFRQDFLKFSLAQNVLKFGEFTTKAGRRSPYFFNAGLFNDGASTLQLAKFYAQSIIESGIRFDMLFGPAYKGIILAAATAMMLAEKGVNVPFAYNRKEAKDHGEGGVLVGAPLKGRVLIIDDVISAGTSVRESIKLIEAEGATPAGVAIALDRMEKGTGELSAVQEVEKQYGLPVAPIASLNDLFILLQNNPEFGQFLEPVRAYRRQYGVE

SEQ ID NO: 379 - protein, 206 aa, Neisseria meningitidis
MTTHHVELRNVTKRFGAQKAVNQVDLVLKAGESVGLAGYNGAGKSTIMKLILGLITPTEGEVMLLGERTGSKAGARLRSQIGYLPETVALHPSLTGIETLDFYAKLKKQPLTQNRGLLERVGISQAAHRRVGTYSKGMRQRLALAQALLGEPKVLLFDEPTTGLDPASRQMFYEVVRELNGRGATVLLSTHALAELDGHADRIIVD

SEQ ID NO: 380 - protein, 228 aa, Neisseria meningitidis
MEKQNIAVILARQNSKGLPLKNLRKMNGISLLGHTINAAISSKCFDRIIVSTDGGLIAEEAKNFGVEVVLRPAELASDTASSISGVIHALETIGSNSGTVTLLQPTSPLRTGAHIREAFSLFDEKIKGSVVSACPMEHHPLKTLLQINNGEYAPMRHLSDLEQPRQQLPQAFRPNGAIYINDTASLIANNCFFIAPTKLYIMSHQDSIDIDTELDLQQAENILNHKES

SEQ ID NO: 381 - protein, 205 aa, Neisseria meningitidis
LEEQQELDNFKYFWKTTGKWLFALLILAALGYLGYTVYQNRATSQNQEAAAVLANIVEKAQNKAPQSEINAELTKLQQSYPHSISTAQATLMAAATEFDAQRYDVAEGHLKWVLSNQKDSLIQALAAQRLGVVLLQQKKYDAALAALDTPVEADFAPLLMETKGDVYAAQGKSQEALKNYGQALEKMPQDSVGRELVQMKLDSLK

SEQ ID NO: 382 - protein, 132 aa, Neisseria meningitidis
LMMYSFEANANAVKISETVSVDTGQGAKIHKFVPKNSKTYSSDLIKTVDLTHIPTGAKARINAKITASVSRAGVLAGVGKLARLGAKFSTRAVPYVGTALLAHDVYETFKEDIQARGYQYDPETDKFAKVSG

SEQ ID NO: 383 - protein, 60 aa, Neisseria meningitidis
VQELACGELEQVMIKGKSGYILLSQAGKDAVLVLVAKETGRLGLILLDAKRAARHIAEAI

SEQ ID NO: 384 - protein, 125 aa, Neisseria meningitidis
LFKSPATVRLQPRSPYQTISARSTKMCYAPFKIWNALKSLQSAMDRLKAAYLSARPDMVLLLRYTEMGLNQAEAAKLLGIAPSNVRARLKQLADLGLTEYRPDPKYRNRHALAAAHGQQSLGLEG

SEQ ID NO: 385 - protein, 153 aa, Neisseria meningitidis
MDLRKLKKLIDLVEESGIAEIEVTEGEEKVRITRTIAAAAAPVYAAPVPAAAPAVTPAAAPVAASAPAAAPAARDLSDAQKSPMVGTFYRAPGPNAAPFVEVGQQVKAGDTLCIIEAMKLMNEIEAEKSGTVKEILVENGTPVEFGEPLFIIG

SEQ ID NO: 386 - protein, 109 aa, Neisseria meningitidis
MKQNIEKLESSVYTLVQKFETLVSENRRLKETVAELKRAHERQKLEHETAVDELSEALLVQVGKLKEDLQNKIDSLTEENSRYRTLLEQNREKISALAARLPQWQETQQ

SEQ ID NO: 387 - protein, 94 aa, Neisseria meningitidis
MQPAVYILASQRNGTLYIGVTSDLVQRIYQHREHLIEGFTSRYNVTMLVWYELHPTMESAITREKQLKKWNRAWKLQLIEENNVSWQDLWFDII

SEQ ID NO: 388 - protein, 245 aa, Neisseria meningitidis
MKKLSRIVFSTVLLGFSAALPAQTYSVYFNQNGKLTATMSSAAYIRQYSVVAGIAHAQDFYYPSMKKYSEPYIVASTQIKSFVPTLQNGMLILWHFNGQKKMAGGFSKGKPDGEWVNWYPNGKKSAVMPYKNGLSEGTGYRYYRNGGKESEIQFKQNKANGVWKQWYADGSIKTEMVMVNDEPAKILTWDESGRLLSELSIRHHQRNGVVLEWYEDGSKKSEAVYQDDKLVRKTQWDKDGYLIEP

SEQ ID NO: 389 - protein, 300 aa, Neisseria meningitidis
MDSLMTLLSVLVPMFAGFFIRVPKPYLPALDKVLSVLVYAVLLLIGVSLSRVEDLGSRLDDMALTVLWLFVCTVGANLLALAVLGKLFPWRIKGKGKGVSVGVSGSVGQLGCVLLGFASGKLMRDIWMPSENAGMYCLMLLVLLIGVQLKSSGVSLRQVLVNRRGIRLSVWFMLSSLSGGLLFAASADGVSWVKGLAMASGFGWYSLSGLVMTEAYGAVWGSIALLNDLARELFALAFIPLLMKRFPDAAVGVGGATSMDFTLPVIRGAGGLEAVPVAVSFGVVVNIAAPFLMVVFSALG

SEQ ID NO: 390 - protein, 150 aa, Neisseria meningitidis
MRNIVAAILRDDYGLTVKTDGTGKGNMPLREAVKLIRGSDVAIEFHTNSAAGKAATGIEALSTVKNKRWCQVLSKAVAKKTGWKLRGEDGFKPDNAGRHSRLAYAQAGGIVFEPFFISNDTDLALFKTTKWGICRAIADAIAMELGAAKV

SEQ ID NO: 391 - protein, 330 aa, Neisseria meningitidis
MPSETVCPFSDGISVTHPSPYTVRPYSEGLLRKPVMPYQQITVNVNDAVAERLADALMEHGALSAAIEDAYAGTQNEQAIFGEPGMPAEQIWQQSKVIALFGEHDEAAAIIDAAAQECGLKDLAYTGETIEDQDWVRLTQSQFDPIRISDRLWITPSWHEVPEGSAVNLRLDPGLAFGTGSHPTTRLCLKWLDTQLKNGESVLDYGCGSGILTIAALKLGAGSAVGVDIDEQAVRAGKDNAEQNNVDAQFYLPEQLPSGQFDVVVANILANPLRMLGEMLAARTKQGGRIVLSGLLDEQAEELGGIYSQWFDLDPAETEEGWARLSGVKR

SEQ ID NO: 392 - protein, 103 aa, Neisseria meningitidis
MASIHDQIKEVVTTHRVVLFMKGTKQFPQCGFSSRAVQILNAAGCTDYVTVNVLENPEVRQGIKEYSDWPTIPQLYVNGEFVGGSDILMEMYEAGELQELLKA

SEQ ID NO: 393 - protein, 118 aa, Neisseria meningitidis
LLQTPKLRVIAVHNDSGSPAFCRVIWRKHIAEMTDLSAAERGELMEMVYKVEAAMRQVFQPAKINLASLGNVVPHLHWHIIARFENDASFPAPIWANPVRKHGMTLPQDWTEQLKKLL

SEQ ID NO: 394 - protein, 233 aa, Neisseria meningitidis
MSLKTVTVIGAMEQEIELLREMMENVKAVSFGKFAAYEGELAGKRMVLALSGIGKVNAAVATAWLIHQFAPDCVINTGSAGGLGKGLKVGDVVVGTEIAHHDVDVTAFGYVWGQVPQLPAVFVSDGLLVGKAKQAAEVFEGAAVEQGLIVSGDRFVHSSEGVAEIRKHFPEVKAVEMEAAAIAQTCHQLETPFVIIRAVSDSADEKADISFDEFLKTAAANSAKMVAEIVKSL

SEQ ID NO: 395 - protein, 311 aa, Neisseria meningitidis
LLQIPISHANGLDARLRDDMQAKHYEPGGKYHLFGNARGSVKKRVYAVQTFDATAVSPVLPITHERTGFEGVIGYETHFSGHGHEVHSPFDHHDSKSTSDFSGGVDGGFTVYQLHRTGSEIHPEDGYDGPQGSDYPPPGGARDIYSYHIKGTSTKTKINTVPQAPFSDRWLKENAGAASGFLSRADEAGKLIWENDPNQNWWGNRMDDVRGIIQGAANPFLTGFQGLGVGAITDSAVNPVTYAAARKTLQGIHNLGNLSPEAQLAAATALQDSAFAVKDGINSAKQWADAHPNITATAQTALAIAEAATTV

SEQ ID NO: 396 - protein, 296 aa, Neisseria meningitidis
MIFQNHAVRTATLSHFTTSAMAHYAIGDIQGCFDELTALLGKIGFNHGTDTLWLTGDIVNRGPKSLETLQFCIRHENSVQIVLGNHDLHLLAVGCGEGAPKRSDTIEPILKHPDGKKMLDWLRAQPLLIREGSRVMVHAGILPQWRIAKAESLAREAEAELRGKKYVKFFSKMYGNKPAAWDEGLEGYARLRFIVNAFTRMRALTFKNELDFDYKSTVKKMPPYLRPWFKAPDRQNLDRTIIFGHWSSLGYTNADNVISLDTGALWGGQLTAVNLETEEITQVQAAGGIDWKSFAK

SEQ ID NO: 397 - protein, 313 aa, Neisseria meningitidis
MKTLLLLIPLVLTACGTLTGIPAHGGGKRFAVEQELVAASSRAAVKEMDLSALKGRKAALYVSVMGDQGSGNISGGRYSIDALIRGGYHNNPESATQYSYPAYDTTATTKADALSSVTTSTSLLNAPAAALTKNSGRKGERSAGLSVNGTGDYRNETLLANPRDVSFLTNLIQTVFYLRGIEVVPPEYADTDVFVTVDVFGIVRSRTELHLYNAETLKAQTKLEYFAVDRDSRKLLIAPKTAAYESQYQEQYALWMGPYSVGKTVKASDRLMVDFSDITPYGDTTAQNRPDFKQNNGKNPDVGNEVIRRRKGG

SEQ ID NO: 398 - protein, 279 aa, Neisseria meningitidis
MPGVKRQSLDRLLFTAEEAVKLGIPMLALFPVVTANKTERAQEAYNPEGLVPSTVRALRERFPELGIMTDVALDPYTVHGQDGLTDENGYVMNDETVEVLVKQALCHAEAGAQVVAPSDMMDGRIGAIREALEDAGHIHTRIMAYSAKYASAFYGPFRDAVGSSGNLGKADKKTYQMDPANTDEALHEVALDIQEGADMVMVKPGLPYLDVVRRVKDEFGVPTYAYQVSGEYAMLQAAVANGWLDGDKVVLESLLAFKRAGADGILTYYAIEAAKMLKR

SEQ ID NO: 399 - protein, 392 aa, Neisseria meningitidis
MAFLKLTEQNVQGKTVLIRADMNVPFKDGKISDDTRIRASLASVKYCLDNGASVIVMTHLGRPTEGEFHPEDDVAPVAAHLGGLLGKDVKVLNDWRENKPALNAGDVVMLQNVRINKGEKKNDLELGKAYASLCDVFVNDAFGTAHRAQASTEAVAQAAPVACAGVLMAGELDALGKALKQPARPMVAIVAGSKVSTKLTILESLADKVDQLIVGGGIANTFLLAEGKAIGKSLAEHDLVEESKKIMAKMAAKGGSVPLPTDVVVAKAFAADAEAVVKDIADVAEDEMILDIGPKSAAALADLLKAADTVVWNGPVGVFEFDQFAGGTKALTEAIAQSKAFSIAGGGDTLAAIAKFGVTDQIGYISTGGGAFLEFLEGKELPAVAALEKRGE

SEQ ID NO: 400 - protein, 241 aa, Neisseria meningitidis
METQNKPTVTDIDRPILVPPGGHKKVLLHSCCAPCSGEVMEAMLASGIDYTIYFYNPNIHPHKEYMLRKEENVRFAEKFGIPFIDKDDDYENDRKEWFAKAKGMEFEPERGIRCTMCFDMRFEKAAQYAHEHGFPVFTSSLGISRWKNMAQINDCGHRAAAPYDDVVYWDFNWRKGGGSARMIEISKRENFYQQEYCGCAYSLRDSNAHRKSQGRIPIKLGVLYYGDESTQYEPAPIRVDK

SEQ ID NO: 401 - protein, 245 aa, Neisseria meningitidis
MGGQKTHFGFSTVNEDEKAGKVAEVFHSVAKNYDIMNDVMSAGLHRVWKHFTINTAHLKKGDKVLDIAGGTGDLSRGWAKRVGKEGEVWLTDINSSMLTVGRDCLLNEGMILPVSLADAEKLPFPDNYFNLVSVAFGLRNMTHKDTALKEMCRVLKPGGTLLVLEFSKIYKPLEGAYDFYSFKLLPVMGKLIAKDAESYQYLAESIRMHPDQETLKQMMLDAGFDSVDYHNMSAGIVALHKGVKF

SEQ ID NO: 402 - protein, 114 aa, Neisseria meningitidis
MNKQYPKINYIGNKEKIASWICDQLPSDVDTVADVFSGGCSFAYEAKKRGYRVITNDILAINYQIALALIENNHETLNDDDVAMIFSGSPHAGFMSQRYAEKFYFHDEYQQLDL

SEQ ID NO: 403 - protein, 179 aa, Neisseria meningitidis
MARLREFYKETVVPELVKQFGYKSVMEVPRIEKITLNMGVGEAVADKKVMEHAVSDLEKIAGQKPVVTVARKSIAGFKIRDNYPVGCKVTLRRDQMFEFLDRLITIALPRVRDFRGVSGKSFDGRGNYNMGVREQIIFPEIEYDKIDALRGLNITITTTAKTDEEAKALLSLFKFPFKG

SEQ ID NO: 404 - protein, 307 aa, Neisseria meningitidis
MKKRNNPLPLLNGVKPSYLVLPHEKQFYGLPLLHFLCIRFPFVGADDWRRRLNSGFVVGSDGAALDEHSLFEPGKTMFYYRETSSEDEPRIPFEEKILHIDEHLIVVDKPHFLPVIPSGRFLRETLLTRLRLRPELQHLNVEDITPLHRLDKDTAGVMLLSHNPATRGAYQTMFQNKTVWKTYEALAPTRTDLPYPLDVVSRLVRGEKFFTTQEAEGEPNAHTTVELIENRGEFSLYRLTPHTGKKHQLRVHMMGLGMPLLNDALYPVPSEAGSEDYRKPLKLLAKKIAFADPLSGRERVFCSRFCL

SEQ ID NO: 405 - protein, 478 aa, Neisseria meningitidis
MPLLSVEFALFFLAFLPIYWGLAKYPSVQNLLLLAAGMGWLYHIGPVFAAIVVLYSSCVYLLGELLRSDRENTRRFWLGCGIAVSLTVLGFFKYFDFFRPLIAQYAGQGGAIDILMPLGLSYYTFQSLAYLVYCFRAPHAARFEWHELLLHLSFFPTVTSGPIIRAAAFKSADGEQAGALAQIRTRQPRSPVRPALAVSLILLGIAKKWWLAGMLAENWVSPVFENPAQFDGWGVLGGVYGYTFQLFLDFSGYSDLVIGMAMLLGFRLPKNFSAPLRALNIRAFWDKWHISLSTWIRDYIYIPLGGSKKGFLRTQLNLMAAMVLSGIWHGYGWNFLIWGALHGTALVLLNTGDRYFGRNALCRLKYLAPLSWFVTFHFVCLSFVVFNTASPDDAGAVFNALFANANGWNAPQQANMLLLASFASVMLLYPYLQRAFDGAAKGLEKIPMWLWFIPVSAVLLLIIVLAPSGIPGFIYANF

SEQ ID NO: 406 - protein, 124 aa, Neisseria meningitidis
MRKSRLSRYKQNKLIELFVAGVTARTAAELVGVNKSTAAYYFHRLRLLIYQNSPHLEMFDGEVEADESYFAERQNHINGIENFWNRAKRHLRKFNGIPKAHFELYLKGYERRFNNSEIKVLVPF

SEQ ID NO: 407 - protein, 1028 aa, Neisseria meningitidis
MRRYLNTCLARDLGVAANLSFSLPAGLTWKLMKKLIPGIPELSPFAPEVMRWRLLDLFRSEAFRNTAEFEDVRNVLQDYLGSGESADYQLAGQLADIFDQYLVYRPQWIDAWQQGRRLGLGDDEIWQSKLWRYLDDGRQSAPHRVALWEKLLAALDKDKLPERYFVFGISTMAPMYLQLLHKLSEHCDVFVFALNPSGMYWGNVIEAAQILKGGGDPDLTQAGHPLLASLGKQGRDFFDFLNEMEIEGETPVFEEGGRDTLLHALQTDIQNLKMPSENVGSVNTGDGSIRIVSAHSPLRELQILKDKLLKILHEHPDWQPHDIAVLTPHIESYTPFIEAVFGQAQPGAQALPYSVSDVKISRRQPLFHALSCLFDLLESRFEVDKVLVLLETAPVLRRFGLTEDDLPLLHDMVADLNVHWGLDGEMRGGTDQLFTWKQAVERMILGWMLPEGGNPMWQDVSAWYADVNQTALFGRFAALLETLSDIVRIWRQPATIGEWVARCRDLLETLFQAEADDQKSVQNLENEWVKWQAETELAQFSGQLPQQTVIRHIRRFLDSESEAGFLRGGITFCSMVPMRSLPFKVICLLGLNDGDFPRNTKAAVFDLIAKHPAKGDRARRDDDRYLFLEALISAREILYLSYIGRDIRKDEELAPSSLLGELIDTVAAMAGIGSRQLAQNWIEQHPLQAFSRRYFQEGGRSDGIFGTRTDYATALGQTPEPPQPFFDQPVENAEPVAEIGQDEFIRFWRNPVKVWLQQQLAWSEPHIGEAWEPAEPFEPQHADQIAETYIEARREGRDFAQTAARIGAESLLPSGELGRLWQQNFQTAAKQIDTAVLNSPKLPPLSYAIPSDGQILKGSLGNLYRCGQVFYAYGKPNAPQRIAFLLEHLIFCAVMPSEAETRQTFIVQSGETEILAEIAQDRALQLLSEWMAFFNIGQNRPLPFFAKTSLAAAEAFAQKQDWEAALKKAQTAYYGNKVSKGQKDYTEVALVFGNASQNPLEQPLFENLARLLADTLAAAEKREGAGAA

SEQ ID NO: 408 - protein, 117 aa, Neisseria meningitidis
MDKHTTRLRRARKTRARIADLKMVRLCVFRSNNHIYAQVISAEGDKVLAQASTLEAEVRGSLKSGSNVEAAAIVGKRIAEKAKAAGVEKVAFDRSGFQYHGRVKALAEAARENGLSF

SEQ ID NO: 409 - protein, 354 aa, Neisseria meningitidis
MKAARFYDKGDIRIEDIPEPTVAPGTVGINVAWCGICGTDLHEFMEGPIFIPPCGHPHPISGESAPVTMGHEFSGVVYAVGEGVDDIKVGQHVVVEPYIVHDDVPTGSGSNYHLSKDMNFIGLGGCGGGLSEKIAVKRRWVHPISDKIPLDQAALIEPLSVGHHAYVRSGAKAGDVALVGGAGPIGLLLAAVLKAKGIKVIITELSKARKDKARESGVADYILDPSEVDVVEEVKKLTNGEGVDVAFECTSVNKVLDTLVEACKPAANLVIVSIWSHPATVNVHSVVMKELDVRGTIAYCNDHAETIKLVEEGKINLEPFITQRIKLDELVSEGFERLIHNNESAVKIIVSPNL

SEQ ID NO: 410 - protein, 224 aa, Neisseria meningitidis
LVRTADGYKAIAHIQAGDRVLSKDEASGETGYKPVTTRYGNPYQETVYIEVSDGIGNSQTLISNRIHPFYSQGKWIQAGRLKKGDTLLSESGAKQTVQNITLKQQPLKAYNLTVADWHTYFVKGDKAETEGVWVHNECPTKPKPTNHAQQRKEEAKNDSHRSVGDSNRVVREGKQYLDADTGNHVYVKGEKVVILTPDGRQVTQFKNSKANTSKRVKNGKWTPK

SEQ ID NO: 411 - protein, 200 aa, Neisseria meningitidis
MFNISAVAVSYLIGSLSFAVIVSKYYGMDDPRTYGSGNPGATNVLRSGKKKAAALTLLGDAAKGLVAVLLARVLQEPLGLSDSAIAAVALAALVGHMWPVFFGFKGGKGVATALGVLLALSPATALVCALIWLVMAFGFKVSSLAALTATIAAPLAALFFMPHTSWIWATLLIALLVLFRHKSNIVKLLEGRESKIGGSR

SEQ ID NO: 412 - protein, 408 aa, Neisseria meningitidis
MNTDNLHDILDEMVQVYSQKKQSRSETPAEIGAHFHPLLDRLCETAEAQNASDILISKGFPPSLKINSALTPQPQKALTGEETAAIAASTMNAEQSEIFRRDGEINYSVQSRSGTRYRANAYHSQGSAGLVLRRINHVIPQMQELGLPEKLKDLAVAPRGLLIIVGPTGSGKSTTMATMLEHRNKTLPSHIVTIEDPIEFIYKPRRCIFTQREIGVDTINWQTAVQNAMRQSPDVVCIGEVRSRESMEYAMQLAQTGHLCIFTLHANTAPQSLERILNFYPKEQHNQILIDIALNLTGIICQRLALKQDKTGRTAVVDLLINTPAIQDFILKGDLMNISKIMETAKTDGMQTMDQNLFELYRHGIISYEEALRQSVSANNLRLHIQLHKEGKTPELLYDRINDLNLVS

SEQ ID NO: 413 - protein, 503 aa, Neisseria meningitidis
VVTLLMDSAEGIEVNNTVIKVLSIDVGRVTRIKLRDDQKGVEVTAQLNADVSGLIRSDTQFWVVKPRIDQSGVTGLGTLLSGSYIAFTPGKSDEAKDVFQVQDIPPVTAIGQSGLRLNLIGKNDRILNVNSPVLYENFMVGQVESAHFDPSDQSVHYTIFIQSPNDKLIHSASRFWLESGINIETTGSGIKLNSAPLPALLSGAISFDSPKTKNSKNVKSEDSFTLYDSRSEVANLPDDRSLYYTAFFKQSVRGLTVGSPVEYKGLNVGVVSDVPYFDRNDSLHLFENGWIPVRIRIEPSRLEINADEQSKEHWKQQFQTALNKGLTATISSNNLLTGSKMIELNDQPSSSPKLRPHTVYAGDTVIATQGGGLDDLQAKVVDLLDKFDKLPLDKTVAELNGSLAELKSALKSANAALSSIDKLAGNPQTQNIPNELNQTLKELRTTLQGVSPQSPIYGDVQNTLQSLDKTLKDVQPVINTLKEKPNALIFNSSSKDPIPKGSR

SEQ ID NO: 414 - protein, 597 aa, Neisseria meningitidis
MQLDIDRLVAYFGGVNALAEALKQHDPENAATTAAIYKWRTRGSLPLAQLQKLTALAEAQGRPLDLNAFLQKNESLERTEMTQANRVIIFDTTLRDGEQSPGAAMTKEEKIRVARQLEKLGVDIIEAGFAAASPGDFEAVNAIAKTITKSTVCSLSRAIERDIRQAGEAVAPAPKKRIHTFIATSPIHMEYKLKMKPKQVIEAAVKAVKIAREYTDDVEFSCEDALRSEIDFLAEICGAVIEAGATTINIPDTVGYSIPYKTEEFFRELIAKTPNGGKVVWSAHCHNDLGLAVANSLAALKGGARQVECTVNGLGERAGNASVEEIVMALKVRHDLFGLETGIDTTQIVPSSKLVSTITGYPVQPNKAIVGANAFSHESGIHQDGVLKHRETYEIMSAESVGWATNRLSLGKLSGRNAFKTKLADLGIELESEEALNAAFARFKELADKKREIFDEDLHALVSDEMGSMNAESYKFISQKISTETGEEPRADIVFSIKGEEKRASATGSGPVDAIFKAIESVAQSGAALQIYSVNAVTQGTESQGETSVRLARGNRVVNGQGADTDVLVATAKAYLSALSKLEFGSAKPKAQGSGTI

SEQ ID NO: 415 - protein, 108 aa, Neisseria meningitidis
VGMTGFNDAAGVASSPSDIKGKYVQSVEVKNGVITATMLSSGVNNEIKGKKLSLWATRQDGSVKWFCGQPVTRDAPNASADAVNKVTGNEIDTKHLPSTAPTRKSTPN

SEQ ID NO: 416 - protein, 100 aa, Neisseria meningitidis
LGFNNLVSLAALIEKVFPIRYTPAGISVLDIILKHESWQKENGQQCFVQLEIPARILGRQAEEWQYRQGVYVHVEGFLAQKSRRSLMPMLRIQNIKEYKG

SEQ ID NO: 417 - protein, 205 aa, Neisseria meningitidis
MTFPPLKSPLKFYAVVPTADWVGRMVKAGADTVQLRCKTLHGDELKREIARCVAACQGSRTQLFINDHWHEAIEAGAYGVHLGQEDMDTADLAAIAAAGLRLGLSTHSVAELNRALSVHPSYVASGAIFPTTTKQMPTAPQGLDKLCEYVKQAGGTPVVAIGGIDLNNARAVLATGVSSLAAVRAVTEAANPEAVVKAFQALWDG

SEQ ID NO: 418 - protein, 206 aa, Neisseria meningitidis
MHGHWHCAEKRGYSGVAVYSKRKPDNVQIGMGIEEFDREGRFVRCDFDRLSVISLYLPSGSSAEERQQVKYRFLDAFYPMLEAMKNEGRDIVVCGDWNIAHQNIDLKNWKGNQKNSGFLPEEREWIGKVIHKLGWTDMWRTLYPDVPGYTWWSNRGQAYAKDVGWRIDYQMVTPELAAKAVSAHVYKDEKFSDHAPLVMEYDYAAE

SEQ ID NO: 419 - protein, 92 aa, Neisseria meningitidis
MKWVTVVLSFALVCCQYSLWFGKGSIGRNSSLREQIAVQEEKNQTLALRNHSLAAEVYDLENGQEAISEIARVELGYIQDGETFYRLIRHNR

SEQ ID NO: 420 - protein, 119 aa, Neisseria meningitidis
MIKLDLKSINLYDIDFEKFTPEIPDNFHRWIDLDIGIEGEQGSSIFSLCICSPKWISHHCNKEGFFWSNALILEQFDHKIIKSEIDKILEYCSKETWDLTLSNLLRFFSWEFEDYNPNT

SEQ ID NO: 421 - protein, 66 aa, Neisseria meningitidis
MFVCICNAVTDHQIKETIAAGATTMGDLQSQLGVASCCGCCGELAASFLTAHNAQPTVTAGINVQA

SEQ ID NO: 422 - protein, 67 aa, Neisseria meningitidis
MDTTLKHKAEALLGEPLLDEPVRPESWECCGSDCGEACIQTMYWADKARYDAQRRKLKEAGWSDDAV

SEQ ID NO: 423 - protein, 118 aa, Neisseria meningitidis
MLSAYFPVFVFILVGLAAGVLFILLGTILGPKRHYAEKDAPYECGFEAFENARMKFDVRYYLVAILFILFDLEVAFMLPWAVVFKDLGAYGFWSMLVFIVVLTVGFVYEWKKGALEWE

SEQ ID NO: 424 - protein, 174 aa, Neisseria meningitidis
MSLNKVILIGRLGRDPEVRYMPNGEAVCNFSVATSETWNDRNGQRVERTEWHNITMYRKLAEIAGQYLKKGGLVYLEGRIQSRKYQGKDGIERTAYDIVANEMKMLGGRNENSGGAPYEEGYGQSQEAYQRPAQQSRQPAPDAPSHPQEAPAAPRRQPVPAAAPVEDIDDDIPF

SEQ ID NO: 425 - protein, 130 aa, Neisseria meningitidis
MNGKYYYGTGRRKSSVARVFLIKGTGQIIVNGRPVDEFFARETSRMVVRQPLVLTENAESFDIKVNVVGGGETGQSGAIRHGITRALIDFDAALKPALSQAGFVTRDAREVERKKPGLRKARRAKQFSKR

SEQ ID NO: 426 - protein, 152 aa, Neisseria meningitidis
VGRQVPSERTFGRHSFVDLNERNCMTYSGLNLNQDKATKPQTVQIVRQGEATLYWFLLIHYRFRRERRETQSLLMTRNTLKFIPFWSYKHITYAIFLYSRLPENSGQEYLTQRKAEKATKNNLHLSRLVSPTLGVQTIQSFRLPLFVYKINF

SEQ ID NO: 427 - protein, 102 aa, Neisseria meningitidis
MTLKTDLLPKINNEDYQRLILKHSAEFSGGEIRLLNEILEKFNFDVVQAQALAQAVMQQIRFDPNAYHIDSDDEDTTGICPHCINPPMPPLRDYLVWRETRG

SEQ ID NO: 428 - protein, 245 aa, Neisseria meningitidis
MLLIPAIDLKEGRCVRLRQGLMEEATVFSDSPAETALHWFKQGARRLHLVDLNGAFAGVPQNLPAIKDILAAVAKDIPVQLGGGIRDLKTIGQYLDLGLNDVIIGTAAVKNPDFVREACKAFPGRIIVGLDAKDGMAAIDGWATVTGHHVIDLAKRFEDDGVNSIIYTDIGRDGMMSGVNIDATVKLAQAVRIPVIASGGLTGLDDIRALCAAEKHGVAGAITGRAIYEGSIDFAQAQQLADSLD

SEQ ID NO: 429 - protein, 43 aa, Neisseria meningitidis
MRNFDKLAEEAAEHAAEGAVKFIEGKPAKKIIAVPGRLANIVV

SEQ ID NO: 430 - protein, 127 aa, Neisseria meningitidis
MTFAYWCILIACLLPLFCAAYAKKAGGFRFKDNHNPRDFLAHTQGTAARAHAAQQNGFEAFAPFAAAVLTAHATGNAAQSTINTLACLFILFRLAFIWCYIADKAAMRSLMWAGGFACTVGLFVAAA

SEQ ID NO: 431 - protein, 280 aa, Neisseria meningitidis
MIQHAGLGYRRDLAEDFLSLSENSPICFIEAAPENWLKMGGWARKQFDRVAERLPLALHGLSMSLGGQAPLDTDLIDGIKEMMRRYDCTFFSDHLSYCHDGGHLYDLLPLPFTEEMVHHTARRIREVQDRLGCRIAVENTSYYLHSPLAEMNEVEFLNAVAREADCGIHLDVNNIYVNAVNHGLLSPEAFLKNVDADRVCYIHIAGHDVETPELLIDTHGAAVLPTVWDLLELAYAKLPTIPPTLLERDFNFPPFAELEAEVAKIADYQTRAGKEYRRAA

SEQ ID NO: 432 - protein, 625 aa, Neisseria meningitidis
MSQALPYRPDIDILRAAAVLSVIVFHIEKDWLPGGFLGVDIFFVISGFLMTTILHREMSGGGRFSLKAFYIRRIKRILPAFFAVLAATLAGGFFLFTKDDFFLLWKSALTALGFASNLYFARGKDYFDPAQEEKPLLHIWSLSVEEQFYFVFPILLLLVARKSLRVQFGFLAALCALSLAASFIPSALDKYYLPHLRACELLIGSLTAVWMRYRQQRNLAVGRCCAAAGALFSACILSACLFAYSEQTAYFPGPAALIPCLAVAALIYFNHYEHPLKKFFQWKITVAAGLISYSLYLWHWPILAFMRYIGPDNLPPYSPAAAIVLMVVLSLISYFCIEKPFKKWKGSFAQSVLWIYALPMLILGAGSFFAMRLPFMAQYDRLGLTRSNTSCHNNTGKQCLWGDTEKQPELLILGDSHADHYKTFFDAVGKKEKWSATMVSADACAYVEGYASRVFQNWAACRAVYRYAEEHLPRYPKVVLAMRWGSQMPENSRSLAYDAGFFQKFDRMLHKLSSEKQAVYLMADNLASSYNVQRAYILSSRIPGYRQTLRPDDESTLKANARIRELAAKYPNVYIIDAAAYIPADFQIGGLPVYSDTDHINPYGGTELAKRFSEKQRFLNTRHNH

SEQ ID NO: 433 - protein, 213 aa, Neisseria meningitidis
LGLLLALARLIHLEKAGAPMRVLAWALRKVSLLYVTLFRGTPLFVQIVIWAYVWFPFFVHPSDGILVSGEAAIALRRGYGPLIAGSLALIANSGAYICEIFRAGIQSIDKGQMEAARSLGLTYPQAMRYVILPQALRRMLPPLASEFITLLKDSSLLSVIAVAELAYVQNTITGRYSVYEEPLYTVALIYLLMTTFLGWIFLRLEKRYNPQHR

SEQ ID NO: 434 - protein, 239 aa, Neisseria meningitidis
LTLTRKTLFLLTAAFGTHSLQTASADAVVKAEKLHASANRSYKVAGKRYTPKNQVAEFTQTGNASWYGGRFHGRKTSGGERYDMNAFTAAHKTLPIPSYVRVTNTKNGKSVIVRVNDRGPFHGNRIIDVSKAAAQKLGFVSQGTAHVKIEQIVPGKSAPVAENKDIFIDLKSFGTEHEAQAYLNQAAQNFAASTSSPNLAIEKRRYEYVVKMGPFASQERAAEAEAQARGMVQTVLTAG

SEQ ID NO: 435 - protein, 73 aa, Neisseria meningitidis
MLKTLTFAALHFTTAFSVTYVLTGSIGVSGAVALVDPLINTVVFYSGLTKTSTALPRLAVLFVLSAASSPCPD

SEQ ID NO: 436 - protein, 112 aa, Neisseria meningitidis
VLNEFAERNWQSDLRYAEAYIRSKSRKHGSLRLKQALAQQGIDEETSCNLLPDRSSEKLAAIAVLRKKFKHPAADLKEKQKQARFLAYRGFDADTVQTALKHAWDENWEDGC

SEQ ID NO: 437 - protein, 481 aa, Neisseria meningitidis
MNWSDLNLMPAMPEIVLLALLVLLLLADLWVSDDKRRWTHYGALATVAVTAVVQLAVWEQGSTSSFNGMYIADGMSRLAKMVLYALTFALFVYAKPYNQVRGIFKGEFYTLSLFALLGMSVMVSAGHFLTAYIGLELLSLALYALIALRRDSGFAAEAALKYFVLGALASGLLLYGISMVYGATGSLEFAGVLASSFNEEANEWLLKLGLVFIVVAVAFKLGAVPFHMWVPDVYHGAPTSVTALVGTAPKVAAVVFAFRILVTGLGTVHHDWSLMFALLAAASLLVGNLAAIMQTNIKRMLAYSTVSHMGFILLAFMAGAVGFAAGLYYAITYALMAAAGFGVLMVLSDGDNECENISDLAGLNQHRVWLAFLMLLVMFSMAGIPPLMGFYAKFGVIMALLKQGYVWLSVFAVVMSLIGAFYYLRVVKVMYFDESGRAHPTVGGNNAAKFLLSVNALLLVLWGIMPQTVIDWCAKALENTL

SEQ ID NO: 438 - protein, 61 aa, Neisseria meningitidis
VDEALFGMRALYAKAVGMTNFLFKIQTIIKRNRAYSPMPSKSMLCFLSFFFAAKTKNPSHQ

SEQ ID NO: 439 - protein, 1306 aa, Neisseria meningitidis
LNYIIAFSNSPETDFSDGIQIKTAKHGHTMTTTTAPQRIREIPYNYTSYTDREIVIRLLGDEAWQILQDLRGQRKTGRSARMLFEVLGDIWVVVRNPYLVDDLLEHPKRRAALVREMRHRLNEIRKRRDDNRQVDVLVAAAEKAVERFDSSFDETSQKRRQILERLSKITKPHNIMFDGLARVTHVTDATDWRVEYPFVVVNPDTEAEIAPLVRALIELDLVIIPRGGGTGYTGGAIPLDANSAVINTEKLDKHRGVEYVELAGLDGKHPIIRCGAGVVTRRVEETAHQAGLVFAVDPTSADASCVGGNVAMNAGGKKAVLWGTALDNLAYWNMVNPQGEWLRIERVRHNFGKIHDEETAVFDVHTLDSDGINIVKTERLEIPGHKFRKVGLGKDVTDKFLSGLPGVQKEGTDGIITSVAFVLHKMPKYTRTVCMEFFGTVATATPSIVEIRDFLLAHDSVRLAGLEHLDWRYVRAVGYATKAAGKGRPKMVLLADVVSDDEAAVEAAAEHICELARARDGEGFIAVSPEARKTFWLDRSRTAAIAKHTNAFKINEDVVIPLERLGEYSDGIERINIELSIQNKLKLCAALEQYLSGKLPIDKMGTDLPTAELLGERGKHALAHVSAVKARWEWLLANLDAPLADYKARYGAAVHAAPEAKDNESCFIAFRDFRLRVSVKADVMKPLSEIFSGKTDTKIIQGLGKIHAKTVRSRVFVALHMHAGDGNVHTNIPVNSDDAEMLQTAYRSVERIMKIARSLNGVISGEHGIGITKLEFLSDEEMQPFWDYKNQVDPKHTFNRHKLMKGSDLRNAYTPSFELLGAESLIMEKSDLGTIADSVKDCLRCGKCKPVCSTHVPRANLLYSPRNKILGVGLLTEAFLYEEQTRRGVSVKHFEELADIGDHCTVCHRCVKPCPVNIDFGDVTVAVRNYLADSGHKRFAPAASMGMAFLNATGPKTIKTLRAAMIQTGFPAQNFAYKIGKLLPVGTKKQKAEPKATVGKAPIKEQIIHFINRPLPKNVPAKTPRSLLGIEDDKSIPIIRNPASPEDAEAVFYFPGCGSERLFSQIGLAVQAMLWHVGVQTVLPPGYMCCGYPQDAGGNKAKAEEMSTNNRVAFHRMANTLNYLDIKTVVVSCGTCYDQLEKYRFEEIFPGCRIIDIHEYLLEKGVKLNGVKGQQYLYHDPCHTPIKTMNATQMASSLMGQKVVLSDRCCGESGMFAVKRPDIATQVKFRKQEEIEKNLKELPQGEPVKMLTSCPACLQGLSRYADDNNMPADYIVIEMAKHILGENWLDEFVKKANNGGVEKVLL

SEQ ID NO: 440 - protein, 95 aa, Neisseria meningitidis
MNTIPLHTILKLMAHPERMAILIQLLDSERNIAELAKSLSLPATAVSGHLNRLRAGGLVDFTRYHRIIEYRLISEDAATILRTIRDLENKRAVWC

SEQ ID NO: 441 - protein, 237 aa, Neisseria meningitidis
LNLIHDTLPVNVLLLMCTRKQQGFTLTELLIVMVIAAIMAMIALPNMSQWIASRRIASHAERIANLLRFSRGEAVRLNLPVYICPVQVKKGGAPNNKCDSGKKGQGMLAFGDKNGNKTYDGDTVDVLLRSVVLNDDINDKRINYAFNHIAFGQTQPTADRVVWTFNQNGTFGYTNNQHLTKQSSFSYSDGYIQIVLTDARAVSDADKKFRSAVVLIDSSGRVEVCPRNDRRTVCQYK

SEQ ID NO: 442 - protein, 222 aa, Neisseria meningitidis
MKTFKNIFSAAILSAALPCAYAAGLPQSAVLHYSGSYGIPATMTFERSGNAYKIVSTIKVPLYNIRFESGGTVVGNTLHPTYYRDIRRGKLYAEAKFADGSVTYGKAGESKTEQSPKAMDLFTLAWQLAANDAKLPPGLKITNGKKLYSVGGLNKAGTGKYSIGGVETEVVKYRVRRGDDAVMYFFAPSLNNIPAQIGYTDDGKTYTLKLKSVQINGQSAKP

SEQ ID NO: 443 - protein, 776 aa, Neisseria meningitidis
LVAIAILVTYPKLPSLDSLQHYQPKMPLTIYSADGEVIGMYGEQRREFTKIGDFPEVLRNAVIAAEDKRFYRHWGVDVWGVARAAVGNVVSGSVQSGASTITQQVAKNFYLSSEKTFTRKFNEVLLAYKIEQSLSKDKILELYFNQIYLGQRAYGFASAAQIYFNKNVRDLTLAEAAMLAGLPKAPSAYNPIVNPERAKLRQKYILNNMLEEKMITVQQRDQALNEELHYERFVRKIDQSALYVAEMVRQELYEKYGEDAYTQGFKVYTTVRADHQKVATEALRKALRNFDRGSSYRGAENYIDLSKSEDVEETVSQYLSGLYTVDKMVPAVVLDVTKKKNVVIQLPGGRRVTLDRRALGFAARAVNNEKMGEDRIRRGAVIRVKNNGGRWAVVQEPLLQGALVSLDAKTGAVRALVGGYDFHSKTFNRAVQAMRQPGSTFKPFVYSAALSKGMTASTVVNDAPISLPGKGPNGSVWTPKNSDGRYSGYITLRQALTASKNMVSIRILMSIGVGYAQQYIRRFGFRSSELPASLSMALGTGETTPLKVAEAYSVFANGGYRVSSHVIDKIYDRDGRLRAQMQPLVAGQNAPQAIDPRNAYIMYKIMQDVVRVGTARGAAALGRTDIAGKTGTTNDNKDAWFVGFNPDVVTAVYIGFDKPKSMGRVGYGGTIAVPVWVDYMRFALKGKQGKGMKMPEGVVSSNGEYYMKERMVTDPGLTLDNSGIAPQPSRRAKEDDGGAAEGGRQAADDEVRQDMQETPVLPSNTGSKQQQLDSLF

SEQ ID NO: 444 - protein, 74 aa, Neisseria meningitidis
MRLATKDLAEAIKRGEVRSSAFTTKQLKAIEKGESKIPDYTWHHHQDTGRMQLINEDLHHDTGHIGWRAMSKGK

SEQ ID NO: 445 - protein, 228 aa, Neisseria meningitidis
METFKDRLVFLWKSEAKQAKIASDIEMTIAGFSRIWNEGGLPKSETLKKIKQLKGCSIDWLLTGEGNPFPDEAPKKSLAYDTLGNEVDTDEFVFVPRYDIRAAAGYGQFVDHEEPVFTMAFRRHWIENYVTRDTKNLSVISVKGDSMEGVLNDGDSILVNHGENTPRDGLYVLRINENLLVKRLQIVPGGIINVISANEAYPAFEINLNDLTDDVEIIGRVEWFGRTI

SEQ ID NO: 446 - protein, 410 aa, Neisseria meningitidis
MAKNGGFSLFAKKEKRFIFEGRHSASDKLVNGEVSAFTEEEARKKLAKRGIRPLQITRVKTSSKRKITQEDITVFTRQLSTMIKAGLPLMQAFEIVARGHGNPSMTEMLMEIRGEVEQGSSLSRAFSNHPKYFDRFYCNLVAAGETGGVLESLLDKLAIYKEKTQAIRKKVKTALTYPVSVIAVAIGLVFVMMIFVLPAFKEVYANMGAELPALTQTVMDMSDFFVSYGWMVLIALGFAIYGFLKLKARSIKIQRRMDAILLRMPIFGDIVRKGTIARWGRTTATLIAAGVPLVDVLDSTAGAAGNLIYEEATREIRTRVIQGLSMTSGMRATELFPNMMLQMSSIGEESGSLDDMLNKAAEFYEDEVDNAVGRLSAMMEPIIIVILGLVIGTLLVAMYLPLFNLGNVVA

SEQ ID NO: 447 - protein, 463 aa, Neisseria meningitidis
VSAARILTKVNMKPLDLNFICQALKLPMPSESKPVSRIVTDSRDIRVGDVFFALAGGRFDAHDFVEDVLAAGAAAVVVSREDCVAMDGALKVDDTLAALQTLAKAWRENVNPFVFGITGSGGKTTVKEMLAAVLRRRFGDNAVLATAGNFNNHIGLPLTLLKLNEKHRYAVIEMGMNHFGELAVLTQIAKPDAALVNNAMRAHVGCGFDGVGDIAKAKSEIYQGLCSDGMALIPQEDANMAVFKTATLNLNTRTFGIDSGDVHAENIVLKPLSCEFDLVCGDERAAVVLPVPGRHNVHNAAAAAALSLAAGLSLNDVAEGLQGFSNIKGRLNVKAGIKGATLIDDTYNANPDSMRAAIDVLARMPAPRIFVMGDMGELGEDEAAAMHAEVGAYARDQGIEAAYFVGDNSVEAAEKFGADGLWFAAKDPLIQVLRHDLPERATVLVKGSRFMQMEEVVEALEDK

SEQ ID NO: 448 - protein, 100 aa, Neisseria meningitidis
MGYRVGINCFDTRLQADDYLLSSLPPTVTQDGKIIRPERVGDKWILNGKPVTLSYPECSNFEQIKQGSYVGSTVLILFVVIYGFRLLINFLKDIGKVGTD

SEQ ID NO: 449 - protein, 441 aa, Neisseria meningitidis
VQTDWQVVFLKISEVLVKVGDGVHTLLLDRPIVRDGRKFDAPLLWMVVLMTAFSLLMIYSASVYLASKEGGDQFFYLTRQAGFVVAGLIASGFLWFLCRMRTWRRLVPWIFALSGLLLVVVLIAGREINGATRWIPLGPLNFQPTELFKLAVILYLASLFTRREEVLRSMESLGWQSIWRGTANLIMSATNPQARRETLEMYGRFRAIILPIMLVAFGLVLIMVQPDFGSFVVITVIAVGMLFLAGLPWKYFFVLVGSVLGGMVLMITAAPYRVQRVVAFLDPWKDPQGAGYQLTHSLMAIGRGEWFGMGLGASLSKRGFLPEAHTDFIFAIIAEEFGFFGMCVLIFCYGWLVVRAFSIGKQSRDLGLTFNAYIASGIGIWIGIQSFFNIGVNIGALPTKGLTLPLMSYGGSSVFFMLISMMLLLRIDYENRRKMRGYRVE

SEQ ID NO: 450 - protein, 274 aa, Neisseria meningitidis
MDGAQPKTNFFERLIARLAREPDSAEDVLNLLRQAHEQEVFDADTLLRLEKVLDFSDLEVRDAMITRSRMNVLKENDSIERITAYVIDTAHSRFPVIGEDKDEVLGILHAKDLLKYMFNPEQFHLKSILRPAVFVPEGKSLTALLKEFREQRNHMAIVIDEYGGTSGLVTFEDIIEQIVGEIEDEFDEDDSADNIHAVSSERWRIHAATEIEDINTFFGTEYSSEEADTIGGLVIQELGHLPVRGEKVLIGGLQFTVARADNRRLHTLMATRVK

SEQ ID NO: 451 - protein, 463 aa, Neisseria meningitidis
MQLFLDNLKAFFETISGWVWGPVMLVLLVGTGILLTVLLKGLQFTMLGYALKQAFVPSKKHEDGEDHEGDISHFAALMTALSATIGTGNIAGVATAVVTGGPGAVFWMWMTAIFGMATKYGEGVLAVKYRVTNSKGEMSGGPMYYIEKGLGKNWKWMAVAFALFGTFASFGIGSSVQSNSVAQAVQTSFGIEPAYTGITLTVLTAVVVLGGIKGIAKAASFIVPAMAVFYVLGGLSIIAINSDALMPAVKLIFSDAFSAQAVAGGAIGTVIRYGVARGVFSNEAGMGSAPIAAAAAKTDHPVRQALVSMTGTFLDTIVVCSITGIVLVMGLLGAGGEFVKPEVSGAALTTVTFQKMLPGIGGWIVTIGLIFFAYSTILGWCYYGEKCAVYVFGEKFAGLYRVGYVSSVMLGTVLSLDLVWLASDTFNGLMALPNLIALLLMAKVIVNETRDFKQKITNGELPH

SEQ ID NO: 452 - protein, 346 aa, Neisseria meningitidis
MKAMVYHGANDIRFEEKPRPQIIDPTDAVVKIVKTTICGTDLGIWKGKNPEVADGRILGHEGIGIVEEVGEAVKNIKVGDKVIISCVSKCCTCDNCKTQLYSHCRNGGWILGYMIDGTQAEYVRTPYADNSLVPLPDNVNEEIALLLSDALPTAHEIGVQYGDVKPGDTVFIAGAGPVGMSALLTAQLYSPAAIIVCDMDENRLKLAKELGATHTINPASGEVSKQVFAIVGEDGVDCAIEAVGIPATWNMCQDIVKPGGHIAVVGVHGQSVDFKLEKLWIKNLAITTGLVNANTTEMLMKAISSSSVDYTKMLTHHFKFSELEKAYDVFKHAAENQVMKVVLEAD

SEQ ID NO: 453 - protein, 283 aa, Neisseria meningitidis
MNTLKFTKMHGLGNDFMVIDAVSQDFTPEDAPIAAWADRFRGVGFDQLLVVGRSETEGVDFRYRIFNADGSEVGQCGNGARCFARFVADKGLTDKKEICVETANGVIFPKLSDNGMVTVNMGKPKFMPSEIPFVPESGEGDDACIYGVHLESGIQPVSCVNMGNPHAVIVVDDVECAPVRETGSLIEPHRQFPERVNVGFMQIVSRTAIRLRVFERGVGETQACGTGACAAVVAGIRLGLLDEGKTVEVILPGGTLYIEWACGGDVMMTGPAEAVFEGELAYS

SEQ ID NO: 454 - protein, 357 aa, Neisseria meningitidis
MSITIQNLNKHFGAFHALKNINLNVPTGKLVSLLGPSGCGKTTLLRIIAGLENADGGNILFDGQDVTAKHVRERKVGFVFQHYALFRHMNVFDNVAFGLTVLPKSERPSKGQIRAKVEELLKLVQLSHLAKSYPHQLSGGQRQRIALARALAVEPKLLLLDEPFGALDAKVRKELRTWLRDIHHNLGVTSILVTHDQEEALEVSDEIVVMNHGKIEQTGSAEAIYRKPENAFVTEFLGETDAFEGRIEKGFWHYNGFAWKLDAQYKWQEQTAIGYIRPHEWQIAAEHETPMICAEIEKIHAVGALTHILVKHDKQDVHITLAGSDAARYPIAEGKELKLIPKQVYVFSQNELIEYSI

SEQ ID NO: 455 - protein, 117 aa, Neisseria meningitidis
VNRQTAYLLTSFSLIALIILSLAWELWIAPLRPGGSWLALKALPLCLPLSGILKKKIYTYQYSSMLVLIYFAEAVMRLFDAYPAEQICAALSAVFSIIFFISCLSFVKQYKETNNAR

SEQ ID NO: 456 - protein, 384 aa, Neisseria meningitidis
MDTHTDETKLQNTQAKRKRCLTALTLLFALAAAAAGSAFFLWWQHEEETEDAYVAGRVVQVTPQKGGTVRKVLHDDTDAVKKGDVLAVLDDDNDVLAYERAKNELIQAVRQNRRQNAATSQAGAQVALRRADLARAQDDLRRRSALAESGAVSAEELAHARAAVSQAQAAVKAALAEESSARAALGGQVSLREQPAVQTAIGRLKDAWLNLQRTQIRAPADGQVAKRSVQVGQQVAAGAPLMAVVPLSDVWVDANFKETQLRHMKIGQPAELVSDLYGKQIVYRGRVAGFSAGTGSAFSLIPAQNATGNWIKVVQRVPVRIVLNREDVDRHPLRIGLSMTVKVDTSAAGAPVSKTPGAALPEMESTDWSEVDRTVDEILGQSAP

SEQ ID NO: 457 - protein, 509 aa, Neisseria meningitidis
VPDVSNIKNSYDDLMYESKAFSQTAINALEARARMMGLKPAAAAKAKVLELGCSMGGNIITQALYYPDAEFVGIDLSGRQVAQGNAIIEKMGLKNVRLEEKDILTIDESFGKFDYIIVHGIWSWVPDAVKDKIFSICRNNLTEHGIAYISYNVYPGWKRQEQLREIMYFAGRDVLEEPLEARTRKGLDALKALAEILENDKGLDGGGKLPAIQKILNHNFYYIAHEYMEAFNDPIYVNGFIEWANRHRLAYIGDTDLHASFVSWMAEHTRERILALAGGDYIAKEFYSDILSDRQFRRSLLCREEVGDNIRRDESVAVEVIESLNFRPARGETINFDENDTLLSGIRDVMKTGEAFKTEDVAENLARRFPGLEFDRMKINSQLLLQTILGRFSVSSDNAGKPFFEDHKTYVPARFTDYAAAFVEHGAEAFVRPANRYNESTPSFGYGHLYIMRQLSRPTSKQAVIDAVAENLNIVSTTPDGLTFHPPAEVYVEEILADLADRHFLVSAD

SEQ ID NO: 458 - protein, 149 aa, Neisseria meningitidis
MSIYAVAHIVHLYCAIAFVGGVFFEVLVLSVLHTGRVSREARCEVEKAMSYRAVRVMPFVVGLLFASGIVMAANRYLSILGEPFATSFGTMLTLKILLAFSVLAHFAIAVVKMAHSTLTVGWSKYIHAVVFTHMLLIVFLAKAMFYISW

SEQ ID NO: 459 - protein, 180 aa, Neisseria meningitidis
VPKKVWKSPAPPAYRFDVQTASGRNAMKCPFCAHPDTRVADSRLMEERNAVRRRRHCPNCGKRFGTLETAELKMPAVIGPDKKRSPFNAQRLRNDLTAAARKSALTPEQIDETVRLTEHRLYTSGQRDIPSAALADMVLKELLRQDTEAAVRFAALHKRFDNPADFASWLAQAVKTGGKA

SEQ ID NO: 460 - protein, 235 aa, Neisseria meningitidis
LVKTADGYKAIAHIRAGDRVLSKDEASGETGYKPVTARYGNPYRETVYIKVSDGIGKIQTLVSNKIHPFYSQGKWIQAGRLKKGDTLLSESGAKQTVQNITFKQQPLKAYNLTVADWHTYFVKGDRAETEGVWVHNDCPYGEKYRTEVGSYTNTHESGRTYSGKGTRQRSQISGAREARVNNDPHIATDFTPAKNNREAFKDESRRIDAHGGSKSTNNYNRIESPGKKYRKQDGD

SEQ ID NO: 461 - protein, 414 aa, Neisseria meningitidis
MTLFCEQVPYPRLAEAFGTPLYVYSQSALTEAFEHYQTAFAELSPLVCYAVKANGNLSIIKHFASLGSGFDIVSGGELARVLAAGGDAAKTIFSGVGKSEAEIEFALNAGVKCFNMESIPEIDRIQKVAARLGKTAPVSLRVNPDVDAKTHPYISTGLKANKFGIAYADALEAYRHAAQQPNLKIIGIDCHIGSQLTDLSPLVEACERILILVDALAAEGIVLEHLDLGGGVGIVYQNEKVPDLGAYAQAVQKLIGTRRLKLILEPGRSLVGNAGALLTRVEFVKYGEEKNFVMVDAAMNDLMRPALYDAYHHIEAVEPKNIAPLTANIVGPICETGDFLGKDRTIACEEGDLLLIRSAGAYGASMASNYNARNRAAEVLVNGGGYKLIRRRETLEQQMANELACLQAEHQNAV

SEQ ID NO: 462 - protein, 491 aa, Neisseria meningitidis
LDENQIIALRREKLHNIRQQRNAYPNDFKRDSFAADLHAQYGEIGKEELDPQGIPVKVAGRMMLKRQMGKASFATIQDVSGQIQLYLNNKGVSQEVLDDFNHWDLGDIVGAEGTLFKTNHGELTVRVSGIRLLSKSLRPLPDKHKGLSDQETKYRQRYVDLIANEESRNTFIKRSQIIQSVRNFMVGEHYLEVETPMMHPIPGGATAKPFVTHHNALDIPLYLRIAPELYLKRLVVGGLERVFEINRSFRNEGMSVRHNPEFTMIEFYEAFSDYERMMQMAEDIIRNASHTVNGTANITYNGKEVDLESPFERLTILEAIKKYNPHYTDEQLNDAEWLKKEIVKHGESLPPSPGIGSLQLALFEGCAEGKLWNPTFIVDYPVEVSPLARASDTKQGLTERFELFVVGRELANGYSELNDPEDQAERFKAQVAQKDAGDDEAMHYDADYIRAMEFGLPPTGGCGIGIDRLVMLLTDSQTIRDVILFPQMRPE

SEQ ID NO: 463 - protein, 173 aa, Neisseria meningitidis
LLPQTGVPEYGEKRPMQKIPLTVRGAELLKQELQQLKSVARPEVIEAIAEARSHGDLSENAEYEAAKERQGFIEGRISELEHKLSVAHIINPTEIHAEGKIVFGTTVTLEDLETEEHVTYQIVGEDEADIKQGKIYVGSPIARALIGKEEGDTAEVQAPGGVREYDIIEVRYI

SEQ ID NO: 464 - protein, 288 aa, Neisseria meningitidis
MKAKILTSVALLACSGSLFAQTLATVNGQKIDSSVIDAQVAAFRAENSRAEDTPQLRQSLLENEVVNTVVAQEVKRLKLDRSAEFKNALAKLRAEAKKSGDDKKPSFKTVWQAVKYGLNGEAYALHIAKTQPVSEQEVKAAYDNISGFYKGTQEVQLGEILTDKEENAKKAVADLKAKKGFDAVLKQYSLNDRTKQTGAPVGYVPLKDLEQGVPPLYQAIKDLKKGEFTATPLKNGDFYGVYYVNDSREVKVPSFDEMKGQIAGNLQAERIDRAVGALLGKANIKPAK

SEQ ID NO: 465 - protein, 333 aa, Neisseria meningitidis
MIDGQTTEPKQKTRIILAPMQGLVDDVMRDLLTRIGGYDECVSEFVRITHTVHSRSIWLKYVPEIANGNKTFSGTPCTVQLLGSDADNMAANALEAVRFGANKIDLNFGCPAPTVNKHKGGAILLKEPELIFHIVKTLRGRLPAHIPLTAKMRLGYEDKSRALECACAIAEGGACGLTVHARTKAEGYEPPAHWEWIRKIRDSVNIPVTANGDVFSLQDYIGIKTISGCNSVMLGRGAVIRPDLARQIKQYENGGPVKDTDFAEVSKWIRQFFELCLTKEANNKYPIARLKQWLGMMKKTFDPAQTLFDRVRTVKDADEVRRILNAFEHEINV

SEQ ID NO: 466 - protein, 74 aa, Neisseria meningitidis
MNSETLDVTRLKCPLPILRAKKALAQMQQGDVLTVLATDGGAPGDFEAFCRQTGHVLLDSSEQDGVFTLVVKHK

SEQ ID NO: 467 - protein, 249 aa, Neisseria meningitidis
MPSVELLLEIVGLPRGTFYYQLAVQSAEDKYADLKQHIHDIYRRHKGRYGYRRIAAAILHAGTPVNHKKVSRLMAKTGLKAVIRRRKYRSFKGEVGKIAPNILRRCFHAEKPNEKWVTDVTEFNVGGEKIYLSPIMDLFNGEIVSYRIQIRPTFDLAGEILKGAPEKPGSSEKPILHSDQGWQYQMFFYSGLNLNQDKAMKPQTVQIVRQGEATPYWFKFNPLYNNDRIKLKLKGLSLVQYRIQSLKAA

SEQ ID NO: 468 - protein, 685 aa, Neisseria meningitidis
VQRADRCRTDCRLYRSALTSFCKKQPTLFRLLFTSERRQPRIYAIIHPDQTTDSGCRCSSRPTDMIEKLTFGLFKKEDARSFMRLMAYVRPYKIRIVAALIAIFGVAATESYLAAFIAPLINHGFSAPAAPPELSAAAGIISTLQNWREQFTYMVWGTENKIWTVPLFLIILVVIRGICRFTSTYLMTWVSVMTISKIRKDMFAKMLTLSSRYHQETPSGTVLMNMLNLTEQSVSNASDIFTVLTRDTMIVTGLTIVLLYLNWQLSLIVVLMFPLLSLLSRYYRDRLKHVISDSQKSIGTMNNVIAETHQGHRVVKLFNGQAQAANRFDAINRTIVRLSKKITQATAAHSPFSELIASIALAVVIFIALWQSQNGYTTIGEFMAFIVAMLQMYAPIKSLANISIPMQTMFLAADGVCAFLDTPPEQDKGTLAPQRVEGRISFRNVDVEYRSDGIKALDGFNLDIRQGERVALVGRSGSGKSTVVNLLPRFVEPSAGNICIDGIDIADIKLDCLRAQFALVSQDVFLFDDTLFENVRYSRPDAGEAEVLSALQAANLQSLIDASPLGLHQPIGSNGSNLSGGQRQRVAIARAILKDAPILLLDEATSALDNESERLVQQALERLMENRTGIIVAHRLTTIEGADRIIVMDDGKIIEQGTHEQLMSQNGYYTMLRNISNKDAAVRTA

SEQ ID NO: 469 - protein, 338 aa, Neisseria meningitidis
MNTRPFYFGLIFIAIIAIFANYLGNTDFSHHYHISALIIAILLGMAIGNTIYPQFSTQVEKGVLFAKGTLLRTGIVLYGFRLTFGDIADVGLNAVVTDAIMLISTFFFTVLLGIRYLKMDKQLVYLTGAGCSICGAAAVMAAESVTKAESHKASVAIAIVVIFGTLAIFTYPLFYTWSQDLINAHQFGIYVGSSVHEVAQVYAIGENINPIVANTAVISKMIRVMMLAPFLLMLSWLLTRSDGVSENTSHKITIPWFAVLFIGVAIFNSFDLLPKELVKLFVEIDSFLLISSMAALGLTTQASAIKKAGLKPFVLGILTYLWLVVGGFLVNYGISKLI

SEQ ID NO: 470 - protein, 164 aa, Neisseria meningitidis
MSSSVSSKTRYWVLALAAIVLDQWSKWAVLSSFQYRERVNVIPSFFDLTLVYNPGAAFSFLADQGGWQKYFFLVLAVAVSAYLVRAILRDEFATLGKTGAAMIIGGALGNVIDRLIHGHVVDFLLFYWQNWFYPAFNIADSFICVGAVLAVLDNIVHRKDGKKT

SEQ ID NO: 471 - protein, 172 aa, Neisseria meningitidis
MRLFPIAAALSLAACGTVQSTQYFVLPDSRYIRPATQGGETAVEVRLAEPLKRGGLVYQTDPYRLNTAQNHVWADTLDDMLEAALSNAFNRLDSTRIFVPASRSGSTEKWTVYIDAFQGSYTGKTLISGYAVLPDGTNRPFHIETEQQGDGYAAMTAALEQGLKQAAQQMVE

SEQ ID NO: 472 - protein, 602 aa, Neisseria meningitidis
MRTNYCGLISEQYLDQTVTVKGWVHRRRDHGGVIFIDLRDREGIVQVVIDPDTPEAFAAADSARNEYVLSITGRVRNRPEGTTNDKMISGKIEILAKEIEVLNAAATPPFQIDDENISENVRLTNRVIDLRRPAMQRNLRLRYQVAMGVRRYLDAQGFIDIETPMLTRSTPEGARDYLVPSRVHPGEFFALPQSPQLFKQLLMVAGFDRYYQITKCFRDEDLRADRQPEFTQIDLETSFLNEDEIMDITEGMAKQVFKDALNVDLGDFPRMPYAEAMFYYGSDKPDMRINLKFTELTDLMKTEEFKVFRGAADMKGGRVVALRVPNGAKFSRKEIDEYTKFVGIYGAKGLAYIKVNDVGNLSNGEDSGLQSPIVKFLSENALKEIIERTGAQNGDIIFFGADKTKVVNEAIGALRIKVGLEHGKDNGYFTDEWKPLWVVDFPMFEYDEEADRYVAVHHPFTAPKEGHEDLMVSDPANCLARAYDMVLNGWEIGGGSIRIHRADVQEKVFAALKISPEEQQEKFGFLLDNLKFGAPPHGGLAFGLDRLVTLMTGAESIRDVIAFPKTQRAQCLLTNAPNSVDDKQLRELSLRLRQKAAETKEA

SEQ ID NO: 473 - protein, 508 aa, Neisseria meningitidis
MNTPLPYSDYLIRILTASVYDVAVETPLEPARSLSVRLKNNILLKREDLQPVFSFKIRGAYNKMSKLPKDALACGVIAASAGNHAQGVALSAQRLGCRAVIVMPETTPKIKVDAVKSRGGEVVLRGVSYNDAYDYAMELAEQEGLTYIAPFDDPDVIAGQGTVGMEIVSQHPDPIRAVFVPIGGGGLAAGVAAFIKQVRPEIKVIGVQTNDSCCMKQSVEAGEIVHLKDVGLFSDGTAVKVVGDETFRLCKELLDEIITVDTDAVCGAVKDIFDDTRSITEPAGALALAGLKAYIAREGAENQTLIAVTSGANMNFHRLRHVSERSELGEGNEGIFAVTIPEERGSFLKFVNILGNRNITEFNYRYGDDEKAHIFVGLQAAGPQDLAVIGSRLDEAGLPNVDLTDDEIAKIHIRYMVGGRTDKVENERLVSFEFPERPGALARFLNHMQGGWNITLFHYRNHGADYGRILVGIDVPPHDAAAFDGFLESLGYSYHEETQNAAYKLFLA

SEQ ID NO: 474 - protein, 219 aa, Neisseria meningitidis
LCASCLNVNKIVIIATFYRNPERPSEMRNEEKRALRRELRGRRSQMGRDVRAAATVKINRLLKRYIKHGRKIGVYWPMGKELRLDGFVRAAQKRGAKLYLPYIEPRSRRMWFTPYPESGMERERIRGRARLNVPQFAGRKIRVHGLSVLLVPLVGIDREGYRLGQAGGYYDATLAAMKYRLQAKTVGVGFACQLVDRLSVEAHDLPLDGFVSEAGILCF

SEQ ID NO: 475 - protein, 431 aa, Neisseria meningitidis
MAQKIQSVKGMNDLLPVEQKDFKLTAAFWQAFEDTVGRWTRTYGYQQIRTPIVEQTGLFVRSIGEETDVVGKEMYTFSDSNDSLSLSLRPEGTASCLRAVVEHNLLYNSPQKLWYMGPMFRRERPQKGRYRQFHQVGIEALGFEGPDIDAEIIAMSADLWEKLGIREYLTLEINSLGNREERAAHRAALVEYLTRYEDKLDEDSKRRLKTNPLRVLDTKNPDLQEICNAAPRLVDYLGEASQNHYARFKAMLDGLGIQYIENPRLVRGLDYYNQTVFEWTTDKLGAQATVCGGGRYDGLIEELGGKPAPSIGFAMGIERLLFLVSEYGSLEVNAAPDVYAMHQGERADLQVMKYAQALRTQGFNVMQHSGYQSLKAQMKKADNSGARFALIVAQDELANGTVTLKDMNGAHGQQTVAAADLTNTLQQWKNA

SEQ ID NO: 476 - protein, 1012 aa, Neisseria meningitidis
MNSQKLPEVKWGNSYKKGELRPEDRDRKFTFTSTYGIKRDTNITFNNTDYLVSEKNGTAVFGAATYLPPYGKVSGFDTDRLTKRGNAVDWINTTHPGLIGYSYQGITCSSSSSCPEFGYKTQFTFGNQGLKRKTNGRLDIDEDKSRDGSPIYKLQNYPGLGVSFNLSSDSLVKQKRHNSLVSSFSEDVTQSNGTQSPYKDRNLVYRTDDYHNQGNYSHQDAHHAIAFYLNAKLHLLDKKQIKDIAQGSELNLGMLKTHIELPKNFNQRSLVGLAVSWTVKDEGKVSVKLKLPEVKADRCINKPNPNPNKKDLSPALTAPALWFGAGQDGKAEMYSASVSTYPDSSSSQIFLQNLSRKDDTSKPGRYSLKPLSTSEIKSKEPTFTGRQTIIRLDGGVQQIKLQGNEVTSFNVNNGNNTFGIVKDLGVDPDASEWKKVLLPWTVRGFADDSKFKEFNKEEKNNDNKPKYSQKYRSRDNNNGNRNLGDIVNSPIVAVGEYLATSANDGMVHIFKQSGGDKRSYNLKLSYIPGTMPRKDIENKDSTLAKELRAFAEKGYVGDRYGVDGGFVLRRITDDQDKQKHFFMFGAMGLGGRGAYALDLTKAENGDPTAVSLFDVKHDNNGKNSNNSVQLGYTVGTPQIGKTHDGKYAAFLASGYATKQIDSGENTTALYVYDLENNNGTLIRKIEVTSGKGGLSSPTLVDKDLDGIVDIAYAGDRGGNMYRFDLSGQDPNQWSVRTIFSGNKPITSAPAISQLKDKRVVIFGTGSDLSEEDVDSKEIQHVYGIFDNDTDTGTAQDGQGKGLLEQKLEKDKDGKTLFLSDYKRSDGSGDKGWVVKLEAGQRVTVKPTVVLRTAFVTIHKYTGNDKCGAETAILGINTADGGKLTKKSARPIVPADNTAVAQYSGHKKTSSGKSIPIGCMEKDNGIVCPNGYVYDKPVNVRYLDEKKTDGFSTTADGDAGGSGTFKEGKKPARNNRCFSRKGVRTLLMNDLDSLDITGPMCGMKRISWREVFY

SEQ ID NO: 477 - protein, 188 aa, Neisseria meningitidis
MAKKISILVGSLRRASFARKVALNAAEMFPEGWQAEIVEIGHLPLYNFDYDDPAVEDVPLPESYTVFRETIKASDGILFVTSENNRTIPACLKNAVDIGSKPNADVAWKNKPAGIISHSVGKMGGYSSQKNLRLALSYFDMPVTGQPEVFLGNSPTLFDENGKLIDSARDFVQSYINQFVGLIERNAK

SEQ ID NO: 478 - protein, 146 aa, Neisseria meningitidis
LLGVVPGIGESIQAYKVAKAAKNLQGMKKALDKAVTVATAQGYVSKTKIKVGQTELRVTAATDKQLLKAIGEGRDTTGKMTEQLFDSLAKQNGFRVLSGGKYGGNNGFDHVWQAADGSVVLIVESKQIRNGTAESEWCGWIYADES

SEQ ID NO: 479 - protein, 156 aa, Neisseria meningitidis
MYDVNTHDVRRFFARVWQQRLNPLQLSALEQKALRIVEAHPEYHCYLERIEDHLDTDWLPENGESNPFLHMSLHLSVQEQAGIDQPHGIRAIHDTLCAKHGWLEAEHEMMEALAETLWTAQRYGTGLDVNFYMTRLRKLIGLGAENQARLNPHEIA

SEQ ID NO: 480 - protein, 217 aa, Neisseria meningitidis
MKITHCKLKKKVQKELLRFFVLEVTARSAADILGIHPNSAVLFYRKIRTVINHHLALAADEVFEGPVEPDESDFGGRRKGRRGRGAAGKVVVFGILKRNGRVYTVVVDNAKSETLLPVIKKKIMPDSIVYTDSLSSCDKLDVSGFIHYRINHSKEFADRQNHINGIENFWNQAKRVLRKYNEIDRKSFPLFLKECKFRFNFGTPSRQLKILRDWCGI

SEQ ID NO: 481 - protein, 449 aa, Neisseria meningitidis
MANQTNSKAKALLGWMDARFPLSKMWNEHLAQYYAPKNFNFWYYFGSLALLVLVIQIVSGIFLTMNYKPDGNLNAYHLPAAFTAVEYIMRDVSGGWIIRYMHSTGASFFFIVVYLHMFRGLIYGSYKKPRELVWIFGSLIFLALMAEAFMGYLLPWGQMSFWGAQVIINLFSAIPVIGPDLSTWIRGDFNVSDVTLNRFFALHVIAVPLVLLGLVVAHIIALHEVGSNNPDGVEIKKNKDENGIPRDGIPFHPYYTVKDILGVVVFLIVFCAVLFFAPEGGGYFLEAPNFDAANALKTPPHIAPVWYFTPFYAILRAIPSFLGTQVWGVIGMGAAVVLIALLPWLDRGEVKSVRYRGPIFKTALVLFIISFIGLGILGAMVATDTRTLVARILSFVYFAFFLGMPFYTKLDKNKPVPERVTMSTAKQKIMFFVYVGITAVGAYLFATNI

SEQ ID NO: 482 - protein, 186 aa, Neisseria meningitidis
MSYQDILRGLLPPVSYARNAPRVRAQAEIDGAALDAVAESAQSVADAVDPRSAGQMLADWERVLGLDGTGKNRQHRVLAVMAKLNETGGLSIPYFVRLAEAAGYQIQIDEPQPFRAGVNRAGDRLAPQEIMWVWHVNVRGGNNRITRFRAGISAAGDRLTDYSDAVIESLFNRLKPAHTAIRFTYR

SEQ ID NO: 483 - protein, 145 aa, Neisseria meningitidis
LRLLLGILCDLSMVAPVYAQGQPDAVNAYIQKKKVIVDTSKAELCFADDRQCHPVLIGTATPKGTFGLTLNSTDKPGYGGEVIGFKQEGDFLFALHRVWNQIPSERRNERIASPSVSDRIMTNGCINVSDAVYEKLRHYFVLEVI

SEQ ID NO: 484 - protein, 792 aa, Neisseria meningitidis
VLALGLCFGTHCAAADAVAAEETDNPTAGGSVRSVSEPIQPTSLSLGSTCLFCSNESGSPERTEAAVQGSGEASIPEDYTRIVADRMEGQSQVQVRAEGNVVVERNRTTLNADWADYDQSGDTVTAGDRFALQQDGTLIRGETLTYNLEQQTGEAHNVRMETEHGGRRLQSVSRTAEMLGEGHYKLTETQFNTCSAGDAGWYVKAASVEADREKGIGVAKHAAFVFGGVPIFYTPWADFPLDGNRKSGLLVPSLSAGSDGVSLSVPYYFNLAPNLDATFAPGVIGERGAVFDGQVRYLRPDYAGQSDLTWLPHDKKSGRNNRYQAKWQHRHDISDTLQAGVDFNQVSDSGYYRDFYGNKEIAGNVNLNRRVWLDYGGRAAGGSLNAGLSVLKYQTLANQSGYKDKPYALMPRLSADWRKNTGRAQIGVSAQFTRFSHDSRQDGSRLVVYPDIKWDFSNSWGYVRPKLGLHATYYSLNRFGSQEARRVSRTLPIVNIDSGMTFERNTRMFGGGVLQTLEPRLFYNYIPAKSQNDLPNFDSSESSFGYGQLFRENLYYGNDRINTANSLSAAVQSRILDGATGEERFRAGIGQKFYFKNDAVMLDGSVGKKPRSRSDWVAFASSGIGSRFILDSSIHYNQNDKRAENYAVGASYRPAQGKVLNARYKYGRNEKIYLKSDGSYFYDKLSQLDLSAQWPLTRNLSAVVRYNYGFEAKKPIEVLAGAEYKSSCGCWGAGVYAQRYVTGENTYKNAVFFSLQLKDLSSVGRNPADRMDVAVPGYIPAHSLSAGRNKRP

SEQ ID NO: 485 - protein, 260 aa, Neisseria meningitidis
MQETRFSILLDELAAKQEAAIAPHLLADGSKVWIRKAGRHNARWRYALLGMVARYLKLGVLKPVPSLGGEPAIATESKRLYELRAAGIAVPELLAVRKNALMFGNLEGIPLDTQIRQEAEAGKSDAWLAGLEAIARVHKKRQFLSQAFARNMMSDGKNISFLDFEDDPSEVLTIAQCQARDWLCYIHSTALILKNGGLLEAAAEKWGGVLSDQPAEIQKLIAATVKPILPIRRLEHPRWGRDALRLAASISLISLADMPP

SEQ ID NO: 486 - protein, 492 aa, Neisseria meningitidis
MFSKLTPLAETGIPTLSCANAAGRLLHSDSRQIKQGDIFVACPGEYADGRSYIPAAVANGAAFVFWDDDGKFAWNPEWKVPNQGIKDLKHRAGILAAQVYGNVSDGLKVWGVTGTNGKTSITQWLAQAADLLGEKTAIVGTVGNGFWGALEETTHTTPAPVDVQTLLYRFRQQGATVAAMEVSSHGLDQSRVNGVSFRSAIFTNLTRDHLDYHGTMEAYGAIKSRLFYWHGLKHAVINVDDEYGAELVGRLKKDCPDLAVYSYGFSEHADIRIIDFTASSDGIAAVFQTPWGEGKCRTRLLGRFNAQNLAACIALLCANGYPLDNVLDVLAKIRPASGRMDCIMNSGKPLVVVDYAHTPDALEKALATLQEIKPQGAALWCVFGCGGNRDRGKRLLMGAAAVQGADKVVVTSDNPRLENPHDIINDILPAVPAPERVEADRAAAIRYAVERAAANDIILIAGKGHENYQDVQGVKHRFSDLEIVGQALLTRK

SEQ ID NO: 487 - protein, 187 aa, Neisseria meningitidis
VHGLTIEVLEGKNAPPFAEVGRQIADFLRGAELIIHNAKFDVGFLNMEFRRMGLPTVEELGCTVTDTLAMAREMFPGQKASLDALCNRFSVDRSKRVLHGALIDCELLGEVYLAMTRRQFDLMGEAAEEKMETKPVVHTETKRSGKLKVIRADENELAAHGQYLDGLGEACIWRKEAVPSENGGTDA

SEQ ID NO: 488 - protein, 74 aa, Neisseria meningitidis
MSWWEFRGFWGILQRSHFVISNVPSTPNLLRGRQLEGKLILEVPAQVNPIPQSVLRAAQEENVIIRDTTGRIYK

SEQ ID NO: 489 - protein, 138 aa, Neisseria meningitidis
MLQPTRLKYRKQQKGRNTGIATRGNKVSFGEFGLKAVGRGRLTARQIEAARRAMTRHIKRGGRIWIRVFPDKPITEKPIQVRMGGGKGNVEYYIAEIKPGKVLYEMDGVPEELAREAFELAAAKLPIPTTFVVRQVGQ

SEQ ID NO: 490 - protein, 121 aa, Neisseria meningitidis
MNLIQQLEQEEIARLNKDIPEFAPGDTVVVSVRVVEGTRSRLQAYEGVVIARRNRGLNSNFIVRKISSGEGVERTFQLYSPTVEKIEVKRRGDVRRAKLYYLRGLTGKAARIKEKLPARKG

SEQ ID NO: 491 - protein, 150 aa, Neisseria meningitidis
MNIEVEMKVLDERMADFIPAYATEGSAGLDLRACLDEEVVLQPGETFLVPTGLAIYLANPAYAAVLLPRSGLGHKHGIVLGNLVGLIDSDYQGELKVSLWNRGSEPFAVKPFERIAQMVIVPVVQAGFKRVEEFVGSSRGEGGFGSTGSH

SEQ ID NO: 492 - protein, 864 aa, Neisseria meningitidis
MSKSAVSPMMQQYLGIKAQHTDKLVFYRMGDFYEMFFDDAVEAAKLLDITLTTRGQMDGVPIKMAGVPFHAAEQYLARLVKLGKSVAICEQVGEVGAGKGPVERKVVRIVTPGTLTDSALLEDKETNRIVAVSPDKKYIGLAWASLQSGEFKTKLTTVDKLDDELARLQAAEILLPDSKNTPQLQTASGVTRLNAWQFAADAGEKLLTEYFGCQDLRGFGLDGKEHAVAIGAAGALLNYIRLTQNLMPQHLDGLSLETDSQYIGMDAATRRNLEITQTLSGKKSPTLMSTLDLCATHMGSRLLALWLHHPLRNRAHIRARQEAVAALESQYKPLQCRLKNIADIERIAARIAVGNARPRDLAALRDSLFALSEIDLSANGSSLLETLKAVFPETLPVAETLKAAVMPEPAVWLKDGNVINHGFHPELDELRRIQNHGDEFLLDLEAKERERTGLSTLKVEFNRVHGFYIELSKTQAEQAPADYQRRQTLKNAERFITPELKAFEDKVMTAQEQALALEKQLFDGVLKNLQTALPQLQKAAKAAAALDVLSTFSALAKERNFVRPEFADYPVIHIENGRHPVVEQQVRHFTANHTNLDHKHRLMLLTGPNMGGKSTYMRQVALIVLLAHTGCFVPADAATIGPIDQIFTRIGASDDLASNRSTFMVEMSETAYILHHATEQSLVLMDEVGRGTSTFDGLALAHAVAEHLLQKNKSFSLFATHYFELTKLPEAHATAVNMHLSALEQGQDIVFLHHIEPGPASKSYGIAVAKLAGLPVRALKSAQKHLNELEDQAAANRPQLDIFSTMPSEKGDEPNVDSFVDKAEEKHFEGILAAALEKLDPDSLTPREALSELYRLKDLCKSVS

SEQ ID NO: 493 - protein, 352 aa, Neisseria meningitidis
MSGYTGGLVVSGGISLIDRLDIMENVNRIVAEGIAAVEAAQDFNALEQIKARYLGKTGELTGLLKTLGQMSPEERKTIGAHINECKNRFQTAFNAKRDALNEVKLQARLAAEALDITLPGRAQEGGSLHPVTLTLQRVVELFHGMGFEVADGPEIEDDFHNFQALNIPANHPARAMQDTFYVENGDVLRTHTSPIQIRYMLDKKEPPIRIIAPGRVYRVDSDATHSPMFHQAEGLWVEEGVTFADLKAVFTDFIRRFFERDDLQVRFRPSFFPFTEPSAEIDIMGENGKWLEVGGCGMVHPNVLKNVNIDSEKYTGFAFGIGLDRFAMLRYNVNDLRLFFDNDLNFLKQFVK

SEQ ID NO: 494 - protein, 89 aa, Neisseria meningitidis
MALTVEQKAQIVKDFQRKEGDTGSSEVQVALLTFRINDLTPHFKANPKDHHSRRGLLKMVSQRRRLLAYLRRTQPDTYRALITRLGLRK

SEQ ID NO: 495 - protein, 1067 aa, Neisseria meningitidis
MAKFFIDRPIFAWVISIFIIAAGIFGIKSLPVSQYPSVAAPTITLRATYPGASAQVMEDSVLSVIERNMNGVEGLDYLSTSADSSGSGSVSLTFTPDTDENLAQVEVQNKLSEVLSTLPATVQQYGVTVSKARSNFLMIVMLSSDVQSTEEMNDYAQRNIVPELQRIEGVGQVRLFGAQRAMRIWVDPKKLQNYNLSFADIGSALSAQNVQISAGSIGSLPAVRGQTVTATVTAQGQLGTAEEFGNVILRANTDGSNVYLKDVARVGLGMEDYSSSTRLNGVNTTGMAVMLSNSGNAMATAKAVKERMATLEKYFPQGMSWKTPYDTSKFVEISIEKVIHTLIEAMVLVFVVMYLFLQNIRYTLIPTIVVPISLLGGFAFISYMGMSINVLTMFAMVLVIGIVVDDAIVVVENVERIMAGEGLPPKEATKKAMGQISGAVIGITAVLISVFVPLAMFSGATGNIYKQFALTMASSIAFSAFLALTLTPALCATMLKTIPKGHHEEKKGFFGWFNKKFNSWTHGYEGRVAKVLRKTFRMMVVYIGLAVVGVFLFMRLPTSFLPTEDQGFVMVSVQLPAGATQERTNATLAQVTQLAKSIPEIENIITVSGFSFSGSGQNMAMGFAILKDWNERTAPGSDAVAIAGKLTGMMMGTLKDGFGIAVVPPPILELGNGSGLSINLQDRNNTGHTALLAKRNELIQKMRASGLFDPSTVRAGGLEDSPQLKIDINRAAAAAQGISFADIRTALASALSSSYVSDFPNQGRLQRVMVQADEDARMQPADILNLTVPNKSGVAVPLSTIATVSWENGTEQSVRFNGYPSMKLSASPATGVSTGQAMAAVQKMVDELGGGYSFEWGGQSREEAKGGSQTLILYGLAVAAVFLVLAALYESWSIPLAVILVIPLGLIGAAAGVTGRNLFEGLLGSVPSFANDIYFQVGFVTVMGLSAKNAILIIEFAKDLQAQGKSAVEAALEAARLRFRPIIMTSFAFILGVVPLYIAGGASSASQRAIGTTVFWGMLIGTLLSVFLVPLFYVVVRKFFKETAHEHEMAVKHAAEAGITGSDDSQH

SEQ ID NO: 496 - protein, 444 aa, Neisseria meningitidis
MAKKYFGTDGVRGEVGQFPITPDFVLKLGYAAGQVLVQHDTDQKPTVLIGKDTRISGYMLEAALVAGFTAAGVNVIQTGPLPTPGVAYLTRALRLSAGVMISASHNAYSDNGIKFFAEGGVKLSDEIELEIEAKIDEEMKTQPSARLGRARRISGADDRYIEFCKSTFPTHSDLRGLKLVVDAANGAAYSVAPKVFHELGAQVVSIGDEPDGYNINEKCGATHTKTLQAAVLQNEADYGIALDGDGDRLMMVDKNGKVYDGDSLIYVIAKARAREGINIGGVVGTVMTNMAMEIALKEQGVDFCRAKVGDRYVLEQLNQRSWLIGGEASGHILCMDKHNTGDGIISALQVLAALQTLNQDLATVCADWQPYPQTMINVRIQKGQKWQEASKDVLAEVEKELEGKGRVVLRASGTEPVVRVMVEARQADWARDGAERIASAIGSL

SEQ ID NO: 497 - protein, 62 aa, Neisseria meningitidis
LFRVTAYQNRKKNALTGIAFLRGIDVYDPPISKEKALKALEKHPEIYQKFRHFFPFVELPPL

SEQ ID NO: 498 - protein, 205 aa, Neisseria meningitidis
MSAYRKGNIFIISAASGTGKTTLVSRLLANHNGLRVSVSHTTRPPREGEVNGVHYHFVSKEEFESLIAQEAFLEYADVFGNYYGTSAEGVNALAAAGYDVILEIDVQGAAQVRDALPEAVGIFILPPSFDVLAARLNGRGTDSREVIQRRLSKARHEIEQSVLFDFVVVNDDLARAEEDLRHIVNACRLKRSRQLGFIADLLENS

SEQ ID NO: 499 - protein, 188 aa, Neisseria meningitidis
LLLPFATLALCTNAFAAPPSDASLARWLDTQNFDRDIEKNMIEGFNAGFKPYADKALAEMPEAKKDQAAKAFNRYRENVLKDLITPEVKQAVRNTLLKNAREIYTQEEIDGMIAFYGSPAGQSVVAKNPRLIKKSMSEIAVSWTALSGKIARHHLPEFTEELRRIICGGKNPDAGCKQAGQLGKRHQK

SEQ ID NO: 500 - protein, 427 aa, Neisseria meningitidis
MNRNEILFDRAKAIIPGGVNSPVRAFGSVGGVPRFIKKAEGAYVWDENGTRYTDYVGSWGPAIVGHAHPEVVEAVREAALGGLSFGAPTEGEIAIAEQIAKIMPSVERLRLVSSGTEATMTAIRLARGFTGRDKIIKFEGCYHGHSDSLLVKAGSGLLTFGNPSSAGVPADFTKHTLVLEYNNIAQLEEAFAQSGNDIACVILEPFVGNMNLVRPTEAFVKALRELTEKHGAVLIYDEVMTGFRVALGGAQSLHGIMPDLTTMGKVIGGGMPLAAFGGRKDIMECISPLGGVYQAGTLSGNPIAVAAGLKTLEIIRREGFYENLTARTEQLVQGFRTAADAAGIEFTADSVGGMFGLYFAAHAPRNYADMARSNIDAFKRFFHGMLDRGIAFGPSAYEAGFVSAAHTPELIDETVAVAVEVFKAMAA

SEQ ID NO: 501 - protein, 261 aa, Neisseria meningitidis
VKHISSANNEHIRHLHRLLSQGKFRRQYAQTVLEGVHLLQVFLQSGGRPVGVYIPEAKMPSEEVRKLTAVLPEDGVFSVSDGILKKISSLTCADDVLALIDIPDAGALPAGGDCVVLDGVQDPGNVGTVLRSAAAAGIGAVVLGKGCADAWSPKVLRAGMGAHFLSEIYPQADLEIWLASYKGRVFATALREEKQAVLYNEDLREPTAWVFGNEGAGVGKAVLDRADKCVRIPMHDATESLNVAMAATICLFEQMRQRSAY

SEQ ID NO: 502 - protein, 456 aa, Neisseria meningitidis
MINPIASLSPLDGRYAQSVEALRPIFSEYGLMKARVKVELNWLKALAAEPKIAEVPPFSAETLAEIDTVIENFSLEDAAAVKAIEATTNHDVKAIEYWLKKRFAEVPEVAAVSEFIHFACTSEDINNLSHALMLQEAREAVLLPKLAEIIEKLTAMAHDLAAVPMMSRTHGQPATPTTLGKETANVVYRLQRQFKNLQAQEFLGKINGAVGNYNAHMVVYPDVDWETHCRNFVEISLGLTFNPYTIQIEPHDYMAEFFQAISRVNTILIDFNRDVWGYISLGYFKQKVKAGEVGSSTMPHKVNPIDFENSEGNLGMANAVLGFLSEKLPISRWQRDLTDSTVLRNMGVGVGYAVLGFAAHLRGLNKLEPNPAALAADLDATWELLAEPIQTVMRRYGVANPYEKLKDLTRGKDGITPEVLKVFIESLEIPTEAKAKLLELTPALYVGKAEALAKRI

SEQ ID NO: 503 - protein, 106 aa, Neisseria meningitidis
VCGGLGSDGQKSLYYYGGYPDTVYEGLKNDDTSLGKQTEKMEKYFVEAGNKKMNAAPGAHAHLGLLLSRSGDKEGAFRQFEEEKRLFPESGVFMDFLMKTGKGGKR

SEQ ID NO: 504 - protein, 204 aa, Neisseria meningitidis
MSFDNYLVPTVIEQSGRGERAFDIYSRLLKERIVFLVGPVTDESANLVVAQLLFLESENPDKDIFFYINSPGGSVTAGMSIYDTMNFIKPDVSTLCLGQAASMGAFLLSAGEKGKRFALPNSRIMIHQPLISGGLGGQASDIEIHARELLKIKEKLNRLMAKHCGRDLADLERDTDRDNFMSAEEAKEYGLIDQILENRASLQF

SEQ ID NO: 505 - protein, 725 aa, Neisseria meningitidis
MTRFKYSLLFAALLPVYAQADVSVSDDPKPQESTELPTITVTADRTASSNDGYTVSGTHTPLGLPMTLREIPQSVSVITSQQMRDQNIKALDRALLQATGTSRQIYGSDRAGYNYLFARGSRIANYQINGIPVADALADTGNANTAAYERVEVVRGVAGLLDGTGEPSATVNLVRKRPTRKPLFEVRAEAGNRKHFGLGADVSGSLNTEGTLRGRLVSTFGRGDSWRQRERSRDAELYGILEYDIAPQTRVHAGMDYQQAKETADAPLSYAVYDSQGYATAFGPKDNPATNWANSRHRALNLFAGIEHRFNQDWKLKAEYDYTRSRFRQPYGVAGVLSIDHNTAATDLIPGYWHADPRTHSASVSLIGKYRLFGREHDLIAGINGYKYASNKYGERSIIPNAIPNAYEFSRTGAYPQPASFAQTIPQYGTRRQIGGYLATRFRAADNLSLILGGRYSRYRTGSYDSRTQGMTYVSANRFTPYTGIVFDLTGNLSLYGSYSSLFVPQSQKDEHGSYLKPVTGNNLEAGIKGEWLEGRLNASAAVYRARKNNLATAAGRDPSGNTYYRAANQAKTHGWEIEVGGRITPEWQIQAGYSQSKTRDQDGSRLNPDSVPERSFKLFTAYHFAPEAPSGWTIGAGVRWQGETHTDPATLRIPNPAAKARAAANSRQKAYAVADIMARYRFNPRAELSLNVDNLFNKHYRTQPDRHSYGALRTVNAAFTYRFK

SEQ ID NO: 506 - protein, 284 aa, Neisseria meningitidis
MAEITAKMVADLRAATGLGMMECKKALVEAEGNFDKAEEILRIKSGAKAGKLAGRTAAEGVLAYAINGNVGALVEVNCETDFVAKDAGFVEFANFVAKTAAEKKPASVEELSELVEAERKAIIAKLGENMSVRRFQVIDTANQLVAYIHGALATEGVLVEYKGSEDVARKIGMHIVAAKPQCVSEAEVDAETVEKERHIYTEQAIASGKPADIAAKMVEGRIRKFLAEITLNGQAFVMNPDQTVAQFAKENGTEVVSFVRYKVGDGIEKAVVDYAAEVAAAAKV

SEQ ID NO: 507 - protein, 231 aa, Neisseria meningitidis
VARGVKVAGTDRLTRNILMKLYIYDHCPFCVRARMAAGLFGADVEEAVLANDDEATPIGMIGAKQVPVLQKEDGSFMGESLDIVRHFDREDRLKDEVRPEIRAWLDKVGGYNDKLVQPRVIKIGLPEFATPEAVKYFTDKKEKSIGSFSANLNKTAQYLERINADLQELENLMDGASDGINGGIGMEDILVFPVLRNLTVVRGIEWPQKVMGYLMTMSEKSGVPLYFDRAL

SEQ ID NO: 508 - protein, 187 aa, Neisseria meningitidis
MRHLENNGYANVAGLERILAVKTDNYKEKENLLHEIFSKSRIGDTELFAVDENLVKRLFLSLRGEIVFPKNETAESEFEKSVHERRQEGNAGSGRKQLLDLVRRGHREYPYALPRLLAGAASYKPKKSKIRLFKEAYFGKSGTRLTDEIADGIHIYTCFSRADLEKAYSEYLELFKSESDAEGRKPQ

SEQ ID NO: 509 - protein, 406 aa, Neisseria meningitidis
LIDMGLERTSEVKKRMKLEPQCPVVVVAGTNGKGSVCAYLTQIYKQAGYKTGTLTSPHLLRYNERIAVNAEPVSDDTIIASFERIEAARGEISLTYFEFNALAAVDIFMREQVDVMILEVGLGGRLDAVNAFDGDCAVVTSVDLDHQAFLGDTVEQVGFEKAGVFRGGKPAICGQNPAPASLLSHAEAIGAKLLMVQRDFEFHAMENIQWNYRFRPQHSDGPARNRNALPFPALRGAYQLSNAACALTVLECLNDKLPVDIGAIKRGLLLVENPGRFQVLPGRPLTVLDVGHNPHAARALRRSLINLAFAQKRTAVFSMLSDKDIDGVLEIVKDQFDEWYIAPLDVPRGMTLESLQNKLHEHSIENIQTFAAVREAYRAAASKAGENDRIVVFGSFHTVADVMSVL

SEQ ID NO: 510 - protein, 92 aa, Neisseria meningitidis
MPAVDLIRERLQTLDPLVLEIGDESHLHKGHAGNTGGGHYAVLVVSGRFEGVSRLNRQKTVKSLLKDLFSGGMIHALGIRAATPDEYFHTAD

SEQ ID NO: 511 - protein, 436 aa, Neisseria meningitidis
MNTPHPRPKIAVIGAGWAGLSAAVTLTRHADVTLFEAGRQAGGRARTLAGNTDGFGFLDNGQHILLGAYRGVLRLMKTIGSDPRAAFLRVPLHWHMHGGLQFRALPLPAPLHILGGVLLARRVPSAFKAKLLADMSDLQKSARLGQPDTTVAQWLKQRNVPRAAVMQFWQPLVWGALNTPLETASLRVLCNVLSDGVLTKKSGSDYLLPKQDLGAIVAEPALAELQRLGADIRLETRVCRLNTIPDGKVLVNGEAFDAAVPATAPYHAAALLPEGTPEHVQTAYQNLRYHAITTVYLRYAEPVRLPAPLTGLADGTAQWLLCRGRLGLPENEVSAVISVSDRVGAFTNRAWADKAHADLKRILPHLGEPEAVRVITEKRATTAADAPPPDLSWLHRHRIFPAGDYLHPDYPATLEAAVQSGFAAAETCLQSLSDAV

SEQ ID NO: 512 - protein, 274 aa, Neisseria meningitidis
MIKKIIGGIIPIFTAVFIPASAGAADLMLAQEYKGQDIAGWAMSEKLDGVRAYWDGKHLISRQGYAFAPPKGFTAQFPPYPLDGELYSGRGQFEQISATVRSVSSDWRGIRLHVFDVPKAQGNLYQRLAVATQWLKTHPNAPITIIPQIKVRDRQHAMDFLKQIEAQGGEGVMLRQPESRYSGGRSSQLLKLKSQYDDECTVTRHYEGKGRNAGRLGAVGCKNRHGEFRIGSGFKDKDRDNPPKIGTLITYRYRGFTRKGTPKFATFVRARTDR

SEQ ID NO: 513 - protein, 399 aa, Neisseria meningitidis
LSDNACEIHSLLKSDDTDRMLEALDKLGVEIEYLAEDRLKVHGTGGRFPNRTADLFLGNAGTAFRPLTAALAVLGGDYRLHGVARMHERPIGDLADALRIAGADVEYLGKEHYPPLHIGERQDNGERVIPIKGNVSSQFLTALLMALPLTGQAFEIRMVGELISKPYIDITLKLMAQFGVQVINEGYRVFKIPADAHYHAPEHLHVEGDASSASYFLAAGLIAATPVRVTGIGANSIQGDVAFACELEKIGADVVWGENFVEVSRPKERAVQAFDLDANHIPDAAMTLAVVALATGQTCTLRNIGSWRVKETDRIAAMANELRKLGAKVAEEAEAIHITPPETPTPDAVIDTYDDHRMAMCFSLVSLLGVPVVINDPKCTHKTFPTYFDVFSSLTETTE

SEQ ID NO: 514 - protein, 376 aa, Neisseria meningitidis
MIKISTRFDAGSVVVKDLTDPSNIRLALRPDNASDFAQWFYFRLQGAAYQNCIMHFENAAEAAYPKGWEGYQACASYDRRNWFRVPTSYENGVLTVNHTPLSNSVYYAYFEPYSEEQHLNLLGDAQGSGLCRIDDLGSTVQGRDINLLTIGNQVESDLKIWITARQHPGETMAEWFVEGLLGRLLDPQDPTARTLLDRATFYIVPNMNPDGSALGNLRTNAAGANLNREWENPTVEKSPEVFFVRERMLETGVDLFLDIHGDEGLPFVFVAGTEGVPNYNPRISALETQFKTALLNASPDFQDEYGYEKDAPGQANVTLATNWVGNRFNCLAYTLEMPFKDNANLPDDDFGWNGQRSLRLGEAALSAILNVIGDLR

SEQ ID NO: 515 - protein, 160 aa, Neisseria meningitidis
MPSENPCSDGIPFCRNGQSETTDWAIISFLRIPRDSKGKTMYEVNRSVFVLIPLEPFWNWLQTLPGNHLDGLTLEDIQADANSYLVRPCETADEVWDEIEARFEDIFAAELADWCEDEREWPALDADIFNEWFDIQLSTVITDLEHEPLAREAFQPINLN

SEQ ID NO: 516 - protein, 281 aa, Neisseria meningitidis
MNIADGRQAFPAPAKLNLDLRITGRREDGYHNIESIFCLIDLQDTVYLKPRDDGKIILHNPVGGIPQEADLSYRAASLLQKYARNPAGVEIWLDKKIPTGAGLGGGSSDAATVLLVLNRWWQCSRTTQQLIDLGATLGADVPFFIFGKNAFASGIGEKLIGMDIPKQWYVIVKPPVHVSTAKIFTHEGLTRNSASSIMPTFQNLQPFRNDMQAVVFKEYPEVWKAYSELSRYGFALMTGSGACVFTACQDRDSAYNIYRQVSGLYEAYLAEGLSKHPLLSV

SEQ ID NO: 517 - protein, 483 aa, Neisseria meningitidis
LGNAKRCALILRTICFAVLRPKRMERCGKRSVGVEYAFAFEYSKKKREKLMPSEHQHISSLLDFDRTHLLHPYTSMTDPLPVYPVKRAEGVFIELADGTRLIDGMSSWWCAIHGYNHPVLNQAVETQMKQMSHVMFGGLTHEPAVELGKLLVGILPQGLDRIFYADSGSVSVEVALKMVVQYQQARGLRAKQNMATVRRGYHGDTWNAMSVCDPETGMHHIFGSALPQRYFVDNPKSRFDDEWDGADLQPVRALFEVHHADIAAFILEPVVQGAGGMYFYHPQYLRGLRDLCDEFDIVLIFDEIATGFGRTGKMFACEHAEVVPDIMCIGKGLSGGYMTLAAAITSQKVTETISRGEAGVFMHGPTFMANPLACAVACASVKLLLSQDWQANIRRIESILKGRLKAAWDIRGVKDVRVLGAIGVIELDKGVDMARFQADCVAQGIWVRPFGRLVYLMPPYIISDGVLTKLADKTVQILKEHSK

SEQ ID NO: 518 - protein, 122 aa, Neisseria meningitidis
LNNIPVEIRLLKNRTVLVLTYGDEPKNLPAEFLRVYSPSAEVRGHGVGQDVLQTGKADVQITDLQPVGQYALKISFSDGHDSGLYDWAYLHRLAYGYDAMWQEYLDKLAAAGASRFEKRSDC

SEQ ID NO: 519 - protein, 193 aa, Neisseria meningitidis
MKHTVSASVILLLTACAQLPQNNENLWQPSEHTRSFTAEGRLAVKAEGKGSYANFDWTYQPPVETININTPLGSTLGQLCQDRDGALAVDGKGNVYQAESAEELSRQLVGFKLPIQYLHIWADGRRVAGAPYRILPDGILEQYGWTVGRTADSGGQVRTLQLNNGNLNIRLVFTEIGMPSETETPERCAARTR

SEQ ID NO: 520 - protein, 265 aa, Neisseria meningitidis
MLKQRVITAMWLLPLMLGMLFYAPQWLWAAFCGLIALIALWEYARMGGLCKIKTNHYLAATLVFGVVAYAGGWMLPNLVWYVVLAFWLAVMPLWLRFKWRLNGGWQVYAVGWLLVMPFWFALVSLRPHPDDALPLLAVMGLVWVADICAYFSGKAFGKHKIAPAISPGKSWEGAIGGAVCVAVYMTAVRSAGWLAFDTGWFDTVLIGLVLTVVSVCGDLLESWLKRAAGIKDSSNLLSGHGGVFDRTDSLIAVISVYAAMMSVLN

SEQ ID NO: 521 - protein, 461 aa, Neisseria meningitidis
MIVASRWPLLEKVFLRFGMPVAVVDLESTGGNLYEDRVTEVALVKFEQGRVVRHEWLVNPQKPIPQFVAGLTGISDGMVADAPVFAEIAGELFSVLKGCVLVAHNSRFDYTFLKHEFHRVGIGFSSPALCSVQLSRCLYPQFYKHSLDSIIERLGIVVEDRHRAMADVSALCDYLEYSLSEHGVEEWIRQCFRLMNPKPLPAALPERLREQLYGLPDGMGVLACFDGGGKVNYIGTFERVYSEVSALLDSGKAPFDWCNTEEVRFFPALGSLHAYKIKAELVGRYHSGCYVSAKNLLKTFTTVRFEKGSDGMLNAKTAALKNGVTDNPPTGLFSNKKAARRALSSWAETYGLCPASAGILPDGYAEDEPCSVYVSGRCDKACGRSDEQVLAFAHKLPILDWGKMHEVEITETDPLTGEKVVLHGMGGALEMDDGFWYFDKDLPDAFKAKFKTDRKNIKEIG

SEQ ID NO: 522 - protein, 706 aa, Neisseria meningitidis
MRRFLPIAAICAVVLLYGLTAATGSTSSLADYFWWIVAFSAMLLLVLSAVLARYVILLLKDRRDGVFGSQIAKRLSGMFTLVAVLPGVFLFGVSAQFINGTINSWFGNDTHEALERSLNLSKSALNLAADNALGNAVPVQIDLIGAASLPGDMGRVLEHYAGSGFAQLALYNAASGKIEKSINPHKLDQPFPDKARWEKIQQAGSVRDLESIGGVLYAQGWLSAGTHNGRDYALFFRQPVPKGVAEDAVLIEKARAKYAELSYSKKGLQTFFLATLLIASLLSIFLALVMALYFARRFVEPVLSLAEGARAVAQGDFSQTRPVLRNDEFGRLTKLFNHMTEQLSIAKEADERNRRREEAARHYLECVLEGLTTGVVVFDEQGCLKTFNKAAEQILGMPLTPLWGSSRHGWHGVSAQQSLLAEVFAAIGAAAGTDKPVHVKYAAPDDAKILLGKATVLPEDNGNGVVMVIDDITVLIHAQKEAAWGEVAKRLAHEIRNPLTPIQLSAERLAWKLGGKLDEQDAQILTRSTDTIVKQVAALKEMVEAFRNYARSPSLKLENQDLNALIGDVLALYEAGPCRFAAELAGEPLMVAADTTAMRQVLHNIFKNAAEAAEEADVPEVRVKSEAGQDGRIVLTVCDNGKGFGREMLHNAFEPYVTDKPAGTGLGLPVVKKIIEEHGGRISLSNQDAGGACVRIILPKTVKTYA

SEQ ID NO: 523 - protein, 171 aa, Neisseria meningitidis
MMTLKTAPLKRRFAAMLYEMLLVGAATCLAALIAGIAAIFLNPVSIAVSALVTSILIMGAWWLYFRANWHGQGQTLAMRTWKIGLCDLNGIQPSLHLLRLRFIWACIFIVFIPMLAYAGLRHFLGIPPKGAAGAALIWLILPWGFALLNPDRQFLYDFLAGTRLVAVKGKP

SEQ ID NO: 524 - protein, 229 aa, Neisseria meningitidis
MKRKNIALIPAAGIGARFGADKPKQYVEIGSKTVLEHTIGIFERHEAVDLTVVVVSPEDTFADKVQTAFPQVRVWKNGGQTRAETVRNGVAKLLEIGLASADDNILVHDAARCCLPSEALTRLIEQAGNAAEGGILAISIADTLKRAEGGQISATVERTSLWQAQTPQLFRAGLLHRALAAENLDGITDEASAVEKLGIRPLLVQGDARNLKLTQPQDAYIVRLLLNAV

SEQ ID NO: 525 - protein, 371 aa, Neisseria meningitidis
MKIVIAPDSFKESLTAQQVAEAIKRGFQQAIADVECLLCPVGDGGEGTVDAIRHSLDLEEKCLQVTGPFGQKEVMRYFQKEQLALFEVADLVGLGKIPLEKRNPLQIQTRGIGELIRHLISQEIKEIYIGVGGTASNDGGIGIAAGLGYQFYDEDGNTLPTCGQALLNLASVSTENRYEIPEDVHIRILADVVSPLCGHQGATYTFGKQKGLDSTMFEAVDQAIQDFYEKVSPATLKLKGAGAGGGIAGGLCAFAQASIVSGIDTCLDLIDFDKKVSDVDLVIIGEGRLDRQSLAGKAPIGVAKRTPVGVPVVAICGSLVEDLPSLPFENIQAAFSILEKSEPLEDSLKNASLYLEHTASNIGHLLNMPKI

SEQ ID NO: 526 - protein, 307 aa, Neisseria meningitidis
MTKTEPNNAQLDWLESESIHIIREVAAECENPALLFSGGKDSVVLLALACKAFRLGSRPVKLPFPLVHIDTGHNYPEVIAFRDAQAAKLNARLIVGRVEDSIAKGTVVLRKETDSRNAAQAVTLLETIEANGFDALMGGARRDEEKARAKERIFSFRDEFGQWDPKAQRPELWSLYNTRLHKGENMRVFPISNWTELDIWQYIARENLELPPIYYSHRREVVRRRGLLVPVTPLTPKMPSETSEILDVRFRTVGDISCTCPVESTASTPTEIIRETAVADISERSATRLDDQASEAAMEKRKKEGYF

SEQ ID NO: 527 - protein, 484 aa, Neisseria meningitidis
MTTQTIKFHMKPETFKQNAAISLQDKPLRKSLRTAMDMLMTKRKAVLTDEEELQSLRDLCEHIRQRSLSKLPALLEQLEENLTKLGVKVHWAETPAEACQIIHDIITAKNGKLMVKGKSMVSEEIELNHYLEAKGIKAVESDLGEFIVQMAGEKPTHIVMPAIHKTKEQVSELFHQNLGTPLTDDVDQLTGFARKALRDIYSTADVGLSGVNFAVAETGTLCLVENEGNGRLSTTVPPVHIAITGIEKVVAKLSDIPPLYSLLPRSAIGQNITTYFNMITGPRRSEELDGPQEMHLVLLDNGRSQAYAEDQMRRTLQCIRCGACMNHCPVYTRIGGAAYGTTYPGPIGEIISPHLLGLDATRDLPTACTMCGACVEVCPVRIPITEQMQRLRVEAQRSPTETVPHPIRGQGASHTFGEQMAWRTFNGIFSGSKTYRAFGWAATKFRNLTPRKQLGWTQNRVPMKPAKKTLHELMAEKMRQKEQA

SEQ ID NO: 528 - protein, 144 aa, Neisseria meningitidis
MCGLWLLRALTAKLPQQRYAALFITLFFAAVLVFGRHDSMYWYPVLVNLMMLAVFGGSLFAGQTVIEKLARLQQPDLPEKAVRYTRRVTQVWCVFFIANGTLAALLARLGRYDWWAVYTGVIAYVLMGMPFAGEWLYRKLVLKV

SEQ ID NO: 529 - protein, 450 aa, Neisseria meningitidis
MPRGEALAVVVALIAAMGYTIISLEWLPHMSIIAAIVVLILYGLARGLKYNDMQQGMIGALNQGMGAIYLFFFIGLMVSALMMSGAIPTLMYYGFGLISPTYFYFSAFALCSVIGVSIGSSLTTCATVGVAFMGMAAAFHADMAMTAGAIVSGAFFGDKMSPLSDTTGISASIVGIDLFEHIKNMMYTTIPAWLISAALMLWLLPSVAAQDLNSVESFRSQLEATGLVHGYSLIPFALLVVLALMRVNAVVAMLFTVMVAVAVTYLHSTPDLRQLGAWFYGGYKLEGEAFKDIAKLISRGGLESMFFTQTIVILGMSLGGLLFALGAIPSLLDAVRSFLTNAGRATFSVAMTSVGVNFLIGEQYLSILLSGETFKPVYDKLGLHSRNLSRTLEDAGTVINPLVPWSVCGVFISHALGVPVWEYLPYAFFCYLSLALTLLFGWTGLTLSKK

SEQ ID NO: 530 - protein, 121 aa, Neisseria meningitidis
MKRQAFFKLMACAAFLSAVSLRLPVLGACYAILSLYAFALYGIDKRRAVRGKRRIPEHRLLLPALFGGWAGAYLGSRIFRHKTAKKRFVVLFRLTVSGNVLATLILIYSGLNLNQYGVASP

SEQ ID NO: 531 - protein, 68 aa, Neisseria meningitidis
MDEAVFADWALKICLTGLIIFLGFIVWNLGKESKAGKFGIAILFLVLGLGVFGFVFKELLIKFLVLPK

SEQ ID NO: 532 - protein, 299 aa, Neisseria meningitidis
MWFKQISFYPLNKEKLPEADALADKLAEAEFTHCQGLDWFSEGFTAPVSFSPELVFPADFTLRVALKKEEKVLPAGVIRDILEEKVAEIQNNEARNVGRKEKQELKEQITDDLLPRAFTRSSRTEAVFNTRHGYLLVNNAASAKAENILTKLREALGGLEASLPNTKQSPSSLMTGWLLQGHCEGGFELDSDCELKGTGDIVPVVKVSKQDLTADEVVQHVKNGKTVTQLGLVWREQIAFILTQDFTLKRIQYLDVLQEEAESNGDDAAGLAFASQILMAESVSIMLEELVSYLGGWQD

SEQ ID NO: 533 - protein, 185 aa, Neisseria meningitidis
VLMLLKTIGHGDGYRIFSVSVYGISLLLLYLSSSLYHGIAAGKLKSILKKTDHCMIYVLIAGSYTPFALVSLRNGPGWTVFSLSWLLAAAGIAQELTIGRKSEKRLLSIVIYVVMGWMVLAVMKSLTASLPSAGLAWLAAGGMLYSVGIYWFVNDEKIRHGHGIWHLFVLGGSITQFVSVYGYVI

SEQ ID NO: 534 - protein, 165 aa, Neisseria meningitidis
MNSLPIADLLVSAVIAACIVLSAMRGVIAEAGSMAAWVVSFFFAKLFAASFADLAFASFQPRLFALALSFISLFVIACLIQKMLRSLLTGAISAVGLGFANRILGGVFGALKGVLIITLLVMLASKTDLPDTEEWRQSYTLPFFVSLSEAVLNHSGGTAETPEDD

SEQ ID NO: 535 - protein, 125 aa, Neisseria meningitidis
MIYGIGTDIVSLKRIIRLNKKFGQAFAGRILTPEELLEFPQAGKPVNYLAKRFAAKEAFAKAVGTGIRGAVSFRNIGIGHDALGKPEFFYGPALSKWLEEQGISRVSLSMSDEEDTVLAFVVAEK

SEQ ID NO: 536 - protein, 308 aa, Neisseria meningitidis
MSFAFFFPGQGSQSLGMMNGFAEHAIVKNTFDEASAILGQDLWAMINGSDAEIIGQTVNTQPIMLAAGVAVYRAYLEAGGKTPAAVAGHSLGEYTALVAAGALDFTDAVKLVRLRAELMQSAVPQGVGAMAAILGLEDEQVKQICAEAAQGEVVEAVNFNSPGQVVIAGNAAAVGRAMAAAKEAGAKRALPLPVSVPSHCSLMKPAADKLAEALKTVEIKQPQIRVIHNADVAAYDDADKIKDALVRQLYSPVRWTETVNALVSDGIAESAECGPGKVLAGLAKRINKTAACSALTDAGQIAAFIEAH

SEQ ID NO: 537 - protein, 305 aa, Neisseria meningitidis
MKKTKVHLISGFLGTGKTTALKSLMAQKDPNEKWVIIVNEFGEIGIDGAVLSDNGIPVAEIAGGCLCCTAGPQMGVTVQKMLRDAKPDRLMIEASGLAHAASVIDELKAKPLDSLLEIGAVFTVVNPRQFINPDYAQQALYKDQIGICDVLVASKTDLCTTEQLAEFHDKAAKLFPPKAKVVEVQNAQLDIRWLDIPVIEKSRYRLKALPDNTMGFQSQGFTFPAGRDFDGEKLTNFFNDLPKMTEGLVRAKGVFQVLGTWVWLNWVDGQWGANQVSWRRDSRFELIAKSFDADLIEQKLKDALE

SEQ ID NO: 538 - protein, 295 aa, Neisseria meningitidis
LKSQAVSFRARSRTSKRLEKQALNHSITAFLLNDWLETEFTLSQAVLPDFSDISPEEAAQELRLEWGLGNEPIPNMITLLEAKGVRVFSLSLDTKDIDAFCTWYENHPFVFLNTQKSAERSRFDAAHELGHLIRDKYSMEHSKNSEITEDEPRDIIEKEANAFASAFLMPEAALRLYRHVPITIENLLKIKRRFGVSLVALAYRMHKLGMITDRMYIHNLCPLFAKKKYRTIEPEPMEREISSALRKMLTILKNDGIGIEQIAENLNVSPKDVADLTFGLVERDLNRYRKLRLVK

SEQ ID NO: 539 - protein, 85 aa, Neisseria meningitidis
MVLLLIVNKYWKVNDMKNEIQKIMDKYNPWHEDDFESYEDIARDVSLTTDKTFIEHYLLEVYSEENGHFDQENVHAMIEEIKNAI

SEQ ID NO: 540 - protein, 761 aa, Neisseria meningitidis
MNTKLTKIISGLFVATAAFQTASAGNITDIKVSSLPNKQKIVKVSFDKEIVNPTGFVTSSPARIALDFEQTGISMDQQVLEYADPLLSKISAAQNSSRARLVLNLNKPGQYNTEVRGNKVWIFINESDDTVSAPARPAVKAAPAAPAKQQAAAPSTKSAVSVSKPFTPAKQQAAAPFTESVVSVSAPFSPAKQQAAASAKQQTAAPAKQQAATPAKQTNIDFRKDGKNAGIIELAALGFAGQPDISQQHDHIIVTLKNHTLPTTLQRSLDVADFKTPVQKVTLKRLNNDTQLIITTAGNWELVNKSAAPGYFTFQVLPKKQNLESGGVNNAPKTFTGRKISLDFQDVEIRTILQILAKESGMNIVASDSVNGKMTLSLKDVPWDQALDLVMQARNLDMRQQGNIVNIAPRDELLAKDKAFLQAEKDIADLGALYSQNFQLKYKNVEEFRSILRLDNADTTGNRNTLVSGRGSVLIDPATNTLIVTDTRSVIEKFRKLIDELDVPAQQVMIEARIVEAADGFSRDLGVKFGATGKKKLKNDTSAFGWGVNSGFGGDDKWGAETKINLPITAAANSISLVRAISSGALNLELSASESLSKTKTLANPRVLTQNRKEAKIESGYEIPFTVTSIANGGSSTNTELKKAVLGLTVTPNITPDGQIIMTVKINKDSPAQCASGNQTILCISTKNLNTQAMVENGGTLIVGGIYEEDNGNTLTKVPLLGDIPVIGNLFKTRGKKTDRRELLIFITPRIMGTAGNSLRY

SEQ ID NO: 541 - protein, 215 aa, Neisseria meningitidis
MKPLILGLAAVLALSACQVQKAPDFDYTSFKESKPASILVVPPLNESPDVNGTWGVLASTAAPLSEAGYYVFPAAVVEETFKENGLTNAADIHAVRPEKLHQIFGNDAVLYITVTEYGTSYQILDSVTTVSAKARLVDSRNGKELWSGSASIREGSNNSNSGLLGALVSAVVNQIANSLTDRGYQVSKTAAYNLLSPYSHNGILKGPRFVEEQPK

SEQ ID NO: 542 - protein, 119 aa, Neisseria meningitidis
MLSNIIPLSIGAALGATARWLLNLAVPAAMSPATGNLFANWTGALLIGIFAETVNHPQWKLLLITGFLGSLTTLSGFSLETVTLLQSNRPASALSNIFLHTAGSLLLTWLGLKIGTAVK

SEQ ID NO: 543 - protein, 348 aa, Neisseria meningitidis
MEARPPRANEAQAPRAVEMKKESRPAFDAAAVFDAAAVPVSDSGFAANANVRRFVDDEVGKGDFSRAEWQDFFDKAAYKADIVKIMHRPSTSRPWYVFRTGNSGKAKFRGARRFYAENRALIDDVAQKYGVPAELIVAVIGIETNYGKNTGSFRVADALATLGFDYPRRAGFFQKELVELLKLAKEEGGDVFAFKGSYAGAMGMPQFMPSSYRKWAVDYDGDGHRDIWGNIGDVAASVANYMKQHGWRTGGKILVSATLAPGADVQAIIGEKTALTRTVADLKAYGIIPGEELADDEKAVLFKLETAPGVFEYYLGLNNFYTVWQYNHSRMYVTAVRDIANSLGGPGL

SEQ ID NO: 544 - protein, 523 aa, Neisseria meningitidis
VRRRRTFAIISHPDAGKTTLTEKLLLFSGAIQSAGTVKGKKTGKFATSDWMEIEKQRGISVASSVMQFDYKDHTVNLLDTPGHQDFSEDTYRVLTAVDSALMVIDAAKGVEAQTIKLLNVCRLRDTPIVTFMNKYDREVRDSLELLDEVENILQIRCAPVTWPIGMGKNFKGVYHILNDEIYLFEAGDERLPHEFDIIKGIDNPELEQRFPLEIQQLRDEIELVQAASNEFNLDEFLAGELTPVFFGSAINNFGIQEILNSLIDWAPAPKPRDATVRMVEPDEAKFSGFIFKIQANMDPKHRDRIAFLRVCSGKFERGMKMKHLRINREIAASSVVTFMSHDRELVEEAYAGDIIGIPNHGNIQIGDSFSEGEQLTFTGIPFFAPELFRSVRIKNPLKIKQLQKGLQQLGEEGAVQVFKPMSGADLILGAVGVLQFEVVTSRLANEYGVEAVFDSASIWSARWVSCDDKKKLAEFEKANAGNLAIDAGGNLAYLAPNRVNLGLTQERWPDIVFHETREHSVKL

SEQ ID NO: 545 - protein, 117 aa, Neisseria meningitidis
MPEIKIFHNPRCSKSRAALSLLEERGIAAEVVKYLDTPPDLSELKDIFNKLGLASARGMMRVKDDLYKELGLDNPNLDNDALLRAIADHPALLERPIVLANGKAAVGRPLENIEAVL

SEQ ID NO: 546 - protein, 131 aa, Neisseria meningitidis
LLIHYTSANAHECKHLSPLLEGIAEGTTVYADKGYDSAENRQHLEKRQLLDGIMRKACRNRPLTEAQTKRNRYLSKTRYVVEQSFGTLHRKFRYARAAYFGLIKVSAQSHLKAMCLNLLKAANRLSAPAAA

SEQ ID NO: 547 - protein, 236 aa, Neisseria meningitidis
LPNINTKIEPFYFCKAYMDMLEILFRHQDFVAINKPGGISVHQDSGETGLARTLAIQLGVERVWLLHRLDKQTSGILLFALNKESASALSGQFAGKSIKKTYLALSDRKPSKKQGWIKGGMEKSRRGMWKLTRNTENIAVTRFHSISIAEKLRLFILEPHTGKTHQLRVAMKSLGSPILGDSLYGGTESETMFLYAWRIQFAYQNRQIEIVAPLKNEWQTENISHALEEFYMAKAG

SEQ ID NO: 548 - protein, 216 aa, Neisseria meningitidis
MPSEPPSDGIARHPQSTIKMAKKPNKPFRLTPKLLIRVVLLICITAIGALAIGIVSTFNPNGGKTLQTEPQHTDSPRETEFWLPNGVVGQDAAQPEHHHAASSEPAQPDGTDESGSGLPSPAAPKKNRVKPQPADTAQTDRQPDDAGTQAENTLKETPVLPTNVPRPEPRKETPEKQAQPKETPKEKETPKENHTKPDTPKNTPPKPHKEILDNLF

SEQ ID NO: 549 - protein, 311 aa, Neisseria meningitidis
MKANMDIETFLAGERAADGYRCGFVAIVGRPNVGKSTLMNHLIGQKISITSKKAQTTRNRVTGIYTDDTAQFVFVDTPGFQTDHRNALNDRLNQNVTEALGGVDAVVFVVEAMRFTDADRVVLKQLPKHTPVVLVVNKIDKDKAKDRYALEAFVAQVRAEFEFAAAEAVSAKHGLRIANLLELIKPYLPESVPMYPEDMVTDKSARFLAMEIVREKLFRYLGEELPYAMNVEVEQFEEEDGLNRIYIAVLVDKESQKAILIGKGGERLKKISTEARLDMEKLFDTKVFLKVWVKVKSGWADDIRFLRELGL

SEQ ID NO: 550 - protein, 304 aa, Neisseria meningitidis
MDAVQLKSFVAVAHEGNLTQAAKRLFLSQPAVSAQIKALEEYVGTPLFRRTGKGMVLTRAGEILLPEAESLLQYKHKLEYFAKTLAGDYSEETSLGIIHPIDSAKLVALTDNIGQTAPKTRLHIQYGMSGEILSRIQHKTLHGGFILGNAAQRGIRSVFLQNLTYALICPQSQYPHLTRSLPQSLQECVWIEMSGVSGSRKHLHQFWRSNRLSPKKQILCDYPQTIIDLVAGGIGVAMVPGNKAEAAAKEGAGVAIIESCRHSMPLNFIYAEEYEDNPHVSLLLECIEKVWGVQAVQPPVVSDN

SEQ ID NO: 551 - protein, 240 aa, Neisseria meningitidis
MPSAPSAPIQTALLFQPTKDIHTMQDNALTIALSKGRIFEETLPLLAAAGIVPTEEPEKSRKLIIGTNHENIRLVIVRATDVPTYVRYGAADFGIAGKDVLIEHGGTGLYRPLDLEIAKCRMMVAVRKGFDYEAASQPGCRLKIATKYPEIAASHFAGKGVHVDIIKLYGSMELAPLVGLSDAIVDLVSTGNTLKANGLEAVEHIVDISSRLVVNKAALKTKYALLEPIIQAFGGAVKAK

SEQ ID NO: 552 - protein, 318 aa, Neisseria meningitidis
LRSPQVPKGLYFYGGVGRGKSFLMDAFFGCLPYRRKRRVHFHAFMAEIHQRLKTLKSESNPLKSVAAEIAKETRVLCFDEFHVSDIADAMILGRLLENLLNEGVVLVATSNYAPSELYPQGQNRSSFLPTIALIESSLTVLNVDGGEDYRLRTLRPAEIFFTPANEENEAKLAKLFKEMTGITDLNPGISTIHGREIPHKAESGRAIWFDFRALCFGPRSQSDYLYLAEHYEMVFISGLEQLSPQEKAEARRLTWLIDVLYDFRVKLCATGAVDVNHIYTEGDFAEEFTRTASRMVEMQSEVYLEQPHLTLSPKASGG

SEQ ID NO: 553 - protein, 305 aa, Neisseria meningitidis
MSIIHYLSLHVESARTALKQLLRQPFGTLLTLIMLAVAMTLPLFMYLGIQSGQSVLGKLNESPQITVYMETAAAQSDSDTVRSLLVRDKRLDNIRFISKEDGLEELQSNLDQNLISMLDGNPLPDVFIVTPDPATTPAQMQAIYRDITKLPMVESANMDTEWVQTLYQINEFIRKILWFLSLTLGMAFVLVAHNTIRLQILSRKEEIEITKLLGAPASFIRRPFLYQAMWQSILSAAVSLGLCGWLLSAVRPLVDAIFKPYGLNIGWRFFYPGEIALVFGFVIALGIFGAWLATTQHLLGFKAKK

SEQ ID NO: 554 - protein, 134 aa, Neisseria meningitidis
MRKSRLSRYKQNKLIELFVAGVTARTAAELVGVNKNTAAYYFHRLRLLIYQNSPHLEMFDGEVEADESYFGGQRKGKRGRGAAGKVAVFGLLKRNGKVYTVTVPNTQTATLFPIIREQVKPDSIVYTDCVAMMY

SEQ ID NO: 555 - protein, 161 aa, Neisseria meningitidis
MIQIGIIMGSNSDWPVMRQAAQFLEEFGVEYEARVVSAHRTPDLMFQYAETARARGIKAIIAGAGGAAHLPGMVAAKTTVPVLGVPVPSKYLRGEDSLLSIVQMPKGVPVATFAIGEAGAANAALFAVSMLANENPELAQKLADFRAKQEQTVLNMELEQI

SEQ ID NO: 556 - protein, 462 aa, Neisseria meningitidis
MNAVVVAVIVMLVLSLSRVHVVLSLTIGAFVGGAVAGMPLQNIADAAGQVSQAGIIPVFNKGLEGGAKIALSYAMLGAFAMAITHSGLPQQLAGAVVRKLNRGGMPDSVRSGEGAVKWLLLSIILVMGIMSQNIIPIHIAFIPMIVPPLLLVFNRLKIDRRLIACVITFGLVTTYMFLPYGFGAIFLNEILLGNIHSAAPQLDVKNINVMAAMAIPALGMLAGLLLAFVHYRKPRLYQSNNADTAGNADAANRPQPSAYRSLAAAAAIAVCFAIQLMYEDSLVLGAMLGFAVFMMLGVINRDKANDVFGEGIKMMAMVGFIMIAAQGFAAVMNATGHIQPLVESSMAIFGNSKGMAALAMLVVGLLVTMGIGSSFSTLPIIAAIYVPLCVGLGFSPLATVAIVGTAGALGDAGSPASDSTLGPTMGLNADGQHDHIRDSVIPTFIHYNIPLLIAGWIAAMVL

SEQ ID NO: 557 - protein, 481 aa, Neisseria meningitidis
MAHFFNINYPTYKGKNMTVRIEHDLLGDREIPAEVYWGIHTLRAIENFKISTQKISDVPQFVRSMVMVKKATAQANGELGAVKPEIAAAIEKACDEVLLNNRCLDQFPSDVYQGGAGTSVNMNTNEVIANLALEALGYEKGRYDIVNPMDHVNASQSTNDAYPTGFRLAVYYSIGELLDKLTVLKNAFTAKAEEFKDVLKMGRTQLQDAVPMTAGQEFQSFQVLLEEEILNLDRTRQLLLEVNLGATAIGTGVNTPKGYAELVVKKLSEVSGLPCKLTENLIEATSDCGAYVMVHGALKRTAVKLSKICNDLRLLSSGPRAGLKEINLPELQAGSSIMPAKVNPVIPEVVNQVCFKVIGNDTTITFAAEAGQLQLNVMEPVIAQCMFETISLLGNAAINLSDKCVKGITVNREICERYVFNSIGLVTYLNPYIGHHNGDLVGKICAQTGKGVREVVLERGLLSEEELNRILSPENLMNPHL

SEQ ID NO: 558 - protein, 69 aa, Neisseria meningitidis
LIDKSGKLECNSRFNYLPILFLGNIMKRTYQPSVTKRKRTHGFLVRSKTRGGRAVLAARRAKGRKRLAV

SEQ ID NO: 559 - protein, 392 aa, Neisseria meningitidis
VAQALSAKPNETVKRIFFMQNTSFDNESDYSDDSDFASASGTENRIGLTVPLELAGGRLDAVLAKLLPDYSRSRLTSWIKEGAVIVNDKPSQPKDKMIGGEQICVTVRPSEENLAFVPEPMALDIVYEDDTVIVVNKPAGLVVHPAAGNWTGTLLNGLLAHCPELSQVPRAGIVHRLDKETSGLMVVAKTLPAQNSLVQQLQERTVKRIYRAVANGIVPFDGKIETQIGRDPHNRLKMAVVKFGGKPAVTHVKVLERYLAHSYIECSLETGRTHQIRVHMREANHPLAADPVYGNPRHPCGDTVKEAVKSLGARQALHAYRLSFTHPKTGETRSFEAPIPNDIYHLLSVLRLEAGLDSSLSNEEEWQDKFGADDDDDWNEDDYDVEVVYVRE

SEQ ID NO: 560 - protein, 297 aa, Neisseria meningitidis
MIIVMSRRAAEADIAGVVAFIRSRGLREHISHGDERTVIGAIGDDRVLSVREVQTLPEVEKAVRILDTWKTVSRENRAEDSRVAAKGVAFGGGETVRIAAEPSVWRNADAVFLDPFFTSANLYDTSSADEGRGRCRRLAEQTASAHDAGKPVLVRVRNVRHVEAALNAGADILYLGGGLMSDLAVLNEAGNLNIPLVLCKDKHHSAEDWLNAAEYVVSRGNRHLILGESGVLNHTKGHPYRLDVESIVKVRQISHLPVIANITGLWNRDMPQEILYGLAKAAGACGIVGTCFEKSGG

SEQ ID NO: 561 - protein, 210 aa, Neisseria meningitidis
MDLHNIREDYSKRELSEGDCADNPIEQFERWLDEAVRAEVNEPTAVNVAAVDGRGRPNSRMVLLKEVNSEGFVFFTNYHSRKGRSLDAHPFAAMTFFWPELERQVRVEGRVERLAEKLSDEYFESRPYQSRLGAWASAQSEVIPNKAVLVAKAAAVGLKHPLHVPRPPHWGGYIVIPDLLEFWQGRPSRLHDRIQYRLLDGGWIRERLSP

SEQ ID NO: 562 - protein, 318 aa, Neisseria meningitidis
MNIIGLDISKDTIDATLHKTNGSIHYIKFKNNDDGLKQFRLWIKGNRIRKAYIGMEATGIYYEKAADMLSSYYTVYVINPLKIKDYGKSRFNRTKTDKADSNLIADYIKRHQDTLIPYQIPKNKALQKLINLKNQLHQHQKQIKNRLHSTEEDFIRNIHQDLIDTIQDKMEQVKIAISEQIKKQTDNNHYRNLQTIPSIGKDTASVLYAQLTEKHFKTANQFVSYAGLSPAIIQSGTSVRGRGRLSRYGNRRLKSTLYMPALCAYRFNAFPKLINNLKKAGKPKMVIIVAIMRKLAKLAYYIVKTGQPYDAERHRLNQ

SEQ ID NO: 563 - protein, 324 aa, Neisseria meningitidis
MIAKHIDRFPLLKLDQVIDWQPIEQYLNRQKNRYLRDHRGRPAYPLLSMFKAVLLGQWHSLSDPELEHSLITRIDFNLFCRFDELIIPDYSTLCRYRNWLAQDDTLSELLKLINCQLTEKGLKVEKASAAVIDATIIQTAGSKQRQAIEVDEEGQVSGQTTPSKDSDARWIKKNGLYKLGYKQHTRTDAEGYIEKLHITPANAHECNHLSPLLEGIADGTTVYADKGYDSAENRQHLKEHQLQDGIMRKACRNRPLTEVQTKRNRYLSKTRYVVEQSFGTLHRKFRYARAAYFGLIKVSAQSHLKAMCLNLLKAANRLSAPAAA

SEQ ID NO: 564 - protein, 107 aa, Neisseria meningitidis
MMTESEFIRASEALFEHIEDQIDENGWDFDCRFAGNVLTIEAGDGTQIIVNRHTPNQELWIAAKSGGYHFAEQNGKWLATRDSRDFYDVLNEALSAASGEAVEIAEL

SEQ ID NO: 565 - protein, 114 aa, Neisseria meningitidis
MNIIRALLIILGCLAAGETAVFLAGIKLPGSIVGMGVLFALLQAGWVKTSWLQQLTDALMANLTLFLVPPCVAVISYLDLIADDWFSILVSASASTLCVLLVTGKVHRWIRSII

SEQ ID NO: 566 - protein, 394 aa, Neisseria meningitidis; identical to SEQ ID NO: 277

SEQ ID NO: 567 - protein, 128 aa, Neisseria meningitidis
MKGLDKYILFKNCETLGELFRIYQDYLSLNIDDPNLKIKFFDLLEELLSDGVIELCDYRENPPKILTGSPKTQVDELRKIWPDMEEMLLYFPDNPWHYVEWFWWGATCPIELTQLPKIEIYEEQMKQA

SEQ ID NO: 568 - protein, 309 aa, Neisseria meningitidis
MDSIIELRHLKTLLALEETGSVSLAAKRVFLTQSALSHQIRMLENHYGTPLFERKSTPLRFTPVGERLLRLAHELIPQVAVAEWDLARITEGEAGELRIAVECHTCFDWLMPAMGEFRPMWPQVELDIVSGFQADPVGLLLQHRADLAIVSEAEKQNGISFQPLFAYEMVGICAPDHPLAAKNVWTAEDFIGETLITYPVPDEMLDLPKKILIPKNINPPRRHSELTIAIIQLVASRRGIAALPYWTVMPYLEKGYVVHRQITADGLQSKLYAAIRTEDTDKSYLNNFCQIIRERGFADLPGLSELESV

SEQ ID NO: 569 - protein, 458 aa, Neisseria meningitidis
MHDKTWSGRFNEPVSELVKQYTASIGFDRRLAEWDIQGSLAHAQMLKETGVLDEGDLADIRRGMAEILEEIRSGKIEWSSDLEDVHMNIERRLTDKIGDAGKRLHTGRSRNDQVATDIRLWLRDQITVIQSLIQSLQTALLDLAEQNAETVMPGFTHLQVAQPVSFGHHMLAYVEMLGRDNERMADCRCRVNRMPLGAAALAGTTYPIQREITAELLGFEQICQNSLDAVSDRDFAIEFTAAASLVMVHLSRLSEELILWMSPRFGFIDIADRFCTGSSIMPQKKNPDVPELVRGKSGRVIGHLIGLITLMKSQPLAYNKDNQEDKEPLFDTADTLIDTLRIYADMMRGVTVKPDNMRAAVMQGFATATDLADYLVKKGMPFRDAHEVVAQAVRHADQAGVDLSELPLEVLQGFSDLIADDVYGVLTPEGSLNARNHLGGTAPEQVRFQVKRWREMLA

SEQ ID NO: 570 - protein, 174 aa, Neisseria meningitidis
MDGVGKNRRGIKIGKNMEHLFGKWLPDLPTPISDGISLPMVRLLHTRSLTAALRALPHTFSVELLKLGELETECGGRLVREVLLKLDGIPVVAARSECRIGSAFWQNILDCGTRPLGERLFQADLEGARSAFEFAVSGEGCGRYFAARRSRFSRHGEEMLLTEYFLPELKRFIG

SEQ ID NO: 571 - protein, 129 aa, Neisseria meningitidis
MKNVQKGFTLLELMIAVAILGILTLITYPSYKTYIRRVRLSEVRTTLLHNAQTMERYYRQKGTFENYDKNKLKQNEYFDITLSEVSPDHFTLKATPNPTTNDGETCVVTLNDGGTIAASDTNQSCPGFD

SEQ ID NO: 572 - protein, 265 aa, Neisseria meningitidis
MNRLYPHPIIAREGWPIIGGGLALSLLVSMCCGWWSLPFWVFTVFALQFFRDPAREIPQNPEAVLSPVDGRIVVVERARDPYRDVDALKISIFMNVFNVHSQKSPADCTVTKVVYNKGKFVNADLDKASTENERNAVLATTASGREITFVQVAGLVARRILCYTQAGAKLSRGERYGFIRFGSRVDMYLPVDAQAQVAIGDKVNGVSTVLARLPLTAPQIESEPESEPALQTAPVETAANPSAEQRQIEAVAAKIQAAVQDVLKD

SEQ ID NO: 573 - protein, 517 aa, Neisseria meningitidis
MLSERSADCCPAHFVVKFRKSTLNCGRRFDRPPINGNRQRKPMIHTEPSAQPSTMDTAAFLKHIESAFRRIFSDGIDLMRYLPEDKWLALKQAGLLLPFLDKKHGGRKGSQFEIQEVLRIAGHYGVPVTLRTGIEGALVLQPLQEFGDEAQIAQGLDMVFKGEGGGLGVTEPETSGAAIAREMQSYYEYTDGQTIYVNAAKYWQGNSQSDFLLVAAKERKNGKLAKVIDLLLVPKTYIRCETLASEGLRAVRYAVNRIDAEMPATAVMKLSQSDAAGLRAFQNIFIRSRLQLIGMTHGIMEYILENLERYVRNDIRFVDYERREIRRRHQVSEILYRYVCHSVSPVAPVAHQLMEANIVKTLATEYTYAAAQMLQKLLGAKGFERGHTAGNIAIDIRPFTIFEGPNDMLYAEIYDQFVRATAEEKEAGMKLDKNQTLLDRLQTDARFAAVARDYTLPEDIRSFLQEHTLTDACALQKVFIGKIIARLFVFVQAEHEDTAAFLLNDIRKDILDCRYCG

SEQ ID NO: 574 - protein, 206 aa, Neisseria meningitidis
MTKLYAEIAKREAQDDGTVKVLGYASSEAVDSDGEVIATAAMKAAIPDYMKFDAGREMHGSNAAGTAIEINVEDDGITFFGAHIIDPVVVSKVKTGVYKGFSIGGSVTARDNLNKSQITGLKLTEISLVERPANPDAVSTCFKADKGAEAVNNDTEHNATYFSHFPSKQKSTGGSRCPFLYRFPYFFTAGSTGLAGPFGAGAPTEA

SEQ ID NO: 575 - protein, 123 aa, Neisseria meningitidis
MNKTLSILPVAILLGGCAAGGGNTFGSLDGGTGMGGSIVKMAVGSQCRAELDKRSEWRLTALAMSAEKQAEWENKICACVAQEAPERMTGNDVMQMLDSSTRNQALAALTAKTVSACFKHLYR

SEQ ID NO: 576 - protein, 240 aa, Neisseria meningitidis
VVTDKYKLSLEENIFLAKKVLVAQIHNLSRFENCQTTLLQTEQIIHGKNVASASLEDIQTILNLKRAYQYVISHISNGEPVDISLLKKINNIVAKDDSLAPGDFRTGSVGVTLLDGSRHAPNPVKEIEVARVLQNIGLQSGSTTEAAVRFMLYCMRQQVFWDGNKRTATLFANGLMMAGGCGILEISEMQMPQFNEKLSAFYRSGDDTDISKFVYQNCISGIDYFGTDEDIDFPDPPNMG

SEQ ID NO: 577 - protein, 129 aa, Neisseria meningitidis
MWKISKENCEDLGFAIVCMFYDAINLSEFKLWLDIVVRDTPIDTIPLYIFDLIDFDKSIGEIYDVIGVVNYGYISNDQKNALTGIAFLRGIDVYDPPISKEKALKALEKYPEIYQRFQHFFPFVELPLL

SEQ ID NO: 578 - protein, 787 aa, Neisseria meningitidis
MQFSYSWLKTQADTELSSDKLEHLLTMSGLEVEEAETAAPAFAGVVVAEVKSVEKHPDADRLNVTQVDAGTGGLVQIVCGAPNVKAGIKVPCSLPGAVLPGNFKIKPTKMRGVVSDGMLCSTDELGLPDDGVNGLHILPEDAPVGTNIREYLDLDDTLFTLKITPNRADCLSIKGIAREVSALTGCAFRQPEIHTAPITGSRKQPVQINAPADCGRFISRVIENVNAKAATPDWMKQRLERSGIRSISALVDIGNYVMLEIGQPMHVFDADKLSGSLHIRRAREGETLECLNEKTVSLSENTLVVADEKGVLSLAGLMGGAASAVSDGTQNIVLEAAWFAPEIIAGKSRQYGFGSDSSFRFERGVDYRLQADAIERATELVLQICGGAAGEMVEAQGELPEAKQVGLRLGRLKTVLGVDIPAEQVETILQHLGLQPEKTAEGFRVTAPSFRFDIEIEADLIEEIGRVYGYENIPDDYTSGRLKMLELPETRRPRFAVYNEMAARGYREVVSYAFVDEQWEQDFAANADPIRLQNPLAAQYAVMRSTLIGGLVEILQNNLNRKQNRVCVFEIARVFSKGSDGQFVQNERIGGLWYGAVMPEQWGGKTRNADFYDIKADVENLLKNKAVEFVKTGHPALHPGRAANIVSDGKVIGFVGELHPKWLQKYDLPQAPLVFEIDMAAVLECGETRYRAVSKFQPVRRDLAFVMPEAMSHDDLLLVLKGAANKLVQEISVFDVYRGTGLPEGMKSVAVKVILQDMENTLTDEAVEPLIGKLIGAATAAGARLRS

SEQ ID NO: 579 - protein, 287 aa, Neisseria meningitidis
MLVAAACFTIMNVLIKEASAKFTLGSGELVFWRMLFSTVALGAAAVLRRDTFRTPHWKNHLNRSMVGTGAMLLLFYAVTHLPLATGVTLSYTSSIFLAVFSFLILKERISVYTQAVLLLGFAGVVLLLNPSFRSGQETAALAGLAGGAMSGWAYLKVRELSLAGEPGWRVVFYLSVTGVAMSSVWATLTGWHTLSFPSAVYLSCIGVSALIAQLSMTRAYKVGDKFTVASLSYMTVVFSALSAAFFLGEELFWQEILGMCIIILSGILSSIRPTAFKQRLQSLFRQR

SEQ ID NO: 580 - protein, 316 aa, Neisseria meningitidis
MESKMSIHTLKHLPSSLLLGLCLSLPSAHLFADNDILGQFLEQNMLTSSDPIEIFAESTIHPTNTQAITGGLILSSQSALVVNNKTGQILYQKNADRIMPIASISKLMSAMVVLDANLDMNETVTITPDEIDRIKGTGSRLAIGTALTRKELLHLSLMSSENRATHALGRTYPGGMGAFVAAMNRKAQSLGMYSSRFYEPTGLNFQNVSTAKDLSLMVNAAAQYPQIRTNSTSNYASVQTKNGQQNYKNSNALVREGMWNIELQKTGYIREAGRSMVVKANIQNQPVTIVLLNSPTSATRVNDARKIESWMLQQRS

SEQ ID NO: 581 - protein, 169 aa, Neisseria meningitidis
MTDTQNRVAMGYIKGVFGIKGWLKIAANTEYSDSLLDYPEWHLVKDGKTISVTLEAGKVVNSELQVKFEGINDRDLAFSLHGYTIEIPREAFAPTEEDEYYWADLVGMTVVNKDHTVLGKVSNLMETGANDVLMIDGEHGQILIPFVSQYIETVDTGSKTITADWGLDY

SEQ ID NO: 582 - protein, 485 aa, Neisseria meningitidis
MHKILPIAHVLSRLGMLFSFILLIPAALSYAFSDGAYTAFATTATVTLSGSCIVRLATLRFRRELRPRDGFTLVLMLWLAFAAMAAMPMYLYFPNMGFTDAFFESMSGLTTTGATVIPHVDGLAPSVNFWRHMLNWLGGMGIIVLAVAILPMLGVGGTQLFKAEIPGIDKESKMSPRISQVAKKLWFGYTLITILAAACLHFAGMGWFDAVCHAMATLSLGGFSTHDASIAYYNSPLIEAVIIVFTIVGGINFASHFAALNSRSLKTYWKDEECRTMMLLLSGSILAAALYLWHTGYYAGFIESLRYTAFNFVSIGLANGLANTDFAQWPLLISLWMFFLANILPNSGSTGGGIKTIRALVLFKFSLREMMVLLHPKAVRTVKISGKAIPDRLALTVMSFIFIYFMTVVLFSFLLMASGMEFTTAFTAVIACITNSGPGLGEVGPAGNYAGLDVMQKWICVAAMLLGRLEIFTVFILFTPAYWKK

SEQ ID NO: 583 - protein, 123 aa, Neisseria meningitidis
MNLTEHNGPKAQIFLNGKPDQPVWFSTIKQMFGYTKLPEEPKGIRVIYVTDMGNVTDWTNPNADTEWMDAKKAFYVIDSGFIGGMGAEDALPFGNKEQAEKFAKDKGGKVVGFDDMPDTYIFK

SEQ ID NO: 584 - protein, 517 aa, Neisseria meningitidis
MNRTYANFYEMLTAACRKNGNGTAVFDGKEKTTYDALKQEVEAVAAYLQNIGVKFGDTVALAVSNSTEFITAYFAVSAIGAVAVPMNTFLKNSEYAYILNDCKARFMFASAGLSKELAGLKAQTPVEKIIWTGKSRQGGGAAEGDAFFEDVRRFPEKPDLGHQPRINDLAHIIYTSGTTGHPKGALISYANLFANLNGIERIFKISKRDRFIVFLPMFHSFTLTAMVLLPIYMACSIILVKSVFPFSNVLKQALLKRATVFLGVPAIYTAMSKAKIPWYFRWFNRIRLFISGGAPLAEQTILDFKAKFPRAKLLEGYGLSEASPVVAVNTPERQKARSVGIPLPGLEVKAVDEELVEVPRGEVGELIVRGGSVMRGYLNMPAATDETIVNGWLKTGDFVTIDEDGFIFIVDRKKDLIISKGQNVYPREIEEEIYKLDAVEAAAVIGVKDRYADEEIVAFVQLKEGMDLGENEIRRHLRTVLANFKIPKQIHFKDGLPRNATGKVLKRVLKEQFDGNK

SEQ ID NO: 585 - protein, 469 aa, Neisseria meningitidis
MDTQIKTEAGQQNNRRYLTVWRWHFYAGLLVMPFLTLLAVTGLGMLLFANITGKEGERIHVVPQATVQPLSVQAEAARSAVNPETSSVVQYIAPRAEDMVAVFRVNNEGKATMVAVDPYTAKVVNTMPRNQGWYHTMDEIHGDMMLGAAGDYLLETAASLTIIMVVSGLYLWWVKRRGIKAMLLPSKGRARSWWRNLHGTFGTWVSLILLLFCLSGIAWAGIWGGKFVQAWSQFPAGKWGVEPNPVSVVPTHGEVLNDGKVKEVPWVLELTPMPVSGTTVGKDGINPDEPMTLETVDRFAREIGFKGRYQLNLPKGEDGVWTLSQDSMSYDMISPFADRTVHIDQYSGKILADIRFDDYNPFGKFMAASIALHMGTLGWWSVLANVLFCLAVIFIGISGCVMWWKRRPTGAVGIVPPAQKVKLPVWWAMAVPLLAIALLFPTALLAIAVIWLLDTLLLSRIPVLRRWFK

SEQ ID NO: 586 - protein, 268 aa, Neisseria meningitidis
MPTVFIFLTAVYAGLGAFAWHCQQQGLGRDYPWKTELPVLGAALTVHGAALLMPVIQDKIIIMGFGYSGSLIVWMMLFIYFAGSFFYSLRGVQLLLYPCAALMLLSGLVFPGKFSGYEITDLPFMLHIGTSLLAYGLFGIATLLSVLTLLLNRSLHRRNFSKLAGFLPSLLSLEKLMFQAMWAGFILLTYSVVSGTFFAEAVFGKPMTFTHKTVFGILSWLIYGGLLLKHSMTAWRGKKAAVWTIIGFVSLMIAYMGSKFVLEIILKR

SEQ ID NO: 587 - protein, 66 aa, Neisseria meningitidis
MQLICADWTGIGNFMKTFEKTWSAQYRDMEISVRNFWNLERTGAEVYINGRRVYHNEAEMASASLR

SEQ ID NO: 588 - protein, 259 aa, Neisseria meningitidis
MNGIIIKTPEEIEKMRELGKLVAEALDYIGQFVKPGVTTDEIDKLVYDYHVNVQGGYPAPLHYGNPPYPKSCCTSVNHVICHGIPDDKPLKEGDIINIDLTIKKDGFHGDSSRMFTVGKVSPIAQRLIDVTHASMMAGIEAVKPGATLGDVGYACQQVAENAGYSVVQEFCGHGIGRGFHEAPQVLHYGKKGQGPVLKPGMIFTVEPMINQGKRHLRILNDGWTVVTKDRSLSAQWEHEVLVTETGYEILTVSPASGKP

SEQ ID NO: 589 - protein, 95 aa, Neisseria meningitidis
MQLEIIGSKIYTEQDFHNQISKIFSIQDYYGNNLDALWDLLSTNVERPITLVWKDAMFSKNQLENIFIEIVNVLERVKKQDEDYGFEEKFNYILE

SEQ ID NO: 590 - protein, 140 aa, Neisseria meningitidis
MSIMEVEVVSSEQKIYSGEATFIVVPTVQGELGIYPRHEPIMSLVRPGALRLTVPGEDKEVLVAVSGGVLEVQPDKVTVLADVAVRSAEMDQARAEEAKKAAEAGISQAKDDKALAEAHKALAAAIAQLKTLDYIRSHKK

SEQ ID NO: 591 - protein, 207 aa, Neisseria meningitidis
MERKERLRAGIAAMGLDILETAQDRLLAYVDLLKKWNKTYNLTALRDEEKMIVHHLLDSLTLLPYIEGAQTMLDVGSGGGQPGIPAAVCRPDVQITLLDANTKKTAFLQQAVIELGLDNVRVVSGRVEAVSDVRADVITSRAFAELADFVSWTGHLLKDGGYWAAMKGVYPQGEIDRLPQDVCVEKVQRLDVPGLDAERHIAILRKR

SEQ ID NO: 592 - protein, 125 aa, Neisseria meningitidis
MTQFRPILNQANITDQQWRIIRLLAENGTLDFQDLANQACILRPSLTGILTRLEKAGLVVRLKPSNDQRRVFLKLTAEGEKLYEEIGEEVDERYDAIEEVLGREKMLLLKDLLAELAKIEDALNS

SEQ ID NO: 593 - protein, 528 aa, Neisseria meningitidis
MALFLSIFPIVLLIWLMVKKNSMPSYVALPITAVLIYAIKLFYFDDAGMLLNATAASGLVKTLTPITVIFGAIMFNRMMETTGCIDVIRKWLATISPNPVAQLMIIGWAFAFMIEGASGFGTPAAIAAPILMSLGFNPLKVAIFTLVMNSVPVSFGAVGTPTWFGFAPLNLSAEDILAIGRQTGVMHFFAGFVIPVIGLGFIVPWSEIRKNLGFVAIAVFSCTIPYVALAMVNEEFPSLVAGAIGLMVSVFAANQGWGLSKDHAKDPNAEKVPFAQVAKALAPLGMLIGMLVVTRIKQLGIKGILTSKEEWFSFQLPFDLSKITVSDSLTITFGNIFGQDVSASYQTLYVPAWIPFVLTVWICILLYKTKFKDAWTIYAVTFNQTKKPLLALMGALIMVQLMLVGGDNSMVKIIGKEFAAMAGEHWVYFSPYLGAIGAFFSGSNTVSNLTFGPIQQQIALDTGLSVTLILALQSVGGAMGNMVCLNNIIAVCTVLDVKNSEGAIIKKTVIPMAIYGVIAVVAAMIFFL

SEQ ID NO: 594 - protein, 180 aa, Neisseria meningitidis
VNMAASVRILGIDPGSRVTGFGVIDVRGRDHFYVASGCIKTPADAPLADRIAVIVRHIGEVVAVYKPQQAAVEQVFVNVNPASTLMLGQARGAALAALVSHKLPVSEYTALQVKQAVVGKGKAAKEQVQHMVVQMLGLSGTPQADAADGLAVALTHALRNHGLASRLNPSGMQVKRGRFQ

SEQ ID NO: 595 - protein, 924 aa, Neisseria meningitidis
LKNVDLDIPRHKLVVVTGLSGSGKSSLAFDTLYAEGQRRYVESLSAYARQFLQMMDKPDVDLIEGLSPAISIEQKSTSHNPRSTVGTVTEIHDYLRLLYARVGTPYCPEHKLPLSSQTVSQMVDAVLKLPEDTRVMILAPAVRERKGEFVDFFADLQAQGFARVRVDGEVYQLDEVPKLEKNIKHNIDVVIDRVKVKADIKQRLAESFETALRHGNERALAMEMDSGEEHWFSARFACPVCSYSLPELEPRLFSFNNPMGSCPTCDGLGNTNFFDPEKVVAHPELSLASGAIDGWDKRNQFYFQMIQSLARHYGFDVQAAWETLPAKIKKVVLHGSGKEVIDFTYLSERGTTFNRSHAFEGIIPNLERRYRETDSETVREKLREYQNHRACPSCGGARLRKEARYVYVSGEPLHEVSAWPLTKTHQFFETLDLDGNKKQIAEKILKEITERLGFLINVGLDYLNLSRSAETLSGGEAQRIRLASQIGSGLTGVMYVLDEPSIGLHQRDNDRLLATLKRLRDLGNSVIVVEHDEDAIREADFVVDMGPGAGEHGGNVLIADTPENVAKCENSVTGQYLSGKKSIAVPSERTPVNPDRMLVLKGARGNNLKNVTLELPLGLITCITGVSGSGKSTLINDTLAKITARELNRAQEEPAPYDDIRGLEHLDKVINVDQSPIGRTPRSNPATYTGLFTPIRELFAGVPLSRERGYNVGRFSFNVKGGRCEACQGDGVIKVEMHFLPDVYVPCEVCHGKRYNRETLEIQYKGKNISQVLDMTVEEAREFFDAVPTVSRKLQTLMDVGLGYIRLGQSATTLSGGEAQRVKLALELSKRDTGRTLYILDEPTTGLHFADIALLLEVIGRLKGKGNSIVIIEHNLDVIKTADWIVDLGPEGGDGGGRIIASGSPEEVAKVKGSYTGKYLKNIL

SEQ ID NO: 596 - protein, 423 aa, Neisseria meningitidis
LFHFMLPVRFTRVSDGIKRLTPASNQTAFYHPFEHPFCRYSSFYWSIAIMTATTASSTKPYLQIQGLVKKFGDNYAVDNIDLDIYQHEIFALLGSSGSGKSTLLRMLAGMESPNQGKIILDGQDITKLAPYDRPINMMFQSYALFPHMTVEQNIAFGLKQDKMPKGEIAARVEEMLRLVQMTKFAKRKPHQLSGGQQQRIALARSLAKRPKILLLDEPLGALDKKLRQQTQLELVNTLEQVGVTCIMVTHDQEEAMTMATRIAIMSDGQLQQVGTPSDVYDYPNSRFTAEFIGETNIFDGVVIEDHADYAVIECEGLENHVRIDHGLGGPSEQDLWVSIRPEDIDLYKEKPEYLGDYNWAKGTVKEIAYLGSFAIYHIKLGNGRVVKSQVPAPYWYVRNITPPTWDETVYISWPENQPTPLFR

SEQ ID NO: 597 - protein, 202 aa, Neisseria meningitidis
MKPKPHTVRTLIAAIFSLALSGCVSAVIGSAAVGAKSAVDRRTTGAQTDDNVMALRIETTARSYLRQNNQTKGYTPQISVVGYNRHLLLLGQVATEGEKQFVGQIARSEQAAEGVYNYITVASLPRTAGDIAGDTWNTSKVRATLLGISPATQARVKIVTYGNVTYVMGILTPEEQAQITQKVSTTVGVQKVITLYQNYVQR

SEQ ID NO: 598 - protein, 227 aa, Neisseria meningitidis
MPSEKCSDGISYNLLFAAHNQSVFPIPFRNAYHAPVPNICEQGKKMARLTVHTLETAPEAAKARVEAVLQNNGFIPNLIGVLSNAPEALAFYQEVGKLNAANSLTAGEVEVIQIIAARTNQCGFCVAGHTKLATLKKLLSEQSVKAARALAAGEFDDAKLGALAAFTQAVMAKKGAVSDEELKAFFDAGYNQQQAVEVVMGVALATLCNYVNNLGQTEINPELQAYA

SEQ ID NO: 599 - protein, 366 aa, Neisseria meningitidis
MITLKTTPFHQAHQDAGAKPVDFAGWELPIHYGSQIAEHEAVRTDAGMFDVSHMLVTDVAGANAKAFFRKLIANDVAKLAFVGKALYSALLNDNGGVIDDLIVYRTNEAETQYRIVSNGATREKDTAQFHKVGQEFGVSFNPRYDLGMLAVQGPKAIEKLLTVKPEWADVVHNLKPFQGADLGNDWFVARTGYTGEDGVEVILPGTEAVAFFKALQAAGVHPCGLGARDTLRMEAGMNLYGNDMDDNTSPLEAGMGWTVDLKDESRDFVGKTALLALKEKGVAVKQVGLLLDKGGILRAHMEVLTDKGKGETTSGVFSPSLKQSIAIARVPKDFDGDTAKVLIRGKEVDVRVLKLPFVRNGQKQFD

SEQ ID NO: 600 - protein, 92 aa, Neisseria meningitidis
MYYQVGNKCLEKHQAENLYFSLVVPRIKENGQIVRPEYNGSLWKMSDGQPLRLLLAECSPKDNLQSGLETGWIVFGILASVYFVSLLKKVLK

SEQ ID NO: 601 - protein, 172 aa, Neisseria meningitidis
MAKHEIEERGDGLIEKMVAVNRVTKVVKGGRIMAFSALTVVGDGDGRIGMGKGKSKEVPVAVQKAMDQARRSMIKVPLKNGTIHHEVIGRHGATKVFMQPAKEGSGVKAGGPMRLVFDAMGIHNISAKVHGSTNPYNIVRATLDGLSKLHTPADIAAKRGLTVEDILGVNHG

SEQ ID NO: 602 - protein, 38 aa, Neisseria meningitidis
MDSAMPSERVSDGIFFSGKSKKSIMARLKITLEHRDER

SEQ ID NO: 603 - protein, 499 aa, Neisseria meningitidis
VFKKYQYLALAALCAASLAGCDKAGSFFGADKKEASFVERIEHTKDDGSVSMLLPDFVQLVQSEGPAVVNIQAAPAPRTQNGSGNAETDSDPLADSDPFYEFFKRLVPNMPEIPQEEADDGGLNFGSGFIISKDGYILTNTHVVTGMGSIKVLLNDKREYTAKLIGSDVQSDVALLKIDATEELPVVKIGNPKDLKPGEWVAAIGAPFGFDNSVTAGIVSAKGRSLPNESYTPFIQTDVAINPGNSGGPLFNLKGQVVGINSQIYSRSGGFMGISFAIPIDVAMNVAEQLKNTGKVQRGQLGVIIQEVSYGLAQSFGLDKAGGALIAKILPGSPAERAGLQAGDIVLSLDGGEIRSSGDLPVMVGAITPGKEVSLGVWRKGEEITIKVKLGNAAEHIGASSKTDEAPYTEQQSGTFSVESAGITLQTHTDSSGGHLVVVRVSDAAERAGLRRGDEILAVGQVPVNDEAGFRKAMDKAGKNVPLLVMRRGNTLFIALNLQ

SEQ ID NO: 604 - protein, 272 aa, Neisseria meningitidis
VVATPIGNLADITLRALAVLQKADIICAEDTRVTAQLLSAYGIQGKLVSVREHNERQMADKIVGYLSDGMVVAQVSDAGTPAVCDPGAKLAGRVREAGFKVVPVVGASAVMAALSVAGVEGSDFYFNGFVPPKSGERRKLFAKWVRAAFPIVMFETPHRIGATLADMVELFSERRLMLAREITKTFETFLSGTVGEIQTALSADGNQSRGEMVLVLYPAQDEKHEGLSESAQNIMKILTAELPTKQAAELAAKITGEGKKALYNLALSWKNK

SEQ ID NO: 605 - protein, 128 aa, Neisseria meningitidis
MNEQELQDLQKMVGVAVNALEDIKAKDISVLETQDKTSLFARMIIASGDSTRQVKALANNVAVDLKEAGFEILSTEGDSGEWTLVDAGDLVVHVMLPAVRDFYDIDTLWGGEKPSFHAGMQKPWHAAD

SEQ ID NO: 606 - protein, 287 aa, Neisseria meningitidis
MKTFFKTLSAAALALILAACGGQKDSAPAASASAAADNGAAKKEIVFGTTVGDFGDMVKEQIQPELEKKGYTVKLVEFTDYVRPNLALAEGELDINVFQHKPYLDDFKKEHNLDITEVFQVPTAPLGLYPGKLKSLEEVKDGSTVSAPNDPSNFARVLVMLDELGWIKLKDGINPLTASKADIAENLKNIKIVELEAAQLPRSRADVDFAVVNGNYAISSGMKLTEALFQEPSFAYVNWSAVKTADKDSQWLKDVTEAYNSDAFKAYAHKRFEGYKSPAAWNEGAAK

SEQ ID NO: 607 - protein, 333 aa, Neisseria meningitidis
LMKIAIYGTKSYDREHFTRANRHFGFELEFFDFMLDAKTAKMAEGAEAVCIFVNDDGSRPVLEKLAQIGVKTVALRCAGFNNVDLKAAEELGLKVVRVPAYSPESVAEHTVGLMLTLNRRIHKAYQRTRDANFSLEGLTGFNMYGKTAGVIGTGKIGIATMRILKGFGMNLLAYDPFCNPEVEKLGGKYVDLDELYAQSDIITLHCPSTPENHYMLNEAAFDKMKDGVMIINTSRGGLIDSAAAIEALKRRKIGALGMDVYENERELFFEDKSNDVITDDVFRRLSSCHNVLFTGHQAFLTEEALGNISEVTLSNIREVGQTGDCGNAVRADG

SEQ ID NO: 608 - protein, 211 aa, Neisseria meningitidis
LNIKYSGIENRFETAILKKNGVRSGFVSFAPNLAAVKLNDYAKVRKRITKTKQKADIVIVMFHGGAEGKQAEHLPFDTEIFYGENRGNVVEFARLAVDSGADVVFGQGPHVTRAVELYRDRFISYSGGNFATYGAINTSGISGIAPIFKIITDKQGKFISGTIIPITQADDKIPKIDPEKTVIGRIIYLNRSDFPNGNGLDVSPDGNITRR

SEQ ID NO: 609 - protein, 158 aa, Neisseria meningitidis
MPIEIERRFLIGNDNWRQYADEPLLLRQGYLSVEKERTVRVRIAGQRAWLTLKGYISEISRSEFEYEIPLADAEKMMETMCPFKMEKWRYPVRWGGSLFEIDVFLGDNAPLVVAEIELPDENADFDRPDWLGREITADGMFTNAYLSRHPFSSWKNAV

SEQ ID NO: 610 - protein, 91 aa, Neisseria meningitidis
MKPNIHPDNYRTVLFFDSSANEGWMIRSCAETHGKTMVWTDGKEYPLFSLDTSSASHPVYTGKQRNVNTEGRASKFNQRFQSVMSSFRKDK

SEQ ID NO: 611 - protein, 344 aa, Neisseria meningitidis
LEDEDFIRAASMLAEEVFGFGIYKESKGSGGRFYERCWLMGSEDVLYGRVHFGGQNNTILFELTGTGCGVAKEGWESRLFAFLTNAIRPKITRVDIAKDFFNGEYSPNQAREDRNKGMFTCHHVKPKGECLGSDWEEDDEAKMTKGKTYGIGSRESSKYVRVYEKGKQLGDKTSTWTRFEIEFKAKDIVIPFEVLQNPGEYFGGAYPICERFVQKATRIHAVKEDKVISADRYLEWVKKQFGRAANGLKFIFPELDKAKLFELIEPSHHKLPKSLAPEAYDCAFLKAQAIHEQPAFKPYKDPYYMYEYYENLEKQLEQQKHVNNEESYNNFIYDKFARLPISWA

SEQ ID NO: 612 - protein, 246 aa, Neisseria meningitidis
MNPLISDFQTPQQRTPVIVALDFANEKDTLGFVRNLDPTLCQIKIGKELFTATGRSLAESLINQGFKLFLDLKYHDIPHTVAQACKVAADMGVWMVDMHASGGRRMMEAAAEAVAGYGTKPLLIGVTVLTSMEQSDLAEIGLNIAPEEQVIRLAKLAQSSGLDGVVCSAQEAAPLRRELGQDFVLVTPGIRLDVAGNNDDQRRIMTPAEALAAGSTYLVMGRPVTQAANPLAVLREVNRVANLEAN

SEQ ID NO: 613 - protein, 120 aa, Neisseria meningitidis
MASSGVNNEIKGKKLSLWAKRQDGSVKWFCGQPVTRKAPTGANNDEVTKTADNEINTKHLPSTCRDASSASRTKTPGFAFKYFQKISRYRVLPESRQMTKKLRHSRAGGNLGLSAQKLIG

SEQ ID NO: 614 - protein, 343 aa, Neisseria meningitidis
MLQTDNLTAAQPQRIVAAQTASAQEELLERALRPKTLDDYIGQDKAKEQLAIFIQAAKKRGEALDHVLLFGPPGLGKTTLAHIIAKELGVNLRQTSGPVLERAGDLAALLTNLDPHDVLFIDEIHRLSPVVEEILYPALEDYRLDIMIGEGPAARSVKIDLPPFTLIGATTRAGMLTNPLRDRFGIVSRLEFYENRDLTTIVSRSAQLLQLDMSEEGAEEIAKRSRGTPRIANRLLRRVRDFADVKNNGTIDGGIADAALSMLDVDAQGLDVMDRKFLEAVLHKFGGGPVGLDNVAAAIGESTDTIEDVIEPYLIQQGFLQRTPRGRMATERAYLHFGLPVEK

SEQ ID NO: 615 - protein, 178 aa, Neisseria meningitidis
VDLREVKLGGETIYEGGFVSISRDKVRLPNGNEGQRIVIRHPGAACVLAVTDEGKVVLVRQWRYAANQATLELPAGKLDVASEDMAACALRELAEETPYTADSVRLLYSFYTAVGFCNEKMYLFEAEGVRLGSTLANDEDEITETVLMSKEEVRQALANDEIKDGKTLIGLQYWLMKD

SEQ ID NO: 616 - protein, 123 aa, Neisseria meningitidis
MIKQNSFVPYPEAMLPKGFKYPQSYLKLAQSTHAINYDEQYSFPWWFENAESNISEVIDIYFEITGIPNLLPFARNQEWAACFDISDKSGNPKIIVVNLDNTKYYETFENFDTWLKEAENDGW

SEQ ID NO: 617 - protein, 375 aa, Neisseria meningitidis
MYTFRPFPKLHTETHIMNIQNIRTLLDTVAVPNTARTLGGEKAVRSVEQRSDGIHIALHFGFPVAHIASETADRIQEILMPETGDTHIHLSIDTEIGTHKVQPGVTTIKGVKNIIAVASGKGGVGKSTTTANLAAAMARMGARVGVLDADLYGPSQPTMLGVDDRKPDQKNQKLIPVESSDGIQVMSIGFLVDTDQAVVWRGPMVSQALQQLMFQSEWDEVDYLFIDLPPGTGDIQLTLSQRIPVTGSVIVTTPQDIALIDARKAVDMFRKVNIPILGVLENMSVHICTNCGHSEALFGTDGGKDLAARLNVPLLGQLPLSLPVREAMDGGTPAQLFDEHPAIARIYTDAAFQIALGIADKGKDFSSRFPKIVVE

SEQ ID NO: 618 - protein, 211 aa, Neisseria meningitidis
LYCLRLRRLVLIFVNPLYRLKHLQTDIRTRKGKTMFPPDKTLFLCLSALLLASCGTTSGKHRQPKPKQTVRQIQAVRISHIDRTQGSQELMLHSLGLIGTPYKWGGSSTATGFDCSGMIQFVYKNALNVKLPRTARDMAAASRKIPDSRLKAGDLVFFNTGGTHRYSHVGLYIGNGEFIHAPSSGKTIKTEKLSTPFYAKNYLGAHTFFTE

SEQ ID NO: 619 - protein, 414 aa, Neisseria meningitidis
MSNENRTCSFCGKSKSHVKHLIEGENAFICDECVSNCIEILHEDGNDGTPSESAGGEPEESGKLPTPAEIVANLNDHVIGQEQAKKALAVSVYNHYKRLRHPKAGANVELSKSNILLIGPTGSGKTLLAQSLARKLDVPFVMADATTLTEAGYVGEDVEQIITKLLGKCDFDVEKAQRGIVYIDEIDKISRKGDNPSITRDVSGEGVQQALLKLIEGTVASVPPQGGRKHPNQEFINVDTTNILFICGGAFAGLEKVIRQRTEKGGIGFGASVHSKDENADITKLFGIVEPEDLIKFGLIPELIGRLPVIATLEELDEDALINILTEPKNALVKQYQALFGMENVELEFEEGALRSIARQAMERKTGARGLRSIVERCLLDTMYRLPDLQGLKKVVVGKAVIEEGREPELVFES

SEQ ID NO: 620 - protein, 333 aa, Neisseria meningitidis
MKRKIWLLPLLAVSAYLQAQTEVRLAVHKSFSLPKGLIARFERANDAKVSIIQAGGANEMLNKLILSRANPIADAVYGLDNANIGKAREMGILAAAQPESAPVAVGLPSALAVDYGYVSINYDKKWFEGKKLPLPQTLQDLTRPEYKNLLVVPSPATSSPGLGFLMANISGLGEEGAFKWWAQMRQNGVKVAKGWSEAYYTDFSHNGGAYPLVVGYAASPAAEVYFSKGKYSEPPTGNLFLKGGVFRQVEGAAVLKGAKQPKLAAKLVQWLQSREVQQAVPSEMWVYPAVKNTRLPDVFRFAQAPTHTTAPAQRDIDANQRGWVSRWIRTVLK

SEQ ID NO: 621 - protein, 674 aa, Neisseria meningitidis
MNDMTLYLIIALVPLAGSLIAGLFGNKIGRAGAHTVTILGVAVSAVLSAYVLWGFIDGSRAKFDENVYTWLTMGGLDFSVGFLVDTMTAMMMVVVTGVSLMVHIYTIGYMHDEKVGYQRFFSYISLFTFSMLMLIMSNNFIQLFFGWEAVGLVSYLLIGFYFKRPSATFANLKAFLINRVGDFGFLLGIGLVLAYFGGSLRYQDVFAYLPNVQNATIQLFPGVEWSLITVTCLLLFVGAMGKSAQFPLHVWLPDSMEGPTPISALIHAATMVTAGLFMVSRMSPIYEMSSTALSVIMVIGAITALFMGFLGVIQNDIKRVVAYSTLSQLGYMTVALGASAYSVAMFHVMTHAFFKALLFLAAGSAIIGMHHDQDMRHMGNLKKYMPVTWLTMLIGNLSLIGTPFFSGFYSKDSIIEAAKYSTLPGSGFAYFAVLASVFVTAFYAFRQYFMVFHGEEKWRSLPEHHSDGHGEEHHGLGKNDNPHESPLVVTLPLILLAVPSVIIGYIAIEPMLYGDFFKDVIFVNADAHPTMHIMKEEFHGALAMVSHSLHSPVLYLAIAGVLSAWLLYVKLPHLPAKIAQAFRPVYVLFENKYYLDALYFNVFAKGTRALGTFFWKVGDTAIIDNGIVNGSARLVGAVAAQVRKVQTGFIYTYAAAMVFGVLVLLGMTFWGLFR

SEQ ID NO: 622 - protein, 169 aa, Neisseria meningitidis
MTMILSILSLFFIIRLLFLAVSIKHEKALIAKGAKQYGKTNSTVLAAVHTLYYLACFVWVWLSDTAFNGISLIGTLTVMASFVILSLIIKQLGEIWTVKIYILPNHQINRSWLFKTFRHPNYFLNIIPELIGIALLCQAWYVLLIGLPIYLLVLFKRIRQEEQAMATLF

SEQ ID NO: 623 - protein, 167 aa, Neisseria meningitidis
MHALHFSASDKAALYREVLPQIESVVADETDWVANLANTAAVLKEAFGWFWVGFYLVDTRSDELVLAPFQGPLACTRIPFGRGVCGQAWAKGGTVVVGDVDAHPDHIACSSLSRSEIVVPLFSDGRCIGVLDADSEHLAQFDETDALYLGELAKILEKRFEASRQAA

SEQ ID NO: 624 - protein, 242 aa, Neisseria meningitidis
MTKQLKLSALFVALLASGTAVAGEASVQGYTVSGQSNEIVRNNYGECWKNAYFDKASQGRVECGDAVAAPEPEPEPEPAPAPVVVVEQAPQYVDETISLSAKTLFGFDKDSLRAEAQDNLKVLAQRLGQTNIQSVRVEGHTDFMGSDKYNQALSERRAYVVANNLVSNGVPVSRISAVGLGESQAQMTQVCEAEVAKLGAKVSKAKKREALIACIEPDRRVDVKIRSIVTRQVVPAHNHHQH

SEQ ID NO: 625 - protein, 65 aa, Neisseria meningitidis; identical to SEQ ID NO: 127

SEQ ID NO: 626 - protein, 561 aa, Neisseria meningitidis
MSMENFAQLLEESFTLQEMNPGEVITAEVVAIDQNFVTVNAGLKSESLIDVAEFKNAQGEIEVKVGDFVTVTIESVENGFGETKLSREKAKRAADWIALEEAMENGNILSGIINGKVKGGLTVMISSIRAFLPGSLVDVRPVKDTSHFEGKEIEFKVIKLDKKRNNVVVSRRAVLEATLGEERKALLENLQEGSVIKGIVKNITDYGAFVDLGGIDGLLHITDLAWRRVKHPSEVLEVGQEVEAKVLKFDQEKQRVSLGMKQLGEDPWSGLTRRYPQGTRLFGKVSNLTDYGAFVEIEQGIEGLVHVSEMDWTNKNVHPSKVVQLGDEVEVMILEIDEGRRRISLGMKQCQANPWEEFAANHNKGDKISGAVKSITDFGVFVGLPGGIDGLVHLSDLSWTESGEEAVRKYKKGEEVEAVVLAIDVEKERISLGIKQLEGDPFGNFISVNDKGSLVKGSVKSVDAKGAVIALSDEVEGYLPASEFAADRVEDLTTKLKEGDEVEAVIVTVDRKNRSIKLSVKAKDAKESREALNSVNAAANANAGTTSLGDLLKAKLSGEQE

SEQ ID NO: 627 - protein, 284 aa, Neisseria meningitidis
LGQTMCQLLGMNCNTPTDIMFSFEGFRRRGGITDHHADGFGIGFFEGKGVRLFHDDKPSANSPVADLVRAYQIKSENVVAHIRKASQGQTSLANTHPFMREMWGGYWLFAHNGHLIDFFPEQGEFFHPVGTTDSERAFCHILNRLRTRFAARPDDDTLFDAIAGLTHEIRKFGLFNFMLSDGIALFAHASTLLHYIVRQAPFGKARLLDDDVMVDFAEVTTPSDRVAVIATLPLTRDETWAQLAVNELVMFREGNIVRHDRPENPVYMSAEEGLEIARAAGVSV

SEQ ID NO: 628 - protein, 149 aa, Neisseria meningitidis
MTDNRGFTLVELISVVLILSVLALIVYPSYRNYVEKAKINAVRAALLENAHFMEKFYLQNGRFKQTSTKWPSLPIKEAEGFCIRLNGIARGALDSKFMLKAVAIDKDKNPFIIKMNENLVTFICKKSASSCSDGLDYFKGNDKDCKLLK

SEQ ID NO: 629 - protein, 419 aa, Neisseria meningitidis
MSMSLAQKLAADSVAAVAEGRNLQDVLAEIRAAHPQLTAQENGALQDIAYGCQRYLGSLKHMLAQMLKKPIDNPQLESLLLAALYQLHYTRNAPHAVVNEAVESIAKIGRGQYRSFANAVLRRFLRERDKLAASCKKDDVAKHNLPLWWVAYLKNHYPKHWHNITAALQSHPPMTLRVNRRHGNAESYLEKLAAEGIAAKALDEYAVTLEEAVPVNRLPGFSDGIVSVQDFGAQQAAYLLNPKDGERILDACAAPGGKTGHILELADCRVTALDIDAGRLKRVEDNIARLGFQTASAACADARDLAAWYDGKPFDAILADVPCTASGVARRNPDVKWLRRPTDALKTARQQEALLDALWQTLKQGGRMLLATCSVFVEENDGQLQKFLNRHADAEPIESRVLLPNKHQDGFYYALIQKH

SEQ ID NO: 630 - protein, 431 aa, Neisseria meningitidis
MLDIQLLRSNTAAVAERLAARGYEFDAARFNALEEQRKAVQVKTEELQASRNSISKQIGALKGQGKHEEAQAAMDQVAQIKTDLEQAAADLDAVQKELDAWLLSIPNLPHESVPAGKDETENVEVRKVGTPREFDFEIKDHVDLGEPLGLDFEGGAKLSGARFTVMRGQIARLHRALAQFMLDTHTLQHGYTEHYTPYIVDDTTLQGTGQLPKFAEDLFHVTRGGDETKTTQYLIPTAEVTLTNTVADSIIPSEQLPLKLTAHSPCFRSEAGSYGKDTRGLIRQHQFDKVEMVQIVHPEKSYETLEEMVGHAENILKALELPYRVITLCTGDMGFGAAKTYDLEVWVPAQNTYREISSCSNCEDFQARRMKARFKDENGKNRLVHTLNGSGLAVGRTLVAVLENHQNADGSINIPAALQPYMGGVAKLEVK

SEQ ID NO: 631 - protein, 64 aa, Neisseria meningitidis
VKHKLASWWKTIKLTANLMAGVPDYENYVAQQRKHNPNAPVMTKLQFQDYCRKRRCGANGGRCC

SEQ ID NO: 632 - protein, 612 aa, Neisseria meningitidis
MCGIVGAIRAHHNVVDFLTDGLKRLEYRGYDSSGIAVNTDGKIKRVRRVGRVQLMEDAAREKGISGGIGIGHTRWATHGGVTEPNAHPHISGGMIAVVHNGIIENFESERKRLEGLGYRFESQTDTEVIAHSINHEYAQNGGRLFEAVQEAVKRFHGAYAIAVIAQDKPDELVVARMGCPLLVALGDDETFIASDVSAVIAFTRRVAYLEDGDIALLASDGIKRLTDKNGLPAERKVKVSELSLASLELGPYSHFMQKEIHEQPRAIADTAEVFLDGGFIPENFGKNAQSVFESIRSVKILACGTSYYAALTAKYWLESIAKIPADVEIASEYRYRSVIADPDQLVITISQSGETLDTMEALKYAKSLGHRHSLSICNVMESALPRESSLVLYTRAGAEIGVASTKAFTTQLVALFGLAVTLAKVRGLVSGEDEARYTEELRQLPGSVQHALNLEPQIAAWAQQFAKKSSALFLGRGIHYPIALEGALKLKEITYIHAEAYPAGELKHGPLALVDENMPVVVIAPNDSLLDKVKANMQEVGARGGELFVFADLDSNFNATEGVHVIRAPRHVGELSPVVHTIPVQLLAYHTALARGTDVDKPRNLAKSVTVE

SEQ ID NO: 633 - protein, 392 aa, Neisseria meningitidis
MAKMMKWAAVAAVAAAAVWGGWSYLKPEPQAAYITETVRRGDISRTVSATGEISPSNLVSVGAQASGQIKKLYVKLGQQVKKGDLIAEINSTSQTNTLNTEKSKLETYQAKLVSAQIALGSAEKKYKRQAALWKENATSKEDLESAQDAFAAAKANVAELKALIRQSKISINTAESELGYTRITATMDGTVVAILVEEGQTVNAAQSTPTIVQLANLDMMLNKMQIAEGDITKVKAGQDISFTILSEPDTPIKAKLDSVDPGLTTMSSGGYNSSTDTASNAVYYYARSFVPNPDGKLATGMTTQNTVEIDGVKNVLIIPSLTVKNRGGKAFVRVLGADGKAAEREIRTGMRDSMNTEVKSGLKEGDKVVISEITAAEQQESGERALGGPPRR

SEQ ID NO: 634 - protein, 655 aa, Neisseria meningitidis
VGNTFKSILVWVALGIGLMAAFNALDGKKEDNGQIEYSQFIQQVNNGEVSGVNIEGSVVSGYLIKGERTDKSTFFTNAPLDDNLIKTLLDKNVRVKVTPEEKPSALAALFYSLLPVLLLIGAWFYFMRMQTGGGGKGGAFSFGKSRARLLDKDANKVTFADVAGCDEAKEEVQEIVDYLKAPNRYQSLGGRVPRGILLAGSPGTGKTLLAKAIAGEAGVPFFSISGSDFVEMFVGVGASRVRDMFEQAKKNAPCIIFIDEIDAVGRQRGAGLGGGNDEREQTLNQLLVEMDGFESNQTVIVIAATNRPDVLDPALQRPGRFDRQVVVPLPDIRGREQILNVHSKKVPLDESVDLLSLARGTPGFSGADLANLVNEAALFAGRRNKVKVDQSDFEDAKDKIYMGPERRSMVMHEDEKRATAYHESGHAIVAESLPFTDPVHKVTIMPRGRALGLTWQLPERDRISMYKDQMLSQLSILFGGRIAEDIFVGRISTGASNDFERATQMAREMVTRYGMSDKMGVMVYAENEGEVFLGRSVTRSQNISEKTQQDIDAEIRRILDEQYQVAYKILDENRDKMETMCKALMEWETIDRDQVLEIMAGKQPSPPKDYSHNLRENADAAEDNAPHAPTREETEAPAPADTASSESEQRSENKA

SEQ ID NO: 635 - protein, 143 aa, Neisseria meningitidis
MDIQTILEKTLPGLGYELVDFELTAQGTLRVFIDKEGGITVEDCATVSNHLSRVFMVEDIDYKNLEISSPGLDRPLKKAADFVRFAGQNAKIKTRLPIDGQKNFIGKIEGCENDTVTISFDGKTVQIGLDNIDKARLRPEFKF

SEQ ID NO: 636 - protein, 123 aa, Neisseria meningitidis
MLFEENPIDGQFAEYECGAGGIRLAGQSFHKPVLVHKDSVCLSQCRTLSDLTPENLLSDVKPVDYPEILIIGTGAAQEFIHPKIMADFSRIGISVECMNTDSAFRTLVFLHSEGRRAWAWLQP

SEQ ID NO: 637 - protein, 167 aa, Neisseria meningitidis
MSDPNLIDPEVFAAEGQNLQGSFLLEELDERVSSHDYPADRQTKISFTLTGGRDRLQRLFLDLNVKADMPLICQRCIKPMPFMLDESSRIVLFSNEESLDESMLADEELEGILIEKELDVRTLVEDQILMSLPFSPRHEDCGSNGTPEKADRDKPNPFAVLAGLKSN

SEQ ID NO: 638 - protein, 147 aa, Neisseria meningitidis
MYLTQHTDYGLRVLIYTAINDDALVNISTIAGTYGISKSHLMKVVTALVKGGFLHSVRGKGGGLRLAAPPDRINIGSVVRHLEPMQLVECMGENNECLITPSCRLTGILGGAMKSFFTYLDGFTLQDLLNKPTYDLLYEPRIPIAVQ

SEQ ID NO: 639 - protein, 248 aa, Neisseria meningitidis
METPTNTPQRSLRQNSIYLLPNSFTIAALFSAFYAITQSMHGRYETAAIAVFISMLLDGMDGRVARLTNSQSAFGEQLDSLADMVSFGVAPALIAYKWQLWQFGKIGYSVAFIYCACAALRLALFNTLIGKVDKRWFIGVPSPTAAALIVGLIWVNHSVEKFPAVHWWALGITLFAGLSMIVQIPFWSFKEINIRRQVPFVGMLLAVLLLLLVTWEPSLVLFLFFLGYSLSGYIMAARRFWKKYRKAD

SEQ ID NO: 640 - protein, 193 aa, Neisseria meningitidis
MKIRWRYGIAFPLILAVALGGLSAWLGRISEVEIEEVRLNPDEPQYTMDGLDGRRFDEQGYLKEHLSAKGAKQFPESSDIHFDSPHLVFFQEGRLLYEVGSDEAVYHTENKQVLFKNNVVLTKTADGKRQAGKVEAEKLHVDTESQYAQTDTPVSFQYGASHGQAGGMTYDHKTGMLNFSSKVKATIYDTKDM

SEQ ID NO: 641 - protein, 274 aa, Neisseria meningitidis
MTTTEVDNWPADADGVQGPELMARFLAHAERFGTEIIFDQINAVDLQKRPFTLKGDMGEYTCDALIVATGASAKYLGLPSEEAFAGKGVSACATCDGFFYKNQDVAVVGGGNTAVEEALYLANIAKTVTLIHRRSEFRAEKIMIDKLMKRVEEGKIILKLESNLQEVLGDDRGVNGALLKNNDGSEQQIAVSGIFIAIGHKPNTDIFKGQLEMDEAGYLKTKGGTADNVGATNIEGVWAAGDVKDHTYRQAITSAASGCQAALDAERWLGSQNI

SEQ ID NO: 642 - protein, 59 aa, Neisseria meningitidis
MAVQQNKKSPSKRGMHRSHDALTAPALSVDSTTGEVHRPHHISPNGMYRGRKVVKAKGE

SEQ ID NO: 643 - protein, 157 aa, Neisseria meningitidis
MKGDRLVIRELNKNLGLLLITINQYFLHARILKNWGFKELGEHFFKQSIVEMKAADDLIERILFLEGLPNLQELGKLLIGESTEEIIACDLTKEQEKHEALLAAIATAEAQQDYVSRDLLEKQKDTNEEHIDWLETQQELIGKIGLPNYLQTAAQED

SEQ ID NO: 644 - protein, 690 aa, Neisseria meningitidis
VRHSTASKTAQTDFRQHQNMMKLNPQQLEAVRYLGGPLLVLAGAGSGKTGVITQKIKYLIVNVGYLPHTVAAITFTNKAAAEMQERVAKMLHKSQTRGLTICTFHSLGMKILREEANHIGYKKNFSILDSTDSAKIIGELLGGTGKEAVFKAQHQISLWKNDLKTPEDVVQTASNAWEQQTARVYASYQETLQSYQAVDFDDLIRLPAVLLQQNSEVRNKWQRRLRYLLVDECQDTNTCQFTLMKLLTGAEGMFTAVGDDDQSIYAWRGANMENLRKMQENYPQMKVIKLEQNYRSTARILKIANKVIENNPKLFTKKLWSKLGEGEPVKVVACQNEQHEADWVVSQIVKQKLIGGDKTQYADFAVLYRGKHQARIFEEALRGARIPYRLSGGQSFFDKAEIKDVLSYVRLLANPNDDPAFLRAVTTPKRGIGDVTLGKLNTYAHEHECSLYEAAQNEEALATLNNTNRQHLQAFMDMFGSYRAKAETGEAGEFINSLLEEIDYENHLMQNEEGKAGEIKWRNVSDLVSWFARKGGEDGKNIIELAQTVALMTLLEGKDEEETDAVSLSTLHAAKGLEYPYVFLVGCEEGVLPHNDSIEEGNVEEERRLMYVGITRAKRQLTLTHCVKRKKQGTWQFPEPSRFIDEMPQEDLKILGRKGGEPIVSKEEGRRNLADIIGRLDNLKKSGAAD

SEQ ID NO: 645 - protein, 45 aa, Neisseria meningitidis
MKISALDHLVLTVADIDRTIAFYTQVLGMEEVSFGNNRKACILED

SEQ ID NO: 646 - protein, 504 aa, Neisseria meningitidis
MTTSKCPVTHLTMNNGAPVADNQNSLTAGPRGPLLAQDLWLNEKLADFVREVIPERRMHAKGSGAFGTFTVTHDITKYTRAKIFSEVGKKTEMFARFTTVAGERGAADAERDIRGFALKFYTEEGNWDVVGNNTPVFFLRDPRKFPDLNKAVKRDPRTNMRSATNNWDFWTLLPEALHQVTIVMSDRGIPAGYRHMHGFGSHTYSFWNEAGERFWVKFHFRTQQGIKNLTNEEAAKIIADDRESHQRDLYEAIERGEFPKWTMYIQVMPEADAEKVPYHPFDLTKVWPKKDYPLIEVGEFELNRNPENFFADVEQSAFAPSNLVPGVGASPDKMLQARLFNYADAQRYRLGVNFRQIPVNRPRCPVHSNQRDGQGRADGNYGSLPHYEPNSFGQWQQQPDFAEPPLKINGDAAHWDYRQDDDDYFSQPRALFNLMNDAQKQALFGNTAAAMGDAPDFIKYRHIRNCYRCDPAYGEGVAKALGLTVEDAQAARATDPALGQPGLL

SEQ ID NO: 647 - protein, 456 aa, Neisseria meningitidis
MPQNTLNIVILAAGKGTRMYSKMPKVLHRIGGKPMLGRVIDTAAALNPQNICVVVGHGKEQVLDTVKRDVVWVEQTEQLGTGHAVKTALPHLAAEGRTLVLYGDVPLIDVETLKTLLEAAGDKVGLLTDVPTDPTGLGRIIRDGNGSVTAIVEEKDASTAQKAVKETNTGILVLPNAKLENWLNSLSSNNAQGEYYLTDLIAKAVSDGIKVRPVRVRASHLAAGVNNKLQLAELERIFQTGQAQELLKAGVTLHDPARFDLRGRLKHGQDVVIDANCIFEGEIELGDNVEIGASCVIKNAKIGANTKIAPFSHLEDCEVGENNRIGPYARLRPQARLADDVHVGNFVEIKNAAIGKGTKANHLTYIGDAEVGSKTNFGAGTIIANYDGVHKHKTVIGNEVRIGSNCVLVAPVTLGNKVTTGAGSAITRNVEDGKLALARARQTVIEGWVRPEKDKQ

SEQ ID NO: 648 - protein, 293 aa, Neisseria meningitidis
MPSENTLFPLPDTLLRPMVEQALSEDLGRRGDITSAAVIAPDKTAKLFLVSREDGVIAGMDLARLAFQTMDPSVRFQAEIRDGQIVRAGQTLAAVEGNARALLAAERTALNYLTHLSGIATATARAVAEVAEYGTDIVCSRKTLPLLRVLQKYAVRAGGGVNHRMGLDDAVLIKDNHLAYCGSIAQAVRQAKQAVGALTCVEIEVDTLAQLDEAIAAGAERILLDNMDDETLKEAANRCHTQTAHPHTVYCEASGGIGFDRLKRVAQTGVDGIALGYLTHSSRSLDIGLDFLA

SEQ ID NO: 649 - protein, 523 aa, Neisseria meningitidis
MLMLERTKSPEVAERALEMAVSLNAFEQAEMIYQKWRQIEPIPGEAQKRAGWLRNVLRERGNQHLDGLEEVLAQADEGQNRRVFLLLAQAAVQQDGLAQKASKAVRRAALKYEHLPEAAVADVVFSVQGREKEKAIGALQRLAKLDTEILPPTLMTLRLTARKYPEILDGFFEQTDTQNLSAVWQEMEIMNLVSLHRLDDAYARLNVLLERNPNADLYIQAAILAANRKEGASVIDGYAEKAYGRGTGEQRGRAAMTAAMIYADRRDYTKVRQWLKKVSAPEYLFDKGVLAAAAAVELDGGRAALRQIGRVRKLPEQQGRYFTADNLSKIQMLALSKLPDKREALRGLDKIIEKPPVGSNTELQAEALVQRSVVYDRLGKRKKMISDLERAFRLAPDNAQIMNNLGYSLLSDSKRLDEGFALLQTAYQINPDDTAVNDSIGWAYYLKGDAESALPYLRYSFENDPEPEVAAHLGEVLWALGERYQAVDVWTQAAHLTGDKKIWRETLKRHGIALLQPSRKPRK

SEQ ID NO: 650 - protein, 716 aa, Neisseria meningitidis
LGSDWVSDGIHSGFHRLMPSERRFRPIPTTRFVRKRITGKIMEVIRYPDSPFKLHQPFQPAGDQPTAIADLLEGLSDGLAYQTLLGVTGSGKTYTMANVIAQSGRPAIIMAHNKTLAAQLYAEMREFFPENAVEYFVSYYDYYQPEAYVPSRDLFIEKDSAINEHIEQMRLSATKNLMTRNDVIIVATVSAIYGIGDPTEYQQMVLSVKEGDTIEQRDIIATLVSMQYERGDLDFKRGSFRVRGDVIDVYPAESSENALRISLFDDEIDRLDMFDPLSGSLIQRVGRYTVFPSSHYVTPRDTVLRACESIKEELRERIEFFAREQRPVEQQRIEQRTRFDLEMLYEMGFCKGIENYSRHFSGKKEGEPPPTLMDYLPDNAIMFIDESHVTVTQIGGMYKGDASRKQNLVDYGFRLPSARDNRPLKFHEFEKVMPQTIFVSATPAKYEEEHAGQVVEQVVRPTGLVDPQIIIRPVATQVDDLMSEINDRIQKGERILVTTLTKRMAEQLTDYYSELGIKVRYLHSDIDTVERVEIIRDLRLGLFDVLVGINLLREGLDIPEVSLVAILDADKEGFLRSHRSLIQTIGRAARNVNGVAILYADKITDSMKAAIDETERRREKQIKFNEEHGIVPQQIKKQVKDIIDGVYHEEDSGKGRRQGKNKVKVGEIHNEEDAIKEIAKLEKAMQQAARDLQFEEASVLRDRIRGIREGLLFGSE

SEQ ID NO: 651 - protein, 540 aa, Neisseria meningitidis
METIPAAQNKAVSPSFSDGISGQTVNNSDKMLYSRPLPRRPKPPFGKAEMISKQEYQAQAAQGYNRIPLVQELLADLDTPLSLYLKLANRPYTYLLESVVGGERFGRYSFIGLPCSHYLKASGKHVDVYQNGEIVEQHDGNPLPFIEAFHNRFKTPEIPSLPRFTGGLVGYFGYETIYNFEHFAHRLKNTTKADPLGTPDILLMLSQELAVIDNLSGKIHLVVYADPSQPDGYERARERLEDIRTQLRQSCAIPLSLGSKHTEAVSEFGEEPFKACVDKIKDYIFAGDCMQVVPSQRMSMEFTDSPLALYRALRTLNPSPYLFYYDFGDFHIVGSSPEILVRRERDDVIVRPIAGTRLRGKTPAEDLANEQDLLSDAKEIAEHVMLIDLGRNDVGRISKTGEVKVTDKMVIEKYSHVMHIVSNVEGRLKDGITNMNILAATFPAGTLSGAPKIRAMEIIEEVEPSKRGIYGGAVGVWGFNNDMDLAIAIRTAVVKNNTLYVQSGAGVVADSDPASEWQETQNKARAVIRAAQMVQEGLDK

SEQ ID NO: 652 - protein, 144 aa, Neisseria meningitidis
MAFGSMNSGDDSPMSDINVTPLVDVMLVLLIVFMITMPVLTHSIPLELPTASEQTNKQDKQPKDPLRLTIDANGGYYVGGDSASKVEIEEVESRLKAAKEQNENVIVAIAADKAVEYDYVNKALEAARQAGITKIGFVTETKAQ

SEQ ID NO: 653 - protein, 195 aa, Neisseria meningitidis
MRAVGHCWKRFPNKAIEYKYKTASCRIGCSDGINREFMKTNFKQKIIEQARSEGLQVTALREQVLDIVLQQSGVIKAYNVLSQMQQQSEGVLAPPTAYRALDFWAEQGVLHKVAAVNGYILCSHAQHECDDHCHDHEEAEAHHSAFILVCTECGTADEQTLSHEWAALRAGVAESGFALKEEHVVLTGICKKCQK

SEQ ID NO: 654 - protein, 515 aa, Neisseria meningitidis
MQLNPAEISDLIKAKIENLSVNAEVRTRGTVISVTDGIVRIHGLSDAMQGEMLEFPGNTFGLAMNLERDSVGAVVLGEYEHIKEGDTVTCTGRILEVPVGRELVGRVVDALGRPIDGKGPINTTLTAPIEKIAPGVIARKSVDQPMQTGLKAIDSMVPVGRGQRELIIGDRQTGKTAVALDAIVNQKGTGVICIYVAIGQKASSIANVVRKLEEHGAMEHTIVVAATASEAAALQYIAPYSGCTMGEFFRDRGEDALIVYDDLSKQAVAYRQISLLLRRPPGREAYPGDVFYLHSRLLERAARVNEHEVEKLTNGEVKGKTGSLTALPIIETQAGDVSAFVPTNVISITDGQIFLETDLFNAGIRPAINAGISVSRVGGAAQTKVIKKLGGGIRLALAQYRELAAFSQFASDLDEATRKQLEHGEVVTELMKQKQFSTLNTAEMALTLWAINNGSYSDVPVAKALAFESEFLSFVRTQHPEVLEAVNASGAMSDESEKTLEAAMKSFKSSYAYQA

SEQ ID NO: 655 - protein, 753 aa, Neisseria meningitidis
MLQIEIDGKQVSVEQGATVIEAAHKLGTYIPHFCYHKKLSIAANCRMCLVDVEKAPKPLPACATPVTDGMIVRTHSAKAREAQEGVMEFLLINHPLDCPTCDQGGECQLQDLAVGYGKTTSRYTEEKRSVVGKDMGPLVSAEEMSRCIHCTRCVRFTEEIAGLQEIAMVNRGEHSEIMPFIGKAVETELSGNVIDLCPVGALTSKPFRFNARTWELNRRKSVSAHDALGSNLIVQTKDHTVRRVLPLENEAINECWLSDRDRFAYEGLYHESRLKNPKIKQGGEWMDVDWKTALEYVRSAIECIAKDGNQNQVGIWANPMNTVEELYLAKKLADGLGVKNFATRLRQQDKRLSDGIKGAQWLGQSIESLADNDAVLVVGANLRKEQPLLTARLRRAAKDRMALSVLAGSKEELFMPLLSQEAAHPDEWAGRLKNLSANAEHAVTASLKNAEKAAVILGAEVQNHPDYAAIYAAVQELADATGAVLGILPQAANSVGADVLGVNSGESVAEMANAPKQAVLLLNVEPEIDTVDGAKAVAALKQAKSVMAFTPFVSETLLDVCDVLLPIAPFTETSGSFINMEGRLQSFHGVVQGFGDSRPMWKVLRVLGNLFDLKGFEYHDTVAILKDALDAESLPSKLNNRAASTQKDFQTASSRLVRVGGVGIYHTDAIVRRSAPLQETSHAAVPAARVNPNTLARLGLQDGQTAVAKQNGASVSVAVKADAGLPENVVHLPLHTENAALGALMDTIELAGA

SEQ ID NO: 656 - protein, 230 aa, Neisseria meningitidis
LIGFFSVGIIMNLKLVFESGDPVLIGVFVLMLLMSIVTWCLVVLRCIKLYRARKGNAAVKRHMRDTLSLNDAVEKVRAVDAPLSKLAQEALQSYRNYRRNEASELAQALPLNEYLVIQIRNSMAQIMRRFDYGMTALASIGATAPFIGLFGTVWGIYHALINIGQSGQMSIAAVAGPIGEALVATAAGLFVAIPAVLAYNFLNRGTKILTQDLDAMAHDLHVRLLNQKDS

SEQ ID NO: 657 - protein, 289 aa, Neisseria meningitidis
MKPIRKAVFPVAGMGTRFLPATKASPKEMLPIVDKPLIQYAVEEAVEAGCTEMVFVTGRNKRSIEDHFDKAYELETELEMRHKDKLLEHVRNILPPNITCLYIRQAEALGLGHAVLCARAAIGDEPFAVILADDLIDAPKGALKQMVEVYGRSGNSILGVETVEASQTGSYGIVETEQLKQFQRITGIVEKPKPEDAPSNLAVVGRYILTPRIFDLLTNLPRGAGNEIQLTDGIAKLLDHEFVLAHPFEGTRYDCGSKLGYLEATVAYGLKHPETGEPFRRLLEKYRTE

SEQ ID NO: 658 - protein, 151 aa, Neisseria meningitidis
MKKPKILFVCLGNICRSPMAEYILRRRAAEAGIPLEADSAGTSGWHDGEDMHRETAKILKKHGIDASGFTSRKIRQSDAAAFDCIIAMDGKNLSELERTFGRRPEKIFKLTDLIPESGYDHVPDPWYTGDFEETFRLADAGCRALLEKISK

SEQ ID NO: 659 - protein, 348 aa, Neisseria meningitidis
MPSEAFRRHRAYRENKLQPLVSVLICAYNVEKYFAQSLAAVVNQTWRNLEILIVDDGSTDGTLAIAKDFQKRDSRIKILAQAQNSGLIPSLNIGLDELAKSGMGEYIARTDADDIAAPDWIEKIVGEMEKDRSIIAMGAWLEVLSEEKDGNRLARHHRHGKIWKKPTRPEDIADFFPFGNPIHNNTMIMRRSVIDGGLRYNTERDWAEDYQFWYDVSKLGRLAYYPEALVKYRLHANQVSSKYSIRQHEIAQGIQKTARNDFLQSMGFKTRFDSLEYRQIKAVAYELLEKHLPEEDFERARRFLYQCFKRTDTLPAGAWLDFAADGRMRRLFTLRQYFGILHRLLKNR

SEQ ID NO: 660 - protein, 146 aa, Neisseria meningitidis
MDVKYEFTLPSSSGADFHSAEHLPLVVYFYPKDSTPGCTTEGLDFNARLEQFEALGYTVVGISRDGVKAHQNFCAKQGFRFELLSDKDETVCRLFDVIKLKKLYGKESLGIERSTFVLNKDGEIAHEWRKVKVAGHAQEVLETLSR

SEQ ID NO: 661 - protein, 254 aa, Neisseria meningitidis
LFKWLIFWIVRMNTKTELQKLLEEDISTLTETLICADALPPRYVRSIATPIVRRWLIDKQLNILAKEIGLTIELPILDTSLVFEKLSTLENKVNFYMAGGVYLGGEFISSIYHSSQEFSGEPIIYAEPNIILCPAEKFLTLKRVFHNGNIFNMNQIITFLSNKQGGVHFDKNYDKYKTWQVAIEKAANFLKLGNPYNEDKLSLSEEHDTILVVLPLEKGYEWNCLEIEVLSAAQSLANIYCNKVRLIDGHVWKE

SEQ ID NO: 662 - protein, 140 aa, Neisseria meningitidis
MSEQTALAVCADGVETALAEAASLLEEGCGSVLVLAADDPLPEGYAVSATRAPFAYALAMVLTKGTRYSLTLSASDDMPSEAGMLPEAYWSGLEWVRFLLNGSRECRRVYRNREWLWQPASCRLKISAMSAPSTTWYRRY

SEQ ID NO: 663 - protein, 139 aa, Neisseria meningitidis
MKSKLTVVYYDLESNIAEEILSGNIMPDGNFLIQEIPLFAPNLALNDIVAIEREDKMLFFDHLIKASGNTTINIVVLDHFPKDLLAAIEEHSGKIRKNGENYLSVNFPPKKYNSDLKGILNRYEEANILSYREACLGFS

SEQ ID NO: 664 - protein, 263 aa, Neisseria meningitidis
MMNPKIVFFDIDDTLYRKYTDTLRPSVKTAVAALRGKGILTALATGRSLATIPEKVRDMMAETGMDAVVTINGQFALLHGKTVREVPMDAGLMGRVCAHLDGLGMDYAFVGGEGIAVSALSECVCRALKHIASDFFADKDYFSSKPVYQMLVFAEENEMPLWSDIVEQEGLKTVRWHEEAVDLLPAGASKTDGIRSVVEALGWEMADVMAFGDGLNDVEMLSEVGFGVAMGNGEQAAKEAAKYVCPSVDEDGVLRGLQDLGVI

SEQ ID NO: 665 - protein, 229 aa, Neisseria meningitidis
MLFEGLPCLAVWCKNRLSAVLPVGGLNVSENLLEIETHPFDSVLPPKAAVMMMGTFPPKEDKRAMQFHYPNFQNDMWRVYGLVFFNDAAHFQRLSEKAFDAEKIKAFLRERGIASCPTVLKAAREHGNASDKFLKVVETVDLAAVLAKIPECRHICTTGGKATEILLDIQGGGIKMPKTGETVPFPFAGRDLTLTRLPSTSRAYPLSLAKKAAVYRAFFEMAGLCEKQL

SEQ ID NO: 666 - protein, 194 aa, Neisseria meningitidis
MISRLTGKLVEKNPPQIVIDVNGVGYEADVSMQTFYNLPPVGESVQLFTQLIIREDAHLLFGFATAEERKTFRQLIKVGGIGAKTALGILSAMTADELAQAVAEEDVKRLSSAPGIGKKTAERMVLELRGKLVAHTVTDGLFAAAPAADETEDIVSTLLALGYSEREAKAAVKGVPEGTDVGEGVRLALKNLLK

SEQ ID NO: 667 - protein, 324 aa, Neisseria meningitidis
MTEYPGIGSPLFYGVFFAAVLVMIALDMFSLKKNSSHKVGVKEALAWSGLWVAVSCLFAGWLYFKLAGNPGYGAAVAKEKVLEFFTGYILEKSLAVDNIFVFLMIFGYFKVAPQFQHRVLLYGVLGALVLRTVMIFVGAALVQQFEWILYLFGAFLLYTGIHMMKPEGDEEGDLANSRLLNAVKKVVPVGTEFHGEKFFTVENGKKIATPLFLVLVMIELSDVVFAVDSIPAVFAVTTDPFIVLTSNIFAILGLRAMYFLLADVAERFIFLKYGLAFVLGFIGVKMLVMHWVHIPISVSLSVVFGALGASILTSLIYTKKQPDK

SEQ ID NO: 668 - protein, 281 aa, Neisseria meningitidis
MRRPYTASLAALPYFYVNLPHCGIEMNFTDTHCHLADAALRENLPHILTAARKVGVKRFIVPATCPQDWQSVAELSEMPSEHGQIRIALGIHPWFSDGIAERDCVRLEAMLARYPQAWVGEIGLDFYDKTQTPQQRERQIQVFSRQLAIAQTLRRRVIIHNLKATADIAAAVKQTGFAQGGIVHAFSGSAEEARVLTKLGFKIGIGSLLLNPNARKVRDTLKALNDGDFVLETDSPFMLKKEINTPANILWIAEIAAQIRGVGVADIAAITERNADSLLRP

SEQ ID NO: 669 - protein, 289 aa, Neisseria meningitidis
VHCWARQTSNLQNNSENGIWRQDVQTGVLPPRRTGNTMKQKKTAAAVIAAMLAGFAAAKAPEIDPALVDTLVAQIMRQADRHAEQSQKPDGQAIRNDAVRRLQTLEVLKNRALKEGLDKDKDVQNRFKIAEASFYAEEYVRFLERSETVSESALRQFYERQIRMIKLQQVSFATEEEARQAQQLLLKGLSFEGLMKRYPNDEQAFDGFIMAQQLPEPLASQFAAMNRGDVTRDPVKLGERYYLFKLSEVGKNPDAQPFELVRNQLEQGLRQEKARLKIDAILEENGVKP

SEQ ID NO: 670 - protein, 354 aa, Neisseria meningitidis
MIKSFELEKFGPISLLKADNLGKINLIIAENSKGKTFILKALYSVLKSHEEAHKGKNIRDFSEELRDKLYWTFQVEEIGDLVTRGKENPNERPLKLSMTLEDSSSVLFSFGRTTKKLIKPELYELSPRINANSIFLPPKEVLSLFDVIKKSEEEKRFGFDATYIDLVKALDIKPTKGRNYPEAAEARKDLEALFGGYVSYNDKKKAWVYEKDRQTFSINSTAEGVKKIGILDTLLGNRFLSPGSILFIDEPEANLHPKAINQFLEILFSLSKSKLGIQIFMSTHSYFVIKKLCLLARKHSESIPVFMPGKEKEQATWVQENLQNSMPDNEIIGESIRLFREEIGVLSPETAWIG

SEQ ID NO: 671 - protein, 138 aa, Neisseria meningitidis
MLKHLAFLLPAMMFALPTSAAVLTSYQEPGCTYDGGVGKDGLPSGKGIWRCRDGRGYTGSFKNGKFDGQGVYTVSANREIFIEPFNSDSTKFRNMVLSGTFKKGLAHGRFTVSQNGETLFIMKCENGMIQEVKLPKNK

SEQ ID NO: 672 - protein, 518 aa, Neisseria meningitidis
MDFSWLAEPHTWIGFATLLVLEVVLGIDNLVFVAILANKVQPARRDRARIIGLGLAVVIRIIMLAFMAHIITLTEPLFQIGGLAVSGKDMIMLAGGIFLLYKATTELHERLEGHNRFTVADNQKKHAPFWGVVAQILILDAVFSIDSVITAVAMVDHIVVAMGAVVVAMAVMISASKLLTEFVDRHPTVVMLCLGFLLMIGFSLIAEAFHFHIPKGYLYAAIGFSILIELFNQISQRNSRKNDYIGSSWRKRTAENVLGMMGIRESVLADAGGESGDDAHFEENEKSMIRSVLTLAERPIMGVMIPRRDIERLDISQSREEQYAQLQNTPYSRLLVVGKAGVDEPLGYINKKDLLSQLLETGGLDIQTALRQPLVLPDGTTALGALELFRQSSADYALVVDEFGAVLGMVTMKDLLEAIAGDFPEEFEREEEPAVQGNPDESLTVEGALEYVELASQLNLPQQEEDADFHTVAGLIMEELQTIPDVGDFADFHGWRFEVVEKEGQRIERVKITKLPEE

SEQ ID NO: 673 - protein, 168 aa, Neisseria meningitidis
MVDAWSVPDFESKICPPEALAARLALLPRPLVFTNGCFDILHRGHVTYLAQARSMGGALVLALNTDASVRRLGKGGDRPINPLENRAAVAAALESVDLVTWFDGDTPAALIEAVKPEILVKGGDWAADKIVGAAETLARGGQVFSIPFLHQTSTTKTLAKIRAAEGGK

SEQ ID NO: 674 - protein, 167 aa, Neisseria meningitidis
MSDEFNRFIERVLSHEGGYANHPKDPGGETNWGITKRTAQANGYNGSMRAMTREQAIGIYRKAFWERYRADQMPEAVAFQFFDACVNHGYGNAVRMLQRAAGVADDGIIGEISLKAINSLPENDLLLRFNAERLVFYTKLSTFTSFGKGWVRRVAQNLIHASADNTD

SEQ ID NO: 675 - protein, 230 aa, Neisseria meningitidis
MGQKINPTGFRLAVTKDWASKWFAKSTDFSTVLKQDIDVRNYLRQKLANASVGRVVIERPAKSARITIHSARPGVVIGKKGEDIEVLKRDLQVLMGVPVHVNIEEIRRPELDAQIIADGIAQQLEKRVQFRRAMKRAMQNAMRSGAKGIKIMTSGRLNGADIARSEWYREGRVPLHTLRANVDYATSEAHTTYGVLGLKVWVYTEGNIKSSKPEHESKQRKAGRRNAAAN

SEQ ID NO: 676 - protein, 197 aa, Neisseria meningitidis
MASIQNLYETVVGVLGDQASKVISALGEITVECLPEHYISVMTALRDHEELHFELLVDLCGVDYSTYKNEVWQGKRFAVVSQLLSVKNNQRIRVRVWVSDDDFPVVESVVPVYNSADWYEREAFDLYGIMFNNHPDLRRILTDYGFVGHPFRKDFPISGYVEMRYDEEQKRVIYQPVTIEPREITPRIVREENYGGQ

SEQ ID NO: 677 - protein, 451 aa, Neisseria meningitidis
MSGIAEVLHNLGFKVSGSDQARNAATEHLGSLGIQVYPGHTAEHVNGADVVVTSTAVKKENPEVVAALEQQIPVIPRALMLAELMRFRDGIAIAGTHGKTTTTSLTASILGAAGLDPTFVIGGKLNAAGTNARLGKGEYIVAEADESDASFLHLTPIMSVVTNIDEDHMDTYGHSVEKLHQAFIDFIHRMPFYGKAFLCIDSEHVRAILPKVSKPYATYGLDDTADIYATDIENVGAQMKFTVHVQMKGHEQGSFEVVLNMPGRHNVLNALAAIGVALEVGASVEAIQKGLLGFEGVGRRFQKYGDIKLPNGGTALLVDDYGHHPVEMAATLAAARGAYPEKRLVLAFQPHRYTRTRDLFEDFTKVLNTVDALVLTEVYAAGEEPIAAADSRALARAIRVLGKLEPIYCENVADLPEMLLNVLQDGDIVLNMGAGSINRVPAALLELSKQI

SEQ ID NO: 678 - protein, 107 aa, Neisseria meningitidis
VPEAYDDGGRGHMPPVQNQVGTDDFRAFSCENGLSVRVRHLDSGKVALRLDGRRAVLSSDVAASGERYTAEHGLFGNATEWHQKGGEAFFGFTDAYGNSVETSCRAR

SEQ ID NO: 679 - protein, 419 aa, Neisseria meningitidis
MMNAAQLDHTAKVLAEMLTFKQPADAVLSAYFREHKKLGRQDRHEIAETAFAALRHYQKISTALRRPHAQPRKAALAALVLGRSTNISQIKDLLDEEETEFLGNLKARKTEFSDGLNTAAELPQWLVEQLQQHWNEEEILAFGRSINQAAPLDIRVNTLKGKRDKVLPLLQAESADAEATPYSPWGIRLKNKIALNKHELFLDGTLEVQDEGSQLLALLVGAKRGEIIVDFCAGAGGKTLAIGAQMANKGRIYAFDIAEKRLANLKPRMTRAGLTNIHPERISSEHDTRIARLAGKADRVLVDAPCSGLGTLRRNPDLKYRQSAETVANLLEQQHSILDAASKLVKPQGRLVYATCSVLPEENELQVERFLSEHPEFEPVNCAELLQSLKVDLDTGKYLRLDSARHQTDGFFAAVLQRK

SEQ ID NO: 680 - protein, 118 aa, Neisseria meningitidis
MDKIFLHGMKADTLIGVYGWERERLQTLIVDLDIGVPEKAGSDDDIANTVHYAEVCETLRRHLKEQDFLLLEALAEYIADLVLGYFGAVWVRVKIVKPGILEGVREVGVEIERGKRED

SEQ ID NO: 681 - protein, 156 aa, Neisseria meningitidis
VNINATLFAQIIVFFGLVWFTMKFVWPPIAKALDERAAKVAEGLAAAERGKSDFEQAEKKVAELLAEGRNQVSEMVANAEKRAAKIVEEAKEQASSEAARIAAQAKADVEQELFRARESLREQVAVLAVKGAESILRSEVDASKHAKLLDTLKQEL

SEQ ID NO: 682 - protein, 416 aa, Neisseria meningitidis
MPSESPSDGIARLRGTKAEKPFAPYFQTRYTCRRCFQPFDYPQPPSLRRRFACQRHCAAVNTKEHIMTVSPVALRRKTECKPHPTARYWKKCDVEALFGLPFLELVHQAAEVHRQNFNPREIQLSTLLSIKTGGCPEDCAYCPQSAHHNTNLGKEQMMDVDEIVEKAKIAKSRGASRFCMGAAWRGPKPKDVETVSAIIKAVKGLGMETCGTFGMLEEGMAEDLKEAGLDYYNHNLDTDPDRYNDIIHTRRHEDRMDTLGKVRNAGLKVCCGGIVGMNETRAERAGLIASLANLDPQPESVPINRLVKVEGTPLDDAEDLDWTEFVRTIAVARITMPQSYVRLSAGRSNMPEAMQAMCFMAGANSIFYGDKLLTTGNPDEDGDRILMEKLNLYPLQFELEGEVAEVEKASGIKVDY

SEQ ID NO: 683 - protein, 188 aa, Neisseria meningitidis
MPLRADSTRESPETALLTKVNCHNTIFHTAIKYIVRNIWIKGKAVPLPAPCRFAKPAASFLSMALLSCQLSHAATAYIPPNDFQPNCDIRRLGLTQSQHNELRKIRTAFKMAGDRARLKVMHSEHSRRRSVVEIISSDVFNRNEARDYVESRYLSGMDFAVDELEIQHRFFHILTPQQQQMWLSSCLK

SEQ ID NO: 684 - protein, 163 aa, Neisseria meningitidis
MRHILSVLIENESGAMSRVVGLFSARDYNIDSLAVAPTEDKTLSRMTIVTHGDEQVIEQITKQLNKLIEVIKVVDLNESRFVERELMLVKVRAAGKDRDEFLRLTEIYRGSIIDVTDRSYTIEITGSTDKLDSFLETVGRAQILETVRTGAAGIGRGERILKI

SEQ ID NO: 685 - protein, 356 aa, Neisseria meningitidis
MYRRKGRGIKPWMGAGAAFAALVWLVFALGDTLTPFAVAAVLAYVLDPLVEWLQKKGLNRASASMSVMVFSLILLLALLLIIVPMLVGQFNNLASRLPQLIGFMQNTLLPWLKNTIGGYMEIDQASIIAWLQAHTGELSNALKAWFPVLMRQGGNIVSSIGNLLLLPLLLYYFLLDWQRWSCGIAKLVPRRFAGAYTRITGNLNEVLGEFLRGQLLVMLIMGLVYGLGLVLVGLDSGFAIGMVAGILVFVPYLGAFTGLLLATVAALLQFGSWNGILSVWAVFAVGQFLESFFITPKIVGDRIGLSPFWVIFSLMAFGQLMGFVGMLAGLPLAAVTLVLLREGVQKYFAGSFYRGR

SEQ ID NO: 686 - protein, 177 aa, Neisseria meningitidis
MGGEDKGLALLGGKALIDHVIDRVRPQVSHIAISTNRNLEEYARRSPHIFPDARQWQHFGPLSALCTAANDLQLATADWLLVVPCDMPYLPGDLVARFETVSKRTPLCNAYYVETPITMHYNIMYIRPQILQSAIPYLFSGMKTLRSWLQQQRARPVRFEFDGHFADLNTQIDLQEG

SEQ ID NO: 687 - protein, 467 aa, Neisseria meningitidis
MTLLNLMIMQDYGISVCLTLTPYLQHELFSAMKSYFSKYILPVSLFTLPLSLSPSVSAFTLPEAWRAAQQHSADFQASHYQRDAVRARQQQAKAAFLPHVSANASYQRQPPSISSTRETQGWSVQVGQTLFDAAKFAQYRQSRFDTQAAEQRFDAAREELLLKVAESYFNVLLSRDTVAAHAAEKEAYAQQVRQAQALFNKGAATALDIHEAKAGYDNALAQEIAVLAEKQTYENQLNDYTGLDSKQIEAIDTANLLARYLPKLERYSLDEWQRIALSNNHEYRMQQLALQSSGQALRAAQNSRYPTVSAHVGYQNNLYTSSAQNNDYHYRGKGMSVGVQLNLPLYTGGELSGKIHEAEAQYGAAEAQLTATERHIKLAVRQAYTESGAARYQIMAQERVLESSRLKLKSTETGQQYGIRNRLEVIRARQEVAQAEQKLAQARYKFMLAYLRLVKESGLGLETVFAE

SEQ ID NO: 688 - protein, 96 aa, Neisseria meningitidis
MAESKRVQRLLRVFIALDEHPIIGLSNKDLSVGLGLTPSQVSRDIDDLVASGLVIKLENGNYAYGIKTLQIAERFRQQHERLQSKIAEIGKRVDVD

SEQ ID NO: 689 - protein, 530 aa, Neisseria meningitidis
MSIVEIKVPDIGGHENVDIIAVEVKAGDTIAVDDTLITLETDKATMDVPADAAGVVKEVKVKVGDKISEGGVILTVETGAAAAEAAPAAAEAQPAPAAAPVAAGGATVQVAVPDIGGHTDVDVIAVEIKVGDTVAEDDTLITLETDKATMDVPCTAAGVVKAVFLKVGDKVSEGSAIIEVETVGSAAAAPAQAAQAAAPAAAPPPTAAAAPAAAPAAAKIDEAAFAKAHAGPSARKLARELGVDLGQVKGTGLKGRIVGDDIKAFVKSVMQGGAAKPAAAGASLGSGLDLLPWPKVDFSKFGNVEVKELSRIKKISGQNLSRNWVVIPHVTVHEEADMTELEEFRKQLNKEWEREGVKLSPLAFIIKASVSALKAFPEFNASLDGDNLVLKNYFNIGFAADTPNGLVVPVIKDVDQKGLKQISQELTELSKKAREGKLKPQEMQGACFTISSLGGIGGTGFTPIVNAPEVAILGVCKSQIKPVWNGKEFAPRLMCPLSLSFDHRVIDGAAGMRFTVFLAKLLKDFRRITL

SEQ ID NO: 690 - protein, 295 aa, Neisseria meningitidis
MYTGRFAPSPTGLLHIGSLLTAAASYADARSNGGKWLVRMEDLDPPREMPGAASHILHTLEAFGFEWDGEVAYQSRRYALYEETLCRLKTAGLVYPCHCSRKDWQAAARRGADGFVYNGRCRHPGQRPAPQGKQPAWRIRVPDRDIGFSDGIVGGYAQNLARDIGDFVLLRADGYWAYQLAVVADDAEQGVTHIVRGQDLLVSTPRQIYLQQCLGVPTPQYAHLPLLTNAQGQKWSKQTLAPALDLNRREQLLRQVFRYLNLPEAPETDRPAELLDWAVAHWDMDKVPKHAVTPP

SEQ ID NO: 691 - protein, 327 aa, Neisseria meningitidis
MKNFLSLFTSILMSALIAVWFSQNPINAYWQQTYHRNSPLEPLAAYGWWRSGAALQENAYTLSDGIKAFLSGETPPTAQDGGSADMPSEAATSEAVPQTGETEWKQDTDTAAVRSGDKVFFVGDSLMQGVAPFVQKSLKQQYGIESVNLSKQSTGLSYPSFFDWPKTIEETLQKHPEISVLAVFLGPNDPWDFPVGKRYLKFASDEWAQEYLKRVDRILEAAHTHRVQVVWLGIPYMKKAKLDGQMRYLDKLLSEHLEGKIILIPTAHTLSGGEDRHTDSVNVNGKPVRYRSKDGIHFTAEGQKLLAAKIMEKIVFEPSTQPSSTQP

SEQ ID NO: 692 - protein, 111 aa, Neisseria meningitidis
VGMTGFNDTADIASTPSDIKGKYVEKVEVKNGVVTATMLSSGVNKEIQGKKLSLWAKRQDGSVKWFCGQPVTRDANNASADAVNKVTGNGNDKIDTKHLPSTAPTRKSTPN

SEQ ID NO: 693 - protein, 448 aa, Neisseria meningitidis
MSDNVPTIAAVATAPGRGGVGVIRISGKNLLPMAQALCGKTPKPRVATYADFTDADGQAIDSGLLLFFAAPASFTGEDVIELQGHGGPVVMDMLLNRCLELGARLAEPGEFTKRAFLNDKLDLAQAEGVADLIDASSRSAARLALRSLKGDFSRRIHGLVEDLITLRMLVEATLDFPEEDIDFLEAADARGKLDGLRRAVDDVLANAQQGAILREGLNVVLVGAPNVGKSSLLNALAGDEVAIVTDIAGTTRDAVRERILIDGVPVHIVDTAGLRETDDVVERIGIERSRKAVSEADVALVLVDPREGLNEKTRAILDALPSELKRIEIHSKSDLHAHAAGGFGTGAETVIALSAKTGDGLDALKRTLLREAGWQGEGEGLFLARTRHVNALKAAQEELSLAALCGNHQIELFAEHLRLAQVACGEITGEFTADDLLGVIFSRFCIGK

SEQ ID NO: 694 - protein, 177 aa, Neisseria meningitidis
MAEFATIARPYAKALFGLAQEKSQIESWLGGLEKLAAVVQEGKVASLIDRPETNASEKADILIDLVGLKDKELKNFVIVLAGQKRLSILPEVYAQYQDLTLSFNHIKSAVIYSAYPLTDKQVGELAQMLNKRFDSELKISVEIEPELIGGIKVEVGDQVLDLSVRGKLSALYTTMTN

SEQ ID NO: 695 - protein, 290 aa, Neisseria meningitidis
MSWLDKILPPKIKNRSKDGSSNVPEGLWHKCPSCSATVYSTELQQNNQVCPKCNHHNPLSARQRLNLLLDEEGREEVAGNVKPIDPLKFKDGKKYPDRLSAARKLTGEDDALVVMKGKMNGLPVVVAAFEFRFIGGSMGSVVGERFVQGIRRAVADNCPFVCVAASGGARMQEGVNSLMQMTKTSAALHLLTEKRLPFISVLTDPTMGGVSASFAFLGDVVLAEPNALIGFAGPRVIEQTVRETLPEGFQRAEFLLEKGAIDQIVDRRDMKRRISDLITLLCRQDKVSAA

SEQ ID NO: 696 - protein, 203 aa, Neisseria meningitidis
MITTYKTITSLTQAEFKDKGSRFIAFAYPIRTLADVKKYLDPLKEEHHKARHWCYAYRLGVDGVQFRANDDGEPSGSAGRPILGQIDSVGITDVLVVVVRYFGGTLLGVPGLIHAYKEATAQALAVAEVVEKNIEKTVWLKCEYPFLNEAIRIAKQYQADILERDLQLDCRLTVSLSLVNYEACVAAWKNTRQIEVNTEKPFE

SEQ ID NO: 697 - protein, 243 aa, Neisseria meningitidis
LERRAKTTYNKPVYHPSECRTVNQLIFDFAAHDYPSFDKFLGTENAELVYVLRHKHGQFIYVWGEEGAGKSHLLQAWVAQALEAGKNAAYIDAASMPLTDAAFEAEYLAVDQVEKLGNEEQALLFSIFNRFRNSGKGFLLLGSEYTPQQLVIREDLRTRMAYCLVYEVKPLTDQEKIDALASMAAARQVTVDSEIFEYLLKHWRRDMDSLMMMLDTLDNYAVTMGKRITLPLLRQLLKQQETQ

SEQ ID NO: 698 - protein, 173 aa, Neisseria meningitidis
VKDSLMDAFDFFMQGNFKKIATEQGLDRKYFIFQYIVCNLSAISSFCLMKIIHTYTILYILIAVIGIINGFILRNRVLSIVKNKQKFLSDMFPLEMPFFSRVYKIPILARFLNRGMKWLYLQNFFCLVMICFSISLILNEERGWMPYFACYWFGLCYPVSTYYVFLSRDYKHI

SEQ ID NO: 699 - protein, 88 aa, Neisseria meningitidis
MDFEFGFKTLWPIATAAFWFWVNGISGRLKEADKRIDDLKEELHAVKLSYHTKQDAKADRDNIAASLGRIENKLEKVNEKLDRKADKS

SEQ ID NO: 700 - protein, 250 aa, Neisseria meningitidis
MTDILIDNTATETVRTLIRAFPLVPVSQPPEQGSYLLAEHDTVSLRLVGEKSSVIVDFASGAAQYRRTKGGGELIAKAVNHTAHPTVWDATAGLGRDSFVLASLGLAVTAFEQHPAVACLLSDGIRRALLNPETQDTAAHINLHFGNAAEQMPALVQTQGKPDIVYLDPMYPERRKSAAVKKEMTYFHRLVGEAQDEAALLHTARQTAKKRVVVKRPRLGEHLAGQAPAYQYTGKSTRFDVYLPYGTDKG

SEQ ID NO: 701 - protein, 106 aa, Neisseria meningitidis
MFGKQLFEEVGSKISETIANSPAKDVEKNIKAMLGGAFNRMDLVTREEFDIQQQVLIKTRTKLAALEARLAKLEAVQNPEQAALEAAEAAAEEAVAEIRQQTEAGE

SEQ ID NO: 702 - protein, 950 aa, Neisseria meningitidis
MKLSELFNPDEFAARHLSFGDEAALLAAVGEKSMDDFVGNTVPQSIRMPSELDLPEALTEADALAKLKGIASKNMINKSYIGLGYYPTRVPNVILRNVLENPGWYTAYTPYQAEIAQGRLEALLNFQQVCIDLTGFPVAGASLLDEATAAAEAMAMAHRVGKVKSERFFVDARVYPQTLDVMKTRAKYFGFELVVGDFAQADEGEYFGALFQYVGKDGDVQDLQDVIGRLKAKGTIVAVSADIMSLVLLKSPAELGADIALGNTQRFGVPMGFGGPHAAYFAFKDEFKRSAPGRIIGVSKDASGKPALRMALSTREQHIRREKATSNICTAQALLANLAGMYAVYHGPEGVKRIANRIHALASAFADALVSDGINVVHKVFFDTVTVDFGNKEKADQVFAAALESGYNLRRVNDTQVAAAFHETSACEDLVDLYRAFTGKDTFAFADDVKGRLNAELLRQDDILQHPVFNRYHTEHEMLRYLKKLEDRDLAMNRSMISLGSCTMKLNATAEMLPITWAEFSDIHPYAPEAQTAGYRELLADMENSLKSITGFDAISFQPNSGAQGEYSGMLAIRRYQEAQGEAQRNICLIPKSAHGTNPATAAMLGLKVVVVDTDEHGNVNIDDLKAKAEQHRDALSAIMITYPSTHGVYEEGIRDICRIVHENGGQVYMDGANLNAQIGIMQPAEVGADVLHMNLHKTFCIPHGGGGPGMGPIGLKAHLAPFAPGHALTDTHSASADQTAVAAAAFGSASILPITWMYLTMMGKQGMEQATRWALLNANYVAKRLSEDYPILYTGKNGRVAHECIVDLRPLKAESGITETDIAKRLMDYGFHAPTVSFPVAGTLMIEPTESESKAELDRFIAALKQIKQEVLKVGRGEWPKEDNPLVNAPHTASDVTGEWAHPYSREEAVFPLPFVREHKFWPSVNRVDDVYGDRNLVCSCPPMENYED

SEQ ID NO: 703 - protein, 1068 aa, Neisseria meningitidis
MRTTPTFPTKTFKPAAMALAVATTLSACLGGGGGGTSAPDFNAGGTGIGSNSRATTAKSAAISYAGIKNEMCKDRSMLCAGRDDVAVTDRDAKINAPPPNLHTGDFTNPNDAYKNLINLKPAIEAGYTGRGVEVGIVDTGESVGSISFPELYGRKEHGYNENYKNYTAYMRKEAPEDGGGKDIKASFDDEAVIETEAKPTDIRHVKEIGHIDVVSHIIGGRSVDGRPAGGIAPDATLHIMNTHDGTKNKIMSAAIRNAWVKLGERGVRIVNNSFGTTSRAGTADHFQIANSEEQYRQALLAYSGGDKTDEGIRLMQQSDYGNLSYHIRNKNMLFIFSASNDAQAQPNTLTLLPFYEKDAQKGIITVAGVDRSGEKFNGSNHCGITAMWCLSAPYEASVRFTRTNPIQIAGTSFSAPIVTGTAALLLQKYPWMSNDNLRTTLLTTAQDIGAVGVDSKFGWGLLDAGKAMNGPASFPFGDFTADTKGTSDIAYSFRNDISGTGGLIKKGGSQLQLHGNNTYTGKTIIEGGSLVLYGNNKSDMRVETKGALIYNGAASGGSLNSDGIVYLADTDRSGANETVHIKGDLQLGGEGTLYTRLGKLLKVDGTAMTGGKLYMSARGKGAGYLNRTGQRVPFLSAAKIGRDYSFFTNIETDGGLLASLDSVEKTAGSEGDTLSYYVRRGNAARTASAAAHSAPAGLKHAVEQGGSNLENLMVELDASESSATPETVETAAADRTDMPGIRPYGATFRAAAAVQHANAADGVRIFNSLAATVYADSTAAHADMQGRRLKAVSDGLDHNGTGLRVIAQTQQDGGTWEQGGVEGKMRGSTQTVGIAAKTGENTTAAATLGMGRSTWSENSANAKTDSISLFAGIRHDAGDIGYLKGLFSYGRYKNSISRSTGADEHAEGSVNGTLMQLGALGGVNVPFAATGDLTVEGGLRYDLLKQDAFAEKGSALGWSGNSLTEGTLVGLAGLKLSQPLSDKAVLFATAGVERDLNGRDYTVTGGFTGATAATGKTGARNMPHTRLVAGLGADVEFGNGWNGLARYSYAGSKQYGNHSGRVGVGYRF

SEQ ID NO: 704 - protein, 94 aa, Neisseria meningitidis
MWKIIKEDSDDLGFAIKCLFSQSIDLNEFKLWIEQVIRDMPIEDIPFYIFDLADFDGVIADIDNIVGFVSSYSLSKSKKKCLDRHCLLKGDRCL

SEQ ID NO: 705 - protein, 101 aa, Neisseria meningitidis
MAKKALINRDLKRQALAKKYAAKRAAIKAVINDSNATEEERFEARLRFQSIPRNAAPVRQRRRCALTGRPRGTFRKFGLGRIKIREIAMRGEIPGVVKASW

SEQ ID NO: 706 - protein, 279 aa, Neisseria meningitidis
MTATAAAIDRLLPQTQCRECGYDGCLPYAQAVATGEAYNLCAPGGEAVIRDISALLGKPLVAPAKTQAKALARIDETACIGCTACIRVCPADAIMGAGKLMHTVIADECTGCGLCVAPCPVDCIHMQPVADTVLPRARRFSLSADSRFAAAEHARARYLKRNERKQREADERKAMLAEREAAVRNARPQTPDTPKKPAFNPADLIAKAMAKAQTQQDRLAAADNRKDYQAKQIAEARERAELRRAQRDMKYGSDSEKAAALEYLKQYKAKQEAAQNTAS

SEQ ID NO: 707 - protein, 77 aa, Neisseria meningitidis
MKLTLMFREYCSLCHKMRDALKPFQNEYGFGLEVVDVDENPVLEEKYNELVPVLLAGDEEICHWFLDEDRLKQFLER

SEQ ID NO: 708 - protein, 594 aa, Neisseria meningitidis
MSLVELKVPDIGGHENVDIIAVEVNVGDTIAVDDTLITLETDKATMDVPAEVAGVVKEVKVKVGDKISEGGLIVVVEAEGTAAAPKAEAAAASAQEAPKAAAPAPQAAQFGGSADAEYDVVVLGGGPGGYSAAFAAADKGLKVAIVERYKTLGGVCLNVGCIPSKALLHNAAVIDEVRHLAANGIKYPEPELDIDMLRAYKDGVVSRLTGGLAGMAKGRKVDVIQGDGQFLDSHHLEVSLTAGDAYELAAPTGEKKIVAFKNCIIAAGSRVTKLPFIPEDPRIIDSSGALALKEVPGKLLIIGGGIIGLEMGTVYSTLGSRLDVVEMMDGLMQGADRDLVKVWQKQNEYRFDNIMINTKTVAVEPKEDGVYVTFEGANAPKEPQRYDAVLVAAGRAPNGKLISAEKAGVAVTDRGFIEVDKQMRTNVPHIYAIGDIVGQPMLAHKAVHEGHVAAENCAGHKAYFDARVIPGVAYTSPEVAWVGETELSAKASGRKITKANFPWAASGRAIANGCDNGFTKLIFDAETGRIIGGGIVGPNGGDMIGEVCLAIEMGCDAADIGKTIHPHPTLGESIGMAAEVALGTCTDLPAQKKK

SEQ ID NO: 709 - protein, 215 aa, Neisseria meningitidis
MKALLLGAPGAGKGTQAQFITAAFGIPQISTGDMLRAAIKAGTPLGLEAKKIIDEGGLVRDDIIIGMVKERIAQDDCKNGFLFDGFPRTLAQAEAMVEAGVDLDAVVEIDVPDSVIVDRMSGRRVHLASGRTYHVTYNPPKVEGKDDVTGEDLIQRDDDKEETVKKRLAVYHEQTEVLVDFYSKLEGEHAPKYIKVDGTQPVEAVKAEVLGALGK

SEQ ID NO: 710 - protein, 456 aa, Neisseria meningitidis
MSGWLLMGLPGAIYLSGLNEAWIAIGLLVGAYFNWLLVAGRLRVHTEYANNALTLPDYFFHRFGAGGHLMKVVSALIILFFFTIYCASGIVAGATLFQSLFEGMTYNQAMWLGAGATIAYTFLGGFLAVSWTDTLQASLMIFALILTPVMVYLGLGGAEQMSAAIQSVAAGTGKEYGSLFAGTTVIGIISTAAWGLGYFGQPHILARFMAAESAKSLVSARRIGMTWMALCLAGAVAVGYFGIAYFGANPDKVSSMSGNHERIFIALSTLLFNPWIAGIILSAILAAVMSTLSCQLLVCSSAITEDFYKGFLRKNAQQSELVWVGRLMVLAIAVISILIASDPNSKVLGLVSYAWAGFGAAFGPIVILSVLWKRITAYGALSGMVAGALTVVVWAEWVKKPAQAAGESGLLTMYEIVPGFIVCLIVAVLVSLFNKEPSRETQERFEKADADYRAAR

SEQ ID NO: 711 - protein, 571 aa, Neisseria meningitidis
MKGRFQGEFAGLNAQLAEKAARCDFVEQAHGKTVSELAVLDGKYRHLQDENYALGNRFSAAEKQIAHLQEKEAESARLKQSYIELQEKAQGLAVENERLATQLGQERKAFADQYALERQIRQRIETDLEESRQTVRDVQNDLSDVGNRFAAAEKQIAHLQEKEAEVERLRQSHTELQEKAQGLAVENERLATQIEQERLASEEKLSLLGEARKSLSDQFQNLANTILEEKSRRFTEQNREQLHQVLNPLNERIHGFGELVKQTYDKESRERLTLENELKRLQGLNAQLHSEAKALTNALTGTQNKVQGNWGEMILETVLENSGLQKGREYVVQAASVRKEEDGGTRRLQPDVLVNLPDNKQIVIDSKVSLTAYVRYTQAADADTAARELAAHVASIRAHMKGLSLKDYTDLEGVNTLDFVFMFIPVEPAYLLALQNDAGLFQECFDKRIMLVGPSTLLATLRTVANIWRNEQQNQNALAIADEGGKLYDKFVGFVQTLESVGKGIDQAQNSFQTAFKQLAEGRGNLVGRAEKLRLLGVKANKQLARDLTERANETTALSESLEYVAEDEAV

SEQ ID NO: 712 - protein, 310 aa, Neisseria meningitidis
MQRSSAEESACANAFIAGIRWGKTCGFYHDSCVVGRRRRFGGTMCAVCSLKVFLYFWSMETHSGCFLRKTVMKDDVLKQQAHAAIQKKLGYAFRDISLLRQALTHRSCHTKHNERFEFVGDSILNYTVARMLFDAFPKLTEGELSRLRASLVNEGVLAEMAAEMDVGEGLYLGAGELKSGGFRRPSILADAMEAMFAAVSFDADFNTAEKVVRHLFADRVRCADFQNQAKDGKTALQEALQARRFALPKYRIEEQIGHANDSMFVISCDLGELGFVCYAKGTSRKAAEQEAAKEALKWLEKKLPLKKKKK

SEQ ID NO: 713 - protein, 611 aa, Neisseria meningitidis
VNTTPIHSKLAEITGRIIERSRPTREKYLAKIRSAKQMGRLERNQLGCSNLAHGYAAMPKSIKIEMLQETVPNLGIITAYNDMVSAHQPFKDFPDQIKDEAQKNGATAQVAGGTPAMCDGITQGYAGMELSLFSRDVIAMSTAIGLSHQMFDGSLFMGVCDKIVPGLMIGALSFGHIPGIFVPAGPMSSGIGNKEKARTRQLFAEGKVGRNELLKSEMGSYHSPGTCTFYGTANSNQMMMEMMGVHLPAAAFVHPYTDLREALTRYAAGHLARGIKNGTIKPLGEMLTEKSFINALIGLMATGGSTNHTMHLVAMARAAGVILNWDDFDEISSIIPLLIRVYPNGKADVNHFTAAGGLPFVIRELLNAGLLHDDVDTVVGHGMRHYTKEPFLIDGKLEWREAPETSGNDDILRKADNPFSPDGGLRLMKGNIGRGVIKVSAVREGCRIIEAPAIVFNDQREVLAAFERGELERDFVCVVRYQGPRANGMPELHKLTPPLGILQDRGFKVALLTDGRMSGASGKVPASIHMTPEALIGGNIAKIRTGDLIRFDSVSGELNVLINETEWNAREVESIDLGANQQGCGRELFANFRSMTSSAETGAMSFGGEFA

SEQ ID NO: 714 - protein, 310 aa, Neisseria meningitidis
MKIANSITELIGNTPLVKLNRLTEGLKAEVAVKLEFFNPGSSVKDRIAEAMIEGAEKAGKINKNTVIVEATSGNTGVGLAMVCAARGYKLAITMPESMSKERKMLLRAFGAELILTPAAEGMAGAIAKAKSLVDAHPDTYFMPRQFDNEANPEVHRKTTAEEIWRDTDGKVDVFVAGVGTGGTITGVGEVLKKYKPEVKVVAVEPEASPVLSGGEKGPHPIQGIGAGFIPTVLNTKIYDSITKVSNEAAFETARAIAEKEGILVGISSGAAVWSALQLAKQPENEGKLIVVLLPSYGERYLSTPLFADLA

SEQ ID NO: 715 - protein, 389 aa, Neisseria meningitidis
MVSIAGIALGVTALIVVLSVMNGFQKEIRGQLLNVAPHAEIGYIDNTDTDWRNLLRFTENRKGILAAAPYVSNQALLANAGEIRGVQMRGILPSEERKVVEYGDKMPAGKFEDLIPGEFDIILGVGLAEALGAEVGNKVTVITPEGNVTPAGVVPRLKQFTVVGLVKTGVYEVDNSLAMTHIQDARVLYRLDKEVAGLRLKLADPQNAPALTATLIPEAQRDTVWVRDWTFSNRSYFEAVELEKRMMFIILTLIIAVAAFNLVSSLVMAVTEKQADIAILRTLGLSPGGVMKIFMVQGAFSGFFGTLAGVVCGVLLGWNVGRVVAFFENLLGVHLINSQVYFIDYLPSDVDMGDVALIACISLGLSFVATLYPSRRASKTQPAEALRYE

SEQ ID NO: 716 - protein, 46 aa, Neisseria meningitidis
LISNHDTEFTRDIYSFAILKTVEVQRNIAEKGSSRKKVGELLAIYA

SEQ ID NO: 717 - protein, 212 aa, Neisseria meningitidis
MKKINVAPENPQYRIVEIFESLQGEGWNTGMPAVFVRLGKCNLACGWCDTDYLTFGMMSLSDILGCLKTYAARNIIITGGEPTIQPHLDMLLDTLKAEGYFLCLETNGLNPAPPQIDYVATSPKACYAAKYENSCIETADEVRIVADGDVLAFCENMERKIRAHHYYLSPCEQDGAMNIYDTIRQIGILNSRPDAPVHWQLSVQTHKWAGIE

SEQ ID NO: 718 - protein, 169 aa, Neisseria meningitidis
MKKKLLSGIKFAVQTALVFLLVSLFLDWIRKPDEPAGAAGRPLTLLSGQRLTLGQFSRDKAVLVYFWGSWCGVCRYQSPIIDDLAADGVPVVGVAVRSGSSAEVAAYMAKRGLGFPTANDEDGGLARSWRIVATPAVVLVKNGKMVHYTTGISSYWGLRARIFQADVFG

SEQ ID NO: 719 - protein, 473 aa, Neisseria meningitidis
MKIIQIQNNHNVNDDRPEFDRALIASLPASGPRYTSYPTADRFHDGFREGEYIKALHLRGMGALNKPLSLYIHIPFCNTICYYCGCNKIITKDKSRADAYIEYLEKEMELLAPHLNGRHQLAQLHFGGGTPTFLSDEQIERVFRMIRKHFELIPTGEYSIEIDPRKVSRDTVLMLGRLGFNRMSIGIQDFDPKVQAAVNRIQSYEETKEVIDAAREAGFKSVSVDLIYGLPHQTSESIKTTIDTVLSLDPDRLALYHYAHLPHVFKPQRRIDTAAVPDSEEKLDMLQYCVQTLTERGYVFIGMDHFAKPDDELSIALKEGFLQRNFQGYSTYADCDLVAIGVSSIGKIGSTYSQNERDIDAYYAAIDEGRLPIMRGYQLNQDDILRRNIIQDLMCRFALDYRIYESMFGIPFDRYFKDELADLEKLAGLGLVRLNSHGLTVTPKGRFLIRNIAMVFDYHLRHKETKAKYSQTV

SEQ ID NO: 720 - protein, 382 aa, Neisseria meningitidis
MPLPLPSPEARQSSLKLQTLIAEKIGKHGNWIPFSRFMELVLYAPQYGYYTGGSHKIGNTGDFITAPTLTSLFAQTLARQLQELLSQTAGNIYEFGAGTGQLAADLLGSISDGISRYYIIEISPELAARQKNLIQARAPEASQKVVHLTALPEAFDGIIIGNEVLDAMPVEIVRKNEGGSFEHVGVCLDNDRFTYSARPLHDLQLSALASLYFPQTDYPYTSELHPQQYAFIRTLASRLERGGMIFIDYGFDAAQYYHPQRNQGTLIGHYRHHVIHNPFDFIGLADLTAHVNFTDIAQAGTDAGLDLIGYLPQSHFLLNLGITELLAQTGKTDSAAYICEAAAVQKLIDQHEMGELFKVIAFGKNIGIDWAGFRFGDICHKL

SEQ ID NO: 721 - protein, 205 aa, Neisseria meningitidis
MFTGIVQGLGKLTAIHRPSEAFHTYVVELPQEAADNLQRGASVANNGCCLTITEIEGNRVSFDLMAETLAKTNLGLLKEGDCVNIERAARFGDEIGGHVMSGHIMATVPIVEIERDGFNRTVWFSLPHELKPYILTKGFVGLDGCSLTIGKVEDGRFNVHLIPETLERTLFGSRKVGDRINIEIDPNTQAIVDTVERLMAQRYAK

SEQ ID NO: 722 - protein, 274 aa, Neisseria meningitidis
MKWLFTLLAVLNIAVFGGTVGYKLAVKATGGVPENRVVENTPPATPAADNAAASVEDTAALLKPGDILTEEQAEQLRLKKEAEQKKLREKKQREEKARREKLAAEKAQAERENGAADALCAAQASLTMDEDDYHRIKGLLGKWSHVASRSVEKRTAKAKPADKTYRVVLPVSADAENQAAELSAKGFNPIPFDGALSLGVGNSRENAQALQNRLAGAGFGGAHIVEHFAEADRQDDSLSVSRMTVLFTGVNAADADEIRKITSLYGKLNLKSCK

SEQ ID NO: 723 - protein, 128 aa, Neisseria meningitidis
VRKILLDTHALLWWLLDDKKLGISARKLIENPRNAIFVSAASIWEISIKQNKGLLKLPEEFFDVLQEEDFEMLPIGLFHAKQAGSLPEIHKDPFDRMLIAQTQAEGFELMTVDEYIPQYGIRVVNASS

SEQ ID NO: 724 - protein, 214 aa, Neisseria meningitidis
MTLGLVGRKVGMTRVFDEQGVSVPVTVLDMSANRVTQVKSKDTDGYTAVQVTFGQKKANRVNKAEAGHFAKAGVEAGRGLIEFALTEEKLAELKAGDEITVSMFEVGQLVDVTGISKGKGFSGTIKRHNFGAQRTSHGNSRSHRVPGSIGMAQDPGRVFPGKRMAGQYGNTKATVQKLEVVRVDAERQLLLVKGAVPGAVNSDVVVRPSVKVGA

SEQ ID NO: 725 - protein, 334 aa, Neisseria meningitidis
VRGVFMQNWEDDDNDEYCSIKQDSFDAIAVADIIGIDIDIVNFAAQYKDKVFAYFLQEYSAGRTPNPDVLCNAEIKFKCFLDYAVGQGADTIATGHYARKEVRNGVHYLLKGLDRNKDQSYFLYRLKPFQLERAIFPLGGLEKPEVRRLAAEFNLPTAAKKDSTGICFIGERPFREFLQKYLPTDNGKMVTPEGKTVGEHVGLMFYTLGQRKGLGIGGAGEPWFVAAKDLTKNELIVVQGHDHPLLYTRSLVMNDLSFTLPERPKAGRYTCKTRYRMADAPCELRYLDDETAELVFDEPQWAVTPGQSAVLYDGDICLGGGIIQTTDKPVIITR

SEQ ID NO: 726 - protein, 85 aa, Neisseria meningitidis
LPRLAVLFVLSAASSPCPDLNLIHYILIAYAVPVLGFLRGSGFAGLPATVMPSGMSHTITAPAPIQLPSFPNGVENVGRKAVYAP

SEQ ID NO: 727 - protein, 243 aa, Neisseria meningitidis
MVKLTAQQIFDKLLNEERILSANGQIRFFLGDVDIIVKQKDVVGNIIQEWLGGWLRKREIEFDVSTNTQMPPDFFLNKKDRSRELLEVKAFNRNASPGFDIADFKMYSDEIIHKPYMLDVDYLIFGYDMDDNGNVTIKDLWLKKVWQITRSMDGWAINLQVKKGVVHKIRPGVWYSINKKNMPMFECLEDFVSAIEETVYQNPATRHNASLWKRKFEEAYKKHYNRSISIPRWHEIAHKYQKK

SEQ ID NO: 728 - protein, 193 aa, Neisseria meningitidis
LPYYLYCLRLRRLVLIFVNPLYLHQFHETQVGSVKQLIAHFDRLIDELDKQIDDHTHTHFDGKAQVAEQIKGIGSITTATLMAMLPELGRLSHKRIASLAGIAPHPRESEETKFKSRCFGGRSAVRKALYMATVAATRFEPLIRDFYQRLLSKGKPYKVAVTACMRKLLTISNTRMRDYFAENDTAENGIQTA

SEQ ID NO: 729 - protein, 277 aa, Neisseria meningitidis
MAIVKMKPTSAGRRGMVRVVTEGLHKGAPYAPLLEKKNSTAGRNSNGHITTRHKGGGHKHHYRVVDFKRNKDGIPAKVERIEYDPNRTAFIALLCYADGERRYIIAPRGIQAGAVLVSGAEAAIKVGNTLPIRNIPVGTTIHCIEMKPGKGAQIARSAGASAVLLAKEAAYAQVRLRSGEVRKINVNCRATIGEVGNEEQSLKKIGKAGANRWRGIRPTVRGVVMNPVDHPHGGGEGRTGEAREPVSPWGTPAKGYRTRNNKRTDNMIVRRRYSNKG

SEQ ID NO: 730 - protein, 92 aa, Neisseria meningitidis
MSRNLLVRWLAVCLIPLATLAVFAANPPEDKPQHLINGIILACEATFLFKFVLFDAIKHHLKQEFDLKRQTMLLFVPIVLLVVYLFHYFGAF

SEQ ID NO: 731 - protein, 415 aa, Neisseria meningitidis
MQLTAVGLNHQTAPLSIREKLAFAAACLPEAVRNLARSNAATEAVILSTCNRTELYCVGDSEEIIRWLADYHSLPIEEISPYLYTLGMQETVRHAFRVACGLDSMVLGEPQILGQIKDAVRVAQEQESMGKKLNALFQKTFSVAKEIRTDTAVGENSVSMASASVKLAEQIFPDIGDLNVLFIGAGEMIELVATYFAAKSPRLMTVANRTLARAQELCDKLGVNAEPCLLSDLPAILHEYDVVVSSTASQLPIVGKGMVERALKQRQSMPLFMLDLAVPRDIEAEVGDLNDAYLYTVDDMVNIVQSGKEARQKAAAAAETLVSEKVAEFVRQQQGRQSVPLIRALRDEGEKARKQVLENAMKQLAKGATAEEVLERLSIQLTNKLLHSPTQTLNKAGEEDKDLVHAVAQIYHLDK

SEQ ID NO: 732 - protein, 278 aa, Neisseria meningitidis
MIDLHCHSTVSDGMLSPAEVVRLAHQNGCTLLALTDHDHTGGIAEARAEADRLDLRLINGVEISVTWRGRTIHVVGLDFDEQDENLQNLLAQVRQGRLKRLEAIAAKLEKKGIGGAYDGALALAANKEMVSRTHVAEFLIQAGHVKNKQQAFTKYLGDGKSCAVRHEWATLEDCVSAVNGAGGMAVIAHPMRYDLSATAKRNLFEEFKKLGGAGIEVHSGNCCKNDRLNYALLAERFGMLASAGSDFHRLNDFGGGILGACPELPENCRPVWAHFSRH

SEQ ID NO: 733 - protein, 91 aa, Neisseria meningitidis
MNALNWSLYLILCENSAFYCGISPNPQQRLAAHTTGKGAKYTRVFKPVAMRIVAGGMDKGTALRQEIAVKKLTAAQKRQLWEQAEKMPSET

SEQ ID NO: 734 - protein, 115 aa, Neisseria meningitidis
MRLNHKQGEAGEDAALAFLQSQGCTLLARNWHCAYGEIDLIVKNGGMILFVEVKYRKNRQFGGVAYSISPSKLLKLQRSVEYYLQQNRLTNVPCRLDAVLIEGNRPPEWIQNITG

SEQ ID NO: 735 - protein, 57 aa, Neisseria meningitidis
LLPIIRKKVKPDGIVYTDTFRSYDVLDISEFSHLRKFNGIPKEHLGLHLKKCQWHFK

SEQ ID NO: 736 - protein, 463 aa, Neisseria meningitidis
MSGHMGKGADAPDLVYGLEDRPPFGNALLSAVTHLLAIFVPMITPALIVGGALELPVEMTAYLVSMAMVASGVGTYLQVNRFGPVGSGMLSIQSVNFSFVTVMIALGAGMKEGGLTKDAMISTLLGVSFVGAFLVCFSAWLLPYLKKVITPTVSGVVVMLIGLSLVHVGITDFGGGFGAKADGTFGSMENLGLASLVLLIVLVFNCMKNPLLRMSGIAVGLIAGYIVALFLGKVDFSALQNLPLVTLPVPFKYGFAFDWHAFIVAGAIFLLSVFEAVGDLTATAMVSDQPIEGEEYTKRLRGGVLADGLVSVIATALGSLPLTTFAQNNGVIQMTGVASRHVGKYIAVILVLLGLFPVVGRAFTTIPSPVLGGAMVLMFGLIAIAGVRILVSHGIRRREAVIAATSVGLGLGVAFEPEVFKNLPVLFQNSISAGGITAVLLNLVLPEDKTEAAVKFDTDHLEH

SEQ ID NO: 737 - protein, 96 aa, Neisseria meningitidis
LPSDKEARTGCLSLPANNGIIRALSPPFTGINIRLFAALGLLSLSGAAAQASVYHCNSNGKSVYTSAPAGSCADADLPKISSHQGGGYRLKIKKLS

SEQ ID NO: 738 - protein, 95 aa, Neisseria meningitidis
MKIEFDSEKNQRNIEERNLPFESVGQIRWTTAVIVPDVCFDYPEPRYVAAAYLGDTQRLHIVCFTPIKDGIRVISFRKANKREVKKYATSILNKR

SEQ ID NO: 739 - protein, 522 aa, Neisseria meningitidis
MSQTDTQRDGRFLRTVEWLGNMLPHPVTLFIIFIVLLLIASAAGAYFELSVPDPRPVGAKGRADDGLIHVVSLLDADGLIKILTHTVKNFTGFAPLGTVLVSLLGVGIAEKSGLISALMRLLLTKSPRKLTTFMVVFTGILSNTASELGYVVLIPLSAIIFHSLGRHPLAGLAAAFAGVSGGYSANLFLGTIDPLLAGITQQAAQIIHPDYVVGPEANWFFMVASTFVIALIGYFVTEKIVEPQLGPYQSDLSQEEKDIRHSNEITPLEYKGLIWAGVVFVALSALLAWSIVPADGILRHPETGLVSGSPFLKSIVVFIFLLFALPGIVYGRVTRSLRGEQEVVNAMAESMSTLGLYLVIIFFAAQFVAFFNWTNIGQYIAVKGATFLKEVGLGGSVLFIGFILICAFINLMIGSASAQWAVTAPIFVPMLMLAGYAPEVIQAAYRIGDSVTNIITPMMSYFGLIMATVIKYKKDAGVGTLISMMLPYSAFFLIAWIALFCIWVFVLGLPVGPGAPTFYPAP

SEQ ID NO: 740 - protein, 432 aa, Neisseria meningitidis
VLNSTFILLIETVVGSFRTAFRSKDRLKTAGTIVPHLKHRLKPCADNPPAPNRLPPPDRDSMIYQRNLIKELSFTAVGIFVVLLAVLVSTQAINLLGRAADGRVAIDAVLALVGFWVIGMTPLLLVLTAFISTLTVLTRYWRDSEMSVWLSCGLALKQWIRPVMQFAVPFAVLVAVMQLWVIPWAELRSREYAEILKQKQELSLVEAGGFNSLGKRNGRVYFVETFDTESGIMKNLFLREQDKNGGDNIIFAKEGNFSLNDNKRTLELRHGYRYSGTPGRADYNQVSFQKLNLIISTTPKLIDPVSHRRTIPTAQLIGSSNPQHQAELMWRISLTVSVLLLCLLAVPLSYFNPRSGHTYNILIAIGLFLIYQNGLTLLFEAVEDGKIHFWLGLLPMHIIMFVIAIVLLRVRSMPSQPFWQAVGKSLTLKGGK

SEQ ID NO: 741 - protein, 154 aa, Neisseria meningitidis
MAIWNYRYYLIPSAAIRNKFNANKDIILDEYRSNGFQNFNENKSFENYFIDNDVILLSIINEAKKQLKLKESWDKDAIMFCDNFGNSLTVWPDDIECELDLRFDYTKFIQKTIDWAIKYNCLLVIEKTGNVVSPNINNLMYEIKAYLESKPWPI

SEQ ID NO: 742 - protein, 405 aa, Neisseria meningitidis
MQRRIITLLCAAGMAFSTQTLAANLEVRPNAPERYTVKQGDTLWGISGKYLYSPWQWGRLWDANRDQIHNPDLIYPDQVLVLRHVDGEPRLGLEQTDGIPVVKMSPDKEVSGYGIPAIDVNFYRIFMRHPQIVSRKETAAAPRLLSGPEGRLLYTKGTRVYTKGLKEPGRYLTYRINKNITDPDTGKFLGREVAFSGIVRSLDYTDSVLEQRSKQAGERPKDNEYHTRIHPLITPLRTPSIQPLVVETAISEIQQGDYLMKMPEDTDRFNMMPHEPSRPVQAKIVSVFEGTRIAGQFQTITIDKGEADGLDKGTVLSLYKRKKTMQVDLSNNFKSRDTVELISTPAEEVGLAMVYRTSEHLSSAIILENISDISVGDTAANPGRDLDNIPDQGRSRVKFGFNRSE

SEQ ID NO: 743 - protein, 166 aa, Neisseria meningitidis
MADLQKTFQTSFRDAMASCAAGVHVITTDGAAGRYGITMTAVAPVTDEPPTVMLCINRSARIIPILSENGSLCINTLADEHQDVAEHFAGLTGLSPEERFAYHIWHRGKTGQLEIEGALAHLHGHIVGKHEIGTHFVFYVRLDEIKNCGCKRPALLYFRRQFRFLD

SEQ ID NO: 744 - protein, 219 aa, Neisseria meningitidis
MKTAILIDGAFFIKRVRSLGLSQNPHDAKRIADLAFRYSMLHLKDKINGTDQMDDLYRIFFYDCVPFEKKMHNPVSHRAIDFSKTPEAIFRRNLHTELKKKRKLALRLGKLSDNTAWILKPQVMKNLLKNPSTQITENDVVLDVKQKGVDMRIGLDISSITLKKQADKIILFSGDSDFVPAAKLARREGIDFILDPMWNHVPPDLMEHIDGLKTKCPKP

SEQ ID NO: 745 - protein, 304 aa, Neisseria meningitidis
MKHPKLTLIAALLTTAATAAPLPVVTSFSILGDVAKQIGGERVSIQSLVGANQDTHAYHMTSGDIKKIRSAKLVLLNGLGLEAADVQRAVKQSKVSYAEATKGIQPLKAEEEGGHHHDHDHDHEGHHHDHGEYDPHVWNDPVLMSAYAQNVAEALIKADPEGKVYYQQRLGNYQMQLKKLHSDAQAAFNAVPAAKRKVLTGHDAFSYMGKRYHIEFIAPQGVSSEAEPSAKQVAAIIRQIKREGIKAVFTENIKDTRMVDRIAKETGVNVSGKLYSDALGNAPADTYIGMYRHNIKALTNAMKQ

SEQ ID NO: 746 - protein, 192 aa, Neisseria meningitidis
MSEQTQQQNSEEAVENVEAVETVETVGNADGVQEQAAAEPAYEDLQARIAELEAQLKDEQLRALANEQNLRRRHQQEIADTHKFAGQKFAVEMLPVKDYLEMALLDQSGNFDALKMGVQMTLNELQKAFDATQIKEINPKAGDKLDPNIHQAMQAVASEQEPNTVVGVMKKGYTLSDRVLRPAMVTVAQKEA

SEQ ID NO: 747 - protein, 396 aa, Neisseria meningitidis
MNPKHLIAFSALFAATQAEALPVASVSLDTVTVSPSAPYTDTNGLLTDYGNAAASPWMKKLRSVAQGSGETFRILQIGDSHTAGDFFTDSLRKRLQKTWGDGGIGWVYPANVKGQRMAAVRYNGNWQSLNSRSAAADFPLGGILAHTGSGGSMTLTASDGKTGKQRISLFAKPLLAEQTLTVNGNTVSANGGGWQVLDTRAALPLTIQTEMPWDIGFINIENPAGGITVSAMGINGAQLTHWSKWRADRMNDLAQTGADLVILSYGTNEAFGDNIDIADTEQKWLDTVRQIRDSLPAAGILIIGAPESLKNTLGVCGTRPVRLTEVQQMQRRVARQGQTMFWSWQNAMGGICSMKNWLNQGWAAKDGVHFSAKGYRRAAEMLADSLEELVRAAAKR

SEQ ID NO: 748 - protein, 481 aa, Neisseria meningitidis
MTQYTLKQASVLLQSKQISAVELASAYLAAIAEKNPALNGYITIDQDKTLAEARAADERIAQGNASALTGIPVAYKDIFCQTGWRSACASKMLDNFISSYTATVVQNLLDEGMVTLGRTNMDEFAMGSTNENSFYGATKNPWNPEHVPGGSSGGSAAVVAARLAPAALGSDTGGSIRQPASHCGITGIKPTYGTVSRFGMVAYASSFDQAGPMAQTAEDCAILLNAMAGFDPKDSTSLEREKEDYTRDLNQPLKGLKIGLPKEYFGEGNSADVLTALQNTIDLLKAQGAELIEVSLPQTKLSIPAYYVLASAEASTNLSRYDGVRYGHRAAQFGDLEEMYGKTRAEGFGSEVKRRIMIGTYVLSHGYYDAYYLKAQKLRRLVADDFQTVFARCDLILAPTAPTAAPKIGADSSPVETYLSDIYTIAVNLAGLPALTLPAGFSGGGLPVGVQLIGNYFAEARILGAAHQIQLNSDWHGKRPE

SEQ ID NO: 749 - protein, 281 aa, Neisseria meningitidis
LCFSADMLLKDRHFFADVKPEDLAWKVLAVNISDMAAMGAIPRWVLLSAALPELDEVWLERFCGSFFGLAKKFGVTLIGGDTTKGDMAFNVTIIGELPKGRALRRDAAVAGDDIWVSGRVGMAAAALNCRLKRCVLPDDVFAECEQKLLRPEPRVGLGLALLPFARAAQDVSDGLAQDLGHILTASGVGAEIWADSLPSLSVLKDILPRAQWLSYTLAGGDDYELVFTAPESCRSRVLDAAERCGVPVTRIGKINGGCRLKVLDADGRELELHSLGFDHFG

SEQ ID NO: 750 - protein, 153 aa, Neisseria meningitidis
MTEVIAYLIEHFQDFDTCPPPEDLGMLLEEAGFDTMEIGNTLMMMEVLLNSSEFSAEPADSGALRVYSKEETDNLPQEVMGLMQYLIEEKAVSCEQREIIIHALMHIPGDEITVDTAKVLTLLLLWANKSELPVLVGDELMSALLLDNKPTMN

SEQ ID NO: 751 - protein, 289 aa, Neisseria meningitidis
MFMNKFSQSGKGLSGFFFGLILATVIIAGILFYLNQSGQNAFKIPASSKQPAETEILKPKNQPKEDIQPEPADQNALSEPDAAKEAEQSDAEKAADKQPVADKADEVEEKADEPEREKSDGQAVRKKALTEEREQTVGEKAQKKDAETVKKQAVKPSKETEKKASKEEKKAEKEKVAPKPTPEQILNSGSIEKARSAAAKEVQKMKTPDKAEATHYLQMGAYADRRSAEGQRAKLAILGISSKVVGYQAGHKTLYRVQSGNMSADAVKKMQDELKKHEVASLIRSIESK

SEQ ID NO: 752 - protein, 92 aa, Neisseria meningitidis
MARSLKKGPYVDLHLLKKVDAARASNDKRPIKTWSRRSTILPDFIGLTIAVHNGRTHVPVFISDNMVGHKLGEFSLTRTFKGHLADKKAKKK

SEQ ID NO: 753 - protein, 149 aa, Neisseria meningitidis
MSLIGEILPLSHIVLDMEVGSKKRLFEEAGLLLERESSLSHADVFECLFAREKLGSTGLGQGVAIPHGRHAGVKQATGAFIRTREPVGFDAPDGKPVSLIFILLVPENATGEHLEVLSKLAGKFSQKSIRESLMTVSSAEEARAILTEE

SEQ ID NO: 754 - protein, 198 aa, Neisseria meningitidis
MNINTSENKDAVAEHTGQWLEKAVIGLNLCPFAKAPHVKNLVRIAISEAKHLDGFLEDLDEELQRLGNTPATELETTLLVHPTLFPDFDVFNDMLDIADAAVVENGLEGIVQIAPFHPDFQFEGTDSDDIGNYTNRSPYPTLHLIREDSIAKAAQAFPDASAIFERNIALLEKMGHEGWAKLGITSCPYPHNKKNISK

SEQ ID NO: 755 - protein, 366 aa, Neisseria meningitidis
MTRIAILGGGLSGRLTALQLAEQGYQIALFDKGCRRGEHAAAYVAAAMLAPAAEAVEATPEVIKLGRQSIPLWRNIRGRLKTPAMMQENGSLIVWHGQDKPLSNEFVRHLKRGGVADDEIVRWRADDIAEREPQLGGRFSDGIYLPTEGQLDGRQILSALADALDELNVPCHWEHECVPEGLQAQYDWLIDCRGYGAKTAWNQAPEHTSTLRGIRGEVARVYTPEITLNRPVRLLHPRYPLYIAPKENHVFVIGATQIESESQAPASVRSGLELLSALYAVHPAFGEADILEIATGLRPTLNHHNPEIRYNRARRLIEINGLFRHGFMISPAVTAAAVRLAVALFDGKDAPERDEESGLAYIRRQD

SEQ ID NO: 756 - protein, 404 aa, Neisseria meningitidis
MEWEFNSYYTLIAATLVLLVGKFLVQKIKFLRDFNIPEPVAGGLVAAIILFALHEAYGVSFKFEKPLQNAFMLIFFTSIGLSADFSRLKAGGLPLVVFTAIVGGFILVQNFVGVGLATALGLDPLIGLITGSVSLTGGHGTSGAWGPNFETQYGLVGATGLGIASATFGLVFGGLIGGPVARRLINKMGRKPVENKKQDQDDNADDVFEQAKRTRLITAESAVETLAMFAACLAFAEIMDGFDKEYLFDLPKFVWCLFGGVVIRNILTAAFKVNMFDRAIDVFGNASLSLFLAMALLNLKLWELTGLAGPVTVILAVQTVVMVLYATFVTYVFMGRDYDAAVLAAGHCGFGLGATPTAVANMQSVTHTFGASHKAFLIVPMVGAFFVDLINAAILTGFVNFFKG

SEQ ID NO: 757 - protein, 230 aa, Neisseria meningitidis
MTAFVHTLSDGMELTVEIKRRAKKNLIIRPAGTHTVRISVPPCFSVSALNRWLYENEAVLRQTLAKTPPPQTAENRLPESILFHGRQLALTAHQDTQILLMPSEIRVPEGAPEKQLALLRDFLERQAHSYLIPRLERHARTTQLFPASSSLTSAKTFWGVCHKTTGIRFNWRLVGAPEYVADYVCIHELCHLAHPDHSPAFWELTRRFAPYTPKAKQWLKIHGRELFALG

SEQ ID NO: 758 - protein, 368 aa, Neisseria meningitidis
MFKPDENGIRRKVFTNIKGLKIPHTYIETDAKKLPKSTDEQLSAHDMYEWIKKPENIGSIVIVDEAQDVWPARSAGSKIPENVQWLNTHRHQGIDIFVLTQGPKLLDQNLRTLVRKHYHIASNKMGMRTLLEWKICADDPVKMASSAFSSIYTLDKKVYDLYESAEVHTVNKVKRSKWFYTLPVIVLLIPVFVGLSYKMLSSYGKKQEEPAAQESAATEQQAVLPDKTEGEPVNNGNLTADMFVPTLTEKPESKPIYNGVRQVKTFEYIAGCVQGGRTGCTCYSHQGTALKEVTELMCKDYVKNGLPFNPYKEESQGQEVRQSAQQHSDRAQVATLGGKPLQNLMYDNWQERGKPFEGIGGGVVGSAN

SEQ ID NO: 759 - protein, 397 aa, Neisseria meningitidis
MYRHIEYYPGDPILSLVETFKNDPRPEKVNLSIGIYFDDEGKMPVLESVSRAETARAATPVPSPYLPMEGLDTYRSAVQHLLFGKDNPALAQGRIVTVQTLGGSGALKVGADFLHRWFPEARAYVSDPTWDNHRGIFESAGFEVGTYPYYDPAAVGVKFDEMTAFFNTLPENSVLILHPCCHNPTGVDMSEQQWDEVLHIIKTRKLIPFMDIAYQGFGGDLDSDAYAVRKAVEMELPLFVSNSFSKNLSLYGERVGGLSVVCPNKEEADLVFGQLKFTVRRIYSSPPAHGAYIAADVMNSPELYALWQNEVYMMRDRIRAMRQKLYDVLTAQIPDRDFTYFIKQRGMFGYTGLSVEQVRRLRDEFAVYLLDSGRMCVAGLNTSNTDYVARAFAEVLK

SEQ ID NO: 760 - protein, 77 aa, Neisseria meningitidis
MARVCKVTGKRPMSGNNVSHANNKTKRRFLPNLQSRRFWVESENRWVRLRVSNAALRTIDKVGIDVVLADLRARGEA

SEQ ID NO: 761 - protein, 431 aa, Neisseria meningitidis
MIRPDFQEYLPSYYFSSVNPHTVYPKLQCRLKTDTCIIGGGLSGLCTALPLAEQGHETVVLEAARIGFGASGRSGGQVISDYACGMEEIEKQVGLEQAQWFWQQSLQAVELVDERVRKHAIDCDWQRGYATVAIRSQHWEELQQWHEHAQKYYGATHYQLWDNTELKQQLDSDMYQGAQFDPLSGHLHPLNYTLGIARAAAEAGTKIFEHSPMIRIEPYQNGWLVYTPEGSVECKNLVYAVNTYAGLNPIFKPLERKAIAVSTFIIATEPLGARAKGLIRNNMAVCDNRHILDYYRLSADGRLLFGGKDNEFIDNPARMTELVRQDMLKVFPQLADVKIEYSWGGECDITANLVPHFGRLAPNVFYTQGYSGHGMAITGIAGLAVAEAILGDECRLKPFERLRQPNIILQPFLRKLGSFLGSKYYQWKDSR

SEQ ID NO: 762 - protein, 136 aa, Neisseria meningitidis
MPVYFRTPSRKRLHKMNRRQHKKLHLGEFQTLIFGVQGSLHQAADDAEAFGRFMDELIAYLEANDFEMAGGGDCGDFSCLFQKSAPRGLGETEKKAIISWLAGREDVATLHATPLVDGFYGDDGWENYSETYKQAD

SEQ ID NO: 763 - protein, 197 aa, Neisseria meningitidis
MSEMLNHVASCRLPTEWGVFTMHGFEEANGQEHVALTVGNFSDGNPVLTRIHSECLTGDALFSRKCDCGPQLEAAMRAVQTEGRGIIVYLRQEGRGIGLINKIRAYHLQDQGMDTVEANLALGLPVDARDFRLAQSIYEYLGIRSVKLLTNNPEKIQTLKDAGINVVERIPLHVGENLENKRYLQTKADKLGHLMSE

SEQ ID NO: 764 - protein, 73 aa, Neisseria meningitidis
LKVMGAVHPEFEQAVLDTVRLHAPDTQAHHITTRPSSKGNYTGATVQVKVENQEQLDNIYRALTSHELVKVVL

SEQ ID NO: 765 - protein, 914 aa, Neisseria meningitidis
LPCRPPPAGNLPIRRFRQPVIIDADFIFPTFLSENRMTMQEQYRPAAIEPAAQKKWDDARIFNVSEDASKPKYYCLSMFPYPSGKLHMGHVRNYTIGDVLSRFKRLNGFNVMQPMGWDAFGMPAENAAMKNNVAPAAWTYDNIEYMKTQLKSLGFAIDWARETATCKPEYYRWEQWLFTKLFEKGIVYRKNGTVNWDPVDQTVLANEQVIDGRGWRSGALIEKREIPMYYFKITDYAEELLNDLDKLEHWPEQVKTMQRNWIGKSRGMTVRFAVSDDSKQGLEGDYARFLQVYTTRPDTLMGATYVAVAAEHPLATAAAADKPELQAFIAECKAGSVAEADMATMEKKGVPTGRYVVNPLNGDKLEVWIANYVLWGYGDGAVMAVPAHDERDFEFATKYSLPKKQVIAVGDNAFDANQWQEWYGDKENGVLVNSGDLDGMNFQTAFDAIAAKLQSQGAGEPKTQYRLRDWGISRQRYWGCPIPIVHCEQCGDVPVPADQLPVVLPENVVPDGMGSPLAKMPEFYETACPCCGGAAKRETDTMDTFMESSWYFFRYMSPKFSDGMVSAEAAKYWGAVDQYIGGIEHAILHLLYARFFTKLMRDEGLVNVDEPFERLLTQGMVVCETYYRENDKGGKDWINPADVELTFDDKGRPVSAVLKADGLPVVISGTEKMSKSKNNGVDPQELINAYGADTARLFMMFAAPPEQSLEWSDSGVEGAHRFLRRLWRTVYEYLKQGGAVKAFAGNQDGLSKELKDLRHKLHSTIAKVSDDYGRRQQFNTAIAAVMELLNQYDKTDTGSEQGRAVAQEVLETAVRLLWPIVPHICETLWSELNGAKLWEAGWPAVDEAALVKSEIEVMVQVNGKLRGKITVAADASKADLEAAALATEGAVKFMEGKPAKKIIVVPGRLVNIVV

SEQ ID NO: 766 - protein, 324 aa, Neisseria meningitidis
MLENLPYFQRHLPEDLAKVNEVINRAVQSDVALISQIGTYIISAGGKRLRPIMTILAGKAVGYDDEKLYSLAAMVEFIHTSTLLHDDVVDESDLRRGRATANNLFGNAAAVLVGDFLYTRAFQLMVASGSMRVLEVMADATNIIAEGEVMQLMNIGNTDITEEQYIQVIQYKTAKLFEAAAQVGAILGKASPEHERALKDYGMYVGTAFQIIDDVLDYSGETEETGKNVGDDLAEGKPTLPLIYLMRQGSEQVANDVRTALENADRSYFEKIHDYVVRSDALAYSIGEARKAVDCAVTALDALPDSEVKDAMIQLAKESLVRVS

SEQ ID NO: 767 - protein, 334 aa, Neisseria meningitidis
MTIIVTGAAGFIGSNIVKALNQRGITDIVAVDNLSKGEKFKNLAECEIAHYLDKHEFIRQVREHILPYQNIEAVFHQGACSDTMNHDGLYMMDNNYQYTLDLLDWCQDERIPFLYASSAAVYGKGEIFREERELEKPLNVYGYSKFLFDQVLRRRMKEGLTAQVVGFRYFNVYGQHEQHKGRMASVAFHHFHQYREHGYVNLFGSNDGYGNGEQTRDFVSVEDVAKVNLYFFDHPELSGIYNLGTGRSQQFNELAAATVNACRAAEGKPEMSLKELVEEELIRYIPFPDALKGKYQSFTQADITKLREAGYTEEFFDVKSGVERYVKWMLENLA

SEQ ID NO: 768 - protein, 318 aa, Neisseria meningitidis
LLIHYIDIAKRNFVIAVSSLSKTKTETNNPKGIAHTIEYLKKHKVALVVTESTGGLEIPAAKAIRRAGIAVIIANPRQTHQFAQSQPLTKTDAKDAKMPAFFTQMMTQKEDWQTMPYQPPTEAEEVLEALVNRRNQSADMRTAEKNRLHQVHETQVGSVKQLIAHFDRLIDELDKQIDNHTHTHFDGKAQVAEQIKGIGSITTATLMAMLPELGRLSHKRIASLVGIAPHPRESGETKFKSRCFGGRSAVLKALYMATVAATRFEPLIRDFHQRPLSEGKPYKVAVTACMRKLLTISNARMRDYFAENDTAENGIRTA

SEQ ID NO: 769 - protein, 200 aa, Neisseria meningitidis
LVYNFPFTDRFRHMTDLETKRLETQAMLENAELLFDQGQCRAALQKVADEITRDLGGKYPLLLPVMGGAVVFTGQLLPLLRFPLDFDYVHVSRYGDKLEGGAFNWKRMPDAEQIRGRHVVVLDDILDEGHTMSAIQAKLLEMGAASCRAAVFANKLIDKPKPIRADYVGLAVPNRYVFGYGMDAAGCWRNLGEIYALDGK

SEQ ID NO: 770 - protein, 238 aa, Neisseria meningitidis
MSDKKYNVDEGEIAKFSRIADKWWDKSGEFKTLHDINPLRLDYIDGHADLRGKRVLDVGCGGGILAESMARRGAAFVKGIDMAEQSLETARLHAALNNVADIEYECIRVEDLAEAEPHSFDVVTCMEMMEHVPDPAAIVRACANLVKPDGMVFFSTINKNPKSYLHLIVAAEYLLKFVPKGTHDWKKFIAPAELARMCRQAGLDVADTKGMTYHVLSQTYALCDSTDVNYMFACRPAF

SEQ ID NO: 771 - protein, 298 aa, Neisseria meningitidis
MERIDICHTTQVVGMDESPQSALKNKKDSSMRVAINQVKEGKAQAAVSAGNTGALMATARFVLKTIPGIERPAIAKFLPSDTDHVTLALDLGANVDCTPEQLAQFAVIGSELVHALHPQKGQPRVGLVNVGTEDIKGTDTVKQTYKLLQNSKLNFIGNIESNGILYGEADVVVADGFVGNVMLKTIEGAVKFMSGAIRREFQSNLFNKLAAVAALPALKGLKNKLDPRKFNGAILLGLRGIVIKSHGGTDETGFRYALEEAYHEAKSAGLSKIEQGVAEQLAALETAKAVQNENADGL

SEQ ID NO: 772 - protein, 380 aa, Neisseria meningitidis
MNTLYTLFATCPRGLETVLSQELESLGCTDVQVFDGGVSCRGGLEQVYAANLHSRTASRILLRLTKGTYRNERDIYKLAKNINWFNWFTLQQTFKVKVEAKRANVKSIQFVGLTVKDAVCDAFRDIYDARPSVDKAAPDVRIHAFLDERNVEIFIDTSGEALFKRGYRLDTGEAPLRENLAAGLLLSAGYDGTQPFQDPFCGSGTIAIEAAWIAARRAPGMMRRFGFEKLQNFDKTLWADLRRRAEAQVNPAFAPISGSDNDRRIVQTALDNARSAEVDDIVSFSVADAQSVRPNGENGIMVSNPPYGVRLEEVRALQALYPQLGTWLKKHYAGWRVGMFTSDREMPKFMRLSPKRKIPLYNGNLDCRLFLIDMVQGSNR

SEQ ID NO: 773 - protein, 306 aa, Neisseria meningitidis
MAELYQTTKQNISKHIKTILAEQELEEKATVNFQLTVQNENGRKVNRKIAHYSLPMIIAVGYRVRSARGIQFRQWATERLDEYLTKGFAIDDERLKGTGGGDYWKELLNRIRDIRSSEKALYRQVLDLYATSQDYNPKSSESQTFFAAVQNKLHYAASRQTVAELIYSRADSSKDFMGLTTFQGAIPTLNEAKIAKNYLTEDELFRLNRLVSAFFDLAEIKAQEQSPMYMRDWIAELDKFSGLYGQGTLQGAGSISRKQAEQKAEREYRAYEARILSPVEQAYLESVKALEKTAVQQIKQKKDRTK

SEQ ID NO: 774 - protein, 138 aa, Neisseria meningitidis
MRLLHTMLRVGNLEKSLDFYQNVLGMKLLRRKDYPEGRFTLAFVGYGDETDSTVLELTHNWDTERYDLGNAYGHIAVEVDDAYEACERVKRQGGNVVREAGPMKHGTTVIAFVEDPDGYKIEFIQKKSGDDSVAYQTA

SEQ ID NO: 775 - protein, 545 aa, Neisseria meningitidis
MDFKRLTAFFAIALVIMIGWEKMFPTPKPVPAPQQTAQQQAVTASAEAALAPATPITVTTDTVQAVIDEKSGDLRRLTLLKYKATGDENKPFILFGDGKEYTYVAQSELLDAQGNNILKGIGFSAPKKQYSLEGDKVEVRLSAPETRGLKIDKVYTFTKGSYLVNVRFDIANGSGQTANLSADYRIVRDHSEPEGQGYFTHSYVGPVVYTPEGNFQKVSFSDLDDDAKSGKSEAEYIRKTPTGWLGMIEHHFMSTWILQPKGGQSVCAAGDCRIDIKRRNDKLYSTSVSVPLAAIQNGAKSEASINLYAGPQTTSVIANIADNLQLAKDYGKVHWFASPLFWLLNQLHNIIGNWGWAIIVLTIIVKAVLYPLTNASYRSMAKMRAAAPKLQAIKEKYGDDRMAQQQAMMQLYTDEKINPLGGCLPMLLQIPVFIGLYWALFASVELRQAPWLGWITDLSRADPYYILPIIMAATMFAQTYLNPPPTDPMQAKMMKIMPLVFSVMFFFFPAGLVLYWVVNNLLTIAQQWHINRSIEKQRAQGEVVS

SEQ ID NO: 776 - protein, 318 aa, Neisseria meningitidis
MHQYYDAVILSVGNGLLKRFFKQNAQLNIASRPLIITLFPGVVFGDQASILSRMGADIVLYNNKHDFRIAEEYKKQYKLSCQNILYGYPIFRHASKGRHGEKIYFIDQVKIPFKKEERIYTLKKLIALAEKYPEKEFTILLRVADKDITVHQDKHSYIELAKQFQLPSNLTIERKSTAQAFQEMGYCLSYSSTMLFEAECKGIPVGVVADLGFSKSYANQHFLGSGVLIYFDQIDFTSPKIANPGWLDCYATKKVITTDEFNKLLKQVVPLQHDYQEYLFAVNSIESTQTIFLRKFKKLIRDPKQFFYDSKWFRRRNS

SEQ ID NO: 777 - protein, 375 aa, Neisseria meningitidis
MKHLLIDFENVQPQNLDKLLTENTHIWLFIGVLHKMLPISLVQSLLRFGERVHLVQLQKTGKNALDFYLSYYLGQITATDPNAQIGILSRDGGYDVLVEHILKNHQAKGIVRLANIDEVQHQKITTEPPSALLENTPQPETTLKPQQPLTSYFQAALTALRRPDAFRPCRLHNLRQNLRKHILSDLFKEKTDEECEITTANVINKLKAQNFISIDEQETVSYHLSDNDLLQRIQRHILSQRPKTYADFQAVVQNRADALHLTVGTNDIQSFARHLRDQNLIRQNNGKIEYAPFTEPKPQPTPKQPKKTAWEPDEIIWKKVIAALSLKNRPNKTKTLRNTIQALTKSNAQETDKLLQHLQDTQVLRIDGTKIVYIK

SEQ ID NO: 778 - protein, 644 aa, Neisseria meningitidis
MSLIECKNINRYFGSGENRVHILKDISLSIEKGDFVAIIGQSGSGKSTLMNILGCLDTAGSGSYRIDGIETAKMQPDELAALRRERFGFIFQRYNLLSSLTARDNVALPAVYMGAGGKERSARADKLLQDLGLASKEGNKPGELSGGQQQRVSIARALMNGGEIIFADEPTGALDTASGKNVMEIIHKLHEAGHTVIMVTHDPGIAANANRVIEIRDGEIISDTSKNPEIPASNVGRIQEKASWSFYYDQFVEAFRMSVQAVLAHKMRSLLTMLGIIIGIASVVSVVALGNGSQKKILEDISSIGTNTISIFPGRGFGDRRSGRIKTLTIDDAKIIAKQSYVASATPMTSSGGTLTYRNTDLTASLYGVGEQYFDVRGLKLETGRLFDENDVKEDAQVVVIDQNVKDKLFADSDPLGKTILFRKRPLTVIGVMKKDENAFGNSDVLMLWSPYTTVMHQITGESHTNSITVKIKDNANTQVAEKGLTDLLKARHGTEDFFMNNSDSIRQIVESTTGTMKLLISSIALISLVVGGIGVMNIMLVSVTERTKEIGIRMAIGARRGNILQQFLIEAVLICVIGGLVGVGLSAAVSLVFNHFVTDFPMDISAASVIGAVACSTGIGIAFGFMPANKAAKLNPIDALAQD

SEQ ID NO: 779 - protein, 613 aa, Neisseria meningitidis
MQTNYLSETDSIMKKLICLFAVFLMLCGRAFALDANDLLPPEKAFVPELAVADDGVNVRFRIADGYYMYQAKIVGKTDPADLLGQPSFSKGEEKEDEFFGRQTVYHHEAQVAFPYAKAVGEPYKLVLTYQGCAEAGVCYPPVDTEFDISGNGTYHPQTDEPASAKDRFLQPSSQNGSGVLPPPKGDEGGDSRFKLSWDTLNANLLAFFLAGLGLSFTACMYPLLPIVSSIVVGDKKAGKARAFVLSVVYVQGLALTYTLVGIVAGLTGALLTVWLQQAWVVLAASALMVVLALSMFGLFNIQLPNAVQSYFQNQSSRLSGGKIVSVFIMGILSALIVGPCVAPPLAFALGYIGQTGDAVLGGLALYTLALGTGVPLIAIGTFGGHILPKAGDWMNAVKYAFGFILLAVAVYLATPHLPYYLVVALYTLLMLVPACMLLVNGRRQKRRPKAVAFVLGGILLIGGAWFGWQGANGKTTALHHFLTLNPPAEAGKSSEHGKMFADTAALKAAMDTALKEHPDKPVVLDFYADWCISCKEMAAYTLNQPEVHQAVDMERFFQIDVTANMPEHQALLKEYGLFGPPGVFVVRSDGSRSEPLLGFVKADKFIEWYEQNR

SEQ ID NO: 780 - protein, 257 aa, Neisseria meningitidis
MYHQIGMWDQKWVIGNWKMNGRLQNNNSLMHRFRILPTAERVLIGLAAPTVYLLQLHNAMQIVLNNRILTCAQDVSRFPDNGAYTGEVSAEMLADTGTDIVLIGHSERSLYFGEKNEIQRRKMENVLNVGLIPLLCVGESLEEREAGKEHEVIAHQLSILQGLDTKNIAVAYEPVWAIGTGKVATVEQIADMHAFIYKEILSLCGSDVKIRVLYGGSVKADNAADIFAVPYVDGALVGGASLSYDSFTAIISAAQNA

SEQ ID NO: 781 - protein, 725 aa, Neisseria meningitidis
MCKPNYGGIVLLPLLLASCIGGNFGVQPVVESTPTAPTLSDSKSSNPADKPAPAPAEPSVETTPVNRPAVGAAMRLLRRNTAFHREDGTAIPDSKQAEEKLSFKEGDVLFLYGSKENKLQQLKSEIHKRDPNVKIRTSENENEKYSYKFVDAGYVFAKDGKDEIEKTSDEKQFSNRLGYDGFVYYLGEHPSQSLPSAGTVKYSGNWQYMTDAIRHRRGKGVSSVDLGYTTYYGNEIGAASYEARDADGREKHPAEYTVNFDKKNLEGKLIKNQYVQKRDDPKNPLTIYNITATLDGNRFTGSAEVNPDLAKNHAGKEHLFFHTNADRRLEGGFFGDNGEELAGRFISNDNSVFGVFAGKQKTEAANAADTKPALTSGKHTKILDSLKISVDEASDENPRPFEVSTMPDFGHPDKLLVEGREISLLKDTQTIVLADGRKKTIRACCDFLNYVKIGRMQTERPAVKPKAQDEEGDEEDAGVDNGEDEEEIAEESEDEVSEDEGEEAEVSEDESEEDEEIVEEETEEEAEPEEAEETEEESPAESGSGSNAILPAPEAPKGRDIDLFLKGIRTAEADIPQTGKAHYTGTWEARIGVPDKKGEQLDGTTSIQKDSYANQAAKAEFDVDFGAKSLSGKLTEKNDTNPAFYIEKGVIDGNGFHALARTRENGVDLSGQGSTNPQSFKASNLLVEGGFYGPQAAELGGNIIDSDRKFGAVFGAKKDDKEATR

SEQ ID NO: 782 - protein, 442 aa, Neisseria meningitidis
MKKVFIRTFGCQMNEYDSDKMLAVLAEEHGGIEQVTQADEADIILFNTCSVREKAQEKVFSDLGRVRPLKEKNPGLIIGVAGCVASQEGENIIKRAPYVDVVFGPQTLHRLPKMIVDKETSGLSQVDISFPEIEKFDHLPPARVEGGAAFVSIMEGCSKYCSFCVVPYTRGEEFSRPLNDVLTEIANLAQQGVKEINLLGQNVNAYCGEMDDGEICDFATLLRIVHEIPGIERMRFTTSHPREFTDSIIECYRDLPKLVSHLHLPIQSGSDRVLSAMKRGYTALEYKSIIRKLRAIRPDLCLSSDFIVGFPGETEREFEQTLKLVKDIAFDLSFVFIYSPRPGTPAANLHDDTPHEEKVRRLEALNEVIEAETARINQTMIGTVQRCLVEGISKKDPDQLQARTANNRVVNFTGTPNMINQMIDLEITEAYTFSLRGKVVEA

SEQ ID NO: 783 - protein, 86 aa, Neisseria meningitidis
LKNCSAKHTNRLGNTMKTLLLTFGIFLTVIIGMAVGYIFSKRTIKGSCGGITALGMKKMCDCDTPCDTLQKKLDEEKQAGGIRVDR

SEQ ID NO: 784 - protein, 187 aa, Neisseria meningitidis
MAIELNGNWTKGFALDHHMQKSILLGYDELGHPHFDSKRSVIGEWVYQLKYRNQTQNVSLLVDYILQKFSGLESINLIVPAPFTTERINQPVQLIAKELSDRLNIPYSPILRKSSSHTPLKNIEEKSEKLEILNNSITIDNIDLSNKNILVIDDLFDSGATLEISTEKLFSKNARSVIVLAMTKTRG

SEQ ID NO: 785 - protein, 404 aa, Neisseria meningitidis
MTVKTPVYLDYAATTPVDKRVAEKMIPYLTETFGNPASNSHAFGWEAEEAVEKARADIAALINADPKEIVFTSGATESDNLAIKGAANFYKTKGKHLITVKTEHKAVLDTMRELERQGFEVTYLGVQENGLIDLEELKAAIRDDTILISVMWVNNEIGVVQDIPAIGEICRERKIVFHVDAAQACGKVPVDVEAAKIDLLSMSAHKVYGPKGIGALYVRRKPRVRLEAQMHGGGHERGFRSGTLPTHQIVGMGEAFRIAKEELEQDMAHYRKLRDIFLKGIEGIEEVYVNGDLEHRAPNNLNVSFNFVEGESLIMAVKELAVSSGSACTSASLEPSYVLRALGRNDELAHSSLRITFGRMTTEEEVQFAAELIKSKIGKLRELSPLWEMFKDGIDLNSIEWAAH

SEQ ID NO: 786 - protein, 349 aa, Neisseria meningitidis
LILMNTPIPFSERLIRWQKQHGRHHLPWQVKNPYCVWLSEIMLQQTQVATVLDYYPRFLEKFPTVQTLAAAPQDEVLSLWAGLGYYSRARNLHKAAQQVVEQFGGTFPSERKDLETLCGVGRSTAAAICAFAFNRRETILDGNVKRVLCRVFARDGNPQDKKFENTLWTLAESLLPSENAEMPAYTQGLMDLGATVCKRTKPLCHQCPMADICEAKKQNRTAELPRKKNAAEVPTLPLYWLIVRNRDGAILLEKRPAKGIWGGLYCVPCFESLNGLSDFAAKLSLTMADMDEQTALTHRLTHRLLMITPFEGQMPSESPSDGIWIKPTHLKDYGLPKPLEIYLNGNRLE

SEQ ID NO: 787 - protein, 622 aa, Neisseria meningitidis
MQAVRYRPEIDGLRAVAVLSVMIFHLNNRWLPGGFLGVDIFFVISGFLITGIILSEIQNGSFSFRDFYTRRIKRIYPAFIAAVSLASVIASQIFLYEDFNQMRKTVELSAVFLSNIYLGFQQGYFDLSADENPVLHIWSLAVEEQYYLLYPLLLIFCCKKTKSLRVLRNISIILFLILTATSFLPSGFYTDILNQPNTYYLSTLRFPELLAGSLLAVYGQTQNGRRQTANGKRQLLSSLCFGALLACLFVIDKHNPFIPGMTLLLPCLLTALLIRSMQYGTLPTRILSASPIVFVGKISYSLYLYHWIFIAFAHYITGDKQLGLPAVSAVAALTAGFSLLSYYLIEQPLRKRKMTFKKAFFCLYLAPSLILVGYNLYARGILKQEHLRPLPGAPLAAENHFPETVLTLGDSHAGHLRGFLDYVGSREGWKAKILSLDSECLVWVDEKLADNPLCRKYRDEVEKAEAVFIAQFYDLRMGGQPVPRFEAQSFLIPGFPARFRETVKRIAAVKPVYVFANNTSISRSPLREEKLKRFAANQYLRPIQAMGDIGKSNQAVFDLIKDIPNVHWVDAQKYLPKNTVEIYGRYLYGDQDHLTYFGSYYMGREFHKHERLLKSSRDGALQ

SEQ ID NO: 788 - protein, 532 aa, Neisseria meningitidis
LDYDAALPCAPTPKHRQCRLNRFPMKTRSLLPLLFLLLCSCAAWLPPLDERTESRHFDTASPVRLDKVLHIRHFPSDSRLSDIYLLDDPHEAFAARAALIESAEHSLDLQYYIWRNDISGRLLFNLVYLAAERGVRVRLLLDDNNTRGLDDLLLALDSHPNIEVRLFNPFVLRKWRALGYLTDFPRLNRRMHNKSFTADNRATILGGRNIGDEYFKVGEDTVFADLDILATGSVVGEVSHDFDRYWASHSAHNATRIIRSGNIGKGLQALGYNDETSRHALLRYRETVEQSPLYQKIQTGRIDWQSVQTRLISDDPAKGLDRDRRKPPIAGRLQDALKQPEKSVYLVSPYFVPTKSGTDALAKLVQDGIDVTVLTNSLQATDVAAVHSGYVKYRKPLLKAGIKLYELQPNHAVPATKDKGLTGSSVTSLHAKTFIVDGKRIFIGSFNLDPRSARLNTEMGVVIESPKIAEQMERTLADTTPKYAYRVTLDRHNRLQWHDPATRKTYPNEPEAKLWKRIAAKILSLLPIEGLL

SEQ ID NO: 789 - protein, 278 aa, Neisseria meningitidis
MLPLKTPGVLPGFKLSLGLTVLCLSLLVVLPFAMMAAKAAEIGWGGFWNTIAEPNVLAAVWLSLRMSFYAMLTNVVFGTLVAWVLVRYEFPGKGLANALVDLPFALPTAVTGIALATLYAPNGWIGRFFEPLGIKIAFTPVGIWIALVVVSLPFIVRAVQPVLEELSGEYEEAAATLGANRFTTFRRVLLPEITPALLTGAGMMFARATGEYGSVIFIAGNIPMVSEILPLIITGKLEQFDVQGASAVALFMLLVSFVILFALNVMQWALGRRSGAKG

SEQ ID NO: 790 - protein, 389 aa, Neisseria meningitidis
MSEYLFTSESVSEGHPDKVADQVSDAILDAILAQDPKARVAAETLVNTGLCVLAGEITTTAQVDYIKVARETIKRIGYNSSELGFDANGCAVGVYYDQQSPDIAQGVNEGEGIDLNQGAGDQGLMFGYACDETPTLMPFAIYYSHRLMQRQSELRKDGRLPWLRPDAKAQLTVVYDSETGKVKRIDTVVLSTQHDPEIGYEELKNAVIEQIIKPVLPSELLTDETKYLINPTGRFVIGGPQGDCGLTGRKIIVDTYGGAAPHGGGAFSGKDPSKVDRSAAYACRYVAKNIVAAGLATQCQIQVSYAIGVAEPTSISIDTFGTGKISEEKLITLVREHFDLRPKGIVQMLDLLRPIYSKSAAYGHFGREEPEFTWERTDKAAALRAAAGL

SEQ ID NO: 791 - protein, 384 aa, Neisseria meningitidis
MKFIDEAKIEVAAGKGGNGATSFRREKFVPRGGPDGGDGGKGGSVWAEADENTNTLVEYRFVKRYQAKNGEKGHGSDRYGAGADDIVLKMPVGTLIRDLDTDEIVADLTYHGQRVCLAKGGKGGLGHIHFKSSVNRAPKQSTPGEEGETRSLQLELKVLADVGLLGMPNAGKSTLITAVSAARPKIANYPFTTLHPNLGVVRIDENHSFVMADIPGLIEGAAEGAGLGHRFLKHLSRTGLLLHVVDLAPFDEAVDPAEEALAIINELRKYDEELYGKPRWLVLNKLDMLDEEEAQERTVTFLEAVGWDYPKPDDRFQFDMETPRLFQISALTHQGTQELVHQINQYLTEKKRLEAEKAEAEKAAANVEIIEQQPKTDTGVFKPE

SEQ ID NO: 792 - protein, 522 aa, Neisseria meningitidis
MAKKDNKTKIQKPEAALQTDAAQITATGRVIAEHPSNFITPQKMRALFEDAESGDIRAQHELFADIEERDSDIAANMGTRKRALLTLNWRVAPPRNATPEEEKLSDQAYEMMDSLPTLEDLMMDLMDAVGHGFSALEVEWVFSDGLYLPRNFIHRPQSWFKWDKDNGLLLRTRENPEGEALWPLGWVVHTQKSRSVQQARNGLFRTLSWLYMFKHYAVHDFAEFLELYGMPIRIGKYGAGATKEEKNTLLRAVAEIGHNAAGIMPEGMEIELHNAANGMTSAGNPFLQMADWCEKSAARLILGQTLTSGADGKSSTNALGNIHNEIRRDLLVSDAKQVAQTITSQIIGPFLQINYPHADPNRVPKFEFDTREPKDIAVFADAIPKLVDVGVQIPESWVRDKLVIPDVQEGEAVLVRQVPDNPVNRTALAALSAHTVPSKATGRHQEILDGALDDALVEPDFNSQLNPMVRQAVAALNACNSYEEADAALNALYPNLDNAKLRTYMQQALFISDILGQDHARA

SEQ ID NO: 793 - protein, 163 aa, Neisseria meningitidis
MNSLFVDNTVFITRLKAGHIGRLVQALFEEWHGFEPWSSVDKIRAYYGRCLKDDELPLAFAAVDDFGTLLGSAAVKRHDMESFPQYEYWLGDVFVLPEYRGKGIGRRLVAHCIGAARSLGIKFLYLYTPDVQIFYESFGWAVVGRHFHNGEWVTVMRLDMDKV

SEQ ID NO: 794 - protein, 304 aa, Neisseria meningitidis
MKQINQALQQKLVEFKEKSGMNQTQLARGIDTSPASISMYLNGTYADKGGNYETIETKIEAFLEMEDSKARREELVLGFVSTKTTRRIAEVMRDAHEGGETVVIYGQAGLGKTQSVKNYCEKNPAAILIEANPSFTALVLMRKLATAAKVSAMGSLNDLFESVSDRLRDSGRLIVVDEAENLPLRALEIIRRLHDETGCGLVLSGMPRLVANLRGKHGELVQLYSRVSVALNLGESLPDDELFEIAKAALPDADEETLLELVKHSNGNTRRMSKLMRGAVRTANKNGIKMQAGIVKKYSSLIIR

SEQ ID NO: 795 - protein, 347 aa, Neisseria meningitidis
MSKKIKVGIVGATGYTGVELLRLLAAHPDVEVAAVTSRSEAGTAVADYFPSLRGVYGLAFQTPDEAGLEQCDIVFFATPNGIAMKDAPRLIEQGVRVIDLSADFRIRDIPTWEHWYGMTHAAPDLVSQAVYGLSELNREAVAQARLVANPGCYPTCVSLPLVPLLRQCRLKPGMPLIADCKSGVSGAGRKGNVGSLLCEAGDNFKAYGIAGHRHLPEIRQTIAGLQDGIAEGFVFTPHLAPMIRGMHATVYLHLSDGSNPETVLRDYYRDSLFVDILPAGSTPETRSVRGANLCRISIQQAAQSDVWVVLSVIDNLVKGAAGQAVQNMNIMFGLKETHGLDAIPLLP

SEQ ID NO: 796 - protein, 291 aa, Neisseria meningitidis
MSQHSAGARFRQAVKESNPLAVAGCVNAYFARLATQSGFKAIYLSGGGVAACSCGIPDLGITTMEDVLIDARRITDNVDTPLLVDIDVGWGGAFNIARTIRNFERAGVAAVHIEDQVAQKRCGHRPNKAIVSKDEMVDRIKAAVDARVDENFVIMARTDALAVEGLDAAIERAQACVEAGADMIFPEAMTDLNMYRQFADVVKVPVLANITEFGSTPLYTQSELAENGVSLVLYPLSSFRAASKAALNVYEAIMRDGTQAAVVDSMQTRAELYEHLNYHAFEQKLDKLFQK

SEQ ID NO: 797 - protein, 301 aa, Neisseria meningitidis
MNPAMIERLKAVENQAEAMGRGARSAYLKQQAQELGISLATLYRKLEAVSIKPTRKRRSDAGKTELKTEEAKLISAVLVEAMRRNGKRLMSVRQAVEMLRTNGKIEAARIDGETGEVIPSVRTAFRPLARHRPHRPVMAHPRRRHEDQTPLYRPTVGLGGRNTPRAAHADRRQHPPFPRHPPTAQTRPPHPDHISIKFAHNAIRRLGYDGSTPGKSKHTMHGFRHLFTNISLTAGKDTLTTDLALGHISRAALQRAGFSSLHHYLTADSYRLQERRELAEWYSRRHRQAYEAAAQNTCNKT

SEQ ID NO: 798 - protein, 361 aa, Neisseria meningitidis
MTVPCIPRGLVMADIAAFRLTEEEKQRLLDPAVGGVILFRRNFQNIAQLKELTAEIKALRTPELIIAVDHEGGRVQRFIEGFTRLPAMSTLGEIWDKDGASAAETAAGQVGRVLATELSACGIDLSFTPVLDLDWGNCPVIGNRSFHRNPEAVARLALALQKGLEKGGMKSCGKHFPGHGFVEGDSHLVLPEDGRSLSELEAADLAPFRIMSREGMAAVMPAHVVYPQVDTKPAGFSEIWLKQILRRDIGFKGVIFSDDLTMEGACGAGGIKERARISFEAGCDIVLVCNRPDLVDELREDFRIPDNPALAQRWQYMANTLGSAAAQAVMQTTDFQAAQAFVAGLASPQDTAGGVKVGEAF

SEQ ID NO: 799 - protein, 626 aa, Neisseria meningitidis
MNIFYEESGQFKIAAIIQKNDATYQVDTPHGKRTKVKANNVFAEFDGDMAAFLENAQAQAADIDTDLLWEVCGEEEFTAEAIAEEYYGHAPTKTELAATLIALYAAPMYFYKKAKGVFKAAPEETLKQALAAIERKKQQDAQIDAWAEALKRGEMPSEIAADLKTILHAPDKQSLTYKAFTKAADALKTSAYELAKKTGGITSIPQYLQDGFEIKYFPKGTGFPDLPLPEMPDLPKADVTAFSIDDESTTEVDDALSLTDLDNGTKRVGIHIAAPSLAIKQGDKMEKNIMERLSTVYFPGGKITMLPENWIAAFSLDAGAYRPSISIYFDVDSEFNVGAPTCKIEAVNIAENLRIQAIEPHFNAEAGLDEAGEMMFAHHQDLIWFYQFATALQKARGKYEPDRAPQYDYSIELDEEGNVSVVRRERGSPIDTLVSEMMILANSTWAQMLDENELPGLFRVQPAGKVRMSTKSEPHIGMGVQHYGWFTSPLRRAADYINQKQLISLIDDSAEPLYQNSDAELFAALRDFDAAYTAYADFQRQMEAYWSLVYLQQQGTSELTATILKEDLVRIEGLPLVTRATGIPFDALPKSQALFKITELDAEKQFVSLNYIKAVAPAGTTAGNAV

SEQ ID NO: 800 - protein, 310 aa, Neisseria meningitidis
MYEIKQPFHSGYLQVSEIHQIYWEESGNPDGVPVIFLHGGPGAGASPECRGFFNPDVFRIVIIDQRGCGRSRPYACAEDNTTWDLVADIEKVREMLGIRKWLVFGGSWGSTLSLAYAQTHPERVKGLVLRGIFLCRPSETAWLNEAGGVSRIYPEQWQKFVAPIAENRRNRLIEAYHGLLFHQDEEVCLSAAKAWADWESYLIRFEPEEVDEDAYASLAIARLENHYFVNGGWLQGDRAILNNIGKIRHIPTIIVQGRYDLCTPMQSAWALSKAFPEAELRVVQAGHRAFDPPLADALVQAVEDILPRLL

SEQ ID NO: 801 - protein, 74 aa, Neisseria meningitidis
MDAVQELERRIVELEIQSALQEDVIAGLNAMVAELRQTLDLQQAQLRLLYQKMQDRNPDAQEPYSLRDEIPPHY

SEQ ID NO: 802 - protein, 248 aa, Neisseria meningitidis
MTSCEPVNEKTDQKAVSAQQAKEQTSFNNPEPMTGFEHTVTFDFQGTKMVIPYGYLARYTQDNATKWLSDMPGQDAYSINLIEISVYYKKTDQGWVLEPYNQQNKAHFIQFLRDGLDSVDDIVIRKDACSLSTTMGERLLTYGVKKMPSAYPEYEAYEDKRHIPENPYFHKLYYIKKGENPAIITHQNYHRYGENDYSTSVGSCINGFTVRYYPFIREKQQLTQQELVGYHQQVEQLVQSFVNNPSKK

SEQ ID NO: 803 - protein, 135 aa, Neisseria meningitidis
MTYTTAKAAEKIGISAHTLRFYDKEGLLPNIGRDEYGNRCFTDNDLQWLGLLQCLKNTGMSLKDIKRFAECTVIGDDTIEERLSLFENQIENVKCQIAELKRYLDLLEYKLAFYQKAKALGSVKAVNLPQIPETA

SEQ ID NO: 804 - protein, 344 aa, Neisseria meningitidis; identical to SEQ ID NO: 611

SEQ ID NO: 805 - protein, 351 aa, Neisseria meningitidis
MTILSDVKALGQQIWLDNLSRSLVQSGELAQMLKQGVCGVTSNPAIFQKAFAGDALYADEVAALKQQDLSPKQRYETMAVADVRAACGICLAEHESTGGKTGFVSLEVSPELSKDAQGTVEEARRLYAAIGCKNAMIKVPATDAGIDALETLVSDGISVNLTLLFSRVQTLKAYAAYARGIAKRLAAGQSVAHIHVVASFFISRVDGALDTTLPDHLKGKIAIALAKAAYQDWEQYFTTPEFAALEAQGANRVQLLWASTGVKNPAYPDTLYVDNLIGAHTVNTVPDATLKAFIDHGTAKATLTEGVEEAQAQLAETAALGIDVETLANRLQEDGLKQFEEAFEKLLAPLV

SEQ ID NO: 806 - protein, 139 aa, Neisseria meningitidis; identical to SEQ ID NO: 663

SEQ ID NO: 807 - protein, 203 aa, Neisseria meningitidis
MRRAILLILTLTAGTSLAAGFSQKDTPINTRYRETPEEAAAREFKEHTAKLPPLPDTHSDGWFDIYVDENYGKQPKILLDSLQIMPAPDGSIRYILNIRSDKGYDNLTAEGIFCARSSIRFGNDKLSSYKVFGYGDTVNRRWIQPRNAEWKPIGGTLSRNDALRTVLYQAFCEGGVPADTKGLVQRLKERAGRYAPSIKPHDK

SEQ ID NO: 808 - protein, 635 aa, Neisseria meningitidis
MNPSPLLDLIDSPQDLRRLDKKQLPRLAGELRTFLLESVGQTGGHFASNLGAVELTIALHYVYDTPEDKLVWDVGHQSYPHKILTGRKNQMHTMRQYGGLAGFPKRCESEYDAFGVGHSSTSIGAALGMAAADKLLGSDRRSVAIIGDGAMTAGQAFEALNCAGDMDVDLLVVLNDNEMSISPNVGALPKYLASNVVRDMHGLLSTVKAQTGKVLDKIPGAMEFAQKVEHKIKTLAEEAEHAKQSLSLFENFGFRYTGPVDGHNVENLVDVLKDLRSRKGPQLLHVITKKGNGYKLAENDPVKYHAVANLPKESAAQMPSENKPAAKPTYTQVFGKWLCDRAAADSRLVAITPAMREGSGLVEFEQRFPDRYFDVGIAEQHAVTFAGGLACEGMKPVVAIYSTFLQRAYDQLVHDIALQNLPVLFAVDRAGIVGADGPTHAGLYDLSFLRCIPNMIVAAPSDENECRLLLSTCYQADAPAAVRYPRGTGTGVPVSDGMETVEIGKGIIRREGEKTAFIAFGSMVAPALAVAEKLNATVADMRFVKPIDEELIVRLARSHDRIVTLEENAEQGGAGGAVLEVLAKHGICKPVLLLGVADTVTGHGDPKKLLDDLGLSAEAVERRVRAWLSDRDAAN

SEQ ID NO: 809 - protein, 238 aa, Neisseria meningitidis
MTDTAENQTPNDRQAGHPRSIRSFVLRQSHMTAAQQRAIDTLWDSFGIDYQATPVDLDANFGSNRPKILEIGFGMGTATAEIALRLPETDFLAIDVHGPGVGNLLKLINENHLENIRVMRHDAVEVVENMLQDGSLDGIHIFFPDPWHKKRHHKRRLIQAPFIAKLLPKLKTGGYIHLATDWEEYAQQMLEVLSSFDSLQNTATDYAPTPDYRPETKFEARGKRLGHGVWDLVFKRIR

SEQ ID NO: 810 - protein, 171 aa, Neisseria meningitidis
MKSKLPLILINFSLISSPLGANAAKIYTCTINGETVYTTKPSKSCLSTDLPPIGNYSSERYIPPQTSEPTPSPSNGGQAVKYKAPVKTVSKPAKSNTPPPQQAPVNNSRRSILEAELSNERKALTEAQKMLSQARLAKGGNINHQEINALQSNVLDRQQNIQALQRELGRM

SEQ ID NO: 811 - protein, 314 aa, Neisseria meningitidis
MLEQNHYINLSLALTMSPDAGTYAALLSSVNAVLDCEKEGEVQWFALPVVLVSGCKKERAIEMKLPTEALFACLQNYPHLRALAQETQWLPYLVHSSDLSAVAPDEWWRAKQNTEAAAQHLRRFAPRPLLLPEGQSVHVVYALGFGSGKVQTALGQNLLQAGLPLMQVWQENLASEGVTLFANPLSPDSPVRALSEGSHTRQRMAMDVFAANAIRAVRMQSPRVGVVAAAKVGGQILFGFNATDGAFEVVPQVFSWQLSFTDNIAVVQQNFLDLMAECRVEHVYLLHNPLGEQESIPSYAEALKREGHNPFFSA

SEQ ID NO: 812 - protein, 1389 aa, Neisseria meningitidis
MTDTAPTDTDPTENGTRKMPSEHRPAPPAKKRRPLLKLSAALLSVLILAVCFLGWLASTEAGLRFGLYQIPSWFGVNISSQNLKGTLLDGFDGDNWSIETEGADLKISRFRFTWKPSELMRRSLHITEISAGDIAIVTKPTPPKEERPPLSLPDSIDLPAAVYLDRFETGKISVGKTFDKQTVYLERLDASYRYDIKGHRLNLKTADTPWSKSTGAVVIGLKKPFVLNTAIYTKGELEGETIHGTARLWGSLQDMHTDLILDGDNIHLSGKSVIHPFAESLDKTLEEVLIKGFNINPSAFLPSLPKARLNFDLTAIPSFSDGIALEGSLDLENTKAGFADRNGIPVRQVLGSFVIRQDGTVHIGNTSAALLGRGGIRLSGKIDTGKDILDLNIGINSVGAEDVLQTAFKGRLDGSIGIGGTTASPKISWQLGIGTARTDGSLAIASDPANGQRKLVLDTVNIAAGQGSLTAQGYLELFKDRLLKLDIRSRAFDPSRIDPQLPAGNINGSINLAGELAKEKFTGKMRFLPGTFNGVPIAGSADIVYESRHLPRAAVDLRLGRNIIKTDGGFGKKGDRLNLNITAPDLSRFGFGLAGSLNVRGHLSGDLDGGIRTFETDLSGAARNLHIGKAADIRSLDFTLKGSPDTSRPIRADIKGSRLSLSGGAAVVDTADLMLDGTGVQHRIRTHAAMTLDGKPFKFDLDASGGINRELTRWKGSIGILDIGGAFNLKLQNRMTLEAGAERVAASAANWQAMGGSLNLQHFSWDKKTGISAKGGAHGLHIAELHNFFKPPFEHNLVLNGDWDVAYGRNARGYLNISRQSGDAVLPGGQALGLNAFSLKTRFQNDRIGILLDGGARFGRINADLGIANAFGGNMANAPLGGRITASLPDLGALKPFLPAAAQNITGSLNAAAQIGGRVGSPSVNAAVNGSSNYGKINGNITVGQSRSFDTAPLGGRLNLTVADAEVFRNFLPVGQTVKGSLNAAVTLGGSIADPHLGGSINGDKLYYRNQTQGIILDNGSLRSHIAGRKWVIDSLKFRHEGTAELSGTVGMENSGPDVDIGAVFDKYRILSRPNRRLTVSGNTRLRYSPQKGISVTGMIKTDQGLFGSQKSSMPSVGDDVVVLGEVKKEAAAPLPVNMNLTLDLNDGIRFAGYGADVTIGGKLTLTAQSGGSVRGVGTVRVIKGRYKAYGQDLDITKGTVSFVGPLNDPNLNIRAERRLSPVGAGVEILGSLNSPRITLTANEPMSEKDKLSWLILNRAGSGSSGDNAALSAAAGALLAGQINDRIGLVDDLGFTSKRSRNAQTGELNPAEQVLTVGKQLTGKLYIGYEYSISSAEQSVKLIYRLTRAIQAVARIGSRSSGGELTYTIRFDRFSGSDKKDSAGNSKGK

SEQ ID NO: 813 - protein, 657 aa, Neisseria meningitidis
MVTAAISVYCIAYRFYSLYIANHVMRLDPNRLTPAERHNDGLDYVPTHKGVLFGHHFAAIAGAGPLVGPVLAAQMGYLPGTLWIIFGVVFAGAVQDMMVLFVSMRRDGKSLGDIVKQELGTVPGVIASIGILMIMVIIMAVLALIVVKALVHSPWGTFTIAATMPIALFMGIYTRYIRPGKIGEISIVGFILLMLAVIYGEDVAKSSIGHWFDLDGIQLTWAIMIYGFVASVLPVWLLLTPRDYLSTFLKIGTIAALALGIVIVNPALQMPAVTHFIDGSGPVFSGALFPFLFITIACGAVSGFHALISSGTTPKMLENETHVRMIGYGGMLMESFVAIMALAAAASLDPGVYFAMNSPAALIGTDANTAAEVITTKLQFPVDAATLLHTAKEVGENTILSRAGGAPTLAVGMAHIMSRLIPGEAMMAFWYHFALLFEALFILTAVDAGTRVARFMIQDLGSIFYKPFGNTDSIPANLIATFFAVALWGYFLYTGVTDPLGGINSLWPLFGIANQMLAGVALIMCAVVLIKMKRDRYVWVVLVPAVGVLFVTCYAGLQKLFHSDPRISFLAHAGKYSDALAKNEVLAPAKDIGEMAQIIFNDKINAGLTILFLSVVVIVAAYGLRTALKARKVGWPTAKEIPAVYRDGKQPEAQSEA

SEQ ID NO: 814 - protein, 524 aa, Neisseria meningitidis
MAQIQMSANVKTINAVFAAMLVGTVGYFIYGGLGYTHYNYAALFIIATMFGVFMAFNIGGNDVANSFGTSVGAGTLTIPQALLIAAVFEVSGAVIAGGEVTNTIRKGIVDLKGVDFEPIQFVFIMMSALLAAALWLLFASKKGLPVSTTHSIIGGIVGSAVCMAVMNDAASGDLIRWGKLGGIGVSWVLSPVLGGAVSYFLFSRVKKNVLDYNAWAEGTLKGIKQEKKAYKERHRLFFEGLSEAEKVEYATKMAHDAQIYDEPEFDPQELQSEYYRGLYAFDNRKNNVDSYKALHSWIPFIASFGAMMISAMLIFKGLKNLHLGMSNVNSFLTIFMIGAAVWMGTFVFAKSLKRKDLGKSTFQMFSWMQVFTACGFAFSHGANDIANAIGPFAAIMDVLRTNSVAAQNVVPPIAMLTFGIALIVGLWFVGKEVIKTVGTSLAEMHPASGFTAELSAASVVMGASLMGLPVSSTHILVGAVLGIGLVNRNANWKLMKPIGLAWVITLPAAAVLSVVCYLVLQAVF

SEQ ID NO: 815 - protein, 678 aa, Neisseria meningitidis
MTDNALLHLGEEPRFDQIKTEDIKPALQTAIAEAREQIAAIKAQTHTGWANTVEPLTGITERVGRIWGVVSHLNSVADTPELRAVYNELMPEITVFFTEIGQDIELYNRFKTIKNSPEFDTLSPAQKTKLNHDLRDFVLSGAELPPEQQAELAKLQTEGAQLSAKFSQNVLDATDAFGIYFDDAAPLAGIPEDALAMFAAAAQSEGKTGYKIGLQIPHYLAVIQYADNRELREQIYRAYVTRASELLDGGKFDNTANIDRTLANALQTAKLLGFKNYAELSLATKMADTPEQVLNFLHDLARRAKPYAEKDLAEVKAFARESLNLADLQPWDLGYASEKLREAKYAFSETEVKKYFPVGKVLNGLFAQIKKLYGIGFTEKTVPVWHKDVRYFELQQNGETIGGVYMDLYAREGKRGGAWMNDYKGRRRFSDGTLQLPTAYLVCNFAPPVGGREARLSHDEILTLFHETGHGLHHLLTQVDELGVSGINGVEWDAVELPSQFMENFVWEYNVLAQMSTHEETGEPLPKELFDKMLAAKNFQRGMFLVRQMEFALFDMMIYSEDDEGRLKNWQQVLDSVRKEVAVIQPPEYNRFALSFGHIFAGGYSAGYYSYAWAEVLSADAYAAFEESDDVAATGKRFWQEILAVGGSRSAAESFKAFRGREPSIDALLRHSGFDNAA

SEQ ID NO: 816 - protein, 558 aa, Neisseria meningitidis
MSQQYVYSMLRVSKVVPPQKTIIKDISLSFFPGAKIGLLGLNGAGKSTVLRIMAGVDKEFEGEAVPMGGIKIGYLPQEPELDPEKTVREEVESGLGEVAAAQKRLEEVYAEYANPDADFDALAEEQGRLEAIIAAGSSTGGGAEHELEIAADALRLPEWDAKIDNLSGGEKRRVALCKLLLSKPDMLLLDEPTNHLDAESVEWLEQFLVRFPGTVVAVTHDRYFLDNAAEWILELDRGHGIPWKGNYSSWLEQKEKRLENEAKSEAARVKAMKQELEWVRQNAKGRQAKSKARLARFEEMSNYEYQKRNETQEIFIPVAERLGNEVIEFVNVSKSFGDKVLIDDLSFKVPAGAIVGIIGPNGAGKSTLFKMIAGKEQPDSGEVKIGQTVKMSLIDQSREGLQNDKTVFDNIAEGRDILQVGQFEIPARQYLGRFNFKGSDQSKIAGNLSGGERGRLHLAKTLLGGGNVLLLDEPSNDLDVETLRALEDALLEFAGSVMVISHDRWFLDRIATHILACEGDSKWVFFDGNYQEYEADKKRRLGEEGTKPKRIKYKPVTR

SEQ ID NO: 817 - protein, 336 aa, Neisseria meningitidis
MSDTPATRDFGLIDGRAVTGYVLSNRRGTRVCVLDLGGIVQEFSVLADGVRENLVVSFDDAASYADNPFQINKQIGRVAGRIRGAAFDINGRTYRVEANEGRNALHGGSHGLAVTRFNAVAADGRSVVLRSRLQQSADGYPNDLDLDISYRLDEDDRLTVTYRATALGDTVFDPTLHIYWRLDAGLHDAVLHIPQGGHIPADAEKLPVSTVSDGLEVFDFSRPKPLDAAVAALRRETGRAGFDDAYRVPSDIGRPAAVLQAGRRCRISIYSDRNGLVIFTAAPQDFARHDAGVYDALATEAQTLPDSLHWPEFGNIRLNKGDTREATIAYGIESLS

SEQ ID NO: 818 - protein, 210 aa, Neisseria meningitidis
MTLRYEIFPVTPFRQNCTLIWDDESGEAVLTDVGGDVPFLLQALANRKLTLTAIWLTHGHLDHAGGVVEMLKTHKVPVLGPHPDDEFLLQSLPQTTAQYGFPVSPAFAPNHWLEEGETLKVGRYAFQVLHIPGHTPGHVVFYCAEAELLIAGDVLFYETIGRTDFPRGNHADLINNIRNKLFALPETVQVVAGHGRMTSIGHEKRHNPFF

SEQ ID NO: 819 - protein, 106 aa, Neisseria meningitidis
MSNTQTIRSADFTTSRAWGALDIANMNGTTVRLHWTDQPYKWHVNDGEEVFAVMDGEVDMHYRENGEEHIVRLKSGDIFYAGIGAEHVAHPRGETRILVIEKEGSV

SEQ ID NO: 820 - protein, 168 aa, Neisseria meningitidis
MPLLDSFKVDHTRMYAPAVRVAKTMTTPKGDTITVFDLRFCVPNKEILPEKGIHTLEHLFAGFMRDHLNGNGVEIIDISPMGCRTGFYMSLIGTPSEQQVADTWLASMQDVLTVQDQSKIPELNEYQCGTYLMHSLAEAQQIAQNVLARKVAVNKNEELTLDEGLLNA

SEQ ID NO: 821 - protein, 75 aa, Neisseria meningitidis
MDIKFNTLGVILNGVNPEEKFIKIIDDQENTGGFLILLSSNDKFSSFDSYDDWVENLEILKEYLQESHWIIKWVG

SEQ ID NO: 822 - protein, 83 aa, Neisseria meningitidis
MGSIAQRLEYLEEANDVLRMQNHVLSTAFKALIRALPADTAEVAVESIQLAFEDALAELSYEDSPHTDLFHDVTYAFFREKER

SEQ ID NO: 823 - protein, 636 aa, Neisseria meningitidis
MTLETLIALPRNIKKICFLIHDFLMIFIAFWFTQSLKADYSNEWFDPVNWQSFLLTALLTIGLFVRMGLYRAVTRFVSFHVLTTAFAGSIVSAVLFFLNTLIFEERLRLALPIVYFLLLFVSVTGSRMVLRGLLSEHPKKQMIPVIIYGAGQAGRQLLEAVKQIREYSAVAFVDDNPKLWHTVIYDLAVYQPDAIAFLIERYGVEKILLAIPGATQEQRRRIINKLEAYPCEVLTIPGMKDLMDGKISIGTLKKISVSDLLGRDSVAPDDRLMSADIEGKTVMVTGASGSIGSELCRQIIRRRPEKLLLFELSEFALYAIEKELRETCIQKRLDTEILPFLGSVQNRTLLEHVMTAFSVATVYHAAAYKHVPMVEFNTVEGIRNNIFGTLECALAATTSGVETFVLISTDKAVRPTNTMGASKRMAELCLQALAAEPGQKTRFSMVRFGNVLGSSGSVVPLFEKQIAEGGPLTLTHPEITRYFMTIPEAAQLVIQAGAMGKGGDVFVLDMGESVKIIDLARQMITLSGLKPKTPEQPDGDIEILITGLRPGEKLYEELLIGDNVRKTGHPRIMTANETMLPWHELSALLDRIRAACDRYDQQAIRTLLINAPTGFAPSDGICDLLWVRETHRKNAV

SEQ ID NO: 824 - protein, 183 aa, Neisseria meningitidis
MKAYLALISAAVIGLAACSQEPAAPAAEATPAAEAPASEAPAAEAAPADAAEAPAAGNCAATVESNDNMQFNTKDIQVSKACKEFTITLKHTGTQPKTSMGHNLVIAKAEDMDGVFKDGVGAADTDYVKPDDARVVAHTKLIGGGEEASLTLDPAKLADGEYKFACTFPGHGALMNGKVTLVD

SEQ ID NO: 825 - protein, 133 aa, Neisseria meningitidis
VKIKPLQFSNNNHRFYVDKICVTEQDVNILASDRNYELNIEIFIDNIIHFQITDESYKVKFSEYLFENKEKNDWDRNPAINYFFEIIDDSYMDWLKEESFDFFEKKYYKAYIFFFSDSVIEVISSTEPVFYSK

SEQ ID NO: 826 - protein, 319 aa, Neisseria meningitidis
MSTFFQQTAQAMIAKHIDRFPLLKLDQVIDWQPIEQYLNRQRTRYLRDHRGRPAYPLLSMFKAVLLGQWHSLSDPELEHSLITRIDFNLFCRFDELSIPDYSTLCRYRNRLAQDNTLSELLELINRQLTEKGLKVEKASAAVVDATIIQTAGSKQRQAIEVDNKGQVSGQTTPSKDKDARWTKKNSLYKLGYKQHTRTDAEGYIEKLYITPTNAHECKHLSPLLEGIAEGTTVYADKGYDSAENRQHLEEHQLQDGIMRKACRNRPLTETQTKRNRYLSKTRYVVEQSFGTLHRKFRYARAAYFGLICARCRLKGSPDA

SEQ ID NO: 827 - protein, 291 aa, Neisseria meningitidis
MNTEIEIIATDKVSNQAAMRSVLVMEQWGNGETYSEERWVERGRQAVRQTMEGMFELGRALIILKEHTEHGRFMEIVKSQFGLGIAETSRLMSATRRFATPQMQKAAPKLMDLGKSKLLELLVEEDVTLVGLAEGEEVNGMTFDDVDRMTVRELRVALRESRENLAAKDEVMKTKTAKIDELTEKLAKKQTVVREPKAEDVGSELAMQLTSLEVGIRSQVSRLKDLFDQLNAHSEAHEISHQAKMVGTLNQIILDCEQLRESYALPTEAPTDNVPEWLGGETGEGDESGND

SEQ ID NO: 828 - protein, 180 aa, Neisseria meningitidis
MRTHRKTCSAVCFAFQTASKPAVSIRHPSEDIMSLKIRLTEDMKTAMRAKDQVSLGTIRLINAAVKQFEVDERTEADDAKITAILTKMVKQRKDSAKIYTEAGRQDLADKENAEIEVLHRYLPQMLSAGEIRTEVEAAVAETGAAGMADMGKVMGVLKTRLAGKADMGEVNKILKAVLTA

SEQ ID NO: 829 - protein, 259 aa, Neisseria meningitidis
MHIIDSHCHLNFEGLKERLPEVLSNMEANGVGQALAISVSRESFSEVFAIAEAHEHIYCTIGVHPDSKEAEEFSIAEMVAAAASPKVVGIGETGLDYYWCKGDLSWQHKRFADHIEAANQTGLPVIVHTRDAAADTLSILKECRVNSGVIHCFSEDIGFARAAMDLGLYISFSGIVTFKNAPLVQEAAKYVPDDRILVETDAPFLAPVPKRGRQNEPAFVRHTAEHIAKLRNQTLEQVAAYTTENFYRLFKKVPDMRTV

SEQ ID NO: 830 - protein, 277 aa, Neisseria meningitidis
MSWWEFRGFWGILQRSRTIKQRKRQPYKLDSQLIQHIDTLIRRKLSPEQVCAYLCKHHRITLHHSTIYRYLRQDKSNGSTLWQHLRICSKPYRKRYGSTWTRGKVPNRVGIENRPAIVDQKSHIGDWEADTIVGKGQKSALLTLVERVTRYTIICKLDSLKAEDTARAAVRALKAHKDRVHTITMDNGKEFYQHTKITKALKAETYFCRPYHSWEKGLNENTNGLIRQYFPKQTDFRNISDREIRRVQDELNHRPRKTLGYETPSVLFLNLFQPLIH

SEQ ID NO: 831 - protein, 79 aa, Neisseria meningitidis
MILNIRKMGNSQGVILPKSLLGQIGAVDSLAVTVEKGNIILSCPTVRRGWAEAAAMLVETEQEHFFSEIENEADKEWIW

SEQ ID NO: 832 - protein, 171 aa, Neisseria meningitidis
MYTCTSCGEKHEDMPAIGFTAPYPYNQLSEEERIAYQAECGGDFCIIRYPDQTDRFIRAVLLIPIIGHEETLEYGVWVSVSEKSFNDYQSHFHDNPENVVYFGMICNRLPPYESDTFGLHCNVVTQSDNQRPLLQLHQSGGHPLVRDFYHGIEYAEAQARIGAVSESDCSG

SEQ ID NO: 833 - protein, 190 aa, Neisseria meningitidis
MDNPATAPWQDGWLQSVRHIPSPNFGPRESKEEVSLVVLHNISLPPFEYGTDAVEKLFANRLDPDGHPFFSLIHTLRVSSHFLIKRDGETVQFVSCDNMAYHAGVSSFRGREKCNAFSIGIELEGCDFEPFTEAQYRSLEALLDAICRRYPITAVTGHQDIAPSRKTDPGHFFDWRRIRGKGFPVDRNAV

SEQ ID NO: 834 - protein, 406 aa, Neisseria meningitidis
MAVNLTEKTAEQLPDIDGIALYTAQAGVKKPGHTDLTLIAVAAGSTVGAVFTTNRFCAAPVHIAKSHLFDEDGVRALIINTGNANAGTGAQGRIDALAVCAAAARQIGCKPNQVLPFSTGVILEPLPADKIIAALPKMQPAFWNEAARAIMTTDTVPKAASREGKVGDKHTVRATGIAKGSGMIHPNMATMLSFIATDAKVSQPVLQLMTQEIADETFNTITVDGDTSTNDSFVIIATGKNSQSEIDNIADPRYAQLKELLCSLALELAQAIVRDGEGATKFITVRVENAKTRDEARQAAYAVARSPLVKTAFFASDPNLGRLLAAIGYAGVVDLDTDLVEMYLDDILVAEHGGRAASYTEAQGQAVMSKAEITVRIKLHRGQSAATVYTCDLSHGYVSINADYRS

SEQ ID NO: 835 - protein, 490 aa, Neisseria meningitidis
MNQTSRDLTRISHNTKIVATLGPGSNNVELLEDMIRVGGLNVVRFNFSHGTPEFHQENARIVREAAKRAGQEIAIIADLQGPKIRVGKIAGGGIELNKGETLVLDAALEGEGTREAVGLDYRDLPDDVAAGDVLWLDDGLLTLTVESVEGSRIITRVENSHVLKSNKGINKRGGGLSAGALTEKDFRDLKTAIAIGCDYLAISFVKSAEDLHIARAKVEEEMKGSTAVRPGLVSKIERVEAIENLDEIILAGDGIMVARGDLAVEVGHAAVPALQKRMIRRARELRRFSITATQMMESMITNPVPTRAEVSDVANAVLDGTDAVMCSAETAVGAYPFETVSQMAIICAAAEKEQDSLNGVAEQAEYPEAVSTNLAVAGGAVSVARAVHAKAIVALTESGSTAFEISRHNITLPIFALTPSVSAQRRMAMYRGVRPLILATSTDHDTALNEVETMLVEHNILHSGDQYIITSGSQMRESGSTNTLEVLRVK

SEQ ID NO: 836 - protein, 270 aa, Neisseria meningitidis
MDIGTAKPSASERAFVPHHLIDIITPVQTYSAARFVEDCTRLIGEITARGKCPLIVGGTMMYFRALTQGLNDLPEADACLRADLDEQKQMYGLDFLYRTLQKVDPETACRLKPNDSQRIERALEVYYLTGKPMSEHLGRQSPHTLPFDLHTAALIPENRARLHENIALRFHLMLEQGFIGEVENLRRRYPGLTADSPAIRCVGYRQAWEYLDGKTDFPAFVEKGIAATRQLAKRQLTWLRKTPLDCVADPFSDGTSCTRLIEAAKRFFGA

SEQ ID NO: 837 - protein, 228 aa, Neisseria meningitidis
MYAFTDAQQQKALFWLVLFHILIIAASNYLVQFPFQIFGIHTTWGAFSFPFIFLATDLTVRIFGSHLARRIIFWVMFPALLLSYVFSVLFHDGGWTGLGALSEFNTFVGRIALASFAAYALGQILDIFVFDKLRRLKAWWVAPTASTVIGNALDTLVFFAVAFYASSDGFMAANWQGIAFVDYLFKLTVCGLFFLPAYGVILNLLTKKLTTLQTKQAQDRPAPSLQNP

SEQ ID NO: 838 - protein, 389 aa, Neisseria meningitidis
MPQIKIPAVYYRGGTSKGVFFKRSDLPEAAREAGSARDKILLRVLGSPDPYGKQIDGLGNASSSTSKAVILDKSERADHDVDYLFGQVSIDKPFVDWSGNCGNLTAAVGAFSIEQGLVDKGKIPSDGICTVKIWQKNIGKTIIAHVPMQNGAVLETGDFELDGVTFPAAEVQIEFLDSADGEGSMFPTGNLVDEIDVPNIGRLKATLINAGIPTVFLNAADLGYTGKELQDDINNDAAALEKFEKIRAYGALKMGLISDVSEAAARAHTPKVAFVAPAADYTASSGKTVNAADIDLLVRALSMGKLHHAMMGTASVAIATAAAVPGTLVNLAAGGGTRKEVRFGHPSGTLRVGAAAECQDGQWTTTKAVMSRSARVMMEGWVRVPEDCF

SEQ ID NO: 839 - protein, 271 aa, Neisseria meningitidis
LGGALLAGSSYANALALALDKPVIPVHHLEGHLLSPLLAEEKPDFPFVALLVSGGHTQIMAVRGIGDYALLGESVDDAAGEAFDKTAKLLGLPYPGGAKLSELAESGRPEAFVFPRPMIHSDDLQMSFSGLKTAVLTAVEKVREANGSETIPEQTRNDICRAFQDAVVDVLAAKVKKALLQTGFRTVVVAGGVGANRKLRETFGNMTVQIPTPKGKPKHPSEKVSVFFPPTAYCTDNGAMIAFAGAMHLGKGREVGAFNVRPRWPLSEIVR

SEQ ID NO: 840 - protein, 116 aa, Neisseria meningitidis
MEAFKTLIWIVNIISALAVIVLVLLQHGKGADAGATFGSGSGSAQGVFGSAGNANFLSRSTAVAATFFFATCMAMVYIHTHTTKYGLDFSNVQQTQQAPKPISNTEPSAPVPQQQK

SEQ ID NO: 841 - protein, 76 aa, Neisseria meningitidis
MKTLDERIKNLGKSLEDRIDANLIDAALEYITFSERLLAFETLCDYIEDFNIQLTEKESQEISFINKEFGIESTSD

SEQ ID NO: 842 - protein, 1371 aa, Neisseria meningitidis
MTYPIPKPREKSRWSNLSQGSLPLALARYLPHKRLKVVLTQDAEQALRLQTAWRFFRPHDTAVFLPDWETLPYERFSPHQDLVSERLSALWQIKSGAADVLFVPVATAMQKLPPVPFLAGRTFWLKTGQTLDIGRLKTDLVDAGYNHVSHVVAAGEFAVRGGIVDLFPMGSEMPYRIDLFDDEIDSIKTFDTDTQRTISPVSEIRLLSAHEFPTDSEAQKIFRSRFREEVDGNPNDAAVYKAVSNGHFGAGVEYYLPLFFENELETLFDYIGEDALFVSLGDVHAEANRFWSDVKSRYAMAQGDETYPPLLPQHLYLSSDVFAGRLKNYGQVLPDIFGVEHTLPNVAVNRQADEPLQALKDFQTAFKGRILLCAESLGRRETMLGFLQQNGLKAKPVSDWQGFLSAHEPLMITVAPLAYGFKLGGLQSPNQQQTTSASEGEGDAVTDQTEFSAAATNPLPSPLPQEREQSAAAVSTESSLPPGKSNLHGQIQQQPAPSPVGEGWGEGKAVAAQTEFPASATNPLPNPLPQEREQSAAVVSDSLKAAAVSTESSLPPGKSNLHGQIQQQPAPSPVGEGWGEGKAVAAQTEFSASATNPLPSPLPQEREQSAAVVSDSLKAAAVSTESSLPPGKSNLHGQIQQQPAPSPVGEGWGEGKAVAAQSAIAVITESDLYQYVARSRVHNRRKKHAAVSDGLLRDLAEINIGDPVVHEEHGIGRYMGLVTMDLGGETNEMMLLEYAGEAQLYVPVSQLHLISRYSGQAHENIALHKLGSGAWNKAKRKAAEKARDTAAELLNLYARRAAQSGHKFEINELDYQAFADGFGYEETEDQAAAIAAVIKDLTQAKPMDRLVCGDVGFGKTEVALRAAFVAVMGGKQVAVLAPTTLLVEQHAQNFADRFADFPVKVASLSRFNNSKATKAALEGMADGTVDIVIGTHKLVQDDIKFKNLGLVIIDEEHRFGVRQKEQLKRLRANVDILTMTATPIPRTLSMALEGLRDFSLITTAPSRRLAVKTFVKPFSEGSVREAVLRELKRGGQVFFLHNEVDTIENMRERLETLLPEARIGVAHGQLRERELEQVMRDFLQQRFNVLLCSTIIETGIDIPNANTIIINRADKFGLAQLHQLRGRVGRSHHQAYAYLLTPEYITKDAEKRLDAIAAADELGAGFTLAMQDLEIRGAGEILGEGQSGEMIQVGFTLYTEMLKQAVRDLKKGRQPDLDAPLGITTEIKLHSPALLPESYCPDIHERLVLYKRLAVCETVQQINAIHEELVDRFGLPEQPVKTLIESHHLRLMAKELGIDAIDAAGEAVTVTFGKNNNVDPTEIILLIQNDKKYRLAGADKLRFTAEMENIEVRINTVKNVLKTLQNRCLPK

SEQ ID NO: 843 - protein, 165 aa, Neisseria meningitidis
LKAGSRLLSESGKTQTVRNIVVKPKPLKAYNLTVADWHTYFVKGDKAETEGVWVHNDCPYGGSNNLEKAKLRAERLSKNDRAGKDFTKAGKEAVIDLNRIQNNGQVKCANCGIETIPAKQSIKNISPTSNERQVDHVIPKSKGGQGTPKNGQVLCRGCNIKKSNK

SEQ ID NO: 844 - protein, 115 aa, Neisseria meningitidis
MQTIDGEMAGGNKSLKIGTQSVEKSTGRTIPNNLKEQLAMEEVKANPQGKTPARIPPMSDTKNGWLAKDGWVKRVQNVNKIEIHYIENTRTGEKTDFKFIENTRTGEKTDFKFKD

SEQ ID NO: 845 - protein, 64 aa, Neisseria meningitidis
LAKRRKWRTFRYMELHDRQEMLFERIFRSVLRLVGVSSETVKQKFAGVELSYAGKAAGESLYCL

SEQ ID NO: 846 - protein, 415 aa, Neisseria meningitidis
MSQRRVVITGLGQVSPVGNTVAEAWDTLLAGKSGIGAITRFDASDINSRVAGEVRGFDIGQYISAKEARRMDVFIHYGIAAALQAIADSGLDDVENLDKDRIGVNIGSGIGGLPSIEVTGKAVIEGGARKINPFFIPGSLINLISGHVTILKGYRGPSYGMVSACTTGAHAIGNSARLIKYGDADIMVAGGAEGAISTLGVGGFAAMKALSTRNDDPATASRPWDKGRDGFVIGEGAGILVLEELEHAKKRGAKIYAEIVGFGMSSDAYHITAPNEEGPALAVTRALKDAGINPEDVDYVNAHGTSTPLGDANETKALKRAFGEHAYKTVVSSTKSMTGHLLGAAGGVEAVYSILAIHDGKIPPTINIFEQDVEAGCDLDYCANEARDAEIDVAISNSFGFGGTNGTLVFKRFKG

SEQ ID NO: 847 - protein, 121 aa, Neisseria meningitidis
MKKLLIAAMMAAALAACSQEAKQEVKEAVQAVESDVKDTAASAAESAASAVEEAKDQVKDAAADAKASAEEAVTEAKEAVTEAKEAVTEAKEAVTEAAKDTLNKAADATQEAADKMKDAAK

SEQ ID NO: 848 - protein, 122 aa, Neisseria meningitidis
MIQMQTILDVADNSGARRVMCIKVLGGSKRRYASVGDIIKVAVKDAAPRGRVKKGDVYNAVVVRTAKGVRRPDGALIKFDNNAAVLLNNKLEPLGTRIFGPVTRELRTERFMKIVSLAPEVL

SEQ ID NO: 849 - protein, 371 aa, Neisseria meningitidis
MRLFKSLKNPKKTDAKLPKKSSGLNNRAAIGIDIDQHSIKMVQLSGRSLNQIQLEKYVIAKLPKNIIQGNKVQNYDQLVTYLQQAYAKLGTSCKNIIASVPQNLATIEQLTYTDKDAELDLQGFVESSISEVSSISLEEANYDYQVLSQSAAGEAVLAVASRKDEIEPLIDAFNAAGMKLSALDVDIFGQYNAYALWINHFAPELAAEKVAIFGVYAAQTYALVIQDGKILYKQETSVSEEQLNQLIQRTYQVTEEKAEEIINSPQKPSDYQESVANYFNQQITQEIQRVLQFYYTTQTADDMTDIKHILLTGEAARQEGIAQTVASQTNADVQCVHPARYFADNLKTDKQQFELDAPTLTRAFGLAVRGL

SEQ ID NO: 850 - protein, 580 aa, Neisseria meningitidis
MNKIYRIIWNSALNAWVVVSELTRNHTKRASATVETAVLATLLFATVQANATDTDEDDELEPVVRSALVLQFMIDKEGNGEIESTGDIGWSIYYDDHNTLHGATVTLKAGDNLKIKQSGKDFTYSLKKELKDLTSVETEKLSFGANGNKVNITSDTKGLNFAKETAGTNGDPTVHLNGIGSTLTDTLAGSSASHVDAGNQSTHYTRAASIKDVLNAGWNIKGVKTGSTTGQSENVDFVRTYDTVEFLSADTKTTTVNVESKDNGKRTEVKIGAKTSVIAEENGKLVTGKGDEGKGLVTAKTVIDAVNKSGWRVKTTDNNQTGQADKFETVTSGTNVTFASGKGTTATVSKDDQGNITVKYDVNVGDALNVNQLQNSGWNLDSKAVAGSSGKVISGNVSPSKGKMDETVNINAGNNIEITRNGKNIDIATSMAPQFSSVSLGAGADAPTLSVDDEGALNVGSKDTNKPVRITNVAPGVKEGDVTNVAQLKGVAQNLNNRIDNVDGNARAGIAQAIATAGLVQAYLPGKSMMAIGGGTYRGEAGYAIGYSSISDGGNWIIKGTASGNSRGHFGASASVGYQW

SEQ ID NO: 851 - protein, 103 aa, Neisseria meningitidis
MKQLTLKEAQEFYAVHKDRPFYAGLVEFMTGGPVMIQVLEGENAVLKNRELMGATNPSEAAEGTIRADFATSVSINAVHGSDSVENAALEIAYFFSQTEICPR

SEQ ID NO: 852 - protein, 370 aa, Neisseria meningitidis
MQTAARRSFDYDMPLIQTPTSACQIRQAWAKVADTPDRETADRLKDEIKALLKEKNAVLVAHYYVDPLIQDLALETGGCVGDSLEMARFGAEHEAGTLVVAGVRFMGESAKILCPEKTVLMPDLEAECSLDLGCPEEAFSAFCDQHPDRTVVVYANTSAAVKARADWVVTSSVALEIVSYLKSRGEKLIWGPDRHLGDYIRRETGADMLLWQGSCIVHNEFKGQELAALKAEHPDAVVLVHPESPQSVIELGDVVGSTSKLLKAAVSRPEKKFIVATDLGILHEMQKQAPDKEFIAAPTAGNGGSCKSCAFCPWMAMNSLGGIKYALTSGRNEILLDRKLGEAAKLPLQRMLDFAAGLKRGDVFNGMGPA

SEQ ID NO: 853 - protein, 106 aa, Neisseria meningitidis
MNFQDYLATFPSIDHLGGLDVQDADGKTVHHIPAVQGKLGSLKLYNALAERFDGKLDKEAAEQGLIWFAEHVADARAHPGKHPNIDLLEKVVQSGETLLLKPLAAQ

SEQ ID NO: 854 - protein, 280 aa, Neisseria meningitidis
MDIKINDFTLGNNSPFVLFGGINVLESLDSTLQTCAHYVEVTRKLGIPYIFKASFDKANRSSIHSYRGVGLEEGLKIFEKVKAEFGIPVITDVHEPHQCQPVAEVCDVIQLPAFLARQTDLVVAMAKTGNVVNIKKPQFLSPSQMKNIVEKFHEAGNGKLILCERGSSFGYDNLVVDMLGFGVMKQTCGNLPVIFDVTHSLQTRDAGSAASGGRRAQALDLALAGMATRLAGLFLESHPDPKLAKCDGPSALPLHLLEDFLIRIKALDDLIKSQPILTIE

SEQ ID NO: 855 - protein, 322 aa, Neisseria meningitidis
MTAKPFSLNLTNLLLLAVLFAVSLSVGVADFRWSDVFSLSDSQQVMFISRLPRTFAIVLTGASMAVAGMIMQILMRNRFVEPSMAGAGQSAALGLLLMSLLLPAAPLPVKMSVAAVAALIGMLVFMLLIRRLPPTAQLMVPLVGIIFGGVIEAVATFIAYENEMLQMLGVWQQGDFSGVLLGRYELLWATGILALFAYLIADQLTILGLGEAVSVNLGLNRTAVLWSGLIIVALITSLVIVTVGNIPFIGLVVPNIISRLMGDKLRQSLPAVALLGASLVLLCDIVGRVIVFPFEIPVSTVFGVMGTALFLWLLLRKPAHAV

SEQ ID NO: 856 - protein, 245 aa, Neisseria meningitidis
MLTAYESSFAALMDDAGVEMLLVGDSLGMAVQGRKSTLPVSLRDMCYHTECVARSAKNAMIVSDLPFGAYQQSKEQAFAAAAELMAAGAHMVKLEGGVWMAETTEFLQMRGIPVCAHIGLTPQSVFAFGGYKVQGRGGKAQALLNDAKAHDDAGAAVVLMECVPAELAKKVTETVSCPTIGIGAGADCDGQVLVMHDMLGIFPGKTAKFVKNFMHGQSSIQAAVRAYVAEVKAKTFPAAEHIFAD

SEQ ID NO: 857 - protein, 226 aa, Neisseria meningitidis
MTYTIVPIATARSPYKQKFGIARQPGLVSAAEVCIELNPEFTADSVRGLEHFDYVWISFIFHGVLDEGWAQMVRPPRLGGKQKMGVFATRSPHRPNHLGLSLLKLERIETGKPVRLYCSGADLLDGTPIVDIKPYIPFVESKPDAASGFVSGKPVELEVVWQENIGAENLSANTKNLISQSIAQDPRPAYQDIPERIYVMNIADYEVRFQIEENRATVIDLSPTPL

SEQ ID NO: 858 - protein, 185 aa, Neisseria meningitidis
LGFGCREGKEFCKGLSLPEIIRDLLEMPSETAVADIARTYSAHYLNPNNRNMTLFPDALPCLDKLKAQGYWLAVATGKGRAGLDGAISQTATGGYWLATACAGEYPSKPSPEMVFGICRELGLDPKEALVVGDTAHDLHMAANAGAAAVGVTTGAHSREQLLSAPHLAVLDGLSELPGFLARHYA

SEQ ID NO: 859 - protein, 416 aa, Neisseria meningitidis
MFSKSVTLAQYDPDLAAAIAQEDQRQQDHVELIASENYVSCAVMDAQGSQLTNKYAEGYPGKRYYGGCEYVDIVEQLAIDRVKKLFGAQYANVQPHSGSQANQAVYASVLKPGDTILGMSLAHGGHLTHGASVNISGKLYNAVTYGLDENEVLDYAEVERLALEHKPKMIVAGASAYALQIDWAKFREIADKVGAYLFVDMAHYAGLVAGGEYPNPVPFCDFVTTTTHKTLRGPRGGVILCRDNTHEKALNSSIFPSLQGGPLMHVIAAKAVAFKEALQPEFKQYAKQVKINAAAMAEELVKRGLRIVSGRTESHVFLVDLQPMKITGKAAEAALGKAHITVNKNAIPNDPEKPFVTSGIRIGSAAMTTRGFNEADVRVLANLVADVLSNPEDEANLAKVREQVTALCNKYPVYGA

SEQ ID NO: 860 - protein, 354 aa, Neisseria meningitidis
MALVSMRQLLDHAAENSYGLPAFNVNNLEQMRAIMEAADQVGAPVIVQASAGARKYAGAPFLRHLILAAVEEFPHIPVVMHQDHGASPDVCQRSIQLGFSSVMMDGSLMEDGKTPSSYEYNVNATRTVVNFSHACGVSVEGEIGVLGNLETGEAGEEDGVGAVGKLSHDQMLTSVEDAVRFVKDTGVDALAIAVGTSHGAYKFTRPPTGDVLRIDRIKEIHQALPNTHIVMHGSSSVPQEWLKVINEYGGNIGETYGVPVEEIVEGIKHGVRKVNIDTDLRLASTGAVRRYLAENPSDFDPRKYLSKTIEAMKQICLDRYLAFGCEGQAGKIKPVSLEKMASRYAKGELNQIVK

SEQ ID NO: 861 - protein, 544 aa, Neisseria meningitidis
MTKFIFVTGGVVSSLGKGIAAASIAAILESRGLNVTMLKLDPYINVDPGTMSPFQHGEVFVTDDGAETDLDLGHYERFIDSTMTRRNSFSTGQVYENVIAKERRGDYLGGTVQVIPHITDEIKRRIHEGAAGYDVAIVEIGGTVGDIESLPFLEAIRQMRSQLGRNNTLFAHLSYVPYIAAAGEIKTKPTQHTVKEMLSIGLQPDILICRMDRTMPADERRKIALFCNVEERAIVGSYDVDSIYECPEMLHDQGIDNIITEQLQLNVQQADLTAWKKIVHAIQNPKHTVKIAMVGKYVDLTESYKSLIEALKHAGIHTETDVQITFVDSESIEKNNGDVSMLKDMDAILVPGGFGSRGVEGKIAAVRYARENNVPYLGICLGMQIALIEYARDVAGLKGANSTEFDLKCAAPVVALIDEWQTADGSVETRDESADLGGTMRLGAQEVELKAGSLAAKIYGSGHIRERHRHRYEVNNNYVPQLEKAGLVIGGVSAGRERLVETIELPNHPWFFACQFHPEFTSNPRKGHPLFTAFVKAALNNKKA

SEQ ID NO: 862 - protein, 706 aa, Neisseria meningitidis
MFDKHVKTFQYGNHTVTLETGEIARQAAAAVKVSMGDTVVLVAVTTNKEVKEGQDFFPLTVDYLERTYAAGKIPGGFFKREGKQSEKEILTSRLIDRPIRPLFPEGFYHDIQIVAMVVSVDPEIDSDIPAMLGASAALVLSGVPFAGPIGAARVGYINGVYVLNPTKAELAKSQLDLVVAGTSKAVLMVESEAKILPEDVMLGAVVYGHDQMQAAINAINEFADEVNPEVWDWKAPETNEELVAKVRGIAGETIKEAFKIRQKQARSAKLDEAWNAVKEALITEETDTLAANEIKGIFKHLEADVVRSQILDGQPRIDGRDTRTVRPLNIQTGVLPRTHGSALFTRGETQALAVATLGTSRDEQIIDALSGEYTDRFMLHYNFPPYSTGEVGRVGAPKRREIGHGRLAKRALLAVLPKPEDFSYTMRVVSEITESNGSSSMASVCGGCLSLLSAGVPLKAHVAGIAMGLILEGNKFAVLTDILGDEDHLGDMDFKVAGTTEGVTALQMDIKIQGITKEIMQIALAQAKEARLHILDQMKAAVAGPQELSAHAPRLFTMKINQDKIREVIGKGGETIRSITAETGTEINIAEDGTITIAATTQEAGDAAKKRIEQITAEVEVGKVYEGTVVKILDNNVGAIVSVMPGKDGLVHISQIAHERVRNVGDYLQVGQVVNVKALEVDDRGRVRLSIKALLDAPAREENAAE

SEQ ID NO: 863 - protein, 759 aa, Neisseria meningitidis
MNTPTDLKVTKRDGRLEAIDLDKIHRVVTWAADGLENVSVSQVELKSHIQFYNGIRTDDIHETIIKAAADLISEDTPDYQYLAARLAIFHLRKIAYGEYEPPHLYDHVKKLTDAAKYDRHILEDYSREEFDELNAYIDHERDMSFSYAAVKQLEGKYLVQNRVTRQIYETPQFLYVLVAMCLFSKYPKETRLDYVKRFYDAVSTFKVSLPTPIMSGVRTPTRQFSSCVLIECDDSLDSINATTSAIVKYVSQRAGIGINAGRIRGLDSEIRGGEARHTGCIPFFKMFQAAVKSCSQGGVRGGAATLFYPLWHIEAESLLVLKNNRGVEDNRIRQLDYGVQINRLLYTRLIKGGNITLFSPNEVPGLYEAFFADQDEFERLYTKYEQDPDIRKRIIPAADLFSTLMQERAGTGRIYIQNVDHCNTHSPFDPRVAPVHQSNLCMEIALPTKPLDNINDPNGEIALCTLSAFNLGALNSLDELEGLADLTVRALDALLDYQGYPVEAARTSTMGRRSLGIGVINYAYYLAKNGVRYSDGSALGLTHRTFEAIQYYLLKASANLAKEYGACTLFNQTVYSQGNLPIDTYKKDLDAVCNEPLHYDWESLRAEIVKYGLRNSTLTALMPSETSSQIANATNGIEPPRGLVTVKASKDGILKQVVPEFETLKNAYETLWQLPGNEGYLKLVGVMQKFVDQSISANTAYDPGKFEGGKVSMKQMLKDLLTAYKYGVKTLYYHNTRDGADDTQTDIQDDGCAGGACKI

SEQ ID NO: 864 - protein, 101 aa, Neisseria meningitidis
VGIQLFEFQSFPINCLSIECLDSRLRGNDGGAVSVFSSKYPQAEIPLFSQKQKTKNSNLKFVIPAQAGIQCVEFQLFRINFETLIASFPRKWESRNLMLRH

SEQ ID NO: 865 - protein, 316 aa, Neisseria meningitidis
MFYAMFEKGQKAGGASLIRCDRFEAASEAVNRLMPELIAVAAQSAELRNRWYAVEFLSTLSGEMLVTMIYHKRLDNEWMQAAQALQQQLDISVIGRSRGQKIVLKQDYVTETLKVGNRDFRYRQIEGSFTQPNAAVCQKMLEWACGAAEGLDGDLLELYCGNGNFTLPLSEKFERVLATEISKTSVSAAQWNIEANRIGNIKIARLSAEEFTEAYTGKREFKRLKDGGIALTDYAFSTIFVDPPRAGIDEETLKLVSQFDNIIYISCNPETLRTNLDTLAETHTVERAALFDQFPFTHHIESGVLLKKKILGKSKR

SEQ ID NO: 866 - protein, 533 aa, Neisseria meningitidis
MTEQHFTEQTKSLIDSLKTICANYGLGNDGNEFKIISQAFLYKFLNDKYDFEVKQIRKENPDEPIEFINMDIEGKTAVLKPEHSIKYLSERQNGADFAKLFDDTLTDIAAHNAELFSVKTEGGAKIVLFERISQYITDEGRRDDFCRALISKLAGFSFEAIFAQKFDFFATIFEYLIKDYNSNSGGKYAEYYTPHAVARIMADILVPEEVRGQIRSVDVYDPSAGSGTLLMNVAHAIGEDKCMIYTQDISQKSSNLLRLNLILNNLVHSLNNVVQGNTILSPAHKDASGRLKKFDFIVSNPPFKLDFSDFRDQLEGEENRERFFAGIPKIKAKDTDKMEIYQLFIQHILFSLKENGKAAIVLPTGFITAQSGIDKKIREHLVENKMLAGVVSMPSNIFATTGTNVSILFIDKANKDKVVLIDASGLGEKIKDGKNQKTVLSREEEQKICNTFTHKQAVEDFSVVVGYDEIKAKNYSLSAGQYFEVKIDYVDISAEEFKQRMAGFSADLDKLFAESAKLEKEIKDRLAMLKFNS

SEQ ID NO: 867 - protein, 119 aa, Neisseria meningitidis
MNIKHLITAALIASAAFAAQAAPQKPVSAAQTAQHSAVWIDVRSEQEFSEGHLHNAVNIPVDQIVRRIHEAAPDKDTPVNLYCRSGRRAEAALQELKKAGYTNVANHGGYEDLLKKGMK

SEQ ID NO: 868 - protein, 122 aa, Neisseria meningitidis
MLQEFLELQKQDIAVKQKELESRKDEIQSHERIALATIEAQKQGEQQHGEIFKEVHKRRLNAVIAISFLIAAVLITALWRDKDSVAIEIVKIGGAVALGYFAGINRGKAQTLEKQRREKDSD

SEQ ID NO: 869 - protein, 436 aa, Neisseria meningitidis
MYAKKGGLGLVKSRRFAPLFATQFLGAFNDNVFKTALFVMIGFYGLGQNGFLPAGQMLNLGALLFILPYFLFSSLSGQLGNKFDKAVLARWVKVLEMIIMAVAAYGFYIRSAPLLLACLFCMGAQSTLFGPLKYAILPDYLDDKELMMGNSLIESGTFVAILFGQILGTAVAGVPPYIVGILVLLVAVGGTVGSLFMPSVPAKAADTQIEWNIVRGTKSLLRETVRHKPVFTAIIGISWFWFVGAVYTTQLPTFTQIHLGGNDNVFNLMLALFSIGIAAGSVLCAKFSRERLMLAWVTVGALGLTVCGLVLVWLTHGHRFEGLNGIFWFLSQGWAYPVMAVMMLIGFFGGFFSVPLYTWLQTASSETFRARAVAANNIVNGIFMVSAAVLSAVLLFVFDSISLLYLIVALGNIPLSVFLIKRERRFLGAAAIRKKP

SEQ ID NO: 870 - protein, 488 aa, Neisseria meningitidis
MMKLGFKPIPLAIAAVLCALVLALPVPDGVKPQAWTLLAMFVGVIAAIIGKAMPLGALSIIAVGLVAVTGVTADKPGAAMSDALSAFANPLIWLIAIAVMISRGLLKTGLGMRIGYLFIAVFGRKTLGIGYSLALSELLLAPVTPSNTARGGGIIHPIMQSIAGSYGSNPAKGTEGKMGKYLALVNYHSNPISSAMFITATAPNPLIVNLIAENLGSSFRLSWGAWAWAMAVPGVIAFFVMPLILYFLYPPEIKETPNAVQFAKDRLREMGKMSADEIIMAVIFGILLLLWADVPALITGNHAFSINATATAFIGLSLLLLSGVLTWDDVLKEKSAWDTIIWFGALIMMAAFLNKLGLIKWFSGVLAESVGGLGVSGTAAGVILVLAYMYAHYMFASTTAHITAMFGAFLAAAVSLNAPAMPTALMMAAASNIMMTLTHYATGTSPVIFGSGYTTMGEWWKAGFIMSVVNFLIFFVIGSIWWKVLGYW

SEQ ID NO: 871 - protein, 158 aa, Neisseria meningitidis
MNTIAPNLDGKHLRIGIVQARFTNEIGSEMLKVCCRTLQELGVADENITVATVPGALEIPIALMNFASSEKFDALIAIGVVIRGETYHFELVSNESGAGVSRVALDYNIPIANAVLTTENDAQAIERIEEKASDAAKVAVECANLVNLLLEEQFEDEE

SEQ ID NO: 872 - protein, 417 aa, Neisseria meningitidis
LRIGREFMPSAHYPEMSEKLMAVLMAMLVTLMPFSIDAYLPAIPEMAQSLNADVHRIEQSLSLFMFGTAFGQVVGGSVSDIKGRKPVALTGLIVYCLAVAAIVFVSSAEQLLNLRVVQAFGAGMTVVIVGAMVRDYYSGRKAAQMFALIGIILMVVPLVAPMVGALLQGLGGWQAIFVFLAAYSLVLLGLVQYFLPKPAVGGKIGRDVFGLVAGRFKRVLKTRAAMGYLFFQAFSFGSMFAFLTESSFVYQQLYRVTPHQYAWAFALNIITMMFFNRVTAWRLKTGVHPQSILLWGIVVQFAANLSQLAAVLFFGLPPFWLLVACVMFSVGTQGLVGANTQACFMSYFKEEGGSANAVLGVFQSLIGAGVGMAATFLHDGSATVMAATMTASTSCGIALLWLCSHRAWKENEQSEYL

SEQ ID NO: 873 - protein, 111 aa, Neisseria meningitidis
LLKTDDFSSVFAFRNRRSRDLLQVSRSNGNGLDHPRIGLVVGKKTAKRANERNYMKRVIRDWFRLNKNRLPPQDFVVRVHRKFDRSTAKQARAELAQLMFGNPATGCRKQA

SEQ ID NO: 874 - protein, 658 aa, Neisseria meningitidis
MHPIETPDKTFHDGDGVSELDTILPAWWLNQVQSELLAVLTAAGIQPDKSQPNQLLAALNRLAVVTTGNQEIGGQKTFTAQTQFPSGIHLSANQTNWNGGHKAYIGADADNAHIVFGDDTLRLHSANNRISYNNHDIFHKANKPRFAEDIEGKPNTLSGYGIGNFKVETFRGDLNTLKTDGIYSLPTAVGSSNLPVENTACHIQVIAGTQPGWCRQLGYPAYTSDVYERHQTSSANDNWSAWKKLNSDGIPVGAIVSFPKAVRNPAGYLRADGTTFAQNTFPDLYRALGNSNRLPDLSRTDIGITAWFPSDQIPTGWLAFDDIRTRVTETAYPELYRLLTGKYGSIQNVPQAEDRFIRNAGNSLAVGTKQEDEIKRHVHKVFSHWTNHTDAAALGYEDRNERQRSALVSTWTDENLNDNGFLTPRSDSKMATGGDENRPKALVLKLCIKAADTLGEAVFWIKSHGETINAGALDAGTLAQNLQDKADRAHTHTAAQIQGLDEKISTAVAAQFTRQTIGGVDIVRFPDGTMIQTGSYRFTRSGGPIENEVVFPVAFADGNVKCFVSERHSGRVTGDRRQHNWLFIRAKNHAAAIITNWYEGSCDWMAIGKAASGNAASSPIGPEIPETNEEPQRESGRTSTGPRNRRRRRDGLLEALQD

SEQ ID NO: 875 - protein, 107 aa, Neisseria meningitidis
MNKIIKGDRVVVIAGKDKGKQGQVVRVLGDKVVVEGVNVVKRHQKPNPMRGIEGGIITKEMPLDISNIAILNPETNKADRVGIKLIENEGKVKRVRFFKSNGSIIGA

SEQ ID NO: 876 - protein, 206 aa, Neisseria meningitidis
MAQFFAIHPDNPQERLIKQAVEIVNKGGVVVYPTDSCYALGCKLGDKAAMERILSIRKIDLKHHLTLMCADLSELGTYAKIDNVQFRQLKAATPGPYTFILQATKDVPARTLHPKRKTIGLRIPDNAIAQALLGELGEPLLSCTLMLPEDGEPLTDPYEIRERLEHAVDLVIDGGWCGTEPTTVIDMTDGTELVRQGCGDTAVFGL

SEQ ID NO: 877 - protein, 203 aa, Neisseria meningitidis
MAAPAGVATECRLTVQGGTDRESDASLLARLLEIIRRPPAGGNRYDYKNWALSVDGVTSAYVYPLRRGLGTVDIAITSADGVSSEETVRRVQAYIDEMRPVTAKNALVLKPTVTAVPVTVQVKLDGIDLDEAKRRIRTALKEYFDTLIPGDGLTVSQIEAAISNVDGVIDRRLTAPTANRAADTVNRIEWFKAGAINVTEMPS

SEQ ID NO: 878 - protein, 416 aa, Neisseria meningitidis
MTKLTRRQIIRRTAGTLFALSPIASAVAKTVRAPQFTAVRIWPSHTYTRLTLESTAALKYQHFTLDNPGRLVVDIQNANINTVLHGLSQKVMADDPFIRSIRAGQNTPDTVRLVIDLKQPSYAQVFSLPPVGGFKNRLVVDLYPQGMDADDPMMALLNGSLNKTRRGSPEADLAQNTPAQTERGKNGRRPVIMIDPGHGGEDPGAVSPGGLQEKHVVLSIARETKKQLEALGYNVFMTRNEDVFIPLGVRVAKGRARRADVFVSIHADAFTSPSARGTGVYMLNTKGATSSAAKFLEQTQNNADAVGGVPTSGNRNVDTALLDMTQTATLRDSRKLGKLVLEELGRLNHLHKGRVDEANFAVLRAPDMPSILVETAFLSNPAEEKLLGSESFRRQCAQSIASGVQRYINTSVLKRG

SEQ ID NO: 879 - protein, 339 aa, Neisseria meningitidis
MKKILVTGGTGFIGSHTVVSLLKSGHQVVILDNLCNSSINILPRLKTITGQEIPFYQGDIRDREILRRIFAENRIDSVIHFAGLKAVGESVAEPMKYYDNNVSGSLVLAEEMARAGVFKIVFSSSATVYGDPGKVPYTEDMPLGDTTSPYGTSKSMVERILTDIQKADPRWSVILLRYFNPIGAHESGLIGEQPNGIPNNLLPYICQVASGRLPQLSVFGGDYPTPDGTGMRDYIHVMDLAEGHVAAMQAKSNVAGTHLLNLGSGRASSVLEIIRAFEAASGLTIPYEVKPRRAGDLACFYADPSYTKAQIGWQTQRDLAQMMEDSWRWVSNNPNGYDD

SEQ ID NO: 880 - protein, 149 aa, Neisseria meningitidis
MDVQLPIEAKDIQKLIPHRYPFLQLDRITAFEPMKTLTAIKNVTINEPQFQGHFPDLPVMPGVLIIEAMAQACGTLAILSEGGRKENEFFFFAGIDEARFKRQVIPGDQLVFEVELLTSRRGIGKFNAVAKVDGQVAVEAVIMCAKRVV

SEQ ID NO: 881 - protein, 460 aa, Neisseria meningitidis
MSINTFETFIYELYQSTNFAEIARITGFSNHKALNLETIRMMAISCFKTKNTTKCIELSEYFNEKSDIKDFFIFEILAECYFLQNDLVKSLENYEKALLLNPKLISARFKHMCLKYRLFNELDSTTFSKYEIESQQKKKISNLRIIAYIQLKEKKYFKAYNNLKLLIELNKSPFYPDYLSIIHAIENLEYSKQSQNTKKELTEYIKISKAIALKSEFVCNGSNNLFVTLSPATGFVLKKYNYPADKLCFIDNTNTYYTFAYELIAEHIISLVKKYKYENISIIGSSKGGTATIILLNLLQTALPNTTICAVSCSPQIQIFPFNKNLTIPSYQKFAEYFSYNSILESKCAQAQKLINFDILYRNKLTIFYGDKFKMDAQEVSTIRPINNTTIIPLNYSGHGSLIPLTIPENKSFDELKQKYSKLEIDTDFQALGGNNLSSIVDEIFEIYSNPDMRLHKFLC

SEQ ID NO: 882 - protein, 245 aa, Neisseria meningitidis
MIILDKVSKHYQTRDKTRFAAVEPTSLEIRDGEIFGLMGYSGAGKSTLLRLINLLERPDSGKVNVCGQELTALDAAALRQARQNIGMVFQQFNLLNNRTVAGNVAFPLEIAGWPSEKIKARVAECLEIVGLTERAGHYPAQLSGGQKQRVGIARALASKPQVILADEPTSALDPATTRSVLECLEDINKRFNVTIVIVTHEMSVIRRLCDRAALLDKGKVVEIVEVRGNQIHARSDIGRELIRED

SEQ ID NO: 883 - protein, 343 aa, Neisseria meningitidis
MGIKVAINGYGRIGRQVLRAIYDYQIQDQLQIVAVNASGSLETNAHLTKFDTVHGRFEADVSHDGGNLIVNGDKIPFFSTRNPAELPWKELGVDLVMECTGAFTSKEKAKIHLESGAKKVLISAPGGDDVDATVVYGVNDSILTADMTVVSNASCTTNCLSPVAKVLSESVGIVKGAMTTIHALTNDQTVTDVRHKDLRRARSGVENMIPTKTGAAKAVGLVLPELKGRLDGLAIRVPTVNVSLVDLSFQAARDTTIEEINALMKAASEAGALKGVLGYNTLPLVSMDFNHTTEASHFDATLTKVVDGNMVKVFAWYDNEWGFSCQMLNTARRMFGLEVRPLK

SEQ ID NO: 884 - protein, 436 aa, Neisseria meningitidis
MTDLFAREPDAPLAERLRPHTLDDVVGQEHLIGEGKPLRVAVEGGKPHSMLLWGPPGVGKTTLARILAQSFNAQFLPVSAVFSGVKDIREAIDKAEIALQQGRATILFVDEVHRFNKAQQDAFLPHVESGLLTFIGATTENPSFEVNPALLSRAQVYVLQPLSSDGLKKLVAKVLALPEYRDFTIEADAQELFVNTADGDARRLLNLLEQLLRAADTRRLKNLTAEFLADSLGAQIRRFDKGGESFYNQISALHKSVRGSHPNAALYWFCRMLDGGTDPRYLARRIVRIAWEDIGLADPRAFQIANDAAATFERLGSPEGELALAQAVLYLAAAAKSNAGYKAYNQMRHFVKENASDEVPVHLRNAPTKLMKELGYGREYRYAHDEPNAYSAGESYMPDGLDEPDFYQPVPRGLEIKIGEKLAWLKSLDEEALKAK

SEQ ID NO: 885 - protein, 421 aa, Neisseria meningitidis
MFSFFRRKKKQETPALEEAQIQETAAKAESETDQVIENIKEDAESLAESVKGQVESAVETVSGAVEQVKETVAEMLSEAEEAAEKAAEQVEAAKEAVAETVGEAVGQVQEAVATTEEHKLGWAARLKQGLTKSRDKMAKSLAGVFGGGQIDEDLYEELETVLITSDMGMEATEYLMKDVRDRVSLKGLKDGNELRGALKEALYDLIKPLEKPLVLPETKEPFVIMLAGINGAGKTTSIGKLAKYFQAQGKSVLLAAGDTFRAAAREQLQAWGERNNVTVISQTTGDSAAVCFDAVQAAKARGIDIVLADTAGRLPTQLHLMEEIKKVKRVLQKAMPDAPHEIIVVLDANIGQNAVNQVKAFDDALGLTGLIVTKLDGTAKGGILAALASDRPVPVRYIGVGEGIDDLRPFDARAFVDALLD

SEQ ID NO: 886 - protein, 286 aa, Neisseria meningitidis
MKPYSANPNLTEPRWLRVLLIAAALGFLLLMLVVPLVAVFYEALKGGWDLYLKSLNDPEAWSAIKLTLITALIVVPVNAVLGVAMAWLLTRFDFRGKQLLTTLLDLPFSVSPVVAGLMFVLLFGAHTALGGWLEAQGIQIIFAIPGIILATLFVTFPFVAREIIPLMQAQGDSEEQAALILGASGWQMFWRVTLPNIKWALLYGIILTNARAMGEFGAVSVVSGHIRGETNTVPLLVEIFYNEYNFTGAFALSGVLALLALATLAVQNIITKLQDKKLAAAERNAA

SEQ ID NO: 887 - protein, 256 aa, Neisseria meningitidis
VRHIAQTEIMPRFLNTPSHRKEDGSMLSEADIAAQTAFAAALPLLIDSPMLGEEMSRQEQSALWEQYSGEKGLWIVDPIDGTNNFVNGLPHFAVSVAFVRNGRAELGVIYNPVSGECFYAERGQGAFLNGTRLPLRLVDKKLNEAIAGVEIKYLRSGKLSSRMSTLAPFGTIRSMGSSTLDWCYLACGRYDVYVHGGQKLWDYAAGALIFEEAGGRLTTLEGDGFWSGEHVFKRSVVAALEPKLFERWVGWIRENQ

SEQ ID NO: 888 - protein, 453 aa, Neisseria meningitidis
MLKKWLNKMLPSGRSSKKAESKTIIPAERHNIRAEMLSFAAENVIRRLKGAGFQAYVVGGAVRDLLLGIEPKDFDVATDATPEQVHKLFRRSRIIGRRFQIVHVMNGAEIIEVTTFRGGAKVHQNAHGRIMKDNTYGSIEEDAMRRDFTCNALYYDPEKEEILDFHNGIADVAARRLVMIGDAAERYQEDPVRILRAIRLSSKLGFDLSEETAAPIAESICRLKHEPVARLFDEIMKLLFSGHARECLKRLNGFDIPDDIHPLLNALRVSDGIAGKMTVLALKNTDERLRADKSVSVGFVLATLMWPELERHWKSNLQQGLKPVPALSDAINTMRETVERGWGVPQRFSATMREIWMFQPQFENRKGARPHKLFAQARFRAAYDFLLLRAETGNADRALAEWWTAFQTASTEQRSEMTKNEAAARHEKNEGQAKKRRRRRRKPKPKVVGTDWE

SEQ ID NO: 889 - protein, 765 aa, Neisseria meningitidis
MQPHAPHTDSNTLMLGQYAERAYLEYAMSVVKGRALPEVSDGQKPVQRRILFAMRDMGLTAGAKPVKSARVVGEILGKYHPHGDSSAYEAMVRMAQDFTLRYPLIDGIGNFGSRDGDGAAAMRYTEARLTPIAELLLSEIHQGTVDFVPNYDGAFDEPLHLPARLPMVLLNGASGIAVGMATEIPPHNLNEVTQAAIALLKKPTLETADLMQYIPAPDFAGGGQIITPADELRRIYETGKGSVRVRARYEIEKLARGQWRVIVTELPPNANSAKILAEIEEQTNPKPKAGKKQLNQDQLNTKKLMLDLIDRVRDESDGEHPVRLVFEPKSSRIDTDTFINTLMAQTSLEGNVSMNLVMMGLDNRPAQKNLKTILQEWLDFRTVTVTRRLKFRLNQVEKRLHILEGRLKVFLHIDEVIKVIRESDDPKADLMAAFGLTEIQAEDILEIRLRQLARLEGFKLEKELNELREEQGRLNILLGDENEKRKLIIKEMQADMKQYGDARRTLVEEAGRAVLTQTTADEPITLILSEKGWIRSRAGHNLDLSQTAFKEGDRLKQTLEGRTVLPVVILDSLGRTYTLDAAEIPGGRGDGVPVSSLIELQNGAKPVAMLTGLPEQHYLLSSSGGYGFIAKLADMVGRVKAGKVVMTTDSGETVLPPIAVYASSFINPDCKIIAATSQNRALAFPIGELKIMAKGKGLQIIGLNAGESMTHTAVSSEPEILIESEGRRGAAHKDRIPISLLEAKRGKKGKLLPISGSLKQLSSPK

SEQ ID NO: 890 - protein, 133 aa, Neisseria meningitidis
MLQIAAATDFSVIIKNSSNTPHHTRTTVSLPSDKDAFHGTDTCRRRQNRPTLPTAPDCGRKRKSLQELNDIFTMVEQMQTINTDGIEPMAHPHEAALRLREDEVTETDRAAEYQAVAPEVRNRLYIVPQVIEE

SEQ ID NO: 891 - protein, 1001 aa, Neisseria meningitidis
MSQTHNENSRVKIPAVLHLMRLGYDYLSLKNENWDKPTNIFPKIFIESLCRINPDLSPDDARRLLTDIRLELDNEDLGQKFYERLTNQSGGKKLIDFQNFDNNSFHVVTELPCINGDEEFRPDITLLVNGMPLVFIEVKKPNNKGGIGEERERMGKRAKNSKFRRFINITQFMIFSNNMEYDDGATEPAQGAFYASSAYGKPVFNYFREEHKLNLAELLNTLSDGLENNVLQDNNLPVIKHSPEFISNKSPDTPTNRILTSLLCRERLSFLLQHGLTYVKASQGLVQKHIMRYPQLFATLAIEKHLANGGKKGVIWHTQGSGKTALAYYNTRYLTHYYAKQGIVPKFYFIVDRLDLLKQAQREFTARDLVVHTIDSREAFAADIKSAQTLHNHAGKAEITVVNIQKFQDDPDVVARNDYDLAIQRVYFLDEVHRSYNPKGSFLANLNQSDVNAVKIGLTGTPLIGVTAGNVNTRELFGDYIHKYYYNASIADGYTLRLIREEIGSRYKAQLQEALAQLEIEKGSFDRKEIYAHPHFVHPMLDYILDDFAKFRKTNQDDSLGAMVVCDSAEQARQLFEHFQIASDHNFTAALILHDVGTKDERDQWVKDFKAGKIDILFVYNMLLTGFDAPRLKKLYLGRLIKAHNLLQTLTRVNRTYKSYRYGYVVDFADIEREFDKTNRAYWDELSNELGDEIGSYSRLFKTAEEIEQEIADIKNALFDFDTENAEEFCSQISQIADKKQLLALKKALQTSKKLYNVLRLQGSHEFLAHLDFDKLNLLYRETAARLETLNLAEKLQQGDTAHLLNEALEDVYFQFVKIGEAELKLADDLKDIMRKVREGLAGNFDQEDPEYISLREGLERIFKKKNLAEVGQEEMQANIAILETVYAKIKELNRQNDLLRHKYGGDAKYARIHKRLRENPALYGDKLKVFNALNGVKTDTDQKVLDMEQILDNQNYFEKQMQGIVLKRFRTEQQFPVQPADIQAINRLLVREYLKESGRI

SEQ ID NO: 892 - protein, 456 aa, Neisseria meningitidis
MLDNLTGRFSNVLKNIRGQAKLTEDNIKEALREVRLALLEADVALPVVKEFVNNVKEKALGQEVAGSLTPDQAFIGVVNKALTELMGRENKTLDLSVAPPAVVLMAGLQGAGKTTTAGKLARLLKNDQKKKVLVVSADVYRPAAIEQLRLLAEQVGVDFFPSDTNQKPVEIATAAVDYAKKHFYDVLMVDTAGRLAIDEEMMNEIKALHAAVNPVETLFVIDAMLGQDAVNTAQAFNEALPLTGVVLTKMDGDSRGGAALSVRHVTGKPIKFIGVGEKINGLEPFHPDRLASRILGMGDVLTLIEDVQKGIDEEAAAKMAKKLQKGKGFDLNDFKEQIQQMRNMGGLENLMSKMPGELGQISKQIPEGTAEKAMGKVEAIINSMTPKERANPALLKASRKRRIAMGAGTTVQEVNKLLKQFEQMQQMMKMFSGNGLGKLMRMAKGMKGMKGMFPGL

SEQ ID NO: 893 - protein, 60 aa, Neisseria meningitidis
MFWYVIGFCSFVVALLSLWVNAGAFGMQEDDTPQSDYEKRLGLGAKLKNKNTPDTEEKQQ

SEQ ID NO: 894 - protein, 287 aa, Neisseria meningitidis
MEEYTANLSSDGIVSAQILLSRADFADKRRYQNAGGALSVLLQRRAVPIINENDTVSVEELKIGDNDTLSAQVAAMIQADLLVLLTDIDGLYTGNPNSNPDAVRLDKIEHINHEIIEMAGGSGSANGTGGMLTKIKAATIAAESGVPVYICSSLKPDALAEAAEHQADGSFFVPRAKGLRTQKQWLAFYSESRGSVYVDEGAEHALSEQGKSLLMSGIAGIEGHFSRMDTVTVYSKATKQPLGKGRVLFGSAAAEDLLKSRKAKGVFIHRDDWISITPEIRLLLTEF

SEQ ID NO: 895 - protein, 105 aa, Neisseria meningitidis
MNKPFITQAQLALYKYQPSSKYFGQSMAVIAQSEFVEFAKINKSENVIDCFSFFWNRRIKHDIWLISFSDNSEMVIKESLKDGHKIYKFEFCEIVDNCNFDDVFV

SEQ ID NO: 896 - protein, 161 aa, Neisseria meningitidis
MRFFGIGFLVLLFLEIMSIVWVADWLGGGWTLFLMAAGFAAGVLMLRHTGLSGLLLAGAAMRSGGRVSVYQMLWPIRYTVAAVCLMSPGFVSSVLAVLLLLPFKGGAVLQAGGAENFFNMNQSGRKEGFSRDDDIIEGEYTVEEPYGGNRSRNAIEHKKDE

SEQ ID NO: 897 - protein, 131 aa, Neisseria meningitidis; identical to SEQ ID NO: 546

SEQ ID NO: 898 - protein, 73 aa, Neisseria meningitidis
MAVWRDYITLESHDLAEGYTYFFNENTDDCYVLKQDFINNERYEKTELYSQKDKVILFPKFGEYDLVLNPDII

SEQ ID NO: 899 - protein, 109 aa, Neisseria meningitidis
MRVNAQHKNARISAQKARLVADLIRGKDVAQALNILAFSPKKGAELIKKVLESAIANAEHNNGADIDELKVVTIFVDKGPSLKRFQARAKGRGNRIEKQTCHINVTVGN

SEQ ID NO: 900 - protein, 163 aa, Neisseria meningitidis
MSTETKNYITPAGWQALKDELYRLVNKERPEIVQIVNWAAGNGDRSENGDYLYGKRRMREIDRRIRFLTKRLESAVVVDPELREATDQVFFGATVGLLRGDGREQTVKIVGIDEIDTAQNKISWISPLARCLIKAREGDEVVLNTPEGREEIEILSVEYIKID

SEQ ID NO: 901 - protein, 752 aa, Neisseria meningitidis
MYTRIMEISPWTLRSAKLEKEHKRLQESLTSLGNGYMGMRGSFEETYSADSHLGTYIAGVWFPDKTRVGWWKNGYPKYFGKAINALNFSKVKIFVDGQEVDLAKNDVAGFSVELDMQHGVLRRSFTVFGVRFNVCKFLSVAQKELAVIRWEAVSVDGKTHQVRIDSIIDADVKNEDSNYEEKFWQVLDKGVSDSLSYIAAQTVANPFGVEQFIVNAEQTFAGSFKALGGRQTDWQVSNSFEAEVGGTPETFEKRVIVTTSRDYQGLEAVKAAGRALSEKVAGVAFETLLDAHKAGWLHRWEIADVVIEGNDEAQQGIRFNLFQLFSTYYGEDARLNIGPKGFTGEKYGGATYWDTEAYAVPLYLALAEPEVTRNLLQYRRNQLPQAQHNAREQGLAGALYPMVTFTGIECHNEWEITFEEIHRNGAIPYAIYNYTNYTGDESYLAKEGLEVLVEVSRFWADRVHFSKRSGKYMIHGVTGPNEYENNINNNWYTNTLAAWVLDYTREALAKYPRPDLNVSAAELEKWADISANMYRPHDEELGVFVQHDGFLDKDIRPVSALSPDDLPLNQKWSWDKILRSPFIKQADVLQGIYFFGDRFNIDEKRRNFDFYEPMTVHESSLSPCIHSILAAELGKEEKAVEMYRRTARLDLDNYNNDTEDGLHITSMTGSWLAIVQGFAQMKTWGGKLSFAPFLPSAWTGYTFHINYRGRLIKVAVGKENVVFTLLKGEPLDLQVYGKDITLNGSHTAALEK

SEQ ID NO: 902 - protein, 231 aa, Neisseria meningitidis
MFVWHEYENAAEAAQSLTDAVADALQGALDEKGGAVLAVSGGRSPIAFFNALSQKDLDWKNVGITLADERIVPTVHADSNTGLVREYLLKNKAEAAMWIPMVEDGKTETELHPDAVVDYALKHYKQPDVLVLGMGNDGHTASIFPKAPQFQTAIDGSAGVALVHTTPVTAPHERVSMTLDAIAHTGHVFLAIQGEEKKAVFEQAAQGENREYPINLVLNHQGVNCHVFYAE

SEQ ID NO: 903 - protein, 58 aa, Neisseria meningitidis
MKSRRFFKALLLIAALVGAFYAGMQTQAYLYEDLCLDLGGGKNPGSYPICVIEKVPAR

SEQ ID NO: 904 - protein, 317 aa, Neisseria meningitidis
LARQTTRMKQNRTFTFPDFRTVYSYAPLYRLQHLKYTLRKFFGKKEIYAFEQFVNASPIRQGLFLHCPQNAYPLLREFVDRRFNCKRRLDAMTADFLMAEKLFGTDILHQMEDYRFHLVLAHLSDGISLWLNRNDNCVEEGAWSLSLRDEAGNRLYMATFAFVGTHLLTASVQGPAGEEAKDTVRRITKQLHGLRPQQLMVTALQYFAAVLGLDGAMGIAQKHQVKLRWKLKKRVKMNYDTFWQEYGASLERDGYWHLPQTPARKDLADIESKKRSMYRKRYEMLDNMVAEMKDGLKTEARGISDGIQTEKPLRRTA

SEQ ID NO: 905 - protein, 64 aa, Neisseria meningitidis
MNIILNGGPAELHGTSVADLIAQTAPQKPFAVAVNTVFVPKGAYAETVLNENDKIDIVRPVVGG

SEQ ID NO: 906 - protein, 418 aa, Neisseria meningitidis
VANKLRNYTINFGPQHPAAHGVLRMILELEGETIVRADPHIGLLHRGTEKLAETKTYLQALPYMDRLDYVSMMVNEQAYCLAVEKLAGIDVPIRAQYIRVMFAEVTRILNHLMGIGSHAFDIGAMTAILYAFRDREELMDLYEAVSGARMHAAYFRPGGVYRDLPDFMPKYESSKFRNAKVLKQLNESREGTMLDFIDAFCERFPKNIDTLETLLTDNRIWKQRTVGIGVVTPERAMQKGFTGVMLRGSGVEWDVRKKQPYEMYDKMDFDIPVGVNGDCYDRYLCRMEEMRQSVRIIKQCSEWLRVNPGPVITTNHKFAPPKRTEMKTGMEDLIHHFKLFTEGMHVPEGETYTAVEHPKGEFGVYIISDGANKPYRLKIRAPGFAHLQGMDEMAKGHMLADVVAIIGTQDIVFGEVDR

SEQ ID NO: 907 - protein, 137 aa, Neisseria meningitidis
MLVLRLFAAYEFLESGLQKWNGENWFSEINDQFPFPFNLLPDALNWNLAMYAELLLPVLLLLGLATRLSALGLMVVTAVAWAAVHAGSGYNVCDNGYKMALIYIVVLIPLLFQGAGGWSLDTLLKKRFCPQCRLKQD

SEQ ID NO: 908 - protein, 676 aa, Neisseria meningitidis
LTIFSVLLPKKCIKRYLMPKILQQTTLHRFFRANTHHPISPSVLQQAGDLIRWLCFSDGISDFRPCRLKPQNPIGGTVMNTVSNYLSALREAMKAQGLDALVIPSADPHLSEYLPEHWQARRELSGFTGSVGTFVLTTDEAGVWVDSRYWEQAAKQLAGSGIELQKSGQVPPYNEWLAANLPENAAVGIPSDMVSLTGKRTLAQSLTAKNIRIEHPDDLLDQVWTSRPAIPAETVFVHDPAYVSETAAEKLARVRAVMAEKGADYHLVSSLDDIAWLTNLRGSDVPFNPVFVSYLLIGKDNAVLFTDRCRLNAEAAAALQTAGITVEPYAQVADKLAQIGGALLIEPNKTAVSTLVRLPESVRLIEGINPSTLFKSCKSEADIARIREAMEHDGAALCGFFAEFEDIIGNGGSLTEIDVDTMLYRHRSVRPGFISLSFDTIAGFNANGALPHYSATPESHSTISGNGLLLIDSGAQYKGGTTDITRVVPVGTPTAEQKRDNTLVLKAHIALAEAVFPENIPSPLIDAICRKPLWQAQCDYGHGTGHGVGYFLNVHEGPQRIAFAAPATPETAMKKGMVTSIEPGLYRPGKWGIRIENLAANQAVATPQETEFGSFLCFETLTLCPIDTRLMDTALMTDGEIDWVNRYHAEVRRRLEPLTEGAAKAWLIKRTEPLAR

SEQ ID NO: 909 - protein, 214 aa, Neisseria meningitidis
MESTLSLQANLYPRLTPAGAFYAVSSDAPSAGKTLLHSLLKADADEMVSSEKLLTWADTADIDTALNLLYRLQKLEFLYGDENGHSDGINLSDEQLPLLMEQLSGSGKALLVDRNGLYLANANFHHEAAEELGLLAAEVAQMEKKYRLLIKNNLYINNNAWGVCDPSGQSELTFFPLYIGSTKFILVIGGIPDLGKEAFVTLVRILYRRYSNRV

SEQ ID NO: 910 - protein, 97 aa, Neisseria meningitidis
MSNIKIVALVTVKPEYTETLAAQFKELVKASRAEEGNISYDLHQEIGKPNRFVFVENWKSQAAIDEHNASAHFQAFVQSVDGKTEALEIVLMNEVAD

SEQ ID NO: 911 - protein, 162 aa, Neisseria meningitidis
MKKILTAAVVALIGILLAIVLIPDSKTAPAFSLPDLHGKTVSNADLQGKVTLINFWFPSCPGCVSEMPKIIKTANDYKNKNFQVLAVAQPIDPIESVRQYVKDYGLPFTVMYDADKAVGQAFGTQVYPTSVLIGKKGEILKTYVGEPDFGKLYQEIDTALAQ

SEQ ID NO: 912 - protein, 436 aa, Neisseria meningitidis
MIVPDLFVAHFREAAPYIRQMRGKTLVAGIDDRLLEGDTLNKLAADIGLLSQLGIRLVLIHGARHFLDRHAAAQGRTPHYCRGLRVTDETSLEQAQQFAGTVRSRFEAALCGSVSGFARAPSVPLVSGNFLTARPIGVIDGTDMEYAGVIRKTDTAALRFQLDAGNIVWLPPLGHSYGGKTLHLDMLQTAASAAVSLQAEKLVYLTLSDGIARPDGTLAETLSAQEAQSLAEHAGGETRRLISSAVAALEGGVHRVQILNGAADGSLLQELFTRNGIGTSIAKEAFVSIRQAHSGDIPHIAALIRPLEEQGILLHRSREYLENHISEFSILEHDGNLYGCAALKTFAEADCGEIACLAVSPQAQDGGYGERLLAHIIDKARGIGISRLFALSTNTGEWFAERGFQTASEAELPEARRKAYRNNGRNSHILVRRLHR

SEQ ID NO: 913 - protein, 320 aa, Neisseria meningitidis
MQYAKISGTGSYLPANRVSNDDLAQKVDTSDEWITARTGIKFRHIAAENEKTSDLAAEAARRALDAAGLDSGEIDLIIVATATPDMQFPSTATIVQQKLGITNGCPAFDVQAVCAGFMYALTTANAYIKSGMAKNALVIGAETFSRIVDWNDRTTCVLFGDGAGAVVLSAADKPGIIHSKLKADGNYLKLLNVPGQIACGKVSGSPYISMDGPGVFKFAVKMLSKIADDVIEEAGYTAAQIDWIVPHQANRRIIESTAKHLGLSMDKVVLTVQDHGNTSAASIPLALDTGIRSGQIKRGQNLLLEGIGGGFAWGAVLLQY

SEQ ID NO: 914 - protein, 168 aa, Neisseria meningitidis
MAHPQEIREKLRRLYVSGEQTLETAALMCEIPQATARAWKRSDKEKGDDWDKMRAAYTLAGGGIEDLSRAMLAGFMVQYNSTMTMLQDSSTEDLPPSDRAKLLASLADAFTKTVSANARVMPETSKLATALELIEFLMAFVQEKHPKHLPAFVEVLEPFGVEVEKKFG

SEQ ID NO: 915 - protein, 519 aa, Neisseria meningitidis
LASVNAPGKFDRVEVYDDGRYLGIRGSDDKRRRIWKGVFDRESGRYLTSEAQDLKVRHVSTGASSTGKVSSVVSSSVSRAGVLAGVGKLARLGAKLSTRAVPYVGTALLAHDVYETFKEDIQARGYQYDTETDKFVKGYEYSNCLWYEDERRINRTYGCYGVDSSIMRLMSDYSRFPEVKELMESQMYRLARPFWNWHKEELNKLSSLDWNNFVLNSCTFDWNGGDCSVNKGDDFRNGANFSLIRNPKYKEEMDAKKLEEILSLKVDANPDKYIKATGYPGYSEKVEVAPGTKVNMGPVTDRNGNPVQVVATFGRDSQGNTTVDVQVIPRPDLTPGSAEAPNAQPLPEVSPAENPANNPNPNENPGTSPNPEPDPDLNPDANPDTDGQPGTRPDSPAVPGRTNGRDGKDGKDGKDGGLLCKFFPDILACDRLPESNPAEDLNLPSETVNVEFQKSGIFQDSAQCPAPVTFTVTVLDSSRQFAFSFENACTIAERLRYMLLALAWAVAAFFCIRTVSREV

SEQ ID NO: 916 - protein, 352 aa, Neisseria meningitidis
LEKRSEDIRVYMDYQGKKDRLEEVIGLSEDPELWNDPKRAQEIGKERKILEGIVLTLDNIASGIEDNRMLIEMTVEENDEEGFAAVQEDVAGLEKQMADLEFKRMFNQPADPNNCFIDITAGAGGTEAEDWAGMLFRMYSRYAERKGFKIEILEEDDGEIAGINRATIRVEGEYAYGLLRTETGVHRLVRYSPFDSNNKRHTSFASVFVYPEIDDSIEIEINPADLRIDTYRASGAGGQHINKTDSAVRITHEPTGIVVQCQNDRSQHANKAAAMEMLKSKLYELEMRKRNEEKQALEEGKSDVGWGSQIRSYVLDSSRIKDLRTGYEVGNTKAVLDGDLDGFIEASLKQGV

SEQ ID NO: 917 - protein, 190 aa, Neisseria meningitidis
MTYEIQASVREAQGTGASRRLRREGQIPGILYGEGQEPVAIAVDHKTVFYALEKESFHTALIKLSLNGETKDVIVRDFQMHPFRREVQHIDFQAVKADQLVRIRVPLHIVNAENSQAVKLQGGRVSLLNTSVEVVALPANIPAFLDLDCAEVVAGDILHLSDIKLPEGVESVSLKRNENLAVATVTGKKR

SEQ ID NO: 918 - protein, 797 aa, Neisseria meningitidis
MKLKQIASALMVLGISPLAFADFTIQDIRIEGLQRTEPSTVFNYLPVKIGDAYNDGRGGEIIKSLYATGFFDDVRVESADGQLLLTVIERPTIGSLNITGAKMLQNDAIKKNLESFGLAQSQYFNQATLNQAVAGLKEEYLGRGKLNIQITPKVTKLARNRVDIDITIDEGKSAKITDIEFEGNQVYSDRKLMRQMSLTEGGIWTWLTRSNQFNEQKFAQDMEKVTDFYQNNGYFDFRILDTDIQTNEDKTKQTIKITVHEGERFRWGKVSIEGDTNEVPKAELEKLLTMKPGKWYERQQMTAVLGEIQNRMGSAGYAYSEISVQPLPNAETKTVDFVLHIEPGRKIYVNEIHITGNNKTRDEVVRRELRQMESAPYDTSKLQRSKERVELLGYFDNVQFDAVPLAGTPDKVDLNMSLTERSTGSLDLSAGWVQDTGLVMSAGVSQDNLFGTGKSAALRASRSKTTLNGSLSFTDPYFTADGVSLGYDVYGKAFDPRKASTSIKQYKTTTAGAGIRMSVPVTEYDRVNFGLVAEHLTVNTYNKAPKHYADFIKKYGKTDGTDGSFKGWLYKGTVGWGRNKTDSALWPTRGYLTGVNAEIALPGSKLQYYSATHNQTWFFPLSKTFTLMLGGEIGYANGYGKTKEIPFFENFYGGGLGSVRGYESGTLGPKVYDEYGEKISYGGNKKANVSAELLFPMPGAKDARTVRLSLFADAGSVWDGKTYDDNSSSATGGRVQNIYGAGNTHKSTFTNELRYSAGGAVTWLSPLGPMKFSYAYPLKKKPEDEIQRFQFQLGTTF

SEQ ID NO: 919 - protein, 228 aa, Neisseria meningitidis
MTVLQERYCEVSDRIGKLVLQAGRKPHSVSLIAVGKTFPSDGIREVYAAGQRDFGENYIQEWYGKTEELADLTDIVWHVIGDVQSNKTKFVAERAHWVHTVCRLKTAVRLSEQRPSSMPPLQVCIEVNIAGEAAKHGVAPEEAVALAVEVAKLPNIVVRGLMCVAKANSSETELKVQFQTMRKLLSDLNTAGVKADVLSMGMSDDMPAAIECGATHVRIGSAIFGKRG

SEQ ID NO: 920 - protein, 435 aa, Neisseria meningitidis
MKPVNIGLLGLGTVGGGTAAVLRDNAAEISRRLGREIRISAVCDLSEEKARQTCPSAAFVKDPFELVAREDVDVVVELFGGTGIAKDAVLKAIENGKHIVTANKKLLAEYGNEIFPLAEKQNVIVQFEAAVAGGIPIIKALREGLAANRIKSIAGIINGTSNFILSEMREKGSAFADVLKEAQALGYAEADPTFDIEGHDAGHKITIMSALAFGTPMNFSACYLEGISKLDSRDIKYAEELGYRIKLLGITRKTGKGIELRVHPTLIPESRLLANVNGVMNAVRVNADMVGETLYYGAGAGALPTASAVVADIIDIARLIEADTGHRVPHLAFQPAQVQAQTILPMDEITSSYYLRVQAKDEPGTLGQIAALLAQENVSIEALIQKGVIDQSTAEIVILTHSTVEKYIKSAIAAIEALDCVEKPITMIRMESLHD

SEQ ID NO: 921 - protein, 139 aa, Neisseria meningitidis
MDNKTKLRLGGLILLTTAVLSLIIVLIVDSWPLAILLAAVIVAAAAGGFVWTSRRQQRQFIERLKKFDIDPEKGRINEANLRRMYHSGGQHQKDAITLICLSQKCSVDEAHAMFKKRPTRQEINQMAAKQSRGQKRPHR

SEQ ID NO: 922 - protein, 422 aa, Neisseria meningitidis
LFIIDFNGLDADKERQLYQENTSLLSLWQTQPHLRRVRFFNILKALPLDYNSLIDFLILLINTCLVRNEFMRPLNVQIRLGNLRHNYQILKEMHGGKLLAVVKADAYGHGAVRCAFALADLADGFAVATIDEGIRLRESGITHPIVLLEGVFEASEYEAVEQYSLWPAVGNQWQLEALLSRHWKKPVKVWLKMDSGMHRTGFFPHDYASAYAALKQSEYVDSIVKFSHFSCADEPESGMTEIQMEAFDLGTEGLEGEESLANSAAILNVPEARRDWGRAGLALYGISPFGGGDDRLKPVMRLSTRIFGERVLQPHSPIGYGATFYTSKSTRVGLIACGYADGYPRRAPSNSPVAVDGKLTRVIGRVSMDMMTIELDASQEGLGHEVELWGDTININTVAEAAGTIPYELMCNIKRAKFTYIE

SEQ ID NO: 923 - protein, 556 aa, Neisseria meningitidis
MKKIWLDSYEKGVSAEIDITQYNSVSDVFRQSVEKFADQPAFQNMGKTLTYAETGKLATDFASYLQNVLKLPRGERVAIMLPNVLQYPIALFGILQAGLVAVNTNPLYTPRELEHQLKDSGATAIIVLENFANTLELVLPRTQIKHVIVASVGEMFGLLKGSLINFIIRKIKKMVPEYRIRETVSFQTALKEGAKHVFQPVALNREDTALLQYTGGTTGVAKGAVLSHGNICANMLQAKEWIKNQLREGKETVIAALPLYHIFALTVNLMIFANAGSKIILITNPRDMKGFIGQLKKQRVNVCIGVNTLFNAMVNRPDFAEVDFSGLRLTLGGGMATQKAVAEKWKKITGTPIVEAYGLTEASPGVCCNPLNIESYSGSIGLPVSSTEVELRDANGKEVPVGQPGELWVKGPQVMQGYWKRPEETAKAIDARGFLETGDIAVMDEKGWLKLVDRKKDLVVVSGFNVYPNEIEEVIAHHGKVMEVACIGVPDEKTGEALKVFVVKKDPSLTKEELIAFCRTELTAYKVPKNIEFRDELPKSNVGKILRRELRQSTGK

SEQ ID NO: 924 - protein, 638 aa, Neisseria meningitidis
MYLPSMKHSLPLLAALVLAACSSTNTLPAGKTPADNIETADLSASVPTRPAEPEGKTLADYGGYPSALDAVKQKNDAAVAAYLENAGDSAMAENVRNEWLKSLGARKQWTLFAQEYAKLEPAGRAQEVECYADSSRNDYTRAAELVKNTGKLPSGCTKLLEQAAASGLLDGNDAWRRVRGLLAGRQTTDARNLAAALGSPFDGGTQGSREYALLNVIGKEARKSPNAAALLSEMESGLSLEQRSFAWGVLGHYQSQNLNVPAALDYYGKVADRRQLTDDQIEWYARAALRARRWDELASVISHMPEKLQKSPTWLYWLARSRAATGNTQEAEKLYKQAAATGRNFYAVLAGEELGRKIDTRNNVPDADANSVLRMAEDGAIKRALVLFQNSRTAGDAKMRRQAQAEWRFATRGFDEDKLLTAAQTAFDHGFYDMAVNSAERTDRKLNYTLRYISPFKDTVIRHAQNVNVDPAWVYGLIRQESRFVIGAQSRVGAQGLMQVMPATAREIAGKIGMDAAQLYTADGNIRMGTWYMADTKRRLQNNEVLATAGYNAGPGRARRWQADTPPRRRGICRNHPVFRNARLCQKSDDQCRLLRRPLRRAAHPAQTAYGHCSCTLTYRCRLKPARSFRRHFYPERH

SEQ ID NO: 925 - protein, 83 aa, Neisseria meningitidis
MKTLEKRMKALDKQMMKFGKSLEGRLDARLIESALDYIHYSERFLAFEILCTYIEDFDVRLTEQESREISFINKEFEIESTSD

SEQ ID NO: 926 - protein, 65 aa, Neisseria meningitidis
MKWTDTRRIAEELYDLHGETIDPRTVRFTQLRDLIMALPEFDDDPARCGERILEAVQQAWIDEAE

SEQ ID NO: 927 - protein, 311 aa, Neisseria meningitidis
MELFKIKRDIPFMSYGKLTTFISLVTFIAAVFFLVTKGLNFSVEFTGGTVMEVQYQQGADVNKMRERLDTLKIGDVQVQALGTNKHIMIRLPNKEGVTSAQLSNQVMDLLKKDSPDVTLRQVEFIGPQVGEELVSNGLMALGFVVIGIIIYLSMRFEWRFAVSAIIANMHDIVIILGCFAFFQWEFSLTVLAGILAVLGYSVNESVVVFDRIRENFRKPAMRGHAVPEVIDNAITATMSRTIITHGSTEAMVVSMLVFGGTALHGFSMALTIGIVFGIYSSVLVASPLLLMFGLSRDNIGKEPKKKEEIVV

SEQ ID NO: 928 - protein, 350 aa, Neisseria meningitidis
MWKEILLNYGIFLLELLTVFGAIALIVLAIVQSKKQSESGSVVLTDFSENYKKQRQSFEAFFLSGEEAKHQEKEEKKKEKAEAKAEKKRLKEGGEKSAETQKSRLFVLDFDGDLYAHAVESLRHEITAVLLIAKPEDEVLLRLESPGGVVHGYGLAASQLRRLRERNIPLTVAVDKVAASGGYMMACVADKIASAPFAIVGSVGVVAEVPNIHRLLKKHDIDVDVMTAGEFKRTVTFMGENTEKGKQKFRQELEETHQLFKQFVSENRPQLDIEEVATGEHWFGRQALALNLIDEISTSDDLLLKAFENKQVIEVKYQEKQSLIQRIGLQAEASVEKLFAKLVNRRADVM

SEQ ID NO: 929 - protein, 159 aa, Neisseria meningitidis
MANLVKTFLLGELVKGMGVTLKNFFARKDTIYFPEEKTPQSVRFRGLHAQRRYPNGEERCIACKLCEAVCPAMAINIESEEREDGTRRTKRYDIDLTKCIFCGFCEEACPTDAIVETHIFEYHGEKKGDLHMTKPILLAIGDKYEAEIAKRKAADAPYR

SEQ ID NO: 930 - protein, 277 aa, Neisseria meningitidis
MPHALVLQFPSAEALPSDFPSRLPEPDCADEKRMRFIVEEGFSLSGADAALLGSRQIDHAVLPDMDFGELGLIVSDMDSTLITIECVDEIAAGVGLKDKVAEITERSMRGELDFEQSLRSRVALLAGLDEQILADVYENVLKLSPGAEFLLDECKRHDVKFLLVSGGFTFFTERLQQRLGFEYQHANVLEIENGRLTGRLKGRIIDAQAKADLLLEYRSRLGLQPHQVLAMGDGANDIPMLKETGIGVAYRAKPKVRAAADACINFGGLERVRGLFR

SEQ ID NO: 931 - protein, 311 aa, Neisseria meningitidis
MGTTYTVKYLSNNRDKLPSPAEIQKRIDDALKEVNRQMSTYQPDSEISRFNQHTAGKPLRISSDFAHVTAEAVRLNRLTHGALDVTVGPLVNLWGFGPDKSVTREPSPEQIKQAASYTGIDKIILKQGKDYASLSKTHPKAYLDLSSIAKGFGVDKVAGELEKYGIQNYLVEIGGELHGKGKNARGEPWRIGIEQPNIVQGGNTQIIVPLNNRSLATSGDYRIFHVDKSGKRLSHIINPNNKRPISHNLASISVVADSAMTADGLSTGLFVLGETEALKLAEREKLAVFLIVRDTGGYRTAMSSEFEKLLR

SEQ ID NO: 932 - protein, 87 aa, Neisseria meningitidis
MSETKNVRTLQGKVVSDKMDKTVTVLVERKVKHPLYGKIIRLSTKIHAHDENNQYGIGDVVVISESRPLSKTKSWVVSELVEKARSI

SEQ ID NO: 933 - protein, 291 aa, Neisseria meningitidis
MEEGLIDRLLETLWLDRRLNQNTLNGYRRDLEKIARRLSQSGRTLKDADEADLAAAVYVDGEQRSSQARALSACKRLYIWMEREGIRTDNPTRLLKPPKIDKNIPTLITEQQISRLLATPDTDTPHGLRDKALLELMYATGLRVSEAVGLNFGNVDLDRGCITALGKGDKQRMVPMGQESAYWVERYYTEARPLLLKGRNCDALFVSQKKTGISRQLAWMIVKEYAGRAGIGHISPHSLRHAFATHLVQHGLDLRVVQDMLGHADLNTTQIYTHVANVWLQGVVKEHHSRN

SEQ ID NO: 934 - protein, 223 aa, Neisseria meningitidis
MTTQDELKRIAAEKAVEFVPENEYIGIGTGSTINFFIEALGKSGKKIKGAVSTSKKSSELLAQYDIPVVSLNEVSGLAVYIDGADEVNHALQMIKGGGGAHLNEKIVASASEKFVCIADESKYVSRLGKFPLPVEVVESARSLVSRKLLAMGGQPELRIGYTTFYGNQIVDVHGLNIDQPLTMEDEINKITGVLENGIFARDAADVLILGTEEGAKVIYPCQG

SEQ ID NO: 935 - protein, 447 aa, Neisseria meningitidis
MSQNHTILQSLPVGQKVGIAFSGGLDTSAALLWMKLKGALPYAYTANLGQPDEDDYNAIPKKAMEYGAENARLIDCRAQLAHEGIAAIQCGAFHVSTGGIAYFNTTPLGRAVTGTMLVSAMKEDDVNIWGDGSTYKGNDIERFYRYGLLTNPALKIYKPWLDQQFIDELGGRHEMSEFLIANGFNYKMSVEKAYSTDSNMLGATHEAKDLEFLNSGIKIVKPIMGVAFWDENVEVSPEEVSVRFEEGVPVALNGKEYADPVELFLEANRIGGRHGLGMSDQIENRIIEAKSRGIYEAPGMALFHIAYERLVTGIHNEDTIEQYRINGLRLGRLLYQGRWFDSQALMLRETAQRWVAKAITGEVTLELRRGNDYSILNTESPNLTYQPERLSMEKVEDAAFTPLDRIGQLTMRNLDITDTRAKLGIYSQSGLLSLGEGSVLPQLGNKQ

SEQ ID NO: 936 - protein, 252 aa, Neisseria meningitidis
MNSKISSDHTEDAVRLSKRMAQLGLCSRREADGYIGQGWVTVNGKTAVLGQKVSPADRIELNKKAHEQQAARITILLNKPVGYVSAQAEKGYKSAAELITSENRWEGDTSRIRFDPKHKIGLAPAGRLDIDSVGLLVLTQDGRIAKQLIGENSGSEKEYLVRVRGKLDEKGLALLNHGLSLDGEKLRPAKVEWQNEDQLRFVLKQGKKRQIRRMCELVGLRVVGLKRIRMGKVKLGRLPPGKWRYLAPGESF

SEQ ID NO: 937 - protein, 138 aa, Neisseria meningitidis
MAKLTEQDILNWSGPEDDYMNDDHLAFFRELLVKMQDELIENASATTGHLQEHESAPDPADRATQEEEYALELRTRDRERKLLSKIQATIRNIDEGDYGFCADTGEPIGLKRLLARPTATLSVESQERRERMKKQFAD

SEQ ID NO: 938 - protein, 185 aa, Neisseria meningitidis
MKPKFKTVLTALLLAVSLPSMAATHVLMETDMGNIRLVLDESKAPKTVANFVRYARKGFYDNTIFHRVIGGFVIQGGGLTEDLAQKASDKAVANESGNGLKNTVGTIAMARTTDPDSATSQFFINLADNDSLNYKNGQYGYTVFGRVESGMDTVSKIARVKTATRGFYQNVPVQPVKIRRVVVGQ

SEQ ID NO: 939 - protein, 93 aa, Neisseria meningitidis
LQNFRKPNMQTVTMYTGPFCPYCAMAKRLLHAAGVGHIDEIRVDASPEAFAEMQQLSGQRSVPQIFIGETHVGGFTDLYRLQQEGGLDGLLNP

SEQ ID NO: 940 - protein, 239 aa, Neisseria meningitidis
MENIIYFGDTARVPYGTKSKATIENFSMQIVDFLLEHDVKAMVIACNTIAAVAGQKIRQKTGNMPVLDVISAGAKAALATTRNNKIGIIATNTTVNSNAYARAIHRNNPDTLVRTQAAPLLVPLVEEGWLEHEVTRLTVCEYLKPLLADGIDTLVLGCTHFPLLKPLIGREAHNVALVDSAITTAEETARVLAQEGLLNTDNNNPDYRFYVSDIPLKFRTIGERFLGRTMEQIEMVSLG

SEQ ID NO: 941 - protein, 498 aa, Neisseria meningitidis; identical to SEQ ID NO: 213

SEQ ID NO: 942 - protein, 798 aa, Neisseria meningitidis
LDTQMADNYVIWFENLRMTDVERVGGKNASLGEMISQLTEKGVRVPGGFATTADAYRAFLAHNGLSERISAALAKLDVEDVAELARVGKEIRQWILDTPFPEQLDAEIEAAWNKMVADAGGADISVAVRSSATAEDLPDASFAGQQETFLNINGLENVKEAMRHVFASRYNDRAISYRVHKGFEHDIVALSAGVQRMVRSDSGASGVMFTLDTESGYDQVVFVTSSYGLGENVVQGAVNPDEFYVFKPTLKAGKPAILRKTMGSKHIKMIFTDKAEAGKSVTNVDVPEEDRNRFSITDEEITELAHYALTIEKHYGRPMDIEWGRDGLDGKLYILQARPETVKSQEEGSRNLRRFSINGEKTVLCEGRAIGQKVGQGKVRLIKDASEMDSVEAGDVLVTDMTDPDWEPVMKRASAIVTNRGGRTCHAAIIARELGIPAVVGCGNATELLKNGQEVTVSCAEGDTGFIYSGLLDVQITDVALDNMPKAPVKVMMNVGNPELAFSFANLPSEGIGLARMEFIINRQIGIHPKALLEFDKQDDELKAEITRRIAGYASPVDFYVDKIAEGVATLAASVYPRKTIVRMSDFKSNEYANLVGGNVYEPHEENPMLGFRGAARYVADNFKDCFALECKALKRVRDEMGLTNVEIMIPFVRTLGEAEAVVKALKENGLERGKNGLRLIMMCELPSNAVLAEQFLQYFDGFSIGSNDMTQLTLGLDRDSGLVSESFDERNPAVKVMLHLAISACRKQNKYVGICGQGPSDHPDFAKWLVEEGIESVSLNPDTVIETWLYLANELNK

SEQ ID NO: 943 - protein, 340 aa, Neisseria meningitidis
MKIEAVDLFCGAGGLTAGLLRAGIKVKAGYDIDAACAYAYEYNNKGAKFILQDVETVTGDQIQAHYSKDAVRLLAGCAPCQPFSTYNQGRDVRNDKKWPLLYAFSRLIHEVQPELVTMENVPDVVKHEVYQDFVNNLKQQGYQVWAEKVLCADYGVPQSRRRHVLLASRIGNIQMVPPTHSNCHVTVRQAIGHLPPLAAGKQDTIDVLHRCSSMSARNLERIRASRPGGTWMDWPEDLRAACHRKKKGQSYKRIYGRMEWDKPAPTMTTLCIGFGNGRFGHPEQDRAISLREAALFQSFPLDYQFTQETDTPIRQISRMIGNAVPVLLGEAIGNSFKLLV

SEQ ID NO: 944 - protein, 94 aa, Neisseria meningitidis
MTDTKLNTKEILELKARAHHLHPVVMVGQQGLTDAVIKETDAALTAHELIKVRVFGDDRAERIEICTALCEAVDAQPVQHIGKLLVLWRKNIEG

SEQ ID NO: 945 - protein, 238 aa, Neisseria meningitidis
VFNNFLASLPFMTETRADMIVSAFLPMVKAGFAVSLPLAAASFVIGMMIAVAVALVRIMPAGGIVRKILLKLVEFYISVIRGTPLLVQLVIVFYGLPSVGIYIDPIPAAIIGFSLNVGAYASETIRAAILSVPKGQWEAGFSIGMTYMQTFRRIVAPQAFRVAVPPLSNEFIGLFKNTSLAAVVTVTELFRVAQETANRTYDFLPVYIEAALVYWCFCKVLFLIQARLEKRFDRYVAK

SEQ ID NO: 946 - protein, 86 aa, Neisseria meningitidis
MRSVMFQANIHQAKTNLSQLIQRAEAGEIVIIAKAGKPCVQLIGIEKPARNAGRLKKFSHMENTDISRILEDDNETAALFFEESAL

SEQ ID NO: 947 - protein, 153 aa, Neisseria meningitidis
MSDLPSISRFLADEAATLDLGAAWSSRLNAPLVIYLEGDLGAGKTTLTRGILRGLGHQGAVKSPTYAIVESYLLERFTLHHFDLYRFSFPEEWEDAGLDELFAANSVCLIEWPQQGGEFTPPADITATLTHDGDGRKCLLTAHTERGRESLPL

SEQ ID NO: 948 - protein, 1450 aa, Neisseria meningitidis
MKTTDKRTTETHRKAPKTGRIRFSPAYLAICLSFGIFPQAWAGHTYFGINYQYYRDFAENKGKFAVGAKDIEVYNKKGELVGKSMTKAPMIDFSVVSRNGVAALVGDQYIVSVAHNGGYNNVDFGAEGSNPDQHRFTYKIVKRNNYKAGTNGHPYGGDYHMPRLHKFVTDAEPVEMTSYMDGRKYIDQNNYPDRVRIGAGRQYWRSDEDEPNNRESSYHIASAYSWLVGGNTFAQNGSGGGTVNLGSEKIKHSPYGFLPTGGSFGDSGSPMFIYDAQKQKWLINGVLQTGNPYIGKSNGFQLVRKDWFYDEIFAGDTHSVFYEPRQNGKYSFHDNNNGTGKIDAKHEHNSLPNRLKTRTVQLFNVSLSETAQEPVYHAAGGVNSYRPRLNNGENISFIDEGKGELILTSNINQGAGGLYFQGDFTVSPENNETWQGAGVHISEDSTVTWKVNGVANDRLSKIGKGTLHVQAKGENQGSISVGDGKVILDQQADENNKKQAFSEIGLVSGRGTVQLNADNQFNPDKLYFGFRGGRLDLNGHSLSFHRIQNTDEGAMIVNHNQDKESTVTITGNKDIATTGNNNSLDSKKEIAYNGWFGEKDTTKTNGRLNLVYQPAAEDRTLLLSGGTNLNGNITQTNGKLFFSGRPTPHAYNHLNDHWSQKEGIPRGEIVWDNDWINRTFKAENFQIKGGQAVVSRNVAKVKGDWHLSNHAQAVFGVAPHQSHTICTRSDWTGLTNCVEKTITDDKVIASLTNTDISGNVSLADHAHLNLTGLATLNGNLSANGDTRYTVSHNATQNGDLSLVGNAQATFNQATLNGNTSASGNASFNLSDHAVQNGSLTLSGNAKANVSHSALNGNVSLADKAVFHFESSRFTGQISGSKDTALHLKDSEWTLPSGTELGNLNLDNATITLNSAYRHDAAGAQTGSATDAPRRRSRRSLLSVTPPASAESHFNTLTVNGKLNGQGTFRFMSELFGYRSDKLKLAESSEGTYTLAVNNTGNEPASLEQLTVVEGKDNKPLSENLNFTLQNEHVDAGAWRYQLIRKDGEFRLHNPVKEQELSDKLGKAEAKKQAEKDNAQSLDALIAAGRDAVEKTESVAEPARQAGGENVGIMQAEEEKKRVQADKDTALAKQREAETRPATTAFPRARRARRDLPQPQPQPQRDLISRYTNSGLSEFSATLNSVFAVQDELDRVFAEDRRNAVWTSGIRDTKHYRSQDFRAYRQQTDLRQIGMQKNLGSGRVGILFSHNRTENTFDDGIGNSARLAHGAVFGQYGIDRFDIGISAGAGFSSGNLSDGIGGKIRRRVLHYGIQARYRAGFGGFGIEPHIGATRYFVQKADYRYENVNIATPGLAFNRYRAGIKADYSFKPAQHISITPYLSLSYTDAASGKVRTRVNTAVLAQDFGKTRSAEWGVNAEIKGFTLSLHAAAAKGPQLEAQHSAGIKLGYRW

SEQ ID NO: 949 - protein, 477 aa, Neisseria meningitidis
MPARNRWMLLLPLLASAAYAEETPREPDLRSRPEFRLHEAEVKPIDREKVPGQVREKGKVLQIDGETLLKNPELLSRAMYSAVVSNNIAGIRVILPIYLQQAQQDKMLALYAQGILAQADGRVKEAISHYRELIAAQPDAPAVRMRLAAALFENRQNEAAADQFDRLKAENLPPQLMEQVELYRKALRERDAWKVNGGFSVTREHNINQAPKRQQYGKWTFPKQVDGTAVNYRLGAEKKWSLKNGWYTTAGGDVSGRVYPGNKKFNDMTAGVSGGIGFADRRKDAGLAVFHERRTYGNDAYSYTNGARLYFNRWQTPKWQTLSSAEWGRLKNTRRARSDNTHLQISNSLVFYRNARQYWMGGLDFYRERNPADRGDNFNRYGLRFAWGQEWGGSGLSSLLRLGAAKRHYEKPGFFSGFKGERRRDKELNTSLSLWHRALHFKGITPRLTLSHRETRSNDVFNEYEKNRAFVEFNKTF

SEQ ID NO: 950 - protein, 270 aa, Neisseria meningitidis
VTESTGGLEIPAAKAIRRAGIAVIIANPRQTHQFAQSQPLTKTDAKDAKMPAFFAQMKAQKEDSQTMPYQPPTEAEEVLEALVNRRNQSADMRTAEKNRLHQVHETQVGSVKQLIAHFDRLIDELDKQIDDHTHTHFDGKAQVAEQIKGIGSITTATLMAMLPELGRLSHKRIASLAGIAPHPRESEETKFKSRCFGGRSAVRKALYMATVAATRFEPLIRDFYQRLLSKGKPYKVAVTACMRKLLTISNTRMRDYFAENDTAENGIQTA

SEQ ID NO: 951 - protein, 505 aa, Neisseria meningitidis
MVISNTRELEKLKDRIPNLINIARIAIVFPLLIMHIFGLEVSGHENLHASWTAWAFYVWLAISCWLIFFSIIHPHWQWQSLKMPRFSAVADITMIGVLTYLFGGIDSGFGILILPFVVCSCLLSYGRYPLLYASYAAILLIFNAIADGDIGKYPHISDARTASATFILVAASYLSAIFTSLSVRYIDSAGQLARDNHLAYRRIKGLSQTVLERVQEAVVVINTEGLAVLFNRKAKDLFPALEIGRRADLSDSAAELWDQASPHTFEYVLGTLGLTARIRAVPMNKEPDKLLILYIRPQSEIQAEALSVKLAALGQLTANLAHEIRNPMSAIRHANDLLRENMEAGAADPFNAKLCKIIDGNVCRIDKMLEDISSLNKRNKTERETIGLIPFWEEFKQEFLLGHPDAAGCIRLDMQGNHPTAYFDPAHLRQIMWNLANNAWRHSRKQPGSISVTIRPAQKNTVCILFADRPKCRNTCSNPFTPRRKTAPASGCMSPANWRTPISAI

SEQ ID NO: 952 - protein, 52 aa, Neisseria meningitidis
MVAPVRPNPPKDGKTATLLEHAAEFGGYVAELENQNQAWRDWAGNHSRKVGN

SEQ ID NO: 953 - protein, 575 aa, Neisseria meningitidis
MQLSGAQIIVQSLKAEGVEYVFGYPGGAVIEIYDALFQLNKFKHILTRHEQAAVHAADAYARVSGKVGVALVTSGPGVTNALTGIATAYTDSIPMVVISGQVGNSLIGTDAFQEVDTVGITRPCVKHNFLVTDINELAETIKKAFQIAASGRPGPVVVDVPKDVTQAMAKFSYPQEDIFIRSYQPVVQGHIGQIKKAVQMLASAKRPVVYFGGGVVLGNASEELTRFVRMTGAPCTGTLMGLGAYPSGDRQFLGMLGMHGTYEANLAMQNADVVLAVGARFDDRVVSVPSKFFEKAKKVIHIDVDPSSIAKRVKADIPIVGDVKNVLSEMVALWQKQESVPSEDTLGKWWKTIEEWRSRDCLWFDNGSEIIKPQYVIQKLAEITGNSAIITSDVGQHQMFAAQYYPFERPRQWLNSGGLGTMGVGLPYAIGAKLAAPDQDVFCITGDGSIQMNIQELSTCFQYRIPVNVITLNNGYLGMVRQWQEIYYGGRESETYFDSLPDFVKLAEAYGHIGIRVDKKSDVEGALLEALNQKDRLVFIDFLTDQKQNVMPMVGNGKGLDEMVLPPHMRADEKA

SEQ ID NO: 954 - protein, 210 aa, Neisseria meningitidis
MTVWVGLTGGIGSGKSAAAQCFADLGVPRIDADAAAHSLTASDGIALPEIRRLFGDTVFDTQGLLRRDILRKEIFASPSRKALLESVMLPLIFSEIKKQQETFTDAAYGIVEIPLLTEKRQFISLIRRVLTISAPLEKRIGRVMARSGLTRGEVAAVISHQASESERLLLADDVLLNDGSLKSLREKTMRLHAFYSGIFASKPTQGKHNG

SEQ ID NO: 955 - protein, 156 aa, Neisseria meningitidis
MPRRREVPKRDVLPDPKFGSVELTKFMNVLMIDGKKSVAERIVYGALEQIEKKTGKVAIEVFNEAIANAKPIVEVKSRRVGGANYQVPVEVRPSRRLALAMRWVRDAARKRGEKSMDLRLAGELIDASEGRGGALKKREEVHRMAEANKAFSHFRF

SEQ ID NO: 956 - protein, 117 aa, Neisseria meningitidis
MIELQLHELKLVSGGGPVTDNIAGNVANAATTKGGPTWGDFVAIPAAAATVHFLPKNFFGAIGANGVYNLTRDWVNDAVNAPPYNGRPIFEIEHGLTAPATKADKSGNGYTDGTDYC

SEQ ID NO: 957 - protein, 108 aa, Neisseria meningitidis
MTYRELVERQLAVRHADLELGLSRAREQEPFVIHVSDLLDKAGIEYAVRMDKDFQTTFCVEFSATAPADVIGILRKYYSVFSDGQKVEAASRHPECHAVRIVFGDVPV

SEQ ID NO: 958 - protein, 119 aa, Neisseria meningitidis
MIRYLLIACGGISLLLGIIGIFLPLLPTTPFVLLSAACWAKASPRFHRWLHRHRYFGPMVHNWEQNGAVPRKAKIFAISMMTASCLIMFWQFPQRWWVGAVSSVFCSLVAIWMWRRPES

SEQ ID NO: 959 - protein, 100 aa, Neisseria meningitidis
MDFFLPNTMHTELNNGTLHISGDVTVKTLTAAAFTRFRQQCRLKDTRAVDLSGVGRADSACVSLLLEVLRGCKGSVRLTGIPESVRALSELYEIKDWLKS

SEQ ID NO: 960 - protein, 334 aa, Neisseria meningitidis
MQRQIKLKNWLQTVYPERDFDLTFAAADADFRRYFRATFSDGGSVVCMDAPPDKMSVAPYLKVQKLFDMVNVPQVLHADTDLGFVVLNDLGNTTFLTAMLQEQGEAAHKALLLEAIGELVELQKASREGVLPEYDRETMLREINLFPEWFVAKELGRELTFKQRQLWQQTVDTLLPPLLAQPKVYVHRDFIVRNLMLTRGRPGVLDFQDALYGPISYDLVSLLRDAFIEWEEEFVLDLVIRYWEKARADGLPVPEAFDEFYRWFEWMGVQRHLKVAGIFARLYYRDGKDKYRPEIPRFLNYLRRVSRRYAELAPLYALLVELVGDEELETGFTF

SEQ ID NO: 961 - protein, 124 aa, Neisseria meningitidis
MIIQNEFNLYPSNMLPERFCYPEKYVRISNDTSLIPYIQPHNFHWWFENYGTEGAEVTYIFRNSILPDLNLIPFASNGEWEAYFDGNDVTGNPRVIVINLDNIENHEFFNSFEEWLELAIKDTW

SEQ ID NO: 962 - protein, 111 aa, Neisseria meningitidis
MSRCCLKRLQTASAVSAFSGGVLGCGVKLCCRRLSVLFNPGVMLFVPDCPVGGAAGFFQYEMLCPFFWQGRLQTGSNLAYDVFMSAGRLNGGRKPRAAAVFLPCFAPLPYN

SEQ ID NO: 963 - protein, 413 aa, Neisseria meningitidis
MPTKTPSLFGGAMIIAGTVIGAGMLANPTATSGVWFTGSLAVLLYTWFSMLSSGLMILEVNTHYPHGASFDTMVKDLLGRSWNIINGIAVAFVLYLLTYAYIFVGGDLTAKGLGSAAGGNVSLTVGQLVFFGILAFCVWASARLVDRFTSVLIGGMVLTFIWATGGLIADAKLPVLFDTQAPTGTNYWIYVATALPVCLASFGFHGNVSSLLKYFKGDAPKVAKSIWTGTLIALVIYVLWQTAIQGNLPRNEFAPVIAAEGQVSVLIETLSKFAQTGNMDKILSLFSYMAIATSFLGVTLGLFDYIADIFKWNDSVSGRTKTAALTFLPPLISCLLFPTGFVTAIGYVGLAATVWTGIIPAMLLYRSRKKFGAGKTYKVYGGLWLMVWVFLFGIVNIAAQVLSQMELVPVFKG

SEQ ID NO: 964 - protein, 272 aa, Neisseria meningitidis
MKKTVFTCAMIALTGTAAAAQELQTANEFTVHTDLSSISSTRAFLKEKHKAAKHIGVRADIPFDANQGIRLEAGFGRSKKNIINLETDENKLGKTKNVKLPTGVPENRIDLYTGYTYTQTLSDSLNFRVGAGLGFESSKDSIKTTKHTLHSSRQSWSAKVHADLLSQLGNGWYINPWSEVKFDLNSRYKLNTGVTSLKKDINQKTNGWGFGLGANIGKKLGESASIEAGPFYKQRTYKESGEFSVTTKSGDVSLTIPKTSIREYGLRVGIKF

SEQ ID NO: 965 - protein, 61 aa, Neisseria meningitidis
MAEQKKIRVTLVKSLIGTIESHRACARGLGLRRREHTVEVLDTPENRGMINKISYLLKVES

SEQ ID NO: 966 - protein, 67 aa, Neisseria meningitidis
MDNLNLQEISVLPENLPLYCSGPDNEQWNGHPRVFLPLCEGESGSVACPYCGTRYRLDGKMPHHHYA

SEQ ID NO: 967 - protein, 218 aa, Neisseria meningitidis
MDFEKARFNMVEQQIRPWDVLDFDVLDALAEIPRELFVDEDLQGLAYADMALPLANGHKMLEPKVVARLAQGLKLTKNDTVLEIGTGSGYATALLAKLAGRVVSDDIDAEQQNRAKAVLDGLGLDNIDYVQNNGLTELSAGAPFDAVYVGGAVNLVPEVLKEQLKDGGRMAVIVGRKPVQRALLITRKGDVFEEKVLFDTLVAHLDDKDADPFGGFQF

SEQ ID NO: 968 - protein, 522 aa, Neisseria meningitidis
MKHRTFFSLCAKFGCLLALGACSPKIVDAGAATVPHTLSTLKTADNRPASVYLKKDKPTLIKFWASWCPLCLSELGQTEKWAQDAKFSSANLITVASPGFLHEKKDGDFQKWYAGLNYPKLPVVTDNGGTIAQSLNISVYPSWALIGKDGDVQRIVKGSINEAQALALIRDPNADLGSLKHSFYKPDTQKKDSKIMNTRTIYLAGGCFWGLEAYFQRIDGVVDAVSGYANGNTKNPSYEDVSYRHTGHAETVKVTYDADKLSLDDILQYFFRVVDPTSLNKQGNDTGTQYRSGVYYTDPAEKAVIAAALKREQQKYQLPLVVENEPLKNFYDAEEYHQDYLIKNPNGYCHIDIRKADEPLPGKTKTAPQGKGFDAATYKKPSDAELKRTLTEEQYQVTQNSATEYAFSHEYDHLFKPGIYVDVVSGEPLFSSADKYDSGCGWPSFTRPIDAKSVTEHDDFSYNMRRTEVRSHAADSHLGHVFPDGPRDKGGLRYCINGASLKFIPLEQMDAAGYGALKSKVK

SEQ ID NO: 969 - protein, 160 aa, Neisseria meningitidis
MRKSRLSQYKQNKLIELFVAGVTARTAAELVGVNKNTAAYYFHRLRLLIYQNSPHLEMFDGEVEADESYFGGQRKGKRGRGAAGKVAVFGLLKRNGKVYTVTVPNTRTATLFPIIREQVKPDSIVYTDCYRSYDVLDVSEFSHFSFAETSFSYQSQHTFC

SEQ ID NO: 970 - protein, 37 aa, Neisseria meningitidis
MRVQPSVKKICRNCKIIRRNRVVRVICTDLRHKQRQG

SEQ ID NO: 971 - protein, 472 aa, Neisseria meningitidis
VLSDAYMLKRLAWTVFQAAATCVLVLPLGVPVAWVLARLAFPGRALVLRLLMLPFVMPTLVAGVGVLALFGADGLLWRGRQDTPYLLLYGNVFFNLPVLVRAAYQGFVQVPAARLQTARTLGAGAWRRFLDIEMPVLRPWLAGGVCLVFLYCFSGFGLALLLGGSRYATVEVEIYQLVMFELDMAVASVLVWLVLGVTAAAGLLYAWFGRRAVSDKAVAPVMPSPPQSVEEYVLLAFSAVVLSVCCLFPLLAIVVKAWSAGESWRVLMESETWQAVWNTLRFSTAAVFAAAVLGVVYAAAARRSAWMRGLMFLPFMVSPVCVSAGVLLLYPGWTASLPLLLAMYALLAYPFVAKDVLSAWDALPPDYGRAAAGLGANGFQTACRITFPLLKPALRRGLTLAAATCVGEFAATLFLSRPEWQTLTTLIYAYLGRAGEDNYARAMVLTLLLSAFALGIFLLLDNGEGGKQTETL

SEQ ID NO: 972 - protein, 408 aa, Neisseria meningitidis
MSGNASSPSSSAAIGLIWFGAAVSIAEISTGTLLAPLGWQRGLAALLLGHAVGGALFFAAAYIGALTGRSSMESVRLSFGKRGSVLFSVANMLQLAGWTAVMIYAGATVSSALGKVLWDGESFVWWALANGALIVLWLVFGARRTGGLKTVSMLLMLLAVLWLSVEVFASSGTNAAPAVSDGMSFGTAVELSAVMPLSWLPLAADYTRHARRPFAATLTATLAYTLTSCWMYALGLAAALFTGETDVAKILLGAGLGAAGILAVVLSTVTTTFLDAYSAGASANNISARFAETPVAVGVTLIGTVLAVMLPVTEYENFLLLIGSVFAPMAAVLIADFFVLKRREEIEGFDFAGLVLWLAGFILYRFLLSSGWESSIGLTAPVMSAVAIATVLVRLFFKKTQSLQRNPS

SEQ ID NO: 973 - protein, 94 aa, Neisseria meningitidis
MKLLAALIPLLMSVAGRILTALGLMAVTYSGVDRLVAHFQQAITNSITGAPQAMLQLFYISGGGTVLNILFGAIAFILSFKQMTKLATSIGKKK

SEQ ID NO: 974 - protein, 253 aa, Neisseria meningitidis
MPFKPSKRISLLLVLALGACSTSYRPSRAEKANQVSNIKTQLAMEYMRGQDYRQATASIEDALKSDPKNELAWLVRAEIYQYLKVNDKAQESFRQALSIKPDSAEINNNYGWFLCGRLNRPAESMAYFDKALADPTYPTPYIANLNKGICSAKQGQFGLAEAYLKRSLAAQPQFPPAFKELARTKMLAGQLGDADYYFKKYQSRVEVLQADDLLLGWKIAKALGNAQAAYEYEAQLQANFPYSEELQTVLTGQ

SEQ ID NO: 975 - protein, 256 aa, Neisseria meningitidis
VSETQNEQPVQPLVEHLIELRRRLMWTVVGILVCFFGLMPFAQQLYTFIADPLMANLPKDTSMIATDVIAPFFVPVKVTLMAAFLISLPHTLYQIWAFVAPALYQNEKRLITPLVLSSVSLFFIGMAFAYFLVFPVIFKFLASVTPVGVNMATDIDKYLSFILGMFVAFGTTFEVPIVVILLTKIGVVTTEQLKRARPYVIVGAFVIAAIITPPDVISQTLLAIPLILLYEAGIWFGRFFTPRSEQDGDIQPPATT

SEQ ID NO: 976 - protein, 600 aa, Neisseria meningitidis
LGCREGLSFGNLLSEIIKRIFYYKCLKICPSVSDGGAVMLQSENSKNLISCSIKALPIMISTNGITMQFGAKPLFENVSVKFGEGNRYGLIGANGSGKSTFMKILGGDLEQTAGEVAIENGVRLGKLRQDQFAYEEMRVLDVVMMGHTEMWAAMTERDAIYANPEATEDDYMKAAELEAKFAEYDGYTAEAHAAELLSGVGISEDLHNATMAEVAPGFKLRVLLAQALFSKPDVLLLDEPTNNLDINTIRWLEGVLNQYDSTMIIISHDRHFLNEVCTHMADLDYNTITIYPGNYDDYMLASAQSRERALKDNAKAKEKLQELQEFVARFSANKSKARQATSRLKQADKIKSEMVEVKPSTRQNPYIRFEADEKAKLHRQAVEVEKLAKRFETQLFKNLNFILEAGQRLAIIGPNGAGKSTLLKLLAGAYNPEYSDGLLPDEGTIKWAEKASVGYYPQDHENDFDVDMDLSEWMRQWGQEGDDEQVIRGTLGRLLFGSNDVVKKVKVLSGGEKGRMLYGKLLLLKPNVLVMDEPTNHMDMESIESLNMALEKYNGTLIFVSHDRQFVSSLATQIIELDGKGGYEHYLGDYESYLEKKGIA

SEQ ID NO: 977 - protein, 182 aa, Neisseria meningitidis
MKKQITAAMMILTMIAAPAMANSMDNQIFENQVFHTRADAPMQLAELSQKEMKETEGAFLPLAILGGAAIGMWTQHGFSYATTGRPASVRDVAIAGGLGAIPGGVGAAGKVVSFAKYGREIKIGNNMRIAPFGNRTGHPIGKFPHYHRRVTDNTGKTLPGQGIGRHRPWESKSTDRSWKNRF

SEQ ID NO: 978 - protein, 297 aa, Neisseria meningitidis
MVTFSKIRPLLAIAAAALLAACGTAGNNAARKPVQTAKPAAVVGLALGGGASKGFAHVGIIKVLKENGIPVKVVTGTSAGSIVGSLFASGMSPDRLELEAEILGKTDLVDLTLSTSGFIKGEKLQNYINRKVGGRRIQQFPIKFAAVATDFETGKAVAFNQGNAGQAVRASAAIPNVFQPVIIGRHTYVDGGLSQPVPVSAARRQGANFVIAVDISARPSKNISQGFFSYLDQTLNVMSVSALQNELGQADVVIKPQVLDLGAVGGFDQKKRAIQLGEEAARAALPEIKRKLAAYRY

SEQ ID NO: 979 - protein, 146 aa, Neisseria meningitidis
VMPVKKVEKNILVLHGADKMFELVDKVEDYPHFLPWYSKTEVIGRSGNELKARLFMDYMHVRQSFATHNRNIPGREIRMELLEGPFKTLRGTWKFIDLGDDMCKIEFNLEYDFSNAVLSALISPVFNHLSATLVEAFVKEADRRYA

SEQ ID NO: 980 - protein, 63 aa, Neisseria meningitidis
MKANELKDKSVEQLNADLLDLLKAQFGLRMQNATGQLGKPSELKRVRRDIARIKTVLTEKGAK

SEQ ID NO: 981 - protein, 65 aa, Neisseria meningitidis
MSDPILEALARIENKTDQTLKNQKEMQAEIAQIRQDTKRTAITFGALGGGVITVGWELLKAKMGL

SEQ ID NO: 982 - protein, 451 aa, Neisseria meningitidis
MSIQSGEILETVKMVADQNFDVRTITIGIDLHDCISTDIDVLNQNIYNKITTVGKDLVATAKYLSAKYGVPIVNQRISVTPIAQIAAASKADSYVSVAQTLDKAAKAIGVSFIGGFSALVQKGMSPSDEVLIRSIPEAMKTTDIVCSSINVGSTRAGINMDAVKLAGETIKRTAEITPEGFGCAKIVVFCNAVEDNPFMAGAFHGSGEADAVINVGVSGPGVVKAALENSDATTLTEVAEVVKKTAFKITRVGELIGREASKMLNIPFGILDLSLAPTPAVGDSVARILEEMGLSVCGTHGTTAALALLNDAVKKGGMMASGSVGGLSGAFIPVSEDEGMIAAAEAGVLTLDKLEAMTAVCSVGLDMIAVPGDTPAHTISGIIADEAAIGMINSKTTAVRIIPVTGKTVGDSVEFGGLLGYAPVMPVKEGSCEVFVNRGGRIPAPVQSMKN

SEQ ID NO: 983 - protein, 307 aa, Neisseria meningitidis
MQYSTLAGQTDNSLVSNNFGFLRLPLNFMPYESHADWVITGVPYDMAVSGRSGARFGPEAIRRASVNLAWEHRRFPWTFDVRERLNIIDCGDLVFSFGDSRDFVEKMEAHAGKLLSSGKRCLSLGGDHFITLPLLRAHARYFGKLALIHFDAHTDTYDNGSEYDHGTMFYTAPKEGLIDPSRSVQIGIRTEHSKKLPFTVLTAPQVNEDSVEETVRKIKETVGNMPVYLTFDIDCLDPSFAPGTGTPVCGGLSSDRALKILRGLTDLDIVGMDVVEVAPSYDQSDITALAGATIALEMLYLQGAKKD

SEQ ID NO: 984 - protein, 71 aa, Neisseria meningitidis
MNTTYTLTFDQDSLKALNLLVFTLNHLKVLEMDMEGIEDGLSAVIETASEKADKLSAAFYNAVYEQEEKAA

SEQ ID NO: 985 - protein, 155 aa, Neisseria meningitidis
LKAGSRLLSESGKTQTVRNIVVKPTPLKAYNLTVADWHTYFVKGNQAETEGVWVHNDCPYDKGNQRYKDASYHGKNDNSVKSRAPTNGQAALDNSVQVKSTSPRRVGVDKANNEIVVLDKTQTFNNGSAEYHGHVRSWQDLHTDQKNALKKAGLD

SEQ ID NO: 986 - protein, 280 aa, Neisseria meningitidis
MLVCNPYEVVIHGTTSSGKIFRPSDWAERLCGILSSFTKDHRLSYSKWVRPMLVDNIRCVAVDKKLETDNPQMFRFLMDFAADNDLRVIDCKALLEEREQGGQNNPADEHVMLAQAIEEKHAAEKAQEQTASGASYVLREIGADDTATAFAALSVLRSALTDINRFTEQINKVQRPQGYRLLGIFEEGKHNAVAVCGFREACTLASGRHIHIDDIVTLPQSRRKGYASRLLEEVRKIGAETGVTKIHLNVHVNHDRADAHRLYFKNGFEICAYHFRCDPK

SEQ ID NO: 987 - protein, 166 aa, Neisseria meningitidis
MTRLTRAFAAALIGLCCTAGAHADTFQKIGFINTERIYLESKQARKIQKTLDSEFSARQDELQKLQREGLDLERQLAEGKLRNAKKAQAEEKWRGLVAAFRKKQAQFEEDYNLRRNEEFASLQQNANRVIVKIAKQEGYDVILQNVIYVNTQYDVTDSVIKEMNAR

SEQ ID NO: 988 - protein, 566 aa, Neisseria meningitidis
MSVKIQTRSINTDVFNHLLTAGADPLIARLCASRGVQSPAELDDKLASLLPYQSLTNCEAAAGRLADAVERQEKILIVADYDADGATACSVGMSGLAAMGAKVDFLVPNRFEHGYGLTPELAEIAAEQGVDLLITVDNGIASIAGVARAQALGLDVIVTDHHLPAETVPDCIIVNPNQKGCGFQSKSLAGVGVIFYVLTALRAELRRRDYFSDGIKEPNLGDLLDLVALGTVADVVTLDHNNRILVSQGLKRMRSGKMRPGIRALFEVARRDWRKAQPFDMGFALGPRINAAGRLDDMSVGIDCLLARDDVEAQELAAQLNNLNIERREIEQSMLQDALSDFPKTLPSGQTTLVAYRDDFHQGVVGIVASRLKDRFFRPTIVFAPADNGEVRGSGRSIPNLHLRDVLDLVSKRHPDLILKFGGHAMAAGLSILEHNIPAFQTAFEEAVREMVCEDDLSQTYITDGSLKACDITLEQAQNLARHVWGQGFAPPSFTDEFHVVRQQPLGAEGKHKKVWLQKDGYEFEAMFWRCSEDIPEYIRTVYRPVANEWRNNLELQLYIDYWEAV

SEQ ID NO: 989 - protein, 384 aa, Neisseria meningitidis
MTETTQTPTFKPKKSVALSGVAAGNTALCTVGRTGNDLSYRGYDILDLAQKCEFEEVAHLLIHGHLPNKFELAAYKAKLKSMRGLPIRVIKVLESLPAHTHPMDVMRTGVSMLGCVHPEREGHPESEARDIADKLIASLGSILLYWYQYSHNGKRIEVESEEETIGGHFLHLLHGKRPSESHIKAMHVSLILYAEHEFNASTFTARVIAGTGSDMYSSITGAIGALKGPKHGGANEVAYDIQKRYRNADEAEADIRERIGRKEIVIGFGHPVYTISDPRNVVIKEVARGLSKETGDMRLFDIAERLESVMWEEKKMFPNLDWFSAVSYQKLGVPTAMFTPLFVISRTTGWSAHVLEQRKDGKIIRPSANYTGPEDLAFVEIEER

SEQ ID NO: 990 - protein, 464 aa, Neisseria meningitidis
MNKQPLSLAVVGHTNTGKTSLLRTLLRDSGFGEVKNAPSTTRHVEEAAISDGADMLVFLYDTPGLEDAGGVLEWLETHTDTRSDGIERLQQFLGSHGAHHDFNQEAKVLRQVLQSDMAMYVIDAREPVLDKYRDELTILSWCAKPVMPVFNFTGGQLPESWTTMLARRNLHVFAGFDTVAFDFEGELRLWENLATMLPERSTLDRLTAMRRREWQRLDGEARREIADFLLDAAAFRQEVDENEDTATVLQTMQAEIRQLERQMQQRLFALYRFYHSEIDGGDWMPQAFRQDPFDSELLKQYGIRTGTGAATGALIGLGLDIATLGGSLGLGTAIGGFLGGILPNTRTISDKLSGRQTLHTDPETLTLLAARALDLLHVLQTRGHAAQSDIELHSRKAPWDAARLPPELNKARSHWKWSSLNTHRPETSRAERAGYVEKLQIRLSGKYSELNLNQDKAASRRQYK

SEQ ID NO: 991 - protein, 328 aa, Neisseria meningitidis
MSSTPNKQAGYPRLVADIGGTNARFALETAPRVIEKAAVLPCKDYDTVTDAVRAYLNQSGATAVRHAAFAIANPILGDWVQMTNHHWAFSIETTRQTLGLDTLILLNDFTAQALAVTQTSSKDLMQVGGQKPVEFAPKAVIGPGTGLGVSGLVHSHAGWVALAGEGGHTSFPPFDDMEVLIWQYAKNKYGHVSAERFLSGAGLSLVYEALAAKQKAKPAKLMPSEITEKALSGASPLCRQTLDIFCAMLGTVASNLALTLGARGGVYLCGGIIPRVLEYFKTSPFRSRFENKGRFEAYLAAIPVYVVLSEFPGISGAAAALDNHLRNV

SEQ ID NO: 992 - protein, 311 aa, Neisseria meningitidis
MGHNMMTTQKWYEHITNVIMGNTANFNSGCPEAIDYVDERKGVPLAAMKYILMYTEAAASHAYLFEHDLKKFKQYAYVAGKLGILQSVDDEDPEPFFFPCDMLNIQDPMFLMLMSDSPQLREFLVRNIDNIANDTEAFINRYDLNRHMIYNTLLMVEGKQLDRLKQRSEKVLAHPTPSKWLQKRLYDYRFFLAFAEQDAEAMKAALEPLFDKKTARMAAKETLSYFDFYLQPQIVTYAKIASMHGFDLGIDHEIAPRDLIVYDPLPADEYQDIFDFMKQYDLSYPYEYLQDWIDYYTFKTDKLVFGNAKRE

SEQ ID NO: 993 - protein, 271 aa, Neisseria meningitidis
MANSAVSRIVKRLEEKLGVNLLNRTTRQLSLTEEGAQYFRRAQRILQEMAAAETEMLAVHEIPQGVLRVDSAMPMVLHLLAPLATKFNERYPHIRLSLVSSEGYINLIERKVDIALRAGELDDSGLRARHLFDSRFRVIASPEYLAKHGTPQSTEELAGHQCLGFTEPGSLNTWAVLDAQGNPYKISPHFTASSGEILRSLCLSGCGIACLSDFLVDNDIAEGKLIPLLAEQTSDKTHPFNAVYYSDKAVNLRLRVFLDFLVEELGNNLCG

SEQ ID NO: 994 - protein, 629 aa, Neisseria meningitidis
MLRTYLNQLTPPELADSVENTVNGFMEKLSQTEPKIAQNVLLLGNVQSGKTAQVLGILSALADDGDHKVFLYLTTDSVDLQDQTVKRAKANLKNFIVLSEADDRSFMEVMKAENPILVVIKKNARVLKRWRNLFASQSSLKGYPLVIVDDEADAASLNTNTDKPDKDASTINKLLNDIKNSCCQSLFIQLTATPQSLLLQNEASDWQPEFIHFFEAGEKYIGGNFVFSDPPSYIVRFIDSELDDMKDESGEIAEGAKQALLSFLITCAEFALCDKANCNFALHPSYKIQDHQAFSKKIQAFLNDLVQAVNNGEDLAGSFKESYLDLQKTKPDIHHFDEIYEKLTALLENKQISTLVVNSQTESDFDLERGFNIIIGGNVIGRGLTIPKLQTVYYSRTAKKPNADTFWQHSRIFGYDRDKSLLRLYIPFDVYYFFVQLNQANNLIIGQAKNSGGNIQVIYPKNINPTRKNVLKFDSINQIVGGVNYFPLHPNEDNLSEINKILPSILKDEIQSDLYQIDIEDLFLVLDKLGRYVPDDWNKEKFIAGVEALKAQRPSFKTYVLIKTGRKLSRATGTMLSEDDRKLGEKYPNDLFLTLYQVVGNKDKGWQGKDFWLPNIKLPHNGLVYQSAK

SEQ ID NO: 995 - protein, 113 aa, Neisseria meningitidis
MPSEPLKGLPEQNVVRLTGKHPNDLEAVSGKCMETDDKGGPVGWAENGVCHTLFAKLVGNIAEDGGKLTDYLISHSALQPYQAGKSGYAAVQNGRYVLEIDSEGAFYFRRRHY

SEQ ID NO: 996 - protein, 238 aa, Neisseria meningitidis
LLIHYTLCRYRNWLAQDDTLSELLKLINCQLTEKNLKVEKASASVVDATIIQTAGSKQRQAIEVDEEGQVSGQTTPSKDSDARWIKKNGLYKLGYKQHTRTDEEGYIEKLHITPANAHECNHLLPLLEGIAEGTTVYADKGYDSKENRQHLKEHQLLDGIMRKACRNRPLSETQTKRNRYLSKTRYVVEQSFGTLHRKFRYARAAYFGLIKVSAQSHLKAMCLNLLKAANRLSAPAAA

SEQ ID NO: 997 - protein, 377 aa, Neisseria meningitidis
MSTPALLVLADGSVFHGTSIGYEGSTSGEVVFNTSMTGYQEILTDPSYCKQIVTLTYPHIGNTGTNAEDEESRSVYAAGLIIRDLPLLHSNFRASESLHDYLVRNKTVAIADIDTRRLTTLLREKGAQGGAILTGADATIEKAQELIAAFGSMVGKDLAKEVSCTETYEWTEGEWELGKGFVTPDEQPYHVVAYDFGVKTNILRMLASRGCRLTVVPAQTSAQDVLALNPDGVFLSNGPGDPEPCTYAIEAVQKLMESGKPIFGICLGHQLISLAIGAKTLKMRFSHHGANHPVQDLDSGKVVITSQNHGFAVDADTLPANARITHKSLFDNTLQGIELTDKPVFCFQGHPEASPGPQDVGYLFDKFIGNMKAAKRA

SEQ ID NO: 998 - protein, 171 aa, Neisseria meningitidis
MKIKQIVKPGLAVLAAGILSACATKSNVKADGTTDNPVFPKPYSVTLDNKRGTFPTYDELDLMRPGLTKDDIYKILGRPHYDEGMYGVREWDYLFHFHTPGVGTDPENTSGVEDVTTCQYKVIFDKDKFARSFYWNPVFPKDAACPPPAPKAEPQVIIREIVPAKPKRIRQ

SEQ ID NO: 999 - protein, 223 aa, Neisseria meningitidis
MTFSTILFYILAAIVLYGAVRTVTAKNPVHAALHLVLTFCVSAMIWMLMQAEFLGVTLVVVYVGAVMVLFLFVVMMLNIDIEEMRAGFWRHAPVAGVVGTLLAVALILILVNPKTNLAAFGLMKDIPADYNNIRDLGSRIYTDYLLPFELAAVLLLLGMVAAIALVHRKTVNPKRMDPADQVKVRADQGRMRLVKMEAVKPQVESAEESEVSDGLKPEGEGKA

SEQ ID NO: 1000 - protein, 544 aa, Neisseria meningitidis
MAAKDVQFGNEVRQKMVNGVNILANAVRVTLGPKGRNVVVDRAFGGPHITKDGVTVAKEIELKDKFENMGAQMVKEVASKTNDVAGDGTTTATVLAQSIVAEGMKYVTAGMNPTDLKRGIDKAVAALVEELKNIAKPCDTSKEIAQVGSISANSDEQVGAIIAEAMEKVGKEGVITVEDGKSLENELDVVEGMQFDRGYLSPYFINDAEKQIAALDNPFVLLFDKKISNIRDLLPVLEQVAKASRPLLIIAEDVEGEALATLVVNNIRGILKTVAVKAPGFGDRRKAMLQDIAILTGGVVISEEVGLSLEKATLDDLGQAKRIEIGKENTTIIDGFGDAAQIEARVAEIRQQIETATSDYDKEKLQERVAKLAGGVAVIKVGAATEVEMKEKKDRVEDALHATRAAVEEGVVAGGGVALLRARAALENLHTGNADQDAGVQIVLRAVESPLRQIVANAGGEPSVVVNKVLEGKGNYGYNAGSGEYGDMIEMGVLDPAKVTRSALQHAASIAGLMLTTDCMIAEIPEDKPAVPDMGGMGGMGGMM

SEQ ID NO: 1001 - protein, 144 aa, Neisseria meningitidis
MKKQITSAVMMLSMIAPAMANGLDNQTFENQVFHTQADAPMQLAELSQKEMKETEGEWIPNAVGGIMGGVGGHFSYMASAIASGSYNREAHWTAIGGGALIGAMNPINGGRALINGMRGVAVGTVAGGINGYAGSTGKNTDIRR

SEQ ID NO: 1002 - protein, 225 aa, Neisseria meningitidis
MSRVLLVDDDALLTELLTEYLSAEGLNVRSVPDGEAGVQEILSGQYDVVVLDSMMPKMNGLDVLKNVRARSTVPIIMLTAKGDDIDRIIGLEMGADDYVPKPCTPRELLARINAILRRAQHSGEQNNAPNSISVSDVVLYPAKRQASVKDMPLELTSTEFNLLEVLMRHAGQVVSKETLSVEALDRKLAKFDRSIDVHISSIRHKLGDASLIQTVRGLGYLFVKN

SEQ ID NO: 1003 - protein, 71 aa, Neisseria meningitidis
VAGATIRIIDRQTDEVIAKKTIYVFEKGLDGTGGARMPWKFAILCNKERLTSSEPLSDFVLSVLKPYILRP

SEQ ID NO: 1004 - protein, 398 aa, Neisseria meningitidis
MSQKLILVLNCGSSSLKGAVLDNGSGEVLLSCLAEKLNLPDAYITFKVNGEKHKVDLSAHPDHTGAVEALMEELKAHGLDSRIGAIGHRVVSGGELYSESILVDDEVIAGIEKCIPLAPLHNPAHLLGLRAAQSIFKDLPNVVVFDTSFHQTMPEVAYKYAVPQELYEKYGLRRYGAHGTSYRFVADETARFLGKDKKDLRMVIAHLGNGASITAVANGESRDTSMGLTPLEGLVMGTRSGDIDPSVFGFLAENANMTIAQITEMLNKKSGLLGISGLSNDCRTIEEEAAKGHKGAKLALDMFIYRLAKYIGSMAVAAGGLDALVFTGGIGENSDIIRERVIGYLGFLGLNIDQEANLKARFGNAGVITTADSKAVAVVIPTNEELMIAHDTARLSGL

SEQ ID NO: 1005 - protein, 92 aa, Neisseria meningitidis
MTEHTPEKKNVKVDQLVVQDKESASNSGKEGFFAYFSNSWSEFKKVVWPKREDAVRMTVFVIVFVAVLSIFIYAADTAISWLFFDVLLRREG

SEQ ID NO: 1006 - protein, 513 aa, Neisseria meningitidis
MKIGIPRESLSGETRVACTPATVALLGKLGFETVVESGAGLAASLDDAAYQTAGATVADKAAVWVCPLIYKVNAPSEQELPLLNEGQTIVSFLWPRQNEALVEALRAKKVNALAMDMVPRISRAQALDALSSMANISGYRAVIEAANAFGRFFTGQITAAGKVPPAQVLVIGAGVAGLAAIGTANSLGAVVRAFDTRLEVAEQIESMGGKFLKLDFPQESGGSGDGYAKVMSDEFIAAEMKLFAEQAKEVDIIITTAAIPGKPAPKLITKEMVESMKSGSVIVDLAAATGGNCELTRPGELSVTGNGVKIIGYTDMANRLAGQSSQLYATNLVNLTKLLSPNKDGEITLDFEDVIIRNMTVTRDGEITFPPPPIQVSAQPQQTPSEKAAPAAKPEPKPVPLWKKLAPAVIAAVLVLWVGAVAPAAFLNHFIVFVLACVIGYYVVWNVSHSLHTPLMSVTNAISGIIVVGALLQIGQGNGFVSLLSFVAILIAGINIFGGFAVTRRMLNMFKKG

SEQ ID NO: 1007 - protein, 671 aa, Neisseria meningitidis
MKSYPDPYRHFENLDSAETQNFAAEANAETRARFLNNDKARALSDGILNQMQDTRQIPFCQEHRARMYHFHQDAEYPKGVYRVCTAATYRSGYPEWKILFSVADFDELLGDDVYLGGVSHLVEKPNRALLTLSKSGGDTAYTLEVDLEAGELVEGGFHFPAGKNHVSWRDENSVWVCPAWDERQLTESGYPREVWLVERGKSFEESLPVYQIDKGAMMVNAWRYLDPQGSPIDLIEASDGFYTKTYLQVSSEGEAKPLNLPNDCDVAGYLAGHLLLTLRKDWHRANQSYPSGALVAVKLNRGEIGAAQLLFAPDETQALESVETTKRFVVASLLENVQGRLKAWRFADGKWQEVELPRLPSGALEMTDQPWGGDVVYLAAGDFTTPLTLFALDLNVMELTVMRRQPQQFDSDGIEVRQFWTTSADGERIPYFHVGKNAAPDTPTLVYAYGGFGIPELPHYLGSIGKYWLEEGNAFVLANIRGGGEFGPRWHQAAQGISKHKSVDDLLAVVRDLSERGMSLPEHIGLQGGSNGGLITAAAFVREPQSIGALVCEVPLTDMIRYPLLSAGASWTDEYGNPQKYEVCKRQLGELSPYHNLSDGIDYPPALITTSLSDDRVHPAHALKFYAKLRETSPQSWLYSPDGGGHTGNGTQRESADELACVLLFLKEFLG

SEQ ID NO: 1008 - protein, 896 aa, Neisseria meningitidis
MSDNRLDTARRHSLFLARQLDNGKLKPEIFLPMLDKVLTEADFQAFADWDKIRAEENEEELARQLRGLRRYVVSQIIVRDINRISDLNEVTRTITLFADFAVNTALDFAYAYYRDMYGTPIGRYTKSPQHLSVVAMGKAGGYELNVSSDIDLIFIYPESGDTDGRRERGNQEFFTKVGQKLIALLNDITADGQVFRVDMRLRPDGDSGALVLSETALEQYLITQGREWERYAWCKGRVVTPYPNDIKALVRPFVFRKYLDYGAYEAMRKLHRQIRSEVSKKGMADNIKLGAGGIREVEFIAQIFQMIRGGQMRALQLKGTQETLKKLAETGIMPSENVETLLAAYRFLRDVEHRLQYWDDRQTQTLPTSPKQRQLLAESMGFDSYSAFSDGLNVHRNKVNQLFNEILSEPEEQTQDNSEWQWAWQDKPDEEGRRCRLKAHGFDAETVAARLDQIRHGHKYRHLSAHAQPRFDAVVPLFVQAAAAQSNPTDTLMRLLDFLENISRRSAYLAFLNEHPQTLAQLAQIMGQSSWVAAYLNKYPILLDELISAQLLDTAFDWQALAAALSDDLKACGGDTEAQMDTLRRFQHAQVFRLAVQDLAGLWTVESLSDQLSALADTILAAALLCAWADMPKKHRDTPQFAVVGYGKLGGKELGYASDLDLVYLYDDPHPDAGDVYSRLARRLTNWLSAATGAGSLYETDLRLRPNGDAGFLAHSIAAFEKYQRENAWTWEHQSLTRARFICGTSEIQTAFDRIRTEILTAERDQTALAGEIIEMREKMFPTHPPADSNVKYARGGVVDVEFIVQYLILAHARKYPQLLDNYGNIALLNIAADCSLIDKNLAEQSRTAYRFYRRQQHNTKLRDAAKTEVTGELLAHYGNVRKLWRDVFGEEAATA

SEQ ID NO: 1009 - protein, 259 aa, Neisseria meningitidis
MAASPEAKFTEEKILWVKHHTPKLITFAISRPESYRFKAGQFSRLGFYEGEGFIWRAYSIVSAEYADTLEYFAVLIQDGPMSARFAKMQQGDTILLDKNATGFLLPERFPDGKDLVMLCTGSGIAPFLSILEQPEIRQRFDTVNLIHSVSFPEELIFNDRLAALSEHPLVGEYGHSFRFIPVTTRAANSDGLGGKRIPELLKNGSIEQALHTKFTPESTRFMICGNPEMVKDTFQTLLDMGYAMHRNRIPGQIMMENGF

SEQ ID NO: 1010 - protein, 157 aa, Neisseria meningitidis
MLSTESLKQIDIELAKYPADQRRSAIMGALRIAQTEKGWLAPETIAFVADYIGISPAQAYEVATFYNMYDLEPVGKYKLTVCTNLPCALRGGMATGEYLKQRLGIGYGEITPDGKFTLVEGECMGACGDAPVMLVNNHSMCSFMTEEAIEKKLAELE

SEQ ID NO: 1011 - protein, 78 aa, Neisseria meningitidis
MRILDIFKNPATGNVSHSKLWANVACAAGTFKFVMLPDPSAEIWAVYLGIVGGYAVARSFVSVKRQEVENESRETAGE

SEQ ID NO: 1012 - protein, 91 aa, Neisseria meningitidis
MNEGEVVLTPEQIQTLRGYAFRGDTYGGWRYLANLGDRYADNAAAIVGKDANLNGLNLWMKKGVENLWDDTVGKKIRLMCISVFWIVVFNL

SEQ ID NO: 1013 - protein, 199 aa, Neisseria meningitidis
MALKTSNLEHAMLVHPEAMSVGALADKIRKIENWPQKGILFHDITPVLQSAEYFRLLVDLLVYRYMDQKIDIVAGLDARGFIIGAALAYQLNVGFVPIRKKGKLPFETVSQSYALEYGEAAVEIHTDAVKPGSRVLLVDDLVATGGTMLAGLELIRKLGGEIVEAAAILEFTDLQGGKNIRASGAPLFTLLQNEGCMKG

SEQ ID NO: 1014 - protein, 331 aa, Neisseria meningitidis
MKTSIRYALLAAALTAATPALADITVYNGQHKEAAQAVADAFTRATGIKVKLNSAKGDQLAGQIKEEGSRSPADVFYSEQIPALATLSAANLLEPLPASTINETRGKGVPVAAKKDWVALSGRSRVVVYDTRKLSEKDLEKSVLNYATPKWKNRIGYAPTSGAFLEQVVAIVKLKGEAAALKWLKGLKEYGKPYAKNSVALQAVENGEIDAALINNYYWHAFAREKGVQNVHTRLNFVRHRDPGALVTYSGAAVLKSSQNKDEAKKFVAFLASKEGQRALTAVRAEYPLNPHVVSTFNLEPIAKLEAPQVSATTVSEKEHATRLLEQAGMK

SEQ ID NO: 1015 - protein, 246 aa, Neisseria meningitidis
MLSARYLHLHEALGLGPMWLKRGAVVLPPATLPESPTQIRPQKQTILSIPQRPSEQHTGQARLKTMKALETAAVPTRKPVPETETPLPGVSDGIAPVPAASGITRLAVVSLCPPIEDAVYGQLFHGKAGILLDNILKAVGLDAAYVHKTCWVKTAAVGNPMPSEQAIENALGQIIRELDGCRAPAVLFLGQAFVKPERQTMIETLCGCRPFFIIDHPARLLRQPELKARNWQVLKQLKRALQAGGS

SEQ ID NO: 1016 - protein, 258 aa, Neisseria meningitidis
MRAVPPPHISITGLGYLGLPLAQKFYQHGSRVSAVKRSLTSDDINLPIHLDTIDLGSTDAFQTALWRHHADKPVWFFLLPPSSLTHYADTVKQWAELARTCNVQHLIFTSSTSVYGDTARECDETATPDPQTESARQILAAEQHLLDSGVPNIDILRLGGLYCAERHPVGRLVQKQNIPGGNRPINIVHRNIAVESLFQTAFNPGGRRLKNIIEPRHPTRREFYTEEAAKLGLPAPDFAPDDSVGKIIRTVCDNGLSL

SEQ ID NO: 1017 - protein, 279 aa, Neisseria meningitidis
MLVAFLIMLREGIEAALIVGIVAGFLKQSGHSKLMPKVWFGVVLASLMCLGIGYGIHSATGEIPQKQQEFVVGIIGLVAVAMLTYMILWMKKAARSMKRQLQDSVQAALNRGSGQGWALVGMAFLAVAREGLESVFFLLAVFKQSPTWQMPAGAVAGVLAAAVIGALIYQGGMRLNLAKFFRWTGAFLIVVAAGLLAGSLRALHEPGIWNALQDIVFDSSKYLHEDSPLGVLLGGFFGYTDHPTQGEALVWLLYLIPVMTWFLCGSRPSETLTRKEELK

SEQ ID NO: 1018 - protein, 197 aa, Neisseria meningitidis
MRKQNTLTGIPTSDGQRGFALFIVLMVMIVVAFLVVTAAQSYNTEQRISANESDRKLALSLAEAALREGELQVLDLEYDTDSKVTFSENCGKGLCAAVNVRTNNDNEEAFDNIVVQGKPTVEAVKRSCTANSTNLCIDNKGTEYKKGTQSVSKMPRYIIEYLGVKNGENVYRVTAKAWGKNANTVVVLQSYVSNNDE

SEQ ID NO: 1019 - protein, 355 aa, Neisseria meningitidis
MRKILVTGGAGFIGSAVVRHIIRNTQDSVVNLDKLTYAGNLESLTDIADNPRYAFEQVDICDRAELDRVFAQHRPDAVMHLAAESHVDRSIGSAGEFIQTNIVGTFNLLEAARAYRQQMPSEQHEAFRFHHISTDEVYGDLGGTDDLFTETAPYAPSSPYSASKASSDHLVRAWLRTYGLPTIVTNCSNNYGPYHFPEKLIPLMILNALDGKPLPVYGDGMQIRDWLFVEDHARALYQVVTEGVVGETYNIGGHNEKANIEVVKTICALLEELAPEKPAGVARYEDLITFVQDRPGHDVRYAIDAAKISRELGWKPQETFESGLRKTVQWYLDNKTWWQNVLNGSYRLERLGTGK

SEQ ID NO: 1020 - protein, 321 aa, Neisseria meningitidis
MSYTQLTQGERYHIQYLSRHCTVTEIAKQLNRHKSTISREIRRHRTQGQQYSAEKAQRQSRTIKQRKRQPYKLDSQLIQHIDTLIRRKLSPEQVCAYLRKHHRITLHHSTIYRYLRQDKSNGSTLWQHLRICSKPYRKRYGSTWTRGKVPNRVSIENRPAIVDQKSRIGDWEADTIVGKGQKSALLTLVERVTRYTIICKLDSLKAEDTARAAVRALKAHKDRVHTITMDNGKEFYQHTKITKALKAETYFCRPYHSWEKGLNENTNGLIRQYFPKQTDFRNISDREIRRVQDELNHRPRKTLGYETPSVLFLNLFQPLIH

SEQ ID NO: 1021 - protein, 335 aa, Neisseria meningitidis
MSTFFQQTAQAMIAKHIDRFPLLKLDQVIDWQPIEQYLNRQRIRYLRDHRGRPAYPLLSMFKTVLLGQWHSLSDPELEHSLITRIDFNLFCRFDELSIPDYSTLCRYRNWLAQDDTLSELLKLINRQLTEKGLKIEKASAAVVDATIIQTAGSKQRQAIEVDEEGQINGQTTPSKDKDARWIKKNGLYKLGYKQHTRTDAEGYIEKLHITPANAHECKHLSPLLEGIAEGTTVYADKGYDSAENRQHLEEHQLLDGIMRKACRNRPLSEAQTKRNRYLSKPRYVVEQSFGTLHRKFRYARAAYFGLIKVSAQSHLKAMCLNLLKAANRLSAPAAA

SEQ ID NO: 1022 - protein, 199 aa, Neisseria meningitidis
MNNLIKINLLPYREEMNKRKQQQFKTLMYGAVLTGVAAVAATYLFIDNMINNQSERNTLLETSIAHLDTELSEIQKLKQEKDAFLIKKNKIEELQLKRLQAAKILDSLNEAVPGSTYLTSLDAVTADSYRLSGRTSSDNRVAAMMRAMPNTGIFKQPELLSIKKNNSHQEFTLQATLQPIVKAAESKENPASGNAQEAN

SEQ ID NO: 1023 - protein, 100 aa, Neisseria meningitidis
MTLTKAELADILVDKVSNVTKNDAKEIVELFFEEIRSTLASGEEIKISGFGNFQLRDKPQRPGRNPKTGEEVPITARRVVTFHASQKLKSMVEHYYDKQR

SEQ ID NO: 1024 - protein, 123 aa, Neisseria meningitidis
MKPYKIYTHPALPPQAVKQGWSWPGLLFGTLWACFKRMWGLGLGLTGAIFVLAVFAQLVYGDTPATDSAFNVLGLAVSVWFGAKGNSLYARHLLSRGYTELPETVQAANPQAALAQYFGRGGR

SEQ ID NO: 1025 - protein, 329 aa, Neisseria meningitidis
MKQPVFAVTSGEPAGIGPDICLDLAFARLPCRCAVLGDKHLLRARAEALGKSVVLRDFDPESGGAAYGELEVLHIPAAEAVEAGKLNPANAAYVLQLLDTALAGISDGIFDGIVTAPLHKGIINDARASTGFFSGHTEYLAEKSGTGQVVMMLAGKGLRVALVTTHLPLKDVAAAITQPLIESVARILHHDLKHKFCIKNPKILVAGLNPHAGEGGHLGHEETDTIIPALENLRRERINLAGPYPADTLFQPFMLEGADAVLAMYHDQGLPVLKYHSFGQGVNITLGLPFIRTSVDHGTALDLAATGRADSGSLITAVETAVEMARGSL

SEQ ID NO: 1026 - protein, 445 aa, Neisseria meningitidis
MTFQNKKILVAGLGGTGISMIAYLRKNGVEVAAYDAELKPERVAQIGKMFDGLVFYTGRLKDALDNGFDILALSPGISERQPDIEAFKQNGGRVLGDIELLADIVNRRGDKVIAITGSNGKTTVTSLVGYLCIKCGLDTVIAGNIGTPVLEAEWQREGKKADVWVLELSSFQLENTESLRPTAATVLNISEDHLDRYDDLLDYAHTKDKIFRGDGVQVLNADDAFCRAMKRAGREVKWFSLEYEADFWLERETGRLKQGNEDLIATQDIPLQGLHNATNVMAAVALCEAVGLPREALLEHVKTFQGLPHRVEKIGEKNGVVFIDDSKGTNVGATAAAIAGLQNPLFVILGGMGKGQDFTPLRDALAGKAKGVFLIGVDALQIRRDLDGCDLNMTDCATLEEAVQKAYAQAEAGDIVLLSPACASFDMFKGYAHRSEVFIGAFKAL

SEQ ID NO: 1027 - protein, 143 aa, Neisseria meningitidis
MSSNAWLFWALASAGFASLTAIFAKMGLQGIDSDFATFIRTLVILAALLLFLTYTGKWQGVNGFTGHNWTFLILSGLATGASWLAYFKALQLGNASQVAPVDKFSLVLVALMAVVFLDERPNTQEWIGLGLVTAGVLVLALKR

SEQ ID NO: 1028 - protein, 231 aa, Neisseria meningitidis
MKAMILAAGRGERMRPLTDTTPKPLLDVAGKPLIGWHLCRLKQAGFTEIVINHAWLGRQIEDALGDGSAYGVNIAYSPEPAGGLETAGGIAQALPLLGGQPFLVVNGDVLTDIDFTAAFQAASSLPEHISAHLWLVENPPHNPDGDFSLLPDGSVRPEVNGGNGLTFSGVGIYRPEMFDGIEAGSVAKLAPVLRGEMRQNRVSGQKHTGLWLDVGTVCRLKEAQALAGAWK

SEQ ID NO: 1029 - protein, 914 aa, Neisseria meningitidis
MQQQHLFRLNILCLSLMTALPAYAENVQAGQAQEKQLDTIQVKAKKQKTRRDNEVTGLGKLVKSSDTLSKEQVLNIRDLTRYDPGIAVVEQGRGASSGYSIRGMDKNRVSLTVDGVSQIQSYTAQAALGGTRTAGSSGAINEIEYENVKAVEISKGSNSVEQGSGALAGSVAFQTKTADDVIGEGRQWGIQSKTAYSGKNRGLTQSIALAGRIGGAEALLIHTGRRAGEIRAHEDAGRGVQSFNRLVPVEDTNQYAHFVVEEECPNGYAACKDKPKKDVVGKDERQTVSTRDYTGPNRFLADPLSYESRSWLFRPGFRFENKRHYIGGILEHTQQTFDTRDMTVPAFLTKAVFDANSKQAGSLPGNGKYVGNHKYGGLFTNGENGALVGAEYGTGVFYDETHTKSRYGLEYVYTNADKDTWADYARLSYDRQGIGLDNHFQQTHCSADGSDKYCRPSADKPFSYYKSDRVIYGESHRLLQAAFKKSFDTAKIRHNLSVNLGFDRFGSNLSHQDYYYQNANRAYSSKTPPKNGNKNISPNGSKEKPYWVSIGGGNVVTEQICRLGNNTYTDCTPRSINGKSYYAAVRDNVRLGRWADVGAGLRYDYRSTHSDDGSVSTGTHRTLSWNAGIVLKPADWLDLTYRTSTGFRLPSFAEMYGWRAGVQSKAVKIDPEKSFNKEAGIVFKGDFGNLEASWFNNAYRDLIVRGYEAQIKNGKEEAKGDPAYLNAQSARITGINILGKIDWNGVWDKLPEGWYSTFAYNRVHVRDIKKRADRTDIQSHLFDAIQPSRYVVGLGYDQPEGKWGVNGMLTYSKAKEITELLGSRALLNGNSRNTKATARRTRPWYIVDVSGYYTIKKHFTLRAGVYNLLNYRYVTWENVRQTAGGAVNQHKNVGVYNRYAAPGRNYTFSLEMKF

SEQ ID NO: 1030 - protein, 284 aa, Neisseria meningitidis
MPPIPAPSAPSEHTVAWVFGQPVTDLPQDLFIPPDALKVVLGSFQGPLDLLLYLIRKQNIDVLDIPMVKITEQYLHYIAQIEAYQFDLAAEYLLMAAMLIEIKSRLLLPRTEAVEDEEADPRAELVRRLLAYEQMKLAAQGLDALPRAGRDFAWAYLPLEIAVEAKLPEVYITDLTQAWLGILSRAKHTRSHEVIKETISVRAQMTAILRRLNGHGICRFHDLFNPEQGAAYVVVNFISLLELAKEGLVRIVQEVGFGEIRISLNHEGAHSDGISGTRGGRDVF

SEQ ID NO: 1031 - protein, 129 aa, Neisseria meningitidis
MLYKCKIKKLDNTIEEAVLIEINGYELHCFISYCPFKIFENQFYEVELSYEIFNDYILDKSTSNIGFRKIDDSFKYEITAELKNNHLTLQNIQFEEDEYLINYSYLDNCLVTLTVDRISVSFIREIQAA

SEQ ID NO: 1032 - protein, 129 aa, Neisseria meningitidis
MSTHEKLLTADNPILRQRAKAMRQEMSGAEAKLWQHLRAGRLNGYKFRRQQPMGNYIVDFMCVTPKLIVEADGGQHTEQAAYDHARTAYLNSLGFTVLRFWNHEILQQTNDVLTEILLVLQELEKQAAR

SEQ ID NO: 1033 - protein, 389 aa, Neisseria meningitidis
MNLFPGGFNNLNPNFIPLAAVAAQDAVQRACETAKSVLIIPENHTRNMFYLQNVYALGEILCSAGYEVRLGSLNPEVTEPTEFETALGDKILLEPLLRTRDRVHLADGFSPCVVLLNNDLSAGIPDILKGISQTVLPPLHGGWTTRRKTNHFGAYNQVAAEFAKLIGIDEWQINPYFEKIGGLDFQGREGEDALAEAVERVLAKIQAKYDESGITDKPFVIVKADAGTYGMGVMSVKSADEVRGLNRKNRNKMAKVKEGLEVSEVIVQEGIYTYETLNGAVCEPVVYMMDRFVIGGFFRVHEGRGADENLNAGGMVFVPLSNSIPTGNGDNSQEAPEACKRVFEQWDSLGMPRSEKDCDVDNEHNRLYVYGVMARLSLLAASIELEETA

SEQ ID NO: 1034 - protein, 604 aa, Neisseria meningitidis
MPAETTVSGARPAAKLPIYILPCFLWIGIVPFTFALRQQPSPDFYHDAAAAAGLIVLLFLTAGKKLFDVKIPPISFLLFAMAAFWYLQARLMNLIYPGMNDIVSWIFILLAVSAWACKSLVAHFGQERIVTLFAWSLLIGSLLQSCIVVIQFAGWEDTPMLQNIIVYSGQGVIGHIGQRNNLGHYLMWGILAAAYLNGQRKIPAALGAICLIMQTAVLGLVNSRTILTYIAAIALILPFWYFRSDKSNRRTMLGIAAAVFLTALFQFSMNTILEPFTGIRYETAVERVANGGFTDLPRQIEWNKALAAFQSAPIFGHGWNSFAQQTFLINAEQHNIYDNLLSNLFTHSHNIVLQLLAEMGISGTLLVAATLLTGIAGLLKRPLTPASLFLICTLAVSMCHSMLEYPLWYVYFLIPFGLMLFLSPAEASDGIAFKKAANLGILTASAAIFAGLLHLDWTYTRLVNAFSPATDDSAKTLNRKINELRYISANSPMLSFYADFSLVNFALPEYPETQTWAEEATLKSLKYRPHSATYRIALYLMRQGKVAEAKQWMRATQSYYPYLMPRYADEIRKLPVWAPLLPELLKDCKAFAAAPGHPEAKPCK

SEQ ID NO: 1035 - protein, 252 aa, Neisseria meningitidis
MPCLAVVLVGGDPASAVYVRNKKTACQKCGIKSLSYELPESTSQEELLALVDRLNADSEVDGILVQLPLPKHLDSQAVLERISPDKDVDGFHPYNVGRLAVKMPLMRPCTPKGVMTLLEAYGIDPKGKKAVVVGASNIVGRPQALELLLARATVTVCHSATENLADEVAGADILVVGVGIPNFVKGEWIKPGAVVIDVGINRLDDGSLCGDVEFETAKERAAMITPVPGGVGPMTIATLMENTLHAASLHDA

SEQ ID NO: 1036 - protein, 842 aa, Neisseria meningitidis
LCHRTKHRRNRNAMKKTCFHCGLDVPENLHLTVRYENEDRETCCAGCQAVAQSIIDAGLGSYYKQRTADAQKTELPPQEILDQIRLYDLPEVQSDFVETHGGTREAVLMLGGITCAACVWLIEQQLLRTDGIVRIDLNYSTHRCRVVWDDGKIRLSDILLKIRQIGYTAAPYDAQKIEAANQKERKQYIVRLAVAGLGMMQTMMFALPTYLYGGDIEPDFLQILHWGGFLMVLPVVFYCAVPFYQGALRDLKNRRAGMDTPIAVAIIMTFIAGVYSLATNAGQGMYFESIAMLLFFLLGGRFMEHIARRKAGDAAERLVKLIPAFCHHMPDYPDTQETCEAAVVKLKAGDIVLVKPGETIPIDGTVLEGASTVDESMLTGESLPVAKMPSEKVTAGTLNTQNPLIIRTDRTGGGTRLSHIVRLLDRALAQKPRTAELAEQYASSFIFGELLLAVPVFIGWTLYADAHTALWITVALLVITCPCALSLATPTALAASTGTLAREGILIGGKQAIETLAQTTDIIFDKTGTLTQGKPAVRRISLLRGTDEAFVLAVAQALEQQSEHPLARAILNCRISDGSVPDIAIKQRLNRIGEGVGAQLTVNGETQVWALGRASYVAEISGKEPQTEGGGSAVYLGSQSGFQAVFYLTDPLKDSAAEAVRQLAGKNLTLHILSGDRETAVAETARALGVAHYRAQAMPEDKLEYVKALQKEGKKVLMIGDGINDAPVLAQADVSAAAAGGTDIARDGADIVLLNEDLNIVPHMFAQARRTQQIIRQNLIWAGAYNIIAVPLAVLGYVQPWIAALGMSFSSLAVLGNALRLHKRGKMPSEKMPSEQCRTALL

SEQ ID NO: 1037 - protein, 680 aa, Neisseria meningitidis
MMSPETRKQLKITDVSAKKLDKLNLHTAWDLVLHLPLRYEDETHIMPIKDAPIGVPCQVEGEVIHQEVTFKPRKQLIVQIADGSGSVLFLRFIHFYASHQKQTAVGKRIRAVGEIKHGFYGDEMIHPKIRDAEGGGLAESLTPVYPTVNGLNQPTLRRIIQTALDVTPLHDTLPDALLCRLKLPHLAESLRLLHSPPPSFTIHQLSDGTLPAWQRLKFDELLAQQLSMRLARQKRIGGTAAALGGDGTLTQALRQALPFALTDAQEKVVSEICRDMAQTYPMHRLLQGDVGSGKTIVAALSALTAIESGAQVAVMAPTEILAEQHFIKFKQWLEPLGIEVVRLFGSLRKKAKDEAKAKLADGSVKIAVGTHALFSDGVAFHNLGLTIVDEQHRFGVAQRLALKNKGREVHQLMMSATPIPRTLAMSFFADLDVSVIDELPPGRTPIKTRLVNNVRRAEVEGFVLGTCRKGRQAYWVCPLIEESETLQLQTAAETLARLQTALPELNIGLVHGRMKAAEKAEVMARFSSGGLNVLVATTVIEVGVDVPNAALMVIEHAERMGLAQLHQLRGRVGRGAAESVCVLLFAEPLGELAKARLKVIYEHTDGFEIARQDLNIRGPGEFLGARQSGVPMLRFAKLEEDLHLLEQVREIAPMLIEQNPEIVEAHLARWLSGREGYLGV

SEQ ID NO: 1038 - protein, 282 aa, Neisseria meningitidis
MLQTALRFPYVFKARAEDSHKGTFGTLAVVGGSAGMSGAPVLAASAAMYLGCGKVWAGFNQDALPFAVIAGFPEIMLDTADGLSKRQDINAWVVGCGLGTGRAAVGTLAGILTEHTDKPVLLDADALNILSTDAETRNLARGCKNLILTPHPAEAARLLGTTVAQVQADRTAAVRKIGAIFGATVVLKGHKTLVAASDTEIYVNESGNAGLATAGSGDVLGGIIGSLLAQGVPVFEAACAGAWLHGAAADVIKESAGIAAGLLAGEIAPAARWLRNRITESM

SEQ ID NO: 1039 - protein, 354 aa, Neisseria meningitidis
MEKEFRILNIVSAKIWGGGEQYVYDVSKALGLRGCTMFTAVNKNNELMHRRFSEVSSVFTTRLHTLNGLFSLCALTRFIRKNRISHLMIHTGKIAALSILLKKLTGVRLIFVKHNVVANKTDFYHRLIQKNTDRFICVSRLVYDVQTADNPFKAKYRIVHNGIDTGRFPPSQEKPDSRFFTVAYAGRISPEKGLENLIEACVILHRKYPQIRLKLAGDGHPDYMCRLKRDVSASGAEPFVSFEGFTEKLASFYRQSDVVVLPSLVPEAFGLSLCEAMYCRTAVISNTLGAQKEIIEHHQSGILLDRLTPESLADEIERLVLNPEAKNALATAGHQCVANRFTINHTADKLLDAI

SEQ ID NO: 1040 - protein, 498 aa, Neisseria meningitidis
VHLAQTERPSIMRIVEKAYTFDDVLLVPAHSTVLPRDVKLQTKLTREITLNLPLLSAAMDTVTEARLAISMAQEGGIGIIHKNMPPEMQARAVSKVKRHESGVVKDPVTVAPTTLIREVLEMRAQRKRKMSGLPVVENGKVVGIVTNRDLRFENRVDLPVSAIMTPRERLVTVPEGTSIDEARELMHTHKVERVLVLNEKDELKGLITVKDILKTTEFPNANKDSEGRLRVGAAVGTGGDTEERVKALVEAGVDVIVVDTAHGHSQGVIDRVRWVKETYPHIQVIGGNIATAKAALDLVAAGADAVKVGIGPGSICTTRIVAGVGVPQLTAIHNVAEALKGTGVPLIADGGIRFSGDIAKALAAGAYSVMLGGMFAGTEEAPGEIELYQGRSYKSYRGMGSLGAMSQGSADRYFQDKTDSTDKYVPEGIEGRVPYKGPIVNIIHQLTGGLRSSMGYLGCANIAEMHEKAEFVEITSAGMSESHVHDVQITKEAPNYHR

SEQ ID NO: 1041 - protein, 377 aa, Neisseria meningitidis
MFKKFKPVLLSFFALVFAFWLGTGIAYEINPRWFLSDTATEIPENPNAFVAKLARLFRNADRAVVIVKESMRTEESLAGAVDDGPLQSEKDYLALAIRLSRLKEKAKWFHVTEQEHGKEVWLDYHIGEGGLVAVSLSQRSPEAFVNAEYLYRNDRPFSVNVYGGTAHGENYETTGEYRVVWQPDGSVFDASGRGKIGEDVYEHCLGCYQMAQVYLAKYRDVANDEQKVWDFREESNRIASDSRDSVFYQNMRELMPRGMKANSLVVGYDADGLPQKVYWSFDNGKKRQSFEYYLKNGNLFIAQSSTVALKADGVTADMQTYHAQQTWYLDGGRIVREEKQGDRLPDFPLNLEDLEKEVSRYAEAAARRSGGRRDLSH

SEQ ID NO: 1042 - protein, 423 aa, Neisseria meningitidis
MQQIKFIDLFSGMSGIRKGFEQACRKQSVACECVFTSEIKPAALEVLKQNYPDEVPYGDITKIETGDIPDFDILLAGFPCQAFSFAGKRLGFEDTRGTLFFDVARILKAKKPKGFILENVEGLVTHDRKDPTQKIGRTLTVILETLEALGYYVSWKVLNAKDFGIPQNRKRIYLTGSLKSKPDLSFETTLSPKLKNILESGLPTESSPFIKKLLKKFPPSELYGKSVKDKRGGKNNIHSWDIELKGTVTEEEKQLLNMLLKERRKKKWASEIGIDWMDGMPLTKAQISTFYKHPNLQNILDSLTDKGYLVLEHPKQKIGGRRIKDESLPKGYNIVSGKKSFEINKILDPNDVAPTLVAMDMEHLFVVDNGGLRTLTGKEGLRLFGYPDDYSFDIPKKDKYDLLGNTVAVPVIKAVSERLLHTL

SEQ ID NO: 1043 - protein, 455 aa, Neisseria meningitidis
MSKNQPAQPTRRTLFKTAIAAGAVGAIGGYLGGKKQGETAERTAESQHSPQAYPCYGEHQAGIVTPQQAFSIMCAFDVTAQSAKQLENLFRTLTARIEFLTQGGEYQDGDDKLPPAGSGILGKAFNPDGLTVTVGVGSSLFDGRFGLKDKKPIHLQEMRDFSNDKLQKSWCDGDLSLQICAFTPETCQAALRDIIKHTVQTAVIRWSIDGWQPKSEPGAMAARNLLGFRDGTGNPKVSDPKTADEVLWTGVAANSLDEPEWAKNGSYQAVRLIRHFVEFWDRTPLQEQTDIFGRRKYNGAPMDGKKEADQPDFAKDPEGNITPKDSHIRLANPRDPEFLKKHRLFRRAYSYSRGLASSGQLDVGLVFVCYQANLADGFIFVQNLLNGEPLEEYISPLRRRLFLRLARRGKRRLLGTRAAGRINPPYKKRRPNLAKRVRTAFLVFGRSGFFDEFGF

SEQ ID NO: 1044 - protein, 273 aa, Neisseria meningitidis
MSLQNIIETAFENRADITPTTVTPEVKEAVLETIRQLDSGKLRVAERLGVGEWKVNEWAKKAVLLSFRIQDNEVLNDGVNKYFDKVPTKFADWSEDEFKNAGFRAVPGAVARRGSFVAKNVVLMPSYVNIGAYVDEGAMVDTWATVGSCAQIGKNVHLSGGVGIGGVLEPLQAAPTIIEDNCFIGARSEIVEGVIVEEGSVISMGVFIGQSTKIFDRTTGEIYQGRVPTGSVVVSGSMPSKDGSHSLYCAVIVKRVDAQTRAKTSVNELLRGI

SEQ ID NO: 1045 - protein, 333 aa, Neisseria meningitidis
LIIWEAHPPSVLFSRRPQPYSRHPNNQSEKIMNQTAINRADVRTRFIFDDMPVRGLHVRLENVWQHIVKQKNYPAAIRRALGELLAAGVLLSGNLKNEGTLIVQVQGRGRLKMLVAEAASDRTVRATARWDETAEIADDESLGDLLGEGGVFVLTLQPKDGEPWQGVVPLEGGGIAQMLANYMKRSEQIDTHIVLSASDEAAGGLLVQRLPEAVLDEEAWEHVSTLARTLTADELAELDAQHVLYRLFHETPPRVFEPETFEFSCTCSRGKVSDMLLMLGGEEVGGVVVEQGSIEVDCDFCHSKYVFDETDVNALFGEDVVGVAKGLPRHTVQ

SEQ ID NO: 1046 - protein, 164 aa, Neisseria meningitidis
LDNSAHYKKPTRATTTMRLTTKGRFAVTAMLDLAMNAQTGAVKLSAISERQNISLSYLEQLFGKLRRAGLVESLRGPGGGYILAAPAARINIAQIIAAAEDRLDATQCGSKANCHHGAPCLTHDLWENLNKTINDYLGSVTLQSIIEQKNNGDGSRVVQFTHIH

SEQ ID NO: 1047 - protein, 440 aa, Neisseria meningitidis
LAGSALVALTALFFAHLADFALELNAKLVQQYPWFAWVALPLGLPLIAWLTRKFAPFTAGSGIPQVIASLSLPYGAQKTRLIRLGQTLLKIPLTFLGMLFGASIGREGPSVQVGAAVMGAWGAWCKKHGLAFKGMQENDLMAAGAAGGLAAAFNAPLAGVIFAIEELGRGIMLRWERQILLGVLAAGFIQVAIQGNNPYFSGFNGGVLEHIFLWVALSGLVCGAAGGLFGRLLYRGAAAFAPRKIRGFIRNRPLLLAALMGLLLALLGTFYQGKTYGTGYHEAAQALHGIYEAPFGLAAAKWLATVFSYWAGVPGGIFTPSLTIGAVLGEHIAAIADISQGANIIVLICMAAFLAGATQSPITSAVVVMEMTGGQSLLFWMLIACIFASQVSRQFSPRPFYHASGMRFRQRVLQETAAQTGNAPARPQTANSKTGMPSEN

SEQ ID NO: 1048 - protein, 340 aa, Neisseria meningitidis
LFCLFPAASVFCRIFLPAAISERQPAVCLRLQIQAVWLQSSALSSRKPTMPTVRFTESVSKHDLDALFEWAKASYGAESCWKTLYLNRLPLGNLSPEWAERVKKDWEAGCSESSDGIFLNADGWSDMGGRLQHLARTWNKAGLLHGWRNECFDLTDGGGNPLFTLERAAFRPFGLLSRAVHLNGLTESDGRWHFWIGKRSPHKAVDPDKLDNIAAGGVSGGEMPSEAVCRESSEEAGLDKTLFPFIRPVSRLHSLRPVSRGVHNEILYVFDAVLPETFLPENQDGEVACFEKMDIGSLVATMLSGNMMHDAQLVTLDAFCRYGLIDAAHPLSEWLDGIRL

SEQ ID NO: 1049 - protein, 942 aa, Neisseria meningitidis
MMDEKLNFSYLFGSNAPYIEELYEAFLENPDTVDEKWKQYFTDLSKQPGTVAVDVAHTPIRESFVTLAKKKIASAVAGGADEAMLKKQVSVLRLISAYRIQGVGAAQLDPLKRIPPRDIEALDPKFHGLSDADMALQFNMGEGDFANRGKLPLSQIISNLKQTYCGHIALEYIYIPNTEERRWVRNYFESVLSTPHYNADQKRRILKEMTAAETLERYLHTKYVGQKRFGVEGGESAIAGLNYLIQNAGKDGVEEVIIGMAHRGRLNVLVNILGKKPGDLFAEFEGRAEIKLPSGDVKYHMGFSSDIATPHGPMHVSLAFNPSHLEIVNPVVEGSARAKQKRLGENGRDKVLPVLIHGDSAFIGLGVNQATFNLSKTRGYTTGGTVHIVINNQIGFTTSDIRDTRSTVHCTDIAKMVSAPVIHVNGDDPERVCFAIQAALDYRKKFHKDIVIDVVCYRKWGHNEGDDPTLTQPMMYKKVSQHPGARALYTEQLIAEGVVTQAEADGYIQAYRDALDKGEHVEQTTLSNFQRTQIDWSKYQGKDWREHIETGLPAADIERLTEKFTAVPEGFALHPTAKRVIEARKAMASGKQAIDWGMAETLAYASLVTKGHGVRISGEDSGRGTFSHRHAVLHDQKREKWDDGTYVPLRHMGEGMGEFLVIDSILNEEAVMAFEYGFACSAPDKLTIWEAQFGDFANGAQVTIDQFLSSGETKWGRLCGLTTILPHGYDGQGPEHSSARVERWLQLCSENNMQVIMPSEASQMFHLLQRQVLGSYRKPLVIFMSKRLLRFKGAMSPLENFTEGSTFRPVIGDTAERASNDSVKRVVLCAGQVYYDLEAGRAERKLEDDVAIVRVEQLYPFPYDEVKAELAKYPNAKSVVWAQEEPKNQGAFYQIRHRIEDVISEEQKLSYAGRPSSASPAVGYSSKHIAQLKQLVEDALAL

SEQ ID NO: 1050 - protein, 125 aa, Neisseria meningitidis
MSAKPRPVYLDLPNIRLPIPGIVSILHRISGVGLFIMLPFLLYFLSGTLSQESAFETYRAIVSHPLVKLVLIGVLWAYLHHSLAGIRFLFLDAHKGLELNTARNTAKAVFASALVLTVVLGALLW

SEQ ID NO: 1051 - protein, 475 aa, Neisseria meningitidis
MFFSALKSFLSRYITVWRNVWAVRDQLEPPKRTAEEQAFLPAHLELTDTPVSAAPKWAARFIMAFALLALLWSWFGKIDIVAAASGKTVSGGRSKTIQPLETVVVKAVHVRDGQHVKQGETLAELEAVGTDSDVVQSEQALQAAQLSKLRYEAVLAALESRTVPHIDMAQARSLGLSDADVQSAQVLAQHQYQAWAAQDAQLQSALRGHQAELQSAKAQEQKLVSVGAIEQQKTADYRRLRADNFISEHAFLEQQSKSVSNWNDLESTRGQMRQIQAAIAQAEQNRVLNTQNLKRDTLDALRQANEQIDQYRGQMDKAKQRQQLMTIQSPADGTVQELATYTVGGVVQAAQKMMVVAPDDDKMDVEVLVLNKDIGFVEQGQDAVVKIESFPYTRYGYLTGKVKSVSHDAVSHEQLGLVYTAVVSLDKHTLNIDGKAVNLTAGMNVTAEIKTGKRRVLDYLLSPLQTKLDESFRER

SEQ ID NO: 1052 - protein, 143 aa, Neisseria meningitidis
LALAADEVFEDPVEPDESDFGGRRKGRRGRGAAGKVVVFGILKRNGRVYTVVVDNAKSETLLPVIKKKIMPDSIVYTDSLSSCDKLDVSGFIHYRINHSKEFADRQNHINGIENFWNQAKRVLRKYSGLTKIRTRRRSRRQYK

SEQ ID NO: 1053 - protein, 457 aa, Neisseria meningitidis
MSNPFSSLGLGTELVSALTAQGYENPTPIQAAAIPKALAGHDLLAAAQTGTGKTAAFMLPSLERLKRYATASTSPAMHPVRMLVLTPTRELADQIDQNVQSYIKNLPLRHTVLFGGMNMDKQTADLRAGCEIVVATVGRLLDHVKQKNIHLNKVEIVVLDEADRMLDMGFIDDIRKIMQMLPRQRQTLLFSATFSAPIRKLAQDFMNAPETVEVAAQNTTNANVEQHIIAVDTIQKRNLLERLIVDLHMNQVIVFCKTKQSVDRVTRELVRRNLSAQAIHGDRSQQSRLETLNAFKDGNLRVLVATDIAARGLDIAELPFVINYEMPAQPEDYVHRIGRTGRAGADGVAISLMDESEQKMFESIKELTGNKLLIERIEGFEPQWWEQGGAKPEKPEMREPRQRNRYESAKAQREKNTRPENAANDAGAACGKIAGRSRRSRREHRTCALLQPRYGVK

SEQ ID NO: 1054 - protein, 742 aa, Neisseria meningitidis
MRSAVLFIYFFLLNIFLFQPAVIHIQSNYILFMSIVSAPLPALSALIILAHYHGIAANPADIQHEFCTSAQSDLNETQWLLAAKSLGLKAKVVRQPIKRLAMATLPALVWCDDGNHFILAKTDGEGEHAQFLIQDLVTNKSAVLSFAEFSNRYSGKLILVASRASVLGSLAKFDFTWFIPAVIKYRRLFFEVLVVSVVLQLFALITPLFFQVVMDKVLVHRGFSTLDVVSVALLVVSLFEIVLGGLRTYLFAHTTSRIDVELGARLFRHLLSLPLSYFEHRRVGDTVARVRELEQIRNFLTGQALTSVLDLAFSFIFLAVMWYYSSTLTWVVLASLPAYAFWSAFISPILRTRLNDKFARNADNQSFLVESITAVGTVKAMAVEPQMTQRWDNQLAAYVASGFRVTKLAVVGQQGVQLIQKLVTVATLWIGARLVIEGKLTVGQLIAFNMLSGQVAAPVIRLAQLWQDFQQVGISVARLGDILNAPTENASSHLALPDIRGEITFEHVDFRYKADGRLILQDLNLRIRAGEVLGIVGRSGSGKSTLTKLVQRLYVPEQGRVLVDGNDLALAAPAWLRRQVGVVLQENVLLNRSIRDNIALTDTGMPLERIIEAAKLAGAHEFIMELPEGYGTVVGEQGAGLSGGQRQRIAIARALITNPRILIFDEATSALDYESERAIMQNMQAICANRTVLIIAHRLSTVKTAHRIIAMDKGRIVEAGTQQELLAKPNGYYRYLYDLQNG

SEQ ID NO: 1055 - protein, 275 aa, Neisseria meningitidis
MPELPEVETTLRGIAPHIEGKTVEAVVLRQLKLRWQINPDLGEILSGRQVLSCGRRAKYLIVRFQTGILLIHLGMSGSLRIFTPSDGRIGRPDRHDHVDIVFSDGTVMRYRDPRKFGAILWYEGIEEHHPLLEKLGPEPLSEAFCTDYLYVRLKAQKRAVKLALMDNAVVVGVGNIYANESLFRAGISPHRPANRLKKKECALLVETVKAVLRRAIETGGSTLRDFVDSDGKSGYFQQEYTVYGRHNQPCPQCGGLVVKETLGQRGTFYCPNCQK

SEQ ID NO: 1056 - protein, 473 aa, Neisseria meningitidis
MRHLPLFSLILFPASVYAADLDGANLNLLWGLPFALILLSIALGPLFFSHTWHHHYGKITAFWTLLFLIPFSLVFGSSAGIHTVAHALVEEYIPFILLLLALYTISGGILVWGDLNGTPKLNTALLAVGTALASIMGTTGAAMLMIRPLLKANQNRTRRVHIVIFFIFLVANIGGGLTPLGDPPLFLGFLKGVDFMWTVKHMFAPVLISTAVLLTAFYFIDNRFFKQESIAQDTPAQQEKPEKIAIFGKWNFLLLSGVVGAVLMSGLWKPEHPGFEILGSRYALQNLVRDVILIALTAVSMAITPKQVRAGNEFNFEPIAEVGKLFLGIFITIFPVLSILKAGEAGALGGVVSLVHDTAGHPINVMYFWMSGILSAFLDNAPTYLVFFNMAGGDAQALMTGTLFHSLLAVSMGSVFMGALTYIGNAPNFMVKAIAEQRGVPMPTFFGYMMWSVAFLTPVFIVHTLIFFVFKLL

SEQ ID NO: 1057 - protein, 83 aa, Neisseria meningitidis
MSLFITDECINCDVCEPECPNDAISQGEEIYEINPNLCTQCVGHYDEPQCQQVCPVDCILIDQEHPETHDELMAKYEKIIQFK

SEQ ID NO: 1058 - protein, 230 aa, Neisseria meningitidis
MKRFTYTLSDGLCIEIELKRSAKKNLILRPVNMQTVSINVPPFFQDHALANWLAANETILRNTLAKTPVHPVSHPNLPEWIWYRGIKTKLDTHSQSHIRITSSEILLPRKETAAQIDHLRRLLNERAREYLLPRLEKHAAETGLTPTATDLSNAKTFWGVCRPHTGIRLNWRLIGTPEYVADYVCIHELCHLRHPDHSPRFWHLVNTLTPHTDNAKSWLKAHGRELFVLG

SEQ ID NO: 1059 - protein, 229 aa, Neisseria meningitidis
VQADLAYAAERITHDYPKPTGTDKDKISTVSDYFRNIRAHSIHPRVSVGYDFGGWRIAADYASYRKWNNNKYSVNTKNVQKNDNGNRQDLKTENQENGTFHAVSSLGLSAIYDFKLNDKFDKFKPYIGVRVAYGHVRHSIDSTKKTTNVVTVAGAANTAPTIYYAPETQNAYHESHSIRRLGLGVIAGVGFDITPKLTLDTGYRYHNWGRLENTRFKTHEVSLGVRYRF

SEQ ID NO: 1060 - protein, 249 aa, Neisseria meningitidis
MITIRNVSYRIGTRPILDNVSLDIPEGGITALIGPNGAGKSTLLSFMARLQPLAHGNISYAGKDTPTAELACTLSILTQENSIMSRITVRDLLMFGRYPYHQGRPTAECRRIVNGAIEEFHLQDFADRYLTELSGGQRQRAMIAMVFCQRTDYVLLDEPLNNLDMYHARSLMQILRRLTDEHKRTTVVVLHDINQAAAYADHVVAMKNGQVAMQGKPDDIFTAANIKTLFDMDVSVLDHQSKKLIVHHI

SEQ ID NO: 1061 - protein, 206 aa, Neisseria meningitidis; identical to SEQ ID NO: 574

SEQ ID NO: 1062 - protein, 150 aa, Neisseria meningitidis
LKISIFWLCNPFAHNLWRQIMGKRMTFDTAKSRFQEKFPHLELLEFSGIYKPSSVRCPTHGVVQLLYYDTAIKSKYGCPECGKLKMKENTPPQNQKPVSILDTATGETLTFPSVQAAAKALNTPYGSIRTKLDGRSNPDNLVCNRYKVLL

SEQ ID NO: 1063 - protein, 197 aa, Neisseria meningitidis
MRMSRLMLLLSAFVLAACNAQNRQSCVRHQDFARVAVDLFRSACVLTQGSFEPVSKFAAVGHFVPVGKEDLSRLPPAVAEPDVQALWTLERDGGIYYLSLPRDCCSVKAERADSAVLLEHFDGLVRQPPKNTNIELRAEQSVQALFETRQISYAWRESGSPEETVLTAQTADSPDLPVQAVLNLTHRSHNGKPLILP

SEQ ID NO: 1064 - protein, 111 aa, Neisseria meningitidis
MFGKAGLGGLMKQAQQMQENMKKAQAKLAETEIEGEAGNGLVKITMTCAHEVRKIDISPDLIQEAADDKEMLEDLILAALKSARDKAEETANKTMGAFAQGLPPGVGDFFR

SEQ ID NO: 1065 - protein, 544 aa, Neisseria meningitidis
MSFCATALPANPTVLSVCMSVWTGCCSITAKTVWAKIRCNCSAVLRRRRIWKGKCVLFCRLAETADLEGKMRALRTGAKVNGSEGRAALHTALRLPDGADAVYADGRDVLPEIRRELNRALEFAHSLDDGSYQGITGKRITDFVHIGIGGSDLGPAMCVQALEPFRRHIAVHFAANADPACLDAVLCRLNPETTVFCVASKSFKTPETLLNAQAVKAWYRGAGFSESETARHFCAVSADTEAAQSFGIAAERVFAMYDWVGGRYSVWSPVGLPVMVAVGGARFRELLAGAHAMDSHFFHTPLRRNIPVLMALIAVWYNNFQHADGQTAVPYSHNLRLLPAWLNQLDMESLGKSRASDGSPAVCKTGGIVFGGEGVNCQHAYFQLLHQGTRLIPCDFIVPMTAQGVEDGRSRFTVANAFAQAEALMKGKTLDEARAELADLPEAERERLAPHKEFPGNRPSNSILLDRLTPYNLGMLMAAYEHKTFVQGAIWNVNPFDQWGVEYGKQLAKTIIGELEGGTSVHDASTEGLMAFYRECRLKGGGAA

SEQ ID NO: 1066 - protein, 209 aa, Neisseria meningitidis
LYCLRLRRLVLIFVNPLYFWESVSPQYIKHHIKAEFLPHFDPNPEKTPPKPILMLPRQPTLKETLMNFALSVITFTLASFLPVPPAGAAVFTWKDGGGNSYSDVPKQLHPDQSQILNLRTRQTKPAVKPAQADAGKRTDGAAQENNPDTAEKNRQLEEEKKRIAETERQNKEENCRISKMNLKAVGNSNAKNKDDLIRKYNNAVNKYCR

SEQ ID NO: 1067 - protein, 273 aa, Neisseria meningitidis
MDFLIVLKALMMGLVEGFTEFLPISSTGHLIVFGNLIGFHSNHKVFEIAIQLGAVLAVVFEYRQRFSNVLHGVGKDRKANRFVLNLAIAFIPAAVMGLLFGKQIKEHLFNPLSVAVMLVLGGLFILWVEKRQSWAEPKIADVDALRPIDALMIGVAQVFALIPGTSRSGSTIMGGMLWGIERKTATEFSFFLAVPMMVAATAYDVLKHYRFFTLHDVGLILIGFVAAFVSGLVAVKALLRFVSKKNYIPFAYYRIVFGIAIIILWLSGWISWE

SEQ ID NO: 1068 - protein, 459 aa, Neisseria meningitidis
MLLDLNRFSFSVFLKEVRLLTALALPMLLAQVAQVGIGFVDTVMAGGAGKEDLAAVALGSSAFATVYITFMGIMAALNPMIAQLYGAGKTDEVGETGRQGIWFGLFLGVFGMVLMWAAITPFRNWLTLSDYVEGTMAQYMLFTSLAMPAAMVHRALHAYASSLNRPRLIMLVSFAAFVLNVPLNYIFVYGKFGMPALGGAGCGLATMAVFWFSALALWIYIAKENFFRPFGLTAKFGKPDWAVFKQIWKIGAPIGLSYFLEASAFSFIVFLIAPFGEDYVAAQQVGISLSGILYMIPQSVGSAGTVRIGFSLGRREFSRARYISGVSLVLGWMLAVITVLSLVLFRSPLVSMYNNDPAVLSIAATVLLFAGLFQPADFTQCIASYALRGYKVTKVPMFIHAAAFWGCGLLPGYLLAYRFDMGIYGFWTALIASLTIAAIALVWCLELCSREMVRSHKAV

SEQ ID NO: 1069 - protein, 146 aa, Neisseria meningitidis
MAGGNKPPKPSTQQHPTHSDNNIGLPASYVKPDTSISPTGTIQDRIRWTKSKFPTEKSLNGHFKAHGKEFGDITIEDYQKMASDLLSKQTSDKILGYQTEHRRVRYDINNNIYVLANPKTFKIKTMFKPNLGKKYYDGEFKKDMGN

SEQ ID NO: 1070 - protein, 121 aa, Neisseria meningitidis
MEKPLLTPPFFLFEDVSLDIFQGLSELEKKIEPQDLMDDVYRAFDSVGNILNFRIVEKEQKGFWVSTKIKTVVFDSADMSSDDLFLKCLQSSYKAYFETEPAGLDKRQLMKTLIQKCGFSC

SEQ ID NO: 1071 - protein, 290 aa, Neisseria meningitidis
MNYPHLSPKAKEQLKYSDIERIEYIRSPRWIGYPQAQQVLVKLEDLLSFPKQNRMPNMLLVGDTNNGKTMLIKHFLRQHPAHDNPHGNGIIAPVVIIQAPPIPDESRFYNAILDLLFAPYKTHDRTDKKLAQVLHLLKYVNTKMLIIDEIHHILSGSLNKQKTFLNVIKYLGNELQIPNPDELFTSWLVRLAHANGLKVQTFCHLLFPNYEIWNRDIDRHTPDWLVNTLAEKTGCSTIRIKTTTLDSLQGRLFDKNNFSGQLTWINSLKANHRKRDNNAIVYCPLCLATD

SEQ ID NO: 1072 - protein, 294 aa, Neisseria meningitidis
MGGFSSEREISLDSGTAILNALKSKGIDAYAFDPKETPLSELKAQGFQTAFNILHGTYGEDGAVQGALELLGIPYTGSGVAASAIGMDKYRCKLIWQALGLPVPEFAVLHDDTDFDAVEEKLGLPMFVKPAAEGSSVGVVKVKGKGRLKSVYEELKHLQGEIIAERFIGGGEYSCPVLNGKGLPGIHIIPATEFYDYEAKYNRDDTIYQCPSEDLTEAEESLMRELAVRGAQAIGAESCVRVDFLKDTDGKLYLLEINTLPGMTSHSLVPKSAAVTGVGFADLCIEILKTAHVG

SEQ ID NO: 1073 - protein, 489 aa, Neisseria meningitidis
MEKHNGTYRDLHRPASEFATRDEYLEHELQIMQPKRWRPNLPFRDYRFEWEDLIPAMAGTIGKVVMVGAVAAAFAAPLGLPDSFVLENVRYELLIAAAFILLVSGFFLPGANLPGTHGPLIPMIPIVVSAGGHPLAFGISIAVLGLLMALFRGGSIMAKLTSNGVCGGLLLYLGFIGTTGQVKKLFSWAGGFNMPYIAFTVIIVTIVMYALLEHWKKRWLAVPLGCLIAGVVAFALGAPFEFHTAPGLPPMSPAYWWGENSGWHLGLPTAESFLVVFPFAVLAVAMWSPDFLGHQVFQKISYPEKTDKVLMNIDDTMTSCSVRQAVGSILGGANFTSSWGTYIVPASIAKRPIPGGAVLTAVLCIIAGLWGYPMDLAIWQPVLSVALVVGVYLPLLEAGMEMTRKGKTTQSAAIVVFSSALVNPVFGWALTMLLDNLGLIGCKERSAQLGFAGRVLIPAVGFLILCVAMGAVGMLPGIPPFLEHFKSLG

SEQ ID NO: 1074 - protein, 128 aa, Neisseria meningitidis
MAYSDKVIDHYENPRNVGTFDKNDESVGTGMVGAPACGDVMRLQIKVNDEGIIEDAKFKTYGCGSAIASSSLITEWVKGKSLDDALAIKNSEIAEELELPPVKIHCSILAEDAVKAAVADYRKRQENR

SEQ ID NO: 1075 - protein, 452 aa, Neisseria meningitidis
MLVGVIVAAQLFAPALDLSNIGPWFHFGRLRPLHTNAVIFAFGGCGLIGTSYYVVQRTCNTRLFGGWLPAFTFWGWQAVIVAAVVSFPMGWTQGKEYAELEWPIDILITLVWVAYAIVFFGTIAKRKIKHIYVANWFYGGFILAVALLHIVNNISIPAGLMKSYPVYSGAIDAMVQWWYGHNAVGFFLTAGFLGMMYYFVPKQAARPVYSYRLSVVHFWALIFTYMWAGPHHLHYTALPDWTQSLGMVLSLILFAPSWGGMINGIMTLSGAWDKLRTDPILKFLIVSLSFYGMSTFEGPMMSIKTVNALSHYTDWTVAHVHAGALGWVGFVTIGSVYYMIPRLFGKEQMHSTKLVEAHFWIATIGVVLYIAAMWIAGVMQGLMWSSLNDDGTLTYSFVESVKRTMPYYVIRFAGGLLYLSGMCIMAYNVYRTAIGGKAVDAEIPAVSQTQHH

SEQ ID NO: 1076 - protein, 117 aa, Neisseria meningitidis
MKNCEFFYDPTRAIYDSGADYLTREKHRLVVIANSAWGLLLNLSCYYDEVLEKRKIPFGKQEIDDDMDKVSAHKRKFKDISEIKVGDGWEYPFNYEQGMKELDEVLLKYIPFFEEER

SEQ ID NO: 1077 - protein, 355 aa, Neisseria meningitidis; identical to SEQ ID NO: 1019

SEQ ID NO: 1078 - protein, 332 aa, Neisseria meningitidis
MKKSLIALTLAALPIAAMADVTLYGTIKTGVETSRSVYYEDGKAAEVTTGTGIVDLGSKIGFKGQEDLGNGLKAIWQVEQKASIAGTDSGWGNRQSFIGLKGGFGKLRVGRLNSVLKDTGDINPWDSKSDYLGVNKIAEPEARLISVRYDSPEFAGLSGSVQYALNDNAGRHNSESYHAGFNYKNGGFFVQYGGAYKRHERVDKNVNIEKYQIHRLVSGYDNDALYASVAVQQQDAKLALPNDNSHNSQTEVAATVAYRFGNVTPRVSYAHGFKGSVDDAKRDNTYDQVVVGAEYDFSKRTSALVSAGWLQEGKGENKFVATAGGVGLRHKF

SEQ ID NO: 1079 - protein, 321 aa, Neisseria meningitidis
MSYTQLTQGERYHIQYLSRHCTVTEIAKQLNRHKSTISREIRRHRTQGQQYSAEKAQRQSRTIKQRKRQPYKLDSQLIQHIDPLIRRKLSPEQVCAYLRKHHRITLHHSTIYRYLRQDKSNGSTLWQHLRICSKPYRKRYGSTWTRGKVPNRVGIENRPAIVDQKSHIGDWEADTIVGKGQKSALLTLVERVTRYTIICKLDSLKAEDTARAAVRALKAHKDRVHTITMDNGKEFYQHTKITKALKAETYFCRPYHSWEKGLNENTNGLIRQYFPKQTDFRNISDREIRRVQDELNHRPRKTLGYETPSVLFLNLFQPLIH

SEQ ID NO: 1080 - protein, 127 aa, Neisseria meningitidis
MKLTVRNYHLDGYGHVNNARYLEFFEEARWAFFEERGLLHELAGLILIVARIDIRYSRPAVEGDVLQFSCRLKTPGTRRIVLTQTITLPNGKTAAEADITLMPVHAATQRTVSLPATLARALEALSE

SEQ ID NO: 1081 - protein, 98 aa, Neisseria meningitidis
LESGIPVSFGGGGVPIANGRNLVTRQAANGVGKSDSEACEHALINAARKFQQTAGKLGGRSVTGFHSYFDKQPLQGGQYDCQTGSFHVRVVMRANVVR

SEQ ID NO: 1082 - protein, 194 aa, Neisseria meningitidis
VRTAVAVLDVLGAAGDAGFDAPARRRASAKSGHRYTGTVSKVYDGDTLHVIDGDGAKHKIRMAYIDAPEMKQAYGTRSRDNLRAAAEGRKVSVRVFDTDRYQREVAQVSVGKTDLNLMQVQDGAAWHYKSYAKEQQDKADFADYADAQIQAERERKGLWKAKNPQAPWAYRRAGRSGGGNKDWMDAVGEWLGIW

SEQ ID NO: 1083 - protein, 79 aa, Neisseria meningitidis
MPHTLPDISQCIRQNLEQYFKDLNGTEPCGVYDMVLHQVEKPLLVCVMEQCGGNQSKASVMLGLNRNTLRKKLIQHGLL

SEQ ID NO: 1084 - protein, 633 aa, Neisseria meningitidis
LPRIAMPYFALFDDAVSGRAKRYQNHVESRFFRPEELDALDGALQSGWQKGLHSVLFADYGFGLPLTGVESERGGNLALHWFADCADTDAESWLARHSDGIPAGISTPQSSVSETDYLDHIRQIHEAIRRGDTYQINYTTRLHLQAYGNPVSLYRRLRQPVPYAVLSHLPDVEGQSAWTLCFSPELFLKIGSDGTISTEPMKGTAPILGDGQDERRAAELQTDPKNRAENVMIVDLLRNDLGKIAQTGKVCVPEPFKVSRFGSVWQMTSTIQAQALPNTSFADILRAAFPCGSITGAPKKMSMQIIESLETEARGLYTGSIGYLNPCKSGLGFEGIFNVVIRTLLLKPVSNSVSDDLDSRLNLNQDKATKPQTRQDEATPYRFKVNPLYQGVYGVGSGIVIDSDPAAEYRECGWKARFLNELRPDFGIFETLRVENGRCTLLDRHLCRLKTSAQALNLPLPDGCENQIKQYIADLPDGAFRIKALLASDGISLSRAVLNRLTDKQRVIISPTILPAQNYLRRFKTTCRTVFDQAWQTAETQGAFDSLFFNSDGILLEGGRSNVFVKHRGQWLTPSLDLDILNGIMRQAVLDEPQKYLQTNQVIETHITQKTLQEAEEIRLSNALRGVFAAALA

SEQ ID NO: 1085 - protein, 661 aa, Neisseria meningitidis
MAKNNQYSESSITVLKGLEPVKERPGMYTRTDSPTHICQEVIDNAADEALGGFATAIDVQIHEDGSLSVRDNGRGIPVGLHPEEGVPVVELVFTRLHAGGKFNKKDGGSAYAFSGGLHGVGVSVTNALSTRLEVTVKREGKIHRIVFAGGDVVEPLAQVGKCAVKDSGTEVRVWPDGKYFESPNYSIPELERLLRAKAVLLPGVRVSLTRPVKGEDEAHTQTWHYPDGLKSYLTDLIADAQEAVPIFSCENYISDGHNGDFSIGEGAAFALTWLEEGSCANESYVNLIPTPLGGTHEAGLKQAVFNAVSNFINLHNLLPRGVKVQSDDVFGKTAFVLSARVLDPQFQGQTKDKLTNRDALKLVATVSGDPLELWLNQNVDFGKKIAELAIRQAQARMRSVKKIEKKKGSGVAVLPGKLTDCESEDIRENELFLVEGDSAGGSAKLARDKATQAILPLRGKVLNSFEVHPDQLFGNAEIHDISVAIGVDPHGINDHPDLSGLRYGKIAILSDADVDGSHIQVLLLTLFYRHFPKLVADGHIYVAQPPLFRVDVNAQGKSKPARKFYALDQNELDGILERLQKEGVKETAYSISRFKGLGEMNPDQLKDTTMHPDTRRLLQVQIPEGADDETRDIFVKLMGKGEAAARRAWMEREGDTAELDI

SEQ ID NO: 1086 - protein, 239 aa, Neisseria meningitidis
MTQQIKYKRVLLKLSGESLMGSDPFGINHDTIVQTVGEIAEVVKMGVQVGIVVGGGNIFRGVSAQAGSMDRATADYMGMMATVMNALALKDAFETLGIKARVQSALSMQQIAETYARPKAIQYLEEGKVVIFAAGTGNPFFTTDTAAALRGAEMNCDVMLKATNVDGVYTADPKKDSSATRYETITFDEALLKNLKVMDATAFALCRERKLNIVVFGIAKEGSLKRVVTGENEGTLVHC

SEQ ID NO: 1087 - protein, 462 aa, Neisseria meningitidis
MSIKFADLNLDKNILSAVSSEGYESPTPIQAQAIPFALEGRDIMASAQTGSGKTAAFLLPTLQKLTKRSEKPGKGPRALVLTPTRELAAQVEKNALAYAKNMRWFRTVSIVGGASFGYQTRALSKPVDLIVATPGRLMDLMQSGKVDFERLEVLILDEADRMLDMGFIDDIETIVEATPSDRQTLLFSATWDGAVGKLARKLTKDPEVIEVERVDDQGKIEEQLLYCDDMRHKNRLLDHILRDANIDQCVIFTSTKAMTEVIADELYEKGFAANCLHGDMPQGWRNRTLMDLRKGRCKILVATDVAARGIDVPTITHVINYDLPKQAEDYVHRIGRTGRAGRTGIAITFAEVNEYVKVHKIEKYINRKLPELTIEGMEPTRKRKSAGGKPKGKGGWGDRKSGGRRGDHKPGKEGFGGKTRGEGFKKEGFKKDGFKKTGEGFKGKRKAGDSFAGRGERRYKDR

SEQ ID NO: 1088 - protein, 511 aa, Neisseria meningitidis
LPIKNTMSPKKIPIWLTGLILLIALPLTLPFLYVAMRSWQVGINRAVELLFRPRMWDLLSNTLTMMAGVTLISIVLGIACALLFQRYRFFGKTFFQTAITLPLCIPAFVSCFTWISLTFRVEGFWGTVMIMSLSSFPLAYLPVEAALKRISLSYEEVSLSLGKSRLQTFFSAILPQLKPAIGSSVLLIALHMLVEFGAVSILNYPTFTTAIFQEYEMSYNNNTAALLSAVLMAVCGIVVFGESIFRGKAKIYHSGKGVARPYPVKTLKLPGQIGAIVFLSSLLTLGIIIPFGVLIHWMMVGTSGTFALVSVFDAFIRSLSVSALGAILTILCALPLVWASVRYRNFLTVWIDRLPFLLHAVPGLVIALSLVYFSINYTPAVYQTFIVVILAYFMLYLPMAQTTLRTSLEQLPKGMEQVGATLGRGHFFIFRTLVLPSILPGITAAFALVFLKLMKELTATLLLTTDDVHTLSTAVWEYTSDAQYAAATPYALMLVLFSGIPVFLLKKYAFK

SEQ ID NO: 1089 - protein, 240 aa, Neisseria meningitidis
MPETGFRAFLRQMPSETTKQRFRWHPFQKRTIMKNIVILISGRGSNMQAIVNAAIPNVRIAAVLSNSETAAGLQWAAGQGIPTDSLNHKNFESRLAFDTAMMEKIDAYQPDLVVLAGFMRILTPEFCAHYEGRLMNIHPSILPSFTGLHTHERSLEAGCRVAGCTIHFVTAELDCGPIVSQGIVPILDGDTADDIAARVLAVEHKLYPKAVADFAAGRLIIEGNRVRNSENADAARFLTA

SEQ ID NO: 1090 - protein, 390 aa, Neisseria meningitidis
MKRDLSKMTCIEDLRRVAKRKMPRMFYDYIDSGSWTETTYRENTSDFKDIRFRQKVLVNMEGRSLETKMIGQDVKMPVAIAPTGFTGMAHADGEILAARAAEKFGIPFTLSTMSICSIEDVAENTSAPFWFQLYVMRDREFMENLIKRAKDAKCSALVLTADLQVLGQRHKDIKNGLSAPPKPTIANLINLATKPEWCMKMLNTERRTFRNIVGHAKNVGDLSSLSSWTSEQFDPRLSWDDVARIKDLWGGKLIIKGIMEPEDAEKAAKSGADALVVSNHGGRQLDDTVSAIKALPDIVSAVGSDIEVWMDSGIRSGQDILKAWALGAKGTMIGRAFLYGLGAYGEEGVTRALEILYKEMDISMAFTGHRDIQDVDASILRGKDWGRETV

SEQ ID NO: 1091 - protein, 89 aa, Neisseria meningitidis
MLKQSIEIINKLGLHARASSKFTQTASQFQSEVWVTKNGSRVNGKSIMGLMMLAAAKGTVIELETDGADEAEAMRALTDLINDYFGEGE

SEQ ID NO: 1092 - protein, 95 aa, Neisseria meningitidis
MNKEIVGVFFIPAGIISMCMAALWQMYVMMTETYTLNRFKDKELVWRVALLFISFSLAVYLLCPNSRKKGIVFFILGGGGAIMYLLARMWLPFSK

SEQ ID NO: 1093 - protein, 672 aa, Neisseria meningitidis
MNKSLSSSVEEYRELTLRGMILGALITVIFTASNVYLGLKVGLTFASSIPAAVISMAVLKFFKGSNILENNMVQTQASAAGTLSTIIFVLPGLLMAGYWSGFPFWQTTLLCIAGGILGVIFTIPLRYAMVVKSDLPYPEGVAAAEILKVGGHEEGDNRQGGSGIKELAAGGALAGLMSFCAGGLRVIADSASYWFKSGTAIFQLPMGFSLALLGAGYLVGLTGGIAILLGISIAWGIAVPYFSSHIPQPSDIEMAAFAMKLWKEKVRFIGAGTIGIAAVWTLLMLLKPMVEGMKMSFKSFGGGAPATERAEQDLSPKAMIFWVLSMMFILGVSFYHFIGDSHITGGMAWLLVVVCTLLASVIGFLVAAACGYMAGLVGSSSSPISGVGIVSIVVISLVLLLVGESGGLMADEANRKFLLALTLFCGSAVICVASISNDNLQDLKTGYLLKATPWRQQVALIIGCIVGALVISPVLELLYEAYGFTGAMPREGMDAAQALAAPQATLMTTIASGIFAHNLEWVYIFTGIAIGAVLIAADLVLKKSSGGKLALPVLAVGMGIYLPPSVNMPIVAGAVLAAVLKHIIGKKAENREGRLKNADRIGTLFAAGLIVGESLIGVIMAFIIAFSVTNGGSDAPLALNLQNWDAAASWLGLAFFVTGMIIFARRVLKAGR

SEQ ID NO: 1094 - protein, 201 aa, Neisseria meningitidis
MNTDFQNILKQLGKQAQKEAAEKQAAEKNKQKQEQDFDFSQAVGQVSPLKNRQQYYAPPDKTPIKVRPKDNRADEENYFYIGSTYNDPPASFSKNGQGKNDIQRLKNGYYPVVTDVDLHGYTQEEAQKVLNEFIAFTQKRGVCGEIIHGSGLGSKGYKPVLKNMTRNWLMQHPDVLAYAEPREGNDGCVRILLKRKLRQQD

SEQ ID NO: 1095 - protein, 147 aa, Neisseria meningitidis
MSEELQPVFSIERLYVKDLSLEVPHAPQIFLEQGEPEVDMRVSTGSQKLEDGYYNVDVTVTVTAKLDNERTMFLNEVTQSGIFRLENIPEEDVQLLLGVACPNILFPYAREAVSGTVTRAGFPPVLLAPINFEAIYQQQQEAEAAGA

SEQ ID NO: 1096 - protein, 465 aa, Neisseria meningitidis
MSQGKIVQIIGAVVDVEFPRDMIPRVYDALKLDENGLTLEVQQLLGDGVVRTIAMGSSDGLKRGMTVSNTGAPITVPVGKGTLGRIVDVLGTPVDEAGPIDTDKSRAIHQAAPKFDELSSTTELLETGIKVIDLLCPFAKGGKVGLFGGAGVGKTVNMMELINNIAKAHSGLSVFAGVGERTREGNDFYHEMKDSNVLDKVAMVYGQMNEPPGNRLRVALTGLTMAEYFRDEKDENGKGRDVLFFVDNIYRYTLAGTEVSALLGRMPSAVGYQPTLAEEMGRLQERITSTQTGSITSIQAVYVPADDLTDPSPATTFAHLDATVVLSRDIASLGIYPAVDPLDSTSRQLDPMVLGQEHYDVARGVQSTLQKYKELRDIIAILGMDELSDEDKLTVMRARKIQRFLSQPFHVAEVFTGSPGKYVALRDTIAGFKAILNGEYDHLPEQAFYMVGSIEEAVEKAKTLN

SEQ ID NO: 1097 - protein, 369 aa, Neisseria meningitidis
MSLTRLILKFYALLRLFLGKNARTAWISHPACTGHEPGANHPDSPDRILCIEQALRRAGIWQHLQTIEAEEISDTRLALVHSSKYLNRLESCLPQKGKIFRLDNDTAISTGSLSAAHFAAGSAVQAVDMVMNRKAWHAFCAARPPGHHAGSGKAGGFCLLNNVAAGVMHAIAEYRLKRIAVIDFDVHYGDGTAEIFKDDPRILFFNLFETDLFPFPENNDMPDGGNMVHLPLPPGTGSRTFREAVRRQWLPRLAAFKPELVLLSAGFDAHRLDESGRLNLHEADFAWLTHKIIQTASGCPGKIVSVLEGGYTLEPLAQSAAEHIRVLAGLGKSDAATAYQKTLDPTKKRFAKPKTGQVRQPTQSDRYDI

SEQ ID NO: 1098 - protein, 174 aa, Neisseria meningitidis
MPISIRRNLSDGTARKPLIITPDTTQRHNMDTPVYLYTDGACKGNPGAGGWGVLMRYGSHEKELFGGEAQTTNNRMELTAVIEGLKSLKRRCTVIICTDSQYVKNGMENWIHGWKRNGWKTAAKQPVKNDDLWKELDTLVGQHQVSWTWVKGHAGHAENERADDLANRGAAQFS

SEQ ID NO: 1099 - protein, 231 aa, Neisseria meningitidis
MMKDLNLSNSLFKGYNDKHGLMICGYEWGWSKADEAAYVAGEYKLPENKIDHTFANKSLYFGEQAKKWRYDNTIKNWFEMWGHPLDENGLGGAFEKSLVQTNWAATQGNTIDNPDKFTQPEHIDNFLYHIEKLRPKVILFMGSRLADFLNNQNVLPRFEQLVGKQTKPLETVQKEFDGTRFNVKFQSFEDCEVVCFPHPSASRGLSYDYIALFVPEMNRILSDFKTTRGFK

SEQ ID NO: 1100 - protein, 88 aa, Neisseria meningitidis
MNQAVAQFAPLVLIMVVFYFLIMRPQQKKFKAHQAMLAALKVGDKVVLAAGFKGKVTRVGEQFFTVDIGQGTKIEVEVERNAIAAKVD

SEQ ID NO: 1101 - protein, 337 aa, Neisseria meningitidis
MQVYYDKDADLSLIKGKTVAIIGYGSQGHAHAANLKDSGVNVVIGLRQGSSWKKAEAAGHVVKTVAEATKEADVVMLLLPDETMPAVYHAEVTANLKEGATLAFAHGFNVHYNQIVPRADLDVIMVAPKGPGHTVRSEYKRGGGVPSLIAVYQDNSGKAKDIALSYAAANGGTKGGVIETTFREETETDLFGEQAVLCGGVVELIKAGFETLTEAGYAPEMAYFECLHEMKLIVDLIFEGGIANMNYSISNNAEYGEYVTGPEVVNASSKEAMRNALKRIQTGEYAKMFIQEGNVNYASMTARRRLNADHQVEKVGAQLRAMMPWITANKLVDQDKN

SEQ ID NO: 1102 - protein, 451 aa, Neisseria meningitidis
MKAPELLLPAGGLERMRTAYDYGADAVYAGSPRYSLRARNNEFAKLDVLEQGIKEAHERNKKFFLTVNTLPHNSKLKTFVSDMEPLIAMKPDALIMADPGLIMTVREKWPEMPIHLSVQANTTNYWGVKFWQNIGVERIILSRELSMEEIAEIRQECPDIELEVFIHGALCIAYSGRCLLSGYFNHRDPNQGTCTNSCRWDYKVHNATESDAGDAQLLQGFNFEKAQEEANQNFEGINGQKRHPYADKVFLIEESNRPGEMMPIMEDEHGTYIMNSKDLRGIEVVEKLAKIGVDSLKVEGRTKSLYYVARVAQSYRKAIDDAVAGRPFDYSLLSELEGLANRGYTSGFLERHQTQDYQNYLSGHSTAKQSQYVGHVTEIDENGWATIEVKNRFAVGDSLEIIHPSGNQTIKLEQMARKGQPVDVAPGNGIQVKIPDMQGKEKALIARVLNP

SEQ ID NO: 1103 - protein, 253 aa, Neisseria meningitidis
MTEFVVLIPARLDSSRLPGKALADIHGKPMVVRVAEQAAKSKAARVVVATDHPDIQTVCQAHGIEAVMTSNRHESGTTRLAEASAALKLPPHLIVVNVQGDEPLIAPELIDRTAEVLVENNVQMATAAHELHDFDELMNPNAVKVVLDKNRNAIYFSRAPIPYLRDAMRAGKREMPSETAVLRHIGIYAYRAGFLQRYAEMSVSPLETIESLEQLRVLWHGYPIAVETAKEAPAAGVDTQEDLDRVRAVFQTV

SEQ ID NO: 1104 - protein, 352 aa, Neisseria meningitidis
MITPQQAIERLISNNELFYDEMTDLMRQMMSGKVPPEQIAAILTGLRIKVETVSEITAAAAVMREFATKVPLENAEGLVDIVGTGGDGAKTFNISTTSMFVAAAAGAKVAKHGGRSVSSSSGAADVVEQMGANLNLTPEQVAQSIRQTGIGFMFAPNHHSAMRHVAPVRRSLGFRSIFNILGPLTNPAGAPNQLLGVFHTDLCGILSRVLQQLGSKHVLVVCGEGGLDEITLTGKTRVAELKDGKISEYDIRPEDFGIETRRNLDEIKVANTQESLLKMNEVLEGREGAARDIVLLNTAAALYAGNVAASLSDGISAAREAIDSGRAKSKKEEFVGFQPQQRCHFLGKMELG

SEQ ID NO: 1105 - protein, 395 aa, Neisseria meningitidis
MTEHYKTLPEHELLIQKSLISNLNLWDWVFAVLVFAATVFVQTRSGMHMDIYETVMLWASAGIAVFLGWFFKPMRWFVPLSVLLAYAAVGLYGGNIKSAEIFLLRYFLSSQSAIMWQCAFVFFALFAYISGAVLASVKNVPTNTLLGMGTVFAWVSAVAGFTGLLVRWHESYLLRPDAGHIPVSNLYEVFILFLVITALMYLYYEGKFAIQKLGGFVFGFMAVVVGFVLWYSVSREAHTIQPLIPALQSWWMKIHVPANFIGYGAFCISAMLGIAELVSLRAEGKGGKLWLPPSALIDEVMYKAIAVGFLFFTIATILGALWAADAWGRYWSWDPKETWAFIVWLNYAVWLHLRLVAGWRGKVLAWWAIIGLFVTAFAFIGVNMFLSGLHSYGTL

SEQ ID NO: 1106 - protein, 242 aa, Neisseria meningitidis
MLLGVNIDHIATVRNARGTTYPSPVEAALVAETHGADLITMHLREDRRHIKDADVFAVKNAIRTRLNLEMALTEEMLENALKVMPEDVCIVPEKRQEITTEGGLDVLAQQEKIAGFTKILTDAGIRVSLFIDADDRQIQAAYDVGAPVIELHTGAYADAHSHAEQMKQFERIQNGAHYASDLGLVVNAGHGLTIHNVTPIAQILAIRELNIGHSLIAQALFLGLPEAVRQMKEAMFRARLLP

SEQ ID NO: 1107 - protein, 372 aa, Neisseria meningitidis
MPDFQRITIENIEYFIVDSIQNLRAEDSFIHRNNKLSVFGGNGEARKYVGSYIDDSGRKLSTFFEYENWGITETKNGRRVEYPLIQKNCFFNKKNLQRYLVDAKVEYHKQEQKYHHDISRFYDDYVLSINNLPTENIFFSIHDVSDHLENSKGYRRGYIRSEDDIWSIWRKIVLPKISYLSILKLLPVKDIEDSEPLFYFRIFLDYQFRSIVHPQLLSGEKLEIPASEFNQFVEQEIIKQKSRKGQQKYRKDVINHMPQCPFTLITDEILLRASHIKPYMVCITEKNEKEALDYLNGLALTPTYDWLFNQGYITFLDDGRLICGTRLSRYTWEKLNINPNAKNKMRIYPEGREKYLEYHRKFVFQDNIDDFL

SEQ ID NO: 1108 - protein, 395 aa, Neisseria meningitidis
MNDLAAQTIQVVNKSDDLVASAIQTANKSIAVYCRYIRPNDVGTTGSHQSGFYIQKHFSDDLFDVVCQKGTNKTISIKINWQDGSVTNSNFKYYGQGTRNEARITGFGKNFEFLSDKYSGSLLVLCRACYKDLLFHAFVLSSDEDIEIFIAETNILPGSLYLPKKQEVEDNLTKLFSLFPNFPKTEEMAVLARENIALNKTNVSNVLKQWVSKEYELFSIFEKREFEIIKSKITDLDSFINFAHSFTNRRKARAGKSLELHLSRIFDEFSLKFETQAKTEGKKKPDFLFPGSEEYHAMDESGNFIFQTEKLTMLGSKTTCKDRWRQVLNEADRIPHKHLFTLQEGISDTQIQEMSDENLTLVVPKESVKTFGTFGKTHVLTLENFIKYIKSQQVS

SEQ ID NO: 1109 - protein, 108 aa, Neisseria meningitidis
MNFKRLLLTAAATALLSISAPALAHHDGHGDDDHGHAAHQHSKQDKIISRAQAEKAALARVGGKITDIDLEHDNGRPHYDVEIVKNGQEYKVVVDARTGRVISSRRDD

SEQ ID NO: 1110 - protein, 99 aa, Neisseria meningitidis
MKIFENIEDVKAIRKKTGLNQIDFWGKVGVTQSGGSRYETGRKMPKPVRELLRLVHIECIDLAKVNKKDMEIAALLKKHHPDLYAELSKQTKSERKKQS

SEQ ID NO: 1111 - protein, 109 aa, Neisseria meningitidis
MSLPPCPQCASEYTYEDGGQYICPECAHEWNETESAADLAAQVRDANGAALQNGDTVILIKDLKVKGSSMVIKQGTKVKGIRLQEGDHNIGCKIDGSAMNLKSEFVKKA

SEQ ID NO: 1112 - protein, 301 aa, Neisseria meningitidis
MLTFQQIIFKLQTFWADKGCTVIQPFDMEVGAGTSHPATCLRALGPEPWFAAYVQPSRRPKDGRYGDNPNRLQHYYQFQVALKPAPANIQDLYLDSLRELGIDPKVHDIRFVEDDWENPTLGAWGLGWEVWLNGMEVTQFTYFQQVGGIDCTPVLGEITYGIERLAMYLQGVENVYDLVWAKTLDGNTVTYGDVYHQNEVEQSTYNFEYSDADWLLRQFNDYEAQAKRLLAEENAALALPAYELVLKAGHTFNLLDARGAISVTERATYIGRIRALSRAVAQKYVESREKLGFPLMKANAA

SEQ ID NO: 1113 - protein, 553 aa, Neisseria meningitidis
MTESITRDSMQYDVVIVGAGPSGLSAAIKLKQLAEKNGREISVCVVEKGSEAGAHSLAGAVIDPIALNELIPDWKEKGAPLTRTVTQDKVLFLTEKKAFNLPITPNFDNHGNYIVSLGEVVRWLAEQAENLGVEIYPGFAAAEVLYHEDGSVKGIATGNMGIGKDGEPTDSFQPGMELWAQQTLFAEGCRGSLSKQVIERFQLDQNSQPQTYGLGIKEIWEVPSEKHQPGLVVHSAGWPLDSKTYGGAFVYHFDDNKVAVGFVVGLDYQNPYLSPFEEFQRFKTHPEIRKTFEGGRRIAYGARSLIEGGLQSLPKLSFKGGVLIGDAAGFLNMPRIKGIHTAMKSAMLAAEAVFPLLENLEEVENFDSGKEAADYQQRFEQSWLYQELYAARNVRPSFKWGVYLGSIYTGIDQMIFRGKAPWTLKHHGKDNEQLKKAAACKPIDYPKPDGVLTFDRLSSVFLANLAHEENQPDHLVLNNPQTMIDVNYKEYASPETRYCPAGVYEIVEENGNPRLQINAANCVHCKTCDIKDPTQNITWICPESASGPNYGGM

SEQ ID NO: 1114 - protein, 916 aa, Neisseria meningitidis
MLTNIAKKIFGSRNDRLLKQYRKSVARINALEEQMQALSDADLQAKTAEFKQRLADGQTLDGILPEAFAVCREASRRTLGMRHFDVQLIGGMVLHDGKIAEMRTGEGKTLVATLAVYLNALAGKGVHVVTVNDYLASRDAGIMEPLYNFLGLTVGVIISDMQPFDRQNAYAADITYGTNNEFGFDYLRDNMVTDQYDKVQRELNFAVVDEVDSILIDEARTPLIISGQADDNIQLYQIMNTVPPHLVRQETEEGEGDYWVDEKAHQVILSEAGHEHAEQILTQMGLLAENDSLYSAANIALMHHLMAALRAHSLFHKDQHYVIQDGEIVIVDEFTGRLMSGRRWSEGLHQAVEAKEGVEIKRENQTLASITFQNYFRLYTKLSGMTGTADTEAFEFQSIYNLETVIIPTNRPVQRKDFNDQIFRSAEEKFEAVVKDIEECHKRGQPVLVGTTSIENSELVSHLLQKAGLPHNVLNAKEHEREALIVAQAGKVGAITVATNMAGRGTDIVLGGNLKHQTDAIRADETLSDEEKQAQIAALENGWQAEHDKVMEAGGLHIIGTERHESRRIDNQLRGRSGRQGDPGSSRFYLSFEDPLLRLFALDRAAAILNRLAPERGVAIEHNLLTRQIEGAQRKVEGRNFDMRKQVLEYDDVANEQRKVIYSQRNEILTSKDISDLMQEIRSDVVSDLVDTYMPPDSMEEQWDIPTLENRLAAEFRLHEDIQSWLKADNAIDGQDIKERLIERIENEYAAKTELVGKQAMADFERNVMLQVIDNQWREHLAAMDYLRQGIHLRSYAQKNPKQEYKREAFTMFQDLWNGIKFHIASLLTSVQIEQNPVAVVEEQPIGNIQSIHSESPDMEELLGQSQTDLVTEAFNPDGTDFSPEALEARGQIVHRNDPCPCGSGLKYKQCHGKLA

SEQ ID NO: 1115 - protein, 90 aa, Neisseria meningitidis
MASKKAGGSTRNGRDSEAKRLGVKAYGNELIPAGSIIVRQRGTKFHAGDNVGMGKDHTLFAKVDGYVEFKTKGALNRKTVSIRPYTGSEE

SEQ ID NO: 1116 - protein, 399 aa, Neisseria meningitidis
LPTFPNHTMHTISFPNRTRLTALPPLSLYIHIPWCIKKCPYCDFNSHSLKNGLPEAAYIDALLTDLQLELPNIWGRPVETIFFGGGTPSLFQAESIDRLLSGVRSLLRLQPEAEITLEANPGTFEIEKFQGFKDAGITRLSIGVQSFNDDMLSRLGRVHNGKEALTAIATALKLFDKINIDLMYALPNQTVRTALDDVQTAIATGATHISAYHLTMEPNTPFGHTPPKGLPQDEAALDIEDAVHGALESAGFVHYETSAFAKPAMQCRHNLNYWQFGDYLGIGAGAHGKISYPDRIERTVRRRHPNDYLALMQNRPSEAVERKTVAAEDLPFEFMMNALRLTDGVPAAMLQERTGVPSAKIMAQIETARQKGLLETDPAVFRPTEKGRLFLNDLLQCFL

SEQ ID NO: 1117 - protein, 103 aa, Neisseria meningitidis
MQNHPFASQPAVYILANGKNGTLYIGVTMNLPERVWQHKNHVNIDGFTARYDVHDLVWYEFFENMPEAVAKEKTMKKWRREWKIKLIEEQNPEWLDLSGVLFV

SEQ ID NO: 1118 - protein, 101 aa, Neisseria meningitidis
MNIEQVHIEVMHARLTVNTPAEEKDTLLQAVGMLNGKAEAIREGGRVADSEKIVIMAALNVVHDLLKTSLNGGDLAIGDFARKIADMDNACQKALSRLAQE

SEQ ID NO: 1119 - protein, 384 aa, Neisseria meningitidis
MKFTKHPVWAMAFRPFYSLAALYGALSVLLWGFGYTGTPDLPGFYWHAHEMIWGYAGLVVIAFLLTAVATWTGQPPTRGGVLVGLTVFWLAARIAAFIPGWGASASGILGTLFFWYGAVCMALPVIRSQNQRNYVAVFALFVLGGTHAAFHVQLHNGNLGGLLSGLQSGLVMVSGFIGLIGTRIISFFTSKRLNVPQIPSPKWVAQASLWLPMLTAMLMAHGVMPWLSAAFAFAAGVIFTVQVYRWWYKPVLKEPMLWILFAGYLFTGLGLIAVGASYFKPAFLNLGVHLIGVGGIGVLTLGMMARTALGHTGNPIYPPPKAVPVAFWLMMAATAVRMVAVFSSGTAYTHSIRTSSVLFALALLVYAWKYIPWLIRPRSDGRPG

SEQ ID NO: 1120 - protein, 589 aa, Neisseria meningitidis
MTVQTKTKGLAWQEKPLSDNERLKTESNFLRGTILDDLKDPLTGGFKGDNFQLIRFHGMYEQDDRDIRAERAEAKLEPLKFMLLRCRLPGGIIKPSQWIELDKFARENSHYRSIRLTNRQTFQFHGVPKAKLQTMHRLLHKLGLDSIATAADMNRNVLCTSNPIESELHRQAYEYAKKISEHLLPRTRGYLDVWVDGKKVQSSDDFLQEDEPILGKTYLPRKFKTAVVIPPLNDVDCYGNDLDFVAISDGNGQLAGFNVLAGGGLSMEHGNTKTYPNISLELGFVPPEHALKAAEAVVTTQRDFGNRSDRKNARTRYTIQNMGLDNFRAEVERRMGMPFEPIRPFKFTGRGDRIGWVKGIDGNWHLTLFIESGRLVDEGGKQLLTGVLEIAKIHKGDFRITANQNLIVANVAEADKAKIEELARTYGLIRNDVSKLRENAMSCVSFPTCPLAMAEAERVLPDFIDELDKIMAKHGTSDDYIVTRITGCPNGCGRAMLAEIGLVGKAVERYNLHIGGDREGVRIPRLYKENITLPEILAELDDLIGKWAAERNIGEGFGDFAIRTGIVKPVLNAPVDFWDVSKAVAIARA

SEQ ID NO: 1121 - protein, 208 aa, Neisseria meningitidis
MNVNVINHPLVRHKLTLMREADCSTYKFRTLAIELARLMAYEASRDFEIEKYLIDGWCGQIEGDRIKGKTLTVVPILRAGLGMLDGVLDLIPTAKISVVGLQRDEETLKPVSYFEKFVDSMDERPALIIDPMLATGGSMVATIDLLKAKGCKNIKALVLVAAPEGVKAVNDAHPDVTIYTAALDSHLNENGYIIPGLGDAGDKIFGTR

SEQ ID NO: 1122 - protein, 140 aa, Neisseria meningitidis
MKKMFLSAVLLLSAAAQTVWADTVFSCKTDNNKYIEVQKINRNLYEYSFGSAAKKEIAIRNSKADLLGRSDRWQGMGSGRRATMKFQNGEFMYTVWTGFDSVTHTESSGVVVERRGKEVARVGCTPQTAQANFNDADFSR

SEQ ID NO: 1123 - protein, 406 aa, Neisseria meningitidis
MFSYYETFHETEALQDDLLRQAALYVAPDSKPETLPEGDGDTRILVQMPQQEDPVVSLPAHLADGLHTLQADGDDDYYRVYIRTTEQGRIAVMQENEYREDLAADAARQSVLPLLAALPLMILLTVWITHKAMRPVRKLSQSLEQRRINDLSALSVDNIPSEIRGFVTAINLLLKRADEDIRHRQRFVADAAHELRTPMTALSLQAERLNNMSLPPDAARQPAVLQQSIRRNKHLLEQLLALARSQSDETPLTKTTFGLQSRFRQVLQELMPLALEKRQDIGVAVRGDVEVSADETEIYTLIKTFADNAVRYTPPEGRIDLGFTDEGKYLAVWVEDNGNGIPESERARVLDPFYRILGTEQQGTGLGLSIADTLAKKYGGHLELTDSRRFGHGLLIRALLDKETLK

SEQ ID NO: 1124 - protein, 94 aa, Neisseria meningitidis
MFGGRLKNAPSITAKHFLKENIMKFINTCRKYGAKLAVVTAAPLALAAHANATLPDTAKNALEAAKADGMEAGWIVVGVFAALFVFSIVKRVMK

SEQ ID NO: 1125 - protein, 61 aa, Neisseria meningitidis
MESMFILVPISIILAFVIGWFFWWSGKNGQFDDLEGPAHRILMDDDSTSKLIEKERENDVR

SEQ ID NO: 1126 - protein, 188 aa, Neisseria meningitidis
MLLQNILPFAHCLLRKALPEGGNALDGTAGNGHDTLFLAQTAGIRGKVWAFDIQPQALSRTRCRLKEARYENVQLILDGHENLKQYVSEPLNAAIFNFGWLPGGDKSLTTRTETSIAALSATLSLLKENGMLIAVLYPGHENGKQEAEAIEQWAKNLPQEQFAVLSYGFTNRKNNPPYLLAFEKLRQK

SEQ ID NO: 1127 - protein, 235 aa, Neisseria meningitidis
MNAAIEHVQAVAFDLDGTLCDSVPDLAAAAEAMLEQLGMKPLPAKVVESYVGDGIGKLVHRVLTNDRDREADSELWEKGFVSYMKYYRDHLSVFTRPYPETEAGLALLKSLGIPLAVITNKNEILAVELLKQLGLADYFSLILGGDSLPEKKPSPLPLRHAAEVLGIDVANMVMVGDSRNDIIAAKAAGCLSVGVTFGYGDMTLLSQDDATRPDWIIGSLPEIYDNLQPQKNKEE

SEQ ID NO: 1128 - protein, 213 aa, Neisseria meningitidis
MKAFTKITAIVAPLDRSNVDTDAIIPKQFLKSIKRSGFGPNAFDEWRYLDHGEPGMDNSKRPLNPDFSLNQPRYQGAQILLTRKNFGCGSSREHAPWALDDYGFRAVIAPSFADIFFNNCYKNGLLPIVLTEEQVDRLFKEVEANEGYQLSIDLAEQTLTTPSGETFTFDITEHRKHCLLNGLDEIGLTLQHADEIHAFEEKRRQSQPWLFNG

SEQ ID NO: 1129 - protein, 136 aa, Neisseria meningitidis
MTTYTIPKKDYQFLYIYEGTLLNYTLKNDEFHIIVQNVDYPDFPQEIPMPNYSEWVKIKFKQFSYLKFIYGYATKNQDKNIKNVLELGELKQDDEILDYGGALEVIGGRYDLPTGFSIDIVCREIELEFLDQESFN

SEQ ID NO: 1130 - protein, 685 aa, Neisseria meningitidis
MPEQNRILCRELSLLAFNRRVLAQAEDQNVPLLERLCFLCIVSSNLDEFFEVRMAWLKRENKLHPRRRLDNGKMPSETIADVTEAARSLIRHQYDLFNNVLQPELAREGIHFYRRRNWTDTQKKWIEDYFDRELLPILTPIGLDPSHPFPRPLNKSLNFAVELDGTDAFGRPSGMAIVQAPRILPRVVPLPSELCGGGHGFVFLSSILHAHVGKLFPGMNVKGCHQFRLTRDSDLTVDEEDVQNLRAAIQNELHDREYGDGVRLEVADTCPAYIRDFLLAQFKLTAAELYQVKGPVNLVRLNAVPDLVDRPDLKFPPHTQGRLKALGKNGSIFKLIRRAPILLHHPYQSFNPVVEMMREAAADPAVLAVKMTIYRTGTRSELVRALMKAALAGKQVTVVVELMARFDEANNVNWAKQLEEAGAHVVYGVFGYKVHAKMALVIRREDGVLKRYAHLGTGNYHQGTSRIYTDFGLITADEQITADVNTLFMEITGLGKPGRLNKLYQSPFTLHKMVIDRIARETEHAKAGKPARITAKMNSLIEPTVIEALYRASAAGVQIDLIVRGMCTLRPGVKGLSENIRVRSIIGRQLEHARVYCFHNNGADDTFISSADWMGRNFFRRIETAAPITAPELKKRVIREGLEMALADNTHAWLMQPDGGYIRAAPAEGESEADLQNDLWTLLGG

SEQ ID NO: 1131 - protein, 243 aa, Neisseria meningitidis
LLIHYTLCRYRNWLAQDDTLSELLELINRQLTEKNLKVEKASAAVIDTTIIQTAGSTQRQAIEVDEEGQVSGQTTPSKDSDARWIKKNGLYKLGYKQHTRTDAEGYIEKLHITPANAHECKHLSPLLEGIAEGTTVYADKGYDSAENRQHLEEHQLLDGIMRKACRNRPLTETQTKRNRYLSKTRYSGLNLNQDKATKPQTVQIVRQGEATPYWFLLIHYMWSNRASVRCTVNSATLGQPISG

SEQ ID NO: 1132 - protein, 207 aa, Neisseria meningitidis
MKKPTDTLPVNLQRRRLLCAAGALLLSPLAHAGAQREETLADDVASVMRSSVGSVNPPRLVFDNPKEGERWLSAMSARLARFVPEEEERRRLLVNIQYESSRAGLDTQIVLGLIEVESAFRQYAISGVGARGLMQVMPFWKNYIGKPAHNLFDIRTNLRYGCTILRHYRNLEKGNIVRALARFNGSLGSNKYPNAVLGAWRNRWQWR

SEQ ID NO: 1133 - protein, 60 aa, Neisseria meningitidis
MSCGGCVKSVTRILEGVKGVASVEVSLENKSATVGYDPAQTDAGALIEAVEDGGYDAALK

SEQ ID NO: 1134 - protein, 127 aa, Neisseria meningitidis
MEPSSYAAEKKGKGGIRRVINAFGYSIDGIAAAYRYEAAFRQVLWLNVLLVCAAFFWVSETAVRLPLIIASFVSVIVELFNTAVEAAVDHTSTEKHELAKLAKDAGSAAQLFAMLMLAAVWLSALFG

SEQ ID NO: 1135 - protein, 140 aa, Neisseria meningitidis
MQVTSKWIDGMCFVGTTEGGHSVVMEGSAAEGKAKRGPSPLEMLLLGVAGCSSIDVVMIAEKQRQKVTDCRATVTAKRADDAPRVFTEIHIHFKVFGHDLKESAIERAVQMSAEKYCSASIMLGKAAKITHSFEIAGADK

SEQ ID NO: 1136 - protein, 256 aa, Neisseria meningitidis
MKITTWNVNSLNVRLPQVQNLLADNPPDILVLQELKLDQDKFPAAALQMMGWHCVWSGQKTYNGVAIVSRNAPEDVHIGLPALPDDPQRRVIAATVGGVRVINVYCVNGEALDSPKFKYKEQWFAALTEFVRDEMTRYGKLVLLGDFNIAPADADCYDPEKWHEKIHCSSVERQWFQNLLDLGLTDSLRQVHPEGAFYTWFDYRGAMFQRKLGLRIDHILVSPAMAAALKDVRVDLETRALERPSDHAPVTAEFDW

SEQ ID NO: 1137 - protein, 192 aa, Neisseria meningitidis
MSPTHEISNVERLIDEINRIHAGYHERVSKLYGGNLPNLSKTLRHLDIDFVLQYRLNLHESINDYLIRSDIGDLPLAYYYRVKTTESVFDKIRWFSERESGYPANKVLNDIFGVRIIADSALMEEIHAALDEWVSTKGLKNWNVQEKNGYIGTHVYFNQKNNLFFPWELQIWDKADALKNIESHERDKRLFV

SEQ ID NO: 1138 - protein, 451 aa, Neisseria meningitidis
MSEYTPQTAKQGLPALAKSTIWMLSFGFLGVQTAFTLQSSQMSRIFQTLGADPHNLGWFFILPPLAGMLVQPIVGHYSDRTWKPRLGGRRLPYLFYGTLIAVIVMILMPNSGSFGFGYASLAALSFGALMIALLDVSSNMAMQPFKMMVGDMVNEEQKSYAYGIQSFLANTGAVVAAILPFVFAYIGLANTAEKGVVPQTVVVAFYVGAALLIITSAFTIFKVKEYDPETYARYHGIDVAANQEKANWFELLKTAPKAFWTVTLVQFFCWFAFQYMWTYSAGAIAENVWHTTDASSVGYQEAGNWYGVLAAVQSVAAVICSFVLAKVPNKYHKAGYFGCLALGALGFFSVFFIGNQYALVLSYTLIGIAWAGIITYPLTIVTNALSGKHMGTYLGLFNGSICMPQIVASLLSFVLFPMMGGLQANMFLVGGVVLLLGAFSVFLIKETHGGV

SEQ ID NO: 1139 - protein, 297 aa, Neisseria meningitidis
MPHPCQTVHTLTARVPKCRLKLNAARRQRYNRPQLFFPNIIMTTTEHDNDDAFLLRYSRHILLDEIGIEGQQKLSAAHILVVGCGGLGAAALPYLAASGIGTLTIADSDTVELHNLQRQVAFDEGDVGKPKAEALADRLKRINHNVDVRTVNEKLDGCRLTGLVQTADIVLDCCDNYATRQAVNRVCVQTKTPLVSGAAVRFEGQLAVYRPDLPDSPCYACLFDGGSASDGICSLFGVFSPLVGIIGSTQAAEALKILLDAGEPSHGRLAVYRALEGGWQYFDLPRNPECPVCGTAR

SEQ ID NO: 1140 - protein, 138 aa, Neisseria meningitidis
MIDVKIDNIFVVLNQIERLGNGIENRYLLMRRLSETMHTAVKLNFRYAGRPKWLGLKYRDGKLLSDSGRLKDSFSTLSDNDTALVGTNIVYAAIHNFGGMAGRNRKVRIPQREFLTLTDDDKQALMDDVQDYFSGLIP

SEQ ID NO: 1141 - protein, 321 aa, Neisseria meningitidis
MSYTQLTQGERYHIQYLSRHCTVTEIAKQLNRHKSTISREIRRHRTQGQQYSAEKAQRQSRTIKQRKRQPYKLDSQLIQHIDTLIRRKLSPEQVCAYLCKHHQITLHHSTIYRYLRQDKSNGSTLWQHLRICSKPYRKRYGSTWTRGKVPNRVGIENRPAIVDQKSHIGDWEADTIVGKGQKSALLTLVERVTRYTIICKLDSLKAEDTARAAVRALKAHKDRVHTITMDNGKEFYQHTKITKALKAETYFCRPYHSWEKGLNENTNGLIRQYFPKQTDFRNISDREIRRVQDELNHRPRKTLGYETPSVLFLNLFQPLIH

SEQ ID NO: 1142 - protein, 90 aa, Neisseria meningitidis
VNNSVITVIGKDRVGIVYDVSKILAENQINILNISQQLMDDFFTMIILVDTSKCSKSRQEVLDLFAEESKKLALDIRMQNEEIFQAMHRI

SEQ ID NO: 1143 - protein, 409 aa, Neisseria meningitidis
MAFGKSLFHAIGRVSLVRQIAAGLALGIVIGSVSPQLGLAAGLFGSLFVGALKAVAPVLVFILVAATIAQHQKGNKAHIRPIIVLYLIGTFSAALTAVIAGMVFPTHIVLAGAGDVSAAPPSGIVEVLKSLLMNLVANPINAIANANYIGILAWALVLGAALRNHGSDVTRQVVADLAEAVSTVVKWIIRFAPLGIFGLVSSTIAETGFGALAGYAKLLAVLLGCMAFIALVVNPAIVWWKIRRNPYPLVFTCLRESGVYAFFTRSSAANIPVNMALAKKLGLHEDTYSISIPLGATVNMGGAAITITVLAMAAAHTQGIQVDFATALLLSLVATVSACGASGVAGGSLLLIPLACSLFGISNDVAMQVVAVGFIIGVIQDSAETALNSSTDVLFTAAADLCRQRNRAE

SEQ ID NO: 1144 - protein, 458 aa, Neisseria meningitidis
MKHIHIIGIGGTFMGGIAAIAKEAGFEVSGCDAKMYPPMSTQLEALGIGVHEGFDAAQLEEFKADVYVIGNVAKRGMDVVEAILNRGLPYISGPQWLAENVLHHHWVLGVAGTHGKTTTASMLAWVLEYAGLAPGFLIGGVPENFSVSARLPQTPRQDPNSQSPFFVIEADEYDTAFFDKRSKFVHYRPRTAVLNNLEFDHADIFADLGAIQTQFHHLVRTVPSEGLIVCNGRQQSLQDTLDKGCWTPVEKFGTEHGWQAGEANADGSFDVLLDGKKAGHVAWSLMGGHNRMNALAVIAAARHAGVDIQTACEALSTFKNVKRRMEIKGTVNGITVYDDFAHHPTAIETTIEGLRQRVGNARILAVLEPRSNTMKLGTMKSALPESLKEADQVFCYAGGVDWNVAEALAPLGGRLHVGKDFDAFVAEIVKNARTGDHILVMSNGGFGGIHTKLLDALR

SEQ ID NO: 1145 - protein, 51 aa, Neisseria meningitidis
MEKRNTYAFLLGIGSLLGLFHPAKIAIRPNPADDLKNIGGDFQRAIEKARK

SEQ ID NO: 1146 - protein, 215 aa, Neisseria meningitidis
MKTKFYNHQGEHLILYFAGWGTPPDAVNHLILPENHDLLICYDYQDLNLDFDFSAYRHIRLVAWSMGVWAAERALQGIRLKSATAVNGTGLPCDDNFGIPFAVFKGTLENLTGNTRLKFERRMCGDKASFEDYQQFSARPFDEIHQELTALFAMIGQDRRTDFIRWTNALVGSGDKIFMSANQHRYWTARCTVREIDGGHYLFSRFTHWSALWNH

SEQ ID NO: 1147 - protein, 196 aa, Neisseria meningitidis
MGLELPLILGTSSVFRREQMERLGIAFQAASPDFDETPMLGESAPQTALRLAEGKARSLTGRFPEALIVGADQVAWCDGRQWGKPMNLANAQKMLMHLSGREIEFYSAVVLLNTVTGRMQRHIDKTVVVMRKLDELHILRYLEREPDAVYCSCALKSEGLGALLIERIESSDPNALIGLPVFRLVDFLKNEGVEVL

SEQ ID NO: 1148 - protein, 389 aa, Neisseria meningitidis
MTAHKILPVLLSIILGVSHATAASPAPNRPTAHAAPTLQTPETLTAAHIVIDLQSRQTLSAKNINTPVEPAALTQLMTAYLVFKNMKSGNIRSEENLKIPESAWASEGSRMFVRPGDTVSTDKLLKGMIALSANDAALTLAGRLGNGSIENFVQQMNKEARRLGMKNTVFKNPTGLSREGQVSTAKDLAQLSEALMRDFPEYYPLFSIKSFKFKNIEQNNRNILLYRDNNVNGLKAGHTESGGYNLAVSYSGNGRHILVITLGSESAETRASDNSKLLNWALQAFDTPKIYPKGKTVAQIQISGGSKKTVRAGFLKEAYITLPHKEAKMAEQILETIQPIPAPVKKGQILGKIKIRQNGYTIAEKEIVALENVEKRSRWQRLWVRLTGQ

SEQ ID NO: 1149 - protein, 437 aa, Neisseria meningitidis
MLTFIGLLIIGVIVWLLLTEKVSPIIALILVPLFGALLAGFDVSQLKEFYSGGTKSVMQIVIMFMFSILFFGIMNDVGLFRPMIGGLIKLTRGNIVAVSVGTVLVSVVAQLDGAGATTFLLVVPALLPLYKRLHMNPYLLFLLLTSSAGLINLLPWGGPTGRVASVLGADVGELYKPLLTVQIIGVVFILALSLLLGVREKRRIVRELGALPAVADLIKPVPLSEEEQKLARPKLFWWNVLLFLAAMSLLFSGIFPPGYVFMLAATAALLLNYRSPQEQMERIYAHAGGAVMMASIILAAGTFLGILKGAGMLDAISKDIVHILPDALLPYLHIAIGVLGIPLELVLSTDAYYFGLFPIVEQITSQAGVAPEAAGYAMLIGSIVGTFVTPLSPALWMGLGLAKLSMGKHIRYSFFWAWGLSLAILASSIAAGIVPLP

SEQ ID NO: 1150 - protein, 521 aa, Neisseria meningitidis
MTQDKILILDFGSQVTQLIARRVREAHVYCELHSFDMPLDEIKAFNPKGIILSGGPNSVYESDYQADIGIFDLGIPVLGICYGMQFMAHHLGGEVTPGNQREFGYAQVKTIDSGLTRDIYDDAPNTLDVWMSHGDKVSKLPDGFAVIGDTPSCPIAMMENAEKQFYGIQFHPEVTHTKQGRALLNRFVLDICGAQPGWTMPNYIEEAVAKIREQVGSDEVILGLSGGVDSSVAAALIHRAIGDQLTCVFVDHGLLRLNEGKMVMDMFARNLGVKVIHVDAEGQFMAKLAGVTDPEKKRKIIGAEFIEVFDAEEKKLTNAKWLAQGTIYPDVIESAGAKTQKAHAIKSHHNVGGLPENMKLKLLEPLRDLFKDEVRELGVALGLPREMVYRHPFPGPGLGVRILGEVKKEYADLLRQADDIFIQELRNTTDENGTSWYDLTSQAFAVFLPVKSVGVMGDGRTYDYVVALRAVITSDFMTAHWAELPYSLLGRVSNRIINEVKGINRVVYDVSGKPPATIEWE

SEQ ID NO: 1151 - protein, 227 aa, Neisseria meningitidis
MQHDVYDYTAHTVSKNTVLQKTYRLLGFSFIPAAAGAALAANAGFNFYAAFGSRWIGFAVVLAFFYGMIHFIEKNRYSNTGVTLLMVFTFGMGVLIGPVLQYALHIADGAKIVGIAAAMTAAVFLTMSALARRTRLDMNALGRFLTVGAVILMVAVVANLFLGIPALALTISAGFVLFSSLMIMWQVRTVIDGGEDSHISAALTLFISLYNIFSSLLNILLSLNGED

SEQ ID NO: 1152 - protein, 217 aa, Neisseria meningitidis
MKITHCKLKKKVQKELLRFFVLEVTVRSAADILGIHPNSAALFYRKIRTVINHHLALAADEVFEGPVEPDESDFGGRRKGRRGRGAAGKVVVFGILKRNGRVYTVVVDNAKSETLLPVIKKKIMPDSIVYTDSLSSCDKLDVSGFIHYRINHSKEFADRQNHINGIENFWNQAKRVLRKYNGIDCKSFPLFLKECEFRFNFGTPSQQLKILRDWCGI

SEQ ID NO: 1153 - protein, 665 aa, Neisseria meningitidis
MKKITPQNLRPLLSESLGHTDFVNVLNALIKFLRRGGKKCAGERFDLIIDTFKQDRELLSRFSRCFYIWLAQIHIYPALIKLGIFSRHSFAREMGIRIYERFSPSYKDFANLGEVFLYLFHSENDDKWLQTLNIRQWLVLYELIRSHAEPSKLQTAGIRLADARLRAIEMLSVWTASEAIEPDLIRIAPRLLEADSSFVALQRETAKLVEHYRNGTAPYDTAHLEVMFDQCFSQIDYLRRKGTGAGSGSSVKVAHLLERLRQTVDRLKLLTDIQTGAGNSNRLTIALMNSLIYAAVEQYSTRHLRRSSIRMLARSITENKSHHGEHYITRNRKEYFKMFYSAAGGGIIIALMALLKIRIGTLGLSPFLTSLSAGFNYGIGFMIIHILHCTVATKQPAMTAASFAEQVDLNEGGKAVDNKLAKLLIDVCRSQSVAVFGNVSIAILLACAISFGYAHLHQQPILDAHTAAYQFKSIDIIAYPTLWYAAIAGLWLFCSGIIAGFFDNRADYLNLRQRLPFNPLLRKIMRPGPRRVLAAYIHKHYGSLAGNFIFGMLLGMTGYFGHLLGLPLDIRHVAFSSANLGYAAVSGNVGLGTFVLGIFSVLAIGLVNLCVSFSLALFVALRSRGTKIGSIRNLIKSFWNQIKSNPCILFLPPAKEQGHPPSDKP

SEQ ID NO: 1154 - protein, 80 aa, Neisseria meningitidis
LLILLIFEYRKFLMATGIVKWFNDAKGFGFITPDEGGEDLFAHFSAINMEGFKTLKEGQRVSFDVTTGPKGKQAANIQAA

SEQ ID NO: 1155 - protein, 434 aa, Neisseria meningitidis
MKKHIWAASLLPTSLSAEPLNWWKPYSAVNSGDTAWVMTAAALVLLMTLPGLALFYGGMVRKKNLLSTMMHSFSIATLVGILWVAVGYSLAFTPGNAFIGGLGRVFLSGMQIDAAAQMLTVSPNAPTVPEPVFMFFQMTFAIISTAIITGAFAERMKYSAMMLFSGIWFLLVYVPGAHWVWGGGFMSKGGVLDYAGGTVVHINAGIAGLVAALVLGRRIGYGREAMPPHNMAMTLIGAAMLWFGWFGFNAGSALAADAAAGMAMAVTQVSAVFGAAGWLACEKIAGHKPSALGLASGAVSGLVGITPAAGFTGPSGAAAIGILTAAACFVSVTVVKHKLRYDDSLDAFGIHGFGGLVGGILTGIFFDNRIFGGDAAVWQQLWIQVKDGFVMAAYSGLMSWAILKVVGKICGGLRVGKDVEREGLDLNIHGERVE

SEQ ID NO: 1156 - protein, 461 aa, Neisseria meningitidis
MMARDNRIQMFPHEWRASTTLSGVYALRMLGMFLVLPVLAVYAASLPGAEGNKTLVGLAMGIYGLTQALLQLPLGIASDKFGRKKTIYVGLIVFAAGSFLAAAADTLPMLVAARAIQGAGAVSAAVTALLADLTRDGVRTRAMAMIGLSIGLTFSVSLVVAPVIADAVGVRGLFLLTGMLTVASIGVVAFMTPDPEVSKLHEDTQAQPSRIGEVLKNRRLLTLDFGIFALHAAQMALFTALPFAMTQLGLEKIQHWKVYLPSTITGLVVMVPLIIVGETRNKLKQVFILGIACIAAAQLGLLSGMRSVGLITAYLVVYFIGFNVLEASLPSMVSKIAPSDLKGTAMGVYNTMQSLGLFAGGVAGGLLFQKYGFSGVFAFCSILMLLWLVIAVLSPAPKPVKNLSYPVGGVWQVNQEGLYRALSELEGVEDIGFSFDGQTVYLKVLQKGFDQAAAEKIITGV

SEQ ID NO: 1157 - protein, 186 aa, Neisseria meningitidis
VGIQDEKSLETVLPDKFPHRQVWIPACAGMTMQVFLTIPGYDVEAEIEKFVWMDAVIWQMPSWWMHEPWTVKKYIDEVLTAGHGKLYQSDGRHSVNPTEGYGTGGLLQGKKHMLSLTWNAPIEAFTREGDFFEGKGVDVLYMHFHKANEFLGMTRLPTFLCNDVVKNPQVEKYLADYQAHLEKVFG

SEQ ID NO: 1158 - protein, 304 aa, Neisseria meningitidis
MRQPHKQISFIFQSTQMMKTLLPFFGVVRVSGEDRQTFLHGQLSNDINNLQTGQACYATYNTPKGRVIANMIVVNRGGDLLLIMAQDLLEATVKRLRMFVLRAKAVFEILEDYAVDAELAASAEPLAAQEPSLVFTAECVSDGICTVVLPHRGILHIAPKNALPPYDAAAESAWRLHEIRSGYPWICAATKETAVAQMLNQHIIGGVHFKKGCYPGQEIIARAQYRGQVKRGLAVLSGNSAAEVGSVLAADGEEAGIVLDSVKDSENFTALAVIKFSAAQKTLSAPNGGSFKAVHLFFKTENAE

SEQ ID NO: 1159 - protein, 291 aa, Neisseria meningitidis
MLQGSLVALITPMNQDGSIHYEQLRDLIDWHIENGTDGIVAVGTTGESATLSVEEHTAVIEAVVKHVAKRVPVIAGTGANNTVEAIALSQAAEKAGADYTLSVVPYYNKPSQEGMYRHFKAVAEAAAIPMILYNVPGRTVVSMNNETILRLAEIPNIVGVKEASGNIGSNIELINRAPEGFFVLSGDDHTALPFMLCGGHGVITVAANAAPKLFADMCRAALQGDIALARELNDRLIPIYDTMFCEPSPAAPKWAVSALGRCEPHVRLPLVPLTEGGQAKVRAALKASGQL

SEQ ID NO: 1160 - protein, 259 aa, Neisseria meningitidis
MNQKYILSANNNSLIEEIHNTVQSIGYCIVRGLNLNHLDDSRRNKKLFDFLSQLGMLTNHKDDGFKSIFWDIKYRGDDYVINNDITFSEDVGECPLHSDSSFSENPESYLVMYVVKSANDGGNSLFLSSSDIVNQLSKTETGKKHLKTLTGNLYPFKTPTSFDKKQGVRWGNILSVNTQMIRFRRDCIYKGIEENRNKVSKEMVLALDYLVNVIKNASDIQEFSAQDDDLIIIDNVNGLHARTDYTDKNRHYIRARITV

SEQ ID NO: 1161 - protein, 395 aa, Neisseria meningitidis
MNTLLNQLKPYPFARLREAMQGISAPEGMEAVPLHIGEPKHPTPKVITDALTASLHELEKYPLTAGLPELRQACANWLKRRYDGLTVDADNEILPVLGSREALFSFVQTVLNPVSDGIKPAIVSPNPFYQIYEGATLLGGGEIHFANCPAPSFNPDWRSISEEVWKRTKLVFVCSPNNPSGSVLDLDGWKEIFDLQDKYGFIIASDECYSEIYFDGNKPLGCLQAAAQLGRSRQKLLMFTSLSKRSNVPGLRSGFVAGDAELLKNFLLYRTYHGSAMSIPMQRASIAAWDDEQHVIDNRRLYQEKFERVIPILQQVFDVKLPDASFYIWLKVPDGDDLAFARNLWQKAAIQVLPGRFLARDTEQGNPGEGYVRIALVVDVATCVKAAETIVSLYR

SEQ ID NO: 1162 - protein, 105 aa, Neisseria meningitidis; identical to SEQ ID NO: 895

SEQ ID NO: 1163 - protein, 273 aa, Neisseria meningitidis
MAVLITGASAGFGEAMCRAFVGAGYRVIGAARRADRLQALADELGALFYPLEMDVSRRESVENALNGIPDEFSDIDCLINNAGLALGLDTADKADFEDWETMIQTNVLGLTFLTRKILPQMVERGGGYVMNLGSIAGNYAYAGSNVYGATKAFVRQFSLNLRAELADKNIRVTNIEPGLCGNTEFSNVRFKGDDEKAAGVYEGVEFIRPEDIAETALWLYRRPAHMNVNTIEIMPVAQTFAGMKVIKTAVPEVREDFEKQSMSLFSRIRSWFK

SEQ ID NO: 1164 - protein, 206 aa, Neisseria meningitidis
MELKVIDAKGQVSGSLSVSDALFAREYNEALVHQLVNAYLANARSGNRAQKTRAEVKHSTKKPWRQKGTGRARSGMTSSPLWRKGGRAFPNKPDENFTQKVNRKMYRAGMATILSQLTRDERLFAIEALTAETPKTKVFAEQVKNLGLEQVLFVTKQLDENVYLASRNLPNVLVLEAQQVDPYSLLRYKKVIITKDAVAQLEEQWV

SEQ ID NO: 1165 - protein, 321 aa, Neisseria meningitidis
MSHTQLTQGERYHIQYLSRHCTVTEIAKQLNRHKSTISREIRRHRTQGQQYSAEKAQRQSRTIKQRKRQPYKLDSQLIQHIDPLIRRKLSPEQVCAYLCKHHQITLHHSTIYRYLRQDKSNGSTLWQHLRICSKPYRKRYGSTWTRGKVPNRVSIENRPAIVDQKSRIGDWEADTIVGKGQKSALLTLVERVTRYTIICKLDSLKAEDTARAAVRALKAHKDRVHTITMDNGKEFYQHTKITKALKAETYFCRPYHSWEKGLNENTNGLIRQYFPKQTDFRNISDREIRRVQDELNHRPRKTLGYETPSVLFLNLFQPLIH

SEQ ID NO: 1166 - protein, 90 aa, Neisseria meningitidis
MMSVKELFKVILDENKDFPIRTIHRTPIGILPKPVALSIVQYEDDQGFYLFYLDETGQEQTDTYHDTLDSAFEQVEFEFGISKEEWMQSP

SEQ ID NO: 1167 - protein, 322 aa, Neisseria meningitidis
MNGKTIILANPRGFCAGVDRAISIVERALEEFGAPIYVRHEVVHNKFVVDNLREKGAVFIEDLAEVPPGATLIYSAHGVSKAVQQEAAERGFRVFDATCPLVTKVHKEVARLDAQDCEIIMIGHKGHVEVEGTMGQLAPGKMLLVETVGDVAKLEVRNPDKLAYVSQTTLSVDETKDIIAALNARFPNIRNPHKEDICYATTNRQTAVKELAEQCDIVIVVGSPNSSNSNRLREVAAGIGTDAYMVDNASYLQRAWFEGKNKVGVTAGASAPEVLVQEVLATIRRWGHETVREGEGAEESIVFVLPKELRREGETKPDLCKR

SEQ ID NO: 1168 - protein, 427 aa, Neisseria meningitidis
MTASKSGFIGQIFSRNMLVCIFTGFTSGLPLYFLINLIPAWLRSEQVDLKSIGLMALIGLPFTWKFLWSPLMDAVRLPVLGRRRGWMLLTQAGLLAALAAYAFLNPRNHLPLIAGLSVLVAFFSASQDIVLDAFRREILSDEELGLGNSVHVNAYRIAALIPGSLSLVLADRMPWSEVFVITSLFMLPGLLMTLFLAREPVLPPAVPKTLKQTVVEPFKEFFTRKGIASAVCVLLFIFLYKLGDSMATALATPFYLDMGFSKTDIGLIAKNAGLWPAVAAGILGGVWMLKIGVNKALWIFGAVQAVTVLGFVWLAGFGHFDTVGTGERLMLAAVIGAEAVGVGLGTAAFVSYMARETNPAFTATQLALFTSLSAVPRTVINSFAGYLIEWLGYVPFFQLCFALALPGMLLLLKVAPWNGEKTQDAGR

SEQ ID NO: 1169 - protein, 484 aa, Neisseria meningitidis
MSIEHTPPTHDGETGQNHAERPSADFDRVHSLCEILEPAFEQIENGTPLEDAPLRDKLTELTVLLGELHPADVAAVLESLPPRERNVVWLLVKPEDDGEVLLEVSDAVRETLIESMDKDELLAAVDDLDADELAELADDLPHQVVYEALQTRDEEERAQVKAAMSYEDNQVGAIMDFELVSIRADVACEVVLRYLRRFDSLPDHTDKIFVVDENDVLQGVLPIRKLLVADPEDLVENVMAKDVVRFRAEDDVEEAAQAFERYDLVTAPVVDENKKLIGRITVDEMVDVIREESEADMLNMAGLQEEEDLFAPVWDSVKNRWMWLAVNLCTAFLASRVIGAFEGSIEKIVALAALMPIVAGIGGNSGNQTITMIVRAMAMGQLTGMQAGRLLKKEVGVALVNGIIWGTVMGAVSWLLYGSLGIGLVMIAAMTLNLLLAATVGVLIPVVMEKFGRDPALGSSVLITAVTDSGGFLIFLGLATLFLL

SEQ ID NO: 1170 - protein, 238 aa, Neisseria meningitidis
MKTKLPLFIIWLSVSAACSSPVSRNIQDMRPEPQAEAGSSDAIPYPVPTLQDRLDYLEGTLVRLSNEVETLNGKVKALEHAKTHPSSRAYVQKLDDRKLKEHYLNTEGGSASAHTVETAQNLYNQALKHYKSGRFSAAASLLKGADGGDGGSIAQRSMYLLLQSRARMGNCESVIEIGGRYANRFKDSPTAPEAIFKIGECQYRLQQKDIARATWRSLIQAYPSSPAAKRAAAAVRKR

SEQ ID NO: 1171 - protein, 58 aa, Neisseria meningitidis
MGEYLEFEESGTKITVEIGSAWHFNETIRNINTHLRGTKLPGSNWRVQDKGHFHLWKR

SEQ ID NO: 1172 - protein, 116 aa, Neisseria meningitidis
MSDGQNIPAKMMSLQLKDMNLLYSSYMPFLEHGGLFVQTNDVFSIGDDILLAVEILNFPKLFLPTKVAWINPARTSSKPKGVGLAFTKHENCLKVKDQIEVELGNTIGGSRSTFTM

SEQ ID NO: 1173 - protein, 183 aa, Neisseria meningitidis
VNYCEFAASLPENTDNPNKHYHDTQYGFPIEDDNELFERLVLEINQAGLNWTLMLKKRQAFQTAFEGFDIDTVAAFDDTDRERLLADAGIVRNRLKIDAAIFNARQIQALQQEYGSFKNWLDTHHPRSKDEWVKLFKKHFKFVGGEIVGEFLMSTGYLKGAHAESCPVYRETLKYHPKWLDAI

SEQ ID NO: 1174 - protein, 375 aa, Neisseria meningitidis
LKRKRSSERVFQTTFSDIGNLFCRIGNFAFCGVVSAGCLLNNKHSYSYAKEPHTVKPRFYWAACAVLLTACSPEPAAEKTVSAASASAATLTVPTARGDAVVPKNPERVAVYDWAALDTLTELGVNVGATTAPVRVDYLQPAFDKAATVGTLFEPDYEALHRYNPQLVITGGPGAEAYEQLAKNATTIDLTVDNGNIRTSGEKQMETLARIFGKEARAAELKAQIDALFAQTREAAKGKGRGLVLSVTGNKVSAFGTQSRLASWIHGDIGLPPVDESLRNEGHGQPVSFEYIKEKNPDWIFIIDRTAAIGQEGPAAVEVLDNALVRGTNAWKRKQIIVMPAANYIVAGGARQLIQAAEQLKAAFEKAEPVAAGKE

SEQ ID NO: 1175 - protein, 30 aa, Neisseria meningitidis
LKRPCILRRIKNHPDIQVIGQVVQVSKNLY

SEQ ID NO: 1176 - protein, 142 aa, Neisseria meningitidis
MAILKLDEHLYISPQLTKADAEQIAQLGIKTVICNRPDREEESQPDFAQIKQWLEQAGVTGFHHQPVTARDIQKHDVETFRQLIEQAEYPVLAYCRTGTRCSLLWGFRRAAEGMPVDEIIRRAQAAGVNLENFRERLDNARV

SEQ ID NO: 1177 - protein, 281 aa, Neisseria meningitidis
MVCLSGGKDSYALLDILRQLQASAPIDFELVAVNLDQKQPGFPEEVLPTYLESIGVPYKIVEEDTYSTVKRVLDEGKTTCSLCSRLRRGILYRTAKELGCTKIALGHHRDDILATMFLNMFYGGKLKAMPPKLVSDNGEHIVIRPLAYVKEKDLIKYAELKQFPIIPCNLCGSQPNLQRQVIGDMLRDWDKRFPGRIESMFSALQNVVPSHLADTELFDFAGLERGQTLKHGGDLAFDSEKMPERFSDGSEEDESEIKIAPQKAERKVINILANKPKTCGA

SEQ ID NO: 1178 - protein, 132 aa, Neisseria meningitidis
MSDCCNRIQPVLLSVLRIVTAYLFLLHGTSKIFAFPIEMGSGSPGGLLLLAGILEIVGGILLVLGLFARPAAFVLSGQMAVAYFMAHASGNALFPIANGGESAVLFCFVFLYIAAAGGGAWSLDRLFFKRKA

SEQ ID NO: 1179 - protein, 305 aa, Neisseria meningitidis
MSVYTSVSDDEMRGFLSGYDLGEFVSLQGIAQGITNSNYFLTTTSGRYVLTVFEVLKQEELPFFLELNRHLSMKGVAVAAPVARKDGRLDSVLAGKPACLVACLKGSDTALPTAEQCFHTGAMLAKMHLAAADFPLEMENPRYDAWWTEACARLLPVLPRDDAALLCSEIDALKDNLGNHLPSGIIHADLFKDNVLLDGGQVSGFIDFYYACRGNFMYDLAIAVNDWVRTADNKLDEALKKAFIGGYEGVRPLSAEEKAYFPTAQRAGCIRFWVSRLLDFHFPQAGEMTFIKDPNAFRNLLLSLG

SEQ ID NO: 1180 - protein, 139 aa, Neisseria meningitidis
MSFGYLIATSQPCELLTKSRGETFSLIMDKMDLWIYFRFCEGNIYTIRKNETESCLTERGGKWLKHIYEFNRGSFIFSYVLLKKRESEENFAEIVLKSIKNNKILTVKVRSGLHFDLRNIYRIEMYSGLNLNQYGVASP

SEQ ID NO: 1181 - protein, 155 aa, Neisseria meningitidis
MQIDNISDEQVVIVRMSCYLEKDEIFKNVERYGYQSSDIKKISPPFPLNILPVPKPYYFYLYDTHLNQIYDLAWSCNDFLMFEIFILDRESIKYIDKDKLFKSGETLYSNFKSIKNQCKNYFFCGFDFDAPYFKSGVSQVADYNFVPDAFSLFFI

SEQ ID NO: 1182 - protein, 117 aa, Neisseria meningitidis
LLCFNGGIEKHILFNQPIKKGLKMKKLLLAAVVSLSAATAFASDSAERQIYSDPNFEQNRVKAVKMLEQRGYQVHDVDADDHWGKPVLEVEAYKDGREYDIVLSYPDLKIIKEQLDR

SEQ ID NO: 1183 - protein, 242 aa, Neisseria meningitidis
MWDNAEAMERLTRWLLVMMAMLLAASGLVWFYNSNHLPVKQVSLKGNLVYSDKKTLGSLAKEYIHGNILRTDINGAQEAYRRYPWIASVMVRRRFPDTVEVVLTERKPVARWGDHALVDGEGNVFEARLDRPGMPVFRGAEGTSAEMLRRYDEFSTVLAKQGLGIKEMTYTARSAWIVVLDNGITVRLGRENEMKRLRLFTEAWQHLLRKNKNRLSYVDMRYKDGFSVRYASDGLPEKESEE

SEQ ID NO: 1184 - protein, 79 aa, Neisseria meningitidis; identical to SEQ ID NO: 831

SEQ ID NO: 1185 - protein, 66 aa, Neisseria meningitidis
MKFEERFIVQDLETHDFIYPDPFGDVGFTQNIKSAGQFESYEDALNSGINEMGGGFQIFQFFVKSE

SEQ ID NO: 1186 - protein, 505 aa, Neisseria meningitidis
MLYFRYGFLVVWCAAGVSAAYGADAPAILDDKALLQVQRSVSDKWAESDWKVENDAPRVVDGDFLLAHPKMLEHSLRDALNGNQADLIASLADLYAKLPDYDAVLYGRARALLAKLAGRPAEAVARYRELHGENAADERILLDLAAAEFDDFRLKSAERHFAEAAKLDLPAPVLENVGRFRKKTEGLTGWRFSGGISPAVNRNANNAAPQYCRQNGGRQICSVSRAERAAGLNYEIEAEKLTALADNHYLLFRSNIGGTSYYFSKKSAYDDGFGRAYLGWQYKNARQTAGILPFYQVQLSGSDGFDAKTKRVNNRRLPPYMLAHGVGVQLSHTYRPNPGWQFSVALEHYRQRYREQDRAEYNNGRQDGFYVSSAKRLGESATVFGGWQFVRFVPKRETVGGAVNNAAYRRNGVYAGWAQEWRQLGGLNSRVSASYARRNYKGVAAFSTEAQRNREWNVSLALSHDKLSYKGIVPALNYRFGRTESNVPYAKRRNSEVFVSADWRF

SEQ ID NO: 1187 - protein, 335 aa, Neisseria meningitidis
MSTFFQQTAQAMIAKHIDRFPLLKLDQVIDWQPIEQYLNRQKTRYLRDHRGRPACPLLSMFKAVLLGQWHSLSDPELEHSLITRIDFNLFCRFDELSIPDYSTLCRYRNWLAQDDTLSELLELINRQLTEKGLKIEKASAAVVDATIIQTAGSTQRQAIEVDNKGQISGQTTPSKDSDARWIKKNGLYKLGYKQHTRTDAEGYIEKLHITPANAHECKHLPPLLEGLPKGTTVYADKGYDSAENRQHLKEHQLQDGIMRKACRNRPLTEVQTKRNRYLSKTRYVVEQSFGTLHRKFRYARAAYFGLIKVSAQSHLKAMCLNLLKAANRLSAPAAA

SEQ ID NO: 1188 - protein, 457 aa, Neisseria meningitidis
LHPDWVYRLFSFIMPPLIFATFPMKPFAENIPHSLRGNCCDEALPPHTVDCPECGCRADVPRLDSGEAAFCPRCGHKLFRVGRHPFSAPPAYAAASLILMAFAYGMTYIEVGIPGAASVLSLPEMMRLMVFQDYGFLAEVMFVLTFGAPVLFLLLCLYVYAALIRKQAYPALRLATRVMVRLRQAMMVDVFFVSTLVAYIKLSSVAEVRFGSAFYLMFALSVMLIRTSVSVPQHWVYFQIGRLTGDNAVQTASEGKTCCSRCLYFRDSAESPCGVCGAELYRRRPKSLSISSAFLTAAVILYFPANILPIMISSNPAATEVNTILNGIAYMWDEGDRLIAAVIFSASILVPVLKIAAMSVLITSARFALPTGAKKLSHLYRITEAVGRWSMIDIFVIIILMCSFHTYAARVIPGSAAVYFCLVVILTMLSAYYFDPRLLWDKRASDGIAFNETEKYD

SEQ ID NO: 1189 - protein, 161 aa, Neisseria meningitidis
LADFKPDFAWLLKRPLCFLAFGFGSGLAPFAPGTFGTLAALPLAFVLILLGIDGLLLAFLCIVLFMWGIRICAYAERETGVSDHGGIVWDEIVAMLFVLAFVPFRWTWWLAAFVLFRLFDALKPSPVGWFDKNLHGGLGIMADDMAAAVMTLIVLRIAMLF

SEQ ID NO: 1190 - protein, 962 aa, Neisseria meningitidis
MSNTTVEQFAAELKRPVEDLLKQLKEAGVSKNSGSDSLTLDDKQLLNAYLTKKNGSNGGTISIRRTKTEVSTVDGVKVETRKRGRTVNIPSAEELAAQVKAAQTQAAPVRPEQTAEDAAKARAEAAARAEARAKAEAEAAKLKAAKAGNKAKPAAQKPTEAKAETAPVAAETKPAEESKAEKAQADKMPSKKPAEPKEKAAKPKHERNGKGKDAKKPAKPAAPAVPQPVVSAEEQAQRDEEARRAAALRAHQEALLKEKQERQARREAMKQQAEQQAKAAQEAKTGRQRPAKPAEKPQAAAPALENKPVNPAKAKKENRRNRDDEGQGRNAKGKGGKGGRDRNNARNGDDERVRGGKKGKKLKLEPNQHAFQAPTEPVVHEVLVPETITVADLAHKMAVKGVEVVKALMKMGMMVTINQSIDQDTALIVVEELGHIGKPAAADDPEAFLDEGAEAVEAEALPRPPVVTVMGHVDHGKTSLLDYIRRTKVVQGEAGGITQHIGAYHVETPRGVITFLDTPGHEAFTAMRARGAKATDIVILVVAADDGVMPQTIEAIAHAKAAGVPMVVAVNKIDKEAANPERIRQELTAHEVVPDEWGGDVQFIDVSAKKGLNIDALLEAVLLEAEVLELTAPVDAPAKGIIVEARLDKGRGAVATLLVQSGTLKKGDMLLAGTAFGKIRAMVDENGKSITEASPSIPVEILGLSDVPNAGEDAMVLADEKKAREIALFRQGKYRDVRLAKQQAAKLENMFNNMGENQAQSLSVIIKADVQGSYEALAGSLKKLSTDEVKVNVLHSGVGGITESDVNLAIASGAFIIGFNVRADASSRKLAENENVEIRYYNIIYDAIDDVKAAMSGMLSPEEKEQVTGTVEIRQVISVSKVGNIAGCMVTDGVVKRDSHVRLIRNNVVIHTGELASLKRYKDDVKEVRMGFECGLMLKGYNEIMEGDQLECFDIVEVARTL

SEQ ID NO: 1191 - protein, 185 aa, Neisseria meningitidis
LQQCPKCRIQESDLQNHSEHNTMKYRRFYRNGGTYFFTVVTNKRQKILTDDAVRLALRQAVMAVRERYPFEILAWVLMPDHLHTIWRLPDNDSAYSERWRQIKRHSQYLIGGNLRLWQKRFWEHTIRDEADFACHFDYLHFNPVKHGYVGQISDWRFSTFHRYVKQGIYPHNWGGGNADFSIGYD

SEQ ID NO: 1192 - protein, 536 aa, Neisseria meningitidis
LRMQAYRLAYMAGEGSPRSQIDNQVDEFEKSLNRISQSDAIHPLIPSDTPLAYDLIQSMLIIDWQAHILPPLQSYRRPTQVDLYRFAGNIELFLQALENANEKNTWWLRRFQWAIMLMTLVSSVLMLFWHQIWVIRPLQALREGAERIGRRCFDIPVPEGGTPEFKQVGRCFNQMGGRLKILYDDLEGQVAEQTRSLEKQNQNLTLLYQTTRDLHQSYIPQQAAEHFLNRILPAVGADSGRVCLDGGSDVYVSIHHADCGTAASDLGKYHEEIFPIEYQNETLGRLLLSFPNGISLDEDDRILLQTLGRQLGVSLAGAKQEEEKRLLAVLQERNLIAQGLHDSIAQALTFLNLQVQMLETAFAENKREEAAENIGFIKTGVQECYEDVRELLLNFRTKISNKEFPEAVADLFARFTQQTGTTVETVWENGTHLPTQDEQLQMIFILQESLSNIRKHARATHVKFTLSEHGGRFTMTIQDNGQGFDTEKIGEPTGSHVGLHIMQERAKRIRAVLKIYSQPQQGTTVSLAGVSEESLK

SEQ ID NO: 1193 - protein, 206 aa, Neisseria meningitidis
MARYIGPKCKLARREGTDLFLKSARRSLDSKCKIDSAPGQHGAKKPRLSDYGLQLREKQKIRRIYGVLERQFRRYFAEADRRKGSTGELLLQLLESRLDNVVYRMGFGSTRAEARQLVSHKAIVVNGQVVNIPSFQVKAGDVVSVREKAKKQVRIQEALGLATQIGLPGWVSVDADKLEGVFKNMPDRSELTGDINEQLVVEFYSK

SEQ ID NO: 1194 - protein, 1154 aa, Neisseria meningitidis
MQNMKNQIRGSGMDARSNPANVSDGLQNSSGHIGTNTRYRLTKLGEQMARLPIDPKIARILLAAKKHDCMAEILVIASALSIQDPRERPLEARDAAAKAHERFTDKQSDFLAYLNIWDSFQRERDKGLSNKQLVQWCRQYFLSHLRMREWRELHHQLAQTAIEMGLTTKEAAFRRLSEIKQLTSSENQGDQDLSAKRKQKQLDKKQHRAQIRAAKEAGYEQIHRALLTGLIANVGMKSPDGNDYTGARGSRFHLFPASALFKAKPKWVMAAELVETTKLYARDVAVIQPEWIEQEAPHLVRYHYFEPHWEQKRGEVVASERVTLYGLTVLPRRPVSYGKVAPEEAREIFIRSALVAQECDLKADFFVHNKKLIKEITELEHKSRKQDVLVDDEALFAFYNERLPEMAWKDAQGSVWGSEDSVRIIESDKAERSSENERNEFRKNKRNGSRQNENHGNTVGWVENPTSAATAKTVGFDNPTYATQQPTPSPEREGRGEGKTVAAQTNFSATAANPLPQEREQSASASTFSDDLRPANLQQTAPSPVGEGWGEGKTVATQTNFSATSTNPLPQEREQSASASTFSDDLRPANLQQPSPSPVGEGWGEGKTVATQTNFSATTANPLPNPLPQEGEQSAAASAVSNDPQPKKQPAPQKNRLKPLPLADIRTFQAWLKTAERDNPRLLFLSRDDLMQHAAAHITEEQFPKFWQTADGKFKLSYRFEPHHPLDGVTMTVPLTVLNRLHAPSLEWLVPGMIREKIQLQIKALPKQIRRICVPVPEFITQFLSQNPDRNAPILPQLAQAIAKTAGDIRIFEQINQDEWAAFRLPEHCYFNLRIIDDGGQELAGGRKLHELQQQLGQAAAVTFRDNTQEFERDNVTAWDIGTLPESIKFARGKQQLTGYLGLQKEKDGRIALRLFDTTEAAEQAHRQGVIELMKLQLKEQVKDLNKGIQGFTQAAMLLKHINADTLRDDLTQAVCDRAFIGEDELPRNEKAFKEQIKRARSRLPAVKEALSRYLQETAAVYAELNSKLGKHPLTHLLRLRLQTLLAAGFATRTPWAQWPRLPIYLKAMTLRLEKYSSNPARDAAREADIQELEQMWQEKTDSLIKQGLPISDGLAAFKWMIEELRVSLFAQELKTPYPVSVKRLLKEWEKIEK

SEQ ID NO: 1195 - protein, 234 aa, Neisseria meningitidis
MLRSILAASLLAVSFPAAAEALNYNIVEFSESAGVEVAQDTMSARFQVAAEGRDKNAVNAEFVKKFNSFNRKLKNGSFKTELVSRSAMPRYQYTNGRRIQTGWEERAEFKVEGRDFDALNRFIADVQTDASLEYTDFSVSRERRNEVIDQVSKDAILRFKTRAEKLAGILGASGYKIVKLNLGHIGSHIAGGGAAQAKMLRAMPMAASVNMEGADSAAQGVEEISISVNGTVQF

SEQ ID NO: 1196 - protein, 377 aa, Neisseria meningitidis
MKIVFITTVASSIYGFRAPIIKKLIGKNHQVYAFVSEFSDNELDTIREMGVTPVTYRSNRSGLNPFSDIKSTFLIFKELKKISPDLVFPYFAKPVIFGTFAAKLAGVPRIVGMLEGLGFAFTPQPEGIPLKTKIIKGILIALYRIALPMLESLIVLNPDDKDELTDKYGIKIKNIHILGGIGLDSRQYPYSEADIPDEKEPVKFLFIGRFLKEKGIDDFIRAAEQVKDKYPDTVFTALGAIDKSRAGGGGDLERLAARDIIRFPGFVNNVSEVIKEHHIFVLPSYYREGVPRSTQEAMAVGRAVITTDVPGCRETVADKVNGFLIEPWNPRILAEKMIYFIENREAVRLMGNASYAIAKDKFDAEKVDLKLLDILKA

SEQ ID NO: 1197 - protein, 268 aa, Neisseria meningitidis
MWHWDIILILLAVGSAAGFVAGLFGVGGGTLIVPVVLWVLDLQGLAQHPYAQHLAVGTSFAVMVFTAFSSMLGQHKKQAVDWKTVFAMMPGMIFGVFAGALSAKYIPAFGLQIFFILFLTAVAFKTLHTGPQTASRPLPKLPGLTAVSTLFGAMSSWVGIGGGSLSVPFLIHCGFPAHKAIGTSSGLAWPIALSGAISYLLNGLNIAGLPEGSLGFLYLPAVAVLSAATIAFAPLGVKTAHKLSSAKLKKSFGIMLLLIAGKMLYNLL

SEQ ID NO: 1198 - protein, 305 aa, Neisseria meningitidis
MNLTKTQRQLHNFLTLAQEAGSLSKLAKLCGYRTPVALYKLKQRLEKQAEDPDARGIRPSLMAKLEKHTGKPKGWLDRKHRERTVPETAAESTGTAETQIAETASAAGCRSVTVNRNTCETQITVSINLDGSGKSRLDTGVPFLEHMIDQIARHGMIDIDISCKGDLHIDDHHTAEDIGITLGQAIRQALGDKKGIRRYGHSYVPLDEALSRVVIDLSGRPGLVYNIEFTRALIGRFDVDLFEEFFHGIVNHSMMTLHIDNLSGKNAHHQAETVFKAFGRALRMAVEHDPRMAGQTPSTKGTLTA

SEQ ID NO: 1199 - protein, 351 aa, Neisseria meningitidis
MKTYAPALYTAALLTACSPTADSNHPSGQNAPANTESDGKNITLLNASYDLARDFYKEYNPLFIKTYQSEHPGTSVSIQQSHGGSSKQALSVANGLQADVVTMNQSSDIDLLEKKGLVEKGWQQALPDHAAPYTSTMVFLVRKNNPKQIRDWNDLAKDGVNIVIANPKTSGNGRYAFLGAYGYGLKTTNGNEQEAQKLVASILKNTPVFENGGRAATTTFTQRNIGDVLITFENEANYVSKKLTQGQFEIVYPSYTISAESPVAVVNSIVAKKGTQKTARAYLEYLWSEPAQELAASLYLRPRNPEVLARHKADFPDLDTFSPEEKFGGWDNIMKTYFADGGIFDRLTAQK

SEQ ID NO: 1200 - protein, 157 aa, Neisseria meningitidis
MKKLLAAVMMAGLAGAVSAAGVHVEDGWARTTVEGMRIGGAFMKIHNDEAKQDFLLGGSSPVADRVEVHTHINDNGVMRMREVEGGVPLEAKSVTELKPGSYHVMFMGLKKQLKEGDKIPVTLKFKNAKAQTVQLEVKIAPMPAMNHGHHHGEAHQH

SEQ ID NO: 1201 - protein, 276 aa, Neisseria meningitidis
LSGSGKSVALRQMEDSGYFCVDNLPLEMLPALVSYHIERADETELAVSVDVRSGIDIGQAREQIAYLRGLGHRVEVLFVEAEESVLVRRFSETRRGHPLSNQDMTLLESLKKEREWLFPLKEIAYCIDTSKMNAQQLRHAVRQWLKVERTGLLVILESFGFKYGVPNNADFMFDMRSLPNPYYDPELRPYTGMDKPVWDYLDGQPLVQEMVDDIEKFLTHWLPRLEDESRSYVTVAIGCTGGQHRSVYVVEKLARRLKGRYELLIRHRQAQNLPSR

SEQ ID NO: 1202 - protein, 524 aa, Neisseria meningitidis
MKKSLFVLFLYSSLLTASEIAYRFVFGIETLPAAKMAETFALTFVIAALYLFARYKTSRLLIALFFAFSIIANNVHYAVYQSWMTGINYWLMLKEVTEVGSAGASMLDKLWLPALWGVAEVVLFCSLAKFRHKTHFSADILFAFLMLMIFVRSFDTKQEHGISPKPTYSRIKANYFSFGYFVGRVLPYQLFDLSKIPVFKQPAPSRIGQGSIQNIVLIMGESESAAHLKLFGYGRETSPFLTRLSQADFKPIVKQSYSAGFMTAVSLPSFFNVIPHANGLEQISGGDTNMFRLAKEQGYETYFYSAQAENQMAILNLIGKKWIDHLIQPTQLGYGNGDNMPDEKLLPLFDKINLQQGRHFIVLHQRGSHAPYGALLQPQDKVFGEADIVDKYDNTIHKTDQMIQTVFEQLQKQPDGNWLFAYTSDHGQYVRQDIYNQGTVQPDSYIVPLVLYSPNKAVQQAANQAFAPCEIAFHQQLSTFLIHTLGYDMPVSGCREGSVTGNLITGDAGSLSIRDGKAEYVYPQ

SEQ ID NO: 1203 - protein, 211 aa, Neisseria meningitidis
MARVWVKILNLSLKHIVGLKYRIIGAENIPDRPAVICAKHQSGWETLALQDIFPPQVYVAKRELFKIPFFGWGLKLVKTIGIDRNNRREANEQLIKQGLARKNEGYWITIFPEGTRLAPGKRGKYKLGGARMAKMFEMDIVPVALNSGEFWPKNSFLKYPGEITVVICPTIPHASGSEAELMGKCEHLIETQQPLISGAGPFAAKMPSETA

SEQ ID NO: 1204 - protein, 1006 aa, Neisseria meningitidis
MAQTYNYAIVMNERNQLDVRRDGQYQKSTLKDKDRERKFIYTSQRNNLGQQNNFISFDNTDTLVSQQRGTAVFGTATYLPPYGKVSGFDADGLEKRNNAVDWIRTTRIALAGYRYDNVVCRSTTDCPKLVYKTRFSFDNPDLAKTGVGLDKHTEPSRDNSPIYKLKDHPWLGVSFNLGAEGTAKNGKTINKLVSSFNEKNSNNNLVYTTEGRDISLGDWQRETTAMAYYLNAKLHLLDKKGIKDIAQGKTVDLGTLRPRVETTGRSWLNFWAKWDIKDNGQIPVKLGLPEVKAGRCINKANPNPKAQALSPALTAPALWFGAGQDGKAEMYSASVSTYPDSSSSRIFLQNLKRKTDTSRPGRYSLADLSASDIQSKEPTFTSRQTIIRLDGGVREIKLDRSNEATGLNGNDGKNETFGIVSEGSFMPDDSEWKKVLLPWTVRGSADDGRFKSINQESSKYSQRYRIRENGNNSKRDLGDIVNSPIVAVGEYLATSANDGMVHIFKQSGGDKRSYNLKLSYIPGTMPRKDIENKDSTLAKELRAFAEKGYVGDRYGVDGGFVLRRITDDQDKQKHFFMFGAMGLGGRGAYALDLTKAENGDPTAVSLFDVKHDNNGKNSNNSVQLGYTVGTPQIGKTHDGKYAAFLASGYATKQIDSGENTTALYVYDLENNNGTLIRKIEVTSGKGGLSSPTLVDKDLDGIVDIAYAGDRGGNMYRFDLSGQDPNQWSVRTIFSGNKPITSAPAISQLKDKRVVIFGTGSDLSEEDVDSKEIQHVYGIFDNDTDTGTAQDGQGKGLLEQKLEKDKDGKTLFLSDYKRSDGSGDKGWVVKLEAGQRVTVKPTVVLRTAFVTIHKYTGNDKCGAETAILGINTADGGKLTKKSARPIVPADNTAVAQYSGHKKTSSGKSIPIGCMEKDNGIVCPNGYVYDKPVNVRYLDEKKTDGFSTTADGDAGGSGTFKEGKKPARNNRCFSRKGVRTLLMNDLDSLDITGPMCGMKRISWREVFY

SEQ ID NO: 1205 - protein, 799 aa, Neisseria meningitidis
MSTVQMNKNIKSLNLREKDPFLSREKQRYEHPLPSREWIIELLERKGVPSKIESLARELSITEDEYVFFERRLKAMARDGQVLINRRGAVCAADKLDLVKCRVEAHKDGFGFAVPLTPAKDGDFVLYERQMRGIMHGDIVTVRPAGMDRRGRREGTVLDIVERAQSKVVGRFYMDRGVAILEPEDKRLNQSIVLEPDGVARFKPESGQVIVGEIEVYPEQNRPAVAKIIEVLGDYADSGMEIEIAVRKHHLPHQFSEACAKAVKKIPDHVRKSDLKGRVDLRDLPLVTIDGETARDFDDAVFAEKIGRNYRLVVAIADVSHYVRPDDAIDTDAQERSTSVYFPRRVIPMLPENLSNGICSLNPNVERLCMVCDMVITYAGNIKEYRFYPAVMRSHARLTYNQVWKWLSGGIGHPFKAQIDTLYKLFKILQKKRFERGAVEFDSIETQMLFDDNGKIEKIVPVVRNDAHKLIEECMLAANVCAADFLLKNKHTALFRNHLGPTPEKLAALREQFGLLGLQLGGGDNPSPKDYAALAGQFKGRPDAELLQVMMLRSMQQAVYEPHCDGHFGLAYEAYAHFTSPIRRYPDLTVHRAIKAVLNQQTYTPKKSWQALGVHTSFCERRADDASRDVENWLKTYYMRDKVGEIFEGKISGVANFGIFVTLDDIHIDGLVHISDLGEDYFNFRPEIMAIEGERSGIRFNMGDRVAIKVARADLDDGKIDFVLIAEGSGRGRKVKSSASAKPAGTAGKGKPKTAAGKKTARGGKVRGRGASAAAESGKKAKKPIPIEVQKVKKRKGKS

SEQ ID NO: 1206 - protein, 225 aa, Neisseria meningitidis
MSIKQWPEGERPREKLLERGAAALSDAELLAILLRVGTRGMSAVDLARYLLQEFGSLGRLMSAEVGKLSAYKGMGTASFTQFAVVREIGRRILAEELQESIVLSDPDTVADYLRFHLGQEKVEVSVALLLNRQNQLIAVRELSRGTVAENTIYIREIVKLALDEYADSLIIAHNHPGGSPEPSQEDIMFTRRLAQAMSLVDVSLLDHFIVTAQTVRSFRQLGLMP

SEQ ID NO: 1207 - protein, 174 aa, Neisseria meningitidis
MKKALATLIALALPAAALAEGASGFYVQADAAHAKASSSLGSAKGFSPRISAGYRINDLRFAVDYTRYKNYKAPSTDFKLYSIGASAIYDFDTQSPVKPYLGARLSLNRASVDLGGSDSFSQTSIGLGVLAGVSYAVTPNVDLDAGYRYNYIGKVNTVKNVRSGELSAGVRVKF

SEQ ID NO: 1208 - protein, 318 aa, Neisseria meningitidis
MKVLFIADPMASFKTYKDTTYAMMREMAKRGWRLFHTLSGELSVKNGLVVADASAFEFLGAQDDHDKNWFAAADKVQTALKAFDAVIMRTDPPFDMQYLYATQLLTLAEQQGAKVFNSGQSMRDFNEKLAILNFSRFTAPTLVTTRSADVRAFLKEHGDIIIKPLDGMGGMGIFRLTEKDPNIGSILETLMRLDSRTIMAQRYIPEIVHGDKRILIIGGEVVPYALARIPQNGETRGNLAAGGRGVAQELDGRDREIAETLAPELKRRGILLAGLDVIGSNLTEVNVTSPTGFQEIMKQKGFDVAAMFADAVAAWSVR

SEQ ID NO: 1209 - protein, 56 aa, Neisseria meningitidis
MKYGVFFAAATALLLSACGYKGDLYLPKEGDKARFGVIQTGLQLQGKPQSAPPTQK

SEQ ID NO: 1210 - protein, 323 aa, Neisseria meningitidis
MPAKFQQETLKSRFAQAKVLVVGDVMLDRYWFGDVSRISPEAPVPVAKIGRIDQRAGGAANVARNIASLGGRAGLLSVTGDDEAADALDALMVQDGVASYLMRDKQIATTVKLRVVARNQQLIRLDFEEHPNREVLEQIKQKYLEVLSEYDAIIFSDYGKGGLSHISDMIDCAKHEGKIVLIDPKGDDYEKYAGATLITPNRAELKEVVGSWKNEGELTEKAQNLRRHLDLTAVLLTRSEEGMTLFSEGEPIYQPTRAQEVYDVSGAGDTVIAGMGLGLAAGCTMPEAMYLANTAAGVVVAKLGTAVCSFAELTKALSGQSTM

SEQ ID NO: 1211 - protein, 359 aa, Neisseria meningitidis
MSRSATEFVSPLTFQALSGNPVLTDTHGGNGSNGMEHINLTRNADVFLIAPASMNTVAKICNGVADNLLTSLAAARKCPLAIAPAMNVEMWLNPANQRNIAQLVSDGITVYMPGLGEQACGENGMGRMPEPAELLDLLPDLWTPKILRGKKILITAGATFEAIDPVRGITNTSSGKMGVALARACRAAGAEVSLIHGQLQTALPFGISDTVQAVSAEDMHRAVHRLIEKQDAFISVAAVSDYKVKNRSTQKFKKDKNAKRLSIELDENPDILASIASLPNPPFCIGFAAETENVMAYAREKRIKKKIPVIVANDVSIAMGKPTNRITIIGDDGELSFPETSKDEAAMQIVERLAVYLNK

SEQ ID NO: 1212 - protein, 324 aa, Neisseria meningitidis
MPSEKNIGFMAGSSRPLWVAFALLLVSCVLFMTLNVKGDWDFVLHLRLTKLAALLMVAYAVGVSTQLFQTLTNNPILTPSILGFDSLYVFLQTLLVFTLGGVGYASLPLTGKFGFELVVMMGGSLLLFYTLVKQGGRDLSRMILIGVIFGILFRSLSSLLSRMIDPEEFTAAQANMFAGFNTVHSELLGIGALILLVSAAVVWRERYRLDVHLLGRDQAVNLGISYTRNTLWILLWIAALVATATAVVGPVSFFGLLAASLANHFSPSVRHSVRLPMTVCVGGILLVGGQTVFEHFLGMKAVLSVVVEFAGGLVFLYLVLKHKK

SEQ ID NO: 1213 - protein, 255 aa, Neisseria meningitidis
MQEIIQSIVFIAAAILHGITGMGFPMLGTTALAFIMPLSKVVALVALPSLLMSLLVLCSNNKKGFWQEIVYYLKTYKLLAIGSVVGSILGVKLLLILPVSWLLLLMAIITLYYSVNGILNVCAKAKNIQVVANNKNMVLFGFLAGIIGGSTNAMSPILLIFLLSETENKNRIAKSSNLCYLLAKIVQIYMLRDQYWLLNKSEYGLIFLLSVLSVIGLYVGIRLRTKISPNFFKMLIFIVLLVLALKIGHSGLIKL

SEQ ID NO: 1214 - protein, 332 aa, Neisseria meningitidis
MRRKMLNVPKGSYDGMKGFTIIEFLVAGLLSMIVLMAVGSSYFTSRKLNDAANERLSAQQDLRNAATLIVRDARMAGGFGCFNMSEHTKNDIIVDPSKQTQPVPAKPGAKQENPLFSLEWANTNNTNNNTAKLIPIAESTDIKYPGFAQARPALIFQYGIDDLDASAETVVVSSCSKIAKPGKKISTLQEAKSALQITNDDKQNGNITRQRHVVNAYAVGRIAGEEGLFRFQLDDKGKWGNPQLLAKKIRDMKVRYIYVSDCPEDDDAGKEETFKYTDTFNSAKDAVTPAGVEVLLSSGTDTKIAASSDNHIYAYHIDATIRGGNVCANRTL

SEQ ID NO: 1215 - protein, 818 aa, Neisseria meningitidis
VLDGSTKLLSVKINGVAADYVLEGETLTIADVPSERFTVEVETEILPAENKSLMGLYASGGNLFTQCEPEGFRKITFYIDRPDVMSKFTTTIVADKKRYPVLLSNGNKIDGGECSDGRHWVKWEDPFAKPSYLFALVAGDLAVTEDYFTTMSGRNVKIEFYTTEADKPKVGFAVESLKNAMKWDETRFGLEYDLDIFMVVAVGDFNMGAMENKGLNIFNTKFVLADSRTATDTDFEGIESVVGHEYFHNWTGNRVTCRDWFQLSLKEGLTVFRDQEFSGDRASRAVRRIENIRLLRQHQFPEDAGPTAHPVRPARYEEMNNFYTMTVYEKGAEVVRMYHTLLGEEGFQKGMKLYFQRHDGQAVTCDDFRAAMADANGINLDQFALWYSQAGTPVLEAEGRLKNNIFELTVKQTVPPTPDMADKQPMMIPVKIGLLNRNGEAAAFDYQGKRATEAVLLLTEAEQTFQFESVTEAVVPSLLRGFSAPVHLNYPYSDDDLLLLLAHDSDAFTRWEAAQTLYRRAVAANLAALSDGIELPKHEKLLAAVEKVISDDLLDNAFKALLLGVPSEAELWEGTENIDPLRYHQAHEALLDTIAVRFLPKWHELNRQAAKQENQSYEYSPEAAGWRTLRNVCRAFVLRADPAHIETVAEKYGEMAQNMTHEWGILSAVNGNESDTRNRLLAQFADKFSDDALVMDKYFALVGSSRRSDTLQQVQTALQHPKFSLENPNKARSLIGSFSRNVPHFHAEDGSGYRFIADKVIEIDRFNPQVAARLVQAFNLCNKLEPHRKNLVKQALQRIRAQEGLSKDVGEIVGKILD

SEQ ID NO: 1216 - protein, 399 aa, Neisseria meningitidis
MSDQLILVLNCGSSSLKGAVIDRKSGSVVLSCLGERLTTPEAVITFNKDGNKRQVPLSGRNCHAGAVGMLLNELEKHGLHDRIKAVGHRIAHGGEKYSESVLIDQAVMDELNACIPLAPLHNPANISGILAAQEHFPGLPNVGVMDTSFHQTMPERAYTYAVPRELRKKYAFRRYGFHGTSMRYVAPEAARILGKPLEDIRMIIAHLGNGASITAIKNGKSVDTSMGFTPIEGLVMGTRCGDIDPGVYSYLTSHAGMDVAQVDEMLNKKSGLLGISELSNDCRTLEIAADEGHEGARLALEVMTYRLAKYIASMAVACGGVDALVFTGGIGENSRNIRAKTVSYLDFLGLHIDTKANMEKRYGNSGIISPTDSSPAVLVVPTNEELMIACDTAELVGIL

SEQ ID NO: 1217 - protein, 97 aa, Neisseria meningitidis
MKTLVLLLLSFSTTTAFAAYGLGLGQAPKYPADFRAYGYVYSGRQGWVLKTEADAIKLDTLFKRFVYRPSAANQNPVGQAVGQRSDGIPANHTKEKP

SEQ ID NO: 1218 - protein, 356 aa, Neisseria meningitidis
MTKHIAILRGDGIGPEIVAETVRVLDKLIAQGLDVGYEYAPLGGEAYDEYGHPYPEFTQNLCRKADAVLLGAVGSPQYDNLDRPLRPERGLLAIRKDLNLFANLRPAILYKELANASTLKPEIVAGLDILIVRELTGDIYFGEPRGIRILENGEREGYNTMKYSESEIRRIAHVAFQSAQKRSKKVCSVGKANVLETTELWREVFEEIGKEYPDVELSHMYVDNAAMQLVRAPKQFDVIATGNIFGDILSDEASMLTGSIGMLPSASLDENGKGLYEPSHGSAPDIAGQNKANPLATVLSLAMLLRYSLNDEARAQQVENAVQKVLQQGLRTNDIYEEGTKLVSCSEMGDAVLAAL

SEQ ID NO: 1219 - protein, 242 aa, Neisseria meningitidis
MSQITMRQMIEAGVHFGHQTRFWNPKMAQYIFGARNKIHIVNLEKTLPMFQDAQEAVRRLVANKGTVLFVGTKRQARDIIREEATRAGMPFVDYRWLGGMLTNYKTVKQSIKRLEEKTAALENAAESGFSKKEILEMQRDVEKLERSLGGIKNMKGLPDAIFVIDTGYQKGTLVETEKLGIPVIAVVDTNNSPDGVKYVIPGNDDSAKAIRLYCRGIADAVLEGKNQALQETVAAAQEAAAE

SEQ ID NO: 1220 - protein, 462 aa, Neisseria meningitidis
MNTRTEHDTMGNVEVPSEAYWGAQTQRSRNNFKIGGETLPQPLIYALALVKKAAAATNVSLGRIKPEQADLITQAADDVLNGKLNGQFPLVVWQTGSGTQSNMNMNEVLANRANEIAGTGLAAYQPVHPNDHVNHAQSTNDAFPTAIHVAAAIEINRHLIPAVKALRDTLDKKAQAFAPIVKIGRTHLQDATPLTLGQEFSGYVSQLDHGLGRLNDALKDLYELALGGTAVGTGLNSHPEYAEKAAAKLAELSGLPFVSAPNKFEALGGRDAAVAASGALKTLAASLNKIANDIRWLASGPRCGLGEIKIPENEPGSSIMPGKVNPTQCEAMTMVWCQVFGNDVTIGMAGASGNFELNVYMPVIAYNLLQSIRLLGDACNSFNEHCAVGIEPVPEKIDYFLHHSLMLVTALNRKIGYENAAKVAKTAYKNNKSLRETAVELGLLTGEEFDELVVPADMVHPR

SEQ ID NO: 1221 - protein, 157 aa, Neisseria meningitidis
MEQKGFTLIEMMIVVAILGIISVIAIPSYQSYIEKGYQSQLYTEMVGINNISKQFILKNPLDDNQTIKSKLEIFVSGYKMNPKIAEKYNVSVHFVNKEKPRAYSLVGVPKTGTGYTLSVWMNSVGDGYKCRDAASAQTYSETLSADSGCEAFSNRKK

SEQ ID NO: 1222 - protein, 298 aa, Neisseria meningitidis
MFRLQFGLFPPLRTAMHILLTALLKCLSLLPLSCLHTLGNRLGHLAFYLLKEDRARIVANMCQAGMNPDPKTVKAVFAETAKGGLELALAFFKKPEDIETMFKSVHGWEHVQQALDKGEGLLFITPHIGSYDLGGRYISQRLPFPLTAMYKPPKIKAIDKIMQAGRVRGKGKTAPTSIQGVKQIIKALRSGEATIVLPDHVPSPQEGGEGVWVDFFGKPAYTMTLAAKLAHVKGVKTLFFCCERLPGGQGFDLHIRPVQGELNGDKAHDAAVFNRNAEYWIRRFPTQYLFMYNRYKMP

SEQ ID NO: 1223 - protein, 841 aa, Neisseria meningitidis
MNPNSKHNTNFTNLLKPSDSDIKQFAAQHICRLTDLLNRYAYEYYTLDAPSVPDAEYDKLFRELEALELNHPELKLPDSPTQRVGGEPLAGFAEVRHEVPMLSLTNAFSPQDENGVFDHAEMYAFDQRVRDGLDGGNPEYVIEPKFDGLAISLLYRDGVLVQAATRGDGTTGEDVTQNIKTVSNIPLRLHGENTPELIEVRGEVLMLKADFVALNKRQAENGQKPFANPRNAAAGSLRQLDSRITAQRKLHFFPYSVARQQDGFVAEEHIQELAYFQALGFSLPNGNFGCFKNIDEVLAFYEHMQQKRPELPYEIDGMVVKVNSLAQQHELGFISRAPRWAVAHKFPAEEALTIVEAIDVQIGRTGAVTPVARLQPVFVGGVTVTNATLHNQDEVSRKDVRVGDTVVVRRAGDVIPEVVRVIFERRPMRETAVAVSDGIGHRQDDLFAETPSANQTQSVPLHKPYRLPTHCPICRSEIEREEGEAVARCSGGMLCQAQRAQGLIHFASRKAMDIDGLGEKQIEQLVAQDLVRHFADLYRLDIPTLQKMKETADKTVAESDQMPSEGSSVGASGKHKKQPVKWAENILAGIEASKTPELARFLFALGIRHVGERTAKTLAQAFGTLERVRRAPEPVLACLPDIGTVVARSIAHFFAQAEQQAMIDELLAAGVAPQTQAVTIPPARHAEPQRWIARLPGFKISENKAQALWELAGKNIEGLQTDKALPTDWQAWRSEPQNAALLENLKTFFAQMPSEDEAAQGSDGINKAVAGKTFVLTGTLPTLKRDQAQSLIEAAGGKVSGSVSKKTDYVVAGEAAGSKLEKANALGVSVLSEAELLTLLG

SEQ ID NO: 1224 - protein, 751 aa, Neisseria meningitidis
MGQYKKLWYLLFAVLAVCFTILGYMGSEVYKKAPPYPEQVVSASGKVLMTKDDILAGQSAWQSTGGMEVGSILGHGAYQAPDWTADWLHRELVAWLDLTAQETYGKKFDEVSPEEQAVLKTRLADEYRNQSRVKEDGSVVISDTRVKAIESILPYYHGVYGDDPKLQTTREHFAMKNNTLPSQEAREKLFDFFFWTSWSASTNRPDETFTYTNNWPHEPLINNVPTTENYMWSFTSVVLLLMGIGLLMWGYSFLTKHEEVEVPTEDPISKVQLTPSQKALGKYVFLTVALFVVQVLLGGLTAHYTVEGQGFYGIDTALGFEMADWFPYALTRTWHIQSAIFWIATGFLTAGLFLAPIVNGGKDPKFQRAGVNFLYIALFIVVGGSYAGNFFALTHILPPEFNFWFGHQGYEYLDLGRFWQLLLMVGLLLWLFLMLRCTVSAFKEKGVDKNLLAIFVASMVGVGVFYAPGLFYGEKSPIAVMEYWRWWVVHLWVEGFFEVFATAAFAFVFYNMGFVRRSTATASTLAAAAIFMLGGVPGTLHHLYFSGSTSASMAIGACFSALEVVPLVLLGREAYEHWSYQHLSDWAKRLRWPLMCFVAVAFWNMIGAGVFGFLINPPISLFYIQGLNTSAVHAHAALFGVYGFLALGFVLLVARYLKPNAQFDDKLMTWGFWLLNGGLVGMIAISLLPVGVIQAYASITHGLWYARSEEFLQMEILDTLRWVRTAADLVFIGGAICVAIQATKIVFGRDK

SEQ ID NO: 1225 - protein, 359 aa, Neisseria meningitidis
MKTLTVHTPSHSYPIFIGNGLLPQAGSLLKPHLGKRAAIITNETVAPLYLGTLQTALDAAGVSHFSIILPDGEAHKNWQTLNLIFDGLMQNRAERKTTLIALGGGVIGDMTGFAAATYQRGAPFVQIPTTLLSQVDSSVGGKTAINHPLGKNMIGAFYQPQAVLADLDTLHTLPARELSAGMAEVIKYGTLGDISFFEWLEQHMPELMALERAPLIQAVYRCCQMKADIVAQDETEQGIRAWLNLGHTFGHAIETEMGYGTWLHGEAVAAGCVLAARLSEQLGKISAADTARLAALLEAAGLPSAPPVFAFEKWLEHMSHDKKVSSGVMRFIGLNRLGEAVITEITDTDILRRTLQPYL

SEQ ID NO: 1226 - protein, 154 aa, Neisseria meningitidis
MYKHLVVAVDGSETSINALKHAAELAGVNGARLTLVHVANPAEYMALAPEFLQHESYEAAAVAQGNEVLDAAERTARELGVENTVKHLLVANKGAREMAQDLVDYADENGADLLVLGTHGRTGLMHLLMGSFAETVMRQSHLPLLIIRSKAEEA

SEQ ID NO: 1227 - protein, 506 aa, Neisseria meningitidis
MQLIDYSHSFFSVVPPFLALALAVITRRVLLSLGIGILVGVAFLVGGNPVDGLTHLKDMVVGLAWSDGDWSLGKPKILVFLILLGIFTSLLTYSGSNQAFADWAKRHIKNRRGAKMLTACLVFVTFIDDYFHSLAVGAIARPVTDKFKVSRAKLAYILDSTAAPMCVLMPVSSWGASIIATLAGLLVTYKITEYTPMGTFVAMSLMNYYALFALIMVFVVAWFSFDIGSMARFEQAALNEAHDETTVSDATKGRVYALIIPVLALIASTVSAMIYTGAQASETFSILGAFENTDVNTSLVFGGTCGVLAVVLCTLGTIKTADYPKAVWQGAKSMFGAIAILILAWLISTVVGEMHTGDYLSTLVAGNIHPGFLPVILFLLASVMAFATGTSWGTFGIMLPIAAAMAVKVEPALIIPCMSAVMAGAVCGDHCSPISDTTILSSTGARCNHIDHVTSQLPYALTVAAAAASGYLALGLTKSALLGFGTTGIVLAVLIFLLKDKKRANA

SEQ ID NO: 1228 - protein, 186 aa, Neisseria meningitidis
MKTAQELRAGNVFMVGNDPMVVQKTEYIKGGRSSAKVSMKLKNLLTGAASETIYKADDKFDVVILSRKNCTYSYFADPMYVFMDEEFNQYEIEADNIGDALKFIVDGMEDQCEVTFYEGNPISVELPTIIVREVEYTEPAVKGDTSGKVMKTARLVGGTEIQVMSYIENGDKVEIDTRTGEFRKRA

SEQ ID NO: 1229 - protein, 305 aa, Neisseria meningitidis
MVLDGFAAHFDAYLENIVREGKSEHTVAAYRRDLEELFALLAQMPSEAEGGVPQGLSRRDFTAALRRLSQRGLNARTLARKLSSWRQYCVWLVERGLLHTDPTADIKPPKQPERVPKALPQEWLNRMLDLPVDGGDPLAVRDHALFELMYGSGLRVSEIHGLNADDVYLDEAWVHVTGKGRKQRQVPLTGKSVEALKNYLPLRQTASDGKALFTGRNGTRLSQRQIQKRLAQWAAQNGDGRHVSPHMMRHSYAGHLLQASRDIRAVQELLGHSSLSTTQIYTKLDFDHIARLYDEAHPRAKRQDE

SEQ ID NO: 1230 - protein, 208 aa, Neisseria meningitidis
MRKIRTKICGITTLEDAAAAAAAGADAVGLVFFQGSSRAVDIARAKKITAALPPFVSVVALFVNESAQNIRRILAEVPIHIIQFHGDEDDAFCRQFDRPYIKAIRVQTASDIRNAADRFPDAQALLFDAYHPSEYGGTGHRFDWTLLAEYSGKPWVLAGGLTPENVGEAVRITGAEAVDVSGGVEASKGKKDPAKVAAFIATANRLSR

SEQ ID NO: 1231 - protein, 423 aa, Neisseria meningitidis
MFQWLYDVLWLLAPIWIRRYLDKRSGSAPAYRAHRDERFGKPYPNPVTGAVWIHAVSVGETRAAQPLIRELRQRFPDAPLLMTQMTPTGRETAQVLFPDAQCRYLPYDKKTWVRQFLREHRPMFGILMETEIWPNLMKECRRTGVPLFLANARLSEKSLNGYLKVRRLIRPAAASLTGCLAQTEADAARLAKLGAASVQVCGNTKYDLMPSEQMKTLAGQFEKRIGDRQVAVCGSTRVYRGEDEAEKLLAAWQQYRGDALLVVVPRHPEHFQTAFETAKRFGFKVQRRSDGLPVEPDTQVWIGDSMGELYAYYLCADVAFVGGSLVDSGCQNIIEPLSCGVPTIFGFSTYNFSEACRHALASGAAVQVESADAWREAVEKTLSAEGGGMQMQARVDGFIAQHRGAGARIAEAVREAVCGHRGR

SEQ ID NO: 1232 - protein, 174 aa, Neisseria meningitidis
VLDREGYRPNVGIILINERNEVFWGKRVREHSWQFPQGGIKPGESPETAMYRELYEEVGLLPQHVKIVGRTRDWLRYDVPNNWVRREWRGSYRGQKQIWYLLRLTGRDCDVNLRATRHPEFDGWRWHQYWAPVDEVIEFKRDVYLGALKELSSRFLRGMESYEDFAARQPSGNR

SEQ ID NO: 1233 - protein, 82 aa, Neisseria meningitidis
MMVFDDIAKRKIRFQTRRGLLELDLIFGRFMEKEFEHLSDKELSEFSEILEFQDQELLALINGHSETDKGHLIPMLEKIRRA

SEQ ID NO: 1234 - protein, 176 aa, Neisseria meningitidis
MNAIRTFQNRTPEIHESCMIDEACVVIGEVSLAEDVSVWPCAVLRGDVNSITVGARSNIQDGSVLHVSHKTAAKPEGSPLVIGEDVTVGHKVMLHGCRIGNRVLVGMGSTVLDDAVIEDEVMIGAGSLVPPRKRLEGGYLYVGSPVRQVRVLTDEEKAFLKYSAAHYVKLSKQYGM

SEQ ID NO: 1235 - protein, 212 aa, Neisseria meningitidis
MSKLTPREILTAGAVVPVMAIDDLSTAVDLSYALVEGGIPTLEITLRTPVGLDAIRLIAKEVPNAIVGAGTVTNPEQLKAVEDAGAVFAISPGLHESLAKAGHNSGIPLIPGVATPGEIQLALEHGIDTLKLFPAEVVGGKAMLKALYGPYADVRFCPTGGISLATAPEYLALPNVLCVGGSWLTPKEAVKNKDWDTITRLAKEAAALKPKA

SEQ ID NO: 1236 - protein, 355 aa, Neisseria meningitidis
MGGKTFMLMAGGTGGHIFPALAVADSLRARGHHVIWLGSKDSMEERIVPQYGIRLETLAIKGVRGNGIKRKLMLPFTLYQTVREAQRIIRKHRVECVIGFGGFVTFPGGLAAKLLGVPIVIHEQNAVAGLSNRHLSRWAKRVLYAFPKAFSHEGGLVGNPVRADISNLPVPAERFQGREGRLKILVVGGSLGADVLNKTVPQALALLPDNARPQMYHQSGRGKLGSLQADYDALGVQAECVEFITDMVSAYRDADLVICRAGALTIAELTAAGLGALLVPYPHAVDDHQTANARFMVQAEAGLLLPQTQLTAEKLAEILGSLNREKCLKWAENARTLALPHSADDVAEAAIACAA

SEQ ID NO: 1237 - protein, 107 aa, Neisseria meningitidis
MDIVQLGPAELKAWMDEGRMFCLLDVRTDEETAVCSLPNALHIPMNLIPLRQNELPDDVPLVVYCHHGIRSLHTAMYLADAGFENLYNLQGGIDAWATEIDGNMMRY

SEQ ID NO: 1238 - protein, 71 aa, Neisseria meningitidis
LDAGEFSHFRINHSTHFAERQNHINGTENFWNQAKRHLRKFNGIPKAHFELYLKECEWRFNNSEIKVLVPF

SEQ ID NO: 1239 - protein, 113 aa, Neisseria meningitidis
MVERKLTGAHYGLRDWVMQRATAVIMLIYTVALLVVLFSLPKEYSAWQAFFSQTWVKVFTQVSFIAVFLHAWVGIRDLWMDYIKPFGVRLFLQVATIVWLVGCLVYSVKVIWG

SEQ ID NO: 1240 - protein, 166 aa, Neisseria meningitidis
MSQYFTLFRIEPAFDIDTENLEQTYRALAARFHPDKFASASAFEQKQAVMMSSTINDAYRTLKNPIDRAAYLLKTSGIDADAPEHTAFAPEFLMQQMEWRETLMEARAGNDLESLKNLDNEIRDEQEKLFCGLKQSFARQDYDTAAQQVRQGRFLDKLRNEISSAL

SEQ ID NO: 1241 - protein, 248 aa, Neisseria meningitidis; identical to SEQ ID NO: 802

SEQ ID NO: 1242 - protein, 90 aa, Neisseria meningitidis
MGSLFLPGGALLFLSVVSTTLPARLGMPLLLVSPAGVLDGAAEALAIAAFLMLVARPPAVFGGLWKFNYSLREKAYISWLGLAEPCRFRR

SEQ ID NO: 1243 - protein, 197 aa, Neisseria meningitidis
MKKIGLFGGTFDPIHNGHLHIARAFADEIGLDAVVFLPAGGPYHKDAASASAADRLAMVELATAEDARFAVSDCDIVREGATYTFDTVQIFRQQFPSAQLWWLMGSDSLMKLHTWKKWQMLVRETNIAVAMRQGDSLHQTPRELHAWLGNALQDGSIRILSAPMHNASSTEIRRAGVSDGIPPAAARYIREHGLYEK

SEQ ID NO: 1244 - protein, 259 aa, Neisseria meningitidis
MFFVLSPAKNLNEKDPAPVSEFTQPDLLAESDILMQQLRELAPQQIAELMHVSDKIALLNAQRNAEWNTPFTPENAKQAVFMFNGDVYEGMDANTLDIGQIRYLQNHVRLLSGLYGLLRPLDLIQPYRLEMGTAFANLRGKNLYEFWGDIITNLLNDTLAQAGSNTLVNLASQEYFKSVNTKKLRARLITPIFKDEKNGKYKIISFYAKRTRGLMVRYAAEHNITDPEMLKNFNYEGYVFNDAASNESEWVFMRSEQIK

SEQ ID NO: 1245 - protein, 162 aa, Neisseria meningitidis
MTVLTVILALALIAVGTAGIVYPALPGLALMFAGTWLLAYSGGYQIYGAGVLWTVGLISLAGILADYVAGILGVKYTGAGRLAVRGALVGSIVGIFFSLPGLILGPFIGAAAGELIDRRNMLQAGKAGLGTLLGLIVGTAFKIGCAVSILFILLVKYIAYLF

SEQ ID NO: 1246 - protein, 78 aa, Neisseria meningitidis
MSNIEQQVKKIVAEQLGVNEADVKNESSFQDDLGADSLDTVELVMALEEAFGCEIPDEDAEKITTVQLAIDYINAHNG

SEQ ID NO: 1247 - protein, 241 aa, Neisseria meningitidis
MPRFHLPENLSVGQTVALPDNIVRHLNVLRVRPNENITLFDGKGKAHAARLTVLEKRRAEAEILHEDTTDNESPLNITLIQSISSGERMDFTLQKSVELGVTAIQPVISERCIVRLDGERAAKRLARWQEIVISACEQSGRNTVPPVLPIIGYREALDKMPSESTKLIMSINRARKLGDIRQPSGAIVFMVGPEGGWTEQEEQQAFEAGFQAVTLGKRILRTETAPLAALAAMQTLWGDFA

SEQ ID NO: 1248 - protein, 235 aa, Neisseria meningitidis
MEKMSFEIYRYNPDVDAKPYMQRYELELEPTDVKLLDALVRLKAQDDTLSFRRSCREGICGSDGMNINGKNGLACLTDLRGLKQPVKIRPLPGLPVIRDLIVDMTQFFKQYHSVKPYVVNDNPIDADKERLQTQEERKELDGLYECILCACCSTACPSFWWNPDKFVGPSGLLNAYRFIADSRDTITNERLDNLNDPYRLFRCHTIMNCVDVCPKHLNPTRAIGKIKEIMLKRAV

SEQ ID NO: 1249 - protein, 57 aa, Neisseria meningitidis
MDKQKNAAFSTELVEKLKLKRALGRIQRFQVKIQGVPAERNQAQISKSGNSFISDGL

SEQ ID NO: 1250 - protein, 1328 aa, Neisseria meningitidis
MSVVLPLRGVTALSDFRVEKLLQKAAALGLPEVKLSSEFWYFVGSEKALDAATVEKLQALLAAQSVEQTPKAREGLHLFLVTPRLGTISPWASKATNIAENCGLAGIERIERGMAVWLEGALTDEQKQQWAALLHDRMTESVLPDFQTASKLFHHLESETFSTVDVLGGGKEALVKANTEMGLALSADEIDYLVENYQALNRNPSDVELMMFAQANSEHCRHKIFNADFILNGEKQPKSLFGMIRDTHNAHPEGTVVAYKDNSSVIEGAKIERFYPDAAENQGYRFHEEDTHIIMKVETHNHPTAIAPFAGAATGAGGEIRDEGATGKGSRPKAGLTGFTVSNLNIPDLKQPWEQAYGKPDHIASPLDIMIEGPIGGAAFNNEFGRPNLLGYFRTFEEKFDGQVRGYHKPIMIAGGLGSIQAQQTHKDEIPEGALLIQLGGPGMLIGLGGGAASSMDTGTNDASLDFNSVQRGNPEIERRAQEVIDRCWQLGDKNPIISIHDVGAGGLSNAFPELVNDAGRGAVFKLREVPLEEHGLTPLQIWCNESQERYVLSILEKDLDAFRAICERERCPFAVVGTATGDGHLKVRDDLFSNNPVDLPLNVLLGKPPKTTRTDKTVTPYATEGNPFGKKPFNAGDIDITEAAYRVLRLPAVAAKNFLITIGDRSVGGMTHRDQMVGKYQTPVADCAVTMMGFNTYRGEAMSMGEKPAVALFDAPASGRMCIGEAITNIAAVNIGDIGNIKLSANWMAACGNEGEDEKLYRTVEAVSKACQALDLSIPVGKDSLSMKTVWQDGADKKSVVSPLSLIISAFAPVEDVRKTVTPELKNVEDSVLLFIDLGFGKARMGGSAFGQVYNNMSGDAPDLDDTSRLKAFYNVIQQLVAEDKLLAYHDRSDGGLFAVLVEMAFAGRCGLDIDLNLLLAQTFITNHTALSQSLRTEEVKALAEWQETIARTLFNEELGAVIQVRKQDVADIINLFYQQQLHHNVFEIGTLTDENTLIIRDGQTHLISDNLIKLQQTWQETSHQIQRLRDNPACADSEFALIGDNERSALFADVKFDVNEDIAAPFINSGAKPKIAILREQGVNGQIEMAAAFTRAGFDAYDVHMSDLMAGRFRLADFKMLAACGGFSYGDVLGAGEGWAKSILFHPALRDQFAAFFADPDTLTLGVCNGCQMVSNLAEIIPGAEAWPKFKRNLSEQFEARLSMVHVPKSASLILNEMQGSSLPVVVSHGEGRADFALHGGNISADLGIALQYVDGQNQVTQTYPLNPNGSPQGIAGITNADGRVTIMMPHPERVYRAAQMSWKPEGWTELSGWYRLFAGARKALG

SEQ ID NO: 1251 - protein, 101 aa, Neisseria meningitidis
MRVSKIIGSMLLVTAVQTVFSANVYACRHNGKTSYSQTPGKHCTNAGLGRDRVYSSVRPAVKDRAEDAGVGDYSDTVRDEHVQNPRENTHKDASNTGAKTH

SEQ ID NO: 1252 - protein, 119 aa, Neisseria meningitidis
MRLKLKNYDCSDFDLEDFPQDKLENFCILLTLSIGFDESNGADYFYVYIYSTEWLLSNIHRPMSLKNSIVTNRFNIEHILKLINDILEICNSTSEDKSISNLAKYFDWEFDDYNLNIQD

SEQ ID NO: 1253 - protein, 394 aa, Neisseria meningitidis
MTEPTSRRRFLKTCTAAAGAGLLQACGTSATSVPPLPSSHSVVKARTVPLQTPRRQSSDGNLLRVVASSGFAEDTNRVNTALTRLYNAGFTVTNQQAGSRRFQRFAGTDAQRVADFQEVASGRVATPKVLMGLRGGYGAARILPHIDFASLGARMREHGTLFFGFSDVCAVQLALLAKGNMMSFAGPMAYSDFGKPAPGAFTMDAFIKGATQNRLTVDVPYIQRADVETEGILWGGNLSVLASLAGTPYMPDIDGGILFLEDVGEQPYRIERMLNTLYLSGILKKQRAIVFGNFRMEKIRDVYDPSYDFSAVANHVSRTAKIPVLTGFPFGHIADKITFPLGAHARIRMNGNSGYSVAFEGYPTLDASALTLDTLLPPPDLPIFPESGVADISE

SEQ ID NO: 1254 - protein, 116 aa, Neisseria meningitidis
LVCAIAQDAETKRVLMVAWMNAEALQKTVETGFAHYYSRSRQKQWMKGEESGHTQKVRELRLDCDGDAIVMLIAQNGGIACHTGRESCFYKVWRGGAWETADAVLKDEKEIYGSTH

SEQ ID NO: 1255 - protein, 317 aa, Neisseria meningitidis
MNHKKIVVLDADTLPGRVFHFDFPHELAVYGTTGADETAERVRDAHIVITNKVMISADIIAANPQLELIAVSATGVNNVDIGAAKAAGVAVCNVRAYGNESVAEHAFMLMIALMRNLPAYQRDVAAGLWEKSPFFCHYGAPIRDLNGKTLAVFGRGNIGRTLAGYAQAFGMGVVFAEHKHAPDVREGYVSFEDAVRTADVLSLHCPLNAQTENMIGENELRQMKPGAVLINCGRGGLVDENALLAALKYGQIGGAGVDVLTEEPPRGGNPLLNARLPNLIVTPHTAWASREALDRLFDILLANIHAFVKGEAQNRVV

SEQ ID NO: 1256 - protein, 260 aa, Neisseria meningitidis
MNPAPKKPSLLFSSLLFSSLLFSSAAQAASEDGSRSPYYVQADLAYAAERITHNYPEPTGADKDKISTVSDYFRNIRAHSIHPRVSVGYDFGGWRIAADYASYRKWKESNSSTNTENSETQQNRIKIETGHQGNGSFHAASSLGLSAIYDFKLNDKFKPYIGARVAYGYVKHQVHSVESKTKTVTPKPNGGPVKEGPTPKPAYHESHSISSVGLGVIAGVGFDITPKLTLDTGYRYHNWGRLENTRFKTHEVSLGMRYRF

SEQ ID NO: 1257 - protein, 55 aa, Neisseria meningitidis
MFAKHYQFIALGIMLLLYMLILYTTDFSNLTYWMLFFICFITGKILARLLEKSFK

SEQ ID NO: 1258 - protein, 419 aa, Neisseria meningitidis
MKQTVLKNNLQNLLESAENILLLQGPVGDFFLRLADWLTANGKTVHKFNFNAGDDYFYPPTQAHTVVFNDNYDAFPEFLQEYITQHHIQAVVCFGDTRPYHVIAKRIANENQASFWAFEEGYFRPYYITLEKDGVNAFSPLPRRADFFLEQFPKLAQQEYKAPTPVHGGFTPMAKNAIRYYIELFRNPRKYPDYIHHRAPNAGHYLKPWSLSILKRLNYYIEDIQIAKRVEAGKYGKFFIVPLQVFNDSQVRIHCDFPSVRSFLLHVLSSFAEHAPADTNIIIKHHPMDRGFIDYWRDIKRFIKEHPELKGRVIYVHDVPLPVFLRHGLGMVTINSTSGLSGLIHNMPVKVLGRAYYDIPGITDQNTLAEFWNHPTPPDKELFHAYRMYHLNVTQINGNFYSQVFFPNKKTSDSSTPAT

SEQ ID NO: 1259 - protein, 78 aa, Neisseria meningitidis; identical to SEQ ID NO: 1011

SEQ ID NO: 1260 - protein, 80 aa, Neisseria meningitidis
MTNLKLDFYSEVIIKDSCPNDLLENGETIKGKKGVVLGISEEDGIIYGYTILLFDIKYCIYIDKKYIIPTGKKFSRDDFY

SEQ ID NO: 1261 - protein, 181 aa, Neisseria meningitidis
MKHYALLISFLALSACSQGSEDLNEWMAQTRREAKAEILPFQAPTLPVAPVYSPPQLTGPNAFDFRRMETDKKGENAPDTKRIKETLEKFSLENMRYVGILKSGQKVSGFIEAEGYVYTVGVGNYLGQNYGRIESITDDSIVLNELIEDSTGNWVSRKAELLLNSSDKNTEQAAAPAAEQN

SEQ ID NO: 1262 - protein, 107 aa, Neisseria meningitidis
MIVDEKSTSDVLKQYQELGFDLTKPMIIEFFIGGSQKNLQSIESRLISYRQDFQISIEQNEFGEMWTCYCSVNIVPSLENILAIETTLFGIAQKNDCNYEGFGSYGN

SEQ ID NO: 1263 - protein, 41 aa, Neisseria meningitidis
MQVLSSLKTAKQRHRDCQIVRRKGKVYVICKSNPRFKARQR

SEQ ID NO: 1264 - protein, 182 aa, Neisseria meningitidis
MNLSNHFLVAMPDMEDAFFSQSVVYICKHDEDGALGIAINKPSPITMDMIFSATGKNIPMRMQHDSVMMGGPVQVDRGYVVHTPIGNWQSSIGVSDNIALTSSRDVIENISREGAVDKALISIGYSSWGKGQLERELADNAWLTVPADEHILFDIPYEHRYAAAFAKLGIDPLALHGKAGHA

SEQ ID NO: 1265 - protein, 218 aa, Neisseria meningitidis
VASVFLEGEAVEVGNIFCIGRNYAAHIEELKNEIPSEPVVFMKPSGSILNSGGTILLPEFSRDVQFECELVLLVGKDSDGMGEGKDILGCVAGYGVGLDLTARDIQCRLKAQGLPWLKAKGFRHSACVSDFAAAGRIGNPEKMLFSLKQNGVLKQRGDTGLMIYPIREILHKLAADYGLGKGDLVFTGTPSGVGAIGAGDNLALELDGLVHASFTVGC

SEQ ID NO: 1266 - protein, 927 aa, Neisseria meningitidis
MANNKTLFEVIENERKAVKKYKPELLEMPEFTSKNLKYDFFEWQKSALENFLIFDRTSKLDDFPDLKNKPTHLLFNMATGAGKTMMMAALILYYFEKGYRHFLFFVNQNNIVDKTENNFIDPTHAKFLFTEKILQGDTVIPIRKVETFSPHSDGIEIKFTSIQKLYNDIHTERENQTTLADLHELNLVMLGDEAHHLNAQTKGKKQGELDLEVELKANAGNAEIERKGWEHMVLELLLNKNGNPSQNVLLEFTATLPENADVQQKYADKIITKFGLKEFLQKGYTKEINLVSSTLGKKERVLHALLFAWYRHQIALKYGIANFKPVMFFRSKTIDESKADYLAFLNWAENVQAVDFSFLTTFSTSLNDSDSDNANEQGKTRTEQALKFMQEKGVEFAHLADWVKQNYQKHNVIITNSETNKTKTEKTDSETEKLLNNLEAADNPIRAIFTVDRLTEGWDVLNLFDIVRLYEGQNGGGSNKKSGKTAAATVSEKQLIGRGVRYFPFAFEGKQPNKRKFDNDMQHELRILEELFYYTHDEQSRYISELKNELRKDGYLPEKDDDKVLATFKLKSEFAANKDFRELLIWANKKIPNPNAKTNNANSLQANPQTLSFQVHGNQLLQETQFTADENDEKVKQLGTQNNFTQTIKMSEMERHIFNKALHIKGKNSQSLFHFDRLQSKLNIQNRNELQNKLLKDWQIEFLGLGQDKQVRLDDKLAGCLKILEMVEKHLNESDMPFIGTKEFTPKKLWEIFGTPKQKWVKKDDVKTTIATQNDWYVMNNFAGTGLEEALIQFISARLGDLKSQYDVHLIRNEEVFKLNNFADGEGFMPDFILLLKDKQKSSSNGVNDFLHYQIFIEPKGEHLVETDGWKEEFLEAITVEYGMDKILQKDTPHYRLIGLPFFTDHQKNGQFTESFPLGAASLEKMK

SEQ ID NO: 1267 - protein, 170 aa, Neisseria meningitidis
MKNFNGKLILIGLMGAGKTTLGRQMAQRLDYRFYDSDHEIAAAAGVPIPTIFEMEGEQGFRSRETAILKKLVILPHIVLSTGGGAVLKEENRALIRKSGTVVYLHAPPETLLERTRCDNSRPLLQVADPLAKLRELYAARDPVYRQTADFTVESANCRETVQTLLKRLSR

SEQ ID NO: 1268 - protein, 348 aa, Neisseria meningitidis
MKMQAVVVNKNVAGDVEIVEREVRPLEYGEALVEVEYCGVCHTDLHVAAGDYGEKPGRVLGHEGIGLVKEVADGVKNLKVGDRVSIAWLFQSCGSCEYCNTGRETLCRSVLNAGYTADGGMATHCIVSADYAVKVPEGLDPAQASSITCAGVTTYKAIKVSGVRPGQWIAIYGAGGLGNLGVQYAKKVFGAHVVAIDINDDKLAFAKETGADLVVNAAKEDAAKVIQEKTGGAHAAVVTAVSAAAFNSAVNCVRAGGRVVAIGLPPESMDLSIPRLVLDGIEVVGSLVGTRKDLEEAFQFGAEGLVVPKVELRALDEAPAIFQEMREGKITGRMVIDMKKECGCGHHH

SEQ ID NO: 1269 - protein, 230 aa, Neisseria meningitidis
MNEILRQPSVLLFLTLAVYALAIIVRTRTGNIFCNPVLVSTIVLIAYLKILDIDYAVYHNAAQFIDFWLKPAVVVLAVPLYQNRRKIFNQWLPVIVSQLAGSVTGIVTGMYFAKWLGAEREVVLSLASKSVTNPIAIEITRSIGGIPAITAATVIIAGLVGQIAGYKMLKNTVVMPSSVGMSLGTASHAMGIAASLERSRRMAAYAGLGLTFNGVLTALIAPLLIPVLGF

SEQ ID NO: 1270 - protein, 190 aa, Neisseria meningitidis
LEKAAENNMPKDNVQRAIDKGTGNLEGVEYIELRYEGYGIGGAALMVDCLTDNKTRTVADVRHAFTKNGGNLGTDGCVAFNFVHQGYLVFEPGVDEDALMEAALEAGAEDVVTNDDGSIEVITAPNDWAGVKSALEAAGYKSVDGDVTMRAQNETELSGDDAVKMQKLIDALEDLDDVQDVYTSAVLNLD

SEQ ID NO: 1271 - protein, 392 aa, Neisseria meningitidis
MTGRTGRNGSTQAQPERVMLVGVMLDKDGTGSSAARLNGFQTALAEAVELVKAAGGDSVRVETAKRDRPHTALFVGTGKAAELSEAVAADGIDLVVFNHELTPTQERNLEKELKCRVLDRVGLILAIFARRARTQEGRLQVELAQLSHLAGRLIRGYGHLQSQRGGIGMKGPGETKLETDRRLIAHRINALKKQLANLKKQRALRRKSRESGTIKTFALVGYTNVGKSSLFNRLTKSGIYAKDQLFATLDTTARRLYISPECSIILTDTVGFVSDLPHKLISAFSATLEETAQADVLLHVVDAAAPNSGQQIEDVENVLREIHAGDILCIKVYNKTDLLPSEEQNTGIWRDAAGKIAAVRISVAENTGIDALREAIAEYCATAPNTDETEMP

SEQ ID NO: 1272 - protein, 242 aa, Neisseria meningitidis
LSHAVLPGAAVGYMFAGLSLPAMGLGGVAAGMLMALLAGLVSRFTTLKEDANFAAFYLSSLAIGVVLVSKNGSSVDLLHLLFGSVLAVDIPALQLIAAVSTLTLLTLAVIYRPLVLESIDPLFLKSVGGKGGLWHVLFLVLVVMNLVSGFQALGTLMSVGLMMLPAITARLWAKHMGALILLSVLTALLCGLSGLLISYHIEIPSGPAIILCCSVLYLFSVILGKEGGILTKWLKNHRHHTT

SEQ ID NO: 1273 - protein, 360 aa, Neisseria meningitidis
MPSEAASDGILPLYPTRTIFQKPIMLPFLPEPSLSYTQQNRTAVLLLNLGTPDAPTAQTVRPYLKSFLTDRRVVELPKWLWYPILHGLVLTLRPKKSAHAYEKIWFKEGSPLEVYTARQAAALAERMPDLIVRHAMTYGNPSVADVLSELKAQGAGRLLVIPMYPQYAASSSGAAVDKVCEQLLLQRNQMSVRTVSRFYDDTGYIDAMKNHILRYWAEHGRGKKLMLSFHGVPQKHHDLGDPYPDECRHTAKLLAEALELAEDQYVVSFQSQFGRAKWVTPSTQDLFGKLPKQGVTELDVFCPGFLADCLETLEEIALMGREQFYEAGGKSYRYIPCLNDNPDWIDALVALAEENLGGWR

SEQ ID NO: 1274 - protein, 136 aa, Neisseria meningitidis
MIEFVRAKKRLLWAFVLLLVWTCGYRYAADKAEAEQTALIATYRHSSMVAAEQYALQLKKAQDERQRWYDFSQKQGRKPVKKQYPPQTKKAGYLKTKEELLAELACLTAEMAALKKPDALIHGKEVRQKERNSSQG

SEQ ID NO: 1275 - protein, 469 aa, Neisseria meningitidis
MTAQTLYDKLWNNHVVREEEDGTVLLYIDRHLVHEVTSPQAFEGLKMAGRKLWRIDSVVSTADHNTPTGDWDKGIQDPISKLQVDILDKNIKEFGALAYFPFMDKGQGIVHVMGPEQGATLPGMTVVCGDSHTSTHGAFGALAHGIGTSEVEHTMATQCITAKKSKSMLIAVDGKLKAGVTAKDVALYIIGQIGTAGGTGYAIEFGGEAIRSLSMEGRMTLCNMAIEAGARSGMVAVDQTTIDYVKDKPFAPKGEAWDKAVEYWRTLVSDEGAVFDKEYRFNAEDIEPQVTWGTSPEMVLDISSKVPNPAEETDPVKRSGMERALEYMGLEAGTPLNEIPVDIVFIGSCTNSRIEDLREAAAIAKDRKKAANVQRVLIVPGSGLVKEQAEKEGLDKIFIEAGFEWREPGCSMCLAMNADRLTPGQRCASTSNRNFEGRQGNGGRTHLVSPAMAAAAAVTGRFTDIRMMA

SEQ ID NO: 1276 - protein, 199 aa, Neisseria meningitidis
LLLSCRLKHVSDGIGLHQIRIKMGIYDFQMKDAEGNAVDLSGYRGKVLLIVNTATRCGLTPQYEALQKLYAQYTAEGLEILDFPCNQFREQAPESSGEIAQVCMMKFGTKFKIFDKIEVNGANTAPLYAYLKSVKPQDKGNHLFKDFVLKLAALGEKRDEGDIKWNFTKFLVNRDGEVVERFAPSVTPEEIEADIRALL

SEQ ID NO: 1277 - protein, 288 aa, Neisseria meningitidis
VENVETHSPTHRKRLLGTFSLVGLENLWMLVLYPVFGGRAINAVIAGEVWQALLYALVVLLMWLVGAARRIADTRTFTRIYTEIAVPVVLEQRQRQVPHSAVTARVALSREFVSFFEEHLPIAATSVVSIFGACIMLLVLEFWVGVSAVGILALFLWLLPRFAAISENLYFRLKNSLERDNHFIRKGDRRQLYRHYGLLARLRVLISNREAFGYLCVGTAMGILFGFAFVMMTLKGYSSAGHVYSVGTYLWMFAMSLDDVPRLVEQYSNLKDIGQRIGGLERNIKAGT

SEQ ID NO: 1278 - protein, 103 aa, Neisseria meningitidis
MFNQTQTVTYPATFLGAKKFKGEIDGSNIDTCSVLVATPLPAQSGNAVGFTAAQMKFGDSKNFSRLENLKYPCEVMVMVEMTSTGKGMVPSLIDFQVAEKPKG

SEQ ID NO: 1279 - protein, 69 aa, Neisseria meningitidis
MAESRQTRLQVKCPTCQTAVVWKPENAFRPFCSQRCKLIDLGGWADEEYTVTAQEEGLLEISEPDGAYR

SEQ ID NO: 1280 - protein, 231 aa, Neisseria meningitidis
MKLKTLALTSLTLLALAACSKQAETSVPADSAQSNTSAPATPAALTEGINYTVLSNPIPQQQAGKIEVLEFFGYFCPHCAHLEPVLSEHIKTFKDDTYMRREHVVWGDEMKPLARLAAAVEMAGESDKANSHIFDAMVNQKINLADTDTLKKWLSEQTAFDGKKVLAAFEAPESQARAAQMEELTNKFQISGTPTVIVGGKYQVEFKDWQSGMTTIDQLVDKVREEQKKPQ

SEQ ID NO: 1281 - protein, 131 aa, Neisseria meningitidis
MAKANTASRVRKKVRKTVSEGIVHVHASFNNTIITITDRQGNALSWATSGGAGFKGSRKSTPFAAQVAAEAAGKVAQEYGVKNLEVRIKGPGPGRESSVRALNALGFKITSITDVTPLPHNGCRPPKKRRI

SEQ ID NO: 1282 - protein, 48 aa, Neisseria meningitidis
LPNTMAALPLYNGIDCKSFPLFLKECEFRFNFGTPSQQLKILRDWCGI

SEQ ID NO: 1283 - protein, 228 aa, Neisseria meningitidis
MFDFGLGELVFVGIIALIVLGPERLPEAARTAGRLIGRLQRFVGSVKQEFDTQIELEELRKAKQEFEAAAAQVRDSLKETGTDMEGNLHDISDGLKPWEKLPEQRTPADFGVDENGNPFPDAANTLLDGISDVMPSERSYASAETLGDSGQTGSTAEPAETDQDRAWREYLTASAAAPVVQTVEVSYIDTAVETPVPHTTSLRKQAISRKRDLRPKSRAKPKLRVRKS

SEQ ID NO: 1284 - protein, 187 aa, Neisseria meningitidis
MKLIILDRDGVINQDRDDFVKSVDEWIPVEGSMDAVAFLTQAGYTVAVATNQSGIGRKYFTVQNLTEMHAKMHRLVRQAGGEINGIWFCPHTGADGCGCRKPKPGMIEDILERFNAQASETWLVGDSLRDLQAIDAVGGKPALVLTGKGKKTLSQHGHELPEHTQVFDTLLDFSQYIMQENAAPQAD

SEQ ID NO: 1285 - protein, 475 aa, Neisseria meningitidis
MNENFTEWLHGWVGAINDPMWSYLVYMLLGTGLFFTVTTGFVQFRLFGRSIKEMLGGRKQGDDPHGITPFQAFVTGLASRVGVGNIAGVAIAIKVGGPGAVFWMWVTALIGMSSAFVESSLAQLFKVRDYDNHHFRGGPAYYITQGLGQKWLGVLFALSLIFCFGFVFEAVQTNTIADTVKAAWGWEPHYVGVALVILTAPIIFGGIRRISKAAEIVVPLMAVLYLFIALFIILTNIPMIPDVFGQIFSGAFKFDAAAGGLLGGLISQTMMMGIKRSLYSNEAGMGSAPNAAAAAEVKHPVSQGMIQMLGVFVDTIIVCSCTAFIILIYQQPYGDLSGAALTQAAIVSQVGQWGAGFLAVILFMFAFSTVIGNYAYAESNVQFIKSHWLITAVFRMLVLAWVYFGAVANVPLVWDMADMAMGIMAWINLVAILLLSPLAFMLLRDYTAKLKMGKDPEFKLSEHPGLKRRIKSDVW

SEQ ID NO: 1286 - protein, 287 aa, Neisseria meningitidis
MNNAFALPAIQSGNGSLEQYIHTVNRIPMLTQEEETRLAERQHKGDLNAAKQLILSHLRVVVSIARGYDGYGLNQADLIQEGNIGLMKAVKRYEPGRGARLFSFAVHWIKAEIHEFILRNWRLVRVATTKPQRKLFFNLRSMRKNLNALSPKEAQDIADDLGVKLSEVLEMEQRMTGHDIAIMADNSDDEDSFAPIDWLADHDSEPSRQLSKQAHYALQTEGLQNALAQLDDRSRRIVESRWLQDDGGLTLHQLAAEYGVSAERIRQIEAKAMQKLRGFLTEEAEAV

SEQ ID NO: 1287 - protein, 92 aa, Neisseria meningitidis
MNIRTAFALCAIALSAAAAAYAKEIKIDANNTPYSEADAQKLAATAVGMGVKEPISLNGGSGSITVSGSSATQCVFKVGNGGALQIQGLNCK

SEQ ID NO: 1288 - protein, 494 aa, Neisseria meningitidis
MSKPVFKKIALYTLGAISGVAVSLAVQGFAAEKDRRDNEVLPVQSIRTMAEVYGQIKANYYQDKPDADLFEGAMKGMVAGLDPHSEYMDKKGYAEIKESTSGEFGGLGMEIGQEDGFVKVVSPIEDTPAERAGVKSGDFIVKIDNVSTRGMTVSEAVKKMRGKPGTKITLTLSRKNADKPIVVNLTRAIIKVKSVRHHLIEPDYGYIRVSQFQERTVESVNTAAKELVKENKGKPLKGLVLDLRDDPGGLLTGAVGVSAAFLPSEAVVVSTKGRDGKDRMVLKAIPEDYVYGMGGDSLAGIPAELKTIPMTVLVNSGSASASEIVAGALQDHKRAVIVGTQSFGKGSVQTLIPLSNGSAVKLTTALYYTPNDRSIQAQGIVPDVEVKDKERIFESREADLVGHIGNPLGGEDVNSETLAVPLEKDADKPAVKEKGKKKKDEDLSSRRIPNPAKDDQLRKALDLVKSPEQWQKSLGLAAKKPVSNKDKKDKKDKK

SEQ ID NO: 1289 - protein, 256 aa, Neisseria meningitidis
MDCPSEEQLIRMRLKDVSDIYELQFDIAGRCLTVYHDNQDTTILQVLEPLNFDSHIISTEVIVDKIVFNKPDEHLEKRLLYQVLMINFVFFIIECSVGIFANSMGLIADSLDMLADSFVYILALSAIGMTLAYKKRVAFLAGITQIILALFGVIEVIRRFIGAEQLPNYQLMIGTAFLALIANWLCLYLLSKNQNKEIHIKASMIFTSNDIIINIGVIAAGALTLLTHSSYPDLIIGMIVFVIVLFGARNILKLAK

SEQ ID NO: 1290 - protein, 554 aa, Neisseria meningitidis
MLLTLSLRDFVIVENLNLDFQSGFTVLTGETGAGKSITLDAIGLLLGDKADYSQVRSGAKEAQLSALFDISHLPVLKAELYEQGLLNDGEEELSIRRIIDAKGKSRSFINNQAATLAQLKAVGSQLIDIHGQNAHHSLNQEAAQRELLDAFAGSRAQAETVRQLYQNWANSKKALQEAQEQAENIALEQERLEWQFNELNQLDIKQGEWEALSQSHDSLAHSAELLQAAEEVGSKIDGDNGIQRHIYQCQKLLANLQNIEPRFAESLNMLASIEAELGEISANMRDVAGRSDINPNELAAQEQRMGELMGMARKYRIEPEELPAKLAEIEERLQAAADLDALEHNVAHNFAEYQEAAHILSAMRHQAAERLSGETTEHMQHLAMKGARFDIVLLPSSPTAHGLEQVQFQVAANKGNPPRPLNKVASGGELARISLALQVVASQYTQVPTLIFDEVDTGIGGGVAEMVGKALRALGRKHQVLAVTHLPQVASCGENHWRVRKHSEGEQTVSEISILDEIQRIEEVARMLGGEVITDTTRQHAAELLQLASKNSLF

SEQ ID NO: 1291 - protein, 426 aa, Neisseria meningitidis
MENSLKEAALKFHELPVPGKISVTPTKSLATDKDLALAYSPGVAAPCMEIHADPQNAYKYTAKGNLVAVISNGTAVLGLGDIGALAGKPVMEGKGVLFKKFAGVDVFDIEIDEKDPQKLVDIIAALEPTFGGINLEDIKAPECFYIERELRKRCKIPVFHDDQHGTAIITAAAVLNALRFTGRKIEEATLVCSGAGAAAIACLNQLLDLGLKRENVTVCDSKGVIYQTREDKDRMDESKQFYAIEDNGQRVLADAVKGKDIFLGLSGANLLTPEMLNTMNEKPIVFAMANPNPEILPPLAKETRPDVVIGTGRSDFPNQVNNVLCFPFIFRGALDVGATTINEEMKRACVYALADLAMEEVTEEVVAAYGKKFEFGAEYLIPTPFDSRLLPRVATAAAKAAMESGVATRPIADFEAYAAKLGEWKL

SEQ ID NO: 1292 - protein, 76 aa, Neisseria meningitidis; identical to SEQ ID NO: 841

SEQ ID NO: 1293 - protein, 140 aa, Neisseria meningitidis
MNKNRKLLLAALLLIAFAAVKLVLLQWWQAQQPQAVAAQCDLTEGCTLPDGSRVRAAAVSTKKPFDIYIEHAPVGTEQVSISFSMKNMDMGFNRYMFERQPSGTWQAVRIRLPICVEGRRDFTADITIGSRTFQTAFTAE

SEQ ID NO: 1294 - protein, 72 aa, Neisseria meningitidis
MMTESHGYLSNNLPVKIINDIIYATQLVEDLVLGKIKIVDFLKSYNNFYCWLGFDELPQSEKIKFLSYLNIL

SEQ ID NO: 1295 - protein, 125 aa, Neisseria meningitidis
MCEFKDFRRNIPCFEEYDENSFIGKWYDDGVWDDEEYWKLENDLIEVRKKYPYPMDIPRDIVIGIGTIIDFLMVPNWELFEIKASPWLPDSVGIHERYERFTTMLRYIFTEKDIVNVRFDYYNKK

SEQ ID NO: 1296 - protein, 123 aa, Neisseria meningitidis
MAITKEDILEAVGSLTVMELNDLVKAFEEKFGVSAAAVAVAGPAGAGAADAEEKTEFDVVLASAGDQKVGVIKVVRAITGLGLKEAKDIVDGAPKTIKEGVSKAEAEDIQKQLEEAGAKVEIK

SEQ ID NO: 1297 - protein, 371 aa, Neisseria meningitidis
MKVGFVGWRGMVGSVLMQRMKEENDFAHIPEAFFFTTSNVGGAAPDFGQAAKTLLDANNVAELAKMDIIVTCQGGDYTKSVFQALRDSGWNGYWVDAASSLRMKDDAIIVLDPVNRNVIDNGLKNGVKNYIGGNCTVSLMLMALGGLFQNDLVEWATSMTYQAASGAGAKNMRELISGMGAVHAQVADELADPAGSILDIDRKVSDFLRSEDYPKANFGVPLAGSLIPWIDVDLGNGQSKEEWKGGVETNKILGRSDNPTVIDGLCVRVGAMRCHSQAITLKLKKDLPVSEIETILAGANDWVKVIPNEKEASIHELTPAKVTGTLSVPVGRIRKLGMGGEYISAFTVGDQLLWGAAEPLRRVLRIVLGSL

SEQ ID NO: 1298 - protein, 58 aa, Neisseria meningitidis
MAITVEKLKENFAKNGQTLAQWARENGFKPRDVYLVVGGQRKGNYGKGHEIAKKLGLK

SEQ ID NO: 1299 - protein, 142 aa, Neisseria meningitidis
MISIFKAYYDVYEFNGELLKRCIFLDEENEENNEIIKDRIYEYLIYVLTGDLYLQKDIDENLEFIHQAENNPNEVYSGGGQGFCWDISAEKVVFYNNEFDEEDGWPDLSCSLHTFKTTLIAWNAFLQLPKSIHSVVETVIEE

SEQ ID NO: 1300 - protein, 148 aa, Neisseria meningitidis
MAIANNKKAFHDFFIEDRIEAGLVLEGWEVKAIRAARVQLKESYIYWKKDAFYLVGCHITALPTASTHIKPDAVRPRKLLLNQSEINKLIGKTERAGYTIVPLDLHFSRGKIKMEIGLAKGKKQHDKRQSMKEADWKREKQRLIKHTR

SEQ ID NO: 1301 - protein, 539 aa, Neisseria meningitidis
MDNLVWDGVPDIRTLDQTIRKHAHPLNLIVCLPDNQIPDFQTAQDASDAECRLKHRLDQATQCLQFDSINLIEHILPDVRFWLVPPSRTRRLHEHFHHISWQTEAIPQTESKPDKPWFALPQTSERQKPEHILVIGAGISGAATAHALASYGISVTVLEARKAAQAASGNRQGLLYAKISPHNTEQTELLLTGYGYTKRLLGHILPESETWGGNGIIHLNYSRTEQQRNHELGLQKHHNHLYRSITQAEAEKIAGIPLSVPYDHPSCGLYWQHGVWLNPPAFVRALLNHPLIGLHEDTPLTDISHDGEKWIASTPNGIFSATHIIYCTGAHSSCLPETNLAALPLRQIRGQTGLTPSTPFSEQLRCAVSGESYISPSWHGLHCYGASFIPNSSHTGWNEAEEASNRQALAQLSPALAESLFAANPIPQKHQGHAAMRCDSPDHLPLVGALGDIAAMQQTYAKLALDKNYRIDAPCPYLPNAYANTAHGTRGLATAPICAAAVAAEILGLPHPLSKRLRHALHPNRTIIRAIVRRKDLTP

SEQ ID NO: 1302 - protein, 306 aa, Neisseria meningitidis
MPNPLYRQHIISISDLSREQLECLLQTALKLKAHPRGDLLEGKLIGSCFFEPSTRTRLSFETAVQCLGGKVIGFSDGANTSAKKGETLADTARIISGYTDAIIQRHPKDGAARVAAEFSRVPVINAGDGTNQHPSQTLLDLVTIYETQGRLDKLKIAMAGDLKYGRTVHSLCQALKRWGCEFAFVSPPSLAMPDYITEELDEAGCRYRILGSLEEAAEWADILYMTRVQRERFDEQEFAKIQGKFNLEASMLARAKPNLRVLHPLPRVDEIHPDVDATPHAYYFEQATNGVYARMAILSLVLNEEV

SEQ ID NO: 1303 - protein, 444 aa, Neisseria meningitidis
VGEPENKSSEPVREIQASKEMPSETSSPRKENETEVHIPAAPFIVKQSGSNALAVCALVLAALGLGTSGFLFVQGQNVLKNQELAFNQKIDKAALGESENAALLKDNLNRQAAIQSELDRLDGNVKANGEQILEMQKSYRELTKGRADWLVDETETILNLAAQQLVLTGNIQTAVGVLEHIDSRLSRFDQAELLPIKQAVSSDLAELKNRPYVDISGTALRLDRLETAVSGLPLILDGVLKPGVQVKNEAASASWWQNVWEKSLGTLKGLVEIRRLENNDAMLISPEQAYFVRENLRLRLLDARTALMQRNSEVYQGDLNNAEAAVRQYFDAKSPATQSWLKELAELKALDVRMTADDGLKNSLNAVRAYRDGTRMTAAENQEAEQAASEPANENTASEPAAASDVKTIEAPSLPSERKPEQPAKKQPVPEKAGRSPSAKGERA

SEQ ID NO: 1304 - protein, 172 aa, Neisseria meningitidis
MAKTRIKQPAIEAAQDKTEVTAFIRQIGDLQREVKRLETEAGDKKAAIEEEYAAKAAPMCAEIMSLTERVAAYCEAHKDELTENGKTKTVDFTTGLIKWRIRPPSVKVTGVAAVLAWLSEKSAFAEFVRTKKEIDKDTILNQKECFSDGQVPGIKIVSGVEDFVIEPSEQIL

SEQ ID NO: 1305 - protein, 209 aa, Neisseria meningitidis
MNLFQNAKFFTTVNHLKDLPDTPLEIAFVGRSNAGKSSAINTLTNHVRLAYVSKTPGRTQHINFFELQNGNFMVDLPGYGYAQVPEAVRAHWVNLLGDYLQQRKQLIGLVLIMDARHPLKELDIRMLDFFHTTGRPVHILLSKADKLSKNEQIKTLSQVKKLLKPYSDRQNISVQLFSSLKKQGIDEANRTVGSWFDAADAAASSPKEN

SEQ ID NO: 1306 - protein, 126 aa, Neisseria meningitidis
LAEGQKSAVTEYYLNHGIWPANNNSAGVATSANIKGKYVEKVEVKNGVVTATMLSTGVNNEIKGKQLSLWAKRQDGSVKWFCGQPVKRANANGATNATADGVTADSGKQIDTKHLPSTCRDASSAS

SEQ ID NO: 1307 - protein, 599 aa, Neisseria meningitidis
LEVGAKPAFFALQSAPDLLLNLPVWKNTFMKASQFFISTLKEAPAEAALASHKLMIRAGLIKANASGLYTWMPMGLRVLRKVENVVREEMARAGSVELLMPVVQPAELWQESGRWEFYGKELLRLKDRHDRDFCMGPTCEEVIADIVRKEINSYKQLPKNFYHIQTKFRDEVRPRFGVMRAREFVMKDAYSFHADYASLQTTYDAMYDSYCRIFTRLGLAFRPVAADTGSIGGTGSHEFQVLAESGEDVIAYSDTSDYAANIELAPTLPLKGERAAAQAVLTKVHTPNVKTIESLVEFLNIPVEQTLKSIVVEGENEGEIVLLLLRGDHEFNDIKAEKLAGVRSPLTMASPAAIVEQFGANGGSLGPVSFAGKVYADFATEKGADWVIGANEDGYHYTSFNFGRDAAEPEFVDLRNVVEGDESPDGQGRLKLARGIEVGHVFQLRDKYTKAMNVSFLDNNGKSQIMEMGCYGIGITRVVAAAIEQNNDEKGIIWTKAMAPFEVVIVPMNYKKSDTVREAADKIYAELLAAGADVLLDDRDERAGVLLNDSELLGIPHRIVIGDRALKEGNVEYAERRNNEAQAVAIGEIVARVTASLNA

SEQ ID NO: 1308 - protein, 398 aa, Neisseria meningitidis
VTVGYGFSASGDYSQSKIRANHASVTEQSGIYAGEDGYQIKVGNHTDLKGGIITSTQSAEDKGKNRFSTGTLAGSDIQNYSQYEGKSFGLGASASISGKTLGQGAQNKPQNKHLTSVADKNGASSSVGYGSDSDSDSQSSITKSGINTQNIQITDEAAQIRLTGKTAAQTKADIDTNVTTDTAERHSGSLKNVFDKDRVQSELDLQRTVSQDFSKNVQQANTEINQHLDKLKADKEAAETAAAEALANGDMETAKHKAHEAQDAAAKADNWQQGKVILNMLASGLAAPTQSGAGIAAATASPAVSYAIGQHFKDLAGQNANGKLTASQETAHVLAHAVLGAAVAAAGGNNAPAGALSAGGSEAAAPYISKWLYGKEKGSDLTAEEKETETFAKFPKIP

SEQ ID NO: 1309 - protein, 264 aa, Neisseria meningitidis
VAEELARSDKRVGVVHGGFASFQTALDGLGIGKVDGALFDLGISSPQIDDGSRGFSFRFDAPLDMRMDTMRGMSAAEWIAVASEQDLHEVIKNYGEERFSRQIARAIVAQRAESPIDTTRKLAQIVAQNVRTRERGQDPATRTFQAIRIFINRELEEVGAVLPQVMCRLKEGGRLAVIAFHSLEDRIVKQFVKKYSQHAPLPRWAAVREADLPEPPLKIAGRALKPGEAEIAANPRARSAVLRVAERTAGPIPEQSQRKTSEWQ

SEQ ID NO: 1310 - protein, 346 aa, Neisseria meningitidis
MDISDFDFTLPEKLIAQHPPEVRGSSRLLVALPDMPLQDRVFGDLPDYVEAGDVLVFNNTKVMKARLFGQKDSGGRIEALIERVLDSHTALAHIRSSKSPKPGMGLVFEGGIRAVMVGREGELFCLRFEGGETVYELLEQNGHLPLPPYIERAADADDDSRYQTVYAKYQGAVAAPTAGLHFTEELLRRLKDKGAVTAEVTLHVGAGTFQPVRVDKIEEHKMHSEWFEVPSETAAAVEAAKARGNKVWAVGTTSMRALESAARATGRLKAGQGDTDIFITPGYRFNVVDRLVTNFHLPKSTLLMLVSAFSGMGHIRAAYRHAVEREYRFFSYGDAMVLGRNEGVVR

SEQ ID NO: 1311 - protein, 232 aa, Neisseria meningitidis
MKSRHLALGVAALFALAACDSKVQTSVPADSAPAASAAAAPAGLVEGQNYTVLANPIPQQQAGKVEVLEFFGYFCPHCAHLEPVLSKHAKSFKDDMYLRIEHVVWQKEMLPLARLAAAVDMAAADSKDVANSHIFDAMVNQKIKPQNPEVLKKWLGEQTAFDGKKVLAAYESPESQARADKMQELTETFQIDGTPTVIVGGKYKVEFADWESGMNTIDLLADKVREEQKAAQ

SEQ ID NO: 1312 - protein, 71 aa, Neisseria meningitidis
VFKLGVYACLGLFAGWVLLLIVQLWFSFIEAELFFKITLTMAGLFVIILAALLVCGQYFSEKKMKDDGFIN

SEQ ID NO: 1313 - protein, 144 aa, Neisseria meningitidis
VAKKIIGYIKLQIPAGKANPSPPVGPALGQRGLNIMEFCKAFNAATQSMEPGLPIPVVITAFADKSFTFVMKTPPASILLKKAAGLQKGSSNPLTNKVGKLTRAQLEEIAKTKEPDLTAADLDAAVRTIAGSARSMGLDVEGVV

SEQ ID NO: 1314 - protein, 344 aa, Neisseria meningitidis
MQTLTIIRPDDMHLHLRDGDALKAVVPYTARQMGRAVIMPNLKPPVVSVADALAYKARIMAALPEGSAFEPLMTLYLTDNATSELVREAKAAGIVAFKLYPAGATTNSDSGVTDLFKLIPVLEEMAKQGILFLVHGEVTDPEIDIFDREAAFIGRVMKPVLAQVPNLKVVFEHITTAEAARLVLEAGDNVAATVTPQHLLLNRNDLLVGGVRPHHFCLPVLKRETHRQALVAAVTGEKAHKFFLGTDSAPHAKSAKENACGCAGMFSAMTAVELYAEVFEKAGALDKLEAFASKNGARFYGIPENAGTITLVKQSQTVPASVPYGDGELVPMRAGGEIGWTVQY

SEQ ID NO: 1315 - protein, 758 aa, Neisseria meningitidis
MAQTTLKPIVLSILLINTPLLAQAHETEQSVGLETVTVVGKSRPRATSGLLHTSTASDKIISGDTLRQKAVNLGDALDGVPGIHASQYGGGASAPVIRGQTGRRIKVLNHHGETGDMADFSPDHAIMVDTALSQQVEILRGPVTLLYSSGNVAGLVDVADGKIPEKMPENGVSGELGLRLSSGNLEKLTSGGINIGLGKNFVLHTEGLYRKSGDYAVPRYRNLKRLPDSHADSKTGSIGLSWVGEKGFIGAAYSDRRDQYGLPAHSHEYDDCHADIIWQKSLINKRYLQLYPHLLTEEDVDYDNPGLSCGFHDDDNAHAHTHNGKPWIDLRNKRYELRAEWKQPLPGFEALRVHLNRNDYHHDEKAGDAVENFFNNKTQNARIELRHQPIGRLKGSWGVQYLQQKSSALSAISEAVKQPMLLDNKVQHYSFFGVEQAEWDNFTLEGGVRVEKQKASIQYDKALIDRENYYKQPLPDLGAHRQTARSFALSGNWYFTPQHKLSLTASHQERLPSTQELYAHGKHVATNTFEVGNKHLNKERSNNIELALGYEGDRWQYNLALYRNRFGNYIYAQTLNDGRGPKSIEDDSEMKLVRYNQSGADFYGAEGEIYFKPTPRYRIGVSGDYVRGRLKNLPSLPGREDAYGNRPFIAQDDQNAPRVPAARLGVHLKASLTDRIDANLDYYRVFAQNKLARYETRTPGHHMLNLGANYRRNTRYGEWNWYVKADNLLNQSVYAHSSFLSDTPQMGRSFTGGVNVKF

SEQ ID NO: 1316 - protein, 183 aa, Neisseria meningitidis
MPSERRPFQTAFLSNRKTVGKLAERVQSRYDGLHKFKHICSAAMALIKEPLDKAKQRNEELEAAEEAAAQEALGREQEAARVSEWEERYKLSRSEFEQFWKGLPQTVQNKLQASQKTWKSGMDKICANNAKAEGETPNGIKVSELACKTVETEARLEELYNRKKALIDEMVREADKKELPKRL

SEQ ID NO: 1317 - protein, 374 aa, Neisseria meningitidis
VCGLCHKTVPAPIAGASGDWKSCLKNVQCRTFLKRGPIMHIGGYFIDNPIALAPMAGITDKPFRRLCREFGAGWAVCEMLTSDPTLRNTRKTLHRSDFVDEGGIVAVQIAGSDPQQMADAARYNVSLGAQLIDINMGCPAKKVCNVQAGSALMQNEPLVAAILEAVVRAAGVPVTLKTRLGWHEDHQNLPVIAKIAEDCGIAALAVHGRTRTQMYKGEARYELIAETKCRLNIPVWVNGDITSPQKAAAVLKQTAADGIMIGRGAQGRPWFFRDLKHYAEHGVLPPALSLAECSAAILNHVRAMHAFYGETAGVRIARKHIGWYIDEMPDGEQTRREINRLDSAAAQYDMLAGYLERLAGKTDRWACAYRPNAF

SEQ ID NO: 1318 - protein, 291 aa, Neisseria meningitidis
MAYLLISIVFSVSVSILLKMARKKKIDIAQAVAVNYVVAVILTLLVLKPDVGNIGAFLPTWPLFAALGVLLPSVFVIMGKSVESAGIVKSDAAQRLSLFLPIVAALTLFGEKLSEGKLIGLCLAFAALFCLLWKHSGGKKSGSAWRQAALLLGVWAGYGIIDILFKQLAKSGTAFAGNLLVAFVLAGVLMFACLFAKSVRWRAESVVGGILLGGLNFMNIVTYITAHQMMKDNPTLVFAGMNIGVIVLGTLSGALFFKEKINTINTAGIVLALCSIACLFYWGEVKVLFGI

SEQ ID NO: 1319 - protein, 675 aa, Neisseria meningitidis
LSLSEFIERRTSFNPMVILTTLFFVCVLVVLVLTVPDQAQMWLDRAKEVIFTEFSWFYVLTFSIFLGFLLILSVSSLGNIRLGRDEDVPEFGFLSWLAMLFAAGMGVGLMFFGVAEPLMHYFSDITAGTPEHRQQQALLHTVFHWGVHAWSVYGTIALALAYFGFRYKLPLALRSCFYPLLKEKISGRFGDAIDIMALLATFFGIITTLGFGASQLGAGLQEMGWIAENSFSVQVLIIAAVMSLAVVSAISGVGKGVKVLSELNLSLAFLLLFFVLAAGPTVYLLSAFGDNIGNYLGNLVRLSFKTYAYEREHKPWFESWTVLYWAWWCSWAPFVGLFIARISKGRTIREFVFGVLLIPGLFGVLWFTVFGNTAIWLNDGVAGGVLEKMTSSPETLLFKFFNYLPLPELTSIVSLLVISLFFVTSADSGIYVLNNITSRDKGLSAPRWQAVMWGVLMSAVAVLLMRSGGLGNLQSMTLIVSLPFALLMLIMCFSLWKGLSADKKYFETRVNPTSVFWTGGKWKERLVQIMSQTQEQDILKFLKHTASPAMHELQRELSEEYGLSVRVDKMFHQDEPAIEFVIRKETMRDFMYGIKSVGQDVSDQLINDGKLPHIRHQTTYKPYAYFFDGRVGYDVQYMNKDELIADILKNYERYLMLLDDVGQELMAHEQVELAE

SEQ ID NO: 1320 - protein, 220 aa, Neisseria meningitidis
MDSRKFTEASKRRLSELLDAKSEQGNTMRCDEVQGFMTALLSGPDKLTPLDWLPEVLGDESQFTAAERSEIERLVLAMAMETTAAMSDKKLPDLWLYENEDGGSDFYTWCNAYLYGLDIVPTDWFEAVDDEAFEELFYPIMALGGIYDEEDNGTIRLQFTEGELAELESELPYALADIYRYWQAVINKPQTVRREGEKTGRNDPCPCGSGRKYKACCGKN

SEQ ID NO: 1321 - protein, 244 aa, Neisseria meningitidis
MSANVSRLVVQNLQKSFKKRQVVKSFSLEIESGEVVGLLGPNGAGKTTSFYMIVGLIAADAGSVMLDGQELRHLPIHERARLGVGYLPQEASIFRKMTVEQNIRAILEISTKDKSRIDGEVEKLLADLNIERLRNNPAPSLSGGERRRVEIARVLAMKPHFILLDEPFAGVDPIAVIDIQKIIGFLKSRGIGVLITDHNVRETLSICDRAYIISDGTVLASGKPDDLVGNEQVRSVYLGKNFKY

SEQ ID NO: 1322 - protein, 193 aa, Neisseria meningitidis
MNLRDDLQLIYDRIPEGSRVLDLGCGDGELLAALVEHKKCSGYGIEIDTDSVIAAMSRGVNVIQADLEEGLTAFNDQSFDVIVLSQTIQAMQNTEKILRCLMRVAKQAIVSFPNFGYWRNRVQIALGGHMPVSERMPYHWYDTPNIHWCTLKDFDLLCAKNNIRVLERAVMTGNRQVKHFPNLLGSLAFYRVG

SEQ ID NO: 1323 - protein, 282 aa, Neisseria meningitidis
MLSKISESLANLSGAERKVAECALAEPKWFVHAAVAEIAERASVSQPTVIRFCRSLGYKGLPEFKLALSASIGHEGMPYVHEELNADDDMASVVEKVLGNAAASLLGERRFLKESELENAIATLMHARRVEFYGVGNSGIVAQDAQHKFFRFGMSTVAYVDTHTQLMAASVLSDQDVLVAISNTGSSIELLDAVSIAKENGASVIALTRNDSPLAQLADCVLSVATQENAELYTPMVSRLLQLAVIDILAIGLALRLGDAASLQLQKSKKSIHNKHIDYDKD

SEQ ID NO: 1324 - protein, 92 aa, Neisseria meningitidis
LLCTQTDGDNAQKKTTTYKEQDPAKVTHYLTQPAEFSDYQRVYLDETGFDRYLFRPYARSLKGQIVKAQISGKRYSGLTKIRTRRRSRRQYK

SEQ ID NO: 1325 - protein, 187 aa, Neisseria meningitidis
VQDKNNLCWLDMEMTGLNPETDRIIEVAMIITDSDLNVLAQSEVYAVHQSDELLDNMDEWNTATHGRTGLTQRVRESSHTEAEVEQKLLDFMSEWVPERTTPMCGNSIHQDRRFMVKYMPKLENYFHYRNLDVSTLKELAKRWNPPVAKSVVKRGSHKALDDILESIEEMRHYREHFLISAPRAEAQ

SEQ ID NO: 1326 - protein, 225 aa, Neisseria meningitidis
MQADFNRPVLAIDTGTSHLSLALRADGETRLFHQEAGSRQSELILPEIRTLFHDVGITAADLGAIVYAKGPGAFTGLRIGIGVAQGLATPFDTPLIGVPSLDAAASLPPPQSCILAATDARMGEVFYAWFDTLNCRRLSDYQVGRAADIRLPEGCAFSDGIGNAFALENRPPFSGKPDMPTAADFLNLAAEGGFPAVAAAHAELLYVRNKIALTAKEQAERRARP

SEQ ID NO: 1327 - protein, 282 aa, Neisseria meningitidis
MDFKQFDFLHLISVSGWEHLAEKAWAFGLNLAAALLIFLVGKWAAKRIVAVMRAAMTRAQVDATLISFLCNVANIGLLILVIIAALGRLGVSTTSVTALIGGAGLAVALSLKDQLSNFAAGALIILFRPFKVGDFIRVGGFEGYVREIKMVQTSLRTTDNEEVVLPNSVVMGNSIVNRSTLPLCRAQVIVGVDYNCDLKVAKEAVLKAAVEHPLSVQNEERQAAAYITALGDNAIEITLWAWANEADRWTLQCDLNEQVVENLRKVNINIPFPQRDIHIINS

SEQ ID NO: 1328 - protein, 311 aa, Neisseria meningitidis
LDEDETRIPLCLPAFNKILQYGSLHRQSCTASAFYARYLWCGRLAERAAQSLNMPSEAVALATPVWQKMGMHQANVLTAEYLNVGTDEAERLCRDLSAFYGDIPWRFVPVLPELWLVSLPRAYRWGAKPVLDLGGLLGTDDQPDGEDALEWLRVQTEIQMWLAAHPVNHNRKKRGLPELNGLWLWDSLHGSSQGGTLFADTVWSRFHPDRRALPDNFRAYEETAAHLPDTHHILFMDDLRLTALTGDRERYASVLQQWEEHWFAPIYEAVRTGKIKRLDITTDGQHGGTLTFKPADRWKFWRGAKTFDGIW

SEQ ID NO: 1329 - protein, 418 aa, Neisseria meningitidis
MKVLVLGAGVAGVSSAWYLAEAGHEVTVIDRAEGVAMETSFANAGQLSYGYTTPWAAPGIPTKALKWLFKSHPPLLFRPDGSLYQIEWLWQMLQNCTAAHYQTNKERMVRISEYSREMFRRFEAQTGMNFEERKKGTLQIFRQTKEVEAAEQDIAVLERYGVPYRRLKPEECAEFEPALARVTAKIASGLHLPADATGDCRLFTENLYKLCQEKGVRFHFNQTISRIDHNGLRIKTVETETGRFEADAVVCALGCFSRTVLAQLDLNLPIYPVKGYSLTLPVTNSDGAPVSTVLDESYKVAITRFDNRIRVGGMAELSGYEIKLPEKRRETLALVVNDLFPEGGDLSQASFWSGLRPMTPDSTPLIGRTRFDNLFLNTGHGTLGWTMSLGSAKLTADIVSGKDTEIRSDDLSLSRYQA

SEQ ID NO: 1330 - protein, 739 aa, Neisseria meningitidis
VFRRWFLPCWVVGAAASFALPVVPHWLFWLAAFAVFAVFARRFAFAGLMLCVLAGAAYGVFRTEAALSSQWWAEAVSGVPLTVEVADMPRSDRRRVQFAAKAVDSGGRTFDLLLSDYKRREWAVGSRWRITARVHPVVGELNLRGLNREAWALSNGIGGAGTVGADRVLLHGGSGWGIAVWRSRISRNWQQADADGGLSDGIGLMRALSVGEQSALRPELWQAFRPLGLTHLVSISGLHVTMVAVMFAWLAKRLLACSPRLPARPRAWVLAAGCAGALFYALLAGFSVPTQRSVLMLAAFAWAWRRGRLSAWATWWQALAAVLLFDPSAVLGVGTWLSFGLVAALIWACSGRLHEGKRQTALRGQWAASVLSLVLLGYLFASLPLISPLVNAVAIPWFSWVLTPLALLGSVVPFAPLQQLGAFLAEYTLRFLVWLADVSPEFAVASAPLPLLVLAVCAALLLLLPRGLGLRPWAVLLLAGFVFYRSPGVPENEVAVTVWDAGQGLSVSVQTANHHLLFDTGTAAAAQMGIVPSLNASGIRYLDYLVLSHHDSDHDGGFQAVGKIPNGGIYAGQPEFYEGARHCAEQRWQWDGVDFEFLMPSERKNIDDNGKSCVLRVVAGGAALLVTGDLDTKGEESLVGKYGGNLYSQVLVLGHHGSNTSSSGVFLNAVSPEYAVASSGYANAYKHPTEAVQNRVRAHGIKLLRTDLSGALQFGLGRGGVKAQRLRGYKFYWQKKPFE

SEQ ID NO: 1331 - protein, 117 aa, Neisseria meningitidis
MKQIIILQSAVLSICAAVAFAVWGFAGFLSAVGGGLSYLLPTFVAVLLLKLFRGNPFLQSRMFVFGEILKVVLSLLSMLAVFAVWHQSLVFAPFLMGLLGVSHLVFLVLLRVKDYGR

SEQ ID NO: 1332 - protein, 387 aa, Neisseria meningitidis
MRKKLTALVLSALPLAAVANVSLYGEIKAGVEGRNYQLQLTEAQAANGGASGQVKVTKAKSRIRTKISDFGSFIGFKGSEDLGEGLKAVWQLEQDVSVAGGGATQWGNRESFIGLAGEFGTLRAGRVANQFDDASQAIDPWDSNNDVASQLGIFKRHDDMPVSVRYDSPDFSGFSGSVQFVPAQNSKSAYKPAYVDEKKMVHAAVVGKPGSDVYYAGLNYKNGGFAGSYAFKYARHANVGRDAFELFLLGSTSDEAKGTDPLKNHQVHRLTGGYEEGGLNLALAAQLDLSENGDKAKTKNSTTEIAATASYRFGNAVPRISYAHGFDLIERGKKGENTSYDQIIAGVDYDFSKRTSAIVSGAWLKRNTGIGNYTQINAASVGLRHKF

SEQ ID NO: 1333 - protein, 271 aa, Neisseria meningitidis
VAKIIVVTSGKGGVGKTTTSASIATGLALRGYKTAVIDFDVGLRNLDLIMGCERRVVYDLINVIQGEATLNQALIKDKNCENLFILPASQTRDKDALTREGVEKVMQELSGKKMGFEYIICDSPAGIEQGALMALYFADEAIVTTNPEVSSVRDSDRILGILQSKSHKAEQGGSVKEHLLITRYSPERVAKGEMLSVQDICDILHIPLLGVIPESQNVLQASNSGEPVIHQDSVAASEAYKDVIARLLGENREMRFLEAEKKSFFKRLFGG

SEQ ID NO: 1334 - protein, 262 aa, Neisseria meningitidis
MLTLYSETFPSRLLLGTAAYPTPEILKQSVRTARPAMITVSLRRAGCGGEAHGQGFWSLLQETGVPVLPNTAGCQSVQEAVTTAQMAREVFETDWIKLELIGDDDTLQPDVFQLVEAAEILIKDGFKVLPYCTEDLIACRRLLDVGCQALMPWAAPIGTGLGAVHAYALNVLRERLPYTPLIIDAGLGLPSQAAQVMEWGFDGVLLNTAVSRSGDPVNMARAFALAVESGRLAFEAGPVEARDKAQASTPTVGQPFWHSAEY

SEQ ID NO: 1335 - protein, 207 aa, Neisseria meningitidis
MKIIHKGLVEYLPTFEAMKTFNAGRNADTEDELWVVEHPPVFTQGLAGKPEHLLIRDDIPVVQIDRGGQITYHGPGQLVVYTMIDFKRRKTSVRNIVSALENSIIATLAEYGIEAAADPKRPGVYVGERKIASLGLRIKNGSVYHGLALNVNMDLSPFTHINPCGYAGMEMTQIADFVQPCPTPDEVAAKLTAHLETQFTPKADNNE

SEQ ID NO: 1336 - protein, 155 aa, Neisseria meningitidis
MTELQHPVLVVDDETDILDLMEMTLMKMGLRVHTASGVAEAKNKLDSQRYSLVLTDMRMPDSSGLEVVQHINSRLLDTPVAVITAFGNADQAQEALRCGAFDPDTMQIQDYLDQIERDIIEQTLKQTEGNRTQAAKRLGISFRSMRYRMERLNIG

SEQ ID NO: 1337 - protein, 64 aa, Neisseria meningitidis
VGINANPNCADEAGKLIWENDPNKNWWANRMDDIRGIIQGAVNPLIYKVSKQKIIYNNKLISGT

SEQ ID NO: 1338 - protein, 508 aa, Neisseria meningitidis
LAYIYDGLCNLRFDDTNPEKENDEYVNAIKEDVEWLGFHWAGEPRFASNYFDQLYDYAVGLIKDGKAYVDDLTPEEMREYRGTLTEAGKNSPYRDRSVEENLDLFTRMKNGEFPDGSKTLRLKIDMASGNINMRDPVIYRIRRAHHHNTGDKWCIYPMYDYTHCISDAIEGITHSLCTLEFEAHRPLYDWVLDNIHAPHATRPRQYEFSRLELLYTITSKRKLNQLVVEKHVSGWDDPRMPTISGMRRRGYTPEGLRLFAKRAGISKSENIVDMSVLEGAIREELENSAPRLMAVLNPLKVTLTNFEAGRTQSRRAAFHPNHEEMGEREVPISQTIYIEADDFAENPPKGFKRLIPGGEVRLRHGYVIKCDEVVKDEAGNVVELKCSIDHDTLGKNPEGRKVKGVIHWVSAEHAAEIKVRLYDRLFTIERPDAVRGEDGEYLPFTDFLNPESVKEITAYAEPAAKDLPAESRWQFERIGYFVTDRKDHGKDTPVFNRTVTLKDSWQPK

SEQ ID NO: 1339 - protein, 320 aa, Neisseria meningitidis
MPSISVRRLFDDNQYKLQLAWAAGNSGADNRIGVEADKPVLALVGHLNFIHPNQIQVVGLAESEYLNRLESGETGYQFGDLFDISMSLVIVANGLPVSPGLRDYCHKNDIPLLTSKLESPYLMDVLRIYLQRTLAASSVKHGVFLDVFEIGVLITGHSGLGKSELALELISRGHSLIADDAVELFRIGPETLEGRCSPMLRDFLEVRGLGILNIRHIFGETSIRPKKILQLIINLVEADDEYMKQLDRLSIRTETESILNVNVRSVTLPVAVGRNLAVLVEAAVRNYILQLRGKDSTREFLERHQTQLKENEQNHENRPD

SEQ ID NO: 1340 - protein, 133 aa, Neisseria meningitidis
MRKLNNHDVHKRYQDRLEEDVEFTINYELPLSCLWSTIKDFSSDFEEKTEAFFILFKELLRRGHLKLQRDGQIIGHTPEEWEQIFREVWSEYEIEPNPLPGYAPFDIGMWLTVEAPAYAVWIDPEDGSEYWAG

SEQ ID NO: 1341 - protein, 217 aa, Neisseria meningitidis
MKITHCKLKKKVQKELLRFFVLEVTARSAADILGIHPNSAALFYRKIRTVINHHLALAADEVFEGSVEPDESDFGGRRKGRRGRGAAGKVVVFGILKRNRRIYTVVVDNAKSETLLPVIKKKIMPDSIVYTDSLSSYDKLDVSGFIHHRINHSKEFADRQNHINGIENFWNQAKRVLRKYNGIDCKSFPLFLKECEFRFNFGTPSRQLKILQDWCGI

SEQ ID NO: 1342 - protein, 436 aa, Neisseria meningitidis
VLTLDAFEQCLKDCFPQGLNGKKTAVALSGGLDSVVLLHLLVRAGKRAGFVPEALHIHHGLSPRADDWADFCQNYCDMLGVGLETVKVCVEKNGLGIEAAARQKRYAAFAEKGFDVLALAHHRDDQIETFMLAVARGGGLRALAAMPTVRPFGEKGIIWRPLLPFSRQDIWDYAQKHGLPNIEDESNSDTAYLRNRFRHRILPELSAQIPHFGRHVLNNVRALQEDLALLDEIIGQDCRWVCGAGYFDTARWLTFSPRRKTHILRHFLKENGIPVPNQNALADIARVLTEAKTGRWNVQGFELHHYAGRLFVFRPEKTDKLRFLKDRQISGNLREILAGQGFVLKRHPFGLPGHLLEQDGILRTVAASDRLAVGGIHKDVKKILQEKRVLPALRPFWPVVADKDNRPLALANYGTDFQISVSDGILPVHPDFPVLF

SEQ ID NO: 1343 - protein, 650 aa, Neisseria meningitidis
MRFAVALLSLLGIASVIGTVLQQNQPQTDYLVKFGPFWAQIFGFLGLYDVYASAWFVVIMMFLVVSTSLCLIRNVPPFWREMKSFREKVKEKSLAAMRHSSLLDVKIAPEVAKRYLEVQGFQGKTINREDGSVLIAAKKGTMNKWGYIFAHVALIVICLGGLIDSNLLLKLGMLTGRIVPDNQAVYAKDFKPESILSASNLSFRGNVNISEGQSADVVFLNADNGILVQDLPFEVKLKKFHIDFYNTGMPRDFASDIEVTDKATGEKLERTIRVNHPLTLHGITIYQASFADGGSDLTFKAWNLGDASREPVVLKATSIHQFPLEIGKHKYRLEFDQFTSMNVEDMSEGAEREKSLKSTLNDVRAVTQEGKKYTNIGPSIVYRIRDAAGQAVEYKNYMLPVLQEQDYFWITGTRSGLQQQYRWLRIPLDKQLKADTFMALREFLKDGEGRKRLVADATKDAPAEIREQFMLAAENTLNIFAQKGYLGLDEFITSNIPKEQQDKMQGYFYEMLYGVMNAALDETIRRYGLPEWQQDEARNRFLLHSMDAYTGLTEYPAPMLLQLDGFSEVRSSGLQMTRSPGALLVYLGSVLLVLGTVLMFYVREKRAWVLFSDGKIRFAMSSARSERDLQKEFPKHVESLQRLGKDLNHD

SEQ ID NO: 1344 - protein, 195 aa, Neisseria meningitidis
MPSEKAFIQHLRTASFQGLHLHHFHQKVGKCGVVGFDIHIFPTLLPAAQGILDIQLGLFRIDCAPLAVYRRTQVDFIHTVIDGIASDQAFSEVVQILRRLNLGHFTDTHLIAQARRFIADFGNIRPMRRGKAETFCRCFRFDGIDRIHGDFRQCGHINRLAAGKNCRNGKRDKVFFHAPIIIKFALRKQIVRQEK

SEQ ID NO: 1345 - protein, 875 aa, Neisseria meningitidis
MPAGRLPRRCPMMTKFTDCTRSNRIQPPTHRGYILKNNRQIKLIAASVAVAASFQAHAGLGGLNIQSNLDEPFSGSITVTGEEAKALLGGGSVTVSEKGLTAKVHKLGDKAVIAVSSEQAVRDPVLVFRIGAGAQVREYTAILDPVGYSPKTKSALSDGKTHRKTAPTAESQENQNAKALRKTDKKDSANAAVKPAYNGKTHTVRKGETVKQIAAAIRPKHLTLEQVADALLKANPNVSAHGRLRAGSVLHIPNLNRIKAEQPKPQTAKPKAETASMPSEPSKQATVEKPVEKPEAKVAAPEAKAEKPAVRPEPVPAANTAASETAAESAPQEAAASAIDTPTDETGNAVSEPVEQVSAEEETESGLFDGLFGGSYTLLLAGGGAALIALLLLLRLAQSKRARRTEESVPEEEPDLDDAADDGIEITFAEVETPATPEPAPKNDVNDTLALDGESEEELSAKQTFDVETDTPSNRIDLDFDSLAAAQNGILSGALTQDEETQKRADADWNAIESTDSVYEPETFNPYNPVEIVIDTPEPESVAQTAENKPETVDTDFSDNLPSNNHIGTEETASAKPASPSGLAGFLKASSPETILEKTVAEVQTPEELHDFLKVYETDAVAETAPETPDFNAAADDLSALLQPAEAPSVEENITETVAETPDFNATADDLSALLQPSKVPAVEENAAETVADDLSALLQPAEAPAVEENVTETVAETPDFNATADDLSALLQPSEAPAVEENAAETVADDLSALLQPAEAPAVEENAAEITLETPDSNTSEADALPDFLKDGEEETVDWSIYLSEENIPNNADTSFPSESVGSDAPSEAKYDLAEMYLEIGDRDAAAETVQKLLEEAEGDVLKRAQALAQELGI

SEQ ID NO: 1346 - protein, 303 aa, Neisseria meningitidis
MMREVLLSAYQDRRRERMWKNIWRAVSTLILVALIAGIFQKDEAALQLAGNTPHTAVVNLYGEIGNGVEDQVKKLKDGMEAAYKNPQAKAIVIRANSPGGSPVVSNTAFEEIRRLKAQHPDIPVYLVAEDMCASGCYYIAAAADKIYADSSSIVGSIGVIGSSFDATELMEKIGVKRRVKIAGSNKGMGDPFSPETPEQSKIWEEMLTGIHGEFIKAVKTGRGGRLKFRQYPDVFSGRVYTGADALKVGLVDGLGNIYSVARDVVKAPDVVDYTPKDDFGRILGRRFGAELKASVREALQAVR

SEQ ID NO: 1347 - protein, 758 aa, Neisseria meningitidis
MTTLHFSGFPRVGAFRELKFAQEKYWRKEISEQELLAVAKDLREKNWKHQAAANADYVAVGDFTFYDHILDLQVATGAIPARFGFDSQNLSLEQFFQLARGNKDQFAIEMTKWFDTNYHYLVPEFHADTEFKANAKHYVQQLQEAQALGLKAKPTVVGPLTFLWVGKEKGAVEFDRLSLLPKLLPVYVEILTALVEAGAEWIQIDEPALTVDLPKEWVEAYKDVYATLSKVSAKILLGTYFGSVAEHAALLKALPVDGLHIDLVRAPEQPDAFADYDKVLSVGVIDGRNIWRANLNKVLETVEPLQAKLGERLWISSSCSLLHTPFDLSVEEKLKANKPDLYSWLAFTLQKTQELRVLKAALNEGRDSVAEELAASQAAADSRANSSEIHRADVAKRLADLPANADQRKSPFVNRIKAQQAWLNLPLLPTTNIGSFPQTTEIRQARAAFKKGELSAADYEAAMKKEIALVVEEQEKLDLDVLVHGEAERNDMVEYFGELLSGFAFTQYGWVQSYGSRCVKPPIIFGDVSRPEAMTVAWSTYAQSLTKRPMKGMLTGPVTILQWSFVRNDIPRATVCKQIALALNDEVLDLEKAGIKVIQIDEPAIREGLPLKRADWDAYLNWAGESFRLSSAGCEDSTQIHTHMCYSEFNDILPAIAAMDADVITIETSRSDMELLTAFGKFKYPNDIGPGVYDIHSPRVPTEAEVEHLLRKAIEVVPVERLWVNPDCGLKTRGWKETLEQLQVMMNVTRKLRAELAK

SEQ ID NO: 1348 - protein, 107 aa, Neisseria meningitidis
MNAFAQALSSALDRCIATNTVAKQNQPVGFLYREAPVFENDSGWRFFSGDETDEYTDDPDNFSIVSLADITKTNPETAALLSQPEGSAWELAEDGTFQTVADWQPKD

SEQ ID NO: 1349 - protein, 307 aa, Neisseria meningitidis
MLQRTLAKSISVTGVGLHSGERVALTLHPAPENSGISFRRTDLDGEMGEQIKLTPYLINDTRLSSTIVTDKGVRVGTIEHIMSALSAYGIDNALIELNAPEIPIMDGSSLPFIYLLQDAGVVDQKAQKRFLKILKPVEIKEAGKWVRFTPYDGFKVTLTIEFDHPVFNRSSPTFEIDFAGKSYIDEIARARTFGFMHEVEMMRAHNLGLGGNLNNAIVIDDTDVLNPEGLRYPDEFVRHKILDAIGDLYIVGHPIVGAFEGYKSGHAINNALLRAVLADETAYDRVEFADSDDLPDAFHELNIRTCG

SEQ ID NO: 1350 - protein, 212 aa, Neisseria meningitidis
MQTAIIDYGMGNLHSVLKSVRTAGQLAGKNTEIFLSGDPDRVSRADKVIFPGQGAMPDCMAALKRDGLDEAVKDALKNKPFFGICVGAQLLFDHSEEGNTDGLGWFGGKVRRFERDLRDPQGCRLKVPHMGWNTVRQTQNHPLFKDIPQDTRFYFVHSYYFAPENPETILGESDYPSPFACIVGKDNVFATQFHTEKSHDAGLTMLKNFLNW

SEQ ID NO: 1351 - protein, 122 aa, Neisseria meningitidis
MKPLKRHPALIGLSRDHHHSLSLCVRLLRTPEERHRDELEPHFSELETHFREEEAKFAPIWQNVAPELKQRFEKDHARLRQMMASPEYGNAAWNTAFATTLRDHARFEERELFPAVEPFLPA

SEQ ID NO: 1352 - protein, 270 aa, Neisseria meningitidis
MSVGHYENFPVGSLILPRRLRKPVHAVYAFARTADDMADEGSMPSEARLAGLEGLQRELDVLASGGRSAHPLIARLDAEAVVPFGLDLQPFYDLLSAFSQDVVKTRYGNFGELADYCRRSANPVGRIMLALYGKTDAVCVAQSDGICTALQLVNFWQDVAVDWQKGRVYIPQDDLLKFGVSEGQIAEGRADAAFQRLMAYECRRAFRMLKAGSPLARELKGRIGLELRMIVLGAQLILQKLDACRYDVFAQRPVLDKKDWLIMLKKALWK

SEQ ID NO: 1353 - protein, 263 aa, Neisseria meningitidis
MARHPYRRLRPAKSSFPEVGISEEGNIRSLHLGSDTIQSSMNLDHPSELVLSYSRAMMGWLLFTDALPQHITQIGLGGGSFARWIDTYLPDTRQTAVDINPQVIAIARNLFELPFEGEKFEIIEADGAEYIKVFRHNTDVILVDGFDGEQIIDALVEEPFFRDCRNALSSDGIFVTNWWSGDKRYQRFIERLLSVFEGRVLELPAESHGNVAVMAFQSSPKEQNIDKLKKRADKLSNAYGLDFHRMLAGLKASNPNNGKHFHL

SEQ ID NO: 1354 - protein, 341 aa, Neisseria meningitidis
MYPLARRILFALDAEKAHHFTLDALNMVYKLGLIPVTGNRTKPVKLMGLDLPNPVGLAAGLDKNGEYIDALGALGFGFIEIGTVTPNPQPGNPQPRLFRVPEYQGIINRMGFNNHGIDAMIQNIEKSKFSGVLGINIGKNAVTPIENAADDYLICLEKAYAHASYITVNISSPNTKNLRALQGGDELSALLEALKNKQAQLASVHGKYVPLAVKIAPDLDEAQIEDIAHVVKSVEMDGIIATNTTIDKSSLGSHPLAGEQGGLSGLPVHEKSNRVLKLLADHIDGKLPIIGVGGIMEGRDAAEKIRLGATAVQVYSGLIYKGPALVKECLKALARSAQNAV

SEQ ID NO: 1355 - protein, 183 aa, Neisseria meningitidis
MEFLSLHPWWSFFIILTIILSYIGFCAHFHIQNGAVFFYSYRDVTIVFLTPVILIALSYLIKNKEILSACILCITLIAFSWAWIIIYRPNTKRFFLSLLIVWGKLLLSTIVWAILAISLGLAVITGNSKRKKYERRDRHAERNEKAFIGALLVGFELSRNLLNLCCLHKDFSTPSKNIEVNRS

SEQ ID NO: 1356 - protein, 307 aa, Neisseria meningitidis
MPSEHPFSDGISTLNPKETMNDTAQITASYGRRYIVRTPDGTTYEASTRKKRVDFACGDRVRISPVNAEQVVIEDFLPRQSLLYRQDAWKTKLIAANVTQLLIVTAAVPSPSVRLLQRALLAAEAAGIRAVIVLNKADLPETALWREKLKFYETLGYPVIETRALENAGSLRPALQGHSNILLGQSGMGKSTLTNALLGSQTARTGDISAALDSGKHTTTHARLYDLNGETQLIDSPGLQEFGLHHLQAADLPRYFPDFRHLVGQCRFHNCTHRAEPGCAFKAAAETRAASPERLAFLQGITDELPG

SEQ ID NO: 1357 - protein, 213 aa, Neisseria meningitidis
MKITHCKLKKKVQKELLRFFVLEVTARSAADILGIHPNSAALFYRKIRTVINHHLALAADEVFEGPVEPDESDFGGRRKGRRGRGAAGKVVVFGILKRNGRVYTVVVDNAKSETLLPVIKKKIMPDSIVYTDSLSSYDKLDVSDFIHYRINHSKEFADRQNHINGIENFWNQAKRVLRKYNGIDRKSFPLFLKECEFRFNFGTPSQQLKILRD

SEQ ID NO: 1358 - protein, 77 aa, Neisseria meningitidis
MCANLAILASLKLRFRINHSTHFAERQNHINGIENFWNQAKRHLRKFNGIPKAHFELYLKECEWRFNNSEIKVLVPF

SEQ ID NO: 1359 - protein, 642 aa, Neisseria meningitidis
MAKVIGIDLGTTNSCLAISENGQTKVIENAEGARTTPSVIAYLDGGEILVGAPAKRQAVTNAKNTIYAAKRLIGHKFEDKEVQRDIESMPFEIIKANNGDAWVKAQGKELSPPQISAEVLRKMKEAAEAYLGEKVTEAVITVPAYFNDSQRQATKDAGRIAGLDVKRIINEPTAAALAFGMDKGDNKDRKVAVYDLGGGTFDISIIEIANLDGDKQFEVLATNGDTFLGGEDFDQRLIDYIIDEFKKEQGIDLKQDVMALQRLKEAAEKAKIELSSGQQTEINLPYITMDATGPKHLAMKITRAKFESLVEDLIARSIEPCRTALKDAGLSTGDIDDVILVGGQSRMPKVQEAVKAFFGKEPRKDVNPDEAVAVGAAIQGEVLSGGRSDVLLLDVTPLSLGIETMGGVMTKLIQKNTTIPTKASQVFSTAEDNQSAVTIHVLQGERERASANKSLGQFNLGDIAPAPRGMPQIEVTFDIDANGILHVSAKDKGTGKAANITIQGSSGLSEEEIERMVKDAEANAEEDKKLTELVASRNQAEALIHSVKKSLADYGDKLDAAEKEKIEAALKEAEEAVKGDDKTAIDAKAEALGTASQKLGEMVYAQAQAEAQAGESEQANASAKKDDDVVDADFEEVKDDKK

SEQ ID NO: 1360 - protein, 299 aa, Neisseria meningitidis
LPSEKKMCIEMKFIFFVLYVLQFLPFALLHKIADLTGLLAYLLVKPRRRIGEINLAKCFPEWSEEKRKTVLKQHFKHMAKLMLEYGLYWYAPAGRLKSLVRYRNKHYLDDALAVGEKVIILYPHFTAFEMAVYALNQDVPLISMYSHQKNKILDEQILKGRNRYHNVFLIGRTEGLRALVKQFRKSSAPFLYLPDQDFGRNDSVFVDFFGIQTATITGLSRIAALANAKVIPAIPVREADNTVTLHFYPAWKSFPSEDAQADAQRMNRFIEERVREHPEQYFWLHKRFKTRPEGSPDFY

SEQ ID NO: 1361 - protein, 81 aa, Neisseria meningitidis
MVVIRLARGGSKHRPFYNVIVTDSRSRRDGRFIERVGFYNPVANEKQERVRLNADRLNHWIAQGAQVSDSVAKLIKEQKAA

SEQ ID NO: 1362 - protein, 172 aa, Neisseria meningitidis
MTTHFVVMGVCGCGKTTAALSLQKHLGQCPHAEGDEFHTQANRDKMGAGIPLTDEDRYPWLGNLRDWMTQQAQNGANHTIVTCSALKRGYRDILRGAEGKAAFIHLSPPQDINLERMMSRKGHYMKAGMLDSQLEILEELGEGEYGVKIANPGTPEAVEADILNWVASENLL

SEQ ID NO: 1363 - protein, 580 aa, Neisseria meningitidis
MKFFPAPCLLVILAVIPLKTLAADENDAELIRSMQRQQHIDAELLTDANVRFEQPLEKNNYVLSEDETPCTRVNYISLDDKTARKFSFLPSVLMKETAFKTGMCLGSNNLSRLQKAAQQILIVRGYLTSQAIIQPQNMDSGILKLRVSAGEIGDIRYEEKRDGKSAEGSISTFNNKFPLYRNKILNLRDVEQGLENLRRLSSVKTDIQIIPSEEEGKSDLQIKWQQNKPIRFSIGIDDAGGKTTGKYQGNVALSFDNPLGLSDLFYVSYGRGLAHKTDLTDATGTETASGSRSYSVHYSVPVKKWLFSFNHNGHRYHEATEGYSVNYDYNGKQYQSSLAAERMLWRNRFHKTSVGMKLWTRQTYKYIDDAEIEVQRRRSAGWEAELRHRAYLNRWQLDGKLSYKRGTGMRQSMPAPEENGGNILPGTSRMKIITAGLDAAAPFILGKQQFFYATAIQAQWNKTPLVAQDKLSIGSRYTVRGFDGEQSLFGERGFYWQNTLTWYFHPNHQFYLGADYGRVSGESAQYVSGKQLMGAVVGFRGGHKVGGMFAYDLFAGKPLHKPKGFQTTNTVYGFNLNYSF

SEQ ID NO: 1364 - protein, 87 aa, Neisseria meningitidis
MSLIEFLFGRKQKTATVARDRLQIIIAQERAQEGQAPDYLPTLRKELMEVLSKYVNVSLDNIRISQEKQDGMDVLELNITLPEQKKV

SEQ ID NO: 1365 - protein, 205 aa, Neisseria meningitidis
MLAKIPDGDTIKPIFHPNRTHMKKIIASALIATFALAACQDDTQARLEQQQKQIEALQQQLAQQADDTVYQLTPEAVKDTIPAEAQANGNNGQPVTGKDGQQYIYDQSTGSWLLQSLVGAAAGVFIGNALANKFTRAGNQDSPVARRARAAYHQSAHPNARTSRDLNTRSLRAKQQAAQAQRYRPTTRPPANYRRPAMRGFGRRR

SEQ ID NO: 1366 - protein, 467 aa, Neisseria meningitidis
MDTTLKTTLTSVAAAFALSACTMIPQYEQPKVEVAETFKNDTADSGIRAVDLGWHDYFADPRLQKLIDIALERNTSLRTAVLNSEIYRKQYMIERNNLLPTLAANANDSRQGSLSGGNVSSSYKVGLGAASYELDLFGRVRSSSEAALQGYFASTANRDAAHLSLIATVAKAYFNERYAEEAMSLAQRVLKTREETYKLSELRYKAGVISAVALRQQEALIESAKADYAHAARSREQARNALATLINQPIPEDLPAGLPLDKQFFVEKLPAGLSSEVLLDRPDIRAAEHALKQANANIGAARAAFFPSIRLTGTVGTGSAELGGLFKSGTGVWSFAPSITLPIFTWGTNKANLDVAKLRQQAQIVAYESAVQSAFQDVANALAAREQLDKAYDALSKQSRASKEALRLVGLRYKHGVSGALDLLDAERSSYAAEGAALSAQLTRAENLADLYKALGGGLKRDTQTDK

SEQ ID NO: 1367 - protein, 89 aa, Neisseria meningitidis
VNKSELIEAIAQEADISKAAAQKALDATTNAVTTALKQGDTVTLVGFGTFYVGERAERQGRNPKTGEPLTIAAAKTPKFRAGKALKDAL

SEQ ID NO: 1368 - protein, 258 aa, Neisseria meningitidis
LLIHYTLCRYRNWLAQDDTLSELLKLINCQLTEKNLKVEKASASVVDATIIQTAGSKQRQAIEVDEEGQVSGQTTPSKDSDARWIKKNGLYKLGYKQHTRTDEEGYIEKLHITPANAHECNHLLPLLEGIAEGTTVYADKGYDSKENRQHLKEHQLLDGIMRKACRNRPLTEVQTKRNRYLSKTRYVVEQSFGTLHRKFRYARAAYFGLIKVSAQSHLKAMCLNLLKAANRLSAPAAAQKATGCLIIGYPGRIKGIFG

SEQ ID NO: 1369 - protein, 249 aa, Neisseria meningitidis
LSVHHWTDAYFTFTCTRDESLRFENGQFVMVGLMVDGKPLMRAYSVASANWEEHLEFFSIKVQDGPLTSRLQHLKVGDDVLISKKPTGTLVAGDLNPGKHLYLLSTGTGIAPFLSITKDPEIYEQFEKIILVHGVRYKKDLAYYDRFTKELPEHEYLGDLVKEKLIYYPIVSREEFEHHGRLTDLMVSGKLFEDIGLPKINPQDDRAMLCGSPAMLKDTCKVLDDFGLTVSPKTGVRGDYLIERAFVDQ

SEQ ID NO: 1370 - protein, 181 aa, Neisseria meningitidis
MIIVEHLEHYLGEIESGIKCLDRRYHLSVSVFPSQPYKGVTTFSTLGLNRYDLNYKSRFELIFTCSEEWNKENIAAFLSGVAEYLIDNRQPILRGEIIQLPRVIIEGSKMDALYVSAPFYFDDDFQVCYGEHYNIVFPLLVPLYKQEAEWVEKKGWNAFEQFLLDNEVGNLSDMNRKPFTW

SEQ ID NO: 1371 - protein, 99 aa, Neisseria meningitidis
MHYFSIHDQSGRHIGFFILLADDESEARPQSGRFAVKLEGGMENHVLSPFGQTEIPQYWRVIKDRIELFFDEAPVGTLRNEYLTVSGQTFVLNDLTGNM

SEQ ID NO: 1372 - protein, 216 aa, Neisseria meningitidis
MISVEHVSKRYLTRQGWRTVLHDISFKMEKGEKIGILGRNGAGKSTLIRLISGVEPPTTGEIKRTMSISWPLAFSGAFQGSLTGMDNLRFICRIYNVDIDYVKAFTEEFSELGQYLYEPVKRYSSGMKARLAFALSLAVEFDCYLIDEVIAVGDSRFADKCKYELFEKRKDRSIILVSHSHSAMKQYCDNAMVLEKGHMYQFEDMDKAYEYYNSLP

SEQ ID NO: 1373 - protein, 344 aa, Neisseria meningitidis
MGRVSYLCVDAAEQALADAGLLGDESITDGRMGVACGSSSGSTKDIGDVGELLLTGTSRNFSANTYVRMMPYTAAANIGIFFGLKGRIIPTSSACSSGSQGIGYAYEAIKYGLTDMMLAGGGEEFFPSEVYVFDSLYAASRRNGEPEKTPRPYDANRDGLVIGEGAGIFVLEELEHAKRRGAIIYAELVGYGANSDAYHISTPRPDAQGAILAFQTALQHAGLAPEDIGWINLHGTGTHHNDSMESRAVAAVFGNNTPCTSTKPQTGHTLGAAGAIEAAFAWGIADRQSNPEGKLPPQLWDGQNDPNLPAINLTGSGSRWETEKRITASSSFAFGGSNCVLIIG

SEQ ID NO: 1374 - protein, 364 aa, Neisseria meningitidis
LNFPSYLGQPQTYFKVQTMQPIRYRTDLTPYNTFGLRAQARAFIALEHADGLRDIVRLPEFDRDTVLWLGGGSNILLMQDYAGLVVHMENKGIREIARSDGMVLIEAQAGEIWHDFVLHTVALGLSGLENLSLIPGTVGASPVQNIGAYGVEAKDVIHSVRCFDLDTETFVTLSNADCRFAYRESLFKQEGKGRYVIVSVVFALKTHFVPNLGYGDLAAKVAELSAGREATAKDVSDAVCAIRNSKLPNPNVLGNVGSFFKNPVIGAEKAAALLEQHPDMPHYPQPDGSVKLAAGWLIDQCRLKGFQIGGAAVHGRQALVLVNKNNASANDVRQLAQHIKFTVFARFQVELHAEPNWLPASFSL

SEQ ID NO: 1375 - protein, 170 aa, Neisseria meningitidis
LRVMTKDAHHAAAKWLVDNPVDMLKPTGLPDADLTWVAHAMVGTRGYELLDGLPCAKEYDYCVWKGVDPELHPYGACFHDIEEKLSTGLIEWLRCQNTDTVIIGGLATDYCVKTTVLQLLKGGRWQVVVNEAACRGIAPETIETAWQEMHSAGAIILKNADEINKYINNQ

SEQ ID NO: 1376 - protein, 242 aa, Neisseria meningitidis
LPNNPENRPLGVIYWLSGLTCTEQNFITKSGFQRYAAEHQVIVVASDTSPRGEQVPNDDAYDLGQGAGFYLNATEQPWAANYQMYDYILNELPRLIEKHFPTNGKRSIMGHSMGGHGALVLALRNREHYQSVSAFSPILSPSLVPWGEKAFTAYLGKDREKWQQYDANSLIQQGYKVQGMRIDQGLEDEFLPTQLRTEDFIETCRAANQPVDVRFHKGYDHSYYFIASFIGEHIAYHAAFLK

SEQ ID NO: 1377 - protein, 160 aa, Neisseria meningitidis
MAIVKNSVVSLHYEMYDANNQLLDKTEEPIAYLHGGYDGIFPLVEEALHGKDAGDTVDVALSPDDAFGEQDPELVRIEDAGVFPVEVEVGMMFEADDPETGDVVVYRVTDVADGKAVVDGNHPLAGMKIRFKATVESVRDASDEEIAHGHVHGPHGHHHH

SEQ ID NO: 1378 - protein, 193 aa, Neisseria meningitidis
MEEKNDYTDAASDNRNGQEIEVGIAGAGDRILAALLNQLFTFLVLLVPFAGLIAFAIKNEGRIGGSEEIFGLLLGMTSFWVGLAGILVYTVVQIYYMSRDGQSLGKKIMRIRVLKTDGRNPGFVGTVLVREIAWSVLVAIIAAVIGLAVGDNGENAINLLAFLANFVLLFMVKRDRRTLYDILADTVVVKLPK

SEQ ID NO: 1379 - protein, 461 aa, Neisseria meningitidis
MTEIADRVLRAEGSALLFENPIKPDGTRYDYPVLANLFGTPERVAMGMGADSVSKLREIGQTLAYLKEPEPPKGIKDAFSKLPLLKDIWSMVPNVVKNAPCQEIVWEGEDVDLYQLPIQHCWPEDVAPLVTWGLTVTRGPHKKRQNLGIYRQQLIGKNKLIMRWLSHRGGALDYQEFHKLNPDTPYPVAVVLGCDPATILGAVTPVPDTLSEYQFAGLLRGSRTELVKCIGNDLQVPARAEIVLEGVIHPNETALEGPYGDHTGYYNEQDHFPMFTVERITMRENPIYHSTYTGKPPDEPAVLGVALNEVFVPLLQKQFPEITDFYLPPEGCSYRMAVVSMKKQYAGHAKRVMMGCWSFLRQFMYTKFIIVVDDDVNVRDWKEVIWAVTTRMDPVRDTVLVENTPIDYLDFASPVSGLGGKMGLDATNKWPGETDREWGRVIKKDPAVTAKIDGIWEELGL

SEQ ID NO: 1380 - protein, 416 aa, Neisseria meningitidis
LKDSTPAHKPISTVAQTLSPKPQRRFHPQNRRIRYNIEPSDRGRHFINPSCRTCRRRTALSSELGKMMSKQPTSKRQWRDGAAPSAKKTAKPFKSKARPKDETRKTASQPYGQKASDGIKLQNTPKQRAAKAKKLVVRNPNQKIMGHARDLKERRSDLSRMEPERLQKVLAASGVGSRREMEEWINNGWVTVNGKTAQLGDKVTPDDHVTVKGSIIKLKWADRLPRIILYYKQEGEIVSRDDPQGRVSIFDRLPQAASSRWVAIGRLDINTSGLLILTTSGELVQRFAHPSFEVEREYAVRVLGGLTGEQMRVLTEEGVMLEDGLAKVERIREQGGEGANKWYNVVIKEGRNREVRRIFESQGLTVSRLVRVGFGPIGLPNRLKRGQFYELNPAEVANIIKWADMLLPGERRRKKA

SEQ ID NO: 1381 - protein, 630 aa, Neisseria meningitidis
MPILTIREVCNINHWGIGYYDVDDSGEIIVRPNPSQHNQTVSLQKLTEAVQQKHQARLPVLFCFPQILEHRLRDINRAFQTAREECGYKGGYCLVYPIKVNQHRRVIESLMSSGQPHGLEAGSKAELMAVLAHAGTRQTLIVCNGYKDREYIRFALMGEKLGHQVYLVIEKLSEIQMVLEEAEKLGIKPRLGVRARLASQGSGKWQSSGGEKSKFGLSASQVLQLVDILKQKNRLDCLQLLHFHLGSQLGNIRDVATGVHESARFYVELHKLGVNIRCFDVGGGLGVDYEGNRTQSDCSVNYSLNEYASTVVWGISQACLEHGLPHPTIITESGRGITAHHAVLVANVIGVERYKPRRLDAPSPEAPRVLHSMWETWTDISASREKRSLRSWIHEGQFDLADVHNQYNVGLLSLAQRAWAEQLYLNICHEVGELFNEKHRSHRTIIDELQERFADKLYVNFSLFQSLPDAWGIDQLFPVCPITGLNEPIARRAVLLDITCDSDGTIDHYIDGDGIAGTMPMPDYPEEEPPLLGFFMVGAYQEILGNMHNLFGDTATADVVVGEDGQFTVIDYDEGNTVADMLEYVYQDPKELMKRYREQIEHSDLPASQAMSFLKELEAGLNGYTYLEDE

SEQ ID NO: 1382 - protein, 391 aa, Neisseria meningitidis
MQNIFDPLVIRGKSLTPIVQGGMGVGVSASGLSSAVARENGIGTIASVDLRHLHEDLLAESQINPSEEKYTSLNCTALDREIQKAKSASEGKGLIAVNVMKAVKDHAAYVRQACESGADAVVMGAGLPLDLPEMTEGYHKDVALLPILSESRGINIVLKRWMKKGILPDAIVVEHPAHAAGHLGASTVEGVNDAKFDFKRVIEETFEVFKSLGLESEKIPLILAGGMANFEKVKTALKNWGASAVQIGTAFAVTEEGDAHLNFKKTLAGAETEKVVEFMSVAGLPARGVRTKFLDSYIKRESKLQANAKADPRRCTQGLNCLTSCGLRDGLSKAGQFCIDIQLAAAFRGEVDKGLFFRGKDPLPFGNAIRTVRETIQYLLTGSEPVATLGR

SEQ ID NO: 1383 - protein, 133 aa, Neisseria meningitidis
MQQHIEKWQHLSREEQKILAEVWGLVQNDDQEVHYEMLKLNAPDEASGEFWFRMAETLSTLPPNRSLGLRMNGGRLATAVSILSVMIEDNPDIPQLWAQKITALNYSGLNLNQYGVASPCRTICTVCGFVALS

SEQ ID NO: 1384 - protein, 151 aa, Neisseria meningitidis
MHKAPKGTALAFDFGETRIGVAQGDAELGLSHPLSTVTGGSNDEKFAAIAKLVQEWQPRYFVVGLPVHTDGTKHEMTHLSRKFGRRLNGRFNLPVYWVDERLSSVYAESLLSEAQVFGKKRKSVLDQVAAQAILHGFFEGGPAECFNGREG

SEQ ID NO: 1385 - protein, 188 aa, Neisseria meningitidis
MSALLPIINRLILQSPDSRSELAAFAGKTLTLNIAGLKLAGRITEDGLLAAGNGFADTEITFRNSAIQKILQGGEPGAGDIGLEGDLILGIAVLSLLGSLRSRASDELARIFGTQADIGSRAADIGHGIKQIGRNIAEQIGRFSREPESANIGNEALADCLDEISRLRDGVERLNERLDRLERDIWID

SEQ ID NO: 1386 - protein, 265 aa, Neisseria meningitidis
MDTAQKQRWAITLSYDGSRFYGWQKQADGVPTVQAALETALAQIAGEAVSTTVAGRTDTGVHATAQVVHFDTAAVRPVQAWVRGVNAHLPEGIAVLHARQVAPEFHARFDAYGRHYRYLLESAPVRSPLLKNRAGWTHLKLDIGQMRQAAALLIGEQDFSSFRAAECQAKSPVKTIYRADLTQSSGLVRLDLHGNAFLHHMVRNIMGALVYVGSGRLSVEGFAALIQERSRLKAPPTFMPDGLYLTGVDYPEAYGIIRPQIPEWL

SEQ ID NO: 1387 - protein, 142 aa, Neisseria meningitidis
MMFSWFKLFHLFFVISWFAGLFYLPRIFVNMAMIDAPRGNPEYVRLSDMAVRLYRFMSPLGFGAVVFGAAIPFAAGWWGSGWVHVKLCLGLILLAYQLYCGVLLRRFQDYSNAFSHRWYRVFNEIPVLLMVAALYLVVFKPF

SEQ ID NO: 1388 - protein, 529 aa, Neisseria meningitidis
MRKVCASARTRSMIYGSMPSEKLTIFQTAFVMQVNIQIPYILPRCVRAEDTPYACYLKQLQVTKDVNWNQVQLAYDKWDYKQEGLTGAGAAIIALAVTVVTAGTGAGAALGLNGAAAAATDAAFASLASQASVSLINNKGNIGNTLKELGRSSTVKNLVVAAATAGVADKIGASALNNVSDKQWINNLTVNLANAGSAALINTAVNGGSLKDNLEANILAALVNTAHGEAASKIKQLDQHYIVHKIAHAIAGCAAAAANKGKCQDGAIGAAVGEILGETLLDGRDPGSLNVKDRAKIIAKAKLAAGAVAALSKGDVSTAANAAAVAVENNSLNDIQDRLLSGNYALCMSAGGAESFCESYRPLGLPHFVSVSGEMKLPNKFGNRMVNGKLIINTRNGNVYFSVGKIWSTVKSTKSNISGVSVGWVLNVSPNDYLKEASMNDFRNSNQNKAYAEMISQTLVGESVGGSLCLTRACFSVSSTISKSKSPFKDSKIIGEIGLGSGVAAGVEKTIYIGNIKDIDKFISANIKK

SEQ ID NO: 1389 - protein, 65 aa, Neisseria meningitidis
MTTVPKSRIPVKPLPEKTTDEAKVEKWRQLGAEHGLSGEWAVAARLGENGFTEEQMENIANLFGR

SEQ ID NO: 1390 - protein, 165 aa, Neisseria meningitidis
MNVKVHKDTHHFGIHNLNNTDVHLTAEDSDNVIEIKGELADLMPTGNVESTSFLRGIETAFKSNTVLTGNNNKISIATEGKGLGLGVNGLQSNSPYSGHTTGIFINNQSSDLTQPSLDGISTIKLKAVKGNNEVDLNVKNHASVKGIIASHSAKATLEAEGDNIV

SEQ ID NO: 1391 - protein, 223 aa, Neisseria meningitidis
MKTVSTAVVLAAAAVSLTGCATESSRSLEVEKVASYNTQYHGVRTPISVGTFDNRSSFQKGIFSDGEDRLGSQAKTILVTHLQQTNRFNVLNRTNLNALKQESGISGKAHNLKGADYVVTGDVTEFGRRDVGDHQLFGILGRGKSQIAYAKVALNIVNVNTSEIVYSAQGAGEYALSNREIIGFGGTSGYDATLNGKVLDLAIREAVNSLVQAVDNGAWQPNR

SEQ ID NO: 1392 - protein, 66 aa, Neisseria meningitidis
VDTVGSLAIGYATGGNAGAFTGANADWNNRQLHSSEYKLAEQYADIVASRLNISKETCTVVYLGIN

SEQ ID NO: 1393 - protein, 336 aa, Neisseria meningitidis
LSTGEQVTIGLLAMALKDIGVEAKSYTGWQVALKTDTAHTKARIESIDDEKMRADLAAGKVVIVAGFQGISSEGDISTLGRGGSDTSAVALAAALKADECQIYTDVDGVYTTDPRVVPEARRMDTVTFEEMIELASLGSKVLQIRSVEFAGKYKVRLRVLSSLQDGGNGTLITFEEDDNMERAAVTGIAFDKNQARINVRGVPDKPGVAYQILGAVADANIEVDMIIQNVGSEGTTDFSFTVPRGDYKQTLEILSERQDSIGAASIDGDDTVCKVSAVGLGMRSHVGVAAKIFRTLAEEGINIQMISTSEIKVSVLIDEKYMELATRVLHKAFNLG

SEQ ID NO: 1394 - protein, 321 aa, Neisseria meningitidis
MLRLTALTLCTVLALGACSPQNSDSAPQAKEQAVSAAQSEGASVTVKTARGDVQIPQNPERIAVYDLGMLDTLSKLGVKTGLSVDKNRLPYLEEYFKTTKPAGTLFEPDYETLNAYKPQLIIIGSRAAKAFDKLNEIAPTIEMTADTANLKESAKERIDALAQIFGKQAEADKLKAEIDASFEAAKTAAQGKGKGLVILVNGGKMSAFGPSSRLGGWLHKDIGVPAVDESIKEGSHGQPISFEYLKEKNPDWLFVLDRSAAIGEEGQAAKDVLDNPLVAETTAWKKGQVVYLVPETYLAAGGAQELLNASKQVADAFNAAK

SEQ ID NO: 1395 - protein, 272 aa, Neisseria meningitidis
MKKDHLNTTGFDLWHTIREETAAAVSAEPMLASFLHQTVLRHESLGSVLAYHLSSKLGSPIMDVRALFEIYQQALGSDTQIGKCVEADLKAIYERDPACDEYSLPLLYFKGFHAIQAHRINHRLYLDGRKTLAYFLQNRMSEVFGVDIHPAARFGYGLMLDHATGFVAGETAVLGNNISILHGVTLGGSGKEGGDRHPKIGDGVMIGANASILGNIRIGSNAKIGAGSVVVSDVPPSITVVGVPAKPVARSLKTPSADMDQNIQFTEIDFMI

SEQ ID NO: 1396 - protein, 79 aa, Neisseria meningitidis
MNVWDIWSRMVEIYHKYKKPCLVLAVDFVMGMVFIEPNEEPCIGRCYAPMSESPDFANAVAMAVAMICIVWIAVLSMTD

SEQ ID NO: 1397 - protein, 160 aa, Neisseria meningitidis
MERNGVFGKIVGNRILRMSSEHAAASYPKPCKSFKLAQSWFRVRSCPGGVFIYGANMKLIYTVVKIIILLFFLLLAVINTDAVTFSYLPGQKFDLPLIVVLFGAFVVGIIFGMFALFGRLLSLRGENGRLRAEVKKNARLTGKELTAPPAQNAPESTKQP

SEQ ID NO: 1398 - protein, 604 aa, Neisseria meningitidis
MSEHDMQNTNPPLPPLPPEITQLLSGLDAAQWAWLSGYAWAKAGNGASAGLPALQTALPTAEPFSVTVLSASQTGNAKSVADKAADSLEAAGIQVSRAELKDYKAKNIAGERRLLLVTSTQGEGEPPEEAVVLHKLLNGKKAPKLDKLQFAVLGLGDSSYPNFCRAGKDFDKRFEELGAKRLLERVDADLDFAAAANAWTDNIAALLKEEAAKNRATPAPQATPPAGLQTASEGRYCKADPFPAALLANQKITARQSDKDVRHIEIDLSGSDLHYLPGDALGVWFDNDPALVREILDLLGIDPATEIQAGGKTLPVASALLSHFELTQNTPAFVKGYAPFADDDELDRIAADNAVLQGFVQSTPIADVLHRFPAKLTAEQFAGLLRPLAPRLYSISSSQAEVGDEVHLTVGAVRFEHEGRARVGGASGFLADRLEEDGTVRVFVERNDGFRLPEDSRKPIVMIGSGTGVAPFRAFVQQRAAENAEGKNWLIFGNPHFAADFLYQTEWQQFAKDGFLHRYDFAWSRDQEEKIYVQDKIREQAEGLWQWLQEGAHIYVCGDAAKMAKDVEAALLDVIIGAGHLDEEGAEEYLDMLREEKRYQRDVY

SEQ ID NO: 1399 - protein, 317 aa, Neisseria meningitidis
MTHTVHLHLEETDNLALQRLCGSFDNNLDLLAKALDIHISRRFEHFTFNGAFAHAGKRALLKLLETAQTRDLNDGDIRLAAVEAQTEDAGHQEKNHDHAYYFRTKRGSICGRTPRQNGYIRALLNHDIVFGLGPAGTGKTYLAVAAAVDAMEKHQVERIILVRPAVEAGEKLGFLPGDLTQKVDPYLRPLYDALYDLMGFDRVTKLIEKGLIEIAPLAYMRGRTLNGAYIILDEAQNTTPEQMKMFLTRIGFGAKAVITGDTSQIDLPKNIKSGLKDAREKLHNVEGLYFHTFTGEDVVRHPLVQKIVEAYESAEHD

SEQ ID NO: 1400 - protein, 608 aa, Neisseria meningitidis
LGISRKISLILSILAVCLPMHAHASDLANDSFIRQVLDRQHFEPDGKYHLFGSRGELAERSGHIGLGKIQSHQLGNLMIQQAAIKGNIGYIVRFSDHGHEVHSPFDNHASHSDSDEAGSPVDGFSLYRIHWDGYEHHPADGYDGPQGGGYPAPKGARDIYSYDIKGVAQNIRLNLTDNRSTGQRLADRFHNAGSMLTQGVGDGFKRATRYSPELDRSGNAAEAFNGTADIVKNIIGAAGEIVGAGDAVQGISEGSNIAVMHGLGLLSTENKMARINDLADMAQLKDYAAAAIRDWAVQNPNAAQGIEAVSNIFMAAIPIKGIGAVRGKYGLGGITAHPIKRSQMGAIALPKGKSAVSDNFADAAYAKYPSPYHSRNIRSNLEQRYGKENITSSTVPPSNGKNVKLADQRHPKTGVPFDGKGFPNFEKHVKYDTKLDIQELSGGGIPKAKPVFDAKPRWEVDRKLNKLTTREQVEKNVQEIRNGNKNSNFSQHAQLEREINKLKSADEINFADGMGKFTDSMNDKAFSRLVKSVKENGFTNPVVEYVEINGKAYIVRGNNRVFAAEYLGRIHELKFKKVDFPVPNTSWKNPTDVLNESGNVKRPRYRSK

SEQ ID NO: 1401 - protein, 324 aa, Neisseria meningitidis
MDTLTRFLPEHLQQNQLPEALGGVLLSVVSACTEINAKVRLGALAGVLGMTGTGNIQGEDQKKLDVIANNIMIDTLKANPAVAGLASEEEDTFVSAGENGRYLVLFDPLDGSSNIDVNISVGTIFSILEKPEGALATESFLQTGRQQLAAGYVLYGPQTQLVFTFGHGVYMFTLNAENEFVLTKEKPKVPESTKEFAINMSNRRHWLPPVQQYIDELLAGETGTRGKNYNMRWVASMVAEIHRILMRGGVFMYPQDKRDPAKPGKLRLMYEANPMSLILEQAGASASNAYQAMLDIQPENLHQRVAVFMGSSEEVDYLNRLHSK

SEQ ID NO: 1402 - protein, 227 aa, Neisseria meningitidis
LGMPAALIKDFLLTQGLKLPLDEVRAAYLTAQTVMDMGTASIDRSVLWRSDEDWKLADYLSCDNVREDALKRLFMALDSVFSRSTGVRSAAVYALMPSENQAFQLICLSRQGEVLENLWDLDEAAGKVSLACRSAQSGWMNVASDVRRWLDLGELSGERNHASAAQISIPVCTESGGVLGVVHVEFECAECAGTAAQVEWVALALALSEPLKLLLGMSAGKDGSEDV

SEQ ID NO: 1403 - protein, 185 aa, Neisseria meningitidis
MNIIDTAIPDVKLLEPQVFGDARGFFMETFRDEWFKTQVCERTFVQENHSKSGKGVLRGLHYQTENTQGKLVRVVVGEVFDVAVDMREGSPTFGKWAGATLSAQNQCQLWIPEGFAHGFCVLGDAAEVVYKCTDYYKPEAEQVLIWNDPTVGIGWPLQTAPLLSPKDLAGKTWAQAEKLRLTLSR

SEQ ID NO: 1404 - protein, 257 aa, Neisseria meningitidis
MKPKIQRHGEILSLVRRHQFMSVDELAAALDVTPQTIRRDIRELEDAGSLKRHHGGASSGGNLPEGLPASRQIQCQNEKNAIARLIAEHIPDESSLFVSIGTTMEAVASELVRRRGSLRIITNNIHVASIVSARTDYTVIITSGVVRPLDGGITGVATVDFINQFKVDYAVMSTHGVESDGSLLDDDYKEVSVMQAMIANARVRFLGVDHSKFRSNALVRLGDITAFDKVFTDRLPDTAMQKMLKEAGVECLIADAV

SEQ ID NO: 1405 - protein, 1302 aa, Neisseria meningitidis; identical to SEQ ID NO: 260

SEQ ID NO: 1406 - protein, 164 aa, Neisseria meningitidis
MKKNILEFWVGLFVLIGAAAVGFLAFRVAGGAAFGGSDKTYAVYADFGDIGGLKVNAPVKSAGVLVGRVGAIGLDPKSYQARVRLDLDGKYQFSSDVSAQILTSGLLGEQYIGLQQGGDTENLAAGDTISVTSSAMVLENLIGKFMTSFAEKNADGGNAEKAAE

SEQ ID NO: 1407 - protein, 701 aa, Neisseria meningitidis
MARKTPISLYRNIGISAHIDAGKTTTTERILFYTGLTHKLGEVHDGAATTDYMEQEQERGITITSAAVTSYWSGMAKQFPEHRFNIIDTPGHVDFTVEVERSMRVLDGAVMVYCAVGGVQPQSETVWRQANKYQVPRLAFVNKMDRQGANFFRVVEQMKTRLRANPVPIVIPVGAEDNFSGVVDLLKMKSIIWNEADKGTTFTYGDIPAELVETAEEWRQNMIEAAAEASEELMDKYLGGDELTEEEIVGALRQRTLAGEIQPMLCGSAFKNKGVQRMLDAVVELLPAPTDIPPVQGVNPNTEEADSRQASDEEKFSALAFKMLNDKYVGQLTFIRVYSGVVKSGDTVLNSVKGTRERIGRLVQMTAADRTEIEEVRAGDIAAAIGLKDVTTGETLCAESAPIILERMEFPEPVIHIAVEPKTKADQEKMGIALNRLAKEDPSFRVRTDEESGQTIISGMGELHLEIIVDRMKREFGVEANIGAPQVAYRETIRKAVKAEYKHAKQSGGKGQYGHVVIEMEPMEPGGEGYEFIDEIKGGVIPREFIPSVDKGIRDTLPNGIVAGYPVVDVRIRLVFGSYHDVDSSQLAFELAASQAFKEGMRQASPALLEPIMAVEVETPEEYMGDVMGDLNRRRGVVLGMDDDGIGGKKVRAEVPLAEMFGYSTDLRSATQGRATYSMEFKKYSEAPAHIAAAVTEARKG

SEQ ID NO: 1408 - protein, 214 aa, Neisseria meningitidis
VLASAIDFILHIDQHLLALSAQYGVWIYAILFLIVFCETGLIVTPLLPGDSLLFAAGGIAALGGMDIHLMVALLSLAAILGDALNFTVGKYFGGRLFANPDSKIFRREYLDKTHRFYEKHGGKTIIIARFMPIVRTFAPFVAGMGKMHYAKFIRYNIIGGLLWVILFSYAGYFFANFPVVKNNLGLVMGGIIIVSVLPGAVEIARAKLAVKSKR

SEQ ID NO: 1409 - protein, 378 aa, Neisseria meningitidis
MEMKQTDSTIKSRAAVAFAPNQPLQIVEIDVEMPRKGEVLIRNTHTGVCHTDAFTLSGSDPEGVFPVVLGHEGAGVVVAVGEGVSSVKPGDHVIPLYTAECGECEFCCSGKTNLCVSVRDTQGKGLMPDGTTRFSYQGQPIYHYMGCSTFSEYSVVAEVSLAKINPEANHEQVCLLGCGVTTGIGAVHNTAKVQEGDSVAVFGLGAIGLAVVQGARQAKAGRIIAIDTNPAKFELAKQFGATDCLNPNDYDKPIKDVLLDINKWGIDHTFECIGNVNVMRQALESAHRGWGQSIIIGVAGAGQEISTRPFQLVTGRVWKGSAFGGVKGRSELPKMVEDSMKGDIELEPFVTHTMTLDQINKAFELMHEGKSIRAVIHY

SEQ ID NO: 1410 - protein, 143 aa, Neisseria meningitidis
MNQLDQLGTRINLICNVFDKWIGQQDLNYNLFAVLYTLATEGSRTQKHIGEEWSLPKQTVSGVCKTLAGQGLIEWQESEQDRRERLLSLTEKGKAHAAPLTESAQEFSDKVFATFGDKRTTRLFADLDALAEVMEKTISENKK

SEQ ID NO: 1411 - protein, 770 aa, Neisseria meningitidis
VLGHCSSFAVSSFRILLELSARLRNFDHTGVQTASRNLDCRLNIKAGIKLMQQKIRFQIEGMTCQSCASRIEKVLNKKDFVESAGVNFASEEAQVTFDDSKTSAADIAKIIEKTGYGAKEKTEDTLPQPEAEHHIGWRLWLLLAINIPFLIGMAGMMIGRHDWMIPPLWQFALASIVQLWLAIPFYKSAWASIKGGLANMDVLVTIGTVSIYLYSVYMLFFSPHAAHGMAHVYFEVGVMVIGFVSLGKFLEHRTKKSSLNSLGLLLKLTPTQVNVQRNGEWKQLPIDQVQIGDLIRANHGERIAADGIIESGSGWADESHLTGESNPEEKKAGGKVLAGALMTEGSVVYRATQLGSQTLLGDMMNALSEAQGSKAPIARVADKAAAVFVPTVVGIALLTFITTWLVKGDWTVALMHAVAVLVIACPCALGLATPAAIMVGMGKAVKHGIWFKDAAAMEEAAHVDAVVLDKTGTLTEGRPQVAAVYCVPDSGFDEDALYRIAAAVEQNAAHPLARAIVSAAQARGLGIPAAQNAQTVVGAGIAAEVESVGLVKAGKAEFAELTLPKFSDGVWDIASIVAVSVDNKPIGAFALADALKADTAEAIGRLKKHNIDVYIMSGDNQGTVEYVAKQLGIAHAFGNMSPRDKAAEVQKLKAAGKTVAMVGDGINDAPALAAANVSFAMKGGADVAEHTASATLMQHSVNQLADALLVSQATLKNIKQNLFFAFFYNILGIPLAALGFLNPIIAGAAMAASSVSVLGNALRLKRVKID

SEQ ID NO: 1412 - protein, 945 aa, Neisseria meningitidis
MLDKYSPAEIESKHYQNWEEQGYFQPDMDLTKPSFSIQLPPPNVTGTLHMGHAFNQTIMDGLTRYYRMKGCNTAWIPGTDHAGIATQIVVERQLAAQNVSRHDLGREKFLEKVWEWKEVSGGTITQQMRRVGCSADWTREYFTMDDVRAETVTEVFVRLYEQGLIYRGKRLVNWDPVLGTAVSDLEVESVEEQGSMWHIRYPLADNPAEAVIVATTRPETLLGDVAVAVNPEDERYTHLIGKELILPLTGRTIPVIADEYVEKDFGTGCVKITPAHDFNDYEVGKRHDTRLVNVFDLEAKVLANAEVFNFKGEAQPSFALPEKYAGLDRFAARKQMVADLQEQGFLVEIKAHTLMTPKGDRTGSVIEPMLTSQWFVAMSATPNGGEPDSEFKGLSLADKAKKAVDSGAVRFIPENWVNTYNQWMNNIQDWCISRQLWWGHQIPAWYDNEGNVYVARNQEEAEKQAGKTGLTREEDVLDTWFSSALVPFSTLGWPSETDELKAFLPSNVLVTGYEIIFFWVARMIMMTTHFTGKVPFKDVYIHGIVRDHEGKKMSKSEGNVIDPVDLIDGIDLEKLLVKRTTGLRKPETAPKVEEASRKLFPEGIPSMGADALRFTMASYASLGRSVNFDFKRAEGYRNFCNKIWNATNFVLMNTENQDCGYGATATEPRGYSFPDMWIVDRLNQTIEQVTQAYETYRFDLAAETLYSFVWNDYCDWYLELAKVQLQTGCASRQRATRHTLLRVLEAALRLLHPIIPFITEELWQTVAPMCDAKTADSIMLARFPEADGGEIVQTAFGQMTVLQDLIGAVRNLRGEMGIQPNVKAPLFVESTDDLADYLKYLPMMTRLTEAQQVAALPESEDAPVAVCNGARLMLKVEIDKAAETARLSKEAEKLQKALDKLNAKLSKPGYTEKAPAHLVEKDKADLAELEDKMAKVQNQLAKLKD

SEQ ID NO: 1413 - protein, 240 aa, Neisseria meningitidis
MDKDLYAVLGVSPQAGANEIKRAYRKLAMKYHPDRNPGNPQAEEKFKEIQRAYDTLSDLSKRMQYDASFRRHEERGRQEEAFRREQARREQFYREQMRREQAFRQAFERQASRSRHAYEPSGGGSGRNYVLAAYILFGLGAIMLFMPIVGVIFAYMPIVGVILAYMKRNSLDSIVYATHTEYLIKTFWRTFWLYLLGALTALLGIGVLIIIATNVWYFYRIIVGFIRFNSGRAVAPEKWI

SEQ ID NO: 1414 - protein, 351 aa, Neisseria meningitidis
MTHHYPTDDIKIKEVKELLPPIAHLYELPISKEASGLVHRTRQEISDLVHGRDKRLLVIIGPCSIHDPKAALEYAERLLKLRKQYENELLIVMRVYFEKPRTTVGWKGLINDPHLDGTFDINFGLRQARSLLLSLNNMGMPASTEFLDMITPQYYADLISWGAIGARTTESQVHRELASGLSCPVGFKNGTDGNLKIAIDAIGAASHSHHFLSVTKAGHSAIVHTGGNPDCHVILRGGKEPNYDAGHVSEAAEQLRAAGVTDKLMIDCSHANSRKDYTRQMEVAQDIAAQLEQDGSNIMGVMVESHLVEGRQDKPEVYGKSITDACIGWGATEELLALLAGANKKRMARAG

SEQ ID NO: 1415 - protein, 431 aa, Neisseria meningitidis
MSVIQDLQSRDLIAQTTDIEALDALLNEQKIALYCGFDPTADSLHIGHLLPVLALRRFQQAGHTPIALVGGATGMIGDPSFKAAERSLNSAETVAGWVESIRNQLTPFLSFEGGNAAIMANNADWFGKMNCLDFLRDIGKHFSVNAMLNKESVKQRIDRDGAGISFTEFAYSLLQGYDFAELNKRYGAVLEIGGSDQWGNITAGIDLTRRLNQKQVFGLTLPLVTKSDGTKFGKTEGGAVWLNAKKTSPYQFYQFWLKVADADVYKFLKYFTFLSIEEIDAVEAKDQASGSKPEAQRILAEEMTRLIHGEEALAAAQRISESLFAEDQSSLTESDFEQLALDGLPAFEVSDGINVVEALVKTGLASSNKEARGFVNSKAVLLNGKPAEANNPNHAAERPDDACLLTDEHKRFGKYTILRRGKRNHALLVWK

SEQ ID NO: 1416 - protein, 54 aa, Neisseria meningitidis
MGQVEFYEKMIGLWSAKSREASEQADLAAFEFAEGELANYQEMLKRHLQTKSVE

SEQ ID NO: 1417 - protein, 139 aa, Neisseria meningitidis
MYAFYCHINKMAYLANTAKHIVGVGIKDAYRAIQTDAQLANRFEPAVLPRWELNKDFMRLLMSFERMLPLSQPSDLHEISLATKLYGMSEGYIGELSRLLTQAAVAAIQQQTECINETILNSINWISPSQRKRQLDKLR

SEQ ID NO: 1418 - protein, 180 aa, Neisseria meningitidis
MINHIEKYIGTISHGSKSDSGSQYKLNIAAIPSSPNRDLKTYITLELSKHDLNYKSRFEILFVCSLKYDENQIFPFLRWLAETIIENKKILLRGQVIYLPRSIVDSTKMDALYVSAPFYFDDDFQVCYGEHYNIVFPLLVPLYKQEAELVEKKGWNAFEQFLLDNEVDNLSDMNRKPFVW

SEQ ID NO: 1419 - protein, 88 aa, Neisseria meningitidis
MQVLKKVDWKMFVARSFWRWVPVGLTVGVWCFVAGMALHSCAKEPEPVAKELTKVEKMERQADLEVKVWEAQYESMSVEEKMKGIVYE

SEQ ID NO: 1420 - protein, 423 aa, Neisseria meningitidis
MKLLVIGNGGREHALAWKLAQSPKVETVFVAPGNAGTAIEPKLQNIDLTAHQDLIEFSRKENIVFTVVGPEAPLAAGVVDDFRAAGLKIFGPTQYAAQLESSKDFAKAFMAKYNIPTAQYQTFENADAAHDYVNQKGAPIVIKADGLAAGKGVIVAMTLDEAHAAIDDMLLDNKMGNAGARVVIEDFLQGEEASFIVMVDGNNVLPMATSQDHKRLLDGDKGLNTGGMGAYSPAPVVTPVVYERAMNEIILPTVAGMKAEGHEFTGFLYAGLMIDQSGAPYTIEFNCRFGDPETQPIMSRLNSDLSDLVEAAIDGRLDSVTAEWSPQTAVGVVLAAQNYPETPKKGDVISGLDAANQVGKVFHAGTTANEKGDVLTNGGRVLCVVGLGDNVAQAKAKAYGALEKISFDGMQYRKDIADKAINR

SEQ ID NO: 1421 - protein, 68 aa, Neisseria meningitidis
MARITTEDCTGKISNHFDLTLVAARRARQLENGNTPLVDDARNNKPTVTALREIAAGHIGTELLTRNK

SEQ ID NO: 1422 - protein, 153 aa, Neisseria meningitidis
MNIIMDSTRKFGILWEENSECNGFIYGKIQIIIGENIYPKICPYGYFTLNTVFNSLKSSFEEKYYAGGNNGLDFGEQLFDIDKYNSLELCNIFSIDTTYMSGGGNCEIDCLVLEMGYSGEEERLFYSFDNGKNFKEIRYKKGTVESVIFQLNL

SEQ ID NO: 1423 - protein, 259 aa, Neisseria meningitidis
MKLVRPQKISDQVLSVLEERIAEGVYAEGGKIPPERVLAEEFGVSRPSVRSALNVLVARQVLEARQGDGYYVSVKPQQDFLQSWQELLGKHSNWEQDVFDFSCHIEGCMAALAAERRTDADLKRIGFWLEKFEEACESGNLEHQSEADVSFHQTIADAAHNLLFSHLSGGLLKMLYRQTRSSLIYLNQEEDPRPKLMAQHRVLYEAISNRRPGEASEAAKAHLNYVASSIMKDREYQSRNRHADTLAQNDLKRVQDWEV

SEQ ID NO: 1424 - protein, 195 aa, Neisseria meningitidis
MPLPDLTDAELIESRKLLLHFARLQLPDHPDLAEDLVQETLLSAYSAGDSFQGRALVNSWLFAILKNKIIDALRQIGRQRKVFTALDDELLDEAFESHFSQNGHWTPEGQPQHWNTPEKSLNNNEFQKILQSCLYNLPENTARVFTLKEILGFSSDEIQQMCGISTSNYHTIMHRARESLRQCLQIKWFNQENPK

SEQ ID NO: 1425 - protein, 536 aa, Neisseria meningitidis
MPSEMLSIIYQTTFYPPSLWPLAVKNLFTVSNGHLLVFSSPERHLTQKDPIMKPTIALVGRPNVGKSTLFNRLTRTKDALVHDLPGLTRDRHYGHGKVGSKPYLVIDTGGFEPVVDSGILHEMAKQTLQAVDEADAVVFLVDGRTGLTPQDKIIADRLRQSPRPVYLAVNKGEGGNRAVLAAEFYELALGDPYVISGAHGDGVYYLIEDILETFPEPEAEEADAKHPVFAVIGRPNVGKSTLVNAILGEERVIAFDMAGTTRDSIHIDFEREGKPFTIIDTAGVRRRGKVDEAVEKFSVIKAMQAVEAANVAVLVLDAQQDIADQDATIAGFALEAGRALVVAVNKWDGISEERREQVKRDINRKLYFLDFAKFHFISALKERGIDGLFDSIQAAYNAAMIKMPTPKITRVLQSAIERQQPPRAGLVRPKMRYAHQGGMNPPVIVVHGNSLHAISDSYTRYLTQTFRKAFNLQGTPLRIQYNVSENPYENAEDKPKKKPLRRVSLSNRIEKREGRKEEKNRFKKKTKVSVKKQFSK

SEQ ID NO: 1426 - protein, 259 aa, Neisseria meningitidis
MKEHKARKRFGQNFLQDTRIISDIVNAVRPQADDVVIEIGPGLAAITEPLAKKLNRLHVVEIDRDIVCRLKTLPFADKLVIHEGDVLQFDFNGIAGKKKIVGNLPYNISTPLLFKLAEVADDVVDMHFMLQKEVVDRMVAAPKSNDYGRLGVMLQYFFDMELLIDVPPESFDPAPKVDSAVVRMIPVKHRIGKADDFEHFAKLVKLAFHQRRKTIRNNLKELAGDDDLQAVDINPQDRAEHIAPEKYVALSNYLAGKAV

SEQ ID NO: 1427 - protein, 236 aa, Neisseria meningitidis
MFAVRPALADELTNLLSSREQILRQFAEDEQPVLPINRAPARRAGNADELIGSAMGLNEQPVLPVNRVPARRAGNADELIGNAMGLNEQPVLPVNRAPARRAGNADELIGNAMGLLGIAYRYGGTSVSTGFDCSGFMQHIFKRAMGINLPRTSAEQARMGTPVARSELQPGDMVFFRTLGGSRISHVGLYIGNNRFIHAPRTGKNIEITSLSHKYWSGKYAFARRVKKNDPSRFLN

SEQ ID NO: 1428 - protein, 249 aa, Neisseria meningitidis
MLIQAVTIFPEMFDSITRYGVTGRANRQGIWQFEAVNPRKFADNRLGYIDDRPFGGGPGMIMMAPPLHAAIEHAKAQSSQTAKVIYLSPQGKPLTHQKAAELAELPHLILLCGRYEGIDERLLQTSVDEEISIGDFVVSGGELPAMMLMDAVLRLVPGVLGDMQSAEQDSFSSGILDCPHYTKPLEFQGMAVPEVLRSGNHGLIAEWRLEQSLRRTLERRPDLLEKRVLIPKESRLLETIRQEQREIQS

SEQ ID NO: 1429 - protein, 507 aa, Neisseria meningitidis
MTVIKQEDFIQSICDAFQFISYYHPKDYIDALYKAWQKEENPAAKDAMTQILVNSRMCAENNRPICQDTGIATVFLKVGMDVQWDADMSVEEMVNEGVRRAYTWEGNTLRASVLADPAGKRQNTKDNTPAVIHMSIVPGGKVEVTCAAKGGGSENKSKLAMLNPSDNIVDWVLKTIPTMGAGWCPPGILGIGIGGTPEKAVLMAKESLMSHIDIQELQEKAASGAELSTTEALRLELFEKVNALGIGAQGLGGLTTVLDVKILDYPTHAASKPIAMIPNCAATRHVEFELDGSGPVELTPPRVEDWPDLTYSPDNGKRVDVDKLTKEEVASWKTGDVLLLNGKILTGRDAAHKRLVDMLNKGEELPVDFTNRLIYYVGPVDPVGDEVVGPAGPTTATRMDKFTRQMLEQTDLLGMIGKSERGAATCEAIADNKAVYLMAVGGAAYLVAKAIKSSKVLAFPELGMEAIYEFEVKDMPVTVAVDSKGESIHATAPPQWQAKIGIIPVES

SEQ ID NO: 1430 - protein, 246 aa, Neisseria meningitidis
MLIVRPSGRAKDDVETCRRAGWQAEVLSPIEIEADAAGLELLSEQYARADAVFWVSPTAVETAVPYLNLSDGIKMHISVGQGSRRVLERCLGRTVIAPEDGNDSEAVLRLTVWNSLPEGARVLFVRGHGGRDFLMNALQEKGFRTEVAEVYFRRHKPLNFQNFQTENIAAAYITSTELVRLLFGQLPPQFSRFFKSLLYFTHHPRIAEALKREGVCSVETVPTLEAALSHSSISVSDGMVFPGTSN

SEQ ID NO: 1431 - protein, 324 aa, Neisseria meningitidis
MIAKHIDRFPLLKLDQVIDWQPIEQYLNRQRTRYLRDHRGRPACPLLSMFKAVLLGQWHSLSDPELEHSLITRIDFNLFCRFDELSIPDYSTLCRYRNWLAQDDTLSELLELINCQLTEKGLKVEKASAAVIDATIIQTAGSKQRQAIEVDEEGQVSGQTTPSKDSDARWIKKNGLYKLGYKQHTRTDAEGYIEKLHITPANAHECNHLSPLLEGIADGTTVYADKGYDSAENRQHLKEHQLQDGIMRKARRNRPLSEAQTKRNRYLSKTRYVVEQSFGTLHRKFRYARAAYFGLIKVSAQSHLKAMCLNLLKAANRLSAPAAA

SEQ ID NO: 1432 - protein, 231 aa, Neisseria meningitidis
MRFDLGKGFPLLTTKKLHLRSIIHELLWFLKGDTNIKYLKDNNVSIWDEWADENGDLGPVYGYQWRNWPAPDGRHIDQIANVLEQIKKNPDSRRLIVSAWNPALVDEMALPPCHTLFQFYVADGKLSCQLYQRSADIFLGVPFNIASYALLTMMMAQVCGLEAGEFVHTFGDAHLYRNHFEQAALQLEREPRALPVMKINPEVKDLFSFKFEDFELEGYDPHPHIKAAVSV

SEQ ID NO: 1433 - protein, 385 aa, Neisseria meningitidis
MNSALKNYAAYVNNKIDVCEISLNQYISTDNILQNKQGIECAASLPIQGGKVTAFKKGDILLANIRPYLKKIWYAQFDGGCSADVLAIRANAKTDSHFLFYALFRDDFFIHAMKGAKGTKMPRGDKTQIMEFKIPVFDLKTQQSIAAVLSALDKKIALNKQINARLEEMAKTLYDYWFVQFDFPDANGKPYKSSGGDMVFDETLKREIPKGWGSIELQSCLAKIPNTTKILNKDIKDFGKYPVVDQSQDFICGFTNDEKSILNPQDAHIIFGDHTRIVKLVNFQYARGADGTQVILSNNERMPNYLFYQIINQIDLSSYGYARHFKFLKEFKIILPSKDISQKYNEIANTFFVKVRNNLKQNHHLTQLRDFLLPMLMNGQVSVAE

SEQ ID NO: 1434 - protein, 258 aa, Neisseria meningitidis
MSDNALTSSRRFGGIARLYGDSALAHFSQAHVCVVGVGGVGSWAVEALARTGIGRLTLIDLDNVAESNVNRQLHALTGDFGKAKVTALRERVAQINPECQVFEIEDFVTEDNLPEYFGKGFDFVIDAIDQVRVKAAMAAYFVERKQPFVLSGGAGGQKNPALIQTADLSRVTHDPLLANLRYTLRKRYGFSRDTKANMRVPCVYSTENIVPPQSREACSADAAPQGLSCAGYGASMLVTASFGLYCAQAAVEHIADKK

SEQ ID NO: 1435 - protein, 388 aa, Neisseria meningitidis
MRKFNLTALSVMLALGLTACQPPEAEKAAPAASGEAQTANEGGSVSIAVNDNACEPMELTVPSGQVVFNIKNNSGRKLEWEILKGVMVVDERENIAPGLSDKMTVTLLPGEYEMTCGLLTNPRGKLVVTDSGFKDTANEADLEKLSQPLADYKAYVQGEVKELVAKTKTFTEAVKAGDIEKAKSLFADTRVHYERIEPIAELFSELDPVIDAREDDFKDGAKDAGFTGFHRIEYALWVEKDVSGVKEIAAKLMTDVEALQKEIDALAFPPGKVVGGASELIEEVAGSKISGEEDRYSHTDLSDFQANVDGSKKIVDLFRPLIEAKNKALLEKTDTNFKQVNEILAKYRTKDGFETYDKLGEADRKALQASINALAEDLAQLRGILGLK

SEQ ID NO: 1436 - protein, 459 aa, Neisseria meningitidis
MAKTLKTLYQCTECGGTSPKWQGKCPHCGEWNTLQESLAAPEPKNARFQSWAADTSTVQSLSAVTATEVPRNPTGMGELDRVLGGGLVDGAVILLGGDPGIGKSTLLLQTIAKMAQSRKVLYVSGEESAQQVALRAQRLELPTEGVNLLAEIRMEAIQTALKQHQPEVVVIDSIQTMYSDQITSAPGSVSQVRECAAQLTRMAKQMGIAMILVGHVTKDGAIAGPRVLEHMVDTVLYFEGDQHSNYRMIRAIKNRFGAANELGVFAMTENGLKGVSNPSAIFLASYRDDTPGSCVLVTQEGSRPLLVEIQALVDDAHGFTPKRLTVGLEQNRLAMLLAVLNRHGGIACFDQDVFLNAVGGVKIGEPAADLAVILAMLSSFRNRPMPEKTVVFGEIGLSGEVRPVARGQERLKEAEKLGFKRAIVPKANMPRNAKEFPNLKIYGVSSLQEAIDICRDSRE

SEQ ID NO: 1437 - protein, 63 aa, Neisseria meningitidis
LLPTRSVSSLLLGEYLEFEENGTKIAAEIDSAWHFLGAACRISINGKYYAGNRIVWFAKKAES

SEQ ID NO: 1438 - protein, 152 aa, Neisseria meningitidis
LLTKLKILLFLFLFVFVLAINLLFFFFSSDIESFGNYQFEYVYDKGWPANYILVMKDGNEGNFDKIISGLVLEYYKEDDNIYFSYIDGQGFASDSCYYKPEISYGKIILNKNHIININSMEKNNFLSEDKIMKGTRNWLADPKNKCNIQTLD

SEQ ID NO: 1439 - protein, 77 aa, Neisseria meningitidis
VSNTACSNSGCTAPITFNGKVQGNSMRDVLFFCSVMMCCLVVYGMPSEGGFAFQTASDVRYFSLNRDNRLSGRRRLF

SEQ ID NO: 1440 - protein, 464 aa, Neisseria meningitidis
MTVKTRFAPSPTGYLHIGGVRTALFSWAFARHHKGEFLLRIEDTDLARSTAESVNIILDGMKWVGLDYDNAGNVVYQTRRFDRYKEVIAELLEKGDAYYCYCSKEELEAMREKAEKEGTATYDRRWRPEAGKTLPEIPAGVQPVVRFKTPLDGVTKWTDLVKGEISIPNEALDDLIIARADGTPTYNFCVVVDDYDMGVTHVIRGDDHVNNTPKQINILKAIGATLPEYGHLPMILNEQGKKISKRSGDTVAITDFGAMGILPEAMLNYLARLGWAHGDDEFFTMEQFIEWFDLKDVSPSPSRMDLKKLYWINGEHIKITPNGKLAELVKPRLALRDIHETEKPALEDVLALVKDRAQDLNTLADECLYFYVKQTPTEADVQKHWDDEAAARMLRFAERLEGLEDWNTEAIHDLFKPFCDEEGIKMGKLGMPLRLAVCGTAKTPSVDAVLALIGKEEVLKRIRA

SEQ ID NO: 1441 - protein, 568 aa, Neisseria meningitidis
VCAPARMRSMIYGSMPSEKLTIFQTAFVMQVNIQIPCMLYRRGSVKPPLFEAPRLLPSFTDPVVPKLSAPGGYIVDIPKGNLKTEIEKLAKQPEYAYLKQLQVAKNVNWNQVQLAYDKWDYKQEGLTRAGAAIIALAVTVVTAGAGVGAALGLNGAAAAAADAAFASLASQASVSLINNKGDVGKTLKELGRSSTVKNLVVAAATAGVADKIGASALNNVSDKQWINNLTVNLANAGSAALINTAVNGGSLKDNLEANILAALVNTAHGEAASKIKQLDQHYIVHKIAHAIAGCAAAAANKGKCQDGAIGAAVGEIVGEALVKNTDFSDMTPEQLDLEVKKITAYAKLAAGTVAGVTGGDVNTAAQTAQNAVENNAVKAVVTAAKVVYKVARKGLKNGKINVRDLKQTLKDEGYNLADNLTTLFDETLDWNDAKAVIDIVVGTELNRANKEEAAQKVKEVLEKNRPYIPNKGAVPNMSTYMKNNPFGKQLAQISEKTTLPTQQGQSVFLVKRNQGLLKTGDRFYLDGQHKNHLEVFDKNGNFKFVLNMDGSLNQMKTGAAKGRKLNLK

SEQ ID NO: 1442 - protein, 161 aa, Neisseria meningitidis
MDALHTIARNLTKKRQTVSCAESCTGGLLAAVFTSVAGSSQWFDQSFVTYSNKAKEDRLGVLPETLLEHGAVSRQTVYEMARGAKAVAQADYAVGISGIAGPGGGSESKPVGTVWFGFAFPGGSCEAMRRFDGNRESVRAQAVAFALERLAGLIENGGDAV

SEQ ID NO: 1443 - protein, 263 aa, Neisseria meningitidis
MDTQAVITHIARWLDEYATQANAKGFVIGVSGGIDSAVVSTLAARTGRPTLLLDMPIRQHPGQLERARLHIRNLQRQYANVSAQTADLTDTFQTFEQTVGIHQTAFDNQPLSLANAKSRLRMLTLYYYGQIHGLLVTGTGNKIEDFGVGFFTKYGDGGVDISPIADLTKTQVYRLAEALGVDEAIQKAPPTDGLWDTERTDEEQMGASYPELEWAMGVYGTRKPEDFEGRQREVLEIYTRLHRAMQHKINPIPVCRIPPELLG

SEQ ID NO: 1444 - protein, 172 aa, Neisseria meningitidis
MPSETPFSLSESRHYEFEGNSTIIRHSDFQTASRPSDRTQTKRKYMFRTMLGGKIHRATVTEADLNYVGSITVDQDLLDAAGIYPNEKVAIVNNNNGERFETYTISGKRGSGVICLNGAAARLVQKGDIVIIMSYVQLSEPEIAAHEPKVVLVDGNNKIRDIISYEPPHTVL

SEQ ID NO: 1445 - protein, 195 aa, Neisseria meningitidis
LLLTACGRKSARTHAKIPEGSTVLALGDSLTFGYGANPGESYPAQLQKLTGWNIVNGGVSGDTSAQALSRLPALLARKPKLVIVGIGGNDFLRKVPKEQTRANIAKIIETVQKENIPAVLVGVPHITLGALFGHLSDHPLYEDLSEEYGIPLFGGAWAEILGDNNLKSDQIHANGKGYRKFAEDLNQFLRKQGFR

SEQ ID NO: 1446 - protein, 378 aa, Neisseria meningitidis
MKNISLSPPAMLGILGGGQLGRMFTVAAKTMGYKVTVLDPDPDAPAAEFADCHLCAPFNDQAALDELAKCAAVTTEFENVNADAMRFLAKHTNVSPSGDCVAIAQNRIQEKAWIRKAGLQTAPYQVVCKAEDITEASAQFLPGILKTATLGYDGKGQIRVKTLDELKAAFTEHGGVDCVLEKMVDLRSEISVIVCRLNNDNVQTFDPAENIHENGILAYSIVPARLSADVQQQARQMAQRLADELDYVGVLAVEMFVVGDTHELVVNEIAPRPHNSGHHTVDACAADQFQQQVRLMCNLPPADTKLLSSCCMANILGDVWQEDGGEPDWFPLQSRPDAHLHLYGKKTAHKGRKMGHFTVLTTDSDTAFQEAKKLHQSL

SEQ ID NO: 1447 - protein, 868 aa, Neisseria meningitidis
MAANQRYRKPLPGTDLEYYDARAACEDIKPGSYDKLPYTSRILAENLVNRADKVDLPTLQSWLGQLIEGKQEIDFPWYPARVVCHDILGQTALVDLAGLRDAIAEKGGDPAKVNPVVQTQLIVDHSLAVECGGYDPDAFRKNRQIEDRRNEDRFHFINWTKTAFENVDVIPAGNGIMHQINLEKMSPVVQVKNGVAFPDTCVGTDSHTPHVDALGVISVGVGGLEAETVMLGRASMMRLPDIVGVELNGKRQAGITATDIVLALTEFLRKERVVGAFVEFFGEGARSLSIGDRATISNMTPEFGATAAMFAIDEQTIDYLKLTGRDDAQVKLVETYAKTAGLWADALKTAVYPRVLKFDLSSVTRNMAGPSNPHARFATADLAAKGLAKPYEEPSDGQMPDGAVIIAAITSCTNTSNPRNVVAAALLARNANRFGLKRKPWVKTSFAPGSKVAEIYLKEAGLLPEMEKLGFGIVAFACTTCNGMSGALDPKIQKEIIDRDLYATAVLSGNRNFDGRVHPYAKQAFLASPPLVVAYALAGSIRFDIENDVLGVADGKEIRLKDIWPADEEIDAVVAEYVKPQQFRDVYVPMFDTGTAQKAPSPLYDWRPMSTYIRRPPYWEGALAGERTLRGMRPLAILPDNITTDHLSPSNAILAVSAAGEYLAKMGLPEEDFNSYATHRGDHLTAQRATFANPKLFNEMVKNEDGSVRQGSFARVEPEGETMRMWEAIETYMNRKQPLIIIAGADYGQGSSRDWAAKGVRLAGVEAIVAEGFERIHRTNLIGMGVLPLQFKPDTNRHTLQLDGTETYDVVGERTPRCDLTLVIHRKNGETVEVPVTCRLDTAEEVLVYEAGGVLQRFAQDFLEGNAA

SEQ ID NO: 1448 - protein, 208 aa, Neisseria meningitidis
MADMKRLKHLMFSPFIDNNPIALQVLGICSALAVTTKLQTAIVMGISVALVTGFSSFFISLVRNYIPNSIRIIVQMAIIASLVTLVDQLLQAFAYELSKQLSVFVGLIITNCIVMGRAEAFAMKEPPLESLIDGIGNGAGYGIMLLVVATVRELIGSGKLLGYTVFQTVQDGGWYQTNGLFLLAPSAFFIIGFLIWGLRTWKPEQAEE

SEQ ID NO: 1449 - protein, 245 aa, Neisseria meningitidis
MKQVDLNADLAEGCGSDEALLQLITSANIACAQHAGSIADIRAALAYAQQNGVRIGAHPGYPDRENFGRTEMNLSEADLRACLNYQLGALQALCRDQGLEMAYVKPHGAMYNQAAKNRALADTVARIVADFDPKLKLMALSGSLLLEAGKAAGLGVISEVFADRRYMPDGTLVPRSRPDAQVDSDEEAIAQVLQMVRDGRVKAVNGSLVAVQADSICLHGDGPHAVVFAEKIRQELLAAGIKVSA

SEQ ID NO: 1450 - protein, 213 aa, Neisseria meningitidis
MLKPETIHISGPAGILETIHIPSEQVPARGVAVINHPNPLQGGTNTNKVIQTAAKALSKLGFHCYLPNLRGVGGSEGTHDYGRGETQDCLAVIDYARAQHPEAPEFALSGFSFGGYVATFAAQARIPDLLLLIGAAVCHYTGRPEPSAVPDVAKTLMIHGAEDEVVEIGKALKWAEPQDLPVITIAGSTHFFHGKLIVLRDTILRFAPVCLNG

SEQ ID NO: 1451 - protein, 264 aa, Neisseria meningitidis
MMSEHRVNHEPVFLLASSPWRESSLRVEAFSRRYGRVALLARSARKRQSELRGVLVPFVPVSASWYGSQELKTLHRAEWVGGWRQPQGRALFSGLYVNELVLKLTAREDPMPELYDALAKVMEAVCREANHIADLRRFEWKLLNALGVAPDLHADSTGGDILADKTYRLMPEEAVMPVCEDADALSHEAGAIVEGQSLIDLREGSFRTAESLQQALKITRLLIGTLLPEGLKSRQVLEQIRQFDRKETARETVPTSDGTASNAV

SEQ ID NO: 1452 - protein, 571 aa, Neisseria meningitidis
MANLNVSSKKIINLLGNQDMQEKYFIIPEYQRPYRWDTEKCAVLWSDIVDFRQSSTGKNEEYFLGTIVVCPNEKGNLEVIDGQQRLTSLLLLLRAFYRVLEQTESTPDTAAKITTLKSKIAPCIWDVDVLTAEITDRTAIRLHTQVATETDNEILHEILANGEISEECRSNYAVNYLYFLKQCQEYARTNPMDWYHLCLTILNDCILLPIESDSLNSALTIFSTLNDRGLPLSDADIFKARLYKMAQQKDKFVEQWKELVALAEGASISVDDLFRYYTHVLRAKEKITDKEIGLRRFYTDNRNKQLENENLFNHLIELAGFWQDINNSKTNQDVETSNFVNDEAAKWLQCLNVYPNEFWKYAASVFFIANKGAQSFKDDFAALLKQLTAFLYAKFLVAPTVTAIKDDIYKLCVAIYHGEKNALSYVMPAPIHYEQNTGRITKGLLMINAYLFDEKQKLLPTKTEIEHIFPKKWQETNYNGWSIIDAEQYLEQLGNKIVFEKRLNIQAGNGYFGKKKEQYQKSDIVEVRELAGENANDWLPSDIQKRQQQIVDRLKQFFDNCFEAASIPKKN

SEQ ID NO: 1453 - protein, 354 aa, Neisseria meningitidis
MASYDKISGGWYRVCPKRSSNRALITVKLPFSTLFRLKPMTDITPFANRLGKNIKHLMKWAKRNGIEAWRIYDRDIPQFPFAADVYGDRIHLQEYDTGWLMQPEEYEAWLAEVLEAVVFVTGFAPEQIHLKRRERQKGLQQYEKTGKTGDDFVITENGRKFWVNLDKYLDTGLFLDHRNTRKKVGETAAGKRFLNLFSYTGSFTVYAATGGAASSETVDLSNTYLDWAKRNFELNGIDTERHKIVRADVFQYLQTAYGEGRRFDLIVMDPPSFSNSKKMSDILDIQRDHKKLIDRAVKLLASDGILYFSNNLRSFVLDDLVSEQYAVKDISKQSVPEDFRNKKIHRCWEIRHES

SEQ ID NO: 1454 - protein, 310 aa, Neisseria meningitidis
MLRCRPKSVLDSDGIFLKFNFLRSKPKYEISFLPSFLPSFKRILCLSAVISVLGACTVVADVYGQDSATMNAAAAEDYMKTVELNKSAGNVDTTSKTARRVQAVFRRMLPYADAANNTGHKFDWKMTVFKNDELNAWAMPGGKMAFYTGIVDKLKLTDDEIAAIMGHEMTHALHEHGKNKVGQQILTNTAAQIGTQIILDKKPDTNPELVGLGMDILGTYGITLPYSRSLEEEADEGGMMLMAQAGYHPAAAVRVWEKMNQENDQNGFIYAITSTHPTNNARIENLKRLLPTVMPVYEQSVRNKGRVNPL

SEQ ID NO: 1455 - protein, 704 aa, Neisseria meningitidis
MDLLSVFHKYRLKYAVAVLTILLLAAVGLHASVYRTFTPENIRSRLQQSIAHTHRKISFDADIQRRLLPRPTVILKNLTITEPGGDRTAVSVQETKIGLSWKNLWSDQIQIEKWVVSSAELALTRDGKGVWNIQDLIDSQKRQASVNRIIVENSTVRLNFLQEQLILKEINLNLQSPDSSGQPFESSGILVWGKLSVPWKSRGLFLSNGIGPPEISPFHFEASTSLDGHGITISTTGSPSVRFNAGGADAAGLGLRADTSFRNLHLTAQIPTLALRNNSIKIETVNGAFTAGGEYAQWDGSFKLDKANLHSGIANIGNAEISGSFKTPRHQTNFSLNSPLVWTENKGLDAPRLYVSTLQDTVNRLPQPRFISRLDGSLSVPNLQNWNAELNGTFDRQTVAAKFRYTHEDAPHLEAAVALQKLNLTPYLDDVRQQNGKIFPDTLAKLSGDIEAHLKIGKVQLPGLQLDDMETYLHADKDHIALSRFKSGLYGGHTEGGISIANTRPATYRLQQNASNIQIQPLLQDLFGFHSFSGNGDAVIDLTAGGETRKELIRSLQGSLSLNISNGAWHGIDMDNILKNGISGKTADNAAPSTPFHRFTLNSEISDGISRHIDTELFSDSLYVTSNGYTNLDTQELSEDVLIRNAVHPKNKPIPLKITGTVDKPSITVDYGRLTGGINSRKEKQKILEDTLLEQWQWLKPKEP

SEQ ID NO: 1456 - protein, 399 aa, Neisseria meningitidis
MWTGFFSKSGTGIAEERHQNRRACTDVPLLAERNSKHPDRPYGFAKYRQSGLDIYAWHGMYFFPRFPFIDIDRIRWVRVGLKAFKHYIRENGLPDLIHAHRMNYAGILAQKISQKYGIPYVVTKHSSTITRGLIRPHQWQPMKNAAAHAAARLAISRHFAHVLQHKYGCEWQYLPNILGGIFNRPFEQREKNNKPHFVFCTVSHLRRLKGHDVLLTAFARALAQCPQLRLNIGGSGQEEQRLKQQAADLGITHAVTFLGALQPEAVLDLMKNSDAFVLASRTETFGVVYIEALSQGLPVIATRCGGAESIVSDGNGYLVPVDDDDALADALIKMYEHHSDFEPARLRENCLNEFGENAVIGRLIGIFRQAIAEYGKKIPVKYSGLTKIRTRRRSRRQYK

SEQ ID NO: 1457 - protein, 526 aa, Neisseria meningitidis
MSVIKRALISLSDKAGAVEFAQTLTKLGVEILSTGGTAKLLADAGVPVIEVADYTGFPEMLDGRVKTLHPKIHGGILGRRDLGEHVAKMEEHGIGNIDLVCVNLYPFAATIAKPNCTLEDAIENIDIGGPTMVRSAAKNWKHVAIVTDTADFPAIAAELEANNGALSDKTRFNLSRKAFSHTAQYDGMISNYLTSLSDDVLSGEPQIGEFPSQFNQSWIKVQDMRYGENPHQRAAFYRDVYPAAGSLSAYKQLQGKELSYNNIADADAAWEAVKSFDAPACVIVKHANPCGVAVAADTLTAYKLAYATDTTSAFGGIIAFNREVDGETVKQITDNQFMEVLMAPKFTAEALEIAAAKKNVRVLEVPLEAGANRFELKRVGGGLLVQTPDIHRISRADLKVVSKRQPTEQEWNDLLFVWNVAKYVKSNAIVFGKGGQTYGIGAGQMSRVDSTRIAARKAQDAGLDLNGACAASDAFFPFRDGVDVIAEQGIKAIIHPAGSMRDQEVFDAADEHGIAMVVTDVRHFRH

SEQ ID NO: 1458 - protein, 502 aa, Neisseria meningitidis
MQTDCDVLIAGNGLAALTLALSLPESFRIVILCKNRLDDTASRHAQGGIAAAWSGEDDIEKHVADTLEASAGLCDEAAVRTILSQGKPAIEWLLAQGVAFDRNYDGLHLTREGGHTCRRIAHVADYTGEAVMQSLLAQIRRRPHIRVCERQMALDIQTESGVACGLIVLDRRTQETYLIRARHTVLAGGGLGQIYAATTTPPECTGDAIAMAIRAGCAVENLEFIQFHPTGLARSSENGRTFLISEAVRGEGGILTNQAGERFMPHYDRRAELAPRDIVARAIAAEIAKQTPDFVSLDISRQPEAFVRRHFPSIHRHCLSQCGLDITRQAIPVRPVQHYTCGGIQTDPCGRTSLPQLYALGETACTGLHGANRLASNSLLECVVTARLAAQTIADGQAFQAKTSPRPSENPSAEAGIFADDLQNTFSRPVLQTFNQRHLGILRSDTGLRRAIAQLRLWKQNQAEPHTASEYENRNLLECSLAVAQAAYRRRQNIGAHFNSDC

SEQ ID NO: 1459 - protein, 444 aa, Neisseria meningitidis
MTDLNTLFANLKQRNPNQEPFHQAVEEVFMSLDPFLAKNPKYTQQSLLERIVEPERVVMFRVTWQDDKGQVQVNRGYRVQMSSAIGPYKGGLRFHPTVDLGVLKFLAFEQVFKNALTTLPMGGGKGGSDFDPKGKSDAEVMRFCQAFMTELYRHIGADTDVPAGDIGVGGREIGYLFGQYKKIRNEFSSVLTGKGLEWGGSLIRPEATGYGCVYFAQAMLQTRNDSFEGKRVLISGSGNVAQYAAEKAIQLGAKVLTVSDSNGFVLFPDSGMTEAQLAALIELKEVRRERVATYAKEQGLQYFEKQKPWGVAAEIALPCATQNELDEEAAKTLLANGCYVVAEGANMPSTLGAVEQFIKAGILYAPGKASNAGGVATSGLEMSQNAIRLSWTREEVDQRLFGIMQSIHESCLKYGKVGDTVNYVNGANIAGFVKVADAMLAQGF

SEQ ID NO: 1460 - protein, 156 aa, Neisseria meningitidis
LPLQSDSRQPIQIEADQGSLNQANQSTTFSGNVVIRQGTLNISAARVNVTRNDKGEQFMKADGSPVRFSQTLDGGKGTVRGQANNVAYSSAGSTVVLTGNAKVQRGGDVAEGAVITYNTKTEVYTISGSTKSGAKSASKSGRVSVIIQPSSTQKSE

SEQ ID NO: 1461 - protein, 234 aa, Neisseria meningitidis
LWQNPKSIVELYIQEGKSDARTREVLEKAANENIRVYFVDTTRLDAISKGARHQGVAGFIDASKNHVHLEDVLENLSEPPLLLILDGITDPHNLGACLRTADAMGVHAVIAPKDKSAGLNATVSKVACGAAETVPYITVTNLARTLRELKEYGIWIIGTDMSGESDLYHCNLPDRAAWVMGNEGDGMRRLTREHCDMLVSIPMFGTVESMNVSVSAGMVLSETRRQRVLKNEKV

SEQ ID NO: 1462 - protein, 269 aa, Neisseria meningitidis
MTPLKIAIAGANGRMGRVLVEAVNNHPDTVLSGALEHSGSEALGLDAGYAVGLKTGIAISDDVDAVLAQSDVLIDFTRPEPTLKHLQKCVEKQVNIIIGTTGFDDAGKAAIHTAAEQTGIVFAANFSVGVNLTFHILDTVARVLNEGYDIEIIEGHHRHKVDAPSGTALRMGEVIAGALGRDLKQCAVYGREGHTGPRDPSTIGFATVRAGDIVGDHTALFATDGERVEITHKAGSRMTFAAGAVRAAVWVNGKTGLYDMQDVLGLNNR

SEQ ID NO: 1463 - protein, 494 aa, Neisseria meningitidis
MPYNQAPDFLCADTMHPTYSAVQARLLEANRLSPELLAKSLCIIGAHHVDYADIYCQRTAYESWHLEEGIVKSGSFQINQGVGVRAVSGDKTAFAYADSLCIDSINRSARAVRAIGAAGGKVSAKMPSETRGKPVCSASDPIAGLDSAAKVALLNKVEAIAKAADPRIVQVMAGLTCEYDMVYLARLDGKHAADIRPMVRLNVTVIAKQGERREQGSAGGGGRYDLAYFDENLVRQFVDAAVKQALTNLESRPAPAGEMTVVLGNGWPGVLLHEAVGHGLEGDFNRKGTSVFSGRIGERVAAKGVTVVDQGDIAGRRGSLNIDDEGNETRRTVLIEDGILTGYMQDETNARLTGTQSTGNGRRESYASAPMPRMTNTFMENGSYEPEEIIASIDKGIYAVNFGGGQVDITSGKFVFSASEAWWVEGGRLQYPVKGATIIGNGPEVLKHVSMIGNDTALDSGVGVCGKEGQSVPVGVGQPTLRIDAGLTVGGSAI

SEQ ID NO: 1464 - protein, 78 aa, Neisseria meningitidis
MRKACRNRPLAEVQTKRNRYLSKTRYVVEQSFGTLHRKFRYARAAYFGLLKVSAQSHLKAMCLNLLKAANRLSAPAAA

SEQ ID NO: 1465 - protein, 39 aa, Neisseria meningitidis
MSDKPILLSPAAKKEALDRAVKEIRAKYGDKAIVKGCVK

SEQ ID NO: 1466 - protein, 207 aa, Neisseria meningitidis
MFLRKRNDPSSLQQAAESRRSIYSLNKNLPVGKDEVVQIVEHAVLHTPSSFNSQSARVVVLFGEEHDKVWQFVEDALRAAVPADSFEPTAQKLNLFKAGAATILFYEDQNVVKGLQEQFPAYAANFPVWADQANAMVQYAVWTTLAAVGVGANLQHYNPLPDAAIAKAWNIPENWLLRAQMVIGGIEGAAGEKTFEPVAERLKVFGA

SEQ ID NO: 1467 - protein, 188 aa, Neisseria meningitidis
MSIKSDKWIRRMSEEFGMIDPFEPNQIKEADGKRIISYGTSSYGYDIRCANEFKIFTNINSTIVDPKNFDPKNFVTVEDDCCIIPPNSFALARTVEYFRIPRNVLTVCLGKSTYARCGIIVNVTPFEPEWEGYVTLEFSNTTPLPAKIYAGEGVAQVLFFESDEICKTSYKDRNGKYMGQTGVTLPKA

SEQ ID NO: 1468 - protein, 476 aa, Neisseria meningitidis
MTWETVIGLEIHVQLNTKSKIFSGASTAFGAEPNAHASVVECALPGVLPVMNREVVEKAIKLGLALDAKINQKNVFDRKNYFYPDLPKGYQISQLDLPIVEHGKLEIVVGDDVKTINVTRAHMEEDAGKSVHEGLNSATGIDLNRAGTPLLEVVSEPEMHSAAEAVAYAKALHSLVTWLDICDGNMAEGSFRVDANVSVRPKGQAEFGTRREIKNLNSFRFLEQAINYEVEAQIEILEDGGKVQQATMLFDPEKGETRVMRLKEDAQDYRYFPDPDLLPVIISDAQMQKAKAEMPELPKEMAARFVADYGVSDYDARLLTASRAQAAYFEEAAKESGQGKPTANWMNGELAAALNKAGLELADSPITAPRLAALVGKIADGTLSSKLAKKAFEAMWAEPEATIAEIIEKHGLQQMTDTGAVEAIVDEVLANNAKAVEQFKSGNEKALNAIVGQVMKASKGKANPAQVQELIKAKLA

SEQ ID NO: 1469 - protein, 319 aa, Neisseria meningitidis
MKPVFLDFEQPIAELTNKIDELRFVQDESAVDISDEIHRLQKKSNDLTKSIFSKLTPAQVSQVSRHPQRPYTLDYIEALFTDFEELHGDRHFADDYAIVGGLARFNGQSVMVVGHQKGRDTKEKIRRNFGMPRPEGYRKALRLMKTAEKFGLPVMTFIDTPGAYPGIGAEERGQSEAIGKNLYELTRLHVPVLCTVIGEGGSGGALAVAVGDYVNMLQYSTYSVISPEGCASILWKTAEKAADAAQALGITADRLQKLDLVDTVIKEPLGGAHRDFGQTMKNVKAVLEKQLHEAQSIPLADLLSRRFDRIMAYGKFSEQ

SEQ ID NO: 1470 - protein, 325 aa, Neisseria meningitidis
MIYPWHNEQWRQIAEHWERRPNAWLFAGKKDTGKTTFARFAAKALLCETPAPGCKPCGECMSCHLFGQGSHPDFYEITPLSDEPENGRKLLQIKIDAVREIIDNVYLTSVRGGLRVVLIHPAESMNIQAANSLLKVLEEPPPQVVFLLVSHAADKVLPTIKSRCRKMVLPAPSHEEALAYLRERGVAEPEERLAFHSGAPLFDEADGVRALRIKLLDILAEPRLLKILDYAALFDKEKLPLAVFVGWMQKWLVDLGLCLQHMKPVYYPAYEDRLLQTASGFRLRNVFAAEDMLKQLAPYGFHTLNVKMQIEHLLINYLELKKENG

SEQ ID NO: 1471 - protein, 126 aa, Neisseria meningitidis
MPSEPPAASGLSGAIQQGRNMITLTENAAKHINDYLAKRGKGLGVRLGVKTSGCSGMAYNLEFVDEADGDDLIFEGHGARIYIDPKSLVYLDGTQVDYTKEGLQEGFKFENPNVKDSCGCGESFHV

SEQ ID NO: 1472 - protein, 336 aa, Neisseria meningitidis
MSKKRVLTGVTTTGIPHLGNYVGAIRPAVRAAQNPDTESFLFLADYHGIIKCHEPEMIHQSTQAVAATWLACGLDPERTTFYRQSDIPEVMELNWILTCITAKGLMNRAHAYKAAVQANAENGQEDPDFGVEMGLFSYPILMTADILMFNANEVPVGRDQIQHVEMARDIAGRFNHRFKEIFTLPEVKIDENVELLVGLDGRKMSKSYGNTIPLWENDKKTQKSVNKIITNMKEPGEPKQPDESPLFEIYKAFSTPSETAAFTQMLAEGLAWGEAKKLLAAKINAELAEPRERYNELTADPSQIEEILQAGAQKARKEARELLDKVRDAVGIRPLK

SEQ ID NO: 1473 - protein, 89 aa, Neisseria meningitidis
MAMNKLNFLLLLAVCVSAFSVVMQQNQYRLNFTALDKAKKQEIALEQDYAQMRLQQARLANHEAIRAAAEKQNLHPPVSGNTFMVAHQR

SEQ ID NO: 1474 - protein, 195 aa, Neisseria meningitidis
MEHKLPQLPYELDALSPHLSKETLEFHYGKHHQTYITNLNNQIKGTEFENLPLEEIVKKSSGGVFNNAAQTWNHTFYWLGFTSKGQGKPAGKLAAAIDAKWGSFEKFQEAFNACAAGTFGSGWAWLVKTPAGGLDLVSTSNAATPLTTENTPLLTCDVWEHAYYIDYRNSRPNYLKGFWEIVNWDEVAKRFAALS

SEQ ID NO: 1475 - protein, 272 aa, Neisseria meningitidis
MKGMDKLRYQQDFLNIRPIFTAGEQEYLTGLSDRLPLSVLTGSVRNIEEIGIDFVYSSAKLEGNTYNQYDTQALLKLGQTAGGKLYSDAVMLINLRESYRHLLSGLDSPEPFDWLDFLKTTHSLISENLLEKGSGGVVRRDSVTISGTDYTPLSNPQSLDTELKWLLQEAPKIENPFDRAVYLHNNLAYLQYFKDCNKRTARNCMTLSLMRSGFFPCVFAPDSYPAYAEAVVAYYETGDYGLFKKYFISAYENTVNKYGPQPDMDISRNFSL

SEQ ID NO: 1476 - protein, 100 aa, Neisseria meningitidis
MQRQSLTNADGEVRELAAEDFALARPIAEALPEDLAQVLFSHQKQLEEKGVMQKRNTGKTPKQLVTIRLSADVVEKFRAGGKGWQTRINEVLRQYVAQLK

SEQ ID NO: 1477 - protein, 192 aa, Neisseria meningitidis
MSNTIKMVVGLGNPGKEYEQTRHNAGFWFLDELAWKWKASFKEEKKFFGEVARAALPDGDVWLLKPATFMNRSGQAIAALAQFYKIKPEEILVVHDELDIPCGRIKFKLGGGNGGHNGLKDIQAKLGTADYYRLRLGIDHPGDRNLVVGYVLNKPSTEHRRQIDDAVAKSLQAIPDILAGKWEEATRFLHSK

SEQ ID NO: 1478 - protein, 124 aa, Neisseria meningitidis
LRKKTMYFVDRTAVVLKPTVRFLEWLKSTDENMPDLTIEQLRANCSVFLVPQFDEPEAVVSYFDERYRQIFEAELAGWDIDKDKWPQDMGLKAFWEFFDIEIHDMVLDMEEAELNITPVFDNMM

SEQ ID NO: 1479 - protein, 419 aa, Neisseria meningitidis
MHVSELQTLHISKLLELAEEHGIENANRFRKQDLVFAIVRQMMKKGEGFTCSGTLEILPDGFGFLRSADTSYLAGPDDIYVSPTQIRRFNLHTGDTIEGSVRVPKDNERYFALVRLDSINGDHPEVCRHKILFENLTPLFPTEQLKLERDLKSEENLTGRAIDLISPIGKGQRALLVAPPKSGKTVMLQNIAHAVTSNYPEVELIVLLIDERPEEVTEMSRSVRGEVVSSTFDEPAQRHVQVAEMVLEKAKRMVEHKKDVVILLDSITRLARAYNTVVPTSGKILTGGVDANALHRPKRFFGAARNVEEGGSLTIIATALVETGSRMDDVIYEEFKGTGNMELHLDRRMAEKRLFPAININKSGTRREELLVPNDQLQRMWLLRKFLHPMDEIEAAEFLIGKIKASKNNDDFFELMRGK

SEQ ID NO: 1480 - protein, 186 aa, Neisseria meningitidis
MNRLLLLSAAVLLTACGSGETDKIGRASTVFNILGKNDRIEVEGFDDPDVQGVACYISYAKKGGLKEMVNLEEDASDASVSCVQTASSISFDETAVRKPKEVFKHGASFAFKSRQIVRYYDPKRKTFAYLVYSDKIIQGSPKNSLSAVSCFGGGIPQTDGVQADTSGNLLAGACMISNPIENPDKR

SEQ ID NO: 1481 - protein, 460 aa, Neisseria meningitidis
MANIARDIFKAYDIRGIVGKTLTDDAAYLIGRAIAAKAAEKGMTRIALGRDGRLSGPELMEHIQRGFTDSGIGVLNVGMVATPMLYFAAINECGGSGVMITGSHNPPDYNGFKMMLGGDTLAGEAIQELLSIIEKDGFAAAGKQGSVTEKDISGEYHNHIVGHVKLKRPMNIAIDAGNGVGGAFAGKLYRALRCGVTELFCDVDGNFPNHHPDPSKPKNLQDLIAALKNGDAEIGLAFDGDADRLGVVTKDGNIIYPDRQLMLFAQDVLSRNPGAKVIFDVKSTRLLAPWIKEHGGEAIMEKTGHSFIKSSMKKTGALVAGEMSGHIFFKERWFGFDDGLYAGARLLEILSASDNPSEVLNNLPQSISTPELNIDLPEGSNGHKVIEELAANAKFEGATEIITIDGLRVEFPDGFGLMRASNTTPILVLRFEADTQEAIERIQNQFKAVIESNPNLIWPL

SEQ ID NO: 1482 - protein, 473 aa, Neisseria meningitidis
MDTKEILGYAAGSIGSAVLAVIILPLLSWYFPADDIGRIVLMQTAAGLTVSVLCLGLDQAYVREYYAAADKDTLFKTLFLPPLLSAAAIAALLLSRPSLPSEILFSLDDAAPGIGLVLFELSFLPIRFLLLVLRMEGRALAFSSAQLVPKLAILLLLPLTVGLLHFPANTAVLTAVYALANLAAAAFLLFQNRCRLKAVRHAPFSPAVLHRGLRYGIPIALSSIAYWGLASADRLFLKKYAGLEQLGVYSMGISFGGAALLFQSIFSTVWTPYIFRAIEENAPPARLSATAESAAALLASALCLTGIFSPLASLLLPENYAAVRFIVVSCMLPPLFCTLAEISGIGLNVVRKTRPIALATLGALAANLLLLGLAVPSGGARGAAVACAASFWLFFAFKTESSCRLWQPLKRLPLYLHTLFCLTSSAAYTCFGTPANYPLFAGVWAAYLAGCILRHRKDLHKLFHYLKKQGFPL

SEQ ID NO: 1483 - protein, 480 aa, Neisseria meningitidis
VNYFPIFANLAGRPVLVVGGGSVAARKISLLLDAGAQVRVVANQLNAELSALAAENKILWLAEEFRAEHIRTVFLIIAASSDQALNRRVFQLAESCQKPVNVVDDRDYCSFIFPSIINRNPIQIAVSSSGSAPVLARLLREKLEALLPHSLGDMAEISGRWRDAVKAKLKSVTERRRFWEKQFNGRFAALVKNQQTAQAEQELAKQLEQNYQGGFVSLVGAGPGDAGLLTLKGLQEIQQADVVLYDALVSDGILSLVRRDAERIFVGKRARGDRTPQEDTNALMVRLAREGRRVVRLKGGDPFVFGRGGEELETLARHQIPFSVVPGITAAVGATAYAGIPLTHRDYAQSAVFVTGHRKADAPDIEWQTLARSRQTLVIYMGALKAALIAERLQQHGRSPDTPAAVISQGTLPAQKTATGTLANLAELAETAPNPALIVIGEVVGLHEKLAWFGENGEGENRVGQAYPALGGLNAGQRAA

SEQ ID NO: 1484 - protein, 336 aa, Neisseria meningitidis
MNHTVTLPDQTTFAAGDGETVLAAAARQNLNLPHSCKSGVCGQCKAELVSGDIQMGGHSEQALSEAEKAQGKILMCRTTAQSDISINIPGYKADALPVRTLPARIESIIFKHDVALLKLALPKAPPFAFYAGQYIDLLLPGNVSRSYSIANSPDQEGILELHIRRRENGVCSEMIFGSEPKVKEKGIVRVKGPLGSFTLQEDSGKPVILLATGTGYAPIRSILLDLIRQNSSRTVHFYWGARHQDDLYALEEAQALADRLKNACFTPVLSRPGEGWQGRKGHVQDIAAQDHPDLSEYEVFACGSPTMTEQTKNLFVQQHKLPENLFFSDAFTPSAS

SEQ ID NO: 1485 - protein, 199 aa, Neisseria meningitidis
MVFITRLFKSIKQWLVLLPMLSVLPDAAAEGIAATRAEARITDGGQLSISSRFQTELPDQLQQALRRGVPLNFTLSWQLSAPIIASYRFKLGQLIGDDDNIDYKLSFHPLTNRYRVTVGAFSTDYDTLDAALRATGAVANWKVLNKGALSGAEAGETKAEIRLTLSTSKLPKPFQINALTSQNWHLDSGWKPLNIIGNK

SEQ ID NO: 1486 - protein, 929 aa, Neisseria meningitidis
MTDYSKTVNLLESPFPMRGNLAKREPAWLKSWYEQKRYQKLREIAKGRPKFILHDGPPYANGDIHIGHAVNKILKDIIIRSKTQAGFDAPYVPGWDCHGLPIEVMVEKLHGKDMPKARFRELCREYAAEQIARQKKDFIRLGVLGDWDHPYLTMDFKTEADTVRMLGEIYKSGYLYRGAKPVQFCLDCGSSLAEAEVEYKDKVSPAIDVAYPFKDTAALAAAFGLAGIEGKAFAVIWTTTPWTLPASQAVSVGADVVYQLIDTPKGKLVLAKDLAEDALKRYGFSDGIAILAETTGDKLENLHMNHPFLERDIPMLNGDHVTTDAGTGLVHTAPAHGLEDYAVCNKYGIELYNPVNAEGRYIGETPRVAGMRVWEANPVILQWLEETGNLLASSKIEHSYAHCWRHKTPLIYRATGQWFVGMDKAGADGKTLRDKAIKAVDDTEFFPSWGRARLEAMIEGRPDWVVSRQRYWGTPMTFFVHKETGELHPNSAELLEKVALKIEEKGIEAWFSLDKSELLSAEDCENYDKLSDTMDVWFDSGSTHYSVVKQREELEWPADLYLEGSDQHRGWFQSSMLTGCASSMGRAPYKQLLTHGFVVDGEGKKMSKSIGNVVAPQEVYNEFGADILRLWAASTDYSGELAISKEILKRVTESYRRIRNTLSFLFANLSDFNPIEDAVQQADMVEIDRYALVLARRLQERLAGDYYPRYAFHFAVKEMVSFCSEDLGAFYLDILKDRLYTTKADSRARRSAQTALYHITRSLVLLIAPILCFTGEEAWDIIGGGEEDSVLFHTWHEFPTINEKTEAELVKKWTAIREAREAVTAAIEPLRADKTVGSSLQAEAEITAPEEMAGYLNALGEELRFAMLVSKAEVKVGSELAVAAKASDGEKCERCWHYTRDVGAVAGYETVCKRCAENVGGEGETRHYA

SEQ ID NO: 1487 - protein, 160 aa, Neisseria meningitidis
MKYLNLAAITLAATFAAHTASADELAGWKDNTPQSLQSLKAPVRIVNLWATWCGPCRKEMPAMSKWYKAQKKGSVDMVGIALDTSDNIGNFLKQTPVSYPIWRYTEANSRNFMKSYGNNVGVLPFTVVEAPKCGYKQTITGEVNEKSLTEAVKLAHSKCR

SEQ ID NO: 1488 - protein, 280 aa, Neisseria meningitidis
MDKERILTPAVVFSVALLHLAMVALLWQAHKLPVIESGNVIEFVDLGDFGGGDGAPEGAGAPAAPEPQPVPEPPKPVEPPKPVLKPVVTKKADADIQQPKEEPKPEEKPKPEEKPKPEPKPEAKPVPKPAEKPVEKPSEKPAEHPGNASAKADSEQGNGEDKGTGIKGDGTGRGEGSGKGSGGVKGEHGEGAGSSKGNPLRANGSIPRPAYPTLSMENDEQGTVVLSVLVSPGGHVESVKIVKSSGFSRLDNAARKAAQNGHFQANAWTEFKVPVKFELN

SEQ ID NO: 1489 - protein, 498 aa, Neisseria meningitidis
MTTENQAGSPASGIGTSEQTKAAPKAKKTFDPRASVIQIHPEGERIHPKKAEGRFAKLRIAAVLATQFVFYVIPWFNWSGRQAVVFNIPERHFFIFGLSLGVGDLIYLALLLMICAFGLFWWTTIAGRLWCGYSCPQTVYTEIMLWIDNLVEGDRNKRLKLEKSPWNFTKIRIKATKYLLIFLVCAWTGITFAGWFVPIRQFVPDLFTGAAGGGAMFATAFYGFMTFFFAHIMREKVCLHMCPYARFQSAMFDKDTLIVSYDAERGEPRGARKKTVNKEEAGLGDCINCAMCVQVCPVGIDIRNGLQYQCIGCAACIDACDEIMDKMGYPRGLIRYTTESALEHEYSEKDIKKRLLRPRVAGYGAVLALVIIAFLAGLSTRKMVEVDILKDRGVLVRENAKGWLENAYSLRIINKSEKEQLITASVKGFDEIALTGLPEGGIKVAPRETVTLPVQVSTIPEYADKGSHPIEFTFQYRESGAPDGKPVVLEEDATFIGE

SEQ ID NO: 1490 - protein, 622 aa, Neisseria meningitidis
LPSKPQNLPERQQSVIDKVKTDDGSNIYTSPYLTQSNHQNGSTNSGANQPKNEATGYKNFEYVYSGWFYKHAANETDFSKNKFKSGDDGYIFYHGEKPSRQLPASGKITYKGVWHFVTDTKKGQKFNDILEASKGQGDRYSGFSGDEGETISNRTDSELKTDQEGYGFTSNLEVDFGSKKLTGKLIRNNRVTNATTNDKYTTQYYSLDAQITGNRFNGKAIATDKPDTGGTKLHPFVSDSSSLSGSFFGPKGEELGFRFLSDDKKVAVVGSAKTKDKNANGNTPAASSGAGAATMPSETRLTTVLDAVELKSDGKKVENLDNFSDATRLVVDGIMIPLLPETSESGSNQADKGKKGKNGKNGGTDFTYKTTYTPKSDEKDTQAGTPTNGAQTASNTAGDTNGKTKTYEVEVCCSNLNYLKYGMLTRKNSKSAMQAGESSSQADAKTEQVEQSMFLQGERTDEKEIPTDQNVVYRGSWYGHIANDKSTSWSGNASDKEGGNRAEFTVNFGEKKITGKLTAENRQAQTFTIEGMIQGNGFEGTAKTAESGFDLDQKNTTRTPKAYITDAKVKGGFYGPKAEELGGWFAYPGDKQTEKATATSSDGKSASSATVVFGAKRQQPVQ

SEQ ID NO: 1491 - protein, 90 aa, Neisseria meningitidis
MNKRMKMCPACQQGYLYHSKPKYLHDEIILCDECDAVWLKGMNIFYGEYEKDFYSYVPFMESQGITSECIWEGDLFDHPYYEDENSNGMD

SEQ ID NO: 1492 - protein, 217 aa, Neisseria meningitidis
MKFKYVFLLACVVVSLSYRLNAAPMFNDNPVVYGKIKVQSWKERRDFNIVKQDLDFSCGAASVATLLNNFYGQTLTEEEVLKKLDKEQMRASFEDMRRIMPDLGFEAKGYALSFEQLAQLKIPVIVYLKYRKDDHFSVLRGIDGNTVLLADPSLGHVSMSRAQFLDAWQTREGNLAGKILAVVPKKAETISNKLFFTHHPKRQTEFAVEQIRQARAE

SEQ ID NO: 1493 - protein, 395 aa, Neisseria meningitidis
MTEDERFAWLQLAFTPYIGAESFLLLMRRFGSAQNALSAPAEQVAALIRHKQALEAWRNAEKRALARQAAEAALEWEMRDGCRLMLLQDEDFPEMLTQGLTAPPVLFLRGNVRLLHKPSAAIVGSRHATPQAMRIAKDFGKSLGGQNIPVVSGMASGIDTAAHQGALEAEGGTIAVWGTGIDRIYPPSNKNLAYEIAEKGLIVSEFPIGTRPYAGNFPRRNRLIAALSQVTLVVEAALESGSLITAGLAAEMGREVMAVPGSIDSPHSKGCHKLIKDGAKLVECLDDILNECPGLLQNTGASSYSINKDTPDTGRRAVQTAYAPPPAAKMPSEAAAGGTAHGGILDKMGFDPVHPDVLAEQLAMPAADLYAALLELELDGSVAAMPGGRYQRIRT

SEQ ID NO: 1494 - protein, 362 aa, Neisseria meningitidis
MSQTIDELLLPHRNAIDTIDAEILRLLNERAQHAHAIGELKGTGAVYRPEREVAVLRRIQDLNKGPLPDESVARLFREVMSECLAVERPLTIAYLGPQGTFTQQAAIKHFGHAAHTMACPTIDNCFKQVETRQADYLVAPVENSTEGSVGRTLDLLAVTALQACGEVVLRIHHNLLRKNNGSTEGIAKVFSHAQALAQCNDWLGRHLPNAERIAVSSNAEAARLVAESDDGTVAAIAGRTAAEIYGLDMVAECIEDEPNNTTRFLVMGHHETGASSSDKTSLAVSAPNRAGAVASLLQPLTESGISMTKFESRPSKSVLWEYLFFIDIEGHRRDAQIQTALERLGERASFVKVIGSYPTAVL

SEQ ID NO: 1495 - protein, 107 aa, Neisseria meningitidis
MQNETINLKQHLAAIKEYWQPEIINRHGFQFRLVKLLGDYGWHTHGYSDKVLFAVEGDMAVDFADGGSMTIREGEMAVVPKSVSHRPRSENGCSVVLIELSDPSEAV

SEQ ID NO: 1496 - protein, 120 aa, Neisseria meningitidis
MARIAGVNIPNNAHIVIGLQAIYGIGATRAKLICEAANIAPDTKAKDLDETQLDALRDQVAKYEVEGDLRREVTMSIKRLMDMGCYRGFRHRRGLPCRGQRTRTNARTRKGPRKAIAGKK

SEQ ID NO: 1497 - protein, 298 aa, Neisseria meningitidis
LNPTNDLKAWQQRAQAQTELLLERFLPSENEIPHTLHEAMRYAALDGGKRLRPMLVLAASELGGVVHEAVEQAMAAIEMIHVYSLVHDDMPAMDNDSLRRGKPTCHVQYDEATALLVGDALQTQAFDVLSRPTELPAARQLAMLSVLAKAGGSAGMAGGQAIDLANVGKQMVQADLEQMHSLKTGALIRAAVLLGATACPDLSDAELSVLDAYAAKLGLAFQVIDDVLDCEADTATLGKTAGKDADNDKPTYVKLMGLEAARSYAHKLVAEAVALLEPFGDKALRLRQLAEFAVARKY

SEQ ID NO: 1498 - protein, 166 aa, Neisseria meningitidis
MNAMPQTAAQNETLHTCSIIVDDAQDFSPMLLDAGRDDTLISESMIPQIRTVAALIAAERHDFSRSSPAEFTDAADFFAARILVLGVRRFHLDVSLLQILKTANSRARRFAEKHRLFFTPAQAELSLNKHKNRRLLTVETEHEVENKGNPVANSLAFVRKLHTLPL

SEQ ID NO: 1499 - protein, 144 aa, Neisseria meningitidis
MTEPKHEMLTKEQVAARKKAKAKIRTIRIWAWVILALLALTALLSQCAMSKPQAKQKIVESCVKNIPFAEKWQNDLRARGLDSNNTRLAVDYCKCMWEQPLDRLSEKQIRSFGKLGAQEQLDLLGGANAFEARDKQCVADLKSE

SEQ ID NO: 1500 - protein, 315 aa, Neisseria meningitidis
MNILSKISSFIGKTFSLWAALFAAAAFFAPDTFKWAGPYIPWLLGIIMFGMGLTLKPSDFDILFKHPKVVIIGVIAQFAIMPATAWLLSKLLNLPAEIAVGVILVGCCPGGTASNVMTYLARGNVALSVAVTSVSTLISPLLTPAIFLMLAGEMLEIQAAGMLMSIVKMVLLPIVLGLIVHKVLGSKTEKLTDALPLVSVAAIVLIIGAVVGASKGKIMESGLLIFAVVVLHNGIGYLLGFFAAKWTGLPYDAQKTLTIEVGMQNSGLAAALAAAHFAAAPVVAVPGALFSVWHNISGSLLATYWAAKAGKHKKP

SEQ ID NO: 1501 - protein, 662 aa, Neisseria meningitidis
MGITIGELLKLNIQGLPTTARGLRERAKTQNWPYIEEVGKARGGRLKKYLIASLPAEIRAAIMKRQSDELTEKMPKTLPQVRPGTAMSAQALAEAAKLLNEKQRSVADARCAVVAAVLGIKYQYGCSAKAAVAQFLGLLAEGKLDAVTLGNLEKANDRSRSAKVGERTLDGWISAYLKAENATERLVALAPKTTKAVKPIESYGWLPMFMQFHNIPSAPKLAHSYRRFVQWAEAENMPVNDVPNLSMVRRVWDKLPMIMQERGRKTGAAYKSLLPYVKRDWGALKPNDVWIGDGHSFKAKVAHPVHGRPFKPEVTVIIDGCTRFVVGFSVSLAESCVAVSDALRIGVKHFGLPIIYYSDNGGGQTGKTIDHEITGITSRLGIRHETGIAGNPQGRGIIERWWKDNLIEMARQYETFAGAGMDSSTKNLMYRKMESAFNALEKGKDLTEEQQKYLKKLPSWSRFIADVVKCIDEYNNRPHGELPRHPDGGHYTPKAYREMRLEQDGIAPDMLSAEELATMFMPQEVRKVQRGWLDLFNNSYFSTELAEYHKDEVRVSYDLSDASAVNVFDMDGKFITKAQANGNSREAFPTARIDQLAEKRRKGKIKRAENAIKLANAEVNPALEQAAVWDELGHLGGNVIEAEYAVLPRTGTDDFVLFEADR

SEQ ID NO: 1502 - protein, 388 aa, Neisseria meningitidis
MNLHEYQAKELLAGYGLPVQGGILARNGEEAAAAYDKLGGKFAVVKAQVHAGGRGKAGGVKVVKSREEAKEVAESLIGTNLVTYQTDANGQPVNSVLVCEDMYPVQTELYLGAVVDRSTRRITFMASTEGGVEIEKVAAETPEKIFKVTVDPLVGLQPCQAREVAFQLGLKDKQINEFVKLMTGAYKAFVDNDFALFEVNPLAVRENGALACVDGKIGIDSNALYRLPKIAELRDKSQENERELKASEFDLNYVALEGNIGCMVNGAGLAMATMDIIKLKGGQPANFLDVGGGATKDRVVEAFKLILEDKSVKGVLINIFGGIVRCDMIAEAIVAAVKEINVNVPVVVRLEGNNAELGAKILNESGLKLTSADGLNDAAEKIVAAVNA

SEQ ID NO: 1503 - protein, 105 aa, Neisseria meningitidis
MQKRIDEIQSKYREWCHLLPQLEEDIRRWKYVVTLIRDMDNFYTHEYQACHQAIEDGVELDLRTEGEYSIMSEDALWNALGEFHQLAWLYLRSSVDALDKYTQED

SEQ ID NO: 1504 - protein, 108 aa, Neisseria meningitidis
MIAKHIDRFPLLKLDQVIDWQPIEQYLNRQRTSYLRDHRGRPAYPLLSIFKAVLLGQWHSLSDPELEHSLITRIDFNLFCRFDELSIPDYSTLCRYRNWHPVRIAQTD

SEQ ID NO: 1505 - protein, 335 aa, Neisseria meningitidis
MSTFFRQTAQAMIAKHIDRFPLLKLDQVIDWQQIEQYLNRQRTRYLRDHRGRPAYPLLSMFKAVLLGQWHSLSDPELEHSLITRIDFNLFCRFDELSIPDYSTLCRYRNWLAQDDTLSELLELINRQLTEKGLKIEKASAAVVDATIIQTAGSTQRQAIEVDEEGQINGQTTPSKDKDARWTKKNGLYRLGYKQHTRTDEEGYIKKLHITPANAHECKHLLPLLEGLPKGTTVYADKGYDSEENRQHLEEHQLLDGIMRKAHRKHPLSEVQTKRNRYLSKTRYVVEQSFGTLHRKFRYARAAYFGLIKVSAQSHLKAMCLNLLKAANRLSAPAAA

SEQ ID NO: 1506 - protein, 267 aa, Neisseria meningitidis
MKKILLTVSLGLALSACATQGTVDKDAQITQDWSVEKLYAEAQDELNSSNYTRAVKLYEILESRFPTSRHARQSQLDTAYAYYKDDEKDKALAAIERFRRLHPQHPNMDYALYLRGLVLFNEDQSFLNKLASQDWSDRDPKANREAYQAFAELVQRFPNSKYAADATARMVKLVDALGGNEISVARYYMKRGAYIAAANRAQKIIGSYQNTRYVEESLAILELAYQKLGKPQLAADTRRVLETNFPKSPFLTHAWQPDDMPWWRYWH

SEQ ID NO: 1507 - protein, 90 aa, Neisseria meningitidis
VFAVIFFSTLGCILAWIRDIPKIKSKKILARSLYIIGIINIIISYVLIKNILVSVSDEGGIKYVAIYLSNLFFWTVLMYVLVKRLSKKPS

SEQ ID NO: 1508 - protein, 60 aa, Neisseria meningitidis
MEKKFLDILVCPVTKGRLEYHQDKQELWSRQAKLAYPIKDGIPYMLENEARALGEEELKV

SEQ ID NO: 1509 - protein, 215 aa, Neisseria meningitidis
MASKSSKTNLDLNNLHLLNLPARLFIALLAVAAVLGLGYAGLFKSQMESLEEYEAKETELKNTYKQKSIDAASLNNLRDELASIRSAFDIMLKQLPTDAEIPNLVQELHQAGSSNGLRLDSVMPQPPVDDGPIKRLPYSISITGNYEQISQFTRDVGSLSRIITLESLKIAQSPENGGNPDGKSSILNLSAIATTYQAKSVEELAAEAAQNAEQK

SEQ ID NO: 1510 - protein, 103 aa, Neisseria meningitidis
MKYKSEALAAIHEMMEGAYNIGAIDKKTMRGFDKSCLTEIKPLSGGDIKAIREKEALSQAAFAIYLNVGKNHVSAWERGVKKPSGAALKLLTIVKNKGIEAIA

SEQ ID NO: 1511 - protein, 146 aa, Neisseria meningitidis
VRAFQTALRPSRILNILTVSLHAASLAVCLTWFYGWMMWFGLAALVASYAYSLRITNLKHRHAITAITIDRDGQAEIVSGKDKTAATLAGSGMVTPYALFLQWDTGGKTVRHCITHDMADPESYRRLKVWVLWRQPKKTAETDTPS

SEQ ID NO: 1512 - protein, 816 aa, Neisseria meningitidis
MTQKEKHFEEYAALATLPLRDVVVYPHMVLPLFVGRPKSIAALENAITREEPVFLLAQTDAAVEEPVAADLYQTGTVAQVLQVLKLPDGTVKVLVEGLYRGRVLTIEDTGGLFVSHIETVVEEDTGGNTDLEAVRRTLLAQFEQYAKLNKKIPAEIIGSINGIAENSRLTDTVAAHLQLKLAQRQQILEIPEIGKRMEFLLAQLESELDIMQAEKRIRGRVKRQMEKSQREYYLNEQIKAIHKELGEEDENGELDALEAGIKKAGMSKEAEEKCLSELKKLKMMPPMSAESTVVRNYIDTLLELPWKKKSRVSKDIAKAGLVLDADHYGMEKVKERILEYLAVQKRMDKLKGPILCLVGPPGVGKTSLGESIAKATGRKYVRMALGGVRDESEIRGHRRTYIGSMPGKILQNMAKAGVKNPLFLLDEIDKLGSDFRGDPASALLEVLDPEQNNKFADHYAEVDYDLSDVMFIATSNSLNIPTPLLDRMEIIRLSGYTEDEKINIAMQYLVPKQMKRNGVKEGELAIEESAVRDIIRYYTREAGVRSLDREIAKICRKVVMQITLDEDSKTKKTGKAKPRAVKVNEKNLHDYLGVRRFDYGVAESENRIGQVTGLAWTEVGGELLTVEAAALPGKGVIQCTGQLGDVMKESVSAAWSVVRSRAESVGLAPDFYEKKDIHVHVPEGATPKDGPSAGIAMTLAMVSAFTKIPVRADVAMTGEITLRGEVLPIGGLKEKLLAALRGGIKHVLIPKDNLKDLEEIPENVKTGLTIHPVKWIDEVLALGLESQPEPWAEPSGAEAAAESASKPKPRSRATKH

SEQ ID NO: 1513 - protein, 177 aa, Neisseria meningitidis
MADFNQILTPGDVDGGIINVVNEIPAGSNHKIEWNRKLAAFQLDRVEPAIFAKPTNYGFIPQTLDEDGDELDVLLVTEQPLATGVFLEARVIGVMKFVDDGEVDDKIVCVPADDRNNGNAYKTLSDLPQQLIKQIEFHFNHYKDLKKAGTTKVESWGDAEEAKKVIKESIERWNKQA

SEQ ID NO: 1514 - protein, 215 aa, Neisseria meningitidis
MRIEITPISESALVCRLNAPSELGKQQKLWAFAAALGQHDRIEEVVVGMNNLTVFTRFDTDLATLADELQYVWEHTAVTDHQGKLVEIPVCYGGEYGPDLAEVAAFHQTVISEIVRRHTAQTYTVFMMGFQPGFPYLGGLPEALHTPRRAVPRTSVPAGSVGIGGSQTGVYPFASPGGWQIIGRTELPLFRADLNPPTLLAAGDQVRFVAERIEP

SEQ ID NO: 1515 - protein, 109 aa, Neisseria meningitidis
VLERVTGKRSCTECSIPELERVVEDLRQHGFTPKKTAGRRPNRRSSADPMMRKIEALLLDNGWSWNYAQGTAKKMFKVDRVEWLSDGNMHKLVAALQISANRKKKEKTG

SEQ ID NO: 1516 - protein, 1161 aa, Neisseria meningitidis
MRLTHIKLSGFKSFTDPTTIHVPGQLVAVIGPNGCGKSNVIDAVRWVLGEASAKQLRGESMQDVIFNGAATRRPAPRASVELVFDNSDHSLQGAWGQYAEVSIKRQLTRQGESTYFINNQTVRRRDITDLFLGTGVGARGYAVIEQGMISRIIEARPEELRAYIEEAAGVSKYKERRKETEGRLKDTREHLQRLGDLQNELARQVEKLEKQAETAERYKSLTAQLNRQQDLLDYAQWQQSLAAADKATAQHQSLQAQQDETATQVQALNDEVHALQTAEQSQQQAVHELSNKRGVLREQIARLEEQIRHQQNLHQRIERDKQAAQAQMQRIHQEQQQIRVQLEENELQAEEKQTELAEWAMQVAEHEERLPELEEAQATLNAAFQTQQDEANRIRRELALKQQQLAHAEQTVAKHEERKDRLKQENQALNLPDEAETAAAQEAAALLQSRQEHYEEQIIAAEEALHAAREAFQTTSSRFQSLKQQHITLQAQQQALSQILSQQQEAADFWQASDHTAAPQLWQHITAPAEWQHALSVILAERLHARAVPQGFVPPEPLPQGQAAWLSDGLSGGIKKSLPVQALLNQIQAQPPFQTALHHWLDGVLCAPDLNYALAHQSDLGAHQIWLTPEGHQVDKVSVLLYAKPAQESLIAQKARLDGIASELDNLAPELSADEAAFKQAEAAVRSSEVQHKNLMQQQQQHTRQYSQAQQRAAELLARTNQGQIRREHIERELAQLAEEQTVLQHTSDGLSDDIAILQEAAAELEHQQQTTAHSRQEQQGRLKQAQLALLEANRQYGLAEVAVHKLNQQKQNYRQQIAQLEQQTFDWQERQQELALAYETEFQNDEQHIKLEELSEAVQTLDEEYIVVQEKLAQIQEQGREQYAKVQTLQTQLPQLQAATQTALLQQQEALINAKRYHQNLTERAADLDALEALTQESPKVLNSSIGSLTQQIEALGAVNLAALQELEEARERDGYYRSQSEDVQTAITLLEEAIAQIDDKTKARFKETFDAVNGKVQTFFPTLFGGGEATLKMIGDDLLTAGVSIMARPPGKKNSTIHLLSGGEKALTAMSLVFALFSLNPAPFCLLDEVDAPLDDANTSRFCNLVKEMSAQTQFLYISHNRLTMEMAEQLVGVTMQEKGVSRVVAVDIKQALEMAEAV

SEQ ID NO: 1517 - protein, 144 aa, Neisseria meningitidis
LNFKISEGSTRVESDFKETLVRFGRDMLQDMPPKIRSATLVALTTLLVGGALGYGYLEYLKQVASEGYQTERLYNAVDRLAESQERITSAILKGARGADFVQIGRRSYSREDISEANRRAERVPYGAELVSDGNFTAVLSDIGD

SEQ ID NO: 1518 - protein, 581 aa, Neisseria meningitidis
LNLTERPNFMNLHQTVEHEAAAAFAAAGIADSPVVLQPTKNAEHGDFQINGVMGAAKKAKQNPRELAQKVADALAGNAVIESAEVAGPGFINLRLRPEFLAQNIQTALNDARFGVAKTDKPQTVVIDYSSPNLAKEMHVGHLRSSIIGDSISRVLEFMGNTVIRQNHVGDWGTQFGMLVAYLVEQQKDNAAFELADLEQFYRAAKVRFDEDPAFADTAREYVVKLQGGDETVLALWKQFVDISLSHAQAVYDTLGLKLRPEDVAGESKYNDDLQAVVDDLVQKGLAVEDDGAKVVFLDEFKNKEGEPAAFIVQKQGGGFLYASTDLACLRYRVGTLHADRLLYVVDHRQALHFEQLFTTSRKAGYLPENVGAAFVGFGTMMGKDGKPFKTRSGDTVKLVDLLTEAVERATALVKEKNPELGADEAAKIGKTVGIGAVKYADLSKNRTSDYVFDWDAMLSFEGNTAPYLQYAYTRVQSVFRKAGEWDANAPTVLTEPLEKQLAAELLKFEDVLQSVADTAYPHYLAAYLYQIATLFSRFYEACPILKAEGASRNSRLQLAKLTGDTLKQGLDLLGIDVLDVM

SEQ ID NO: 1519 - protein, 216 aa, Neisseria meningitidis
MPVTRPAKINTYTRIIDASLALFNEEGERNISTNHIAAHLGISPGNLYYHFRNKDEIIVQLFKRYSEALLEYLNEAVLPSDVEDSINYMAGIYDVMWEYRFLFSDVNTLLARSAELLGEHNTFTQAKVSPLLVNLLTQLNGLNIIQADQTAMNDLAVNMWMVTKYWFDFDSSLRGRTKLTEDSKARGIRRTLSLLRPYLLPEHRAEYDRKIGNGNL

SEQ ID NO: 1520 - protein, 347 aa, Neisseria meningitidis
MQITDLLAFGAKNKASDLHLSSGISPMIRVHGDMRRINLPEMSAEEVGNMVTSVMNDHQRKIYQQNLEVDFSFELPNVARFRVNAFNTGRGPAAVFRTIPSTVLSLEELKAPSIFQKIAESPRGMVLVTGPTGSGKSTTLAAMINYINETQPAHILTIEDPIEFVHQSKKSLINQRELHQHTLSFANALRSALREDPDVILVGEMRDPETIGLALTAAETGHLVFGTLHTTGAAKTVDRIVDVFPAGEKEMVRSMLSESLTAVISQNLLKTHDGNGRVASHEILIANPAVRNLIRENKITQINSVLQTGQASGMQTMDQSLQSLVRQGLIAPEVARRRAQNSESMSF

SEQ ID NO: 1521 - protein, 151 aa, Neisseria meningitidis
MVDAVVKTPEFVPFTSVGIFRFGADITQYKNILETFMYEPPDEFRTEYYESPDSNLLIAVKKNKIISIFCYQELYFMGVNLIGLNFEDFKQLFHHPKSYGVDEYYLSNESYPTYVYEFDEIGVQAWEAKGKVVTIIAGGKDNYSTEPYYDE

SEQ ID NO: 1522 - protein, 288 aa, Neisseria meningitidis
MAGETITAADYIKHHLQSLTSLSDVTQGQGLKNIADFSFINLDAVFFAVLLGVIGSFLLWRGAKKATAGVPGRFQAAVEFLFEFVDDMCKSIIHNEKSRKAVAPLGLTLFVWIFLMNAMDMLPVDLLPMVWQGITGNHHALLRVVPTADLNTTLALAVGVLLICIYYNIKIKGLGGWFHELFSAPFGAKLAPANFLLNLVEFLSKTVSHGMRLFGNMYAGELVFLLIALLGGAWAASGSVEVMDPILFVFHIIAGLAWAIFHILVITLQAFIFMALAFVYIGQAHDAH

SEQ ID NO: 1523 - protein, 436 aa, Neisseria meningitidis
VANQQTSSGSSKFGDLKKRLLFLFGALIVFRIGAHIPVPGVDAVALAKLYESAGNGILGILNMFSGGSLERFSIFAIGIMPYISASIIVQLASEILPSLKALKKEGEAGRKVITKYTRYGTVLLAILQSLGVASFVFQQGIVVTSSFEFHVSTVVSLVTGTMFLMWLGEQITERGIGNGISLIITAGIASGIPSGIAKLVTLTNQGSMSMLTALFIVFGALLLIYLVVYFESAQRKIPIHYAKRQFNGRAGSQNTHMPFKLNMAGVIPPIFASSIILFPSTLLGWFGSADTNSVLHKIAGLLQHGQLLYMALFAATVIFFCYFYTALVFSPKEMAENLKKSGAFVPGIRPGEQTSRYLEKVVLRLTLFGALYITTICLIPEFLTTVLNVPFYLGGTSLLILVVVTMDFSTQINSYRLTQQYDKLMTRSEMKSFSRK

SEQ ID NO: 1524 - protein, 118 aa, Neisseria meningitidis
VGMTGFNDAAGVASSSDIKGKYVEKVEVAKGVITATMLSTGVNKEIQGKKLSLWAKRQDGSVKWFCGQPVERAAKDDTIKAATDTTTNINTKHLPSTCRNESTAGCIETPPTAFYKNT

SEQ ID NO: 1525 - protein, 315 aa, Neisseria meningitidis
LGRGYRQQALSKRCLKNASSTLSLTLSHGRGNKSQHHRHFQTASVKKPSMNAFNLIIIGDEILHGSRQDKHFAFFKSLLESKGLKLNQVQYLPDEPDLLVRQLRRSFSDGIPTFVTGGIGATPDDHTRQAAAAALDLPVVRHSEAAKFIEGITQKRGEPLDSPEHAQRLKMADFPEGAELVPNPFNNIAGFSIREHYFFPGFPVMAHPMAEWVLETYYADRFNQTERGSRSVYVFEQPESRITPIMEHIEQTYPGVRSYSLPSVGWTHSDGTQVKPHIEFGIKAEGEAVNLLDAAWAEVLHSLDGLGAELKNRVN

SEQ ID NO: 1526 - protein, 197 aa, Neisseria meningitidis
MTTLQERVAAHFAESIRAKQEAEKVLVEPTVQAAELMLQCLMNDGKILACGNGGSAADAQHFAAEMTGRFEKERMELAAVALTTDTSALTAIGNDYGFNHVFSKQVRALGRAGDVLVGISTSGNSANVIEAVKAAHERDMHVIALTGRDGGKIAAMLKDTDVLLNVPYPRTARIQENHILLIHAMCDCIDSVLLEGM

SEQ ID NO: 1527 - protein, 187 aa, Neisseria meningitidis
MKKIIIAALAAAAVGTASAATYKVDEYHANARFAIDHFNTSTNVGGFYGLTGSVEFDQAKRDGKIDITIPVANLQSGSQHFTDHLKSADIFDAAQYPDIRFVSTKFNFNGKKLVSVDGNLTMHGKTAPVKLKAEKFNCYQSPMAKTEVCGGDFSTSIDRTKWGVDYLVNVGMTKSVRIDIQIEAAKQ

SEQ ID NO: 1528 - protein, 43 aa, Neisseria meningitidis
LRACQINPVFKRAAMRYAQSLEAQSIYYFHQNGRPRLPCKPLK

SEQ ID NO: 1529 - protein, 147 aa, Neisseria meningitidis
MKWLLNMIMRPIKFSMVNTLLFIVICSSFFDLLVQLCTILFHSQKIYFITLFLLFIFNFVTKSIYMAIIYPILYFFTIKKYYPYSRKVIILLSLALSIYFSFMDFYFFSIYSDNLSYETESLHLYIPIIINFFSLLVSNFILSFINK

SEQ ID NO: 1530 - protein, 405 aa, Neisseria meningitidis
MDMQSKAKKLIEMIQTAPVEWKPLGGENGIAIIKTGQAVSKQKISNNIGSYPVINSGKEPLGYIDEWNTENDPIGITTRGAGVGSITWQEGRYFRGNLNYAVTIKNRTELDVRFLYHILLEFEQEIHALCTFTGIPALNASNLKKLLIPIPPLETQQKIVKILDKFTELEAELALRKRQYRYYRDFLLDFDNQIGGIADGYKGRLKDVVWKTLGEVFDLKNGYTPSKSNKEYWENGSIPWFRMEDIRENGRILDNSLKHISKSAVKGGKLFPAKSIMMSTTATIGEHALIKVNYISNQQLTNFTIKDEFKDALDINFAFYYFFIIAEQSKKLINTSSLPIISMKELKKLKIPIPPLPEQEKIAAILDKFDTLTHSISEGLPHEIALRRKQYEYYREQLLAFPKAT

SEQ ID NO: 1531 - protein, 92 aa, Neisseria meningitidis; identical to SEQ ID NO: 600

SEQ ID NO: 1532 - protein, 253 aa, Neisseria meningitidis
MDANKEPNWEKRLENLRQTRRMKAVPTYAPLSRPSETGTDAPVPKLDDESRARVLKAYLKKWQEEHNAAVADCGEEVETDPMIVLQENWLNAQASLQMSVSEKHIESRRRILFDAKKDSAEFETGQIEGGENADAAESGTAADGVAENGEGGAEEALMPVQINILNPKAVNRREVFCLSEQELTERLIKRLRPHLTDTVNGIIRTAVQKQMAVFTYQLQQMLHEQAGAVVEDVLEHDVRKILNDIKYELKYKR

SEQ ID NO: 1533 - protein, 754 aa, Neisseria meningitidis
MLAPELEQILQQLYREARKAHYEFISLEHLLLVLIEEDASVPNVLKLCGADLKVVSEQLAASVAENTPLIPEHLLDTVETRPTLGFQRVMQRAMVHTQSAGKAAVEPLDVLVALMSETDSHTVYFLKLQSVTRFEVLRCIAHGSPDDEDGNDSDGLGREGEEAEQKTGSLSDYTVNLNAEVKAGRIDPLIGRKHEMERLVQILCRRRKNNPLLVGEAGVGKTALAEGLAHQIVNSDIPDALKDTEVYALDMGSLLAGTKYRGDFEARVKSVLKQLEKIPHAILFIDEIHTIIGAGSTSGGTMDASNLLKPALAKGSLRCIGATTYDEYRTIFDKDHALSRRFQKIDVVEPTVSETVQILRGLKPMFEAFHQVRYTQGALEAAAELSARYINERFLPDKAIDVMDEAGAAQRILPKSKQKKVIGKAQIETVIAKVSRIPEKTVSHDDKQVLQFLGRDLKNMVYGQENAIDALVAAVKMSRSGLALPDKPIGSFLFSGPTGVGKTEAAKQLAYSLGVPLQRFDMSEYMERHAVSRLIGAPPGYVGFEQGGLLTEAVNKQPHCVLLLDEIEKAHPDIFNVLLQVMDAGKLTDNNGKSADFRNVILIMTTNAGAESLSRPSLGFTAKRERGDEMQAINKLFTPEFRNRLDAIIPFAPLSEPIIVKVVDKFLLQLEHQLLDKKVEAEFTSALHKYLAEKGFDPQMGARPMHRLIQEKIRKPLADELLFGKLADGGFVRIDWDTAKEEAVLKFKKSKVKM

SEQ ID NO: 1534 - protein, 615 aa, Neisseria meningitidis
VHDTRTMMIKPTALLLPALFFFPHTYAPAADLSENKAAGFALFKNKSPDTESVKLKPKFPVRIDTQDSEIKDMVEEHLPLITQQQEEVLDKEQTGFLAEEAPDNVKTMLHSKGYFSSKVSLTEKDGAYTVHITPGPRTKIANVGVAILGDILSDGNLAEYYRNALENWQQPVGSDFDQDSWENSKTSVLGAVTRKGYPLAKLGNTRAAVNPDTATVDLNVVVDSGRPIAFGDFEITGTQRYPEQIVSGLARFQPGTPYDLDLLLDFQQALEQNGHYSGASVQADFDRLQGDRVPVKVSVTEVKRHKLETGIRLDSEYGLGGKIAYDYYNLFNKGYIGSVVWDMDKYETTLAAGISQPRNYRGNYWTSNVSYNRSTTQNLEKRAFSGGIWYVRDRAGIDARLGAEFLAEGRKIPGSDIDLGNSHATMLTASWKRQLLNNVLHPENGHYLDGKIGTTLGTFLSSTALIRTSARAGYFFTPENKKLGTFIIRGQAGYTLARDNADVPSGLMFRSGGASSVRGYELDSIGLAGPNGSVLPERALLVGSLEYQLPFTRTLSGAVFHDMGDAAANFKRMKLKHGSGLGVRWFSPLAPFSFDIAYGHSDKKIRWHISLGTRF

SEQ ID NO: 1535 - protein, 319 aa, Neisseria meningitidis
MTQPLFRRLKELHPGCTIDVFAPKWSMAVFERMPEVNEILENPFGHGALELKRRWRVGRDLGRRGYDQVIVLPGSLKSAIIALATGIGKRTGYVGESRYFLLNDIRRLDKERLPLMVDRYTALAHPSQEDFDGHSGFPEFSIDERRREISVETFGLDIGKPVLAFCPGAEFGPAKRWPTRYFAELGKHYSAAGWQVWLFGSQKDDEIAEEINCLSDGMCVNLCGKTDLSQAMDLLSLADTVVCNDSGLMHLAAALGRKVVAVYGSSSPTHTPPLSDRAKIVSLHLECSPCFKRECPLGHTDCLNRLYPEKIVQAVEEAV

SEQ ID NO: 1536 - protein, 51 aa, Neisseria meningitidis
MRDKIKLESSAGTGHFYTTTKNKRTMPGKLEIKKFDPVARKHVVYKETKLK

SEQ ID NO: 1537 - protein, 183 aa, Neisseria meningitidis
LSGINIKLKSGDSLLIRGPSGCGKTSLLRALAGLWPFGSSGKVSRPPHQDILFLPQRPYTAQGSLRDAVCYPDIDKQHPELIEAMNTCRLGYLIDKLDKTDDWQHKLSLGELQRVAFVRALLSKPKIVLLDEATAALDEPAEAALYRALKQKLPDSIIISIGHRSTLNAFHNMRLDVGNVACG

SEQ ID NO: 1538 - protein, 384 aa, Neisseria meningitidis
MSCEHLTMSYSTFPKTKNDALNEPMFFGQPVNVARYDQQKYEVFEKLIEKQLSFFWRPEEIDVSRDRIDYANLPEHEKHIFISNLKYQTLLDSIQGRSPNVALLPLVSIPELETWIETWSFSETIHSRSYTHIIRNIVNDPSVVFDDIVENEYITARAEDIACYYDDLIEYTQYYNLLGEGMHNVGGKPVTVSLRGLKKKLYLCLMCVNVLEAIRFYVSFACSFAFAERELMEGNAKIIKLIARDEALHLTGTQHMLNLMRSGVDDSEMAEIAAELQDECFQLFKKAAEQEKEWAAYLFKDGSMIGLNKEILSQYVEYITNLRMQAVGLPAGFEGANQNPIPWINAWLSSDNVQVAPQEVEISSYLIGQIDSEVNTDDLGDFEL

SEQ ID NO: 1539 - protein, 221 aa, Neisseria meningitidis
MTFTAVLFDLDGVITDTAEYHYRAWKKLAEELGIGIDRKFNEQLKGVSRDDSLKRILAHGGKTVGEAEFAELTRRKNDNYVEMIQAVKPEDVYLGILPLLEALKANGKKIALASASKNGPFLLERMGLTHFFDTVADPAAVAHSKPAPDIFLAAAEGVGADIRRCIGIEDAAAGVAAIKAAGALPIGVGKAEDLGSDIALVSDTAELTYAYLQNVWAQSGR

SEQ ID NO: 1540 - protein, 290 aa, Neisseria meningitidis
MEIWNMLDTWLGAVPIRAEAVESVAAVAALLLARALLLNIHFKRHPDFGIESKRRFLVASRNITLLLVLFSLAFIWSAQIQTLALSMFAVAAAVVVATKELIMCLSGSILRSATQQYSVGDYIEINGLRGRVVDINLLNTLMMQVGPNPLVGQLAGTTVSFPNSLLLSHPVRRDNILGDYVIHTVEIPVPIHLDSDEAVCRLKAVLEPLCAPYIPAIQRHLENVQAEKLFITPAARPRVTRVPYDDKAYRIIVRFASPVSKRLEIQQAVMDEFLRVQYRLLNYPAGSETL

SEQ ID NO: 1541 - protein, 637 aa, Neisseria meningitidis
MLNITLPDGSVRQYESPVTVAQIAASIGAGLAKAAVAGKVNGKLVDACDPITEDSSVQIITPKDQEGIEIIRHSCAHLVGHAVKQLYPNAKMVIGPVIEEGFYYDIATEKPFTPEDVAAIEARMKELIAQDYDVVKIMTPRAEAIKIFQERGEEYKLRLIDDMPEVEAMGMYHHQEYVDMCRGPHVPNTRFLKNFKLTKLAGAYWRGDSNNEMLQRIYGTAWATKDELKAYIQRIEEAEKRDHRKLGKQLDLFHLQDEAPGMVFWHPKGWALWQVIEQHMRKELNAAGYKEVKTPQIMDKTFWEKSGHWDNYKDNMFVTSSEKREYAVKPMNCPGHVQIFNNGLRSYRDLPMRLAEFGSCHRNEPSGALHGLMRVRGFVQDDAHIFCTEDQIVSEARAFNELLVRIYKQFGFHDVSVKLSLRPEKRAGSDDVWDKAEQGLREALTACGVEWGELPGEGAFYGPKIEYHVRDALGRSWQCGTLQLDFVLPERLGAEYVTENNDRARPVMLHRAILGSLERFIGILIENHAGSFPLWLAPVQLVIMNITENQADYCREVAAKLQAAGFRAELDLRNEKIGYKIRDNSQYRFPYQIVVGDKEKQENKVAVRRKAEDLGSLDLDDFIAQLQQEITDALVNH

SEQ ID NO: 1542 - protein, 389 aa, Neisseria meningitidis
MSKKLHPQTLAIRGGKEQTEYREHNQALFLTSSFMWDNAQHAADLFSKKIKGFTYTRTANPTTAAFEKRIAALEGAERAVATSTGMSAIQAAFFTFLQAGDHVISSRSLFGTTVGFINNIVTKFGIEVSHVSPTDINEWKAAVKANTKLLFLETPSNPLGEVADLEALAELAHGIGALLVVDNSLLSPVGSQPLKHGADISVSSATKAIDGHGRVMGGVLAGSEELMAQVAVYCNSCGLAMSPFNAWQLLSGVETLSLRMEKQFDNALKIAQWLQAQPQVQAVYYTGLPDHPQAELIRKQQNGGGIVIGFEVADQAAAWKVVDGVELFSRTANLGDVRSTITHPWTTTHGRMQPEEKLAANIRPGLVRLSVGLEYVGDLIDDLKQALAR

SEQ ID NO: 1543 - protein, 222 aa, Neisseria meningitidis
MKNLAIFDLDNTLINTDSDHAWPQYLIKKGLVDAAETEAQNEKFYRDYQNGCLDIDAFLKFHLAPLARYSKEELAEFHREFMAEYIISHISPMQRMLVQSHQMAGDETLVISSTNEFIITPICHLFGITNIIGTQLETDPDGRYTGNYIGTPSLKEGKITRLNQWLAERGETLQSYGKTYFYSDSRNDLPLLRLVSEPVTVNPDAELEKEAKEKGWPVLNFK

SEQ ID NO: 1544 - protein, 617 aa, Neisseria meningitidis
MNRYPLWKYLLIVFTIAVAAVYSLPNLFGETPAVQVSTNRQAIIINEQTQFKVDAALKNAGIQTDGMFVVDNSLKVRFKDTETQLKARDVIENTLGEGYITALNLLADSPEWMAKIKANPMFLGLDLRGGVHFTMQVDMKAAMQKTFERYSGDIRRELRREKIRSGTVRQAGNSLTVPLQDAGDVQKALPQLRKLFPEATLNSDGSNIVLTLSEEAVNKVRSDAVKQNITTLHNRVNELGVAEPVIQQSGADRIVVQLPGVQDTAKAKDIIGRTATLELRMVEDDPAKLREALEGNVPSGYELLSSGGDRPEILLISKQVELTGDNINDAQPSFDQMGAPAVSLSLDSAGGSIFGELTAANVGKRMAMVLIDQGKSEVVTAPVIRTAITGGRVEISGSMTTAEANDTSLLLRAGSLAAPMQIVEERTIGPSLGKENIEKGFHSTLWGFAIVAAFMVVYYRLMGFFSTIALSANILFLIGILSAMQATLTLPGMAALALTLGMAIDSNVLINERIREELRVGVPPQQAINLGFQHAWATIVDSNLTSLIAGIALLVFGSGPVRGFAVVHCLGILTSMYSSVVVFRALVNLWYGRRRKLQNISIGAVWKPEAETAAGKE

SEQ ID NO: 1545 - protein, 148 aa, Neisseria meningitidis
MQHEEGNRQRPQGELLLRTVAMPRDTNPNQDIFGGWIMSQMDLGGGILAAEIARGRIVTVAVQEMNFIRPVKVGNVVCCYGHCVRVGNTSLQLKIEVWVKTLMNDCVTEDRYLVTEAVFTYVAIDAEGNPRPIPKEGNPKLSGLLPTP

SEQ ID NO: 1546 - protein, 1204 aa, Neisseria meningitidis
MSAPIQAFDPLTVPISGTNLIEASAGTGKTYGIAALFTRLIVLEQKNVERVLVVTFTKAATAELKTRLRARLDDVLQVLESKEIAKLGDDTLSDGIAAYCAEHHKGDTFLPALLKQALQKEGRTRLIVRLKAAIGQFDNAAIYTIHGFCQRILRDYAFLCQAPFDVELTEEDGDRLLIPAQDFWRERVSNDPVLAALAFKRKAVPQTVLAQIRAYLSRPYLNFRRPQADLKQAQRNAETSWQTVCRLLPELEAGFWRIHPDLNGNSYRKNSFGNLFKELAQKSAAGQLPFLDKDTHDRLLKLASDKLEAGLKKGKTPDAAVFAELQKLADFGRDLNALEEAEEATMIRLQLDLIEYLNRSLAEMKKSRRERGFDDLLLDVHTALTDNPHAETLARAVAENWETALIDEFQDTDPLQYEIFQKIFIAQNRPLFLVGDPKQAIYSFRGADIYAYLQAAEDARHRYTLATNYRSHAALIGSIGALFRLKERPFVLENIGYSEVGAARAESRLSPKRPAVQVRWLHENDNEKANKDVLRRRAADYCADEIAHALNEAAGGRLNFKGYPLQSGDIAVLVRTHNEAVMVSAALKKRQVQSVLLSRESVFASPEAAALSALIGFWLEPRRAGTLRFVLTSGIFGYDAQQLHDFNQNESEILHWAESARTALDNWNQYGIFAAMQQFSQTHGIETRLLSRNNGRSLTNYFQLLELLAAEDAQNRNPAALHKWLRDQISLADNNGGDNRAIRLESDEDLVKIVTMHASKGLQYPLVYCPFAWDAQDTGPSDWQILHQSANRTELLAKAQLSEDEQKQYADEEMAERLRLLYVALTRAEEQLNIYAAYSTNTADTPLAYLIEGSPQDSRETVRQTYAQEKDGIAMLKRNWRRLADNAPAGTDFVFTEDAPPPAAYRGNADQTAEFAANSIPERGFRFVRHTSFTTLSRHTQTPDGSEEDACPSLDAAETSVPAMPSETPTASDGISIHNFPKGTQAGLCLHEILENFKFGQAAAGQETFITDKLKKYGFEEIWLPAVAEMAEACQKTPLTGAYGLSDILSECRCPEMGFTLHTEDFGLKRLRDWFARDDIRLPEVCRAAAETLDFHTVNGFLNGFIDMVCQDPDGNICVIDYKSNHLGTDASAYTQQAMDEAVAHHHYYLQALIYAVAAARYFKLRGQPPAAVSVRYLFLRGLDGKGGGVWRWDIDADTLEQIK

SEQ ID NO: 1547 - protein, 430 aa, Neisseria meningitidis
MGIATVAVHSEADKDSLHVKLADESVCIGPAASAQSYLNVPAIIAAAEVSCADAVHPGYGFLAENADFAEQVEQSGFTFIGPKPDTIRLMGDKVSAKHAMIAAGVPCVPGSDGALPDDGEEILKIADKVGYPVIIKASGGGGGRGMRVVEKKEDLLQSVEMTKAEAGAAFGNPMVYMERYLQRPRHVEIQVIADEHGNAIYLAERDCSLQRRHQKVIEEAPAPFITEKERAKIGNACADACKRIGYRGAGTFEFLYEDGEFFFIEMNTRVQVEHPVTELITGVDIVQEQLRIAAGLPLQYKQKDIQVEGHAFECRINAEDPYNFIPSPGPIESCHLPGGFGIRVDSHIYQGYRIPPYYDSLIGKICVHGKTREQAMAKMRVALAELAVTGIKTNTPLHRDLFADAGFQKGGVSIHYLEHWLEDRKAKQDK

SEQ ID NO: 1548 - protein, 433 aa, Neisseria meningitidis
MAIYQSGVIFDQVDTANPDCWTLDEYVKRGGYTALRKILSENISQTDVIDEVKTSGLRGRGGAGFPTGLKWSFMPRSFPGEKYVVCNTDEGEPGTFKDRDIIMFNPHALIEGMIIAGYAMGAKAGYNYIHGEIFEGYQRFETALAQARAAGFLGKNILGSDFEFELFAHHGYGAYICGEETALLESLEGKKGQPRFKPPFPASFGLYGKPTTINNTETFSSVPFIIRDGGQAFADKGIPNAGGTKLFCISGHVERPGNYEVPLGTPFAEVLKMAGGMRGGKKLKAVIPGGSSAPVLPADIMMQTNMDYDSISKAGSMLGSGAIIVMDEDVCMVKALERLSYFYYDESCGQCTPCREGTGWLYRIVHRIVEGKGCMEDLDLLDSIGNQMAGRTICALADAAVFPVRSFTKHFRDEFVYYIEHGGPMKEHKWGGW

SEQ ID NO: 1549 - protein, 376 aa, Neisseria meningitidis
MAKHLPLAVLTALLLAACGGSDKPSAENPTSAENRNVLKIYNWSEYVDPETVADFEKKNGIKVTYDVYDSDETLESKVLTGKSGYDIVAPSNAFVGRQIKAGAYQKIDKSLIPNYKHLNPEMMRLMDGVDPGHEYAVPFYWGTNTFAINTERVKKALGTDKLPDNQWDLVFDPEYTSKLKQCGISYLDSAAEIYPMVLNYLGKNPNSSNTEDIREATALLKKNRPNIKRFTSSGFIDDLARGDTCVTIGFGGDLNIAKRRAEEAGGKEKIRVMMPKEGVGIWVDSFVIPKDAKNVANAHKYINDFLDPEVSAKNGNFVTYAPSSKPARELMEDEFKNDNTIFPTEEDLKNSFIMVPIQPAALKFMVRQWQDVKAGK

SEQ ID NO: 1550 - protein, 165 aa, Neisseria meningitidis; identical to SEQ ID NO: 843

SEQ ID NO: 1551 - protein, 197 aa, Neisseria meningitidis
MEHYLSLFIKSVFIENMALSFFLGMCTFLAVSKKVSTAFGLGVAVIFVLGLSVPVNQLVYSLLKDGAIVEGVDLTFLKFITFIGVIAALVQILEMFLDKFVPALYNALGIYLPLITVNCAIFGAVSFMAQREYNFGESVVYGFGAGLGWMLAIVALAGITEKMKYSDAPKGLKGLGITFIAAGLMAMAFMSFSGIQL

SEQ ID NO: 1552 - protein, 181 aa, Neisseria meningitidis
MTYEKLYELRQTLRPTTKDGLYTDNEKSREILTVRWSGNTENPKNFSAVAIGINPSKANDERSDKTLTQLARFLDMYGFTNFKMLNIFSSYSTQQTGIRANTQTDFSKFKGCLEDADMIILAWGTDRSAYKDEKNRILEFLKAEKFMEKVFCISETGNSSDTRHPSRISYSYQLVQFEESA

SEQ ID NO: 1553 - protein, 366 aa, Neisseria meningitidis
MAGNTFGQLFTVTTFGESHGAGLGCIIDGCPPGLELSEADIQFDLDRRKPGTSRHVTQRRETDQVEILSGVFKGKTTGTPIALLIRNTDQRSKDYGNIAQSFRPGHADYTYWHKYGTRDYRGGGRSSARETAARVAAGAVAKKWLKEKFGTEITAYVTQVGEKEIRFEGCEHISQNPFFAANHSQIAELENYMDSVRKSLDSVGAKLHIEAANVPVGLGEPVFDRLDAEIAYAMMGINAVKGVEIGAGFDSVTQRGSEHGDELTPQGFLSNHSGGILGGISTGQDICVNIAIKPTSSIATPRRSIDINGNPIELATHGRHDPCVGLRAAPIAEAMLALVLIDHALRHRAQNADVAVDTPDIARSDK

SEQ ID NO: 1554 - protein, 318 aa, Neisseria meningitidis
MTVCFTTYPNATMKIRLGRHNAPDFPHGAAVTIGNFDGVHLGHKHILQKLRFEADTRGLPVVVVIFEPQPKEFFALRTGRMPPCRISPLRTKLELLEGTGCVDAVWVLRFDQNFSEISAQGFIDRLLRQTLNTRYLLVGDDFRFGAGREGCFELLAQQPDMQTERTPSVIVEDIRTSSTAVRQALSDGNLAYAKKLLGHDYVLGGRVVHGRKLGRTLNAPTANIRLPGHRYALGGVFVVEADGAFGTRRGVASFGFNPTVDSGCSQKLEVHLFDFQGDLYGQRLNVRFLHKLRDEEKFDGMEELKRQIEADMEAAKCW

SEQ ID NO: 1555 - protein, 105 aa, Neisseria meningitidis
MVVRGGIYLVSLDPTVGSEIKKTRPCVVVSPPEIHNYLKTVLIIPMTSGSRPAPFRVNVRFQDKDGLLLPEQIRAVDKAGLVKHLGNLDNSTAEKLFAVLQEMFA

SEQ ID NO: 1556 - protein, 268 aa, Neisseria meningitidis
MNMKKWIAAALACSALALSACGGQGKDAAAPAANPDKVYRVASNAEFAPFESLDSKGNVEGFDVDLMNAMAKAGNFKIEFKHQPWDSLFPALNNGDADVVMSGVTITDDRKQSMDFSDPYFEITQVVLVPKGKKISSSDDLKNMNKVGVVTGYTGDFSVSKLLGNDNPKIARFENVPLIIKELENGGLDSVVSDSAVIANYVKNNPTKGMDFVTLPDFTTEHYGIAVRKGDEATVKMLNDALKKVRESGEYDKIYAKYFAKENGQAAK

SEQ ID NO: 1557 - protein, 140 aa, Neisseria meningitidis
MEWVSLFSDPQRDDDSLITLKDEKITVKNYIVPWWKKGENFRKLELITTGKNDNGNLTVNGIYGIQSFADSQLGYTPELLVKSNNDILFKNNFQSVDVKPHSGNIHLDAKGKIQFNLNVPDVDGVQDVASGKKYRQTIVP

SEQ ID NO: 1558 - protein, 103 aa, Neisseria meningitidis
MANQKIRIRLKAYDYALIDRSAQEIVETAKRTGAVVKGPIPLPTKIERFNILRSPHVNKTSREQLEIRTHLRLMDIVDWTDKTTDALMKLDLPAGVDVEIKVQ

SEQ ID NO: 1559 - protein, 213 aa, Neisseria meningitidis
MIVLVGLGNKKMKNNDCFRLKNPQSGMALIEVLVAMLVLTIGILALLSVQLRTVASVREAETQTIVSQITQNLMEGMLMNPTIDSDSNKKNYNLYMGNNTLSAVDGEFAIDAIKTKTQLAEAQLKRFSYELKNALPDAAAIHYAVCKDSSGNAPTLSGNAFSSNCDNKANGDTLIKVLWVNDSAGDSDISRTNLEVSGDNIVYTYQARVGGRE

SEQ ID NO: 1560 - protein, 109 aa, Neisseria meningitidis
MTDKSKTEKLISSDDKQSVIDGILDMVFNSKAYEVPWISEKLMELSKNKDLDIAGLSLTCFGHLARLHSNIGDYDKVISLLHSKQDDPELQGRAEDALEDISLFLSENH

SEQ ID NO: 1561 - protein, 313 aa, Neisseria meningitidis; identical to SEQ ID NO: 397

SEQ ID NO: 1562 - protein, 159 aa, Neisseria meningitidis
MSLNWEMTEQDFEAVKHLLPHSVVAMITVIGLEAAFHMVKVWGGTNYPISNRRRNTRQSRILHAQLVEDIGEEAAGRLERAYVGQPFLAIPRCWDAMRELRNRFIRRQYDAMSAEGLSDLFIVRELVLAHRLSARNIRYILKEADREAAARAQTDLFVA

SEQ ID NO: 1563 - protein, 540 aa, Neisseria meningitidis
MKTKEFLKSLAELAASLRQVIEAEVDGFDASPKAIAARRAKVFDPVGGYEYFVNTYFPHYIRSPEKSELHEFLFSRLPEIIHSPKGENEAVGAPRGEGKSTQVTQLFTLWCIVTGQKHYAVIVMDSIDQAYPMLEAIKAELEFNPRLKTDFPEVCGQGRVWQAGTIVTANDVKVQVAGSGKKLRGLRHGPYRPDLTVLDDIENDEQVRNPEQRDKLNAWLTKTVLPLGGVGQKYDVIYIGTILHYDSVLNRTLNNPFWHGIKFKAMKRWPDRMDLWDRWEELFRNDGETVAEAFYLANKDEMERGAVTSWAARGVLALMKIRARDGHATFDSEYQNDPVSGEDAPFAKSMKFWNDLPSDLVYFGALDPSLGKAGASRDPSAIIIGGYQRETGKLYVVEAQIKKRLPDLIIEDVIRLHRQYRCKLWFVETVQFQEFLKDELVKRSAARGIPVPARAVKPVSDKLLRIETLQPHMANGLILLNESQQTLIQQFRHFPKADHDDGPDAVHMLWSGAVANCVPIEWQSPTDNDFDDEIKSKWSR

SEQ ID NO: 1564 - protein, 134 aa, Neisseria meningitidis
LAEGQKSAVTEYYLNHGIWPGDNSSAGVATSSKIKGKYVKEVTVANGVVTATMLSSGVNKEIQGKKLSLWAKRQDGSVKWFCGQPVTRDANASADAVKADTDKKIDTKHLPSTCRDASSAVCIETPPTAFYKNT

SEQ ID NO: 1565 - protein, 558 aa, Neisseria meningitidis
MSFKTDAEIAQSSTMRPIGEIAAKLGLNADNIEPYGHYKAKINPAEAFKLPQKQGRLILVTAINPTPAGEGKTTVTIGLADALRHIGKDSVIALREPSLGPVFGVKGGAAGGGYAQVLPMEDINLHFTGDFHAIGAANNLLAAMLDNHIYQGNELDIDPKRVLWRRVVDMNDRQLRNIIDGMGKPVDGVMRPDGFDITVASEVMAVFCLAKDISDLKERLGNILVAYAKDGSPVYAKDLKANGAMAALLKDAIKPNLVQTIEGTPAFVHGGPFANIAHGCNSVTATRLAKHLADYAVTEAGFGADLGAEKFCDIKCRLAGLKPDAAVVVATVRALKYNGGVERANLGEENLDALEKGLPNLLKHISNLKNVFGLPVVVALNRFVSDSDAELAMIEKACAEHGVEVSLTEVWGKGGAGGADLARKVVNAIESQTNNFGFAYDVELGIKDKIRAIAQKVYGAEDVDFSAEASAEIASLEKLGLDKMPICMAKTQYSLSDNAKLLGCPEGFRIAVRGITVSAGAGFIVALCGNMMKMPGLPKVPAAEKIDVDEHGVIHGLF

SEQ ID NO: 1566 - protein, 885 aa, Neisseria meningitidis
MTRHLRDIEKIMKTSELRQKFLKFFETKGHTVVRSSSLVPHDDPTLLFTNAGMNQFKDVFLGFDKRPYSRATTAQKCVRAGGKHNDLENVGYTARHHTFFEMMGNFSFGDYFKRDAIHFAWEFLTSPEWLNIPKDKLLATVYAEDDEAYNIWLNEIGMPSERIVRIGDNKGAKYVSDNFWQMGDTGPCGPCSEIFYDHGEEIWGGIPGSPEEDGDRWIEIWNCVFMQFNRDEQGNMNPLPKPSVDTGMGLERMAAVMQHVHSNYEIDLFQDLLKAVARETGAAFSMDEPSLKVIADHIRSCSFLIADGVLPSNEGRGYVLRRIIRRAVRHGYKLGQSKPFFHKLVADLVKEMGGAYPELKEKQAQIEEALKNEESRFAQTLETGMALLENALAKGGKTLDGEIIFKLYDTYGFPYDLTADICRERNIELDEAGFEREMEAQRARARAAQSFKANAQLPYDGQDTEFKGYSERQTESKVLALYKDGEQVNELNEGDSGAVVIDFTPFYAESGGQVGDVGYIFSSENRFEVRDTQKIKAAVFGQFGVQTSGRLKVGDSVTAKVDDEIRNANMRNHSATHLMHKALRDVLGGHVEQKGSLVTAESTRFDISHPQAVTAEEIAEVERRVNEAVLANVAVNAAIMSMEDAQKTGAMMLFGEKYGEEVRVLQMGGFSTELCGGTHVSRTGDIGLFKIISEGGIAAGVRRIEAITGLNALKWAQEQERLVKDIIAETKAQTEKDVLAKIQAGAAHAKALEKELAKAKAELAVHAGAKLLDDAKDLGAAKLVAAQIEADAAALREIVTDLTGKSDNAVILLAAVNDGKVSLCAGVSKPLTGKVKAGDLVKFAAEQVGGKGGGRPDLAQAGGTDAGKLPEMLVSVESWLCQKLS

SEQ ID NO: 1567 - protein, 92 aa, Neisseria meningitidis
MLLATDGENVYEARMAARPEHLKRLETLKSEGRLLTAGPNPLPEDSNRVSGSLIVAQFESLDAAEAWAEDDPYVHAGVYSEVLIKPFKAVFK

SEQ ID NO: 1568 - protein, 562 aa, Neisseria meningitidis
MDSNDLEKERGITILAKNTAIDYEGYHINIVDTPGHADFGGEVERVLGMVDCVVLLVDAQEGPMPQTRFVTKKALALGLKPIVVINKIDKPSARPSWVIDQTFELFDNLGATDEQLDFPIVYASGLSGFAKLEETDESNDMRPLFDTILKYTPAPSGSADETLQLQISQLDYDNYTGRLGIGRILNGRIKPGQTVAVMNHEQQIAQGRINQLLGFKGLERVPLEEAEAGDIVIISGIEDIGIGVTITDKDNPKGLPMLSVDEPTLTMDFMVNTSPLAGTEGKFVTSRQIRDRLQKELLTNVALRVEDTADADVFRVSGRGELHLTILLENMRREGYELAVGKPRVVYRDIDGQKCEPYENLTVDVPDDNQGAVMEELGRRRGELTNMESDGNGRTRLEYHIPARGLIGFQGEFMTLTRGVGLMSHVFDDYAPVKPDMPGRHNGVLVSQEQGEAVAYALWNLEDRGRMFVSPNDKIYEGMIIGIHSRDNDLVVNPLKGKKLTNIRASGTDEAVRLTTPIKLTLEGAVEFIDDDELVEITPQSIRLRKRYLSELERRRHFKKLD

SEQ ID NO: 1569 - protein, 520 aa, Neisseria meningitidis
LFEVMKKPLISVAAALLGVALGTPYYLGVKAEESLTQQQKILQEAGFLTVESHQYERGWFTSTETTVIRLKPELLNNARKYLPDNLKTVLEQPVTLVNHITHGPFAGGFGTQAYIETEFKYAPETEKVLERFFGKQVPVSLANTVYFNGSGKMEVSVPAFDYEELSGIRLHWEGLTGKTVYQKGFKSYRNSYDAPLFKIKLADKGDAAFEKAHFDSETSDGINPLALGSSNLTLEKFSLEWKEGVDYNVKLNELVNLVTDLQIGAFINPNGSIAPSKIEVGKLAFSTKTGESGAFINSEGQFRFGTLVYGDEKYGPLDIHIAAEHLDASALTVLKRKFAQISAKKMTEEQIRNDLIAAVKGEASGLFTNNPVLDIKTFRFTLPSGKIDVGGKIMFKDLKKEDLNQLGLMLKKTEADIRMSIPQKMLEDLAVSQAGNIFSVNAEDEAEGRASLDDINETLRLMVDSTVQSMAREKYLTLNGDQIDTAISLKNNQLKLNGKTLQNEPEPDFDEGGMVSEPQQ

SEQ ID NO: 1570 - protein, 312 aa, Neisseria meningitidis
MDAYTEAEAPPQSIVELVPVLIAVTDGGLRVLTVAQGTLLPNGPLSPLRNSLQAGVKLWVAKQTSQPMGYVEQLYTFVDTHRRNEHGMPVLYVSYLGLVREAADSILHPDAKWQDCYGYFPWEDLRTDGGQRDAVVSRLRIWANSADTEEVRQMRLKRIHLCWGVEPENWSEEYVLQRYEMLYESGLIVEAAEPQANFDFALTGQPMRHDHRRVLATALSRLRAKIKYRPVIFELMPPEFTLLQLQNSVEAISGRLLHKQNFRRQIQQQNLIEPSDTGVSGSKGRPAQLCRFRDDVLPDRLISDIGLPLGSR

SEQ ID NO: 1571 - protein, 170 aa, Neisseria meningitidis
MLPNTPRRAVYAGSFDPPTLGHLWMIRQAQSMFDELIVAIGINPDKRSTYTVAERQDMLCDITKMFPNVRTDVFENRFLVHYAREVDAGFIVRGIRSASDYEYERSMRHINSDLAPEISTVFLMPPREIAEVSSTMVKGLVGPEGWTETIHRYVPQAVYEKILAEHQHEN

SEQ ID NO: 1572 - protein, 96 aa, Neisseria meningitidis
MARIGTNKGFFELLEGETLLEGLERTGHMVEYQCRSGYCGSCRVKILEGSVTYREPPLAFLGRDEILPCCCYVEGDVRLDCGLSGEDEGLSDSLLK

SEQ ID NO: 1573 - protein, 323 aa, Neisseria meningitidis
MKMDGSQQEENLEVISTGSLGLDLALGVGGLPRGRIVEIFGPESSGKTTLCLEAVAQCQKNGGVCAFVDAEHAFDPVYARKLGVKVEELYLSQPDTGEQALEICDTLVRSGGIDMVVVDSVAALVPKAEIEGDMGDSHVGLQARLMSQALRKLTGHIKKTNTLVVFINQIRMKIGVMFGSPETTTGGNALKFYSSVRLDIRRTGSIKKGEEVLGNETRVKVIKNKVAPPFRQAEFDILYGEGISWEGELIDIGVKNDIINKSGAWYSYNGAKIGQGKDNVRVWLKENPEIADEIDAKIRALNGVEMHITEGKLDETDGERPEE

SEQ ID NO: 1574 - protein, 135 aa, Neisseria meningitidis
MNLVKLLANNWQPIAIIALIGTGLAVSHHQGYYKSAFAKQQAVIDKMEKDKAQALLLSAQNYARELEQARAEAKKYEVKAHAVGMALAKKQAEVSRLKTERDLCKIPFPPDSRNPNTGFQLFSPQIPPNSTQISL

SEQ ID NO: 1575 - protein, 512 aa, Neisseria meningitidis
MFHSIEKYRTPAQVLLGLIALTFVGFGVSTVSHPGADYIVQVGDEKISEQSLNAAVQNEQADGGSPSRDAVFQSLLQRAYLKQGAKLMGISVSSEQIKQIIVDDPNFHDANGKFDHALLNRYLSQRHMSEDQFVEEIRDQFALQNLVNLVQNGVLVGDAQAEQLIRLTQVNRTIRSHTFNPDEFIAQVKVSEADLQKFYNANKKDYLLPKAVKLEYVALNLKDFADKQTVSETEVKNAFEERVARLPANEAKPSFEQEKAAVENELKMKKAVADFNKAKEKLGDDAFNHPSSLAEAAKNSGLKVETQETWLSRQDAQMSGMPENLINAVFSDDVLKKKHNSEVLTINSETAWVVRAKEVREEKTLPFAEAKDAVRQAYIRTEAAKLAENKAKDVLTQLNGGKAVDVKWSEVSVLGAQQARQSMPPEAYAELLKAKPANGKPAYVRLIGLPAPVIVEVQAVTPPDDIAAQLPLAKQALAQQQSANTFDLLIRYFNGKIKQTKGAQSVDNGDAQ

SEQ ID NO: 1576 - protein, 404 aa, Neisseria meningitidis
MRAAALAAAVALVLSSCGKGGDAAQGGQPAGREAPAPVVGVVTVHPQTVALTVELPGRLESLRTADVRAQVGGIIQKRLFQEGSYVRAGQPLYQIDSSTYEAGLESARAQLATAQATLAKADADLARYKPLVAAEAVSRQEYDAAVTAKRSAEAGVKAAQAAIKSAGINLNRSRITAPISGFIGQSKVSEGTLLNAGDTTVLATIRQTNPMYVNVTQSASEVMKLRRQIAEGKLLAADGVIAVGIKFDDGTVYPEKGRLLFADPTVNESTGQITLRAAVPNDQNILMPGLYVRVLMDQVAVDNAFIVPQQAVTRGAKDTVMIVNAQGGMEPREVTVAQQQGTNWIVTSGLKDGDKVVVEGISIAGITGAKKVTPKEWAPSENQAAAPQSGVQTASEAKTASEAE

SEQ ID NO: 1577 - protein, 117 aa, Neisseria meningitidis
MLNFNHLSGNIMMGNKLTLPAELPDEQDLRAVLAYNMRLFRVNKGWSQEELARQCGLDRTYVSAVERKRWNIALSNIEKMAAALGVAAYQLLLPPQERLNLMTNSADTRQMPSESGI

SEQ ID NO: 1578 - protein, 251 aa, Neisseria meningitidis
LLKLINRQLTEKGLKVEKASAAVVDATIIQTAGSKQRQTIEVDEEGQISGQTTPSKDKDARWIKKNGLYKLGYKQHTRTDAEGYIEKLHITPANAHECKHLSPLLEGLPKGTTVYADKGYDSKENRQHLKEHQLLDGIMRKACRNRPLTEVQTKRNRYLSKTHYSGLNLNQDKATKPQTVQIVRQGEATPYWFKFNPLYVVEQSFGTLHRKFRYARAAYFGLIKVSAQSHLKAMCLNLLKAANRLSAPAAA

SEQ ID NO: 1579 - protein, 72 aa, Neisseria meningitidis
MFPEYRDLISKLKQENSRFARLFDEHNELDDKITGLVNNPVTSGAETIDELKKAKLKLKDELYAILQKAAGK

SEQ ID NO: 1580 - protein, 426 aa, Neisseria meningitidis
MKSLFIRLLLLGSAAGVFYHTQNQSLPAGELVYPSAPQIRDGGDALHYLNRIRAQIGLHKLAHAPVLENSARRHARYLTLNPEDGHGEHHPDNPHYTAQKLTERTRLAGYLYNGVHENISTEEEAAESSDSDIRTQQRQVDGLMSAIYHRLSLLDRHTDEAGAAFVRENGKTVLVFNQGNGRFERHCAQGRNQPEAGRKYYRNACHNGAVVYTDEAMPAQELLYTAYPVGNGALPYFHGERPDPVPEYEITGNPASIDFSEAAGKITMKSFKLYQGKNEIRPVRVLTAGNDPNGRLTAYQFALFPLKPLEYGTLYTAVFDYVRNGRRAQAKWQFRTRKPDYPYFEVNGGETLAVRKGEKYFIHWRGRWCLEACTRYTYRQRPGSRLSIGRHEAGGIVFSVDGMAGSRITLAPEGETERGVTLYLQD

SEQ ID NO: 1581 - protein, 308 aa, Neisseria meningitidis
MKVIFAGTPDFAAAALRAVAAAGFEIPLVLTQPDRPKGRGMQLTAPPVKQAALELGLRVEQPEKLRNNAEALQMLKEVEADVMVVAAYGLILPQDVLDVPKHGCLNIHASLLPRWRGAAPIQRAIEAGDAETGVCIMQMDAGLDTGDVVSEHRYAIRPTDTANEVHDALMEIGAAAVVADLQQLQSKGRLNAVKQPKEGVTYAQKLSKEEARIDWSESAAVIERKIRAFNPVPAAWVEYQGKPMKIRRAEVVAQQGAAGEVLSCSADGLVVACGENALKITELQPAGGKRMSIQAFAAGRTIEVGTVL

SEQ ID NO: 1582 - protein, 183 aa, Neisseria meningitidis
MLQWHTRVGLFILFLLVFRLCWSIWGSDTARFSCFVQGWAGIRGYLKNGIPEHIQPGHNPLGALMVVALLAAVSFQVGTGLFAADENTFSTNGYLNHLVSEHTGSLMRKIHLNFFKLLAVFSAIHIAAVAAYRLFKKKNLVLPMITGFKYIEGKTSIRFAGKAALAAALSVAALAAAAILLLS

SEQ ID NO: 1583 - protein, 106 aa, Neisseria meningitidis
LLPLTRNTMFRILLLLFPCAILAACTRNIPANPAVSNCAHLQNRTILYFDAHGKPADGAVKGGFYKIIEIQGANCILIQDFNSTGNALGGSYVPDCRKSSLFPKNI

SEQ ID NO: 1584 - protein, 907 aa, Neisseria meningitidis
MGVMLYHHSYAEDAGRAGSEAQIQVLEDVHVKAKRVPKDKKVFTDARAVSTRQDIFKSSENLDNIVRSIPGAFTQQDKSSGIVSLNIRGDSGFGRVNTMVDGITQTFYSTSTDAGRAGGSSQFGASVDSNFIAGLDVVKGSFSGSAGINSLAGSANLRTLGVDDVVQGNNTYGLLLKGLTGTNSTKGNAMAAIGARKWLESGASVGVLYGHSRRSVAQNYRVGGGGQHIGNFGAEYLERRKQRYFVQEGALKFNSDSGKWEPDLQKQQWKYNPYKKYNNQELQKYIEEHDKSWRENLAPQYDITPIDPSSLKQQSAGNLFKLEYDGVFNKYTAQFRDLNTKIGSRKIINRNYQFNYGLSLNSYANLNLTAAYNSGRQKYPKGSKFTGWGLLKDFETYNNAKILDLNNTATFRLPRETELQTTLGFNYFHNEYGKNRFPEELGLFFDGPDQDNGLYSYLGRFKGDKGLLPQKSTIVQPAGSQYFNTFYFDAALKKDIYRLNYSTNTVGYRFGGEYTGYYSSEGEFKRAFGENSPTYKKHCNRSCGIYEPVLKKYGKKRANNHSVSISADFGDYFMPFASYSRTHRMPNIQEMYFSQIGDSGVHTALKPERANTWQFGFNTYKKGLLKQDDTLGLKLVGYRSRIDNYIHNVYGKWWDLNGNIPSWVNSTGLAYTIQHRNFKDKVHKHGFELELNYDYGRFFTNLSYAYQKSTQPTNFSDASESPNNASKEDQLKQGYGLSRVSALPRDYGRLEVGTRWLGNKLTLGGAMRYFGKSIRATAEERYIDGTNGGNTSNVRQLGKRSIKQTETLARQPLIFDFYAAYEPKKNLIFRAEVKNLFDRRYIDPLDAGNDAATQRYYSSFDPKDKDEEVTCNADKTLCNGKYGGTSKSVLTNFARGRTFLMTMSYKF

SEQ ID NO: 1585 - protein, 428 aa, Neisseria meningitidis
LDGIFKLKANGTTVRTELMAGLTTFLTMCYIVIVNPLILGETGMDMGAVFVATCIASAIGCFVMGFVGNYPIALAPGMGLNAYFTFAVVKGMGVPWQVALGAVFISGLIFILFSFFKVREMLVNALPMGLKMSIAAGIGLFLALISLKGAGIIVANPATLVGLGDIHQPSALLALFGFAMVVVLGYFRIQGAIIITILTITVIASLMGLNEFHGVVGEVPSIAPTFMQMDFKGLFTVSMVSVIFVFFLVDLFDSTGTLVGISHRAGLLVDGKLPRLKRALLADSTAIVAGAALGTSSTTPYVESAAGVSAGGRTGLTAVTVGVLMLACLMFSPLAKSVPAFATAPALLYVGTQMLRSARDIDWDDMTEAAPAFLTIVFMPFTYSIADGIAFGFISYAVVKLLCRRTKDVPPMVWIVAVLWALKFWYLG

SEQ ID NO: 1586 - protein, 128 aa, Neisseria meningitidis
MSNNIPAELKYVASHEWLRLEEDGTITVGITHHAQELLGDIVFVELPEVGANLAAEEQAGVVESVKAASDVYAPIAGEVVAVNDDLPSAPETANSDPYGAGWFFKIKPANPADYDGLLTAEQYAGEVD

SEQ ID NO: 1587 - protein, 251 aa, Neisseria meningitidis
MAFASLFTLPDDITAVLDDVALMTKAAAKKTAGVVGDDLAPNANRVTGVSAERELPIVWSMAKGSFSNKPVLVPAALLLSAFLPQLITPLLTAGGIYLCFEGVEKLLHKFLHRHDAHARNGGNRHRHDCFGVRNRCRHRQTRRLRHAADAPPTNLFAQFGANADCLYALLYARFERGRHACHVSYRRRTGRPQPRPSARFPARATLGRWLGGVLRQPRCRAAFRFDCLRPRLAADESFRQALISFSNTDAV

SEQ ID NO: 1588 - protein, 660 aa, Neisseria meningitidis
MRQISLTDYFCKGLNISPEIFGTLFQSVMDAQERREAGAHYTETANIDKVINGLFLENLRAEFEAVKALKRDKDKKLAAFYQKIQNLQFLDPACGCGNFLIVAYDRIRALEDDIIAEALKDKTGGLFDSPSVQCRLKQFHGIEIDEFAVLIARTAMWLKNHQCNIRTQIRFDGEVACHTLPLEDVAEIIHANSLRTPWQAADYIFGDPPFIGSTYQTKEQKNDLESICGHIKGYGLLDYVCNWYVKAAGIMAQHPQVQTAFVSTNSICQGQQVEILWGSLLKQDIEIHFAHRTFQWTSQAAGKAAVHCIIVGFRQKPQMPSEKTLYDYPDIKGEPVKHAAANINPYLIDAPDVIIAKRSRPVHCEPDMVNGSKPTEGGNLILSTDEKEALIAAEPLAEQYIRPFVGAEEFINGKTRWCLWFHGVSDVKRNHDLKQMPQVQARIQAVKTMREASSDKQTQKDAATPWLFQKIRQPSDGNFLIIPRVSSESRRFVPIGYLSYETVVSDLVFTLPNASLYHFGILSSTMHNAFMRTVAGRLESRYRYSNTVVYNNFPFPESCRMPSENDRQDPLRAAVETAAQAVLDARGQYRREAREAGLPEPTLAELYAPDAGYTALDKAHAALDKAVDKAYGYKTGKNTDDEAERTAFLFELYRKAAAIA

SEQ ID NO: 1589 - protein, 220 aa, Neisseria meningitidis
MIQAVLFDLDGTLADTALDLGGALNTLLARHGLPPKSMDEIRNQASHGAAGLIKLGAGITPDHPDYARWRTEYLEEYDRRYAQDTELFDGVNELIAELDRRGIKWGIITNKPMRFTDKLAPKLGFIIPPAVVVSGDTCGEPKPSIKPMLYACGQIHADPQHTLYVGDAERDIQAGRNAGMKTVLAEWGYIAPEDDTGSWQADFHIRTPLDLLECLDKIQP

SEQ ID NO: 1590 - protein, 335 aa, Neisseria meningitidis
MSTFFQQTAQAMIAKHIDRFPLLKLDQVIDWQPIEQYLNRQKTRYLRDHRGRPAYPLLSMFKAVLLGQWHSLSDPELEHSLITRIDFNLFCRFDELSIPDYSTLCRYRNWLAQDDTLSELLELINRQLTEKGLKIEKASAAVVDATIIQTAGSTQRQAIEVDEEGQINGQTTPSKDKDARWTKKNGLYRLGYKQHTRTDEEGYIKKLHITPANAHECKHLLPLLEGLPKGTTVYADKGYDSEENRQHLEEHQLLDGIMRKACRNRPLSEVQTKRNRYLSKTRYVVEQSFGTLHRKFRYARAAYFGLIKVSAQSHLKAMCLNLLKAANRLSAPAAA

SEQ ID NO: 1591 - protein, 32 aa, Neisseria meningitidis
MNTNLNDKDKAMDTAIRFQKRMRIPKFFFLIL

SEQ ID NO: 1592 - protein, 197 aa, Neisseria meningitidis
MADGIGNLIGWEKTGLVVGKQWITAKDDKVSDVCNANGEMGVIGLYEPFSHGALTIPGHPNCRCEVVSVSGGELGEFAEKKELRKAAMQYARDNFIGKSYVNENSGHELKVTWQGVKHATSKANQAELSIITKLDDLLRYAKYEGSYSDKKGHPDIIAAHKYRAVAKVGNESLNIGVIVREFPDGHKHYDHFILKDE

SEQ ID NO: 1593 - protein, 339 aa, Neisseria meningitidis
MNTMLMSGAAAALLAGIILYFKSDKKRQENGEWSSGLEYAYILTAVGVFAALSLFMSFTAVFLIFVVLCGTAWGVYKYRLKTHPEISESSHFGDYFGSFFPTVLVLFLIRSFIAEPFQIPSSSMRPGLIKGDFILVGKFSYGLRVPVLNNIFIPTGKIERGDVVVFNYPLQPEMTYIKRIVGIPGDVVEYRDKILTVNGKPTSDIPNGTYRYPDDTDPSEIHNTDMFRSGLDGKSFNILKKEGQPAVSLPVLGKYTSDIMSENGYSIEQSGLEHCQYADDGSGFVCKVPEGRYFAMGDNRDNSADSRYWGFVDDKLVVGKAMFILMNFGDFGRAGTAIR

SEQ ID NO: 1594 - protein, 386 aa, Neisseria meningitidis
LNERSKTMKKTLVAAAILSLALTACGGGNDTAAQAPSAKPEAEQSGKLNIYNWSDYVDPETVAAFEKETGIKTRSDYYDSNETLEAKVLTGKSGYDLTAPSIANVGRQIKAGAYQKIDKAQIPHYGNIDKDLLKMMEAVDPGNEYAVPYFWGINTLAINTGQVQKALGTDKLPENEWDLVFKPEYTAKLKSCGISYFDSAIEQIPLALHYLGKDPNSENPEDIKAAVDMMKAVRSDVKRFSSSGYIDDMAAGNLCAAIGYGGDLNIAKTRAEEAANGVEIKVLTPKTGVGVWVDSFMIPRDAQNVANAHRYIDYTLRPEVAAKNGSFVTYAPASRPARELMDEKYTSDASIFPNKELMEKSFIVSPKSAESAKLGVKLWQGLKAGK

SEQ ID NO: 1595 - protein, 256 aa, Neisseria meningitidis
LEADSDTAHDRTFSVLSFSSHISHTIMKLIKYLQYQGIGSRKQCQWLIAGGYVFINGTCMDDTDADIDSSSVETLDIDGEAVTVVPEPYFYIMLNKPEDYETSHKPKHYRSVFSLFPDNMRNIDMQAVGRLDADTTGVLLITNDGKLNHNLTSPSRKIPKLYEVTLKHPTGETLCETLKNGVLLHDENETVCAADAVLKNPTTLLLTITEGKYHQVKRMIAAAGNRVQHLHRRRFAHLETENLKPGEWKFIECPKF

SEQ ID NO: 1596 - protein, 468 aa, Neisseria meningitidis
VEFSTKTEILQEQQAGAQLFVCTEEAQLNHPTALALLSSLEEGQNFADTKIPTGNGLQAVAVCCLKSTGRAALNKAAAEAAKWAQNQETVNVDIHAFDEAQAAAVAEAFAIAFGNAAYRFDRYKKEAKPAKFETAVFHSAHEAVVKEALRVAEAQVYGQSLCRDLGNAAPNECTPEFLARTAKAEAEKLGAHAKIIEKDYIKENMGSFWSVAKGSAEAPYLVELSYFGAADKEAAPVVLVGKGITFDTGGISLKPGLNMDEMKFDMCGAATVISTFCAAVKLQLPINLIAIVATCENMPSGAANKPGDVVKSMKGLTIEVLNTDAEGRLILCDALTYAEQFKPKAVIDVATLTGACIVALGHDVSGVMGNNQDLINSLLAASRNVDDKAWQLPLFETYKDQLKSNFADIPNIGTPGAGTITAATFLSYFTEGYPWAHLDIAGTAWKSGAEKGATGRPVPLLLNYLRNL

SEQ ID NO: 1597 - protein, 252 aa, Neisseria meningitidis
MKITPVKALTDNYIWMIQHGNHAVCVDPSEPSPVLEFLVRNRLMLAQTWVTHPHPDHEGGAAALWRGYMESPVYGESDIEAATHTVTAGTQFTFGDGQVTVWATPGHTDRHTSYLLETSDGIHVFCGDTLFSAGCGRVFTGTIEQLYDSFQRFNRLPENTLFYPAHEYTAANLRFAAHIEPDNADIQTALKAAAHTPTLPVTLAHERRVNPFLRVDLPHVRDRAEALSGKTLNSSLDTFVALRELKNQYRTK

SEQ ID NO: 1598 - protein, 360 aa, Neisseria meningitidis
MFLWLAHFSNWLTGLNIFQYTTFRAVMAALTALAFSLMFGPWTIRRLTALKCGQAVRTDGPQTHLVKNGTPTMGGSLILTAITVSTLLWGNWANPYIWILLGVLLATGALGFYDDWRKVVYKDPNGVSAKFKMVWQSSVAIIAGLALFYLAANSANNILIVPFFKQIALPLGVVGFLVLSYLTIVGTSNAVNLTDGLDGLATFPVVLVAAGLAIFAYVSGHYQFSQYLQLPYVAGANEVAIFCTAMCGACLGFLWFNAYPAQVFMGDVGALALGAALGTVAVIVRQEFVLVIMGGLFVVEAVSVMLQVGWYKKTKKRIFLMAPIHHHYEQKGWKETQVVVRFWIITIVLVLIGLSTLKIR

SEQ ID NO: 1599 - protein, 720 aa, Neisseria meningitidis
MNAPLFRLSLLSLTLAAGFAHAAENNAKVVLDTVTVKGDRQGSKIRTNIVTLQQKDESTATDMRELLKEEPSIDFGGGNGTSQFLTLRGMGQNSVDIKVDNAYSDSQILYHQGRFIVDPALVKVVSVQKGAGSASAGIGATNGAIIAKTVDAQDLLKGLDKNWGVRLNSGFASNEGVSYGASVFGKEGNFDGLFSYNRNDEKDYEAGKGFRNVNGGKTVPYSALDKRSYLAKIGTTFGDDDHRIVLSHMKDQHRGIRTVREEFTVGDKSSRINIDRQAPAYRETTQSNTNLAYTGKNLGFVEKLDANAYVLEKERYSADDSGTGYAGNIKGPNHTRITTRGMNFNFDSRLAEQTLLKYGINYRHQEIKPQAFLNSKFSIPTTEEKNGQKVDKPMEQQMKDRADEDTVHAYKLSNPTKTDTGVYVEAIHDIGDFTLTGGLRYDRFKVKTHDGKTVSSSNLNPSFGVIWQPHEHWSFSASHNYASRSPRLYDALQTHGKRGIISIADGTKAERARNTEIGFNYNDGTFAANGSYFWQTIKDALANPQNRHDSVAVREAVNAGYIKNHGYELGASYRTGGLTAKVGVSHSKPRFYDTHKDKLLSANPEFGAQVGRTWTASLAYRFQNPNLEIGWRGRYVQKATGSILAAGQKDRKGNLENVVRKGFGVNDVFANWKPLGKDTLNVNLSVNNVFNTFYYPHSQRWTNTLPGTGRDVRLGVNYKF

SEQ ID NO: 1600 - protein, 193 aa, Neisseria meningitidis
MDNQEINNGRRRFLTLATCGAGGVAALGVATPFVASFFPSEKAKAAGAAVEVDVSKIEAGQLLTAEWQGKPIWVLNRTDQQLKDLKGLNGELTDPNSDAEQQPEYAKNETRSIKPNILVAIGICTHLGCSPTFRPDIAPADLGADWKGGFFCPCHGSKFDLAGRVYKGVPAPTNLVVPPYKYLSDTTILVGED

SEQ ID NO: 1601 - protein, 369 aa, Neisseria meningitidis
MSNWKPDIPYNDLPPLPPKQDIESKTILKRCITARASLARLKQAAELIPNQAMLINTLPVMEARASSEIENIVTTTDKLFQSLQMDTERQDPATKEALQYRTALFAGYESLTSRPLCTQTAIMVCNAIKHPYEMAIRKTGGTALKGGNSGNVVYTPPEGEETIRGKLANWERFIHESGDLDPLIIMAAAHYQFEAIHPFTDGNGRTGRILNSLLLIEKGLLDLPILYLSRYIIENRADYYRLLLGVTERQDWESWIIYILDGVADTADWTVSKIDAIRRLFEQTRQHIRTHAQGIYTHELVNLLFEQPYTRIANLEAAGIAKRQTASKYLKELSDIGVLQEIVIGRDKLFIHPRLMELLRGEGNSFTSF

SEQ ID NO: 1602 - protein, 274 aa, Neisseria meningitidis
LIQFRFSNTRNHLYMKTKLIKILTPFTVLPLLACGQTPVSNANAEPAVKAESAGKSVAASLKARLEKTYSAQDLKVLSVSETPVKGIYEVVVSGRQIIYTDAEGGYMFVGELINIDTRKNLTEERAADLNKIDFASLPLDKAIKEVRGNGKLKVAVFSDPDCPFCKRLEHEFEKMTDVTVYSFMMPIAGLHPDAARKAQILWCQPDRAKAWTDWMRKGKFPVGGSICDNPVAETTSLGEQFGFNGTPTLVFPNGRSQSGYSPMPQLEEIIRKNQ

SEQ ID NO: 1603 - protein, 123 aa, Neisseria meningitidis
MRKPQRGYARQDRVKEQIMRELAELVRTGLKDPRAGFITVNEVEVTRDYSHATVFYTILNQDAREITEEVLEHARGHLRSELAKRIKLFKIPELHFKYDESLERGLNLSALIDQVAAEKPVED

SEQ ID NO: 1604 - protein, 658 aa, Neisseria meningitidis
MSKLKTIALTASGLSVCPGFLYAQNTSSHQIGLAIMRLNSSILDLPPTKQYFQSGSLWSELRQGFRMGEVNPELVRRHESKFIASHSYFNRVINRSRPYMYHIANEVKKRNMPAEAALLPFIESAFVTKAKSHVGASGLWQFMPATGRHYGLEKTPVYDGRHDVYAATDAALNYLQYLYGLFGDWPLAFAAYNWGEGNVGRAINRARAQGLEPTYENLRMPNETRNYVPKLLAVRNIIATPQSFGMNISDIDNKPYFQAVEPDRPLDNEAIARLAGITQSELLALNPAFNVPAFIPKSKRKLLLPVASVQTFQSNYLNAAPDSLFSWEVYTPAAKTSLSDISTATGMSIADIKRLNNLNGNLVNAGRSILVAKNGKTLQTASESVVSIDIDNTPDTYRSNMPAGTVNVGIARIRPAAAQTADITVAPLPQKTVRTEPDPLVRIAEPALATAAAQPQTEKQTAMPSETQTATLAQIVPQNDMQAADELMQLVARNNLRRQAEETISAVIGTPDTVAEHNISSSPQHTVAADGKRRVRLETRVAKAADGEAEISPLHASIHRVVEGDTLFNIAKRYNVSVADLIVANNIKGNTIQKGQVLRLAQAAPAQTRIEKVSYTARKGDTFKSIAARFNIHIDDIRRLNPNLNTINPGQRVKLIGS

SEQ ID NO: 1605 - protein, 366 aa, Neisseria meningitidis
METQLYIGIMSGTSMDGADAVLIRMDGGKWLGAEGHAFTPYPDRLRRKLLDLQDTGTDELHRSRMLSQELSRLYAQTVGELLNKQNLAPSDITALGCHGQTVRHAPEHGYSVQLADLPLLAELTQIFTVGDFRSRDLAAGGQGAPLVPAFHEALFRDDRETRAVLNIGGIANISVLPPDAPAFGFDTGPGNMLMDAWMQAHWQLPYDKNGAKAAQGNILPQLLDRLLAHPYFAQPHPKSTGRELFALNWLETYLDGGENRYDVLRTLSRFTAQTVFDAVSHAAADARQMYICGGGIRNPVLMADLAECFGTRVSLHSTAELNLDPQWVEAAAFAWMAACWVNRIPGSPHKATGASKPCILGAGYYY

SEQ ID NO: 1606 - protein, 312 aa, Neisseria meningitidis
MLELNGLCKRFGGKTVADNICLTVGRGKILAVLGRSGCGKSTLLNMIAGIVRPDGGEIQLNGENITRMPPEKRRISLMFQDYALFPHMSALENAAFGLKMQKMPKAEAESLALLALAEVGLENEAHRKPEKLSGGEKQRLALARALVVRPSLLLLDESFSSLDTHLRDRLRRMTAERIRNGGIPAVLVTHSPEEACTAADEIAVMHEGKILQCGTPETLVQTPAGVQVARLMGLPNTDDDRHIPQNAVRFDQDGMECRVLSRTCLPESFSLSVLHPEHGILWLNLDMPHAGEISGNDTVRIHIEDREIVRFR

SEQ ID NO: 1607 - protein, 279 aa, Neisseria meningitidis
VNRTAFCCLFLTTALILTACSSGGGGSGSGGVAADIGTGLADALTAPLDHKDKGLRSLTLDQSVRKNEKLKLAAQGAEKTYGNGDSLNTGKLKNDKVSRFDFIRQIEVDRQLITLESGEFQVYKQSHSALTAFQTEQIQDSEHSGKMVAKRRFRIGDIAGEHTSFDKLPEGGRATYRGTAFSSDDAGGKLTYTIDFAAKQGYGKIEHLKSPELNVDLVSADIKPDEKRHAVISGSVLYNQDEKGSYSLGIFGGKAQEVAGSAEVKTVNGIRHIGLAAKQ

SEQ ID NO: 1608 - protein, 160 aa, Neisseria meningitidis
MTNIRIGQGYDVHQLTEGRKLILGGVEIPFEKGLLGHSDADALLHAVTDALLGAAGLGDIGSHFPDTAAEFKDADSRVLLRAAYQSVQAQGWQAVNVDTTVIAQKPKLAPHIPQMRANIAADLGIDISCVNIKGKTNEKLGYLGRMEGIEAQAAVLLVRI

SEQ ID NO: 1609 - protein, 472 aa, Neisseria meningitidis
MSIKNAVKLIEESEARFVDLRFTDTKGKQHHFTVPARIVLEDPEEWFENGQAFDGSSIGGWKGIQASDMQLRPDASTAFVDPFYDDTTVVFTCDVIDPADGQGYDRDPRSIARRAEAYLKSSGIGDTAYFGPEPEFFVFDGVEFETDMHKTRYEITSESGAWASGLHMDGQNTGHRPAVKGGYAPVAPIDCGQDLRSAMVNILEELGIEVEVHHSEVGTGSQMEIGTRFATLVKRADQTQDMKYVIQNVAHNFGKTATFMPKPIMGDNGSGMHVHQSIWKDGQNLFAGDGYAGLSDTALYYIGGIIKHAKALNAITNPSTNSYKRLVPHFEAPTKLAYSAKNRSASIRIPSVNSSKARRIEARFPDPTANPYLAFAALLMAGLDGIQNKIHPGDPADKNLYDLPPEEDALVPTVCASLEEALAALKADHEFLLRGGVFSKDWIDSYIAFKEEDVRRIRMAPHPLEFEMYYSL

SEQ ID NO: 1610 - protein, 98 aa, Neisseria meningitidis
MLLKVVPERTVSADAKTRDPMWDNAALQTSEGVNFIARFLGFFSDGEYRYVDVLQPNHSDIIRYSGKDFPLNQILNHIHPARYAVTFENNVDSKLRRH

SEQ ID NO: 1611 - protein, 108 aa, Neisseria meningitidis
MSVKKMLAILLSAILGLVSTTAAAGTSEPAHRDTKHIRKANKQMLHPECRKYLERRAAWYRSQGNVQELRENKKARKAFRSLPYAEQKIQCRAAYEAFDDFDGGSFRR

SEQ ID NO: 1612 - protein, 314 aa, Neisseria meningitidis
LMEYNAIMKTIAPSHIKPLMPELNQSQRNRIIFIDFYLCFLGKINRKDLMQAFQISPAVATRDFALYCSSFSKNLRFDTKSKFYLSTEDFEPQFPHSFENAIKILNGSLIFDIDSQHQPLLPFDLPPVLINPDVLIFSKISKALSLKKPLKISYHSISSGLSEKVIVPLALVNDGFRWHLRAFDRTKNRFADFVLTRIIQANILLAENIEENETINNDIDWNRIVKIELVPHPNHDEAKKVIEMDFGMTNGKLELALRASNIGYVLQQWRVDCSSDHHIDDPAFRLWLLDNLVLYGINNAEHLAPAFDKKRSKP

SEQ ID NO: 1613 - protein, 177 aa, Neisseria meningitidis
MSRVAKNPVTVPAGVEVKFGTEALVIKGKNGELSFPLHSDVAIEFNDGKLAFVANNSSKQANAMSGTARALVSNMVKGVSEGFEKRLQLIGVGYRAQAQGKILNLSLGFSHPIVYEMPEGVSVQTPSQTEIVLTGSDKQVVGQVAAEIRAFRAPEPYKGKGVRYVGEVVVMKEAKKK

SEQ ID NO: 1614 - protein, 275 aa, Neisseria meningitidis
MKPDIYALLERALLSGNPDEKGRLADEAFAAVQNADGAETNAPPADFPRAGRPDKPVLVAPSQLTPRKMNTTEGYAAMLHAITHIEFNAVNLTLDAAYRFRTLPFQFVRDWVKVAKEEVYHFRLMRDRLRAFGFDYGSFEAHNHLWDMAYKTAYDPLLRMALVPRVLEARGLDVTPGIRAKVAQRGDSETCGVLDIIYRDEVGHVAIGNHWYQHLCRERGLEPIALFRSLIARYDMFIFRGYVNIEAREKAGFSRFELDMLEDFEQGLKQNKHAV

SEQ ID NO: 1615 - protein, 558 aa, Neisseria meningitidis
MSVGLLRILVQNQVVTVEQAEHYYNESQAGKEVLPMLFSDGVISPKSLAALIARVFSYSILDLRHYPRHRVLMGVLTEEQMVEFHCVPVFRRGDKVFFAVSDPTQMPQIQKTVSAAGIEVELVIVEDDQLAGLLDWVGSRSTSLLQELGEGQEEEESHTLYIDNEEAEDGPVPRFIHKTLSDALRSGASDIHFEFYEHNARIRFRVDGQLREVVQPPIAVRGQLASRIKVMSRLDISEKRIPQDGRMQLTFQKGGKPVDFRVSTLPTLFGEKVVMRILNSDAASLNIDQLGFEPFQKKLLLEAIHRPYGMVLVTGPTGSGKTVSLYTCLNILNTESVNIATAEDPAEINLPGINQVNVNDKQGLTFAAALKSFLRQDPDIIMVGEIRDLETADIAIKAAQTGHMVFSTLHTNNAPATLSRMLNMGVAPFNIASSVSLIMAQRLLRRLCSSCKQEVERPSASALKEVGFTDEDLAKDWKLYRAVGCDRCRGQGYKGRAGVYEVMPISEEMQRVIMNNGTEVDILDVAYKEGMVDLRRAGILKVMQGITSLEEVTANTND

SEQ ID NO: 1616 - protein, 364 aa, Neisseria meningitidis
MKTNLLNYDLQGLTRHFADTGEKPFRAKQVMRWMHQSGAQNFNEMTDLAKSLRHKLNEQASIEIPKLMMSQESSDGTRKWLLDVGTGNGVETVFIPESDRGTLCISSQVGCALECTFCSTGRQGFNRNLTAAEIIGQLWWANKAMGVTPKNERVISNVVMMGMGEPMANFDNVVTALSIMLDDHGYGLSRRRVTVSTSGMVPQMDRLRDVMPVALAVSLHASNDEVRNQIVPLNKKYPLKELMAACQRYLVKAPRDFITFEYVMLDGINDRAQHARELIELVKDVPCKFNLIPFNPFPNSGYERSSNENIRVFRDILQQAGFVVTVRKTRGDDIDAACGQLAGQVQDKTRRQQKWQQILIGQQG

SEQ ID NO: 1617 - protein, 335 aa, Neisseria meningitidis
MSTFFQQTAQAMIAKHINRFPLLKLDQVIDWQPIEPYLNRQKTRYLRDHRGRPAYPLLSMFKAVLLGQWHSLSDPELEHSLITRIDFNLFCRFDELIIPDYSTLCRYRNWLAQDDTLSELLKLINCQLTEKGLKVEKASAAVIDATIIQTAGSKQRQAIEVDEEGQVSGQTTPSKDSDARWIKKNGLYKLGYKQHTRTDAEGYIEKLHITPANAHECKHLSPLLEGLPKGTTVYADKGYDSAENRQHLEEHQLLDGIMRKACRNRPLSEVQTKRNRYLSKTRYVVEQSFGTLHRKFRYARAAYFGLLKVSAQSHLKAMCLNLLKAANRLSAPAAA

SEQ ID NO: 1618 - protein, 916 aa, Neisseria meningitidis
MTDATIRHDHKFALETLPVSLEDEMRKSYLDYAMSVIVGRALPDVRDGLKPVHRRVLYAMHELKNNWNAAYKKSARIVGDVIGKYHPHGDIAVYDTIVRMAQNFAMRYVLIDGQGNFGSVDGLAAAAMRYTEIRMAKISHEMLADIEEETVNFGPNYDGSEHEPLVLPTRFPTLLVNGSSGIAVGMATNIPPHNLSDTVNACLRLLDAPDTEIDELIDIIQAPDFPTGATIYGLSGVREGYKTGRGRVVMRGKTHIEPIGRNGEREAIVIDEIPYQVNKAKLVEKIGDLVREKTLEGISELRDESDKSGMRVVIELKRNENAEVVLNQLYKLTPLQDSFGINMVVLVDGQPRLLNLKQILSEFLRHRREVVTRRTLFRLKKARHEGHIAEGKAVALSNIDAIIKLIKESPNAAEAKDKLLAHPWRSSLVEEMLTRSGLDLEMMRPEGLAANIGLKEQGYYLSEIQADAILRMSLRNLTGLDQEEIVESYKNLMGKIIDFVDILSKPERITQIIRDELEEIKTNYGDERRSEINPFGGDIADEDLIPQREMVVTLTHGGYIKTQPTTDYQAQRRGGRGKQAAATKDEDFIETLFVANTHDYLMCFTNLGKCHWIKVYKLPEGGRNSRGRPINNVIQLEEGEKVSAILAVREFPEDQYVFFATAQGLVKKVQLSAFKNVRAQGIKAIALKEGDYLVGAAQTGGADDIMLFSNLGKAIRFNEYWEKSGNDEAEDADIETEISDGIEDETADSENALPSGKHGVRPSGRGSGGLRGMRLPADGKIVSLITFAPETEESGLQVLTATANGYGKRTPIADYSRKNKGGQGNIAINTGERNGDLVAATLVGETDDLMLITSGGVLIRTKVEQIRETGRAAAGVKLINLDEGETLVSLERVAEDESELSDASVISNVTEPEVEN

SEQ ID NO: 1619 - protein, 497 aa, Neisseria meningitidis
MLSGLPIPKDIARPPETILVNITPQETRVAVLEENNICELHIERNSEHSLVGNIYLGVVRRVLPGMQSAFIDIGLERAAFLHIVDVLEQRRNPEETQRIEHMLFEGQSVLVQVIKDPINTKGARLSTQISLAGRFLVHLPQEDHIGVSQRIEDDAERSSLRERLDKLLPENACRGYIIRTNAENATDEQLQSDIDYLTKVWEHIQEQAKIRPPETLLYQDLPLSLRVLRDMVGCDTQKILVDSTVNHGRMTRFAEQYVHGALGRIELFKGERPLFETHNVEQEISRALQPRVNLNFGSYLIIESTEAMTTIDVNTGGFVGARNFDETIFRTNLEACHTIARELRLRNLGGIIIIDFIDMAQESHREAVLQELAKALAFDRTRVTLHGFTSLGLVELTRKRSRENLNQVLCEPCPSCQGRGRLKTPQTVCYEIQREIVREARRYDAESFRILAAPNVIDLFLDEESQSLAMLIDFIGKPISLAVETAYTQEQYDIVLM

SEQ ID NO: 1620 - protein, 84 aa, Neisseria meningitidis
MNKLFITALSALALSACASTWEGAKQDTARNLDKTQAAAERAAEQTGNAVEKGWDKTKEAVKKGGNAVGRGISHLGGKIENATE

SEQ ID NO: 1621 - protein, 69 aa, Neisseria meningitidis
MNYFGMVEFLRLMAMVRPPFVFFSGTRSELPAYLDLVAELRLTGWERFAGSQTLTVSSTSTAIQATTTT

SEQ ID NO: 1622 - protein, 78 aa, Neisseria meningitidis
MGLIAIACGLIVALGALGASIGIAMVGSKYLESSARQPELIGPLQTKLFLIAGLIDAAFLIGVAIALLFAFVNPFAGA

SEQ ID NO: 1623 - protein, 591 aa, Neisseria meningitidis
MSIVLHGVAAGKGIAVGCAHLIARGTEEVPQYDVAEADTDAEAERFDAAVKATRKELEQLRSAIPENAPTELGAFISLHLMLLTDVTLSREPVDILREQKINAEWALKQQSDKLAAQFDNMDDAYLRERKQDMLQVVRRIHNNLIGQGNELEVADNLFDETVLIANDLSPADTVLFKEQRIAAFVTDAGGPTGHTAILGRSLDIPSVVGLHNARKLITEGETVIVDGINGVLIIAPDESVLNEYRRRAREYRSHKRDLNKLKKTAAATADGVCIELVGNIESAEDVKPLHNLGADGIGLFRSEFLYLNRDTMPSEDEQYEVYSAIVKKMKGKSVTIRTVDLGVDKNPRWFGKNSTPNGSLNPALGMTGIRLCLAEPVMFRTQMRAILRAAVHGPVRMMWPMITSVSEVRQCLIHLDTARRQLAERGDAFGKVGIGCMIEIPSAALTVGSILKLVDFISVGTNDLIQYILSVDRGDDSVSHLYQPGHPSVLKMLQHVIRTANRMDKDVSVCGEMAGDTAFTRILLGMGLRRFSMNPNNILPVKNIILHSNIAQLENEIAKIVRCEDEEKAEKLIKQMNSVSVEEEADFKGRK

SEQ ID NO: 1624 - protein, 255 aa, Neisseria meningitidis
MSSNKASFFTRLRRLCRLTVWLFKTGKNLRGIDGGCPESRNRAVIELGRGALTALDIGLEVGRPAPEHPNGVLVAANHVSWLDIFAMSAVYPSSFIAKQEIKSWPVLGKMGQNAGTVFINRNSRRDIEPINRAVCETLQRGQNVSFFPEARTSSGLGLLPFKAALFQSAIDAGAKVLAVALRYYDETGKRTARPSYADVGLPTCLWRIVSMKKLTIKVDFVCVADAAESEDRYALKDKIEESIRAVVADDADIAV

SEQ ID NO: 1625 - protein, 513 aa, Neisseria meningitidis
MFFDNNYHYNAIPVRLLVNIQDADSDGIQTASENNNGTRMGYNRPMEKNTLSARAPSPWLPLLLAIAIFMQMLDATILNTALPEIATDLDESPLDMQLAVVAYTLTVALLIPLSGYLADRFGTKKVFFGSIAVFMLGSALCAASGSLFELTLSRVVQGIGGSMLVPIPRLTILRMYDKSKLLNAINYAVMPALIGPVLGPLAGGYLVEYASWHWIFLLNLPIGLLGFILGRNIMPDVKGNDTALDFKGYLTFSAAACLLLLAAESLSHALPPYFALLPLCGGLLFARRYFRHMKTTSKPIYSADLFLIRTFRLGLAGNLFSRLGISSIPFLMPLMFQVAFGFGASLSGWLVAPVALSSLLVKPLIAPLMKRFGYRTVLLWNTKLLAAFIMLLALPDGNSSLWIWIFLSLAIGACNSLQFSAMNTLTLADLRPQQTGSGNSLMAVNQQLAISMGIVVGALILKNWTFLIPASSGLHSAFRMTLLSIGGITLASSLVFNRLHVSDGTNLTRNTPS

SEQ ID NO: 1626 - protein, 291 aa, Neisseria meningitidis
MRILLTGSKSQLARCLRDRLPEDWETIATDSASLDITDADAVCNMVKSFQPDAIVNTAAYTAVDKAEGDAAAAFAVNASAVYNLALAAHRAHARFIHISTDYIFDGKGKRPYQESDFTNPSNVYGQSKTAGELLALSANPDSLILRTSWLFSEYGDNFVRTMLNLARERSPLSAVHNQIGCPTYAGDLSAAIIRLLQQSNPVRGIYHYVGGKSVSWYEFAQHIFQAASQQQTSFPVPELTAVSDKEYPTAAPRPAYSILDCRKIENDFSIKPSDWQKALAQVVSKLLSSGY

SEQ ID NO: 1627 - protein, 289 aa, Neisseria meningitidis
LAEGQKSAVTEYYLNHGIWPKNNTSAGVASTPSDIKGKYVQKVEVAKGVITATMLSSGVNKEIQGKELSLWAKRQDGSVKWFCGQPVTRNDTAKDDVAADNDATKKIDTKHLPSTCRDAASAVCTKTPEYYLNHGKWPDGNSNAGVASSSTIKGKYVEKVEVAKGVITATMLSTGVNNEIKDKKLSLWAKRQDGSVKWFCGQPVTRNAKAANADDVAADDTNKIDTKHLPSTCRDASSASRTKTPGFAFKYFQKISRYRVLPESRQMTKKLRHSRAGGNLGLSAQKLIG

SEQ ID NO: 1628 - protein, 238 aa, Neisseria meningitidis
MNFENDDIIHAPTTSSLILEERHDSELFRVYALILDGITDQVLLPGKKLTESELCRQMVCSRNTVRGALSLLAHDKIVDLQPNRGAFVHVPDLKEMQDVFNARIEMETMILNILAGLPDLETRLKPLYAMIRREEEASGRGDRVGWNRLSNAFHVELARLVGNDVLFDIMNTLCARSSLIVAVAGVHREEKHAINTHTHSEHREILDLLLAGRRNRVVKILRRHLGNCMERLEKTLED

SEQ ID NO: 1629 - protein, 196 aa, Neisseria meningitidis
MKKSSLISALGIGILSIGMAFAAPADAVNQIRQNATQVLSILKSGDANTARQKAEAYAIPYFDFQRMTALAVGNPWRTASDAQKQALAKEFQTLLIRTYSGTMLKLKNANVNVKDNPIVNKGGKEIIVRAEVGVPGQKPVNMDFTTYQSGGKYRTYNVAIEGASLVTVYRNQFGEIIKAKGVDGLIAELKAKNGSK

SEQ ID NO: 1630 - protein, 294 aa, Neisseria meningitidis
VVGNGKKYAAPLLVLGCVVFGLGSLIVRSVPVGSYAIAFWRLLISVFVFWFLARFFGQKFPKNRKTVRYALTAGVFLAFDLALWHESIHAVGPGVSTLLNSLQIFFLSAIGVFFFGERLSGLKKAGLISAVAGVAMIAGAEFGYNGNAVWGFVSGLVSGLMLALSMVFVRKTHEVEPVALFPSMMILSLGGAVSLVVPALLMDGGALYPTTWKDAGLVLVYGVVMQCFAWAMVAYAIPLLSLSLTGLLLLSEPVAALFIDYFGLGKPIEGVQWAGVALTLSAIYLGSLKQQSSH

SEQ ID NO: 1631 - protein, 400 aa, Neisseria meningitidis
MKNYHAPDEKGFFGEHGGLYVSETLIPALQELADAYKAAKNDPEFWAEFRCDLKHYVGRPSPVYHAARLSEHLGGAQIWLKREDLNHTGAHKVNNTIGQALLAKRMGKKRVIAETGAGQHGVASATVAARFGMTCDVYMGADDIQRQMPNVFRMKLLGANVVGVESGSRTLKDAMNEAMREWVARVDDTFYIIGTAAGPAPYPEMVRDFQCVIGNEAKAQMQEAIGRQPDVAVACVGGGSNAIGLFHPYIGEENVRLVGVEAGGLGVNTPDHAAPITSGAPIGVLHGFRSYLMQDENGQVLGTHSVSAGLDYPGIGPEHSHLHDIKRVEYTVAKDDEALEAFDLLCRFEGIIPALESSHAVAWAVKNAPKMGKDQVILVNLSGRGDKDINTVAKLKGIKL

SEQ ID NO: 1632 - protein, 943 aa, Neisseria meningitidis
MNRRHTFPLTLTALAVATAFPAYAAQAGVAAPDAAQTQSLKEVTVRAAKVGRRSKEATGLGKIVKTSETLNKEQVLGIRDLTRYDPGVAVVEQGNGASGGYSIRGVDKNRVAVSVDGVAQIQAFTVQGSLSGYGGRGGSGAINEIEYENISTVEIDKGAGSSDHGSGALGGAVAFRTKEAADLISDGKSWGIQAKTAYGSKNRQFMKSLGAGFSKDGWEGLLIRTERQGRETRPHGDIADGVAYGINRLDAFRQTYDIQSKDKTGQFFLVEGENTLKPVAKLAGNGNYLKNQLNRWVEERRSKGQALNSEEEAMVREAQARHENLSAQSYTGGGRILPDPMDYRSGSWLAKLGYRFGGRHYVGGVFEDTKQRYDIRDMTEKQYYGTDESKKFSNKSGVYDGNDFRDGLYFVPNIEEWKGDTNLVKGIGLKYSRTKFIDEHHRRRRMGLLYRYENEKYSDNWADKAVLSFDKQGVATDNNTLKLNCAVYPAVDKSCRASADKPYSYDSSDRFHYREQHNVLNASFEKSLKNKWTKHHLTLGFGYDASKAISRPEQLSHNAARISEYSDYTDKGDKYLLGKPEVVEGSVCGYIETLRSRKCVPRKINGSNIHISLNDRFSIGKYFDFSLGGRYDRKNFTTSEELVRSGRYVDRSWNSGIVFKPNRHFSLSYRASSGFRTPSFQELFGIDIYHDYPKGWQRPALKSEKAANREIGLQWKGDFGFLEISSFRNRYTDMIAVADHKTQLPNQAGQLTEIDIRDYYNAQNMSLQGVNILGKIDWNGVYGKLPEGLYTTLAYNRIKPKSVSNRPGLSLRSYALDAVQPSRYVLGFGYDQPEGKWGANIMLTYSKGKNPDELAYLAGDQKRYSTKRASSSWSTADVSAYLNLKKRLTLRAAIYNIGNYRYVTWESLRQTAESTANRHGGDSNYGRYAAPGRNFSLALEMKF

SEQ ID NO: 1633 - protein, 123 aa, Neisseria meningitidis
MLFVGFLERIKQELDLKKDKDVAEFLGLEPKAFSIRKKRDSIPVDAVRAAAFEHPELNADWGYILTGRREKSVKMPSEKLNKEEQELLALFREAAAADREMILMVARRAEKKAQAALGKVSNG

SEQ ID NO: 1634 - protein, 160 aa, Neisseria meningitidis
MRKSRLSRYKQNKLIELFVAGVTARTAAELVGINKNTAAYYFHRLRLLIYQNSPHLEMFDGEVEADESYFGGQRKGKRGRGAAGKVAVFGLLKRNGKVYTVTVPNTQTATLFPIIREQVKPDSIVYTDCYRSYDVLDVREFSHFSFAETSFSYQSQHTFC

SEQ ID NO: 1635 - protein, 601 aa, Neisseria meningitidis
MRYKPLLLALMLVFSTPAVAAHDAAHNRSAEVKKQTKNKKEQPEAAEGKKEKGKNGAVKDKKTGGKEAAKEGKESKKTAKNRKEAEKEATSRQSARKGREGDKKSKAEHKKAHGKSVSGSKEKNAKTQPENKQGKKEAKGQGNPRKGGKAEKDTVSANKKVRSDKNGKAVKQDKKYREEKNAKTDSDELKAAVAAATNDVENKKALLKQSEGMLLHVSNSLKQLQEERIRQERIRQERIRQARGNLASVNLKQREAWDKFQKLNTELNRLKTEVAATKAQISRFVSGNYKNSQPNAVALFLKNAEPGQKNRFLRYTRYVNASNREVVKDLEKQQKALAVQEQKINNELARLKKIQANVQSLLKKQGVTDAAEQTESRRQNAKIAKDARKLLEQKGNEQQLNKLLSNLEKKKAEHRIQDAEAKRKLAEARLAAAEKARKEAAQQKAEARRAEMSNLTAEDRNIQAPSVMGIGSADGFSRMQGRLKKPVDGVPTGLFGQNRSGGDVWKGVFYSTAPATVESIAPGTVSYADELDGYGKVVVVDHGENYISIYAGLSEISVGKGYMVAAGSKIGSSGSLPDGEEGLYLQIRYQGQVLNPSSWIR

SEQ ID NO: 1636 - protein, 641 aa, Neisseria meningitidis
LRICIMNILSVENASFAIGHVALLDKTSFQLDSGEKVGLIGRNGAGKSSFLKILAGVQKLDDGQIIVQNNLKIVYVPQESFFDKDATVFDTVAEGLGEIRDLLRRYHHVSHELENGSSEALLKELNELQLEIEAKDGWKLDAAVKQTLGELSLPENEKIGNLSGGQKKRVALAQAWVQKPDVLLLDEPTNHLDIDAIIWLENLLKAFEGSLAVITHDRRFLDNIATRIVELDRGILRSYPGSFSKYSEKKAQELAVEAEHNRLFDKFHAQEEAWIRKGIEARRTRNEGRVRRLEELRRQRAERRNVQGQVNFKLDSGEKSGKIIAELEHASFAYGGKVIMDKFSAILQRGDKIGLIGPNGIGKTTFLKLILGELQPTYGRIRIGSKQEVAYFDQFRSALNENDTVFYTLGQGNDYVEVGGKKKHVMSYLEDFLFPPARAQSPVSSLSGGERNRLLLAKLFTRPANILVLDEPTNDLDIDTQELLEDLLRDYQGTVFLVSHDRMFLDNVITQSLVFEGNGRLKEYIGGYQDYIDAKSREAKIQTESAPKTADAEPVKEKPKANRTVKLSYKEQRELDALPDEIAALEAEQAEINAQLSDPEIFKDYEKAGALQSRAEEIEMLLLEKLERWELLETKQNGNAV

SEQ ID NO: 1637 - protein, 336 aa, Neisseria meningitidis
MNDNTQTLPPRRLSVAPMLDWTDRHYRYMARQITRNTWLYSEMVNAGAIVYGDKDRFLMFNEGEQPVALQLGGSDPSDLAKAAKAAEAYGYNEVNLNCGCPSPRVQKGAFGACLMNEVGLVADCLNAMQDAVGIPVTVKHRIGVDRQTEYQTVADFVGTLRDKTACKTFIVHARNAWLDGLSPKENRDVPPLKYDYVYRLKQEFPELEIIINGGVTTNEAIAGHLQHVDGVMVGREAYHNPMVMREWDRLFYGDTRSPIEYADLVQRLYTYSQAQIQAGRGTILRHIVRHSLGLMHGLKGARTWRRMLSDATLLKDNDGSLILEAWKEVEWANTRE

SEQ ID NO: 1638 - protein, 140 aa, Neisseria meningitidis
MNLEQLGRRDALLSGLLKQAGQWRRLDAAVKKLLPANLHPHFQTACIEDGRLVLLAANNMAASRLKMIAPSVLPQLAGLDASIRSVSVRLVPKPEKPPKTNTLHLSKAALESFGSAAVKLEKRHPELAEALANLVRRHGA

SEQ ID NO: 1639 - protein, 172 aa, Neisseria meningitidis
MPKLHMFYLGGNAGRSNIEVHDIQFAVCDDYREAVPALKAAWFGDADKIHIDGWQIVEWADGYDIAVSETPKTKMPSEHAPRLYFANVGGYRAGQLAEAHAFGLFAAATPAEAKQKALQTLLTDSYVQQHKDNLKDVDNLLALDRIGNFHIRLTPNPHGKPAEIGFQGYLPI

SEQ ID NO: 1640 - protein, 297 aa, Neisseria meningitidis
MIAKHIDRFPLLKLDQVIDWQPIEQYLNRQRIRYLRDHRGRPAYPLLSMFKAVLLGQWHSLSDPELEHSLITRIDFNLFCRFDELSIPDYSTLCRYRNWLAQDDTLSELLELINRQLTEKGLKIEKASAAVVDATIIQTAGSTQRQAIEVDEEGQINGQTTPSKDKDARWIKKNGLYKLGYKQHTRTDAEGYIEKLHITPANAHECNHLSPLLEGIADGTTVYADKGYDSAENRQHLKEHQLQDGIMRKACRNRPLTEVQTKRNRYLSKTRYVVEQSFGTLHRKFRYARAAYFGLIK

SEQ ID NO: 1641 - protein, 248 aa, Neisseria meningitidis
MNVLISNDDGYLSEGIAVLARVTAEFANVRVVAPERDRSGVSNSLTLERPLQLKQAQNGFYYVNGTPTDCIHIGQSVFSDFQADFVFSGINRGANMGDDTLYSGTVAAATEAYLMGIPAVAFSLNDASGRYWATAEQALWTLLAHFFKTPPQSPILWNINIPAVAPEDVRGIKIARLGRRHHGQNVIPARNPRGEQIYWIGPVGEVSDREEGTDFGECGAGFITVTPLQIDLTAYPDMAETAAFWHAD

SEQ ID NO: 1642 - protein, 381 aa, Neisseria meningitidis
MTETQSLELAKALISRPSVTPDDRDCQKLLVERLYKIGFAAEELHFGDTKNIWLRRGTKVPVVCFAGHTDVVPTGPVEKWDSPPFEPTERDGRLYGRGAADMKTSIACFVTACERFVAEHPDHQGSIALLITSDEEGDALDGTTKVVDVLKARGELIDYCIVGEPTAVDKLGDMIKNGRRGSLSGNLTVKGKQGHIAYPHLAINPVHTFAPALLELTQEVWDEGNKYFPPTSFQISNINGGTGATNVIPGELNVKFNFRFSTESTEAGLKQRVHAILDKHGVQYDLQWSCSGQPFLTQAGKLTDVARAAIAETCGIEAELSTTGGTSDGRFIKAIAKELIELGPSNATIHQINENVRLNDIPKLSAVYEGILARLLAGNAV

SEQ ID NO: 1643 - protein, 145 aa, Neisseria meningitidis
MPRWVDEAVAEYAKRFGRDVAYALKEIKPEKRGAGVNAAQGMAAEEKRILEAIPQGAFLVVLDERGKAPTSVELAEHLKTWQQNGEHVCFVIGGADGMTDRLKQQARIMMRLSSLTLPHGMVRVLLTEQLYRAASILHNHPYHRE

SEQ ID NO: 1644 - protein, 132 aa, Neisseria meningitidis; identical to SEQ ID NO: 382

SEQ ID NO: 1645 - protein, 259 aa, Neisseria meningitidis
MKTITETLNLAPKGKNFLTADWPAPANVKTLITTRNGGVSQGAYQSLNLGTHVGDNPEAVRRNREIVQQQVGLPVAYLNQIHSTVVVNAAEALGGTPDADASVDDTGKVACAVMTADCLPVLFCDRAGTAVAAAHAGWRGLAGGVLQNTIAAMKVPPVEMMAYLGPAISADAFEVGQDVFDAFCTPMPEAATAFEGIGSGKFLADLYALARLILKREGVGGVYGGTHCTVLERDTFFSYRRDGATGRMASLIWLDGNAV

SEQ ID NO: 1646 - protein, 218 aa, Neisseria meningitidis
VNKRLFCSRNGLRYYLLGGFCLSVFPLLLVFASSVWAVYRTGGQVLPPYVRADAALVLGAAAWDKRPSPVFRERINHAIALYQSRRVGKIVFTGGRTKKGYMTEAEVGRRYALKQGVPARNILFENTSRNTYENLNNIRPVLRANGIASVVIVSDPYHLARAAEMAEDLGVRVYMSATPTTRFDAGNKKKIFMLQEGYALSLYRLEKWGSRFLGWLSD

SEQ ID NO: 1647 - protein, 205 aa, Neisseria meningitidis
MSHKKQDAFQGLIDALKVLPNVGPKSAQRIAYHLLQHKRKEAEKLVDALQTALKQVHHCAMCNTFCEGGLCDICADETRDGRRLMVVHMPADVSNMEAANCHDGLYFVLMGQINTALGMDVSAIALDRLAQRLGGGEVEEIIIATAFTAEGNATAYVLSEFFKNLPYKVSRLSQGIPLGGELEYVDAGTLAQAVYERRLIKEGGA

SEQ ID NO: 1648 - protein, 332 aa, Neisseria meningitidis
VAAHIGHIDTDAPLKPLYVIHGEEELLRIEALDALRAAAKKQGYLNREVYTADNAFDWNELLQTAGSAGLFADLKLLELHIPNGKPSKTGGEALQDFAARLPEDTVTLVLLPKLEKTQLQSKWFAALAAKGEVWEAKPVGAAALPQWIRGRLDKIDLGIEADALALFAERVEGNLLAARQEIDKLALLYPKGHTVNIDEAQTAVANVARFDAFQLAGAWMKGDVPRVCRLLDGLQEEGEEPVLLLWAVAEDVRTLIRLAAALKQGQSVQSVRNSLRLWGDKQTLAPLAVKRISVVRLLDALKTCAQIDRIIKGAEDGDAWTVFKRLVVSLAE

SEQ ID NO: 1649 - protein, 239 aa, Neisseria meningitidis
MLTTPPLAPKTVAALHRLGIRTLEELRQNGSVKAFLLLKASGLTLTKSTLWQLQSLLDDTLPQEMSQAHKARLLAELKNHPPVAAFPSQEEMEHFMREALRQAEQSAADGEIPVGAVIVSDGKIIASAHNTCIADCNVSRHAEINALAQAGREIQNYRLDGCDIYITLEPCAMCASALIQARIRRVIYGAAEPKTGAAGSIVNLFADKRLNTHTAIRGGILQEECRAVLSRFFQNKRKG

SEQ ID NO: 1650 - protein, 313 aa, Neisseria meningitidis
MAIQWFPGHMNKAKKAIAERAKSVDMVIEMLDARMPASSENPLLAQLSKGKPKLKILNKQDLADPERTKIWLEHYNSRPDTCAIALDSSETGAHGKITQACRAMIPHRQGIDKPLRVLICGIPNVGKSTLINGMIGKKSAKTGNEPGITKAEQRLFLADDFWLYDTPGMLWPKIIVEEGGYNLAAGGAVGRNALDEEEVALELLDYLRRHYLPMLQERYQADKDPSSHWDENVWLEWIAKKRGAVLSGGRINYQKAAENILTDFREGKIGRITLETPNQWETWLKKARQKEAELKAIREARKAERKGQKPSEA

SEQ ID NO: 1651 - protein, 144 aa, Neisseria meningitidis
MNELLSGELAARDQYFIHSRLYSEWGYTKLFERLNHEMEEETTHAEDFIRRILMLGGTPKMVRAELNIGTDVVSCLKADLQTEYEVRDALKKGIKLCEEAQDYVTRDLMVAQLKDTEEDHAHWLEQQLRLIELIGEGNYYQSQL

SEQ ID NO: 1652 - protein, 65 aa, Neisseria meningitidis
LEHIARGMCAAIMAYFGGFVRALFDLGVFERGGVKGREKWFSRVWRRSEVLCLMCGGIFSVKLIL

SEQ ID NO: 1653 - protein, 363 aa, Neisseria meningitidis
MSLKCGIVGLPNVGKSTLFNALTQSGIEAANYPFCTIEPNVGIVEVPDPRMAELAKIVNPQKMQPAIVEFVDIAGLVAGASKGEGLGNQFLANIRETDAIVNVVRCFDDDNIVHVSGKVDPIADIETIGTELALADLASVEKAIVREEKRARSGDKDAQKLVDLCKKLLPHLDEGKPVRSFGLDAEERAMLKPLFLLTAKPAMYVGNVAEDGFENNPHLERLKELAAKENAPVVAVCAAMESEIAELEDDEKAEFLAEMGLEEPGLNRLIRAGYDLLGLQTYFTAGVKEVRAWTIHKGDTAPQAAGVIHTDFERGFIRAQVISYDDFVSLGGEAKAKEAGKMRVEGKEYVVQDGDVMHFLFNV

SEQ ID NO: 1654 - protein, 178 aa, Neisseria meningitidis
MRENKIIFTGPVGVGKTTAIAAISDEALVQTDASASDMTLDRKRNTTVAMDYGAISLDEDTKVHLYGTPGQERFNFMWEILSQGSMGLVLLLDNARTNPLKDLEFFLHSFRGLLEKAPVVVGITKMDIRSQPGIDVYHKYLAKHNLNVPVFEIDARKEDDVKQLVSAMLFSIDPGLEV

SEQ ID NO: 1655 - protein, 405 aa, Neisseria meningitidis
VGGTPVDAQTGGAVGQNAVENNLYLTSEALKKDKQTARKIYSVIKEQVKHECSSTGRITECRQNIGRIIEFTQDKRFDSRFKDLKKESLYYLNKHPDLVASYLKAEYEKLDREDKSILHRYISPGAEIVSGSLGVVLSGVAGGGSCAETFGLGCAAALVGVTSSYDHVITGTKNFGKKASEQRPTIAVQALKQLGLSEQAAEYVQFSIDLFSVGKSGGGIPKAKPVFDAKPRWEVDRKLNKLTTREQVEKNVQETRRRSQSSQFKAHAQREWENKTGLDFNHFIGGDINKKGTVTGGHSLTRGDVRVIQQTSAPDKHGVYQATVEIKKPDGSWEMKKGRGGKPMTNHSMFPKDWDEARIRAEVTSAWEKRKELEGQKWRGTSKSGVEIEGFTEPNRTAYPLYNSK

SEQ ID NO: 1656 - protein, 469 aa, Neisseria meningitidis
MKYISTRGETAHKPFSEVLLMGLAPDGGLMLPEHYPQIGRETLDKWRGLAYPELAFEIMRLFVTDIPEDDLRDILNRTYTEAAFGTKEITPVRTLSDGIKIQALSNGPTLAFKDMAMQFLGNAFEYVLNKEGKKLNILGATSGDTGSAAEYALRGKKGVNVFMLSPDGKMSAFQRAQMYSLQDENIHNIAVKGMFDDCQDIVKAVQNDAAFKEKYHIGTVNSINWGRIVAQVVYYFAGYFKATQSNDEQVSFCVPSGNFGNVCAGHIAKQMGLPIRRLIVATNENDVLDEFFKTGAYRPRNSAHTYVTSSPSMDISKASNFERFVFDLMDRDPQEINTLWAEVAAGKGFDLRFALEKVGGKYGFTSGKSTHPDRLATIRQVYEQDQELIDPHTADGVKVAREVREEGETVVCLETALAAKFDATIREAVGDAAIPRPAALEGLETLPQRVQTVPNSADAVKGIIEQTLA

SEQ ID NO: 1657 - protein, 108 aa, Neisseria meningitidis
MSEAKFMRIIVFFDLPVITAAKRKAANQFRQFLLKDGYQMLQLSVYSRIVKGRDSLQKHHNRLCANLPQEGSIRCLEITEKQYAAMKLLLGELKTQEKKVNSDQLLLF

SEQ ID NO: 1658 - protein, 417 aa, Neisseria meningitidis
VDKLKISANGPLNGEITVSGAKNAALPLMCAGLLTSGTLRLKNVPMLADVKTTQKLLQGMGARVLTDNISEFEINGGTVNNTCAPYELVRTMRASILVLGPTLARFGEAQVSLPGGCAIGSRPVDQHLKGLEAMGAEIVIEHGYVKAKGKLKGTRVAMDVVTVGGTENLLMAATLAEGTTVLENCAIEPEVVDLAECLVKMGAKISGIGTSTMVVEGAGELHGCEHSVVPDRIEAGTFLCAVAITGGRVVLRNAAPKTMEVVLDKLVEAGAVIEAGDDWIAIDMRQRPKAVDIRTVVHPGFPTDMQAQFMALNAVAEGSCRVVETIFENRFMHVPELNRMGANITTEGNTAFVQGVEQLSGAVVKATDLRASASLVIAGLAARGETVVEQIYHLDRGYENIEKKLGSVGAKIERVSG

SEQ ID NO: 1659 - protein, 320 aa, Neisseria meningitidis
MQARLLIPILFSVFILSACGTLTGIPSHGGGKRFAVEQELVAASARAAVKDMDLQALHGRKVALYIATMGDQGSGSLTGGRYSIDALIRGEYINSPAVRTDYTYPRYETTAETTSGGLTGLTTSLSTLNAPALSRTQSDGSGSKSSLGLNIGGMGDYRNETLTTNPRDTAFLSHLVQTVFFLRGIDVVSPANADTDVFINIDVFGTIRNRTEMHLYNAETLKAQTKLEYFAVDRTNKKLLIKPKTNAFEAAYKENYALWMGPYKVSKGIKPTEGLMVDFSDIRPYGNHTGNSAPSVEADNNHEGYGYSNEAVRQHRQGQP

SEQ ID NO: 1660 - protein, 414 aa, Neisseria meningitidis
MEQQQRYISVLDIGTSKVLALIGEVQDDDKINIVGLGQAPSRGLRAGMVTNIDATVQAIRQAVNDAELMADTKITHVTTGIAGNHIRSLNSQGVVKIKDGEVTQADIDRAIETAKAINIPPDQKILDAVVQDYIIDTQLGVREPIGMSGVRLDTRVHIITGASTAVQNVQKCIERCGLKSDQIMLQPLASGQAVLTEDEKDLGVCVIDIGGGTTDIAVYMNGAIRHTSVIPAGGNLITKDLSKSLRTPLDAAEYIKIHYGVASCDTEGLGEMIEVPGVGDRTSRQVSSKVLAAIISARIQEIFGVVLGELQKSGFPKEVLNAGIVLTGGVSMMTGIVEFAEKIFDLPVRTGAPQEMGGLSDRVRTPRFSTAIGLLHAACKLEGNLPQPENGAVQEREGGGGLLARLKRWIENSF

SEQ ID NO: 1661 - protein, 130 aa, Neisseria meningitidis
MSMHDPISDMLTRIRNAQRANKAAVAMPSSKLKCAIAKVLKEEGYIEDFAVSSDVKSILEIQLKYYAGRPVIEQIKRVSRPGLRIYKASSEIPSVMNGLGIAIVSTSKGVMTDRKARSQGVGGELLCIVA

SEQ ID NO: 1662 - protein, 338 aa, Neisseria meningitidis
VNLDEVKALSIWMTIKCCVAGIPYGGGKGGVTLDPRDYSEAELERIARAYSEAISPLIGEKIDIPAPDVNTNGKIMSWMVDAYENVVKHSAPGVFTGKPVEFGGSLARTEATGYGVNLAAVQALEKLGKDVKGATYAIQGFGNVGYHTGYYAHQSGAKVVAVSTVDVAIYNENGLDMEALFKEFQEKGFITNEAGYGKEITNAELLALDVDVLAPCALENQLTSENAGKVRAKIVVEGANGPTTPEADVILRQNGVLVVPDILANCGGVVVSYFEWVQNLQGYYWEFDEVQEKETVVLRRAFRDIWNLAQEYDVDLRTASYMMSIRRVEKAMKLRGWY

SEQ ID NO: 1663 - protein, 578 aa, Neisseria meningitidis
MTISGCQVIHANQGKVNTHSAVITGADAHTPEHATGLTEQKQVIASDFMVASANPLATQAGYDILKQGGSAADAMVAVQTTLSLVEPQSSGLGGGAFVLYWDNTAKTLTTFDGRETAPMRATPELFLDKDGQPLKFMEAVVGGRSVGTPAIPKLMETIHQRYGVLPWGKLFDTPIRLAKQGFEVSPRLAISVEQNQQHLARYPKTAAYFLPNGVPLQAGSLLKNLEFADSVQALAAQGAKALHTGKYAQNIVSVVQNAKDNPGQLSLQDLSDYQVVERPPVCVTYRIYEVCGMGAPSSGGIAVGQILGILNEFSPNQVGYDAEGLRLLGDASRLAFADRDVYLGDPDFVPVPIRQLISKDYLKHRSQLLEQSDKALPSVSAGDFIHEWVSSQAIELPSTSHISIVDKAGNVLSMTTSIENAFGSTLMANGYLLNNELTDFSFEPIKQGKQVANRVEPGKRPRSSMAPTIVFKAGKPYMAIGSPGGSRIIGYVAKTIVAHSDWNMDIQDAISAPNLLNRFGNYELETGTTALQWQQALNDLGYKTDVRELNSGVQAIIIEPSRLVGGADPRREGRVMGD

SEQ ID NO: 1664 - protein, 375 aa, Neisseria meningitidis
MNTRNMRYILLTGLLPTVSAFGETALQCAALTDNVTRLACYDRIFAAQLPSSAGQEGQESKAVLNLTETVRSSLDKGEAVIVVEKGGDALPADSAGETADIYTPLSLMYDLDKNDLRGLLGVREHNPMYLMPLWYNNSPNYAPGSPTRGTTVQEKFGQQKRAETKLQVSFKSKIAEDLFKTRADLWFGYTQRSDWQIYNQGRKSAPFRNTDYKPEIFLTQPVKADLPFGGRLRMLGAGFVHQSNGQSRPESRSWNRIYAMAGMEWGKLTVIPRVWVRAFDQSGDKNDNPDIADYMGYGDVKLQYRLNDRQNVYSVLRYNPKTGYGAIEAAYTFPIKGKLKGVVRGFHGYGESLIDYNHKQNGIGIGLMFNDLDGI

SEQ ID NO: 1665 - protein, 1787 aa, Neisseria meningitidis
LVRDDVDYQIFRDFAENKGKFFVGATDLSVKNKQGQNIGNALSNVPMIDFSVANVNRRTLTVIDPQYAVSVKHVKGDEISYYGHHNGHLDVSNDENEYRSVAQNDYEPNKNWHHGNQGRLEDYNMARLNKFVTEVAPIAPTSAGGGVETYKDKNRFSEFVRVGAGTQFEYNSRYNMTELSRAYRYAIAGTPYQDVNVTSNLNQEGLIGFGDNSKHHSPEKLKEVLSQNALTNYAVLGDSGSPLFAYDKQEKRWVFLGAYDYWAGYQKNSWQEWNIYKKEFADKIKQRDNAGTIKGYGEHHWKTTGTNSHIGSTAVRLANNERDANNGQNVTFEDNGTLVLDQNINQGAGGLFFKGDYTVKGANNDITWLGAGIDVADGKKVVWQVKNPNGDRLAKIGKGTLEINGTGVNQGQLKVGDGTVILNQQADADKKVQAFSQVGIVSGRGTLVLNSSNQINPDNLYFGFRGGRLDANGNDLTFEHIRNVDEGARIVNHNTGHASTITLTGKSLITDPKTISIHYIQNNDDDDDGYYYYRPRKPIPQGKDLYFKNYRYYALKSGGSVNAPMPENGQTENNDWVFMGYKQEEAQKNAMNHKNNQRISGFSGFFGEENGKGHNGALNLNFNGKSAQNRFLLTGGTNLNGKISVTQGNVLLSGRPTPHARDFVNKSSARKDAHFSKNNEVVFEDDWINRTFKATEIAVNQSASFSSGRNVSNITANITATDNAKVNLGYKNGDEVCVRSDYTGYVTCNTGNLSDKALNSFGATQINGNVNLNQNAALVLGKAALWGQIQGQGNSRVSLNQHSKWHLTGDSQVHNLSLADSHIHLNNASDAQSANKYHTLKINHLSGNGHFHYLTHLAKNLGDKVLVKESASGHYQLHVQDKTGEPNQEGLNLFDASSVQDRSRLSVSLANNHVDLGALRYTIKTENGITRLYNPYAENRRRVKPAPSPATNTASQAQKATQTDGAQIAKPQNIVVAPPSPQANQAEEAKRQQAKAEQVKRQQAEAERKSAELAKQKAEAEREARELATRQKAEQERSSAELARRHEKEREAAELSAKQKVEAEREAQALAVRRKAEAEEAKRQAAELARRHEKEREAAELSAKQRVGEEERRQTAQSQPQRRKRRAAPQDYMAASQDRPKRRGHRSVQQNNVEIAQAQAELARRQQEERKAAELLAKQRAEAEREAQALAARRKAEAEEAKRQAAELAHRQEAERKAAELSANQKAAAEAQALAARQQKALARQQEEARKAAELAVKQKAETERKTAELAKQRAAAEAAKRQQEARQTAELARRQEAERQAAELSAKQKAETDREAAESAKRKAEEEEHRQAAQSQPQRRKRRAAPQDYMAASQNRPKRRGRRSTLPAPPSPSFDSSAYAAPRALHNPDWYENDYEEIPLDALEDENVSESVDTSDKQPQDNTELHEKYENDYEEIPLDALEDEDVSESVDTSDKQPQDNTELHEKVETVSLQPRAAQPRAQAATQLQAQAAAQADAVSTNTNSALSDAMASTQSILLDTGASLTRHIAQKSRADAEKNSVWMSNTGYGRDYASAQYRRFSSKRTQTQIGIDRSLSENMQIGGVLTYSDSQHTFDQASGKNTFVQANLYGKYYLNDAWYVVGDIGAGSLRSRLQTQQKANFNRASIQTGLTLGNTLKINQFEIVPSAGIRYSRLSSADYKLGNDSVKVSSMSVKTLTAGLDFAYRFKVGNLTVKPLLSAAYFANYGKGGVNVGGNSFVYKADNQQQYSAGAALLYRNVTLNVNGSITKGKQLEKQKSGQIKIQIRF

SEQ ID NO: 1666 - protein, 463 aa, Neisseria meningitidis
MLLVMRAKQGKKTPKRKSQGVGNTQGQTPGSNDSDWVDQIGQSVSDGTQPDWSWNESAETASAAVSAQEVDPLTEYQVYKQFGYQGKAAESLAAYLDGIPDGEAKPENLIRELLDINLEVGDVDVLADNLQKYGKLIPSELLAKYIEQALQRDSNHLRIRVLAEEGLGWGTQEIEKRAEGGSATAASASPPPDAGGKAYEAEEIKRIPIVRGKKDVSGISQEEIGAIAGLVRADQGAKILKDKVSYETASKQYDRAIQTSEKPANLIIDALKLDYQYADIDRFAGHLWKLYQTLGNYGRQVKERMLGWGYSLGYHEVFDDLEKGPNDRQIKDIGMGHGYLPKNIQKFKSQHRDLVLQDSSLINTGSSPADDAVKEVESLLMYGQIEAAMDVLEQAVLKYPDESQLYITLIDIYERTEDWDRLGQFLRVLRERADRLPEEVVMLMSRLLQRMNQNIKKIKRYGK

SEQ ID NO: 1667 - protein, 94 aa, Neisseria meningitidis; identical to SEQ ID NO: 1124

SEQ ID NO: 1668 - protein, 144 aa, Neisseria meningitidis
MEKFNNIAQLKDSGLKVTGPRLKILDLFETHAEEHLSAEDVYRILLEEGVEIGVATIYRVLTQFEQAGILQRHHFETGKAVYELDKGDHHDHIVCVKCGEVTEFHNPEIEALQDKIAEENGYRIVDHALYMYGVCSDCQAKGKR

SEQ ID NO: 1669 - protein, 247 aa, Neisseria meningitidis
MPDAVKKVYLIHGWGANRHVFDDLMPRLPATWAVSAVDLPGHGDAPFVQPFDIEAAADAVAAQIDTPADILGWSLGGLVALYLAARHPDKVRSLCLTASFARLTAAEDYPEGLAAPALGKMVGAFRTDYAKHIKQFLQLQLLHTPDADGIIGRILPDLARCGTPSALQEALDAAERADARHLLDKIDVPVLLVFGGKDAITPPRMGEYLHRHLKGSRLVVMEKAAHAPFLSHAEAFAALYRDFVEGV

SEQ ID NO: 1670 - protein, 430 aa, Neisseria meningitidis
MAVFPLSAKHRKYALRALAVSIILVSAAYIASTERTERVRPQRVEQKLPPLSWGGSGVQTAYWVQEAVQPGDSLADVLARSGMARDEIARITEKYGGEADLRHLRADQSVHVLVGGDGGAREVQFFTDEDGERNLVALEKKGGIWRRSASEADMKVLPTLRSVVVKTSARGSLARAEVPVEIRESLSGIFAGRFSLDGLKEGDAVRLMYDSLYFHGQQVAAGDILAAEVVKGGTRHQAFYYRSDKEGGGGGNYYDEDGRVLQEKGGFNIEPLVYTRISSPFGYRMHPILHTWRLHTGIDYAAPQGTPVRASADGVITFKGRKGGYGNAVMIRHANGVETLYAHLSAFSQAQGNVRGGEVIGFVGSTGRSTGPHLHYEARINGQPVNPVSVALPTPELTQADKAAFAAQKQKADALLARLRGIPVTVSQSD

SEQ ID NO: 1671 - protein, 394 aa, Neisseria meningitidis
MSLHSDILVVGAGPAGLSFAAELAGSGLKVTLIERSPLTVLQNPPYDGREIALTHFSREIMQRLGMWDKIPENEIYPLRDAKVLNGRSDYQLHFPQPTEARGEPADCLGYLISNHNIRRAAYEVVSQLDNITILTDTVVKEVKTSDNEAQVILENGKILTARLLLAADSRFSQTRRQLGISSDMHDYSRTMFVCRMKHTLSNQHTAYECFHYGRTIALLPLEEHLTNTVITVDTDKINSVQNLSPEELAASVKEQLKGRLGDMELVSSIHHYPLVGMIAKRFYGKRSALIGDAAVGMHPVTAHGFNLGLSSADILAKLILEAEQRGQDIGAASLLEKYSSKHMLHAQPLYHGTNMMLKLFTNETAPAKLLRGLVLRAGNNFPPLKKLITKQLTG

SEQ ID NO: 1672 - protein, 1201 aa, Neisseria meningitidis
MFHFAFPAQTALRQAITDAYRRNEIEAVQDMLQRAQMSDEERNAASELARRLVTQVRAGRTKAGGVDALMHEFSLSSEEGIALMCLAEALLRIPDNATRDRLIADKISDGNWKSHLNNSPSLFVNAAAWGLLITGKLTATNDRQMSSALSRLISKGGAPLIRQGVNYAMRLLGKQFVTGQTIEEALQNGKEREKMGYRFSFDMLGEAAYTQADADRYYRDYVEAIHAIGKDAAGQGVYEGNGISVKLSAIHPRYSRAQHGRVMGELLPRLKELFLLGKKYDIGINIDAEEANRLELSLDLMEALVSDPDLAGYKGIGFVVQAYQKRCPFVIDYLIDLARRNNQKLMIRLVKGAYWDSEIKWAQVDGLNGYPTYTRKVHTDISYLACARKLLSAQDAVFPQFATHNAYTLGAIYQMGKGKDFEHQCLHGMGETLYDQVVGPQNLGRRVRVYAPVGTHETLLAYLVRRLLENGANSSFVNQIVDENISIDTLIRSPFDTIAEQGIHLHNALPLPRDLYGKCRLNSQGVDLSNENVLQQLQEQMNKAAAQDFHAASIVNGKARDVGEAQPIKNPADHDDIVGTVSFADAALAQEAVGAAVAAFPEWSATPAAERAACLRRFADLLEQHTPALMMLAVREAGKTLNNAIAEVREAVDFCRYYANEAEHTLPQDAKAVGAIVAISPWNFPLAIFTGEVVSALAAGNTVIAKPAEQTGLIAGYAVSLMHEAGILTSALQLVLGAGDVGAALTNDARIGGVIFTGSTEVARLINKALAKRGDNPVLIAETGGQNAMIVDSTALAEQVCADVLNSAFDSAGQRCSALRILCVQEDVADRMLDMIKGAMDELVVGKPIQLTTDVGPVIDAEAQQNLLNHINKMKGVAKSYHEVKTAADVDSEKSTFVRPILFELNNLNELQREVFGPVLHVVRYRADELDNVIDQINSKGYALTHGVHSRIEGTVRHIRSRIEAGNVYVNRNIVGAVVGVQPFGGHGLSGTGPKAGGSFYLQKLTRAGEWVAPTLSQIGQADEAALKRLEALVHKLPFNAEEKKAAAAALGHARIRTLRRAETVLTGPTGERNSISWHAPKRVWIHGGSTVQAFAALTELAASGVQAVVEPDSPLASYTADLEGLLLVNGKPETVGISHVAALSPLDSARKQELAAHDGALIRVLPSENGLDILQVFEEISCSVNTTAAGGNASLMAVAD

SEQ ID NO: 1673 - protein, 207 aa, Neisseria meningitidis
MMKPHNLFQFLAVCSLTVAVASAQAGAVDALKQFNNDADGISGSFTQTVQSKKKTQTAHGTFKILRPGLFKWEYTSPYKQTIVGDGQTVWLYDVDLAQVTKSSQDQAIGGSPAAILSNKTALESSYTLKEDGSSNGIDYVLATPKRNNAGYQYIRIGFKGGNLAAMQLKDSFGNQTSISFGGLNTNPQLSRGAFKFTPPKGVDVLSN

SEQ ID NO: 1674 - protein, 261 aa, Neisseria meningitidis
MSRIRQAFAALDGGKALIPYITVGDPDIRTTLALMHGMVANGADILELGVPFSDPMADGPVIQRAAERALANGISLRDVLDVVRKFRETDTQTPVVLMGYLNPVHKMGYREFAQEAAKAGVDGVLTVDSPVETIDPLYRELKDNGVDCIFLIAPTTTEDRIKTIAELAGGFVYYVSLKGVTGAASLDTDEVSRKIEYLHQYIDIPIGVGFGISNAESARKIGRVADAVIVGSRIVKEIENNAGNEAAAVGALVKELKDAVR

SEQ ID NO: 1675 - protein, 100 aa, Neisseria meningitidis
MTAQHQSDTLLHRLNTLPPKRYGVFLLNDDYTTMEFVVEILTEIFMLGQEQAVAVMLLVHHEGKGLCGTYTRDIAQTKQQQVMQRAKAEGHPLQCIVEEI

SEQ ID NO: 1676 - protein, 222 aa, Neisseria meningitidis
MTVWFVAAVAVLIIELLTGTVYLLVVSAALAGSGIAYGLTGSTPAAVLTAALLSALGIWFVHAKTAVGKVETDSYQDLDAGQYAEILRHVGGNRYEVFIAVRTGRRKIRGKKSLNRERAPSLSARKATFLLSHTLNTRRNYGIFHYLVGSRRRFRFQILCCHPTTGSPRCRKARAFPSRPDGRFEYFDSLYRPRRLPPFAERNPFRRTQPSLHHARQYAADC

SEQ ID NO: 1677 - protein, 77 aa, Neisseria meningitidis
MEATVYLEDNEYIALCDLLKLAGLAESGGQAKALIAEGLVSRNGETETRKTAKIRGGEVIEFDGARLEIADGYDPEA

SEQ ID NO: 1678 - protein, 124 aa, Neisseria meningitidis
MKLLTTAILSSAIALSSMAAAAGTDNPTVAKKTVSYVCQQGKKVKVTYGFNKQGLTTYASAVINGKRVQMPVNLDKSDNVETFYGKEGGYVLGTGVMDGKSYRKQPIMITAPDNQIVFKDCSPR

SEQ ID NO: 1679 - protein, 99 aa, Neisseria meningitidis
MKKMFVLFCMLFSCAFSLAAVNINAASQQELEALPGIGPAKAKAIAEYRAQNGAFKSVDDLTKVKGIGPAVLAKLKDQASVGAPAPKGPAKPVLPADKK

SEQ ID NO: 1680 - protein, 99 aa, Neisseria meningitidis; identical to SEQ ID NO: 1679

SEQ ID NO: 1681 - protein, 216 aa, Neisseria meningitidis
MIRFEQVSKTYPGGFEALKNVSFQINKGEMIFIAGHSGSGKSTVLKLISGITKPSRGKILFNGQDLGTLSDNQIGFMRQHIGIVFQDHKILYDRNVLQNVILPLRIIGYPPRKAEERARIAIEKVGLKGRELDDPVTLSGGEQQRLCIARAVVHQPSLLIADEPSANLDRAYALDIMELFKTFHEAGTTVIVAAHDETLMADYGHRILRLSKGRLA

SEQ ID NO: 1682 - protein, 82 aa, Neisseria meningitidis
MLTSEQVKAMIEGVAKCEHIEVEGDGHHFFAVIVSSEFEGKARLARHRLIKDGLKAQLESNELHALSISVAATPAEWNAKAQ

SEQ ID NO: 1683 - protein, 685 aa, Neisseria meningitidis
MTRKILVTSALPYANGSIHLGHMVEHIQTDVWVRFQKLRGNECHYCCADDTHGTPVMLAAQKQGIAPEDMIAKVREEHLADFTGFFIGYDNYYSTHSPENKQFSQDIYRALKANGKIESRVIEQLFDPEKQMFLPDRFVKGECPKCHAQDQYGDNCEVCGTTYSPTELINPYSAVSGAKPELRESEHFFFKLGECADFLKAWTSGNNPHDGKPHLQAEALNKMKEWLGEGEETTLSDWDISRDAPYFGFEIPDAPGKYFYVWLDAPVGYMASFKNLCDRIGVDFDEYFKAGSQTEMYHFIGKDILYFHALFWPAMLHFSGHRAPTGVYAHGFLTVDGQKMSKSRGTFITAKSYLEQGLNPEWMRYYIAAKLNSKIEDIDLNLQDFISRVNSDLVGKYVNIAARASGFIAKRFEGRLKDVADSALLAKLAAESDTIAEQYENREYARALRDIMALADAVNEYVDANKPWELAKQEGQDERLHEVCSELINAFTMLTAYLAPVLPQTAANAAKFLNLEAITWANTRETLGKHAINKYKHLMQRVEQKQVDDLIEANKQSIAAAAAPAAEESKYEKVAEQASFDDFMKIDMRVAKVLNCEAVEGSTKLLKFDLDFGFEQRIIFSGIAASYLNPAELNGRMVIAVANFAPRKMAKFGVSEGMILSAATADGKLKLLDVDAGAQPGDKVG

SEQ ID NO: 1684 - protein, 175 aa, Neisseria meningitidis
MEMKQMLLAVGVAAVLAGCGKDAGGYEGYWREKSDKKEGMIAVKKEKGNYFLNKINVFTGKEESMLLSEKDGELSINTGIGEIPIKLSDDGKELYVERRQYVKTDAAMKDKIIAHQKKCGQTEQAYRDARNALPSNQTYQQRQAAIEQLKRRFEAEFDELEKEIKCNGRPRALLF

SEQ ID NO: 1685 - protein, 716 aa, Neisseria meningitidis
MKALPIKSLLITSLPVFASVFTAASIVWQLGEPKLAMPFVLGIIAGGLVDLDNRLTGRLKNIIATVALFTLSSLTAQSTLGTGLPFILAMTLMTFGFTILGAVGLKYRTFAFGALAVATYTTLTYTPETYWLTNPFMILCGTVLYSTAIILFQIILPHRPVQESVANAYDALGGYLEAKADFFDPDEAAWIGNRHIDLAMSNTGVITAFNQCRSALFYRLRGKHRHPRTAKMLRYYFAAQDIHERISSAHVDYQEMSEKFKNTDIIFRIHRLLEMQGQACRNTAQALRASKDYVYSKRLGRAIEGCRQSLRLLSDSNDNPDIRHLRRLLDNLGSVDQQFRQLRHSDSPAENDRMGDTRIAALETGSLKNTWQAIRPQLNLESGVFRHAVRLSLVVAAACTIVEALNLNLGYWILLTALFVCQPNYTATKSRVRQRIAGTVLGVIVGSLVPYFTPSVETKLWIVIASTTLFFMTRTYKYSFSTFFITIQALTSLSLAGLDVYAAMPVRIIDTIIGASLAWAAVSYLWPDWKYLTLERTAALAVCSNGAYLEKITERLKSGETGDDVEYRATRRRAHEHTAALSSTLSDMSSEPAKFADSLQPGFTLLKTGYALTGYISALGAYRSEMHEECSPDFTAQFHLAAEHTAHIFQHLPETEPDDFQTALDTLRGELDTLRTHSSGTQSHILLQQLQLIARQLEPYYRAYRQIPHRQPQNAA

SEQ ID NO: 1686 - protein, 135 aa, Neisseria meningitidis
MEIRAIKYTAMAALLAFTVAGCRLAGWYECSSLSGWCKPRKPAAIDFWDIGGESPPSLEDYEIPLSDGNRSVRANEYESAQQSYFYRKIGKFEACGLDWRTRDGKPLIETFKQEGFDCLKKQGLRRNGLSERVRW

SEQ ID NO: 1687 - protein, 263 aa, Neisseria meningitidis
MNVYFLGGGNMAAAIAGGLVKQGGYRIYIANRGAEKRERLEKELGVETSATLPELHSDDVLILAVKPQDMEAACKNIRTNGALVLSVAAGLSVDTLSRYLGGNRRIVRVMPNTPGKIGLGVSGMFAEAEVSETDRRIADRIMKSVGLTVWLEDEAQMHSITGISGSGPAYVFYLLDALQNAAIRQGFDMAEARALSLATFKGAVALAEQTGEDFEKLQKNVTSKGGTTHEAVEAFRRHRVAEAISEGVCACVRRSQEMERQYQ

SEQ ID NO: 1688 - protein, 288 aa, Neisseria meningitidis
MKGIILAGGSGTRLYPITRGVSKQLLPVYDKPMIYYPLSVLMLAGIRDILVITAPEDNASFKRLLGDGSDFGISISYAVQPSPDGLAQAFIIGEEFIGNDNVCLVLGDNIFYGQSFTQTLKQAAAQTHGATVFAYQVKNPERFGVVEFNENFRAVSIEEKPQRPKSDWAVTGLYFYDNRAVEFAKQIKPSARGELEITDLNRMYLEDGSLSVQILGRGFAWLDTGTHESLHEAASFVQTVQNIQNLHIACLEEIAWRNGWLSDEKLEELARPMAKNQYGQYLLRLLKK

SEQ ID NO: 1689 - protein, 173 aa, Neisseria meningitidis
MSCFSIKRMSAFRARITAFFTAFVFLTAALPAYAERLPDFLAKIQPSEIFPGADRYGKPEGKPMVARVYKGDEQLGLVYITTDAVNTRGYSSKPIDTLMALANDGTIAGAKLVDHHEPIMLIGIPHLPAPGRAIRLNWLPAYIKPNFISTNRLRLKGLPTVPQPSKGTGAAAP

SEQ ID NO: 1690 - protein, 377 aa, Neisseria meningitidis
MKRILCITGTRADFGKLKPLLAYIENHPDLELHLIVTGMHMMKTYGRTCKEVTRENYQHTYLFSNQIQGEPMGAVLGNTITFISRLSDEIEPDMVMIHGDRLEALAGATVGALSSRLVCHIEGGELSGTVDDSIRHSISKLSHIHLVANEQAVTRLVQMGEKRKHIHIIGSPDLDVMASSTLPSLEEVKEYYGLPYENYGISMFHPVTTEAHLMPQYAAQYFKALELSGQNIISIYPNNDTGTESILQELLKYQSDKFIAFPSIRFEYFLVLLKHAKFMVGNSSAGIREAPLYGVPSIDVGTRQSNRHMGKSIIHTDYETKNIFDAIQQACSLGKFEADDTFNGGDTRTSTERFAEVINNPETWNVSAQKRFIDLNL

SEQ ID NO: 1691 - protein, 265 aa, Neisseria meningitidis
MKALHKTSFWESLAIQRRVIGALLMREIITRYGRNNIGFLWLFVEPLLMTFVIVLMWKFLKADRYSTLNIVAFAITGYPMLMMWRNASKRAVGSISSNASLLYHRNVRVLDTILARMILEIAGATIAQIVIMAVLIAIGWIEMPADMFYMLMAWLLMAFFAIGLGLVICSIAFNFEPFGKIWGTLTFVMMPLSGAFFFVHNLPPKVQEYALMIPMVHGTEMFRAGYFGSDVITYENPWYIVLCNLVLLLFGLAMVSKFSKGVEPQ

SEQ ID NO: 1692 - protein, 757 aa, Neisseria meningitidis
MNITQILSQELSATAAQITAAVELLDDGATVPFIARYRKEATGGLDDTQLRRLAERLQYLRELEERKAVVLKSIEEQGKLSDDLRAQIEAADNKTALEDLYLPYKPKRRTKAQIAREHGLQPLADVLLAEQSQDVEAAAQGYLNENVPDAKAALDGARAILMEQFAEDAELIGTLRDKLWNEAEIHAQVVEGKETEGEKFSDYFDHREPVRTMPSHRALAVLRGRNEGVLNIALKYQPDDTPITRQSEYEQIIACRFKVSDGHKWLRDTVRLTWRAKIFLSLELEALGRLKEAADTDAITVFARNLKDLLLVAPAGRLTTLGLDPGYRNGVKCAVVDDTGKLLDTVIVYLHQENNMLATLSRLIKQHGVKLIAIGNGTASRETDKIAGELVRGMPEMGLHKIVVSEAGASIYSASELAAREFPDLDVSLRGAVSIARRLQDPLAELVKIDPKSIGVGQYQHDVNQNQLAKSLDAVVEDCVNAVGVDVNTASAPLLARISGLNQTLAQNIVAYRDENGAFDSRKKLLKVPRLGEKTFEQAAGFLRINGGKEPLDASAVHPEAYPVVAKMLAQQGISAAELIGNRERVKQIKASDFTDERFGLPTILDILSELEKPGRDPRGEFQTASFAEGIHEISDLQVGMILEGVVSNVANFGAFVDIGVHQDGLVHISALSNKFVQDPREVVKAGDVVKVKVLEVDAARKRIALTMRLDDEPGGAKHKMPSENRSRERTAGRKPQRNDRAPANSAMADAFAKLKR

SEQ ID NO: 1693 - protein, 205 aa, Neisseria meningitidis
MPYTEDMRPGDTANPYGASKAMVERMLTDIQKADPRWSVILLRYFNPIGAHESGLIGEQPNGIPNNLLPYICQVASGRLPQLSVFGGDYPTPDGTGMRDYIHVMDLAEGHVAAMQAKSNVAGTHLLNLGSGRASSVLEIIRAFEAASGLTIPYEVKPRRAGDLACFYADPSYTKAQIGWQTQRDLAQMMEDSWRWVSNNPNGYDD

SEQ ID NO: 1694 - protein, 464 aa, Neisseria meningitidis
MTPSALKKTVLLLGTAFAAASVHASGYHFGTQSVNAQSTANAAAAEAADASTIFYNPAGLTKLDSSQISVNANIVLPSIHYEADSATDFTGLPVQGSKSGKITKTTVAPHIYGAYKVNDNLTVGLGVYVPFGSATEYEKDSVLRHNINKLGLTSIAVEPVAAWKLNDRHSFGAGIIAQHTSAELRKYADWGIMEKAKALKETPPNPTKAAQIKADGHADVKGSDWGFGYQLAWMWDINDRARVGVNYRSKVSHTLKGDAEWAADDAAAKAMWSTMLAANGYTANEKARVKIVTPESLSVHGMYKVSDKADLFGDVTWTRHSRFDKAELVFEKEKTIGMGKKSDRTTITPNWRNTYKVGLGGSYQISEPLQLRAGIAFDKSPVRNADYRMNSLPDGNRIWFSAGMKYHIGKNHVVDAAYTHIHINDTTYRTAKASGNDVDSKGASSARFKNHADIIGLQYTYKFK

SEQ ID NO: 1695 - protein, 468 aa, Neisseria meningitidis
MTAAPDILYRQAAALLEQSNTAQALPLLQQAAEQGYAEAAFVLGNHLLQNGQPEQALSWLEAAAAQRHPKALFSLLQQREHNGTPTGQLLNDYAWLGEQGHSEAQLILMRYHAQRNDPQSLYWAELAAARYAAPAYYHLARHHQRQGDVETAIEQYEKAAALGVTAACWQLGQIYFYGTGVSPNHAQAEHYLEPAAQAGHIAAQTLLADLLAAQRKPEALEWYRRAANKEQAEAQAKLAQYALTGELSERDPFQAARYAKAAAEKNHPEALKIMGDLYRYGLGIKADNHIAHDYYHRAAALGSAAAAQKLISDAALYHPQQYEQIKTAALQQQQTETIYRLAETQAHAIGRPADYNAARKNYMEAAEFHHKNAAAALGRIYHYGLGTAQDPRAAAHWYAIAAEQNHPSAQYHLACFYYHGQGVGCHVPTACYWLQAAISNGHTSAESLISLLEQWRREAHHAIGQKAV

SEQ ID NO: 1696 - protein, 183 aa, Neisseria meningitidis
MKVLNGWSDRKMWRVLSALPIGVVFFDLIYGFVLNVLQGLDLQRAVPDSEGVLAVTPDIAFNSLQIVANGGMAAVVCFGLAVVFLLNRSVRRRQVLEIGVFRMLGLVAVLAFSAPSVWEWANALPLLLKGADVVNTGNARYVLTALCMPFPAVSCVIGLVGRFRLQTASGRAAKSGGAGKADG

SEQ ID NO: 1697 - protein, 152 aa, Neisseria meningitidis
METPKLSVEAIEKGTVIDHIPAGRGLTILRQFKLLHYGNAVTVGFNLPSKTQGSKDIIKIKGVCLDDKAADRLALFAPEAVVNTIDNFKVVQKRHLNLPDEIAEVFRCPNTNCAGHGEPVKSRFYVKKHNGQTRLKCHYCEKTYSRDSVAEA

SEQ ID NO: 1698 - protein, 221 aa, Neisseria meningitidis
MMMHASVQSRFAPILYVLIFFAGFLTAQIWFNQKAYTEELPPLLSALSAVALVWLAWAFVSARSKAKAEKFYREKMIQNESIHPVLHASLQHLEHKPQMLALLVKNHGKGMAEQVRFKAEVLPDDEDARTIAAELAKMDMFALGTDAVASGETYGRVFADIFELSAALEGRAFKGMLKLTAEYKNIFGDACSSETALELGALNQALQEISKTSEKSKRIFY

SEQ ID NO: 1699 - protein, 425 aa, Neisseria meningitidis
MRSSDILIVDDEIGIRDLLSEILQDEGYSVALAENAEEARKLRHQARPAMVLLDIWMPDCDGITLLKEWAKNGQLNMPVVMMSGHASIDTAVEATKIGALDFLEKPISLQKLLSTVENALKYGAAQTETGPVFDKLGNSAAIQEMNREVGAAVKRASPVLLTGEAGSPFETVARYFHKNGTPWVSPARVEYLIDMPMELLQKAEGGVLYVGDIAQYSRNIQAGIAFIVGKAERCRVRVVASGSRAAGSDGIACEEKLAELLSESVVRIPPLRMQHEDIPFLIQGIACNVAESQKIAPAAFSEDALAVLTRYDWPGNFDQLQSVVATLLLEADGQEIGAAAVSSLLGQNVPAEGAEDMVGGFNFNLPLRELREEVERRYFEYHIAQEGQNMSKVAQKVGLERTHLYRKLKQLGIGVSRRAGEKTEE

SEQ ID NO: 1700 - protein, 768 aa, Neisseria meningitidis
MAKNLLIVESPSKAKTLKKYLGGDFEILASYGHVRDLVPKSGAVDPDNGFAMKYQLISRNGKHVDAIVAGAKEAENIYLATDPDREGEAISWHLLEILKSKRGLKNIKPQRVVFHEITKNAVLDAVAHPREIEMDLVDAQQARRALDYLVGFNLSPLLWKKIRRGLSAGRVQSPALRLICERENEIRAFEAQEYWTVHLDSHKGRSKFTAKLAQYNGAKLEQFDLPNEAAQADVLKELEGKEAVVTAIEKKKRSRNPAAPFTTSTMQQDAVRKLGFTTDRTMRTAQQLYEGIDVGQGAIGLITYMRTDSVNLADEALTEIRHYIENKIGKEYLPSAAKQYKTKSKNAQEAHEAIRPTSVYRTPESVKPFLSADQFKLYQMIWQRTVACQMTPAKFDQTTVDITVGKGVFRVTGQVQTFAGFLSVYEESSDDEEGEDSKKLPEMSEGDKLPVDKLYGEQHFTTPPPRYNEATLVKALEEYGIGRPSTYASIISTLKDREYVTLEQKRFMPTDTGDIVNKFLTEHFAQYVDYHFTAKLEDQLDEIAGGKRQWIPLMDKFWKPFIKQVEEKEGIERAKFTTQELDETCPKCGEHKLQIKFGKMGRFVACAGYPECSYTRNVNETAEEAAERIAKAEAEQAELDGRECPKCGGRLVYKYSRTGSKFIGCANYPKCKHVEPLEKPKDTGVQCPQCKKGNLVERKSRYGKLFYSCSTYPDCNYATWNPPVAEECPNCHWPVLTIKTTKRWGVEKVCPQKECGWKEQIEPPAPKE

SEQ ID NO: 1701 - protein, 105 aa, Neisseria meningitidis
MAEKLAMSAGGYAKIERGETQLNIPRLEQLAQIFKIDMWDLLKSGGGGMVLQINEGDSGGDIALYASGDVSMKIEFLKMELKHCKEMLEQKDKEIELLRKLTETV

SEQ ID NO: 1702 - protein, 189 aa, Neisseria meningitidis
MAAGKHTKHSNRVRIIGGQCRGRKLSFTSADGLRPTPDSVREKLFNWLGQDLTGKTVLDLFGGSGALGIEAASRNAKRVLISDNTRQTVQTLQKNSRELGLGQVQIVFSDGIAYLKTVSEQFDVVFLDPPFAWQDWQILFDALKPCLNPRAFVYLEAGTLPNIPDWLTEYREGKSGQSTFELRVFQVAE

SEQ ID NO: 1703 - protein, 178 aa, Neisseria meningitidis
MSKKWYVVQAYSGFEKNVQRILEERIAREEMGDYFGQILVPVEKVVDIRNGRKTISERKSYPGYVLVEMEMTDDSWHLVKSTPRVSGFIGGRANRPMPISQREAEIILQQVQTGIEKPKPKVEFEVGQQVRVNEGPFADFNGVVEEVNYERNKLRVSVQIFGRETPVELEFSQVEKIN

SEQ ID NO: 1704 - protein, 166 aa, Neisseria meningitidis
LSLNIETKKVAVEEISAAIANAQTLVVAEYRGISVSSMTELRANARKEGVYLRVLKNTLARRAVQGTSFAELADQMVGPLVYAASEDAVAAAKVLHQFAKKDDKIVVKAGSYNGEVMNAAQVAELASIPSREELLSKLLFVMQAPVSGFARGLAALAEKKAGEEAA

SEQ ID NO: 1705 - protein, 1392 aa, Neisseria meningitidis
MNYSFTEKKRIRKSFAKRENVLEVPFLLATQIDSYAKFLQLENAFDKRTDDGLQAAFNSIFPIVSHNGYARLEFVHYTLGEPLFDIPECQLRGITYAAPLRARIRLVILDKEASKPTVKEVRENEVYMGEIPLMTPSGSFVINGTERVIVSQLHRSPGVFFEHDKGKTHSSGKLLFSARIIPYRGSWLDFEFDPKDLLYFRIDRRRKMPVTILLKALGYNNEQILDIFYDKETFYLSSNGVQTDLVAGRLKGETAKVDILDKEGNVLVAKGKRITAKNIRDITNAGLTRLDVEPESLLGKALAADLIDSETGEVLASANDEITEELLAKFDINGVKEITTLYINELDQGAYISNTLRTDETAGRQAARVAIYRMMRPGEPPTEEAVEQLFNRLFFSEDSYDLSRVGRMKFNTRTYEQKLSEAQQNSWYGRLLNETFAGAADKGGYVLSVEDIVASIATLVELRNGHGEVDDIDHLGNRRVRSVGELTENQFRSGLARVERAVKERLNQAESENLMPHDLINAKPVSAAIKEFFGSSQLSQFMDQTNPLSEVTHKRRVSALGPGGLTRERAGFEVRDVHPTHYGRVCPIETPEGPNIGLINSLSVYARTNDYGFLETPYRRVIDGKVTEEIDYLSAIEEGRYVIAQANADLDSDGNLIGDLVTCREKGETIMATPDRVQYMDVATGQVVSVAASLIPFLEHDDANRALMGANMQRQAVPCLRPEKPMVGTGIERSVAVDSATAIVARRGGVVEYVDANRVVIRVHDDEATAGEVGVDIYNLVKFTRSNQSTNINQRPAVKAGDVLQRGDLVADGASTDLGELALGQNMTIAFMPWNGYNYEDSILISEKVAADDRYTSIHIEELNVVARDTKLGAEDITRDIPNLSERMQNRLDESGIVYIGAEVEAGDVLVGKVTPKGETQLTPEEKLLRAIFGEKASDVKDTSLRMPTGMSGTVIDVQVFTREGIQRDKRAQSIIDSELKRYRLDLNDQLRIFDNDAFDRIERMIVGQKANGGPMKLAKGSEITTEYLAGLPSRHDWFDIRLTDEDLAKQLELIKVSLQQKREEADELYEIKKKKLTQGDELQPGVQKMVKVFIAIKRRLQAGDKMAGRHGNKGVVSRILPVEDMPYMADGRPVDIVLNPLGVPSRMNIGQILEVHLGWAAKGIGERIDRMLKEQRKAGELREFLNKLYNGSGKKEDLDALTDEEIIELASNLRKGASFASPVFDGAKESEIREMLNLAYPSDDPEVEKLGFNDSKTQITLYDGRSGEAFDRKVTVGVMHYLKLHHLVDEKMHARSTGPYSLVTQQPLGGKAQFGGQRFGEMEVWALEAYGAAYTLQEMLTVKSDDVNGRTKMYENIVKGEHKIDAGMPESFNVLVKEIRSLGLDIDLERY

SEQ ID NO: 1706 - protein, 106 aa, Neisseria meningitidis
MGMNQQRLTQVILAPIVSEKSNVLAEKRNQMTFKVLASATKPEIKAAVELLFGVQVASVTTVTTKGKTKRFGRTLGRRRDVKKAYVSLAAGQELDLEAAAAAADKE

SEQ ID NO: 1707 - protein, 237 aa, Neisseria meningitidis
MMVYIMNAFDIKSTKMDVLSISLHTSDLFDLEDVLVKLGKKFQESGVVPFVLDVQEFDYPESLDLAALVSLFSRHGMQILGLKHSNERWAAAAMKYHLLFCLSHSENVKELGQVEVQNTEDGQKARKTVLITSPVRTGQQVYAEDGDLIVTGAVSQGAELIADGNIHIYAPMRGRALAGAKGDTSARIFIHSMQAELVSVAGIYRNFEQDLPNHLHKQPVQILLQDNRLVISAIGSE

SEQ ID NO: 1708 - protein, 306 aa, Neisseria meningitidis
MTLTELRYIVAVAQERHFGRAARRCFVSQPTLSIAIKKLEEELAVSLFDRSSNDIITTEAGERIVAQARKVLEEAELIRHLANEEQNELEGAFKLGLIFTVAPYLLPKLIVSLRRTAPKMPLMLEENYTHTLTESLKRGDVDAIIVAEPFQEPGIVTEPLYDEPFFVIVPKGHSFEELDAVSPRMLGEEQVLLLTEGNCMRDQVLSSCSELAAKQRIQGLTNTLQGSSINTIRHMVASGLAISVLPATALTENDHMLFSIIPFEGTPPSRRVVLAYRRNFVRPKALSAMKAAIMQSQLHGVSFIRD

SEQ ID NO: 1709 - protein, 269 aa, Neisseria meningitidis
MPDFSMSNLAVAFSITLAAGLFTVLGSGLVMFSKTPNPRVLSFGLAFAGGAMVYVSLTEIFSKSSEAFAEIYDKDHAFAAATMAFLAGMGGIALIDRLVPNPHETLDAQDPSFQESKRRHIARVGMMAAFAITAHNFPEGLATFFATLENPAVGMPLALAIAIHNIPEGISIAAPVYFATRSRKKTVWACLLSGLAEPLGAALGYLVLQPFLSPAVFGSVFGVIAGVMVFLALDELLPAAKRYSDGHETVYGLTMGMAVIAVSLVLFHF

SEQ ID NO: 1710 - protein, 446 aa, Neisseria meningitidis
LHTLLAFIFAILILVSLHEFGHYIVARLCGVKVVRFSVGFGKPFFTRKRGDTEWCLAPIPLGGYVKMVDTREGEVSEADLPYAFDKQHPAKRIAIVAAGPLTNLALAVLLYGLSFSFGVTELRPYVGTVEPDTIAARAGFQSGDKIQSVNGTPVADWGSAQTEIVLNLEAGKVAVGVQTASGAQTVRTIDAASTPEAGKIAKNQGYIGLMPFKITTVAGGVEKGSPAEKAGLKPGDRLTAADGKPITSWQEWANLTRQSPGRKIALTYERAGQTHTADIRPDTVEQSDHTLIGRVGLRPQPDRAWDAQIRRSYRPSVVRAFGMGWEKTVSHSWTTLKFFGKLISGNASVSHISGPLTIADIAGQSAELGLQSYLEFLALVSISLGVLNLLPVPVLDGGHLVFYTAEWIRGKPLGERVQNIGLRFGLALMMLMMAIAFFNDITRLLG

SEQ ID NO: 1711 - protein, 394 aa, Neisseria meningitidis
MTPQVLTILGSTGSIGESTLDVVSLHPEKFRVFALAGHKQVEKLAVQCRTFRPEYAVVADAEHAARLEALLKGDGTATQVLHGAQALVDVASADEVSGVMCAIVGAVGLPSALAAAQKGKTIYLANKETLVVSGALFMETARANGAAVLPVDSEHNAVFQVLPRDYAGRLNEHGIASIILTASGGPFLTADLNTFDSITPDQAVKHPNWRMGRKISVDSATMMNKGLELIEAHWLFNCPPDKLEVVIHPQSVIHSMVRYRDGSVLAQLGNPDMRTPIAYCLGLPERIDSGVGDLDFDALSALTFQKPDFDRFPCLKLAYEAMNAGGAAPCVLNAANEAAVAAFLDGQIKFTDIAKTVAHCLAQDFSDGIGDIGGLLAQDARTRAQARAFIGTLR

SEQ ID NO: 1712 - protein, 248 aa, Neisseria meningitidis
MKSSTQAVLEHTAIPKHIAVIMDGNGRWAKKRFLPRIMGHKRGLDALENMVKHCAKLGVQYLTVFAFSTENWRRPEDEVSFLMGLFLQALQKQVRRLHENNMRLKILGSRERFSRQILKGIEEAEALTANNTGLTLSIAADYGGRWDILQAANKLIAKGVSEITEDTLAKHLMLGDAPEPDLFIRTGGETRISNFLLWQMAYAELYFTDILWPDFDGKALDDAVASFQKRERRFGRTSEQLPIEQQRN

SEQ ID NO: 1713 - protein, 375 aa, Neisseria meningitidis
MNTSQRNRLVSRWLNSYERYRYRRLIHAVRLGGAVLFATASARLLHLQHGEWIGMTVFVVLGMLQFQGAIYSKAVERMLGTVIGLGAGLGVLWLNQHYFHGNLLFYLTVGTASALAGWAAVGKNGYVPMLAGLTMCMLIGDNGSEWFDSGLMRAMNVLIGAAIAIAAAKLLPLKSTLMWRFMLADNLTDCSKMIAEISNGRRMTRERLEENMAKMRQINARMVKSRSHLAATSGESRISPAMMEAMQHAHRKIVNTTELLLTTAAKLQSPKLNGSEIRLLDRHFTLLQTDLQQTVALINGRHARRIRIDTAINPELEALAEHLHYQWQGFLWLSTNMRQEISALVILLQRTRRKWLDAHERQHLRQSLLETREHG

SEQ ID NO: 1714 - protein, 185 aa, Neisseria meningitidis
MINDIQKTAEGKMQRSVEVLKENLAKVRTGRAHTGLLDQVEVEYWGSMVPVSQVANVTLLDARTIGVKPFEGNMAVKVEKAIRDSNLGLNPAAVGDLIRVPMPMLTEERRKDLIKVVRGEAEEGRVSIRNVRRDANDHIKKLLKDKEISEDEARRGEEAVQKLTDKYITEADKLLTAKEEDLMAI

SEQ ID NO: 1715 - protein, 628 aa, Neisseria meningitidis
MIYPKTYDVIVVGGGHAGTEAALAAARMGAQTLLLTHNIETLGQMSCNPSIGGIGKGHLVRELDALGGAMALATDKSGIQFRRLNASKGAAVRATRAQADRILYKAAIREMLENQENLDLFQQAVEDVTLDGDRISGVITAMGVEFKARAVVLTAGTFLSGKIHIGLENYEGGRAGDPAAKSLGGRLRELKLPQGRLKTGTPPRIDGRTIDFSQLTEQPGDTPVPVMSVRGNAEMHPRQVSCWITHTNTQTHDIIRSGFDRSPMFTGKIEGVGPRYCPSIEDKINRFADKDSHQIFLEPEGLTTHEYYPNGISTSLPFDIQIALVRSMKGLENAHILRPGYAIEYDYFDPRNLKASLETKTIQGLFFAGQINGTTGYEEAAAQGLLAGANAVQYVREQDPLLLRREQAYLGVLVDDLITKGVNEPYRMFTSRAEYRLQLREDNADMRLTEDGYKIGLVGEEQWRMFNEKREAIEREIQRLKTTWYTPQKLAEDEQIRVFGQKLSREANLHDLLRRPNLDYAALMTLEGAMPSENLSAEVIEQVEIQVKYQGYIDRQNEEIDSRRDIETLKLPDDIDYSKVKGLSAEVQQKLNQHKPETVGQASRISGVTPAAVALLMVHLKRGFKDAK

SEQ ID NO: 1716 - protein, 384 aa, Neisseria meningitidis
MVDKKSPLIAVSVGEASGDLLGAHLIRAIRKRCPQARFVGIGGELMKAEGFESLYDQERLAVRGFVEVVRRLPEILRIRRGLVRDLLSLKPDVFVGIDAPDFNLGVAEKLKRSGIPTVHYVSPSVWAWRRERVGKIVHQVNRVLCLFPMEPQLYLDAGGRAEFVGHPMAQLMPLEDDRETARQTLGVDAGIPVFALLPGSRVSEIDYMAPVFFQTALLLLERYPAACFLLPAATEATKRRLAEVLQRPEFAGLPLTVIDRQSETVCRAADAVLVTSGTATLEVALCKRPMVISYKISPLTYAYVKRKIKVPHVGLPNILLGKEAVPELLQSEAKPEKLAAALADWYEHPDKVAALQQDFRALHLLLKKDTADLAARAVLEEAGC

SEQ ID NO: 1717 - protein, 125 aa, Neisseria meningitidis
VNKTLILALSALLGLAACSVERVSLFPSYKLKIIQGNELEPRAVASLRPGMTKDQVLLLLGSPILRDAFHTDRWDYTFNTSRNGIIKDRSNLTVYFENGVLVRTEGNALQNAAEALRVKQNADKQ

SEQ ID NO: 1718 - protein, 658 aa, Neisseria meningitidis
MNEFSLAPIVVVLLVSVITVILCRKFNIPSMLGYLLVGFLAGPGMLSLIPKSHATDYLGEIGIVFLMFSIGLEFSLPKLRAMRRLVFGLGGLQVGVTMLSVMGILMLTGVPFNWAFAVSGALAMSSTAIVSRILSEKTELGQPHGQMAMGVLLMQDIAVVPLMILIPALAGGGDGNIWAALGLAFAKMLLTLGLLFFVGSKIMSRWFRMVAKRKSSELFMINVLLVTLGVAYLTELEGLSMALGAFVAGMLLSETEYRFQVEDDIRPFRDILLGFFFITVGMKLDIQALIGGWRQVLMLLAMLLVLKALVVFAIAFKMKHSVGDSLKTALYLAQGGEFGFVMLAIAGQLDMVSPEWEQAATAAVLLSMIIAPFLLGGSDALVGRLVKSSWDMKSLDLHSMLVETMSKSDHVLIVGFGRGGQTVGRVLAQEDIPYFALDLDIARVQVARSAGEPVSFGDAKRREVLEAAGLGRAKMVVVTLNNMHETQHVLDNVLSMYPNMPVYVRATNDDYVKTFTDIGAEEAVSDTKETGLVLAGYAMLGNGASYRHVYQTMANIRHSRYAALEGLFVGSDDEAGFGETGETVRHAFPLAAEAYAVGKTVGTLPMAAYGIKLLFVRRRTGRIENPDASFTLEGGDVLVVAGKKEEIISFENWSLQGI

SEQ ID NO: 1719 - protein, 461 aa, Neisseria meningitidis
MVSIFDIFKIGIGPSSSHTVGPMKAAAAFATGLDAQAVRIVIDIYGSLALTGYGHGTFDALMLGLEGSLPHDIPLAGIPERLERIRTQHILRLNGQEIRFIPDRDLNILGNQVLPKHPNGLRFTAYASDGTVLNEQVYYSVGGGFVVTEEDFDRQAETEKAVPYPYTSCAELLARCRLNRLDISEVVLANEAALAGCGEAEIRRRAAAVAEVMEGCIKRGLGADGELPGGLNVRRRAPQLAAKLKVLRETEIVNTQLWPMVYAMAVNEENAAGGRVVTAPTNGAAGIIPAVLHYFRKFNPHATQERVENFLLTAGAIGILYKTNASISGADVGCQGEVGVACSMAAGAYAEVIGGTPKQVENAAEMAMEHHLGLTCDPVGGLVQIPCIERNGIAAEKALKLGTLALLEDGTDKKVSLDEVIRTMLQTGRDMKATYKETSLAGLAATLRKKAVPVSVRVVEC

SEQ ID NO: 1720 - protein, 796 aa, Neisseria meningitidis
MTEQKHEEYGADSIQVLEGLEAVRKRPGMYIGDTQDGSGLHHMVFEVLDNAIDEALAGHCDKITVTIHADHSVSVADNGRGMPTGIHPKEGRSAAEVIMTVLHAGGKFDNNSYKISGGLHGVGVSVVNALSDWVTLTIYRDGKEHFVRFVRGETEEPLKVVGDSDKKGTTVRFLASTETFGNVEYSFDILAKRIRELSFLNNGVDIELTDERDGKHESFALSGGVAGFVQYMNRKKTPLHEKIFYAFGEKDGMSVECAMQWNDSYQESVQCFTNNIPQRDGGTHLTALRQVMTRTINNYIEANEVAKKAKVETAGDDMREGLTCVLSVKLPDPKFSSQTKDKLVSGEIGPVVNEVISQALTDFLEENPAEAKIITGKIVDAARAREAARKAREITRRKGVMDGLGLPGKLADCQEKDPALSELYLVEGDSAGGSAMQGRDRKFQAILPLKGKILNVEKARFEKMLASQEVAALITALGAGIGKEEFNAEKLRYHRIIIMTDADVDGAHIRTLLLTFFYRQMPELVERGYIYIAQPPLYKAKYGKQERYLKDELEKDQWLLGLALEKAKIISDGRTIEGAELADTAKQFLLAKTVIEQESRFVDELVLRAMLHASPIDLTSSENADKAVAELSGLLDEKEVALERIEGHEGHRFIKITRKLHGNVMVSYIEPKFLNSKAYQTLTQTAAALKGMVGEGAKLYKGENGYDADSFETALDILMSVAQKGMSIQRYKGLGEMNPEQLWETTMDPAVRRLLKVRIEDAIAADEVFVTLMGDEVEPRRAFIENNALIAQNIDA

SEQ ID NO: 1721 - protein, 188 aa, Neisseria meningitidis
MSLYALLLIALGMSMDAFAVALAKGAAVRMPPRKIAATALVFGSVEALTPLAGWVGGFYAKPFISEWDHWAAFVLLGGLGLKMMREGLSGKAEDVRESKRESLWMTVLTAFGTSIDSMIVGVGLAFMEVNIAFAAAIIGMATTVMVAVGLTAGRALGVLFGRRAEFAGGLVLIAIGTWTLLSHLGLIQ

SEQ ID NO: 1722 - protein, 157 aa, Neisseria meningitidis
MTDFSVWETAPFGATVDHILQRYHNVHRAQFEELVPLAQKVAQVHADTFPAEIAGLLADMQNELLMHMMKEERMLFPMINQGVGRGAAMPIGVMMHEHEEHDRAIARLKELTDNFQPPEGACGSWTRLYALAKEMVEDLNDHIHLENDILFARVLDS

SEQ ID NO: 1723 - protein, 42 aa, Neisseria meningitidis
MNEQELDLDNLDNLLEDFDGVTMEGGVDSENDDGCEGGACKI

SEQ ID NO: 1724 - protein, 735 aa, Neisseria meningitidis
MFPDQSAPNLLQGLNPEQLSAVTWPPQSALVLAGAGSGKTRVLTTRIAWLLQTGQASVHSIMAVTFTNKAAKEMQTRLGAMIPVNVRAMWLGTFHGLCHRFLRLHHRDAGLPSSFQILDSGDQLSLIKRLLKSLNIAEEIIAPRSLQGFINAQKESGLRASVLSAPDPHTSRMIECYAEYDKICQREGVVDFAELMLRSYEMLQSNEILRQHYQNRFNHILVDEFQDTNKLQYAWLKLMAGGNAAVFAVGDDDQSIYRFRGANVGNMTALMEEFHIDAPVKLEQNYRSVGNILAAANAVIENNDERLGKNLRTDAEAGDKIRYYSAFTDLEEARFIVDETKALEREGWDLDEIAVLYRSNAQSRVIEQSLFRSGIPYKIYGGLRFYERQEIKHALAYLRLAVNPDDDNALLRVINFPPRGIGARTVENLQTASNEQGITLWQAACNAGAKAAKIAAFVRLIEALRNQVGQLPLSEIIVGILKDSGLTEHYRTQKGDNQDRLDNLDELVNAAIEFKPEDSNFETLPENISDDPAFPILAFLSNAALESGENQAGAGEKAVQLMTVHAAKGLEFNAVFLTGMEEGRFPSEMSLAERGGLEEERRLMYVAITRARKRLYITMAQQRMLHGQTQFGIVSRFVEEIPPEVLHYLSVKKPAYDSYGNTRQTATFKDKIIDDYKQPQTYAGFRIGQNVRHAKFGTGVIIDAADKGESARLTINFGKQGVKELDTKFAKLEAM

SEQ ID NO: 1725 - protein, 206 aa, Neisseria meningitidis
MNSTASKTLKGLSLVFFASGFCALIYQVSWQRLLFSHIGIDLSSITVIISVFMVGLGVGAYFGGRIADRFPSSIIPLFCIAEVSIGLFGLVSRGLISGLGHLLVEADLPIIAAANFLLLLLPTFMMGATLPLLTCFFNRKIHNVGESIGTLYFFNTLGAALGSLAAAEFFYVFFTLSQTIALTACFNLLIAASVWLRYRKDGYSEH

SEQ ID NO: 1726 - protein, 483 aa, Neisseria meningitidis
MLSFLSGLLSLGIEVLWVRMFSFAAQSVPQAFSFTLACFLTGIAVGAYFGKRICRSRFVDIPFIGQCFLWAGIADFLILGAAWLLTGFSGFVHHAGIFITLSAVVRGLIFPLVHHVGTDGNKSGRQVSNVYFSNVAGSALGPVLIGFVILDFLSTQQIYLLICLISAAVPLFCTLFQKSLRLNAVSVAVSLMFGILMFLLPDSVFQNIADRPDRLIENKHGIVAVYHRDGDKVVYGANVYDGAYNTDVFNSVNGIERAYLLPSLKSGIRRIFVVGLSTGSWARVLSAIPEMQSMIVAEINPAYRSLIADEPQIAPLLQDKRVEIVLDDGRKWLRRHPDEKFDLILMNTTWYWRAYSTNLLSAEFLKQVQSHLTPDGIVMFNTTHSPHAFATAVHSIPYAYRYGHMVVGSATPVVFPNKELLKQRLSRLIWPESGRHVFDSSTVDAAAQKVVSRMLIQMTEPSAGAEVITDDNMIVEYKYGRGI

SEQ ID NO: 1727 - protein, 66 aa, Neisseria meningitidis
LNIKVTGGKEAPTAAQKAELIGGVTELLARVLGKNPETTVVVIDEVDTDNWGIGGKSVSERRKEGR

SEQ ID NO: 1728 - protein, 498 aa, Neisseria meningitidis
MFSNHLLSLAIWIPIAAGVLVLATGKDSRAPLARVLAFMGALAGFLVTLPLFTGFDRLSGGYQFTEFHEWIPLLKINYALGVDGISVLFIILNAFITLLVVLAGWEVIQKRPAQYMAAFLMMSGLINGAFAAQDAILFYVFFEGMLIPLYLIIGVWGGPRRVYASVKLFLYTLMGSLLMLVAMVYLYYQTGSFSIVDFQNIKQIPLGVQQLLFAAFFLSFAVKVPMFPVHTWLPDAHVEAPTGGSMVLAAITLKLGAYGFLRFILPIMPDAARYFAPVIIVLSLIAVIYIGMVALVQTDMKKLVAYSSISHMGFVTLGMFLFVDGQLDDWALKGAIIQMISHGFVSAAMFMCIGVMYDRLHTRNIADYGGVVNVMPKFAAFMMLFGMANAGLPATSGFVGEFMVIMGAVKVNFWVGALAAMTLIYGASYTLWMYKRVIFGAIHNPHVAEMKDINCREFAILAVLAVAVLGMGLYPNAFIEVVHQAANDLIAHVAQSKM

SEQ ID NO: 1729 - protein, 113 aa, Neisseria meningitidis
MMDKNQLEQEFHKAMLNIYQEALNLPQPYKATRFLQIVNEFGGKEAADKLLSTGEKKTQTGFTELILSGGGVHALKYSMEYLVLQKPWCDLFTEEQLAVARKRLERVGFVFPK

SEQ ID NO: 1730 - protein, 191 aa, Neisseria meningitidis
MPSENPIGKTMKSIDEQSLHNARRLFESGDIDRIEVGTTAGLQQIHRYLFGGLYDFAGQIREDNISKGGFRFANAMYLKEALVKIEQMPERTFEEIIAKYVEMNIAHPFLEGNGRSTRIWLDLVLKKNLKKVVNWQNVSKTLYLQAMERSPVNDLELRFLLKDNLTDDVDNREIIFKGIEQSYYYEGYEKG

SEQ ID NO: 1731 - protein, 99 aa, Neisseria meningitidis
MTASMYILLLLALIFANAPFLTTKLFGIVPLKRKHFGHHLIELAAGFALTAVLAYILESRAGAVHDQGWEFYATVVCLYLIFAFPCFVWRYFWHTRNRE

SEQ ID NO: 1732 - protein, 618 aa, Neisseria meningitidis
MLNKIFSWFESRIDPYPEAAPKTPEKGLWRFVWSSMAGVRKWIAALAALTAGIGIMEALVFQFMGKIVEWLGKYAPAELFAEKGWELAAMAAMMVFSVAWAFAASNVRLQTLQGVFPMRLRWNFHRLMLNQSLGFYQDEFAGRVSAKVMQTALALRDAVMTVADMVVYVSVYFITSGVILASLDSWLLLPFIGWIVGFASVMRLLIPKLGQTAAWQADARSLMTGRITDAYSNIATVKLFSHGAREAAYAKQSMEEFMVTVRAQMRLATLLHSCSFIVNTSLTLSTAALGIWLWHNGQVGVGAVATATAMALRVNGLSQYIMWESARLFENIGTVGDGMATLSKPHTILDKPNALPLKVSQGEIKFEHVDFSYEAGKPLLNGFNLTIRPGEKVGLIGRSGAGKSTIVNLLLRFYEPQSGTVSIDGQDISGVTQESLRAQIGLVTQDTSLLHRSVRDNIIYGRPDATDAEMVSAAERAEAAGFIPDLSDAKGRRGYDAHVGERGVKLSGGQRQRIAIARVMLKDAPILLLDEATSALDSEVEAAIQESLDKMMDGKTVIAIAHRLSTIAAMDRLVVLDKGRIIEEGTHAELLEKRGLYAKLWAHQSGGFLNEHVEWQHD

SEQ ID NO: 1733 - protein, 154 aa, Neisseria meningitidis
MFTIVLYQPEIPPNTGNIIRLCANTGADLHLVKPLGFPLDSAKMKRAGLDYHEFASLTVYENFDDCLKALAGRRIFALTTKGTARPDETAFQKGDVLLFGPETRGLPADILDSLPAAQKIRLPMQPGSRSMNLSNTVAVILFEAWRQHGYAGGV

SEQ ID NO: 1734 - protein, 241 aa, Neisseria meningitidis
MDFLSCWRRIADAPTIRRCVLCHGSSGVSDGICAGCRDDLAAYRTDAANSCPLCFMHVQGGAVCGGCQKKPPAFDRMWASLHYEPPVSNMIHALKHLADLSMVQPLADLMMQNPPDRLADECFDFVLPVPLSRERLLQRGFNQSESIVGLLAQRYGWRTLPLHTVFRRHRPPQSTLKGGERRRNIKNAFEIRTPPPKNCNILLIDDVFTTGATLDELAKTLKKSGANRICCWTLARTPMKK

SEQ ID NO: 1735 - protein, 98 aa, Neisseria meningitidis
MNKKLNYIFMLDCLGLVILFTCIIATFERDYGFKIFTNSKRPEFYYWIGMFYYGIISCWFDYQLISTKANSYKRKVKQYKIFSVIFSVLIFISTIVKL

SEQ ID NO: 1736 - protein, 141 aa, Neisseria meningitidis
MYWERGLHMYKASAVVPTGYVRVGNTAPLVGEDTQRYASFWGDGYDVYRQLRWQQIPEKQRKAFKKAAKSKKTVMFAGREYGISKQNLSDVWDDFEDAMELKAFPCLSSLFLTKWHKNLYDSGLTKTSTALSRLSSKRTIL

SEQ ID NO: 1737 - protein, 766 aa, Neisseria meningitidis
MHRPTAKQILHEVFGYPEFRGKQESIVNALAGGESLMVLMPTGGGKSLCYQIPALMREGVAVVVSPLIALMNDQVASLHVAGIEAAAVNSSTSADEAREIADKLAQGRLKLLYVAPERLVTDRFLRFLDQQTVSLFAIDEAHCVSQWGHDFRPEYQQLGILAERYPNVPRIALTATADAATRADIKHYLHLDNAPEFVSSFDRPNIYYQVIEKNNGKKQLLDFIRKEMTGQSGIVYCLSRKKVEDVAQFLRENGLNAIPYHAGLSMDVREENQRRFTHEDNIIVVATVAFGMGIDKPDVRFVAHLDMPQSVEHFYQESGRAGRDGLPAVSWLCYGLNDWVLLRERIAEGNSDEVQKQIEMQKLDAMLSVCETAACRRVLLLKHFGEASEPCGHCDNCLHPPVRFDGTVLVQKLLSCVYRAGQRFAAGYITNLLRGKSDDWIRGNRHEQLSTFGIGTELSDKEWRSVIRQCISLGYLTVNITRYQALQLTEAAKKVLKGETEVMLRPLKRDKPAARTLKDNWLRTEREERLWQALRVWRMKQAEAEVIPAYMIFGDKTLRDLVEKMPQDLNGLHDIYGLGEAKIDRFGHGILEVCRNTADFSHNAVIRPQTEREQQLRQKLEAWRYEQARAENCALHAVLSDESLADMLADTPETETDLEGVHGLGSVRAAKYGRDILAVCRPFSDGIDEAAKHKRRLMRALIQWCNETAKHEQSEPYRILSKAALRAIAAKQPEGLAELAAVYGVGEEKAARYGAAVLAVLERNAV

SEQ ID NO: 1738 - protein, 260 aa, Neisseria meningitidis
MTDILNKILATKAQEVAAQKAAVNAEHIRALAAEAAPVRSFIDLIRGKHRLNLPAVIAEIKKASPSKGLIRPDFRPAEIARAYENAGAACLSVLTDEPYFQGSPEYLKQAREAVSLPVLRKDFIIDEYQVYQARAWGADAVLLIAAALEQEQLERFEAVAHELGMTVLLELHDETELEKCRNLTTPLWGVNNRNLRTFEVSLDQTLSLLPALEGKTVVTESGITGKADVEFMRTRGVHTFLIGETFMRAADIEAEVGKLF

SEQ ID NO: 1739 - protein, 512 aa, Neisseria meningitidis
MNMLGALAKVGSLTMVSRVLGFVRDTVIARAFGAGMATDAFFVAFKLPNLLRRVFAEGAFAQAFVPILAEYKETRSKEATEAFIRHVAGMLSFVLVIVTALGILAAPWVIYVSAPGFAKDADKFQLSIDLLRITFPYILLISLSSFVGSVLNSYHKFSIPAFTPTFLNVSFIVFALFFVPYFDPPVTALAWAVFVGGILQLGFQLPWLAKLGFLKLPKLNFKDAAVNRVMKQMAPAILGVSVAQISLVINTIFASYLQSGSVSWMYYADRMMELPSGVLGAALGTILLPTLSKHSANQDTEQFSALLDWGLRLCMLLTLPAAVGLAVLSFPLVATLFMYREFTLFDAQMTQHALIAYSFGLIGLIMIKVLAPGFYARQNIKTPVKIAIFTLICTQLMNLAFIGPLKHVGLSLAIGLGACINAGLLFYLLRRHGIYQPGKGWAAFLAKMLLSLAVMGGGLYAAQIWLPFDWAHAGGMQKAARLFILIVIGGCLYFASLAALGFRPRHFKRVES

SEQ ID NO: 1740 - protein, 354 aa, Neisseria meningitidis
MMKIKALMIAAALLAAADVHAAPQKAKTASAKAAKAAKAAKAAKVAKVAKVAKVAKVAATAQKEAAPAQQQGGIRFSDGIAAVADNEVITRRRLAEAVAEAKANLPKDAQISESELSRQVLMQLVNQSLIVQAGKRRNIQASEAEIDAVVAKNPALKNLSPAQRRDFADNIIAEKVRQQAVMQNSRVSEAEIDAFLEQAQKQGITLPEGAPLRQYRAQHILIKADSENAAVGAESTIRKIYGEARSGTDFSSLARQYSQDASAGNGGDLGWFADGVMVPAFEEAVHALKPGQVGAPVRTQFGWHIIKLNEVRDAGTPQERIRNSVRQYIFQQKAEQATVNLLRDLHSGAYVDIR

SEQ ID NO: 1741 - protein, 162 aa, Neisseria meningitidis
MTPLFRKAVWLLFAVSVCAFAGSLAAQYVLGMEPCVLCISQRLCVLATALCTAIVLMCRPRRRAGGLFGAVFISIPAVTGISVAAYQLWLQSLPPGTAPSCGAPWTFRLKGWPLFDWFEPVVRGFGNCAEPDYLLGVALPVWSAAYFLAVVLTVWWAWARAK

SEQ ID NO: 1742 - protein, 210 aa, Neisseria meningitidis
MENTNRVPEQARYDAERRQADEALAGVFPAVSIFGSARTPQNHADYAFACRLARRLSDSGIAVISGGGPGIMEAANKGAFAGKSVSVGLNIVLPHEQKPNPYQDIALRFSRFAERKAVFFRYSQAYVVMPGGFGTLDELFEILTLVQTGKVPPRPIVLVGKAFWSGLAEWINAQLLARGLISEGAASLFAISDDEDEIVEYLSEHGLQTA

SEQ ID NO: 1743 - protein, 214 aa, Neisseria meningitidis
MVEFALSEPFPFEVGEIVEQQNSDIALSEISKYLSQEMLKEIVLTAHNNIQDKAALSDRNTLGMYRQAEITFALRVYLSKDGWTLEPWSGGAFLCLSPCRTKSIIVATATSDVGRHHGMPMTTARKGKGFEEAIRNSKLDLPDTVQFWVLLFHWKYNKVQLELSLPSGFVSHQITGYKQRIILADVDLTKFDELERKQPVEEYEPLVERKQKAG

SEQ ID NO: 1744 - protein, 82 aa, Neisseria meningitidis
MRSLLVRAMFGERMVGRFVLQSGKRSSENRVQTTFWFSWEGLWFKKTACVCTAHTLHTDSKFCVICRSGVPKDKDTVGQATY

SEQ ID NO: 1745 - protein, 473 aa, Neisseria meningitidis
MTTIYNTLTRQKEPFAPIDPENVRMYVCGMTVYDYCHLGHARVMVVFDMIARWLRECGYPLTYVRNITDIDDKIIARAAENGETIGELTARFIQAMHEDADALGVLRPDIEPKATENIPQMIAMIETLIQNGKAYPAANGDVYYAVREFAAYGQLSGKSLDDLRAGERVEVDGFKRDPLDFVLWKAAKAGEPAWESPWGNGRPGWHIECSAMSENLFGDTFDIHGGGADLQFPHHENEIAQSVGATGHTCGHHHAQTHHGQSIASHVKYWLHNGFIRVDGEKMSKSLGNFFTIREVLKQYDPEVVRFFILRAHYRSPLNYSDAHLDDAKGALTRLYTTLKNTPAAEFDLSENVNDYTRRFYAAMNDDFGTVEAVAVLFELAGEVNKTNDAQLAGCLKALGGIIGLLQRDPTEFLQGGAASDGLSNEEIEDLIARRKQARSDKNWAESDRIRDLLNEHKIILEDNAGGTTWRRG

SEQ ID NO: 1746 - protein, 323 aa, Neisseria meningitidis
MIAKHIDRFPLLKLDRVIDWQPIEQYLNRQKTRYLRDHRGRPAYPLLSMFKAVLLGQWHSLSDPELEHSLITRIDFNLFCRFDELSIPDYSTLCRYRNWLAQDDTLSELLKLINRQLTEKGLKIEKASAAVVDATIIQTAGSKQRQAIEVDEGQINGQTTPSKDSDARWIKKNGLYKLGYKQHTRTDAEGYIEKLHITPANAHECKHLSPLLEGLPKGTTVYADKGYDSAENRQHLKEHQLPDGIMRKACRNRPLTETQTKRNRYLSKTRYVVEQSFGTLHRKFRYARAAYFGLIKVSAQSHLKAMCLNLLKAANRLSAPAAV

SEQ ID NO: 1747 - protein, 482 aa, Neisseria meningitidis
MKGDIGVIGLAVMGQNLILNMNDCGFKVVAYNRTIGKVDEFLNGAAKGTGIIGAYSLQDLVDKLAKPRKIMMMVRAGSVVDDFIEQLLPLLEEGDIIIDGGNANYPDTTRRTHYLAEKGILFVGAGVSGGEEGARHGPSIMPGGDKRAWEAVKPIFQAIAAKTPQGEPCCDWVGKDGAGHFVKMVHNGIEYGDMQLICEAYQFMKDGLGLSYDEMYRVFAEWNKTELDSYLIEITAAILGYKDEGGEPLVEKILDTAGQKGTGKWTGINALDLGIPLTLISEAVFARCVSSFKEQRVQTGKLFARTVTPVEGGKQEWVEALRQALLASKIISYAQGFMLIREAGESYGWDLDYGNTALLWREGCIIRSAFLSNIRDAYENNPDLVFLGADPYFKNILENCLPAWRKVVAKAVECGIPMPCMASAITFLDGYTTERLPANLLQAQRDYFGAHTYERTDKPRGEFFHTNWTGKGGDTASTTYDI

SEQ ID NO: 1748 - protein, 441 aa, Neisseria meningitidis
MKKYLFRAALCGIAAAILAACQSKSIQTFPQPDTSVINGPDRPVGIPDPAGTTVGGGGAVYTVVPHLSLPHWAAQDFAKSLQSFRLGCANLKNRQGWQDVCAQAFQTPVHSFQAKQFFERYFTPWQVAGNGSLAGTVTGYYEPVLKGDDRRTAQARFPIYGIPDDFISVPLPAGLRSGKALVRIRQTGKNSGTIDNTGGTHTADLSQFPITARTTAIKGRFEGSRFLPYHTRNQINGGALDGKAPILGYAEDPVELFFMHIQGSGRLKTPSGKYIRIGYADKNEHPYVSIGKYMADKGYLKLGQTSMQGIKSYMRQNPQRLAEVLGQNPSYIFFRELTGSSNDGPVGALGTPLMGEYAGAVDRHYITLGAPLFVATAHPVTRKALNRLIMAQDTGSAIKGAVRVDYFWGYGDEAGELAGKQKTTGYVWQLLPNGMKPEYRP

SEQ ID NO: 1749 - protein, 492 aa, Neisseria meningitidis
MLQKIRKALFHPKKFFQDSQWFATPLFSSFAPKSNLFIISTFAQLNQAHSLTKMQKLKNNLLVILYTTQNMKMPKLIQKSVDKELFSVTYMFELPRKPGIVSPKKFLYIQRGYKKLLKTIQPAHLYVMSFAGHYSSLLSLAKKMNITTHLVEEGTATYAPLLESFTYKPTKFEQRFVGNNLHQKGYFDKFDILHVAFPEYAKKIFNANEYHRFFAHSGGISTSQSIAKIQDKYRISQNDYIFVSQRYPVSDEVYYKTIVETLNQMSLRIEGKIFIKLHPKEMENKNIMSLFLNMVTINPRLVVINEPPFLIDPLIYLTTPKGIIGLTSTSIVYTPLLSPTTQCLSIGQIVIDSIHHTAQQENTALIEEHLEIVKQFDFIKILSSIEDGIDTNSFKTEETLEMLLKSAEYAYKNKNFYQAIFYWQLASNNDLSVLGYKSLWYYNALNKVKQNYKMKYLEINYIERISLYFNDKDKMIWQNIKNDFFKYSLCNQ

SEQ ID NO: 1750 - protein, 467 aa, Neisseria meningitidis
MNNPDLPYRQALERLSQKQYNFTEVRRLLTEAASAGHPAAAFELAKHLMDADSPYQDREQGMEMLRIAAEQGHPYARYNLAYIQELEGAPPETLISLYRPLAEEGLPEAQVRLMYLLYASRHFEEALKWAKTSAKNNNPHGQYLLAQYCRYGTPPDFETAHLLYREAAAQGLAAAQWQLGLQYRFGQGTPTDTTQAINHLRAAAQQGYIPAYTPLAELILPTAPDKAVYRFQQAAQENDPDAHAALADIYLQGKHPERNYKLALHHAEAAAAERHPEGLRILGDICRYGLGMTSDKEKARHYYRQAAEAGSLTAYQKLISDSALNHPDQYGGIKDSAIRRQRAEQLYQKAQALHYGLQCAPEYAAALKLYTEAAELGHSKAQTNLGSMYYFGQGMTADYNEARKWFEKAAAKKDSMAFYNLACIHYSGHGVGPDKEKACRYLQEAINNGYGQKSVLQELLQQWQNAV

SEQ ID NO: 1751 - protein, 288 aa, Neisseria meningitidis; identical to SEQ ID NO: 1688

SEQ ID NO: 1752 - protein, 52 aa, Neisseria meningitidis
MKPPLPICTLSALAACTLSGQGGSRVYGEIKARDLCVTAPILLSAFCLACSR

SEQ ID NO: 1753 - protein, 275 aa, Neisseria meningitidis
MQNHVISLASAAERRAHIAATFGARGIPFQFFDALMPSERLEQAMAELVPGLSAHPYLSGVEKACFMSHAVLWKQALDEGLPYIAVFEDDVLLGESAEKFLAEDAWLQERFDPDSAFIVRLETMFMHVLTSPSGVADYCGRAFPLLESEHWGTAGYIISKKAMRFFLDRFAALPPEGLHPVDLMMFSDFFDREGVPVCQLNPALCAQELHYAKFHDQNSALGSLIEHDRLLNRKQQWRDSPANTFKRRLIRALTKISREREKRRQRREQFIVPFQ

SEQ ID NO: 1754 - protein, 280 aa, Neisseria meningitidis
MQNHVISLASAKERRAHIADTFGRHDIPFQFFDALMPSEELNRMMAELVPGLAKQHLLSEVEKACFMSHAVLWKQALDEGLPYVAVFEDDVLLGKDAEKFLAEDTWLEDRFDKDSAFIVRLETMFAKVIVRPDKVLNYENRSFPLLESEHWGTAGYIISREAMRFFLERFAVLPAEWIKAVDWMMFTYFFDKEGMPVYQVNPALCTQELHYAKFLSKNSMLGSDLEKDREQGRRHRRSLKVMFDLKRALGKFGREKKKRMERQRQAELEKAYGRRVISFK

SEQ ID NO: 1755 - protein, 96 aa, Neisseria meningitidis
LKVPAKRYFTLDELCGLLQISPYGFAQWQHDHGVVVGYGGERYTRLDVVKLLKLQSTFAPYAEGAESGSDGNRPVTLQEIGDGLKDLLADLDKELC

SEQ ID NO: 1756 - protein, 257 aa, Neisseria meningitidis
MNTIADVQSSRDLRNLPINQVGIKDLRFPITLQTAEGIQSTIARLTMTVYLPAEQKGTHMSRFVALMEQYSEALDFAQLHRLTAEMVALLDSRAGKISVSFPFFRKKTAPVSGIQSLLDYDVCLTGEMKDGAYGHSMKVMIPVTSLCPCSKEISQYGAHNQRSHVTVSLTADAEVGIEEVIDYVEAQASCQLYGLLKRPDEKYVTEKAYENPKFVEDMVRDVATSLIADKRIKSFVVESENFESIHNHSAYAYIAYP

SEQ ID NO: 1757 - protein, 385 aa, Neisseria meningitidis
MKFATKAIHSSYDCDEHNRALMPPIYQNSMFALHEIGENVPYRYSRLSNPTRQILEDTVADLEHGATGFAFSSGMAGIDAVWRTFLQQGDTIVAVADIYGGAYDLLVDVYQKWGVNVVFADLGNPDNLDELLKAHKVKLVWLETPSNPLLRLVDIKALAAKAKATGALVGIDNTFATPYLQQPLDMGCDFVFHSATKYLCGHSDVLMGIVVAKTKELAQPLHDMMVHTGAVAGPLDCWLVLRGIKTLALRMEAHCKNALEIARRLEDHPAIEKVFHPGLPSHEHYELAQAQMPKGIGGVVTVYLKNDTREAANSVIKNMKLVKMASSLGGVESLVNHCYSQSHSGVPHNVKMEMGIRVGLLRFSVGIEDVDDIWNDISAALDTTV

SEQ ID NO: 1758 - protein, 252 aa, Neisseria meningitidis
MKKVSVLIVAKNEANHIRECIESCRFDKEVIVIDDYSTDNTAEIAEGLGAKVFRRHLNGDFGAQKTFAIEQAGGEWVFLIDADERCTPELSDEISNIVQTGDYAAYFVERRNLFPNHPATHGAMRPDSVCRLIPKKDSSVQGKVHETVQTPYPKRRLKHFMYHYTYDNWEQYFNKFNKYTSISAEKYREQGKPVRFVRDIILRPIWGFFKIYILNKGFLDGKMGWIMSVNHSYYTMIKYVKLYYLYKSGGKF

SEQ ID NO: 1759 - protein, 371 aa, Neisseria meningitidis
MGLKKACLTVLCLIVFCFGIFYTFDRVNQGERNAVSLLKEKLFNEEGEPVNLIFCYTILQMKVAERIMAQHPGERFYVVLMSENRNEKYDYYFNQIKDKAEWAYFFHLPYGLNKSFNFIPTMAELKVKSMLLPKVKRIYLASLEKVSIAAFLSTYPDAEIKTFDDGTINLIQSSSYLGDEFSVNGTIKRNFARMMIGDWSIAKTRNASDEHYTIFKGLKNIMDDGRRKMTYLPLFDASELKAGDETGGTVRILLGSPDKEMKEISEKAAKDFNIQYVAPHPRQTYGLSGVTTLNSPYVIEDYILREIKKNPHTRYEIYTFFSGAALTMKDFPNVHVYALKPASLPEDYWPKPVYALFTQSGIPILTFDDKD

SEQ ID NO: 1760 - protein, 322 aa, Neisseria meningitidis
MKILLVRLSSMGDLIHTLPAIEDLARQCPDVELHWLCEAGFADIARLHPFVKKIHVMKWRQWRKHLFRAETWREMGHLKQTLRQEVFDFVLDSQGLIKSACFAKMAKSPICGLDKNSAREGWAALAYVKTYAVPKGKNAVWRNRELFAQVFGYVMPETQVFGLTVPEAGRLKNLAQPYYAALHATSRDSKLWPVENWRSLLQKLNEEQQCNIYLPWGNEDEKTRAKQIADGLPFAIVCDKINLLQAAYLLKYAVGIVGVDTGLLHLANALEKPVVGIYTDTDPIKTGVQVSPIAKNLGNIGQIPTADLVYQALMDCVAADKG

SEQ ID NO: 1761 - protein, 78 aa, Neisseria meningitidis
LRTKFFKNPTPTPSTAAPWSKRQTATKPLPISEPARASSPRTRQVEKRDTNPLPPDTAIPIKKPFTLKFQTASATVKP

SEQ ID NO: 1762 - protein, 160 aa, Neisseria meningitidis
MPQLTLDKTDIKILQVLQENGRLTNVELSERVALSPSPCLRRLKQLEDAGIVRQYAALLSPESVNLGLQAFIRVSIRKAKDAREDFAASVRKWPEVLSCFALTGETDYLLQAFFTDMNAFSHFVLDTLLSHHGVQDAQSSFVLKEIKHTTSLPLNHLLKE

SEQ ID NO: 1763 - protein, 228 aa, Neisseria meningitidis
MADLTFQQAVSNIIGMKGEIVRALGETFVMVGLSTTFAVVFGTLLGVLLFVTSSRQLHYNKPVNFLLDNLVNLMRAFPFVILMIAMIPATRAIVGSTIGPIAASLVLSVSGLFYFARLVEQNLREVPKGVIEAAAAMGAPPIAIVCKVLLNEARAGMVSSITVLAIGLLSYSAAAGMIGGGGLGDLAIRYGYYRYQTEVIVFIVALLVLLVILIQSTGNALARKLDKR

SEQ ID NO: 1764 - protein, 190 aa, Neisseria meningitidis
MMVRRLIIGISGASGFQYGVKALELLRAQDIETHLVVSKGAEMARASETDYARDEVYALADFVHPIGNIGACIASGTFKTDGMLVAPCSMRTLASVAHGFGDNLLTRAADVVLKERRRLVLMVRETPLNLAHLDNMKRVTEMGGVVFPPVPAMYRKPQTADDIVAHSVAHALSLFGIDTPDSAEWQGMAD

SEQ ID NO: 1765 - protein, 112 aa, Neisseria meningitidis
MNTRIIVSAAFVALALAGCGSINNVTVSDQKLQERAAFALGVSPNAVKISNRNNEGIRINFTATVGKRVSQCYVTSVISTIGVTTSDAICLGGGTHKGKSQCNALLKAAGRC

SEQ ID NO: 1766 - protein, 213 aa, Neisseria meningitidis
MRCFMIQNVVTSIILYSGTAVDLLIILMLFFAKRKSRKDIINIYLGQFLGSVSLILLSLLFAFVLDYIPSKEILGLLGLIPIFLGLKVLLLGDSDGEAIAKEGLRKDNKNLIFLVAMITFASCGADNIGVFVPYFTTLNSANLIVALLTFLVMIYLLVFSAQKLAQVPSVGETLEKYSRWFVAVVYLGLGVYILIENNSFDMLWTVSGQEKIL

SEQ ID NO: 1767 - protein, 145 aa, Neisseria meningitidis
MIGLLIITHETIGEAYRKLAHHFFPGGLPENVRILGVQPTEDQDDIINNAIAALQEFPDNDGVLIMTDIFGATPCNAARRLVRENKSAILTGLNAPMMVKAVQYSPAAEDLAAFTECVREAAVKGIFAITSAPEDLVCRRSGDAV

SEQ ID NO: 1768 - protein, 442 aa, Neisseria meningitidis
MNTTSQFTSNFWNIYIAVIVLLSFIALAWLLLSQNVVKRPKKGEEVQTTGHEWDGIAEYDNPLPRWWFWLCVLTWLFGIGYLVMYPGVGDYKGLLKWTSHNQYEKEVKKADEQYGKLYAKFADMPIEKVAKDPQAKQIAQNLFNTYCIQCHGSDAKGSKGFPNLTDSDWLWGGDPDKIHETIEKGRVATMPAWGPALGEEGVKDVAHYVMSLSKPEGQYDEERAARGQALFSGPPANCFTCHGDKGQGIQGLGPNLTDDVWLWGGTQKSIIETITNGRSSQMPAWGHFLDKDKLHIMTAYVWGLSDKDGKAPVKKAEPAPTPAPAAEPAASAPAEAAQAASEAKPAAAEPKAEEKAAPAAKADGKVYETVCAACHGNAVPGIPHVGIKADWADRIKKGKDTLHKHAIEGFNTMPAKGGRGDLSDDEVKAAVDYMVNQSGGKF

SEQ ID NO: 1769 - protein, 307 aa, Neisseria meningitidis
MNTGKPQKRAVNGVLLLDKPEGLSSNTALQKARRLFRAEKAGHTGVLDPLATGLLPVCFGEATKFSQYLLDADKAYTATLKLGEASSTGDAEGEIVATARADISLAEFQTACQALTGNIRQVPPMFSALKHEGKPLYEYARKGIVIERKARDITVYAIDIAEFDAPKAVISVRCSKGTYIRTLSEDIAKHIGTFAHLTALRRTETAGFTIAQSHTLEALANLDETGRDSLLLPCDVLVAHFPQTVLNDYAVHMLQCGQRPRFDEDLTSDTPVRVYTENGHFVGLAEYQKEICRLKALRLMNTAASAV

SEQ ID NO: 1770 - protein, 96 aa, Neisseria meningitidis
MNIQLQGHIVGVKKFNGQIEGRSFDYCRLIVATPLDSSQGNALGSSTTEYDFGGSANFEQFRNAQFPIEANLNVEIVTTGKTQKLKVIGFQPVKKG

SEQ ID NO: 1771 - protein, 96 aa, Neisseria meningitidis; identical to SEQ ID NO: 1770

SEQ ID NO: 1772 - protein, 104 aa, Neisseria meningitidis
MTKSELMVRLAEVFAAKNGTHLLAKDVEYSVKVLVDTMTRSLARGQRIEIRGFGSFDLNHRPARIGRNPKTGERVEVPEKHVPHFKPGKELRERVDLALKENAN

SEQ ID NO: 1773 - protein, 134 aa, Neisseria meningitidis
LESQMAKSFNQAASELTDIFPNISLTGFDGVNYPVTVNCPMHGNVRYSTFNALIKSKYGCPECAKMSKTQTPPNVGKPLLILDTTTNETLTFPSVTAAGAALGVHFQQINHRLKGRTSPDNLISNRYKVLGYDR

SEQ ID NO: 1774 - protein, 136 aa, Neisseria meningitidis
MALTFTQAVSKLTSKFPHLNLVEFNGVRYPTVIVCPIHGRVTCSTFKSMLDSKSGCPKCASYGVNSHKIPEDTIDKLSKNTVLEDTVTGETLTFPSRASAARSLGINPAAITDRIKGRVHTETLLAGRYKVHICTK

SEQ ID NO: 1775 - protein, 145 aa, Neisseria meningitidis
LKISIFWLYNAFILERSIMPKSLSLQDVQLRFSSKFPDKTVLKFTKNYEPVTIQCPLHGSVVYGNLQAAMKSSTGCPECTRNPEKPSPNAVAIRLEDTETGEIYEFASTLAASKFIGCSNSTLAVRLSGRTPFDRLIRYRYRLVK

SEQ ID NO: 1776 - protein, 105 aa, Neisseria meningitidis
LMCVLLHRRLSHAGDESVYFAQSPLAASEGRGARERGGQVLSHWLSPYYLSNYGCIMRLCLLFVKHYTVKMCKDLVRTYTLFFTFSSIGYQCVQRKFENFYILVV

SEQ ID NO: 1777 - protein, 408 aa, Neisseria meningitidis
MTFLQRLQGLADNKICAFAWFVVRRFDEERVPQAAASMTFTTLLALVPVLTVMVAVASIFPVFDRWSDSFVSFVNQTIVPQGADMVFDYINAFREQANRLTAIGSVMLVVTSLMLIRTIDNTFNRIWRVNSQRPWMMQFLVYWALLTFGPLSLGVGISFMVGSVQDAALASGAPQWSGALRTAATLTFMTLLLWGLYRFVPNRFVPARQAFVGALATAFCLETARSLFTWYMGNFDGYRSIYGAFAAVPFFLLWLNLLWTLVLGGAVLTSSLSYWQGEAFRRGFDSRGRFDDVLKILLLLDAAQKEGKALPVQEFRRHINMGYDELGELLEKLARHGYIYSGRQGWVLKTGADSIELNELFKLFVYRPLPVERDHVNQAVDAVMMPCLQTLNMTLAEFDAQAKKQQQS

SEQ ID NO: 1778 - protein, 156 aa, Neisseria meningitidis
MRIIQANAFRRHLNAMPSEHAAYADLTASSAKRLLCAKAILFSSAVRTGAAVGNIFFDGFADGGDFGDGAQYGFATFNAVDAASDSAGGIAGAAVLGIVEDEDFEGDLGSWADSVKMVRSSNGITVVPMPSETAAVQAFVPDGKIGYNIGHQCPTY

SEQ ID NO: 1779 - protein, 150 aa, Neisseria meningitidis
VFYGFEMRRALIAKIKIAQKELGLDDGTYRAVLERVTGKRSCADMDVSELESVVADMRSHGFKPKAKGNPHGKPHLRRTSSAAMLDKVEALLTVGGKHWNYAHAMARRMFGKDKVEYLDDTQLHKLVAALQIAENRKTEKAGGDDGVRKS

SEQ ID NO: 1780 - protein, 326 aa, Neisseria meningitidis
MAMAENGKYLDWAREVLHTEAEGLREIAADLDENFALAADALLHCKGRVVITGMGKSGHIGRKMAATMASTGTPAFFVHPAEAAHGDLGMIVDNDVVVAISNSGESDEIAAIIPALKRKNITLVCITARPDSTMARHADIHITASVSQEACPLGLAPTTSTTAVMALGDALAVVLLRARAFTPDDFALSHPAGSLGKRLLLRVADIMHKGGGLPAVRLGTPLKEAIVSMSEKGLGMLAVTDGQGRLKGVFTDGDLRRLFQECDNFTGLSIDEVMHTHPKTIAAERLATEALKVMQANHVNGLLVTDADGVLIGALNMHDLLAARIV

SEQ ID NO: 1781 - protein, 500 aa, Neisseria meningitidis
MSREMLQLAEALASEKNVDAEVVFQALEFALSTAAKKKADREHMDVRVQINRDTGEYQTFRRWLIVADEDYTYPDVEKTIEEIQEEIPGIAIQIGEYYEEQLPNEGFGRQAAQTAKQIILQRIRDAEREQNLNEFLAVKEDIVSGTVKRVERHGIIVEVVAGKLDALIPRDQMIPRENFRSGDRIRALFLRVEEIGNTGRKQVILSRTSGDFLVKLYANEVPEIADGMLEIRAVARDPGQRAKVAVKANDQRIDPQGTCIGVRGSRVNAVSNELSGERIDVVLWSPEPAQFVMSALSPAEVSRIVIDEDKHAVDVIVAEDQLALAIGRGGQNVRLASELTGWQLNIMTSAEADERNAAEDAAIRRLFMDHLNVDEETADVLVQEGFATLEEVAYVPAAELLAIEGFDEEIVDMLRNRARDAILTMAIAAEEKLGEVSDDMRNLEGIDADMLRSLAEAGITTRDDLAELAVDELIEITGVNEETAKAVILTAREHWFTEDK

SEQ ID NO: 1782 - protein, 511 aa, Neisseria meningitidis
VSDSKTKERATFGTRRAFMIAAIGSAVGLGNIWRFPYIAFENGGGAFILPYLVALLTAGIPLLLLDYAIGHRYRGSAPLAFRRLGRWFEPVGWWNVMTNIVICIYYAVIIGWAASYTYYSVNAAWGADPQGFFFKDFLQMAGPEALGLDFVGKVAGPLAGVWVFTAAIMALGVQKGVARASSFFMPLLLVMFLIMVGISLTLPGAAKGLDALFTPDWSKLADSKVWVAAYGQIFFSLSICFGIMVTYSSYLKKKTDLGGTGLVVGFANSSFELLAGIGVFAALGFMAQAGGKAVNEVASGGIGLAFIAFPTIINQAPMGWLIGILFFGSLVFAGVTSMISILEVIVAAIQDKLNIGRVNATLLVCISMGIVSTLLFGTATGLPVLDVMDKFVNTYGIVAAGFVYVAAIIISGRLPELRKHLNALSSIRIGGLWTVCVVVTVVMLGYMLFKDTSGLMEKNYEGYPDGFLSIFGWGMSAALVVFGLLLSLLPWKHGQDFNVKDEHEHEQGEEK

SEQ ID NO: 1783 - protein, 91 aa, Neisseria meningitidis
MQWSIETEGLGLNVISHKILGKDHAQVEFEAYFRDGQHRSAHHELSGFVNIGGQWYFIDPTVPHPAMKQPCICGSGKKFKACCGKYLKPVA

SEQ ID NO: 1784 - protein, 311 aa, Neisseria meningitidis
MNPKKLVIASRESLLAMWQAKHIQGRLKALYPDCEVEILGMTTRGDQILDKTLSKVGGKGLFVKELEQALYDGRADLAVHSIKDVPMDLPEGFALATIGERANPFDAFVSNQYTRLEEMPEGAVVGTSSLRREAQLRARYPHLLIKPLRGNVQTRLSKLDNGEYDAIILAAAGLQRLKLDGRIRMILSESDSLPAAGQGALGIEIAAHREDLYEVLKPLNHGVTNACVTAERALARALGGSCQVPLAAYCTEENGLLTLRGLVGHPDGSVVLRADAQAPAEYADALGRAVAKKLADDGAQELIGAVLNTEN

SEQ ID NO: 1785 - protein, 71 aa, Neisseria meningitidis
MKQGIHPNYHEVNVTCSCGNKFATKSAMEKENFNIEVCSLCHPFYTGTQKIVDTTGRVDKFNNKFGNLFKR

SEQ ID NO: 1786 - protein, 273 aa, Neisseria meningitidis
MTFDKWLGLSKLPKIEARMLLQYVSEYTRVQLLTRGGEEMPDEVRQRADRLAQCRLNGEPVAYILGVREFYGRRFTVNPSVLIPRPETEHLVEAVLARLPENGRVWDLGTGSGAVAVTVALERPDAFVRASDISPPALETARENAADLGARVEFAHGSWFDTDMPSEGKWDIIVSNPPYIENGDKHLLQGDLRFEPQIALTDFSDGLSCIRTLAQGAPDRLAEGGFLLLEHGFDQGAAVRGVLAENGFSGVETLPDLAGLDRVTLGKYMKHLK

SEQ ID NO: 1787 - protein, 303 aa, Neisseria meningitidis
MVHIMFNQAAQELTTIRDVLRFAVSRFNEAGLFFGHGTDNAHDEAAYLILHTLNLPLDMLAPYLDAKLLEAEKEEVLAVIERRAVEHIPAAYLTHQAWQGEFDFYVDERVIIPRSFIYELLGNGLRPWIEYDELVHNALDLCTGSGCLAIQMAHHYPDAHIDAVDVSLDALEVAGINVEDYGLEERIRLIHTDLFEGLEGTYDLIVSNPPYVDAESVELLPEEYLHEPKLALGSGADGLDATRQILLNAAKFLNPKGVLLVEIGHNRDVLEAAYPELPFTWLETSGGDGFVFLLTREQLLGEE

SEQ ID NO: 1788 - protein, 451 aa, Neisseria meningitidis
MSDFFHSDVLSVSELNAFAKSILENHLAGLWIAGEVSNLTRAASGHYYFSLKDSRAQVRCAMFKGAAMRLAKPLKEGDHIEVSGKISIYEARGEFQITVNEVRLKGLGQLYEAYERLKAQLQAEGAFAAERKKPLPPRPQCIGIVTSLAAAALRDVVTTLNRRAPEIPVIVYPTPVQGTGSELQIAQAIKTASQRAECDVLIVCRGGGSIEDLWAFNEEPVVRAIEACSIPVVSGVGHETDFTLADFVADVRAPTPTGAAELVSPNRQESLHRLAQAQGHLKTILEQRYFDASQKLDWLARQIRHPRQKLDDQRTYIHKLVQTLSYSMTQNLRAHTARFERQTQTLKHCRPDVSVYKHNIDRFQTALSHAFHQLLTHRRQSLTAQAALLEAVSPQHILERGFSVVKNTRGQVIRNADVLKQGQKLHIIFADGETDVRVSKEQGQQDLFDCI

SEQ ID NO: 1789 - protein, 1144 aa, Neisseria meningitidis
MTEPTYIPLRLHTEFSITDGMVRIKKLIAKAQEYGLPALGISDLMNEFGLVKFYKACRSAGIKPIGAADVWIGNPNAPDKPFRAMLIIRNDAGYLRLSELLTEAYVGKDRNIHHAELNPEWLENGDNSGLICLSGAHYGEVGVNLLNGNEDAARAAALKYAAWFPDAFYMELQRLPERPEWEACVSGSVKLAEELGLPVVATHPTQFMSRDDFNAHEARVCIAGGWVLTDKKRPRDFTPDQFFIPPETMLERFADLPEALENTVEIAKRCNLHITLGKNFLPLFPTPDGLSRDDYLIKLSNKGLQERMVQLYPDEAERAAKMPEYQERLDFELNIIIQMKFPGYFLIVQDFINWAKTHGCPVGPGRGSGAGSLVAYSLKITDLDPLKYALLFERFLNPERVSMPDFDVDFCQSNRGRVIEYVREKYGAKAVSQIVTFGTMSSKAVIRDVGRVLELPFMLCDKLSKLIPLEANKPLGLDDAMKAEPQIQELIEAEEADELITLAKKLEDLTRGLGMHAGGVLIAPGKISDYSPVYQADESASPVSMYDKGDVEDVGLVKFDFLGLRNLTIIEMAQNNIKNTTGDIIDVGKIPLDDQAAYQIFRDANTTAVFQFESTGMKKMLKTAHTTKFEELIAFVSLYRPGPMDNIPDFVARMKGQEFQYIHPLLEGILAPTYGIMVYQEQVMQAAQIIGGYSLGGADLLRRAMGKKKPEEMVKHREIFAEGAAKQGISREKSDEIFNYMEKFAGYGFNKSHAAAYALISYQTAWLKAHYPAEFMAATMSSELDNTDQLKHFYDDCRANGIEFLPPDINESDYRFTPYPDMKIRYALGAIKGTGEAAVESITSARQSGGKFTGLLDFCERVGKEHMNRRTLEALIRGGAFDSIEPNRAMLLANIDLAMNNADQKAANTNQGGLFDMMEDAIEPVRLVDAPMWSESEKLAEEKTVIGFYLSGHPFGPYAQEVRQIAPQKLSKLKPQDSVRLAGFVTAVRTMMGKRGKIAFVSLEDLSGQVEIMVGGQTLENCADCLKADQVLIIESKVSRDDYGGGDGLRILANQVMTLQTARERYARSLSLALAPHHDIGGLVQLLAAHQLPDTPRIPLQLSYANEKASGRLQVPPKWTVTPSSALFGELETLLGSRSVRVNW

SEQ ID NO: 1790 - protein, 302 aa, Neisseria meningitidis
MNTPQSAIIPDHAQAGIFIEADFAANRLNDIKAACRASLDALTALKARFPDDILGLTIAFGSKAWATFGHTDEGSEIKPFSEMGNGLAPSTQHDMSIHIQSFRQNAAYALAQSVLGAFGDSICVASEEHGLRLYQDRGLDGFVDGTENPQGDENVREVAIIPEGKPDAGGSYVLLQKYLHDLKKWDAVPVAEQEASVGRGKETDDEFGRDVRLPDSHLGRVNLKENGVGLKIVRRSLPFGKISGEHGLMFTAYCRTLHNIEAQLLSMFGDTDGKTDLLLRHLSAAVSGGYYYAPSVERLQNL

SEQ ID NO: 1791 - protein, 315 aa, Neisseria meningitidis
MEFFIILLVAVAVFGFKSFVVIPQQEVHVVERLGRFHRALTAGLNILIPFIDRVAYRHSLKEIPLDVPSQVCITRDNTQLTVDGIIYFQVTDPKLASYGSSNYIMAITQLAQTTLRSVIGRMELDKTFEERDEINSTVVAALDEAAGAWGVKVLRYEIKDLVPPQEILRSMQAQITAEREKRARIAESEGRKIEQINLASGQREAEIQQSEGEAQAAVNASNAEKIARINRAKGEAESLRLVAEANAEAIRQIAAALQTQGGADAVNLKIAEQYVAAFNNLAKESNTLIMPANVADIGSLISAGMKIIDSSKTAK

SEQ ID NO: 1792 - protein, 471 aa, Neisseria meningitidis
MNLHAKDKTQHPENVELLSAQKPITDFKGLLTTIISAVVCFGIYHILPYSPDANKGIALLIFVAALWFTEAVHITVTALMVPILAVVLGFPDMDIKKAMADFSNPIIYIFFGGFALATALHMQRLDRKIAVSLLRLSRGNMKVAVLMLFLVTAFLSMWISNTATAAMMLPLAMGMLSHLDQEKEHKTYVFLLLGIAYCASIGGLGTLVGSPPNLIAAKALNLDFVGWMKLGLPMMLLILPLMLLSLYVILKPNLNERVEIKAESIPWTLHRVIALLIFLATAAAWIFSSKIKIAFGISNPDTVIALSAGVAVVVFGVAQWKEVARNTDWGVLMLFGGGISLSTLLKTSGASEALGQQVAATFSGAPAFLVILIVAAFIIFLTEFTSNTASAALLVPIFSGIAMQMGLPEQVLVFVIGIGASCAFMLPVATPPNAIVFGTGLIKQREMMNVGILLNILCVVLVALWAYAVLM

SEQ ID NO: 1793 - protein, 107 aa, Neisseria meningitidis
MGDSVLSAIQQTITQRKSANPSESYVAQLLHKGEDKILKKVIEEAGEVLMASKDKNPSHLVYEVADLWFHTMILLTHHDLKAEDVLDELARRQGLSGLAEKAARTES

SEQ ID NO: 1794 - protein, 133 aa, Neisseria meningitidis
MNTTRLPTALVLGCLCAAASAADNSIMTKGQKVYESNCVACHGKKGEGRGTMFPPLYRSDFIMKKPQVLLHSMVKGINGTIKVNGKTYNGFMPATAISDADIAAVATYIMNAFDNGGGSVTEKDVKQAKSKKN

SEQ ID NO: 1795 - protein, 383 aa, Neisseria meningitidis
MNTHAFPVCWIFCKVIDNFGDIGVSWRLARVLHRELGWQVHLWTDDVSALRALCPDLPDVPCVHQDIDVRTWHSDAADIDTAPVPDAVIETFACDLPENVLHIIRRHKPLWLNWEYLSAEESNERLHLMPSPQEGVQKYFWFMGFSEKSGGLIRERDYRDAVRFDIEALRERLMLPEKNASEWLLFGYRSDVWAKWLEMWQQAGSPMTLLPAGAQIIDSLKQSGVIPQDALQNDGDVFQTASVRLVKIPFVPQQDFDKLLHLADCAVIRGEDSFVRTQFAGKPFFWHIYPQDENVHLDKLHAFWDKAHGFYTPETASAHRRLSDDLNGGEALSATQRLECWQILQQHQNGWRQGAKDWSRYLFGQPSASEKLAAFVSKHQKIR

SEQ ID NO: 1796 - protein, 407 aa, Neisseria meningitidis
VGRRKLWFALAAAGVIGGLVGIVLTELMHFIQHTAYGYGADGVYTSFREGVAQASSMRRVVVLTLCGAVAGVGWCLLKALGKPQIEIKAALKQPLQGLPFLTTVFHVLLQIITVGLGSPLGREVAPREMTAAFAFAGGRRLGLDEDEMRLLIACASGAGLAAVYNVPLASTLFILEAMLGVWTQQAVAAALLTSVIATAVARIGLGDVQQYHPANLAVNTSLLWFSAVIGPILGAAAVFFQRTAQKFPFIKRDNIKIIPLAVCMFVLIGAIAVWFPEILGNGKAGNQLTFSGLTGWQYALELAAVKWLVVLMALAAGAYGGLITPSMMLGSTISFAAAAAWNSVFPAMSSESAAVVGAAVFLGVSLKMPLTAIVFVLELTYAPLSLLLPLCIGMAGALGTSGKMGFK

SEQ ID NO: 1797 - protein, 380 aa, Neisseria meningitidis
MSIYLDFGISPKTFRQTYLYQKPKLFKGAVRNLEAASWKDINEIYQRADPTAPLFHLRKKGAIVPKEEYVESFDDLGKTRYRFIKSVIYEHMKNGASLLYNHIIVDITSTALPRLAGAHTIVSGYLAFGSDESYKNHWDIRDVYAIQLFGKKRWQLTAPDFPMPLYMQQTKDTDISIPEHIDMDIILEAGDVLYIPRGWWHRPIPLGCETFHLAVGTFPPNGYNYLEWLMKKFPTIESLRHSFSDWEQDRTRINDTAAQIAAMIANPVNYEAFSEDFLGKERTDTAFHLEQFANPNATPLSDDVRLRLNANNLDTLEKGYLIGNGMKISVDELGKKVLEHIGKNEPLLLKNLLVNFNQGKHEEVRKLIYQLIELDFLELL

SEQ ID NO: 1798 - protein, 93 aa, Neisseria meningitidis
MIHEEICAMPMGYETLIGDMGSALSGGQKQRIVLARALYCEPKILFLDEATSHLDIANEKAVNANLNGLSIIKIMAAHRKETVESADRKMSLG

SEQ ID NO: 1799 - protein, 75 aa, Neisseria meningitidis
METWVQNYTAIGGSLYLTAAAALLPIVFFFAALTVLKLKGYQAGLYTLLIALAVAVFGFGMPTGMAVSSLPPQPH

SEQ ID NO: 1800 - protein, 558 aa, Neisseria meningitidis
MLTYTPPDARPPAKTHEKPWLLLLMAFAWLWPGVFSHDLWNPAEPAVYTAVEALAGSPTPLVAHLFGHADFGIPPVYLWVAAAFKHLLSPWAADPYDAARFAGVFFAVVGLTSCGFAGFNFLGRHHGRSVVLILIGCIGLIPTVHFLNPAAAAFAAAGLVLHGYSLARRRVIAASFLLGTGWTLMSLAAAYPAAFALMLPLPVLMFFRPWQSRRLMLTAVASLAFALPLMTVYPLLLAKTQPALFAQWLDYHVFGTFGGVRHVQTAFSLFYYLKNLLWFALPALPLAVWTVCRTRLFSTDWGILGVVWMLAVLVLLAVNPQRFQDNLVWLLPPLALFGAAQLDSLRRGAAAFVNWFGIMAFGLFAVFLWTGFFAMNYGWPAKLAERAAYFSPYYVPDIDPIPMAVAVLFTPLWLWAITRKNIRGRQAVTNWAAGVTLTWALLMTLFLPWLDAAKSHAPVVRSMEASLSPELKRELSDGIECIGIGGGDLHTRIVWTQYGTLPHRVGDVQCRYRIVRLPQNVDAPQGWQTVWQGARPRNKDSKFALIRKIGENILKTTD

SEQ ID NO: 1801 - protein, 195 aa, Neisseria meningitidis
MNNMFAAKLSKLVYTASDHPDSLSEMEEFDRLILLIRKLYQILDGQHILSRVTVCLHHQNRRGLIALDKAAAGCDAAMLRAQRWRIYTQIAERLAGSGGGFTVTAESVSAACPELEGRYLELVRRTATSFGFVQVQEYPAGGQEETQAVPDAASDHSVRKPIKINIEAKVERYPAYRPTAALKVTRRRFFRLQNR

SEQ ID NO: 1802 - protein, 219 aa, Neisseria meningitidis
MGRHFGRRRFLTAAAVAAAGAAVSFLPNPFAADDEKRNGDEKRSENVFFWKGVALGSGAELRLFGVDDRRAADLVNKVLAEVARLEKMFSLYREDSLISRLNRDGYLTSPSADFLELLSLCRDIHALTDGAFDPTVQALWKLYADYFAARPDAETPPPQNSVKEALKRVGFGKVSFDDREIRFAEKGMGLSLNGIAQGYSGLTKTSTVLPRLSSKRTIL

SEQ ID NO: 1803 - protein, 292 aa, Neisseria meningitidis
MNYAKEINALNNSLSDLKGDINVSFEFFPPKNEQMETMLWDSIHRLQTLHPKFVSVTYGANSGERDRTHGIVKRIKQETGLEAAPHLTGIDASPDELRQIAKDYWDSGIRRIVALRGDEPPGYEKKPFYAEDLVKLLRSVADFDISVAAYPEVHPEAKSAQADLINLKRKIDAGANHVITQFFFDVERYLRFRDRCVMLGIDVEIVPGILPVTNFKQLGKMAQVTNVKIPSWLSQMYEGLDDDQGTRNLVAASIAIDMVKVLSREGVKDFHFYTLNRSELTYAICHILGVRP

SEQ ID NO: 1804 - protein, 287 aa, Neisseria meningitidis
MELNEFLDKAYAVLRRLDAVLPPEPGHTDWNALAFRWQSAGKKGFLEHLPDPHTFPLVRLAGVGRQTELLVRNTEQFIVGRPANNVLMSGARGTGKSSLVKALLHEYADKGLRLIEVDKSDLIGLPYLLTLLKERPEKFIVFCDDLSFESGDETYKALKTALDGGLSQRCANVLVYATSNRRHLMPEYFDENAGTTGMRGEIHQKEAVEEKISLSDRFGLWLSFYPFDQNDYLAAVQNWLEDFGVPYDETAQMAALQWAQTRGSRSGRSAWQFACDWAGRLPKQRAL

SEQ ID NO: 1805 - protein, 463 aa, Neisseria meningitidis
MFPDFSQTLSKDRHFLQSAFKNPNKYGGLSKVEEKYRKSHEIFLKRLAALPKPEFDNTLPVHEKLDEIKKTVAEHQVTIICGETGSGKTTQLPKICLELGRGAAGLIGHTQPRRLAARSVAERIAEELKSEIGSAVGYKVRFTDHTSRDACVKLMTDGILLAETQTDRYLAAYDTIIIDEAHERSLNIDFLLGYLKQLLPRRPDLKVIITSATIDAERFSQHFNGAPVLEVSGRTYPVEILYRPLIGKDEDDAEIELTDAIVDAADELARYGEGDILVFLPGEREIREAAEALRKSTLRRNDEILPLFARLSHAEQHKIFHPSGAKRRIVLATNVAETSLTVPGIKYVIDTGLARVKRYSARAKVEQLHIEKISQAAARQRSGRCGRVSAGVCIQLFSEENFNNRPEFTDPEIARSNLAAVILRMASLKLGDVAAFPFLEMPDSRYINDGFQVLLELGAVEAA

SEQ ID NO: 1806 - protein, 186 aa, Neisseria meningitidis
MNPLIHQAKESSMQTRILSAVLLAFSTAAFAGGAFTLQFDNPSEDGGFTQNQLLSAPYGFGCSGGNASPALSWKNPPAGTKSFVLTVYDKDAPTGLGWMHRVVADIPADVHRRNATSLQLSRCANIADDQSAAISAVISLRICRIRLTPSYTAKPMPSCCNHANTPQSATSAALCGTSSSVSTAAA

SEQ ID NO: 1807 - protein, 352 aa, Neisseria meningitidis
MSSRKIIHIDMDAFYASVELREQPHLKGRPVVVAWEGARSVICAASYEARQFGLHSAMSVATAKRLCPQAVYVPPHFDLYRQVSAQIHAVFRRYTDLIEPLSLDEAYLDVTRNFKNIPYASEVAKEIRAAIFAETGLTASAGIAPNKFLAKIASDWRKPNGQFVLPPHKVMAFLETLPLGKIPGVGKVTLKKMQSLGMRTAGDLRRFERGELLNHFGRYGYRLYDLVRGTDERPVKAERERLQISTEITLPEDLPLEQAAGHLPHLAEDLWRQITRKNVEAQSVTLKLKTYDFRIITRTLTYSSVLPDCAALLQAAQMLIARVPPQTEDAFRLIGIGVGHLVPKNQQQDLWA

SEQ ID NO: 1808 - protein, 590 aa, Neisseria meningitidis
MIPSDFIDELLAKTDIVDIIDEQVPLKKGGANYMACCPFHKEKTPSFSVSPTKQFYHCFSCGAHGSAIGFVMEHQGLSFPEAVQFLADRVGMIVPKVRGQNDNPEVRAERKKKQQTLEETTAAAADFYAQQLRFNPTAKAYLDKRGLSAEVIAHYGLGYAPDGWQPLAQVFQPYPNTALVDTGMVIDNEGRYYDRFRHRIMFPIRNPRGQVIGFGGRVLDDSKPKYLNSPDTPLFDKGKNLYGLYEGRAAVKEVGRILVVEGYMDVVALAQFGVGYGVAALGTATTAEHVKILMRQADSIYFCFDGDSAGRKAAWRALENALPQLKDDKSLHFLFLPEEHDPDSYIRAYGKAQFEDALLNQSKPLSEYFWEHLTDGIHLNTQEGKAELVKTSSPLLAQITAPALAYLLKQRLSELVGIDPDNLAQLLGQEAPKRHVKQKNYKLPPISVKQPVMPTLVQRQIRSLLINPDWAAYIDLPDYLALDGDFACLANLAETIKNHPSVPATAQVLEHMRGSPYEETINRIFRSALQSEEMEGGGEEDCENFQIGIKKLLNELKYSQIETLKQKSLQSGLNESEKKLLLSLLTAKQN

SEQ ID NO: 1809 - protein, 812 aa, Neisseria meningitidis
MTEKSHKKTAKGRAGSPSPTSARNKKADNGARGNKVSERLKAVKELQKTETKKARPEHVVNLIGDALWLMGLAATLYLAISLISFDMGDPSWSHSSPVVEDVANWGGLFGAYVADVGYYLFGWSFWWWIAAACVVLYKNFRLHAKQTENEAYNHKIAAAALFVLTVFSPVLEYFVLGGKYADSLPVGAGGMVGIRVGAVFAWLLGKSGSLLIILVVLLLSLSLLVQISWLEFLNGAGRAVQNRLSALSGKVMALGKRRPNTKTDGVDTQNTRRMVKEAKNITAKPVALPEGSSSNRKSVAVSVAPPPKIQVSLFEDDEPRQAGEYHKPTLNLLRIPDSEPVSINPAELERTAELIESKLAEFGIGVQVVSATSGPVITRYEIEPAQGVKGSQIVALSKDLARSMSLQSVRIVETIAGKNTMGIELPNDKRQDVMLSEILSSPVFAEAKSKLTVALGKDIAGTPVVGDLAKMPHLLVAGMTGSGKSVGVNGMIMSMLFKATPDEVRFIMIDPKMLELSIYDGIPHLLCPVVTDMREAGQALNWCVAEMEKRYRLLSHAGVRNLEGFNQKVEAAKAAGKPLLNPFSLNPDEPEPLEKLPLIVVVIDELADLMMTERKAVEQQIARLAQKARAAGIHMIVATQRPSVDVVTGLIKANIPTRMAFTVQSKIDSRTILDQMGADELLKYGDSLFLQPGSAEPTRLQGAFVSDDEVHQVVNYVKSQAPADYIEGLLSGEAALETANIVNPNADSDELFDQAVAYVLESKKTSISSLQRQLRIGYNRAANLMEALENAGVVSPADLNGSRKILAHKDHL

SEQ ID NO: 1810 - protein, 548 aa, Neisseria meningitidis
MKQSARIKNMDQTLKNTLGICALLAFCFGAAIASGYHLEYEYGYRYSAVGALASVVFLLLLARGFPRVSSVVLLIYVGTTALYLPVGWLYGAPSYQIVGSILESNPAEAREFVGNLPGSLYFVQALFFIFGLTVWKYCVSGGVFADVKNYKRRSKIWLTILLTLILSCAVMDKIASDKDLREPDAGLLLNIFDLYYDLASAPAQYAAKRAHILEAAKKASTWHIRHVAPKYKNYVVVIGESARSDYMNVYGFPLPDTPFLSQTKGLLINGYQSTAHATNLSLPQTLGLPGEPNNNIVSLAKQAGFRTAWLSNQGMLGHFANEISTYALRSDYPWFTQRGDYGKSAGLSDRLLLPAFKRVLIGNAGTKPRLIVMHLMGSHSDFCTRLDKDARRFQYQTEKISCYVSTIAQTDKFLEDTVKILNENKESWSLVYFSDHGLMHVGKGGERTLTHGAWKRQSYGVPLVKISSDDTRREMIKVRRSAFNFLRGFGSWTGIETDELPDDGYDFWGNVPDVQGEGNNLAFIDGLPDDPAPWYAGKGKSTKNTSKK

SEQ ID NO: 1811 - protein, 258 aa, Neisseria meningitidis
MNRPKQPFFRPEVAVARQTSLTGKVILTRPLSFSLWTTFASISALLIILFLIFGNYTRKTTVEGQILPASGVIRVYAPDTGTITAKFVEDGEKVKAGDKLFALSTSRFGAGGSVQQQLKTEAVLKKTLAEQELGRLKLIHENETRSLKATVERLENQKLHILQQIDGQKRRIRLAESVAKTALGRQELSGLGMVSSDLAKSNEPVYLVKIKPDKPTITAYGEEKPLQIGMTLEADILHEKRRLYEWVLELIYSMSGKL

SEQ ID NO: 1812 - protein, 157 aa, Neisseria meningitidis
MGIEGVLKKGFITTSADTVLNYMRTGSLWPVTFGLACCAVEMMHAGMARYDLDRFGIIFRPSPRQADLMIVRGTLTNKMAPALRRVYDQLAEPRWVLSMGSCANGGGYYHYSYSVVRGADRVVRTFMCRVVRRLRKPFTAFSSNKKSSALPPSRVTS

SEQ ID NO: 1813 - protein, 222 aa, Neisseria meningitidis
MTTHLSNVAPDLQNYLNAIGEPEHPVLTRLREKTGHHRMGKMAIAREQAAVLVWLAKLIRAEKYLEIGVFTGYSSTALALALPEHGRITACDINVSFTDTARQVWNEAGVAHKISLHLQPALLTLDDLIAQGEAGSYDLALIDADKPPTPRYFERCLKLVRQGGIIAIDNILLNGRVMREAASDAPPSVGILKDFNQNLPNDTRIVPITLPVGDGLTLLLKK

SEQ ID NO: 1814 - protein, 180 aa, Neisseria meningitidis
VQSWKERRDFNIVKQDLDFSCGAASVATVLNNFHGQKLTEEDVLKKLDKEQMRASFEDMRRIMPDLGFEAKGYALSFEQLAQLQIPVIVYLKYRKDDHFSVLRGIDGNTVLLADPSLGHVSMSRAQFLDAWQTREGNLAGKILAVVPKGRDAGGDKAFFTRSPKRQTEFAVGQVKWWRAY

SEQ ID NO: 1815 - protein, 729 aa, Neisseria meningitidis
MIYHRIAVNVPLSDGLLTYSHSDPLPPGTRVLVPFRNKTVVGMVWETDIAPDMDTARILSIQTTFLDEPPLPESWRDLLSFTSRYYHYPTGQAVFAALPQGLKETRAVEMPQPPLFYALNEAGRAQTPPLARFNKKAALWDALLSGGMTMAALKQVNAQAAKLIEDWAEQGWIETTEAAKPVLRSCNGQASHSEFVLNADQQKASDAIQTALGRFQPFLLYGITGSGKTEVYFDAMAKVLAQGRQVLFLLPEINLTPQLLKRVENRFADVPTAVLHSQMAAGKRTQDYLRAMLGQAKLVIGTRLAVFTPMDDVGLIVVDEEHDGSFKQDNELRYHARDLAVWRAKQGGCPIILGSATPSLESWHKAQSGAYRLLQLTERAHTAAQLPQVDILNVGRLKLDNGFSPQALQLLKQNFEAGGMSLVYLNRRGFAPALFCGDCGYTFGCPNCSAKMVLHQRVRQLRCHHCDHREPIPFKCPDCGNQDLTAVGHGTQRVEETLRAFLPKAAVVRVDRDSTAHKNDWADLYRRIADNEIDILVGTQMLAKGHDFARLNLVIVLNADGSLYSADFRAPERLFAELMQVSGRAGRADKPGKVLIQTQLPEHPVFAAVKAQDYVVFAENELNERQMFAMPPFGFQTAVRADAPRVADAMEFLNAAKETLAPLLPESVSQFGAAPMLMVRLAERERAQIFLESTSRQDLHRAVSLWVQVLQQNRDGKIRWSVDVDPHEA

SEQ ID NO: 1816 - protein, 469 aa, Neisseria meningitidis
MNFPKTAASLLLLLASLAAHALDTGRIPQNEIAVYVQELDSGKVIIDHRSDVPVNPASTMKLVTAFAAFKTFGSNYRWATEFKSNGTVNDGTLDGNLYWAGSGDPVFNQENLLAVQRQLREQGIRNITGHLMLDHSLWGEVGSPDDFEADSGSPFMTPPNPTMLSAGMVMVRAERNAADSTDILTDPPLPHIFAQNNLKITASQAACPSIKKLMRASFSDNTLKLRGNIPESCLGKPVGVRMFALDELIRQSFTNHWLLGGGRISDGIGISDTPEGAQTLAVAHSKPMKEILTDMNKRSDNLIARSVFLKLGGNGKLPAVSEQAASAVRRELAVSGIDVADLVLENGSGLSRKERVTARMMAQMLETAYFSPFAQDFIDTLPIAGTDGTLRNRFKQSGGLLRLKTGTLNNVRALAGYWLGDKPMAVVVIINSGRAVSLLPDLDNFVANNIISGGDGWLDAKLMCKERRA

SEQ ID NO: 1817 - protein, 343 aa, Neisseria meningitidis
MSLPAMDAGIYLEETAPRALIEHNNILDNSVGVYLHGSADAMVRENKIVGDATLRVNERGNGVTVWNAPGAQVVGNDISKGRDGIFSNTSTHNTYKNNRFSDLRFAVHYMYTNDSEISGNISVGNNMGYVLMFSERLKVFDNIAVGSRDGIMLNYVNYSDIHDNIINKAGKCVFAYNANYDKLSANHFENCQIGIHFTAAIEGTSLHDNSFINNESQVKYVSTRFLDWSEGGHGNYWSDNSAFDLNGDGFGDSAYRPNGIIDQIIWRAPVLRLLMNSLAISIVKWAQAQFPAVLPGGVVDSKPLMKPYVPKIQTRYQAMKDELLKEAETRQSEWGRAENGSLN

SEQ ID NO: 1818 - protein, 114 aa, Neisseria meningitidis
MLPNKVLGKYDWNVDGKTGIGAAWVVAAFILPILVWAIFMLSRMQGWLAPTKANPTWALVWLLICMPCLLIASKCLGWKGWRRVVNIFACLTVCAILSVPASLLIAFTLRDLLK

SEQ ID NO: 1819 - protein, 501 aa, Neisseria meningitidis
MMTEIQQRAQLHRQIWKIADEVRGAVDGWDFKQYVLGTLFYRFISENFTDYMQAGDSSIDYAAMPDSIITPEIKDDAVKVKGYFIYPGQLFAILPPKPIKTKSSTPSKKFLPRLKAPPPAIRPNKTLKACLTTSTPPAAGSAAPLPTRTNALPPSKAWRNSISAVLKTTTSTFSAMPTNTFPTTLPTQANPAANFSPRKAYPSLRGWRCTGRRKTKSTTQLAARAACSCRRKNSLTSTSSKKASSGRKSTTPPTTSPAICFCTTSITTNSTSNWATHPIPNSKTANPLMPSFPIRPIPSTGAAATPPSTTTALPLQAYSPRNPKPILPSFCTHTTFLAEAAPPSSHSPAFSIAAAQSRKSANIWWRATTWKPSSPLRPISFTAPASPSIYWFCPNTKTIPTSNSSTQAASLKKKPTTTSPKNTLPKSSNSSPIKPMCRISPKTPPSKPSKTTATTSPSAAMLNPKTPAKLSTSNSLTPKSAKPLPKSNGCGVKLTKVQRLK

SEQ ID NO: 1820 - protein, 642 aa, Neisseria meningitidis
MKTDIQTELTQALLPHEKVWANEEKTILAKNILLDLVEKTDPSIIELLLGNDELKRHFFVEVNGVLVFKLQDFRFFLDKHSVNNSYTKYANRIGLTDGNRFLKDNSDIVLDFPFKDCVLNGGQSTEEGEEIYFKRNNSQSVSQSVSQSVSQSVSQSVSQLYTKLTRKRQEIFFNQTLAFDEIDRLFDAKAFSKFSRHTTDGKQAVGEIKRHSDGTPAENLIIKGNNLIALHSLAKQFRGKIKLIYIDPPYNTETDSFAYNDKFNRSTWLTFMKNRLEIARELLADDGAIYINLDYHEVHYCKVLMDEIFGEYNFQREIIWRIGWVSGYKTTVSNYIRNHDTILFYSKDYNHLNFNKYYIDNKHFKVLVDLDRATKNTFTKFGINKETAEKILQEINFSNRPERYPLEDVWNANEYDDLNSIAIVSYSGESVSKMLGLEEIKGQKSEKLLKRILEAHTKPNDIVLDFFGGSGTTAAVAHKMNRQYICIEQIDKQTDTIVKRLNKILVNESSGISKAVNWQGGGEFVYAELAPFNETAKQQILACEDSDGIKTLFEGLCERYFLKYNVSINEFSQIIEEPEFQSLPLDEQKQMVLEMLDLNQMYVSLSEMDDEQFADCLNDDDKALSRAFYQSVKNQAEKKDGE

SEQ ID NO: 1821 - protein, 303 aa, Neisseria meningitidis
MDTLFSLKVFRQVVQSGGFTRAADALGISTAMASKHVSHLENTVQAKLLHRNSRNLSLTEAGEEYYRQCSYALDTLDDAAQKAAGGTEKPQGLLRVTMPLWFAGSQICNWLAEYRERYPEVTLELILDNRHVDLIAEGVDLALRVSQTLSPSLIARPLAEIEFALLASPDFLRRNGVPETPEEVAGLPAVLPTYTNQQKLDLTRKSDGKKYRLELTPVIRTDNTLMMREMIKAGACIGYQPLWAAEHDLRCGSLVRLLPEYTVPTDRLNAVYADRAFLSAKVRSFIDFLNEKIASRKGCRNAV

SEQ ID NO: 1822 - protein, 233 aa, Neisseria meningitidis
MTEPAAEGGKAAKALKKYLITGILVWLPIAVTVWVVSYIVSASDQLVNLLPKQWRPQYVLGFNIPGLGVIVAIAVLFVTGLFAANVLGRQILAAWDSLLGRIPVVKSIYSSVKKVSESLLSDSSRSFKTPVLVPFPQSGIWTIAFVSGQVSNAVKVALPQDGDYLSVYVPTTPNPTGGYYIMVKKSDVRELDMSVDEALKYVISLGMVIPDDLPVKTLAGPMPSEKADLPEQQ

SEQ ID NO: 1823 - protein, 263 aa, Neisseria meningitidis
MNLFFDTELGKQQNKATHKIRVMSEAWLEKNGYCPCCGSKPMKRFANNKPVADLFCPNCHEQYELKSKNQKTIGNIVPDGAYHTMLERIRSDTNPNFFFLAYKKADYSIRQLVLVPKHFITPDMIIPRNKGIKNRPHHIMCSINLAPLPESGKIFLIDDSRIIEPETVLKKWQSNLFLRNQNAERKGWLLAVMKCIDQLPEEFTLSQMYEFENKLSIQFPQNNHIKDKIRQQLQILRDQNTIEFIGRGLYKKIDKLRPTSKAV

SEQ ID NO: 1824 - protein, 162 aa, Neisseria meningitidis
MLKITLIAACAENLCIGAGNAMPWHIPEDFAFFKAYTLGKPVIMGRKTWESLPVKPLPGRRNIVISRQADYCAAGAETAASLEAALALCAGAEEAVIMGGAQIYGQAMPLATDLRITEVDLSVEGDAFFPEIDRTHWKEAGRTERRVSSKGTRYAFVHYLRY

SEQ ID NO: 1825 - protein, 157 aa, Neisseria meningitidis
MSRNTEELQGISLLGNQKTQYPIGYAPEILEAFDNKHPDNDYFVKFVCPEFTSLCPMTGQPDFATIVIRYIPHIKMVESKSLKLYLFSFRNHGDFHEDCVNIIMKDLIALMDPKYIEVFGEFTPRGGIAIHPFANYGKAGTEFEALARKRLFEHDAQ

SEQ ID NO: 1826 - protein, 102 aa, Neisseria meningitidis
MYAVVKTGGKQYKVSVGEKLKVEQIPAELDSQIELTEVLMIADGESVKVGAPFIEGAKVTAKVVAHGRGEKVRIFKMRRRKHYQKRQGHRQNFTQIEIVAIA

SEQ ID NO: 1827 - protein, 332 aa, Neisseria meningitidis
MSRPVPAVFGSVFHSQMPVLAYREGKWQPTEWQSSQDLSLVPGAHALHYGSECFEGLKAFRQADGKIVLFRPTANIARMRQSADILHLPRPETQAYLDALVELVKRAADEIPDAPAALYLRPTLIGTDPVIGKAGSPSETALLYILASPVGDYFKVGSPVKILVETEHIRCAPHMGRVKCGGNYASAMHWVLKAKAEYGANQVLFCPNGDVQETGASNFILINGDEIITKPLTDEFLHGVTRDSVLTVAKDLGYTVSERNFTVAELKAAVENGAEAILTGTAAVISPVTSFVIDGKEIEVKSQERGYAIRKAITDIQYGLAEDKYGWLVEVC

SEQ ID NO: 1828 - protein, 389 aa, Neisseria meningitidis
MDNELWIILLPIILLPVFFAMGWFAARVDMKTVLKQAKSIPSGFYKSLDALVDRNSGRAARELAEVVDGRPQSYDLNLTLGKLYRQRGENDKAINIHRTMLDSPDTVGEKRARVLFELAQNYQSAGLVDRAEQIFLGLQDGKMAREARQHLLNIYQQDRDWEKAVETARLLSHDDQTYQFEIAQFYCELAQAALFKSNFDVARFNVGKALEANKKCTRANMILGDIEHRQGNFPAAVEAYAAIEQQNHAYLSMVGEKLYEAYAAQGKPEEGLNRLTGYMQTFPELDLINVVYEKSLLLKCEKEAAQTAVELVRRKPDLNGVYRLLGLKLSDLDPAWKADADMMRSVIGRQLQRSVMYRCRNCHFKSQVFFWHCPACNKWQTFTPNKIEV

SEQ ID NO: 1829 - protein, 176 aa, Neisseria meningitidis
MKFVSDLLSVILFFATYTVTKNMIAATAVALVAGVVQAAFLYWKYKKLDTMQWVGLVLIVVFGGATIVLGDSRFIMWKPSVLFWLGALFLWGSHLAGKNGLKASIGREIQLPDAVWAKLTYMWVGFLIFMGIANWFVFTRFESQWVNYKMFGSTALMLVFFIIQGIYLSTCLKKED

SEQ ID NO: 1830 - protein, 163 aa, Neisseria meningitidis
MRAVIQKTVGAKVDVVSEAGTETCGKIDGGFVVLLGVTHSDTEKDARYIADKIAHLRVFEDEAGKLNLSLKDVGGAVLLVSQFTLYADAASGRRPSFSQAAPAEQAQQLYLRTAELLRGHGIHVETGRFRTHMQVSLCNDGPVTILLDSFMTRISPKMKVVPD

SEQ ID NO: 1831 - protein, 178 aa, Neisseria meningitidis
MQAISPELQARAAKIKLLILDVDGVLTDGRIFIRDNGEEIKSFHTLDGHGLKMLQASGVQTAIITGRDAPSVGIRVKQLGINYYFKGISDKRAAYEELRAQVGVEEAECAFVGDDVVDLPVMVRCGLPVAVPDAHWFTLQHAAYIAKRPGGAGAVREVCDLIMQAQGTLGAALNEYIK

SEQ ID NO: 1832 - protein, 244 aa, Neisseria meningitidis
MASHNTTHQMKTLCSSCSLRELCLPVGLLPNELSQLDAVIRQSRRLKKGEYLFCVGEAFTSLFAIRSGFFKTTVASQDGRDQVTGFFMSGELIGMDGICSHVHSCDAVALEDSEVCELPFTHIEELGQNIPSLRTHFFRMMSREIVRDQGVMLLLGNMRAEERIAAFLLNLSQRLYSRGFAANDFILRMSREEIGSYLGLKLETVSRTLSKFHQEGLISVEHKHIKILNLQVLKKMVSGCSHAI

SEQ ID NO: 1833 - protein, 344 aa, Neisseria meningitidis
MPNCFKFHTVIERHWQKPYPVLSFLLKPLSGLFAKIAAKRRTDFLSGKRQSEKLPVPVVVVGNIHAGGTGKTPIVAALVSGLQEKGVKVGIISRGYGRKSKAVHVLNAESRAEDAGDEPLLLFRKTGAPTAVGSSRAEAGRALLAAHPDIGLIVADDGLQHYALRRDVEIAVFPAADTGRTDLDLLPNGSLREPLSRLDSVDTVVVSGGKADALFRPSENMFHSRIEVGRIYRLNNPSEILDTGRLKNQTVVAVAGIAKPARFFDSLRNMGITVKRTVALPDHADISAADLPDADAVIITEKDAVKFSDGICTDNVWVLPVCAIIEPDLAAFVLERLEDVPKAV

SEQ ID NO: 1834 - protein, 325 aa, Neisseria meningitidis
MQENPTVWLFDLDNTLHNADAGIFHLINRAMTRYMAHRLKLSESAASDLRQEYWHRYGATLAGLQIHHPEIDIADFLRESHPINAILTRLHGMPETQNTLSRLKGRKAVFSNGPSFYVRAVVGALGLENRFDALFGTDDFGLLYKPNPQAYLNVCRLLDVPPECCIMVDDSADNLHQAKALGMKTVWFGAKSHALPFIDASVSDMAQLARYAETLSEHRQNHYNTPQPPKIRKNVMRKTFLILMTAAALLSGCAWETYQDGNGKTAVRQKYPAGTPVYYQDGSYSKNMNYNQYRPERHAVLPDQTDDSEQGVRGQNWQKPKFQNR

SEQ ID NO: 1835 - protein, 116 aa, Neisseria meningitidis
MALRTHFVISNVPSTPNLLRGRQLEGKLILEVPAQVNPIPQSVLRAAQEENVIIRDTTGRIYNRWWFSIRWLCRCTSCKKRIIDTNRENRGRCVSNCKCKHWISMDCQFVKAKRRS

SEQ ID NO: 1836 - protein, 61 aa, Neisseria meningitidis
MYHYQSEATQFLNRLIEEKPELEQQRLENRGLLWDVELNPEEQENFEAAKVAKKPYTYYQD

SEQ ID NO: 1837 - protein, 498 aa, Neisseria meningitidis
MSLALVYSRALSGMNAPLVEVEAHLANGLPHFNIVGLPDTEVKESRDRVRAAIIQSGFEFPAKKITVNLAPADLPKESGRFDLPIAIGILAASGQVAPEKLAEYEFAGELALSGLLRPVRGALAMAWQGMQAKRAFVLPEENAGQAAVMRGITVYGARSLGEVAAHLNGIEPLAQTECQVPQMPFEHGGQPDLCDVKGQHTARLALEIAAAGGHSLLMMGPPGTGKSMLSQRLPGILPPLTEDELVEVWALRSLLPNHQQQLDSNRPFRSPHHSASAAAMVGGGSDPRPGEISLAHHGVLFLDELPEFDRKVLEVLREPLENGEIHISRAARQAVYPAKFQLVAAMNPCPCGYLGHPVKPCRCTPESVARYRSKISGPLLDRIDLTIEVPSLSAAELMQQEAGERSASVLERVIAARDKQYARQGKVNAALSVSELDTSARIQKEAQEALGSLLEKLSLSARSFHRIMRVARTLADLAGDEEVGRSHVMKAIGFRRAL

SEQ ID NO: 1838 - protein, 151 aa, Neisseria meningitidis
MFGGAHELSIDSKGRLAVPAKFRDILSRLYTPAVVVTLESKHKLLMYPVAEWEKVAAQLLNLKVADNPVLRRFQNLLLHNAEILEWDSAGRVLLPAGLRKRVDFDREVVLVGRANRLELWGREQWEAEMVQALDDDPDELAFQLSQTDLQL

SEQ ID NO: 1839 - protein, 581 aa, Neisseria meningitidis
MLIKSEYKPRMLPKEEQVKKPMTSNGRISFVLMAIAVLFAGLIARGLYLQTVTYNFLKEQGDNRIVRTQTLPATRGTVSDRNGAVLALSAPTESLFAVPKEMKEMPSAAQLERLSELVDVPIDVLRNKLEQKGKSFIWIKRQLDPKVAEEVKALGLENFVFEKELKRHYPMGNLFAHVIGFTDIDGKGQEGLELSLEDSLHGEDGAEVVLRDRQGNIVDSLDSPRNKAPKNGKDIILSLDQRIQTLAYEELNKAVEYHQAKAGTVVVLDARTGEILALANTPAYDPNRPGRADSEQRRNRAVTDMIEPGSAIKPFVIAKALDAGKTDLNERLNTQPYKIGPSPVRDTHVYPSLDVRGIMQKSSNVGTSKLSARFGAEEMYDFYHELGIGVRMHSGFPGETAGLLRNWRRWRPIEQATMSFGYGLQLSLLQLARAYTALTHDGVLLPVSFEKQAVAPQGKRIFKESTAREVRNLMVSVTEPGGTGTAGAVDGFDVGAKTGTARKFVNGRYADNKHIATFIGFAPAKNPRVIVAVTIDEPTAHGYYGGVVAGPPFKKIMGGSLNILGISPTKPLTAAAVKTPS

SEQ ID NO: 1840 - protein, 169 aa, Neisseria meningitidis
MGSKFFFLLLRFAGSGLPPSHMRGIGIVGRRVRGFLARRVSPHIGRGVNIERGAYVFPDTVLGDGSGIGANCEICRGPVVGKNVMMEPECLFYSNNHKFDRKRFEGYTEIRPITLEDDVWPGRRVIVMAGVTVGRGSVVGAGAVVTKDIPPYSLAAGNPAVVKKNLPKG

SEQ ID NO: 1841 - protein, 290 aa, Neisseria meningitidis
MPILNHIALIGVGLIGGSFVLDLKRQGLVRTVTGIDTDRDNLERALERGVIDRASVAIDADSIGGADLVLIATPVATVPDILTALRPVLPEHTWISDVGSTKSSVIEAFRRCLPDRLHHCIAAHPIAGSDRSGAQAAQFGLFRHRKLIITPHGGEHSDGIALVEELWHAVGAEIYTMDAQRHDAVFAAVSHMPHLTAFAYVHQILDHPDGQEYLKFAATGFRDFTRIASGHPAVWADICLANKDSLLQLVQGLGKQLDVLANILTTDDREALYRYFEEAKTTRDRWLDGN

SEQ ID NO: 1842 - protein, 284 aa, Neisseria meningitidis
MFYQILALIIWSSSFIAAKYVYGGIDPALMVGVRLLIAALPALPACRRHVGKIPREEWKPLLIVSFVNYVLTLLLQFVGLKYTSAASASVIVGLEPLLMVFVGHFFFNDKARAYHWICGAAAFAGVALLMAGGAEEGGEVGWFGCLLVLLAGAGFCAAMRPTQRLIARIGAPAFTSVSIAAASLMCLPFSLALAQSYTVDWSVGMVLSLLYLGLGCGWYAYWLWNKGMSRVPANVSGLLISLEPVVGVLLAVLILGEHLSPVSALGVFVVIAATLVAGRLSHQK

SEQ ID NO: 1843 - protein, 380 aa, Neisseria meningitidis
MKVFKQQLEQLGAQNQYRSIPDLIHQGRYITRENCKMLNMSSNDYLGLASDENLRRSFLQQYGGNFPSFTSSSSRLLTGNFPIYTDLEELVAQRFQRESALLFNSGYHANLGILPALTTTKSLILADKFVHASMIDGIRLSRCAFFRYRHNDYEHLKNLLEKNVGKFDRTFIVTESVFSMDGDVADLKQLVQLKKQFPNTYLYVDEAHAIGVYGQNGLGIAERDNLIAEIDLLVGTFGKALASVGAYAVCNQVLKECLINQMRPLIFSTALPPFNVAWTYFIFERLPQFSKERSHLEQLSAFLRREVAHRTQIMPSQTCIVPYILGGNEATLAKAEYLQRQGYYCLPIRPPTVPKGTSRIRLSLTADMTMDEVRQFAACL

SEQ ID NO: 1844 - protein, 260 aa, Neisseria meningitidis
MESLTAINKSRIRQAFQKALNDYDRHALIQQKMTINLMAHLQDYLPDMPLENVLELGCGSGMLSALLQKQISANYWLFNDLCDVQPQLAEKLPQSFDFYCGDAENFPFQRQFDLIASASAVQWFHQPDAFIAHCKTGLKANGLLAVATFGKDNLKEVRQITNIGLNYPTLSQWQTWLAKDFELLWCEDFKVILDFDTPLDVLKHLKYTGVTATNQKNWTRKNLNEFIGDYLSAFSMPSGKVHLTYHPLFFIARYSAAGRQ

SEQ ID NO: 1845 - protein, 365 aa, Neisseria meningitidis
MEVQLPKIKTVRVMLAGMTAQQESVFKMAFKMHNTTRYETVSPSDGSAVPDLVLADTDAEGGFELWKELAERYKDIPVAVCSEKVPDSEVPYLPKPIRFETLFPMLRKLLQGENVYGKSFIAPADRSAKNNGNVQRTVTIRQFNPNKGLLGALRFAEKNRQDIAILHGNKPVLIVFPSIQRVLLTESVQKLEELCKDENLQVSCKTVPDNPQWREKAKVGIMSCMWQFSIWTAQGRLIYPISPDTPFTLKSWPNLTRLANVPGSIRLSAFLTKASVNLNVLYKVMPLNLNDILNYLAATYTTGFLSVDLKTVSQQAYSDMADKINIGADSASDSEMMKKAEKITTPSQSQSRGLLQRLMKKLLGS

SEQ ID NO: 1846 - protein, 123 aa, Neisseria meningitidis
MKLLFILLVLFVAVEHFYIAWLEMTQIPSEKAAEIFKLPYEFMEQKRVQTLFGNQGLYNGFLGIGLVWSRFAAPDNAVYGAMVLFLGFVLIAAAWGAFSSGNKGILVKQGLPAFLAAAAVLAV

SEQ ID NO: 1847 - protein, 209 aa, Neisseria meningitidis
MNRHIRQEIFERFRAANPHPTTELNFNSPFELLIAVLLSAQATDVGVNKATAKLFPVADTPQAMLDLGLDGVMEYTKTIGLYKTKSKHIMQTCRILLEKYNGEVPEDREALESLPGVGRKTANVVLNTAFGHPVMAVDTHIFRVSNRTKIAPGKDVREVEDKLMRFIPKEFLMDAHHWLILHGRYTCKALKPQCQTCIINDLCEYPAKA

SEQ ID NO: 1848 - protein, 137 aa, Neisseria meningitidis
MIPSYTYAALAFSAFTSATLLPGTSEAAFALFVRRFPEHAYGALLCAGLANGLGSMVSYWMGRLLPSRKMPSEKTLNLMRRFGIWLLPFAWLPVVGDALPLAAGWLRLNPWTSGLMLVIGKTARYAFILWGMQYYAA

SEQ ID NO: 1849 - protein, 154 aa, Neisseria meningitidis
MIEMSKDYRNDLYDVYVSYPPQVDRGLIRECLRENLGEEKAEGLIESLDSKPQVLVEEKCTWAKREELHDYFSYLGLDIITRRYMELETVVPPEEGEGEGEGADGEMPEYLELHGGREDDISAPSQPEPPSRNIKLLVFGLLIAFLGYLLGKIF

SEQ ID NO: 1850 - protein, 503 aa, Neisseria meningitidis
MKWLKRLTVIVGTFYRYRLAGLCASLMGSGWICALLKMMPQSSKLKNEPPAVRLRLALESLGPIFIKFGQVLSTRPDLIPHDYAVELAKLQDKVPPFDARLSREQIEKSLGQSIEKLYAEFETEPIASASIAQVHKARLHSGERVAVKVLRPNLLPLIEQDLSLMRFGAAWVERLFSDGRRLKPLEVVAEFDKYLHDELDLMREAANAGQLGRNFQNSNMLIVPKVFYDYCTSDVLTIEWMDGTPVADIAKLKADGIDLHKLADYGVEIFFTQVFRDGFFHADMHPGNILVAADNRYIALDFGIVGTLTDYDKRYLAINFLAFFNRDYRRVATAHIESGWVPADTRAEELEAAVRAVCEPVFNKPISQISFGLVLMRLFEVSRRFNVEIQPQLVLLQKTLLNIEGLGRQLDPDLDLWKTAKPFLVKWINGQVGPKALWRNLKNEAPDWAQIIPSLPRKISALIDENRQQEMRDAYIHLVKVQQRQSLWLAVIAVVLLLILLLK

SEQ ID NO: 1851 - protein, 447 aa, Neisseria meningitidis
MIKIKKGLNLPIAGRPEQVIYDGPVITEVALLGEEYAGMRPSMKVKEGDAVKKGQVLFEDKKNPGVVFTAPVSGKIAAIHRGEKRVLQSVVIAVEGNDEIEFERYAPETLANLSGEEVRRNLIQSGLWTALRTRPFSKIPAVDAEPFAIFVNAMDTNPLAADPTVIIKEAAEDFKQGLLVLSRLTERKIHVCKAVGADVPSENAANIEIHEFGGPHPAGLSGTHIHFIEPVGANKIVWTINYQDVIAIGRLFVTGRLNTERVVALGGSQVNKPRLLRTVLGAKVSQITAGELVDADNRVISGSVLNGAIAQGAHDYLGRYHNQISVIEEGRSKELLGWVAPQPDKYSITRTTLGHFLKNKLFKFNTAVNGGDRAMVPIGTYERVMPLDILPTLLLRDLIVGDTDSAQALGCLELDEEDLALCSFVCPGKYEYGPLLRKVLETIEKEG

SEQ ID NO: 1852 - protein, 500 aa, Neisseria meningitidis
MAKVLIVPVSAGLDASAAAQAFAKALDAQIFQAVDATAETLLAQGKSDDWFDALVGKVAALDAANLVIEGIAPDADKIYLAGKNVELALSLDAAAVFAVRSDNADADELANRLNLAKQFFAAAPGVLEGFVVDGAAASVAEAAAEKTGLTFFGSSDALKDVSVLAGREAKRLSPAQFRYNLIDFARQADKRIVLPEGAEPRTVQAAAICHEKGIARCVLLAKREEVEAVAKERGISLPDSLEIIDPASLVEQYVEPMCELRKSKGLTPEDARKQLQDTVVLGTMMMAQNDVDGLVSGAVHTTANTIRPALQLIKTAPGASLVSSVFFMLLPNQVLVFGDCAVNPNPTAQQLADIAIQSADSAKAFGIDPKVAMISYSTVNSGSGPDVDTVIEATKLAREKRPDLAIDGPLQYDAATVPGVGKSKAPGSQVAGQATVLVFPDLNTGNCTYKAVQRSANVLSVGPLLQGLRKPVNDLSRGALVEDIVFTIALTAVQAKQMEG

SEQ ID NO: 1853 - protein, 206 aa, Neisseria meningitidis
MKPQFITLDGIDGAGKSTNLAVIKAWFERRGLPVLFTREPGGTPVGEALREILLNPETKAGLRAETLMMFAARMQHIEDVILPALSDGIHVVSDRFTDATFAYQGGGRGMPSEDIEILEHWVQGGLRPDLTLLLDVPLEVSMARIGQTREKDRFEQEQADFFMRVRSVYLNRAAACPERYAIIDSNRSLDEVRNSIEKVLDGHFGC

SEQ ID NO: 1854 - protein, 514 aa, Neisseria meningitidis
MCGVLGLVSHEPVNQLLYDGLQMLQHRGQDAAGIATAEGGTFHMHKGKGMVREVFRTRNMRDLTGNAGIAHVRYPTAGNAGSSAEAQPFYVSSPFGIVLAHNGNLTNTAELYENVCNKHLRHVNTSSDSEVLLNVFAHELRREVSKNADPHRLNADNIFNAVAEVHRLVHGAYGVVAMIAGYGMLAFRDPYGIRPLVLGSQTDNEGRKSYAVASESVAFNALAYDLERDIRPGEAVFVGFDGTMIARQCSDRAKLSPCLFEYVYFARPDSVIDGVSVYQSRLDMGVSLAEKIKRELPVDGIDVVMPIPDTSRPSAMELAVHLDKPYREGLIKNRYIGRTFIMPGQATRKKSVRQKLSPMETEFAGKSVLLVDDSIVRGTTSREIVEMVRAAGARKVYIASAAPEVRYPNVYGIDMPTREELIANGRSAAEIAAEIGADGIVFQNLSDLEAVVKALNPKIESFDSSCFNGIYQTGDIDDAYLDRLSAEKSGCGGLKIHPSRMEHSISISDAGDEE

SEQ ID NO: 1855 - protein, 243 aa, Neisseria meningitidis
VSREINAGGHHFLYGGISGGGVHYWDNKDFSEQCLRLSLGYKNRSVTRSFGIVPFIGQNLLGGSRYNFVGGFNADFSRRLSERWRLTLNVGNMWKRYQEDRTAARYDSHMPLAGATLMYSAPKDWLLYGGADWSHDLTKEAEQASIRKGLRVGAVKTFDGGLGLRANLRYTRRTFDAPGTLVYCFPRKDHEYQANLSLWHDKISWKGFTPQLNFRYLKIDSNMKSFYTRKNMQIFMSVEKDFK

SEQ ID NO: 1856 - protein, 119 aa, Neisseria meningitidis
MTDRPSLLWIKPGQAEIMEYCEPEEASDPYATYRCANLMAVLPLFVVILVLLNIVFPLPAHPLAWLVPAGFMVLVGGFPLSLPLAVLLVLTCCILARCPPLSRLLCYPCPNHPMSKNSA

SEQ ID NO: 1857 - protein, 83 aa, Neisseria meningitidis
MKKSLFAAALLSLVLAACGGEKAAEAPAAEAPAAEAPATEAPAAEAPAAEAPAAEAPATEAPAAEAAATEAPAAEAPAAEAAK

SEQ ID NO: 1858 - protein, 369 aa, Neisseria meningitidis
MFSDTDISMMENALRLAALGRFSTSPNPRVGCVIAHGSQIVGQGFHVKAGEPHAEVHALRQAGEMAQGATAFVTLEPCSHYGRTPPCAEALLRSGVTRVVAAMRDPNPLVAGKGLAMLEAAGIKTECGLLEHQARELNRGFLSRIERRRPFVRLKCAVSLDGKTALSDGSSFWITGEDARADVQVLRAESCAVLTGIGTVLADNPRLNVRAFPTLRQPARIVLDSRLRLPLDSHLLTDGQSPTYIATLERDEDKLRPYREHAHIRILMPSETADGKIDLHHLMRLLADEGFGEIMVEAGSELTSAFLAEDLADEIVLYRSPKILGGGSGLFCLPENRAALSAPPLWTPVSSEILGHDIKTVFRKNGNAF

SEQ ID NO: 1859 - protein, 417 aa, Neisseria meningitidis
MSEQHISTWKSKINALGPGIMMASAAVGGSHLIASTQAGALYGWQIALIIILTNLFKYPFFRFSAHYTLDTGKSLIEGYAEKSRVYLWVFLILCILSATINAGAVAIVTAAIVKMAIPSLMFDAGTVAALIMASCLIILVSGRYRALDRVSKIIIVTLSIATLAAAGIAMSRGMQMQSDFIEPTPWTLAGLGFLIALMGWMPAPIEISAINSLWVTEKQRINPSEYRDGIFDFNVGYIASAVLALVFLALGAFVQYGNGEAVQMAGGKYIGQLINMYAVTIGGWSRPLVAFIAFACMYGTTITVVDGYARAIAEPVRLLRGKDKTGNAEFFAWNIWVAGSGLAVIFWFDGVMANLLKFAMIAAFVSAPVFAWLNYRLVKGDEKHKLTSGMNALALAGLIYLTGFTVLFLLNLAGMFK

SEQ ID NO: 1860 - protein, 391 aa, Neisseria meningitidis
MLNTALSPWPCFTQEEADAVSKVLLSNKVNYWTGNECREFEKEFAAFAGTRYAVALSNGTLALDVALKAIGIGAGNDVIVTSRTFLASASCIVNAGANPVFADVDLNSQNISAETVKAALTPNTKAIIVVHLAGMPAEMDGIMALAKEHDLWVIEDCAQAHGAKYKGKSVGSIGHVGAWSFCQDKIMTTGGEGGMVTTNDKELWSKMWSYKDHGKSYDAVYHREHAPGFRWLHERFGTNWRMMEMQAVIGRIQLKRLPEWTVRRQENAAKLAESLGKFKSIRLIEVADYIEHAQYKFYAFVKPEHLKDGWTRDRIVNELNVRKVPCYQGSCSEVYLEKAFDNTPWRPKERLKNAVELGNTSLMFLVHPTLTDDEIAFCKKHIEAVLAEATQ

SEQ ID NO: 1861 - protein, 303 aa, Neisseria meningitidis
MTWRSLLIQNGGKLSLQRRQLLIQQNGESHTVPLEDIAVIIIENRETLITAPLLSALAEHGATLLTCDEQFLPCGQWLPYAQYHRQLKILKLQLNISEPLKKQFWQHIVRQKILNQAFVADETGNDLAAKRLRTLASEVRSGDTGNREAAAALYFQALFGEKFTRNDNNAVNAALNYTYAVLRAAVARALTLYGWLPALGLFHRSELNPFNLADDFIEPLRPLADLTVIHLYEQGRLKTELTLGIKQHLIKILYYQTSIERQHFSTLAAIDKMVSSFQAGVTDKNAKQLKLPEILPLKAYQYE

SEQ ID NO: 1862 - protein, 537 aa, Neisseria meningitidis
MVAYVFLFLFVTAALVLIIRSHYRWTYFFASALFVFLAGGMLMLTAQWQRALNFASVWFVVLILFHRLKIHYYKQPLLISDFLLIADWRNWETLFHYKEAVIGMAGLLALAAYAVFGWSGADSLDVPWRWAGAVLFAAAFVSMRHFSKHPGAVKTWLDSLPDDGRDVFTCRCPVGRCFSKYPCSRATGKRLPGRCRLKPGRAACRMKNPILSLPWNRRSIRTVSTLPPPRFPIKCSDGRKIPYFPHLCACILSAAQRGSPNLRFWRVFRPRISARWQAACFTRSYRICRPVLSATCANTVIFAWHSRHLPRATTMPRQHMTISALICSSRKIWAIPRRWAKTCGIFPVRKCSMRGFWKNAIPIWKTCGSRCSYMCPRSTGRIGRIPTMCLIWMRPIMRKPYPRLTTTSGALPIWTKRWKVSTVICTNAANPLFSVISAIIRYRLRACPSGRNGITRSRIMRSLPSGAILPADSYSGRISSTLPLQAACWRRLVWKPKTASCVRIWRCAVCAAEGWKTARTGSWSEITATICTTFKLP

SEQ ID NO: 1863 - protein, 180 aa, Neisseria meningitidis
VNYKIYDGAKIIKKENLSIGDYSQIDDFVFFNCGEKSILGSFVHISSFTSIIGGGEFYMDHFSGLSAGCRIITGSDDFMGGGVNQSNSPIIYCKICNWKTCNFRNKCNSITRRYYWWGCCWSRGYSEKKSAVDYLCRGRLTTEAQITRNIGVRETSCSRISRFMSYNPIPDTPQPKGNAM

SEQ ID NO: 1864 - protein, 1010 aa, Neisseria meningitidis
MNLETKPIAETPNFIVLDQYEKIEQSGSYQSENQLEAELIADLQNQGYEYRKDLNSQSRLLENLRAQLQRLNDVAFSDGEWARFLTEYLDRPSENITDKTRKIHDDHIYDFAFDDGRLKNIYLLDKKNLARNHVQLINQFEQTGTHANRYDVTVLVNGLPLVQIELKKRGVAVREAFNQVHRYSKESFNSENSLFKFLQIFVISNGTDTRYFANTTKRDKNSFDFTMNWARSDNHPIKDLKDFTATFLQKKRITERFAALQRVRCEYAADYAAVPDCRRRTHSVENQFGAGEELEQTGKRRLCLAYHGQRQNADQLGGASGDGIGVYRQGFLRGGQEGFGLPDDEGIPAFFARQRKRFGKHGGFETQFGKRRQQNHRYHHPKAEQPDEEGSAGLSPAGCLYFRRMPPLAIRRSAKKSEKEIKILPVRLYRYADFSRKRFGRGNHGGRVRAVAFLCDYRCHPRKSIEIQSGLQRCAPAVQSRGSGTGEETECCRKPPSPAAPRTHPRNHAIYPEPVQAENAPPECGRRLQRHVCGQQRGCGEVLLRSVQNTTGRQPAPAESGHHFFLCGQRRAERRRNCDLTGSDGRQRERIFAGCHQRLQRLFQNQFRHGQQSLSKLLPRFGKTGEKSGSGFADCGRHVFDGFRADAEHAVRRKPALSRPDAGVFAHQPHLRCHQNLRQYCLLPRFGAGNHCDYPVRRQTHQKRGAGKKLRRIHERLYRQPDRRSAARLFGCGKRVATFPRTRRNRNGKRQKRFCQTLRRIPAGGKRIAELRICRAARVAECGRGGRRCDEGVSRKILLERRRAGNAASADTVKGGAGLPFRLQRHPRLVAPPKSRRTERTVKNRLGRCGFGGFAQITGNQSGLHPATGFRTPQKNQRQSGAGGRNPPHHPRQHRPPRQRGSDCGFHQRYGFGQSTRRSRHTGNLLHLRARGDAARSGRIDCRRRPERNRRQTLFDRLAQTRLCQRKRHGTDRNPAENESAQPAISDEETKCFSKDCGVCGEVCRNRDRY

SEQ ID NO: 1865 - protein, 121 aa, Neisseria meningitidis
MFKRPEEIIVLILAVLWIAGTYFLAALFGADAYTVLKITALTLLWSAASFLLWQKNLSRHIWPLLLGCLTACWWPYLNQSVAPGSLPWYASWTFKTILALIPVTAGYLFKWKQYRQRKTKP

SEQ ID NO: 1866 - protein, 63 aa, Neisseria meningitidis
LPKFGECPLPNPPPRGRGQVAADFAVAGGLRKNARNINSGNFSGSLYRKAGGTNAANVFSDDL

SEQ ID NO: 1867 - protein, 97 aa, Neisseria meningitidis
LHKQVQHITTKLFYFKITDISFFIDFKFHIFNILGILFQRKRNRLIKTIPTIHSDKTARNIRFPISTTIRYRTPRCRFRLHIRQNFIRKENVENKKN

SEQ ID NO: 1868 - protein, 124 aa, Neisseria meningitidis
MIMDQYYMELKNKLSNRPILLDNTNDFLFVLVNTVKAMIENTDKSQLSELDKILDGVTSQELKLAYDFCQGKFGQAGFSYRRHPNYFYLSSLIATFPEFELSKADRDYLKGIINFDNYLLYELD

SEQ ID NO: 1869 - protein, 62 aa, Neisseria meningitidis
VRNARMRFSRFELRGRLKTEKLFQTTFLLTSCHSNRTKAAYLHIHIGNTGEIFCKFYEYFTC

SEQ ID NO: 1870 - protein, 75 aa, Neisseria meningitidis
MKVYVFKISNENGKLKIELPEIPMGKQIDEVDLIAGLTTEFIASMLRDAQKDRRKFVIDASNQLAAIQTYQKIFN

SEQ ID NO: 1871 - protein, 74 aa, Neisseria meningitidis
LQKFYVIDFLSLKSIFLNKFALKYSGLNLNQDKATKPQTVQIVRQGEATPYWFKFNPLYRKFIQWIDREENKVV

SEQ ID NO: 1872 - protein, 51 aa, Neisseria meningitidis
LYAGHYGGNTVWEAAASRGIGTAGDAPMPSGVKAGQSAVWKKAMESVGRRS

SEQ ID NO: 1873 - protein, 64 aa, Neisseria meningitidis
LRQAFQTAFLKCVYLWCSKRSSESAASAKLKRSINEVKICLNLKGSLHPNPLSPWERARTRLAN

SEQ ID NO: 1874 - protein, 60 aa, Neisseria meningitidis
MCEMSFGRRNTDWQAWGQHRRRATKFMVKRNREQEVAEYQAQFEDKDGKGRLKTEGNKDE

SEQ ID NO: 1875 - protein, 97 aa, Neisseria meningitidis
MTAKGQMLQDPFLNALRKEHVPVSIYLVNGIKLQGQVESFDQYVVLLRNTSVTQMVYKHAISTIVPARSVNLQHENRPQAAPTSTLVQVETVQQPAE

SEQ ID NO: 1876 - protein, 88 aa, Neisseria meningitidis
LKRQTVNQATACVRTAHTLHVDFEVPCNSQVGCVAQPRTRCWVCRLRLAAAETPEEKAKDAAEEAKEEAKDAAEDAKEAAEDAKEEAK

SEQ ID NO: 1877 - protein, 68 aa, Neisseria meningitidis
MNIIGKLKEAASYFLTKLIGENPSNEQVNRALIQMPNVRPIHTYPRPNLRNSGVAAAKRAARKRKNRH

SEQ ID NO: 1878 - protein, 325 aa, Neisseria meningitidis
MHTPLTYIDLFSGAGGLSLGFEQAGFQQLLSVEMESDYCQTYRTNFPHHQLLQKDLTTLTEQDLINCLNGQAVDLIIGGPPCQGFSMAGKIGRTFTDDPRNHLFKEFVRIVKIVQPYFFVMENVARLYTHNSGKTRIEIIQAFQNIGYSVECKILSAADFGVPQIRSRVIFIGRRDKGKISFPEPLQISHQTVGSAIGHFPKLAAGESNPHVANHEAMNHSAQMLEKMAFVKNGGNRNDIPEPLRPKTGDIRKYIRYNSNKTSRLYYRRYAQSFSLTESGVNRSISCLTIFPFYFLRQQNCPAAAGWRRTAFIGKSYCKYFKNEK

SEQ ID NO: 1879 - protein, 1475 aa, Neisseria meningitidis
MRFTHTTPFCSVLSTLGLFAVSPAYSSIVRNDVDYQYFRDFAENKGAFAVGASNISIQDKQGKILGRVLNGIPMPDFRVSNRQTAIATLIHPQYVNSVKHNVGYGSIQFGNDTQNPEEQAYTYRLVSRNPHPDYDYHLPRLNKLVTEISPAALSSVPLLGNGQPKANAYLDTDRFPYFVRLGSGTQQVRKADGTRTRTAPAYQYLTGGTPLKVLGFQNHGLLVGGSLTDQPLNTYAIAGDSGSPLFAFDKHENRWVLAGVLSTYAGFDNFFNKYIVTQPEFIRSTIRQYETRLDVGLTTNELIWRDNGNGDSTLQGLNERITLPIANPSLAPQNDSRHMPSEDAGKTLILSSRFDNKTLMLADNINQGAGALQFDSNFTVVGKNHTWQGAGVIVADGKRVFWQVSNPKGDRLSKLGAGTLIANGQGINQGDISIGEGTVVLAQKAASDGSKQAFNQVGITSGRGTAVLADSQQIKPENLYFGFRGGRLDLNGNNLAFTHIRHADGGAQIVNHNPDQAATLTLTGNPVLSPEHVEWVQWGNRPQGNAAVYEYINPHRNRRTDYFILKPGGNPREFFPLNMENSTSWQFIGNNRQQAAKQVAQAENARPDLITFGGYLGENAQTGKAAPSYSKTNIEWVNGPNTPHKPSPYTNTPTRTGAGVPTITASKKAATPASTSHGMPTAPKTGNFSDMTGEAAIEKTRHIANAAVYGRPEYRYNGALNLHYRPKRTDSTLLLNGGMNLNGEVLIEGGNMIVSGRPVPHAYDHQAKREPVLENEWTDGSFKAARFTLRNHARLTAGRNTAHLDGDITAYNLSGIDLGFIQGKTPECYRSYHSGSTHCTPNAVLKAENYRALPATQVRGDITLNDRSELRLGKAHLYGSIRAGKDTAVRMEADSNWTLSQSSHTGALTLDGAQITLNPDFANNTHNNRFNTLTVNGTLDGFGTFRFLTGIVRKQNAPPSNWKGTAAAHSKSTSKTPDKNLKQPNRLHLASIRNTATKPDSPSKTAMPIWVPTATSSAKTTTDTACTTRSKRPNFKLKPRVRNMSATNRHTTNYRQPTSADRFNMTLTRPGRHYRPGRTVKPNLPASTAKSNICPPNNRQTRPAFRVPKTCVPHKDTVSISAVRLPKPPTRTTHSSKPNWIRINVKWPNPNLTKHGKAAMRKPSKQPGTPTTHSTVCPDKSTVKPALPASVCRTWPNSAGRPTPPFPNRPPTIPAGNRRDAASTATLPIRSSKTSGWKPVRNKPTTIAAHTVPTNKLPTMHISASKPASPTVSVSVQFPMSAQTTVLMKAYPPETAATAHICSSKGKTAHSLPRQIATATAVPDLPIMTGLPSAATHGMQASTPASKSIPASTSDPMPASVTAATATGTYSTAQRTARRKSKPHGMPASVSIKPSNWVKPSPPPSAAITTIPAKTAVPPSASTTVPYCSKPPTAHCIPCKSTPDTKAGTPNFMPLTAKTATPPATNKQESKATTG

SEQ ID NO: 1880 - protein, 64 aa, Neisseria meningitidis
MSYDSKRLVIGLASSALFELSESDNIFRMEGAETYRQYQREKQNHPLKKALSFHLLKNFCQSMK

SEQ ID NO: 1881 - protein, 40 aa, Neisseria meningitidis
MRPLQNSPKFPPRHLGDFGEFCKGLGQYFERSARKSVWKP

SEQ ID NO: 1882 - protein, 270 aa, Neisseria meningitidis
MADILPSDKRRQPPKTKGSTMNIIEQEMKHSSLRKVDAEIAKIIADAHKINAESVKIAQESRWYPMMAATGLVTAIAAVLALIFKFAPQAPRGALSPEQPEQNEQSRTIQPLPRMDYRARRRKPFHYPLPLSPPDCQNPQADRQRMPGRALPPFRKRHHPLRFYFFRRKTGRRSPICRRPYRNLPPGSQKNMRNKINRNDMELGYTPYNLRTLRNRCKLTQAELAQIVGVKHYIQVGRWEAEPDTETRRADMPLEKWRQFLDWTEKTNAV

SEQ ID NO: 1883 - protein, 69 aa, Neisseria meningitidis
VGCRVCFSPLHQKFLENRRESAVLVSAGTVEMGNIDGIDGSGGLQPTACILESPYHSATRAHPRHTTVA

SEQ ID NO: 1884 - protein, 40 aa, Neisseria meningitidis
MNKAMPSEGLSDGILRYFVKVGMTVRVFLTGWIFKVLYRV

SEQ ID NO: 1885 - protein, 89 aa, Neisseria meningitidis
LYCLRLRRLVLIFVNPLYADAGDVYCVYNIRLKQYTACQVTRVEEHGGKKTHATLLALDWQGNKPLGAEELADLKPLYKDLKNNIGNIV

SEQ ID NO: 1886 - protein, 283 aa, Neisseria meningitidis
MTLLGIKLKQTQQLNQRLQQSLRVLQMSGIELEREVENWLSDNPLLERKDTDEFSDARFSHYTAPARQIGGDEGEDMLSNIAGEQDFKQYLHAQVCEHPLSDQEASCVQILIDFLDEQGYLTDSIEDILDHTPLEWMLDEAMLKQALTALQKFDPAGVAAADLNESLILQIERLGECAAKPAALHIVRNALDSIDGNRSQTLARIKKHLPQTDSGTLEAALDLIASLNPFPAAGFASSTPTPYSDEALANLLAFRGMEVSRRTIAKYRESLEIPAAHKRKTAE

SEQ ID NO: 1887 - protein, 702 aa, Neisseria meningitidis
MKISFHLALLPTLIIASFPVAAADTQDNGEHYTATLPTVSVVGQSDTSVLKGYINYDEAAVTRNGQLIKETPQTIDTLNIQKNKNYGTNDLSSILEGNAGIDAAYDMRGESIFLRGFQADASDIYRDGVRESGQVRRSTANIERVEILKGPSSVLYGRTNGGGVINMVSKYANFKQSRNIGAVYGSWANRSLNMDINEVLNKNVAIRLTGEVGRANSFRSGIDSKNVMVSPSITVKLDNGLKWTGQYTYDNVERTPDRSPTKSVYDRFGLPYRMGFAHPNDFVQDKLQVWRSDLEYAFNDKWRAQWLAHRTAAQDFDHFYAGSENGGRIKRNYAWQQTDNKTLSSNFTLNGDYTIGRFENHLTVGMDYSREHRNPTLGYSRAFTASIDPYDRASWPASGRLQPVLTQNRHKADSYGIFVQNIFSATPDLKFVLGGRYDKYTFNSENKLTGSSRQYSGHSFSPNIGAVWNVTPAHTLYASYNKGFAPYGGRGGYLSIDTLSSAVFNADPEYTRQYETGVKSSWLDDRLSTTLSAYQIERFNIRYRPDPKNNPYIYAVSGKHRSRGVELSAIGQIIPKKLYLRGSLGVMQAKVVEDKENPDRVGIHLNNTSNVTGNLFFRYTPTENLYGEIGVTGTGKRYGYNSRNKEVTTLPGFARVDAMLGWNHKNVNITFAAANLLNQKYWRSDAMPGAPRTYTARVNYSF

SEQ ID NO: 1888 - protein, 120 aa, Neisseria meningitidis
MKLPRNRFSLLSALWFAGSIYSLLFKAADTAPPPFPHFDKAAHLALFFAQIWLLTKAFKTGKLPIPYRSLMVFALCFALFSECAQAWFTATRTGSLGDVLADMAGTVLALFAARAADRPD

SEQ ID NO: 1889 - protein, 90 aa, Neisseria meningitidis
MFTTNDLRHFLEGLAILFSIGYWDTMLLLLWFLVRFAYKKPRQNPFRQPDRRRYPDAVCLDYSQTILPEQRRNTGTRRVGQKIQRSRSRV

SEQ ID NO: 1890 - protein, 100 aa, Neisseria meningitidis
MTWVGGSGNAQQSSYYCEICESAGLNDTGNPDKSLGLPNNTFSNPPGWGATIGALAGSRIGMPEFGTFASHAIENFDWSWYRRYREIAETIEREYSGGLP

SEQ ID NO: 1891 - protein, 73 aa, Neisseria meningitidis
MGGKVQHNKGKIRDNALKALVKSDLFRHKVERKRKGKGSYNRQEAKKWRDGFDTVPPFLCLKHGSFRRSRRSL

SEQ ID NO: 1892 - protein, 65 aa, Neisseria meningitidis
MTAMPSEPPFRRHFTHQNRKTAPKIIITRHNGKPDTKPNTAAKMPSEAVGATILIWGITFLNHPF

SEQ ID NO: 1893 - protein, 67 aa, Neisseria meningitidis
MPSEACLVFRRHFLRLKQRIGNPALPVHGNLHLKTICIPNHTPIPVSVICTLSVLGNHRFFAYNSRI

SEQ ID NO: 1894 - protein, 65 aa, Neisseria meningitidis
MPSENRSAGVCGALYAVLQDKAQGRAAGCIVATVFLPDGVKNTVATPTDNEKREQCRLNRVLRRA

SEQ ID NO: 1895 - protein, 55 aa, Neisseria meningitidis
VPEQARARPIQTAMTLCRRFGAGWRHTRRLPRFISHRSSETRNPPGPTCGMKRLS

SEQ ID NO: 1896 - protein, 357 aa, Neisseria meningitidis
MKIVLTTSMAGLGGTETATVRLGRLLRQHGHDIMLASSDGPLLKEAQALGIRWQPVDFYRGGLFGYLKGMIAYARMLRREQPDIIDCQMARVVPACAIAAKIVSPKTKIIYHSHGLDAATYPKIAKLFDKLGVYIIGNCKHEREKLIRHGFPADRIVYAYNALPPPPEFPFWKTVKGCVMLGTLSRLDTVRAVHLMLDIFKKMVDRDMPVRLNVAGIGEEMDNLKAQAKRLGIEDKVTFLGGVRDLTAYFKDVDILVNTPHCIGDHGAGVGNNILEAGLYDTPVVTYNMGGISEMVITGETGYCFPFGEDEAFIEAVDTLVKQPELREKMGKALHKHVETLCSDDEIYRTTMAAYDM

SEQ ID NO: 1897 - protein, 768 aa, Neisseria meningitidis
MKPLQMLPIAALVGSIFGNPVLAADEAAIETTPVKAEIKAVRVKGKHNASTTVERVKAKNIQEQMIRDTRDLVRYSSDVGVSDDGRRMKGFAMRGVEDNRVGISIDGVALPSSEENSLYARYGNFNNSRLSIDTELVKGVDITKGADSFESGSGSLGGNVNYRTLDARDIVLPEQNFGALLRSGYASKNREWANTAGFGYAGNVFDAVVLYSRRRGHEMKSGGDVVDFVGFGELDKQDQAERGSARIHPDPSKHNNHSYLVKLGWQPVDAHRFGFSVNGQNNSNYTYEKTYSLTSYWREADDVQKRSNINLNHEWTPDSSILSLLRTDLDYQKTRNGAINYKGDMVRTGDWRTGYQYHNGFMADRDERNMDTKYKRITFRLDSQPFSLWKGEHRLSFKTFASRRDFENVNDDLDFNSTGNITGRKHYTIMRPMKTDQIGFSLQDKIAFGDKLSVNAGVRYDHEKVKPQAFKPDTPCLSTCVNDGNPSARSFNTWNGVLGLDYLFNDTWRAAYQINTGHRVPTASEMYFTYTSPYGNWIANPSLKAERSLNQTLSLRGKNDKGLLDFSLYQTRYRNFLFEEEKTYQVPNEYYNEHSCYYNPKYCNPTLTEIGQQMVNIDKARVRGVEFKGELNLHQVMSVPEGFKVSGALGYSKGKLSGERGSLLSIQPLKLVLGFDYESPDERWGIFSRVSYMGRKKAKDAQVIEQKSYCTSYKLDPWTGKETDDCAVALQYRDDKIDFRWLNKAATVVDVFGYYKPVKRMTFTGGRL

SEQ ID NO: 1898 - protein, 261 aa, Neisseria meningitidis
MNPFLNTAFKAARRAGQMMIRAAGNLDAVKTDSKAFNDFVSDVDRNSEIILVEALKEAYPHHKITCEESGSHGKAAAEYEWIIDPLDGTTNFLHGHPQYAISMALLHKGVLQEALVYAPERNDVYMASRGKGALLNDRRIRVSNRIELNRCLIGTGFPVVDQSMMDKYLVILKDFLAKTAGGRREGAASLDLCAVATGRFDGFFEFNLKPWDIAAGALIVQEAGGIVTDMSGEDGWLESGDIVAANPKVLAQMLKIISAHV

SEQ ID NO: 1899 - protein, 182 aa, Neisseria meningitidis
LNWLLTGKGLPYLDKARLENAGAFSVSRNSDGITDTMGNPVDLSEFVFVPRYNVAAAAGYGAPVFGEEPLFCLAFRKYWIDNYVTKQPEKLSVITVKGDSMEGVLNHGDSILINHAKTDPRDGLYVLRIGNDLFVKRVQRIPGKLLVTSENPRYAPFEIDFSNAQDDIAIIGRVEWYGRSID

SEQ ID NO: 1900 - protein, 137 aa, Neisseria meningitidis
LTEEMMKKQRHILCVGCLYIILKVNVFPNTGWMEASKGMQGMSFSTFGYADAPGYTFSRIGHTLIFLLGKTTGTRTTVSDSSHNVYYVKLYICANNSKALSCCLMLCQFGRKLSICAIKRALRWRSSKWVSSWTTTY

SEQ ID NO: 1901 - protein, 81 aa, Neisseria meningitidis
MLKSIELNSHIRNRLAAYLKGRGMDFQTAMREEKGNKEIASIVHSGLPTLVRKLYSEQKMQKFFWEKRDLIADYISRRMQG

SEQ ID NO: 1902 - protein, 473 aa, Neisseria meningitidis
MLFAAAISLLQIPISHANGLDARLRDDMQAKHYEPGGKYHLFGNARGSVKNRVYAVQTFDATAVSPVLPITHERTGFEGIIGYETHFSGHGYEVHSPFDHHDSKSTSDFSGGVDGGFTVYQLHRTGSEIHPEDGYDGPQGSDYPPPGGARDIYSYYVKGTSTKTKTNIVPQAPFSDRWLKENAGAASGFFSRADEAGKLIWESDPNKNWWANRMDDIRGIVQGAVNPFLMGFQGVGIGAITDSAVNPVTYAAARKTLQGIHNLGNLSPEAQLAAATALQDSAFAVKDSINSARQWADAHPNITATAQTALSAAEAAGTVWRGKKVELNPTKWDWVKNTGYKKPAARHMQTVDGEMAGGNRPPKSITSNSKADASTQPSLQAQLIGEQISSGHAYNKHVIRQQEFTDLNINSPADFARHIENIVSHPTNMKELPRGRTAYWDDKTGTIVIRDKNSDDGGTAFRPTSGKKYYDDL

SEQ ID NO: 1903 - protein, 114 aa, Neisseria meningitidis
LFVCFEKCLFPDFAIPIRFCAVRCVLARTCSKSDVVPVFGALIRDADFQYIFLSYNNEGLMSVGQVREIFERFGKYNLVQTEYRRFKADKTENRNHKANSIFEYLHETFAKIVC

SEQ ID NO: 1904 - protein, 102 aa, Neisseria meningitidis
LTPWADAYADLRGKTKVMTTQMCASRDVSKSAKGWSVGIGLNVGKQLTDSVGLEFDPYYRHKTICKPREIVLDGDKTKMGRSKSNEYGFRVTATFYSQLKSK

SEQ ID NO: 1905 - protein, 89 aa, Neisseria meningitidis
MKEYKVVIYQESLLSSLFFGAAKVNPVNFSAFLNKQIPRRLAGRNDGKRFAPYAAVFQTRGLRRHFGAGSCLSSAFMPVSDCLPAGCCC

SEQ ID NO: 1906 - protein, 86 aa, Neisseria meningitidis
MPSPQPSPTGEGEGCSRFCGCRRFERQLRFAAVVSGHLKNKKQPAQPVFLAEPLIPTATTSSLPWERVRERATNCKAYTNSNPTTE

SEQ ID NO: 1907 - protein, 78 aa, Neisseria meningitidis
VRTWLVFWLQRLKYPLLLWIADMLLYRLLGGAEIECGRCPVPPMTDWQHFLPAMGTVSAWVAVIWAYLIIESEKNGRY

SEQ ID NO: 1908 - protein, 108 aa, Neisseria meningitidis
MSALLPAACQHVSDRHGKFRFQILHCQRRQTGSKKRRKRRRICPVPFAGQQDCRGVGIFPFTTLILRDIRQILWEVSAFAYNASYLTNFVNFIKRNKRWLPSTTKLKK

SEQ ID NO: 1909 - protein, 54 aa, Neisseria meningitidis
MNTNQPAVYDPLTRALHWLTVAGFIGILTTIVLWTIYSGLTKIRTRRRSRRQYK

SEQ ID NO: 1910 - protein, 451 aa, Neisseria meningitidis
MSSPSNTNRQTSSRLTYILTIAGATVGFGATWRFPYLVGENGGGAYVFLFCIAMLVIGIPMILVENVIGRRKGVNALDAFGGPMNGKPIAKIWKLVGWMGLGAFGIMAYYMVLGGWVISYIVNIIGGNLNISSPVDGVVTKGFFAEHINSPWEIAFYTLLFVAVNQWILAKGVIGGIEKAAKLMPLLFLFLIAMVVRNVTLPGAMEGVAFYLKPDFSKITAELFVFVLGQVFFALSLGFGVMITLSSYLDKNENLVQTAVITAITNTIIAILAGFMIFPSLFSFGVAPDSGPTLVFQSLPIVFSHMWARSVFAVIFFSLLLIAALTTSLTIYEVLITTIQEKTKIRRTAAITIVLAAIFIFGNIPSILSYGSWKDVVFGKNIFDAFDYISGNILFMLTALGFALFVGFVMKDEAKEELLYKGNHTTVNIWFAYVKYLVPLVILLIFVSNLF

SEQ ID NO: 1911 - protein, 337 aa, Neisseria meningitidis
MIFSIIVPIYNVEKYLRCCVDSVLAENFADYEMILVDDGSPDGCGKICDEYAGKYPHIKVIHQENGGLSDARNAGIRAAKGDYLIFLDSDDYWADTSRSKNARGGGLFDLQQLADKKVDLILHPSSFNYRDIPKGADFSDNDFVRHFETLVEGRYYIANAWTKIVRREIIIKNNLFFPKGYIHEDFPYSLQLARFIKTFAFYDNPFYQYRVLGGSISHNIKYKNFSDVLTHLDRGVDFLVENKNSPIYGGLQKFVFDNIGYLRSILVRLYFSKNIILIYRKYFSFKEKCRKIFGAKAIRPVFIGKTAFIIGLPILRLLVPPMLYPAIKAVYQKFFSE

SEQ ID NO: 1912 - protein, 133 aa, Neisseria meningitidis
MANRFRQRKSAYRRLSGKPLFSDGIAGNPCRGRKTLSYNLSRFKISIRSEMQKISFNLLKPATPKIGKRRPGLNGAPHIPMPSPRYLPASPEMPGNNIHPAKIRNNTPGGRQSQTAPQSIRHQKNKPPPRASS

SEQ ID NO: 1913 - protein, 218 aa, Neisseria meningitidis
MIKNLYKLINYAALIGFAPNIVFAWPMFVDPPSYQNIHVRSWKARRDSGIVKQDLDFSCGAASIATLLNNFYGRHYSEAEILDKMDKTQMRASFDDMQRIMPELGFEAQGYALPFEQLVQLKIPVIVYLKYRKNNHFSVLNGINGETVLLADPSLGHVSMSKSQFLSAWKTRDGEMEGKILAIVPKNTDFVRNQMFFNKNPVRQTRFTVEQIQMRQKR

SEQ ID NO: 1914 - protein, 378 aa, Neisseria meningitidis
MDLSIVVPIYNVESYLEACLSSIEPILSNENVELILVNDGSKDGSEDICYKYIDKIQTTNNKQQTTNNKQQTTNNKQQTTNNKQQTTNNKQQTTNNKQQTTNNKQQTTNNKHRTPNIKYIYQDNQGLSEARNTGIKNSNGKYIVFIDSDDFINCQVLLDFLSKDDIDMPDVVFLNAVKYDKGSVSYFGEDYQPEKILNQSKVEVLKGLCRFRKFPGSAWNKIIKRELIIKEKLFFEKGIYSEDIEWSMRLFNAATTFFYLDGCYYYYRQGRKDSITGTVSEKSIKSLLYILEKNAEMEFDRDISSYLYSFLSYEYLVLLFIMTSKNIECDADIKRRAYHLRFMLLKSNKLIYKLIFPIITLFGVDITGRILKVIRGNV

SEQ ID NO: 1915 - protein, 171 aa, Neisseria meningitidis
MPSEAVQTAFLKDKNTMTDTDTQADRFEQMMWQAVDKLFEQHDGKLESMDGREQELVLIWRAEADIGNGGILQFVCNWGFPAAEKTCSVLKKCAIHSAMLIHRAADALRKEIRHLQSEGKNLKEMWDITKHLDNKTASLPNSLDEQYWQDPDKLYLPGWQYYSGNPVQTLF

SEQ ID NO: 1916 - protein, 1029 aa, Neisseria meningitidis
MNQNHFSLKILTVMLLSAYGGSFADGVVPVSDGNTVSLDTVNVRGSHALSGKTEKTRSYTIDRMSTATGMRIAGKDTPQSVSVITRSRLDDKAVHTLEEAMKNTTGVNVVRDSGLQTRFLSRGFYIDQIGEDGITVNVAGRSGYTAKIDVSPSTDLAVYDHIEVVRGATGLTQSNSEPGGTVNLIRKRPTASFKHTGELTADHRGSRRAVLDVSGSLNKANTLRGRLVGAEEYKKSFKDRVWGRKHMVYGIAEADAGDSSVLTLGGMYQKSREVPDFSGIILSCENQKTAPFSSTPACNRPLQLPRNTYLGEDWSRLSADKYNLFSGFKHVFDNGWQLNAEVSYTKNESDAKVGQFFLKNEHAAGLSGEDAVGFLTEKNEVIPFEPKDKALEKLKAYRDETAKEYRERKDDFVKNRFDNTAFEQYRSRRAAERKAGFDECMSAPFALDFICQGSWGDPGVDADKAEFVDKALAKEGIFNNAAQRFPNSLYDSSFNRKATANRRYSYMPLRHTKDDRQWGIKLDLTGTYGLFGREHDFFVGYAYGDEKIRSEYLEIYERRHRVRPNTGATHGVYAGSCQEEPDGDLSSPLVRGHKEPDWKAYDEKGNRTVYAEECRNAKKIKTEPKLDAEGKQVYYYDEYSGSRTPVYVDVYELDEKGNKIQETNPDGSPAFTGFSGTVPVWKTVKVADDHVPALYNYAKYLNTNKTHSLTAGTRFNVTGRLHLLGGLHYTRYETSQTKDMPVRYGQPASDFQTASSIKADQDHYTAKMQGHKLTPYAGITYDLTPQQSIYGSYTKIFKQQDNVDVSAKTVLPPLVGTNYEVGWKGAFLQGRLNASFALFYLEQKNRTVVDFGYVPGAGGKQGSFQTVAKPIGKVVSRGAEFELSGELNEDWKVFAGYTYNKSRYKNAAEVNAERLAKNTGADPYNFSNFTPVHIFRFGTSFHIPNTGLTVGGGVSAQSGTSSLYNIRQGGYGLIDGFVRYELGKHAKLSLIGTNLNGRTYFENNYNRTRGANNFYGEPRTVSMKLDWQF

SEQ ID NO: 1917 - protein, 387 aa, Neisseria meningitidis
MNITIVAPYCSLPSEPYFNRFWYLAERLSQSHDVLLITSRFRHYDKSFRRHEDAAATSNGRLRVKLLDEPGYRKNVSLARVASHRVFVRNLARWLHSPQAAEQDIVYSAYPLMATNLLLGKHKARLGYKLIVDVQDVWPESFSSVVPFLKKVPHKLLPFASRANRAYRCADALVAVSQTYLDRAKEANPNVPGEAVYIGTDFAAIAPPRVRSKTTRLFYLGTLSYSYDVETVCKGVRKLLDDGENVELHIMGGGPDLEKLKQYENRAIKFYGYLPYSEMMSIAKGCDIAVNAIHSHAMQSVTNKLSDYMALQKPILNSQTNAEVLSLLNLLPHENYRSGDVDSFVQAAKDILKRKNDPVQSDEIVRRFRRDISYRKIVNLIERLANE

SEQ ID NO: 1918 - protein, 430 aa, Neisseria meningitidis
MQFSAFGEKFTQHSGILQLMDDLGDALKSDKPVNMLGGGNPARIPEIDRAFADIFSKLAAEHAVENIGNYSNPQGDAALIDALTAFLNREYGWNLTAGNIALTNGSQNAFFYLFNLFGGKFKLSDGTSAEKAILLPLAPEYIGYADVHIEGRHFVSVKPKIENVEHEGETGFFKYRVDFDALENLPELKEGKIGAICCSRPTNPTGNVLTDGEMARLDALAQKHGIPLIIDNAYGMPFPNIIYSDVTLNWHENIILCFSLSKVGLPGVRTGIIVAAPEVVKAVSSLNAIVNLAPTRFGAAIAAPLLESGEMKRLADQVIRPFYRNQAQTAVSLLKRELGAYPMKIHKPEGAIFLWLWFENLPVSSQTLYEMLKAEGTLIIPGEHFFVGIDTQDYPHAGECIRMSIAQDAQTLEKGIAAIGKTVRKLYDNV

SEQ ID NO: 1919 - protein, 431 aa, Neisseria meningitidis
MPAPDLGFALSLPPKKAIEWLESKKVTAESYRNLTASEIAKVYTIARMTDLDMLNDIKTSMVESAKSGQSFDDWRKGILNLLSNKGWLHPNGHNGKDIIDPATGEVFGSPRRLETIYRTNMQTAYNAGQYQGYMANIDARPYWMYDAVGDSRTRPAHSAIDGLVYRYDDPFWATFYPPNGYNCRCSVIALSERDVERQGRIVGQSTADNLVETHKIYNKKGDSYPTTAYKAPDGSLYTADKGFGYNAGRMNYRPDLDKYDRALAHQFAKAEMGGADFKTSFKQLEKEFYEVKQRLDIDGKPDKEQKIKIRNALSRQLKFAAGVLSKEMQELAGMTRATVWLSDDTLVKQVDSREGQNFDDSYYAFLPDMLQNPEHVIRDNRELIFTARYKGSALWAVLKYIKEVDEIYLQSYRISNDKEIAKFMAKKKVLK

SEQ ID NO: 1920 - protein, 171 aa, Neisseria meningitidis
MKRAKKYPFLTLQRQRFHLNFENASSAAGIPAERDFYRWAWSALKNEYRRADISLILLDEEEARAYNRDYRGKDYATNVLSFALNEGETLPGQVSEKLYGDLIICPQVVLKEAAEQGKTPERHFAHLTIHGVLHLMGYDHIEDDEAEIMEAEEIRLMRAAGFPNPYQEDGH

SEQ ID NO: 1921 - protein, 705 aa, Neisseria meningitidis
MGKANAFTAPITVVNYDEQALNNTEARTLVDAVAKKDASVWQFGGESNTLTGLYFRGYQLDSRQFSVNGLAGMYGTQGTASVQVGSAQLIKGASTAVNGMDPEGAVSGSVNIETKKAADEGNRKIGLGWFSNNRAQGTFDLGQRFGENKAFGVRANGKLRHGDTPRHGYSEDNKEFAVNADYRGETLRVAFDSIYAKRKTNGGRARMQDIQNAGGRLFGAPDGKTNLLPSWNWQNTAGQTNMLTFEWDAFDNAQITGGIGYNKARYYGTLISPTVCLNATSTCTDMQNTNASGKVTARNYDYNTGTARLTDQYFRTLSMNLTARGEFETGPVTHNWSMAFDRVIRQRKTINGSGNGNSKIEVKANENIANQLASFTADYPNSWENSANLDANIKVNSLALSDTLGFVDNKYRLTLGGRFQTVEYTDKKSQSGDAKRFSPMLMAAWVPQPDLVVYGNYMEDLEPADIKTDDSGETTMAKPRVSRQFEVGVRKNWGNFVTTLNAFQIKRPDWRGHTTTKTTKGVTTTLTYGNNSDFARYKAQGGVAGDEQGMERNRGIEFNAYANLLNKTLRPTLGLMYLQSTVKEYPNSRDMLVNGVQVANPRVIAKAGLEWDTPFAKGLTLNGNVSYFGKSYQDTQKQYAFPSYTLIDVGARYKTKLGKNTLTVSSSVENLFNKNYWQVQRGQYDRSFAVVGMPRTYWLKAELDF

SEQ ID NO: 1922 - protein, 117 aa, Neisseria meningitidis
VITLRIVWAVANRAKRPQSDSKAAAAGHGILYLLMLAVPVIGMIRQYGSGRGPLKVFGVEVMQGSPEKIEWMANLGNTFHGNLGLLLFAAVAGHVAMVVAHRVQGRDVLCRMTGRVR

SEQ ID NO: 1923 - protein, 331 aa, Neisseria meningitidis
MSHETENFCPLYRRHHRHDASSEGLRPDTALVGQALAPFSNGMDFDWHVCGTLIDSSAVQLQNWCAWLDIIATALPQYDGVLVLHGTDTLAYTANLFALALQGLDKPIVLTGSQWPYNAVGSDAPRNLATAVAAFPLGLKQTLIAFDGKLYPAVGSSKVSTETAAGFDNPHFGALAEWDETQGWHNVRIPNQDTADVSDGLKIRYPDPQAKIAVRTLIPGFAVQELADGLGQLPAHALILQSYGHGNTPADEGFIRAVRDFTRQGKLLLNISQVRQGRTAAVYAQGNAFRNSGIINGGKCNLETATALMTLAVSQGWGAEDVEKELARLKL

SEQ ID NO: 1924 - protein, 203 aa, Neisseria meningitidis
MNFTRLLNQVLSTVQKGNTFSDSPLNSFGGGALVAGVASMLLNGKNRKTITKIGSTAALGYLAYRGYQMWQQNKGRATVTQSDFQPAGETEETYSRTVLRTMIAAAASDGMIDEAERRTIEQESGTDPETAAWLAAEYRLPASIEDIAAAVGNDEALAAEAYLAARLVCADLSRKETVFLARLSQALELDDNLVENLERQLGF

SEQ ID NO: 1925 - protein, 508 aa, Neisseria meningitidis
MTLKASKQASKQASKQASKQASKQASKQASKRSGCNTSQTSLNNIFNKKLHVKIENKSHVAGQVLELTKMTLKDSLWEPRRHSDIHMLETSDNARIRLNTKDEKLTVHKAYQGGADFLFGYDVRESDKPALTFEDKVSGKSGVVLERRPENLKTLDGRKLIAAEKADSNSFAFKQNYRQGLYELLLKQCEGGFCLGVQRLAIPEAEAVLYAQQAYAANTLFGLRAADRGDDVYAADPSRQKLWLRFIGGRSHQNIRGGAAADGRRKGVQIGGEVFVRQNEGSRLAIGVMGGRAGQHASVNGKGGAAGSYLYGYGGGVYAAWHQLRDKQTGAYLDGWLQYQRFKHRINDENRAERYKTKGWTASVEGGYNALVAEGIVGKGNNVRFYLQPQAQFTYLGVNGGFTDSEGTAVGLLGSGQWQSRAGIRAKTRFALRNGVNLQPFAAFNVLHRSKSFGVEMDGEKQTLAGRTALEGRFGIEAGWKGHMSARIGYGKRTDGDKEAALSLKWLF

SEQ ID NO: 1926 - protein, 456 aa, Neisseria meningitidis
MPQNTLNIVILAAGKGTRMYSKMPKVLHRIGGKPMLGRVIDTAAALNPQNICVVIGHGKDQVLNAVKRDVVWVEQTEQLGTGHAVKTALPHLAAEGRTLVLYGDVPLIDVETLETLLEAAGNEVGLLTDVPADPSGLGRIIRDGSGSVTAIVEEKDADAAQKAVKEINTGILVLPNAKLENWLNSLSSNNAQGEYYLTDLIAKAVADGIKVHPVQVRASHLAAGVNNKRQLAELERIFQTEQAQELLKAGVTLRDPARFDLRGRLKHGQDVVIDVNCIFEGEVELGDNVEIGANCVIKNAKIGANSKIAPFSHLESCEVGENNRIGPYARLRPQAKLAADVHVGNFVEIKNAAIGKGTKANHLTYIGDAEVGSKTNFGAGTIIANYDGVHKHKTVIGDEVRIGSNCVLVAPVTLGNKVTTGAGSTITRNIEDNKLALARARQTVIEGWMRPEKDKQ

SEQ ID NO: 1927 - protein, 169 aa, Neisseria meningitidis
MNPFETQSVTFAEPIEMLYACHGKVRRFCGQVAMLSDYIAENGCNQLVLQTIRQIAQYFNVAAPLHHEDEEENFFPLLLQYAPQAQESVDELLRQHIGLHDNWAAVSAEFAKLEADNAYVPDEEAFKRFVAGYDVHLAIEEPLFDMGNTFIPKEKLTEIGEIMAARRRK

SEQ ID NO: 1928 - protein, 369 aa, Neisseria meningitidis
MFSDTDISMMENALRLAALGRFSTSPNPRVGCVIAHGSQIVGQGFHVKAGEPHAEVHALHQAGEMAKGATAFVTLEPCSHYGRTPPCAEALLRSGVTRVVAAMRDPNPLVAGKGLAMLEAAGIKTECGLLEHQARELNRGFLSRIERRRPFVRLKCAVSLDGKTALSDGSSFWITGEDARADVQVLRAESCAVLTGIGTVLADNPRLNVRAFPTLRQPARIVLDSRLRLPLDSHLLTDGQSPTYIATLERDEDKLRPYREHAHIRILMPSETADGKIDLHHLMRLLADEGFGEIMVEAGSELTSAFLAENLADEIVLYRSPKILGSGKDLFSLLENRAALSAPPLWTPVSSEILGHDIKTVFRKNGNAF

SEQ ID NO: 1929 - protein, 170 aa, Neisseria meningitidis
MFEQEDEWVSKTQMKKQMNGLQDLGMELTKLSSDTLKKIGLDEDLYEAIVTYKKITSNGALKRQAQFIGRLMRDTDPAPIEAFLAKLRGDDAAHNAFLQRVERTRMELLADDGALTQFMSDFPNADAGKLRTLIRNTKKEQEQNKPPKNFRALFQELKTVMESQGGTGEA

SEQ ID NO: 1930 - protein, 364 aa, Neisseria meningitidis
MKTNLLNYDLQGLTRHFADMGEKPFRAKQVMRWMHQSGAQNFNEMTDLAKSLRHKLNEQAGIEIPKLMMSQKSSDGTRKWLLDVGTGNGVETVFIPESDRGTLCISSQVGCALECTFCSTGRQGFNRNLTAAEIIGQLWWANKAMGVTPKNERVISNVVMMGMGEPMANFDNVVTALSIMLDDHGYGLSRRRVTVSTSGMVPQMDRLRDVMPVALAVSLHASNDEVRNQIVPLNKKYPLKELMAACQRYLVKAPRDFITFEYVMLDGINDKAQHARELIELVKDVPCKFNLIPFNPFPNSGYERSSNENIRVFRDILQQAGFVVTVRKTRGDDIDAACGQLAGQVQDKTRRQQKWQQILIGQQG

SEQ ID NO: 1931 - protein, 324 aa, Neisseria meningitidis
MPSEKNIGFMAGSSRPLWVAFALLLVSCILFMTLNVKGDWDFVLHLRLTKLAALLMVAYAVGVSTQLFQTLTNNPILTPSILGFDSLYVFLQTLLVFTFGGVGYASLPLTGKFGFELAVMMGGSLLLFYTLIRQGGRDLPRMILIGVIFGILFRSLSSLLSRMIDPEEFTAAQANMFAGFNTVHSELLGIGALILLVSAAVVWRERYRLDVHLLGRDQAVNLGISYTRNTLWILLWIAALVATATAVVGPVSFFGLLAASLANHFSPSVRHSVRLPMTVCIGGILLVGGQTVFEHFLGMKAVLSVVVEFAGGLVFLYLVLRHKK

SEQ ID NO: 1932 - protein, 1003 aa, Neisseria meningitidis
LASLENAIRRDIAVKIAGGKANREYYEELARQRGIDIARLNPLLSQLDRHNTQTNRATQSVKQFNNALRQTPAQITDIVTQLAGGQSPFLIMIQQGGQLRDMYGGFGGMLKGLATVISPMRLAVAGLGGGIAALGYAMYQGAEESCEYRKALILAGDAAGITADRMQEIAVSVGAATGGYADARAAITALVSSGKVATDNYEQFARSITLQSQATGQSIDDLVEKYTEIAKDPLKAVVSLSATYRTMTADVYQQVKALQAQGREQDAVALVQRKFSEESEDMAKRVLGNLGLIERAWKDIKESASEAWDAVKSIGRDKTKLDEIAALDSFISQIETSKKHPVTQLFWGEEGERKLQEAYARRARLRAEIDKEAAAAETLRQKQKQNQNRTEGIAELEAVSERYATREQQRQRELLKNDKARKKALDGITDAKKRQEIINKHAANAKLINESFAEKKHERQKEKTDKTSYPTVSNGLRIKPGAEAGGKALGGTYAFAHAMQQMLGDRLFRFGAFRDRYHIGKNSLHNSGLAFDATPSPGMGMKQKQEVVAQMTRYLESLGFKNGQDFNLKLELAGQRNKNGTVATGDHWHFNWRSREAAARFAGGVEGQVKNMAHLGLFKGVEKEPLSGYEKWHEDFNRRAAEAGAKRVLEILNGNRAIGEQLKLLSDPTFGDWTLKQQADARELAEKADAQDSLTAASKKYSDIVKQMTDDSKEKLDDRLFEISLIGKTREEIEKLTLARLWDRQIAKAREEGAPLESIDLLERGKAEGMSNLSQMQKARADSDNDWRGGIESGLKSYIDSFGTMRQAMENATVQTFDKMGDALADFVATGKLDFRSLTVSILQDLSKMLIKMAIVNAMKSALGYADGGIVGGGSTQFDALFSGGGYTGYGGKYEPAGIVHKGEVVFSQRDVRNHGGVAAVERLRLNGYAGGGAVGLPSVLTGVRSAGAGSMQVNITINRDGSTESDSSADTEMAKHLAAAIPGMVEQWYVKNVYRENGTYHK

SEQ ID NO: 1933 - protein, 671 aa, Neisseria meningitidis
MMKLNPQQLEAVRYLGGPLLVLAGAGSGKTGVITQKIKHLIVNVGYLPHTVAAITFTNKAAAEMQERVAKMLPKSQTRGLTICTFHSLGMKILREEANHIGYKKNFSILDSTDSAKIIGELLGGTGKEAVFKAQHQISLWKNDLKTPEDVVQTASNIWEQQTARVYASYQETLQSYQAVDFDDLIRLPAVLLQQNSEVRNKWQRRLRYLLVDECQDTNTCQFTLMKLLTGAEGMFTAVGDDDQSIYAWRGANMENLRKMQENYPQMKVIKLEQNYRSTARILKIANKVIENNPKLFTKKLWSKLGEGEPVKIVACQNEQHEADWVVSQIVKQKLIGGDKTQYADFAVLYRGKHQARIFEEALRGARIPYRLSGGQSFFDKAEIKDVLSYVRLLANPNDDPAFLRAVTTPKRGIGDVTLGKLNTYAHEHECSLYEAAQNEEALATLNNTNRQHLQAFMDMFGSYRAKAETGEAGEFINSLLEEIDYENHLLASEEGKAGEIKWRNVGDLVSWFARKGGEDGKNIIELAQTVALMTLLEGKDEEETDAVSLSTLHAAKGLEYPYVFLVGCEEGVLPHNDSIEEGNVEEERRLMYVGITRAKRQLTLTHCVKRKKQGTWQFPEPSRFIDEMPQEDLKILGRKGGEPIVSKEEGRRNLADIIGRLDSMKKGNPSD

SEQ ID NO: 1934 - protein, 97 aa, Neisseria meningitidis
MKTNDKLNRQIDVLQKQSAAIHNEAYIEMNTLLYRHREVVSVHNRKADYAEKGKERIALFPRGLNGITKLPAAVLLPDRPDCFDMKAVWQMFNRIPR

SEQ ID NO: 1935 - protein, 232 aa, Neisseria meningitidis
MSFEIYRYNPDVDAKPYMQRYELELEPTDVKLLDALVRLKAQDDTLSFRRSCREGICGSDGMNINGKNGLACLTDLRGLKQPVKIRPLPGLPVIRDLIVDMTQFFKQYHSVKPYVVNDNPIDADKERLQTQEERKELDGLYECILCACCSTACPSFWWNPDKFVGPSGLLNAYRFIADSRDTITNERLDNLNDPYRLFRCHTIMNCVDVCPKHLNPTRAIGKIKEIMLKRAV

SEQ ID NO: 1936 - protein, 263 aa, Neisseria meningitidis
LHRLQKVVRHIAQTEIMPRFLNTPSCRKEDGSMLSEADIAAQTAFAAALPLLIDSPMLGEEMSRQEQSALWEQYSGEKGLWIVDPIDGTNNFVNGLPHFAVSVAFVRNGRAELGVIYNPVSGECFYAERGQGAFLNGTRLPLRLVDKKLNEAIAGVEIKYLRSGKLSSRMSTLAPFGTIRSMGSSTLDWCYLACGRYDVYVHGGQKLWDYAAGALIFEEAGGRLTTLEGDGFWSGEHVFKRSVVAALEPKLFERWVGWIRENQ

SEQ ID NO: 1937 - protein, 59 aa, Neisseria meningitidis
MPSERTFCRSDGIFISFSCLPPFENPLRAALFETKQTPAANRTILIRSQSKSGGKLLNI

SEQ ID NO: 1938 - protein, 619 aa, Neisseria meningitidis
MPEYRSKTSTHGRNMAGARALWRATGVMETDFGKPIIAVANSFTQFVPGHVHLHNMGQLVAREIEKAGAIAKEFNTIAIDDGIAMGHSGMLYSLPSRDLIADSIEYMVNAHCADALVCISNCDKITPGMLIAAMRLNIPTIFVSGGPMEAGKVIGVANIQPERRLDLIDAMIESADDNVSNRQVEEVEQNACPTCGSCSGMFTANSMNCLTEALGLSLPGNGSYLATHVGRKELFLEAGRMIVEITKRYYEQNDETVLPRSIATKKAFENAMTMDIAMGGSTNTILHLLAVANEAGVDFKMADIDRLSRVVPCICKTAPNNHDYYMEDVHRAGGIFAILKELDKAGKLHTDVHTIHAPTLKDAIEKWDITNPENTRAIERFKAAPGGVRTTQAFSQNRMWKTLDLDREKGCIRDVAHAYSQDGGLAVLFGNIAERGCVVKTAGVDESILKFTGRARVFESQEDAVEGILGNQIVAGDIVIIRYEGPKGGPGMQEMLYPTSYLKSKGLGKACALLTDGRFSGGTSGLSIGHASPEAAEGGAIGLVHEGDTVEIDIPNRSIHLAISDEELAARRAEMEARGSKAWKPENRDRYVSAALRAYGAMATSADKGAVRDVAQIER

SEQ ID NO: 1939 - protein, 1629 aa, Neisseria meningitidis
MNEGEVVLTPEQIQTLRGYASRGDTYGGWRYLANLGDRYADNAAAIVGKDTNLNGLNLWMKKGVENLWDDTVGKKTRLEKFDRVALQHFSQYVDLINKNNGRLPNTSEIERSYYKAVTYHGVSSSAAIDLVINRSLPDMADGYWALGLGIEAERIHNEQAVNNPNGSERDNRKQLISALDKGFDGSFKEKHFTFLQSVMMDLTKLGVEYTIDGWQKIGGWGNGIINDLYKSVVKREWTGIFEIVNNNIKQGNEAFKNEINSLVHDMKAAGKEFGDDLNTQWNNLTQAAEIIYNDIVDNTSQGIEKGVKAIKELSEKMKNAASDLADGSAEKAKQVVEDLAQAAKEAYENAKSTAEKAAQAAREFFKGLPSFKDLAEKFRDLFPNPEGWIDDGHQCFAPWVKETKKRNGKYHVYDPLALDLDGDGIETVATKGFSGSLFDHNRDGIRTATGWVSADDGLLVRDLNGNGIIDNGAELFGDNTKLADGSFAKHGYAALAELDSNGDNIINAADAAFQTLRVWQDLNQDGISQANELRTLEELGIQSLDLAYKDVNKNLGNGNTLAQQGSYTKTDGTTAKMGDLLLAADNLHSRFKDKVELTAEQAKAANLAGIGRLRDLREAAALSGDLANMLKAYSAAETKEAQLALLDNLIHKWAETDSNWGKKSPMRLSTDWTQTANEGIALTPSQVAQLKKNALVSLSDKAKAAIDAARDRIAVLDAYTGQDSSTLYYMSEEDALNIVKVTNDTYDHLAKNIYQNLLFQTRLQPYLNQISFKMENDTFTLDFSGLVQAFNHVKETNPQKAFVDLAEMLAYGELRSWYEGRRLMADYVEEAKKAGKFEDYQKVLGQETVALLAKTSGTQADDILQNVGFGHNKNVSLYGNDGNDTLIGGAGNDYLEGGSGSDTYVFGKGFGQDTVYNYDYATGRKDIIRFTDGITADMLTFTREGNHLLIKAKDGSGQVTVQSYFQNDGSGAYRIDEIHFDNGKVLDVATVKKLVQQSTDGSDRLYAYQSGNTLNGGLGDDYLYGADGDDLLNGDAGNDSIYSGNGNDTLDGGEGNDALYGYNGNDVLNGAEGNDHLNGEDGNDTLIGGAGNDYLEGGSGSDTYVFGKGFGQDTVYNYDYATGRKDIIRFTDGITADMLTFTREGNHLLIKAKDGSGQVTVQSYFQNDGSGAYRIDEIHFDNGKVLDVATVKKLVQQSTDGSDRLYAYQSGSTLNGGLGDDYLYGADGDDLLNGDAGNDSIYSGNGNDTLDGGEGNDALYGYNGNDVLNGGEGNDHLNGEDGNDTLIGGAGNDYLEGGSGSDTYVFGKGFGQDTVYNYDYATGRKDIIRFTDGITADMLTFTREGNHLLIKAKDGSGQVTVQSYFQNDGSGAYRIDEIHFDNGKVLDVATVKKLVQQSTDGSDRLYAYQSGSTLNGGLGDDYLYGADGDDLLNGDAGNDSIYSGNGNDTLDGGEGNDALYGYNGNDVLNGGEGNDHLNGEDGNDTLIGGAGNDYLEGGSGSDTYVFGEGFGQDTVYNYHVDKNSDTMHFKGFKAADVHFIRSGSDLVLSASEQDNVRISGFFYGENHRVDTFVFDDAAISNPDFAKYINAGNNLVQSMSVFGSNTAATGGNVDANIQSVQQPLLVTPSA

SEQ ID NO: 1940 - protein, 99 aa, Neisseria meningitidis
MKKMFVLFCMLFSCAFSLAAVNINAASQQELEALPGIGPAKAKAIAEYRAQNGAFKSVDDLTKVKGIGPAVLAKLKDQASVGAPAPKGPAKPALPAAKK

SEQ ID NO: 1941 - protein, 290 aa, Neisseria meningitidis
VKGLDYCRQKAEESRSSFLSGFRFLTQEKRDAVTVLYAFCRELDDVVDECSNPDVAQATLNWWRGDLDKVFGGAMPEHPVNQALRQVKETFKLPKYELEALIDGMQMDLVQARYGSFEELKLYCHCVAGVVGCLIARILGFSDDQTLEYADKMGLALQLTNIIRDVGEDARRGRIYLPMEEMRRFDVPASVILQCSPTGNFAELMAFQIKRARETYREAVSLLPDADKKAQKVGLVMAAVYYALLNEIDRDGAQNVLKYKIALPSPRKKRIALKTWLFGFKPRPGTPERA

SEQ ID NO: 1942 - protein, 887 aa, Neisseria meningitidis; identical to SEQ ID NO: 89

SEQ ID NO: 1943 - protein, 336 aa, Neisseria meningitidis
MSKKRVLTGVTTTGIPHLGNYVGAIRPAVRAAQNPDTESFLFLADYHGIIKCHEPEMIHQSTQAVAATWLACGLDPERTTFYRQSDIPEVMELNWILTCITAKGLMNRAHAYKAAVQANAENGQEDPDFGVEMGLFSYPILMTADILMFNANEVPVGRDQIQHVEMARDIAGRFNHRFRELFTLPEVKIDENVELLVGLDGRKMSKSYGNTIPLWENDKKTQKSVNKIITNMKEPGEPKQPDESPLFEIYKAFSTPSETVEFTKMLADGLAWGEAKKLLAAKINAELAEPRERYNELTADPSQIEEILQAGAQKARKEARELLDKVRDAVGIRPLK

SEQ ID NO: 1944 - protein, 367 aa, Neisseria meningitidis
MLILQAERDSLLKPLQAVTGIVERRHTLPILSNVLIEGKGGQTKLLATDLEIQIDTAGPEGGADDFRITTNAKKFQDILRALPAGALVSLDWDDSRLTLKAGKSRFALQTLPAADFPMMNVGEDISATFSLEQERFKTMLSQVQYSMAVQDIRYYLNGLLMQVEGSQLRLVATDGHRLAYAACAIDADLPRAEVILPRKTVLELFKLLNNPDDPIQIELLDKQVRFQCNGTTIVSKVIDGKFPDFNRVIPLDNDKIFVLSRAELLGALERVSILANEKFRGARLFLQSGLLSVVCSNNEQEEAREEIEIAYQGGELEVGFNIGYLMDVLRNIHSDDMQLAFGDANRSTLFTVPNNPNFKYIVMPMRI

SEQ ID NO: 1945 - protein, 158 aa, Neisseria meningitidis; identical to SEQ ID NO: 871

SEQ ID NO: 1946 - protein, 307 aa, Neisseria meningitidis
MLQRTLAKSISVTGVGLHSGERVALTLHPAPENSGISFRRTDLDGEMGEQIKLTPYLINDTRLSSTIVTDKGVRVGTIEHIMSALSAYGIDNALIELNAPEIPIMDGSSLPFIYLLQDAGVVDQKAQKRFLKILKPVEIKEAGKWVRFTPYDGFKVTLTIEFDHPAFNRSSPTFEIDFAGKSYIDEIARARTFGFMHEVEMMRTHNLGLGGNLNNAIVIDDTDVLNPEGLRYPDEFVRHKILDAIGDLYIVGHPIVGAFEGYKSGHAINNALLRAVLADETAYDRVEFADSDDLPDAFHELNIRNCG

SEQ ID NO: 1947 - protein, 223 aa, Neisseria meningitidis
MTTQDELKRIAAEKAVEFVPENEYIGIGTGSTINFFIEALGKSGKKIKGAVSTSKKSSELLAQYDIPVVSLNEVSGLAVYIDGADEVNHALQMIKGGGGAHLNEKIVASASEKFVCIADESKYVSRLGKFPLPVEVVESARSLVSRKLLAMGGQPELRIGYTTFYGNQIVDVHGLNIDKPLMMEDEINKITGVLENGIFARDAADVLILGTEEGAKVIYPCQG

SEQ ID NO: 1948 - protein, 85 aa, Neisseria meningitidis
MQTVTMYTGPFCPYCTMAKRLLHAAGVGHIDEIRVDASPEAFAEMQQLSGQRSVPQIFIGETHVGGFTDLYRLQQEGGLDGLLNP

SEQ ID NO: 1949 - protein, 226 aa, Neisseria meningitidis
MIFQTVWFSDMVLSVSWIVLILILAASAPSAFRSLARYRSALPLCTVIFSAAWCLNASAGGGQLAQMNYHLLAVNLVALMVGTSAAFWLAALLMLPYCLLFAGSAGAYPPNALVLILPALAVNRLSRMLVNRLPPNIFIFIFVNGFLASAAGILLTGLVLTGILDAANAFPSEILWTTALPVFILLAWAEAFLSGISTAIFVALKPHWINTFDDNRYLKSDRGIWR

SEQ ID NO: 1950 - protein, 419 aa, Neisseria meningitidis
MSMALAQKLAADSIAAVAEGRNLQDVLAQIRTAHPDLTAQENGALQDIAYGCQRYLGSLKHMLAQMLKKPIDNPQLESLLLAALYQLHYTRNAPHAVVNEAVESIAKIGRGQYRSFANAILRRFLRERDKLAASCKKDDVAKHNLPLWWVAYLKNHYPKHWHNITAALQSHPPMTLRVNRRHGNAESYLEKLAAEGIPARALDEYAVTLEEAVPVNRLPGFSDGIVSVQDFGAQQAAYLLNPKDGERILDACAAPGGKTGHILELADCRVTALDIDAGRLKRVEDNIARLGFQTASAACADARDLAAWYDGKPFDAILADVPCTASGVARRNPDVKWLRRPTDALKTARQQEALLDALWQTLKQGGRMLLATCSVFVEENDGQLQKFLNRHADAEPIESRVLLPNKHQDGFYYALIQKH

SEQ ID NO: 1951 - protein, 213 aa, Neisseria meningitidis
MTDFRQDFLKFSLAQNVLKFGEFTTKAGRQSPYFFNAGLFNDGLSTLQLAKFYAQSIIESGIQFDMLFGPAYKGIILAAATAMMLAEKGVNVPFAYNRKEAKDHGEGGVLVGAPLKGRVLIIDDVISAGTSVRESIKLIEAEGATPAGVAIALDRMEKGTGELSAVQEVEKQYGLPVAPIASLNDLFILLQNNPEFGQFLEPVRAYRRQYGVE

SEQ ID NO: 1952 - protein, 242 aa, Neisseria meningitidis
MIKFKNVHKHFKDLHVINGVNLEIKKGEVVVVCGPSGSGKSTLIRTVNQLESIESGEIWVDGVNVADPKTDLNKIREEVGFVFQSFNLYPHLTVLENITLAPMKVKGQNAEQAEKKAMELLERVGLAHKKDAFPSQLSGGQQQRVAIARGLAMEPRVMLFDEPTSALDPEMVGEVLKVMKDLAESGMTMMCVTHEMGFAREVADRVIFVDKGQILEDETPEAFFTNPKHERAKQFLQQVMTH

SEQ ID NO: 1953 - protein, 473 aa, Neisseria meningitidis
MRHLPLFSLMLFPASVYAADLDGANLNLLWSLPFALILLSIALGPLFFSHTWHHHYGKITAFWTLLFLIPFSLVFGASAGIHTVAHALVEEYIPFILLLLALYTISGGILVWGDLNGTPKLNTALLAVGTALASIMGTTGAAMLMIRPLLKANQNRTRRVHIVIFFIFLVANIGGGLTPLGDPPLFLGFLKGVDFMWTVKHMFAPVLISTAVLLTAFYFIDNRFFKQESIAQDTPAQQEKPEKIAIFGKWNFLLLSGVVGAVLMSGLWKPEHPGFEILGSRYALQNLVRDVILIALTAVSMAITPKQVRAGNEFNFEPIAEVGKLFLGIFITIFPVLSILKAGEAGALGGVVSLVHDTAGHPINTMYFWMSGILSAFLDNAPTYLVFFNMAGGDAQALMTGTLFHSLLAVSMGSVFMGALTYIGNAPNFMVKAIAEQRGVPMPTFFGYMMWSVAFLTPVFIVHTLIFFVFKLL

SEQ ID NO: 1954 - protein, 91 aa, Neisseria meningitidis
MNEGEVVLTPEQIQTLRGYAFRGDTYGGWRYLVNLGDRYADDAAAIVGKDANLNGLNLWMKKGVENLWDDTVGKKTRLMCISVFWIVVFNL

SEQ ID NO: 1955 - protein, 141 aa, Neisseria meningitidis; identical to SEQ ID NO: 7

SEQ ID NO: 1956 - protein, 215 aa, Neisseria meningitidis; identical to SEQ ID NO: 1509

SEQ ID NO: 1957 - protein, 284 aa, Neisseria meningitidis
MFYQILALIIWSSSFIAAKYVYGGIDPALMVGVRLLIAALPALPACRRHVGKIPREEWKPLLIVSFVNYVLTLLLQFVGLKYTSAASASVIVGLEPLLMVFVGHFFFNDKARAYHWICGAAAFAGVALLMAGGAEEGGEVGWFGCLLVLLAGAGFCAAMRPTQRLIARIGAPAFTSVSIAAASLMCLPFSLALAQSYTVDWSVGMVLSLLYLGVGCGWYAYWLWNKGMSRVPANVSGLLISLEPVVGVLLAVLILGEHLSPVSALGVFVVIAATLVAGRLSHQK

SEQ ID NO: 1958 - protein, 618 aa, Neisseria meningitidis
MLNKIFSWFESRIDPYPEAAPKTPEKGLWRFVWSSMAGVRKWIAALAALTAGIGIMEALIFQFMGKIVEWLGKYAPAELFAEKGWELAAMAAMMVFSVVWAFAASNVRLQTLQGVFPMRLRWNFHRLMLNQSLGFYQDEFAGRVSAKVMQTALALRDAVMTVADMVVYVSVYFITSGVILASLDSWLLLPFIGWIVGFASVMRLLIPKLGQTAAWQADARSLMTGRITDAYSNIATVKLFSHGAREAAYAKQSMEEFMVTVRAQMRLATLLHSCSFIVNTSLTLSTAALGIWLWHNGQVGVGAVATATAMALRVNGLSQYIMWESAQLFENIGTVGDGMATLSKPHTILDKPNALPLKVSQGEIKFEHVDFCYEAGKPLLNGFNLTIRPGEKVGLIGRSGAGKSTIVNLLLRFYEPQSGTVSIDGQDISGVTQESLRAQIGLVTQDTSLLHRSVRDNIIYGRPDATDAEMVSAAERAEAAGFIPDLSDAKGRRGYDAHVGERGVKLSGGQRQRIAIARVMLKDAPILLLDEATSALDSEVEAAIQESLDKMMDGKTVIAIAHRLSTIAAMDRLVVLDKGRIIEEGTHAELLEKRGLYAKLWAHQSGGFLNEHVEWQHD

SEQ ID NO: 1959 - protein, 278 aa, Neisseria meningitidis
MQIIHTIQELRAWRKNAGTVAFVPTMGNLHEGHLALVREAKKRADNVVVSIFVNRLQFGQGEDFDKYPRTLQQDADKLEAEGVAVVFAPDEKELYPNVEQRYNVEPPNLQNELCGKFRPGHFRGVATVVSKLFNIVAPDVACFGKKDYQQLAVIKGLTEDLNFDVEIVPVDTGRTEDGLALSSRNQYLSAAERDEAPRLYRELKAVAESLVQGSLDYAGLEKRAVQSLTEYGWVVDYVEIRRADTLEVARAGDKKLVVLAAACLGTTRLIDNLEIKLP

SEQ ID NO: 1960 - protein, 271 aa, Neisseria meningitidis; identical to SEQ ID NO: 1333

SEQ ID NO: 1961 - protein, 91 aa, Neisseria meningitidis
MTEQENKTSLIEFPCTFPLKVMGAVHPEFEQAVLDTVRLHAPDTQAHHITTRPSSKGNYTGATVQVKVENQEQLDNIYRALTSHELVKVVL

SEQ ID NO: 1962 - protein, 370 aa, Neisseria meningitidis
  misc_feature 365, 366: 'Xaa' is any amino acid
LGTVGGGTAAVLRDNAEEISRRLGREIRISAVCDLSEEKARQTCPSAAFVKDPFELVAREDVDVVVELFGGTGIAKDAVLKAIENGKHIVTANKKLLAEYGNEIFPLAEKQNVIVQFEAAVAGGIPIIKALREGLAANRIKSIAGIINGTSNFILSEMREKGSAFADVLKEAQALGYAEADPTFDIEGNDAGHKITIMSALAFGTPMNFSACYLEGISKLDSRDIKYAEELGYRIKLLGITRKTGKGIELRVHPTLIPESRLLANVNGVMNAVRVNADMVGETLYYGAGAGALPTASAVVADIIDIARLVEADTAHRVPHLAFQPAQVQAQTILPMDEITSSYYLRVQAKDEPGTLGQIAALWHXXHTLN

SEQ ID NO: 1963 - protein, 49 aa, Neisseria meningitidis
MSGATGLDYSAVAAVMECGNIKSKKRKALLEKVRLMELEVLSMWAGEHE

SEQ ID NO: 1964 - protein, 309 aa, Neisseria meningitidis
LGKTRYRFIKSVIYEHMKNGASLVYNHINNEPFSDHIARQVARFAGAHTIVSGYLAFGSDESYKNHWDTRDVYAIQLFGKKRWQLTAPDFPMPLYMQQTKDTDISIPEHIDMDIILEAGDVLYIPRGWWHRPIPLGCETFHLAVGTFPPNGYNYLEWLMKKFPTIESLRHSFSDWEQDRTRINDTAAQIAAMIADPVNYEAFSEDFLGKERTDTAFHLEQFANPNATPLSDDVRLRLNANNLDTLEKGYLIGNGMKISVDELGKKVLEHIGKNEPLLLKNLLVNFNQGKHEEVRKLIYQLIELDFLELL

SEQ ID NO: 1965 - protein, 209 aa, Neisseria meningitidis
LERGAAALSDAELLAILLRVGTRGMSAVDLARYLLQEFGSLGRLMSAEVGKLSAYKGMGTASFTQFAVVREIGRRILAEELQESIVLSDPDTVADYLRFHLGQEKVEVSVALLLNRQNQLIAVRELSRGTVAENTIYIREIVKLALDEYADSLIIAHNHPGGSPEPSQEDIMFTRRLAQAMSLVDVSLLDHFIVTSQSVRSFRQLGLMP

SEQ ID NO: 1966 - protein, 83 aa, Neisseria meningitidis; identical to SEQ ID NO: 925

SEQ ID NO: 1967 - protein, 525 aa, Neisseria meningitidis
MNKFFKRLFDIVASASGLIILSPVFLILVYLIRKNLGSPVFFIQERPGKDGKPFKMIKFRSMRDALDSDGIPLPDSERLTPFGKKLRAASLDELPELWNVLKGDMSLVGPRPLLMQYLPLYDNFQNRRHEMRPGITGWAQVNGRNALSWDEKFACDVWYIDHYSFWLDMKILFLTVKKVLIKEGISAEGEATMPYFTGNQTNEKNNILILSAGRRVELVQDFQTEAARFSDGISVFATDLNPRMSSACHVSDGSFEVPPISADSYIDSIFNLAVRENIGLIIPTIDTELQKLADERERFEAASVHIVVSDSDFIAQCRDKRKTATLFARYGIRSPEIYDRKKLVFPCFAKPYDGSRAIGAKRIDTPADLTPEVLADTKLMFCQFIDIENKFSEFTVDMYYDRQCRLKCAIPRKRLEVRSGEISKGVTCKNSLYQTLLEKMAVLQGARGCITAQFFYNEETGEFYGVEINPRFGGGFPLTYAAGGNYPSRLMREYLGDEEIPFSDDWENNLIMLRYDAKVLVHEND

SEQ ID NO: 1968 - protein, 418 aa, Neisseria meningitidis
MNAAQLDHTAKVLAEMLTFKQPSDAVLSAYFREHKKLGRQDRHEIAETAFAALRHYQKISTALRRPHAQPRKAALAALVLGRSTNISQIKDLLDEEETEFLGNLKARKTEFSDGLNTAAELPQWLVEQLQQHWNEEEILAFGRSINQAAPLDIRVNTLKGKRDKVLPLLQAESADAEATPYSPWGIRLKNKIALNKHELFLDGTLEVQDEGSQLLALLVGAKRGEIIVDFCAGAGGKTLAVGAQMANKGRIYAFDIAEKRLANLKPRMTRAGLTNIHPERISSEHDSRIARLAGKADRVLVDAPCSGLGTLRRNPDLKYRQSAETVANLLEQQHSILDAASKLVKPQGRLVYATCSILPEENELQVERFLSEHPEFEPVNCAELLQSLKIDLDTGKYLRLDSAKHQTDGFFAAVLQRK

SEQ ID NO: 1969 - protein, 240 aa, Neisseria meningitidis
MDKDLYAVLGVSPQAGADEIKRAYRKLAMKYHPDRNPGNPKAEEKFKEIQRAYDTLSDLSKRMQYDASFRRHEERGRQEEAFRREQARREQFYREQMRREQAFRQAFERQASRSCHTYEPSGGGSGRNYVLAAYILFGLGAIMLFMPIVGVIFAYMPIVGVILAYMKRNSLDSIVYAAHTEYLIKTFWRTFWLYILGALTALLGIGVLIIIATNVWYFYRIIAGFIRFNGGRAVAPEKWI

SEQ ID NO: 1970 - protein, 107 aa, Neisseria meningitidis
VRAARTAVFNEPLNVFTNPADFGETVMIGGKEVNAIFDREFITDSGFGVAVANADPQIIVTEDDLPEDVKSVVVTVRGKRYAVAETDFDGCGMVVVQLRAIHDKPTY

SEQ ID NO: 1971 - protein, 389 aa, Neisseria meningitidis
MDNELWIILLPIILLPVFFAMGWFAARVDMKTVLKQAKSIPSGFYKSLDALVDRNSGRAARELAEVVDGRPQSYDLNLTLGKLYRQRGENDKAINIHRTMLDSPDTVGEKRARVLFELAQNYQSAGLVDRAEQIFLGLQDGKMAREARQHLLNIYQQDRDWEKAVETARLLSHDDQTYQFEIAQFYCELAQAALFKSNFDVARFNVGKALEANKKCTRANMILGDIEHRQGNFPAAVEAYAAIEQQNHAYLSMVGEKLYEAYAAQGKPEEGLNRLTGYMQTFPELDLINVVYEKSLLLKCEKEAAQTAVELVRRKPDLNGVYRLLGLKLSDMNPAWKADADMMRSVIGRQLQRSVMYRCRNCHFKSQVFFWHCPACNKWQTFTPNKIEV

SEQ ID NO: 1972 - protein, 339 aa, Neisseria meningitidis
MKKILVTGGTGFIGSHTVVSLLKSGHQVVILDNLCNSSINILPRLKTITGQEIPFYQGDIRDREILRRIFAENRIDSVIHFAGLKAVGESVAEPMKYYDNNVSGSLVLAEEMARAGVFSIVFSSSATVYGDPGKVPYTEDMPLGDTTSPYGTSKSMVERILTDIQKADPRWSVILLRYFNPIGAHESGLIGEQPNGIPNNLLPYICQVAAGKLPQLAVFGDDYPTPDGTGMRDYIHVMDLAEGHIAAMKAKSNVAGTHLLNLGSGRASSVLEIIRAFEAASGLNIPYQIQPRRAGDLACSFADPSHTKQETGWETKRSLAQMMEDSWRWVSRNPNGYGD

SEQ ID NO: 1973 - protein, 426 aa, Neisseria meningitidis
MLDIQLLRSNTAAVAERLARRGYDFDTARFDALEERRKSVQVKTEELQASRNSISKQIGALKGQGKHEEAQAAMDQVAQIKTDLEQAAADLEAVQKELDAWLLSIPNLPHEDVPFGKDETENVEVRKVGTPREFDFEIKDHVDLGEPLGLDFEGGAKLSGARFTVMRGQIARLHRALAQFMLDTHTLQHGYTEHYTPYIVDDTTLQGTGQLPKFAEDLFHVTRGGDETKTTQYLIPTAEVTLTNTVADSIIPSEQLPLKLTAHSPCFRSEAGSYGKDTRGLIRQHQFDKVEMVQIVHPEKSYEALEEMVGHAENILKALELPYRVITLCTGDMGFGATKTYDLEVWVPAQIPTAKSQAAPTARFPARRMKRVSKTKRKTLGTYFDGSGLAVGRTLVAVLENHQNADGSINILPHCNRIWAALPSWK

SEQ ID NO: 1974 - protein, 405 aa, Neisseria meningitidis
  misc_feature 401, 402, 403: 'Xaa' is any amino acid
MALGAFVAGMLLSETEYRFQVEDDIRPFRDILLGFFFITVGMKLDIQALIGGWRQVLMLLAMLLVLKALVVFAIAFKMKHSVGDSLKTALYLAQGGEFGFVMLAIAGQLDMVSPEWEQAATAAVLLSMIIAPFLLGGSDALVGRLVKSSWDMKSLDLHSMLVETMSKSDHVLIVGFGRGGQTVGRVLAQEDIPYFALDLDIARVQVARSAGEPVSFGDAKRREVLEAAGLGRAKMVVVTLNNMHETQHVLDNVLSMYPNMPVYVRATNDDYVKTFTDIGAEEAVSDTKETGLVLAGYAMLGNGASYRHVYQTMANIRHSRYAALEGLFVGSDDEAGFGENGETVRHAFPLAAEAYAVGKTVGTLPMAAYGIKLLFVRRRTGRIENPDASFTLKGGDVLVVXXXHT

SEQ ID NO: 1975 - protein, 113 aa, Neisseria meningitidis
  misc_feature 2, 3, 4: 'Xaa' is any amino acid
VXXXKEGGITVEDCATVSNHLSRVFMVEDIDYKNLEISSPGLDRPLKKAADFVRFAGQNAKIKTRLPIDGQKNFIGKIEGCENDTVTISFDGKTVQIELGNIDKARLRPEFKF

SEQ ID NO: 1976 - protein, 96 aa, Neisseria meningitidis
VEYFMLLATDGENVYEARMAARPEHLKRLETLKSEGRLLTAGPNPLPEDSNRVSGSLIVAQFESLDAAQAWAEDDPYVHAGVYSEVLIKPFKAVFK

SEQ ID NO: 1977 - protein, 71 aa, Neisseria meningitidis
MTESHGYLSNNLPVKIINDIIYATQLVEDLVLGKIKIVDFLKSYNNFYCWLGFDELPQSEKIKFLSYLNIL

SEQ ID NO: 1978 - protein, 521 aa, Neisseria meningitidis
MTQDKILILDFGSQVTQLIARRVREAHVYCELHSFDMPLDEIKAFNPKGIILSGGPNSVYESDYQADTGIFDLGIPVLGICYGMQFMAHHLGGEVQPGNQREFGYAQVKTIDSELTRGIQDGEPNTLDVWMSHGDKVSKLPDGFAVIGNTPSCPIAMMENAEKQFYGIQFHPEVTHTKQGRALLNRFVLDICGAQPSWTMPNYIEEAVAKIREQVGSDEVILGLSGGVDSSVAAALIHRAIGDQLTCVFVDHGLLRLNEGKMVMDMFARNLGVKVIHVDAEGQFMEKLAGVTDPEKKRKIIGAEFIEVFDAEEKKLTNAKWLAQGTIYPDVIESAGAKTKKAHAIKSHHNVGGLPENMKLKLLEPLRDLFKDEVRELGVALGLPREMVYRHPFPGPGLGVRILGEVKKEYADLLRQADDIFIQELRNTTDENGTSWYDLTSQAFAVFLPVKSVGVMGDGRTYDYVVALRAVITSDFMTAHWAELPYSLLGRVSNRIINEVKGINRVVYDVSGKPPATIEWE

SEQ ID NO: 1979 - protein, 292 aa, Neisseria meningitidis
LNRHKSTISREIRRHRTQGQQYSAEKAQRQSRTIKQRKRQPYKLDSQLIQHIDTLIRRKLSPEQVCAYLCKHHRITLHHSTIYRYLRQDKSNGSTLWQHLRICSKPYRKRYGSTWTRGKVPNRVGIENRPAIVDQKSRIGDWEADTIVGKGQKSALLTLVERVTRYTIICKLDSLKAEDTARAAVRALKAHKDRVHTITMDNGKEFYQHTKITKALKAETYFCRPYHSWEKGLNENTNGLIRQYFPKQTDFRNISDREIRRVQDELNHRPRKTLGYETPSVLFLNLFQPLIH

SEQ ID NO: 1980 - protein, 296 aa, Neisseria meningitidis; identical to SEQ ID NO: 337

SEQ ID NO: 1981 - protein, 308 aa, Neisseria meningitidis
MSFAFFFPGQGSQSLGMMNGFAEHAIVKNTFAEASAILGQDLWAMINGSDAEIIGQTVNTQPIMLAAGVAVYRAYLEAGGKTPAAVAGHSLGEYTALVAAGALNFADAVKLVRLRAELMQSAVPQGVGAMAAILGLEDEQVKQICAEAAQGEVVEAVNFNSPGQIVIAGNAAAVGRAMAAAKEAGAKRALPLPVSVPSHCSLMKPAADKLAEALKTVEIKQPQIRVIHNADVAAYDDADKIKDALVRQLYSPVRWTETVNALVSDGIAESAECGPGKVLAGLAKRINKAAACSALTDAGQVAAFIEAH

SEQ ID NO: 1982 - protein, 88 aa, Neisseria meningitidis
MNQAVAQFAPLVLIMVVFYFLIMRPQQKKFKAHQAMLAALKVGDKVVLAAGFKGKVTRVGEQFFTVDIGQGTKIEVEVERNAISAKVD

SEQ ID NO: 1983 - protein, 248 aa, Neisseria meningitidis; identical to SEQ ID NO: 639

SEQ ID NO: 1984 - protein, 335 aa, Neisseria meningitidis
MSTFFQQTAQAMIAKHIDRFPLLKLDQVIDWQPIEQYLNRQKTRYLRDHRGRPACPLLSMFKAVLLGQWHSLSDPELEHSLITRIDFNLFCRFDELIIPDYSTLCRYRNWLAQDDTLSELLKLINCQLTEKGLKVEKASAAVVGATIIQTAGSKQRQAIEVDEEGQVSGQTTPSKDSDARWIKKNGLYKLGYKQHTRTDAEGYIEKLHITPANAHECKHLPPLLEGVPRGTTVYADKGYDSAENRQHLEEHQLQDGIMRKACRNRPLTEAQTKRNRYLSKTRYVVEQSFGTLHRKFRYARAAYFGLIKVSAQSHLKAMCLNLLKAANRLSAPAAA

SEQ ID NO: 1985 - protein, 115 aa, Neisseria meningitidis
MNRTKTCKECGEIKPITAFPKNGFDRKTGLQKYAPRCRRCHNVYQQDLLYKRREKEFEQKQAVMAALMDAEREKEEAAKARSIAQSLVLAKAACPILHIGLWTEPLFIPQGMLQI

SEQ ID NO: 1986 - protein, 394 aa, Neisseria meningitidis; identical to SEQ ID NO: 1253

SEQ ID NO: 1987 - protein, 195 aa, Neisseria meningitidis
MEHKLPQLPYELDALSPHLSKETLEFHYGKHHQTYITNLNNQIKGTEFENLPLEEIVKKSSGGVFNNAAQTWNHTFYWLGFTSKGQGKPAGELAAAIDAKWGSFEKFQEAFNACAAGTFGSGWAWLVKTPAGGLDLVSTSNAATPLTTENTPLLTCDVWEHAYYIDYRNSRPNYLKGFWEIVNWDEVAKRFAALS

SEQ ID NO: 1988 - protein, 186 aa, Neisseria meningitidis
  misc_feature 180, 181: 'Xaa' is any amino acid
MKQKIFVLYTGGTIGMTQSSEGLRPDTALVGQALAPFSNGMDFDWHVCGTLIDSSAVQLQNWCAWLDIIAAALPQYDGVLVLHGTDTLAYTANLFALALQGLDKPIVLTGSQWPYAAENSDAPRNLSTAVAAFSLKLKQTVIAFDGKLYPAVGSSKVSTETAAGFDNPHFGAIAEWDETXXTHLIN

SEQ ID NO: 1989 - protein, 370 aa, Neisseria meningitidis
MTAKEELFAWLRHMNKNKGSDLFVTTHFPPAMKLDGKITRITDEPLTAEKCMEIAFSIMSAKQAEEFSSTNECNFAISLPDTSRFRVNAMIQRGATALVFRAITSKIPKFESLNLPPVLKDVALKKRGLVIFVGGTGSGKSTSLASLIDYRNENSFGHIITIEDPIEFVHEHKNCIITQREVGVDTENWMAALKNTLRQAPDVILIGEIRDRETMDYAIAFAETGHLCMATLHANSTNQALDRIINFFPEERREQLLTDLSLNLQAFISQRLVPRDGGKGRVAAVEVLLNSPLISELIHNGNIHEIKEVMKKSTTLGMQTFDQHLYQLYEKGDISLQEALKNADSAHDLRLAVQLRSRRAQSSSPDLELL

SEQ ID NO: 1990 - protein, 226 aa, Neisseria meningitidis
MTYTITPIGTARSPYKQKFGIARQPGLASAAEVCIELNPEFTADSVRGLEDFDYVWISFIFHGVLDEGWAQMVRPPRLGGKQKMGVFATRSPHRPNHLGLSLLKLERIETGKPVRLYCSGADLLDGTPIIDIKPYIPFVESKPDASSGFVSGKPEELEVVWLENIGAENLSESTQNLISQSIAQDPRPAYQDIPERIYVMNIADYEVRFQIEENRATVIDLSPTPL

SEQ ID NO: 1991 - protein, 797 aa, Neisseria meningitidis
MKLKQIASALMVLGISPLALADFTIQDIRVEGLQRTEPSTVFNYLPVKVGDTYNDTHGSAIIKSLYATGFFDDVRVETADGQLLLTVIERPTIGSLNITGAKMLQNDAIKKNLESFGLAQSQYFNQATLNQAVAGLKEEYLGRGKLNIQITPKVTKLARNRVDIDITIDEGKSAKITDIEFEGNQVYSDRKLMRQMSLTEGGIWTWLTRSNQFNEQKFAQDMEKVTDFYQNNGYFDFRILDTDIQTNEDKTKQTIKITVHEGERFRWGKVSIEGDTNEVPKAELEKLLTMKPGKWYERQQMTAVLGEIQNRMGSAGYAYSEISVQPLPNAETKTVDFVLHIEPGRKIYVNEIHITGNNKTRDEVVRRELRQMESAPYDTSKLQRSKERVELLGYFDNVQFDAVPLAGTPDKVDLNMSLTERSTGSLDLSAGWVQDTGLVMSAGVSQDNLFGTGKSAALRASRSKTTLNGSLSFTDPYFTADGVSLGYDVYGKAFDPRKASTSIKQYKTTTAGAGIRMSVPVTEYDRVNFGLVAEHLTVNTYNKAPKHYADFIKKYGKTDGTDGSFKGWLYKGTVGWGRNKTDSALWPTRGYLTGVNAEIALPGSKLQYYSATHNQTWFFPLSKTFTLMLGGEIGYANGYGKTKEIPFFENFYGGGLGSVRGYESGTLGPKVYDEYGEKISYGGNKKANVSAELLFPMPGAKDARTVRLSLFADAGSVWDGKTYDDNSSSATGGRVQNIYGAGNTHKSTFTNELRYSAGGAVTWLSPLGPMKFSYAYPLKKKPEDEIQRFQFQLGTTF

SEQ ID NO: 1992 - protein, 299 aa, Neisseria meningitidis
MWFKQISFYPLNKEKLPEADILADKLAEAEFTHCQGLDWFSEGFTAPVSFSPELVFPADFTLRVALKKEEKVLPAGVIRDILEEKVAEIQNNEARNVGRKEKQELKEQITDDLLPRAFTRSSRTEAVFNTRHGYLLVNNAASAKAENILTKLREALGGLEASLPNTKQSPSSLMTGWLLQGHCEGGFELDSDCELKGTGDIVPVVKVSKQDLTADEVVQHVKNGKTVTQLGLVWREQIAFILTQDFTLKRIQYLDVLQEEAESNGDDAAGLAFASQILMAESVSTMLEELVSYLGGWQD

SEQ ID NO: 1993 - protein, 231 aa, Neisseria meningitidis
MFVWHEYENAAEAAQSLADAVADALQGALDEKGGAVLAVSGGRSPIAFFNALSQKDLDWKNVGITLADERIVPTVHADSNTGLVREYLLKNKAEAAMWIPMVEDGKTETELHPDAVVDYALKHYKQPDVLVLGMGNDGHTASIFPKAPQFQTAIDGSAGVALVHTTPVTAPHERVSMTLDAIAHTGHVFLAIRGEEKKAVFDQAAQGENREYPINLVLNHQGVNCHVFYAE

SEQ ID NO: 1994 - protein, 243 aa, Neisseria meningitidis
  misc_feature 3, 4: 'Xaa' is any amino acid
VCXXVSGSLIERINNKGTVTVGTEGTYAPFTYHDKDGKLTGYDVEVTRAVAEKLGVKVEFKETQWDSMMAGLKAGRFDVVANQVGLTSPERQATFDKSDPYSWSGAVLVARNDSNIKSIDDIKGVKTAQSLTSNYGEKAKAAGADLVAVDGLAQSLTLIEQKRADATLNDELAVLDYLKKNPNAGVKIVWSAPADEKVGSGLIVNKGNDEAVAKFSTAINELKADGTLKKLGEQFFGKDISVQ

SEQ ID NO: 1995 - protein, 79 aa, Neisseria meningitidis
VRGIRSASDYEYERSMRHINSDLAPEISTVFLMPPREIAEVSSTMVKGLVGPEGWTETIHRYVPQAVYEKILAEHQHEN

SEQ ID NO: 1996 - protein, 261 aa, Neisseria meningitidis
MNPFLNTAFKAARRAGQMMIRAAGNLDAVKTDSKAFNDFVSDVDRNSEIILVEALKEAYPHHKITCEESGSHGKAAAEYEWIIDPLDGTTNFLHGHPQYAISMALLHKGVLQEALVYAPERNDVYMASRGKGALLNDRRIRVSNRIELNRCLIGTGFPVVDQSMMDKYLAILKDFLAKTAGGRREGAASLDLCAVATGCFDGFFEFNLKPWDIAAGALIVQEAGGIVTDMTGEDGWLESGDIVAANPKVLAQMLKIISAHV

SEQ ID NO: 1997 - protein, 334 aa, Neisseria meningitidis
MTIIVTGAAGFIGSNIVKALNQRGITDIVAVDNLSKGEKFKNLAECEIAHYLDKHEFIRQVREHILPYQNIEAVFHQGACSDTMNHDGLYMMENNYQYTLDLLNWCQDERIPFLYASSAAVYGKGEIFREERELEKPLNVYGYSKFLFDQVLRRRMKEGLTAQVVGFRYFNVYGQHEQHKGRMASVTFHHFHQYREHGYVNLFGSNDGYGNGEQTRDFVSVEDVAKVNLYFFDHPELSGIYNLGTGRSQQFNELAAATVNACRAAEGKPEMSLKELVEEELIRYIPFPDALKGKYQSFTQADITKLREAGYKEEFFDVKSGVDRYVKWMLENLA

SEQ ID NO: 1998 - protein, 198 aa, Neisseria meningitidis
LRQGLWNVFLPASDAEILFFLPNNLFSQGKLDYNGGMKKYLIPLSIVAVLSGCQSIYVPTLTEIPVNPINTVKTEAPAKGFRLASSHWTDVAKISDEATRLGYQVGIGKMTKVQAAQYLNNFRKRLVGRNAVDDSMYEIYLRSAIDSQRGAINTEQSKLYIQNALRGWQQRWKNMDVKPNNPAFTNFLMEVMKMQPLK

SEQ ID NO: 1999 - protein, 593 aa, Neisseria meningitidis
MPYFALFDDAVSGRAKRYQNHVESRFFRPEELDALDGALQSGWQKGLHAVLFADYGFGLPLTGVESERGGNLALHWFADCADTDAASWLARHSDDFPAGISTPQSSVSEADYLDHIRQIHEAIRRGDTYQINYTTRLHLQAYGNPVKLYQRLRQPVPYAVLSHLPDAQGQSAWTLCFSPELFLKIGSDGTISTEPMKGTAPILGDGQDERRAAELQADPKNRAENVMIVDLLRNDLGKIAQTGTVCVPEPFKVSRFGSVWQMTSTIQAQALPHTSFADILRAAFPCGSITGAPKKMSMQIIESLEAEARGLYTGSIGYLNPCSGGLGFEGTFNVVIRTLSLTPLSDGIYQGVYGVGSGIVIDSDPAAEYRECGWKARFLNELRPNFGIFETLRAENGRCTLLDRHLCRLKTSARALNLPLPDGCENQIKQYIADLPDGAFRVKALLASDGISLSRAVLNRLTDKQRVIISPTILPAQNYLRRFKTTHRALFDQAWQTAETQGAFDSLFFNSDGILLEGGRSNVFVKYQGQWLTPSLDLDILNGIMRQAVLDEPQKYLQTNQVIETHITQKTLQEAEEIRLSNALRGVFAAALA

SEQ ID NO: 2000 - protein, 481 aa, Neisseria meningitidis; identical to SEQ ID NO: 437

SEQ ID NO: 2001 - protein, 367 aa, Neisseria meningitidis
MMETQLYIGIMSGTSMDGADAVLVRMDGGKWLGAEGHAFTPYPDRLRRQLLDLQDTGADELHRSRILSQELSRLYAQTAAELLCSQNLAPSDITALGCHGQTVRHAPEHGYSIQLADLPLLAELTQIFTVGDFRSRDLAAGGQGAPLVPAFHKALFRDDKETRVVLNIGGIANISVLPSDAPAFGFDTGPGNMLMDAWTQAHWQLPYDKNGAKAAQGNILPQLLDRLLAHPYFAQPHPKSTGRELFALNWLETYLDGGENRYDVLRTLSRFTAQTVCDAVSHAAADARQMYICGGGIRNPVLMADLAEYFGTRVSLRSTAELKLDPQWVEAAAFAWLAACWINRIPGSSHKATGASKPCILGAGYYY

SEQ ID NO: 2002 - protein, 199 aa, Neisseria meningitidis
MSEKLEKIVLASGNVGKLEEFANLFKPYGITVLPQSAFGIPECSEPYSTFVENALAKARHAAGHSGLPALADDSGICAAALNGAPGIHSARYAGDHPKSDTANNLKLAAELVGKADKSCCYVCVLVFVRHKDDPRPIIAEGVWHGQWHDTPQGQNGFGYDPYFYLPEHGKTAAELDSEVKNRESHRAQALADLIRKLAL

SEQ ID NO: 2003 - protein, 64 aa, Neisseria meningitidis
MTKYYSWGVNGFPPYVFDTIWKRWKLNGRGGGYRVRHPGRHDRRGQSGKAAAAQKPQDRDGISD

SEQ ID NO: 2004 - protein, 191 aa, Neisseria meningitidis
MPSENPIGKTMKSIDEQSLHNARRLFESGDIDRIEVGTTAGLQQIHRYLFGGLYEFAGQIREDNISKGGFRFANAMYLKEALVKIEQMPERTFEEIIAKYVEMNIAHPFLEGNGRSTRIWLDLVLKKNLKKVVNWQNVSKTLYLQAMERSPVNDLELRFLLKDNLTDDVDNREIIFKGIEQSYYYEGYEKG

SEQ ID NO: 2005 - protein, 505 aa, Neisseria meningitidis
MVISNTRELEKLKDRIPNLINIARIAIVFPLMIMHILGLETGSRANLHASWTAWAFYVWLAIACWLIFFSIIHPHWQWQSLKMPRFSAVADITMIGVLTYLFGGIDSGFGILILPFVVCSCLLSYGRYPLLYASYAAILLIFNAIADGDIGKYPLISDARTASATFILVAASYLSAIFTSLSVKYIDRAGKLAHENHAAYRRIRGLNQTVLNRVQEAVVVINVEHQTILFNKKAKDLLPMLEIGQHTALFDPITVLWDKASPHTFEYVLGTSGLNAGIRAVPVNKGPDKLLILYIRPQSEIQAEALSVKLAALGQLTANLAHEIRNPMSAIRHANDLLRENMEAGAADPFNAKLCKIIDGNVCRIDKMLEDISSLNKRNKTERETIGLIPFWEEFKQEFLLGHPDAAGCIRLDMQGNHPTAYFDPAHLRQIMWNLANNAWRHSRKQPGSISVTIRPAQKNTVCILFADRPKCRNTCSNPFTPRRKTAPASGCMSPANWRTPISAI

SEQ ID NO: 2006 - protein, 249 aa, Neisseria meningitidis
MLIQAVTIFPEMFDSITRYGVTGRANRQGIWQFEAVNPRKFADNRLGYIDDRPFGGGPGMIMMAPPLHAAIEHAKAQSSQAAKVIYLSPQGKPLTHQKAVELAELPHLILLCGRYEGIDERLLQSSVDEEISIGDFVVSGGELPAMMLMDAVLRLVPGVLGDMQSAEQDSFSSGILDCPHYTKPLEFQGMAVPEVLRSGNHGLIAEWRLEQSLRRTLERRPDLLEKRSLIPKESRILNKILQEQREIQS

SEQ ID NO: 2007 - protein, 472 aa, Neisseria meningitidis
MNIHTLLSKQWTLPPFLPKRLLLSLLILLAPNAVFWVLALLTATARPIVNLDYLPAALLIALPWRFVKIAGVLAFWLAVLFDGLMMVIQLFPFMDLIGAINLVPFILTAPAPYQIMTGLLLLYMLAMPFVLQKAAAKTDFRHIAVCAAVVAAAGYFTGHLSYYDRGRMANIFGANNFYYAKSQAMLYTVSQNADFITAGLVDPVFLPLGNQQRAATHLNEPKSQKILFIVAESWGLPANPELQNATFAKLLAQKDRFSVWESGSFPFIGATVEGEMRELCAYGGLRGFALRRAPDEKFARCLPNRLKQEGYATFAMHGAGSSLYDRFSWYPRAGFQEIKTAENLIGKKTCAIFGGVCDSELFGEVSAFFKKHDKGLFYWMTLTSHADYPESDIFNHRLKCTEYGLPAETDLCRNFSLHTQFFDQLADLIQRPEMKGVEVIIVGDHPPPVGNLNETFRYLKQGHVAWLHFKIK

SEQ ID NO: 2008 - protein, 284 aa, Neisseria meningitidis
MSAQLINGKEVSQKRLQAVAEAVAQRQQNNLHTPCLAVVLVGGDPASAVYVRNKKTSCQKCGIKSLSYELPESTSQEELLALVDRLNVDSEVDGILVQLPLPKHLDSQAVLERISPDKDVDGFHPYNVGRLAVKMPLMRPCTPKGVMTLLEAYGIDPKGKKAVVVGASNIVGRPQALELLLARATVTVCHSATENLADEVAGADILVVGVGIPNFVKGEWIKPGAVVIDVGINRLDDGSLCGDVEFETAKERAAMITPVPGGVGPMTIATLMENTLHAASLHDA

SEQ ID NO: 2009 - protein, 404 aa, Neisseria meningitidis; identical to SEQ ID NO: 33

SEQ ID NO: 2010 - protein, 154 aa, Neisseria meningitidis
MQGNQAVLDYMNELLSGELAARDQYFIHSRLYSEWGYTKLFERLNHEMEEETTHAEDFIRRILMLGGTPKMARAELNIGTDVVSCLKADLQTEYEVRDALKKGIKLCEEAQDYVTRDLMVAQLKDTEEDHAHWLEQQLRLIELIGEGNYYQSQL

SEQ ID NO: 2011 - protein, 324 aa, Neisseria meningitidis
VQPGLWASDGIFSEWRHSCRRRGSRMGKGGDIVVGNGKKYAAPLLVLGCVVFGLGSLIVRSVPVGSYAIAFWRLLISVFVFWFLARFFRQKFPKNRKTVRYALTAGVFLAFDLALWHESIHAVGPGISTLLNSLQIFFLSAIGVFFFGERLSGLKKAGLISAVAGVAMIAGAEFGYNGNAVWGFVSGLVSGLMLALSMVFVRKTHEIETVALFPSMMILSLGGAVSLVVPALLMDGGVLYPTTWKDAGLVLVYGVVMQCFAWAMVAYAIPLLSLSLTGLLLLSEPVAALFIDYFGLGKPIEGVQWAGVALTLSAIYLGSLKQQS

SEQ ID NO: 2012 - protein, 181 aa, Neisseria meningitidis
MGKTVTLTAGHSNTDPGAVNGSDREADLAQDMRNIVASILRNDYGLTVKTDGTGKGNMPLREAVKLIRGSDVAIEFHTNAAVSKAATGIEALSTVKNKRWCQVLSKAVAKKTGWKLRGEDGFKPDNAGRHSRLAYAQAGGIVFEPFFISNDTDLALFKTTKWGICRAIADAIAMELGAARV

SEQ ID NO: 2013 - protein, 335 aa, Neisseria meningitidis
MSTFFQQTAQAMIAKHIDRFPLLKLDRVIDWQLIEQYLNRQKTRYLRDHRGRPAYPLLSMFKAVLLGQWHSLSDPELEHSLITRIDFNLFCRFDELSIPDYSTLCRYRNWLAQDDTLSELLKLINRQLTEKGLKVEKASAAVVDATIIQTAGSKQRQAIEVDEEGQISGQTTPSKDKDARWIKKNGLYKLGYKQHTRTDAEGYIEKLHITPANAHECKHLPPLLEGLPKGTTVYADKGYDSAENRQHLEERQLLDGIMRKACRNRPLTETQTKHNRYLSKIRYVVEQSFGTLHRKFRYARAAYFGLIKVSAQSHLKAMCLNLLKAANRLSAPAAA

SEQ ID NO: 2014 - protein, 1144 aa, Neisseria meningitidis
MTEPTYIPLRLHTEFSITDGMVRIKKLIAKAQEYGLPALGISDLMNEFGLVKFYKTCRGAGIKPIGAADVWIGNPNAPDKPFRAMLIIRNDAGYLRLSELLTAAYVGKDRNIHHAELNPEWLENGDNSGLICLSGAHYGEVGVNLLNGNEDAARAAALKYAAWFPDAFYLELQRLPERPEWEACVSGSVKLAEELGLPVVATHPTQFMSRDDFNAHEARVCIAGGWVLTDKKRPRDFTPGQFFIPPETMAERFADLPEALENTVEIAKRCNLHITLGKNFLPLFPTPDGLSLDDYLIKLSNEGLQERMVQLYPDEAERAEKMPEYQERLDFELNIIIQMKFPGYFLIVQDFINWAKTHGCPVGPGRGSGAGSLVAYSLKITDLDPLKYALLFERFLNPERVSMPDFDVDFCQANRGRVIEYVREKYGAEAVSQIVTFGTMSSKAVIRDVGRVLELPFMLCDKLSKLIPLEANKPLGLDDAMKAEPQIQELIEAEEADELITLAKKLEDLTRGLGMHAGGVLIAPGKISDYSPVYQADESASPVSMYDKGDVEDVGLVKFDFLGLRNLTIIEMAQNNIKNTTGDIVDVGKIPLDDQAAYQIFRDANTTAVFQFESTGMKKMLKTAHTTKFEELIAFVSLYRPGPMDNIPDFVARMKGQEFQYIHPLLEGILAPTYGIMVYQEQVMQAAQIIGGYSLGGADLLRRAMGKKKPEEMVKHREIFAEGAAKQGISREKSDEIFNYMEKFAGYGFNKSHAAAYALISYQTAWLKAHYPAEFMAATMSSELDNTDQLKHFYDDCRANGIEFLPPDINESDYRFTPYPNMKIRYALGAIKGTGEAAVESIIAARQSGGKFTGLLDFCERVGKEHMNRRTLEALIRGGAFDSIEPNRAMLLANIDLAMDNADQKAANANQGGLFDMMEDAIEPVRLIDAPMWSESEKLAEEKTVIGFYLSGHPFGPYAQEVRQIAPQKLSKLKPQDSVRLAGFVTAVRTMMGKRGKIAFVSLEDLSGQVEIMVGGQTLENCADCLKADQVLIIESKVSRDDYGGGDGLRILANQVMTLQTARERYARSLSLALAPHHDIGGLVQLLAAHQLPDTPRIPLQLSYANEKASGRLQVPPKWTVTPSSALFGELETLLGSRSVRVNW

SEQ ID NO: 2015 - protein, 199 aa, Neisseria meningitidis
MRKQNTLTGIPTSDGQRGFALFIVLMVMIVVAFLVVTAAQSYNTEQRISANESDRKLALSLAEAALREGELQVLDLEYDTDSKVTFSENCEKGLCTAVNVRTNTNNGNEEVFDNIVVQGKPTVEAVKRSCTANSTNLCIDNKGMEYKKGTRSVSKMPRYIIEYLGVKNGENVYRVTAKAWGKNANTVVVLQSYVSNNDE

SEQ ID NO: 2016 - protein, 126 aa, Neisseria meningitidis
  misc_feature 120, 121: 'Xaa' is any amino acid
MNLIQQLEQEEIARLNKEIPEFAPGDTVVVSVRVVEGTRSRLQAYEGVVIARRNRGLNSNFIVRKISSGEGVERTFQLYSPTVEKIEVKRRGDVRRAKLYYLRGLTGKAARIKEKLPARXXTHLIN

SEQ ID NO: 2017 - protein, 461 aa, Neisseria meningitidis
MMARDNRIQMFPHEWRASTTLSGVYALRMLGMFLVLPVLAVYAASLPGAEGNKTLVGLAMGIYGLTQALLQLPLGIASDKFGRKKTIYAGLVVFAAGSFLAAAADTLPMLVAARAIQGAGAVSAAVTALLADLTRDGVRTRAMAMIGLSIGLTFSVSLVVAPVIADAVGVRGLFMLTGILTVISIGVVAWMTPDPEVSKLHEDTQAQPSRIGEVLKNRRLLTLDFGIFALHAAQMALFTALPFAMTQLGLEKIQHWKVYLPSTITGLVVMVPLIIVGETRNKLKQVFVLGIVCIAAAQLGLLSGMRSVGLITAYLVVYFIGFNVLEASLPSMVSKIAPSDLKGTAMGVYNTMQSLGLFAGGAAGGLLFQKYGFSGVFAFCSILMLLWLVIAVLSPAPKPVKNLSYPVGGVWQGNQEGLYRALSELEGVEDIGFSFDGQTVYLKVLQKGFDQAAAEKIITGV

SEQ ID NO: 2018 - protein, 148 aa, Neisseria meningitidis
VRAFQTALRPSRILNILTVSLHSASLAVCLTWFYGWMMWFGLAALAASYAYSLRITNLKHRHAITAITIDRDGQAEIVSGKEKTAKAATLAGSSMVTPYALFLQWDTGGKTVRHCIMPDMTDKESYRKLKVWVLWRQPKKTAETDTSD

SEQ ID NO: 2019 - protein, 89 aa, Neisseria meningitidis; identical to SEQ ID NO: 494

SEQ ID NO: 2020 - protein, 198 aa, Neisseria meningitidis
  misc_feature 193, 194: 'Xaa' is any amino acid
MATLSDKTILVTGASQGLGEQVAKAYAAAGATVILVARHQKKLEKVYDAIVEAGYPEPFAICFDLISAEEKEFEHFAATIAEATQGKLDGIVHCAGYFYALSPLDFQTVAEWVNQYRINTVAPMGLTRALFPLLKQSPDASVIFVGESHGETPKAYWGGFGASKAALNYLCKVAADEWERFGNLRANVLVPGXXHTLN

SEQ ID NO: 2021 - protein, 63 aa, Neisseria meningitidis; identical to SEQ ID NO: 980

SEQ ID NO: 2022 - protein, 366 aa, Neisseria meningitidis
MAGNTFGQLFTVTTFGESHGAGLGCIIDGCPPGLELSEADIQFDLDRRKPGTSRHVTQRREADQVEILSGVFEGKTTGTPIALLIRNTDQRSKDYGNIATSFRPGHADYTYWHKYGTRDYRGGGRSSARETAARVAAGAVAKKWLKEKFGTEITAYVTQVGEKEIRFEGCEHISQNPFFAANHSQIAELENYMDSVRKSLDSVGAKLHIEAANVPVGLGEPVFDRLDAEIAYAMMGINAVKGVEIGAGFDSVTQRGSEHGDELTPQGFLSNHSGGILGGISTGQDICVNIAIKPTSSIATPRRSIDINGNPIELATHGRHDPCVGLRAAPIAEAMLALVLIDHALRHRAQNADVAVDTPDIARSDK

SEQ ID NO: 2023 - protein, 916 aa, Neisseria meningitidis; identical to SEQ ID NO: 1114

SEQ ID NO: 2024 - protein, 432 aa, Neisseria meningitidis
MAKNVVVIGAQWGDEGKGKIVDWLAEEAGGVVRFQGGHNAGHTLVVGGKKTILRLIPSGILHESLDCFIGSGVVVSPEALLGEIDELNAAGVKNVEGRLKIAPTCPLILPYHIALDQAREASRGKGKIGTTGRGIGPAYEDKVARRAIRAADLLHPEKLREKLDAVLAYYNVQLQHLHNAEPVKAEDVMAVIEKVAPRIAPMITDVSRVLNEKNKNGEKLLFEGAQGALLDIDYGTYPFVTSSNCLAGAASAGAGVGPQMLDYVLGIVKAYTTRVGSGPFPTELFDEVGVGLAERGHEFGSVTGRARRCGWFDAAALKRSIQINGISGMCITKLDVMDGVETINICVGYELPDGGKTDILPCGSDAVETCKPIYETMPGWRESTFGVKDYGALPENAKAYLKRIEEVCGAPVAIVSTGPDREETIVLHHPFA

SEQ ID NO: 2025 - protein, 207 aa, Neisseria meningitidis
MERKERLRAGIAALGLDISAAAQDRLLAYVDLLKKWNKTYNLTALRDEEKMVVHHLLDSLTLLPHIEGVQTMLDVGSGGGQPGIPAAVCRPDVQITLLDANTKKTAFLQQAVIELGLDNVRVVSGRVEAVSDVRADVVTSRAFAELADFVSWTAHLLKDGGYWAAMKGVYPQGEIGRLPQDVCVEKVQRLDVPGLDAERHIVILSKR

SEQ ID NO: 2026 - protein, 427 aa, Neisseria meningitidis
MNRNEILFDRAKAIIPGGVNSPVRAFGSVGGVPRFIKKAEGAYVWDENGTRYTDYVGSWGPAIVGHAHPEVIEAMREAALGGLSFGAPTEGEIVIAEEIAKIMPSVERLRLVSSGTEATMTAIRLARGFTGRDKIIKFEGCYHGHSDSLLVKAGSGLLTFGNPSSAGVPADFTKHTLVLEYNNIAQLEEAFAQSGNDIACVILEPFVGNMNLVRPSEAFVKALRELTEKHGAVLIYDEVMTGFRVALGGAQSLHGITPDLTTMGKVIGGGMPLAAFGGRKDIMECISPLGGVYQAGTLSGNPIAVAAGLKTLEIIRREGFYENLTARTEQLVQGFQTAADAAGIEFTADSVGGMFGLYFASHTPRNYADMARSNIDAFKRFFHGMLDRGIAFGPSAYEAGFVSAAHTPELIDETVAVAVEVFKAMAA

SEQ ID NO: 2027 - protein, 335 aa, Neisseria meningitidis
MSTFFRQTAQAMIAKHIDRFPLLKLDRVIDWQPIEQYLNRQKTRYLRDHRGRPAYPLLSMFKAVLLGQWHSLSDPELEHSLITRIDFNLFCRFDELSIPDYSTLCRYRNWLAQDDTLSELLELINRQLTEKGLKVEKASAAVIDATIIQTAGSTQRQAIEVDEEGQISGQTTPSKDSDARWIKKNGLYKLGYKQHTRTDAEGYIEKLHITPANAHECKHLSPLLEGLPEGTTVYADKGYDSAENRQHLEERQLLDGIMRKACRNRPLSEAQTKRNRYLSKTRYVVEQSFGTLHRKFRYARSTYFGLIKVSAQSHLKAMCLNLLKAANRLSAPAAA

SEQ ID NO: 2028 - protein, 414 aa, Neisseria meningitidis
MTLFCEQVPYPRLAEAFGTPLYVYSQSALTEAFEHYQTAFAELSPLVCYAVKANGNLSIIKHFASLGSGFDIVSGGELARVLAAGGDAAKTIFSGVGKSEAEIEFALNAGVKCFNMESIPEIDRIQKVAAHLGKTAPVSLRINPDVDAKTHPYISTGLKANKFGIAYADALEAYRHAAQQPNLKIIGIDCHIGSQLTDLSPLVEACERILILVDALAAEGIVLEHLDLGGGVGIVYQDEDVPDLGAYAQAVQKLIGTRRLKLILEPGRSLVGNAGSLLTRVEFVKYGEEKNFVMVDAAMNDLMRPALYDAYHHIEAVETKDIATLTANIVGPICETGDFLGKDRTIACEEGDLLLIRSAGAYGASMASNYNARNRAAEVLVNGGGYKLIRRRETLEQQMANELACLQAEHQNAV

SEQ ID NO: 2029 - protein, 498 aa, Neisseria meningitidis
MFSNYLLSLAIWIPIAAGVLVLSTGKDSRAPLARVLAFMGALAGFLVTLPLFTGFDRLSGGYQFTEFHEWIPLLKINYALGVDGISVLFIILNAFITLLVVLAGWEVIQKRPAQYMAAFLMMSGLINGAFAAQDAILFYVFFEGMLIPLYLIIGVWGGPRRVYASVKLFLYTLMGSLLMLVAMVYLYYQTGSFSIVDFQNIKQIPLGVQQLLFVAFFLSFAVKVPMFPVHTWLPDAHVEAPTGGSMVLAAITLKLGAYGFLRFILPIMPDAARYFAPVIIVLSLIAVIYIGMVALVQTDMKKLVAYSSISHMGFVTLGMFLFVDGQLDDWALKGAIIQMISHGFVSAAMFMCIGVMYDRLHTRNIADYGGVVNVMPKFAAFMMLFGMANAGLPATSGFVGEFMVIMGAVKVNFWVGALAAMTLIYGASYTLWMYKRVIFGAIHNPHVAEMKDINCREFAILVILAVVVLGMGLYPNAFIEVVHQAANDLIAHVAQSKI

SEQ ID NO: 2030 - protein, 283 aa, Neisseria meningitidis
MTLLGIKLKQTQQLNQRLQQSLRVLQMSGIELEREVENWLSDNPLLERKDTDEFSDAEFSHYTAPARQIGGDEGEDMLSNIAGEQDFKQYLHAQVCEHPLSDQESACVHILIDFLDEQGYLTDSIEDILDHTPLEWMLDEAMLKQALTALKKFDPAGVAAADLNESLILQIERSGECAAKTTALHIVRNALNSIDGNRSQTLARIKKRLPQTDSGTLEAALDLIASLNPFPAAGFASSTPTPYSDEALANLLAFRGMEVSRRTIAKYRESFEIPAAHKRKTAE

SEQ ID NO: 2031 - protein, 356 aa, Neisseria meningitidis
MDLSIVVPIYNVESYLEACLNSIEPILSNENVELILVNDGSKDGSEDICYKYIDKTTNNKQQTTNNKQQTTNNKQQTTNNKQQTTNNTRYRTPNIKYIYQDNQGTAEARNTGIKNSNGKYIVFIDSDDFINCQVLLDFLSKDDIDMPDVVFLNAVKYDKGSVSHFGEDYQPEKILKQSKVEVLKGLCRFRKFPGSACNKIIKRELIIKEKLFFEKEVYAEDIEWSMRLFNAATTFSYLDGCYYYYRQGRKDSKTGTVSEKSIKSLLYILEKNAEMEFDRDISSYLYSFLSYEYLVLLFIMTSKNIECDADIKRRAYHLRFMLLKSNKLIYKLIFPIITLFGVDITGRILKAIRGNI

SEQ ID NO: 2032 - protein, 395 aa, Neisseria meningitidis
MAEICLITGTPGSGKTLKMVSMMANDEMFKPDENGIRRKVFTNIKGLKIPHTYIETDAKKLPKSTDEQLSAHDMYEWIKKPENIGSIVIVDEAQDVWPARSAGSKIPENVQWLNTHRHQGIDIFVLTQGSKLLDQNLRTLVRKHYHIASNKMGMRTLLEWKICADDPVKMASSAFSSIYTLDKKVYDLYESAEVHTVNKVKRSKWFYTLPVIILLIPVFVGLSYKMLSSYGKKQEEPAAQESAATEHQAVFQDKTEGEPVNNGNLTADMFVPTLSEKPESKPIYNGVRQVRTFEYIAGCVEGGRTGCTCYSHQGTALKEVTELMCKDYVKNGLPFNPYKEESQGRDVQQSAQQHSDRPQVATLGGKPLQNLMYDNWQERGKPFEGIGGGVVGSAN

SEQ ID NO: 2033 - protein, 188 aa, Neisseria meningitidis
MSALLPIINRLILQSPDSRSELATFAGKTLTLNIAGLKLAGRITEDGLLSAGNGFADTEITFRNSAVQKILQGGEPGAGDIGLEGDLILGIAVLSLLGSLRSRASDELARIFGTQADIGSRAADIGHGIKQIGRNIAEQIGGFSRESESANIGNEALADCLDEISRLRDGVERLNERLDRLERDIWID

SEQ ID NO: 2034 - protein, 115 aa, Neisseria meningitidis
MRLNHKQGEAGEDAALAFLQSQGCTLLARNWHCAYGEIDLIVKNGGMILFVEVKYRKNRQFGGAAYSISPSKLLKLQRSVEYYLQQNRLTNVPCRLDAVLIEGSRPPEWIQNITG

SEQ ID NO: 2035 - protein, 197 aa, Neisseria meningitidis
MASIQNLYETVSRVLGNQAGKVISALGEITVECLPEHYISVMTALRDHEELHFELLVDLCGVDYSTYKNEAWQGKRFAVVSQLLSVKNNQRIRVRVWVSDDDFPVVESVVDIYNSADWYEREAFDLYGIMFNNHPDLRRILTDYGFVGHPFRKDFPISGYVEMRYDEEQKRVIYQPVTIEPREITPRIVREENYGGQ

SEQ ID NO: 2036 - protein, 457 aa, Neisseria meningitidis
MSNPFSSLGLGTELVSALTAQGYENPTPIQAAAIPKALAGHDLLAAAQTGTGKTAAFMLPSLERLKRYATASTSPAMHPVRMLVLTPTRELADQIDQNVQSYIKNLPLRHTVLFGGMNMDKQTADLRAGCEIVVATVGRLLDHVKQKNISLNKVEIVVLDEADRMLDMGFIDDIRKIMQMLPKQRQTLLFSATFSAPIRKLAQDFMNAPETVEVAAQNTTNANVEQHIIAVDTIQKRNLLERLIVDLHMNQVIVFCKTKQSVDRVTRELVRRNLSAQAIHGDRSQQSRLETLNAFKDGSLRVLVATDIAARGLDIAELPFVINYEMPAQPEDYVHRIGRTGRAGADGVAISLMDESEQKMFESIKELTGNKLLIERIEGFEPQWWEQGGAKPEKTEMREPRQRNRYESARAQREKNTRPETTANDAGAACGKIAGRSRRSRREHRTCALLQPRYGVK

SEQ ID NO: 2037 - protein, 443 aa, Neisseria meningitidis
MLFNHTASELLDLCRRTLDLAKATGATAAEADFSESLGQSVSVRLGEIEQIEFQQDKSLDITVYVGKRKGRASTADFSEQALQDTVKAAIDIARYTAEDDCAGLADASLMAQHVGDLDRYHEWDLSTEAAVELAKQCEQAALNEDERIENSEGAAVQTGHYQYVYGNTHGFAAHRQGTHHSISCSVVAADENGMQRDYWYDSACRHPDMDSPETIGQTAARRTLRRLGSRSIPTGSYPVLFDTTVSGGLIGHLVGALSGGALYRQSSFLIDSIGKKVLPDFLNLREEPHIPRSFRSSYFDAEGVATAPRFVIQNGIVEGYFLSSYSARKLGMQTTGNAGGAHNLYLNHTHETQSDLLKEMGTGLLVTELMGQGANTITGDYSRGAAGFWVENGVIAYPVHEITVAGRLQDMYRDIVGVADDALRRSSNKIGSILIAGMTVAGS

SEQ ID NO: 2038 - protein, 92 aa, Neisseria meningitidis
MNIRTAFALCAIALSAAAAAYAKEIKIDANNTPYSEADAQKLAATAVGMGVKEPISLNGGSDSITVSGSSATQCVFKVGNGGALQIQGLNCK

SEQ ID NO: 2039 - protein, 290 aa, Neisseria meningitidis
MPILNHIALIGVGLIGGSFVLDLKRQGLVRTVTGIDTDRDNLERALERGVIDRASVAIDADSIGGADLVLIATPVATVPAILTALRPVLPEHTWISDVGSTKSSVIEAFRRCLPDRLHRCIAAHPIAGSDRSGAQAAQFGLFRHRKLIITPHGGEHSDGIALVEELWHAVGAEIYTMDAQRHDAVFAAVSHMPHLTAFAYVHQILDHPDGQEYLKFAATGFRDFTRIASGHPAVWADICLANKDSLLQLVQGLGKQLDVLANILTTDDREALYRYFEEAKTTRDRWLDGN

SEQ ID NO: 2040 - protein, 263 aa, Neisseria meningitidis
MITVNTLQKMKAAGEKIAMLTAYESSFAALMDDAGVDVLLVGDSLGMAVQGRQSTLPVSLRDMCYHTECVARGAKNAMIVSDLPFGAYQQSKEQAFAAAAELMAAGAHMVKLEGGVWMAETTEFLQMRGIPVCAHIGLTPQSVFAFGGYKVQGRGGKAQALLNDAKAHDDAGAAVVLMECVPAELAKKVTESVSCPTIGIGAGVDCDGQVLVMHDMLGIFPGKTAKFVKNFMQGHDSVQAAVRAYVAEVKAKTFPAAEHIFAD

SEQ ID NO: 2041 - protein, 248 aa, Neisseria meningitidis
MSTQDLSGKIALVTGASRGIGAAIADTLAAAGAKVIGTATSESGAAAISERLAQWGGEGRVLNSAEPETVENLIADIEKTFGKLDILVNNAGITRDNLLMRMKEEEWDDIMQVNLKSVFRASKAVLRGMMKQRAGRIINITSVVGVMGNAGQTNYAAAKAGLIGFSKSMAREVGSRGITVNCVAPGFIDTDMTRALPEETRQTFTAQTALGRFGDAQDIADAVLFLASDQAKYITGQTLHVNGGMLMP

SEQ ID NO: 2042 - protein, 210 aa, Neisseria meningitidis; identical to SEQ ID NO: 48

SEQ ID NO: 2043 - protein, 199 aa, Neisseria meningitidis
MNNLIKINLLPYREEMNKRKQQQFKTLMYGAVLTGVAAVAATYLFIDNMINNQSERNTLLETSIAHLDTELSEIQKLKQEKDAFLIKKNKVEELQLKRLQAAKILDSLNEAVPGSTYLTSLDAVTADSYRLSGRTSSDNRVAAMMRAMPNTGIFKQPELLSIKKNNSHQEFTLQATLQPIVKAAESKENPASGNAQEAN

SEQ ID NO: 2044 - protein, 404 aa, Neisseria meningitidis
MTHTASKTPKFWLTITAAAFILLITIGMRMTLGLFVQPIVNTTELSIAQFSLIIAVFQLMWGVSQPLSGALADRFGAFRVLSGGAVLLVCACLIAPNIPTYWGLMIAVGLLLAFGTGSGGFSIIMGQVAAQVPAHKRGLASGLVNAGGSAGQFLFAPLVQGLTALPQAGWTGTFYVWAGIALLILPVSWWLAGGNNAAHTQHAQATHGQSLGEAVKTAFKTPSYILLHLSFFACGFHIAFLVTHLPTEVALCGLPATVASTAIAIIGLANIAGCIFSGWCTSRVRGKYVLFGLYASRAAMILIYIFSPKTDLNFYIFAAALGFTWLATVTPTASITGKLFGTRYLATLFGLTMLSHQIGGFLGSYIGGIVITQFGDYGWMWYADALLAGTAALLNLPIREPETA

SEQ ID NO: 2045 - protein, 194 aa, Neisseria meningitidis; identical to SEQ ID NO: 666

SEQ ID NO: 2046 - protein, 340 aa, Neisseria meningitidis
MLTKKEFEKFLDEVCTVLRQEAKNAPFKSQDIFENRVRALCIAKIPAYADIVINPEPVPQIFPDVPIGEYGVEVKFTLKDTWRSVANSIQEKNKADGVQHIYVVFGKMGGIPDVKWQLYEDSVIHVRTSHVPRFEVEIESDRPSLFEGFGISYAEFADLDMHEKMEYIRKYARNRLKEGERLWWIEDIDAVDSHDLPLEVRLYTSLPQEEKIRLRAEAALVSPRIVCSGRAKHKYDNAVLYLITYRGVLCHQARDLFSAGSVANSAEDYRGGNYVEKSLKLIEHEIEKAALEMDDALIVEYWGESVPTEKRLEYWIKMLDDLADGWIPSESLFNGRYKAK

SEQ ID NO: 2047 - protein, 356 aa, Neisseria meningitidis
MTKHIAILRGDGIGPEIVAETVRVLDKLIAQGLDAGYEYAPLGGEAYDEYGHPYPEFTQNLCRKADAVLLGAVGSPQYDNLDRPLRPERGLLAIRKDLNLFANLRPAVLYPELANASTLKPEIVAGLDILIVRELTGDIYFGEPRGIRVLENGEREGYNTMKYSESEIRRIAHVAFQSAQKRSKKVCSVGKANVLETTELWREIFEEIGKQYPDVELSHMYVDNAAMQLVRAPKQFDVIATGNIFGDILSDEASMLTGSIGMLPSASLDENGKGLYEPSHGSAPDIAGQNKANPLATILSLAMLLRYSLNDEARAQQVENAVQKVLQQGLRTSDIYEEGTKLVSCSEMGDAVLAAL

SEQ ID NO: 2048 - protein, 104 aa, Neisseria meningitidis
MKLIYTVVKIIILLFFLLLAVINTDAVTFSYLPGQKFDLPLIVVLFGAFVVGIIFGMFALFGRLLSLRGENGRLRAEVKKNARLTGKELTAPPAQNAPESTKQP

SEQ ID NO: 2049 - protein, 169 aa, Neisseria meningitidis
MTMILSILSLFFIIRLLFLAVSIKHEKALIAKGAKQYGKTNSTLLAAVHTLYYLACFVWVWLSDTAFNGISLIGTLTVMASFVILSLIIKQLGEIWTVKIYILPNHQINRSWLFKTFRHPNYFLNIIPELIGIALLCQAWYVLLIGLPIYLLVLFKRIRQEEQAMATLF

SEQ ID NO: 2050 - protein, 228 aa, Neisseria meningitidis
MFDFGLGELVFVGIIALIVLGPERLPEAARTAGRLIGRLQRFVGSVKQEFDTQIELEELRKAKQEFEAAAAQVRDSLKETGTDMEGNLHDISDGLKPWEKLPEQRTPADFGVDENGNPLPDAANTLSDGISDVMPSERSYASAETLGDSGQTGSTAEPAETDQDRAWREYLTASAAAPVVQTVEVSYIDTAVETPVPHTTSLRKQAISRKRDLRPKSRAKPKLRVRKS

SEQ ID NO: 2051 - protein, 279 aa, Neisseria meningitidis
  misc_feature 2, 3, 4: 'Xaa' is any amino acid
VXXXLVLGIIMLGMGMTLGREDYRILAQRPLDVFIGAAAQYTVMPLLAIGIAKLFDLSPGLTLGLVLVGTCPGGVSSNIMSFLAKGDVAFSVGMTTVSTVLAPAVTPLWMTCLVGQTVDMDGWGMFRFMLLVTLLPVVLGSAANILLHGKHWFENVRAVMPGVAVLAFACIVGGVASVHGHRFAESALVMVLAIAVHNIAGYVSGYYAAALFGMDTAKKRTLAIEVGVQNAGLATGLSAKFFPGNPESAVAAAVACVWHSVSGTVLGNLFALWDKRRDA

SEQ ID NO: 2052 - protein, 170 aa, Neisseria meningitidis
MKNFNGKLILIGLMGAGKTTLGRQMAQRLDYRFYDSDHEIAAAAGVPIPTIFEMEGEQGFRSRETAILKKLVILPHIVLSTGGGAVLKEENRALIRKSGTVVYLHAPPEILLERTRCDNSRPLLQVADPLAKLRELYAARDPVYRQTADFTVESANCRETVQTLLKRLSR

SEQ ID NO: 2053 - protein, 205 aa, Neisseria meningitidis
MTFPPLKSPLKFYAVVPTADWVGRMVKAGADTVQLRCKTLHGDELKREIARCVAACQGSRTQLFINDHWREAIEAGAYGVHLGQEDMDTADLAAIAAAGLRLGLSTHSVAELDRALSVHPSYVASGAIFPTTTKQMPTAPQGLDKLREYVKQAGGTPVVAIGGIDLNNAEEVLATGVSSLAVVRAVTEAANPEAVVKAFQALWDG

SEQ ID NO: 2054 - protein, 187 aa, Neisseria meningitidis
  misc_feature 3, 4: 'Xaa' is any amino acid
VCXXGEEVVIAKFFELIEKHTPQLVSWNGGGFDLPVLHYRSLLHGINAARYWDMGDGDFGDSRDFKWNNYISRYHQRHCDLMDLLALYQPRANVPLDDMAKLCGFPGKLGMDGSKVWDAFHAGRLKEIRNYCETDAVNTYLMYLRFCLVSGRFDADEYEMEIKRIRNYLSTQTEDKPHWSEFAQAWK

SEQ ID NO: 2055 - protein, 165 aa, Neisseria meningitidis
MSSSVSSKTRYWVLALAAIVLDQWSKWAVLSSFQYRERVNVIPSFFDLTLVYNPGAAFSFLADQGGWQKYFFLVLAVAVSAYLVRAILRDEFATLGKTGAAMIIGGALGNVIDRLIHGHVVDFLLFYWQNWFYPAFNIADSFICVGAVLAVLDNIVHRKTQEEKY

SEQ ID NO: 2056 - protein, 929 aa, Neisseria meningitidis
MTDYSKTVNLLESPFPMRGNLAKREPAWLKSWYEQKRYQKLREIAKGRPKFILHDGPPYANGDIHIGHAVNKILKDIIIRSKTQAGFDAPYVPGWDCHGLPIEVMVEKLHGKDMPKARFRELCREYAAEQIARQKKDFIRLGVLGDWDHPYLTMDFKTEADTVRMLGEIYKSGYLYRGAKPVQFCLDCGSSLAEAEVEYKDKISPAIDVAYPFKDTAALAAAFGLASIEGKAFAVIWTTTPWTLPASQAVSAGADVVYQLIDTPKGKLVLAKDLAEDALKRYGFSDGIAILAETTGDKLENLHMNHPFLERDIPMLNGEHVTTDAGTGLVHTAPAHGLEDYAVCNKYGIELYNPVNAEGKYIGETPRVADMRVWEANPVILQWLEETGNLLASSKIEHSYAHCWRHKTPLIYRATGQWFVGMDKAGADGKTLRDKAIKAVDDTEFFPSWGRARLEAMIEGRPDWVVSRQRYWGTPMTFFVHKETGELHPNSAELLEKVAQRIEEKGIEAWFSLDKSELLSAEDCEHYDKLPDTMDVWFDSGSTHYSVVKQREELEWPADLYLEGSDQHRGWFQSSMLTGCASSMGRAPYKQLLTHGFVVDGEGKKMSKSIGNVVAPQEVYNEFGADILRLWAASTDYSGELAISKEILKRVTESYRRIRNTLSFLFANLSDFNPIEDAVQQADMVEIDRYAVVLARQLQERLAGDYYPRYAFHFAVKDIVSFCSEDLGAFYLDILKDRLYTTKADSHARRSAQTALYHITRSLVLLIAPILCFTGEEAWDIIGGGEEDSVLFHTWHEFPTINEKAEAELVKKWTAVRKVREAVTAAIEPLRADKTIGSSLQAEAEITAPEEMAGYLNALGEELRFAMLVSKAEVKVGDELAVAAKAGSGEKCERCWHYTRDVGAVAGYETVCKRCAENVGGEGETRHYA

SEQ ID NO: 2057 - protein, 317 aa, Neisseria meningitidis
MTHTVHLHLEETDNLALQRLCGSFDNNLDLLAKALDIHISRRFEHFTFNGAFAHAGKRALLKLLETAQTRDLNDGDIRLAAVEAQTEDAGHQEKNHDHAYYFRTKRGSIGGRTPRQNGYIRALLNHDIVFGLGPAGTGKTYLAVAAAVDAMEKHQVERIILVRPAVEAGEKLGFLPGDLTQKVDPYLRPLYDALYDLMGFDRVTKLIEKGLIEIAPLAYMRGRTLNGAYIILDEAQNTTPEQMKMFLTRIGFGAKAVITGDTSQIDLPKNIKSGLKDAREKLHGVEGLYFHTFTGEDVVRHPLVQKIVEAYESAEHD

SEQ ID NO: 2058 - protein, 98 aa, Neisseria meningitidis
VHIFRFGTSFHIPNTGLTVGGGVSAQSGTSSLYNIRQGGYGLIDGFVRYELGKHAKLSLIGTNLNGRTYFENNYNRTRGANNFYGEPRTVSMKLDWQF

SEQ ID NO: 2059 - protein, 227 aa, Neisseria meningitidis
MELVFIRHGQSEWNAKNLFTGWRDVKLSEQGLAEAAAAGKKLKENGYEFDIAFTSVLTRAIKTCNIVLEESDQLFVPQIKTWRLNERHYGQLQGLDKKQTAEQYGDEQVRIWRRSYDTLPPLLDKDDEFSAHKDRRYAHLPADVVPDGENLKVTLERVLPFWEDQIAPAILSGKRVLVAAHGNSLRALAKHIEGISDKDIMGLEIPTGQPLVYKLDDNLKVLEKFYL

SEQ ID NO: 2060 - protein, 381 aa, Neisseria meningitidis
MIYGSMPSEKLTIFQTAFVMQVNIQIPCMLYRRGSVKPPLFEAPRLLPSFTDPVVPKLSAPGGYIVDIPKGNLKTEIEKLSKQPEYAYLKQLQTAKNVDWKQVQLAYDKWDYKQEGLTGAGAAIVVIIVTALTYGYGAAAAGSVTAAGSSTAAAATTTAAATTTVSTAAAMQTAALASLYSQAAVAIINNKGDVGKALKDLGTSDTVKQIVTSALTAGALNQMGADIAQLNSKVRTELFSSTGNQTIANLGGRLATNLSNAGISAGINTAVNGGSLKDNLGNAALGALVNSFQGEAASKIKTTFSDDYVAKQFAHALAGCVSGLVQGKCKDGAIGAAVGEIVAESILGGRNPATLSDAEKHKVISYSKIIAGSVRHSTAAM

SEQ ID NO: 2061 - protein, 39 aa, Neisseria meningitidis
MIWDLLYCVMSAMQPTKKNSWIGYMELSGLSLPKVFQGI

SEQ ID NO: 2062 - protein, 66 aa, Neisseria meningitidis
MKFEERFIVQDLETHDFIYPDPFGDVGFTQNIKSAGQFESYEDALNSGINEIGGGFQIFQFFVKSE

SEQ ID NO: 2063 - protein, 95 aa, Neisseria meningitidis
MKITHCKLKKKVQKELLRFFVLEVTARSAADILGIHPNSAALFYRKIRTVINHHLVLAADEVFEGPVEQDESDFGGRRKGRRGRGRQEKWLSSAF

SEQ ID NO: 2064 - protein, 75 aa, Neisseria meningitidis
  misc_feature 69, 70: 'Xaa' is any amino acid
LDKQIDNHTHTHFDGKDQVAEQIKGIGSITTATLMVMLPELGRLSHKRIAGLAGIAPHPREGGETKFKXXTHLIN

SEQ ID NO: 2065 - protein, 291 aa, Neisseria meningitidis
MNLYDLLLAPFAEFDFMRYALVSVFCLSLSAAPVGVFLVMRRMSLIGDALSHAVLPGAAVGYMFAGLSLPAMGLGGVAAGMLMALLAGLVSRFTTLKEDANFAAFYLSSLAIGVVLVSKNGSSVDLLHLLFGSVLAVDIPALQLIAAVSSLTLITLAVIYRPLVLESIDPLFLKSVGGKGGLWHVLFLVLVVMNLVSGFQALGTLMSVGLMMLPTITARLWAKHMGALILLSVLTALLCGLSGLLISYHIEIPSGPAIILCCSVLYLFSVILGKEGGILTKWLKNHRHHTT

SEQ ID NO: 2066 - protein, 64 aa, Neisseria meningitidis; identical to SEQ ID NO: 905

SEQ ID NO: 2067 - protein, 1201 aa, Neisseria meningitidis
MFHFAFPAQTALRQAITDAYRRNEIEAVQDMLQRAQMSDEERNAASELARRLVTQVRAGRTKAGGVDALMHEFSLSSEEGIALMCLAEALLRIPDNATRDRLIADKISDGNWKSHLNNSPSLFVNAAAWGLLITGKLTATNDKQMSSALGRLIGKGGAPLIRQGVNYAMRLLGKQFVTGQTIEEALQNGKEREKMGYRFSFDMLGEAAYTQADADRYYRDYVEAIHAIGKDAVGQGVYEGNGISVKLSAIHPRYSRAQHGRVMGELLPRLKELFLLGKKYDIGINIDAEEANRLELSLDLMEALVSDPDLAGYKGIGFVVQAYQKRCPFVIDYLIDLARRNNQKLMIRLVKGAYWDSEIKWAQVDGLNGYPTYTRKVHTDISYLACARKLLSAQDAVFPQFATHNAYTLGAIYQMGKGKDFEHQCLHGMGETLYDQVVGPQNLGRRVRVYAPVGTHETLLAYLVRRLLENGANSSFVNQIVDENISIDTLIRSPFDTIAEQGIHLHNALPLPRDLYGKCRLNSQGVDLSNENVLQQLQEQMNKAAAQDFHAASIVNGKARDVGEAQPIKNPADHDDIVGTVSFADAALAQEAVGAAVAAFPEWSATPAAERAACLRRFADLLEQHTPALMMLAVREAGKTLNNAIAEVREAVDFCRYYANEAEHTLPKDAEAVGAIVAISPWNFPLAIFTGEVVSALAAGNTVIAKPAEQTSLIAGYAVSLMHEAGIPTSALQLVLGAGDVGAALTNDARIGGVIFTGSTEVARLINKALAKRGDNPVLIAETGGQNAMIVDSTALAEQVCADVLNSAFDSAGQRCSALRILCVQEDVADRMLDMIKGAMDELVVGKPIQLTTDVGPVIDAEAQQNLLNHINKMKGVAKSYHEVKTAADVDSEKSTFVRPILFELNNLNELQREVFGPVLHVVRYRADELDNVIDQINSKGYALTHGVHSRIEGTVRHIRSRIEAGNVYVNRNIVGAVVGVQPFGGHGLSGTGPKAGGSFYLQKLTRAGEWVAPTLSQIGQADEAALKRLEALVHKLPFNAEEKKAAAAALGHARIRTLRRAETVLTGPTGERNSISWHAPKRVWIHGGSTVQAFAALTELAASGVQAVVEPDSPLASYTADLEGLLLVNGKPETVGISHVAALSPLDSARKQELAAHDGALIRVLPSENGLDILQVFEEISCSVNTTAAGGNASLMAVAD

SEQ ID NO: 2068 - protein, 71 aa, Neisseria meningitidis
MKEYKVVIYQESQLSSLFFGAAKVNPVNFSAFLNKQTPEGWRVVTMEKDLRRMLLFFKREAYVVILERDRV

SEQ ID NO: 2069 - protein, 61 aa, Neisseria meningitidis
MSTFFRQTAQAMIAKHIDRFPLLKLDQVIDWQPIEQYLNRQKTRYLRDHRGRPAHPVAGIP

SEQ ID NO: 2070 - protein, 91 aa, Neisseria meningitidis
MNASNWSVYLILCENSAFYCGISPNPQQRLAAHTAGKGAKYTRVFKPVAMRIVAGGMDKGTALKQEIAVKKLTAAQKRKLWEQAEKMPSET

SEQ ID NO: 2071 - protein, 268 aa, Neisseria meningitidis
MQNHVISLASAAERRAHIADTFGRHGIPFQFFDALMPSERLEQAMAELVPGLSAHPYLSGVEKACFMSHAVLWKQALDEGLPYIAVFEDDVLLGEGAEKFLAEDAWLQERFDPDSAFIVRLETMFMHVLTSPSGVADYCGRAFPLLESEHWGTAGYIISRKAMRFFLDRFAVLPSERLKAVDWMLFSSFLDKGGMTVCQLTPALCVQSETLPSQLKNGRQESYRNRRSPKVLLKRALGKIGREIERARERKRQKKLEKHLGRHVVPFE

SEQ ID NO: 2072 - protein, 241 aa, Neisseria meningitidis; identical to SEQ ID NO: 400

SEQ ID NO: 2073 - protein, 640 aa, Neisseria meningitidis
MIEIKNLTLQRGLKILLDKANATVNPGQRVGLIGKNGTGKSSLFALLKGEITQDGGDVSIPKNWRLASVSQETPDLDISALDYVLQGDAELQAFQTALRQAEAQNDGMKQAEYHAKLEEIDAYTAPARAAKLLNGLGFSQEEHSRPVKSFSGGWRMRLNLAQALICRADLLLLDEPTNHLDLETVLWLENHLASLPCTQIIISHDRDFLNAATTQTIELSQQKLTQYGGNYDFYQNERAQRLAQQQAAYVKQQAQIKHLQSFIDRFKAKATKAVQAQSRMKALAKLERIAPAHLDSEFSFEFYNPEHLPNPLLKLEHADLGYEGKTVLHDITLSLESGARYGLLGVNGSGKSTFIKALAGKIDLLSGSIVRSEKLNIGYFAQHQLDTIRADQNPVWHIQQLSPEVREQEIRNFLGGFNFVGDMALQKTEPFSGGEKARLALAMIIWQKPNLLLLDEPTNHLDLDMRHALTLALQSFQGALIAVSHDRSLLEATTDSFLLIDKGRLKNFDGDLNDYRQWRLAQENAAAAPAASAQSQSRKDTKRIEAQIRQEKARRSKPIQQKIDRAEKEMARLSEIQTACEAFLAQEDAYLEANKEKLQNTLSQLAKVKTQLAQIEEVWLACQEELERIETEIEKQFAER

SEQ ID NO: 2074 - protein, 191 aa, Neisseria meningitidis
  misc_feature 187, 188, 189: 'Xaa' is any amino acid
MNRQKVIAIDGPGASGKGTVAARVAAALGYDYLDTGALYRLTALYAQKQGVGWHDEENVSELAKKLPAVFSGSRILLGGEDVSDGIRTEAIGMGASAVAQLPKVRAALLQRQRDFLTEKGLVADGRDTGSVVFPQAELKIFLTAESKIRAERRAKQIGIPCEGLAFERILSDIEARDEADRNRKVAXXXHT

SEQ ID NO: 2075 - protein, 81 aa, Neisseria meningitidis
  misc_feature 76, 77: 'Xaa' is any amino acid
MPSETDMFCVGNVSDENGRTKIMKKIQADVVVIGGGTAGMGAFRNARLHSDNVYLIENNVFGTTCARVGCMPSKLXXHTLN

SEQ ID NO: 2076 - protein, 418 aa, Neisseria meningitidis
VANKLRNYTINFGPQHPAAHGVLRMILELEGETIVRADPHIGLLHRGTEKLAETKTYLQALPYMDRLDYVSMMVNEQAYCLAVEKLAGIDVPIRAQYIRVMFAEVTRILNHLMGIGSHAFDIGAMTAILYAFRDREELMDLYEAVSGARMHAAYFRPGGVYRDLPDFMPKYEGSKFRNAKVLKQLNESREGTMLDFIDAFCERFPKNIDTLETLLTDNRIWKQRTVGIGVVSPERAMQKGFTGVMLRGSGVEWDVRKKQPYEVYGKMDFDIPVGVNGDCYDRYLCRMEEMRQSVRIIKQCSEWLRVNPGPVITTNHKFAPPKRTEMKTGMEDLIHHFKLFTEGMHVPEGETYTAVEHPKGEFGVYIISDGANKPYRLKIRAPGFAHLQGMDEMAKGHMLADVVAIIGTQDIVFGEVDR

SEQ ID NO: 2077 - protein, 512 aa, Neisseria meningitidis
MNMLGALAKVGSLTMVSRVLGFVRDTVIARAFGAGMATDAFFVAFKLPNLLRRVFAEGAFAQAFVPILAEYKETRSKEATEAFIRHVAGMLSFVLVIVTALGILAAPWVIYVSAPGFAKDADKFQLSIDLLRITFPYILLISLSSFVGSVLNSYHKFSIPAFTPTFLNVSFIVFALFFVPYFDPPVTALAWAVFVGGILQLGFQLPWLAKLGFLKLPKLNFKDAAVNRVMKQMAPAILGVSVAQVSLVINTIFASYLQSGSVSWMYYADRMMELPSGVLGAALGTILLPTLSKHSANQDTEQFSALLDWGLRLCMLLTLPAAVGLAVLSFPLVATLFMYREFTLFDAQMTQHALIAYSFGLIGLIMIKVLAPGFYARQNIKTPVKIAIFTLICTQLMNLAFIGPLKHVGLSLAIGLGACINAGLLFFLLRRHGIYQPGKGWAAFLAKMLLSLAVMGGGLYAAQIWLPFDWAHAGGMQKAARLFILIAVGGGLYFASLAALGFRPRHFKRVES

SEQ ID NO: 2078 - protein, 306 aa, Neisseria meningitidis; identical to SEQ ID NO: 1708

SEQ ID NO: 2079 - protein, 81 aa, Neisseria meningitidis
MVFDDIAKRKIRFQTRRGLLELDLIFGRFMEKEFEHLSDKELSEFSEILEFQDQELLALINGHSETDKGHLIPMLEKIRRA

SEQ ID NO: 2080 - protein, 478 aa, Neisseria meningitidis
MPLLSVEFALFFLAFLPIYWGLAKYPSVQNLLLLAAGMGWLYHIGPVFAAIVVLYSSCVYLLGELLRSDRENTRRFWLGCGIAVSLTVLGFFKYFDFFRPLIAQYAGQGGAIDILMPLGLSYYTFQSLAYLVYCFRAPHAARFEWHELLLHLSFFPTVTSGPIIRAAAFKSADGEQAGALAQIRTRQPRSPVRPALAVSLILLGIAKKWWLAGMLAENWVSPVFENPAQFNGWGVLAGVYGYTFQLFLDFSGYSDLVIGMAMLLGFRLPKNFSAPLRAANIRAFWDKWHISLSTWIRDYIYIPLGGSKKGFLRTQLNLMAAMVLSGIWHGYGWNFLIWGALHGTALVLLNTGDRYFGRNALCRLKYLAPLSWFVTFHFVCLSFVVFNTASPDDAGAVFNALFANANGWNAPQQANMLLLASFASVMLLYPYLQRAFDGAVKGLEKIPMWLWFIPISIILLLIIVLAPSGIPGFIYANF

SEQ ID NO: 2081 - protein, 383 aa, Neisseria meningitidis
MQTWQLPEHIADVLPTNARQLESAREQLLALFRVHGYELVQPPLMEYAHSLLTHIDAGLSLKTILVTDRLSGRQLGIRADITPQVARIDAHLLSANQGINRLCYAGPVLHAQPDGLLNMREPLQAGAEMYGFADIRGDIELIDLMLKSMKIADMGKVLLSLGHIGIFRALSDAAHLDAGQSATLLALMQDKDTGAVEAQVKAWKLDGMWAKAFSLLPRLYGGREVLSDARGRLPDLSAVGGALDELQAVCDAFPDCEIHIDLSELRVDNYHTGLLYAAYAADFHDAVARGGRYDGLGGYFGRARPATGFSFDLRSFIGRLPAIERQPAVLVDAEDAEAAREAVEALREQGQCVVVDYGIGHNVSEELAGRLKKTDGVWQVVKR

SEQ ID NO: 2082 - protein, 167 aa, Neisseria meningitidis; identical to SEQ ID NO: 189

SEQ ID NO: 2083 - protein, 453 aa, Neisseria meningitidis
MLKKWLNKMLPSGRSSKKAESKTVIPAERHNIRAEMLSFAAENVIRRLKEAGFQAYVVGGAVRDLLLGIEPKDFDVATDAMPEQVHKLFRRSRIVGRRFQIVHVMNGAEIIEVTTFRGGAKVHQNAHGRIMKDNTYGSIEEDAMRRDFTCNALYYDPEKEEILDFHNGIADVAARRLVMIGDAAERYQEDPVRILRAIRLSGKLGFELSEETAAPIAESICRLKHEPVARLFDEIMKLLFSGHARECLKRLNGFDIPDDIHPLLNALRVSDGIAGKMTVLALKNTDERLRADKSVSVGFVLAALMWPELERHWKSNLQQGLKPVPALSDAINTMRETVERGWGVPQRFSATMREIWMFQPQFENRKGARPHKLFAQARFRATYDFLLLRAETGNADRALAEWWTAFQTASQEQRTEMTKNEAAARHEKNEGQAKKRRRRRRKPKPKVVGTDWE

SEQ ID NO: 2084 - protein, 178 aa, Neisseria meningitidis
MSATVRILGIDPGSRVTGFGIIDVRGRDHFYVASGCIKTPPDAPLADRIAVIVRHIGEVVAVYKPQQAAVEQVFVNVNPASTLMLGQARGAALAALVSHKLPVSEYTALQVKQAVVGKGKAAKEQVQHMVVQMLGLSGTPQADAADGLAVALTHALRNHGLAAKLNPSGMQVKRGRFQ

SEQ ID NO: 2085 - protein, 357 aa, Neisseria meningitidis
MKIVLTTSMAGLGGTETATVRLGRLLRQHGHDIMLASSDGPLLKEAQALGIRWQPVDFYRGGLAGYLKSTFAYARMLRREQPDIIDCQMARVVPACALAAKIVSPKTKIIYHSHGLDAATYPKIAKLFDKLGVYIIGNCKHEREKLIRHGFPADRIVYAYNALPPPPEFPFRKTEKECAVLGTLSRLDTVRAVHLMLDIFKKMVDRDMPVRLNVAGIGEEMDNLKAQAERLGIDGKVTFLGGVRDLTAYFKDVDILVNTPHCIGDHGAGVGNNILEAGLYDTPVVTYDMAGISEMVVNGETGYCIPFGDEEAFIAAVDTLVRQPELREAMGKRLHAHVAALCSDDEIYRTTMAAYTM

SEQ ID NO: 2086 - protein, 123 aa, Neisseria meningitidis; identical to SEQ ID NO: 575

SEQ ID NO: 2087 - protein, 245 aa, Neisseria meningitidis
  misc_feature 241, 242, 243: 'Xaa' is any amino acid
MSQHRKLIILGSGPAGYTAAVYAARANLNPVIITGIAQGGQLMTTTEVDNWPADADGVQGPELMARFLAHAERFGTEIIFDQINAVDLQKRPFTLKGDMGEYTCDALIVATGASAKYLGLPSEEAFAGKGVSACATCDGFFYKNQDVAVVGGGNTAVEEALYLANIAKTVTLIHRRSEFRAEKIMIDKLMKRVEEGKIILKLESNLQEVLGDDRGVNGALLKNNDGSEQQIAVSGIFIAIXXXHT

SEQ ID NO: 2088 - protein, 144 aa, Neisseria meningitidis
MTGFNDAAGVASVSTDIKGKYVQSVTVANGVITAQMASSGVNNEIKGKKLSLWAKRQDGSVKWFCGQPVTRADKADDVNKATGNEIDTKHLPSTCRDASSAVCTKHPSIARITANGRKTSSFPRRRESRFVGAETYRVKRFLRS

SEQ ID NO: 2089 - protein, 145 aa, Neisseria meningitidis
  misc_feature 2, 3, 4: 'Xaa' is any amino acid
VXXXIAFAIKNEGRIGGSEEIFGLLLGMTSFWVGLAGILVYTVVQIYYMSRDGQSLGKKIMRIRVLKTDGRNPGFVGTVLVREIAWSVLVAIIAAVIGLAVGDNGENAINLLAFLANFVLLFMVKRDRRTLYDILADTVVVKLPK

SEQ ID NO: 2090 - protein, 290 aa, Neisseria meningitidis
LSDEGRHKPTSAPNRVFMMKGMDKLRYQQDFLNIRPIFTAGEQEYLTELSDRLPLSVLTDSVRNIEEIGIDFVYSSAKLEGNTYNQYDTQALLKLGQTAGGKLYSDAVMLINLRESYRHLLSGLDSPDPFDWLDFLKTTHSLISENLLEKGSGGVVRRDSVTISGTDYTPLSNPQSLDTELKWLLQEAPKIENPFDRAVYLHNNLAYLQYFKDCNKRTARNCMTLSLMRSGFFPCVFAPDSYPAYAGAVVAYYETGDYGLFKKYFISAYENTVNKYGPQPDMDIFRNFSL

SEQ ID NO: 2091 - protein, 106 aa, Neisseria meningitidis; identical to SEQ ID NO: 853

SEQ ID NO: 2092 - protein, 628 aa, Neisseria meningitidis
MPSEAVFQIIDMNTENRSPEQFDIPLFLKNLPKLPGVYRFFDEGGKVLYVGKAVNLKRRVSGYFQKNDHSPRIALMVKQVHHIETTITRSEAEALILENNLIKALSPKYNILFRDDKSYPYLMLSGHQYPQMAYYRGTLKKPNQYFGPYPNSNAVRDSIQVLQKVFMLRTCEDSVFEHRDRPCLLYQIKRCTAPCVGHISEEDYRDSVRQAATFLNGKTDELTRTLQHKMQTAAANLQFEEAARYRDQIQALGIMQSNQFIDSKNPNNPNDIDLLALAVSDGIVCVHWVSIRGGRHVGDKSFFPDTKNDPEPNGQDYAEAFVAQHYLGKSKPDIIISNFSVPDALKEALEGEHGKQMQFVTKTIGERKVWLKMAEQNAQMAIAQRRLQQSNQQHRIDELAKILGMDSDGLNRLECFDISHTQGEATIASCVVYDEQNIQPSQYRRYNITTAKPGDDYAAMREVLTRRYGKMQEAEANGETVKWPDAVLIDGGKGQIGVAVSVWEELGLHIPLVGIAKGPERKAGMEELILPFTGEVFRLPPHSPALHLLQTVRDESHRFAITGHRKKRDKARVTSSLSDIPGVGSKRRQALLTRFGGLRGVIAASREDLEQVEGISKALAETIYNHLH

SEQ ID NO: 2093 - protein, 186 aa, Neisseria meningitidis
MKTAQELRAGNVFMVGNDPMVVQKTEYIKGGRSSAKVSMKLKNLLTGAASETIYKADDKFDVVILSRKNCTYSYFADPMYVFMDEEFNQYEIEADNIGDALKFIVDGMEDQCEVTFYEGNPISVELPTIIVREVEYTEPAVKGDTSGKVMKTARLVGGTEIQVMSYIENGDKIEIDTRTGEFRKRA

SEQ ID NO: 2094 - protein, 225 aa, Neisseria meningitidis
LVKTADGYKAIAHIQTGEHVFAKDETSGKTGYKPVTARYGNPYQETVYIEISDGIGNSQTLISNRIHPFYSDGKWIKAEDLKAGSRLYSESGKTQTVRNTVVKPKPLKAYNLTVADWHTYFVKGNRAETEGVWVHNECPPRKTPSTPIYGNDSEAYAAAKELGYRKIKERTRNDAAIFKKGKSYISRDVDSHNGGAWKEASSPEKLNRKETRNGTFDKNLNRIGD

SEQ ID NO: 2095 - protein, 381 aa, Neisseria meningitidis
MTETQSLELAKELISRPSVTPDDRDCQKLLAERLHKIGFAAEELHFGDTKNIWLRRGTKAPVVCFAGHTDVVPTGPVEKWDSPPFEPAERDGRLYGRGAADMKTSIACFVTACERFVAEHPDHQGSIALLITSDEEGDALDGTTKVVDVLKARDELIDYCIVGEPTAVDKLGDMIKNGRRGSLSGNLTVKGKQGHIAYPHLAINPVHTFAPALLELTQEVWDEGNEYFPPTSFQISNINGGTGATNVIPGELSVKFNFRFSTESTEAGLKQRVHAILDKHGVQYDLQWSCSGQPFLTQAGKLTDVARAAIAETCGIEAELSTTGGTSDGRFIKAIAKELIELGPSNATIHQINENVRLDDIPKLSAVYEGILACLLAGNAV

SEQ ID NO: 2096 - protein, 69 aa, Neisseria meningitidis
MTESRQTRLQVKCPTCQTTVVWKPENAFRPFCSQRCKLIDLGGWADGKYTVSDQTESLLEISEPDGAYR

SEQ ID NO: 2097 - protein, 1144 aa, Neisseria meningitidis; identical to SEQ ID NO: 2014

SEQ ID NO: 2098 - protein, 267 aa, Neisseria meningitidis
  misc_feature 263, 264, 265: 'Xaa' is any amino acid
MKKTIFNITKMDCPSEEQLIRMRLKDVSDIYELQFDIAGRCLTVYHDNQDTTILQVLEPLNFDSHIISTEVIVDKIVFNKPDEHLEKRLLYQVLMINFVFFIIECSVGIFANSMGLIADSLDMLADSFVYILALSAIGMTLAYKKRVAFLAGITQIILALFGVIEVIRRFIGAEQLPNYQLMIGTAFLALIANWLCLYLLSKNQNKEIHIKASMIFTSNDIIINIGVIAAGALTLLTHSSYPDLIIGMIVFVIVLFGARNILXXXHT

SEQ ID NO: 2099 - protein, 437 aa, Neisseria meningitidis
  misc_feature 2, 3: 'Xaa' is any amino acid
VXXFIGLLIIGVIVWLLLTEKVSPIIALILVPLFGALLAGFDVSQLKEFYSGGTKSVMQIVIMFMFSILFFGIMNDVGLFRPMIGGLIKLTRGNIVAVSVGTVLVSVVAQLDGAGATTFLLVVPALLPLYKRLHMNPYLLFLLLTSSAGLINLLPWGGPTGRVASVLGADVGELYKPLLTVQIIGVVFILALSLLLGVREKRRIVRELGALPAVADLIKPVPLSEEEQKLARPKLFWWNVLLFLAAMSLLFSGIFPPGYVFMLAATAALLLNYRSPQEQMERIYAHAGGAVMMASIILAAGTFLGILKGAGMLDAISKDIVHILPDALLPYLHIAIGVLGIPLELVLSTDAYYFGLFPIVEQITSQAGVAPEAAGYAMLIGSIVGTFVTPLSPALWMGLGLAKLSMGKHIRYSFFWAWGLSLAILASSIAAGIVPLP

SEQ ID NO: 2100 - protein, 1096 aa, Neisseria meningitidis
MKNQVRGSGMDARSNPANVSDGLQNSSGHIGTNTRYRLTKLGEQMARLPIDPKIARILLAAKKHDCMAEILVIASALSIQDPRERPLEARDAAAKAHERFTDKQSDFLAYLNIWDSFQRERDKGLSNKQLVQWCRQYFLSHLRMREWRELHHQLAQTAIEMGLTTKEAAFRRLSEIKQLTSSENQGDQDLSAKRKQKQLDKKQHRAQIRAAKEAGYEQIHRALLTGLIANVGMKSPDGNDYTGARGSRFHLFPASALFKAKPKWVMAAELVETTKLYARDVAVIQPEWIEQEAPHLVRYHYFEPHWEQKRGEVVASERVTLYGLTVLPRRPVPYGKVAPEEAREIFIRSALVAQECDLKADFFVHNKKLIKEITELEHKSRKQDVLVDDEALFAFYNERLPEMAWKDAQGSVWGSEDSVRIIESDKAERSSENERNEFRKNKRNGSRQNENHGNTVGWVENPTSAATAKTVGFDNPTYATQQPTPSPAREGRGEGKTVAAQTNFSATAANPLPQEREQSAAASAVSNDLHPANPQQTAPSPVGEGWGEGKTVATQTNFSATTANPLPNPLPQEGEQSAAASAVSNDPQPQKQPAPQKDRLKPLPLADIRTFQAWLKTAERENPRLLFLSRDDLMQHAAAHITEEQFPKFWQTADGKFELSYRFEPHHPLDGVTLTLPLTVLNRISPAALEWLVPGMLREKIQLLIKALPKQIRRICVPVPEFITQFLSQNPDRNAPILPQLAQAIAKTAGDIRIFEQINQDEWAAFRLPEHCYFNLRIIDDGGQELAIGRDLIQIQQQLGQAAAVTFRDNTQEFERDNVTTWDIGILPESIKFARGKQQLTGYLGLQKEKDGRIALRLFDTIEAAEQAHRQGVIELMKLQLKEQVKDLNKGIQGFTQAAMLLKHINADTLRDDLTQAVCDRAFIGEDELPRNEKAFKEQIKRARSRLPAVKEALSRYLQETAAAYAELNSKLGKHPLTHLLRQRLQTLLAAGFATRTPWAQWPRLPIYLKAMTLRLEKYSSNPARDAAREADIQELEQMWQEKTDSLIKQGLPISDGLAAFKWMIEELRVSLFAQELKTPYPVSVKRLLKMWEDLN

SEQ ID NO: 2101 - protein, 207 aa, Neisseria meningitidis
MMKPHNLFQFLAVCSLTVSVASAQAGAVDALKQFNNDADGISGSFTQTVQSKKKTQTAHGTFKILRPGLFKWEYTSPYKQTIVGDGQTVWLYDVDLAQVTKSSQDQAIGGSPAAILSNKTALESSYTLKEDGSSNGIDYVLATPKRNNAGYQYIRIGFKGGNLAAMQLKDSFGNQTSISFGGLNTNPQLSRGAFKFTPPKGVDVLSN

SEQ ID NO: 2102 - protein, 590 aa, Neisseria meningitidis
MIPSDFIDELLAKTDIVDIIDEQVPLKKGGANYMACCPFHKEKTPSFSVSPTKQFYHCFSCGAHGSAIGFVMEHQGLSFPEAVQFLADRVGMVVPKVRGQNDNPEVRAERKKKQQTLEETTAAAADFYAQQLKFNPAAKAYLDKRGLSAEVIAHYGLGYAPDGWQPLAQVFQPYPNTALVDTGMVIDNEGRYYDRFRHRIMFPIRNPRGQVIGFGGRVLDDSKPKYLNSPDTPLFDKGKNLYGLYEGRAAVKEAERILVVEGYMDVVALAQFGVDYGVAALGTATTAEHVKILMRQADSIYFCFDGDSAGRKAAWRALENALPQLKDDKSLHFLFLPEEHDPDSYIRAYGKAQFEDALLNQSKPLSEYFWEHLSDGIHLNTQEGKAELVKTSSPLLAQITAPALAYLLKQRLSELVGIDPDNLAQLLGQEAPKRHVKQKNYKLPPISVKQPVMLTLVQRQIRSLLINPDWAAYIDLPDYLALDGDFACLANLAESIKNHAAVPETAQVLEYMRGSPYEETITRIFHSTHQSEEMNSSSEEDCENFQIGMKKLLNELKYSQIETLKQKSLQSGLNESEKKLLLSLLTAKQN

SEQ ID NO: 2103 - protein, 334 aa, Neisseria meningitidis
MQRQIKLKNWLQTVYPERDFDLTFAAADADFRRYFRATFSDGSSVVCMDAPPDKMSVAPYLKVQKLFDMVNVPQVLHADTDLGFVVLNDFGNTTFLTAMLQEQGETAHKALLLEAIGELVELQKASREGVLPEYDRETMLREINLFPEWFVAKELGRELTFKQRQLWQQTVDTLLPPLLAQPKVYVHRDFIVRNLMLTRGRPGVLDFQDALYGPISYDLVSLLRDAFIEWEEEFVLDLVIRYWEKARAAGLPVPEAFDEFYRWFEWMGVQRHLKVAGIFARLYYRDGKDKYRPEIPRFLNYLHRVSRRYAELAPLYALLVELVGDEELETGFTF

SEQ ID NO: 2104 - protein, 344 aa, Neisseria meningitidis
MQTLTIIRPDDMHLHLRDGDALKAVAPYTARQMGRAVIMPNLKPPVVSVADALAYKARIMAVLPEGSAFEPLMTLYLTDQATPELVREAKAAGIVAFKLYPAGATTNSDSGVTDLFKLIPVLEEMAKQDILFLVHGEVTDPEIDIFDREAAFIERVMKPVLAQVPNLKVVFEHITTAEAARLVLEAGDNVAASVTPQHLLLNRNDLLVGGVRPHHFCLPVLKRETHRQALVAAVTGEKAHKFFLGTDSAPHAKSAKENACGCAGMFSAMTAVELYAEVFEKAGALDKLEAFASKNGARFYGIPENAGTITLVKQSQTVPASVPYGDGELVPMRAGGEIGWTVQY

SEQ ID NO: 2105 - protein, 96 aa, Neisseria meningitidis
MAKYFTETGISVREYFDFFGEFVVLPAARSGDLALAYGLRLEAGEEGLSLAELFDKRSDSQEPVECGRIDIGGFMLTAKEVDGDGNIGSMGLKVPR

SEQ ID NO: 2106 - protein, 107 aa, Neisseria meningitidis
MDIVQLGSAELKAWMDEGRMFCLLDVRTDEETAVCSLPNALHIPMNLIPLRQNELPDDVPLVVYCHHGIRSLHTAMYLADAGFENLYNLQGGIDAWAAEIDGNMMRY

SEQ ID NO: 2107 - protein, 226 aa, Neisseria meningitidis
  misc_feature 221, 222: 'Xaa' is any amino acid
MITLPSLNNLPSKWDEIRYWLETRVCECGVMPHPNLTECEAGQFDRDFWDNIGCAPEEYVRIRRAIRLLEARYPDSLNELVCAAIATPLGEMLAVFGNKGLCLLEFVGQKHLEQEIAAVQKALRGRFVFREDERTQLLRQELDLYFKGRLKTFATPLEQIGTEFQKQAWDALLAIPYGETRSYKEQAQRLGNPKAVRAVAAANGQNKVSVLIPCHRVIGSXXHTLN

SEQ ID NO: 2108 - protein, 119 aa, Neisseria meningitidis; identical to SEQ ID NO: 1252

SEQ ID NO: 2109 - protein, 322 aa, Neisseria meningitidis
MTAKPFSLNLTNLLLLAVLFAVSLSVGVADFRWSDVFSLSDSQQVMFISRLPRTFAIVLTGASMAVAGMIMQILMRNRFVEPSMAGAGQSAALGLLLMSLLLPAAPLPVKMSVAAVAALIGMLVFMLLIRRLPPTAQLMVPLVGIIFGGVVEAVATFIAYENEMLQMLGVWQQGDFSSVLLGRYELLWITGGLAVFAYLIADRLTILGLGETVSVNLGLNRTAVLWSGLIIVALITSLVIVTVGNIPFIGLVVPNIISRLIGDRLRQSLPAVALLGASLVLLCDIIGRVIVFPFEIPVSTVFGVLGTALFLWLLLRKPAHAV

SEQ ID NO: 2110 - protein, 709 aa, Neisseria meningitidis
MAYQVLARKWRPKTFADLVGQEHVVKALRNALDEGRLHHAYLLTGTRGVGKTTIARILAKSLNCENAQHGEPCGVCQSCTQIDAGRYVDLLEIDAASNTGIDNIREVLENAQYAPTAGKYKVYIIDEVHMLSKSAFNAMLKTLEEPPEHVKFILATTDPHKVPVTVLSRCLQFVLRNMTAQQVADHLAHVLDSEKIAYEPAALQLLGRAAAGSMRDALSLLDQAIALGSGKVAENDVRQMIGAVDKQYLYELLTGIINQDGAALTAKAREMAACAVGFDNALGELAILLQQLALIQAVPNALAHDDPDSDILHRLAQTIGGEQIQLYYQIAVHGKRDLGLAPDEYAGFMMTLLRMLAFAPLAAASCDANAVIENTELQSPSVQTAEKEAAAKKPQPRPEAETAQTSVQTASAAAMPSESKTAEPVSNQENNDVPPWEDAPDEAQTAAGTAQTSAKSIQTASEAETPPENQVSKNKAADNETNAPLSETPSENPIQATPNNEAVETETFAHEAPAEPFYGYGFPDNDCPVEDNAEIPPPDWEHAAPADTAGGGADEEAEAGGIGGNNTPSAPPPEFSTENWAAIVRHFARKLGAAQMPAQHSAWTEYHPDTGLMVLAMTAEARATADKKRLDKIRDTLAQAYGLQLTLQTQDWQDEAGRETPAMQDKRVQIEDRQKAQALLEADPAAQKILQAFGAQWQPESLELAANRP

SEQ ID NO: 2111 - protein, 94 aa, Neisseria meningitidis
MFGGRLKNSPSITAKHFLKENIMKFINTCRKYGAKLAVVTAAPLALAAHANATLPDTAKNALEAAKADGMEAGWIVVGVFAALFVFSIVKRVMK

SEQ ID NO: 2112 - protein, 298 aa, Neisseria meningitidis
MLTFQQIIFKLQTFWADKGCTVIQPFDMEVGAGTSHPATCLRALGPEPWFAAYVQPSRRPKDGRYGDNPNRLQHYYQFQVALKPAPANIQDLYLDSLRELGIDPKVHDIRFVEDDWENPTLGAWGLGWEVWLNGMEVTQFTYFQQVGGIDCTPVLGEITYGIERLAMYLQGVENVYDLVWAKTLDGNTVTYGDVYHQNEVEQSTYNFEYSDADWLLRQFNDYEAQAKRLLAVEEASLALPAYELVLKAGHTFNLLDARGAISVTERATYIGRIRALSRAVAQKYVESREKLGFPLIKK

SEQ ID NO: 2113 - protein, 426 aa, Neisseria meningitidis
LKDCFPQGLNGKKTAVALSGGLDSVVLLHLLVRAGKRAGFVPEALHIHHGLSPRADDWADFCQNYCDMLGVGLETVKVCVEKNGLGIEAAARQKRYAAFAEKGFDILALAHHRDDQIETFMLAVARGGGLRALAAMPAVRPFGEKGIIWRPLLPFSRQDIWDYAQKHGLPNIEDESNTDTAYLRNRFRHRILPELSAQIPHFGRHVLNNVRALQEDLALLDEVVVQDCRWVCGAGYFDTARWLTFSPRRKTHILRHFLKENGIPVPNQNALADIARVLTEAKTGRWNLQGFELHHYAGRLFVFRQEKTDKLRFLKDRQISGNLREILTGQGFVLKRHPFGLPEHLLEQDGILRTVAASDTLAVGGIHKDVKKILQGKRVLPVLRPIWPLVADSGNRPLALANCCADFQYSVSDGILPVHPDFPILF

SEQ ID NO: 2114 - protein, 387 aa, Neisseria meningitidis
MNITIVAPYCSLPSEPYFNCFWYLAERLSQSHDVLLITSRFRHYDKSFRRHEDAAATSNGRLRVKLLDEPGYRKNVSLARVASHRVFVRNLARWLHSPQAAEQDIVYSAYPLMATNLLLGKHKARLGYKLIVDVQDVWPESFSSVVPFLKKVPHKLLPFASRANRAYRCADALVAVSQTYLDRAKEANPNVPGEAVYIGTDFAAIAPPRFRSKTTRLFYLGTLSYSYDVETVCKGVRKLLDDGENVELHIMGGGPDLEKLKQYENRAIKFYGYLPYSEMMSIAKGCDIAVNAIHSHAMQSVTNKLSDYMALQKPILNSQTNAEVLSLLNLLPHENYRSGDVDSFVQAAKDILKRKNDPVQSEEIVRRFKRDVAYQKIVNLIERLAHE

SEQ ID NO: 2115 - protein, 203 aa, Neisseria meningitidis
MAAPAGVATECRLTVQGGTDRESDASLLARLLEIIRRPPAGGNRYDYKNWALSVDGVTSAYVYPLRRGLGTVDIAITSADGVPSEETVRRVQAYIDEMRPVTAKNALVLKPTVTAVPVTVQVKLDGIDLDEAKRRIRTALKEYFDTLIPGDGLTVSQIEAAISNVDGVIDRRLTAPTANRAADTVNRIEWFKAGAINVTEMPS

SEQ ID NO: 2116 - protein, 149 aa, Neisseria meningitidis
  misc_feature 143, 144: 'Xaa' is any amino acid
MSQLANAIRFLSADAVQKANSGHPGAPMGMAEMAETLWTKFLNHNPANPKFYNRDRFVLSNGHASMLLYSLLHLTGYNLSIEDLKNFRQLHSKTPGHPEYGYTDGVETTTGPLGQGIANAVGMALAEKILAAEFNKDGLNIVXXTHLIN

SEQ ID NO: 2117 - protein, 488 aa, Neisseria meningitidis
MAEATDVVLVGGGIMSATLGVLLKELEPSWEITLIERLEDVALESSNAWNNAGTGHSALCELNYAPLGANGIIDPARALNIAEQFHVSRQFWATLVAEGKLEDNSFINAVPHMSLVMNEDHCSYLQKRYDAFKTQKLFENMEFSTDRNKISDWAPLMMRGRDENQPVAANYSAEGTDVDFGRLTRQMVKYLQGKGVKTEFNRHVEDIKRESDGAWVLKTADTRNPDGQLTLRTRFLFLGAGGGALTLLQKSGIPEGKGYGGFPVSGLFFRNSTPETAEQHNAKVYGQASVGAPPMSVPHLDTRNVDGKRHLMFGPYAGFRSNFLKQGSLMDLPLSIHMDNLYPMLCAGWANMPLTKYLLGELRKTKEERFASLLEYYPEANPDDWELITAGQRVQIIKKDSEKGGVLQFGTEIVAHADGSLAALLGASPGASTAVPLMIRLMHQCFPERAPSWEGRLKELVPGYGIKLNENPERADEIIAYTAKVLDI

SEQ ID NO: 2118 - protein, 155 aa, Neisseria meningitidis
MQVFLTIPGYDVEAEIEKFVWMDAVIWQMPSWWMHEPWTVKKYIDEVLTAGHGKLYQSDGRHSVNPTEGYGTGGLLQGKKHMLSLTWNAPIEAFTREGDFFEGKGVDVLYMHFHKANEFLGMTRLPTFLCNDVVKNPQVEKYLADYQAHLEKVFG

SEQ ID NO: 2119 - protein, 223 aa, Neisseria meningitidis; identical to SEQ ID NO: 1391

SEQ ID NO: 2120 - protein, 206 aa, Neisseria meningitidis; identical to SEQ ID NO: 1725

SEQ ID NO: 2121 - protein, 487 aa, Neisseria meningitidis
MRIVEKAYTFDDVLLVPAHSTVLPRDVKLQTKLTREITLNLPLLSAAMDTVTEARLAISMAQEGGIGIIHKNMPPEMQARAVSKVKRHESGVVKDPVTVAPTTLIREVLEMRAQRKRKMSGLPVVENGKVVGIVTNRDLRFENRVDLPVSAIMTPRERLVTVPEGTSIDEARELMHTHKVERVLVLNEKDELKGLITVKDILKTTEFPNANKDSEGRLRVGAAVGTGGDTEERVKALVEAGVDVIVVDTAHGHSQGVIDRVKWVKETYPHIQVIGGNIATAKAALDLVAAGADAVKVGIGPGSICTTRIVAGVGVPQLTAIHNVAEALKGTGVPLIADGGIRFSGDIAKALAAGAYSVMLGGMFAGTEEAPGEIELYQGRSYKSYRGMGSLGAMSQGSADRYFQDKTDSADKYVPEGIEGRVPYKGPIVNIIHQLTGGLRSSMGYLGCANIAEMHEKAEFVEITSAGMSESHVHDVQITKEAPNYHR

SEQ ID NO: 2122 - protein, 57 aa, Neisseria meningitidis
LRLKIKLPSVVGITTQKNELLDIPMFFICFYIVMRSDKRPPDICLDGIVLLNFYKYV

SEQ ID NO: 2123 - protein, 160 aa, Neisseria meningitidis
MKYLNLAAITLAATFAAHTASADELAGWKDNTPQSLQSLKAPVRIVNLWATWCGPCRKEMPAMSKWYKAQKKGSVDMVGIALDTSDNIGNFLKQTPVSYPIWRYTGANSRNFMKSYGNNVGVLPFTVVEAPKCGYKQTITGEVNEKSLTDAVKLAHSKCR

SEQ ID NO: 2124 - protein, 718 aa, Neisseria meningitidis
MPVPQPTAPYDPLTAEARTLLFHTASYLKPEEQAELEKAVAYAFRAHDGQTRKSGEPYITHPIAVATQLAVWHMDVQGLCAGVMHDVLEDTGVTKGEMAAVFGNTIAEMVDGLSKLEKLKFEDHAEHQAESFRKLILAMTKDVRVIVVKLADRLHNMRTLGSMRPDKRRRIARETLEIYAQIANRIGLNNAYQELQDLSFQNLHPNRYETLKKAMDKSRKNRQDVVGKVLRAFGQRLVGANIEAKIKGREKNLYGIHQKMMAKKLRFAEVMDIYGFRVIVNSIPACYAALGALHTLYQPKPGRFKDYIAIPKSNGYQSLHTTLVGPYGLPIEVQIRTKEMDAVAEGGIAGHWSYKSYSKMVDQAVLHTNRWLKNILDLQASSANAIEFLEHVKVDLFPNEIYILTPKGKILTLPKGATPVDFAYAVHTDIGHKTVAARINNIMMPLRTKLKTGDSVEIITSEHAKPNPAWLNFAVSGRARSAIRQYIKNLNRHDAVVLGESLLQKALSSLLPKDVLLSDGIKEKYLADLNDKQTSFEEVLYNVGMGHTLPVYVAMHIAELAGEHFGSEVRLSSIKVDGQESGHIHFAECCHPVPGDSIRLLLVKGKGMIIHRDTCPTLLKSDPEQQLDADWENMNGQNYRVGLQVQSEDSHGLLALMAQAISDSGADIESVETPSKSQSGTEGFVEFKFLLKVKNLNQLNQIIQNLHSIPYIRKVIRS

SEQ ID NO: 2125 - protein, 93 aa, Neisseria meningitidis
MENGQRNNRFPLEKRIFYLEHSGRYLMICALSDYSQNKHTVVMANFIYPDEKTDWRNLDDLFNELVLEELQASFMDWHPTVEEAISRHLEDFS

SEQ ID NO: 2126 - protein, 328 aa, Neisseria meningitidis
MKHFLSLFASILMSALIAAWFAQNPINAYWQQTYHRNSPLEPLAAYGWWRSGAALQENAYTLSDGIKAFLSGETPPTAQDGGSADMPPEAAASEAAPQTGEIQEWKQDTDTAAVRSGDKVFFAGDSLMQGVAPFVQKSLKQQYGIESVNLSKQSTGLSYPSFFDWPKTIEETLKKHPEISVLAVFLGPNDPWDFPVGKRYLKFASDEWAQEYLKRVDRILEAAHTHRVQVVWLGIPYMKKAKLDGQMRYLDKLLSEHLKGKIILIPTAHTLSGGKDRYTDSVNVNGKPVRYRSKDGIHFTAEGQKLLAAKIMEKIVFEPSTQPSSTQP

SEQ ID NO: 2127 - protein, 219 aa, Neisseria meningitidis
VQADLAYAAERITHDYPKATGANNTSTVSDYFRNIRAHSIHPRVSVGYDFGGWRIAADYASYRKWKESNYSKKVTEFKHQNGTKKEDKTEHQGNGSFHAASSLGLSAIYDFKLNDKFKPYIGARIAYGHVKHQIHSVESKTTTVTSNNGGPIPQGPTPKPPYHESNSISSLGLGVIAGVGFDITPKLTLDTGYRYHNWGRLENTRFKTHEVSLGVRYHF

SEQ ID NO: 2128 - protein, 93 aa, Neisseria meningitidis
MKKSLFAAALLSLVLAACGGEKAAEAPAAEAPAAEAPATEAPAAEAPAAEAAATEAPAAEAPAAEAAATEAPAAEAAATEAPAAEAPAAEAAK

SEQ ID NO: 2129 - protein, 394 aa, Neisseria meningitidis; identical to SEQ ID NO: 277

SEQ ID NO: 2130 - protein, 236 aa, Neisseria meningitidis
MHETTDRLFEIAKEQGVLKPADIAERLNISQQALKNWESRGIAAKALPEVAKAFGVSETWLRTGEGSRTAPVLIDPDLPHEVKDIHRPMTWSSNDPLPDDDYVFVPYLKESCFKGGVGTYEIPDYNGYRLPFGKSTLKRKGINPDNVFCCTLTGDSMEEKIAEDAAIAVDTGETAIRDGKIYAFAQDGMFRVKYLIRQPGNSVLIRSHNSGFYGDENAPLDSLTVIGRVFWWSVLD

SEQ ID NO: 2131 - protein, 146 aa, Neisseria meningitidis
  misc_feature 142, 143, 144: 'Xaa' is any amino acid
LELPVLEASIGHDVVDIRGLTKNTGLFSFDPGFVSTASCESKITYIDGDQGLLYYRGYPIEQLAEKSDYLEVCYLLIYGELPTPEQKAEFDNTVRRHTMVHEQLTWFFRGFRRDAHPMAMMVGVVGALSAFYQDSLDISNPXXXHT

SEQ ID NO: 2132 - protein, 278 aa, Neisseria meningitidis
MIDLHCHSIVSDGMLSPAEVVRLAHQNGCTLLALTDHDHTGGIAEARAEADRLGLRLINGVEISVTWRGRTIHVVGLDFDEQDENLQNLLAQVRQGRLKRLEAIAAKLEKKGIGGAYDGALALAANKEMVSRTHVAEFLIRAGHVKNKQQAFTKYLGDGKSCAVRHEWATLEDCVSAVNGAGGMAVIAHPMRYDLSATAKRNLFEEFKNLGGAGIEVHSGNCCKNDRLNYALLAERFGMLASAGSDFHRLNDFSGGILGACPELPENCRPVWAHFSRH

SEQ ID NO: 2133 - protein, 310 aa, Neisseria meningitidis
MKQNRTFTFPDFRTVYSYAPLYRLQHLKYTLRKFFGKKEIYAFEQFVNASPIRQGLFLHCPQNAYPLLREFVDRRFNCKRRLDAMTADFLMAEKLFGTDILHQMEDYRFHLVLAHLSDGISLWLNRNDNCVEEGAWSLSLRDEAGNRLYMATFAFVGTHLLTASVQGPAGEEAKDTVRRITKQLHGLRPQQLMVTALQYFAAVLGLDGAMGIAQKHQVKLRWKLKKRVKMNYDAFWQEYGASLERDGYWHLPQTPARKDLADIESKKRSMYRKRYEMLDNMVAEMKDGLKTEARGISDGIQTEKPLRRTA

SEQ ID NO: 2134 - protein, 413 aa, Neisseria meningitidis
MPTKTPSLFGCAMIIAGTVIGAGMLANPTATSGVWFTGSLAVLLYTWFSMLSSGLMILEVNTHYPHGASFDTMVKDLLGRGWNIINGIAVAFVLYLLTYAYIFVGGDLTAKGIGNALGGNVSLTVGQLVFFGILAFCVWASARLVDRFTSALIGGMVLTFIWATGGLIADAKMPVLFDTQAPAGTGYWIYAATALPVCLASFGFHGNVSSLLKYFKGDAPKVAKSIWMGTLIALVIYVLWQTAIQGNLPRNEFAPVIAAEGQVSVLIETLSKFAQTGNMDKILSLFSYMAIATSFLGVTLGLFDYIADIFKWNDSVSGRTKTAALTFLPPLISCLLFPTGFVTAIGYVGLAATVWTGIIPAMLLYRSRKKFGAGKTYKVYGGLWLMVWVFLFGIVNIAAQVLSQMELVPVFKG

SEQ ID NO: 2135 - protein, 349 aa, Neisseria meningitidis; identical to SEQ ID NO: 328

SEQ ID NO: 2136 - protein, 213 aa, Neisseria meningitidis
MKLYIYDHCPFCVRARMAAGLFGADVEEAVLANDDEATPIGMIGAKQVPVLQKEDGSFMGESLDIVRHFDREDRLKDEVRPEIRAWLDKVGGYNDKLVQPRVIKIGLPEFATPEAVKYFTDKKEKSIGSFSANLNKTAQYLERINADLQELENLMDGASDGINGGIGMEDILVFPVLRNLTVVRGIEWPQKVMGYLMTMSEKSGVPLYFDRAL

SEQ ID NO: 2137 - protein, 92 aa, Neisseria meningitidis
LRGKTKVMTTQMCASRDVSKSAKGWSVGIGLNVGKQLTDSVGLEFDPYYRHKTICKPREIVLDGDKTKMGRSKSNEYGFRVTATFYSQLKSK

SEQ ID NO: 2138 - protein, 265 aa, Neisseria meningitidis
MKALHKTSFWESLAIQRRVIGALLMREIITRYGRNNIGFLWLFVEPLLMTFVIVLMWKFLRADRYSTLNIVAFAITGYPMLMMWRNASKRAVGSISSNASLLYHRNVRVLDTILARMILEIAGATIAQIVIMAVLIAIGWIEMPADMFYMLMAWLLMAFFAIGLGLVICSIAFNFEPFGKIWGTLTFVMMPLSGAFFFVHNLPPKVQEYALMIPMVHGTEMFRAGYFGSDVITYENPWYIVLCNLVLLLFGLAMVSKFSKGVEPQ

SEQ ID NO: 2139 - protein, 597 aa, Neisseria meningitidis
MKNIRNFSIIAHIDHGKSTLADRFIQYCGGLDLREMSTQVLDSMDIEKERGITIKAQTAALNYKARDGQVYQLNLIDTPGHVDFSYEVSRSLSACEGALLVVDASQGVEAQTVANCYTAIDLGVEVVPVLNKIDLPAADPERVEQEIEDIIGIDAVGAVQCSAKSGIGVEDVLEEIVAKIPAPTGDENAPLQAVIVDSWFDNYVGVVMLIRVKNGTIKLKDKVRFMSTKAETQVEQLGVFTPKSVQKQELKAGEVGFLITGVKELGQAKVGDTVTLVANPASEPLPGFQEVQSQVFAGLYPVESHDYEALRDALEKLQLNDASLKFEPEVSQALGFGFRCGFLGLLHLEIVQERLEREFDMDLITTAPTVVYEVVLKSGEKIEVENPSKLPDIGSIETILEPIITATILVPQEYVGNVMTLCNQKRGVQVNMQYMGRQVMLTYDLPMNEVVMDFFDKLKSTSRGYASLDYHFKEFQPSDLIKLDIMVNGEKVDALSLIVHRQSAVHRGRELASKMRELIPRQMFDIAVQAAIGSQIIARENVKALRKNVLAKCYGGDITRKKKLLEKQKAGKRRMKQVGNVEIPQSAFLAILQVSDK

SEQ ID NO: 2140 - protein, 171 aa, Neisseria meningitidis
MYTCTSCGEKHEDMPAIGFTAPDPYNQLSEEERIAYQAECDSDFCIIRYPDQTDRFIRAVLPIPIIGHQETLEYGVWVSVSEKSFNDYQSHFHDNPENVVYFGMICNRLPPYESDTFGLHCNVVTQPDGQRPLLQLHQSGGHPLVRDFYHGIEYAEAQARIGAVSESDCSG

SEQ ID NO: 2141 - protein, 468 aa, Neisseria meningitidis
MKLFQRIFATFCAVIVCAIFVASFSFWLVQNTLAENQFNQRRTIETTLMGSIISAFRARGDAGAREILTEWKDSPVSSGVYVIQGDEKKDILNRYIDSYTIERARLFAAGHPHSNLVHIEYDRFGEEYLFFTKDWDKLQARRLPSPLLIPGLPLAPIWHELIILSFIIVVGLLMAYILAGNIAKPIRILGNGMDRVANGELETRISQQVDDRDDELSHLAIQFDKMVEKLEKLVAKERHLLHHVSHEMRSPLARMQAIVGLIQAQPQKQEQYLKRLEGELTRMDTLAGELLTLSRLETSNMALEKESLKLLPFLGNLVEDNQSIAQKNGQTVTLSADGKIPENTTILANESYLYRAFDNVIRNAVNYSPEGSTILINIGQDHKHWIIDVTDNGPGVDEMQLPHIFTAFYRADSSANKPGTGLGLALTQHIIEQHCGKIIAENIKPNGLRMRFILPKKKTGSKTEKSAN

SEQ ID NO: 2142 - protein, 418 aa, Neisseria meningitidis
MKVLVLGAGVAGVSSAWYLAEAGHEVTVIDRAEGVAMETSFANAGQLSYGYTTPWAAPGIPTKALKWLFKSHPPLLFRPDGSLYQIEWLWQMLQNCTAAHYQTNKERMVRISEYSREMFRRFEAQTGMNFEERKKGTLQIFRQTKEVEAAEQDIAVLERYGVPYRRLKPEECAEFEPALARVTAKIAGGLHLPADATGDCHLFTENLYKLCQEKGVQFHFNQTISRIDHNGLRIKAVETETGRFEADAVVCALGCFSRTVLAQLDLNLPIYPVKGYSLTLPVTNSDGAPVSTVLDESYKVAITRFDNRIRVGGMAELSGYEIKLPEKRRETLALVVNDLFPEGGDLSQASFWSGLRPMTPDSTPLIGRTRFENLFLNTGHGTLGWTMSLGSAKLTADIVSGKDTEIRSDDLSLSRYQA

SEQ ID NO: 2143 - protein, 134 aa, Neisseria meningitidis
MTAQPCPICTAQDEDILLQTPKLRVIAVHNDSGSPAFCRVIWRKHIAEMTDLSAAERGELMEMVYKVEAAMRQVFQPAKINLASLGNVVPHLHWHIIARFENDASFPAPIWANPVRKHGMTLPQDWTEQLKKLL

SEQ ID NO: 2144 - protein, 163 aa, Neisseria meningitidis
MKYRRFYRNGGTYFFTVVTNKRQKILTDDAVRLALRQAVMAVRERYPFEILAWVLMPDHLHTIWRLPDNDSAYSERWRQIKRHSQYLIGGNLRLWQKRFWEYTIRDEADFAWHFDYLHFNPVKHGYVGQISDWRFSTFHRYVKQGIYPHNWGGGNADFSIGYD

SEQ ID NO: 2145 - protein, 231 aa, Neisseria meningitidis
MKAMILAAGRGERMRPLTDTTPKPLLDVAGKPLIGWHLCRLKQAGFTEIVINHAWLGRQIEDVLGDGSAYGVNIAYSPEPAGGLETAGGIAQALPLLGGQPFLVVNGDVLTDIDFTAAFQTASSLPEHISAHLWLVENPPHNPDGDFSLLPDGSVRPEVNGGNGLTFSGVGIYRPEMFDGIEAGSVAKLAPVLRGEMRQNRVSGQKHTGLWLDVGTVCRLKEAQALAGAWK

SEQ ID NO: 2146 - protein, 127 aa, Neisseria meningitidis
MEPSSYAAEKKGKGGIRRVINAFGYSIDGIAAAYRYEAAFRQVLWLNVLLVCAAFFWVSETAVRLPLIIASFVSVIVELFNTAVEAAVDHTSTEKHELAKRAKDAGSAAQLFAMLMLAAVWLSALFG

SEQ ID NO: 2147 - protein, 48 aa, Neisseria meningitidis
MIYGSMPSEKLTIFQTAFVMQVNIQIPYILPRCVRAEDTPYACCRTFG

SEQ ID NO: 2148 - protein, 473 aa, Neisseria meningitidis
MTTIYNTLTRQKEPFAPIDPENVRMYVCGMTVYDYCHLGHARVMVVFDMIARWLRECGYPLTYVRNITDIDDKIIARAAENGETIGELTARFIQAMHEDADALGVLRPDIEPKATENIPQMIAMIETLIQNGKAYPAANGDVYYAVREFAAYGQLSGKSLDDLRAGERVEVDGFKRDPLDFVLWKAAKAGEPAWESPWGNGRPGWHIECSAMSENLFGDTFDIHGGGADLQFPHHENEIAQSVGASGHTCGHDHAQTHHGQSIASHVKYWLHNGFIRVDGEKMSKSLGNFFTIREVLKQYDPEVVRFFILRAHYRSPLNYSDAHLDDAKGALTRLYTTLKNTPPADPMPSEADDDYTRRFYVAMNDDFDTVKAVAVLFELAGEVNKTNDAQLAGCLKALGGIIGLLQRDPTEFLQGGAASDGLSNEEIEDLIARRKQARSDKNWAESDRIRDLLNEHKIILEDNAGGTTWRRG

SEQ ID NO: 2149 - protein, 539 aa, Neisseria meningitidis
MDNLVWDGVPDIRTLDQTIRKHAHPLNLIVCLPDNQIPDFQTAQDASDAECRLKHRLDQATQCLQFDSINLIEHILHDVRFWLVPPSRTRRLHEHFHHISWQTEAIPQTESKPDKPWFALPQTSERQKPEHILVIGAGISGAATAHALASYGISVTVLEARKAAQAASGNRQGLLYAKISPHDTEQTELLLAGYGYTKRLLGHILPESETWGGNGIIHLNYSRTEQQRNHELGLQKHHNHLYRSITQAEAEKIAGIPLSVPYDHPSCGLYWQHGVWLNPPAFVRTLLNHPLIGLHEDTPLTDISHDGEKWIASTPNGIFSATHIIYCTGAHSPRLPETNLAALPLRQIRGQTGLTPSTPFSEQLRCAVSGESYISPSWHGLHCYGASFIPNSSHTGWNEAEEASNRQALAHLNPALSESLFAANPNPQKHQGHAAIRCDSPDHLPLVGALGDIAAMQQTYAKLALDKNYRIDAPCPYLPNAYANTAHGTRGLATAPICAAAVAAQILGLPHPFSQRLRHALHPNRTIIRAIVRRKDLTP

SEQ ID NO: 2150 - protein, 528 aa, Neisseria meningitidis
MALFLSIFPIVLLIWLMVKKNSMPSYVALPITAVLIYAIKLFYFDDAGMLLNATAASGLVKTLTPITVIFGAIMFNRMMETTGCIDVIRKWLATISPNPVAQLMIIGWAFAFMIEGASGFGTPAAIAAPILMSLGFNPLKVAIFTLVMNSVPVSFGAVGTPTWFGFAPLNLSAEDILAIGRQTGVMHFFAGFVIPVIGLGFIVPWSEIRKNLGFVAIAVFSCTIPYVALAMVNEEFPSLVAGAIGLMVSVFAANQGWGLSKDHAKDPNAEKVPFAQVAKALAPLGMLIGMLVVTRIKQLGIKGILTSKEEWFSFQLPFDLSKITVSDSLTITFGNIFGQDVSASYQTLYVPAWIPFVLTVWICILLYKTKFKDAWTIYSVTFNQTKKPLLALMGALIMVQLMLVGGDNSMVKIIGKEFAAMAGEHWVYFSPYLGAIGAFFSGSNTVSNLTFGPIQQQIALDTGLSVTLILALQSVGGAMGNMVCLNNIIAVCTVLDVKNSEGAIIKKTVIPMAIYGVIAVVAAMIFFL

SEQ ID NO: 2151 - protein, 72 aa, Neisseria meningitidis
  misc_feature 2, 3, 4: 'Xaa' is any amino acid
VXXXLVVRLKPSNDQRRVFLKLTAEGEKLYEEIGEEVDERYDAIEEVLGREKMLLLKDLLAELAKIEDALNS

SEQ ID NO: 2152 - protein, 121 aa, Neisseria meningitidis; identical to SEQ ID NO: 1070

SEQ ID NO: 2153 - protein, 300 aa, Neisseria meningitidis
MDSLMTLLSVLIPMFAGFFIRVPKPYLPALDKVLSVLVYAVLLLIGVSLSRVEDLGSRLDDMALTVLWLFVCTVGANLLALAVLGKLFPWRIKGKGKGVSVGVSGSVGQLGCVLLGFASGKLMRDIWMPSENAGMYCLMLLVLLIGVQLKSSGVSLRQVLVNRRGIRLSVWFMLSSLSGGLLFAASADGVSWVKGLAMASGFGWYSLSGLVMTEAYGAVWGSIALLNDLARELFALAFIPLLMKRFPDAAVGVGGATSMDFTLPVIRGAGGLEAVPVAVSFGVVVNIAAPFLMVVFSALG

SEQ ID NO: 2154 - protein, 327 aa, Neisseria meningitidis
MSEIKTDDPKRGIKLRGADKTARIPIKVVPLQEKLKKPEWIRAKLPSRKFFEIKDILREQKMHTVCEEASCPNIGECFSKGTATFMIMGDICTRRCPFCDVGHGRPNMLDPDEPKNLAESVKAMNLRYVVITSVDRDDLRDGGAQHFADCIKAIRETSPNTKIEILVPDFRGRLDIALKILAETPPDVMNHNLETHPSLYRKARPGANYQHSLDLLKRYKEMMPHIPTKSGIMVGLGETDEDVREIMRDMRAHNIEMITIGQYLQPSDGHLPVLRYVTPEQFKIFEKEAYELGFSNAAIGAMVRSSYHADEQAAEALRESHGGCGHH

SEQ ID NO: 2155 - protein, 796 aa, Neisseria meningitidis
MTEQKHEEYGADSIQVLEGLEAVRKRPGMYIGDTQDGSGLHHMVFEVLDNAIDEALAGHCDKITVTIHADHSVSVADNGRGMPTGIHPKEGRSAAEVIMTVLHAGGKFDNNSYKISGGLHGVGVSVVNALSDWVTLTIYRDGKEHFVRFVRGETEEPLKVVGDSDKKGTTVRFLASAETFGNVEYSFDILAKRIRELSFLNNGVDIELTDERDGKHESFALSGGVAGFVQYMNRKKTPLHEKIFYAFGEKDGMSVECAMQWNDSYQESVQCFTNNIPQRDGGTHLTALRQVMTRTINNYIEANEVAKKAKVETAGDDMREGLTCVLSVKLPDPKFSSQTKDKLVSGEIGPVVNEVISQALTDFLEENPTEAKIITGKIVDAARAREAARKAREITRRKGVMDGLGLPGKLADCQEKDPALSELYLVEGDSAGGSAMQGRDRKFQAILPLKGKILNVEKARFEKMLASQEVATLITALGAGIGKEEFNAEKLRYHRIIIMTDADVDGAHIRTLLLTFFYRQMPELVERGYIYIAQPPLYKAKYGKQERYLKDELEKDQWLLGLALEKAKIVSDSRTIEGEELANTAKQFLLAKTVIEQESRIIDELVLHAMLHASPVDLSTAESADRSVAELSGLLDEKEVALERIEGHEGHQFIKITRKLHGNVVVSYLEPKFLNSKAYQTLTQTAAALKGMVGKGAKLYKGDNEYDIDSFEGALDILMSVAQKGMSIQRYKGLGEMNPEQLWETTMDPTVRRLLKVRIEDAIAADEVFVTLMGDEVEPRRAFIENNALIAQNIDA

SEQ ID NO: 2156 - protein, 133 aa, Neisseria meningitidis
MNTTRLPTALVLGCLCAAASAADNSIMTKGQKVYESNCVACHGKKGEGRGTMFPPLYRSDFIMKKPQVLLHSMVKGINGTIKVNGKTYNGFMPATAISDADIAAVATYIMNAFDNGGGSVTEKDVKQAKGKKN

SEQ ID NO: 2157 - protein, 359 aa, Neisseria meningitidis
MKTLTVHTPSHSYPIFIGNGLLPQAGSLLKPHLGKRAAIIANETVAPLYLGTLQTALDAAGVSHFSIILPDGEAHKNWQTLNLIFDGLMQNRAERKTTLIALGGGVIGDMVGFAAATYQRGAPFVQIPTTLLSQVDSSVGGKTAINHPLGKNMIGAFYQPQAVLADLDTLHTLPARELSAGMAEVIKYGALGDIGFFEWLEQHMPELMTLDREKLAQAVYRCCQMKADIVAQDETEQGIRAWLNLGHTFGHAIETEMGYGTWLHGEAIAAGCVLAARLSEQLGKTSAADTARLAALLEAAGLPSAPPVFAFEKWLEHMSHDKKVSGGIMRFIGLNRLGEANITEITDTDILRRTLQPYL

SEQ ID NO: 2158 - protein, 553 aa, Neisseria meningitidis
MTESITRDSMQYDVVIVGAGPSGLSAAIKLKQLAEQNGREISVCVVEKGSEAGAHSLAGAVIDPIALNELIPDWKEKGAPLTRTVTQDKVLFLTEKKAFNLPITPNFDNHGNYIVSLGEVVRWLAEQAENLGVEIYPGFAAAEVLYHKDGSVKGIATGNMGVGKNGEPTDSFQPGMELWARQTLFAEGCRGSLSKQIIERFKLDQNSQPQTYGLGIKEVWEVPSEQHQPGLVVHSAGWPLDSKTYGGAFVYHFDDNKVAVGFVVGLDYQNPYLSPFEEFQRFKTHPEIRKTFEGGRRIAYGARSLIEGGFQSLPKLSFKGGVLVGDAAGFLNMPRIKGIHTAMKSAMLAAEAVFPLLENLEEVENFDSGKEAADYQQRFEQSWLYQELYAARNVRPSFKWGVYLGSIYTGIDQMIFRGKAPWTLKHHGKDNEQLKKAAACKPIAYPKPDGVLTFDRLSSVFLANLAHEENQPDHLVLNNPQTMINVNYKEYASPETRYCPAGVYEIIEENGNPRLQINAANCVHCKTCDIKDPTQNITWICPEGASGPNYGGM

SEQ ID NO: 2159 - protein, 347 aa, Neisseria meningitidis
MQITDLLAFGAKNKASDLHLSSGISPMIRVHGDMRRINLPEMSAEEVGNMVTSVMNDHQRKIYQQNLEVDFSFELPNVARFRVNAFNIGRGPAAVFRTIPSTVLSLEELKAPSIFQKIAESPRGMVLVTGPTGSGKSTTLAAMINYINETQPAHILTIEDPIEFVHQSKKSLINQRELHQHTLSFANALRSALREDPDVILVGEMRDPETIGLALTAAETGHLVFGTLHTTGAAKTVDRIVDVFPAGEKEMVRSMLSESLTAVISQNLLKTHDGNGRVASHEILIANPAVRNLIRENKITQINSVLQTGQASGMQTMDQSLQSLVRQGLIAPEVARRRAQNSESMSF

SEQ ID NO: 2160 - protein, 132 aa, Neisseria meningitidis; identical to SEQ ID NO: 1178

SEQ ID NO: 2161 - protein, 183 aa, Neisseria meningitidis
VNYCEFAASLPENTDNPNKHYHDTQYGFPIDSDNGLFERLVLEINQAGLNWTLMLKKQQAFQTAFEGFDIDTVAAFDDTDRERLLADAGIVRNRLKIDAAIFNARQIQALQQEYGSFKNWLDTHHPRSKDEWVKLFKKHFKFVGGEIVGEFLMSTGYLKGAHAESCPVYRETLKYHPKWLDAI

SEQ ID NO: 2162 - protein, 637 aa, Neisseria meningitidis
MNPSPLLDLIDSPQDLRRLDKKQLPRLAGELRAFLLESVGQTGGHFASNLGAVELTIALHYVYNTPEDKLVWDVGHQSYPHKILTGRKNQMHTMRQYGGLAGFPKRCESEYDAFGVGHSSTSIGAALGMAAADKLLGSDRRSVAIIGDGAMTAGQAFEALNCAGDMDVDLLVVLNDNEMSISPNVGALPKYLASNVVRDMHGLLSTVKAQTGKVLDKIPGAMEFAQKVEHKIKTLAEEAEHAKQSLSLFENFGFRYTGPVDGHNVENLVDVLEDLRGRKGPQLLHVITKKGNGYKLAENDPVKYHAVANLPKESAAQMPSEKEPKPAAKPTYTQVFGKWLCDRAAADSRLVAITPAMREGSGLVEFEQRFPDRYFDVGIAEQHAVTFAGGLACEGMKPVVAIYSTFLQRAYDQLVHDIALQNLPVLFAVDRAGIVGADGPTHAGLYDLSFLRCVPNMIVAAPSDENECRLLLSTCYQADAPAAVRYPRGTGTGVPVSDGMETVEIGKGIIRREGGKTAFIAFGSMVAPALAVAGKLNATVADMRFVKPIDEELIVRLARSHDRIVTLEENAEQGGAGGAVLEVLAKHGICKPVLLLGVADTVTGHGDPKKLLNDLGLSAEAVERRVRAWLSDRDAAN

SEQ ID NO: 2163 - protein, 189 aa, Neisseria meningitidis
MVRRLIIGISGASGFQYGVKALELLRAQDIETHLVVSKGAEMARASETAYARDEVYALADFVHPIGNIGACIASGTFKTDGMLVAPCSMRTLASVAHGFGDNLLTRAADVVLKERRRLVLMVRETPLNLAHLDNMKRVTEMGGVVFPPVPAMYRKPQTADDIVAHSVAHALSLFGIDTPDSAEWQGMAD

SEQ ID NO: 2164 - protein, 1471 aa, Neisseria meningitidis
MYSNNAITNNRNNITLGAYRDAIIFIFSDENVVRAIGTINSMYEEYLTRSHKIDQKEFLREGERLSAKAREFQRTAEEAQKSLKEGIGRAASKFRGNSKEAFVARKVQSDLQKALNASNYNKQQYARRAATALENASKSKVMAANLGKFTYGATVAMGTLSMGSAWWKALDGEGNWSDVGLSSASFLGGLMGVQWGAALGVGAFGLLTGGAGWLVVGAILGGGAGAWWGSLGAEKAWRWFEDFLNLNRSDKYHVYDPLALDLDGDGIETVATKGFAGALFDHRNQGIRTATGWVSADDGLLVRDLNGNGIIDNGAELFGDNTKLADGSFAKHGYAALAELDSNGDNIINAADAAFQSLRVWQDLNQDGISQANELRTLEELGIQSLDLAYKDVNKNLGNGNTLAQQGSYTKTDGTTAKMGDLLLAADNLHSRFKDKVELTAEQAKAANLAGIGRLRDLREAAALSGDLANMLKAYSAAETKEAQLALLDNLIHKWAETDSNWGKKSPMRLSTDWTQTANEGIALTPSQVAQLKKNALVSLSDKAKAAIDAARDRIAVLDAYTGQDSSTLYYMSEEDALNIVKVTNDTYDHLAKNIYQNLLFQTRLQPYLNQISFKMENDTFTLDFSGLVQAFNHVKETNPQKAFVDLAEMLAYGELRSWYEGRRLMADYVEEAKKAGKFEDYQKVLGQETVALLAKTSGTQADDILQNVGFGHNKNVSLYGNDGNDTLIGGAGNDYLEGGSGSDTYVFGKGFGQDTVYNYDYATGRKDIIRFTDGITADMLTFTREGNHLLIKAKDGSGQVTVQSYFQNDGSGAYRIDEIHFDNGKVLDVATVKKLVQQSTDGSDRLYAYQSGNTLNGGLGDDYLYGADGDDLLNGDAGNDSIYSGNGNDTLDGGEGNDALYGYNGNDVLNGAEGNDHLNGEDGNDTLIGGAGNDYLEGGSGSDTYVFGKGFGQDTVYNYDYATGRKDIIRFTDGITADMLTFTREGNHLLIKAKDGSGQVTVQSYFQNDGSGAYRIDEIHFDNGKVLDVATVKKLVQQSTDGSDRLYAYQSGSTLNGGLGDDYLYGADGDDLLNGDAGNDSIYSGNGNDTLDGGEGNDALYGYNGNDVLNGGEGNDHLNGEDGNDTLIGGAGNDYLEGGSGSDTYVFGKGFGQDTVYNYDYATGRKDIIRFTDGITADMLTFTREGNHLLIKAKDGSGQVTVQSYFQNDGSGAYRIDEIHFDNGKVLDVATVKKLVQQSTDGSDRLYAYQSGSTLNGGLGDDYLYGADGDDLLNGDAGNDSIYSGNGNDTLDGGEGNDALYGYNGNDVLNGGEGNDHLNGEDGNDTLIGGAGNDYLEGGSGSDTYVFGEGFGQDTVYNYHVDKNSDTMHFKGFKAADVHFIRSGSDLVLSASEQDNVRISGFFYGENHRVDTFVFDDAAISNPDFAKYINAGNNLVQSMSVFGSNTAATGGNVDANIQSVQQPLLVTPSA

SEQ ID NO: 2165 - protein, 315 aa, Neisseria meningitidis
  misc_feature 2, 3, 4: 'Xaa' is any amino acid
VXXXDKVFFCNSGSEANEAALKLARKYARDRFGGGKSEIVACINSFHGRTLFTVSVGGQPKYSKDYAPLPQGITHVPFNDIAALEAAVGEQTCAVIIEPIQGESGILPATAEYLQTARRLCDRHNALLILDEVQTGMGHTGRLFAYEHYGVVPDILSSAKALGCGFPIGAMLATETIAAAFQPGTHGSTFGGNPMACAVGSRAFDIINTPETLNHVREQGQKLQTALLDLGRKTGLFSQVRGMGLLLGCVLDEAYRGRASEITAAALKHGVMILVAGADVLRFAPSLLLNDEDMAEGLRRLEHALTEFAATSDNP

SEQ ID NO: 2166 - protein, 461 aa, Neisseria meningitidis
  misc_feature 2, 3, 4: 'Xaa' is any amino acid
VXXXLWDYLLIYALLGIGLFFTLYLGAPQITKLGAGFKSVFGGLFAKGDKDDKSLSQFQALAVAISAQIGTGNVAGVATAITAGGPGAIFWMWVSAVLGMSTIFAEALLAQKYRVVSHGKYIGGPAFYITHGLTPKIGRGAARFLSGFFSIALIIALGFIGNATQANSIASAVTIAFDVPSLAVGIVLAVLAGMVVIGGVNRIANIAQFVVPFMAVVYILCAVVILFEFSDYIVPMFNHIFTAAFNPEAVLGGAAGIGMREAIRFGVARGLFSNEAGMGSTPHAHATADVKHPVQQGMAAFVGVFIDTILVCTATALIILLTDANLSGEQGAAVTQFAFNKAFPGFGSQLLAVCLTFFALTTIIGWYYFGESNIRFLFRGRHLGIYRALVLLAIVLGTLGKVDLVWSLSDMFNGFMVIPNLIALFLLRKEIRAIYDDYLAQKKAGRDLSYQYEFHEFHDKG

SEQ ID NO: 2167 - protein, 216 aa, Neisseria meningitidis
MISVEHVSKQYQMRGGMRTVLDDINFSLQKGEKVGILGRNGAGKSTLIRLISGVEPPTTGEIKRTMSISWPLAFSGAFQGSLTGMDNLRFICRIYNVDIDYVKNFTEEFSELGQYLYEPVKRYSSGMKARLAFALSLAVEFDCYLIDEVIAVGDSRFADKCKYELFEKRKDRSIILVSHSHSAMKQYCDNAMVLEKGHMHQFEDMDKAYEYYNSLP

SEQ ID NO: 2168 - protein, 321 aa, Neisseria meningitidis
MSYTQLTQGERYHIQYLSRHCTVTEIAKQLNRHKSTISREIRRHRTQGQQYSAEKAQRQSRTIKQRKRQPYKLDSQLIQHIDTLIRRKLSPEQVCAYLCKHHRITLHHSTIYRYLRQDKSNGSTLWQHLRICSKPYRKRYGSTWTRGKVPNRVGIENRPAIVDQKSRIGDWEADTIVGKGQKSALLTLVERVTRYTIICKLDSLKAEDTARAAVRALKAHKDRVHTITMDNGKEFYQHTKITKALKAETYFCRPYHSWEKGLNENTNGLIRQYFPKQTDFRNISDREIRRVQDELNHRPRKTLGYETPSVLFLNLFQPLIH

SEQ ID NO: 2169 - protein, 213 aa, Neisseria meningitidis
MKAFTKITAIVAPLDRSNVDTDAIIPKQFLKSIKRSGFGPNAFDEWRYLDHGEPGMDNSKRPLNPDFSLNQPRYQGAQILLTRKNFGCGSSREHAPWALDDYGFRAVIAPSFADIFFNNCYKNGLLPIVLTEEQVDRLFKEVEANEGYQLSIDLAEQTLTTPGGETFTFDITEHRKHCLLNGLDEIGLTLQHADEIHAFEEKRRQSQPWLFNG

SEQ ID NO: 2170 - protein, 453 aa, Neisseria meningitidis
MLKKVLIANRGEIALRVLRACREMGIATVAVHSEADKDSLHVKLADESVCIGPAASAQSYLNVPAIIAAAEVSCADAVHPGYGFLAENADFAEQVEQSGFTFIGPKPDTIRLMGDKVSAKHAMIEAGVPCVPGSDGALPDDGEEILKIADKVGYPVIIKASGGGGGRGMRVVEKKEDLLQSVEMTKAEAGAAFGNPMVYMERYLQRPRHVEIQVIADEHGNAVYLAERDCSLQRRHQKVIEEAPAPFITEKERAKIGNACADACKRIGYRGAGTFEFLYEDGEFFFIEMNTRVQVEHPVTELITGVDIVQEQLRIASGLPLQYKQKDIKIEGHAFECRINAEDPYNFIPSPGPIESCHLPGGFGIRVDSHIYQGYRIPPYYDSLIGKICVHGKTREQAMAKMRVALAELAITGIKTNTPLHRDLFNDPGFQKGGVSIHYLEHWLEDRKAKQDK

SEQ ID NO: 2171 - protein, 332 aa, Neisseria meningitidis
LQSLVSVLICAYNVEKYFAQSLAAVVNQTWRNLEILIVDDGSTDGTLAIAKDFQKRDSRIKILAQAQNSGLIPSLNIGLDELAKSGMGEYIARTDADDIAAPDWIEKIVGEMEKDRSIIAMGAWLEVLSEEKDGNRLARHHRHGKIWKKPTRHEDIADFFPFGNPIHNNTMIMRRSVIDGGLRYNTERDWAEDYQFWYDVSKLGRLAYYPEALVKYRLHANQVSSKYSIRQHEIAQGIQKTARNDFLQSMGFKTRFDSLEYRQIKAVAYELLEKHLPEEDFERARRFLYQCFKRTDTLPAGAWLDFAADGRMRRLFTLRQYFGILHRLLKNR

SEQ ID NO: 2172 - protein, 313 aa, Neisseria meningitidis
MPTPKAFALLGPTAGGKTALALKIAETLPVEIISLDSALVYTGMDIGTAKPSASERAFVPHHLIDIITPVQTYSAARFVEDCTRLVGEISSRGRFALIVGGTMMYFRALTQGLNDLPEADACLRADLDEQKQMYGLDFLYRTLQQVDPETACRLKPNDSQRIGRALEVYYLTGKPMSTHLGSPTSHTLPFDLHTAALIPENRARLHENIALRFHLMLEQGFIGEVENLRRLYPSLTADSPAIRCVGYRQAWEYLDGKTDFPAFVEKGIAATRQLAKRQLTWLRKTPLDCVTDPFSDGNSCTRLIEAAKRFFGA

SEQ ID NO: 2173 - protein, 176 aa, Neisseria meningitidis
  misc_feature 2, 3, 4: 'Xaa' is any amino acid
VXXXDPRWSVILLRYFNPIGAHESGLIGEQPNGIPNNLLPYICQVAAGKLPQLAVFGDDYPTPDGTGMRDYIHVMDLAEGHIAAMKAKSNVAGTHLLNLGSGRASSVLEIIRAFEAASGLNIPYQIQPRRAGDLACSFADPSHTKQETGWETKRSLAQMMEDSWRWVSRNPNGYGD

SEQ ID NO: 2174 - protein, 58 aa, Neisseria meningitidis
MGGVFFSVAFRQAQIHIYSGLNLNQDKATKPQTVQIVRQGKATLYWFKFNPLYCPKTA

SEQ ID NO: 2175 - protein, 248 aa, Neisseria meningitidis
MKSSTQAVLEHTAIPKHIAVIMDGNGRWAKKRFLPRIMGHKRGLDALENMVRHCAKLGVQYLTVFAFSTENWRRPEDEVSFLMGLFLQALQKQVRRLHENNMRLKILGSRERFNRQILQGIEEAEALTANNTGLTLSIAADYGGRWDILQAANKLIAEGVSEITEDTLAKYLMLGDAPEPDLFIRTGGETRISNFLLWQMAYAELYFTDILWPDFDGKALDDAVASFQKRERRFGRTSEQLPIEQQRN

SEQ ID NO: 2176 - protein, 119 aa, Neisseria meningitidis
MQQLLISILEDLNNTSTDIIASAVISTDGLPMATMLPSHLNSDRVGAISATLLALGSRSVQELACGELEQVMIKGKSGYILLSQAGKDAVLVLVAKETGRLGLILLDAKRAARHIAEAI

SEQ ID NO: 2177 - protein, 114 aa, Neisseria meningitidis
MNIIRALLIILGCLAAGETAVFLAGIKLPDSIVGMGVLFALLQAGWVKTSWLQQLTDALMANLTLFLVPPCVAVISYLDLIADDWFSILVSASASTLCVLLVTGKVHRWIRSII

SEQ ID NO: 2178 - protein, 140 aa, Neisseria meningitidis
MNLEQLGRRDALLSGLLKQAGQWRRLDAAVKKLLPANLHPHFQTACIEDGRLVLLAANNMAASRLKMIAPSVLPQLAGLDVSIRSVSVRLVPKPEKPPKTNTLHLSKAALESFGSAAAKLEKRHPELAEALANLVRRHGA

SEQ ID NO: 2179 - protein, 56 aa, Neisseria meningitidis
MAQYMCGPCGWIYDEEHGDPEHGIAPGTKFEDIPDDWKCPECGVGKEDFYLLDFVI

SEQ ID NO: 2180 - protein, 259 aa, Neisseria meningitidis; identical to SEQ ID NO: 1423

SEQ ID NO: 2181 - protein, 38 aa, Neisseria meningitidis
LELKYCNREAKASVVTFTIYFIILISSKKEIQDYTYRQ

SEQ ID NO: 2182 - protein, 395 aa, Neisseria meningitidis
MTEHYKTLPEHELLIQKSLISNLNLWDWVFAVLVFAATVFVQTRSGMHMDIYETVMLWASAGIAVFLGWFFKPMRWFVPLSVLLAYAAVGLYGGNIKSAEIFLLRYFLSSQSAIMWQCAFVFFALFAYISGAVLASVKNVPTNTLLGMGTVFAWVSAVAGFTGLLVRWHESYLLRPDAGHIPVSNLYEVFILFLVITALMYLYYEGKFAIQKLGGFVFGFMAVVVGFVLWYSVSREAHTIQPLIPALQSWWMKIHVPANFIGYGAFCISAMLGIAELVSLRAEEKGGKSWLPQSVLIEEVMYKAIAVGFLFFTIATILGALWAADAWGRYWSWDPKETWAFIVWLNYAVWLHLRLVAGWRGKVLAWWAIIGLFVTAFAFIGVNMFLSGLHSYGTL

SEQ ID NO: 2183 - protein, 181 aa, Neisseria meningitidis
MKKQITAAVMMLSMIAPAMANGLDNQAFEDQVFHTRADAPMQLAELSQKEMKETEGAFLPLAILGGAAIGMWTQHGFSYATTGRPASVRDVAIAGGLGAIPGGVGAAGKVVSFAKYGREIKIGNNMRIAPFGNRTGHPIGKFPHYHRRVTDNTGKTLPGQGIGRHRPWESKSTDRSWKNRF

SEQ ID NO: 2184 - protein, 476 aa, Neisseria meningitidis
MTWETVIGLEIHVQLNTKSKIFSGASTAFGAEPNAHAGVVECALPGVLPVMNREVVEKAIKLGLALDAKINRKNVFDRKNYFYPDLPKGYQISQLDLPIVEHGKLEIVVGDDVKTINVTRAHMEEDAGKSVHEGLNGATGIDLNRAGTPLLEVVSEPEMRSAAEAVAYAKALHSLVTWLNICDGNMAEGSFRVDANVSVRPKGQAEFGTRREIKNLNSFRFLEQAINYEVEAQIEILEDGGKVQQATMLFDPEKGETRVMRLKEDAHDYRYFPDPDLLPVIISDAQMQKAKAEMPELPKEMAARFVADYGVSEYDARLLTASRAQAAYFEEAAKESGQGKPTANWMNGELAATLNKAGLELADSPITAPRLAALVGKIADGTLSGKLAKKAFEAMWAEPEATIAEIIEKHGLQQMTDTGAVEAMVDEVLANNAKAVEQFKSGNEKALNAIVGQVMKASKGKANPAQVQELIKAKLA

SEQ ID NO: 2185 - protein, 419 aa, Neisseria meningitidis
MHVSELQTLHISKLLELAEEHGIENANRFRKQDLVFAIVRQMMKKGEGFTCSGTLEILPDGFGFLRSADTSYLAGPDDIYVSPTQIRRFNLHTGDTIEGSVRVPKDNERYFALVRLDTINGDHPEVCRHKILFENLTPLFPTEQLKLERDLKSEENLTGRAIDLISPIGKGQRALLVAPPKSGKTVMLQNIAHAVTANYPEVELIVLLIDERPEEVTEMSRSVRGEVVSSTFDEPAQRHVQVAEMVLEKAKRMVEHKKDVVILLDSITRLARAYNTVVPTSGKILTGGVDANALHRPKRFFGAARNVEEGGSLTIIATALVETGSRMDDVIYEEFKGTGNMELHLDRRMAEKRLFPAININKSGTRREELLVPNDQLQRMWLLRKFLHPMDEIEATEFLNGKIKASKNNDDFFELMRGK

SEQ ID NO: 2186 - protein, 319 aa, Neisseria meningitidis
  misc_feature 2, 3: 'Xaa' is any amino acid
VXXDQLQIVAVNASGSLETNAHLTKFDTVHGRFEADVSHDGGNLIVNGDKIPFFSTRNPAELPWKELGVDLVMECTGAFTSKEKAKVHLESGAKKVLISAPGGDDVDATVVYGVNDSILTADITVVSNASCTTNCLSPVAKVLSESVGIVKGAMTTIHALTNDQTVTDVRHKDLRRARSGVENMIPTKTGAAKAVGLVLPELKDKLDGLAIRVPTVNVSLVDLNFQAARDTTIEEINALMKAASEAGALKGVLGYNTLPLVSMDFNHTTEASHFDATLTKVVDGNMIKVFAWYDNEWGFSCQMLNTARRMFGLEVRPLK

SEQ ID NO: 2187 - protein, 336 aa, Neisseria meningitidis
MNDNTHTLPPRHLSVAPMLDWTDRHYRYMARQITRNTWLYSEMVNAGAIVYGDKDRFLMFNEGEQPVALQLGGSDPSDLAKAAKAAEAYGYNEVNLNCGCPSPRVQKGSFGACLMNEVGLVADCLNAMQDAVGIPVTVKHRIGVDRQTEYQTVADFVGTLRDKTACKTFIVHARNAWLDGLSPKENRDVPPLKYDYVYRLKQEFPGLEIIINGGITTNEAIAGHLQHVDGVMVGREAYHNPMVMREWDRLFYGDTRSPIEYADLVQCLYTYSQAQIQAGRGTILRHIVRHSLGLMHGLKGARTWRRMLSDATLLKDNDGSLILEAWKEVERANTRE

SEQ ID NO: 2188 - protein, 950 aa, Neisseria meningitidis
MKLSELFNPNEFAARHLSFGDEAALLAAVGEKSMDEFVGNTVPQSIRMPSELDLPDALTEADALAKLKGIASKNVINKSYIGLGYYPTRVPNVILRNVLENPGWYTAYTPYQAEIAQGRLEALLNFQQVCIDLTGFPVAGASLLDEATAAAEAMAMAHRVGKVKSERFFVDARVYPQTLDVMKTRAKYFGFELVVSDFAKADDGEYFGALFQYVGKDGDVQDLQDVIGRLKAKGTIVAVAADIMSLVLLKSPAELGADIALGNTQRFGVPMGFGGPHAAYFAFKDAFKRSAPGRIIGVSKDASGKPALRMALSTREQHIRREKATSNICTAQALLANLAGMYAVYHGPEGVKRIANRIHALASAFADALVSDGINVVHKVFFDTVTVDFGNKEKADQVFAAALESGYNLRRVNDTQVAAAFHETSACEDLVDLYRAFTGKDTFAFADDVKGRLNAELLRQDDILQHPVFNSYHTEHEMLRYLKKLEDRDLAMNRSMISLGSCTMKLNATAEMLPITWAEFTDIHPYAPEAQTAGYRELLADMENSLKAITGFDAISLQPNSGAQGEYTGMLAIRRYQESQGEAHRNICLIPKSAHGTNPATAAMLGLKVVVVDTDEHGNVNIDDLKAKAEQHRDALSAIMITYPSTHGVYEEGIRDICRIIHENGGQVYMDGANLNAQIGIMQPAEVGADVLHMNLHKTFCIPHGGGGPGMGPIGLKAHLAPFAPGHTLTDTHNAAADQTAVAAAAYGSASILPITWMYLTMMGKQGMEQATRWALLNANYVAKALGEDYPILYTGKNGRVAHECIVDLRPLKAESGITETDIAKRLMDYGFHAPTVSFPVAGTLMIEPTESESKAELDRFIAALKQIKQEVLKVGRGEWPKDDNPLVNAPHTAADITGNWAHPYSREEAVFPLPFVREHKFWPFVNRVDDVYGDRNLVCSCPPMENYED

SEQ ID NO: 2189 - protein, 147 aa, Neisseria meningitidis
MPFRLFLGILCGLSMVAPVYAQGQPDAVNAYIQKKKVIVNTSKAELCFADDRQCHPVLIGVATPKGTFGLTLNSTDKPGYGGEVIGFKQEGDFLFALHRVWNQIPSERRNERIASPSVSDRIMTNGCINVSDAVYEKLRHYFVLEVI

SEQ ID NO: 2190 - protein, 445 aa, Neisseria meningitidis
MSNHTSWSSKIGFVLAAAGSAIGLGAIWKFPYTAGTNGGAVFFLLFLIFTVLVALPVQLAEFYIGRTGGQNAVDSFRALRPSTQWLWVGRMGVSACFILLSFYSVVGGWVLNYVVHSFTGAVHTGADFEALFGATISNPAGSLSYQALFMLITVWVVKGGISDGIEKANRYLMPGLFILFIALAIRSLTLPGAMEGVSFLLKPNWSYFKADTMITALGQAFFALSIGVSAMITYASYLGKDQDMFRSGHTIMWMNLLVSLLAGLVIFPAVFAFGFEPSQGPGLIFIVLPAVFMKMPFGTVLFAVFMLLVVFATLTSAFSMLETVIASTIRQDERKRKKHTWLIGTAIFIVGIPSALSFGIWGEFKVFGKTIFDLWDYVISAVIMPVGALGVAVFTAWIQDKQSVLKDAGAGSTVPRAVLLLWLNTLRYLAPIAIIIVFVNSLDIL

SEQ ID NO: 2191 - protein, 135 aa, Neisseria meningitidis
MKRQAFFKPIACAAFLSAVSLRLPVLGACYAILSLYAFALYSIDKRRAVRGKRRIPEHRLLLPALFGGWAGAYLGSRIFRHKTAKKRFVVLFRLTVSGNVLATLILIYSGLNLNQYGVASPCRTICTVCGFVALS

SEQ ID NO: 2192 - protein, 177 aa, Neisseria meningitidis; identical to SEQ ID NO: 1513

SEQ ID NO: 2193 - protein, 547 aa, Neisseria meningitidis
MNAFTRAWYALERHYQDTRHVLLRDRFACEPDRFDRMHERLDGMLFDYSKNRLGEDTLQLLCNLADAADLEGKMRALRTGAKVNNSEGRAALHTALRLPDGAGAVYADGRDVLPEIRRELNRALKFAHSLDDGSYQGTTGKRITDFVHIGIGGSDLGPAMCVQALEPFRRHIAVHFAANADPACLDEVLCRLNPETTVFCVASKSFKTPETLLNAEAVKAWYRGAGFSESETGCHFCAVSADTEAAQSFGIAAERVFAMYDWVGGRYSVWSPVGLPVMVAVGGARFRELLAGAHAMDSHFFHTPPRRNIPVLMALIAVWYNNFQHADGQTAVPYSHNLRLLPVWLNQLDMESLGKSRASDGSPAVCKTGGIVFGGEGVNCQHAYFQLLHQGTRLIPCDFIVPVTAQGVEDGRSRFTVANAFAQAEALMKGKTLDEARAELADLPEAERERLAPHKEFPGNRPSNSILLDRLTPYNLGMLMAAYEHKTFVQGVIWDINPFDQWGVEYGKQLAKTIIGELEGGTSVHDASTEGLMAFYRECRLKGGGAA

SEQ ID NO: 2194 - protein, 154 aa, Neisseria meningitidis; identical to SEQ ID NO: 1733

SEQ ID NO: 2195 - protein, 349 aa, Neisseria meningitidis; identical to SEQ ID NO: 328

SEQ ID NO: 2196 - protein, 167 aa, Neisseria meningitidis
MSDPNLIDLEIFAAEGQNLQGSFLLEELDERVSSHDYPADRQTKISFTLTGGRDRLQRLFLDLNVKADMPLICQRCIKPMPFMLDESSRIVLFSNEESLDESMLADEELEGILIEKELDVRTLVEDQILMSLPFSPRHEDCGDNGTLEEVNRDKPNPFAVLAGLKSN

SEQ ID NO: 2197 - protein, 113 aa, Neisseria meningitidis; identical to SEQ ID NO: 995

SEQ ID NO: 2198 - protein, 262 aa, Neisseria meningitidis
MNPQDKCWQVHRHLAEHTDQRLTLVRNAPKHILLAGADADISRSLLAKRYPQAVFEEYDSRADFLAAAAAVRKGGFWQRFTGKGVVQHCQSPTAPLPEACADMLWSNLGLLAAEQILPVLHNWARALKTDGLLFFTCFGRDTFTELKCRLKENGIESRSALFPDMHDLGDMLAENGFYDPVTDTAKLVLDYKKAETFWADMDTLGVWRAMSWNDENAARSCVGTIFEREGGLGITLETVYGHAVKKLMLPQGENVVQFFPKR

SEQ ID NO: 2199 - protein, 92 aa, Neisseria meningitidis
MHTELNNGTLHISGDITVKTLTGEAFERFQQQCRLKETIAVDFGGVKRADSACVSLLLEVLRGCKGSVRLTGIPESVRALSELYEIKDWLKS

SEQ ID NO: 2200 - protein, 896 aa, Neisseria meningitidis
MSDNRLDTARRHSLFLARQLDNGKLKPEIFLPMLDKVLTEADFQAFADWDKIRAEENEEELARQLRGLRRYVVSQIIVRDINRISDLNEVTRTITLFADFAVNTALDFAYAYYRDMYGTPIGRYTKSPQHLSVVAMGKAGGHELNVSSDIDLIFTYPESGDTDGRRERGNQEFFTKVGQKLIALLNDITADGQVFRVDMRLRPDGDSGALVLSETALEQYLITQGREWERYAWCKGRVVTPYPNGIKSLVRPFVFRKYLDYSAYEAMRKLHRQISSEVSKKGMADNIKLGAGGIREVEFIAQIFQMIRGGQMRALQLKGTQETLKKLAETGIMPSENVETLLAAYRFLRDVEHRLQYWDDQQTQTLPTSPEQRQLLAESMGFDSYSAFSDGLNIHRNKVNQLFNEILSEPEEQTQDNSEWQWAWQEKPDEEERLGRLKEYGFDAETIATRLDQIRNGHKYRHLSAHAQPRFDAIVPLFVQAAAEQNKPTDTLMRLLDFLENISRRSAYLAFLNEHPQTLAQLAQIMGQSSWVAAYLNKYPILLDELISAQLLDTAFDWQALAAALSDDLKACGGDTEAQMDTLRRFQHAQVFRLAVQDLAGLWTVESLSDQLSALADTILAAALLCAWADMPKKHRDTPQFAIVGYGKLGGKELGYASDLDLVYLYDDPHPDAGDVYSRLARRLTNWLSTATGAGSLYETDLRLRPNGDAGFLAHSIAAFEKYQRENAWTWEHQSLTRARFICGTSEIQTAFDRIRTEILTAERDQTALAGEIIEMREKMFPTHPPADSNVKYARGGVVDVEFIVQYLILAHARQYPQLLDNYGNIALLNISADCGLIDKTLAGQSRTAYRFYRRQQHNTKLRDAAKTEVTGELLAHYGNVRKLWREVFGEEAATV

SEQ ID NO: 2201 - protein, 41 aa, Neisseria meningitidis
MQVLSSLKTAKQRHRDCQIVRRRGKVYVICKSNPRFKARQR

SEQ ID NO: 2202 - protein, 255 aa, Neisseria meningitidis
MRPYATTIYQLFILFIGSVFTMTSCEPVKEQTSFNNPEPMTGFEHTVTFDFQGIKMVIPYGYLARYTQDNATKWLSDTPGQDAYSINLIEISVYYKKTDQGWVLEPYNQQNKAHFIQFLRDGLDSVDDIVIRKDACSLSTTMGERLLTYGVKKMPSAYPEYEAYEDKRHIPENPYFHEFYYIKKGENPAIITHQNYHRYGENDYSTDIGSCINGFTVQYYPFIREKQQLTQQELVGYHQQVEQLVQSFVNNPSKK

SEQ ID NO: 2203 - protein, 151 aa, Neisseria meningitidis
MVDAVVKTPEFLPFTSVGIFRFGADITQYKNILETFMYEPPDEFRTEYYESPDSNLLISVKKNKIISIFCYQELYFMGVNIIGLNFEDFKQLFHHPKSYGVDKYYLSNESYPTYVYEFDEIGVQAWEAKGKIVTIIAGGKDNYSTEPYYDE

SEQ ID NO: 2204 - protein, 95 aa, Neisseria meningitidis; identical to SEQ ID NO: 589

SEQ ID NO: 2205 - protein, 138 aa, Neisseria meningitidis
MLKHLAFLLPAMMFALPTSAAVLTSYQEPGCTYEGDVGKDGKPAGKGTWRCQDGRNYTGSFKNGKFDGQGVYTVAANREIFIEPFNSDSTKFRNMVLSGTFKKGLAHGRFTVSQNGETLFIMKCENGMIKEVKLPKNK

SEQ ID NO: 2206 - protein, 328 aa, Neisseria meningitidis
MQYRIRRENEAPEAKNAGETLWERDMMREVLLSAYQDRRRERMWKNIWRAVSTLILVALIAGIFQKDEAALQLAGNTPHTAVVNLYGEIGNGVEDQVKKLKDGMEAAYKNPQAKAIVIRANSPGGSPVVSNTAFEEIRRLKAQHPDIPVYLVAEDMCASGCYYIAAAADKIYADSSSIVGSIGVIGSSFDATELMEKIGVKRRVKIAGSNKGMGDPFSPETPEQSKIWEEMLTGIHGEFIKAVKTGRGGRLKFRQYPDVFSGRVYTGADALKVGLVDGLGNIYSVARDVVKAPDVVDYTPKDDFGRILGRRFGAELKASVREALQAVR

SEQ ID NO: 2207 - protein, 54 aa, Neisseria meningitidis
MGQVAFYEKMIGLWSAKSREASEQADLAAFEFAEGELANYQEMLKRHLQTKSVE

SEQ ID NO: 2208 - protein, 291 aa, Neisseria meningitidis
MPTVRFTESVSKHDLDALFEWAKASYGAESCWKTLYLNGLPLGNLSPEWAERVKKDWEAGCSESSDGIFLNADGWSDMGGRLQHLTRTWNKAGLLHGWRNECFDLTDGGGNILFSLERAAFRPFGLLSRAVHLNGLTESDGRWHFWIGRRSPHKAVDPGKLDNTAAGGVSGSEMPSEAVCRESSEEAGLDETLFPLIRPVSRLHSLRPVSRGVHNEILYVFDAVLPETFRPENQDGEVAGFEKMDIGGLSDAMLSGRMMHDAQLVTLDAFDRYGLIAPNHPLSGWLRGIRT

SEQ ID NO: 2209 - protein, 129 aa, Neisseria meningitidis
MNPHEKLLTTDNPILRQRAKAMRQEMSGAEAKLWQHLRAGRLNGYKFRRQQPMGNYIVDFMCVTPKLIVEADGGQHTEQAAYDHARTAYLNSLGFTVLRFWNHEILQQTNDVLTEILLVLQELEKQAAR

SEQ ID NO: 2210 - protein, 451 aa, Neisseria meningitidis
MKAPELLLPAGGLERMRAAYDYGADAVYAGSPRYSLRARNNEFAKLNVLEQGIKEAHERNKKFFLTVNTLPHNSKLKTFVSDMEPLIAMKPDALIMADPGLIMTVREKWPEMPIHLSVQANTTNYWGVKFWQNIGVERIILSRELSMEEIAEIRQQCPDIELEVFIHGALCIAYSGRCLLSGYFNHRDPNQGTCTNSCRWDYKVHNATESDAGDAQLLQGFNFEKAQEEANQNFEGINGQKRHPYADKVFLIEESNRPGEMMPIMEDEHGTYIMNSKDLRGIEVVEKLAKIGVDSLKVEGRTKSLYYVARVAQSYRKAIDDAVAGRPFDYSLLSELEGLANRGYTSGFLERHQTQDYQNYLTGHSTAKQSQYVGHVTEIDENGWATVEVKNRFAVSDSLEIIHPSGNQTIKLEQMTRKGQPVDVAPGNGIQVKIPNMQGKEKALIARVLNP

SEQ ID NO: 2211 - protein, 227 aa, Neisseria meningitidis; identical to SEQ ID NO: 1151

SEQ ID NO: 2212 - protein, 92 aa, Neisseria meningitidis
VALWVQVFETDVLKPPNALSDNEWSFPMPKMKTKSSAKKRFKVLGNGGVKRAHAFKRHILTKKTTKNKRQLRGTSMVNDRDLASVAKMLPYA

SEQ ID NO: 2213 - protein, 903 aa, Neisseria meningitidis
MLYHHSYAEDAGRAGSEAQIQVLEDVHVKAKRVPKDKKVFTDARAVSTRQDIFKSSENLDNIVRSIPGAFTQQDKSSGIVSLNIRGDSGFGRVNTMVDGITQTFYSTSTDAGRAGGSSQFGASVDSNFIAGLDVVKGSFSGSAGINSLAGSANLRTLGVDDVVQGNNTYGLLLKGLTGTNSTKGNAMAAIGARKWLESGASVGVLYGHSRRSVAQNYRVGGGGQHIGNFGAEYLERRKQRYFVQEGALKFNSDSGKWERDLQRQQWKYKPYKNYNNQELQKYIEEHDKSWRENLAPQYDITPIDPSSLKQQSAGNLFKLEYDGVFNKYTAQFRDLNTKIGSRKIINRNYQFNYGLSLNSYANLNLTAAYNSGRQKYPKGSKFTGWGLLKDFETYNNAKILDLNNTATFRLPRETELQTTLGFNYFHNEYGKNRFPEELGLFFDGPDQDNGLYSYLGRFKGDKGLLPQKSTIVQPAGSQYFNTFYFDAALKKDIYRLNYSTNTVGYRFGGEYTGYYGSDDEFKRAFGENSPTYKKHCNPSCGLYEPVLKKYGKKRANNHSVSISADFGDYFMPFAGYSRTHRMPNIQEMYFSQIGDSGVHTALKPERANTWQFGFNTYKKGLLKQDDTLGLKLVGYRSRIDNYIHNVYGKWWDLNGNIPSWVSSTGLAYTIQHRNFKDKVHKHGFELELNYDYGRFFTNLSYAYQKSTQPTNFSDASESPNNASKEDQLKQGYGLSRVSALPRDYGRLEVGTRWLGNKLTLGGAMRYFGKSIRATAEERYIDGTNGGNTSNFRQLGKRSIKQTETLARQPLIFDFYAAYEPKKNLIFRAEVKNLFDRRYIDPLDAGNDAATQRYYSSFDPKDKDEDVTCNADGLCNGKYGGTSKSVLTNFARGRTFLMTMSYKF

SEQ ID NO: 2214 - protein, 250 aa, Neisseria meningitidis
VPVGEARIPSNPKAVKGTTVTLSQEQRLANGELIPKGSVVTWSDNAVKVVRPDGKKRRFNSRDWEQKALPKPQLPKDYRDDINIGGNNPRFNQQRHEKIESHNPNRIEEIRQRNAVSSAERQADALKRMQTSGRTRLPGQPQKGKPGAAREMSSSDNPNQTAEAFARRYLGRKPTLMERVEGEKLYGGKCVGCWKAQMPDGTFVVYRPAGNASMTKGTTASVDINNPTLNNLNINLKGKPTELKFKFPAR

SEQ ID NO: 2215 - protein, 328 aa, Neisseria meningitidis; identical to SEQ ID NO: 991

SEQ ID NO: 2216 - protein, 195 aa, Neisseria meningitidis
MNNMFAAKLSKLVYTASDHPDSLSEMEEFDRLILLIRKLYQILDGQHILSRVTVCLHYRSRRGLIALDKAAAGCDAAMLRAQRWRIYTQIAERLAGSGGGFTVTAESVSAACPELEGRYLELVRRTATSFGFVQVQEYPAGGQEETQAVPDAASDHSVRKPIKINIEAKVERYPAYRPTAALKVTRRRFFRLQNR

SEQ ID NO: 2217 - protein, 375 aa, Neisseria meningitidis
MSNWKPDIPYNDLPPLPPKQDIESKTILKRCIAARASLARLKQAAELIPNQAMLINTLPVMEARASSEIENIVTTTDKLFQSLQMDTERQDPATKEALQYRTALFAGYESLTSRPLCTQTAIMVCNAIKHPYEMAIRKTGGTALKGGNSGNVVYTPPEGEETIRGKLANWERFIHESGDLDPLIIMAAAHYQFEAIHPFTDGNGRTGRILNSLLLIEKGLLDLPILYLSRYIIENRADYYRLLLGVTERQDWESWIIYILDGVADTADWTVSKIDAIRRLFEQTRQHIRTHAQGIYTHELVNLLFEQPYTRIANLEAAGIAKRQTASKYLKELLDIGVLQEIVIGRDKLFIHPRLMELLRGEGNSFTSFQSLVKA

SEQ ID NO: 2218 - protein, 183 aa, Neisseria meningitidis
  misc_feature 2, 3, 4: 'Xaa' is any amino acid
VXXXHHELETRFGLPGGGYDNIQRLLFPDIRPEDPDYHQKIILAIEDLRYGKRTISRQAQDALMEQERRLREATLLLIQGSQETRGQGEEPKRTRYFEVSATPAYSSRHNNGLGGNFQYIGQLPGYLKIHGEMLENQSLFRLSNRERNPDKPFLDIHFDENGKITRIVVYEKNIYFNPNLGRR

SEQ ID NO: 2219 - protein, 434 aa, Neisseria meningitidis
MKPFAENIPHSLRGNCCDEALPPHTVDCPECGCRADVPRLDSGEAAFCPRCGHKLFRVGRHPFSAPPAYAAASLILMAFAYGMTYIEVGIPGAASVLSLPEMMRLMVFQDYGFLAEVMFVLTFGAPVLFLLLCLYVYAALIRKQAYPALRLATRVMVRLRQAMMVDVFFVSTLVAYIKLSSVAEVRFGPAFYLMFALSVMLIRTSVSVPQHWVYFQIGRLTGDNAVQTASEGKTCCSRCLYFRDSAESPCGVCGAELYRRRPKSLSISSAFLTAAVILYFPANILPIMISSNPAATEVNTILNGIAYMWDEGDRLIAAVIFSASILVPVLKIAAMSVLIASARFALPTGAKKLSHLYRITEAVGRWSMIDIFVIIILMCSFHTYAARVIPGSAAVYFCLVVILTMLSAYYFDPRLLWDKRASDGIAFNETEKHD

SEQ ID NO: 2220 - protein, 741 aa, Neisseria meningitidis
MTQKSTIVYTHTDEAPALATQSLLPIVQAFARHADIDVKTADISLSGRILAAFPEYLTEAQRVPDALAELGELVKQPDANVIKLPNISASVPQLTAAIKELQSKGFAVPDYPADPQTDEEKAVRERYDRIKGSAVNPVLREGNSDRRAPKAVKNFAKKNPHSMGAWAKDSKTHVATMQSGDFFHNEQSVTVPEATSVSIVFTDKQGNKKELRAPVALKAGEIIDATVMSKKALLAFLAEQVKDAKAKGVLFSLHMKATMMKVSDPIIFGHAVKVFFAPVFEKFGGKLAAAGVNVNNGFGNLLANLDKLDADTRAAVEAEIAAVYAANPDLAMVDSDKGITNLHVPSDVIVDASMPAMIRNSGRMWDKNGKAQDTKAVIPDSSYAGVYQATIDFCREHGAFDPTTMGTVPNVGLMAQAAEEYGSHNKTFEIEADGQVQVIDAEGKVLMQHDVEAGDIWRMCQTKDAPVKDWVQLAVNRARLSNTPAVFWLDENRPHDKSLLAKVKAYLAELDTNGLDIRILAPEEAAKFSLGRLKNGEDTISVTGNVLRDYLTDLFPILELGTSAKMLSIVPLMNGGGMFETGAGGSAPKHVQQFLEENHLRWDSLGEFLALAVSFEHLAQKTGNTKAQVLADTLDAATEKLLLNDKSPKRKAGELDNRGSHFYLTLYWAQELAAQDKDAELKAAFTPLAAALTADEAKIVAELSAVQGKAADIGGYYAANPEKAAQVMRPSATFNQALNAL

SEQ ID NO: 2221 - protein, 241 aa, Neisseria meningitidis
MDFLSCWRRIADAPTIRRCVLCHGSSGVSDGICAGCRDDLAAYRTDAANSCPLCFMHVQGGAVCGGCQKKPPAFDRMWASLHYEPPVSNMIHALKHLADLSMVQPLADLMMQNPPDRLADECFDFVLPVPLSRERLLQRGFNQSESIVGLLAQRYGWRTLPLHTVFRRHRPPQSTLKGSDRLKNIKNAFEIRTPIPENCNILLIDDVFTTGATLDELAKMLKKSGANRICCWTLARTPMKK

SEQ ID NO: 2222 - protein, 384 aa, Neisseria meningitidis
MKFIDEAKIEVAAGKGGNGATSFRREKFVPRGGPDGGDGGKGGSVWAEADENTNTLVEYRFVKRYQAKNGEKGHGSDRYGAGADDIVLKMPVGTLIRDLDTDETVADLTYHGQRVCLAKGGKGGLGNIHFKSSVNRAPKQSTPGEEGEARSLQLELKVLADVGLLGMPNAGKSTLITAVSAARPKIANYPFTTLHPNLGVVRIDENHSFVMADIPGLIEGAAEGAGLGHRFLKHLSRTGLLLHVVDLAPFDETVNPAEEALAIINELRKYDEELYGKPRWLVLNKLDMLDEEEAQTRTAAFLEAVGWDYPKPDDRFQFDMETPRLFQISALTHQGTQELVHQINQYLTEKKRIEAEKAEAEKAAANVEIIEQQPKTDTGVFKPE

SEQ ID NO: 2223 - protein, 297 aa, Neisseria meningitidis
MKGFTIIEFLVAGLLSMIVLMAVGSSYFTSRKLNDAANERLAAQQDLRNAATLIVRDARMAGGFGCFNMSEHPATDVVSDVAQKNRLFSLKRNSTNKLIPIAESLNIEYQGFAQARPALIFQYGIDDLDASAETVVVSSCSKIAKPGKKISTLQEAKSALQITNDDKQNGNITRQRHVVNAYAVGRIADEEGLFRFQLNEKGKWGNPQLLVKKVRHMKVRYIYVSGCPEDDDAGKEETFKYTDKFDSSTNAVTPAGVEVLLSSGTDTKIAASSDNHIYAYRIDATIRGGNVCANRTL

SEQ ID NO: 2224 - protein, 448 aa, Neisseria meningitidis
MSDNVPTIAAVATAPGRGGVGVIRISGKNLLPMAEALCGKTPKPRVATYADFTDADGQAIDSGLLLFFAAPASFTGEDVIELQGHGGPVVMDMLLNRCLELGARLAEPGEFTKRAFLNDKLDLAQAEGVADLIDASSRSAARLALRSLKGDFSRRIHGLVEDLITLRMLVEATLDFPEEDIDFLEAADARGKLDGLRRAVDDVLANAQQGAILREGLNVVLVGAPNVGKSSLLNALAGDEVAIVTDIAGTTRDAVRERILIDGVPVHIVDTAGLRETDDVVERIGIERSRKAVSEADVALVLVDPREGVNDKTRAILDALPPELKRIEIHSKSDLHAHAAGGFGTGAETVIALSAKTGDGLDALKRTLLREAGWQGEGEGLFLARTRHVNALKAAQEELSLAALCGNHQIELFAEHLRLAQVACGEITGEFTADDLLGVIFSRFCIGK

SEQ ID NO: 2225 - protein, 473 aa, Neisseria meningitidis
MDTKEILGYAAGSIGSAVLAVIILPLLSWYFPADDIGRIVLMQTAAGLTVSVLCLGLDQAYVREYYAAADKDTLFKTLFLPPLLSAAAIAALLLSRPSLPSEILFSLDDAAAGIGLVLFELSFLPIRFLLLVLRMEGRALAFSSAQLVSKLAILLLLPLTVGLLHFPANTAVLTAVYALANLAAAAFLLFQNRCRLKAVRRAPFSSAVLHRGLRYGIPIALSSIAYWGLASADRLFLKKYAGLEQLGVYSMGISFGGAALLFQSIFSTVWTPYIFRAIEANAPPARLSATAESAAALLASALCLTGIFSPLASLLLPENYAAVRFIVVSCMLPPLFCTLVEISGIGLNVVRKTRPIALATLGALAANLLLLGLAVPSGGARGAAVACAASFWLFFVFKTESSCRLWQPLKRLPLYMHTLFCLASSAAYTCFGTPANYPLFAGVWAVYLAGCILRHRKDLHKLFHYLKKQGFPL

SEQ ID NO: 2226 - protein, 140 aa, Neisseria meningitidis
MKITKIFTFDSSHMLDGHDGKCQNLHGHTYKLEITVSDGIIKGGAKDGMVMDFTDLKAIVKQHITDPFDHAFIYHGGNSRESQIAALLEGWNMKTLRLPCRTTAENMAVEMYGRLKNAGLNVCRVKLWETPTSCAEYEGE

SEQ ID NO: 2227 - protein, 214 aa, Neisseria meningitidis; identical to SEQ ID NO: 909

SEQ ID NO: 2228 - protein, 188 aa, Neisseria meningitidis
LNIKYSGIENRFETAILKKNGVRSGFVSFAPNLAAVKLNDYAKVRKRITKTKQKADIVIVMFHGGAEGKQAEHLPFDTEIFYGENRGNVVEFARLAVDSGADVVFGQGPHVTRAVELYRDRFISYSGGNFATYGAINTSGISGIAPIFKIITNKQGKFISGTIIPITQADDKIPKIDPEKPLSGGLFI

SEQ ID NO: 2229 - protein, 150 aa, Neisseria meningitidis
MNIEVEMKVLDERMADVVPVYATKGSAGLDLRACLDEEVVLQPGETFLVPTGLAIYLADPSYAAVLLPRSGLGHKHGIVLGNLVGLIDSDYQGELKVSLWNRSSEPFTVKPFERIAQMVIVPIVQARFKRVEEFVGSSRGEGGFGSTGLH

SEQ ID NO: 2230 - protein, 187 aa, Neisseria meningitidis
MTDLETKRLETQAMLENADLLFDQGQCRAALQKVADEITRDLGGKYPLLLPVMGGAVVFTGQLLPLLRFPLDFDYVHVSRYGDKLEGGAFNWKRMPDAEQIRGRHVVVLDDILDEGHTMSAIQAKLLEMGAASCRAAVFANKLIDKPKPIRADYVGLDVPNRYVFGYGMDAAGCWRNLGEIYALDGK

SEQ ID NO: 2231 - protein, 39 aa, Neisseria meningitidis
MNEQELDLDNLLEDFDGVTVEGGVDSENDDGCEGGACKI

SEQ ID NO: 2232 - protein, 737 aa, Neisseria meningitidis
MTAISPIQDTQSATLQELREWFDSYCAALPDNDKKLVLAARSLAEAHYPADAVTPYGEPLSDHFLGAAQMVDELDLLPDAVAATLLADIGRYVPDWNLLVSERCNSTVAELVKGVDEVQKLTHFARVDSLATPEERAQQAETMRKMLLAMVTDIRVVLIKLAMRTRTLQFLSNVPDNPEKRAVAKETLDIFAPLANRLGVWQLKWQLEDLGFRHQEPEKYREIALLLDEKRTERLEYIENFLNILRTELKKYNIHFEVAGRPKHIYSIYKKMVKKKLSFDGLFDIRAVRILIDTVPECYTTLGIVHSLWQPIPGEFDDYIANPKGNGYKSLHTVIVGPEDKGVEVQIRTFDMHQFNEFGVAAHWRYKEGGKGDSAYEQKIAWLRQLLDWRENMAESGKEDLAAAFKTELFNDTIYVLTPHGKVLSLPTGATPIDFAYALHSSIGDRCRGAKVEGQIVPLSTPLENGQRVEIITAKEGHPSVNWLYEGWVKSNKAIGKIRAYIRQQNADTVREEGRVQLDKQLAKLTPKPNLQELAENLGYKKPEDLYTAVGQGEISNRAIQKACGTLNEPPPVPVSETTIVKQSKIKKGGKNGVLIDGEDGLMTTLAKCCKPAPPDDIVGFVTRDRGISVHRKTCPSFRHLAEHAPEKVLDASWAALQEGQVFAVDIEIRAQDRSGLLRDVSDALARHKLNVTAVQTQSRDLEASMRFTLEVKQVNDLPRVLASLGDVKGVLSVTRL

SEQ ID NO: 2233 - protein, 103 aa, Neisseria meningitidis
MFNQTQTVTYPATFLGAKKFKGEIDGSNIDTCSVLVATPLPAQSGNAVGFTAAQMKFGDSKNFSKLENLKYPCEVMVTVEMTSTGKGMVPSLIDFQVAEKPKG

SEQ ID NO: 2234 - protein, 339 aa, Neisseria meningitidis
MNTMLMSGAAAALLAGIILYFKSDKKRQENGEWSSGLEYAYILTAVGVFAALSLFMSFTAVFLIFVVLCGTAWGVYKYRLKTHPEISESSHFGDYFGSFFPTVLVLFLIRSFIAEPFQIPSSSMRPGLIKGDFILVGKFSYGLRVPVLNNIFIPTGKIERGDVVVFNYPLQPEMTYIKRIVGIPGDVVEYRDKILTVNGKPTSDIPNGTYRYPDDTDPSEIHNTDMFHSGLDGKSFNILKKEGQPAVSLPVLGKYTSDIMSENGYSIEQSGLEHCQYADDGSGFVCKVPEGRYFAMGDNRDNSADSRYWGFVDDKLVVGKAMFILMNFGDFGRAGTAIR

SEQ ID NO: 2235 - protein, 229 aa, Neisseria meningitidis
MKRKNIALIPAAGIGARFGADKPKQYVEIGSKTVLEHTLGIFERHEGVDLTVVVVSPEDTFADKVQTAFPQVRVWKNGGQTRAETVRNGVAKLLETGLAAETDNILVHDAARCCLPSEALTRLIEQAGNAAEGGILAIPVADTLKRADGGNISATVERTSLWQAQTPQLFRAGLLHRALAAENLDGITDEASAVEKLGIHPLLVQGDARNLKLTQPQDAYIVRLLLDAV

SEQ ID NO: 2236 - protein, 107 aa, Neisseria meningitidis
MIVDEKSTSDVLKQYQELGFDLTKSMIIEFFIEGSQKNLQSIESQIISYRQDFQISIEQNEFGEMWTCYCSVNIIPSLENILAIETTLFDIAQKNDCNYEGFGSYGN

SEQ ID NO: 2237 - protein, 526 aa, Neisseria meningitidis
MPSIKRALISLSDKTGAVEFAQTLTKLGVEILSTGGTAKLLADAGVPVIEVADYTGFPEMLDGRVKTLHPKIHGGILGRRDLDEHVAKMEEHGIGNIDLVCVNLYPFAATIAKPNCTLEDAIENIDIGGPTMVRSAAKNWKHVAIVTDTADFPAIAAELEANNGALSDKTRFNLSRKAFSHTAQYDGMISNYLTSLSDDVLSGEPEIGEFPSQFNQSWIKVQDMRYGENPHQRAAFYRDIDPAAGSLSAYKQLQGKELSYNNIADADAAWEAVKSFDAPACVIVKHANPCGVAVAADTLTAYKLAYVTDTTSAFGGIIAFNREVDGETVKQITDNQFMEVLMAPKFTAEALEIAAAKKNVRVLEVPLEAGANRFELKRVGGGLLVQTPDIHRLNRADLKVVSKRQPTEQEWNDLMFVWNVAKYVKSNAIVFGKGGQTYGIGAGQMSRVDSTRIAARKAQDANLDLNGACAASDAFFPFRDGVDVIAEQGIKAIIHPAGSMRDQEVFDAADEHGIAMVVTDVRHFRH

SEQ ID NO: 2238 - protein, 180 aa, Neisseria meningitidis
LDEVEKAHPDVFNILLQVLDDGRLTDGQGRTVDFKNTVIVMTSNIGSQHIQQMGIQDYEAVKEVVMEDVKEHFRPEMINRIDEVVVFHGLDQDNIRNIAKIQLKGLEKRLEKQNLRLTVSDAALDIIAKAGFDPIYGARPLKRAIQSEIENPLAKALLAGNYAPESEIRVEADGDRLKFA

SEQ ID NO: 2239 - protein, 687 aa, Neisseria meningitidis
MTTQTLLIELLTEELPPKALNNLGNHFAAAVAEGLEKAQLVDGAAEFTAYASPRRLAVQVKNVKAVQADQKIVKKGPAVANAMKDGAPTKALEGFARGAGAKIEDLTIVHDGKQDVYAYEYVQTGKPLGELLEDIINQAVKKLPIPKVMRWGSSTFTFVRPVHGLIVLHGGDIVNVSVLGLQSSNQTLGHRFLSNGEITIENADSYAEQMRGQGKVVASFAERKAAIQTALEGQARRLNATVAADEALLDEVTALVEWPVVLEAGFEEHFLAVPQECLILTMQQNQKYFPLLDQNGKLMNRFLLVSNLQTADPSHIIRGNERVLRARLSDAEFFYKQDQKATLESRLPKLANVVYHNKIGSQAERIERLQSIAAHIAKALGADAAAAERTARLAKADLVTEMVGEFPELQGTMGKYYARLDGETEEIAEAVEQHYQPRFAGDNLPNGKVATAVALADKLETLVGIWGIGLIPTGDKDPYALRRAALGILRMLMQYGLDVNELIQTAFDSFPKGLLNEKTPSETADFMQARLAVLLQNDYPQDIVAAVLAKQPRRLDDLTAKLQAVAAFKQLPEAAALAAANKRVQNLLKKADAALGEVNESLLQQDEEKALFAAAQGLQPKIAAAVAEGNFQTALSELASVKPQVDAFFDGVMVMAEDAAVKQNRLNLLNRLAEQMNAVADIALLGE

SEQ ID NO: 2240 - protein, 468 aa, Neisseria meningitidis
MTAAPDILYRQAAALLEQSNTAQALPLLQQAAEQGYAEAAFVLGNHLLQNGQPEQALSWLEAAAAQRHPKALFSLLQQREHNGTPTGQLLNDYAWLGEQGHSEAQLILMRYHAQRNDPQSLYWAELAAARYAAPAYYHLARHHQRQGDVETAIEQYEKAAALGVTAACWQLGQIYFYGTGVSPNHAQAEHYLEPAAQAGHIAAQTLLADLLAAQRKPEALEWYRRAADKEQAEAQSKLAQYALTGELSERDPFQAARYAKAAAEKNHPEALKIMGDLYRYGLGIKADNHIAQDYYHRAAALGSAAAAQKLISDAALYHPQQYEQIKTAALQQQQTETIYRLAEAQACAIGRPADYNAARKNYMEAAGFHHKNAAAALGRIYHYGLGTAQDPRAAAHWYAIAAEQNHPSAQYHLACFYYHGQGVGCHVPTACYWLQAAIGNGHTSAESLISLLEQWRREAHHAIGQKAV

SEQ ID NO: 2241 - protein, 178 aa, Neisseria meningitidis
  misc_feature 3, 4: 'Xaa' is any amino acid
VCXXTAEQYGRLTLNPLPHIDLVGTIIVPLLTLMFTPFLFGWARPIPIDSRNFRNPRLAWRCVAASGPLSNLAMAVLWGVVLVLTPYVGGAYQMPLAQMANYGILINAILFALNIIPILPWDGGIFIDTFLSAKYSQAFRKIEPYGTWIILLLMLTGVLGAFIAPIVRLVIAFVQMFV

SEQ ID NO: 2242 - protein, 206 aa, Neisseria meningitidis; identical to SEQ ID NO: 1725

SEQ ID NO: 2243 - protein, 197 aa, Neisseria meningitidis
MADGMGNLIGWEKTGLVVGKQWITAKDDKVSDVCNANGEMGVIGLYEPFSHGALTIPGHPNCRCEVVSVSGGELGEFAEKKELRKAAMQYARDNFIGKSYVNKNSGHELKVTWQGVKHAASKANQAELSIMTKLDDLLRYAKYEGSYSDRKGHPNIIAAHKYRAVAKVGNEPLNIGVIVREFPDDHKHYDHFILKDE

SEQ ID NO: 2244 - protein, 291 aa, Neisseria meningitidis
MNTEIEIIATDKVSNQAAMRSVLVMEQWGNGETYSEERWVERGRQAVRQTMEGMFELGRALIILKEHTEHGRFMEIVKSQFGLGIAETSRLMSATRRFATPQMQKAAPKLMDLGKSKLLELLVEEDVTLVGLAEGEEVNGMTFDDVDRMTVRELRVALRESRENLAAKDEVMKTKTAKIDELAEKLAKKQTVVREPKAEDVGSELAMQLTSLEVGIRSQVSRLKDLFDQLNAHSEAHGISHQAKMVGTLNQIILDCEQLRESYALPTEAPTDNVPEWLGGETGEGDESGND

SEQ ID NO: 2245 - protein, 179 aa, Neisseria meningitidis; identical to SEQ ID NO: 403

SEQ ID NO: 2246 - protein, 416 aa, Neisseria meningitidis
MFSKSVTLAQYDPDLAAAIAQEDQRQQDHVELIASENYVSCAVMEAQGSQLTNKYAEGYPGKRYYGGCEYVDIVEQLAIDRVKKLFGAQYANVQPHSGSQANQAVYASVLKPGDTILGMSLAHGGHLTHGASVNISGKLYNAVTYGLDENEVLDYAEVERLALEHKPKMIVAGASAYALQIDWAKFREIADKVGAYLFVDMAHYAGLIAGGEYPNPVPFCDFVTTTTHKTLRGPRGGVILCRDNTHEKALNSSIFPSLQGGPLMHVIAAKAVAFKEALQPEFKQYAKQVKINAAAMAEELVKRGLRIVSGRTESHVFLVDLQPMKITGKAAEAALGKAHITVNKNAIPNDPEKPFVTSGIRIGSAAMTTRGFNEADARVLANLVADVLSNPEDEANLENVRKQITALCDKYPVYGA

SEQ ID NO: 2247 - protein, 145 aa, Neisseria meningitidis
MDTPVYLYTDGACKGNPGAGGWGVLMRYGSHEKELFGGEAQTTNNRMELTAVIEGLKSLKRRCTVIICTDSQYVKNGMENWIHGWKRNGWKTAAKQPVKNDDLWKELDTLVGQHQVSWTWVKGHAGHAENERADDLANRGAAQFS

SEQ ID NO: 2248 - protein, 71 aa, Neisseria meningitidis
MTITEEYSIDIRVTAEQGKNDYGYPTERYGCDIINTDGELLVGIEPEYKTPFAAVRKALICLAKDNLKNAA

SEQ ID NO: 2249 - protein, 404 aa, Neisseria meningitidis
  misc_feature 400, 401, 402: 'Xaa' is any amino acid
MKSLKTFLIWGIVVLVGLASFTTLALSRGEQVSAVWMVTAAISVYCIAYRFYSLYIANRVMRLDPNRLTPAERHNDGLDYVPTHKGVLFGHHFAAIAGAGPLVGPVLAAQMGYLPGTLWIIFGVVFAGAVQDMMVLFVSMRRDGKSLGDIVKQELGTVPGVIASIGILMIMVIIMAVLALIVVKALVHSPWGTFTIAATMPIALFMGIYTRYIRPGKIGEISIVGFILLMLAVIYGEDVAKSSIGHWFDLDGIQLTWAIMIYGFVASVLPVWLLLTPRDYLSTFLKIGTIAALALGIVIVNPALQMPAVTHFIDGSGPVFSGALFPFLFITIACGAVSGFHALISSGTTPKMLDNETHVRMIGYGGMLMESFVAIMALAAAASLDPGVYFAMNSPAALIXXXHT

SEQ ID NO: 2250 - protein, 309 aa, Neisseria meningitidis
MDSIIELRHLKTLLALEETGSVSLAAKRVFLTQSALSHQIRMLENHYGAPLFERKSTPLRFTPVGERLLRLAHDLLPQVTDAERDLARIIEGEAGELRIAVECHTCFDWLMPAMGEFRPIWPQIELDIVSGFQADPIGLLLQHRADLAIVSEAEKQNGISFQPLFAYEMVGICAKDHPLAAKTVWEAEDFIGETLITYPVPDEMLDLPKKILIPKNINPPRRHSELTIAIIQLVASRRGIAALPYWTVMPYLEKGYVVHRQITADGLQSKLYAAIRTEDTDKSYLNNFCQIIRERGFADLPGLSELEPV

SEQ ID NO: 2251 - protein, 125 aa, Neisseria meningitidis
MPTSTKPYILRALCEWCSDNSLTPHILVWVNEHTRVPMQYVRDNEIMLNIGATATQNLQIDNDWISFSARFSGQAHDIWIPVGHVLSLFARETGESMGFELEAYRPDTPPENTSAETAPRPAKKA

SEQ ID NO: 2252 - protein, 168 aa, Neisseria meningitidis
  misc_feature 3, 4: 'Xaa' is any amino acid
VCXXIEFKAKDIVIPFEVLQNPGEYFGGAYPICERFAQKATRIHAVKEDKVISADRYLEWVKKQFGRAANGLKFIFPELDKAKLFELIEPSHHKLPKSLAPEAYDCAFLKAQAIHEQPAFKPYKDPYYMYEYYENLEKQLEQQKHVNNEESYNNFIYDKFARLPISWA

SEQ ID NO: 2253 - protein, 354 aa, Neisseria meningitidis
MTLLKNDTFLRALLKQPVEYTPIWMMRQAGRYLPEYKATRAKAGSFLDLCKNTELATEVTIQPLERFDLDAAILFSDILTVPDAMGLGLYFAEGEGPKFKRAMQHEADIAKLHVPDMEKLQYVFDAVTSIRKALDGRVPLIGFSGSPFTLACYMVEGGGSKEFRTIKTMMYSRPDLLHKILDTNAQAVTAYLNAQIDAGAQAVQIFDTWGGVLSDAAFKEFSLKYIRQIVAGLKRESEGRRVPVIVFAKGGGLWLESMAQIGADALGLDWTCNIGEARRRVGKQVALQGNFDPSALFGTPESIRTEVARILADYGHGSGHVFNLGHGINQHADPEHAKILVDTVHELSRQYHGG

SEQ ID NO: 2254 - protein, 296 aa, Neisseria meningitidis
MNPKSPLFLRLSDRLDVYIRLMRADKPIGTLLLLWPTYWALWLASDGIPDLAVLAAFTIGTFLMRSAGCVINDFADRDFDGAVERTKNRPFAQGRVKKKEALLLTAFLCLLAALCLIPLNHLTWLMSLPALFLALTYPFTKRFFPIPQLYLGLAFSFGIPMAFAAVAGNVPPQAWILFAANVLWTLAYDTVYAMADKEDDLKIGIKTSAVTFGRYDIAAVMLCHGGFTLLMAVLGVVIGAAWAYWTAIPIVLLLQYRQYAAIKSRVRQICFETFLANNRIGWVWFTAIFAHTFFAK

SEQ ID NO: 2255 - protein, 842 aa, Neisseria meningitidis
  misc_feature 2, 3: 'Xaa' is any amino acid
VXXDAQQTADLVELLKSPPAGEGEFLVELLAHRVPPGVDDAAKVKASFLAAVAEGSASSPLISPEYATELLGTMLGGYNIHALIELLDDDKLAPIAAKGLKHTLLMFDSFHDVQEKAEKGNKYAQEVLQSWADAEWFTSRAKVPEKITVTVFKVDGETNTDDLSPAPDAWSRPDIPLHALAMLKNPRDGITPDKPGEVGPIKLLEELKAKGHPVAYVGDVVGTGSSRKSATNSVIWHTGEDIPFVPNKRFGGVCLGGKIAPIFFNTQEDSGALPIEVDVSALKMGDVVDILPYEGKIVKNGETVAEFELKSQVLLDEVQAGGRINLIIGRGLTAKAREALKLPASTAFRLPQAPAESKAGFTLAQKMVGRACGLPEGQGVRPGTYCEPRMTTVGSQDTTGPMTRDELKDLACLGFSADMVMQSFCHTAAYPKPVDVKTHKELPAFISTRGGVSLRPGDGVIHSWLNRLLLPDTVGTGGDSHTRFPIGISFPAGSGLVAFAAATGVMPLDMPESVLVRFSGKLQPGVTLRDLVNAIPLYAIKQGLLTVAKAGKKNIFSGRILEIEGLPDLKVEQAFELTDASAERSAAGCTVKLNKEPIIEYMKSNVVLMKNMIADGYQDPRTLERRIKAMEKWLANPELLEADKDAEYAAVIEINMDDIKEPIIACPNDPDDVCFMSERSGTKIDEVFIGSCMTNIGHFRAASKLLEGKADTPVRLWIAPPTKMDAKQLSDEGHYGVLGRAGARMEMPGCSLCMGNQAQVREGATVMSTSTRNFPNRLGKNTFVYLGSAELAAICSKLGKIPTVEEYQANIGIINEQGDKIYRYMNFNEIDSYNEVAETVNV

SEQ ID NO: 2256 - protein, 305 aa, Neisseria meningitidis
MSVYTSVSDDEMRGFLSGYDLGEFVSLQGIAQGITNSNYFLTTTSGRYVLTVFEVLKQEELPFFLELNRHLSMKGVAVAAPVARKDGRLDSVLAGKPACLVACLKGSDTALPTAEQCFHTGAMLAKMHLAAADFPLEMENPRYNAWWTEACARLLPVLSQDDAALLCSEIDALKDNLGNHLPSGIIHADLFKDNVLLDGGQVSGFIDFYYACRGNFMYDLAIAVNDWARTADNKLDEALKKAFIGGYEGVRPLSAEEKAYFPTAQRAGCIRFWVSRLLDFHFPQAGEMTFIKDPNAFRNLLLSLD

SEQ ID NO: 2257 - protein, 350 aa, Neisseria meningitidis
MTVSPVALRRKTECKPHPTARYWKKCDVEALFGLPFLELVHQAAEVHRQNFNPREIQLSTLLSIKTGGCPEDCAYCPQSAHHNTNLGKEQMMDVDEIVEKAKIAKSRGASRFCMGAAWRGPKPKDVETVSAIIKAVKGLGMETCGTFGMLEEGMAEDLKEAGLDYYNHNLDTDPDRYNDIIHTRRHEDRMDTLGKVRNAGLKVCCGGIVGMNETRAERAGLIASLANLDPQPESVPINRLVKVEGTPLADAEDLDWTEFVRTIAVARITMPQSYVRLSAGRSNMPEAMQAMCFMAGANSIFYGDKLLTTGNPDEDGDRILMEKLNLYPLQFELEGEVAEVEKASGIKVDY

SEQ ID NO: 2258 - protein, 95 aa, Neisseria meningitidis; identical to SEQ ID NO: 2063

SEQ ID NO: 2259 - protein, 459 aa, Neisseria meningitidis
MAKTLKTLYQCTECGGTSPKWQGKCPHCGEWNTLQESLAAPEPKNARFQSWAADTSTVQSLSAVTAAEVPRNPTGMGELDRVLGGGLVDGAVILLGGDPGIGKSTLLLQTIAKMAQSRKVLYVSGEESAQQVALRAQRLELPTEGVNLLAEIRMEAIQTALKQHQPEVVVIDSIQTMYSDQITSAPGSVSQVRECAAQLTRMAKQMGIAMILVGHVTKDGAIAGPRVLEHMVDTVLYFEGDQHSNYRMIRAIKNRFGAANELGVFAMTENGLKGVSNPSAIFLASYRDDTPGSCVLVTQEGSRPLLVEIQALVDDAHGFTPKRLTVGLEQNRLAMLLAVLNRHGGIACFDQDVFLNAVGGVKIGEPAADLAVILAMLSSFRNRPMPEKTVVFGEIGLSGEVRPVARGQERLKEAEKLGFKRAIVPKANMPRNAKEFPNLKIYGVSSLQEAIDICRDSRE

SEQ ID NO: 2260 - protein, 196 aa, Neisseria meningitidis
METQDDGTVKVWGYASSEEIDSDGEVIAAAAMKAAIPDYMKFGAGREMHGSNAAGTAIEINVEDDGITFFGAHIIDPVAVAKVKTGVYKGFSIGGSVTARDDLNKSQITGLKLTEISLVERPANPDAVFTCFKADKSAEAVNNDTEHNTAYFSHFPSKQKSTDGGRCPFLYRFPYFLAAGRAGFAGPFGAGAPTEA

SEQ ID NO: 2261 - protein, 307 aa, Neisseria meningitidis
MTKTEPNNAQLDWLESESIHIIREVAAECENPALLFSGGKDSVVLLALACKAFRLGSRAVKLPFPLVHIDTGHNYPEVIAFRDAQAAKLNARLIVGRVEDSIAKGTVVLRKETDSRNAAQAVTLLETIEANGFDALMGGARRDEEKARAKERIFSFRDEFGQWDPKAQRPELWSLYNTRLHKGENMRVFPISNWTELDIWQYIARENLELPPIYYSHRREVVRRRGLLVPVTPLTPKMPSETSEILDVRFRTVGDISCTCPVESTASTPAEIIRETAVADISERSATRLDDQASEAAMEKRKKEGYF

SEQ ID NO: 2262 - protein, 76 aa, Neisseria meningitidis
MAALWQMYVMMTETYTLNRFKDKELVWRVALLFISFSLAVYLLCPNSRKKGIVFFILGGGGAAMYLLARMWLPFSK

SEQ ID NO: 2263 - protein, 296 aa, Neisseria meningitidis
MSVLINKDTKVLVQGFTGKNGTFHSEQALAYGTKVVGGVTPGKGGQTHLNLPVFNTMKEAVKETGADASVIYVPAPFVLDSIVEAVDSGVGLVVVITEGVPTLDMLKAKRYLETNGNGTRLVGPNCPGVITPGECKIGIMPGHIHTPGRIGIISRSGTLTYEAVAQTTKLGLGQSTCIGIGGDPIPGMNQIDALKLFQEDPDTDAIIMIGEIGGTAEEEAAEYIQSNVTKPVVGYIAGVTAPKGKRMGHAGAIISGGKGTAEEKFAAFEKAGIAYTRSPAELGTTMLEVLKTKGLA

SEQ ID NO: 2264 - protein, 291 aa, Neisseria meningitidis
MFQKHLQKASDSVVGGTLYVVATPIGNLADITLRALAVLQKADIICAEDTRVTAQLLSAYGIQGKLVSVREHNERQMADKIVGYLSDGMVVAQVSDAGTPAVCDPGAKLARRVREVGFKVVPVVGASAVMAALSVAGVAGSDFYFNGFVPPKSGERRKLFAKWVRAAFPVVMFETPHRIGATLADMAELFSERRLMLAREITKTFETFLSGTVGEIQTALSADGNQSRGEMVLVLYPAQDEKHEGLSESAQNIMKILTAELPTKQAAELAAKITGEGKKALYNLALSWKNK

SEQ ID NO: 2265 - protein, 159 aa, Neisseria meningitidis
LFEEIPGYDLRKTYDNAGYEVWFNGELKAYCFKKYEFYRFLKRPGYNINWKDHLSKRLLPDNGLFIIIRDTLFIIEIKFQQTPGSVDEKLQTCDFKRKQYTKLVHSLGWRVEYVYVLNDWFTKPEYKDVLDYIISVNCHYQFNTIPLRWFGLPDGETNE

SEQ ID NO: 2266 - protein, 154 aa, Neisseria meningitidis
MKCPFCAHPDTRVADSRLMEERNAVRRRRHCPNCGKRFGTLETAELKMPAVIGPDKKRSPFNAQRLRNDLTAAARKSALTPEQIDETVRLTEHRLYTSGQRDIPSAALADMVLKELLRQDTEAAVRFAALHKRFDNPADFASWLAQAVKTGGKA

SEQ ID NO: 2267 - protein, 194 aa, Neisseria meningitidis
LFIDNYDSFTYNIVQYFAELGQEVAVRRNDDITLEEIEALNPQYLVIGPGPCSPKEAGISVAAMRHFAGRLPIMGVCLGHQTIGEAFGGRIVRAKTLMHGKVSPVSHSGKGMFKGLPNPVTCTRYHSLVIDRNTMPECLEVTAWTEDGEIMGVRHKEYAVEGVQFHPEALLTEHGHDMLNNFLIEFQNFKPQKI

SEQ ID NO: 2268 - protein, 387 aa, Neisseria meningitidis; identical to SEQ ID NO: 2114

SEQ ID NO: 2269 - protein, 267 aa, Neisseria meningitidis
MKKILLTVSLGLALSACATQGTVDKDAQITQDWSVEKLYAEAQDELNSSNYTRAVKLYEILESRFPTSRHARQSQLDTAYAYYKDDEKDKALAAIERFRRLHPQHPNMDYALYLRGLVLFNEDQSFLNKLASQDWSDRDPKANREAYQAFAELVQRFPNSKYAADATARMVKLVDALGGNEMSVARYYMKRGAYIAAANRAQKIIGSYQNTRYVEESLAILELAYQKLGKPQLAADTRRVLETNFPKSPFLTHAWQPDDMPWWRYWH

SEQ ID NO: 2270 - protein, 221 aa, Neisseria meningitidis
MTFTAVLFDLDGVITDTAEYHYRAWKKLAEELGISIDRKFNEQLKGVSRDDSLKRILAHGGKTVSEAEFAELTRRKNDNYVEMIQAVKPEDVYPGILPLLETLKANGKKIALASASKNGPFLLERMGLTHFFDTVADPAAVAHSKPAPDIFLAAAEGVGADIRRCIGIEDAAAGVAAIKASGALPIGVGKAEDLGSDIPLVSGTAELTYAYLQNVWAQSGR

SEQ ID NO: 2271 - protein, 129 aa, Neisseria meningitidis
LKAGIRLLSESGKTQTVRNIVVKPKPLKAYNLTVADWHTYFVKGNRAETEGVWVHNACPPKRTGSSKNEKHGDDGRSQISAESRIAELKNKIIPGMPKNERLKIEQKIKNITKNANRKAKGEEHGRRGR

SEQ ID NO: 2272 - protein, 377 aa, Neisseria meningitidis
MSYSTFPKTKNDALNEPMFFGQPVNVARYDQQKYEVFEKLIEKQLSFFWRPEEIDVSRDRIDYANLPEHEKHIFISNLKYQTLLDSIQGRSPNVALLPLVSIPELETWIETWSFSETIHSRSYTHIIRNIVNDPSVVFDDIVENEYITARAEDIACYYDDLIEYTQYYNLLGEGMHNVGGKPITVSLRGLKKKLYLCLMCVNVLEAIRFYVSFACSFAFAERELMEGNAKIIKLIARDEALHLTGTQHMLNLMRSGVDDSEMAEIAAELQDECFQLFKKAAEQEKEWAAYLFKDGSMIGLNKEILSQYVEYITNLRMQAVGLPAGFEGANQNPIPWINAWLSSDNVQVAPQEVEISSYLIGQIDSEVNTDDLGDFEL

SEQ ID NO: 2273 - protein, 201 aa, Neisseria meningitidis
MILLHLDFLSALLYAAVFLFLIFRAGMLQWFWASIMLWLGISVLGAKLMPGIWGMTRAAPLFIPHFYLTLGSIFFFIGHWNRKTDGNGWQADPEHPLLGLFAVSNVSMTLAFVGICALVHYCFSGTVQVFVFAALLKLYALKPVYWFVLQFVLMAVAYVHRCGIDRQPPSTFGGSQLRLGGLTAALMQVSVLVLLLSEIGR

SEQ ID NO: 2274 - protein, 436 aa, Neisseria meningitidis
MTDLFAREPDAPLAERLRPHTLDDVVGQEHLIGEGKPLRVAVEGGKPHSMLLWGPPGVGKTTLARILAQSFNAQFLPVSAVFSGVKDIRGAIDKAEIALQQGRATILFVDEVHRFNKAQQDAFLPHVESGLLTFIGATTENPSFEVNPALLSRAQVYVLQPLSSDDLKKLIAKVLALPEYQEFTIETDAQKLLVNTADGDARRLLNLLEQLLRAADTRRLKNLTAEFLADSLGAQIRRFDKGGESFYNQISALHKSVRGSHPNAALYWFCRMLDGGTDPRYLARRIVRIAWEDIGLADPRAFQIANDAAATFERLGSPEGELALAQAVLYLAAAAKSNAGYKAYKQMRRFVAENSSDEVPVHLRNAPTKLMKELGYGREYRYAHDEPNAYAAGESYMPDGLDEPDFYQPVPRGLEIKIGEKLEWLKSLDEEVLKAK

SEQ ID NO: 2275 - protein, 630 aa, Neisseria meningitidis
MKKMKPDKAQMQQMSRFAVFQRESVDVEKRTVEVAFSSEESVRRWFGDEVLSHAQGAVDLSRLNDGGAVLFNHDWDDQIGIIERAWIDADKRGRALVRFGNGTKATEKFQDVQDGILRHISVGYRVEDMVLDNPDTDDEGYRYIVTRWMPYEISFVTVPADPTVGVGRSVEPFIENPVNPTPEKGNRNMDKNQTPTTVETSAAAIPAAAATDTNNTAERGMQNERARVSELLAIGRSYAAHGGIEAAEKVIKEGGSEAQLRAAIMANMQTKPTVTAGEIGMTDKEQREFSLLRAMSAAATGKWDKAGLEREVSEELEKRHGRAAAGFFVPTDLIARAYSKGNAANGGNVIENDFREDLFIELLRNRLAVAQLGATVLDGLVGDITIPKHLTGNTVQWVDENGSATESNATFGQMSLKPKTVTANTELSRKFILQSSLSAEQFARSELLKAMMLGIDLAAINGKGTGNEPTGILNTAGIGAVEIGANGGAPEWKHIVALESAIAAANADIGDLAYITNARVRGLLKTKLKADGVSGYIWQDGATPLNGYRCAVSNQIPSNLTKGTAANKCSPLIFGNWSDLMIAHWGVLDVIVDPYTKSTTGAVRITTLQDVDIAVRHVESFAAIKDIAAA

SEQ ID NO: 2276 - protein, 391 aa, Neisseria meningitidis
VFKVKFYIRHAVLLLCGSLIVGCSAIPSSGPSAKKIVSLGQQSEVQIPEVELIDVNHTVAQLLYKAQINQSFTQFGDGYASAGTLNIGDVLDIMIWEAPPAVLFGGGLSSMGSGSAHQTKLPEQLVTARGTVSVPFVGDISVVGKTPGQVQEIIKGRLKKMANQPQVMVRLVQNNAANVSVIRAGNSVRMPLTAAGERVLDAVAAVGGSTANVQDTNVQLTRGNVVRTVALEDLVANPRQNILLRRGDVVTMITNPYTFTSMGAVGRTQEIGFSARGLSLSEAIGRMGGLQDRRSDARGVFVFRYTPLVELPAERQDKWIAQGYGSEAEIPTVYRVNMADAHSLFSMQRFPVKNKDVLYVSNAPLAEVQKFLSFVFSPVTSGANSINNLTN

SEQ ID NO: 2277 - protein, 242 aa, Neisseria meningitidis; identical to SEQ ID NO: 624

SEQ ID NO: 2278 - protein, 626 aa, Neisseria meningitidis
MNIFYEESGQFKIAAIIQKNDATYQVDTQHGKRTKVKANNVFAEFDGDMAAFLENAQAQAADIDTDLLWEVCGEEEFSAEAIAEEYFGHAPTKTELAATLIALYAAPMYFYKKAKGVFKAAPEETLKQALAAIERKKQQDAQIDAWAEALKRGEMPSEIAADLKTILHAPDKQSLTYKAFTKAADALKISAYELAKKTGGITSIPQYLQDGFEIKYFPKGTGFPDLALPEMPDLPKADVTAFSIDDESTTEVDDALSLTDLDNGTKRVGIHIAAPSLAVKPGDKMEKNIMERLSTVYFPGGKITMLPENWIAAFSLDAGAHRPAVSIYFDVDSEFNTGEPTCKIEAVNISENLRIQAIEPHFNAEAGLDEAGEMMFAHHQDLIWFYQFAIALQKARGKYEPDRAPQYDYSIELDEEGNVSIVRRERGSPIDTLVSEMMILANSTWAQMLDENDLPGLFRVQPAGKVRMSTKSEPHIGMGVQHYGWFTSPLRRAADYINQKQLISLIDDTAEPLFQQSDAELFAALRDFDAAYTAYADFQRQMEAYWSLVYLQQQGTSELTATILKEDLVRIEGLPLVTRATGIPFDALPKSQALFKITELDAEKQFVSLNYIKAVAPAGTTAGNAV

SEQ ID NO: 2279 - protein, 485 aa, Neisseria meningitidis
MSRHPAPTGEKTFFGHPFQLSTLFHIELWERFSFYGMQGILLIYLYYTADKGGLGIDKTLAGGIVGAYSGSVYLSTILGAWFADRVWGAEKTLFLSGIVVMLGHIVLAAAPGLYGLLIGLIFIALGSGGVKSTASSMVGALYEQDEMRPLRDAGFSIFYIAINIGGFLGPLLTGLLQENIGFHYGFGAAAVGMAFGLWRYSLGRKNLPHPTVPHPLSKGQGKTAAAVGIALIAALATAIKTGLVNLDNFSGILLSTVILAVIAYFARLLTNPRVSSDNKRHIIAYIPLFLTICMFWAVWFQIYTVATVYFDETVNRTIGSFTVPVAWKDSMQSLWVILFSGLMAAMWTKMGRKQPKTPLKFAMAVFVTGASFLGFIPFISAGTPMPIAVFALIVLAITIGELMISPIALSISTKIAPPLFKTQMVALNFLAFSLGFTLGGVLFEKGYQAGDEIGFYRLLFYIGAATGFLLLLLVPKLNKMLEGTD

SEQ ID NO: 2280 - protein, 272 aa, Neisseria meningitidis; identical to SEQ ID NO: 1395

SEQ ID NO: 2281 - protein, 74 aa, Neisseria meningitidis
MNSETLDVTGLKCPLPILRAKKALAQMQQGDVLTVLATDGGAPGDFEAFCRQTGHVLLDASEQDGVFTLVVQHK

SEQ ID NO: 2282 - protein, 409 aa, Neisseria meningitidis
MAFGKSLFHAIGRVSLVRQIAAGLALGIVIGSVSPQLGLAAGLFGSLFVGALKAVAPVLVFILVAATIAQHQKGNKAHIRPIIVLYLIGTFSAALTAVIAGMVFPTHIVLAGAGDVSAAPPSGIVEVLKSLLMNLVANPINAIANANYIGILAWALVLGAALRNHGSDVTRQVVADLAEAVSTVVKWIIRFAPLGIFGLVSSTIAETGFGALAGYAKLLAVLLGCMAFIALVVNPAIVWWKIRRNPYPLVFTCLRESGVYAFFTRSSAANIPVNMALAKKLGLHEDTYSISIPLGATVNMGGAAITITVLAMAAAHTQGIQVDFATALLLSLVATVSACGASGVAGGSLLLIPLACSLFGISNDVAMQVVAVGFIIGVIQDSAETALNSSTDVLFTAAADLGRQRNRAE

SEQ ID NO: 2283 - protein, 174 aa, Neisseria meningitidis
MKKALAALIALALPAAALAEGASGFYVQADAAHAKASSSLGSAKGFSPRISAGYRINDLRFAVDYTRYKNYKAPSTDFKLYSIGASAIYDFDTQSPVKPYLGARLSLNRASVDLGGSDSFSQTSTGLGVLTGVSYAVTPNVDLDAGYRYNYIGKVNTVKNVRSGELSVGVRVKF

SEQ ID NO: 2284 - protein, 463 aa, Neisseria meningitidis
MQVFLDNLKAFFETVSGWVWGSVMLMLLVGTGIVLTVMLKGLQFTMLGYALKQAFVPSKKYEGGEGHEGDISHFAALMTALSATIGTGNIAGVATAVVTGGPGAVFWMWMTAIFGMATKYGEGVLAVKYRVNNSKGEMSGGPMYYIEKGLGKNWKWMAVAFALFGTFASFGIGSSVQSNSVAQAVQTSFGIEPAYTGITLTVLTAVVVLGGIKGIAKAASFIVPAMAVFYVLGGLSIIAINSDALMPAVKLIFSDAFSAQAVAGGAIGTVIRYGVARGVFSNEAGMGSAPIAAAAAKTDHPVRQALVSMTGTFLDTIVVCSITGIVLVMGLLGAGGEFVKPEVSGAALTTVTFQKMLPGIGGWIVTIGLIFFAYSTILGWCYYGEKCAVYVFGEKFAGLYRVGYVSSVMLGTVLSLDLVWLASDTFNGLMALPNLIALLLMAKVIVNETRDFKQKITNGELPH

SEQ ID NO: 2285 - protein, 208 aa, Neisseria meningitidis
MYTGERFNTYSHLSGLILAAAGLVLMLLKTIGHGDGYRIFSVSVYGISLLLLYLSSSLYHGIAAGKLKSILKKTDHCMIYVLIAGSYTPFALVSLRNGPGWTVFSLSWLLAAAGIAQELTIGRKSEKRLLSIVIYVVMGWMVLAVMKSLTASLPSAGLAWLAAGGMLYSVGIYWFVNDEKIRHGHGIWHLFVLGGSITQFVSVYGYVI

SEQ ID NO: 2286 - protein, 139 aa, Neisseria meningitidis
  misc_feature 135, 136, 137: 'Xaa' is any amino acid
MEQQQRYISVLDIGTSKVLALIGEVQDDDKINIVGLGQAPSRGLRAGMVTNIDATVQAIRQAVNDAELMADTKITHVTTGIAGNHIRSLNSQGVVKIKDGEVTQADIDRAIETAKAINIPPDQKILDAVVQDYIXXXHT

SEQ ID NO: 2287 - protein, 513 aa, Neisseria meningitidis
MKFLDREASIAKPGFNRWLVPPAALAVHLAIGQIYAYSVFNAPLTKLIGITESAAGDWKLTTVGWIFSIALAMLGASAALFGTWMERVGPRKAIFAAACCFSLGFFVSAFGVRTHNLFLLYLGNGVIGGVGLGLGYIGPVSTLMKWFPDKPGMATGLAIMGFGGGAMLASPLSVSLMNAFSNAASVGVAETFAVLGLLYLALMMFGAFTIRVPADGWKPEGYTAPKTQNKLVSSNHVNVSQAMKTPQFWLLFWVLCLNVTAGIGVLGQASVMIQELFSETSIGRQAAVGAGAAAGFVSLLSLFNMGGRFLWSSVSDKIGRKNTYTIFFVLGSLLYFAVPSIGEGGSKALFIIGFCVIISMYGGGFAAIPAYLKDLFGTYQVGAIHGRILLAWSTAAVIGPVLVNYIRQSQIDSGIPAAQAYSVTMYIMACLLIIGLLCNLAVKSVHEKHHEKDIKTAAHSGNPDDETAISDAYLVGEKVSGGGISVWWRWALAVIPLAYGVVMVFVKALDLFS

SEQ ID NO: 2288 - protein, 60 aa, Neisseria meningitidis
MFWYVIGFCSFVVALLSLWVNVGAFGMQEDDTPQSDYEKRLGLGAKLKNKNTPDTEEKQQ

SEQ ID NO: 2289 - protein, 979 aa, Neisseria meningitidis
MSGFNYEKNQPHQMRAVSAVLGVFDGATPKYRTADENPELLFAAKQYANNILKVQSQNGIDGRFPDRSDDQNILDISMETGTGKTYTYTQTMFELHRWLGVFKFIVVVPTLSIKAGTQQFLQSKALAEHFEQDFGGDYEGVRLKTYVVESAKKNKGKKSNAPITIEQFVKAENKKEIHVLLINAGMVNSSSMNDTGDKALKDLFDNPVDALAAVRPFMIVDEPHKFPTRDSAKTWGNIKRLKPQYILRYGATFNDEYYNLLYRLTAVDAFNDGLVKGVRVFQEEMQGGMDAAVKLVSSDGKEAKFELNEKDKKQTFKLAKGEDLAQIHPAISDLKIDKMNKTVVVLSNGLELKTGAVINPYSYSQTVQDAMMQRAVAEHFKLERALLAERAPQPKIKPLTLFFIDDIAGYRSGNELSGSLKDKFESWIRAEAARRLKTESDPFYRDYLQKTLDDVSACHGGYFSKDNTDSDDRIEQEINEILHDKEKLLSLDNPRRFIFSKWTLREGWDNPNVFQICKLRSSGSTTSKLQEVGRGLRLPVNELMARVRDVPYKLNYFVDSSEKDFVKQLVGEINDNSFQEEISKKFTEELKQKILQKYPDIKPLVLVNQLFSDGIIDDNENFAEDGYDKLKAAYPEAFPKGLDKGKVSNAKDEGKDTIIMREGKYEELKALWELIHHKAVLQYKIKDEAEFVDLFTAYLRENAAKFPQAGIRTAVNEAYINNGLMLSRRIDSFEDEDFIRFNTMTYRELLEKLAQTAKIRMQTLHQAFYRVRDELNIGDFLNMQTIAQIKNGFNRFLLHHSFHKFELDYRLVGSKIHPTKFTDKDGKPRAVKKADLGRFEDTEHRPAAGYLFDEIFYDSDIEHENVANNQIEGVTVFTKIPRNSIKIPVAGGGTYSPDFAYIVKTKSGEILNFVIEAKGTDGAEDLRKSEERKIKHAEKPFAEISKEIKVVFKTQFDGERIAELIGQNMPAGGHSENGH

SEQ ID NO: 2290 - protein, 107 aa, Neisseria meningitidis; identical to SEQ ID NO: 564

SEQ ID NO: 2291 - protein, 335 aa, Neisseria meningitidis
MSTFFQQTAQAMIAKHINRFPLLKLDQVIDWQPIEQYLNRQKTRYLRDHRGRPAYPLLSMFKAVLLGQWHSLSDPELEHSLITRIDFNLFCRFDELSIPDYSTLCRYRNWLAQDDTLSELLELINRQLTEKGLKIEKASAAVVDATIIQTAGSKQRQTIEVDEEGQISGQTTPSKDKDARWIKKNGLYKLGYKQHTRTDAEGYIEKLHITPANAHECKHLPPLLEGIAEGTTVYADKGYDSAENRQHLEEHQLLDGIMRKACRNRPLSEVQTKRNRYLSKTRYVVEQSFGTLHRKFRYARAAYFGLIKVSAQSHLKAMCLNLLKAANRLSAPAAA

SEQ ID NO: 2292 - protein, 837 aa, Neisseria meningitidis
  misc_feature 2, 3, 4: 'Xaa' is any amino acid
VXXXLIAASVAVAASFQAHAGLGGLNIQSNLDEPFSGSITVTGEEAKALLGGGSVTVSEKGLTAKVHKLGDKAVIAVSSEQAVRDPVLVFRIGAGAQVREYTAILDPVGYSPKTKSALSDGKTHRKTAPTAESQENQNAKALRKTDKKDSANAAVKPAYNGKTHTVRKGETVKQIAAAIRPKHLTLEQVADALLKANPNVSAHGRLRAGSVLHIPNLNRIKAEQPKPQTAKPKAETASMPSEPSKQATVEKPVEKPEAKVAAPEAKAEKPAVRPEPVPAANTAASETAAESAPQEAAASAIDTPTDETGNAVSEPVEQVSAEEETESGLFDGLFGGSYTLLLAGGGAALIALLLLLRLAQSKRARRTEESVPEEEPDLDDAADDGIEITFAEVETPATPEPAPKNDVNDTLALDGESEEELSAKQTFDVETDTPSNRIDLDFDSLAAAQNGILSGALTQDEETQKRADADWNAIESTDSVYEPETFNPYNPVEIVIDTPEPESVAQTAENKPETVDTDFSDNLPSNNHIGTEETASAKPASPSGLAGFLKASSPETILEKTVAEVQTPEELHDFLKVYETDAVAETAPETPDFNAAADDLSALLQPAEAPSVEENVTETVAETPDFNATADDLSALLQPSEVPAVEENAAEIVADDLSALLQPAEAPAVEENVTKTVAEIPDFNATADDLSALLQPSEVPAVEENAAETVADDLSALLQPAEAPAVEENAAEITLETPDSNTSEADALPDFLKDGEEETVDWSIYLSEENIPNNADTSFPSESVGSDAPSEAKYDLAEMYLEIGDRDAAAETVQKLLEEAEGDVLKRAQALAQELGI

SEQ ID NO: 2293 - protein, 169 aa, Neisseria meningitidis; identical to SEQ ID NO: 111

SEQ ID NO: 2294 - protein, 187 aa, Neisseria meningitidis; identical to SEQ ID NO: 508

SEQ ID NO: 2295 - protein, 412 aa, Neisseria meningitidis
  misc_feature 407, 408: 'Xaa' is any amino acid
MCCSLSFAEPARIDDRIIKFRPSKSKFFESTGYRKINNEFSKFTEAANVEHIPTGAKARINAKITASVSRAAVLSGVGKLARLGAKLSTRAVPYVGTALLAHDVYETFKEDIQAQGYQYDPETDKFVKGYEYSNCLWYEDKRRINRTYGCYGVDSSIMRLMSDDSRFPEVKELMESQMYRLARPFWNWHKEELNKLSSLDWNNFVLNRCTFNWNGGDCLVNKGDDFRNGANFSLIRNPKYKEEMDAKKLEEILSLKVDANPDKYIKATGYPGYSEKVEVAPGTKVNMGPVTDRNGNPVQVVATFGRDSQGNTTVDVQVIPRPDLTPGSAEAPNAQPLPEVSPAENPANNPNPNENPGTSPNPEPDPDLNPDANPDTDGQPGTRPDSPAVPGRTNGRDGEDGGLLCKXXHTLN

SEQ ID NO: 2296 - protein, 196 aa, Neisseria meningitidis
  misc_feature 192, 193, 194: 'Xaa' is any amino acid
MFFSALKSFLSRYITVWRNVWAVRDQLEPPKRTAEEQAFLPAHLELTDTPVSAAPKWAARFIMAFALLALLWSWFGKIDIVAAASGKTVSGGRSKTIQPLETAVVKAVHVRDGQHVKQGETLAELEAVGTDSDVVQSEQALQAAQLSKLRYEAVLAALESRTVPHIDMAQARSLGLSDADVQSAQCWRSTSXXXHT

SEQ ID NO: 2297 - protein, 224 aa, Neisseria meningitidis
MPAALIKDFLLTQGLKLPLDEVRAAYLTAQTVMDMGTASIERSVLWLEHEDWRLADYLEQNSGNEEGLKRLFMALDSVFSRSTGVRSAAVYALMPSESQAFQLICLSRQGEVLENLWDLDEAAGKVSLACRSAQSGWMNIASDVGRWLALGELSGERNRHSAAQLSIPVCTESGGVLGVVHVEFEKAGCADEAAQAEWIALALALSEPLKQLLGITAAEGDENV

SEQ ID NO: 2298 - protein, 180 aa, Neisseria meningitidis
VQSWKERRDFNIVKQDLDFSCGAASVATLLNNFYGQKLTEEDVLKKLDKEQMPASFEDMRRIMPDLGFEAKGYALSFEQLAQLQIPVIVYLKYRKDDHFSVLRGIDGNTVLLADPSLGHVSMSRAQFLDAWQTREGNLAGKILAVVPKGRDAGGDKAFFTRSPKRQTEFAVGQVKWWRAY

SEQ ID NO: 2299 - protein, 344 aa, Neisseria meningitidis
MGAGAAFAALVWLIFALGDTLTPFAVAAVLAYVLDPLVEWLQKKGLNRASASMSVMVFSLILLLALLLIIVPMLVGQFNNLASRLPQLISFMQNTLLPWLKNTIGGYMEIDQASIIAWLQAHTGELSNALKAWFPVLMRQGGNIVSSIGNLLLLPLLLYYFLLDWQRWSCGIAKLVPRRFAGAYTRITGNLNEVLGEFLRGQLLVMLIMGLVYGLGLVLVGLDSGFAIGMVAGILVFVPYLGAFTGLLLATVAALLQFGSWNGILSVWAVFAVGQFLESFFITPKIVGDRIGLSPFWVIFSLMAFGQLMGFVGMLAGLPLAAVTLVLLREGVQKYFAGSFYRGR

SEQ ID NO: 2300 - protein, 176 aa, Neisseria meningitidis
MQGFELEDLTLWLIRDAGEDQMWIDRWAISYPVVQMSEASAGQSIGEWQAGLRTAFERIRGKYVAVVAHGAGAAAFLAWLYQADILTRKKIANIILVPQRPDIFPDDAEHTFQRVRCPCRAALVVPEHGGVPHGWAQKQADLWNARLLVSPHSGSLNGMLGGWQWGMKLMQEMLLA

SEQ ID NO: 2301 - protein, 218 aa, Neisseria meningitidis
VNKRLFCSRNGLRYYLLGGFCLSVFPLLLVFASSVWAVYRTGGQVLPPYVRADAALVLGAAAWDKRPSPVFRERINHAIALYQSRRVGKIIFTGGRSKKGYMTEAEVGRRYALKQGIPPRNILFENTSRNTYENLNNIRPVLRANGIASVVIVSDPYHLARAAEMAEDLGVRVYMSATPTTRFDAGNKKKIFMLQEGYALSLYRLEKWGRDFFNWLFH

SEQ ID NO: 2302 - protein, 40 aa, Neisseria meningitidis
LLKLINRQLTEKGLKIEKASAAVVDATIIQTAGSKQRQAR

SEQ ID NO: 2303 - protein, 715 aa, Neisseria meningitidis
  misc_feature 709, 710: 'Xaa' is any amino acid
MQLHILNNPKDAALAADAEFLKQSLFNLLHEEASPLVVETVKLLSTSDDSAALIEKVLPQLDEQQTHDLTLACGLFAQILNIAEDVHHERRRQIHEEAGRGGAEGSLTETVRRLKAGKADGKSVQRQLDNTSVTAVLTAHPTEVQRQTVLSFNRRIRALLPQRERCTNADALARLRREIDTILLGLWQTSETRRHKLSVNDEINNGVSIFPMSFFEALPKLYRNMEHDFQMVYPDVCVPNILKIGGWIGGDRDGNPFVSAETLRFAFRRHADAVFRFYRGELDKLYRELPLSIRRVKVNDDVMALAALSPDEEIARTEEPYRRAIAYIMARAMGKARALGLGMGCKFGFLEPYASAQEFLDDLKKLQRSLIDNGSRLLAEGRLADLIRSVSVFGFHMMPLDLRQHAGKHADVVAELFQHAGLEDYNSLNEEQKQAALLRELSHQRPLYSPFITYSDHTRHELAIFNEARKIKDEFGEDAVTQSIISNCEQPSDLLALALLLKESGLLAVENGKPRSRINIVPLFETIEALENACPVMETMFRLDWYDALLESCGNIQEIMLGYSDSNKDGGYVTSSWCLYQAELGLVELFKKYDVRMRLFHGRGGSVGRGGGPSYQAILAQPAGSVAGQIRITEQGEVITAKYADPGNAQRNLETLVAATLEASILPDKKDPDAKLMQALSDVSFKYYRELITHPDFIDYFLQTSPIQXXTHLIN

SEQ ID NO: 2304 - protein, 201 aa, Neisseria meningitidis
MTRQSLQQAAESRRSVYSLNKNLPVGKDEVVQIVEHAVLHTPSSFNSQSARVVVLFGEEHDKVWQFVEDALRAVVPADSFEPTAQKLNLFKAGAATILFYEDQNVVKGLQEQFPAYAANFPVWADQANAMVQYAVWTTLAAVGVGANLQHYNPLPDAAIAKAWNIPENWLLRAQMVIGGIEGAAGEKTFEPVAERLKVFGA

SEQ ID NO: 2305 - protein, 139 aa, Neisseria meningitidis
  misc_feature 134, 135: 'Xaa' is any amino acid
MQTANKKTILVTGGAGFIGSAVVRHIIQNTQDSVVNLDKLTYAGNLESLTDIADNPRYAFEQVDICDRAELDRVFAQHRPDAVMHLAAESHVDRSIGSAGEFIQTNIVGTFNLLEAARAYWQQMPSEQHEAFRXXHTLN

SEQ ID NO: 2306 - protein, 343 aa, Neisseria meningitidis; identical to SEQ ID NO: 614

SEQ ID NO: 2307 - protein, 170 aa, Neisseria meningitidis; identical to SEQ ID NO: 2052

SEQ ID NO: 2308 - protein, 361 aa, Neisseria meningitidis
MTVPHIPRGPVMADIAAFRLTEEEKQRLLDPAVGGIILFRRNFQNIEQLKTLTAEIKALRTPELIIAVDHEGGRVQRFIEGFTRLPAMSTLGEIWDKDGASAAETAAGQVGRVLATELSACGIDLSFTPVLDLDWGNCPVIGNRSFHHNPEAVAHLALALQKGLAKGGMKSCGKHFPGHGFVEGDSHLVLPEDRRSLSELEAADLAPFHIMSREGMAAVMPAHVVYPQVDTKPAGFSEIWLKQILRRDIGFKGVIFSDDLTMEGACGVGGLKERARISFEAGCDIVLVCNRPDLVDELREDFRIPDNPALAQRWQYMANTLGSAAAQAVMQTADFQEAQAFVAGLASPQDTAGGVKVGEAF

SEQ ID NO: 2309 - protein, 294 aa, Neisseria meningitidis
MSSGNIHIHSMTGFANAAAECGSKRINLDLRAVNHRFLDIQIRMPDDLRYLESGIREKISSHIARGKVECKIQIQDTENSRQSLELNSDLVNQLAEINKDLRKHHDLAKLGVADILRFPGVLASQRENTEELAKSITELTEKALKDFTAARRREGKKLGEHLLQRLESMEEIIDALSELFPTLLETHKEKIRARLVEAVGDINNDRLQQEFALFIQKSDIDEEFSRLRTHIAEVRRIVTEHKGSSGKRLDFLMQELNREANTLGSKSIAAECTQASVELKVLIEQMREQVQNIE

SEQ ID NO: 2310 - protein, 70 aa, Neisseria meningitidis
MIKLDLKSINLYDIDFEKFTPEIPDNFHRWIDLDIGIEGEQGSSIFSLCICSPKWISHHCNKEGFFGLMH

SEQ ID NO: 2311 - protein, 206 aa, Neisseria meningitidis
MAQFFAVHPDNPQERLIKQAVEIVNKGGVVVYPTDSCYALGCKLGDKAAMERILSIRKIDLKHHLTLMCADLSELGTYAKIDNVQFRQLKAATPGPYTFILQATKDVPARTLHPKRKTIGLRIPDNAIAQALLGELGEPLLSCTLMLPEDGEPLTDPYEIRERLEHAVDLVIDGGWCGTEPTTVIDMTDGTELVRQGCGDTAVFGL

SEQ ID NO: 2312 - protein, 376 aa, Neisseria meningitidis
MKQADSTIKSRAAVAFAPNQPLQIVEIDVEMPRKGEVLIRNTHTGVCHTDAFTLSGSDPEGVFPVVLGHEGAGVVVAVGEGVSSVKPGDHVIPLYTAECGECEFCCSGKTNLCVSVRDTQGKGLMPDGTTRFSYQGQPIYHYMGCSTFSEYSVVAEVSLAKINPEANHEQVCLLGCGVTTGIGAVHNTAKVQEGDSVAVFGLGAIGLAVVQGARQAKAGRIIAIDTNPSKFELAKQFGATDCLNPNDYDKPIKDVLLDINKWGIDHTFECIGNVNVMRQALESAHRGWGQSIIIGVAGAGQEISTRPFQLVTGRVWKGSAFGGVKGRSELPKMVEDSMKGDIELEPFVTHTMTLDQINKAFDLMHEGKSIRAVIHY

SEQ ID NO: 2313 - protein, 387 aa, Neisseria meningitidis; identical to SEQ ID NO: 2114

SEQ ID NO: 2314 - protein, 107 aa, Neisseria meningitidis
MQNETINLKQHLAAIKEYWQPEIINRHGFQFRLVKLLGDYGWHTHGYSDKVLFAVEGDMAVDFADGGSMTIREGEMAVVPKSVSHRPRSENGCSLVLIELSDPSEAV

SEQ ID NO: 2315 - protein, 131 aa, Neisseria meningitidis
MPSDVGIRLQTAFKRKFKMKKIFYFLMVVFSTSVWAGDAEDNLLSIQSGYRALLQKQNNLDGKIIGMQSDLEDARRRLQAAQADINRLEAEIPAAMAQKARQAEELRQIGVRLDHAWNAVYGAGGTKASGN

SEQ ID NO: 2316 - protein, 396 aa, Neisseria meningitidis
MIYHRIAVNVPLSDGLLTYSHSDPLPPGTRVLVPFRNKTVVGMVWETDIAPDMDTARILSIQTTFLDEPPLPESWRDLLSFTSRYYHYPTGQAVFAALPQGLKETRAVEMPQPPLFYALNEAGRAQTPPPARFNKKAALWDALLSGGMTMAALKQVNAQAAKLIEDWTEQGWIETAEAAKPVLRSCHGQASHAGFVLNAGQRQASDEIQTALGRFQPFLLYGITGSGKTEVYFDAMAKVLAQGRQVLFLLPEINLTPQLLKRVENRFADVPTAVLHSRMAAGKRTQDYLRAMSGQAKLVIGTRLAVFTPMDDVGLIVVDEEHDGSFKQDNELRYHARDLAVWRAKQGGCPVVLGSATPSLESWHKAQSGAYRLLQLTERAHAAAQLPQVEILNAAV

SEQ ID NO: 2317 - protein, 96 aa, Neisseria meningitidis
MNIQLQGHIVGVKKFNGQIEGKSFDYCRLIVATPLDSSQGNALGSSTTEYDFGGSANFEQFRNAQFPIEANLNVEIVTTGKTQKLKVIGFQLVKKG

SEQ ID NO: 2318 - protein, 148 aa, Neisseria meningitidis
VRVLRENGIEFEPFTYAYEEHGGTAQFARLFGKDEHLVIKTIVLQDENGKGLIVLMHGDKQISTRNLARHLGAKHIEPATPVQANKWTGYLVGGTTPFGIRTKLDIYVEQSVMDLETIYINGGKRGFIIGIRPRDLNILNPKTIQAAV

SEQ ID NO: 2319 - protein, 912 aa, Neisseria meningitidis
MQQQHLFRLNILCLSLMTALPVYAENVQAGQAQEKQLDTIQVKAKKQKTRRDNEVTGLGKLVKTADTLSKEQVLDIRDLTRYDPGIAVVEQGRGASSGYSIRGMDKNRVSLTVDGVSQIQSYTAQAALGGTRTAGSSGAINEIEYENVKAVEISKGSNSVEQGSGALAGSVAFQTKTADDVIGEGRQWGIQSKTAYSGKNRGLTQSIALAGRIGGAEALLIHTGRRAGEIRAHEDAGRGVQSFNRLVPVEDTNRYANFIVEEECENRNYETCKANPKKEVVGKDERQTVSTRDYTGPNRFLADPLSYESRSWLFRPGFRFENKRHYIGGILEHTQQTFDTRDMTVPAFLTKAVFDENRKYGPIRGNGKYAGNHKYGGLFTNGENGALVGAEYGTGVFYDETHTKSRYGLEYVYTNADKDTWADYARLSYDRQGIGLDNHFQQTHCSADGSDKNCRPSADKPFSYYKSDRVIYGESHRLLQAAFKKSFDTAKIRHNLSVNLGFDRFGSNLRHQDYYFQNAKRAYSLKTPPQSGKNSPNGDKSKPYWVSIGGGNVVTEQICRLGNNTYTDCTPRSINGKSYYAAVRDNVRLGRWADVGAGLRYDYRSTHSDDSSVSTGTHRTLSWNAGIVLKPADWLDLTYRTSTGFRLPSFAEMYGWRAGVQSKAVKIDPEKSFNKEAGIVFKGDFGNLEASWFNNAYRDLIVRGYEAQIQNGKETAKGDPAYLNAQSARITGINVLGKIDWNGVWDKLPEGWYSTFAYNRVHVRDIKKRADRTDIQSHLFDAIQPSRYVVGLGYDQPEGKWGVNGMLTYSKAKEITELLGSRALLNGNSRNTKATARRTRPWYIVDVSGYYTIKKHFTLRAGVYNLLNYRYVTWENVRQTAGGAVNQHKNVGVYNRYAAPGRNYTFSLEMKF

SEQ ID NO: 2320 - protein, 388 aa, Neisseria meningitidis
MRKFNLTALSVMLALGLTACQPPEAEKAAPAASGETQSANEGGSVSIAVNDNACEPMELTVPSGQVVFNIKNNSGRKLEWEILKGVMVVDERENIAPGLSDKMTVTLLPGEYEMTCGLLTNPRGKLVVTDSGFKDTANEADLEKLSQPLADYKAYVQGEVKELVAKTKTFTEAVKAGDIEKAKSLFADTRIHYERIEPIAELFSELDPVIDAREDDFKDGAKDAGFTGFHRIEYALWVEKDVSGVKEIAAKLMTDVEALQKEIDALAFPPGKVVGGASELIEEVAGSKISGEEDRYSHTDLSDFQANVDGSKKIVDLFRPLIEAKNKALLEKTDTNFKQVNEILAKYRTKDGFETYDKLGEADRKALQASINALAEDLAQLRGILGLK

SEQ ID NO: 2321 - protein, 52 aa, Neisseria meningitidis
VVEQSFGTLHRKFRYARAAYFGLIKVSAQSHLKAMCLNLLKATNRLSAPVGT

SEQ ID NO: 2322 - protein, 256 aa, Neisseria meningitidis
MTTTEHDNDDELLLRYSRHILLDEIGIEGQQKLSAAHILVVGCGGLGAAALPYLAASGIGTLTIADSDTVELHNLQRQVAFDEGDVGKLKTEALADRLKRINHTVNVRAVNEKLDGCRLTGLVQAADIVLDCCDNYATRQAVNRACVQTKTPLVSGAAVRFEGQLAVYRPDLPDSPCYACLFDGGSASDGICSLFGVFSPLVGIIGSTQAAEALKILLDAGEPSHGRLAVYRALEGGWQYFDLPRNPECPVCGAER

SEQ ID NO: 2323 - protein, 149 aa, Neisseria meningitidis
MDVQLPIEAKDIQKLIPHRYPFLQLDRITAFEPMKTLTAIKNVTINEPQFQGHFPDLPVMPGVLIIEAMAQACGTLAILSEGGRKENEFFFFAGIDEARFKRQVIPGDQLVFEVELLTSRRGIGKFNAVAKVDGQVAVEAIIMCAKRVV

SEQ ID NO: 2324 - protein, 944 aa, Neisseria meningitidis
MNKKHGFQLTLTALAIATAFPAYAAQAGGATPDAAQTQSLKEVTVRATKVGRRTKEVTGLGKIVKTSETLNKEQVLGIRDLTRYDPGVAVVEQGNGASGGYSIRGVDKNRVAVSVDGVAQIQAFTVQGSLSGYGGRGGSGAINEIEYENISTVEIDKGAGSSDHGSGALGGAVAFRTKEAADLISDGKSWGIQAKTAYGSKNRQFMKSLGAGFSKDGWEGLLIRTERQGRETRPHGDIADGVEYGIDRLDAFRQTYDIQKQNKKAEYFLAEGESEPKPVAKLAGNGNYLKNQLNRWVEERKKNNQPLSAEEEAMVREAQARHENLSAQSYTGGGRILPDPMDYRSGSWLAKLGYRFGSRHYVGGVFEDTKQRYDIRDMTEKQYYGTDEAKKFSNKSGVYDGNDFRDGLYFVPNIEEWKGDTNLVKGIGLKYSRTKFIDEHHRRRRMGLLYRYENEKYSDNWADKAVLSFDKQGVATDNNTLKLNCAVYPAVDKSCRASADKPYSYDSSDRFHYREQHNVLNALFEKSLKNKWTKHHLTLGFGYDASNAISRPEQLSHNAARISESTGFDEKNQDKYRLGKPEVVEGSVCGYIETLRSRKCVPRKINGSNIHISLNDRFSIGKYFDFSLGGRYDRKNFTTSEELVRSGRYVDRSWNSGIVFKPNRHFSLSYRASSGFRTPSFQELFGIDIYHDYPKGWQRPALKSEKAANREIGLQWKGDFGFLEISSFRNRYTDMIAVADHKTKLPNQAGQLTEIDIRDYYNAQNMSLQGVNILGKIDWNGVYGKLPEGLYTTLAYNRIKPKSVSNRPDLSLRSYALDAVQPSRYVLGFGYDQPEGKWGANIMLTYSKGKNPDELAYLAGDQKRYSTKRASSSWSTADVSAYLNLKKRLTLRAAIYNIGNYRYVTWESLRQTAESTANRHGGDSNYGRYAAPGRNFSLALEMKF

SEQ ID NO: 2325 - protein, 220 aa, Neisseria meningitidis
MDMLEILFRHQDFVAINKPGGISVHQDSGETGLARTLAIQLGVERVWLLHRLDKQTSGILLFALNKESASALSGQFAGKSIKKTYLALSDRKPSKKQGWIKGGMEKSRCGMWKLTRNTENIAVTRFHSISIAEKLRLFILEPHTGKTHQLRVAMKSLGSPILGDSLYGGTESETMFLYAWKIQFDYQNRQIEIVAPLKNEWQTENIHRALEEFCMENKID

SEQ ID NO: 2326 - protein, 463 aa, Neisseria meningitidis; identical to SEQ ID NO: 736

SEQ ID NO: 2327 - protein, 608 aa, Neisseria meningitidis
LGISRKISLILSILAVCLPMHAHASDLANDSFIRQVLDRQHFEPDGKYHLFGSRGELAERSGHIGLGKIQSHQLGNLMIQQAAIKGNIGYIVRFSDHGHEVHSPFDNHASHSDSDEAGSPVDGFSLYRIHWDGYEHHPADGYDGPQGGGYPAPKGARDIYSYDIKGVAQNIRLNLTDNRSTGQRLADRFHNAGSMLTQGVGDGFKRATRYSPELDRSGNAAEAFNGTADIVKNIIGAAGEIVGAGDAVQGISEGSNIAVMHGLGLLSTENKMARINDLADMAQLKDYAAAAIRDWAVQNPNAAQGIEAVSNIFMAAIPIKGIGAVRGKYGLGGITAHPIKRSQMGAIALPKGKSAVSDNFADAAYAKYPSPYHSRNIRSNLEQRYGKENITSSTVPPSNGKNVKLADQRHPKTGVPFDGKGFPNFEKHVKYDTKLDIQELSGGGIPKAKPVSDAKPRWEVDRKLNKLTTREQVEKNVQEIRNGNKNSNFSQHAQLEREINKLKSADEINFADGMGKFTDSMNDKAFSRLVKSVKENGFTNPVVEYVEINGKAYIVRGNNRVFAAEYLGRIHELKFKKVDFPVPNTSWKNPTDVLNESGNVKRPRYRSK

SEQ ID NO: 2328 - protein, 399 aa, Neisseria meningitidis
MSDQLILVLNCGSSSLKGAVIDRKSGSVVLSCLGERLTTPEAVITFNKDGNKRQVPLSGRNCHAGAVGMLLNELEKHGLHDRIKAIGHRIAHGGEKYSESVLIDQAVMDELNACIPLAPLHNPANISGILAAQEHFPGLPNVGVMDTSFHQTMPERAYTYAVPRELRKKYAFRRYGFHGTSMRYVAPEAARILGKPLEDIRMIIAHLGNGASITAIKNGKSVDTSMGFTPIEGLVMGTRCGDIDPGVYSYLTSHAGMDVAQVDEMLNKKSGLLGISELSNDCRTLEIAADEGHEGARLALEVMTYRLAKYIASMAVGCGGVDALVFTGGIGENSRNIRAKTVSYLDFLGLHIDTKANMEKRYGNSGIISPTDSSPAVLVVPTNEELMIACDTAELAGIL

SEQ ID NO: 2329 - protein, 92 aa, Neisseria meningitidis
LFKQFVSENRPQLDIEEVATGEHWFGRQALALNLIDEISTSDDLLLKAFENKQVIEVKYQEKQSLIQRIGLQAEASVEKLFAKLVNRRADVM

SEQ ID NO: 2330 - protein, 149 aa, Neisseria meningitidis
MSIYALAHIVHLYCAIAFVGGVFFEVLVLSVLHTGRVSCEARREVEKAMSYRAVRVMPFVVGLLFASGVVMAANRYLPILGEPFATSFGTMLTLKILLAFSVLAHFAIAVVKMARSTLTVGWSKYIHAVVFTHMLLIVFLAKAMFYISW

SEQ ID NO: 2331 - protein, 205 aa, Neisseria meningitidis
MPYTEDMRPGDTANPYGASKAMVERMLTDIQKADPRWSVILLRYFNPIGAHESGLIGEQPNGIPNNLLPYICQVAAGKLPQLAVFGDDYPTPDGTGMRDYIHVMDLAEGHIAAMKAKSNVAGTHLLNLGSGRASSVLEIIRAFEAASGLNIPYQIQPRRAGDLACSFADPSHTKQETGWETKRSLAQMMEDSWRWVSRNPNGYGD

SEQ ID NO: 2332 - protein, 313 aa, Neisseria meningitidis
MKILLLLIPLVLTACGTLTGIPAHGGGKRFAVEQELVAASSRAAVKEMDLSALKGRKAALYVSVMGDQGSGNISGGRYSIDALIRGGYHNNPESATRYSYPAYDTTATTKSDALSSVTTSTSLLNAPAAALTRNSGRKGERSAGLSVNGMGDYRNETLLANPRDVSFLTNLIQTVFYLRGIEVVPPEYADTDVFVTVDVFGTVRSRTELHLYNAETLKAQTKLEYFAVDRDSRKLLIAPKTAAYESQYQEQYALWMGPYSVGKTVKASDRLMVDFSDITPYGDTTAQNRPDFKQNNGKNPDVGNEVIRRRKGG

SEQ ID NO: 2333 - protein, 313 aa, Neisseria meningitidis
MEYNAIMKTIAPSHIKPLMPELNQSQRNRIIFIDFYLCFLGKINRKDLMQAFQISPAVATRDFALYCSSFSKNLRFDTKSKFYLSTEDFEPQFPHSFENAIKILNGSLIFDIDSQHQPLLPFDLPPVLINPDVLIFSKISKALSLKKPLKISYHSISSGLSEKVIVPLALVNDGFRWHLRAFDRTKNRFADFVLTRIIQANILLAENIEENETINNDIDWNRIVKIELVPHPNHDEAKKVIEMDFGMTNGKLELALRASNIGYVLQQWRVDCSSDHHIDDPAFRLWLLDNLVLYGINNAEHLAPAFDKKRSKP

SEQ ID NO: 2334 - protein, 391 aa, Neisseria meningitidis
MLNTSLSPWPCFTQEEADAVSKVLLSNKVNYWTGSECRKFEKEFAAFAGTRYAVALSNGTLALDVALKAIGIGAGNDVIVTSRTFLASASCIVNAGANPVFADVDLNSQNISAETIKAALTSNTKAIIVVHLAGMPAEMDGIMDLAKEHDLWVIEDCAQAHGAKYKGKSVGSIGHVGAWSFCQDKIMTTGGEGGMVTTNDKTLWEKMWSYKDHGKSYDAVYHREHAPGFRWLHESFGTNWRMMEMQAAIGRIQLKRLPEWTACRQAHAAKLAESLGKFKSIRLVEVADYIGHAQYKFYAFVKPEHLKDGWTRDRIVSELNARKVPCYQGSCSEVYLEKSFDDTPWRPKERLKNAVELGDTSLMFLVHPTLTDDEIAFCKEHIEAVLAEATR

SEQ ID NO: 2335 - protein, 329 aa, Neisseria meningitidis
MKQPVFAVTSGEPAGIGPDICLDLAFARLPCRCAVLGDKHLLRARAEALGKSVVLRDFDPESGGAAYGELEVLHIPAVEAVEAGKLNPANAAYVLQLLDTALAGISDGIFDGIVTAPLHKGIINDARASTGFFSGHTEYLAEKSGTGQVVMMLAGKGLRVALVTTHLPLKDVAAAITQPLIESVARILHHDLKHKFCIKNPKILVAGLNPHAGEGGHLGHEETDTIIPALENLRREGINLAGPYPADTLFQPFMLEGADAVLAMYHDQGLPVLKYHSFGQGVNITLGLPFIRTSVDHGTALDLAATGRADSGSLITAVETAVEMARGSL

SEQ ID NO: 2336 - protein, 331 aa, Neisseria meningitidis
VNLKNRHFLKLLDFTPEEITAYLDLAAELKAAKKAGREIQRMKGKNIALIFEKTSTRTRCAFEVAARDQGAGVTYLEPSASQIGHKESIKDTARVLGRMYDGIEYRGFAQETVEELTKYAGVPVFNGLTNEFHPTQMLADALTMREHSGKPLNQTAFAYVGDARYNMGNSLLILGAKLGMDVRIGAPQSLWPSEGIIAAAHAAAKETGAKITLTENAHEAVKNVDFIHTDVWVSMGEPKEVWQERIDLLKDYRVTPELMAASGNPQVKFMHCLPAFHNRETKVGEWIYETFGLNGVEVTEEVFESPASIVFDQAENRMHTIKAVMVAALGD

SEQ ID NO: 2337 - protein, 374 aa, Neisseria meningitidis
MTATTASSTKPYLQIQGLVKKFGDNYAVDNIDLDIYQHEIFALLGSSGSGKSTLLRMLAGMESPNQGKIILDGQDITKLAPYDRPINMMFQSYALFPHMTVEQNIAFGLKQDKMPKGEIAARVEEMLRLVQMTKFAKRKPHQLSGGQQQRIALARSLAKRPKILLLDEPLGALDKKLRQQTQLELVNTLEQVGVTCIMVTHDQEEAMTMATRIAIMSDGQLQQVGTPSDVYDYPNSRFTAEFIGETNIFDGVVIEDHADYAVIECEGLENHVRIDHGLGGPSEQDLWVSIRPEDIDLYKEKPEYLGDYNWAKGTVKEIAYLGSFAIYHIKLGNGRVVKSQVPAPYWYVRNITPPTWDETVYISWPENQPTPLFR

SEQ ID NO: 2338 - protein, 82 aa, Neisseria meningitidis
MFQANIHQAKTNLSQLIQRAEAGEIVIIAKAGKPCVQLIGIEKPARNAGRLKKFSHMENTDISRILEDDNETAALFFEESAL

SEQ ID NO: 2339 - protein, 371 aa, Neisseria meningitidis
MKIVIAPDSFKESLTAQQVAEAIKRGFQQSIADVECLLCPVGDGGEGTVDAIRHSLDLEEKCLQVTGPFGQKEVMRYFQKEQLALFEVADLVGLGKIPLEKRNPLQIQTRGIGELIRHLISQEIKEIYIGVGGTASNDGGIGIAAGLGYQFYDEDGNALPACGQSLLNLASVSTENRYKIPEDVHIRILADVVSPLCGHQGATYTFGKQKGLDSTMFEAVDQAIQDFYEKVSPATLKLKGAGAGGGIAGGLCAFAQASIVSGIDTCLDLIDFDKKVSDVDLVIVGEGRLDRQSLAGKAPIGVAKRTPVGVPVVAICGSLVEDLPSLPFENIQAAFSILEKSEPLEDSLKNASLYLEHTASNIGHLLNMPKI

SEQ ID NO: 2340 - protein, 43 aa, Neisseria meningitidis
MQNQNTRPVKIELKGEAGKRVLLAAARRIAKTHQKAVKALADK

SEQ ID NO: 2341 - protein, 98 aa, Neisseria meningitidis
MFRILLLLFPCAILAACTRNIPANPTVSNCAHLQNRTILYFDAHGKPADGAVKGGFYKIIEIQGANCILIQDFNSTGNALGGSYVPDCRKSSLFPKNI

SEQ ID NO: 2342 - protein, 642 aa, Neisseria meningitidis
MSRNQNHEEYQDDARPLTIEEQRARLRQLIIMGKERGYITYSEINDALPDDMSDADQIDNIVSMISGLGIQVTEHAPDAEDILLSDNAAVTDDDAVEEAEAALSSADSEFGRTTDPVRMYMREMGQVDLLTREDEIIIAKKIENALKNMVQAISACPGSIAEILELIEKIRKDEIRVDEVVEAIIDPNEVLLNELGLGHLETTAPEKPSNDNSDENEDDEESEEDADEISAANLAELKQKVIGHFAQIEKDYKKMIGRLEKHHSRHKDYLAYRDAIANKLLEVRFATRQIDSLSSSLRGKVENIRKLEREIRDICLDRVHMERDYFIQNFLPEITNLEWIEEEIAKGRVWSDALDRFRHAILEKQTELADMEKETRISIEELKEINKNMVSSEKETAAAKQEMIQANLRLVISIAKKYTNRGLQFLDLIQEGNIGLMKAVDKFEYRRGYKFSTYATWWIRQAITRSIADQARTIRIPVHMIETINKMNRISRQHLQETGEEPDSAKLAELMQMPEDKIRKIMKIAKEPISMETPIGDDDDSHLGDFIEDANNVAPADAAMYTSLHEVTKEILESLTPREAKVLRMRFGIDMNTDHTLEEVGRQFDVTRERIRQIEAKALRKLRHPTRSDRLRSFLDSEDSKL

SEQ ID NO: 2343 - protein, 924 aa, Neisseria meningitidis
MANNKTLFDWVEDRKSTLEEIEQTDFFALPEFVERNLKYPFFEWQKSALENFVIFDRASKLKDFPDIKNRPTHLLFNMATGAGKTMMMAALILYYFEKGYRHFLFFVNQNNIVDKTENNFIDPAHAKFLFTEKILQGDTVIPIRKVEMFSPHSDGIEIKFTSIQKLYNDIHTERENQTTLADLHKLNLVMLGDEAHHLNAQTKGKKQDELDLEVELKANAGNAEIERKGWEHMVLELLLNKNGNPGQNVLLEFTATLPENADVQQKYADKIITKFGLKEFLQKGYTKEINLVSSTLNKKERVLHALLFAWYRHQIALKYGIANFKPVMLFRSKTIDESKADYSAFLNWAENVQADDFEFLDTFSGSLNNSDNANEQGKTRTEQALKFMQENGFEFAHLANWVKQNYQKHNVIITNSETNKNKTEKTDSETEKLLNNLEAADNPIRAIFTVDRLTEGWDVLNLFDIVRLYEGQNGGGSNKKSGKTAAATVSEKQLIGRGVRYFPFAFEGKQPNKRKFDNDMQHELRILEELFYYTHDEQSRYISELKNELRKDGYLPEKDDDKVLATFKLKSEFADNKDFRELLIWANKKIPNPNAKSNNADSLQANPQTLSFQIHGNQLLQETQFTADENDETARQIGTQNNFTQTIKMSEMERHIFNKALHIKGKNSQSLFHFDRLQSKLNIQNRNELQNNLLKDWQIEFLGLGQDKQVRPDDKLAGCLKILEMVEKHLNESDMPFIGTKEFTPKKLWEIFGTPKQKWVKKDDVKTTIATQNDWYVMDNFAGTGLEEALIQFISARLGDLKSKYDVHLIRNEEVFKLNNFADGEGFMPDFILLLKDKQKSSSNGVNDFLHYQIFIEPKGEHLVETDGWKEEFLEAITVEYGMDKILQKDTPHYRLIGLPFFTDHQKNGQFTESFPLGAASLEK

SEQ ID NO: 2344 - protein, 604 aa, Neisseria meningitidis
MSEHDMQNTNPPLPPLPPEITQLLSGLDAAQWAWLSGYAWAKAGNGASAGLPALQTALPTAEPFSVTVLSASQTGNAKSVADKAADSLEAAGIQVSRAELKDYKAKNIAGERRLLLVTSTQGEGEPPEEAVVLHKLLNGKKAPKLDKLQFAVLGLGDSSYPNFCRAGKDFDKRFEELGAKRLLERVDADLDFAAAANAWTDNIAALLKEEAAKNRATPAPQATPPAGLQTASEGRYCKADPFPAALLANQKITARQSDKDVRHIEIDLSGSDLHYLPGDALGVWFDNDPALVREILDLLGIDPATEIQAGGKTLPVASALLSHFELTQNTPAFVKGYAPFADDDELDRIAADNAVLQGFVQSTPIADVLHRFPAKLTAEQFAGLLRPLAPRLYSISSSQAEVGDEVHLTVGAVRFEHEGRARAGGASGFLADRLEEDGTVRVFVERNDGFRLPEDSRKPIVMIGSGTGVAPFRAFVQQRAAENAEGKNWLIFGNPHFARDFLYQTEWQQFAKDGFLHRYDFAWSRDQEEKIYVQDKIREQAEGLWQWLQEGAHIYVCGDAAKMAKDVEAALLDVIIGAGHLDEEGAEEYLDMLREEKRYQRDVY

SEQ ID NO: 2345 - protein, 232 aa, Neisseria meningitidis
MKSRHLALGVAALFALAACDSKVQTSVPADSAPAASAAAAPAGLVEGQNYTVLANPIPQQQAGKVEVLEFFGYFCPHCAHLEPVLSKHAKSFKDDMYLRTEHVVWQKEMLTLARLAAAVDMAAADSKDVANSHIFDAMVNQKIKLQNPEVLKKWLGEQTAFDGKKVLAAYESPESQARADKMQELTETFQIDGTPTVIVGGKYKVEFADWESGMNTIDLLADKVREEQKAAQ

SEQ ID NO: 2346 - protein, 650 aa, Neisseria meningitidis
MRFAVALLSLLGIASVIGTVLQQNQPQTDYLVKFGPFWAQIFGFLGLYDVYASAWFVVIMMFLVVSTSLCLIRNVPPFWREMKSFREKVKEKSLAAMRHSSLLDVKIAPEVAKRYLEVQGFQGKTVSREGGSVLIAAKKGTMNKWGYIFAHVALIVICLGGLIDSNLLLKLGMLTGRIVPDNQAVYAKDFKPESILSASNLSFRGNVNISEGQSADVVFLNADNGILVQDLPFEVKLKKFHIDFYNTGMPRDFASDIEVTDKATGEKLERTIRVNHPLTLHGITIYQASFADGGSDLTFKAWNLGDASREPVVLKATSIHQFPLEIGKHKYRLEFDQFTSMNVEDMSEGAEREKSLKSTLNDVRAVTQEGKKYTNIGPSIVYRIRDAAGQAVEYKNYMLPVLQEQDYFWITGTRSGLQQQYRWLRIPLDKQLKADTFMALREFLKDGEGRKRLVADATKDAPAEIREQFMLAAENTLNIFAQKGYLGLDEFITSNIPKEQQDKMQGYFYEMLYGVMNAALDETIRRYGLPEWQQDEARNRFLLHSMDAYTGLTEYPAPMLLQLDGFSEVRSSGLQMTRSPGALLVYLGSVLLVLGTVLMFYVREKRAWVLFSDGKIRFAMSSARSERDLQKEFPKHVESLQRLGKDLNHD

SEQ ID NO: 2347 - protein, 122 aa, Neisseria meningitidis
MNPKTLSRLSLCAAVLALTACGGNGQKSLYYYGGYPDTVYEGLKNDDTSLGKQTEKMEKYFVEAGNKKMNAAPGAHAHLGLLLSRSGDKEGAFRQFEEEKRLFPESGVFMDFLMKTGKGGKR

SEQ ID NO: 2348 - protein, 313 aa, Neisseria meningitidis
  misc_feature 2, 3: 'Xaa' is any amino acid
VXXLLLLIPLVLTACGTLTGIPAHGGGKRFAVEQELVAASSRAAVKEMDLSALKGRKAALYVSVMGDQGSGNISGGRYSIDALIRGGYHNNPESATQYSYPAYDTTATTKSDALSSVTTSTSLLNAPAAALTRNSGRKGERSAGLSVNGMGDYRNETLLANPRDVSFLTNLIQTVFYLRGIEVVPPEYADTDVFVTVDVFGTVRSRTELHLYNAETLKAQTKLEYFAVDRDSRKLLIAPKTAAYESQYQEQYALWMGPYSVGKTVKASDRLMVDFSDITPYGDTTAQNRPDFKQNNGKNPDVGNEVIRRRKGG

SEQ ID NO: 2349 - protein, 522 aa, Neisseria meningitidis; identical to SEQ ID NO: 968

SEQ ID NO: 2350 - protein, 56 aa, Neisseria meningitidis; identical to SEQ ID NO: 326

SEQ ID NO: 2351 - protein, 449 aa, Neisseria meningitidis; identical to SEQ ID NO: 481

SEQ ID NO: 2352 - protein, 155 aa, Neisseria meningitidis; identical to SEQ ID NO: 1336

SEQ ID NO: 2353 - protein, 151 aa, Neisseria meningitidis; identical to SEQ ID NO: 2203

SEQ ID NO: 2354 - protein, 65 aa, Neisseria meningitidis
MNTVPKSRIPVKPLPEKTTDEAKVEKWRQLGAEHGLSGEWAVAARLGENGFTEEQMENIANLFGR

SEQ ID NO: 2355 - protein, 92 aa, Neisseria meningitidis; identical to SEQ ID NO: 32

SEQ ID NO: 2356 - protein, 469 aa, Neisseria meningitidis
MKYISTRGETAHKPFSEVLLMGLAPDGGLMLPEHYPQIGRETLDKWRGLAYPELAFEIMRLFVTDIPEDDLRDILNRTYTEAAFGTKEITPVRTLSDGIKIQALSNGPTLAFKDMAMQFLGNAFEYVLNKEGKKLNILGATSGDTGSAAEYALRGKKGVNVFMLSPDGKMSAFQRAQMYSLQDENIHNIAVKGMFDDCQDIVKAVQNDAAFKEKYHIGTVNSINWGRIVAQVVYYFAGYFKATQSNDEQVSFCVPSGNFGNVCAGHIAKQMGLPVRRLIVATNENDVLDEFFKTGAYRPRNSAHTYVTSSPSMDISKASNFERFVFDLMDRDPQEINTLWAEVAAGKGFDLRFALDKVGGKYGFTSGKSTHADRLATIKQVYGQDQELIDPHTADGVKVAREVREEGETVVCLETALAAKFDATIREAVGDAAIPRPAALEGLETLPQRVQTVPNSADAVKGIIEQTLA

SEQ ID NO: 2357 - protein, 201 aa, Neisseria meningitidis
MTIYFKNGFYDDTLGSIPEGAVAVRAEEYAALLAGQTQGGQIAADSDGRPVLTPPRPSEYHEWDGKKWEIGEAAAAARFAEQKTATAFRLAAKADELKNSLLAGYPQVEIDSFYRQEKEALARQADNNAPTPMLAQIAAARGVELDVLIEKVVEKSARLAVAAGAIIGKRQQLEDKLNTIETAPGLDALEKEIEEWTLNIG

SEQ ID NO: 2358 - protein, 160 aa, Neisseria meningitidis; identical to SEQ ID NO: 182

SEQ ID NO: 2359 - protein, 185 aa, Neisseria meningitidis
MDALKLLTNRRSSKKLKHPAPDAAELEQIFQAATQVPDHGNMRPFRFIVIQGEVGLQRFRDVLKQTVAELNFGDDAMKKAEKVGNMAPMVIGVTFAPNRDVPKPKPEWEQMLTAGCAAYALQLAATAQGFDNVWITGMWVNSPLLREAFGCADKDKIIGLMMVGTPTEEVHKPKNTDLEAFVSHW

SEQ ID NO: 2360 - protein, 168 aa, Neisseria meningitidis
MDFFNFFEQGYFKKLAVENGLNTEYFIFQFIVCNLFSIFVIILMNFIKNYAVLIVLIVIVSILFGLILKNKTMSLIKNKEKFLCGLFPLDVPIFKYTMPSYFKLINKNMRWLFHMNVFCLFFICFSIYLINKGENQYIAYFSCYFFGLTYPLINYLILLHREYKRIQF

SEQ ID NO: 2361 - protein, 121 aa, Neisseria meningitidis; identical to SEQ ID NO: 1865

SEQ ID NO: 2362 - protein, 558 aa, Neisseria meningitidis
MSFKTDAEIAQSSTMRPIGEIAAKLGLNADNIEPYGHYKAKINPAEAFKLPQKQGRLILVTAINPTPAGEGKTTVTIGLADALRHIGKDAVIALREPSLGPVFGVKGGAAGGGYAQVLPMEDINLHFTGDFHAIGAANNLLAAMLDNHIYQGNELDIDPKRVLWRRVVDMNDRQLRNIIDGMGKPVDGVMRPDGFDITVASEVMAVFCLAKDISDLKERLGNILVAYAKDGSPVYAKDLKAHGAMAVLLKDAIKPNLVQTIEGTPAFVHGGPFANIAHGCNSVTATRLAKHLADYAVTEAGFGADLGAEKFCDIKCRLAGLKPDAAVVVATVRALKYNGGVERANLGEENLEALAKGLPNLLKHISNLKNLFGLPVVVALNRFVSDSDAELAMIEKACAEHGVEVSLTEVWGKGGVGGADLARKVVNAIENQPNNFNFSYDVELSIKDKIRAIAQKVYGAEDVDFSAEASAEIASLEKLGLDKMPICMAKTQYSLSDNAKLLGCPEGFRITVRGITVSSGAGFIVALCGNMMKMPGLPKVPAAEKIDVDEHGVIHGLF

SEQ ID NO: 2363 - protein, 416 aa, Neisseria meningitidis
MFVPLAMLAGMFSYYETFHETEALQDDLLRQAALYVAPDSKPETLPEGDGDTRILVQMPQQEDPVVSLPAHLADGLHTLQADGDDDYYRVYIRTTEQGRIAVMQENEYREDLAADAARQSVLPLLAALPLMILLTVWITHKAMRPVRKLSQSLEQRRINDLSALSVDNIPSEIRGFVTAINLLLKRADEDIRHRQRFVADAAHELRTPMTALSLQAERLNNMSLPPDAARQSAVLQQSIRRNKHLLEQLLALARSQSDETPLAKTTFGLQSRFRQVLQELMPLALEKRQDIGVAVGGDVEIFADETEIYTLVKTFVDNAIRYTPSEGRIDLGFTDEGKYLAVWVEDNGNGIPESERARVLDPFYRILGTEQQGMGLGLSIADTLAKKYGGHLELTDSRRFGHGLLIRALLDKETLK

SEQ ID NO: 2364 - protein, 470 aa, Neisseria meningitidis
VKILILGNGQVGSTVAQNLAAIPNNDVTVIDIDEKALQETGSRLDVQTVFGNGASPFTLERAGAEDADLLLALSRSDETNIVACKVAADLFNIPGRIARVRSSEYLEYLSPKLENNENGSLSIFGITETISPEQLVTEQLAGLIDCPGALQVLRFADDRVRMVIIQARRGGLLVGRSIADIAQDLPDGADCQICAVYRNNRLIVPAPQTVIIEGDEILFAAAAENIGAVIPELRPKETSTRRIMIAGGGNIGYRLAKQLEHAYNVKIIECRPRRAEWIAENLDNTLVLQGSATDETLLDNEYIDEIDVFCALTNDDESNIMSALLAKNLGAKRVIGIVNRSSYVDLLEGNKIDIVVSPHLITIGSILAHIRRGDIVAVHPIRRGTAEAIEVVAHGDKKTSAIIGRRISGIKWPEGCHIAAVVRAGTGETIMGHHTETVIQDGDHIIFFVSRRRILNELEKLIQVKMGFFG

SEQ ID NO: 2365 - protein, 146 aa, Neisseria meningitidis
MNIRRASPSDCAALAALDAVCNPSAWTQRQFESALVSPSEQVFLAEKDGGIAAFIVWQNLPDESELHLIATAPECRRRGVASALLEYWFAHLPEDTQRLLLEVRAGNTAAQALYAAHGFTDAGRRKNYYRTADGKTEDAVLMEKIC

SEQ ID NO: 2366 - protein, 449 aa, Neisseria meningitidis
MKLSVMSPEHSAQLQAFEAKILSNHAKIEAWFRTQWSVHRPPFYGSVDIRNAGYKISSIDMNLFPGGFNNLNPNFIPLAAVAAQDAVQRACETAKSVLIIPENHTRNTFYLQNVYALGEILCSAGYEVRLGSLNPEVTEPTEFETALGDKILLEPLLRTRDRVHLADGFSPCVVLLNNDLSAGIPDILKGISQTVLPPLHGGWTTRRKTNHFGAYNQVAAEFAKLIGIDEWQINPYFEKIGGLDFQGREGEDALAEAVECVLAKIQAKYDESGITDKPFVIVKADAGTYGMGVMSVKSADEVRGLNRKNRNKMAKVKEGLEVSEVIVQEGIYTYETLNSAVCEPVVYMMDRFVIGGFFRVHEGRGADENLNAGGMVFVPLSNSIPTGNGDNSQEAPEACKRVFEQWDSLGMPRSEKDCDVDNEHNRLYVYGVMARLSLLAASIELEETA

SEQ ID NO: 2367 - protein, 376 aa, Neisseria meningitidis
MIKISTRFDAGSVVVKDLTDPSNIRLALRPDNASDFAQWFYFRLQGAAYQNCIMHFDNAAEAAYPKGWEGYQACASYDRRNWFRVPTSYENGVLTVNHTPLSNSVYYAYFEPYSEEQHLNLLGDAQGSGLCRIDDLGSTVQGRDINLLTIGNQVESDLKIWITARQHPGETMAEWFVEGLLGRLLDPQDPTARTLLDRATFYIVPNMNPDGSALGNLRTNAAGANLNREWENPTLEKSPEVFFVRERMLETGVDLFLDIHGDEGLPFVFVAGTEGVPNYNPRISALETQFKTALLNASPDFQDEYGYEKDAPGEANMTLATNWVGNRFNCLAYTLEMPFKDNANLPDDDFGWNGQRSLRLGEAALSAILNVIGDLR

SEQ ID NO: 2368 - protein, 525 aa, Neisseria meningitidis; identical to SEQ ID NO: 1967

SEQ ID NO: 2369 - protein, 231 aa, Neisseria meningitidis
MSELILKCEGVGKRYRDGGLDVRVLHGLDLEIRAGESTGIIGSSGSGKSTLLHILGGLDMPSEGRLLLMGEDLRTLSQRQLGILRNRHLGFVYQFHHLLPEFSALENVMMPLLIGKKSREEAAETAMAMLEKVGLKHRSTHRAGELSGGERQRAAIARALVTQPKCLLADEPTGNLDRANARNVLDMMLELKTELGTGLVVVTHDDELAGRFERVMVMKDGSLHPKQGANA

SEQ ID NO: 2370 - protein, 368 aa, Neisseria meningitidis
MSLYPIYNFSAGPAVLPEAVLETARQEMLDYNGTGFPVMAMSHRSEMFLSILHHAEQDLRQLLKVPDNYKILFLQGGATTQFNMAAMNLAHGFRTADAVVTGNWSRIAYEQMSRLTDTEIRLAAHGGEQFDYLDLPPVETWDVAPDSAFVHFAVNETVNGLQYREVPRLSEGMPPLVCDMSSEILSREFDVSDYGLIYAGAQKNIGPAGVTVVIVREDLLERCPNDIPDVFNYRSHLNRDGMYNTPSTYAIYMSGLVFRWLQAQGGVKKIEAVNRLKAQTLYETIDGSDGFYINRIRPNARSKMNVVFQTGDEELDRRFVLEAELQGLCLLKGYKTVGGMRASIYNAMPLEGVRALADFMRDFQRRYG

SEQ ID NO: 2371 - protein, 351 aa, Neisseria meningitidis
MITLAVDAMGGDQGLAVTVPGATAFLQAHPDVRLIMTGDETQLRQALTAAGAPMERIDICHTTQVVGMDESPQSALKNKKDSSMRVAINQVKEGKAQAAVSAGNTGALMATARFVLKTIPGIERPAIAKFLPSDTDHVTLALDLGANVDCTPEQLAQFAVIGSELVHALHPQKGQPRVGLVNVGTEDIKGTDTVKQTYKLLQNSKLNFIGNIESNGILYGEADVVVADGFVGNVMLKTIEGAVKFMSGAIRREFQSNLFNKLAAVAALPALKGLKNKLDPRKFNGAILLGLRGIVIKSHGGTDETGFRYALEEAYHEAKSAGLSKIEQGVAEQLAALETAKAVQNENADGL

SEQ ID NO: 2372 - protein, 127 aa, Neisseria meningitidis; identical to SEQ ID NO: 1080

SEQ ID NO: 2373 - protein, 122 aa, Neisseria meningitidis
LNNIPVEIRLLKNRTVLVLTYGDEPKNLPAEFLRVYSPSAEVRGHGVGQDVLQTGKADVQITDLQPVGQYALKISFSDGHDSGLYDWAYLHRLAYGYDAMWQEYLDKLAAAGASRFEKQSDC

SEQ ID NO: 2374 - protein, 277 aa, Neisseria meningitidis
  misc_feature 3, 4: 'Xaa' is any amino acid
VCXXTPAVVFSVALLHLAMVALLWQAHKLPVIESGNVIEFVDLGDFGGGDGAPEGAGAPAAPEPQPEPEPPKPVEPPKPVLKPVVTKKADADIQQPKEEPKPEEKPKPEEKPKPEPKPEAKPVPKPAEKPVEKPSEKPAEHPSNASAKADSEQGNGEDKGTGTKGDGTGRGEGSGKGSGGVKGEHGEGAGSSKGNPLRANGSIPRPAYPTLSMENDEQGTVVLSVLVSPGGHVESVKIVKSSGFSRLDNAARKAAQNGHFQANAWTEFKVPVKFELN

SEQ ID NO: 2375 - protein, 284 aa, Neisseria meningitidis; identical to SEQ ID NO: 506

SEQ ID NO: 2376 - protein, 225 aa, Neisseria meningitidis; identical to SEQ ID NO: 1002

SEQ ID NO: 2377 - protein, 122 aa, Neisseria meningitidis
MKPLKRHPALIGLSRDHHHSLSLCVRLLRTPEERHRDELEPHFAELETHFREEEAKFAPIWQNVAPELKQRFEKDHARLRQMMASPEYGNAAWNTAFATTLRDHARFEERELFPAAEPFLPA

SEQ ID NO: 2378 - protein, 405 aa, Neisseria meningitidis; identical to SEQ ID NO: 163

SEQ ID NO: 2379 - protein, 212 aa, Neisseria meningitidis
  misc_feature 207, 208: 'Xaa' is any amino acid
MKKYLFRAALYGIAAAILAACQSKSIQTFPQPDTSVINGPDRPVGIPDPAGTTVGGGGAVYTVVPHLSLPHWAAQDFAKSLQSFRLGCANLKNRQGWQDVCAQAFQTPVHSFQAKQFFERYFTPWQVAGNGSLAGTVTGYYEPVLKGDDRRTAQARFPIYGIPDDFISVPLPAGLRSGKALVRIRQTGKNSGTIDNTGGTHTADLSXXHTLN

SEQ ID NO: 2380 - protein, 168 aa, Neisseria meningitidis
MPLLDSFKVDHTRMHAPAVRVAKTMTTPKGDTITVFDLRFCVPNKEILPEKGIHTLEHLFAGFMRDHLNGNGVEIIDISPMGCRTGFYMSLIGTPSEQQVADAWLASMQDVLNVKDQSKIPELNEYQCGTYQMHSLAEAQQIAQNVLARKVAVNKNEELTLDEGLLNA

SEQ ID NO: 2381 - protein, 263 aa, Neisseria meningitidis
MSEHRVNHEPVFLLASSPWRESSLRVEAFSRRYGRVALLARSARKRQSELRGVLVPFVPVSASWYGSQELKTLHRAEWIGGWPQPQGRALFSGLYVNELMLKLTVREDPLPELYDALAEVMEAVCCKAAYIDDLRRFEWRLLNLLGVAPDLNRDGDGGTIAAGGTYLVRPETAVFPVGKGFAVPPHAAGVVAPGQSLIDLREGSFRTAESLQQALKITRLFIRHLLPEGLKSRQVLEQIRQFDRKETARETVPTSDGTASNAV

SEQ ID NO: 2382 - protein, 168 aa, Neisseria meningitidis; identical to SEQ ID NO: 2252
  misc_feature 3, 4: 'Xaa' is any amino acid

SEQ ID NO: 2383 - protein, 149 aa, Neisseria meningitidis
MKIGTPWQTASAMLVLRLFAAYEFLESGLQKWNGENWFSEINDQFPFPFNLLPDALNWNLAMYAELLLPVLLLLGLATRLSALGLMVVTAVAWAAVHAGSGYNVCDNGYKMALIYIVVLIPLLFQGAGGWSLDTLLKKRFCPQCRLKQD

SEQ ID NO: 2384 - protein, 157 aa, Neisseria meningitidis
MTDFSVWETAPFGATVDHILQRYHNVHRAQFEELVPLAQKVAQVHADTFPAEIAGLLAYMQNELLMHMMKEERMLFPMINQGVGRGAAMPIGVMMHEHEEHDRAIARLKELTDNFQPPEGACGSWTRLYALAKEMVEDLNDHIHLENDILFARVLDS

SEQ ID NO: 2385 - protein, 223 aa, Neisseria meningitidis
MMKTFKNIFSAAILSAALPCAYAAGLPQSAVLHYSGSYGIPATMTFERSGNAYKIVSTIKVPLYNIRFESGGTVVGNTLHPTYYRDIRRGKLYAEAKFADGSVTYGKAGESKTEQSPKAMDLFTLAWQLAANDAKLPPGLKITNGKKLYSVGGLNKAGTGKYSIGGVETEVVKYRVRRGDDTVMYFFAPSLNNIPAQIGYTDDGKTYTLKLKSVQINGQSAKP

SEQ ID NO: 2386 - protein, 408 aa, Neisseria meningitidis
MNTDNLHDILDEMVQVYSQKKQSRSETPAEIGAHFHPLLDRLCETAEAQNASDILISKGFPPSLKINSALTPQPQKALTGEETAAIAASTMNAEQSEIFRRDGEINYSVQSRSGTRYRANAYHSQGSAGLVLRRINHVIPQMQELGLPEKLKDLAVAPRGLLIIVGPTGSGKSTTMATMLEHRNKTLPSHIVTIEDPIEFIYKPRRCIFTQREIGVDTINWQTAVQNAMRQSPDVVCIGEVRSRESMEYAMQLAQTGHLCIFTLHANTAPQSLERILNFYPKEQHNQILIDIALNLTGIICQRLALKQDKTGRTAVVDLLINTPAIQDFILKGDLMNISKIMETAKTDGMQTMDQNLFELYRHGIISYEEALRQSVSANNLRLHIQLHKEGKTPELLYDRVNGLNLIS

SEQ ID NO: 2387 - protein, 401 aa, Neisseria meningitidis
MQTLISADNHLLLWAFVMLAAAAAIFIEQNSRLAGKVPGAVLALLIALIASNLGVIPTDAPVFDAVWSYIVPLAIPLLLFQLDLHALFKESGRMLFIFLISSLGTVIGTLVSFALLKNYIPELDKVAGMISASYTGGGVNFAAMSAKLNPAKDVIAATIVADNLMMACYFFILIGISSSYWVRKVWGSPYQDKLEQEYHDPSVNKAAEYWKPKSISLQSIALSLAASILLVAVSFSLSSFLQNHFQSVDGVALKMLTGLISDKYLLLTTFTLAVVLFFRKGIQKLDGSQELGTYCIYLFFVVIGVPASIPLIIKTAPLLFVFTLIIAVLNLLLTLVLGKLFKFSIEEIVLACNANIGGPTTAAALAISKGWRDLVGAILLIGTVGYIIGNYIGSFVYALLS

SEQ ID NO: 2388 - protein, 260 aa, Neisseria meningitidis; identical to SEQ ID NO: 485

SEQ ID NO: 2389 - protein, 127 aa, Neisseria meningitidis; identical to SEQ ID NO: 430

SEQ ID NO: 2390 - protein, 321 aa, Neisseria meningitidis; identical to SEQ ID NO: 2168

SEQ ID NO: 2391 - protein, 312 aa, Neisseria meningitidis
MDAYPEAEAPPQSIVELVPVLIAVTDGGLRVLTVAQGTLLPNGPLSPLRNSLQAGVKLWVAKQTSQPMGYVEQLYTFVDTHRRNEHGMPVLYVSYLGLVREAADSILHPDAKWQDCYGYFPWEDLRTDGGQRDAVVGRLRIWANSADTEEVRQKRLKRIHLCWGVEPENWSEEYVLQRYEMLYESGLIEEAAEPQANFDFALTGQPMRHDHRRVLATALSRLRAKIKYRPVIFELMPPEFTLLQLQNSVEAISGRLLHKQNFRRQIQQQNLIEPSDTGVSGSKGRPAQLCRFRDDVLPDRLISDIGLPLGSR

SEQ ID NO: 2392 - protein, 319 aa, Neisseria meningitidis
  misc_feature 313, 314: 'Xaa' is any amino acid
MNILSKISSFIGKTFSLWAALFAAAAFFAPDTFKWAGPYIPWLLGIIMFGMGLTLKPSDFDILFKHPKAVIIGVIAQFAIMPATAWLLSKLLNLPAEIAVGVILVGCCPGGTASNVMTYLARGNVALSVAVTSVSTLISPLLTPAIFLMLAGEMLEIQAGSMLMSIVKMVLLPIVLGLIVHKVLGSKTEKLTDALPLVSVAAIVLIIGAVVGASKGKIMESGLLIFAVVALHNGIGYLLGFFAAKWTGLPYDAQKTLAIKVGMQNSGLAAALAAAHFAAAPVVAVPGALFSVWHNISGSLLATYWAAKAGNIXXTHLIN

SEQ ID NO: 2393 - protein, 206 aa, Neisseria meningitidis; identical to SEQ ID NO: 1164

SEQ ID NO: 2394 - protein, 481 aa, Neisseria meningitidis
MTQYTLKQASVLLQSKQISAVELASAYLAAIAEKNPALNGYITIDQDKTLAEARAADERIAQGNASALTGVPVAYKDIFCQTGWRSACASKMLDNFISPYTATVVQNLLDEGMVTLGRTNMDEFAMGSTNENSFYGAAKNPWNPEHVPGGSSGGSAAVVAARLAPAALGSDTGGSIRQPASHCGITGIKPTYGTVSRFGMVAYASSFDQAGPMAQTAEDCAILLNAMAGFDPKDSTSLEREKEDYTRDLNQPLKGLKIGLPKEYFGEGNSADVLTALQNTIDLLKAQGAELIEVSLPQTKLSIPAYYVLASAEAGTNLSRYDGVRYGHRAAQFGDLEEMYGKTRAEGFGSEVKRRIMIGTYVLSHGYYDAYYLKAQKLRRLVADDFQTAFARCDLILAPTAPTAAPKIGADASPVETYLSDIYTIAVNLAGLPALTLPAGFSGGGLPVGVQLVGNYFAEAKILGAAHQIQLNSDWHGKRPE

SEQ ID NO: 2395 - protein, 433 aa, Neisseria meningitidis
MTESLRLPAASLKPSTVALPGSKSISNRTLLLAALSDNACEIHSLLKSDDTDRMLEALDKLGVEIEYLAEDRLKVHGTGGRFPNRTADLFLGNAGTAFRPLTAALAVLGGDYRLHGVARMHERPIGDLADALRIAGADVEYLGKEHYPPLHIGERQDNGERVIPIKGNVSSQFLTALLMALPLTGQAFEIRMVGELISKPYIDITLKLMAQFGVQVINEGYRVFKIPADAHYHAPEHLHVEGDASSASYFLAAGLIAATPVRVTGIGANSIQGDVAFACELEKIGADVVWGENFVEVSRPKERAVQAFDLDANHIPDAAMTLAIVALATGQTCTLRNIGSWRVKETDRIAAMANELRKLGAKVVEEAEAIHITPPETLTPDAVIDTYDDHRMAMCFSLVSLLGVPVVINDPKCTHKTFPTYFDVFSSLTETAE

SEQ ID NO: 2396 - protein, 205 aa, Neisseria meningitidis
MFTGIVQGLGKLTAIHRPSEAFQTYVVELPQEAADNLQRGASVANNGCCLTITEIEGNRVSFDLMAETLAKTNLGLLKEGDCVNIERAARFGDEIGGHVMSGHIMATVPIVEIERDGYNRTVWFALPHELKPYILTKGFVGLDGCSLTIGKVEDSRFNVHLIPETLERTLFGSRKVGDRINIEIDPNTQAIVDTVERLMAQRYAK

SEQ ID NO: 2397 - protein, 701 aa, Neisseria meningitidis
VFLLSACLGGGGSFDLDSVDTEAPRPAPKYQDVFSEKPKAQKDQGGYGFAMRFKRRNWHPLAVPKETEVKLNLNDWEETGLPSDPKNLPKRQKSVIEKVETDSDSNIHSSPYLAQSNHQNSNTNGGTKQPKNEVTDYKNFKYVYSGWFYKHAKSEIKNENGSVSAKRGDDGYIFYHGEKPSRQLPASGKITYKGVWHFVTDTKKGQKFNDILEASKGQGDKYSGFSGDEGETISNRTDSELKTDQEGYGFTSNLEVDFGSKKLTGKLIRNNRVTNATTNDKYTTQYYSLDAQITGNRFNGTATATDKKENETKLHPFVSDSSSLSGGFFGPQGEELGFRFLSNDQKVAVVGSAKTQDKAESGGSNGASGGTDAAASNSAAGTSSENSKLTTVLDAVELKSGGKEVQKLDNFSNAAQLVVDGIMIPLLPKDSESGGNQADKGKNGGTDFTYKTTYTPESDKKDTQAQTVTNGTQTASGTESVNGGQAGTKTYEVEVCCSNLNYLKYGLLTRKTAGNTGEGGNGSPTAAQTDAQSMFLQGERTDEKEIPKEQNVVYRGSWYGHIANDTSWSGNASDKEVGNRAEFTVDFADKKITGKLTAENRQAQTFTIEGMIQGNGFEGTAKTAESGFDLDQSNTTGTPKAYITDAKVKGGFYGPKAEELGGWFAYPSDKQTKNAPDASGNGNSASSATVVFGAKRQQPVR

SEQ ID NO: 2398 - protein, 306 aa, Neisseria meningitidis
MRIRLGRHNAPDFPHGAAVTIGNFDGVHLGHKHILQKLRLEADTRGLPVVTVVFEPQPKEFFALRTGRMPPCRISPLRTKLELLEGTGCVDAVWVLRFDQNFSEISAQGFIDRLLRQTLNTRYLLVGDDFRFGAGREGCFELLAQQPDMQTERTPSVIVEDIRTSSTAVRQALSDGNLAYAKKLLGHDYVLSGRVVHGRKLGRTLNAPTANIRLPRHRYALGGVFVVEADGAFGTRRGVASFGFNPTVDSGCSQKLEVHLFDFQGDLYGQRLNVRFLHKLRDEEKFDGMEELKRQIEADMEAAKRW

SEQ ID NO: 2399 - protein, 101 aa, Neisseria meningitidis
MITLTHYLVLGALLFGISAMGIFMNRKNVLVLLMSIELMLLAVNFNFIAFSQHLGDTAGQIFVFFVLTVAAAESAIGLAIMVLVYRNRQTINVADLDELKG

SEQ ID NO: 2400 - protein, 515 aa, Neisseria meningitidis; identical to SEQ ID NO: 654

SEQ ID NO: 2401 - protein, 57 aa, Neisseria meningitidis
MSFGRRNTDWQAWGQHRRRATARMAQKSREREIEEYQAQFEDKDGKGRLKTEGNKDE

SEQ ID NO: 2402 - protein, 269 aa, Neisseria meningitidis
MIDFDKPAEEDAIYQSRLKKIVSDDLVLYNENSLNVMRKILEKYPNGCFDMIFSDPPYFLSNDGFSCQNGQMVSVNKGNWDKSKGMAADLEFYEEWLRLCYALLKPNGTIWVCGTFHNIYLIGYLMQTIGYHILNNITWEKPNPPPNLSCRFFTHSTETILWAKKNKKAKHTFHYEMMKAQNDGKQMKCVWTFPPPNKAEKTFGKHPTQKPLPLLERCILSASNIGDLIFDPFMGSGTTGVAALKHGRKFCGCELEEDFFELAKKRLEK

SEQ ID NO: 2403 - protein, 363 aa, Neisseria meningitidis
MSLKCGIVGLPNVGKSTLFNALTQSGIEAANYPFCTIEPNVGIVEVPDPRMAELAKIVNPQKMQPAIVEFVDIAGLVAGASKGEGLGNQFLANIRETDAIVNVVRCFDDDNIVHVSGKVDPIADIETIGTELALADLASVEKAIVREEKRARSGDKDAQKLVDLCKKLLPHLDEGKPVRSFGLDAEERAMLKPLFLLTAKPAMYVGNVSEDGFENNPHLDRLKELAAKENAPVVAVCAAMESEIAELEDGEKAEFLAEMGLEEPGLNRLIRAGYDLLGLQTYFTAGVKEVRAWTIHKGDTAPQAAGVIHTDFERGFIRAQVIAYDDFVSLGGEAKAKEAGKMRVEGKEYVVQDGDVMHFLFNV

SEQ ID NO: 2404 - protein, 433 aa, Neisseria meningitidis
MPSEHQHTSSLLDFDRTHLLHPYTSMTDPLPVYPVKRAEGVFIELADGTRLVDGMSSWWCAIHGYNHPVLNQAVETQIKQMSHVMFGGLTHEPAVELGKLLVGILPQGLDRIFYADSGSVSVEVALKMAVQYRQVRGLTAKQNIATVRRGYHGDTWNAMSVCDPETGMHHIFGSALPQRYFVDNPTSRFDDEWDEADLQPVRALFEVHHADIAAFILEPVVQGAGGMYFYHPQYLRGLRDLCDEFDIVLIFDEIATGFGRTGKMFACEHAEVVPDIMCIGKGLSGGYMTLAAAITSQKVTETISRGEAGVFMHGPTFMANPLACAVACASVKLLLSQDWQANIRRIESILKGRLKAAWDIRGVKDVRVLGAIGVIELDKGVDMARFQADCVAQGIWVRPFGRLVYLMPPYIISDGVLTKLADKTVQILKEHSK

SEQ ID NO: 2405 - protein, 201 aa, Neisseria meningitidis
MMTLYSGITCPFSHRCRFVLYEKGMDFEIKDVDIYNKPEDLAVMNPYNQVPVLVERDLVLHESNIINEYIDERFPHPQLMPGDPVMRGRGRLVLYRMEKELFNHVQVLENPAATNKEQAKAREAIGNGLTMLAPSFSKSKYILGEDFSMIDVALAPLLWRLGHYDVKLGKSAAPLLKYAERIFQREAFIEALTPAEKAMRK

SEQ ID NO: 2406 - protein, 412 aa, Neisseria meningitidis
VIASLTGAAVGGTPVDAQTGGAVGQNAVENNLYLTSEALKKDKQTARKIYSVIKEQVKHECSSTGRITECRQNIGRIIEFTQDKRFDSRFKDLKKESLYYLNKHPDLVASYLKAEYEKLDREDKSILHRYISPGAEIVSGSLGVVLSGVAGGGSCAETFGLGCAAALVGVTSSYDHVITGTKNFGKKASEQRPTIAVQALKQLGLSEQAAEYVQFSIDLFSVGKSGGGIPKAKPVFDAKPRWEVDRKLNKLTTREQVEKNVQETRRRSQSSQFKAHAQREWENKTGLDFNHFIGGDINKKGTVTGGHSLTRGDVRVIQQTSAPDKHGVYQATVEIKKPDGSWEVKTKKGGKVMTKHTMFPKDWDEARIRAEVTSAWESRIMLKDNKWQGTSKSGIKIEGFTEPNRTAYPIYE

SEQ ID NO: 2407 - protein, 310 aa, Neisseria meningitidis
MLSQLEYGIAKENRPNRQADRFAGSVLPLAASLTHKPNIMKPIPTDTFQPAILPQAFETEIKSTCTGRIYRIQTATLGEMPSEGYPVLFVLDGEAFFPALFNIMQSLMPNPVTRSNAPCLIVGIGYTTGSVRDLAQRAADYTPPLGDNATADERQQFGQADRFAAFIDSELTAFLESRYTLNRNETAVFGHSFGALFGLYSLLSHRRFRRHWLVSPSIWWHNRRILDFMPSENRLNGIDVCLNIGALERGSDCKRREERDMAGQAEQMAAELDRHGAAVFFREYPNADHGNVPFYSLTDCVEYLRKAWQR

SEQ ID NO: 2408 - protein, 397 aa, Neisseria meningitidis
MFFKHIEAAPADPILGLGEAFKAETRPEKVNLGIGVYKDASGATPLVKAVKEAEKRLLESETTKNYLTIDGVADYNAQTQILLFGKDHEIIASRRAKTAQSLGGTGALRIAAEFAKRQLNAQTIWISNPTWPNHNAIAKAVGIQDKPYRYYDAAKHGLDWDGMIEDLSQAQKGDIVLLHGCCHNPTGIDPTPEQWETLAKLSAEKGWLPLFDFAYQGFGNGLEEDAYGLRVFLKHNTELLIASSYSKNFGMYNERVGAFTLVAEDEETAARAHSQVKTIIRTLYSNPASHGANTIALVLKNDDLKAQWIAELDEMRGRIKAMRQKFVALLKAKGASQDFDFIIEQNGMFSFSGLTPEQVDRLKNEFAIYAVRSGRINVAGITDDNIDYLCESIVKVL

SEQ ID NO: 2409 - protein, 301 aa, Neisseria meningitidis
MDILDKLVDFAQLTGSVDVQCLLGGQWSVRHETLQREGLVHIVTSGSGYLCIDGETSPRPVSTGDIVFFPRGLGHVLSHDGKCGESLQPDMRQHGAFTVKQCGNGQDMSLFCARFRYDTHADLMNGLPETVFLNIAHPSLQYVVSMLQLESKKPLTGTVSVVNALSSVLLVLILRAYLEQDKDVELSGVLKGWQDKRLGHLIQKVIDKPEDEWNVDKMVAAANMSRAQLMRRFKSRVGLSPHAFVNHIRLQKGALLLKKNPDSVLSVALSVGFQSETHFGKAFKRQYHVSPGQYRKEGGQK

SEQ ID NO: 2410 - protein, 124 aa, Neisseria meningitidis
MIIQNEFNLYPSDMLPERFCYPEKYVRISNDTSLIPYIQPHNFHWWFENYGTEGAEVTYIFRNSILPDLNLIPFASNGEWEAYFDGNDVTGNPRVIVINLDNIENHEFFNSFEEWLELAIKDTW

SEQ ID NO: 2411 - protein, 417 aa, Neisseria meningitidis
VDKLKISANGPLNGEITVSGAKNAALPLMCAGLLTSGTLRLKNVPMLADVKTTQKLLQGMGARVLTDNISEFEINGGTVNNTCAPYELVRTMRASILVLGPTLARFGEAQVSLPGGCAIGSRPVDQHLKGLEAMGAEIVIEHGYVKAKGKLKGTRVAMDVVTVGGTENLLMAATLAEGTTVLENCAIEPEVVDLAECLVKMGAKISGIGTSTMIVEGVDELHGCEHSVVPDRIEAGTFLCAVAITGGRVVLRNAAPKTMEVVLDKLVEAGAVIEAGDDWIAIDMRQRPKAVDIRTVVHPGFPTDMQAQFMALNAVAEGSCRVVETIFENRFMHVPELNRMGANITTEGNTAFVQGVERLSGAVVKATDLRASASLVIAGLAARGETVVEQIYHLDRGYENIEKKLGSVGAKIERVSG

SEQ ID NO: 2412 - protein, 89 aa, Neisseria meningitidis
MTETFRWRVASDNKAVHKFDVRSVRFGDGYEQRQPKSLKPKLRSWEIKIVGQKALMGEIKAFFDARRGVEPFNWRPPDGVPVLVKVSEY

SEQ ID NO: 2413 - protein, 273 aa, Neisseria meningitidis
MSLQNIIETAFENRADITPSTVAPEVKEAVLETIRQLDSGKLRVAERLGVGEWKVNEWAKKAVLLSFRIQDNEVLNDGVNKYFDKVPTKFADWSEDEFKNAGFRAVPGAVARRGSFVAKNVVLMPSYVNIGAYVDEGAMVDTWATVGSCAQIGKNVHLSGGVGIGGVLEPLQASPTIIEDNCFIGARSEIVEGVIVEEGSVISMGVFIGQSTKIFDRTTGEIYQGRVPAGSVVVSGSMPSKDGSHSLYCAVIVKRVDAQTRAKTSVNELLRGI

SEQ ID NO: 2414 - protein, 64 aa, Neisseria meningitidis; identical to SEQ ID NO: 2003

SEQ ID NO: 2415 - protein, 322 aa, Neisseria meningitidis
MNEKTIILANPRGFCAGVDRAISIVERALEEFGAPIYVRHEVVHNKFVVDNLREKGAVFIEDLAEVPPGATLVYSAHGVSKAVRQEAAERGFRVFDATCPLVTKVHKEVARLDAQDCEIIMIGHKGHVEVEGTMGQLAPGKMLLVETVGDVAKLEVRNPDKLAYVSQTTLSVDETKDIIAALNARFPNIRNPHKEDICYATTNRQTAVKELAEQCDIVIVVGSPNSSNSNRLREVAASRGIDAYMVDNAGYLQRAWFEGKNKVGVTAGASAPEVLVREVLATIRGWGHETVREGEGEEESIVFVLPKELRREGETKPDLCKR

SEQ ID NO: 2416 - protein, 154 aa, Neisseria meningitidis; identical to SEQ ID NO: 2266

SEQ ID NO: 2417 - protein, 219 aa, Neisseria meningitidis
MSNQKALVIFSGGQDSTTCLIQAIQTYGRENVQAITFQYGQRHAVELERARWIAQDLGVKQTVLDLSLMRQITHNALMDDTAAIETAENGVPNTFVDGRNALFLLYAAIYAKGQGIRHIIAGVCETDFSGYPDCRDVFVKSMNVTLNLAMDYDFQIHTPLMYLTKAQTWALADEMGVLDYIREQTHTCYNGIVGGCRECPSCILRERGLAEYLESKKAV

SEQ ID NO: 2418 - protein, 290 aa, Neisseria meningitidis
MSWLDKILPPKIKNRGKDGSSNVPEGLWHKCPSCSATVYSTELQQNNQVCPKCNHHNPLSARQRLNLLLDEDGREEIAGNVKPTDPLKFKDSKKYPDRLSAARKLTGEDDALVVMKGKMNGLPVVVAAFEFRFIGGSMGSVVGERFVQGIRRAVADNCPFVCVAASGGARMQEGVNSLMQMTKTSAALHLLTEKRLPFISVLTDPTMGGVSASFAFLGDVVLAEPNALIGFAGPRVIEQTVRETLPESFQRAEFLLEKGAIDQIVDRRDMKRRISDLITLLCRQDKVSAA

SEQ ID NO: 2419 - protein, 186 aa, Neisseria meningitidis
  misc_feature 181, 182: 'Xaa' is any amino acid
MKALLLGAPGAGKGTQAQFITAAFGIPQISTGDMLRAAIKAGTPLGLEAKKIIDEGGLVRDDIIIGMVKERIAQDDCKNGFLFDGFPRTLAQAEAMVEAGVDLDAVVEIDVPDSVIVDRMSGRRVHLASGRTYHVTYNPPKVEGKDDVTGEDLIQRDDDKEETVKKRLAVYHEQTEVLVDXXHTLN

SEQ ID NO: 2420 - protein, 107 aa, Neisseria meningitidis; identical to SEQ ID NO: 150

SEQ ID NO: 2421 - protein, 183 aa, Neisseria meningitidis
MKVLNGWSDRKMWRVLSALPIGVVFFDLIYGFVLNVLQGLDLQRAVPDSEGVLAVTPDIAFNSLQIVANGGMAAVVCFGLAVVFLLNRSVRRRQVLEIGVFRMLGLVAVLAFSAPSVWEWANALPLLLKGADVVNTGNARYVLTALCMPFPAVSCVIGLVGRFRLQTASGRAAKAGGAVKAGG

SEQ ID NO: 2422 - protein, 227 aa, Neisseria meningitidis
MPSEKCSDGISYNLLFAAHNQSVFPIPFRNAYHAPVPNICEQGKKMARLTVHTLETAPEAAKARVEAVLQNNGFIPNLIGVLSNAPEALAFYQEVGKLNAANSLTAGEVEVIQIIAARTNQCGFCVAGHTKLATLKKLLSEQSVKAARALAAGEFDDAKLGALAAFTQAVMAKKGAVSDDELKAFFDAGYNQQQAVEVVMGVALATLCNYVNNLGQTEINPELQAYA

SEQ ID NO: 2423 - protein, 718 aa, Neisseria meningitidis
MSVFRINMTAATVLAALSSSVFAAQTADLETVHIKGQRSYNAIATEKNGDYSSFAATVGTKIPASLREIPQSVSIITNQQVKDRNVDTFDQLARKTPGLRVLSNDDGRSSVYARGYEYSEYNIDGLPAQMQSINGTLPNLFAFDRVEVMRGPSGLFDSSGEMGGIVNLVCKRPAKAFQGHAAAGFGTHKQYKAEADVSGSLNSDGSVRGRVMAQTVGASPRPAEKNNRHETFYAAADWDINPDTVLGAGYLYQQRHLAPYNGLPADANNKLPSLPQHVFVGADWNKFKMNSHDVFADLKHYFGNGGYGKVGMRYSDRDADSNYAFAGSKLGMKTLAGRPGCNTADDKACAVGLGTEIKQKALAFDASYSRPFRLGNTANEFVIGADYNRFRSTNEQGRTTLYARGGLALNEFRSIPQVDLIANARKGVRGYSHTVATENLDEFGIYGKSTFHPADGLSLIGGGRLGHYKIESGEGKTLHKASKTKFTGYAGAVYDLNDNNSLYLSLSQLYTPQTNLDADGKLLKPRQGNQFEVGYKGSYMDDRLNARVSFYRMKDKNAAAPLNPNNKKTRYAALGKRVMEGVETEISGAVTPKWQIHAGYSYLHSQIKTASNSRDDGIFLLMPKHSANLWTTYQVTPELTIGGGVNAMSGITSSAGMHAGGYATFDAMAAYRFTPKLKLQINADNIFNRHYYARVGGANTFNIPGSERSLTANLRYSF

SEQ ID NO: 2424 - protein, 171 aa, Neisseria meningitidis
MKSKLPLILINFSLISSPLGANAAKIYTCTINGETVYTTKPSKSCHSTDLPPIGNYSSERYIPPQTPEPVSSPSNGGQVVKYKAPVKTVSKPAKSNTPPPQQAPSNNSRRSILETELSNERKALVEAQKMLSQARLAKGGNINHQEINALQSNVLDRQQNIQALQRELGRM

SEQ ID NO: 2425 - protein, 389 aa, Neisseria meningitidis
MPQIKIPAVYYRGGTSKGVFFKRSDLPEAAREAGSARDKILLRVLGSPDPYGKQIDGLGNASSSTSKAVILDKSERADHDVDYLFGQVSIDKPFVDWSGNCGNLTAAVGAFAIEQGLVDKGKIPSDGICTVKIWQKNIGKTIIAHVPMQNGAVLETGDFELDGVTFPAAEVQIEFLDPADGEGSMFPTGNLVDEIDVPNIGRLKATLINAGIPTVFLNAADLGYTGKELQDDINNDAAALEKFEKIRAYGALKMGLISDVSEAAARAHTPKVAFVAPAADYTASSGKTVNAADIDLLVRALSMGKLHHAMMGTASVAIATAAAVPGTLVNLASGGGTRKEVRFGHPSGTLRVGAAAECQDGQWTATKAVMSRSARVMMEGWVRVPEDCF

SEQ ID NO: 2426 - protein, 117 aa, Neisseria meningitidis; identical to SEQ ID NO: 455

SEQ ID NO: 2427 - protein, 109 aa, Neisseria meningitidis; identical to SEQ ID NO: 899

SEQ ID NO: 2428 - protein, 190 aa, Neisseria meningitidis
MTYEIQASVREAQGTGASRRLRREGQIPGILYGEGQEPVAIAVDHKTVFYALEKESFHTALIKLSLNGETKDVIVRDFQMHPFRREVQHIDFQAVKADQPVRIRVPLHIVNAENSQAVKLQGGRVSLLNTSVEVVALPANIPAFLDLDCAEVVAGDILHLSDIKLPEGVESVSLKRNENLAVATVTGKKR

SEQ ID NO: 2429 - protein, 68 aa, Neisseria meningitidis
MFTFLNKNIFIKTIVLGCFYSFLFFSFFVSGKSFGYSFEIFNMDTSALAFLSVYMGFFISVAVHIYDI

SEQ ID NO: 2430 - protein, 201 aa, Neisseria meningitidis
MPSEMRMSRLMLLLSAFVLAACNAQNRQSGVRHQDFARVAVDLFRSACVLTQGSFESVSKFAAVGHFVPVGKEDLSHLPPTVAEPDVQALWTLERDGGIYYLSLTRDSCSVKAERADSAALLEHFDGLVRQPPKNANIELRAEQSVQASFEIRQVSYAWREAGSSEETVLTAQTADSPDLPVQAVLNLTHRSHNGKPLILP

SEQ ID NO: 2431 - protein, 170 aa, Neisseria meningitidis; identical to SEQ ID NO: 2052

SEQ ID NO: 2432 - protein, 143 aa, Neisseria meningitidis
MSSNAWLFWALASAGFASLTAVFAKMGLQGIDSDFATFIRTLVILAALVLFLTYTGKWQGVNGFTGRNWTFLILSGLATGASWLAYFKALQLGNASQVAPIDKFSLVLVALMAVVFLDERPNTQEWIGLGLVTAGVLVLALKR

SEQ ID NO: 2433 - protein, 210 aa, Neisseria meningitidis
MENTNRVPEQARYDAERRQADEALAGVFPAVSIFGSARTPQNHADYAFACRLARRLSDSGIAVISGGGPGIMEAANKGAFAGKSVSVGLNIVLPHEQKPNPYQDIALRFSRFAERKAVFFRYSQAYVVMPGGFGTLDELFEILTLVQTGKVPPRPIVLVGKAFWSGLAEWINAQLLACGLISEGAVSLFAISDDEDEIVAYLSEHGLQTA

SEQ ID NO: 2434 - protein, 725 aa, Neisseria meningitidis
MQQKIRFQIEGMTCQACASRIEKVLNKKDFVKSAGVNFASEEAQVTFDDSKTSAADIAKIIEKTGYGAKEKTEDTLPQPEAEHHIGWRLWLLLAINIPFLIGMVGMMLKGLNWTRHDWMLSPLLQFALASVVQLWLAVPFYKSAWASIKGGLANMDVLVTIGTVSIYLYSVYMLFFSPHAAYGMAHVYFEVGVMVIGFVSLGKFLEHRTKKSSLNSLGLLLKLTPTQVNVQRNGEWKQLPIDQVQIGDLIRANHGERIAADGIIESGSGWADESHLTGESNPEEKKAGSKVLAGALMTEGSVVYRATQLGSQTLLGDMMNALSEAQGSKAPIARVADKAAAVFVPTVVGIALLTFIATWLVKGDWTVALMHAVAVLVIACPCALGLATPAAIMVGMGKAVKHGIWFKDAAAMEEAAHVDAVVLDKTGTLTEGKPQVAAVYCVPDSGFDEDALYRIAATVEQNAAHPLARAIVSAAQARGLGIPAAQNAQTVVGAGIAAEVKGAGLVKAGKAEFAELTLPKFSDGVWKIASVVAVSVNGKPIGAFALADALKADTAEAIGRLKKHNIDVYIMSGDNQGTVEYVAQQLGIAHAFGNMSPRDKAAEVQKLKAAGKTVAMVGDGINDAPALAAANVSFAMKGGADVAEHTASATLMQHSVNQLADALSVSRATLRNIKQNLFFAFFYNILGIPLAALGFLNPVIAGAAMAASSVSVLSNALRLKRVKID

SEQ ID NO: 2435 - protein, 386 aa, Neisseria meningitidis
  misc_feature 381, 382: 'Xaa' is any amino acid
MHIPFKPVLAAAAIAQAFPAFAADPAPQSTQTLNEITVTGTHKTQKLGEEKIRRKTLDKLLVNDEHDLVRYDPGISVVEGGRAGSNGFTIRGVDKDRVAINVDGLAQAESRSSEAFQELFGAYGNFNANRNTSEPENFSEVTITKGADSLKSGSGALGGAVNYQTKSASDYVSEDKPYHLGIKGGSVGKNSQKFSSITAAGRLFGLDALLVYTRRFGKETKNRSTEGDIEIKNDGYVYNPTDTNGPSKWLDYVATGVARSQPDPQEWVNKSTLFKLGYNFNDRNRIGWIFEDSRTDRFTNELSNLWTGTTTSAATGDYRHRQDVSYRRRSGVEYKNELEHGPWDSLKLRYDKQRIDMNTWTWDIPKDYDTNGINGQVYHSXXHTLN

SEQ ID NO: 2436 - protein, 618 aa, Neisseria meningitidis; identical to SEQ ID NO: 1958

SEQ ID NO: 2437 - protein, 348 aa, Neisseria meningitidis
MSDDKSKALAAALAQIEKSFGKGAIMKMDGSQQEENLEVISTGSLGLDLALGVGGLPRGRIVEIFGPESSGKTTLCLEAVAQCQKNGGVCAFVDAEHAFDPVYARKLGVKVEELYLSQPDTGEQALEICDTLVRSGGIDMVVVDSVAALVPKAEIEGDMGDSHVGLQARLMSQALRKLTGHIKKTNTLVVFINQIRMKIGVMFGSPETTTGGNALKFYSSVRLDIRRTGSIKKGEEVLGNETRVKVIKNKVAPPFRQAEFDILYGEGISWEGELIDIGVKNDIINKSGAWYSYNGAKIGQGKDNVRVWLKENPEVANEIDAKIRALNGVEMHITEGTQDETDGERPEE

SEQ ID NO: 2438 - protein, 402 aa, Neisseria meningitidis
MSEAEYFSHFISNGNGKLLEIPQRRGRQDGVFIDWLSFTLHEDSLLKVSGCPLVSDAEYMFVLSKKLEEILGFGITSRCKSKGNKFYDSMFRLGSEEVDYGEVHYGGQRNTVLIELKGVGCNIANPGWELRLKQFLEDSLRPRITRVDLALDFFDGEYTPEQALLDHDNGFFDNSNMRPKSEMVGTAWRREDGSGKTFYVGRKKNSRFVRVYEKGRQLGDKESKWVRFEIQFNHGDMEIPLDILINQGSYFSGAFPICQKFKNMPNPERFDYRKKVANLTFQHKLRYAKNAVGKLINFMFDMGFDSDEIVRYLKADLGYPKGLEPEKYSLAGLKESLKFGFIHEQPDVDLEVELEELGIIKFKQSDKFDPDKRLFDPHHDVESERQYQLYLDRMYDLHANQN

SEQ ID NO: 2439 - protein, 66 aa, Neisseria meningitidis; identical to SEQ ID NO: 2062

SEQ ID NO: 2440 - protein, 366 aa, Neisseria meningitidis
  misc_feature 360, 361: 'Xaa' is any amino acid
MDFSWLAEPHTWIGFATLLVLEVVLGIDNLVFVAILANKVQPARRDRARIIGLGLAVVIRIIMLAFMAHIITLTEPLFQIGGLAVSGKDMIMLAGGIFLLYKATTELHERLEGHNRFTVADNQKKHAPFWGVVAQILILDAVFSIDSVITAVAMVDHIVVAMGAVVVAMAVMISASKLLTEFVDRHPTVVMLCLGFLLMIGFSLIAEAFHFHIPKGYLYAAIGFSILIELFNQISQRNSRKNDYIGSSWRKRTAENVLGMMGIRESVLADAGGESGDDAHFEENEKSMIRSVLTLAERPIMGVMIPRRDIERLDISQSREEQCAQLQNTPYSRLLVVGKAGVDEPLGYINKKDLLSQLLXXTHLIN

SEQ ID NO: 2441 - protein, 247 aa, Neisseria meningitidis
MLIIRNLIYWLILCSTLIFLFPFMLLASPFRDGAHKMARVWVKILNLSLKHIVGLKYRIIGAENIPDRPAVICAKHQSGWETLALQDIFPPQVYVAKRELFKIPFFGWGLKLVKTIGIDRNNRREANEQLIKQGLARKNEGYWITIFPEGTRLAPGKRGKYKLGGARMAKMFEMDIVPVALNSGEFWPKNSFLKYPGEITVVICPTIPHASGSEAELMGKCEHLIETQQPLISGAGPFAAKMPSETA

SEQ ID NO: 2442 - protein, 502 aa, Neisseria meningitidis
MTTTPANILASVDLGSNSFRLQICENNNGQLKVIDSFKQMVRFAAGLDEQKNLSAASQEQALDCLAKFGERLRGFRPEQVRAVATNTFRVAKNIADFLPKAEAALGFPIEIIAGREEARLIYTGVIHTLPPGGGKMLVIDIGGGSTEFVIGSTLNPDITESLPLGCVTYSLRFFQNKITAKDFQSAISAARNEIQRISKNMRREGWDFAVGTSGSAKSIRDVLAAEMPQEADITYKGMRALAERIIEAGSVKKAKFENLKPERIEVFAGGLAVMMAAFEEMKLDRMTVTEAALRDGVFYDLIGRGLNEDMRGQTVAEFQHRYHVSLNQAKRTAETAQTFMDSLCHAKNVTVQELALWQQYLGRAAALHEIGLDIAHTGYHKHSAYILENADMPGFSRKEQTILAQLVIGHRGDMKKMSGIIGTNEMLWYAVLSLRLAALFCRSRQDLSFPKNMQLRTDTESCGFILRIDREWLERHPLIADALEYESVQWQKINMPFKVEVV

SEQ ID NO: 2443 - protein, 305 aa, Neisseria meningitidis; identical to SEQ ID NO: 1198

SEQ ID NO: 2444 - protein, 948 aa, Neisseria meningitidis
MNKKYATKAEINAAAHDRWREVLEACGIPSEILDKKHHPCPSCGGSDRFRFTDGSGSSRGSGVWICNQCKPEGGSPFDLLMDVCGYSFNEARDKVASLLGLAHGDLVDKAPKLLPPPAPVKEEERDLWKPIVPVPEYALNSMSFGNGFRKSDDLIFKSVFRDSSSAVLGGVARFRKSDGGKIDLPYTFCEHKKTGEKMWRWRCWDNPRPLYGLDSLVADPSLPVLVVEGEKCKNAADAQGYNYAVLTWHGGCNNWDKSDWSAVVDRDVVLWPDCDSLRQKLTKKDRDDGVDPESKPFLPRNEQGGMKAMLGIAEVLTKQNCRVWLVNIPAPGIWPHGFDIADAIADGGRICDPSEVLSWMGAADWLVEYVPEAEMPSENSPAPIQDMEPESEQLHESLEATGNQGGAGDVDDEYLAKLQKLKSEFGLVEGKDHGVNRKTGVTYTRKAMTVHFGKDVVDAWYEWGRAPVLTMYEINRLKKDYALIQAVKDDDTQDMMERFIYLDGSASIWDNKLWRVVPEKAARLSMTPDGFKIWVNSPSRIVKRFDRLVFEPGRVLSDDYINIFRGMPIEPKFPIPKEDMPETNYELYRLFPEIKPILNLINHLCNGDYQQVEYILNWLAYPLQNVGAKMTTAVVMHGHIHGAGKSFFFEEIVKPMYGEYGATYGQEDLESNYTANRSGKMFGIFEEVYTNQQKYNKTGSQKHMITGKTMRVERKFQDAYEEANHMNCVFLRNESHPFKIEENDRRYFVVWPEKKLDKKLRDEVLDCIGNDGVRLFYSFLLCWNFYLTYGQQGAENEKGYEVIKLEEPVRFDPNTPPPMTAAKQNVISYGRYAWQTFYSEWAGGGIKDLPFCCCITDDLWLVYKEWCRQNGERETGKTKFLQHIAEKMPRARRWWRTKNKDGDVSCQNWIFKPAGWQAADGLPEMDALGNEVLRFRSAGWRYRGGEEV

SEQ ID NO: 2445 - protein, 150 aa, Neisseria meningitidis
MQIILLEKIGGLGNLGDIVTVKNGYARNFLIPAGKAKRATEANMKEFEARRAELEAKQAEILADARVRQEKLDGQTVTVAQKAGVDGRLFGSVTNADIAAAIVAAGIEAVKANVRLPNGPLKAVGEYEVEVALHTDAVAKITVAVVAATE

SEQ ID NO: 2446 - protein, 346 aa, Neisseria meningitidis
  misc_feature 2, 3, 4: 'Xaa' is any amino acid
VXXXALQRPGRFDRQVVVPLPDIRGREQILNVHSKKVPLDKSVDLLSLARGTPGFSGADLANLVNEAALFAGRRNKVKVDQSDFEDAKDKIYMGPERRSMVMHEDEKRATAYHESGHAIVAESLPFTDPVHKVTIMPRGRALGLTWQLPERDRISMYKDQMLSQLSILFGGRIAEDIFVGRISTGASNDFERATQMAREMVTRYGMSDKMGVMVYAENEGEVFLGRSVTRSQNISEKTQQDIDAEIRRILDEQYQVAYKILDENRDKMETMCKALMEWETIDRDQVLEIMAGKQPSPPKDYSHNLRENADAAEDNAPHAPAREETEAPAPADTASSESEQRPENKA

SEQ ID NO: 2447 - protein, 205 aa, Neisseria meningitidis; identical to SEQ ID NO: 2331

SEQ ID NO: 2448 - protein, 154 aa, Neisseria meningitidis; identical to SEQ ID NO: 1226

SEQ ID NO: 2449 - protein, 106 aa, Neisseria meningitidis
MNKPFITQAQLALYKYQPSSKYFGQSMALIASKEFEEFVRNVKEYDVIECFSYFLNKRVTHNIWKIYFSDESNIFIRKSEENGKISHEFIYSEFSDSNTDFNVLFS

SEQ ID NO: 2450 - protein, 189 aa, Neisseria meningitidis
  misc_feature 2, 3, 4: 'Xaa' is any amino acid
VXXXRKSVKKPGNMPVLDVISAGAKAALATTRNNKIGIIATNTTVNSNAYARAIHRNNPDTLVRTQAAPLLVPLVEEGWLEHEVTRLTVCEYLKPLLADGIDTLVLGCTHFPLLKPLIGREAHNVALVDSAITTAEETARVLAQEGLLNTDNNNPDYRFYVSDIPLKFRTIGERFLGRTMEQIEMVSLG

SEQ ID NO: 2451 - protein, 876 aa, Neisseria meningitidis
MQEHYQPAAIEPAAQKKWDDARIFNVSEDASKPKYYCLSMFPYPSGKLHMGHVRNYTIGDVLSRFKLLNGFNVMQPMGWDAFGMPAENAAMKNNVAPAAWTYDNIEYMKTQLKSLGFAIDWARETATCKPEYYRWEQWLFTKLFEKGIVYRKNGTVNWDPVDQTVLANEQVIDGRGWRSGALIEKREIPMYYFKITDYAEELLNDLDKLEHWPEQVKTMQRNWIGKSRGMTVRFAVSDDSKQGLEGDYAKFLQVYTTRPDTLMGATYVAVAAEHPLAAAAAADKPELQAFIAECKAGSVAEADMATMEKKGVPTGRYVVNPLNGDKLEVWIANYVLWGYGDGAVMAVPAHDERDFEFAAKYNLPKKQVIAVGDNAFDANRWQEWYADKENGVLVNSGDLDGLDFQTAFDAVAAKLQSQGAGEPKTQYRLRDWGISRQRYWGCPIPIVHCEQCGDVPVPADQLPVVLPENVVPDGMGSPLAKMPEFYETACPCCGGAAKRETDTMDTFMESSWYFFRYMSPKFSDGMVDPAAAKYWGAVDQYIGGIEHAILHLLYARFFTKLMRDEGLVNVDEPFERLLTQGMVVCETYYRENDKGGKDWINPADVELTFDDKGRPISAVLKADGLPVVISGTEKMSKSKNNGVDPQELINAYGADTARLFMMFAAPPEQSLEWSDSGVEGAHRFLRRLWRTVYEYLKQGEAVKAFAGSQDGLSKELKDLRHKLHATTAKVSDDYGRRQQFNTAIAAVMELLNQYDKTDTGGEQGRAVAQEVLETAVRLLWPIVPHICETLWSELNGAKLWEAGWPTVDEAALVKSEIEVMVQVNGKLRGKITVAADASKADLEAAALATEGAVKFMEGKPAKKIIVVPGRLVNIVV

SEQ ID NO: 2452 - protein, 248 aa, Neisseria meningitidis
VQPETSAQYQHRFAQAIRGGEAADGLPQDRLNVYIRLIRNNIHSFIDRCYTETRQYFDSEEWSRLKEGFVRDAHAQTPYFQEIPGEFLQYCQSLPLSDGILALMDFEYTQLLAEVAQIPDIPDIHYSNDSKYTPSPAAFIRQYRYDVTDDLHEAETALLIWRNAEDDVMYQTLDGFDMMLLEIMGSSALSFDTLAQTLVEFMPEDDNWKNILLGKWSGWTEQRIIIPSLSAISENMEGNSPGQNHLSA

SEQ ID NO: 2453 - protein, 490 aa, Neisseria meningitidis
MNQTSRDLTRISHNTKIVATLGPGSNNVELLEDMIRVGGLNVVRFNFSHGTPEFHQENARIVREAAKRAGQEIAIIADLQGPKIRVGKIAGGGIELNKGETLVLDAALEGEGTREAVGLDYRDLPDDVTAGDVLWLDDGLLTLTVESVEGSRIITRVENSHVLKSNKGINKRGGGLSAGALTEKDFRDLKTAIAIGCDYLAISFVKSAEDLHIARAKVEEEMKGSTAVRPSLVSKIERVEAIENLDEIILAGDGIMVARGDLAVEVGHAAVPALQKRMIRRARELRRFSITATQMMESMITNPVPTRAEVSDVANAVLDGTDAVMCSAETAVGAYPFETVSQMAVICAAAEKEQDSLNGVAEQAEYPEAVSTNLAVAGGAVSVARAVHAKAIVALTESGSTAFEISRHNITLPIFALTPSVSAQRRMAMYRGVRPMILATSTDHDTALNEVEAVLVEHQILCSGDQYIITSGSKMRESGSTNTLEVLRVK

SEQ ID NO: 2454 - protein, 321 aa, Neisseria meningitidis; identical to SEQ ID NO: 2168

SEQ ID NO: 2455 - protein, 56 aa, Neisseria meningitidis
MKYGVFFAAATALLLSACGYKGDLYLPKEGDKARFGVIQTGLQLQSKPQSAPPTQK

SEQ ID NO: 2456 - protein, 187 aa, Neisseria meningitidis
VQDKNNLCWLDMEMTGLNPETDRIIEVAMIITDSDLNVLAQSEVYAVHQSDELLDNMDEWNTATHGRTGLTQRVRESLHTEAEVEQKLLDFMSEWVPGRATPMCGNSIHQDRRFMVKYMPKLENYFHYRNLDVSTLKELAKRWNPSVAKSVVKRGSHKALDDILESIEEMRHYREHFLISAPRAEAQ

SEQ ID NO: 2457 - protein, 245 aa, Neisseria meningitidis
MLSARYLHLHEALGLGPMWLKQAAAVLPPKNTPATPAQARPQTVRAAPIRPSQPHNGQARLETMKALETAAVHTRKPAPETETPPPGLSDGIAPVPAASGITKLAVVSLCPPIEDAVYGQLFYGKAGVLLDNILKAVGLDAAYVHKTCWVKTAAVGNPMPSEAAIETATVSVMQELDGCRAPAVLFLGQAFVQPERQTMIETLCGSRPFFIIDHPARLLRQPELKARAWQVLKQLKRALRQGGGS

SEQ ID NO: 2458 - protein, 1421 aa, Neisseria meningitidis
MGGKSGGGQRTPYEAPNSLSSAQSLRIIDAVSEGVVSGFANGDDAPFKSVYFDDTPVQNSDGSYNFNGVTGYFQRGEQDQSYVPGFDASERTVAVSAAVKQNQPMVRAVTDELVSRLRITVAVERNAQVEDNGDTVPADTLMRVELINSNGVQASNQVRFNEKSSGTYYQDVEFDVVPQVPFNIRVFRISPDSKTDKVSNNTYFSSYVEIVDAKLSYPHTAFAALSIDSAQFGNQIPRRNYLMKGRLVKVPSNYNPETRQYTGGTWDGSFKTAWTNNPAWVFYDVLTQPRFSTLARRLNVADIDKWSLYQIGKYCDEPVDDGFGGKEPRFVCNAYITDLMQAGEFLNNLASVFTGLPVWNGQQVSVVMDADADPVAQYTNANVKDGLFNYAGAALKSIHTAVHVQYIDKYDGYRAKTEYVADNEAIARYGLNIKQITAFGCDSRGQAARFGAWTLQTELRQQNAVTFEIGREGLKHLPYDIVQIMDNQYAGAELSGRVAAISGNVLTLDRPVSDAVGALVFYSEGGSLKSAKITAAAGNKVTLEREVPLQAGDTWVLSGKVKPRLYRAIGIKENTDAGTYTVTALLHDPKKYAAVDSFAHFDHEITTLHNTAPVLTDAAVNTDGGTVVVTWDNLAANGQVLTYDIKIYRNNSLYRHIPDAQTAEIRLENLPNGNYRAEIRGRNARGVLSAPLVKAWSIDYTVTGLRTTPKTLSVTVDWVLPQTVVSDLVFELWYSKTNNLQTATKLASLAYPQNSYTLTGVGVADVYYFWVRIRDIAGNTGEFTAAVQGRADNNPAPIVQQIQGAIGKSALSRELIDTLNRDMAAAAGLKVSAEAAERAKALQEEARARTAAIQAESSARTAELARKSSEIGTRIAATEAVNEQQAQQIQTVTSVQGNTAAGLEAEKKARADGDRAEAQARETLAVRLGNAESGISALRETVTRQDAARSSEINTLTAKLENVEVGGRNYALSTGTAGKVLTASGNNQTKTVTIDVSSALDLKQGDSLIISCDIELVNATSPHGKPYPRIGAEFSVIYADNSVGYFAAWYGEAVSGTTKTLKQRIVAKRTVAKEVKALRSFIVQARYQTSESIKVSNVKLERGTVATDWSPAPEDSNADTSALTALSAKVQQASSAVAEIGGKIQSLYTLKTEAIAGGRRAVAGVAVGADGKTGSGEILLMADKVAYVDPKDKTVTPAFVTVIENGKAKQALNGDLFATGSILAKHIAANQTIEAPTLNGATVNAGLIKGGTIRGARIEAVDLEAANIIGDVVAVRTFELKQSPLGYQELICQIPDSRKTRRTVIVPPVFAVAENGAVVSLQLHMDGVIQREVTIQSPEKRIARNEKFSVWVPGPPPLYIGTPLEVPLSFSVPFHLPKTGSISFQKGIDGAAHSLHILCRISGNFDYSPLGDLSGIVCLIV

SEQ ID NO: 2459 - protein, 275 aa, Neisseria meningitidis
MDGEGMSVGHYENFPVGSLILPRRLRKPIHAVYAFARTADDMADEGSMPSEARLAGLEGLQRELDVLASGGRSAHPLIARLDAEAVVPFGLDLQPFYDLLSAFSQDVVKTRYGNFGELADYCRRSANPVGRIMLALYGKTDAVCVAQSDGICTALQLVNFWQDVAVDWQKGRVYIPQDDLLKFGVSEGQIAEGRADAAFQRLMAYECRRAFRMLKAGSPLARELKGRIGLELRMIVLGAQLILQKLDACRYDVFAQRPVLDKKDWLIMLKRALWK

SEQ ID NO: 2460 - protein, 282 aa, Neisseria meningitidis
MDFKQFDFLHLISASGWEHLAEKAWAFGLNLAAALLIFLVGKWAAKRIVAVMRAAMTRAQVDATLISFLCNVANIGLLILVIIAALGRLGVSTTSVTALIGGAGLAVALSLKDQLSNFAAGALIILFRPFKVGDFIRVGGFEGYVREIKMVQTSLRTTDNEEVVLPNSVVMGNSIVNRSTLPLCRAQVIVGVDYNCDLKVAKEAVLKAAVEHPLSVQNEERQAAAYITALGDNAIEITLWAWANEADRWTLQCDLNEQVVENLRKVNINIPFPQRDIHIINS

SEQ ID NO: 2461 - protein, 480 aa, Neisseria meningitidis
VNYFPIFANLAGRPVLVVGGGSVAARKISLLLDAGAQVRVVANQLNAELSALAAENKILWLAEEFRAEHIRTVFLIIAASSDQALNRRVFQLAESCQKPVNVVDDRDYCSFIFPSIINRNPIQIAVSSSGSAPVLARLLREKLEALLPPSLGDMAEISGRWRDAVKAKLKSVTERRRFWEKQFNGRFAALVKNQQTAQAEQELAKQLEQNYQGGFVSLVGAGPGDAGLLTLKGLQEIQQADVVLYDALVSDGILSLVRRDAERIFVGKRARGGRTPQEDTNALMVRLAREGRRVVRLKGGDPFVFGRGGEELETLARHQIPFSVVPGITAAVGATAYAGIPLTHRDYAQSAVFVTGHRKADAPDIEWQTLARSRQTLVIYMGALKAALIAERLQQHGRSPDTPAAVISQGTLPAQKTATGTLANLAELAETAPNPALIVIGEVVGLHEKLAWFGENGEGENRVGQAYPALGGLNAGQRAA

SEQ ID NO: 2462 - protein, 215 aa, Neisseria meningitidis
  misc_feature 2, 3, 4: 'Xaa' is any amino acid
VXXXNALNGIPDEFSDIDCLINNAGLALGLDTADKADFEDWETMIQTNVLGLTFLTRKILPNMVARGGGYVMNLGSIAGNYAYAGSNVYGATKAFVRQFSLNLRAELADKNIRVTNIEPGLCGNTEFSNVRFKGDDEKAAGVYEGVEFIRPEDIAETALWLYRRPAHMNVNTIEIMPVAQTFAGMKVIKKAVPEVREDFEKQSMSLFSRIRSWFK

SEQ ID NO: 2463 - protein, 1071 aa, Neisseria meningitidis
MPKRTDLKSILIIGAGPIVIGQACEFDYSGAQACKALREEGYKVILVNSNPATIMTDPEMADVTYIEPIMWQTVEKIIAKERPDAILPTMGGQTALNCALDLARNGVLAKYNVELIGATEDAIDKAEDRGRFKEAMEKIGLSCPKSFVCHTMNEALAAQEQVGFPTLIRPSFTMGGSGGGIAYNKDEFLAICERGFDASPTHELLIEQSVLGWKEYEMEVVRDKNDNCIIICSIENFDPMGVHTGDSITVAPAQTLTDKEYQIMRNASLAVLREIGVDTGGSNVQFAVNPENGEMIVIEMNPRVSRSSALASKATGFPIAKVAAKLAVGFTLDELRNDITGGRTPASFEPSIDYVVTKIPRFAFEKFPAADDRLTTQMKSVGEVMAMGRTIQESFQKALRGLETGLCGFNPRSEDKAEIRRELANPGPERMLFVADAFRAGFTLEEIHEICAIDPWFLAQIEDLVKEEKAVSDGILSDLDFAALRRLKRKGFSDKRIAQLLGVKEKEVREHRYVLNLHPVYKRVDTCAAEFATETAYLYSTYEEECEARPSDRKKVMILGGGPNRIGQGIEFDYCCVHAALALRESGFETIMVNCNPETVSTDFDTSDRLYFEPLTLEDVLEIVRTENPWGVIVHYGGQTPLKLANALVENGVNIIGTSADSIDAAEDRERFQKVLNDLGLRQPPNRIAHNEEEALVKAEEIGYPLVVRPSYVLGGRAMQIVHSAEQLQKYMREAVQVSEDSPVLLDFFLNNAIEVDVDCVSDGKDVVIGGIMQHVEQAGIHSGDSGCSLPPYSLSEEIQDEIRRQTKAMAYALGVVGLMNVQFAVQDGVVFVLEVNPRASRTVPFVSKATGVPLAKVGARCMAGISLKEQGVEKEVVPDFYAVKEAVFPFIKFPGVDTILGPEMRSTGEVMGVGASFGEAYYKAQLGAGERLNPTGKIFLSVREEDKERVIKTAKNFQVLGYGICATRGTAQYLTEHGLIVQTINKVPEGRPHIGDALKNGEIALVVNTVSSDPQSVSDSHIIRQSALQQRVPQYTTTAGGEAMSEGAKSRDHLGVYSVQELHGRLKNRN

SEQ ID NO: 2464 - protein, 74 aa, Neisseria meningitidis
LVFWLQRLKYPLLLWIADMLLYRLLGGAEIECGRCPVPPMTDWQHFLPAMGTVSAWVAVIWAYLIIESEKNGRY

SEQ ID NO: 2465 - protein, 427 aa, Neisseria meningitidis
MFERSVIAMACIFALSACGGGGGGSPDVKSADTLSKPAAPVVAEKETEVKEDAPQAGSQGQGAPSTQGSQDMAAVSAENTGNGGAATTDKPKNEDEGPQNDMPQNSAESANQTGNNQPADSSDSAPASNPAPANGGSNFGRVDLANGVLIDGPSQNITLTHCKGDSCNGDNLLDEEAPSKSEFENLNESERIEKYKKDGKSDKFTNLVATAVQANGTNKYVIIYKDKSASSSSARFRRSARSRRSLPAEMPLIPVNQADTLIVDGEAVSLTGHSGNIFAPEGNYRYLTYGAEKLPGGSYALRVQGEPAKGEMLAGTAVYNGEVLHFHTENGRPYPTRGRFAAKVDFGSKSVDGIIDSGDDLHMGTQKFKAAIDGNGFKGTWTENGGGDVSGRFYGPAGEEVAGKYSYRPTDAEKGGFGVFAGKKEQD

SEQ ID NO: 2466 - protein, 147 aa, Neisseria meningitidis
MYLTQHTDYGLRVLIYTAINDDALVNISTIAVTYGISKSHLMKVVTALVKGGFLHSVRGKGGGLRLAAPPDRINIGSVVRHLEPMQLVECMGENNECLITPSCRLTGILGGAMKSFFTYLDGFTLQDLLNKPTYDLLYEPRIPIAVQ

SEQ ID NO: 2467 - protein, 107 aa, Neisseria meningitidis
MFKDELNEFIRLISDPESELDEWYLSDFKDEHIWEMQSYEAFSCLREAVPYLFAYPRYGYELLEIISALKETSDTTELFYEPGIVPLLIDLYKEDSYLVNMVKRIFK

SEQ ID NO: 2468 - protein, 230 aa, Neisseria meningitidis
MTAFVHTLSDGMELTVEIKRRAKKNLIIRPAGTHTVRISVPPCFSVSALNRWLYENEAVLRQTLAKTPPPQTAENRLPESILFHGRQLALTAHQDTQILLMPSEIRVPEGAPEKQLALLRDFLERQAHSYLIPRLERHARTTQLFPAPSSLTSAKTFWGVCRKTTGIRLNWRLVGAPEYVADYVCIHELCHLAHPDHSPAFWELTRRFAPYTPKAKQWLKIHGRELFALG

SEQ ID NO: 2469 - protein, 291 aa, Neisseria meningitidis
MLQGSLVALITPMNQDGSIHYEQLRDLIDWHIENGTDGIVAVGTTGESATLSVEEHTAVIEAVVKHVAKRVPVIAGTGANNTVEAIALSQAAEKAGADYTLSVVPYYNKPSQEGMYRHFKAVAEAAAIPMILYNVPGRTVVSMTNDTILRLSEIPNIVGVKEASGNVGSNIELINRAPEGFVVLSGDDHTALPFMLCGGHGVITVAANAAPKLFADMCRAALQGDIALARELNDRLIPIYDTMFCEPSPAAPKWAVSALGRCEPHVRLPLVPLTEGGQAKVRAALKASGQL

SEQ ID NO: 2470 - protein, 76 aa, Neisseria meningitidis; identical to SEQ ID NO: 841

SEQ ID NO: 2471 - protein, 158 aa, Neisseria meningitidis
MKTNFKQKIIEQARSEGLQVTALREQVLDIVLQQSGVIKAYNVLSQMQQQSEGVLAPPTAYRALDFWAEQGVLHKVAAVNGYILCSHAQHECDDHCHDHEEAEAHHSAFILVCTECGTADEQTLSHEWAALRAGVAESGFALKEEHVVLTGICKKCQK

SEQ ID NO: 2472 - protein, 124 aa, Neisseria meningitidis
VDEKQKIKILDFQIDLSSIFNSYKNQMGINIQDKNLKNNFCSFMEELLNDGSIRLHDYTDGIGIPLTGTSKEQVQKLKDIWPTLEDAQAIWPEDPWYYLEWLWWDIACPIDLADLPNIDIYEQA

SEQ ID NO: 2473 - protein, 231 aa, Neisseria meningitidis
MMKDLNLSNSLFKGYNDKHGLMICGYEWGWSKADEAAYVAGEYKLPENKIDHTFANKSLYFGEQAKKWRYDNTIKNWFEMWGHPLDENGLGGAFEKSLVQTNWAATQGNTIDNPDKFTQPEHIDNFLYHIEKLRPKVILFMGSRLADFLNNQNVLPRFEQLVGKQTKPLETVQKEFDGTRFNVKFQSFEDCEVVCFPHPSASRGLSYDYIALFAPEMNRILSDFKTTRGFK

SEQ ID NO: 2474 - protein, 456 aa, Neisseria meningitidis
MINPIASLSPLDGRYAQSVEALRPIFSEYGLMKARVKVELNWLKALAAEPKIAEVPPFSAETLAEIDTVIENFSLEDAAAVKAIEATTNHDVKAIEYWLKKRFAEVPEVAAVSEFIHFACTSEDINNLSHALMLQEAREAVLLPKLAEIIGKLTAMAHDLAAVPMMSRTHGQPATPTTLGKETANVVYRLQRQFKNLQAQEFLGKINGAVGNYNAHMAAYPDVDWETHCHNFVEIGLGLTFNPYTIQIEPHDYMAEFFQTLSRINTILIDFNRDVWGYISLGYFKQKVKAGEVGSSTMPHKVNPIDFENSEGNLGMANAVLGFLAEKLPVSRWQRDLTDSTVLRNMGVGVGYAVLGFAAHLRGLNKLEPNPAALAADLDATWELLAEPIQTVMRRYGVANPYEKLKDLTRGKGGITPEVLKVFIGSLEIPAEAKAKLLELTPALYVGKAEALAKRI

SEQ ID NO: 2475 - protein, 489 aa, Neisseria meningitidis
MEKHNGTYRDLHRPASEFATRDEYLEHELQIMQPKRWRPNLPFRDYRFEWEDLIPAMAGTIGKVVMVGAVAAAFAAPLGLPDSFVLENVRYELLIAAAFILLVSGFFLPGANLPGTHGPLIPMIPIVVSAGGHPLAFGISIAVLGLLMALFRGGSIMAKLTSNGVCGGLLLYLGFIGTTGQVKKLFSWASGFNMPYIAFTVIIVTIVMYALLEHWKKRWLAVPLGCLIAGVVAFALGAPFEFHTAPGLPPMSPAYWWGENSGWHLGLPTAESFLVVFPFAVLAVAMWSPDFLGHQVFQKISYPEKTDKVLMNIDDTMTSCSVRQAVGSILGGANFTSSWGTYIVPASIAKRPIPGGAVLTAVLCIIAGLWGYPMDLAIWQPVLSVALVVGVYLPLLEAGMEMTRKGKTTQSAAIVVFSSALVNPVFGWALTMLLDNLGLIGCKERSAQLGFAGRVLIPAVGFLILCVAMGAVGMLPGIPPFLEHFKSLG

SEQ ID NO: 2476 - protein, 109 aa, Neisseria meningitidis
MGSLIIEDLQESFEKEAVKGKEITVHYTGWLEDGTKFDSSLDRRQPLTITLGVGQVIKGWDEGFGGMKEGGKRKLTIPSEMGYGAHGAGGVIPPHATLIFEVELLKVYE

SEQ ID NO: 2477 - protein, 360 aa, Neisseria meningitidis
MQTANKKTILVTGGAGFIGSAVVRHIIQNTQDSVVNLDKLTYAGNLESLTDIADNPRYAFEQVDICDRAELDRVFAQHRPDAVMHLAAESHVDRSIGSAGEFIQTNIVGTFNLLEAARAYWQQMPSEQHEAFRFHHISTDEVYGDLGGTDDLFTETAPYAPSSPYSASKASSDHLVRAWLRTYGLPTIVTNCSNNYGPYHFPEKLIPLMILNALDGKPLPVYGDGMQIRDWLFVEDHARALYQVVTEGVVGETYNIGGHNEKANIEVVKTICALLEELAPEKPAGVARYEDLITFVQDRPGHDVRYAVDAAKIRRDLGWLPLETFESGLRKTVQWYLDNKTWWQNVLNGSYRLERLGTGK

SEQ ID NO: 2478 - protein, 378 aa, Neisseria meningitidis
MKNISLSPPAMLGILGGGQLGRMFTVAAKTMGYKVTVLDPDPDAPAAEFADCHLCAPFNDQAALDELAKCAAVTTEFENVNADAMRFLAKHTNVSPGSDCVAIAQNRIQEKAWIRKAGLQTAPYQAICKAEDITEESIQFLPGILKTATLGYDGKGQIRVKTVDELKAAFAEHRGVDCVLEKMVDLRGEISVIVCRLNNDNVQTFDPAENIHENGILAYSIVPARLSADIQQQARQMAQRLADELNYVGVLAVEMFVVGDTHELVVNEIAPRPHNSGHHTVDACAADQFQQQVRLMCNLPPADTKLLSSCCMANILGDVWQEDGGEPDWFPLQSRPDAHLHLYGKKTAHKGRKMGHFTVLTTDSDTAFQEAKKLHQSL

SEQ ID NO: 2479 - protein, 716 aa, Neisseria meningitidis
MLTDLEKNAIRDHYQNIGKNLPGFRPRASQREMIAAVANAFSRTLAREEGGEPPKREGESIAVIEGPTGVGKSLAYLLAGGIMAQTRGKRLIVSSATVALQEQLVDRDLPFLVEKSGLELTFALAKGRGRYLCPYKLYQLTQNNAQQNLLGFEAPEVLWDSKPKPEELKLLHDIADEFSARRFNGDRDTWPEKIDDAIWLKVTNDRHGCLKTACPNRPECPFYLARDVLETVDVVVANHDLLLADISMGGGVILPAPENSFYCIDEAHHLPKKALSRFAAEHSWNIAVWTLEKLPQLTGKIAALTDKAELANLADEAAASLLDSLHEWQFHLAEEPSLSLGPSENDRRTNSEPTWLWEDGKIPEGLETTVSNTAVAVRSLLKHVIGLNDALSAARREKEQDGALLDRLTGDFGIFIARIEQISAVWDLLSTVPLEGEEPLAKWITRRADDKNDYIFNASPISSASHLANSLWRRAAGAVLTSATLQSLGNFNLMLRQTGLQWLPETTTLALKSPFDFEKQGELYIPPIYASPKDPEAHTAAIIEWLPKLISPGEAIGTLVLFSSRKQMQDVALRLPGDYLPLLLVQGELPKAVLLQKHHRAIEEGKASIIFGLDSFAEGLDLPGTACVQVIIAKLPFAMPDNPIEKTQNRWIEQRGGNPFIEITVPEAGIKLIQAVGRLIRTEQDYGRVTILDNRVKTQRYGQQLLAGLPPFKRIG

SEQ ID NO: 2480 - protein, 210 aa, Neisseria meningitidis
MTVWVGLTGGIGSGKSAAAQCFADLGVPRIDADAAAHSLTASDGIALPEIRRLFGDTVFDTQGLLRRDILRKEVFASPSRKALLESVMLPLIFSEIKKQQETFTDAAYGIVEIPLLTEKRQFIILIRRVLTISAPVEKRIGRVMARSGLTRGEVAAVISHQASESERLLLADDVLLNDGSLKSLREKTMRLHAFYSGIFASKPTQGKHND

SEQ ID NO: 2481 - protein, 103 aa, Neisseria meningitidis; identical to SEQ ID NO: 392

SEQ ID NO: 2482 - protein, 209 aa, Neisseria meningitidis; identical to SEQ ID NO: 1305

SEQ ID NO: 2483 - protein, 542 aa, Neisseria meningitidis
MISTNGITMQFGAKPLFENVSVKFGEGNRYGLIGANGSGKSTFMKILGGDLEQTAGEVAIENGVRLGKLRQDQFAYEDMRVLDVVMMGHTEMWAAMTERDAIYANPEATEDDYMKAAELEAKFAEYDGYTAEARAAELLSGVGISEDLHNAKMAEVAPGFKLRVLLAQALFSKPDVLLLDEPTNNLDINTIRWLEGVLNQYDSTMIIISHDRHFLNEVCTHMADLDYNTITIYPGNYDDYMLASAQSRERALKDNAKAKEKLQELQEFVARFSANKSKARQATSRLKQADKIKSEMVEVKPSTRQNPYIRFEADEKAKLHRQAVEVEKLAKRFETQLFKNLNFILEAGQRLAIIGPNGAGKSTLLKLLAGAYNPEYSDGLLPDEGSIKWAEKASVGYYPQDHENDFDVDMDLSEWMRQWGQDGDDEQVIRGTLGRLLFGSNDVVKKVKVLSGGEKGRMLYGKLLLLKPNVLVMDEPTNHMDMESIESLNMALEKYNGTLIFVSHDRQFVSSLATQIIELDGKGGYEHYLGDYESYLEKKGVA

SEQ ID NO: 2484 - protein, 351 aa, Neisseria meningitidis
MTILSDVKALGQQIWLDNLSRSLVQSGELAQMLKQGVCGVTSNPAIFQKAFAGDALYADEVAALKQQDLTPKQRYETMAVADVRAACGVCLAEHESTGGKTGFVSLEVSPELSKDAQGTVEEARRLYAAIGCKNAMIKVPATDAGIDALETLVSDGISVNLTLLFSRAQTLKAYAAYARGIAKRLAAGQSVAHIHVVASFFISRVDSALDTTLPDRLKGKIAIALAKAAYQDWEQYFTAPEFAALEAQGANRVQLLWASTGVKNPAYPDTLYVDSLIGAHTVNTVPDATLKAFIDHGTAKATLTEGVEEAQAQLAETAALGIDVETLATRLQEDGLKQFEEAFEKLLAPLV

SEQ ID NO: 2485 - protein, 527 aa, Neisseria meningitidis
MPNKKKKAAFARAATENGVPDVSNIKNSYDDLMYESKAFSQTAINALEARARMMGLQPAPAANAKVLELGCSMGGNIITQALYYPDAEFVGIDLSGRQVAQGNAIIEKMGLKNVRLEEKDILTVDESFGKFDYIIVHGIWSWVPDAVKDKIFSICRNNLTEHGIAYISYNVYPGWKRQEQLREIMYFAGRDVLEEPLEARTRKGLDALKALAEILENDKGLDGGGKLPAIQKILNHNFYYIAHEYMEAFNDPIYVNGFIEWANRHRLAYIGDADLHASFVSWMAEHTRERILALAGGDYIAKEFYSDILSDRQFRRSLLCREEVGDTVRRDESVAVEVIESLNFRPARGETINFDENDTLLSGIRDVMKTGEPFKTEDVAENLARRFPGLTFDRMKINSQLLLQTILGRFSVSSDNAGKQFFEDHKTYVPARFTDYAAAFVEHGAEAFVRPANRYNESTPSFGYGHLYIMRQLSRPTSKQALIETVAENLNIVSTTPDGLTFHPPAEVYVEEILADLADRHFLVSAD

SEQ ID NO: 2486 - protein, 752 aa, Neisseria meningitidis
MYTRIMEISPWTLRSAKLEKEHKRLQESLTSLGNGYMGMRGSFEETYSADSHLGTYIAGVWFPDKTRVGWWKNGYPKYFGKAINALNFSKVKIFVDGQEVDLAKNDVAGFSVELDMQHGVLRRSFTVFGVRFDVCKFLSVAQKELALIRWEAVSIDGKTHQVRIDSIIDADVKNEDSNYEEKFWQVLDKGVSDDRSYIATQTVTNPFGVEQFIVNAEQTFAGSFKALGGSQTDWQVSNSFEAEVGGTPKTFEKRVIVTTSRDYQGLEAVKAAGRALSEKVAGVAFETLLDAHKAGWLHRWEIADVVIEGSDEAQQGIRFNLFQLFSTYYGEDARLNIGPKGFTGEKYGGATYWDTEAYAVPLYLALAEPEVTRNLLQYRRNQLPQAQHNAREQGLAGALYPMVTFTGIECHNEWEITFEEIHRNGAIPYAIYNYTNYTGDEGYLAKEGLEVLVEVSRFWADRVHFSKRNGKYMIHGVTGPNEYENNINNNWYTNTLAAWVLDYTREALAKYPRPDLNVRAAELEKWADISANMYRPHDEELGVFVQHDGFLDKDIRPVSALSPDDLPLNQKWSWDKILRSPFIKQADVLQGIYFFGDRFNIDEKRRNFDFYEPMTVHESSLSPCIHSILAAELGKEEKAVEMYRRTARLDLDNYNNDTEDGLHITSMTGSWLAIVQGFAQMKTWGGKLSFAPFLPSAWTGYAFHINYRGRLIKVAVGKENVVFTLLKGEPLDLQVYGKDITLNGSHTAALEK

SEQ ID NO: 2487 - protein, 459 aa, Neisseria meningitidis
MFAFKSLLDMPRGEALAVVVALIAAMGYTIISLEWLPHMSIIAAIVVLILYGLVRGLKYNDMQQGMIGALNQGMGAIYLFFFIGLMVSALMMSGAIPTLMYYGFGLISPTYFYFSAFALCSVIGVSIGSSLTTCATVGVAFMGMAAAFHADMAMTAGAIVSGAFFGDKMSPLSDTTGISASIVGIDLFEHIKNMMYTTIPAWLISAALMLWLLPSVAAQDLNSVESFRSQLEATGLVHGYSLIPFALLVVLALMRVNAVVAMLFTVMVAVAVTYLHSTPDLRQLGAWFYGGYKLEGEAFKDIAKLISRGGLESMFFTQTIVILGMSLGGLLFALGAIPSLLDAVRSFLTNAGRATFSVAMTSVGVNFLIGEQYLSILLSGETFKPVYDKLGLHSRNLSRTLEDAGTVINPLVPWSVCGVFISHALGVPVWEYLPYAFFCYLSLALTLLFGWTGLTLSKK

SEQ ID NO: 2488 - protein, 288 aa, Neisseria meningitidis; identical to SEQ ID NO: 464

SEQ ID NO: 2489 - protein, 60 aa, Neisseria meningitidis
MESLVQRRICYKAVGSFSSGRDVLKYSGLNLNQDKATKPQTVQIVRQGEATPYWFKFNPL

SEQ ID NO: 2490 - protein, 194 aa, Neisseria meningitidis
LYCLRLRRLVLIFVNPLYLHQFHETQVGSVKQLIAHFDRLIDELDKQIDDHTHTHFDGKAQVAEQIKGIGSITTATLMAMLPELGRLSHKRIASLAGIAPHPRESGETKFKSRCFGGKSAVRKALYMATVAATRFEPLIRDFYQRLLSEGKPYKVAVTACMRKLLTISNARMRDYFAENDTAENDTAENGIRTA

SEQ ID NO: 2491 - protein, 74 aa, Neisseria meningitidis; identical to SEQ ID NO: 444

SEQ ID NO: 2492 - protein, 118 aa, Neisseria meningitidis
MDKIFLHGIKADTLIGVYGWERERLQTLIVDLDIGVPEKAGSDDDIANTVHYAEVCETLRRHLKEQDFLLLEALAEYIADLVLGYFGAVWVRVKIVKPGILEGVREVGVEIERGKRED

SEQ ID NO: 2493 - protein, 87 aa, Neisseria meningitidis; identical to SEQ ID NO: 1364

SEQ ID NO: 2494 - protein, 610 aa, Neisseria meningitidis
  misc_feature 604, 605: 'Xaa' is any amino acid
MRYDKLTAKFQQALAEAQSLALAADGSYLEAGFVLKALLDDQNSGAAALLAHAGVNVPQVKQRLQQHLNSLPKVSGQGGDILPSRELQAVLNLMDKAATKRGDAYIASELFLLALVQQNDAAGKILKEAGATEQNINAAIDAVRGGQNVNDANAEDQRDALKKYTLDLTQRARDGKLDPVIGRDDEIRRAIQVLQRRTKNNPVLIGEPGVGKTAIVEGLAQRIVNGEVPESLRNKRLLVLDLAALIAGAKYRGEFEERLKGVLNDLAKDDGNTLIFIDEIHTLVGAGKTDGAMDAGNMLKPALARGELHCIGATTLDEYRQYIEKDAALERRFQKVLVGEPSVEDTIAILRGLQERYEIHHGIDITDPAIVAAAELSDRYITDRFLPDKAIDLIDEAASRVKMEKETKPEAMDKIDRRLIQLRMEKAHVEKEKDDASKKRLELIDEEIDGLEKEYADLDEIWKAEKAISDGAANIKKQIDEVKIKIEQAKRQGDLALASKLMYEDLEHLEKQRAAAERADTDSTKPANKLLRNNVGAEEIAEVVSRMTGIPVSKMMEGERDKLLKMEEVLHRRVVGQDEAVRAVSDAIRRSRSGLADPNKPYGXXTHLIN

SEQ ID NO: 2495 - protein, 392 aa, Neisseria meningitidis
MAFLKLTEQNVQGKTVLIRADMNVPFKDGKISDDTRIRASLASIQYCMDNGASVIVMTHLGRPTEGEFHPEDDVAPVAAHLGGLLGKNVKVLNDWRENKPALNAGDVVMLQNVRINKGEKKNDLELGKAYASLCDVFVNDAFGTAHRAQASTEAVAQAAPVACAGVLMAGELDALGKALKQPARPMVAIVAGSKVSTKLTILESLADKVDQLIVGGGIANTFLLAEGKAIGKSLAEHDLVEESKKIMAKMAAKGGSVPLPTDVVVAKAFTADAEAVVKDIADVAEDDMILDIGPKSAAELADLLKAAGTVVWNGPVGVFEFDQFAGGTKALAEAIAQSKAFSIAGGGDTLAAIAKFGVTDQIGYISTGGGAFLEFLEGKELPAVAALEKRGA

SEQ ID NO: 2496 - protein, 203 aa, Neisseria meningitidis
MKNNDCFRLKNPQSGMALIEVLVAMLVLTIGILALLSVQLRTVASVREAETQTIVSQITQNLMEGMLMNPTIDSDSNKKNYNLYMGNHHTLSVVDGDFQVGVIKTKTQLAEAQLKRFSYELKNALPDAAAIHYAVCKDSSGNAPTLSGNAFSSNCDNKANGDTLIKVLWVNDSAGDSDIARTNLEVSGDNIVYTYQARVGGRE

SEQ ID NO: 2497 - protein, 275 aa, Neisseria meningitidis; identical to SEQ ID NO: 67

SEQ ID NO: 2498 - protein, 125 aa, Neisseria meningitidis
MCELKNFRRNITCFEGYDENSFIGKWYDDGVWDDEEYWKLENDLIEVRKKYPYPMDIPRDIVIGIGTIIDFLMVQNWKLFEIKASPWLPDSVGIHERYERFTTMLRYIFTEKDIVNVRFDYYNKK

SEQ ID NO: 2499 - protein, 228 aa, Neisseria meningitidis; identical to SEQ ID NO: 380

SEQ ID NO: 2500 - protein, 148 aa, Neisseria meningitidis
MQHEEGNRQRPQGELLLRTVAMPRDTNPNQDIFGGWIMSQMDLGGGILAAEIAQGRIVTVAVQEMNFIRPVKVGNVVCCYGHCVRVGNTSLQLKVEVWVKTLMNDCVTEDRHLVTEAVFTYVAIDAEGNPRPIPKEGNPILAGLLPTP

SEQ ID NO: 2501 - protein, 188 aa, Neisseria meningitidis
MPSEACWRFRRHILIEKMMTLKTAPLKRRFAAMLYEMLLVGAATCLAALFAGIAAIFLNPVSIAVSALVTSILIMGSWWLYFRANWHGQGQTLAMRTWKIGLCDLNGIQPSLYLLRLRFIWACIFIVFIPMLAYAGLRHFLGIPPKGAAGAALIWLILPWGFALLNPDRQFLYDFLAGTRLVAVKGKP

SEQ ID NO: 2502 - protein, 1552 aa, Neisseria meningitidis
MKTKRFKINAISLSIFLAYALTPYSEAALVRDDVDYQIFRDFAENKGKFFVGATDLSVKNKQGQNIGNALSNVPMIDFSVADVNRRTLTVIDPQYAVSVKHVKGDEISYYGHHNGHLDVSNDENEYRSVAQNDYEPNKNWHHGNQGRLEDYNMARLNKFVTEVAPIAPTSAGGGVETYKDKNRFSEFVRVGAGTQFEYNSRYNMTELSRAYRYAIAGTPYQDVNVTSNLNQEGLIGFGDNSKHHSPEKLKEVLSQNALTNYAVLGDSGSPLFAYDKQEKRWVFLGAYDYWAGYQKNSWQEWNIYKKEFADKIKQRDNAGTIKGNGEHHWNITFGTNSKIGSTAVRLAGNEKDANNGQNVTFEDNGTLVLDQNINQGAGGLFFKGDYTVKGINNDITWLGAGIDVTDGKKVVWQVKNPNGDRLAKIGKGTLEINGTGVNQGQLKVGDGTVILNQQADADKKVQAFSQVGIVSGRGTLVLNSSNQINPDNLYFGFRGGRLDANGNDLTFEHIRNVDEGARIVNHNTSHASTITLTGKSLITNPNSLSVHSIQNDYDEDDYSYYYRPRRPIPQGKDLYYKNYRYYALKSGGSVNAPMPENGVTENNDWVFMGYTQEEAKKNAMNHKNNQRISGFSGFFGEENGKGHNGALNLNFNGKSAQNRFLLTGGTNLNGKISVTQGNVLLSGRPTPHARDFVNKSSARKDAHFSKNNEVVFEDDWINRTFKAAEIAVNQSASFSSGRNVSNITANITATDNAKVNLGYKNGDEVCVRSDYTGYVTCNTGNLSDKALNSFGATQINGNVNLNQNAALVLGKAALWGQIQGQGNSRVSLNQHSKWHLTGDSQVHNLSLADSHIHLNNASDAQSANQYHTLKINHLSGNGHFHYLTHLAENLGDKVLVKESASGHYQLHVQDKTGEPNQEGLNLFDASSVQDRSRLSVSLANNHVDLGALRYTIKTENGITRLYNPYAENRRRVKPVPSPATNTASQAQTDSAQIAKPQNIVVAPPSPQANQAEEAKRQQAKAEQVKRQQAEAERKSAELAKQKAEAEREARELATRQKAEQERSSAELARRHEKEREAAELSAKQKVEAEREAQALAVRRKAEAEEAKRQAAELARQQEEARKAAELAAKQKAETERKAAEIAEQKAEAEREAAELAKQKAEEEGRQAAQSQPKRRNRRAIPPELSSDATTRALPRIARNSNPDASDYEKIPLDALEDEDVSESVDTSDKQPQDNTELHEKVETVSLQPRAAQPRAQAAAQADAVSTNTNSALSDAMASTQSILLDTGASLTRHIAQKSRADAEKNSVWMSNIGYGRDYASAQYRRFSSKRTQTQIGIDRSLSENMQIGGVLTYSDSQHTFDQASGKNTFVQANLYGKYYLNDAWYVAGDIGAGSLRSRLQTQQKANFNRTSIQTGLTLGNTLKINQFEIVPSAGIRYSRLSSADYKLGNDSVKVSSMSVKTLTAGLDFAYRFKVGNLTVKPLLSAAYFANYGKGGVNVGGNSFAYKADNQQQYSAGAALLYRNVTLNVNGSITKGKQLEKQKSGQIKIQIRF

SEQ ID NO: 2503 - protein, 360 aa, Neisseria meningitidis
MFLWLAHFSNWLTGLNIFQYTTFRAVMAALTALAFSLMFGPWTIRRLTALKCGQAVRTDGPQTHLVKNGTPTMGGSLILTAITVSTLLWGNWANPYIWILLGVLLATGALGFYDDWRKVVYKDPNGVSAKFKMVWQSSVAIIAGLALFYLAANSANNILIVPFFKQIALPLGVVGFLVLSYLTIVGTSNAVNLTDGLDGLATFPVVLVAAGLAIFAYASGHSQFAQYLQLPYVAGANEVVIFCTAMCGACLGFLWFNAYPAQVFMGDVGALALGAALGTVAVIVRQEFVLVIMGGLFVVEAVSVMLQVGWYKKTKKRIFLMAPIHHHYEQKGWKETQVVVRFWIITIVLVLIGLSTLKIR

SEQ ID NO: 2504 - protein, 258 aa, Neisseria meningitidis
MRAVPPPHISITGLGYLGLPLAQKFYQHGSRVAAIKRSLTSDDINLPIHLDTFDLGSTDAFQTALWRHHADKPVWYFLLPPSSLTHYADTVKQWAELARACNVQHLIFTSSTSVYGDTARECDETATPDPQTESARQILAAEQHLLDSGISNIDILRLGGLYCAERHPVSRLVQKQNIPGGNRPINIVHRNIAVESLFQTAFNPGGRRLKNIIEPRHPTRREFFTEEAAKLDLPAPDFAPDDSRGKIIRTVCDNGLSL

SEQ ID NO: 2505 - protein, 153 aa, Neisseria meningitidis
MKPQKSLRARAMDILSRQEVSRIGLKRKLAPHAESEEELENVLNEFAERNWQSDLRYAEAYIRSKSRKHGSLRLKQALAQQGIDEETSRNLLPDRSSEKQAAIAVLRKKFKHPAADLKEKQKQARFLAYRGFDADTVQTALKHAWDENWEDGC

SEQ ID NO: 2506 - protein, 216 aa, Neisseria meningitidis
MPSENTKGTTMTTHHVELRKVTKRFGAQKAVNQVDLVLKAGESVGLAGHNGAGKSTIMKLILGLITPTEGEVMLLGERTGSKAGARLRSQIGYLPETVALHPSLTGIETLDFYAKLKKQPLTQNRGLLERVGISQAAHRRVGTYSKGMRQRLALAQALLGEPKVLLFDEPTTGLDPASRQMFYEVVRELNGRGATVLLSTHALAELDGHADRIIVD

SEQ ID NO: 2507 - protein, 300 aa, Neisseria meningitidis
MDTAKKDILGSGWMLVAAACFTIMNVLIKEASAKFALGSGELVFWRMLFSTVALGAAAVLRRDTFRTPHWKNHLNRSMVGTGAMLLLFYAVTHLPLATGVTLSYTSSIFLAVFSFLILKERISVYTQAVLLLGFAGVVLLLNPSFRSGQETAALAGLAGGAMSGWAYLKVRELSLAGEPCWRVVFYLSVTGVAMSSVWATLTGWHTLSFPSAVYLSCIGVSALIAQLSMTRAYKVGDKFTVASLSYMTVVFSALSAAFFLGEELFWQEILGMCIIILSGILSSIRPTAFKQRLQSLFRQR

SEQ ID NO: 2508 - protein, 140 aa, Neisseria meningitidis
MSEQTALAVCADGVETALAEAASLLEEGCGSVLVLAADDPLPEGYAVSATRAPFAYALAMVLTKGTRYSLTLSASDDMPSEAGMLPEAYWSGLEWVRFLLNGSRECCRVYRNREWLWQPASCRLKISAMSAPSTTWYRRY

SEQ ID NO: 2509 - protein, 346 aa, Neisseria meningitidis
MNTPIPFSERLIRWQKQHGRHHLPWQVKNPYCVWLSEIMLQQTQVATVLDYYPRFLEKFPTVQTLAAAPQDEVLSLWAGLGYYSRARNLHKAAQQVVRQFGGTFPSERKDLETLCGVGRSTAAAICAFSFNRRETILDGNVKRVLCRVFARDGNPQDKKFENSLWTLAESLLPSENADMPAYTQGLMDLGATVCKRTKPLCHQCPMADICEAKKQNRTAELPRKKTAAEVPTLPLYWLIIRNRNGAILLEKRPAKGIWGGLYCVPCFESLNGLSDFAAKFSLTMADMDEQTALTHRLTHRLLMITPFEGQMPSESPSDGIWIKPTHLKDYGLPKPLEIYLNGNRLE

SEQ ID NO: 2510 - protein, 106 aa, Neisseria meningitidis
MITLTENAAKHINDYLAKRGKGLGVRLGVKTSGCSGMAYNLEFVDEADGDDLIFEGHGARIYIDPKSLVYLDGTQVDYTKEGLQEGFKFENPNVKDSCGCGESFHV

SEQ ID NO: 2511 - protein, 249 aa, Neisseria meningitidis
MSTFFRQTAQAMIAKHIDRFPLLKLDQVIDWQPIEQYLNRQRTRYLRDHRGRPAYPLLSMFKAVLLGQWHSLSDPELEHSLITRIDFNLFCRFDELSIPDYSTLCRYRNWLAQDDTLSELLELINCQLTEKGLKVEKASAAVVDATIIQTAGSKQRQAIEVDEEGQISGQTTPSKDSDARWISTNSVTNNIPVPMRKAISRNCTLPPPMPMSANTCRRCWKDCPKVRPSMPIKATTMRKTGNIWKNISC

SEQ ID NO: 2512 - protein, 171 aa, Neisseria meningitidis
MPKLHMFYLGGNAGRSNIEVHDIQFAVCDDYREAVPALKAAWFGDADKIHIDGWQVVEWADGYDIAVSETPKTEMPSEHAPRLYFANVGGYRAGQLAEAHAFGLFAAATPAEAKQKALQTLLTDHVQQHKDNLKDVDNLLALDRIGNFHIRLTPNPHGKPAEIGFQGYLPI

SEQ ID NO: 2513 - protein, 601 aa, Neisseria meningitidis
MRYKPLLLALMLVFSTPAVAAHDAAHNRSAEVKKQTKNKKEQPEAAEGKKEKGKNGAVKDKKTGGKEAAKEGKESKKTAKNRKEAEKEATSRQSARKGREGDKKSKAEHKKAHGKPVSGSKEKNAKTQPENKQGKKEAKGQGNPRKGGKAEKDTVSANKKVRSDKNGKAVKQDKKYREEKNAKTDSDELKAAVAAATNDVENKKALLKQSEGMLLHVSNSLKQLQEERIRQERIRQERIRQARGNLASVNRKQREAWDKFQKLNAELNRLKTEVAATKAQISRFVSGNYKNSQPNAVALFLKNAEPGQKNRFLRYTRYVNASNREVVKDLEKQQKALAVQEQKINNELARLKKIQANVQSLLKKQGVTDAAEQTESRRQNAKIAKDARKLLEQKGNEQQLNKLLSNLEKKKAEHRIQDAEAKRKLAEARLAAAEKARKEAAQQKAEARRAEMSNLTAEDRNIQAPSVMGIGSADGFSRMQGRLKKPVDGVPTGLFGQNRSGGDVWKGVFYSTAPATVESIAPGTVSYADELDGYGKVVVVDHGENYISIYAGLSEISVGKGYMVAAGSKIGSSGSLPDGEEGLYLQIRYQGQVLNPSSWIR

SEQ ID NO: 2514 - protein, 159 aa, Neisseria meningitidis; identical to SEQ ID NO: 929

SEQ ID NO: 2515 - protein, 144 aa, Neisseria meningitidis
MPACFCPHCKTRLWVKETQLNVAQGFVVCQKCEGMFKAKDHLASTKEPIFNDLPEAVSDVKLVHRIGTRAIGKKQISRDEIAGILNGGTTQPDIPPATAATPAAAPQVTVPPAAPARQDGFNWTIATLFALIVLIMQLSYLVIL

SEQ ID NO: 2516 - protein, 337 aa, Neisseria meningitidis
MQVYYDKDADLSLIKGKTVAIIGYGSQGHAHAANLKDSGVNVVIGLRQGSSWKKAEAAGHVVKTVAEATKEADVVMLLLPDETMPAVYHAEVAANLKEGATLAFAHGFNVHYNQIVPRADLDVIMVAPKGPGHTVRSEYKRGGGVPSLIAVYQDNSGKAKDIALSYAAANGGTKGGVIETTFREETETDLFGEQAVLCGGVVELIKAGFETLTEAGYAPEMAYFECLHEMKLIVDLIFEGGIANMNYSISNNAEYGEYVTGPEVVNASSKEAMRNALKRIQTGEYAKMFIQEGNVNYASMTARRRLNADHQVEKVGAQLRAMMPWITANKLVDQDKN

SEQ ID NO: 2517 - protein, 197 aa, Neisseria meningitidis
MSELLNYVASCRLPTEWGVFTMHGFEEAGGQEHVALTVGNFSDGNPVLTRIHSECLTGDALFSRKCDCGPQLEAAMRAVQTEGRGIIVYLRQEGRGIGLINKIRAYHLQDQGMDTVEANLALGLPVDARDFRLAQSIYEYLGIRSVKLLTNNPEKIQTLKDAGINVVERIPLHVGENLENKRYLQTKADKLGHLMSE

SEQ ID NO: 2518 - protein, 328 aa, Neisseria meningitidis; identical to SEQ ID NO: 372

SEQ ID NO: 2519 - protein, 168 aa, Neisseria meningitidis
MDFFDFFAQGKYKKIATEQGLDRKYFIFHYIVCNLSAISSFCLMKVVHSYTILCLLIMIIGIAFGFILRNRVLSIVKNKQKFLSDMFPLEMPFFSRVYKIPILARFLNRGMKWLYLQNFFCLVMICFSISLILNEERGWMPYFICYWFGLCYPANTYYVFLSRDYKRI

SEQ ID NO: 2520 - protein, 231 aa, Neisseria meningitidis
MKLKTLALTSLTLLALAACSKQAETSVPADSAQSSSSAPAAPAELNEGVNYTVLSTPIPQQQAGKIEVLEFFGYFCPHCAHLEPVLSEHIKTFKDDTYMRREHVVWGDEMKPLARLAAAVEMAGESDKANSHIFDAMVNQKINLADTDTLKKWLSEQTAFDGKKVLAAFEAPESQARAAQMEELTNKFQISGTPTVIVGGKYQVEFKDWQSGMTTIDQLVDKVREEQKKPQ

SEQ ID NO: 2521 - protein, 196 aa, Neisseria meningitidis; identical to SEQ ID NO: 1629

SEQ ID NO: 2522 - protein, 444 aa, Neisseria meningitidis
MTDLNTLFANLKQRNPNQEPFHQAVEEVFMSLDPFLAKNPKYTQQSLLERIVEPERVVMFRVTWQDDKGQVQVNRGYRVQMSSAIGPYKGGLRFHPTVDLGVLKFLAFEQVFKNALTTLPMGGGKGGSDFDPKGKSDAEVMRFCQAFMTELYRHIGADTDVPAGDIGVGGREIGYLFGQYKKIRNEFSSVLTGKGLEWGGSLIRPEATGYGCVYFAQAMLQTRNDSFEGKRVLISGSGNVAQYAAEKAIQLGAKVLTVSDSNGFVLFPDSGMTEAQLAALIELKEVRRERVATYAKEQGLQYFENQKPWGVAAEIALPCATQNELDEEAAKTLLANGCYVVAEGANMPSTLGAVEQFIKAGILYAPGKASNAGGVATSGLEMSQNAIRLSWTREEVDQRLFGIMQSIHESCLKYGKVGDTVNYVNGANIAGFVKVADAMLAQGF

SEQ ID NO: 2523 - protein, 125 aa, Neisseria meningitidis
VISKSLFGNRLKEKRKFLGLTQAQAAEKAGIERETWGKYERGVFMPSGDVLLSFLNMGIDVSSLFAAEQGIRPSENSEISKEESELLGYYRQASDNGKFVILSVAKGAEKKAAENTQVSATHKTA

SEQ ID NO: 2524 - protein, 107 aa, Neisseria meningitidis
MNAFAQALSSALDRCIATNTVAKQNRPVGFLYREAPVFENDSGWRFFSGDETDEYTDDPDNFSIVSLADIAKTNPETAALLSQPEGSAWELAEDGTFQTVADWQPQD

SEQ ID NO: 2525 - protein, 83 aa, Neisseria meningitidis
LLDGIMRKACRNRPLSETQTKRNRYLSKTRYVVEQSFGTLHRKFRYARAAYFGLLKVSAQSHLKAMCLNLLKAANRLSAPAAA

SEQ ID NO: 2526 - protein, 160 aa, Neisseria meningitidis
MGIEGVLKKGFITTSADTVLNYMRTGSLWPVTFGLACCAVEMMHAGMARYDLDRFGIIFRPSPRQADLMIVAGTLTNKMAPALRRVYDQLAEPRWVLSMGSCANGGGYYHYSYSVVRGADRVVPVDVYVPGCPPTAEALIYGLIQLQQKIKRTSTIARDE

SEQ ID NO: 2527 - protein, 354 aa, Neisseria meningitidis
MKAARFYDKGDIRIEDIPEPTVAPGTVGINVAWCGICGTDLHEFMEGPIFIPPCGHPHPISGESAPVTMGHEFSGVVYAVGEGVDDIKVGQHVVVEPYIIRDDVPTGEGSNYHLSKDMNFIGLGGCGGGLSEKIAVKRRWVHPISDKIPLDQAALIEPLSVGHHAYVRSGAKAGDVALVGGAGPIGLLLAAVLKAKGIKVIITELSKARKDKARESGVADYILDPSEVDVVEEVKKLTNGEGVDVAFECTSVNKVLDTLVEACKPAANLVIVSIWSHPATVNVHSVVMKELDVRGTIAYCNDHAETIKLVEEGKINLEPFITQRIKLDELVSEGFERLIHNNESAVKIIVSPNL

SEQ ID NO: 2528 - protein, 349 aa, Neisseria meningitidis; identical to SEQ ID NO: 261

SEQ ID NO: 2529 - protein, 424 aa, Neisseria meningitidis
MKTLQDWLSHLETAHSGGLIDMGLERTSEVKKRMKLEPQCPVVVVAGTNGKGSVCAYLTQIYKQAGYKTGTLTSPHLLRYNERIAINAEPVSDDTIIASFERIEAARSEISLTYFEFNTLAAVDIFMREQVDVMILEVGLGGRLDAVNAFDGDCAVVTSVDLDHQAFLGDTVEQVGFEKAGVFRSGKPAICGQNPAPESLLSHAEAIGAKLLMVQRDFEFHAMENIQWNYRFRPQHSDDPARNRNALPFPALRGTYQLSNAACTLTVLECLNAKLPVDIGAIKRGLLLVENPGRFQVLPGRPLTVLDVGHNPHAARALRRSLINLAFAQKRTAVFSMLSDKDIDGVLEIVKDQFDEWYIAPLDVPRGMTLESLQNKLHEHSIENIQTFAAVREAYRAAASKAGENDRIVVFGSFHTVADVMSVL

SEQ ID NO: 2530 - protein, 377 aa, Neisseria meningitidis
MSTPALLVLADGSVFHGTSIGYEGSTSGEVVFNTSMTGYQEILTDPSYCKQIVTLTYPHIGNTGTNAEDEESRSVYAAGLIIRDLPLLHSNFRASESLHDYLVRNQTVAIADIDTRRLTTLLREKGAQGGAILTGADATIEKAQELIAAFGSMVGKDLAKEVSCTETYEWTEGEWELGKGFVTPDEQPYHVVAYDFGVKTNILRMLASRGCRLTVVPAQTSAQDVLALNPDGVFLSNGPGDPEPCTYAIEAVQKLMESGKPIFGICLGHQLISLAIGAKTLKMRFSHHGANHPVQDLDSGKVVITSQNHGFAVDADTLPANARITHKSLFDNTLQGIELTDKPVFCFQGHPEASPGPQDVGYLFDKFIGNMKAAKRA

SEQ ID NO: 2531 - protein, 139 aa, Neisseria meningitidis
MDNKTKLRLGGLILLTTAVLSLIIVLIVDSWPLAILLAAIIVAAAAGGFVWTSRRQQRQFIERLKKFDIDPEKGRINEANLRRMYHSGGQHQKDAITLICLSQKCSVDEAHAMFKKRPTRQEINQMAAKQSRGQKRPHR

SEQ ID NO: 2532 - protein, 451 aa, Neisseria meningitidis
MSIQSGEILETVKMVADQNFDVRTITIGIDLHDCISTDIDVLNQNIYNKITTVGKDLVATAKYLSAKYGVPIVNQRISVTPIAQIAAASKADSYVSVAQTLDKAAKAIGVSFIGGFSALVQKGMSPSDEVLIRSIPEAMKTTDIVCSSINVGSTRAGINMDAVKLAGETIKRTAEITPEGFGCAKIVVFCNAVEDNPFMAGAFHGSGEADAVINVGVSGPGVVKAALENSDATTLTEVAEVVKKTAFKITRVGELIGREASKMLNIPFGILDLSLAPTPAVGDSVARILEEMGLSVCGTHGTTAALALLNDAVKKGGMMASSAVGGLSGAFIPVSEDEGMIAAAEAGVLTLDKLEAMTAVCSVGLDMIAVPGDTPAHTISGIIADEAAIGMINSKTTAVRIIPVTGKTVGDSVEFGGLLGYAPVMPVKEGSCEVFVNRGGRIPAPVQSMKN

SEQ ID NO: 2533 - protein, 140 aa, Neisseria meningitidis
MNKNRKLLLAALLLIAFAAVKLVLLQWWQAQQPQAVAAQCDLTEGCTLPDGSRVRAAAVSTKKPFDIYIEHAPAGTEQVSISFSMKNMDMGFNRYMFERQPSGTWQAVRIRLPICVEGRRDFTADITIGSRTFQTAFTAE

SEQ ID NO: 2534 - protein, 154 aa, Neisseria meningitidis
MIEMSKDYRNDLYDVYVSYPPQVDLGLIRECLRENLGEEKAEGLIESLDSKPQVLVEEKCTWAKREELHDYFSYLGLDIITRRYMELETVVPPEEGEGEGEGADGEMPEYLELHGGREDDISAPSQPEPPSRNIKLLVFGLLIAFLGYLLGKIF

SEQ ID NO: 2535 - protein, 145 aa, Neisseria meningitidis
  misc_feature 3, 4: 'Xaa' is any amino acid
VCXXAKRNFVIAVSSLSKTKTETNNPKGIAHTIEYLKKHKVALVVTESTGGLEIPAAKAIRRAGIAVIIANPRQTHQFAQSQPLTKTDAKDAKMPAFFAQMTAQKEDSQTMPYQPPTEAEEVLEALVNRRNQSADMRTAEKNRLH

SEQ ID NO: 2536 - protein, 260 aa, Neisseria meningitidis
MTDILNKILTAKAQEVAAQKAAVNAEHIRALAAEAAPVRSFIGSIRGKHRLNLPAVIAEIKKASPSKGLIRPDFRPPEIARAYENAGAACLSVLTDEPYFQGSPEYLKQAREAVSLPVLRKDFIIDEYQVYQARAWGADAVLLIAAALEQEQLERFEAVAHELGMTVLLELHDETELEKCRNLTTPLWGVNNRNLRTFEVSLDQTLSLLPALEGKTVVTESGITGKADVEFMQSRGVHTFLIGETFMRADDIEAEVGKLF

SEQ ID NO: 2537 - protein, 91 aa, Neisseria meningitidis; identical to SEQ ID NO: 1954

SEQ ID NO: 2538 - protein, 253 aa, Neisseria meningitidis; identical to SEQ ID NO: 265

SEQ ID NO: 2539 - protein, 90 aa, Neisseria meningitidis
MMSVKELFKVILDENKDFPIRTIHRTPMGILPKPVALSIVQYENDPGFYLFYLDETGQEQTDTYHDTLDSAFEQAEFEFGISKEEWMQSP

SEQ ID NO: 2540 - protein, 391 aa, Neisseria meningitidis
MQNIFDPLVIRGKSLTPIVQGGMGVGVSASGLSSAVARENGIGTIASVDLRHLHEDLLAESQINPSEEKYTSLNCTALDREIQKAKSASEGKGLIAVNVMKAVKDHAAYVRQACESGADAVVMGAGLPLDLPEMTEGYHKDVALLPILSESRGINIVLKRWMKKGILPDAIVVEHPAHAAGHLGASTVEGVNDAKFDFKRVIEETFEVFKSLGLESEKIPLILAGGMANFEKVKTALKNWGASAVQIGTAFAVTEEGDAHLNFKKTLAGAETEKVVEFMSVAGLLARGVRTKFLDSYIKRESKLQTNAKADPRRCTQGLNCLTSCGLRDGLSKAGQFCIDIQLAAAFRGEVDKGLFFRGKDPLPFGNAIRTVRETIQYLLTGSEPVATLGR

SEQ ID NO: 2541 - protein, 214 aa, Neisseria meningitidis
MKLKHLLPLLLSAVLSAQAYALTEREDYLVLDKPIPQEQSGKIEVLEFFGYFCVHCHHFDPLLLKLGKALPSDAYLRTEHVVWQPEMLGLARMAAAVNLSGLKYQANPAVFKAVYEQKIRLENRAVAGKWALSQKGFDGKKLMRAYDSPEAAAAALKMQKLTEQYGIDSTPTVIVGGKYRVIFNNGFDGGVHTIKELVAKVREERKRQTPAVQK

SEQ ID NO: 2542 - protein, 472 aa, Neisseria meningitidis
VKPLRRLTNLLAACAVAAAAFGQPALAADLAQDPFITDNAQRQHYEPGGKYHLFGDPRGSVSDRTGKINVIQDYTHQMGNLLIQQANINGTIGYHTRFSGHGHEEHAPFDNHAADSASKEQGNVDEGFTVYRLNWEGHEHHPADAYDGPKGGNYPKPTGARDEYTYHVNGTARSIKLNPTDTRSIRQRISDNYSNLGSNFSDRADEANRKMFEHNAKLDRWGNSMEFINGVAAGALNPFISAGEALGIGDILYGTRYAIDKAAMRNIAPLPTEGKFAVIGGLGSVAGFEKNTREAVDRWIQENPNAAETVEAVFNVAAAAKVAKLAKAAKPGKAAVSGDFSDSYKHNTASRLSQSVDGEMFQTRNVDFKAKSIGTKIHDGAQGKHISGHRNYIEGKSTLNQNINPQELLNGIHSGAYPVISKGARGNPVVDFGYPIGSDGKSGLSTNFGTIHSGKNGVHIVPANPKTIKKVQ

SEQ ID NO: 2543 - protein, 168 aa, Neisseria meningitidis; identical to SEQ ID NO: 2519

SEQ ID NO: 2544 - protein, 369 aa, Neisseria meningitidis
MKYKRIVFKVGTSSITHSDGSLSRGKIQTITRQLAALHHAGHELVLVSSGAVAAGFGALGFKKRPVKIADKQASAAVGQGLLMEEYTANLSSDGIVSAQILLSRADFADKRRYQNAGGALSVLLQRRAVPIINENDTVSVEELKIGDNDTLSAQVAAMIQADLLVLLTDIDGLYTGNPNSNPDAVRLDKIEHINHEIIEMAGGSGSANGTGGMLTKIKAATIAAESGVSVYICSSLKPDALAEAAEHQADGSFFVPRAKGLRTQKQWLAFYSESRGSVYVDEGAEHALSEQGKSLLMSGIAGIEGHFSRMDTVTVYSKATKQPLGKGRVLFGSAAAEDLLKSRKAKGVFIHRDDWISITPEIRLLLTEF

SEQ ID NO: 2545 - protein, 868 aa, Neisseria meningitidis
MAANQRYRKPLPGTDLEYYDARAACEDIKPGSYDKLPYTSRILAENLVNRADKVDLPTLQSWLGQLIEGKQEIDFPWYPARVVCHDILGQTALVDLAGLRDAIAEKGGDPAKVNPVVQTQLIVDHSLAVECGGYDPDAFRKNRQIEDRRNEDRFHFINWTKTAFENVDVIPAGNGIMHQINLEKMSPVVQVKNGVAFPDTCVGTDSHTPHVDSLGVISVGVGGLEAETVMLGRASMMRLPDIVGVELTGKRRPGITATDIVLALTEFLRKERVVGAFVEFFGEGARSLSIGDRATISNMTPEFGATAAMFAIDEQTIDYLKLTGRDDAQVKLVETYAKTAGLWADALKTAVYPRVLKFDLSSVTRNMAGPSNPHARFATADLAAKGLAKPYEEPSDGQMPDGAVIIAAITSCTNTSNPRNVVAAALLARNANRLGLQRKPWVKSSFAPGSKVAEIYLKEAGLLPEMEKLGFGIVAFACTTCNGMSGALDPKIQKEIIDRDLYATAVLSGNRNFDGRIHPYAKQAFLASPPLVVAYALAGSIRFDIENDVLGVADGREIRLKDIWPTDEEIDAVVAEYVKPQQFRDVYVPMFDTGKAQKAPSPLYDWRPMSTYIRRPPYWEGALAGERTLRGMRPLAILPDNITTDHLSPSNAILAVSAAGEYLAKMGLPEEDFNSYATHRGDHLTAQRATFANPKLFNEMVKNEDGSVRQGSLARVEPEGETMRMWEAIETYMNRKQPLIIIAGADYGQGSSRDWAAKGVRLAGVEAIAAEGFERIHRTNLIGMGVLPLQFKPGTNRHTLQLDGTETYDVIGERTPRCDLTLVIHRKNGETVEVPVTCRLDTAEEVLVYEAGGVLQRFAQDFLEGNAA

SEQ ID NO: 2546 - protein, 420 aa, Neisseria meningitidis
MTLFRPEVFQAKKNRWTGQIVLVRPFSLQFLTFFAVSLAAILVAFLIFGSYTNKTTVTGQLLPTTGVVRVYSQDMGVIAHQHVMNGDFVKKGDVLFTLSTSRNDNNGSIQARLLAEAELKKSLSEQEIIMKKRVHAAEKTAQENTVHRFQNQMQHVRNQIIMQEKRIAISEKMLEKQRYLAKMDAISELEKNSYEIALLELKAGLAAYQREADNLAREITVQQSNLKNLPEQQATEISQLERAVSVYQQEILDYQQRNEQTIRATISGYVSSINTEIGQQVDTNKLLMSIVPKESELLANLYVPSRAIGFVKPNDKVILRYQAYPYQKFGHAEGHVISIAQTALGAQEWTNLGNIFTQTAQVNEPVYLIKVKLDNQHIRIYGTEKKLQIGMILEADILHENKRLYEWILDPLYQVMGKIS

SEQ ID NO: 2547 - protein, 251 aa, Neisseria meningitidis
LKMLETADPGNQYAVPYFSGVNTIAITAKGKELLGGKLPENGWDLLFKPEYTHKLKSCGIALWDTPSEMFPILLNYLGKDPKGSNPEDLKAAAEVLKSIRPDVKRFSPSIIDELARGDICLAAGNGGDLNLAKARSEEVKNNVGIEVLNPKGMGFWIESWLIPADAKNVANAHKYINYTLDPEIAAKNGIAVTFAPASKPAREKMPAELVNTRSIFPNEQDMKDGFVMPQMSTDAKKLSVSLWQKIKVGTN

SEQ ID NO: 2548 - protein, 103 aa, Neisseria meningitidis
VYQYIIYVLTGDLYLQKDIDENLEFIHQAENNPNEVYSGGGQGFCWDISAEKVVFYHNEFDEEDGWPDLSCSLHTFKTALIAWNAFLQLPKSIHSVVETVIEE

SEQ ID NO: 2549 - protein, 217 aa, Neisseria meningitidis
MKITHCKLKKKVQKELLRFFVLEVTARSAADILGIHPNSAALFYRKIRTVINHHLALAADEVFEGPVEQDESDFGGRRKGRRGRGAAGKVVVFGILKHNGRVYTVIVDNAKSETLLPVIKKKIMPDSIVYTDSLSSCDKLDVSGFIHYRINHSKEFADRQNHINGIENFWNQAKRVLRKYNGIDCKSFPLFLKECEFRFNFGTPSQQLKILRDWCGI

SEQ ID NO: 2550 - protein, 228 aa, Neisseria meningitidis
MTVLQERYCEVSDRIGKLVLQAGRKPHSVSLIAVGKTFPSDGIREVYAAGQRDFGENYIQEWYGKTEELADLTDIVWHVIGDVQSNKTKFVAERAHWVHTVCRLKTAVRLSGQRPSSMPPLQVCIEVNIAGEAVKHGVAPEEAVVLAVEVAKLPNIVVRGLMCVAKAGGSEAELKTQFQTMQKLLADLNTAGVKADVLSMGMSDDMPAAIECGATHVRIGSAIFGKRG

SEQ ID NO: 2551 - protein, 617 aa, Neisseria meningitidis
MNRYPLWKYLLIVFTIAVAAVYSLPNLFGETPAVQVSTNRQAIIINEQTQFKVDAALKNAGIQTDGMFVVDNSLKVRFKDTETQLKARDVIENTLGEGYITALNLLADSPEWMAKIKANPMFLGLDLRGGVHFTMQVDMKAAMQKTFERYSGDIRRELRREKIRSGTVRQAGNSLTVPLQDAGDVQKALPQLRKLFPEATLNSDGSNIVLTLSEEAVNKVRSDAVKQNITTLHNRVNELGVAEPVIQQSGADRIVVQLPGVQDTAKAKDIIGRTATLELRMVEDDPAKLREALEGNVPSGYELLSSGGDRPETLLISKQVELTGDNINDAQPSFDQMGAPAVSLSLDSAGGSIFGELTAANVGKRMAMVLIDQGKSEVVTAPVIRTAITGGRVEISGSMTTAEANDTSLLLRAGSLAAPMQIVEERTIGPSLGKENIEKGFHSTLWGFAIVAAFMVVYYRLMGFFSTIALSANILFLIGILSAMQATLTLPGMAALALTLGMAIDSNVLINERIREELRAGVPPQQAINLGFQHAWATIVDSNLTSLIAGIALLVFGSGPVRGFAVVHCLGILTSMYSSVVVFRALVNLWYGRRRKLQNISIGSVWKPKAEMAGGKE

SEQ ID NO: 2552 - protein, 485 aa, Neisseria meningitidis
MHKILPIAHVLSRLGMLFSFILLIPAALSYAFSDGAYTAFATTATVTLSGSCIVRLATLRFRRELRPRDGFTLVLMLWLAFAAMAAMPMYLYFPNMGFTDAFFESMSGLTTTGATVIPHVDGLAPSVNFWRHMLNWLGGMGIIVLAVAILPMLGVGGTQLFKAEIPGIDKESKMSPRISQVAKKLWFGYTLITILAAACLHFAGMGWFDAVCHAMATLSLGGFSTHDASIAYYNSPLIEAVIIVFTIVGGINFANHFAALNSRSLKTYWKDEECRTMLLLLSGSILAAALYLWHTGYYAGFTESLRYTAFNFVSIGLANGLANTDFAQWPLLISLWMFFLANILANSGSTGGGIKTIRALVLFKFSLREMMVLLHPKAVRTVKISGKAIPDRLALTVMSFIFIYFMTVVLFSFLLMASGMEFTTAFTAVIACITNAGPGLGEVGPAGNYAGLDVMQKWICVTAMLLGRLEIFTVFILFTPAYWKK

SEQ ID NO: 2553 - protein, 157 aa, Neisseria meningitidis
MLSAESLKQIDTELAKYPADQRRSAIMGALRIAQTEKGWLAPETIAFVADYIGITPAQAYEVATFYNMYDLEPVGKYKLTVCTNLPCALRGGMATGEYLKQKLGIGYGETTPDGKFTLVEGECMGACGDAPVMLVNNHSMCSFMTEEAIEKKLAELE

SEQ ID NO: 2554 - protein, 234 aa, Neisseria meningitidis
MLRSILAASLLAVSFPTAAEALNYNIVEFSESAGVEAVQDTMSARFQVTAEGRDKNAVNAEFVKKFNNFTRKSKNGSFKTELVSRSAMPRYQYTNGRRIQTGWEERAEFKVEGRDFDALNRFIADVQADAALEYTDFHVSRERRNEVIDQVSKDAVLRFKARAEKLAGVLGASGYKIVKLNLGHIGSHIAGGGAAQAKMLRAMPMAASVNMEGADSAAPGVEEISISVNGTVQF

SEQ ID NO: 2555 - protein, 235 aa, Neisseria meningitidis
LVKTADGYKAIARIRTGDRVFAKDETSGKTGYKPVTARYGNPYRETVYIEISDGIGNNQTLISNKIHPFYSQGKWIQAGRLKKGDTLLSESGAKQTVQNITLKQQPLKAYNLTVADWHTYFVKGDKAETEGVWVHNDCPYDKGNQRYKDASYHGKNDNSVKSRAPTNGQAALDNSVQVKSTSPRRVGVDKANNEIVVLDKTQTFNNGFAEYHGHVRSWQDLHTDQKNALKKAGLD

SEQ ID NO: 2556 - protein, 40 aa, Neisseria meningitidis
MLPSKYEDNTLQIKEKSTERTAPFFVLEVTARSASANRFV

SEQ ID NO: 2557 - protein, 462 aa, Neisseria meningitidis
MSIKFADLNLDKNILSAVSSEGYESPTPIQAQAIPSALEGRDIMASAQTGSGKTAAFLLPTLQKLTKRSEKPGKGPRALVLTPTRELAAQVEKNALAYAKNMRWFRTVSIVGGASFGYQTRALSKPVDLIVATPGRLMDLMQSGKVDFERLEVLILDEADRMLDMGFIDDIETIVEATPTDRQTLLFSATWDGAVGKLARKLTKDPEIIEVERVDDQGKIEEQLLYCDDMRHKNRLLDHILRDANIDQCVIFTSTKAMTEVIADELYEKGFAANCLHGDMPQGWRNRTLMDLRKGRCKILVATDVAARGIDVPTITHVINYDLPKQAEDYVHRIGRTGRAGRTGIAITFAEVNEYVKVHKIEKYINRKLPELTIEGMEPTRKRKSAGGKPKGKGGWGDRKSGGRRGDHKPGKEGFGGKTRGEGFKKEGFKKDGFKKTGEGFKGKRKAGDSFAGRGERRYKDR

SEQ ID NO: 2558 - protein, 246 aa, Neisseria meningitidis
MLIVRPSGRAKDDVETCRRAGWQAEVLSPIEIEADAAGLELLSEQYARADAVFWVSPTAVETAVPYLNLSDGIKMHISVGQGSRRALERCLGRTVIAPEDGNDSEAVLRLTVWNSLPEGARVLFVRGHGGRDFLMNALQEKGFRTEVAEVYFRRHKPLNFQNFQTENIAAAYITSTELVRLLFGQLPPQFSRFFKSLLYFTHHPRIAEALKREGVCSVETVPTLEAALSHSSISVSDGMVFPGTSN

SEQ ID NO: 2559 - protein, 55 aa, Neisseria meningitidis; identical to SEQ ID NO: 1257

SEQ ID NO: 2560 - protein, 260 aa, Neisseria meningitidis
MESLTAINKSRIRQAFQKALNDYDRHALIQQKMTINLMAHLQDYLPDMPLENVLELGCGSGMLSALLQKQISANYWLFNDLCDVQPQLAEKLPQSFDFYCGDAENFPFQRQFDLIASASAVQWFHQPDAFIAHCKTGLKANGLLAVATFGKDNLKEVRQITNIGLNYPTLSQWQTWLAKDFELLWCEDFKVILDFDTPLDVLKHLKYTGVTATNQKNWTRKNLNGFIGDYLSAFSMPSGKVHLTYHPLFFIARYSAAGRQ

SEQ ID NO: 2561 - protein, 131 aa, Neisseria meningitidis
MKKQITAAVMMLSMIAPAMANGLDNQTFENQVFHTQADAPMQLAELSQKEMKETEGAWGPVGAFIGGVGGGIGYMMNQQLSGSRFSPTAFTLAVGAGAFGGATAGPAGVVWGFNRSLATGMVTGVAQRYGK

SEQ ID NO: 2562 - protein, 192 aa, Neisseria meningitidis
MSNKIKMVVGLGNPGKEYEQTRHNAGFWFLDELAWKWKASFKEEKKFFGEVARATLPDGDVWLLKPTTFMNRSGQAVAALAQFYKIKPEEILVVHDELDIPCGRIKFKLGGGNGGHNGLKDIQARLGTADYYRLRLGIGHPGDRNLVVGYVLNKPSTEHRRQIDDAVAKSLQAIPDILAGKWEEATRFLHSK

SEQ ID NO: 2563 - protein, 163 aa, Neisseria meningitidis
MSTETKNYITPAGWQALKDELYQLVNKERPEIVQIVNWAAGNGDRSENGDYLYGKRRMREIDRRIRFLTKRLESAVVVDPELREATDQVFFGATVGLLRGDGREQTVKIVGIDEIDTAQNKISWISPLARCLIKAREGDEVVLNTPEGREEIEILSVEYIKID

SEQ ID NO: 2564 - protein, 794 aa, Neisseria meningitidis
MADNYVIWFENLRMTDVERVGGKNASLGEMISQLTEKGVRVPGGFATTADAYRAFLAHNGLSERISAALAKLDVEDVAELARVGKEIRQWILDTPFPEQLDAEIEAAWNKMVADAGGADISVAVRSSATAEDLPDASFAGQQETFLNINGLENVKEAMHHVFASLYNDRAISYRVHKGFEHDIVALSAGVQRMVRSDSGASGVMFTLDTESGYDQVVFVTSSYGLGENVVQGAVNPDEFYVFKPTLKAGKPAILRKTMGSKHIKMIFTDKAEAGKSVTNVDVPEEDRNRFSITDEEITELAHYALTIEKHYGRPMDIEWGRDGLDGKLYILQARPETVKSQEEGNRNLRRFAINGDKTVLCEGRAIGQKVGQGKVRLIKDASEMDSVEAGDVLVTDMTDPDWEPVMKRASAIVTNRGGRTCHAAIIARELGIPAVVGCGNATELLKNGQEVTVSCAEGDTGFIYAGLLDVQITDVALDNMPKAPVKVMMNVGNPELAFSFANLPSEGIGLARMEFIINRQIGIHPKALLEFDKQDDELKAEITRRIAGYASPVDFYVDKIAEGVATLAASVYPRKTIVRMSDFKSNEYANLVGGNVYEPHEENPMLGFRGAARYVADNFKDCFALECKALKRVRDEMGLTNVEIMIPFVRTLGEAEAVVKALKENGLERGKNGLRLIMMCELPSNAVLAEQFLQYFDGFSIGSNDMTQLTLGLDRDSGLVSESFDERNPAVKVMLHLAISACRKQNKYVGICGQGPSDHPDFAKWLVEEGIESVSLNPDTVIETWLYLANELNK

SEQ ID NO: 2565 - protein, 81 aa, Neisseria meningitidis
MFDFEQQIKWGERAEEIVKEAATQNNIEIPEPLASALAKAVKVHYLSQAGVFSLVEAYADTVNPTEKEVDYQAIGKELFEK

SEQ ID NO: 2566 - protein, 507 aa, Neisseria meningitidis
MTVIKQEDFIQSICDAFQFISYYHPKDYIDALYKAWQKEENPAAKDAMTQILVNSRMCAENNRPICQDTGIATVFLKVGMDVQWDADMSVEEMVNEGVRRAYTWEGNTLRASVLADPAGKRQNTKDNTPAVIHMSIVPGDKVEVTCAAKGGGSENKSKLAMLNPSDNIVDWVLKTIPTMGAGWCPPGILGIGIGGTPEKAVLMAKESLMSHIDIQELQEKAASGAELSTTEALRLELFEKVNALGIGAQGLGGLTTVLDVKILDYPTHAASKPIAMIPNCAATRHVEFELDGSGPVELTPPRVEDWPDLTYSPDNGKRVDVDKLTKEEVASWKTGDVLLLNGKILTGRDAAHKRLVDMLNKGEELPVDFTNRLIYYVGPVDPVGDEVVGPAGPTTATRMDKFTRQMLEQTGLLGMIGKSERGAAACEAIADNKAVYLMAVGGAAYLVAKAIKSSKVLAFPELGMEAIYEFEVKDMPVTVAVDSKGESIHATAPPQWQAKIGIIPVKS

SEQ ID NO: 2567 - protein, 255 aa, Neisseria meningitidis; identical to SEQ ID NO: 2202

SEQ ID NO: 2568 - protein, 212 aa, Neisseria meningitidis
MQTAIIDYGMGNLHSVLKSVRTAGQLAGKNTEIFLSGDPERVSRADKVIFPGQGAMPDCMAALTRGGLDEAVKDALKNKPFFGICVGAQLLFDHSEEGNTDGLGWFGGKVRRFERDLRDPQGCRLKVPHMGWNTVRQTQNHPLFKDIPQDTRFYFVHSYYFAPENPETILGESDYPSPFACIVGKDNVFATQFHTEKSHDAGLTMLKNFLNW

SEQ ID NO: 2569 - protein, 378 aa, Neisseria meningitidis
MKIVFITTVASSIYGFRAPVIKKLIGKNHQVYAFVSEFSDNELDIIREMGVTPVTYRSNRSGLNPFSDIKSTFLIFKELKKISPDLVFPYFAKPVIFGTFAAKLAGVPRIVGMLEGLGFAFTPQPEGIPLKTKIIKGILIALYRIALPMLESLIVLNPDDKDELTDKYGIKIKNIHILGGIGLDSRQYPYSEADIPDEKEPVKFLFIGRFLKEKGIDDFIRAAEQVKDKYPDTVFTALGAIDKSRGGGGGGDLERLAARDIIRFPGFVNNVSEVIKEHHIFVLPSYYREGVPRSTQEAMAVGRAVITTDVPGCRETVADKVNGFLIEPWNPRILAEKMIYFIENREAVRLMGNASYAIAKDKFDAEKVDLKLLDILKA

SEQ ID NO: 2570 - protein, 447 aa, Neisseria meningitidis
MFHSVNVFTGETLYRRPAQDYAEFERRLADLKMRGGAFAQLGVTERAARLQKFADRLEAEKERFAEMVCEEVGRCLHECRAEIGKSIELIRYYARLAPELLAHKTIATQASLSQVRFEPLGVVFAVMPWNYPVWQVLRFAVPAMCAGNACAVKPAPSVARVSQALFDLVSDGIPLAGAWLDEAGTLKAVEDTDAMAFTGSTHTGRILAAHAGANLKKTVLELGGSNAFIVMPDADLERAAAEACYSRFRDAGQSCNAAKRIIVTEAAADRFITLFLAECAKLKMGDPKHPDTTLAPLHREDLRDRVHGQVEDAVSNGAVCLTGGKIPQGRGWFYPATVLDRVNPACRVWREEVFGPAALILRAENEEHAIALANDSPFGLGACIYTADTERAWRFAEKIQAGSVFINRHTSSDLRLPFGGVKDSGYGRELSEFGLYEFVNVKTYWQK

SEQ ID NO: 2571 - protein, 98 aa, Neisseria meningitidis
MDAKHRLKKYVYHLLVAIDQLFNALTGGAADETLSSRTYRGARLAQKPKTRWKVLYTLINGVFFDRQHCRQAYISELKGRQHDARFNQSRAAGEKGTR

SEQ ID NO: 2572 - protein, 397 aa, Neisseria meningitidis
MSNQKNRKNALIGAAFLMATSAIGPGFLTQTATFTQALAASFGFVILLSILLDIGAQLNIWRIVAVSEKQAQDIANQVLPGAGYFLAVLIVMGGLAFNIGNVGGAGLGLNLLTGLSPETGAVISGVIAIGVFLFKEAGKVMDKFAQVMGFVMIALTVYVAWQANPPLADAAVHTFMPEKLDAMAIVTLVGGTVGGYITFAGAHRLLDAGIKGKSALPEVSQSSVRAILIASIMRIVLFLAVLGVVSQGVQLNPDNPASTPFEYAAGYIGLLIFGVVIWAASITSVIGAAYTSVSFFSGLSPSIERNKNKWIIAFIAVSTAVFSTIGKPAQVLVFVGALNGLILPISLGLILIAAYKTKIVGDYKHPLWLTVSGVIVVGLMAVLSAITISKYIGGLFG

SEQ ID NO: 2573 - protein, 142 aa, Neisseria meningitidis
MMFSWFKLFHLFFVISWFAGLFYLPRIFVNMAMIDAPRGNPEYVRLSGMAVRLYRFMSPLGFGAVVFGSAIPFAAGWWGSGWVHVKLCLGLMLLAYQLYCGVLLRRFQDYSNAFSHRWYRVFNEIPVLLMVAALYLVVFKPF

SEQ ID NO: 2574 - protein, 173 aa, Neisseria meningitidis
MSCFSIKRMSAFRARITVFFTAFVFLTAALPAYAERLPDFLAKIQPSEIFPGADRYGKPEGKPMVARVYKGDEQLGLVYITTDAVNTRGYSNKPIDTLMALANDGTIAGAKLVDHHEPIMLIGIPHLPAPGRAIRLNWLPAYIKPNFISTNRLRLKGLPTVPQPSNGTGAAAP

SEQ ID NO: 2575 - protein, 67 aa, Neisseria meningitidis; identical to SEQ ID NO: 86

SEQ ID NO: 2576 - protein, 62 aa, Neisseria meningitidis
  misc_feature 58, 59, 60: 'Xaa' is any amino acid
MNFLLSKLLLGLIRFYQYCISPLIPPRCRYTPTCSQYAVEAVKKYGAFKGGRLAIKRXXXHT

SEQ ID NO: 2577 - protein, 164 aa, Neisseria meningitidis
MKKTLLAIIAVFALSACRQAEEGPPPLPQQISDRSVGHYCSMNLTEHNGPKAQIFLNGKPDQPVWFSTIKQMFGYTKLPEEPKGIRVIYVTDMGNVTDWTNPNADTEWMDAKKAFYVIDSGFIGGMGAEDALPFGNKEQAEKFAKDKGGKVVSFDDMPDTYIFK

SEQ ID NO: 2578 - protein, 228 aa, Neisseria meningitidis
MADLTFQQAVSNIIGMKGEIVRALGETFVMVGLSTTFAVVFGTLLGVLLFVTSSRQLHYNKPVNFLLDNLVNLMRAFPFVILMIAMIPATRTIVGSTIGPVAASLVLSVSGLFYFARLVEQNLREVPKGVIEAAAAMGAPPIAIVCKVLLNEARAGMVSSITVLAIGLLSYSAAAGMIGGGGLGDLAIRYGYYRYQTEVIVFIVALLVLLVILIQSTGNALARKLDKR

SEQ ID NO: 2579 - protein, 371 aa, Neisseria meningitidis
MGLKKACLTVLCLIVFCFGIFYTFDRVNQGERNAVSLLKEKLFNEEGEPVNLIFCYTILQMKVAERIMAQHPGERFYVVLMSENRNEKYDYYFNQIKDKAERAYFFYLPYGLDKSFNFIPTMAELKVKSMLLPKVKRIYLASLEKVSIAAFLSTYPDAEIKTFDDGTGNLIQSSSYLGDEFSVNGTIKRNFARMMIGDWSIAKTRNASDEHYTIFKGLKNIMDDGRRKMTYLPLFDASELKAGDETGGTVRILLGSPDKEMKEISEKAVKDFNIQYVAPHPRQTYGLSGVTTLNSPYVIEDYILREIKKNPHTRYEIYTFFSGAALTMKDFPNVHVYALKPASLPEDYWLKPVYALFTQSGIPILTFDDKD

SEQ ID NO: 2580 - protein, 174 aa, Neisseria meningitidis
LRSSEMDILLKYWKPVGVLLLIVLIFTAWHFDRAEKYRMGREAAAAEISNRLKDGYIEQAKQARSAEQKAAAAFAERQTKLEEEKQNAEKTVAAMRLELNRLRHYAAAQNRNRNLPATTTAATASDGASDSQGWLLFGQCAEKYAGLAETADGHAADLREWQAYGHAVSSQRAE

SEQ ID NO: 2581 - protein, 140 aa, Neisseria meningitidis; identical to SEQ ID NO: 1135

SEQ ID NO: 2582 - protein, 404 aa, Neisseria meningitidis; identical to SEQ ID NO: 756

SEQ ID NO: 2583 - protein, 220 aa, Neisseria meningitidis
MDSQKFTEASKRRLSELLDAKSEQGNTMRCDEVQGFMTALLSGPDKLTPLDWLPEVLGDESQFTAAERSEIERLVLAMAMETTAAMSDKKLPDLWLYENEDGGSDFYTWCNAYLYGLDIVPTDWFEAVDDEAFEELFYPIMALGGIYDEEDNGTIRLQFTEGELAELESELPYALADIYRYWQAVINKPQTVRREGEKTGRNDPCPCGSGRKYKACCGKN

SEQ ID NO: 2584 - protein, 724 aa, Neisseria meningitidis
MNAPFFRLSLLSLTLAAGFAHAAENNANVALDTVTVKGDRQGSKIRTNIVTLQQKDESTATDMRELLKEEPSIDFGGGNGTSQFLTLRGMGQNSVDIKVDNAYSDSQILYHQGRFIVDPALVKVVSVQKGAGSASAGIGATNGAIITKTVDAQDLLKGLDKNWGVRLNSGFASNEGVSYGASVFGKEGNFDGLFSYNRNDEKDYEAGKGFRNNFNGGKTVPYSALDKRSYLAKIGTTFGDGDHRIVLSHMKDQHRGIRTVREEFTVGGDKERISMKRQAPSYRETTQSNTNLAYTGKDLGFVEKLDANVYVLEKKRYSADDSGTGYAGNVKGPNHTRITTRGMNFNFDSRLAEQTLLKYGINYRHQEIKPQAFLNSKFKISDKKPDPNNPGKEIAKTDEEKAKDKIDMALVHSYKLSNPAKTDTGAYIEAIHEINGFTLTGGLRYDRFKVKTHDGKTVSSSNLNPSFGVIWQPHEHWSFSASHNYASRSPRLYDALQTHGKRGIISIADGTKAERARNTEIGFNYNDGTFAANGSYFWQTIKDALANPQNRHVSAAVREAVNAGYIKNHGYELGASYRTGGLTAKVGVSHSKPRFYDTHKDKLLSANPEFGAQVGRTWTASLAYRFKNPNLEIGWRGRYVQKAVGSILVSGQKDRQGKLENVVRQGFGVNDVFANWKPLGKDTLNVNLSVNNVFNTFYYPHSQRWTNTLPGVGRDVRLGVNYKF

SEQ ID NO: 2585 - protein, 310 aa, Neisseria meningitidis
MKIANSITELIGNTPLVKLNRLTEGLKAEVAVKLEFFNPGSSVKDRIAEAMIEGAEKAGKINKNTVIVEATSGNTGVGLAMVCAARGYKLAITMPESMSKERKMLLRAFGAELILTPAAEGMAGAIAKAKSLVDAHPDTYFMPRQFDNEANPEVHRKTTAEEIWRDTDGKVDVFVAGVGTGGTITGVGEVLKKYKPEVKVVAVEPEASPVLSGGEKGPHPIQGIGAGFIPTVLNTKIYDSITKVPNEAAFETARAIAEKEGILVGISSGAAVWSALQLAKQPENEGKLIVVLLPSYGERYLSTPLFADLA

SEQ ID NO: 2586 - protein, 272 aa, Neisseria meningitidis
MNTIFKISALTLSAALALSACGKKEAAPASASEPAAASSAQGDTSSIGSTMQQASYAMGVDIGRSLKQMKEQGAEIDLKVFTEAMQAVYDGKEIKMTEEQAQEVMMKFLQEQQAKAVEKHKADAKANKEKGEAFLKENAGKESVKTTASGLQYKITKQGEGKQPTKDDIVTVEYEGRLIDGTVFDSSKANGGPVTFPLSQVIPGWTEGVQLLKEGGEATFYIPSNLAYREQGAGDKIGPNATLVFDVKLVKIGAPENAPAKQPAQVDIKKVN

SEQ ID NO: 2587 - protein, 185 aa, Neisseria meningitidis
MNIIDTAIPDVKLLEPQVFGDARGFFMETFRDEWFKTQVCERTFVQENHSKSGKGVLRGLHYQTENTQGKLVRVVVGEVFDVAVDMRKDSPTFGKWVGEILSAENKRQLWVPEGFAHGFYVLSDEAEFVYKCTDYYNPEAEHSLIWNDPTVGIDWPLQTAPLLSPKDLAGKTWAQAEKLRLPLSR

SEQ ID NO: 2588 - protein, 237 aa, Neisseria meningitidis
LGACSTSYRPSRAEKANQVSNIKTQLAMEYMRGQDYRQATASIEDALKSDPKNELAWLVRAEIYQYLKVNDKAQESFRQALSIKPDSAEINNNYGWFLCGRLNRPAESMAYFDKALADPTYPTPYIANLNKGICSAKQGQFGLAEAYLKRSLAAQPQFPPAFKELARTKMLAGQLGDADYYFKKYQSRVEVLQADDLLLGWKIAKALGNAQAAYEYEAQLQANFPYSEELQTVLIGQ

SEQ ID NO: 2589 - protein, 178 aa, Neisseria meningitidis; identical to SEQ ID NO: 1831

SEQ ID NO: 2590 - protein, 261 aa, Neisseria meningitidis
MSRIRQAFAALDGGKALIPYITVGDPDIRTTLALMHGMVANGADILELGVPFSDPMADGPVIQRAAERALANGISLRDVLDVVRKFRETDTQTPVVLMGYLNPVHKMGYREFAQEAAMAGVDGVLTVDSPVETIDPLYRELKDNGVDCIFLIAPTTTEDRIKTIAELAGGFVYYVSLKGVTGAASLDTDEVSRKIEYLHQYIDIPIGVGFGISNAESARKIGRVADAVIVGSRIVKEIENNTGNEAAAVGALVKELKDAVR

SEQ ID NO: 2591 - protein, 285 aa, Neisseria meningitidis
MNYALDALWWKLTSQPVRDLASLLTAPPLWQSGCELGVRELLGERGFRYLLALDADPAPLTEHLTRRAPFGHRLGIYAEELLAFWFANAPHAELLAHNLTVSGSDGNTQGAADFVVRLNGKPYHIELTCKYYGGGTGRLEDMRGLDPKDTLLGKAAKLTAQLGLPHTSDGIRTLRQHGLPLDVKPVSIVRGIGFFPQSFHAFEPPLNPYGWRGIYIQDWAEYGFERQEVRYHLLDRMAYLAPARAAETETLNETEIRRIDQGLIAVLECRPDGFWHEIERIMKAV

SEQ ID NO: 2592 - protein, 644 aa, Neisseria meningitidis
MSLIECKNINRYFGSGENRVHILKNISLSIEKGDFVAIIGQSGSGKSTLMNILGCLDTAGSGSYRIDGIETAKMQPDELAALRRERFGFIFQRYNLLSSLTARDNVALPAVYMGAGGKERSARADKLLQDLGLASKEGNKPGELSGGQQQRVSIARALMNGGEIIFADEPTGALDTASGKNVMEIIRRLHEAGHTVIMVTHDPGIAANANRVIEIRDGEIISDTSKNPEIPASNVGRIQEKASWSFYYDQFVEAFRMSVQAVLAHKMRSLLTMLGIIIGIASVVSVVALGNGSQKKILEDISSIGTNTISIFPGRGFGDRRSGRIKTLTIDDAKIIAKQSYVASATPMTSSGGTLTYRNTDLTASLYGVGEQYFDVRGLKLETGRLFDENDVKEDAQVVVIDQNVKDKLFADSDPLGKTILFRKRPLTVIGVMKKDENAFGNSDVLMLWSPYTTVMHQITGESHTNSITVKIKDNANTQVAEKGLTDLLKARHGTEDFFMNNSDSIRQIVESTTGTMKLLISSIALISLVVGGIGVMNIMLVSVTERTKEIGIRMAIGARRGNILQQFLIEAVLICVIGGLVGVGLSAAVSLVFNHFVTDFPMDISAASVIGAVACSTGIGIAFGFMPANKAAKLNPIDALAQD

SEQ ID NO: 2593 - protein, 240 aa, Neisseria meningitidis
MITVCLYGGLREYGRRFVLHVETPAEALHALFTQIKGLRQRIRDGVYQVRFDGKDQSEETIGSVFRRPADGVLHIVPRVQGAGKNGGLIQTIVGVVLIVVGAYTSWASGAQLIAVGIGMVAGGVAQMLTKQPKLDADGKGVEESKNSAFSNLANTTAQGRPVPLAYGLCYCGSRVVSQGVQSRRIEPSSTAASSGAVLNLGLSKTFVQGVAATAPNGQKYRTDFSDDSVRARNYKAAFSG

SEQ ID NO: 2594 - protein, 58 aa, Neisseria meningitidis; identical to SEQ ID NO: 903

SEQ ID NO: 2595 - protein, 140 aa, Neisseria meningitidis
MTDIFTTSKRSFVMSKIHSKETKPEILVRKFLFSQGFRYRKNDKRYAGKPDIVLPKYKTVVFIHGCFWYGHSCNKGHIPKSNTDFWLEKITKNCERDIKNETELEKIGFKVIVVWECELKNKAIGRERLNRLVREIKDAV

SEQ ID NO: 2596 - protein, 183 aa, Neisseria meningitidis; identical to SEQ ID NO: 824

SEQ ID NO: 2597 - protein, 339 aa, Neisseria meningitidis
MDAGIYLEETAPRALIEHNNILDNSVGVYLHGSADAMVRENKIVGDATLRVNERGNGVTVWNAPGAQVVGNDISKGRDGIFSNTSTHNTYKNNRFSDLRFAVHYMYTNDSEISGNISVGNNMGYVLMFSERLKVFDNIAVGSRDQGIMLNYVNYSDIHDNIINKAGKCVFAYNANYDKLSANHFENCQIGIHFTAAIEGTSLHDNSFINNESQVKYVSTRFLDWSEGGHGNYWSDNSAFDLNGDGFGDSAYRPNGIIDQIIWRAPVSRLLMNSPAISIVKWAQAQFPAVLPGGVVDSKPLMKPYAPKIQTRYQAMKDGLLKEVETRQLEWGRAENGSLN

SEQ ID NO: 2598 - protein, 237 aa, Neisseria meningitidis
MKLSIQKFMMLFAAAISLLQIPISHANGLDARLRDDMQAKHYEPGGKYHLFGDGRGSVKNRVYAVQTFDATAVGPILPITHERTGFEGVIGYETHFSGHGHEVHSPFDHHDSKSTSDFSGGVDGGFTVYQLHRTGSEIHPEDGYDGPQGSDYPPPGGARDIYSYYVKGTSTKTKTNIVPQAPFSDRWLKENAGAASGFFSRADEAGKLIWESDPNKNWWANRMDDVRGIVQVRLILF

SEQ ID NO: 2599 - protein, 141 aa, Neisseria meningitidis; identical to SEQ ID NO: 26

SEQ ID NO: 2600 - protein, 262 aa, Neisseria meningitidis
  misc_feature 2, 3: 'Xaa' is any amino acid
VXXIVIVIAVLYFLIKLAGSGSFGDVDATTEAATQTRIQPVGQLTMGDGIPVGERQGEQIFGKICIQCHAADSNVPNAPKLEHNGDWAPRIAQGFDTLFQHALNGFNAMPAKGGAADLTDQELKRAITYMANKSGGSFPNPDEAAPADNAASGTASAPADSAAPAEAKAEDKGAAAPAVGVDGKKVFEATCQVCHGGSIPGIPGIGKKDDWAPRIKKGKETLHKHALEGFNAMPAKGGNAGLSDDEVKAAVDYMANQSGAKF

SEQ ID NO: 2601 - protein, 161 aa, Neisseria meningitidis
VQEQAAAEPAYEDLQARIAELEAQLKDEQLRALANEQNLRRRHQQEIADTHKFAGQKFAVEMLPVKDYLEMALLDQSGNFDALKMGVQMTLNELQKAFDATQIKEINPKAGDKLDPNIHQAMQAVASEQEPNTVVGVMKKGYTLSDRVLRPAMVTVAQKEA

SEQ ID NO: 2602 - protein, 213 aa, Neisseria meningitidis
MPSEKPMNRRTFLLGAGALLLTACGRKSARTHAKIPEGSTVLALGDSLTFGYGANPGESYPAQLQKLTGWNIVNGGVSGDTSAQALSRLPALLARKPKLVIVGIGGNDFLRKVPKEQTRANIAKIIETVQKENIPAVLVGVPHITLGALFGHLSDHPLYEDLSEEYGIPLFGGAWAEILGDNNLKSDQIHANGKGYRKFAEDLNQFLRKQGFR

SEQ ID NO: 2603 - protein, 197 aa, Neisseria meningitidis
MTTLQERVAAHFAESIRAKQEAGKVLVEPTVQAAELMLQCLMNDGKILACGNGGSAADAQHFAAEMTGRFEKERMELAAVALTTDTSALTAIGNDYGFNHVFSKQVRALGRAGDILVGISTSGNSANVIEAIKAAHERDMHVIALTGRDGGKIAAILKDTDVLLNVPHPRTARIQENHILLIHAICDCIDSVLLEGM

SEQ ID NO: 2604 - protein, 186 aa, Neisseria meningitidis
MSYQDILRGLLPPVSYARNAPRVRAQAEIDGAALDAVAESAQSVADAVDPRSAGQMLADWERVLGLDGTGKNRQRRVLAVMAKLNETGGLSIPYFVRLAEAAGYQIQIDEPQPFRAGVNRAGDRLAPQEIMWVWHVNVRGGNNRITRFRAGISAAGDRLTDYSDAVIESLFNRLKPAHTAIRFTYR

SEQ ID NO: 2605 - protein, 259 aa, Neisseria meningitidis
MFFVLSPAKNLNEKDPAPVSEFTQPDLLAESDILMQQLRELAPQQIAELMHVSDKIALLNAQRNAEWNTPFTPENAKQAVFMFNGDVYEGMDANTLNTDQIQYLQGRVRLLSGLYGLLRPLDLIQPYRLEMGTAFANLRGKNLYEFWGDIITNLLNDTLAQAGSNTLVNLASQEYFKSVNTKTLRARLITPIFKDEKNGKYKIISFYAKRARGLMVRYAAEHNITDPEMLKNFNYEGYAFNDAASNESEWVFMRSEQIK

SEQ ID NO: 2606 - protein, 130 aa, Neisseria meningitidis; identical to SEQ ID NO: 425

SEQ ID NO: 2607 - protein, 266 aa, Neisseria meningitidis
MNAFNLIIIGDEILHGSRQDKHFAFFKSLLESKGLKLNQVQYLPDEPDLLVRQLRRSFSDGIPTFVTGGIGATPDDHTRQAAAAALELPVVRHPEAAGFIEGITQKRGEPLDSPEHAQRLKMADFPEGAELVPNPFNNIAGFSIREHYFFPGFPVMAHPMAEWVLDTYYAGRFNQTQRGSRSVYVFEQPESRITPIMEHIEQTYPGVRSYSLPSVGWTHSDGTQVKPHIEFGIKAEGEAVNLLDAAWAEVLHSLDGLGAELKNRVN

SEQ ID NO: 2608 - protein, 158 aa, Neisseria meningitidis
MTVFDLAAMGLWYEIGFFRGINAVQKQRVHESLERVGMRQFAGRQIAHLSNGQFQRVLFARMLVQNAKFLLLDEPFNAVDARTTYELLDVLQKCHCGGHAIIAVLHDYEQVRAYFPNTLLLAREKIAAGATETILTEPYLAQANAKMQQQESPEWCAS

SEQ ID NO: 2609 - protein, 97 aa, Neisseria meningitidis
MNFQEENENIKNDIEINLLHSAEADSVEAMMDLAVYGLAAMVAKHNKTRGEQLVLQAIAGHMRKLLAALPETESLVQTGKVYRRLEDLIFKTYLPEQ

SEQ ID NO: 2610 - protein, 387 aa, Neisseria meningitidis; identical to SEQ ID NO: 30

SEQ ID NO: 2611 - protein, 473 aa, Neisseria meningitidis; identical to SEQ ID NO: 2225

SEQ ID NO: 2612 - protein, 206 aa, Neisseria meningitidis; identical to SEQ ID NO: 1853

SEQ ID NO: 2613 - protein, 156 aa, Neisseria meningitidis
MYDVNTHDVRRFFARVWQQRLNPLQLSALEQKALRIIEAHPEYHRYLERIEDHLDTDWLPENGESNPFLHMSLHLSVQEQAGIDQPHGIRAIHDTLCAKRGWLEAEHEMMEALAETLWTAQRYGTGLDVNFYMTRLRKLIGLGAEDQARLNPHKIA

SEQ ID NO: 2614 - protein, 443 aa, Neisseria meningitidis
LAQDPFITDNAQRQHYEPGGKYHLFGDPRGSVSDRTGKINVIQDYTHQMGNLLIQQANINGTIGYHTRFSGHGHEEHAPFDNHAADSASKEQGNVDEGFTVYRLNWEGHEHHPADAYDGPKGGNYPKPTGARDEYTYHVNGTARSIKLNPTDTRSIRQRISDNYSNLGSNFSDRADEANRKMFEHNAKLDRWGNSMEFINGVAAGALNPFISAGEALGIGDILYGTRYAIDKAAMRNIAPLPTEGKFAVIGGLGSVAGFEKNTREAVDRWIQENPNAAETVEAVFNVAAAAKVAKLAKAAKPGKAAVSGDFSDSYKHNTASRLSQSVDGEMFQTRNVDFKAKSIGTKIHDGAQGKHISGHRNYIEGKSTLNQNINPQELLNGIHSGAYPVISKGARGNPVVDFGYPIGSDGKSGLSTNFGTIHSGKNGVHIVPANPKTIKKVQ

SEQ ID NO: 2615 - protein, 61 aa, Neisseria meningitidis
LLDYFQDSVPREPDYTKKPPSCKAVLKSPVKADTTIAKLEQEAAKAGLSKTALIERLIGDL

SEQ ID NO: 2616 - protein, 100 aa, Neisseria meningitidis
MGFRVGMNCFDTRLQADDYLLSSLPPTVTQDGKIIRPERVGDKWILNGKPVTLSYPECSNFEQIKQGSYVGSTVLILFVVIYGFRLLINFLKDMGKVGTD

SEQ ID NO: 2617 - protein, 161 aa, Neisseria meningitidis
LAADEVFEGPVEQDESDFGGRRKGRRGRGAAGKVVVFGILKHNGRVYTVIVDNAKSETLLPVIKKKIMPDSIVYTDSLSSCDKLDVSGFIHYRINHSKEFADRQNHINGIENFWNQAKRVLRKYNGIDRKSFPLFLKECEFRFNFGTPSQQLKILRDWCGI

SEQ ID NO: 2618 - protein, 101 aa, Neisseria meningitidis; identical to SEQ ID NO: 2399

SEQ ID NO: 2619 - protein, 143 aa, Neisseria meningitidis
MKNNIFLNLNKKSINNNHFVISIFFETIYQFETKDTLLECFKNITTTGHFGVIGAQYEKIDATRWIGDYEEVNGFEYIDKAPSIYFSVGDDFNPEELIIPINLAYHYFNIAISDFLIAHPEYQKKCKEIQKTYSQTNCSLHET

SEQ ID NO: 2620 - protein, 365 aa, Neisseria meningitidis
MNQTFTLPDTRPYPQNPIKNHLLLNAYQLAHNSSQASRKLSSGQLQTEIRGMLEQNHYINLSLALTMSPDAGTYAALLSSVNAVLDCEKEGEVQWFALPVVLVSGCKKERAIEMKLPTEALFACLKNYPHLRALTQETQWLPYLVHSSDLSAVAPDEWWRAKQNTEAAAQHLRRFAPRPLLLPEGQSVHVVYALGFGSGKVQTALGQNLLQAGLPLMQVWQENLASEGVTLFANPLSPDSPVRALSDGSHTRQRMAMDVFAANAIRAVRMQSPRVGVVAAAKAGGQVLFGFNATDGAFEVVPQVFLWQLSFTDNIGVIQQNFLDLMAECRVEHVYLLHNPLGEQESIPSYAEALKREGHNPFFSA

SEQ ID NO: 2621 - protein, 40 aa, Neisseria meningitidis; identical to SEQ ID NO: 1884

SEQ ID NO: 2622 - protein, 127 aa, Neisseria meningitidis
MEKIKNYIEFKKLFKNITEKFVRDLDITLIEAAEYSIIEFEIYLSEYPEDSTFIFTAWAIYLLENNCLNERGKDNFFIAEMKKCYQQTNLDRIKSIYSSSDYHIFAKDVNKIQQTFKLNLANIMQQE

SEQ ID NO: 2623 - protein, 121 aa, Neisseria meningitidis
MQFPYRNVPASRMRRMRRDDFSRRLMREHTLTADDLIYPVFVLEGSAREEDVPSMPGVKRQSLDRLLFTAEEAVKLGIPMLALFPVVTANKTERAQEAYNPEDSCRQLSAPCARGFPNWAL

SEQ ID NO: 2624 - protein, 47 aa, Neisseria meningitidis
VFDGKGEAKIPSYTWHHHQDTGRMQLISERKHTQTGHIGGEAMDKGK

SEQ ID NO: 2625 - protein, 55 aa, Neisseria meningitidis
MNEKDLIEWLEDRGELMVMKKDGEGFVIAARAPDGMWKTAEAETLAQAITLWEEV

SEQ ID NO: 2626 - protein, 321 aa, Neisseria meningitidis; identical to SEQ ID NO: 2168

SEQ ID NO: 2627 - protein, 279 aa, Neisseria meningitidis
VKRIFLFLATNIAVLVVINIVLAVLGINSRGGTGSLLAYSAVVGFTGSIISLLMSKFIAKQSVGAEVIDTPRTEEEAWLLNTVEAQARQWNLKTPEVAIYHSPEPNAFATGASRNSSLIAVSTGLLDHMTRDEVEAVLAHEMAHVGNGDMVTLTLIQGVVNTFVVFLSRIIANLIARNNDGSQSQGTYFLVSMVFQILFGFLASLIVMWFSRQREYRADAGAAKLVGAPKMISALQRLKGNPVDLPEEMNAMGIAGDTRDSLLSTHPSLDNRIARLKSL

SEQ ID NO: 2628 - protein, 84 aa, Neisseria meningitidis
  misc_feature 3, 4: 'Xaa' is any amino acid
VCXXGRRQLAYPINKIHKAHYVLMNIETTPEVVEELETAFRFNDAVLRHLTIKTKHAVTEASPMLGGEKAKNLLSGASEEAVAQ

SEQ ID NO: 2629 - protein, 758 aa, Neisseria meningitidis
MTTLHFSGFPRVGAFRELKFAQEKYWRKEISEQELLAVAKDLREKNWKHQAAANADFVAVGDFTFYDHILDLQVATGAIPARFGFDSQNLSLEQFFQLARGNKDQFAIEMTKWFDTNYHYLVPEFHADTEFKANAKHYVQQLQEAQALGLKAKPTVVGPLTFLWVGKEKGTVEFNRLSLLQKLLPVYVEILNALVEAGAEWIQIDEPALTVDLPKEWVEAYKDVYATLSKVSAKILLSTYFGSVAEHAALLKSLPVDGLHIDLVRAPEQLDAFADYDKVLSAGIIDGRNIWRANLNKVLETVEPLQAKLGDRLWISSSCSLLHTPFDLSVEEKLKANKPDLYSWLAFTLQKTQELRVLKAALNEGRDSVAEELAASQAAADSRANSSEIHRADVAKRLADLPANADQRKSPFADRIKAQQAWLNLPLLPTTNIGSFPQTTEIRQARAAFKKGELSAADYEAAMKKEIALVVEEQEKLDLDVLVHGEAERNDMVEYFGELLSGFAFTQYGWVQSYGSRCVKPPIIFGDVSRPEAMTVAWSTYAQSLTKRPMKGMLTGPVTILQWSFVRNDIPRSTVCKQIALALNDEVLDLEKAGIKVIQIDEPAIREGLPLKRADWDAYLNWAGESFRLSSAGCEDSTQIHTHMCYSEFNDILPAIAAMDADVITIETSRSDMELLTAFGEFKYPNDIGPGVYDIHSPRVPTEAEVEHLLRKAIEVVPVERLWVNPDCGLKTRGWKETLEQLQVMMNVTHKLRAELAK

SEQ ID NO: 2630 - protein, 123 aa, Neisseria meningitidis; identical to SEQ ID NO: 130

SEQ ID NO: 2631 - protein, 168 aa, Neisseria meningitidis
MVDAWSVPDFESKICPPEALSERLARLPRPLVFTNGCFDILHRGHVTYLAQARSAGAALVLALNTDASVRRLGKDGDRPINPLENRAAVAAALESVDLVTWFDGDTPAALIEAVKPEILVKGGDWAADKIVGAAETLARGGQVFSIPFLHQTSTTKTLAKIRAAEGGK

SEQ ID NO: 2632 - protein, 1320 aa, Neisseria meningitidis
MSVVLPLRGVTALSDFRVEKLLQKAAALGLPEVKLSSEFWYFAGSEKALDAATVEKLQALLAAQSVEQTPKAREGLHLFLVTPRLGTISPWASKATNIAENCGLAGIERIERGMAVWLEGALTDEQKQQWAALLHDRMTESVLPDFQTASKLFHHLESETFSTVDVLGGGKEALVKANTEMGLALSADEIDYLVENYQALQRNPSDVELMMFAQANSEHCRHKIFNADFILNGEKQPKSLFGMIRDTHNAHPEGTVVAYKDNSSVIEGAKIERFYPNAAENQGYRFHEEDTHIIMKVETHNHPTAIAPFAGAATGAGGEIRDEGATGKGSRPKAGLTGFTVSNLNIPGLKQPWEQDYGKPEHISSPLDIMIEGPIGGAAFNNEFGRPNLLGYFRTFEEKFDGQVRGYHKPIMIAGGLGSIQAQQTHKDEIPEGALLIQLGGPGMLIGLGGGAASSMDTGTNDASLDFNSVQRGNPEIERRAQEVIDRCWQLGDKNPIISIHDVGAGGLSNAFPELVNDAGRGAVFELREVPLEEHGLTPLQIWCNESQERYVLSILEKDLDTFRAICERERCPFAVVGTATDDGHLKVRDDLFANNPIDLPLNVLLGKPPKTTRTDKTVTPSKKPFHAGDIDITEAAYRVLRLPAVAAKNFLITIGDRSVGGMTHRDQMVGKYQTPVADCAVTMMGFNTYRGEAMSMGEKPTVALFDAPASGRMCVGEAITNIAAVNIGDIGNIKLSANWMAACGNEGEDEKLYRTVEAVSKACQALDLSIPVGKDSLSMKTVWQDGEEKKSVVSPLSLIISAFAPVKDVRKTVTPELKNVEDSVLLFIDLGFGKARMGGSAFGQVYNNMSGDAPDLDDTSRLKAFYNVIQQLVAEDKLLAYHDRSDGGLFAVLVEMAFAGRCGLDIDLNLLLAQTFITNHTALSQSLRTEEVKALAEWQETIARTLFNEELGAVIQVRKQDVADIINLFYQQQLHHNVFEIGTLTDENTLIIRDGQTHLISDNLIKLQQTWQETSHQIQRLRDNPACADSEFALIGDNGRSALFANLKFDVNEDIAAPFINSGAKPKIAILREQGVNGQIEMAAAFTRAGFDAYDVHMSDLMAGRIHLADFKMLAACGGFSYGDVLGAGEGWAKSILFHPALRDQFAAFFADPDTLTLGVCNGCQMVSNLAEIIPGTAGWPKFKRNLSEQFEARLSMVHVPKSASLILNEMQGSSLPVVVSHGEGRADFALHGGNISADLGIALQYVDGQNQVTQTYPLNPNGSPQGIAGITNADGRVTIMMPHPERVYRAAQMSWKPEGWTELSGWYRLFAGARKALG

SEQ ID NO: 2633 - protein, 142 aa, Neisseria meningitidis
LAHLKKRPQHKGMIVIGNQFEQLQPLLQMPSENLQDMLRKEWPAPKTFLLSAKSCVLPELRGKQRSKLAVRVPAHVGARRLCQALQTPLVSTSCNRAGKRACRTEREVRRQFGRDVWIVGGRIGRQKSPSQIIDGETGKRLR

SEQ ID NO: 2634 - protein, 54 aa, Neisseria meningitidis
LHFKCESAGLQVRIGQRFYRTTARAVIGSGGTAEIPAIADEPGAAANVATARRN

SEQ ID NO: 2635 - protein, 152 aa, Neisseria meningitidis
LLTKLKILLFLFLFVFVLAINLLFFFFSSDIESFGNYQFEYVYDKGWPANYILVMKDGNEGNFDKIISGLVLEYYKEDDNIYFSYIDGQGFASDSCYYKPEILYGKIILNKNHIININSMEKNNFLSEDKIMKGTRNWLADPKNKCNIQTLD

SEQ ID NO: 2636 - protein, 546 aa, Neisseria meningitidis
MTDNSPPPNGHAQARVRKNNTFLSAVWLVPLIALIAGGWLWVKEIRNRGPVVTLLMDSAEGIEVNNTVIKVLSIDVGRVTRIKLRDDQKGVEVTAQLNADVSGLIRSDTQFWVVKPRIDQSGVTGLGTLLSGSYIAFTPGKSDEAKDVFQVQDIPPVTAIGQSGLRLNLIGKNDRILNVNSPVLYENFMVGQIESAHFDPSDQSVHYTIFIQSPNDKLIHSASRFWLESGINIETTGSGIKLNSAPLPALLSGAISFDSPKTKNSKNVKSEDSFTLYDSRSEVANLPDDRSLYYTAFFKQSVRGLTVGSPVEYKGLNVGVVSDVPYFDRNDSLHLFENGWIPVRIRIEPSRLEINADEQSKEHWKQQFQTALNKGLTATISSNNLLTGSKMIELNDQPSSSPKLRPHTVYADDTVIATQGGGLDDLQVKLADLLDKFGKLPLDKTVSGLNASLAELKSTLKSINTLSNNPQTQNIPNELNQTLKELRTTLQGVSPQSPIYGDVQNTLQSLDKTLKDVQPVINTLKEKPNALIFNSSSKDPIPKGSR

SEQ ID NO: 2637 - protein, 250 aa, Neisseria meningitidis
MANQRPIYGFHAVNARLWQNPKSIVELYVQEGKNDVRTREVLEKAANENIRVYFADADRLNAISKGARHQGVVGFIDASKNHVHLEDVLENLSEPPLLLILDGITDPHNLGACLRTADAMGVHAVIAPKDKSAGLNATVSKVASGAAETVPYITVTNLARTLRELKEYGIWIIGTDMGGNADLYHCDLPDSAAWVMGNEGDGMRRLTREHCDMLVSIPMFGTVESMNVSVSAGMVLSETRRQRVLKNEKA

SEQ ID NO: 2638 - protein, 216 aa, Neisseria meningitidis; identical to SEQ ID NO: 2167

SEQ ID NO: 2639 - protein, 349 aa, Neisseria meningitidis; identical to SEQ ID NO: 328

SEQ ID NO: 2640 - protein, 70 aa, Neisseria meningitidis
  misc_feature 64, 65: 'Xaa' is any amino acid
MNPMYITFAIYLVAVLLIGLAAYFSTRNFDDYILGGRSLGPFVTAMSAGASDMSGWLLMGLPGXXTHLIN

SEQ ID NO: 2641 - protein, 205 aa, Neisseria meningitidis
MSHKKQDAFQGLIDALKVLPNVGPKSAQRIAYHLLQHKRKEAEKLVDALQTALKQVYHCAMCNTFCEGGLCDICADETRDGRRLMVVHMPADVSNMEAANCHDGLYFVLMGQINTALGMDVSAIALDRLAQRLGGGEVEEIIIATAFTAEGNATAYVLSEFFKNLPYKVSRLSQGIPLGGELEYVDAGTLAQAVYERRLIKEGGA

SEQ ID NO: 2642 - protein, 684 aa, Neisseria meningitidis
MTRKILVTSALPYANGSIHLGHMVEHIQTDVWVRFQKLRGHECYYCCADDTHGTPVMLAAQKQGIAPEDMIAKVREEHLADFTDFGIGYDNYYSTHSPENKQFSQDIYRALKANGKIESRVIEQLFDPEKQMFLPDRFVKGECPKCHAQDQYGDNCEVCGTTYSPTELINPYSAVSGAKPELRESEHFFFKLGECADFLKAWTSGNNPHDGKPHLQAEALNKMKEWLGEGEETTLSDWDISRDAPYFGFEIPDAPGKYFYVWLDAPVGYMASFKNLCDRIGVDFDEYFKADSQTEMYHFIGKDILYFHALFWPAMLHFSGHRAPTGVYAHGFLTVDGQKMSKSRGTFITAKSYLEQGLNPEWMRYYIAAKLNSKIEDIDLNLQDFISRVNSDLVGKYVNIAARASGFIAKRFEGRLKDVADSALLAKLTAQSEAIAECYESREYAKALRDIMALADIVNEYVDANKPWELAKQEGQDARLHEVCSELINAFTMLTAYLAPVLPQTAANAARFLNLDAITWANTRVTLGEHAINKYEHLMQRVEQKQVDDLIEANKQSIQTTPAPVEDSKYEKVAEQAGFDDFMKIDMRVAKVLNCEAVEGSTKLLKFDLDFGFEKRIIFSGIAAFYPNPAELNGRMVIAVANFAPRKMAKFGVSEGMILSAATADGKLKLLDVDAGAQPGDKVG

SEQ ID NO: 2643 - protein, 522 aa, Neisseria meningitidis
MSQTDTQRDGRFLRTVEWLGNMLPHPVTLFIIFIVLLLIASAAGAYFGLSVPDPRPVGAKGRADDGLIHVVSLLDADGLIKILTHTVKNFTGFAPLGTVLVSLLGVGIAEKSGLISALMRLLLTKSPRKLTTFMVVFTGILSNTASELGYVVLIPLSAIIFHSLGRHPLAGLAAAFAGVSGGYSANLFLGTIDPLLAGITQQAAQIIHPDYVVGPEANWFFMVASTFVIALIGYFVTEKIVEPQLGPYQSDLSQEEKDIRHSNEITPLEYKGLIWAGVVFVALSALLAWSIVPADGILRHPETGLVSGSPFLKSIVVFIFLLFALPGIVYGRVTRSLRGEQEVVNAMAESMSTLGLYLVIIFFAAQFVAFFNWTNIGQYIAVKGATFLKEVGLGGSVLFIGFILICAFINLMIGSASAQWAVTAPIFVPMLMLAGYAPEVIQAAYRIGDSVTNIITPMMSYFGLIMATVIKYKKDAGVGTLISMMLPYSAFFLIAWIALFCIWVFVLGLPVGPGAPTLYPAP

SEQ ID NO: 2644 - protein, 297 aa, Neisseria meningitidis
MIIVMSRRAAEADIAGVVAFIRSRGLREHISHGDERTVIGAIGDDRVLSVREVQTLPEVEKAVRILDTWKTVSRENRAEDSRVAAKGVAFGGGETVRIAAEPSVWRNADAVFLDPFFTSANLYDTSSADERRGRCRRLAEQTASAHGAGKPVLVRVRNVRHVEAALNAGADILYLGGGLMSDLAVLNEAGSLNIPLVLCKDKHHSAEDWLNAAEYVVSRGNRHLILGESGVLSHTKDHPYRLDVESIVKVRQISHLPVIANITGLWNRDMPQEILYGLAKAAGACGIVGTCFEKSGG

SEQ ID NO: 2645 - protein, 333 aa, Neisseria meningitidis
MIDGQTTEPKQKTRIILAPMQGLVDDVMRDLLTRIGGYDECVSEFVRITHTVHSRSIWLKYVPEIANGNKTFSGTPCTVQLLGSDADNMAANALEAVRFGANKIDLNFGCPAPTVNKHKGGAILLKEPELIFHIVKTLRGRLPAHIPLTAKMRLGYEDKGRALECACAIAEGGACGLTVHARTKAEGYEPPAHWEWIRKIRDSVNIPVTANGDVFSLQDYIGIKTISGCNSVMLGRGAVIRPDLARQIKQYENGGPVKDTDFAEVSKWIRQFFELCLTKEANNKYPIARLKQWLGMMKKTFDPAQTLFDRVRTVKDADEVRRILNAFEHEINV

SEQ ID NO: 2646 - protein, 305 aa, Neisseria meningitidis
MSIIHYLSLHVESARTALKELLRQPFGTLLTLLMLAVAMTLPLFMYLGIQSGQSVLGKLNESPQITVYMETAAAQSDSDTVRSLLARDKRIANVRFIGKEDGLAELQSNLDQNLVSMLDGNPLPDAFIVTPDPATTPAQMQAIYRDITKLPMVESASMDTEWVQTLYQINEFIRKILWFLSLTLGMAFVLVAHNTIRLQILSRKEEIEITKLLGAPASFIRRPFLYQAMWQSILSAAVSLGLCGWLLSTVRPLVDAIFKPYELNIGWRFFYPEEIALVFGFVIALGVFGAWLATTQHLLGFKAKK

SEQ ID NO: 2647 - protein, 716 aa, Neisseria meningitidis
MKTPLLKPLLITSLPVFASVFTAASIVWQLGEPKLAMPFVLGIIAGGLVDLDNRLTGRLKNIIATVALFTLSSLTAQSTLGTGLPFILAMTLMTFGFTILGAVGLKYRTFAFGALAVATYTTLTYTPETYWLTNPFMILCGTVLYSTAIILFQIILPHRPVQESVANAYDALGGYLEAKADFFDPDEAAWIGNRHIDLAMSNTGVITAFNQCRSALFYRLRGKHRHPRTAKMLRYYFAAQDIHERISSAHVDYQEMSEKFKNTDIIFRIHRLLEMQGQACRNTAQALRASKDYVYSKRLGRAIEGCRQSLRLLSDGNDSPDIRHLRRLLDNLGSVDQQFRQLQHNGLQAENDRMGDTRIAALETGSLKNTWQAIRPQLNLESGVFRHAVRLSLVVAAACTIVEALNLNLGYWILLTALFVCQPNYTATKSRVRQRIAGTVLGVIVGSLVPYFTPSVETKLWIVIASTTLFFMTRTYKYSFSTFFITIQALTSLSLAGLDVYAAMPVRIIDTIIGASLAWAAVSYLWPDWKYLTLERTAALAVCSNGAYLEKITERLKSGETGDDVEYRATRRRAHEHTAALSSTLSDMSSEPAKFADSLQPGFTLLKTGYALTGYISALGAYRSEMHEECSPDFTAQFHLAAEHTAHIFQHLPETEPDDFQTALDTLRGELDTLRTHSSGTQSHILLQQLQLIARQLEPYYRAYRQIPHRQPQNAA

SEQ ID NO: 2648 - protein, 114 aa, Neisseria meningitidis
MNLENYENILIKLLFHHNNLVNEYSYFIENKNLFKIVSRTKTSKGFFFTIEKPLNFLSKKTYFEFNFKYLHSGKERFGSFMCWINTNLMEFEGVFFNDPLPDNMIINNFFEIND

SEQ ID NO: 2649 - protein, 62 aa, Neisseria meningitidis
VITNDILAINYQIALALIENNHETLNDDDVAMIFSGSPHAGFMSQRYAEKFYFHDEYQQLDL

SEQ ID NO: 2650 - protein, 71 aa, Neisseria meningitidis
MKAIHPYACPRCCRLPANTFRTGMANSASKFCIAKGGRREVKKDESGGGYALCHLPDSRIVEEWEYFRSQH

SEQ ID NO: 2651 - protein, 691 aa, Neisseria meningitidis
MLCVLAGAAYGVFRTEAALSSQWRAEAVSGVPLTVEVADMPRSDGRRVQFAAKAVDSGGRTFDLLLSDYKRREWAVGSRWRITARVHPVVGELNLRGLNREAWALSNGIGGAGTVGADRVLLHGGSGWGIAVWRSRISRNWQQADADGGLSDGIGLMRALSVGEQSALRPELWQAFRPLGLTHLVSISGLHVTMVAVMFAWLAKRLLACSPRLPARPRAWVLAAGCAGALFYALLAGFSVPTQRSVLMLAAFAWAWRRGRLSAWATWWQALAAVLLFDPSAVLGVGTWLSFGLVAALIWACSGRLHEGKRQTAVRGQWAASVLSLVLLGYLFASLPLISPLVNAVAIPWFSWVLTPLALLGSVVPFAPLQQLGAFLAEYTLRFLVWLADVSPEFAVAAAPLPLLVLAVCAALLLLLPRGLGLRPWAVLLLAGFVFYRSPGVPENEVAVTVWDAGQGLSVSVQTANHHLLFDTGTAAAAQMGIVPSLNAAGVRRLDKLVLSHHDSDHDGGFQAVGKIPNGGIYAGQPEFYEGARHCAEQRWQWDGVDFEFLMPSERKNIDDNGKSCVLRVVAGGAALLVTGDLDTKGEESLVGKYGGNLYSQVLVLGHHGSNTSSSGVFLNAVSPEYAVASSGYANAYKHPTEAVQNRIRAHGIKLLRTDLSGALQFGLGRGGVKAQRLRGYKFYWQKKPFE

SEQ ID NO: 2652 - protein, 252 aa, Neisseria meningitidis
MKITPVKALTDNYIWMIQHGNHAVCVDPSEPSPVLEFLVRNRLMLAQTWVTHPHPDHEGGAAALWRGYMESPVYGESDIEAATHTVTAGTQFTFGDGQVTVWATPGHTDRHTSYLLETSDGIHVFCGDTLFSAGCGRVFTGTIEQLYDSFQRFNRLPENTLFYPAHEYTAANLDFAAHIEPDNADIQTALKAAAHTPTLPVTLARERRVNPFLRVDLPHVRDRAEALSGKTLNSSLDTFVALRELKNQYRTK

SEQ ID NO: 2653 - protein, 395 aa, Neisseria meningitidis; identical to SEQ ID NO: 2032

SEQ ID NO: 2654 - protein, 492 aa, Neisseria meningitidis
MKYKDLRDFIAMLEQQGKLKRIAHPVSPHLEMTEIADRVLRAEGSALLFENPIKPDGTRYGYPVLANLFGTPERVAMGMGADSVSKLREIGQTLAYLKEPEPPKGIKDAFSKLPLLKDIWSMAPNVVKNAPCQEIVWEGEDVDLYQLPIQHCWPEDVAPLVTWGLTVTRGPHKKRQNLGIYRQQLIGKNKLIMRWLSHRGGALDYQEFRKLNPDTPYPVAVVLGCDPATILGAVTPVPDTLSEYQFAGLLRGSRTELVKCIGNDLQVPARAEIVLEGVIHPNETALEGPYGDHTGYYNEQDHFPVFTVERITMRENPIYHSTYTGKPPDEPAVLGVALNEVFVPLLQKQFPEITDFYLPPEGCSYRMAVVSMKKQYAGHAKRVMMGCWSFLRQFMYTKFIIVVDDDVNVRDWKEVIWAVTTRMDPVRDTVLVENTPIDYLDFASPVSGLGGKMGLDATNKWPGETDREWGRVIKKDPAVTAKIDEIWWELGL

SEQ ID NO: 2655 - protein, 505 aa, Neisseria meningitidis
MSPKKIPIWLTGLILLIALPLTLPFLYVAMRSWQVGINRAVELLFRPRMWDLLSNTLTMMAGVTLISIVLGIACALLFQRYRFFGKTFFQTAITLPLCIPAFVSCFTWISLTFRVEGFWGTVMIMSLSSFPLAYLPVEAALKRISLSYEEVSLSLGKSRLQTFFSAILPQLKPAIGSSVLLIALHMLVEFGAVSILNYPTFTTAIFQEYEMSYNNNTAALLSAVLMAVCGIVVFGESIFRGKAKIYHSGKGVARPYPVKTLKLPGQIGAIVFLSSLLTLGIIIPFGVLIHWMMVGTSGTFALVSVFDAFIRSLSVSALGAILTILCALPLVWASVRYRNFLTVWIDRLPFLLHAVPGLVIALSLVYFSINYTPAVYQTFIVVILAYFMLYLPMAQTTLRTSLEQLPKGMEQVGATLGRGHFFIFRTLVLPSILPGITAAFALVFLKLMKELTATLLLTTDDVHTLSTAVWEYTSDAQYAAATPYALMLVLFSGIPVFLLKKYAFK

SEQ ID NO: 2656 - protein, 76 aa, Neisseria meningitidis; identical to SEQ ID NO: 374

SEQ ID NO: 2657 - protein, 487 aa, Neisseria meningitidis
MKETAFKTGMCLGSNNLSRLQKAAQQILIVRGYLTSQAIIQPQNMDSGILKLRVSAGEIGDIRYEEKRDGKSAEGSISAFNNKFPLYRNKILNLRDVEQGLENLRRLSSVKTDIQIIPSEEEGKSDLQIKWQQNKPIRFSIGIDDAGGKTTGKYQGNVALSFDNPLGLSDLFYVSYGRGLAHKTDLTDATGTETASGSRSYSVHYSVPVKKWLFSFNHNGHRYHEATEGYSVNYDYNGKQYQSSLAAERMLWRNRLHKTSVGMKLWTRQTYKYIDDAEIEVQRRRSAGWEAELRHRAYLNRWQLDGKLSYKRGTGMRQSMPAPEENGGDILPGTSRMKIITAGLDAAAPFILGKQQFFYATAIQAQWNKTPLVAQDKLSIGSRYTVRGFDGEQSLFGERGFYWQNTLTWYFHPNHQFYLGADYGRVSGESAQYVSGKQLMGAVVGFRGGHKVGGMFAYDLFAGKPLHKPKGFQTTNTVYGFNLNYSF

SEQ ID NO: 2658 - protein, 146 aa, Neisseria meningitidis
LDKQIDDHTHTHFDGKAQVAEQIKGIGSITTATLMAMLPELGRLSHKRIASLAGIAPHPRESGETKFKSRCFGGKSAVRKALYMATVAATRFEPLIRDFYQRLLSEGKPYKVAVTACMRKLLETFAKFLSLPTAETQTQVFVYFRS

SEQ ID NO: 2659 - protein, 262 aa, Neisseria meningitidis; identical to SEQ ID NO: 256

SEQ ID NO: 2660 - protein, 99 aa, Neisseria meningitidis; identical to SEQ ID NO: 1110

SEQ ID NO: 2661 - protein, 120 aa, Neisseria meningitidis
MNQLDQLGTRINLICNVFDKWIGQQDLNYNLFAVLYTLATEGSRTQKHIGEKWSLPKQTVSGVCKTLAGQGLIEWQESEQDRRERLLSLTEKGKAHAAPLTESAQEFSDKETFAKFPKIP

SEQ ID NO: 2662 - protein, 196 aa, Neisseria meningitidis
MGLELPLILGTSSVFRREQMERLGIAFQAASPDFDETPMLGESAPQTALRLAEGKARSLTGRFPEALIVGADQVAWCDGRQWGKPMNLANAQKMLMHLSGREIEFYSAIVLLNTVTGRMRRHIDKTVVVMRQLDELHILRYLEREPDAVYCSCALKSEDLGALLIERIESTDPNALIGLPVFRLVDFLKNEGVEVL

SEQ ID NO: 2663 - protein, 193 aa, Neisseria meningitidis; identical to SEQ ID NO: 1322

SEQ ID NO: 2664 - protein, 352 aa, Neisseria meningitidis; identical to SEQ ID NO: 1807

SEQ ID NO: 2665 - protein, 589 aa, Neisseria meningitidis
MTVQTKTKGLAWQEKPLSDNERLKTESNFLRGTILDDLKDPLTGGFKGDNFQLIRFHGMYEQDDRDIRAERAEAKLEPLKFMLLRCRLPGGIIKPSQWIELDKFARENSHYRSIRLTNRQTFQFHGVPKAKLQTMHRLLHKLGLDSIATAADMNRNVLCTSNPIESELHRQAYEYAKKISEHLLPRTRGYLDVWVDGKKVQSSDDFLQEDEPILGKTYLPRKFKTAVVIPPLNDVDCYGNDLDFVAISDGNGQLAGFNVLAGGGLSMEHGNTKTYPNISLELGFVPPEHALKAAEAVVTTQRDFGNRSDRKNARTRYTIQNLGLDNFRAEVERRMGMPFEPIRPFKFTGRGDRIGWVKGIDGNWHLTLFIESGRLVDEGGKQLLTGVLEIAKIHKGDFRITANQNLIVANVAEADKAKIEELARTYGLIRNDVSKLRENAMSCVSFPTCPLAMAEAERVLPDFIDDLDKIMAKHGTSDDYIVTRITGCPNGCGRAMLAEIGLVGKAVGRYNLHIGGDREGVRIPRLYKENITLPEILAELDDLIGKWAAERNIGEGFGDFAIRTGIVKPVLNAPVDFWDASKAVAIARA

SEQ ID NO: 2666 - protein, 167 aa, Neisseria meningitidis
MSDEFNRFIERVLSHEGGYVNHPQDPGGETNWGITKRTAQANGYNGSMRAMTREQAIGIYRKAFWERYRADQMPEAVAFQFFDACVNHGYGNAARMLQRAAGVPDDGIIGEISLKAINSLPENDLLLRFNAERLVFYTKLGTFTSFGKGWVRRVAQNLIHASADNTD

SEQ ID NO: 2667 - protein, 757 aa, Neisseria meningitidis
MNITQILSQELSATTAQINAAIELLDDGATVPFIARYRKEATGGLDDTQLRRLAERLQYLRELEERKAVVLKSIEEQGKLSDGLRAQIEAADNKTALEDLYLPYKPKRRTKAQIAREHGLQPLADVLLAEQSQDVEAAAQGYLNENVPDAKAALDGARAILMEQFAEDAELIGTLRDKLWNEAEIHAQVVGGKETEGEKFSDYFDHREPIRAMPSHRALAVLRGRNEGVLNIALKYQPDDTPITQQSEYEQIIARRFKVSDGHKWLRDTVRLTWRAKIFLSLELEALNRLKEAADTDAITVFARNLKDLLLAAPAGRLTTLGLDPGYRNGVKCAVVDDTGKLLDTVIVYLHQENNMLATLSRLIKQHGVKLIAIGNGTASRETDKIAGELVREMSKMGLHKIVVSEAGASIYSASELAAREFPDLDVSLRGAVSIARRLQDPLAELVKIDPKSIGVGQYQHDVNQSRLAKSLDAVVEDCVNAVGVDVNTASAPLLARISGLNQTLAQNIVAYRDENGAFDSRKKLLKVPRLGEKTFEQAAGFLRINGGKEPLDASAVHPEAYPVVAKMLAQQGISAAELIGNRERVKQIKVSDFTDERFGLPTILDILSELEKPGRDPRGEFQTASFAEGIHEISDLQVGMILEGVVSNVANFGAFVDIGVHQDGLVHISALSNKFVQDPREVVKAGDVVKVKVLEVDAARKRIALTMRLDDEPGGAKHKMPSENRSRERTAGRKPQRNDRAPANSAMADAFAKLKR

SEQ ID NO: 2668 - protein, 66 aa, Neisseria meningitidis; identical to SEQ ID NO: 1185

SEQ ID NO: 2669 - protein, 224 aa, Neisseria meningitidis
MWKEILLNYGIFLLELLTVFGAIALIVLAIVQSKKQSESGSVVLTDFSENYKKQRQSFEAFFLSGEEAKHQEKEEKKKEKAEAKAEKKRLKEGGEKSSETQKSRLFVLDFDGDLYAHAVESLRHEITAVLLIAKPEDEVLLRLESPGGVVHGYGLAASQLRRLRERNIPLIVAVDKVAASGGYMMACVADKIVSAPFAIVGSVGVVAEVPNIHRLLKNMILMWM

SEQ ID NO: 2670 - protein, 379 aa, Neisseria meningitidis
MKKTLAAAAILSLALTACGGGSDTAAQTPSAKPEAGQSGKLNIYNWSDYVDPETVAAFEKETGIKTRSDYYDSNETLEAKVLTGKSGYDLTAPSIANVGRQIKAGAYQKIDKAQIPHYGNIDKDLLKMMEAVDPGNEYAVPYFWGINTLAINTQQVKKALGTDKLPENEWDLVFKPEYTAKLKSCGISYFDSAIEQIPLALHYLGKDPNSENPEDIKAAVDMMKAVRGDVKRFSSSGYIDDMAAGNLCAAIGYGGDLNIAKTRAEEAANGVEIKVLTPKTGVGVWVDSFMIPRDAQNVANAHRYIDYTLRPEVAAKNGSFVTYAPASRPARDLMEAKYTNDPSIFPTKELMEKSFIVSPKSAESAKLGVKLWQGLKAGK

SEQ ID NO: 2671 - protein, 236 aa, Neisseria meningitidis
MNAAIEHVQAVAFDLDGTLCDSVPDLAAAAEAMLEQLGMKPLPAKVVESYVGDGIGKLVHRVLSNDRDREADSELWEKGFVSYMKYYRDHLSVFTRPYPETATGLALLKSLGIPLAVITNKNEILAVELLKQLGLADYFSLILGGDSLPEKKPSPLPLRHAAEVLGIDVANMVMVGDSRNDIIAAKAAGCLSVGVTFGYGDMTLLSQDDATRPDWIIGSLPEIYENLQPQKNKDEE

SEQ ID NO: 2672 - protein, 263 aa, Neisseria meningitidis
MARHPYRRLRPAKSGFPEVGISEEGNIRSLHLGSDTIQSSMNLDHPSELVLSYSRAMMGWLLFTDALPQHITQIGLGGGSFARWIDTYLPDTRQTAVDINPQVIAIARNLFELPFEGEKFEIIEADGAEYIKIFRHNTDVILVDGFDGEQIIDALVEEPFFRDCRNALSSDGIFVTNWWSGDKRYQRFIERLLNVFEGRVLELPAESHGNVAVMAFQSSPKEQNIDKLKKRADKLSNAYGLDFHRMLAGLKASNPNNGKHFHL

SEQ ID NO: 2673 - protein, 346 aa, Neisseria meningitidis
MDISDFDFTLPEKLIAQHPPEVRGSSRLLVALPDMPLQDRVFGDLPDYVEAGDVLVFNNTKVMKARLFGQKDSGGRIEALIERVLDNHTALAHIRSSKSPKPGMGLVFEGGIRAVTVGREGELFCLRFEGGQTVYELLEQNGHLPLPPYIERAADADDDSRYQTVYAKYQGAVAAPTAGLHFTEELLRRLKDKGAVTAEVTLHVGAGTFQPVRVDKIEEHKMHSEWFEVPSETAAAVEAAKARGNKVWAVGTTSMRALESAARATGRLKAGQGDTDIFITPGYRFNVVDRLVTNFHLPKSTLLMLVSAFSGMGHIRAAYRYAVEREYRFFSYGDAMVLGWNEGVVR

SEQ ID NO: 2674 - protein, 311 aa, Neisseria meningitidis
MGHNMMTTQKWYEHITNVIIGNTANFNSGCPEAIDYVDERKGVPLAAMRHILMYTEAAASHAYLFEHDLNKFKQYAYVAGKLGILRSVNSTDPEPFFFPCDMLNIQNPMFLMLMSDSPQLREFLVRNIDNIANDTEAFINRYDLNRHMIYNTLLMVEGKQLDRLKQRSEKVLAHPTPSKWLQKRLYDYRFFLAFAEQDAEAMKAALEPLFDKKTARMAAKETLSYFDFYLQPQIVTYAKIASMHGFDLGIDQEIAPRDLIVYDPLPADEYQDIFDFMKQYDLSYPYEYLQDWIDYYTFKTDKLVFGNAKRE

SEQ ID NO: 2675 - protein, 421 aa, Neisseria meningitidis
  misc_feature 2, 3, 4: 'Xaa' is any amino acid
VXXXGKYHLFGDGRGSVKIGLRRPNIDATAVGPILPITHERTGFEGVIGYETHFSGHGHEVHSPFDHHDSKSTSDFSGGVDGGFTVYQLHRTGSEIHPEDGYDGPQGSDYPPPGGARDIYSYYVKGTSTKTKTNIVPQAPFSDRWLKENAGAASGFFSRADEAGKLIWESDPNKNWWANRMDDVRGIVQGAVNPFLMGFQGLGVGAITDSAVNPVTYAAARKTLQGIHNLGNLSPEAQLAAATALQDSAFAVKDGINSAKQWADAHPNITATAQTALAIAEAATTVWGGKKVNLNPTKWDWVKNTGYKTPAARPMQTVDGEMAGGNKPPKSNTSTLLTEFNQNDINHVFQKKHEFDSFLKNYTSKADAYSAIQNVANNTLNSSTYQKGTWVTIQVDGVPVSVKGNFVDGKFRIGTATMKSF

SEQ ID NO: 2676 - protein, 330 aa, Neisseria meningitidis
MQSAGIQVLAGIDYEPSCKETYEANINAKFIQADVFELQPETLEKELGLKKNDDDLILIGCSPCQYWSVIQTDKRKSEKSKSLLLEFQRFVEYFNPGYVVVENVPGILSRMKESRLDNFIKLLEEKGFTVHFGIHNTADYGIPQSRKRFTLIANRITKEKLEPVKYSGKRLTVRDVLGMENGFPKIIAGHQDETDFMHSCAGLSDINLKRLALIPKNGGNRLAFAHIPELQLECFIGKDNSFKDTFGRLWWDKPAPTITTKFFSISNGRFAHPEEDRALSLREGATLQSFPRNYVFKAGSRDKIARLIGNAVPPMYAEKIGRAIVDNIEC

SEQ ID NO: 2677 - protein, 602 aa, Neisseria meningitidis
MNKIYRIIWNSALNAWVVVSELTRNHTKRASATVATAVLATLLFATVQANATDDDDLYLEPVQRTAVVLSFRSDKEGTGEKEGTEDSNWAVYFDEKRVLKAGAITLKAGDNLKIKQNTNENTNENTNENTNDSSFTYSLKKDLTDLTSVETEKLSFGANGNKVNITSDTKGLNFAKETAGTNGDPTVHLNGIGSTLTDTLLNTGATTNVTNDNVTDDEKKRAASVKDVLNAGWNIKGVKPGTTASDNVDFVRTYDTVEFLSADTKTTTVNVESKDNGKRTEVKIGAKTSVIKEKDGKLVTGKGKGENGSSTDEGEGLVTAKEVIDAVNKAGWRMKTTTANGQTGQADKFETVTSGTKVTFASGNGTTATVSKDDQGNITVKYDVNVGDALNVNQLQNSGWNLDSKAVAGSSGKVISGNVSPSKGKMDETVNINAGNNIEITRNGKNIDIATSMTPQFSSVSLGAGADAPTLSVDDEGALNVGSKDANKPVRITNVAPGVKEGDVTNVAQLKGVAQNLNNRIDNVDGNARAGIAQAIATAGLAQAYLPGKSMMAIGGGTYRGEAGYAIGYSSISDTGNWVIKGTASGNSRGHFGTSASVGYQW

SEQ ID NO: 2678 - protein, 458 aa, Neisseria meningitidis
MHDKTWSGRFNEPVSELVKQYTASIGFDRRLAEWDIQGSLAHAQMLKETGVLDEGDLADIRQGMAEILEEIRSGKIEWSSDLEDVHMNIERRLTDKIGDAGKRLHTGRSRNDQVATDIRLWLRDQITVIQNLIQNLQTALLDLAEQNAETVMPGFTHLQVAQPVSFGHHMLAYVEMLGRDNERMADCRRRVNRMPLGAAALAGTTYPIRREITAELLGFEQICQNSLDAVSDRDFAVEFTAAASLIMVHLSRLSEELILWMSPRFGFIDIADRFCTGSSIMPQKKNPDVPELVRGKSGRVIGHLIGLITLMKSQPLAYNKDNQEDKEPLFDTADTLIDTLRIYADMMRGVTVKPDNMRAAVMQGFATATDLADYLVKKGMPFRDAHEVVAQAVRHADEAGVDLSELPLEVLQGFSDLIADDVYGVLTPEGSLNARNHLGGTAPEQVRLQVKRWREVSA

SEQ ID NO: 2679 - protein, 43 aa, Neisseria meningitidis
VRYDINNNIYVLANPKTFKIKTMFKPNLGKKYYDGEFKKDMGN

SEQ ID NO: 2680 - protein, 273 aa, Neisseria meningitidis
VNRTAFCCLSLTAALILTACSSGGGGVAADIGAGLADALTAPLDHKDKSLQSLTLDQSVRKNEKLKLAAQGAEKTYGNGDSLNTGKLKNDKVSRFDFIRQIEVDGQLITLESGEFQIYKQDHSAVVALQIEKINNPDKIDSLINQRSFLVSGLGGEHTAFNQLPDGKAEYHGKAFSSDDAGGKLTYTIDFAAKQGHGKIEHLKTPEQNVELAAAELKADEKSHAVILGDTRYGSEEKGTYHLALFGDRAQEIAGSATVKIGEKVHEIGIAGKQ

SEQ ID NO: 2681 - protein, 289 aa, Neisseria meningitidis
MSANEYTQIGWIGLGQMGLPMVTRLLDGGIEVGVYNRSPDKTAPISAKGAKVYGNTAELVRDYPVIFLMVSDYAAVCDILNGVRDGLAGKIIVNMSTISPTENLAVKALVEAAGGQFAEAPVSGSVGPATNGTLLILFGGSEAVLNPLQKIFSLVGKKTFHFGDVGKGSGAKLVLNSLLGIFGEAYSEAMLMARQFGIDTDTIVEAIGGSAMDSPMFQTKKSLWANREFPPAFALKHASKDLNLAVKELEQAGNTLPAVETVAASYRKAVEAGYGEQDVSGVYLKLAEH

SEQ ID NO: 2682 - protein, 331 aa, Neisseria meningitidis
LKAAYQNIATVWQGDFHNAKQVLSAMKKKVRKPAAVRSDADIAALFHAHRMKQAQQSRILNMLAVEIRPGFVLDNKRAPDIRAALLDVYGEADGKPFFLPLNLLLGFMGAHEWHKKGVAVPQLGGSIHVPFGVFSPLRGEYLDLLAHAPSTGFQTAFDIGTGSGVLAAILAKQGIPSVIGTDTNPKAVACARANIARLGFEKQVEIRETDLFPEGFADLIVCNPPWLPAKPTSAVESALYDPESAMLAAFLRDAPKHLNPDGEIRLIISDLAEHLHLRPSDFLDKAFAQAGLRVADVLKTKPVHKKAADPNNPLAFARNRETTFLYRLKKA

SEQ ID NO: 2683 - protein, 389 aa, Neisseria meningitidis
MTAHKILPVLLSIILGVSHTTAASPAPNKLTVHAAPTLQTPETLTAAHIVIDLQSRQTLSAKNINTPVEPAALTQLMTAYLVFKNMKSGNIQSEENLKIPESAWASEGSRMFVRPGDTVSTDKLLKGMIALSANDAALTLAGRLGNGSIENFVQQMNKEARRLGMKNTVFKNPTGLSREGQVSTAKDLAQLSEALMRDFPEYYPLFSIKSFKFKNIEQNNRNILLYRDNNVNGLKAGHTESGGYNLAVSYSGNGRHILVITLGSESAETRASDNSKLLNWALQAFDTPKIYPKGKTVAQIQISGGSKKTVRAGFLKEAYITLPHKEAKMAEQILETIQPIPAPVKKGQILGKIKIRQNGYTIAEKEIVALENVEKRSRWQRLWVRLTGQ

SEQ ID NO: 2684 - protein, 204 aa, Neisseria meningitidis; identical to SEQ ID NO: 504

SEQ ID NO: 2685 - protein, 1161 aa, Neisseria meningitidis
MRLTHIKLSGFKSFTDPTTIHVPGQLVAVIGPNGCGKSNVIDAVRWVLGEASAKQLRGESMQDVIFNGAATRRPAPRASVELVFDNSDHSLQGAWGQYAEVSIKRQLTRQGESTYFINNQTVRRRDITDLFLGTGVGARGYAVIEQGMISRIIEARPEELRAYIEEAAGVSKYKERRKETEGRLKDTREHLQRLGDLQNELARQVEKLEKQAETAERYKSLTAQLNQQQDLLDYAQWQQSLAAADKATAQHQSLQAQQDETAAQVQALNDEVHALQTAEQSQQQAVHELGNKRGVLREQIARLEEQIRHQQNLHQRIERDKQAAQAQMQRIHQEQQQIRVKLEENESQTEEKQTELAEWAMQVAEHEERLPELEEAQATLNAAFQTQQDEANRIRRELALKQQQLAHAEQTVAKHEERKGRLKQENQALNLPDEAETAAAQEAAALLQSQQEHYEEQIIAAEEALHAAREAFQTASNRFQSLKQQHITLQAQQQALSQILSQQQEAADFWQATDHAAAPQLWQHITAPAEWQHALSVILAERLHARAVPQGFVPPEPLPQGQAAWLSDGLSGGIKKSLPVQALLNQIQAQPPFQTALHYWLDGVLCAPDLSYALAHQNDLGAHQIWLTPEGHQVDKVSVLLYAKPAQESLIAQKARLDGIASELENLAPELSAAEAAFKQAEAAVRSSEVQHKNLMQQQQQHTRQYSQAQQRAAELLARTNQGQIRREHIERELAQLAEEQTVLQHTSDGLSDDIVTLQEAAAELEHQQQTTAHSRQEQQGRLKQAQLALLEANRQYGLAEVAVHKLNQQKQNYRQQIAQLEQQTLDWQERQQELALAYETEFQNDEQHIKLEELSEAVQSLDEEYIVVQEKLAQIQEQGREQYARVQTLQTKLPQLQAATQTALLQQQEALINAKRYHQNLTERAADLDALEALAKESPKVLNSSIGSLSQQIEALGAVNLAALQELEEARERDGYYRSQSEDVQAAITILEEAIAQIDDKTKARFKETFDAVNGKVQTFFPTLFGGGEATLKMIGDDLLTAGVSIMARPPGKKNSTIHLLSGGEKALTAMSLVFALFSLNPAPFCLLDEVDAPLDDANTSRFCNLVKEMSAQTQFLYISHNRLTMEMAEQLVGVTMQEKGVSRVVAVDIKQALEMAEAV

SEQ ID NO: 2686 - protein, 273 aa, Neisseria meningitidis
MSSPRHVFYISDRTGLTAENIGEALLNQFGNLSFKRHTHPFVDTPEKARAVVEKVNRSRQENGQRPIAFVSVVDDEIRRIIKGADAFQINFFETFLGLLEKELNTEATASEQGHHSIGNTKRYDARMEAVNFSLNHDDGVSDKNLQEADVILMGVSRSGKTPTCLYLALQYGIRAANYPLIPDDLESADLPRMVKPYRDKLFGLTIQPERLQAIRQERRPNSTYAKIDTCRSEVADAQSMFRRHGIPFANTTDKSVEELAVHILQACKLKRKF

SEQ ID NO: 2687 - protein, 286 aa, Neisseria meningitidis
MKPYSANPNLTEPRRLRVLLIAAALGFLLLMLVVPLVAVFYEALKGGWDLYLKSLNDPEAWSAIKLTLITALIVVPVNAVLGVAMAWLLTRFDFRGKQLLTTLLDLPFSVSPVVAGLMFVLLFGAHTALGGWLEAQGIQIIFAIPGIILATLFVTFPFVAREIIPLMQAQGDSEEQAALILGASGWQMFWRVTLPNIKWALLYGIILTNARAMGEFGAVSVVSGHIRGETNTVPLLVEIFYNEYNFTGAFALSGVLALLALATLAVQNIITKLQDKKLAAAERNAV

SEQ ID NO: 2688 - protein, 259 aa, Neisseria meningitidis
MKEHKARKRFGQNFLQDTRIISDIVNAVRPQADDVVIEIGPGLAAITEPLAKKLNRLHVVEIDRDIVCRLKTLPFADKLVIHEGDVLQFDFNNIEGKKKIVGNLPYNISTPLLFKLAEVADDVVDMHFMLQKEVVERMVAAPKSNDYGRLGVMLQYFFDMEMLIDVPPESFDPAPKVDSAVVRMIPVKHRIGRADDFEHFAKLVKLAFHQRRKTIRNNLKELAGDDDLQAVGINPQDRAEHIAPEEYVALSNYLAGKAV

SEQ ID NO: 2689 - protein, 469 aa, Neisseria meningitidis
MTSTFPRRLARKIRQTRRLSRKSIAFLFLLAGSALVALTALFFAHLADFALELNAKLVQQYPWFAWVALPLGLPLIAWLTRKFAPFTAGSGIPQVIASLSLPYGAQKTRLIRLGQTLLKIPLTFLGMLFGASIGREGPSVQVGAAVMGAWGAWCKKHGLAFKGMQENDLMAAGAAGGLAAAFNAPLAGVIFAIEELGRGIMLRWERQILLGVLASGFIQVAIQGNNPYFSGFNGGVLEHIFLWVALSGLVCGAAGGLFGRLLYRGAAAFAPRKIRGFIRNRPLLLAALMGLLLALLGTFYQGKTYGTGYHEAAQALHGIYEAPFGLAAAKWLATVFSYWAGVPGGIFTPSLTIGAVLGEHIAAIADISQGANIIVLICMAAFLAGATQSPITSAVVVMEMTGGQSLLFWMLIACIFASQVSRQFSPRPFYHASGMRFRQRVLQETAAQTGNAPARPQTANSKTGMPSEN

SEQ ID NO: 2690 - protein, 125 aa, Neisseria meningitidis
VGQSGELFCFGQMPVWKAENLPEVLLSGYSSEEGEWVCLNVLQGDVEVRTQDGAAEVWSAESGDCVFAPQQVFSVKLKTDDAEIRLSLYCAAADYFHKKYGMSATHSAVAAARDTVPAGRALDMG

SEQ ID NO: 2691 - protein, 222 aa, Neisseria meningitidis
MTTHLSNVAPDLQNYLNAIGEPEHPVLTRLREKTGHHRMGKMAIAREQAAVLVWLAKLIRAEKYLEIGVFTGYSSTALALALPEHGRITACDINVTFTDTARQVWNEAGVAHKIGLHLQPALLTLDDLIAQGEAGSYDLALIDADKPPTPQYFERCLKLVRQGGIIAIDNILLNGRVMREAASDAPPSVGILKDFNQNLPNDTRIVPITLPVGDGLTLLLKK

SEQ ID NO: 2692 - protein, 400 aa, Neisseria meningitidis
MKNYHAPDEKGFFGEHGGLFVSETLIPALQELADAYKAAKNDPSFWEEFHRDLKHYVGRPSPVYHAARLSEHLGGAQIWLKREDLNHTGAHKVNNTIGQALLAKRMGKKRVIAETGAGQHGVASATVAARFGMTCDVYMGADDIQRQMPNVFRMKLLGANVVGVDSGSRTLKDAMNEAMREWVARVDDTFYIIGTAAGPAPYPEMVRDFQCVIGNEAKEQMLEAIGRQPDVAVACVGGGSNAIGLFHPYIGEENVRLVGVEAGGLGVNTPDHAAPITSGAPIGVLHGFRSYLMQDENGQVLGTHSVSAGLDYPGIGPEHSHLHDIKRVEYTVAKDDEALEAFDLLCRFEGIIPALESSHAVAWAVKNAPKMGKDQVILVNLSGRGDKDINTVAKLKGIKL

SEQ ID NO: 2693 - protein, 468 aa, Neisseria meningitidis
MEKNTLSARAPSPWLPLLLAIAIFMQMLDATILNTALPEIAADLNESPLNMQLAVISYTLTVALLIPLSGYLADRFGTKKVFFGSIAVFMLGSALCAASGSLFELTLSRVVQGIGGSMLVPIPRLTILRVYDKSKLLNAINYAVMPALIGPVLGPLAGGYLVEYASWHWIFLLNLPIGLLGFILGRNIMPDVKGNDTALDFKGYLIFSAAACLLLLSAESLSHALPPYFALLPLCGGLLFARRYFRHMKTASKPIYSADLFLIRTFRLGLAGNLFSRLGISSIPFLMPLMFQVAFGFGASLSGWLVAPVALSSLLVKPLISTLMKRFGYRKVLLWNTKLLAAFIMLLALPDGNSPLWIWIFLSLAIGACNSLQFSAMNTLTLADLRPQQTGSGNSLMAVNQQLAISMGIVVGALILKNWTFLIPASSGLHSAFRMTLLSIGGITLASSLVFKRLHVSDGANLTRNTPS

SEQ ID NO: 2694 - protein, 94 aa, Neisseria meningitidis
MKKLLLAAVVSLSAATAFADDSAERQIYGDPHFEQNRTKAVKMLEQRGYQVHDVDADDHWGKPVLEVEAYKDGREYDIVLSYPDLKIIKEQLDR

SEQ ID NO: 2695 - protein, 97 aa, Neisseria meningitidis
MSNIKIVALVTVKPEYTETLVAQFKELVKASRAEEGNISYDLHQEIGKPNRFVFVENWKSQAAIDEHNASAHFQAFVQSVDGKTEALEIVLMNEVVA

SEQ ID NO: 2696 - protein, 239 aa, Neisseria meningitidis
LTLTRKTLFLLTAAFGTHSLQTASADAVVKAEKLHASANRSYKVAGKRYTPKNQVAEFTQTGNASWYGGRFHGRKTSGGERYDMNAFTAAHKTLPIPSYVRVTNTKNGKSVIVRVNDRGPFHGNRIIDVSKAAAQKLGFVSQGTAHVKIEQIVPGKSAPVAENKDIFIDLKSFGTEHEAQAYLNQAAQNFAASTSSPNLAIEKRRYEYVVKMGPFASQERAAEAEAQAHGMVQTVLTAG

SEQ ID NO: 2697 - protein, 367 aa, Neisseria meningitidis
  misc_feature 362, 363: 'Xaa' is any amino acid
MKLSIQKFMMLFAAAISLLQIPISHANGLDARLRDDMQAKHYEPGGKYHLFGDGRGSVKNRVYAVQTFDATAVGPILPITHERTGFEGVIGYETHFSGHGHEVHSPFDHHDSKSTSDFSGGVDGGFTVYQLHRTGSEIHPEDGYDGPQGSDYPPPGGARDIYSYYVKGTSTKTKTNIVPQAPFSDRWLKENAGAASGFFSRADEAGKLIWESDPNKNWWANRMDDVRGIVQGAVNPFLMGFQGLGVGAITDSAVNPVTYAAARKTLQGIHNLGNLSPEAQLAAATALQDSAFAVKDGINSAKQWADAHPNITATAQTALAIAEAATTVWGGKKVNLNPTKWDWVKNTGYKTPAARPMQTIDXXHTLN

SEQ ID NO: 2698 - protein, 658 aa, Neisseria meningitidis
MPRIAALPDHLVNQIAAGEVVERPANALKEIVENSIDAGATAIDVELAGGGIRLIRVSDNGSGIHPDDIKLALHRHATSKIKTLNDLEHVASMGFRGEGLASIASVSRLTLTSRQDGSAHATQVKAEDGKLSSPTAAAHPVGTTIEAAELFFNTPARRKFLKSEATEYAHCATMLERLALAHPHIAFSLKRDGKQVFKLPAQSLHERIAAIVGDDFQTASLEIDSGNGALRLYGAIAKPTFAKGKTDKQYCFVNHRFVRDKVMLHAVKQAYRDVLHNALTPAFVLFLDLPPEAVDVNVHPTKTEIRFRDSQQVHQLVFHTLNKALADTRADLTESVGNAGEVLHDITGVTPAPMPSENNSENLFDRASNYPTGNKPDTRNAFGASGKTAPMPYQAARAPQQRSLSLRESRAAMNTYAELYKKTDDIDLELNRLEQARFGNMPSETPTPKTDAPLSDGIPSQSELPPLGFAIAQLLGIYILAQAEDSLLLIDMHAAAERVNYEKMKRQRQENGRLQSQRLLIPVTFAASHEECAALADHADALAGFGLELSDMGGNTLAVRTVPAMLGKADVVSLAKDVLGELAQVGSSQTIEEHENRILATMSCHGSVRAGRRLTLPEMNALLRDMENTPRSNQCNHGRPTWVKLTLKELDALFLRGQ

SEQ ID NO: 2699 - protein, 99 aa, Neisseria meningitidis
MKKMFVLFCMLFSCAFSLAAVNINAASQQELEALPGIGPAKAKAIAEYRAQNGAFKSVDDLTKVKGIGPAVLAKLKDQASVGAPAPKGPAKPAIPAAKK

SEQ ID NO: 2700 - protein, 136 aa, Neisseria meningitidis
VKLLANNWQPIAIIALVGTLLAVSHHQGYKSAFAKQQAVIDKMEKDKAQALLLSAQNYARELEQARAEAKKYEVKAHAVGMALAKKQAEVSRLKTENKKEIENVLTQDRKNAGGGCIDGFGHHGLQLYKRALGYGN

SEQ ID NO: 2701 - protein, 123 aa, Neisseria meningitidis
MKPYKIYTHPALPPQAVKQGWSWPGLLFGTLWACFKRMWGLGLGLTGAIFVLAVFAQLVYGDTPATDSAFNVLGLAVSVWFGAKGNSLYARHLLSRGYTELPETVEAANPQAALAQYFGRGGR

SEQ ID NO: 2702 - protein, 90 aa, Neisseria meningitidis
MPIEDIPFYIFDLADFDVGIGDIGNIVGFAPSSSLPKSKKNALTGIAFLRGIDVYDPPVSKEKALKALKKHPEIYQKFQHFFPFVELPPL

SEQ ID NO: 2703 - protein, 254 aa, Neisseria meningitidis
MCSCLVVKNTVIGSGRTKIAVPLVARDAAELSAVLEQIKNMPFDIAEFRADFLECAGSIGEILHHTQTVRDALPDKPLLFTFRRHGEGGSFPCSDDYYFELLDALIESRLPDIIDIELFSGETAVRCAVANAQKNGIAALLCNHEFHRTPPQEEIVCRLKQMEDCGADICKIAVMPQSAEDVLTLLSATLKAKELAAKPIVTMSMGQTGAVSRLAGQVFGSSITFGSGTQNSAPGQIGVSALRATLDCLESGAD

SEQ ID NO: 2704 - protein, 423 aa, Neisseria meningitidis
MFQWLYDVLWLLAPIWIRRYLDKRSGSAPAYRAHRGERFGKPYPNPVTGAVWIHAVSVGETRAAQPLIRELRQRFPDAPLLMTQMTPTGRETAQVLFPDAQCRYLPYDKKTWVRQFLREHRPMFGVLMETEIWPNLMKECRRAGVPLFLANARLSEKSLNGYLKVRSLIRPAVASLTGCLVQTEADAARLAKLGAASVQVCGNTKYDLMPSEQMKTLAGQFEKRIGDRPVAVCGSTRVYRGEDEAEKLLAAWQQYRGDALLVVVPRHPEHFQTAFETAKRFGFKVQRRSDGLPVEPDTQVWIGDSMGELYAYYLCADVAFVGGSLVDSGCQNIIEPLSCGVPTIFGFSTYNFSEACRHALASGAAVQVESADAWREAVEKTLSYEGGGMQMQARVDGFIAQHRGAGARIAEAVREAVCGHRGR

SEQ ID NO: 2705 - protein, 352 aa, Neisseria meningitidis
MTAALHIGHLSKSFQNTPVLNDISLSLDPGEILFIVGASGCGKTTLLRCLAGFEQPDFGEISLSGRTIFSKNTNLPVRERRLGYVVQEGVLFPHLTVYRNTAYGLGNGKGKTAQERQRIEAMLELTGISELAGRYPHELSGGQQQRVALARALAPDPELILLDEPFSALDEQLRRQIREDMIAALRANGKSAVFVSHDREEALQYADRIAVMKQGRILQTASPHELYRQPADLDAALFIGEGIVFPAALNADGTADCGLGRLPVQSGAPAGTRGTLLIRPEQFSLHPHSAPTASIHAVVLKTTPKARHTEISLRVGQTVLTLNLPSAPTLSDGISAVLHLDGSALFFPGNTL

SEQ ID NO: 2706 - protein, 259 aa, Neisseria meningitidis
MLKIISANVNGIRSAYKKGFYEYIAASGADIVCVQELKAQEADLSADMKNPHGMHGHWHCAEKRGYSGVAVYSKRKPDNVQIGMGIEEFDREGRFVRCDFDRLSVISLYLPSGSSAEERQQVKYRFLDAFYPMLEAMKNEGRDIVVCGDWNIAHQNIDLKNWKGNQKNSGFLPEEREWIGKVIHKLGWTDMWRTLYPDVPGYTWWSNRGQAYAKDVGWRIDYQMVTPELAAKAVSAHVYKDEKFSDHAPLVMEYDYAAE

SEQ ID NO: 2707 - protein, 147 aa, Neisseria meningitidis
MSEELQPVFSIERLYVKDLSLEVPHAPQIFLEQGEPEVDMRVSTGSQKLEDGYYNVDVTVTVTAKLDNERTMFLNEVTQSGIFRLENIPEEDADLLLGVACPNILFPYAREAVSGTVTRAGFPPVLLAPINFEAIYQQQQEAEAAGA

SEQ ID NO: 2708 - protein, 216 aa, Neisseria meningitidis
MPSEPPSDGIARHPKSTIKMAKKPNKPFRLTPKLLIRAVLLICITAIGALAIGIVSTFNPNGDKTLQAEPQHTDSPRETEFWLPNGVVGQDAAQPEHHHAASSEPAQPDGTDESGSGLPSPAAPKKNRVKPQPADTAQTDRQPDDAGTQAENTLKETPVLPTNVPRPEPRKETPEKQAQPKETPKEKETPKENHTKPDTPKNTPPKPHKEILDNLF

SEQ ID NO: 2709 - protein, 577 aa, Neisseria meningitidis
MYSNNAITNNRNNITLGAYRDAIIFIFSDENVVRAIGTINSMYEEYLTRSHKIDQKEFLREGERLSAKAREFQRTAEEAQKSLKEGIGRAASKFRGNSKEAFVARKVQSDLQKALNASNYNKQQYARRAATALENASKSKVMAANLGKFTYGATVAMGTLSMGSAWWKALDGEGNWSDVGLSSASFLGGLMGVQWGAALGVGAFGLLTGGAGWLVVGAILGGGAGAWWGSLGAEKAWRWFEDFLNLNRSDKYHVYDPLALDLDGDGIETVATKGFAGALFDHRNQGIRTATGWVSADDGLLVRDLNGNGIIDNGAELFGDNTKLADGSFAKHGYAALAELDSNGDNIINAADAAFQSLRVWQDLNQDGISQANELRTLEELGIQSLDLAYKDVNKNLGNGNTLAQQGSYTKTDGTTAKMGDLLLAADNLHSRFKDKVELTAEQAKAANLAGIGRLRDLREAAALSGDLANMLKAYSAAETKEAQLALLDNLIHKWAETDSNWGKKSPMRLSTDWTQTANEGIALTPSQVAQLKKNALVSLSDKAKAAIDAARDRIAVLDAYTGQDSSTLYYMSERCA

SEQ ID NO: 2710 - protein, 65 aa, Neisseria meningitidis; identical to SEQ ID NO: 127

SEQ ID NO: 2711 - protein, 275 aa, Neisseria meningitidis
MKLDIYALLERALLSDDPDEKGRLTDEAFAAVQNADGAEANAPPADFPRAGRPDKPVLVAPSQLTPRKMNTTEGYAAMLHAIAHIEFNAVNLALDAAYRFRTLPFQFVRDWVKVAKEEVYHFRLMRDRLRAFGFDYGSFEAHNHLWDMAYKTAYDPLLRMALVPRVLEARGLDVTPGIRAKVAQRGDSETCGVLDIIYRDEVGHVAIGNHWYQHLCRERGLEPVALFRSLIARYDMFIFRGYVNIEAREKAGFSRFELDMLEDFEQGLKQNKHAV

SEQ ID NO: 2712 - protein, 682 aa, Neisseria meningitidis
MRRFLPIAAICAVVLLYGLTAATGSTSSLADYFWWIVAFSAMLLLVLSAVLARYVILLLKDRRDGVFGSQIAKRLSGMFTLVAVLPGVFLFGVSAQFINGTINSWFGNDTHEALERSLNLSKSALNLAADNALGNAIPVQIDLISTASLSGNMGRVLEHYANGFTQLSLYNAASGKIEKSINPHKLDQPFPDKARWEKIQQAGSVRDLESIGGVLYAQGWLSAGTHNGRDYALFFRQPVPKGVAEDAVLIEKARAKYAELSYSKKGLQTFFLATLLIASLLSIFLALVMALYFARRFVEPVLSLAEGAKAVAQGDFSQTRPVLRNDEFGRLTKLFNHMTEQLSIAKEADERNRRREEAARHYLECVLEGLTTGVVVFDEQGCLKTFNKAAEQILGMPLTPLWGSSRHGWHGVSAQQSLLAEVFAAIGAAAGTDKPVHVKYAAPDDAKILLGKATVLPEDNGNGVVMVIDDITVLIHAQKEAAWGEVAKRLAHEIRNPLTPIQLSAERLAWKLGGKLDEQDAQILTRSTDTIVKQVAALKEMVEAFRNYARSPSLKLENQDLNALIGDVLALYEAGPCRFAAELAGEPLMVAADTTAMRQVLHNIFKNAAEAAEEADVPEVRVKSEAGQDGRIVLTVCDNGKGFGREMLHNAFEPYVTDKPAGTGLGLPVVKKSLKNTAAASA

SEQ ID NO: 2713 - protein, 124 aa, Neisseria meningitidis
MIILHGIPNCDTVKKAKNRLAGYGLEFEFRDFKKQRPSEAEICSWLEQVPLATLLNKRGTSWRKLDAGTQQKVLSSTAEAVKLMSEMPSLIKRPVLECGGRVYVGFSEETYDGIFNRQALCRQG

SEQ ID NO: 2714 - protein, 106 aa, Neisseria meningitidis; identical to SEQ ID NO: 2449

SEQ ID NO: 2715 - protein, 50 aa, Neisseria meningitidis
MPDRIKPSRNGDGADDIARQQGTAQTGAKPETSPTARHGDFLSPLQGDWI

SEQ ID NO: 2716 - protein, 363 aa, Neisseria meningitidis
  misc_feature 2, 3, 4: 'Xaa' is any amino acid
VXXXTNRLVALAHEMQEHPDPRELDVVLSTGEQVTIGLLAMALKDIGVDAKSYTGWQVALKTDTAHTKARIESIDDEKMRADLTAGKVVIVAGFQGISSEGNISTLGRGGSDTSAVALAAALKADECQIYTDVDGVYTTDPRVVPEARRMDTVTFEEMIELASLGSKVLQIRSVEFAGKYKVRLRVLSSLQDGGNGTLITFEEDDNMERAAVTGIAFDKNQARINVRGVPDKPGVAYQILGAVADANIEVDMIIQNVGSEGTTDFSFTVPRGDYKQTLEILSERQDSIGAASIDGDDTVCKVSAVGLGMRSHVGVAAKIFRTLAEEGINIQMISTSEIKVSVLIDEKYMELATRVLHKAFNLG

SEQ ID NO: 2717 - protein, 321 aa, Neisseria meningitidis; identical to SEQ ID NO: 2168

SEQ ID NO: 2718 - protein, 68 aa, Neisseria meningitidis
  misc_feature 64, 65, 66: 'Xaa' is any amino acid
MSLFITDECINCDVCEPECPNDAISQGEEIYEINPNLCTQCVGHYDEPQCQQVCPVDCILIDEXXXHT

SEQ ID NO: 2719 - protein, 157 aa, Neisseria meningitidis
MQVTKNFSLRELTRSETARRAGVPNEPSPADMDNIYYTAQQLEKIREYVGRPIIVTSCFRSERVNKLVGGSPTSAHRHGLAADCDASGMTSPAFAKLLIKMRDESALKFDQLILEFPERGDGAWVHIGFRRNSPQRNQILTATKKNGKTVYLPGLHP

SEQ ID NO: 2720 - protein, 558 aa, Neisseria meningitidis
MSQQYVYSMLRVSKVVPPQKTIIKDISLSFFPGAKIGLLGLNGAGKSTVLRIMAGVDKEFEGEAVPMGGIKIGYLPQEPELDPEKTVREEVESGLGEVAAAQKRLEEVYAEYANPDADFDALAEEQGRLEAIIAAGSSTGGGAEHELEIAADALRLPEWDAKIDNLSGGEKRRVALCKLLLSKPDMLLLDEPTNHLDAESVEWLEQFLVRFPGTVVAVTHDRYFLDNAAEWILELDRGHGIPWKGNYSSWLEQKEKRLENEAKSEAARVKAMKQELEWVRQNAKGRQAKSKARLARFEEMSNYEYQKRNETQEIFIPVAERLGNEVIEFVNVSKSFGDKVLIDDLSFKVPAGAIVGIIGPNGAGKSTLFKMIAGKEQPDSGEVKIGQTVKMSLIDQSREGLQNDKTVFDNIAEGRDILQVGQFEIPARQYLGRFNFKGSDQSKITGQLSGGERGRLHLAKTLLGGGNVLLLDEPSNDLDVGTLRALEDALLEFAGSVMVISHDRWFLDRIATHILACEGDSKWVFFDGNYQEYEADKKRRLGEEGTKPKRIKYKPVTR

SEQ ID NO: 2721 - protein, 310 aa, Neisseria meningitidis
  misc_feature 304, 305: 'Xaa' is any amino acid
MLDNLTGRFSNVFKNIRGQAKLTEDNIKEALREVRLALLEADVALPVVKEFVNNVKEKALGQEVAGSLTPDQAFIGVVNKALTELMGRENKTLDLSVAPPAVVLMAGLQGAGKTTTAGKLARLLKNDQKKKVLVVSADVYRPAAIEQLRLLAEQVGVDFFPSDTNQKPVEIATAAVDYAKKHFYDVLMVDTAGRLAIDEEMMNEIKALHAAVNPVETLFVIDAMLGQDAVNTAQAFNEALPLTGVVLTKMDGDSRGGAALSVRHVTGKPIKFIGVGEKINGLEPFHPDRLASRILGMGDVLTLXXTHLIN

SEQ ID NO: 2722 - protein, 92 aa, Neisseria meningitidis
MYYQVGNKCLEKHQAENLYFSLVVPRIKENGQIVRPEYNGSLWKMSDGQPLRLLLAECSLKDNLQSGLETGWIVFGILASVYFVSLLKKVLK

SEQ ID NO: 2723 - protein, 318 aa, Neisseria meningitidis
MNIIGLDISKDTIDATLHKTNGSIHYIKFKNNDDGLKQFRLWIKGNRIRKAYIGMEATGIYYEKAADMLSSYYTVYVINPLKIKDYGKSRFNRTKTDKADSNLIADYIKRHQDTLIPYQIPKNKALQKLINLKNQLQQHQKQIKNRLHSTEEDFIRNIHQDLIDTIQDKMEQVKIAISEQIKKQTDNNHYRNLQTIPSIGKDTASVLYAQLTEKHFKTANQFVSYAGLSPAIIQSGTSVRGRGRLSRYGNRRLKSTLYMPALCAYRFNAFPKLINNLKKAGKPKMVIIVAIMRKLAKLAYYIVKTGQPYDAERHRLNQ

SEQ ID NO: 2724 - protein, 387 aa, Neisseria meningitidis; identical to SEQ ID NO: 30

SEQ ID NO: 2725 - protein, 469 aa, Neisseria meningitidis
MDTQIKTEAGQQNNRRYLTVWRWHFYAGLLVMPFLTLLAVTGLGMLLFANITGKEGERIHVVPQATVQPLSVQAEAARSAVNPETSSVVQYIAPRADDMVAVFRVNNEGKATMVAVDPYTAKVVSTMPRNQGWYYAMDEIHSDMMLGSTGDYLLETAASLTIIMIISGLYLWWVKRRGIKAMLLPPKGKARSWWRNLHGAFGTWVSLILLLFCLSGIAWAGIWGGKFVQAWSQFPAGKWGVEPNPVSVVPTHGEVLNDGKVKEVPWILELTPMPVSGTTVGKDGINPDEPMTLETVDRFAREIGFKGRYQLNLPKGEDGVWTLSQDSMSYDMISPFADRTVHIDQYSGKILADIRFDDYNPFGKFMAASIALHMGTLGWWSVLANVLFCLAVIFIGISGCVMWWKRRPSGAAGMVPPAQKIKLPVWWAMAVPLLLIALLFPTALLAIAVIWLLDTLLLSRIPVLRKWFK

SEQ ID NO: 2726 - protein, 179 aa, Neisseria meningitidis
MNIIDTAIPDVKLLEPQVFGDARGFFMETFRDEWFKTQVCERTFVQENHSKSGKGVLRGLHYQTENTQGKLVRVVVGEVFDVAVDMRKDSPTFGKWVGEILSAENKRQLWVPEGFAHGFYVLSDEAEFVYKCTDYYNPEAEHSLIWNDPTVGIDWPLQGEPNLSPKDLAGKVLAEAVTF

SEQ ID NO: 2727 - protein, 215 aa, Neisseria meningitidis
MKGVYFVSGIDTDIGKTVATGMLAKQLLQQGKSVITQKPVQTGCQDIAEDIAVHRKIMGIPMQEADKQGLTMPEIFSYPASPHLAARLDGRALDLDKIRTATQQLAAQYEIVLVEGAGGLMVPLTENLLTIDYIRQQGYPVILVTSGRLGSINHTLLSFAALKQYGIRLHSLIFNHIHDSSDECVAQDSLSYLKCRLKADFSEAEWMELAKTDAV

SEQ ID NO: 2728 - protein, 208 aa, Neisseria meningitidis
MKNIVILISGRGSNMQAIVNAAIPNVRIAAVLSNSETAAGLQWAAERGIPTDSLNHKNFESRLAFDTAMMEKIDAYQPDLVVLAGFMRILTPEFCAHYEGRLMNIHPSILPSFTGLHTHERALEAGCRVAGCTIHFVTAELDCGPIVSQGIVPILDGDTADDIAARVLAVEHKLYPKAVADFAAGRLIIEGNRVRNSENADAARFLTA

SEQ ID NO: 2729 - protein, 145 aa, Neisseria meningitidis
MPVKKVEKNILVLHGADKMFELVDKVEDYPNFLPWYSKTEVIGRNGNELKARLFMDYMHVRQSFATHNRNIPGREIRMELLEGPFKTLRGTWKFIDLGDDMCKIEFNLEYDFSNAVLSALISPVFNHLSATLVEAFVKEADRRYA

SEQ ID NO: 2730 - protein, 87 aa, Neisseria meningitidis
  misc_feature 81, 82: 'Xaa' is any amino acid
MIHYKITPSPLDHEWHILLTFTQDDDLPIEISLPNWVPGSYLIRDFSRHITSIHASCNGTSMPLEQIAKNRWHAAAVRGEXXTHLIN

SEQ ID NO: 2731 - protein, 314 aa, Neisseria meningitidis
  misc_feature 309, 310: 'Xaa' is any amino acid
VKPLRRLTNLLAACAVAAAAFGQPALAADLAQDPFITDNAQRQHYEPGGKYHLFGDPRGSVSDRTGQINVIQDYTHQMGNLLIQQANINGTIGYHTRFSGHGHEEHAPFDNHAADSASKEQGNVDEGFTVYRLNWEGHEHHPADAYDGPKGGNYPKPTGARDEYTYHVNGTARSIKLNPTDTRSIRQRISDNYSNLGSNFSDRADEANRKMFEHNAKLDRWGNSMEFINGVAAGALNPFISAGEALGIGDILYGTRYAIDKAAMRNIAPLPTEGKFAVIGGLGSVAGFERIRAKPLTGGYRKTPMPPKXXHTLN

SEQ ID NO: 2732 - protein, 140 aa, Neisseria meningitidis
MSIMQVEVVSSEQKIYSGEATFIVVPTVQGELGIYPRHEPIMSLVRPGALRLTVPGEDKEVLVAVSGGVLEVQPDKVTVLADVAVRSAEMDQARAEEAKKAAEAGISQAKDDKALAEAHKALAAAIAQLKTLDYIRSHKK

SEQ ID NO: 2733 - protein, 498 aa, Neisseria meningitidis
MTTENQAGSPASGIGTSEQTKAAPKAKKTFDPRASVIQIHPEGERIHPKKAEGRFAKLRIAAVLATQFVFYVIPWFNWSGRQAVVFNIPERHFFIFGLSLGVGDLIYLALLLMICAFGLFWWTTIAGRLWCGYSCPQTVYTEIMLWIDNLVEGDRNKRLKLEKSPWNFTKIRIKATKYLLIFLVCAWTGITFAGWFVPIRQFVPDLFTGAAGGGAMFAAAFYGFMTFFFAHIMREKVCLHMCPYARFQSAMFDKDTLIVSYDAERGEPRGARKKTVNKEEAGLGDCINCAMCVQVCPVGIDIRNGLQYQCIGCAACIDACDEIMDKMGYPRGLIRYTTESALEHEYSEKDIKKRLLRPRVAGYGAVLALVIIAFLAGLSTRKMVEVDILKDRGVLVRENAKGWLENAYSLRIINKSEKEQLITASVKGFDEIALTGLPEGGIKVAPRETVTLPVQVSTIPEYADKGSHPIEFTFQYRESGAPDGKPVVLEEDATFIGE

SEQ ID NO: 2734 - protein, 216 aa, Neisseria meningitidis; identical to SEQ ID NO: 2167

SEQ ID NO: 2735 - protein, 101 aa, Neisseria meningitidis
MAKKALINRNLKRQALAKKYAAKRAAIKAVINDSNATEEERFEARLRFQSIPRNAAPVRQRRRCALTGRPRGTFRKFGLGRIKIREIAMRGEIPGVVKASW

SEQ ID NO: 2736 - protein, 120 aa, Neisseria meningitidis
MNLPRNRFILLSALWFAGSIYSLLFKAAETAPPPFPHFDKVAHLALFFAQIWLLTKAFRTDNRPIPYRSLMVFALCFALFSECAQAWFTATRTGSLGDVLADLTGAALALFTARAACRPD

SEQ ID NO: 2737 - protein, 148 aa, Neisseria meningitidis
MDQAKRTAYVKIINALFDGAVKVQPGQITETVVDMADKMFDEIATCHERIRPMAVLADGIAESIVKLAPNEIPLIFGNSSFGSYLKSKTRDEVFNVLKQSKVNNAGKVLEAFYESWLKYTAKDRRLKVCIVTAQSRWRSRFEIELLGI

SEQ ID NO: 2738 - protein, 377 aa, Neisseria meningitidis
MKRILCITGTRADFGKLKPLLAYIENHPDLELHLIVTGMHMMKTYGRTYKEVTRENYQHTYLFSNQIQGEPMGAVLGNTITFISRLSDEIEPDMVMIHGDRLEALAGATIGALSSRLVCHIEGGELSGTVDDSIRHSISKLSHIHLVANEQAVTRLVQMGEKRKHIHIIGSPDLDVMASSTLPSLEEVKEYYGLPYENYGISMFHPVTTEAHLMPQYAAQYFKALELSGQNIISIYPNNDTGTESILQELLKYQSDKFIAFPSIRFEYFLVLLKHAKFMVGNSSAGIREAPLYGVPSIDVGTRQSNRHMGKSIIHTDYETKNIFDAIQQACSLGKFEADDTFNGGDTRTSTERFAEVINNPETWNVSAQKRFIDLNL

SEQ ID NO: 2739 - protein, 275 aa, Neisseria meningitidis
MKLIEQHQIFGGSQQVWAHHAQTLQCEMKFAVYLPNNPENRPLGVIYWLSGLTCTEQNFITKSGFQRYAAEHQVIVVASDTSPRGEQVPNDDAYDLGQGAGFYLNATEQPWAANYQMYDYILNELPRLIEKHFPTNGKRSIMGHSMGGHGALVLALRNQERYQSVSAFSPILSPSLVPWGEKAFTAYLGKDREKWQQYDANSLIQQGYKVQGMRIDQGLEDEFLPTQLRTEDFIETCRAANQPVDVRFHKGYDHSYYFIASFIGEHIAYHAAFLK

SEQ ID NO: 2740 - protein, 82 aa, Neisseria meningitidis
MLTSEQVKAMIEGVAKCEHIEVEGDGHHFFAVIVSSEFEGKARLARHRLIKDGLKAQLESNELHALSISVAATPAEWAAKAQ

SEQ ID NO: 2741 - protein, 171 aa, Neisseria meningitidis
MKRTKKYPFLTLQRQRFHLNFENASSAAGIPAERDFYRWAWSALKNEYRRADISLILLDEEEARAYNRDYRGKDYATNVLSFALNEGEILPCQVSEKLYGDLIICPQVVLKEAAEQGKTPEQHFAHLTIHGTLHLMGYDHIEDDEAEIMEAEEIRLMRAAGFPNPYQEDGH

SEQ ID NO: 2742 - protein, 497 aa, Neisseria meningitidis; identical to SEQ ID NO: 1619

SEQ ID NO: 2743 - protein, 109 aa, Neisseria meningitidis
MFDGEVEADESYFGGQRKGKRGRGAAGKVAVFGLLKRNGKVYTVTVPNTQTATLFPIIREQVKPDSIVYTDCYRSYDVLDVREFSHFSFAETSFSYQSQHTFCRTTKPY

SEQ ID NO: 2744 - protein, 178 aa, Neisseria meningitidis; identical to SEQ ID NO: 1654

SEQ ID NO: 2745 - protein, 384 aa, Neisseria meningitidis
MTETTQTPTFKPKKSVALSGVAAGNTALCTVGRTGNDLSYRGYDILDLAQKCEFEEVAHLLIHGHLPNKFELAAYKTKLKSMRGLPIRVIKVLESLPAHTHPMDVMRTGVSMLGCVHPERESHPESEARDIADKLIASLGSLLLYWYQYSHNGKRIEVESDEETIGGHFLQLLHGKRPSESHIKAMHVSLILYAEHEFNASTFTARVIAGTGSDMYSSITGAIGALKGPKHGGANEVAYDIQKRYRNADEAEADIRERIGRKEIVIGFGHPVYTISDPRNVVIKEVARGLSKETGDMRLFDIAERLESVMWEEKKMFPNLDWFSAVSYQKLGVPTAMFTPLFVISRTTGWSAHVLEQRKDGKIIRPSANYTGPEDLAFVEIEER

SEQ ID NO: 2746 - protein, 205 aa, Neisseria meningitidis
MVIAAIMAMIALPNMSQWIASRRIASHAEQVANLLRFSRGEAVRLNLPVYICPVQVKKGGAPNNKCDSGKKGQGMLAFGDKNGNKTYDGDTADVLLRSVVLNDDINDKRINYAFNHIAFGSSQPTADRVVWTFNQNGTFGYTKDQHLTSKSSFFYSDGYIQIVLTDARAVSDADKKFRSAVVLIDSSGRVEVCPRNDRRTVCQYK

SEQ ID NO: 2747 - protein, 144 aa, Neisseria meningitidis
MNFALSVITFTLASFLPVPPAEAAVFTWKDGGGNSYSDVPKQLHPDQSQILNLRTRQTKPAVKPAQADAGKRTDGAAQENNPDTAEKNRQLEEEKKRIAETERQNKEENCRISKMNLKAVGNSNAKNKDDLIRKYNNAVNKYCR

SEQ ID NO: 2748 - protein, 178 aa, Neisseria meningitidis
VDLREVKLGGETIYEGGFVSISRDKVRLPNGNEGQRIVIRHPGAACVLAVTDDEKVVLVRQWRYAANQATLELPAGKLDVAGEDMAACALRELAEETPYVADSVRLLYSFYTAVGFCNEKMYLFEAEGVRLGSTLANDEDEITETVLMSKEEVRQALANDEIKDGKTLIGLQYWLMKD

SEQ ID NO: 2749 - protein, 107 aa, Neisseria meningitidis; identical to SEQ ID NO: 875

SEQ ID NO: 2750 - protein, 433 aa, Neisseria meningitidis
MPSETARPLYADTCAAHTLVWFRQNLRIRDNAALCAAVAEGLPVIGIWIDDAETDNPRRAAFYRQSAAELAQGLAGRGIPFYTAASPAGLVRLAVRLNTRAVIADESHTFADKLTDNALWHELDKHGIALTFVNDRAVFGKTDLIPDGGTAYADFDRYREVWLDRFSKQPPAGSDLFAAYRQPFPENLSAPQPAVLSDGIFLPRNGGETAAWRQWRRFLEQADSYSVLKDFPSRKNTSLMGAYLSAGCISPRLLARKSLERRLNAWTDNIIRRDFFLQLALQHTDDDPSDGNPEHTLRLTLWQQGRTGIPIIDAAMRCLHKTGSLHPALRRLSADFFCHVLNLPRREGEIWFARQLTDFDAAINQGNWRLAASRHTCPDIAAAAHKTDPDGTFVRRHIPELAHLSADTVHTPWRFACSVDTHGYPAHPVAGIP

SEQ ID NO: 2751 - protein, 142 aa, Neisseria meningitidis
MISIFKAYYDVYEFNGELLKRCIFLDEENEENNEIIKDRIYGYLIYVLTGDLYLQKDIDENLEFIHQAENNPNEVYSGGGQGFCWDISAEKVVFYNNEFDEEDGWPDLSCSLHTFKTALIAWNAFLQLPKSIHSVVETVIEE

SEQ ID NO: 2752 - protein, 162 aa, Neisseria meningitidis
LTQPAEFSDYQRVYLDETGFDRYLFRPYARSLKGQIVKAQISGKRYQRLSLVSAQVGNRLIAPMVYQNTMTGVFFEAWFQQCLLPALTQKSVIILDNARFHRMGVLREMAEKLGHKVLPLAPYSPELNPIEKVWANIKRYLRTVLSDYARFDDALLSYFDFN

SEQ ID NO: 2753 - protein, 125 aa, Neisseria meningitidis; identical to SEQ ID NO: 1050

SEQ ID NO: 2754 - protein, 289 aa, Neisseria meningitidis
  misc_feature 3, 4: 'Xaa' is any amino acid
VCXXDEILIPAPDYPLWTAAATLAGGTVRHYLCDEENGWFPNLADMEAKITPKTKAIVVINPNNPTGAVYSREILLEIAELARKHGLIIFADEIYDKILYDGAVHHHIAALAPDLLTVTFNGLSKSYRVAGFRQGWMVLNGPKHHAKGYIEGLDMLSSMRLCANTPMQHAIQTALGGYQSINEFILPGGRLLEQRNRAWELVSQIPGVSCVKPMGAMYMFPKIDTEMYRIHDDMKFVYDLLVREKVLLVQGTGFNWIKPDHFRIVTLPYVHQIEEAMGRLARFLQTYRQ

SEQ ID NO: 2755 - protein, 734 aa, Neisseria meningitidis
LLPLLLASCIGGNFGVQPVVESTPTAYPVTFKSKDVPTSPPAKPSIETTPVNQPAVGAAMRLPRRNIAAFDKNGNEIPDSKQAEEYLPLKEEDILFLDGTPKEQADKLKKEINGRYPNVTIYTSDLKDAVYKYEHVRAGYVYTRFGTDEIEQNSGGKQVTHRLGYDGFVYYSGERPSQSLPSAGTVKYSGNWQYMTDVKRHRAGKAVGIDNLGYITFYGNDVGATSYAAKDVDEREKHPAKYTVDFDKKTLTGQLIKNQYVQKKTDEKKSLTIYNITAKLDGNRFTGSAKVNPDLAKNPAGNERLFFHADADQRLEGGFFGDNGEELAGRFISNDNSVFGVFAGKKTETANAADTKPALPSGKHTKILDSLKISVDEATDGHARKFAISSMPDFGHPDKLLVEGREIPLVNKEQIIKLADGRKMTVSACCDFLTYVKLGRIKTERPAVKPKAQDEEGDEEDAGVDNGEDEEEIAEESEDEVSEDEGEEAEVSEDESEEDEEIVEEETEEEAEPEEAEETEEESPAESGSGSNAILPAPEAPGRDIDLFLKGIRTAEADIPQTGKARYTGTWEARIGEPIQWDNQADKEAAKAVFTVDFDKKSISGTLTEQNGVEPAFHIEKGKIEGNGFYATARTRDNGIDLSGQGSTKPQIFQANDLRVEGGFYGPKAEELGGTIFNKDGKSLGITEGTENKVEAEVEVEVEADVGKQLEPDEVKHKFGVVFGAKKDMQEVEK

SEQ ID NO: 2756 - protein, 524 aa, Neisseria meningitidis
MAQIQMSANVKTINAVFAAMLVGTVGYFIYWGLGYTHYNYAALFIIATMFGVFMAFNIGGNDVANSFGTSVGAGTLTIPQALLIAAVFEVSGAVIAGGEVTNTIRKGIVDLKGVDFEPIQFVFIMMSALLAAALWLLFASKKGLPVSTTHSIIGGIVGSAVCMAVMNDAASGDLIRWGKLGGIGVSWVLSPVLGGAVSYFLFSRVKKNVLDYNAWAEGTLKGIKQEKKAYKERHRLFFEGLSEAEKVEYATKMAHDAQIYDEPEFDPQELQSEYYRGLYAFDNRKNNVDSYKALHSWIPFIASFGAMMISAMLIFKGLKNLHLGMSNVNSFLTIFMIGAAVWMGTFVFAKSLKRKDLGKSTFQMFSWMQVFTACGFAFSHGANDIANAIGPFAAIMDVLRTNSVAAQNVVPPIAMLTFGIALIVGLWFVGKEVIKTVGTSLAEMHPASGFTAELSAASVVMGASLMGLPVSSTHILVGAVLGIGLVNRNANWKLMKPIGLAWVITLPAAAVLSVVCYLVLQAVF

SEQ ID NO: 2757 - protein, 269 aa, Neisseria meningitidis; identical to SEQ ID NO: 1709

SEQ ID NO: 2758 - protein, 544 aa, Neisseria meningitidis
MTKFIFVTGGVVSSLGKGIAAASIAAILESRGLNVTMLKLDPYINVDPGTMSPFQHGEVFVTDDGAETDLDLGHYERFIDSTMTRRNSFSTGQVYENVIAKERRGDYLGGTVQVIPHITDEIKRRIHEGAAGYDVAIVEIGGTVGDIESLPFLEAIRQMRSQLGRNNTLFAHLSYVPYIAAAGEIKTKPTQHTVKEMLSIGLQPDILICRMDRTMPADERRKIALFCNVEERAIVGSYDVDSIYECPEMLHDQGIDNIITEQLQLNVQQADLTAWKKIVHAIQNPKHTVKIAMVGKYVDLTESYKSLIEALKHAGIHTETDVQITFVDSESIEKNNGDVSMLKDMDAILVPGGFGSRGVEGKIAAVRYARENNVPYLGICLGMQIALIEYARDVAGLKGANSTEFDLKCAAPVVALIDEWQTADGSVETRDESADLGGTMRLGAQEVELKAGSLAAKIYGSEHIRERHRHRYEVNNNYVPTLEQAGLVIGGVSAGRERLVETIELPNHPWFFACQFHPEFTSNPRKGHPLFTAFVKAALNNKKA

SEQ ID NO: 2759 - protein, 162 aa, Neisseria meningitidis
  misc_feature 156, 157: 'Xaa' is any amino acid
MNIIDTAIPDVKLLEPQVFGDARGFFMETFRDEWFKTQVCERTFVQENHSKSGKGVLRGLHYQTENTQGKLVRVVVGEVFDVAVDMRKDSPTFGKWVGEILSAENKRQLWVPEGFAHGFYVLSDEAEFVYKCTDYYNPEAEHSLIWNDPTVGIDWXXTHLIN

SEQ ID NO: 2760 - protein, 426 aa, Neisseria meningitidis
  misc_feature 2, 3, 4, 421, 422: 'Xaa' is any amino acid
VXXXFGETKLSREKAKRAADWIALEEAMENGDILSGIINGKVKGGLTVMISSIRAFLPGSLVDVRPVKDTSHFEGKEIEFKVIKLDKKRNNVVVSRRAVLEATLGEERKALLENLQEGSVIKGIVKNITDYGAFVDLGGIDGLLHITDLAWRRVKHPSEVLEVGQEVEAKVLKFDQEKQRVSLGMKQLGEDPWSGLTRRYPQGTRLFGKVSNLTDYGAFVEIEQGIEGLVHVSEMDWTNKNVHPSKVVQLGDEVEVMILEIDEGRRRISLGMKQCQANPWEEFAANHNKGDKISGAVKSITDFGVFVGLPGGIDGLVHLSDLSWTESGEEAVRKYKKGEEVEAVVLAIDVEKERISLGIKQLEGDPFGNFISVNDKGSLVKGSVKSVDAKGAVIALSDEVESYLPASEFAADRVEDLTTKXXHTLN

SEQ ID NO: 2761 - protein, 427 aa, Neisseria meningitidis
MTASKSGFIGQIFSRNMLVCIFTGFTSGLPLYFLINLIPAWLRSEQVDLKSIGLMALIGLPFTWKFLWSPLMDAVRLPVLGRRRGWMLLTQAGLLAALAAYAFLNPRNHLPLIAGLSVLVAFFSASQDIVLDAFRREILSDEELGLGNSVHVNAYRIAALIPGSLSLVLADRMPWSEVFVITSLFMLPGLLMTLFLAREPVLPPAVPKTLKQTVVEPFKEFFTRKGIASAVCVLLFIFLYKLGDSMATALATPFYLDMGFSKTDIGLIAKNAGLWPAVAAGILGGVWMLKIGVNKALWLFGAVQAVTVLGFVWLAGFGHFDTVGTGERLMLAAVIGAEAVGVGLGTAAFVSYMARETNPAFTATQLALFTSLSAVPRTVINSFAGYLIEWLGYVPFFQLCFALALPGMLLLLKVAPWNGEKTQDAGR

SEQ ID NO: 2762 - protein, 332 aa, Neisseria meningitidis
VAAYIGRIDTDAPLKPLYVIHGEEELLRIEALDALRAAAKKQGYLNREVYTADNAFDWNELLQTAGSAGLFADLKLLELHIPNGKPGKTGGEALQDFAARLPEDTVRLVLLPKLEKTQLQSKWFAALAAKGEVWEAKPVGAAALPQWIRGRLDKIGLGIEADALALFAERVEGNLLAARQEIDKLALLYPKGHTVNIDEAQTAVANVARFDVFQLAGAWMKGDVPRVCRLLDGLQEEGEEPVLLLWAVAEDVRTLIRLAAVLKQGQGVQSVRNSLRLWGDKQTLAPLAVKRISVVRLLDALKTCAQIDRIIKGAEEGDAWTVFKRLVVSLAE

SEQ ID NO: 2763 - protein, 416 aa, Neisseria meningitidis
MTKLTRRQIIRRTAGTLFALSPIASAVAKTIRAPQFTAARIWPSHTYTRLTLESTAALKYQHFALDNPSRLVVDIQNANINTVLHGLSQKVMADDPFIRSIRAGQNTPTTVRLVIDLKQPTHAQVFALPPVGGFKNRLVVDLYPHGMDADDPMMALLNGSPNKTRRGSPEADLAQNTPAQTERGKNGRRPVIMIDPGHGGEDPGAVSPGGLQEKHVVLSIARETKKQLEALGYNVFMTRNEDVFIPLGVRVAKGRARRADVFVSIHADAFTSPSARGTGVYMLNTKGATSSAAKFLEQTQNNADAVGGVPTSGNRNVDTALLDMTQTATLRDSRKLGKLVLEELGRLNHLHKGRVDEANFAVLRAPDMPSILVETAFLSNPAEEKLLGSESFRRQCAQSIASGVQRYLNTSVLKRG

SEQ ID NO: 2764 - protein, 404 aa, Neisseria meningitidis
MTVKTPVYLDYAATTPVDKRVAEKMIPYLTETFGNPASNSHAFGWEAEEAVEKARADIAALINADPKEIVFTSGATESDNLAIKGAANFYKTKGKHLITVKTEHKAVLDTMRELERQGFEVTYLGVQENGLIDLEELKAAIRDDTILISVMWANNEIGVVQDIPAIGEICRERKIVFHVDAAQACGKVPVDVEAAKIDLLSMSAHKVYGPKGIGALYVRRKPRVRLEAQMHGGGHERGFRSGTLPTHQIVGMGEAFRIAKEELEQDMAHYRKLRDIFLKGIEGIEEVYINGDLEHRAPNNLNVSFNFVEGESLIMAVKELAVSSGSACTSASLEPSYVLRALGRNDELAHSSLRITFGRMTTEEEVRFAAELIKSKIGKLRELSPLWEMFKDGIDLNSIEWAAH

SEQ ID NO: 2765 - protein, 213 aa, Neisseria meningitidis
MAVKLPNGATVHIATALAAEKKATVATNAAECVLTVAGHGFANGDLVLFKSGWGKLNERVFQIGDVKADTFKLTGIDTSNADEFPAGSGIGAVQKITDWVQVSQIVEFSTSGGEQQYVDFGFLEDDFDQQIPSTKSAMSMSIKIADDTSLSGYKAAAKCSDKGGKWPLKVVLKGGGLICYNGYPSMNKTPELVRNQVMAVTLSYAISGEVNRY

SEQ ID NO: 2766 - protein, 494 aa, Neisseria meningitidis
MSKPVFKKIALYTLGAISGVAVSLAVQGFAAEKDRRDNEVLPVQSIRTMAEVYGQIKANYYQDKPDADLFEGAMKGMVAGLDPHSEYMDKKGYAEIKESTSGEFGGLGMEIGQEDGFVKVVSPIEDTPAERAGVKSGDFIVKIDNVSTRGMTVSEAVKKMRGKPGTKITLTLSRKNADKPIVVNLTRAIIKVKSVRHHLIEPDYGYIRVSQFQERTVESVNTAAKELVKENKGKPLKGLVLDLRDDPGGLLTGAVGVSAAFLPSEAVVVSTKGRDGKDRMVLKAVPEDYVYGMGGDSLAGIPAELKTIPMTVLVNSGSASASEIVAGALQDHKRAVIVGTQSFGKGSVQTLIPLSNGSAVKLTTALYYTPNDRSIQAQGIVPDVEVKDKERIFESREADLVGHIGNPLGGEDVNSETLAVPLEKDADKPAVKEKGKKKKDEDLSSRRIPNPAKDDQLRKALDLVKSPEQWQKSLGLAAKKPVSNKDKKDKKDKK

SEQ ID NO: 2767 - protein, 451 aa, Neisseria meningitidis
MSEYTPQTAKQGLPALAKSTIWMLSFGFLGVQTAFTLQSSQMSRIFQTLGADPHNLGWFFILPPLAGMLVQPIVGHYSDRTWKPRLGGRRLPYLFYGTLIAVIVMILMPNSGSFGFGYASLAALSFGALMIALLDVSSNMAMQPFKMMVGDMVNEEQKSYAYGIQSFLANTGAVVAAILPFVFAYIGLANTAEKGVVPQTVVVAFYVGAALLIITSAFTIFKVKEYDPETYARYHGIDVAANQEKANWFELLKTAPKAFWTVTLVQFFCWFAFQYMWTYSAGAIAENVWHTTDASSVGYQEAGNWYGVLAAVQSVAAVICSFVLAKVPNKYHKAGYFGCLALGALGFFSVFFIGNQYALVLSYTLIGIAWAGIITYPLTIVTNALSGKHMGTYLGLFNGSICMPQIVASLLSFVLFPMMGGLQATMFLVGGVVLLLGAFSVFLIKETHGGV

SEQ ID NO: 2768 - protein, 604 aa, Neisseria meningitidis
MPAETPVSGARPAAKLPIYILPCFLWIGIVPFTFALRQQPSPDFYHDAAAAAGLIVLLFLTAGKKLFDVKIPPISFLLFAMAAFWYLQARLMNLIYPGMNDIVSWIFILLAVSAWACRSLVAHYGQERIVTLFAWSLLIGSLLQSCIVVIQFAGWEDTPLFQNIIVYSGQGVIGHIGQRNNLGHYLMWGILASAYLNGQRKIPAALGVICLIMQTAVLGLVNSRTILTYIAAIALILPFWYFRSDKSNRRTMLGIAAAVFLTALFQFSMNTILETFTGIRYETAVERVANGGFTDLPRQIEWNKALAAFQSAPIFGHGWNSFAQQTFLINAEQHNIHDNLLSNLFTHSHNIVLQLLAEMGISGTLLVAATLLTGIAGLLKHPLTPASLFLICTLAVSMCHSMLEYPLWYVYFLIPFGLMLFLSPAEASDGIAFKKAANLGILTASAAIFAGLLHLDWTYTRLVNAFSPATDDSAKTLNRKINELRYISANSPMLSFYADFSLVNFALPEYPETQTWAEEATLKALKYRPYSATYRIALYLMRQGKVAEAKQWMRATQSYYPYLMPRYADEIRKLPVWAPLLPELLKDCKAFAAAPGHPEAKPCK

SEQ ID NO: 2769 - protein, 245 aa, Neisseria meningitidis
MLLIPAIDLKEGRCVRLRQGLMEEATVFSDSPAETALHWFKQGARRLHLVDLNGAFAGVPQNLPAIKDILAAVAKDIPVQLGGGIRDLKTIGQYLDLGLNDVIIGTAAVKNPDFVREACKAFPGRIIVGLDAKDGMAAIDGWATVTGHHVIDLAKRFEDDGVNSIIYTDIGRDGMMSGVNIDATVKLAQAVRIPVIASGGLTGLDDIRALCTAEKHGVAGAITGRAIYEGSIDFAQAQQLANSLD

SEQ ID NO: 2770 - protein, 525 aa, Neisseria meningitidis; identical to SEQ ID NO: 1967

SEQ ID NO: 2771 - protein, 442 aa, Neisseria meningitidis
MKKVFIRTFGCQMNEYDSDKMLAVLAEEHGGIEQVTQADEADIILFNTCSVREKAQEKVFSDLGRVRPLKEKNPGLIIGVAGCVASQEGENIIKRAPYVDVVFGPQTLHRLPKMIVDKETSGLSQVDISFPEIEKFDHLPPARVEGGAAFVSIMEGCSKYCSFCVVPYTRGEEFSRPLNDVLTEIANLAQQGVKEINLLGQNVNAYRGEMDDGEICDFATLLRIVHEIPGIERMRFTTSHPREFTDSIIECYRDLPKLVSHLHLPIQSGSDRVLSAMKRGYTALEYKSIIRKLRAIRPDLCLSSDFIVGFPGETEREFEQTLKLVKDIAFDLSFVFIYSPRPGTPAANLHDDTPHEEKVRRLEALNEVIEAETARINQTMIGTVQRCLVEGISKKDPDQLQARTANNRVVNFTGTPDMINQMIDLEITEAYTFSLRGKIVEA

SEQ ID NO: 2772 - protein, 725 aa, Neisseria meningitidis
MTRFKYSLLFAALLPVYAQADVSVSDDPKPQESTELPTITVTADRTASSNDGYTVSGTHTPLGLPMTLREIPQSVSVITSQQMRDQNIKTLDRALLQATGTSRQIYGSDRAGYNYLFARGSRIANYQINGIPVADALADTGNANTAAYERVEVVRGVAGLLDGTGEPSATVNLVRKRPTRKPLFEVRAEAGNRKHFGLDADVSGSLNTEGTLRGRLVSTFGRGDSWRQRERSRDAELYGILEYDIAPQTRVHAGMDYQQAKETADAPLSYAVYDSQGYATAFGPKDNPATNWANSRHRALNLFAGIEHRFNQDWKLKAEYDYTRSRFRQPYGVAGVLSIDHNTAATDLIPGYWHADPRTHSASVSLIGKYRLFGREHDLIAGINGYKYASNKYGERSIIPNAIPNAYEFSRTGAYPQPASFAQTIPQYGTRRQIGGYLATRFRAADNLSLILGGRYSRYRTGSYDSRTQGMTYVSANRFTPYTGIVFDLTGNLSLYGSYSSLFVPQSQKDEHGSYLKPVTGNNLEAGIKGEWLEGRLNASAAVYRARKNNLATAAGRDLSGNTYYRAANQAKTHGWEIEVGGRITPEWQIQAGYSQSKTRDQDGSRLNPDSVPERSFKLFTAYHFAPEAPSGWTIGAGVRWQSETHTDPATLRIPNPAAKARAADNSRQKAYAVADIMARYRFNPRAELSLNVDNLFNKHYRTQPDRHSYGALRTVNAAFTYRFK

SEQ ID NO: 2773 - protein, 172 aa, Neisseria meningitidis
MTTHFVVMGVCGCGKTTAALSLQKHLGQCPYAEGDEFHTQANRDKMGAGIPLTDEDRYPWLGNLRDWMTQQAQNGANHTIVTCSALKRGYRDILRGAEGKAAFIHLSPPQDINLERMMSRKGHYMKAGMLDSQLEILEELGEGEYGVKIANPGTPEAVEADILNWVASENLL

SEQ ID NO: 2774 - protein, 258 aa, Neisseria meningitidis
MAAFNTQKVLSVHHWTDAYFTFTCTRDESLRFENGQFVMVGLMVDGKPLMRAYSVASANWEEHLEFFSIKVQDGPLTSRLQHLKVGDDVLISKKPTGTLVAGDLNPGKHLYLLSTGTGIAPFLSITKDPEIYEQFEKIILVHGVRYKKDLAYYDRFTKELPEHEYLGDLVKEKLIYYPIVSREEFEHHGRLTDLMVSGKLFEDIGLPKINPQDDRAMLCGSPAMLKDTCKVLDDFGLTVSPKTGVRGDYLIERAFVDQ

SEQ ID NO: 2775 - protein, 200 aa, Neisseria meningitidis
MTDVLQTVFYIMLFPRIIAASAQRKLSVYLKKGGLVAYPTESCYGLGCLPTLAKALGKLAHLKKRPQHKGMIVIGNQFEQLQPLLQMPSENLQDMLRKEWPAPKTFLLSAKSCVLPELRGKQRSKLAVRVPAHVGARRLCQALQTPLVSTSCNRAGKRACRTEREVRRQFGRDVWIVGGRIGRQKSPSQIIDGETGKRLR

SEQ ID NO: 2776 - protein, 661 aa, Neisseria meningitidis
MAKNNQYSESSITVLKGLEPVKERPGMYTRTDSPTHICQEVIDNAADEALGGFATAIDVQIHEDGSLSVRDNGRGIPVGLHPEEGVPVVELVFTRLHAGGKFNKKDGGSAYAFSGGLHGVGVSVTNALSTRLEVTVKREGKIHRIVFAGGDVVEPLAQVGKCAVKDSGTEVRVWPDGKYFESPNYSIPELERLLRAKAVLLPGVRVSLTRPVKGEDEAHTQTWHYPDGLKSYLTDLIADAQEAVPIFSCENYISDGHNGDFSIGEGAAFALTWLEESSCANESYVNLIPTPLGGTHEAGLKQAVFNAVSNFINLHNLLPRGVKVQSDDVFGKTAFVLSARVLDPQFQGQTKDKLTNRDALKLVATVSGDPLELWLNQNVDFGKKIAELAIRQAQARMRSVKKIEKKKGSGVAVLPGKLTDCESEDIRENELFLVEGDSAGGSAKLARDKATQAILPLRGKVLNSFEVHPDQLFGNAEIHDISVAIGVDPHGINDHPDLSGLRYGKIAILSDADVDGSHIQVLLLTLFYRHFPKLVADGHIYVAQPPLFRVDVNAQGKSKPARKFYALDQNELDGILERLQKEGVKETAYSISRFKGLGEMNPDQLKDTTMHPDTRRLLQVQIPEGADDETRDIFVKLMGKGEAAARRAWMEREGDTAELDI

SEQ ID NO: 2777 - protein, 298 aa, Neisseria meningitidis
LNPTNDLKAWQQRAQAQTELLLERFLPSENEIPHTLHEAMRYAALDGGKRLRPMLVLAASELGEAVHEAVEQAMAAIEMIHVYSLVHDDMPAMDNDSLRRGKPTCHIKYGEANALLTGDALQTQAFDVLSRPTELPAARQLAMLSVLAKAGGSRGMAGGQAIDLANVGKQMVQADLEQMHSLKTGALIRAAVLLGATACPDLSDAELSVLDAYAAKLGLAFQVIDDVLDCEADTATLGKTAGKDADNDKPTYVKLMGLEAARSYAHKLVAEAVALLEPFGDKALRLRQLAEFAVARKY

SEQ ID NO: 2778 - protein, 183 aa, Neisseria meningitidis; identical to SEQ ID NO: 1316

SEQ ID NO: 2779 - protein, 127 aa, Neisseria meningitidis
MFRTMLGGKIHRATVTEADLNYVGSITVDQDLLDAAGIYPNEKVAIVNNNNGERFETYTISGKRGSGVVCLNGAAARLVQKGDIVIIMSYVQLSEPEIAAHEPKVVLVDGNNKIRDIISYEPPHTVL

SEQ ID NO: 2780 - protein, 352 aa, Neisseria meningitidis
MRPLNVQIRLGNLRHNYQILKEMHGGKLLAVVKADAYGHGAVRCAFALADLADGFAVATIDEGIRLRESGITHPIVLLEGVFEASEYEAVEQYSLWPAVGNQWQLEALLIRHWKKPVKVWLKMDSGMHRTGFFPHDYASAYAALKQSEYVDSIVKFSHFSCADEPESGMTEIQMEAFDLGTEGLEGEESLANSAAILNVPEARRDWGRAGLALYGISPFGGSDDRLKPVMRLSTRIFGERVLQPHSPIGYGATFYTSKSTRVGLIACGYADGYPRRAPSNSPVAVDGKLTRVIGRVSMDMMTIELDASQEGLGHEVELWGDTVNINTVAEAAGTIPYELMCNIKRAKFTYIE

SEQ ID NO: 2781 - protein, 363 aa, Neisseria meningitidis
MNAQTLIANVAEFVKTKLKPIVDDIDRKGYYPEAFMRELGAIGGFGAVGTEAEGGNGLGLATQIAVLREIGKECGATSFSAWCQAACAWYLHQTPNRAVKDKYLADILQGKVLAGTGMSNTVKHLADIEKHNLQAERVEGGYTVNGALPWVSNIGEDHIWANTAQIGGGYVMFITGGQWEGVSLQNCPEFCALEGTRTFSLNFKDVFIPDEDIIAAPEQFADYIQSIKAGFILLQIGIGAGVIDGSLGIIRLANVVNAEVNRYLDDGYDSLKTRLDGAWAETERLAGLAWSGTPDNLTTLKLREAAAVLTLAAAQSAALHSGAKGYLMRSPAQRRVREAMFVAIVTPAIKHLRKEIAAIEAAK

SEQ ID NO: 2782 - protein, 348 aa, Neisseria meningitidis
MIPATYTLSQITARLGGEWRGEDISVTAVRPLADAQAEHISFLANPKYKAEVHDSSAGAVIVSAKAADRFEGRNLIVADDPYLYFAKVARLFSPVVKARGGIHPTAVVEPSATVPASCEIGANVYIGANTVLGEGCRILANAVVQHDCKLGDEVVLHPNAVVYYGCTLGRRVEIHSGAVIGADGFGLAFAGDSWFKIPQTGAVTLGDDVEIGSNTNIDRGAMSDTTVGNGTKIDNQVQIGHNCKIGSHTVIAAKTGISGSVTIGSYCIIGGGVGTVGHIEIADKTTIGGGTSVTHSITESGKHLAGIFPMSTHKEWARNAVYIHRLSEMNKRLKTLEQQLSDTGQDSK

SEQ ID NO: 2783 - protein, 55 aa, Neisseria meningitidis; identical to SEQ ID NO: 1895

SEQ ID NO: 2784 - protein, 65 aa, Neisseria meningitidis; identical to SEQ ID NO: 127

SEQ ID NO: 2785 - protein, 275 aa, Neisseria meningitidis
MQNHVISLASAAERRAHIADTFGRHGIPFQFFDALMPSERLEQAMAELVPGLSAHPYLSGVEKACFMSHAVLWKQALDEGLPYIAVFEDDVLLGEGAEKFLAEDAWLQERFDPDSAFIVRLETMFMHVLTSPSGVADYCGRAFPLLESEHWGTAGYIISRKAMRFFLDRFAALPPEGLHPVDLMMFSDFFDREGVPVCQLNPALCAQELHYAKFHDQNSALGSLIEHDRLLNRKQQRRDSPANTFKHRLIRALTKISREREKRRQRREQFIVPFQ

SEQ ID NO: 2786 - protein, 212 aa, Neisseria meningitidis
MSKLTPREILTAGAVVPVMAIDDLSTAIDLSHALVEGGIPTLEITLRTPVGLDAIRLIAKEVPNAIVGAGTVTNPEQLKAVEDAGAVFAISPGLHESLAKAGHNSGIPLIPGVATPGEVQLALEHGIDTLKLFPAEVVGGKAMLKALYGPYADVRFCPTGGISLATAPEYLALPNVLCVGGSWLTPKEAVKNKDWDTITRLAKEAAALKPKA

SEQ ID NO: 2787 - protein, 334 aa, Neisseria meningitidis
MSTFFRQTAQAMIAKHIDCFPLLKLDQVIDWQPIEQYLNRQRTRYLRDHRGRPAYPLLSMFKAVLLGQWHSLSVPELEHSLITRIDFNLFCRFDELSIPDYSTLCRYRNWLAQDDTLSELLELINRQLTEKGLKIEKASAVVGATIIQTAGSKQRQAIEVDEEGQVSGQTTPSKDSDARWIKKNGLYKLGYKQHTRTDAEGYIEKLHITPANAHECKHLPPLLEGVPRGTTVYADKGYDSAENRQHLEEHQLQDGIMRKACRNRPLTEAQTKRNRYLSKTRYVVEQSFGTLHRKFRYARAAYFGLIKVSAQSHLKAMCLNLLKAANRLSAPAAA

SEQ ID NO: 2788 - protein, 233 aa, Neisseria meningitidis
MSLKTVAVIGAMEQEIELLREMMENVKAVSFGKFAAYEGELAGKRMVLALSGIGKVNAAVATAWIIREFAPDCVINTGSAGGLGKGLKVGDVVVGTEIAHHDVDVTAFGYVWGQVPQLPAVFVSDGLLVGKAKQAAEVFEGAAVEQGLIVSGDRFVHSSEGVAEIRKHFPKVKAVEMEAAAIAQTCHQLETPFVIIRAVSDSADEKADISFDEFLKTAAASSAKMVAEIVKSL

SEQ ID NO: 2789 - protein, 333 aa, Neisseria meningitidis
MKRKIWLLPLLAVSAYLQAQTEVRLAVHKSFSLPKGLIARFERANDAKVSIIQAGGANEMLNKLILSRANPIADAVYGLDNANIGKAREMGILAAAQPESAPVAVGLPSALAVDYGYVSINYDKKWFEGKKLPLPQTLQDLTRPEYKNLLVVPSPATSSPGLGFLMANISGLGEEGAFKWWVQMRQNGVKVAKGWSEAYYTDFSHNGGAYPLVVGYAASPAAEVYFSKGKYSEPPTGNLFLKGGVFRQVEGAAVLKGAKQPKLAAKLVQWLQSREVQQAVPSEMWVYPAVKNTRLPDVFRFAQAPTHTTAPAQRDIDANQRGWVSRWIRTVLK

SEQ ID NO: 2790 - protein, 111 aa, Neisseria meningitidis; identical to SEQ ID NO: 233

SEQ ID NO: 2791 - protein, 297 aa, Neisseria meningitidis
MVTFSKIRPLLAIAAAALLAACGTAGNNAARKPVQTAKPAAVVGLALGGGASKGFAHVGIIKVLKENGIPVKVVTGTSAGSIVGSLFASGMSPDRLELEAEILGKTDLVDLTLSTSGFIKGEKLQNYINRKVGGRRIQQFPIKFAAVATDFETGKAVAFNQGNAGQAVRASAAIPNVFQPVIIGRHTYVDGGLSQPVPVSAARRQGANFVIAVDISARPGKNISQGFFSYLDQTLNVMSVSALQNELGQADVVIKPQVLDLGAVGGFDQKKRAIRLGEEAARAALPEIKRKLAAYRY

SEQ ID NO: 2792 - protein, 628 aa, Neisseria meningitidis
MIYPKTYDVIVVGGGHAGTEAALAAARMGAQTLLLTHNIETLGQMSCNPSIGGIGKGHLVRELDALGGAMALATDKSGIQFRRLNASKGAAVRATRAQADRILYKATIREMLENQENLDLFQQAVEDVTLDGERISGVVTAMGVEFKARAVVLTAGTFLSGKIHIGLENYEGGRAGDPAAKSLGGRLRELNLPQGRLKTGTPPRIDGRTIDFSQLTEQPGDTPVPVMSVRGSAEMHPHQVSCWITHTNTQTHDIIRSGFDRSPMFTGKIEGVGPRYCPSIEDKINRFADKDSHQIFLEPEGLTTHEYYPNGISTSLPFDIQIALVRSMKGLENAHILRPGYAIEYDYFDPRNLKASLETKTIEGLFFAGQINGTTGYEEAAAQGLLAGANAVQYVRGQDPLLLRREQAYLGVLVDDLITKGVNEPYRMFTSRAEYRLQLREDNADMRLTEDGYKIGLVGEAQWRMFNEKREAIEREIQRLKTTWYTPQKLAEDEQIRVFGQKLNREANLHDLLRRPNLDYTALMTLEGAMPSERLSAEVVEQVEIQVKYQGYIDRQNEEIDSRRDIETLKLPDGIDYGKVKGLSAEVQQKLNQHKPETVGQASRISGVTPAAVALLMVHLKRGFKDAK

SEQ ID NO: 2793 - protein, 484 aa, Neisseria meningitidis
MTTQTIKFHMKPETFKQNAAISLQDKPLRKSLRTAMDMLMTKRKAVLTDEEELQSLRDLCEHVRQRSLSKLPALLEQLEENLTKLGVKVHWAETPTEACQIIHDIITAKNGKLMVKGKSMVSEEIELNHYLEAKGIKAVESDLGEFIVQMAGEKPTHIVMPAIHKTKEQVSELFHQNLGTPLTDDVDQLTGFARKALRDIYSTADVGLSGVNFAVAETGTLCLVENEGNGRLSTTVPPVHIAITGIEKVVAKLSDIPPLYSLLPRSAIGQNITTYFNMITGPRRSEELDGPQEMHLVLLDNGRSQAYAEDQMRRTLQCIRCGACMNHCPVYTRIGGAAYGTTYPGPIGEIISPHLLGLDATRDLPTACTMCGACVEVCPVRIPITEQMQRLRVEAQRSPTETVPHPIRGQGASHTFGEQMAWRTFNGIFSGSKTYRAFGWAATKFRNLTPRKQLGWTQNRVPMKPAKKTLHELMAEKMRQKEQA

SEQ ID NO: 2794 - protein, 188 aa, Neisseria meningitidis
MSIKSDKWIRRMSEEFGMIDPFEPNQIKEADGKRIISYGTSSYGYDIRCANEFKIFTNINSTIVDPKNFDPKNFVTVEDDCCIIPPNSFALARTVEYFRIPRNVLTVCLGKSTYARCGIIVNVTPFEPEWEGYVTLEFSNTTPLPAKIYAGEGVAQVLFFESDEICETSYKDRNGKYMGQTGVTLPKA

SEQ ID NO: 2795 - protein, 204 aa, Neisseria meningitidis
  misc_feature 200, 201, 202: 'Xaa' is any amino acid
MSYTQLTQGERYHIQYLSRHCTVTEIAKQLNRHKSTISREIRRHRTQGQQYSAEKAQRQSRTIKQRKRQPYKLDSQLIQHIDTLIRRKLSPEQVCAYLCKHHRITLHHSTIYRYLRQDKSNGSTLWQHLRICSKPYRKRYGSTWTRGKVPNRVGIENRPAIVDQKSRIGDWEADTIVGKGQKSALLTLVERVTRYTIICXXXHT

SEQ ID NO: 2796 - protein, 761 aa, Neisseria meningitidis
MNTKLTKIISGLFVATAAFQTASAGNITDIKVSSLPNKQKIVKVSFDKEIVNPTGFVTSSPARIALDFEQTGISMDQQVLEYADPLLSKISAAQNSSRARLVLNLNKPGQYNTEVRGNKVWIFINESDDTVSAPARPAVKAAPAAPAKQQAAAPSTKSAVSVSKPFTPAKQQAAAPFTESVVSVSAPFSPAKQQAAASAKQQTAAPAKQQAAAPAKQTNIDFRKDGKNAGIIELAALGFAGQPDISQQHDHIIVTLKNHTLPTTLQRSLDVADFKTPVQKVTLKRLNNDTQLIITTAGNWELVNKSAAPGYFTFQVLPKKQNLESGGVNNAPKTFTGRKISLDFQDVEIRTILQILAKESGMNIVASDSVNGKMTLSLKDVPWDQALDLVMQARNLDMRQQGNIVNIAPRDELLAKDKAFLQAEKDIADLGALYSQNFQLKYKNVEEFRSILRLDNADTTGNRNTLVSGRGSVLIDPATNTLIVTDTRSVIEKFRKLIDELDVPAQQVMIEARIVEAADGFSRDLGVKFGATGKKKLKNDTSAFGWGVNSGFGGDDKWGAETKINLPITAAANSISLVRAISSGALNLELSASESLSKTKTLANPRVLTQNRKEAKIESGYEIPFTVTSIANGGSSTNTELKKAVLGLTVTPNITPDGQIIMTVKINKDSPAQCASGNQTILCISTKNLNTQAMVENGGTLIVGGIYEEDNGNTLTKVPLLGDIPVIGNLFKTRGKKTDRRELLIFITPRIMGTAGNSLRY

SEQ ID NO: 2797 - protein, 430 aa, Neisseria meningitidis
MAVFPLSAKHRKYALRALAVSIILVSAAYIASTERTERVRPQRVEQNLPPLSWGGSGVQTAYWVQEAVQPGDSLADVLARSGMARDEIARITEKYGGEADLRHLRADQSVHVLVGGDGGAREVQFFTDEDGERNLVALEKKGGIWRRSASEADMKVLPTLRSVVVKTSARGSLARAEVPVEIRESLSGIFAGRFSLDGLKEGDAVRLMYDSLYFHGQQVAAGDILAAEVVKGGTRHQAFYYRSDKEGGGGGNYYDEDGKVLQEKGGFNIEPLVYTRISSPFGYRMHPILHTWRLHTGIDYAAPQGTPVRASADGVITFKGRKGGYGNAVMIRHANGVETLYAHLSAFSQAQGNVRGGEVIGFVGSTGRSTGPHLHYEARINGQPVNPVSVALPTPELTQADKAAFAAQKQKADALLARLRGIPVTVSQSD

SEQ ID NO: 2798 - protein, 194 aa, Neisseria meningitidis
MPKSPPPKPTPFPSPAKIEVDEKGQINGQTTPSKDSDARWIKKNGLYKLGYKQHTRTDAEGYIEKLHITPANAHECKHLSPLLEGLPKGTTVYADKGYDSAENRQHLEEHQLQDGIMRKACRNRPLSEAQTKRNRYLSKTRYVVEQSFGTLHRKFRYARAAYFGLIKVSAQSHLKAMCLNLLKAANRLSAPAAA

SEQ ID NO: 2799 - protein, 160 aa, Neisseria meningitidis; identical to SEQ ID NO: 236

SEQ ID NO: 2800 - protein, 430 aa, Neisseria meningitidis
MQFSAFGEKFTQHSGILQLMDDLGDALKSDKPVNMLGGGNPARIPEIDQAFADIFSKLAAEHAVENIGNYSNPQGDAVLIDALTAFLNREYSWNLTADNIALTNGSQNAFFYLFNLFGGKFKLSDGTSAEKAILLPLAPEYIGYADVHVEGQHFVSVKPKIENVEHEGEAGFFKYRVDFDALENLPELKAGKIGAICCSRPTNPTGNVLTDGEMARLDALAREHGIPLIIDNAYGMPFPNIIYSDVTLNWHENIILCFSLSKVGLPGVRTGIIVAAPEVVKAVSSLNAIVNLAPTRFGAAIAAPLLESGEMKRLADQVIRPFYRNQAQTAVSLLKRELGAYPMKIHKPEGAIFLWLWFENLPVSSQTLYEMLKAEGTLIIPGEHFFVGIDTQDYPHAGECIRMSIAQDAQTLEKGIAAIGKTVRKLYDNV

SEQ ID NO: 2801 - protein, 189 aa, Neisseria meningitidis
MAAGKHTKHSNRVRIIGGQCRGRKLSFTSADGLRPTPDSVREKLFNWLGQDLTGKTVLDLFGGSGALGIEAASRNAKRVLISDNNRQTVQTLQKNSRELGLGQVQIVFSDGIAYLKTVSEQFDVVFLDPPFAWQDWQILFDALKPCLNPRAFVYLEAGTLPDIPDWLTEYREGKSGQSTFELRVFQVAE

SEQ ID NO: 2802 - protein, 278 aa, Neisseria meningitidis
MLALKTPDVLPGFKLSLGLTVLCLSLLVVLPFAMMAAKAAEIGWSGFWNTITEPNVLAAVWLSLRMSFYAMLTNVVFGTLVAWVLVRYEFPGKGLANALVDLPFALPTAVTGIALATLYAPNGWIGRFFEPLGIKIAFTPVGIWIALVVVSLPFIVRAVQPVLEELSGEYEEAAATLGANRFTTFRRVLLPEITPALLTGSGMMFARATGEYGSVIFIAGNIPMVSEILPLIITGKLEQFDVQGASAVALFMLLVSFVILFALNVMQWALGRRSGAKG

SEQ ID NO: 2803 - protein, 208 aa, Neisseria meningitidis
MTQERLPEFFDRAPTLTVQDPLAAFLGAAENGILTYRYADAVRLCGHSCPTVAGAYLMVIKGLKALYGEELPERGGIEAAMQGARDEGTVGVTASVVQLLTGAAPETGFGGIGMQGRFARRNLLSFGVGEINGTLTLRRKDNGKTVAVGLNAALQPFAPEMRDIMPKAVSGSASAEELERFGQLWQARVKAFLTESADDPQFVIVREV

SEQ ID NO: 2804 - protein, 195 aa, Neisseria meningitidis
LNIKLKTLLLPFATLALCTNAFAAPPSDASLARWLDTQNFDRDIEKNMIEGFHAGFKPYADKALAEMPEAKKDQAAKAFNRYRENVLKDLITPEVKQAVRNTLLKNAREIYTQEEIDGMIAFYGSPVGQSVVAKNPRLIKKSMSEIAVSWTALSGKIARHHLPAFTEELRRIICGGKNPDAGCKQAGQVGKRHQK

SEQ ID NO: 2805 - protein, 556 aa, Neisseria meningitidis
MKKIWLDSYEKGVSAEIDITQYNSVSDVFRQSVEKFADQPAFQNMGKTLTYAETGKLATDFASYLQNVLKLPRGERVAIMLPNVLQYPVALFGILQAGLVAVNTNPLYTPRELEHQLKDSGATAIIVLENFANTLELVLPRTQIKHVIVASVGEMFGLLKGSLINFIIRKIKKMVPEYRIRETISFQTALKEGAKHVFQPVALNREDTALLQYTGGTTGVAKGAVLSHGNICANMLQAKEWIKNQLREGKETVIAALPLYHIFALTVNLMIFANAGSKIILITNPRDMKGFIGELKKQRVNVFIGVNTLFNAMVNRPDFAEVDFSGLRLTLGGGMATQKAVAEKWKKITGTPIVEAYGLTEASPGVCCNPLNIESYSGSIGLPVSSTEVELRDANGKEVPVGQPGELWVKGPQVMQGYWNRPEETAKAIDARGFLETGDIAVMDEKGWLKLVDRKKDLVVVSGFNVYPNEIEEVIAHHGKVMEVACIGVPDEKTGEALKVFVVKKDPSLTKEELIAFCRTELTAYKVPKNIEFRDELPKSNVGKILRRELRQSTGK

SEQ ID NO: 2806 - protein, 1392 aa, Neisseria meningitidis
MSYSFTEKKRIRKSFAKRENVLEVPFLLATQIDSYAKFLQLENAFDKRTDDGLQAAFNSIFPIVSHNGYARLEFVHYTLGEPLFDIPECQLRGITYAAPLRARIRLVILDKEASKPTVKEVRENEVYMGEIPLMTPSGSFVINGTERVIVSQLHRSPGVFFEHDKGKTHSSGKLLFSARIIPYRGSWLDFEFDPKDLLYFRIDRRRKMPVTILLKALGYNNEQILDIFYDKETFYLSSNGVQTDLVAGRLKGETAKVDILDKEGNVLVAKGKRITAKNIRDITNAGLTRLDVEPESLLGKALAADLIDSETGEVLASANDEITEELLAKFDINGVKEITTLYINELDQGAYISNTLRTDETAGRQAARVAIYRMMRPGEPPTEEAVEQLFNRLFFSEDSYDLSRVGRMKFNTRTYEQKLSEAQQNSWYGRLLNETFAGAADKGGYVLSVEDIVASIATLVELRNGHGEVDDIDHLGNRRVRSVGELTENQFRSGLARVERAVKERLNQAESENLMPHDLINAKPVSAAIKEFFGSSQLSQFMDQTNPLSEVTHKRRVSALGPGGLTRERAGFEVRDVHPTHYGRVCPIETPEGPNIGLINSLSVYARTNDYGFLETPYRRVIDGKVTEEIDYLSAIEEGRYVIAQANADLDSDGNLIGDLVTCREKGETIMATPDRVQYMDVATGQVVSVAASLIPFLEHDDANRALMGANMQRQAVPCLRPEKPMVGTGIERSVAVDSATAIVARRGGVVEYVDANRVVIRVHDDEATAGEVGVDIYNLVKFTRSNQSTNINQRPAVKAGDVLQRGDLVADGASTDLGELALGQNMTIAFMPWNGYNYEDSILISEKVAADDRYTSIHIEELNVVARDTKLGAEDITRDIPNLSERMQNRLDESGIVYIGAEVEAGDVLVGKVTPKGETQLTPEEKLLRAIFGEKASDVKDTSLRMPTGMSGTVIDVQVFTREGIQRDKRAQSIIDSELKRYRLDLNDQLRIFDNDAFDRIERMIVGQKANGGPMKLAKGSEITTEYLAGLPSRHDWFDIRLTDEDLAKQLELIKVSLQQKREEADELYEIKKKKLTQGDELQPGVQKMVKVFIAIKRRLQAGDKMAGRHGNKGVVSRILPVEDMPYMADGRPVDIVLNPLGVPSRMNIGQILEVHLGWAAKGIGERIDRMLKEQRKAGELREFLNRLYNGSGKKEDLDSLTDEEIIELASNLRKGASFASPVFDGAKESEIREMLNLAYPSEDPEVEKLGFNDSKTQITLYDGRSGEAFDRKVTVGVMHYLKLHHLVDEKMHARSTGPYSLVTQQPLGGKAQFGGQRFGEMEVWALEAYGAAYTLQEMLTVKSDDVNGRTKMYENIVKGEHKIDAGMPESFNVLVKEIRSLGLDIDLERY

SEQ ID NO: 2807 - protein, 455 aa, Neisseria meningitidis
MPDLHTEFSRLLPADEIAELSPTLLKDQRNRFTSAPDIILQPRSVESVQTIMRFCYEHRIPVTPQGGNTGLCGAAVSENGVLLNLSKLNRIRSINLSDNCITVEAGSVLQTVQQAAEASNRLFPLSLASEGSCQIGGNIACNAGGLNVLRYGTMRDLVIGLEVVLPNGERVSHLHPLHKNTTGYDLRHLFIGSEGTLGIITAATLKLFARPSDKATAWVGIPDIESAVRLLTETQAHFAERLCSFELIGRFAAELSSEFSKFPLPTHSEWHILLELTDSLPDSNLDDRLVEFLYKKGFTDSVLAQSEQERIHMWALRENISASQRKLGTSIKHDIAIPIGRVADFVRRCAKDLEQNFKGIQIVCFGHLGDGSLHYNTFLPEILSNEVYRYENDINDAVYRNVLACNGTIAAEHGIGIIKKQWLDKVRTPAEIALMKSIKQHLDPYNIMNPGKLLP

SEQ ID NO: 2808 - protein, 93 aa, Neisseria meningitidis
MIHEEISAMPMGYETLIGDMGSALSGGQKQRIVLARALYCEPKILFLDAATSHLDIANEKAVNANLNGLSIIKIMAAHRKETVESADRKMSLG

SEQ ID NO: 2809 - protein, 446 aa, Neisseria meningitidis
MNKQPLSLAVVGHTNTGKTSLLRTLLRDSGFGEVRNAPSTTRHVEEAAISDGADTLVFLYDTPGLEDAGGVLEWLENHTDNRSDGIERLQQFLGSHGAHHDFNQEAKVLRQVLQSDMAMYVIDAREPVLDKYRDELIILSWCAKPVMPVFNFTGGQPPESWTTMLARRNLHVFAGFDTVAFDFEGELRLWENLATMLPERSTLDRLTAMRRREWQRLDGEARREIADFLLDAAAFRQEVDENEDTATVLQTMQAEIRQLERQMQQRLFALYRFYHSEIDGGDWMPQAFRQDPFDSELLKQYGIRTGTGAATGALIGLGLDIATLGGSLGLGTAIGGFLGGILPNTRTISDKLSGRQTLHTDPETLTLLAARALDLLHVLQTRGHAAQSDIELHSRKAPWDAARLPPELNKARSHWKWSSLNTHRPETSRTERREYAEKLGIRLAGK

SEQ ID NO: 2810 - protein, 315 aa, Neisseria meningitidis
MTDITPFANRLGKNIKHLMKWAKRNGIEAWRIYDRDIPQFPFAADVYGDRIHLQEYDTGWLMRPEEYEAWLAEVLEAVAFVTGFAPEQIRLKRRERQKGLQQYEKTGKAGDDFVITENGRKFWVNLDKYLDTGLFLDHRNTRKKVGETAAGKRFLNLFSYTGSFTVYAATGGAASSETVDLSNTYLDWARRNFELNGIDTERHKIVRADVFQYLQTAYGEGRRFDLIVMDPPSFSNSKKMSDILDIQRDHKKLIDGAVKLLASDGILYFSNNLRSFVLDDLVSEQYAVKDISKQSVPEDFRNKKIHRCWEIRHKS

SEQ ID NO: 2811 - protein, 249 aa, Neisseria meningitidis
MVLRRDFLTWCNETLQTALFKDYAPNGLQVEGREYIGKIVTSVTASRAAIDFAVEQKADLLLVHHGMFWKNELPTVTGWKKERIAALLRHDINMAGYHLPLDAHPTLGNNAQLADRLGFATEKRFGEQNLLNSGSLKQAKTLGALAAHIETVLQRKPVVIGKPEREIRRVAWCSGGAQGFFQTAIDEGVDLYLTGEISEAQYHLANETGTAFISAGHHATERYGVRALAESAAEVFGLELCHFDENNPA

SEQ ID NO: 2812 - protein, 287 aa, Neisseria meningitidis
MNNAFALPAIQSGNGSLEQYIHTVNSIPMLSQEEETRLAERRIKGDLNAAKQLILSHLRVVVSIARGYDGYGLNQADLIQEGNIGLMKAVKRYEPGRGARLFSFAVHWIKAEIHEFILRNWRLVRVATTKPQRKLFFNLRSMRKNLNALSPKEAQDIADDLGVKLSEVLEMEQRMTGHDIAIMADNSDDEDSFAPIDWLADHDSEPSRQLSKQAHYALQTEGLQNALAQLDDRSRRIVESRWLQDDGGLTLHQLAAEYGVSAERIRQIEAKAMQKLRGFLTEEAEAV

SEQ ID NO: 2813 - protein, 205 aa, Neisseria meningitidis; identical to SEQ ID NO: 2331

SEQ ID NO: 2814 - protein, 296 aa, Neisseria meningitidis
MFPVFHLSGESRRRMLQTALRFPHVFKARAEDSHKGTFGTLAVVGGSAGMSGAPVLAASAAMYLGCGKVWVGFNQDTLPFAVIAGFPEIMLDTADSLAKRQDINAWVVGCGLGTGRAAVGTLAGILTEHTDKPVLLDADALNILSTDAETRNLARGCKNLILTPHPAEAARLLGTTVAQVQADRTAAVRKIGAIFGATVVLKGHKTLVAASDTEIYVNESGNAGLATAGSGDVLGGIIGSLLAQGVPVFEAACAGAWLHGAAADVIKESAGIAAGLLAGEIAPAARWLRNRITESM

SEQ ID NO: 2815 - protein, 60 aa, Neisseria meningitidis
MEKKFLDILVCPVTKGRLEYHQDKQELWSRQAKLAYPIKDGIPYMLENEARALSEEELKA

SEQ ID NO: 2816 - protein, 162 aa, Neisseria meningitidis
MTALLVILALALIAAGTAGIVYPALPGLALMFAGTWLLAYSGGYQIYGAGVLWTVGLISLAGILADYVAGIWGTKYTGAGKLAVRGALAGSIIGIFFSLPGLILGPFIGAAAGELIDRRNMLQAGKAGLGTLLGLIVGTTFKIGCAVSILFILLVKYIAYLF

SEQ ID NO: 2817 - protein, 468 aa, Neisseria meningitidis
VEFSTKTEILQEQQAGAQLFVCTEEAQLNHPTALALLSSLEEGQNFADTKIPTGNGLQAVAVCCLKSTGRAALNKAAAEAAKWAQNQETVNVDIHAFDEAQAAAVAEAFAIAFGNAAYRFDRYKKEAKPAKFETAVFHSAHEAVVKEALRVAEAQVYGQSLCRDLGNAAPNECTPEFLARTAKAEAEKLGAHAKIIEKDYIKENMGSFWSVAKGSVEDPYLVELSYFGAADKEAAPVVLVGKGITFDTGGISLKPGLNMDEMKFDMCGAATVISTFCAAVKLQLPINLIAVVATCENMPSGAANKPGDVVKSMKGLTIEVLNTDAEGRLILCDALTYAEQFKPKAVIDVATLTGACIVALGHDVSGVMGNNQDLVDSLLAASYNVDDKAWQLPLFETYKDQLKSNFADIPNIGTPGAGTITAATFLSYFTEGYPWAHLDIAGTAWKSGAEKGATGRPVPLLLNYLRNL

SEQ ID NO: 2818 - protein, 753 aa, Neisseria meningitidis
MLQIEIDGKQVSVEQGATVIEAAHKLGTYIPHFCYHKKLSIAANCRMCLVNVEKAPKPLPACATPVTDGMIVRTHSAKAREAQEGVMEFLLINHPLDCPTCDQGGECQLQDLAVGYGKTTSRYTEEKRSVVGKDMGPLVSAEEMSRCIHCTRCVRFTEEIAGLQEIAMVNRGEHSEIMPFIGKTVETELSGNVIDLCPVGALTSKPFRFNARTWELNRRKSVSAHDALGSNLIIQTKDHTVRRVLPLENEAINECWLSDRDRFAYEGLYHESRLKNPKIKQGGEWMDVDWKTALEYVRSAIECIAKDGNQNQVGIWANPMNTVEELYLAKKLANGLGVKNFATRLRQQDKRLSDDLKGAQWLGQSIESLADNDAVLVVGANLRKEQPLLTARLRRAAKDRMALSVLAGSKEELLMPLLSQEAAHPDEWAGRLKNLSANAEHAVTASLKNAEKAAVILGAEVQNHPDYAAIYAAAQELAAATGAVLGILPQAANSVGADVLNVNSGESVAEMANAPKQAVLLLNVEPEIDTVDGAKAVAALKQAKSVMAFTPFVSETLLDVCDVLLPIAPFTETSGSFINMEGRLQSFHGVVQGFGDSRPMWKVLRVLGNLFDLKGFEYHDTAAILKDALDAESLSSKLDNRSTWTGEGVQTASDRLVRVGGVGIYHTDAIVRRSAPLQETSHAAVPAARVNPNTLARLGLQDGQTAVAKQNGASVSVAVKADAGLPENVMHLPLHTENAALGALMDTIELAGA

SEQ ID NO: 2819 - protein, 228 aa, Neisseria meningitidis
MKTINPETTVIVFDLDDTLYSEYEYKLSGIRSVIDTVAALYPDWNSDNLWRNIDPDGKDWLDKLCRHCGFNESEKQVLLWQYRLHRPTLTPYAPPDFLSELTAPFAARALITDGRSLTQRLKLEALGLSSLFDDILISEACSSEKPDSKRFRHLQDKYADKAGCFIYIGDNISKDFIAPNTLGWITIGLLPSGQNIHRHQPESFNTEYHPDFWVNSFQDLVPIIDSNT

SEQ ID NO: 2820 - protein, 286 aa, Neisseria meningitidis
MAKVKGGLGRGLDSLLANGADNSSGDRLTTVAVKDIRPGRYQARVQIDDEALQELADSIKAQGVIQPVIVREHGLSRYELIAGERRWRAAQIAGLTEIPAVIKTISDETALAMGLIENLQRENLNPIEEAQGLKRLADEFGLTHETIAQAVGKSRSAISNSLRLLSLPGPVQEMLYQRRLEMGHARALLTLPVVEQLELAQKAVKNGWSVREVERRSQAAFQNKRPEPKKTAAADIGRLNDLLTEKLGVNAEIKTANHKKGKIILHFDTPETFDHILKQLGIDYRP

SEQ ID NO: 2821 - protein, 429 aa, Neisseria meningitidis
MKKLNTQSPDFQAGLKALLAFETAQNPETERIVADICADVQKRGDAALIEYTNKFDQTNAKSIDDLILTQADLNAAFERIPNDVQTALQTAARRVESYHQRQKMESWSYTDEDGTLLGQQITPLDRVGIYVPGGKAAYPSSVIMNAMPAHVAGVKEIIMVVPTPKGERNDIVLAAAYVAGVTKVFTVGGAQAVAALAYGTETIPQVDKITGPGNAFVAAAKRRVFGVVGIDMVAGPSEILVIADGTTPADWVAMDLFSQAEHDEIAQAILIGTSQAYLDEVEAAMDRLIETMPRRDIIEASLGNRGAMILAKDLDEACEIANYISPEHLELSVENPQEWAKKIRHAGAIFMGRYTGESLGDYCAGPNHVLPTSRTARFSSPLGTYDFQKRSSLIQVSEQGAQKLGETASVLAHGESLTAHARAAEFRMK

SEQ ID NO: 2822 - protein, 145 aa, Neisseria meningitidis
VGMMGFEKVEHLLPDTVLDIVDVIGLAATEQLVKAIGGARFKFGKGKVDTERLAILVEAIGEVKTHELLQVYGGEELYVPRCGKALIQLRNHRFYQEFVKLRDIDKESGLMAMTKLCPKYGISSRTGYTIINEMSRPAAQQAALF

SEQ ID NO: 2823 - protein, 78 aa, Neisseria meningitidis; identical to SEQ ID NO: 1246

SEQ ID NO: 2824 - protein, 302 aa, Neisseria meningitidis; identical to SEQ ID NO: 1790

SEQ ID NO: 2825 - protein, 257 aa, Neisseria meningitidis
MSANILAIANQKGGVGKTTTTVNLAASLASRGKRVLVVDLDPQGNATTGSGIDKAGLQSGVYQVLLGDADVKSAAVRGKEGGYAVLGANRALAGAEIELVQEIAREVRLKNALKAVAEDYDFILIDCPPSLTLLTLNGLVAAGGVIVPMLCEYYALEGISDLIATVRKIRQAVNPDLDITGIVRTMYDSRSRLVAEVSEQLRSHFGDLLFETVIPRNIRLAEAPSHGMPVMAYDAQAKGTKAYLALADELAARVSGK

SEQ ID NO: 2826 - protein, 156 aa, Neisseria meningitidis
LNITVLAVGTKMPRWVDEAVAEYAKRFGRDVAYALKEIKPEKRGAGVNAAQGMAAEEKRILEAIPQGAFLVVLDERGKAPTSVELAEHLKSWQQNGEHVCFVIGGADGMTDRLKQQARMMMRLSSLTLPHGMVRVFLTEQLYRAVSILHNHPYHRE

SEQ ID NO: 2827 - protein, 356 aa, Neisseria meningitidis
MNLISRYIIRQMAVMAVYALLAFLALYSFFEILYETGNLGKGSYGIWEMLGYTALKMPARAYELMPLAVLIGGLVSLSQLAAGSELTVIKASGMSTKKLLLILSQFGFIFAIATVALGEWVAPTLSQKAENIKAAAINGKISTGNTGIWLKEKNSIINVREMLPDHTLLGIKIWARNDKNELAEAVEADSAVLNSDGSWQLKNIRRSTLGEDKVEVSIAAEENWPISVKRNLMDVLLVKPDQMSVGELTTYIRHLQNNSQNTRIYAIAWWRKLVYPAAAWVMALVAFAFTPQTTRHGNMGLKLFGGICLGLLFHLAGRFFGFTSQLYGIPPFLAGALPTIAFALLAVWLIRKQEKR

SEQ ID NO: 2828 - protein, 194 aa, Neisseria meningitidis
MHILTAGVDEAGRGPLVGSVFAAAVILPEIFDLPGLTDSKKLSEKKRDALAEMIKNQAVAWHVAAAGPEEIASLNILHATMLAMKRAVDGLAVRPEKIFIDGNRIPEHLNIPAEAVVKGDSKIIEISAASVLAKTARDAEMYALAQRHPQYGFDKHKGYGTKQHLEALKQYGVLPEHRRDFAPVRNLLAQQTLF

SEQ ID NO: 2829 - protein, 120 aa, Neisseria meningitidis
MASSNVNKEIKDKKLSLWAKRQDGSVKWFCGQPVTRNDTAKDDTVAADTDTAKKIDTKHLPSTCRDDSSTGCIETPRADFKHFQKISRYRVLPESRHMAEKLRHSRAGGNLGLSARKLIG

SEQ ID NO: 2830 - protein, 312 aa, Neisseria meningitidis
MLKLNKVCKRFGGKTVADSICLTVGRGKILAVLGRSGCGKSTLLNMIAGIVRPDGGEIWLNGENITRMPPEKRRISLMFQDYALFPHMSALENAAFGLKMQKMPKAEAERLAMAALAEVGLENEAHRKPEKLSGGEKQRLALARALVVRPSLLLLDESFSSLDTHLRDRLRRMTAERIRNGGIPAVLVTHSPEEACTAADEIAVMHGGRILQYGTPETLVKTPSCVQVARLMGLPNTNDDRHIPQHAVRFDQDGMECRVLSRTCLPESFSLSVLHPEHGILWLNLDMPHAGEISGNDTVRIHIEDREIVRFR

SEQ ID NO: 2831 - protein, 520 aa, Neisseria meningitidis
MAKQSNAAPKKRGFFARLFGRREAVPKTARRNFAGARPVGSLASWQPQNWSADALARSDLDRLRTRARSLARDNDYMRKFLNMVESNVIGRDGFALQMRVLLDNADKPDALANKAIEAAFSRWARRGVCDVTGQMSFTDLQRLLIRSVARDGEVLIRHISGFDNDYGYALQVLDIDRLDTGYNVPQQNGRNAVRMGVELNSYSRPVAYWLRTAHPGESYGQTNTGNLRERVPAEQISHIFLHDRPEQRRGFPWVASAIIGLQNLSGYQEAAIIAARVGASKMGFFKQTEDADNFMPPIDGQEVDNGRGSIDLIDSVEPGTFHELPQGYDFTPFDPDYPHANYDAFVKASLRGIASGLNVAYHSLANDLEGVNFSSIRSGTLEERDTWMTLQNWFADAFLYDVFDRWIEAALLMGAIKMPSGKSLPAGKLDKFKACNWQGRRWSWVDPLKDINAHKEAVALAVKSRRDICAEMGLDFEDVITQIEQENQMLAGKGIIADVKPAASAAEPESEDNPNEENEA

SEQ ID NO: 2832 - protein, 288 aa, Neisseria meningitidis
MAGETITAADYIKHHLQSLTSLSDVTQGQGLKNIADFSFINLDAVFFAVLLGVIGSFLLWRGAKKATAGVPGRFQAAVEILFEFVDDMCKSIIHNEKSRKAVAPLGLTLFVWIFLMNAMDMLPVDLLPMVWQGITGNHHALLRVVPTADLNTTLALAVGVLLICIYYNIKIKGLGGWFHELFSAPFGAKLAPANFLLNLVEFLSKTVSHGMRLFGNMYAGELVFLLIALLGGAWAASGSVEVMDPILFVFHIIAGLAWAIFHILVITLQAFIFMALAFVYIGQAHDAH

SEQ ID NO: 2833 - protein, 765 aa, Neisseria meningitidis
MQPHAPHTDSNTLMLGRYAERAYLEYAMSVVKGRALPEVSDGQKPVQRRILFAMRDMGLTAGAKPVKSARVVGEILGKYHPHGDSSAYEAMVRMAQDFTLRYPLIDGIGNFGSRDGDGAAAMRYTEARLTPIAELLLSEINQGTVDFVPNYDGAFDEPLHLPARLPMVLLNGASGIAVGMATEIPSHNLNEVTQAAIALLKKPTLETADLMQYIPAPDFAGGGQIITPADELRRIYETGKGSVRVRARYEIEKLARGQWRVIVTELPPNANSSKILAEIEEQTNPKPKAGKKQLNQDQLNTKKLMLDLIDRVRDESDGEHPVRLVFEPKSSRIDTDTFINTLMAQTSLEGNVSMNLVMMGLDNRPAQKNLKTILQEWLDFRTVTVTRRLKFRLNQVEKRLHILEGRLKVFLHIDEVIKVIRESDDPKADLMAAFGLTEIQAEDILEIRLRQLARLEGFKLEKELNELREEQGRLNILLSDENEKRKLIIKEIQADMKQYGDARRTLVEEAGRAVLTQTTADEPITLILSEKGWIRSRAGHNLDLSQTTFKEGDRLKQTLEGRTVLPVVILDSSGRTYTLDAAEIPGGRGDGVPVSSLIELQNGAKPVAMLTGLPEQHYLLSSSGGYGFIAKLGDMVGRVKAGKVVMTADSGETVLPPVAVYASSFINPDCKIIAATNQNRALAFPIGELKIMAKGKGLQIIGLNAGESMTHTAVSSEPEILIESEGRRGAAHKDRIPISLLEAKRGKKGKLLPISGSLKQLSSPK

SEQ ID NO: 2834 - protein, 56 aa, Neisseria meningitidis
MTKKEKDAVYGITYIRNQEFYDIPITREKALKALKKHPEIYQKFRHFFPFVELPPL

SEQ ID NO: 2835 - protein, 320 aa, Neisseria meningitidis
MQARLLIPILFSVFILSACGTLTGIPSHGGGKRFAVEQELVAASARAAVKDMDLQALHGRKVALYIATMGDQGSGSLTGGRYSIDALIRGEYINSPAVRTDYTYPRYETTAETTSGGLTGLTTSLSTLNAPARSRTQSDGSGSKSSLGLNIGGMGDYRNETLTTNPRDTAFLSHLVQTVFFLRGIDVVSPANADTDVFINIDVFGTIRNRTEMHLYNAETLKAQTKLEYFAVDRTNKKLLIKPKTNAFEAAYKENYALWMGPYKVSKGIKPTEGLMVDFSDIRPYGNHTGNSAPSVEADNSHEGYGYSDEAVRQHRQGQP

SEQ ID NO: 2836 - protein, 808 aa, Neisseria meningitidis
MSAQTDPGYFFMPNHIILIGASERPYSLGERVLSNLLSTPFQGKITPVNPRHHTIAGLPAYTSLNKIPGNADLIIAVTLPDSYDTLFKTCRKKQLRHIILIQDWDSLSAAELHTAETAIRKHHGNGLNITACTTAGIQLPSLGLNISTQDGYAAGHTAILTGNAAVSRQIDNILNKLRQGTSRHISLHPGISPITSADWLNRFGHSLHTKTAVLHHNPEENQRKLFSAIRQFTRHTPLILHITCRTTETDRAVLHCLARHCNFLISFNADDLEAALRAQLSDLPPLSRLDILSDTPAEWLNAHAPKTLALHFPNLPHHIRNGHLTGTPTPSICHDIASRQLARPDTQAVLTILSPSGHEDYKKTARALIRLSEQSAKPLLVSSPFSDGITHFDTPTQAIRTLSYRNTAAALKQAQLDIAPPQPCRLKTPQPQNIKKALEAADPALIAEALHLPPYRHTTHNAVQFQFGSHSLYGDILTARCNGQTTAVLPPFTTLDSRHLARFAELDGTQTLDQFLHTLTIIPEYRQHILGITLNLNGGQYSSDFILKTPETHDTPKRKNTGKAAQTLEHAAAKMQSAAAYLKHKNPTAAEFLRHTSEAAAELLGSKTETGAAVPNVLAPYPAAYPKTLSLRNNTTVTITPILPEDAEAKQQFVRSLGPEARYTRFMTHTNELPAATLARLCNPDYHCEAAWTAKDADSNIVAVVRHSRLNRNECEFGITLAEHMRGSGLAQKMMELIIQTAAQQGYRTMSADILKTNTPMIKLAEKSGFTLKESDTEKNLYRAYLNLAADKTTEKTNKNLRTDHKIT

SEQ ID NO: 2837 - protein, 495 aa, Neisseria meningitidis
MLKKIKKALFQPKKFFQDSMWLTTSPFYLTPPRNNLFVISNLGQLNQVQSLIKIQKLTNNLLVILYTSKNLKMPKLVHQSANKNLFESIYLFELPRSPNNITPKKLLYIYRSYKKILNIIQPAHLYMLSFTGHYSYLISIAKKKNITTHLIDEGTGTYAPLLESFSYHPTKLERYLIGNNLNIKGYIDHFDILHVPFPEYAKKIFNAKKYNRFFAHAGGISINNNIANLQKKYQISKNDYIFVSQRYPISDDLYYKSIVEILNSISLQIKGKIFIKLHPKEMGNNYVMSLFLNMVEINPRLVVINEPPFLIEPLIYLTNPKGIIGLASSSLIYTPLLSPSTQCLSIGELIINLIQKYSMVENTEMIQEHLEIIKKFNFINILNDLNGVISNPLFKTEETFETLLKSAEFAYKSKNYFQAIFYWQLASKNNITLLGHKALWYYNALYNVKQIYKMEYSDIFYIDNISVDFHSKDKLTWEKIKHYYYSADNRIGRDR

SEQ ID NO: 2838 - protein, 296 aa, Neisseria meningitidis
VSEIHQIYWEESGNPDGVPVIFLHGGPGAGASPECRGFFNPDVFRIVIIDQRGCGRSRPYACAEDNTTWDLVADIEKVREMLGIRKWLVFGGSWGSTLSLAYAQTHPERVKGLVLRGIFLCRPSETAWLNEAGGVSRIYPEQWQKFVAPIAENRRNRLIEAYHGLLFHQDEEVCLSAAKAWADWESYLIRFEPEEVDEDAYASLAIARLENHYFVNGGWLQGDRAILNNIGKIRHIPTIIVQGRYDLCTPMQSAWALSKAFPEAELRVVQAGHRAFDPPLVDALVQAVEDILPHLL

SEQ ID NO: 2839 - protein, 447 aa, Neisseria meningitidis
MSQNHTILQNLPVGQKVGIAFSGGLDTSAALLWMKLKGALPYAYTANLGQPDEDDYNAIPKKAMEYGAENARLIDCRAQLAHEGIAAIQCGAFHVSTGGIAYFNTTPLGRAVTGTMLVSAMKEDDVNIWGDGSTYKGNDIERFYRYGLLTNPALKIYKPWLDQQFIDELGGRHEMSEFLIANGFNYKMSVEKAYSTDSNMLGATHEAKDLEFLNSGIKIVKPIMGVAFWDENVEVSPEEVSVRFEEGVPVALNGKEYADPVELFLEANRIGGRHGLGMSDQIENRIIEAKSRGIYEAPGMALFHIAYERLVTGIHNEDTIEQYRINGLRLGRLLYQGRWFDSQALMLRETAQRWVAKAVTGEVTLELRRGNDYSILNTESPNLTYQPERLSMEKVEGAAFTPLDRIGQLTMRNLDITDTRAKLGIYSQSGLLSLGEGSVLPQLGNKK

SEQ ID NO: 2840 - protein, 41 aa, Neisseria meningitidis
MVFGPSGSDGISDPMPSEGGRVPKNRARAAGVVKIGLYGGV

SEQ ID NO: 2841 - protein, 326 aa, Neisseria meningitidis
  misc_feature 320, 321: 'Xaa' is any amino acid
MKHFPSKVLTTAILATFCSGALAATNDDDVKKAATVAIAAAYNNGQEINGFKAGETIYDIDEDGTITKKDATAADVEADDFKGLGLKKVVTNLTKTVNENKQNVDAKVKAAESEIEKLTTKLADTDAALDATTNALNKLGENITTFAEETKTNIVKIDEKLEAVADTVDKHAEAFNDIADSLDETNTKADEAVKTANEAKQTAEETKQNVDAKVKAAETAAGKAEAAAGTANTAADKAEAVAAKVTDIKADIATNKDNIAKKANSADVYTREESDSKFVRIDGLNATTEKLDTRLASAEKSITEHGTRLNGLDRTVSDLXXTHLIN

SEQ ID NO: 2842 - protein, 572 aa, Neisseria meningitidis
MNLHQTVEHEAAAAFAAAGIADSPVVLQPTKNAEHGDFQINGVMGAAKKAKQNPRELAQKVADALAGNAVIESAEVAGPGFINLRLRPEFLAQNIQTALNDARFGVAKTDKPQTVVIDYSSPNLAKEMHVGHLRSSIIGDSISRVLEFMGNTVIRQNHVGDWGTQFGMLVAYLVEQQKDNAAFELADLEQFYRAAKVRFDEDPAFADTAREYVVKLQGGDETVLALWKQFVDISLSHAQAVYDTLGLKLRPEDVAGESKYNDDLQAVVDDLVQKGLAVEDDGAKVVFLDEFKNKEGEPAAFIVQKQGGGFLYASTDLACLRYRVGTLHADRLLYVVDHRQALHFEQLFTTSRKAGYLPESVGAAFVGFGTMMGKDGKPFKTRSGDTVKLVDLLTEAVERATALVKEKNPELGADEAAKIGKTVGIGSIKYADLSKNRTSDYVFDWDAMLSFEGNTAPYLQYAYTRVQSVFRKAGEWDANAPTVLTEPLEKQLAAELLKFEDVLQSVADTAYPHYLAAYLYQIATLFSRFYEACPILKAESASRNSRLQLAKLTGDTLKQGLDLLGIDVLDVM

SEQ ID NO: 2843 - protein, 410 aa, Neisseria meningitidis; identical to SEQ ID NO: 257

SEQ ID NO: 2844 - protein, 252 aa, Neisseria meningitidis
MNPKTPPDHTEDAVRLSKRMAQLGLCSRREADGYIEQGWVTVNGKTAVLGQKVLPADRIELNKKAHEQQAARITILLNKPVGYVSAQAEKGYKSAAELITPENHWEDDTSRIRFDPKHKIGLAPAGRLDIDSVGLLVLTQDGRIAKQLIGENSGSEKEYLVRVRGKLDEKGLALLNHGLSLDGEKLRPAKVEWQNEDQLRFVLKQGKKRQIRRMCELVGLRVVGLKRIRMGKVKLGRLPPGKWRYLAPGESF

SEQ ID NO: 2845 - protein, 203 aa, Neisseria meningitidis
MITTYKTITSSTQAEFKDKGSRFIAFTYPIRTLADVKKYLDLLKEEHHKARHWCYAYRLGVDGVQFRANDDGEPSGSAGRPILGQIDSVGITDVLVVVVRYFGGTLLGVPGLIHAYKEATAQALAVAEVVEKNIEKTVWLKCEYPFLNEAIRIAKQYQADILERDLQLDCRLTVSLSLVNYEACVAAWKNTRQIEVNTEKPFE

SEQ ID NO: 2846 - protein, 62 aa, Neisseria meningitidis; identical to SEQ ID NO: 2649

SEQ ID NO: 2847 - protein, 279 aa, Neisseria meningitidis
MLVAFLIMLREGIEAALIVGIVAGFLKQSGHSKLMPKVWFGVVLASLMCLGLGYGIHSATGEIPQKQQEFVVGIIGLVAVAMLTYMILWMKKAARSMKQQLQDSVQAALNRGSGQGWALVGMAFLAVAREGLESVFFLLAVFKQSPTWHMPAGAVAGVLAAAVIGALIYQGGMRLNLAKFFRWTGAFLIAVAAGLLAGSLRALHEAGIWNALQDIVFDSSKYLHEDSPLGVLLGGFFGYTDHPTQGEALVWLLYLIPVMTWFLCGSRPSETLTRKEELK

SEQ ID NO: 2848 - protein, 219 aa, Neisseria meningitidis
LCASCLNVNKIVIIATFYRNPERPSEMRNEEKRALRRELRGRRSQMGRDVRAAATVKINHLLKRYIKKGRKIGVYWPMGKELRLDGFVRAAQKRGAELYLPYIEPRSRRMWFTPYPESGMERERIRGRAKLNVPQFAGRKIRVHGLSVLLVPLVGIDREGYRLGQAGGYYDATLAAMKYRLQAKTVGVGFACQLVGTLPREAHDLPLDGFVSEAGILCF

SEQ ID NO: 2849 - protein, 761 aa, Neisseria meningitidis
LTLYAVEELNYDKLDSHKKRKFLGITYDKVHDTSTQQMQTALPSRVVAESANLQSGWDTKLQGTQFETTLGGAVIRAGVGDQARADAKIILEGIKSSIHTETVSSSKSALWQKQAGRGSNIETLQLPSFTGPVAPVLSAPGGYIVDIPKGNLKTEIEKLAKQPEYAYLKQLQVAKNINWNQVQLAYDRWDYKQEGLTEAGAAIIALAVTVVTSGAGTGAVLGLNGAAAAATDAAFASLASQASVSFINNKGDVGKTLKELGRSSTVKNLVVAAATAGVADKIGASALNNVSDKQWINNLTVNLANAGSAALINTAVNGGSLKDNLEANILAALVNTAHGEAASKIKQLDQHYIVHKIAHAIAGCAAAAANKGKCQDGAIGAAVGEIVGEALTNGKNPDTLTAKEREQILAYSKLVAGTVSGVVGGDVNAAANAAEVAVKNNQLSDKEGREFDNEMTACAKQNNPQLCRKNTVKKYQNVADKRLAASIAICTDISRSTECRTIRKQHLIDSRSLHSSWEAGLIGKDDEWYKLFSKSYTQADLALQSYHLNTAAKSWLQSGNTKPLSEWMSDQGYTLISGVNPRFIPIPRGFVKQNTPITNVKYPEGISFDTNLKRHLANADGFSQKQGIKGAHNRTNFMAELNSRGGRVKSETQTDIEGITRIKYEIPTLDRTGKPDGGFKEISSIKTVYNPKKFSDDKILQMAQNAASQGYSKASKIAQNERTKSISERKNVIQFSETFDGIKFRSYFDVNTGRITNIHPE

SEQ ID NO: 2850 - protein, 39 aa, Neisseria meningitidis
MSDKPILLSPAAKKEALARAVKEIRAKYGDKAIVKGCVK

SEQ ID NO: 2851 - protein, 133 aa, Neisseria meningitidis
MPSEAFRRHRAYRENKLQSLVSVLICAYNVEKYFAQSLAAVVNQTWRNLEILIVDDGSTDGTLAIAKDFQKRDSRIKILAHDRLLNRKQQRRDSPANTFKHRLIRALTKISREREKRRQRREQLIGKIIVPFQ

SEQ ID NO: 2852 - protein, 633 aa, Neisseria meningitidis
MTTPKKTAKTSGNEARELADLSEDIGIRFKYPNSERVYLQGSRDDIRVPLREIRQDDTYTAQGAEANPPIPVYDTSGVYGDPAAHIDLKQGLPHIRTAWLNERGDTEILPKLSSEYGIERAHDPKTAHLRFNQITRPRRAKSGSNVTQLHYARQGIITPEMEFVAIRERLKLDELSQKSEYAKLLKQHAGQSFGANIPTRPDQITPEFVRQEIAAGRAIIPANINHPELEPMIIGRNFRVKINGNLGNSAVTSSLTEEVEKMVWSLRWGADTIMDLSTGAHIHETREWIIRNAPVPIGTVPIYQALEKTGGIAEDLTWDLFRDTLIEQAEQGVDYFTIHAGVLLRYVPMTANRLTGIVSRGGSIMAKWCLAHHRENFLYTHFDEICEIMKAYDVSFSLGDGLRPGCIADANDESQFAELHTLGELTDKAWKHDVQVMIEGPGHVPLQRVKENMTEELQHCFEAPFYTLGPLVTDIAPGYDHITSGIGAANIGWYGTAMLCYVTPKEHLGLPDKEDVRTGIITYKLAAHAADLAKGWPGAQLRDNALSKARFEFRWRDQFRLSLDPERAESFHDETLPAEGAKIAHFCSMCGPKFCSMKITQEVRDYADKQKAQRQGMEEKAVEFVKKGAKIYS

SEQ ID NO: 2853 - protein, 88 aa, Neisseria meningitidis
MQVLKKVDWKMFVARSFWQCVPVGLTAGVWCFVAGMALHSCAKEPEPVAKEPTKVEAMERQADLEVKVWEGQYESMSVEEKMKGIVYE

SEQ ID NO: 2854 - protein, 447 aa, Neisseria meningitidis
MIKIKKGLNLPIAGRPEQVIYDGPAITEVALLGEEYAGMRPSMKVKEGDAVKKGQVLFEDKKNPGVVFTAPASGKIAAIHRGEKRVLQSVVIAVEGNDEIEFDRYAPDALAKLSGKEVRRNLIQSGLWTALRTRPFSKIPAVDAEPFAIFVNAMDTNPLAADPVVVIKEAAEDFRRGLLVLSRLTERKIHVCKAAGADVPSENAANIETHEFGGPHPAGLSGTHIHFIEPVGANKTVWTINYQDVIAIGRLFATGRLNTGRVVALGGSQVNKPRLLRTVLGAKVSQITAGELVDADNRVISGSVLNGAIAQGAHDYLGRYHNQISVIEEGRSKELLGWVAPQPDKYSITRTTLGHFLKNKLFKFNTAVNGGDRAMVPIGTYERVMPLDILPTLLLRDLIVGDTDSAQALGCLELDEEDLALCSFVCPGKYEYGPLLRKVLETIEKEG

SEQ ID NO: 2855 - protein, 339 aa, Neisseria meningitidis; identical to SEQ ID NO: 1972

SEQ ID NO: 2856 - protein, 199 aa, Neisseria meningitidis
MALKTSNLEHAMLVHPEAMSVGALADKIRKIENWPQKGILFHDITPVLQSAEYFRLLVDLLVYRYMDQKIDIVAGLDARGFIIGAALAYHLNVGFVPIRKKGKLPFETVSQSYALEYGEAAVEIHTDAVKPGSRVLLVDDLVATGGTMLAGLELIRKLGGEIVEAAAILEFTDLQGGKNIRASGAPLFTLLQNEGCMKG

SEQ ID NO: 2857 - protein, 214 aa, Neisseria meningitidis; identical to SEQ ID NO: 1408

SEQ ID NO: 2858 - protein, 658 aa, Neisseria meningitidis
MHPIETPDKTFHDGDGVSELGTILPAWWLNQVQSELLAVLTAAGIQPDKSQPNQLLAALNRLAVVTTGNQEIGGQKTFTAQTQFQSGIHLSANQTNWNGGHKAYIGADADNAHIVFGDDTLRLHGANNRISYNNHDIFHKANKPRFAEDIEGKPNTLSGYGIGNFKVETFRGDLNTLKTDGIYSLSTAVGSSNLPVENTACHIQVIAGTKHGWCRQLGYPAYTSDVYERHQTSSANDNWSAWKKLNSDGIPVGAIVSFPKAVRNPAGYLKANGTTFAQNTFPDLYRALGNSNRLPDLSRTDIGMTAWFPSDQIPTGWLAFDDIRTRVTETAYPELYRLLTGKYGSIQNVPQAEDRFIRNAGNGLAVGTKQEDEIKRHVHKVFSHWTNHTDAAALGYEDHNERQRSALVSTWTDGDLNDNGFLTPRPDSKMATGGDENRPKALVLKLCIKAADTLGEAVFWIKSHGETINAGALDAGTLAQNLQDKADRAHTHTAAQIQGLDEKISTAVAAQFTRQTIGGVDIVRFPDGTMIQTGSYRFTRSGGPIENEVVFPVAFADGNVKCFVSERHSGRVTGDRRQHNWLFIRAKNHAAAIITNWYEGSCDWMAIGKAASGNAASSPIVPEIPETNEEPQRESGRTSTGPRNRRRRRDGLLEALQD

SEQ ID NO: 2859 - protein, 183 aa, Neisseria meningitidis; identical to SEQ ID NO: 2421

SEQ ID NO: 2860 - protein, 382 aa, Neisseria meningitidis
MNTPPFVCWIFCKVIDNFGDIGVSWRLARVLHRELGWQVHLWTDDVSALRALCPDLPDVPCVHQDIHVRTWHSDAADIDTAPVPDVVIETFACDLPENVLHIIRRHKPLWLNWEYLSAEESNERLHLMPSPQEGVQKYFWFMGFSEKSGGLIRERDYCEAVRFDSEALRQRLMLPEKNAPEWLLFGYRSDVWAKWLEMWRQAGSPMTLLLAGTQIIDSLKQSGVIPQDALQNDGDVFQTASVRLVKIPFVPQQDFDKLLHLADCAVIRGEDSFVRAQLAGKPFFWHIYPQDENVHLDKLHAFWDKAHGFYTPETVSAHRRLSDDLNGGGALSATQRLECWQILQQHQNGWRQGAEDWSRYLFGQPSASEKLAAFVSKHQKIR

SEQ ID NO: 2861 - protein, 167 aa, Neisseria meningitidis
MHALHFSASDKAALYREVLPQIESVVADETDWVANLANTAAVLKEAFGWFWVGFYLVDTRSDELVLAPFQGPLACTRIPFGRGVCGQAWAKGGTVVVGDVDAHPDHIACSSLSRSEIVVPLFSDGRCIGVLDADSEHLAQFDETDALYLGELAKILEKRFEASRQAV

SEQ ID NO: 2862 - protein, 338 aa, Neisseria meningitidis
MYRKLIALPFALLLAACGREEPPKALECANPAVLQGIRGNIQETLTQEARSFAREDGRQFVDADKIIAAAYGLAFSLEHASETQEGGRTFCIADLNITVPSETLADAKANSPLLYGETALSDIVRQKTGGNVEFKDGVLTAAVRFLPVKDGQTAFVDNTVGMAAQTLSAALLPYGVKSIVMIDGKAVKKEDAVRILSGKAREEEPSKPTPEDILEHNAAGGDAGVPQAAEGAPEPEILHPDDGERADTVTVSRGEVEEARVQNQRAESEITKLWGGLDTDVQKELVGEQRKWAQEKISNCRQAAAQADRQEYAEYLKLQCDTRMTRERIQYLRGYSID

SEQ ID NO: 2863 - protein, 299 aa, Neisseria meningitidis; identical to SEQ ID NO: 167

SEQ ID NO: 2864 - protein, 211 aa, Neisseria meningitidis
MSETENQALTFAKRLKADTTAVHDSVDNLVMSVQPFVSKENYIKFLKLQSVFHKAVDHIYKDAELNKAIPELEYMARYDAVTQDLKDLGEEPYKFDKELPYETGNKAIGWLYCAEGSNLGAAFLFKHAQKLDYNGEHGARHLAPHPDGRGKHWRAFVEHLNALGLSPEAEAEAIQGVREAFAFYKVVLRETFGLAADAEAPEGMMPKHRKE

SEQ ID NO: 2865 - protein, 376 aa, Neisseria meningitidis
MAKHLPLAVLTALLLAACGGSDKPPAEKPAPAENRNVLKIYNWSEYVDPETVADFEKKNGIKVTYDVYDSDETLESKVLTGKSGYDIVAPSNAFVGRQIKAGAYQKIDKSLIPNYKHLNPEMMRLMDGVDPGHEYAVPFYWGTNTFAINTERVKKALGTDKLPDNQWDLVFDPEYTSKLKQCGISYLDSAAEIYPMVLNYLGKNPNSSNTEDIREATALLKKNRPNIKRFTSSGFIDDLARGDTCVTIGFGGDLNIAKRRAEEAGGKEKIRVMMPKEGVGIWVDSFVIPKDAKNVANAHKYINDFLDPEVSAKNGNFVTYAPSSKPARELMEDEFKNDNTIFPTEEDLKNSFIMVPIQPAALKFMVRQWQDVKAGK

SEQ ID NO: 2866 - protein, 94 aa, Neisseria meningitidis; identical to SEQ ID NO: 944

SEQ ID NO: 2867 - protein, 162 aa, Neisseria meningitidis
MLKLTLIAACAENLCIGAGNAMPWHIPEDFAFFKAYTLGKPVIMGRKTWESLPVKPLPGRRNIVISRQADYCAAGAETAASLEAALALCAGAEEAVIMGGAQIYGQAMPLATDLRITEVDLSVEGDAFFPAIDRTHWKEAERTERRVSSKGTSYAFVHYLRY

SEQ ID NO: 2868 - protein, 225 aa, Neisseria meningitidis; identical to SEQ ID NO: 2094

SEQ ID NO: 2869 - protein, 506 aa, Neisseria meningitidis
MQLIDYSHSFFSVVPPFLALALAIITRRVLLSLGIGILVGVAFLVGGNPVDGLTHLKDMVVGLAWSDGDWSLGKPKILVFLILLGIFTSLLTYSGSNQAFADWAKRHIKNRRGAKMLTACLVFVTFIDDYFHSLAVGAIARPVTDKFKVSRAKLAYILDSTAAPMCVLMPVSSWGASIIATLAGLLVTYKITEYTPMGTFVAMSLMNYYALFALIMVFVVAWFSFDIGSMARFEQAALNEAHDETAVSDGSRGRVYALIIPVLALIASTVSAMIYTGAQASETFSILGAFENTDVNTSLVFGGTCGVLAVVLCTLGTIKTADYPKAVWQGAKSMFGAIAILILAWLISTVVGEMHTGDYLSTLVAGNIHPGFLPVILFLLASVMAFATGTSWGTFGIMLPIAAAMAVKVDPSLIIPCMSAVMAGAVCGDHCSPISDTTILSSTGARCNHIDHVTSQLPYALTVAAAAASGYLALGLTKSALLGFGTTGIVLAVLIFLLKDKKRANA

SEQ ID NO: 2870 - protein, 161 aa, Neisseria meningitidis; identical to SEQ ID NO: 1442

SEQ ID NO: 2871 - protein, 202 aa, Neisseria meningitidis; identical to SEQ ID NO: 597

SEQ ID NO: 2872 - protein, 83 aa, Neisseria meningitidis
  misc_feature 2, 3: 'Xaa' is any amino acid
VXXVGANLAAEEQAGVVESVKAASDVYAPIAGEVVAVNEDLPSAPETANSDPYGAGWFFKLKPANVADYDVLLTAEQYAGEVD

SEQ ID NO: 2873 - protein, 268 aa, Neisseria meningitidis
MNMKKWIAAALACSALALSACGGQGKDAAAPAANPDKVYRVASNAEFAPFESLDSKGNVEGFDVDLMNAMAKAGNFKIEFKHQPWDSLFPALNNGDADVVMSGVTITDDRKQSMDFSDPYFEITQVVLVPKGKKISSSDDLKNMNKVGVVTGYTGDFSVSKLLGNDNPKIARFENVPLIIKELENGGLDSVVSDSAVIANYVKNNPTKGMDFVTLPDFTTEHYGIAVRKGDEATVKMLNDALEKVRESGEYDKIYAKYFAKEDGQAAK

SEQ ID NO: 2874 - protein, 219 aa, Neisseria meningitidis
MDTWHDALGGEKQQPYFQEILNAVRQERLSGQIIYPPAADVFNAFRLTAFDRVKAVILGQDPYHGAGQAHGLAFSVRQGIRIPPSLLNIYKELETDIEGFSIPAHGCLTAWAEQGVLLLNTVLTVRAGQAHSHALLGWERFTDTVIRQLATHRKHLVFMLWGGYAQQKGRLIDSQNHLILTAPHPSPLSAYRGFFGCRHFSQANSYLSRHGIDPINWKL

SEQ ID NO: 2875 - protein, 402 aa, Neisseria meningitidis
LFAKKEKRFIFEGRHSASDKLVNGEVSAFTEEEAHKKLAKRGIRPLQITRVKTSSKRKITQEDITVFTRQLSTMIKAGLPLMQAFEIVARGHGNPSMTEMLMEIRGEVEQGSSLSRAFSNHPKYFDRFYCNLVAAGETGGVLESLLDKLAIYKEKTQAIRKKVKTALTYPVSVIAVAIGLVFVMMIFVLPAFKEVYANMGAELPALTQTVMDMSDFFVSYGWMVLIALGFAIYGFLKLKARSIKIQRRMDAILLRMPIFGDIVRKGTIARWGRTTATLIAAGVPLVDVLDSTAGAAGNLIYEEATREIRTRVIQGLSMTSGMRATELFPNMMLQMSSIGEESGSLDDMLNKAAEFYEDEVDNAVGRLSAMMEPIIIVILGLVIGTLLVAMYLPLFNLGNVVA

SEQ ID NO: 2876 - protein, 664 aa, Neisseria meningitidis
MKRHFMPEILQQTTLHRFFRANTHHPISPSVLQQAGDLIRWLCFSDGISDFRPCRLKPQNPIGGTVMNTVSNYLSALREAMKAQGLDALVIPSADPHLSEYLPEHWQARRELSGFTGSVGTFVLTTDEAGVWVDSRYWEQAAKQLAGSGIELQKSGQVPPYNEWLAANLPENAAVGIPSDMVSLTGKRTLAQSLTAKNIRIEHPDDLLDQVWTSRPAIPAETVFVHDPAYVSETAAEKFARVRAVMAEKGADYHLVSSLDDIAWLTNLRGSDVPFNPVFVSYLLIGKDNAVLFTDRCRLNAEAAAALQTAGITVEPYAQVADKLAQIGGALLIEPNKTAVSTLVRLPESVRLIEGINPSTLFKSCKSEADIARIREAMEHDGAALCGFFAEFEDIIGNGGSLTEIDVDTMLYRHRSVRPGFISLSFDTIAGFNANGALPHYSATPESHSTISGNGLLLIDSGAQYKGGTTDITRVVPVGTPTAEQKRDNTLVLKAHIALAEAVFPENIPSPLIDAICRKPLWQAQCDYGHGTGHGVGYFLNVHEGPQRIAFAAPATPETAMKKGMVTSIEPGLYRPGKWGIRIENLAANQAVAAPQETEFGSFLCFETLTLCPIDTRLMDTALMTDGEIDWVNRYHAEVRRRLEPLTEGAAKAWLIKRTEPLAR

SEQ ID NO: 2877 - protein, 182 aa, Neisseria meningitidis
MNLSNHFLVAMPDMEDAFFSQSVVYICKHDEDGALGIAINKPSPITMDMIFSATGKNIPMRMQHDSVMMGGPVQVERGYVVHTPIGNWQSSIGVSDNIALTSSRDVIENISREGAVDKALISIGYSSWGKGQLERELADNAWLTVPADEHILFDIPYEHRYAAAFAKLGIDPLALFSGAGHA

SEQ ID NO: 2878 - protein, 369 aa, Neisseria meningitidis
MSNWKPDIPYNDLPPLPPKQDIESKTILKRCIAARASLARLKQAAELIPNQAMLINTLPVMEARASSEIENIVTTTDKLFQSLQMDTERQDPATKEALQYRTALFAGYESLTSRPLCTQTAIMVCNAIKHPYEMAIRKTGGTALKGGNSGNVVYTPPEGEETIRGKLANWERFIHESGDLDPLIIMAAAHYQFEAIHPFTDGNGRTGRILNSLLLIEKGLLDLPILYLSRYIIENRADYYRLLLGVTERQDWESWIIYILDGVADTADWTVSKIDAIRRLFEQTRQHIRTHAQGIYTHELVNLLFEQPYTRIANLEAAGIAKRQTASKYLKELLDIGVLQEIVIGRDKLFIHPRLMELLRGEGNSFTSF

SEQ ID NO: 2879 - protein, 175 aa, Neisseria meningitidis; identical to SEQ ID NO: 5

SEQ ID NO: 2880 - protein, 103 aa, Neisseria meningitidis
MAKLTLKPDATFRHTVKIPVPGAEPADVEFEFKARGRKAMKEFTEKHKDGWTADTVLDCVQGWDLEEAFDRQNVEILLDSYPMAVFAIVNGYVEEVFNAREGN

SEQ ID NO: 2881 - protein, 798 aa, Neisseria meningitidis
MIKKILTTCFGLVFGFCVFGVGLVAIAILVTYPKLPSLDSLQHYQPKMPLTIYSADGEVIGMYGEQRREFTKIGDFPEVLRNAVIAAEDKRFYRHWGVDVWGVARAAVGNVVSGSVQSGASTITQQVAKNFYLSSEKTFTRKFNEVLLAYKIEQSLSKDKILELYFNQIYLGQRAYGFASAAQIYFNKNVRDLTLAEAAMLAGLPKAPSAYNPIVNPERAKLRQKYILNNMLEEKMITVQQRDQALNEELHYERFVQKIDQSALYVAEMVRQELYEKYGEDAYTQGFKVYTTVRADHQKVATEALRKALRNFDRGSSYRGAENYIDLSKSEDVEETVSQYLSGLYTVDKMVPAVVLDVTKKKNVVIQLPGGRRVTLDRRALGFAARAVNNEKMGEDRIRRGAVIRVKNNGGRWAVVQEPLLQGALVSLDAKTGAVRALVGGYDFHSKTFNRAVQAMRQPGSTFKPFVYSAALSKGMTASTVVNDAPISLPGKGPNGSVWTPKNSDGRYSGYITLRQALTASKNMVSIRILMSIGVGYAQQYIRRFGFRSSELPASLSMALGTGETTPLKVAEAYSVFANGGYRVSSHVIDKIYDRDGRLRAQMQPLEAGQNAPQAIDPRNAYIMYKIMQDVVRVGTARGAAALGRTDIAGKTGTTNDNKDAWFVGFNPDVVTAVYIGFDKPKSMGRVGYGGTIAVPVWVDYMRFALKGKQGKGMKMPEGVVSSNGEYYMKERMVTDPGLTLDNSGIAPQPSRRAKEDDGGAAEGGRQAADDEVRQDMQETPVLPSNTGSKQQQLDSLF

SEQ ID NO: 2882 - protein, 213 aa, Neisseria meningitidis
MLKPETIHISGPAGILETIHIPSEQVPARGVAVINHPNPLQGGTNTNKVIQTAAKALSKLGFHCYLPNLRGVGGSEGTHDYGRGETQDCLAVIDYARAQHPEAPEFALSGFSFGGYVATFAAQARIPDLLLLIGAAVCHYTGRPEPSAVPNVAKTLMIHGAEDEVVEIEKALKWAEPQDLPVITIAGSTHFFHGKLIVLRDTILRFAPVCLNG

SEQ ID NO: 2883 - protein, 119 aa, Neisseria meningitidis
  misc_feature 2, 3: 'Xaa' is any amino acid
VXXIAAAPVYAAPVPAAAPAVTPAAAPVAASAPAAAPAARDLSDAQKSPMVGTFYRAPGPNAAPFVEVGQQVKAGDTLCIIEAMKLMNEIEAEKSGTVKEILVENGTPVEFGEPLFIIG

SEQ ID NO: 2884 - protein, 103 aa, Neisseria meningitidis
MDPANTDEALHEVALDIQEGADMVMVKPGLPYLDVVRRVKDEFGVPTYAYQVSGEYAMLQAAVANGWLDGDKVVLESLLAFKRAGADGILTYYAIEAAKMLKR

SEQ ID NO: 2885 - protein, 252 aa, Neisseria meningitidis
MKQKKTAAAVIAAMLAGFAAAKAPEIDPALVDTLVAQIMQQADRHAEQSQKPDGQAIRNDAVRRLQTLEVLKNRALKEGLDKDKDVQNRFKIAEASFYAEEYVRFLERSETVSESALRQFYERQIRMIKLQQVSFATEEEARQAQQLLLKGLSFEGLMKRYPNDEQAFDGFIMAQQLPEPLASQFAAMNRGDVTRDPVKLGERYYLFKLSEVGKNPDAQPFELVRNQLEQGLRQEKARLKIDAILEENGVKP

SEQ ID NO: 2886 - protein, 345 aa, Neisseria meningitidis
MSDTPATPATPATPATRDFGLIDGRAVTGYVLSNRRGTRVCVLDLGGIVQEFSVLADGVRENLVVSFDDAASYADNPFQINKQIGRVAGRIRGAAFDINGRTYRVEANEGRNALHGGSHGLAVTRFNAVAADGRSVVLRSRLQQSADGYPNDLDLDISYRLDEDNRLTVSYRATALGDTVFDPTLHIYWRLDAGLHDAVLHIPQGGHIPADAEKLPVSTVSDDLEVFDFSRPKPLDAAVAALRRETGRAGFDDAYRVPSDIGRPAAVLQAGRRRRISIYSDRNGLVIFTAAPQDFARHDAGVYDALATEAQTLPDSLNWPEFGNIRLNKGDTREATIAYGIESLS

SEQ ID NO: 2887 - protein, 109 aa, Neisseria meningitidis
MSLPPCPQCASEYTYEDGGQYICPECAHEWNETESAADLAAQVLDANGAVLQNGDTVILIKDLKVKGSSMVIKQGTKVKGIRLQEGDHNIGCKIDGSAMNLKSEFVKKA

SEQ ID NO: 2888 - protein, 249 aa, Neisseria meningitidis
MKALVAVKRVVDYNVKVRVKADGSDVDIGNVKMSMNPFDEIAVEEAVRLKEAGKVSEIVAVSLGEKKCEETLRTALAMGADRAIHVETDTKLESLAVAKLLKAVADKENPQIFFLGKQAIDDDANQVAQMLAALLNAAQGTFASKVHIEGGEVQIVREIDGGEETIALKLPAVISADLRLNEPRFVKLPNIMAAKKKPLEKLTPDDLVADISPRLKTVKFAEPKARQAGVKVASVAELVEKLKNEAKVI

SEQ ID NO: 2889 - protein, 305 aa, Neisseria meningitidis
  misc_feature 3, 4: 'Xaa' is any amino acid
VCXXCTVTEIAKQLNRHKSTISREIRRHRTQGQQYSAEKAQRQSRTIKQRKRQPYKLDSQLIQHIDTLIRRKLSPEQVCAYLCKHHRITLHHSTIYRYLRQDKSNGSTLWQHLRICSKPYRKRYGSTWTRGKVPNRVGIENRPAIVDQKSRIGDWEADTIVGKGQKSALLTLVERVTRYTIICKLDSLKAEDTARAAVRALKAHKDRVHTITMDNGKEFYQHTKITKALKAETYFCRPYHSWEKGLNENTNGLIRQYFPKQTDFRNISDREIRRVQDELNHRPRKTLGYETPSVLFLNLFQPLIH

SEQ ID NO: 2890 - protein, 188 aa, Neisseria meningitidis
MSLYALLLIALGMSMDAFAVALAKGAAVRMPPRKIAATALVFGTVEALTPLAGWVGGFYAKPFISEWDHWAAFVLLGGLGLKMMREGLSGKAEDVRESKRESLWMTVLTAFGTSIDSMIVGVGLAFMEVNIAFAAAIIGMATTVLVAVGLTVGRALGVLFGRRAEFAGGLVLIAIGTWTLLSHLGLIG

SEQ ID NO: 2891 - protein, 307 aa, Neisseria meningitidis
MDIETFLAGERAAGGYRCGFVAIVGRPNVGKSTLMNHLIGQKISITSKKAQTTRNRVTGIYTDDTAQFVFVDTPGFQTDHRNALNDRLNQNVTEALGGVDVVVFVVEAMRFTDADRVVLKQLPKHTPVILVVNKIDKDKAKDRYALEAFVAQVRAEFEFAAAEAVSAKHGLRIANLLELLKPYLPESVPMYPEDMVTDKSARFLAMEIVREKLFRYLGEELPYAMNVEVEQFEEEDGLNRIYIAVLVDKESQKAILIGKGGERLKKISTEARLDMEKLFDTKVFLKVWVKVKSGWADDIRFLRELGL

SEQ ID NO: 2892 - protein, 319 aa, Neisseria meningitidis
MSKKTKQELENNKLSKRLRHAVGDAINDFNMIEPGDKIMVCLSGGKDSYALLDILRRLQASAPIDFELVAVNLDQKQPGFPEEVLPTYLESIGVPYKIVEEDTYSTVKRVLDEGKTTCSLCSRLRRGILYRTAKELGCTKIALGHHRDDILATLFLNMFYGGKLKAMPPKLVSDNGEHIVIRPLAYVKEKDLIKYAELKQFPIIPCNLCGSQPNLQRQVIGDMLRDWDKRFPGRIESMFSALQNVVPSHLADTELFDFAGLERGQTLKHGGDLAFDSEKMPERFSDGSEEDESEIKIAPQKAERKVINILANKPKTCGA

SEQ ID NO: 2893 - protein, 100 aa, Neisseria meningitidis
LSAVFIAPYLTAFHEQEKTFEYAELTVTAPNRSGRAIKLDADGQHYRLSCYGFDSLCTGGNIGRTIRAEQVRAVLSETVGKGFLNGVLLEYRNSGSVYKQ

SEQ ID NO: 2894 - protein, 484 aa, Neisseria meningitidis
MSIEHTPPTHDGETGQNHAERPSADFDRVHSLCEILEPAFEQIENGTPLEDAPLRDKLTELTVLLGELHPADVAAVLESLPPRERNVVWLLVKPEDDGEVLLEVSDAVRETLIESMDKDELLAAVDDLDADELAELADDLPHQVVYEALQTRDEEERAQVKAAMSYEDNQVGAIMDFELVSIRADVACEVVLRYLRRFDSLPDHTDKIFVVDENDVLQGVLPIRKLLVADPEDLVENVMAKDVVRFRAEDDVEEAAQAFERYDLVTAPVVDENKKLIGRVTVDEMVDVIREESEADMLNMAGLQEEEDLFAPVLDSVKNRWMWLAVNLCTAFLASRVIGAFEGSIEKIVALAALMPIVAGIGGNSGNQTITMIVRAMAMGQLTDMQAGRLLKKEVGVALVNGIIWGTVMGAVSWLLYGSLGIGLVMVAAMTLNLLLAATVGVLIPVVMEKFGRDPALGSSVLITAVTDSGGFLIFLGLATLFLL

SEQ ID NO: 2895 - protein, 128 aa, Neisseria meningitidis
  misc_feature 3, 4: 'Xaa' is any amino acid
VCXXQWHSLSDPELEHSLITRIDFNLFCRFDELIIPDYSTLCRYRNWLAQDDTLSELLKLINCQLTEKGLKVEKASAAVVGATIIQTAGSKQRQAIEVDEEGQVSGQTTPSKDSGLFGFGFFEVSGNF

SEQ ID NO: 2896 - protein, 243 aa, Neisseria meningitidis
LQDRTGQKVPSVVFRTRVGDTWKDVSTDDLFKGKKVVVFSLPGAFTPTCSSSHLPRYNELFGAFKENGVDAIYCVSVNDTFVMNAWAAEEESDNIYMIPDGNGEFTEGMGMLVGKEDLGFGKRSWRYSMLVNDGVVEKMFIEPEEPGDPFKVSDADTMLKFVAPDWKAQESVAIFTKPGCQFCAKAKQALQDKGLSYEEIVLGKDATVTSVRAITGKMTAPQVFIGGKYIGGSEDLEAYLAKN

SEQ ID NO: 2897 - protein, 258 aa, Neisseria meningitidis
MKDVAFAYGDRPILKNINFSIPQGNFAAVMGGSGSGKTTLMRLITGQIRPQSGQVLIEGRDLAGFSADELYEHRRRMGVLFQHGALFTDLSVFDNIAFPMRELTRLPEAVIRDLVLLKLNAVGLRGVENLMPSELSGGMSRRVALARTIALDPEIMLYDEPFTGLDPISLGVIAHLISRVNKALRSTSIMVTHDIEKSLEIVDQVIFLAHGEIMFSGSPQEMRELDSPWVRQFVGGLADGPVAYRYPAQTSLQQDLLG

SEQ ID NO: 2898 - protein, 235 aa, Neisseria meningitidis
LVKTADGYKAIAHIQAGDRVFAKDETSGKTGYKPVTARYGNPYRETVYIEISDGIGNNQTLISNKIHPFYSQGKWIQAGRLKKGDTLLSESGAKQTVQNITLKQQPLKAYNLTVADWHTYFVKGDKAETEGVWVHNECPYGEKYRTEVGSYTNTHESGRTYSGKGTRQRSQISGAREARVNNDPHIATDFTPAKNNREAFKDESRRIDAHGGSKSTNNYNRIESPGKKYRKQDGD

SEQ ID NO: 2899 - protein, 166 aa, Neisseria meningitidis; identical to SEQ ID NO: 1240

SEQ ID NO: 2900 - protein, 258 aa, Neisseria meningitidis; identical to SEQ ID NO: 1434

SEQ ID NO: 2901 - protein, 386 aa, Neisseria meningitidis
MNMENYFSNLNLDIRTHKLGTFTDQKVTPDVLCAVAECIIEYIENIGEIFSINDIRYSDYAEYIATAVFKKPSIENAGSEYNKFFSQPIKMLSYCGVLSEEKFSRYYRYGVQNNKILQYIANRERNALNFIQAFSEKLLKDSGIYPKFADFFAQPNKNTFESMKTAFTDLVIQNTPKNTEVEVRRIFTKIINPLAYKHNTFGTRKGSISNTPITLDELYYNRLNWRDKGKEKSLTRKEAQALFADSANAANLNYLVNKAKKFVKMLHKTSEVQRFDPTEANQAHHIFMASEFPDLASLPENLICLTPNQHFNLAHPSNKTTVIDKHYQRICLMAKLDSIEQDNRANTGNYDYHEFIHVLNTGFNTDQFDVSMSYETLKHRILMFYF

SEQ ID NO: 2902 - protein, 670 aa, Neisseria meningitidis
LACLVSVLGFHGFYTDLRHLRARFSLSLKGATLADLVRFANSMNLTARAVRLDLDELVNLRLPCILHWDLNHFVVLHEVHRNHIVIMNPASGWQKVRMEEVSRCFTGIALELFPNTQFEEKHETRKIRILPMLRGVVGLKRSLFQLLLLAAVLQVFALASPFFMQWVIDHAIVSADRDLLLTLALGFGLLMIVQQLVSLLQTWAGMYLSTSLNIQWKANVFRRLMDLPVSYFTKRHLGDVVSRFGSVDSIQSTLTSTFFVLVLNSIMAVFTLGLMYLYSPSLTAVVLVVLLIYIGIRWVAYYPLRHATEENIVHAAKQSSYFMETIRGIQTVKLFDKNAQRHAAWLNLFVDTINTGLTTQKLSAMFGFANSLLFGIANILIVYFGAVSVLDGVFTVGALMAFMSYKSQFESKAGSLIDQFVQIKMLGLHAERLADIVLEKTENEQNNDFRLPKNLEHFDIKIENISFRYAENEPYILQDFSLIIKQGTAIAFAGHSGCGKSTLIQILTGSLKPESGHVLLGENDIHAFPPAFIRKWSASVMQDDVLFAGSIAENISFFDDTPNMEKIAFCAQMANIHHEIVAMPMAYETLIGDMGSALSGGQKQRIVLARALYREPKILFLDEASSHLDINNERVINDNLRQLNITKIMVAHRQETLNTADSVVYLDKVA

SEQ ID NO: 2903 - protein, 51 aa, Neisseria meningitidis; identical to SEQ ID NO: 1872

SEQ ID NO: 2904 - protein, 161 aa, Neisseria meningitidis
MIQIGIIMGSNSDWPVMRQAAQFLEEFGVEYEACVVSAHRTPDLMFQYAETARARGIKAIIAGAGGAAHLPGMVAAKTTVPVLGVPVPSKYLRGEDSLLSIVQMPKGVPVATFAIGEAGAANAALFAVSMLANETPELAQKLADFRAKQEQAVLSMELEQI

SEQ ID NO: 2905 - protein, 227 aa, Neisseria meningitidis
MFALLEAFFVEYGYAAVFFVLVICGFGVPIPEDLTLVTGGVISGMGYTNPHIMFAVGMLGVLVGDGIMFAAGRIWGQKILKFKPIARIMTPKRYAQVQEKFDKYGNWVLFVARFLPGLRTAVFVTAGISRKVSYLRFLIMDGLAALISVPVWIYLGEYGAHNIDWLMAKMHSLQSGIFIALGVLAAALAWFWWRKRRHYQLYRAQLSEKRAKRKAEKAAKKAAQKQQ

SEQ ID NO: 2906 - protein, 139 aa, Neisseria meningitidis; identical to SEQ ID NO: 2305
  misc_feature 134, 135: 'Xaa' is any amino acid

SEQ ID NO: 2907 - protein, 124 aa, Neisseria meningitidis; identical to SEQ ID NO: 2410

SEQ ID NO: 2908 - protein, 107 aa, Neisseria meningitidis; identical to SEQ ID NO: 1793

SEQ ID NO: 2909 - protein, 192 aa, Neisseria meningitidis
MNILLLDGGKAFGHSHGGLNRTLHKKAKEVLTALGHNVQETVIDAGYDVEAEIEKFVWMDAVIWQMPGWWMHEPWTVKKYIDEVLTAGHGKLYQSDGRHRVNPTEGYGTGGLLQGKKHMLSLTWNAPIEAFTREGDFFEGKGVDVLYMHFHKANEFLGMTRLPTFLCNDVVKNPQVEKYLADYQAHLEKVFG

SEQ ID NO: 2910 - protein, 134 aa, Neisseria meningitidis
  misc_feature 3, 4: 'Xaa' is any amino acid
VCXXLREHAQSNPFFQAMLSNMEQVMAKTDITLAENYAGLSESLEKAAVIFGMIKEEYQRSRKALLDLLQTEELLRDNRSLARSLALRIPYLNALNGLQVAMLKRLRKEPDNPHALLMVHLTINGVAQGLRNTG

SEQ ID NO: 2911 - protein, 265 aa, Neisseria meningitidis
MLKQRVMTAMWLLPLMLGMLFYAPQWLWAAFCGLIALIALWEYARMGGLCKIKTNHYLAATLVFGVVAYAGGWMLPNLVWYVVLAFWLAVMPLWLRFKWRLNGGWQVYAVGWLLVMPFWFALVSLRPHPDDALLLLAVMGLVWVADICAYFSGKAFGKHKIAPAISPGKSWEGAIGGAVCVAVYMTAVRSAGWLAFDTGWFDTVLIGLVLTVVSVCGDLLESWLKRAAGIKDSSNLLPGHGGVFDRTDSLIAVISVYAAMMSVLN

SEQ ID NO: 2912 - protein, 59 aa, Neisseria meningitidis; identical to SEQ ID NO: 642

SEQ ID NO: 2913 - protein, 321 aa, Neisseria meningitidis
MNLNKLKNKLFRRPGQRVVIAVPYIWLLVLFLIPFAIVLKISFAEQEIAIPPFTPLTSIDEDLGRLNITISYQNYADIFQNFWHTLNPFGDSENSNIYLMTYWSSIKTALMTTVICLLVGYPTAYAISRANPSVRNGLLLAIMLPFWTSFLLRVYAWMGLLGHNGIVNNLLIKMGIISEPLDLFYNAFSLNLVMVYAYLPFMILPLYTQLVKLDNRLLEAASDLGAGPVKSFLTITLPLSKTGIIAGSMLVFVPAVGEFVIPELVGGSENLMIGKVLWQAFFDQNNWPLASAVAVVMVALLVVPIALFQHYENRELEEGAK

SEQ ID NO: 2914 - protein, 245 aa, Neisseria meningitidis
MKQVDLNADLAEGCGSDEALLQLITSANIACAQHAGSIANIRAALAYAQQNGVRIGAHPGYPDRENFGRTEMNLSEADLRACLNYQLGALQALCRDQGLEMAYVKPHGAMYNQAAKNRALADTVARIVADFDPKLKLMALSGSLLLEAGKAAGLGVISEVFADRRYMPDGTLVPRSRPDAQVDSDEEAIAQVLQMVRDGQVKAVDGSLVAVQADSICLHGDGPHAVVFAEKIRQELLAAGIKVSA

SEQ ID NO: 2915 - protein, 84 aa, Neisseria meningitidis
  misc_feature 79, 80: 'Xaa' is any amino acid
VVVFGILKRNGRVYTVVVNNAKSETLLPVIKKKIMPDSIVYTDSLSSCDKLDVSGFIHYRINHSKECADRQNHINGIEXXHTLN

SEQ ID NO: 2916 - protein, 1204 aa, Neisseria meningitidis
MSAPIQAFDPLTVPISGTNLIEASAGTGKTYGIAALFTRLIVLEQKNVERVLVVTFTKAATAELKTRLRARLDDVLQVLESKEIAKLGDDTLSDGIAAYCAEHHKGDTFLPALLKQALQKEGRTRLIVRLKAAIGQFDNAAIYTIHGFCQRILRDYAFLCQAPFDVELTEEDGDRLLIPAQDFWRERVSNDPVLAALAFKRKAVPQTVLAQIRAYLSRPYLNFRRPQADLKQAQRNAETSWQTVCRLLPELEAGFWRIHPDLNGNSYRKNSFGNLFKELAQKSAAGQLPFLDKDTHDRLLKLASDKLEAGLKKGKTPDAAVFAELQKLADFGYDLNALEEAEEATIIRLQLDLIGYLNRSLAEMKKSRRERGFDDLLLDVHTALTDNPHAETLARAVAENWETALIDEFQDTDPLQYEIFQKIFIAQNRPLFLVGDPKQAIYSFRGADIYAYLQAAEDARHRYTLATNYRSHAALIGSIGALFRLKERPFVLENIGYSEVGAARAESRLSPERPAVQVRWLHENDNEKANKDVLRRRAADYCADEIAHALNEAAGGRLNFKGCPLQSGDIAVLVRTHNEAVMVSAALKKRQVQSVLLSRESVFASPEAAALSALIGFWLEPRRAGTLRFVLTSGIFGYDAQQLHDFNQNESEILHWAESARTALDNWNQYGIFAAMQQFSQTHGIETRLLSRNNGRSLTNYFQLLELLAAEDAQNRNPAALHKWLGDQISLAENNSNDNRAIRLESDEDLVKIVTMHASKGLQYPLVYCPFAWDAQDTGPSDWQILHQSANRTELLAKAQLSEDEQKQYADEEMAERLRLLYVALTRAEEQLNIYAAYSSDTADNPLAYLIEGLPQDSRETVRRAYACEKDGITMLKRNWQRVTDNAPADTDFAFTEDAPPPAAYRGNAGQTAEFAANSIPERRFRFVRHTSFTALSRHTQTPDGGEEDACPSLDAAETSVAAMPSETPTASDGISIHDFPKGTQAGLCLHEILEDFKFGQAAAGQETLIADKLKKYGFEEMWLPAVAEMAEACRKTPLTGAYCLSDIPPECRCPEMGFTLHTEDFGLKRLRDWFARDDIRLPEVCRAAAETLDFHTVNGFLNGFIDMVCQDPDGNICIIDYKSNHLGADASAYTQQAMDEAVTHHHYYLQALIYAVAAARYFKLRGQPPAAVSVRYLFLRGTDGKGGGVWRWDIDAAALEQIK

SEQ ID NO: 2917 - protein, 293 aa, Neisseria meningitidis
MPSENTLFSLPDTLLRPMVEQALSEDLGRRGDITSAAVIAPDKTAKLFLVSREDGVIAGMDLARLAFQTMDPSVRFQAEIRDGQVVRAGQTLAAVEGNARALLAAERTALNYLTHLSGISTATARAVAEVAKYGTDIVCSRKTIPLLRVLQKYAVRAGGGVNHRMGLDDAVLIKDNHLAYCDSIAQAVRQAKQAVGPLTCVEIEVDTLAQLDEAIAAGAERILLDNMDDETLKEAANRCHTQTAHPHTVYCEASGGIGFDRLKRVAQTGVDGIALGYLTHSSRSLDIGLDFLA

SEQ ID NO: 2918 - protein, 241 aa, Neisseria meningitidis
MPRFYLPENLSVGQTVALPDNIVRHLNVLRVRPNENITLFDGKGKAHAAQLTVLEKRRAEAEILHEDTTDNESPLNITLIQSISSGDRMDFTLQKSVELGVTAIQPVISERCIVRLDGERAAKRLARWQEIVISACEQSGRNTVPPVLPIIGYREALDKMPSESTKLIMSINRARKLADIRQPSGAIVFMVGPEGGWTEQEEQQAFEAGFQAVTLGKRILRTETAPLAALAAMQTLWGDFA

SEQ ID NO: 2919 - protein, 146 aa, Neisseria meningitidis
LDKQIDNHTHTHFDGKDQVAEQIKGIGSITTATLMAMLPELGRLSHKRIAGLAGIAPHPREGGETKFKSRCFGGRSAVRKALYMATVAATRFEPLIRDFYQRLPSEGKPYKVAVTACMRKLLTISNARMRDYFAENDTAENGIRTA

SEQ ID NO: 2920 - protein, 277 aa, Neisseria meningitidis
MPQALVLQFPSAEALPSDFPSRLPEPDCADEKRMRFIVEEGFSLSGADAALLGSRQIDHAVLPDMDFGELGLIVSDMDSTLITIECVDEIAAGVGLKDKVAEITERSMRGELDFEQSLRSRVALLAGLDEQILADVYENVLKLSPGAEFLLDECKRHDVKFLLVSGGFTFFTERLQQRLGFEYQHANVLEIENGRLTGRLKGRIIDAQAKADLLREYRSRLGLQPHQVLAMGDGANDIPMLKEAGIGVAYRAKPKAQAAADACINFGGLERVRGLFG

SEQ ID NO: 2921 - protein, 415 aa, Neisseria meningitidis
MQLTAVGLNHQTAPLSIREKLAFAAACLPEAVRNLARSNAATEAVILSTCNRTELYCVGDSEEIIRWLADYHSLPIEEISPYLYTLGMQETVRHAFRVACGLDSMVLGEPQILGQIKDAVRVAQEQESMGKKLNALFQKTFSVAKEVRTDTAVGENSVSMASASVKLAEQIFPDIGDLNVLFIGAGEMIELVATYFAAKSPRLMTVANRTLARAQELCDKLGVNAEPCLLSDLPAILHEYDVVVSSTASQLPIVGKGMVERALKQRQSMPLFMLDLAVPRDIEAEVGDLNDAYLYTVDDMVNIVQSGKEARQKAAAAAETLVSEKVAEFVRQQQGRQSVPLIRALRDEGEKARKQVLENAMKQLAKGATAEEVLERLSIQLTNKLLHSPTQTLNKAGEEDKDLVHAVAQIYHLDK

SEQ ID NO: 2922 - protein, 123 aa, Neisseria meningitidis; identical to SEQ ID NO: 1296

SEQ ID NO: 2923 - protein, 257 aa, Neisseria meningitidis
MKPKIQRHGEILSLVRRHQFMSVDELAAALDVTPQTIRRDIRELEDAGSLKRHHGGASSGGNLPEGLPASRQIQCQNEKNAIARLIAEHIPDESSLFVSIGTTMEAVASELVRRRGSLRIITNNIHVASIVSARTDYTVIITSGVVRPLDGGITGVATVDFINQFKVDYAVMSTHGVESDGSLLDDDYKEVSVMQAMIANARVRFLGVDHSKFRSNALVRLGDITAFDKVFTDRLPDTAMQKMLKEAEVECLIADAV

SEQ ID NO: 2924 - protein, 289 aa, Neisseria meningitidis
MKRIFLPALPAILPLSTYADLPLTIEDIMTDKGKWKLETSLTYLNSENNRAELAAPVYIQTGATSFIPIPTEIQENGSNTDMLVGTLGLRYGLTGNTDIYGSGSYLWHEERKLDGNSKTRNKRMSDVSLGISHTFLKDDKNPALISFLESTVYEKSRNKASSGKSWLIGATTYKAIDPIVLSLTAAYRINGSKTLSDGIRYKSGNYLLLNPNISFAANDRISLTGGIQWLGKQPDRIDGKKESARNTSTYAHFGAGFGFTKTTALNASARFNVSGQSSSELKLGVQHTF

SEQ ID NO: 2925 - protein, 355 aa, Neisseria meningitidis; identical to SEQ ID NO: 1236

SEQ ID NO: 2926 - protein, 154 aa, Neisseria meningitidis; identical to SEQ ID NO: 2266

SEQ ID NO: 2927 - protein, 431 aa, Neisseria meningitidis
MAQKIQSVKGMNDLLPVEQKDFKLTAAFWQAFEDTVGRWTRAYGYQQIRTPIVEQTGLFVRSIGEETDVVGKEMYTFSDSNDSLSLSLRPEGTASCLRAVVEHNLLYNSPQKLWYMGPMFRRERPQKGRYRQFHQVGIEALGFEGPDIDAEIIAMSADLWEKLGIREYLTLEINSLGNREERAAHRAALVEYLTRYEDKLDEDSKRRLKTNPLRVLDTKNPDLQEICNAAPRLVDYLGEASQNHYARFKAMLDGLGIQYIENPRLVRGLDYYNQTVFEWTTDKLGAQATVCGGGRYDGLIEELGGKPAPSIGFAMGIERLLLLVSEYGSLEVNAAPDVYAMHQGERADLQVMKYAQALRAQGFNVMQHSGYQSLKAQMKKADNSGARFALIVAQDELANGTVTLKDMNGAHGQQTVAAEDLTHTLQQWKNA

SEQ ID NO: 2928 - protein, 96 aa, Neisseria meningitidis; identical to SEQ ID NO: 2317

SEQ ID NO: 2929 - protein, 426 aa, Neisseria meningitidis; identical to SEQ ID NO: 1291

SEQ ID NO: 2930 - protein, 207 aa, Neisseria meningitidis; identical to SEQ ID NO: 243

SEQ ID NO: 2931 - protein, 126 aa, Neisseria meningitidis
MKQTVKWLAAALIALGLNQAVWADDVSDFRENLQAAAQGNAAAQYNLGAMYAEGQGVRQDYVEAVRWFRKAADQGLARAQFNLGAMYYKGHGVRQDRALAQEWLGKACQNGNQDGCDNDQRLKAGY

SEQ ID NO: 2932 - protein, 240 aa, Neisseria meningitidis
MKPAYFISDLHLSEKHPELTALLLRFLRSSAAGQARAIYILGDLFDFWVGDDEVSELNTSVAREIRKLSDKGVAVFFVRGNRDFLIGRDFCRQAGMTLLPDYSVLDLFGCKTLICHGDTLCTDDRAYQRFRKIVHRKRLQKLFLMLPLKWRTRLATKIRRVSKMEKQVKPADIMDVNAAFTARQVRAFGAERLIHGHTHREHIHHENGFTRIVLGDWHNDYASILRVDGDGAVFVPLEKY

SEQ ID NO: 2933 - protein, 163 aa, Neisseria meningitidis; identical to SEQ ID NO: 684

SEQ ID NO: 2934 - protein, 602 aa, Neisseria meningitidis
MRTNYCGLISEQYLDQTVTVKGWVHRRRDHGGVIFIDLRDREGIVQVVIDPDTPEAFAAADSARNEYVLSITGRVRNRPEGTTNDKMISGKIEILAKEIEVLNAAATPPFQIDDENISENVRLTNRVIDLRRPVMQRNLRLRYQVAMGVRRYLDAQGFIDIETPMLTRSTPEGARDYLVPSRVHPGEFFALPQSPQLFKQLLMVAGFDRYYQITKCFRDEDLRADRQPEFTQIDLETSFLNEDEIMDITEGMAKQVFKDALNVDLGDFPRMPYAEAMFYYGSDKPDMRINLKFTELTDLMKTEEFKVFRGAADMKGGRVVALRVPNGAKFSRKEIDEYTKFVGIYGAKGLAYIKVNDVGNLSNGEDSGLQSPIVKFLSENALKEIIERTGAQNGDIIFFGADKTKVVNEAIGALRIKVGLEHGKDNGYFTDEWKPLWVVDFPMFEYDEEADRYVAVHHPFTAPKEGHEDLMVSDPANCLARAYDMVLNGWEIGGGSIRIHRADVQEKVFAALKISPEEQQEKFGFLLDNLKFGAPPHGGLAFGLDRLVTLMTGAESIRDVIAFPKTQRAQCLLTNAPNSVDDKQLRELSLRLRQKVAETKEA

SEQ ID NO: 2935 - protein, 259 aa, Neisseria meningitidis
MKTITETLNLAPKGKNFLTADWPAPANVKTLITTRNGGVSQGAYQSLNLGTHVGDNPEAVRRNREIVQQQVGLPVAYLNQIHSTIVVNAAEALDGTPDADASVDDTGKVACAVMTADCLPVLFCDRAGTTVAAAHAGWRGLAGGVLQNTIAAMKVPPVEMMAYLGPAISADAFEVGQDVFDAFCTPMPEAAAAFEGIGGGKFLADLYALARLILKREGVGGVYGGTHCTVLERDTFFSYRRDGATGRMASLIWLDGNAV

SEQ ID NO: 2936 - protein, 339 aa, Neisseria meningitidis
MKKILVTGGTGFIGSHTVVSLLKSGHQVVILDNLCNSSINILPRLKTITGQEIPFYQGDIRDREILRRIFAENRIDSVIHFAGLKAVGESVAEPMKYYDNNVSGSLVLAEEMARAGVFSIVFSSSATVYGDPGKVPYTEDMPLGDTTSPYGTSKSMVERILTDIQKADPRWSVILLRYFNPIGAHESGLIGEQPNGIPNNLLPYICQVAAGKLPQLAVFGDDYPTPDGTGMRDYIHVMDLAEGHIAAMKAKSNVAGTHLLNLGSGRASSELEIIRAFEAASGLNIPYQIQPRRAGDLACSFADPSHTKQETGWETKRSLAQMMEDSWRWVSRNPNGYGD

SEQ ID NO: 2937 - protein, 166 aa, Neisseria meningitidis
MADLQKTFQTSFRDAMASCAAGVHVITTDGAAGRYGITMTAVAPVTDEPPTVMLCINRSARIIPILSENGSLCINMLADEHQDVAEHFAGLTGLSPEERFAYHIWHRGKTGQLEIEGALAHLHGHIVGKHEIGTHFVFYVRLDEIKNCGCKRPALLYFRRQFRFLD

SEQ ID NO: 2938 - protein, 206 aa, Neisseria meningitidis
  misc_feature 200, 201: 'Xaa' is any amino acid
MTDKISPDALIEAALLTQTEPLTEKSMRELCVPPLSQDKLIDVLAQLKTRWQDRALQLVHTQEGWRFQIVQTAFERLGSLQEQRAPRYSRAVMETLAIIAYQQPVTRGDIEGIRGVAVSQNVMQTLQDRGWIEVIGHRDTLGKPALWATTATFLSDLRLDGLEELPPLTELGELVLPDLMEMPPTDEEEPEAVPSDTLPXXTHLIN

SEQ ID NO: 2939 - protein, 89 aa, Neisseria meningitidis; identical to SEQ ID NO: 1473

SEQ ID NO: 2940 - protein, 305 aa, Neisseria meningitidis
MVLDGFAAHFDAYLENIVREGKSEHTVAAYRRDLEELFALLAQMPSEDAGGVPQDLSRRDFTAALRRLSQRGLNARTLARKLSSWRQYCVWLVERGLLHTDPTADIKPPKQPERVPKALSQEWLNRMLDLPVDGGDPLAVRDHALFELMYGSGLRVSEIHGLNADDVYLDEAWVHVTGKGRKQRQVPLTGKSVEALKNYLPLRQTASDGKALFTGRNGTRLSQRQIQKRLAQWAAQNGDGRHVSPHMMRHSYAGHLLQASRDIRAVQELLGHSSLSTTQIYTKLDFDHIARLYDEAHPRAKRQDE

SEQ ID NO: 2941 - protein, 105 aa, Neisseria meningitidis
MQKRIDEIQSKYREWCHLLPQLEEDIRRWKYVVTLIRDMDNFYTHEYQACHQAIEDGVELDLSTEGEYSIMSEDALWNALGEFHQLAWLYLRSSVDALDKYTQED

SEQ ID NO: 2942 - protein, 475 aa, Neisseria meningitidis
MFFSALKSFLSRYITVWRNVWAVRDQLEPPKRTAEEQAFLPAHLELTDTPVSAAPKWAARFIMAFALLALLWSWFGKIDIVAAASGKTVSGGRSKTIQPLETAVVKAVHVRDGQHVKQGETLAELEAVGTDSDVVQSEQALQAAQLSKLRYEAVLAALESRTVPHIDMAQARSLGLSDADVQSAQVLAQHQYQAWAAQDAQLQSALRGHQAELQSAKAQEQKLVSVGAIEQQKTADYRRLRADNFISEHAFLEQQSKSVSNWNDLESTRGQMRQIQAAIAQAEQSRVLNTQNLKRDTLDALRQANEQIDQYRGQTDKAKQRQQLMTIQSPADGTVQELATYTVGGVVQAAQKMMVVAPDDDKMDVEVLVLNKDIGFVEQGQDAVVKIESFPYTRYGYLTGKVKSVSHDAVSHEQLGLVYTAVVSLDKHTLNIDGKAVNLTAGMNVTAEIKTGKRRVLDYLLSPLQTKLDESFRER

SEQ ID NO: 2943 - protein, 270 aa, Neisseria meningitidis
MASKPFLKWAGGKHKLVPFIEHNLPTPTRKRLIEPFCGSAALSLALDFEHYLLNDINADLIGLFRILKEEKSGFIDYARSFFISENNSDSRFYELREQFNFSKNLHERSALFIYLNRHAFNGLCRYNSKGVFNVPFGRYKSPYFPQQEMEGFIQKSDRVELMCGDFQMILSQTDNTDTVYCDPPYAPLSPTASFTTYAKESFNLDNQIRLAQSAQQIAPDSQGVLISNHDTEFTRDIYSFAILKTIEVQRNIAAKGSSRKKVGELLAIYD

SEQ ID NO: 2944 - protein, 415 aa, Neisseria meningitidis
MFSLEAWIGLRYLRAKKRNGFMSFITMVSIAGIALGVTALIVVLSVMNGFQKEIRGQLLNVAPHAEIGYIDNTDTDWRNLLRFTENRKGILAAAPYVSNQALLANAGEIRGVQMRGILPSEERKVVEYGDKMPAGKFEDLIPGEFDIILGVGLAEALGAEVGNKVTVITPEGNVTPAGVVPRLKQFTVVGLVKTGVYEVDNSLAMTHIQDARVLYRLDKEVAGLRLKLADPQNAPALTATLIPEAQRDAVWVRDWTYNNRSYFEAVELEKRMMFIILTLIIAVAAFNLVSSLVMAVTEKQADIAILRTLGLSPGGVMKIFMVQGAFSGFFGTLAGVVCGVLLGWNVGRVVAFFENLLGVHLINSQVYFIDYLPSDVDMGDVALIACISLGLSFVATLYPSWRASKTQPAEALRYE

SEQ ID NO: 2945 - protein, 83 aa, Neisseria meningitidis
MGKVEAIINSMTPKERANPALLKASRKRRIAMGAGTTVQEVNKLLKQFEQMQQMMKMFSGNGLGKLMRMAKGMKGMKGMFPGL

SEQ ID NO: 2946 - protein, 196 aa, Neisseria meningitidis
MSERIILPVLSLGGVRLEPLDVHHEMGLREAVCDGEVWKLGVTSAPHPDRVADYIGTALATRLAFAVVDEEAGRVVGTTAYYHFEPQIPRLDIGFTWYAASARRTRINTCCKIMLLDYAFDVLACRCVGWRTDILNLASQRAIERLGAEKDGVLRMHMLRKDGSVRDTVVYSMLREDWCKNREILTGRLAGYGVQV

SEQ ID NO: 2947 - protein, 287 aa, Neisseria meningitidis
MKTFFKTLSAAALALILAACGGQKDSAPAASASAAADNGAEKKEIVFGTTVGDFGDMVKEHIQPELEKKGYTVKLVEFTDYVRPNLALAEGELDINVFQHKPYLDDFKKEHNLDITEVFQVPTAPLGLYPGKLKSLEEVKDGSTVSAPNDPSNFARVLVMLDELGWIKLKDGINPLTASKADIAENLKNIKIVELEAAQLPRSRADVDFAVVNGNYAISSGMKLTEALFQEPSFAYVNWSAVKTADKDSQWLKDVTEAYNSDAFKAYAHKRFEGYKSPAAWNEGAAK

SEQ ID NO: 2948 - protein, 525 aa, Neisseria meningitidis
  misc_feature 2, 3, 4: 'Xaa' is any amino acid
VXXXSGSLNSDGSVRGRVMAQTSARLRVPPRKTTGHETFYAAADWDINPDTVLGAGYLYQQRHLAPYNGLPADANNKLPSLPQHVFVGADWNKFKMNSHDVFADLKHYFGNGGYGKVGMRYSDRDADSNYAFAGSKLGMKTLAGRPGCNTADDKACAVGLGTEIKQKALAFDASYSRPFRLGNTANEFVIGADYNRFRSTNEQGRTTLYARGGLALNEFRSIPQVDLIANARKGVRGYSHTVATENLDEFGIYGKSTFHPADGLSLIGGGRLGHYKIESGEGKTLHKASKTKFTGYAGAVYDLNDNNSLYLSLSQLYTPQTNLDADGKLLKPRQGNQFEVGYKGSYMDDRLNARVSFYRMKDKNAAAPLNPNNKKTRYAALGKRVMEGVETEISGAVTPKWQIHAGYSYLHSQIKTASNSRDDGIFLLMPKHSANLWTTYQVTPELTIGGGVNAMSGITSSAGMHAGGYATFDAMAAYRFTPKLKLQINADNIFNRHYYARVGGANTFNIPGSERSLTANLRYSF

SEQ ID NO: 2949 - protein, 1278 aa, Neisseria meningitidis
  misc_feature 3, 4: 'Xaa' is any amino acid
VCXXTTAPQRIREIPYNYTSYTDREIVIRLLGDEAWQILQDLRGQRKTGRSARMLFEVLGDIWVVVRNPYLVDDLLEHPKRRTALVREMRHRLNEIRKRRDDNRQVDVLVAAADKAVGRFDGSFDETRQKRQQILERLSKITKPHNIMFDGLARVTHVTDATDWRVEYPFVVVNPDTEAEIAPLVCALIELDLVIIPRGGGTGYTGGAIPLDAMSAVINTEKLDKHNGVEFVELAGLDGKHPIIRCGAGVVTRRVEETAHQAGLVFAVDPTSADASCVGGNVAMNAGGKKAVLWGTALDNLAYWQMVNPQGEWLRIERVRHNFGKIHDEETAVFDVHTLDSDGLNIVKTERLEIPGHKFRKVGLGKDVTDKFLSGLPGVQKEGTDGIITGVAFVLHKMPKYTRTVCMEFFGTVATATPSIVEIRDFLLAHESVRLAGLEHLDWRYVRAVGYATKAAGKGRPKMVLLADVVSDDEAAVQAAAEHICELARARDGEGFIAVSPEARKTFWLDRSRTAAIAKHTNAFKINEDVVIPLERLGEYSDGIERINIELSIQNKLKLCAALEQYLSGKLPIDKMGTDLPTAELLGERGKHALAHVSAVKARWDWLLANLDTPLADYKTRYGAAVHAAPEAKDDESCFIAFRDFRLRVSVKADVMKPLSEIFSGKTDTKIIQGLGKIHAKTVRSRVFVALHMHAGDGNVHTNIPVNSDDAEMLQTAYRSVERIMKIARSLNGVISGEHGIGITKLEFLSDEEMQPFWNYKNQVDPKHTFNRHKLMKGSDLRNAYTPSFELLGAESLIMEKSDLGTIADSVKDCLRCGKCKPVCSTHVPRANLLYSPRNKILGVGLLTEAFLYEEQTRRGVSVKHFEELMDIGDHCTVCHRCVKPCPVNIDFGDVTVAVRNYLADSGHKRFAPAAAMGMAFLNATGPKTIKALRAAMIQTGFPAQNFAYKIGKLLPIGTKKQKAEPKATVGKAPIKEQVIHFINRPLPKSVPAKTPRSLLGIEDGKSIPIIRNPAAPEDAEAVFYFPGCGSERLFSQIGLAVQAMLWHVGVQTVLPPGYMCCGYPQDAGGNKAKAEEMSTNNRVAFHRMANTLNYLDIKTVVVSCGTCYDQLEKYRFEEIFPGCRIIDIHEYLLEKGVKLDGVQGQQYLYHDPCHTPIKTMNATQMASSLMGQKVVLSDRCCGESGMFAVKRPDIATQVKFRKQEEIEKNLKELPQGEPVKMLTSCPACLQGLSRYTDDNNMPADYIVIEMAKHILGENWLDEFVKKANNGGVEKVLL

SEQ ID NO: 2950 - protein, 361 aa, Neisseria meningitidis
MKKSLIALTLAALPVAAMADVTLYGTIKAGVEVSRVKDAGTYKAQGGKSKTATQIADFGSKIGFKGQEDLGNGMKAIWQLEQKASIAGTNSGWGNRQSFIGLKGGFGTVRAGNLNTVLKDSGDNVNAWESGSNTEDVLGLGTIGRVESREISVRYDSPVFAGFSGSVQYVPRDNANDKDKYTHKQSSRESYHAGLKYENAGFFGQYAGSFAKYADLKDNAERVAVNTANAHPVKDYQVHRVVAGYDANDLYVSVAGQYEAAKNNTGTVGKQGKKHEQTQVAATAAYRFGNVTPRVSYAHGFKAKVNGVKDANYQYDQVIVGADYDFSKRTSALVSAGWLKQGKGAGKVEQTASMVGLSHKF

SEQ ID NO: 2951 - protein, 575 aa, Neisseria meningitidis
MQLSGAQIIVQSLKAEGVEYVFGYPGGAVIEIYDALFQLNKFKHILTRHEQAAVHAADAYARVSGKVGVALVTSGPGVTNALTGIATAYTDSIPMVVISGQVGNSLIGTDAFQEVDTVGITRPCVKHNFLVTDINELAETIKKAFQIAASGRPGPVVVDVPKDVTQAMAKFSYPQEDIFIRSYQPVVQGHIGQIKKAVQMLASAKRPVVYFGGGVVLGNASEELTRFVRMTGAPCTGTLMGLGAYPSGDRQFLGMLGMHGTYEANLAMQNADVVLAVGARFDDRVVSVPSKFFEKAKKVIHIDVDPSSIAKRVKVDIPIVGDVKNVLSEMVALWQKQESVPSEDALGKWWKTIEEWRSRDCLWFDNGSEIIKPQYVIQKLAEITGNSAIITSDVGQHQMFAAQYYPFERPRQWLNSGGLGTMGVGLPYAIGAKLAAPDQDVFCITGDGSIQMNIQELSTCFQYRIPVNVITLNNGYLGMVRQWQEIYYGGRESETYFDSLPDFVKLAEAYGHIGIRVDKKSDVEGALLEALNQKDRLVFIDFLTDQKQNVMPMVGNGKGLDEMVLPPHMRADGKA

SEQ ID NO: 2952 - protein, 433 aa, Neisseria meningitidis
MAIYQSGVIFDQVDTANPDCWTLDEYVKRGGYTALRKILSENISQTDVIDEVKTSGLRGRGGAGFPTGLKWSFMPRSFPGEKYVVCNTDEGEPGTFKDRDIIMFNPHALIEGMIIAGYAMGAKAGYNYIHGEIFEGYQRFEAALEQARAAGFLGKNILGSDFEFELFAHHGYGAYICGEETALLESLEGKKGQPRFKPPFPASFGLYGKPTTINNTETFSSVSFIIRDGGQAFADKGIPNAGGTKLFCISGHVERPGNYEVPLGTPFAEVLKMAGGMRGGKKLKAVIPGGSSAPVLPADIMMQTNMDYDSISKAGSMLGSGAIIVMDEDVCMVKALERLSYFYYDESCGQCTPCREGTGWLYRIVHRIVEGKGKMEDLDLLDSVGNQMAGRTICALADAAVFPVRSFTKHFRDEFVHYIEHGGPMKEHKWGGW

SEQ ID NO: 2953 - protein, 45 aa, Neisseria meningitidis; identical to SEQ ID NO: 645

SEQ ID NO: 2954 - protein, 118 aa, Neisseria meningitidis
MLSAYFPVFVFILIGLAAGVLFILLGTILGSKRHYAEKDAPYECGFEAFENARMKFDVRYYLVAILFILFDLEVAFMLPWAVVFKDLGAYGFWSMLVFIVVLTVGFIYEWKKGALEWE

SEQ ID NO: 2955 - protein, 251 aa, Neisseria meningitidis
MDSFFKPAVWAVLWLMFAVRPALADELTNLLSSREQILRQFAEDEQPVLPINRAPARRAGNADELIGSAMGLNEQPVLPVNRVPARRAGNADELIGNAMGLNEQPVLPVNRAPARRAGNADELIGNAMGLLGIAYRYGGTSISTGFDCSGFMQHIFKRAMGINLPRTSAEQARMGTPVARSELQPGDMVFFRTLGGSRISHVGLYIGNNRFIHAPRTGKNIEITSLSHKYWSGKYAFARRVKKNDPSRFLN

SEQ ID NO: 2956 - protein, 74 aa, Neisseria meningitidis
MDAVQELEHRITELEIQSALQEDVIAGLNAMVAELRQTLDLQQAQLRLLYQKMQDRNPDTQEPYSLRDEIPPHY

SEQ ID NO: 2957 - protein, 311 aa, Neisseria meningitidis
MSVLIIVEHDNKQLNPTTLHAVTAAAKLGKIDLLVAGSGASAVVEFAKQVAGVEKVLVADAAHYAEGLAEELAPLVVKLAADYCYVAATATTFGKNLLPRVAALLDVPQISDLTEIVDNTTFVRPIYAGNAFETVQADSEKLVLTFRATVFDAVAAQGGNAEVINVEATPAQNLSRFVNRQLSHSDRPELTQAKVIVSGGRALGSAGKFNEVLTPLADVLGAAIGASRAAVDAEYAPNDAQVGQTGKVVAPQLYFAIGISGAIQHVAGMQDSKVIVAINKDADAPIFNVADYGLVGDLFEIVPQLTEVLKN

SEQ ID NO: 2958 - protein, 377 aa, Neisseria meningitidis
MFKKFKLVLLSFFALVFAFWLGTGIAYEINPRWFLSDTATEVPENPNAFVAKLARLFRNADRAVVIVKESMRTEESLAGTVDDGPLQSEKDYLALAIRLSRLKEKAKWFHVTEQEHGKEVWLDYHIGEGGLVAVSLSQRSPEAFVNAEYLYRNDRPFSVNVYGGTVHGENYETTGEYRVVWQPDGSVFDASGRGKIGEDVYEHCLGCYQMAQVYLAKYRDVANDEQKVWDFREESNRIASDSRDSVFYQNMRELMPRGMKANSLVVGYDADGLPQKVYWSFDNGKKRQSFEYYLKNGNLFIAQSSTVALKADGVTADMQTYHAQQTWYLDGGRIVREEKQGDRLPDFPLNLEDLEKEVSRYAEAAARRSGGRRDLSH

SEQ ID NO: 2959 - protein, 71 aa, Neisseria meningitidis
  misc_feature 65, 66: 'Xaa' is any amino acid
MKGDRLVIRELNKNLGLLLVTINQYFLHARILKNWGFEELGEHFFKQSIVEMKAADDLIERILFXXTHLIN

SEQ ID NO: 2960 - protein, 217 aa, Neisseria meningitidis
MKITHCKLKKKVQKELLRFFVLEVTARSAADILGIHPNSAALFYRKIRTVINHHLVLAADEVFEGPVEPDESDFGGRRKGRRGRGAAGKVVVFGILKRNGRVYTVVVDNAKSETLLPVIKKKIMPDSIVYTNSLSSCDKLDVSGFIHYRINHSKEFADRQNHINGIENFWNQAKRVLRKYNGIDRKSFPLFLKECEFRFNFGTPSQQLKILRDWCGI

SEQ ID NO: 2961 - protein, 105 aa, Neisseria meningitidis; identical to SEQ ID NO: 895

SEQ ID NO: 2962 - protein, 243 aa, Neisseria meningitidis
VSREINAGGHHFLYGGISGGGVHYWDNKDFSEQCLHLSLGYKNRSVTRSFGIVPFVGQNLLGGSRYNFVGGFNADFSQHLSERWRLTLNAGNMWKHYQEDRTAARYDSHMPLAGATLMYSAPKDWLLYGGADWSHDLTKEAEQASIRKGLRVGAVKTFDGGLGLRANLRYTRRTFDAPGTLVYRFPRKDHEYQANLSLWHDKISWKGFTPQLNFRYLKIDSNMKSFYTRKNMQIFMSVEKDFK

SEQ ID NO: 2963 - protein, 459 aa, Neisseria meningitidis
MLLDLNRFSFSVFLKEVRLLAALALPMLLAQVAQVGIGFVDTVMAGGAGKEDLAAVALGSSAFATVYITFMGIMAALNPMIAQLYGAGKTGEVGETGRQGIWFGLFLGIFGMVLMWAAITPFRNWLTLSDYVEGTMAQYMLFTSLAMPAAMVHRALHAYASSLNRPRLIMLVSFAAFVLNVPLNYIFVYGKFGMPALGGAGCGLATMVVFWFSALALWIYIAKEKFFRPFELTAKFGKPDWAVFKQIWKIGAPIGLSYFLEASAFSFIVFLIAPFGEDYVAAQQVGISLSGILYMIPQSVGSAGTVRIGFSLGRREFSRARYISGVSLALGWMLAVITVLSLVLFRSPLVSMYNNDPAVLSIAATVLLFAGLFQPADFTQCIASYALRGYKVTKVPMFIHAAAFWGCGLLPGYLLAYRFDMGIYGFWTALIASLTIAAIALVWCLELCSREMVRSHKVV

SEQ ID NO: 2964 - protein, 548 aa, Neisseria meningitidis
MKHFHDLPAWSKLWNHFDDSKTLHMREMFEQDPQRAERYWLQVGGLTLDYSKNRINDETMSLLFELACEAGVPERMRQMFHGEKINTTENRAVLHVALRNRTNSPIVVDGEDVMPKVNRVLQRMGEFAHEVRSGSWLGYTNQVITDVVNIGIGGSDLGPLMMCTALKPFGHPRLNMHFVSNVDGSQLRDVLSKVHPETTLFIIASKTFTTQETLTNALTAREWFLNHAGDEEAVAKHFAAVSTNQKAVAEFGIDTANMFEFWDWVGGRYSLWSAIGLPIMLYLGEENFIEMLNGAHLMDQHFINTPLERNLPVILALIGIWYINYYGGGSHVIAPYDQHLHRLPKFIQQLDMESNGKQVTLDGKAVGHETSPIIWGETGINGQHAFFQLLHQGTHITPIDLIASLEKRSNLPGHHEILLANVFAQAEAFMRGKTPDEVRAELKAQGMDEARIEELVPHKTFSGNRPTNLILMDKVNPRNMGSLIAMYEHKTFVQGIIWGINSFDQWGVELGKQLAKTILGELTGETGPQKHDSSTERLINLYLQTNRK

SEQ ID NO: 2965 - protein, 158 aa, Neisseria meningitidis
MEHLFGKWLPDLPTPISDGISLPMVRLLHTRSLTAALRALPHTFSVELLKLGELETECGGRLVREVLLKLDGIPVVAARSECRIGSAFWQNILDCGTRPLGERLFQADLEGARSAFEFAVFGEGCGRYFAARRSRFSHHGEEMLLTEYFLPELKRFIG

SEQ ID NO: 2966 - protein, 563 aa, Neisseria meningitidis
MSASQLLSRLTQTVGEKYIITDPAKTEQYRQGYRFGEGKALAVVRPGSILEMWKILQACVEADVIVITQAANTGLTGGSTPDGNDYDRDIVIVNTMRMNIIQTINNNEQVVCLPGSTLNQLELLLKPLGREPHSVIGSSCIGASVLGGVCNNSGGALVQRGPAYTEMALFAQINEEGRLELVNHLGIDLGDTPEEILTNLQGHHYQNKDIKQDAGKGHDHAYCEHVRQVDEPTAARFNADPARHYEASGCAGKLMVFAVRLDTFPQEKQTAVFYIGTNDINELTDIRRAALGEFESLPVSGEYIHRHAFDIADVYGKDTFYVIKKFGTHQLPKLFDLKARVDRFGKKASFLPKHFSDKAMQFVSKYLPDHLPKSMRDYRDKYEHHLILKMGGKGVDEARAFLKEYFAHHSGAFFECNAEETQAAMLHRFAVASAAIRYRAVHDDEVEDLVALDIALRRDDRDWFEKLPSEIDNKIIHKLYYGHFMCHVFHQDYIIKKGNDCMALEHEMLHLLDQRGAQYPAEHNVGHLYEAKPALKQFYRKLDPTNSFNPGVGKTSKKKNWAE

SEQ ID NO: 2967 - protein, 133 aa, Neisseria meningitidis
MQQHIEKWQHLSREEQKILAEVWGLVQNDDQEVHYEMLKLNAPDEASGEFWFRMAETLSTLPPNRSLDLRMNGGRLATAVSILSVMIEDNPDIPQLWAQKITALNYSGLNLNQYGVASPCRTICTVCGFVALS

SEQ ID NO: 2968 - protein, 218 aa, Neisseria meningitidis
MKNKTKVWDLPTRLFHWLLAASLPFMWYSAKAGGDMLQWHTRVGLFVLFLLVFRLCWGIWGSDTARFSRFVQGWAGIRGYLKNGIPEHIQPGHNPLGALMVVALLVAVSFQVGTGLFAADENTFSTNGYLNHLVSEHTGSLMRKIHLNFFKLLAVFSAIHIAAVAAYRVFKKKNLVLPMITGFKYIEGKTSIRFAGKTALAAALSVAALAAAAILLLS

SEQ ID NO: 2969 - protein, 397 aa, Neisseria meningitidis
MNSKHLIAFSALFAATQAEALPVASVSLDTVTVSPSAPYTDTNGLLTDYGNAAASPWMKKLQSVAQGSGETFRILQIGDSHTAGDFFTDSLRKRLQKTWGDGGIGWVYPANVKGQRMAAVRHNGNWQSLTSRNNTGDFPLGGILAHTGSGGSMTLTASDGIASKQRVSLFAKPLLAEQTLTVNGNTVSANGGGWQVLDTGAALPLTIHTEMPWDIGFINIENPAGGITVSAMGINGAQLTQWSKWRADRMNDLAQTGADLVILAYGTNEAFGDNIDIADTEQKWLDTVRQIHDSLPAAGILIIGAPESLKNTLGVCGTRPVRLTEVQQMQRRIARQGQTMFWSWQNAMGGVCSMKNWLNQGWAAKDGVHFSAKGYRRAAEMLADSLEELVRAAAIRQ

SEQ ID NO: 2970 - protein, 230 aa, Neisseria meningitidis; identical to SEQ ID NO: 1058

SEQ ID NO: 2971 - protein, 56 aa, Neisseria meningitidis
LSIWADNPEEARAKFRAARENAHYDGEVVAKVYTFVNISWVKKLYKRTKYLMGIKE

SEQ ID NO: 2972 - protein, 581 aa, Neisseria meningitidis
MLIKSEYKPRMLPKEEQVKKPMTSNGRISFVLMAIAVLFAGLIARGLYLQTVTYNFLKEQGDNRIVRTQTLPATRGTVSDRNGAVLALSAPTESLFAVPKEMKEMPSAAQLERLSELVDVPVDVLRNKLEQKGKSFIWIKRQLDPKVAEEVKALGLENFVFEKELKRHYPMGNLFAHVIGFTDIDGKGQEGLELSLEDSLHGEDGAEVVLRDRQGNIVDSLDSPRNKAPKNGKDIILSLDQRIQTLAYEELNKAVEYHQAKAGTVVVLDARTGEILALANTPAYDPNRPGRADSEQRRNRAVTDMIEPGSAIKPFVIAKALDAGKTDLNERLNTQPYKIGPSPVRDTHVYPSLDVRGIMQKSSNVGTSKLSARFGAEEMYDFYHELGIGVRMHSGFPGETAGLLRNWRRWRPIEQATMSFGYGLQLSLLQLARAYTALTHDGVLLPVSFEKQAVAPQGKRIFKESTAREVRNLMVSVTEPGGTGTAGAVDGFDVGAKTGTARKFVNGRYADNKHIATFIGFAPAKNPRVIVAVTIDEPTAHGYYGGVVAGPPFKKIMGGSLNILGISPTKPLTAAAVKTPS

SEQ ID NO: 2973 - protein, 380 aa, Neisseria meningitidis
MNTLYTLFATCPRGLETVLSQELESLGCTDVQVFDGGVSCRGGLEQVYAANLHSRTAGRILLRLTKGTYRTERDIYKLAKNINWFNWFTLQQTFKVKIEAKRANVKSLQFVGLTVKDAVCDAFRDIYDARPSVDKAAPDVRIHAFLDERNVEIFIDTSGEALFKRGYRLDTGEAPLRENLAAGLLLSAGYDGTQPFQDPFCGSGTIAIEAAWIAARRAPGMMRRFGFEKLQNFDKTLWSDLRRRAEAQVKPAFAPISGSDSDRRIIQTALANARSAGVDDIVSFSVADAQSVRPNGVGGIMVSNPPYGVRLEEVRALQALYPQLGTWLKKHYAGWQVGMFTGDREMPKFMRLSPKRKIPLYNGNLDCRLFLIDMVQGSNR

SEQ ID NO: 2974 - protein, 153 aa, Neisseria meningitidis
MSDFSPISRFLADEAATLDLGAAWSSRLNAPLVIYLEGDLGAGKTTLTRGILRGLGHQGAVKSPTYAIVESYPLERFTLHHFDLYRFSFPEEWEDAGLDELFAANSVCLIEWPQQGGEFTPPADITATLTHDGDGRKCLLTAHTERGRESLPL

SEQ ID NO: 2975 - protein, 163 aa, Neisseria meningitidis; identical to SEQ ID NO: 2144

SEQ ID NO: 2976 - protein, 289 aa, Neisseria meningitidis
MKPIKKAVFPVAGMGTRFLPATKASPKEMLPIVDKPLIQYAVEEAVEAGCTEMVFVTGRNKRSIEDHFDKAYELETELEMRHKDKLLEHVRNILPPNITCLYIRQAEALGLGHAVLCARAAIGDEPFAVILADDLIDAPKGALKQMVEVYERSGNSILGVETVEPSQTGSYGIVETEQLKQFQRITGIVEKPKPEDAPSNLAVVGRYILTPRIFDLLTNLPRGAGNEIQLTDGIAKLLDHEFVLAHPFEGTRYDCGSKLGYLEATVAYGLKHPETGEPFRRLLEKYRTE

SEQ ID NO: 2977 - protein, 93 aa, Neisseria meningitidis
MMIVSFKHKGLERFFKTGSLSGIQAGHSVKLNLLLTALNAAQTPSDMAVPSWNLHPLKGSLSGHWAVKVNGNWRLTFRFNDGNAEVVDYQDYH

SEQ ID NO: 2978 - protein, 259 aa, Neisseria meningitidis
MAASPEAKFTEEKILWVKHHTPKLITFAISRPESYRFKAGQFSRLGFYEGEGFIWRAYSIVSAEYADTLEYFAVLIQDGPMSARFAKMQQGDTILLDKNATGFLLPERFPDGKDLVMLCTGSGIAPFLSILEQPEIRQRFDTVNLIHSVSFPEELIFNDRLAALTEHPLVGEYGHSFRFLPVTTRAANPSGLSGKRIPELLKNNSIEQALHTKFTPESTRFMICGNPDMVKDTFQTLLDMGYAMHRNRIPGQIMMENGF

SEQ ID NO: 2979 - protein, 228 aa, Neisseria meningitidis
MYAFTDAQQQKALFRLVLFHILIIAASNYLVQFPFQIFGIHTTWGAFSFPFIFLATDLTVRIFGSHLARRIIFWVMFPALLLSYVFSVLFHNGSWTGLGALSEFNTFVGRIALASFAAYALGQILDIFVFNKLRRLKAWWIAPTASTVIGNALDTLVFFAVAFYASSDGFMAANWQGIALVDYLFKLTVCGLFFLPAYGVILNLLTKKLTTLQTKQAQDRPAPSLQNP

SEQ ID NO: 2980 - protein, 92 aa, Neisseria meningitidis; identical to SEQ ID NO: 2722

SEQ ID NO: 2981 - protein, 295 aa, Neisseria meningitidis
MPYQQITINVNDAVAERLADALMEHGALSAAIEDAYAGTQNEQAIFGEPGMPAEQIWQQSKVIALFGEHDEAAAIIQIAAQECGLKDLAYTGETIEDQDWVRLTQSQFDPIRISDRLWITPSWHEAPEGTAVNLRLDPGLAFGTGSHPTTRLCLKWLDTQLKNGESVLDYGCGSGILTIAALKLGAGSAVGVDIDEQAVRAGKDNAEQNNVDAQFFLPDGLPQGQFDVVVANILANPLRMLGEMLAARTKQGGRIVLSGLLDEQAEELGGIYSQWFDLDPAETEEGWARLSGTKR

SEQ ID NO: 2982 - protein, 357 aa, Neisseria meningitidis; identical to SEQ ID NO: 2085

SEQ ID NO: 2983 - protein, 119 aa, Neisseria meningitidis
MYFVDRTAVVLKPTARFLEWLKSADENMPDLTVEQIRLNCSVFLVPQFDEPEAVVSYFDERYRQIFEAELAGWDIDKDKWPQDMGLKAFWEFFDIEIHDMVLDMEEADLNITPVFDNMM

SEQ ID NO: 2984 - protein, 380 aa, Neisseria meningitidis
MQKWQTELYSTPLWLCLTPKSTVKVLLLITVMVTLLLTEVRLNVLSTFMSKGLYDSMQDLNASAFWMFAAMNAGVVLIRAFNNVVNDFLDQGLAIKWSEQLNEVLTTRWLADKNYYRLQMRRHAPDNIDQRIQQDAQDFIASTIEFVRGMVNSVVTSLEFAVVLWGLAGILTVFGFDIPRGIVWLVFIFVILATFIAMWIGNPLIRYNYENEKLNGDYRYSLIRVRDHAESVAFYNGEQHEHGRLSDRFKAIIRNRWRIARQSVCLSGFNDMFTNGIKLFPIILQAPRLFAGQIKIGDIQQTVQAFARLQNALSFFRMFYNKFTAYRARLERLYGFLLSTEEQHSARQPEISEVSDGIALECKAAAAFARIGGSFCTAEA

SEQ ID NO: 2985 - protein, 295 aa, Neisseria meningitidis
MYTGRFAPSPTGLLHIGSLLTAAASYADARSNGGKWLVRMEDLDPPREMPGAASHILHTLEAFGFEWDGEVAYQSRRYALYEETLCRLKTAGLVYPCHCSRKDWQAAAVHGADGFVYNGRCRNPQQRPAPQGKQPAWRIRVPDRDIGFSDGIVGGYAQNLARDIGDFVLLRADGYWAYQLAVVADDAEQGVTHIVRGQDLLVSTPRQIYLQQCLGVPTPQYAHLPLLTNAQGQKWSKQTLAPALDLNRREQLLRQVFRYLKLPEAPETDRPAELLDWAVAHWDMGKVPKHAITTP

SEQ ID NO: 2986 - protein, 491 aa, Neisseria meningitidis
MISKQEYQAQAAQGYNRIPLVQELLADLDTPLSLYLKLANRPYTYLLESVVGGERFGRYSFIGLPCSHYLKASGKHVDVYQNGEIVEQHDGNPLPFIEAFHNRFKTPEIPSLPRFTGGLVGYFGYETIYNFEHFAHRLKNTTKADPLGTPDILLMLSQELAVVDNLSGKIYLIVYADPSQPDGYERARERLEDIRTQLRQSCAIPLSLGSKHTEAVSEFGEEPFKACVNKIKDYIFAGDCMQVVPSQRMSMEFTDSSLALYRALRTLNPSPYLFYYDFGDFHIVGSSPEILVRRERDDVIVRPIAGTRLRGKTPAEDLANEQDLLSDAKEIAEHVMLIDLGRNDVGRISKTGEVKVTDKMVIEKYSHVMHIVSNVEGRLKDGMTNMDILAATFPAGTLSGAPKVRAMEIIEEVEPSKRGIYGGAVGVWGFNNDMDLAIAIRTAVVKNNTLYVQSGAGVVADSDPASEWQETQNKARAVIHAAQMVQEGLDK

SEQ ID NO: 2987 - protein, 233 aa, Neisseria meningitidis
MSARENILAKLKKADALPMEEPAVFDYYREMGVSWGSEVERLKHWAAAMRAVKTEIYWVTKSNWMQVFREAAEGKGLKNILLPLATEHGQIARAALADSNIEPIAFEREIDTWKTEFFTNIDAGFSGAQCGIARTGTLMLFSSPEEPRTLSLVPPVHFCLFDTSKMYNEFHNAVEGEKLVENGMPTNVFLISGPSKTADIQLTLAYGAHGPRDLVILAILPDHISPTDLEENA

SEQ ID NO: 2988 - protein, 391 aa, Neisseria meningitidis; identical to SEQ ID NO: 2334

SEQ ID NO: 2989 - protein, 735 aa, Neisseria meningitidis
MFPDQSAPNLLQGLNPEQLSAVTWPPQSALVLAGAGSGKTRVLTTRIAWLLQSGQASVHSIMAVTFTNKAAKEMQTRLGAMIPVNVRAMWLGTFHGLCHRFLRLHHRDAGLPSSFQILDSGDQLSLIKRLLKSLNIAEEIIAPRSLQGFINAQKESGLRASVLSAPDPHTSRMIECYAEYDKICQREGVVDFAELMLRSYEMLQSNEILRQHYQNRFNHILVDEFQDTNKLQYAWLKLMAGGNAAVFAVGDDDQSIYRFRGANVGNMTALMEEFHIDAPVKLEQNYRSVGNILAAANAVIENNDERLGKNLRTDAEAGDKIRYYSAFTDLEEARFIVDETKALEREGWDLDEIAVLYRSNAQSRVIEQSLFRSGIPYKIYGGLRFYERQEIKHALAYLRLAVNPDDDNALLRVINFPPRGIGARTVENLQTASQEQGVSLWQAACNAGAKAAKVAAFVRLIEALRNQVGQMPLPEIIAGILKDSGLTEHYRTQKGDNQDRLDNLDELVNAAIEFKPEDSNFETLPENISDDPAFPILAFLSNATLESGENQAGAGEKAVQLMTVHAAKGLEFNAVFLTGMEESRFPSEMSLAERGGLEEERRLMYVAITRARKRLYITMAQQRMLHGQTQFGIVSRFVEEIPPEVLHYLSVKKPAYDSYGNTRQTAASKDKIIDDYKQPQTYAGFRIGQNVRHAKFGTGVIIDAADKGESARLTINFGKQGVKELDTKFAKLEEM

SEQ ID NO: 2990 - protein, 445 aa, Neisseria meningitidis
MTFQNKKILVAGLGGTGISMIAYLRKNGAEVAAYDAELKPERVSQIGKMFDGLVFYTGRLKDALDNGFDILALSPGISERQPDIEAFKQNGGRVLGDIELLADIVNRRGDKVIAITGSNGKTTVTSLVGYLCIKCGLDTVIAGNIGTPVLEAEWQREGKKADVWVLELSSFQLENTESLRPTAATVLNISEDHLDRYDDLLDYAHTKAKIFRGDGVQVLNSDDVFCRAMKRAGREVKWFSLEHEADFWLERETGRLKQGNEDLIATQDIPLQGLHNATNVMAAVALCEAVGLPRNELLEHVKTFQGLPHRVEKIGKKNGVVFIDDSKGTNVGATAAAITGLQNPLFVILGGMGKGQDFTPLRDALAGKAKGVFLIGVDAPQIRRDLDGCDLNMTDCATLEEAVQKAYAQAEAGDIVLLSPACASFDMFKGYAHRSEVFIGAFKAL

SEQ ID NO: 2991 - protein, 98 aa, Neisseria meningitidis
MRKACRNRPLAEVQTKRNRYLSKTRYVVEQSFGTLHRKFRYARAAYFGLIKVSAQSHLKAMCLNLLKAANRLSAPAAAQKATGCLIIGYPGRIKGVFG

SEQ ID NO: 2992 - protein, 394 aa, Neisseria meningitidis
MTPQVLTILGSTGSIGESTLDVVSRHPEKFRVFALAGHKQVEKLAAQCQTFRPEYAVVADAEHAARLEALLKRDGTATQVLHGAQALVDVASADEVSGVMCAIVGAVGLPSALAAAQKGKTIYLANKETLVVSGALFMETARANGAAVLPVDSEHNAVFQVLPRDYAGRLNEHGIASIILTASGGPFLTADLNTFDSITPDQAVKHPNWRMGRKISVDSATMMNKGLELIEAHWLFNCPPDKLEVVIHPQSVIHSMVRYRDGSVLAQLGNPDMRTPIAYCLGLPERIDSGVGDLDFDALSALTFQKPDFDRFPCLKLAYEAMNAGGAAPCVLNAANEAAVAAFLDGQIKFTDIAKTVAHCLSQDFSDGIGDIGGLLAQDARTRAQARAFIGTLR

SEQ ID NO: 2993 - protein, 246 aa, Neisseria meningitidis
MNPLISDFQTPQQRTPVIVALDFSNEKDTLGFVRNLDPTLCQIKIGKELFTATGRNLAESLINQGFKLFLDLKYHDIPHTVAQACKVAADMGVWMVDMHASGGRRMMEAAAEAVAGYGTKPLLIGVTVLTSMEQSDLAEIGLNTAPEEQVIRLAKLAQSSGLDGVVCSAQEAAPLRRELGQDFVLVTPGIRLDVAGNNDDQRRIMTPAEALAAGSTYLVMGRPVTQAADPVAVLREVNRVANLEAN

SEQ ID NO: 2994 - protein, 238 aa, Neisseria meningitidis
VFNNFLASLPFMTETRADMIVSAFLPMVKAGFAVSLPLAAASFVIGMVIAVAVALVRIMPAGGIARKILLKLVEFYISVIRGTPLLVQLVIVFYGLPSVGIYIDPIPAAIIGFSLNVGAYASETIRAAILSVPKGQWEAGFSIGMTYMQTFRRIVAPQAFRVAVPPLSNEFIGLFKNTSLAAVVTVTELFRVAQETANRTYDFLPVYIEAALVYWCFCKVLFLIQARLEKRFDRYVAK

SEQ ID NO: 2995 - protein, 109 aa, Neisseria meningitidis; identical to SEQ ID NO: 1560

SEQ ID NO: 2996 - protein, 242 aa, Neisseria meningitidis
MWDNAEAMERLTRWLLVMMAMLLAASGLVWFYNSNHLPVKQVSLKGNLVYSDKKALGSLAKEYIHGNILRTDINGAQEAYRRYPWIASVMVRRRFPDTVEVVLTERKPVARWGDHALVDGEGNVFEARLDRPGMPVFRGAEGTSAEMLRRYDEFSTVLAKQGLGIKEMTYTARSAWIVVLDNGITVRLGRENEMKRLRLFTEAWQHLLRKNKNRLSYVDMRYKDGFSVRYASDGLPEKESEE

SEQ ID NO: 2997 - protein, 151 aa, Neisseria meningitidis
MRPYATTIYQLFILFIGSVFTMTSCEPVKEQTSFNNPEPMTGFEHTVTFDFQGIKMVIPYGYLARYTQDNATKWLSDTPGQDAYSINLIEISVYYKKTDQSWVLEPYNQQNKAHFIQFLRDGLDSVDDIVIRKDACSLSTTMGEKIAYLRG

SEQ ID NO: 2998 - protein, 464 aa, Neisseria meningitidis
MTVKTRFAPSPTGYLHIGGVRTALFSWAFARHHKGEFLLRIEDTDLARSTAESVNIILDGMKWVGLDYDNADNVVYQTRRFERYKEVIAELLAKGDAYYCYCSKEELEAMREKAEKEGTATYDRRWRPEAGKTLPEIPAGVQPVVRFKTPLDGVTKWADLVKGEISIPNEALDDLIIARADGTPTYNFCVVVDDYDMGVTHVIRGDDHVNNTPKQINILKAIGATLPEYGHLPMILNEQGKKISKRSGDTVAITDFGAMGILPEAMLNYLARLGWAHGDDEFFTMEQFIEWFDLKDVSPSPSRMDLKKLYWINGEHIKITPNGKLAELVKPRLALRDIHETEKPALEDVLAQVKDRAQDLNALADECLYFYKKQVPAEADVAKHRDDEAAARMLRFAERLEGLEDWNTEAIHDLFKPFCDEEGIKMGKLGMPLRLAVCGTAKTPSVDAVLALIGKEEVLKRIRA

SEQ ID NO: 2999 - protein, 146 aa, Neisseria meningitidis
MMQTFRKISLYAATLWLGMQIMAGYIVAPVLFKMLPKMQAGEIASVLFDILSWSGLAVWGAVLAAAFAALTRRQTALLLFLLSALAANRFLITPVIEALKYGHENWLLSFVGGSFGMWHGISSIVFMATALLSAVLSWRLSGKEAV

SEQ ID NO: 3000 - protein, 284 aa, Neisseria meningitidis
METQENMIKTALQAAQKPFFEFAPNNTLLVFTPDQDGGWRYKSHPELMQNPYRKCGKFLMHDTASLIKFVQKHKQDGTQIYIDADFKSGRIDVTAVINGHTQQAPGWLDFYAVYTPQHTTSASNWLNNNAHRMNQMEFSHFLTNNARNIVSKNPGNENSVYPTAAEVLDFALNLEYTEKTTFKQGYREQDGRINFTFQSEDSGQTEKNLKMFERFGIEFTPHQGGASYFVEALLKFRIDKNSGALVLWYELQQIDAVIEQAAKDISEAVQKAFPEIDIYFGIIA

SEQ ID NO: 3001 - protein, 185 aa, Neisseria meningitidis
MINDIQKTAEGKMQRSVEVLKENLAKVRTGRAHTGLLDQVEVEYWGSMVSVSQVANVTLLDARTIGVKPFEGNMAAKVEKAIRDSNLGLNPAAVGDLIRVPMPMLTEERRKDLIKVVRGEAEEGRVSIRNVRRDANDHIKKLLKDKEISEDEARRGEEAVQKLTDKYITEADKLLTAKEEDLMAI

SEQ ID NO: 3002 - protein, 108 aa, Neisseria meningitidis
MNFKRLLLTAAATALMGISAPALAHHDGHGDDDHGHAAHQHSKQDKIISRAQAEKAALARVGGKITDIDLEHDNGRPHYDVEIVKNGQEYKVVVDARTGRVISSRRDD

SEQ ID NO: 3003 - protein, 362 aa, Neisseria meningitidis; identical to SEQ ID NO: 1494

SEQ ID NO: 3004 - protein, 74 aa, Neisseria meningitidis
MMKNKYILIKAAIGITAISIFYLLTQESSGKTEEPSYFLMFMFLNLLWFEENKTVMAAVTAMIAAHFIFVALSD

SEQ ID NO: 3005 - protein, 41 aa, Neisseria meningitidis; identical to SEQ ID NO: 2840

SEQ ID NO: 3006 - protein, 281 aa, Neisseria meningitidis
MNIADGRQAFSAPAKLNLDLRITGRREDGYHNIESIFCLIDLQDTVYLKPRDDGKIILHNPVDGMPQEVDLSYRAASLLQKYARNPAGVEIWLDKKIPTGAGLGGGSSDAATVLLVLNRWWQCGLTQRQLIDSGAALGADVPFFIFGKNAFARGIGDRLDEMDIPKQWYVIVKPPVHVSTAKIFTHESLTRNSASSIMPTFQNLQPFRNDMQAVVFKEYPEVWKAYSELSRYGFALMTGSGACVFTACQDRNSAYNIYRQVSDLYEAYLAEGLSKHPLLSV

SEQ ID NO: 3007 - protein, 495 aa, Neisseria meningitidis; identical to SEQ ID NO: 2837

SEQ ID NO: 3008 - protein, 96 aa, Neisseria meningitidis; identical to SEQ ID NO: 2317

SEQ ID NO: 3009 - protein, 194 aa, Neisseria meningitidis; identical to SEQ ID NO: 666

SEQ ID NO: 3010 - protein, 398 aa, Neisseria meningitidis; identical to SEQ ID NO: 1004

SEQ ID NO: 3011 - protein, 83 aa, Neisseria meningitidis
MGSIEQRLEYLEEANDVLRMQNHVLSTAFKALIRALPAETAEIAVESIQLAFEDALAELSYEDSPHTDLFHDVTYAFFREKER

SEQ ID NO: 3012 - protein, 265 aa, Neisseria meningitidis; identical to SEQ ID NO: 2138

SEQ ID NO: 3013 - protein, 207 aa, Neisseria meningitidis
MKIIHKGLVEYLPTFEAMKTFNAGRNADTEDELWVVEHPPVFTQGLVGKPEHLLIRDDIPVVQIDRGGQITYHGPGQLVVYTMIDFKRRKTSVRNIVSALENSIIATLAEYGIEAAADPKRPGVYVGERKIASLGLRIKNGSVYHGLALNVNMDLSPFTHINPCGYAGMEMTQIADFVQPCPTPDEVAAKLTAHLETQFTPKADNNE

SEQ ID NO: 3014 - protein, 124 aa, Neisseria meningitidis
  misc_feature 2, 3, 4: 'Xaa' is any amino acid
VXXXQIAQLGIKTVICNRPDREEESQPDFAQIKQWLEQAGVTGFHHQPVTARDIQKHDVETFRQLIGQAEYPVLAYCRTGTRCSLLWGFRRAAEGMPVDEIIRRAQAAGVNLENFRERLDNARV

SEQ ID NO: 3015 - protein, 318 aa, Neisseria meningitidis; identical to SEQ ID NO: 2723

SEQ ID NO: 3016 - protein, 257 aa, Neisseria meningitidis; identical to SEQ ID NO: 780

SEQ ID NO: 3017 - protein, 82 aa, Neisseria meningitidis
MNIKNEIVALISKKIDGGQYSSLENFALSVLREKIIKNTVSSDEKLLIINDFLSGFLEFDPETGKPVGETLKIEQMIDFFLV

SEQ ID NO: 3018 - protein, 335 aa, Neisseria meningitidis
MSTFFQQTAQAMIAKHINRFPLLKLDQVIDWQPIEQYLNRQKTRYLRDHRGRPAYPLLSMFKAVLLGQWHSLSDPELEHSLITRIDFNLFCRFDELSIPDYSTLCRYRNWLAQDDTLSELLELINRQLTEKGLKIEKASAAVVDATIIQTAGSKQRQTIEVDEEGQVSGQTTPSKDSDARWIKKNGLYKLGYKQHTRTDGEGYIEKLHITPANAHECKHLSPLLEGIAEGTTVYADKGYDSAENRQHLEEHQLLDGIMRKACRNRPLSEVQTKRNRYLSKTRYVVEQSFGTLHRKFRYARAAYFGLIKVSAQSHLKAMCLNLLKAANRLSAPAAA

SEQ ID NO: 3019 - protein, 675 aa, Neisseria meningitidis
LSLSEFIERRTSFNPMVILTTLFFVCVLVVLVLTVPDQAQMWLDRAKEVIFTEFSWFYVLTFSIFLGFLLILSVSSLGNIRLGRDEDVPEFGFLSWLAMLFAAGMGVGLMFFGVAEPLMHYFSDITAGTPEHRQQQALLHTVFHWGVHAWSVYGTIALALAYFGFRYKLPLALRSCFYPLLKEKISGRFGDAIDIMALLATFFGIITTLGFGASQLGAGLQEMGWIAENSFSVQVLIIAAVMSLAVVSAISGVGKGVKVLSELNLSLAFLLLFFVLAAGPTVYLLSAFGDNIGNYLENLVRLSFKTYAYEREHKPWFESWTVLYWAWWCSWAPFVGLFIARISKGRTIREFVFGVLLIPGLFGVLWFTVFGNTAIWLNDGVAGGMLEKMTSSPETLLFKFFNYLPLPELTSIVSLLVISLFFVTSADSGIYVLNNITSRDKGLSAPRWQAVMWGVLMSAVAVLLMRSGGLGNLQSMTLIVSLPFALLMLIMCFSLWKGLSADKKYFETRVNPTSVFWTGGKWKERLVQIMSQTQEQDILKFLKHTASPAMHELQRELSEEYGLSVRVDKMFHQDEPAIEFVIRKETMRDFMYGIKSVGQDVSDQLINDGNLPHIRHQTTYKPYAYFFDGRVGYDVQYMNKDELIADILKNYERYLMLLDDVGQELMAHEQVELAE

SEQ ID NO: 3020 - protein, 87 aa, Neisseria meningitidis; identical to SEQ ID NO: 932

SEQ ID NO: 3021 - protein, 417 aa, Neisseria meningitidis
MSEQHISTWKSKINALGPGIMMASAAVGGSHLIASTQAGALYGWQIALIIILTNLFKYPFFRFSAHYTLDTGKSLIEGYAEKSRVYLWVFLILCILSATINAGAVAIVTAAIVKMAIPSLMFDVGTVAALIMASCLIILVSGRYRALDRVSKIIIVTLSIATLAAAGIAMSRGMQMQPDFIEPTPWTLAGLGFLIALMGWMPAPIEISAINSLWVTEKQRINPSEYRDGIFDFNVGYIASAVLALVFLALGAFVQYGNGEAVQMAGGKYIGQLINMYAVTIGGWSRPLVAFIAFACMYGTTITVVDGYARAIAEPVRLLRGKDKTGNAEFFAWNIWVAGSGLAVIFWFDGVMANLLKFAMIAAFVSAPVFAWLNYRLVKGDEKHKLTSGMNALALAGLIYLTGFTVLFLLNLAGMFK

SEQ ID NO: 3022 - protein, 412 aa, Neisseria meningitidis
MAFYAFKAMRAAALAAAVALVLSSCGKGGDAAQGGQPAGREAPAPVVGVVTVHPQTVALTVELPGRLESLRTADVRAQVGGIIQKRLFQEGSYVRAGQPLYQIDSSTYEAGLESARAQLATAQATLAKADADLARYKPLVAAEAVSRQEYDAAVTAKRSAEAGVKAAQAAIKSAGINLNRSRITAPISGFIGHSKVSEGTLLNAGDTTVLATIRQTNPMYVNVTQSASEVMKLRRQIAEGKLLAADGVIAVGIKFDDGTVYPEKGRLLFADPAVNESTGQITLRAAVPNDQNILMPGLYVRVLMDQVAVDNAFIVPQQAVTRGAKDTVMIVNAQGGMEPREVTVAQQQGTNWIVTSGLKDGDKVVVEGISIAGITGAKKVTPKEWAPSENQAAAPQSGVQTASEAKTASEAE

SEQ ID NO: 3023 - protein, 630 aa, Neisseria meningitidis
MPILTIREVCNINHWGIGYYDVDDSGEIIVCPNPSQHNQTVSLQKLTEAVQQKHQARLPVLFCFPQILEHRLRDINRAFQTAREECGYKGGYCLVYPIKVNQHRRVIESLMSSGQPHGLEAGSKAELMAVLAHAGTRQTLIVCNGYKDREYIRFALMGEKLGHQVYLVIEKLSEIQMVLEEAEKLGIKPRLGVRARLASQGSGKWQSSGGEKSKFGLSASQVLQLVDILKQKNRLDCLQLLHFHLGSQLGNIRDVATGVHESARFYVELHKLGVNIRCFDVGGGLGVDYEGNRTQSDCSVNYSLNEYAATVVWGISQACLEHGLPHPTIITESGRGITAHHAVLVANVIGVERYKPRRLDAPSPEAPRVLHSMWETWTDISASREKRSLRSWIHEGQFDLADVHNQYNVGLLSLAQRAWAEQLYLNICHEVGELFNEKHRSHRTIIDELQERFADKLYVNFSLFQSLPDAWGIDQLFPVCPITGLNEPIARRAVLLDITCDSDGTIDHYIDGDGIAGTMPMPDYPEEEPPLLGFFMVGAYQEILGNMHNLFGDTATADVVVGEDGQFTVIDYDEGNTVADMLEYVYQDPKELMKRYREQIEHSDLPASQAMSFLKELEAGLNGYTYLEDE

SEQ ID NO: 3024 - protein, 371 aa, Neisseria meningitidis
MLKFTLHKKDGYARRGTLELNHGKIETPVFMPVGTYGSVKAMNPQNLHDIKAQIILGNTYHLWLRPGLEVVEQFGGLHGFIGWDKPILTDSGGFQVFSLSDMRKLTEEGCTFKSPINGDKLFLSPEISMKIQTVLNSDIAMQLDECTPGEATREQAKKSLQMSLRWAERSKKAFEDLKNPNALFGIVQGAMYEDLREESLRGLEQFDFPGLAVGGLSVGEPKPEMYRMLRAVGPILPEHKPHYLMGVGTPEDLVYGVAHGIDMFDCVMPTRNARNGWLFTRFGDLKIKNAKHKLDKRPIDESCTCYACQNFSRAYLHHLHRAGEILGAQLNTIHNLHFYQVIMAEMREAVEQGKFADWQAQFHENRARGTD

SEQ ID NO: 3025 - protein, 359 aa, Neisseria meningitidis; identical to SEQ ID NO: 2157

SEQ ID NO: 3026 - protein, 467 aa, Neisseria meningitidis
MDTTLKTTLTSVAAAFALSACTMIPQYEQPKVEVAETFKNDTADSGIRAVDLGWHDYFADPRLQKLIDIALERNTSLRTAVLNSEIYRKQYMIERNNLLPTLAANANDSRQGSLSGGNVSSSYKVGLGAASYELDLFGRVRSSSEAALQGYFASTANRDAAHLSLIATVAKAYFNERYAEEAMSLAQRVLKTREETYKLSELRYKAGVISAVALRQQEALIESAKADYAHAARSREQARNALATLINQPIPDDLPAGLPLDKQFFVEKLPAGLSSEVLLDRPDIRAAEHALKQANANIGAARAAFFPSIRLTGSVGTRSAELGGLFKSGTGVWSFAPSITLPIFTWGTNKANLDVAKLRQQAQIVAYESAVQSAFQDVANALAAREQLDKAYDALSKQSRASKEALRLVGLRYKHGVSGALDLLDAERSSYAAEGAALSAQLTRAENLADLYKALGGGLKRDTQTDK

SEQ ID NO: 3027 - protein, 337 aa, Neisseria meningitidis
MIFSIIVPIYNVEKYLRCCVDSVLAENFADYEMILVDDGSPDGCGKICDEYAGKYPHIKVIHQENGGLSDARNAGIRAAKGDYLIFLDSDDYWADTNRSKNAGGGILFDLQQLADKKVDLILHPSSFNYRDIPKGADFSDNDFVRHFETLVEGRYYIANAWTKIVRREIIIKNNLFFPKGYIHEDFPYSLQLARFIKTFAFYDNPFYQYRVLGGSISHNIKYKNFSDVLTHLDRGVDFLVENKNSPIYGGLQKFVFDNIGYLRSILVRLYFSKNIILIYRKYFSFKEKCRKIFGAKAIRPVFIGKTAFIIGLPILRLLVPPMLYPAIKAVYQKFFSE

SEQ ID NO: 3028 - protein, 95 aa, Neisseria meningitidis
MSDIYYRSTIDEHFKIIELIENNPNEIYDDGGGQQFCLEFHHDKVIFYHNEFDEEDGYPVLSCSLHTFKTALIAWNAFLQLPKSIHSVVETVIEE

SEQ ID NO: 3029 - protein, 176 aa, Neisseria meningitidis
LTVCRFNEVKNLKQQTIPSPTPKPQTKILCRVIAETSLPAAHSVSLSNPPPRNRACLSNISTSRAAYMDVQKQYPFETVAVCVLPNHIHAIWTLPPDDADYSLLRRLIKTKFSAYSPYTKNLSAGKQRQHERGIWQRRFYGHTVRDETDLQRCADYIHSNPIKQKMSRAKTESCKK

SEQ ID NO: 3030 - protein, 284 aa, Neisseria meningitidis; identical to SEQ ID NO: 1030

SEQ ID NO: 3031 - protein, 242 aa, Neisseria meningitidis; identical to SEQ ID NO: 201

SEQ ID NO: 3032 - protein, 261 aa, Neisseria meningitidis
VKHISSTNNEHIRHLHRLLSQGKFRRQYAQTVLEGVHLLQVFLQSGGMPVGVYIPEGKMPSEEIRRLRAVVPEGRIFSVSDGILKKISSLSCADDILALIDIPLGGTLPDKGDCVVLDGVQDPGNVGTVLRSAAAAGVGTVVLGRGCADAWSPKVLRAGMGAHFLSGIYPQADLEIWLASYKGRVFATALREEKQVVLYGEDLCEPTAWVFGNEGAGVGKAVLDRADKCVRIPMHDATESLNVAMAATICLFEQMRQRSAY

SEQ ID NO: 3033 - protein, 103 aa, Neisseria meningitidis; identical to SEQ ID NO: 1510

SEQ ID NO: 3034 - protein, 407 aa, Neisseria meningitidis
MSGNASSPSSSAAIGLIWFGAAVSIAEISTGTLLAPLGWQRGLAALLLGHAVGGALFFAAAYIGALTGRSSMESVRLSFGKRGSVLFSVANMLQLAGWTAVMIYAGATVSSALGKVLWDGESFVWWALANGALIVLWLVFGARKTGGLKTVSMLLMLLAVLWLSAEVFSTAGSTAAQVSDGMSFGTAVELSAVMPLSWLPLAADYTRQARRPFAATLTATLAYTLTGCWMYALGLAAALFTGETDVAKILLGAGLGAAGILAVVLSTVTTTFLDAYSAGVSANNISAKLSETPIAVAVAVVGTLLAVLLPVTEYENFLLLIGSVFAPMAAVLIADFFVLKRREEIEGFDFAGLVLWLAGFILYRFLLSSGWESSIGLTAPVMSAVAIATVSVRLFFKKTQSLQRNPS

SEQ ID NO: 3035 - protein, 230 aa, Neisseria meningitidis
MNEILRQPSVLLFLTLAVYALAIIVRTRTGNIFCNPVLVSTIVLIAYLKILDIDYAVYHNAAQFIDFWLKPAVIVLAVPLYQNRRKIFNQWLPVIVSQLAGSVTGIVTGMYFAKWLGAEREVVLSLASKSVTNPIAIEITRSIGGIPAITAATVIIAGLVGQIAGYKMLKNTVVMPSSVGMSLGTASHAMGIAASLERSRRMAAYAGLGLTFNGVLTALIAPLLIPVLGF

SEQ ID NO: 3036 - protein, 421 aa, Neisseria meningitidis
MFSFFRRKKKQETPAPEEAQVQETAAKAESEVTQIVENIKEEVESLTESVKGQVESAVETVSGAVEQVKEAVAEMLSEAEEAAEKAAEQVEAAKEAIAETVGEAVGQVQEAVATTEEHKLGWAARLKQGLTKSRDKMAKSLAGVFGGGQIDEDLYEELETVLITSDMGMEATEYLMKDVRDRVSLKGLKDGNELRGALKEALYDLIKPLEKPLVLPETKEPFVIMLAGINGAGKTTSIGKLAKYFQAQGKSVLLAAGDTFRAAAREQLQAWGERNNVTVISQTTGDSAAVCFDAVQAAKARGIDIVLADTAGRLPTQLHLMEEIKKVKRVLQKAMPDAPHEIIVVLDANIGQNAVNQVKAFDDALGLTGLIVTKLDGTAKGGILAALASDRPVPVRYIGVGEGIDDLRPFDARAFVDALLD

SEQ ID NO: 3037 - protein, 418 aa, Neisseria meningitidis; identical to SEQ ID NO: 2076

SEQ ID NO: 3038 - protein, 357 aa, Neisseria meningitidis
MSITIQNLNKHFGNFHALKNINLNVPTGKLVSLLGPSGCGKTTLLRIIAGLENADGGNILFDGQDVTAKHVRERKVGFVFQHYALFRHMNVFDNVAFGLTVLPKSERPSKEQICTKVEELLKLVQLSHLAKSYPHQLSGGQRQRIALARALAVEPKLLLLDEPFGALDAKVRKELRTWLRDIHHNLGVTSILVTHDQEEALEVSDEIVVMNHGKIEQTGSAEAIYRKPENAFVTEFLGETDAFEGRIEKGFWHYNGFAWKLDAQYKWQEQTATGYIRPHEWQIAAEHETPMICAEIEKVHAVGALTHILVKHGKQDVHITLAGSDAARYPIAEGKELKLIPKQVYVFSQNELIEYSI

SEQ ID NO: 3039 - protein, 61 aa, Neisseria meningitidis; identical to SEQ ID NO: 1836

SEQ ID NO: 3040 - protein, 256 aa, Neisseria meningitidis
MKITTWNVNSLNVRLPQVQNLLADNPPDILVLQELKLDQDKFPAAALQMMGWHCVWSGQKTYNGVAIVSRNAPEDVHIGLPALPDDPQRRVIAATVGGVRVINVYCVNGEALDSPKFKYKEQWFAALTEFVRDEMARHGKLVLLGDFNIAPADADCYDPEKWYEKIHCSTVERQWFQNLLDLGLTDSLRHIHPEGAFYTWFDYRGAMFQRKLGLRIDHILVTSEMAAVLKDVRVDLDTRALERPSDHAPVTAEFDW

SEQ ID NO: 3041 - protein, 68 aa, Neisseria meningitidis
MKAVRDIALWLAVTVWINFFPDSYRYDTVPQGRHGYWHADHPWYPYARFLLPLFLACILFYRHFRKRK

SEQ ID NO: 3042 - protein, 238 aa, Neisseria meningitidis
MLFRKTTAAVLAAALMLNGCTAMMWGMNDPFSQTTAYKHVDKDQIRAFGVVAKDNAQLEKGSLVMMGGKYWFVVNPEDSAKLTGILKAGLDKPFQIVEDTPSYARHQALPVKLESPGSQNFSTEGLCLRYDTDKPADIAKLKQLEFEAVELDNRTIYTRCVSAKGKYYATPQKLNADYHFEQSVPADIYYTVTKKHTDKSKLFENIAYTPTTLILDAVGAVLALPVAALIAATNSSDK

SEQ ID NO: 3043 - protein, 111 aa, Neisseria meningitidis
MFGKAGLGGLMKQAQQMQENMKKAQAKLAETEIEGEAGNGLVKITMTCAHEVRKIDISPDLIQEAADDKEMLEDLILAALKSARDKAEETANKTMGAFTQGLPPGVGDFFR

SEQ ID NO: 3044 - protein, 329 aa, Neisseria meningitidis; identical to SEQ ID NO: 247

SEQ ID NO: 3045 - protein, 504 aa, Neisseria meningitidis
MCCSLSFAEPARIDDRIIKFRPSKSKFFESTGYRKINNEFSKFTEAANVEHIPTGAKARINAKITASVSRAAVLSGVGKLARLGAKLSTRAVPYVGTALLAHDVYETFKEDIQAQGYQYDPETDKFVKGYEYSNCLWYEDKRRINRTYGCYGVDSSIMRLMSDDSRFPEVKELMESQMYRLARPFWNWHKEELNKLSSLDWNNFVLNRCTFNWNGGDCLVNKGDDFRNGANFSLIRNPKYKEEMDAKKLEEILSLKVDANPDKYIKATGYPGYSEKVEVAPGTKVNMGPVTDRNGNPVQVVATFGRDSQGNTTVDVQVIPRPDLTPGSAEAPNAQPLPEVSPAENPANNPNPNENPGTSPNPEPDPDLNPDANPDTDGQPGTRPDSPAVPGRTNGRDGEDGGLLCKFFPDILACDRLPEPNPAEDLNLPSETVNVEFQKSGIFQNSAQCPAPVTFTVTVLDSSRQFAFSFENACTIAERLRYMLLALAWAVAAFFCIRTVSREV

SEQ ID NO: 3046 - protein, 392 aa, Neisseria meningitidis
MTGRTGGNGSTQAQPERVMLVGVMLDKDGTGSSATRLNGFQTALAEAVELVKAAGGDSVRVETAKRDRPHTALFVGTGKAAELSEAVAADGIDLVVFNHELTPTQERNLEKELKCRVLDRVGLILAIFARRARTQEGRLQVELAQLSHLAGRLIRGYGHLQSQRGGIGMKGPGETKLETDRRLIAHRINALKKQLVNLKKQRALRRKPRESGTIKTFALVGYTNVGKSSLFNRLTKSGIYAKDQLFATLDTTARRLYISPECSIILTDTVGFVSDLPHKLISAFSATLEETAQADVLLHVVDAAAPNSGQQIEDVENVLREIHAGDIPCIKVYNKTDLLPSEEQNTGIWRDAAGKIAAVRISVAENTGIDALREAIAESCAAAPNTDETEMP

SEQ ID NO: 3047 - protein, 386 aa, Neisseria meningitidis
LSKMTCIEDLRRVAKRKMPRMFYDYIDSGSWTETTYRENTSDFKDIRFRQKVLVNMEGRSLETKMIGQDVKMPVAIAPTGFTGMAHADGEILAARAAEKFGIPFTLSTMSICSIEDVAENTSAPFWFQLYVMRDREFMENLIKRAKDAKCSALVLTADLQVLGQRHKDIKNGLSAPPKPTIANLINLATKPEWCMKMLNTERRTFRNIVGHAKNVGDLSSLSSWTSEQFDPRLSWDDVARIKDLWGGKLIIKGIMEPEDAEKAAKSGADALIVSNHGGRQLDDTVSAIKALPDIVSAVGSDIEVWMDSGIRSGQDILKAWALGAKGTMIGRAFLYGLGAYGEEGVTRALEILYKEMDISMAFTGHRDIQDVDASILRGKDWGRETV

SEQ ID NO: 3048 - protein, 320 aa, Neisseria meningitidis; identical to SEQ ID NO: 1339

SEQ ID NO: 3049 - protein, 500 aa, Neisseria meningitidis
MSREMLQLAEALASEKNVDAEVVFQALEFALSTAAKKKADREHMDVRVQINRDTGEYQTFRRWLIVADEDYTYPDVEKTIEEIQEEIPGTAIQIGEYYEEQLPNEGFGRQAAQTAKQIILQRIRDAEREQNLNEFLAVKEDIVSGTVKRVERHGIIVEVVAGKLDALIPRDQMIPRENFRSGDRIRALFLRVEEIGNTGRKQVILSRTSGDFLVKLYANEVPEIADGMLEIRAVARDPGQRAKVAVKANDQRIDPQGTCIGVRGSRVNAVSNELSGERIDVVLWSPEPAQFVMSALSPAEVSRIVIDEDKHAVDVIVDENQLALAIGRGGQNVRLASDLTGWQLNIMTSAEADERNAAEDAAIRRLFMDHLNVDEETADVLVQEGFATLEEVAYVPAAELLAIEGFDEEIVDMLRNRARDAILTMAIAAEEKLGEVSDDMRNLEGIDADMLRSLAEAGITTRDDLAELAVDELIEITGVNEETAKAVILTAREHWFTEDK

SEQ ID NO: 3050 - protein, 426 aa, Neisseria meningitidis
MKSLFIRLLLLGSAAGVFYHTQNQSLPAGELVYPSAPQIRDGGDALHYLNRIRAQIGLHKLAHAPVLENSARRHARYLTLNPEDGHGEHHPDNPHYTAQKLTERTRLAGYLYNGVHENISTEEEAAESSDSDIRTQQRQVDGLMSAIYHRLSLLDRHTDEAGAAFVRENGKTVLVFNQGNSRFERHCAQGRNQPEAGRKYYRNACHNGAVVYTDEAMPAQELLYTAYPVGSGALPYFHGERPDPVPEYEITGNPASIDFSEAAGKITMKSFKLYQGKNEIRPVRVLTAGNDPNGRLTAYQFALFPLKPLEYGTLYTAVFDYVRNGRRAQAKWQFRTRKPDYPYFEVNGGETLAVRKGEKYFIHWRGRWCLEACTRYTYRQRPGSRLSIGRHEAGGIVFSVDGMAGSRITLAPEGETERGVTLYLQD

SEQ ID NO: 3051 - protein, 187 aa, Neisseria meningitidis
MKKIIFAALAAAAVGTASAATYKVDEYHANARFAIDHFNTSTNVGGFYGLTGSVEFDQAKRDGKIDITIPVANLQSGSQHFTDHLKSADIFDAAQYPDIRFVSTKFNFNGKKLVSVDGNLTMHGKTAPVKLKAEKFNCYQSPMAKTEVCGGDFSTTIDRTKWGVDYLVNVGMTKSVRIDIQIEAAKQ

SEQ ID NO: 3052 - protein, 433 aa, Neisseria meningitidis; identical to SEQ ID NO: 2952

SEQ ID NO: 3053 - protein, 76 aa, Neisseria meningitidis
MNIVKKYAVKALLAAGIFTPAIVMADGFDAAAIGTQVANVIMGFVAMVSAVGMAAITVILAIQGFKMAWSMIKSVK

SEQ ID NO: 3054 - protein, 94 aa, Neisseria meningitidis; identical to SEQ ID NO: 2111

SEQ ID NO: 3055 - protein, 366 aa, Neisseria meningitidis
MTRIAILGGGLSGRLTALQLAEQGYQIALFDKGCRRGEHAAAYVAAAMLAPAAEAVEATPEVIKLGRQSIPLWRGIRCRLNTHTMMQENGSLIVWHGQDKPLSSEFVRHLKRGGVADDEIVRWRADDIAEREPQLGGRFSDGIYLPTEGQLDGRQILSALADALDELNVPCHWEHECAPEDLQAQYDWLIDCRGYGAKTAWNASAEHGSTLRGIRGEVARVYTPEITLNRPVRLLHPRYPLYIAPKENHVFVVGATQIESESQAPASVRSGLELLSALYAVHPAFGEADILEIATGLRPTLNHHNPEIRYSLARRLIEINGLFRHGFMISPAVTAAAVRLAVALVDGKDAPERDEESGLAYIRRQD

SEQ ID NO: 3056 - protein, 389 aa, Neisseria meningitidis
MSKKLHPQTLAIRGGKEQTEYREHNQALFLTSSFMWDNAQHAADLFSKKIKGFTYTRTANPTTAAFEKRIAALEGAERAVATSTGMSAIQAAFFTFLQAGDHVVSSRSLFGTTVGFINNIVTKFGIEVSHVSPTDINEWKAAVKANTKLLFLETPSNPLGEVADLEALAELAHGIGAILVVDNSLLSPVGSQPLKHGADISVSSATKAIDGHGRVMGGVLAGSEELMAQAAVYCNSCGLAMSPFNAWQLLSGVETLSLRMEKQFDNALKIAQWLQAQPQVQAVYYTGLPDHPQAALIRKQQNGGGIVIGFEVADQAAAWKVVDGVELFSRTANLGDVRSTITHPWTTTHGRMQPEEKLAANIRPGLVRLSVGLEYVGDLIDDLKQALAR

SEQ ID NO: 3057 - protein, 69 aa, Neisseria meningitidis
VIDFLSLKSIFLNKFALKYSGLNLNQDKATKPQTVQIVRQGEATPYWFKFNPLYRKFIQWIDREENKVV

SEQ ID NO: 3058 - protein, 274 aa, Neisseria meningitidis
MIKKTIGGIIPIFTAVFIPASAGAADLMLAQEYKGQEIAGWAMSEKLDGVRAYWDGKHLVSRQGYVFTPPKGFTAQFPPYPLDGELYSGRGQFEQISATVRSASSDWRGIRLHVFDVPKAQGNLYQRLAVATQWLKTHPNAPITIIPQIKVRDRQHAMDFLKQIEAQGGEGVMLRQPESRYSGGRSSQLLKLKSQYDDECTVTRHYEGKGRNAGRLGAVGCKNRYGEFRIGSGFKDKDRDNPPKIGTLITYRYRGFTQKGTPKFATFVRVRTDR

SEQ ID NO: 3059 - protein, 498 aa, Neisseria meningitidis
VKPLRRLTNLLAACAVAAAAFGQPALAADLAQDPFITDNAQRQHYEPGGKYHLFGDPRGSVSDRTGQINVIQDYTHQMGNLLIQQANINGTIGYHTRFSGHGHEEHAPFDNHAADSASKEQGNVDEGFTVYRLNWEGHEHHPADAYDGPKGGNYPKPTGARDEYTYHVNGTARSIKLNPTDTRSIRQRISDNYSNLGSNFSDRADEANRKMFEHNAKLDRWGNSMEFINGVAAGALNPFISAGEALGIGDILYGTRYAIDKAAMRNIAPLPAEGKFAAIGGLGSVAGFEKNTREAVDRWIQENPNAAETVEALVNVLPFAKVKNLTKAAKPGKAAVSGDFSAAYNTRTTRKVTTETEGLNRIRQNQKNSNIHEKNYGRDNPNHINVLSGNSIQHILYGDEAGGGHLFPGKPGKTTFPQHWSASKITHEISDIVTSPKTQWYAQTGTGGKYIAKGRPARWVSYETRDGIRIRTVYEPATGKVVTAFPDRTSNPKYNPVK

SEQ ID NO: 3060 - protein, 78 aa, Neisseria meningitidis
  misc_feature 73, 74: 'Xaa' is any amino acid
MQKIPLTVRGAELLKQELQQLKSVARPEVIEAIAEARSHGDLSENAEYEAAKERQGFIEGRISELEHKLSVAXXHTLN

SEQ ID NO: 3061 - protein, 336 aa, Neisseria meningitidis
MNHTVTLPDQTTFAAGDGETVLAAAARQNLNLPHSCKSGVCGQCKAELVSGDIQIGGHSEQALSEAEKAQGKILMCCTTAQSDISLNIPGYKADALPVRTLPARIESMVFKHDVALLKLALPKAPPFAFYAGQYIDLLLPGNVSRSYSIANSPDQEGILELHIRRRENGVCSEMIFGSEPKVKEKGIVRVKGPLGSFTLQEDSGKPVILLATGTGYAPIRSILLDLIRQDSGRAVHFYWGARHQDDLYALEEAQGLACRLKNACFTPVLSRPGEGWQGRKGHVQDIAAQDHPDLSEYEVFACGSPAMTEQAKNLFVQQHKLPENLFFSDAFTPSAS

SEQ ID NO: 3062 - protein, 129 aa, Neisseria meningitidis; identical to SEQ ID NO: 2271

SEQ ID NO: 3063 - protein, 295 aa, Neisseria meningitidis
MQKSKLSWFLKLMLALSLAFLYIPLVVLVIYSFNESKLVTVWGGFSTKWYGALLENDTILEAAWLSLRIAVVSSLAAVVLGTLAGYAMARIKRFRGSTLFAGMISAPMVMPDVITGLSMLLLIIQVQIFLQGSEWLQHLYFDRGFFTIFLGHTTLCMAYITVVIRSRLVELDQSLEEAAMDLGARPLKIFFVITLPLIAPAIASGFLLGITLSLDDLVITSFLSGPGSSTLPQVIFSKIKLGLDPQMNVLATILIGIIGTLVIIVNYWMMRQATKRDREAAEAYRQEKLAAEKAN

SEQ ID NO: 3064 - protein, 685 aa, Neisseria meningitidis
MPEQNRILCRELSLLAFNRRVLAQAEDRNVPLLERLRFLCIVSSNLDEFFEVRMAWLKRENKLHPRRRLDNGKMPSETIADVTEAARSLIRHQYDLFNNVLQPELAQEGIHFYRRRNWTGAQKKWIESYFDRELLPILTPIGLDPSHPFPRPLNKSLNFAVELDGTDAFGRPSGMAIVQAPRILPRVVPLPSELCGGGHGFVFLSSILHAHVGKLFPGMNVKGCHQFRLTRDSDLTVDEEDLQNLRAAIQNELHDREYGDGVRLEVADTCPAYIRDFLLAQFKLTAAELYQVKGPVNLVRLNAVPDLVNRPDLKFPTHTPGRLKALGKTASIFDLVRQSPILLHHPYQSFDPVVEMMREAAADPDVLAVKMTIYRTGTRSELVRALMKAALAGKQVTVVVELMARFDEANNVNWAKQLEEAGAHVVYGVFGYKVHAKMALVIRREDGVLKRYAHLGTGNYHQGTSRIYTDFGIITADEQITADVNTLFMEITGLGKPGRLNKLYQSPFTLHKMVIDRIARETEHAKAGKPARITAKMNSLIEPTVIEALYRASAAGVQIDLIVRGMCTLRPGVKGLSENIRVRSIIGRQLEHARVYCFHNNGADDTFISSADWMGRNFFRRIETAAPITAPELKKRVIREGLEMALADNTHAWLMQPDGGYIRAAPAEGESEADLQNDLWTLLGG

SEQ ID NO: 3065 - protein, 318 aa, Neisseria meningitidis
MILTPPDTPFFLRNGNADTIAAKFLQRPAPTYRRELLPDSTGKTKVAYDFSDGISPDAPLVVLFHGLEGSSRSHYAVELMLAVRSRGWHGAVVHFRSCGGIANTAPVFYHLGDTAEIAFTLDTLAARYREIYAVGVSLGGNALAKYLGERGENALPQAAAAVSAPVDAEAAGRRFDSGITRLLYTRYFLRTLIPKARSLHGFQTAFAAGCKTLGEFDDRFTAPLHGFADRHDYYRQTSCKPLLKHVAKPLLLLNAVNDPFLPPEALPRADEVSEAVTLFQPTHGGHVGFVGSTGGRLHLQWLPQTVLSYFDSFRTNRR

SEQ ID NO: 3066 - protein, 238 aa, Neisseria meningitidis
MTDTAENQTQNNWQAEHPRSIRSFVLRQSHMTAAQQRAIDTLWDSFGIDYQATPADLDANFGSNRPKILEIGFGMGTATAEIARRLPETDFLAIDVHGPGVGNLLKLINENHLENIRVMRHDAVEVIENMLQDGSLDGIHIFFPDPWHKKRHHKRRLIQAPFIAKLLPKLKTGGYIHLATDWEEYARQMLEVLSSFDSLQNTAADYAPTPDYRPETKFEARGKRLGHGVWDLVFKRMG

SEQ ID NO: 3067 - protein, 193 aa, Neisseria meningitidis
MKHTVSASVILLLTACAQLPQNNENLWQPSEHISSFAAEGRLAVKAEGKGSYANFDWTYQPPVETININTPLGSTLGQLCQDRDGALAVDGKGNVYQAESAEELSRQLVGFKLPIQYLHIWADGRRVAGAPYRILPDGILEQYGWTVGRTADSGGQVRTLQLNNGNLNIRLVFTEIGMPSETETPERCAARTR

SEQ ID NO: 3068 - protein, 148 aa, Neisseria meningitidis
MDRLTPEQRKKCMQSNKSKGTKPELALAKAMWALGLRYRKNSGSIFGKPDFSFKKYKVAVFVDGEFWHGKDWEQRKAEIKGNREFWIAKIERNIRRDMEVTGRLKVEGWAVLRFWSNDVVKNTTCCAEKVRQAVRDKQGLSKFQTREK

SEQ ID NO: 3069 - protein, 371 aa, Neisseria meningitidis
  misc_feature 2, 3, 4: 'Xaa' is any amino acid
VXXXVVRKLNRGGMPDSVRSGEGAVKWLLLSIILVMGMMSQNIIPIHIAFIPMIVPPLLLVFNRLKIDRRLIACVITFGLVTTYMFLPYGFGAIFLNEILLGNIHSAAPQLDVKNINVMAAMAIPALGMLAGLLLAFVHYRKPRLYQSNNADTAGNADAANRPQPSAYRSLAAAAAIAVCFAIQLMYEDSLVLGAMLGFAVFMMLGVINRDKANDVFGEGIKMMAMVGFIMIAAQGFAAVMNATGHIQPLVESSMAIFGNSKGMAALAMLVVGLLVTMGIGSSFSTLPIIAAIYVPLCVGLGFSPLATVAIVGTAGALGDAGSPASDSTLGPTMGLNADGQHDHIRDSVIPTFIHYNIPLLIAGWIAAMVL

SEQ ID NO: 3070 - protein, 665 aa, Neisseria meningitidis
MKKITPQNLRPLLSESLGHTDFVNVLNALIKFLRRGGKKCAGERFDLIIDTFKQDRELLSRFSRCFYIWLAQIHIYPALIKLGIFSRHSFAREMGIRIYERFSPSYKDFANLGEVFLYLFHSENDDKWLQTLNIRQWLVLYELIRSHAEPSKLQTAGIRLADARLRAIEMLSVWTASEAIEPDLIRIAPRLLEADSSFVALQRETAKLVEHYRNGTAPYDTAHLEVMFDQCFSQIDYLRRKGTGAGSGSSVKVAHLLERLRQTVDRLKLLTDIQTGAGNSNRLTIALMNSLIYAAVEQYSTRHLRRSSIRMLARSITENKSHHGEHYITRNRKEYFKMFYSAAGGGVIIALMALLKIRIGTLGLSPFLTSLSAGFNYGIGFMIIHMLHCTVATKQPAMTAASFAEQVDLNEGGKAVDNKLAKLLIDVCRSQSVAVFGNVSIAILLACAISFGYAHLYRQPILDAHTAAYQFKSIDIIAYPTLWYAAIAGLWLFCSGIIAGFFDNRADYLNLRQRLPFNPLLRKIMRPGPRRVLAAYIHKHYGSLVGNFIFGMLLGMTGYFGHLLGLPLDIRHVAFSSANLGYAAVSGNVGLGTFVLGIFSVLAIGLVNLCVSFSLALFVALRSRGTKIGSIRNLIKSFWNQIKSNPCILFLPPAKEQGHPPSDKP

SEQ ID NO: 3071 - protein, 206 aa, Neisseria meningitidis; identical to SEQ ID NO: 355

SEQ ID NO: 3072 - protein, 680 aa, Neisseria meningitidis
MMSPETRKQLKITDVSAKKLDKLNLHTAWDLVLHLPLRYEDETHIMPIKDAPIGVPCQVEGEVIHQEVTFKPRKQLIVQIADGSGSVLFLRFIHFYASHQKQTAIGKRIRAVGEIKHGFYGDEMIHPKIRDAEGGGLAESLTPVYPTVNGLNQPTLRRIIQTALDVTPLHDTLPDALLCRLKLPHLAESLRLLHSPPPSFTIHQLSDGTLPAWQRLKFDELLAQQLSMRLARQKRIGGTAAALGGDGTLTQALRQALPFALTDAQEKVVSEICRDMAQTYPMHRLLQGDVGSGKTIVAALSALTAIESGAQVAVMAPTEILAEQHFIKFKQWLEPLGIEVVRLFGSLRKKAKDEAKAKLADGSVKIAVGTHALFSDGVAFHNLGLTIVDEQHRFGVAQRLALKNKGREVHQLMMSATPIPRTLAMSFFADLDVSVIDELPPGRTPIKTRLVNNVRRAEVEGFVLGTCRKGRQAYWVCPLIEESETLQLQTAAETLARLQTALPELNIGLVHGRMKAAEKAEVMARFSSGGLNVLVATTVIEVGVDVPNAALMVIEHAERMGLAQLHQLRGRVGRGAAESVCVLLFAEPLGELAKARLKVIYEHTDGFEIARQDLNIRGPGEFLGARQSGVPMLRFAKLEEDLHLLEQVREIAPMLIEQNPEIVEAHLARWLSGREGYLGV

SEQ ID NO: 3073 - protein, 318 aa, Neisseria meningitidis
MNTAAIYRQYQTYVRSDKSGWALDGCSDSALIAQAKQPGLHLEMCINRFDSGITLSRMRGGGTGAFPTEIHNFSHNCALFVMVSGQNRLQMGGREYRPSAGEIWLVRGELADVSETLLPDNSGMCALHLDFSLEKLRRWHDEGLLDERLFSPQTIGRFALQRLAQNAAALTAAACPLLQRSFESDGFGLLADEAAALELSARLLRFTFRRHDNGYRRRRIDEAADILQHEFARPLTIAEIARRVGLNECYLKRYFKAQTGETVAGCLRRLRLEHALALIESGSTVQAAMHFCGYRHAGRFNEAFRRHYGFLPSDVKKC

SEQ ID NO: 3074 - protein, 107 aa, Neisseria meningitidis; identical to SEQ ID NO: 178

SEQ ID NO: 3075 - protein, 100 aa, Neisseria meningitidis; identical to SEQ ID NO: 2616

SEQ ID NO: 3076 - protein, 286 aa, Neisseria meningitidis; identical to SEQ ID NO: 148

SEQ ID NO: 3077 - protein, 58 aa, Neisseria meningitidis
MCAAIMAYFGGFVRALFDLGVFERGGVKGREKWFSRVWWRSEVLCLMCGGIFSVKLIL

SEQ ID NO: 3078 - protein, 253 aa, Neisseria meningitidis; identical to SEQ ID NO: 1532

SEQ ID NO: 3079 - protein, 223 aa, Neisseria meningitidis
MTFSAILFYILAAIVLYGALRTVTAKNPVHAALHLVLTFCVSAMLWMLMQAEFLGVTLVVVYVGAVMVLFLFVVMMLNIDIEEMRAGFWRHAPVAGVVGTLLAVALILILVNPKTDLAAFGLMKDIPADYNNIRDLGSRIYTDYLLPFELAAVLLLLGMVAAIALVHRKTVNPKRMDPADQVKVRADQGRMRLVKMEAVKPQVESAEESEVSDDLKPKEEGKA

SEQ ID NO: 3080 - protein, 283 aa, Neisseria meningitidis
MARHVWQAGRFEIGLDKPKIMGIVNLTPDSFSDGGAYSQNAQTALAHAERLLKEGADILDIGGESTRPGADYVSSEEEWARVEPVLAEVAGWGVPVSLDTRRTVIMEKALALGGIDIINDVAALTDEGAVELLARQTDMGICLMHMQGLPETMQINPKYQDVVGEVARYLKARAAECIAAGIAPQRITLDPGFGFGKTLQHNIALMRHLPELMAETGFPLLIGVSRKRMIGELTGETDAAARVHGSAAAALASVARGAQIVRVHDVKATADALKVWEALGINL

SEQ ID NO: 3081 - protein, 76 aa, Neisseria meningitidis
MNIVKKYAVKAALAAGIFTPAIVMADTFDASAIGTQVANVIMGFVAMVSAVGMAAITVILAIQGFKMAWSMIKSVK

SEQ ID NO: 3082 - protein, 157 aa, Neisseria meningitidis; identical to SEQ ID NO: 140

SEQ ID NO: 3083 - protein, 614 aa, Neisseria meningitidis
MLPNRFKMLTVLTATLIAGQVSAAGGGAGDMKQPKEVGKVFRKQQRYSEEEIKNERARLAAVGERVNQIFTLLGGETALQKGQAGTALATYMLMLERTKSPEVAERALEMAVSLNAFEQAEMIYQKWRQIEPIPGKAQKRAGWLRNVLRERGNQHLDGLEEVLAQADEGQNRRVFLLLAQAAVQQDGLAQKASKAVRRAALKYEHLPEAAVADVVFSVQGREKEKAIGALQRLAKLDTEILPPTLMTLRLTARKYPEILDGFFEQTDTQNLSAVWQEMEIMNLVSLHRLDDAYARLNVLLERNPNADLYIQAAILAANRKEGASVIDGYAEKAYGRGTEEQRSRAALTAAMMYADRRDYAKVRQWLKKVSAPEYLFDKGVLAAAAAVELDGGRAALRQIGRVRKLPEQQGRYFTADNLSKIQMLALSKLPDKREALRGLDKIIEKPPAGSNTELQAEALVQRSVVYDRLGKRKKMISDLERAFRLAPDNAQIMNNLGYSLLTDSKRLDEGFALLQTAYQINPDDTAVNDSIGWAYYLKGDAESALPYLRYSFENDPEPEVAAHLGEVLWALGERDQAVDVWTQAAHLTGDKKIWRETLKRHGIALPQPSRKPRK

SEQ ID NO: 3084 - protein, 358 aa, Neisseria meningitidis; identical to SEQ ID NO: 96

SEQ ID NO: 3085 - protein, 419 aa, Neisseria meningitidis
MKQTVLKNNLQNLLESAENILLLQGPVGDFFLRLADWLTANGKTVHKFNFNAGDDYFYPPTQAHTVVFNDNYDAFPEFLQEYITQHHIQAVVCFGDTRPYHVIAKRIANENQASFWAFEEGYFRPYYITLEKDGVNAFSPLPRRADFFLEQFPKLAQQEYKAPTPVHGGFTPMAKNAIRYYIELFRNPRKYPDYIHHRAPNAGHYLKPWSLSILKRLNYYIEDIQIAKRVEAGKYGKFFIVPLQVFNDSQVRIHCDFPSVRSFLLHVLSSFAEHAPADTNIIIKHHPMDRGFIDYWRDIKRFIKEHPELKGRVIYVHDVPLPVFLRHGLGMVTINSTSGLSGLIHNMPVKVLGRAYYDIPGITDQNTLAEFWNHPTPPDKELFHAYRMYHLNVTQINGNFYSQVFFPNKNTSDSSTPTT

SEQ ID NO: 3086 - protein, 204 aa, Neisseria meningitidis
MNFTRLLNQVLSTVQKKGNTFSDSPLNSFGGGAPVAGAASMLLNGKNRKTITKIGSTAALGYLAYRGYQMWQQNKGRATVTQSDFQPAGETEETYSRTVLRTMIAAAASDGMIDEAERRTIEQESGTDPETAAWLAAEYRLPASIGDIATAVGNDEALAAEAYLAARLVCADLSRKETVFLARLSQALKLDDNLVESLERQLGF

SEQ ID NO: 3087 - protein, 592 aa, Neisseria meningitidis
MTVLKLSHWRVLAELADGLPQHVSQLARMADMKPQQLNGFWQQMPAHIRGLLRQHDGYWRLVRPLAVFDAEGLRELGERSGFQTALKHECASSNDEILELARIAPDKAHKTICVTHLQSKGRGRQGRKWSHRLGECLMFSFGWVFDRPQYELGSLSPVAAVACRRALSRLGLDVQIKWPNDLVVGRDKLGGILIETVRTGGKTVAVVGIGINFVLPKEVENAASVQSLFQTASRRGNADAAVLLETLLVELDAVLLQYARDGFAPFVAEYQAANRDHGKAVLLLRDGETVFEGTVKGVDGQGVLHLETAEGKQTVVSGEISLRSDDRPVSVPKRRDSERFLLLDGGNSRLKWAWVENGTFATVGSAPYRDLSPLGAEWAEKADGNVRIVGCAVCGEFKKAQVQEQLARKIEWLPSSAQALGIRNHYRHPEEHGSDRWFNALGSRRFSRNACVVVSCGTAVTVDALTDDGHYLGGTIMPGFHLMKESLAVRTANLNRHAGKRYPFPTTTGNAVASGMMDAVCGSVMMMHGRLKEKTGAGKPVDVIITGGGAAKVAEALPPAFLAENTVRVADNLVIHGLLNLIAAEGGESEHT

SEQ ID NO: 3088 - protein, 334 aa, Neisseria meningitidis
MSTFFRQTAQAMIAKHIDRFPLLKLDRVIDWQPIEQYLNRQKTRYLRDHRGRPAYPLLSMFKAVLLGQWHSLSVPELEHSLITRIDFNLFCRFDELSIPDYSTLCRYRNWLAQDDTLSELLELINRQLTEKGLKIEKASAVVGATIIQTAGSKQRQAIEVDEEGQVSGQTTPSKDSDARWIKKNGLYKLGYKQHTRTDAEGYIEKLHITPANAHECKHLPPLLEGVPRGTTVYADKGYDSAENRQHLEEHQLQDGIMRKACRNHPLTEAQTKRNRYLSKTRYVVEQSFGTLHRKFRYARAAYFGLIKVSAQSHLKAMCLNLLKAANRLSAPAAA

SEQ ID NO: 3089 - protein, 256 aa, Neisseria meningitidis
VSETQNEQPVQPLVEHLIELRRRLMWTVVGILVCFFGLMPFAQQLYTFIADPLMANLPKDTSMIATDVIAPFFVPVKVTLMAAFLISLPHTLYQIWAFVAPALYQNEKRLITPLVLSSVSLFFIGMAFAYFLVFPVIFKFLASVTPVGVNMATDIDKYLSFILGMFVAFGTTFEVPIVVILLTKISVVTTGQLKRARPYVIVGAFVIAAIITPPDVISQTLLAIPLILLYEAGIWFGRFFTPRSEQDGDIRPPATT

SEQ ID NO: 3090 - protein, 424 aa, Neisseria meningitidis
MPSETSSPRKENETEVHIPAAPFIVKQSGSNALAVCALVLAALGLGTSGFLFVQGQNVLKNQELAFNQKIDKAALGESENAALLKDNLNRQAAIQSELDRLDGNVKANGEQILEMQKSYRELTKGRADWLVDETETILNLAAQQLVLTGNIQTAVGVLEHIDSRLSRFNQAELLPIKQAVSSDLAELKNRPYVDISGTALRLDRLETAVSGLPLMLDGVLKPGVQVKNEAASASWWQNVWEKSLGTLKGLVEIRRLENNDAMLLSPEQAYFVRENLRLRLLDARIALMQRNGEVYQGDLNNAEAAVRQYFDAKSPATQSWLKELAELKALDVRMTADDGLKNSLNAVRAYRDGTRMTAAENQEAEQAASEPANENTASEPAAASDVKTIEAPSLPSERKPEQPAKKQPVPEKAGRSPSAKGERA

SEQ ID NO: 3091 - protein, 318 aa, Neisseria meningitidis
MKEFDFIKRYLQTGTDKDVVLGIGDDAAIVRPREGFDLCFSADMLLKDRHFFADVKPEDLAWKVLAVNISDMAAMGAIPRWVLLSAALPELDEVWLERFCGSFFGLAKKFGVTLIGGDTTKGDMAFNVTIIGELPKGRALRRDAAVAGDDIWVSGRVGMAAAALNCRLKRCVLPDDVFAECEQKLLRPEPRVGLGLALLPFARAAQDVSDGLAQDLGHILTASGVGAEIWADSLPSLSVLKDILPRAQWLSYTLAGGDDYELVFTAPESCRSRVLDAAERCGVPVTRIGKINGGCRLKVLDADGRELELHSLGFDHFG

SEQ ID NO: 3092 - protein, 388 aa, Neisseria meningitidis
MNLHEYQAKELLASYGLPVQGGILAHNGEEAAAAYDKLGGKFAVVKAQVHAGGRGKAGGVKVVKSREEAKEVAESLIGTNLVTYQTDANGQPVNSVLVCEDMYPVQTELYLGAVVDRSTRRVTFMASTEGGVEIEKVAAETPEKIFKVTVDPLVGLQPCQAREVAFQLGLKDKQINEFVKLMTGAYKAFVENDFALFEVNPLAVRENGALACVDGKIGIDSNALYRLPKIAELRDKSQENERELKASEFDLNYVALEGNIGCMVNGAGLAMATMDIIKLKGGQPANFLDVGGGATKDRVVEAFKLILEDKSVKGVLINIFGGIVRCDMIAEAIVAAVKEINVNVPVVVRLEGNNAELGAKILNESGLKLTSADGLNDAAEKIVAAVNA

SEQ ID NO: 3093 - protein, 193 aa, Neisseria meningitidis; identical to SEQ ID NO: 1600

SEQ ID NO: 3094 - protein, 157 aa, Neisseria meningitidis
MSRNTEELQGISLLGNQKTQYPIGYAPEILEAFDNKHPDNDYFVKFVCPEFTSLCPMTGQPDFATIYIRYIPHIKMVESKSLKLYLFSFRNHGDFHEDCVNIIMKDLIALMDPKYIEVFGEFTPRGGIAIHPFANYGKAGTEFEALARKRLFEHDSQ

SEQ ID NO: 3095 - protein, 753 aa, Neisseria meningitidis
LKVTKRDGRLEAIDLDKIHRVVTWAADGLENVSVSQVELKSHIQFYNGIRTDDIHETIIKAAADLISEDTPDYQYLAARLAIFHLRKIAYGEYEPPHLYDHVKKLTDAGKYDRHILEDYSREEFDELNAYIDHERDMSFSYAAVKQLEGKYLVQNRVTRQIYETPQFLYVLVAMCLFSKYPKEARLGYVKRFYDAVSTFKVSLPTPIMSGVRTPTRQFSSCVLIECDDSLDSINATTSAIVKYVSQRAGIGINAGRIRGLDSEIRGGEARHTGCIPFFKMFQAAVKSCSQGGVRGGAATLFYPLWHIEAESLLVLKNNRGVEDNRIRQLDYGVQINRLLYTRLIKGGNITLFSPNEVPGLYEAFFADQDEFERLYTKYEQDPDIRKRIIPAADLFSTLMQERAGTGRIYIQNVDHCNTHSPFDPRVAPVHQSNLCMEIALPTKPLDNINDPNGEIALCTLSAFNLGALNSLDELEGLADLTVRALDALLDYQGYPVEAARTSTMGRRSLGIGVINYAYYLAKNGVRYSDGSALGLTHRTFEAIQYYLLKASANLAKEYGACTLFNQTVYSQGKLPIDTYKKDLDAVCGEPLHYDWESLRAEIVKYGLRNSTLTALMPSETSSQIANATNGIEPPRGLVTVKASKDGILKQVVPEFETLKDAYETLWQLPGNEGYLKLVGVMQKFVDQSISANTAYDPNKFEGSKVSMKQMLKDLLTAYKYGVKTLYYHNTRDGADDTQADIQDDGCAGGACKI

SEQ ID NO: 3096 - protein, 321 aa, Neisseria meningitidis
MLRLTALTLCTVLALGACSPKDSDSAPQAKEQAVSAAQSESASVTVKTARGDVQIPQNPERIAVYDLGMLDTLSKLGVKTGLSVDKNRLPYLEEYFKTTKPAGTLFEPDYETLNAYKPQLIIIGSRAAKAFDKLNEIAPTIEMTADTANLKESAKERIDALAQIFGKQAEADKLKAEIDASFEAAKTAAQGKGKGLVILVNGGKMSAFGPSSRLGGWLHKDIGVPAVDEAIKEGSHGQPVSFEYLKEKNPDWLFVLDRSAAIGEEGQAAKDVLNNPLVAETTAWKKRQVVYLVPETYLAAGGAQELLNASKQVADAFNAAK

SEQ ID NO: 3097 - protein, 406 aa, Neisseria meningitidis
MAVNLTEKTAEQLPDIDGIALYTAQAGVKKPGHTDLTLIAVAAGSTVGAVFTTNRFCAAPVHIAKSHLFDEDGVRALIINTGNANAGTGAQGRIDALAVCAAAARQIGCKPNQVLPFSTGVILEPLPADKIIAALPKMQPAFWNEAARAIMTTDTVPKAASREGKVGDKHTVRATGIAKGSGMIHPNMATMLGFIATDAKVSQPVLQLMTQEIADETFNTITVDGDTSTNDSFVIIATGKNSQSEIDNIADPRYAQLKELLCSLALELAQAIVRDGEGATKFITVRVENAKTRDEARQAAYAVARSPLVKTAFFASDPNLGRLLAAIGYAGVADLDTDLVEMYLDDILVAEHGGRAASYTEAQGQAVMSKAEITVRIKLHRGQSAATVYTCDLSHGYVSINADYRS

SEQ ID NO: 3098 - protein, 270 aa, Neisseria meningitidis
MENIGRQRPIGVFDSGIGGLTNVRALMERLPMENIIYFGDTARVPYGTKSKATIENFSMQIVDFLLEHDVKAMVIACNTIAAVAGQKIRQKTGNMPVLDVISAGAKAALATTRNNKIGIIATNTTVNSNAYARAIHRNNPDTLVRTQAAPLLVPLVEEGWLEHEVTRLTVCEYLKPLLADGIDTLVLGCTHFPLLKPLIGREAHNVALVDSAITTAEETARVLAQEGLLNTDNNNPDYRFYVSDIPLKFRTIGERFLGRTMEQIEMVSLG

SEQ ID NO: 3099 - protein, 123 aa, Neisseria meningitidis
MKLLSTLLVLLVTAEHFYIAWLEMTQIPSEKAAEIFKLPYEFMEQKRVQTLFGNQGLYNGFLGIGLVWSRFAAPDNAVYGATVLFLGFVLIAAAWGAFSSGNKGILVKQGLPAFLAAAAVLAV

SEQ ID NO: 3100 - protein, 663 aa, Neisseria meningitidis
  misc_feature 3, 4: 'Xaa' is any amino acid
VCXXELTLRGMILGALITVIFTASNVYLGLKVGLTFASSIPAAVISMAVLKFFKGSNILENNMVQTQASAAGTLSTIIFVLPGLLMAGYWSGFPFWQTTLLCIAGGILGVIFTIPLRYAMVVKSDLPYPEGVAAAEILKVGGHEEGDNRQGGSGIKELAAGGALAGLMSFCAGGLRVIADSASYWFKSGTAIFQLPMGFSLALLGAGYLVGLTGGIAILLGISIAWGIAVPYFSSHIPQPSDMEMAAFAMKLWKEKVRFIGAGTIGIAAVWTLLMLLKPMVEGMKMSFKSFGGGAPAAERAEQDLSPKAMIFWVLAMMFVLGVSFYHFIGDSHITGGMAWLLVVVCTLLASVIGFLVAAACGYMAGLVGSSSSPISGVGIVSVVVISLVLLLVGESGGLLADEANRKFLLALTLFCGSAVICVASISNDNLQDLKTGYLLKATPWRQQVALIIGCIVGALVISPVLELLYEAYGFTGAMPREGMDAAQALAAPQATLMTTIASGIFAHNLEWVYIFTGIAIGAVLIVVDLVLKKSSGGKLALPVLAVGMGIYLPPSVNMPIVAGAVLAAVLKHIIGKKAENREGRLKNAERIGTLFSAGLIVGESLIGVIMAFIIAFSVTNGGSDAPLALNLQNWDAAASWLGLAFFVTGMFFFAQRVLKAGK

SEQ ID NO: 3101 - protein, 233 aa, Neisseria meningitidis
MFRIVKWLIALPVGIFIFFNAYVYGNIITYRAVAPHQTAFMSMRMKQFEQEGRDVALDYRWMPYNRISVNLKKALIASEDARFAGHGGFDWGGIQNAIRRNRNSGKVKAGGSTISQQLAKNLFLNESRSYIRKGEEAAITAMMEAVTDKDRIFELYLNSIEWHYGVFGAEAASRYFYQIPAAKLTKQQAAKLTARVPAPLYYADHPKSKRLRNKTNIVLRRMGSAELPESDTD

SEQ ID NO: 3102 - protein, 160 aa, Neisseria meningitidis; identical to SEQ ID NO: 1377

SEQ ID NO: 3103 - protein, 431 aa, Neisseria meningitidis
MIRPDFQEYLPSYYFSSVNPHTVYPKLQCRLKTDTCIIGGGLSGLCTALPLAEQGHETVVLEAARIGFGASGRSGGQVISDYACGMEEIEKQVGLEQAQWFWQQSLQAVELVDERVRKHAIDCDWQRGYATVAIRSQHWEELQQWHEHAQKYYGATHYQLWDNTELKQQLDSDMYQGAQFDPLSGHLHPLNYTLGIARAAAEAGTKIFEHSPMIRIEPYQNGWLVYTPEGSVECKNLVYAVNTYAGLNPIFQPLERKAIAVSTFIIATEPLGARAKGLIRNNMAVCDNRHILDYYRLSADGRLLFGGKDNEFIDNPARMTELVRQDMLKVFPQLDDVKIEYSWGGECDITANLVPHFGRLAANVFYAQGYSGHGMAITGIAGLAVAEAILGDECRLKPFERLRQPNIILQPFLRKLGSFLGSKYYQWKDSR

SEQ ID NO: 3104 - protein, 103 aa, Neisseria meningitidis
MKMHNPAHPGLVLKEYINGASITDIAKRLGVSRVALSRIVNAQSSITPEMAVRLSQLLNTSPDFWLNMQAGYDLWQIRQRKTFDIAPLFPEPPLSSMQTGARA

SEQ ID NO: 3105 - protein, 182 aa, Neisseria meningitidis; identical to SEQ ID NO: 125

SEQ ID NO: 3106 - protein, 222 aa, Neisseria meningitidis
MKNLAIFDLDNTLINTDSDHAWPQYLIKKGLVDAAETEAQNEKFYRDYQNGCLDIDAFLKFHLAPLARYSKEELAEFHREFMAEYIIPHISPMQRMLVQSHQMAGDETLVISSTNEFIITPVCHLFGITNIIGTQLESGSDGRYTGNYIGTPSLKEGKITRLNQWLAERGETLESYGKTYFYSDSKNDLPLLRLVDEPVAVNPDAELEEEAKEKGWPVLNFK

SEQ ID NO: 3107 - protein, 159 aa, Neisseria meningitidis
MKHILPLIAASALCISTASAHPASEPSTQNETAMTTHTLTSKYSFDETVSRLETAIKSKGMDIFAVIDHQEAARRNGLTMQPAKVIVFGTPKAGTPLMVKDPAFALQLPLRVLVTETDGKVRAAYTDTRALIAGSRIGFDEVANTLANAEKLIQKTIGE

SEQ ID NO: 3108 - protein, 335 aa, Neisseria meningitidis
MYPLARRILFALDAEKAHHFTLDALNMVYKLGLIPVTGNRTKPVKLMGLDLPNPVGLAAGLDKNGEYIDALGALGFGFIEIGTVTPNPQPGNPQPRLFRVPEYQGIINRMGFNNHGIDAMIQNIEKSKFSGVLGINIGKNAVTPIENAADDYLICLEKAYAHASYITVNISSPNTKNLRALQGGDELSALLEALKNKQAQLASVHGKYVPLAVKIAPDLDEAQIEDIAHVVKSVEMDGIIATNTTIDKSSLGSHPLAGEQGGLSGLPVHEKSNRVLKLLADHIDGKLPIIGVGGIMEGRDAAEKIRLGATAVQVYSGLIYKGPALVKECLKALAQ

SEQ ID NO: 3109 - protein, 369 aa, Neisseria meningitidis; identical to SEQ ID NO: 1928

SEQ ID NO: 3110 - protein, 215 aa, Neisseria meningitidis
MKTKFYNHQGEHLILYFAGWGTPPDAVNHLILPENHDLLICYDYQDLNLDFDFSAYRHIRLVAWSMGVWAAERALQGIRLKSATAVNGTGLPCDDNFGIPCAVFKGTLENLTENTRLKFERRMCGDKVSFEDYQQFPARPFDEIHQELTALFEMIGQDRRADLIRWTNALVGSGDKIFMPANQHRYWTPRCTVREIDGGHYLFSRFTHWSALWNH

SEQ ID NO: 3111 - protein, 611 aa, Neisseria meningitidis
VNTTPIHSKLAEITGRIIERSRPTREKYLAKIRSAKQMGRLERNQLGCSNLAHGYASMPKSIKIEMLQDTVPNLGIITAYNDMVSAHQPFKDFPDQIKDEAQKNGATAQVAGGTPAMCDGITQGYAGMELSLFSRDVIAMSTAVGLSHQMFDGSLFMGVCDKIVPGLMIGALSFGHIPGIFVPAGPMSSGIGNKEKARTRQLFAEGKVGRNELLKSEMGSYHSPGTCTFYGTANSNQMMMEMMGVHLPAAAFVHPYTDLREALTRYAAGHLARGIKNGTIKPLGEMLTEKSFINALIGLMATGGSTNHTMHLVAMARAAGVILNWDDFDEISSIIPLLIRVYPNGKADVNHFTAAGGLPFVIRELLDAGLLHDDVDTVVGHGMRHYTKEPFLIDGKLEWREAPETSGNDDILRKAGNPFSPDGGLRLMKGNIGRGVIKVSAVREGCRIIEAPAIVFNDQREVLSAFERGELERDFVCVVRYQGPRANGMPELHKLTPPLGILQDRGFKVALLTDGRMSGASGKVPASIHMTPEALMGGNIAKIRTGDLIRFDSVSGELNVLIDEAEWNAREVEHIDLGANQQGCGRELFAGFRSLTGGAETGAMSFGGEFA

SEQ ID NO: 3112 - protein, 157 aa, Neisseria meningitidis
MKKLLAAVMMAGLAGAVSAAGVHVEDGWARTTVEGMKIGGAFMKIHNDEAKQDFLLGGSSPVADRVEVHTHINDNGVMRMREVKGGVPLEAKSVTELKPGSYHVMFMGLKKQLKEGDKIPVTLKFKNAKAQTVQLEVKTAPMPAMNHGHHHGEAHQH

SEQ ID NO: 3113 - protein, 369 aa, Neisseria meningitidis; identical to SEQ ID NO: 1928

SEQ ID NO: 3114 - protein, 351 aa, Neisseria meningitidis
MTHHYPTDDIKIKEVKELLPPIAHLYELPISKEASGLVHRTRQEISDLVHGRDKRLLVIIGPCSIHDPKAALEYAERLLKLRKQYENELLIVMRVYFEKPRTTVGWKGLINDPHLDGTFDINFGLRQARSLLLSLNNMGMPASTEFLDMITPQYYADLISWGAIGARTTESQVHRELASGLSCPVGFKNGTDGNLKIAIDAIGAASHSHHFLSVTKAGHSAIVHTGGNPDCHVILRGGKEPNYDAGHVSEAAEQLRAAGVTDKLMIDCSHANSRKDYTRQMEVAQDIAAQLEQDGSNIMGVMVESHLVEGRQDKPEVYGKSITDACIGWGATEELLALLAGANKKRMARAS

SEQ ID NO: 3115 - protein, 187 aa, Neisseria meningitidis
MKLIILDRDGVINQDRDNFVKSVDEWIPVEGSMDAVAFLTQAGYTVAVATNQSGIGRKYFTVQNLTEMHAKMHRLVRQAGGEINGIWFCPHTDADNCNCRKPKPGMIEDIIGRFNAQASETWLVGDSLRDLQAIDAVGGKPALVLTGKGKKTLSQHGHELPEHTQVFDTLLDFSQYIMQENAAPQAD

SEQ ID NO: 3116 - protein, 270 aa, Neisseria meningitidis
MDKIRVAAVQMVSGVSPETNVAAMKRLVARAAEQGVDWVLLPEYWVLMGANDTDKLALAEPLGGGRFQTALSETAKECGVVLFGGTVPLQSPEAGKVMNTLLVYGRDGKRTGLYHKMHLFGFSGLGERYAEADTIRAGGDVPHLSAEGVSVAAGICYDVRFPEFFRRQLPFDVLMLPAAFTHTTGKAHWELLLRARAVENQCYVVAAAQGGLHENGRRTFGHSMIVDPWGDVLDVLPEGEGVVTADIDANRLNSVRNRLLALKYRVLDAV

SEQ ID NO: 3117 - protein, 61 aa, Neisseria meningitidis; identical to SEQ ID NO: 965

SEQ ID NO: 3118 - protein, 525 aa, Neisseria meningitidis; identical to SEQ ID NO: 2948
  misc_feature 2, 3, 4: 'Xaa' is any amino acid

SEQ ID NO: 3119 - protein, 764 aa, Neisseria meningitidis
  misc_feature 2, 3: 'Xaa' is any amino acid
VXXELEQILQQLYREARKAHYEFISLEHLLLVLIEEDASVPNVLKLCGADLKVVSEQLAASVAENTPLIPEHLLDTVETRPTLGFQRVMQRAMVHTQSAGKAAVEPLDVLVALMSETDSHTVYFLKLQSVTRFEVLRCIAHGSPDEDEDEDDGNYSSDGMDDDNGNRTKPGKNPLSAYTVNLNTEVKAGRIDPLIGRKHEMERLVQILCRRRKNNPLLVGEAGVGKTALAEGLAHQIVNGGIPDALKDAEVYALDMGSLLAGTKYRGDFEARVKSVLKQLEKIPHAILFIDEIHTIIGAGSTSGGTMDASNLLKPALAKGSLRCIGATTYDEYRTIFDKDYALSRRFQKIDVVEPTVSETVQILRGLKPMFEAFHQVRYTQGALEAAAELSARYINERFLPDKAIDVMDEAGAAQRILPKSKQKKVIGKAQIETVIAKVSRIPEKTVSHDDKQVLQFLGRDLKNMVYGQENAIDALVAAVKMSRSGLALPDKPIGSFLFSGPTGVGKTEAAKQLAYSLGVPLQRFDMSEYMERHAVSRLIGAPPGYVGFEQGGLLTEAVNKQPHCVLLLDEIEKAHPDIFNVLLQVMDAGKLTDNNGKSADFRNVILIMTTNAGAESLSRPSLGFTAKRERGDEMQAINKLFTPEFRNRLDAIIPFAPLSEPIIVKVVDKFLLQLEHQLLDKKVEAEFTSALHKYLAEKGFDPQMGARPMHRLIQEKIRKPLADELLFGKLSDGGFVRIDWDAVKEEAVLKFKKSKVKIKTASA

SEQ ID NO: 3120 - protein, 1067 aa, Neisseria meningitidis
MAKFFIDRPIFAWVISIFIIAAGIFGIKSLPVSQYPSVAAPTITLHATYPGASAQVMEDSVLSVIERNMNGVEGLDYMSTSADSSGSGSVSLTFTPDTDENLAQVEVQNKLSEVLSTLPATVQQYGVTVSKARSNFLMIVMLSSDVQSTEEMNDYAQRNIVPELQRIEGVGQVRLFGAQRAMRIWVDPKKLQNYNLSFADIGSALSAQNVQISAGSIGSLPAVRGQTVTATVTAQGQLGTAEEFGNVILRANTDGSNVYLKDVARVGLGMEDYSSSTRLNGVNTTGMAVMLSNSGNAMATAKAVKERMATLEKYFPQGMSWKTPYDTSKFVEISIEKVIHTLIEAMVLVFVVMYLFLQNIRYTLIPTIVVPISLLGGFAFISYMGMSINVLTMFAMVLVIGIVVDDAIVVVENVERIMAGEGLPPKEATKKAMGQISGAVIGITAVLISVFVPLAMFSGATGNIYKQFALTMASSIAFSAFLALTLTPALCATMLKTIPKGHHEEKKGFFGWFNKKFNSWTHGYEGRVAKVLRKTFRMMVVYIGLAVVGVFLFMRLPTSFLPTEDQGFVMVSVQLPAGATQERTNATLAQVTQLAKSIPEIENIITVSGFSFSGSGQNMAMGFAILKDWNERTAPGSDAVAIAGKLTGMMMGTLKDGFGIAVVPPPILELGNGSGLSINLQDRNNTGHTALLAKRNELIQKMRASGLFDPSTVRAGGLEDSPQLKIDINRAAAAAQGISFADIRTALASALSSSYVSDFPNQGRLQRVMVQADEDARMQPADILNLTVPNKSGVAVPLSTIATVSWENGTEQSVRFNGYPSMKLSASPATGVSTGQAMAAVQKMVDELGGGYSLEWGGQSREEAKGGSQTLILYGLAVAAVFLVLAALYESWSIPLAVILVIPLGLIGAAAGVTGRNLFEGLLGSVPSFANDIYFQVGFVTVMGLSAKNAILIIEFAKDLQAQGKSAVEAALEAARLRFRPIIMTSFAFILGVVPLYIAGGASSASQRAIGTTVFWGMLIGTLLSVFLVPLFYVVVRKFFKETAHEHEMAIRHASEAGITGSNDSQH

SEQ ID NO: 3121 - protein, 228 aa, Neisseria meningitidis; identical to SEQ ID NO: 380

SEQ ID NO: 3122 - protein, 265 aa, Neisseria meningitidis; identical to SEQ ID NO: 572

SEQ ID NO: 3123 - protein, 245 aa, Neisseria meningitidis
MGGQKTHFGFSTVNEDEKAGKVAEVFHSVAKNYDIMNDVMSAGLHRVWKHFTINTAHLKKGDKVLDIAGGTGDLSRGWAKRVGKEGEVWLTDINSSMLTVGRDRLLNEGMILPVSLADAEKLPFPDNYFNLVSVAFGLRNMTHKDAALKEMYRVLKPGGTLLVLEFSKIYKPLEGAYDFYSFKLLPVMGKLIAKDAESYQYLAESIRMHPDQETLKQMMLDAGFDSVDYHNMSAGIVALHKGVKF

SEQ ID NO: 3124 - protein, 467 aa, Neisseria meningitidis
MNNPDLPYRQALERLSQKQYNFTEVRRLLTEAASAGHPAAAFELAKHLMDADSPYQDREQGMEMLRIAAEQGHPYARYNLAYIQELEGAPPETLIPLYRPLAEERLPEAQVRLMYLLYASRHFEEALEWAKTSTKNNNPHGQYLLAQYCRYGTPPDFETAHLLYRKAAAQGLPEAHWQLGLQYRFGQGTKVDTAQAVNHLRAAAQQGYIPAYTPLAELILPTAPDEAVYRFQQAAQENDPDAHAALADIYLQGKYQERNHKLALHHAEAAAAERHPEGLRILGDICRYGLGIAPDTEKARHYYRQAAEAGSLSAYQKLISDSALNHPDQYGGIKDSAIRRQRAEQLYQKAQALHYGLQCAPEYAAALKLYTEAAELGHSKAQTNLGSMYYFGQGIAADYGKARKWFEQAAAQKDSMAFYNLACIHYSGHGVGPDKEKACRYLQEAINNGYGQKSVLQELLQQWQNAV

SEQ ID NO: 3125 - protein, 377 aa, Neisseria meningitidis; identical to SEQ ID NO: 2738

SEQ ID NO: 3126 - protein, 354 aa, Neisseria meningitidis
MALVSMRQLLDHAAENSYGLPAFNVNNLEQMRAIMEAADQVNAPVIVQASAGARKYAGAPFLRHLILAAVEEFPHIPVVMHQDHGASPDVCQRSIQLGFSSVMMDGSLMEDGKTPSSYEYNVNATRTVVNFSHACGVSVEGEIGVLGNLETGEAGEEDGVGAVGKLSHDQMLTSVEDAVRFVKDTGVDALAIAVGTSHGAYKFTRPPTGDVLRIDRIKEIHQALPNTHIVMHGSSSVPQEWLKVINEYGGNIGETYGVPVEEIVEGIKHGVRKVNIDTDLRLASTGAVRRYLAENPSDFDPRKYLSKTIEAMKQICLDRYLAFGCEGQAGKIKPVSLEKMANRYAKGELNQIVK

SEQ ID NO: 3127 - protein, 120 aa, Neisseria meningitidis
MDIRYFGTTPRYSEAVGANGLIFLSGMVPENGETAAEQTADVLAQIDRWLAECGSDKAHVLDAVIYLRDMGDYAEMNGVWDAWVAAGRTPARACVEARLARPEWCVEIKITAVKKDAATA

SEQ ID NO: 3128 - protein, 69 aa, Neisseria meningitidis
MNYFGMVEFLRLMAMVRPPFVFFSGTRSELPTYLDLVAELRLTGWERFAGSQTLTVSSTSTAIQATTTT

SEQ ID NO: 3129 - protein, 468 aa, Neisseria meningitidis
MNDYAAMPSEDREVGALSLPPHSMEAEQSVLGGLMLENPAWDRIADVVSGEDFYRHEHRLIFRSIAKLINESRPADVITVQEDLQRNEELEAAGGFEYLITLAQNTPSAANIRRYAEIVRERSIMRQLAEVGTEIARSAYNPQGRDAGQLLDEAENKVFQIAESTAKSKQGFLEMPDLLKEVVQRIDMLYSRDNPDEVTGVPTGFIDLDKKTSGLQPGDLIIVAGRPSMGKTAFSINIAEHVAVEGKLPVAVFSMEMGGAQLVMRMLGSVGRLDQSVLKTGRLEDEHWGRLNEAVVKLSDAPVYIDETPGLTALELRARARRLARQFNNKLGLIVIDYLQLMAGSGRSDNRASELGEISRSLKALAKELQVPIIALSQLSRTVESRTDKRPMMSDLRESGAIEQDADLIMFMYRDEYYNQDSPMKGLAECIIGKHRNGPVGKIFLTWTGQFTKFDNAAYIPEEAKIED

SEQ ID NO: 3130 - protein, 122 aa, Neisseria meningitidis
MIDGELVALIHQTVLADEAGLKGRADMARLDGALSRIANWRQYENLEDIYEIAALYAQAIAKAHAFPDGNKRTALLTMLTYLDLQGISIAADQGLDDLIVSLAAGETDFKQLAETLRRLDKE

SEQ ID NO: 3131 - protein, 176 aa, Neisseria meningitidis
MIQKICKLFVLIAFFSASPAFALQSDSRQPIQIEADQGSLDQANQSTTFSGNVVIRQGTLNISAARVNVTRGGKGGESVRAEGSPVRFSQTLDGGKGTVRGQANNVAYSSAGSTVVLTGNAKVQRGGDVAEGAVITYNTKTEVYTISGSTKSGAKSASKSGRVSVVIQPSSTQKSE

SEQ ID NO: 3132 - protein, 165 aa, Neisseria meningitidis
MTALTLPEDIRQQEPSALLYTLVSAYLEHTAQTGDESLSCLSDDQHTLTAFCYLDSQVEEGGFVQLIASGYGEYIFRNPLADSLRRWKIKAVPKVLDKAKALYEQHGKTIETLADGGADIESLRKQFPDFEEWDGAYYEAAEQDLPLLAEHIQSNWETFAHIGQA

SEQ ID NO: 3133 - protein, 330 aa, Neisseria meningitidis
MENVNRIVAEGIAAVEAAQDFNALEQIKARYLGKTGELTGLLKTLGQMSPEERKTIGAHINECKNRFQTAFNAKRDALNEAKLQARLAAEALDITLPGRAQEGGSLHPVTLTLQRVVELFHGMGFEVADGPEIEDDFHNFQALNIPANHPARAMQDTFYVENGDVLRTHTSPIQIRYMLDKKEPPIRIIAPGRVYRVDSDATHSPMFHQAEGLWVEEGVTFADLKAVFTDFIRRFFERDDLQVRFRPSFFPFTEPSAEIDIMGENGKWLEVGGCGMVHPNVLKNVNIDSEKYTGFAFGIGLDRFAMLRYNVNDLRLFFDNDLNFLKQFAK

SEQ ID NO: 3134 - protein, 240 aa, Neisseria meningitidis
MNPRIKAMSGVMLQALSAAQQDVLVDLWQVDLRPLGGRVFYFCNQVNERGTAVVWQGQAYEPYPIKADDFESTSQGAGNRPTLTVSNLLGLITGAADQFGQLVGVLVVRRQTYAKFLDAVNFQSGRNPTADPMQEVVGKYLVERMTALNAETATFELAAPSESDGSVIPARIMLANTCCWQYRGEGCGYTGRAVADRFDMPTDDASKDVCSKTLTGCRARFGATAVLPFGGFPSSDKVTT

SEQ ID NO: 3135 - protein, 363 aa, Neisseria meningitidis
MSHISPIPEILADIKAGKMVIITDAEDRENEGDLLMAAQFVTPEAINFMIKHARGLVCLPMDGEMVEKLGLPMMTQKNGAQYGTNFTVSIEAAHGITTGISAADRALTIQTAVSPTAKPEDIVQPGHIFPLRAQKGGVLVRAGHTEAGVDLAQMNGLIPAAVICEIINDDGTMARMPELMKFAEEHKLKIGTITDLIEYRSRTESLLEDMGNAPVQTPWGEFQQHVYVDKLSGETHLALVKGTPAADTETLVRVHEPFSVMDFIQANPRHSWSLPKALERIQQAESGVVILLHRAEDGASLLDRTLPKGANQAYKWDSKSYGIGAQILVGLNVKKLRVLGQPSSFTGLTGFGLEVVGFEEAEK

SEQ ID NO: 3136 - protein, 65 aa, Neisseria meningitidis; identical to SEQ ID NO: 127

SEQ ID NO: 3137 - protein, 92 aa, Neisseria meningitidis; identical to SEQ ID NO: 419

SEQ ID NO: 3138 - protein, 360 aa, Neisseria meningitidis; identical to SEQ ID NO: 2477

SEQ ID NO: 3139 - protein, 304 aa, Neisseria meningitidis
MDAVQLKSFVAVAHEGNLTQAAKRLFLSQPAVSAQIKALEEYVGTPLFRRTGKGMVLTRAGEILLPEAESLLQYKHKLEHFAKTLAGDYSEETSLGIIHPIDSAKLVALTDNIGQTAPKTRLHIQYGMSGEILSRIQHKTLHGGFILGNAAQRGIRSVFLQNLTYALICPQSQYPHLTRSLPQSLQECVWIEMSGVSGSRKHLHQFWRSNRLSPKKQILCDYPQTIIDLVAGGIGVAMVPGNKAEAAAKEGAGVAIIESCRHSMPLNFIYAEEYEDNPHVSLLLECIEKVWGVQAVQPPVVSDN

SEQ ID NO: 3140 - protein, 220 aa, Neisseria meningitidis
MIHAVLFDLDGTLADTALDLGGALNTLLARHGLPPKSMDEIRTQASHGAAGLLKLGAGITPEHPDYARWRTEYLDEYDSRYAQDTTLFGGVNELIAELDRRGIKWGIITNKPMRFTDKLAPKLGFIIPPAVVVSGDTCGEPKPSVKPMLYACGQIHADPQHTLYVGDAERDIQAGRNAGMKTVLAEWGYIAPEDDTGSWQADFHIRTPLDLLECLDKIQP

SEQ ID NO: 3141 - protein, 417 aa, Neisseria meningitidis
MQTYLVGGAVRDYLLGLPVKDRDWVVVGADAQTMLAQGFQPVGKDFPVFLHPETHEEYALARTERKTAKGYVGFSFHADKDVTLEQDLMRRDLTINAMAQDADGKIIDPFGGQRDLAAGILRHVSPAFAEDPVRILRTARFAARYRFEIAEETIKLMRQMVENGEADALVAERVWQEFAKGLMEKNPRKMIEVLRECGALKVLLPEVNALFGVPQRADYHPEIDSGIHTLMTLQRAADMGLSLPERYAALLHDLGKAKTPSDILPRHHGHDLAGVEPVREVNQRLRAPKHCAELAELVCRWHIIFHQVGQLKSQTILNVLKKTDAFRRPERFQTALNVCIADTQGRLNREHTPYPQRAHWFALLEAANQADSGKIAAECRAQGKAHLIAEQIDRARLAQIAPLQKTFRAAQDKTEKH

SEQ ID NO: 3142 - protein, 126 aa, Neisseria meningitidis
MNIRFFALTVPVLSLAACAVPEAYDDGGRGHMSSVQNQARPADFRAFSCENGLSVRVRHLDSGKVALRLDGRRAVLSSDVAASGERYTAEHGLFGNATEWHQKGGEAFFGFTDAYGNSVETSCRAR

SEQ ID NO: 3143 - protein, 307 aa, Neisseria meningitidis; identical to SEQ ID NO: 983

SEQ ID NO: 3144 - protein, 327 aa, Neisseria meningitidis
  misc_feature 2, 3, 4: 'Xaa' is any amino acid
VXXXELIPTGEYSIEIDPRKVSRDTVLMLGRLGFNRMSIGIQDFDPKVQAAVNRIQSYEETKEVIDAAREAGFKSVSVDLIYGLPHQTSESIKTTIDTVLSLDPDRLALYHYAHLPHVFKPQRRIDTASVPDSEEKLDMLQYCVQTLTERGYVFIGMDHFAKPDDELSIALKEGFLQRNFQGYSTYADCDLVAIGVSSIGKIGSTYSQNERDIDAYYAAIDEGRLPIMRGYQLNQDDILRRNIIQDLMCRFALDYRIYESMFGIPFDRYFKDELADLEKLAGLGLVRLNSHGLTVTPKGRFLIRNIAMVFDYHLRHKETKAKYSQTV

SEQ ID NO: 3145 - protein, 621 aa, Neisseria meningitidis
MIEKLTFGLFKKEDARSFMRLMAYVRPYKIRIVAALIAIFGVAATESYLAAFIAPLINHGFSAPAAPPELSAAAGIISTLQNWREQFTYMVWGTENKIWTVPLFLIILVVIRGICRFTSTYLMTWVSVMTISKIRKDMFAKMLTLSSRYHQETPSGTVLMNMLNLTEQSVSNASDIFTVLTRDTMIVTGLTIVLLYLNWQLSLIVVLMFPLLSLLSRYYRDRLKHVISDSQKSIGTMNNVIAETHQGHRVVKLFNGQAQAANRFDAINRTIVRLSKKITQATAAHSPFSELIASIALAVVIFIALWQSQNGYTTIGEFMAFIVAMLQMYAPIKSLANISIPMQTMFLAADGVCAFLDTPPEQDKGTLAPQRVEGRISFRNVDVEYRSDGIKALDGFNLDIRQGERVALVGRSGSGKSTVVNLLPRFVEPSAGNICIDGIDIADIKLDCLRAQFALVSQDVFLFDDTLFENVRYSRPDAGEAEVLSALQAANLQSLIDASPLGLHQPIGSNGSNLSGGQRQRVAIARAILKDAPILLLDEATSALDNESERLVQQALERLMENRTGIIVAHRLTTIEGADRIIVMDDGKIIEQGTHEQLMSQNGYYTMLRNISNKDAAVRTA

SEQ ID NO: 3146 - protein, 916 aa, Neisseria meningitidis
MTDATIRHDHKFALETLPVSLEDEMRKSYLDYAMSVIVGRALPDVRDGLKPVHRRVLYAMHELKNNWNAAYKKSARIVGDVIGKYHPHGDTAVYDTIVRMAQNFAMRYVLIDGQGNFGSVDGLAAAAMRYTEIRMAKISHEMLADIEEETVNFGPNYDGSEHEPLVLPTRFPTLLVNGSSGIAVGMATNIPPHNLSDTVNACLRLLDAPDTEIDELIDIIQAPDFPTGATIYGLSGVREGYKTGRGRVVMRGKTHIEPIGRNGEREAIVIDEIPYQVNKAKLVEKIGDLVREKTLEGISELRDESDKSGMRVVIELKRNENAEVVLNQLYKLTPLQDSFGINMVVLVDGQPRLLNLKQILSEFLRHRREVVTRRTLFRLKKARHEGHIAEGKAVALSNIDEIIKLIKESPNAAEAKDKLLAHPWRSSLVEEMLTRSGLDLEMMRPEGLAANIGLKEQGYYLSEIQADAILRMSLRNLTGLDQEEIVESYKNLMGKIIDFVDILSKPERITQIIRDELEEIKTNYGDERRSEINPFGGDIADEDLIPQREMVVTLTHGGYIKTQPTTDYQAQRRGGRGKQAAATKDEDFIETLFVANTHDYLMCFTNLGKCHWIKVYKLPEGGRNSRGRPINNVIQLEEGEKVSAILAVREFPEDQYVFFATAQGMVKKVQLSAFKNVRAQGIKAIALKEGDYLVGAAQTGGADDIMLFSNLGKAIRFNEYWEKSGNDEAEDADIETEISDGIEDETADSENALPSGKHGVRPSGRGSGGLRGMRLPADGKIVSLITFAPETEESGLQVLTATANGYGKRTPIADYSRKNKGGQGNIAINTGERNGDLVAATLVGETDDLMLITSGGVLIRTKVEQIRETGRAAAGVKLINLDEGETLVSLERVAEDESELSDASVISNVTEPEVEN

SEQ ID NO: 3147 - protein, 119 aa, Neisseria meningitidis
MLSNIIPLSIGAALGATARWLLNLAVPASIPPATGNLFANWIGAFLIGIFAETVNHPQWKLLLITGFLGSLTTLSGFSLETVTLLQLNRPASALSNIFLHTVGSLLLTWLGLKIGAAVK

SEQ ID NO: 3148 - protein, 255 aa, Neisseria meningitidis
MALAKRIIPCLDVKDGRVVKGVNFIGLRDAGNPVEAAKRYNGEGADELTFLDITASSDNRDTILHIIEEVAGQVFIPLTVGGGVRTVADIRRLLNAGADKVSINTAAVTRPDLIDEAAGFFGSQAIVAAVDAKAANPENTRWEIFTHGGRNPTGLDAVEWAVEMQKRGAGEILLTGMDRDGTKQGFNLPLTRAVAEAVDIPVIASGGVGNVRHLIEGITEGKADAVLAAGVFHFGEIAIREAKRAMREAGIEVRL

SEQ ID NO: 3149 - protein, 172 aa, Neisseria meningitidis; identical to SEQ ID NO: 1304

SEQ ID NO: 3150 - protein, 620 aa, Neisseria meningitidis
MALLQISEPGMSASPHRHRLAAGIDLGTTNSLVATVRSGSAACLPDAEGRVTLPSVVRYLENGGIEVGKTALSAQKTDPLNTVSSAKRLIGRTLADLHQNTHYLPYRFGDNQRVIELHTRQGVKTPVEVSAEILKTLKSRAEETLGGDLVGVVITVPAYFDDAQRQATKDAARLAGLNVLRLLNEPTAAAIAYGLDNASEGTFVVYDLGGGTFDVSVLQLTKGLFEVKATGGNSALGGDDFDHRLFCRLLEQNGLSQLNEQDSQLLLSLVRAAKEQLTTQTEARIQATLSDGMAIDTSISRAEFHNLTQHLVMKTLEPVTQALKDAGVGKNEVKGVIMVGGSTRMLHVQQAVATFFGQTPLNNLNPDEVVALGAAIQANVLAGNKTDGEWLLLDVTPLSLGLETYGGLAEKIIPRNSTIPTARAQDFTTFKDGQTAMTIHVVQGERELVADCRSLAKFTLRGIPPMAAGAARIRVTFQIDADGLLSVSAQEQSTGVHAQIEVKPSYGLDDGAITRMLKDSMDNAAEDMAARARAEAVVEAESLTDAVNAALELDSDLLDAKELQQIRQGIADLQGRLKDGKAEDIRSAVAKLSRSTDNFAAKRMNRNIQRALTGQSVDNI

SEQ ID NO: 3151 - protein, 201 aa, Neisseria meningitidis
MKKIGLFGGTFDPIHNGHLHIARAFADEIGLDAVVFLPAGGPYHKDAASASAADRLAMVELATAEDARFAVSDCDIVREGATYTFDTVQIFRQQFPSAQLWWLMGSDSLMKLHTWKKWQMLVRETNIAVAMRQGDSLHQTPRELHAWLGKSLQDGSVRILSAPMHNVSSTEIRRNLAGQGVSDGIPPAAARYIREHGLYEK

SEQ ID NO: 3152 - protein, 517 aa, Neisseria meningitidis
MTQANRVIIFDTTLRDGEQSPGAAMTKEEKIRVARQLEKLGVDIIEAGFAAASPGDFEAVNAIAKTITKSTVCSLSRAIERDIRQAGEAVAPAPKKRIHTFIATSPIHMEYKLKMKPKQVIEAAVKAVKIAREYTDDVEFSCEDALRSEIDFLAEICGAVIEAGATTINIPDTVGYSIPYKTEEFFRELIAKTPNGGKVVWSAHCHNDLGLAVANSLAALKGGARQVECTVNGLGERAGNASVEEIVMALKVRHDLFGLETGIDTTQIVPSSKLVSTITGYPVQPNKAIVGANAFSHESGIHQDGVLKHRETYEIMSAESVGWSANRLSLGKLSGRNAFKTKLADLGIELESEEALNAAFARFKELADKKREIFDEDLHALVSDEMGNMNTESYKFISQKISTETGEEPRADIVFSIKGEEKRASATGSGPVDAIFKAIESVAQSGATLQIYSVNAVTQGTESQGETSVRLARGNRVVNGQGADTDVLVATAKAYLSALSKLEFSAAKPKAQGSGTI

SEQ ID NO: 3153 - protein, 596 aa, Neisseria meningitidis
MELMTVLLLLAALLSGVLFTWLLMKSRFQGVLAVLNAQLAEKAARCDFVEQAHAEIASELAVLDGKYEHLQDENYALGNRFSAAEKQIAHLQEKEAESARLKQSYIELQEKAQGLAVENERLATQLGQERKAFADQYALERQIRQRVETDLEESRQTLRDVQNDLSDVGNRFAAAEKQIAHLQEKEAEAERLRQSHIDLQEKAQGLAVENERLATQIEQERLASEEKLSLLGEARKSLSDQFQNLANTILEEKSRRFTEQNREQLHQVLNPLNERIHGFGELVKQTYDKESRERLTLENELKRLQGLNAQLHSEAKALTNALTGTQNKVQGNWGEMILETVLENSGLQKGREYVVQAASVRKEEDGGTRRLQPDVLVNLPDNKQIVIDSKVSLTAYVRYTQAEDADAAARELAAHVASIRAHMKGLSLKDYTDLEGVNTLDFVFMFIPVEPAYLLALQHDAGLFQECFDKRIMLVGPSTLLATLRTVANIWRNEQQNQNALAIADEGGKLYDKFVGFAQTLESVGKSIDQAQSSFQTAFKQLAEGRGNLVGRAEKLRLLGVKAGKQLQRDLVERANEQTAFALGKPSEQEAADEAE

SEQ ID NO: 3154 - protein, 591 aa, Neisseria meningitidis
MSIVLHGVAAGKGIAVGCAHLIARGTEEVPQYDVAEADTDAEAERFDAAVKATRKELEQLRSAIPENAPTELGAFISLHLMLLTDVTLSREPVDILREQKINAEWALKQQSDKLAAQFDNMDDAYLRERKQDMLQVVRRIHNNLIGQGNELEVADNLFDETVLIANDLSPADTVLFKEQRIAAFVTDAGGPTGHTAILGRSLDIPSVVGLHNARKLITEGETVIVDGINGVLIIAPDESVLNEYRRRAREYRSHKRDLNKLKKTAAATADGVCIELVGNIESAEDVKPLHNLGADGIGLFRSEFLYLNRDTMPSEDEQYEVYNAIVKKMKGKSVTIRTVDLGVDKNPRWFGKNSTPNGSLNPALGMTGIRLCLAEPVMFRTQMRAILRAAVHGPVRMMWPMITSVSEVRQCLIHLDTAQRQLAERGDAFGKVGIGCMIEIPSAALTVGSILKLVDFISVGTNDLIQYILSVDRGDDSVSHLYQPGHPAVLKMLQHVIRTANRMDKDVSVCGEMAGDTAFTRILLGMGLRRFSMNPNNILPVKNIILHSNIAQLENEIAKIVRCEDEEKAEKLIKQMNSVSVEEEADFKGRK

SEQ ID NO: 3155 - protein, 449 aa, Neisseria meningitidis
MLNPSRKLVELVRILEEGGFIFSGDPVQATEALRRVDGSTEEKIIRRAEMIDRNRMLRETLERVRAGSFWLWVVAASMMFTAGFSGTYLLMDNQGLNFFLILAGVLGMNTLMLAVWLAMLFLRVKVGRFFSSPATWFRGKDPVNQAVLRLYADEWRQPSVRWKIGATSHSLWLCTLLGMLVSVLLLLLVRQYTFNWESTLLGDSSSVRLVEMLAWLPAKLGFPVPDARAVIEGRLNGNIADARAWSGLLVGSIACYGILPRLLAWVVCKILLKTSENGLDLEKPYYQAVIRRWQNKITDADTRRETVSAVSPKIILNDAPKWAVMLETEWQDGEWFEGRLAQEWLDKGVAANREQVAALETELKQKPAQLLIGVRAQTVPDRGVLRQIVRLSEAAQGGAVVQLLAEQGLSDDLSEKLEHWRNALAECGAAWLEPDRAAQEGRLKTNDRT

SEQ ID NO: 3156 - protein, 242 aa, Neisseria meningitidis
MGGKMSDKKYNVDEGEIAKFSRIADKWWDKSGEFKTLHDINPLRLDYIDGHADLCGKRVLDVGCGGGILAESMARRGAAFVKGIDMAEQSLETARLHAALNNVADIEYECIRVEDLAEAEPHSFDVVTCMEMMEHVPDPAAIVRACANLVKPDGMVFFSTINKNPKSYLHLIVAAEYLLKFVPKGTHDWKKFIAPAELARMCRQAGLDVADTKGMTYHVLSQTYALCDSTDVNYMFACRPAF

SEQ ID NO: 3157 - protein, 161 aa, Neisseria meningitidis
MSNKMEQKGFTLIEMMIVVAILGIISVIAIPSYQSYIEKGYQSQLYTEMVGINNISKQFILKNPLDDNQTIKSKLEIFVSGYKMNPKIAEKYNVSVHFVNKEKPRAYSLVGVPKTGTGYTLSVWMNSVGDGYKCRDAASARAYSETLSADAGCEAFSNRKK

SEQ ID NO: 3158 - protein, 461 aa, Neisseria meningitidis
MDGWTQTLSAQTLLGISAAAIILILILIVKFRIHALLTLVIVSLLTALATGLPTGSIVNDILVKNFGGTLGGVALLVGLGAMLGRLVETSGGAQSLADALIRMFGEKRAPFALGVASLIFGFPIFFDAGLIVMLPIVFATARRMKQDVLPFALASIGAFSVMHVFLPPHPGPIAASEFYGANIGQVLILGLPTAFITWYFSGYMLGKVLGRTIHVPVPELLSGGTQDNDLPKEPAKAGTVVAIMLIPMLLIFLNTGVSALISEKLVSADETWVQTAKIIGSTPIALLISVLVALFVLGRKRGESGSALEKTVDGALAPVCSVILITGAGGMFGGVLRASGIGKALADSMADLGIPVLLGCFLVALALRIAQGSATVALTTAAALMAPAVAAAGFTDWQLACIVLATAAGSVGCSHFNDSGFWLVGRLLDMDVPTTLKTWTVNQTLIALIGFALSALLFAIV

SEQ ID NO: 3159 - protein, 371 aa, Neisseria meningitidis
MKVGFVGWRGMVGSVLMQRMKEENDFAHIPEAFFFTTSNVGGAAPDFGQAAKTLLDANNVAELAKMDIIVTCQGGDYTKSVFQALRDSGWNGYWIDAASSLRMKDDAIIVLDPVNRNVIDNGLKNGVKNYIGGNCTVSLMLMALGGLFQNDLVEWATSMTYQAASGAGAKNMRELISGMGAVHAQVADELADPAGSILDIDRKVSDFLRSEDYPKANFGVPLAGSLIPWIDVDLGNGQSKEEWKGGAETNKILGRSDNPTVIDGLCVRIGSMRCHSQALTLKLKKDLPISEIEAILAGANDWVKVIPNEKEASIRELTPAKVTGTLSVPVGRIRKLGMGGEYISAFTVGDQLLWGAAEPLRRVLRIVLGSL

SEQ ID NO: 3160 - protein, 208 aa, Neisseria meningitidis
MADMKRLKHLMFSPFIDNNPIALQVLGICSALAVTTKLQTAIVMGISVALVTGFSSFFISLVRNYIPNSIRIIVQMAIIASLVTLVDQLLQAFAYELSKQLSVFVGLIITNCIVMGRAEAFAMKEPPLESLIDGIGNGAGYGMMLLVVATVRELIGSGKLLGYTVFQTVQDGGWYQTNGLFLLAPSAFFIIGFLIWGLRTWKPEQAEE

SEQ ID NO: 3161 - protein, 249 aa, Neisseria meningitidis
LPSEVSAWDILQKMRGGRPDSVTVQIIEGSRFSHMRKVIDATPDIEHDTKGWSNEKLMAEVAPDAFSGNPEGQFFPDSYEIDAGGSDLRIYQTAYKAMQRRLNEAWESRQDGLPYKNPYEMLIMASLVEKETGHEADRDHVASVFVNRLKIGMRLQTDPSVIYGMGAAYKGKIRKADLRRDTPYNTYTRGGLPPTPIALPGKAALDAAAHPSGEKYLYFVSKMDGTGLSQFSHDLTEHNAAVRKYILKK

SEQ ID NO: 3162 - protein, 387 aa, Neisseria meningitidis; identical to SEQ ID NO: 30

SEQ ID NO: 3163 - protein, 103 aa, Neisseria meningitidis; identical to SEQ ID NO: 2233

SEQ ID NO: 3164 - protein, 160 aa, Neisseria meningitidis; identical to SEQ ID NO: 515

SEQ ID NO: 3165 - protein, 43 aa, Neisseria meningitidis
MRVLLVEDDAMIAEAVSASLKDGGYAVDWVKNGARLPLPSLMT

SEQ ID NO: 3166 - protein, 391 aa, Neisseria meningitidis; identical to SEQ ID NO: 2334

SEQ ID NO: 3167 - protein, 69 aa, Neisseria meningitidis
MKSKFVYKLLVLAKYLYILICISIPIVFIYESYQGDDVDFMIYIRAFIIFSILGVLAQYSMSNFFGKEK

SEQ ID NO: 3168 - protein, 252 aa, Neisseria meningitidis
MITIRNVSYRIGTRPILDNVSLDIPEGGITALVGPNGAGKSTLFSFMARLRPLESGSIAYRGKNLADTPTAELAKTLSILTQENSIMSRITVRDLLMFGRYPYHQGRPTAECRRIVNGAIEEFHLQDLSDRYLTELSGGQRQRAMIAMVFCQSTDYVLLDEPLNNLDMYHARSLMQILRRLTDEHKRTTVVVLHDINQAAAYADHVVAMKNGQVAMQGKPNDIFTAANIKTLFDMDVDVLDYEGKKLVIHHI

SEQ ID NO: 3169 - protein, 230 aa, Neisseria meningitidis
MKLIKYLQYQGIGSRKQCQWLIAGGYVFINGTCMDDTDADIDSSSVETLDIDGEAVTVVPEPYFYIMLNKPEDYETSHKPKHYRSVFSLFPDNMRNIDMQAVGRLDADTTGVLLITNDGKLNHNLTSPSRKIPKLYEVTLKHPTGETLCETLKNGVLLHDENETVCAADAVLENPTTLLLTITEGKYHQVKRMIAAVGNRVQHLHRRRFAHLETENLKPGEWKFIDCPKF

SEQ ID NO: 3170 - protein, 236 aa, Neisseria meningitidis
VKRGGSEQGTWLHPKLAIHFARWLNPKFAVWCDEQIEILLNGKISDGIKTVTPKPTRALPDGLTGEQIEAVKKLHNALTKSAPKEAQARIAITLWSAVKSKFGCSYKEVPAEQFPEVLSVMSRVAVENGVLYGEVLDREPLPAPQPALPISGNALYDLAVAVRYGAWAIQMGRDVSLPLKQLGCKQAVTMWTVWAETRSRLKAAANALEALNAHADAEHAAKIRPMLPEIRNLSSV

SEQ ID NO: 3171 - protein, 84 aa, Neisseria meningitidis
MNKLFITALSALALSACAGTWEGAKQDTARNLDKTQAAAERAAEQTGNAVEKGWDKTKEAVKKGGNAVGRGISHLGGKIENATE

SEQ ID NO: 3172 - protein, 125 aa, Neisseria meningitidis
VNKTLILVLSALFSLTACSVERVSLFPSYKLKIIQGNELEPRAVAALRPGMTKDQVLLLLGSPMLRDAFHTDRWDYTFNTSRNGIIKERSNLTVYFENGVLVRAEGDALQNAAEALRAKQNADKQ

SEQ ID NO: 3173 - protein, 370 aa, Neisseria meningitidis
MQTAARRSFDYDMPLIQTPTSACQIRQAWAKVADTPDRETAGRLKDEIKALLKEKNAVLVAHYYVDPLIQDLALETGGCVGDSLEMARFGAEHEADTLVVAGVRFMGESAKILCPEKTVLMPDLEAECSLDLGCPEEAFSAFCDQHPDRTVVVYANTSAAVKARADWVVTSSVALEIVSYLKSRGEKLIWGPDRHLGDYICRETGADMLLWQGSCIVHNEFKGQELAALKAEHPDAVVLVHPESPQSVIELGDVVGSTSKLLKAAVSRPEKKFIVATDLGILHEMQKQAPDKEFIAAPTAGNGGSCKSCAFCPWMAMNSLGGIKYALTSGRNEILLDRKLGEAAKLPLQRMLDFAAGLKRGDVFNGMGPA

SEQ ID NO: 3174 - protein, 545 aa, Neisseria meningitidis
  misc_feature 2, 3, 4: 'Xaa' is any amino acid
VXXXQASHAGFVLNAGQRQASDEIQTALGRFQPFLLYGITGSGKTEVYFDAMAKVLAQGRQVLFLLPEINLTPQLLKRVENRFADVPTAVLHSRMAAGKRTQDYLRAMSGQAKLVIGTRLAVFTPMDDVGLIVVDEEHDGSFKQDNELRYHARDLAVWRAKQGGCPVVLGSATPSLESWHKAQSGAYRLLQLTERAHAAAQLPQVEILNAGRLKLDNGFSPQALQLLKQNFEAGGMSLVYLNRRGFAPALFCGDCGHTFGCPNCSAKMVLHQRARQLRCHHCDHREPVPFKCPDCGNQDLTAVGHGTQRVEETLRAFLPKAAVVRVDRDSTAHKNDWADLYRRIADNEIDILVGTQMLAKGHDFARLNLVIVLNADGSLYSADFRAPERLFAELMQVSGRAGRADKPGKVLIQTQLPEHPVFAAVKAQDYAVFAENELNERQMFAMPPFGFQTAVRADAPRVADAMEFLNAAKETLAPLLPESVSQFGAAPMLMVRLAERERAQIFLESVSRQDLHRAVSLWVQVLQQNRDSKIRWSVDVDPQEA

SEQ ID NO: 3175 - protein, 217 aa, Neisseria meningitidis; identical to SEQ ID NO: 115

SEQ ID NO: 3176 - protein, 214 aa, Neisseria meningitidis
MTLGLVGRKVGMTRVFDEQGVSVPVTVLDMSANRVTQVKSKDTDGYTAVQVTFGQKKANRVNKAEAGHFAKAGVEAGRGLIEFALTEEKLAELKAGDEITVSMFEVGQLVDVTGTSKGKGFSGTIKRHNFGAQRTSHGNSRSHRVPGSIGMAQDPGRVFPGKRMAGQYGNTKATVQKLEVVRVDAERQLLLVKGAVPGAVNSDVVVRPSVKVGA

SEQ ID NO: 3177 - protein, 384 aa, Neisseria meningitidis
MDTHADETKLQNTQAKRKRRLTALTLLFALAAAAAGSAFFLWWQHEEETEDAYVAGRVVQVTPQKGGTVRKVLHDDTDAVKKGDVLAVLDDDNDVLAYERAKNELIQAVRQNRRQNAATSQAGAQVALRRADLARAQDDLRRRSALAESGAVSAEELAHARAAVSQAQAAVKAALAEESSARAALGGQVSLREQPAVQTAIGRLKDAWLNLQRTQIRAPADGQVAKRSVQVGQQVAAGAPLMAVVPLSDVWVDANFKETQLRHMKIGQPAELVSDLYGKQIVYRGRVAGFSAGTGSAFSLIPAQNATGNWIKVVQRVPVRIVLNREDVDRHPLRIGLSMTVKVDTSAAGAPVSKTPGAALPEMESTDWSEVDRTVDEILGQSAP

SEQ ID NO: 3178 - protein, 102 aa, Neisseria meningitidis; identical to SEQ ID NO: 254

SEQ ID NO: 3179 - protein, 753 aa, Neisseria meningitidis; identical to SEQ ID NO: 2818

SEQ ID NO: 3180 - protein, 244 aa, Neisseria meningitidis
  misc_feature 2, 3, 4: 'Xaa' is any amino acid
VXXXFVSVTYGANSGERDRTHGIVKRIKQETGLEAAPHLTGIDASPDELRQIAKDYWDSGIRRIVALRGDEPPGYEKKPFYAEDLVKLLRSVADFDISVAAYPEVHPEAKSAQADLINLKRKIDAGANHVITQFFFDVERYLRFRDRCVMLGIDVEIVPGILPVTNFKQLGKMAQVTNVKIPSWLSQMYEGLDDDQGTRNLVAASIAIDMVKVLSREGVKDFHFYTLNRSELTYAICHILGVRP

SEQ ID NO: 3181 - protein, 548 aa, Neisseria meningitidis
MSEEKLKMSFEPTVIEHLGVKMYSHTVPAIAELIANAYDACATEVEVRLFDKPEHKIVIKDNGIGMSFDEINDFYLRIGRNRREEKQASPCGRIPTGKKGLGKLALFGLGNKIEISTIQGNERVTFTLDYAEIKKSERIYQPEFQKESVEPNTENGTTITLTELTKKQGYPLDNYVEHLSRLFDFPAQDFKIKVSLNGSEPKIIDGNLKYDLVTPQFEWEYQDLATNISSLSSKFEQYEYSGLIQGKFITTEKPLKNNMKGITLFANGRMVNMPEFFTDSESSHFYSYLTGWLSIDFIDNDDEDLIATDRTSLDWKHPKTSKLRVFLGEIVRAIGQDWRKRRKKEKDDEVKGESGVDIENWKNKLPEKEREPVEVILNRLEDSELTNKEQAEVISALHSIIPEYPYYHWRHLHQDLHTACNDFYNEKKDYLSAAIEAVKVFENKVQKQTGLHSIDGRELIEQAFGSKNSILLLTNNKTKAEQNLEDGLEQLACGTWTGFRNPVQHELRANLSPSIFNDKDALDLISLVSYLLRKVEQTKKRSKVVSSK

SEQ ID NO: 3182 - protein, 41 aa, Neisseria meningitidis
MMVLSLKLGEKLSSYELESKKHKKEFQKGGAKDFLTEVFMM

SEQ ID NO: 3183 - protein, 119 aa, Neisseria meningitidis
MIRYLLIACGCISLLLGIIGIFLPLLPTTPFVLLSAACWAKASPRFHRWLHRHRYFGPMVHNWEQNGAVPRKAKIFAISMMTASCLIMFWQFPQRWWVGAVSSVFCSLVAIWMWRRPES

SEQ ID NO: 3184 - protein, 430 aa, Neisseria meningitidis; identical to SEQ ID NO: 2800

SEQ ID NO: 3185 - protein, 66 aa, Neisseria meningitidis
  misc_feature 2, 3: 'Xaa' is any amino acid
VXXKNRVYAVQTFDATAVGPILLLHTNGQDLKVLSAMKPIFQGTDMKYTVRSIIMIQKALLISAAV

SEQ ID NO: 3186 - protein, 258 aa, Neisseria meningitidis
MAKKFDKDSFSGTLIVVLAVSLICSVIVAGAVVGLKPIQEKQKLQDKQGYILSVAGLMDKDTDIGKTFAERIEQRVVDLATGEYVADAPKDFSARIAGKDPAQSIQIKPEDDLAGIKSRAKYTEVYLVKGEDGKIGQIILPMHGNGLWSVMYGFVAIQPDGNTINGITYYEQGETPGLGGEIGNPLWQQKFVGKKLFDGQGKLALHVGKGAGSDKEHGVDALSGASLTSKGVQGSFAYWFGENGYIPYLNKLKSAGAQ

SEQ ID NO: 3187 - protein, 332 aa, Neisseria meningitidis
MSENKHNEVLSGYEQLKRRNRRRLVTASCLVAASCILLAAALSSGPAEQTAGETSGVENKAAGAAQTPALKSAADKPQDLAGEDKPSAADSEISEPENVGAPLVLINDRLEDSNIKGLEASEKLQQAETAKTAPKQAKQRAAEKVPATADSTDTVAVEKPKRTAETKPQKAERTAKAKPKAKETKTAEKVADKPKTAAEKTKPDTAKSDSAVKEAKKADKAESKKTAEKDRSDGKKHETAQKTDKADKTKTAEKEKSGKKAAIQAGYAEKERALSLQRKMKAAGIDSTITEIMTDNGKVYRVKSSNYKNARDAERDLNKLRVHGIAGQVTNE

SEQ ID NO: 3188 - protein, 144 aa, Neisseria meningitidis
MEKFSNIAQLKDSGLKVTGPRLKILDLFETHAEEHLSAEDVYRILLEEGVEIGVATIYRVLTQFEQAGILQRHHFETGKAVYELDKGDHHDHIVCVKCGEVTEFHNPEIEALQDKIAEENGYRIVDHALYMYGVCSDCQAKGKR

SEQ ID NO: 3189 - protein, 119 aa, Neisseria meningitidis
METQEKKFVPASKQIPTVNSGWLDRELGEAMSEAVRACLAHGKQSEITVKLKIQPQNIQSGTVKISHDVATKLPKEKREGGIVFATPDGNIQADDPAQGKLKLKQVPNTSSTLKMVRSN

SEQ ID NO: 3190 - protein, 273 aa, Neisseria meningitidis
MDFLIVLKALMMGLVEGFTEFLPISSTGHLIVFGNLIDFHSNHKVFEIAIQLGAVLAVVFEYRQRFSNVLHGVGKDRKANRFVLNLAIAFIPAAVMGLLFGKQIKEHLFNPLSVAVMLVLGGFFILWVEKRQSRAEPKIADVDALRPIDALMIGVAQVFALVPGTSRSGSTIMGGMLWGIERKTATEFSFFLAVPMMVAATAYDVLKHYRFFTLHDVGLILIGFIAAFVSGLVAVKALLKFVSKKNYIPFAYYRIVFGIVIIILWLSGWISWE

SEQ ID NO: 3191 - protein, 347 aa, Neisseria meningitidis
MSKKIKVGIVGATGYTGVELLRLLAAHPDVEVAAVTSRSEAGTAVADYFPSLRGVYGLAFQTPDEAGLEQCDIVFFATPNGIAMKDALRLLEQGVRVIDLSADFRIRDIPTWEHWYGMTHAAPGLVSQAVYGLSELNREAVAQARLVANPGCYPTCVSLPLVPLLRQCRLKPGMPLIADCKSGVSGAGRKGNVGSLLCEAGDNFKAYGIAGHRHLPEIRQTIAGLQDGIAEGFVFTPHLAPMIRGMHATVYLHLSDGSNPETVLRDYYRDSLFVDILPAGSTPETRSVRGANLCRISIQQAAQSDVWVVLSVIDNLVKGAAGQAVQNMNIMFGLKETHGLDAIPLLP

SEQ ID NO: 3192 - protein, 324 aa, Neisseria meningitidis
MTEYPGIGSPLFYGVFFAAVLVMIALDMFSLKKNGSHKVGVKEALAWSGLWVAVSCLFAGWLYFELAGNLGYGAAVAKEKVLEFFTGYILEKSLAVDNIFVFLMIFGYFKVAPQFQHRVLLYGVLGALVLRTVMIFVGAALVRQFEWILYLFGAFLLYTGIHMMKPEGDEEEDLANSRLLNAVKKVVPVGTEFHGEKFFTVENGKKIATPLFLVLVMIELSDVVFAVDSIPAVFAVTTDPFIVLTSNIFAILGLRAMYFLLADVAERFIFLKYGLAFVLGFIGVKMLVMHWVHIPISVSLSVVFGALGASILTSLIYTKKQPDK

SEQ ID NO: 3193 - protein, 287 aa, Neisseria meningitidis
MKTLLPFFGVVRVSGEDRQTFLHGQLSNDINNLQTGQACYATYNTPKGRVIANMIVVNRGGDLLLIMAQDLLEATIKRLRMFVLRAKVVFEILEDYAVDAELEASAEPLAAQEPSLVFTAECVSDGICTVVLPHRGILHIAPKNALPPYDAAAENAWRLHEIRSGYPWICAATKETAVAQMLNQHIIGGVHFKKGCYPGQEIIARAQYRGQVKRGLAVLSGNSAAEAGILLAADGEEAGIVLDSVQDSENFTALAVIKFSAAQKELTVPNGGIFKAVHLFFKTENAE

SEQ ID NO: 3194 - protein, 259 aa, Neisseria meningitidis
MHIIDSHCHLNFEGLKERLPEVLSNMEANGVGQALAISVSRESFSEVFAIAEAHEHIYCTIGVHPDSKEAEEFSVAEMVEAAAHPKVVGIGETGLDYYWCKGDLSWQHKRFADHIEAANQTGLPVIVHTRDAAADTLSILKECRVNSGVIHCFSEDIGFARAAMDFGLYISFSGIVTFKNAPLVQEAAKYVPDDRILVETDAPFLAPVPKRGRQNEPAFVRHTAEHIAKLRDQTLEQVAAYTTENFYRLFQKVPDMRAV

SEQ ID NO: 3195 - protein, 162 aa, Neisseria meningitidis; identical to SEQ ID NO: 911

SEQ ID NO: 3196 - protein, 80 aa, Neisseria meningitidis
MTYRELVERQLAVRHADLELGLSRAREQEPFVIHVSDLLDKAGIEYAVRMDKDFQTTFCVAFSATAPADVIGILRKYYSV

SEQ ID NO: 3197 - protein, 380 aa, Neisseria meningitidis
MKVFKQQLEQLGAQNQYRSIPDLIHQGRYITRENRKMLNMSSNDYLGLASDENLRRSFLQQYGGNFPSFTSSSSRLLTGNFPIYTDLEELVAQRFQRESALLFNSGYHANLGILPALTTTKSLILADKFVHASMIDGIRLSRCAFFRYRHNDYEHLKNLLEKNVGKFDRTFIVTESVFSMDGDVADLKQLVQLKKQFPNTYLYVDEAHAIGVYGQNGLGIAERDNLIAEIDLLVGTFGKALASVGAYAVCNQVLKECLINQMRPLIFSTALPPFNVAWTYFIFERLPQFSKERSHLEQLSAFLRREVAHRTQIMPSQTCIVPYILGGNEATLAKAEYLQRQGYYCLPIRPPTVPKGTSRIRLSLTADMTMDEVRQFAACL

SEQ ID NO: 3198 - protein, 862 aa, Neisseria meningitidis
MKNQYSKSLHGVFYLAFYDKIHAFFAEQLFQLIINMNKKPTYISLFSSAGVGCYGFKTNGFECVATNELLEKRLKIQKYNQKCRFDSGYIAGDITLPETQAKLFAEIRRWNTEIDVVIATPPCQGMSVANHKKNNEMARNSLVVESIKIVREVQPKFFIFENVKAFLNTPCTDTDHQEKPIEEAIWSNLGGHYNILSNVLNFKDYGANSSRTRTLVIGVRKDIHHITPYDIFPKQTPPKTLRTLLADLPPLMQMGEISDDDIYHSYREFDRRMLPWIAQLKEGESAFQNTDPARIPHQIKNGKIIYNQNKNGDKYARWFLDREGPCIHTRNDILASQNTIHPTENRVFSVRELMRMMSIPPSFKWTAQDEKQLNALSFDEKKTFLKKEELNIRHCIGESVPTAVLANVAQNIQAALQQSELSMTEIQNLIKRENLSLADNLYRFIEQHFDTYPFSRLLQIAEYANAARSETAAYFTRIDIAFGLVNALPDFKKKKNLRILEPSVGIGNFIPLLAKKYADKEKVIFDLVDIDSNSLNLLSLLLKKLNLGSKFEFNIIHQDFLTATLPENYDLVIGNPPYGKVKASDKNLALYRKNATNKDTQNIFSFFIDKALTLSKTVALVVPKSVINAPEFQITRQQLITANINRIIDYGEKAFKGVKIETIAFIADQTDKDNQHITIESHIQETLIQNCKNYFFSDNFPYWLIYRNSEFDQIAQKLEFNVFQSFRDRQITKAHTQNSGNVRVLKSRNIGNNEIIDIEGYDSYVDSVAPFSVGKFINRKNVVMIPNLTYKPRAAFLPENSIADGSVALLTMKKHEKILTQRDLAYYATPEFEQFYRVARNYGSRSMNIDNHSVFFFGLLKD

SEQ ID NO: 3199 - protein, 570 aa, Neisseria meningitidis
MKASQFFISTLKEAPAEAALASHKLMIRAGLIKANASGLYTWMPMGLRVLRKVENVVREEMARAGSVELLMPVVQPAELWQESGRWEFYGKELLRLKDRHDRDFCMGPTCEEVIADIVRKEINSYKQLPKNFYHIQTKFRDEVRPRFGVMRAREFVMKDAYSFHADYASLQTTYDAMYDSYCRIFTRLGLAFRPVAADTGSIGGTGSHEFQVLAESGEDVIAYSDTSDYAANIELAPTLPLKGERAAAQAVLTKVHTPNVKTIESLVEFLNIPVEQTLKSIVVEGENEGEIVLLLLRGDHEFNDIKAEKLAGVRSPLTMASPAAIVEQFGANGGSLGPVSFAGKVYADFATEKGADWVIGANEDGYHYTGFNFGRDAAEPEFVDLRNVVEGDESPDGQGRLKLARGIEVGHVFQLRDKYTQAMNVSFLDNNGKSQIMEMGCYGIGITRVVAAAIEQNNDEKGIIWTKAMAPFEVVIVPMNYKKSDTVREAADKIYAELLAAGADVLLDDRDERAGVLLNDSELLGIPHRIVIGDRALKEGNVEYAERRNNEAQAVAIGEIVARVTASLNG

SEQ ID NO: 3200 - protein, 311 aa, Neisseria meningitidis
MELFKIKRDIPFMSYGKLTTFISLVTFIAAVFFLVTRGLNFSVEFTGGTVMEVQYQQGADVNKMRERLDTLKIGDVQVQALGTNKHIMIRLPNKEGVTSAQLSNQVMDLLKKDSPDVTLRQVEFIGPQVGEELVSNGLMALGFVAIGIIIYLSMRFEWRFAVSAIIANMHDIVIILGCFAFFQWEFSLTVLAGILAVLGYSVNESVVVFDRIRENFRKPAMRGHAVPEVIDNAITATMSRTIITHGSTEAMVVSMLVFGGAALHGFSMALTIGIVFGIYSSVLVASPLLLMFGLSRDNIAKEAKQKEEIVV

SEQ ID NO: 3201 - protein, 113 aa, Neisseria meningitidis; identical to SEQ ID NO: 118

SEQ ID NO: 3202 - protein, 240 aa, Neisseria meningitidis
MDKDKGSYAGIPVQNTKELVWQKIQDIPISECGEPLVSVGNTGRIRVNPVYFSQGIEGAINSVLLRRSVADRLTQVVSLLPEVYGLEIFDGWRPVIVQRALRENMKQEIEKRHPEYDEVQVREALDCFAADPDRAGMPLPHLTGGSVDVGLFDIKSGKSLDMGSEFDATGHLSYSDALEKEGEYFSSARNLRRILIHAMKEAGFSNLPTEWWHFDYGNQNWAYFTQQSNAVFGAVEEQDT

SEQ ID NO: 3203 - protein, 133 aa, Neisseria meningitidis
VKIKPLQFSNNNHRFYVDKICVTEQDVNILASDRNYELNIEIFIDNIIHFQITDESYKVKFSEYLFENKEKNDWDRNPAINYFFEIIDDSYMDWLKEESFGFFEKKYYKAYIFFFSDSVIEVISSTEPVFYSK

SEQ ID NO: 3204 - protein, 284 aa, Neisseria meningitidis
  misc_feature 279, 280: 'Xaa' is any amino acid
MRILLTGSKSQLARCLRDRLPEDWETIATDSASLDITDADAVCNMVKSFQPDAIVNTAAYTAVDKAEGNAAAAFAVNASAVYNLALAAHRAHARFIHISTDYIFDGKGKRPYQESDFTNPSNVYGQSKTAGELLALSANPDSLILRTSWLFSEYGDNFVRTMLNLARERSPLSAVHNQIGCPTYAGDLAAAIIRLLQQTSPVRGIYHYAGGKSVSWYEFAQHIFQAASQQQTSFPVPELTAVSDKEYPTAAPRPAYSILDCRKIENDFSIKPSDWQKAXXHTLN

SEQ ID NO: 3205 - protein, 177 aa, Neisseria meningitidis
  misc_feature 173, 174, 175: 'Xaa' is any amino acid
MQNTSFDNESDYSDDSDFASASETENRIGLTVPLELAGGRLDAVLAKLLPDYSRSRLTLWIKEGAVIVNDKPSQPKDKMIGGEQIRVTVRPSEENLAFVPEPMALDIVYEDDTVIVVNKPAGLVVHPAAGNWEGDAAQRPVGALSRIEPSTACSIVHRLDKETSGLMVVAKTXXXHT

SEQ ID NO: 3206 - protein, 218 aa, Neisseria meningitidis
MDFEKARFNMVEQQIRPWDVLDFDVLDALAEIPRELFVDEDLQGLAYADMALPLANGHKMLEPKVVARLAQGLKLTKNDTVLEIGTGSGYATALLAKLAGRVVSDDIDAEQQNRAKAVLDGLGLDNIDYVQNNGLTELSAGAPFDAVYVGGAVNLVPEVLKEQLKDGGRMVVIVGRKPVQRALLITRKGDVFEEKVLFDTLVAHLDDKDADPFGGFQF

SEQ ID NO: 3207 - protein, 284 aa, Neisseria meningitidis
MKIVLISGLSGSGKSVALRQMEDSGYFCVDNLPLEMLPSLVSYHIERADETELAVSVDVRSGIDIGQAREQIAYLRGLGHRVEVLFVEAEESVLVRRFSETRRGHPLSNQDMTLLESLKKEREWLFPLKEIAYCIDTSKMNAQQLRHAVRQWLKVERTGLLVILESFGFKYGVPNNADFMFDMRSLPNPYYDPELRPYTGMDKPVWDYLDGQPLVQEMVDDIERFVTHWLPRLEDESRSYVTVAIGCTGGQHRSVYVVEKLARRLKGRYELLIRHRQAQNLSDR

SEQ ID NO: 3208 - protein, 302 aa, Neisseria meningitidis
MNQTAINRADVRTRFIFDDMPVRGLHVRLENVWQHIVKQKNYPAAIRRALGELLAAGVLLSGNLKNEGTLIVQVQGRGRLKMLVAEAASDRTVRATARWDETAEIADDESLGDLLGEGGVFVLTLQPKDGEPWQGVVPLEGGGIAQMLANYMKRSEQIDTHIVLSASDEAAGGLLVQRLPEAVLDEEAWEHVSTLARTLTADELAELDAQHVLYRLFHETPPRVFEPETFEFSCTCSRGKVSDMLLMLGGEEVGGVVVEQGSIEVDCDFCHSKYVFDETDVNALFGEDVVGVAKGLPRHTVQ

SEQ ID NO: 3209 - protein, 126 aa, Neisseria meningitidis
  misc_feature 121, 122: 'Xaa' is any amino acid
MAVRSKSSKAWLHEHVNDHYVHMAQKDGYRARAAYKLLEINEKDKLIKPGTVLADLGSAPGSWSQVAAKLTGTSGAVFALDILPMEAIGGVSFIQGDFRENDVLAQFETLLDNRPLDLVIXXHTLN

SEQ ID NO: 3210 - protein, 239 aa, Neisseria meningitidis
MTQQIKYKRVLLKLSGESLMGSDPFGINHDTIVQTVGEIAEVVKMGVQVGIVVGGGNIFRGVSAQAGSMDRATADYMGMMATVMNALALKDAFETLGIKARVQSALSMQQIAETYARPKAIQYLEEGKVVIFAAGTGNPFFTTDTAAALRGAEMNCDVMLKATNVDGVYTADPKKDPSATRYETITFDEALNKNLKVMDATAFALCRERKLNIVVFGIAKEGSLKRVITGEDEGTLVHC

SEQ ID NO: 3211 - protein, 273 aa, Neisseria meningitidis
MMRIFSTGGKMDTQAVITHIVRWLDEYAARANAKGFVVGVSGGIDSAVVSALAARTGRTTLLLDMPIRQHPDQLERARLHIRNLQRQYANVSAQTVDLTDTFQTFEQTVGVHQTAFDNQPLSLANARSRLRMLTLYYYGQIHGLLVTGTGNKIEDFGVGFFTKYGDGGVDISPIADLTKTQVYRLAEALGVDEAIQKAPPTDGLWDTERTDEEQMGASYPELEWAMGMYGTRKPEDFEGRQREVLEIYTRLHRAMQHKINPIPVCRIPPELLG

SEQ ID NO: 3212 - protein, 200 aa, Neisseria meningitidis
MFNIPAVAVSYLIGSLSFAVIVSKYYGMDDPRTYGSGNPGATNVLRSGKKKAAALTLLGDAAKGLIAVLLARVLQEPLGLSDSAIAAVALAALVGHMWPVFFGFKGGKGVATALGVLLALSPATALVCALIWLVMAFGFKVSSLAALTATIAAPLAALFFMPHLSWIWATLLIALLVLFRHKSNISNLLKGKEGKIGEKR

SEQ ID NO: 3213 - protein, 55 aa, Neisseria meningitidis
VAQPRTRCWVCRLRLAAAETPEEKAKDAAEEAKEEAKDAAEDAKEAAEDAKEEAK

SEQ ID NO: 3214 - protein, 477 aa, Neisseria meningitidis
MDTQTYNYKVVRQFAIMTVVWGIVGMLVGVIVAAQLFAPALDLSNIGPWFHFGRLRPLHTNAVIFAFGGCGLIGTSYYVVQRTCNTRLFGGWLPAFTFWGWQAVIVAAVVSFPMGWTQGKEYAELEWPIDILITLVWVAYAIVFFGTIAKRKIKHIYVANWFYGGFILAVALLHIVNNISIPAGLMKSYPVYSGAIDAMVQWWYGHNAVGFFLTAGFLGMMYYFVPKQAARPVYSYRLSVVHFWALIFTYMWAGPHHLHYTALPDWTQSLGMVLSLILFAPSWGGMINGIMTLSGAWDKLRTDPILKFLIVSLSFYGMSTFEGPMMSIKTVNALSHYTDWTVAHVHAGALGWVGFVTIGSVYYMIPRLFGKEQMHSTKLVEAHFWIATIGVVLYIAAMWIAGVMQGLMWSSLNDDGTLTYSFVESVKRTMPYYVIRFAGGLLYLSGMCIMAYNVYRTAIGGKAVDAEIPAVSQTQHH

SEQ ID NO: 3215 - protein, 228 aa, Neisseria meningitidis; identical to SEQ ID NO: 445

SEQ ID NO: 3216 - protein, 303 aa, Neisseria meningitidis
MDTLFSLKVFRQVVQSGGFTRAAGALGISTAMASKHVSHLENTVQAKLLHRNSRNLSLTEAGEEYYRQCSYALDTLDDAAQKAAGGTEKPQGLLRVTMPLWFAGSQICNWLAEYRERYPEVTLELILDNRHVDLIAEGVDLALRVSQTLSPSLIARPLAEIEFALLASPDFLRRNGVPETPEEVAGLPAVLPTYTNQQKLDLTRKSDGKKYRLELTPVIRTDNTLMMREMIKAGACIGYQPLWAAEHDLRCGTLVRLLPGYAVPTDRLNAVYADRAFLSAKVRSFIDFLNEKIASRKGCRNAV

SEQ ID NO: 3217 - protein, 122 aa, Neisseria meningitidis; identical to SEQ ID NO: 218

SEQ ID NO: 3218 - protein, 446 aa, Neisseria meningitidis
LHTLLAFIFAILILVSLHEFGHYIVARLCGVKVVRFSVGFGKPFFTRKRGDTEWCLAPIPLGGYVKMVDTREGEVSEADLPYAFDKQHPAKRIAIVAAGPLTNLALAVLLYGLSFSFGVTELRPYVGTVEPDTIAARAGFQSGDKIQSVNGTPVADWGSAQTEIVLNLEAGKVAVGVQTASGAQTVRTIDAAGTPEAGKIAKNQGYIGLMPFKITTVAGGVEKGSPAEKAGLKPGDRLTAADGKPITSWQEWANLTRQSPGKKITLNYERAGQTHTADIRPDTVEQSDHTLIGRVGLRPQPDRAWDAQIRRSYRPSVIRAFGMGWEKTVSHSWTTLKFFGKLISGNASVSHISGPLTIADIAGQSAELGLQSYLEFLALVSISLGVLNLLPVPVLDGGHLVFYTAEWIRGKPLGERVQNIGLRFGLALMILMMAVAFFNDVTRLLG

SEQ ID NO: 3219 - protein, 70 aa, Neisseria meningitidis; identical to SEQ ID NO: 232

SEQ ID NO: 3220 - protein, 311 aa, Neisseria meningitidis
MNPKKLVIASRESLLAMWQAKHIQGRLKALYPDCEVEILGMTTRGDQILDKTLSKVGGKGLFVKELEQALYDGRADLAVHSIKDVPMDLPEGFALAAIGERANPFDAFVSNQYARLEEMPKGAVVGTSSLRREAQLRARYPHLLIKPLRGNVQTRLSKLDNGEYDAIILAAAGLQRLKLDGRIRMILSESDSLPAAGQGALGIEIAAHREDLYEVLKPLNHDTTHACVTAERALARALGGSCQVPLAAYCTEENGLLTLRGLVGHPDGSVVLRADAQAPAEYADALGRAVAKKLADDGARELIGAVLNTEN

SEQ ID NO: 3221 - protein, 357 aa, Neisseria meningitidis; identical to SEQ ID NO: 2085

SEQ ID NO: 3222 - protein, 385 aa, Neisseria meningitidis
MKFATKAIHSSYDCDEHNRALMPPIYQNSMFALHEIGENVPYRYSRLSNPTRQILEDTVADLEHGAAGFAFSSGMAGIDAVWRTFLQPGDTIVAVADIYGGAYDLLVDVYQKWGVNVVFADLGNPDNLDELLKAHKVKLVWLETPSNPLLRLVDIKALAAKAKATGALVGIDNTFATPYLQQPLDMGCDFVFHSATKYLCGHSDVLMGIVVAKTKELAQPLHDMMVHTGAIAGPMDCWLVLRGIKTLALRMEAHCKNALEIARRLEDHPAIEKVFHPGLPSHEHYELAQAQMPKGIGGVVTVYLKNDTREAANSVIKNMKLVKMASSLGGVESLVNHCYSQSHSGVPHNVKMEMGIKVGLLRFSIGIEDADDIWNDISAALDTTL

SEQ ID NO: 3223 - protein, 233 aa, Neisseria meningitidis
MFRRHRHLKNMQIKKIMKWLPVALSLLGALGYTGYGSEAVRTAVAVLDVLGAAGDAGSDAPARRRASAKSGHRYTGTVSKVYDGDTLHVIDGDGAKHKIRMAYIDAPEMKQAYGTRSRDNLRAAAEGRKVSVRVFDTDRYQREVAQVSVGKTDLNLMQVQDGAAWHYKSYAKEQQDKADFADYADAQIQAERERKGLWKAKNPQAPWAYRRAGRSGGGNKDWMDAVGEWLGIW

SEQ ID NO: 3224 - protein, 332 aa, Neisseria meningitidis
MKIAIYGTKSYDREHFTRANRHFGFELEFFDFMLDAKTAKMAEGAEAVCIFVNDDGSRPVLEKLAQIGVKTVALRCAGFNNVDLKAAEELGLKVVRVPAYSPESVAEHTVGLMLTLNRRIHKAYQRTRDANFSLEGLTGFNMYGKTAGVIGTGKIGIATMRILKGFGMNLLAYDPFCNPEAEKIGGKYVDLDELYARSDIITLHCPATLENHYMLNEAAFDKMKDGVMIINTSRGGLIDSAAAIEALKRRKIGALGMDVYENERELFFEDKSNDVITDDVFRRLSSCHNVLFTGHQAFLTEEALGNISEVTLSNIREVGQTGDCGNAVRADG

SEQ ID NO: 3225 - protein, 271 aa, Neisseria meningitidis
  misc_feature 266, 267: 'Xaa' is any amino acid
MKLSIQKFMMLFAAAISLLQIPISHANGLDARLRDDMQAKHYEPGGKYHLFGDGRGSVKNRVYAVQTFDATAVGPILPITHERTGFEGVIGYETHFSGHGHEVHSPFDHHDSKSTSDFSGGVDGGFTVYQLHRTGSEIHPEDGYDGPQGSDYPPPGGARDIYSYYVKGTSTKTKTNIVPQAPFSDRWLKENAGAASGFFSRADEAGKLIWESDPNKNWWANRMDDVRGIVQGAVNPFLMGFQGLGVGAITDSAVNPVTYAAARKTXXHTLN

SEQ ID NO: 3226 - protein, 221 aa, Neisseria meningitidis
  misc_feature 217, 218, 219: 'Xaa' is any amino acid
MNLKLVFESGDPVLIGVFVLMLLMSIVTWCLVVLRCIKLYRARKGNAAVKRHMRDTLSLNDAVEKVRAVDAPLSKLAQEALQSYRNYRRNEASELAQALPLNEYLVIQIRNSMAQIMRRFDYGMTALASIGATAPFIGLFGTVWGIYHALINIGQSGQMSIAAVAGPIGEALVATAAGLFVAIPAVLAYNFLNRGTKILTQDLDAMAHDLHVRLLNXXXHT

SEQ ID NO: 3227 - protein, 68 aa, Neisseria meningitidis; identical to SEQ ID NO: 1421

SEQ ID NO: 3228 - protein, 145 aa, Neisseria meningitidis; identical to SEQ ID NO: 1767

SEQ ID NO: 3229 - protein, 475 aa, Neisseria meningitidis
MNENFTEWLHGWVGAINDPMWSYLVYMLLGTGLFFTVTTGFVQFRLFGRSIKEMLGGRKQGDDPHGITPFQAFVTGLASRVGVGNIAGVAIAIKVGGPGAVFWMWVTALIGMSSAFVESSLAQLFKVRDYDNHHFRGGPAYYITQGLGQKWLGVLFALSLIFCFGFVFEAVQTNTIADTVKAAWGWEPHYVGVALVILTAPIIFGGIRRISKAAEIVVPLMAVLYLFIALFIILTNIPMIPDVFGQIFSGAFKFDAAAGGLLGGLISQTMMMGIKRGLYSNEAGMGSAPNAAAAAEVKHPVSQGMIQMLGVFVDTIIVCSCTAFIILIYQQPYGDLSGAALTQAAIVSQVGQWGAGFLAVILFMFAFSTVIGNYAYAESNVQFIKSHWLITAVFRMLVLAWVYFGAVANVPLVWDMADMAMGIMAWINLVAILLLSPLAFMLLRDYTAKLKMGKDPEFKLSEHPGLKRRIKSDVW

SEQ ID NO: 3230 - protein, 221 aa, Neisseria meningitidis
MDSWFEDTAMGRYVAKLEQDFFGRYLDSYRFSGMCAVQVGGPWLSLSEDVVCVPRDMSMSAENMALADVSADMLLFPHTLEGGVPSQILSEAHRILKPCGRLMLTGFNPYSLWGFSRWFDGERLPEKRFCLPLPELKRQLADVGFDIEFGKFMVYLPPVSSLGQIRFWRFMEKAGDRWWPQCAAVYGLVLVKRAAGVTPLPAWDGYLGGKALAAGAARIAD

SEQ ID NO: 3231 - protein, 603 aa, Neisseria meningitidis
MKQIRNIAIIAHVDHGKTTLVDQLLRQSGTFRANQQVDERVMDSNDLEKERGITILAKNTAIDYEGYHINIVDTPGHADFGGEVERVLGMVDCVVLLVDAQEGPMPQTRFVTKKALALGLKPIVVINKIDKPSARPSWVIDQTFELFDNLGATDEQLDFPIVYASGLSGFAKLEETDESSDMRPLFDTILKHTPAPSGSADEPLQLQISQLDYDNYTGRLGIGRILNGRIKPGQTVAVMNHEQQIAQGRINQLLGFKGLERVPLEEAEAGDIVIISGIEDIGIGVTITDKDNPKGLPMLSVDEPTLTMDFMVNTSPLAGTEGKFVTSRQIRDRLQKELLTNVALRVEDTADADVFRVSGRGELHLTILLENMRREGYELAVGKPRVVYRDIDGQKCEPYENLTVDVPDDNQGAVMEELGRRRGELTNMESDGNGRTRLEYHIPARGLIGFQGEFMTLTRGVGLMSHVFDDYAPVKPDMPGRHNGVLVSQEQGEAVAYALWNLEDRGRMFVSPNDKIYEGMIIGIHSRDNDLVVNPLKGKKLTNIRASGTDEAVRLTTPIKLTLEGAVEFIDDDELVEITPQSIRLRKRYLSELERRRHFKKLD

SEQ ID NO: 3232 - protein, 140 aa, Neisseria meningitidis; identical to SEQ ID NO: 1122

SEQ ID NO: 3233 - protein, 255 aa, Neisseria meningitidis
MSSNKASFFTRLRRLCRLTVWLFKTGKNLRGIDGGCPESRNRAVIELGRGALTALDIGLEVGRPAPEHPNGVLVAANHVSWLDIFAMSAVYPSSFIAKQEIKSWPVLGKMGQNAGTVFINRNSRRDIEPINRAVYETLQRGQNVSFFPEARTSSGLGLLPFKAALFQSAIDAGAKVLAVALRYYDETGKRTARPSYADVGLPTCLWRIVSMKKLTIKVDFVCVADAAESEDRYALKDKIEESIRAVVADDADIAV

SEQ ID NO: 3234 - protein, 156 aa, Neisseria meningitidis
MTDTDTQADRFEQMMWQAVDKLFEQHDGKLESMDGREQELVLIWRAEADIGNGGILQFVCNWSFPAAEKTCSVLKKIGAVHSAMLIHRAADALGKEIRHLQSEGKNLKEMWDITQHLDNKTASLPNSLDEQYWQDPDKLYLPGWQYYSGNPVQTLF

SEQ ID NO: 3235 - protein, 171 aa, Neisseria meningitidis
MKIKQIVKPGLAVLAAGVLSACATKSNVKADGTTDNPVFPKPYSVTLDNNRGTFPTYDELDLMRPGLTKDDIYKILGRPHYDEGMYGVREWDYLFHFHTPGVGIDPENTSGVEGITTCQYKIIFDKDKFARSFYWNPVFPKDAACPPPAPKAEPQVIIREIVPAKPKRIRQ

SEQ ID NO: 3236 - protein, 103 aa, Neisseria meningitidis; identical to SEQ ID NO: 1278

SEQ ID NO: 3237 - protein, 60 aa, Neisseria meningitidis
MPTPPAALMVAPVRPNPPKDGKTATLLEHAAEFGGYVAELENQNQAWRDWAGNHSRKVGN

SEQ ID NO: 3238 - protein, 223 aa, Neisseria meningitidis; identical to SEQ ID NO: 3079

SEQ ID NO: 3239 - protein, 492 aa, Neisseria meningitidis
MFSKLTPLAETGIPTLSCANAAGRLLHSDSRQIKQGDIFVACPGEYADGRSYIPAAVANGAAFVFWDDDGKFAWNPEWKVPNQGIKDLKHRAGILAAQVYGNVSDGLKVWGVTGTNGKTSITQWLAQAADLLGEKTAIVGTVGNGFWGALEETTHTTPAPVDVQTLLYRFRQQGATVAAMEISSHGLDQSRVNGVSFRSAIFTNLTRDHLDYHGTMEAYGAIKSRLFYWHGLKHAVINVDDEYGAELAGRLKKDCPDLAVYSYGFSEHADIRITDFTASSDGIAAVFQTPWGEGKCRTRLLGRFNAQNLAACIALLCANGYPLDKVLDVLAKIRPASGRMDCIMNSGKPLVVVDYAHTPDALEKALATLQEIKPQGAALWCVFGCGGNRDRGKRLLMGAAAVQGADKVVVTSDNPRLENPHDIINDILPAVPAPECVEADRAAAIRYAVEQAAANDIILIAGKGHENYQDVQGVKHRFSDLEIVGQALLTRK

SEQ ID NO: 3240 - protein, 749 aa, Neisseria meningitidis
VPSKIESLARELSITEDEYVFFERRLKAMARDGQVLINRRGAVCAADKLDLVKCRVEAHKDGFGFAVPLTPAKDGDFVLYERQMRGIMHGDIVTVRPAGMDRRGRREGTVLDIVERSQSKVVGRFYMDRGVAILEPEDKRLNQSIVLEPDGVARFKPESGQVIVGEIEVYPEQNRPAVAKIIEVLGDYADSGMEIEIAVRKHHLPHQFSEACAKAVKKIPDHVRKSDLKGRVDLRDLPLVTIDGETARDFDDAVFAEKIGRNYRLVVAIADVSHYVRPDDAIDTDAQERSTSVYFPRRVIPMLPENLSNGICSLNPNVERLCMVCDMVITYAGNIKEYRFYPAVMRSHARLTYNQVWKWLSGGIGHPFKAQIDTLYKLFKILQKKRFERGAVEFDSIETQMLFDDNGKIEKIVPVVRNDAHKLIEECMLAANVCAADFLLKNKHTALFRNHLGPTPEKLAALREQFGLLGLQLGGGDNPSPKDYAALAGQFKGRPDAELLQVMMLRSMQQAVYEPHCDGHFGLAYEAYAHFTSPIRRYPDLTVHRAIKAVLNQQTYTPKKSWQALGVHTSFCERRADDASRDVENWLKTYYMRDKVGEIFEGKISGVANFGIFVTLDDIHIDGLVHISDLGEDYFNFRPEIMAIEGERSGIRFNMGDRVAIKVARADLDDGKIDFVLIAEGSGRGRKVKSSASAKPAGTAGKGKPKTAAGKKTARGGKVRGRGASAAAESGKKAKKPVPIKVKKRKGKS

SEQ ID NO: 3241 - protein, 314 aa, Neisseria meningitidis
  misc_feature 3, 4: 'Xaa' is any amino acid
VCXXTIVRGDTVYNISKRYHISQDDFRAWNGMTDNTLSIGQIVKVKPAGYAAPKAAAVKSRPAVPAAAQPPVQSAPVDINAATHTIVRGDTVYNISKRYHISQDDFRAWNGMTDNTLSIGQIVKVKPAGYAAPKTSAVESRPAVPAAVQTPVKPAAQPPVQSAPQPAAPAAENKAVPAPAPQSPAASPSGTRSVGGIVWQRPTQGKVVADFGGNNKGVDIAGNAGQPVLAAADGKVVYAGSGLRGYGNLVIIQHNSSFLTAYGHNQKLLVGEGQQVKRGQQVALMGNTDASRTQLHFEVRQNGKPVNPNSYIAF

SEQ ID NO: 3242 - protein, 95 aa, Neisseria meningitidis
MDDLIAAFLGYLSGKYSEGKISRLGISLTAGSIFFAVFFTHELIIFIVDGNKENLWNFITEMMKDLFLFSCSVCLLFYFLLFIAETIGKTINKIK

SEQ ID NO: 3243 - protein, 259 aa, Neisseria meningitidis
MNGIIIKTPEEIEKMRELGKLVAEALDYIGQFVKPGVTTDEIDKLVYDYHVNVQGGYPAPLHYGNPPYPKSCCTSVNHVICHGIPDDKPLKEGDIINIDLTIKKDGFHGDSSRMFTVGKVSPIAQRLIDVTHASMMAGIEAVKPGATLGDVGYACQQVAENAGYSVVQEFCGHGIGRGFHEAPQVLHYGKKGQGSVLKPGMIFTVEPMINQGKRHLRILNDGWTVVTKDRSLSAQWEHEVLVTETGYEILTVSPASGKP

SEQ ID NO: 3244 - protein, 261 aa, Neisseria meningitidis
MGFLQGKKILITGMISERSIAYGIAKACREQGADLAFTYVVDKLEERVRKMAAELDSELVFRCDVASDDEINQVFADLGKHWDGLDGLVHSIGFAPKEALSGDFLDSISREAFNTAHEISAYSLPALAKAARPMMRGRNSAIVALSYLGAVRAIPNYNVMGMAKASLEAGIRFTAACLGKEGIRCNGISAGPIKTLAASGIADFGKLLGHVAAHNPLRRNVTIEEVGNTAAFLLSDLSSGITGEITYVDGGYSINALSTEG

SEQ ID NO: 3245 - protein, 140 aa, Neisseria meningitidis
MRPIFLSFVLLPILITACSTPDKSARWENIGTISNGNIHTYINKDSVRKNGNLMIFQDKKVVTNLKQERFANTPAYKTAIAEWEIHCNNKTYRLSSLQLFDTKNTEISTQNYTASSLRPMSILSGTLTEKQYETVCGKKL

SEQ ID NO: 3246 - protein, 77 aa, Neisseria meningitidis
MNRRKIYLLSVALFTLAFMLLVLLGAYLLTVGSKAFAVASFLFAFGALFGQIGALALYLRHKSLRAAQSAAKENRYV

SEQ ID NO: 3247 - protein, 405 aa, Neisseria meningitidis; identical to SEQ ID NO: 157

SEQ ID NO: 3248 - protein, 258 aa, Neisseria meningitidis
MTLIHPTAVIDPKAELDSGVKVGAYTVIGPNVQIGANTEIGPHAVINGHTSIGENNRIFQFASLGEIPQDKKYRDEPTKLIIGNGNTIREFTTFNLGTVTGIGETRIGDDNWIMAYCHLAHDCVIGNHTIFANNASLAGHVTIGDYVVLGGYTLVFQFCHIGDYAMTAFAAGVHKDVPPYFMASGYRAEPAGLNSEGMRRNGFTAEQISAVKDVYKTLYHRGIPFEEAKADILRRAETQAELAVFRDFFAQSARGIIR

SEQ ID NO: 3249 - protein, 123 aa, Neisseria meningitidis
MRKPQRGYARQDRVKEQIMRELAELVRTRLKDPRAGFITVNEVEVTRDYSHATVFYTILNQDAREITEEVLEHARGHLRSELAKRIKLFKIPELHFKYDESLERGMNLSALIDQVAAEKPVED

SEQ ID NO: 3250 - protein, 161 aa, Neisseria meningitidis; identical to SEQ ID NO: 1189

SEQ ID NO: 3251 - protein, 701 aa, Neisseria meningitidis; identical to SEQ ID NO: 1407

SEQ ID NO: 3252 - protein, 421 aa, Neisseria meningitidis
MNTLQRRKTHQVRIDHITVGSEAPVVIQSMTNTDTADAKATALQIKELSDAGSEMVRITVNSPEAASKVAEIRRRLDDMGYATPLIGDFHFNGERLLAEFPECGKALSKYRINPGNVGKGVKGDEKFAFMIRTAAENDKAVRIGVNWGSLDQSLAKRMMDANLASSAPKPPEEVTKEALIVSALESAEKAVLLGLPEDKIILSCKVSAVQDLIQVYRELGSRCAYPLHLGLTEAGMGSKGIVASTAALSVLLQEGIGDTIRISLTPEPGSPRTQEVVVGQEILQTMGLRSFTPMVTACPGCGRTTSTVFQELAQDVQNYLRQKMSIWRTLYPGVESLNVAVMGCVVNGPGESKLADIGISLPGTGETPVAPVYVDGERKITLKGDNIATEFLAIVEEYVKTNYGENGSKRNQNKIIPIQSL

SEQ ID NO: 3253 - protein, 671 aa, Neisseria meningitidis
MKSYPDPYRHFENLDSAETQNFAAEANAETRARFLENDKARTLSDGILAQMQDTRQIPFCQEHRARMYHFHQDAEYPKGVYRVCAAATYRSGYPEWKILFSVADFDELLGDDVYLGGVSHLVEKPDRALLTLSKSGGDTAYTLEVDLEAGELVEGGFHFPAGKNQVSWRDENSVWVCPAWDERQLTESGYPREVWLVERGKSFEESLPVYQIDKDAMMVNAWRYLDPQGSPIDLIEASDGFYTKTYLQVSAEGEAKPLNLPNDCDVVGYLAGHLLLTLRKDWNRANQSYPSGALVAVKLNRGELGAAQLLFAPDETQALESVETTKRFVVASLLENVQGRLKAWRFADGKWQEVELPRLPSGALEMTDQPWGGDVVYLAAGDFTTPLTLFALDLNVMELTVMRRQPQQFDSDGIEVRQFWVMSSDGERIPYFHVGKNAAPDTPTLVYAYGGFGVPELPHYLGSIGKYWLEEGNAFVLANIRGGGEFGPRWHQAAQGISKHKSVDDLLAVVRDLSERGISSPQHIGLQGGSNGGLITAAAFVREPQSIGALVCEVPLTDMIRYPLLSAGSSWTDEYGNPQKYEVCKRRLGELSPYHNLSDGIDYPPALITTSLSDDRVHPAHALKFYAKLRETSPQSWLYSPDGGGHTGNGTQREAADELACVLLFLKEFLG

SEQ ID NO: 3254 - protein, 874 aa, Neisseria meningitidis
MKTSELRQKFLKFFETKGHTVVRSSSLVPHDDPTLLFTNAGMNQFKDVFLGFDKRPYSRATTAQKCVRAGGKHNDLENVGYTARHHTFFEMMGNFSFGDYFKRDAIHFAWEFLTSPEWLNIPKDKLLATVYAEDDEAYNIWLNEIGMPSERIVRIGDNKGAKYASDNFWQMGDTGPCGPCSEIFYDHGEEIWGGIPGSPEEDGDRWIEIWNCVFMQFNRDEQGNMNPLPKPSVDTGMGLERMAAVMQHVHSNYEIDLFQDLLKAVARETGAAFSMEEPSLKVIADHIRSCSFLIADGVLPSNEGRGYVLRRIIRRAVRHGYKLGQSKPFFHKLVADLVKEMGDAYPELKEKQVQIEEALKNEESRFAQTLETGMALLENALAKGSKKLDGEIIFKLYDTYGFPYDLTADICRERNIELDEAGFEREMEAQRARARAAQSFKANAQLPYDGQDTEFKGYSERQTESKVLALYKDGEQVDELNEGDSGAVVIDFTPFYAESGGQVGDVGYIFSGENRFEVRDTQKIKAAVFGQFGVQTSGRLKVGDSVTAKVDDEIRNANMRNHSATHLMHKALRDVLGRHVEQKGSLVTAESTRFDISHPQAVTAEEIAEVERRVNEAVLANVAVNAAIMSMEDAQKTGAMMLFGEKYGDEVRVLQMGGFSTELCGGTHVSRTGDIGLFKIISEGGIAAGVRRIEAITGLNALKWAQEQERLVKDIIAETKAQTEKDVLAKIQAGAAHAKALEKELARAKAELAVHAGAKLLDDAKDLGAAKLVAAQIEADAAALREIVTDLTGKSDNAVILLAAVNDGKVSLCAGVSKALTGKVKAGDLVKFAAEQVGGKGGGRPDLAQAGGTDAGKLPAVLDSVKDWVGAKLV

SEQ ID NO: 3255 - protein, 76 aa, Neisseria meningitidis
  misc_feature 2, 3, 4: 'Xaa' is any amino acid
VXXXELFFEEIRSTLASGEEIKISGFGNFQLRDKPQRPGRNPKTGEEVPITARRVVTFHASQKLKSMVEHYYDKQR

SEQ ID NO: 3256 - protein, 420 aa, Neisseria meningitidis
LIYALALVKKAAAATNVSLGRIKPEQADLITQAADDVLNGKLDGQFPLVVWQTGSGTQSNMNMNEVLANRANEIAGTGLAAYQPVHPNDHVNHAQSTNDAFPTAIHVAAAIEINRHLIPAVKALRDTLDKKAQAFAPIVKIGRTHLQDATPLTLGQEFSGYVSQLDHGLGRLNDALKDLYELALGGTAVGTGLNSHPEYAEKAAAKLAELSGLPFVSAPNKFEALGGRDAAVAASGALKTLAASLNKIANDIRWLASGPRCGLGEIKIPENEPGSSIMPGKVNPTQCEAMTMVCCQVFGNDVTIGMAGASGNFELNVYMPVIAYNLLQSIRLLGDACNSFNEHCAIGIEPVPEKIDYFLHHSLMLVTALNRKIGYENAAKVAKTAYKNNKSLRETAVELGLLTGEEFDELVVPADMVHPR

SEQ ID NO: 3257 - protein, 198 aa, Neisseria meningitidis
MKITHCKLKKKVQKELLRFFVLEVTARSAADILGIHPNSAALFYRKIRTVINHHLALAADEVFEGPVEQDESDFGGRRKGRRGRGAAGKVVVFGILKHNGRVYTVIVDNAKSETLLPVIKKKIMPDSIVYTDSLSSCDKLDVSGFIHYRINHSKEFADRQNHINGIENFWNQAKRVLRKYSGLARTFPRIGSATGCAD

SEQ ID NO: 3258 - protein, 289 aa, Neisseria meningitidis
  misc_feature 284, 285: 'Xaa' is any amino acid
MQFSYSWLKTQADTELSADKLEHLLTMSGLEVEEAETAAPAFTGVVIAEVKSVEKHPDADRLNVTQVDAGTGGLVQIVCGAPNVKAGIKVPCSLPGAVLPGNFKIKPTKMRGVVSDGMLCSTDELGLPDDGVNGLHILPEDAPVGTNIREYLDLDDTLFTLKITPNRADCLSIKGIAREVSALTGCAFRQPEIHTAPITGSRKQPVQINAPADCGRFISRVIENVNAKAATPDWMKQRLERSGIRSISALVDIGNYVMLEIGQPMHVFDADKLSGSLHIRRARXXHTLN

SEQ ID NO: 3259 - protein, 325 aa, Neisseria meningitidis
  misc_feature 321, 322, 323: 'Xaa' is any amino acid
MTTSKCPVTHLTMNNGAPVADNQNSLTAGPRGPLLAQDLWLNEKLADFVREVIPERRMHAKGSGAFGTFTVTHDITKYTRAKIFSEVGKKTEMFARFTTVAGERGAADAERDIRGFALKFYTEEGNWDVVGNNTPVFFLRDPRKFPDLNKAVKRDPRTNMRSATNNWDFWTLLPEALHQVTIVMSDRGIPAGYRHMHGFGSHTYSFWNEAGERFWVKFHFRTQQGIKNLTNEEAAKIIADDRESHQRDLYEAIERGEFPKWTMYIQVMPEADAEKVPYHPFDLTKVWPKKDYPLIEVGEFELNRNPENFFADVEQSAFAPXXXHT

SEQ ID NO: 3260 - protein, 372 aa, Neisseria meningitidis
MPDFQRITIENIEYFIVDSIQNLRAEDSFIHRNNKLSVFGGNGEARKYVGSYIDDSGRKLSTFFEYENWGITETKNGRRVEYPLIQKNCFFNKKNLQRYLVDAKVEYHKQEQKYHHDISRFYDDYVLSINNLPTENIFFSIHDVSDHLENSKGYRRGYIRSEDDIWSIWRKIVLPKISYLSILKLLPVKDIEDSEPLFYFRIFLDYQFRSIVHPQLLSREKLEIPASEFNQFVEQEIIKQKSRKGQQKYRKDVINHMPQCPFTLITDEVLLRASHIKPYMVCITEKNEKEALDYLNGLALTPTYDWLFDQGYITFLDDGRLICGTRLSRYTWEKLNINPNAKNKMRIYPEGREKYLEYHRKFVFQDNIDDFL

SEQ ID NO: 3261 - protein, 280 aa, Neisseria meningitidis
MDIKINGITVGNDAPFVLFGGINVLEDLDSTLQTCAHYVEVTRKLGIPYIFKASFDKANRSSIHSYRGVGLEEGLKIFEKVKAEFGIPVITDVHEPHQCQPVAEVCDVIQLPAFLARQTDLVAAMAETGNVINIKKPQFLSPSQMKNIVEKFREAGNGKLILCERGSSFGYDNLVVDMLGFGVMKQTCGNLPVIFDVTHSLQTRDAGSAASGGRRAQALDLALAGMATRLAGLFLESHPDPKLAKCDGPSALPLHLLEDFLIRIKALDDLIKSQPILTIE

SEQ ID NO: 3262 - protein, 210 aa, Neisseria meningitidis
MDLHNIREDYSKRELSEGDCADNPIEQFERWLDEAVRAQVNEPTAVNVAAVDGRGRPNSRMVLLKEVNSEGFVFFTNYHSRKGRSLDAHPFAAMTFFWPELERQVRVEGRVERLAEKLSDEYFESRPYQSRLGAWASAQSEVIPNKAVLVAKAAAVGLKHPLHVPRPPHWGGYIVIPDLIEFWQGRPSRLHDRIQYRLLDGGWIRERLSP

SEQ ID NO: 3263 - protein, 945 aa, Neisseria meningitidis
MLDKYSPAEIESKHYQNWESQGYFQPDMDLTKPSFSIQLPPPNVTGTLHMGHAFNQTIMDGLTRYYRMKGCNTAWIPGTDHAGIATQIVVERQLAAQNVSRHDLGREKFLEKVWEWKEVSGGTITQQMRRVGCSADWTREYFTMDDVRAETVTEVFVRLYEQGLIYRGKRLVNWDPVLGTAVSDLEVESVEEQGSMWHIRYPLADNPAEAVIVATTRPETLLGDVAVAVNPEDERYTHLIGKELILPLTGRTIPVIADEYVEKDFGTGCVKITPAHDFNDYEVGKRHDTRLINVFDLEAKVLANAEVFNFKGEAQQGFALPEKYAGLDRFAARKQMVADLQEQGLLVEIKAHTLMTPKGDRTGSVIEPMLTSQWFVAMSATPNGGEPDSEFKGLSLADKAKKAVDSGAVRFIPENWVNTYNQWMNNIQDWCISRQLWWGHQIPAWYDETGNVYVARNQAEAEKQAGKTGLTREEDVLDTWFSSALVPFSTLGWPSETDELKAFLPSNVLVTGYEIIFFWVARMIMMTTHFTGKVPFKDVYIHGIVRDHEGKKMSKSEGNVIDPVDLIDGIGLDKLLVKRTTGLRKPETAPKVEEATKKLFPEGIPSMGADALRFTMASYASLGRSVNFDFKRAEGYRNFCNKIWNATNFVLMNTENQDCGYGATAAEPRGYSFPDMWIIGRLNQTIEQVTQAYETYRFDLSAETLYSFVWNDYCDWYLELAKVQLQTGCASRQRATRHTLLRVLEAALRLLHPIIPFITEELWQTVAPMCDAKTADSIMLARFPEADSGEIVQTAFEQMTVLQDLIGAVRNLRGEMGIQPNVKAPLFVESTDDLADYLKYLPMMTRLTEAQQVAALPESEDAPVAVCNGARLMLKVEIDKAAETARLSKEAEKLQKALDKLNAKLSKPGYTEKAPAHLVEKDKADLAELEDKMAKVQNQLAKLKD

SEQ ID NO: 3264 - protein, 244 aa, Neisseria meningitidis
MTTRQIILDTETTGLYADGGDRLVEFAGLEMVNRQMTDKNLHLYVHPERDMPEEAARVHGLTIEVLEGKNAPPFAEVGRQIADFLRGAELIIHNAKFDVGFLNMEFRRMGLPTVEELGCTVTDTLAMAREMFPGQKASLDALCNRFSVDRSKRVLHGALIDCELLGEVYLAMTRRQFDLMGEAAEEKMETKPVVHTETKRSGKLKVIRADENELAEHGQYLDGLGEACIWRKEAVPSENGGTDA

SEQ ID NO: 3265 - protein, 239 aa, Neisseria meningitidis
MKDDVLKQQAHAAIQKRLGYAFRDISLLRQALTHRSHHAKHNERFEFVGDSILNYTVARMLFDTFPKLTEGELSRLRASLVNEGVLAEMAAEMNVGDGLYLGAGELKSGGFRRPSILADAMEAMFAAVSFDADFNTAEKVVRHLFADRVRCADFQNQAKDGKTALQEALQARRFALPKYRIEEQIGHANDSMFVVSCDLGELGFVCRAKGTSRKAAEQEAAKEALKWLEEKLPLKKKKK

SEQ ID NO: 3266 - protein, 201 aa, Neisseria meningitidis
LNTLYLGSNSPRRMEILTQLGYRVIQLPAGIDESVKAGETPFAYVQRMAEEKNRTALTLFCETNGTMPDFPLITADTCVVSDGIILGKPRSQAEAIEFLNRLSGKQHTVLTAVCIHYRGNAENRVQTNRVVFKPLSSEEISAYVQSGEPMDKAGAYAVQGIGGIFIQSIEGSFSGIMGLPVYETVSMLQDLGYRTPPFIRA

SEQ ID NO: 3267 - protein, 352 aa, Neisseria meningitidis
MITPQQAIERLISNNELFYDEMTDLMRQMMSGKVPPEQIAAILTGLRIKVETVSEITAAAAVMREFATKVPLENAEGLVDIVGTGGDGAKTFNISTTSMFVAAAAGAKVAKHGGRSVSSSSGAADVMEQMGANLNLTPEQVAQSISQTGIGFMFAPNHHSAMRHVAPVRRSLGFRSIFNILGPLTNPAGAPNQLLGVFHTDLCGILSRVLQQLGSKHVLVVCGEGGLDEITLTGKTRVAELKDGKISEYDIRPEDFGIETRRNLDEIKVANTQESLLKMNEVLDGKEGAARDIVLLNTAAALYAGNVAASLSDGISAAREAIDSGRAKSKKEEFVGFQPQQRCHFLGKMELG

SEQ ID NO: 3268 - protein, 365 aa, Neisseria meningitidis
MEVQLPKIKTVRVMLAGMTAQQESVFKMAFKMHNTTRYETVSPSDGSAVPDLVLADTDAEGGFELWKELAERYKDIPVAVCSEKVPDSEVPYLPKPIRFETLFPMLRKLLQGENVYGKSFIAPADRSAKNNGNVQRTVTIRQFNPNKGLLGALRFAEKNRQDIAILHGNKPVLIVFPSIQRVLLTESVQKLEELCKDENLQVSCKTVPDNPQWREKAKVGIMSCMWQFSIWTAQGRLIYPISPDTPFTLKSWPNLTRLASVPGSIRLSAFLTKASVNLNVLYKVMPLNLNDILNYLAATYTTGFLSVDLKTVSQQAYSDMADKINIGADSASDSEMMKKAEKITTPSQSQSRGLLQRLMKKLLGS

SEQ ID NO: 3269 - protein, 319 aa, Neisseria meningitidis
MKPVFLDFEQPIAELTNKIDELRFVQDESAVDISDEIHRLQKKSNDLTKSIFSKLTPAQISQVSRHPQRPYTLDYIEALFTDFEELHGDRHFADDYAIVGGLARFNGQSVMVVGHQKGRDTKEKIRRNFGMPRPEGYRKALRLMKTAEKFGLPVMTFIDTPGAYPGIGAEERGQSEAIGKNLYELTRLRVPVLCTVIGEGGSGGALAVAVGDYVNMLQYSTYSVISPEGCASILWKTAEKAADAAQALGITADRLQRLDLVDTVIKEPLGGAHRDFGQTMKNVKAVLEKQLHEAQSIPLADLLSRRFDRIMAYGKFSEQ

SEQ ID NO: 3270 - protein, 228 aa, Neisseria meningitidis; identical to SEQ ID NO: 380

SEQ ID NO: 3271 - protein, 260 aa, Neisseria meningitidis
MDDIRGIIQGAANPFLTGFQGLGVGAITDSAVNPVTYAAARKTLQGIHNLGNLSPEAQLAAASLLQDSAFAVKDSINSARQWADAHPNITATAQTALAVAEAATTVWGGKKVELNPTKWDWVKNTGYKKPAARHMQTVDGEMAGGNRPPKSITSNSKADASTQPSLQAQLIGEQISSGHAYNKHVIRQQEFTDLNINSPADFARHIENIVSHPTNMKELPRGRTAYWDDKTGTIVIRDKNSDDGGTAFRPTSGKKYYDDL

SEQ ID NO: 3272 - protein, 187 aa, Neisseria meningitidis
MAIELNGNWTKGFALDHHMQKSILLGYDELGHPHFDSKRSMIGEWVYQLKYRNQTQNVSLLVDYILQKFSGLESINLIVPAPFTTERINQPVQLIAKELSDRLNIPYSPILRKSSSHTPLKNIEEKSEKLEILNNSITIDNIDLSNKNILVIDDLFDSGATLEISTEKLFSKNARSVIVLAMTKTRG

SEQ ID NO: 3273 - protein, 96 aa, Neisseria meningitidis
LKVPAKRYFTLDELCGLLQISPYGFAQWQHNHGVVVGYGGERYTRLDVVKLLKLQSTFAPYAEGAESGSDGNRPVTLQEIGDGLKELLADLDKELC

SEQ ID NO: 3274 - protein, 460 aa, Neisseria meningitidis
MASIARDIFKAYDIRGIVGKTLTDEAAYLIGKAIAAKAAEKGITRIALGRDGRLSGPELMEHIRRGFTDSGINVLNVGMVATPMLYFAAVNECGGSGVMITGSHNPPDYNGFKMMLGGDTLAGEAIQELLSIIEKDGFAAAGKQGSVTEKDISGEYLKHITGHIRLKRPMNIAIDAGNGVGGAFAGKLYKGLGNEVTELFCDVDGTFPNHHPDPSKPKNLQDLIAALKNGDAEIGLAFDGDADRLGVVTKDGNIIYPDRQLMLFAQDVLNRNPGAKVIFDVKSTRLLAPWIKEHGGKAIMEKTGHSFIKSAMKETGAPVAGEMSGHIFFKERWFGFDDGLYAGARLLEILSASDNPSEVLNNLPQSISTPELNIALPEGSNGHQVIDELAAKAEFEGATEIITIDGLRVEFPDGFGLMRASNTTPILVLRFEADTQEAIERIQNQFKAVIESNPNLIWPL

SEQ ID NO: 3275 - protein, 252 aa, Neisseria meningitidis
MKKVSVLIVAKNEANHIRECIESCRFDKEVIVIDDHSTDNTAEIAEGLGAKVFQRHLNGDFGAQKTFAIEQAGGEWVFLIDADERCTPELSDEISKIVQTGDYAAYFVERRNLFPNHPATHGAMRPDSVCRLMPKKDSSVQGKVHETVQTPYPKRRLKHFMYHYTYDNWEQYFNKFNKYTSISAEKYREQGKPVRFVRDIILRPIWGFFKIYILNKGFLDGKMGWIMSVNHSYYTMIKYVKLYYLYKSGGKF

SEQ ID NO: 3276 - protein, 236 aa, Neisseria meningitidis
  misc_feature 2, 3: 'Xaa' is any amino acid
VXXERICADIGGFAQAVSTFFGTGGCGANVTVPFKQEAFHLADEHSDRALAAGAVNTLILLKNGKLRGDNTDGIGLANDITQVKNIAIEGKTILLLGAGGAVRGVIPVLKGHRPARIVVANRTHAKAEELARLFGIEAVPMADVNGGFDIIINGTSGGLSGQLPAVSPEIFLGCRLAYDMVYGDAAQEFLNFAQSNGAAEVSDGLGMLVGQAAASYALWRGFTPDIRPVIEYMKAM

SEQ ID NO: 3277 - protein, 384 aa, Neisseria meningitidis
MKFTKHPVWAMAFRPFYSLAALYGALSVLLWGFGYTGTHELSGFYWHAHEMIWGYAGLVVIAFLLTAVATWTGQPPTRGGVLVGLTIFWLAARIAAFIPGWGASASGILGTLFFWYGAVCMALPVIRSQNQRNYVAVFALFVLGGTHAAFHVQLHNGNLGGLLSGLQSGLVMVSGFIGLIGTRIISFFTSKRLNVPQIPSPKWVAQASLWLPMLTAMLMAHGVMPWLSAAFAFAAGVIFTVQVYRWWYKPVLKEPMLWILFAGYLFTGLGLIAVGASYFKPAFLNLGVHLIGVGGIGVLTLGMMARTALGHTGNPIYPPPKAVPVAFWLMMAATAVRMVAVFSSGTAYTHSIRTSSVLFALALLVYAWKYIPWLIRPRSDGRPG

SEQ ID NO: 3278 - protein, 105 aa, Neisseria meningitidis
MNKPFITQAQLALYKYQPSSKYFGQSMALIAQKEFEEFVNNVKEYDILESFSYFLNKRVAHNIWKIYFSDESVIFIRKSEENGKTVHEFVYQEYTDSSDFNSMFE

SEQ ID NO: 3279 - protein, 322 aa, Neisseria meningitidis
MKILLVRLSSMGDLIHTLPAIEDLARQCPDVELHWLCEAGFTDIARLHPFVKKIHVMKWRQWRKHLFQAETWREMGHLKQTLRQEAFNFVLDSQGLIKSACFAKMAKSPIYGLDKNSAREGLAALAYAKTYAVPKGKNAVWRNRELFAQVFGYAMPETQVFGLTVPEVGRLKNLAQPYYAALHATSRDSKLWPMENWRSLLQKLNEEQQCNIYLPWGNEDEKTRAKQIADGLPFAIVCDKINLLQAAYLLKYAVGIVGVDTGLLHLANALEKPVVGIYTDTDPIKTGVQVSPIAKNLGNIGQIPTADLVYQALMDCVAADKG

SEQ ID NO: 3280 - protein, 391 aa, Neisseria meningitidis; identical to SEQ ID NO: 2276

SEQ ID NO: 3281 - protein, 174 aa, Neisseria meningitidis
MSLNKVILIGRLGRDPEVRYMPNGEAVCNFSVATSETWNDRNGQRVERTEWHNITMYRKLAEIAGQYLKKGGLVYLEGRIQSRKYQGKDGIERTAYDIVANEMKMLGGRNENSGGAPYEEGYGQSQEAYQRPAQQSRQPASDAPSHPQEAPAAPRRQPVPAAAPVEDIDDDIPF

SEQ ID NO: 3282 - protein, 1044 aa, Neisseria meningitidis
MNKTLKRRVFRHTALYAAILMFSHTGGGGGGAMAQTHKYAIIMNERNQLEVKGNGQYSTIKDKDRERVFDHTNWRDRFGITNNFISFNNSDELVSQQSGTAVFGTATYLPPYGKVSGFDADGLEKRNNAVDWIRTTRIALAGYRYDNVVCRSTTDCPKLVYKTRFSFDNPDLAKTGVGLDKHTEPSRDNSPIYKLKDHPWLGVSFNLGAEGTAKNGKTINKLVSSFNEKNSNNNLVYTTEGRDISLGDWQRETTAMAYYLNAKLHLLDKKGIKDIAQGKTVDLGTLRPRVETTGRSWLNFWAKWDIKDNGQIPVKLGLPEVKAGRCINKANPNPKAQALSPALTAPALWFGAGQDGKAEMYSASVSTYPDSSSSRIFLQNLKRKNDPNKPGRYSLADLSASDIQSKEPTFTSRQTIIRLDGGVQQIKLDKSNEATGLNGNDGKNDTFGIVSEGSFTPDVSEWKKVLLPWTVRGSADDGRFKSINQESSKYSQRYRIRENGNNSKRDLGDIVNSPIVAVGEYLATSANDGMVHIFKQSGGDKRSYNLKLSYIPGTMPRQYFDNDTSALKDSTLAKELRTFAEKGYVGDRYGVDGGFVLRRITDDQDKQKHFFMFGAMGLGGRGAYALDLTKADSNNPTAVSLFDVKNGNNGKNSNNSNNSVQLGYTVGTPQIGKTHNGKYAAFLASGYATKDINNGDNKTALYVYDLESNNGTPIAKIEVPNGKGGLSSPTLVDKDLDGTVDIAYAGDRGGSMYRFDLSGNNPTSWSARAIFSGNKPITSAPAISQLKDKRVVIFGTGSDLSEEDVDSKEIQHVYGIFDNDTDTGTAQDGQGKGLLEQKLEKDKDGKTLFLSDYKRSDGSGDKGWVVKLEAGQRVTVKPTVVLRTAFVTIHKYTGNDKCGAETAILGINTADGGKLTKKSARPIVPADNTAVAQYSGHKQTAKGKSIPIGCMEKNNGIVCPNGYVYDKPVNVRYLDEKKTDGFSTTADGDAGGSGTFKEGKKPARNNRCFSGKGVRTLLMNDLDSLDITGPTCGMKRISWREVFY

SEQ ID NO: 3283 - protein, 103 aa, Neisseria meningitidis
MANQKIRIRLKAYDYALIDRSAQEIVETAKRTGAVVKGPIPLPTKIERFNILRSPHVNKTSREQLEIRTHLRLMDIVDWTDKTTDALMKLDLSAGVDVEIKVQ

SEQ ID NO: 3284 - protein, 362 aa, Neisseria meningitidis
MSDYTQQLQDKKDHLKTLFAGLDVPEWEVYESPDKHYRMRAEFRIWHEGGEMFYAMFEKGQKAGGASLIRCDRFEAASEAVNRLMPELIAVAAQSAELRNRWYAVEFLSTLSGEMLVTMIYHKRLDNEWMQAAQALQQQLDISVIGRSRGQKIVLKQDYVTETLKVGNRDFHYRQIEGGFTQPNAAVCRKMLEWACRAAEGLGGDLLELYCGNGNFTLPLSEKFERVLATEISKTSISAAQWNIEANGIGNIKIARLSAEEFTEAYTGKREFKRLKDGGIALTDYAFSTIFVDPPRAGIDEETLKLVSQFDNIIYISCNPETLRANLDTLAETHAVERAALFDQFPFTHHIESGVLLKKKIL

SEQ ID NO: 3285 - protein, 336 aa, Neisseria meningitidis
MSIKILIISPSWIGDCVMTQPLFRRLKELHPGCTIDVFAPKWSMAVFERMPEVNEILENPFGHGALELKRRWRVGRDLGRRGYDQVIVLPGSLKSAIIALATGIGKRTGYVGESRYFLLNDIRRLDKERLPLMVDRYTALAHPSQEDFDGHSGFPEFSIDERRREISVETFGLDIGKPVLAFCPGAEFGPAKRWPTRHFAELGKHYLAAGWQVWLFGSQKDDEIAEEINRLSDGMCVNLCGKTDLSQAMDLLSLADTVVCNDSGLMHLAAALGRKVVAVYGSSSPTHTPPLSDRAKIVSLHLECSPCFKRECPLGHTDCLNKLYPEKIVQAVEEAV

SEQ ID NO: 3286 - protein, 354 aa, Neisseria meningitidis
MLVLGIESSCDETGVALYDTERGLRAHCLHTQMAMHAEYGGVVPELASRDHIRRLVPLTEGCLAQAGASYGDIDAVAFTQGPGLGGALLAGSSYANALAFALDKPVIPVHHLEGHLLSPLLAEEKPDFPFVALLVSGGHTQIMAVRGIGDYALLGESVDDAAGEAFDKTAKLLGLPYPGGAKLSELAESGRPEAFVFPRPMIHSDDLQMSFSGLKTAVLTAVEKVRAENGADDIPEQTRNDICRAFQDAVVDVLAAKVKKALLQTGFRTVVVAGGVGANRKLRETFGNMTVQIPTPKGKPKHPSEKVSVFFPPTAYCTDNGAMIAFAGAMHLKTGREAGAFNVRPRWPLSEIVK

SEQ ID NO: 3287 - protein, 631 aa, Neisseria meningitidis
  misc_feature 2, 3, 4: 'Xaa' is any amino acid
VXXXGLAIMRLNSSILDLPPTKQYFQSGSLWSELRQGFRMGEVNPELVRRHESKFIASHSYFNRVINRSRPYMYHIANEVKKRNMPAEAALLPFIESAFVTKAKSHVGASGLWQFMPATGRHYGLEKTPVYDGRHDVYAATDAALNYLQYLYGLFGDWPLAFAAYNWGEGNVGRAINRARAQGLEPTYENLRMPNETRNYVPKLLAVRNIIAAPQSFGMNISDIDNKPYFQAIEPDRPLDNEAIARLAGITQSELLALNPAFNVPAFIPKSKRKLLLPVASVQTFQSNYLNAAPDSLFSWEVYTPAAKTSLSDISTATGMSIADIKRLNNLNGNLVNAGRSILVAKNGKTLQTASESVVSIDIDNTPDTYRSNMPAGTVNVGIARIRPAAAQTADITVAPLPQKTVRTEPDPLVRIAEPALATAAAQPQTEKQTAMPSETQTATLAQIIPQNDMQAADELMQLVARNNLRRQAEETISAVIGTPDTVAEHNISSSPQHTVAADGKRRARLETRVAKAADGEAEISPLHASIHRVVEGDTLFNIAKRYNVSVADLIVANNIKGNTIQKGQVLRLAQAAPAQTRIEKVSYTARKGDTFKSIAARFNIHIDDIRRLNPNLNTINPGQRVKLIGS

SEQ ID NO: 3288 - protein, 271 aa, Neisseria meningitidis
MRPYATTIYQLFILFIGSVFTMTSCEPVNEKTDQKAVSAQQAKEQTSFNNPEPMTGFEHTVTFDFQGTKMVIPYGYLARYTQDNATKWLSDTPGQDAYSINLIEISVYYKKTDQGWVLEPYNQQNKAHFIQFLRDGLDSVDDIVIRKDACSLSTTMGERLLTYGVKKMPSAYPEYEAYEDKRHIPENPYFHEFYYIKKGENPAIITHRNNRINQTEEDSYSTSVGSCINGFTVQYYPFIREKQQLTQQELVGYHQQVEQLVQSFVNNSNKK

SEQ ID NO: 3289 - protein, 268 aa, Neisseria meningitidis
MSTFFRQTAQAMIAKHIDRFPLLKLDQVIDWQPIEQYLNRQKTRYLRDHRGRPAYPLLSMFKAVLLGQWHSLSDPELEHSLITRIDFNLFCRFDELSIPDYSTLCRYRNWLAQDDTLSELLELINRQLTEKGLKIEKASAAVVDATIIQTAGSKQRQAIEVDEEGQVSGQTTPSKDRDARWIKKNGLYKLGYKQHTRTDGEGYIEKLHITPANAHECKHLSPLLEGIAESTTVYADKGYDSAENRQHLKEHQLLDGIMRGQPISDCSK

SEQ ID NO: 3290 - protein, 166 aa, Neisseria meningitidis; identical to SEQ ID NO: 987

SEQ ID NO: 3291 - protein, 354 aa, Neisseria meningitidis
MEKEFRILNIVSAKIWGGGEQYVYDVSKALGLRGCTMFTAVNKNNELMHRRFSEVSSVFTTRLHTLNGLFSLCALTRFIRENRISHLMIHTGKIAALSILLKKLTGVRLIFVKHNVVANKTDFYHRLIQKNTDRFICVSRLVYDVQTADNPFKEKYRIIHNGIDTDRFPPSQEKPDSRFFTVAYAGRISPEKGLENLIEACVILHRKYPQIRLKLAGHGHPDYMCRLKRDVSASGAEPFVSFEGFTENIASFYRQSDVVVLPSLVPEAFGLSLCEAMYCRTAVISNTLGAQKEIVEHHQSGILLDRLTPESLADEIERLVLNPEAKNALATAAHQCVAARFTINHTADKLLDAI

SEQ ID NO: 3292 - protein, 473 aa, Neisseria meningitidis; identical to SEQ ID NO: 2225

SEQ ID NO: 3293 - protein, 110 aa, Neisseria meningitidis
MQILSFQPDIAERMLEGTEGESVNENAQFVRTDNGYWIAWHEGVAALLAPDTPPGIPCFWVEGAESLEELCAMVERGEFDEVEEFDGDDDEWLETAQGCGHHGDACACGH

SEQ ID NO: 3294 - protein, 65 aa, Neisseria meningitidis; identical to SEQ ID NO: 926

SEQ ID NO: 3295 - protein, 177 aa, Neisseria meningitidis
MFPPDKTLFLCLSALLLASCGTTSGKHRQPKPKQTVRQIQAVRISHIDRTQGSQELMLHSLGLIGTPYKWGGSSTATGFDCSGMIQFVYKNALNVKLPRTARDMAAASRKIPDSRLKAGDLVFFNTGGTHRYSHVGLYIGNGEFIHAPSSGKTIKTEKLSTPFYAKNYLGAHTFFTE

SEQ ID NO: 3296 - protein, 63 aa, Neisseria meningitidis
LPKFGECPLPSPPPRGRGQVAADFAVAGGLRKNARNINSGNFSGSLYRKADVTNAASVFSDDL

SEQ ID NO: 3297 - protein, 140 aa, Neisseria meningitidis
MKKQITAAVMMLSMIAPAMANGLDNQAFEDQVFHTRADAPMQLAELSQKEMKETEGAALWFAPVLAGGGRFALTGFTRHGLNQAISRGGVGVSNKAIMNTMRNPTKITSQSGGRTRFTGADGGVVLNSQGKVITTWGKPR

SEQ ID NO: 3298 - protein, 203 aa, Neisseria meningitidis; identical to SEQ ID NO: 352

SEQ ID NO: 3299 - protein, 283 aa, Neisseria meningitidis
MNTLKFTKMHGLGNDFMVIDAVSQDFTPEDAPIAEWADRFRGVGFDQLLVVGRSETEGVDFRYRIFNADGSEVEQCGNGARCFARFVADKGLTDKKEICVETANGVIFPKLSDNGMVTVNMGKPRFMPSEIPFVPESGEGDDACIYGVHLESGIQPVSCVNMGNPHAVIVVDDVECAPVRETGSLIEPHRQFPERVNVGFMQIVSRTAIRLRVFERGVGETQACGTGACAAVVAGIRLGLLDEGKTVEVILPGGTLYIEWACGGDVMMTGPAETVFEGELAYS

SEQ ID NO: 3300 - protein, 389 aa, Neisseria meningitidis
MSEYLFTSESVSEGHPDKVADQVSDAILDAILAQDPKARVAAETLVNTGLCVLAGEITTTAQVDYIKVARETIKRIGYNSSELGFDANGCAVGVYYDQQSPDIAQGVNEGEGIDLNQGAGDQGLMFGYACDETPTLMPFAIYYSHRLMQRQSELRKDGLLPWLRPDAKAQLTVVYDSESGKVKRIDTVVLSTQHDPEIGYEELKNAVIEQIIKPVLPSELLTDETKYLINPTGRFVIGGPQGDCGLTGRKIIVDTYGGAAPHGGGAFSGKDPSKVDRSAAYACRYVAKNIVAAGLATQCQIQVSYAIGVAEPTSISIDTFGTGKISEEKLITLVREHFDLRPKGIVQMLDLLRPIYSKSAAYGHFGREEPEFTWERTDKAAALRAAAGL

SEQ ID NO: 3301 - protein, 291 aa, Neisseria meningitidis
MAYLLISIVFSVSVSILLKMARKKKIDIAQAVAVNYVVAVILTLLVLKPDVGNIGAFLPTWWLFAALGVLLPSVFVIMGKSVESAGIVKSDAAQRLSLFLPIVAALTLFGEKLSEGKLIGLCLAFAALFCLLWKHSGGKKSGSAWRQAALLLGVWAGYGIIDILFKQLAKSGTAFAGNLLVAFVLAGVLMFACLFAKSVRWRVESVVGGIFLGGLNFMNIVTYITAHQMMKDNPTLVFAGMNIGVIVLGTLSGALFFKEKINTINTAGIVLALCSIACLFYWAEVKVLFGI

SEQ ID NO: 3302 - protein, 161 aa, Neisseria meningitidis
LLIQSALCFEAEAHEYTNIQEMEWVSLFSDPQRDDDSLITLKDEKITVKNYIVPWWKKGENFRKLELITPGKNDNGNLTVNGIYGIQSFADPQLGYTPELSVKSNNDILFKNNLQSVDVKPHSGNIHLDAKGKIQFNLNVPDVDGVQDVASGKKYRQTIVP

SEQ ID NO: 3303 - protein, 287 aa, Neisseria meningitidis
MFEPLWNNKYIESVQLTIAEQLGVEERGEFYDITGALRDMVQNHLMQMLCMTAMEAPASLDADAVRDEKVKVIKSLKPLTVESVNENVVRGQYTAARGMNGYLEEINVPQDSFTETYVAIKAEIENERWKGVPFYLRTGKRMAGKVAEIVLNFKDLNSHIFEGSRTAPNRLVIELQPYESVRLYTQMKTPGAGNKVETVPLATDLGKALESRRAEAYERLLLDVINGKLALFNRRDELEAAWEYVMPILENWTNNTTPPHGYGAHSWGPEAARELLARDGHKWHEEQ

SEQ ID NO: 3304 - protein, 163 aa, Neisseria meningitidis; identical to SEQ ID NO: 793

SEQ ID NO: 3305 - protein, 274 aa, Neisseria meningitidis
MKWLFTLLAVLNIAVFGGTVGYKLAVKATGGVPENRAVENTPPATPAADNAAASVEDTAALLKPGDILTEEQAEQLRLKKEAEQKKLKEKKQREEKARREKLAAEKAQAERENGAADALCAAQASLTMDEDDYHRIKGLLGKWSHVASRSVEKRTAKAKPADKTYRVVLPVSADAENQAAELSAKGFNPIPFDGALSLGVGNSRENAQALQNRLAGAGFGGAHIVEHFAEADRQDDSLSVSRMTVLFTGVNAADADEIRKITSLYGKLNLKSCK

SEQ ID NO: 3306 - protein, 245 aa, Neisseria meningitidis
MIILDKVSKHYQTRDKTRFAAVEPTSLEIRDGEIFGLMGYSGAGKSTLLRLINLLERPDSGKVNVCGQELTALDAAALRQARQNIGMVFQQFNLLNNRTVAGNVAFPLEIAGWPSEKIEARVAECLEIVGLTERAGHYPAQLSGGQKQRVGIARALASKPQVILADEPTSALDPATTRSVLECLEDINKRFNVTIVIVTHEMSVIRRLCDRAALLDKGKVVEIVEVRGNQIHARSDIGRELIRED

SEQ ID NO: 3307 - protein, 90 aa, Neisseria meningitidis; identical to SEQ ID NO: 311

SEQ ID NO: 3308 - protein, 93 aa, Neisseria meningitidis
MNTIPLHTILKLMAHPERMAILIQLLDSERNIAELAKSLSLPATAVSGHLSRLRVEGLVDFTRYHRIIEYRLISEDAATILRTIRDLENKRAV

SEQ ID NO: 3309 - protein, 249 aa, Neisseria meningitidis; identical to SEQ ID NO: 467

SEQ ID NO: 3310 - protein, 287 aa, Neisseria meningitidis
VENVETHSQNHRKRLIGTFFLVGLENLLMLVYPVFGGWAINAVIAGQAWQALLYALVVLLMWLVGAARRIADTRTFTRIYTEIAVPVVLEQRQRQVPHSAVTARVALSREFVSFFEEHLPIAATSVVSIFGACIMLLVLEFWVGVSAVGILALFLWLLPRFAAISENLYFRLKNSLERDNHFIRKGDERQLDRHYGLLARLRVLISNREAFGYLCVGTAMGILFGFAFVMMTLKGYSSAGHVYSVGTYLWMFAMSLDDVPRLVEQYSNLKDIGQRIEWSKRNIKAGT

SEQ ID NO: 3311 - protein, 256 aa, Neisseria meningitidis
MEPERLQKVLAASGVGSRREMEEWITNGWITVNGKTAQLGDKVTPDDHVTVKGSIIKLKWADRLPRIILYYKQEGEIVSRDDPQGRVSIFDRLPQAASSRWVAIGRLDINTSGLLILTTSGELVQRFAHPSFEVEREYAVRVLGGLTGEQMRVLTEEGVMLEDGLAKVERIREQGGEGANKWYNVVIKEGRNREVRRIFESQGLTVSRLVRIGFGPIGLPNRLKRGQFYELNPAEVANIIKWADMLLPGERRRKKA

SEQ ID NO: 3312 - protein, 595 aa, Neisseria meningitidis
MSLVELKVPDIGGHENVDIIAVEVNVGDTIAVDDTLITLETDKATMDVPAEVAGVVKEVKVKVGDKISEGGLIVVVEAEGAAASPKAEAPVAAPAQEAPKAAAPAPQAAQFGGSADAEYDVVVLGGGPGGYSAAFAAADEGLKVAIVERYKTLGGVCLNVGCIPSKALLHNAAVIDEVRHLAANGIKYPEPELDIDMLRAYKDGVVSRLTGGLAGMAKSRKVDVIQGDGQFLDSHHLEVSLTAGDAYEQAAPTGEKKIVAFKNCIIAAGSRVTKLPFIPEDPRIIDSSGALALKEVPGKLLIIGGGIIGLEMGTVYSTLGSRLDVVEMMDGLMQGADRDLVKVWQKQNEYRFDNIMINTKTVAVEPKEDGVYVTFEGANAPKEPQRYDAVLVAAGRAPNGKLISAEKAGVAVTDRGFIEVDKQMRTNVPHIYAIGDIVGQPMLAHKAVHEGHVAAENCAGHKAYFDARVIPGVAYTSPEVAWVGETELSAKASGRKITKANFPWAASGRAIANGCDNGFTKLIFDAETGRIIGGGIVGPNGGDMIGEVCLAIEMGCDAADIGKTIHPHPTLGESIGMAAEVALGTCTDLPPQKKK

SEQ ID NO: 3313 - protein, 151 aa, Neisseria meningitidis; identical to SEQ ID NO: 658

SEQ ID NO: 3314 - protein, 403 aa, Neisseria meningitidis; identical to SEQ ID NO: 69

SEQ ID NO: 3315 - protein, 279 aa, Neisseria meningitidis
LGNFAKVSNCEFWDKINYNRAAQAAEQRAKQAQETPKEPPKQEEHFIAKLPNDKLMTIYRLFQKQLDDMRGLERDIERGDWYINARYRMNENRNKIRALEDDNKRLHHDYWAVQDQGENRFFGMGKIGAKLVKENEKQQHINERHGANVREIRRLKTENEKLEGQYSDKLAADVVKVRDRFNEELDNVRREIGKRPMEEFRNVFLQAAQEAQTTIGQKAVQIELEKFPLNGSPSAKRIAFYFGAQRIREVEQKEREDQRKEQERQARRMERDDGHGIGM

SEQ ID NO: 3316 - protein, 408 aa, Neisseria meningitidis
MTFLQRLQGLADNKICAFAWFVVRRFDEERVPQAAASMTFTTLLALVPVLTVMVAVASIFPVFDRWSDSFVSFVNQTIVPQGADMVFDYINAFREQANRLTAIGSVMLVVTSLMLIRTIDNTFNRIWRVNSQRPWMMQFLVYWALLTFGPLSLGVGISFMVGSVQDAALASGAPQWSGALRTAATLTFMTLLLWGLYRFVPNRFVPARQAFVGALATAFCLETARSLFTWYMGNFDGYRSIYGAFAAVPFFLLWLNLLWTLVLGGAVLTSSLSYWQGEAFRRGFDSRGRFDDVLKILLLLDAAQKEGKALPVQEFRRHINMGYDELGELLEKLARYGYIYSGRQGWVLKTGADSIELNELFKLFVYRPLPVERDHVNQAVDAVMMPCLQTLNMTLAEFDAQAKKQQQS

SEQ ID NO: 3317 - protein, 205 aa, Neisseria meningitidis
MSAYRKGNIFIISAASGTGKTTLVSRLLANHNGLRVSVSHTTRPPREGEANGVHYHFVSKEEFESLIAQEAFLEYADVFGNYYGTSAEGVNALAAAGYDVILEIDVQGAAQVRDALPEAVGIFILPPSFDVLAARLNGRGTDSQEVIQRRLAKARHEIEQSVLFDFVVVNDDLARAEEDLRHIVNACRLKRSRQLGFIADLLENS

SEQ ID NO: 3318 - protein, 209 aa, Neisseria meningitidis
MAAHLEEQQELDNFKYFWKTTGKWLFAVLILAALGYLGYTVYQNRAASQNQEAAAILAEIVEKAQNKAPQSEINAELTKLQQSYPHSISAAQATLMAAATEFDAQRYDVAEGHLKWVLSNQKDSLIQALAAQRLGVVLLQQKKYDAALAALDTPVEADFAPLLMETKGDVYAAQGKSQEALKNYGQALEKMPQDSVGRELVQMKLDSLK

SEQ ID NO: 3319 - protein, 157 aa, Neisseria meningitidis; identical to SEQ ID NO: 2553

SEQ ID NO: 3320 - protein, 377 aa, Neisseria meningitidis; identical to SEQ ID NO: 2738

SEQ ID NO: 3321 - protein, 268 aa, Neisseria meningitidis
MWHWDIILILLAVGSAAGFIAGLFGVGGGTLIVPVVLWVLDLQGLAQHPYAQHLAVGTSFAVMVFTAFSSMLGQHKKQAVDWKTVFAMMPGMIFGVFTGALSAKYIPAFGLQIFFILFLTAVAFKTLHTDPQTASRPLPGLPGLTAVSTLFGTMSSWVGIGGGSLSVPFLIHCGFPAHKAIGTSSGLAWPIALSGAISYLLNGLNIAGLPEGSLGFLYLPAVAVLSAATIAFAPLGVKTAHKLSSAKLKKSFGIMLLLIAGKMLYNLL

SEQ ID NO: 3322 - protein, 228 aa, Neisseria meningitidis; identical to SEQ ID NO: 2819

SEQ ID NO: 3323 - protein, 129 aa, Neisseria meningitidis; identical to SEQ ID NO: 322

SEQ ID NO: 3324 - protein, 841 aa, Neisseria meningitidis
MNPNSKHNTNFTNLLKPSDSDIKQFAAQHIRHLTDLLNRYAYEYYTLDAPSVPDAEYDKLFRELEALERNHPELKLPDSPTQRVGGEPLAGFAEVRHEVPMLSLTNAFSPQDENGVFDHAEMYAFDQRVRDGLDGGNPEYVIEPKFDGLAISLLYRDGVLIQAATRGDGTTGEDVTQNIKTVSNIPLRLHGENTPELIEVRGEVLMQKADFAALNKRQAENGQKPFANPRNAAAGSLRQLDSRITAQRKLHFFPYSVARQQGGFVAEEHIQELAYFQALGFSLPNGNFGCFKNIDEVLAFYGHMQQKRPELPYEIDGMVVKVNSLAQQHELGFISRAPRWAVAHKFPAEEALTIVEAIDVQIGRTGAVTPVARLQPVFVGGVTVTNATLHNQDEVSRKDVRVGDTVVVRRAGDVIPEVVRVIFERRPMQETAVAVSDGIGHRQDDLFAEAPAANQTQSVPLYKPYRLPTHCPICRSEIEREEGEAVARCSGGMLCQAQRAQGLIHFASRKAMDIDGLGEKQIEQLVAQDLVLHFADLYRLDIPTLQKMKETADKTVAESDQMPSEGSSVGASGKHKKQPVKWAENILAGIESGKTPELARFLFALGIRHVGERTAKTLAQAFGTLERVRRAPEPVLACLPDIGTVVARSIAHFFAQAEQQAMIDELLAAGVAPQTQAVTIPPARHAEPQRWIARLPDFKISENKAQALWELAGKNIEGLQNDKALPADWQAWRSEPQNAALLENLKTFFAQMPSEDEAAQGSDGINKAVAGKTFVLTGTLPTLKRDQAQSLIEAAGGKVSGSVSKKTDYVVAGEAAGSKLEKANALGVSILSEAELLTLLG

SEQ ID NO: 3325 - protein, 460 aa, Neisseria meningitidis
  misc_feature 2, 3, 4: 'Xaa' is any amino acid
VXXXTKDDGSVSMLLPDFVQLVQSEGPAVVNIQAAPAPRTQNGSGNAETDSDPLADSDPFYEFFKRLVPNMPEIPQEEADDGGLNFGSGFIISKDGYILTNTHVVTGMGSIKVLLNDKREYTAKLIGSDVQSDVALLKIDATEELPVVKIGNPKDLKPGEWVAAIGAPFGFDNSVTAGIVSAKGRSLPNESYTPFIQTDVAINPGNSGGPLFNLKGQVVGINSQIYSRSGGFMGISFAIPIDVAMNVAEQLKNTGKVQRGQLGVIIQEVSYGLAQSFGLDKAGGALIAKILPGSPAERAGLQAGDIVLSLDGGEIRSSGDLPVMVGAITPGKEVSLGVWRKGEEITIKVKLGNAAEHIGASSKTDEAPYTEQQSGTFSVESAGITLQTHTDSSGGHLVVVRVSDAAERAGLRRGDEILAVGQVPVNDEAGFRKAMDKAGKNVPLLIMRRGNTLFIALNLQ

SEQ ID NO: 3326 - protein, 225 aa, Neisseria meningitidis
MQADFNRPVLAVDTGTSHLSLALRADGETHLFHQEAGSRQSELILPEIRTLFRNAGITAADLGAIVYTKGPGAFTGLRIGIGVAQGLATPFDTPLIGIPTLDAAASLPPPQSCILAAADARMGEVFYAWFDTLNRRRLSDYQVGRAADIRLPEGCAFSDGIGSAFALEETPPFSGKPDMPTAADFLNLAAEGGFPAVAAAHSELLYVRNKIALTAKEQAERKART

SEQ ID NO: 3327 - protein, 131 aa, Neisseria meningitidis
  misc_feature 127, 128, 129: 'Xaa' is any amino acid
MTALFYLPFPWFAEETINLTAAVIFAVAALTDWFDGFLARLWKQTSDFGAFLDPVADKLMVAVSLLLLVKLDRTYVLFAMIIIGREITISALREWMAQMGKRNSVAVATVGKFKTAAQMLAIFLLLXXXHT

SEQ ID NO: 3328 - protein, 304 aa, Neisseria meningitidis
MKQINHTLQQKLAEFKTKSGMNQTQLARGIGTSPASISMYLNGTYAEKGGNYETIEPKIEAFLEMQDSKARREELVLGFVSTKTTRRIVEAMRNAHEGGEISVIYGQAGLGKTQAVKNYCEKNPAAILIEANPSFTALVLMRKLATAAKVSAMGSLNDLFESVSDRLRDSGHLIVVDEAENLPLRALEIIRRLHDETGCGLVLSGMPRLVANLRGKYGELVQLHSRVAGALNLGDTMPDAELEQIARATLPEADDETIAELVKHSNGNTRRMSKLMRGSVRVANKNGIRMQAGIVKKYSTLIIR

SEQ ID NO: 3329 - protein, 959 aa, Neisseria meningitidis
MSNTTVEQFAAELKRPVEDLLKQLKEAGVSKNSGSDSLTLDDKQLLNAYLTKKNGSNGGTISIRRTKTEVSTVDGVKVETRKRGRTVNIPSAEELAAQVKAAQTQAAPVRPEQTAEDAAKARAEAAARAEARAKAEAEAAKLKAAKAGNKAKPAAQKPTEAKAETAPVAAETKPAEESKAGKAQADKMPSKKPAEPKEKAAKPKHERNGKGKDAKKPAKPAVPQPVVSAEEQAQRDEEARRAAALRAHQEALLKEKQERQARREAMKQQAEQQAKAAQEAKTGRQRPAKPAEKPQAAAPAVENKPVNPAKAKKEDRRNRDDEGQGRNAKGKGGKGGRDRNNARNGDDERVRGSKKGKKLKLEPNQHAFQAPTEPVVHEVLVPETITVADLAHKMAVKGVEVVKALMKMGMMVTINQSIDQDTALIVVEELGHIGKPAAADDPEAFLDEGAEAVEAEALPRPPVVTVMGHVDHGKTSLLDYIRRTKVVQGEAGGITQHIGAYHVETPRGVITFLDTPGHEAFTAMRARGAKATDIVILVVAADDGVMPQTIEAIAHAKAAGVPMVVAVNKIDKEAANPERIRQELTAHEVVPDEWGGDVQFIDVSAKKGLHIDALLEAVLLEAEVLELTAPVDAPAKGIIVEARLDKGRGAVATLLVQSGTLKKGDMLLAGTAFGKIRAMVDENGKAINEAGPSIPVEILGLSDVPNAGEDAMVLADEKKAREIALFRQGKYRDVRLAKQQAAKLENMFNNMGETQAQSLSVIIKADVQGSYEALAGSLKKLSTDEVKVNVLHSGVGGITESDVNLAIASGAFIIGFNVRADASSRKLAENENVEIRYYNIIYDAIDDVKAAMSGMLSPEEKEQVTGTVEIRQVISVSKVGNIAGCMVTDGVVKRDSHVRLIRNNVVIHTGELASLKRYKDDVKEVRMGFECGLMLKGYNEIMEGDQLECFDIVEVARSL

SEQ ID NO: 3330 - protein, 310 aa, Neisseria meningitidis; identical to SEQ ID NO: 2407

SEQ ID NO: 3331 - protein, 106 aa, Neisseria meningitidis
MFGKQLFEEVGSKISETIANSPAKDVEKNIKAMLGGAFNRMDLVTREEFDIQQQVLIKTRTKLAALEARLAKLEAAQNPERAALEAAEAAAEEAVAEIRQQTEAGE

SEQ ID NO: 3332 - protein, 129 aa, Neisseria meningitidis
MKNVQKGFTLLELMIAVAILGILTLITYPSYKTYIRRVRLSEVRTTLLHNAQTMERYYRQKGTFKTYDKNKLKQNEYFDITLSEVSPDHFTLQADPNPTTNDGETCVVTLNDGGTIAASGTNQSCPGFD

SEQ ID NO: 3333 - protein, 322 aa, Neisseria meningitidis
MKLTLALPSLNLDEDEIRIPLCLPAFNKILQYGSLHRQSCTASAFYARYLWCGRLAERAAQSLNMPSEAVALATPVWQKMGMHQANVLTAEYLNVGTDEAERLCRDLSAFYGDIPWRFVPVLPELWLVSLPCAYRWGAKPVLDLGGLLGADDQPDGEDALEWLRVQTEIQMWLAAHPVNHNRKKRGLPELNGLWLWDGTNGGAQGGTLFADTVWSRFHPDRRALPDNFRAYEETAAHLPDTHHILFMDDLRLTALTGDRERYAAILQQWEERWFAPLYEAVRTGKIKRLDITTDGQHGGTLTFKPADRWKFWRGAKTFDGIW

SEQ ID NO: 3334 - protein, 169 aa, Neisseria meningitidis; identical to SEQ ID NO: 219

SEQ ID NO: 3335 - protein, 482 aa, Neisseria meningitidis
MKGDIGVIGLAVMGQNLILNMNDCGFKVVAYNRTIGKVDEFLNGAAKGTGIIGAYSLQDLVDKLEKPRKIMMMVRAGSVVDDFIEQLLPLLEKGDIIIDGGNANYPDTTRRTHYLAEKGILFVGMGVSGGEEGARHGPSIMPGGDERAWEAVKPIFQAIAAKTPQGEPCCDWVGRDGAGHFVKMVHNGIEYGDMQLICEAYQFMKDGLGLSYDEMHRVFAEWNKTELDSYLIEITAAILGYKDEGGEPLVEKILDTAGQKGTGKWTGINALDLGIPLTLISEAVFARCVSSFKEQRVQTGKLFARTVTPVEGGKQEWVEALRQALLASKIISYAQGFMLIREAGESYGWDLDYGNTALLWREGCIIRSAFLSNIRDAYENNPDLVFLGADPYFKNILENCLPAWRKVVARAVECGIPMPCMASAITFLDGYTTERLPANLLQAQRDYFGAHTYERTDKPRGEFFHTNWTGKGGDTASTTYDI

SEQ ID NO: 3336 - protein, 159 aa, Neisseria meningitidis; identical to SEQ ID NO: 929

SEQ ID NO: 3337 - protein, 402 aa, Neisseria meningitidis; identical to SEQ ID NO: 2438

SEQ ID NO: 3338 - protein, 392 aa, Neisseria meningitidis; identical to SEQ ID NO: 633

SEQ ID NO: 3339 - protein, 512 aa, Neisseria meningitidis
MFHSIEKYRTPAQVLLGLIALTFVGFGVSTVSHPGADYIVQVGDEKISDHSINNAMQNEQADGGSPSRDAVFQSLLQRAYLKQGAKLMGISVSSEQIKQIIVDDPNFHDANGKFDHALLNRYLSQRHMSEDQFVEEIRDQFALQNLVNLVQNGVLVGDAQAEQLIRLTQVNRTIRSHTFNPDEFIAQVKVSEADLQKFYNANKKDYLLPKAVKLEYVALNLKDFADKQTVSETEVKNAFEERVARLPANEAKPSFEQEKAAVENELKMKKAVADFNKAKEKLGDDAFNHPSSLAEAAKNSGLKVETQETWLSRQDAQMSGMPENLINAVFSDDVLKKKHNSEVLTINSETAWVVRAKEVREEKTLPFAEAKDAVRQAYIRTEAAKLAENKAKDVLTQLNGGKAVDVKWSEVSVLGAQQARQSMPPEAYAELLKAKPANGKPAYVRLIGLPAPVIVEVQAVTPPDDIAAQLPLAKQALAQQQSANTFDLLIRYFNGKIKQTKGAQSVDNGDGQ

SEQ ID NO: 3340 - protein, 382 aa, Neisseria meningitidis
MPLPLPSPEARQFSLKLQTLIAEKIGKHGNWIPFSRFMELVLYAPQYGYYTGGSHKIGNTGDFITAPTLTSLFAQTLARQLQELLSQTAGNIYEFGAGTGQLAADLLGSISDGISRYYIIEISPELAARQKNLIQARAPEASQKVVHLTALPEAFDGIIIGNEVLDAMPVEIVRKNEGGSFEHVGVCLDNDRFTYSARPLHDLQLSALASLYFPQTDYPYTSELHPQQYAFIRTLASRLERGGMIFIDYGFDAAQYYHPQRNQGTLIGHYRHHVIHNPFDFIGLADLTAHVNFTDIAQAGTDAGLDLTGYLPQSHFLLNLGITELLAQVGKTDSPAYIREAAAVQKLIDQHEMGELFKVIAFGKNIGVDWAGFRFGDICHKL

SEQ ID NO: 3341 - protein, 431 aa, Neisseria meningitidis
MSVIQDLQSRGLIAQTTDIEALDALLNEQKISLYCGFDPTADSLHIGHLLPVLALRRFQQAGHTPIALVGGATGMIGDPSFKAAERSLNSAETVAGWVESIRSQLTPFLSFEGGNAAIMANNADWFGKMNCLDFLRDIGKHFSVNAMLNKESVKQRIDRDGAGISFTEFAYSLLQGYDFAELNKRHGAVLEIGGSDQWGNITAGIDLTRRLYQKQVFGLTLPLVTKSDGTKFGKTEGGAVWLNAKKTSPYQFYQFWLKVADADVYKFLKYFTFLSIEEIDAVEAKDQASGSKPEAQRILAEEMTRLIHGEEALAAAQRISGSLFAEDQSSLTESDFEQLALDGLPAFEVSDGINVVEALVKTGLASSNKEARGFVNSKAVLLNGKPAEANNPNHAAERPDDACLLTDEHKRFGKYTILRRGKRNHALLVWK

SEQ ID NO: 3342 - protein, 184 aa, Neisseria meningitidis
MKKIIASALIATFALAACQDDTQARLEQQQKQIEALQQQLAQQADDTVYQLTPEAVKDTIPAEAQANGNNGQPVTGKDGQQYIYDQSTGSWLLQSLVGAAAGAFIGNALANKFTRAGNQDSPVARRARAAYHQSARPNARTSRDLNTRSLRAKQQAAQAQRYRPTTRPPANYRRPAMRGFGRRR

SEQ ID NO: 3343 - protein, 326 aa, Neisseria meningitidis
  misc_feature 322, 323, 324: 'Xaa' is any amino acid
MDTLTRFLPEHLQQNQLPEALGGVLLSVVSACTEINAKVRLGALAGVLGMAGTGNIQGEDQKKLDVIANNIMIDTLKANPAVAGLASEEEDSFVSAGENGRYLVLFDPLDGSSNIDVNISVGTIFSILEKPEGALATESFLQTGRQQLAAGYVLYGPQTQLVFTFGHGVYMFTLNAENEFVLTKEKPKVPESTKEFAINMSNRRHWLPPVQQYIDELLAGETGTRGKNYNMRWVASMVAEIHRILMRGGVFMYPQDKRDPSKPGKLRLMYEANPMALILEQAGASASNARHDILGIRPESLHQRVAVIMGSSEEVDYLNRLXXXHT

SEQ ID NO: 3344 - protein, 675 aa, Neisseria meningitidis
MEVIRYPDSPFKLHQPFPPAGDQPTAIAGLLEGLSDGLAYQTLLGVTGSGKTYTMANVIAQSGRPAIIMAHNKTLAAQLYAEMREFFPENAVEYFVSYYDYYQPEAYVPSRDLFIEKDSAINEHIEQMRLSATKNLMTRDDVIIVATVSAIYGIGDPTEYQQMVLSVKEGDTIEQRDIIATLVSMQYERGDLDFKRGSFRVRGDVIDVYPAESSENALRISLFDDEIDRLDMFDPLSGSLIQRVGRYTVFPSSHYVTPRDTVLRACESIKEELRERIDFFTKENRPVEQQRIEQRTRFDLEMLYEMGFCKGIENYSRHFSGKKEGEPPPTLMDYLPDNAIMFIDESHVTVTQIGGMYKGDASRKQNLVDYGFRLPSARDNRPLKFHEFEKVMPQTVFVSATPAKYEEEHAGQVVEQVVRPTGLVDPQIIIRPVATQVDDLMSEINDRIQKGERVLVTTLTKRMAEQLTDYYSELGIKVRYLHSDIDTVERVEIIRDLRLGLFDVLVGINLLREGLDIPEVSLVAILDADKEGFLRSHRSLIQTIGRAARNVNGVAILYADKITDSMKAAIDETERRREKQIKFNEEHGIVPQQIKKQVKDIIDGVYHEEDGGKGRRQGKNKVKVSEIHNEEDAVKEIAKLEKAMQQAARDLQFEEAAVLRDRIRGIKEGLLFGSE

SEQ ID NO: 3345 - protein, 271 aa, Neisseria meningitidis
MTTLKPALPAYLDNIRIILTRTSHPANIGSAARAMKTMGLHKLTIVAPNLMATPMTENPPVFDPEHPQSFKLPEESFILASGAADVLENATIAASLDEALADTTIACALTSRRREITAPLQTPRDLVSELLQTANRGEKVALVFGNETFGLSIEEVQACNRLMTINGNPDYFSLNLAQAVQVVCYEIFSQTGSPMTHLQQEDHAATHEQIKGMVAHMESVMNDIGFFNRRNGERLMRRMQSLFGRANTQTEDIDILRGFFNTVSHRIHKKD

SEQ ID NO: 3346 - protein, 262 aa, Neisseria meningitidis
MNPKIVFFDIDDTLYRKYTDTLRPSVKTAVAALRGKGILTALATGRSLATIPEKVRDMMAEAGMDAVVTINGQFALLHGKTVREVPMDAGLMGRVCAHLDGLGMDYAFVGGEGIAVSALSECVCRALKHIASDFFADKDYFSSKPVYQMLVFAEENEMPLWSDIVEREGLKTVRWHEEAVDLLPAGASKTDGIRSVVEALGWEMADVMAFGDGLNDVEMLSEVGFGVAMGNGEQAAKEAAKYVCPGVDEDGVLRGLQDLGVI

SEQ ID NO: 3347 - protein, 411 aa, Neisseria meningitidis
MTISTMAQTHDTRLQKTLLFPSQQGWKSKTFLKPDSHIRLATVFSGIGAVEQAFHRLNLNHTIVFAGDIDPYVKKSYLGNYKLNEDFWHNDITQFDARKFRNQVDILVGGSPCQAFSMVGKRAGLEDTRGTLFYEFSRVVDEVQPKIFIYENVKGLLNHDNGKTWKVVKSVFYSLGYDLYFQIMNSKDYGIPQHRERIFVVGFHTPPINGFQFPEKIELEHTMQDFLEDYTDSKYFLREKGVKFVTSSKNRQKRYTQINGEIALCQKANQQFNWHGDFIFQAARESEFDDFIFDVNNVEEKYYLSEKIKNYVLAGGTKNFKTSTETDLPVARPLLQTMHKMHRAGVDNYVTHNRGRIRKLTPRECLRLMGFRDDFKILVSDTQMYRQAGNSIVVDVLIAILKQMDITLYGE

SEQ ID NO: 3348 - protein, 195 aa, Neisseria meningitidis
MPLPDLTDAELIESRKLLLHFARLQLPDHPDLAEDLVQETLLSAYSAGDSFQGRALVNSWLFAILKNKIIDALRQIGRQRKVFTTLDDELLDEAFESHFSQNGHWTPEGQPQHWNTPEKSLNNNEFQKILQSCLYNLPENTARVFTLKEILGFSSDEIQQMCGISTSNYHTIMHRARESLRQCLQIKWFNQENPK

SEQ ID NO: 3349 - protein, 153 aa, Neisseria meningitidis
  misc_feature 147, 148: 'Xaa' is any amino acid
MAKKISILVGSLRRASFAHKVALNAAEMFPEGWQAEIVEIGHLPLYNFDYDDPAVEDVPLPESYTAFRETIKASDGILFVTSENNRTIPACLKNAVDIGSKPNADVAWKNKPAGIISHSVGKMGGYSSQKNLRLALSYFDMPVTGQXXTHLIN

SEQ ID NO: 3350 - protein, 177 aa, Neisseria meningitidis
MAEFATIARPYAKALFGLAQEKNQIESWLGGLEKLAAVVQEGKVASLIDRPETNASEKADILIDLVGLKDKELKNFVIVLAGQKRLSILPEVYAQYQDLTLSFNHIKSAVIYSAYPLTDKQVGELAQMLNKRFDSELKISVEIEPELIGGIKVEVGDQVLDLSVQGKLSALYTTMTN

SEQ ID NO: 3351 - protein, 531 aa, Neisseria meningitidis
MSQEILDQVRRRRTFAIISHPDAGKTTLTEKLLLFSGAIQSAGTVKGKKTGKFATSDWMEIEKQRGISVASSVMQFDYKDHTVNLLDTPGHQDFSEDTYRVLTAVDSALMVIDAAKGVEAQTIKLLNVCRLRDTPIVTFMNKYDREVRDSLELLDEVENILQIRCAPVTWPIGMGKNFKGVYHILNDEIYLFEAGGERLPHEFDIIKGIENPELEQRFPLEIQQLRDEIELVQAASNEFNLDEFLAGELTPVFFGSAINNFGIQEILNSLIEWAPAPKPRDATVRMVEPDEPKFSGFIFKIQANMDPKHRDRIAFLRVCSGKFERGMKMKHLRINREIAASSVVTFMSHDRELVEEAYAGDIIGIPNHGNIQIGDSFSEGEQLTFTGIPFFAPELFRSVRIKNPLKIKQLQKGLQQLGEEGAVQVFKPMSGADLILGAVGVLQFEVVTSRLANEYGVEAVFDSASIWSARWVSCDDKKKLAEFEKANAGNLAIDAGGNLAYLAPNRVNLGLTQERWPDIVFHETREHSVKL

SEQ ID NO: 3352 - protein, 191 aa, Neisseria meningitidis
MRIPLLAPDNYAFPDPAYALARCDGLVGVSRDLDAGRLLEAYRNGVFPWFLRDGWFFWYAVGPRAVIVPERLHVPRSLEKTLRNCSYRVTVNGCFAEVVAHCAAAVRPNQDGTWIAPEFQTAYLKLHEMGYAHSFECHYPDENGKTRLAGGFYAFRSAGCFTANRCSHYNRMRRKSRLPAPCRFSRLWVWN

SEQ ID NO: 3353 - protein, 704 aa, Neisseria meningitidis
MDLLSVFHKYRLKYAVAVLTILLLAAVGLHASVYRTFTPENIRSRLQQSIAHTHRKISFDADIQRRLLPRPTVILKNLTITEPGGDRTAVSVQETKIGLSWKNLWSDQIQIEKWVVSSAELALTRDGKGVWNIQDLIDSQKRQASVNRIIVENSTVRLNFLQEQLILKEINLNLQSPDSSGQPFESSGILVWGKLSVPWKSRGLFLSDGIGTPKISPFHFEASTSLDGHGITISTTGSPSVRFNAGGADAAGLGLRADTSFRNLHLTAQIPTLALRNNSIKIETVNGAFTAGGEYAQWDGSFKLDKANLHSGIANIGNAEISGSFKTPRHQTNFSFNSPLVWTENKGLDAPRLYVSTLQDTVNRLPQPRFISRLDGSLSVPNLQNWNAELNGTFDRQTVAAKFRYTHEDAPHLEAAVALQKLNLTPYLDDVRQQNGKIFPDTLAKLSGDIEAHLKIGKVQLPGLQLDDMETYLHADKGHIALSRFKSGLYGGHTEGGISIANTRPATYRLQQNASNIQIQPLLQDLFGFHSFSGNGDAVIDLTAGGETRKELIRSLQGSLSLNISNGSWHGIDMDNILKNGISGKTADNAAPSTPFHRFTLNSEISDGISRHIDTELFSDSLYVTSNGYTNLDTQELSEDVLIRNAVHPKNKPIPLKITGTVDKPSITVDYGRLIGGINSRKEKQKILEDTLLEQWQWLKPKEP

SEQ ID NO: 3354 - protein, 84 aa, Neisseria meningitidis; identical to SEQ ID NO: 2915
  misc_feature 79, 80: 'Xaa' is any amino acid

SEQ ID NO: 3355 - protein, 431 aa, Neisseria meningitidis
LAGVGKLARLGAKFSTRAVPYVGTALLAHDVYETFKEDIQAQGYQYDPETDKFVKGYEYSNCLWYEDERRINRTYGCYGVDSSIMRLMSDYSRFPEVKELMESQMYRLARPFWNWHKEELNKLSSLDWNNFVLNRCTFDWNGGDCVVNKGDDYRNGANFSLSRNPKYKEEMDAKKLEEILSLKVDANPDKYIKATGYPGYSEKVEVAPGTKVNMGPVTDRNGNPVQVVATFGRDSQGNTTVDVQVIPRPDLTPGSAEAPNAQPLPEVSPAENPANNPNPNENPGTSPNPEPDPDLNPDANPDTDGQPGTRPDSPAVPGRTNGRDGEDGGLLCKFFPDILACDRLPEPNPAEDLNLPSETVNVEFQKSGIFQNSAQCPAPVTFTVTVLDSSRQFAFSFENACTIAERLRYMLLALAWAVAAFFCIRTVSREV

SEQ ID NO: 3356 - protein, 1389 aa, Neisseria meningitidis
MTDTAPTDTDPTENGTRKMPSEHRPAPPAKKRRPLLKLSAVLLSVLILAVCFLGWLAGTEAGLRFGLYQIPSWFGVNISSQNLKGTLLDGFDGDNWSIETEGADLKISRFRFAWKPSELMHRSLHITEISAGDIAIVTKPTPPKEERPPLSLPDSIDLPAAVYLDRFETGKISMGKAFDKQTVYLERLDASYRYDRKGHRLDLKAADTPWSSSSGAASVGLKKPFALDTAIYTKGGLEGKTIHSTARLSGSLKDVRAELAIDGGNIRLSGKSVIHPFAESLDKTLEEVLVKGFNINPAAFVPSLPDAGLNFDLTAIPSFSDGIALEGSLDLENTKAGFADRNGIPVRQVLGSFVIRQDGTVHIGNTSAALLGRGGIRLSGKIDTGKDILDLNIGINSVGAEDVLQTAFKGRLDGSIGIGGTTASPKISWQLGIGTARTDGSLAIASDPANGQRKLVLDTVNIAAGQGSLTAQGYLELFKDRLLKLDIRSRAFDPSRIDPQLPAGNINGSINLAGELAKEKFTGKMRFLPGTFNGVPIAGSADIVYESRHLPRAAVDLRLGRNIIKTDGGFGKKGDRLNLNITAPDLSRFGFGLAGSLNVRGHLSGDLDGGIRTFETDLSGAARNLHIGKAADIRSLDFTLKGSPDTSRPIRADIKGSRLSLSGGAAVVDTADLMLDGTGVQHRIRTHAAMTLDGKPFKFDLDASGGINRELTRWKGSIGILDIGGAFNLKLQNRMTLEAGAERVAASAANWQAMGGSLNLQHFSWDKKTGISAKGGAHGLHIAELHNFFKPPFEHNLVLNGDWDVAYGRNARGYLNISRQSGDAVLPGGQALGLNAFSLKTRFQNDRIGILLDGGARFGRINADLDIGNAFGGNMANAPLGGRITASLPDLGTLKPFLPAAAQNITGSLNAAAQIGGRVGSPSVNAAVNGSSNYGKINGNITVGQSRSFDTAPLGGRLNLTVADAEVFRNFLPVGQTVKGSLNAAVTLGGSIADPHLGGSINGDKLYYRNQTQGIILDNGSLRSHIAGRKWVIDSLKFRHEGTAELSGTVGMENSGPDVDIGAVFDKYRILSRPNRRLTVSGNTRLRYSPQKGISVTGMIKTDQGLFGSQKSSMPSVGDDVVVLGEVKKEAAAPLPVNMNLTLDLNDGIRFAGYGADVTIGGKLTLTAQSGGSVRGVGTVRVIKGRYKAYGQDLDITKGTVSFVGPLNDPNLNIRAERRLSPVGAGVEILGSLNSPRITLTANEPMSEKDKLSWLILNRAGSGSSGDNAALSAAAGALLAGQINDRIGLVDDLGFTSKRSRNAQTGELNPAEQVLTVGKQLTGKLYIGYEYSISSAEQSVKLIYRLTRAIQAVARIGSRSSGGELTYTIRFDRFSGSDKKDSAGNGKGK

SEQ ID NO: 3357 - protein, 383 aa, Neisseria meningitidis
MSNRDQLFKAPPFENHSPLTWYQAASQLPNFIRDDAQAAAIEHLDRLWTELMMFKRKRNRFLGRSLRSPQVPKGLYFYGGVGRGKSFLMDAFFGCLPYRRKRRVHFHAFMAEIHQRLKTLKSESNPLKSVAAEIAKETRVLCFDEFHVSDIADAMILGRLLENLLNEGVVLVATSNYAPSELYPQGQNRSSFLPTIALIESSLTVLNVDGGEDYRLRTLRPAEIFFTPANEENEAKLAKLFKEMTGITDLNPGISTIHGREIPHKAESGRAIWFDFRALCFGPRSQSDYLYLAEHYEMVFISGLEQLSPQEKAEARRLTWLIDVLYDFRVKLCATGAVDVNHIYTEGDFAEEFTRTASRMVEMQSEVYLEQPHLTLSPKASGG

SEQ ID NO: 3358 - protein, 458 aa, Neisseria meningitidis
MKHIHIIGIGGTFMGGIAAIAKEAGFEVSGCDAKMYPPMSTQLEALGIGVHEGFDAAQLEEFKADVYVIGNVAKRGMDVVEAILNRGLPYISGPQWLAENVLHHHWVLGVAGTHGKTTTASMLAWVLEYAGLAPGFLIGGVPENFGVSARLPQTPRQDPNSQSPFFVIEADEYDTAFFDKRSKFVHYRPRTAVLNNLEFDHADIFADLGAIQTQFHYLVRTVPSEGLIVCNGRQQSLQDTLDKGCWTPVEKFGTEHGWQAGEANADGSFDVLLDGKTAGRVKWDLMGRHNRMNALAVIAAARHAGVGIQTACEALGAFKNVKRRMEIKGTANGITVYDDFAHHPTAIETTIQGLRQRIGGARILAVLEPRSNTMKLGTMKSALPVSLKEADQVFCYAGGVDWNVAEALAPLGGRLHVGKDFDAFVAEIVKNAEAGDHILVMSNGGFGGIHGKLLDALR

SEQ ID NO: 3359 - protein, 485 aa, Neisseria meningitidis
MKPTIALVGRPNVGKSTLFNRLTRTKDALVHDLPGLTRDRHYGHGKVGSKPYLVIDTGGFEPVVDSGILHEMAKQTLQAVDEADAVVFLVDGRTGLTPQDKIIADRLRQSPRPVYLAVNKGEGGNRAVLAAEFYELALGDPYVISGAHGDGVYYLIEDILETFPEPEAEEADAKHPVFAVIGRPNVGKSTLVNAILGEERVIAFDMAGTTRDSIHIDFEREGKPFTIIDTAGVRRRGKVDEAVEKFSVIKAMQAVEAANVAVLVLDAQQDIADQDATIAGFALEAGRALVVAVNKWDGISEERREQVKRDINRKLYFLDFAKFHFISALKERGIDGLFDSIQAAYNAAMIKMPTPKITRVLQSAIERQQPPRAGLVRPKMRYAHQGGMNPPVIVVHGNSLHAISDSYTRYLTQTFRKAFNLQGTPLRIQYNVSENPYENAEDKPKKKPLRRVSLSNRIEKREGRKEEKNRFKKKTKVSVKKQFSK

SEQ ID NO: 3360 - protein, 768 aa, Neisseria meningitidis
MAKNLLIVESPSKAKTLKKYLGGDFEILASYGHVRDLVPKSGAVDPDNGFAMKYQLISRNSKHVDAIVAGAKEAENIYLATDPDREGEAISWHLLEILKSKRGLKNIKPQRVVFHEITKNAVLDAVANPREIEMDLVDAQQARRALDYLVGFNLSPLLWKKIRRGLSAGRVQSPALRLICERENEIRAFEAQEYWTVHLDSHKGRSKFTAKLAQYNGAKLEQFDLPNEAAQADVLKELEGKEAVVTAIEKKKRSRNPAAPFTTSTMQQDAVRKLGFTTDRTMRTAQQLYEGIDVGQGAIGLITYMRTDSVNLADEALTEIRHYIENKIGKEYLPSAAKQYKTKSKNAQEAHEAIRPTSVYRTPESVKPFLSADQFKLYQMIWQRTVACQMTPAKFDQTTVDITVGKGVFRVTGQVQTFAGFLSVYEESNDDEESEDSKKLPEMSEGDKLPVDKLYGEQHFTTPPPRYNEATLVKALEEYGIGRPSTYASIISTLKDREYVTLEQKRFMPTDTGDIVNKFLTEHFAQYVDYHFTAKLEDQLDEIADGKRQWIPLMDKFWKPFIKQVEEKEGIERAKFTTQELDETCPKCGEHKLQIKFGKMGRFVACAGYPECSYTRNVNETAEEAAERIAKAEAEQAELDGRECPKCGGRLVYKYSRTGSKFIGCANYPKCKHVEPLEKPKDTGVQCPQCKKGNLVERKSRYGKLFYSCSTYPDCNYATWNPPVAEECPNCHWPVLTIKTTKRWGVEKVCPQKECGWKEQIEPPAPKE

SEQ ID NO: 3361 - protein, 360 aa, Neisseria meningitidis; identical to SEQ ID NO: 2477

SEQ ID NO: 3362 - protein, 78 aa, Neisseria meningitidis; identical to SEQ ID NO: 1622

SEQ ID NO: 3363 - protein, 391 aa, Neisseria meningitidis; identical to SEQ ID NO: 2276

SEQ ID NO: 3364 - protein, 75 aa, Neisseria meningitidis; identical to SEQ ID NO: 1870

SEQ ID NO: 3365 - protein, 66 aa, Neisseria meningitidis
MSVQTVTYNKFFMNTNQPAVYDPLTRALHWLTVAGFIGILTTIVLWTIYSGLTKIRTRRRSRRQYK

SEQ ID NO: 3366 - protein, 119 aa, Neisseria meningitidis
MPRVKRGVTARARHQKIFALAKGYRGRRKNVYRVAKQAVMKAGQYAYRDRRQRKRQFRQLWIVRINAGTRENGLSYSKFMNGLKRASIEIDRKVLADLAVFDKAAFAQLVEKAKAALAA

SEQ ID NO: 3367 - protein, 364 aa, Neisseria meningitidis
LIFSFFSGAGFLDLGFELSGFDIAFVNEVHPPFLEAYKYSRSRMDIPKPKYGYFKGSIDECLYAEKAKDLAGWVKKEKQNGIIVGFIGGPPCPDFSIAGKNKGKDGENGKLSQSYVDLICKNQPDFFVFENVKGLYRTAKHREFFNALKRQLSDFGYVCTEKLINAIEYGVPQDRERIILVGFLSQHVDALQKFDWDAHISFPDALEKDWPTTEEVGRVVSQPANIYPELTVQYWFNRNGVDTHPNASKHFQPRAGLEKFQTISEGDDKKKSYKRLHRWRYSPTAAYGNNEVHIHPYLPRRISAAEALAIQSLPKEFELPDNMTLSNMFKTIGNGVPFLAAKGIAMTLKSYLENHYERTKTDGC

SEQ ID NO: 3368 - protein, 434 aa, Neisseria meningitidis
MKKHIWAASLLPASLSAEPLNWWKPYSAVNSGDTAWVMTAAALVLLMTLPGLALFYGGMVRKKNLLSTMMHSFSIATLVGILWVAVGYSLAFTPGNAFIGGLGRVFLSGMQIDATAQMLTVSPNAPTVPEPVFMFFQMTFAIISTAIITGAFAERMKYSAMMLFSGIWFLLVYVPGAHWVWGGGFMSKGGVLDYAGGTVVHINAGIAGLVAALVLGRRIGYGREAMPPHNMAMTLIGAAMLWFGWFGFNAGSALAADAAAGMAMAVTQVSAVFGAAGWLACEKIAGHKPSALGLASGAVSGLVGITPAAGFTGPSGAAAIGILTAAACFVSVTVVKHKLRYDDSLDAFGIHGFGGLVGGILTGIFFDNRIFGGDAAVWQQLWIQVKDGFVMAAYSGLMSWAILKVVGKICGGLRVGKDVEREGLDLNIHGERVE

SEQ ID NO: 3369 - protein, 242 aa, Neisseria meningitidis
MLLGVNIDHIATVRNARGTTYPSPVEAALVAETHGADLITMHLREDRRHIKDADVFAVKNAIRTRLNLEMALTEEMLENALKVMPEDVCIVPEKRQEITTEGGLDVLAQQEKIAEFTKILTDAGIRVSLFIDADDRQIQAARDVGAPVVELHTGAYADARSHAEQIRQFERIQNGAHFAGDLGLVVNAGHGLTIHNVTPIAQILAIRELNIGHSLIAQALFLGLPEAVRQMKEAMFRARLLP

SEQ ID NO: 3370 - protein, 420 aa, Neisseria meningitidis
MSNTQKQLALAKAAKKSVNTADTEEKNRALLAMADSLEAATADILAANRQDLEAAAGKIPESMADRLLLDEKRIGAMADGIRAVAALPDPVGEILETSTLPNGLEIVKKRVAMGVIGIIYESRPNVTSDAAALALKSGSAVVLRSGKDAFQSARAIVAALKTGLAQTRIDPDALQLIEDTGRESSYEMMRAKDYLDLLIPRGGAGLIRAVVENAVVPVIETGTGIVHIYIDKDADWDKALRIVYNAKTSRPSVCNSMEVLLVHEDIAADFLPKLERLLVRDRIEAGLPPVRFRLDPQAARHIGGEAAGADDFDTEFLDYILAVKTVASVEEAVWHIETHSTHHSDGIVTENRHAADYFTTHIDSAAVYVNASTRFTDGGEFGLGCEMGISTQKLHARGPMGLKELTSYKYIVQGTGQVRE

SEQ ID NO: 3371 - protein, 126 aa, Neisseria meningitidis
MPLKFQPRERSVIMCDFRGYEEPEMVKKRPVVVIARNRHNGKLVTVVPLSSTEPVPLADYHHKMSGNPLPDKPHIQCWAKCDMTATVGLARLDRYKPKGRDRCIPIISEEDFQAIKTAVAKAFKLY

SEQ ID NO: 3372 - protein, 76 aa, Neisseria meningitidis
MEEVKANPQGKTPARIPPMSDTKNGWLAKDGWVKRVQNVNKIEIHYIENTRTGEKTDFKFIENTRTGEKTDFKFKD

SEQ ID NO: 3373 - protein, 253 aa, Neisseria meningitidis
MTEFVVLIPARLDSSRLPGKALADIHGKPMVVRVAEQAAKSKAVRVVVATDHPDIQTACQAHGVEVVMTSNRHESGTTRLAEASAALKLPPHLVVVNVQGDEPLIAPELIDRTAEVLVENNVQMATAAHELHDFDELMNPNAVKVVLDKNRNAIYFSRAPIPYPRDAMRAGKREMPFETAVLRHIGIYAYRVGFLQRYTEMSVSSLETIESLEQLRVLWHGYSIAVETAKEAPAAGVDTQEDLDRVRAVFQTV

SEQ ID NO: 3374 - protein, 259 aa, Neisseria meningitidis
MSATIPPKIIRYDSNPTDVYFFGTCVLDLFMPEAGMDAITLIEQQGIRVHFPMAQSCCGQPAYSSGHPTEAFDVARAQLDLFPEEWPIVVPSGSCGGMMKHHWPTLFKGSEYEERAVDCAGRIIEFTHFLLAIGFKPEDKGEPLKVAVHTSCAARREMNVHLSGWQLIDGMENVERIVHDHESECCGFGGTFSVKQADISGAMVTDKVAALKETGATEIISADCGCMMNIGGKIAKDEPDMPRPKHIASFLLERTGGKA

SEQ ID NO: 3375 - protein, 71 aa, Neisseria meningitidis
VFKLGVYACLGLFAGWVLLLIVQLWFSFLEAELFFKITLTMAGLFVIILAALLVFGQYFSEKKMKDDGFIN

SEQ ID NO: 3376 - protein, 128 aa, Neisseria meningitidis
VVVFGILKRNGRVYTVVVNNAKSETLLPVIKKKIMPDSIVYTDSLSSCDKLDVSGFIHYRINHSKECADRQNHINGIENFWNQAKRVLRKYNGIDRKSFPLFLKECEFRFNFGTPSQQLKILRDWCGI

SEQ ID NO: 3377 - protein, 377 aa, Neisseria meningitidis; identical to SEQ ID NO: 2958

SEQ ID NO: 3378 - protein, 89 aa, Neisseria meningitidis
MLKQSIEIINKLGLHARASSKFTQTASQFQSEVWVTKNGSRVNGKSIMGLMMLAAAKGTVIELETDGADEAEAMRALSDLINGYFGEGE

SEQ ID NO: 3379 - protein, 465 aa, Neisseria meningitidis; identical to SEQ ID NO: 1096

SEQ ID NO: 3380 - protein, 323 aa, Neisseria meningitidis
MSAKFQQETLKSRFAQAKVLVVGDVMLDRYWFGDVSRISPEAPVPVAKIGRIDQRAGGAANVARNIASLGGRAGLLSVTGNDEAADALDALMVQDGVASYLMRDKQIATTVKLRVVARNQQLIRLDFEEHPNCEVLEQIKQKYREILPEYDAIIFSDYGKGGLSHISDMIDWAKHAGKTVLIDPKGDDYEKYVGATLITPNRAELKEVVGSWKNESELTEKAQNLRRHLDLTAVLLTRSEEGMTLFSEGEPIYQPTRAQEVYDVSGAGDTVIAGMGLGLAAGCTMPEAMYLANTAAGVVVAKLGTAVCSFAELIKALSGQSTM

SEQ ID NO: 3381 - protein, 948 aa, Neisseria meningitidis
MCKHHPQHSHDNDTIRIRGARTHNLKNVDLDIPRHKLVVVTGLSGSGKSSLAFDTLYAEGQRRYVESLSAYARQFLQMMDKPDVDLIEGLSPAISIEQKSTSHNPRSTVGTVTEIHDYLRLLYARVGTPYCPEHKLPLSSQTVSQMVDAVLKLPEDTRVMILAPAVRERKGEFVDFFADLQAQGFARVRVDGEVYQLDEVPKLEKNIKHNIDVVIDRVKVKADIKQRLAESFETALRHGNERALAMEMDSGEEHWFSARFACPVCSYSLPELEPRLFSFNNPMGSCPTCDGLGNTNFFDPEKVVAHPELSLASGAIDGWDKRNQFYFQMIQSLARHYGFDVQAAWETLPAKIKKVVLHGSGKEVIDFTYLSERGTTFNRSHAFEGIIPNLERRYRETDSETVREKLREYQNHRACPSCGGARLRKEARYVYVSGEPLHEVSAWPLTKTHRFFETLDLDGNKKQIAEKILKEITERLGFLINVGLDYLNLSRSAETLSGGEAQRIRLASQIGSGLTGVMYVLDEPSIGLHQRDNDRLLATLKRLRDLGNSVIVVEHDEDAIREADFVVDMGPGAGEHGGNVLIADTPENVAKCENSVTGQYLSGKKSIAVPSERTPVNPGRMLVLKGARGNNLKNVTLELPLGLITCITGVSGSGKSTLINDTLAKITARELNRAQEEPAPYDDIRGLEHLDKVINVDQSPIGRTPRSNPATYTGLFTPIRELFASVPLSRERGYNVGRFSFNVKGGRCEACQGDGVIKVEMHFLPDVYVPCEVCHGKRYNRETLEIQYKGKNISQVLDMTVEEACEFFDAVPTVSRKLQTLMDVGLGYIRLGQSATTLSGGEAQRVKLALELSKRDTGRTLYILDEPTTGLHFADIALLLEVIGRLKGKGNSIVIIEHNLDVIKTADWIVDLGPEGGDGGGRIIASGSPEEVAKVKGSYTGKYLKNIL

SEQ ID NO: 3382 - protein, 852 aa, Neisseria meningitidis
MPANLSSALETFKQQRDAAEAHYLKANRVSVFFREYTAALETLLAALWAEYFQNSALCLMAVGGFGRGELYPCSDVDLAVVSPAPLSDGIQEQIARFVQTLWDCKLMPSVKSGSVDELCESVRNDITGDTAFLEARFLFGNRQTADKLAEKMNAQRNVAAFVEAKLVEMEHRHAKSQGSGAVLEPNIKSCPGGLRDIHTLLWIAKAQGLATDLPDLLKQRILTRAEAGMLSHGYRRLAHIRIHLHLNANRAEDRLLFDLQPQVAESMGYEGLNLRRQSEELMRVFYRAIKTVKQLGGILTPMLQSRVSSTPLRVTLRIDDDYIQVNNQIAARHTDIFFRRPEHIFKIVEIMQQRNDITALEPQTLRAWWGATRKINRSFYQNSENRHRFAGFFRNGNGLTQTLRFLNLYGVLGRYLPAWEKIVGLLQHDLFHIYPVDDHILAVVRNVRRLALDMHSHELPYASALMQSFEKQDILYLAAFFHDIAKGRGGDHAIQGIADARQFAADHFLTGEESDLLAWLVENHLLMSAVAQKEDIQDPDVLDAFCKRVQTHERLSALYLLTISDIRGTNPKLWNAWRASLLESLFHAAGRYLTGNGGNPHTLFGRRRQEAADLLTRAAVPEKQQKKLWNALGSAYFARHQSREILWHAANLVHDFETPIVRSRILPKSDSFQVMVFMPNGPRLFARLCRIFSRHGFDILAARAFITEHDYILDTFIVQIPSQHAPEDYPDIQSALEAELNSFIHGHTVAEISSHSRRISRRSRYMPIAPSITITPEEDYPDWYSVEITAVNRPFLLADMAEVFFAHNVSLRYAKISTLDERAEDSFTVFSPDLKNPKIQSSLKQALLEQLT

SEQ ID NO: 3383 - protein, 428 aa, Neisseria meningitidis
MTAQHQTPLRFITAGSVDDGKSTLIGRLLYDSKALLSDQIKTLESGKSKGLKEAIDFSILTDGLEAEREQGITIDVAYRYFSTAKRKFIIADTPGHEQYTRNMVTGASTASAAVVLVDASQLDFGAQPLQLLPQTKRHSAILRQLNCPHIVVAVNKMDLLDYSEDKFNAIVEAYRRLAEQLGLKDAHFVPVSALLGDNLVYPGGNMPWYRGEPLLAILENLPGADETGRSAADFYFPVQLVVRQDADKADDFRGYQGRIERGSVAVGQTVRIEPNGLTAKVSEIITPKGEVAQAFAGEAATLRLDRDIDVSRGDLFVDKNSPLAPQKHLEATLCWFDERPLNTARRYLLKHGTQTLPAKVGEIESVLDVRTLEQEAGAESLKMNDIAKVRINLQKPVTATPYAENTAAGSFILIDEATYGTVAAGMIL

SEQ ID NO: 3384 - protein, 172 aa, Neisseria meningitidis
MRLFPIAAALTLAACGTVQSTQYFVLPDSRYIRPATQGGETAVEVRLAEPLKRGGLVYQTDPYRLNTAQNHVWADTLDDMLEAALSNAFNRLDNTRIFVPASRSGSTEKWTVYIDAFQGSYTGKTLISGYAVLPDGTNRPFHIETEQQGDGYAAMTAALEQGLKQAAQQMVE

SEQ ID NO: 3385 - protein, 96 aa, Neisseria meningitidis
  misc_feature 92, 93, 94: 'Xaa' is any amino acid
MNLHAKDKTQHPENVELLSAQKPITDFKGLLTTIISAVVCFGIYHILPYSPDANKGIALLIFVAALWFTEAVHITVTALMVPILAVVLGFPXXXHT

SEQ ID NO: 3386 - protein, 117 aa, Neisseria meningitidis
VYSGRGFAPAQSQLPCVVVYVDRRRTEQETFDFPPTYRHTVRLVTLVCVQAASGADELAEEMLSLIGQLFAEHSDLGVGDLENLVPDLLNIDSDESGEAVTVYYQQGWQAIYFDTAV

SEQ ID NO: 3387 - protein, 282 aa, Neisseria meningitidis; identical to SEQ ID NO: 1323

SEQ ID NO: 3388 - protein, 151 aa, Neisseria meningitidis
MFGGAHELSIDSKGRLAVPAKFRDILSRLYTPAVVVTLESKHKLLMYPVAEWEKVAAQLLNLKVADNPVLRRFQNLLLHNAEILEWDSAGRVLLPAGLRKRVDFDREVVLVGRANRLELWGREQWEAEMVQALDDDPDELAFQLGQTDLQL

SEQ ID NO: 3389 - protein, 230 aa, Neisseria meningitidis; identical to SEQ ID NO: 675

SEQ ID NO: 3390 - protein, 263 aa, Neisseria meningitidis
MNVYFLGGGNMAAAVAGGLVKQGGYRIHIANRGAEKRERLQKELGVETSETLPELHSDDVLILAVKPQDMEAACKNIRTNGALVLSVAAGLPVDTLSRYLGGTRRIVRVMPNTPGKIGLGVSGMYAEAEVSETDRRIADRIMKSVGLTVWLEDEAQMHSITGISGSGPAYVFYLLDALQNAAIRQGFDMAEARALSLATFKGAVALAEQTGEDFEKLQKNVTSKGGTTHEAVEAFRRHRVAEAISEGVCACVRRSQEMERQYQ

SEQ ID NO: 3391 - protein, 131 aa, Neisseria meningitidis
MDKNLLEAVKFDEKGLVCAIAQDAETKRVLMVAWMNAEALQKTVETGFAHYYSRSRQKQWMKGEESGHTQKVRELRLDCDGDAIVMLIAQNGGIACHTGRESCFYKVWRGSAWETADAVLKDEKEIYGSTH

SEQ ID NO: 3392 - protein, 159 aa, Neisseria meningitidis
MNKLFLTAAVLMLGACGFHLKGADGISPPLTYRSWHIEGGQALQFPLETALYQASGRVDDAAGAQMTLRIDSVSQNKETYTVTRAAVINEYLLILTVEAQVLKRGEPVGKPMTVSVRRVLAYADNEILGKQEEEAALWAEMRQDAAEQIVRRLTFLKAE

SEQ ID NO: 3393 - protein, 257 aa, Neisseria meningitidis
MNTIADVQSSRDLRNLPINQVGIKDLRFPISLKSKEGEQSTVAHLTMTVYLPAEQKGTHMSRFVALMEQHAEALDFAQLRKLTTEMVALLDSRAGKISVSFPFFRKKTAPVSGIRSLLDYDVCLTGEIKDGAYGHSMKVMIPVTSLCPCSKEISQYGAHNQRSHVTVSLTADAEVGIEEVIDYVEAQASCQLYGLLKRPDEKYVTEKAYENPKFVEDMVRDVATSLIADKRIKSFVVESENFESIHNHSAYAYIAYP

SEQ ID NO: 3394 - protein, 102 aa, Neisseria meningitidis; identical to SEQ ID NO: 427

SEQ ID NO: 3395 - protein, 125 aa, Neisseria meningitidis; identical to SEQ ID NO: 2498

SEQ ID NO: 3396 - protein, 367 aa, Neisseria meningitidis
MNTTANPSNIIVGLSGGVDSSVTAALLKQQGYQVRGVFMQNWEDDDNDEYCSIKQDSFDAIAVADIVGIDIDIVNFAAQYKDKVFAYFLQEYSAGRTPNPDVLCNAEIKFKCFLDYAVGQGADTIATGHYARKEVRNGVHYLLKGLDRNKDQSYFLYRLKPFQLERAIFPLGGLEKPEVRRLAAEFKLPTAAKKDSTGICFIGERPFREFLQKYLPTDNGKMVTPEGKTVGEHVGLMFYTLGQRKGLGIGGAGEPWFVAAKDLTKNELIVVQGHDHPLLYTRSLVMNDLSFTLPERPKAGRYTCKTRYRMADAPCELRYLDEETAELVFDEPQWAVTPGQSAVLYEGDVCLGGGIIQSTDKPVIITR

SEQ ID NO: 3397 - protein, 371 aa, Neisseria meningitidis; identical to SEQ ID NO: 849

SEQ ID NO: 3398 - protein, 566 aa, Neisseria meningitidis
MSVKIQTRSVNTDVFNHLLTAGADPLIARLCASRGVQSPAELDDKLASLLPYQTLTNCEAAARRLADAVERQEKILIVADYDADGATACAVGLDGLAAMGAKVDFLVPNRFEHGYGLTPELAEIAAAQGVDLLITVDNGIASIAGVARAQELGLDVIVTDHHLPAETVPDCIIVNPNQKGCGFQSKSLAGVGVIFYVLMALRAELRRRNYFSDGLKEPNLGDLLDLVALGTVADVVSLDHNNRILVSQGLKRMRSGKMRPGIRALFEVARRDWRKAQPFDMGFALGPRINAAGRLDDMSVGIACLLARDDTEAQELAAQLNNLNIERREIEQSMLQDALNAFPETLPSGQMTLVAYRDDFHQGVVGIVASRLKDRFYRPTIVFAPADNGEVRGSGRSIPNLHLRDALDLVSKRHPDLILKFGGHAMAAGLSILEHNIPAFQTAFEEAVREMVCEDDLSQTFITDGSLPARDITLEQAQNLAKHVWGQGFAPPSFTDEFHVVRQQPLGAEGKHKKVWLQKDGCEFEAMFWRCSEDIPEYIRTVYRPVANEWRNNLELQLYIDYWEAA

SEQ ID NO: 3399 - protein, 251 aa, Neisseria meningitidis
MKFARLLFLCAALAGTQAAAAEMVQIEGGSYRPLYLKKDTGLIKVKPFKLDKYPVTNAEFAEFVNSHPQWQKGRIGSKQAEPAYLKHWMKNGSRSYAPKAGELKQPVTNVSWFAANAYCAAQGKRLPTIDEWEFAGLASATQKNGSNEPGYNRTILDWYADGGRKGLHDVGKGRPNYWGVYDMHGLIWEWTEDFNSSLLSSGNANAQMFCSGASIGSSDSSNYAAFLRYGIRTSLQSKYVLHNLGFRCTSR

SEQ ID NO: 3400 - protein, 558 aa, Neisseria meningitidis; identical to SEQ ID NO: 1615

SEQ ID NO: 3401 - protein, 404 aa, Neisseria meningitidis
  misc_feature 400, 401, 402: 'Xaa' is any amino acid
MERATELVLQICGGAAGEMVEAQGKLPEAKQVGLRLDRLKTVLGVDIPAEQVETILQHLGLQPEKTAEGFRVTAPSFRFDIEIEADLIEEIGRVYGYENIPDDYTSGRLKMLELPETRRSRFAVYNEMAARGYREVVSYAFVDEQWEQDFAANADPIRLQNPLAAQYAVMRSTLIGGLVEILQNNLNRKQNRVRVFEIARVFGKGSDGRFVQNERIGGLWYGAAMPEQWGGKTRNADFYDIKADVENLLKNKAVEFVKTGYPALHPGRAANIVSDGKVIGFVGELHPKWLQKYDLPQAPLVFEIDMAAVLECGKTRYRAVSKFQPVRRDLAFVMPEAMSHDDLLLVLKGAANKLVQEISVFDVYRGMGLPEGMKSVAVKVILQDMENTLTDEAVEPLIGXXXHT

SEQ ID NO: 3402 - protein, 423 aa, Neisseria meningitidis
MKLLVIGNGGREHALAWKLAQSPKVETVFVAPGNAGTAIEPKLQNIDLTAHQDLIEFCRKENIVFTVVGPEAPLAAGIVDDFRAAGLKIFGPTQYAAQLESSKDFAKAFMAKYNIPTAQYQTFENADAAHDYVNQKGAPIVIKADGLAAGKGVIVAMTLDEAHAAIDDMLLDNKMGNAGARVVIEDFLQGEEASFIVMVDGNNVLPMATSQDHKRLLDGDKGLNTGGMGAYSPAPVVTPVVYERAMNEIILPTVAGMKAEGHEFTGFLYAGLMIDQSGAPYTIEFNCRFGDPETQPIMSRLNSDLSDLVEAAIDGKLDSVTAEWSPQTAVGVVLAAQNYPETPKKGDIISGLDAANQIGKVFHAGTTAKEKGDVLTNGGRVLCVVGLGDNVAQAKAKAYGALEKISFDGMQYRKDIADKAINR

SEQ ID NO: 3403 - protein, 377 aa, Neisseria meningitidis
  misc_feature 372, 373: 'Xaa' is any amino acid
MYRHIEYYPGDPILSLVETFKNDPRPEKVNLSIGIYFDDEGKMPVLESVSRAETARAATPVPSPYLPMEGLDTYRSAVQHLLFGKDNPALAQGRIVTVQTLGGSGALKVGADFLHRWFPEARAYVSDPTWDNHRGIFESAGFEVGTYPYYDPAAVGVKFDEMTAFFNTLPENSVLILHPCCHNPTGVDMSEQQWDEVLHIIKTRKLIPFMDIAYQGFGGDLDSDAYAVRKAVEMELPLFVSNSFSKNLSLYGERVGGLSVVCPNKEEADLVFGQLKFTVRRIYSSPPAHGAYIAADVMNSPELYALWQNEVYMMRDRIRAMRQKLYDVLTAQIPDRDFTYFIKQRGMFGYTGLSVEQVRRLRDEFAVYLLDXXHTLN

SEQ ID NO: 3404 - protein, 79 aa, Neisseria meningitidis
MNVWDIWGRMVEIYHKYKKPCLVLAVDFVMGMVFIEPNEEPCIGRCYAPMSESPDFANAVAMAVAMICIVWIAVLSMTD

SEQ ID NO: 3405 - protein, 375 aa, Neisseria meningitidis
MNTSQRNRLVSRWLNSYERYRYRRLIHAVRLGGAVLFATASARLLHLQHGEWIGMTVFVVLGMLQFQGAIYSKAVERMLGTVIGLGAGLGVLWLNQHYFHGNLLFYLTVGTASALAGWAAVGKNGYVPMLAGLTMCMLIGDNGSEWFDSGLMRAMNVLIGAAIAIAAAKLLPLKSTLMWRFMLADNLTDCSKMIAEISNGRRMTRERLEQNMVKMRQINARMVKSRSHLAATSGESRISPAMMEAMQHAHRKIVNTTELLLTTAAKLQSPKLNGSEIRLLDRHFTLLQTDLQQTVALINGRHARRIRIDTAINPELEALAEHLHYQWQGFLWLSTNMRQEISALVILLQRTRRKWLDAHERQHLRQSLLETREHG

SEQ ID NO: 3406 - protein, 99 aa, Neisseria meningitidis
MTASMYILLLLALIFANAPFLTTRLFGIVPLKRKHFGHHLIELAAGFALTAVLAYILESRAGAVHDQGWEFYATVVCLYLIFAFPCFVWRYFWHTRNRE

SEQ ID NO: 3407 - protein, 92 aa, Neisseria meningitidis
MSAVDLIRERLQTLDPLVLEIGDESHLHKGHAGNTGGGHYAVLVVSGRFEGVSRLNRQKTVKSLLKDLFSGGMIHALGIRAATPDEYFHTAD

SEQ ID NO: 3408 - protein, 624 aa, Neisseria meningitidis
MSQALPYRPDIDTLRAAAVLSVIVFHIEKNWLPGGFLGVDIFFVISGFLMTMILHREMSGGRFSLKAFYIRRIKRILPAFFTVLAATLIGGFFLFTKDDFFLLWKSALTALGFASNLYFARGKDYFDPAQEEKPLLHIWSLSVEEQFYFVFPILLLLVARKSPRVQFGFLAALCALSLAASFMPSAFDKYYLPHLRACEMLVGSLTAVWMRYRQQRNLAVGRCCAAAGALFSSCILSACLFAYSEQTAYFPGPAALIPCLAVAALIYFNHYEHPLKKFFQWKITVAAGLISYSLYLWHWPILAFMRYIGPDNLPPYSPAAAVVLILLLSLFSYHCIEKPFKKWQGSFAQSVLWIYALPMLILGAGSFFAMRLPFMAQYDRLGLTRSNTSCHNNTVRQCLWGDTEKQPELLVLGDSHADHYKTFFDAVGKKEKWSATMVSADACAYVEGYASRVFQNWAACRAVYRYAEEHLPRYSKVVLAMRWGSQMPENSRSLAYDAGFFQKFDRMLHKLSSEKQAVYLMADNLASSYNVQRAYILSSRIPGYRQTLRPDDESTLKANARIRELAAKYPNVYIIDAAAYIPANFQIGGLPVYSDKDHINPYDGTELAKRFSEKQRFLDTRHNH

SEQ ID NO: 3409 - protein, 76 aa, Neisseria meningitidis; identical to SEQ ID NO: 3081

SEQ ID NO: 3410 - protein, 545 aa, Neisseria meningitidis
MDFKRLTAFFAIALVIMIGWEKMFPTPKPVPAPQQAAQQQAVTASAEAALAPATPITVTTDTVQAVIDEKSGDLRRLTLLKYKATGDENKPFILFGDGKEYTYVAQSELLDAQGNNILKGIGFSAPKKQYSLEGDKVEVRLSAPETRGLKIDKVYTFTKGSYLVNVRFDIANGSGQTANLSADYRIVRDHSEPEGQGYFTHSYVGPVVYTPEGNFQKVSFSDLDDDAKSGKSEAEYIRKTPTGWLGMIEHHFMSTWILQPKGRQSVCAAGECNIDIKRRNDKLYSTSVSVPLAAIQNGAKAEASINLYAGPQTTSVIANIADNLQLAKDYGKVHWFASPLFWLLNQLHNIIGNWGWAIIVLTIIVKAVLYPLTNASYRSMAKMRAAAPKLQAIKEKYGDDRMAQQQAMMQLYTDEKINPLGGCLPMLLQIPVFIGLYWALFASVELRQAPWLGWITDLSRADPYYILPIIMAATMFAQTYLNPPPTDPMQAKMMKIMPLVFSVMFFFFPAGLVLYWVVNNLLTIAQQWHINRSIEKQRAQGEVVS

SEQ ID NO: 3411 - protein, 276 aa, Neisseria meningitidis
MAHYAIGDIQGCFDELTALLGKIGFNHGTDTLWLTGDIVNRGPKSLETLQFCIRHENSVQIVLGNHDLHLLAVGCGEGAPKRSDTIEPILKHPDGKKMLDWLRAQPLLIREGSRVMVHAGILPQWRITKAESLAREAEAELRGKKYVKFFSKMYGNKPAAWDEGLKGYARLRFIVNAFTRMRALTFKNELDFDYKSTVKKMPPYLRPWFKAPDRQNLDRTIIFGHWSSLGYTNADNVISLDTGALWGGQLTAVNLETEEITQVQAAGGIDWKSFAK

SEQ ID NO: 3412 - protein, 128 aa, Neisseria meningitidis; identical to SEQ ID NO: 605

SEQ ID NO: 3413 - protein, 64 aa, Neisseria meningitidis; identical to SEQ ID NO: 2003

SEQ ID NO: 3414 - protein, 309 aa, Neisseria meningitidis
MIHVSAVQAPAHIQDTGRYGHRRYGIGHAGAMDTVALAAGNILLGNDEGTAAIEIALGGIMLVFERDTPFCLTGAVYQAELDGEPVYSYWRYTARKGQTLKLVRAVQGMYGYVCVAGGFDVPEVMGSRSTDLKAGFGGHQGRMLQKGDYLPIGKGAQELSKVGIAPIPFTDTVHLVPSSEYAAFSEKGRLNLERETWTLQSDSNRMGYRFDGQPLTLSQPLEMLSHAVQAGTVQVPPGGKPIILLADAQTTGGYPKIATVAAADLGKLAQVRFGSKVKFKIIGLKKATALRRKNQAYLNQIRRITHEAG

SEQ ID NO: 3415 - protein, 436 aa, Neisseria meningitidis
MYAKKGGLGLVKSRRFAPLFATQFLGAFNDNVFKTALFVMIGFYGLGQNGFLPAGQMLNLGALLFILPYFLFSSLSGQLGNKFDKAVLARWVKVLEMIIMAVAAYGFYIRSAPLLLACLFCMGAQSTLFGPLKYAILPDYLDDKELMMGNSLIESGTFVAILFGQILGTAVAGVPPYIVGILVLLVAVGGTVGSLFMPSVPAKAADTQIEWNIVRGTKSLLSEMVRHKPVFTAIIGISWFWFVGAVYTTQLPTFTQIHLGGNDNVFNLMLALFSIGIAAGSVLCAKFSRERLRLAWVTVGALGLTVCGLVLVWLTHGHRFEGLNGIFWFLSQGWAYPVMAVMTLIGFFGGFFSVPLYTWLQTASSETFRARAVAANNIVNGIFMVSAAVLSAVLLFLFDSISLLYLIVALGNIPLSVFLIKRERRFLGAAAIRKKP

SEQ ID NO: 3416 - protein, 218 aa, Neisseria meningitidis
MTIKIILIDDHTLFRSGIKALLSRQHGFEVIGEAADGLSGIKMISRLQPDVVLLDLDMPGMNGREALSQIISINPQQAVIMLTVSEDSDDLTECMRIGARGYLLKNINADFLLESIRKAAEGDNVFSPEMTAKLVKSLISPQPAQGTQALSSLTPRELEILGYLAAGHSNKIIARHLDLAESTVKVHVQNLLRKLNLSSRVQAAVYAIRHNVPQPVLE

SEQ ID NO: 3417 - protein, 265 aa, Neisseria meningitidis
MDTAQKQRWAITLSYDGSRFYGWQKQADGVPTVQAALETALAQIAGEAVSTIVAGRTDTGVHATAQVVHFDTAAARPQQAWVRGVNAHLPEGIAVLHARQVAPEFHARFDAYGRHYRYLLESVPVRSPLLKNRAGWTHLKLDIGPMRRAAALLIGEQDFSSFRAAECQAKSPVKTIYRADLTQSSGLVRLDLHGNAFLHHMVRNIMGALVYVGSGRLSVEGFAALIQERSRLKAPPTFMPDGLYLTGVDYPEAYGIIRPQIPEWL

SEQ ID NO: 3418 - protein, 191 aa, Neisseria meningitidis; identical to SEQ ID NO: 2004

SEQ ID NO: 3419 - protein, 110 aa, Neisseria meningitidis
MNIKHLITAALIASAAFAAQAAPQKPVSAAQTAQHPAVWIDVRSEQEFSEGHLHNAVNIPVDQIVRRIHEAAPDKDTPVNLYCRSGQACRSRPSRAEKSRLYKCCQSRRL

SEQ ID NO: 3420 - protein, 244 aa, Neisseria meningitidis
MSANVSRLVVQNLQKSFKKRQVVKSFSLEIESGEVVGLLGPNGAGKTTSFYMIVGLIAADAGSVTLDGQELRHLPIHERARLGVGYLPQEASIFRKMTVEQNIRAILEIRTKDKNQIDREIEKLLADLNIGHLRRSPAPSLSGGERRRVEIARVLAMKPHFILLDEPFAGVDPIAVIDIQKIIGFLKSRGIGVLITDHNVRETLSICDRAYIISDGTVLASGKPDDLVGNEQVRSVYLGKNFKY

SEQ ID NO: 3421 - protein, 125 aa, Neisseria meningitidis; identical to SEQ ID NO: 535

SEQ ID NO: 3422 - protein, 280 aa, Neisseria meningitidis; identical to SEQ ID NO: 431

SEQ ID NO: 3423 - protein, 503 aa, Neisseria meningitidis
MSEQNHPQTEPQLDENQIIALRREKLHNIRQQRNAYPNDFKRDSFAADLHAQYGEIGKEELDPQGIPVKVAGRMMLKRQMGKASFATIQDVSGQIQLYLNNKGVSQEVLDDFNHWDLGDIVGAEGTLFKTNHGELTVRVSGIRLLSKSLRPLPDKHKGLSDQETKYRQRYVDLIANEESRNTFIKRSQIIQSVRNFMVGEHYLEVETPMMHPIPGGATAKPFVTHHNALDIPLYLRIAPELYLKRLVVGGLERVFEINRSFRNEGMSVRHNPEFTMIEFYEAFSDYERMMQMAEDIIRNASRTVNGTANITYNGKEVDLESPFERLTILEAIKKYNPHYTDEQLNDAEWLKKEIVKHGESLPPSPGIGSLQLALFEGCAEGKLWNPTFIIDYPVEVSPLARASDTKQGLTERFELFVVGRELANGYSELNDPEDQAERFKSQVAQKDAGDDEAMHYDADYIRAMEFGLPPTGGCGIGIDRLVMLLTDSQTIRDVILFPQMRPE

SEQ ID NO: 3424 - protein, 159 aa, Neisseria meningitidis
  misc_feature 155, 156, 157: 'Xaa' is any amino acid
MKITHCKLKKKVQKELIRFFVLEVTARSAADILGIHPNSAALFYRKIRTVINHHLALAADEVFEGSVEPDKSDFGGRRKGRRGRGAAGKVVVFGILKHNGRVYTVVVDNAKSETLLPVIKKKIMPDSIVYTDSLSSCDKLDVSGFIHYRINHSKXXXHT

SEQ ID NO: 3425 - protein, 320 aa, Neisseria meningitidis; identical to SEQ ID NO: 913

SEQ ID NO: 3426 - protein, 238 aa, Neisseria meningitidis
MKTKLPLFIIWLSVSAACSSPVSRNIQDMRLEPQAEAGSSDAIPYPVPTLQDRLDYLEGRIVRLSNEVETLNGKVKALEHAKTHPSSRAYVQKLDDRKLKEHYLNTEGGSASAHTVETAQNLYNQALKHYKSGRFSAAASLLKGADGGDGGSIAQRSMYLLLQSRARMGNCESVIEIGGRYANRFKDSPTAPEAMFKIGECQYRLQQKDIARATWRSLIQAYPSSPAAKRAAAAVRKR

SEQ ID NO: 3427 - protein, 475 aa, Neisseria meningitidis
MIHTEPSAQPSTMDTAAFLKHIESAFRRIFSDGIDLMRYLPEDKWLALKQAGLLLPFLDKRHGGRKGSQFEIQEVLRIAGHYGVPVTLRTGIEGALVLQPLQEFGDEAQIAQGLDMVFKGEGGGLGVTEPETSGAAIAREMQSYYEYTDGQTIYVNAAKYWQGNSQSDFLLVAAKERKNGKLAKVIDLLLVPKTYIRCETLASEGLRAVRYAVNRIDAEMPATAVMKLSQSDAAGLRAFQNIFIRSRLQLIGMTHGIMEYILENLERYVRNDIRFVDYERREIRRRHQVSEILYRYVCHSVSPVAPVAHQLMEANIVKTLATEYTYAAAQMLQKLLGAKGFERGHTAGNIAIDIRPFTIFEGPNDMLYAEIYDQFVRATAEEKEAGMKLDKNQTLLDRLQTDARFAAVARDYTLPEDIRSFLQEHTLTDACALQKVFIGKIIARLFVFVQAEHEDTAAFLLNDIRKDILDCRYCG

SEQ ID NO: 3428 - protein, 75 aa, Neisseria meningitidis; identical to SEQ ID NO: 2064
  misc_feature 69, 70: 'Xaa' is any amino acid

SEQ ID NO: 3429 - protein, 481 aa, Neisseria meningitidis; identical to SEQ ID NO: 437

SEQ ID NO: 3430 - protein, 114 aa, Neisseria meningitidis
MKKLLIAAMMAAALAACSQEAKQEVKEAVQAVESDVKDTAASAAESAASAVEEAKDQVKDAAADAKASAEEAVTEAKEAVTEAKEAVTEAAKDTLNKAADATQEAADKMKDAAK

SEQ ID NO: 3431 - protein, 216 aa, Neisseria meningitidis
MIRFEQVSKTYPGGFEALKNVSFQINKGEMIFIAGHSGSGKSTVLKLISGITKPSRGKILFNGQDLGTLSDNQIGFMRQHIGIVFQDHKILYDRNVLQNVILPLRIIGYPPRKAEERARIAIEKVGLKGRELDDPVTLSGGEQQRLCIARAVVHQPGLLIADEPSANLDRAYALDIMELFKTFHEAGTTVIVAAHDETLMADYGHRILRLSKGRLA

SEQ ID NO: 3432 - protein, 138 aa, Neisseria meningitidis; identical to SEQ ID NO: 774

SEQ ID NO: 3433 - protein, 160 aa, Neisseria meningitidis; identical to SEQ ID NO: 1608

SEQ ID NO: 3434 - protein, 288 aa, Neisseria meningitidis
  misc_feature 3, 4: 'Xaa' is any amino acid
VCXXGVPQDLLPVVSGRASEIGREFATNPIIRKISFTGSTEVGAKIFADSAADIKKLSLELGGNAPFIVFDDADLDKAVEGALASKFRNSGQTCVCTNRVYAQSGIYDAFCRKLSEKAAALKLGNGLEDGVNQGPLIEEKAVEKVEQHIADALSKGAVCLTGGKRSALGGTFFEPTVLSGVTAQMAVAREETFGPLCPVFRFETEVEVIEAANNTEYGLAAYLFTADTARQWRVGEALEYGMVGINTGLISNEAAPFGGVKRSGLGREGSKYGADEYLELKYLCMDVG

SEQ ID NO: 3435 - protein, 402 aa, Neisseria meningitidis; identical to SEQ ID NO: 136

SEQ ID NO: 3436 - protein, 210 aa, Neisseria meningitidis
MTLRYEIFPVTPFRQNCTLIWDDESGEAVLTDVGGDVPFLLQALANRKLTLTAIWLTHGHLDHAGGVVEMLKTHKVPVLGPHPDDEFLLQSLPQTTAQYGFPVSPAFAPNRWLEEGETLTVGRYAFQVLHIPGHTPGHIVFYCAEAELLIAGDVLFYETIGRTDFPRGNHADLINNIRNKLFTLPETVQVVAGHGRMTSIGHEKRHNPFF

SEQ ID NO: 3437 - protein, 514 aa, Neisseria meningitidis
MCGVLGLVSHEPVNQLLYDGLQMLQHRGQDAAGIVTAEGGTFHMHKGKGMVREVFRTRNMRDLTGNAGIAHVRYPTAGNAGSSAEAQPFYVSSPFGIVLAHNGNLTNTAELYENVCNKHLRHVNTSSDSEVLLNVFAHELRREVSKNADPHRLNADNIFNAVAEVHRLVRGAYGVVAMIAGYGMLAFRDPYGIRPLVLGSQTDSEGRKSYAVASESVAFNALTYDLERDIRPGEAVFVGFDGTMIARQCSDRAKLSPCLFEYVYFARPDSVIDGVSVYQSRLDMGVSLAEKIKRELPVDGIDVVMPIPDTSRPSAMELAVHLDKPYREGLIKNRYIGRTFIMPGQATRKKSVRQKLSPMETEFAGKSVLLVDDSIVRGTTSREIVEMVRAAGARKVYIASAAPEVRYPNVYGIDMPTREELIANERSAAEIAAEIGADGIVFQNLSDLEAVVKALNPKIESFDSSCFNGIYQTGDIDDAYLDRLSAEKSGCGGLKIHPSRMEHSISISDAGDEE

SEQ ID NO: 3438 - protein, 117 aa, Neisseria meningitidis
MFTTNDLRHFLEGLAILFSIGYWGTMLLLLWFLVRFAYKKPKRNPGKILSGSLTAAAILMLFVWIIPKQFGPIKEEIQAQEEWDRKYKEAEAVFNEQCKTAGERFTRRRTMWKGLCC

SEQ ID NO: 3439 - protein, 703 aa, Neisseria meningitidis
MKISFHLALLPTLIIASFPVAAADTQDNGEHYTATLPTVSVVGQSDTSVLKGYINYDEAAVTRNGQLIKETPQTIDTLNIQKNKNYGTNDLSSILEGNAGIDAAYDMRGESIFLRGFQADASDIYRDGVRESGQVRRSTANIERVEILKGPSSVLYGRTNGGGVINMVSKYANFKQSRNIGAVYGSWANRSLNMDINEVLNKNVAIRLTGEVGRANSFRSGIDSKNVMVSPSITVKLDNGLKWTGQYTYDNVERTPDRSPTKSVYDRFGLPYRMGFAHPNDFVQDKLQVWRSDLEYAFNDKWRAQWQLAHRTAAQDFDHFYAGSENGNLIKRNYAWQQTDNKTLSSNFTLNGDYTIGRFENHLTVGMDYSREHRNPTLGFSSAFSASINPYDRASWPASGRLQPILTQNRHKADSYGIFVQNIFSATPDLKFVLGGRYDKYTFNSENKLTGSSRQYSGHSFSPNIGAVWNINPVHTLYASYNKGFAPYGGRGGYLSIDTSSSAVFNADPEYTRQYETGVKSSWLDDRLSTTLSAYQIERFNIRYRPDPKNNPYIYAVSGKHRSRGVELSAIGQIIPKKLYLRGSLGVMQAKVVEDKENPDRVGIHLNNTSNVTGNLFFRYTPTENLYGEIGVTGTGKRYGYNSRNKEVTTLPGFARVDAMLGWNHKNVNITFAAANLLNQKYWRSDAMPGAPRTYTARVNYSF

SEQ ID NO: 3440 - protein, 153 aa, Neisseria meningitidis; identical to SEQ ID NO: 750

SEQ ID NO: 3441 - protein, 68 aa, Neisseria meningitidis
LSASTVASYLSLLSNKLRENNPDIVQFNIEFKAVGNCDKLSLIQQHGVKSILLDASAYQLSRNRRIRI

SEQ ID NO: 3442 - protein, 757 aa, Neisseria meningitidis; identical to SEQ ID NO: 2667

SEQ ID NO: 3443 - protein, 207 aa, Neisseria meningitidis
  misc_feature 2, 3: 'Xaa' is any amino acid
VXXSTVSDYFRNIRAHSIHPRVSVGYDFGGWRIAADYASYRKWNNNKYSVNTKEVLRNNNGNRKELKTENQENGTFHAVSSLGLSAIYDFKLNDKFDKFKPYIGARVAYGHVKHQVHSVKKETTTVFTAPTQGAQKGGVIPEATISKPAYHESHSISSLGLGVIAGVGFDITPKLTLDTGYRYHNWGRLENTRFKTHEVSLGMRYRF

SEQ ID NO: 3444 - protein, 250 aa, Neisseria meningitidis
MTDILIDNTATEAVRALIQAFSLVPVSQPPEQGSYLLAEHDTVSLRLVGEKSSVIVDFASGAAQYRRTKGGGELIAKAVNHTAHPTVWDATAGLGRDSFVLASLGLAVTAFEQHPAVACLLSDGIRRALLNPETQDTAARITLHFGNAAVQMPALVQTQGKPDIVYLDPMYPERRKSAAVKKEMTYFHRLVGEAQDEAALLHTARQTAKKRVVVKRPRLGEHLAGQAPAYQYTGKSTRFDVYLPYGTDKG

SEQ ID NO: 3445 - protein, 800 aa, Neisseria meningitidis
MQLLAAEGIHQHQLNVQKSTRFIGIKVGKSNYSKNELNETKLPVRVIAQTAKTRSGWDTVLEGTEFKTTLSGADIQAGVGEKARADAKIILKGIVNRIQSEEKLETNSTVWQKQAGRGSNIETLQLPSFTGPVAPVLSAPGGYIVDIPKGNLKTEIEKLAKQPEYAYLKQLQVAKNINWNQVQLAYDRWDYKQEGLTEAGAAIIALAVTVVTSGAGTGAVLGLNGAAAAATDAAFASLASQASVSFINNKGDVGKTLKELGRSSTVKNLVVAAATAGVADKIGASALNNVSDKQWINNLTVNLANAGSAALINTAINGGSLKDNLGDAALGAIVSTVHGEVASKIKFNLSEDYITHKIAHAIAGCAAAAANKGKCQDGAIGAAVGEIVGEALTNGKNPATLTAKEREQILAYSKLVAGTVSGVVGGDVNTAANAAKVAIENNLLSQEEYALREKLIKKAKGKGLLSLDWGSLTEQEARQFIYLIEKDRYSNQLLDRYQKNPSSLNNQEKNILAYFINQTSGGNTAWAASILKTPQSMGNLTIPSKDINNTLSKAYQTLSRYDSFDYKSAVAAQPALYLLNGPLGFSVKAATVAAGGYNIGQGAKAISAKAISNGEYLHGTVQVVNGTLMVAGSVSAQAAISAKPAPVTRYLSNDSAPALRQALTAESQRIRMKLPEEYRQIGNLAIAKIDVKGLPQRMEAFSSFQKGEHGFISLPETKIFKPISVDKYHNIASPPRGTLRNIDGEYKLLETIAQQLGNNRNVSGRIDLFTELKACQSCSNVILEFRNRYPNIQLNIFTGK

SEQ ID NO: 3446 - protein, 68 aa, Neisseria meningitidis
MKAVRDIALWLAVTVWINFFPDNYRYDTVPQGRYGYWHADHPWYPYVRFLLPLFLACILFYRHFRKRK

SEQ ID NO: 3447 - protein, 128 aa, Neisseria meningitidis; identical to SEQ ID NO: 1074

SEQ ID NO: 3448 - protein, 212 aa, Neisseria meningitidis
MKKINVAPENPQYRIVEIFESLQGEGWNTGIPAVFVRLGKCNLACGWCDTDYLTFGMMSLSDILGCLKTYAARNIIITGGEPTIQPHLDMLLDMLKAEGYFLCIETNGLNPAPPQIDYVATSPKACYAAKYEKSCIETADEVRIVADGDVLAFCENMERKIRAHHYYLSPCEQDGAMNIYDTIRQIGILNSRPDASVHWQLSVQTHKWAGIE

SEQ ID NO: 3449 - protein, 444 aa, Neisseria meningitidis
MAKKYFGTDGVRGEVGQFPITPDFVLKLGYAAGQVLVQHDTDQKPTVLIGKDTRISGYMLEAALVAGFTAAGVNVVQTGPLPTPGVAYLTRALRLSAGVMISASHNAYSDNGIKFFAEGGVKLSDEIELEIEAKIDGEMKTQPSARLGRARRISGADDRYIEFCKSTFPSHSDLRGLKLVIDTANGAGYGVAPKVFHELGAQVVSIGDEPNGYNINEKCGATYTKTLQAAVLQHEADYGIALDGDGDRLMMVDKNGKVYDGDSLIYVIAKARAREGINIGGVVGTVMTNMAMEIALKEQGVDFCRAKVGDRYVLEQLNQRGWLIGGEASGHILCMDKHNTGDGIISALQVLAALQTLNQDLATVCADWQPYPQTMINVRIQKGQKWQEASKDVLAEVEKELEGKGRVVLRASGTEPVVRVMVEARQADWARDGAERIASAIGSL

SEQ ID NO: 3450 - protein, 100 aa, Neisseria meningitidis
MGYRVGMNCFDTRLQADDYLLSSLPPTVTEEGKIIRPERVGDKWILNGKPVTLSYPECSNFEQIKQGSYVGSTVLILFVVIFGFRLLINFLKDMGKVGTD

SEQ ID NO: 3451 - protein, 245 aa, Neisseria meningitidis
MKKLSRIVFSTVLLGFSAALPAQTYSVYFNQNGKLTATMSSAAYIRQYSVAEGIAHAQDFYYPSMKKYSEPYIVASTQIKSFVPTLQNGMLILWHFNGQKKMAGGFSKGKPDGEWVNWYPNGKKSAVMPYKNGLSEGTGYRYYRNGGKESEIQFKQNKANGVWKQWYADGNIKTEMVMVNDEPAKILTWDESGRLLSELSIRHHQRNGVVLEWYEDGSKKSEAVYQDDKLVRKTQWDKDGYLIEP

SEQ ID NO: 3452 - protein, 766 aa, Neisseria meningitidis
MHRPTAKQILHEVFGYPEFRGKQEAIVNALAGGESLMVLMPTGGGKSLCYQIPALMREGVAVVVSPLIALMNDQVASLHVAGIEAAAVNSGTSADEAREIADKLAQGRLKLLYVAPERLVTDRFLRFLDQQTVSLFAIDEAHCVSQWGHDFRPEYQQLGMLAERYPNVPRIALTATADAATRADIKHYLHLDDAPEFISSFDRPNIYYQVIEKNNGKKQLLEFIRKEMAGQSGIVYCLSRKKVEDVAQFLRENGLNAIPYHAGLSMDVREENQRRFTHEDNIIVVATVAFGMGIDKPDVRFVAHLDMPQSVEHFYQESGRAGRDGLPAASWLCYGLNDWVLLRERIAEGNSDEVQKQIEMQKLDAMLSVCETAACRRVLLLKHFGEESEPCGHCDNCLHPPVRFDGTVLVQKLLSCVYRAGQRFAAGYITNLLRGKSDDWIRGNRHEQLSTFGIGAELSDKEWRSVIRQCISLGYLTVNIARYQALQLTEAAKKVLKGETEVMLRPLKRGKPAARTLKDNWLRTEREERLWQALRVWRMKQAEAEGIPAYMIFGDKTLRDLVEKMPQNLNGLHDIYGLGEAKTERFGHGILEVCRNAAGFSRDAVIRPQTEREQQLRQKLEAWRYEQARAENCALHAVLSDESLADMLADTPETETDLEGVHGLGSVRAAKYGRDILAVCRPFSDGIDETAKHKRRLMRALIQWCNETAKHEQSEPYRILSKAALRAIAAKQPEGLAELAAVYGVGEEKAARYGAAVLAVLERNAV

SEQ ID NO: 3453 - protein, 398 aa, Neisseria meningitidis
MPSEAFRRHNATNTLISITQDDTMTHIKPVIAALALIGLAACSGSKTEQPKLDYQSRSHRLIKLEVPPDLNNPDQGNLYRLPAGSGAVRASDLEKRRTPAVQQPADAEVLKSVKGVRLERDGSQRWLVVDGKSHAEIWPLLKAFWQENGFDIKSEEPAIGQMETEWAENRAKIPQDSLRRLFDTVGLGGIYSTGERDKFIVRIEQGKNGVSDIFFAHKAMKEVYGGKDKDTTVWQPSPSDPNLEAAFLTRFMQYLGVDGQQAENASAKKPTLPAANEMARIEGKSLIVLGDYGRNWRRTVLALDRIGLTVVGQNTERHAFLVQKAPNESNAVTEQKPGLFKRLLGKGKAEKPAEQPELIVYAEPVANGSRIVLLNKDGSAYAGKDASALLGKLHSELR

SEQ ID NO: 3454 - protein, 412 aa, Neisseria meningitidis
MIYPWHNEQWRQIAEHWERRPNAWLFVGKKDTGKTTFARFAAKALLCETPAPGCKPCGECMSCHLFGQGSHPDFYEITPLSDEPENGRKLLQIKIDAVREIIDNVYLTSVRGGLRVILIHPAESMNVQAANSLLKVLEEPPPQVVFLLVSHAADKVLPTIKSRCRKMVLPAPSHEEALAYLRERGVAEPEERLAFHSGAPLFDEADGVRALRIKLLDILAEPRLLKILDYAALFDKEKLPLAVFDQSGGIADGVRAGGTGGNHPVARAAVAFEDGNVSGNQVDQRTGDKERVDFARAAFDYGFAGDLDAGQSADAGTDVHADAVFVEVFHIVQARIGDCLQCGGNAVVDEYVHPARFFRADVLSDVETAHFAGDTAVDVGCVKAGNRADAAFAGEQGVPSLCDSVADRGNLT

SEQ ID NO: 3455 - protein, 425 aa, Neisseria meningitidis
MRSSDILIVDDEIGIRDLLSEILQDEGYSVALAENAEEARKLRHQARPAMVLLDIWMPDCDGITLLKEWAKNGQLNMPVVMMSGHASIDTAVEATKIGALDFLEKPISLQKLLSAVENALKHGAAKIETGPVFDKLGNSAAIQEMNREVGAAVKRASPVLLTGEAGSPFETVARYFHKNGTPWVSPARVEYLIDMPMELLQKAEGGVLYVGDIAQYSRNIQAGIAFIVGKAERCRVRVVASGSRAAGSDGIACEEKLAELLSESVVRIPPLRMQHEDIPFLIQGIACNVAESQKIAPAAFSEEALAALTRYDWPGNFDQLQSVVATLLLEADGQEIGAAAVSSLLGQNVPAEGAEDMVGGFNFNLPLRELREEVERRYFEYHIAQEGQNMSKVAQKVGLERTHLYRKLKQLGIGVSRRAGEKTEE

SEQ ID NO: 3456 - protein, 1144 aa, Neisseria meningitidis; identical to SEQ ID NO: 2014

SEQ ID NO: 3457 - protein, 88 aa, Neisseria meningitidis; identical to SEQ ID NO: 255

SEQ ID NO: 3458 - protein, 307 aa, Neisseria meningitidis
MPSEHPFSDGISTPNPKETMNDTAQITASYGRRYIVRTPDGTTYEASTRKKRVDFACGDRVRISPVNAEQVVIEDFLPRQSLLYRQDAWKTKLIAANVTQLLIVTAAVPSPSMRLLQRALLAAEAAGIRAVIVLNKADLPETALWREKLKFYETLGYPVIETRALENADILRPVLQGHSNILLGQSGMGKSTLTNALLGSQTARTGDISAALDSGKHTTTHARLYDLNGETQLIDSPGLQEFGLHHLQAADLPRYFPDFRHLVGQCRFHNCTHRAEPGCAFKAAAETRAASPERLAFLQGITDDLLK

SEQ ID NO: 3459 - protein, 269 aa, Neisseria meningitidis
MIQDTRPLIRVVAGILLDSDGNYLLSSRPEGKPYAGYWEFAGGKVEAGETDFQALQREFEEELGIRILAATPWLTKIHSYEHARVCLKFLWVNPGQWTGEPQSREGQEWSWQKAGDFTVAPMLPANGALLRSLSVPRRLYGSLKTGLHGENSMGAYRVLPLGSAEGSGANVLMEAAQWQDRPEHADSVWMMVQTREQWRQAQEKGADVVVWRVCNDVQAQEAAEALRQGVSVPLVLAANGQTVARYGKLWLGLGAHVVVRDETIGKNHE

SEQ ID NO: 3460 - protein, 544 aa, Neisseria meningitidis
MIKPNLRPKLGSSALIAFLSLYSSLVLNYAFFAKVVELHPFNGTGADIFLYTMPVVLFFLSNFVFHVIALPFVHKVLIPLILVISAAVSYQEIFFNIYFNKSMLNNVLQTTAAESARLITPGYVLWIVCLGVLPALAYIAVKVKYRVWYKELLTRLVLAAVSFLCALGIAMLQYQDYASFFRNNKSVTHLIVPSNFIGAGVSKYKDWKRSNIPYTQLDMAVVQNRPAGSLRRFVVLVVGETTRAANWGLNGYSRQTTPLLAARGDEIVNFPQVRSCGTSTAHSLPCMFSTFDRTDYDEIKAEHQDNLLDIVQRAGVEVTWLENDSGCKGVCGKVPNTDVTSLNLPEYCRNGECLDNILLTKFDEVLNKNDKDAVLILHTIGSHGPTYYERYTEAERKFTPTCDTNEINKCTRATLVNTYDNTVLYVDQFIDKVIRKLENRDDLESVVHYVSDHGESLGENGMYLHAAPYAIAPSGQTHIPMVMWFSKAFRQHGGIDFQCLKQKAAENEYSHDHYFSTVLGLMDISNSQTYRKEMDILAACRRPR

SEQ ID NO: 3461 - protein, 421 aa, Neisseria meningitidis
MSKNQPAQPTRRTLFKTAIAAGAVGAIGGYLGGKKRGETAERTAESQHSPQAYPCYGEHQAGIVTPQQAFSIMCAFDVTAQSAKQLENLFRTLTARIEFLTQGGEYQDGDDKLPPAGSGILGKAFNPDGLTVTVGVGSSLFDGRFGLKDKKPIHLQEMRDFSNDKLQKSWCDGDLSLQICAFTPETCQAALRDIIKHTVQTAVIRWSIDGWQPKSEPGAMAARNLLGFRDGTGNPKVSDPKTADEVLWTGVAANSLDEPEWAKNGSYQAVRLIRHFVEFWDRTPLQEQTDIFGRRKYSGAPMDGKKEADQPDFAKDPEGNTTPKDSHIRLANPRDPEFLKKHRLFRRAYSYSRGLASSGQLDVGLVFVCYQANLADGFIFVQNLLNGEPLEEYISPFGGGYFFVLPGVEKGGFLGQGLLGV

SEQ ID NO: 3462 - protein, 533 aa, Neisseria meningitidis
MSIVEIKVPDIGGHENVDIIAVEVKAGDTIAVDDTLITLETDKATMDVPADAAGVVKEVKVKVGDKISEGGVILTVETGAAAAEAAPAAAEAQPAPAAAPVAAGGATVQVAVPDIGGHTDVDVIAVEIKVGDTVAEDDTLITLETDKATMDVPCTAAGVVKAVFLKVGDKVSEGSAIIEVETAGSAAAAPAPAAQAAAPAPAAAPVPAAAAAPAPSAPAAAKIDEAAFAKAHAGPSARKLARELGVDLGQVKGTGLKGRIMGDDIKAFVKSVMQGGAAKPAAASASLGGGLDLLPWPKVDFSKFGNVEVKELSRIKKISGQNLSRNWVVIPHVTVHEEADMTELEEFRKQLNKEWEREGVKLSPLAFIIKASVSALKAFPEFNASLDGDNLVLKNYFNIGFAADTPNGLVVPVIKDVDQKGLKQISQELTELSKKAREGKLKPQEMQGACFTISSLGGIGGTGFTPIVNAPEVAILGVCKSQIKPVWNGKEFAPRLMCPLSLSFDHRVIDGAAGMRFTVFLAKLLKDFRRITL

SEQ ID NO: 3463 - protein, 503 aa, Neisseria meningitidis
MKWLKRLTVIVGTFYRYRLAGLCASLMGSGWICALLKMMPQSSKLKNEPPAVRLRLALESLGPIFIKFGQVLSTRPDLIPHDYAVELAKLQDKVPPFDARLSREQIEKSLGQSIEKLYAEFETEPIASASIAQVHKARLHSGERVAVKVLRPNLLPLIEQDLSLMRFGAAWVERLFSDGRRLKPLEVVAEFDKYLHDELDLMREAANAGQLGRNFQNSNMLIVPKVFYDYCTSDVLTIEWMDGTPVADIAKLKADGIDLHKLADYGVEIFFTQVFRDGFFHADMHPGNILVAADNRYIALDFGIVGTLTDYDKRYLAINFLAFFNRDYRRVATAHIESGWVPADTRAEELEAAVRAVCEPVFNKPISQISFGLVLMRLFEVSRRFNVEIQPQLVLLQKTLLNIEGLGRQLDPDLDLWKTAKPFLVKWMNGQVGPKALWRNLKNEAPDWAQIIPSLPRKISALIDENRQQEMRDAYIHLVKVQQRQSLWLAVIAVVLLLILLLK

SEQ ID NO: 3464 - protein, 67 aa, Neisseria meningitidis
MDNLNTQEISVLPENLPLYCSGPDNEQWNGHPRVFLPLCEGESGSVACPYCGTRYRFDGKMPHHHYA

SEQ ID NO: 3465 - protein, 114 aa, Neisseria meningitidis
LIGSRSSKGTTIYADKGYDSAENRQHLEEHQLQDGIMRKACRNRPLTEVQTKRNRYLSKTRYVVEQSFGTLHRKFRYARSTYFGLIKVSAQSHLKAMCLNLLKAANRLSAPAAA

SEQ ID NO: 3466 - protein, 635 aa, Neisseria meningitidis
  misc_feature 2, 3: 'Xaa' is any amino acid
VXXGGYIVDIPKGNLKTEIEKLSKQPEYAYLKQLQTAKNVDWKQVQLAYDKWDYKQEGLTGAGAAIVVIIVTALTYGYGAAAAGSVTAAGSSTAAAATTTAAATTTVSTAAAMQTAALASLYSQAAVAIINNKGDVGKALKDLGTSDTVKQIVTSALTAGALNQMGADIAQLNSKVRTELFSSTGNQTIANLGGRLATNLSNAGISAGINTAVNGGSLKDNLGNAALGALVNSFQGEAASKIKTTFSDDYVAKQFAHALAGCVSGLVQGKCKDGAIGAAVGEIVAESILGGRNPATLSDAEKHKVISYSKIIAGSVAALNGGDVNTEANAAEVAVVNNALNFDSTPTNAKKHQPQKPDKTALEKIIQGIMPAHAAGAMTNPQDKDAAIWISNIRNGITGPIVITSYGVYAAGWTAPLIGTAGKLAISTCMANPSGCTVMVTQAAEAGAGIATGAVTVGNAWEAPVGALSKAKAAKQAAPKETINNLANLAKAEQQILFRIAQRDTQLDAWKTGFNNRVRKGAGLLDASNIPITINGKTIKPVQAISLKGAPVYSGVSEQEIFALYRQMTGQNPNFRVLPDGRLANGIISTGEWAGTKIALRNFSKTENSTQARWTLDLQNPPSFIKGTKLELKFQ

SEQ ID NO: 3467 - protein, 757 aa, Neisseria meningitidis; identical to SEQ ID NO: 2667

SEQ ID NO: 3468 - protein, 93 aa, Neisseria meningitidis
MKTLVLLLLSFSTTTAFAAYGLGLGQAPKYPAGFRAYGYVYSGRQGWVLKTEADAIKLDTLFKRFVYRPSAANQNPVGQRSDGIPANHTKEKP

SEQ ID NO: 3469 - protein, 238 aa, Neisseria meningitidis
MNFENDDIIHAPTTSSLILEERHDSELFRVYALILDGITDQVLLPGKKLTESELCRQMVCSRNTVRGALSLLAHDKIVDLQPNRGAFVHVPDLKEMQDVFNARIEMETMILNILADLPDLETRLKPLYAMIRREEEASGRGDRVGWNRLSNAFHVELARLVGNDVLFDIMNTLCARSSLIVAVAGVHREEKHAINTHTHSEHREILDLLLAGRRNRVVKILRRHLGNCMERLEKTLED

SEQ ID NO: 3470 - protein, 347 aa, Neisseria meningitidis
  misc_feature 342, 343: 'Xaa' is any amino acid
MSNENRTCSFCGKSKSHVKHLIEGENAFICDECVSNCIEILHEDGNDGTPPESAGGEPEESGKLPTPAEIVANLNDHVIGQEQAKKALAVSVYNHYKRLRHPKAGANVELSKSNILLIGPTGSGKTLLAQSLARKLDVPFVMADATTLTEAGYVGEDVEQIITKLLGKCDFDVEKAQRGIVYIDEIDKISRKGDNPSITRDVSGEGVQQALLKLIEGTVASVPPQGGRKHPNQEFINVDTTNILFICGGAFAGLEKVIRQRTEKGGIGFGASVHSKDENADITKLFGIVEPEDLIKFGLIPELIGRLPVIATLEELDEDALINILTEPKNALVKQYQALFGXXHTLN

SEQ ID NO: 3471 - protein, 63 aa, Neisseria meningitidis; identical to SEQ ID NO: 1437

SEQ ID NO: 3472 - protein, 465 aa, Neisseria meningitidis
MTVRTEHDLLGDREIPAEVYWGIHTLRAIENFKISTQKISDVPQFVRSMVMVKKATAQANGKLGAVKPEIAAAIEKACDEVLLNNRCLDQFPSDVYQGGAGTSVNMNTNEVIANLALEVLGYEKGRYDIVNPMDHVNASQSTNDAYPTGFRLAVYYSIGELLDKLAVLKNAFAAKAEAFKDVLKMGRTQLQDAVPMTAGQEFQSFQVLLEEEILNLDRTRQLLLEVNLGATAIGTGVNTPKGYAELVVKKLSEVSGLPCKLTENLIEATSDCGAYVMVHGALKRTAVKLSKICNDLRLLSSGPRAGLKEINLPELQAGSSIMPAKVNPVIPEVVNQVCFKVIGNDTTITFAAEAGQLQLNVMEPVIAQCMFETISLLGNAAVNLAEKCVKGITVNREICERYVFNSIGLVTYLNPYIGHHNGDLVGKICAQTGKGVREVVLERGLLSEEELNRILSPENLMNPHL

SEQ ID NO: 3473 - protein, 469 aa, Neisseria meningitidis
MTAQTLYDKLWNSHVVREEEDGTVLLYIDRHLVHEVTSPQAFEGLKMAGRKLWRIDSVVSTADHNTPTGDWDKGIQDPISKLQVDTLDKNIKEFGALAYFPFMDKGQGIVHVMGPEQGATLPGMTVVCGDSHTSTHGAFGALAHGIGTSEVEHTMATQCITAKKSKSMLIAVDGKLKAGVTAKDVALYIIGQIGTAGGTGYAVEFGGEAIRSLSMEGRMTLCNMAIEAGARSGMVAVDQTTIDYVKDKPFAPEGEAWDKAVEYWRTLVSDEGAVFDKEYRFNAEDIEPQVTWGTSPEMVLDISSKVPNPAEETDPVKRSGMERALEYMGLEAGTPLNEIPVDIVFIGSCTNSRIEDLREAAAIAKDRKKAANVQRVLIVPGSGLVKEQAEKEGLDKIFIEAGFEWREPGCSMCLAMNADRLTPGQRCASTSNRNFEGRQGNGGRTHLVSPAMAAAAAVTGRFTDIRMMA

SEQ ID NO: 3474 - protein, 142 aa, Neisseria meningitidis
  misc_feature 136, 137: 'Xaa' is any amino acid
MNEYYQLIKHPDISLSPISDGIGVDNPATGEILAYVRKTDSDKLKNLIQKAAAAQKLWAAKTALERADVLWRWYFQIKENKEALARLMTMEQGKSLTEARGEIDYAASFVRWFAEEARRIDGDVLTSVKASQKLVXXTHLIN

SEQ ID NO: 3475 - protein, 234 aa, Neisseria meningitidis
MLNITLPDGSVRQYESPVTVAQIAASIGAGLAKAAVAGRVNGKLVDACDPIVEDSAVQIITPKDQEGIEIIRHSCAHLVGHAVKQLYPNAKMVIGPVIEEGFYYDIATEKPFTPEDVAAIEARMKELIAQDYDVVKIMTPRAEAIKIFQERGEEYKLRLIDDMPEVEAMGMYHHQEYVDMCRGPHVPNTRFLKNFKLTKLAGAYWRGDSNNEMLQRIYGTAWANVQAMLRLKKS

SEQ ID NO: 3476 - protein, 461 aa, Neisseria meningitidis; identical to SEQ ID NO: 264

SEQ ID NO: 3477 - protein, 430 aa, Neisseria meningitidis; identical to SEQ ID NO: 2800

SEQ ID NO: 3478 - protein, 251 aa, Neisseria meningitidis
MMDLDLLSEEARREMLACAEEAVPSEMCGVLVFSYEGYEFLPLSNCAENPHETFEISADDWMAAERVGEIVAVVHSHPRGEPFLSGADRWMQVETGLPWILVTQGRLKLFRPVPHLRGRVFEYGKTDCGALVRDAFMLMGLVFPDHPRGDMDEDAAAGFWEKHLENCGFSRVSDGLCAGDVVLTATGGHASHAVLYLGNDWMLHHAYNQLSCRVPYTRYWADVTHSVWRHPDFEPAMMQALENDFTHMEQA

SEQ ID NO: 3479 - protein, 94 aa, Neisseria meningitidis; identical to SEQ ID NO: 2111

SEQ ID NO: 3480 - protein, 94 aa, Neisseria meningitidis
MKLLAALIPLLMSVAGRILTALGLMAVTYSGVDRLVAHFQQAITSSITGAPQAMLQLFYISGGGTVLNILFGAIAFILSFKQMTKLATSIGKKK

SEQ ID NO: 3481 - protein, 112 aa, Neisseria meningitidis
MSDESPIIFTDSCCAKVADLIAEENNPDLKLRVFVNGGGCSGFQYGFTFDEIKNDDDFEIEKNGLVFLVDPMSYQYLVGAEIDYTESLQGSQFVIRNPNAETTCGCGSSFSV

SEQ ID NO: 3482 - protein, 161 aa, Neisseria meningitidis
MRFFGIGFLVLLFLEIMSIVWVADWLGGGWTLFLMAATFAAGVLMLRHTGLSGLLLAGAAMRSGGRVSVYQMLWPIRYTVAAVCLMSPGFVSSVLAVLLLLPFKGGAVLQAGGAENFFNMNQSGRKEGFSRDDDIIEGEYTVEEPYGGNRSRNAIEHKKDE

SEQ ID NO: 3483 - protein, 64 aa, Neisseria meningitidis
VGINANPNCADEAGKLIWENDPNKNWWANRMDDIRGIIQGAVNPLIYKVSKQKIIYNNKLILRT

SEQ ID NO: 3484 - protein, 86 aa, Neisseria meningitidis
MKYLIRTALLAVVAAGIYACQPQSEAAVQVKAENSLTAMRLAVADKQAEIDGLNAQIDAEIRQREAEELKDYRWIHGDAEVPELEK

SEQ ID NO: 3485 - protein, 228 aa, Neisseria meningitidis; identical to SEQ ID NO: 2819

SEQ ID NO: 3486 - protein, 334 aa, Neisseria meningitidis
MSIKVAINGFGRIGRLALRQIEKAHDIEVVAVNDLTPAEMLLHLFKYDSTQGRFQGTAELKDDAIVVNGKEIKVFANPNPEELPWGELGVDVVLECTGFFTNKTKAEAHIRAGARKVVISAPSGNDVKTVVYGVNQNILDGSETVISAASCTTNCLAPMAAVLQKEFGVVEGLMTTIHAYTGDQNTLDAPHRKGDLRRARAAALNIVPNSTGAAKAIGLVIPELNGKLDGSAQRVPVATGSLTELVSVLERPVTKEEINAAMKAAASESYGYNEDQIVSSDVVGIEYGSLFDATQTRVMTVGGKQLVKTVAWYDNEMSYTCQLVRTLEYFVGKI

SEQ ID NO: 3487 - protein, 346 aa, Neisseria meningitidis
  misc_feature 2, 3: 'Xaa' is any amino acid
VXXIAVSLLRLSRGNMKVAVLMLFLVTAFLSMWISNTATAAMMLPLAMGMLSHLDQEKEHKTYVFLLLGIAYCASIGGLGTLVGSPPNLIAAKALNLDFVGWMKLGLPMMLLILPLMLLSLYVILKPNLNERVEIKAESIPWTLHRVIALLIFLATAAAWIFSSKIKTAFGISNPDTVIALSAAVAVVVFGVAQWKEVARNTDWGVLMLFGGGISLSTLLKTSGASEALGQQVAATFSGAPAFLVILIVAAFIIFLTEFTSNTASAALLVPIFSGIAMQMGLPEQVLVFVIGIGASCAFMLPVATPPNAIVFGTGLIKQREMMNVGILLNILCVVLVALWAYAVLM

SEQ ID NO: 3488 - protein, 314 aa, Neisseria meningitidis
MSASKKFPIPLSYFSIALGLFALGLSWRYGASVGLLPALAAESLLAAASVVWLLLVAAYLIKMFAYRNDFLSDLRDLVQCCFISAIPITAMLEGLALKPYQAGAAAVLIYVGVAGQLAFSMYRAAGLWRGLHSLEATTPIIYLPTVATNFVSASSLAALGHHDYAALFFGAGMFSWLSLEASILGRLRTAAPVGTAARGVVGIQLAPAFVGCGAYFAVGGKVDGFALALIGYGCLQLLFLLRLTRWFWEGGFTMSFWGFSFGFAAMAGCGLHLAASGVLSGLGLTLATAGSAGVALLLVGTLHRIATGRFLVRG

SEQ ID NO: 3489 - protein, 223 aa, Neisseria meningitidis
VQADLAYAAERITHDYPKATGANNTSTVSDYFRNIRAHSIHPRVSVGYDFGDWRIAADYASYRKWNNNKYSVNTKELENKNNNKRDLKTENQENGSFHAASSLGLSAIYDFKLNDKFKPYIGARVAYGHVRHSIDSTKKTTEVLTSSHAPGTAPTIYNQGSTQNAYHESHSIRRLGLGVIAGVGFDITPKLTLDTGYRYHNWGRLKNTRFKTHEVSLGMRYHF

SEQ ID NO: 3490 - protein, 139 aa, Neisseria meningitidis; identical to SEQ ID NO: 2305
  misc_feature 134, 135: 'Xaa' is any amino acid

SEQ ID NO: 3491 - protein, 508 aa, Neisseria meningitidis
MNTPLPYSNYLIRILTASVYDVAVETPLEPARSLSVRLKNNILLKREDLQPVFSFKIRGAYNKMSKLPKDALACGVIAASAGNHAQGVALSAQRLGCRAVIVMPETTPKIKVDAVKSHGGEVVLRGVSYNDAYDYAMELAEKEGLTYIAPFDDPDVIAGQGTVGMEIVSQHPDPIRAVFVPIGGGGLAAGVAAFIKQVRPEIKVIGVQTNDSCCMKQSVEAGEIVHLKDVGLFSDGTAVKVVGDETFRLCKELLDEIITVDTDAVCGAVKDIFDDTRSITEPAGALALAGLKAYIAREGAENQTLIAVTSGANMNFHRLRHVSERSELGEGNEGIFAVTIPEERGSFLKFVNILGNRNITEFNYRYGDDEKAHIFVGLQAAGPQDLAVIGSRLDEAGLPNVDLTDDEIAKIHIRYMVGGRTDKVENERLVSFEFPERPGALARFLNHMQGGWNITLFHYRNHGADYGRILVGIDVPPHDAAAFDGFLESLGYSYHEETQNAAYKLFLA

SEQ ID NO: 3492 - protein, 341 aa, Neisseria meningitidis
MDYQGKKDRLEEVIGLSEDPELWNDPKRAQEIGKERKILEGIVLTLDNIASGIEDNRMLIEMTVEENDEEGFAAVQEDVAGLEKQMADLEFKRMFNQPADPNNCFIDITAGAGGTEAEDWAGMLFRMYSRYAERKGFKIEILEEDDGEIAGINRATIRVEGEYAYGLLRTETGVHRLVRYSPFDSNNKRHTSFASVFVYPEIDDSIEIEINPADLRIDTYRASGAGGQHINKTDSAVRITHEPTGIVVQCQNDRSQHANKAAAMEMLKSKLYELEMRKRNEEKQALEEGKSDVGWGSQIRSYVLDSSRIKDLRTGYEVGNTKAVLDGDLDGFIEASLKQGV

SEQ ID NO: 3493 - protein, 330 aa, Neisseria meningitidis
MKTHEISKDSVSLIGVAEHEAGQRLDNYLIKILKGVPKSHIHRIIRAGEVRLNKKRCKPDSRIAEGDTVRIPPVRVAEKEMPSERRAAVPARAFDVVYEDDALLVIDKPSGVAVHGGSGVSFGVIEQLRRARPEAKYLELVHRLDKDTSGLLMVAKKRSALVKLHEAIRNDHPKKIYLALGVGKLPDDNFHVKLPLFKYTGAQGEKMVRVSADGQSAHTVFRVLSRFSDGILHGVGLSHLTLVRATLKTGRTHQIRVHLQSQGCPIAGDERYGDYQANRRLQKLGLKRMFLHASELHLNHPLTGEPLVLKAELPPDLAQFAVMLENGTKM

SEQ ID NO: 3494 - protein, 70 aa, Neisseria meningitidis; identical to SEQ ID NO: 2310

SEQ ID NO: 3495 - protein, 287 aa, Neisseria meningitidis
MELNEFLDKAYAVLRRLDAVLPPEPGHTDWNALAFRWQSAGKKGFWEHLPDPHTFPLARLAGVGRQTELLVRNTEQFIVGRPANNVLMSGARGTGKSSLVKALLHEYADKGLRLIEVDKSDLIGLPYLLTLLKERPEKFIVFCDDLSFESGDETYKALKTALDGGLSQRCANVLVYATSNRRHLMPEYFDENAGTTGMRGEVHQKEAVEEKISLSDRFGLWLSFYPFDQNDYLAAVQNWLEDFGVPYDETAQMAALQWAQTRGSRSGRSAWQFACDWAGRLPEQRAP

SEQ ID NO: 3496 - protein, 291 aa, Neisseria meningitidis
MAVGKEILTKIRSVQNTQKITKAMQMVSTSKMRKTQERMRLARPYAEKVRMVMSHLAQTNTDHGIPLLESHREIRRVGFILITSDKGLCGGLNANVLKKFLAQVQEYRNQGIEEEIVCLGSKGLMACQSIGLNVIASAVNLGDTPKMEMLLGPLTELFQRYEKHEIDRIHLVYSGFVNTMRQEPRMEVLLPIGENVIGDSAPKSPFSWEYRYEPTALAVLEYLVRRYLESVVYQALSDNMASEQAARMVAMKAATDNAGNAIKELRLVYNKSRQAAITTELSEIVAGAAAV

SEQ ID NO: 3497 - protein, 450 aa, Neisseria meningitidis
  misc_feature 3, 4: 'Xaa' is any amino acid
VCXXNSKVRTELFSSTGNQTIANLGGRLATNLSNAGISAGINTAVNGGSLKDNLGNAALGALVNSFQGEAASKIKTTFSDDYVAKQFAHALAGCVSGLVQGKCKDGAIGAAVGEIVAESILGGRNPATLSDAEKHKVISYSKIIAGSVAALNGGDVNTEANAAEVAVVNNALNFDSTPTNAKKHQPQKPDKTALEKIIQSIMPAHAAGAMTNPQDKDAAIWISNIRNGITGPIVITSYGVYAAGWTAPLIGTAGKAAISTCMANPSGCTVMVTQAAEAGAGIATGAVTVGNAWEAPVGALSKAKAAKQAIPTQTVKELDGLLQESKNIGAVNTRINIANSTTRYTPMRQTGQPVSAGFEHVLEGHFHRPIANNRSVFTISPNELKVILQSNKVVSSPVSMTPDGQYMRTVDVGKVIGTTSIKEGGQPTTTIKVFTDKSGNLITTYPVKGN

SEQ ID NO: 3498 - protein, 423 aa, Neisseria meningitidis
VGDGVHTLLLDRPIVRDGRKFDAPLLWMVVLMTAFSLLMIYSASVYLASKEGGDQFFYLTRQAGFVVAGLIASGFLWFLCRMRTWRRLVPWIFALSGLLLVVVLIAGREINGATRWIPLGPLNFQPTELFKLAVILYLASLFTRREEVLRSMESLGWQSIWRGTANLIMSATNPQARRETLEMYGRFRAIILPIMLVAFGLVLIMVQPDFGSFVVITVIAVGMLFLAGLPWKYFFVLVGSVLGGMVLMITAAPYRVQRVVAFLDPWKDPQGAGYQLTHSLMAIGRGEWFGMGLGASLSKRGFLPEAHTDFIFAIIAEEFGFFGMCVLIFCYGWLVVRAFSIGKQSRDLGLTFNAYIASGIGIWIGIQSFFNIGVNIGALPTKGLTLPLMSYGGSSVFFMLISMMLLLRIDYENRRKMRGYRVE

SEQ ID NO: 3499 - protein, 344 aa, Neisseria meningitidis
MPNCFKFHTVIERHWQKPYPVLSFLLKPLSGLFAKIAAKRRTDFLSGKRQSEKLPVPVVVVGNIHAGGTGKTPIVAALVSGLQEKGVKVGIISRGYGRKSKAVHVLNAESRAEDAGDEPLLLFRKTGAPTAVGSSRAEAGRALLAAHPDIGLIVADDGLQHYALQRDVEIAVFPSADTGRTDLDLLPNGSLREPLLRLDSVDAVVVSGGKADALFRPSENMFHSRIEAGRIYRLNNPSEILDTGRLKNQTVVAVAGIAKPARFFDSLRNMGITVKRTVALPDHADISAADLPDADAVIITEKDAVKFSDGICTDNVWVLPVCAIIEPDLAAFVLERLEDVPKAV

SEQ ID NO: 3500 - protein, 222 aa, Neisseria meningitidis; identical to SEQ ID NO: 197

SEQ ID NO: 3501 - protein, 116 aa, Neisseria meningitidis
MSDGQNIPAKMMSLQLKDMNLLYSSYMPFLEHGGLFVQTDDVFSIGDDILLAVEILNFPKLFLPTKVAWINPARTSSKPKGVGLAFTKHENCLKVKDQIEVELGSTIGGSRPTFTM

SEQ ID NO: 3502 - protein, 283 aa, Neisseria meningitidis
MITHPQFDPVLISIGPLAVRWYALSYILGFIFFTFLGRRRIAQGLSVFTKESLDDFLTWGILGVILGGRLGYVLFYKFSDYLAHPLDIFKVWEGGMSFHGGFLGVVIAIWLFGRKHGIGFLKLMDTVAPLVPLGLASGRIGNFINGELWGRVTDINAFWAMGFPQARYEDAEAAAHNPLWAEWLQQYGMLPRHPSQLYQFALEGICLFAVVWLFSKKQRPTGQVASLFLGGYGIFRFIAEFARQPDDYLGLLTLGLSMGQWLSVPMIVLGIVGFVRFGMKKQH

SEQ ID NO: 3503 - protein, 864 aa, Neisseria meningitidis
MSKSAVSPMMQQYLGIKAQHTDKLVFYRMGDFYEMFFDDAVEAAKLLDITLTTRGQMDGEPVKMAGVPFHAAEQYLARLVKLGKSVAICEQVGEVGAGKGPVERKVVRIVTPGTLTDSALLEDKETNRIVAVSPDKKYIGLAWASLQSGEFKTKLTTVDKLDDELARLQAAEILLPDSKNAPQLQTASGVTRLNAWQFAADAGEKLLTEYFGCQDLRGFGLDGKEHAVAIGAAGALLNYIRLTQNLMPQHLDGLSLETDSQYIGMDAATRRNLEITQTLSGKKSPTLMSTLDLCATHMGSRLLALWLHHPLRNRAHIRARQEAVAALESQYKPLQCRLKSIADIERIAARIAVGNARPRDLAALRDSLFALSEIELSAECSSLLGTLKAVFPENLSTAEQLRQAILPEPSVWLKDGNVINHGFHPELDELRRIQNHGDEFLLDLEAKERERTGLSTLKVEFNRVHGFYIELSKTQAEQAPADYQRRQTLKNAERFITPELKAFEDKVLTAQEQALALEKQLFDGVLKNLQTALPQLQKAAKAAAALDVLSTFSALAKERNFVRPEFADYPVIHIENGRHPVVEQQVRHFTANHTDLDHKHRLMLLTGPNMGGKSTYMRQVALIVLLAHTGCFVPADAATIGPIDQIFTRIGASDDLASNRSTFMVEMSETAYILHHATEQSLVLMDEVGRGTSTFDGLALAHAVAEHLLQKNKSFSLFATHYFELTYLPEAHAAAVNMHLSALEQGQDIVFLHQIQPGPAGKSYGIAVAKLAGLPVRALKSAQKHLNGLENQAAANRPQLDIFSTMPSEKGDEPNVDSFVDKAEEKHFEGILAAALEKLDPDSLTPREALSELYRLKDLCKSVS

SEQ ID NO: 3504 - protein, 202 aa, Neisseria meningitidis
  misc_feature 198, 199, 200: 'Xaa' is any amino acid
MKPLILGLAAVLALSACQVQKAPDFDYTSFKESKPASILVVPPLNESPDVNGTWGVLASTAAPLSEAGYYVFPAAVVEETFKQNGLTNAADIHAVRPEKLHQIFGNDAVLYITVTEYGTSYQILDSVTTVSAKARLVDSRNGKELWSGSASIREGSNNSNSGLLGALVSAVVNQIANSLTDRGYQFPNRRIQPAVALXXXHT

SEQ ID NO: 3505 - protein, 77 aa, Neisseria meningitidis
MWHIVAIGYLFVAVMYSAAQPSIARALIYLVFWAVLPTVFTVFTITVRRRNHLMRQQEQAESEQQRAQRQKDSGTKP

SEQ ID NO: 3506 - protein, 436 aa, Neisseria meningitidis
MIVPDLFVAHFREAVPYIRQMRGKTLVAGIDDRLLEGDTLNKLAADIGLLSQLGIRLVLIHGARHFLDRHAAAQGRTPHYCRGLRVTDETSLEQAQQFAGTVRSRFEAALCGSVSGFARAPSVPLVSGNFLTARPIGVIDGTDMEYAGVIRKTDTAALRFQLDAGNIVWLPPLGHSYSGKTFHLDMLQTAASVAVSLQAEKLVYLTLSDGISRPDGTLAVTLSAQEAQSLAEHAGGETRRLISSAVAALEGGVHRVQILNGAADGSLLQELFTRNGIGTSIAKEAFVSIRQAHSGDIPHIAALIRPLEEQGILLHRSREYLENHISEFSILEHDGNLYGCAALKTFAEADCGEIACLAVSPQAQDGGYGERLLAHIIDKARGIGISRLFALSTNTGEWFAERGFQTASEDELPETRRKDYRSNGRNSHILVRRLHR

SEQ ID NO: 3507 - protein, 156 aa, Neisseria meningitidis; identical to SEQ ID NO: 681

SEQ ID NO: 3508 - protein, 233 aa, Neisseria meningitidis
  misc_feature 3, 4: 'Xaa' is any amino acid
VCXXETRGKGVPVAAKKDWVALSGRSRVVVYDTRKLSEKDLEKSVLNYATPKWKNRIGYAPTSGAFLEQVVAIVKLKGEAAALKWLKGLKEYGKPYAKNSVALQAVENGEIDAALINNYYWHAFAREKGVQNVHTRLNFVRHRDPGALITYSGAAVLKSSQNKDEAKKFVAFLASKEGQRALTAVRAEYPLNPHVVSTFNLEPIAKLEAPQVSATTVSEKEHATRLLEQAGMK

SEQ ID NO: 3509 - protein, 823 aa, Neisseria meningitidis
MKKTCFHCGLDVPEHLHLTVRYENEDRETCCAGCQAVAQSIIDAGLGSYYKQRTADAQKTELPPQEILDQIRLYDLPEVQSDFVETHGGTREAVLMLGGITCAACVWLIEQQLLRTDGIVRIDLNYSTHRCRVVWDDGKIRLSDILLKIRQIGYTAAPYDAQKIEAANQKERKQYIVRLAVAGLGMMQTMMFALPTYLYGGDIEPDFLQILHWGGFLMVLPVVFYCAVPFYQGALRDLKNRRVGMDTPITVAIIMTFIAGVYSLATNAGQGMYFESIAMLLFFLLGGRFMEHIARRKAGDAAERLVKLIPAFCHHMPDYPDTQETCEAAVVKLKAGDIVLVKPGETIPVDGTVLEGASTVDESMLTGESLPVAKMPSEKVTAGTLNTQSPLIIRTDRTGGGTRLSHIVRLLDRALAQKPRTAELAEQYASSFIFGELLLAVPVFIGWTLYADAHTALWITVALLVITCPCALSLATPTALAASTGTLAREGILIGGKQAIETLAQTTDIIFDKTGTLTQGKPAVRRISLLRGTDEAFVLAVAQALEQQSEHPLARAILNCRISDGSVPDIAIKQRLNRIGEGVGAQLTVNGETQVWALGRASYVAEISGKEPQTEGGGSAVYLGSQSGFQAVFYLTDPLKDSAAEAVRQLAGKNLTLHILSGDRETAVAETARALGVAHYRAQAMPEDKLEYVKALQKEGKKVLMIGDGINDAPVLAQADVSAAAAGGTDIARDGADIVLLNEDLRTVAHLLDQARRTRHIIRQNLIWAGAYNIIAVPLAVLGYVQPWIAALGMSFSSLAVLGNALRLHKRGKMQSEKMPSEQ

SEQ ID NO: 3510 - protein, 321 aa, Neisseria meningitidis
VKPRFYWAACAVLLTACSPEPAAEKTVSAASASAATLTVPTARGDAVVPKNPERVAVYDWAALDTLTELGVNVGATTAPVRVDYLQPAFDKAATVGTLFEPDYEALHRYNPQLVITGGPGAEAYEQLAKNATTIDLTVDNGNIRTSGEKQMETLARIFGKEARAAELKAQIDALFAQTREAAKGKGRGLVLSVTGNKVSAFGTQSRLASWIHGDIGLPPVDESLRNEGHGQPVSFEYIKEKNPDWIFIIDRTAAIGQEGPAAVEVLDNALVRGTNAWKRKQIIVMPAANYIVAGGSRQLIQAAEQLKEAFEKAEPVAAGKE

SEQ ID NO: 3511 - protein, 251 aa, Neisseria meningitidis
MIKIRNIHKTFGENTILRGIDLDVGKGQVVVILGPSGSGKTTFLRCLNALEMPEDGQIEFDNERPLKIDFSKKPSKHDILALRRKSGMVFQQYNLFPHKTALENVMEGPVAVQGKPAAQAREEALKLLEKVGLGDKVDLYPYQLSGGQQQRVGIARALAIQPELMLFDEPTSALDPELVQDVLDTMKELAQEGWTMVVVTHEIKFALEVATTVVVMDGGVIVEQGSPQDLFDHPKHERTRRFLSQIQSTKI

SEQ ID NO: 3512 - protein, 398 aa, Neisseria meningitidis
MAKIITPLSANQVKNAKPRDKLYKLSDGGGLALWVYPTGGRSWKLSFVQDGRQQTISLGRYPDFSLADAREWREEVRRKRAHGENVVNKKVRADFAFEKVARDWFVRWSKGRSEKYAGQVMRNFERWVFPAIGNLDIRQVRTADVVGCLRVMEARGIVDTLRKTKNSLKMVFAFAVGSGMMEINPVAQIGSGVFERAKTGNMAALSPSELPRLIDFLEQRNEFAVYAGRVRIHPVTRLCIYWLLLTMTRIQEAALMEWSELDGEVWRIPAERKKERRGHDVPLSRAMQWVLDQARALNVNGRFVFESVNFQGHINKESPRVAMQRAGLDTTAHGLRLLARTYLREVLKVDNDVAEKLLAHSLGTRTQTAYNRSELWEERKDALERWGNDVLRLAKNGK

SEQ ID NO: 3513 - protein, 67 aa, Neisseria meningitidis
MPSEACLVFRRHFLRLKQRIGNPALPVHGNLHLKTICIPNHTPIPVSVICTLPVLGNHRFFAYNSRI

SEQ ID NO: 3514 - protein, 154 aa, Neisseria meningitidis
  misc_feature 150, 151, 152: 'Xaa' is any amino acid
VISAFQTAGTAMTDNLIQIATPILTVIGVFVAAYGIMRNTENAKKRATIDMIMAERNNAALQEAITIVNGLAKTDGCILATYTSDTSDKKKDREAILTVLNQREFVCAGVLGGALHEKMYKDFEYSMLLRDWDNLSSFIFEIRRIRSAPXXXHT

SEQ ID NO: 3515 - protein, 550 aa, Neisseria meningitidis
MVAYVFLFLFVTAALVLIIRSHYRWTYFFASALFVFLAGGMLMLTAQWQRALNFASVWFVVLILFHRLKIHYYKQPLLISDFLLIADWRNWETLFHYKEAVIGMAGLLALAAYAVFGWSGADTLGVPWRWAGAALFAASFALMRHFSKHPGAVKTWLDSLPDDGRDVFLNLPMSCRAVFFQVPVFEGDGEGFAKQMPSEPPLRGSSDEKPDIVVTLMESTLDPHCFDFAAAKIPDLKMFGRQEDTVFFSPLRVHTFGGATWKSEFAFLAGVPSTDFGALASGVFYSVVPHLQTGLVRNLREHGYFCVALSPFTKGNYNAKAAYDHFGFNLMFQPQDLGYPAPMGKNLWHISSEEMMQYARMILEKRHPDLENVRQPMFVYVLTMKEHGPYRTDTDNVFDLDAPDLNAKTVSALNDYIGRIADLDKAVESFDRYLHERGKPFVFGYFGDHQVPFEGVSVRKKWDYAQPDYVTQFAVRSNIAGGFVQRQDFLDLAFAGGVLMEAAGLEAKDGFMRANMAMRGLCGGGLEDCPNRKLVGDYRNYLYDVLKIVR

SEQ ID NO: 3516 - protein, 158 aa, Neisseria meningitidis
MPIEIERRFLIGNDNWRQYADEPLLLKQAYLSVEKERTVRVRIVGQQAWLTLKGYISELSRSEFEYEIPLADAEKMMETMCPFKMEKWRYPVRWGGSLFEIDVFLGDNAPLVVAEIELPDENADFDRPDWLGREITADGMFTNAYLSRHPFSSWKNAV

SEQ ID NO: 3517 - protein, 405 aa, Neisseria meningitidis
LVNPQKPIPQFVVGLTGISDGMVADAPVFAEIAGELFSVLKGCVLVAHNSRFDYTFLKHEFHRVGIGFSSPVLCSVQLSRCLYPQFYKHSLDSIIERLGIVVEDRHRAMADVSALCDYLEYSLSEHGVEAWIRQCFRLMNPKPLPAALPERLREQLYGLPDGMGVLACFDGGGKVNYIGTFERVYSEVSALLDSGKAPFDWCNTEEVRFFPALGSLHAYKIKAELVGRYHSGCYVSAKNLLKTFTTVRFEKGSDGMLNAKTAALKNGVTDNPPTGLFANKKAARRALSSWAETYGLCPAAAGILSDGYTEDEPCPVYVSDRCDKACVRSDEQVLAFAHKLPVLDWGKMHEVEITETDPLTGEKVVLHGMGGALEMDDGLWYFDKDLPDAFKAKFKTDRKNIKEIG

SEQ ID NO: 3518 - protein, 160 aa, Neisseria meningitidis; identical to SEQ ID NO: 2526

SEQ ID NO: 3519 - protein, 99 aa, Neisseria meningitidis; identical to SEQ ID NO: 3406

SEQ ID NO: 3520 - protein, 590 aa, Neisseria meningitidis
MILPARFSDGISLSLRLKLLTGLWVGLAALSVVLTLLLSLRLENAASVIEEAGNLRMQAYRLAYMAGEGSPRAQIDNQVAEFEKSLKRIAQSDAIHPLIPSDTPLAYDLIQSMLIIDWQAHILPPLQSYRRPTQVDLYRFAGNIELFLQALENANEKNTWWLRRFQWAIMLMTLVSSVLMLFWHQIWVIRPLQALREGAERIGRRCFDIPVPEGGTPEFKQVGRCFNQMGGRLKILYDDLEGQVAEQTRSLEKQNQNLTLLYQTTRDLHQSYIPQQAAEHFLNRILPAVGADSGRVCLDGGSDVYVSIHHADCGTAASDLGKYHEEIFPIEYQNETLGRLLLSFPNGISLDEDDRILLQTLGRQLGVSLAGTKQEEEKRLLAVLQERNLIAQGLHDSIAQALTFLNLQVQMLETAFAENKREEAAENIGFIKTGVQECYEDVRELLLNFRTKISNKEFPEAVADLFARFTQQTGITVETAWENGSFLPPQEAQLQMIFILQESLSNIRKHTRATHVKFTLSEHGGRFTMTIQDNGQGFDTEKIGEPTGSHVGLHIMQERAKRIHAVLEIRSQAQQGTTVSLTVASEESLK

SEQ ID NO: 3521 - protein, 100 aa, Neisseria meningitidis
LGFNNLVSLAALIEKVFPIRYTPAGIPVLDIILKHESWQEENGQQCLVQLEIPARILGRQAEEWQYRQGVYVHVEGFLAQKSRRSLMPMLRIQNIQEYKG

SEQ ID NO: 3522 - protein, 1454 aa, Neisseria meningitidis
MKTTDKRTTETHRKAPKTGRIRFSPAYLAICLSFGILPQAWAGHTYFGINYQYYRDFAENKGKFAVGAKDIEVYNKKGELVGKSMTKAPMIDFSVVSRNGVAALVGDQYIVSVAHNGGYNNVDFGAEGSNPDQHRFTYKIVKRNNYKAGTNGHPYGGDYHMPRLHKFVTDAEPVEMTSYMDGRKYIDQNNYPDRVRIGAGRQYWRSDEDEPNNRESSYHIASAYSWLVGGNTFAQNGSGGGTVNLGSEKIKHSPYGFLPTGGSFGDSGSPMFIYDAQKQKWLINGVLQTGNPYIGKSNGFQLVRKDWFYDEIFAGDTHSVFYEPRQNGKYSFHDNNNGTGKIDAKHEHNSLPNRLKTRTVQLFNVSLSETAQEPVYHAAGGVNSYRPRLNNGENISFIDEGKGELILTSNINQGAGGLYFQGDFTVSPENNETWQGAGVHISEDSTVTWKVNGVANDRLSKIGKGTLHVQAKGENQGSISVGDGKVILDQQADENNKKQAFSEIGLVSGRGTVQLNADNQFNPDKLYFGFRGGRLDLNGHSLSFHRIQNTDEGAMIVNHNQDKESTVTITGNKDIATTGNNNSLDSKKEIAYNGWFGEKDTTKTNGRLNLVYQPAAEDRTLLLSGGTNLNGNITQTNGKLFFSGRPTPHAYNHLNDHWSQKEGIPRGEIVWDNDWINRTFKAENFQIKGGQAVVSRNVAKVKGDWHLSNHAQAVFGVAPHQSHTICTRSDWTGLTNCVEKTITDDKVIASLTNTDISGNVSLADHAHLNLTGLATLNGNLSANGDTRYTVSHNATQNGDLSLVGNAQATFNQATLNGNTSASGNASFNLSDHAVQNGSLTLSGNAKANVSHSALNGNVSLADKAVFHFESSRFTGQISGSKDTALHLKDSEWTLPSGTELGNLNLDNATITLNSAYRHDAAGAQTGSATDAPRRRSRRSLLSVTPPASAESHFNTLTVNGKLNGQGTFRFMSELFGYRSDKLKLAESSEGTYTLAVNNTGNEPASLEQLTVVEGKDNKPLSENLNFTLQNEHVDAGAWRYQLIRKDGEFRLHNPVKEQELSDKLGKAEAKKQAGKDNAQSLDALIAAGRDAVEKTESVAEPARQAGGENVGIMQAEEEKKRVQADKDTALAKQREAETRPATTAFPRARRARRDLPQPQPQPQPQPQRDLISRYANSGLSEFSATLNSVFAVQDELDRVFAEDRRNAVWTSGIRDTKHYRSQDFRAYRQQTDLRQIGMQKNLGSGRVGILFSHNRTENTFDDGIGNSARLAHGAVFGQYGIGRFDIGISTGAGFSSGSLSDGIGSKIRRRVLHYGIQARYRAGFGGFGIEPHIGATRYFVQKADYRYENVNIATPGLAFNRYRAGIKADYSFKPAQHISITPYLSLSYTDAASGKVRTRVNTAVLAQDFGKTRSAEWGVNAEIKGFTLSLHAAAAKGPQLEAQHSAGIKLGYRW

SEQ ID NO: 3523 - protein, 197 aa, Neisseria meningitidis
MEHYLSLFIKSVFIENMALSFFLGMCTFLAVSKKVSTAFGLGVAVIFVLGLSVPANQLVYSLLKDGAIVEGVDLTFLKFITFIGVIAALVQILEMFLDKFVPALYNALGIYLPLITVNCAIFGAVSFMAQREYNFGESVVYGFGAGLGWMLAIVALAGITEKMKYSDAPKGLKGLGITFIAAGLMAMAFMSFSGIQL

SEQ ID NO: 3524 - protein, 477 aa, Neisseria meningitidis
MSQYDVVVIGAGPGGYVAAIRAAQLGFKTACVDAGVNKAGNAPALGGTCLNVGCIPSKALLQSSEHFHAAQHEFAEHGITVGDVKFDVAKMIERKDAIVTKLTGGVKFLFQKNKVTSLFGTASFAGKNGDAYQIEVDNKGEKTVIEAKHVIVATGSVPRPLPQVAIDNVNVLDNEGALNLTEVPAKLGVIGSGVIGLEMGSVWNRVGAEVTILEAAPTFLAAADQQIAKEAFKYFTKEQGLSIELGVKIGDIKSEGKGVSVAYETAAGEAKTEVFDKLIVAIGRIPNTKGLNAEAVGLEKDERGFIKVDGECRTNLPNVWAIGDVVRGPMLAHKASDEGVAVAERIAGQKPHIDFNNVPFVIYTDPEIAWVGKTEEQLKAEGVEYKKGTSGFGANGRALAMGKAKGTVKVLADAKTDRILGVHMIGPVVSELLTEGVTALEFFASSEDIARIIHAHPTLSEVVHEAALAADKRALHG

SEQ ID NO: 3525 - protein, 246 aa, Neisseria meningitidis
METTLFKPALWQIPHIGSGGETALAEKTETLKQRLHRIVGSHRDARFASSLAAEDMVITDLIAGENLNIGIFTLDTGLLHTETLNLLDRLGRAYPHLRIKRFRPVREDADRYVESKGRFAFYDSVEARRECCRIRKIEPLNRAIAGADAWLTGQRREQSATRTELPFAEYDAGRGIGKYNPIFDWSEHDVWAYILANNVPYNDLYRQGFPSIGCDPCTRPVKAGEDIRAGRWWWEGRNSKECGLHK

SEQ ID NO: 3526 - protein, 498 aa, Neisseria meningitidis
MSLALVYSRALSGMNAPLVEVEAHLANGLPHFNIVGLPDTEVKESRDRVRAAIIQSGFEFPAKKITVNLAPADLPKESGRFDLPIAIGILAASGQVAPEKLAEYEFAGELALSGLLRPVRGALAMAWQGMQAKRAFVLPEENAGQAAVMRGITVYGARSLGEVAAHLNGIEPLVQTDCQVPQMPSENTKLLDLVDVKGQHTARLALEIAAAGGHSLLMMGPPGTGKSMLSQRLPGILPPLTEDELVEVWALRSLLPNHQQQLDSNRPFRSPHHSASAAAMVGGGSDPRPGEISLAHHGVLFLDELPEFDRKVLEVLREPLENGEIHISRAARQAVYPAKFQLVAAMNPCPCGYLGHPVKPCRCTPESVARYRSKISGPLLDRIDLTIEVPSLSAVELMQQEAGESSASVLERVIAARDKQYARQGKVNAALSVSELDSQARIQKEAQEALGSLLEKLSLSARSFHRIMRVARTLADLAGDEEVGRSHVMKAIGFRRAL

SEQ ID NO: 3527 - protein, 70 aa, Neisseria meningitidis
MTAMPSEPPFRRHSTHQNRKTAPKIIITRHNGKPDTKPNTAAKMPSEAVGATILIWGALQGRITFLNHPF

SEQ ID NO: 3528 - protein, 115 aa, Neisseria meningitidis
MYIPDKGDIFHLNFDPSSGKEIKGGRFALALSPKAFNRATGLVFACPISQGNAAAARSSGMISTLLGAGTETQGNVHCHQLKSLDWQIRKASFKETVPDYVLDDVLARIGAVLFD

SEQ ID NO: 3529 - protein, 274 aa, Neisseria meningitidis
MDGAQPKTNFFERLIARLAREPDSAEDVLNLLRQAHEQEVFDADTLLRLEKVLDFSDLEVRDAMITRSRMNVLKENDSIERITAYVIDTAHSRFPVIGEDKDEVLGILHAKDLLKYMFNPEQFHLKSILRPAVFVPEGKSLTALLKEFREQRNHMAIVIDEYGGTSGLVTFEDIIEQIVGDIEDEFDEDDSADNIHAVSSERWRIHAATEIEDINTFFGTEYSSEEADTIGGLVIQELGHLPVRGEKVIIGSLQFTVARADNRRLHTLMATRVK

SEQ ID NO: 3530 - protein, 51 aa, Neisseria meningitidis
MWLGDMKIFYGQYGKDFYDYHEFMKDKGIEEINMWEGELFDHPYYEDEKFK

SEQ ID NO: 3531 - protein, 154 aa, Neisseria meningitidis
LKENKVDEVFKTESAGYLMNHIARQFAILLGEGLKPLGIAPAQFPILLELWQKDGLSQQELVERADLKQATIANTLARMERDGLITREPNPDDARSRLIMLTEQARALQQQSTEIAQAINQTALSDLSANEQKLFLEMAAKIVARQQEMITGEK

SEQ ID NO: 3532 - protein, 164 aa, Neisseria meningitidis
MKKNILEFWVGLFVLIGAAAVAFLAFRVAGGAAFGNSGKTYTVYADFGDIGGLKVNAPVKSAGVLVGRVGAIGLDPKSYQARVRLDLDGKYQFSSDVSAQILTSGLLGEQYIGLQQGGDTENLAAGDTISVTSSAMVLENLIGKFMTSFAEKNADGGNAEKAAE

SEQ ID NO: 3533 - protein, 95 aa, Neisseria meningitidis
MNKILEKLIEQACTNNALFCGKLLTDLTKDEMDILSSFHAIDVDMIVLNDDYFCGIRADHFVIEFGWSECHEGDLILITANHKGSRALTLIDISK

SEQ ID NO: 3534 - protein, 403 aa, Neisseria meningitidis
MNQLKLAVSGAQILFVAFGAMVLVPLLTGLNPALALLGAGLGTLLFQITTKRKVPIFLGSSFAFIAPIIYSVGEWGLPSTMFGLFAAGFMYFVFAALIRWRGLAAVHKLLPPVVIGPVIMVIGLSVAVAASSMAMGQADGKQVIDYTDSLILSGFTFAVTAIVSVFGSRMMKLIPILIGVASGYVLALLMGLVDTASIAHAPWFAVPHFETPQVNWQAALFMLPVAVAPAIEHIGGIMAIGNVTGKDYTKDPGLDKTLAGDGLGVCVAGLIGGPPVTTYGEVTGAVMITKNSNPVIMTWAAVFAVCMAFFGKFNAFLASIPMPVMGGIMLLLFGTIASLGVKTLIDAKVDLMLPKNLVIVSSVLTTGIGGMTLKLGSFSFAGVGLCAVLAIMLNSLLPDPKES

SEQ ID NO: 3535 - protein, 288 aa, Neisseria meningitidis
MKGIILAGGSGTRLYPITRGVSKQLLPVYDKPMIYYPLSVLMLAGIRDILVITAPEDNASFKRLLGDGSDFGISISYAVQPSPDGLAQAFIIGEEFIGNDNVCLVLGDNIFYGQSFTQTLKQAAAQTHGATVFAYQVKNPERFGVVEFNENFRAVSIEEKPQRPKSDWAVTGLYFYDNRAVEFAKQLKPSARGELEISDLNRMYLEDGSLSVQILGRGFAWLDTGTHESLHEAASFVQTVQNIQNLHIACLEEIAWRNGWLSDEKLEELARPMAKNQYGQYLLRLLKK

SEQ ID NO: 3536 - protein, 212 aa, Neisseria meningitidis
LTIALSKGRIFEETLPLLAAAGIVPTEEPEKSRKLIIGTNHENIRLVIVRATDVPTYVRYGAADFGIAGKDVLIEHGGTGLYRPLDLEIAKCRMMVAVRKGFDYEAASQPGCRLKIATKYPEIAASHFAGKGVHVDIIKLYGSMELAPLVGLSDAIVDLVSTGNTLKANGLEAVEHIVDISSRLVVNKAALKTKYALLEPIIQAFGGAVKAK

SEQ ID NO: 3537 - protein, 96 aa, Neisseria meningitidis
MALTLADVDKIARLSRLHLTAEEKEKSLQELNDIFTMVEQMQTINTDGIEPMAHPHEAALRLREDEVTETDRAAEYQAGAPEVRNRLYIVPQVIEE

SEQ ID NO: 3538 - protein, 150 aa, Neisseria meningitidis
MAKPLKYPVSALVVLYSGDGGILLIERTHPKGFWQSVTGSLEPGETVAQTARREVWEETGILLADGQLQDWHDSTVYEIYHHWRHRYPKGVFENREHLFSAEIPRDTPVVLQPEEHVSYGWFGLEEAAEKVFSPSNRRAILELGRFLGKR

SEQ ID NO: 3539 - protein, 188 aa, Neisseria meningitidis
  misc_feature 182, 183: 'Xaa' is any amino acid
MALKVRHDLFGLETGIDTTQIVPSSKLVSTITGYPVQPNKAIVGANAFSHESGIHQDGVLKHRETYEIMSAESVGWSANRLSLGKLSGRNAFKTKLADLGIELESEEALNAAFARFKELADKKREIFDEDLHALVSDEMGNMNTESYKFISQKISTETGEEPRADIVFSIKGEEKRASATGXXTHLIN

SEQ ID NO: 3540 - protein, 242 aa, Neisseria meningitidis
MSQITMRQMIEAGVHFGHQTRFWNPKMAQYIFGARNKIHIVNLEKTLPMFQDAQEAVRRLVANKGTVLFVGTKRQARDIIREEATRAGMPFVDYRWLGGMLTNYKTVKQSIKRLEEKTAALENAAESGFSKKEILEMQRDVEKLERSLGGIKNMKGLPDAIFVIDTGYQKGTLVEAEKLGIPVIAVVDTNNSPDGVKYVIPGNDDSAKAIRLYCRGIADAVLEGKNQALQETVAAAQEAAAE

SEQ ID NO: 3541 - protein, 178 aa, Neisseria meningitidis
LEDEDFIRAASMLAEEVFGFGIYKESKGSGGRFYERCWLMGSEDVLYGRVHFGGQNNTILFELTGTGCGVAKEGWESRLFAFLTNAIRPKITRVDIAKDFFNGEYSPNQAREDRNKGMFTCHHVKPKGECLGSDWEEDDEAKMTKGKTYGIGSRESSKYVRVYEKASSWAIKQHMDAL

SEQ ID NO: 3542 - protein, 393 aa, Neisseria meningitidis
MRKKLTALVLSALPLAAVADVSLYGEIKAGVEGRNIQAQLTEQPQVTNGVQGNQVKVTKAKSRIRTKISDFGSFIGFKGSEDLGEGLKAVWQLEQDVSVAGGGASQWGNRESFIGLAGEFGTLRAGRVANQFDDASQAINPWDSNNDVASQLGIFKRHDDMPVSVRYDSPEFSGFSGSVQFVPAQNSKSAYKPAYYTKDTNNNLTLVPAVVGKPGSDVYYAGLNYKNGGFAGNYAFKYARHANVGRNAFELFLIGSATSDEAKGTDPLKNHQVHRLTGGYEEGGLNLALAAQLDLSENGDKAKTKNSTTEIAATASYRFGNAVPRISYAHGFDLIERGKKGENTSYDQIIAGVDYDFSKRTSAIVSGAWLKRNTGIGNYTQINAASVGLRHKF

SEQ ID NO: 3543 - protein, 149 aa, Neisseria meningitidis
MSLIGEILPLSHIVLDMEVGSKKRLFEEAGLLLERESSLSHADVFECLFAREKLGSTGLGQGVAIPHGRHAGVKQATGAFIRTREPVGFDAPDGKPVSLVFILLVPENATGEHLEVLSKLAGKFSQKSIRESLMTVSSAEEARAILTEE

SEQ ID NO: 3544 - protein, 135 aa, Neisseria meningitidis
MTVWFVAAVAVLIIELLTGTVYLLVVSAALAGSGIAYGLTGSTPAAVLTAALLSALGIWFVHAKTAVRKVETDSYQDLDAGQYVEILRHTGGNRYEVFYRGTHWQAQNTGQEELEPGTRALIVRKEGNLLIIAKP

SEQ ID NO: 3545 - protein, 276 aa, Neisseria meningitidis
MITLKTTPFHQAHQDAGAKPVDFAGWELPIHYGSQIAEHEAVRTDAGMFDVSHMLVTDVAGANAKAFFRKLIANDVAKLAFVGKALYSALLNDNGGVIDDLIVYRTNEAETQYRIVSNGATREKDTAQFHKVGQEFGVSFNPRYDLGMLAVQGPKAIEKLLTVKPEWADVVHNLKPFQGADLGNDWFVARTGYTGEDGVEVILPGTEAVAFFKALQAAGVQPCGLGARDTLRMEAGMNLYGNDMDDDTSPLEAGMGWTVDLKDESRDFVGKAALLA

SEQ ID NO: 3546 - protein, 90 aa, Neisseria meningitidis
VNNSVITVIGKDRVGIVYDVSKILAENRINILNISQQLMDDFFTMIILVDTSKCPKSRQEVLDLFAEESKKLALDIRMQNEEIFQAMHRI

SEQ ID NO: 3547 - protein, 60 aa, Neisseria meningitidis
MKNHQTTLSFPTSSSLKPCADKQGLSEDRSQYRLTKLGEQMAHLPIDPKIARILLVLFRF

SEQ ID NO: 3548 - protein, 264 aa, Neisseria meningitidis
MKAYLDLMRHVLDNGTDKSDRTGTGTRSVFGYQMRFDLGKGFPLLTTKKLHLRSIIHELLWFLKGDTNIKYLKDNNVSIWDEWADENGDLGPVYGYQWRNWPAPDGRHIDQIANVVEQIKKNPDSRRLIVSAWNPALVDEMALPPCHALFQFYVADGKLSCQLYQRSADIFLGVPFNIASYALLTMMMAQVCGLEAGEFIHTFGDAHLYRNHFEQAELQLEREPRTLPVMKINPEVKDLFSFKFEDFELEGYDPHPHIKAAVSV

SEQ ID NO: 3549 - protein, 218 aa, Neisseria meningitidis
VASVFLEGEAVEVGNIFCIGRNYAAHIEELKNEIPSEPVVFMKPSGSILNSGGTILLPEFSRDVQFECELVLLVGKDSDGTGEGKDILGCVAGYGVGLDLTARDIQCRLKEKGLPWLKAKGFRHSACVSDFAAAGRIGNPENVLFSLKQNGVLKQRGDTGLMIYPIREILHKLAADYGLGKGDLVFTGTPSGVGAIGAGDNLALELDGLVRASFTVGC

SEQ ID NO: 3550 - protein, 177 aa, Neisseria meningitidis
VDAVIVTHTHEDHWGETAARSIPKNLPVYVQHQADAAKIRSQGFTDVRVLNGSTVFNGVTISKTGGVHGTEAMYANPQLAEILGDAMGVVFQSSGHKTAYIMGDTVWTADVNKALNRYKPDYLIMNTGYALISGITVHMDTVNHTAVSRTDMRKFIRGQGIESRVNVPEDGEILKLD

SEQ ID NO: 3551 - protein, 229 aa, Neisseria meningitidis
MLFEGLPCLAVWCKNRLSAVLPVGGLNVSENLLEIETHPFDSVLPPKAAVMMMGTFPPKEDKRAMQFHYPNFQNDMWRVYGLVFFNDAAHFQRLSEKAFDAEKIKAFLHERGIASCPTVLKAAREHGNASDKFLKVVETVDLAAVLAKIPDCRHICTTGGKATEILLDIQGGGIKMPKTGETVPFPFAGRDLTLTRLPSTSRAYPLSLAKKAAAYRAFFEMAGLCEKQL

SEQ ID NO: 3552 - protein, 317 aa, Neisseria meningitidis
  misc_feature 3, 4: 'Xaa' is any amino acid
VCXXVLNLTETVRSSLDKGEAVIVVEKGGDALPADSAGETADIYTPLSLMYDLDKNDLRGLLGVREHNPMYLMPLWYNNSPNYAPGSPTRGTTVQEKFGQQKRAETKLQVSFKSKIAEDLFKTRADLWFGYTQRSDWQIYNQGRKSAPFRNTDYKPEIFLTQPVKADLPFGGRLRMLGAGFVHQSNGQSRPESRSWNRIYAMAGMEWGKLTVIPRVWVRAFDQSGDKNDNPDIADYMGYGDVKLQYRLNDRQNVYSVLRYNPKTGYGAIEAAYTFPIKGKLKGVVRGFHGYGESLIDYNHKQNGIGIGLMFNDLDGI

SEQ ID NO: 3553 - protein, 278 aa, Neisseria meningitidis; identical to SEQ ID NO: 2132

SEQ ID NO: 3554 - protein, 371 aa, Neisseria meningitidis
MIYQRNLIKELSFTAVGIFVVLLAVLVSTQAINLLGRAADGRVAIDAVLALVGFWVIGMTPLLLVLTAFISTLTVLTRYWRDSEMSVWLSCGLALKQWIRPVMQFAVPFAVLVAVMQLWVIPWAELRSREYAEILKQKQELSLVEAGEFNSLGKRNGRVYFVETFDTESGIMKNLFLREQDKNGGDNIIFAKEGNFSLNDNKRTLELRHGYRYSGTPGRADYNQVSFQKLNLIISTTPKLIDPVSHRRTIPTAQLIGSSNPQHQAELMWRISLTVSVLLLCLLAVPLSYFNPRSGHTYNILIAIGLFLIYQNGLTLLFEAVEDGKIHFWLGLLPMHIIMFVIAIVLLRVRSMPSQPFWQAVGKSLTLKGGK

SEQ ID NO: 3555 - protein, 64 aa, Neisseria meningitidis
LRQAFQTAFLKCVYLWCSKRSSESAASAKLKRGINEVKICLNLKGSLHPNPLSPWERARTRLAN

SEQ ID NO: 3556 - protein, 268 aa, Neisseria meningitidis
MKSSFVQTLTIAGSDSGGGAGIQADLKTFQMRGVFGTCVITAVTAQNTLGVSAVHLVPTETITAQIQAIREDFDIRAYKIGMLGTAEIIECVADKLKHCDFGRRVLDPVMIAKGGAPLLQDSAVAALTRLLLPDTDVLTPNLPEAEALTGVHIENRKDAERAAKILLDYGVKNVVIKGGHLNGSSSGRCTDWLFTQNETLELDSPRFPTAHTHGTGCTFSACITAELAKGSDVCEAVQTAKAYITAAISNPLEIGAGHGPVNHWAYRD

SEQ ID NO: 3557 - protein, 278 aa, Neisseria meningitidis; identical to SEQ ID NO: 2132

SEQ ID NO: 3558 - protein, 203 aa, Neisseria meningitidis
LVCRLNAPSELGKQQKLWAFAAALGQHDRIEEVVVGMNNLTVFTRFDTDLATLADELQYVWEHTAVTDHQGKLVEIPVCYGGEYGPDLAEVAAFHQTVISEIVRRHTAQTYTVFMMGFQPGFPYLGGLPEALHTPRRAVPRTSVPAGSVGIGGSQTGVYPFASPGGWQIIGRTELPLFRADLNPPTLLAAGDQVRFVAERIEP

SEQ ID NO: 3559 - protein, 241 aa, Neisseria meningitidis
MSEGMMSPVLYLIPTPLGTPDTPCLLPHEQQAIVGLTDFVVEAEKTARAHLKHLGVTTPIRELNLQTLNEHTDLKTLPELLKPLQEGRSMGIVSEAGCPAVADPGANLVALAHKHGFEVRPLVGPSSLLLALMASGANGQSFAFKGYLPSEKNERIQAFRALEQRSRQCGETQIFIETPYRNDALLADAVENLHPETRLCTATDLTLPTQEIISQTIVQWRKRKEMPNLKKRPTIFVMYAG

SEQ ID NO: 3560 - protein, 480 aa, Neisseria meningitidis
MHPTYSAVQARLLEANRLSPELLAKSLCIIGAHHVDYADIYCQRTAYESWHLEEGIVKSGSFQINQGVGVRAVSGDKTAFAYADSLCIDSINRSARAVRAIGAAGGKVSAKMPSETRGKPVCSASDPIAGLDSAAKVALLNKVEAIAKAADPRIVQVMAGLTCEYDMVYLARLDGKHAADIRPMVRLNVTVIAKQGERREQGSAGGGGRYDLAYFDENLVRQFVDAAVKQALTNLESRPAPAGEMTVVLGNGWPGVLLHEAVGHGLEGDFNRKGTSVFSGRIGERVAAKGVTVVDQGDIAGRRGSLNIDDEGNETRRTVLIEDGILVGYMQDETNARLTGTQSTGNGRRESYASVPMPRMTNTFMENGSYEPEEIIASIDKGIYAVNFGGGQVDITSGKFVFSASEAWWVEGGRLQYPVKGATIIGNGPEVLKHVSMIGNDTALDSGVGVCGKEGQSVPVGVGQPTLRIDAGLTVGGSAI

SEQ ID NO: 3561 - protein, 66 aa, Neisseria meningitidis
METITIPKENFDALLNLARTAVALNENFIPKINYGASTIPAAGFAALNEFGIARSTVESLEILKIK

SEQ ID NO: 3562 - protein, 359 aa, Neisseria meningitidis; identical to SEQ ID NO: 2157

SEQ ID NO: 3563 - protein, 135 aa, Neisseria meningitidis
MTYTTAKATEKIGISAHTLRFYDKEGLLPNIGRDEYGNRCFTDNDLQWLGLLQCLKNTGMSLKDIKRFAECTVIGDDTIEERLSLFENQIENVKCQIAELKRYLDLLEYKLAFYQKAKALGSVKAVNLPQIPETA

SEQ ID NO: 3564 - protein, 325 aa, Neisseria meningitidis
MIYPWHNEQWRQIAEHWERRPNAWLFVGKKDTGKTTFARFAAKALLCETPAPGCKPCGECMSCHLFGQGSHPDFYEITPLSDEPENGRKLLQIKIDAVREIIDNVYLTSVRGGLRVILIHPAESMNVQAANSLLKVLEEPPPQVVFLLVSHAADKVLPTIKSRCRKMVLPAPSHEEALAYLRERGVAEPEERLAFHSGAPLFDEADGVRALRIKLLDILAEPRLLKILDYAALFDKEKLPLAVFVGWMQKWLVDLGLCLQHMKPVYYPAYEDRLLQTASGFRPRNVFAAEDMLKQLAPYGFHTLNVKMQIEHLLINYLELKKENG

SEQ ID NO: 3565 - protein, 498 aa, Neisseria meningitidis; identical to SEQ ID NO: 2029

SEQ ID NO: 3566 - protein, 405 aa, Neisseria meningitidis
MQRRIITLLCAAGMAFSTQTLAANLEVRPNAPERYTVKQGDTLWGISGKYLYSPWQWGRLWDANRDQIHNPDLIYPDQVLVLRHVDGEPRLGLEQTDGIPVVKMSPDKEVSGYGIPAIDVNFYRIFMRHPQIVSRKETAAAPRLLSGPEGRLLYTKGTRVYTKGLKEPGRYLTYRINKNITDPDTGKFLGQEVAFSGIVRSLDYTDSVLEQRSKQAGERPKDNEYHTRTHPLITPLRTPSIQPLVVETAISEIQQGDYLMKMPEDTDRFNMMPHEPSRPVQAKIVSVFEGTRIAGQFQTITIDKGEADGLDKGTVLSLYKRKKTMQVDLSNNFKSRDTVELISTPAEEVGLAMVYRTSEHLSSAIILENISDISVGDTAANPGRDLDNIPDQGRSRVKFGFNRSE

SEQ ID NO: 3567 - protein, 81 aa, Neisseria meningitidis; identical to SEQ ID NO: 1901

SEQ ID NO: 3568 - protein, 916 aa, Neisseria meningitidis
LENPDAVDEKWKQYFTDLSKQPGTVAVDVAHTPIRESFVTLAKKKIASAVAGGADEAMLKKQVSVLRLISAYRIQGVGAAQLDPLKRIPPRDIEALDPKFHGLSDADMALQFNMGEGDFANRGKLPLSQIISNLKQTYCGHIALEYIYIPNTEERRWVRNYFESVLSTPHYNADQKRRILKEMTAAETLERYLHTKYVGQKRFGVEGGESAIAGLNYLIQNAGKDGVEEVIIGMAHRGRLNVLVNILGKKPGDLFAEFEGRAEIKLPSGDVKYHMGFSSDIATPHGPMHVSLAFNPSHLEIVNPVVEGSARAKQKRLGENGRDKVLPVLIHGDSAFIGLGVNQATFNLSKTRGYTTGGTVHIVINNQIGFTTSDIRDTRSTVHCTDIAKMVSAPVIHVNGDDPERVCFAIQAALDYRKKFHKDIVIDVVCYRKWGHNEGDDPTLTQPMMYKKVSQHPGARALYTEQLIAEGVVTQAEADGYIQAYRDALDKGEHVEQTTLSNFQRTQIDWSKYQGKDWREHIETGLPAADIERLTEKFTAVPEGFALHPTAKRVIEARKAMASGKQAIDWGMAETLAYASLVTKGHGVRISGEDSGRGTFSHRHAVLHDQKREKWDDGTYVPLRHMGEGMGEFLVIDSILNEEAVMAFEYGFACSAPDKLTIWEAQFGDFANGAQVTIDQFLSSGETKWGRLCGLTTILPHGYDGQGPEHSSARVERWLQLCSENNMQVIMPSEASQMFHLLQRQVLGSYRKPLVIFMSKRLLRFKGAMSPLENFTEGSTFRPVIGDTAERASNDSVKRVALCAGQVYYDLEAGRAERKLEDDVAIVRVEQLYPFPYDEVKAELAKYPNAKSVVWAQEEPKNQGAFYQIRHRIEDVISEEQKLSYAGRPSSASPAVGYSSKHIAQLKQLVEDALAL

SEQ ID NO: 3569 - protein, 212 aa, Neisseria meningitidis
MIVSIDVDAQKTFTPLCPDELPVNEGHLIVEELNAQAALADLRVMTKDAHHMVAKWLVDNPVDMLKPTGLPDADLTWVAHAMVGTRGYELLDGLPSAKEYDYCVWKGVDPELHPYGACFHDIEEKLSTGLIEWLRCQNTDTVIIGGLATDYCVKTTVLQLLKGGNWQVIVNEAACRGGIAPDTIETAWQEMSSAGAVILKNVEEIKKYINNQ

SEQ ID NO: 3570 - protein, 219 aa, Neisseria meningitidis
MTTPKLIIFDWDGTLADTTQPIIDTMRRSFAECGFPPPEAERVRSLIGYSLPEIIRDLLEMPSETAVADIARTYSAHYLNPNNRNMTLFPDALPCLDKLKAQGFRLAVATGKGRAGLDNAISQTATGGYWLATACAGEYPSKPSPEMVFGLCGELGFDPKEALVVGDTAHDLHMAANAGAAAVGVATGAHSREQLLSAPHLAVLDGLSELPGFLAQHYA

SEQ ID NO: 3571 - protein, 117 aa, Neisseria meningitidis
  misc_feature 111, 112: 'Xaa' is any amino acid
MSEIGLVKIYFGKVRDLYEIDDKRMLMVASDRLSAFDVILDDPIPSKGEILTQISNFWFKKLVHIMPNHFTGQTVYDVLPENEAKALEKRAVVAKKLTPVKVEAIVRGYLXXTHLIN

SEQ ID NO: 3572 - protein, 269 aa, Neisseria meningitidis
MIPLKIAIAGVNGRMGRVLVEAVNNHPDTVLSGALEHSGSEALGLDAGYAVGLKTGIAISDDVDTVLAQSDVLIDFTRPEPTLKHLQKCVEKQVNIIIGTTGFDDAGKAAIQAAGEKTGVVFAANFSVGVNLTFHLLDTVARVLNEGYDIEIIEGHHRHKVDAPSGTALRMGEVIAGALGRDLKQCAVYGREGHTGPRDPSTIGFATVRAGDIVGDHTALFATDGERVEITHKASSRMTFAAGAVRAAVWVNGKTGLYDMQDVLGLNNR

SEQ ID NO: 3573 - protein, 81 aa, Neisseria meningitidis; identical to SEQ ID NO: 1361

SEQ ID NO: 3574 - protein, 318 aa, Neisseria meningitidis
MKVLFIADPMASFKTYKDTTYAMMREMAKRGWRLFHTLSGELSVKNGLVVADASAFEFLGAQDDHDKNWFAAADKVQTALKAFDAVIMRTDPPFDMQYLYATQLLTLAEQQGAKVFNSGQAMRDFNEKLAILNFSRFTAPTLVTTRSADVRAFLKEHGDIIIKPLDGMGGMGIFRLTEKDPNIGSILETLMQLDSRTIMAQRYIPEIVHGDKRILIIGGEVVPYALARIPQNGETRGNLAAGGRGVAQELGGRDREIAETLAPELKRRGILLAGLDVIGSNLTEVNVTSPTGFQEIMKQKGFDVAAMFADAVAAWSVR

SEQ ID NO: 3575 - protein, 313 aa, Neisseria meningitidis
MKTLLLLIPLVLTACGTLTGIPAHGGGKRFAVEQELVAASSRAAVKEMDLSALKGRKAALYVSVMGDQGSGNISGGRYSIDALIRGGYHNNPESATQYSYPAYDTTATTKSDALSSVTTSTSLLNAPAAALTRNSGRKGERSAGLSVNGMGDYRNETLLANPRDVSFLTNLIQTVFYLRGIEVVPPEYADTDVFVTVDVFGTVRSRTELHLYNAETLKAQTKLEYFAVDRDSRKLLIAPKTAAYESQYQEQYALWMGPYSVGKTVKASDRLMVDFSDITPYGDTTAQNRPDFKQNNGKNPDVGNEVIRRRKGG

SEQ ID NO: 3576 - protein, 128 aa, Neisseria meningitidis
MEKQDNITPPHYRSRAVECIEFTERLNFCMGNAFKYVWRHREKNGAEDLKKARWYLQRQLDSCAVMHLLEPEEYAELMDGLEKCELDDLMQHVLEEILYHAFFESEDSLLAAMCGVSELLKGYGDERT

SEQ ID NO: 3577 - protein, 123 aa, Neisseria meningitidis
MSKDKNQITVGINREIIDTETDSSAEFHVIRHVSLDYATGFNVVSLDSYVRKSTFERRGRSVGSMQLNIPGVPPRGTDVLDWAYQAVVAAVEGGAVDAYGQPISANSLTGAELVYADLPEAAI

SEQ ID NO: 3578 - protein, 165 aa, Neisseria meningitidis
MNNLPVADLLVFAIIAACIVLSAMRGVIAEAGSMAAWVVSFFFAKLFAAPFADLAFASFQPRLFALALSFISLFVIACLIQKMLRSLLTGAVSAVGLGFANRILGGVFGALKGILIITLLVMLASKTDLPDTEEWRQSYTLPFFVSLSEAVLNHSGGTAETPEDD

SEQ ID NO: 3579 - protein, 341 aa, Neisseria meningitidis
LVSAIDSLKKNVNYNYVNSSNTHTIQIVHVEKPEGPIKIKRGDTETSISKQAIWRLADALSTGEPVNVDRVFGASYNFRSALEALLAHTPEIYWCKLQRIQPGLNKSEVVEGHKHIIWLPDRPHEKGVMKEYETDVVISEIPSNNVVYDALSLPSTHSEIDIDVKRRHVQIQIALSAIGFQLGFRTWIARNDQGISYGDKKIADLDGIVQKIESEKLISSFDGAVQAAMNIDCIWFRNGKLMPAVMEVEHSTGVRSGLARMKQLKDLLPPYANTRWVIVAPDEDRDKVFKEANVPMFKNLDTQYFPYSAVEELYSLCIRRKLTNKAVNEEFLDCFMEKCVM

SEQ ID NO: 3580 - protein, 113 aa, Neisseria meningitidis
MVERKLTGAHYGLRDWAMQRATAVIMLIYTVALLVVLFSLPKEYSAWQAFFSQTWVKVFTQVSFIAVFLHAWVGIRDLWMDYIKPFGVRLFLQVATIVWLVGCLVYSIKVIWG

SEQ ID NO: 3581 - protein, 428 aa, Neisseria meningitidis
MSAIVDIFAREILDSRGNPTVECDVLLESGVMGRAAVPSGASTGQKEALELRDGDKSRYSGKGVLKAVEHVNNQIAQALIGIDASEQSYIDQIMIELDGTENKGNLGANATLAVSMAVARAAAEDAGLPLYRYLGGAGPMSLPVPMMNVINGGEHANNSLNIQEFMIMPVGAKSFREALRCGAEIFHALKKLCDSKGFPTTVGDEGGFAPNLNSHKEALQLMVEATEAAGYKAGEDVLFALDCASSEFYKDGKYHLEAEGRSYTNAEFAEYLESLVNEFPIISIEDGMDENDWEGWKLLTEKLGGKVQLVGDDLFVTNPKILAEGIEKGVANALLVKVNQIGTLSETLKAVDLAKRNRYASVMSHRSGETEDSTIADLAVATNCMQIKTGSLSRSDRMAKYNQLLRIEEELAEAADYPGKAAFYQLGK

SEQ ID NO: 3582 - protein, 186 aa, Neisseria meningitidis
MNRLLLLSAAVLLTACGSGETDKIGRASTVFNMLGKNDRIEVEGFDDPDVQGVACYISYAKKGGLKEMINLEEDASDASVSCVQTASSISFDETAVRKPKEVFKHGASFAFKSRQIVRYYDPKRKTFAYLVYSDKIIQGSPKNSLSAVSCFGGGIPQTDGVQADTSGNLLAGACMISNPIENPDKR

SEQ ID NO: 3583 - protein, 321 aa, Neisseria meningitidis; identical to SEQ ID NO: 2168

SEQ ID NO: 3584 - protein, 298 aa, Neisseria meningitidis
MESENIISAADKARILAEALPYIRRFSGSVAVIKYGGNAMTEPALKEGFARDVVLLKLVGIHPVIVHGGGPQINAMLEKVGKKGEFVQGMRVTDKEAMDIVEMVLGGHVNKEIVSMINTYGGHAVGVSGRDDHFIKAKKLLIDTPEQNGVDIGQVGTVESIDTGLVKGLIERGYIPVVAPVGVGEKGEAFNINADLVAGKLAEELNAEKLLMMTNIAGVMDKMGNLLTKLTPKRIDELIADGTLYGGMLPKIASAVEAAVNGVKATHIIDGRLPNALLLEIFTDAGIGSMILGGGEDA

SEQ ID NO: 3585 - protein, 258 aa, Neisseria meningitidis
MNFIRSVGAKTLGLIQSLGSITLFLLNILAKSGTAFVRPRLSVRQVYFAGVLSVLIVAVSGLFVGMVLGLQGYTQLSKFKSADILGYMVAASLLRELGPVLAAILFASSAGGAMTSEIGLMKTTEQLEAMNVMAVNPVARVVAPRFWAGVFSMPLLASIFNVAGIFGAYLVGVSWLSLDSGIFWSQMQNNITIHYDVINGLIKSAAFGVAVTLIAVHQGFHCVPTSEGILRASTRTVVSSALTILAVDFILTAWMFTD

SEQ ID NO: 3586 - protein, 95 aa, Neisseria meningitidis
MTGFNDAAGVASASDIKGKYVEKVEVKNGVVTAEMKSSGVNKEIQGKKLSLWAKRQDGSVKWFCGQPVARNDKADTDKIDTKHLPSTCRDAASAD

SEQ ID NO: 3587 - protein, 116 aa, Neisseria meningitidis; identical to SEQ ID NO: 840

SEQ ID NO: 3588 - protein, 394 aa, Neisseria meningitidis
MGKHILLGVTGSIAAYKSCELVRLLKKQGHSVTVVMSRSATEFVSPLTFQALSGNPVLTDTHGGNGSNGMEHINLTRNADVFLIAPASMNTVAKICNGVADNLLTSLAAARKCPLAIAPAMNVEMWLNPANQRNIAQLVSDGITVYMPGLGEQACGENGMGRMPEPAELLDLLPDLWTPKILRGKKILITAGATFEAIDPVRGITNTSSGKMGVALARACRAAGAEVSLIHGQLQTELPFGISDTVQAVSAEDMHRAVHRLIEKQDAFISVAAVSDYKVKNRSTQKFKKDKNAKPLSIELDENPDILASIASLPNPPFCIGFAAETENVMAYAREKRIKKKIPVIVANDVSIAMGKPTNRITIIGDDGELSFPETSKDEAAMQIVERLAGYLNK

SEQ ID NO: 3589 - protein, 118 aa, Neisseria meningitidis; identical to SEQ ID NO: 2954

SEQ ID NO: 3590 - protein, 208 aa, Neisseria meningitidis
MRKIRTKICGITTPEDASAAVAAGADAVGLVFFQGSSRAVDIARAKKITAALPPFVSVVALFVNESAQNIRRILAEVPIHIIQFHGDEDDTFCRQFDRPYIKAIRVQTASDIRNAADRFPDAQALLFDAYHPSEYGGTGHRFDWTLLAEYSGKPWVLAGGLTPENVGEAVRITGAEAVDVSGGVEASKGKKDPAKVAAFIATANRLSR

SEQ ID NO: 3591 - protein, 133 aa, Neisseria meningitidis
  misc_feature 127, 128: 'Xaa' is any amino acid
MKTAILIDGAFFIKRVRSLGLSQNPHDAKRIADLAFRYSMLHLKDKINGTDQMDDLYRIFFYDCVPFEKKMHNPVSHRAIDFSKTPEAIFRCNLHTELKKKRKLALRLGKLSDNTAWILKPQVMKNXXTHLIN

SEQ ID NO: 3592 - protein, 678 aa, Neisseria meningitidis
MTDNALLHLGEEPRFDQIKTEDIKPALQTAIAEAREQIAAIKAQTHTGWANTVEPLTGITERVGRIWGVVSHLNSVADTPELRAVYNELMPEITVFFTEIGQDIELYNRFKTIKNSPEFDTLSPAQKTKLNHDLRDFVLSGAELPPEQQAELAKLQTEGAQLSAKFSQNVLDATDAFGIYFDDAAPLAGIPEDALAMFAAAAQSEGKTGYKIGLQIPHYLAVIQYADNRELREQIYRAYVTRASELSDGGKFDNTANIDRTLANALQTAKLLGFKNYAELSLATKMADTPEQVLNFLHDLARRAKPYAEKDLAEVKAFARESLNLADLQPWDLGYASEKLREAKYAFSETEVKKYFPVGKVLNGLFAQIKKLYGIGFTEKTVPVWHKDVRYFELQQNGETIGGVYMDLYAREGKRGGAWMNDYKGRRRFSDGTLQLPTAYLVCNFAPPVGGREARLSHDEILILFHETGHGLHHLLTQVDELGVSGINGVEWDAVELPSQFMENFVWEYNVLAQMSAHEETGVPLPKELFDKMLAAKNFQRGMFLVRQMEFALFDMMIYSEDDEGRLKNWQQVLDSVRKKVAVIQPPEYNRFTLSFGHIFAGGYSAGYYSYAWAEVLSADAYAAFEESDDVAATGKRFWQEILAVGGSRSAAESFKAFRGREPSIDALLRHSGFDNAA

SEQ ID NO: 3593 - protein, 221 aa, Neisseria meningitidis
MTALGEDVTMREAFRAADNVLRDAVAGISEVVTCPSEIINLDFADVKTVMSNRGIAMMGSGYAQGIDRARMATDQAISSPLLDDVTLDGARGVLVNITTAPGCLKMSELSEVMKIVNQSAHPDLECKFGAAEDETMSEDAIRITIIATGLKEKGAVDFVPAREVEAVAPSKQEQSHNVEGMIRTNRGIRTMNLTAADFDNQSVLDDFEIPAILRRQHNSDK

SEQ ID NO: 3594 - protein, 298 aa, Neisseria meningitidis; identical to SEQ ID NO: 2777

SEQ ID NO: 3595 - protein, 152 aa, Neisseria meningitidis
MSQVFKDFDLSSVWESDSWADENYKEAPFTPEILAAVESELGYKLPQSFIELMAVQNGGIFVKNCFPTTQRNSWAKDHVQICEVSGIGFEKEGSLCGAMGQKLWLEEWEYPPIGVYFANDPSGGHAMFALDYRECGRDGEPKVVFVEQESDF

SEQ ID NO: 3596 - protein, 308 aa, Neisseria meningitidis
MKHPKLTLIAALLTTAATAAPLPVVTSFSILGDVAKQIGGERVSIQSLVGANQDTHAYHMTSGDIKKIRSAKLVLLNGLGLEAADVQRAVKQSKVSYAEATKGIQPLKAEEEGGHHHDHDHDHDHDHEGHHHDHGEYDPHVWNDPVLMSTYAQNVAEALIKADPEGKVYYQQRLGNYQMQLKKLHSDAQAAFNAVPAAKRKVLTGHDAFSYMGKRYHIEFIAPQGVSSEAEPSAKQVAAIIRQIKREGIKAVFTENIKDTRMVDRIAKETGVNVSGKLYSDALGNAPADTYIGMYRHNIKALTNAMKQ

SEQ ID NO: 3597 - protein, 328 aa, Neisseria meningitidis
VSIPTATPLPAGEVTLSDDSVNIVNINTANTETHPPRRTRRSLYASPQNTSAGISIQQREVEKDYFGYKSKETSFIFQTPGGAQYALSSYSDPIVPSYSSPDFKIPDRHAGQRLADGSRIFICCSDSGATTYAEITKQDYMKFGAWIGPNGEIDLFAGGFPVGKTPKPAYSWGDDTPETAGKGKITYQVWGIRVKDGQFVTSSYTPPKGSSFTGYTNTPVLSFITANFNSNKLAGKIIGNSDYGPDVEIKEAQIDGLSFSGDATSGGKTGKLEGKFFGKFDSSYDRDTSIGGKITFDGDRSLDTVFGGVSYKKELENNTDMSTTHLTK

SEQ ID NO: 3598 - protein, 265 aa, Neisseria meningitidis; identical to SEQ ID NO: 2138

SEQ ID NO: 3599 - protein, 307 aa, Neisseria meningitidis
MKKRNNPLPLLNGVKPSYLVLPHEKQFYGLPLLHFLCIRFPFVGADDWRRRLNSGFVVGSDGAALDEHSLFEPGKVVFYYRETSRESEPRIPFEEKILHIDEHLIVVDKPHFLPVIPSGRFLRETLLTRLRLRPELQHLNVEDITPLHRLDKDTAGVMLLSHNPATRGAYQTMFQNKTVWKTYEALAPTRTDLPYPIDVVSRLVRGEKFFTTQEAEGEPNAHTTVELIENRGEFSLYRLTPHTGKKHQLRVHMMGLGMPLLNDALYPVPSEAGSEDYRKPLKLLAKKIAFADPLSGRERVFCSRFCL

SEQ ID NO: 3600 - protein, 114 aa, Neisseria meningitidis; identical to SEQ ID NO: 1818

SEQ ID NO: 3601 - protein, 256 aa, Neisseria meningitidis
MLKQAVTGMTKQERITTQAYNEMTKSVAGSNSIVLNDVQGDTTINNHHTHTHNHSDADGKALSMRLTPRPLLSDRQAAAFARTGKLTGSFDLFASVVAPSQYTFAVAMPDTSMSPVIEKGDLVVVEPRMRPADEDIVLIELSDKRLVVAHLVIDIAGRMLIYQTGRPSEAFDLPEGSTILGVVLESKNGLCPPHRQEGVLIRITTPDVWTVGTISASKTSCTRPTAARKSAVCFLRFWQATRGIPKTRSWRNPNNA

SEQ ID NO: 3602 - protein, 277 aa, Neisseria meningitidis
MAIVKMKPTSAGRRGMVRVVTEGLHKGAPYAPLLEKKNSTAGRNNNGHITTRHKGGGHKHHYRVVDFKRNKDGIPAKVERIEYDPNRTAFIALLCYADGERRYIIAPRGIQAGAVLVSGAEAAIKVGNTLPIRNIPVGTTIHCIEMKPGKGAQIARSAGASAVLLAKEGAYAQVRLRSGEVRKINVNCRATIGEVGNEEQSLKKIGKAGANRWRGIRPTVRGVVMNPVDHPHGGGEGRTGEAREPVSPWGTPAKGYRTRNNKRTDNMIVRRRYSNKG

SEQ ID NO: 3603 - protein, 95 aa, Neisseria meningitidis; identical to SEQ ID NO: 2063

SEQ ID NO: 3604 - protein, 500 aa, Neisseria meningitidis
MAKVLIVPVSAGLDASAAAQAFAKALDAQIFQAVDATAETLLAQGKSDDWFDALVGKVAALDAANLVIEGIAPDADKIYLAGKNVELALSLDAAAVFAVRSDNADADELANRLNLAKQFFAAAPGVLEGFVVDGAAASVAEAAAEKTGLTFFGSSDALKDVSVLAGREAKRLSPAQFRYNLIDFARQADKRIVLPEGAEPRTVQAAAICHEKGIARCVLLAKREEVEAVAKERGISLPDSLEIIDPASLVEQYVEPMCELRKSKGLTPEDARKQLQDTVVLGTMMMSQNDVDGLVSGAVHTTANTILPALQLIKTAPGASLVSSVFFMLLPNQVLVFGDCAVNPNPTAQQLADIAIQSADSAKAFGIDPKVAMISYSTVNSGSGPDVDTVIEATKLAREKRPDLAIDGPLQYDAATVPGVGKSKAPGSPVAGQATVLVFPDLNTGNCTYKAVQRSANVLSVGPLLQGLRKPVNDLSRGALVEDIVFTIALTAVQAKQMEG

SEQ ID NO: 3605 - protein, 192 aa, Neisseria meningitidis
MKTFALILADGQASRMGGEDKGLALLGGKALIDHVIDRVRPQVSHIAISTNRNLEEYARRSPHIFPDARQWQHFGPLSALCTAANDLQLATADWLLVVPCDMPYLPGDLVARFETVSKRTPLCNAFYVETPVTMHYNIMYIRPQILQSAIPYLFSGMKTLRSWLQQQRARSVRFEFDGHFADLNTQTDLQEG

SEQ ID NO: 3606 - protein, 144 aa, Neisseria meningitidis
VPLPAPCRFAKPAASFLSMALLSCQLSHAATAYIPPNDFQPNCDIRRLGLTQSQHNELRKIRTAFKMAGDRARLKVMHSEHSRRRSVVEIISSDVFNRNEARDYVESRYLSGMDFAVDELEIQHRFFHILTPQQQQMWLSSCLK

SEQ ID NO: 3607 - protein, 525 aa, Neisseria meningitidis
MRANPKTQAMPSETISLMKTRSLISLLCLLLCSCSSWLPPLEERTESRHFNTSKPVRLDNILQIRHTPHTNGLSDIYLLNDPHEAFAARAALIESAEHSLDLQYYIWRNDISGRLLFNLVYLAAERGVRVRLLLDDNNTRGLDDLLLALDSHPNIEVRLFNPFVLRKWRALGYLTDFPRLNRRMHNKSFTADNRATILGGRNIGDEYFKVGEDTVFADLDILATGSVVGEVSHDFDRYWASHSAHNATRIIRSGNIGKGLQALGYNDETSRHALLRYRETVEQSPLYQKIQAGRIDWQSVQTRLISDDPAKGLDRDRRKPPIAGRLQDALKQPEKSVYLVSPYFVPTKSGTDALAKLVQDGIDVTVLTNSLQATDVAAVHSGYVKYRKPLLKAGIKLYELQPNHAVPATKDKGLTGSSVTSLHAKTFIVDGKRIFIGSFNLDPRSARLNTEMGVVIESPKIAEQMERTLADTTPEYAYRVTLDRHNRLQWHDPATRKTYPNEPEAKLWKRIAAKILSLLPIESLL

SEQ ID NO: 3608 - protein, 495 aa, Neisseria meningitidis; identical to SEQ ID NO: 2837

SEQ ID NO: 3609 - protein, 168 aa, Neisseria meningitidis; identical to SEQ ID NO: 2360

SEQ ID NO: 3610 - protein, 299 aa, Neisseria meningitidis
MKTNSEELTVFVQVVESGSFSRAAEQLAMANSAVSRIVKRLEEKLGVNLLNRTTRQLSLTEEGAQYFRRAQRILQEMAAAETEMLAVHEIPQGVLRVDSAMPMVLHLLAPLATKFNERYPHIRLSLVSSEGYINLIERKVDIALRAGELDDSGLRARHLFDSRFRVIASPEYLAKHGTPQSTEELAGHQCLGFTEPGSLNTWAVLDAQGNPYKISPHFTASSGEILRSLCLSGCGIACLSDFLVDNDIAEGKLIPLLAEQTSDKTHPFNAVYYSDKAVNLRLRVFLDFLVEELGNNLCG

SEQ ID NO: 3611 - protein, 384 aa, Neisseria meningitidis
MVDKKSPLIAVSVGEASGDLLGAHLIRAIRKRCPQARFTGIGGELMKAEGFESLYDQERLAVRGFVEVVRRLPEILRIRRGLVRDLLSLKPDVFVGIDAPDFNLGVAEKLKRAGIPTVHYVSPSVWAWRRERVGKIVHQVNRVLCLFPMEPQLYLDAGGRAEFVGHSMAQLMPLEDDRETARQTLGVDAGIPVFALLPGSRVSEIDYMAPVFFQTALLLLKRYPAARFLLPAATEATKRRLAEILQRSEFAGLPLTVTDRQSETVCRAADAVLVTSGTATLEVALCKRPMVISYKISPLTYAYVKRKIKVPHVGLPNILLGKEAVPELLQHDAVPEKLAAALADWYEHPDKVAALQQDFRALHLLLKKDTADLAARAVLEEAGC

SEQ ID NO: 3612 - protein, 181 aa, Neisseria meningitidis
MTYEKLYELRQTLRPTTKDGLYTDNEKSREILTVRWSGNTENPKNFSAVAIGINPSKANDERSDKTLTQLARFLDMYGFTNFKMLNIFSSYSTQQTGIRANTQTDFSKFKGCLEDADMIILAWGTDRGAYKDEKNRILEFLKAEKFMEKVFCISETGNSSDTRHPSRISYSYQLVQFEESA

SEQ ID NO: 3613 - protein, 129 aa, Neisseria meningitidis
MNVKIKYNLLEYCEYLGGIFGVYKNYLNMDIKDPNLKIRFFDFLEELLSDGVIELCDYRENPPKILTGSPKTQVDELRRIWPDMEEMLLYFPDNPWFYVEHFWWGATCPIELTQLPKIEIYEEQMKQGK

SEQ ID NO: 3614 - protein, 119 aa, Neisseria meningitidis
MTDRPSLLWIKPGQAEIMEYCEPEEASDPYATYRRASLMAMLPLFVVILVLLNIVFPLLAHPLAWLVPAGFMVLVGGFPLSLPLVALLVLTCCILAHCPPLSRLLCCPCPNHPMSKNSA

SEQ ID NO: 3615 - protein, 199 aa, Neisseria meningitidis
MSELDNILAHNRQFVESGEYEKYFTDKYPERGLAVLSCMDARIIGLLPDALGLKNGDAKLIKNAGALVTHPWGSVMRSLLVAVFELKVREIMVIAHHDCGMQGLNAEEFLGRVRESRIPEDRIETLRYAGVDLDGWLTGFDNVEDSVRHTVDLIRNHPLMPRHIAVHGLVIHPVTGKLTLVVDGSVSDGMDLSEGMETS

SEQ ID NO: 3616 - protein, 395 aa, Neisseria meningitidis
MNTLLKQLKPYPFARLHEAMQGISAPEGMEAVPLHIGEPKHPTPKVITDALTASLHELEKYPLTAGLPELRQACANWLKRRYDGLTVDADNEILPVLGSREALFSFVQTVLNPVSDGIKPAIVSPNPFYQIYEGATLLGGGEIHFANCPAPSFNPDWRSISEEVWKRTKLVFVCSPNNPSGSVLDLDGWKEVFDLQDKYGFIIASDECYSEIYFDGNKPLGCLQAAAQLGRSRQKLLMFTSLSKRSNVPGLRSGFVAGDAELLKNFLLYRTYHGSAMSIPVQRASIAAWDDEQHVIDNRRLYQEKFERVIPILQQVFDVKLPDASFYIWLKVPDGDDLAFARNLWQKAAIQVLPGRFLARDTEQGNPGEGYVRIALVADVATCVKAAEDIVSLYR

SEQ ID NO: 3617 - protein, 315 aa, Neisseria meningitidis
MEFFIILLAAVAVFGFKSFVVIPQQEVHVVERLGRFHRALTAGLNILIPVIDRVAYRHSLKEIPLDVPSQVCITRDNTQLTVDGIIYFQVTDPKLASYGSSNYIMAITQLAQTTLRSVIGRMELDKTFEERDEINSTVVAALDEAAGAWGVKVLRYEIKDLVPPQEILRSMQAQITAEREKRARIAESEGRKIEQINLASGQREAEIQQSEGEAQAAVNASNAEKIARINRAKGEAESLRLVAEANAEAIRQIAAALQTQGGADAVNLKIAEQYVAAFNNLAKESNTLIMPANVADIGSLISAGMKIIDSSKTAK

SEQ ID NO: 3618 - protein, 222 aa, Neisseria meningitidis
VNQLIFDFAAHDYPSFDKFLGTENAELVYVLRHKHGQFIYVWGEEGAGKSHLLQAWVAQALEAGKNAAYIDAASMPLTDAAFEAEYLAVDQVEKLGNEEQALLFSIFNRFRNSGKGFLLLGSEYTPQQLVIREDLRTRMAYCLVYEVKPLTDQEKIDALASMAAARQVTVDSEIFEYLLKHWRRDMDSLMMMLDTLDNYAVTMGKRITLPLLRQLLKQQETQ

SEQ ID NO: 3619 - protein, 472 aa, Neisseria meningitidis
MSIKNAVKLIEESEARFVDLRFTDTKGKQHHFTVPARIVLEDPEEWFENGQAFDGSSIGGWKGIQASDMQLRPDASTAFVDPFYDDATVVLTCDVIDPADGQGYDRDPRSIARRAEAYLKSSGIGDTAYFGPEPEFFVFDGIEFETDMHKTRYEITSESGAWASGLHMDGQNTGHRPAVKGGYAPVAPIDAGQDLRSAMVNILEELGIEVEVHHSEVGTGSQMEIGTRFATLVKRADQTQDMKYVIQNVAHNFGKTATFMPKPIMGDNGSGMHVHQSIWKDGQNLFAGDGYAGLSDTALYYIGGIIKHAKALNAITNPSTNSYKRLVPHFEAPTKLAYSAKNRSASIRIPSVNSSKARRIEARFPDPTANPYLAFAALLMAGLDGIQNKIHPGDPADKNLYDLPPEEDALVPTVCASLEEALAALKADHEFLLRGGVFSKDWIDSYIAFKEEDVRRIRMAPHPLEFEMYYSL

SEQ ID NO: 3620 - protein, 365 aa, Neisseria meningitidis; identical to SEQ ID NO: 11

SEQ ID NO: 3621 - protein, 240 aa, Neisseria meningitidis
VFPDKYKLSLKENIFLAKKVLVAQIHNLSRFENCQTTLLQTEQIIHGKNVASVSLEDIQTILNLKRAYQYVISHISNGEPVNISLLKKINNIVAKDDSLAPGDFRTGSVGVTLLDGSRHAPNPVKEIEVARVLQNIGLQSGSTTEAAVRFMLYCMRQQVFWDGNKRTATLFANGLMMAGGCGILEISEMQMPQFNEKLSAFYRSGDDTDISKFVYQNCISGIDYFGTHEDIDFPDPPNMG

SEQ ID NO: 3622 - protein, 157 aa, Neisseria meningitidis
  misc_feature 3, 4: 'Xaa' is any amino acid
VCXXIAATAVALVAGVVQAAFLYWKYKKLDTMQWVGLVLIVIFGGATIVLGDSRFIMWKPSVLFWLGALFLWGSHLAGKNGLKASIGREIQLPDAVWAKLTYMWVGFLIFMGIANWFVFTRFESQWVNYKMFGSTALMLVFFIIQGIYLSTCLKKED

SEQ ID NO: 3623 - protein, 307 aa, Neisseria meningitidis; identical to SEQ ID NO: 3458

SEQ ID NO: 3624 - protein, 547 aa, Neisseria meningitidis
MDEIQIPKKVELQTKLENEKIVLSKGSTTIIVGANGTGKTRLAVYIEEQLKEKAHRISAHRALKLNPNVNKIPEKSAKTYLSYGQNWDGIDVSNRKNYRWDNNSYTHLLNDFDWLLQYLFAQQNNIAVANNQKLNRNEKVTNSKTKLDILQEAWETLLPHRKLHITADDIQVSAVDNEELYSASNMSDGERALFYILGQVLSVDDGSVLIFDEPELHIHKSIISNLWDKIEELRPDCSFLIITHDIEFAATRVAKKYVIRNYYPTPAWDISEVPESNFDEETITMILGSRKPILFVEGNNNSLDIATYRYCYPDWTIIPKGACKDVIQSVSSLKKLSNEMPLLNLKCSGIVDLDSRDEREIEQLNNLGIYILPVSEIENLFSLTDVAKEILKLNQYSDEELLNKLNGFKSELIKYIDNELKDDKLDEFVVKQVRRKIDNYLKNIDLSSKITSTDMKKSLLNEISTLTEQKIETWISEIKNEIQRCIEQQDLDKLLTIYDNKGLLAKSACVLKGMRNKHEFESWIMRTLKGRNKDFIDAIRQKLPILD

SEQ ID NO: 3625 - protein, 867 aa, Neisseria meningitidis
MSKTVRYLKDYQTPAYRILETDLHFDIAEPQTVVKSRLTVEPQRVGEPLVLDGSTKLLSVKINGVAADYVLEGETLTIADVPSERFTVEVETEILPAENKSLMGLYASGGNLFTQCEPEGFRKITFYIDRPDVMSKFTTTIVADKKRYPVLLSNGNKIDGGECSDGRHWVKWEDPFAKPSYLFALVAGDLAVTEDCFTTMGGRNVKIEFYTAEADKPKVGFAVESLKNAMKWDETRFGLEYDLDIFMVVAVGDFNIGAMENKGLNIFNTKFVLADSRTATDTDFEGIESVVGHEYFHNWTGNRVTCRDWFQLSLKEGLTVFRDQEFSGDRASRAVRRIENIRLLRQHQFPEDAGPTAHPVRPASYEEMNNFYTMTVYEKGAEVVRMYHTLLGEEGFQKGMKLYFQRHDGQAVTCDDFRAAMADANGINLDQFALWYSQAGTPVLEAEGRLKNNSFELTIKQTVPPTPDMADKQPMMIPVKVGLLNRNGEAVAFDYQGKRATEAVLLLTEAEQTFQFESVTEAVVPSLLRGFSAPVHLNYPYSNDDLLLLLAHDSDAFTRWEAAQTLYRRAVAANLAALSDGIELPKHEKLLAAVEKVISDDLLDNAFKALLLGVPSEAELWDGTENIDPLRYHQAHEALLDTIAVRFLPKWHELNRQAAKQENQSYEYSPEAAGWRTLRNVCRAFVLCADPAHIETVAEKYGEMAQNMTHEWGILSAVNGNESDTRNRLLAQFADKFSDDALVMDKYFALVGSSRRSDTLQQVQTALQHPKFSLENPNKARSLIGSFSRNVPHFHAEDGSGYRFIADKVIEIDRFNPQVAARLVQAFNLCNKLEPHRKNLVKQALQRIRAQEGLSKDVGEIVGKILD

SEQ ID NO: 3626 - protein, 502 aa, Neisseria meningitidis
MQTDCDVLIAGNGLAALTLALSLPESFRIVILCKNRLDDTASRHAQGGIAAAWSGEDDIEKHVADTLEAGAGLCNEAAVRTILSQGKPAIEWLLAQGVAFDQNNNGLHLTREGGHTCRRIAHVADYTGEAVMQSLIVQIRRRPNIRVYERQMALDVQTESGAACGLTVLDCRTQETYNIRARHTVLAGGGLGQIYASTTTPPECTGDAIAMAIRAGCAVENLEFIQFHPTGLARPSENGRTFLISEAVRGEGGILTNQSGERFMPHYDRRAELAPRDIVARAIAAEISKQTQDFVSLDISRQPAEFVRRHFPSIHRHCLSQCGLDITRQAIPVRPVQHYTCGGIQTDPGGRTSLPQLYALGETACTGLHGANRLASNSLLECVVTAKLAAQTIADGQAFQTAPPQRPSENPFSEANIFSDGIQNTFSRPALQAFNQRHLGILRNDTGLRRAIAQLRLWKQNQTEPHTVSEYENRNLLECSLAVAQAAYRRRQNIGAHFNSDC

SEQ ID NO: 3627 - protein, 612 aa, Neisseria meningitidis
MCGIVGAIRAHHNVVDFLTDGLKRLEYRGYDSSGIAVNTDGNIKRVRRVGRVQLMEDAAREKHLNGSLGIGHTRWATHGGVTEPNAHPHISGGMIAVVHNGIIENFESERKRLEDLGYRFESQTDTEVIAHSINHEYAQNGGRLFEAVQEAVKRFHGAYAIAVIAQDKPDELVVARMGCPLLVALGDDETFIASDVSAVIAFTRRVAYLEDGDIALLASDGIKRLTDKNGLPAERKVKVSELSLASLELGPYSHFMQKEIHEQPRAIADTAEVFLDGGFIPENFGKNAKSVFESIRSVKILACGTSYYAALTAKYWLESIAKIPADVEIASEYRYRSVIADPDQLVITISQSGETLDTMEALKYAKSLGHRHSLSICNVMESALPRESSLVLYTRAGAEIGVASTKAFTTQLVALFGLAVTLAKVRGLVSEEDEARYTEELRQLPGSVQHALNLEPQIAAWAQQFAKKTSALFLGRGIHYPIALEGALKLKEITYIHAEAYPAGELKHGPLALVDENMPVVVIAPNDSLLDKVKANMQEVGARGGELFVFADLDSNFNATEGVHVIRAPRHVGKLSPVVHTIPVQLLSYHVALARGTDVDKPRNLAKSVTVE

SEQ ID NO: 3628 - protein, 106 aa, Neisseria meningitidis
MDDVRGIVQGAVNPFLMGFQGLGVGAITDSAVNPVTYAAARKTLQGIHNLGNLSPEAQLAAATALQDSAFAVKDGINSAKQWADAHPNITATAQTALAIAEAATTV

SEQ ID NO: 3629 - protein, 117 aa, Neisseria meningitidis
MPEIKIFHNPRCSKSRAALSLLEERGIAAEVVKYLDTPPDLSELKDIFNKLGLASARGMMRVKDDLYKELGLDNPNLDKDALLRAIADHPALLERPIVLAHGKAAVGRPLENIEAVL

SEQ ID NO: 3630 - protein, 136 aa, Neisseria meningitidis; identical to SEQ ID NO: 1274

SEQ ID NO: 3631 - protein, 317 aa, Neisseria meningitidis
MNQKKVVVLDADTLPGRTFHFDFPHELAVYGTTDAAETAGRVRDAHIIITNKVMISADIIAHAPQLELIAVSATGVNNVDIGAAKAAGVAVCNVRAYGNESVAEHAFMLMIALMRNLPAYQRDVAAGLWEKSPFFCHYGAPIRDLNGKTLAVFGRGNIGRTLAGYAQAFGMGVVFAEHKHAPDVREGYVSFEDAVQTADVLSLHCPLNAQTENMIGENELRQMKPGAVLINCGRGGLVDENALLAALKYGQIGGAGVDVLTEEPPRGGNPLLNARLPNLIVTPHTAWASREAVDRLFDILLANIHAFVKGEAQNRVV

SEQ ID NO: 3632 - protein, 176 aa, Neisseria meningitidis
MNAIRTFQNRTPEIHESCMIDEACVVIGEVSLAEDVSVWPCAVLRGDVNSITVGARSNIQDGSVLHVSHKTAAKPEGSPLVIGEDVTVGHKVMLHGCRIGNRVLVGMGTTVLDDAVIEDEVMIGAGSLVPPRKRLEGGYLYVGSPVRQVRVLTDEEKAFLKYSAAHYVKLSKQYGM

SEQ ID NO: 3633 - protein, 92 aa, Neisseria meningitidis; identical to SEQ ID NO: 2722

SEQ ID NO: 3634 - protein, 310 aa, Neisseria meningitidis; identical to SEQ ID NO: 2407

SEQ ID NO: 3635 - protein, 141 aa, Neisseria meningitidis
MAIERTISIIKPDAVGKNVIGKIYSRFEENGLKIVAAKMKQLTLKEAQEFYAVHKDRPFYAGLVEFMTGGPVMIQVLEGENAVLKNRELMGATNPSEAAEGTIRADFATSVSINAVHGSDSVENAALEIAYFFSQTEICPR

SEQ ID NO: 3636 - protein, 109 aa, Neisseria meningitidis
MSRCCLKRLQTASAVSAFSGGVLEVVRLCCRRLSVLFNPSVMLFVPDCPVGGAAGFFQYEMLCPFFWQGRLQTGSNLAYDVFMSAGRLNGGRNPPHSRRFLALLCSVAL

SEQ ID NO: 3637 - protein, 581 aa, Neisseria meningitidis
MERQTDEFAQAAARAAIWFLARYAGSGSEVLANCTERLFQALQNGHSFIRLSGGEADALSALAPVVGTSAAPLILEGRRLFLGRMWQLEYDLAAEIKRLAAADTSAPDAAGARQNLAKWFQGTGSEGQRDAAALALLQPFMVITGGPGTGKTTTVAKLLALICGEDENLPNIALAAPTGKAAAHMARALHRAINGFDAPEAVRRHLLKLEGQTVHRLLKLRPPKMQAAFNPVYPLPFDVLVIDEASMLDTALMLQLLKAVKTGARVILLGDENQLPSVGIGAVLSVLSQKTVLDGETHQRLAGFLPEHGFSVSANPPVLAQNTAHLSFSHRFGDNSGIGCLARAAVSGDEGAWALFDRFPDELEHSECSPNARVERLYRAHKAYWQAVKDGNIEAAYAGISDIVVLAAWRQDAEDFNEAYCRHVRRKMNIPEHLAYFAGEPIMIRQNDYALELFNGDIGLIMEDVGRQGSLAAYFADADGFKKVAVSCLPEFEPAFAMTVHKSQGSEYREVWLLPPSAAPSDEGDDALSGLSKELLYTAITRAREKFVFFGGEEAFRQAAATVKTRQTALGSMLERVFSQE

SEQ ID NO: 3638 - protein, 69 aa, Neisseria meningitidis
MYDVFKTRAAELSGAFCSLDFWLCHKFVPLCHALCHFLTRRDIDTLIEEGLVEERFEQGVSKFYAKEAV

SEQ ID NO: 3639 - protein, 137 aa, Neisseria meningitidis
  misc_feature 132, 133: 'Xaa' is any amino acid
MQTANKKTILVTGGAGFIGSAVVRHIIQNTQDSVVNLDKLTYAGNLESLTDIADNPRYAFEQVDICDRAELDRVFAQHRPDAVMHLAAESHVDRSIGSAGEFIQTNIVGTFNLLEAARAYWQQMPSEQHEAXXHTLN

SEQ ID NO: 3640 - protein, 262 aa, Neisseria meningitidis
MLTLYGETFPSRLLLGTAAYPTPEILKQSVRIAQPAMITVSLRRTGSGGEAHGQGFWSLLQETGVPVLPNTAGCQSVQEAVTTAQMAREVFETDWIKLELIGDDDTLQPDVFQLVEAAEILIKDGFKVLPYCTEDLIACRRLLDVGCQALMPWAAPIGTGLGAVHAYALNVLRERLPDTPLIIDAGLGLPSQAAQVMEWGFDGVLLNTAVSRSGDPVNMARAFALAVESGRLAFEAGPVEARDKAQASTPTVGQPFWHSAEY

SEQ ID NO: 3641 - protein, 500 aa, Neisseria meningitidis
MQVNIQIPYILPRCVRAEDTPYACYLKQLQVTKDVNWNQVQLAYDKWDYKQEGLTEAGAAIIALAVTVVTSGAGAGAALGLNGAAAAATDAAFASLASQASVSLINNKGDVGKTLKELGRSRTVKKLVVAAAIAGVSNKIGASSLATWSETPWVNNLNVNLANAGSAALINTAVNGGSLKDNLEANILAALVNTAHGEAASKIKQLDQHYIAHKIAHAIAGCAAAAANKGKCQDGAIGAVVGEIVGEALVKNTDFSGMTASEIEKAKANITAYAKLVAGATVGVTGGNVDVAANASETAVKNNALDIIWDIGNLVWDGGKWIYAKSIGDKQMAREAAIDFGVDAAAAAVPFVPAGATKISRGGAYVLKAGDEAVDTAKAIQEIQKQTGIKLTYDKVNKVWTTPAGLDYGLDAKHGNRIKHVLAHTIPNPNKPVHSVFNVSRKEVLPLVDEAWRMKGNPLPNDSSVYLVDMKKPIGTKGETKVRIVVQKGTNKIISAYPQK

SEQ ID NO: 3642 - protein, 1375 aa, Neisseria meningitidis
MTYPIPKPREKSRWPNLSQGSLPLALVRYLPHKRLKVVLTQDAEQALRLQTAWRFFRPHDTAVFLPDWETLPYERFSPHQDLVSERLSALWQIKSGAADVLFVPVATAMQKLPPVPFLAGRTFWLKTGQTLDIGRLKTDLVDAGYNHVSHVVAAGEFAVRGGIVDLFPMGSEMPYRIDLFDDEIDSIKTFDTDTQRTISPVSEIRLLPAHEFPTDSEAQKIFRSRFREEVDGNPNDAAVYKAVSNGHFGAGVEYYLPLFFENELETLFDYIGEDALFVSLGDVHAEANRFWSDVKSRYAMAQGDETYPPLLPQHLYLSADVFAGRLKNYGQVLPDVSGKEHALPDLAVNRQSDEPLQALKDFQTAFEGRILLCAESLGRRETMLGFLQQNGLKAKSVSDWQGFLSAHEPLMITVAPLAYGFKLGGLQSPNQQQTTSASEGEGDAVTDQTEFSASATNPLPSPLPQEREQSAAAVSDSLKAAAVSTESSLPLGTSNLHGQIRQQPAPSPVGEGWGEGKAVAAQTEFSAAATNPLPNPLPQEREQSAAAVSDDLKTKSSLHPVANNLHGQIRQQPTPSPVGEGWGEGKAVAAQTEFSAAATNPLPSPLPQEREQSAAVVSDSLKAAAVSTESSLPPGKSNLHGQIQQQPAPSPVGEGWGEGKAVAAQSAIAVITESDLYQYVARSRVHNRRKKHAAVSDGLLRDLAEINIGDPVVHEEHGIGRYMGLITMDLGGETNEMMLLEYAGEAQLYVPVSQLHLISRYSGQAHENVALHKLGSGAWNKAKRKAAEKARDTAAELLNLYAQRAAQSGHKFEINELDYQAFADGFGYEETEDQAAAIAAVIKDLTQAKPMDRLVCGDVGFGKTEVALRAAFVAVMGGKQVAVLAPTTLLVEQHAQNFADRFADFPVKVASLSRFNNSKATKAALEGLADGTVDIVIGTHKLVQDNIRFKSLGLVIIDEEHRFGVRQKEQLKRLRANVDILTMTATPIPRTLSMALEGLRDFSLITTAPSRRLAVKTFVKPFSEGSVREAVLRELKRGGQVFFLHNEVDTIENMRERLETLLPEARIGVAHGQLRERELEQVMRDFLQQRFNVLLCSTIIETGIDIPNANTIIINRADKFGLAQLHQLRGRVGRSHHQAYAYLLTPEYITKDAEKRLDAIAAADELGAGFTLAMQDLEIRGAGEILGEGQSGEMIQVGFTLYTEMLKQAVRDLKKGRQPDLDAPLGITTEIKLHSPALLPESYCPDIHERLVLYKRLAVCETVQQINAIHEELVDRFGLPEQPVKTLIESHHLRLMAKELGIDAIDAAGEAVTVTFGKNNNVDPTEIILLIQNDKKYRLAGADKLRFTAEMENIEVRINTVKNVLKTLQNRCLPK

SEQ ID NO: 3643 - protein, 201 aa, Neisseria meningitidis
MNTDFQNILKQLGKQAQKEAAEKQAAEKNKQKQEQDFDFSQAVGQLSPLKNRQQYYAPPDKTPIKVRPKDNRADEENYFYIGSTYNDPPASFSKNGQGKNDIQRLKNGYYPVVTDVDLHGYTQEEAQKVLNEFIAFTQKRGVCGEIIHGSGLGSKGYKPVLKNMTRNWLMQHPDVLAYAEPREGNDGCVRILLKRKLRQQD

SEQ ID NO: 3644 - protein, 636 aa, Neisseria meningitidis
MNILSVENASFAIGHVALLDKTSFQLDSGEKVGLIGRNGAGKSSFLKILAGVQKLDDGQIIIQNNLKIVYVPQESFFDKDATVFDTVAEGLGEIRDLLRRYHRVGHELENGSGEALLKELNELQLEIEAKDGWKLDAAVKQTLGELGLPENEKIGNLSGGQKKRVALAQAWVQKPDVLLLDEPTNHLDIDAIIWLENLLKAFEGSLVVITHDRRFLDNIATRIVELDRGILRSYPGSFSKYSEKKVQELAVEAEHNRLFDKFHAQEEAWIRKGIEARRTRNEGRVRRLEELRRQRAERRNVQGQVNFKLDSGEKSGKIIAELEHASFAYGDKVIMDKFSAILQRGDKIGLIGPNGIGKTTFLKLILGELNPTYGRIRIGSKQEVAYFDQFRSTLNENDTVFYTLGQGNDYVEVGGKKKHVMSYLEDFLFHPARAQSPVSSLSGGERNRLLLAKLFTRPANILILDEPTNDLDIDTQELLEDLLRDYQGTVFLVSHDRMFLDNVITQSIIFEGNGRLKEYIGGYQDYIDAKSREAKIQTESAPKTADAEPVKEKPKANRTVKLSYKEQRELDALPDEIAALEAEQAEINAQLSDPEIFKDYEKAGALQSRAEEIEMLLLEKLERWELLETKQNGNAV

SEQ ID NO: 3645 - protein, 513 aa, Neisseria meningitidis
MKIGIPRESLSGETRVACTPATVALLGKLGFETVVESGAGLAASLDDAAYQTAGATVADKAAVWACPLIYKVNAPSEGELPLLNEGQTIVSFLWPRQNEALVEALRAKKVNALAMDMVPRISRAQALDALSSMANISGYRAVIEAANAFGRFFTGQITAAGKVPPAQVLVIGAGVAGLAAIGTANSLGAVVRAFDTRLEVAEQIESMGGKFLKLDFPQESGGSGDGYAKVMSDEFIAAEMKLFAEQAKEVDIIITTAAIPGKPAPKLITKEMVESMKSGSVIVDLAAATGGNCELTRPGELSVTGNGVKIIGYTDMANRLAGQSSQLYATNLVNLTKLLSPNKDGEITLDFEDVIIRNMTVTHDGEITFPPPPIQVSAQPQQTPSEKAAPAAKPEPKPVSLWKKLAPAVIAAVLVLWVGAVAPAAFLNHFIVFVLACVIGYYVVWNVSHSLHTPLMSVTNAISGIIVVGALLQIGQGNGFVSLLSFVAILIAGINIFGGFAVTRRMLNMFKKG

SEQ ID NO: 3646 - protein, 346 aa, Neisseria meningitidis
MQPIRYRTDLTPYNTFGLRAQARAFIALEHADELCDIVRLPEFDRDTVLWLGGGSNILLMQDYAGLVVHMENKGIREIARSDGMVLIEAQAGEIWHDFVLHAVALGLNGLENLSLIPGTVGASPVQNIGAYGVEAKDVIHSVRCFDLDTETFVELANADCRFAYRESLFKQEGKGRYVIVSVVFALKTHFVPNLGYGDLAAKVAELSAGREATAKDVSDAVCAIRNSKLPNPNVLGNVGSFFKNPVIGAEKAAALLEQHPDMPHYPQPDGSVKLAAGWLIDQCRLKGFQIGGAAVHGRQALVLVNKNNASANDVRQLAQHIKFTVFARFQVELHAEPNWLPASFSL

SEQ ID NO: 3647 - protein, 221 aa, Neisseria meningitidis
MAVLSKEQVLSAFKNRKSCRHYDEARKISAEDFQFILELGRLSPSSVGSEPWQFVVVQNPEIRQAIKPFSWGMADALDTASHLVVFLAKKNARFDSPFMLESLKRRGVTEPDAMAKSLARYQAFQADDIKILDDSRALFDWCCRQTYIALGNMMTGAAMAGIDSCPVEGFNYAEMERVLSGQFGLFDAAEWGVSVAATFGYRVQEIATKARRPLEETVIWA

SEQ ID NO: 3648 - protein, 207 aa, Neisseria meningitidis; identical to SEQ ID NO: 1132

SEQ ID NO: 3649 - protein, 199 aa, Neisseria meningitidis
MAFITRLFKSIKQWLVLLPMLSVLPDAAAEGIDVSRAEARITDGGQLSISSRFQTELPDQLQQALRRGVPLNFTLSWQLSAPIIASYRFKLGQLIGDDDNIDYKLSFHPLTNRYRVTVGAFSTDYDTLDAALRATGAVANWKVLNKGALSGAEAGETKAEIRLTLSTSKLPKPFQINALTSQNWHLDSGWKPLNIIGNK

SEQ ID NO: 3650 - protein, 332 aa, Neisseria meningitidis
MSRPVPAVFGSVFHSQMPVLAYREGKWQPTEWQSSQDLSLAPGAHALHYGSECFEGLKAFRQADGKIVLFRPTANIARMRQSADILHLPRPETQAYLDALVELVKRAADEIPDAPAALYLRPTLIGTDPVIGKAGSPSETALLYILASPVGDYFKVGSPVKILVETEHIRCAPHMGRVKCGGNYASAMHWVLKAKAEYGANQVLFCPNGDVQETGASNFILINGDEIITKPLTDEFLHGVTRDSVLTVAKDLGYTVSERNFTVDELKAAVENGAEAILTGTAAVISPVTSFVIGGKEIEVKSQERGYAIRKAITDIQYGLAEDKYGWLVEVC

SEQ ID NO: 3651 - protein, 706 aa, Neisseria meningitidis
MFNKHVKTFQYGNQTVTLETGEIARQAAAAVKVSMGDTVVLVAVTTNKEVKEGQDFFPLTVDYLERTYAAGKIPGGFFKREGKQSEKEILTSRLIDRPIRPLFPEGFYHDIQIVAMVVSVDPEIDSDIPAMLGASAALVLSGVPFAGPIGAARVGYINGVYVLNPTKAELAKSQLDLVVAGTSKAVLMVESEAKILPEDVMLGAVVYGHDQMQVAINAINEFADEVNPELWDWKAPETNEELVAKVRGIAGETIKEAFKIRQKQARSAKLDEAWSAVKEALITEETDTLAANEIKGIFKHLEADVVRSQILDGQPRIDGRDTRTVRPLNIQTGVLPRTHGSALFTRGETQALAVATLGTSRDEQIIDALSGEYTDRFMLHYNFPPYSTGEVGRMGAPKRREIGHGRLAKRALLAVLPKPEDFSYTMRVVSEITESNGSSSMASVCGGCLSLLSAGVPLKAHVAGIAMGLILEGNKFAVLTDILGDEDHLGDMDFKVAGTTEGVTALQMDIKIQGITKEIMQIALAQAKEARLHILDQMKAAVAGPQELSAHAPRLFTMKINQDKIREVIGKGGETIRAITAETGTEINIAEDGTITIAATTQEAGDAAKKRIEQITAEVEVGKVYEGTVVKILDNNVGAIVSVMPGKDGLVHISQIAHERVRNVGDYLKVGQVVNVKALEVDDRGRVRLSIKALLDAPAREENAAE

SEQ ID NO: 3652 - protein, 930 aa, Neisseria meningitidis
MSNRPTLLLVDGSSYLYRAYHAMGQNLTAPDGAPTGALYGVLNMLRRLRSEYPHDYCAVVFDAKGKNFRHQMFEEYKATRPPMPDDLRPQAEALPDLVRLTGWPVLVIGQVEADDVIGTLAKQGAEHGLRVIVSTGDKDMAQLVDERVTLVNTMSSETLDIEGVKAKFGVRPDQIRDYLALMGDKVDNVPGVEKCGPKTAVKWLEAYGSLAGVMEHASEIKGKVGENLQAALPQLPLSYDLVTIKTDVDLHAELSDGIESLRRTTPKWAQLVVDFKRWGFRTWLKEAESNMNTGSTDDLFGSDSIGEQAALNAEMPFEKQAEKATAPEKLDYQAVTTEAQFAALLDKLSRADTIGIDTETTSLDAMNASLVGISIAFQAGEAVYIPVGHSLTAAPEQLDLQDVLGRLKPHLGNPALKKIGQNLKYDQHVFANYGIALNGIAGDAMLASYIIESHLGHGLDELSERWLGLETITYESLCGKGAKQIGFADVAIGQATEYAAQDADFALRLEAHLRAQMDEKQLEMYEKMELPVAQVLFEMERNGVQIDRAELARQSAELGAELMKLEQEAYAAAGQPFNLNSPKQLQEILFDKMGIPTKGLKKTAKGGISTNEAVLEQLAPDYPLPKIILQNRSLAKLKSTYTDKLPDMISPQDNRVHTTYAQAVAITGRLASNNPNLQNIPIRTAEGRRVRRAFTAPPGSVIVSADYSQIELRIMAHLSGDKTLIAAFQNGEDVHRRTAAEVFGTAPENVSPEQRRYAKTINFGLIYGMGQYGLAKSLGIDNLSAKNFIDRYFARYPGVAEYMQRAKEQAAAQGYVETLFGRRLYLPDIRNKNANARAGAERAAINAPMQGTASDLIKRAMIDVRNWLSDGIDSKLVMQVHDELVLEVVETELDFVKEKLPQIMAKVDGGLLDVPLVAEVGVGENWEEAH

SEQ ID NO: 3653 - protein, 208 aa, Neisseria meningitidis; identical to SEQ ID NO: 1121

SEQ ID NO: 3654 - protein, 172 aa, Neisseria meningitidis; identical to SEQ ID NO: 601

SEQ ID NO: 3655 - protein, 260 aa, Neisseria meningitidis
MKTKLIKILTPFTVLPLLACGQTPVSNANAEPAAKAESAGKSVAASLKARLEKTYSAQDLKVLSVSETPVKGIYEVVVSGRQIIYTDAEGGYMFVGELINIDTRKNLTEERAADLNKIDFASLPLDKAIKEVRGNGKLKVAVFSDPDCPFCKRLEHEFEKMTDVTVYSFMMPIAGLHPDAARKAQILWCQPDRAKAWTDWMRKGKFPVGGSICDNPVAETTSLGEQFGFNGTPTLVFPNGRSQSGYSPMPQLEEIIRKNQ

SEQ ID NO: 3656 - protein, 197 aa, Neisseria meningitidis; identical to SEQ ID NO: 2035

SEQ ID NO: 3657 - protein, 283 aa, Neisseria meningitidis
MHILLTALLKCLSLLPLSCLHTLGNRLGHLAFYLLKEDRARIVANMRQAGMNPDPKTVKAVFAETAKGGLELAPAFFRKPEDIETMFKAVHGWEHVQQALDKHEGLLFITPHIGSYDLGGRYISQQLPFPLTAMYKPPKIKAIDKIMQAGRVRGKGKTAPTSIQGVKQIIKALRSSEATIVLPDHVPSPQEGGEGVWVDFFGKPAYTMTLAAKLAHVKGVKTLFFCCERLPGGQGFDLHIRPVQGELNGDKAHDAAVFNRNAEYWIRRFPTQYLFMYNRYKMP

SEQ ID NO: 3658 - protein, 525 aa, Neisseria meningitidis
MMKKSFLTLVLYSSLLTASEIAYRFVFGIETLPAAKIAETFALTFVIAALYLFARYKVTRLLIAVFFAFSIIANNVHYAVYQSWMTGINYWLMLKEVTEVGSAGASMLDKLWLPVLWGVLEVMLFCSLAKFRRKTHFSADILFAFLMLMIFVRSFDTKQEHGISPKPTYSRIKANYFSFGYFVGRVLPYQLFDLSRIPAFKQPAPSKIGQGSVQNIVLIMGESESAAHLKLFGYGRETSPFLTQLSQADFKPIVKQSYSAGFMTAVSLPSFFNVIPHANGLEQISGGDTNMFRLAKEQGYETYFYSAQAENQMAILNLIGKKWIDHLIQPTQLGYGNGDNMPDEKLLPLFDKINLQQGRHFIVLHQRGSHAPYGALLQPQDKVFGEADIVDKYDNTIHKTDQMIQTVFEQLQKQPDGNWLFAYTSDHGQYVRQDIYNQGTVQPDSYIVPLVLYSPNKAVQQAANQAFAPCEIAFHQQLSTFLIHTLGYDMPVSGCRESSVTGNLITGDAGSLNIRDGKAEYVYPQ

SEQ ID NO: 3659 - protein, 216 aa, Neisseria meningitidis
MPVTRPAKINTYTRIIDASLALFNEEGERNISTNHIAAHLGISPGNLYYHFRNKDEIIVQLFKRYSEALLAYLNEAVLPSDVEDSINYMAGIYDVMWEYRFLFSDVNTLLARSAELLGEHNTFTQAKVSPLLVNLLTQLNGLNVINADQTAMNDLAVNMWMVTKYWFDFDSSLRGRTKLTEDSKARGIRRTLSLLRPYLLPEHREKYDRKIGNGNP

SEQ ID NO: 3660 - protein, 93 aa, Neisseria meningitidis
MPSEAQKPVSFVLYSNDIKVTAKKNVFFGYFASLNRATGTIDIRVHDTDSTKGKNGIFQSIGIKTALSLQKYQIDKPGKEIRPCRLKKRPPVR

SEQ ID NO: 3661 - protein, 94 aa, Neisseria meningitidis; identical to SEQ ID NO: 387

SEQ ID NO: 3662 - protein, 221 aa, Neisseria meningitidis
MMMHASVQSRFAPILYVLIFFAGFLTAQIWFNQKAYTEELPPLLSALSAVALVWLAWAFVSARSKAKAEKFYREKMIQNESIHPVLHASLQHLEHKPQMLALLVKNHGKGMAEQVRFKAEVLPDDEDARTIAAELAKMDMFALGTDAVASGETYGRVFADIFELSAALEGRAFKGMLKLTAEYKNIFGDACRSETALELGALNQALQEISKTSEKSKRIFY

SEQ ID NO: 3663 - protein, 177 aa, Neisseria meningitidis
MGIYDFQMKDAEGNAVDLSGYRGKVLLIVNTATRCGLTPQYEALQKLYAQYTAEGLEILDFPCNQFREQAPESSGEIAQVCMMKFGTKFKIFDKIEVNGANTAPLYAYLKSVKPQDKGNHLFKDFVLKLAALGEKRDEGDIKWNFTKFLVNRDGEVVERFAPSVTPEEIEADIRALL

SEQ ID NO: 3664 - protein, 174 aa, Neisseria meningitidis
MEMKQMLLTVGGAAVLAGCGKEAGGYGGYWREKSDKKGGRVAVKKEKGNYFLNKIKVVTGKEEARLLSGKEGARSINTGIGEIRIKLSDDGKEVYVERRQYVKTDAAMKDKIIAHQKKCGQTAQAYLDARKALPSNQTYQQHQAAIEQLKRRFEAEFDELEKEIKCNGKPTLLF

SEQ ID NO: 3665 - protein, 375 aa, Neisseria meningitidis
MYTFRPFPKLHTETHIMNIQNIRTLLDTVAVPNTARTLGGEKAVRSVEQRSDGIHIALHFGFPVAHIASETADRIQEILMPLTGDTHIHLSMDTEIGTHKVQPGVTTIKGVKNIIAVASGKGGVGKSTTTANLAAAMARMGARVGVLDADLYGPSQPTMLGVDDRKPDQKNQKLIPVESSDGIQVMSIGFLVDTGQAVVWRGPMVSQALQQLMFQSEWDEVDYLFIDLPPGTGDIQLTLSQRIPVTGSVIVTTPQDIALIDARKAVDMFRKVNIPILGVLENMSVHICSNCGHSEALFGTDGGKDLAARLNVPLLGQLPLSLPVREAMDGGTPAQLFDEHPAIARIYTDAAFQIALGIADKGKDFSSRFPKIVVE

SEQ ID NO: 3666 - protein, 514 aa, Neisseria meningitidis
MNMFSKLDKYWQHPALYWPLLILFAAATPFTFAPYYHFWLMPLIFGAFVRLIELRPRFAVSSAYLFSLTAYTTQFYWIHTALHDVSGLPDLYAVPLTFLLPAYLALYPALCFWLWKKFTLPRGIKIGLVLPILWTLTEFARERFLTGFGWGAIGYSQITPDSPLAGFAPLGGIHMVTLATAFLGVWLVLASDNTARSGKRLLPIILIAALLAAGYTARQTDFTRPDGSRSTVALLQGNIDQTLKWREDQVIPTIQKYYEQVGKTTADIVILPETAIPVMRQNLPENILAKFAEQAQNNGSALAVGISQYTSDGNGYENAVINLTGYQENNQDGIPYYAKNHLVPFGEYKPLPFLTTPLYKMMNMPLSDFRKGGGKQSALLMKNQKIAFNICYEDGFGDELIAAAKDATLLANASNMAWYGKSNAMYQHLQQSQARAMELGRYMVRATNTGATAIISPKGNIIAQAQPDTETVLEGHIKGYVGETPYMKTGSSWWLMGILTLAALILFIFRNKEH

SEQ ID NO: 3667 - protein, 478 aa, Neisseria meningitidis
LENSLIIGLALAVLLMLLVMRAKQGKKTPKRKSQGVGNTQGQTPGSNDSDWVDQIGQSVSDGTQPDWSWNESAETASAAVSAQEVDPLTEYQVYKQFGYQGKAAESLAAYLDGIPDGEAKPENLIRELLDINLEVGDVDVLADNLQKYGKLIPSELLAKYIEQALQRDSNHLRIRVLAEEGLGWGTQEIEKRAEGGPATAASASPPPDAGGKAYEAEEIKRIPIVRGKKDVSGISQEEIGAIAGLVRADQGAKILKDKVSYETASKQYDRAIQTSEKPANLIIDALKLDYQHADIDRFAGHLWKLYQTLGNYGRQVKERMLGWGYSLGYHEVFDDLEKGPNDRQIKDIGMGHGYLPKNIQKFKSQHRDLVLQDSSLINTGSSPADDAVKEVESLLMYGQIEAAMDVLEQAVLKYPDESQLYITLIDIYERTEDWDRLGQFLRVLRERADRLPEEVVMLMSRLLQRMNQNIKKIKRYGK

SEQ ID NO: 3668 - protein, 1069 aa, Neisseria meningitidis
MFYLYQSNRLETLAALFAHIQKVKPLKSALQPEQIIVQSQGMRRYLNTCLARDLGVAANLSFSLPAGLTWKLMKKLIPGIPELSPFAPEVMRWRLLDLFRSEAFRNTAEFEDVRNVLQDYLGSGESADYQLAGQLADIFDQYLVYRPQWIDAWQQGRRLGLGDDEIWQSKLWRYLDDGRQSAPHRVALWEKLLESLSSDKLPERYFVFGISTMAPMYLQLLHKLSEHCDVFVFALNPSGMYWGNVIEAAQILKGGGDPDLTQAGHPLLASLGKQGRDFFDFLNEMEIEEETPVFEEGSRDTLLHALQTDIQNLDMPSEKAGNINTDDGSIRIVSAHSPLRELQILKDKLLKILHEHPDWQPHDIAVLTPNIESYTPFIEAVFGQAQPGAQALPYSVSDVKISRRQPLFHALSCLFDLLESRFEVDKVLVLLETAPVLRRFGLTEDDLPLLHDMVADLNVHWGLDGEMRGGTDQLFTWKQAVERMILGWMLPEGGNPMWQDVSAWYADVNQTALFGRFAALLETLSDIVRIWRQPATIGEWVARCRDLLETLFQAEADDQKSVQNLENEWVKWQAETELAQFSGQLPQQTVIRHIRRFLDSESEAGFLRGGITFCSMVPMRSLPFKVICLLGLNDGDFPRNTKAAVFDLIAKHPAKGDRARRDDDRYLFLEALISAREILYLSYIGRDIRKDEELAPSSLLGELIDTVAAMTGTNSRQLAQNWIEQHPLQAFSRRYFQEGGRSDGIFGTRTDYAAALGQTPEPPQPFFDQPVENAEPVAEIGQDEFIRFWRNPVKVWLQQQLAWSEPHIGEAWEPAEPFEPQHADQIAKTYIEARREGRDFSQTAARIGAESLLPSGELGRLWQQDFQTAAKQIDTAVLNSPKLPPLSYAIPSDGQILKGSLGNLYRCGQVFYAYGKPNAPQRIAFLLEHLIFCAVMPSETETRQTFIVQSGETEILAEIAQDRALQLLSEWMAFFNIGQNRPLPFFAKTSLAAAEAFAQKQDWEAALKKAQTAYHGNKVSKGQKDYTEVALVFGNASQNPLEQPLFENLVRLLADTFAAAEKKEEAGEA

SEQ ID NO: 3669 - protein, 129 aa, Neisseria meningitidis; identical to SEQ ID NO: 1031

SEQ ID NO: 3670 - protein, 72 aa, Neisseria meningitidis; identical to SEQ ID NO: 113

SEQ ID NO: 3671 - protein, 57 aa, Neisseria meningitidis; identical to SEQ ID NO: 735

SEQ ID NO: 3672 - protein, 163 aa, Neisseria meningitidis
MFWQLTVVSVTAVIALGTIFINKKTSKQKATLDVILNDYQDAQFVEADNHISPYIRGTAVDDNNARIDLYEIYQNKGGQWEKERGHLLTVINRHEFYACAINSGVLDEDLFKRLHCTNFIKLWNAVSPLVMKIREEERKDTIFRELEILVALWKANPLKASDL

SEQ ID NO: 3673 - protein, 710 aa, Neisseria meningitidis
MSIVSAPLPALSALIILAHYHGIAANPADIQHEFCTSAQSDLNETQWLLAAKSLGLKAKVVRQPIKRLAMATLPALVWCDDGNHFILAKTDGEGEHAQFLIQDLVTNKSAVLSFAEFSNRYSGKLILVASRASVLGSLAKFDFTWFIPAVIKYRRLFFEVLVVSVVLQLFALITPLFFQVVMDKVLVHRGFSTLDVVSVALLVVSLFEIVLGGLRTYLFAHTTSRIDVELGARLFRHLLSLPLSYFEHRRVGDTVARVRELEQIRNFLTGQALTSVLDLAFSFIFLAVMWYYSSTLTWLVLASLPAYAFWSAFISPILRTRLNDKFARNADNQSFLVESITAVGTVKAMAVEPQMTQRWDNQLAAYVASGFRVTKLAVVGQQGVQLIQKLVTVATLWIGARLVIEGKLTVGQLIAFNMLSGQVAAPVIRLAQLWQDFQQVGISVARLGDILNAPTENASSHLALPDIRGEITFEHVDFRYKADGRLILQDLNLRIRAGEVLGIVGRSGSGKSTLTKLVQRLYVPEQGRVLVDGNDLALAAPAWLRRQVGVVLQENVLLNRSIRDNIALTDTGMPLERIIEAAKLAGAHEFIMELPEGYGTVVGEQGAGLSGGQRQRIAIARALITNPRILIFDEATSALDYESERAIMQNMQAICANRTVLIIAHRLSTVKTAHRIIAMDKGRIVEAGTQQELLAKPNGYYRYLYDLQNG

SEQ ID NO: 3674 - protein, 436 aa, Neisseria meningitidis
MNTPHPRPKIAVIGAGWAGLSAAVTLARHADVTLFEAGRQAGGRARALAGNTDGFGFLDNGQHILLGAYRGVLRLMKTIGSDPRAAFLRVPLHWHMHGGLQFRTLPLPAPLHILGGVLLARRVPSAFKAKLLADMSDLQKSARLGQPDTTVAQWLKQRNVPRAAVMQFWQPLVWGALNTPLETASLRVLCNVLSDGVLTKKSGSDYLLPKQDLGAIVAEPALAELQRLGADIRLETRVCRLNTLPDGKVLVNGEAFDAAVPATAPYHAAALLPEGTPEHVQTAYQNLRYHAITTVYLRYAEPVRLPAPLTGLADGTVQWLLCRGRLGLPENEVSAVISVSDRVGAFANRAWADKAHADLKRILPHLGEPEAVRVITEKRATTAADAPPPDLSWLHRHRIFPAGDYLHPDYPATLEAAVQSGFASAEACLQSLSDAV

SEQ ID NO: 3675 - protein, 185 aa, Neisseria meningitidis
MKPKFKTVLTALLLAVSLPSMAATHVLMETDMGNIRLVLDESKAPKTVANFVRYARKGFYDDTVFHRVIDGFVIQGGGFTEDLVQKATDKAVANESGNGLKNTAGTIAMARTADPDSATSQFFINLADNDSLNYKNGQYGYTVFGRVESGMNTVSKIARVKTATHGLYQNVPVQPVKIRRIVVGQ

SEQ ID NO: 3676 - protein, 85 aa, Neisseria meningitidis
MILLLIVNKYWKVNDMKNEIQKIMDKYNPWHEDDFESYEDIAKDVSLMTDKTFIEHYLLEVYSEENGHFDQENIHAMIGEIKNAI

SEQ ID NO: 3677 - protein, 436 aa, Neisseria meningitidis; identical to SEQ ID NO: 1523

SEQ ID NO: 3678 - protein, 37 aa, Neisseria meningitidis
LQNSPKFPPRHLGDFGEFCKGLGQYFERSARKSVWKP

SEQ ID NO: 3679 - protein, 358 aa, Neisseria meningitidis
MQEWFQNLFAATLGLGDLGITVGLVVSVIVKIVIILIPLILTVAYLTYFERKVIGFMQLRVGPNVTGPWGLIQPFADVFKLLFKEVTRPKLSNKALFYIGPIMSLAPSFAAWAVIPFNEEWVLTNINIGLLYILMITSLSVYGVIIAGWASNSKYSFLGAMRASAQSISYEIAMSAALVCVVMVSGSMNFSDIVAAQAKGIAGGSVFSWNWLPLFPIFIVYLISAVAETNRAPFDVAEGESEIVAGHHVEYSGFAFALFFLAEYIFMILIAALTSLMFLGGWLSPFPQSWGIVGTPSAFWMFVKMAAVLYWYLWIRATFPRYRYDQIMRLGWKVLIPIGFAYIVVLGVWMISPLNLWK

SEQ ID NO: 3680 - protein, 636 aa, Neisseria meningitidis
MTLETLIALPRNIKKICFLIHDFLMIFIAFWFTQSLKAEYSDEWFDFANWQSFLLTALLTITLFIRMGLYRAVTRFVSFRILSTALAGSIVSAVLFFLNTLIFEERLRLALPIVYFLLLFVSVTGSRMVLRGLLSEHPKKQMIPVIIYGAGRSGRQLLEAVKQMREYSAAAFVDDDPKLWHTVIYDLAVYQPDAIAFLIERYGVEKILLAIPGATQEQRRRIINKLEAYPCEVLTIPGMKDLMDGKISIGTLKKISVSDLLGRDSVAPDDRLMSADIEGKTVMVTGAGGSIGSELCRQIIRRRPEKLLLFELSEFALYAIEKELRETCIQKRLDTEILPFLGSVQNRTLLEHVMTAFSVATVYHAAAYKHVPMVEFNTVEGIRNNIFGTLECALAATTSGVRTFVLISTDKAVRPTNTMGASKRMAELCLQALAAEPGQKTRFSMVRFGNVLGSSGSVVPLFEKQIAEGGPLTLTHPEITRYFMTIPEAAQLVIQAGAMGTGGDVFVLDMGESVKIIDLARQMITLSGLKPNTPEQPDGDIEILITGLRPGEKLYEELLIGDNVRKTAHPRIMTADEAMLPWHELSALLDRIRAACDRYDQQAIRTLLINAPTGFAPSDGICDLLWVRETHRKNAV

SEQ ID NO: 3681 - protein, 280 aa, Neisseria meningitidis
MCQLLGMNCNTPTDIMFSFEGFRRRGGITDHHADGFGIGFFEGKGVRLFHDDKPSANSPVADLVRAYQIKSENVIAHIRKASQGQTSLANTHPFMREMWGGYWLFAHNGHLIDFFPEQGEFFHPVGTTDSERAFCHILNRLRTRFAARPDDDTLFDAIAGLTHEIRKFGLFNFMLSDGIALFAHASTLLHYIVRQAPFGKARLLDDDVMVDFAEVTTPSDRVAVIATLPLTRDESWSQLAVDELVMFREGNIVRHDRPENPVYMSAEEGLEIARAAGVAV

SEQ ID NO: 3682 - protein, 136 aa, Neisseria meningitidis
MTTYTIPKKDYQFLYIYEGTLLNYTLKNDEFHIIVQNVDYPDFPQEIPTPNYTDWVKIKFKQFSYLKFIYGYATKNQDKNIKNVLELGELKQDDEILDYGGALEVIGSRYDLPTGFSIDIVCREIELEFLDQESFN

SEQ ID NO: 3683 - protein, 792 aa, Neisseria meningitidis
MKPLQMLPIAALVGSIFGNPVLAADEAASETTPVKAEIKAVRVKGQRNVPAAVERVNLNRIKQEMIRDNKDLVRYSTDVGLSDSGRHQKGFAIRGVEGNRVGVSIDGVNLPDSEENSLYARYGNFNSSRLSIDPELVRNIDIVKGADSFNTGSGALGGGVNYQTLQGRDLLLPERQFGVMMKNGYSTRNREWTNTLGFGVSNDRVDAALLYSQRRGHETESAGNRGYPVEGAGKETNIRGSARGIPDPSKHKYHSFLGKIAYQINDNHRIGASLNGQQGHNYTIEESYNLLASYWREADDVNRRRNTNLFYEWTPESDRLSMVKADVDYQKTKVSAVNYKGSFPIEDSSTLTRNYNQKDLDEIYNRSMDTRFKRITLRLDSHPLQLGGGRHRLSFKTFASRRDFENLNRDDYYFSGQISRTTSSIQHPVKTTNYGFSLSDQIQWNDVFSSRAGIRYDHTKMTPQELNADCHACDKTPPAPNTYSGWSGFAGLAAQLNQAWRVGYDITSGYRVPNASEVYFTYNHGAGTWLPSPNLKAERSTTHTLSLQGRGEKGTLDANLYQSNYRNFLSEEQKLTTSGTPGCTEENAYYGICSDPYKEKLDWQMKNIDKARIRGIELTGRLNVDKVASFVPEGWKLFGSLGYAKSKLSGDNSLLSTQPLKVIAGIDYESPSEKWGVFSRLTYLGAKKVKDAQYTVYENKGWGTPLQKKVKDYPWLNKSAYVFDMYGFYKPAKNLTLRAGVYNLFNRKYTTWDSLRGLYSYSTTNAVDRDGKGLDRYRAPGRNYAVSLEWKF

SEQ ID NO: 3684 - protein, 145 aa, Neisseria meningitidis
MVEAKIFILYGAANKGKSTTLNTLFNQICRKFSKFLVFFERHGNGLDFVAVFDHEGQRIGFYSSGDNEYEVRRNLYKLYSHNCDFIFGTSRTRGGSCDAVGCYAELLHGDVNIINWCEKFEPTDEDNERAVKELFKSFKNIINKL

SEQ ID NO: 3685 - protein, 122 aa, Neisseria meningitidis; identical to SEQ ID NO: 848

SEQ ID NO: 3686 - protein, 182 aa, Neisseria meningitidis
VSQNTPIKPWYKHVWPWILMAGPIFVVIASVAMFFVAQQHATDLVTDDYYKDGKHIDIQLHRDEEAVRRHIGVQVLISPDMNAAKVFVGGEFDGKQPLNLLLMHPTRKADDQTVALKPVGSAQNGRAEYEAVFKTLSPTNHWYVRVEDAAGVWRVENKWITSQGNAVDLTPMDKLFNNTESK

SEQ ID NO: 3687 - protein, 636 aa, Neisseria meningitidis; identical to SEQ ID NO: 3680

SEQ ID NO: 3688 - protein, 99 aa, Neisseria meningitidis
MHYFSIHDQSGRHIGFFILLADDESEARPQSGRFAVKLEGGMENHVLSPFGQTEIPQYWRVVKDRIELFFDEAPVGTLRNEYLTVSGQTFVLNDLTGNM

SEQ ID NO: 3689 - protein, 642 aa, Neisseria meningitidis
MAKVIGIDLGTTNSCLAISENGQTKVIENAEGARTTPSVIAYLDGGEILVGAPAKRQAVTNAKNTIYAAKRLIGHKFEDKEVQRDIESMPFEIIKANNGDAWVKAQGKELSPPQISAEVLRKMKEAAEAYLGEKVTEAVITVPAYFNDSQRQATKDAGRIAGLDVKRIINEPTAAALAFGMDKGDNKDRKVAVYDLGGGTFDISIIEIANLDGDKQFEVLATNGDTFLGGEDFDQRLIDHIIAEFKKEQGIDLKQDVMALQRLKEAAEKAKIELSSGQQTEINLPYITMDATGPKHLAMKITRAKFESLVEDLIARSIEPCRTALKDAGLSTGDIDDVILVGGQSRMPKVQEAVKDFFGKEPRKDVNPDEAVAVGAAIQGEVLSGGRSDVLLLDVTPLSLGIETMGGVMTKLIQKNTTIPTKASQVFSTAEDNQSAVTIHVLQGERERASANKSLGQFNLGDIAPAPRGMPQIEVTFDIDANGILHVSAKDKGTGKAANITIQGSSGLSEEEIERMVKDAEANAEEDKKLTELVASRNQAEALIHSVKKSLADYGDKLDAAEKEKIEAALKEAEEAVKGDDKAAIDAKTEALGAASQKLGEMVYAQAQAEAQAGESEQANASAKKDDDVVDADFEEVKDDKK

SEQ ID NO: 3690 - protein, 344 aa, Neisseria meningitidis; identical to SEQ ID NO: 179

SEQ ID NO: 3691 - protein, 573 aa, Neisseria meningitidis
MPSEAICSKKTMLNKDQFADNHFIRTFIEEDLKSGKHETIQTRFPPEPNGYLHIGHAKSICLNFGLAYIYDGLCNLRFDDTNPEKENDEYVNAIKEDVEWLGFHWAGEPRFASNYFDQLYDYAVGLVKDGKAYVDDLTPEEMREYRGTLTEAGKNSPYRDRSIEENLDLFTRMKNGEFPDGSKTLRLKIDMASGNINMRDPVIYRIRRAHHHNTGDKWCIYPMYDYTHCISDAIEGITHSLCTLEFEAHRPLYDWVLDNIPAPHATRPRQYEFSRLELLYTITSKRKLNQLVVEKHVSGWDDPRMPTISGMRRRGYTPEGLRLFAKRAGISKSENIVDMSVLEGAIREELENSAPRLMAVLNPLKVTLTNFETGRTQSRRAAFHPNHEEMGEREVPISQTIYIEADDFAENPPKGFKRLIPGGEVRLRHGYVIKCDEVVKDEAGNVVELKCSIDHDTLGKNPEGRKVKGVIHWVSAEHAAEIKVRLYDRLFTVERPDAVRGEDGEYLPFTDFLNPESVKEITAYAEPAAKDLPAESRWQFERIGYFVTDRKDHGKDTPVFNRTVTLKDSWQPK

SEQ ID NO: 3692 - protein, 96 aa, Neisseria meningitidis
MDDLILYFLSGIFGNQVAEYIIKNNREIKVPFIVLYAIFFTLIYTVALLFLSLIYWVNGAEIAWKGIGIFSMSVSFCIVFCLYLIDKAGRCKDKKQ

SEQ ID NO: 3693 - protein, 56 aa, Neisseria meningitidis
LGLGSTCVCCIFGRNSGFEKIGRILINGMRGVAVGTVAGGITGYAGSTGKNTDIRR

SEQ ID NO: 3694 - protein, 298 aa, Neisseria meningitidis
LAADRTVPEPSKNPLPSRPPRPSRLPAVVHVQSRPARTMAQPLRSRTRTQPHYPHRFQPVLSFRTEHPRLQHLMPLPQLAGARRHPVRTVGTDQPPTDRKRFKNRESIRCRCRHHYSDRRQQTASDHRSRRRTNQRPNHTEQRQRCPLDQEKRPLQTRLQTTYPHRCGRLYRETAHYPRQCPVQTPAAFAGRDSRYDRLCRQRLQCGKPATSGRTSVAGRHYAQSLPQPSAVGSANQTQPIFVEDPLCGRTKLRYAAPIPLCAVNLFRTDSECAKPPEGDVFEPVESRQQAKCARCRL

SEQ ID NO: 3695 - protein, 488 aa, Neisseria meningitidis
MMKLGFKPIPLAIAAVLCALVLALPVPDGVKPQAWTLLAMFVGVIAAIIGKAMPLGALSIIAVGLVAVTGVTADKPGAAMSDALSAFANPLIWLIAIAVMISRGLLKTGLGMRIGYLFIAVFGRKTLGIGYSLALSELLLAPVTPSNTARGGGIIHPIMQSIAGSYGSNPAKGTEGKMGKYLALVNYHSNPISSAMFITATAPNPLIVNLIAENLGSSFRLSWGAWAWAMAVPGVIAFFVMPLILYFLYPPEIKETPNAVQFAKDRLREMGKMSADEIIMAVIFGILLLLWADVPALITGNHAFSINATATAFIGLSLLLLSGVLTWDDVLKEKSAWDTIIWFGALIMMAAFLNKLGLIKWFSGVLAESVGGLGVSGTAAGVILVLAYMYAHYMFASTTAHITAMFGAFFAAAVSLNAPAMPTALMMAAASNIMMTLTHYATGTSPVIFGSGYTTMGEWWKAGFIMSVVNFLIFFVIGSIWWKVLGYW

SEQ ID NO: 3696 - protein, 305 aa, Neisseria meningitidis
MKKTKVHLISGFLGTGKTTALKSLMAQKDPNEKWVIIVNEFGEIGIDGAVLSDNGIPVAEIAGGCLCCTAGPQMGVTVQKMLRDAKPDRLMIEASGLAHAASVIDELKAKPLDSLLEIGAVFTVVNPRQFINPDYAQQALYKDQIGICDVLVASKTDLCTPEQLAEFHDKAAKLFPPKAKVVEVQNAQLDIRWLDIPVIEKSRYRLKALPDNTMGFQSQGFTFPAGRDFDGEKLTNFFNDLPKMTEGLVRAKGVFQVLGTWVWLNWVDGQWGANQVSWRRDSRFELIAKSFDADLIEQKLKDALE

SEQ ID NO: 3697 - protein, 758 aa, Neisseria meningitidis
MAQTTLKPIVLSILLISTPILAQAHETEQSVDLDEVTVVGKSRPRATSGLLHTSTASDKILSGDTLRQKAVNLGDALDGVPGIHASQYGGGASAPVIRGQTGRRIKVLNHHGETGDMADFSPDHAIMVDTALSQQVEILRGPVTLLYSSGNVAGLVDVADGKIPEKMPENGVSGELGLRLSSGNLEKLTSGGINIGLGKNFVLHTEGLYRKSGDYAVPRYRNLKRLPDSHADSQTGSIELSWVGEKGFIGAAYSDRRDQYGLPAHSHEYDDCHADIIWQKSLINKRYLQLYPHLLTEEDIDYDNPGLSCGFHDDDDAHAHAHNGKPWIDLRNKRYELRAEWKQPFPGFEALRVHLNRNDYRHDEKAGDAVENFFNNQTQNARIELRHQPIGRLKGSWGVQYLGQKSSALSATSEAVKQPMLLDNKVQHYSFFGVEQANWDNFTLEGGVRVEKQKASIRYDKALIDRENYYNHPLPDLGAHRQTARSFALSGNWYFTPQHKLSLTASHQERLPSTQELYAHGKHVATNTFEVGNKHLNKERSNNIELALGYEGDRWQYNLALYRNRFGNYIYAQTLNDGRGPKSIEDDSEMKLVRYNQSGADFYGAEGEIYFKPTPRYRIGVSGDYVRGRLKNLPSLPGREDAYGNRPLIAQADQNAPRVPAARLGVHLKASLTDRIDANLDYYRVFAQNKLARYETRTPGHHMLNLGANYRRNTRYGEWNWYVKADNLLNQSVYAHSSFLSDTPQMGRSFTGGVNVKF

SEQ ID NO: 3698 - protein, 342 aa, Neisseria meningitidis
MEARPPRVNEAQAPRADEMKKESRPAFDAAAVPVSDSGFAANANVRRFVDDEVGKGDFSRAEWQDFFDKAAYKADIVKIMHRPSTSRPWYVFRTGNSGKAKFRGARRFYAENRALIDDVAQKYGVPAELIVAVIGIETNYGKNTGSFRVADALATLGFDYPRRAGFFQKELVELLKLAKEEGGDVFAFKGSYAGAMGMPQFMPSSYRKWAVDYDGDGHRDIWGNIGDVAASVANYMKQHGWRTGGKILVSATLAPGADVQAIIGEKTALTRTVADLKAYGIIPGEELADDEKAVLFKLETAPGVFEYYLGLNNFYTVWQYNHSRMYVTAVRDIANSLGGPGL

SEQ ID NO: 3699 - protein, 480 aa, Neisseria meningitidis
MKQLAMYINGRFENDFNGEWRDVLNPSTEEAIAREPKGGRADVDRAVAAARAAQPAWERLPAVERGAYLRKIAQGIRERADELTDTIVAEGGKTKDLARVEVMFTADYLDYQAEWARRYEGEIIQSDRPRENILLFKRPLGVIAGILPWNFPFFLIARKMGPALVTGNTIVVKPSSVTPINCHIFAEIVDAVGLPAGVFNVVNGPGAEIGNALSAHPQVDMVSLTGSVEAGRQVMEAASANITKVSLELGGKAPAIVLKDADLDLAVKSILASRVGNTGQICNCAERVYVHSSLKDAFIEKMTAAMKGVRYGNPAEAEAGALEMGPLIEERAVKAVAEKVERAVKQGAKLVCGGKRAEGRGYFFEPTLLTDTDNSMDIMKEETFGPVLPVSAFDTLDQVIALANDCEFGLTSSVYTTNLNEAFYVTRRLQFGETYINRENFEAMQGFHAGWKKSGIGGADGKHGLEEYLQTQVVYLETDI

SEQ ID NO: 3700 - protein, 177 aa, Neisseria meningitidis; identical to SEQ ID NO: 1613

SEQ ID NO: 3701 - protein, 183 aa, Neisseria meningitidis
LSGINIKLKSGDSLLIRGPSGCGKTSLLCALAGLWPFGSSGKVSRPPHQDILFLPQRPYTAQGSLRDAVCYPDIDKQHPELAEAMNTCRLGYLIDKLDKTADWQHKLSPGELQRVAFVRALLSKPKIVLLDEATAALDEPAEAALYRALKQKLPDSIIISIGHRSTLNTFHNMHLNVGNVACD

SEQ ID NO: 3702 - protein, 237 aa, Neisseria meningitidis; identical to SEQ ID NO: 1707

SEQ ID NO: 3703 - protein, 201 aa, Neisseria meningitidis
MTIMNINTSENKDAVAEHTGQWLEKAVIGLNLCPFAKAPHVKNLVRIAISEAKHLDSFLEDLDEELQRLGNTPATELETTLLVHPTLFPDFDVFNDMLDIADAAVIENGLEGIVQIAPFHPQFRFQNTEPDDIGNYTNRSPYPTLHLIREDSIAKAAQAFPDASAIFERNIALLEKMGHEGWAKLGITSCPYPHNKKNISK

SEQ ID NO: 3704 - protein, 488 aa, Neisseria meningitidis
MVIFYFCGKTFMPARNRWMLLLPLLASAAYAEETPREPDLRSRPEFRLHEAEVKPIDREKVPGQVREKGKVLQIDGETLLKSPELLSRAMYSAVVSNNIAGIRVILPIYLQQAQQDKMLALYAQGILAQADGRVKEAISHYRELIAAQPDAPAVRMRLAAALFEDRQNEAAADQFDRLKAENLPPQLMEQVELYRKALRERDAWKVNGGFSVTREHNINQAPKRQQYGKWTFPKQVDGTAVNYRLGAEKKWSLKNGWYTTAGGDVSGRVYPGNKKFNDMTAGVSGGIGFADRRKDAGLAVFHERRTYGNDAYSYTNGARLYFNRWQTPKWQTLSSAEWGRLKNTRRARSDNTHLQISNSLVFYRNARQYWMGGLDFYRERNPADRGDNFNRYGLRFAWGQEWGGSGLSSLLRLGAAKRHYEKPGFFSGFKGERRRDKELNTSLSLWHRALHFKGITPRLTLSHRETWSNDVFNEYEKNRAFVEFNKTF

SEQ ID NO: 3705 - protein, 120 aa, Neisseria meningitidis; identical to SEQ ID NO: 1496

SEQ ID NO: 3706 - protein, 1050 aa, Neisseria meningitidis
MNKTWKRQVFRHTALYTAILMFSHTGGGGQAQAQTQTHKYAIVMNNQKLPEVKWGNDYSSLTDKSNEREVTHTSKFVVAKKHISFSFNNTDEVVAEKKDAVVFGAATYLPPYGKVSGFDTAKLAERKNALDQIGTTHPGLIGYNYQDVTCASGNCPELSYRTQFTFNNGLKRNGNGGRLDIYEDKSRDSSPIYKLKDYPWLGVSFNLGGESSFKPKRQGSLVSSFSEDVTQQNGTQDQYKSKNLVYTTDDYNSKGNKNHQDKHHAVAFYLNAKLHLLDKKQIKNIAQGVTVDLGTLKTRIEPTDAWKNRQGSYFNNGTWTYEEKGSVSVKLKLPEVKAGRCINKPNPNPNKKALSPALTAPALWFGAGQDGKAEMYSASVSTYPDSSSSRIFLQNLKRKDDPNKPGRHSLEPLNDTQIKSKEPTFTGRQTIIRLDGGVQQIKLQDNEVTSFNVNNGNNTFGIVKDLGVDPDASEWKKVLLPWTVRDSADDSKFKAFNKEENNDNKPKYSQKYRSRDNNNRDLGDIVNSPIVAVGGYLATAANDGMVHIFKKNGGSDERSYNLKLSYIPGTMPRQYFDNDTSALKDSTLAKELRAFAEKGYVGDRYGVDGGFVLREVERDGKTRVFMFGAMGFGGRGAYALDLTKADGSDPTAVSLFDVKNDDKNNNGVKLGYTVGTPQIGKTHNDKYAAFLASGYATKEITSGENKTALYVYDLESSGTLIKKIDVPGGKGGLSSPTLVDKDLDGTIDIAYAGDRGGKMYRFDLSGQDPNQWSVRAIFEGTKPITSAPAISQLKDKRVVIFGTGSDLSEEDVLSTDEQHIYGIFDNDTNTGVAKDGQGNGLLEQVLEKDKDGKTLFLSDYKRSNGSGDKGWVVKLKEGQRVTVKPTVVLRTAFVTIRKYNDGGCGAETAILGINTADGGKLTKKSARPIVPDANKDVAQYSGHKKGTNGKSIPIGCMEKGNEIVCPNGYVYDKPVNVRYLDEKKTDGFSTTADGDAGGSGIDPDGKRAGKNNRCFSQKGVRTLLMNDLDSLDITGPTCGMKRISWREIFY

SEQ ID NO: 3707 - protein, 622 aa, Neisseria meningitidis
MQAVRYRPEIDGLRAVAVLSVIIFHLNNRWLPGGFLGVDIFFVISGFLITNIILSEIQNGSFSFRDFYTRRIKRIYPAFIAAVSLASVIASQIFLYEDFNQMRKTIELSTVFLSNIYLGFRLGYFDLSANENPVLHIWSLAVEEQYYLLYPLLLIFCYKKTKSLRVLRNISIILFLILTATSFLPSRFYTDILNQPNTYYLSTLRFPELLAGSLLAVYGQTQNGRRQTASGKRQLLSLLCFGALLACLFVIDKHNPFIPGMTLLLPCLLTALLIRSMQYGTLPTRILSASPIVFVGKISYSLYLYHWIFIAFAHYITGDKQLGLPAVSAVAALTAGFSLLSYYLIEQPLRKRKMTFKKAFFCLYLAPSLILVGYNLYARGILKQEHLRPLPGAPLAAENHFPETVLTLGDSHAGHLRGFLDYVGSREGWKAKILSLDSECLVWVDTTLADNPLCRKYRDEVEKAEAVFIAQFYDLRMGGQPVPRFEAQSFLIPGFQARFRETVKRIAAVKPVYVFANNTSISRSPLREEKLKRFAANQYLRPIQAMGDIGKSNQAVFDLVKDIPNVHWVDAQKYLPKNTVEIHGRYLYGDQDHLTYFGSYYMGREFHKHERLLKSSRGGALQ

SEQ ID NO: 3708 - protein, 231 aa, Neisseria meningitidis
MAKVSKRLKALRSSVEANKLYAIDEAIALVKKAATAKFDESVDVSFNLGVDPRKSDQVIRGSVVLPKGTGKITRVAVFTQGANAEAAKEAGADIVGFEDLAAEIKAGNLNFDVVIASPDAMRIVGQLGTILGPRGLMPNPKVGTVTPNVAEAVKNAKAGQVQYRTDKAGIVHATIGRASFAEADLKENFDALLDAIVKAKPAAAKGQYLKKVAVSSTMGLGIRVDTSSVNN

SEQ ID NO: 3709 - protein, 516 aa, Neisseria meningitidis
MKKPLISVAAALLGVALGTPYYLGVKAEESLTQQQKILQETGFLTVESHQYERGWFTSMETTVIRLKPELLNNARKYLPDNLKTVLEQPVTLVNHITHGPFAGGFGTQAHIETEFKYAPETEKVLERFFGKQAPVSLANTVYFNGSGKMEVSVPAFDYEELSGIRLHWEGLTGKTVYQKGFKSYRNSYDAPLFKIKLADKGDAAFEKAHFDSETSDGINPLALGSSNLTLEKFSLEWKEGVDYNVKLNELVNLVTDLQIGAFINPNGSIAPSKIEVGKLAFSTKTGESGSFINSEGQFRFDTLVYGNEKYGPLDIHIAAEHLDASALTVLKRKFAQISAKKMTEEQIRNDLIAAVKGEASGLFTNNPVLDIKTFRFTQPSGKIDVGGKIMFKDMKKEDLNQLGLMLKKTEADIRMSIPQKMLEDLAVSQAGNIFSVNAEDEAEGRASLDDINETLRLMVDSTVQSMAREKYLTLNGDQIDTAISLKNNQLKLNGKTLQNEPEPDFDEGGMVSEPQQ

SEQ ID NO: 3710 - protein, 138 aa, Neisseria meningitidis; identical to SEQ ID NO: 489

SEQ ID NO: 3711 - protein, 117 aa, Neisseria meningitidis; identical to SEQ ID NO: 408

SEQ ID NO: 3712 - protein, 467 aa, Neisseria meningitidis
MTLLNLMIMQDYGISVCLTLTPYLQHELFSAMKSYFSKYILPVSLFTLPLSLSPSVSAFTLPEAWRAAQQHSADFQASHYQRDAVRARQQQAKAAFLPHVSANASYQRQPPSISSTRETQGWSVQVGQTLFDAAKFAQYRQSRFDTQAAEQRFDAAREELLLKVAESYFNVLLSRDTVAAHAAEKEAYAQQVRQAQALFNKGAATALDIHEAKAGYDNALAQEIAVLAEKQTYENQLNDYTDLDSKQIEAIDTANLLARYLPKLERYSLDEWQRIALSNNHEYRMQQLALQSSGQALRAAQNSRYPTVSAHVGYQNNLYTSSAQNNDYHYRGKGMSVGVQLNLPLYTGGELSGKIHEAEAQYGAAEAQLTATERHIKLAVRQAYTESGAARYQIMAQERVLESSRLKLKSTETGQQYGIRNRLEVIRARQEVAQAEQKLAQARYKFMLAYLRLVKESGLGLETVFAE

SEQ ID NO: 3713 - protein, 280 aa, Neisseria meningitidis; identical to SEQ ID NO: 3681

SEQ ID NO: 3714 - protein, 293 aa, Neisseria meningitidis
MCIEMKFIFFVLYVLQFLPFALLHKLADLTGLLAYLLVKPRRRIGEINLAKCFPEWDGKKRETVLKQHFKHMAKLMLEYGLYWYAPAGRLKSLVRYRNKHYLDDALAAGEKVIILYPHFTAFEMAVYALNQDVPLISMYSHQKNKILDEQILKGRNRYHNVFLIGRTEGLRALVKQFRKSSAPFLYLPDQDFGRNDSVFVDFFGIQTATITGLSRIAALANAKVIPAIPVREADNTVTLHFYPAWKSFPGEDAQADAQRMNRFIEERVREHPEQYFWLHKRFKTRPEGSPDFY

SEQ ID NO: 3715 - protein, 292 aa, Neisseria meningitidis
MMSQHSAGARFRQAVKESNPLAVAGCVNAYFARLATQSGFKAIYLSGGGVAACSCGIPDLGITTMEDVLIDARRITDNVDTPLLVDIDVGWGGAFNIARTIRNFERAGVAAVHIEDQVAQKRCGHRPNKAIVSKDEMVDRIKAAVDARVDENFVIMARTDALAVEGLDAAIERAQACVEAGADMIFPEAMTDLNMYRQFADAVKVPVLANITEFGSTPLYTQSELAENGVSLVLYPLSSFRAASKAALNVYEAIMRDGTQAAVVDSMQTRAELYEHLNYHAFEQKLDKLFQK

SEQ ID NO: 3716 - protein, 93 aa, Neisseria meningitidis; identical to SEQ ID NO: 3660

SEQ ID NO: 3717 - protein, 131 aa, Neisseria meningitidis; identical to SEQ ID NO: 1281

SEQ ID NO: 3718 - protein, 92 aa, Neisseria meningitidis; identical to SEQ ID NO: 752

SEQ ID NO: 3719 - protein, 820 aa, Neisseria meningitidis
MTQKEKHFEEYAALATLPLRDVVVYPHMVLPLFVGRPKSIAALENAITREEPVFLLAQTDAAVEEPVAADLYQTGTVAQVLQVLKLPDGTVKVLVEGLYRGRVLTIEDTGGLFVSHIEAVVEEDTGGNTDLEAVRRTLLAQFEQYAKLNKKIPAEIIGSINGIAENSRLTDTVAAHLQLKLTQRQQILEISEIGKRMEFLLAQLESELDIMQAEKRIRGRVKRQMEKSQREYYLNEQIKAIHKELGEEDENGELDALEAGIKKAGMSKEAEEKCLSELKKLKMMPPMSAESTVVRNYIDTLLELPWKKKSRVSKDIAKAGLVLDADHYGLEKVKERILEYLAVQKRMDKLKGPILCLVGPPGVGKTSLGESIAKATGRKYVRMALGGVRDESEIRGHRRTYIGSMPGKILQNMAKAGVKNPLFLLDEIDKLGSDFRGDPASALLEVLDPEQNNKFADHYAEVDYDLSDVMFIATSNSLNIPTPLLDRMEIIRLSGYTEDEKINIAMQYLVPKQMKRNGVKEGELAIEESAVRDIIRYYTREAGVRSLDREIAKICRKVVMQITLDEDKKRLSETKKTSKAKPKAVKVNEKNLHDYLGVRRFDYGVAESENRIGQVTGLAWTEVGGELLTVEAAALPGKGVIQCTGQLGDVMKESVSAAWSVVRSRAESVGLAPDFYEKKDIHVHVPEGATPKDGPSAGIAMTLAMVSAFTKIPVRADVAMTGEITLRGEVLPIGGLKEKLLAALRGGIKHVLIPKDNLKDLEEIPENVKTGLTIHPVKWIDEVLALGLESQPEPWAEPSGAEAAAESASKPKPRSRATKH

SEQ ID NO: 3720 - protein, 304 aa, Neisseria meningitidis
MQNFGKVAVLMGGFSSEREISLDSGTAILNALKSKGIDAYAFDPKETPLSELKAQGFQTAFNILHGTYGEDGAVQGALELLGIPYTGSGVAASAIGMDKYRCKLIWQALGLPVPEFAVLHDDTDFDAVEEKLGLPMFVKPAAEGSSVGVVKVKGKGRLKSVYEELKHLQGEIIAERFIGGGEYSCPVLNGKGLPGIHIIPATEFYDYEAKYNRDDTIYQCPSEDLTEAEESLMRELAVRGAQAIGAEGCVRVDFLKDTDGKLYLLEINTLPGMTSHSLVPKSAAVTGVGFADLCIEILKTAHVG

SEQ ID NO: 3721 - protein, 452 aa, Neisseria meningitidis
MKPLDLNFICQALKLPMPSESKPVSRIVTDSRDIRAGDVFFALAGGRFDAHDFVEDVLAAGAAAVVVSREDCVAMDGALKVDDTLTALQMLAKAWRENVNPFVFGITGSGGKTTVKEMLAAVLRRRFGDNAVLATAGNFNNHIGLPLTLLKLNEKHRYAVIEMGMNHFGELAVLTQIAKPDAALVNNAMRAHVGCGFDGVGDIAKAKSEIYQGLCSDGMALIPQEDANMAVFKTATLNLNTRTFGIDSGDVHAENIVLKPLSCEFDLVCGNECAAVVLPVPGRHNVHNAAAAAALSLAAGLSLNDVAEGLKGFSNIKGRLNVKSGIKGATLIDDTYNANPDSMKAAVDVLARMPAPRIFVMGDMGELGEDEAAAMHAEVGAYARDQGIEAAYFVGDNSVEAAEKFGADGLWFAAKDPLIQVLRHDLPERATVLVKGSRFMEMEEVVEALEDK

SEQ ID NO: 3722 - protein, 128 aa, Neisseria meningitidis
VRKILLDTHALLWWLLDDKKLGISARKLIENPRNAIFVSAASIWEISIKQNKGLLKLPEEFFDVLQEEDFEMLPIGLFHAKQAGSLLEIHKDPFDRMLIAQTQAEGFELMTVDEYIPQYGIRVVNASS

SEQ ID NO: 3723 - protein, 141 aa, Neisseria meningitidis
MNFLGVQGELKVHELHHRTATLCFEWLGEVSAPRRKENYKDLKPNVLYDFDGSGKHFANPDARYLLPVGSSGLILKHIQIDDEDTLLRLWCARNIPMPHRLSKIPMLRQYYLSKAWHEIYAINQHLRKTKLIVDVAYGPTD

SEQ ID NO: 3724 - protein, 255 aa, Neisseria meningitidis
MQEIMQSIVFVAAAILHGITGMGFPMLGTTALAFNMPLSKVVALVALPSLLMSLLVLCSNNKKGFWQEIVYYLKTYKLLAIGSVVGSIFGVKLLLILPVSWLLLLMAIITLYYSVNGILNVCAKAKNIQVVANNKNMVLFGFLAGIIGGSTNAMSPILLIFLLSETENKNRIVKSSNLCYLLAKIVQIYMLRDQYWLLNKSEYGLIFLLSVLSVIGLYVGIRLRTKISPNFFKMLIFIVLLVLALKIGHSGLIKL

SEQ ID NO: 3725 - protein, 113 aa, Neisseria meningitidis; identical to SEQ ID NO: 1729

SEQ ID NO: 3726 - protein, 1391 aa, Neisseria meningitidis
MNLLNLFNPLQTAGMEEEFDAIKIGIASPETIRSWSYGEVKKPETINYRTFKPERDGLFCAKIFGPVKDYECLCGKYKRLKFKGVTCEKCGVEVTLSKVRRERMGHIELAAPVAHIWFLKSLPSRLGMVLDMTLRDIERVLYFEAFVVTDPGMTPLQRRQLLTEDDYYNKLDEYGDDFDAKMGAEGIRELLRTLNVAGEIEILRQELESTGSDTKIKKIAKRLKVLEAFHRSGMKLEWMIMDVLPVLPPDLRPLVPLDGGRFATSDLNDLYRRVINRNNRLKRLLELHAPDIIVRNEKRMLQEAVDSLLDNGRRGKAMTGANKRPLKSLADMIKGKGGRFRQNLLGKRVDYSGRSVITVGPYLRLHQCGLPKKMALELFKPFIFHKLEKQGLASTVKAAKKLVEQEVPEVWDILEEVIREHPIMLNRAPTLHRLGIQAFEPILIEGKAIQLHPLVCAAFNADFDGDQMAVHVPLSLEAQMEARTLMLASNNVLSPANGEPIIVPSQDIVLGLYYMTRDRINAKGEGSLFADVKEVHRAYHTKQVELGTKITVRLREWVKNEAGEFEPVVNRYETTVGRALLSEILPKGLPFEYVNKALKKKEISKLINASFRLCGLRDTVIFADHLMYTGFGFAAKGGISIAVDDMEIPKEKVALLAEANAEVKEIEDQYRQGLVTNGERYNKVVDIWGRAGDKIAKAMMDNLSKQKVIDRDGNEVDQESFNSIYMMADSGARGSAAQIKQLSGMRGLMAKPDGSIIETPITSNFREGLTVLQYFIATHGARKGLADTALKTANSGYLTRRLVDVTQDLVVVEDDCGTSDGFVMKAVVQGGDVIEALRERILGRVTASDVVDPSSGETLVEAGTLLTEKLVDMIDQSGVDEVKVRTPITCKTRHGLCAHCYGRDLARGKLVNAGEAVGVIAAQSIGEPGTQLTMRTFHIGGAASRAAAASQVEAKSNGTARFSSQMRYVANNKGELVVIGRSCEVVIHDDIGRERERHKVPYGAILLVQDGMAIKAGQTLATWDPHTRPMITEHAGMVKFENVEEGVTVAKQTDDVTGLSTLVVIDGKRRSSSASKLLRPTVKLLDENGVEICIPGTSTPVSMAFPVGAVITVREGQEIGKGDVLARIPQASSKTRDITGGLPRVAELFEARVPKDAGMLAEITGTVSFGKETKGKQRLIITDVDGVAYETLISKEKQILVHDGQVVNRGETIVDGAVDPHDILRLQGIEALARYIVQEVQEVYRLQGVKISDKHIEVIIRQMLRRVNIADAGETGFITGEQVERGDVMAANEKALEEGKEPARYENVLLGITKASLSTDSFISAASFQETTRVLTEAAIMGKQDELRGLKENVIVGRLIPAGTGLTYHRSRHQQWQEVEQETAETQVTDE

SEQ ID NO: 3727 - protein, 98 aa, Neisseria meningitidis
MRMAESKRVQRLLRVFIALDEHPIIGLSNKDLSVGLGLTPSQVSRDIDDLVASGLVIKLENGNYAYGIKTLQIAERFRQQHERLQSKIAEIGKRVDVD

SEQ ID NO: 3728 - protein, 94 aa, Neisseria meningitidis
MAFHHGRRCRITPLPETESLQESKKMNINELGARIDRPTIRELIAYATCRNRPISNSTLLRMEKDGRIPCRLKTPLTSPVWDTREVLEALGLQQ

SEQ ID NO: 3729 - protein, 301 aa, Neisseria meningitidis
VARDFYKEYNPLFIKTYQSEHPGTSVSIQQSHGGSSKQALSVANGLQADVVTMNQSSDIDLLEKKGLVEKGWQQALPDHAAPYTSTMVFLVRKNNPKQIRDWNDLAKDGVNIVIANPKTSGNGRYAFLGAYGYGLKTTNGNEQEAQKLVASILKNTPVFENGGRAATTTFTQRNIGDVLITFENEANYVSKKLTQGQFEIVYPSYTISAESPVAVVNSVVAKKGTQKTARAYLEYLWSEPAQELAASLYLRPRNPEVLARHKADFPDLDSFSPEEKFGGWDNIMKTYFADGGIFDRLTAQK

SEQ ID NO: 3730 - protein, 156 aa, Neisseria meningitidis
MPRRREVPKRDVLPDPKFGSVELTKFMNVLMIDGKKSVAERIVYGALEQIEKKTGKVAIEVFNEAIANAKPVVEVKSRRVGGANYQVPVEVRPSRRLALAMRWVRDAARKRGEKSMDLRLAGELIDASEGRGGALKKREEVHRMAEANKAFSHFRF

SEQ ID NO: 3731 - protein, 96 aa, Neisseria meningitidis
MARIGTNKGFFELLEGETLLEGLERTGHMVEYQCRSGYCGSCRVKILEGSVTYRKPPLAFLGRDEILPCCCYVEGDVRLDCGLSGEDEGLSDSLLK

SEQ ID NO: 3732 - protein, 351 aa, Neisseria meningitidis
MPSETRLPNFIRVLIFALGFIFLNACSEQTAQTVTLQGETMGTTYTVKYLSNNRDKLPSPAEIQKRIDDALKEVNRQMSTYQPDSEISRFNQHTAGKPLRISSDFAYVTAEAVRLNRLTHGALDVTVGPLVNLWGFGPGKSVTREPSPEQIKQAASYTGIDKIILKQGKDYASLSKTHPKAYLDLSSIAKGFGVDKVAGELEKYGIQNYLVEIGGELHGKGKNARGEPWRIGIEQPNIIQGGNTQIIVPLNNRSLATSGDYRIFHVDKSGKRLSHIINPNNKRPISHNLASISVVADSAMTADGLSTGLFVLGETEALKLAEREKLAVFLIVRDKGGYRTAMSSEFEKLLR

SEQ ID NO: 3733 - protein, 750 aa, Neisseria meningitidis
MGQYKKLWYLLFAVLAVCFTILGYMGSEVYKKAPPYPEQVVSASGKVLMTKDDILAGQSAWQSTGGMEVGSILGHGAYQAPDWTADWLHRELVALDLTAQQTYGKKFDEVSPEEQAVLKTRLADEYRNQSRIKEDGSVVISDTRVKAIESILPYYHGVYGDDPALQTTREHFAMKNNTLPSQEAREKLFDFFFWTSWSASTNRPDETFTYTNNWPHEPLINNVPTTENYMWSFTSVVLLLMGIGLLMWGYSFLTKHEEVEVPSEDPISKIQLTPSQKALGKYVFLTVALFVVQVLLGGLTAHYTVEGQGFYGIDEALGFEMSDWFPYALTRTWHIQSAIFWIATGFLTAGLFLAPIVNGGKDPKFQRAGVNFLYIALFIVVGGSYAGNFFALTHILPPEFNFWFGHQGYEYLDLGRFWQLLLMVGLLLWLFLMLRCTVSAFKEKGVDKNLLAIFVASMVGVGVFYAPGLFYGEKSPIAVMEYWRWWVVHLWVEGFFEVFATAAFAFVFYNMGFVRRSTATASTLAAAAIFMLGGVPGTLHHLYFSGSTSASMAIGACFSALEVVPLVLLGREAYEHWSYQHLSDWAKRLRWPLMCFVAVAFWNMIGAGVFGFLINPPISLFYIQGLNTSAVHAHAALFGVYGFLALGFVLLVARYLKPNAQFDDKLMTWGFWLLNGGLVGMIAISLLPVGVIQAYASITHGLWYARSEEFLQMEILDTLRWVRTAADLVFIGGAICVAIQATKIVFGRDK

SEQ ID NO: 3734 - protein, 130 aa, Neisseria meningitidis; identical to SEQ ID NO: 1661

SEQ ID NO: 3735 - protein, 173 aa, Neisseria meningitidis
VKDSLMDFFDFFAQGKYKKIATEQGLDRKYFIFHYIVCNLSAISSFCLMKVIHSYTILCLLIMIIGIAFGFILRNRVLSIVKNKQKFLSDMFPLEMPFFSRVYKIPILARFLNRGMKWLYLQNFFCLVMICFSISLILNEERGWMPYFICYWFGLCYPANTYYVFLSRDYKHI

SEQ ID NO: 3736 - protein, 280 aa, Neisseria meningitidis
MSGGVMPELPEVETTLRGIAPHIEGKTVEAVVLRQLKLRWQINPDLGEILSGRQVLSCGRRAKYLIVRFQTGILLIHLGMSGSLRIFTPSDGRIGRPDRHDHVDIVFSDGTVMRYRDPRKFGAILWYEGIEEHHPLLEKLGPEPLSEAFCADYLYVRLKAQKRAVKLALMDNAVVVGVGNIYANESLFRAGISPHRPANRLKKKECALLVETVKAVLRRAIETGGSTLRDFVDSDGKSGYFQQEYTVYGRHNQPCPQCGGLVVKETLGQRGTFYCPNCQK

SEQ ID NO: 3737 - protein, 242 aa, Neisseria meningitidis
MAFASLFTLPDDITAVLDDVALMTKAAAKKTAGVVGDDLAPNANRVTGVSAERELPIVWSMAKGSFSNKPVLVPAALLLSAFLPQLITPLLTAGGIYLCFDGVEKLLHKFLHRHDAHARNGGNRHRHDCFGVRNRCRHRQTRQLRHAADAPPTNLFAQFGANADCLYALLYARFERGRHACHVSCRRRTGRPQPRPSARFPARATLGRWLGGVLRQPRCRAAFRFDCLRPRLAADESFRQAL

SEQ ID NO: 3738 - protein, 463 aa, Neisseria meningitidis
MFPDFSQTLSKDRHFLRSAFKNPNKYGGLSKVEEKYQKSHEIFLKRLAALPKPEFDNTLPVHEKLEEIKKTVAEHQVTIICGETGSGKTTQLPKICLELGRGAAGLIGHTQPRRLAARSVAERIAEELKSEIGSAVGYKVRFTDHTSRDACVKLMTDGILLAETQTDRYLAAYDTIIIDEAHERSLNIDFLLGYLKQLLPRRPDLKVIITSATIDAERFSQHFNGAPVLEVSGRTYPVEILYRPLTGKDEDDAEIELTDAIVDAADELARYGEGDILVFLPGEREIREAAEALRKSTLRRNDEILPLFARLSHAEQHKIFHPSGAKRRIVLATNVAETSLTVPGIKYVIDTGLARVKRYSARAKVEQLHIEKISQAAARQRSGRCGRVSAGVCIRLFSEENFNNRPEFTDPEIARSNLAAVILRMASLKLGDVAAFPFLEMPDSRYINDGFQVLLELGAVEAV

SEQ ID NO: 3739 - protein, 163 aa, Neisseria meningitidis
MRAVIQKTVGAKVDVVSENGTETCGKIDGGFVVLLGVTHSDTEKDAHYIADKIAHLRVFEDEAGKLNLSLKDVGGAVLLVSQFTLYADAASGRRPSFSQAAPAEQAQQLYLRTAELLRGHGIHVETGRFRTHMQVSLCNDGPVTILLDSFMTRISPKMKVVPD

SEQ ID NO: 3740 - protein, 47 aa, Neisseria meningitidis
LEDVLWYKVSKCIENIYFSHTTQIQLQQFRKQKWSEKLYHFSVFIIT

SEQ ID NO: 3741 - protein, 145 aa, Neisseria meningitidis; identical to SEQ ID NO: 3684

SEQ ID NO: 3742 - protein, 166 aa, Neisseria meningitidis
MRKSRLSQYKQNKLIELFVAGVTARTAAELVGVNKNTAAYYFHRLRLLIYQNSPHLEMFDGEVEADESYFGGQRKGKRGRGAAGKVAVFGLLKRNGKVYTVTVPNTQTATLFPIIREQVKPDSIVYTDCYRSYDVLDVREFSHFSFAETSFSYQSQHTFCRTTKPY

SEQ ID NO: 3743 - protein, 79 aa, Neisseria meningitidis; identical to SEQ ID NO: 1083

SEQ ID NO: 3744 - protein, 469 aa, Neisseria meningitidis
MMKNRVTNIHFVGIGGVGMSGIAEVLHNLGFKVSGSDQARNAATEHLGSLGIQVYPGHTAEHVNGADVVVTSTAVKKENPEVVAALEQQIPVIPRALMLAELMRFRDGIAIAGTHGKTTTTSLTASILGAAGLDPTFVIGGKLNAAGTNARLGKGEYIVAEADESDASFLHLTPIMSVVTNIDEDHMDTYGHSVEKLHQAFIDFIHRMPFYGKAFLCIDSEHVRAILPKVSKPYATYGLDDTADIYATDIENVGAQMKFTVHVQMKGHEQGSFEVVLNMPGRHNVLNALAAIGVALEVGASVEAIQKGLLGFEGVGRRFQKYGDIKLPNGGTALLVDDYGHHPVEMAATLAAARGAYPEKRLVLAFQPHRYTRTRDLFEDFTKVLNTVDALVLTEVYAAGEEPIAAADSRALARAIRVLGKLEPIYCENVADLPEMLLNVLQDGDIVLNMGAGSINRVPAALLELSKQI

SEQ ID NO: 3745 - protein, 307 aa, Neisseria meningitidis
MENQRPLLGFALALLAAMTWGTLPIAVRQVLKFVDAPTLVWVRFTVAAAVLFVLLALGGRLPKRRDFSWCSFRLLLLGVAGISANFVLIAQGLHYISPTTTQVLWQISPFTMIVVGVLVFKDRMTAAQKIGLVLLLAGLLMFFNDKFGELSGLGAYAKGVLLCAAGSMAWVCYAVAQKLLSAQFGPQQILLLIYAASAAVFLPFAEPAHIGSLDGTLAWVCFAYCCLNTLIGYGSFGEALKHWEASKVSAVTTLLPVFTVIFSLLGHYVMPDTFAAPDMNGLGYVGALVVVGGAVTAAVGDRLFKRR

SEQ ID NO: 3746 - protein, 169 aa, Neisseria meningitidis
MTDTQNRVAMGYIKGVFGIKGWLKIAANTEYSDSLLDYPEWHLVKDGKTVSVTLEAGKVVNSELQVKFEGINDRDLAFSLRGYTIEIPREAFAPTEEDEYYWTDLVGMTVVNKDHTVLGKVSNLMETGANDVLMIDGEHGQILIPFVSQYIETVDTGSKIITADWGLDY

SEQ ID NO: 3747 - protein, 303 aa, Neisseria meningitidis
MVHIMFNQAAQELTTIRDVLRFAVSRFNEAGLFFGHGTDNAHDEAAYLILHTLNLPLDMLAPYLDAKLLEAEKEEVLTVIERRAVEHIPAAYLTHQAWQGEFDFYVDERVIIPRSFIYELLGDGLRPWIEYDELVHNALDLCTGSGCLAIQMAHHYPDAQIDAVDVSLDALEVAGINVEDYGLEERIRLIHTDLFEGLEGTYDLIVSNPPYVDAESVELLPEEYLHEPELALGSGADGLDATRQILLNAAKFLNPKGVLLVEIGHNRDVLEAAYPELPFTWLETSGGDGFVFLLTREQLLGEE

SEQ ID NO: 3748 - protein, 374 aa, Neisseria meningitidis
VCGLCHKTVSAPIAGASGDWKSCLKNVQWRTFLKRGSIMHIGGYFIDNPIALAPMAGITDKPFRRLCRDFGAGWAVCEMLTSDPTLRNTKKTLHRSDFADEGGIVAVQIAGSDPQQMADAARYNVSLGAQVIDINMGCPAKKVCNAQAGSALMQNEPLVAAILEAVVRAVDVPVTLKTRLGWHDDHKNLPAVARIAEDCGIAALAVHGRTRTQMYKGEAAYDLIAETKCRLNIPVWVNGDITSPQKAAAVFKQTAADGIMIGRGAQGRPWFFRDLKHYAEHGVLPPALSLAECSAAILNHVRAMHAFYGETAGVRIARKHIGWYIGEMPDGEQARREINRLDSAAAQYDMLAGYLERLAGKTDRWACGYRTNAF

SEQ ID NO: 3749 - protein, 262 aa, Neisseria meningitidis
MMENGKTVPRWRFALKSAGWHLLISLSVAGLAALLVFKVWYPYPYAELTGGLSLYQLVVAVDIVCGPLLTLILASPKKKTKARMVDFSMVGIIQLAALVYGLHSVSLARPVVEAFEKDRINVVTAAEVAVEDLHKAPEGLQSLSWFGIRRIALKEPEDADEKNKTLDLSLKGIEPSMRPDRWLPYSDKEAEEIRKHLKPLKVLADARKTTVADILKQAGLAEGEELYYLPFTSSRQKEWIVITDKEGNTKGYAPIDGFIITP

SEQ ID NO: 3750 - protein, 704 aa, Neisseria meningitidis
MFLFSDGLQSINNNNRRKRIVKNAYIPSRGIRKIPHLSTLLPEFHIYKDGKGAEAVIGWGLRPTTHKARAFAAEHQLPFIALEDGFLRSLGLGVAGYPPYSIVYDDIGIYYDTTRPSRLEQLILAADTMPSETLAQAQQTMDFILQHHLSKYNHAPELSDDHPLRSPSKPETVLIIDQTFGDMAIQYGGADASTFELMFQTALNENPQADIWVKTHPDVLCGKKQGYLTQLAQQHRVHLLAEDINPISLLQNVDKVYCVTSQMGFEALLCGKPLTTFGLPWYAGWGVSDDRHPEINRLVQTQRRATRNLLQLFAAAYLQYSRYLNPNTGEAGSLFDVIDYLATVKRKNDKLRGELYCVGMSLWKRAVAKPFFNVPSCRLKFISSTQKLARVKLSDDARILAWGNGKEAIVRFAEQHHIPLLRMEDGFIRSVGLGSNLVPPLSLVTDDMSIYFNAETPSRLEYILQNQNFDDQDFQTALKLQKMLTENHISKYNVGSSDFTAPSTDKTVILVPGQVEDDASIRYGSPQIYRNLDLLRTVRERNPNAYIIYKPHPDVVSGNRIGHISPEDAARYADQTAEQADILTCLQYADEIHTMTSLTGFEALLRGKKVSCYGLPFYAGWGLTQDLLPIPRRSRRLELWQLIAGTLIHYPDYIHPETHQAINAETAAQILIRQKNMQKNNNGLHRGCFAKKLGKIKQLYRSFK

SEQ ID NO: 3751 - protein, 591 aa, Neisseria meningitidis
VAKTYLLTALIMSMTISGCQVIHANQGKVNTHSAVITGADAHTPEHATGLTEQKQVIASDFMVASANPLATQAGYDILKQGGSAADAMVAVQTTLSLVEPQSSGLGGGAFVLYWDNTAKTLTTFDGRETAPMRATPELFLDKDGQPLKFMEAVVGGRSVGTPAIPKLMETIHQRYGVLPWGKLFDTPIRLAKQGFEVSPRLAISVEQNQQHLARYPKTAAYFLPNGVPLQAGSLLKNLEFADSVQALAAQGAKALHTGKYAQNIVSVVQNAKDNPGQLSLQDLSDYQVVERPPVCVTYRIYEVCGMGAPSSGGIAVGQILGILNEFSPNQVGYDAEGLRLLGDASRLAFADRDVYLGDPDFVPVPIRQLISKDYLKHRSRLLEQSDKALPSVSAGDFIHEWVSSQAIELPSTSHISIVDKAGNVLSMTTSIENAFGSTLMANGYLLNNELTDFSFEPIKQGKQVANRVEPGKRPRSSMAPTIVFKAGKPYMAIGSPGGSRIIGYVAKTIVAHSDWNMDIQDAISAPNLLNRFGSYELETGTTALQWQQALNDLGYKTDVRELNSGVQAIIIEPSRLVGGADPRREGRVMGD

SEQ ID NO: 3752 - protein, 45 aa, Neisseria meningitidis
LIISHFTPFLKFTPFLKNRQEQLSIFKIYLKQKYTDISGCLKHKK

SEQ ID NO: 3753 - protein, 281 aa, Neisseria meningitidis
MLSYRHAFHAGNHADMLKHFTLFLVLQYFNRKDKPYWYIDTHGGAGVYNLEGSEAQKVGEYRQGIALLRQAKNLPTELNGFIAHIQKILPSPKLYCGSPWLAQSLTRVGDKLRLFELHPTDFVHLQNNMGEAGLGKRGQVLREDGYKELISLLPPPPRRATVLIDPPYEEKQDYRRVTETLKAALKRFESGCYLIWYPCLSREESRKLPEELKKLLPDNYLHAELHVHAPKADGFGMHGSGMFVINPPYLLAEQLAANLPALTRLLAQDEGARYLLDSKIR

SEQ ID NO: 3754 - protein, 122 aa, Neisseria meningitidis
MRHRNGNRKLNRTSSHRAAMLRNMANSLLTHETIVTTLPKAKELRRVVEPLITLGKKPSLANRRLAFDRTRDRDVVVKLFGDLGPRFTARNGGYVRVLKYGFRKGDNAPLALVELVDKPAAE

SEQ ID NO: 3755 - protein, 248 aa, Neisseria meningitidis
MDFRFDIIYEYRWMFLYGALTTLGLTVVATAGGSVLGLLLALARLIHLEKAGAPMRVLAWALRKVSLLYVTLFRGTPLFVQIVIWAYVWFPFFVHPSDGILVSGEAAIALRRGYGPLIAGSLALIANSGAYICEIFRAGIQSIDKGQMEAARSLGLTYPQAMRYVILPQALRRMLPPLASEFITLLKDSSLLSVIAVAELAYVQNTITGRYSVYEEPLYTVALIYLLMTTFLGWIFLRLEKRYNPQHR

SEQ ID NO: 3756 - protein, 613 aa, Neisseria meningitidis
MQTNYLSETDSIMKKLICLFAVFLMLCGRAFALDANDLLPPEKAFVPELAVADDGVNVRFRIADGYYMYQAKIVGKTDPADLLGQPSFSKGEEKEDEFFGRQTVYHHEAQVAFPYAKAVGEPYKLVLTYQGCAEVGVCYPPVDTEFDISGNGTYHPQTDEPASAKDRFLQPSSQNGSGALPPPKGDEGGDSRFKLSWDTLNANLLAFFLAGLGLSFTACMYPLLPIVSSIVVGDKKAGKARAFVLSVVYVQGLALTYTLVGIVAGLTGALLTVWLQQAWVVLAASALMVVLALSMFGLFNIQLPNAVQSYFQNQSSRLSGGKIVSVFIMGILSALIVGPCVAPPLAFALGYIGQTGDAVLGGLALYTLALGTGVPLIAIGTFGGHILPKAGDWMNAVKYAFGFILLAVAVYLATPHLPYYLVVALYTLLMLVPACMLLVNGRRQKRRPKAVAFALGGILLIGGAWFGWQGANGKTTALHHFLTLNPPAEAGKSSEHGKMFADTAALKAAMDTALKEHPDKPVVLDFYADWCISCKEMAAYTLNQPEVHQAVDMERFFQIDVTANKPEHQALLKEYGLFGPPGVFVVRSDGSRSEPLLGFVKADKFIEWYEQNR

SEQ ID NO: 3757 - protein, 150 aa, Neisseria meningitidis
MFMAIANNKKAFHDFFIEDRIEAGLVLEGWEVKAIRAARVQLKESYIYWKKDAFYLVGCHITALPTASTHIKPDAVRPRKLLLNQSEINKLIGKTERAGYTIVPLDLHFSRGKIKMEIGLAKGKKQHDKRQSMKEADWKREKQRLIKHTR

SEQ ID NO: 3758 - protein, 105 aa, Neisseria meningitidis
MGNKLTLPAELPDEQDLRAVLAYNMRLFRVNKGWSQEELARQCGLDRTYVSAVERKRWNIALSNIEKMAAALGVAAYQLLLPPQERLKLMTNSADTRQMPSESGI

SEQ ID NO: 3759 - protein, 328 aa, Neisseria meningitidis
VSGAESYRHITVLLNEAVDALAVREDGVYVDGTFGRGGHSRLILSRLGDAGRLIVFDKDPQAIAVAEELARSDKRVGVVHGGFASFQTALDGLGIGKVDGALFDLGISSPQIDDGSRGFSFRFDAPLDMRMDTTRGMSAAEWIAVASEQDLHEVIKNYGEERFSRQIARAIVAQRAESPIDTTRKLAQIVAQNVRTRERGQDPATRTFQAVRIFINRELEEVGAVLPQVMCRLKEGGRLAVIAFHSLEDRIVKQFVKKYSQHAPLPRWAAVREADLPELPLKIVGRALKPGEAEIAANPRARSAVLRVAERTAGSIPEQSQRKTSEWQ

SEQ ID NO: 3760 - protein, 360 aa, Neisseria meningitidis
MPSEAASDGILPLYPTRTIFQKPIMLPFLPEPSLSYTQQNRTAVLLLNLGTPDAPTAQAVRPYLKSFLTDRRVVELPKWLWYPILHGLVLTLRPKKSAHAYEKIWFKEGSPLEVYTARQAAALAERMPDLIVRHAMTYGNPSVADVLSELKAQGAGRLLVIPMYPQYAASSSGAAVDKVCEQLLLQRNQMSVRTVSRFYDDTGYIDAMKNHILRYWAEHGRGKKLMLSFHGVPQKHYDLGDPYPDECRHTAKLLAEALELTEDQYVVSFQSQFGRAKWVTPSTQDLFGKLPKQGVTELDVFCPGFLADCLETLEEIALMGREQFYEAGGKSYRYIPCLNDNPDWIDALVALAEENLGGWR

SEQ ID NO: 3761 - protein, 436 aa, Neisseria meningitidis
MSVTVETLENLERKVVLSLPWSEINAETDKKLKQTQRRAKIDGFRPGKAPLKMIAQMYGASAQNDVINELVQRRFHDVAVAQELKVAGFPRFEGVEEQDDKESFKVAAIFEVFPEVVIGDLSAQEVEKVTASVGDAEVDQTVEILRKQRTRFNHVEREARNGDRVIIDFEGKIDGEPFAGGASKNYAFVLGAGQMLPEFEAGVVGMKAGESKDVTVNFPEEYHGKDVAGKTAVFTITLNNVSEATLPEVDADFAKALGIADGDVAKMREEVQKNVSREVERRVNEQTKESVMNALLKAVELKAPVALVNEEAARLANEMKQNFVNQGMADAANLDLPLDIFKEQAERRVSLGLILAKLVDENKLEPTEEQVKAVVANFAESYEDPQEVIDWYYAEPSRLQAPTSLAIESNVVDFVLGKAKVNEKALSFDEVMGAQA

SEQ ID NO: 3762 - protein, 123 aa, Neisseria meningitidis; identical to SEQ ID NO: 616

SEQ ID NO: 3763 - protein, 358 aa, Neisseria meningitidis; identical to SEQ ID NO: 3679

SEQ ID NO: 3764 - protein, 163 aa, Neisseria meningitidis
LKNHPPVAAFPPQGEMAHFMGLALEQAKLSALMGEIPVGAVIVSDGKIIASAHNTCIADCNVSRHAEINALAQAGSEMQNYRLDGCDIYITLEPCAMCASALIQARIRRVIYGAAEPKTGAAGSIVNLFADKRLNTHTAIRGGILQEECRAVLSRFFQNKRKG

SEQ ID NO: 3765 - protein, 181 aa, Neisseria meningitidis
MKHYALLISFLALSACSQGSEDLNEWMAQTRREAKAEIIPFQAPTLPVAPVYSPPQLTGPNAFDFRRMETDKKGENAPDTKRIKETLEKFSLENMRYVGILKSGQKVSGFIEAEGYVYTVGVGNYLGQNYGRIESITDDSIVLNELIEDSTGNWVSRKAELLLNSSDKNTEQAAAPAAEQN

SEQ ID NO: 3766 - protein, 182 aa, Neisseria meningitidis
LNLTEGDTVLDREGYRPNVGIILTNNRDEVFWGKRVREHSWQFPQGGIKPGESPETAMYRELYEEVGLLSQHVKIVGRTRDWLRYDVPNNWVRREWRGSYRGQKQIWYLLRLTGRDCDVNLRATRHPEFDGWRWHQYWAPVDEVIDFKRDVYLGALKELSSRFLRGMESYEDFAARQLSGNR

SEQ ID NO: 3767 - protein, 166 aa, Neisseria meningitidis; identical to SEQ ID NO: 1704

SEQ ID NO: 3768 - protein, 281 aa, Neisseria meningitidis
MNKFSQSGKGLSGFFFGLILATVIIAGILFYLNQSGQNAFKIPVPSKQPAETEILKPKNQPKEDIQPEPADQNALSEPDAAKEAEQSDAEKAADKADEVEEKADEPEREKSDGQAVRKKALTEEREQTVGEKAQKKDAETVKKQAVKPSKETEKKASKEEKKAEKEKVAPKPTPEQILNSGSIEKARSAAAKEVQKMKTPDKAEATHYLQMGAYADRRSAEGQRAKLAILGISSKVVGYQAGHKTLYRVQSGNMSADAVKKMQDELKKHEVASLIRSIESK

SEQ ID NO: 3769 - protein, 114 aa, Neisseria meningitidis; identical to SEQ ID NO: 53

SEQ ID NO: 3770 - protein, 134 aa, Neisseria meningitidis
MRKSRLSRYKQNKLIELFVAGVTARTAAELVGVNKSTAAYYFHRLRLLIYQNSPHLEMFDGKVEADESYFAERQNHINGIGNFWNRAKRHLRKFDGIPKAHFELYLKGYERRFNNSEIKVQISILKQLVKSSLS

SEQ ID NO: 3771 - protein, 217 aa, Neisseria meningitidis
MGLGMEIGKLIVAFLVLINPFSALSLYLDLTNGHSTKERRKVARTAAVAVFAVIAVFALIGGTLLKVLGISVGSFQVGGGILVLLIAISMMNGNDNPAKQNLGAQPETGQARPARNAGAIAVVPIAIPITIGPGGISTVIIYASAAKTYSDIALIIVAGLVVSAICYAILIVAGKVSRLLGATGLTILNRIMGMMLAAVSVEIIVSGLKTIFPQLAG

SEQ ID NO: 3772 - protein, 144 aa, Neisseria meningitidis; identical to SEQ ID NO: 6

SEQ ID NO: 3773 - protein, 93 aa, Neisseria meningitidis; identical to SEQ ID NO: 3660

SEQ ID NO: 3774 - protein, 150 aa, Neisseria meningitidis
LVMYVVKSANDGGNSLFLSSSDIVNQLSKTETGKKHLKTLTGNLYPFKAPASFDKKQGVRWGNILSVNTQMIRFRSDFIYKGIEENRNKVSKEMVLALDYLVKIIKNASDIQEFSAQDDGLIIIDNVNGLHAGTDYTDKNRHYIRARITV

SEQ ID NO: 3775 - protein, 636 aa, Neisseria meningitidis; identical to SEQ ID NO: 3680

SEQ ID NO: 3776 - protein, 384 aa, Neisseria meningitidis
LLEQDMSQNASVGIVTPQKIPFEMPLVLENGKTLPRFDLMIETYGELNAEKNNAVLICHALSGNHHVAGRHSAEDKYTGWWDNMVGPGKPIDTERFFVVGLNNLGGCDGSSGPLSINPETGREYGADFPVVTVKDWVKSQAALADYLGIGQWAAVVGGSLGGMQALQWAISYPERVRHALVIASAPKLSTQNIAFNDVARQAILTDPDFNEGHYRSHNTVPARGLRIARMMGHITYLAEDGLGKKFGRDLRSNGYQYGYGVEFEVESYLRYQGDKFVGRFDANTYLLMTKALDYFDPAADFGNSLTRAVQDVQAKFFVASFSTDWRFAPERSHELVKALIAAQKSVQYIEVKSAHGHDAFLMEDEAYMRAVAAYMNNVYKECQQ

SEQ ID NO: 3777 - protein, 206 aa, Neisseria meningitidis; identical to SEQ ID NO: 1193

SEQ ID NO: 3778 - protein, 98 aa, Neisseria meningitidis; identical to SEQ ID NO: 1735

SEQ ID NO: 3779 - protein, 193 aa, Neisseria meningitidis; identical to SEQ ID NO: 640

SEQ ID NO: 3780 - protein, 280 aa, Neisseria meningitidis; identical to SEQ ID NO: 3681

SEQ ID NO: 3781 - protein, 180 aa, Neisseria meningitidis
VQSWKERRDFNIVKQDLDFSCGAASVATLLNNFYGQTLTEEEVLKKLDKEQMRASFEDMRRIMPDLGFEAKGYALSFEQLAQLKIPVIVYLKYRKDDHFSVLRGIDGNTVLLADPSLGHVSMSRAQFLDAWQTREGNLAGKILAVVPKKAETISNKLFFTHHPKRQTEFAVGQIRQARAE

SEQ ID NO: 3782 - protein, 431 aa, Neisseria meningitidis
VIAMIYIVLFLAAVLAVVAYNMYQENQYRKKVRDQFGHSDKDALLNNKTSHVRDGKPSGGSVMMPKPQPAVKKTAKLQDPAMRNLQEQDAVYIAKQKQAKASPFKTEIETALEESGIIGNSAHTVSEPQTGHSAPKPADAPAKPAPVPQTPAKPLITLKELSKVELPWFDVRFDFISYIALTEAKELHALPRLSNRCRYQIVGCTMDDHFQIAEPIPGIRYQAFIVGIQAVSRNGLASQEELSAFNRQVDAFAQSMGGQTLHTDLAAFIEVASALDAFCARVDQTIAIHLVSPTSISGVELRSAVTGVGFVLEDDGAFHYTDTSGSTMFSICSLNNEPFTNALLDNQSYKGFSMLLDIPHSPAGEKTFDDLFMDLAVRLSGQLNLNLVNDKMEEVSTQWLKDVRTYVLARQSEMLKVGIEPGGKTALRLFS

SEQ ID NO: 3783 - protein, 113 aa, Neisseria meningitidis; identical to SEQ ID NO: 1729

SEQ ID NO: 3784 - protein, 144 aa, Neisseria meningitidis
MCGLWLLRALTAKLPQQRYAALFITLFFAAVLVFRRHDSMYWYPVLVNLMMLAVFGGSLFAGQTVIEKLARLQQPDLPEKAVRYTRRVTQVWCVFFIINGTLTALLARLGRYDWWAVYTGVIAYVLMGMLFAGEWLYRKLVLKV

SEQ ID NO: 3785 - protein, 118 aa, Neisseria meningitidis
MNEHNLLIFCLKDNVSISEYTEMIDWAYKNIQSETVVEITESQIIEYQNRGLWRLVSEITDNWLFGPSEGDWLIDKESILAVKEKLQNSDFSTEPLVKNIIHVLEYAIKNEKTVIFHF

SEQ ID NO: 3786 - protein, 66 aa, Neisseria meningitidis; identical to SEQ ID NO: 587

SEQ ID NO: 3787 - protein, 103 aa, Neisseria meningitidis
MLAILLSAILGLVSTTAAAGTSEPAHRDTKHIRKANKQMLHPECRKYLERRAAWYRSQGNVQELRENKKARKAFRSLPYAEQKIQCRAAYEAFDDFDGGSFRR

SEQ ID NO: 3788 - protein, 71 aa, Neisseria meningitidis; identical to SEQ ID NO: 1785

SEQ ID NO: 3789 - protein, 132 aa, Neisseria meningitidis
  misc_feature 2, 3, 4: 'Xaa' is any amino acid
VXXXRRGKKMLFEENPIDGHFTEYSHRSGEIRLAGQSFHKPVLVHKDSVCLSQCRTLSDLTPENLLSDIKPVDYPEILIIGTGAAQEFIHPKIMADFSRIGISVECMNTDSAFRTLVFLHSEGRRAWAWLQP

SEQ ID NO: 3790 - protein, 131 aa, Neisseria meningitidis
MMYSFEANANAVKISETVSVDTGQGAKIHKFVPKNSKTYSSDLIKTVDLTHIPTGAKARINAKITASISRAGVLAGGGKLARLGAKFSTRAVPYVGTALLAHDVYETFKEDIQARGYQYDTETDKFVKVSG

SEQ ID NO: 3791 - protein, 135 aa, Neisseria meningitidis
MEIRAIKYTAMAALLAFTVAGCQLAGWYECSSLSGWCKPRKPAAIDFWDIGGESPPSLEDYEIPLSDGNRSVRAKEYESAQQSYFYRKIGKFEACGLDWRTRDGKPLIETFKQEGFDCLKKQGLRRNGLSERVRW

SEQ ID NO: 3792 - protein, 105 aa, Neisseria meningitidis
MAEKLAMSAGGYAKIERGETQLNIPRLEQLAQIFKIDMWDLLKSGGGGMVFQINEGDSGGDIALYASGDVSMKIEFLKMELKHCKEMLEQKDKEIELLRKLTETV

SEQ ID NO: 3793 - protein, 247 aa, Neisseria meningitidis
MPDAVKKVYLIHGWGANRHVFDDLMPRLPATWAVSAVDLPGHGDAPFVQPFDIEAAADAVAAQIDTPADILGWSLGGLVALYLAARHPDKVRSLCLTASFARLTAAEDYPEGLAAPALGKMVGAFRTDYAKHIKQFLQLQLLHTPDAAEIIGRILPDLARCGTPSALQEALDAAERADARHLLDKIDVPVLLVFGGKDAITPPRMGEYLHRHLKGSRLVVMEKAAHAPFLSHAEAFAALYRDFVEGV

SEQ ID NO: 3794 - protein, 326 aa, Neisseria meningitidis
MAMAGNEKYLDWAREVLHTEAEGLREIAADLDENFALAADALLHCKGRVVITGMGKSGHIGRKMAATMASTGTPAFFVHPAEAAHGDLGMIVDNDVVVAISNSGESDEIAAIIPALKRKNITFVCITARPDSTMARHADIHITASVSKEACPLGLAPTTSTTAVMALGDALAVVLLRARAFTPDDFALSHPAGSLGKRLLLRVADIMHKGGGLPAVRLGTPLKEAIVSMSEKGLGMLAVTDGQGRLKGVFTDGDLRRLFQECDNFTGLSIDEVMHTHPKTIAAERLATEALKVMQANHVNGLLVTDADGVLIGALNMHDLLAARIV

SEQ ID NO: 3795 - protein, 442 aa, Neisseria meningitidis
MNTTSQFTSNFWNIYIAVIVLLSFIALAWLLLSQNVVKRPKKGEEVQTTGHEWDGIAEYDNPLPRWWFWLCVLTWLFGIGYLVMYPGVGDYKGLLKWTSHNQYEKEVKKADEQYGKLYAKFADMPIEKVAKDPQAKQIAQNLFNTYCIQCHGSDAKGSKGFPNLTDSDWLWGGDPDKIHETIEKGRVATMPAWGPALGEEGVKDVAHYVMSLSKPEGQYDEERAARGQALFSGPPANCFTCHGDKGQGIQGLGPNLTDDVWLWGGTQKSIIETITNGRSSQMPAWGHFLDKDKLHIMTAYVWGLSDKDGKAPVKKAEPAPTPAPAAEPAASAPAEAAQAASEAKPAAAEPKAEEKAAPAAKADGKVYETVCAACHGNAIPGIPHVGIKADWADRIKKGKDTLHKHAIEGFNTMPAKGGRGDLSDDEVKAAVDYMVNQSGGKF

SEQ ID NO: 3796 - protein, 252 aa, Neisseria meningitidis
  misc_feature 246, 247: 'Xaa' is any amino acid
MTFDKWLGLSKLPKNEARMLLQYVSEYTRVQLLTRGGEEMPDEVRQRADRLAQRRLNGEPVAYILGVREFYGRRFTVNPSVLIPRPETEHLVEAVLARLPENGRVWDLGTGSGAVAVTVALERPDAFVRASDISPPALETARKNAADLGARVEFAHGSWFDTDMPSEGKWDIIVSNPPYIENGDKHLSQGDLRFEPQIALTDFSDGLSCIRTLAQGAPDRLAEGGFLLLEHGFDQGAAVRGVLAEXXTHLIN

SEQ ID NO: 3797 - protein, 124 aa, Neisseria meningitidis
MKLLTTAILSSAIALSSMAAAAGTNNPTVAKKTVSYVCQQGKKVKVTYGFNKQGLTTYASAVINGKRVQMPVNLDKSDNVETFYGKEGGYVLGTGVMDGKSYRKQPIMITAPDNQIVFKDCSPR

SEQ ID NO: 3798 - protein, 207 aa, Neisseria meningitidis
MKAAAAFAAGLDAQAVRIVIDIYGSLALTGYGHGTFDALMLGLEGSLPHDIPLAGIPERLERIRTQHILRLNGQEIRFIPDRDLNILGNQVLPKHPNGLRFTAYASDGTVLNEQVYYSVGGGFVVTEEDFDRQAETEKAVPYPYTSCAELLARCRLNRLDISEVVLANEAALAGCGEAEIRRRAAAVAEVMEGCIKRGLGADGELPG

SEQ ID NO: 3799 - protein, 99 aa, Neisseria meningitidis; identical to SEQ ID NO: 1940

SEQ ID NO: 3800 - protein, 288 aa, Neisseria meningitidis; identical to SEQ ID NO: 3535

SEQ ID NO: 3801 - protein, 288 aa, Neisseria meningitidis; identical to SEQ ID NO: 3535

SEQ ID NO: 3802 - protein, 312 aa, Neisseria meningitidis
MHQYYDAVILSVGNGLLKRFFKQNAQLNIASRPLIITLFPGVVFGDQASILSRMGADIVLYNNKHDFRIAEEYKKQYKLSCQNILYGYPIFRHASKGRHGEKIYFIDQVKIPFKKEERIYTLKKLIALAEKYPEKEFTILLRVADKDITVHQDKHSYIELAKQFQLPSNLTIERKSTAQAFQEMGYCLSYSSTMLFEAECKGIPVGVVADLGFSESYANQHFLGSGVLVYFDQIDFTSPKIADPDWLDCYATKKVITTDEFNKLLKQVVPLQHDYQEYLSAVNSIESTKTIFLRKFKKLIRDPKKFFMILNG

SEQ ID NO: 3803 - protein, 308 aa, Neisseria meningitidis
MKVIFAGTPDFAAAALRAVAAAGFEIPLVLTQPDRPKGRGMQLTAPPVKQAALELGLRVEQPEKLRNNAEALQMLKEVEADVMVVAAYGLILPQDVLDVPKHGCLNIHASLLPRWRGAAPIQRAIEAGDAETGVCIMQMDAGLDTGDVVSEHRYAIQPTDTANEVHDALMEIGAAAVVADLQQLQSKGRLNAVKQPEEGVTYAQKLRKEEARIDWSESAAVIERKIRAFNPVPAAWVEYQGKPMKIRRAEVVAQQGAAGEVLSCSADGLVVACGENALKITELQPAGGRRMNIAAFAAGRHIEAGTKL

SEQ ID NO: 3804 - protein, 126 aa, Neisseria meningitidis
  misc_feature 2, 3: 'Xaa' is any amino acid
VXXPPVGPALGQRGLNIMEFCKAFNAATQGMEPGLPIPVVITAFADKSFTFVMKTPPASILLKKAAGLQKGSSNPLTNKVGKLTRAQLEEIAKTKEPDLTAADLDAAVRTIAGSARSMGLDVEGVV

SEQ ID NO: 3805 - protein, 106 aa, Neisseria meningitidis
MGMNQQRLTQVILAPIVSEKSNVLAEKRNQMTFKVLANAAKPEIKAAVELLFGVQVASVTTVTTKGKTKRFGRTLGRRSDVKKAYVSLAAGQELDLEAAAAAADKE

SEQ ID NO: 3806 - protein, 160 aa, Neisseria meningitidis
MKKYLPLLRFLLIACISAFLAWKGQPFVHGNEKAVDLIINVFAILAGFLIAIMTLFSDMRFDEDANWRQIQIREGVQEQRYIKHSLLFYTYLAVLVCVFIVILLAHKEEYKNGPAIFWLERSYLFLACISIFYSVFLPGNLIKSRKEEFKKLMEKKKPKI

SEQ ID NO: 3807 - protein, 919 aa, Neisseria meningitidis
MKRMLFNATQAEELRVAIVDGQNLLDLDIETLGKEQRKGNIYKGIITRIEPSLEACFVDYGTDRHGFLPFKEVSRSYFQDYEGGRARIQDVLKEGMEVIVQVEKDERGNKGAALTTFISLAGRYLVLMPNNPRGGGVSRRIEGEERQELKAAMAQLDIPNGMSIIARTAGIGRSAEELEWDLNYLKQLWQAIEEAGKAHHDPYLLFMESSLLIRAIRDYFRPDIGEILVDNQEVYDQVAEFMSYVMPGNIGRLKLYEDHTPLFSRFQIEHQIESAFSRSVSLPSGGAIVIDHTEALVSIDVNSARATRGADIEDTAFKTNMEAAEEVARQMRLRDLGGLVVIDFIDMENPKHQRDVENVLRDALKKDRARVQMGKLSRFGLLELSRQRLKPALGESSHVACPRCAGTGVIRGIESTALHVLRIIQEEAMKDNTGEVRAQVPVDVATFLLNEKRAELFAMEERLDVNVVLIPNIHLENPHYEINRIRTDDVEEDGEPSYKRVAEPEEDESAKPFGGEKAKAARPEPAVKGVRHTSPAPTAAPEKKTSWWDSFKAWLKRIFGGSETQAAPAAETSEKRSTANRSGSRANNRRQNPRRSKREGSKVEVREVAGKTAGQEARADKAETRNNGNRRRNERGDRAAGRADEAEIQDRNIQPAATVADAAPSETEVQTGKRRRNGSRSERGQTAPETATVAETTVQTAENTPSEPHTAEDKGSKPKSERNRRERDSRDAKERRERNNQRDRRQNGKKRNIPSAAKIEQYLNIHDTADKVRSAAAHVFGETDANAPITVSIADPVAERDLPTASPAVSNGDAPVYDAAEKIRRATAAILPEGATPKAEAQEMPSETATFTAAAEQARETAQTGGLVLIETDPAALKAWAAQPEVQAGRGLRRSEQPKPSEVATVPAEEMIQVETRQG

SEQ ID NO: 3808 - protein, 307 aa, Neisseria meningitidis
VQSKQIKGFKLWKSYDEQLEILRSRGLQIDDEKKALGYLRTIGYYRLSGYFYSFRQFAPESSKSRLDEFITDTRFEDVKSLYMFDKKLRQLALDALERIEVALRVNIAHTLGRHDPLAYKDSKYSATGFDHAEWLDRYNRLVEREKKTGFVKHHLEHYADLPVWVACEVWDFGTMSMLYKGMLNKDKDSIAKLYRLKDGKHLQTHLHAFNFIRNVSAHHSRLWNRDITFKASLKGLSDAEWKSLPINKPFVYFCLMKRMLDVICPRTEWGNRLLALLDEFPDVANEAVSLRDMGLENNPRDWRLWQG

SEQ ID NO: 3809 - protein, 290 aa, Neisseria meningitidis
MEIWNMLDTWLGAVPIRAEAVESVAVVAALLLARALLLNIHFKRHPDFGIESKRRFLVASRNITLLLVLFSLAFIWSAQIQTLALSMFAVAAAVVVATKELIMCLSGSILRSATQQYSVGDYIEINGLRGRVVDINLLNTLMMQVGPNPLVGQLAGTTVSFPNSLLLSHPVRRDNILGDYVIHTVEIPVPIHLDSDEAVCRLKAVLEPLCAPYIPAIQRHLENVQAEKLFITPAARPRVTRVPYDDKAYRIIVRFASPVSKRLEIQQAVMDEFLRVQYRLLNYPAGSETL

SEQ ID NO: 3810 - protein, 483 aa, Neisseria meningitidis
MLSFLSGLLSLGIEVLWVRMFSFAAQSVPQAFSFTLACFLTGIAVGAYFGKRICRSRFVDIPFIGQCFLWAGIADFLILGAAWLLTGFSGFVHHAGIFITLSAVVRGLIFPLVHHVGTDGNKSGRQVSNVYFANVAGSALGPVLIGFVILDFLSTQQIYLLICLISAAVPLFCTLFQKSLRLNAVSVAVSLMFGILMFLLPDSVFQNIADRPDRLIENKHGIVAVYHRDGDKVVYGANVYDGAYNTDVFNSVNGIERAYLLPSLKFGIRRIFVVGLSTGSWARVLSAIPEMQSMIVAEINPAYRSLIADEPQIAPLLQDKRVEIVLDDGRKWLRRHPDEKFDLILMNTTWYWRAYSTNLLSAEFLKQVQSHLTPDGIVMFNTTHSPHAFATAVHSIPYAYRYGHMVVGSATPVVFPNKELLKQRLSRLIWPESGRHVFDSSTVDAAAQKVVSRMLIQMTEPSAGAEVITDDNMIVEYKYGRGI

SEQ ID NO: 3811 - protein, 483 aa, Neisseria meningitidis; identical to SEQ ID NO: 3810

SEQ ID NO: 3812 - protein, 674 aa, Neisseria meningitidis
MNDMTLYLIIALVPLAGSLIAGLFGNKIGRAGAHTVTILGVAVSAVLSAYVLWGFIDGSRAKFDENVYTWLTMGGLDFSVGFLVDTMTAMMMVVVTGVSLMVHIYTIGYMHDEKVGYQRFFSYISLFTFSMLMLIMSNNFIQLFFGWEAVGLVSYLLIGFYFKRPSATFANLKAFLINRVGDFGFLLGIGLVLAYFGGSLRYQDVFAYLPNVQTATIQLFPSVEWSLITVTCLLLFVGAMGKSAQFPLHVWLPDSMEGPTPISALIHAATMVTAGLFMVSRMSPIYEMSSTALSVIMVIGAITALFMGFLGVIQNDIKRVVAYSTLSQLGYMTVALGASAYSVAMFHVMTHAFFKALLFLAAGSAIIGMHHDQDMRHMGNLKKYMPVTWLTMLIGNLSLIGTPFFSGFYSKDSIIEAAKYSTLPGSGFAYFAVLASVFVTAFYAFRQYFMVFHGEEKWRSLPEHHDDHHGEEHHGLGKNDNPHESPLVVTLPLILLAIPSVIIGYVAIEPMLYGDFFKDVIFVNTDAHPTMHIMKEEFHGALAMVSHSLHSPVLYLAIAGVLSAWLLYVKLPHLPAKIAQAFRPIYVLFESKYYLDALYFNVFAKGTRALGTFFWKVGDTAIIDNGIVNGSAKLVGVIAAQVRKAQTGFIYTYAAAMVFGVLVLLGMTFWGLFR

SEQ ID NO: 3813 - protein, 674 aa, Neisseria meningitidis; identical to SEQ ID NO: 3812

SEQ ID NO: 3814 - protein, 363 aa, Neisseria meningitidis
MMKIKALMIAAALLAAADVHAAPQKAKTASAKAAKAAKAAKAAKVAKVAKVAKVAKVAKVAKVAKVAATAQKEAAPAQQQGGIRFSDGIAAVADNEVITRRRLAEAVAEAKANLPKDAQISESELSRQVLMQLVNQSLIVQAGKRRNIQASEAEIDAVVAKNPALKNLSPAQRRDFADNIIAEKVRQQAVMQNSRVSEAEIDAFLEQAQKQGITLPEGAPLRQYRAQHILIKADSENAAVGAESTIRKIYGEARSGTDFSSLARQYSQDASAGNGGDLGWFADGVMVPAFEEAVHALKPGQVGAPVRTQFGWHIIKLNEVRDAGTPQERIRNSVRQYIFQQKAEQATVNLLRDLHSGAYVDIR

SEQ ID NO: 3815 - protein, 792 aa, Neisseria meningitidis
VLALGLCFGTHCAAADAVAAEETDNPTAGGSVRSVSEPIQPTSLSLGSTCLFCSNESGSPERTEAAVRGSGEASIPEDYTRIVADKVEGQSQVQVRAEGNVVVERNRTTLNTDWADYDQSGDTVTAGDRFALQQDGTLIRGETLTYNLEQQTGEAHNVRMETEQGGRRLQSVSRTAEMLGEGHYKLTETQFNTCSAGDAGWYVKAASVEADREKGIGVAKHAAFVFGGVPLFYTPWADFPLDGNRKSGLLVPSLSAGSDGVSLSVPYYFNLAPNLDATFAPGVIGERGAVFDGQVRYLRPDYAGQSDLTWLPHDKKSGRNNRYQAKWQHRHDISDTLQAGVDFNQVSDSGYYRDFYGNKEIAGNVNLNRRVWLDYGGRAAGGSLNAGLSVLKYQTLANQSGYKDKPYALMPRLSADWRKNTGRAQIGVSAQFTRFSHDSRQDGSRLVVYPDIKWDFSNSWGYVRPKLGLHATYYSLNRFGSQEARRVSRTLPIVNIDSGATFERNTRMFGGGVLQTLEPRLFYNYIPAKSQNDLPNFDSSESSFGYGQLFRENLYYGNDRINTANSLSAAVQSRILDGATGEERFRAGIGQKFYFKNDAVMLDGSVGKKPRSRSDWVAFASSGIGSRFILDSSIHYNQNDKRAENYAVGASYRPAQGKVLNARYKYGRNEKIYLKSDGSYFYDKLSQLDLSAQWPLTRNLSAVVRYNYGFEAKKPIEVLAGAEYKSSCGCWGAGVYAQRYVTGENTYKNAVFFSLQLKDLSSVGRNPADRMDVAVPGYIPAHSLSAGRNKRP

SEQ ID NO: 3816 - protein, 149 aa, Neisseria meningitidis
MTDNRGFTLVELISVVLILSVLALIVYPSYRNYIEKAKINAVRAALLENAHFMEKFYLQNGRFKQTSTKWPSLPIKEAEGFCIRLNGIARGALDSKFMLKAVAIDKDKNPFIIKMNENLVTFICKKSASSCSDGLDYFKGNDKDCKLLK

SEQ ID NO: 3817 - protein, 312 aa, Neisseria meningitidis; identical to SEQ ID NO: 3802

SEQ ID NO: 3818 - protein, 312 aa, Neisseria meningitidis; identical to SEQ ID NO: 3802

SEQ ID NO: 3819 - protein, 316 aa, Neisseria meningitidis
MTKQEKQEDREKKYKIISLFSGCGGMDLGFLGGFEFLNRTYDKHDFDIIWANEIDEHAVRTYRHNLGNHIVHGDIWQHLDEIPTSADIIIGGFPCQDISINGKGAGISGSRSGLYKAMLSAVERVRPKIFVAENVKGLLMKHHRKDLETVLSDFRNLGYQVDYYLLNAADYGVPQTRERVIIVGRLPEIPEIQIEKTNTSNSYVTARQAIGDLVDKVEDEIANHIWSRAEKSPDQGSRKLDAERAGYTIRAECHGNIQWHYELPRRISMREAARIQSFPDNFIFQAKLRATERQIGNAVPPVLGWHIAAAVSKALK

SEQ ID NO: 3820 - protein, 276 aa, Neisseria meningitidis
MHTPLTYIDLFSGAGGLSLGFEQAGFQQLLSVEMESDYCQTYRTNFPHHQLLQKDLTTLTEQDLINCLNGQAVDLIIGGPPCQGFSMAGKIGRTFTDDPRNHLFKEFVRIVKIVQPYFFVMENVARLYTHNSGKTRIEIIQAFQNIGYSVECKILSAADFGVPQIRSRVIFIGRRDKGKISFPEPLQISHQTVGSAIGHFPKLAAGESNPHVANHEAMNHSAQMLEKMAFVKNGGNRNDIPEPLRPKTGDIRKYIRYNSNKTSRLYYRRYAQSFSL

SEQ ID NO: 3821 - protein, 68 aa, Neisseria meningitidis
MFDGAKVVRRVEGNLWVFGMVALEKTCFKGQMPSENRFQTAFSVYLKQTGKGSNILQSSYSHKRFIVN

SEQ ID NO: 3822 - protein, 125 aa, Neisseria meningitidis
MCEFKDFRRNIPCFKEYDENSFIGKWYDDGVWDDEEYWKLENDLIEVRKKYPYPMDIPRDIVIGIGTIIDFLMVQNWKLFEIKASPWLPDSVGINERYERLKTMLRYIFTEKDIVNVRFDYYNKK

SEQ ID NO: 3823 - protein, 125 aa, Neisseria meningitidis; identical to SEQ ID NO: 3822

SEQ ID NO: 3824 - protein, 369 aa, Neisseria meningitidis
MSLTRLILKFYALLRLFLGKNARTAWISHPACAGHEPGANHPDSPDRILCIEQALRRASIWQHLQTIEAEEISDTRLALVHSSKYLNRLESCLPQKGKISRLDNDTAISTGSLSAARFAAGSAVQAVDMVMNRKAWHAFCAARPPGHHAGSGKAGGFCLLNNVAAGVMHAIAEYRLKRIAVIDFDVHYGDGTAEIFKDDPRILFFNLFETDLFPFPENNDMPDGGNMVHLPLPPGTGSRTFREAVRRQWLPRLAAFKPELVLLSAGFDAHRLDESGRLNLHEADFAWLTHKIIQTASGCPGKIVSVLEGGYTLEPLAQSAAEHIRVLAGLGKSDAATAYQKTLDPTKKRFAKPKTGQVRQPTQSDRYDI

SEQ ID NO: 3825 - protein, 180 aa, Neisseria meningitidis
MRTHRKTCSAVCFAFQTASKPAVSIRHPSEDIMSLKIRLTEDMKTAMRAKDQVSLGTIRLINAAVKQFEVDERTEADDAKITAILTKMVKQRKDSAKIYTEAGRQDLADKENAEIEVLHRYLPQMLSAGEIRTAVDAAVAETGAAGMADMGKVMGVLKTRLAGKADMGEVNKILKAVLTA

SEQ ID NO: 3826 - protein, 307 aa, Neisseria meningitidis
MNTGKPQKRAVNGVLLLDKPEGLSSNTALQKARRLFRAEKAGHTGVLDPLATGLLPVCFGEATKFSQYLLDADKAYTATLKLGEASSTGDAEGEIVATARADISLAEFQTACKALTGDIRQVPPMFSALKHEGKPLYEYARKGIVIERKARYITVYAIDIAEFDAPKAVIDVRCSKGTYIRTLSEDIAKHIGTFAHLTALRRTETAGFTIAQSHTLEALANLNETERDSLLLSCDVLVSHFPQTVLNDYAVHMLRCGQRPRFEEDLPSGTPVRVYTEIGEFVGLAEYQKEICRLKALRLMNTAASAA

SEQ ID NO: 3827 - protein, 143 aa, Neisseria meningitidis; identical to SEQ ID NO: 362

SEQ ID NO: 3828 - protein, 155 aa, Neisseria meningitidis
MQIDNISDEQVVIVRMSCYLKKDEIFKNIERYGYQSSDIKKISPPFPLNILPVPKPYYFYLYDTHLNQIYDLAWSCNDFLMFEIFILDRESIKYIDKDKLFKSGETLYSNFKSIKNQCKNYFFCGFDFDAPYFKSGVSQVADYNFVPDAFSLFFI

SEQ ID NO: 3829 - protein, 104 aa, Neisseria meningitidis; identical to SEQ ID NO: 1772

SEQ ID NO: 3830 - protein, 186 aa, Neisseria meningitidis; identical to SEQ ID NO: 104

SEQ ID NO: 3831 - protein, 166 aa, Neisseria meningitidis
LLIHYTSANAHECKHLSPLLEGIAEGTTVYADKGYDSAENRQHLEEHQLLDGIMRKACRNRLLTEVQTKRNRYLSKTRYSGLNLNQDKATKPQTVQIVRQGEATPYWFKFNPLYVVEQSFGTLHRKFRYARVAYFGLIKVSAQSHLKAMCLNLLKAANRLSAPAAA

SEQ ID NO: 3832 - protein, 399 aa, Neisseria meningitidis
LSTFPNHTMHTISFPNRTRLTALPPPSLYIHIPWCIKKCPYCDFNSHSLKNGLPEAAYIDALLTDLQLELPNIWGRPVETIFFGGGTPSLFQAESIDRLLSGVRSLLRLQPEAEITLEANPGTFEIEKFQGFKDAGITRLSIGVQSFNDDMLSRLGRVHNGKEALTAIDTALKLFDKVNIDLMYALPNQTVQTALDDVQTAIATGATHISAYHLTMEPNTPFGHTPPKGLPQDEAALDIEDAVHGALESAGFVHYETSAFAKPAMQCRHNLNYWQFGDYLGIGAGAHGKISYPDRIERTVRRRHPNDYLALMQNRPSEAVERKTVAAEDLPFEFMMNALRLTDGVPTAMLQERTGVPSAKIMAQIETARQKGLLETDPAVFRPTEKGRLFLNDLLQCFL

SEQ ID NO: 3833 - protein, 129 aa, Neisseria meningitidis
MWKISKENCEDLGFAIVCMFYDAINLSEFKLWLDIVVRDTPIDTIPLYIFDLIDFDKGIGEIYDVIGVVNYGYISNDQKNALTGIAFLRGIDVYDPPISKEKALKALEKYPEIYQRFQHFFPFVELPLL

SEQ ID NO: 3834 - protein, 86 aa, Neisseria meningitidis
LLLPRQHLGQNGRRLKSKHRPSCCRLRMSTGQPQCRRNRRSRLQHCRRQSRKVGKNGKTGEIKADGRKVNVRIDSTEADLLYPAGQ

SEQ ID NO: 3835 - protein, 173 aa, Neisseria meningitidis
MIIVEHLEHYLGEIESGIKCLDRRYHLSVSVFPSQPYKGVTTFSTLGLNRYDLNYKSRFELIFTCSEEWNKENIAAFLSGVAEYLIDNRQPILRGEIIQLPRVIIEGSKMDALYVSAPFYFDDDFQVCYGEHYNIVFPLLVPLYKQEAELVEKRVGMLLSSSCWIMKLATFRI

SEQ ID NO: 3836 - protein, 116 aa, Neisseria meningitidis
VALRTHFVISNVPSTPNLLRGRQLEGKLILEVPAQVNPIPQSVLRAAQEENVIIRDTTGRIYNRWWFSIRWLCRCTSCKKRTIDTNRENRGRCVSNCKCKHWISMDCQFVRAKRRS

SEQ ID NO: 3837 - protein, 154 aa, Neisseria meningitidis; identical to SEQ ID NO: 741

SEQ ID NO: 3838 - protein, 62 aa, Neisseria meningitidis; identical to SEQ ID NO: 1869

SEQ ID NO: 3839 - protein, 183 aa, Neisseria meningitidis
MEFLSLHPWWSFFIILTIILSYIGFCAHLHIQNRAVFFYSYRDVTIIFLTPVILIALSYLIKNKEILSACILCITLIAFSWAWIITYRSNTKRFFLSLLIVWGKLLLSTIVWAILAISLGLAVITGNSKRKKYERRDRHAERNEKAFIGALLVGFELSRNLLNLCCLHKDFSTPSKNIEVNRS

SEQ ID NO: 3840 - protein, 323 aa, Neisseria meningitidis
LLIRYIDIAKRNFVIAVSSLSKTKTETNNPKGIAHTIEYLKKHKVALVVTESTGGLEIPAAKAIRRAGIAVIIANPRQTHQFAQSQPLTKTDAKDAKMPAFFAQMTAQKEDSQTMPYQPPTEAEEVLEALVNRRNQSADMRTAEKNRLHQVHETQVGSVKQLIAHFDRLIDELDKQIDDHTHTHFDGKAQVAEQIKGIGSITTATLMVMLPELGRLSHKRIASLVGIAPHPRESGETKFKSRCFGGRSAVRKALYMATVAATRFEPLIRDFYQRLPSEGKPYKVAVTACMRKLLTISNARMRDYFAENDTAENDTAENGIRTA

SEQ ID NO: 3841 - protein, 144 aa, Neisseria meningitidis
MRRALIAKIKIAQKELGLDDGTYRAVLERVTDKRSCADMDVSELESVVADMRSHGFKPKAKGNPHGKPHLRRTSSAAMLDKVEALLTVGGKHWNYAHAMARRMFGKDKVEYLDDTQLHKLVAALQIAENRKTEKAGGDDGVRKS

SEQ ID NO: 3842 - protein, 74 aa, Neisseria meningitidis
LTESTEAVGFSPPLVYWNHRIIAPPAPTQGTQPLRSSGSGRATHRHNRTVAGQHNRMQGRFMMSTQYHYAGIVN

SEQ ID NO: 3843 - protein, 511 aa, Neisseria meningitidis
VSDSKTKERATFGTRRAFMIAAIGSAVGLGNIWRFPYIAFENGGGAFILPYLVALLTAGIPLLLLDYAIGHRYRGSAPLAFRRLGRWFEPVGWWNVMTNIVICIYYAVIIGWAASYTYYSVNAAWGADPQGFFFKDFLQMAGPEALGLDFVGKVAGPLAGVWVFTAAIMALGVQKGVARASSFFMPLLLVMFLIMVGISLTLPGAAKGLDALFTPDWSKLADSKVWVAAYGQIFFSLSICFGIMVTYSSYLKKKTDLGGTGLVVGFANSSFELLAGIGVFAALGFMAQAGGKAVNEVASGGIGLAFIAFPTIINQAPMGWLIGILFFGSLVFAGVTSMISILEVIVAAIQDKLNIGRVNATLLVCIPMGIVSTLLFGTATGLPVLDVMDKFVNTYGIVAAGFVYVAAIIISGRLPELRKHLNALSSIRIGGLWTVCVVVTVVMLGYMLFKDTSGLMEKNYEGYPDGFLSIFGWGMSAALVVFGLLLSLLPWKHGQDFNVKDEHEHEQGEEK

SEQ ID NO: 3844 - protein, 102 aa, Neisseria meningitidis
MPSEILLFQTASGFQKCYNSVFTETPDTMKKITPKSFEEALSRLESLTQSMQGEMPLEDALAAYQEGNELVRYCQTKLAQVEQKLQVLDADGPKELNLESDE

SEQ ID NO: 3845 - protein, 102 aa, Neisseria meningitidis; identical to SEQ ID NO: 3844

SEQ ID NO: 3846 - protein, 101 aa, Neisseria meningitidis; identical to SEQ ID NO: 1251

SEQ ID NO: 3847 - protein, 65 aa, Neisseria meningitidis; identical to SEQ ID NO: 204

SEQ ID NO: 3848 - protein, 117 aa, Neisseria meningitidis
MKNCKFFYDPTRAIYDSGADYLTREKHRLVVIANSAWGLLLNLSCYYDEVLEKRKIPFGKQEIDDDMDKVSALKRKFKDISEIKVGDGWEYPFNYEQGMKELDEVLLKYIPFFEEER

SEQ ID NO: 3849 - protein, 242 aa, Neisseria meningitidis
MIKLTAQQIFDKLLDEEKILSANGQIRFFLGDVDIIVKQKDVVGNIIQEWLGGLRKREIEFDVSTNTQMPPDFFLNKKDRSRELLEVKAFNRNTGPGFDIADFKMYSDEIIHKPYMLDVDYLIFGYDMDDNGNVTIKDLWLKKVWQITRSMDGWAINLQVKKGVVHKIRPGVWYSINKKNMPMFECLEDFVSAIEETVYQNPATRHNASLWKKKFEEAYKKHYNRSISIPRWHEIAHKYKKK

SEQ ID NO: 3850 - protein, 326 aa, Neisseria meningitidis
  misc_feature 2, 3, 4: 'Xaa' is any amino acid
VXXXTAVGCLLFYPAAGSHSYAVFLGALFILASGVTLLQVAGNPYVTLLAKPGKESATLTLVQAFNALGTTIAPQIGAFLILADATQTVSKAEQISSVQIPYLGLAGLLIILAVFVKMIRLPDARKIAAEESAHNHDGKTSVWQYKHLVFGTAGIFCYVGAEVSIGSLMVNVLGYLKGLDHASAAHYLSFYWGGAMVGRFLGSAVMAKFAPNRYLAFNASAAVVLLAVAMATGSGNADVAMWSLLAIGFFNSIMFPTIFSLATKGLGKFTNAASGVLCTAIVGGAVVPVVQGWVADTYTLMSSFVVSVICYLYIVFFAVYGYRADK

SEQ ID NO: 3851 - protein, 112 aa, Neisseria meningitidis
MLDASPPQERGSRRETRSQKKASQITAFFRWLGGLVSNPATGKISHTKLWTNVAAASMTYKFSQTADAPEWLWWAYGALVGGYALIKRGIAAVPQLAEIKKSANAEEWSGND

SEQ ID NO: 3852 - protein, 188 aa, Neisseria meningitidis
MQNGGGKIYQTADNVEGIMLLKVVPERTVSADAKTRDPMWDNAALQTSEGVNFIARFLGFFSDGEYRYVDVLQPNHSDIIRYSGKDFPINQIFNHIHPARYAVTFENNVDSKLRRHWVAGATIRIIDRQTDEVIAKKTIYVFEKGLDGTGGARMPWKFAILCNKERLTSSEPLSDFVLSVLKPYILRP

SEQ ID NO: 3853 - protein, 451 aa, Neisseria meningitidis
MSDFFHSDVLSVSELNAFAKSLLENHLAGLWIAGEVSNLTRAASGHYYFSLKDSRAQVRCAMFKGAAARLAKPLKEGDHIEVSGKISIYEARGEFQITVNEVRLKGLGQLYEAYERLKAQLQAEGAFAAERKKPLPTRPQCIGIVTSLAAAALRDVVTTLKRRAPEIPVIVYPTPVQGAGSELQIAQAIKTASQRAECDVLIVCRGGGSIEDLWAFNEEPVVRAIEACTVPVVSGVGHETDFTLADFVADVRAPTPTGAAELVSPNRQESLHRLAQAQGRLKTVLEQRYFDASQKLDWLARQIRHPRQKLDEQRASIGKLAQTLSYSMKQNLRAHTARFERQTQALQHYRPDVSVCKNNIVCLQTALPAAFSQLLTHRRQSLTAQAALLEAVSPQHILERGFSVVKNTRGQVIRNADVLKQGQKLHITFADGETDVRVSKEQGQQDLFDCI

SEQ ID NO: 3854 - protein, 117 aa, Neisseria meningitidis
VITLRIVWAVANRAKRPQSDSKAAAAGHGILYLLMLAVPVIGMIRQYGSGRGPLKVFGVEVMQGSPEKIEWMANLGNTFHGNLGWLLFAAVVGHVAMVVVHRVQGKDVLYRMTGRVR

SEQ ID NO: 3855 - protein, 37 aa, Neisseria meningitidis; identical to SEQ ID NO: 970

SEQ ID NO: 3856 - protein, 92 aa, Neisseria meningitidis
MSRNLLVRWLVVCLIPLATLAVFVANPPEDKPQHLINGIILACEATFLFKFVLFDTIKHHLKQEFDLKRQTMLLFIPIVLLVVYLFHYFGAF

SEQ ID NO: 3857 - protein, 413 aa, Neisseria meningitidis
LNGRNDSGTQKTLVCPGSSRRYRRFGRHCADGTDALHTAYGNGYGADGVYTSFREGVAQASGMRRVAVLTLCGAVAGSGWWLLKRFGKPQIEIKAALKQPLQGLPFLTTVFHVLLQIITVGLGSPLGREVAPREMTAAFASAGGKRLGLDEGEMRLLIACASGAGLAAVYNVPLASTLFILEAMLGVWTQQAAAAALLTSVIATAVARIGLGDVQQYHPANLAVNTSLLRFSAVIGPILGATAVYFRRSAEKFPFLKRDNPRIIPLAIALFALIGAIAVWFPEILGNGKAGNQLTFGGLTDWQHSLELTAVKWLVVLMALAAGAYGGLITPSMMLGSTISFAAAAAWNSVFPEMPSESAAVVGAAVFLGVSLNMPLTAAVFILELTYAPAALLMPLCTGMAGAVWTARKMGCK

SEQ ID NO: 3858 - protein, 75 aa, Neisseria meningitidis
METWVQNYTAIGGSLYLTAAAALLPIVFLFAVLTVLKLKGYQAGLYTLLIALAVAAFGFGMPAGMAVSSLPPQPH

SEQ ID NO: 3859 - protein, 214 aa, Neisseria meningitidis
MDRHFGRRRFLTVAAVAAAGAAVSFLPNPFAADGEKRNGDEKRNENVFFWKGVALGSGAELRLFGVDDRQAADLVNKVLAEVARLEKIVQPLPRQPDQPPEQGRLSDFAVGGFFGTVEPVPRYSRADGRRVRSDSAGVVETVCRLFCRPSRCGNAASSKQREGSPETGRLRQSLVRPNPFCRKGYGFVLERHRASLWINKNQYGVASPLKENDS

SEQ ID NO: 3860 - protein, 186 aa, Neisseria meningitidis; identical to SEQ ID NO: 1806

SEQ ID NO: 3861 - protein, 203 aa, Neisseria meningitidis
MRRTALLLLALAAGTSLAAGFSQKDTPINTRYRETPEEAAAREFKEHTAKLPPLPDTHSDGWFDIYVDENYGKQPKILLDSLQIMPAPDGSIRYILNIRSDKGYDNLTAEGIFCARFSIRFGNGKPSSYKVFGYGDTVNRRWIQPRNAEWKPIGGTLSRNDALRTVLYQAFCEGGVPADTKGLVQRLKERAGRYAPSIKPHNK

SEQ ID NO: 3862 - protein, 159 aa, Neisseria meningitidis
MPQLTLDKTDIKILQVLQENGRLTNVELSERVALSPSPWRRLKQLEDAGIVRQYAALLSPESVNLGLQAFIRVSIRKAKDAREDFAASVRKWPEVLSCFALTGETDYLLQAFFTDMNAFSHFVLDTLLSHHGVQDAQSSFVLKEIKHTTSLPLNHLLKE

SEQ ID NO: 3863 - protein, 421 aa, Neisseria meningitidis
MQQIKFIDLFSGMSGIRKGFEQACRKQSVACECVFTSEIKPAALEVLKQNYPDEVPYGDITKIETGDIPDFDILLAGFPCQAFSFAGKRLGFEDTRGTLFFDVARILKAKKPKGFILENVEGLVTHDRKDSTQKWRTLTVILETLEALGYYVSWKVLNAKDFGIPQNRKRIYLTGSLKSKPDLSFETSPSPKLKNILESGLPTESSPFIKKLLKKFPPSELYGKSVKDKRGGKNNIHSWDIELKGAVTEEEKQLLNILLKERRKKRASEIGIDWMDGMPLTKAQISTFYKHPDLQNILDSLTDKGYLVLEHPKQKIGGQRIKDESLPKGYNIVSGKKSFEINKILDPNDVAPTLVAMDMEHLFVVDNGGLRTLTGKEGLRLFGYPDDYSFDIPKKDRCDLLGNTVAVPVIKAVSERLLHTL

SEQ ID NO: 3864 - protein, 391 aa, Neisseria meningitidis
MTEDERFAWLQLAFTPYIGAESFLLLMRRFGSAQNALSAPAEHAPAVRHKHARAWRNAENALWRAAAEAALEWEMRDGCRLMLLQMRFPRNADAGLTAPPVLFLRGNVRLLHKPSAAIVGSRHATPQAMRIAKDFGKSLGGQNIPVVSGMASGIDTAAHQGALEAEGGTIAVWGTGIDRIYPPSNKNLAYEIAEKGLIVSEFPIGTRPYAGNFPRRNRLIAALSQVTLVVEAALESGSLITAGLAAEMGREVMAVPGSIDNPHSKGCHKLIKDGAKLVECLDDILNECPGLLQNTGASSYSINKDTPDTGRRAVQTAYAPPPAAKMPSEGAAGGTAVGGILDKMGFDPIHPDVLAGQLAMPAADLYAALLELELDGSVAAMPGGRYQRIRT

SEQ ID NO: 3865 - protein, 809 aa, Neisseria meningitidis
MTEKSHKKTKGRAGSPSPTSARKKADNGARGNKVSERLKAVKELQKTETKKARPEHVVNFIGDALWLMGLAATLYLAISLISFDMGDPSWSHSSPVVEDVANWGGLFGAYVADVGYYLFGWSFWWWIAAACVMLYKNFRLHAKQTENEAYNHKIAAAALFVLTVFSPVLEYFVLGGKYADSLPVGAGGMVGIRVGAVFAWLLGKSGSLLIILVVLLLSLSLLVQISWLEFLNGAGRAVQNRLSALSGKVMALGKRRPNSKTDGVDTQNTRRMVKEAKNITAKPVALPEGSSSNRKSVAVSVAPSPKIQVSLFEDDEPRQAGEYHKPTLNLLRIPDSEPVSINPAELERTAELIESKLAEFGIGVQVVSATSGPVITRYEIEPAQGVKGSQIVALSKDLARSMSLQSVRIVETIAGKNTMGIELPNDKRQDVMLSEILSSPVFAEAKSKLTVALGKDIAGTPVVGDLAKMPHLLVAGMTGSGKSVGVNGMIMSMLFKATPDEVRFIMIDPKMLELSIYDGIPHLLCPVVTDMREAGQALNWCVAEMEKRYRLLSHAGVRNLEGFNQKVEAAKAAGKPLLNPFSLNPDSPEPLEKLPMIVVVIDELADLMMTERKAVEQQIARLAQKARAAGIHMIVATQRPSVDVVTGLIKANIPTRMAFTVQSKIDSRTILDQMGADELLKYGDSLFLQPGSAEPTRLQGAFVSDDEVHQVVNYVKSQAPADYIEGLLSGEAALETANIVNPNADSDELFDQAVAYVLESKKTSISSLQRQLRIGYNRAAKMEALENAGVVSPTDLNGSRKILAHKDHL

SEQ ID NO: 3866 - protein, 548 aa, Neisseria meningitidis
MKQSARIKNMDQTLKNTLGICALLAFCFGAAIASGYHLEYEYGYRYSAVGALASVVFLLLLARGFPRVSSVVLLIYVGTTALYLPVGWLYGAPSYQIVGSILESNPAEAREFVGNLPGSLYFVQALFFIFGLTVWRYCVSGGVFADVKNYKRRSKIWLTILLTLILSCAVMDKIASDKDLREPDAGLLLNIFDLYYDLASAPAQYAAKRAHILEAAKKASTWHIRHVAPKYKNYVVVIGESARSDYMNVYGFPLPDTPFLSQTKGLLINGYQSTAHATNLSLPQTLGLPGEPNNNIVSLAKQAGFRTAWLSNQGMLGHFANEISTYALRSDYPWFTQRGDYGKSAGLSDRLLLPAFKRVLIGNAGTKPRLIVMHLMGSHSDFCTRLDKDARRFQYQTEKISCYVSTIAQTDKFLEDTVKILNENKESWSLVYFSDHGLMHVGKGGERTLTHGAWKRQSYGVPLVKISSDDTRREMIKVRRSAFNFLRGFGSWTGIETDELPDDGYDFWGNVPDVQGEGNNLAFIDGLPDDPAPWYAGKGKSTKNTSKK

SEQ ID NO: 3867 - protein, 326 aa, Neisseria meningitidis
MHTPLTYIDLFSGAGGLSLGFEQAGFQQLLSVEMESDYCQTYRTNFPHHQLLQKDLTTLTEQDLINCLNGQAVDLIIGGPPCQGFSMAGKIGRTFTDDPRNHLFKEFVRIVKIVQPYFFVMENVARLYTHNSGKTRIEIIQAFQNIGYSVECKILSAADFGVPQIRSRVIFIGRRDKGKISFPEPLQISHQTVGSAIGHFPKLAAGESNPHVANHEAMNHSAQMLEKMAFVKNGGNRNDIPEPLRPKTGDIRKYIRYNSNKTSRLYYRRYAQSFSLTESGVNRSISCLTIFPFYFLRQQNCPAAAGWRRTAFIGKSYCKYFKNEKI

SEQ ID NO: 3868 - protein, 325 aa, Neisseria meningitidis; identical to SEQ ID NO: 1878

SEQ ID NO: 3869 - protein, 313 aa, Neisseria meningitidis
MAIQWFPGHMNKAKKAIAERAKSVDMVIEMLDARMPASSENPLLAQLSKGKPKLKILNKQDLADPERTKVWLDHYNSRPDTRAIALDSSETGAHGKITQACRAMIPHRQGIDKPLRVLICGIPNVGKSTLINGMIGKKSAKTGNEPGITKAEQRLFLADDFWLYDTPGMLWPKIIVEEGGYNLAAGGAVGRNALDEEEVALELLDYLRRHYLPMLQERYQADKDPSSHWDENVWLEWIAKKRGAVLSGGRINYQKAAENILTDFREGKIGRITLETPNQWETWLKKARQKEAELKAIREARKAERKGQKPSEA

SEQ ID NO: 3870 - protein, 258 aa, Neisseria meningitidis
MNRPKQPFFRPEVAVARQTSLTGKVILTRPLSFSLWTTFASISALLIILFLIFGNYTRKTTAEGQILPASGVIRVYAPDTGTITAKFVEDGEKVKAGDKLFALSTSRFGAGDSVQQQLKTEAVLKKTLAEQELGRLKLIHGNETRSLKATVERLENQELHISQQIDGQKRRIRLAEAVAKTALGRQELSGLGMVSSDLAKSNEPVYLVKIKPDKPTITAYGEEKPLQIGMTLEADILHEKRRLYEWVLELIYSMSGKL

SEQ ID NO: 3871 - protein, 321 aa, Neisseria meningitidis
MNPAMIERLKAVENQAEAMERGARSAYLKQQAQELGISLATLYRKLEAVSVKPTRKRRSDAGKTELKPEEAKLISAVLVEAMRRNGKRLMSVRQAVEMLRANGKIEAARIDGETGEVIPSVRTAFRPLARHRPHRPVMAHPRRRHEDQTPLYRPTVGLGGRNTPRAAHTDRRQHPPFPRHPPTAQTRPPPDHISIKFAHNAIRRLGYDGSTPGKSKHTMHGFRHLFTNISLTAGKDTLTTDLALGHISRAALQRAGFSSLHHYLTADSYRLQERRELAEWYSRRHRQAYEAAAKTPQNKKPPEKNSDGILPKTLAIKPKRY

SEQ ID NO: 3872 - protein, 399 aa, Neisseria meningitidis
MWTGFFSKSGTGIAEERHQNRRACTDVPLLAERNSKHPDRPYGFAKYRQSGLDIYAWHGIYFFPRFPFIDIDCIRWVCAGLKAFKHYIRENGLPDLIHAHRMNYAGILAQKISQKYGIPYVVTEHSSTITRGLIRPHQWQPMEKAAAHASALLAVSRHFAHVLQHKYGCEWQYLPNILGGIFNRPFEQREKNNKPHFVFCTVSHLRRLKGHDVLLTAFARALAQCPQLRLNIGGSGQEEQRLKQQAADLGITHAVTFLGALQPEAVLDLMRNSDAFVLASRTETFGVVYIEALSQGLPVIATRCGGAESIVSDGNGYLVPVDDDDALADALIKMYEHHSDFEPARLRENCLNEFGENAVIGRLIGIFRQAIAEYGKKIRVKYSGLTKIRTRRRSRRQYK

SEQ ID NO: 3873 - protein, 657 aa, Neisseria meningitidis
MLPTQPNPTQPNPTQPNPTQPNPTQPNPSPDLIDTAGVNTEAIYTSDGITANSTQLEQLKKLFPACFDADGNFLIDRLQAEIAPQTDIGREFYEMNWLGKSYARLLRNLPPETLISEDKTHNAKPENAGSQNLLIRGDNLEVLKHLKNAYTNSVKMIYIDPPYNTGSDGFVYQDDRKFTPAELACLANIDEDEAARILDFTDKGSNSHSAWLTFMYPRLYIARELLKDDGVIFISIDDNEAAQLKLLCDEVFGEGNFIKDLIVNTSEGGGNAKYVVNGHETVLVYAKDITHFDNLKRPKDIRGKKIVINDELYWIQEDAVREQFGKYGNLHYEDIIEIKGIEFKNKIDKDIENNEYILIPKSYGKTIIGKLRKVSDDFSKFHSILNIGNISKNLTKDGIRELEELFETGKGYSPFETPKPLDLLKRLVLSATFKGNQTDLILDFFAGSGTTAHAVMQLNAEGQNGNRRYICVQLPEKTAEKSEARKAGYPTIFDITKARIEKAAAKIRVEHPDYTGDSGFKIFQTADNFRQHPDKDFSPEQPDLPLNDELSEEQLQTLLTTWTLYDGAALTTPVEPVRLGSYTAYLCEKRLYLMNAGFTSADLLAFIRKLDDDAAFNPNRVIVFGSNMASAMQHELDQAVRGYANKKEIELNVVIRV

SEQ ID NO: 3874 - protein, 738 aa, Neisseria meningitidis
MKTDIQTELTQALLSHEKVWANEEKTILAKNILLDLVEKTDPTIIGLLLNNDELKRHFFVEVNGVLVFKLQDLRFFLDKHSVNNSYTKYANRIGLTDGNRFLKDNSDIVLDFPFKDCVLNGGQSTEEGEEIYFKRSNSQPASQPASQPASQPASQPASQPASQPELYTKLTRKRQEIFFNQTLAFDEIDRLFDAKAFSKFSRHTADGKQAVGEIKRHSDGTPAENLIIKGNNLIALHSLATQFKGKVKLIYIDPPYYFVKKKQQDSFGYNTNFKLSTWLTFMKNRLSIAKELLTDDGIIVISIDDDGNAYLKILLDEIFGFENFIGNLPTIMNLKGNNDEYAFAGTHEYTLVFAKNKDKSTFYEFPIDEDNFLEKWEEDEIGFYKKGAPMRATGTEDKREDRPEMFYPFLVKNNTVSTITDEEFSQIYNKDLEVFNDDFIQKLKEKYENLGYNFILPIADKQWGRWRWGYSIKNKARLQTDIIVSQSKNGISLYKKQRPELDDLPTKKPKTIFYKPEYSSGNGTEQMKNLFGEKAFKNPKPEELIQDFITITTNESDIVLDYHLGSGTTAAVAHKMNRQYIGIEQMDYIETLAVERLKKVIDGEQGGISKAVNWQGGGEFVYAELAPFNETAKQQILACEDSDGIKTLFEGLCERYFLKYNVSVNEFSQIIQEPEFQSLALDEQKQMVLEMLDLNQMYVSLSEMDDEQFAGCLNDDDKALSREFYQSAKNQAEKKDGE

SEQ ID NO: 3875 - protein, 327 aa, Neisseria meningitidis; identical to SEQ ID NO: 294

SEQ ID NO: 3876 - protein, 508 aa, Neisseria meningitidis
MDYPPLKGAALAWITLSLGLAVFMEVLDTTIANVAVPVIAGNLGAATTQGTWVITSFAVANAVSVPLTGFLAKRIGEVKLFTAAAVGFVITSWLCGIAPNLQALVFFRILQGFIAGPLIPLSQSLLMASYPPAKRTLALALWAMTVVVAPVLGPILGGWISGNWHWGWIFFINIPIGIISAWITWKHLKYRETETVKMPTDYVGLTLMVVGIGALQMMLDRGKELDWFASGEIITLGVTALVCLSYFIVWELGEKYPIVDLSLFKDRNFTVGVIATSLGFMVYMGTLTLLPLVLQTNLGYTSTWAGLAAAPVGILPVFLSPIIGRFGNKIDMRLLVTASFLTFAFTFYWRTDFYADMDIGNVIWPQFWQGAGVAMFFLPLTTITLSHMKGGQIAAAGSLSNFLRVLMGGVGVSFVSTLWERREALHHTRFAEHITPYSATLHETAAHLSQQGISDIQTLGIINNTITQQGFIIGSNEIFMAGSLLFIIMIPVIWLAKPPFHNGGGGGH

SEQ ID NO: 3877 - protein, 453 aa, Neisseria meningitidis
MSSPSNTNRQTSSRLTYILTVAGATVGFGATWRFPYLVGENGGGAYVFLFCIAMLVIGIPMILVENVIGRRKGVNALDAFGGPMNGKPIAKIWKLVGWMGLLGAFGIMAYYMALGGWVISYIVNIIGGNLNISSPIDGVVTKGFFAEHIDSPWEIAFYTLLFVAVNQWILVKGVIGGIEKAAKLMPLLFLFLIAMVVRNVTLPGAMEGVAFYLKPDFSKITAELFVFVLGQVFFALSLGFGVMITLSSYLDKNENLVQTAVITAITNTIIAILAGFMIFPSLFSFGVAPDSGPTLVFQSLPIVFSHMWAGSVFAVIFFSLLLIAALTTSLTIYEVLITTIQEKTKIRRTAAITIVLAAIFIFGNIPSILSYGPWKDVSIFGKNIFDAFDYISGNILFMLTALGSALFVGFVMKDEAKEELLYKGNHTTVNIWFAYVKYLVPLVILLIFISNLF

SEQ ID NO: 3878 - protein, 1490 aa, Neisseria meningitidis
MRFTHTTPFCSVLSTLGLFAVSPAYSSIVRNDVDYQYFRDFAENKGAFAVGASNISIQDKQGKILGRVLNGIPMPDFRVSNRQTAIATLIHPQYVNSVKHNVGYGSIQFGNDTQNPEEQAYTYRLVSRNPHPDYDYHLPRLNKLVTEISPAALSSVPLLGNGQPKANAYLDTDRFPYFVRLGSGTQQVRKADGTRTRTAPAYQYLTGGTPLKVLGFQNHGLLVGGSLTDQPLNTYAIAGDSGSPLFAFDKHENRWVLAGVLSTYAGFDNFFNKYIVTQPEFIRSTIRQYETRLDVGLTTNELIWRDNGNGDSTLQGLNERITLPIANPSLAPQNDSRHMPSEDAGKTLILSSRFDNKTLMLADNINQGAGALQFDSNFTVVGKNHTWQGAGVIVADGKRVFWQVSNPKGDRLSKLGAGTLIANGQGINQGDISIGEGTVVLAQKAASDGSKQAFNQVGITSGRGTAVLADSQQIKSENLYFGFRGGRLDLNGNNLAFTHIRHADGGAQIVNHNPDQAATLTLTGNPVLSPEHVEWVQWGNRPQGNAAVYEYINPHRNRRTDYFILKPGGNPREFFPLNMENSTSWQFIGNNRQQAAKQVAQAENARPDLITFGGYLGENAQTGKAAPSYSKTNIEWVNGPNTPHKPSPYTNTPTRTGAGVPTITASKKAATPAPTSHGMPTAPKTGNFSDMTGEAAIEKNRHIANAAVYGRPEYRYNGALNLHYRPKRTDSTLLLNGGMNLNGEVLIEGGNMIVSGRPVPHAYDHQAKREPVLENEWTDGSFKAARFTLRNHARLTAGRNTAHLDGDITAYNLSGIDLGFIQGKTPECYRSYHSGSTHCTPNAVLKAENYRALPVTQVRGDITLNDRSELRLGKAHLYGSIRAGKDTAVRMEADSNWTLSQSSHTGALTLDGAQITLNPDFANNTHNNRFNTLTVNGTLDGFGTFRFLTGIVRKQNAPPKLEGDSRGAFQIHVKNTGQEPQTTESLALVSLNPKHSHQARFTLQNGYADLGAYRYILRKNNNGYSLYNPLKEAELQIEATRAEHERNQQAYNQLQATDISRQVQHDSDATRQALQAWQNSQTELARIDSQVQYLSAQLKQTDPLTGILTRAQNLCAAQGYSVDICRQVAKAADTNDLTLFETELDTYIERVEMAESELDKARQGGDAQAVETARHAYLNALNRLSRQIHSLKTDVAGIRMPNLAELISRSANTAVSEQAAYNTGRQQAGRRIDRHLTDPQQQNIWLETGTQQTDYHSGTHRPYQQTTNYAHIGIQTGITDRLSVGTILTDERTNNRFDEGVSARNRSNGAHLFVKGENGALFAAADLGYSNSRTRFTDYDGAAVRRHAWDAGINTGIKIDTGINLRPYAGIRINRSNGNRYVLDGAEINSPAQIQTTWHAGIRLDKTVELGQAKLTPAFSSDYYHTRQNSGSALSVNDRTLLQQAAHGTLHTLQIDAGYKGWNAKLHAAYGKDSNTARHKQAGIKIGYNW

SEQ ID NO: 3879 - protein, 467 aa, Neisseria meningitidis
MNFPKTAASLLLLLASLAAHALDTGRIPQNEIAVYVQELDSGKVIIDHRSDVPVNPASTMKLVTAFAAFKTFGSNYRWATEFKSNGTVNDGTLDGNLYWAGSGDPVFNQENLLDAQKQLREQGILNITGHLMLDHSLWGEVGSPDHFEADSGSPFMTPPNPTMLSAGMVMVRAERNAAGSTDILTDPPLPHIFAQNNLKITASQAACPSVKKLMRASFSDNTLKLRGNIPESCLGKPVGVRMFALDELIRQSFTNHWLLGGGRISDGIGIADTPEGAQTLAVAHAKPMKEILTDMNKRSDNLIARSVFLKLGGDGKLPAVSEQAASAVRRELAVSGIDIADLVLETVQPVQKERVTASDGAMLETAYFSPFAQDFIDTLPIAGTDGTLRNRFKQSGGLLRLKTGTLNNVRALAGYWLGDKPMAVVVIINSGRAVSLLPDLDNFVAKNIISGGDGWLDAKLMCKERRA

SEQ ID NO: 3880 - protein, 146 aa, Neisseria meningitidis
MHKIPKGTALAFDFGEARIGVAQGDAELGLSHPLSTVTGGSNDESRGIASWSDGSRVICRRLPVHTDGTKHERTCRGSSEAGTAGSISPSIGLTNGCRPSMPKACFRKHRSSAKNANRCSTKWRRKPSCTVFSRAVRRNVSTGVRV

SEQ ID NO: 3881 - protein, 325 aa, Neisseria meningitidis
MQENPTVWLFDLDNTLHDADAGIFTLINRAMTRYMARRLKLSESAASDLRQDYWHRYGATLAGLQIHHPEIDIAEFLRESHPIDEVLTRLHGMPETQNTLSRLKGRKAVFSNGPSFYVRAVVGALGLENRFDALFGTDDFGLLYKPNPQAYLNVCRLLDVPPECCIMVDDSADNLHQAKALGMKTVRFGAKVHDLPFIDASVSDMAQLARYAETLSEHRQNHYNTHNPPKIRKNVMRKTFLILMTAAALLSGCAWETYQDGNGKTAVRQKYPAGTPIYYQDGSYSKNMNYNQYRPERHAVLPNQTGNNADEEHRQHWQKPKFQNR

SEQ ID NO: 3882 - protein, 346 aa, Neisseria meningitidis
MKAMVYHGANDIRFEEKPRPQIIDPTDAVVKIVKTTICGTDLGIWKGKKTEVADGRILGHEGIGIVEEVGEAVKNIKVGDKVIISCVSKCCTCDNCKIQLYSHCCNGGWILGYMIDGTQAEYVRTPYADNSLVPLPDNVNEEVALLLSDALPTAHEIGVQYGDVKPGDTVFIAGAAPVGMSALLTAQLYSPAAIIVCDMDENRLKLAKELGATHTISPASGDVSKQVFAIVGEDGVDCAIEAVGIPATWNMCQDIVKPGGHIAVVGVHGQSVDFKLEKLWIKNLAITTGLVNANTTEMLMKAISSSSVDYIKMMTHHFKFSELEKAYDVFKHAAENQAMKVVLEAD

SEQ ID NO: 3883 - protein, 332 aa, Neisseria meningitidis
MLAEEVFGFGIYKESKGSGGRFYERCWLMGSEDVLYGRVHFGGQNNTILFELTGTGCGVAKEGWESRLFAFLTNAIRPKITRVDIAKDFFNGEYSPNQAREDRNKGMFTCHHVKPKGECLGSDWEEDDEAKMTKGKTYGIGSRESSKYVRVYEKGKQLGDKTSTWTRFEIEFKAKDIVIPFEVLQNPGEYFGGAYPICERFVQKATRIHAVKEDKVISADRYLEWEKQFGRAANGLKFIFPELDKAKLFELIEPSHHKLPKSLTPEAYDCAFLKAQAIHEQPAFKPYKDPYYMYEYYENLEKQLEQQKHVNNEESYNNFIYDKFARLPISWA

SEQ ID NO: 3884 - protein, 170 aa, Neisseria meningitidis
MGSKFFFLLLRFAGSGLPPSHMRGIGIVGRRVRGFLARRVSPHIGRGVNIQRGAYVFPDTVLGDGSGIGANCEICRGLVVGKNVMMEPECLFYSNNHKFDRKKRFEGYTEIRPITLEDDVWPGHRVIVMAGVTVGRGSVVGAGAVVTKDIPPYSLAAGNPAVVKKNLPEG

SEQ ID NO: 3885 - protein, 143 aa, Neisseria meningitidis
LNMYWERGLHMYKASAVVPTGYVRVGNTAPLVGEDTQRYASFWGDGYDVYRQLRWQQISEKQRKAFKKAAKSKKTVMFAGREYGISKQNLSDVWDDFEDAMELKAFPCLSSLFLTKWHKNLYDSGLTKTSTALPRLSSKRTIL

SEQ ID NO: 3886 - protein, 89 aa, Neisseria meningitidis
LYCLRLRRLVLIFVNPLYADAGDVYCVYNIRLKQYTACQVTRVEEHGGKKTRATLLALDWQGNKPLGAAELADLKPLYKDLKNNIGNIV

SEQ ID NO: 3887 - protein, 113 aa, Neisseria meningitidis
MNKQYPKINYIGNKEKIASICDQLPSDVDTVADVFSGGCSFAYEAKKRGYRVITNDILAINYQIALALIENNHETLNDDDVAMIFSGSPHAGFMSQRYAEKFYFHDEYQQLDL

SEQ ID NO: 3888 - protein, 343 aa, Neisseria meningitidis
MGRVSYLCVDAAEQALTDAGLLGDESITDGRMGVACGSSSGSTKDIGDVGELLLTGMSRNFSANTYVRMMPHTAAANIGIFFGLKGRIIPTSSACSSGSQGIGYAYEAIKYGLTDMMLAGGGEEFFPSEVYVFDSLYAASRRNGEPEKTPRPYDANRDGLVIGEGAGIFVLEELEHAKRRGAKIYAELVGYGANSDAYHISTPRPDAGAILAFQTALQHAGLAPEDIGWINLHGTGTHHNDNMESRAVAAVFGNNTPCTSTKPQTGHTLGAADAIEAAFAWGIADRQSNPEGKLPPRLWDGQNDPNLPAINLTGSGSRWETEKRIAASSSFAFGGSNCVLIIG

SEQ ID NO: 3889 - protein, 1014 aa, Neisseria meningitidis
MFWIVMIVILLLALAGLFFVRAQSEREWMREVSAWQEKKGEKQAELPEIKDGMPDFPELALMLFHAVKTAVYWLFVGVVRFCRNYLAHESEPDRPVPPASANRADVPNASDGYSDSGNGTEEAETEAAEAAEEEAADTEDIATAVIDNRRIPFDRSIAEGLMPSESEISPVRPVFKEITLEEATRALNGAALRETKKRYIDAFEKNETAAPKVRVSDTPMEGLQIIGLDDPVLQRTYSHMFDADKEAFSESADYGFEPYFEKQHPSAFSAVKAENARNAPFRRHAGQGKGQAEAKSPDVSQGQSVSDGTAVRDARRRVSVNLKEPNKATVSAEARISRLIPESRTVVGKRDVEMPSETENVFTETVSSVGYGGPVYDETADIHIEEPAAPDAWVVEPPEVPKVPMPAIDIPPPPPVSEIYNRTYEPPTGFEQAQRSRIAETDHLADDVLNGGWQEETAAIADDGSEGAAERSSGQYLSETEAFGHDSRAVCPFEDVPSERPSRRASDTEADEGAFQSEETGAVSEHLPTTDLLLPPLFNPEATQTEEELLENSITIEEKLAEFKVKVKVVDSYSGPVITRYEIEPDVGVRGNSVLNLEKDLARSLGVASIRVVETIPGKTCMGLELPNPKRQMIRLSEIFNSPEFAESKSKLTLALGQDITGQPVVTDLGKAPHLLVAGTTGSGKSVGVNAMILSMLFKAAPEDVRMIMIDPKMLELSIYEGIPHLLAPVVTDMKLAANALNWCVNEMEKRYRLMSFMGVRNLAGFNQKIAEAAARGEKIGNPFSLTPDNPEPLEKLPFIVVVVDEFADLMMTAGKKIEELIARLAQKARAAGIHLILATQRPSVDVITGLIKANIPTRIAFQVSSKIDSRTILDQMGAENLLGQGDMLFLPPGTAYPQRVHGAFASDEEVHRVVEYLKQFGEPDYVDDILSGGGSEELPGIGRSGDDETDPMYDEAVSVVLKTRKASISGVQRALRIGYNRAARLIDQMEAEGIVSAPEHNGNRTILVPLDNA

SEQ ID NO: 3890 - protein, 304 aa, Neisseria meningitidis
MEKAEHLNSSRFVNLVKSGGGSYVEGSYHFDTLSNGISIHGGTVTARCDFCSSRLAEPYVSFVLLLEGSLDFGINRCRFQIDADGGKIVLIAVGEEVLFSRYLYRGGKTVKMTIKGMEQWLLRPEYARFAPLLYREPVRIDLPPNLRGLAASCLQAVPKGHLGKTLRREADVLRLLSDLWDTVSDGIGPAVGQTAEADAMPSEDFSRTLNAAFDGGAHQVNRLTDALNISERTLQRRMRDHFGITASEWLHHKQMQHALYLLQNGGKSIGETAYLCGYRHVSSFTQAFRQYFGSTPAETKKENR

SEQ ID NO: 3891 - protein, 600 aa, Neisseria meningitidis
IMKRQSDELAEKMPKTLPQVRPGTAMSAQALAEAAKLLNEKQRSVADARCAVVAAVLGIKYEYDCSAKAAVAQFLGLLAEGKLDAVTLGNLEKANDRSRSAKVGERTLDGWISAYLKAENATERLVALAPKTTKAVKPIESYGWLPMFMQFHSIPSEPKLAHSYRRFVQWAEAENMPVNDVPSLSMVRRVWGKLPLIMQERGRKTGAAYKSLLPYVKRDWGALKPNDVWIGDGHSFKAKVAHPVHGRSFKPEVTVIIDGCTRFVVGFSVSLAESCVAVSDALRIGVKHFGLPIIYYSDNGGGQIGKTIDHEITGITSRLGIRHETGIAGNPQGRGIIERWWKDNLIEMARQYETFTGAGMDSSTKNLMYRKMESAFNALEKGKDLTEEQQKYLKNCRAGRALSRMWPSVSTNTTTARTASCPDILTAGIIRRRLIGKGWNRTVSRRICCRQKSWRRCLCRKRCERYSAVGWICSTTLISQLSWRSITKTRYGSATIAMRRRSMCLIWTASLSLRRRPTAIPARLSRRLVSTNWRKNAEKAKSSGRKMQSSSQTRKSIRHWNRRQLGTSWDIWAETTSRRSMRYCRKRAQTILCCLRRIEV

SEQ ID NO: 3892 - protein, 106 aa, Neisseria meningitidis
VDWMGSLFLPGGALLFLSVVSTTLPARLGMPLLLVSPAGVLDGAAEALAIAAFLMLVARPPAVFGGLWKFNYSLREKAYSRIEMQSDTVLQAGIWRGTSCPTARSI

SEQ ID NO: 3893 - protein, 190 aa, Neisseria meningitidis
VNYKIYDGAKIIKKENLSIGDYSQIDDFVFFNCGEKSILGSFVHISSFTSIIGGGEFYMDHFSGLSAGCRIITGSDDFMGGGGLTNPTVPSKYTNVKKSSVRIGKHAILGTNVTVLPGVTIGDGVAVGAGAIVRKNLEPWTIYVGVDCKPLKRRSQDKILELEKHLVAEFNLDLCPIIPSPNLPKPKETR

SEQ ID NO: 3894 - protein, 111 aa, Neisseria meningitidis
MKELTINDLTLVSGGFEVGRDYIEIAPVVGTAGGVASSVRAASMTGEAGAILTRSGVTGLRAGVVAIPLLAYNGTVWLNRNTKLQDNLGRLIDKVTGLDQSGNDYGDGTSY

SEQ ID NO: 3895 - protein, 58 aa, Neisseria meningitidis; identical to SEQ ID NO: 1171

SEQ ID NO: 3896 - protein, 1066 aa, Neisseria meningitidis
MRTTPTFPTKTFKPAAMALAVATTLSACLGGGGGTSAPDFNAGGTGIGSNSRATTAKSAAVSYAGIKNEMCKDRSMLCAGRDDVAVTDRDAKINPPPNLHTGDFTNPNDAYKNLINLKPAIEAGYTGRGVEVGIVDTGESVGSISFPELYGRKEHGYNENYKNYTAYMRKEAPEDGGGKDIKASFDDEAVIETEAKPTDIRHVKEIGHIDVVSHIIGGRSVDGRPAGGIAPDATLHIMNTHDGTKNEIMSAAIRNAWVKLGERGVRIVNNSFGTTSRAGTADHFQIANSEEQYRQALLAYSGGDKTDEGIRLMQQSDYGNLSYHIRNKNMLFIFSASNDAQAQPNTLTLLPFYEKDAQKGIITVAGVDRSGEKFNGSNHCGITAMWCLSAPYEASVRFTRTNPIQIAGTSFSAPIVTGTAALLLQKYPWMSNDNLRTTLLTTAQDIGAVGVDSKFGWGLLDAGKAMNGPASFPFGDFTADTKGTSDIAYSFRNDISGTGGLIKKGGSQLQLHGNNTYMGKTIIEGGSLVLYGNNKSDMRVETKGALIYNGAASGGSLNSDGIVYLADTDRSGANETVHIKGDLQLGGEGTLYTRLGKLLKVDGTAMTGGKLYMSARGKGAGYLNRTGQRVPFLSAAKIGRDYSFFTNIETDGGLLASLDSVEKTAGSEGDTLSYYVRRGNAARTASAAAHSAPAGLKHAVEQGGSNLENLMVELDASESSATPETVETAAADRTDMPGIRPYGATFRAAAAVQHANAADGVRIFNSLAATVYADSTAAHADMQGRRLKAVSDGLDHNATGLRVIAQTQQDGGTWEQGGVEGKMRGSTQTVGIAAKTGENTTAAATLGMGHSTWSENSANAKTDSISLFAGIRHDAGDIGYLKGLFSYGRYKNSISRSTGADEHAEGSVNGTLMQLGALGGVNVPFAATGDLTVEGGLRYDLLKQDAFAEKGSALGWSGNSLTEGTLVGLAGLKLSQPLSDKAVLFATAGVERDLNGRDYTVTGGFTGATAATGKTGARNMPHTRLVAGLGADVEFGNGWNGLARYSYAGSKQYGNHSGRVGVGYRF

SEQ ID NO: 3897 - protein, 84 aa, Neisseria meningitidis
MSGHDYAVELEEAREILNSLRKAYKEHAAGRGMTKRYKIKDREMEFSSLADLLKQIRFWQQEIKRLEAAAGVSPRRSGRIITRF

SEQ ID NO: 3898 - protein, 97 aa, Neisseria meningitidis
LHKQVQHITTKLFYFKITDISFFIDFKFHIFNILGILFQRKRNRLIKTIPAIHSDKTARNIRFPISTTIRYRTPRCRFRLHIRQNFIRKENVENKKN

SEQ ID NO: 3899 - protein, 124 aa, Neisseria meningitidis; identical to SEQ ID NO: 1868

SEQ ID NO: 3900 - protein, 78 aa, Neisseria meningitidis
LKRLEDMIMGFWNGVAKAAKAVGEGMIEAGNEHKALKMEYAEKSSEELHEIVKSDGFFKNSTREKSAAYAILKERGEV

SEQ ID NO: 3901 - protein, 127 aa, Neisseria meningitidis
LYCLRLRRLVLIFVNPLYIIATTVPAQQAFLDAAELMQWSIETEGLGLNVISHKILGKDHAQVEFEAYFRDGQHRSAHHELSGFVNIGGQWYFIDPTVPHPAMKQPCICGSGKKFKACCGKYLKPVA

SEQ ID NO: 3902 - protein, 78 aa, Neisseria meningitidis
MRILDIFKNPATGNVSHSKLWANVACAAGTVKFVMLPDPSAEIWAVYLGIVGGYAVARSLVSVKRQEVENESRETAGE

SEQ ID NO: 3903 - protein, 75 aa, Neisseria meningitidis
MAKIKIIPTRSFFDGEQTFATGKKYSVDESAAAVYIREGWAAEAPAKEAESPVADGGEAEDSGNASGEGGEDGSV

SEQ ID NO: 3904 - protein, 63 aa, Neisseria meningitidis
MNTNQDTIPFGGNLVICCSTGNGGDGRFSCLITNQIPDLNLVRSGQAFPMFIYEYETREKRKA

SEQ ID NO: 3905 - protein, 66 aa, Neisseria meningitidis
VDTVGSLAIGYATGGNAGAFTGANADWNNRQLHSSEYKLAEQYADIVASRLNISKETCTVIYLGIN

SEQ ID NO: 3906 - protein, 160 aa, Neisseria meningitidis
MTHISSPRNEFIRGIKESSPMLIGLLPWALILGMQGGQKGMSWLEMLLMTGMNFAGGSEFATVNLWAEPLPILLIATVTFMINSRHILMGAALAPHLKEIPLKKAVPALFFMCDESWAMAFSEIQKRKAAGLPAFNMPFYSGLTKTSTALPRLSSKRTIL

SEQ ID NO: 3907 - protein, 119 aa, Neisseria meningitidis
LERKNNIIELSIEDLELIYGGGLGERILEGGANGAQIGGSIGAGIGLGAGIVSGGIPAGPAIILGGTVGAAVGAATGMGVAAYEYYQETQPKGTVTVGPISAFAVDKSGNGYTDSTNYC

SEQ ID NO: 3908 - protein, 80 aa, Neisseria meningitidis; identical to SEQ ID NO: 1154

SEQ ID NO: 3909 - protein, 78 aa, Neisseria meningitidis
MLRVQKWGNSAAVRLPADMLKQLDFKIGDALVAEVHNGELRVRAARRFRLADLLAEMEETPPRVEGWEILDDVGNEVV

SEQ ID NO: 3910 - protein, 68 aa, Neisseria meningitidis
MNIIGKLKEAASYFLTKLIGENPSNEQVNRALIQMPNVRPIHTYPRPNLRNSGVAAAKRAARKRKNRR

SEQ ID NO: 3911 - protein, 68 aa, Neisseria meningitidis
MNILSINNQNSTISLTQDEVFVLRAILNEIYAGVCVDSREFENVSGVRKHEVDNLQQQFAGIYKKMTT

SEQ ID NO: 3912 - protein, 147 aa, Neisseria meningitidis; identical to SEQ ID NO: 1529

SEQ ID NO: 3913 - protein, 65 aa, Neisseria meningitidis
MSYDLSKRLVIGLASSALFDLSESDNIFRMEGAETYRQYQREKQNHPLKKALSFHLLKNFCQSMK

SEQ ID NO: 3914 - protein, 131 aa, Neisseria meningitidis
LCSSNSYSEPVRLERSQIKFQSSNNLKSSGFKLDSSSKSFAKFIEAANFEHIPTGAKARINAKITASVSRAGVLAGVGKLARLGAKFSTRAVPYVGTALLAHDVYETFKEDIQARGYQYDPETDKFAKVSG

SEQ ID NO: 3915 - protein, 99 aa, Neisseria meningitidis
MTWVGGSGNAQSSYYCEICESAGLNDTGNPDKSLGLPNNTFSNPPGWGATIGALAGSRIGMPEFGTFASHAIENFDWSWYRRYREIAETIEREYSGGLP

SEQ ID NO: 3916 - protein, 73 aa, Neisseria meningitidis
MGGKVQHNKGKIRDNALKALVKSDLFRHKVERKRKGKGSYNRQEAKKWRDGFDTVPPFLCLKRGSFRRSRRSL

SEQ ID NO: 3917 - protein, 72 aa, Neisseria meningitidis; identical to SEQ ID NO: 202

SEQ ID NO: 3918 - protein, 74 aa, Neisseria meningitidis
MNQKYILSANNNSLIEEIHNTVQSIGYCIVRGLNLNHLDGSRRNKKLFDFLSQLGMLTNHKGDGFKSIFWDIKY

SEQ ID NO: 3919 - protein, 707 aa, Neisseria meningitidis
MGKANAFTAPITVVNYDEQALNNTEARTLVDAVAKKDASVWQFGGESNTLTGLYFRGYQLDARQFSVNGLAGMYGTQGTASVQVGSAQLIKGASTAVNGMNPEGAVSGSVNIETKKAADEGNRKIGLGRFSNNRAQGTFDLGQRFGENKAFGVRANGKLRHGDTPRHGYSEDNKEFAVNADYRGETLRVAFDSIYAKRKTNGGRARMQDIQNAGGRLFGAPDGKTNLLPSWNWQNTAGQTNMLTFEWDAFDNAQITGGIGYNKARYYGTLISPTVCLNATSTCTDMQNTNASGKVTARNYDYNTGTARLTDQYFRTLSMNLTARGEFETSPVTHNWSTAFDRVIRQRKTIRGTAAGAGKVEVKANENIANQLASFKADYPNSWENSANLDANIKVNSLALSDTLGFVDNKYRLTLGGRFQAVEYTNKKKSQSGDAKRFSPMLMAAWVPQPDLVVYGNYMEDLEPADIKTDDSGETTMAKPRVSRQFEVGVRKNWGNFVTTLNAFQIKRPGYWRGHTTTKTTKGVTTTLTYGNNSDFARYKAQGGAAGDEQGMERNRGIEFNTYANLLNNTLRPTLGLMYLQSTVKEYPNSRDMLVNGVQVANPRVIAKAGLEWDTPFAKGLTLNSNVSYFGKSYQDTQKQYAFPSYTLVDVGARYKTKLGKNTLTVSSSVENLFNKNYWQVQRGQYDRSFAVVGMPRTYWLKAELDF

SEQ ID NO: 3920 - protein, 71 aa, Neisseria meningitidis
LRIGNDLFVKRVQRIPGKLLVTSENPRYAPFEIDLSNTQDDIAIIGRVEWYGRSIPHRKTSLCSATTAKSC

SEQ ID NO: 3921 - protein, 146 aa, Neisseria meningitidis
LTEEMMKKQRHILCVGCLYIIIEGQRISQYRLDGSVERDAGHVVQYLRIRGCSGLYIQPHWPYFNFPTWKDHRDTYNCFRFACILCIIYLCKRSASDSSLRYTPNSKALSCCLMLCQFGRKLSICAIKRALRWRSSKWVSSWTTTY

SEQ ID NO: 3922 - protein, 410 aa, Neisseria meningitidis
MPSAHYPEMSEKLMAVLMAMLVTLMPFSIDAYLPAIPEMAQSLGADVHRIEQSLSVFMFGTAFGQVVGGSVSDIKGRKPVALAGLTVYCLAVAAIVFASSAEQLLNLRVVQAFGAGMTVVIVGAMVRDYYSGRKAAQMFALIGIILMVVPLVAPMVGALLQGLGGWQAIFVFLAAYSLVLLGLVQYFLPKPAVGGKIGRDVFGLVAGRFKRVLKTRAAMGYLFFQAFSFGSMFAFLTESSFVYQQLYRVTPHQYAWAFALNIITMMFFNRVTAWRLKTGVHPQSILLWGIVVQFAANLSQLAAVLFFGLPPFWLLVACVMFSVGTQGLVGANTQACFMSYFKEEGGSANAVLGVFQSLIGAGVGMAATFLHDGSATVMAATMTASTSCGIALLWLCSHRAWKENGQSEYL

SEQ ID NO: 3923 - protein, 137 aa, Neisseria meningitidis
LPSDKEARAGCLSLPANNGIIRALSPPFTGINIRLFAALGLLSLSGAAAQASVYHCNSNGKSVYTSAPAGSCADADLPKISSHQGGGYRLKIKKLSQEAKIHIESKKKNKKPAGKKNRQAAKAPKENQKQPTEKKSP

SEQ ID NO: 3924 - protein, 68 aa, Neisseria meningitidis; identical to SEQ ID NO: 531

SEQ ID NO: 3925 - protein, 71 aa, Neisseria meningitidis
MMETLILDIGGMSCGGCVKSVTRILEGVKGVASVEVSLENKSATVGYDPAQTDAGALIEAVEDGGYDAALK

SEQ ID NO: 3926 - protein, 71 aa, Neisseria meningitidis
MKTLLLTFGIFLTVIIGMAVGYIFSKRSIKGSCGGITALGMKKMCDCDTPCDTLQKKLDEEKQAGGIRVDR

SEQ ID NO: 3927 - protein, 62 aa, Neisseria meningitidis
VMESMFILVPISIILAFVIGWFFWWSGKNGQFDDLEGPAHRILMDDDSTSKLIEKERENDVR

SEQ ID NO: 3928 - protein, 111 aa, Neisseria meningitidis
LFVCFEKCLFPDFAIPIRFCAVRCVLARTCSKSHVIPVFEALIRDADFQYIFSYNNEGLMSVGQVREIFECFGKYDLVQTEYRRFKADKTENRNHKANSTFEYLHILEKTF

SEQ ID NO: 3929 - protein, 386 aa, Neisseria meningitidis
VHINFSMEYKEFNENYLYKKPFIFKKALDVSSISWKEINELYQRADPTDWQFKFRKGEIIPKEAYVESFNDVGRIRHRFNKTAVYQYLQDGATMVYNRIDNEPFVDSIAKQIAQFAQAQTVVSGYLAFGSSPSYRNHWDTRDVFAVQLIGKKHWTVSAPNFDMPLYMQQAKDMPHITPPTTVDMEVILEAGDILYIPRGWWHNPMPMNCETFHLAIGTFPPNGYNYMEWLMKKIPDIQSIRQNFIDWEHDQNIDNAAQAVTEMMKNQENYQAFIQDFLGNQRVNTAFNMQIFGNLDNDRLPENSTIKLNSLDNRTIKQGYIIANGIKTNLDNDSQTILQWIADKHSVKLTQLYEFCQNQNINLEKVEKLVFDLTMIDVLECLTDER

SEQ ID NO: 3930 - protein, 357 aa, Neisseria meningitidis
MRPFFVGAAVLAILGALVFFISPGAVVLHRQIFLELMLPAAYGGFLTAALLDWTVFSGNLKPVATLMAALLLAASAILPFSPQTASFFVASYWLVLLLFCARLIWLDRNTDNFALLMLLAAFTVFQTAYAVSGDLNLLRAQVHLNMAAVMFVSVRVSILLGAEALKECRLKDPVFIPNIVYKNIAITFLLLHAAAELWLPAQTAGFTALAVGFILLAKLRELHHHELLRKHYVRTYYLLQLFAAAGYLWTGAAKLQNLPASAPLHLITLGGMMGGVMMVWLTAGLWHSGFTKLDYPKLCRIAVPILFAAAVSRAVLMNVNPIFFITVPAILTAAVFVLYLFTFVPIFRANAFTGDPE

SEQ ID NO: 3931 - protein, 132 aa, Neisseria meningitidis
MANRFRQRKSAYRRLSGKPLFSDGIAANLCGGRKTLSYNLSRFKISIRSEMQKISFNLLKPATPIGKRRPGLNGAPHIPMPSPRYLPASPEMPGNNIHPAKIRNNTPGGRQSQTAPQSIRHQKNKPPPRASS

SEQ ID NO: 3932 - protein, 218 aa, Neisseria meningitidis
MIKNLYKLINYAALIGFAPNIVFAWPMFVDPPPYQNIHVRSWKARRDSGIVKQDLDFSCGAASIATLLNNFYGRHYSEAEILDKMDKTQMRASFDDMQRIMPELGFEAQGYALPFEQLVQLKIPVIVYLKYRKNNHFSVLNGINGETVLLADPSLGHVSMSKSQFLSAWKTRDGEMEGKILAIVPKNTDFVRNQMFFNKNPVRQTRFTVEQIQMRQKR

SEQ ID NO: 3933 - protein, 385 aa, Neisseria meningitidis
MKRQALAAMIASLFALAACGGEPAAQAPAASAEAASSAAQTAAETPTGELPVIDAVTTHAPEVPPAIDRDYPAKVRVKMETVEKLTMEDGVEYRYWTFDGDVPGRMIRVREGDTVEVEFSNNPSSTVPHNVDFHAATGQGGGAAATFTAPGRTSTFSFKALQPGLYIYHCAVAPVGMHIANGMYGLILVEPKEGLPKVDKESYIVQGDFYTKGKKGAQGLQPFDMDKAVAEQPEYVVFNGHVGAIAGDNALKAKAGETVRMYVGNGGPNLVSSFHVIGEIFDKVYVEGGKLINENVQSTIVPAGGSAIVEFKVDIPGSYTLVDHSIFRAFNKGALGQLKVEGAENPEIMTQKLSDTAYAGNGAAPAASAPAASAPAASASEKSVY

SEQ ID NO: 3934 - protein, 556 aa, Neisseria meningitidis
MLLTLSLRDFVIVENLNLDFQSGFTVLTGETGAGKSITLDAIGLLLGDKADYSQVRSGAKEAQLSALFDISHLPVLKAELYEQGLLNDGEEELSIRRIIDAKGKSRSFINNQAATLAQLKAVGSQLIDIHGQNAHHSLNQEAAQRELLDAFAGSRAQAETVRQLYQNWANSKKALQEAQEQAENIALEQERLEWQFNELNQLDIKQGEWEALSQSHDSLAHSAELLQAAEEVGSKIDGDNGIQRHIYQCQKLLANLQNIEPRFAESLNMLASIEAELGEISANMRDVAGSDINPNELAAQEQRMGELMGMARKYRIEPEELPAKLAEIEERLQSLQAAADLDALEHNVAHNFAEYQEAAHILSAMRHQAAERLSGETTEHMQHLAMKGARFDIVLLPSSPTAHGLEQVQFQVAANKGNPPRPLNKVASGGELARISLALQVVASQYTQVPTLIFDEVDTGIGGGVAEMVGKALRALGRKHQVLAVTHLPQVASCGENHWRVRKHSEGEQTVSEISILDEIQRVEEVARMLGGEVITDTTRQHAAELLQLASKNSLF

SEQ ID NO: 3935 - protein, 108 aa, Neisseria meningitidis
MNFKRLFLTAAATALMGISAPALAHHDGHGDDDHGHAAHQHSKQDKIISRAQAEKAALARVGGKITDIDLEHDNGRPHYDVEIVKNGQEYKVVVDARTGRVISSRRDD

SEQ ID NO: 3936 - protein, 1714 aa, Neisseria meningitidis
  misc_feature 1709, 1710: 'Xaa' is any amino acid
MNKGLHRIIFSKKHSTMVAVAETANSQGKGKQAGSSVSVSLKTSGDLCGKLKTTLKTLVCSLVSLSMVLPAHAQITTDKSAPKNQQVVILKTNTGAPLVNIQTPNGRGLSHNRYTQFDVDAKGAVLNNDRNNNPFLAKGSAQLILNEVRGAASKLNGIVTVGGQKADVIIANPNGITVNGGGFKNVGRGILTTGAPQIGKDGALTGFDVRQGTLTVGAAGWNDKGGADYTEILARAVALQGKLQGKNLAVSTGAQKVDYASGEISAGTAAGTKPTVALDTAALGGMYADSITLIANEKGVGVKNAGTLEAAKQLIVTSSGRIENSGRIATTADGTEASPTYLSIETTEKGAAGTFISNGGRIESKGLLVIETGEDISLRNGAVVQNNGSRPATTVLNAGHNLVIESKTNVNNAKGSANLSAGGRTTINDATIQAGSSVYSSTKGDTELGENTRIIAENVTVLSNGSIGSAAVIEAKDTAHIESGKPLSLETSTVASNIRLNNGNIKGGKQVVLMADGDIQAKASNLNASGNLYIHAGKDLDLNADKDLSTQSISLRADNTALISSNGNTLTAEKNLDIQAGSLSVRQSNLQSSGGNVQMSATKGNISLNQSWINASQNIDTAALQGNIISDGLTAVAEVGRVSLLANGNVDFNGLNTLIAEGDINAGSVGKGRLKMDNTDIYASAGDVKLVAGGQLDLGNGTVNGGHISLDSNKGSMVVQDVHLNARASLKVDADQTLTINNSKLNSGHNTQINTNHGHMTLNQLDAHSRRHMSISAQGKGKGKDSGQILQNDQQNSKSTLAADGVLSLNSSALQVLDNTTLRGGAINIKAGGGIIKRGYIDWETQDTATMRSAELKPLSGMMSIESGGDNPLTVEPGNRIVSAGDLAVNHNGTFQISARAGNNGNPSAQTASVSAKGNIGIVAGEVDIDAANIAAGKDLALVATKGNISLNSIRNTFSNYQLKTDKHNITQQLTDVEQELSKLTSDPKYRKAQDLPQMLRRKYKRRDKVFGDSEARLRGLRAEINAADEAWAELQSPVKALLERKQLLQQALLTVSQPGSGHENQGSTLSGQNIKLLAAGGIRIQGSKVAATQQANIQAAGFLPAPAAEELQEGRLQSAIDISGVFDTFEYGQQGSDKYGYAIFSRPSEISGKTGVTLSAPNANENSRISLSAANIEAENGKIKLQSYGDQSYYAGQGELYTLERRSYKTGKWYNRKHITEVKEHKNAKPDAVNLSASQGIDIKSGGNIDAYATAFDAPKGSINIEAGRKLTLYAVEELNYDKLDSQKRRRFLGISYSKAHDTTTQVMKTALPSRVVAESANLQSGWDTKLQGTQFETTLGGATIRAGVGEQARADAKIILEGIKSSIHTETVSSSKSTLWQKQAGRGSNIETLQLPSFTGPVAPVLSAPGGYIVDIPKGNLKTEIEKLSKQPEYAYLKQLQTAKNVDWKQVQLAYDKWDYKQEGLTGAGAAIVVIIVTALTYGYGAAAAGSVTAAGSSTAAAATTTAAATTTVSTAAAMQTAALASLYSQAAVAIINNKGDVGKALKDLGTSDTVKQIVTSALTAGALNQMGADIAQLNSKVRTELFSSTGNQTIANLGGRLATNLSNAGISAGINTAVNGGSLKDNLGNAALGALVNSFQGEAASKIKTTFSDDYVAKQFAHALAGCVSGLVQGKCKDGAIGAAVGEIVAESILGGRNPATLSDAXXHTLN

SEQ ID NO: 3937 - protein, 429 aa, Neisseria meningitidis
MNRTYANFYEMLAAACRKNGNGTAVFDGKEKTAYRALKQEAEAVAAYLQNIGVKFGDTVALAVSNSTEFITAYFAVSAIGAVAVPMNTFLKNSEYAYILNDCKARFLFASAGLSKELAGLKAQTPVEKIIWTDKSRPAGEMAEGDAFFEDVRRFPEKPDLGRQPRINDLAHIIYTSGTTGHPKGALISYANLFANLNGIERIFKISKRDRFIVFLPMFHSFTLTAMVLLPIYMTSPVVAVNTPERQKARSVGIPLPGLEAKAVDEELVEVPRGEVGELIVRGGSVMRGYLNMPAATDETIVNGWLKTGDFVTIDEDGFIFIVDRKKDLIISKGQNVYPREIEEEIYKLDAVEAAAVIGVKDRYADEEIVAFVQLKEGMDLGENEIRRHLRTVLANFKIPKQIHFKDGLPRNATGKVLKRVLKEQFDGNK

SEQ ID NO: 3938 - protein, 889 aa, Neisseria meningitidis
VLKTPPTLAAELSGKTGVSISAPYANENSRILLSTTDISSENGKIKIQSYGDQSYYAGQGELYTLERRSYKTGKWYNRKHITEVKEHKNAKPDAVNLSASQGIDIKSGGNIDAYATAFDAPKGSINIEAGRKLTLYAVEELNYDKLDSQKRRRFLGISYSKAHDTTTQVMKTALPSRVVAESANLQSGWDTKLQGTQFETTLGGATIRAGVGEQARADAKIILEGIKSSIHTETVSSSKSTLWQKQAGRGSNIETLQLPSFTGPVAPVLSAPGGYIVDIPKGNLKTQIETLTKQPEYAYLKQLQVAKNINWNQVQLAYDKWDYKQEGMTPAAAAVVVIVVTVLTYGALSAPAAAGTAGAAGAGAGGAAAGTAAGTGVAAGTAATTGVAAGTSAAAITTAAGKAALASLASQAAVSLINNKGDINHTLKELGKSSTVRQAATAAVTAGVLQGISGLNTQAAEAVSKHFHSPAAGKLTANLINSTAAASVHTAINGGSLKDNLGDAALGAIVSTVHGEVASKIKFNLSEDYIAHKIAHAIAGCAAAAANKGKCQDGAIGAAVGEIVGEALVKNTDFSRMSATEIEKAKAKITAYSKLVAGTASAVVGGDVNTAANAAQIAVENNTLYPRCVGAKCDEFQKEQQKWIRENPEEYREVLLLQTGFIPIIGDIQSFVQAQTAADHLFALLGVVPGIGESIQAYKVAKAAKNLQGMKKALDKAATVATAQGYVSKTKIKIGQIELRVTAATDKQLLKAIGEGRDTTGKMTEQLFDSVAKQNGFRVLSGGKYGGNNGFDHVWQAADGSVVLIVESKQIRNGTVQLNPNGAGGYTQMSEDWIKQVANSLPDGSPAKAAVFKAEREGKLKTAIAGVDRQTGKAVILSVKVPSKTNIRR

SEQ ID NO: 3939 - protein, 505 aa, Neisseria meningitidis
MLYFRYGFLVVWCAAGVSAAYGADAPAILDDKALLQVQRSVSDKWAESDWKVENDAPRVVDGDFLLAHPKMLEHSLRDALNGNQADLIASLADLYAKLPDYDAVLYGRARALLAKLAGRPAEAVARYRELHGENAADERILLDLAAAEFDDFRLKSAERHFAEAAKLDLPAPVLENVGRFRKKTEGLTGWRFSGGISPAVNRNANNAAPQYCQQNGGRQICSVSRAERAAGLNYEIEAEKLTALADNHYLLFRSNIGGTSYYFSKKSAYDDGFGRAYLGWQYKNARQTAGILPFYQVQLSGSDGFDAKTKRVNNRRLSPYMLAHGVGVQLSHTYRPNPGWQFSVALEHYRQRYREQDRAEYNNGRQDGFYVSSAKRLGESATVFGGWQFVRFVPKRETVGGAVNNAAYRRNGVYAGWAQEWRQLGGLNSRVSASYARRNYKGVAAFSTEAQRNREWNVSLALSHDKLSYKGIVPALNYRFGRTESNVPYAKRRNSEVFVSADWRF

SEQ ID NO: 3940 - protein, 351 aa, Neisseria meningitidis
MELKIDIATNNFKHGGGTERYTLDLVKGLNRQNITPAVYATKFDHGIPEYAMIEPHLVDQHRTLKKLRSFLFSSRLAQTRKNSAAKLIACHHADYADLLICGGTHLGYLHHMAQKPNLLDRLAIRRNRSNYATAKLIMAHSHMMRRELVGLYGVPPERIQVPPPPADTERFFPQPGETADLRAKYGFADHETVFLFPSTGHTRKGLELLADFFEHTGLPVKLAVVGSPLPRPMKNVVGLGFCTDMPELYRAADFTIMASLYEPFGLVGVESVLCGTRVVLSENMACTEVMNEEAGFFFSRQNPETLAQAVAQAVSLKKQGGHRLSDPMRALNYNPSLSHHIDRLTDMLASV

SEQ ID NO: 3941 - protein, 218 aa, Neisseria meningitidis; identical to SEQ ID NO: 3932

SEQ ID NO: 3942 - protein, 122 aa, Neisseria meningitidis
MSFGYLIATSQPCELLTKSRGETFSLIMDKWIYFRFCEGNIYTIRKNETESCLTERGGKWLKHIYEFNRGSFIFSYVLLKKRESEENFAEIVLKSIKNNKILTVKVRSGLHFDLRNIYRIEM

SEQ ID NO: 3943 - protein, 585 aa, Neisseria meningitidis
MGFPVRKFDAVIVGGGGAGLRAALQLSKSGLNCAVLSKVFPTRSHTVAAQGGISASLGNVQEDRWDWHMYDTVKGHWLGDQDAIEFMCRAAQAVIELEHMGMPFDRVESGKIYQRPFGGHTAEHGKRAVERACAVADRTGHAMLHTLYQQNVRANTQFFVEWTAQDLIRDENGDVVGVTAMEMETGEVYIFHAKAVMFATGGGGRIYASSTNAYMNTGDGLGICARAGIPLEDMEFWQFHPTGVAGAGVLITEGVRGEGGILLNADGERFMERYAPTVKDLASRDVVSRAMAMEIYEGRGCGKNKDHVLLKIDHIGAEKIMEKLPGIREISIQFAGIDPIKDPIPVVPTTHYMMGGIPTNYHGEVVVPQGDEYEVPVKGLYAAGECACASVHGANRLGTNSLLDLVVFGKAAGDSMIKFIKEQSDWKPLPANAGELTRQRIERLDSQTDGENVDALRRELQRSVQLHAGVFRTDEILSKGVREVMAIAERVKRTEIKDKSKVWNTARIEALELDNLIEVAKATLVSAEARKESRGAHASDDHPERDDENWMKHTLYHSDTNTLSYKPVHTKPLSVEYIKPAKRVY

SEQ ID NO: 3944 - protein, 615 aa, Neisseria meningitidis
MHDTRTMMIKPTALLLPALFFFPHAYAPAADLSENKAAGFALFKNKSPDTESVKLKPKFPVRIDTQDSEIKDMVEEHLPLITQQQEEVLDKEQTGFLAEEAPDNVKTMLRSKGYFSSKVSLTEKDGAYTVHITPGPRTKIANVGVAILGDILSDGNLAEYYRNALENWQQPVGSDFDQDSWENSKTSVLGAVTRKGYPLAKLGNTRAAVNPDTATVDLNVVVDSGRPIAFGDFEITGTQRYPEQIVSGLARFQPGTPYDLDLLLDFQQALEQNGHYSGASVQADFDRLQGDRVPVKVSVTEVKRHKLETGIRLDSEYGLGGKIAYDYYNLFNKGYIGSVVWDMDKYETTLAAGISQPRNYRGNYWTSNVSYNRSTTQNLEKRAFSGGIWYVRDRAGIDARLGAEFLAEGRKIPGSDVDLGNSHATMLTASWKRQLLNNVLHPENGHYLDGKIGTTLGTFLSSTALIRTSARAGYFFTPENKKLGTFIIRGQAGYTLARDNADVPSGLMFRSGGASSVRGYELDSIGLTGPNGSVLPERALLVGSLEYQLPFTRTLSGAVFHDMGDAAANFKRMELKHGSGLGVRWFSPLAPFSFDIAYGHSDKKIRWHISLGTRF

SEQ ID NO: 3945 - protein, 106 aa, Neisseria meningitidis
LGEKIKDGKKTVLSREEEQKICNTFTNKQAVEDFSVVIGYDEIKAKNHSLSAGQYFEVKIDYVDISADEFAQKMAGFSADLDKLFAESAELEKEIKDRLAMLKFNS

SEQ ID NO: 3946 - protein, 133 aa, Neisseria meningitidis; identical to SEQ ID NO: 8

SEQ ID NO: 3947 - protein, 436 aa, Neisseria meningitidis
MDTSKQTLLDGIFKLKANGTTVRTELMAGLTTFLTMCYIVIVNPLILGETGMDMGAVFVATCIASAIGCFVMGFVGNYPIALAPGMGLNAYFTFAVVKGMGVPWQVALGAVFISGLIFILFSFFKVREMLVNALPMGLKMSIAAGIGLFLALISLKGAGIIVANPATLVGLGDIHQPSALLALFGFAMVVVLGHFRVQGAIIITILTITVIASLMGLNEFHGIIGEVPSIAPTFMQMDFEGLFTVSMVSVIFVFFLVDLFDSTGTLVGISHRAGLLVDGKLPRLKRALLADSTAIVAGAALGTSSTTPYVESAAGVSAGGRTGLTAVTVGVLMLACLMFSPLAKSVPAFATAPALLYVGTQMLRSARDIDWDDMTEAAPAFLTIVFMPFTYSIADGIAFGFISYAVVKLLCRRTKDVPPMVWVVAVLWALKFWYLG

SEQ ID NO: 3948 - protein, 271 aa, Neisseria meningitidis
MERIDLALNLVEERSRLGYSRKNFAEQTGCSAESLRLYESGQVNIPADFLLAAVQLGVDIQFVFTGIHSANLNAVSDDLNKKLDDAIGKSNVENQINGNVSNAVIASSGSVVHQINTQNHVIRTRVDSKPGKEHITLEQASKLQQLVKQVAAAEEIAKRSPKSIRAIWASLNAHCKVPSYKLIALSDYDKAETYLRKWLGRLSNTATSKNNDPDWRKKKYAYIKLNVKQLELEDWLKSYLEKNFSVESLTELSDEDLQKTYAAVSTKKRKK

SEQ ID NO: 3949 - protein, 266 aa, Neisseria meningitidis
MADILPSDKRRQPPKTKGNPMNIIEQEMKHSSLRKVDAEIAKIIADAHKINAESVKIAQESRWYPMIAATGLVTAIAAVLALIFKFAPQAPRGALSQQNEQSRTIQPLPRMDYRARRRKPFHYPLPLSPPDCQNPQADRRRMPGRALPPFRKRHHPLRFYFFRRQTGRRSPICRRPYRNLPQGSQKNMRNKINRNDMELGYTPYNLRTLRNRCKLTQAELAQIVGVKHYIQVGRWEAEPDTETRRADMPLEKWRQFLDWIEKTNAV

SEQ ID NO: 3950 - protein, 141 aa, Neisseria meningitidis
MFVNEKDPYAALFAGLVFLTLPFALAVHDAFALAFGRAGLLVSVSDGGFGWRGGWDGTVWFVFGVFAFLNVVVSAGLTKLAYKKMMRRHSRGFSSCCLAVPPWAGCVGRRCWNMRLPCGWCRCHCPNARARRCSRWCFTGK

SEQ ID NO: 3951 - protein, 64 aa, Neisseria meningitidis
MPSENRSAGFVVHYTVLQDKAQGRAAGCIVATVFLPDGVKNTVATPTDNEKREQCRLNRVLRRA

SEQ ID NO: 3952 - protein, 233 aa, Neisseria meningitidis
MTEPAAEGGKAAKALKKYLITGILVWLPIAVTVWVVSYIVSASDQLVNLLPKQWRPQYVLGFNIPGLGVIVAIAVLFVTGLFAANVLGRQILAAWDSLLGRIPVVKSIYSSVKKVSESLLSDSSRSFKTPVLVPFPQSGIWTIAFVSGQVSNAVKAALPKDGDYLSVYVPTTPNPTGGYYIMVKKSDVRELDMSVDEALKYVISLGMVIPDDLHVKTLAGPMPSEKAELPEQQ

SEQ ID NO: 3953 - protein, 310 aa, Neisseria meningitidis
MDIVFAADDNYAAYLCVAAKSVEAAHPDTEIRFHVLDAGISEANRAAVAANLRGGGNIRFIDVNPEDFAGFPLNIRHISITTYARLKLGEYIADCDKVLYLDIDVLVRDSLKPLWDTDLGDNWLGACIDLFVERQNAYKQKIGMADGEYYFNAGVLLINLKKWRQHDIFKMACEWVEQYKDVMQYQDQDILNGLFKGGVCYANSRFNFMPTNDAFMANRFASRHTDPLYRDRTYTAMPVAVSHYCGPAKPWHRDCTAWGAERFTELAGSLTSVPEEWRGKLAVPHRVFPTKRMLQRWRRKLSARFLRKIY

SEQ ID NO: 3954 - protein, 89 aa, Neisseria meningitidis
VFAVIFFSTLGCILAWIRDIPKIKSKKILARSLYIIGIINVIISYVLIKNIFSVSDGGGIKYVAIYLSNLFFWTVLMYVLVKRLSKKPS

SEQ ID NO: 3955 - protein, 141 aa, Neisseria meningitidis
MSEPIITPAAVYIFGGVVGAGYLLGMPVDAVVLGAVASAAVTMISEPKSRWMVVAYIVIGGLLGGAFAPPLTHFLIGEVVGSHPSLGEQRIQFAHAFAPVVVGLLWQVLLRFARAVWPSFEKHADDIVEWLLNLLPWRPKK

SEQ ID NO: 3956 - protein, 91 aa, Neisseria meningitidis
MKLLLILSAAPSLISAYLMICRLNGRKWSALSPEAWAYLAFLGGAIYTFYIVFAYGLTPSLGKFMMDIAACVYFGSRSVRVVKWRHRHGLK

SEQ ID NO: 3957 - protein, 465 aa, Neisseria meningitidis
MTPSTLKKTVLLLGTAFAAASVHASGYHFGTQSVNAQSTANAAAAEAADASTIFYNPAGLTKLDSSQISVNANIVFPSIRYEADSATDFTGIPVQGSKSGKITKTTVAPHIYGAYKVNDNLTVGLGVYVPFGSATEYEKDSVLRHNINKLGLTSIAVEPVAAWKLNERHSFGAGIIAQHTSAELRKYADWGIPKKAQMLQATPSNPTAAAQIKADGHADVKGSDWGFGYQLAWMWDINDRARVGVNYRSKVSHTLKGDAEWAADDAMAKQLWNSNMLAPLGYTPSEKARVKIVTPESLSVHGMYKVSDKADLFGDVTWTRHSRFDKAELVFEKEKNIANGKKSDRTTITPNWRNTYKVGFGGSYQISEPLQLRAGIAFDKSPVRNADYRMNSLPDGNRIWFSAGMKYHIGKNHVVDAAYTHIHINDTSYRTAKASGNDVDSKGASSARFKNHADIIGLQYTYKFK

SEQ ID NO: 3958 - protein, 121 aa, Neisseria meningitidis
LCEGDIVFFGGRDGAAVGNIFFDGFADGGHFGDGAQYGFATFNAVDAASDSAGGIAGAAVLEIVEDEDFEGDLGSWADSVKMVRSSDGITVVPMPSETAAVQAFVPDGKIGYNIGHQCPTY

SEQ ID NO: 3959 - protein, 741 aa, Neisseria meningitidis
MKLEASKQQKFKKSFIISLFFSILYTSPLLAVDYVYDKTKLTDDEITRLKKLRNRNSEYWKDDLFRIDIPKETGLRHDIEGAATGNFSYPIFSYKTFDNDTIDPDKKISFFDSPYTPGYTAAFVQGFGVKERNGDTEEQAKKYIDELRTKLKTAPIIAAAQLGYFQLNDGSGDSWLYNYYRNDIFNSYGTVKHSNINSEILAVGNVADLYYKHFIRNPFIYVDWSLWTSSLPRLKVSENSHVIGQIIHLYRLDLENSLWEPRWDSDVSYLNLFNSHIRFNTKNESLVVGESRIRPTPDNASSPEKFFKREFTDIGYQSGSPVITCDYSGCRDGYSGNSSIHFAYDLSEREADKPVLTLKSKVTGKTAIVFEEKALNNLKNLTYRQLIKTETDVEPDAFFLLEEYKKGRYRLFLRQCPNGFCIGVEKLAIPTHLVASYAQQAQAANTLFSLRLNDKNSDIFDRTLPRKGLWLRVIDGHSKQWVQGKTAPVEGYRKGVQLGGEVFTWQNESNQLSVGLMGGQAEQRSTFRNPDTDNLTTGNVKGFGAGVYATWHQLQDKQTGAYADSWVQYQRFRHRINTEDATERFTSKGITASIEAGYNALLAEHFTEKGNRVRFYLQPQAQLTYLGVNGKFSDSENAQVNLLGFRQLQSRVGVQAKAQFSLYKNIAIEPFAAVNALYHNKPFGVEMDGERRVINNKTAIESQLGVAVKIKSHLTLQASFNRQTSKYHQAKQGALNLQWTF

SEQ ID NO: 3960 - protein, 692 aa, Neisseria meningitidis
MTLKASKQASKQASKQASKQASKQASGRVNLLTLSVLSLFCTPYVGSDAYDPVKEAEIKNKFILEAAEDRNSHVWRGPCSVSFDCFGAFSYQPGSDTRSTNIGDAADFSFSDKPANGVSHYFSSGKTDPNSSEALYDEINITGKNYNSGILAVDNMPVVKKYVTENYGADLKQAVKDQLKDLYKTRPEDWEKNKKIVEEAIIKQYGIPRNKINKFRKVIDPIIEEAVLTPHSNTTPTNLDNIFNKKLHVKIENKSHVAGQVLELTKMTLKDSLWEPRRHSDIHTLETSDNARIRLNTKDEKLTVHKDYAGGADFLFGYDVRESDEPALTFEDKVSGQSGVVLERRPENLKTLDGRKLIAAKTADSGSFAFKQNYRQGLYELLLKQCEGGFCLGVQRLAIPEAEAVLYAQQAYAANTLFGLRAADRGDDVYAADPSRQNIRGGAAADGRRKGVQIGGEVFVRQNEGSRLAIGVMGGRVGQHASVNSKGGAAGSDLHGYGGGVYAAWHQLRDKQTGAYLDGWLQYQRFKHRINDENRAERYKTKGWTASVEGGYNTLVAEGVVGKGNNVRFYLQPQAQFTYLGVNGGFTDSEGTGVGLLGSGQWQSRAGIRAKNRFALRNGVNLQPFAAFNVLHRSKSFGVEMDGEKQTLAGRTALEGRFGIEAGWKGHMSARIGYGKRTDGDKEAALSLKWLF

SEQ ID NO: 3961 - protein, 166 aa, Neisseria meningitidis
MSNYRRDFTRGAHYFFTLALQDRTKDYLIRHIDRLRLAYRETKIRYPFETAAICVLPDHLHFIMRLPEGDHDYPIRIAYLKTRFSQLIPKKYRAPNESKTKKREAGIWQRRFWEHLIRDEQDLNNHRDYIYFNPVKHGYAASVKEWRYSSFFKDVEKGIYPLDWGG

SEQ ID NO: 3962 - protein, 152 aa, Neisseria meningitidis; identical to SEQ ID NO: 1697

SEQ ID NO: 3963 - protein, 306 aa, Neisseria meningitidis
MPNPLYRQHIISISDLSREQLECLLQTALKLKSEPRGDLLEGKLIGSCFFEPSTRTRLSFETAVQRLGGKVIGFSDGANTSAKKGETLADTARIISGYTDAIIQRHPKDGAARVAAEFSRVPVINAGDGTNQHPSQTLLDLVTIYETQGRLDKLKIAMAGDLKYGRTVHSLCQALKRWNCEFAFVSPPSLAMPDYITEELDEAGCRYRILGSLEEAAEWADILYMTRVQRERFDEQEFAKIQGKFNLEASMLAHAKPNLRVLHPLPRVDEIHPDVDATPHAYYFEQATNGVYARMAILSLVLNEEV

SEQ ID NO: 3964 - protein, 95 aa, Neisseria meningitidis; identical to SEQ ID NO: 371

SEQ ID NO: 3965 - protein, 191 aa, Neisseria meningitidis
  misc_feature 185, 186: 'Xaa' is any amino acid
MMMHASVQSRFAPILYVLIFFAGFLTAQIWFNQKAYTEELPPLLSALSAVALVWLAWAFVSARSKAKAEKFYREKMIQNESIHPVLHASLQHLEHKPQMLALLVKNHGKGMAEQVRFKAEVLPDDEDARTIAAELAKMDMFALGTDAVASGETYGRVFADIFELSAALEGRAFKGMLKLTAEYKXXTHLIN

SEQ ID NO: 3966 - protein, 39 aa, Neisseria meningitidis
MAGNKTKARVSKNNNAKNGVGNFKVCALAALIRKKTARR

SEQ ID NO: 3967 - protein, 212 aa, Neisseria meningitidis
  misc_feature 209, 210: 'Xaa' is any amino acid
MKITHCKLKKKVQKELLRFFVLEVTARSAADILGIHPNSAALFYRKIRTVINHHLALAADEVFEGPVEQDESDFGGRRKGRRGRGAAGKVVVFGILKHNGRVYTVIVDNAKSETLLPVIKKKIMPDSIVYTDSLSSCDKLDVSGFIHYRINHSKEFADRQNHINGIENFWNQAKRVLRKYNGIDRKSFPLFLKECEFRFNFGTPSQQLXXHT

SEQ ID NO: 3968 - protein, 694 aa, Neisseria meningitidis
  misc_feature 2, 3, 4: 'Xaa' is any amino acid
VXXXGAYGNFNANRNTSEPENFSEVTITKGADSLKSGSGALGGAVNYQTKSASDYVSEDKPYHLGIKGGSVGKNSQKFSSITAAGRLFGLDALLVYTRRFGKETKNRSTEGDIEIKNDGYVYNPTDTNGPSKWLDYVATGVARSQPDPQEWVNKSTLFKLGYNFNDRNRIGWIFEDSRTDRFTNELSNLWTGTTTSAATGDYRHRQDVSYRRRSGVEYKNELEHGPWDSLKLRYDKQRIDMNTWTWDIPKDYDTNGINGQVYHSFRHIRQNTAQWTADFEKQLDFSKAVWAAQYGLGGGKGDNANSDYSYFAKLYDPKILTTNQGKITMLIENRSKYKFAYWNNAFHLGGNDRFRLNAGIRYDKNSSSAKDDPKYTTAIRGQIPHLGSERAHAGFSYGTGFDWRFTKHLHLLAKYSTGFRAPTSDETWLLFPHPDFYLKANPNLKAETAKNFELGLAGSGKAGNFKFSGFQTRYRNFIELTYMGVSSDKPNSPNYAPISDGTALVSSPVWQNQNRSSAWVKGLEFNGTWNLDSIGLPQGTHAGVNVSYIKGKAKQTNGQETPINALSPWSAVYNLGYDAPSKRWGINAYATRTAAKKPSDTVHSNDDLNNPWPYAKHSKAYTLFDLSAYLNIGKQVTLRAAAYNITNKQYYTWESLRSIREFGTVNRVDNKTHAGIQRFTSPGRSYNFTIEAKF

SEQ ID NO: 3969 - protein, 42 aa, Neisseria meningitidis
LHCYFLIRALLFYFPPSQKRRAAGIYRKNSNLSAVIPAKAGI

SEQ ID NO: 3970 - protein, 174 aa, Neisseria meningitidis
  misc_feature 169, 170: 'Xaa' is any amino acid
MTYTITPIGTARSPYKQKFGIARQPGLASAAEVCIELNPEFTADSVRGLEDFDYVWISFIFHGVLDEGWAQMVRPPRLGGKQKMGVFATRSPHRPNHLGLSLLKLERIETGKPVRLYCSGADLLDGTPIIDIKPYIPFVESKPDASSRLRQRQTRELEVVWLENIGAEXXHTLN

SEQ ID NO: 3971 - protein, 52 aa, Neisseria meningitidis
MKTPLPICTLSALAACTLSGQGGTQVYGEIKARDLCVTAPILLSAFCLACSR

SEQ ID NO: 3972 - protein, 544 aa, Neisseria meningitidis
MAAKDVQFGNEVRQKMVNGVNILANAVRVTLGPKGRNVVVDRAFGGPHITKDGVTVAKEIELKDKFENMGAQMVKEVASKTNDVAGDGTTTATVLAQSIVAEGMKYVTAGMNPTDLKRGIDKAVAALVEELKNIAKPCDTSKEIAQVGSISANSDEQVGAIIAEAMEKVGKEGVITVEDGKSLENELDVVEGMQFDRGYLSPYFINDAEKQIAGLDNPFVLLFDKKISNIRDLLPVLEQVAKASRPLLIIAEDVEGEALATLVVNNIRGILKTVAVKAPGFGDRRKAMLQDIAILTGGTVISEEVGLSLEKATLDDLGQAKRIEIGKENTTIIDGFGDAAQIEARVAEIRQQIETATSDYDKEKLQERVAKLAGGVAVIKVGAATEVEMKEKKDRVEDALHATRAAVEEGVVAGGGVALLRARAALENLHTGNADQDAGVQIVLRAVESPLRQIVANAGGEPSVVVNKVLEGKGNYGYNAGSGEYGDMIEMGVLDPAKVTRSALQHAASIAGLMLTTDCMIAEIPEDKPAMPDMGGMGGMGGMM

SEQ ID NO: 3973 - protein, 280 aa, Neisseria meningitidis
MLVCNPYEVVIHGTTSSGKIFRPSDWAERLCGILSSFTKDHRLSYSKWVRPMLVDNIRCVAVDKKLETDNPQMFRFLMDFAADNDLRVIDCKALLEEREQGGQNNPADEHVMLAQAIEEKHAAEKAQEQTASGASYVLREIGADDTATAFAALSVLRSALTDINRFTEQINKIQRPQGYRLLGIFEEGKHNAVAVCGFHEACTLAGGRHIHIDDIVTLPQSRRKGYASRLLEEVRKIGAETGVTKIHLNVHVNHDRADAHRLYFKNGFEICAYHFRCDPK

SEQ ID NO: 3974 - protein, 147 aa, Neisseria meningitidis
MKAIQKGFTLIELMIVIAIVGILAAVALPAYQDYTARAQMSEALTLAEGQKTAVVEYYSDNGVFPKNNASAGVASASEIVGKYVAKVDVSGNTITSTMKTSGVNKDISGATLVLEGAQKSGSFTWTCKAGSSNGVKDKFLPSSCRAK

SEQ ID NO: 3975 - protein, 248 aa, Neisseria meningitidis
  misc_feature 243, 244: 'Xaa' is any amino acid
MLAIYSINILIYNEKMFFRVTFYFVKNFVSFSKTRKSNEMMQKHKCLIDFILTVASQIAYADLPLSLEELLTDKGKFKLESSISYINTERNQSEFANPIYVQTSATKIATVMAMMITPVMAQNLDSQVFDSQNVKAIQLSQAEMKETQGEFVPIIAAAAFGGALGAWGYHGANLYNHGKLGTAQGAATAAGIGAATGVAATGLAAAAGGGLAGNLAWRPGIHALGFGANAANNAVNSRKYSGXXHTLN

SEQ ID NO: 3976 - protein, 246 aa, Neisseria meningitidis
MNLLISDFQTPQQRTPVIVALDFANEKDTLGFVRNLDPTLCQIKIGKELFTATGRNLAESLINQGFKLFLDLKYHDIPHTVAQACKVAADMGVWMVDMHASGGRRMMEAAAEAVAGYGTKPLLIGVTVLTSMEQSDLAEIGLNIAPEEQVIRLAKLAQSSGLDGVVCSAQEAAPLRRELGQDFVLVTPGIRLDVAGNNDDQRRIMTPAEALAAGSTYLVMGRPVTQAANPLAVLREVNRVANLEAN

SEQ ID NO: 3977 - protein, 516 aa, Neisseria meningitidis
MKKPLISVAAALLGVALGTPYYLGVKAEESLTQQQKILQETGFLTVESHQYERGWFTSMETTVIRLKPELLNNARKYLPDKLKTVLEQPVTLVNHITHGPFAGGFGTQAHIETEFKYAPETEKVLERFFGKQAPVSLANTVYFNGSGKMEVGVPAFDYEELSGIRLHWEGLTGETVYQKGFKSYRNGYDAPLFKIKLADKGDAAFEKVHFDSETSDGINPLALGSSNLTLEKFSLEWKEGVDYNVKLNELVNLVTDLQIGAFINPNGSIAPSKIEVGKLAFSTKTGESGAFINSEGQFRFDTLVYGDEKYGPLDIHIAAEHLDASALTVLKRKFAQISAKKMTEEQIRNDLIAAVKGEASGLFTNNPVLDIKTFRFTLPSGKIDVGGKIMFKDMKKEDLNQLGLMLKKTEADIRMSIPQKMLEDLAVSQAGNIFSVNAEDEAEGRASLDDINETLRLMVDSTVQSMAREKYLTLNGDQIDTAISLKNNQLKLNGKTLQNEPEPDFDEGGMVSEPQQ

SEQ ID NO: 3978 - protein, 333 aa, Neisseria meningitidis
MIDRQTNEPKQKTRIILAPMQGLVDDVMRDLLTRIGGYDECVSEFVRITHTVHSRSIWLKYVPEIANGNKTPVGTPCTVQLLGSDADNMAANALEAVRFGADKIDLNFGCPAPTVNRHKGGAILLKEPQLIFHIVKTLRERLPAHIPLTAKMRLGYEDKSRALECACAIAEGGACGLTVHARTKAEGYEPPAHWEWIRKIRDSVNIPVTANGDVFSLQDYIGIKTISGCNSVMLGRGAVIRPDLARQIKQYENGGPVKDTDFAEVSKWIRQFFELCLTKEANNKYPIARLKQWLGMMKKTSGPAQTLFDRVRTVKDADEVRRILNAFEHEMNV

SEQ ID NO: 3979 - protein, 77 aa, Neisseria meningitidis
MNRRKIYLLSVALFTLAFMLLVLLGAYLLTVGSKAFAVASFLFAFGALFGQIGSLALYLRHKSLRAAQSAAKENRYV

SEQ ID NO: 3980 - protein, 470 aa, Neisseria meningitidis; identical to SEQ ID NO: 2364

SEQ ID NO: 3981 - protein, 307 aa, Neisseria meningitidis
MPSEHPFSDGISTPNPKETMNDTAQITASYGRRYIVRTPDGTTYEASTRKKRVDFACGDRVRISPVNAEQVVIEDFLPRQSLLYRQDAWKTKLIAANVTQLLIVTAAVPSPSVRLLQRALLAAEAAGIEAVIVLNKADLPETALWREKLKFYETLGYPVIETRALENADLLRPVLQGHSNILLGQSGMGKSTLTNALLGSQTARTGDISAALDSGKHTTTHARLYDLNGETQLIDSPGLQEFGLHHLQAADLPRYFPDFRHLVGQCRFHNCTHRAEPSCAFKAAAETGAASPERLAFLQGITDELPG

SEQ ID NO: 3982 - protein, 298 aa, Neisseria meningitidis
MFRLQFGLFPPLRTAMHILLTALLKCLSLLPLSCLHTLGNRLGHLAFYLLKEDRARIVANMRQAGMNPDPKTVKAVFAETAKGGLELAPAFFRKPEDIETMFKAVHGWEHVQQALDKHEGLLFITPHIGSYDLGGRYISQQLPFPLTAMYKPPKIKAIDKIMQAGRVRGKGKSAPTSIQGVKQIIKALRSGEATIVLPDHVPSPQEGGEGVWVDFFGKPAYTMTLAAKLANVKGVKTLFFCCERLPDGQGFDLHIRPVQGELNGDKAHDAAVFNRNAEYWIRRFPTQYLFMYNRYKMP

SEQ ID NO: 3983 - protein, 67 aa, Neisseria meningitidis
MATGIVKWFNDAKGFGFITPDEGGEDLFAHFSAINMEGFKTLKEGQRVSFDVTTGPKGKQAANIQAA

SEQ ID NO: 3984 - protein, 363 aa, Neisseria meningitidis
MSLKCGIVGLPNVGKSTLFNALTQSGIEAANYPFCTIEPNVGIVEVPDPRMAELAKIVNPQKMQPAIVEFVDIAGLVAGASKGEGLGNQFLANIRETDAIVNVVRCFDDDNIVHVSGKVDPIADIETIGTELALADLASVEKAIVREEKRARSGDKDAQKLVDLCKKLLPHLDEGKPVRSFGLDAEERAMLKPLFLLTAKPAMYVGNVAEDGFENNPHLDRLKELAAKENAPVVAVCAAMESEIAELEDDEKAEFLAEMGLEEPGLNRLIRAGYDLLGLQTYFTAGVKEVRAWTIHKGDTAPQAAGVIHTDFERGFIRAQVIAYDDFVSLGGEAKAKEAGKMRVEGKEYVVQDGDVMHFLFNV

SEQ ID NO: 3985 - protein, 140 aa, Neisseria meningitidis
LSAVFIAPYLTAFHEQEKTFEYAELTVTAPNRSGRAIKLDADGQHYRLSCYGFDSLCTGGNIGRTIRAEQVRAVLSETVGKGFLNGVLLEYRNSGSVYSNKDFARTEDRLVEVLAQPAVFSLKLGILLLLPAIFLRLKRM

SEQ ID NO: 3986 - protein, 278 aa, Neisseria meningitidis
MLLLKTPGVLPGFKLSLGLTVLCLSLLVVLPFAMMAAKAAEIGWGGFWNTIAEPNVLAAVWLSLRMSFYAMLTNVVFGTLVAWVLVRYEFPGKGLANALVDLPFALPTAVTGIALATLYAPNGWIGRFFEPLGIKIAFTPVGIWIALVVVSLPFIVRAVQPVLEELSGEYEEAAATLGANRFTTFRRVLLPEITPALLTGAGMMFARATGEYGSVIFIAGNIPMVSEILPLIITGKLEQFDVQGASAVALFMLLVSFVILFALNVMQWALGRRSGAKG

SEQ ID NO: 3987 - protein, 260 aa, Neisseria meningitidis
MTDILNKILTAKAQEVAAQKAAVNAEHIRALAENAPPVRSFIGSIRGKHRLNLPAVIAEIKKASPSKGLIRPDFRPAEIARAYENAGAACLSVLTDEPYFQGSPEYLKQAREAVSLPVLRKDFIIDEYQVYQARAWGADAVLLIAAALEREQLERFEAVAHELGMTVLLELHDESELEKCRNLTTPLWGVNNRNLRTFEVSLDQTLSLLPALEGKTVVTESGITGKADVEFMRARGVHTFLIGETFMRADDIEAEVGKLF

SEQ ID NO: 3988 - protein, 235 aa, Neisseria meningitidis; identical to SEQ ID NO: 1248

SEQ ID NO: 3989 - protein, 74 aa, Neisseria meningitidis
MKKNAPKSFEEALSRLESLTQSMQGEMPLEDALAAYQEGNELVRYCQTKLAQVEQKLQVLDADGLKELNLESDE

SEQ ID NO: 3990 - protein, 201 aa, Neisseria meningitidis
MPSEMRMSRLMLLLSAFVLAACNAQNRQSCVRHQDFARVAVDLFRSACVLTQGSFESVSKFAAVGHFVPVGKEDLSHLPPAVAEPDVQVLWTLERDGGIYYLSLTRDSCSVKAERADSAALLEHFDGLIRQPPKNTNIELRAEQSVQAPFETRQISYAWRESGSSEETVLTAQTADSPDLPVQAVLNLTHRSHNGKPLILP

SEQ ID NO: 3991 - protein, 442 aa, Neisseria meningitidis
MNTTSQFTSNFWNIYIAVIVLLSFIALAWLLLSQNVVKRPKKGEEVQTTGHEWDGIAEYDNPLPRWWFWLCVLTWLFGIGYLVMYPGVGDYKGLLKWTSHNQYEKEVKKADEQYGKLYAKFADMPIEKVAKDPQAKQIAQNLFNTYCIQCHGSDAKGSKGFPNLTDSDWLWGGDPDKIHETIEKGRVATMPAWGPALGEEGVKDVAHYVMSLSKPEGQYDEERAARGQALFSGPPANCFTCHGDKGQGIQGLGPNLTDDVWLWGGTQKSIIETITNGRSSQMPAWGHFLDKDKLHIMTAYVWGLSDKDGKAPVKKAEPAPTPAPAAEPAASAPAEAAQAASEAKPAAAEPKAEEKAAPAAKADGKVYETVCAACHGNAIPGIPHVGIKADWADRIKKGKDTLHKHAIEGFNTMPAKGCRGDLSDDEVKAAVDYMVNQSGGKF

SEQ ID NO: 3992 - protein, 140 aa, Neisseria meningitidis; identical to SEQ ID NO: 2533

SEQ ID NO: 3993 - protein, 188 aa, Neisseria meningitidis
MSLYALLLIALGMSMDAFAVALAKGAAVRMPPRKIAATALVFGSVEALTPLAGWVGGFYAKPFISEWDHWAAFVLLGGLGLKMMREGLSGKAEDVRESKRESLWMTVLTAFGTSIDSMIVGVGLAFMEVNIAFAAAIIGMATTVMVAVGLTAGRVLGGLFGKRAEFAGGLVLIAIGTWTLLSHLGLIQ

SEQ ID NO: 3994 - protein, 384 aa, Neisseria meningitidis
MSTFFQQTAQAMIAKHIDRFPLLKLDQVIDWQPIEQYLNRQKNRYLRDHRGRPAYPLLSMFKAVLLGQWHSLSDPELEHSPITRIDFNLFCRFDELSIPDYSIVDQKPVRRCLALAQRERFSKVLKHQVNRFRTICTVCGFVALSFLLIHYTLCRYRNWLAQDNTLSELLKLINCQLTEKGLKIEKASAAVVDATIIQTAGSKQRQAIEVDEEGQISGQTTPSKDSDARWIKKNGLYKLGYKQHTRTDEEGYIEKLHITPANAHECKHLPPLLEGIAEGTTVYADKGYDSAENRQHLEEHQLLDGIMRKACRNRPLSETQTKRNRYLSKTRYVVEQSFGTLHRKFRYARAAYFGLIKVSAQSHLKAMCLNLLKAANRLSAPAAA

SEQ ID NO: 3995 - protein, 460 aa, Neisseria meningitidis
MERCGKRSVGVEYAFAFEYSKKKREKLMPSEHQHISSLLDFDRTHLLHPYTSMTDPLPVYPVKRAEGVFIELADGTRLIDGMSSWWCAIHGYNHPVLNQAVETQMKQMAHVMFGGLTHEPAVELGKLLVGILPQGLNRIFYADSGSISVEVALKMAVQYQQARGLTAKQNIATVRRGYHGDTWNAMSVCDPETGMHHIFGSALPQRYFVDNPKSRFYDEWDGADLQPVRALFEVHHADIAAFILEPVVQGAGGMYFYHPQYLRGLHDLCDEFDIMLIFDEIATGFGRTGKMFACEHAEVVPDIMCIGKGLSGGYMTLAAAITSQKVTETISRGEAGVFMHGPTFMANPLACAVACASVKLLLSQDWQANIRRIESILKGRLKAAWDIRGVKDVRVLGAIGVIELEKGVDMARFQADCVAQGIWVRPFGRLVYLMPPYIISDGVLTKLADKTVQILKEHSK

SEQ ID NO: 3996 - protein, 74 aa, Neisseria meningitidis
MQKFYVIDFLSLKSIFLNKFALKYSGLNLNQDKATKPQTVQIVRQGEATPYWFKFNPLYRKFIQWIDREENKVV

SEQ ID NO: 3997 - protein, 261 aa, Neisseria meningitidis
MSRIRQAFAALDGGKALIPYITVGDPDIRTTLAIMHSMVANGADILELGVPFSDPMADGSVIQRAAERALANGISLRDVLDVVRKFRETDTQTPVVLMGYLNPVHKMGYREFAQEAAKAGVDGVLTVDSPVETIDPLYRELKDNGVDCIFLIAPTTTEDRIKTIAELAGGFVYYVSLKGVTGAASLDTDEVSRKIEYLHQYIDIPIGVGFGISNAESARKIGRVADAVIVGSRIVKEIENNTGNEAAAVGALVKELKDAVR

SEQ ID NO: 3998 - protein, 273 aa, Neisseria meningitidis; identical to SEQ ID NO: 221

SEQ ID NO: 3999 - protein, 446 aa, Neisseria meningitidis
LHTLLAFIFAILILVSLHEFGHYAVAKLCGVKVLRFSVGFGKPFFTRKRGDTEWCLAPIPLGGYVKMVDTREGEVSEADLPYAFDKQHPAKRIAIVAAGPLTNLALAVLLYGLSFSFGVTELRPYVGTVEPDTIAARAGFQSGDKIQSVNGTPVADWGSAQTEIVLNLEAGKVAVGVQTASGAQTVRTIDAAGTPEAGKIAKNQGYIGLMPFKITTVAGGVEKGSPAEKAGLKPGDRLTAADGKPIASWQEWANLTRQSPGKKITLTYERAGQTHTADIRPDTVEQSDHTLIGRVGLRPQPDRAWDAQIRRSYRPSVVRAFGMGWEKTVSHSWTTLKFFGKLISGNASVSHISGPLTIADIAGQSAELGLQSYLEFLALVSISLGVLNLLPVPVLDGGHLVFYTAEWIRGKPLGERVQNIGLRFGLALMMLMMAVAFFNDVTRLLG

SEQ ID NO: 4000 - protein, 221 aa, Neisseria meningitidis
MENIEEYALLSPEALLERLDTVLSIRIGGKGWESSMTANFAQTLVEIQDSLYRVVSTVQYGDDNLKRLTADKRKQYELNFKISEGSTRVESDFKETLVRFGRDMLQDMPPKIRSATLVALTTLLVGGALGYGYLEYLKQVASEGYQTERLYNAVDRLAESQERITSAILKGARGADFVQIGRRSYSREDISEANRRAERVPYGAELVSDGNFTAVLSDIVD

SEQ ID NO: 4001 - protein, 104 aa, Neisseria meningitidis
MAMLPELRRIAGLAGIAPHPRESGETKFKSRCFGGRSAVRKALHMATVAATRFEPLIRDFYQRLPSEGKPYKVAVTACMRKLLTISNARMRDYFAENDTAENGI

SEQ ID NO: 4002 - protein, 92 aa, Neisseria meningitidis; identical to SEQ ID NO: 510

SEQ ID NO: 4003 - protein, 485 aa, Neisseria meningitidis
MKPTIALVGRPNVGKSTLFNRLTRTKDALVHDLPGLTRDRHYGHGKVGSKPYLVIDTGGFEPVVDSGILHEMAKQTLQAVDEADAVVFLVDGRTGLTPQDKIIADRLRQSPRPVYLAVNKGEGGNRAVLAAEFYELALGDPYVISGAHGDGVYYLIEEILENFPEPEVEEADAKHPVFAVIGRPNVGKSTLVNAILGEERVIAFDMAGTTRDSIHIDFEREGKPFTIIDTAGVRRRGKVDEAVEKFSVIKAMQAVEAANVAVLVLDAQQDIADQDATIAGFALEAGRALVVAVNKWDGISEERREQVKRDINRKLYFLDFAKFHFISALKERGIDGLFDSIQAAYNAAMIKMPTPKITRVLQSAIERQQPPRAGLVRPKMRYAHQGGMNPPVIVVHGNSLHAISDSYTRYLTQTFRKAFNLQGTPLRIQYNVSENPYENADDKPKKKPLRRVSLSNRIEKREGRKEEKNRFKKKTKVSVKKQFSK

SEQ ID NO: 4004 - protein, 202 aa, Neisseria meningitidis
MKPKPHTVRTLIAAIFSLALSGCVSAVIGSAAVGAKSAVDRRTTGAQTDDNVMALRIETTARSYLRQNNQTKGYTLQISVVGYNRHLLLLGQVATEGEKQFVGQIARSEQAAEGVYNYITVASLPRTAGDIAGDTWNTSKVRATLLGISPATQARVKIVTYGNVTYVMGILTPEEQAQITQKVSTTVGVQKVITLYQNYVQR

SEQ ID NO: 4005 - protein, 140 aa, Neisseria meningitidis
MLIGLLPWALILGMQGGQKGMSWLEMLLMTSMNFAGGSEFATVNLWAESLPILLIATVTFMINSRHILMGAALALHLKEIPLKKAVPALFFMCDESWAMAFSEIQKRKATGLPAFNMPFYSGLTKTSTALPRLSSKRTIL

SEQ ID NO: 4006 - protein, 188 aa, Neisseria meningitidis
MPSEACWRFRRHILIEKMMTLKTAPLKRRFAAMLYEMLLVGAATCLAALFAGIAAIFLNPVSIAVSALVTSILIMGAWWLYFRANWHGQGQTLAMRTWKIGLCDLNGIQPSLHLLRLRFIWACIFIVFIPMLAYAGLRHFLGIPPKGAAGAALIWLILPWGFALLNPDRQFLYDFLAGTRLVAVKGKP

SEQ ID NO: 4007 - protein, 336 aa, Neisseria meningitidis
MSIKILIISPSWIGDCVMTQPLFRRLKELHPGCTIDVFAPKWSMEVFERMPEVNEILENPFGHGALELKRRWRVGRDLGRRGYDQVIVLPGSLKSAIIALATGIGKRTGYVGESRYFLLNDIRRLDKERLPLMVDRYTALAHQSQEDFDGHSGFPEFSIDERRREISVETFGLNLGKPVLAFCPGAEFGPAKRWPTRYFAELGKHYSAAGWQVWLFGSQKDDEIAEEINRLSDGMCVNLCGKTDLSQAMDLLSLADTVVCNDSGLMHLAAALGRKVVAVYGSSSPTHTPPLSDRAKIVSLHLECSPCFKRECPLGHTDCLNRLYPEKIVQAVEEAV

SEQ ID NO: 4008 - protein, 655 aa, Neisseria meningitidis
VGNTFKSILVWVALGIGLMAAFNALDGKKEDNGQIEYSQFIQQVNNGEVSGVNIEGSVVSGYLIKGERTDKSTFFTNAPLDDNLIKTLLDKNVRVKVTPEEKPSALAALFYSLLPVLLLIGAWFYFMRMQTGGGGKGGAFSFGKSRARLLDKDANKVTFADVAGCDEAKEEVQEIVDYLKAPNRYQSLGGRVPRGILLAGSPGTGKTLLAKAIAGEAGVPFFSISGSDFVEMFVGVGASRVRDMFEQAKKNAPCIIFIDEIDAVGRQRGAGLGGGNDEREQTLNQLLVEMDGFESNQTVIVIAATNRPDVLDPALQRPGRFDRQVVVPLPDIRGREQILNVHSKKVPLDESVDLLSLARGTPGFSGADLANLVNEAALFAGRRNKVKVDQSDFEDAKDKIYMGPERRSMVMHEDEKRATAYHESGHAIVAESLPFTDPVHKVTIMPRGRALGLTWQLPERDRISMYKDQMLSQLSILFGGRIAEDIFVGRISTGASNDFERATQMAREMVTRYGMSDKMGVMVYAENEGEVFLGRSVTRSQNISEKTQQDIDAEIRRILDEQYQVAYKILDENRDKMETMCKALMEWETIDRDQVLEIMAGKQPSPPKDYSHNLRENADAAEDNAPHAPTREETEAPAPADTASTESEQQPENKA

SEQ ID NO: 4009 - protein, 318 aa, Neisseria meningitidis
MILTPPDTPFFLRNGNADTIAAKFLQRPAPTYRRELLPDSTGKTKVAYDFSDGISPDAPLVVLFHGLEGSSRSHYAVELMLAVRSRGWHGAVVHFRSCGGIANTAPVFYHLGDTAEIAFTLDTLAARYREIYAVGVSLGGNALAKYLGERGENALPQAAAAVSAPVDAEAAGRRFDSGITRLLYTRYFLRTLIPKARSLHGFQTAFAAGCKTLGEFDDRFTAPLHGFADRHDYYRRTSCKPLLKHVAKPLLLLNAANDPFLPPEALPTPDEVSEAVTLFQPAHGGHAGFVGSTGGRLHLQWLPQTVLSYFDSFRTNRR

SEQ ID NO: 4010 - protein, 178 aa, Neisseria meningitidis; identical to SEQ ID NO: 1654

SEQ ID NO: 4011 - protein, 508 aa, Neisseria meningitidis
MDYPPLKGAALAWITLSLGLAVFMEVLDTTIANVAVPVIAGNLGAATTQGTWVITSFAVANAVSVPLTGFLAKRIGEVKLFTAAAVGFVITSWLCGIAPNLQSLVIFRILQGFIAGPLIPLSQSLLMASYPPAKRTLALALWAMTVVVAPVLGPILGGWISGNWHWGWIFFINIPIGIISAWITWKHLKHRETETVKMPTDYVGLTLMVVGIGALQMMLDRGKELDWFASGEIITLGVVALVCLSYFIVWELGEKYPIVDLSLFKDRNFTVGVIATSLGFMVYMGTLTLLPLVLQTNLGYTSTWAGLAAAPVGILPVFLSPLIGRFGNKIDMRLLVTASFLTFAFTFYWRTDFYADMDIGNVIWPQFWQGAGVAMFFLPLTTITLSHMKGGQIAAAGSLSNFLRVLMGGVGVSFVSTLWERREALHHTRFAEHITPYSATLHETAAHLSQQGVSDIQTLGIINNTITQQGFIIGSNEIFMAGSLLFIIMIPVIWLAKPPFHNGGGGGH

SEQ ID NO: 4012 - protein, 213 aa, Neisseria meningitidis
MQKPETIHISGPAGILETIHIPSEQVPARGVAVINHPNPLQGGTNTNKVIQTAAKALSKLGFHCYLPNLRGVGGSGGTHDYGRGETQDCLAVIDYARAQHPEAPEFALSGFSFGGYVATFAAQARTPDLLLLIGAAVCHYTGRPEPSAVPNVAKTLMIHGAEDEVVEIEKALKWAEPQDLPVITIAGSTHFFHGKLIVLRDTILRFAPVCLNG

SEQ ID NO: 4013 - protein, 280 aa, Neisseria meningitidis
MDKERILTPAVVFSVALLHLAMVALLWQAHKLPVIESGNVIEFVDLGDFGGGDGAPEGAGAPAAPEPQPEPEPPKPVEPPKPVLKPVVTKKADADIQQPKEEPKPEEKPKPEEKPKPEPKPEAKPVPKPAEKPVEKPSEKPAEHPSNASAKADSEQGNGEDKGTGTKGDGTGRGEGSGKGSGGVKGEHGEGAGSSKGNPLRANGSIPRPAYPTLSMENDEQGTVVLSVLVSPGGHVESVKIVKSSGFSRLDNAARKAAQNGHFQANAWTEFKVPVKFELN

SEQ ID NO: 4014 - protein, 142 aa, Neisseria meningitidis
MGFEKVEHLLPDTVLDIVDVIGLAATEQLVKAIGGARFKFGKGKVDTERLAILVEAIGEVKTHELLQVYGGEELYVPRCGKALIQLRNHRFYQEFVKLRDIDKESGLMAMTKLCPKYGISSRTGYTIINEMSRPAAQQAALF

SEQ ID NO: 4015 - protein, 458 aa, Neisseria meningitidis
MHDKTWSGRFNEPVSELVKQYTASIGFDRRLAEWDIQGSLAHAQMLKETGVLDEGDLADIRRGMAEILEEIRSGKIEWSSDLEDVHMNIERRLTDKIGDAGKRLHTGRSRNDQVATDIRLWLRDQITVIQSLIQNLQTALLDLAEQNAETVMPGFTHLQVAQPVSFGHHMLAYVEMLGRDNERMADCRRRVNRMPLGAAALAGTTYPIQREITAELLGFEQICQNSLDAVSDRDFAVEFTAAASLVMVHLSRLSEELILWMSPRFGFIDIADRFCTGSSIMPQKKNPDVPELVRGKSGRVIGHLIGLITLMKSQPLAYNKDNQEDKEPLFDTADTLIDTLRIYADMMRGVTVKPDNMRAAVMQGFATATDLADYLVKKGMPFRDSHEVVAQAVRHADEAGVDLSELPLEVLQGFSKLISDDVYGVLTPEGSLNARNHLGGTAPEQVRLQVKRWREVLA

SEQ ID NO: 4016 - protein, 335 aa, Neisseria meningitidis
MSTFFQQTAQAMIAKHIDRFPLLKLDQVIDWQPIEQYLNRQKTRYLRDHRGRPAYPLLSMFKAVLLGQWHSLSDPELEHSLITRIDFNLFCRFDELSIPDYSTLCRYRNWLAQDDTLSELLELINCQLTEKGLKVEKASAAVVDATIIQTAGSKQRQAIEVDEEGQVSGQTTPSKDSDARWIKKNGLYKLGYKQHTRTDGEGYIEKLHITPTNAHECTHLSPLLEGLPKGTTVYADKGYDSKENRQHLKEHRLQNGIMRKACRNRPLTETQTKHNRYLSKTRYVVEQSFGTLHRKFRYARAAYFGLLKVSAQSHLKAMCLNLLKAANRLSAPAAA

SEQ ID NO: 4017 - protein, 250 aa, Neisseria meningitidis
MDKDLYAVLGVSPQAGADEIKRAYRKLAMKYHPDRNPGNPQAEEKFKEIQQAYDTLSDLSKRTQYDASFRRHEERGRQEEAFRREQARREQFYREQARREQFYREQMRREQAFRQAFERQASRSCHTYEPSSGGSGRNYVLAAYILFGLGAIMLFMPIVGVIFAYMPIVGVILAYMKRNSLDSIVYAAHTEYLIKTFWRTFWLYILGALTALLGIGVLIIIATNVWYFYRIIAGFIRFNGGRAVAPEKWI

SEQ ID NO: 4018 - protein, 222 aa, Neisseria meningitidis
MKTFKNIFSAAILSAALPCAYAAGLPQSAVLHYSGSYGIPATMTFERSGNAYKIVSTIKVPLYNIRFESGGTVVGNTLHPTYYRDIRRGKLYAEAKFADGSVTYGKAGESKTEQSPKAMDLFTLAWQLAANDAKLPPGLKITNGKKLYSVGGLNKAGTGKYSIGGVETEVVKYRVRRGDDAVMYFFAPSLNNIPAQIGYTDDGKTYTLKLKSVQINGQAAKP

SEQ ID NO: 4019 - protein, 148 aa, Neisseria meningitidis
MRLTTKGRFAVTAMLDLAMNAQTGAVKLSAISERQNISLSYLEQLFGKLRRAGLVESLRGPGGGYILAAPAARINIAQIIAAAEDRLDATQCGSKANCHHGAPCLTHDLWENLNKTINDYLGSVTLQSIIEQKNNGDGSRVVQFTHIH

SEQ ID NO: 4020 - protein, 123 aa, Neisseria meningitidis
MNKTLSILPVAILLGGCAAGGGNTFGSLDGGTGMGGSIVKMAVGSQCRAELDKRSEWRLTALAMSAEKQAEWENKICACVAQEAPERMTGNDVMQMLAPSTRNQALAALTAKTVSACFKHLYR

SEQ ID NO: 4021 - protein, 397 aa, Neisseria meningitidis
MQNYLTPNFAFAPMIPERASGSRVWDTEGREYIDFSGGIAVNALGHCHPALADALNAQMHKLWHISNIYTTRPAQELAQKLVANSFADKVFFCNSGAEANEAALKLARKYARDRFGGGKSEIVACINSFHGRTLFTVSVGGQPKYSKDYAPLPQGITHVPFNDIAALEAAVGEQTCAVIIEPIQGESGILPATAEYLQTARRLCDRHNALLILDEVQTGMGHTGRLFAYEHYGVVPDILSSAKALGCGFPIGAMLATETIAAAFQPGTHGSTFGGNPMACAVGSRAFDIINAPETLHNVRSQGQKLQTALLDLGRKTGLFSQVRGMGLLLGCVLDAPYRGRASEITAAALKHGVMILVAGADVLRFAPSLLLNDEDTAEGLRRLEHVLTEFAAANRP

SEQ ID NO: 4022 - protein, 227 aa, Neisseria meningitidis
MELVFIRHGQSEWNAKNLFTGWRDVKLSGQGLAEAAAAGKKLKENGYEFDIAFTSVLTRAIKTCNIVLEESDQLFVPQIKTWRLNERHYGQLQGLDKKQTAEKYGDEQVRIWRRSYDTLPPLLDKDDEFSAHKDRRYAHLPADVVPDGENLKVTLERVLPFWEDQIAPAILSGKRVLVAAHGNSLRALAKHIEGISDEDIMGLEIPTGQPLVYKLDDNLKVIEKFYL

SEQ ID NO: 4023 - protein, 469 aa, Neisseria meningitidis; identical to SEQ ID NO: 2689

SEQ ID NO: 4024 - protein, 417 aa, Neisseria meningitidis
MSEQHISTWKSKINALGPGIMMASAAVGGSHLIASTQAGALYGWQIALIIILTNLFKYPFFRFSAHYTLDTGKSLIEGYAEKSRVYLWVFLILCIISATINAGAVAIVTAAIVKMAIPSLMFDAGTVAALIMASCLIILVSGRYRALDRVSKIIIVTLSIATLAAAGIAMSRGMQMQPDFIEPTPWTLAGLGFLIALMGWMPAPIEISAINSLWVTEKQRINPSEYRDGIFDFNVGYIASAVLALVFLALGAFVQYGNGEAVQMAGGKYIGQLINMYAVTIGGWSRPLVAFIAFACMYGTTITVVDGYARAIAEPVRLLRGKDKTGNAEFFAWNIWVAGSGLAVIFWFDGVMANLLKFAMIAAFVSAPVFAWLNYRLVKGDEKHKLTSGMNALALAGLIYLTGFTVLFLLNLAGMFK

SEQ ID NO: 4025 - protein, 482 aa, Neisseria meningitidis
MKGDIGVIGLAVMGQNLILNMNDCGFKVVAYNRTIGKVDEFLNGAAKGTDIVGAYSLQDLVDKLAKPRKIMMMVRAGSVVDDFIEQLLPLLEEGDIVIDGGNANYPDTTRRTHYLAEKGILFVGAGVSGGEEGARHGPSIMPGGDKRAWEAVKPIFQAIAAKTPQGEPCCDWVGKDGAGHFVKMVHNGIEYGDMQLICEAYQFMKDGLGLSYDEMHRVFAEWNKTELDSYLIEITAAILGYKDEGGEPLVEKILDTAGQKGTGKWTGINALDLGIPLTLISEAVFARCVSSFKEQRVQTGKLFARTVTPVEGGKQEWVEALRQALLASKIISYAQGFMLIREAGESYGWDLDYGNTALLWREGCIIRSAFLGNIRDAYENNPDLVFLGEDGYFKNILENCLPAWRRVVAKAVECGIPMPCMASAITFLDGYTTERLPANLLQAQRDYFGAHTYERTDKPRGEFFHTNWTGKGGDTASTTYDI

SEQ ID NO: 4026 - protein, 508 aa, Neisseria meningitidis
MNTPLPYSDYLIRILTASVYDVAVETPLEPARSLSVRLKNNILLKREDLQPVFSFKIRGAYNKMSKLPKDALACGVIAASAGNHAQGVALSAQRLGCRAVIVMPETTPKIKVDAVKSHGGEVVLRGVSYNDAYDYAMELAEKEGLTYIAPFDDPDVIAGQGTVGMEIVSQHPDPIRAVFVPIGGGGLAAGVAAFIKQVRPEIKVIGVQTNDSCCMKQSVEAGEIVHLKDVGLFSDGTAVKVVGNETFRLCKELLDEIITVDTDAVCGAVKDIFDDTRSITEPAGALALAGLKAYIAREGAENQTLIAVTSGANMNFHRLRHVSERSELGEGNEGIFAVTIPEERGSFLKFVNILGNRNITEFNYRYGDDEKAHIFVGLQAAGPQDLAVIGSRLDEAGLLNVDLTNNEIAKIHIRYMVGGRTDKVENERLVSFEFPERPGALARFLNHMQGGWNITLFHYRNHGADYGRILVGIDVPPHDAAAFDGFLESLGYSYHEETQNAAYKLFLA

SEQ ID NO: 4027 - protein, 263 aa, Neisseria meningitidis
MDTQAVITHIARWLDEYAAQANAKGFVVGVSGGIDSAVVSTLAARTGRPTLLLDMPIRQHPGQLERARLHIRNLQRQYANVSAQTVDLTDTFQTFEQTVGIHQTAFDNQPLSLANARSRLRMLTLYYYGQIHGLLVTGTGNKIEDFGVGFFTKYGDGGVDISPIADLTKTQVYRLAEALGVDEAIQKAPPTDGLWDTERTDEEQMGASYPELEWAMGVYGTRKPEDFEGRRREVLEIYTRLHRAMQHKINPIPVCRIPPELLG

SEQ ID NO: 4028 - protein, 494 aa, Neisseria meningitidis
MPYNQAPDFLCADTMHPTYSAVQARLLEANRLSPELLAKSLCIIGAHHVDYADIYCQRTAYESWHLEEGIVKSGSFQINQGVGVRAVSGDKTAFAYADSLCIDSINRSARAVRAIGAAGGKVSAKMPSETRGKPVCSASDPIAGLDSAAKVALLNKVEAIAKAADPRIVQVMAGLTCEYDMVYLARLDGKHAADIRPMVRLNVTVIAKQGERREQGSAGGGGRYDLAYFDENLVRQFVDAAVKQALTNLESRPAPAGEMTVVLGNGWPGVLLHEAVGHGLEGDFNRKGTSVFSGRIGERVAAKGVTVVDQGDIAGRRGSLNIDDEGNETRRTVLIEDGILVGYMQDETNARLTGTQSTGNGRRESYASAPMPRMTNTFMENGSYEPEEIIASIDKGIYAVNFGGGQVDITSGKFVFSASEAWWVEGGRLQYPVKGATIIGNGPEVLKHVSMIGNDTALDSGVGVCGKEGQSVPVGVGQPTLRIDAGLTVGGSAI

SEQ ID NO: 4029 - protein, 248 aa, Neisseria meningitidis
MKSSTQAVLEHTAIPKHIAVIMDGNGRWAKKRFLPRIMGHKRGLDALENMVKHCAKLGVQYLTVFAFSTENWRRPEDEVSFLMGLFLQALQKQVRRLHENNMRLKILGSRERFNRQILQGIEEAEALTANNTGLTLSIAADYGGRWDILQAANKLIAEGVSEITEDTLAKHLMLGDAPEPDLFIRTGGETRISNFLLWQMAYAELYFTDILWPDFDGKALDDAVASFQKRERRFGRTSEQLPIEQQRN

SEQ ID NO: 4030 - protein, 507 aa, Neisseria meningitidis
MNLPIQKFMMLFAAAISLLQIPISHANGLDARLRDDMQAKHYEPGGKYHLFGDGRGSVKNRVYAVQTFDATAVGPILPITHERTGFEGVIGYETHFSGHGHEVHSPFDHHDSKSTSDFSGGVDGGFTVYQLHRTGSEIHPEDGYDGPQGSDYPPPGGARDIYSYYVKGTSTKTKTNIVPQAPFSDRWLKENAGAASGFFSRADEAGKLIWENDPNKNWWANRMDDIRGIVQGAVNPFLTGFQGVGIGAITDSAVSPVTDTAAQQTLQGINHLGNLSPEAQLAAATALQDSAFAVKDGINSARQWADTHPNITATAQTALAVAEAAGTVWGGKKVELNPTKWDWVKNTGYKKPAARPMQTLDGEMAGGNKPPKPSTQQHPTHSDNNIGLPASYVKPDTSISPTGTIQDRIRWTKSKFPTEKSLNGHFKAHGKEFGDITIEDYQKMASDLLSKQTSDKILGYQTEHRRVRYDINIYVLANPKTFKIKTMFKPNLGKKYYDGEFKKDMGN

SEQ ID NO: 4031 - protein, 231 aa, Neisseria meningitidis; identical to SEQ ID NO: 1099

SEQ ID NO: 4032 - protein, 444 aa, Neisseria meningitidis; identical to SEQ ID NO: 2522

SEQ ID NO: 4033 - protein, 528 aa, Neisseria meningitidis
MALFLSIFPIVLLIWLMVKKNSMPSYVALPITAVLIYAIKLFYFGDAGMLLNATAASGLVKTLTPITVIFGAIMFNRMMETTGCIDVIRKWLATISPNPVAQLMIIGWAFAFMIEGASGFGTPAAIAAPILMSLGFNPLKVAIFTLVMNSVPVSFGAVGTPTWFGFAPLNLSAEDILAIGRQTGVMHFFAGFVIPVIGLGFIVPWSEIRKNLGFVAIAVFSCTIPYVALAMVNEEFPSLVAGAIGLMVSVFAANQGWGLSKDHAKDPNAEKVPFAQVAKALAPLGMLIGMLVVTRIKQLGIKGILTSKEEWFSFQLPFDLSKITVSDSLTITFGNIFGQDVSASYQTLYVPAWIPFVLTVWICILLYKTKFKDAWTIYSVTFNQTKKPLLALMGALIMVQLMLVGGDNSMVKIIGKEFAAMAGEHWVYFSPYLGAIGAFFSGSNTVSNLTFGPIQQQIALDTGLSVTLILALQSVGGAMGNMVCLNNIIAVCTVLDVKNSEGAIIKKTVIPMAIYGVIAVVAAMIFFL

SEQ ID NO: 4034 - protein, 143 aa, Neisseria meningitidis; identical to SEQ ID NO: 28

SEQ ID NO: 4035 - protein, 375 aa, Neisseria meningitidis
MKIVFITTVASSIYGFRAPIIKKLIGKNHQVYAFVSEFSDNELDTIREMGVTPVTYRSNRSGLNPFSDIKSTFLIFKELKKISPDLVFPYFAKPVIFGTFAAKLAGVPRIVGMLEGLGFAFTPQPEGIPLKTKIIKGILIALYHIALPMLESLIVLNPDDKDELTDKYGIKIKNIHILGGIGLDLRQYPYSEADIPDEKEPVKFLFIGRFLKEKGIDDFIRAAEQVKDKYPDTVFTALGAIDKSRAGGGDLERLAARDIIRFPGFVNNVSEVIKEHHIFVLPSYREGVPRSTQEAMAVGRAVITTDVPGCRETVADKVNGFLIEPWNPRILAEKMIYFIENREAIRLMGNASYAIAKDKFDAEKVDLKLLDILKA

SEQ ID NO: 4036 - protein, 241 aa, Neisseria meningitidis; identical to SEQ ID NO: 400

SEQ ID NO: 4037 - protein, 356 aa, Neisseria meningitidis; identical to SEQ ID NO: 214

SEQ ID NO: 4038 - protein, 488 aa, Neisseria meningitidis; identical to SEQ ID NO: 3695

SEQ ID NO: 4039 - protein, 625 aa, Neisseria meningitidis
LQRSLFGLNYLAILNTIISIPCMNHQSNSGEGVLVAKTYLLTTLIMSMTISGCQVIHANQGKVNTHSAVITGADAHTPEHATGLTEQKQVIASDFMVASANPLATQAGYDILKQGGSAADAMVAVQTTLSLVEPQSSGLGGGAFVLYWDNTAKTLTTFDGRETAPMRATPELFLDKDGQPLKFMEAVVGGRSVGTPAIPKLMETIHQRYGVLPWGKLFDTPIRLAKQGFEVSPRLAISVEQNQQHLARYPKTAAYFLPNGVPLQAGSLLKNLEFADSVQALAAQGAKALHTGKYAQNIVSVVQNAKDNPGQLSLQDLSDYQVVERPPVCVTYRIYEVCGMGAPSSGGIAVGQILGILNEFSPNQVGYDAEGLRLLGDASRLAFADRDVYLGDPDFVPVPIRQLISKDYLKHRSQLLEQSDKALPSVSAGDFIHEWVSSQAIELPSTSHISIVDKAGNVLSMTTSIENAFGSTLMANGYLLNNELTDFSFEPIKQGKQVANRVEPGKRPRSSMAPTIVFKAGKPYMAIGSPGGSRIIGYVAKTIVAHSDWNMDIQDAISAPNLLNRFGSYELETGTTALQWQQALNDLGYKTDVRELNSGVQAIIIEPSRLVGGADPRREGRVMGD

SEQ ID NO: 4040 - protein, 228 aa, Neisseria meningitidis; identical to SEQ ID NO: 445

SEQ ID NO: 4041 - protein, 230 aa, Neisseria meningitidis; identical to SEQ ID NO: 675

SEQ ID NO: 4042 - protein, 405 aa, Neisseria meningitidis
MTHTASKTPKFWLTITAAAFILLITIGMRMTLGLFVQPVVNTTELSIAQFSLIIAVFQLMWGISQPLSGALADRFGAFRVLSGGAVLLVCACLIAPNIPTYWGLMVAVGLLLAFGTGSGGFSIIMGQVAAQIPAHKRGLASGLVNAGGSAGQFLFAPLVQGLTALPQAGWTGTFYVWAGIALLILPVSWWLAGGNNAAHTQHAQATHGQSLGEAVKTAFKTPSYILLHLSFFACGFHIAFLVTHLPTEVALCGLPATVASTSIAIIGLANIAGCIFSGWCTSRVRGKYVLFGLYASRAAMILIYIFSPKTDLNFYIFAAALGFTWLATVTPTASITGKLFGTRYLATLFGLTMLSHQIGGFLGSYIGGIVITQFGDYGWMWYADALLAGTAALLNLPIREPRTAA

SEQ ID NO: 4043 - protein, 218 aa, Neisseria meningitidis
MEQKRRFAASLLLAAVLPLCAHSFPFAEENPIAYGKVKIQSWKERRDFNIVKQDLDFSCGAASVATLLNNFYGQTLTEEEVLEKLDKEQMRASFEDMRHIMPDLGFEAKGYALSFEQLAQLKIPVIVYLKYRKDDHFSVLRGIDGNTVLLADPSLGHVSMSRAQFLDAWQTREGNLAGKILAVVSKKAETISNKLFFTQHPKRQTEFAVEQIRQARAE

SEQ ID NO: 4044 - protein, 68 aa, Neisseria meningitidis
MARITTEDCTGKISNHFDLTLVAARRARQLENGNTPLVDDVRNNKPTVTALREIAAGHIGTELLTRNK

SEQ ID NO: 4045 - protein, 245 aa, Neisseria meningitidis
MKQVDLNADLAEGCGSDEALLQLITSANIACAQHAGSIADIRAALAYAQQNGVRIGAHPGYPDRENFGRTEMNLSEADLRACLNYQLGALQALCRDQGLEMAYVKPHGAMYNQAAKNRALADTVARIVADFDPKLKLMALSGSLLLEAGKAAGLGVISEVFADRRYMPDGTLVPRSRPDAQVDSDEEAIAQVLQMVRDGQVKAVDGSLVAVQADSICLHGDGPHAVVFAEKIRQELLAAGIKVSA

SEQ ID NO: 4046 - protein, 311 aa, Neisseria meningitidis
MGHNMMTTQKWYEHITNVIIGNTANFNSGCPEAIDYVDERKGVPLAAMRHILMYTEAAASHAYLFEHDLNKFKQYAYVAGKLGILRSVNSTDPEPFFFPCDMLNIQDPMFLMLMSDSPQLREFLVRNIDNIANDTEAFVNRYDLNRHMIYNTLLMVEGKQLDRLKQRSEKVLVHPTPSKWLQKRLYDYRFFLAFAEQDAEAMKAALEPLFDKKTARMAAKETLSYFDFYLQPQIVTYAKIASMHGFDLGIDHEIAPRDLIVYDPLPADEYQDIFDFMKQYDLSYPYEYLQDWIDYYTFKTDKLVFGNAKRE

SEQ ID NO: 4047 - protein, 300 aa, Neisseria meningitidis
MDSLMTLLSVLVPMFAGFFIRVPKPYLPALDKVLSVLVYAVLLLIGVSLSRVEDLGSRLDDMALTVLWLFVCTVGANLLALAVLGKLFPWRIKGKGKGVSVGVSGSVGQLGCVLLGFASGKLMRDIWMPSESAGMYCLMLLVFLIGVQLKSSGVSLRQVLVNRRGIRLSVWFMLSSLSGGLLFAASADGVSWTKGLAMASGFGWYSLSGLVMTEAYGAVWGSIMLLNDLARELFALAFIPLLMKRFPDAAVGVGGATSMDFTLPVIQGAGGLEVVPVAVSFGVVVNIAAPFLMVVFSTLG

SEQ ID NO: 4048 - protein, 525 aa, Neisseria meningitidis
MRANPKTQAMPSETISLMKTRSLISLLCLLLCSCSSWLPPLEERTESRHFNTSKPVRLDNILQIRHTPHTNGLSDIYLLNDPHEAFAARAALIESAEHSLDLQYYIWRNDISGRLLFNLVYLAAERGVRVRLLLDDNNTRGLDDLLLALDSHPNIEVRLFNPFVFRKWRALGYLTDFPRLNRRMHNKSFTADNRATILGGRNIGDEYFKVGEDTVFADLDILATGSVVGEVSHDFDRYWASHSAHNATRIIRSGNIGKGLQALGYNDETSRHALLRYRETVEQSPLYQKIQTGRIDWQSVQTRLISDDPAKGLDRDRRKPPIAGRLQDALKQPEKSVYLVSPYFVPTKSGTDALAKLVQDGIDVTVLTNSLQATDVAAVHSGYVKYRKPLLKAGIKLYELQPNHAVPATKDKGLTGSSVTSLHAKTFIVDGKRIFIGSFNLDPRSARLNTEMGVVIESPKIAEQMERTLADTTPEYAYRVTLDRHNRLQWHDPATRKTYPNEPEAKLWKRIAAKILSLLPIEGLL

SEQ ID NO: 4049 - protein, 228 aa, Neisseria meningitidis
MYAFTDAQQQKALFRLVLFHILIIAASNYLVQFPFQIFGIHTTWGAFSFPFIFLATDLTVRIFGSHLARRIIFWVMFPALLLSYIFSVLFHDGGWTGLGALSQFNTFVGRIALASFAAYALGQILDIFVFDKLRRLKAWWVAPTASTVIGNALDTLVFFAVAFYASSDGFMAANWQGIAFVDYLFKLTVCGLFFLPAYGVILNLLTKKLTTLQTKQAQDRPAPSLQNP

SEQ ID NO: 4050 - protein, 178 aa, Neisseria meningitidis
VDLREVKLGGETIYEGGFVSISRDKVRLPNGNEGQRIVIRHPGAACVLAVTDDEKVVLVRQWRYAANQATLELPAGKLDVAGEDMAACALRELAEETPYVADSVRLLYSFYTAVGFCNEKMYLFEAEGVRLGSTLANDEDEITETVLMSKEEVRQALANDEIKDGKTLIGLQYWLMRD

SEQ ID NO: 4051 - protein, 258 aa, Neisseria meningitidis
MSDNALTSSRRFGGIARLYGDSALAHFSQAHVCVVGVGGVGSWAVEALARTGIGRLTLIDLDNVAESNVNRQLHALTGDFGKAKVTALRERITQINPQCEVFEIEDFVTEDNLPEYFGKGFDFVIDAIDQVRVKAAMAAYFVERKQPFVLSGGAGGQKNPALIQTADLSRVTHDPLLANLRYTLRKRYGFSRDTKAKMRVPCVFSTENITPPQSGVACSADAAPQGLSCAGYGASMLVTASFGLYCAQAAVEHIAGKK

SEQ ID NO: 4052 - protein, 206 aa, Neisseria meningitidis; identical to SEQ ID NO: 355

SEQ ID NO: 4053 - protein, 148 aa, Neisseria meningitidis
MNFSFVPLFLVTLILLGVVSNNNSITISATILLLMQQTALVQFVPLVEKHGLNLGIILLTIGVLSPLVSGKAQVPPVAEFLNFKMISAVFIGIFVAWLAGRGVPLMGQQPVLITGLLIGTVIGVAFMGGIPVGPLIAAGILSFVVGKG

SEQ ID NO: 4054 - protein, 91 aa, Neisseria meningitidis
MKPNIHPDNYRTVLFFDSSANEGWLIRSCAETHGKTMVWTDGKEYPLFSLDTSSASHPVYTGKQRNVNTEGRASKFNQRFQSVMSSFRKDK

SEQ ID NO: 4055 - protein, 306 aa, Neisseria meningitidis
MTNKPAKRPVNGVLLLDKPEGLSSNTALQKARRLFHAEKAGHTGVLDPLATGLLPVCFGEATKFAQYLLDADKAYTATLKLGEASSTGDAEGEIIATARADISLAEFQTACQALTGNIRQVPPMFSALKHEGKPLYEYARKGIVIERKARDITVYAIDIAEFDSPKAVIDVRCSKGTYIRTLSEDIAKHIGTFAHLTALRRTETAGFTIAQSHTLEALANLDETRRDSLLLPCDVLVSHFPQTVLNDYAVHMLRCGQRPRFDEDLPSDTPVCVYTENGHFVGLAEYQKKICRLKALRLMNTAASVA

SEQ ID NO: 4056 - protein, 321 aa, Neisseria meningitidis
VKPRFYWAACAVLLTACSPEPAAEKTVSAASASAATLTVPTARGDAVVPKNPERVAVYDWAALDTLTELGVNVGATTAPVRVDYLQPAFDKAATVGTLFEPDYEALHRYNPQLVITGGPGAEAYEQLAKNATTIDLTVDNGNIRTSGEKQMETLARIFGKEARAAELKAQIDALFAQTREAAKGKGRGLVLSVTGNKVSAFGTQSRLASWIHGDIGLPPVDESLRNEGHGQPVSFEYIKEKNPDWIFIIDRTAAIGQEGPAAVEVLDNALVRGTNAWKRKQIIVMPAANYIVAGGSRQLIQAAEQLKAAFEKAEPVAAGKE

SEQ ID NO: 4057 - protein, 109 aa, Neisseria meningitidis; identical to SEQ ID NO: 899

SEQ ID NO: 4058 - protein, 113 aa, Neisseria meningitidis
MADERVPELVADLEDQAVACLMSVLPMERQQAVEVSKKLSRHLTGNWGGQLIYFPKNLLGRVSERDMRIYKEFDGKNHAELARRYDLTVQHVYRIVKEVGMAERAKKQADLFS

SEQ ID NO: 4059 - protein, 478 aa, Neisseria meningitidis
LENSLIIGLALAVLLMLLVMRAKQGKKTPKRKSQGVGNTQGQTPGSNDSDWVDQIGQSVSDGTQPDWSWNESAETASAAVSAQEVDPLTEYQVYKQFGYQGKAAESLAAYLDGIPDGEAKPENLIRELLDINLEVGDVDVLADNLQKYGKLIPSELLAKYIEQALQRDSNHLRIRVLAEEGLGWGTQEIEKRAEGGSATAASASPPTDAGGKAYGFEEIKRIPIVRGKKDVSRISQEEIGAIAGLVRADQGAKILKDKVSYETASKQYDRAIQTSEKPANLIIDALKLDYQHADIDRFAGHLWKLYQTLGNYGRQVKERMLGWGYSLGYHEVFDDLEKGPNDRQIKDIGMGHGYLPKNIQKFKSQHRDLVLQDSSLINTGSSPADDAVKEVESLLMYGQIEAAMDVLEQAVLKYPDESQLYITLIDIYERTEDWDRLGQFLRVLRERADRLPEEVVMLMSRLLQRMNQNIKKIKRYGK

SEQ ID NO: 4060 - protein, 200 aa, Neisseria meningitidis
MTNVLQTVFYIMLFPRIIAASAQRKLSVYLKKGGLVAYPTESCYGLGCLPTLAKALGKLAHLKKRPQHKGMIVIGNQFEQLQPLLQMPSENLQDMLRKEWPAPKTFLLSAKSCVLPELRGKQRSKLAVRVPAHVGARRLCQALQTPLVSTSCNRAGKRACRTEREVRRQFGRDVWIVGGRIGRQKSPSQIIDGETGKRLR

SEQ ID NO: 4061 - protein, 563 aa, Neisseria meningitidis
MSASQLLSRLTQTVGEKYIITDPAKTEQYRQGYRFGEGKALAVVRPGSILEMWKILQACVEADVIVITQAANTGLTGGSTPDGNDYDRDIVIVNTMRMNIIQTINNNEQVVCLPGSTLNQLELLLKPLGREPHSVIGSSCIGASVLGGVCNNSGGALVQRGPAYTEMALFAQINEEGRLELVNHLGIDLGDTPEEILTNLQGHHYQNKDIKQDAGKGHDHAYCEHVRQVDEPTAARFNADPARHYEASGCAGKLMVFAVRLDTFPQEKQTAVFYIGTNDINELTDIRRAALGEFESLPVSGEYIHRHAFDIADVYGKDTFYVIKKFGTHQLPKLFDLKARVDRFGKKASFLPKHFSDKAMQFVSKYLPDHLPKSMRDYRDKYEHHLILKMGGKGVDEARAFLKEYFAHHSGAFFECNAEETQAAMLHRFAVASAAIRYRAVHDDEVEDLVALDIALRRDDRDWFEKLPPEIDNKIIHKLYYGHFMCHVFHQDYIIKKGNDCMALEHEMLHLLDQRGAQYPAEHNVGHLYEAKPALKQFYRKLDPTNSFNPGVGKTSKKKNWAE

SEQ ID NO: 4062 - protein, 363 aa, Neisseria meningitidis
MNAQTLIANVAELVKTKLKPLVDDIDRKGYYPEAFMRELGAIGGFGAVGTEAEGGNGLGLATQIAVLREIGKECGATSFSAWCQAACAWYLHQTPNRAVKDKYLADILQGKVLAGTGMSNTVKHLAGIEKHNLQAERADGGYTVNGALPWVSNIGEEHIWANTAQIGGGYVMFITGGQWEGVSLQNCPEFCALEGTRTFSLNFKDVFIPDEDIIAAPEQFADYIQSIKAGFILLQIGIGAGVIDGSLGIIRLANIVNAEVNSYLDDGYDSLKTRLDGAWAETERLAGLAWSGTPDNLATLKLREAAAVLALAATQSAALHSGAKGYLMRSPAQRRVREAMFVAIVTPAIKHLRKEIAAIEAAK

SEQ ID NO: 4063 - protein, 291 aa, Neisseria meningitidis
MAYLLISIAFSVSVSILLKMARKKKIDIAQAVAVNYVVAVILTLLVLKPDVGNIGAFLPTWWLFAALGVLLPSVFVIMGKSVESAGIVKSDAAQRLSLFLPIVAALTLFGEKLSEGRLIGLCLAFAALFCLLWKHSGGKKSGSAWRQAALLLGVWAGYGIIDILFKQLAKSGTAFAGNLLVAFVLAGVLMFACLFAKSVRWRVESVVGGIFLGGLNFMNIVTYITAHQMMKDNPTLVFAGMNIGVIVLGTLSGALFFKEKINTINTAGIVLALCSIACLFYWAEVKALFGI

SEQ ID NO: 4064 - protein, 104 aa, Neisseria meningitidis
MKLIYTVIKIIILLLFLLLAVINTDAVTFSYLPGQSVNLPLIVILFGAFVVGIVFGMFALFGRLLSLRGENGRLRAEVKKNARLTGKELTAPPAQNAPESAKQP

SEQ ID NO: 4065 - protein, 431 aa, Neisseria meningitidis
MLDIQLLRSNTAAVAERLARRGYNFDTARFDALEERRKSVQVKTEELQASRNSISKQIGALKGQGKHEEAQAAMDQVAQIKTDLEQAAADLEAVQKELDAWLLSIPNLPHEDVPFGKDETENVEVRKVGTPREFDFEIKDHVDLGEPLGLDFEGGAKLSGARFTVMRGQIARLHRALAQFMLDTHTLQHGYTEHYTPYIVDDTTLQGTGQLPKFAEDLFHVTRGGDETKTTQYLIPTAEVTLTNTVADSIIPSEQLPLKLTAHSPCFRSEAGSYGKDTRGLIRQHQFDKVEMVQIVHPEKSYETLEEMVGHAENILKALELPYRVITLCTGDMGFGATKTYDLEVWVPAQNTYREISSCSNCEDFQARRMKARFKDENGKNRLVHTLNGSGLAVGRTLVAVLENHQNADGSINIPAALQPYMGGVAKLEVK

SEQ ID NO: 4066 - protein, 492 aa, Neisseria meningitidis
MKYKDLRDFIAMLEQQGKLKRVAHPVSPHLEMTEIADRVLRAEGSALLFENPIKPDGTRYDYPVLANLFGTPERVAMGMGADSVSKLREIGQTLAYLKEPEPPKGIKDAFSKLPLLKDIWSMAPNVVKNAPCQEIVWEGEDVDLYQLPIQHCWPEDVAPLVTWGLTVTRGPHKKRQNLGIYRQQLIGKNKLIMRWLSHRGGALDYQEFRKLNPDTPYPVAVVLGCDPATILGAVTPVPDTLSEYQFAGLLRGSRTELVKCIGNDLQVPARAEIVLEGVIHPNETALEGPYGDHTGYYNEQDHFPVFTVERITMRENPIYHSTYTGKPPDEPAVLGVALNEVFVPLLQKQFPEITDFYLPPEGCSYRMAVVSMKKQYAGHAKRVMMGCWSFLRQFMYTKFIIVVDDDVNVRDWKEVIWAVTTRMDPVRDTVLVENTPIDYLDFASPVSGLGGKMGLDATNKWPGETDREWGRVIKKDPAVTAKIDGIWEELGL

SEQ ID NO: 4067 - protein, 334 aa, Neisseria meningitidis
MSIKVAINGFGRIGRLALRQIEKAHGIEVVAVNDLTPAEMLLHLFKYDSTQGRFQGTAELKDDAIVVNGKEIKVFANPNPEELPWGELGVDVVLECTGFFTNKTKAEAHIRAGARKVVISAPGGNDVKTVVYGVNQDILDGSETVISAASCTTNCLALMAAVLQKEFGVVEGLMTTIHAYTGDQNTLDAPHRKGDLRRARAAALNIVPNSTGAAKAIGLVIPELNGKLDGSAQRVPVATGSLTELVSVLERPVTKEEINAAMKAAASESYGYNEDQIVSSDVVGIEYGSLFDATQTRVMTVGGKQLVKTVAWYDNEMSYTCQLVRTLEYFAGKI

SEQ ID NO: 4068 - protein, 157 aa, Neisseria meningitidis
MTDFSVWETAPFGATVDYILQRYNNVHRAQFEELVPLAQKVAQVHADTFPAEIAGLLAYMQNELLMHMMKEERMLFPMINQGVGRGAAMPISVMMHEHEEHDRAIARLKELTDNFQPPEGACGSWTRLYALAKEMADDLNDHIHLENDILFARVLAS

SEQ ID NO: 4069 - protein, 72 aa, Neisseria meningitidis; identical to SEQ ID NO: 332

SEQ ID NO: 4070 - protein, 108 aa, Neisseria meningitidis
VASSSTIKGKYVKEVEVKNGVVTATMASSNVNNEIKGKKLSLWAKRQDGSVKWFCGQPVERTDNNAANDAVTAASDKQIDTKHLPSTCRDAASVVCIETPPTAFYKNT

SEQ ID NO: 4071 - protein, 275 aa, Neisseria meningitidis; identical to SEQ ID NO: 67

SEQ ID NO: 4072 - protein, 812 aa, Neisseria meningitidis
MTEKSHKKTAKGRAGSPSPTSARNKKADNGARGNKVSERLKAVKELQKTETKKERPEHVVNLIGDALWLMGLAATLYLAISLISFDMGDPSWSHSSPVVEDVANWGGLFGAYVADVGYYLFGWSFWWWIAAACVMLYKNFRLHAKQTENEAYNHKIAAAALFVLTVFSPVLEYFVLGGKYADSLPVGAGGMVGIRVGAVFAWLLGKSGSLLIILVVLLLSLSLLVQISWLEFLNGAGRAVQNRLSALSGKVMALGKRRPNTKTDGVDTQNTRRMVKEAKNITAKPVALPEGSSSNRKSVAVSVAPPPKIQVSLFEDDEPRQAGEYHKPTLNLLRIPDSEPVSINPAELERTAELIESKLAEFGIGVQVVSATSGPVITRYEIEPAQGVKGSQIVALSKDLARSMSLQSVRIVETIAGKNTMGIELPNDKRQDVMLSEILSSPVFAGAKSKLTVALGKDIAGTPVVGDLAKMPHLLVAGMTGSGKSVGVNGMIMSMLFKATPDEVRFIMIDPKMLELSIYDGIPHLLCPVVTDMREAGQALNWCVAEMEKRYRLLSHAGVRNLEGFNQKVEAAKAAGKPLLNPFSLNPDNPEPLEKLPMIVVVIDELADLMMTERKAVEQQIARLAQKARAAGIHMIVATQRPSVDVVTGLIKANIPTRMAFTVQSKIDSRTILDQMGADELLKYGDSLFLQPGSAEPTRLQGAFVSDDEVHQVVNYVKSQAPADYIEGLLSGEAALETANIVNPNADSDELFDQAVAYVLESKKTSISSLQRQLRIGYNRAANLMEALENAGVVSPTDLNGSRKILAHKDHL

SEQ ID NO: 4073 - protein, 378 aa, Neisseria meningitidis
MNTPPILPPAMLGILGGGQLGRMFTVAAKTMGYKVTVLDPDPDAPAAEFADCHLCAPFNDQAALDELAKCAAVTTEFENVNADAMRFLAKHTNVSPSGDCVAIAQNRIQEKSWIRKAGLQTAPYQAICKAEDITEESIQFLPGILKTATLGYDGKGQIRVKTVDELKAAFAEHRGVDCVLEKMVDLRGEISVIVCRLNNDNVQTFDPAENIHENGILAYSIVPARLSADVQQQARQMAQRLADELDYVGVLAVEMFVVGDTHELVVNEIAPRPHNSGHHTVDACAADQFQQQVRIMCNLPPADTKLLSPCCMANILGDVWQEDGGEPDWFPLQSRPDAHLHLYGKKTAHKGRKMGHFTVLTTDSDTAFQEAKKLHQSL

SEQ ID NO: 4074 - protein, 1103 aa, Neisseria meningitidis
MQNMKNQVRGSGMDARSNPANVSDGLQNSSGHIGTNTRYRLTKLGEQMARLPIDPKIARILLAAKKHDCMAEILVIASALSIQDPRERPLEARDAAAKAHERFTDKQSDFLAYLNIWDSFQRERDKGLSNKQLVQWCRQYFLSHLRMREWRELHHQLAQTAIEMGLTTKEAAFRRPPEVRQLTSSENAGDQDLSAKLKQKQLDKKQHRAQIRAAKEAGYEQIHRALLTGLIANVGMKSPDGNDYTGARGSRFHLFPASALFKAKPKWVMAAELVETTKLYARDVAAIQPEWIEQEAPHLVRYHYFEPHWEQKRGEVVASERVTLYGLTVLPRRPVPYGKVAPEEAREIFIRSALVAQECDLKADFFVHNKKLIKEITELEHKSRKQDVLVDDEALFAFYNERLPEMAWKDAQGSVWGSEDSVRIIESDKAERSSENERNEFRKNKRNGSRQNENHGNTVGWVENPTSAATAKTVGFDNPTYATQQPTPSPAREGRGEGKTVAAQTNFSATAANPLPNPLPQEREQSAAASAVSNDLHPANPQQTAPSPVGEGRGEGKTVASQTNFSATTANPLPNPLPQEGEQSAAASAVSNDPQPQKQPAPQKDRLKPLPLADIRTFQAWLKTAERENPRLLFLSRDDLMQHAAAHITEEQFPKFWQTADGKFKLSYRFEPHHPLDGVTLTLPLTVLNRLHAPSLEWLVPGMLREKIQLLIKALPKQIRRICVPVPDFITQFLSQNPDRNAPILPQLAQAIAKTAGDIRILEQINQDEWAAFRLPEHCYFNLRIIDDGGQELAGGRKLHELQQQLGQAAATTFRDNTQEFERDNVTAWDIGTLPESIKFARGKQQLTGYLGLQKEKDGRIALRLCDTIEAAEQAHRQGVIELMKLQLKEQVKDLNKGIQGFTQAAMLLKHINADTLRDDLTQAVCDRAFIGEDELPRNEKAFKEQIKRARSRLPAVKEALSRYLQETAAAYAELNGKLGKHPLTHLLRLRLQTLLAAGFATRTPWAQWPRLPIYLKTMTLRLEKYSSNPARDAAREADTQELEQMWQEKTDSLIKQGLPISDGLAAFKWMIEELRVSLFAQELKTPYPVSVKRLLKEWEDLN

SEQ ID NO: 4075 - protein, 343 aa, Neisseria meningitidis
MGIKVAINGYGRIGRQVLRAIYDYQIQDQLQIVAVNASGSLETNAHLTKFDTVHGRFEADVSHDGGNLIVNGDKIPFFSTRNPAELPWKELGVDLVMECTGAFTSKEKAKVHLESGAKKVLISAPGGDDVDATVVYGVNDSILTADMTVVSNASCTTNCLSPVAKVLSESVGIVKGAMTTIHALTNDQTVTDVRHKDLRRARSGVENMIPTKTGAAKAVGLVLPELKGKLDGLAIRVPTVNVSLVDLSFQAARDTTIEEINALMKAASEAGALKGVLGYNTLPLVSMDFNHTTEASHFDATLTKVVDGNMIKVFAWYDNEWGFSCQMLNTARRMFGLEVRPLK

SEQ ID NO: 4076 - protein, 247 aa, Neisseria meningitidis
MLIIRNLIYWLILCSTLIFLFPFMLLASPFRDGAHKMARVWVKILNLSLKHIVGLKYRIIGAENIPDRPAVICAKHQSGWETLALQDIFPPQVYVAKRELFKIPFFGWGLKLVKTIGIDRNNRREANEQLIKQGLARKNEGYWITIFPEGTRLAPGKRGKYKLGGARMAKMFEMDIVPVALNSGEFWPKNSFLKYPGEITVVICPTIPHASGSEAELMEKCEHLIETQQPLISGAGPFAAKMPSETA

SEQ ID NO: 4077 - protein, 100 aa, Neisseria meningitidis; identical to SEQ ID NO: 959

SEQ ID NO: 4078 - protein, 63 aa, Neisseria meningitidis
MIGSGDTKQCKKFSACDGKYHVYDPLALDLDGDGIETVTAKGFSGSLKTERVNTMSIHSMPLN

SEQ ID NO: 4079 - protein, 228 aa, Neisseria meningitidis
VQADLAYAAERITHDYPKPTGANNTSTVSDYFRNIRAHSIHPRVSVGYDFGGWRIAADYASYRKWNNNKYSVNIKKGRETQDNREELKTENQENGSFHAASSLGLSAIYDFKLNDKFDKFKPYIGARVAYGHVKHQVHSVETKTTIVTSKPKGKHLKGGPVSSRELSKPPYHESHSISSLGLGVIAGVGFDITPKLTLDTGYRYHNWGRLENTRFKTHEVSLGVRYRF

SEQ ID NO: 4080 - protein, 174 aa, Neisseria meningitidis
MKKALAALIALALPAAALAEGASGFYVQADAAHAKASSSLGSAKGFSPRISAGYRINDLRFAVDYTRYKNYKAPSTDFKLYSIGASAIYDFDTQSPVKPYLGARLSLNRASVDLGGSDSFSQTSIGLGVLTGVSYAVTPNVDLDTGYRYNYIGKVNTVKNVRSGELSAGVRVKF

SEQ ID NO: 4081 - protein, 255 aa, Neisseria meningitidis
MRPYATTIYQLFILFIGSVFTMTSCEPVNEQTSFNNPEPMTGFEHTVTFDFQGTKMVIPYGYLARYTQDNATKWLSDTPGQDAYSINLIEISVYYKKTDQGWVLEPYNQQNKAHFIQFLRDGLDSVDDIVIRKDACSLSTTMGERLLTYGVKKMPSAYPEYEAYEDKRHIPENPYFHEFYYIKKGENPAIITHRNYHRYGENDYSTSVGSCINGFTVRYYPFIREKQQLTQQELVGYHQQVEQLVQSFVNNPSKK

SEQ ID NO: 4082 - protein, 156 aa, Neisseria meningitidis
MPRRREVPKRDVLPDPKFGSVELTKFMNVLMIDGKKSVAERIVYGALEQIEKKTGKVAIEVFNEAIANAKPIVEVKSRRVGGANYQVPVEVRPSRRLALAMRWVRDAARKRGEKSMDLRLAGELIDAAEGRGGALKKREEVHRMAEANKAFSHFRF

SEQ ID NO: 4083 - protein, 205 aa, Neisseria meningitidis
MSAYRKGNIFIISAASGTGKTTLVSRLLANHNGLRVSVSHTTRPPREGEANGVHYHFVSKEEFESLIAQEAFLEYADVFGNYYGTSAEGVNALAAAGYDVILEIDVQGAAQVRNALPEAVGIFILPPSFDVLAARLNGRGTDSREVIQRRLSKARHEIEQSVLFDFVVVNDDLARAEEDLRHIVNACRLKRSRQLGFIADLLENS

SEQ ID NO: 4084 - protein, 219 aa, Neisseria meningitidis
MSNQKALVIFSGGQDSTTCLIQAIQIYGRENVQAITFQYGQRHAVELERASWIAQDLGVKQTVLDLSLMRQITHNALMDDTAAIETAENGVPNTFVDGRNALFLLYAAIYAKGQGIRHIIAGVCETDFSGYPDCRDVFVKSMNVTLNLAMDYDFQIHTPLMYLTKAQTWALADEMGVLDYIREQTHTCYNGIVGGCRECPSCILRERGLAEYLESKKAV

SEQ ID NO: 4085 - protein, 352 aa, Neisseria meningitidis; identical to SEQ ID NO: 327

SEQ ID NO: 4086 - protein, 178 aa, Neisseria meningitidis; identical to SEQ ID NO: 1831

SEQ ID NO: 4087 - protein, 304 aa, Neisseria meningitidis
MTWRSLLIQNGGKLSLQRRQLLIQQSGESHTVLLEDIAVIIIENRETLITAPLLSALAEHGATLLTCDEQFLPCGQWLPYAQYHRQLKILKLQLNISEPLKKQLWQHIVRQKILNQAFVADETGNDLAAKRLRTLASEVRSGDTGNREAQAAALYFQALFGEKFTRNDNNAVNAALNYTYAVLRAAVARTLTLYGWLPALGLFHRSELNPFNLADDFIEPLRPLADLTVIHLYEQGRLKTELTPGIKQHLIKTLHYQISIERQHFSTLAAIDKMISSFQAGVTDKNAKQLKLPEILPLKAYQYE

SEQ ID NO: 4088 - protein, 409 aa, Neisseria meningitidis
MAFGKSLFHAIGRVSLVRQIAAGLALGIVIGSVSPQLGLAAGLFGSLFVGALKAVAPVLVFILVAATIAQHQKGNKAHIRPIIILYLIGTFSAALTAVIAGMVFPTHIVLAGAGDVSAAPPSGIVEVLKSLLMNLVANPINAIANANYIGILAWALVLGAALRNHGSDVTRQVVADLAEAVSTVVKWIIRFAPLGIFGLVSSTIAETGFGALAGYAKLLAVLLGCMAFIALAVNPAIVWWKIRRNPYPLVFTCLRESGVYAFFTRSSAANIPVNMALAKKLGLHEDTYSISIPLGATVNMGGAAITITVLAMAAAHTQGIQVDFATALLLSLVATVSACGASGVAGGSLLLIPLACSLFGISNDVAMQVVAVGFIIGVIQDSAETALNSSTDVLFTAAADLGRQRNRAE

SEQ ID NO: 4089 - protein, 149 aa, Neisseria meningitidis; identical to SEQ ID NO: 628

SEQ ID NO: 4090 - protein, 226 aa, Neisseria meningitidis
MTYTIVPIATARSPYKQKFGIARQPGLVSAAEVCIELNPEFTADSVRGLEDFDYVWISFIFHGVLDEGWAQMVRPPRLGGKQKMGVFATRSPHRPNHLGLSLLKLNRIETGKPVRLYCSGADLLDGTPIIDIKPYIPFVESKPDAASGFVSGKPVELEVVWQENIGAENLSANTKNLISQSIAQDPRPAYQNIPERIYVMNIADYEVRFQIEENRATVIDLSPTPL

SEQ ID NO: 4091 - protein, 916 aa, Neisseria meningitidis
MTDATIRHDHKFALETLPVSLEDEMRKSYLDYAMSVIVGRALPDVRDGLKPVHRRVLYAMHELKNNWNAAYKKSARIVGDVIGKYHPHGDTAVYDTIVRMAQNFAMRYVLIDGQGNFGSVDGLAAAAMRYTEIRMAKISHEMLADIEEETVNFGPNYDGSEHEPLVLPTRFPTLLVNGSSGIAVGMATNIPPHNLSDTVNACLRLLDAPDTEIDELIDIIQAPDFPTGATIYGLSGVREGYKTGRGRVVMRGKTHIEPIGRNGEREAIVIDEIPYQVNKAKLVEKIGDLVREKTLEGISELRDESDKSGMRVVIELKRNENAEVVLNQLYKLTPLQDSFGINMVVLVDGQPRLLNLKQILSEFLRHRREVVTRRTLFRLKKARHEGHIAEGKAVALSNIDEIIKLIKESPNAAEAKDKLLARPWRSSLVEEMLTRSGLDLEMMRPEGLAANIGLKEQGYYLSEIQADAILRMSLRNLTGLDQEEIVESYKNLMGKIIDFVDILSKPERITQIIRDELEEIKTNYGDERRSEINPFGGDIADEDLIPQREMVVTLTHGGYIKTQPTTDYQAQRRGGRGKQAAATKDEDFIETLFVANTHDYLMCFTNLGKCHWIKVYKLPEGGRNSRGRPINNVIQLEEGEKVSAILAVREFPEDQYVFFATAQGMVKKVQLSAFKNVRAQGIKAIALKEGDYLVGAAQTGGADDIMLFSNLGKAIRFNEYWEKSGNDEAEDADIETEISDGIEDETADSENALPSGKHGVRPSGRGSGGLRGMRLPADGKIVSLITFAPETEESGLQVLTATANGYGKRTPIADYSRKNKGGQGNIAINTGERNGDLVAATLVGETDDLMLITSGGVLIRTKVEQIRETGRAAAGVKLINLDEGETLVSLERVAEDESELSDASVISNVTEPEVEN

SEQ ID NO: 4092 - protein, 335 aa, Neisseria meningitidis
MSTFFRQTAQAMIAKHIDRFPLLKLDRVIDWQPIEQYLNRQKTRYLRDHRGRPAYPLLSMFKAVLLGQWHSLSDPELEHSLITRIDFNLFCRFDELSIPDYSTLCRYRNWLAQDDTLSELLKLINRQLTEKGLKIEKASAAVVDATIIQTAGSKQRQAIEVDEEGQISGQTTPSKDSDARWIKKNGLYKLGYKQHTRTDEEGYIEKLHITPANAHECKHLPPLLEGIAEGTTVYADKGYDSAENRQHLEEHQLLDGIMRKACRNRPLSETQTKRNRYLSKTRYVVEQSFGTLHRKFRYARAAYFGLIKVSAQSHLKAMCLNLLKAANRLSAPAAA

SEQ ID NO: 4093 - protein, 87 aa, Neisseria meningitidis; identical to SEQ ID NO: 932

SEQ ID NO: 4094 - protein, 107 aa, Neisseria meningitidis
MDIVQLGPAELKAWMDEGRMFCLLDVRTDEETAVCSLPNALHIPMNLIPLRQNELPDDVPLVVYCHHGIRSLHTAMYLADAGFENLYNLQGGIDAWAAEIDGNMMRY

SEQ ID NO: 4095 - protein, 262 aa, Neisseria meningitidis
MNPQDKCWQVHRHLAEYADQRLTLVRNAPKYILLAGADADISRSLLAKRYPQAVFEEYDSRADFLAAAAAARKGGFWQRFTGKGVVQHCQSPIAPLPEACADMLWSNLGLLAAEQILPVLHNWARALKTDGLLFFTCFGRDTFTELKCRLKENGIESRSVMFPDMHDLGDMLAENEFYDPVTDTAKLVLDYKKAETFWADMDTLGVWRAMSWNDENAARSCVGTIFEREGGLGITLETVYGHAVKKLMLPQGENVVQFFPKR

SEQ ID NO: 4096 - protein, 258 aa, Neisseria meningitidis
MTLIHPTAVIDPKAELDSGVKVGAYTVIGPNVQIGANTEIGPHAVINGHTSIGENNRIFQFASLGEIPQDKKYRDEPTKLIIGNGNTIREFTTFNLGTVTGIGETRIGDDNWIMAYCHLAHDCVVGNHTIFANNASLAGHVTVGDYVVLGGYTLVFQFCHIGDYAMTAFAAGVHKDVPPYFMASGYRAEPAGLNSEGMRRNGFTAEQISAVKDVYKTLYHRGIPFEEAKADILRRAETQAELAVFRDFFTQSTRGIIR

SEQ ID NO: 4097 - protein, 334 aa, Neisseria meningitidis
MTIIVTGAAGFIGSNIVKALNQRGITDIVAVDNLSKGEKFKNLAECEIAHYLDKHEFIRQVREHILPYQNIEAVFHQGACSDTMNHDGLYMMENNYQYTLDLLDWCQDERIPFLYASSAAVYGKGEIFREERELEKPLNVYGYSKFLFDQVLRRRMKEGLTAQVVGFRYFNVYGQHEQHKGRMASVTFHHFHQYREHGYVNLFGSNDGYGNGEQTRDFVSVEDVAKVNLYFFDHPELSGIYNLGTGRSQQFNELAAATVNACRAAEGKPEMSLKELVKEELIRYIPFPNALKGKYQSFTQADITKLREAGYKEEFFDVKSGVDRYVKWMLENLA

SEQ ID NO: 4098 - protein, 211 aa, Neisseria meningitidis
MFLKRSKAVQTHDFTATMQFGTVSAVDEASHSLRVKIPVLDDMETDWLPMATPAAGGNRFYSLPDVGELVVCLLDARGENGCVIGAIYNAADKPPVSDQNKWVKRFTNGTVISHDRGSGEVVVETPGKVKIKAAQKVDIQSPETEITGNATVNGLLTYTAGLVAGNAGGGEAAKITGNVIIDGELIVNGINIGKHIHDGDSGGQTGEPKNH

SEQ ID NO: 4099 - protein, 280 aa, Neisseria meningitidis
MLVCNPYEVVIHGTTSSGKIFRPSDWAERLCGILSSFTKDNRLSYSKWVRPMLVDNIRCVAVDKKLETDNPQMFRFLMDFAADNDLRVIDCKALLEEREQGGQNNPADEHVMLAQAIEEKHAAEKAQEQTASGASYVLREIGADDTATAFAALSVLRSALTDINRFTEQINKVQRPQGYRLLGIFEEGKHNAVAVCGFREACTLASGRHIHIDDIVTLPQSRRKGYASRLLEEVRKIGAETGVTKIHLNVHVNHDRADAHRLYFKNGFEICAYHFRCDPK

SEQ ID NO: 4100 - protein, 113 aa, Neisseria meningitidis; identical to SEQ ID NO: 3580

SEQ ID NO: 4101 - protein, 929 aa, Neisseria meningitidis
MTDYSKTVNLLESPFPMRGNLAKREPAWLKSWYEQKRYQKLREIAKGRPKFILHDGPPYANGDIHIGHAVNKILKDIIIRSKTQAGFDAPYVPGWDCHGLPIEVMVEKLHGKDMPKARFRELCREYAAEQVARQKKDFIRLGVLGDWDKPYLTMDFKTEADTVRMLGEIYKSGYLYRGAKPVQFCLDCGSSLAEAEVEYKDKISPAIDVAYLFKDTAALAAAFGLASIEGKAFAVIWTTTPWTLPASQAVSAGADVVYQLIDTPKGKLVLAKDLAEDALKRYGFSDGIAILAETTGDKLENLHMNHPFLERDIPMLNGEHVTTDAGTGLVHTAPAHGLEDYAVCNKYGIELYNPVNAEGKYIGETPRVAGMRVWEANPVILQWLEETGNLLASSKIEHSYAHCWRHKTPLIYRATGQWFVGMDKAGADGKTLRDKAIKAVDDTEFFPSWGRARLEAMIEGRPDWVVSRQRYWGTPMTFFVHKETGELHPNSAELLEKVALKIEEKGIEAWFSLDKSELLSAEDCENYDKLSDTMDVWFDSGSTHYSVVKQREELEWPADLYLEGSDQHRGWFQSSMLTGCASSMGRAPYKQLLTHGFVVDGEGKKMSKSIGNVVAPQEVYNEFGADILRLWAASTDYSGELAISKEILKRVTESYRRIRNTLSFLFANLSDFNPIEDAVQQADMVEIDRYALVLARRLQERLAGDYYPRYAFHFAVKDIVSFCSEDLGAFYLDILKDRLYTTKADSHARRSAQTALYHITRSLVLLIAPILCFTGEEAWDIIGGGEEDSVLFHTWHEFPTINEKTEAELVKKWTAIREAREAVTAAIEPLRADKTVGSSLQAEAEITAPEEMAGYLNALGEELRFALLVSKAEVKVGDELAVAAKASDGEKCERCWHYTRDVGAVAGHETVCKRCAENVSGEGETRHYA

SEQ ID NO: 4102 - protein, 225 aa, Neisseria meningitidis
MSIKQWPEGERPREKLLERGAAALSDAELLAILLRVGTRGMSAVDLARYLLQEFGSLGRLMSAEVGKLSAYKGMGTASFTQFAVVREIGRRILAEELQEEITLSDPDTVADYLRFHLGQEKVEVSVALLLNRQNQLIAVRELSRGTVAENTIYIREIVKLALDEYADSLIIAHNHPGGSPEPSQEDIMFTRRLAQAMSLVDVSLLDHFIVTSQSVCSFRQLGLMP

SEQ ID NO: 4103 - protein, 252 aa, Neisseria meningitidis
MITIRNVSYRIGTRPILDNVSLDIPEGGITALVGPNGAGKSTLFSFMARLRPLESGSIAYRGKNLAGTPTAELARTLSILTQENSIMSRITVRDLLMFGRYPYHQGRPTAECRRIVNGAIEEFHLQDLSDRYLTELSGGQRQRAMIAMVFCQSTDYVLLDEPLNNLDMYHARSLMQILQKLTREHKRTTVAVLHDINQAAAYADHVVAMKNGKAVLTGTPEEVFTVHNIKELFDMDVDVLDYEGKKLIVHHI

SEQ ID NO: 4104 - protein, 461 aa, Neisseria meningitidis
MSSGLVTAAYIVAAILFIFSLAGLSKQETAKQGCYSGIAGMAVALFVTVFSDNTHGLGWIIIAMLIGAAIGIYKAKKVEMTEMPELIALLHSFVGLAAVLVGFNSYIEPGNVSHDMHTIHLVEVYLGIFIGAVTFTGSLVAFGKLNGKISSSPLQLPAKHKLNALALAVSFVLLLVFVGIDGSGFILLIMTLIALAFGWHLVASIGGADMPVVVSMLNSYSGWAAAAAGFMLSNDLLIVTGALVGSSGAILSYIMCKAMNRSFVSVIAGGFGSDSGTSSSGSQEIGEYREVKAADVAEMLKGANSVIITPGYGMAVAQAQYPVAEITELLRKNGTEVRFGIHPVAGRLPGHMNVLLAEAKVPYDIVLEMDEINDDFPETDVVLVIGANDTVNPAAQTDPNSPIAGMPVLEVWKAKEVVVFKRSMNTGYAGVQNPLFFNENSVMCFGDAKKTVDDILSELKK

SEQ ID NO: 4105 - protein, 121 aa, Neisseria meningitidis; identical to SEQ ID NO: 530

SEQ ID NO: 4106 - protein, 338 aa, Neisseria meningitidis
MYRKLIALPFALLLAACGREEPPKALECANPAVLQGIRGNIQETLTQEARSFAREDGRQFVDADKIIAAAYGLAFSLEHASETQEGGRTFCIADLNITVPSETLADAKANSPLLYGETALSDIVRQKTGGNVAFKDGVLTAAVRFLPVKDGQTAFVDNTVGMAAQTLSAALLPYGVKSIVMIDGKAVKKEDAVRILSGKAREEEPSKPTPEDILEHNAAGGDAGVPQAAEGAPEPEILHPDDGERADTVTVSRGEVEEARVQNQRAESEITKLWGGLDTDVQKELVGEQRKWAQEKISNCRQAAAQADRQEYAEYLKLQCDTRMTRERIQYLRGYSID

SEQ ID NO: 4107 - protein, 371 aa, Neisseria meningitidis
MLKFTLHKKDGYARRGTLELNHGKIETPVFMPVGTYGSVKAMNPQNLHDIKAQIILGNTYHLWLRPGLEVVEQFGGLHGFIGWDKPILTDSGGFQVFSLSDMRKLTEEGCTFKSPINGDKLFLSPEISMKIQTVLNSDIAMQLDECTPGEATREQAKKSLQMSLRWAERSKKAFEDLKNPNALFGIVQGAMYEDLREESLRGLEQFDFPGLAVGGLSVGEPKPEMYRMLRAVGPILPEHKPHYLMGVGTPEDLVYGVAHGIDMFDCVMPTRNARNGWLFTRFGDLKIKNAKHKLDKRPIDESCTCYACQNFSRAYLHHLHRTGEILGAQLNTIHNLHFYQVIMAEMREAVEQGKFADWQAQFHENRARGTD

SEQ ID NO: 4108 - protein, 119 aa, Neisseria meningitidis; identical to SEQ ID NO: 3189

SEQ ID NO: 4109 - protein, 218 aa, Neisseria meningitidis
MKNKTKVWDFPTRLFHWLLAASLPFMWYSAKTGGDMLQWHTRVGLFILFLLIFRLCWGIWGSDTARFSRFVHGWSGIRDYLKNGIPEHIQPGHNPLGALMVVALLAAVSFQVGTGLFAADENTFSTNGYLNHLVSEHTGSLMRKIHLNFFNLLAVFSAVHIAAVAAYRVFKKKNLVLPMITGFKYIEGKTSIRFAGKTALAAALSVAALVAAAILLLS

SEQ ID NO: 4110 - protein, 259 aa, Neisseria meningitidis
MKTITETLNLAPKGKNFLTADWPAPANVKTLITTRNGGVSQGAYQSLNLGTHVGDNPEAVRRNREIVQQQVGLPVAYLNQIHSTVVVNAAEALGGTPDADASVDDTGKVACAVMTADCLPVLFCDRAGTAVAAAHAGWRGLAGGVLQNTIAAMKVPPVEMMAYLGPAISADAFEVGQDVFDAFCTPMPEAAAAFEGIGGGKFLADLYALARLILKREGVGGVYGGTHCTVLERDTFFSYRRDGATGRMASLIWLDGNAV

SEQ ID NO: 4111 - protein, 238 aa, Neisseria meningitidis
MTMHETTDRLFEIAKEQGVLKPADIAERLNISQQALKNWESRGIAAKALPEVAKAFGVSETWLRTGEGSRTAPVLIDPDLPHEVKDIHRPMTWSSNDPLPDDDYVFVPYLKESCFKGGVGTYEIPDYNGYRLPFGKSTLKRKGINPDNVFCCTLTGDSMEEKIAEDAAIAVDTGETAIRDGKIYAFAQDGMFRVKYLIRQPGNSVLIRSHNSGFYGDENAPLDSLTVIGRVFWWSVLD

SEQ ID NO: 4112 - protein, 50 aa, Neisseria meningitidis
MPSETMISDGILTSKRTSLIKPAFPASLTRTGLNEVTALTIMASSHSQKL

SEQ ID NO: 4113 - protein, 1422 aa, Neisseria meningitidis
MSWNSFGNFMSARSSALAEFGNMVANLVSAKNEKDISKRNEYYKQAGYSALLAFGNLASNIAPGSTSSHIVNGTNASVIASRLSGNISSAIQEHKDGKVNINRFQNILADLYSLGGLGSTLIEKNGNMQSWGIPLAIAGDIIAATAIATGDTGTISTEEFYNFDNWKGFGYELFEDWSRWVYDWLPDGWNLWKELDRNRSGQYHIYDPLALDLDGDGIETVAAKGFSGSLFDHNGNGIRTATGWVSADDGLLVRDLNGNGIIDNGAELFGDNTKLADGSFAKHGYAALAELDSNGDNIINAADAAFQSLRVWQDLNQDGISQANELRTLEELGIQSLDLAYKDVNKNLGNGNTLAQQGSYTKTDGTTAKMGDLLLAADNLHSRFKDKVELTAEQAKAANLAGIGRLRDLREAAALSGDLANMLKAYSAAETKEAQLALLDNLIHKWAETDSNWGKKSPMRLSTDWTQTANEGIALTPSQVAQLKKNALVSLSDKAKAAIDAARDRIAVLDAYTGQDSSTLYYMSEEDALNIVKVTNDTYDHLAKNIYQNLLFQTRLQPYLNQISFKMENDTFTLDFSGLVQAFNHVKETNPQKAFVDLAEMLAYGELRSWYEGRRLMADYVEEAKKAGKFEDYQKVLGQETVALLAKTSGTQADDILQNVGFGHNKNVSLYGNDGNDTLIGGAGNDYLEGGSGSDTYVFGKGFGQDTVYNYDYATGRKDIIRFTDGITADMLTFTREGNHLLIKAKDGSGQVTVQSYFQNDGSGAYRIDEIHFDNGKVLDVATVKKLVQQSTDGSDRLYAYQSGNTLNGGLGDDYLYGADGDDLLNGDAGNDSIYSGNGNDTLDGGEGNDALYGYNGNDVLNGGEGNDHLNGEDGNDTLIGGAGNDYLEGGSGSDTYVFGKGFGQDTVYNYDYATGRKDIIRFTDGITADMLTFTREGNHLLIKAKDGSGQVTVQSYFQNDGSGAYRIDEIHFDNGKVLDVATVKELVQQSTDGSDRLYAYQSGNTLNGGLGDDYLYGADGDDLLNGDAGNDSIYSGNGNDTLDGGEGNDALYGYNGNDVLNGGEGNDHLNGEDGNDTLIGGAGNDYLEGGSGSDTYVFGKGFGQDTVYNYDYATGRKDIIRFTDGITADMLTFTREGNHLLIKAKDGSGQVTVQSYFQNDGSGAYRIDEIHFDNGKVLDVATVKELVQQSTDGSDRLYAYQSGSTLNGGLGDDYLYGADGDDLLNGDAGNDSIYSGNGNDTLDGGEGNDALYGYNGNDVLNGGEGNDHLNGEDGNDTLIGGAGNDYLEGGSGSDTYVFGEGFGQDTVYNYHVDKNSDTMHFKGFKAADVHFIRSGSDLVLSASEQDNVRISGFFYGENHRVDTFVFDDAAISNPDFAKYINAGNNLVQSMSVFGSNTAATGGNVDANTQSVQQPLLVTPSA

SEQ ID NO: 4114 - protein, 524 aa, Neisseria meningitidis; identical to SEQ ID NO: 2756

SEQ ID NO: 4115 - protein, 375 aa, Neisseria meningitidis
MYTFRPFPKLHTETHIMNIQNIRTLLDTVAVPNTARTLGGEKAVRSVEQHSDGIHIALHFGFPVAHIAAAIADSVQETLMPETGDTHIHLSMDTEIGTHKVQPGVTTIKGVKNIIAVASGKGGVGKSTTTANLAAAMARMGARVGVLDADLYGPSQPTMLGVHDRKPDQKNQKLIPVESSDGIQVMSIGFLVDTGQAVVWRGPMVSQALQQLMFQSEWDEVDYLFIDLPPGTGDIQLTLSQRIPVTGSVIVTTPQDIALIDARKAVDMFRKVNIPILGVLENMSVHICSNCGHSEALFGTDGGKDLAARLNVPLLGQLPLSLPVREAMDGGTPAQLFDEHPAIAKIYTDAAFQIALSIADKGKDFSSRFPKIVVE

SEQ ID NO: 4116 - protein, 263 aa, Neisseria meningitidis
MITVNTLQKMKAAGEKIAMLTAYESSFAALMDDAGVEMLLVGDSLGMAVQGRKSTLPVSLRDMCYHTECVARGAKNAMIVSDLPFGAYQQSKEQAFAAAAELMAAGAHMVKLEGGVWMAETTEFLQMRGIPVCAHIGLTPQSVFAFGGYKVQGRGGKAQALLNDAKAHDDAGAAVVLMECVPAELAKKVTESVSCPTIGIGAGVDCDGQVLVMHDMLGIFPGKTAKFVKNFMHGQSSIQAAVRAYVAEVKAKTFPAAEHIFAD

SEQ ID NO: 4117 - protein, 121 aa, Neisseria meningitidis
MNLIQQLEQEEIARLNKEIPEFAPGDTVVVSVRVVEGTRSRLQAYEGVVIARRNRGLNSNFIVRKISSGEGVERTFQLYSPTVEKIEVKRRGDVRRAKLYYLRGLTGKAARIKEKLPARKG

SEQ ID NO: 4118 - protein, 275 aa, Neisseria meningitidis
MPELPEVETTLRGIAPHIEGKTVEAVVLRQLKLRWQINPDLGEILSGRQVLSCGRRAKYLIVRFQTGILLIHLGMSGSLRIFTPSDGRIGRPDRHDHVDIVFSDGTVMRYRDPRKFGAILWYEGIEEHHPLLEKLGPEPLSEAFCADYLYARLKAQKRAVKLALMDNAVVVGVGNIYANESLFRAGISPHRPANRLKKKECALLVETVKAVLQRAIETGGSTLRDFVDSDGKSGYFQQEYTVYGRHNQPCPQCGGLVVKETLGQRGTFYCSNCQK

SEQ ID NO: 4119 - protein, 263 aa, Neisseria meningitidis
MNVYFLGGGNMAAAVAGGLVKQGEYRIHIVNRGAEKRERLEKELGVETSATLPELHSDDVLILAVKPQDMEAACKNIRTNGALVLSVAAGLSVGTLSRYLGGTRRIVRVMPNTPGKIGLGVSGMFAEAEVSETDRRIADRIMKSVGLTVWLEDEAQMHSITGISGSGPAYVFYLLDALQNAAIRQGFDMAEARALSLATFKGAVALAEQTGEDFEKLQKNVTSKGGTTHEAVEAFRRHRVAEAISEGVCACVRRSQEMERQYQ

SEQ ID NO: 4120 - protein, 433 aa, Neisseria meningitidis
MAIYQSGVIFDQVDTANPDCWTLDEYVKRGGYTALRKILSGNISQTDVIDEVKTSGLRGRGGAGFPTGLKWSFMPRSFPGEKYVVCNTDEGEPGTFKDRDIIMFNPHALIEGMIIAGYAMGAKAGYNYIHGEIFEGYQRFEAALEQARAAGFLGKNILGSDFEFELFAHHGYGAYICGEETALLESLEGKKGQPRFKPPFPASFGLYGKPTTINNTETFSSVPFIIRDGGQAFADKGIPNAGGTKLFCISGHVERPGNYEVPLGTPFAEVLKMVGGMRGGKKLKAVIPGGSSAPVLPADIMMQTNMDYDSISKAGSMLGSGAIIVMDEDVCMVKALERLSYFYYDESCGQCTPCREGTGWLYRIVHRIVEGKGRMEDLDLLDSVGNQMAGRTICALADAAVFPVRSFTKHFRDEFVHYIEHGGPMKEHKWGGW

SEQ ID NO: 4121 - protein, 337 aa, Neisseria meningitidis; identical to SEQ ID NO: 1101

SEQ ID NO: 4122 - protein, 374 aa, Neisseria meningitidis
VCGLCHKTVPAPIAGASGDWKSCLKNVQWRTFLKRGPIMHIGGYFIDNPIALAPMAGITDKPFRRLCRDFGAGWAVCEMLTSDPTLRNTKKTLHRSDFTDEGGIVAVQIAGSDPQQMADAARYNVSLGAQVIDINMGCPAKKVCNVQAGSALMQNEPLVAAILEAVVKAAGVPVTLKTRLGWHDDHKNLPAVARIAEDCGIAALAVHGRTRTQMYKGEAAYDLIAETKCRLNIPVWVNGDITSPQKAQAVLKQTAADGIMIGRGAQGRPWFFRDLKHYAEHGVLPPALSLAECTATILNHIRAMHAFYGDTAGVRIARKHIGWYIDEMPDGEQARRDINCLDSAAAQYDMLAGYLERLAEKTDSWACAYRPNTF

SEQ ID NO: 4123 - protein, 875 aa, Neisseria meningitidis
MPAGRLPRRCPMMTKFTDCTRSNRIQPPTHRGYILKNNRQIKLIAASVAVAASFQAHAGLGGLNIQSNLDEPFSGSITVTGEEAKALLGGGSVTVSEKGLTAKVHKLGDKAVIAVSSEQAVRDPVLVFRIGAGAQVREYTAILDPVGYSPKTKSALSDGKTHRKTAPTAESQENQNAKALRKTDKKDSANAAVKPAYNGKTHTVRKGETVKQIAAAIRPKHLTLEQVADALLKANPNVSAHGRLRAGSVLHIPNLNRIKAEQPKPQTAKPKAETASMPSEPSKQATVEKPVEKPEAKVAAPEAKAEKPAVRPEPVPAANTAASETAAESAPQEAAASAIDTPTDETGNAVSEPVEQVSAEEETESGLFDGLFGGSYTLLLAGGGAALIALLLLLRLAQSKRARRTEESVPEEEPDLDDAADDGIEITFAEVETPATPEPAPKNDVNDTLALDGESEEELSAKQTFDVETDTPSNRIDLDFDSLAAAQNGILSGALTQDEETQKRADADWNAIESTDSVYEPETFNPYNPVEIVIDTPEPESVAQTAENKPETVDTDFSDNLPSNNHIGTEETASAKPASPSGLAGFLKASSPETILEKTVAEVQTPEELHDFLKVYETDAVAETAPETPDFNAAADDLSALLQPAEAPSVEENITETVAETPDFNATADDLSALLQPSEVPAVEENAAETVADDLSALLQPAEAPAVEENVTETVAETPDFNATADDLSALLQPSEVPAVEENAAETVADDLSALLQPAEAPAVEENATEITLETPDSNTSEADTLPDFLKDGEEETVDWSIYLSEENIPNNADTGFPSESVGSDAPSEAKYDLAEMYLEIGDRDAAAETVQKLLEEAEGDVLKRAQALAQELGI

SEQ ID NO: 4124 - protein, 161 aa, Neisseria meningitidis; identical to SEQ ID NO: 1442

SEQ ID NO: 4125 - protein, 201 aa, Neisseria meningitidis
MPTYLSRLSFSFSRRLPVILQTEAAECGLACLVSVLGFHGFYTDLRHLRARFSLSLKGATLADLVRFANSMNLTARAVRLDLDELANLRVPCILHWDLNHFVVLHEVHRNHIMIMNPASGWQKVRMEEVSRCFTGVALELFPNTQFEEKHETRKIRVLPMLRGVVGLKRSETFAKFLSLPTAETQTQVFGCFQLFSPQIPP

SEQ ID NO: 4126 - protein, 405 aa, Neisseria meningitidis
MKTVVWIVVLFAAAVGLALASGIYTGDVYIVLGQTMLRINLHAFVLGSLIAVVVWYFLFKFIIGVFNIPEKMQRFGSARKGRKAALALNKAGLAYFEGRFEKAELEASRVLGNKEAGDNRTLALMLGAHAAGQMENIELRDRYLAEIAKLPEKQQLSRYLLLAESALNRRDYEAAEANLHAAAKMNANLTRLVRLQLRYAFDRGDALQVLAKTEKLSKAGALGKSEMERYQNWAYRRQLADAADAAALKTCLKRIPDSLKNGELSVSVAEKYERLGLYADAVKWVKQHYPQSRRPELLEAFVESVRFLGERDQQKAIDFADAWLKEQPDNALLLMYLGRLAYGRKLWGKAKGYLEASIALKPSISARLVLAKVFDETGEPQKAEAQRNLVLASVAEENRPSSETC

SEQ ID NO: 4127 - protein, 369 aa, Neisseria meningitidis
MSLTRLILKFYALLRLFLGKNARTAWISHPACAGHEPGANHPDSPDRILCIEQALRRAGIWQHLQTIEAEEISDTRLALVHSSKYLNRLESCQPQKGKIFRLDDDTAISTGSLSAARFAAGSAVQAVDMVMNRKAWHAFCAARPPGHHAGSGKAGGFCLLNNVAAGVMHAIAEYRLKRIAVIDFDVHYGDGTAEIFKDDPRILFFNLFETDLFPFPENNDMPDGGNMVHLPLPPGTGSRTFREAVRRQWLPRLATFKPELVLLSAGFDAHRLDESGRLNLHEADFAWLTHKIIQTASGCPGKIVSVLEGGYTLEPLAQSAAEHIRVLAGLGKSDAATAYQKTLDPTKKRFAKPKTGQVRQPTQSDRYDI

SEQ ID NO: 4128 - protein, 718 aa, Neisseria meningitidis
MPAPQPSAPYDPLTAEARALLFHTASYLKPEEQAELEKAVAYAFRAHDGQTRKSGEPYITHPIAVATQLALWHMDIQGLCAGVMHDVLEDTGVTKGEMAAVFGNTVAEMVDGLSKLEKLKFEDHAEHQAESFRKLILAMTKDVRVIVVKLADRLHNMRTLGSMRPDKRRRIARETLEIYAQIANRIGLNNAYQELQDLSFQNLHPNRYETLKKAMDKSRKNRQDVVGKVLRAFGQRLVGANIEAKIKGREKNLYGIHQKMMAKKLRFAEVMDIYGFRVIVNSIPACYAALGALHTLYQPKPGRFKDYIAIPKSNGYQSLHTTLVGPYGLPIEVQIRTKEMDAVAEGGIAGHWSYKSYSKTVDQAVLHTNRWLKNILDLQASSANAIEFLEHVKVDLFPNEIYILTPKGKILTLPKGATPVDFAYAVHTDIGHKTVAARINNIMMPLRTKLKTGDSVEIITSEYAKPNPAWLNFAVSGRARSAIRQYIKNLNRHDAVVLGESLLQKALSSLLPKDVLLSDGIKEKYLADLNDKQTSFEEVLYNVGMGHTLPVYVAMHIAELAGEHFGSEVRLSSIKVDGQESGHIHFAECCHPVPGDSIRLLLVKGKGMIIHRDTCPTLLKSDPEQQLDADWENMNGQNYRVGLQVQSEDSHGLLALMAQAISDSGADIESVETPSKSQSGTEGFVEFKFLLKVKNLNQLNQIIQNLHSIPYIRKVIRS

SEQ ID NO: 4129 - protein, 308 aa, Neisseria meningitidis
MSEMKKTKVHLISGFLGTGKTTALKSLMAQKDPNEKWVIIVNEFGEIGIDGAVLSDNGIPVAEIAGGCLCCTAGPQMGVTVQKMLRDAKPDRLMIEASGLAHAASVIDELKAKPLDSLLEIGAVFTVVYPRQFINPDYAQQALYKDQIGICDILVASKTDLCTPEQLAEFHDKAAKLFPPKAKVVEVQNAQLDIQWLDIPVIEKSRYRLKALPDNTMGFQSQGFTFPAGRDFDGEKLTNFFNDLPKMTEGLVRAKGVFQVLGTWVWLNWVDGQWGANQVSWRRDSRFELIAKSFDADLIEQKLKDALE

SEQ ID NO: 4130 - protein, 160 aa, Neisseria meningitidis; identical to SEQ ID NO: 2526

SEQ ID NO: 4131 - protein, 319 aa, Neisseria meningitidis
MSHHHEHHHHAHAHTHTANKKVLRVSFIIIAAFMLLEAFGGWLTHSLALLSDAGHMFSDAFSLGVALWAFKLGEKETTLQKTFGYKRFEILTAMFNGLSLVVIAVLIFYEAVKRLLYPPEIATLGMLVISVVGLLVNIGVAVYMLKNSDTEANVNMRGAYLHVLSDLLGSIGAIAAAVLMMAFGWKWADPLASVFVAALVGRSGWSLLKQTLHILMEGAPENIHTDDLLAVIRNTEGVKSVHDLHVWTITSNINVLSCHIVVDGSMTVAESEQIAYRIEHELSHKNIGHCTIQIESERHPHKNEILCSPYAEAHHSHSH

SEQ ID NO: 4132 - protein, 513 aa, Neisseria meningitidis
MKIGIPRESLSGETRVACTPATVALLGKLGFETVVESGAGWAASLDDAAYQTAGATVADKAAVWACPLIYKVNAPSEQELPLLNEGQTIVSFLWPRQNEALVEALRAKKVNALAMDMVPRISRAQALDALSSMANISGYRAVIEAANAFGRFFTGQITAAGKVPPAQVLVIGAGVAGLAAIGTANSLGAVVRAFDTRLEVAEQIESMGGKFLKLDFPQESGGSGDGYAKVMSDEFIAAEMKLFAEQAKEVDIIITTASIPGKPAPKLITKEMVESMKSGSVIVDLAAATGGNCELTRPGELSVTGNGVKIIGYTDMANRLAGQSSQLYATNLVNLTKLLSPNKDGEITLDFEDVIIRNMTVTRDGEITFPPPPIQVSAQPQQTPSEKAAPAAKPEPKPVPLWKKLAPAVIAAVLVLWVGAVAPAAFLNHFIVFVLACVIGYYVVWNVSHSLHTPLMSVTNAISGIIVVGALLQIGQGNGFVSLLSFVAILIASINIFGGFFVTRRMLNMFRKG

SEQ ID NO: 4133 - protein, 286 aa, Neisseria meningitidis
MNPLFTQERRIFHKKLLDGNVLATNNKGVVSNADGSNTRSCNIAKGIADLLHSETVSERLPGQTSGNAFEAICSEFVQSAFEKLQHIRPGDWNVKQVGSRNRLEIARYQQYAHLTALAKAAEENPELAAALGSDYTITPDIIVTRNLIADAEINRNEFLVDENIATYASLRAGNGNMPLLHASISCKWTIRSDRAQNARSEGLNLVRNRKGRLPHIVVVTAEPTPSRISSIALGTGEIDCVYHFALYELEQTLQSLNYEDALDLFYIMVNGKRLKDISDLPLDLAV

SEQ ID NO: 4134 - protein, 281 aa, Neisseria meningitidis
MNIADGRQAFPAPAKLNLDLRITGKREDGYHNIESIFCLIDLQDTVYLKPRDDGKIILHNPVGGIPQEADLSYRAASLLQKYARNPAGVEIWLDKKIPTGAGLGGGSSDAATVLLVLNRWWQCGLTQRQLIDSGAALGADVPFFIFGKNAFARGIGDRLDEMDIPKQWYVIVKPPVHVSTAKIFTHEGLTRNSASSIMPTFQNLQPFRNDMQAVVFKEYPEVWKAYSELSRYGFALMTGSGACVFTACQDRDSAYNIYRQVSGLYEAYLAEGLSKHPLLSV

SEQ ID NO: 4135 - protein, 163 aa, Neisseria meningitidis; identical to SEQ ID NO: 684

SEQ ID NO: 4136 - protein, 138 aa, Neisseria meningitidis
MKTSTIVFGGFFITDNGERIQIPILENPNIKEINNFFSVSNFEKKAGVLVFRIIPEPEFGNTELTIYFEKGYYLPIIQTILEDGDIEVKNLKTENYSGNTMEILGDVYPIEHISKNISIIQDIISKFIIKNKPITIMI

SEQ ID NO: 4137 - protein, 841 aa, Neisseria meningitidis
MNPNSKHNTNFTNLLKPSDSDIKQFAAQHIRHLTDLLNRYAYEYYTLDAPSVPDAEYDKLFRELEALERNHPELKLPDSPTQRVGGEPLAGFAEVRHEVPMLSLTNAFSPQDENGVFDHAEMYAFDQRVRDGLDGGKPEYVIEPKFDGLAISLLYRDGVLVQAATRGDGTTGEDVTQNIKTVANIPLRLHGENTPELIEVRGEVLMQKADFAALNKRQAENGQKPFANPRNAAAGSLRQLDSRITAQRKLHFFPYSVARQQGGFVAEEHIQELAYFQALGFSLPNGNFGCFKNIDEVLAFYEQMQQKRPELPYEIDGMVVKVNSLAQQRELGFISRAPRWAIAHKFPAEEALTIVEAIDVQIGRTGAVTPVARLQPVFVGGVTVTNATLHNQDEVSRKDVRVGDTVVVRRAGDVIPEVVRVIFERRPMRETAVAVSDGIGHRQDDLFAETPSANQTQSVPLHKPYRLPTHCPICRSEIEREEGEAVARCSGGMLCQAQRAQGLIHFASRKAMDIDGLGEKQIEQLVAQDLVRHFADLYRLDIPTLQKMKEAADKTVAESDQMPSEDSSVGASGKHKKPPTKWAENILAGIESGKTPELARFLFALGIRHVGERTAKTLAQAFGTLEHVRRAPEPVLACLPDIGTVVARSIAHFFAQAEQQAMIDELLAAGVAPQTQAVTIPPARHAEPQRWIARLPDFKISENKAQALWELAGKNIEGLQNDKALPADWQAWRSEPQNAALLENLKTFFAQMPSEDEAAQGSDGINEAVAGKTFVLTGTLPTLKRDQAQSLIEAAGGKVSGSVSKKTDYVVAGEAAGSKLEKANALGVSVLSEAELLTLLG

SEQ ID NO: 4138 - protein, 284 aa, Neisseria meningitidis
MSAQLINGKEVSQKRLQAVAEAVAQRQQDNLHMPCLAVVLVGGDPASAVYVRNKKTACQKCGIKSLSYELPESTSQEELLALVDRLNADSEVDGILVQLPLPKHLDSQAVLERISPDKDVDGFHPYNVGRLAVKMPLMRPCTPKGVMTLLEAYGIDPKGKKAVVVGASNIVGRPQALELLLARATVTVCHSATENLTDEVAGADILVVGVGIPNFVKGEWIKPGAVVIDVGINRLDDGSLCGDVEFETAKERAAMITPVPGGVGPMTIATLMENTLHAASLHDA

SEQ ID NO: 4139 - protein, 139 aa, Neisseria meningitidis
MGVLLNNTKILINISSISFILLNVYIIYSKVRFNLSTIPFVNHISILIAFSFIISTLLLIYKMVIFARGINKNQNKIEFVKIFTFYFMVILYIALITLFRQENFYFNMNIYSIIFIVILFCLTHFFFIIKFYFEVNKNV

SEQ ID NO: 4140 - protein, 92 aa, Neisseria meningitidis; identical to SEQ ID NO: 419

SEQ ID NO: 4141 - protein, 426 aa, Neisseria meningitidis
MKSLFIRLLLLGSAAGVFYHTQNQSLPAGELVYPSAPQIRDGGDALHYLNRIRAQIGLHKLAHAPVLENSARRHARYLTLNPEDGHGEHHPDNPHYTAQKLTERTRLAGYLYNGVHENISTEEEAAESSDSDIRTQQRQVDGLMSAIYHRLSLLDRHTDEAGAAFVRENGKTVLVFNQGNGRFERHCAQGRNQPEAGRKYYRNACHNGAVVYTDEAMPAQELLYTAYPVGNGALPYFHGERPDPVPEYEITGNPASIDFSEAAGKITMKSFKLYQGKNEIRPVRVLTAGNDPNGRLTAYQFALFPLKPLEYGTLYTAVFDYVRNGRRAQAKWQFRTRKPDYPYFEVNGGETLAVRKGEKYFIHWRGRWCLEACTRYTYRQRPGSRLSIGRHEAGGIVFSVGGMAGSRITLAPEGETERGVTLYLQD

SEQ ID NO: 4142 - protein, 365 aa, Neisseria meningitidis
MRKNAMMYDPLYFPRSELAEIIAKSLYGGITHAFTLFAPRRMGKTQFLLKDIKPTAEAAGFNVFYFSFMDSTAPTVDFQAALLRFAESIKTGGKVQNLIGQISKIEIMGSSIERRTERQQAELRLSDIIADIAGGSRPSLLLLDEIQELARQPDTGGLIRSLRTGLDIHQQQVKTIFTGSSTNGLRAMFNDIKAPFFHFAHALDFPTLGREFTDFLAGVYQERTGRGLDGGELYRAFERLNKTPLYMRAMLQDMIINPDLSIGQAESIRLEEMHKHADTAAQWRHLSLIEQLILSELASGQTAIYSAQTRQALARVIGVDDIGTSTVQNNIRKLERKDLITRDGANRLQINSPILKTWILENVER

SEQ ID NO: 4143 - protein, 477 aa, Neisseria meningitidis
MNEYSQLIKHPDVSLSPISDGIGVDNPATGEILAYVRNTGSDKLKNLIQKAAAAQKLWAAKTALERADILWRWYFLVKENKEALARLMTMEQGKSLTESRGEIDYAASFVRWFAEEARRIDGDVLTSVKASQKLVVLKQPVGVTAAITPWNFPSAMIARKAAPALAVGCAMIVKPASLTPLSAYALVVLAYEAGVPQDLLPVVSGRASEIGREFATNPIIRKISFTGSTEVGAKIFADSAADIKKLSLELGGNAPFIVFDDADLDKAVEGALASKFRNSGQTCVCTNRVYAQSGIYDEFCRKLSEKVAELKLGNGLEDGVNQGPLIEEKAVEKVEQHIADALAKGAVCLTGGKRSALGGTFFEPTVLSGVTAQMAVAREETFGPLCPVFRFETEVEVIEAANNTEYGLAAYLFTADTARQWRVGEALEYGMVGINTGLISNEAAPFGGVKRSGLGREGSKYGADEYLELKYLCMDVG

SEQ ID NO: 4144 - protein, 268 aa, Neisseria meningitidis
MWHWDIILILLAVGSAAGFIAGLFGVGGGTLIVPVVLWVLDLQGLAQHPYAQHLAVGTSFAVMVFTAFSSMLGQHKKQAVDWKTVFAMMPGMIFGVFTGALSAKYIPAFGLQIFFILFLTAVAFKTLHTDPQTASRPLPGLPGLTAVSTLFGAMSSWVGIGGGSLSVPFLIHCGFPAHKAIGTSSGLAWPIALSGAISYLLNGLNIAGLPEGSLGFLYLPAVAVLSAATIAFAPLGVKTAHKLSSAKLKKSFGIMLLLIAGKMLYNLL

SEQ ID NO: 4145 - protein, 127 aa, Neisseria meningitidis
MFRTMLGGKIHRATVTEADLNYVGSITVDQDLLDAAGIYPNEKVAIVNNNNGERFETYTIAGKRGSGVICLNGAAARLVQKGDIVIIMSYVQLSEPEIAAHEPKVVLVDGNNKIRDIISYEPPHTVL

SEQ ID NO: 4146 - protein, 782 aa, Neisseria meningitidis
MLPIAALVGSIFGNPVFAADEAATETTPVKAEVKAVRVKGQRNAPAAVERVNLNRIKQEMIRDNKDLVRYSTDVGLSDSGRHQKGFAVRGVEGNRVGVSIDGVNLPDSEENSLYARYGNFNSSRLSIDPELVRNIEIVKGADSFNTGSGALGGGVNYQTLQGRDLLLDDRQFGVMMKNGYSTRNREWTNTLGFGVSNDRVDAALLYSQRRGHETESAGNRGYPVEGAGKETNIRGSARGIPDPSKHKYHNFLGKIAYQINDNHRIGASLNGQQGHNYTVEESYNLTASSWREADDVNRRRNANLFYEWMPDSNWLSSLKADFDYQKTKVAAINYKGLFPTNYTTWETEYHKKEVGEIYNRSMDTRFKRFTLRLDSHPLQLGGGGRHRLSFKTFASRRDFENLNRDDYYFSGQISRTTSSIQHPVKTTNYGFSLSDQIQWNDVFSSRAGIRYDHTKMTPQELNAECHACDKTPPAANTYKGWSGFVGLAAQLNQAWRVGYDITAGYRVPNASEIYFTYDNGAATWLANPSLKAERSTTHTLSLQGRGEKGTLDANLYQSNYHNFLSEEQFTRLIRDEKCDEDYALAGYCKLYRNQLYWHMENIDKARIRGIELTGRLNVDKVASFVPEGWKLFGSLGYAKSKLSGDNSLLSTQPLKVIAGIDYESPSEKWGVFSRLTYLGAKKAKDAQYTEYEGYRFIKKVKDYPWLNKSAYVFDMYGFYKPAKNLTLRAGVYNMFNRKYTTWDSLRGLYSYSTTNAVEKDGRGLDRYRAPGRNYAVSLEWKF

SEQ ID NO: 4147 - protein, 99 aa, Neisseria meningitidis
VDYPDFPQEIPTPNYTDWVKIKFKQFSYLKFVYGYATKSQDINIDNTLELGELKQDDEILDYGGALELIGGRYDFPTAFRIDIVCREIELEFLDQEGFN

SEQ ID NO: 4148 - protein, 270 aa, Neisseria meningitidis
MSVGHYENFPVGSLILPRRLRKPVHAVYAFARTADDMADEGSMPSEARLAGLEGLRRELDVLASGGRSAHPLIARLDAEAVVPFGLDLQPFYDLLSAFSQDVVKTRYAHFGELADYCRRSANPVGRIMLALYGKTDAVCVAQSDGICTALQLVNFWQDVAVDWQKGRVYIPQDDLLKFGVSEEQIAAGRADAAFQRLMAYECRRAFRMLKAGSPLARELKGRIGLELRMIVLGAQLILQKLDACRYDVFAQRPVLDKKDWLIMLKKALWK

SEQ ID NO: 4149 - protein, 387 aa, Neisseria meningitidis
MTQLFLHSDTPNEKELISIYEKAVSEAVELYIFSAYLTHWDVKNKLNSKLQEFKFIFGQDFGLSKKEAIRKVLKWLPSHLKFTLMVAQGIQGFHPKAVFWKNDKNEYYALIGSSNLTHAAFNSNYEANILTKISEQDFIKVKSWADEIAMKSIPVSEDWLEEYQEAEINYKKSTVSQSLMDKLFMEMPNYNQELIAARRKQMRNHQTVCNQLKSLIKQCAAGKIDNDEFYVEFNKLWSWKSENKGEGVGNRFQDQTWKRTGKSSDFRKLCIAIQSVFDAPLAERDNVVAKQIDWLKECGVSTRGSVFSEMLCQEYPDRYPVLNAPIKKFLEKNKFKSAKGASEGSRYIDLSMKLRALLAMQSEIKNLAELDVLVQAEYRDSTDIDWE

SEQ ID NO: 4150 - protein, 107 aa, Neisseria meningitidis; identical to SEQ ID NO: 1793

SEQ ID NO: 4151 - protein, 861 aa, Neisseria meningitidis
MLEAYRKAAAERAALGIPALPLTAQQTADLVELLKSPPAGEGEFLVELLAHRVPPGVDDAAKVKASFLAAVAEGSASSPLISPEYATELLGTMLGGYNIHALIELLDDDKLAPIAAKGLKHTLLMFDSFHDVQEKAEKGNKYAQEVLQSWADAEWFASRAKVPEKITVTVFKVDGETNTDDLSPAPDAWSRPDIPLHALAMLKNPRDGITPDKPGEVGPIKLLEELKAKGHPVAYVGDVVGTGSSRKSATNSVIWHTGEDIPFVPNKRFGGVCLGGKIAPIFFNTQEDSGALPIEVDVSALKMGDVVDILPYEGKIVKNGETVAEFELKSQVLLDEVQAGGRINLIIGRGLTAKAREALKLPASTAFRLPKAPAESKAGFTLAQKMVGRACGLPEGQGVRPGTYCEPRMTTVGSQDTTGPMTRDELKDLACLGFSADMVMQSFCHTAAYPKPVDVKTHKELPAFISTRGGVSLRPGDGVIHSWLNRLLLPDTVGTGGDSHTRFPIGISFPAGSGLVAFAAATGVMPLDMPESVLVRFSGKLQPGVTLRDLVNAIPLYAIKQGLLTVAKAGKKNIFSGRILEIEGLPDLKVEQAFELTDASAERSAAGCTVKLNKEPIIEYMKSNVVLMKNMIANGYQDPRTLERRIKAMEKWLANPELLEADKDAEYAAVIEINMDDIKEPIIACPNDPDDVCFMSERSGTKIDEVFIGSCMTNIGHFRAASKLLEGKADTPVRLWIAPPTKMDAKQLSDEGHYGVLGRAGARMEMPGCSLCMGNQAQVREGATVMSTSTRNFPNRLGKNTFVYLGSAELAAICSKLGKIPTVEEYQANIGIINEQGDKIYRYMNFNEIDSYNEVAETVNV

SEQ ID NO: 4152 - protein, 399 aa, Neisseria meningitidis
MSTFFQQTAQAMIAKHIDRFPLLKLDRVIDWQPIEQYLNRQKTRYLRDHRGRPAYPLLSMFKAVLLGQWHSLSDPELEHSLIIRIDFNLFCRFDELSSIVDQKPVRRCLALAQRERFSKVLKHRVNRFRTICTVFGFVALSFLLIHYTLCRYRNWRRKTTPCPNCSNLTANPKKAKRKHPPPSLTPPLFRPPAANSVRLKSMKKEKSAAKPHRVRTAMPVGSRKTASTNSVTNNIPVPMRKAISRNCTSLPPMPMSANTCRRCWKDCPKVRPSMPTKAMTVRKTGNIWKSVSCTALCAKPAATVRRKRKPNVTDIYRRPVIVDIIRTRRRSRRQYKYGKARQRRTGLNLIHYMWSNRASVRCTVNSAMRGQPISGAKVHKAIRRCVTFKRPTGVRLFAP

SEQ ID NO: 4153 - protein, 163 aa, Neisseria meningitidis
LAKQQEKAKIEKAERERKKAEEQAEQARKEKEKQKLEEQRQFLIEQFEVLSPKQQENVINEIFEQVGKGAFKQIFQTARQQGTVHIDARFVKNFYNYFQQEERAKRARKRVDLPIQYTEEDIEQEVPKEKGTIFFGNDWNEYVYKQLIMYRDFKSMMNDDAIK

SEQ ID NO: 4154 - protein, 481 aa, Neisseria meningitidis
MAHFFNINYPTYKGKNMTVRIEHDLLGDREIPAEVYWGIHTLRAIENFKISTQKISDVPQFVRSMVMVKKATAQANGELGAVKPEIAAAIEKACDEILLNNRCLDQFPSDVYQGGAGTSVNMNTNEVIANLALEVLGYEKGRYDIVNPMDHVNASQSTNDAYPTGFRLAVYYSIGELLDKLTVLKNAFAAKAEEFKDVLKMGRTQLQDAVPMTAGQEFQSFQVLLEEEILNLDRTRQLLLEVNLGATAIGTGVNTPKGYAELVVKKLSEVSGLPCKLTENLIEATSDCGAYVMVHGALKRTAVKLSKICNDLRLLSSGPRAGLKEINLPELQAGSSIMPAKVNPVIPEVVNQVCFKVIGNDTTITFAAEAGQLQLNVMEPVIAQCMFETISLLGNAAVNLSDKCVKGITVNREICERYVFNSIGLVTYLNPYIGHHNGDLVGKICAQTGKGVREVVLERGLLSEEELNRILSPENLMNPHL

SEQ ID NO: 4155 - protein, 145 aa, Neisseria meningitidis; identical to SEQ ID NO: 1767

SEQ ID NO: 4156 - protein, 110 aa, Neisseria meningitidis
MQILSFQPDIAERMLEGTEGESVNENAQFVRTDNGYWIAWHEGVAALLAPDMPPGIPCFWVEGAESLEELCVMVERGEFDEVEEFDGDDDEWLETAQGCGHHGDACACGH

SEQ ID NO: 4157 - protein, 257 aa, Neisseria meningitidis; identical to SEQ ID NO: 37

SEQ ID NO: 4158 - protein, 105 aa, Neisseria meningitidis
MACDAGVASSSTIKGKYVAGVKVEKGVITAEMKSSGVNKEIQGKKLSLWAKRQDGSVKWFCGQPVERTAPTTTNDDVKADTAANGKQIDTKHLPSTASTRKSTPN

SEQ ID NO: 4159 - protein, 359 aa, Neisseria meningitidis
MKTLTVHTPSHSYPIFIGNGLLPQAGSLLKPHLGKRAAIITNETVAPLYLGTLQTALDAAGVSHFSIILPDGEAHKNWQTLNLIFDGLMQNRAERKTTLIALGGGVIGDMTGFAAATYQRGAPFVQIPTTLLSQVDSSVGGKTAINHPLGKNMIGAFYQPQAVLADLDTLHTLPVRELSAGMAEVIKYGALGDIGFFEWLEQNISGLMMLDREKLAQAVYRCCQMKADIVAQDETEQGIRAWLNLGHTFGHAIETEMGYGTWLHGEAVAAGCVLAVRLSEQLGKTSAADTARLAALFEAAGLPSAPPVFPFEKWLEHMSHDKKVSGGIMRFIGLNRLGEANITEITDTDILRRTLQPYL

SEQ ID NO: 4160 - protein, 421 aa, Neisseria meningitidis
MFSFFRRKKKQETPALEEAQIQETAAKAESETDQVIENIKEDAESLAESVKGQVESAVETVSGAVEQVKETVAEMLSEAEEAAEKAAEQVEAAKEAIAETVGEAVGQVQEAVATTEEHKLGWAARLKQGLTKSRDKMAKSLAGVFGGGQIDEDLYEELETVLITSDMGMEATEYLMKDVRDRVSLKGLKDGNELRGALKDALYDLIKPLEKPLVLPETKEPFVIMLAGINGAGKTTSIGKLAKYFQAHGKSVLLAAGDTFRAAAREQLQAWGERNNVTVISQTTGDSAAVCFDAVQAAKARGIDIVLADTAGRLPTQLHLMEEIKKVKRVLQKAMPDAPHEIIVVLDANIGQNAVNQVKAFDDALGLTGLIVTKLDGTAKGGILAALASDRPVPVRYIGVGEGIDDLRPFDARAFVDALLD

SEQ ID NO: 4161 - protein, 238 aa, Neisseria meningitidis; identical to SEQ ID NO: 3469

SEQ ID NO: 4162 - protein, 114 aa, Neisseria meningitidis; identical to SEQ ID NO: 565

SEQ ID NO: 4163 - protein, 117 aa, Neisseria meningitidis
MGIKNEQIIICKKYNTEIYPVSDVSKIGVAENVKQTDLYPINGLRHRPKGDTNGWYIWAGENFSNDENFFLPLHTFHLQIWRPEIIPFLTLPPGYRFLIGENGYEDVWFDELLLNDN

SEQ ID NO: 4164 - protein, 100 aa, Neisseria meningitidis
LGFNNLVSLAALIEKVFPIRYTPAGIPVLDIILKHKSWQEENGQQCLVQLEIPARILGRQAEEWQYRQGVYVHVEGFLAQKSRRSLMPMLRIQNIQEYKG

SEQ ID NO: 4165 - protein, 268 aa, Neisseria meningitidis; identical to SEQ ID NO: 2873

SEQ ID NO: 4166 - protein, 109 aa, Neisseria meningitidis
MLDLLPSEIWSNPKATFLDPVCKSGVFLREIVKRLDEGLTNQIPDKQTRINHILKNQVFGSTATYVGSFDRYLHKNSFAGERNYFANFKIFLAPNSTMTKTIMPMIKSG

SEQ ID NO: 4167 - protein, 658 aa, Neisseria meningitidis
MPRIAALPDHLVNQIAAGEVVERPANALKEIVENSIDAGATAIDVELAGGGIRLIRVSDNGSGIHPDDIKLALHRHATSKIKTLNDLEHVASMGFRGEGLASIASVSRLTLTSRQDGSAHATQVKAEDGKLSSPTAAAHPVGTTIEAAELFFNTPARRKFLKSEATEYAHCATMLERLALAHPHIAFSLKRDGKQVFKLPAQSLHERIAAIVGDDFQTASLEIDSGSGALRLYGAIAKPTFAKGKTDKQYCFVNHRFVRDKVMLHAVKQAYRDVLHNALTPAFVLFLDLPPEAVDVNVHPTKTEIRFRDSRQVHQLVFHTLNKALADTRADLTESVSNAGEVLHDITGVVSTPMPSENDSENLFDSASDYPTGNKPDTRNAFGSSGKTAPMPYQAARAPQQRSLSLRESRAAMNTYAELYKKTDGIDLELNRLEQARFGNMPSEMPIPKTDAPLSDGIPSQSELPPLGFAIAQLLGIYILAQAEDSLLLIDMHAAAERVNYEKMKRQRQENGKLQSQRLLIPVTFAASHEECAALSDHADALAGFGLELSDMGGNTLAVRAVPAMLGKADVVSLAKDVLGELAQVGSSQTIEEHENHILATMSCHGSIRAGRRLTLPEMNVLLRDMENTPRSNQCNHGRPTWVKLTLKELDALFLRGQ

SEQ ID NO: 4168 - protein, 279 aa, Neisseria meningitidis; identical to SEQ ID NO: 2627

SEQ ID NO: 4169 - protein, 139 aa, Neisseria meningitidis
MAQLPLYLTSEIKDFTVGTPKVLESFSKHIPYGVVFEDDGDTGYFYAASQDGILDALHIYNVEDVSDKHIPNHVLILWDDACTIAALSINDYIHAVYDFVEQAGYCRNGFPETGGEWVKVENRVLDDELLDKILSRKST

SEQ ID NO: 4170 - protein, 922 aa, Neisseria meningitidis
MRSSFRLKPICFYLMGVMLYHHSYAEDAGRAGSEAQIQVLEDVHVKAKRVPKDKKVFTDARAVSTRQDIFKSSENLDNIVRSIPGAFTQQDKSSGIVSLNIRGDSGFGRVNTMVDGITQTFYSTSTDAGRAGGSSQFGASVDSNFIAGLDVVKGSFSGSAGINSLAGSANLRTLGVDDVVQGNNTYGLLLKGLTGTNSTKGNAMAAIGARKWLESGASVGVLYGHSRRSVAQNYRVGGGGQHIGNFGAEYLERRKQQYFVQTGGLKFNSNSGKWERDLQRQFWKTSYYKQYKDPQKLKKYIEDQDKDWRENLAPQYDITPIDPSSLKQQSAGNLFKLEYDGVFNKYTAQFRDLNTKIGSRKIINRNYQFNYGLSLNPYTNLNLTAAYNSGRQKYPKGSKFTGWGLLKDFETYNNAKILDLNNTATFRLPRETELQTTLGFNYFHNEYGKNRFPEELGLFFDGPDQDNGLYSYLGRFKGDKGLLPQKSTIVQPAGSQYFNTFYFDAALKKDIYRLNYSTNTVGYRFGGEYTGYYGSEGEFKRAFGENSPIYREHCDPSCGLYEPVLKKYGKKRANNHSVSISADFGDYFMPFASYSRTHRMPNIQEMYFSQIGDSGVHTALKPERANTWQFGFNTYKKGLLKQDDTLGLKLVGYRSRIDNYIHNVYGKWWDLNGNIPSWVSSTGLAYTIQHRNFKDKVHKHGFELELNYDYGRFFTNLSYAYQKSTQPTNFSDASESPNNASKEDQLKQGYGLSRVSALPRDYGRLEVGTRWLGNKLTLGGAMRYFGKSIRATAEERYIDGTNGGNTSNVRQLGKRSIKQTETLARQPLIFDFYAAYEPKKNLIFRAEVKNLFDRRYIDPLDAGNDAATQRYYSSFDPKDKDEEVTCNDDNTLCNGKYGGTSKSVLTNFARGRTFLITMSYKF

SEQ ID NO: 4171 - protein, 45 aa, Neisseria meningitidis; identical to SEQ ID NO: 645

SEQ ID NO: 4172 - protein, 526 aa, Neisseria meningitidis
MSVIKRALISLSDKAGAVEFAQTLHKLGVEILSTGGTAKLLADAGVPVIEVADYTGFPEMLDGRVKTLHPKIHGGILGRRDLDEHVAKMEEHGIGNIDLVCVNLYPFAATIAKPNCTLEDAIENIDIGGPTMVRSAAKNWKHVAIVTDTADFPAIAAELEANNGALSDKTRFNLSRKAFSHTAQYDGMISNYLTSLSDDVLSGQPQIGEFPSQFNQSWIKVQDMRYGENPHQRAAFYRDIHPAAGSLAAYKQLQGKELSYNNIADADAAWEAVKSFDAPACVIVKHANPCGVAVAADTLTAYKLAYATDTTSAFGGIIAFNREVDGETVKQITDNQFMEVLMAPKFTAEALEIAAAKKNVRVLEVPLEAGANRFELKRVGGGLLVQTPDICRISRADLKVVSKRQPTEQEWNDLLFVWNVAKYVKSNAIVFGKGGQTYGIGAGQMSRVDSTRIAARKAQDANFDLNGVCAASDAFFPFRDGVDVIAEQGIKAIIHPAGSMRDQEVFDAADEHGIAMVVTDVRHFRH

SEQ ID NO: 4173 - protein, 401 aa, Neisseria meningitidis
MQTLISADNHLLLWAFVMLAAAAAIFIEQNSRLAGKVPGAVLALLIALIASNLGVIPTDAPVFDAVWSYIVPLAIPLLLFQLDLHALFKESGRMLFIFLISSLGTVIGTLVSFALLKNYIPELDKVAGMISASYTGGGVNFAAMSAKLNPAKDVIAATIVADNLMMACYFFILIGISSSYWVRKVWGSPYQDKLEQEYHDPSVNKAAEYWKPKSISLQSIALSLAASILLVAVSFSLSSFLQNHFQSVDGVALKMLTGLISDKYLLLTTFTLAVVLFFRKGIQKLDGSQELGTYCIYLFFVVIGVPASIPLIIKTAPLLFVFTLIIVVLNLLLTLVLGKLFKFSIEEIVLACNANIGGPTTAAALAISKGWRDLVGAILLIGTVGYIIGNYIGSFVYALLS

SEQ ID NO: 4174 - protein, 252 aa, Neisseria meningitidis; identical to SEQ ID NO: 3275

SEQ ID NO: 4175 - protein, 336 aa, Neisseria meningitidis
MNHTVTLPDQTTFAANDGETVLSAAARQNLNLPHSCKNGVCGQCKAELVSGDIQMGGHSEQALSEAEKAQGKILMCRTTAQSDISLNIPGYNPNALPVRTLPARIESMVFKHDVALLKLALPKAPPFAFYAGQYIDLLLPGNVSRSYSIANPPDQEGILELHIRRRENGVCSEMIFGSEPKVKEKGIVRVKGPLGSFTLQEDSGKPVILLATGTGYAPIRSILLDLIRQDSSRAVHFYWGARHQDDLYALEEAQGLACRLKNACFTPVLSRPGEGWQGRKGHVQDIAAQDHPDLSEYEVFACGSPAMTEQAKNLFVQQHKLPENLFFSDAFTPSAS

SEQ ID NO: 4176 - protein, 330 aa, Neisseria meningitidis
MPSETVCPFSDGISVTHPSPYTVRPYSEGLLRKPAMPYQQITINVNDAVAERLADTLMEYGALSAAIEDAYAGTENEQAIFGEPGMPAEQIWQQSKVIALFGEHDEAAAIIQTAAQECGLKDLAYTGETLEDQDWVRLTQAQFDPIRISDRLWITPSWHEAPEGTAVNLRLDPGLAFGTGSHPTTRLCLKWLDTQLKNGESVLDYGCGSGILTIAALKLGAGSAVGVDIDEQAVRAGRDNAEQNNVDAQFFLPDGLPQGQFDVVVANILANPLRMLGEMLAARTKQGGRIVLSGLLDEQIEELGGIYSQWFDLDPAETEEGWARLSGTKR

SEQ ID NO: 4177 - protein, 452 aa, Neisseria meningitidis
MDLNVEIKNLGKVAHARVSIRPLTVITGCNSSGKSFITRGLYSILHTLNQDVVSAYILNVLSLTNSALLRLSDGIPRRSADDDALLSDIGLLLEGVRQSVADRLSPSPLYQPPASQLVLNDLKTAVAELARRLKVGKGTKMQAVKQHYTDIEDYLSDLEFCLSGDVGFYTEAVGRALHSAFSGNFQVADIKRLLSSDSANFSLGDGTEVSIGDKGLGFKLSETMLGSLQSLKNVVYLESPVYYKMRNALKDARLFRLNMLRRGAVNPVPQYFYDLDEMLEAELPPVNEVFGQIADKVEALINGRLAVTPSGEIVYSERGRQSVPLNMASSGISNIGMIALLLRRNVLDEGSFLFIDEPEMNLHTSWQHAMLDILLDLSRAGVNVVVATHSLDMLHRLEAKVEADASLLGSVGVCRLSSDGISLEDGSVLGGLRAAKEALGAPYLEVIEERLP

SEQ ID NO: 4178 - protein, 63 aa, Neisseria meningitidis
MIKKVLLMKYGVFFAAATALLLSACGYKGDLYLPKEGDKARFGVIQTGLQLQSKPQSASQTQK

SEQ ID NO: 4179 - protein, 145 aa, Neisseria meningitidis; identical to SEQ ID NO: 3684

SEQ ID NO: 4180 - protein, 218 aa, Neisseria meningitidis
MNRQKVIAIDGPGASGKGTVAARVAAALGYDYLDTGALYRLTALYAQKQGVEWHDEENVSALAEKLPAVFSGSRILLGGEDVSDGIRTEAIGMGASAVAQLPKVRAALLQRQRDFLTEKGLVADGRDTGSVVFPQAELKIFLTAESKIRAERRAKQIGIPCEGLAFERILSNIEARDEADRNRKVAPLKQQPDALLLDTSRLTIEETVKKVLDWYRKV

SEQ ID NO: 4181 - protein, 370 aa, Neisseria meningitidis
MQTAARRSFDYDMPLIQTPTSACQIRQAWAKVADTPDHETAGRLKDEIKALLKEKNAVLVAHYYVDPLIQDLALETGGCVGDSLEMARFGAEHEAGTLVVAGVRFMGESAKILCPEKTVLMPDLEAECSLDLGCPEEAFSAFCDQHPDRTVVVYANTSAAVKARADWVVTSSVALEIVSYLKSRGEKLIWGPDRHLGDYIRRETGADMLLWQGSCIVHNEFKGQELAALKAEHPDAVVLVHPESPQSVIELGDVVGSTSKLLKAAVSRPEKKFIVATDLGILHEMQKQAPDKEFIAAPTAGNSGSCKSCAFCPWMAMNSLGGIKYALTSGHNEILLDRKLGEAAKLPLQRMLDFAAGLKRGDVFNGMGPA

SEQ ID NO: 4182 - protein, 706 aa, Neisseria meningitidis
MFDKHVKTFQYGNHTVTLETGEIARQAAAAVKVSMGDTVVLVAVTTNKEVKEGQDFFPLTVDYLERTYAAGKIPGGFFKREGKQSEKEILTSRLIDRPIRPLFPEGFFHDIQIVAMVVSVDPEIDSDIPAMLGASAALVLSGVPFAGPIGAARVGYVNGVYVLNPTKAELAKSQLDLVVAGTSKAVLMVESEAKILPEDVMLGAVVYGHDQMQVAINAINEFADEVNPELWDWKAPETNEELVAKVRGIAGETIKEAFKIRQKQTRSAKLDEAWNAVKEALITEETDTLAANEIKGIFKHLEADVVRSQILDGQPRIDGRDTRTVRPLNIQTGVLPRTHGSALFTRGETQALAVATLGTSRDEQIIDALSGEYTDRFMLHYNFPPYSTGEVGRMGAPKRREIGHGRLAKRALLAVLPKPEDFSYTMRVVSEITESNGSSSMASVCGGCLSLLSAGVPLKAHVAGIAMGLILEGNKFAVLTDILGDEDHLGDMDFKVAGTTEGVTALQMDIKIQGITKEIMQIALAQAKEARLHILDQMKAAVAGPQELSAHAPRLFTMKINQDKIREVIGKGGETIRSITAETGTEINIAEDGTITIAATTQEAGDAAKKRIEQITAEVEVGKVYEGTVVKILDNNVGAIVSVMPGKDGLVHISQIAHERVRNVGDYLQVGQVVNVKALEVDDRGRVRLSIKALLDAPAREENAAE

SEQ ID NO: 4183 - protein, 444 aa, Neisseria meningitidis
MAKKYFGTDGVRGEVGQFPITPDFVLKLGYAAGQVLVQHDTGQKPTVLIGKDTRISGYMLEAALVAGFTAAGVNVIQTGPLPTPGVAYLTRALRLSAGVMISASHNAYSDNGIKFFAEGGVKLSDEVELEIEAKIDEEMKTQPSARLGRARRINGADDRYIEFCKSTFPTHSDLRGLKLVVDAANGAAYSVAPKVFHELGAQVVSIGNEPNGYNINEKCGATHTKTLQAVVLQNEADYGIALDGDGDRLMMVDKNGQVYDGDSLIYVIAKARAGEGVNIGGVVGTVMTNMAMENALKEQGVDFCRAKVGDRYVLEQLNRRGWLVGGEASGHILCMDKHNTGDGIISALQVLAALQTLNQDLAAVCADWQPYPQTMINVRIGKGQNWQEASKTVLAEVEKELEGKGRVVLRASGTEPVVRVMVEARQADWARDGAERIAAAIGGI

SEQ ID NO: 4184 - protein, 310 aa, Neisseria meningitidis
MLSQLEYGIAKENRPNRQADRFAGSVLPLAASLTHKPNIMKPIPTDTFQPAILPQAFETEIKSTCTGRIYRIQTATLGEMPSEGYPVLFVLDGEAFFPSLFNIMQSLMPNPVTRSNAPCLIVGIGYTTGSVRDLTQRAADYTPPLGDNATADERQQFGQADRFAAFIDSELTAFLESKYRLDKNETAVFGHSFGALFGLYSLLSHRRFRRHWLVSPSIWWHNRRILDFMPSENRLNGIDVCLNIGALERGSGCKRREERDMAGLSERMAAELDRHGAAVFFREYPNADHGNVSFYSLTDCVEYLRKAWQR

SEQ ID NO: 4185 - protein, 160 aa, Neisseria meningitidis
MTQQRQLPSHELIMSELMMPDTANFSGNVHGGELLLLLDQVAYSCASRYSGNYCVTLSVDKVLFKEPIHIGDLVTFYAAVNYTGRTSMEIGIRVEAQNIRTGEIRHTNSCYFTMVAVKDGKPVPVPPLEILTDRQRCRYEKAKKRRDISLQASEDMSCGC

SEQ ID NO: 4186 - protein, 404 aa, Neisseria meningitidis; identical to SEQ ID NO: 240

SEQ ID NO: 4187 - protein, 102 aa, Neisseria meningitidis; identical to SEQ ID NO: 254

SEQ ID NO: 4188 - protein, 397 aa, Neisseria meningitidis
MNPKHLIAFSALFAATQAEALPVASVSLDTVTVSPSAPYADTNGLLTDYGNAAASPWMKKLRSVAQGSGETFRILQIGDSHTAGDFFTDSLRKRLQKTWGDGGIGWVYPANVKGQRMAAVRHNGNWQSLTSRSAAADFPLGGILAHTGSGGSMTLTASDGKTGKQRVSLFTKPLLAEQTLTVNGNTVSANGGGWQVLDTRAALPLTIQTEMPWDIGFINIENPAGGITVSAMGINGAQLTHWSKWRADRMNDLAQTGADLVILSYGTNEAFGDNIDIADTEQKWLDTVRQIRDSLPAAGILIIGAPESLKNTLGVCGTRPVRLTEVQQMQRRVARQGQTMFWSWQNAMGGVCSMKNWLNQGWAAKDGVHFSAKGYRRTAEMLADSLEELVRAAAIRQ

SEQ ID NO: 4189 - protein, 103 aa, Neisseria meningitidis; identical to SEQ ID NO: 392

SEQ ID NO: 4190 - protein, 661 aa, Neisseria meningitidis
MAKNNQYSESSITVLKGLEPVKERPGMYTRTDSPTHICQEVIDNAADEALGGFATAIDVQIHEDGSLSVRDNGRGIPVGLHPEEGVPVVELVFTRLHAGGKFNKKDGGSAYAFSGGLHGVGVSVTNALSTRLEVTVKREGKIHRIVFAGGDVVEPLAQVGKCAVKDSGTEVRVWPDGKYFESPNYSIPELERLLRAKAVLLPGVRVSLTRPVKGEDEAHTQTWHYPDGLKSYLTDLIADAQEAVPLFSCENYISDEHNGDFSIGEGAAFALTWLEEGSCANESYVNLIPTPLGGTHEAGLKQAVFNAVSNFINLHNLLPRGVKVQSDDVFGKTAFVLSARVLDPQFQGQTKDKLTNRDALKLVATVSGDPLELWLNQNVDFGKKIAELAIRQAQARMRSVKKIEKKKGSGVAVLPGKLTDCESEDIRENELFLVEGDSAGGSAKLARDKATQAILPLRGKVLNSFEVHPDQLFGNAEIHDISVAIGVDPHGINDHPDLSGLRYGKIAILSDADVDGSHIQVLLLTLFYRHFPKLVADGHIYVAQPPLFRVDVNAQGKSKPARKFYALDQNELDSILERLQKEGVKETAYSISRFKGLGEMNPDQLKDTTMHPDTRRLLQVQIPEGADDETRDIFVKLMGKGEAAARRAWMEREGDTAELDI

SEQ ID NO: 4191 - protein, 331 aa, Neisseria meningitidis; identical to SEQ ID NO: 1014

SEQ ID NO: 4192 - protein, 329 aa, Neisseria meningitidis; identical to SEQ ID NO: 247

SEQ ID NO: 4193 - protein, 451 aa, Neisseria meningitidis
MSEYTPQTAKQGLPALAKSTIWMLSFGFLGVQTAFTLQSSQMSRIFQTLGADPHSLGWFFILPPLAGMLVQPIVGHYSDRTWKPRLGGRRLPYLLYGTLIAVIVMILMPNSGSFGFGYASLAALSFGALMIALLDVSSNMAMQPFKMMVGDMVNEEQKGYAYGIQSFLANTGAVVAAILPFVFAYIGLANTAEKGVVPQTVVVAFYVGAALLVITSAFTIFKVKEYDPETYARYHGIDVAANQEKANWIELLKTAPKAFWTVTLVQFFCWFAFQYMWTYSAGAIAENVWHTTDASSVGYQEAGNWYGVLAAVQSVAAVICSFVLAKVPNKYHKAGYFGCLALGALGFFSVFFIGNQYALVLSYTLIGIAWAGIITYPLTIVTNALSGKHMGTYLGLFNGSICMPQIVASLLSFVLFPMLGGLQATMFLVGGVVLLLGAFSVFLIKETHGGV

SEQ ID NO: 4194 - protein, 89 aa, Neisseria meningitidis; identical to SEQ ID NO: 494

SEQ ID NO: 4195 - protein, 344 aa, Neisseria meningitidis
MQTLTIIRPDDMHLHLRDGDALKAVAPYTARQMGRAVIMPNLKPPVVSVADALAYKARIMAALPEGSAFEPLMTLYLTDNATPELVREAKAAGIVAFKLYPAGATTNSDSGVTDLFKLIPVLEEMAKQGILFLVHGEVTDPEIDIFDREAAFIGRVMKPVLAQVPNLKVVFEHITTAEAARLVLEAGDNVAATVTPQHLLLNRNDLLVGGVRPHHFCLPVLKRETHRQALVAAVTGEKAHKFFLGTDSAPHAKSAKENACGCAGMFSAMTAVELYAEVFEKAGALDKLEAFASKNGARFYGIPENTDTITLVKQSQTVPASVPYGDGELVPMRAGGEIGWTVQY

SEQ ID NO: 4196 - protein, 472 aa, Neisseria meningitidis
MENILSVLVGTVNRFLWDYLLIYALLGIGLFFTLYLGAPQITKLGAGFKSVFGGLFAKGDKDDKSLSQFQALAVAISAQIGTGNVAGVATAITAGGPGAIFWMWVSAVLGMSTIFAEALLAQKYRVVSHGKYIGGPAFYITHGLTPKIGRGAARFLSGFFSIALIIALGFIGNATQANSIASAVTIAFDVPSLAVGIVLAVLAGMVVIGGVNRIANIAQFVVPFMAVVYILCAVVILFEFSDYIVPMFNHIFTAAFNPEAVLGGAAGIGMREAIRFGVARGLFSNEAGMGSTPHAHATADVKHPVQQGMAAFVGVFIDTILVCTATALIILLTDANLSGEQGAAVTQFAFNKAFPGFGSQLLAVCLTFFALTTIIGWYYFGESNIRFLFRGRHLGIYRALVLLAIVLGTLGKVDLVWSLSDMFNGFMVIPNLIALFLLRKEIRAIYDDYLAQKKAGRDLSYQYEFHEFHDKG

SEQ ID NO: 4197 - protein, 90 aa, Neisseria meningitidis
MRCQDGRNYTGSFKNGKFDGQGVYTVAANREIFIEPFNSDSTKFRNMVLSGTFKKGLAHGRFTVSQNGETLFIMKCENGMIKEVKLPKNK

SEQ ID NO: 4198 - protein, 128 aa, Neisseria meningitidis; identical to SEQ ID NO: 605

SEQ ID NO: 4199 - protein, 182 aa, Neisseria meningitidis
VSQNTPIKPWYKHVWPWILMAGPIFVVIASVAMFFVAQQHATDLVTDDYYKDGKHIDIQLHRDEEAVRRHIGVQVLISPDMNAAKVFVGGEFDGKQPLNLLLMHPTRKADDQTVALKPVGSAQNGRAEYEAVFKTLSPTNHWYVRVEDAAGVWRVENKWITSQGNAVDLTPMDKLFNNAGSK

SEQ ID NO: 4200 - protein, 352 aa, Neisseria meningitidis
MITPQQAIERLISNNELFYDEMTDLMRQIMRGQVLPEQIAAILTGLRIKVETVSEITAAAAVMREFATKVPLENAEGLVDIVGTGGDGAKTFNISTTSMFVAAAAGAKVAKHGGRSVSSSSGAADVVEQMGANLNLTPEQVAQSIRQTGIGFMFAPNHHSAMRHVAPVRRSLGFRSIFNILGPLTNPAGAPNQLLGVFHTDLCGILSRVLQQLGSKHVLVVCGEGGLDEITLTGKTRVAELKDGKISEYDIRPEDFGIETRRNLDEIKVANTQESLLKMNEVLEGREGAARDIVLLNTAAALYAGNIAASLSDGISAAREAIDSGRAKSKKEEFVGFQPQQRCHFLGKMELG

SEQ ID NO: 4201 - protein, 212 aa, Neisseria meningitidis
MSKLTPREILTAGAVVPVMAIDDLSTAIDLSHALVEGGIPTLEITLRTPVGLDAIRLIAKEVPNAIVGAGTVTNPEQLKAVEDAGAVFAISPGLHESLAKAGHNSGIPLIPGVATPGEVQLALEHGIDTLKLFPAEVVGGKAMLKALYGPYADVRFCPTGGISLATAPEYLALPNVLCVGGSWLTPKEAVKNKDWNTITRLAKEAAALKPKA

SEQ ID NO: 4202 - protein, 140 aa, Neisseria meningitidis
MQVTSKWIDGMCFVGTTEGGHSVVMEGSAVEGAVKRGPSPMEMLLLGVAGCSSIDVVMIAEKQRQKVTDCRATVTAKRADDAPRVFTEIHIHFKVFGHDLKESAIERAVQMSAEKYCSASIMLGKAAKITHSFEIAGADK

SEQ ID NO: 4203 - protein, 162 aa, Neisseria meningitidis
MLKITLIAACAENLCIGAGNAMPWHIPEDFAFFKAYTLGKPVIMGRKTWESLPVKPLPGRRNIVISRQADYCAAGAETAASLEAALALCASAEEAVIMGGAQIYGQAMPLATDLRITEVDLSVEGDAFFPEIDRTHWKEAERTERRVSSKGTSYAFVHYLRY

SEQ ID NO: 4204 - protein, 70 aa, Neisseria meningitidis
MELETVVPPEEGEGEGEGADGEMPEYLELHGGREDDISAPSQPEPPTRNIKPLLFGLLIAFLGYLLGKIF

SEQ ID NO: 4205 - protein, 383 aa, Neisseria meningitidis
MSNRDQLFKAPPFENHSPLTWYQAASQLPNFIRDDAQAAAIEYLDRLWTELMMFKRKRNRFLGRSLRSPQVPKGLYFYGGVGRGKSFLMDAFFGCLPYRRKRRVHFHAFMAEIHQRLKTLKSESNPLKSVAAEIAKETRVLCFDEFHVSDIADAMILGRLLENLLNEGVVLVATSNYAPSELYPQGQNRSSFLPTIALIESSLTILNVDGGEDYRLRTLRPAEIFFTPANEENEAKLAKLFKEMTGITDLNPGISTIHGREIPHKAESGCAIWFDFRALCFGPRSQSDYLYLAEHYEMVFISGLEQLSPQEKAEARRLTWLIDILYDFRVKLCATGAVDVNHIYTEGDFAEEFTRTASRMVEMQSEVYLEQPHLTLSPKASGG

SEQ ID NO: 4206 - protein, 151 aa, Neisseria meningitidis
MHKIPKGTALAFDFGEARIGVAQGDAELGLSHPLSTVTGGSNDEKFAAIAKLVQEWQPRYFVVGLPVHTDGTKHEMTHLSRKFGRRLNGRFNLPVYWVDERLSSVYAESLLSEAQVFGKKRKSVLDQVAAQAILHGFFEGGPAECFNGREG

SEQ ID NO: 4207 - protein, 350 aa, Neisseria meningitidis
MKPTYQDIKAAARYRWQEIHAAIGIAPKFLRNKHQPCPACGGEDRFRYDDKDGKGTFICTHWENGAGDGFGLVMHFLGCDFQTALKQVSGIFGMDETNPLPIPPTRPQLQPRPEKDHIGKLAALWDEAEPLTPDCPVVRYWAGRGLTVARLPENIRHHAGMEYWTQGEDGKPLFIGRFHAAIAASTRGSTVCGLHITYLEAQRGGGFAKARIKHPQTGEALPAKKMRSRKQGAMTGGAVYLFPVPENGRLMVSEGIETALAARELFNAHDWGLCAALSANGMKRLELSDGIKELAVIADHDAPRPVGETAALSLAKRAQSGGIAVRYWISGTAGYDALDELNDRKRSGKA

SEQ ID NO: 4208 - protein, 186 aa, Neisseria meningitidis
MPTAFAYNARIPNSDTDAVQTYRKPSYGKRDIMQGNQAVVDYMNELLSGELAARDQYFIHSRLYSEWGYTKLFERLNHEMEEETTHAEDFIRRILMLGGTPKMARAELNIGTDVVSCLKADLQTEYEVRDALKKGIKLCEEAQDYVTRDLMVAQLKDTEEDHAHWLEQQLRLIELIGEGNYYQSQL

SEQ ID NO: 4209 - protein, 53 aa, Neisseria meningitidis
MPATAVSNHLSRLRVEGLVDFTRYHRIIEYRLISEDAATILRTIRDLENKRAV

SEQ ID NO: 4210 - protein, 586 aa, Neisseria meningitidis
MILRKFQIKNFRSLINVNVKFIDNLPIVISGENNIGKTNFLRALNVYFNHIHDKNLYHAETDIPHHIYYGSRGGRTKTELIGEFENHGKIIKLLVRFDAKGNSSYKLDSKDINDNKAFEFLSEFKFIFIESHNIHLPSLIGAILEKDGLLALDKKRTKQSRPLEKLEEFIDLSRQAITDIENDINHCFKELTDFDGILKEAKILINFAEFDRLRDVIRTMTSITLQDGNNHEIESKGSGAQRAVFLSLMKYISKNIKNKKIIWAIDEPEAFLQPKLQRKVFETLQSMCKEDKQTIILTTHSQHFINLRNIDTVNLFIGNSEPKEYERRPGKIFYEINTQNIAFTSTSEKIKAIKEHLGINNNDGWELLPFNVLVEGEEDKKYLEKLMEAVDIEIPNIICAGGATKIAGYLQYYNDFAKDNPFPEKPKILCIFDNDKKGRESKSKINPKKLTSLEIQSILIPRHDYTILDDNPRNFSGQSQNWAIEDFLSPVLIIETANNLLRKDKYKIIGKKQINVRNQVAHRNKIILEYLSECTSQNNPDKDDYLWGSDGRKIALCKSFCDNQTPEKILEHLNQNQRDFLNKLKG

SEQ ID NO: 4211 - protein, 308 aa, Neisseria meningitidis
MKVIFAGTPDFAAAALRAVAAAGFEIPLVLTQPDRPKGRGMQLTAPPVKQAALELGLRVEQPEKLRNNAEALQMLKEVEADVMVVAAYGLILPQDVLDAPKHGCLNIHASLLPRWRGAAPIQRAIEAGDAETGVCIMQMDAGLDTGDVVSEHRYAIRPTDTANEVHDALMEIGAAAVVADLQQLQSKGRLNAVKQPEEGVTYAQKLSKEEARIDWSESAAVIERKIRAFNPVPAAWVEYQGKPMKIRRAEVVAQQGAAGEVLSCSADGLVVACGENALKITELQPAGGRRMNIAAFAAGRHIEAGTKL

SEQ ID NO: 4212 - protein, 109 aa, Neisseria meningitidis; identical to SEQ ID NO: 3636

SEQ ID NO: 4213 - protein, 461 aa, Neisseria meningitidis
MMARDNRIQMFPHEWRASTTLSGVYALRMLGMFLVLPVLAVYAASLPGAEGNKTLVGLAMGIYGLTQALLQLPLGIASDKFGRKKTIYVGLIVFAAGSFLAAAADTLPMLVAARAIQGAGAVSAAVTALLADLTRDGVRTRAMAMIGLSIGLTFSVSLVVAPVIADAVGVRGLFLLTGILTVASIGVVAWMTPDPEVSKLHEDTQAQPSRIGEVLKNRRLLTLDFGIFALHAAQMALFTALPFAMTQLGLEKIQHWKVYLPSTITGLVVMVPLIIVGETRNKLKQVFVLGIVCIAAAQLGLLSGMRSVGLITAYLVVYFIGFNVLEASLPSMVSKIAPSDLKGTAMGVYNTMQSLGLFAGGAAGGLLFQKYGFSGVFAFCSILMLLWLVIAVLSPAPKPVKNLSYPVGGVWQGNQEGLYRALSELEGVEDIGFSFDGQTVYLKVLQKGFDQAAAEKIITGV

SEQ ID NO: 4214 - protein, 248 aa, Neisseria meningitidis
MPSADPMCRTAANHPFSRKIFDFKLPMNHDITFLTLFLLGFFGGTHCIGMCGGLSSAFALQLPPHINRFWLILLLNTGRVSSYTAIGLILGLIGQVGVSLDQTRVLQNILYTAANLLLLFLGLYLSGISSLAAKIEKIGKPIWRNLNPILNRLLPIKSIPACLAVGILWGWLPCGLVYSASLYALGSGSAATGGLYMLAFALGTLPNLLAIGIFSLQLKKIMQNRYIRLCTGLSVSLWALWKLAVLWL

SEQ ID NO: 4215 - protein, 766 aa, Neisseria meningitidis
MHRPTAKQILHEVFGYPEFRGRQEAVINTLAGGGSLMVLMPTGGGKSLCYQIPALMREGVAVVVSPLIALMNDQVASLHVAGIEAAAVNSGTSADEAHEIADKLAQGRLKLLYVAPERLVTDRFLRFLDQQTVSLFAIDEAHCVSQWGHDFRPEYQQLGMLAERYPNVPRIALTATADVATRADIKHYLHLDDAPEFISSFDRPNIYYQVIEKNNGKKQLLEFIRKEMAGQSGIVYCLSRKKVEDVAQFLRENGLNAIPYHAGLSMDVREENQRRFTHEDNIIVVATVAFGMGIDKPDVRFVAHLDMPQSVEHFYQESGRAGRDGLPAASWLCYGLNDWVLLRERIAEGNSDEVQKQIEMQKLDAMLSVCETAACRRVLLLKHFGEESEPCGHCDNCLHPPVRFDGTVLVQKLLSCVYRAGQRFAAGYITNLLRGKSDDWIRGNRHEQLSTFGIGTELSDKEWRSVIRQCISLGYLTVNITRYQALQLTEAAKKVLKGETEVMLRPLKRDKPAARTLKDNWLRTEREERLWQALRVWRMKQAEAEVIPAYMIFGDKTLRDLVEKMPQDLNGLHDIYGLGEAKIDRFGHGILEVCRNTADFSHNAVIRPQTEREQQLRQKLEAWRYEQARAENCALHTVLSDESLADMLADTPETETDLEGVHGLGSVRAAKYGRDILAVCRPFSDGIDEAAKHKRRLMRALIQWCNETAKHEQSEPYRILSKAALRAIAAKQPEGLAELAAVYGVGEEKAARYGAAVLAVLERNAV

SEQ ID NO: 4216 - protein, 123 aa, Neisseria meningitidis
MRKPQRGYARQDRVKEQIMRELAELVRTGLKDPRAGFITINEVEVTRDYSHATVFYTVLNQDAREITEEVLEHARGHLRSELAKRIKLFKIPELHFKYDESLERGMNLSALIDQVAAEKPVED

SEQ ID NO: 4217 - protein, 287 aa, Neisseria meningitidis
MNKFSQSGKGLSGFFFGLILATVIIAGILFYLNQSGQNAFKIPASSKQPAETEILKPKNQPKEDIQPEPADQNALSEPDAATEAEQSDAEKAADKQPVADKADEVEEKAGEPEREEPDGQAVRKKALTEEREQTVREKAQKKDAETVKKQAVKPSKETEKKASKEEKKAEKEKVAPKPTPEQILNSGSIEKARSAAAKEVQKMKTSDKAEATHYLQMGAYADRRSAEGQRAKLAILGIYSKVVGYQAGHKTLYRVQSGNMSADAVKKMQDELKKHEVASLIRSIESK

SEQ ID NO: 4218 - protein, 556 aa, Neisseria meningitidis
MEKIWLDSYEKGVSAEIDITQYNSVSDVFRQSVEKFADQPAFQNMGKTLTYAETGKLATDFASYLQNVLKLPRGERVAIMLPNVLQYPVALFGILQAGLVAVNTNPLYTPRELEHQLKDSGATAIIVLENFANTLELVLPRTQIKHVIVASVGEMFGLLKGSLINFIIRKIKKMVPEYRIRETVSFQTALKEGAKHVFQPVALNREDTALLQYTGGTTGVAKGAVLSHGNICANMLQAKEWIKNQLREGKETVIAALPLYHIFALTVNLMIFANAGSKIILITNPRDMKGFIGQLKKQRVNVCIGVNTLFNAMVNRPDFAEVDFSGLRLTLGGGMATQKAVAEKWKKITGTPIVEAYGLTEASPGVCCNPLNIESYSGSIGLPVSSTEVELRDANGKEVPVGQPGELWVKGPQVMQGYWNRPEETAKAIDARGFLETGDIAVMDEKGWLKLVDRKKDLVVVSGFNVYPNEIEEVIAHHGKVMEVACIGVPDEKTGEALKVFVVKKDPSLTKEELIAFCRTELTAYKVPKNIEFRDELPKSNVGKILRRELRQSTGK

SEQ ID NO: 4219 - protein, 201 aa, Neisseria meningitidis
MTRQSLQQAAESRRSIYSLNKNLPVGKDEVVQIVEHAVLHTPSSFNSQSARVVVLFGEEHDKVWQFVEDALRAVVPADSFEPTAQKLNLFKAGAATILFYEDQNVVKGLQEQFPAYAANFPVWADQANAMVQYAVWTTLAAVGVGANLQHYNPLPDAAIAKAWNIPENWLLRAQMVIGGIEGEAGEKTFEPVAERLKVFGA

SEQ ID NO: 4220 - protein, 218 aa, Neisseria meningitidis
MDFEKARFNMVEQQIRPWDVLDFDVLDALAEIPRELFVDEDLQGLAYADMELPLANGHKMLEPKVVARLAQGLKLTKNDTVLEIGTGSGYATALLAKLAGRVVSDDIDAEQQNRAKAVLDGLGLDNIDYVQNNGLTELSAGAPFDAVYVGGAVNIVPDVLKQQLKDGGRMVVIVGRKPVQRALLITRKGDVFEEKVLFDTLVAHLDDKDTDPFGGFDF

SEQ ID NO: 4221 - protein, 916 aa, Neisseria meningitidis
MLTNIAKKIFGSRNDRLLKQYRKSVARINALEEQMQALSDADLQAKTAEFKQRLADGQTLDGILPEAFAVCREASRRTLGMRHFDVQLIGGMVLHDGKIAEMRTGEGKTLVATLAVYLNALAGKGVHVVTVNDYLASRDAGIMEPLYNFLGLTVGVIISDMQPFDRQNAYAADITYGTNNEFGFDYLRDNMVTDQYDKVQRELNFAVVDEVDSILIDEARTPLIISGQADDNIQLYQIMNTVPPHLVRQETEEGEGDYWVDEKAHQVILSEAGHEHAEQILTKMGLLAENDSLYSAANIALMHHLMAALRAHTLFHKDQHYVIQDGEIVIVDEFTGRLMSGRRWSEGLHQAVEAKEGVEIKRENQTLASITFQNYFRLYTKLSGMTGTADTEAFEFQSIYNLETVIIPTNRPVQRKDFNDQIFRSAEEKFEAVVKDIEECHKRGQPVLVGTTSIENSELVSHLLQKAGLPHNVLNAKEHEREALIVAQAGKVGAITVATNMAGRGTDIVLGGNLKHQTDAIRADEALSDEEKQAQIAALENGWQAEHDKVMEAGGLHIIGTERHESRRIDNQLRGRSGRQGDPGSSRFYLSFEDPLLRLFALDRAAAILNRLAPERGVAIEHNLLTRQIEGAQRKVEGRNFDMRKQVLEYDDVANEQRKVIYSQRNEILTSKDISDLMQEIRSDVVSDLVDTYMPPDSMEEQWDIPTLENRLAAEFRLHEDIQSWLKADNAIDGQDIKERLIERIENEYAAKTELVGKQAMADFERNVMLQVIDNQWREHLAAMDYLRQGIHLRSYAQKNPKQEYKREAFTMFQDLWNGIKFHIASLLTSVQIEQNPVAAVEEQPVGNIQSIHSESPDMEELLGQSQTDLVTEAFNPDGTDFSPEALEARGQIVHRNDLCPCGSGLKYKQCHGKLA

SEQ ID NO: 4222 - protein, 92 aa, Neisseria meningitidis; identical to SEQ ID NO: 32

SEQ ID NO: 4223 - protein, 126 aa, Neisseria meningitidis
MSKSTIGYKMVQLLATEADRLIGEKIRQRRKELGYSAEKLAEHINLSQQQISRYERGVGKINISHLVDIAVFLETPIAWFFQDCLPKPLTVACTPENTPEQQWHSLNPNQKAAFAAFLDTLRNKET

SEQ ID NO: 4224 - protein, 324 aa, Neisseria meningitidis
MPSENKIAFMQGSPRPLWAAFALLLICCGLFLTLNVKGDWDFVLQLRLTKLAALLMVAYAVGVSTQLFQTLTNNPILTPSILGFDSLYVFLQTLLVFTFGGVGYASLPLTGKFGFELAVMMGGSLLLFYTLIRQGGRDLPRMILIGVIFGILFRSLSSLLSRMIDPEEFTAAQANMFAGFNTVHSELLGIGALILLVSAAVVWRERYRLDVHLLGRDQAVNLGISYTRNTLWILLWIAALVATATAVVGPVSFFGLLAASLANHFSPSVRHSVRLPMTVCVGGILLVGGQTVFEHFLGMKAVLSVVVEFAGGLVFLYLVLKHKK

SEQ ID NO: 4225 - protein, 273 aa, Neisseria meningitidis
MMKGMDKLRYQQDFLNIRPIFTAGEQEYLTELSDRLPLSVLTDSVRNIEEIGIDFVYSSAKLEGNTYNQYDTQALLKLGQTAGGKLYSDAVMLINLRESYRHLLSGLDSPDPFDWLDFLKTTHSLISENLLEKGSGGVVRRDSVTISGTDYTPLSNPQSLDTELKWLLQEAPKIENPFDRAIYLHNNLAYLQYFKDCNKRTARNCMTLSLMRSGFFPCVFAPDSYPAYAEAVVAYYETGDYGLFKKYFISAYENTVNKYGPQPDMDIFRNFSL

SEQ ID NO: 4226 - protein, 69 aa, Neisseria meningitidis
MTESRQTRLQVKCPTCQTAVVWKPENAFRPFCSQRCKLIDLGGWADGKYTVSSQTESLPEISEPDMAYR

SEQ ID NO: 4227 - protein, 180 aa, Neisseria meningitidis; identical to SEQ ID NO: 3825

SEQ ID NO: 4228 - protein, 531 aa, Neisseria meningitidis
MSQEILDQVRRRRTFAIISHPDAGKTTLTEKLLLFSGAIQSAGTVKGKKTGKFATSDWMDIEKQRGISVASSVMQFDYKDHTVNLLDTPGHQDFSEDTYRVLTAVDSALMVIDAAKGVEAQTIKLLNVCRLRNTPIVTFMNKYDREVRDSLELLDEVENILQIRCAPVTWPIGMGKNFKGVYHILNDEIYLFEAGGERLPHEFDIIKGIDNPELEQRFPLEIQQLRDEIELVQAASNEFNLDEFLAGELTPVFFGSAINNFGIQEILNSLIDWAPAPKPRDATVRMVKPDEPKFSGFIFKIQANMDPKHRDRIAFLRVCSGKFERGMKMKHLRINREIAASSVVTFMSHDRELVEEAYAGDIIGIPNHGNIQIGDSFSEGEQLAFTGIPFFAPELFRSVRIKNPLKIKQLQKGLQQLGEEGAVQVFKPMSGADLILGAVGVLQFEVVTSRLANEYGVEAVFDSASIWSARWVSCDDKKKLAEFEKANAGNLAIDAGGNLAYLAPNRVNLGLTQERWPDIVFHETREHSVKL

SEQ ID NO: 4229 - protein, 71 aa, Neisseria meningitidis; identical to SEQ ID NO: 1238

SEQ ID NO: 4230 - protein, 221 aa, Neisseria meningitidis
MAVLSKEQVLSAFKNRKSCRHYDAARKISAEDFQFILELGRLSPSSVGSEPWQFVVVQNPEIRQAIKPFSWGMADALDTASHLVVFLAKKNARFDSPFMLESLKRRGVTEPDAMAKSLARYQAFQADDIKILDDSRALFDWCCRQTYIALGNMMTGAAMAGIDSCPVEGFNYAEMERVLSGQFGLFDAAEWGVSVAATFGYRVQEIATKARRPLEETVIWA

SEQ ID NO: 4231 - protein, 171 aa, Neisseria meningitidis
VVVVTPKTQHLQYTESNGIAIKTVHRRTSFDSCRATAGKKSRFDVESGANFDKTVELPIEDGDGKIGVVAEPSGSGKTGIGKARELYAPTCAGGKPIADEIAPDKAFHEVTAALSAAGLGSVPVRLRPYTPRHERSACRRDGRIARMAGYRHRHTVFKHPQRNAVPRRKPL

SEQ ID NO: 4232 - protein, 213 aa, Neisseria meningitidis
MAVKLPNGATVHIATALAAEKKATVATNAAECVLTVAGHGFANGDLVLFKSGWGKLNERVFQIGDVKADTFKLTGIDTSNADEFPAGSGIGAVQKITDWVQVSQIVEFSTSGGEQQYVDFGFLEDGFDQQIPSTKSAMSMSIKIADDTSLSGYKAAAKCSDKGGKWPLKVVLKGGGLICYNGYPSMNKTPELVRNQVMAVTLSYAISGEVNRY

SEQ ID NO: 4233 - protein, 765 aa, Neisseria meningitidis
MQPHAPHTDSNTLMLGRYAERAYLEYAMSVVKGRALPEVSDGQKPVQRRILFAMRDMGLTAGAKPVKSARVVGEILGKYHPHGDSSAYEAMVRMAQDFTLRYPLIDGIGNFGSRDGDGAAAMRYTEARLTPIAELLLSEIHQGTVDFVPNYDGAFDEPLHLPARLPMVLLNGASGIAVGMATEIPPHNLNEVTQAAIALLKKPTLETADLMQYIPAPDFAGGGQIITSADELRRIYETGKGSVRVRARYEIEKLARGQWRVIVTELPPNANSAKILAEIEEQTNPKPKAGKKQLNQDQLNTKKLMLDLIDRVRDESDGEHPVRLVFEPKSSRIDTDTFINTLMAQTSLEGNVSMNLVMMGLDNRPAQKNLKTILQEWLDFRVVTVTRRLKFRLNQVEKRLHILEGRLKVFLHIDEVIKVIRESDDPKADLMAAFGLTEIQAEDILEIRLRQLARLEGFKLEKELNELREEQGRLNILLGDENEKRKLIIKEMQADMKQFGDARRTLVEEAGRAVLTQTTADEPITLILSEKGWIRSRAGHNLDLSQTAFKEGDRLKQTLEGRTVLPVVILDSLGRTYTLDAAEIPGGRGDGVPISSLIELQNGAKPVAMLTGLPEQHYLLSGSGGYGFIAKLGDMVGRVKAGKVVMTADSGETVLPPVAVYASSFINPDCKIIAATSQNRAIAFPIGELKIMAKGKGLQIIGLNAGESMTHTAVSSEPEILIESEGRRGAAHKDRIPISLLEAKRGKKGRLLPISGSLKQLSSPK

SEQ ID NO: 4234 - protein, 160 aa, Neisseria meningitidis
MMKKILAVSALCLMTAAARAADTYGYLAVWQNPQNADDVLQVKTTKEDSTKSEAFAELEAFCKGQDTLAGIAEDEPTGCRSVVSLNNTCVALAYPKALGAMRVENAVVITSPRFTSVHQVALNQCIKKYGAQGQCGLETVYCTSSSYYGGTVRSLIQNLK

SEQ ID NO: 4235 - protein, 109 aa, Neisseria meningitidis
MGSLIIEDLQEGFGKEAVKGKEITVHYTGWLEDGTKFDSSLDRRQPLTITLGVGQVIKGWDEGFGGMKEGGKRKLTIPSEMGYGARGAGGVIPPHATLIFEVELLKVYE

SEQ ID NO: 4236 - protein, 452 aa, Neisseria meningitidis
MKPLDLNFICQALKLPMPSESKPVSRIVTDSRDIRVGDVFFALAGGRFDAHDFVEDVLAAGAAAVVVSREDCVAMDGALKVDDTLAALQTLAKAWRENVNPFVFGITGSGGKTTVKEMLAAVLRRRFGDNAVLATAGNFNNHIGLPLTLLKLNEKHRYAVIEMGMNHFGELAVLTQIAKPDAALVNNAMRAHVGCGFDGVGDIAKAKSEIYQGLCSDGMALIPQEDANMAVFKTATLNLNTRTFGIDSGDVHAENIVLKPLSCEFDLVCGDERAAVVLPVPGRHNVHNAAAAAALSLAAGLSLNDVAEGLQGFSNIKGRLNVKAGIKGATLIDDTYNANPDSMRAAIDVLARMPAPRIFVMGDMGELGEDEAAAMHAEVGAYARDQGIEAAYFVGDNSVEAAEKFGADGLWFAAKDPLIQVLRHDLPERATVLVKGSRFMQMEEVVEALEDK

SEQ ID NO: 4237 - protein, 155 aa, Neisseria meningitidis
MQVFLTIPGYDVEAEIEKFVWMDAVIWQMPGWWMHEPWTVKKYIDEVLTAGHGKLYQSDGRHRVNPTEGYGTGGLLQGKKHMLSLTWNAPIEAFTREGDFFEGKGVDVLYMHFHKANEFLGMTRLSTFLCNDVVKNPQVEKYLADYQAHLEKVLG

SEQ ID NO: 4238 - protein, 106 aa, Neisseria meningitidis; identical to SEQ ID NO: 3331

SEQ ID NO: 4239 - protein, 196 aa, Neisseria meningitidis
MKKSSFISALGIGILSIGMAFAAPADAVNQIRQNATQVLSILKSGDANTARQKAEAYAIPYFDFQRMTALAVGNPWRTASDAQKQALAKEFQTLLIRTYSGTMLKLKNANVNVKDNPIVNKGGKEIIVRAEVGVPGQKPVNMDFTTYQSGNKYRAYNVAIEGASLVTVYRNQFGEIIKAKGIDGLIAELKAKNGSK

SEQ ID NO: 4240 - protein, 142 aa, Neisseria meningitidis
MMFSWFKLFHLFFVISWFAGLFYLPRIFVNMAMIDTPRGNPEYVRLSGMAVRLYRFMSPLGFGAVVFGAAIPFAAGWWGSGWVHVKLCLGLMLLAYQLYCGVLLRRFQDYSNAFSHRWYRVFNEIPVLLMVAALYLVVFKPF

SEQ ID NO: 4241 - protein, 65 aa, Neisseria meningitidis
MNTVPKSRIPVKPLPEKTTDEAKVEKWRQLGAEHGLSGEWVVAARLGENGFTEEQMENIANLFGR

SEQ ID NO: 4242 - protein, 540 aa, Neisseria meningitidis
METIPAAQNKAVSPSFSDGISGQTVNNSDKMLYSRPLPRRPKPPFGKAEMISKQEYQAQAAQGYNRIPLVQELLADLDTPLSLYLKLANRPYTYLLESVVGGERFGRYSFIGLPCSHYLKASGKHVDVYQNGEIVEQHDGNPLPFIEAFHNRFKTPEIPSLPRFTGGLVGYFGYETIYNFEHFAHRLKNTTKADPLGTPDILLMLSQELAVIDNLSGKIHLVVYADPSQPDGYERARERLEDIRTQLRQSCAIPLSLGSKHTEAVSEFGEEPFKACVNKIKDYIFAGDCMQVVPSQRMSMEFTDSPLALYRALRTLNPSPYLFYYDFGDFHIVGSSPEILVRRERDDVIVRPIAGTRLRGKTPAEDLANEQDLLSDAKEIAEHVMLIDLGRNDVGRISKTGEVKVTDKMVIEKYSHVMHIVSNVEGRLKEGVTNMDILAATFPAGTLSGAPKVRAMEIIEEVEQEKRGIYGGAVGVWGFNNDMDLAIAIRTAVVKNNTLYVQSGAGIVADSDPTSEWQETQNKARAVIRAAQMVQEGLDK

SEQ ID NO: 4243 - protein, 436 aa, Neisseria meningitidis
VANQQTSSGSSKFGDLKKRLLFLFGALIVFRIGAHIPVPGVDAVALAKLYESAGNGILGILNMFSGGSLERFSIFAIGIMPYISASIIVQLASEILPSLKALKKEGEAGRKVITKYTRYGTVLLAILQSLGVASFVFQQGIVVTSSFEFHVSTVVSLVTGTMFLMWLGEQITERGIGNGISLIITAGIASGIPSGIAKLVTLTNQGSMSMLTALFIVFGALLLIYLVVYFESAQRKIPIHYAKRQFNGRAGSQYTHMPFKLNMAGVIPPIFASSIILFPSTLLGWFGSADTNSVLHKIAGLLQHGQLLYMALFAATVIFFCYFYTALVFSPKEMAENLKKSGAFVPGIRPGEQTSRYLEKVVLRLTLFGALYITTICLIPEFLTTVLNVPFYLGGTSLLILVVVTMDFSTQINSYRLTQQYDKLMTRSEMKSFSRK

SEQ ID NO: 4244 - protein, 148 aa, Neisseria meningitidis
MQHEEGNRQRPQGELLLRTVAMPRDTNPNQDIFGGWIMSQMDLGGGILAAEIARGRIVTVAVQEMNFIRPVKVGNVVCCYGHCVRVGNTSLQLKVEVWVKTLMNDCVTEDRHLVTEAVFTYVAIDAEGNPRPIPKEGNPKLAGLLPTP

SEQ ID NO: 4245 - protein, 379 aa, Neisseria meningitidis
MSQNASVGIVTPQKIPFEMPLVLENGKTLPRFDLMIETYGELNAEKNNAVLICHALSGNHHVAGRHSAEDKYTGWWDNMVGPGKPIDTERFFVVGLNNLGGCDGSSGPLSINPETGREYGADFPLVTVKDWVKSQAALADYLGIGQWAAVVGGSLGGMQALQWAISYPERVRHALVIASAPKLSTQNIAFNDVARQAILTDPDFNEGHYRSRNTVPARGLRIARMMGHITYLAEDGLGKKFGRDLRSNGYQYGYGVEFEVESYLRYQGDKFVGRFDANTYLLMTKALDYFDPAADFGNSLTRAVQDVQAKFFVASFSTDWRFAPERSHELVKALIAAQKSVQYIEVKSAHGHDAFLMEDEAYMRAVAAYMDNVYKECQQ

SEQ ID NO: 4246 - protein, 637 aa, Neisseria meningitidis
MNPSPLLDLIDSPQDLRRLDKKQLPRLAGELRAFLLESVGQTGGHFASNLGAVELTVALHYVYNTPEDKLVWDVGHQSYPHKILTGRKNQMHTMRQYGGLAGFPKRCESEYDAFGVGHSSTSIGAALGMAAADKQLGSDRCSVAIIGDGAMTAGQAFEALNCAGDMDVDLLVVLNDNEMSISPNVGALPKYLASNVVRDMHGLLSTVKAQTGKVLDKIPGAMEFAQKVEHKIKTLAEEAEHAKQSLSLFENFGFRYTGPVDGHNVENLVDVLEDLRGRKGPQLLHVITKKGNGYKLAENDPVKYHAVANLPKESAAQMPSEKEPKPAAKPTYTQVFGKWLCDRAAADSRLVAITPAMREGSGLVEFEQRFPDRYFDVGIAEQHAVTFAGGLACEGMKPVVAIYSTFLQRAYDQLVHDIALQNLPVLFAVDRAGIVGADGPTHAGLYDLSFLRCIPNMIVAAPSDENECRLLLSTCYQADAPAAVRYPRGTGTGAPVSDGMETVEIGKGIIRREGGKTAFIAFGSMVAPALAVAEKLNATVADMRFVKPIDEELIVRLARSHDRIVTLEENAEQGGAGSAVLEVLAKHGICKPVLLLGVADTVTGHGDPKKLLDDLGLSAEAVERRVRAWLSDRDAAN

SEQ ID NO: 4247 - protein, 66 aa, Neisseria meningitidis; identical to SEQ ID NO: 3905

SEQ ID NO: 4248 - protein, 449 aa, Neisseria meningitidis; identical to SEQ ID NO: 481

SEQ ID NO: 4249 - protein, 237 aa, Neisseria meningitidis
LNLIHDTLPVNVLLPMCTRKQQGFTLTELLIVMAIAAIMAMIALPNMSQWIASRRIASHAERVANLLRFSRGEAVRLNLPVYICPVQVKKDGAPNNKCDFGKKGQGMLAFGDKNGNKIYDNDTADVLLRSVVLNDDINNKRINYAFNHIAFGQTQPTADRVVWTFNQNGTFGYTKDQHLTSKSSFFYSDGYIQIVLTDARAVSDADKKFRSAVVLINSSGRVEVCPRNDRRTVCQYK

SEQ ID NO: 4250 - protein, 107 aa, Neisseria meningitidis
LLENCNGLHNRFPYLIFVFLLPCRIKQVCLRTVYPHIYFPAIGFYLPGFTVFANFAALAAAMLKAASTVSAALGLTRTHPQTATRRTVFAFQPSAVLTKVLPWKEQV

SEQ ID NO: 4251 - protein, 706 aa, Neisseria meningitidis
MTLKASKQASKQASKQASKQASKQASGRVNLLTLSVLSLFCTPYAWGSDAYDPVKEAEIKNKFILEAAENRDSHVWRGPCSISFDCFGMFSAQLGSNTRSTEIGGDADFSFSDKPANGVSHYFSSGKTDPNSSEALYDEINITGKNYNSGILAVDNMPVVKKYVTENYGADLKQAVKDQLKDLYKTRPEDWEKNKKIVEEAIIKQYGIPRNKINKFRKVIDPIIEEAVLTPHSNTSQTSLNNIFNKKLHVKIENKSHVAGQVLELTKMTLKDSLWEPRRHSDIHMLETSDNARIRLNTKDEKLTVHKAYQGGADFLFGYDVRESDEPALTFEDKVSGQSGVVLERRPENLKTLDGRKLIAAKTADSGSFAFKQNYRQGLYELLLKQCEGGFCLGVQRLAIPEAEAVLYAQQAYAANTLFGLRAADRGDDVYAADPSRQKLWLHFIGGRSHQNIRGGAAADGRRKGVQIGGEVFVRQNEGSRLAIGVMGGRVGQHASVNSKGGAAGSDLHGYGGGVYAAWHQLRDKQTGAYLDGWLQYQRFKHRINDENRAERYKTKGWTASVEGGYNALVAEGVVGKGNNVRFYLQPQAQFTYLGVNGGFTDSEGTAVGLLGSGQWQSRAGIRAKTRFALRNGVNLQPFAAFNVLHRSKSFGVEMDGEKQTLAGRTALEGRFGIEAGWKGHMSARIGYGKRTDGDKEAALSLKWLF

SEQ ID NO: 4252 - protein, 179 aa, Neisseria meningitidis
MKITHCKLKKKVQKELLRFFVLEVTARSAADILGIHPNSAVLFYRKIRMVISHYLALAANEVFEGSVELDESYFGGRRKGKRGRGAAGKVVVFGILKRNGRVYTVVVDNAKSDTLMPVIKQKIMPDSIVYTDSLSSYDKLDVSGFIHYRINHSKEFADRQNHINGIENFWNQAKRVLRK

SEQ ID NO: 4253 - protein, 481 aa, Neisseria meningitidis
MNWSDLNLMPALPEVALLSLLVLLLLADLWVSDDKRRWTHYGALATVAVTAAVQLAVWEQGSTSSFNGMYIADGMSRLAKMVLYALMFTLFVYAKPYNQVRGIFKGEFYTLSLFALLGMSVMVSAGHFLTAYIGLELLSLALYALIALRRDSGFAAEAALKYFVLGALASGLLLYGISMVYGATGSLEFAGVLASSFNEEANEWLLKLGLVFIVVAVAFKLGAVPFHMWVPDVYHGAPTSVTALVGTAPKIAAVVFAFRILVTGLGTVHHDWSLMFALLAAASLLVGNLAAIMQTNIKRMLAYSTVSHMGFILLAFMAGAVGFAAGLYYAITYALMAAAGFGVLMVLSDGDNECENISDLAGLNQHRVWLAFLMLLVMFSMAGIPPLMGFYAKFGVIMALLKQGYVWLSVFAVVMSLIGAFYYLRVVKVMYFDESGRAHPTVGGNNAAKFLLSVNALLLVLWGIMPQTVIDWCAKALENTL

SEQ ID NO: 4254 - protein, 294 aa, Neisseria meningitidis
MSSGNIHIHSMTGFANAAAECGSKRINLDIRAVNHRFLDIQIRMPDDLRYLESGIREKISSHIARGKVECKIQIQDTENSRQSLELNSDLVNQLAEINKNLRKHHDLAKLGVADILRFPGVLASQRENTEELAKSITELTEKALKDFTAARRREGKKLGEHLLQRLESMEEIIDALSELFPTLLETHKEKIRARLVEAVGDINNDRLQQEFALFIQKSDIDEEFSRLRTHIDEVRRIVTEHKGSSGKRLDFLMQELNREANTLGSKSIAAECTQASVELKVLIEQMREQVQNIE

SEQ ID NO: 4255 - protein, 200 aa, Neisseria meningitidis
MFNIPAVAVSYLIGSLSFAVIVSKYYGMDDPRTYGSGNPGATNVLRSGKKKAAALTLLGDAAKGLVAVLLARVLQEPLGLSDSAIAAVALAALVGHMWPVFFGFKGGKGVATALGVLLALSPATALVCALIWLVMAFGFKVSSLAALTATIAAPLAALFFMPHPSWIWATLLIAMLVLFRHKSNIVKLLEGRESKIGGSR

SEQ ID NO: 4256 - protein, 381 aa, Neisseria meningitidis
MTETQSLELAKELISRPSVTPDDRDCQKLLAERLHKIGFAAEELHFGDTKNIWLRRGTKAPVVCFAGHTDVVPTGPVEKWDSPPFEPAERDGRLYGRGAADMKTSIACFVTACERFVAEHPDHQGSIALLITSDEEGDALDGTTKVVDVLKARGELIDYCIVGEPTAVDKLGDMIKNGRRGSLSGNLTVKGKQGHIAYPHLAINPVHTFAPALLELTQEVWDEGNEYFPPTSFQISNINGGTGATNVIPGELSVKFNFRFSTESTEAGLKQRVHAILDKHGVQYDLQWSCSGQPFLTHAGKLTDVARAAIAEICGVETELSTTGGTSDGRFIKAIAKELIELGPSNATIHQINENVRLDDIPKLSAVYEGILARLLAGNAV

SEQ ID NO: 4257 - protein, 238 aa, Neisseria meningitidis
MTDTAENQTPNDRQAGHPRSIRSFVLRQSHMTAAQQRAIDTLWDSFGIDYQATPADLDARFGSSRPKILEIGFGMGTATAEIARRLPETDFLAIDVHGPGVGNLLKLINENHLENIRVMRHDAVEVVENMLQDGSLDGIHIFFPDPWHKKRHHKRRLIQAPFIAKLLPKLKTGGYIHLATDWEEYAQQMLEVLSSFDSLQNTAADYAPTPDYRPETKFEARGKRLGHGVWDLVFKRIG

SEQ ID NO: 4258 - protein, 62 aa, Neisseria meningitidis; identical to SEQ ID NO: 3927

SEQ ID NO: 4259 - protein, 394 aa, Neisseria meningitidis
MTEPTSRRRFLKTCTAAAGAGLLQACGTSATSVPPLPSSHSVVKARTVPLQTPRRQSSDGNLLRVVASSGFAEDTNRVNTALTRLYNVGFTVTNQQAGSRRFQRFAGTDTQRAADFQEVASGRVATPKVLMGLRGGYGAARILPHIDFASLGARMREHGTLFFGFSDVCAVQLALLAKGNMMSFAGPMAYSDFGKPAPGAFTMDAFIKGATQNRLTVDVPYIQRADVETEGILWGGNLSVLASLAGTPYMPDIDGGILFLEDVGEQPYRIERMLNTLYLSGILKKQRAIVFGNFRMEKIRDVYDPSYDFSAVANHVSRTAKIPVLTGFPFGHIADKITFPLGAHARIRMNGNSGYSVAFGGYPTLDASALTLDTLLPPPDLPIFPESGVADISE

SEQ ID NO: 4260 - protein, 144 aa, Neisseria meningitidis
MDNKKEFINNLTNRYMWIYPLVLNILFLPFYQSYQSFFIALGCLFALVRKMQSLDFKLQNHIVLLNIKSAWADKKVFLIRIVVSWLAVMEIWMCFISESSTWVCGAFCLNSEILEKIFRGFGYSGSLYFLFILMIDLNKLRESI

SEQ ID NO: 4261 - protein, 222 aa, Neisseria meningitidis
MKNLAIFDLDNTLINTDSDHAWPQYLIKKGLVDAAETEAQNEKFYRDYQNGCLDIDAFLKFHLAPLARYSKEELAEFHREFMAEYIIPHISPMQRMLVQSHQMAGDETLVISSTNEFIITPVCRLFGITNIIGTQLESGSDGRYTGNYIGTPSLKEGKITRLNQWLAERGETLESYGKTYFYSDSKNDLPLLRLVDEPVAVNPDAELEKEAKEKGWPVLNFK

SEQ ID NO: 4262 - protein, 259 aa, Neisseria meningitidis
MSATIPPKIIRYDSNPTDVYFFGTCVLDLFMPEAGMDAIALIEQQGIRVHFPMAQSCCGQPAYSSGHPTEAFDVAKAQLDLFPENWPIVVPSGSCGGMMKHHWPTLFKGSEYEERAVDCAGRIIEFTHFLLAIGFKPEDKGEPLKVAVHTSCAARREMNVHLSGWQLIDGMENVERIVHDHESECCGFGGTFSVKQADISGAMVTDKVAALKETGATEIISADCGCMMNIGGKIAKDEPDMPRPKHIASFLLERTGGKA

SEQ ID NO: 4263 - protein, 154 aa, Neisseria meningitidis
MKCPFCAHPDTRVADSRLMEERNAVRRRRHCPSCGKRFGTLETAELKMPAVIGPDKKRSPFNAQRLRNDLTAAARKSALTPEQIDETVRLTEHRLYTSGQRDIPSAALADMVLKELLRQDTEAAVRFAALHKRFDNPADFASWLAQAVKTDRKA

SEQ ID NO: 4264 - protein, 197 aa, Neisseria meningitidis
LYGSHHLLCTQTDGDNAQKKTTTYKEQDPAKVTHYLTQPAEFSDYQRVYLDETGFDRYLFRPYARSLKGQIVKAQISGKRYQRLSLVSAQVGNRLIAPMVYQNTMTGVFFEAWFQQCLLPALTQKSVIILDNARFHRMGVLREMAEKLGHKVLPLAPYSPELNPIEKVWANIKRYLRTVLSDYARFDDALLSYFDFN

SEQ ID NO: 4265 - protein, 164 aa, Neisseria meningitidis
MKKTLLAIIAVFALSACRQAEEGPPPLPQQISDRSVGHYCSMNLTEHNGPKAQIFLNGKPDQPVWFSTIKQMFGYTKLPEEPKGIRVIYVTDMGNVTDWTNPNADTEWMDAKKAFYVIDSGFIGGMGAEDALPFGNKEQAEKFAKDKGGKVVGFDDMPDTYIFK

SEQ ID NO: 4266 - protein, 122 aa, Neisseria meningitidis; identical to SEQ ID NO: 3754

SEQ ID NO: 4267 - protein, 415 aa, Neisseria meningitidis
MLKQTTLLAACASFAALLGGCATQQPAPVIAGNSGMQDAPSSAVYNNPYGATPYSPAPAGDAPYVPPVQSAPVYTPPAYVPPSAPAVSGTYVPSYAPVDINAATHTIVRGDTVYNISKRYHISQDDFRAWNGMTDNTLSIGQIVKVKPAGYAAPKAAAVKSRPAVPAAAQPPVQSAPVDINAATHTIVRGDTVYNISKRYHISQDDFRAWNGMTDNTLSIGQIVKVKPAGYAAPKTSAVESRPAVPAAVQTPVKPAAQPPVQSAPQPAAPAAENKAVPAPAPQSPAASPSGTRSVGGIVWQRPTQGKVVADFGGNNKGVDIAGNAGQPVLAAADGKVVYAGSGLRGYGNLVIIQHNSSFLTAYGHNQKLLVGEGQQVKRGQQVALMGNTDASRTQLHFEVRQNGKPVNPNSYIAF

SEQ ID NO: 4268 - protein, 197 aa, Neisseria meningitidis
MADGMGNMIGWEKTGLVVGKQWITAKDDKVSDVCNANGEMGVIGLYEPFSHGALTIPGHPNCRCEVVSVSGGELGEFAEKKELRKAAMQYARDNFIGKSYVNKNSGHELKVTWQGVKHAASKANQAELSIMTKLDDLLRYAKYEGSYSDRKGHPNIIAAHKYRAVAKVGNESLNIGVIVREFPDDHKHYDHFILKDE

SEQ ID NO: 4269 - protein, 668 aa, Neisseria meningitidis
MADMKKITPQNLRPLLSESLGHTDFVNVLNALIKFLRRGGKKCAGERFDLIIDTFKQDRELLSRFSRCFYIWLAQVHIYPALIKLGIFSRHSFAREMGIRIYERFSPSYKDFANLGEVFLYLFHSENDDKWLQTLNIRQWLVLYELIRSHAEPSKLQTAGIRLADARLRAIEMLSVWTASEAIEPDLIRIAPRLLEADSSFVALQRETAKLVEHYRNGTTPYDTAHLEVMFDQCFSQIDYLRRKGTGAGSGSSVKVAHLLERLRQTVDRLKLLTDIQTGAGNSNRLTIALMNSLIYAAVEQYSTRHLRRSSIRMLARSITENKSHHGEHYITRNRKEYFKMFYSAAGGGIIIALMALLKIRIGTLGLSPFLTSLSAGFNYGIGFMIIHMLHCTVATKQPAMTAASFAEQVDLNEGGKAVDNKLAKLLIDVCRSQSVAVFGNVSIAILLACAISFGYAHLYRQPILDAHTAAYQFKSIDIIAYPTLWYAAIAGLWLFCSGIIAGFFDNRADYLNLRQRLPFNPLLRKIMRPGPRRVLAAYIHKHYGSLAGNFIFGMLLGMTGYFGHLLGLPLDIRHVAFSSANLGYAAVSGNVGLGTFVLGIFSVLAIGLVNLCVSFSLALFVALRSRGTKIGSIRNLIKSFWNQIKSNPCILFLPPAKEQGHPPSDKP

SEQ ID NO: 4270 - protein, 250 aa, Neisseria meningitidis
MANQRPIYGFHAVNARLWQNPKSIVELYVQEGKNDVRTREVLEKAANENIRVYFADADRLNAISKGARHQGVVGFIDASKNHVHLEDVLENLSEPPLLLILDGITDPHNLGACLRTADAMGVHAVIAPKDKSAGLNATVSKVACGAAETVPYITVTNLARTLRELKEYGIWIIGTDMGGDADLYHCNLPDSAAWVMGNEGDGMRRLTREHCDMLVSIPMFGTVESMNVSVSAGMVLSETRRQRVLKNEKA

SEQ ID NO: 4271 - protein, 1983 aa, Neisseria meningitidis
MNKGLHRIIFSKKHSTMVAVAETANSQGKGKQAGSSVSVSLKTSGDLCGKLKTTLKTLVCSLVSLSMVLPAHAQITTDKSAPKNQQVVILKTNTGAPLVNIQTPNGRGLSHNRYTQFDVDNKGAVLNNDRNNNPFLVKGGAQLILNEVRGTASKLNGIVTVGGQKADVIIANPNGITVNGGGFKNVGRGILTTGAPQIGKDGALTGFDVRQGTLTVGAAGWNDKGGADYTEILARAVALQGKLQGKNLAVSTGPQKVDYASGEISAGTAAGTKPTIALDTAALGGMYADSITLIANEKGVGVKNAGTLEAAKQLIVTSSGRIENSGRIATTADSTEASPTYLSIETTETGAAGAFISNGGRIESKGLLVIETGEDISLRNGAVVQNNGSRPATTVLNAGHNLVIESKTNVNNAKGPATLSAGGRTTINDATIQAGSSVYSSTKGDTELGENTRIIAENVTVLSNGSISSAAVIEAQDTAHIESGKPLSLETSTVASNIRLNNGNIKGGKQVVLMADGDIQAKASNLNASGNLYIHAGKDLDLNADKDLSTQSISLRADNTALISSNGNTLTAEKNLDIQAGSLSVRQSNLQSSGGNVQMSATKGNISLNQSWINASQNIDTAALQGNIISDGLTAVAEVGRVSLLANGNVDFNGLNTLIAEGDINAGSVGKGRLKMDNTDIYASAGDVKLVAGGQLDLGNGTVNGGHISLDSNKGSMVVQNVHLNARASLKVDADQTLTINNSKLNSGHNTQINTNHGHMTLNQLDAHSHRHMSISAQGKGKGKDSGQILQNDQQNSKSTLAADGVLSLNSSALQVLDNTTLRGGAINIKAGGGIIKRGHIDWETQDTATMRSAELKPLSGMMSIESGGNNPLTVEPGNRIVSAGDLAVKHNGTFQISARAGNNGNPSAQTASVSAKGNIGIVAGEVDIDAANIAAGKDLALVATKGNISLNSIRNTFSNYQLKTDKHNITQQLTDVEQELSKLTSDPKYRKAQDLPQMLRRKYKRRDKVFGDSEARLRGLRAEINAADEAWAELQSPVKALLERKQLLQQALLTVSQPGSGHENQGSTLSGQNIKLLAAGGIRIQGSKVAATQQANIQAAGFLPAPAAEELQEGRLQSAIDISGVFDTFEYGQQGSDKYGYAIFSRPSEISGKTGVTLSAPNANENSRISLSAANIEAENGKIKIQSYGDQYYYARQSELYTFERRSYKTGKWYNRKHITEVKEHKNAKPDAVNLSASQGIDIKSGGSIDAYATAFDAPKGSINIEAGRKLTLYAVEELNYDKLDSQKRRRFLGISYSKAHDTTTQVMKTALPSRVVAESANLQSGWDTKLQGTQFETTLGGATIRAGVGEQARADAKIILEGIKTTIHNETVSSSKSALWQKQAGRGSNIETLQLPSFTGPVAPVLSAPGGYIVDIPKGNLKTQIETLTKQPEYAYLKQLQVAKNINWNQVQLAYDKWDYKQEGLTEAGAAIIALAVTVVTSGAGTGAVLGLNGAAAAATDAAFASLASQASVSFINNKGDVGKTLKELGRSSTVKNLVVAAATAGVADKIGASALNNVSDKQWINNLTVNLANAGSAALINTAVNGGSLKDNLEANILAALVNTAHGEAASKIKQLDQHYIAHKIAHAVAGCAAAAANKGKCQDGAIGAAVGEIVGEALVKNTDFSRMSATEIEKAKAKITAYSKLAAGTATAVAGGDVNAAANAAQIAVENNTLYPKCIGAKCDEFQKEQQKWIRENPEEYREVLLLQTGFIPIIGDIQSFVQAQTAADHLFALLGVVPGIGESIQAYKVAKAAKNLQGMKKALDKAATVATAQGYVSKTKIKIGQTELRVTAATDKQLLKAIGEGRDTTGKMTEQLFDSLAKQNGFRVLSGGKYGGNNGFDHVWQAADGSVVLIVESKQIRNGTVQLNPNGAGGYTQMSEDWIKQVANSLPDGSPAKAAVFKAEREGKLKTAIAGVDRQTGKAVILSVKVPSKTNIRR

SEQ ID NO: 4272 - protein, 366 aa, Neisseria meningitidis
MITLKTTPFHQAHQDAGAKLVDFAGWELPIHYGSQIAEHEAVRTDAGMFDVSHMLVTDVAGANAKAFFRKLIANDVAKLAFVGKALYSALLNDNGGVIDDLIVYRTNEAETQYRIVSNGATREKDTAQFHKVGQEFGVSFNPRYDLGMLAVQGPKAIEKLLTVKPEWADVVHNLKPFQGADLGNDWFVARTGYTGEDGVEVILPGTEAVAFFKALQQAGVQPCGLGARDTLRMEAGMNLYGNDMDDDTSPLEAGMGWTVDLKDESRDFVGKAALLALKEKGVAVKQVGLLLDKGGILRAHMEVLTDKGKGETTSGVFSPSLKQSIAIARVPKDFDGDTAKVLIRGKEADVRVLKLPFVRNGQKQFD

SEQ ID NO: 4273 - protein, 181 aa, Neisseria meningitidis; identical to SEQ ID NO: 3765

SEQ ID NO: 4274 - protein, 291 aa, Neisseria meningitidis; identical to SEQ ID NO: 122

SEQ ID NO: 4275 - protein, 124 aa, Neisseria meningitidis
MIIQNEFNLYPSNMLPEGFCYPEKYVRISNDTSLIPYIQPHNFHWWFENYGTEGAEVAYIFRNSILPDLNLIPFASNGEWEAYFDGNDVTGNPRVIVINLDNIENHEFFNSFEEWLELAIKDTW

SEQ ID NO: 4276 - protein, 214 aa, Neisseria meningitidis; identical to SEQ ID NO: 909

SEQ ID NO: 4277 - protein, 172 aa, Neisseria meningitidis; identical to SEQ ID NO: 1639

SEQ ID NO: 4278 - protein, 229 aa, Neisseria meningitidis; identical to SEQ ID NO: 3551

SEQ ID NO: 4279 - protein, 367 aa, Neisseria meningitidis
MNTTANPSNIIVGLSGGVDSSVTAALLKQQGYQVRGVFMQNWEDDDNDEYCSIKQDSFDAIAVADIVGIDIDIVNFAAQYKDKVFAYFLQEYSAGRTPNPDVLCNAEIKFKCFLDYAVGQGADTIATGHYARKEVRNGVHYLLKGLDRNKDQSYFLYRLKPFQLERAIFPLGGLEKPEVRRLAAEFKLPTAAKKDSTGICFIGERPFREFLQKYLPTDNGKMVTPEGKTVGEHVGLMFYTLGQRKGLGIGGAGEPWFVAAKDLTKNELIVVQGHDHPLLYTRSLVMNDLSFTLPERPKAGRYTCKTRYRMADAPCELRYLDDETAELVFDEPQWAVTPGQSAVLYDGDICLGGGIIQTTDKPVIITR

SEQ ID NO: 4280 - protein, 396 aa, Neisseria meningitidis
LLIHYIQAAFKAEKNAVKYMDWHERFPELEAQLGAPIEDYAPPKHWTRKQLRSMGRVSYLCVDAAEQALTDAGLLGDESITDGRMGVACGSSSGSTKDIGDVGELLLTGMSRNFSANTYVRMMPHTAAANIGIFFGLKGRIIPTSSACSSGSQGIGYAYEAIKYGLTDMMLAGGGEEFFPSEVYVFDSLYAASRRNGEPEKTPRPYDANRDGLVIGEGAGIFVLEELEHAKRRGAKIYAELVGYGANSDAYHISTPRPDAGAILAFQTALQHAGLAPEDIGWINLHGTGTHHNDNMESRAVAAVFGNNTPCTSTKPQTGHTLGAADAIEAAFAWGIADRQSNPEGKLPPRLWDGQNDPNLPAINLTGSGSRWETEKRIAASSSFAFGGSNCVLIIG

SEQ ID NO: 4281 - protein, 539 aa, Neisseria meningitidis
MDNLVWDGVPDIRTLDQTIRKHAHPLNLIVCLPDNQIPDFQTAQDASDAECRLKHRLDQATQCLQFDSINLIEHILPDVRFWLVPPSRTRSLHEHFHHISWQTEAIPQTESKPDKPWFALPQTAERQKPEHILVIGAGISGAATAHALASHGISVTVLEARKAAQAASGNRQGLLYAKISPHDTEQTELLLAGYGYTKRLLGHILPESETWGGNGIIHLNYSRTEQQRNHELGLQKHHNHLYRSITQAEAEKIAGIPLSVPYDHPSCGLYWQHGVWLNPPAFVRTLLNHPLIGLHEDTPLTDISHDGEKWIASTPNGTFTATHIIYCTGANSPYLPETNLAALPLRQIRGQTGLTPSTPFSEQLRCAVSGESYISPSWHGLHCYGASFIPNSSHTGWNEAEEASNRQALAHLNPALSESLFAANPNPQKHQGHAAIRCDSPDHLPLVGALGDIAAMRQTYTKLALDKNYRIDTPCPYLPNAYVNTAHGTRGLATAPICAAAIAAQILGLPHPFSQRLRHALHPNRTIIRAIVRRKDLTP

SEQ ID NO: 4282 - protein, 480 aa, Neisseria meningitidis; identical to SEQ ID NO: 3699

SEQ ID NO: 4283 - protein, 186 aa, Neisseria meningitidis; identical to SEQ ID NO: 2093

SEQ ID NO: 4284 - protein, 637 aa, Neisseria meningitidis
MLNITLPDGSVRQYESPVTVAQIAASIGAGLAKAAVAGRVNGKLVDACDPITEDSSVQIITPKDQEGIEIIRHSCAHLVGHAVKQLYPNAKMVIGPVIEEGFYYDIATEKPFTPEDVAAIEARMKELIAQDYDVVKIMTPRAEAIKIFQERGEEYKLRLIDDMPKVEAMGMYHHQEYVDMCRGPHVPNTRFLKNFKLTKLAGAYWRGDSNNEMLQRIYGTAWATKDELKAYIQRIEEAEKRDHRKLGKQLDLFHLQDEAPGMVFWHPKGWALWQVIEQHMRKELNAAGYKEVKTPQIMDKTFWEKSGHWENYKDNMFVTSSEKREYAVKPMNCPGHVQIFNNGLRSYRDLPMRLAEFGSCHRNEPSGALHGLMRVRGFVQDDAHIFCTEDQIVSEARAFNELLVRIYKQFGFHDVAVKLSLRPEQRAGSDEVWDKAEQGLRDALTACGVEWEELPGEGAFYGPKIEYHVKDALGRSWQCGTLQLDFVLPERLDAEYVTENNDRARPVMLHRAILGSLERFIGILIENHAGSFPLWLAPVQLVIMNITENQADYCREVAAKLQAAGFRAELDLRNEKIGYKIRDNSQYRFPYQIVVGDKEKQENKVAVRRKAEDLGSLDLDDFIAQLQQEITDALVNH

SEQ ID NO: 4285 - protein, 757 aa, Neisseria meningitidis
MNITRILSQELSATTAQINAAIELLDDGATVPFIARYRKEATGGLDDTQLRRLAERLQYLRELEERKAVVLKSIEEQGKLSDDLRAQIEAADNKTALEDLYLPYKPKRRTKAQIAREHGLQPLADVLLAEQSQDVEAAAQGYLNENVPDAKAALDGARAILMEQFAEDAELIGTLRDKLWNEAEIHAQVVGGKETEGEKFSDYFDHREPVRTMPGHRALAVLRGRNEGVLNIALKYRPDDTPITQQSEYEQIIARRFKVSDGHKWLRDTVRLTWRAKIFLSLELEALNRLKEAADTDAITVFARNLKDLLLAAPAGRLTTLGLDPGYKNGVKCAVVDDTGKLLDTVIVYLHQENNMLATLSRLIKQHGVKLIAIGNGTASRETDKIAGELVREMSKMGLHKIVVSEAGASIYSASELAAREFPDLDVSLRGAVSIARRLQDPLAELVKIDPKSIGVGQYQHDVNQSQLAKSLDAVVEDCVNAVGVDVNTASAPLLARISGLNQTLAQNIVAYRDENGAFDSRKKLLKVPRLGEKTFEQAAGFLRINGGKEPLDASAVHPEAYPVVAKMLAQQGISAAELIGNRERVKQIKASDFTDERFGLPTILDILSELEKPGRDPRGEFQTASFAEGIHEISDLQVGMILEGVVSNVANFGAFVDIGVHQDGLVHISALSNKFVQDPREVVKAGDVVKVKVLEVDAARKRIALTMRLDDEPGGAKHKMPSENRSRERTAGRKPQRNDRAPTNSAMADALAKLKR

SEQ ID NO: 4286 - protein, 43 aa, Neisseria meningitidis
MQNQNTRPVKIELKGEAGKRVLLTAARRIAKTHQKAVKALADK

SEQ ID NO: 4287 - protein, 106 aa, Neisseria meningitidis
MGMNQQRLTQVILAPIVSEKSNVLAEKRNQMTFKVLASATKPEIKAAVELLFGVQVASVTTVTTKGKTKRFGRTLGRRSDVKKAYVSLAAGQELDLEAAAAAADKE

SEQ ID NO: 4288 - protein, 127 aa, Neisseria meningitidis
MTFAYWCILIACLLPLFCAAYAKKAGGFRFKDNHNPRDFLARTQGAAARAHAAQQNSFEAFAPFAAAVLTAHATGNAGQATVNTLAGLFILFRLAFIWCYIADKAALRSLMWAGGFACTVGLFVAAA

SEQ ID NO: 4289 - protein, 251 aa, Neisseria meningitidis
MDSFFKPAVWAVLWLMFAVRPALADELTNLLSSREQILRQFAEDEQPVLPINRAPARRAGNADELIGSAMGLNEQPVLPVNRVPARRAGNADELIGNAMGLNEQPVLPVNRAPARRAGNADELIGNAMGLLGIAYRYGGTSVSTGFDCSGFMQHIFKRAMGINLPRTSAEQARMGTPVARSELQPGDMVFFRTLGGSRISHVGLYIGNNRFIHAPRTGKNIEITSLSHKYWSGKYAFARRVKKNDPSRFLN

SEQ ID NO: 4290 - protein, 1277 aa, Neisseria meningitidis
MTTTTAPQRIREIPYNYTSYTDREIVIRLLGDEAWQILQDLRGQRKTGRSARMLFEVLGDIWVVVRNPYLVDDLLEHQKRRAALVREMRHRLNEIRKRRDDNRQVDVLVAAAEKAVGRFDSSFDETSQKRRQILERLSKITKPHNIMFDGLARVTHVTDATDWRVEYPFVVVNPDTEAEIAPLVRALIELDLVIIPRGGGTGYTGGAIPLDAMSAVINTEKLDKHRGVEFVELAGLDGKHPIIRCGAGVVTRRVEETAHQAGLVFAVDPTSADASCVGGNVAMNAGGKKAVLWGTALDNLAYWNMINPQGEWLRIERVRHNFGKIHDEETAVFDVHTLDSDGLNVVKTERLEIPGHKFRKVGLGKDVTDKFLSGLPGVQKEGTDGIITSVAFVLHKMPKYTRTVCMEFFGTVATATPSIVEIRDFLLAHDSVRLAGLEHLDWRYVRAVGYATKAAGKGRPKMVLLADVVSDDEAAVEAAAEHICELARARDGEGFIAVSPEARKTFWLDRSRTAAIAKHTNAFKINEDVVIPLERLGEYSDGIERINIELSIQNKLKLCAALEQYLSGKLPIDKMGTDLPTAELLGERGKHALSHVSAVKARWDWLLANLDTPLADYKARYGAAVHAAPEAKDDESCFIAFRDFRLRVSVKADVMKPLSEIFSGKTDTKIIQGLGKIHAKTVRSRVFVALHMHAGDGNVHTNIPVNSDDADMLQTAYRSVERIMKIARSLGGVISGEHGIGITKLEFLTDEDLQPFWDYKNQVDPKHTFNRHKLMKGSDLRNAYTPSFELLGAESLIMEKSNLGTIADSVKDCLRCGKCKPVCSTHVPRANLLYSPRNKILGVGLLTEAFLYEEQTRRGVSVKHFEELMDIGDHCTVCHRCVKPCPVNIDFGDVTVAVRNYLADSGHKRFAPAAAMGMAFLNATGPKTIKALRAAMIQTGFPAQNFAYKIGKLLPIGTKKQKAEPKATVGKAPIKEQVIHFINRPLPKSVPAKTPRSLLGIEDGKSIPIIRNPAAPEDAEAVFYFPGCGSERLFSQIGLAVQAMLWHVGVQTVLPPGYMCCGYPQDAGGNKAKAEEMSTNNRVAFHRMANTLNYLDIKTVVVSCGTCYDQLEKYRFEEIFPGCRIIDIHEYLLEKGVKLDGVKGQQYLYHDPCHTPIKTMNATQMASSLMGQKVVLSDRCCGESGMFAVKRPDIATQVKFRKQEEIEKNLKELPQGEPVKMLTSCPACLQGLSRYADDNNMPADYIVIEMAKHILGENWLDEFVKKANNGGVEKVLL

SEQ ID NO: 4291 - protein, 459 aa, Neisseria meningitidis
MAKTLKTLYQCTECGGTSPKWQGKCPHCGEWNTLQESLAAPEPKNARFQSWAADTSTVQSLSSVTATEVPRNPTGMGELDRVLGGGLVDGAVILLGGDPGIGKSTLLLQTITKMAQSRKVLYVSGEESAQQVALRAQRLELPTEGVNLLAEIRMEAIQTALKQHQPEVVVIDSIQTMYSDQITSAPGSVSQVRECAAQLTRMAKQMGIAMILVGHVTKDGAIAGPRVLEHMVDTVLYFEGDQHSNYRMIRAIKNRFGAANELGVFAMTENGLKGVSNPSAIFLASYRDDTPGSCVLVTQEGSRPLLVEIQALVDDAHGFTPKRLTVGLEQNRLAMLLAVLNRHGGIACFDQDVFLNAVGGVKIGEPAADLAVILAMLSSFRNRPMPEKTVVFGEIGLSGEVRPVARGQERLKEAEKLGFKRAIVPKANMPRNAKEFPNLKIYGVSSLQEAIDICRDSRE

SEQ ID NO: 4292 - protein, 272 aa, Neisseria meningitidis
MKKDHLNTTGFDLWHTIREETAAAAAAEPMLASFLHQTVLRHESLGSVLAYHLSSKLGSPIMDVRALFEIYQQALGSDTQIGKCVEADLKAIYERDPACDEYSLPLLYFKGFHAIQAHRINHRLYLDGRKTLAYFLQNRMSEVFGVDIHPAARFGYGLMLDHATGFVAGETAVLGNNISILHGVTLGGSGKEGGDRHPKIGDGVMIGANASILGNIRIGSNAKIGAGSVVVSDVPPSITVVGVPAKPVARSLKTPSADMDQNIQFTEIDFMI

SEQ ID NO: 4293 - protein, 144 aa, Neisseria meningitidis
MARYRRNFIAGGTFFFTVKLADPKSRLLVEHIDFAGGLYGCAKTISLNRRRMRAAKPHSRHLDAAARRCGLFPTPAADNQILRIFPLYKLIRRQTAAARTRYLATAFLRTHRARRNGFAALRGLHPFQSYQTKNVACNRILQKI

SEQ ID NO: 4294 - protein, 72 aa, Neisseria meningitidis
MVVNIQFHQNIPRQPVGTGYLNTPRRPKQVYSGLNLNQDKATKPQTVQIVRQGEATPYWFKFNPLYLPAYAP

SEQ ID NO: 4295 - protein, 257 aa, Neisseria meningitidis
MKPKIQRHGEILSLVRRHQFMSVDELAAALDVTPQTIRRDIRELEEGGSLKRHHGGASSGGNLPEGLSADRQTRCQNEKNAIARLIAEHIPDGSSLFVSIGTTMEAVASELVRRRGSLRIITNNIHVASIVSARTDYTVIITSGVVRPLDGGITGVATVDFINQFKVDYAVMSTHGVESDGSLLDDDYKEVSVMQAMIANARVRFLGVDHSKFRSNALVRLGDITAFDKVFTDRLPDTAMQKMLKEAGVECLIADAV

SEQ ID NO: 4296 - protein, 364 aa, Neisseria meningitidis; identical to SEQ ID NO: 1930

SEQ ID NO: 4297 - protein, 400 aa, Neisseria meningitidis
MKNYHAPDEKGFFGEHGGLFVSETLIPALQELADAYKAAKNDPSFWEEFHRDLKHYVGRPSPVYHAARLSEHLGGAQIWLKREDLNHTGAHKVNNTIGQALLAKRMGKKRVIAETGAGQHGVASATVAARFGMTCDVYMGADDIQRQMPNVFRMKLLGANVVGVDSGSRTLKDAMNEAMREWVARVDDTFYIIGTAAGPAPYPEMVRDFQCVIGNEAKEQMLEAIGRQPDVAVACVGGGSNAIGLFHPYIGEENVRLVGVEAGGLGVNTPDHAAPITSGAPIGVLHGFRSYLMQDENGQVLGTHSVSAGLDYPGIGPEHSHLHDIKRVEYTAAKDEEALEAFDLLCRFEGIIPALESSHAVAWAVKNAPKMGKDQVILVNLSGRGDKDINTVAKLKGIKL

SEQ ID NO: 4298 - protein, 134 aa, Neisseria meningitidis
MAEGQDVDLVEISPTAKPPVCKLMDYGKYKYQQAKKRDEAKKNQKQVQIKEIKFRPGTDEGDYQIKMRNINRFLADGDKVKVTLRFRGREMAHQQLGAQLLERVKEDLAEVAQIESFPKMEGRQMVMMIAPKKK

SEQ ID NO: 4299 - protein, 390 aa, Neisseria meningitidis
MKRQALAAMIASLFALAACGGEQAAQAPAETPAASAEAASSAAQTAAETPSGELPVIDAVTTHAPEVPPAIDRDYPAKVRVKMETVEKTMKMDDGVEYHYWTFDGDVPGRMIRVREGDTVEVEFSNNPSSTVPHNVDFHAATGQGGGAAATFTAPGRTSTFSFKALQPGLYIYHCAVAPVGMHIANGMYGLILVEPKEGLPKVDKEFYIVQGDFYTKGKKGAQGLQPFDMDKAVAEQPEYVVFNGHVGAIAGDNALKAKAGETVRMYVGNGGPNLVSSFHVIGEIFDKVYVEGGKLINENVQSTIVPAGGSAIVEFKVDIPGSYTLVDHSIFRAFNKGALGQLKVEGAENPEIMTQKLSDTAYAGNGAAPAASAPAASAPAASASEKSVY

SEQ ID NO: 4300 - protein, 291 aa, Neisseria meningitidis
MEEGLIDRLLETLWLDRRLSQNTLNGYRRDLEKIARRLSQSGRMLKDADEADLAAAVYVDGEQRSSQARALSACKRLYIWMEREGIRTDNPTRLLKPPKIDKNIPTLITEQQISRLLATPDTDTPHGLRDKALLELMYATGLRVSEAVGLNFGSVDLDRGCITALGKGDKQRMVPMGQESAYWVGRYYTEARPALLKGRSCDALFVSQKKTGISRQLAWMIVKEYAGRAGIGHISPHSLRHAFATHLVQHGLDLRVVQDMLGHADLNTTQIYTHVANVWLQGVVKEHHSRN

SEQ ID NO: 4301 - protein, 92 aa, Neisseria meningitidis; identical to SEQ ID NO: 1005

SEQ ID NO: 4302 - protein, 164 aa, Neisseria meningitidis
MNNRHFAVIALGSNLENPAQQVRAALDTLSSHPDIRLEQASSLYMTAPVGYDNQPDFVNAVCTVSTTLDGIALLAELNRIEADFGRERSFRNAPRTLDLDIIDFDGISSDDPRLTLPHPRAHERSFVIRPLAEILPDFVLGKHGKVAELSKQLGNQGIRLLPDK

SEQ ID NO: 4303 - protein, 942 aa, Neisseria meningitidis
MMDEKLNFSYLFGSNAPYIEELYEAFLENPDTVDEKWKQYFTDLSKQPGTVAVDVAHTPIRESFVTLAKKKIASAVAGGADEAMLKKQVSVLRLISAYRIQGVGAAQLDPLKRIPPRDIEALDPKFHGLSDADMALQFNMGEGDFANRGKLPLSQIISNLKQTYCGHIALEYIYIPNTEERRWVRNYFESVLSTPSYNVEQKRRILKEMTAAETLERYLHTKYVGQKRFGVEGGESAIAGLNYLIQNAGKDGVEEVIIGMAHRGRLNVLVNILGKKPGDLFAEFEGRAEIKLPSGDVKYHMGFSSDIATPHGPMHVSLAFNPSHLEIVNPVVEGSARAKQKRLGENGRDKVLPVLIHGDSAFIGLGVNQATFNLSKTRGYTTGGTVHIVINNQIGFTTSDIRDTRSTVHCTDIAKMVSAPVIHVNGDDPERVCFAIQAALDYRKKFHKDIVIDVVCYRKWGHNEGDDPTLTQPMMYKKVSQHPGARALYTEQLIAEGVVTQAEADGYIQAYRDALDKGEHVEQTTLSNFQRTQIDWSKYQGKDWREHIETGLPAADIERLTEKFTAVPEGFALHPTAKRVIEARKAMASGKQAIDWGMAETLAYASLVTKGHGVRISGEDSGRGTFSHRHAVLHDQKREKWDDGTYVPLRHMGEGMGEFLVIDSILNEEAVMAFEYGFACSAPDKLTIWEAQFGDFANGAQVTIDQFLSSGETKWGRLCGLTTILPHGYDGQGPEHSSARVERWLQLCSENNMQVIMPSEASQMFHLLQRQVLGSYRKPLVIFMSKRLLRFKGAMSPLENFTEGSTFRPVIGDTAERASNDSVKRVVLCAGQVYYDLEAGRAERKLEDDVAIVRVEQLYPFPYDEVKAELAKYPNAKSVVWAQEEPKNQGAFYQIRHRIEDVISEEQKLSYAGRPSSASPAVGYSSKHIAQLKQLVEDALAL

SEQ ID NO: 4304 - protein, 347 aa, Neisseria meningitidis
MQITDLLAFGAKNKASDLHLSSGISPMIRVHGDMRRINLPEMSAEEVGNMVTSVMNDHQRKIYQQNLEVDFSFELPNVARFRVNAFNTGRGPAAVFRTIPSTVLSLEELKAPSIFQKIAESPRGMVLVTGPTGSGKSTTLAAMINYINETQPAHILTIEDPIEFVHQSKKSLINQRELHQHTLSFANALSSALREDPDVILVGEMRDPETIGLALTAAETGHLVFGTLHTTGAAKTVDRIVDVFPAGEKEMVRSMLSESLTAVISQNLLKTHDGNGRVASHEILIANPAVRNLIRENKITQINSVLQTGQASGMQTMDQSLQSLVRQGLIAPEVARRRAQNSESMSF

SEQ ID NO: 4305 - protein, 422 aa, Neisseria meningitidis
VKPLRRLTNLLAACAVAAAALIQPALAADLAQDPFITDNAQRQHYEPGGKYHLFGDPRGSVSDRTGQINVIQDYTHRMGNLLIQQANINGTIGYHTRFSGHGHEEHAPFDNHASRSASKEQGNVDEGFTVYRLNWEGHEHHPADAYDGPKGGNYPKPTGARDEYTYHVNGTARSIKLNPTDTRSIRQRISDNYSNLGSNFSDRADEANRKMFEHNAKLDRWGNSMEFINGVAAGALNPFISAGEAVDQWMQENPNAAETVEALVNVLPFAKVKNLTKAAKPGKAAVSGDFSDSYKHNTASRLSQSVDGEMFQTRNVDFKAKSIGTKIHDGAQGKHISGHRNYIEGKSTLNQNINPQELLNGIHSGAYPVISKGARGNPVVDFGYPIGSDGKSGLSTNFGTIHSGKNGVHIVPANPKTIKKVQ

SEQ ID NO: 4306 - protein, 104 aa, Neisseria meningitidis; identical to SEQ ID NO: 1772

SEQ ID NO: 4307 - protein, 97 aa, Neisseria meningitidis
MTAKGQMLQDPFLNALRKEHVPVSIYLVNGIKLQGQVESFDQYVVLLRNTSVTQMVYKHAISTIVPARSVNLQHENRPQAAPASTLVQVETVQQPAE

SEQ ID NO: 4308 - protein, 395 aa, Neisseria meningitidis
MNTLLNQLKPYPFARLREAMQGISAPEGLEAVPLHIGEPKHPTPKVITDALTASLHELEKYPLTAGLPELRQACANWLKRRYDGLTLNSDTEILPVLGSREALFSFVQTVLNPVSDGLKPVIVSPNPFYQIYEGATLLGGGEIHFANCPAPSFNPDWRSISEEVWKRTKLVFVCSPNNPSGSVLDLDGWKEVFDLQDKYGFIIASDECYSEIYFDGNKPLGCLQAAAQLKRGREKLVMFTSLSKRSNVPGLRSGFVAGDAGLLKNFLLYRTYHGSAMSIPVQRASIAAWNDEQHVIDNRRLYQEKFEWVIPILQQVFDVKLPDASFYIWLKVPDGDDLAFARNLWQKAAIQVLPGRFLARDTEQGNTGEGYVRIALVADVATCVKAAETIVSLYR

SEQ ID NO: 4309 - protein, 242 aa, Neisseria meningitidis
MRHMKNKNYLLVFIVLHIALIVINIVFGYFVFLFDFFAFLFFANVFLAVNLLFLEKNIKNKLLFLLPISIIIWMVIHISMINIKFYKFEHQIKEQNISSITGVIKPHDSYNYVYDSNGYAKLKDNHRYGRVIRETPYIDVVASDVKNKSIRLSLVCGIHSYAPCANFIKFAKKPVKIYFYNQPQGDFIDNVIFEINDGNKSLYLLDKYKTFFLIENSVCIVLIILYLKFNLLLYRTYFNELE

SEQ ID NO: 4310 - protein, 464 aa, Neisseria meningitidis
MNKQPLSLAVVGHTNTGKTSLLRTLLRDSGFGEVRNAPSTTRHVEEAAISDGADTLVFLYDTPGLEDAGGVLEWLENHTDNRSDGIERLQQFLGSHGAHHDFNQEAKVLRQVLQSDMAMYVIDAREPVLDKYRDELIILSWCAKPVMPVFNFTGGQPPESWTTMLARRNLHVFAGFDTVAFDFEGELRLWENLATMLPERSTLDRLTAMRRREWQRLDGEARREIADFLLDAAAFRQEVDENEDTATVLQTMQAEIRQLERQMQQRLFALYRFYHSEIDGGDWMPQAFRQDPFDSELLKQYGIRTGTGAATGALIGLGLDIATLGGSLGLGTAIGGFLGGILPNTRTISDKLSGRQTLHTDPETLTLLAARALDLLHVLQTRGHAAQSDIELHSRKAPWDATRLPPELNKARSHWKWSSLNTHRPETSRAERAGYVEKLQIRLSGKYSELNLNQDKAASRRQYK

SEQ ID NO: 4311 - protein, 630 aa, Neisseria meningitidis; identical to SEQ ID NO: 2275

SEQ ID NO: 4312 - protein, 144 aa, Neisseria meningitidis
VAKKIIGYIKLQIPAGKANPSPPVGPALGQRGLNIMEFCKAFNAATQGMEPGLPIPVVITAFADKSFTFVMKTPPASILLKKAAGLQKGSSNPLTNKVGKLTRAQLEEIAKTKDPDLTAADLDAAVRTIAGSARSMGLDVEGVV

SEQ ID NO: 4313 - protein, 233 aa, Neisseria meningitidis
MSARENILAKLKKADALPMEEPAVFDYYREKGVSWDSEAERLKHWAAAMRAVKTEIYWVTKSNWMQVFREAAEGKGLKNILLPLATEHGQIARAALAGSNIEPIVFEREIDTWKTEFFTNINAGFSGAQCGIARTGTLMLFSSPEEPRTLSLVPPVHFCLFDTSKMYNEFHNAVEGEKLVENGMPTNVFLISGPSKTADIQLTLAYGAHGPRDLVILAILPDHISPADLEENA

SEQ ID NO: 4314 - protein, 119 aa, Neisseria meningitidis; identical to SEQ ID NO: 2176

SEQ ID NO: 4315 - protein, 259 aa, Neisseria meningitidis
MNQKYILSANNNSLIEEIHNTVQSIGYCIVRGLNLNHLDDSRRNKKLFDFLSQLGMLTNHKDDGFKSIFWDIKYRGDDYVINNDITFSEDVGECPLHSDSSFSENPESYLVMYVVKSANDGGNSLFLSSSDIVNQLSKTETGKKHLKTLTGNLYPFKTPTSFDKKQGVIWGNILSLNTQMIRFRSDCIYKGIEENRNKVSKEMVLALDYLVNVIKNASDIQEFSAQDDDLIIIDNVNGLHARTDYTDKNRHYIRARITV

SEQ ID NO: 4316 - protein, 88 aa, Neisseria meningitidis
MDFEFGFRTLWPIATAAFWFWVNGISGRLKEADKRIDDLKEELHAVKLSYHTKQDAKADRDNIAASLGRIENKLEKVNEKLDRKADKS

SEQ ID NO: 4317 - protein, 360 aa, Neisseria meningitidis
MPSEAASDGILPRYPTRTIFQKPIMLPFLPEPSLSYTQQNRTAVLLLNLGTPDAPTAQAVRPYLKSFLTDRRVVELPKWLWYPILHGLVLTLRPKKSAHAYEKIWFKEGSPLEVYTARQAAALAKRMPDLIVRHAMTYGNPSVADVLSELKAQGAGRLLVIPMYPQYAASSSGAAVDKVCEQLLLQRNQMSVRTVSRFYDDTGYIDAMKNHILRYWAEHGRGKKLMLSFHGVPQKHHDLGDPYPDECRHTAKLLAEALELTEDQYVVSFQSQFGRAKWVTPSTQDLFGKLPKQGVTELDVFCPGFLADCLETMEEIALMGREQFYEAGGKSYRYIPCLNDNPDWIDALVALAEENLGGWR

SEQ ID NO: 4318 - protein, 199 aa, Neisseria meningitidis
MSELDNILAHNRQFVESGEYEKYFTDKYPERGLAVLSCMDARIIGLLPDALGLKNGDAKLIKNAGALVTHPWGSVMRSLLVAVFELKVREIMVIAHHDCGMQGLNAEEFLGRVRESRIPEDRIETLRYAGVDLDGWLTGFDNVEDSVRHTVELIRRHPLMPRHIAVHGLVIHPVTGKLTLVVDGSVSDGMDLSEGMETS

SEQ ID NO: 4319 - protein, 183 aa, Neisseria meningitidis
MKAYLALISAAVIGLAACSQEPAAPAAEATPAAEAPASEAPAAEAAPADAAEAPAAGNCAATVESNDNMQFNTKDIQVSKACKEFTITLKHTGTQPKASMGHNLVIAKAEDMDGVFKDGVGAADTDYVKPDDARVVAHTKLIGGGEEASLTLDPAKLADGEYKFACTFPGHGALMNGKVTLVD

SEQ ID NO: 4320 - protein, 410 aa, Neisseria meningitidis
MQTYLVGGAVRDYLLGLPVKDRDWVVVGADAQTMLAQGFQPVGKDFPVFLHPETHEEYALARTERKTAKGYVGFSFHADKDVTLEQDLMRRDLTINAMAQDADGKIIDPFGGQRDLAAGILRHVSPAFAEDPVRILRTARFAARYGFEIAEETMKLMRQMVANGEADALVAERVWQEFAKGLMEKNPRKMIEVLRECGALKVLLPEVNALFGVPQRADYHPEIDSGIHTLMTLQRAANMGLSLPERYAALLHDLGKAKTPSDILPRHHGHDLAGVEPVREVNQRLRAPKHCAELAELVCRWHIIFHQVGQLKSQTILNVLKKTDAFRRPERFQTALNVCIADTQGRLNREHTPYPQRAHWLALLEAANQADSGKIAAECRAQGKAHLIAEQIDRARLAQIAPLQKAFRAA

SEQ ID NO: 4321 - protein, 184 aa, Neisseria meningitidis
MKPKFKTVLTALLLAVSLPSMAATHVLMETDMGNIRLVLDESKAPKTVANFVRYARKGFYDNTIFHRVIGGFVIQGGGFTEDLAQKASDKAVANESGNGLKNTVGTIAMARTADPDSATSQFFINLADNDSLNYKNGQYGYTVFGRVESGMNAVSKIARVKTATRGFYQNVPVQPVKIRRVVVE

SEQ ID NO: 4322 - protein, 215 aa, Neisseria meningitidis; identical to SEQ ID NO: 709

SEQ ID NO: 4323 - protein, 514 aa, Neisseria meningitidis
MCGVLGLVSHEPVNQLLYDGLQMLQHRGQDAAGIATAEGGTFHMHKGKGMVREVFRTRNMRDLTGNAGIAHVRYPTAGNAGSSAEAQPFYVSSPFGIVLAHNGNLTNTAELYENVCNKHLRHVNTSSDSEVLLNVFAHELRREVSKNADPHRLNADNIFNAVAQVHRLVRGAYGVIAMIAGYGMLAFRDPYGIRPLVLGSQTDSEGRKSYAVASESVAFNALTYDLERDIRPGEAVFVGFDGTMIARQCSDRAKLSPCLFEYVYFARPDSVIDGVSVYQSRLDMGVSLAEKIKRELPVDGIDVVMPIPDTSRPSAMELAVHLDKPYREGLIKNRYIGRTFIMPGQATRKKSVRQKLSPMETEFAGKSVLLVDDSIVRGTTSREIVEMVRAAGARKVYIASAAPEVRYPNVYGIDMPTREELIANGRSAAEIAAEIGADGIVFQNLSDLEAVVKALNPKIESFDSSCFNGIYQTGDIDDAYLDRLSAEKSGCGGLKIHPSRVEHSISISDAGDEE

SEQ ID NO: 4324 - protein, 269 aa, Neisseria meningitidis
MTPLKIAIAGVNGRMGRVLVEAVNNHPDTVLSGALEHSGSEALGLDAGYAVGLKTGIAISDDVDAVLAQSDVLIDFTRPEPTLKHLQKCVEKGVCIIIGTTGFDDTGKAAIRTAAEQTGIVFAANFSVGVNLTFHILDTVARVLNEGYDIEIIEGHHRHKVDAPSGTALRMGEVIAGALGRDLKQCAVYGREGHTGPRDPSTIGFATVRAGDIVGDHTALFATDGERVEITHKASSRMTFAAGAVRAAVWVNGKTGLYDMQDVLGLNNR

SEQ ID NO: 4325 - protein, 135 aa, Neisseria meningitidis; identical to SEQ ID NO: 803

SEQ ID NO: 4326 - protein, 416 aa, Neisseria meningitidis
MFSKSVTLAQYDPDLAAAIAQEDQRQQDHVELIASENYVSCAVMEAQGSQLTNKYAEGYPGKRYYGGCEYVDIVEQLAIDRVKKLFGAQYANVQPHSGSQANQAVYASVLKPGDTILGMSLAHGGHLTHGASVNISGKLYNAVTYGLDENEVLDYAEVERLALEHKPKMIVAGASAYALQIDWAKFREIADKVGAYLFVDMAHYAGLIAGGEYPNPVPFCDFVTTTTHKTLRGPRGGVILCRDNTHEKALNSSIFPSLQGGPLMHVIAAKAVAFKEALQPECKQYAKQVKINAAAMAEELVKRGLRIVSGRTESHVFLVDLQPMKITGKAAEAALGKAHITVNKNAIPNDPEKPFVTSGIRIGSAAMTTRGFNEADARVLANLVADVLSNPEDEANLENVRKQITALCDKYPVYGA

SEQ ID NO: 4327 - protein, 823 aa, Neisseria meningitidis
MKKTCFHCGLDVPEHLHLTVRYENEDRETCCAGCQAVAQSIIDAGLGSYYKQRTADAQKTELPPQEILDQIRLYDLPEVQSDFVETHGGTREAVLMLGGITCAACVWLIEQQLLRTDGIVRIDLNYSTHRCRVVWDDGKIRLSDILLKIRQIGYTAAPYDAQKIEAANQKERKQYIVRLAVAGLGMMQTMMFALPTYLYGGDIEPDFLQILHWGGFLMVLPVVFYCAVPFYQGALRDLKNRRVGMDTPITVAIIMTFIAGVYSLATNAGQGMYFESIAMLLFFLLGGRFMEHIARRKAGDAAERLVKLIPAFCHHMPDYPDTQETCEAAVVKLKAGDIVLVKPGETIPVDGTVLEGSSAVNESMLTGESLPVAKMPSEKVTAGTLNTQSPLIIRTDRTGGGTRLSHIVRLLDRALAQKPRTAELAEQYASSFIFGELLLAVPVFIGWTLYADAHTALWITVALLVITCPCALSLATPTALAASTGTLAREGILIGGKQAIETLAQTTDIIFDKTGTLTQGKPAVRRISLLRGTDEAFVLAVAQALEQQSEHPLARAILNCRISGGSVPDIAIKQRLNRIGEGVGAQLTVNGETQVWALGRASYVAEISGKEPQTEGGGSAVYLGSQSGFQAVFYLTDPLKDSAAEAVWQLAGKNLTLHILSGDRETAVAETARALGITHYRAQAMPEDKLEYVKALQKEGKKVLMIGDGINDAPVLAQADVSAAAAGGTDIARDGADIVLLNEDLRTVAHLLDQARRTRQIIRQNLIWAGAYNIIAVPLAVLGYVQPWIAALGMSFSSLAVLGNALRLHKRGKMPSEKMPSEQ

SEQ ID NO: 4328 - protein, 199 aa, Neisseria meningitidis; identical to SEQ ID NO: 1022

SEQ ID NO: 4329 - protein, 288 aa, Neisseria meningitidis; identical to SEQ ID NO: 2832

SEQ ID NO: 4330 - protein, 144 aa, Neisseria meningitidis
MTEPKHEMLTKEQVAARKKAKAKIRTIRIWAWVILALLALTALLSQCAMSKPQAKQKIVESCVKNIPFAEKWQNDLRARGLDSNNTRLTVDYCKCMWEQPLDRLSEKQISSFGKLGAQEQLDLLGGANAFETRDKQCVADLKSE

SEQ ID NO: 4331 - protein, 296 aa, Neisseria meningitidis; identical to SEQ ID NO: 64

SEQ ID NO: 4332 - protein, 304 aa, Neisseria meningitidis
MKHLKLTLIAALLTTAATAAPLPVVTSFSILGDVAKQIGGERVSIQSLVGANQDTHAYHMTSSDIKKIRSAKLVLLNGLGLEAADVQRAVKQSKVSYAEATKGIQPLKAEEEGGHHHDHDHDHEGHHHDHGEFDPHVWNDPVLMSAYAQNVAEALIKADPEGKVYYQQRLGNYQMQLKKLHSDAQAAFNAVPAAKRKVLTGHDAFSYMGKRYHIEFIAPQGVSSEAEPSAKQVAAIIRQIKREGIKAVFTENIKDTRMVDRIAKETGVNVSGKLYSDALGNAPADTYIGMYRHNIKALINAMKQ

SEQ ID NO: 4333 - protein, 522 aa, Neisseria meningitidis; identical to SEQ ID NO: 968

SEQ ID NO: 4334 - protein, 326 aa, Neisseria meningitidis
MAMAENGKYLDWAREVLHTEAEGLREIAAELDENFVLAADALLHCKGRVVITGMGKSGHIGRKMAATMASTGTPAFFVHPAEAAHGDLGMIVDNDVVVAISNSGESDEIAAIIPALKRKDITLVCITARPDSTMARHADIHITASVSKEACPLGLAPTTSTTAVMALGDALAVVLLRARAFTPDDFALSHPAGSLGKRLLLRVADIMHKGGGLPAVRLGTPLKEAIVSMSEKGLGMLAVTDGQGRLKGVFTDGDLRRLFQECDNFTGLSIDEVMHTHPKTIAAERLATEALKVMQANHVNGLLVTDADGVLIGALNMHDLLAARIV

SEQ ID NO: 4335 - protein, 75 aa, Neisseria meningitidis; identical to SEQ ID NO: 3903

SEQ ID NO: 4336 - protein, 111 aa, Neisseria meningitidis
MKELNISDLEIVSGGSEPKYFSPLDVIGVTSAATGGWRAVSATATGDMIARSAARGGLIGLAGIAGWNTGTYLYHETPLGDWLSSGVDKLTGLDQNFNDASGNDYGDGTGY

SEQ ID NO: 4337 - protein, 259 aa, Neisseria meningitidis
MLKIISANVNGIRSAYKKGFYEYIAASGADIVCVQELKAQEADLSADMKNPHGMHGYWHCAEKRGYSGVAVYSKRKPDNVQIGMGIEEFDREGRFVRCDFDRLSVISLYLPSGSSAEERQQVKYRFLDAFYPMLEAMKNEGRDIVVCGDWNIAHQNIDLKNWKGNQKNSGFLPEEREWIGKVIHKLGWTDMWRTLYPDVPGYTWWSNRGQAYAKDVGWRIDYQMVTPELAAKAVSAHVYKDEKFSDHAPLVMEYDYAAE

SEQ ID NO: 4338 - protein, 293 aa, Neisseria meningitidis
LLIHYIDIAKRNFVIAVSSLSKTKTETNNPKGIAHTIEYLKKHKVALVVTESTGGLEIPAAKAIRRAGIAVIIANPRQTHQFAQSQPLTKTDAKDAKMPAFFAQMTAQKEDSQTMPYQPPTEAEEVLEALVNRRNQSADMRTAEKNRLHQVHETQVGSVKQLIAHFDRLIDELDKQIDDHTHTHFDGKAQVAEQIKGIGSITTATLMAMLPELGRLSHKRIASLVGIAPHPRESEETKFKAAALAEGLRCVRHCIWLPWQRHVLNRLFGISTNACCPRVSRIRLLLRHVCANC

SEQ ID NO: 4339 - protein, 306 aa, Neisseria meningitidis
MPNPLYRQHIISISDLSREQLECLLQTALKLKAHPRGDLLEGKLIGSCFFEPSTRTRLSFETAVQRLGGKVIGFSDGANTSAKKGETLADTARIISGYTDAIIQRHPKDGAARVAAEFSRVPVINAGDGTNQHPSQTLLDLVTIYETQGRLDKLKIAMAGDLKYGRTVHSLCQALKRWGCEFAFVSPPSLAMPDYITEELDEAGCRYRILGSLEEAAEWADILYMTRVQRERFDEQEFAKIQGKFNLDASMLARAKPNLRVLHPLPRVDEIHPDVDATPHAYYFEQATNGVYARMAILSLVLNEEV

SEQ ID NO: 4340 - protein, 436 aa, Neisseria meningitidis
MDTSKQTLLDGIFKLKANGTTVRTELMAGLTTFLTMCYIVIVNPLILGETGMDMGAVFVATCIASAIGCFVMGFVGNYPIALAPGMGLNAYFTFAVVKGMGVPWQVALGAVFISGLIFILFSFFKVREMLVNALPMGLKMSIAAGIGLFLALISLKGAGIIVANPATLVGLGDIHQPSALLALFGFAMVVVLGHFRVQGAIIITILTITVIASLMGLNEFYGIIGEVPSIAPTFMQMDFKGLFTVSMVSVIFVFFLVDLFDSTGTLVGVSHRAGLLVDGKLPRLKRALLADSTAIVAGAALGTSSTTPYVESAAGVSAGGRTGLTAVTVGVLMLACLMFSPLAKSVPAFATAPALLYVGTQMLRSARDIDWDDMTEAAPAFLTIVFMPFTYSIADGIAFGFISYAVVKLLCRRTKDVPPMVWIVAVLWALKFWYLG

SEQ ID NO: 4341 - protein, 343 aa, Neisseria meningitidis
MSYEIFRAGTRTDANGNTVTITHADLAAAAQAYDPKVHEAPIVVGHPKADAPTYGWVSGLKAENGVLTADFDQVDEGFADLVKAGRYKKVSASFYPPTSPNNPKPGVWTLRHVGFLGAQPPAVKGLSPVSFAEGEVYVEFAEEPQEIGLLRRLLSMAGLKPAEFTESPPPPENHENKETPMSLEQELAAEKAAREAAEKKAAESQAELKKLQDEQHAALRDGAHEQNAEFAEGLVKAGRLKPADKDLVVKVLDFAEYPDDVTADFGEGSKKQPLSAALRAFFTAVLPKQIQGGEMAKGETPSGLAADFAEAADPEALSHHQRASALAAKEGIPYEEAARRTIA

SEQ ID NO: 4342 - protein, 377 aa, Neisseria meningitidis
MDLSKLKREEVKAVSDDLAEILAQTIADYEAKSGKTLQPAHIERLIINTYAYREMLTRKALNEAYRQQHPRFATGLMLDLCGDDVNTPRLEASAARCTVRFTLAASHSEPVVIPQSTQIAAGATVFQTASEGTLSPAGRTLDLEAVCTQTGVSGNGFAAGQINTLVSPIDGVSAANIEVSAGGADEESDDAYRQRILLAPESFSVAGPVGAYEYFARRVNPVICDVHVGNLKTAGGEPVGGRVRVTVLTKNGLPSPELIGEVQRALSDERVRPLCDTVSVAAPSVIDYTLDAELTLFTGADAAEVLAAAKQAWADYEASRREKLGADIVPLDIQTALKAAGVYNVVLKSPALTVVQPDQWARCTSVNIRISPETAEG

SEQ ID NO: 4343 - protein, 96 aa, Neisseria meningitidis; identical to SEQ ID NO: 2317

SEQ ID NO: 4344 - protein, 269 aa, Neisseria meningitidis
MIQDTRPLIRVVAGILLNRDGDYLLSSRPEGKPYAGYWEFAGGKVEAGETDFQALRREFEEELGIRILAATPWLTKIHSYEHARVCLKFLWVNPGQWTGEPQSREGQEWSWQKAGDFTVAPMLPANGALLRSLSVPRRLYGSLKTGLHGENSMGAYRVLPLGSAEGSGANVLMEAAQWQDRPEHADSVWMVVQTREQWRQAQEKGADAVVWRVCDDVQAQEAAEALRQGVSVPLVLAANGQTVARYGKLWLGLGAHVVVRDETIGKNHE

SEQ ID NO: 4345 - protein, 130 aa, Neisseria meningitidis
MPTSTKPYILRALCEWCSDNSLTPHILVWVNEHTRVPMQYVRDNEIMLNIGATATQNLQIDNDWISFSARFGGQAHDIWIPVGHVLSLFARETGEGMGFELEAYRPDTPPENTSAETAPRPAKKGLKLVK

SEQ ID NO: 4346 - protein, 230 aa, Neisseria meningitidis
MNEILRQPSILLFLTLAVYALAIIVRTRTGNIFCNPVLVSTIVLIAYLKILGIDYAVYHNAAQFIDFWLKPAVVVLAVPLYQNRRKIFNQWLPVIVSQLAGSVTGIVTGMYFAKWLGAEREVVLSLASKSVTNPIAIEITRSIGGIPAITAATVIIAGLVGQIAGYKMLKNTVVMPSSVGMSLGTASHAMGIAASLERSRRMAAYAGLGLTFNGVLTALIAPLLIPVLGF

SEQ ID NO: 4347 - protein, 346 aa, Neisseria meningitidis
MQPIRYRTDLTPYNTFGLRAQARAFIALEHADGLRDIVRLPEFNRDTVLWLGGGSNILLMEDYAGLVVHMENKGIREIARSDGMVLIEAQAGEIWHDFVLHAVALGLNGLENLSLIPGTVGASPVQNIGAYGVEAKDVIHSVRCFDLDTEAFVELANADCRFAYRESLFKQEGKGRYVIVSVVFALKEHFVPNLGYGDLAAAVAERCAGREITAKEVSDAVCAVRRRKLPDPGILGNVGSFFKNPVVGAGKAAALLQQHPDMPHYPQPDGSVKLAAGWLIDQCRLKGFQIGGAAVHDKQALVLVNKNNASANDVRQLAQHIKFTVFAQFQVELHAEPNWLPASFSL

SEQ ID NO: 4348 - protein, 547 aa, Neisseria meningitidis
MNAFTRAWYALERHYQDTRHVLLRDRFACEPDRFERMHERLDGMLFDYSKNRLGEDTLQLLCRLAETADLEGKMRALRTGAKVNGSEGRAALHTALRLPDGADAVYADGRDVLPEIRRELNRALEFAHSLDDGSYQGTTGKRITDFVHIGIGGSDLGPAMCVQALEPFRRHIAVHFAANADPACLDAVLCRLNPETTVFCVASKSFKTPETLLNAEAVKAWYRGAGFSESETGCHFCAVSADTEAAQSFGIAAERVFAMYDWVGGRYSVWSPVGLPVMVAVGGARFRELLAGAHAMDSHFFHTPPRRNIPVLMALIAVWYNNFQHADGQTAVPYSHNLRLLPVWLNQLDMESLGKSRASDGSPAVCKTGGIVFGGEGVNCQHAYFQLLHQGTRLIPCDFIVPMTAQGVEDGRSRFTVANAFAQAEALMKGKTLDEARAELADLPEAERERLAPHKEFPGNRPSNSILLERLTPYNLGMLMAAYEHKTFVQGVIWDINPFDQWGVEYGKQLAKTIIGELEGGTSVRDASTEGLMAFYRECRLKGGGAA

SEQ ID NO: 4349 - protein, 124 aa, Neisseria meningitidis
MQYLIVKYSHQIFVTITILVFNIRVFLLWKNPEKPLVGFWKALPHLNDTMLLFTGLWLMKITHFSPFNAPWLGTKILLLLAYIALGMMMMRARPRSTKFYTVYLLAMCCVACIVYLAKTKVLPF

SEQ ID NO: 4350 - protein, 236 aa, Neisseria meningitidis
MNAAIEHVQAVAFDLDGTLCDSVPDLAAAAEAMLEQLGMKPLPAKVVESYVGDGIGKLVHRVLTNDRDREADSELWEKGFVSYMKYYRDHLSVFTRPYPETEAGLALLKSLGIPLAVITNKNEILAVELLKQLGLADYFSLILGGDSLPEKKPSPLPLRHAAEVLGIDVANMVMVGDSRNDIIAAKAVGCLSVGVTFGYGDMTLLSQDDATRPDWIIGSLPEIYENLQPQKNKDEE

SEQ ID NO: 4351 - protein, 462 aa, Neisseria meningitidis
MNTRTEHDTMGNVEVPSEAYWGAQTQRSRNNFKIGGETLPQPLIYALALVKKAAAATNVSLGRIKPEQADLITQAADDVLNGKLDGQFPLVVWQTGSGTQSNMNMNEVLANRANEIAGTGLAAYQPVHPNDHVNHAQSTNDAFPTAIHVAAAIEINRHLIPAVKALRDTLDKKAQAFAPIVKIGRTHLQDATPLTLGQEFSGYVSQLDHGLGRLNDALKDLYELALGGTAVGTGLNSHPEYAEKAAAKLAELSGLPFVSAPNKFEALGGRDAAVAASGALKTLAASLNKIANDIRWLASGPRCGLGEIKIPENEPGSSIMPGKVNPTQCEAMTMVCCQVFGNDVTIGMAGASGNFELNVYMPVIAYNLLQSIRLLGDACNSFNEHCAVGIEPVPEKIDYFLHHSLMLVTALNRKIGYENAAKVAKTAYKNNKSLRETAVELGLLTGEEFDELVVPADMVHPR

SEQ ID NO: 4352 - protein, 442 aa, Neisseria meningitidis
MKKVFIRTFGCQMNEYDSDKMLAVLAEEHGGIEQVTQADEADIILFNTCSVREKAQEKVFSDLGRVRPLKEKNPGLIIGVAGCVASQEGENIIKRAPYVDVVFGPQTLHRLPKMIVDKETSGLSQVDISFPEIEKFDHLPPARVEGGAAFVSIMEGCSKYCSFCVVPYTRGEEFSRPLNDVLTEIANLAQQGVKEINLLGQNVNAYRGEMDDGEICDFATLLRIVHEIPGIERMRFTTSHPREFTDSIIECYRDLPKLVSHLHLPIQSGSDRVLSAMKRGYTALEYKSIIRKLRAIRPDLCLSSDFIVGFPGETEREFEQTLKLVKDIAFDLSFVFIYSPRPGTPAANLPDDTPHEEKVRRLEALNEVIEAETARINQTMIGTVQRCLVEGISKKDPDQLQARTANNRVVNFTGTPDMINQMIDLEITEAYTFSLRGKVVEA

SEQ ID NO: 4353 - protein, 347 aa, Neisseria meningitidis
MSKKIKVGIVGATGYTGVELLRLLAAHPDVEVAAVTSRSEAGTAVADYFPSLRGVYGLAFQTPDEAGLEQCDIVFFATPNGIAMKDAPRLIEQGVRVIDLSADFRIRDIPTWEHWYGMTHAAPDLVSQAVYGLSELNREAVAQARLVANPGCYPTCVSLPLVPLLRQCRLKPGMPLIADCKSGVSGAGRKGNVGSLLCEAGDNFKAYGIAGHRHLPEIRQTIAGLQDGIAEGFVFTPHLAPMIRGMHATVYLHLSNGICPETVLRDYYRDSLFVDILPAGSTPETRSVRGANLCRISIQQAAQSDVWVVLSVIDNLVKGAAGQAVQNMNIMFGLKETHGLDAIPLLP

SEQ ID NO: 4354 - protein, 325 aa, Neisseria meningitidis
MNYFNMRRFNMPSEAPMDSIIELRHLKTLLALEETGSVSLAAKRVFLTQSALSHQIRMLENHYGTPLFERKSTPLRFTPVGERLLRLAHELIPQVAVAERDLARITEGEAGELRIAVECHTCFDWLMPAMGEFRPMWPQVELDIVSGFQADPVGLLLQHRADLAIVSEAEKQNGISFQPLFAYEMVGICAPDHPLAAKNVWTAEDFIGETLITYPVPDEMLDLPKKILIPKNINPPRRHSELTIAIIQLVASRRGIAAFPYWTVMPYLEKGYVVHRQITADGLQSKLYAAIRTEDTDKSYLNNFCQIIRERGFADLPGLSELEPV

SEQ ID NO: 4355 - protein, 133 aa, Neisseria meningitidis; identical to SEQ ID NO: 2967

SEQ ID NO: 4356 - protein, 76 aa, Neisseria meningitidis; identical to SEQ ID NO: 374

SEQ ID NO: 4357 - protein, 230 aa, Neisseria meningitidis
MLGTTALAFIMPLSKVVALVALPSLLMSLLVLCSNNKKGFWQEIVYYLKTYKLLAIGSVVGSILGVKLLLILPVSWLLLLMAIITLYYSVNGILNVCAKAKNIQVVANNKNMILFGFLAGIIGGSTNAMSPILLIFLLSETENKNRIAKSSNLCYLLAKIVQIYMLRDQYWLLNKSEYGLIFLLSVLSVIGLYVGIRLRTKISPNFFKMLIFIVLLVLALKIGHSGLIKL

SEQ ID NO: 4358 - protein, 259 aa, Neisseria meningitidis
MKKTLTLLAVSALFATSAHAHCVWVETAHTHGGEYLKADLGYGEFPELEPIAKDRLHIFSKPMQLVTEKGKENMIQRGTYNYQYRSNRPVKDGSYLVIAEYQPTFWSKNKAGWKQAGIKEMPDASYCEQTRMFGKNIVNVGHESADTAIITKPVGQNLEIVPLDNPANIHVGERFKVRVLFRGEPLPNATVTATFDGFDTSDRSKTHKTEAQAFSDSTDDKGEVDIIPLRQGFWKASVEHKADFPDQSVCQKQANYSTL

SEQ ID NO: 4359 - protein, 85 aa, Neisseria meningitidis
MTKRSFARTAFSLIAVEFDIQLDGDFSALTVQTFGFAVQNTGNINGIKTVFTRPLGSGFVLVFQPLLGFISSTLFHKKPLKTMKT

SEQ ID NO: 4360 - protein, 160 aa, Neisseria meningitidis; identical to SEQ ID NO: 1377

SEQ ID NO: 4361 - protein, 279 aa, Neisseria meningitidis
MRKKTPKLAIIPTNTLKDNNMAASPEAKFTEEKILWVKHHTPKLITFAISRPESYRFKAGQFSRLGFYEGEGFIWRAYSIVSAEYADTLEYFAVLIQDGPMSARFAKMQQGDTILLDKNATGFLLPERFPDGKDLVMLCTGSGIAPFLSILEQPEIRQRFDTVNLIHSVSFPEELIFNDRLAALSEHPLVGEYGHSFHFVPVTTRAANPSGLSGKRIPELLKNSSIEQALHTKFTPESTRFMICGNPEMVKDTFQTLLDMGYAMHRNRIPGQIMMENGF

SEQ ID NO: 4362 - protein, 176 aa, Neisseria meningitidis; identical to SEQ ID NO: 3131

SEQ ID NO: 4363 - protein, 256 aa, Neisseria meningitidis
MKITTWNVNSLNVRLPQVQNLLADNPPDILVLQELKLDQDKFPAAALQMMGWHCVWSGQKTYNGVAIVSRNAPEDVHIGLPALPDDPQRRVIAATVGGVRVINVYCVNGEALDSPKFKYKEQWFAALTEFVRDEMARHGKLVLLGDFNIAPADADCYDPEKWYEKIHCSTVERQWFQNLLDLGLTDSLRHIHPEGAFYTWFDYRGAMFQRKLGLRIDHILVSPAMAAALKDVRVDLETRALERPSDHAPVTAEFDW

SEQ ID NO: 4364 - protein, 622 aa, Neisseria meningitidis
MQAVRYRPEIDGLRAVAVLSVIIFHLNNRWLPGGFLGVDIFFVISGFLITGIILSEIQNGSFSFRGFYTRRIKRIYPAFIAAVSLASVIASQIFLYEDFNQMRKTVELSAVFLSNIYLGFQQGYFDLSADENPVLHIWSLAVEEQYYLLYPLLLIFCCKKTKSLRVLCHISIILFLILTASSFLPAAFYTDILNQPNTYYLSTLRFPELLAGSLLAVYGQTQNGRRQTANGKRQLLSSLCFGALLACLFVIDKHNPFIPGMTLLLPCLLTALLIRSMQYGTLPTRILSASPIVFVGKISYSLYLYHWIFIAFAHYITGDKQLGLPAVSAVAALTAGFSLLSYYLIEQPLRKRKMTFKKAFFCLYLAPSLILVGYNLYARGILKQEHLRPLPGAPLAAENHFPETVLTLGDSHAGHLRGFLDYVGSREGWKAKILSLDSECLVWVDEKLADNPLCRKYRDEVEKAEAVFIAQFYDLRMGGQPVPRFEAQSFLIPGFPARFRETVKRIAAVKPVYVFANNTSISRSPLREEKLKRFAANQYLRPIQAMGDIGKSNQAVFDLIKDIPNVHWVDAQKYLPKNTVEIYGRYLYGDQDHLTYFGSYYMGREFHKHERLLKSSRDGALQ

SEQ ID NO: 4365 - protein, 449 aa, Neisseria meningitidis
MLNPSRKLVELVRILDEGGFIFSGDPVQATEALRRVDGSTEEKIIRRAEMIDRNRMLRETLERVRAGSFWLWVAAATFAFFTGFSGTYLLMDNQGLNFFLVLAGVLGMNTLMLAVWLAMLFLRVKVGRFFSSPATWFRGKDPVNQAVLRLYADEWRQPSVRWKIGATSHSLWLCTLLGMLVSVLLLLLVRQYTFNWESTLLGDSSSVRLVEMLAWLPAKLGFPVPDARAVIEGRLNGNIADARAWSGLLVGSIACYGILPRFLAWAVCKILLKTSKNGLDLEKPYYQAVIRRWQNKITDADTRRETVSAVSPKIVLNDAPKWAVMLETEWQDGEWFEGRLAQEWLDKGVATNREQVAALETELKQKPAQLLIGVRAQTVPDRGVLRQIVRLSEAAQGGAVVQLLAEQGLSDDLSEKLEHWRNALAECGAAWLEPDRAAQEGRLKTNDRT

SEQ ID NO: 4366 - protein, 570 aa, Neisseria meningitidis
MKASQFFISTLKEAPAEAALASHKLMIRAGLIKANASGLYTWMPMGLRVLRKVENVVREEMARAGSVELLMPVVQPAELWQESGRWEFYGKELLRLKDRHDRDFCMGPTCEEVIADIVRKEINSYKQLPKNFYHIQTKFRDEVRPRFGVMRAREFVMKDAYSFHADYASLQTTYDAMYDAYCRIFTRLGLAFRPVAADTGSIGGTGSHEFQVLAESGEDVIAYSDTSDYAANIELAPTLPLKGERTAAQAELTKVHTPNVKTIESLVEFLNIPVEQTLKSIVVEGENEGEIVLLLLRGDHEFNDIKAEKLAGVKSPLTMASPAAIVEQFGANGGSLGPVGFAGKVYADFATEKGADWVIGANEDGYHYTGFNFGRDAAEPEFVDLRNVVEGDESPDGQGRLKLARGIEVGHVFQLRDKYTQAMNVSFLDNNGKSQIMEMGCYGIGITRVVAAAIEQNNDEKGIIWTKAMAPFEVVIVPMNYKKSDTVREAADKIYAELLAAGADVLLDDRDERAGVLLNDSELLGIPHRIVIGDRALKEGNVEYAERRNNEAQAVAIGEIVARVTALLNG

SEQ ID NO: 4367 - protein, 808 aa, Neisseria meningitidis
MSAQTDPGYFFMPNHIILIGASERPYSLGERVLSNLLSTPFQGKITPVNPRHHTIAGLPAYTSLNKIPGNADLIIAVTLPDSYDTLFKTCRKKQLRHIILIQDWDSLSAAELHTAETAIRKHHGNGLNITACTTAGIQLPSLGLNISTQDGYAAGHTAILTGNAAVSRQIDNILNKLRQGTSRHISLHPGISPITSADWLNRFGHSLHTKTAVLHHNPEEDQRKLFSAIRQFTRHTPLILHITCRTTETDRAVLHCLARHCNFLISFNADDLEAALRAQLSDLPPLSRLDILSDTPAEWLNAHAPKTLALHFPNLPHHIRNGHLTGTPTPSICHDIASRQLARPDTQAVLTILSPSGHEDYKKTARALIRLSEQTAKPLLVSSPFSDGITHFDTPTQAIRTLSYRNTAAALKQAQLDIAPPQPCRLKTPQPQNIKKALAAANPSLLAEALHLPPYRHTTHNAVQFQFGSHPIYGNILTVRYAGQTTAALPPFTTQDSLHIAQFAELEDPQTLNQFLHILTTLSDHNLHIGKITLNLNGGQYSSDFILKTPETHDTPKRKNTGKAAQTLEHAAAKMQSAAAYLKHKNPTAAEFLRHTSEAAAELLGSKTETGAAVPNVLAPYPAAHPKTLSLKNNTTVTITPLLPEDAEAKQQFVRSLGPEARYTRFMTHTNELPAATLARLCNPDYHCEAAWTAKDADSNIVAVVRHSRLNRNECEFGITLAEHMRGSGLAQKMMELIIQTAAQQGYRTMSADILKTNTPMIKLAEKSGFTLKESDTEKNLYRAYLNLAADKTTEKTNKNLRTDHKIT

SEQ ID NO: 4368 - protein, 163 aa, Neisseria meningitidis
MKYRRFYRNGGTYFFTVVTNKRQKILTDDAVRLALRQAVMAVRERYPFEILAWVLMPDHLHTIWRLPDNDSAYSERWRQIKRHSQYLIGGNLRLWQKRFWEYTIRDEADFACHFDYLHFNPVKHGYVGQISDWGFSTFHRYVKQGIYPHNWGGGNADFSIGYD

SEQ ID NO: 4369 - protein, 273 aa, Neisseria meningitidis
MSLQNIIETAFENRADITPTTVTPEVKEAVLETIRQLDSGKLRVAERLGVGEWKVNEWAKKAVLLSFRIQDNEVLNDGVNKYFDKVPTKFADWSEDEFKNAGFRAVPGAVARRGSFVAKNVVLMPSYVNIGAYVDEGAMVDTWATVGSCAQIGKNVHLSGGVGIGGVLEPLQAAPTIIEDNCFIGARSEIVEGVIVEEGSVISMGVFIGQSTKIFDRTTGEIYQGRVPAGSVVVSGSMPSKDGSHSLYCAVIVKRVDAQTRAKTSVNELLRGI

SEQ ID NO: 4370 - protein, 472 aa, Neisseria meningitidis
MPSEKCFRRHFYPSANHPHPHKPLKISYNAQLFDFRLSHIEMAQKIQSVKGMNDLLPVEQKDFKLTAAFWQAFEDTVNRWTRAYGYQQIRTPIVEQTGLFVRSIGEETDVVGKEMYTFSDSNDSLSLSLRPEGTASCLRAVVEHNLLYNSPQKLWYMGPMFRRERPQKGRYRQFHQVGIEALGFEGPDIDAEIIAMSADLWEKLGIREYLTLEINSLGNREERAAHRAALVEYLTRYEDKLDEDSKRRLKTNPLRVLDTKNPDLQEICNAAPRLVDYLGEASQNHYARFKAMLDGLGIQYIENPRLVRGLDYYNQTVFEWTTDKLGAQATVCGGGRYDGLIEELGGKPAPSIGFAMGIERLLLLVSEYGSLEVNAAPDVYAMHQGERADLQVMKYAQALRAQGFNVMQHSGYQSLKAQMKKADNSGARFALIVAQDELANGTVTLKDMNGAHGQQTVAAEDLTHTLQQWKNA

SEQ ID NO: 4371 - protein, 436 aa, Neisseria meningitidis
MIVPDLFVAHFREAAPYIRQMLGKTLVAGIDDRLLEGDTLNKLAADIGLLSQLGIRLVLIHGARHFLDRHAAAQGRTPHYCRGLRVTDETSLEQAQQFAGTVRSRFEAALCGSVSGFARAPSVPLVSGNFLTARPIGVIDGTDMEYAGVIRKTDTAAIRFQLDAGNIVWLPPLGHSYGGKTLHLDMLQTAASAAVSLQAEKLVYLTLSDGIARPDGTLAETLSAQEAQSLAEHAGGETQRLISSAVAALEGGVHRVQILNGASDGSLLQELFTRNGIGTSIAKEAFVSIRQAHSGDIPHIAALIRPLEEQGILLHRSREYLENHISEFSILEHDGNLYGCAALKTFTEADCGEIACLAVSPQAQDGGYGERLLAHIIDKARGIGISRLFALSTNTGEWFAERGFQTASEDELPETRRKAYRSNGRNSHILVRRLHR

SEQ ID NO: 4372 - protein, 159 aa, Neisseria meningitidis; identical to SEQ ID NO: 3392

SEQ ID NO: 4373 - protein, 312 aa, Neisseria meningitidis
MLELNGLCKRFGGKTVADDICLTVGRGKILAVLGRSGCGKSTLLNMIAGIVRPDGGEIQLNGENITRMPPEKRRISLMFQDYALFPHMSALENAAFGLKMQKMPKAEAERLAMAALAEVGLENEVHRKPEKLSGGEKQRLALARALVVRPSLLLLDESFSSLDTHLRDRLRRMTAERIRNGGIPAVLVTHSPEEACTTADEIAVMYEGRILQYGTPETLVKTPSCVQVARLMGLPNTNDDRHIPQHAVRFDQDGMECRVLSRTCLPESFSLSVLHPEHGILWLNLDMRHAGAVSGKDTVRIHIEEREIVRFR

SEQ ID NO: 4374 - protein, 100 aa, Neisseria meningitidis; identical to SEQ ID NO: 1023

SEQ ID NO: 4375 - protein, 249 aa, Neisseria meningitidis
MVLRRDFLAWCDETLQTASFKDYAPNGLQVEGREYIGKIVTSVTASRAAIDFAVEQKADLLLVHHGMFWKNELPTVTGWKKERIAALLRHDINMAGYHLPLDAHPTLGNNAQLADRLGFATEKRFGEQNLLNSGSLKQAKTLGALAAHIETVLQRKPVVIGKPEREIRRVAWCSGGAQGFFQTAIDEGVDLYLTGEISEAQYHLANETGTAFISAGHHATERYGVRALAESAAEVFGLEVCHFDENNPA

SEQ ID NO: 4376 - protein, 322 aa, Neisseria meningitidis
MTAKPFSLNLTNLLLLAVLFAVSLSVGVADFRWSDVFSLSDSTELMLVSRLPRTFAIVLTGASMAVAGMIMQILMRNRFVEPSMAGAGQSAALGLLLMSLLLPAAPLPVKMSVAAVAALIGMLVFMLLIRRLPPTAQLMVPLVGIIFGGVVEAVATFIAYENEMLQMLGVWQQGDFSSVLLGRYELLWITGGLAVFAYLIADRLTILGLGETVSVNLGLNRTAVLWSGLIIVALITSLVIVTVGNIPFVGLVVPNIISRLIGDRLRQSLPAVALLGASLVLLCDILGRVIVFPFEIPVSTVFGVLGTALFLWLLLRKPAHAV

SEQ ID NO: 4377 - protein, 100 aa, Neisseria meningitidis
MKTSKIIAGLMLAVAVQTASAAVYECRQNGKVSYSQTPGKHCTNAGLGRDLVYSSVRPAVKDRAEDAGVGDYSDTVRDEAAQNPKGNAQKDGSAAGIKPH

SEQ ID NO: 4378 - protein, 95 aa, Neisseria meningitidis
MHGMYYQVGNKCLEKHQAENLYFSLVVPRIKENGQIVRPEYNGSLWKMSDGQPLRLLLAECSPKDNLQSGLETGWIVFGILASVYFVSLLKKVLK

SEQ ID NO: 4379 - protein, 146 aa, Neisseria meningitidis
MNIRRASPSDCAALAALDAVCNPSAWTQRQFESALVSPSEQVFLAEKDGGIAAFIVWQNLPDESELHLIATAPECRRQGIASALLEYWFTHLPEDTQRLLLEVRAGNTAAQALYTAHGFSITGRRKNYYRTADGKTEDAVLMEKIC

SEQ ID NO: 4380 - protein, 287 aa, Neisseria meningitidis
MAVCRLFGYWGNRVIKKTIGGIIPIFMAVFIPASAGAADLMLAQEYKDQEIAGWAMSEKLDGVRAYWDGKHLISRQGYAFTPPKGFTAQFPPYPLDGELYSGRGQFEQISATVRSVSSDWRGIRLHVFDVPKAQGNLYQRLAVATQWLKTHPNAPITIIPQIKVRDRQHAMDFLKQIEAQGGEGVMLRQPESRYSGGRSSQLLKLKSQYDDECTVTRHYEGKGRNAGRLGAVGCKNRHGEFRIGSGFKDKDRDNPPKIGTLITYRYRGFTRKGTPKFATFVRVRTDR

SEQ ID NO: 4381 - protein, 280 aa, Neisseria meningitidis; identical to SEQ ID NO: 854

SEQ ID NO: 4382 - protein, 85 aa, Neisseria meningitidis
MQTVTMYTGPFCPYCAMAKRLLHAAGVGHIDEIRVDASPEAFAEMQQLSGQRSVPQIFIGETHVGGFTDLYRLQQEGGLDGLLNP

SEQ ID NO: 4383 - protein, 394 aa, Neisseria meningitidis; identical to SEQ ID NO: 277

SEQ ID NO: 4384 - protein, 75 aa, Neisseria meningitidis; identical to SEQ ID NO: 821

SEQ ID NO: 4385 - protein, 286 aa, Neisseria meningitidis
MAKVKGGLGRGLDSLLANGADNSSGDRLTTVAVKDIRPGRYQARVQIDDEALQELADSIKAQGVIQPVIVREHGLSRYELIAGERRWRAAQIAGLTEIPAVIKTISDETALAMGLIENLQRENLNPIEEAQGLKRLADEFGLTHETIAQAVGKSRSAISNSLRLLSLPEPVQEMLYQRRLEMGHARALLTLPVVEQLELAQKAVKNGWSVREVERRSQAALQNKRPEPKKTAAADIGRLNDLLTEKLGVNAEIKTANHKKGKIILHFDTLETFDHILKQLGIDYRP

SEQ ID NO: 4386 - protein, 98 aa, Neisseria meningitidis
MNEAKKLQEDLGVNTVVKLKYPVRLATGQMLEQVTLRRLRVGDLRAVSHLTNEAEQELALFARMASMIPEDFDCLDLADWKQLQETFRRFTESEPDGK

SEQ ID NO: 4387 - protein, 264 aa, Neisseria meningitidis
MTLPMQETRFSILLDELAAKQEAAIAPHLLADGTKVWVRKAGRHNARWRYALLGMVARYLKLGVLKPVPSLGGEPAIATESKRLYELRAAGIAVPELLAVRKNALMFGNLEGIPLDTQIRQEAEAGKADAWLAGLEAIARVHKKQQFLSQAFARNMMSDGKNISFLDFEDDPSEVLTIAQCQARDWLCYIHSTALILKNGGLLEAAAEKWGGVLSDQPAEIQKLIAATVKPILPIRRLEHPRWGRDALRLAASISLISLADMPP

SEQ ID NO: 4388 - protein, 64 aa, Neisseria meningitidis; identical to SEQ ID NO: 905

SEQ ID NO: 4389 - protein, 203 aa, Neisseria meningitidis; identical to SEQ ID NO: 352

SEQ ID NO: 4390 - protein, 697 aa, Neisseria meningitidis
MNNPLVNQAAMVLPVFLLSACLGGGGSFDLDSVDTEAPRPAPKYQDVSSEKPQAQKDQGGYGFAMRFKRRNWYQRANPKEDEIKLSEDDWEQTDDGDIKNPSKQKNIINALPGNNEGALLQDSSQENQGISKVKDYHNFQYVWSGFFYKQIKNTIEKNGSSITAARNGPDGYIFYKGKDPSRQLPVLGQVTYKGTWDFLTDVKINQKFIDLGNTSTKPGDRYSAFSGELDYIVNKDSDKKDGHVGLGLTTEITVDFEKKTLSGKLIKNNSVTNNDKYTTQYYSLEAQVTGNRFSGTATATDKPEKDGTKEHPFVSDSSSLSGGFFGPQGEELGFRFLSDDKKVAVVGSAKTQDKDANGNTEAASGGTGAAASGGAAAMPSENGKLTTVLDAVELTHGGTAIKKLDNFSNAAQLVVDGIMIPLLPQNSTGKNNQPDQGKNGGTEFTRKFDHTPESDKKDAQAQTVTGGAQTDSGKADVNGGKAETKTYEVEVCCSNLNYLKYGLLTRKTADNTGEGGNGSQAAAQTDAQSMFLQGERTDENKIPTDQNVVYRGSWYGHIASSTSWSGNASDKEGGNRAEFTVNFADKKLDGTLTARERTSPTFTITATIQDNGFSGTAKTADLGFDLDQSNTTGTPKAYITDAKVQGGFYGPKAEELGGWFAYPGDKQTKNATATSSDGKSASSATVVFGAKRQQPVQ

SEQ ID NO: 4391 - protein, 477 aa, Neisseria meningitidis; identical to SEQ ID NO: 3214

SEQ ID NO: 4392 - protein, 187 aa, Neisseria meningitidis
MRHLENNGYANVAGLERILAVKTDNYKEKENLLHEIFSKSRIGDTELFAVDENLVKRLFLSLRGEIVFPKNETAESEFEKSVHERRQEGNAGSGRKQLLDLVRRGHREYPYALPRLLAGAASYKPKKSKIRLFKEAYFGKSGTRLTDEIADGIHIYTCFSRADLEKAYSEYLELFKSESDAESRKPR

SEQ ID NO: 4393 - protein, 282 aa, Neisseria meningitidis; identical to SEQ ID NO: 1327

SEQ ID NO: 4394 - protein, 272 aa, Neisseria meningitidis; identical to SEQ ID NO: 2586

SEQ ID NO: 4395 - protein, 585 aa, Neisseria meningitidis
MCKDVKPNFAEEAAPLGDMAEFAAPFAQPRYDVDGAGVWYIGVKTDREGNTQEATPVKLSSPIEIIGRGTDNDGAYYRVIRWQDANTRRTKIAAIPQSEIGTVQGWQRLQSYGLAVLSGRVKRERLSDYLQTQGSGDIYTITDRAGWHGNAYILPNGETINAEGANILYNGDTSQREGYTESGSLEEWRQEAARYAEGNSRLCLALGLSLAAPFLALLHEEGGGVHLAGSSSKGKTTAANLALSVWGSYEATKSNWDTTALGLQNAALARNDGFLALDEIGQTADPRRIPQMVYSVINGISKTQGAKDGGNRKQKTWRNLILSTGETNPESLIGDRAQWRAGNRARLPDIQAEAKHGIYDTLHGFTDGAKLSEYINRAAAKKYGTAGRALIRQILSDGKEAAAETIEATRARYLEALPPMEGQARRIARRFTLLAAVLEYAAPITGLKAGGAAVMQCFHEWLEENGTGDREAEAICSQLDDFIAQYADSPRFLSWSERDAPYTMTGGKGKGHAGFKVQAGGNDEFYILPLVFREEIAQSFPIHTVCKVLSEKGRLKPSKTGYQHQIKVNKKPIRHYLIIEPLELD

SEQ ID NO: 4396 - protein, 498 aa, Neisseria meningitidis; identical to SEQ ID NO: 1489

SEQ ID NO: 4397 - protein, 173 aa, Neisseria meningitidis
MSCFSIKRMSAFRARITAFFAAFVFLTAALPAYAERLPDFLAKIQPSEIFPGADRYGKPEGKPMVARVYKGDEQLGLVYITTDAVNTRGYSSKPIDTLMALAKDGTIAGAKLVDHHESIMLIGIPHLPAPGRAIRSNWLPAYIKPNFTSTNRLRLKGLPTVPQPSKGTGAGVP

SEQ ID NO: 4398 - protein, 356 aa, Neisseria meningitidis
MAACPNESVKMDISDFDFTLPEKLIAQHPPEVRGSSRLLVALPDMPLQDRVFGDLPDYVEAGDVLVFNNTKVMKARLFGQKDSGGRIEALIERVLDNHTALAHIRSSKSPKPGMGLVFEGGIRAVMVGREGELFCLSFEGGETVYELLEQNGHLPLPPYIERAADADDDSRYQTVYAKYQGAVAAPTAGLHFTEELLHRLKDKGAVTAEVTLHVGAGTFQPVRVDKIEEHKMHSEWFEVPSETAAAVEAAKARGNKVWAVGTTSMRALESAARATGRLKAGQGDTDIFITPGYRFNVADRLVTNFHLPKSTLLMLVSAFSGMGHIRAAYRYAVEREYRFFSYGDAMVLGRNEGVVR

SEQ ID NO: 4399 - protein, 248 aa, Neisseria meningitidis
MMSEHRVNHEPVFLLASSPWRESSLRVEAFSRRYGRVALLARSARKRQSELRGVLVPFVPVSASWYGSQELKTLHRAEWIGGWRQPQGRALFSGLYVNELVLKLTAREDPMPELYDALAKVMEAVCREANHIADLRRFEWKLLNALGVAPDLHADGTGGDILADKTYRLMPEEAVMPVCEDADALSHEAGAIVEGQSLIDLREGSFRTAESLQQALKITRLFIRHLLPEGLKSRQVLEQIRQFDRNTA

SEQ ID NO: 4400 - protein, 142 aa, Neisseria meningitidis
LGNFAKVSGYTYNKSRYRNAAEVNAERLAKNSSADPYNFSNFTPVHIFRFGTSFHIPNTGLTVGGGVSAQSGTSSLYNIRQGGYGLIDGFVRYELGKHAKLSLIGTNLNGRTYFENNYNRTRGANNFYGEPRTVSMKLDWQF

SEQ ID NO: 4401 - protein, 102 aa, Neisseria meningitidis; identical to SEQ ID NO: 427

SEQ ID NO: 4402 - protein, 206 aa, Neisseria meningitidis
MAVRSKSSKAWLHEHVNDHYVHMAQKDGYRARAAYKLLEINDKDKLIKPGTVLADLGSAPGSWSQVAAKLTGSSGAVFALDILPMEAIGGVSFIQGDFRENDVLAQFETLLDNRPLDLVICDMAPNMSGNAVSDQARSFYLCELALDFASQHLKTGGSFLVKVFQGAGYQEYMAAMREIFGTVQTRKPEASRNRSSEIYLLGKNKR

SEQ ID NO: 4403 - protein, 332 aa, Neisseria meningitidis
MSRPVPAVFGSVFHSQMPVLAYREGKWQPTEWQSSQDLSLAPGAHALHYSSECFEGLKAFRQADGKIVLFRPTANIARMRQSADILHLPRPETQAYLDALVELVKRAADEIPDAPAALYLRPTLIGTDPVIGKAGSPSETALLYILASPVGDYFKVGSPVKILVETEHIRCAPHMGRVKCGGNYASAMHWVLKAKAEYGANQVLFCPNGDVQETGASNFILINGDEIITKPLTDEFLHGVTRDSVLTVAKDLGYTVSERNFTVDELKAAVENGAEAILTGTAAVISPVTSFVIGGKEIEVKSQERGYAIRKAITDIQYGLAEDKYGWLVEVC

SEQ ID NO: 4404 - protein, 305 aa, Neisseria meningitidis
MVLDGFAAHFDAYLENIVREGKSEHTVAAYRRDLEELFALLAQMPSEDAGGVPQDLSRRDFTAALRRLSQRGLNARTLARKLSSWRQYCVWLVERGLLHTDPTADIKPPKQPERVPKALPQEWLNRMLDLPVDGGDPLAVRDHALFELMYGSGLRVSEIHGLNADDVYLDEAWVHVTGKGRKQRQVPLVGKSVEALKNYLPLRQTASDGKALFTGRNGTRLSQRQIQKRLAQWAAQNGDGRHVSPHMMRHSYAGHLLQASRDIRAVQELLGHSSLSTTQIYTKLDFDHIARLYDEAHPRAKRQDE

SEQ ID NO: 4405 - protein, 130 aa, Neisseria meningitidis; identical to SEQ ID NO: 1661

SEQ ID NO: 4406 - protein, 251 aa, Neisseria meningitidis
MIKIRNIHKTFGKNTILRGINLDVCKGQVVVILGPSGSGKTTFLRCLNALEMPEDGQIEFDNERPLKIDFSKKPSKHDILALRRKSGMVFQQYNLFPHKTALENVMEGPVAVQGKPAAQAREEALKLLEKVGLGDKVDLYPYQLSGGQQQRVGIARALAIQPELMLFDEPTSALDPELVQDVLNAMKELAREGWTMVVVTHEIKFALEVATTVVVMDGGVIVEQGSPKELFDHPKHERTRRFLSQIQSTKI

SEQ ID NO: 4407 - protein, 392 aa, Neisseria meningitidis
MAFLKLTEQNVQGKTVLIRADMNVPFKDGKISDDTRIRASLASIQYCMDNGASVIVMIHLGRPTEGEFHPEDDVAPVAAHLGGLLGKDVKVLNDWRENKPALNAGDVVMLQNVRINKGEKKNDLELGKAYASLCDVFVNDAFGTAHRAQASTEAVAQAAPVACAGVLMAGELDALGKALKQPARPMVAIVAGSKVSTKLTILESLADKVDQLIVGGGIANTFLLAEGKAIGKSLAEHDLVEESKKIMAKMAAKGGSVPLPTDVVVAKAFAADEEAVVKDIADVAEDEMILDIGPKSAAALADLLKAAGTVVWNGPVGVFEFDQFAGGTKALAEAIAQSKAFSIAGGGDTLAAIAKFGVTDQIGYISTGGGAFLEFLEGKELPAVAALEKRGE

SEQ ID NO: 4408 - protein, 140 aa, Neisseria meningitidis
MKKMFLSAVLLLSAAAQTVWADTVFSCKTDNNKYIEVQKINRNLYEYSFGSAAKKEIAIRNSKADLSGRSDRWQGMGSGRWATMKFQNGEFMYTIWTGFDSVTHTESSGVVVERRGKEVARVGCTPQTAQANFNDADFSR

SEQ ID NO: 4409 - protein, 477 aa, Neisseria meningitidis
MSQYDVVVIGAGPGGYVAAIRAAQLGFKTACVDAGVNKAGNAPALGGTCLNVGCIPSKALLQSSEHFHAAQHDFAEHGITVGDVKFDAAKMIERKDAIVTKLTGGVKFLFQKNKVTSLFGTASFAGKNGDAYQIEVDNKGEKTVIEAKHVIVATGSVPRPLPQVAIDNVNVLDNEGALNLTEVPAKLGVIGSGVIGLEMGSVWNRVGAEVTILEAAPTFLAAADQQIAKEAFKYFTKEQGLNIELGVKIGDIKSEGKGVSVAYQTAAGEAKTEVFDKLIVAIGRIPNTKGLNAEDVGLEKDERGFIKVDGECRTNLPNVWAIGDVVRGPMLAHKASDEGVAVAERIAGQKPHIDFNNVPFVIYTDPEIAWVGKTEEQLKAEGVEYKKGTSGFGANGRALAMGKAKGTVKVLADAKTDRILGVHMIGPVVSELLTEGVTALEFFASSEDIARIIHAHPTLSEVVHEAALAADKRALHG

SEQ ID NO: 4410 - protein, 96 aa, Neisseria meningitidis
MARIGTNKGFFELLEGETLLEGLERTGHMVEYQCRSGYCGSCRVKILEGSVTYREPPLAFLGRDEILPCCCCVEGDVRLDCGLSGEDEGLSDSLLK

SEQ ID NO: 4411 - protein, 192 aa, Neisseria meningitidis
MAKLSYASVIEHDRRYKMLADLGLRINEVDAVRLLPRLVDLVAPEHLALLAEGRSILGADGYWLAESDQTRRKLIKGAYQLHRMKGTPWAIREIVRRLGFGEVEITEGLGNKEHNGEIRRDGTYAHGRSDHWAHYRITMNGALTNDQAALLRHTLQAFAPARCVLAALDYRHAAVRHNGRVSRDGTFNRGTA

SEQ ID NO: 4412 - protein, 335 aa, Neisseria meningitidis
MSTFFQQTAQAMIAKHIDRFPLLKLDQVIDWQPIEQYLNRQKTRYLRDHRGRPAYPLLSMFKAVLLGQWHSLSDPELEHSLITRIDFNLFCRFDELSIPDYSTLCRYRNWLAQDDTLSELLKLINRQLTEKGLKIEKASAAVVDATIIQTAGSKQRQAIEVDEEGQISGQTTPSKDSDARWIKKNGLYKLGYKQHTRTDAEGYIEKLHITPANAHECKHLPPLLEGIAEGTTVYADKGYDSAENRQHLEEHQLLDGIMRKACRNRPLSETQTKRNRYLSKTRYVVEQSFGTLHRKFRYARAAYFGLIKVSAQSHLKAMCLNLLKAANRLSAPAAA

SEQ ID NO: 4413 - protein, 231 aa, Neisseria meningitidis
MKLKTLALTSLTLLALAACSKQAETSVPADSVQSSSSAPAAPAELNEGVNYTVLSTPIPQQQAGKIEVLEFFGYFCPHCAHLEPVLSEHIKTFKDDTYMRREHVVWGDEMKPLARLAAAVEMAGESDKANSHIFDAMVNQKINLADTDTLKKWLSEQTAFDGKKLLAAFEAPESQARAAQMEELTNKFQISGTPTVIVGGKYQVEFKDWQSGMTTIDQLVDKVREEQKKPQ

SEQ ID NO: 4414 - protein, 207 aa, Neisseria meningitidis; identical to SEQ ID NO: 1132

SEQ ID NO: 4415 - protein, 240 aa, Neisseria meningitidis; identical to SEQ ID NO: 2593

SEQ ID NO: 4416 - protein, 288 aa, Neisseria meningitidis; identical to SEQ ID NO: 464

SEQ ID NO: 4417 - protein, 549 aa, Neisseria meningitidis
MKQSARIKNMDQTLKNTLGICALLAFCFGAAIASGYHLEYEYGYRYSAVGALASVVFLLLLARGFPRVSSVVLLIYVGTTALYLPVGWLYGAPSYQIVGSILESNPAEAREFVGNLPGSLYFVQALFFIFGLTVWKYCVSGGGVFADVKNYKRRSKIWLTILLTLILSCAVMDKIASDKDLREPDAGLLLNIFDLYYDLASAPAQYAAKRAHILEAAKKASTWHIRHVAPKYKNYVVVIGESARSDYMNVYGFPLPDTPFLSQTKGLLINGYQSTAHATNLSLPQTLGLPGEPNNNIVSLAKQAGFRTAWLSNQGMLGHFANEISTYALRSDYPWFTQRGDYGKSAGLSDRLLLPAFKRVLIGNAGTKPRLIVMHLMGSHSDFCTRLDKDARRFQYQTEKISCYVSTIAQTDKFLEDTVKILNENKESWSLVYFSDHGLMHVGKGGERTLTHGAWKRQSYGVPLVKISSDDTRREMIKVRRSAFNFLRGFGSWTGIETDELPDDGYDFWGNVPDVQGEGNNLAFIDGLPDDPAPWYAGKGKSTKNTSKK

SEQ ID NO: 4418 - protein, 114 aa, Neisseria meningitidis
MRRKALLYSKRHDFLTRSDKQPDAMKHPSLCRRNRSILFQTALTPLPDMIGRLFRIFFFFALAALIINRLFSRRQKRALRDVAKISAWVLLGAAAAMLFWYLFMLYFKHIPDSY

SEQ ID NO: 4419 - protein, 735 aa, Neisseria meningitidis
MFPDQSAPNLLQGLNPEQLSAVTWPPQSALVLAGAGSGKTRVLTTRIAWLLQSGQASVHSIMAVTFTNKAAKEMQTRLGAMIPVNVRAMWLGTFHGLCHRFLRLHHRDAGLPSSFQILDSGDQLSLIKRLLKSLNIAEEIIAPRSLQGFINAQKESGLRASVLSAPDPHTSRMIECYAEYDKICQREGVVDFAELMLRSYEMLQSNEILRQHYQNRFNHILVDEFQDTNKLQYAWLKLMAGGNAAVFAVGDDDQSIYRFRGANVGNMTALMEEFHIDAPVKLEQNYRSVGNILAAANAVIENNDERLGKNLRTDAEAGDKIRYYSAFTDLEEARFILDETKALEREGWDLDEIAVLYRSNAQSRVIEQSLFRSGIPYKIYGGLRFYERQEIKHALAYLRLAVNPDDDNALLRVINFPPRGIGARTVENLQTASNEQGITLWQAACNAGAKAAKVVAFVRLIEALRNQVGQLSLSEIIVGILKDSGLTEHYRTQKGDNQDRLDNLDELVNAAIEFKPEDSNFEILPENISDDPAFPILAFLSNATLESGENQAGVGEKAVQLMTVHAAKGLEFNAVFLTGMEEGRFPSEMSLAERGGLEEERRLMYVAITRARKRLYITMAQQRMLHGQTQFGIVSRFVEEIPPEVLHYLSVKKPAYDSYGNTRQTAASKDKIIDDYKQPQTYAGFRIGQNVRHAKFGTGVIIDAADKGESARLTINFGKQGVKELDTKFAKLEEM

SEQ ID NO: 4420 - protein, 290 aa, Neisseria meningitidis
VKGLDYCRQKAEESRSSFLSGFRFLTQKKRDAVTVLYAFCRELDDVVDECSNPDVAQATLNWWRGDLDKVFGGEMPEHPVNQALQQVKETFKLPKYELEALIDGMQMDLAQARYGSFEELKLYCHRVAGVVGCLIARILGFSDGKTLEYADKMGLALQLTNIIRDVGEDARNGRIYLPMEEMQRFDVPASVILQCRPTENFTELMAFQIKRARETYREAVSLLPDADKKAQKVGLVMAAVYYALLNEIDRDGAQNVLKYKIALPSPRKKRIALKTWLFGFKPRPGTPERA

SEQ ID NO: 4421 - protein, 128 aa, Neisseria meningitidis
MSNNIPAELKYVASHEWLRLEEDGTITVGITHHAQELLGDIVFVELPEVGANLAAEEQAGVVESVKAASDVYAPIAGEVVAVNEDLPSAPETANSDPYGAGWFFKLKPANVADYDVLLTAEQYAGEVD

SEQ ID NO: 4422 - protein, 253 aa, Neisseria meningitidis
MMGDSVIYYVEQADEPVNRAGERARKTFKYFWRELFWERRRIIPALDFAMVKAPFFQDGEDGEICEHMWIDDIYFDGLYIYGVLNNEPGELTNVEQGESVCIPVDDISDWMFVCNGIPYGGFTIQAMRGQMTEEERTEHDAAWGIDFGDPGQVLLVYEEKEHPENLEEHPMCRNCIDDFRQQLSQNPDFLHEQDEDGYTPLHHDAIAGNALMVKAMLEYGANPASTTSEGYTALDFARLTGWQNVADLLEPRH

SEQ ID NO: 4423 - protein, 79 aa, Neisseria meningitidis
LANGKNGTLYIGVTMNLPERVWQHKNHVNIDGFTARYDVHDLVWYQFFENMPEAVAKEKTMKKWRREWKIKLIEEQNPE

SEQ ID NO: 4424 - protein, 85 aa, Neisseria meningitidis
MKPRNLFFAGCLLTSATFAEDIGVPVELINVGNRIAMPSEGESLALLPFAEDVPPVRDAMPSEVPKSAAGGDVRGNRMGMPINIG

SEQ ID NO: 4425 - protein, 620 aa, Neisseria meningitidis
MALLQISEPGMSAAPHRHRLAAGIDLGTTNSLVATVRSGSAACLPDTDGCVTLPSVVRYLENGGIEVGKTALSAQKSDPLNTVSSAKRLIGRTLADLHQNTHYLPYRFGDNQRVIELHTRQGVKTPVEVSAEILKTLKSRAEETLGGDLVGVVITVPAYFDDAQRQATKDAARLAGLNVLRLLNEPTAAAIAYGLDNASEGTFVVYDLGGGTFDVSVLQLTKGLFEVKATGGNSALGGDDFDHRLFCYLLEQNGLSQLNEQDSQLLLSLVRAAKEQLTTQTEARIQATLSDGMAIDTSISRAEFHNLTQHLVMKTLEPVKQALKDAGVGKNEVKGVIMVGGSTRMLHVQQAVATFFGQTPLNNLNPDEVVALGAAIQANVLAGNKTDGEWLLLDVTPLSLGLETYGGLAEKIIPRNSTIPTARAQDFTTFKDGQTAMTIHVVQGERELVADCRSLAKFTLRGIPPMAAGAARIRVTFQIDADGLLSVSAQEQSTGVHAQIEVKPSYGLDDDTITQMLKDSMSNAAEDMAARARAEAVVEAESLTDAVNAALELDSDLLDAEELQQIRQGIADLQGRLKDGKAEDIRAAAAKLGSITDNFAAKRMNRNIQRALTGQSVDNI

SEQ ID NO: 4426 - protein, 611 aa, Neisseria meningitidis
VNTTPIHSKLAEITGRIIERSRPTREKYLAKIRSAKQMGRLERNQLGCSNLAHGYAAMPKSIKIEMLQETVPNLGIITAYNDMVSAHQPFKDFPDQIKDEAQKNGATAQVAGGTPAMCDGITQGYAGMELSLFSRDVIAMSTAVGLSHQMFDGSLFMGVCDKIVPGLMIGALSFGHIPGIFVPAGPMSSGIGNKEKARTRQLFAEGKVGRDELLKSEMGSYHSPGTCTFYGTANSNQMMMEMMGVHLPAAAFVHPYTDLREALTRYAAGHLARGIKNGTIKPLGEMLTEKSFINALIGLMATGGSTNHTMHLVAMARAAGVILNWDDFDEISSIIPLLIRVYPNGKADVNHFTAAGGLPFVIRELLNAGLLHDDVDTVVGHGMRHYTKEPFLIDGKLEWREAPETSGNDDILRKADNPFSPDGGLRLMKGNIGRGVIKVSAVREGCRIIEAPAIVFNDQREVLAAFERGELERDFVCVVRYQGPRANGMPELHKLTPPLGILQDRGFKVALLTDGRMSGASGKVPASIHMTPEALMGGNIAKIRTGDLIRFDSVSGELNVLINETEWNAREVESIDLGANQQGCGRELFANFRSMTSSAETGAMSFGGEFA

SEQ ID NO: 4427 - protein, 236 aa, Neisseria meningitidis
MSPVLYLIPTPLGTPDTPCLLPHEQQAIVGLTDFVVEAEKTARAHLKHLGVTMPIRELNLQTLNEHTDLKTLPELLKPLQEGRSMGIVSEAGCPAVADPGANLVALAHKHGFEVRPLVGPSSLLLALMASGANGQSFAFKGYLPSEKNERIQSLKALEQRSRQQNETQLFIETPYRNDALLADAVENLHSETRLCVAADLTLPTQEIISQTVVQWRKRKEMPNLKKRPTIFVMYAG

SEQ ID NO: 4428 - protein, 190 aa, Neisseria meningitidis
MMVRRLIIGISGASGFQYGVKALELLRAQDIETHLVVSKGAEMARASETAYARDEVYALADFVHPIGNIGACIASGTFKTDGMLVAPCSMRTLASVAHGFGDNLLTRAADVVLKERRRLVLMVRETPLNLAHLDNMKRVTEMGGVVFPPVPAMYRKPQTADDIVAHSVAHALSLFGIDTPDSAEWQGMAD

SEQ ID NO: 4429 - protein, 271 aa, Neisseria meningitidis; identical to SEQ ID NO: 1333

SEQ ID NO: 4430 - protein, 685 aa, Neisseria meningitidis
MPEQNRILCRELSLLAFNRRVLAQAEDKNVPLLERLRFLCIVSSNLDEFFEVRMAWLKRENKLHPRRRLDNGKMPSETIADVTEAARSLIRHQYDLFNNVLQPELARESIHFYRRRNWTGAQKKWIEDYFDRELLPILTPIGLDPSHPFPRPLNKSLNFAVELDGTDAFGRPSGMAIVQAPRILPRVVPLPSELCGGGHGFVFLSSILHAHVGKLFPGMNVKGCHQFRLTRDSDLTVDEEDLQNLRAAIQNELHDREYGDGVRLEVADTCPAYIRDFLLAQFKLTAAELYQVKGPVNLVRLNAVPDLVNRPDLKFPTHTPGRLKALGKTASIFDLVRQSPILLHHPYQSFDPVVEMMREAAADPDVLAVKMTIYRTGTRSELVRALMKAALAGKQVTVVVELMARFDEANNVNWAKQLEEAGAHVVYGVFGYKVHAKMALVIRREDGVLKRYAHLGTGNYHQGTSRIYTDFGIITADEQITADVNTLFMEITGLGKPGRLNKLYQSPFTLHKMVIDRIARETEHAKAGKPARITAKMNSLIEPTVIEALYRASAAGVQIDLIVRGMCTLRPGVKGLSENIRVRSIIGRQLEHARVYCFHNNGADDTFISSADWMGRNFFRRIETAAPITAPELKKRVIREGLEMALADNTHAWLMQPDGGYIRAAPAEGESEADLQNDLWTLLGG

SEQ ID NO: 4431 - protein, 280 aa, Neisseria meningitidis
MIQHAGLGYRRDLAEDFLSLSENSPICFIEAAPENWLKMGGWARKQFDRVAERLPLALHGLSMSLGGQAPLDTDLIDGIKEMMRRYDCTFFSDHLSYCHDGGHLYDLLPLPFTEEMVHHTARRIREVQDRLGCRIAVENTSYYLHSPLAEMNEVEFLNAVAREADCGIHLDVNNIYVNAVNHGLLSPEAFLKNVDADRVCYIHIAGHDVETPELLIDTHGAAVLPTVWDLLELAYAKLPTIPPTLLERDFNFPPFAELEAEVAKIADYQTRAGKECRRAA

SEQ ID NO: 4432 - protein, 354 aa, Neisseria meningitidis
MLVLGIESSCDETGVALYDTERGLRAHCLHTQMAMHAEYGGVVPELASRDHIRRLVPLTEGCLAQAGVSYGDIDAVAFTQGPGLGGALLAGSSYANALALALGKPIIPVHHLEGHLLSPLLAEEKPDFPFVALLVSGGHTQIMAVRGIGDYALLGESVDDAAGEAFDKTAKLLGLPYPGGAKLSELAESGRPEAFVFPRPMIHSDDLQMSFSGLKTAVLTAVEKVRAENGADDIPEQTRNDICRAFQDAVVDVLAAKVKKALLQTGFRTVVVAGGVGANRKLRETFGNMTVQIPTPKGKPKHPSEKVSVFFPPTAYCTDNGAMIAFAGAMHLGKGREVGAFNVRPRWPLSEIVR

SEQ ID NO: 4433 - protein, 290 aa, Neisseria meningitidis
MPILNHIALIGVGLIGGSFVLDLKRQGLVRTVTGIDTDRDNLERALERGVIDRASVAIDADSIGGADLVLIATPVATFPAILTALRPVLPEHTWISDVGSTKSSVIEAFRRCLPDRLHRCIAAHPIAGSDRSGAQAAQFGLFRHRKLIITPHGGEHSDGIALIENLWHAVGAEIYTMDAQRHDAVFAAVSHMPHLTAFAYVHQILDHPDGQEYLKFAATGFRDFTRIASGHPAVWADICLANKDSLLQLVQGLGKQLDVLADILTADDREALYRYFEEAKTTRDRWLDGN

SEQ ID NO: 4434 - protein, 266 aa, Neisseria meningitidis
LLIHYIDIAKRNFVIKGIAHTIEYLKKHKVALVVTESTGGLEILAAKAIRRAGIAVIIANPRQTHQFAQSQPLTKTDAKDAKMPAFFTQMMTQKEDWQTMPYHPPTEAEEVLEALNNLPILTGLTNRTNKSTTTPTRILTAKPKWRSKSKASVRRRLRWRCCPNGGCRTNGRVWPALPRTRERAGKPNSKAAALAEGLRCVRHCIWLPWRHVLNRLFGISTNACCPRVSRIMLPLRHVCVNCRYRMPGCVIILPKTIPPKTVSGRL

SEQ ID NO: 4435 - protein, 321 aa, Neisseria meningitidis
MSYTQLTQGERYHIQYLSRHCTVTEIAKQLNRHKSTISREIRRHRTQGQQYSAEKAQRQSRTIKQRKRQPYKLDSQLIQHIDTLIRRKLSPEQVCAYLCKHHQITLHHSTIYRYLRQDKSNGSTLWQHLRICSKPYRKRYGSTWTRGKVPNRVGIENRPAIVDQKSRIGDWEADTIVGKGQKSALLTLVERVTRYTIICKLDSLKAEDTARAAVRALKAHKDRVHTITMDNGKEFYQHTKITKALKAETYFCRPYHSWEKGLNENTNGLIRQYFPKQTDFRNISDREIRRVQDELNHRPRKTLGYETPSVLFLNLFQPLIH

SEQ ID NO: 4436 - protein, 143 aa, Neisseria meningitidis
MSSNAWLFWALASAGFASLTAIFAKMGLQGIDSDFATFIRTLVILAALLLFLTYTGKWQGVNGFTGHNWTFLILSGLATGASWLAYFKALQLGNASQVAPVDKFSLVLVALMAVVFLNERPSTQEWIGLGLVTAGVLVLALKR

SEQ ID NO: 4437 - protein, 273 aa, Neisseria meningitidis
MKPYSANPNLTEPRRLRVLLIAAALGFLLLMLVVPLVAVFYEALKGGWDLYLKSLNDPEAWSAIKLTLITALIVVPVNAVLGVAMAWLLTRFDFRGKQLLTTLLDLPFSVSPVVAGLMFVLLFGAHTALGGRLEAQGIQIIFAIPGIVLATLFVTFPFVAREIIPLMQAQGDSEEQAALILGASGWQMFWRVTLPNIKWALLYGIILTNARAMGEFGTVSVVSGHIRGETNTVPLLVEIFYNEYNFTGAFALSGVLALLALATLAVQNIITKL

SEQ ID NO: 4438 - protein, 216 aa, Neisseria meningitidis
MRKSRLSRYKQNKLIELFVAGVTARTAAELVGINKNTAAYYFHRLRLLIYQNSPHLEMFDGEVEADESYFGGQRKGKRGRGAAGKVAVFGLLKRNGKVYTVTVPNTQTATLFPIIREQVKPDSIFYTDCYRSYDVLDVSEFSHFSFAETSFSYQSQHTFCRTTKPYWNELLEPGKTSFTQVRHSQSAFAVFKGVRMAFQQDKSSCSILKQLVKPSL

SEQ ID NO: 4439 - protein, 268 aa, Neisseria meningitidis
MKSSFVQTLTIAGSDSGGGAGIQADLKTFQMRGVFGTCVITAVTAQNTLGVSAVHLVPTETITAQIQAIREDFDIRAYKIGMLGTAEIIECVADKLKHCDFGRRVLDPVMIAKGGAPLLQDSAVAALTRLLLPDTDVLTPNLPEAEALTGVHIENRKDAERAAKILLDYGVKNVVIKGGHLNGSSSGRCTDWLFTQNETLELDNPRFPTAHTHGTGCTFSACITAELAKGLDVCKAVQTAKAYITAAISSPLEIGAGHGPVNHWAYRD

SEQ ID NO: 4440 - protein, 134 aa, Neisseria meningitidis
MNTKPCPICTAQDEDILLQTPKLRVIAVHNDSGSPTFCRVIWRKHIAEMTDLSAAERGELMEMVYKVEAAMRQVFQPAKINLASLGNVVPHLHWHIIARFENDASFPAPIWANPVRKHGMTLPQDWTEQLKKLL

SEQ ID NO: 4441 - protein, 172 aa, Neisseria meningitidis
MTTHFVVMGVCGCGKTTAALSLQKHLGQCPYAEGDEFHTQAKRDKMGAGIPLTDEDRYPWLGNLRDWMTKQAQNGANHTIVTCSALKRGYRDILRGAEGKAAFIHLSPPQDINLERMMSRKGHYMKAGMLDSQLEILEELGEGEYGVKIANPGTPEAVEADILNWVASENLL

SEQ ID NO: 4442 - protein, 154 aa, Neisseria meningitidis
MKELDKIDFRILKILQQNARIPMTELAEKVGLSTTPVTERVRRLEREHYISGYHAHLNPHLLGKPLLVFVELKLQSKSGNIFEDFKKEVLKIPQIMECHLVSGEYDYLIKVRLPDMSAYRDMLGNILLQLPAASESRSYVVMEEVKENPVLDLD

SEQ ID NO: 4443 - protein, 158 aa, Neisseria meningitidis
METRAQKKQRLIRLIHVAKSQLMMDDGEYRALLANLSCGKTSSTKLSVGELELAVKALQMRGFVVATKAQAASGKRDLPVHMPNRMMEAQVKKIRALWLEQHHLGAVRNPSELGLSRFVKRMTGIDYHGWLGTDDAVRVIEHLKKWKARVENGGRKSA

SEQ ID NO: 4444 - protein, 144 aa, Neisseria meningitidis
MCGLWLLRALTAQLPQQRYAALFITLFFAAVLVFGRHDSMYWYPVLVNLMMLAVFGGSLFAGQTVIERLARLQQPDLPEKAVRYTRRVTQVWCVFFIINGTLAALLARLGRYDWWAVYTGVIAYVLMGMPFAGEWLYRKLVLKV

SEQ ID NO: 4445 - protein, 311 aa, Neisseria meningitidis
MSVLIIVEHDNKQLNPTTLHAVTAAAKLGKIDLLIAGSGASAVVEFAKQVAGVEKVLVADAAHYAEGLAEELAPLVVKLAADYCYVAATATTFGKNLLPRVAALLDVPQISDLTEIVDNTTFVRPIYAGNAFETVQADSEKLVLTFRATVFDAVAAQGGNAEVINVEATPAQNLSRFVNRQLSHSDRPELTQAKVIVSGGRALGSAEKFNEVLTPLADVLGAAIGASRAAVDAEYAPNDAQVGQTGKVVAPQLYFAIGISGAIQHVAGMQDSKVIVAINKDADAPIFNVADYGLVGDLFEIVPQLTEVLKN

SEQ ID NO: 4446 - protein, 85 aa, Neisseria meningitidis
LPYYLYCLRLRRLVLIFVNPLYLHQFHETQVGSVKQLIAHFDRLIDELDKQIDDHTHTHFDGKAQVAEQIKGIGSITTATLGARG

SEQ ID NO: 4447 - protein, 156 aa, Neisseria meningitidis
MYDVNTHDVRRFFARVWQQRLNPLQLSALEQKALRIVEAHPEYHRYLERIEDHLDTDWLPENGESNPFLHMSLHLSVQEQAGIDQPHGIRAIHDTLCAKHGWLEAEHEMMEALAETLWTAQRYGTGLDVNFYMTRLRKLIGLGAENQARLNPHEIA

SEQ ID NO: 4448 - protein, 152 aa, Neisseria meningitidis
METPKLSVEAIEKGTVIDHIPAGRGLTILRQFKLLHYGNAVTVGFNLPSKTQGSKDIIKIKGVCLDDKAADRLALFAPEAVVNTIDHFKVVQKRHLNLPDEIAEVFRCPNTNCAGHGEPVKSRFYVKKHNGQTRLKCHYCEKTYSRDSVAEA

SEQ ID NO: 4449 - protein, 725 aa, Neisseria meningitidis
MQQKIRFQIEGMTCQACASRIEKVLNKKDFVESAGVNFASEEAQVVFDDSKTSVADIAKIIEKTGYGAKEKTEDTLPQPEAEHHIGWRLWLLFTINVPFLIGMVGMMLKGLNWTRHDWMLSPLLQFALASVVQLWLAIPFYKSAWASIRGGLANMDVLVTIGTVSIYLYSVYMLFFSPHAAHGMAHVYFEAGVMVIGFVSLGKFLEHRTKKSSLNSLGLLLKLTPTQVNVQRDGEWKQLPIDQVQIGDLIRANHGERIAADGVIESGSGWADESHLTGESNPEEKKAGGKVLAGALMTEGSVVYRAAQLGSQTLLGDMMNALSEAQGSKAPIARVADKAAAVFVPAVVGIALLTFIVTWLIKGDWTVALMHAVAVLVIACPCALGLATPAAIMVGIGKAVKHGIWFKDAAAMEEAAHVDAVVLDKTGTLTEGRPQVAAVYCIPDSGFDEDALYRIAAAVEQNAAHPLARAIVSAAQARSLDIPTAQNAQTVVGSGIAAEVESVGLVKAGKAEFAELTLPKFLDGVWDIASIVAVSVDNKPIGAFALADALKADTAEAIGRLKKHNIDVYIMSGDNQGTVEYVAKQLGIAHAFGNMSPRDKAAEVQKLKAAGKTVAMVGDGINDAPALAAANVSFAMKGGADVAEHTASATLMQHSVNQLADALSVSRATLRNIKQNLFFAFFYNILGIPLAALGFLNPVIAGAAMAASSVSVLSNALRLKRVKID

SEQ ID NO: 4450 - protein, 478 aa, Neisseria meningitidis
MPLLSVEFALFFLAFLPIYWGLAKYPSVQNLLLLAAGMGWLYHIGPVFAAIVVLYSSCVYLLGELLRSDRENTRRFWLGCGIAVSLTVLGFFKYFDFFRPLIAQYAGQGGAIDILMPLGLSYYTFQSIAYLVYCFRAPHAARFEWHELLLHLSFFPTVTSGPIIRAAAFKSADGEQAGALAQIRTRQPRSPVRPALAVSLILLGIAKKWWLAGMLAENWVSPVFENPAQFDGWGVLGGVYGYTFQLFLDFSGYSDLVIGMSMLLGFRLPKNFSAPLRAANIRAFWDKWHISLSTWIRDYIYIPLGGSKKGFLRTQLNLMAAMVLSGIWHGYGWNFLIWGALHGTALVLLNTGDRYFGRNALCRLKYLAPLSWFVTFHFVCLTFVVFNTANPDDAGAVFNALFANANGWNAPQRADMLLLASFASVMLLYPYLQRAFDGAVKGLEKIPMWLWFIPVSAVLLLIIVFAPSGIPGFIYANF

SEQ ID NO: 4451 - protein, 592 aa, Neisseria meningitidis
MTVLKPSHWRVLAELADGLPQHVSQLARMADMKPQQLNGFWQQMPAHIRGLLRQHDGYWRLVRPLAVFDAEGLRELGERSGFQTALKHECASSNDEILELARIAPDKAHKTICVTHLQSKGRGRQGRKWSHRLGECLMFSFGWVFDRPQYELGSLSPVAAVACRRALSRLGLKTQIKWPNDLVVGRDKLGGILIETVRTGGKTVAIIGIGINFVLPKEVENAASVQSLFQTASRRGNADAAVLLETLLAELDAVLLQYARDGFAPFVAEYQAANRDHGKAVLLLRDGETVFEGTVKGVDGQGVLHLETAEGKQTVVSGEISLRSDDRPVSVPKRRDSERFLLLDGGNSRLKWAWVENGTFATVGSAPYRDLSPLGAEWAEKADGNVRIVGCAVCGEFKKAQVQEQLARKIEWLPSSAQALGIRNHYRHPEEHGSDRWFNALGSRRFSRNACVVVSCGTAVTVDALTDDGHYLGGTIMPGFHLMKESLAVRTANLNRHAGKRYPFPTTTGNAVASGMMDAVCGSVMMMHGRLKEKTGAGKPVDVIITGGGAAKVAEALPPAFLAENTVRVADNLVIHGLLNLIAAEGGESEHT

SEQ ID NO: 4452 - protein, 119 aa, Neisseria meningitidis; identical to SEQ ID NO: 1252

SEQ ID NO: 4453 - protein, 418 aa, Neisseria meningitidis
VANKLRNYTINFGPQHPAAHGVLRMILELDGEQIVRADPHIGLLHRGTEKLAETKTYLQALPYMDRLDYVSMMVNEQAYCLAVEKLAGIDVPIRAQYIRVMFAEVTRILNHLMGIGSHAFDIGAMTAILYAFRDREELMDLYEAVSGARMHAAYFRPGGVYRDLPDFMPKYESSKFRNAKVLKQLNESREGTMLDFIDAFCERFPKNIDTLETLLTDNRIWKQRTVGIGVVSPERAMQKGFTGVMLRGSGVEWDVRKKQPYEVYDKMDFDIPVGVNGDCYDRYLCRMEEMRQSVRIIKQCSEWLRVNPGPVITTNHKFAPPKRTEMKTGMEDLIHHFKLFTEGMHVPEGETYTAVEHPKGEFGVYIISDGANKPYRLKIRAPGFAHLQGMDEMAKGHMLADVVAIIGTQDIVFGEVDR

SEQ ID NO: 4454 - protein, 310 aa, Neisseria meningitidis
MKQNRTFTFPDFRTVYSYAPLYRLQHLKYTLRKFFGKKEIYAFEQFVNASPIRQGLFLHCPQDAYPLLREFVDRRFNCKRRLDAMTADFLMAEKLFGTDILHQMEDYRFHLVLAHLSDGISLWLNRNDNCVEEGAWSLSLRDEAGNRLYMATFAFVGTHLLAASVQGPAGEEAKDTVRRITKQLHGLRPQQLMVTALQYFAAALKLDGAIGIAQKHQVKLRWKLKKRVKMNYDAFWQEYGASLERDGYWHLPQTPARKDLADIESKKRSMYRKRYEMLDNMVAEMKDSLKTEARGISDGIQTEKPLRRTA

SEQ ID NO: 4455 - protein, 388 aa, Neisseria meningitidis
MRKFNLTALSVMLALGLTACQPPEAEKAAPAASGETQSANEGGSVSIAVNDNACEPMELTVPSGQVVFNIKNNSGRKLEWEILKGVMVVDERENIAPGLSDKMTVTLLPGEYEMTCGLLTNPRGKLVVTDSGFKDTTNEADLEKLSQPLADYKAYVQGEVKELVAKTKTFTEAVKAGDIEKAKSLFADTRVHYERIEPIAELFSELDPVIDAREDDFKDGAKDAGFTGFHRIEYALWVEKDVSGVKEIAAKLMTDVEALQKEIDALAFPPGKVVGGASELIEEVAGSKISGEEDRYSHTDLSDFQANVDGSKKIVDLFRPLIEAKNKALLEKTDTNFKQVNEILAKYRTKDGFETYDKLGEADRKALQASINALAEDLAQLRGILGLK

SEQ ID NO: 4456 - protein, 352 aa, Neisseria meningitidis
MRPLNVQIRLGNLRHNYRILKEMHGGKLLAVVKADAYGHGAVRCAFALADLADGFAVATIDEGIRLRESGITHPIVLLEGVFEASEYEAVEQYSLWPAVGNQWQLEALLVRHWKKPVKVWLKMDSGMHRTGFFPHDYASAYAALKQSEYVDSIVKFSHFSCADEPESGMTEIQMEAFDLGTKGLEGEESLANSAAILNIPEARRDWGRAGLALYGISPFGGGDDRLKPVMRLSTRIFGERVLQPHSPIGYGATFYTSKSTRVGLIACGYADGYPRHAPSNSPVAVDGKLTRVIGRVSMDMMTIELDASQEGLGHEVELWGDTVNINTVAEAAGTIPYELMCNIKRAKFTYIE

SEQ ID NO: 4457 - protein, 336 aa, Neisseria meningitidis
MSDTPATRDFGLIDGRAVTGYVLSNRRGTRVCVLDLGGIVQEFSVLADGVRENLVVSFDDAASYADNPFQINKQIGRVAGRIRGAAFDINGRTYRVEANEGRNALHGGSHGLAVTRFNAVAADGRSVVLRSRLQQSADGYPNDLDLDISYRLDEDDRLTVSYRATALGDTVFDPTLHIYWRLDAGLHDAVLHIPQGGHIPADAEKLPVSTVSDGLEVFDFSRPKPLDAAVAALRRETGRAGFDDAYRVPSDIGRPAAVLQAGRRRRISIYSDRNGLVIFTAAPQDFARHDAGVYDALATEAQTLPDSLNWPEFGNIRLNKGDTREATIAYGIESLS

SEQ ID NO: 4458 - protein, 348 aa, Neisseria meningitidis
MKMQAVVVNKNVAGDVEIVEREVRPLEYGEALVEVEYCGVCHTDLHVAAGDYGEKPGRVLGHEGIGLVKEVADGVKNLKVGDRVSIAWLFQSCGSCEYCNTGRETLCRSVLNAGYTADGGMATYCIVSADYAVKVPEGLDPAQASSITCAGVTTYKAIKVSSVRPGQWIAIYGAGGLGNLGVQYAKKVFGAHVVAIDINDDKLAFAKETGADLVVNAAKEDAAKVIQEKTGGAHAAVVTAVSAAAFNSAVNCVRAGGRVVAIGLPPESMDLSIPRLVLDGIEVVGSLVGTRKDLEEAFQFGAEGLVVPKVQLRALDEAPAIFQEMREGKITGRMVIDMKKECGCGHHH

SEQ ID NO: 4459 - protein, 206 aa, Neisseria meningitidis
MTTHHVELRKVTKRFGAQKAVNQVDLVLKAGESVGLAGHNGAGKSTIMKLILGLITPTEGEVMLLGERTGSKAGARLRSQIGYLPETVALHPSLTGIETLDFYAKLKKQPLTQNRGLLERVGISQAAHRRVGTYSKGMRQRLALAQALLGEPKVLLFDEPTTGLDPASRQMFYEVVRELNGRGATVLLSTHALAELDGHADRIIVD

SEQ ID NO: 4460 - protein, 520 aa, Neisseria meningitidis
MAKQSNAAPQKRGFFARLFGRREAVPKTARRNFAGARPVGSLASWQPQNWSADALARSDLDRLRARARSLARDNDYMRKFLNMVESNVIGRDGFALQMRVLLDNAEKPDALANKAIETAFSRWARRGVCDVTGQMSFTDLQRLLIRSVARDGEVLIRHISGFDNDYGYALQVLDIDRLDTGYNVPQQNGRNAVRMGVELNSYSRPVAYWLRTAHPGESYGQTNTGNLRERVPAEQISHIFLHDRPEQRRGFPWVASAIIGLQNLSGYQEAAIIAARVGASKMGFFKQTEDADNFMPPIDGQEVDNGRGSIDLIDSVEPGTFHELPQGYDFTPFDPDYPHANYDAFVKASLRGIASGLNVAYHSLANDLEGVNFSSIRSGTLEERDTWMTLQNWFADAFLYDVFDRWIEAALLMGAIKMPSGKSLPAGKLDKFKACNWQGRRWSWVDPLKDINAHKEAVALAVKSRRDICAEMGLDFEDVITQIEQENQMLAGKGIIADVKPAASAAEPESEDNPNEENEA

SEQ ID NO: 4461 - protein, 84 aa, Neisseria meningitidis
MKHDCTNGKPKTPNQRQRILARLRQGSVTSWELSQMGILGYNTRIMELRQAGHNIVTTMEEIQNQFGETVKRGRFSLVSEGRQS

SEQ ID NO: 4462 - protein, 163 aa, Neisseria meningitidis
MRAVIQKTVGAKVDVVSENGTETCGKIDGGFVVLLGVTHSDTEKDARYVADKIAHLRVFEDEAGKLNLSLKDVGGSVLLVSQFTLYADAASGRRPSFSKAAPAEQAKRLYLHTAELLRGHGIHVETGRFRTHMQVSLCNDGPVTILLDSFMTRISPKMKVVPD

SEQ ID NO: 4463 - protein, 369 aa, Neisseria meningitidis
MKKRKILPLAICLAALSACTAMEARPPRANEAQAPRADEMKKESRPAFDAAAVFDAAAVPVSDSGFAANANVRRFVDDEVGKGDFSRTEWQDFFDKAAYKADIVKIMHRPSTSRPWYVFRTGNSGKAKFRGARRFYAENRALIDDVAQKYGVPAELIVAVIGIETNYGKNTGSFRVADALATLGFDYPRRAGFFQKELVELLKLAKEEGGDVFAFKGSYAGAMGMPQFMPSSYRKWAVDYDGDGHRDIWGNIGDVAASVANYMKQHGWRTGGKILVSATLAPGADVQAIIGEKTALTRTVADLKAYGIIPGEELADDEKAVLFKLETAPGVFEYYLGLNNFYTVWQYNHSRMYVTAVRDIANSLGGSGL

SEQ ID NO: 4464 - protein, 144 aa, Neisseria meningitidis
MPACFCPHCKTRLWVKETQLNVAQGFVVCQKCEGLFKAKDHLASTKEPIFNDLPEAVSDVKLVHRIGTRAIGKKQISRDEIAGILNGGTTQPDIPPATAATPAAAPQVTVPPAAPARQDGFNWTIATLFALIVLIMQLSYLVIL

SEQ ID NO: 4465 - protein, 213 aa, Neisseria meningitidis; identical to SEQ ID NO: 2136

SEQ ID NO: 4466 - protein, 78 aa, Neisseria meningitidis
MKRLRHRAVSICIRRPSGARLMLTQIPLCLPIMFGCGITKIYECIKTVRSRTVEKVAKWRTCQNARLCARFTRVHRAR

SEQ ID NO: 4467 - protein, 945 aa, Neisseria meningitidis
MLDKYNPAEIESKHYQNWESQGYFQPDMDLTKPSFSIQLPPPNVTGTLHMGHAFNQTIMDGLTRYYRMKGCNTAWIPGTDHAGIATQIVVERQLAAQNVSRHDLGREKFLEKVWEWKEVSGGTITQQMRRVGCSADWTREYFTMDDVRAETVTEVFVRLYEQGLIYRGKRLVNWDPVLGTAVSDLEVESVEEQGSMWHIRYPLADNPAEAVIVATTRPETLLGDVAVAVNPEDERYTHLIGKELILPLTGRTIPVIADEYVEKDFGTGCVKITPAHDFNDYEVGKRHDTRLVNVFDLEAKVLANAEVFNFKGEAQPSFALPEKYAGLDRFAARKQMVADLQEQGFLVEIKAHTLMTPKGDRTGSVIEPMLTSQWFVAMSATPNGGEPDSEFKGLSLADKAKKAVDSGAVRFIPENWVNTYNQWMNNIQDWCISRQLWWGHQIPAWYDEAGNVYVARNQEEAEKQAGKTGLTREEDVLDTWFSSALVPFSTLGWPSETDELKAFLPSNVLVTGYEIIFFWVARMIMMTTHFTGKVPFKDVYIHGIVRDHEGKKMSKSEGNVIDPVDLIDGIDLEKLLVKRTTGLRKPETAPKVEEATKKLFPEGIPSMGADALRFTMASYASLGRSVNFDFKRAEGYRNFCNKIWNATNFVLMNTENQDCGYGATAAEPRGYSFPDMWIIGRLNQTIEQVTQAYKTYRFDLAAETLYSFVWNDYCDWYLELAKVQLQTGCASRQRATRHTLLRVLETALRLLHPIIPFITEELWQTVAPMCDAKTADSIMLARFPEADSGEIVQTAFEQMTVLQDLIGAVRNLRGEMGIQPNVKAPLFVESTDDLADYLKYLPMMTRLTEAQQVAALPESEDAPVAVCNGARLMLKVEIDKAAETARLSKEAEKLQKALDKLNAKLSKPGYTEKAPAHLVEKDKADLAELEDKMAKVQNQLAKLKD

SEQ ID NO: 4468 - protein, 198 aa, Neisseria meningitidis
MKQTVKWLAAALIALGLNQAVWADDVSDFRENLQAAAQGNAAAQYNLGAMYYKGRGVRQDYVEAVRWFRQAAEQGNTLAQTLLGWMYANGRGVRQDDTEAVKWYRQAAEQGLAQAQYNLGVMYNTGRGVRRDYAEAARWFRKAADQGLAQAQFNLGAMYYKGRGVRQDLVLAQEWLGKACQNGNQDGCDNDQRLKAGY

SEQ ID NO: 4469 - protein, 171 aa, Neisseria meningitidis
MKSKLPLILINFSLISSPLGANAAKIYTCTINGETVYTTKPSKSCLSTDLPPIGNYSSERYIPPQTPEPVSSPSNGGQVVKYKAPVKTVSKPAKSNTPPPQQAPSNNSRRSILEAELSNERKALTEAQKMLSQARLAKGGNINHQEINALQSNVLDRQQNIQALQRELGRM

SEQ ID NO: 4470 - protein, 369 aa, Neisseria meningitidis
MKYKRIVFKVGTSSITHSDGSLSRGKIQTITCQLAALHHAGHELVLVSSGAVAAGFGALGFKKRPVKIADKQASAAVGQGLLMEEYTANLSSDGIVSAQILLSRADFADKRRYQNAGGALSVLLQRRAVPIINENDTVSVEELKIGDNDTLSAQVAAMIQADLLVLLTDIDGLYTGNPNSNPDAVRLDKIEHINHEIIEMAGGSGSANGTGGMLTKIKAATIAAESGVPVYICSSLKPDALAEAAEHQADGSFFVPRAKGLRTQKQWLAFYSESRGSVYVDEGAEHALSEQGKSLLMSGIAGIEGHFSRMDTVTVYSKATKQPLGKGRVLFGSAAAEDLLKSRKAKGVFIHRDDWISITPEIHLLLTEF

SEQ ID NO: 4471 - protein, 391 aa, Neisseria meningitidis
MHTISFPNRTRLTALPPLSLYIHIPWCIKKCPYCDFNSHSLKNGLPEAAYIDALLTDLQLELPNIWGRPVETIFFGGGTPSLFQAESIDRLLSGVRSLLRLQPEAEITLEANPGTFEIEKFQGFKDAGITRLSIGVQSFNDDMLSRLGRVHNGKEALTAIDTALKLFDKVNIDLMYALPNQTVQTALDDVQTAIATGATHISAYHLTMEPNTPFGHTPPKGLPQDEAALDIEDAVHGALESAGFVHYETSAFAKPAMQCRHNLNYWQFGDYLGIGAGAHGKISYPDRIERTVRRRHPNDYLALMQNRPSEAVERKTVAAEDLPFEFMMNALRLTDGVPAAMLQERTGVPSAKIMAQIETARQKGLLETDPAVFRPTEKGRLFLNDLLQCFL

SEQ ID NO: 4472 - protein, 128 aa, Neisseria meningitidis
MWKIYKENSTDLNFAIGSIYCQAINLTEFKMWVEKIIREVDLDEIPNYFFDLIDFQSLYDLIDIIGFVPENNLSKNQDNALTGIAFLRGIDVYDPPVSKEKALKALEKHPEIYQRFQHFFPFVELPPL

SEQ ID NO: 4473 - protein, 464 aa, Neisseria meningitidis
MAAAYHHGTETIRIDGGSNPVYTVDGAITAIVGTAPVGAVNELTVCQIKKDFARFGGELTGKGFTLPDAAHIWTRYGSGVAYVVNVCDPAKHKTTVSNEVLAVDPDTLTAKTAKPALQSGYAVSDGNSLLTENTHYTINTLTGEIVFKTKPSAAEISYTYTDPTKVTEADIIGAYVAATGKRTGLELLTEGFNRQGADAKIIIAPEYDGNAGVRAAMEIIAGKLKAIAYAAAPKGTGLGKALEGRGPLGSINFQTSSDRCQLFYPYAVGLLGLESLATHAAGLRMKTDVEQGYWFSISNRELLGVTGVEIGLTARADDPQSETNRLNEKGITTVFNSYGTGYRMWGNRLACFPTVSHIKNFEVAQRTGDIIDESIRRAELQYVDRPIDDALIDSLIETVRTYLGTLPSIVGFSVGLDYDYDLPDAFSKGQVPIVYDYTPKLPAERMTNTSVMTRKYLANLVSAS

SEQ ID NO: 4474 - protein, 107 aa, Neisseria meningitidis; identical to SEQ ID NO: 178

SEQ ID NO: 4475 - protein, 451 aa, Neisseria meningitidis
MKAPELLLPAGGLERMRTAYDYGADAVYAGSPRYSLRARNNEFAKLDVLEQGIKEAHERNKKFFLTVNTLPHNSKLKTFVSDMEPLIAMKPDALIMADPGLIMTVREKWPEMPIHLSVQANTTNYWGVKFWQNIGVERIILSRELSMEEIAEIRQQCPDIELEVFIHGALCIAYSGRCLLSGYFNHRDPNQGTCTNSCRWDYKVHNATESDAGDAQLLQGFNFEKAQEEANQNFEGINGQKRHPYADKVFLIEESNRPGEMMPIMEDEHGTYIMNSKDLRGIEVVEKLAKIGVDSLKVEGRTKSLYYVARVAQSYRKAIDDAVAGRPFDYSLLSELEGLANRGYTSGFLERHQTQDYQNYLSGHSTAKQSQYVGHVTEIDKNGWATVEVKNRFAVGDSLEIIHPNGNQTIKLEQMTRKGQPVDVAPGNGIQVKIPNMQGKEKALIARVLNP

SEQ ID NO: 4476 - protein, 55 aa, Neisseria meningitidis
MAIKKFRKPCGISAIGDKKIPQAVRNFGYLFREKPQSSFSIPICKYFSDGIFTSH

SEQ ID NO: 4477 - protein, 195 aa, Neisseria meningitidis
LNIKLKTLLLPFATLALCTNAFAAPPSDASLARWLDTQNFDRDIEKNMIEGFNAGFKPYADKALAEMPEAKKDQAAEAFNRYRENVLKDLITPEVKQAVRNTLLKNAREIYTQEEIDGMIAFYGSPVGQSVVAKNPRLIKKSMSEIAVSWTALSGKIARHHLPAFTEELRRIICGGKNPDAGCKQAGQVGKRHQK

SEQ ID NO: 4478 - protein, 644 aa, Neisseria meningitidis
MSLIECKNINRYFGSGENRVHILKDISLSIEKGDFVAIIGQSGSGKSTLMNILGCLDTAGSGSYRIDGIETAKMQPDELAALRRERFGFIFQRYNLLSSLTARDNVALPAVYMGAGGKERSARADKLLQDLGLASKEGNKPGELSGGQQQRVSIARALMNGGEIIFADEPTGALDTASGKNVMEIIHKLHEAGHTVIMVTHDPGIAANANRVIEIRDGEIISDTSKNPEIPASNVGRIREKASWSFYYDQFVEAFRMSVQAVLAHKMRSLLTMLGIIIGIASVVSVVALGNGSQKKILEDISSIGTNTISIFPGRGFGDRRSGRIKTLTIDDAKIIAKQSYVASATPMTSSGGTLTYRNTDLTASLYGVGEQYFDVRGLKLETGRLFDENDVKEDAQVVVIDQNVKDKLFADSDPLGKTILFRKRPLTVIGVMKKDENAFGNSDVLMLWSPYTTVMHQITGESHTNSITVKIKDNANTQVAEKGLTDLLKARHGTEDFFMNNSDSIRQIVESTTGTMKLLISSIALISLVVGGIGVMNIMLVSVTERTKEIGIRMAIGARRGNILQQFLIEAVLICVIGGLVGVGLSAAVSLVFNHFVTDFPMDISAASVIGAVACSTGIGIAFGFMPANKAAKLNPIDALAQD

SEQ ID NO: 4479 - protein, 213 aa, Neisseria meningitidis
MTDFRQDFLKFSLAQNVLKFGEFTTKAGRQSPYFFNAGLFNDGLSTLQLAKFYAQSIIESGIRFDMLFGPAYKGIILAAATAMMLAEKGVNVPFAYNRKEAKDHGEGGVLVGAPLKGRVLIIDDVISAGTSVRESIKLIEAEGATPAGVAIALDRMEKGTGELSAVQEVEKQYGLPVAPIASLNDLFILLQNNPEFGQFLEPVRAYRRQYGVE

SEQ ID NO: 4480 - protein, 262 aa, Neisseria meningitidis
MNPKIVFFDIDDTLYRKYTDTLRPSVKTAVAALRGKGILTALATGRSLATIPEKVRDMMAETGMDAVVTINGQFALLHGKTVHEVPMDAGLMGRVCAHLDGLGMDYAFVGGEGIAVSALSECVCRALQHIASDFFADKDYFSSKPVYQMLVFAEENEMPIWSDIVEQEGLKTVRWHEEAVDLLPAGMSKTDGIRSVVEALGLEMADVMAFGDGLNDVEMLSEVGFGVAMGNGEQAAKEAAKYVCPSVDEDGVLRGLQDLGVI

SEQ ID NO: 4481 - protein, 227 aa, Neisseria meningitidis; identical to SEQ ID NO: 1151

SEQ ID NO: 4482 - protein, 186 aa, Neisseria meningitidis
MNMKTLLALAVSAVCSVSVAQAHEHNTIPKGASIEVKVQQLDPVNGNKDVGTVTITESNYGLVFTPDLQGLSEGLHGFHIHENPSCEPKEKEGKLTAGLGASGHWDPKGAKQHGYPWQDDAHLGDLPALTVLHDGTATNPVLAPRLKHLDDVRGHSIMIHTGGDNHSDHPAPLGGGGPRMACGVIK

SEQ ID NO: 4483 - protein, 179 aa, Neisseria meningitidis
MKQRKLSLRPSDKRAPRGGAKGEYDMYKHLVVAVDGSETSINALKHAAELAGVNSARLTLVHVANPAEYMALAPEFLQHESYEAAAVAQGNEVLDAAERTARELGVENTVKHLLVANKGAREMAQDLVDYADENGADLLVLGTHGRTGLMHLLMGSFAETVMRQSHLPLLIIRSKAEEA

SEQ ID NO: 4484 - protein, 468 aa, Neisseria meningitidis; identical to SEQ ID NO: 29

SEQ ID NO: 4485 - protein, 64 aa, Neisseria meningitidis
LAEGQKSAVTEYYLNHGKWPGGNSDAGVASSSKIKGKRPLQNSFPSRQPKPKHRFSAVFAPNTS

SEQ ID NO: 4486 - protein, 260 aa, Neisseria meningitidis; identical to SEQ ID NO: 3655

SEQ ID NO: 4487 - protein, 215 aa, Neisseria meningitidis
MKPLILGLAAVLALSACQVQKAPDFDYTSFKESKPASILVVPPLNESPDVNGTWGVLASTAAPLSEAGYYVFPAAVVEETFKQNGLTNAADIHAVRPEKLHQIFGNDAVLYITVTEYGTSYQILDSVTTVSAKARLVDSRNGKELWSGSASIREGSNNSNSGLLGALVSAVVNQIANSLTDRGYQVSKTAAYNLLSPYSHNGILKGPRFVEEQPK

SEQ ID NO: 4488 - protein, 176 aa, Neisseria meningitidis
MKFVSDLLSVILFFATYTVTKNMIAATAVALVAGVVQAAFLYWKYKKLDTMQWVGLVLIVIFGGATIVLGDSRFIMWKPSVLFWLGALFLWGSHLAGKNGLKASIGREIQLSDAVWAKLTYMWVGFLIFMGIANWFVFTRFEAQWVNYKMFGSTALMLVFFIIQGIYLSTCLKKED

SEQ ID NO: 4489 - protein, 89 aa, Neisseria meningitidis
MLKQSIEIINKLGLHARASNKFTQTASQFKSEVWVTKNDSRVNGKSIMGLMMLAAAKGTVIELETDGADEAEAMRALTDLINGYFGEGE

SEQ ID NO: 4490 - protein, 335 aa, Neisseria meningitidis
MSTFFRQTAQAMIARHIDRFPLLKLDQVIDWQPIEQYLNRQRTRYLRDHRGRPAYPLLSMFKAVLLGQWHSLSDPELEHSLITRIDFNLFCRFDELSIPDYSTLCRYRNWLAQDDTLSELLKLINRQLTEKGLKIEKASAAVVDATIIQTAGSKQRQAIEVDEEGQISGQTTPSKDSDAHWIKKNGLYKLGYKQHTRTDAEGYIEKLHITPANAHECKHLSPLLEGLPEGTTVYADKGYDSAENRQHLEEHQLLDGIMRKACRNRPLSETQTKRNRYLSKTRYVVEQSFGTLHRKFRYARAAYFGLIKVSAQSHLKAMCLNLLKAANRLSAPAAA

SEQ ID NO: 4491 - protein, 187 aa, Neisseria meningitidis; identical to SEQ ID NO: 2230

SEQ ID NO: 4492 - protein, 157 aa, Neisseria meningitidis
MKKLLAAVMMAGLAGAVSAAGVHIEDGWARTTVEGMKMGGAFMKIHNDEAKQDFLLGGSSPVADRVEVHTHINDNGVMRMREVEGGVPLEAKSVTELKPGSYHVMFMGLKKQLKEGDKIPVTLKFKNAKAQTVQLEVKIAPMSAMDHGHHHGEAHQH

SEQ ID NO: 4493 - protein, 140 aa, Neisseria meningitidis
MKITKIFTFDSSHMLDGHDGKCQNLHGHTYKLEITVSDGIIKGGAKDGMVMDFTDLKAIVKQHITDPFDHAFIYHGGNSRECQIAALLEGWNMKTLRLPCRTTAENMAVEMYGRLKNAGLNVCRVKLWETPTSCAEYEGE

SEQ ID NO: 4494 - protein, 321 aa, Neisseria meningitidis
MSYTQLTQGERYHIQYLSRHCTVTEIAKQLNRHKSTISREIRRHRTQGQQYSAEKAQRQSRTIKQRKRQPYKLDSQLIQHIDTLIRRKLSPEQVCAYLCKHHQITLHHSTIYRYLRQDKSNGSTLWQHLRICSKPYRKRYGSTWTRGKVPNRVGIENRPAIVDQKSRIGDWEADTIVGKGQKSALLTLVERVTRYTIICKLDSLKAEDTARAAVRTLKAHKDRVHTITMDNGKEFYQHTKITKALKAETYFCRPYHSWEKGLNENTNGLIRQYFPKQTDFRNISDREIRRVQDELNHRPRKTLGYETPSVLFLNLFQPLIH

SEQ ID NO: 4495 - protein, 208 aa, Neisseria meningitidis
MRKSRLSRYKQNKLIELFVAGVTARTAAELVGVNKNTAAYYFHRLRLLIYQNSPHLEMFDGEVEADESYFGGQRKGKRGRGAADKVAVFGLLKRNGKVYTVTVPNTQTATLFPIIREQVKPDSIVYTDCYRSYDVLDVREFSHFSFAETSFSYQSQHTFCRTTKPYWNELLEPGKTSFTQVRHSQSAFAVFKGVRMAFQQDKSSCSIL

SEQ ID NO: 4496 - protein, 379 aa, Neisseria meningitidis
MKKTLVAAAILSLALTACGGGSDTAAQAPSAKPEAEQSGKLNIYNWSDYVDPETVAAFEKETGIKTRSDYYDSNETLEAKVLTGKSGYDLTAPSIANVGRQIKAGAYQKIDKAQIPHYGNIDKDLLKMMEAVDPGNEYAVPYFWGINTLAINTRQVQKALGTDKLPENEWDLVFNPEYTAKLKSCGISYFDSAIEQIPLALHYLGKDPNSENPEDIKAAVDMMKAVRGDVKRFSSSGYIDDMAAGNLCAAIGYGGDLNIAKTRAEEAANGVEIKVLTPKTGVGVWVDSFMIPRDAQNVANAHRYIDYTLRPEVAAKNGSFVTYAPASRPARELMDEKYTSDASIFPNKELMEKSFIVSPKSAESAKLGVKLWQGLKAGK

SEQ ID NO: 4497 - protein, 572 aa, Neisseria meningitidis
MNLHQTVEHEAAAAFAAAGIAGSPVVLQPTKNAEHGDFQINGVMGAAKKAKQNPRELAQKVADALAGNAVIESAEVAGPGFINLRLRPEFLAQNIHAALNDARFGVAKTDKPQTVVIDYSSPNLAKEMHVGHLRSSIIGDSISRVSEFMGNTVIRQNHVGDWGTQFGMLVAYLVEQQKDNAAFELADLEQFYRAAKVRFDEDPAFADTAREYVVKLQGGDETVLALWKQFVDISLSHAQAVYDTLGLKLRPEDVAGESKYNDDLQPVVDNLVQKGLAVEDDGAKVVFLDEFKNKEGEPAAFIVQKQGGGFLYASTDLACLRYRVGTLHADRLLYVVDHRQALHFEQLFTTSRKAGYLPENVGAAFVGFGTMMGKDGKPFKTRSGDTVKLVDLLTEAVERATALVKEKNPELGADEAAKIGKTVGIGAVKYADLSKNRTSDYVFDWDAMLSFEGNTAPYLQYAYTRVQSVFRKAGEWDANAPTVLTEPLEKQLAAELLKFEDVLQSVADTAYPHYLAAYLYQIATLFSRFYEACPILKAEGASRNSRLQLAKLTGDTLKQGLDLLGIDVLDVM

SEQ ID NO: 4498 - protein, 796 aa, Neisseria meningitidis
MTEQKHEEYGADSIQVLEGLEAVRKRPGMYIGDTQDGSGLHHMVFEVLDNAIDEALAGHCDKITVTIHADHSVSVADNGRGMPTGIHPKEGRSAAEVIMTVLHAGGKFDNNSYKISGGLHGVGVSVVNALSDWVTLTIYRDGKEHFVRFVRGETEEPLKVVGDSDKKGTTVRFLASTETFGNVEYSFDILAKRIRELSFLNNGVDIELTDERDGKHESFALSGGVAGFVQYMNRKKTPLHEKIFYAFGEKDGMSVECAMQWNDSYQESVQCFTNNIPQRDGGTHLTALRQVMTRTINSYIEANEVAKKAKVETAGDDMREGLTCVLSVKLPDPKFSSQTKDKLVSGEIGPVVNEVISQALTDFLEENPAEAKIITGKIVDAARAREAARKAREITRRKGVMDGLGLPGKLADCQEKDPALSELYLVEGDSAGGSAMQGRDRKFQAILPLKGKILNVEKARFEKMLASQEVAALITALGAGIGKEEFNAEKLRYHRIIIMTDADVDGAHIRTLLLTFFYRQMPELVERGYIYIAQPPLYKAKYGKQERYLKDELEKDQWLLGLALEKAKIVSDGRTIEGAELADTAKQFLLAKTVIEQESRFVDELVLRAMLHASPIDLTSSENADKAVAELSGLLDEKEVALERIEGHEGHRFIKITRKLHGNVMVSYIEPKFLNSKAYQTLTQTAAALKGMVGEGAKLYKGENGYDADSFETALDILMSVAQKGMSIQRYKGLGEMNPEQLWETTMDPAVRRLLKVRIEDAIAADEVFVTLMGDEVEPRRAFIENNALIAQNIDA

SEQ ID NO: 4499 - protein, 376 aa, Neisseria meningitidis
MFTDENMTAKEELFAWLRHMNQNKGSDLFVTTHFPPAMKLDGKITRITDEPLTAEKCMEIAFSIMSAKQAEEFSSTNECNFAISLPDTSRFRVNAMIQRGATALVFRAITSKIPKFESLNLPPVLKDVALKKRGLVIFVGGTGSGKSTSLASLIDYRNENSFGHIITIEDPIEFVHEHKNCIITQREVGVDTENWMAALKNTLRQAPDVILIGEIRDRETMDYAIAFAETGHLCMATLHANSTNQALDRIINFFPEERREQLLTDLSLNLQAFISQRLVPRDGGKGRVAAVEVLLNSPLISELIHNGNIHEIKEVMKKSTTLGMQTFDQHLYQLYEKGDISLQEALKNADSAHDLRLAVQLRSRRAQSSSPDLELL

SEQ ID NO: 4500 - protein, 392 aa, Neisseria meningitidis; identical to SEQ ID NO: 276

SEQ ID NO: 4501 - protein, 511 aa, Neisseria meningitidis; identical to SEQ ID NO: 3843

SEQ ID NO: 4502 - protein, 138 aa, Neisseria meningitidis; identical to SEQ ID NO: 774

SEQ ID NO: 4503 - protein, 506 aa, Neisseria meningitidis
MFFISIRYIFVRKLWRANGQPFKITPLRIENPPERNIMMKNRVTNIHFVGIGGVGMSGIAEVLHNLGFKVSGSDQARNAATEHLGSLGIQVYPGHTAEHVNGANVVVTSTAVKKENPEVVAALEQQIPVIPRALMLAELMRFRDGIAIAGTHGKTTTTSLTASILGAAGLDPTFVIGGKLNAAGTNARLGKGEYIVAEADESDASFLHLTPIMSVVTNIDEDHMDTYGHSVEKLHQAFIDFIHRMPFYGKAFLCIDSEHVRAILPKVSKPYATYGLDDTADIYATDIENVGAQMKFTVHVQMKGHEQGSFEVVLNMPGRHNVLNALAAIGVALEVGASVEAIQKGLLGFEGVGRRFQKYGDIKLPNGGTALLVDDYGHHPVEMAATLSAARGAYPEKRLVLAFQPHRYTRTRDLFEDFTKVLNTVDALVLTEVYAAGEEPIAAADSRALARAIRVLGKLEPIYCENVADLPEMLLNVLQDGDIVLNMGAGSINRVPAALLELSKQI

SEQ ID NO: 4504 - protein, 71 aa, Neisseria meningitidis
MDQSVLRVNQVAERLGVSRSTVWNWGNTKSRHYRADFPRPFKVSANVVGWLSSEIDDYIGKLAAKREEQTD

SEQ ID NO: 4505 - protein, 524 aa, Neisseria meningitidis
MKKSLFVLFLYSSLLTASEIAYRFVFGIETLPAAKMAETFALTFVIAALYLFARYKTSRLLIALFFAFSIIANNVHYAVYQSWMTGINYWLMLKEVTEVGSAGASMLDKLWLPALWGVLEVMLFCSLAKFRRKTHFSADILFAFLMLMIFVRSFDTKQEHGISPKPTYSRIKANYFSFGYFVGRVLPYQLFDLSRIPAFKQPAPSKIGQGSVQNIVLIMGESESAAHLKLFGYGRETSPFLTRLSQADFTPIVKQSYSAGFMTAVSLPSFFNAIPHANGLEQISGGDTNMFRLAKEQGYETYFYSAQAENEMAILNLIGKKWIDHLIQPTQLGYGNGDNMPDEKLLPLFDKINLQQGRHFIVLHQRGSHAPYSALLQPQDKVFGEADIVDKYDNTIHKTDQMIQTVFEQLQKQPDGNWLFAYTSDHGQYVRQDIYNQGTVQPDSYLVPLVLYSSNKAVQQAANQAFAPCEIAFHQQLSTFLIHTLGYDMPVSGCREGSVTGNLITGDAGSLNIRDGKAEYVYPQ

SEQ ID NO: 4506 - protein, 139 aa, Neisseria meningitidis
MTYTVYSFEKKFLEKFGVYGLSVLNFRGSMYPLDIYCPKHGNQTVSNATSCLRSKLGCPACGREHQQSKASERLKQSSKSAKPLLILDTMTNETLAFPSVTAAGTALGVHFQQINHRLKGRTSPDNLISNRYKVLGYDR

SEQ ID NO: 4507 - protein, 140 aa, Neisseria meningitidis; identical to SEQ ID NO: 662

SEQ ID NO: 4508 - protein, 86 aa, Neisseria meningitidis
MKYLIRTALLAVAAAGIYACQPQSEAAVQVKAENSLTAMRLAVADKQAEIDGLNAQIDAEIRQREAEELKDYRWIHGDAEVPELEK

SEQ ID NO: 4509 - protein, 168 aa, Neisseria meningitidis
MVDAWSVPDFESKICPPEALAARLALLPRPLVFTNGCFDILHRGHVTYLAQARSAGAALVLALNTDASVRRLGKGGDRPINPLENRAAVAAALESVDLVTWFDGDTPAALIEAVKPEILVKGGDWAADKIVGAAETLARGGQVFSIPFLHQTSTTKTLAKIRAAEGGK

SEQ ID NO: 4510 - protein, 243 aa, Neisseria meningitidis
VSREINAGGHHFLYGGISGGGVHYWDNKDFSEQCLRLSLGYKNRSVTRSFGIVPFVGQNLLGCSRYNFVGGFNADFSQHLSERWRLTLNAGNMWKHYQEDRTAARYDSHMPLAGATLMYSAPKDWLLYGGADWSHDLTKEAEQASVRKGLRIGAVKTFDGGLGLRANLRYTRRTFDAPGTIVYRFPRKDHEYQANLSFWHDKISWKGFTPQLNFRYLKIDSNMKSFYTRKNTQIFMSVEKDFK

SEQ ID NO: 4511 - protein, 468 aa, Neisseria meningitidis
MEKNTLSARAPSPWLPLLLAIAIFMQMLDATILNTALPEIAADMNESPLDMQLAVVAYTLTVALLIPLSGYLADRFGTKKVFFGSIAVFMLGSALCAASGSLFELTLSRVVQGIGGSMLVPIPRLTILRMYDKSKLLNAINYAVMPALIGPVLGPLAGGYLVEYASWHWIFLLNLPIGLLGFILGRNIMPDVKGNDTALDFKGYLIFSAAACLLLLSAESLSHALPPYFALLPLCGGLLFARRYFRHMKTASKPIYSADLFLIRTFRLGLAGNLFSRLGISSIPFLMPLMFQVAFGFGASLSGWLVAPVALSSLLVKPLIAPLMKRFGYRTVLLWNTKLLAAFIMLLALPDGNSSLWIWIFLSLAIGACNSLQFSAMNTLTLADLRPQQTGSGNSLMAVNQQLAISMGIVVGALILKNWTFLIPASSGLHSAFRMTLLSIGGITLASSLVFKRLHVSDGANLTRNTPS

SEQ ID NO: 4512 - protein, 119 aa, Neisseria meningitidis; identical to SEQ ID NO: 121

SEQ ID NO: 4513 - protein, 581 aa, Neisseria meningitidis
MERQTDEFAQAAARAAIRFLEHYAGSGDEVLANCTERLFQALQNGHSFIRLSGGEADALSALAPVVGTSAAPLILEGRRLFLGRMWQLEYDLAAEIKRLAAADTSAPDAAGARQNLAKWFQGTGSEGQRDAAALALLQSFMVITGGPGTGKTTTVAKLLALICGKDENLPNIALAAPTGKAAAHMARALHRAINGFDALEAVRRHLLKLEGQTVHRLLKLRPPKMQAAFNPVYPLPFDVLVIDEASMLDTALMLQLLKAVKTGARVILLGDENQLPSVGIGAVLSVLSQKTVLDGETHQRLAGFLPEHGFSVSANPPVLAQNTAHLSFSHRFGDNSGIGCLARAAVSGDEGAWALFDRFPDELEHSECSPNARVERLYRAHKAYWQAVKDGNIEAAYAGISDIVVLAAWRQDAEDFNEAYCSHVRRKMNIPEHQAYFAGEPIMIRQNDYALELFNGDIGLIMEDVGRQGSLAAYFADADGFKKVAVSCLPDFEPAFAMTVHKSQGSEYREVWLLPPSAAPSDEGDDALSGLSRGLLYTAITRAREKFVFFGGEEAFRQAAATVKARQTALGSMLGRVFSQG

SEQ ID NO: 4514 - protein, 117 aa, Neisseria meningitidis
LLCFNGSIEKHILFNQPIKKGLKMKKLLLAAVVSLSAATAFADDSAERQIYGDPHFEQNRTKAVKMLEQRGYQVHDVDADDHWGKPVLEVEAYKDGREYDIVLSYPDLKIIKEQLDR

SEQ ID NO: 4515 - protein, 136 aa, Neisseria meningitidis
MKIYNLDNIITSSALSLYKSTWVKLDLISCAKFIIEGTDFTFDWDEGIENWIVFFHKNKVIGYLCAKLPFAILDNEQLKNQLYHKYPHVLTLQIKNIETEKISLNVNICRLTLCPSFHDEHDTLVCSVQDFYVNTV

SEQ ID NO: 4516 - protein, 1032 aa, Neisseria meningitidis
MNLETKPIAETPNFIVLDQYEKIEQSGSYQSENRLEAELIADLQNQGYEYRKDLNSQSRLLENLRAQLQRLNDVAFSDGEWARFLTEYLDRPSENITDKTRKIHDDHIYDFAFDDGRLKNIYLLDKKNLARNHVQLINQFEQTGTHANRYDVTVLVNGLPLVQIELKKRGVAVREAFNQVHRYSKESFNSDNSLFKFLQIFVISNGTDTRYFANTTKRDKNSFDFTMNWARSDNHPIKDLKDFTATFLQKSVLLGVLLHYSVFDANNTLLIMRPYQIAAAERILWKINSSAQAKNWSKPESGGYVWHTTGSGKTLTSFKAARLATESAFIDKVFFVVDRKDLDYQTMKEYQRFSPDSVNGSESTAGLKRNLEKDDNKIIVTTIQKLNNLMKGEDNLPVYHQQVVFIFDECHRSQFGEAQKNLKKKFKKFCQFGFTGTPIFPENALGAETTAGVFGRELHSYVITDAIRDEKVLKFKVDYNDVRPKFKAVEAEQDEKKLSAAENRQALLHPERIREITQYILNQFRQKTHRLNAGGKGFNAMFAVSSVDAAKCYYEAFKTQQAGSLHPLKVATIFSFAANEEQNAVGEIVDETFEPEAMDSSAKEFLQAAINDYNACFKTNFGTDSKAFQNYYRDLAKRVKNQEVDLLIVVGMFLTGFDAPTLNTLFVDKNLRYHGLMQAFSRTNRIYDATKTFGNIVCFRDLEQATIDAITLFGDKNTKNVVLEKSYEEYMNGYTDDRTGEARRGYLDVAKELRERFPEPDKIETEKDKKDFAKLFGEYLRAENVLQNYDEFAALRELQNVDAADEDAMKAFQEKYYLSDEDVKEMRQVPMPSERAVQDYRSAYNDIRDWLRRQKAGEQKEQSKIDWDDVVFEVDLLKSQEINLDYILQLVFEHHKKIKGKAELVEEIRRIIRASIGHRAKEGLIVDFINDTDLDKVPDVPAILETFYTYAQEVMRHEAAGLIAAEDLNETAAKRYLTGSLKRGYASENGTELTETLPKMSPLNPQYLTKKQSVFQKIAAFVEKFAGIGTDI

SEQ ID NO: 4517 - protein, 251 aa, Neisseria meningitidis
MGRLLLGSIRMSIIVENLTVSYRRRPAVHHVDITFEEHSMWAVFGPNGAGKSTFLKSLMGLQPIDTGSIRLDGLSRQDIAYLPQQSDIDRSQPMTVFDLAAMGLWYEIGFFKGINTAQKQRVHESLERVGMRQFAGRQIAHLSNGQFQRVLFARMLVQNAKFLLLDEPFNAVDARTTYELLDVLQKCHCGGHAIIAVLHDYEQVRAYFPSTLLLAREKIAAGATETILTEPYLAQANAKMQQQESPDWCAS

SEQ ID NO: 4518 - protein, 375 aa, Neisseria meningitidis; identical to SEQ ID NO: 1664

SEQ ID NO: 4519 - protein, 127 aa, Neisseria meningitidis; identical to SEQ ID NO: 2146

SEQ ID NO: 4520 - protein, 384 aa, Neisseria meningitidis
MKFTKHPVWAMAFRPFYSLAALYGALSVLLWGFGYTGTHELSGFYWHAHEMIWGYAGLVVVAFLLTAVATWTGQPPTRGGVLVGLTIFWLAARIAAFIPGWGASASGILGTLFFWYGAVCMALPVIRSQNQRNYVAVFALFVLGGTHAAFHVQLHNGNLGGLLSGLQSGLVMVSGFIGLIGTRIISFFTSKRLNVPQIPSPKWVAQASLWLPMLTAMLMAHGVMPWLSAAFAFAAGVIFTVQVYRWWYKPVLKEPMLWILFAGYLFTGLGLIAVGASYFKPAFLNLGVHLIGVGGIGVLTLGMMARTALGHTGNPIYPPPKAVPVAFWLMMAATAVRMVAVFSSGTAYTHSIRTSSVLFALALLVYAWKYIPWLIRPRSDGRPG

SEQ ID NO: 4521 - protein, 369 aa, Neisseria meningitidis
MSNHKICSDLKTECYKTQSPKHNKTARLRAVSCQTTYFTDGCFFNKITPILKNMESKMSIHTLKRLPSSLLLGLCLSLPSAHLFADNDILGQFLEQNMLTSSDPIEIFAESTIHPTNTQAITGGLILSSQSALVVNNKTGQILYQKNADRIMPIASISKLMSAMVVLDANLDMNETVTITPDEIDRLKGTGSRLAIGTALTRKELLHLSLMSSENRATHALGRTYPGGMGAFVAAMNRKAQSLGMYGSRFYEPTGLNFQNVSTAKDLSLMVNAAAQYPQIRTNSTSNYASVQTKNGQQNYKNSNALVREGMWNIELQKTGYIREAGRSMVVKANIQNQPVTIVLLNSPTSATRVNDARKIESWMLQQRS

SEQ ID NO: 4522 - protein, 497 aa, Neisseria meningitidis; identical to SEQ ID NO: 1619

SEQ ID NO: 4523 - protein, 481 aa, Neisseria meningitidis
MTQYTLKQAGSLLQSKQISAVELANEYLAAIAEKNPALNGYITLNPEKTLAEARAADERIAQGNASALTGVPVAYKDIFCQTGWRSACASKMLDNFISPYTATVVQNLLDESMVTLGRTNMDEFAMGSTNENSFYGATKNPWNPEHVPGGSSGGSAVVVAARLAPAALGSDTGGSIRQPASHCGITGIKPTYGTVSRFGMVAYASSFDQAGPMAQTAEDCAILLNAMAGFDPKDSTSLEREKEDYTRDLNQPLKGLKIGLPKEYFGEGNSADVQTALQNTIDLLKTQGAELVEVSLPQTKLSIPAYYVLASAEAGTNLSRYDGVRYGHRAAQFGDLEEMYGKTRAEGFGSEVKRRIMIGTYVLSHGYYDAYYLKAQKLRRLVADDFQTAFARCDLILAPTAPTAAPKIGADASPVETYLSDIYTIAVNLAGLPALTLPAGFSGGGLPIGVQLIGNYFSEARILGAAHQIQLNSDWHGKRPE

SEQ ID NO: 4524 - protein, 183 aa, Neisseria meningitidis
MPSERRPFQTAFLSNRKTVGKLAERVQSRYDGLHKFKHICSAAMALIKEPLDKAKQRNEELEAAEEAAAQEALGREQEVDRVSEWEERYKLSRSEFEQFWKGLPQTVQNKLQASQKTWKSGMDKICANNAKAEGETPNGIKFSELACKTAETEARLEELHNRKKALIDEMAREADKKELPKRL

SEQ ID NO: 4525 - protein, 636 aa, Neisseria meningitidis
MNILSVENASFAIGHVALLDKTSFQLDSGEKVGLIGRNGAGKSSFLKILAGLQKLDDGQIIVQNNLKIVYVPQESFFDKDATVFDTVAEGLGEIRDLLRRYHHVSHELENGSSEALLKELNELQLEIEAKDGWKLDAAVKQTLGELGLPENEKIGNLSGGQKKRVALAQAWVQKPDVLLLDEPTNHLDIDAIIWLENLLKAFEGSLVVITHDRRFLDNIATRIVELDRGILRSYPGSFSKYSEKKAQELAVEAEHNRLFDKFHAQEEAWIRKGIEARRTRNEGRVHRLEELRRQRAERRNVQGQVNFKLDSGEKSGKIIAELEHASFAYGDKVIMDKFSAILQRGDKIGLIGPNGIGKTTFLKLILGELQPTYGRIRIGSKQEVAYFDQFRSALNENDTVFYTLGQGNDYVEVGGKKKHVMSYLEDFLFPPARAQSPVSSLSGGERNRLLLAKLFTRPANILVLDEPTNDLDIDTQELLEDLLRDYQGTVFLVSHDRMFLDNVITQSIVFEGNGRLKEYIGGYQDYIDAKSREAKIQTESAPKTADAEPVKEKPKANRTVKLSYKEQRELDALPDEIAALEAEQAEINAQLSDPEIFKDYEKAGALQSRAEEIEMLLLEKLERWELLETKQNGNAV

SEQ ID NO: 4526 - protein, 118 aa, Neisseria meningitidis; identical to SEQ ID NO: 680

SEQ ID NO: 4527 - protein, 303 aa, Neisseria meningitidis
MVHIMFNQAVQELTTIRDILRFAVSRFNEAGLFFGHGTDNAHDEAAYLILHTLNLPLDMLAPYLDAKLLEAEKEEVLAVIERRAVEHIPAAYLTHQAWQGEFDFYVDERVIIPRSFIYELLGNGLRPWIEYDELVHNALDLCTGSGCLAIQMAHHYPDAQIDAVDVSLDALEVAGINVEDYGLEERIQLIHTDLFEGLEGTYDLIVSNPPYVDAESVELLPEEYLHEPELALGSGADGLDATRQILLNAAKFLNPKGVLLVEIGHNRDVLEAAYPELPFTWLETSGGDGFVFLLTREQLLGEE

SEQ ID NO: 4528 - protein, 144 aa, Neisseria meningitidis
MAFGSMNSGDDSPMSDINVTPLVDVMLVLLIVFMITMPVLTHSIPLELPTASEQTNKQDKQPKDPLRLTIDANGGYYVGGDSASKVEIGEVESRLKAAKEQNENVIVAIAADKAVEYDYVNKALEAARQAGITKIGFVTETKAQ

SEQ ID NO: 4529 - protein, 354 aa, Neisseria meningitidis
MTLLKNDTFLRALLKQPVEYTPIWMMRQAGRYLPEYKATRAKAGSFLDLCKNTGLATEVTIQPLERFDLDAAILFSDILTVPDAMGLGLYFAEGEGPKFKRALQHEADIAKLHVPDMEKLQYVFDAVTSIRKALDGRVPLIGFSGSPFTLACYMVEGGGSKEFRTIKTMMYSRPDLLHKILDTNAQAVTAYLNAQIDAGAQAVQIFDTWGGVLSDAAFKEFSLKYIRQIVAGLKRESEGRLVPVIVFAKGGGLWLESMAQIGADALGLDWTCNIGEARRRVGNQVALQGNFDPFALFGTPESIRTEVARILADYGHGSGHVFNLGHGINQHADPEHTKILVDTVHELSRHYHGG

SEQ ID NO: 4530 - protein, 112 aa, Neisseria meningitidis
MAQTKQVVLVTTVKTSGKVVKNRFVDFAGKQTAAGVKVLGTATFDADAGDTLAVDALGIALVEAGGTVAVGDEVAADAQGAAVKAAGNAKVAGTARSAATAAGEVIQVFLKG

SEQ ID NO: 4531 - protein, 150 aa, Neisseria meningitidis
MIKMKDIYESICCKSIRKIMYISDSFVAISGTGFIIKFQEKFYFCCLYHCISNEGKFEKNKLFGLSILYKTYLEIDPKTISESNVANYVLFPNPEQITKEFCSSKIDDDLMLDEEFIPIEIIGENELIPCGYLDFDIEYWSNYLFSEKNQ

SEQ ID NO: 4532 - protein, 103 aa, Neisseria meningitidis
MNIKRLLLTAAATALLGISAPALAHHDGHGDDDHGHSKQDKIISRAQAEKAAWARVGGKITDIDLEHDDGRPHYDVEIVKNGQEYKVVVDARTGRVISSRRDD

SEQ ID NO: 4533 - protein, 364 aa, Neisseria meningitidis
VDALSAFLKLKGLDGGNTHPVTMPDFVLSYEDKDITADVAPYLISFSYTDYLEGQSDELQVDFEDTDGRWLSNWYPEQGDALSLSLGNQFTGLVSLGKFEIAEIEYNRPPSTVSLKALSTGITKSNRTLRGKAYENTTLAAIVRQIAGRLKLEITVTVKDIPIKRVTQYQERYVEFLARLAKEYGHSFKIVGKKLVFTDNDALKQRPAVAVLKPEDIIRVRLRDLIKGVPSKVDVKGYDPKNKKTVSASRKSKPKRGKAKHGSTGDTLRIVPNKGESAAQLNARADAKLADAQDDQCAGTVTLVGNALLAAGQMVRLKGFGKFSGKYLVKQSRHDFSRSGGYTTEIEIKMTEYVSEEEQGSANP

SEQ ID NO: 4534 - protein, 227 aa, Neisseria meningitidis
MTETRADMIVSAFLPMVKAGFAVSLPLAAASFVIGMMIAVAVALVRIMPAGGIVRKILLKLVEFYISVIRGTPLLVQLVIVFYGLPSVGIYIAPIPAAIIGFSLNVGAYASETIRAAILSVPKGQWEAGFSIGMTYMQTFRRIVAPQAFRVAVPPLSNEFIGLFKNTSLAAVVTVTELFRVAQETANRTYDFLPVYIEAALVYWCFCKVLFLIQARLEKRFDRYVAK

SEQ ID NO: 4535 - protein, 131 aa, Neisseria meningitidis; identical to SEQ ID NO: 1281

SEQ ID NO: 4536 - protein, 883 aa, Neisseria meningitidis
MASDLGISISVSAVVGGALSGLTHIGKAMNTLKTTTNTLSERQKELGRVLERNKDRLGVSSAKQLWQEYDKIGNSVAKLTRQYEKLNAVRAQMAAVSSQWTDIKGQWQGALAAAGTLILPVKASIEFESAMADVKKVVNFDTPQQFKEMERDILKMTRKIPMAGKDIAAIVAAGGQSGVARENLTGFAENAAKMGVAFDMAAGQAGESMATLSNVLQIPIPKIGILGDAVNHLSDNANSKAADIVNVLTRVGSDIKQLGMTENQGAAWGSTFLSMGKAPELAAQAMKGMITSMSVMKAGGAKKELAELGLTTKEFAAAMDKDANGAMLNLLARVKQLSKAEQFPMLLKMFGRNYADDAMMLANNVGEYNRQLALLEERDASGNLKYLGSMQREFANRSATTANQIQIFKNGISELGIRMGSIVLPALNDFLAKGSKLANIVSDWSEKHPVLTKGIVGTAASLLAFKVGMFGAMVVANRSRAAYLGMKGAVLSLRSAIVLTHTVMQGGMGLHDVPGRLGKLMRALVAARTAMLGFSLSSLTATWPLVLAVGALALVGWTIYKAWNPIKAFFAGLWDGLLKGLKPLKPAFDALVSALSDAWDGIYNAISPVVDTVFSVLGGLWDTVRPFVRPLLDFFRDFFSTTQVAAGGARSFGESAGSWIGEKITAVAGWVGGKIAEMKTAFDGGLLGILGLILNWSPIGAFYSAFAAVLSWFGIDLPSSFTQFGANIIQGLWNGLQSKFESVKAWFAEKAASLKQAFAGVMGIHSPSRVFRRFGGWMMDGLQIGLDGGAARPIASIADTAGRLKSGFTDHMGALAARLSAGGEAFASARNTQAAGGMTINYNPTINAPGSNPQQIEAALQMGLREFEAMFRRMMDDKARRAY

SEQ ID NO: 4537 - protein, 184 aa, Neisseria meningitidis
MKKIIASALIATFALAACQDDTQARLEQQQKQIEALQQQLAQQADDTVYQLTPEAVKDTIPAEAQANGNNGQPVTGKDGQQYIYDQSTGSWLLQSLVGAAAGAFIGNALANKFTRAGNQDSPVARRARAAYHQSAHPNARTSRDLNTRSLRAKQQAAQAQRYRPTTRPPANYRRPAMRGFGRRR

SEQ ID NO: 4538 - protein, 166 aa, Neisseria meningitidis
MNAMPQTAAQNETLHTCSIIVDDAQDFSPMLLDAGRDDTLISESMIPQIRTVAALIAAERHNFSRSSPAEFTDAADFFAARILVLGVRRFHLDVSLLQILKTANSRARRFAEKHRLFFTPAQAELSLNKHKNRRLLTVETEHEVENKGNPVANSLAFVRKLHTLPL

SEQ ID NO: 4539 - protein, 159 aa, Neisseria meningitidis
MTDNLIQIATPILTVIGVFVAAYGIMRNTENAKKRATIDMIMAERNNAALQEAITIVNGLAKTDGCILATYTSDTPDKKKDREAILTVLNQREFVCAGVLGGALHEKMYKDFEYSMLLRDWDNLSSFIFEIRRIRSAPTAFQEFEAVARKWKKKPLKTK

SEQ ID NO: 4540 - protein, 65 aa, Neisseria meningitidis; identical to SEQ ID NO: 926

SEQ ID NO: 4541 - protein, 335 aa, Neisseria meningitidis
MSTFFQQTAQAMIAKHIDRFPLLKLDRVIDWQLIEQYLNRQKTRYLRDHRGRPAYPLLSMFKAVLLGQWHSLSDPELEHSLITRIDFNLFCRFDELSIPDYSTLCRYRNWLAQDDTLSELLKLINRQLTEKGLKIEKASAAVVDATIIQTAGSKQRQAIEVDEEGQISSQTTPSKDSDARWIKKNGLYKLGYKQHTRTDEEGYIEKLHITPANAHECKHLPPLLEGIAEGTTVYADKGYDSAENRQHLEEHQLLDGIMRKACRNRPLSETQTKRNRYLSKTRYVVEQSFGTLHRKFRYARAAYFGLIKVSAQSHLKAMCLNLLKAANRLSVPVCA

SEQ ID NO: 4542 - protein, 596 aa, Neisseria meningitidis
MRYKPLLLALMLVFSTPAVAAHDAAHNRSAEVKKQTKNKKEQPEAAEGKKEKGKNGAVKDKKTGGKEAAKEGKESKKTAKNRKEAEKEATSRQSARKGREGDKKSKAEHKKAYGKPVSGSKEKNAKTQPENKQGKKEAKGQGNPRKGGKAEKDTVSANKKVRSDKNGKAVKQDKKYREEKNAKTDSDELKAAVAAATNDVENKKALLKQSEGMLLHVSNSLKQLQEERIRQERIRQARGNLASVNRKQREAWDKFQKLNTELNRLKTEVAATKAQISRFVSGNYKNSQPNAVALFLKNAEPGQKNRFLRYTRYVNASNREVVKDLEKQQKALAVQEQKINNELARLKKIQANVQSLLKKQGVTDAAEQTESRRQNAKIAKDARKLLEQKGNEQQLNKLLSNLEKKKAEHRIQDAEAKRKLAEARLAAAEKARKEAAQQKAEARRAEMSNLTAEDRNIQAPSVMGIGSADGFSRMQGRLKKPVDGVPTGLFGQNRSGGDVWKGVFYSTAPATVESIASGTVSYADELDGYGKVVVVDHGENYISIYAGLSEISVGKGYMVAAGSKIGSSGSLPDGEEGLYLQIRYQGQVLNPSSWIR

SEQ ID NO: 4543 - protein, 207 aa, Neisseria meningitidis
MKIIHKGLVEYLPTFEAMKTFNAGRNADTEDELWVVEHPPVFTQGLAGKPEHLLIRDDIPVVQIDRGGQITYHGPGQLVVYTMIDFKRRKTSVRNIVSALENSIIATLAEYGIEAAADPKRPGIYVGERKIASLGLRIKGGSVYHGLALNVNMDLSPFTHINPCGYAGMEMTQIADFVQPCPTPDEVAAKLTAHLETQFTPKADNNE

SEQ ID NO: 4544 - protein, 1389 aa, Neisseria meningitidis
MTDTAPTDTDPTENGTRKMPSEHRPAPPAKKRRPLLKLSAALLSVLILAVCFLGWLAGTEAGLRFGLYQIPSWFGVNISSQNLKGTLLDGFDGDNWSIETEGADLKISRFRFAWKPSELMRRSLHITEISAGDIAIVTKPTPPKEERPPQGLPDSIDLPAAVYLDRFETGKISMGKTFDKQTVYLERLNAVYRYDRKGHRLDLKAADTPWSSSSGSASVGLKKPFALDTAIYTKGGLEGKTIHSTARLSGSLKDVRAELAIDGGNIRLSGKSVIHPFAESLDKTLEEVLVKGFNINPAAFVPSLPDAGLNFDLTAIPSFSDGIALEGSLDLENTKAGFADRNGIPVRQVLGSFVIRQDGTVHIGNTSVALLGRGGIRLSGKIDTGKDILDLNIGINSVGAEDVLQTAFKGRLDGSIGIGGTTASPKISWQLGIGTARTDGSLAIASDPANGQRKLVLDTVNIAAGQGSLTAQGYLELFKDRLLKLDIRSRAFDPSRIDPQLPAGNINGSINLAGELAKEKFTGKMRFLPGTFNGVPIAGSADIVYESRHLPRAAVDLRLGRNIIKTDGGFGKKGDRLNLNITAPDLSRFGFGLAGSLNVRGHLSGDLDGGIRTFETDLSGAARNLHIGKAADIRSLDFTLKGSPDTSRPIRADIKGSRLSLSGGAAVVDTADLMLDGTGVQHRIRTHAAMTLDGKPFKFDLDASGGINRELTRWKGSIGILDIGGAFNLKLQNRMTLEAGAERVAASAANWQAMGGSLNLQHFSWDKKTGISAKGGAHGLHIAELHNFFKPPFEHNLVLNGDWDVAYGRNARGYLNISRQSGDAVLPGGQALGLNAFSLKTRFQNDRIGILLDGGARFGRINADLGIGNAFGGNMANAPLGGRITASLPDLGALKPFLPAAAQNITGSLNAAAQIGGRVGSPSVNAAVNGSSNYGKINGNITVGQSNSFSTSPLGGKLNLTVADAEVFRNFLPVGQTVKGSLNAAVTLGGSIADPHLGGSINGDKLYYRNQTQGIILDNGSLRSHIAGRKWVIDSLKFRHEGTAELSGTVGMENSGPDVDIGAVFDKYRILSRPNRRLTVSGNTRLRYSPQKGISVTGMIKTDQGLFGSQKSSMPSVGDDVVVLGEVKKEAAAPLPVNMNLTLDLNDGIRFAGYGADVTIGGKLTLTAQSGGSVRGVGTVRVIKGRYKAYGQDLDITKGTVSFVGPLNDPNLNIRAERRLSPVGAGVEILGSLNSPRITLTANEPMSEKDKLSWLILNRAASGSSGDNAALSAAAGALLAGQINDRIGLVDDLGFTSKRSRNAQTGELNPAEQVLTVGKQLTGKLYIGYEYSISSAEQSVKLIYRLTRAIQAVARIGSRSSGGELTYTIRFDRFSGSDKKDSAGNGKGK

SEQ ID NO: 4545 - protein, 177 aa, Neisseria meningitidis; identical to SEQ ID NO: 3663

SEQ ID NO: 4546 - protein, 102 aa, Neisseria meningitidis
MRIIVFFDLPVITAAKRKAANQFRQFLLKDGYQMLQLSVYSRIVKGRDSLQKHHNRLCANLPQEGSIRCLEITEKQYAAMKLLLGELKTQEKKVNSDQLLLF

SEQ ID NO: 4547 - protein, 105 aa, Neisseria meningitidis
MQKRIDEIQSKYREWCHLLPQLEEDIRRWKHAVALIRDMDNFYTHEYQACHRAIEDEAEVDLRTEGEYSIMSEDALWNALGEFHQLAWLYLRSSVDALDRYTQED

SEQ ID NO: 4548 - protein, 233 aa, Neisseria meningitidis
MFRIVKWLIALPVGIFIFFNAYVYGNIITYRAVAPHRTAFMSMRMKQFEQEGRDVALDYRWMPYKRISTNLKKALIASEDARFAGHGGFDWGGIQNAIRRNRNSGKVKAGGSTISQQLAKNLFLNESRSYIRKGEEAAITAMMEAVTDKDRIFELYLNSIEWHYGVFGAEAASRYFYQIPAAKLTKQQAAKLTARVPAPLYYADHPKSKRLRNKTNIVLRRMGSAELPESDTD

SEQ ID NO: 4549 - protein, 395 aa, Neisseria meningitidis
MTEDERFAWLQLAFTPYIGAESFLLLLRRFGSASNALSAPAEQVAPAVRHKQAAEAWRNAEKRALARQAAEAALEWEMRDGCRLMLLQDEDFPEMLTQGLTAPPVLFLRGNVRLLHKPSAAIVGSRHATPQAMRIAKDFGRALGEKGIPVVSGMASGIDTAAHQGALQAEGGTIAVWGTGIDRIYPPSNKNLAYEIAEKGLIVSEFPIGTRPYAGNFPRRNRLIAALSQVTLVVEAALESGSLITAGLAAEMGREVMAVPGSIDNPHSKGCHKLIKDGAKLTECLDDILNECPGLLQNTGASSYSINKDTSDTGSRAVQAAYAPPPAAKMPSEGAAGGTAVGGILDKMGFDPIHPDVLAGQLAMPAADLYAALLELELDGSVAAMPGGRYQRIRT

SEQ ID NO: 4550 - protein, 171 aa, Neisseria meningitidis
MYTCTSCGEKHEDMPAIGFTAPYPYNQLSEEERIAYQAECGGDFCIIRYPDQTDRFIRAVLPIPIIGHEETLEYGVWVSVSEKSFNDYQSRFYDNLENAVYFGMICNWLPPYKSDTFGLHCNVVTQPDGQRPLLQLHQSGGHPLVRDFYHGIEYAEAQARIGAVSESDCSG

SEQ ID NO: 4551 - protein, 217 aa, Neisseria meningitidis
MKAVFVELPPFERFRADYFSSEEYRAFQNELMANPEKGDVIQGTRGLRKIRVADSKRGKGKRGGSRVIYYWAVSRAVFLLFTVYGKNVKDDLSPSEKRYFPPCFITSRKITMSERNLFEELKEGLEAAEQYLQGKITLRAIEAEIPENGAAAISPEEIRAIRESLNFSQAVFARKLRCSVRTYQGWEQGKTRPNPQAALLRRMVQKSPKTFKTIAAL

SEQ ID NO: 4552 - protein, 149 aa, Neisseria meningitidis
MKIGTTWQTASAMLVLRLFAAYEFLESGLQKWNGENWFSEINDQFPFPFNLLPDALNWNLAMYAELLLPVLLLLGLATRLSALGLMVVTAVAWAAVHAGSGYNVCDNGYKMALIYIVVLIPLLFQGAGGWSLDTLLKKRFCPQCRLKQD

SEQ ID NO: 4553 - protein, 521 aa, Neisseria meningitidis
MTQDKILILDFGSQVTQLIARRVREAHVYCELHSFDMPLDEIKAFNPKGIILSGGPNSVYESDYQADTGIFDLGIPVLGICYGMQFMAHHLGGEVQPGNQREFGYAQVKTIDSELTRGIQDGEPNTLDVWMSHGDKVSKLPDGFAVIGNTPSCPIAMMENAEKQFYGIQFHPEVTHTKQGRALLNRFVLDICGAQPGWTMPNYIEEAVAKIREQVGSDEVILGLSGGVDSSVAAALIHRAIGDQLTCVFVDHGLLRLNEGKMVMDMFARNLGVKVIHVDAEGQFMAKLAGVTDPEKKRKIIGAEFIEVFDVEEKKLTNAKWLAQGTIYPDVIESAGAKTKKAHAIKSHHNVGGLPENMKLKLLEPLRDLFKDEVRELGVALGLPREMVYRHPFPGPGLGVRILGEVKKEYADLLRQADDIFIQELRNTTDENGTSWYDLTSQAFAVFLPVKSVGVMGDGRTYDYVVALRAVITSDFMTAHWAELPYSLLGRVSNRIINEVKGINRVVYDVSGKPPATIEWE

SEQ ID NO: 4554 - protein, 488 aa, Neisseria meningitidis
MRQMPSEAVFLQFRQTRKIMKYISTRGETAHKPFSEVLLMGLAPDGGLMLPEHYPQIGRETLDKWRGLAYPELAFEIMRLFVTDIPEDDLRDILNRTYTEAAFGTKEITPVRTLSDGIKIQALSNGPTLAFKDMAMQFLGNAFEYVLNKEGKKLNILGATSGDTGSAAEYALRGKKGVNVFMLSPDGKMSAFQRAQMYSLQDENIHNIAVKGMFDDCQDIVKAVQNDAAFKEKYHIGTVNSINWGRIVAQVVYYFAGYFNATSSNDETVSFCVPSGNFGNVCAGHIAKQMGLPVRRLIVATNENDVLDEFFKTGAYRPRNSAHTYVTSSPSMDISKASNFERFVFDLMDRDPQEMNTLWAEVAAGKGFDLRFALEKVGGKYGFTSGKSTHPDRLATIRQVYEQDQELIDPHTADGVKVAREVREEGETVVCLETALAAKFDATIREAVGDAAIPRPAALEGLENLPQRVQTVPNSADAVKGIIEQTLA

SEQ ID NO: 4555 - protein, 77 aa, Neisseria meningitidis; identical to SEQ ID NO: 760

SEQ ID NO: 4556 - protein, 117 aa, Neisseria meningitidis; identical to SEQ ID NO: 3854

SEQ ID NO: 4557 - protein, 150 aa, Neisseria meningitidis
MVIKYTNLNFAKLSIIAILMMYSFEANANAVKISETVSVDTGQGAKIHKFVPKNSKTYSSDLIKTVDLTHIPTGAKARINAKITASVSRAGVLAGVGKLARLGAKFSTRAVPYVGTALLAHDVYETFKEDIQAQGYQYDTETDKFAKVSG

SEQ ID NO: 4558 - protein, 101 aa, Neisseria meningitidis; identical to SEQ ID NO: 2735

SEQ ID NO: 4559 - protein, 125 aa, Neisseria meningitidis
MIYGIGTDIVSLKRIIRLNKKFGQAFAVRILTPEELLEFPQAGKPVNYLAKRFAAKEAFAKAVGTGIRGAVSFRNIGIGHDALGKPEFFYGPALSKWLEEQGISRVSLSMSDEEDTVLAFVVAEK

SEQ ID NO: 4560 - protein, 589 aa, Neisseria meningitidis
MTVQTKTKGLAWQEKPLSDNERLKTESNFLRGTILDDLKDPLTGGFKGDNFQLIRFHGMYEQDDRDIRAERAEAKLEPLKFMLLRCRLPGGIIKPSQWIELDKFARENSHYRSIRLTNRQTFQFHGVPKAKLQTMHRLLHKLGLDSIATAADMNRNVLCTSNPIESELHRQAYEYAKKISEHLLPRTRGYLDVWVDGKKVQSSDDFLQEDEPILGKTYLPRKFKTAVVIPPLNDVDCYGNDLDFVAISDGNGQLAGFNVLAGGGLSMEHGNTKTYPNISLELGFVPPEHALKAAEAVVTTQRDFGNRSDRKNARTRYTIQNMGLDNFRAEVERRMGMPFEPIRPFKFTGRGDRIGWVKGIDGNWHLTLFIESGRLVDEGGKQLLTGVLEIAKIHKGDFRITANQNLIVANVPERGKARIEQLARSYGLIHDGVSKLRENAMSCVSFPTCPLAMAEAERVLPDFIDDLDKIMAKHGTSDDYIVTRITGCPNGCGRAMLAEIGLVGKAVGRYNLHIGGDREGVRIPRLYKENITLPEILAELDDLIGKWAAERNIGEGFGDFAIRTGIVKPVLDAPVDFWDASKAVPIARA

SEQ ID NO: 4561 - protein, 299 aa, Neisseria meningitidis; identical to SEQ ID NO: 3610

SEQ ID NO: 4562 - protein, 213 aa, Neisseria meningitidis
MLFRKTTAAVLAATLMLNGCTAMMWGMNDPFSQTTAYKHVDKDQIRAFGVVAKDNAQLEKGSLVMMGGKYWFVVNPEDSAKLTGILKAGLDKPFQIVEDTPSYARHQALPVKLESPGSQNFSTEGLCLRYDTDRPADIAKLKQLEFEAVELDNRTIYTRCVSAKGKYYATPQKLNADYHFEQSVPADIYYTVTEKHTDKSKLFANILYTPPPF

SEQ ID NO: 4563 - protein, 224 aa, Neisseria meningitidis
MPAALIKDFLLTQGLKLPLDEVRAAYLTAQTVMDMGTASIERSVLWLEHEDWRLADYLEQNSGNEESLKRLFMALDSVFSRCKGVRAAAVYALMPSENAAFRLVCLSRQGEVLENLWDLDEAAGKVSLACRSAQSGWMNIASDVRRWLDLGELSGERNHASAAQISIPVCTESGSVLGVVHVEFECAECADEAAQAEWVALALALSEPLKQLLGITAAEGDENV

SEQ ID NO: 4564 - protein, 207 aa, Neisseria meningitidis
MPNSFIDRRTEIYNQRNQNKITLSLRLSIKDDLILQELADAWETTRQDIINDLIQEFIIQDWENKRMIDKQKEEEFDNSTTTRYFLLNTNSANDLEDHNFMMTNQVAAAFEDGYKEKICRIKKGDYVFLYASGQGIVAYGQATGIIEKTHHYGVDNKTFFQKLEHFIDLSQNPIKAKQVKSILGRSFPFAQTLSQMTDGEKLLENLK

SEQ ID NO: 4565 - protein, 211 aa, Neisseria meningitidis
MPDVVFLNAVKYDKGSVSHFGEDYQPEKILNQSKVEVLKGLCRFRKFPGSACNKIIKRELIIKEKLFFEKEVYAEDIEWSMRLFNAATTFSYLDGCYYYYRQGRKDSKTGTVSEKSIKSLLYILEKNAEMEFDRDISSYLYSFLSYEYLVLLFIMTSKNIECDADIKRRAYHLRFMLLKSNKLIYKLIFPIITLFGVDITGRILKAIRGNI

SEQ ID NO: 4566 - protein, 1375 aa, Neisseria meningitidis
MTYPIPKPREKSRWPNLSQGSLPLALARYLPHKQLKVVLTQDAEQALRLQTAWLFFRPHDTAVFLPDWETLPYERFSPHQDLVSERLSALWQIKSGAADVLFVPVATAMQKLPPVPFLAGRTFWLKTGQTLDIGRLKSDLVDAGYNHVSHVVAAGEFAVRGGIVDLFPMGSEMPYRIDLFDDEIDSIKTFDTETQRTISPVSEIRLLPAHEFPTDSEAQKIFRSRFREEVDGNPNDAAVYKAVSNGHFGAGVEYYLPLFFENELETLFDYIGEDALFVSLGDVHAEANRFWSDVKSRYAMAQGDETYPPLLPQHLYLSADVFAGRLKNYGQVLPDVSGKEHALPDLAVNRQSDEPLQALKDFQTAFEGRILLCAESLGRRETMLGFLQQNGLKAKPVSDWQGFLSAHEPLMITVAPLAYGFKLGGLQSPNQQQTTSASEGEGDAVTDQTEFSASATNPLPSPLPQEREQSAAAVSDSLKAAAVSTESSLPPGKSNLHGQIRQQPTPSPVGEDWGESKTVAAQTEFPASATNPLPSPLPQEREQSAAVVSDSLKAAAVSTESSLPPGKSNLHGQIRQQPTPSPVGEDWGESKTVAAQTEFPASATNPLPSPLPQEREQSAAAVSDDLKTKSSLYPIENSLHGQIRQQPAPSPVGEGWGEGKAVADQSAIAVITESDLYQYVARSRVHNRRKKHAAVSDGLLRDLAEINIGDPVVHEEHGIGRYMGLITMDLGGETNEMMLLEYAGEAQLYVPVSQLHLISRYSGQAHENIALHKLGSGAWNKAKRKAAEKARDTAAELLNLYARRAAQSGHKFEINELDYQAFADGFGYEETEDQAAAIAAVIKDLTQAKPMDRLVCGDVGFGKTEVALRAAFVAVMGGKQVAVLAPTTLLVEQHAQNFADRFADFPVKVASLSRFNNSKATKAALEGMADGTVDIVIGTHKLVQDDIKFKNLGLVIIDEEHRFGVRQKEQLKRLRANVDILTMTATPIPRTLSMALEGLRDFSLITTAPSRRLSVKTFVKPFSEGSVREAVLRELKRGGQVFFLHNEVDTIENMRERLETLLPEARIGVAHGQLRERELEQVMRDFLQQRFNVLLCSTIIETGIDIPNANTIIINRADKFGLAQLHQLRGRVGRSHHQAYAYLLTPEYITKDAEKRLDAIAAADELGAGFTLAMQDLEIRGAGEILGEGQSGEMIQVGFTLYTEMLKQAVRDLKKGRQPDLDAPLGITTEIKLHSPALLPESYCPDIHERLVLYKRLAVCETVQQINAIHEELVDRFGLPEQPVKTLIESHHLRLMAKELGIDAIDAAGEAVTVTFGKNNNVDPTEIILLIQNDKKYRLAGADKLRFTAEMENIEVRINTVKNVLKTLQNRCLPK

SEQ ID NO: 4567 - protein, 365 aa, Neisseria meningitidis
MKSVRSFIRDDIQAMSAYQIADVPPGFAKLDSMESPVHPFAGHETLLQEWQARLAAAPIHLYPNPSGSGLQEALRSAFDIPDCADIALGNGSDELIQFITMLTAKPGAAMLAAEPSFVMYRHNAALYGMDYVGVPLNGDFTLNLPAVIEAVRKHRPALTFIAYPNNPTGVCFTRAEIEAVIEASDGIVVVDEAYGAFNGDSFLPQAGSIPNLIVIRTVSKIGFAGLRIGYAAGCPEVIGELQKILPPYNMNQLSLTTAKLALQHYGIISANIDSLKNERERMFAELGKICRLNTFPSQANFITIRVPDADLLFDTLKQNRVLVKKLHGAHPLLEHCLRITVGSPAQNDAVLNIIRQLYCQPTDFL

SEQ ID NO: 4568 - protein, 68 aa, Neisseria meningitidis; identical to SEQ ID NO: 3041

SEQ ID NO: 4569 - protein, 252 aa, Neisseria meningitidis
QPPKTFSSLLFSSLLFSSAAQAASEDGSRSPYYVQADLAYAAERITHDYPKATGANNTSTVSDYFRNIRAHSIHPRVSVGYDFGGWRIAADYASYRKWKESNYSKKVTEFKHENGNKKEDKTEHQGNGSFHAASSLGLSAIYDFKLNDKFKPYIGARVAYGHVKHQVHSVESKTTTVTSKGGGPIPQGPTPKPPYHESNSISSLGLGVIAGVGFDITPKLTLDTGYRYHNWGRLENTRFKTHEVSLGVRYHF

SEQ ID NO: 4570 - protein, 333 aa, Neisseria meningitidis; identical to SEQ ID NO: 620

SEQ ID NO: 4571 - protein, 399 aa, Neisseria meningitidis
MSDQLILVLNCGSSSLKGAVIDRKSGSIVLSCLGERLTTPEAVITFSKDGNKRQVPLSGRNCHAGAVGMLLNELEKHGLHDRIKAIGHRIAHGGEKYSESVLIDQAVMDELNACIPLAPLHNPANISGILAAQEHFPGLPNVGVMDTSFHQTMPERAYTYAVPRELRKKYAFRRYGFHGTSMRYVAPEAARILGKPLEDIRMIIAHLGNGASITAIKNGKSVDTSMGFTPIEGLVMGTRCGDIDPGVYSYLTSHAGMDVAQVDEMLNKKSGLLGISELSNDCRTLEIAADEGHEGARLALEVMTYRLAKYIASMAVACGGVDALVFTGGIGENSRNIRAKTVSYLDFLGLHIDTKANMEKRYGNSGIISPTDSSPAVLVVPTNEELMIACDTAELAGIL

SEQ ID NO: 4572 - protein, 1454 aa, Neisseria meningitidis
MKTTDKRTTETHRKAPKTGRIRFSPAYLAICLSFGILPQAWAGHTYFGINYQYYRDFAENKGKFAVGAKDIEVYNKKGELVGKSMTKAPMIDFSVVSRNGVAALVGDQYIVSVAHNGGYNNVDFGAEGSNPDQHRFTYKIVKRNNYKAGTKGHPYGGDYHMPRLHKFVTDAEPVEMTSYMDGRKYIDQNNYPDRVRIGAGRQYWRSDEDEPNNRESSYHIASAYSWLVGGNTFAQNGSGGGTVNLGSEKIKHSPYGFLPTGGSFGDSGSPMFIYDAQKQKWLINGVLQTGNPYIGKSNGFQLVRKDWFYDEIFAGDTHSVFYEPRQNGKYSFNDDNNGTGKINAKHEHNSLPNRLKTRTVQLFNVSLSETAREPVYHAAGGVNSYRPRLNNGENISFIDEGKGELILTSNINQGAGGLYFQGDFTVSPENNETWQGAGVHISEDSTVTWKVNGVANDRLSKIGKGTLHVQAKGENQGSISVGDGKVILDQQADENNKKQAFSEIGLVSGRGTVQLNADNQFNPDKLYFGFRGGRLDLNGHSLSFHRIQNTDEGAMIVNHNQDKESTVTITGNKDIATTGNNNSLDNKKEIAYNGWFGEKDTTKTNGRLNLNYQPTEADRTLLLSGGTNLNGNITQTNGKLFFSGRPTPHAYNHLNNHWSQKEGIPHGEIVWDNDWINRTFKAENFHIQGGQAVISRNVAKVEGDWHLSNHAQAVFGVAPHQSHTICTRSDWTGLTNCVEKTITDDKVIASLTKTNISGNVSLADHAHLNLTGLATLNGNLSANGDTRYTVSHNATQSGNLSLVGNAQATFNQATLNGNTSASGNASFNLSNNAVQNGSLTLSDNAKANVSHSALNGNVSLADKAVFHFENSRLTGQISGGKDTALHLKDSEWTLPSGTELGNLNLDNATITLNSAYRHDAAGAQTGSATDAPRRRSRRSLLSVTPPTSAESRFNTLTVNGKLNGQGTFRFMSELFGYRSDKLKLAESSEGTYTLAVNNTGNEPASLEQLTVVEGKDNKPLSENLNFTLQNEHVDAGAWRYQLIRKDGEFRLHNPVKEQELSDKLGKAEAKKQAGKDNAQSLDALIAAGRDAVEKTESVAEPARQAGGENVGIMQAEEEKKRVQADKDSALAKQREAETRPATTAFPRARRARRDLPQPQPQPQPQPQRDLISRYANSGLSEFSATLNSVFAVQDELDRVFAEDRRNAVWTSGIRDTKHYRSQDFRAYRQQTDLRQIGMQKNLGSGRVGILFSHNRTENTFDDGIGNSARLAHGAVFGQYGIDRFDIGISAGAGFSSGSLSDGIGSKIRRRVLHYGIQARYRAGFGGFGIEPHIGATRYFVQKADYRYENVNIATPGLAFNRYRAGIKADYSFKPAQHISITPYLSLSYTDAASGKVRTRVNTAVLAQDFGKTRSAEWGVNAEIKGFTLSLHAAAAKGPQLEAQHSAGIKLGYRW

SEQ ID NO: 4573 - protein, 674 aa, Neisseria meningitidis
MNDMTLYLIIALVPLAGSLIAGLFGNKIGRAGAHTVTILGVAVSAVLSAYVLWGFIDGSRAKFDENVYTWLTMGGLDFSVGFLVDTMTAMMMVVVTGVSLMVHIYTIGYMHDEKVGYQRFFSYISLFTFSMLMLIMSNNFIQLFFGWEAVGLVSYLLIGFYFKRPSATFANLKAFLINRVGDFGFLLGIGLVLAYFGGSLRYQDVFAYLPNVQNATIQLFPGVEWSLITVTCLLLFVGAMGKSAQFPLHVWLPDSMEGPTPISALIHAATMVTAGLFMVSRMSPIYEMSSTALSVIMVIGAITALFMGFLGVIQNDIKRVVAYSTLSQLGYMTVALGASAYSVAMFHVMTHAFFKALLFLAAGSAIIGMHHDQDMRHMGNLKKYMPITWLTMLIGNLSLIGTPFFSGFYSKDSIIEAAKYSTLPGSGFAYFAVLASVFVTAFYAFRQYFMVFHGEEKWRSLPEHHDDHHGEEHHSLGKNDNPHESPLVVTLPLILLAIPSVIIGYVAIEPMLYGDFFKDVIFVNTDAHPTMHIMKEEFHGALAMVSHSLTSPVLYLAAAGVAAAWLLYVKLPHLPAKIAQAFRPVYVLFENKYYLDALYFNVFAKGTRALGTFFWKVGDTAIIDNGIVNGSAKLVGAIAAQVRKAQTGFIYTYAAAMVFGVLVLLGMTFWGLFR

SEQ ID NO: 4574 - protein, 250 aa, Neisseria meningitidis
MITLPSLNNLPSKWDEIRHCLETRVFECGVMPHPNLTECEAGQFDRDFWDNIGCAPEEYVRIRRAIRLLEARYPDSLNELVCAAIATPLGEMLAVFGNKGLCLLEFVGQKHMEQEIAAVQKALRGRFVFREDERTQLLRQELDLYFKGRLKTFATPLEQIGTEFQKQAWDALLAIPYGETRSYKEQAQRLGNPKAVRAVAAANGQNKVSILIPCHRVIGSDGKLTGYAGGLNRKQFLLALERGEVQTALF

SEQ ID NO: 4575 - protein, 169 aa, Neisseria meningitidis
MNPFETKSVTFAEPIEMLYACHGKVRRFCGQVAMLSDYIAENGCNQIVLQTIRQIAQYFNVAAPLHHEDEEENFFPLLLQYAPQAQESVDELLRQHIGLHDNWAAVSAEFAKLEADNAYVPDEEAFKRFVAGYDVHLAIEEPLFDMGNTFIPKEKLTEIGEIMAARRRK

SEQ ID NO: 4576 - protein, 161 aa, Neisseria meningitidis; identical to SEQ ID NO: 1189

SEQ ID NO: 4577 - protein, 244 aa, Neisseria meningitidis; identical to SEQ ID NO: 1321

SEQ ID NO: 4578 - protein, 130 aa, Neisseria meningitidis
MEFLSLHPWWSFFIILTIILSYIGFCAHLHIQNRAVFFYSYRDVTIIFLTPVILIALSYLIKNKEILSACILCITLIAFSWAWIIIYRPNTKRFFLSLLIVWGKLLFKYYCLGNSRHITWLSCNNREQQA

SEQ ID NO: 4579 - protein, 344 aa, Neisseria meningitidis
MPNCFKFHTVIERHWQKPYPVLSFLLKPLSGLFAKIAAKRRTDFLSGKRQSEKLPVPVVVVGNIHAGGTGKTPIVAALVSGLQEKGVKVGIISRGYGRKSKAVHVLNAESRAEDAGDEPLLLFRKTGAPTAVGSSRAEAGRALLAAHPDIGLIVADDGLQHYALRRDVEIAVFPAADTGRTDLDLLPNGSLREPLLRLDSVDAVVVSGGKADALFRPSENMFHSRIEAGRIYRLNNPSEILDTGRLKNQTVVAVAGIAKPARFFDSLRNMGITVKRTVALPDHADISAADLPDADAVIITEKDAVKFSDGICTDNVWVLPVCAIIEPDLAAFVLERLEDVPKAV

SEQ ID NO: 4580 - protein, 142 aa, Neisseria meningitidis
PREVLCILIPIGCCCSKDRRPLINEITCLSLLTIFILCHFAGQNRRQCCQVSDRTSGRPLLVPDVRLLQVIRAVQHAFGAACYNNGIGWRLARFACPQTNGKAERVIRTLMEMWHEEQSFDSPEHRQKELCCFINLGAALDH

SEQ ID NO: 4581 - protein, 475 aa, Neisseria meningitidis; identical to SEQ ID NO: 3229

SEQ ID NO: 4582 - protein, 273 aa, Neisseria meningitidis
MAVLITGASAGFGEAMCRAFVGAGYRVIGAARRADRLQALADELGALFYPLEMDVSRRESVENALNGIPDEFSDIDCLINNAGLALGLDTADKADFEDWETMIQTNVLGLTFLTRKILPQMVERGGGYVMNLGSIAGNYAYAGSNVYGATKAFVRQFSLNLRAELADKNIRVTNIEPGLCGNTEFSNVRFKGDDEKAAGVYEGVEFIRPEDIAETALWLYRRPAHMNVNTIEIMPVAQTFAGMKVIKKAVPEVREDFEKQSMSLFSRIRSWFK

SEQ ID NO: 4583 - protein, 297 aa, Neisseria meningitidis; identical to SEQ ID NO: 2791

SEQ ID NO: 4584 - protein, 160 aa, Neisseria meningitidis
MTNIRIGQGYDVHQLTEGRKLILGGVEIPFEKGLLGHSDADALLHAVTDALLGAAGLGDIGSHFPDTASEFKDADSRALLRDAYRSVQAKGWHVVNVDTTVIAQKPKLAPHIPQMRANIAADLGIDISCVNIKGKTNEKLGYLGRMEGIEAQAAVLLVRI

SEQ ID NO: 4585 - protein, 518 aa, Neisseria meningitidis
MDFSWLAEPHTWIGFATLLVLEVVLGIDNLVFVAILANKVQPARRDRARIIGLGLAVVIRIIMLAFMAHIITLTEPLFQIGGLAVSGKDMIMLAGGIFLLYKATTELHERLEGHNRFTVADSQKKHAPFWGVVAQILILDAVFSIDSVITAVAMVDHIVVAMGAVVVAMAVMISASKLLTEFVDRHPTVVMLCLGFLLMIGFSLIAEAFHFHIPKGYLYAAIGFSILIELFNQISQRNSRKNDYIGSSWRKRTAENVLGMMGIRESVLADAGGESVDDAHFEENEKSMIRSVLTLAERPIMGVMIPRRDIERLDISQSREEQCAQLQNTPYSRLLVVGKAGVDEPLGYINKKDLLSQLLETGGLDIQTALRQPLVLPDSTTALGAIELFRQSSADYALVVDEFGAVLGMVTMKDLLETIAGEFPEEFEREEEPAVQGNPDESLTVEGALEYVELAPQLNLPQQEEDADFHTVAGLIMEELQTIPDVGDFADFHGWRFEVVEKEGQRIERVKITKLPEE

SEQ ID NO: 4586 - protein, 488 aa, Neisseria meningitidis
MAEATDVVLVGGGIMSATLGVLLKELEPSWEITLIERLEDVALESSNAWNNAGTGHSALCELNYAPLGADGIINPARALNIAEQFHISRQFWATLVAEGKLEDNSFVNAVPHMSLVMNEDHCRYLQKRYDVFKTQKLFENMEFSTDRNKISDWAPLIMRGRDENQPVAANYSAEGTDVDFGQLTRQMVKYLQGKGVKTEFNRHVEDIKRESDGAWVLKTADTRNPDGQLTLRTRFLFLGAGGGALTLLQKSGIPEGKGYGGFPVSGLFFRNSNPETAEQHNAKVYGQASVGAPPMSVPHLDTRNVDGKRHLMFGPYAGFRSNFLKQGSLMDLPLSIHMDNLYPMLRAGWANMPLTKYLLGELRKTKEERFASLLEYYPEANPDDWELITAGQRVQIIKKDSEKGGVLQFGTEIVAHADGSLAALLGASPGASTAVPLMIRLMHQCFPKRAPSWEGRLKELVPGYGIKLNENPERADEIIAYTAKVLDI

SEQ ID NO: 4587 - protein, 215 aa, Neisseria meningitidis
MKGVYFVSGIDTDIGKTVATGVLAKQLLQQGKSVITQKPVQTGCQNIADDIAVHRKIMGKPMQEADKQGLTMPEIFSYPASPHLAARLDGRALDLDKIRTATQELAAQYEIVLVEGAGGLMVPLTEKLLTIDYIRQQGYPVILVTSGRLGSINHTLLSFAALKQYGIRLHSLIFNHIHDSSDECVAQDSLNYLQCRLKDSFPEAEWLELDKTDAV

SEQ ID NO: 4588 - protein, 170 aa, Neisseria meningitidis; identical to SEQ ID NO: 1571

SEQ ID NO: 4589 - protein, 160 aa, Neisseria meningitidis; identical to SEQ ID NO: 515

SEQ ID NO: 4590 - protein, 518 aa, Neisseria meningitidis
MTLAEFWPLCLRRLHDMLPQGQFAQWIAPLTVGEEGGVWVVYGKNQFACNMLKSQFAGKIEAVREELAAGRSAFVFKPGEGVRYEMAAVEGAVEPAEPSLHAVSEGMPVQEVLLDELPSEEPVKPAASKTAADILAERMKNLPHEPRHTAGSASRPESEVLAKARTDAQRDAEEARYEQTNLSPDYTFDTLVEGKGNRLAAAAAQAIAESPGQSYNPFFLYGSTGLGKTHLVQAVGNELLKNRPDAKVRYMHSDDYIRSFMKAVRNNTYDVFKQQYKQYDLLIIDDIQFIKGKDRTMEEFFYLYNHFHNEKKQLILTCDVLPAKIEGMDDRLKSRFSWGLTLELEPPELEMRIAILQKKAEAAGISIEDEAALFIANLIRSNVRELEGAFNRVGASSRFMNRPVIDIDLARTALQDIIAEKHKVITADIIIDAVAKYYRIKISDVLGKKRTRNIARPRQVAMSLTKELTTLSLPSIGDSFGGRDHTTVMHGIRAVAKLREEDPELAQDYEKLLILIQN

SEQ ID NO: 4591 - protein, 209 aa, Neisseria meningitidis
MAAHLEEQQELDNFKYFWKTTGKWLFALLILAALGYLGYTVYQNRAASQNQEAAAVLANIVEKAQNKAPQSEINAELTKLQQSYPHSISAAQATLMAAATEFDAQRYDVAEGHLKWVLSNQKDSLIQALAAQRLGVVLLQQKKYDAALAALDTPVEADFSPLLMETKGDVYAAQGKSQEALKNYGQALEKMPQDSVGRELVQMKLDSLK

SEQ ID NO: 4592 - protein, 315 aa, Neisseria meningitidis
MQLHDFSLIAVNTVNVPQMPHPCQTVHTLTARVPKCRLKLNAARRQRYNRPQLFFPNIIMTTTEHDNDDAFLLRYSRHILLDEIGIEGQQKLSAAHILVVGCGGLGAAALPYLAASGIGTLTIADSDTVELHNLQRQVAFDEGDVGKPKAEALADRLKRINHNVDVRTVNEKLDGCRLTGLVQTADIVLDCCDNYATRQAVNRVCVQTKTPLVSGAAVRFEGQLAVYRPDLPDSPCYACLFDGGSASDGICSLFGVFSPLVGIIGCTQAAEALKILLDVGEPSHGRLAVYRALEGGWQYFDLPRNPECPICGTER

SEQ ID NO: 4593 - protein, 797 aa, Neisseria meningitidis
MKLKQIASALMVLGISPLALADFTIQDIRVEGLQRTEPSTVFNYLPVKVGDTYNDTHGSAIIKSLYATGFFDDVRVETADGQLLLTVIERPTIGSLNITGAKMLQNDAIKKNLESFGLAQSQYFNQATLNQAVAGLKEEYLGRGKLNIQITPKVTKLARNRVDIDITIDEGKSAKITDIEFEGNQVYSDRKLMRQMSLTEGGIWTWLTRSNQFNEQKFAQDMEKVTDFYQNNGYFDFRILDTDIQTNEDKTKQTIKITVHEGERFRWGKVSIEGDTNEVPKAELEKLLTMKPGKWYERQQMTAVLGEIQNRMGSAGYAYSEISVQPLPNAETKTVDFVLHIEPGRKIYVNEIHITGNNKTRDEVVRRELRQMESAPYDTSKLQRSKERVELLGYFDNVQFDAVPLAGTPDKVDLNMSLTERSTGSLDLSAGWVQDTGLVMSAGVSQDNLFGTGKSAALRASRSKTTLNGSLSFTDPYFTADGVSLGYDVYGKAFDPRKASTSIKQYKTTTAGAGIRMSVPVTEYDRVNFGLVAEHLTVNTYNKAPKHYADFIKQYGKTDGTDGSFKGWLYKGTVGWGRNKTDSALWPTRGYLTGVNAEIALPGSKLQYYSATHNQTWFFPLSKTFTLMLGGEIGYANGYGKTKEIPFFENFYGGGLGSVRGYESGTLGPKVYDEYGEKISYGGNKKANVSAELLFPMPGAKDARTVRLSLFADAGSVWDGKTYDDNSSSATGGRVQNIYGAGNTHKSTFTNELRYSAGGAVTWLSPLGPMKFSYAYPLKKKPEDEIQRFQFQLGTTF

SEQ ID NO: 4594 - protein, 318 aa, Neisseria meningitidis
MTACFTTYPNITMRIRLGRHNAPDFPHGAAVTIGNFDGVHLGHKHILQKLRLEADTRGLPVVTVVFEPQPKEFFALRTGRMPPCRISPLRTKLELLEGTGCVDAVWVLRFDQNFSEISAQGFIDRLLRQTLNTRYLLVGDDFRFGAGREGCFELLAQQPDMQTERTPSVIVEDIRTSSTAVRQALSDGNLAYAKKLLGHDYVLSGRVVHGRKLGRTLNAPTANIRLPRHRYALGGVFVVEADGAFGTRRGVASFGFNPTVDSDCFQKLEVHLFDFQGDLYGQRLNVRFLHKLRDEEKFDGMEELKRQIEADMEAAKCW

SEQ ID NO: 4595 - protein, 139 aa, Neisseria meningitidis; identical to SEQ ID NO: 160

SEQ ID NO: 4596 - protein, 406 aa, Neisseria meningitidis
MAVNLTEKTAEQLPDIDGIALYTAQAGVKKPGHTDLTLIAVAAGSTVGAVFTTNRFCAAPVHIAKSHLFDEDGVRALIINTGNANAGTGAQGRIDALAVCAAAARQIGCKPNQVLPFSTGVILEPLPADKIIAALPKMQPAFWNEAARAIMTTDTVPKAASREGKVGDKHTVRATGIAKGSGMIHPNMATMLSFIATDAKVSQPVLQLMTQEIADETFNTITVDGDTSTNDSFVIIATGKNSQSEIDNIADPRYAQLKELLCSLALELAQAIVRDGEGATKFITVRVENAKTRDEARQAAYAVARSPLVKTAFFASDPNLGRLLAAIGYAGVADLDTDLVEMYLDDILVAEHGGRAASYTEAQGQAVMSKDEITVRIKLHRGQAAATVYTCDLSHGYVSINADYRS

SEQ ID NO: 4597 - protein, 373 aa, Neisseria meningitidis
MSNQDFYATLGVARTATDDEIKKAYRKLAMKYHPDRNPDNKEAEEKFKEVQKAYETLSDKEKRTMYDQYGHAAFEGGGQGGFGGFGGFGGAQGFDFGDIFSQMFGGGSGRAQPDYQGEDVQVGIEITLEEAAKGVKKRINIPTYEACDVCNGSGAKPGTSPETCPTCKGSGTVHIQQAIFRMQQTCPTCHGAGKHIKEPCVKCRGAGRNKAVKTVEVNIPAGIDDGQRIRLSGEGGPGMHGAPAGDLYVTVRIRAHKIFQRDGLDLHCELPISFATAALGGELEVPTLDGKVKLTVPKETQTGRRMRVKGKGVKSLRSSATGDLYCHIVVETPVNLTDRQKELLEEFERISTGLENQTPRKKSFLDKLRDLFD

SEQ ID NO: 4598 - protein, 103 aa, Neisseria meningitidis
MLAILLSAILGLVSTTAAAGTSEPAHRHTKHIRKANKQMLHPECRKYLERRAAWYRSQGNVQELRENKKARKAFRSLPYAEQKIQCRAAYEAFDDFDGGSFRR

SEQ ID NO: 4599 - protein, 351 aa, Neisseria meningitidis
MTILSDVKALGQQIWLDNLSRSLVQSGELAQMLKQGVCGVTSNPAIFQKAFAGDALYADEIAALKQQNLSPKQRYETMAVADVRAACGVCLAEHESTGGKTGFVSLEVSPELSKDAQGTVEEARRLYAAIGCKNAMIKVPATDAGIDALEILVSDGISVNLTLLFSRAQTLKAYAAYARGIAKRLAAGQSVAHIHVVASFFISRVDGALDTTLPDHLKGKIAIALAKTAYQDWEQYFTAPKFAALEAQGANRVQLLWASTGVKNPAYPDTLYVDSLIGAHTVNTVPDATLKAFIDHGTAKATLTEGVDEARARLAEIAALGIDVETLAARLQEDGLKQFEEAFEKLLAPLV

SEQ ID NO: 4600 - protein, 485 aa, Neisseria meningitidis
MSRHPAPTGEKTFFGHPFQLSTLFHIELWERFSFYGMQGILLIYLYYTADKGGLGIDKTLAGGIVGAYSGSVYLSTILGAWFADRVWGAEKTLFLSGIVVMLGHIVLAAAPGLYGLLIGLIFIALGSGGVKSTASSMVGALYEQDEMRPLRDAGFSIFYIAINIGGFLGPLLTGLLQENIGFHYGFGAAAVGMAFGLWRYSLGRKNLPHPTVPHPLSKGQGKTAAAVGITLIAALATAIKTGLVNLDNFSGILLSTVILAVIAYFARLLTNPRVSSDNKRHIIAYIPLFLTICMFWAVWFQIYTVATVYFDETVNRTIGSFTVPVAWKDSMQSLWVILFSGLMAAMWTKMGRKQPKTPLKFAMAVFVTGASFLGFVPFISAGTPMPIAVFALIVLAITIGELMISPIALSISTKIAPPLFKTQMVALNFLAFSLGFTLGGVLFEKGYQAGDEIGFYRLLFYIGAATGFLLLLLVPKLNKMLEGTD

SEQ ID NO: 4601 - protein, 612 aa, Neisseria meningitidis
MCGIVGAIRAHHNVVDFLTDGLKRLEYRGYDSSGIAVNTDGKIKRVRRVGRVQLMEDAAREKGISGGIGIGHTRWATHGGVTEPNAHPHISGGMIAVVHNGIIENFESERKRLEGLGYRFESQTDTEVIAHSINHEYAQNGGRLFEAVQEAVKRFHGAYAIAVIAQDKPDELVVARMGCPLLVALGDDETFIASDVSAVIAFTRRVAYLEDGDIALLASDGIKRLTDKNGLPAERKVKVSELSLASLELGPYSHFMQKEIHEQPRAIADTAEVFLDGGFIPENFGKDAKSVFESIRSVKILACGTSYYAALTAKYWLESIAKIPTDVEIASEYRYRSVIADPDQLVITISQSGETLDTMEALKYAKSLGHRHSLSICNVMESALPRESSLVLYTRAGAEIGVASTKAFTTQLVALFGLAVTLAKVRGLVSGEDEARYTEELRQLPGSVQHALNLEPQIAAWAQQFAKKTSALFLGRGIHYPIALEGALKLKEITYIHAEAYPAGELKHGPLALVDENMPVVVIAPNDSLLDKVKANMQEVGARGGELFVFADLDSNFNATEGVHVIRAPRHVGELSPVVHTIPVQLLSYHTALARGTDVDKPRNLAKSVTVE

SEQ ID NO: 4602 - protein, 213 aa, Neisseria meningitidis
MSPIRGIRAILKKPSGLRMRAVGHCWKRFPNKAIEYKYKTASCRIGCSDGINREFMKTNFKQKIIEQARSEGLQVTALREQVLDIVLQQSGVIKAYNVLSQMQQQSEGVLAPPTAYRALDFWAEQGVLHKVAAVNGYILCSHAQHECDDHCHDHEEAEAHHSAFILVCTECGTADEQTLSHEWAALRAGVAESGFALKEEHVVLTGICKKCQK

SEQ ID NO: 4603 - protein, 461 aa, Neisseria meningitidis
MDGWTQTLSAQTLLGISAAAIILILILIVKFRIHALLTLVIVSLLTALATGLPTGSIVNDVLVKNFGGTLGGVALLVGLGAMLGRLVETSGGAQSLADALIRMFGEKRAPFALGVASLIFGFPIFFDAGLIVMLPIVFATARRMKQDVLPFALASIGAFSVMHVFLPPHPGPIAASEFYGANIGQVLILGLPTAFITWYFSGYMLGKVLGRTIHVPVPELLSGGTQDNDLPKEPAKAGTVVAIMLIPMLLIFLNTGVSALISEKLVSADETWVQTAKIIGSTPIALLISVLVALFVLGRKRGESGSALEKTVDGALAPVCSVILITGAGGMFGGVLRASGIGKALADSMADLGIPVLLGCFLVALALRIAQGSATVALTTAAALMAPAVAAAGFTDWQLACIVLATAAGSVGCSHFNDSGFWLVGRLLDMDVPTTLKTWTVNQTLIALIGFALSALLFAIV

SEQ ID NO: 4604 - protein, 109 aa, Neisseria meningitidis
MKQNIEKLESSVYTLVQKFETLVSENRRLKETVAELKRAHERQKLEHETAVDELSEALLVQVGKLKEDLQNKIDSLTEENTRYRSLLEQSREKISALAARLPQWQETQQ

SEQ ID NO: 4605 - protein, 146 aa, Neisseria meningitidis
VRAFQTALRPSRILNILTVSLHAASLAVCLTWFYGWMMWFGLAALVASYAYSLRITNLKHRHAITAITIDRDGQAEIISGKDKTAATLAGSSMVTPYALFLQWDTGGTTVSQCIIPDMTDKESYRRLKVWILWRQPKKTAETDTPS

SEQ ID NO: 4606 - protein, 222 aa, Neisseria meningitidis
PYYVQADLAYAAERITHDYPQATGANNTSTVSDYFRNIRAHSIHPRVSVGYDFGGWRIAADYASYRKWKESNYSKKVTEFKHENGNKKEDKTEHQGNGSFHAASSLGLSAIYDFKLNDKFKPYIGARVAYGHVKHQVHSVESKTTTVTSKGGGPIPQGPTPKPPYHESNSISSLGLGVIAGVGFDITPKLTLDTGYRYHNWGRLENTRFKTHEVSLGVRYHF

SEQ ID NO: 4607 - protein, 240 aa, Neisseria meningitidis
MKPAYFISDLHLSEKHPELTALLLRFLRSSAAGQARAVYILGDLFDFWVGDDEVSELNTSVAREIRKLSDKGVAVFFVRGNRDFLIGQDFCRQAGMTLLPDYSVLDLFGCKTLICHGDTLCTDDRAYQRFRKIVHRKRLQKLFLMLPLKWRTRLAAKIRRVSKMEKQVKPADIMDVNAAFTARQVRAFNAERLIHGHTHREHIHHENGFTRIVLGDWHNDYASILRVDGDGAVFVPLEKC

SEQ ID NO: 4608 - protein, 129 aa, Neisseria meningitidis; identical to SEQ ID NO: 322

SEQ ID NO: 4609 - protein, 642 aa, Neisseria meningitidis
MAKVIGIDLGTTNSCLAISENGQTKVIENAEGARTTPSVIAYLDGGEILVGAPAKRQAVTNAKNTIYAAKRLIGHKFEDKEVQRDIESMPFEIIKANNGDAWVKAQGKELSPPQISAEVLRKMKEAAEAYLGEKVTEAVITVPAYFNDSQRQATKDAGRIAGLEVKRIINEPTAAALAFGMDKGDNKDRKVAVYDLGGGTFDISIIEIANLDGDKQFEVLATNGDTFLGGEDFDQRLIDYIIDEFKKEQGIDLKQDVMALQRLKEAAEKAKIELSSGQQTEINLPYITMDATGPKHLAMKITRAKFESLVEDLIQRSIEPCKVALKDAGLSTSDIDDVILVGGQSRMPKVQEAVKAFFGKEPRKDVNPDEAVAVGAAIQGEVLSGGRSDVLLLDVTPLSLGIETMGGVMTKLIQKNTTIPTKASQVFSTAEDNQSAVTIHVLQGERERASANKSLGQFNLGDIAPAPRGMPQIEVTFDIDANGILHVSAKDKGTGKAANITIQGSSGLSEEEIERMVKDAEANAEEDKKLTELVASRNQAEALIHSVKKSLADYGDKLDAAEKEKIEAALKEAEEAVKGDDKAAIDAKAEALGAASQKLGEMVYAQAQAEAQAGESAQTNASAKKDDDVVDADFEEVKDDKK

SEQ ID NO: 4610 - protein, 201 aa, Neisseria meningitidis
MTIMNINTSENKDAVAEHTGQWLEKAVIGLNLCPFAKAPHVKNLVRIAISEAKHLDGFLEDLDEELQRLGNTPATELETTLLVHPTLFPDFGVFNDMLDIADAAVVENGLEGIVQIAPFHPDFQFEGTDSDDIGNYTNRSPYPTLHLIREDSIAKAAQAFPDASAIFERNIALLEKMGHEGWAKLGITSCPYPHNKKNISK

SEQ ID NO: 4611 - protein, 245 aa, Neisseria meningitidis
MLLIPAIDLKEGRCVRLRQGLMEEATVFSDSPAETALHWFEQGARRLHLVDLNGAFAGVPQNLPAIKDILAAVAKDIPVQLGGGIRDLKTIGQYLDLGLNDVIIGTAAVKNPDFVREACKAFPGRIIVGLDAKDGMAAIDGWATVTGHHVIDLAKRFEDDGVNSIIYTDIGRDGMMSGVNIDATVKLAQAVRIPVIASGGLTGLDDIRALCAAEKHGVAGAITGRAIYEGSIDFAQAQQLADSLD

SEQ ID NO: 4612 - protein, 421 aa, Neisseria meningitidis; identical to SEQ ID NO: 3252

SEQ ID NO: 4613 - protein, 93 aa, Neisseria meningitidis; identical to SEQ ID NO: 2125

SEQ ID NO: 4614 - protein, 468 aa, Neisseria meningitidis
VEFSTKTEILQEQQAGAQLFVCTEEAQLNHPTALALLSSLEEGQNFADTKIPTGNGLQAVAVCCLKSTGRAALKKAAAEAAKWAQNQETVNVDIHAFDEAQAAAVAEAFAIAFGNAAYRFDRYKKEAKPAKFETAVFHSAHEAVVKEALRVAEAQVYGQSLCRDLGNAAPNECTPEFLARTAKAEAEKLGAHAKIIEKDYIKENMGSFWSVAKGSAEAPYLVELSYFGAADKEAAPVVLVGKGITFDTGGISLKPGLNMDEMKFDMCGAATVISTFCAAVKLQLPINLIAVVATCENMPSGAANKPGDVVKSMKGLTIEVLNTDAEGRLILCDALTYAEQFKPKAVIDVATLTGACIVALGHDVSGVMGNNQDLIDSLLAASYNVDDKAWQLPLFETYKDQLKSNFADIPNIGTPGAGTITAATFLSYFTEDYPWAHLDIAGTAWKSGAEKGATGRPVPLLLNYLRNL

SEQ ID NO: 4615 - protein, 165 aa, Neisseria meningitidis
MSTTRPIIDAVVEHLQAAIPWVSVEAFPERPSEYQFIHPVGAILVGYGGSKFGDIEQLGRIAQQRDVRLMLTVFGSSLNADDGTLAILDETRLAMVGFAPPNCRPCHLISEEFLAEDAGAWQYQLVLQTETQQVEVCREEKRPLFVAARYRRTDQDLNSDLKPKK

SEQ ID NO: 4616 - protein, 435 aa, Neisseria meningitidis
VGEPENKSSEPVREIQASKEMPSETSSPRKENETEVHIPAAPFIVKQSGSNALAVCALVLAALGLGTSGFLFVQGQNVLKNQELAFNQKIDKAALGESENAALLKDNLNRQAAIQSELDRLDGNVKANGEQILEMQKSYRELTKGRADWLVDETDTILNLAAQQLVLTGNIQTAVGVLEHIDSRLSRFNQAELLPIKQAVSSDLAELKNRPYVDISGTALRLDRLETAVFGLPLILDGVLKPGVQVKNEAASASWWQNVWEKSLGTLKGLVEIRRLENNDAMLISPEQAYFVRENLRLRLLDARTALMQRNSEVYQGDLNNAEAAVRQYFDAKSPATQSWLKELAELKELDVRMTADDGLKASLNAVRAYRDGTRMMAAENQEAEQAVSEPSAASDVKTIEAPSLPSERKPEQPAKKQPVPEKAGRSPSAKGERA

SEQ ID NO: 4617 - protein, 125 aa, Neisseria meningitidis; identical to SEQ ID NO: 1050

SEQ ID NO: 4618 - protein, 642 aa, Neisseria meningitidis; identical to SEQ ID NO: 269

SEQ ID NO: 4619 - protein, 1010 aa, Neisseria meningitidis
MFWIVLIVILLLALAGLFFVRAQSEREWMREVSAWQEKKGEKQAELPEIKDGMPDFPELALMLFHAVKTAVYWLFVGVVRFCRNYLAHESEPDRPVPPASANRADVPTASDGYSDSGNRTEEAETEAAEAAEEEAADTEDIATAVIDNRRIPFDRSIAEGLMPSESEISPVRPVFKEITLEEATRALNSAALRETKKRYIDAFEKNETAVPKVRVSDTPMEGLQIIGLDDPVLQRTYSRMFDADKEAFSESADYGFEPYFEKQHPSAFSAVKAENARNAPFRRHAGQAEAKSPDVSQGQSVSDGTAVRDARRRVSVNLKEPNKATVSAEARISRLIPESRTVVGKRDVEMPSETENVFTETVSSVGYGGPVYDETADIHIEEPAAPDAWVVEPPEVPKVPMPAIDIPPPPPVSEIYNRTYEPPSGFEQAQRSRIAETDHLADDVLNGGWQEETAAIADDGSEGAAERSSGQYLSETEAFGHDSRAVCPFEDVPSERPSCRVSDTEADEGAFQSEETDAVYEHLPTTDLLLPPLFNPGATQTEEELLENSITIEEKLAEFKVKVKVVDSYSGPVITRYEIEPDVGVRGNSVLNLEKDLARSLGVASIRVVETILGKTCMGLELPNPKRQMIRLSEIFNSPEFAESKSKLTLALGQDITGQPVVTDLGKAPHLLVAGTTGSGKSVGVNAMILSMLFKAAPEDVRMIMIDPKMLELSIYEGIPHLLAPVVTDMKLAANALNWCVNEMEKRYRLMSFMGVRNLAGFNQKIAEAAARGEKIGNPFSLTPDDPEPLEKLPFIVVVVDEFADLMMTAGKKIEELIARLAQKARAAGIHLILATQRPSVDVITGLIKANIPTRIAFQVSSKIDSRTILDQMGAENLLGQGDMLFLPPGTAYPQRVHGAFASDEEVHRVVEYLKQFGEPDYVDDILSGGGSEELPGIGRSGDGETDPMYDEAVSVVLKTRKASISGVQRTLRIGYNRAARLIDQMEAEGIVSAPEHNGNRTILVPLDNA

SEQ ID NO: 4620 - protein, 86 aa, Neisseria meningitidis
VRTWLVFWLQRLKYPLLLWIADMLLYRLLGGAEIECGRCPVPPMTDWQHFLLAMGTVSAWVAVIWAYLIIESEKTEDIESFGHNAV

SEQ ID NO: 4621 - protein, 307 aa, Neisseria meningitidis
MTKTEPNNAQLDWLESESIHIIREVAAECENPALLFSGGKDSVVLLALACKAFRLGSRPVKLPFPLVHIDTGHNYPEVIAFRDAQAAKLNARLIVGRVEDSIAKGTVVLRKETDSRNAAQAVTLLETIEANGFDALMGGARRDEEKARAKERIFSFRDEFGQWDPKAQRPELWSLYNTRLHKGENMRVFPISNWTELDIWQYIARENLELPPIYYSHRREVVRRRGLLVPVTPLTPKMPSETSEILDVRFRTVGDISCTCPVESTASTPAEIIRETAVADISERSATRLDDQASEAAMEKRKKEGYF

SEQ ID NO: 4622 - protein, 112 aa, Neisseria meningitidis
MTYRELVERQLAVRHADLELGLSRAREQEPFVIHISDLLDKAGIEYAVRMDKDFQTTFHLEYPITNYDTFKRAVWQTLGAYYCVCNDGDGLEIASNRPDGYAVRIVFGDVPV

SEQ ID NO: 4623 - protein, 203 aa, Neisseria meningitidis
LGGVAGFEKNTREAVDRWIWDNPNAAETVEAVFNVAAAAKVAKLAKAAKPGKAAVSGDFSIGYKNFSTVKPKVIAKGTINGKTFRDVNQSAKIGSPDSPTLIAQRVNAKIQADGKPRPNATVANSHAEIGVIQQAYNAGKTKGGSMTMTVSGKDVCGYCKGDIAAAAQASGLKSLTVNATDDVTGKNKTYYWTPGMKSIKERK

SEQ ID NO: 4624 - protein, 116 aa, Neisseria meningitidis
MSDGQNIPAKMMSLQLKDMNLLYSSYMPFLEHGGLFVQTNDVFSIGDDILLAVEILNFPKLFLPTKVAWINPARTSSKPKGVGLAFTKHENCLKVKDQIEVELGNTIGGSRPTFTM

SEQ ID NO: 4625 - protein, 215 aa, Neisseria meningitidis
MKTKFYNHQGGHLILYFAGWGTPPDAVNHLILPENHDLLICYDYQDLKLDFDFSAYRHIRLVAWSMGVWAAERALQGIRLKSATAVNGTGLPCDDNFGIPYAVFKGTLENLTENTRLKFERRICGDKASFERYQQFPARPFGEIHQELIALFAMIGQDRRTDLIRWTNALVGSGDKIFMPANQHRYWTARCTVREIDGGHYLFSRFTHWSALWNH

SEQ ID NO: 4626 - protein, 324 aa, Neisseria meningitidis
MTEYPGIGSPLFYGVFFAAVLVMIALDMFSLKKNGSHKVGIKEALAWSGLWVAVSCLFAGWLYFELAGNPGYGAAVAKEKVLEFFTGYILEKSLAVDNIFVFLMIFGYFKVAPQFQHRVLLYGVLGALVLRTVMIFVGAALVRQFEWILYLFGAFLLYTGIHMMKPEGDEEGDLANSRLLNAVKKVVPVGTEFHGEKFFTVENGKKIATPLFLVLVMIELSDVVFAVDSIPAVFAVTTDPFIVLTSNIFAILGLRAMYFLLSDVEERFIFLKYGLAFVLSFIGVKMLVMHWVHIPISVSLSVVFGALGASILTSLIYTKKQPDK

SEQ ID NO: 4627 - protein, 265 aa, Neisseria meningitidis; identical to SEQ ID NO: 572

SEQ ID NO: 4628 - protein, 339 aa, Neisseria meningitidis
MNTMLMSGAAAALLAGIILYFKSDKKRQENGEWSSGLEYAYILTAVGVFAALSLFMSFTAVFLIFVVLCGTAWGVYKYRLKTHPEISESSHFGYYFGSFFPTVLVLFLIRSFIAEPFQIPSSSMRPGLIKGDFILVGKFSYGLRVPVLNNVFIPTGKIERGDVVVFNYPLQPEMTYIKRIVGIPGDVVEYRNKVLTVNGKPASDIPDGTYRYPDDTDPSEIHNTDMFHSGLDGKSFNILKKEGQPAVSLPVLGKYTSDIMSENGYSIEQSGLEHCQYADDGSGFVCKVPEGRYFAMGDNRDNSADSRYWGFVDDKLVVGKAMFILMNFGDFGRAGTAIR

SEQ ID NO: 4629 - protein, 141 aa, Neisseria meningitidis; identical to SEQ ID NO: 3635

SEQ ID NO: 4630 - protein, 315 aa, Neisseria meningitidis
MYKTIDLFSGIGGIRLGFEKYGCTNVFSSEWDKYARQMYEANFGEKPFGDINGIDPSDIPDHDILLAGFPCQPFSIAGKGLGFEDTRGTLFFNIAEILKTKQPKAFLLENVKRLTTHDSGRTFRIILETLKQLGYTVYFKVLNTLDFGLPQKRERIYIIGFSDNIPFYFPEPINQYRPLGELLENDRDVEPSYFLSDALKQKRLAALKKAPPTPSIWHENIGGNVSALPYSCALRAGGSYNYLVVNGVRRLTGREMLRLQGFPDDFEINIPYSQVRKVAGNSVSVPVIEAIAENMLASLSGKVEQKGQLDLLEAG

SEQ ID NO: 4631 - protein, 144 aa, Neisseria meningitidis; identical to SEQ ID NO: 6

SEQ ID NO: 4632 - protein, 144 aa, Neisseria meningitidis
MDTNNYDKIMPFKPENKESELKIAVRFQRRLIPSKIVYFYTGFMGLLVFLQKYQILHISNFNELMDWLMLLFVLLGVYSVISTVFLTICPYCHRFQKQFNGKVISVDNQEIACNQGVVPFIHYCNRCNAPLSPKAVTDYYENKA

SEQ ID NO: 4633 - protein, 292 aa, Neisseria meningitidis
MARKTEKFEVAAREVEERFGHRGIKLVEFSGRSNPCVIYCPEHGNQTYGRFGSMFRGNSMGCPACGKVRAAKIANASHQSVREELENLKQAITGMTKQERITTQAYNEMTKSVAGSNSIILNDVQGDTTINNHHTHTHNHSDADGKALSMRLTPRPLLSDRQAAAFARTGKLTGSFDLFASVVAPSQYTFAVAMPDTSMSPVIEKGDLLVVEPRMCPADEDIALIELSDKRLVVAHLVIDIAGRMLIYQTGRPSEAFDLPEGSTILGVVLEVKKRFMSAAQARRRVDSDYHP

SEQ ID NO: 4634 - protein, 710 aa, Neisseria meningitidis
MAYQVLARKWRPKTFADLVGQEHVVKALRNALDEGRLHHAYLLTGTRGVGKTTIARILAKSLNCENAQHGEPCGVCESCTQIDAGRYVDLLEIDAASNTGIDNIREVLENAQYAPTAGKYKVYIIDEVHMLSKSAFNAMLKTLEEPPEHVKFILATTDPHKVPVTVLSRCLQFVLRNMTSQQVADHLAHVLDSEKIAYEPPALQLLGRAAAGSMRDALSLLDQAIALGSGSVAEQDVRQMIGAVDKQYLYELLTGIVNQDGEALLAKAQEMAACAVGFDNALGELAILLQHLALIQAVPSALAHDDPDSDILHRLAQTISGEQIQLYYQIAVHGKRDLSLAPDEYAGFMMTLLRMLAFTPLAAASCDANAVIENTELQSPSVQTAEKEAAAKKPQPRPEAETAQTSVQTASAAAMPSEGKTAEPVTNQENNDVPPWEDAPDEAQTAAGTTAQTSAKSIQTASEAETPPENQVSKNKAADNETNAPLSEMPSENPIQTTPNDEALETETFAHEAPAEPFYGYGFPDDDCPVEDNAEIPPPDWEHAAPADTAGGGADEEAEAGGIGENNTPSAPPPEFSTENWAAIVRHFARKLGAAQMPAQHSAWTEYHPDTGLMVLAMTAEARATADKKRLDKIRDTLAQAYGLQLTLQTQDWHDEAGRETPAMQDKRVQAEDRQKAQALLEADPAAQKILQAFGAQWQPESLELAANRP

SEQ ID NO: 4635 - protein, 60 aa, Neisseria meningitidis
MEKKFLDILVCPVTKGRLEYHQDKQELWSRQAKLAYPIKDGIPYMLENEARPLGEEELEA

SEQ ID NO: 4636 - protein, 358 aa, Neisseria meningitidis
MKPSILEKLQQLGDRLEEVTHLLGQPEATSDMDNYRKLTREHAELTPVVEVFQNYQLAQSDLADAEEMLSDPEMKDFAAEEIEAAKAKINTLDTELQKLLLPKDADDDKNIFIEIRAGTGGDEAALFAGDLLRMYSRYAERNRWQVEIVSANESELGGYKEVIARIIGLGAYSRLKFESGGHRVQRVPATESQGRIHTSACTVAVMPEADELEDIELNPVDLRIDTFRASGAGGQHINKTDSAVRITHLPTGMVVECQDGRSQHANKAQAMKVLAARLNDAQKREAQAKEAAERKSLIGSGDRSERIRTYNYPQGRVTDHRINLTLHKLDFVMDGDLEEITNALIAEHQAELLAAMGD

SEQ ID NO: 4637 - protein, 435 aa, Neisseria meningitidis
MKPVNIGLLGLGTVGGGTAAVLRDNAEEISRRLGREIRISAVCDLSEEKARQTCPSAAFVKDPFELVAREDVDVVVELFGGTGIAKDAVLKAIENGKHIVTANKKLLAEYGNEIFPLAEKQNVIVQFEAAVAGGIPIIKALREGLAANRIKSIAGIINGTSNFILSEMREKGSAFADVLKEAQALGYAEADPTFDIEGNDAGHKITIMSALAFGTPMNFSACYLEGISKLDSRDIKYAEELGYRIKLLGITRKTGKGIELRVHPTLIPESRLLANVNGVMNAVRVNADMVGETLYYGAGAGALPTASAVVADIIDIARLVEADTAHRVPHLAFQPAQVQAQTILPMDEITSSYYLRVQAKDEPGTLGQIAALLAQENVSIEALIQKGVIDQTTAEIVILTHSTVEKHIKSAIAAIEALDCVEKPITMIRMESLHD

SEQ ID NO: 4638 - protein, 228 aa, Neisseria meningitidis
MFDFGLGELVFVGIIALIVLGPERLPEAARTAGRLIGRLQRFVGSVKQEFDTQIELEELRKAKQEFEAAAAQVRDSLKETGTDMEGNLHDISDGLKPWEKLPEQRTPADFGVDENGNPLPDAANTLSDGISDVMPSERSYASAETLGDSGQTGSTAEPAETDQDRAWREYLTASAAAPVVQTVEVSYIDTAVETPVPHTTSLRKQAISRKRDFRPKHRAKPKLRVRKS

SEQ ID NO: 4639 - protein, 544 aa, Neisseria meningitidis; identical to SEQ ID NO: 3460

SEQ ID NO: 4640 - protein, 238 aa, Neisseria meningitidis
MKGYSIMNTNNTQLVQISGDRLVTTSLAVSNHFGKKHKNVLQAIENLECSDEFAKLNFQPISYRDGMNREKPAYEITRDGFVFLCMGFTGSAAAQWKERYIAAFNAMESELSKPRGSSGIEGDMKLLAQGMTLVLQQNQLTHRYIDLLERNQKSRARISPDHAVEAKKLVAAGFSQSQAAAQLGISKAAVNALVNDKYEFGGEWKAPTPTKLLQRQLEEQRDAIVQALQLTVEEGEQS

SEQ ID NO: 4641 - protein, 182 aa, Neisseria meningitidis; identical to SEQ ID NO: 2877

SEQ ID NO: 4642 - protein, 266 aa, Neisseria meningitidis
MNAFNLIIIGDEILHGSRQDKHFAFFKSLLESKGLKLNQVQYLPDEPDLLVRQLSRSFSDGIPTFVTGGIGATPDDHTRQAAAAALDLPVVRHPEAAKFIEGVTQKRSEPLDSPEHAQRLKMADFPEGAELVPNPFNNIAGFSIREHYFFPGFPVMAHPMAEWVLETYYADRFNQTERGSRSVYVFEQPESRITPLMEHIEQTYPGVRSYSLPSVGWTHSDGTQVKPHIEFGIKAEGEAVNLLDAAWAEVLHSLDGLGAELKNRVN

SEQ ID NO: 4643 - protein, 348 aa, Neisseria meningitidis
MPSEAFRRHRAYRENKLQPLVSVLICAYNAEKYFAQSLAAVVNQTWRNLEILIVDDGSTDGTLAIAKDFQKWDSRIKILAQAQNSGLIPSLNIGLDELAKSGMGEYIARTDADDIAAPDWIEKIVGEMEKDRSIIAMGAWLEVLSEEKDGNRLARHHRHGKIWKKPTRHEDIADFFPFGNPIHNNTMIMRRSVIDGGLRYNTERDWAEDYQFWYDVSKLGRLAYYPEALVKYRLHANQVSSKYSIRQHEIAQGIQKTARNDFLQSMGFKTRFDSLEYRQIKAVAYELLEKHLPEEDFERARRFLYQCFKRTDTLPADAWLDFAADGRMRRLFTLRQYFGILHRLLKNR

SEQ ID NO: 4644 - protein, 213 aa, Neisseria meningitidis
MPSEKPMNRRIFLLGTGALLLTACGRKSARTHAKIPERSTVLALGDSLTFGYGANPGESYPAQLQKLTGWNIVNGGVSGDTSAQALSRLPALLARKPKLVIVGIGGNDFLRKVPKEQTRANIAKIIETVQKENIPAVLVGVPHITLGALFGHLSDHPLYEDLSEEYGIPLFGGAWAEILGDNNLKSDQIHANGKGYRKFAEDLNQFLRKQGFR

SEQ ID NO: 4645 - protein, 575 aa, Neisseria meningitidis
MQLSGAQIIVQSLKAEGVEYVFGYPGGAVIEIYDALFQLNKFKHILTRHEQAAVHAADAYARVSGKVGVALVTSGPGVTNALTGIATAYTDSIPMVVISGQVGNSLIGTDAFQEVDTVGITRPCVKHNFLVTDINELAETIKKAFQIAAGGRPGPVVVDVPKDVTQAMAKFSYPQEDIFIRSYQPVVQGHIGQIKKAVQMLASAKRPVVYFGGGVVLGNASEELTRFVRMTGAPCTGTLMGLGAYPSGDRQFLGMLGMHGTYEANLAMQNADVVLAVGARFDDRVVSVPSKFFEKAKKVIHIDVDPSSIAKRVKADIPIVGDVKNVLSEMVALWQKQESVPSEDTLGKWWKTIEEWRSRDCLWFDNGSEIIKPQYVIQKLAEITGNSAIITSDVGQHQMFAAQYYPFERPRQWLNSGGLGTMGVGLPYAIGAKLAAPDQDVFCITGDGSIQMNIQELSTCFQYRIPVNVITLNNGYLGMVRQWQEIYYGGRESETYFDSLPDFVKLAEAYGHIGIRVDKKSDVEGALLEALNQKDRLVFIDFLTDQKQNVMPMVGNGKGLDEMVLPPHMRADEKA

SEQ ID NO: 4646 - protein, 216 aa, Neisseria meningitidis; identical to SEQ ID NO: 3431

SEQ ID NO: 4647 - protein, 390 aa, Neisseria meningitidis
MATHADETTIQNRQEANSAKVKRKRRLTALTLLFALAAVAAGSAFFLWWQHEEETEDAYVAGRVVQVTPQKGGTVRKVLHDDTDAVKKGDVLAVLDDDNDVLAYERAKNELIQAVRQNRQQNAATSQAGAQVALRRADLARAQDDLRRRSALAESGAVSAEELAHARAAVSQAQAAVKAALAEESSARAALGGQVALREQPAVQTAIGRLKDAWLNLQRTQIRAPTDGQVAKRSVQVGQQVAAGAPLMAVVPLSDVWVDANFKETQLRHMKIGQPAELVSDLYGKQIVYRGMVAGFSAGTGSAFSLIPAQNATGNWIKVVQRVPVRIVLNREDVDRHPLRIGLSMTVKVDTSAASAPVSKTPGAALPEMESTDWSEVDRTVDEILGQSAP

SEQ ID NO: 4648 - protein, 210 aa, Neisseria meningitidis; identical to SEQ ID NO: 3436

SEQ ID NO: 4649 - protein, 319 aa, Neisseria meningitidis
MSKKTKQELENNKLSKRLRHAVGDAINDFNMIEPGDKIMVCLSGGKDSYALLDILRQLQASAPIDFELVAVNLDQKQPGFPEEVLPTYLESIGVPYKIVEEDTYSTVKRVLDEGKTTCSLCSRLRRGILYRTAKELGCTKIALGHHRDDILATMFLNMFYGGKLKAMPPKLVSDNGEHIVIRPLAYVKEKDLIKYAELKQFPIIPCNLCGSQPNLQRQVIGDMLRDWDKRFPGRIESMFSALQNVVPSHLADTELFDFAGLERGQTLKHGGDLAFDSEKMPERFSDGSEEDESEIKIAPQKAERKVINILANKPKTCGA

SEQ ID NO: 4650 - protein, 257 aa, Neisseria meningitidis
MSANILAIANQKGGVGKTTTTVNLAASLASRGKRVLVVDLDPQGNATTGSGIDKAGLQSGVYQVLLGDADVKSATVRSKEGGYAVLGANRALAGAEIELVQEIAREVRLKNALKAVAEDYDFILIDCPPSLTLLTLNGLVAAGGVIVPMLCEYYALEGISDLIATVRKIRQAVNPDLDITGIVRTMYDSRSRLVAEVSEQLRSHFGDLLFETAIPRNIRLAEAPSHGMPVMAYDAQAKGTKAYLALADELMARVSGK

SEQ ID NO: 4651 - protein, 233 aa, Neisseria meningitidis; identical to SEQ ID NO: 3223

SEQ ID NO: 4652 - protein, 384 aa, Neisseria meningitidis
MTETTQTPTFKPKKSVALSGVAAGNTALCTVGRTGNDLSYRGYDILDLAQKCEFEEVAHLLIHGHLPNKFELAAYKTKLKSMRGLPIRVIKVLESLPAHTHPMDVMRTGVSMLGCVHPERESHPESEARDIADKLIASLGSILLYWYQYSHNGKRIEVESDEETIGGHFLQLLHGKRPSESHIKAMHVSLILYAEHEFNASTFTARVIAGTGSDMYSSITGAIGALKGPKHGGANEVAYDIQKRYRNADEAEADIRERIGRKEIVIGFGHPVYTISDPRNVVIKEVARGLSKETGDMRLFDIAERLESVMWEEKKMFPNLDWFSAVSYQKLGVPTAMFTPLFVISRTTGWSAHVLEQRKDGKIIRPSANYTGPEDLAFVEIEER

SEQ ID NO: 4653 - protein, 427 aa, Neisseria meningitidis
MNRNEILFDRAKAIIPGGVNSPVRAFGSVGGVPRFIKKAEGAYVWDENGTRYTDYVGSWGPAIVGHAHPEVIEAVREAALGGLSFGAPTEGEIAIAEQIAKIMPSVERLRLVSSGTEATMTAIRLARGFTGRDKIIKFEGCYHGHSDSLLVKAGSGLLTFGNPSSAGVPADFTKHTLVLEYNNIAQLEEAFAQSGNDIACVILEPFVGNMNLVRPTEAFVKALRELTEKHGAVLIYDEVMTGFRVALGGAQSLHGITPDLTTMGKVIGGGMPLAAFGGRKDIMECISPLGGVYQAGTLSGNPIAVAAGLKTLEIIQREGFYENLTALTQRLANGIADAAKAHGVEFTADSVGGMFGLYFAAHAPRNYADMARSNIEGFKQFFHGMLDRNVAFGPSAYEAGFVSAAHTPELIDETVAVAVEVFKAMAA

SEQ ID NO: 4654 - protein, 1054 aa, Neisseria meningitidis
MNKTWKRQVFRHTALYTAILMFSHTGGGGGQAQAQTQTQTHKYAIVMNAQNLPEVKWGNQYQSLTHKSNEREVIHTSGFGLAKKYISFSFNNTDEVVAEKKDAVVFGAATYLPPYGKVSGFDTTKLTERKNAVDQIGTTHPGLVGYSYEGSTCSSGSCPTVAYRTQFTFGNSSLAKKTNGGGLDIYEDKSRDNSPIYKLKDHPWLGVSFNLGGESSFKPKRQGSLVSSFSEDVTQQNGADSQHKGKNLVYTTDDYKSQNNKNHQDKHHAVAFYLNAKLHLLDKKHITNIAQVGTVDLGTLKTRIEPTEAWKKQNNNFFSGSWTYEEKGLVSVKLILPQVKAGRCVNKNNPNPNKKDLSPALTAPALWFGAGQNGKAEMYSASVSTYPDSSSSRIFLQNLKRKTDHSKPGRHSLATLNKSDIESKEPSFTGRQTVIRLDGGVHEIKLKGNEVEGFKGNNGNATFGIVKDLGVDPDANEWKKVLLPWTVRASNDDGQFNTFNKEENNGKPKYSQKYRSRDNGKHERNLGDIVNSPIVAVGGYLATSANDGMVHIFKKGNGDDRNYSLKLSYIPGTMPRKDIESKDSTLAKELRAFAEKGYVGDRYGVDGGFVLRQVEWKGQNRVFMFGAMGFGGRGAYALDLTKADGNDPTKASLFDVKNNGNNGNNGNNSVKLGYTVGTPQIGKTYNGKYAAFLASGYATKQIDSGENTTALYVYDLEGNGTNNLIKKIEVSGGKGGLSSPTLVDKDLDGTIDIAYAGDRGGSMYRFDLSGQDPSQWTVRTIFQGTKPITSAPAISQLKDKRVVIFGTGSDLSEEDVDNMEEQYIYGIFDDDTAATGTVNFTGTGGGLLEQHLTEENKTLFLTDYKRSDGSGSKGWVVKLKDGQRVTVKPTVVLRTAFVTIRKYNDGGCGAQTAILGINTADGGKLTKKSARPIVPEANTAVAQYSGHKKGTNGKSIPIGCMQKGNEIVCPNGYVYDKPVNVRYLDEKKTDGFSTTADGDAGGSGIDPDGKRAGKNNRCFSQKGVRTLLMNDLDSLDITGPTCGMKRISWREVFY

SEQ ID NO: 4655 - protein, 77 aa, Neisseria meningitidis
MWHIVAIGYLFVAVMYSAAQPSIARSLIYLVFWAVLPTVFTVFVVTVRRRNRLMKRQEQAEFEQQRAQRQKDSGTKP

SEQ ID NO: 4656 - protein, 503 aa, Neisseria meningitidis
MKWLKRLTVIVGTFYRYRLAGLCASLMGSGWICALLKMMPQSSKLKNEPPAVRLRLALESLGPIFIKFGQVLSTRPDLIPHDYAVELAKLQDKVPPFDARLSREQIEKSLGQPIEKLYAEFETEPVASASIAQVHKARLHSGERVAVKVLRPNLLPLIEQDLSLMRFGAAWVERLFADGRRLKPREVVAEFDKYLHDELDLMREAANAGQLGRNFQNSDMLIVPKVFYDYCTSDVLTIEWMDGTPVSDIAKLKADGIDLHKLADYGVEIFFTQVFRDGFFHADMHPGNILVAADNRYIALDFGIVGTLTDYDKRYLAINFLAFFNRDYRRVATAHIESGWVPADTRAEELEAAVRAVCEPVFNKPISQISFGLVLMRLFEVSRRFNVEIQPQLVLLQKTLLNIEGLGRQLDPDLDLWKTAKPFLVKWMNGQVGPKALWRNLKNEAPDWAQIIPSLPRKINALVDEARRQEMRDAYIHLVKVQQRQSLWLAVIAVVLLLILLLK

SEQ ID NO: 4657 - protein, 146 aa, Neisseria meningitidis
MIKETLMRPIFLSFVLLPILITACSTPDKSARWENIGTISNGNIHTYINKDSVRKNGNLMIFQDKKVVTNLKQERFANIPAYKTAIAEWEIHCNNKTYRLSSLQLFDTKNTEISTQNYTASSLRPMSILSGTLTEKQYETVCGKKL

SEQ ID NO: 4658 - protein, 1392 aa, Neisseria meningitidis
MNYSFTEKKRIRKSFAKRENVLEVPFLLATQIDSYAKFLQLENAFDKRTDDGLQAAFNSIFPIVSHNGYARLEFVHYTLGEPLFDIPECQLRGITYAAPLRARIRLVILDKEASKPTVKEVRENEVYMGEIPLMTPSGSFVINGTERVIVSQLHRSPGVFFEHDKGKTHSSGKLLFSARIIPYRGSWLDFEFDPKDLLYFRIDRRRKMPVTILLKALGYNNEQILDIFYDKETFYLSSNGVQTDLVAGRLKGETAKVDILDKEGNVLVAKGKRITAKNIRDITNAGLTRLDVEPESLLGKALAADLIDSETGEVLASANDEITEELLAKFDINGVKEITTLYINELDQGAYISNTLRTDETAGRQAARVAIYRMMRPGEPPTEEAVEQLFNRLFFSEDSYDLSRVGRMKFNTRTYEQKLSEAQQNSWYGRLLNETFAGAADKGGYVLSVEDIVASIATLVELRNGHGEVDDIDHLGNRRVRSVGELTENQFRSGLARVERAVKERLNQAESENLMPHDLINAKPVSAAIKEFFGSSQLSQFMDQTNPLSEVTHKRRVSALGPGGLTRERAGFEVRDVHPTHYGRVCPIETPEGPNIGLINSLSVYARTNDYGFLETPYRRVIDGKVTEEIDYLSAIEEGRYVIAQANADLDSDGNLIGDLVTCREKGETIMATPDRVQYMDVATGQVVSVAASLIPFLEHDDANRALMGANMQRQAVPCLRPEKPMVGTGIERSVAVDSATAIVARRGGVVEYVDANRVVIRVHDDEATAGEVGVDIYNLVKFTRSNQSTNINQRPAVKAGDVLQRGDLVADGASTDLGELALGQNMTIAFMPWNGYNYEDSILISEKVAADDRYTSIHIEELNVVARDTKLGAEDITRDIPNLSERMQNRLDESGIVYIGAEVEAGDVLVGKVTPKGETQLTPEEKLLRAIFGEKASDVKDTSLRMPTGMSGTVIDVQVFTREGIQRDKRAQSIIDSELKRYRLDLNDQLRIFDNDAFDRIERMIVGQKANGGPMKLAKGSEITTEYLAGLPSRHDWFDIRLTDEDLAKQLELIKVSLQQKREEADELYEIKKKKLTQGDELQPGVQKMVKVFIAIKRRLQAGDKMAGRHGNKGVVSRILPVEDMPYMADGRPVDIVLNPLGVPSRMNIGQILEVHLGWAAKGIGERIDRMLKEQRKASELREFLNKLYNGSGKKEDLDALTDEEIIELASNLRKGASFASPVFDGAKESEIREMLNLAYPSDDPEVEKLGFNDSKTQITLYDGRSGEAFDRKVTVGVMHYLKLHHLVDEKMHARSTGPYSLVTQQPLGGKAQFGGQRFGEMEVWALEAYGAAYALQEMLTVKSDDVNGRTKMYENIVKGEHKIDAGMPESFNVLVKEIRSLGLDIDLERY

SEQ ID NO: 4659 - protein, 131 aa, Neisseria meningitidis
MPSDVGMRLQTAFKRKLNMKKIFYFLMVVFSTSVWAGDAEDNLLSIQSGYRALLQKQNRLDGKIIGMQSDLEDARRRLQAAQADIARLEAEIPAAMAQKARQAEELRQIGVRLDHAWNAVYGAGGTKASGN

SEQ ID NO: 4660 - protein, 301 aa, Neisseria meningitidis
MGKGGDIVVGNGKKYAAPLLVLGCVVFGLGSLIVRSVPVGSYAIAFWRLLISVFVFWFLARFFGQKFPKNRKTVRYALTAGVFLAFDLALWHESIHAVGPGISTLLNSLQIFFLSAIGVFFFGERLSGLKKAGLISAVAGVAMIAGAEFGYNGNAVWGFVSGLVSGLMLALSMVFVRKTHEIEPVALFPSMMILSLGGAVSLVVPALLMDGGALYPTTWKDAGLVLVYGVVMQCFAWAMVAYAIPLLSLSLTGLLLLSEPVAALFIDYFELGKPIEGVQWAGVALTLSAIYLGSLKQQSEP

SEQ ID NO: 4661 - protein, 258 aa, Neisseria meningitidis; identical to SEQ ID NO: 2774

SEQ ID NO: 4662 - protein, 417 aa, Neisseria meningitidis
VDKLKISANGPLNGEITVSGAKNAALPLMCAGLLTSGTLRLKNVPMLADVKTTQKLLQGMGARVLTDNISEFEINGGTVNNTCAPYELVRTMRASILVLGPTLARFGEAQVSLPGGCAIGSRPVDQHLKGLEAMGAEIVIEHGYVKAKGKLKGTRVAMDVVTVGGTENLLMAATLAEGTTVLENCAIEPEVVDLAECLVKMGAKISGIGTSTMIVEGVDELHGCEHSVVPDRIEAGTFLCAVAITGGRVVLRNAAPKTMEVVLDKLVEAGAVIEAGDDWIAIDMRQRPKAVDIRTVVHPGFPTDMQAQFMALNAVAEGSCRVVETIFENRFMHVPELNRMGANITTEGNTAFVQGVEQLSGAVVKATDLRASASLVIAGLAARGETVVEQIYHLDRGYENIEKKLGSVGAKIERVSG

SEQ ID NO: 4663 - protein, 367 aa, Neisseria meningitidis
MEAEVINQLNNTLNDLEKRSEDIRVYMDYQGKKDRLEEVVGLSEDPELWNDPKRAQEIGKERKILEGIVLTLDNIASGIEDNRMLIEMTVEENDEEGFAAVQEDVAGLEKQMADLEFKRMFNQPADPNNCFIDITAGAGGTEAEDWAGMLFRMYSRYAERKGFKIEILEEDDGEIAGINRATIRVEGEYAYGLLRTETGVHRLVRYSPFDSNNKRHTSFASVFVYPEIDDSIEIEINPADLRIDTYRASGAGGQHINKTDSAVRITHEPTGIVVQCQNDRSQHANKAAAMEMLKSKLYELEMRKRNEEKQALEEGKSDVGWGSQIRSYVLDSSRIKDLRTGYEVGNTKAVLDGDLDGFIEASLKQGV

SEQ ID NO: 4664 - protein, 67 aa, Neisseria meningitidis; identical to SEQ ID NO: 966

SEQ ID NO: 4665 - protein, 318 aa, Neisseria meningitidis
MKVLFIADPMASFKTYKDTTYAMMREMAKRGWRLFHTLSSGLSVKNGLVVADASAFEFLGAQDDHDKNWFAAADKVQTALKAFDAVIMRTDPPFDMQYLYATQLLTLAEQQGVKVFNSGQAMRDFNEKLAILNFSRFIAPTLVTTRSADVRVFLKEHGDIIIKPLDGMGGMGIFRLTEKDPNIGSILETLMQLDSRTIMAQRYIPEIVHGDKRILIIGGEVVPYALARIPQNGETRGNLAAGGRGVAQELGGRDREIAETLAPELKRRGILLAGLDVIGSNLTEVNVTSPTGFQEIMKQKGFDVAAMFADAVAAWSVR

SEQ ID NO: 4666 - protein, 522 aa, Neisseria meningitidis; identical to SEQ ID NO: 2643

SEQ ID NO: 4667 - protein, 112 aa, Neisseria meningitidis
MSDESPIIFTDSCCAKVADLIAEENNPDLKLRVFVNGGGCSGFQYGFTFDEIKNDDDFEIEKNGLVFLVDPMSYQYLVGAEIDYTENLQGSQFVIRNPNAETTCGCGSSFSV

SEQ ID NO: 4668 - protein, 448 aa, Neisseria meningitidis
MSDNVPTIAAVATAPGRGGVGVIRISGKNLLPMAQALCGKTPKPRTATYADFTDADGQAIDSGLLLFFAAPASFTGEDVIELQGHGGPVVMDMLLNRCLELGARLAEPGEFTKRAFLNDKLDLAQAEGVADLIDASSRSAARLALRSLKGDFSRRIHGLVEDLITLRMLVEATLDFPEEDIDFLEAADARGKLDGLRRAVDDVLANAQQGAILREGLNVVLVGAPNVGKSSLLNALAGDEVAIVTDIAGTTRDAVRERILIDGVPVHIVDTAGLRETDDVVERIGIERSRKAVSEADVALVLVDPREGVNDKTRAILDALPPELKRIEIHSKSDLHAHAAGGFGTGAETVIALSAKTGDGLDALKRTLLREAGWQGESEGLFLARTRHVNALKAAQEELSLAALCGNHQIELLAEHLRLAQVACGEITGEFTADDLLGVIFSRFCIGK

SEQ ID NO: 4669 - protein, 239 aa, Neisseria meningitidis
MLTTPPLAPKTVAALHRLGIRTLEELRQNGSVKAFLLLKASGLTLTKSTLWQLESLLNGTLPQEITQHDKTRLFAELKNHPPVAAFPPQEEMEHFMREALRQAEQSAADGEIPVGAVIVSDGKIIASAHNTCIADCNVSRHAEINALAQAGSEMQNYRLDGCDIYITLEPCAMCASALIQARIRRVIYGAAEPKTGAAGSIVNLFADKRLNTHTAIRGGILQEECRAVLSRFFQNKRKG

SEQ ID NO: 4670 - protein, 242 aa, Neisseria meningitidis
MTTYRIAPSILSADFARLGEEVESVIAAGADLIHFDVMDNHYVPNLTFGPMVCAALKPYASVPIDVHLMVEPVDDLIQSFAKAGASIITFHPEASRHIDRSLSLIRDMGCQAGLVLNPATPVYLLENVLDRLDMVLLMSVNPGFGGQSFIPHTLEKIRRVRAMLDRYEAQSGRHIAIEVDGGIKTDNIAAVARAGADTFVAGSAIFGKPDYKAVIDAMRAELEKSGRLNLAPMIEIEMPSEN

SEQ ID NO: 4671 - protein, 293 aa, Neisseria meningitidis
MCIEMKFIFFVLYVLQFLPFALLHKIADLTGLLAYLLVKPRRRIGEINLAKCFSEWSEEKRKTVLKQHFKHMAKLMLEYGLYWYAPAGRLKSLVRYRNKHYLDDALAAGEKVIILYPHFTAFEMAVYALNQDIPLISMYSHQKNKILDEQILKGRNRYHNVFLIGRTEGLRALVKQFRKSSAPFLYLPDQDFGRNDSVFVDFFGIQTATITGLSRIAALANAKVIPAIPIREADNTVTLHFYPAWESFPGEDAQADAQRMNRFIEERVREHPEQYFWLHKRFKTRPEGSPDFY

SEQ ID NO: 4672 - protein, 312 aa, Neisseria meningitidis
MQFTSLEICAGAGGQALGLERAGFSHVALIEIEPSACQTLRLNRPDWNVIEGDVRLFQGKGYDGIDLLAGGVPCPPFSKAGKQLGKDDERDLFPEAIRLAKETDPKAIMLENVRGLLDPKFEDYRNHITEQFAKLGYLGQWKLLYAADYGVSQLRPRVLFVALKNEYTNFFKWPEPNSEQPKTVGELLFDLMSENNWQGAHNWRLKAAQIAPTLVGGSKKHGGADLGPTRSKRAWAELGVDGSGLWNSAPPEDFSGMPRLTARMTARIQGFPDDWQFFGKKTPMYRQIGNAFPPPVAEAVGQQIIKALKKEN

SEQ ID NO: 4673 - protein, 887 aa, Neisseria meningitidis
MSTQLHDVDPIETQEWLDALSSVLEYEGGERAQYLLENLVKYCRDKGVRMPHGTTTPYLNTVSVENEKGIPGDQNIEHRIRAFVRWNAAAIVLRAGKKDLELGGHIASFQSAATMYEVGFNHFWKAKGEGEEGDLVFFQGHVAPGIYARAFVEGRLTEDQLNNFRQEVDGHGLPSYPHPHLLPDFWQFPTVSMGLGPIMAIYQARFLKYLESRGLAKTKGRKVWCFCGDGEMDEPESQGAIALAAREGLDNLIFVINCNLQRLDGPVRGNGKIIQELEGNFAGAGWNVVKVIWGRRWDRLLAKDKDGILRQRMEECLDGDYQTYKSKDGAYVREHFFNTPELKALVADMTDEQLWALNRGGHDPQKVYNAYDRAANHADGKPTVILAKTIKGYGMGASGEGQNVAHQAKKMDKASLKQFRDRFDIPVTDEQIESGDLPYLTFAPDTEEYKYLHARRDALGGYLPQRKPTQEVLEVPELSAFDAQLKSSGEREFSTTMAFVRILSTLLKDKKIGKRVVPIVPDESRTFGMEGMFRQYGIWNPKGQQYTPQDKDQLMFYKESVDGQILQEGINEPGAMADWIAAATSYANSNFAMIPFYIYYSMFGFQRIGDLAWAAGDMHVRGFLLGGTAGRTTLNGEGLQHEDGHSHIQADLIPNCVSYDPTFQYEVAVIVQDGLRRMYANNEDVFYYITLMNENYTHPDMPEGAEQDILKGMYLLKAGGKGDKKVQLMGSGTILQEVIASAELLKADFGVEADIWSCPSFNLLHRDAVEVERFNRLHPLEAEKVPFVTSQLQGHDGPVIAATDYIRSYADRIRAYIPNDYHVLGTDGFGRSDSRANLRRFFEVDRYNVAVAALSALAEQGKVSKETVQQAIEKYGIKADSAPSWKR

SEQ ID NO: 4674 - protein, 249 aa, Neisseria meningitidis
MKALVAVKRVVDYNVKVRVKADGSDVDIGNVKMSMNPFDEIAVEEAVRLKEAGKVSEIVAVSLGEKKCEETLRTALAMGADRAIHVETDTKLESLAVAKLLKAVADKENPQIFFLGKQAIDDDANQVAQMLAALLNAAQGTFASKVHIEGGEVQIVREIDGGEETIALKLPAVISADLRLNEPRFVKLPNIMAAKKKPLEKLAPADLATDILPRLKTVKFAEPKARQAGVKVASVAELVEKLKNEAKVI

SEQ ID NO: 4675 - protein, 321 aa, Neisseria meningitidis; identical to SEQ ID NO: 4435

SEQ ID NO: 4676 - protein, 254 aa, Neisseria meningitidis
MKQKKTAAAVIAAMLAGFAAAKAPEIDPALVDTLVAQIMQQADRHAEQSQKPDGQAIRNDAVRRLQTLEVLKNRALKEGLDKDKDKDVQNRFKIAEASFYAEEYVRFLERSETVSESALRQFYERQIRMIKLQQVSFATEEEARQAQQLLLKGLSFEGLMKRYPNDEQAFDGFIMAQQLPEPLASQFAAMNRGDVTRDPVKLGERYYLFKLSEVGKNPDAQPFELVRNQLEQGLRQEKARLKIDAILEENGVKP

SEQ ID NO: 4677 - protein, 168 aa, Neisseria meningitidis
MAHPQEIREKLRRLYVSGEQTLETAALMCEIPQTTARAWKRADKEKGDDWDKMRAAYTLAGGGIEDLSRAMLAGFMVQYNSTMTMLQDSSTEDLPPSDRAKLLASLTDAFTKTVSANARVMPETSKLATALELIEFLMAFVQEKHPKHLPAFVEVLEPFGVEVEKKFG

SEQ ID NO: 4678 - protein, 471 aa, Neisseria meningitidis
MNLHAKDKTQHPENVELLSAQKPITDFKGLLTTIISAVVCFGIYHILPYSPDANKGIALLIFVAALWFTEAVHITVTALMIPILAVVLGFPDMDIKKAMADFSNPIIYIFFGGFALATALHMQRLDRKIAVALLRLSRGSMKAAVLMLFLVTAFLSMWISNTATAAMMLPLAMGMLSHLDREKERKTYVFVLLGIAYCASIGGLGTLVGSPPNLIAAKALNLDFVGWMKLGLPMMLLILPLMLLSLYVILKPNLNERVEIKAESIPWTLHRVIALLIFLATAAAWIFSSKIKTAFGISNPDTVIALSAAVAVVVFGVAQWKEVARNTDWGVLMLFGGGISLSTLLKTSGASEALGQQVAATFSGAPAFLVILIVAAFIIFLTEFTSNTASAALLVPIFSGIAMQMGLPEQVLVFVIGIGASCAFMLPVATPPNAIVFGTGLIKQREMMNVGILLNILCVVLVALWAYAVLM

SEQ ID NO: 4679 - protein, 369 aa, Neisseria meningitidis
MFSDTDISMMETALRLAALGRFSTSPNPRVGCVIAHGSQVVGQGFHVKAGEPHAEVHALHQAGEMAQGATAFVTLEPCSHYGRTPPCAEALVRAGVSRVVAAMRDPNPLVAGKGLALLEAAGIKTECGLLEHQARELNRGFLSRIERRRPFVRLKCAVSLDGKTALSDGSSFWITGEDARADVQVLRAESCAVLTGIGTVLADNPRLNVRAFPTLRQPARIVLDSRLRLPLDSHLLTDGQSPTYIATLERDEDKLRPYRKHAHVRILMPSETAGGKIDLNSLMRLLADEGIGELIVEAGSELTSAFLAEDLADEIVLYRSPKILGSGKDLFSLPENRAALSAPPLWTPVSSEILGHDIKTVFRKNGNAF

SEQ ID NO: 4680 - protein, 391 aa, Neisseria meningitidis
MQNIFDPLVIRGKSLTPIVQGGMGVGVSASGLSSAVARENGIGTIASVDLRHLHEDLLAESQINPSEEKYTSLNCTALDREIQKAKSASEGKGLIAVNVMKAVKDHAAYVRQACESGADAVVMGAGLPLDLPEMTEGYHKYVALLPILSESRGINIVLKRWMKKGILPDAIVVEHPAHAAGHLGASTVEGVNDAKFDFKRVIEETFEVFKSLGLESEKIPLILAGGMANFEKVKTALKNWGASAVQIGTAFAVTEEGDAHLNFKKTLAGAETEKVVEFMSVAGLPARGVRTKFLDSYIKRESKLQTNAKADPRRCTQGLNCLTSCGLRDGLSKAGQFCIDIQLAAAFRGEVDKGLFFRGKDPLPFGNAIRTVRETIQYLLTGSEPVATVGR

SEQ ID NO: 4681 - protein, 322 aa, Neisseria meningitidis
MNEKTIILANPRGFCAGVDRAISIVERALEEFGAPIYVRHEVVHNKFVVDNLREKGAVFIEDLAEVPPGATLVYSAHGVSKAVRQEAAERGFRVFDATCPLVTKVHKEVARLDAQDCEIIMIGHKGHVEVEGTMGQLAPGKMLLVETVGDVAKLEVRNPDKLAYVSQTTLSVDETKDIIAALNARFPNIRNPHKEDICYATTNRQTAVKELAEQCDIVIVVGSPNSSNSNRLREVAASRGIDAYMVDNAGYLQRAWFEGKNKVGVTAGASAPEVLVQEVLATIRGWGHETVREGEGAEESIVFVLPKELRREGETKPDLCKR

SEQ ID NO: 4682 - protein, 125 aa, Neisseria meningitidis
MTIQQPELKNPTIVVVTDRNDLDGQLFQTFSSGKDLIKQTPQQVEDREQLRQLLAQNEVGGVFFTTIQKFALNEEESRFPVLNERSNIIVISDEAHRSQYGFTQKLYNGKFQAGYARHKFPEIPT

SEQ ID NO: 4683 - protein, 72 aa, Neisseria meningitidis; identical to SEQ ID NO: 1294

SEQ ID NO: 4684 - protein, 517 aa, Neisseria meningitidis
MPSERSADCCPAHFVVKFRKLTLNCGRRFDRPPINGNRQRKPMIHTEPSAQPSTMDTAAFLKHIESAFRRIFSDGIDLMRYLPEDKWLALKQAGLLLPFLDKKHGGRKGSQFEIQEVLRIAGHYGVPVTLRTGIEGALVLQPLQEFGDEAQIAQGLDMVFKGEGGGLGITEPETSGAAIAREMQSYYEYTDDKTIYVNAAKYWQGNSQGDFLLVAAKERKNGKLAKVIDLLLVPKTYIRCETLTSEGLRAVRYAVNHIDAQMPAAAVMKLSQSDAAGLRAFQNIFIRSRLQLIGMTHGIMEYILENLERYVRNDIRFVDYERREIRRRHQVSEILYRYVCHSVSPVAPVAHQLMEANIVKTLATEYTYAAAQMLQKLLGAKGFERGHTAGNIAIDIRPFTIFEGPNDMLYAEIYDQFVRATAEEKEAGMKLDKNQTLLDRLQTDARFAAVARDYTLPEDIRSFLQEHTLTDACALQKVFIGKIIARLFVFVQAKHEDAAACLLNDIRKDILDCRYCG

SEQ ID NO: 4685 - protein, 150 aa, Neisseria meningitidis
MNIEVEMKVLDERMADFIPAYATEGSAGLDLCACLDEEVVLQPGETFLVPTGLAIYLANPAYAAVLLPRSGLGHKHGIVLGNLVGLIDSDYQGELKVSLWNRSSEPFTVKPFERIAQMVVVPIVQARFKRVEEFVGSSRGEGGFGSTGLH

SEQ ID NO: 4686 - protein, 327 aa, Neisseria meningitidis; identical to SEQ ID NO: 2154

SEQ ID NO: 4687 - protein, 360 aa, Neisseria meningitidis; identical to SEQ ID NO: 2477

SEQ ID NO: 4688 - protein, 187 aa, Neisseria meningitidis
MKLIILDRDGVINQDRDDFVKSVDEWIPVEGSMDAVAFLTQAGCTVAVATNQSGIGRKYFTVQDLTEMHAKMHRLVRQAGGEINGIWFCPHTGADGCGCRKPKPGMIEDILERFNAQASETWLVGDSLRDLQAIDAVGGKPALVLTGKGKKTLSQHGHELPEHTQVFDTLLDFSQYIMQENAAPQAD

SEQ ID NO: 4689 - protein, 159 aa, Neisseria meningitidis
LKIFWRIFMRQISLTDYFCKGLGLCGLLEEGDERGEIKKSAVAVFLTCLIVGFYDGFFGPGTGSIFIIALFAINKLSLLQASATSKIFNFASNIGAFVAFLIAGKMAFLIGIPMILANLLGNHFGSLHAINSNGEVIRKVLVVTVLLIIISMAYKAFSA

SEQ ID NO: 4690 - protein, 687 aa, Neisseria meningitidis
MMTQTLLIELLTEELPPKALNNLGNHFAAAVAEGLEKAQLVDGTAEFTAYASPRRLAVQVKNVKAVQADQKIVKKGPAVANAMKDGAPTKALEGFARGAGAKIEDLTIVHDGKQDVYAYEYVQTGKPLGGLLEDIINAAVKKLPIPKVMRWGSSTFTFVRPVHGLIVLHGGDIVNVSVLGLQSGNKTLGHRFLSNGEITIENADSYAEQMREQGKVEASFAERKAAIQTALEGQARRLNATVAADEALLDEVTALVEWPVVLEAGFEEHFLAVPQECLILTMQQNQKYFPLLDQNGKLMNRFLLVSNLQTEDPSHIIRGNERVLRARLSDAEFFYKQDQKATLESRLPKLSSVVYHNKIGSQAERIERLQSIAAHIAKALGADAAAAERAARLAKADLVTEMVGEFPELQGTMGKYYARLDGETEEIAEAVEQHYQPRFAGDKLPESKVATAVALADKLETLVGIWGIGLIPTGDKDPYALRRAALGILRMLMQYGLDVNELIQTAFDSFPKGLLNEQTPSETADFMQARLAVLLQNDYPQDIVAAVLAKQPRRLDDVVAKLQAVAAFKQLPEAAALAAANKRVQNLLKKADAELGAVNESLLQQDEEKALFAAAQGLQPKIAAAVAEGNFQTALSELASVKPQVDAFFDGVMVMAEDAAVKQNRLNLLNRLAEQMNAVADIALLGE

SEQ ID NO: 4691 - protein, 328 aa, Neisseria meningitidis; identical to SEQ ID NO: 372

SEQ ID NO: 4692 - protein, 287 aa, Neisseria meningitidis; identical to SEQ ID NO: 2812

SEQ ID NO: 4693 - protein, 295 aa, Neisseria meningitidis
MYTGRFAPSPTGLLHIGSLLTAAASYADARSNGGKWLVRMEDLDPPREMPGAASHILHTLEAFGFEWDGEVAYQSRRYALYEETLCRLKTAGLVYPCHCSRKDWQAAAVHGADGFVYNGRCRNPQQRPAPQGKQPAWRIRVPDRDIGFSDGIVGGYAQNLARDIGDFVLLRADGYWAYQLAVVADDAEQGVTHIVRGQDLLVSTPRQIYLQQCLGVPTPQYAHLPLLTNAQGQKWSKQTLAPALDLNRREQLLRQVFRYLKLPEAPEADRPAELLDWAVAHWDMDKVPKHAITTP

SEQ ID NO: 4694 - protein, 219 aa, Neisseria meningitidis
MDTWHDALGGEKQQPYFQEILNAVRQERLSGQIIYPPAADVFNAFRLTAFDRVKAVILGQDPYHGAGQAHGLAFSVRQGVRIPPSLLNIYKELETDIEGFSIPAHGCLTAWAEQGVLLLNTVLTVREGQAHSHALLGWERFTDTVIRQLATHRKHLVFMLWGGYAQQKGKLIDSQNHLILTAPHPSPLSAYRGFFGCRHFSQANSYLSRHGIDPINWKL

SEQ ID NO: 4695 - protein, 103 aa, Neisseria meningitidis; identical to SEQ ID NO: 1510

SEQ ID NO: 4696 - protein, 222 aa, Neisseria meningitidis
MLPSKYEDNTLQIKEKSTERTAPFFVLEVTARSAADILGIHPNSAALFYRKIRTVINHHLALAADEVFEGPVEPDESDFGGRRKGRRGRGAAGKVVVFGILKRNGRVYTVVVDNAKSETLLPVIKKKIMPDSIVYTDSLSSCDKLDVSGFIHYRINHSKEFADRQNHINGIENFWNQAKRVLRKYNGIDCKSFPLFLKECEFRFNFGTPSQQLKILRDWCGI

SEQ ID NO: 4697 - protein, 165 aa, Neisseria meningitidis
MNVKVHKDTHHFGIHNLNNTDVHLTAEDSDNVIEIKGELADLMPTGNVESTSFLRGIETAFKSNTVLTGNNNKISIATEGKGLGLGVNGLQSNSPYSGHTTGIFINNQSSDLTQPSLDGISTIKLKAVKGNNEVDLNVKNHASVKDIIASHSAKATLEAEGDNIV

SEQ ID NO: 4698 - protein, 131 aa, Neisseria meningitidis
MKKQITAAVMMLSMIAPSMANGLDNQTFENQVFHTQADAPMQLAELSQKEMKETEGAWGPVGAFIGGVGGGIGYMMNQQLSGSRFSPTAFTLAVGAGAFGGATAGPAGVVWGFNRSLATGMVTGVAQRYGK

SEQ ID NO: 4699 - protein, 397 aa, Neisseria meningitidis
MYRHIEYYPGDPILSLVETFKNDPRPEKVNLSIGIYFDDEGKMPVLESVSRAETARAAAPAPSPYLPMEGLDTYRSAVQHLLFGKDNRALVQGRIATVQTLGGSGALKVGADFLHRWFPEARAYVSDPTWDNHRGIFEGAGFEVGTYPYYDPAAVGVKFDEMTAFFNTLPENSVLILHPCCHNPTGVDMSEQQWDEVLHIIKTRKLIPFMDIAYQGFGGDLDSDAYAVRKAVEMELPLFVSNSFSKNLSLYGERVGGLSVVCPNKEEADLVFGQLKFTVRRIYSSPPAHGAYIAADVMNSPELYALWQNEVYMMRDRIRAMRQKLYDVLTAQIPDRDFTYFIKQRGMFGYTGLSVEQVRRLRDEFAVYLLDSGRMCVAGLNTSNTDYVARAFAEVLK

SEQ ID NO: 4700 - protein, 180 aa, Neisseria meningitidis
MKITHCKLKKKVQKELLRFFVLEVTARSAADILGIHPNSAALFYRKIRTVINHHLALAADEVFEGPVEPDESDFGGRRKGRRGRGAAGKVVVFGILKRNGRVYTVVVDNAKSETLLPVIKKKIMPDSIVYTDSLSNCDKLDVSGFIHYRINHSKEFADRQNHINGIENFWNQAKRVLRKL

SEQ ID NO: 4701 - protein, 72 aa, Neisseria meningitidis; identical to SEQ ID NO: 1579

SEQ ID NO: 4702 - protein, 917 aa, Neisseria meningitidis
MRHLGYIYSIYGNERKIMQLHILNNPKDAALAADAEFLKQSLFNLLHEEASPLVVETVKLLSTSDDSAALIEKVLPQLDEQQTHDLTLACGLFAQILNIAEDVHHERRRQIHEEAGRGGAEGSLTETVRRLKAGKADGKSVQRQLDNTSVTAVLTAHPTEVQRQTVLNFNRRIRALLPQRERCTNADALARLRREIDTILLGLWQTSETRRHKLSVNDEINNGVSIFPMSFFEALPKLYRNMEHDFQMVYPDVCVPNILKIGGWIGGDRDGNPFVSAETLRFAFRRHADAVFRFYRGELDKLYRELPLSIRRVKVNDDVMALAALSPDEELARTEEPYRRAIAYIMARAMGKARALGLGMGCKFGFLEPYASAQEFLDDLKKLQRSLIDNGSRLLAEGRLADLIRSVSVFGFHMMPLDLRQHAGKHADVVAELFQHAGLEDYNSLDEEQKQAALLRELGHQRPLYSPFITYSDHTRRELAIFNEARKIKDEFGEDAVTQSIISNCEQPGDLLALALLLKESGLLAVENGKPRSRINIVPLFETIEALENACPVMETMFRLDWYDALLESRGNIQEIMLGYSDSNKDGGYVTSSWCLYQAELGLVELFKKYDVRMRLFHGRGGSVGRGGGPSYQAILAQPAGSVAGQIRITEQGEVITAKYADPGNAQRNLETLVAATLEASILPDKKDPDAKLMQALSDVSFKYYRELITHPDFIDYFLQTSPIQEIATLNLGSRPASRKTLARIQDLRAIPWVFSWMQNRLMLPAWYGFGSAVETLCEDKPETLAALREHAQSNPFFQAMLSNMEQVMAKTDITLAENYAGLSESPDKAKIIFGMIKEEYRRSRKALLDLLQTEELLRDNRSLARSLALRIPYLNALNGLQVAMLKRLRKEPDNPHALLMVHLTINGVAQGLRNTG

SEQ ID NO: 4703 - protein, 171 aa, Neisseria meningitidis
KSYTCSFHGSTLVKTADGYKAIAHIQAGDRVLSKDEASGVTGYKPVTAQYGNLYQETVYIKVSDGIGNSQTLISNKIHPFYSDGKWIKAEDLKTGNRLLSESGKTQTVRNIIVKPTPLKAYNLTVADWHTYFVKGDKAETEGVWVHNECPPYKRPNNATRKCTRKTLRRMR

SEQ ID NO: 4704 - protein, 1491 aa, Neisseria meningitidis
MRFTHTTPFCSVLSTLGLFAVSPAYSSIVRNDVDYQYFRDFAENKGAFAVGASNISIQDKQGKILGRVLNGIPMPDFRVSNRQTAIATLIHPQYVNSVKHNVGYGSIQFGNDTQNPEEQAYTYRLVSRNPHPDYDYHLPRLNKLVTEISPAALSSVPLLGNGQPKANAYLDTDRFPYFVRLGSGTQQVRKADGTRTRTAPAYQYLTGGTPLKVLGFQNHGLLVGGSLTDQPLNTYAIAGDSGSPLFAFDKHENRWVLAGVLSTYAGFDNFFNKYIVTQPEFIRSTIRQYETRLDVGLTTNELIWRDNGNGDSTLQGLNERITLPIANPSLAPQNDSRHMPSEDAGKTLILSSRFDNKTLMLADNINQGAGALQFDSNFTVVGKNHTWQGAGVIVADGKRVFWQVSNPKGDRLSKLGAGTLIANGQGINQGDISIGEGTVVLAQKAASDGSKQAFNQVGITSGRGTAVLADSQQIKPENLYFGFRGGRLDLNGNNLAFTHIRHADGGAQIVNHNPDQAATLTLTGNPVLSPEHVEWVQWGNRPQGNAAVYEYINPHRNRRTDYFILKPGGNPREFFPLNMENSTSWQFIGNNRQQAAKQVAQAENARPDLITFGGYLGENAQTGKAAPSYSKTNIEWVNGPNTPHKPSPYTNTPTRTGAGVPTITASKKAATPAPTSHGMPTAPKTGNFSDMTGEAAIEKNRHIANAAVYGRPEYRYNGALNLHYRPKRTDSTLLLNGGMNLNGEVLIEGGNMIVSGRPVPHAYDHQAKREPVLENEWTDGSFKAARFTLRNHARLTAGRNTAHLDGDITAYNLSGIDLGFTQGKTPECYRSYHSGSTHCTPNAVLKAENYRALPATQVRGDITLNDRSELRLGKAHLYGSIRAGKDTAVRMEADSNWTLSQSSHTGALTLDGAQITLNPDFANNTHNNRFNTLTVNGTLDGFGTFRFLTGIVRKQNAPPLKLEGDSRGAFQIHVKNTGQEPQTTESLALVSLNPKHSHQARFTLQNGYADLGAYRYILRKNNNGYSLYNPLKEAELQIEATRAEHECNQQAYNQLQATDISRQVQHDSDATRQALQTWQNSQTELARIDSQVQYLSAQLKQTDPLTGILTRAQNLCAAQGYSADICRQVAKAADTNDLTLFETELDTYIERVEMAESELDKARQGGDAQAVETARHAYLNALNRLSRQIHSLKTGVAGIRMPNLAELISRSANTAVSEQAAYNTGRQQAGRRIDRHLTDPQQQNIWLETGTQQTDYHSGTHRPYQQTTNYAHIGIQTGITDRLSVGTILTDERTNNRFDEGVSARNRSNGAHLFVKGENGALFAAADLGYSNSRTRFTDYDGAAVRRHAWDAGINTGIKIDTGISLRPYAGIRINRSNGNRYVLDGAEINSPAQIQTTWHAGIRLDKTVELGQAKLTPAFSSDYYHTRQNSGSALSVNDRTLLQQAAHGTLHTLQIDAGYKGWNAKLHAAYGKDSNTARHKQAGIKIGYNW

SEQ ID NO: 4705 - protein, 217 aa, Neisseria meningitidis
MGLGMEIGKLIVAFLVLINPFSALSLYLELTNGHSTKERRKVARTAAVAVFAVIAVFALIGGALLKVLGISVGSFQVGGGILVLLIAISMMNGNDNPAKQNLGAQPETGQARPARNAGAIAVVPIAIPITIGPGGISTVIIYASAAKTYSDIALIIAAGLVVSAICYAILIVAGKVSRRLGTTGLTILNRIMGMMLAAVSVEIIVSGLKTIFPQLAG

SEQ ID NO: 4706 - protein, 340 aa, Neisseria meningitidis; identical to SEQ ID NO: 2046

SEQ ID NO: 4707 - protein, 91 aa, Neisseria meningitidis
MLNTVSSREFNQYPSQTQKKAAKSPVFITTRGKPSHVLISYAEYRKLTGKPQSALEALTANAELAAKLESIDFEIPPRSTAQRPPVDFGED

SEQ ID NO: 4708 - protein, 517 aa, Neisseria meningitidis
MNRTYANFYEMLAAACRKNGNGTAVFDGKEKTAYRALKQEAEAVAAYLQNIGVKFGDTVALAVSNSTEFITAYFAVSAIGAVAVPMNTFLKNSEYAYILNDCKARFLFASAGLSKELAGLKAQTPVEKIIWTDKSRPTGEMAEGDAFFEDVRRFPEKPDLGRQPRINDLAHIIYTSGTTGHPKGALISYANLFANLNGIERIFKISKRDRFIVFLPMFHSFTLTAMVLLPIYMACSIILVKSVFPFSNVLKQALLKRATVFLGVPAIYTAMSKAKIPWYFRWFNRIRLFISGGAPLAEQTILDFKAKFPRAKLLEGYGLSEASPVVAVNTPERQKARSVGIPLPGLEVKAVDEELVEVPRGEVGELIVRGGSVMRGYLNMPAATDETIVNGWLKTGDFVTIDEDGFIFIVDRKKDLIISKGQNVYPREIEEEIYKLDAVEAAAVIGVKDRYADEEIVAFVQLKEGMDLGENEIRRHLRTVLANFKIPKQIHFKDGLPRNATGKVLKRVLKEQFDGNK

SEQ ID NO: 4709 - protein, 241 aa, Neisseria meningitidis
MDFLSCWRRIADAPTIRRCVLCHGSSGVSDGICAGCRDDLAAYRTDAANSCPLCFRHIQGGAVCGICQRKPPAFDRMWASLHYEPPVSNIIHALKHLADLSMVQPLADLMMQNPPDRLADECFDFVLPVPLSRERLLQRGFNQSESIVGLLAQRYGWQILPRHTVFRHHRPPQSTLKGSERRRNIKNAFEIRTPIPENCNILLIDDVFTTGATLDELAKTLKKSGANRICCWTLARTPMKK

SEQ ID NO: 4710 - protein, 122 aa, Neisseria meningitidis; identical to SEQ ID NO: 66

SEQ ID NO: 4711 - protein, 298 aa, Neisseria meningitidis
MDDIRGIVQGAVNPFLTGFQGVGIGAITDSAVSPVTDTAAQQTLQGINHLGNLSPEAQLAAATALQDSAFAVKDGINSAKQWADAHPNITATAQTALSAAEAAGTVWRSKKVKLNPTKWDWVKNTGYETTVTRKTLDGQIAGKNKPIKPSSGDYVLPVGRQIIDPTRTSFSQATVSYQKRGANYNYDSLVAAMNEKKSWVGDRVDVVNMPDGAPTSMDNTRIMAAREAGVKVEANVHNFNDPIPLERAKSISYQGKIPKTWGEAIQFRIKKQSENGLAPPNWSTQFPNGSIYDPKVTK

SEQ ID NO: 4712 - protein, 70 aa, Neisseria meningitidis
MFNFLNKNIFIKAIKVIVMGCFYSFLVFGLFVSGKEFGYPYAPNMDAGGLAFLSVYIGFFLSVALHIYDI

SEQ ID NO: 4713 - protein, 143 aa, Neisseria meningitidis
MDIQTILEKTLPGLGYELVDFELTAQGTLRVFIDKESGITVEDCATVSNHLSRVFMVEDIDYKNLEISSPGLDRPLKKAADFVRFAGQNAKIKTRLPIDGQKNFIGKIEGCENDTVTISFDGKTVQIELGNIDKARLRPEFKF

SEQ ID NO: 4714 - protein, 398 aa, Neisseria meningitidis
MAKIITPLSANQVKNAKPRDKLYKLSDGGGLALWVYPTGGRSWKLSFVQDGRQQTISLGRYPDFSLADAREWREEVRRKRAHGENVVNKKVRADFAFEKVTRDWFVRWSKGRSEKYAGQVMRNFERWVFPAIGNLDIRQVRTADVVGCLRVMEARGIVDTLRKTKNSLKMVFAFAVGSGMMEINPVAQIGSGVFERAKTGNMAALSPSELPRLIDFLEQRNEFAVYAGRVRIHPVTRLCIYWLLLTMTRIQEAALMEWSELDGEVWRIPAERKKERRGHDVPLSRAMQWVLDQARALNVNGRFVFESVNFQGHINKESPRVAMQRAGLDTTAHGLRSLARTYLREVLKVDNDVAEKLLAHSLGTRTQTAYNRSELWEERKDALERWGNDVLRLAKNGK

SEQ ID NO: 4715 - protein, 279 aa, Neisseria meningitidis; identical to SEQ ID NO: 343

SEQ ID NO: 4716 - protein, 208 aa, Neisseria meningitidis
MVYFFAVGFNRRIAAAILHAGTPVNHKKVSRLMAKTGLKAVIRRRKYRSFKGEVGKIAPNILRRCFHAEKPNEKWVTDVTEFNVGGEKIYLSPIMDLFNGEIVSYRIQIRPTFDLAGEILKGAPEKPGSSEKPILHSDQGWQYQMFFYSGLNLNQDKAMKPQTVQIVRQGEATPYWFKFNPLYNNDRIKLKLKGLSLVQYRIQSLKAA

SEQ ID NO: 4717 - protein, 494 aa, Neisseria meningitidis
MFERSVIAMACIFALSACGGGGGGSPDVKSADTPSKPAAPVVTEDVGEEVLPKEKKDEEAVSGAPQADTQDATAGKGGQDMAAVSAENTGNGGAATTDKPKNEDAGVQNDMPQNAADTDSLTPNHTPAPNMPTGDMGNQAPDSGESAQPANQPDMENAADGIQGDDPSAGGENAGNTAAQGTNQAENNQAAGSSDSAPASNPAPANGGGDFGRTNVANGVLIDGPSQNITLTHCKGDSCDNGNLLDEEAPSKSEFESLNDSGRIDKYKKDGQDKFTNLVATKVEKKGLNKYVIFYTDTPPTRSARSRRLRRSLPAEMPLIPVNQADTLIVDGEAVSLTGHSGNIFAPEGNYRYLTYGAEKLSGGSYALSVQGEPAKGEMLAGTAVYNGEVLHFHTENGRSYPTKGRFAAKVDFGSKSVDGIIDSGDDLHMGKQKFKAAIDGNGFKGNWTENGGGDVSGRFYGPAGEEVAGKYSYRPTDAEKGGFGVFAGKKEQD

SEQ ID NO: 4718 - protein, 427 aa, Neisseria meningitidis
MTASKSGFIGQIFSRNMLVCIFTGFTSGLPLYFLINLIPAWLRSEQVDLKSIGLMALIGLPFTWKFLWSPLMDAVRLPVLGRRRGWMLLTQAGLLAALAAYAFLNPRNHLPLIAGLSVLVAFFSASQDIVLDAFRREILSDEELGLGNSVHVNAYRIAALIPGSLSLVLADRMPWSEVFVITSLFMLPGLLMTLFLAREPVLPPAVPKTLKQTVVEPFKEFFTRKGIASAVCVLLFIFLYKLGDSMATALATPFYLDMGFSKTDIGLIAKNAGLWPAVAAGILGGVWMLKIGVNKALWLFGAVQAVTVLGFVWLAGFGHFDTVGTGERLMLAAVIGAEAVGVGLGTAAFVSYMARETNPAFTATQLALFTSLSAVPRTVINSFAGYLIEWLGYVPFFQLCFVLALPGMLLLLKVAPWNGEKTQDAGR

SEQ ID NO: 4719 - protein, 274 aa, Neisseria meningitidis
MLKKFVLGGIAALVLAACGGSEGGSGASSAPAQSAVSGSLIERINNKGTVTVGTEGTYAPFTYHDKDGKLTGYDVEVTLAVAEKLGVKVEFKETQWDSMMAGLKAGRFDVVANQVGLTSPERQATFDKSDPYSWSGAVLVARNDSNIKSIDDIKGVKTAQSLTSNYGEKAKAAGADLVAVDGLAQSLTLIEQKRADATLNDELAVLDYLKKNPNAGVKIVWSAPADEKVGSGLIVNKGNDEAVAKFSTAINELKADGTLKKLGEQFFGKDISVQ

SEQ ID NO: 4720 - protein, 189 aa, Neisseria meningitidis
MPSERGGILLKCAIGKNSRIKMFEQEDEWISKTQMKKQMNGLQDLGMELTKLSNDTLKKIGLDEDLYEAVVTYKKITSNGALKRQAQFIGRLMRDTDPAPIEAFLAKLRGDDAAHNAFLQRVEQARVRLLADDGALTQFMSDFPHADAGKLRTLVRNTKKEQEQNKPPKNFRALFQELKTVMENGDAEI

SEQ ID NO: 4721 - protein, 131 aa, Neisseria meningitidis
MMRRRGKKMLFEENPIDGHFTEYSHRSGEIRLAGQSFHKPVLVHKDSVCLSQCRTLSDLTPENLLSDIKPVDYPEILIIGTGAAQEFIHPKIMADFSRIGISVECMNTDSAFRTLVFLHSEGRRAWAWLQP

SEQ ID NO: 4722 - protein, 467 aa, Neisseria meningitidis; identical to SEQ ID NO: 3712

SEQ ID NO: 4723 - protein, 56 aa, Neisseria meningitidis; identical to SEQ ID NO: 326

SEQ ID NO: 4724 - protein, 272 aa, Neisseria meningitidis
MTAPKPELPDYLGNIRIVLTRTSHPANIGSAARAMKTMGLHKLTIVAPNLMATPMTENPPVFDPEYPQSFKSPEESFILASGAADVLENATIAASLDEALADTTIACALTSRRREITAPLQTPRDLVSELLQTANRGEKVALVFGNETFGLSIEEVQACNRLMTINGNPDYFSLNLAQAVQVVCYEIFSQTGSPMTHLQQEDHAATHEQIKGMVAHMESVMNDIGFFNRRNGERLMRRMQSLFGRANTQTEDIDILRGFFNTLQQRLKDGQS

SEQ ID NO: 4725 - protein, 197 aa, Neisseria meningitidis; identical to SEQ ID NO: 1551

SEQ ID NO: 4726 - protein, 660 aa, Neisseria meningitidis
MVILTTLFFVCVLAVLVLTVPDQVQMWLDRAKEVIFTEFGWFYVLTFSIFLGFLLILSVSSLGNIRLGRDEDVPEFGFLSWLAMLFAAGMGVGLMFFGVAEPLMHYFSDITAGTPEHRQQQALLHTVFHWGVHAWSVYGTIALALAYFGFRYKLPLALRSCFYPLLKEKISGRFGDAIDIMALLATFFGIITTLGFGASQLGAGLQEMGWIAENSFSVQVLIIAAVMSLAVVSAISGVGKGVKVLSELNLSLAFLLLFFVLAAGPTVYLLSAFGDNIGNYLGNLVRLSFKTYAYEREHKPWFESWTVLYWAWWCSWAPFVGLFIARISKGRTIREFVFGVLLIPGLFGVLWFTVFGNTAIWLNDGVAGGMLEKMTSSPETLLFKFFNYLPLPELTSIVSLLVISLFFVTSADSGIYVLNNITSRDKGLSAPRWQAVMWGVLMSAVAVLLMRSGGLGNLQSMTLIVSLPFALLMLIMCFSLWKGLSADKKYFETRVNPTSVFWTGGKWKERLVQIMSQTQEQDILKFLKHTASPAMHELQRELSEEYGLSVRVDKMFHQDEPAIEFVIRKETMRDFMYGIKSVGQDVSDQLINDGKLPHIRHQTTYKPYAYFFDGRVGYDVQYMNKDELIADILKNYERYLMLLDDVGQELMAHEQVELAE

SEQ ID NO: 4727 - protein, 680 aa, Neisseria meningitidis
MMSPETRKQLKITDVSAKKLEKLNLHTAWDLVLHLPLRYEDETHIMPIKDAPIGVPCQVEGEVIHQEVTFKPRKQLIVQIADGSGSVLFLRFIHFYASHQKQTAIGKRIRAVGEIKHGFYGDEMIHPKIRDAEGGGLAESLTPVYPTVNGLNQPTLRRIIQTALDVTPLHDTLPDALLCRLKLPHLAESLRLLHSPPPSFTIHQLSDGTLPSWQRLKFDELLAQQLSMRLARQKRIGGSATALSGDGTLTQALRHALPFALTDAQKKVVSEICRDMAQTYPMHRLLQGDVGSGKTIVAALSALTAIESGAQVAVMAPTEILAEQHFIKFKQWLEPLGLEVVWLSGSQRKKAKDEAKAKLADGSVKIAVGTHALFSDGVAFHNLGLSIVDEQHRFGVAQRLALKNKGCDVHQLMMSATPIPRTLAMSFFADLDVSVIDELPPGRTPIKTRLVNNVRRAEVEGFVLNICRKGQQAYWVCPLIEESETLQLQTAAETLARLQTALPELNIGLVHGRMKAAEKAEVMARFSSGGLNVLVATTVIEVGVDVPNAALMVIEHAERMGLAQLHQLRGRVGRGAAESVCVLLFAEPLGELAKARLKVIYEHTDGFEIARQDLNIRGPGEFLGARQSGVPMLRFAKLEEDLHLLEQARETAPMLIEQNPEIVEAHLARWLSGREGYLGV

SEQ ID NO: 4728 - protein, 408 aa, Neisseria meningitidis; identical to SEQ ID NO: 2386

SEQ ID NO: 4729 - protein, 111 aa, Neisseria meningitidis
MEIEKRFTVYEIEQVAQLSSGYAMRLYEFFMQYFDKQTGKGWLEVSLVDLRFRFGLLPNEYARIGNFKTRVIDYSINEINKKTDLTATYEQRKNGRVITGFRFEFTRKQQQ

SEQ ID NO: 4730 - protein, 580 aa, Neisseria meningitidis
MKFFPAPCLLVILAVIPLKTLAADENDAELIRSMQRQQHIDAELLTDANVRFEQPLEKNNYVLSEDETPCTRVNYISLDDKTARKFSFLPSVLMKETAFKTGMCLGSNNLSRLQKAAQQILIVRGYLTSQAIIQPQNMDSGILKLRVSAGEIGDIRYEEKRDGKSAEGSISAFNNKFPLYRNKILNLRDVEQGLENLRRLSSVKTDIQIIPSEEEGKSDLQIKWQQNKPIRFSIGIDDAGGKTTGKYQGNVALSFDNPLGLSDLFYVSYGRGLVHKTDLTDATGTETESGSRSYSVHYSVPVKKWLFSFNHNGHRYHEATEGYSVNYDYNGKQYQSSLAAERMLWRNRLHKTSVGMKLWTRQTYKYIDDAEIEVQRRRSAGWEAELRHRAYLNRWQLDGKLSYKRGTGMRQSMPAPEENGGGTIPGTSRMKIITAGLDAAAPFMLGKQQFSYETAIHAQWNKTPLVAQDKLSIGSRYTVRGFDGEQSLSGERGFYWQNTLGWHFHPRHQFYLGADYGRVSGESAQYVSGKQLMGAVVGFRGGHKVGGMFAYDLFAGKPLHKPKGFQTTNTVYGFNLNYSF

SEQ ID NO: 4731 - protein, 215 aa, Neisseria meningitidis; identical to SEQ ID NO: 1514

SEQ ID NO: 4732 - protein, 356 aa, Neisseria meningitidis
MYRRKGRGIKPWMGAGAAFAALVWLVFALGDTLTPFAVAAVLAYVLDPLVEWLQKKGLNRASASMSVMVFSLILLLALLLIIVPMLVGQFNNLASRLPQLIGFMQNTLLPWLKNTIGGYVEIDQASIIAWLQAHTGELSNALKAWFPVLMRQGGNIVSSIGNLLLLPLLLYYFLLDWQRWSCGIAKLVPRRFAGAYTRITGNLNEVLGEFLRGQLLVMLIMGLVYGLGLVLVGLDSGFAIGMVAGILVFVPYLGAFTGLLLATVAALLQFGSWNGILSVWAVFAVGQFLESFFITPKIVGDRIGLSPFWVIFSLMAFGQLMGFVGMLAGLPLAAVTLVLLREGVQKYFAGSFYRGR

SEQ ID NO: 4733 - protein, 436 aa, Neisseria meningitidis
MTDLFAREPDAPLAERLRPHTLDDVVGQEHLIGEGKPLRVAVEGGKPHSMLLWGPPGVGKTTLARILAQSFNAQFLPVSAVFSGVKDIREAIDKAEIALQQGRATILFVDEVHRFNKAQQDAFLPHVESGLLTFIGATTENPSFEVNPALLSRAQVYVLQPLSSDDLKKLIAKVLALPEYQEFTIETDAQKLLVNTADGDARRLLNLLEQLLRAADTRRLKTLTAEFLADSLGAQIRRFDKGGESFYNQISALHKSVRGSHPNAALYWFCRMLDGGTDPRYLARRIVRIAWEDIGLADPRAFQIANDAATTFERLGSPEGELALAQAVLYLAAAAKSNAGYKAYKQMRRFVAENSSDEVPVHLRNAPTKLMKELGYGREYRYAHDEPNAYAAGESYMPDGLDEPDFYQPVPRGLEIKIGEKLAWLKSLDEEALKAK

SEQ ID NO: 4734 - protein, 760 aa, Neisseria meningitidis
MTVFRICFIIRLFLKYLGWGDVFRRWFLPCWVVGAAASFALPVVPHWLFWLAAFAVFAVFARRFAFAGLMLCVLAGAAYGVFRTEAALSSQWWAEAVSGVPLTVEVADMPRSDGRRVQFAAKAVDSGGRTFDLLLSDYKRREWAVGSRWRITARVHPVVGELNLRGLNREAWALSNGIGGAGTVGADRVLLHGGSGWGIAVWRSRISRNWQQADADGGLSDGIGLMRALSVGEQSALRPELWQAFRPLGLTHLVSISGLHVTMVAVMFAWLAKRLLACSPRLPARPRAWVLAAGCAGALFYALLAGFSVPTQRSVLMLAAFAWAWRRGRLSAWATWWQALAAVLLFDPSAVLGVGTWLSFGLVAALIWACSGRLHEGKRQTALRGQWAASVLSLVLLGYLFASLPLISPLVNAVAIPWFSWVLTPLALLGSVVPFAPLQQLGAFLAEYTLRFLVWLADVSPEFAVASAPLPLLVLAVCAALLLLLPRGLGLRPWAVLLLAGFVFYRSPGVPENEVAVTVWDAGQGLSVSVQTANHHLLFDTGTAAAAQMGIVPSLNAAGVRRLDKLVLSHHDSDHDGGFQAVGKIPNGGIYAGQPEFYEGARHCAEQRWQWDGVDFEFLMPSERKNIDDNGKSCVLRVVAGGAALLVTGDLDTKGEESLVGKYGGNLYSQVLVLGHHGSNTSSSGVFLNAVSPEYAVASSGYANAYKHPTEAVQNRVRAHGIKLLRTDLSGALQFGLGRGGVKAQRLRGYKFYWQKKPFE

SEQ ID NO: 4735 - protein, 209 aa, Neisseria meningitidis
MSETENQALTFAKRLKADTTAVHDSVDNLVMSVQPFVSKENYIKFLKLQSVFHKAVDHIYKDAELNKAIPELEYMARYDAVTQDLADLGEEPYKFDKELPHETGNKAIGWLYCAEGSNLGAAFLFKHAQKLDYNGEHGARHLAPHPDGRGKHWRAFVEHLNALNLTPEAEAEAIQGAREAFAFYKVVLRETFGLAADAEAPEGMMPHRH

SEQ ID NO: 4736 - protein, 1391 aa, Neisseria meningitidis
MNLLNLFNPLQTAGMEEEFDAIKIGIASPETIRSWSYGEVKKPETINYRTFKPERDGLFCAKIFGPVKDYECLCGKYKRLKFKGVTCEKCGVEVTLSKVRRERMGHIELAAPVAHIWFLKSLPSRLGMVLDMTLRDIERVLYFEAFVVTDPGMTPLQRRQLLTEDDYYNKLDEYGDDFDAKMGAEGIRELLRTLNVAGEIEILRQELESTGSDTKIKKIAKRLKVLEAFHRSGMKLEWMIMDVLPVLPPDLRPLVPLDGGRFATSDLNDLYRRVINRNNRLKRLLELHAPDIIVRNEKRMLQEAVDSLLDNGRRGKAMTGANKRPLKSLADMIKGKGGRFRQNLLGKRVDYSGRSVITVGPYLRLHQCGLPKKMALELFKPFIFHKLEKQGLASTVKAAKKLVEQEVPEVWDILEEVIREHPIMLNRAPTLHRLGIQAFEPILIEGKAIQLHPLVCAAFNADFDGDQMAVHVPLSLEAQMEARTLMLASNNVLSPANGEPIIVPSQDIVLGLYYMTRDRINAKGEGSLFADVKEVHRAYHTKQVELGTKITVRLREWVKNEAGEFEPVVNRYETTVGRALLSEILPKGLPFEYVNKALKKKEISKLINASFRLCGLRDTVIFADHLMYTGFGFAAKGGISIAVDDMEIPKEKAALLAEANAEVKEIEDQYRQGLVTNGERYNKVVDIWGRAGDKIAKAMMDNLSKQKVIDRAGNEVDQESFNSIYMMADSGARGSAAQIKQLSGMRGLMAKPDGSIIETPITSNFREGLTVLQYFIATHGARKGLADTALKTANSGYLTRRLVDVTQDLVVVEDDCGTSDGFVMKAVVQGGDVIEALRDRILGRVTASDVVDPSSGETLVEAGTLLTEKLVDMIDQSGVDEVKVRTPITCKTRHGLCAHCYGRDLARGKLVNAGEAVGVIAAQSIGEPGTQLTMRTFHIGGAASRAAAASQVEAKSNGTARFSSQMRYVANNKGELVVIGRSCEVVIHDDIGRERERHKVPYGAILLVQDGMAIKAGQTLATWDPHTRPMITEHAGMVKFENVEEGVTVAKQTDDVTGLSTLVVIDGKRRSSSASKLLRPTVKLLDENGVEICIPGTSTPVSMAFPVGAVITVREGQEIGKGDVLARIPQASSKTRDITGGLPRVAELFEARVPKDAGMLAEITGTVSFGKETKGKQRLIVTDVDGVAYETLISKEKQILVHDGQVVNRGETIVDGAVDPHDILRLQGIEALARYIVQEVQEVYRLQGVKISDKHIEVIIRQMLRRVNIADAGETGFITGEQVERGDVMAANEKALEEGKEPARYENVLLGITKASLSTDSFISAASFQETTRVLTEAAIMGKQDELRGLKENVIVGRLIPAGTGLTYHRSRHQQWQEVEQETAETQVTDE

SEQ ID NO: 4737 - protein, 230 aa, Neisseria meningitidis; identical to SEQ ID NO: 1058

SEQ ID NO: 4738 - protein, 92 aa, Neisseria meningitidis
MYYQVGNKCLEKHQAENLYFSLVVPRIKENGQIVRPEYNGSLWKMSDGQPLRLLLAECSPKTCVWVSAVGRERNFAKVSGCVLIRCWCRRIA

SEQ ID NO: 4739 - protein, 221 aa, Neisseria meningitidis
MNLFQNAKFFTTVNHLKDLPDTPLEIAFVGRSNAGKSSAINTLTNHVRLAYVSKTPGRTQHINFFELQNGNFMVDLPGYGYAQVPEAVRAHWVNLLGDYLQQRKQLIGLVLIMDARHPLKELDIRMLDFFHTTGRPVHILLSKADKLSKNEQIKTLSQVKKLLKPYSDRQNISVQLFSSLKKQGIDEANRTVGSWFDAADAAASSPKENLPQLYGNRISPT

SEQ ID NO: 4740 - protein, 252 aa, Neisseria meningitidis
MKITPVKALTDNYIWMIQHGNHAVCVDPSEPSPVLEFLVRNRLMLAQTWVTHPHPDHEGGAAALWRGYMESPVYGESDIEAATHTVTAGTQFTFGDGQVTVWATPGHTDRHTSYLLETSDGIHVFCGDTLFSAGCGRVFTGTIEQLYDSFQRFNRLPENTLFYPAHEYTAANLDFAAHIEPDNADIQTALKAAAHTPTLPVTLAHERRVNPFLRVDLPHVRDRAEALSGKTLNSSLDTFVALRELKNQYRTK

SEQ ID NO: 4741 - protein, 424 aa, Neisseria meningitidis
MKTLQDWLSHLETAHSGGLIDMGLERVGEVKKRMKLTPQCPVVVVAGTNGKGSVCAYLTQIYKQAGFKVGTLTSPHLLRYNERIAVNAEPVSDDTIIASFERIEAARGEISLTYFEFNALAAVDIFMREQVDVMILEVGLGGRLDAVNAFDGDCAVVTSVDLDHQAFLGDTVEQVGFEKAGVFRSGKPAICGQNPAPKSLLSHAEAIGAKLLMVQRDFEFHAMENIQWNYRFRPQHSDGPARNRNALPFPALRGTYQLSNAACALTVLECLNDKLPVDIGAIKRGLLLVENPGRFQVLPGRPLTVLDVGHNPHAARALRRSLINLAFAQKRTAVFSMLSDKDIDGVLEIVKDQFDEWYIAPLDVPRGMTLESLQNKLHEHSIENIQTFAAVREAYRAAASKAGENDRIVVFGSFHTVADVMSVL

SEQ ID NO: 4742 - protein, 284 aa, Neisseria meningitidis
MKIVLISGLSGSGKSVALRQMEDSGYFCVDNLPLEMLPALVSYHIERADETELAVSVDVRSGIDIGQAREQIAYLRGLGHRVEVLFVEAEESVLVRRFSETRRGHPLSNQDMTLLESLKKEREWLFPLKEIAYCIDTSKMNAQQLRHAVRQWLKVERTGLLVILESFGFKYGVPNNADFMFDMRSLPNPYYDPELRPYTGMDKPVWDYLDGQPLVQEMVDDIERFVTHWLPRLEDESRSYVTVAIGCTGGQHRSVYIVEKLARRLKGRYELLIRHRQAQNLSDR

SEQ ID NO: 4743 - protein, 106 aa, Neisseria meningitidis; identical to SEQ ID NO: 1583

SEQ ID NO: 4744 - protein, 96 aa, Neisseria meningitidis
MTIRPLHDRVVVKRLEAEEKTASGIVLPGAAAEKPDMGEVIAVGAGKIGKDGARRPLDVKVGDKIIFGKYSGQTVKADGEELLVMREEDIFGIVEK

SEQ ID NO: 4745 - protein, 590 aa, Neisseria meningitidis
MILPARFSDGISLSLRLKLLTGLWVGLAALSVVLTLLLSLRLENAASVIEEAGNLRMQAYRLAYMAGEGSPRAQIDNQVAEFEKSLKRIAQSDAIHPLIPSDTPLAYDLIQSMLIIDWQAHILPPLQSYRRPTQVDLYRFAGNIELFLQALENANEKNTWWLRRFQWAIMLMTLVSSVLMLFWHQIWVIRPLQALREGAERIGRRCFDIPVPEGGTPEFKQVGRCFNQMGGRLKILYDDLEGQVAEQTRSLEKQNQNLTLLYQTTRDLHQSYIPQQAAEHFLNRILPAVGADSGRVCLDGGSDVYVSIHHADCGTAASDLGKYHEEIFPIEYQNETLGRLLLSFPNGISLDEDDRILLQTLGRQLGVSLAGAKQEEEKRLLAVLQERNLIAQGLHDSIAQALTFLNLQVQMLETAFAENKREEAAENIGFIKTGVQECYEDVRELLLNFRTKISNKEFPEAVADLFARFTQQTGITVETVWENGTHLPTQDEQLQMIFILQESLSNIRKHARATHVKFTLSEHGGRFTMTIQDNGQGFDTEKIGEPTGSHVGLHIMQERAKRIHAVLEIRSQAQQGTTVSLTVASEESLK

SEQ ID NO: 4746 - protein, 140 aa, Neisseria meningitidis
MNTTRLPTALVLGCLCAAASAADNSIMTKGQKVYESNCVACHGKKGEGRGTMFPPLYRSDFIMKKPQVLLHSMVKGINGTIKVNGKTYNGFMPATAISDADIAAVATYIMNAFDNGGGSVTEKDVKQAKNKKKLNRQNAV

SEQ ID NO: 4747 - protein, 122 aa, Neisseria meningitidis; identical to SEQ ID NO: 848

SEQ ID NO: 4748 - protein, 392 aa, Neisseria meningitidis
MAKMMKWAAVAAVAAAAVWGGWSYLKPEPQAAYITETVRRGDISRTVSATGEISPSNLVSVGAQASGQIKKLYVKLGQQVKKGDLIAEINSTSQTNTLNTEKSKLETYQAKLVSAQIALGSAEKKYKRQAALWKDDATSKEDLESAQDAFAAAKANVAELKALIRQSKISINTAESELGYTRITATMDGTVVAILVEEGQTVNAAQSTPTIVQLANLDMMLNKMQIAEGDITKVKAGQDISFTILSEPDTPIKAKLDSVDPGLTTMSSGGYNSSTDTASNAVYYYARSFVPNPDGKLATGMTTQNTVEIDGVKNVLIIPSLTVKNRGGKAFVRVLGADGKAAEREIRTGMRDSMNTEVKSGLKEGDKVVISEITAAEQQESGERALGGPPRR

SEQ ID NO: 4749 - protein, 1069 aa, Neisseria meningitidis
MFYLYQSNRLETLAALFARIQKVKPLKSALQPEQIIVQSQGMRRYLNTCLARDLGVAANLSFSLPAGLTWKLMKKLIPGIPELSPFAPEVMRWRLLDLFRSEAFRNTAEFEDVRNVLQDYLGSGESADYQLAGQLADIFDQYLVYRPQWIDAWQQGRILGLGDDEIWQSKLWRYLDDGRQSAPHRVALWEKLLESLSSDKLPERYFVFGISTMAPMYLQLLHKLSEHCDVFVFALNPSGMYWGNVIEAAQILKGGGDPDLTQAGHPLLASLGKQGRDFFDFLNEMEIEGETPVFEEGGRDTLLHALQTDIQNLKMPSENVGSVGTDDGSIRIVSAHSPLRELQILKDKLLKILHEHPDWQPHDIAVLTPNIESYTPFIEAVFGQAQPGAQALPYSVSDVKISRRQPLFHALSCLFDLLESRFEVDKVLVLLETAPVLRRFGLTEDDLPLLHDMVADLNVRWGLDGEMRGGTDQLFTWKQAVERMILGWMLPESGNPMWQDVSAWYADVNQTALFGRFAALLETLSDIVRIWQQPATVGEWVARCRDLLETLFQTEADDQKAVQNLENEWVKWQAETELAQFSGQLPPHTVIRHIRRFLDSESEAGFLRGGITFCSMVPMRSLPFKVICLLGLNDGDFPRNTKAAVFDLIAKHPAKGDRARRDDDRYLFLEALISAREILYLSYIGRDIRKDEELAPSSLLGELIDTVAAMAGIGSRQLAQNWIEQHPLQAFSRRYFQEGGRSDGIFGTRTDYATALGQTPEPPQPFFDQPVENAEPVAEIGQDEFIRFWRNPVKVWLQQQLAWSEPHIGEAWEPAEPFEPQHADQIAETYIEARREGRDFAQTAARIGAESLLPSGELGRLWQQDFQTAAKQIDTAVLNSPKLPPLSYAIPSDGQILKGSLGNLYRCGQVFYAYGKPNAPQRIAFLLEHLIFCAVMPSEAETRQTFIVQSGETEILAEIAQDRALQLLSEWMAFFNIGQNRPLPFFAKTSLATAEAFAQKQDWEAALKKAQTAYHGNKVSKGQKDYTEVALVFGNASQNPLEQPLFENLVRLLADTFAAAEKKEEAGAA

SEQ ID NO: 4750 - protein, 433 aa, Neisseria meningitidis
MPSETARPLYADTRAAHTLVWFRQNLRIRDNAALCAAVAEGLPVIGIWIDDAETDNPRRAAFYRQSAAELAQGLAGRGIPLYTAASPAELVRLAVRLNIRAVIADESHTFADKLADNALWHELDKHGIALTFVNDRAVFGKTDLIPDGGTAHTDFDRYREVWLDRFSKQPPAGPDLFAAYRQPFPENLSAPPPAALSDGIFLPQNSGETAAWRQWRRFLEQADSYSVLKDFPSRKHTSLMGAYLSAGCISPRLLARESLERRLNAWADNIIRRDFFLQLALQYADDDPSDGNPEHTLRLTLWQQGQTGIPIIDAAMRCLHKTGSLHPALRRLSADFFCHVLNLPRREGEIWFARQLTDFDAAINQGNWRLAASRHTCPDIAAASYRTDPDGTFIKRHIPELAHLSADTVHTPWRFACSVDTHGYPAHPVAGIP

SEQ ID NO: 4751 - protein, 101 aa, Neisseria meningitidis
MITLTHYLVLGALLFGISAMGIFMNRKNVLVLLMSIELMLLAVNFNFIAFSQHLGDAAGQIFVFFVLTVAAAESAIGLAIMVLVYRNRQTINVADLNKLKG

SEQ ID NO: 4752 - protein, 100 aa, Neisseria meningitidis; identical to SEQ ID NO: 1890

SEQ ID NO: 4753 - protein, 514 aa, Neisseria meningitidis
MMTEIQQRAQLHRQIWKIADEVRGAVDGWDFKQYVLGTLFYRFISENFTDYMQAGDSSIDYAAMPDSIITPEIKDDAVKVKGYFIYPSQLFCNIAAEAHQNEELNTKLKEIFTAIESSASGYPSEQDIKGLFDDFDTTSSRLGSTVADKNKRLAAVLKGVAELDFGNFEDHRIDLFGDAYEYLISNYAANAGKSGGEFFTPQSVSKLIARLAVHGQEKVNKIYDPACGSGSLLLQAKKQFDEHIIEEGFFGQEINHTTYNLARMNMFLHNVNYNKFHIELGDTLTNPKLKDGRPFDAIVSNPPYSINWIGSDDPTLINDDRFAPAGVLAPKSKADFAFILHALNYLSSRGRAAIVSFPGIFYRGGAEQKIRQYLVEGNYVETVIALAPNLFYGTGIAVNILVLSKHKDNTDIQFIDASSFFKKETNNNVLTEEHIAEIVKLFADKADVPHIAQNAAQQTVKDNGYNLAVSSYVEAKDTCEAVDIKQLNAEISETVAKIERLRREIDEVIAEIEA

SEQ ID NO: 4754 - protein, 220 aa, Neisseria meningitidis
MIQAVLFDLDGTLADTALDLGGALNTVLRRHNLPEKSIAEIRPYAGHGAAGLLKLGAGITPDHPDYARWRTEYLDEYDRRYAQDTALFDGVDELIAELGRRGIKWGIITNKPARFTDKLVPKLGFAVPPAVVVSGDTCGEPKPSVKPMLYACGQIHAEPQHTVYVGDAERDIQAGRNAGMKTVLAEWGYISDEDDTDSWQADFHIRTPLDLLECLDKIQP

SEQ ID NO: 4755 - protein, 266 aa, Neisseria meningitidis; identical to SEQ ID NO: 4434

SEQ ID NO: 4756 - protein, 327 aa, Neisseria meningitidis; identical to SEQ ID NO: 294

SEQ ID NO: 4757 - protein, 344 aa, Neisseria meningitidis
MSTSLSYRDAGVDIDAGDQLVENIKPFAKRTMRPEVLGDLGGFGALVEIGKKYKNPVLVSGTDGVGTKLKLAFDWDKHDTVGIDLVAMSVNDILVQGAEPLFFLDYFACGELDVPRATDVIKGIAQGCEESGCALIGGETAEMPGMYPVGEYDLAGFAVGVVEKENVITGRSIGAGDVVLGLASNGAHSNGYSLIRKIIERDNPDLDAEFDNSKTLREAVIAPTRLYVKPILAALEKFTIKGMAHITGGGITENVPRVLPENTVAQIDAKSWELPKLFQWLQKAGNVETQEMYRTFNCGIGMVVIVAAEDADAVQGLLGEQGETVYRLGLIRERQGDEHQTQVA

SEQ ID NO: 4758 - protein, 135 aa, Neisseria meningitidis
MTVWFVAAVAVLIIELLTGTVYLLVVSAALAGSGIAYGLTGSTPAAVLTAALLSALGIWFVHAKTAVRKVETDSYQDLDAGQYVEILRHTGGNRYEVFYRGTHWQAQNTGQEELEPGTRALIVRKEGNLLIITHP

SEQ ID NO: 4759 - protein, 143 aa, Neisseria meningitidis
MNRLDQLGTRINLICNVFDKWIGQQDLNYNLFAVLYTLATEGSRTQKHIGEEWSLPKQTVSGVCKTLAGQGLIEWQEGEQDRRKRLLSLTETGKAYAAPLTENAQEFSDKVFATFGDTRTTRLFADLDTLAEVMEKTISENKK

SEQ ID NO: 4760 - protein, 145 aa, Neisseria meningitidis
MPVKKVEKNILVLHGADKMFELVDKVEDYPHFLPWYSKTEVIGRSGNELKARLFMDYMHVRQSFATHNRNIPGREIRMELLEGPFKTLRGTWKFIDLGDDMCKIEFNLEYDFSNAVLSALISPVFNHLSVTLVEAFVKEADRRYA

SEQ ID NO: 4761 - protein, 251 aa, Neisseria meningitidis
MMDLDLLSEEARREMLACAEEAVPSEMCGVLVFSYEGYEFLPLSNCAENPHETFEISADDWMAAERVGEIVAVVHSHPRGEPFLSGADRRMQVETGLPWILVTQGRLKLFRPVPHLRGRVFEYGKTDCGALVRDAFMLMGLVFPDHPRGDMDEDAAAGFWEKHLENCGFSRVSDGLCAGDVVLTATGGHASHAVLYLGNDWMLHHAYNQLSCRVPYTRYWADVTHSVWRHPDFEPAMMQALENDFTHMEQA

SEQ ID NO: 4762 - protein, 545 aa, Neisseria meningitidis
MDFKRLTAFFAIALVIMIGWEKMFPTPKPVPAPQQAAQQQAVTASAEAALAPATPITVTTDTVQAVIDEKSGDLRRLTLLKYKATGDENKPFILFGDGKEYTYVAQSELLDAQGNNILKGIGFSAPKKQYSLEGDKVEVRLSAPETRGLKIDKVYTFTKGSYLVNVRFDIANGSGQTANLSADYRIVRDHSEPEGQGYFTHSYVGPVVYTPEGNFQKVSFSDLDDDAKSGKSEAEYIRKTPTGWLGMIEHHFMSTWILQPKGGQSVCAAGECSIDIKRRNDKLYSASVSVPLAAIPAGAKAETAVNLYAGPQTTSVIANIADNLQLAKDYGKVHWFASPLFWLLNQLHNIIGNWGWAIIVLTIIVKAVLYPLTNASYRSMAKMRAAAPKLQAIKEKYGDDRMAQQQAMMQLYTDEKINPLGGCLPMLLQIPVFIGLYWALFASVELRQAPWLGWITDLSRADPYYILPIIMAATMFAQTYLNPPPTDPMQAKMMKIMPLVFSVMFFFFPAGLVLYWVVNNLLTIAQQWHINRSIEKQRAQGEVVS

SEQ ID NO: 4763 - protein, 293 aa, Neisseria meningitidis
MPSENTLFSLPDTLLRPIVEQALSEDLGRRGDITSAAVIAPDKTAKLFLVSREDGVIAGMDLACLAFQTMDPSVRFQAEIQDGQAVRAGQTLAVVEGNACALLTAERTALNYLTHLSGIATATARAVAEVAEYGTDIVCSRKTIPLLRVLQKYAVRAGGGVNHRMGLDDAVLIKDNHLAYCGSIAQAVRQAKQAVGALTCVEIEVDTLAQLDEAIAAGAERILLDNMDDETLKEAANRCHTQTAHPHTVYCEASGGIGFDRLKRVAQTGVDGIALGYLTHSSRSLDIGLDFLA

SEQ ID NO: 4764 - protein, 335 aa, Neisseria meningitidis; identical to SEQ ID NO: 4092

SEQ ID NO: 4765 - protein, 366 aa, Neisseria meningitidis
MAGNTFGQLFTVTTFGESHGAGLGCIIDGCPPGLELSEADIQFDLDRRKPGTSRHVTQRREADQVEILSGVFEGKTTGTPIALLIRNTDQRSKDYGNIATSFRPGHADYTYWHKYGTRDYRGGGRSSARETAARVAAGAVAKKWLKEKFGTEITAYVTQVGEKEIRFEGCEHISQNPFFAANHSQIAELENYMDSVRKSLDSVGAKLHIEAANVPVGLGEPVFDRLDAEIAYAMMGINAVKGVEIGAGFDSVTQRGSEHGDELTPQGFLSNHSGGILGGISTGQDIHVNIAIKPTSSIATPRRSIDINGNPIELATHGRHDPCVGLRAAPIAEAMLALVLIDHALRHRAQNADVQVNTPDITLSNK

SEQ ID NO: 4766 - protein, 796 aa, Neisseria meningitidis
MSTVQMNKNIKSLNLREKDPFLSREKQRYEHPLPSREWIIELLERKGVPSKIESLARELSITEDEYVFFERRLKAMARDGQVLINRRGAVCAADKLDLVKCRVEAHKDGFGFAVPLMPTGEGDFVLYERQMRGVMHGDIVTVRPVGIDRRGRCEGTVLDIVERAQSKVVGRFYMDRGVAILEPEDKRLNQSIVLEPDGVARFKPESGQVIVGEIEVYPEQNRPAVAKIIEVLGDYADSGMEIEIAVRKHHLPHQFSEACAKAVKKIPDHVRKSDLKGRVDLRDLPLVTIDGETARDFDDAVFAEKIGRNYRLVVAIADVSHYVRPDDAIDTDAQERSTSVYFPRRVIPMLPENLSNGICSLNPNVERLCMVCDMVITYAGNIKEYRFYPAVMRSHARLTYNQVWKWLSGGIGHPFKAQIDTLYKLFKILQKKRFERGAVEFDSIETQMLFDDNGKIEKIVPVVRNDAHKLIEECMLAANVCAADFLLKNKHTALFRNHLGPTPEKLAALREQFGLLGLQLGGGDNPSPKDYAALAGQFKGRPDAELLQVMMLRSMQQAVYEPHCDGHFGLAYEAYAHFTSPIRRYPDLTVHRAIKAVLNQQTYTPKKSWQALGVHTSFCERRADDASRDVENWLKTYYMRDKVGEIFEGKISGVANFGIFVTLDDIHIDGLVHISDLGEDYFNFRPEIMAIEGERSGIRFNMGDRVAIKVARADLDDGKIDFVLIAEGSGRGRKVKSSASAKPAGTAGKGKPKTAAEKKTARGGKVRGRGASAAAESGKKAKKPVPIKVKKRKGKS

SEQ ID NO: 4767 - protein, 169 aa, Neisseria meningitidis
MTDTQNRVAMGYIKGVFGIKGWLKIAANTEYSDSLLDYPEWHLVKDGKTISVTLEAGKVVNGELQVKFEGINDRDLAFSLRGYTIEIPREAFAPTEEDEYYWTDLVGMTVVNKDHTVLGKVSNLMETGANDVLMIDGEHGQILIPFVSQYIETVDTGSKIITADWGLDY

SEQ ID NO: 4768 - protein, 376 aa, Neisseria meningitidis
MIKISTRFDAGSVVVKDLTDPSNIRLALRPDNASDFAQWFYFRLQGAAYQNCIMHFENAAEAAYPKGWEGYQACASYDRRNWFRVPTSYENGVLTVNHTPLSNSVYYAYFEPYSEEQHLNLLGDAQGSGLCRIDDLGSTVQGRDINLLTIGNQVESDLKIWITARQHPGETMAEWFVEGLLGRLLDPQDPTARTLLDRATFYIVPNMNPDGSALGNLRTNAAGANLNREWENPTLEKSPEVFFVRERMLETGVDLFLDIHGDEGLPFVFVAGTEGVPNYNPRISALETQFKTALLNASPDFQDEYGYEKDAPGQANMTLATNWVGNRFNCLAYTLEMPFKDNANLPDDDFGWNGQRSLRLGEAVLSAILNVAGDLR

SEQ ID NO: 4769 - protein, 173 aa, Neisseria meningitidis
VKDSLMDFFDFFAQGKYKKIATEQGLDRKYFIFHYIVCNLSAISSFCLMKVIHSYTILYLLIMIIGIAFGFILRNRVLSIVKNKQKFLSDMFPLEMPFFSRVYKIPILARFLNRGMKWLYLQNFFCLVMICFSISLILNEERGWMPYFICYWFGLCYPANTYYVFLSRDYKHI

SEQ ID NO: 4770 - protein, 171 aa, Neisseria meningitidis
MKIKQIVKPGLAVLAAGVLSACATKSNVKADGTTDNPVFPKPYSVTLDNKRGTFPTYDELDQMRPGLTKDDIYKILGRPHYDEGMYGVHEWDYLFHFHTPGVGIDPENTSGVEGVTTCQYKVIFDKDKFARSFYWNPVFPKDAACPPPAPKAEPQVIIREIVPAKPKRIRQ

SEQ ID NO: 4771 - protein, 212 aa, Neisseria meningitidis
MQTAIIDYGMGNLHSVLKSVRTAGQLAGKNTEIFLSGDPERVSRADKVIFPGQGAMPDCMAALTRDGLDEAVKDALKNKPFFGICVGAQLLFDHSEEGNTDGLGWFGGKVRRFARDLRDRQGCRLKVPHMGWNTVRQTQNHPLFQGIPQDTRFYFVHSYYFAPENPETILGESDYPSPFACIVGKDNVFATQFHTEKSHDAGLTMLKNFLNW

SEQ ID NO: 4772 - protein, 264 aa, Neisseria meningitidis; identical to SEQ ID NO: 3548

SEQ ID NO: 4773 - protein, 334 aa, Neisseria meningitidis
MQRQIKLKNWLQTVYPERDFDLTFAAADADFRRYFRATFSDGSSVVCMDAPPDKMSVAPYLKVQKLFDMVNVPQVLHADTDLGFVVLNDFGNTTFLTAMLQEQGEAAHKALLLEAIGELVELQKASREGVLPEYDRETMLREINLFPEWFVAKELGRELTFKQRQLWQQTVDTLLPPLLAQPKVYVHRDFIVRNLMLTRGRPGVLDFQDALYGPISYDLVSLLRDAFIEWEEEFVLDLVIRYWEKARAAGLPVPEAFDEFYRWFEWMGVQRHLKVAGIFARLYYRDGKDKYRPEIPRFLNYLRRVSRRYAELAPLYALLVELVGDEELETGFTF

SEQ ID NO: 4774 - protein, 206 aa, Neisseria meningitidis
MAQFFAIHPDNPQERLIKQAVEIVNKGGVVVYPTDSCYALGCKLGDKAAMERILSIRKIDLKHHLTLMCADLSELGTYAKIDNVQFRQLKAATPGPYTFILQATKDVPARTLHPKRKTIGLRIPDNAIAQALLGELGEPLLSCTLMLPEDGEPLTDPYEIRERLEHAVDLVIDGGWCGTEPTTVVDMTDGTELVRRGCGDTAVFGL

SEQ ID NO: 4775 - protein, 300 aa, Neisseria meningitidis
MSVFQTAFFMFQKHLQKASDSVVGGTLYVVATPIGNLADITLRALAVLQKADIICAEDTRVTAQLLSAYGIQGKLVSVREHNERQMADKIVGYLSDGMVVAQVSDAGTPAVCDPGAKLARRVREVGFKVVPVVGASAVMAALSVAGVAGSDFYFNGFVPPKSGERRKLFAKWVRAAFPVVMFETPHRIGATLADMAELFSERRLMLAREITKTFETFLSGTVGEIQTALSADGNQSRGEMVLVLYPAQDEKHEGLSESAQNIMKILTAELPTKQAAELAAKITGEGKKALYNLALSWKNK

SEQ ID NO: 4776 - protein, 352 aa, Neisseria meningitidis
MSSRKIIHIDMDAFYASVELREQPHLKGRPVVVAWEGARSVICAASYEARQFGLHSAMSVATAKRLCPQAVYVPPHFDLYRQVSAQIHAVFRRYTDLIEPLSLDEAYLDVTRNFKNIPYASEVAKEIRAAIFAETGLTASAGIAPNKFLAKIASDWRKPNGQFVLPPHKVMAFLETLPLGKIPGVGKVTLKKMQSLGMRTAGDLRRFERGELLNHFGRYGYRLYDLVRGTDERPVKAERERLQISTEITLPEDLPLEQAAGHLPHLAEDLWRQITRKNVEAQSVTLKLKTYDFRIITRTLTYSSVLPDCAALLQAAQMLMARVPPQTEDAFRLIGIGVGHLVPKNQQQGLWA

SEQ ID NO: 4777 - protein, 414 aa, Neisseria meningitidis
MSNENRTCSFCGKSKSHVKHLIEGENAFICDECVSNCIEILHEDGNDGTPSESAGGEPEESGKLPTPAEIVANLNDHVIGQEQAKKALAVSVYNHYKRLRHPKAGANVELSKSNILLIGPTGSGKTLLAQSLARKLDVPFVMADATTLTEAGYVGEDVEQIITKLLGKCDFDVEKAQRGIVYIDEIDKISRKSDNPSITRDVSGEGVQQALLKLIEGTVASVPPQGGRKHPNQEFINVDTTNILFICGGAFAGLEKVIRRRTEKGGIGFGASVHSKDENADITKLFGIVEPEDLIKFGLIPELIGRLPVIATLEELDEDALINILTEPKNALVKQYQALFGMENVELEFEEGALRSIARQAMERKTGARGLRSIVERCLLDTMYRLPDLQGLKKVVVGKAVIEEGREPELVFES

SEQ ID NO: 4778 - protein, 146 aa, Neisseria meningitidis
MKRQVSADLTVCFRGTEYSVKAVPHVLVGEHLEICLYDGKVCAAYSYDDDQPETVYLPLPEVCKQENRQENWFAFKGETCCALREDSRLDMEVANSALAALHALLLDNKSAKTKSWDAEGLADIIGCISERLARAVNETEEINRAA

SEQ ID NO: 4779 - protein, 189 aa, Neisseria meningitidis
MEILTQLGYRVIQLPAGIDESVKADETPACYVQRMAAEKNQTALALFLETNGAMPDFPLITADTCVVSDGIILGKPRSQAEAIEFLNRLSGKQHTVLTAVCIHYRGKTSSRVQTNRVVFKPLSSEEISAYVQSGEPMDKAGAYAVQGIGGIFIQSIEGSFSGIMGLPVYETVSMLQDLGYRSPLSALKP

SEQ ID NO: 4780 - protein, 60 aa, Neisseria meningitidis
MPTPPAALMVAPVRPNPPKDGKTVTLLEHAAEFGGYVAELENQNQAWRDWAGNHSRKVGN

SEQ ID NO: 4781 - protein, 126 aa, Neisseria meningitidis
MPLKFQPRERSVIMCDFRGYEEPEMVKKRPVVVIARNRHNGKLVTAVPLSSTEPVPLADYHHKMSGNPLPDKPHIQCWAKCDMTATVGLARLDRYKPKGRDRCIPIISEEDFQAIKTAVAKAFKLY

SEQ ID NO: 4782 - protein, 353 aa, Neisseria meningitidis
MAAFPSEAESPVMYPLARRILFALDAEKAHHFTLDALYTVYKLGLIPVTGNRTKPVKLMGLDLPNPVGLAAGLDKNGEYIDALGALGFGFIEIGTVTPKPQPGNPQPRLFRVPEHQGIINRMGFNNHGIDTMIRNIEKSKFSGVLGINIGKNAVTPIENAADDYLICLEKAYAHASYITVNISSPNTKNLRALQGGDELSALLEALKNKQAQLASVHGKYVPLAVKIAPDLDEAQIEDIAHVVKSVEMDGIIATNTTIDKSSLGSHPLAGEQGGLSGLPVYEKSNRVLKLLADHIDGKLPIIGVGGIMEGRDAAEKIRLGATAVQVYSGLIYKGPALVKECLKALARSAQNAV

SEQ ID NO: 4783 - protein, 166 aa, Neisseria meningitidis; identical to SEQ ID NO: 987

SEQ ID NO: 4784 - protein, 347 aa, Neisseria meningitidis
MIPATYTLSQITARLGGEWRGEDISVTAVRPLADAQAEHISFLANPKYKAEVHDSSAGAVIVSAKAADGFEGRNLIVADDPYLYFAKVARLFSPVVKARGGIHPTAVVEPGATVPASCEIGANVYIGANTVLGEGCRILANAVVQHDCKLGDEVVLHPNAVVYYGCTLGRRVEIHSGAVIGADGFGLAFAGDSWFKIPQTGAVTLGDDVEIGSNTNIDRGAMSDTTVGNGTKIDNQVQIGHNCKIGSHTVIAAKTGISGSVTIGSYCIIGGGVGTVGHIEIADKTTIGGGTSVTHSITESGKHLAGIFPMSTHKEWARNAVHIHRLSEMNKRLKTLEQQLSDGKDTQ

SEQ ID NO: 4785 - protein, 226 aa, Neisseria meningitidis
MIFQTVWFSDMVLSVSWIVLILILAASAPSAFRSLARYRSALPLCTVIFSAAWCLNASAGGGQLAQMNYHLLAVNLVALMVGTSAAFWLAALLMLPYCLLFASSAGAYPPNALVLILPALAVNRLSRILVNRLPPNIFIFIFVNGFLASAAGILLTGLVLTGILDAANAFPSEILWTTALPVFILLAWAEAFLSGISTAIFVALKPHWINTFDDNRYLKSDRGIWR

SEQ ID NO: 4786 - protein, 177 aa, Neisseria meningitidis; identical to SEQ ID NO: 1513

SEQ ID NO: 4787 - protein, 135 aa, Neisseria meningitidis
MFLLAEFLGILTKKRSIKMIELQLHELKLVSGGGPVTDNIAGNVANVATTKGGPTWGDLVAIPAAAAAVYYLPKNAYGAAGANGVYNVTRNWVNDAVNAPPYNGRPIFEIEHGLTAPATKADKSGNGYTDGTDYC

SEQ ID NO: 4788 - protein, 375 aa, Neisseria meningitidis
MTLIKPVIAALALIGLAACSGSKTEQPKLDYQSRSHRLIKLEVPPDLNNPDQGSLYRLPAGSGAVRASDLEKRRTPAVQQPADAEVLKSVKGVRLERDGSQRWLVVDGKSHAEIWPLLKAFWQENGFDIKSEEPAIGQMETEWAENRAKIPQDSLRRLFDTVGLGGIYSTGERDKFIVRIEQGKNGVSDIFFAHKAMKEVYGGKDKDTTVWQPSPSDPNLEAAFLTRFMQYLGVDGQQAENASAKKTTLPAANEMARIEGKSLIVFDDYGRNWRRTALALDRIGLTVVGQNTERHAFLVQKAPNESNAVTEQKPGLFKRLLGKGKAEKPAEQPELIVYAEPVANGSRIVLLNKDGSAYAGKDASALLGKLHSELR

SEQ ID NO: 4789 - protein, 277 aa, Neisseria meningitidis
MPHALVLQFPSAEALPSDFPSRLPEPDYADEKRMRFIVEEGFSLSGADAALLGSRQIDHAVLSDMDFGELGLIVSDMDSTLITIECVDEIAAGVGLKDKVAEITERSMRGELDFEQSLRSRVALLAGLDEQILADVYENVLKLSPGAEFLLDECKRHDVKFLLVSGGFTFFTERLQQRLGFEYQHANVLEIENGRLTGRLKGRIIDAQAKADLLREYRSRLGLQPHQVLAVGDGANDIPMLKEAGIGVAYRAKPKVRAAADVCINFGGLERVRGLFR

SEQ ID NO: 4790 - protein, 222 aa, Neisseria meningitidis
MTTHLSNVAPDLQNYLNAIGEPEHPVLTRLREKTGHHRMGKMAIAREQAAVLVWLAKLIRAEKYLEIGVFTGYSSTALALALPEHGRITACDINVTFTDTARQVWNEAGVAHKISLHLQPALLTLDDLIAQGEAGSYDLALIDADKPPTPQYFERCLKLVRQGGIIAIDNILLNGRVMREAASDAPPSVGILKDFNQNLPNDTRIVPITLPVGDGLTLLLKK

SEQ ID NO: 4791 - protein, 330 aa, Neisseria meningitidis
VYACLPLKTNTQRIIMNILSKISSFIGKTFSLWAALFAAIAFFAPDTFKWAGPYIPWLLGIIMFGMGLTLKPSDFDILFEHPKVVIIGVIAQFAIMPATAWLLSKLLNLPAEIAVGVILVGCCPGGTASNVMTYLARGNVALSVAVTSVSTLISPLLTPAIFLMLAGEMLEIQAGSMLMSIVKMVLLPIVLGLIVHKVLGSKTEKLTDALPLVSVAAIVLIIGAVVGASKGKIMESGLLIFAVVVLHNGIGYLLGFFAAKWTGLPYDAQKTLTIEVGMQNSGLAAALAAAHFAAAPVVAVPGALFSVWHNISGSLLATYWAAKAGKHKKP

SEQ ID NO: 4792 - protein, 221 aa, Neisseria meningitidis
MDSWFEDTAMGRYVAKLEQDFFGRYLDSYRFSGMCAVQVGGPWLSLSEDVVCVPRDMSMSAENMALADVSADMLLFPHTLEGGVPSQILSEAHRILKPCGRLMLTGFNPYSLWGFSRWFDGERLPEKRFCLPLPELKRRLADAGFDIEFGKFMVYLPPVSSLGQIRFWRFMEKAGDRWWPQCAAVYGLVLVKRAAGVTPLPAWDGYLGGKALAAGAARVAD

SEQ ID NO: 4793 - protein, 498 aa, Neisseria meningitidis
MSLALVYSRALSGMNAPLVEVEAHLANGLPHFNIVGLPDTEVKESRDRVRAAIIQSGFEFPAKKITVNLAPADLPKESGRFDLPIAIGILAASGQVAPEKLAEYEFAGELALSGLLRPVRGALAMAWQGMQAKRAFVLPEENAGQAAVMRGITVYGARSLGEVAAHLNGIEPLAQTECQVPQMPFEHGGQPDLCDVKGQHTARLALEIAAAGGHSLLMMGPPGTGKSMLSQRLPGILPPLTEDELVEVWALRSLLPNHQQQLDSHRPFRSPHHSASAAAMVGGGSDPRPGEISLAHHGVLFLDELPEFDRKVLEVLREPLENGEIHISRAARQAVYPAKFQLVAAMNPCPCGYLGHPVKPCRCTPESVARYRSKISGPLLDRIDLTIEVPSLSAAELMQQEAGESSASVLERVIAARDKQYARQGKVNAALSVSELDTSARIQKEAQEALGGLLEKLSLSARSFHRIMRVARTLADLAGDEEVGRSHVMKAIGFRRAL

SEQ ID NO: 4794 - protein, 218 aa, Neisseria meningitidis
VNKRLFCSRNGLRYYLLGGFCLSVFPFLLVFASSVWAVYRTGGQVLPPYVRADAALVLGAAAWDKHPSPVFRERINHAIALYQSRRVGKIVFTGGRTKKGYMTEAEVGRRYALKQGVPARNILFENTSRNTYENLNNIRPVLRANGIASVVIVSDPYHLARAAEMAEDLGVRVYMSATPTTRFDAGNKKKIFMLQEGYALSLYRLEKWGWDFFNWLFH

SEQ ID NO: 4795 - protein, 329 aa, Neisseria meningitidis
MKQPVFAVTSGEPAGIGPDICLDLAFARLPCRCAVLGDKHLLRARAEALGKSVVLRDFNPESGGAAYGELEVLHIPTAKAVEAGKLNPANAAYVLQLLDTALTGISDGIFDGIVTAPLHKGIINDARASTGFFSGHTEYLAEKSGTGQVVMMLAGKGLRVALVTTHLPLKDVAAAITQPLIESVARILHHDLKHKFGIKNPKILVAGLNPHAGEGGHLGHEETDTIIPALENLCREGINLAGPYPADTLFQPFMLEGADAVLAMYHDQGLPVLKYHSFGQGVNITLGLPFIRTSVDHGTALDLAATGRADSGSLITAVETAVEMARGSL

SEQ ID NO: 4796 - protein, 405 aa, Neisseria meningitidis; identical to SEQ ID NO: 163

SEQ ID NO: 4797 - protein, 137 aa, Neisseria meningitidis
MNKFLATWLAPILVLSGCATIMGESSQTVPIKSQPSGAVFKIQDETGVIVQSGVTPANVSLPKGNGKYFGRKKYQVSFEKKGYQPLVYKLETNPNGWYIGGNLIFGGLIGYLIVDPLSNGKMFTISPKQVDVPLIAK

SEQ ID NO: 4798 - protein, 109 aa, Neisseria meningitidis; identical to SEQ ID NO: 2887

SEQ ID NO: 4799 - protein, 307 aa, Neisseria meningitidis; identical to SEQ ID NO: 1349

SEQ ID NO: 4800 - protein, 357 aa, Neisseria meningitidis
MERIVMGKEMAMMPADYGQWLADIKNRVLTARLRVALAVNVELISLYWHIGRDILQRQAAQDWGSKVIDRLGRDLREAFPEMKGFSRANLLYMRAFAEAWTDFEIVQQAVGQLPGHNVLLLNRMKEQEARLFYVQKAIAKNWSRATLEVHIKNRLHERQGKAVTNFAARLPAPTSALEQETLKDPYLFDFLSLGEDAQEREIENALMQHITRFLLELGNGFAFVGRQYRLEVNGDEFFIDLLFYHIRLKCYVVVELKATAFKPEHAGQLNFYLAAIDAQIKAPDDHPTIGLLLCKTQNRLVAEYALSGIDKPIGIAEYELVRALPEPLVTNLPTVEQLENELSDWQEARDELSGNSE

SEQ ID NO: 4801 - protein, 62 aa, Neisseria meningitidis
LQRSQSVSTGDFLYLSPETGDIGHTKLITNADYFYDFEEAINAGLEEIGNQYEFVVFGFLKD

SEQ ID NO: 4802 - protein, 289 aa, Neisseria meningitidis
MKPIRKAVFPVAGMGTRFLPATKASPKEMLPIVDKPLIQYAVEEAVEAGCTEMVFVTGRNKRSIEDHFDKAYELETELEMRHKDKLLEHVRNILPPNITCLYIRQAEALGLGHAVLCARAAIGDEPFAVILADDLIDAPKGALKQMVEVYERSGNSILGVETVEPSQTGSYGIVETEHLKQFQRITGIVEKPKPEDAPSNLAVVGRYILTPRIFDLLTGLPRGAGNEIQLTDGIAKLLDHEFVLAHPFEGTRYDCGSKLGYLEATVAYGLKHPETGEPFRRLLEKYRTE

SEQ ID NO: 4803 - protein, 107 aa, Neisseria meningitidis; identical to SEQ ID NO: 875

SEQ ID NO: 4804 - protein, 377 aa, Neisseria meningitidis
MFKKFKPVLLSFFALVFAFWLGTGIAYEINPRWFLSDTATEIPENPNAFVAKLARLFRNADRAVVIVKESMRTEESLAGAVDDGPLQSEKDYLALAIRLSRLKEKAKWFHVTEQEHGKEVWLDYHIGEGGLVAVSLSQRSPEAFVNAEYLYRNDRPFSVNVYGGTAHGENYETTGEYRVVWQPDGSVFDASGRGKIGEDVYEHCLGCYQMAQVYLAKYRDVANDEQKVWDFREESNRIASDSRDSVFYQNMRELMPRGMKANSLVVGYDADGLPQKVYWSFDNGKKRQSFEYYLKNGNLFIAQSSTVALKADGVTADMQTYHAQQTWYLDGGRIIREEKQGDRLPDFPLNLEDLEKEVSRYAEAAARRSGGRRDLSH

SEQ ID NO: 4805 - protein, 265 aa, Neisseria meningitidis
MAAVFSVCACFMCSCLVVKNTVIGSGRTKIAVPLVARDAAVLSAVLDQIKNLPFDIVEFRADFLECAGSIGEVLRHTQTVRDALPDKPLLFTFRRHGEGGAFPCSDGYYFELLDALIESRLPDIIDIELFSGETAVRCAVANAQKNGIAALLCNHEFHRTPPQEEIVCRLKQMEDCGADICKIAVMPQSAEDVLTLLSATLKAKELAAKPIVTMSMGQTGAVSRLAGQVFGSSITFGSGTQNSAPGQIGVSALRATLDCLENGAD

SEQ ID NO: 4806 - protein, 129 aa, Neisseria meningitidis
MWKIIKEDSDDLEFAIKCLFSQSIDLNEFKLWIEQVIRDMPIEDIPFYIFDLADFDGGIADIDNIVGFVSSYSLSKSKKNALTGIAFLRGIDVYDPPISKEKALKALKKHPEIYQKFQHFFPFVELPPL

SEQ ID NO: 4807 - protein, 457 aa, Neisseria meningitidis
MSNPFSSLGLGTELVSALTAQGYENPTPIQAAAIPKALAGHDLLAAAQTGTGKTAAFMLPSLERLKRYATASTSPAMHPVRMLVLTPTRELADQIDQNVQGYIKNLPLRHTVLFGGVNMDKQTADLRAGCEIVVATVGRLLDHVKQKNISLNKVEIVVLDEADRMLDMGFIDDIRKIMQMLPRQRQTLLFSATFSAPIRKLAQDFMNAPETVEVAAQNTTNANVEQHIIAVDTIQKRNLLERLIVDLHMNQVIVFCKTKQSVDRVTRELVRRNLSAQAIHGDRSQQSRLETLNAFKDGSLRVLVATDIAARGLDIAELPFVINYEMPAQPEDYVHRIGRTGRAGADGVAISLMDESEQKMFESIKELTGNKLLIERIEGFEPQWWEQGGAKPEKPEMREPRQRNRYESAKAQREKNTRPENAANDAGAACGKIAGRSRRSRREHRTCALLQPRYGVK

SEQ ID NO: 4808 - protein, 279 aa, Neisseria meningitidis
MTATAAAIDRLLPQTQCRECGYDGCLPYAQAVATGEAYNLCAPGGETVIRDISALLGKPFVAPAKTQAKALARIDETACIGCTACIRACPADAIMGAGKLMHTVIADECTGCGLCVAPCPVDCIHMQPVADTVLPRARRFSLSADSRFAAAEHARARYHKRTARKQREADERKAMLAEREAAVRNARPQTPDTPKKPAFNPADLIAKAMAKAQTQQDRLAAADNRKDYQAKQIAQARERAELRRAQRDMKYGSDSEKAAALEYLKQYKAKQEAAQNTAS

SEQ ID NO: 4809 - protein, 68 aa, Neisseria meningitidis; identical to SEQ ID NO: 3041

SEQ ID NO: 4810 - protein, 186 aa, Neisseria meningitidis; identical to SEQ ID NO: 1480

SEQ ID NO: 4811 - protein, 161 aa, Neisseria meningitidis; identical to SEQ ID NO: 3482

SEQ ID NO: 4812 - protein, 148 aa, Neisseria meningitidis; identical to SEQ ID NO: 2737

SEQ ID NO: 4813 - protein, 264 aa, Neisseria meningitidis
VLHRLQKVVRHIAQTEIMPRFLNTPSHRKEDGSMLSEADIAAQTAFAAALPLLIDSPMLGEEMSRQEQSALWEQYSGEKGLWIVDPIDGTNNFVNGLPHFAVSVAFVRNGRAELGVIYNPVSGECFYAERGQGAFLNGTRLPLRLVDKKLNEAIAGVEIKYLRSGKLSSRMSTLAPFGTIRSMGSSTLDWCYLACGRYDVYVHGGQKLWDYAAGALIFEEAGGRLTTLEGDGFWSGEHVFKRSVVAALEPKLFERWVGWIRENQ

SEQ ID NO: 4814 - protein, 130 aa, Neisseria meningitidis
MGKRMTFDTAKSRFQEKFPHLELLEFSGIYKPSSVRCPTHEVVQLLYYDTAIKSKYGCPECARLKMKKNTPPQNQKTVSILDTTTGETLTFPSVQAAAKALNTSYGSIRTKLDGRSSPDNLVCNRYKVLL

SEQ ID NO: 4815 - protein, 96 aa, Neisseria meningitidis
MALTLADVDKIARLSRLHLTAEEKEKSLQELNDIFAMVEQMQTINTDGIEPMAHPHEAALRLREDEVTETDRAAEYQAVAPEVRNRLYIVPQVIEE

SEQ ID NO: 4816 - protein, 118 aa, Neisseria meningitidis
MLSAYFPVFVFILVGLAAGVLFILLGTILGPKRHYAEKDAPYECGFEAFENARMKFDVRYYLVAILFILFDLEVAFMLPWAVVFKELGAYGFWSMLVFIVVLTVGFVYEWKKGALEWE

SEQ ID NO: 4817 - protein, 242 aa, Neisseria meningitidis
MWDNAEAMERLTRWLLVMMAMLLAASGLVWFYNSNHLPVKQVSLKGNLVYSDKKALGSLAKEYIHGNILRTDINGAQEAYRRYPWIASVMVRRRFPDTVEVVLTERKPVARWDDHALVDVEGNVFEARLDRPGMPVFRGAEGTSAEMLRRYDEFSTVLAKQGLGIKEMTYTARSAWIVVLDNGITVRLGRENEMKRLRLFTEAWQHLLRKNKNRLSYVDMRYKDGFSVRYASDGLPEKESEE

SEQ ID NO: 4818 - protein, 193 aa, Neisseria meningitidis
MRNEEKRALRRELRGRRSQMGRDVRAAATVKINHLLKRYIKKGRKIGVYWPMGKELRLDGFVRAAQKRGAELYLPYIEPRSRRMWFTPYPADGVKQERKRGRAKLHVPQFAGRKKRVHDLNLLLVPVVGMDRLGYRLGQAGGYYDATLAAMKYRLQAKTVGVGFACQLVGTLPREAHDLPLDGFVSEAGILCF

SEQ ID NO: 4819 - protein, 262 aa, Neisseria meningitidis
MLTLYSETFPSRLLLGTAAYPTPEILKQSVRTARPAMITVSLRRAGCGGEAHGQGFWSLLQETGVPVLPNTAGCQSVQEAVTTAQMAREVFETDWIKLELIGDDDTLQPDVFQLVEAAEILIKDGFKVLPYCTEDLIACRRLLDAGCQALMPWAAPIGTGLGAVHAYALNVLRERLPDTPLIIDAGLGLPSQAAQVMEWGFDGVLLNTAVSRSGDPVNMARAFALAVESGRLAFEAGPVEARDKAQASTPTVGQPFWHSAEY

SEQ ID NO: 4820 - protein, 248 aa, Neisseria meningitidis; identical to SEQ ID NO: 2452

SEQ ID NO: 4821 - protein, 573 aa, Neisseria meningitidis
MPSEAICSKKTMLNKDQFADNHFIRTFIEEDLKSGKHETIQTRFPPEPNGYLHIGHAKSICLNFGLAYIYDGLCNLRFDDTNPEKENDEYVNAIKEDVEWLGFHWAGEPRFASNYFDQLYDYAVGLIKDGKAYVDDLTPEEMREYRGTLTEAGKNSPYRDRSVEENLDLFTRMKNGEFPDGSKTLRLKIDMASGNINMRDPVIYRIRRAHHHNTGDKWCIYPMYDYTHCISDAIEGITHSLCTLEFEAHRPLYDWVLDNIPAPHATRPRQYEFSRLELLYTITSKRKLNQLVVEKHVSGWDDPRMPTISGMRRRGYTPEGLRLFAKRAGISKSENIVDMSVLEGAIREELENSAPRLMAVLNPLKVTLTNFEAGKTQSRRAAFHPNHEEMGDREVPVSQTIYIEADDFAENPPKGFKRLIPGGEVRLRHGYVIKCDEVVKDEAGNVVELKCSIDHDTLGKNPEGRKVKGVIHWVSAEHAAEIKVRLYDRLFTVERPDAVRGEDGEYLPFTDFLNPESVKEITAYAEPAAKDLPAESRWQFERIGYFVTDRKDHGKDTPVFNRTVTLKDSWQPK

SEQ ID NO: 4822 - protein, 355 aa, Neisseria meningitidis
MYSIEQFPPEIDFETVAILKKLASAHRYLAELKGICRSIPNQGILINTLSLQEAKDSSEIENIITTHDELFRAGISVIPSSPAIKEVQNYASALHCGFGLIQKHGILTNNHILTIQAELEKNRAGFRKQSGTMLKNDYTGETVYTPPQHTDDIIRLMGRLEAFVNDGSTAKPIDPLIRMALIHHQFESIHPFYDGNGRTGRIINVLYLVLTGLLDIPVLYLSRYLVRNKSEYYRLLQHVRDTGEWEGWLLYMLEAVEQTAKDGIDTVQHIHQEMLNYKHRIRKNFSFYSQDLINHLFNHPYTKIDFLMKTLKVSRPSAAKYLDELTEGGFLHKEKIGRSNYYINIALMNILLPTN

SEQ ID NO: 4823 - protein, 253 aa, Neisseria meningitidis; identical to SEQ ID NO: 974

SEQ ID NO: 4824 - protein, 489 aa, Neisseria meningitidis
MPSETDMFCVGNVSDENGRTKIMKKIQADVVVIGGGTAGMGAFRNARLHSDNVYLIENNVFGTTCARVGCMPSKLLIAAAEARHHALHTDPFGVHLDKDSIVVNGEEVMQRVKSERDRFVGFVVADVEEWPADKRIMGSAKFIDEHTVQIDEHTQITAKSFVIATGSRPVILPQWQSLGNRLIINDDVFSWDTLPKRVAVFGPGVIGLELGQALHRLGVKVEIFGLGGIIGGISDPVVSDEAKAVFGEELKLHLDAKTEVKLDADGNVEVHWEQDGEKGVFVAEYMLAAVGRRPNVDNIGLENINIEKDARGVPVADPLTMQTSIPHIFIAGDASNQLPLLHEAADQGKIAGDNAGRYPNIGGGLRRSTIGVVFTSPQIGFVGLKYAQVAAQYQADEFVIGEVSFKNQGRSRVMLVNKGHMRLYAEKATGRFIGAEIVGPAAEHLAHLLAWAHQMKMTVPQMLDMPFYHPVIEEGLRTALRDADAKLKA

SEQ ID NO: 4825 - protein, 147 aa, Neisseria meningitidis; identical to SEQ ID NO: 2466

SEQ ID NO: 4826 - protein, 761 aa, Neisseria meningitidis; identical to SEQ ID NO: 2796

SEQ ID NO: 4827 - protein, 468 aa, Neisseria meningitidis
MNDYAAMPSEDREIGALSLPPHSMEAEQSVLGGLMLENPAWDRIADVVSGEDFYRHEHRLIFRSIAKLINESRPADVITVQEDLQRNEELEAAGGFEYLITLAQNTPSAANIRRYAEIVRERSIMRQLAEVGTEIARSAYNPQGRDAGQLLDEAENKVFQIAESTAKSKQGFLEMPDLLKEVVQRIDMLYSRDNPDEVTGVPTGFIDLDKKTSGLQPGDLIIVAGRPSMGKTAFSINIAEHVAVEGKLPVAVFSMEMGGAQLVMRMLGSVGRLDQSVLKTGRLEDEHWGRLNEAVVKLSDAPVYIDETPGLTALELRARARRLARQFNNKLGLIVIDYLQLMAGSGRSDNRASELGEISRSLKALAKELQVPIIALSQLSRTVESRTDKRPMMSDLRESGAIEQDADLIMFMYRDEYYNQDSPMKGLAECIIGKHRNGPVGKIFLTWTGQFTKFDNAAYIPEEAKIED

SEQ ID NO: 4828 - protein, 558 aa, Neisseria meningitidis; identical to SEQ ID NO: 1615

SEQ ID NO: 4829 - protein, 357 aa, Neisseria meningitidis
MNITIVAPYCSLPSEPYFNRFWYLAERLSQSHDVLLITSRFRHYDKSFRRHEDAAATSNGRLHSPQAAEQDIVYSAYPLIATNLLLGKHKARLGYKLIVDVQDVWPESFSSVVPFLKKVPHKLLPFASRANQAYRYADALVAVSQTYLDRAKETNPNVPGEVIYIGADFPKLDAAPAKDFGDDKTRFFYLGTLSYSYDVETVCKGVRKLLDDGENVELHIMGGGPDLDRLKQYACEGIKFYGYIPYAEMMSVAKGCDISVNAIHSYSMASITNKLSDYMALQKPILNSQVNDEVAEVLTLLPHADYRSGDVDSFIQAAKDILARKNDPVQSDEIVRRFKRDVAYQKIVSLIERLAHE

SEQ ID NO: 4830 - protein, 461 aa, Neisseria meningitidis
MLSKEYIKQIKQHTPHIFPLLIEEYQNNVGSILFILKNLGNLPKNFRTDWIEKLLQNDNEQVRFWAVKTLGKVENSQLLDLLNYVVLSDSSTIVKREAVSSIGRMRDPKIQTLLLQYLQSYDPKIICQAIRGLLPFKGQPEIDNALRKLVNHENEMVRSVIYKEYFTQKVNKKTLLPHTETYPFLKNVVVNSDVRDVLQLVPEDSVHLTFTSPPYYNARDYSIYPSYEAYLVFLQEVFKEIHRITKEGRFLIVNTSPVIVPRISRAHSSKRYPIPFDLHHRLIQIGWEFIDDIVWMKPEYSVKNRIGGFQQHRKPLAYKPNSVTEYLMVYRKQTDRLLDWNMNQYDKQTIEESKVADGFETTNVWQIHPKSDKVHSAIFPADLCKRIVEYYSFKDDLVFDPFGGSGTLGRVAKKLGRHFFLTEKDEKYFEYMQTFQKKDSLFLERDTKFLTLTEFAGSIIK

SEQ ID NO: 4831 - protein, 388 aa, Neisseria meningitidis
MNLHEYQAKELLAGYGLPVQGGILAHNGEEAAAAYDKLGGKFAVVKAQVHAGGRGKAGGVKVVKSREEAKEVAESLIGTNLVTYQTDANGQPVNSVLVCEDMYPVQTELYLGAVVDRSTRRVTFMASTEGGVEIEKVAAETPEKIFKVTVDPLVGLQPCQAREVAFQLGLKDKQINEFVKLMTGAYKAFVENDFALFEVNPLAVRENGALACVDGKIGIDSNALYRLPKIAELRDKSQENERELKASEFDLNYVALEGNIGCMVNGAGLAMATMDIIKLKGGQPANFLDVGGGATKDRVVEAFKLILEDKSVQGVLINIFGGIVRCDMIAEAIVAAVKEINVDVPVVVRLEGNNAELGAKILNESGLKLTSADGLNDAAEKIVAAVNA

SEQ ID NO: 4832 - protein, 207 aa, Neisseria meningitidis
MERKERLRAGIAAMGLDISETAQDRLLAYVDLLKKWNKTYNLTALRDEEKMIVHHLLDSLTLLPHIEGVQTMLDVGSGGGQPGIPAAVCRPDVQITLLDANTKKTAFLQQAVIELGLDNVRVVSGRVEAVSDVRADVVTSRAFAELADFVSWTVHLLKDGGYWAAMKGVYPQEEIGRLPQDVCVEKVQRLDVPGLDAERHIVILSKR

SEQ ID NO: 4833 - protein, 228 aa, Neisseria meningitidis
MTVLQERYCEVSDRIGKLVLQAGRKPHSVSLIAVGKTFPSDGIREVYAAGQRDFGENYIQEWYGKTEELADLTDIVWHVIGDVQSNKTKFVAERAHWVHTVCRLKTAVRLSEQRPSSMPPLQVCIEVNIAGEAVKHGVAPEEAVALAVEVAKLPNIVVRGLMCVAKANSSETELKVQFQTMRKLLADLNAAGVKADVLSMGMSDDMPAAIECGATHVRIGSAIFGKRG

SEQ ID NO: 4834 - protein, 215 aa, Neisseria meningitidis
MVRSRPGGNRRRLGALERDKTLTSKGNIMQDKNNLCWLDMEMTGLNPETNRIIEVAMIITDSDLNVLAQSEVYAVHQSDELLDNMDEWNTATHGRTGLTQRVRESSHTEAEVEQKLLDFMSEWVPGRATPMCGNSIHQDRRFMVKYMPKLENYFHYRNLDVSTLKELAKRWNPSVAKSVVKRGSHKALDDILESIEEMRHYREHFLISAPRAEAQ

SEQ ID NO: 4835 - protein, 258 aa, Neisseria meningitidis
MAKKFDKDSFSGTLIVVLAVSLICSVIVAGAVVGLKPIQEKQKLQDKQGYILSVAGLMDKDTDIGKTFAERIEQRVVDLATGEYVKDAPKDFSARVAAKDPAQSIQIKPEDDLAGIKSRAKYTEVYLVKGEDGKIGQIILPMHGNGLWSVMYGFVAIQPDGNTINGITYYEQGETPGLGGEIGNPLWQQKFVGKKLFDGQGKLALHVGKGAGSDKEHGVDALSGASLTSKGVQGSFAYWFGENGYIPYLNKLKSAGAQ

SEQ ID NO: 4836 - protein, 558 aa, Neisseria meningitidis
MKRKNMTDNSPPPNGHAQARVRKNNTFLSAVWLVPLIALIAGGWLWVKEIRNRGPVVTLLMDSAEGIEVNNTVIKVLSIDVGRVTRIKLRDDQKGVEVTAQLNADVSGLIRSDTQFWVVKPRIDQSGVTGLGTLLSGSYIAFTPGKSDEAKDVFQVQDIPPVTAIGQSGLRLNLIGKNDRILNVNSPVLYENFMVGQVESAHFDPSDQSVHYTIFIQSPNDKLIHSASRFWLESGINIETTGSGIKLNSAPLPALLSGAISFDSPKTKNSKNVKSEDSFTLYDSRSEVANLPDDRSLYYTAFFKQSVRGLTVGSPVEYKGLNVGVVSDVPYFDRNDSLHLFENGWIPVRIRIEPSRLEINADEQSKEHWKQQFQTALNKGLTATISSNNLLTGSKMIELNDQPSASPKLRPHTVYAGDTVIATRGGGLDDLQAKVVDLLDKFGKLPLDKTVTELNGSLAELKSTLKSANAALSSIDKLVGKPQTQNIPNELNQTLKELRITLQGVSPQSPIYGDVQNTLQSLDKTLKDVQPVINTLKEKPNALIFNSSSKDPIPKGSR

SEQ ID NO: 4837 - protein, 73 aa, Neisseria meningitidis; identical to SEQ ID NO: 227

SEQ ID NO: 4838 - protein, 206 aa, Neisseria meningitidis
MMSHKKQDAFQGLIDALKVLPNVGPKSAQRIAYHLLQHKRKEAEKLVDALQTALKQVYHCAMCNTFCEGGLCDICADETRDGRRLMVVHMPADVSNMEAANCHDGLYFVLMGQINTALGMDVSAIALDRLAQRLGGGEVEEIIIATAFTAEGNATAYVLSEFFKNLPYKVSRLSQGIPLGGELEYVDAGTLAQAVYERRLIKEGGA

SEQ ID NO: 4839 - protein, 716 aa, Neisseria meningitidis
MLTDLEKNAIRDHYQNIGKNLPGFRPRASQREMIAAVANAFSRTLAREEGGEPPKREGESIAVIEGPTGVGKSLAYLLAGGIMAQTRGKRLIVSSATVALQEQLVDRDLPFLVEKSGLELTFALAKGRGRYLCPYKLYQLTQSNAQQNLLGFEAPAVLWDSKPKPEELKLLRDIADEFSARRFNGDRDTWPEKIDDAIWLKVTNDRHGCLKTACPNRPECPFYLARDVLETVDVVVANHDLLLADISMGGGVILPAPENSFYCIDEAHHLPKKALSRFAAEHSWNIAVWTLEKLPQLTGKIAALTDKAELANLADEAAASLLDSLHEWQFHLAEEPSLSMGPSENDRRTNSEPTWLWEDGKIPEGLETTVSNTAIAARSLLKHVVGLNDALSAARREKEQDGALLDRLTGDFGIFIARIEQISAVWDLLSTVPIEGEEPLAKWITRRADDKNDYIFNASPISSASHLANSLWRRAAGAVLTSATLQSLGNFNLMLRQTGLQWLPETTTLALKSPFDFEKQGELYIPPIYASPKDPEAHTAAIIEWLPKLISPTEAIGTLVLFSSRKQMQDVALRLPGDYLPLLLVQGELPKAVLLQKHHRAIEEGKASIIFGLDSFAEGLDLPGTACVQVIIAKLPFAMPDNPIEKTQNRWIEQRGGNPFIEITVPEAGIKLIQAVGRLIRTEQDYGRVTILDNRIKTQRYGQQLLAGLPPFKRIG

SEQ ID NO: 4840 - protein, 324 aa, Neisseria meningitidis
MLENLPYFQRHLPEDLAKVNEVINRAVQSDVALISQIGTYIISAGGKRLRPIMTILAGKAVGYDDEKLYALAAMVEFIHTSTLLHDDVVDESDLRRGRATANNLFGNAAAVLVGDFLYTRAFQLMVASGSMRVLEVMADATNIIAEGEVMQLMNIGNTDITEEQYIQVIQYKTAKLFEAAAQVGAILGKASPEHEQALKDYGMYVGTAFQIIDDVLDYSGETEETGKNVGDDLAEGKPTLPLIYLMRQGSEQVANDVRTALENADRSYFEKIHDYVVRSDALAYSIGEARKAVDCAVTALDALPDSEVKDAMIQLAKESLVRVS

SEQ ID NO: 4841 - protein, 325 aa, Neisseria meningitidis
MCVLLQLFSCVSRLIISFYGSKRFMDILDKLVDFAQLTGSVDVQCLLGGQWSVRHETLQREGLVHIVTSGSGYLCIDGETSPRPVSTGDIVFFPRGLGHVLSHDGKCGESLQPDMRQHGAFTVKQCGNGQDMSLFCARFRYDTHADLMNGLPETVFLNIAHPSLQYVVSMLQLESKKPLTGTVSMVNALSSVLLVLILRAYLEQDKDVELSGVLKGWQDKRLGHLIQKVIDKPEDEWNVDKMVAAANMSRAQLMRRFKSRVGLSPHAFVNHIRLQKGALLLKKNPDSVLSVALSVGFQSETHFGKAFKRQYHVSPGQYRKEGGQK

SEQ ID NO: 4842 - protein, 128 aa, Neisseria meningitidis; identical to SEQ ID NO: 1074

SEQ ID NO: 4843 - protein, 535 aa, Neisseria meningitidis
MSIVEIKVPDIGGHENVDIIAVEVKAGDTIAVDDTLITLETDKATMDVPADAAGVVKEVKVKVGDKISEGGVILTVETGAAAAEAASAAAEAQPAPAAAPVAAGGATVQVAVPDIGGHTDVDVIAVEIKVGDTVAEDDTLITLETDKATMDVPCTAAGVVKAVFLKVGDKVSEGSAIIEVETVGSAAAAPAQAAQAAAPAAAPPPTAAAAPAAAPAPSAPAAAKIDEAAFAKAHAGPSARKLARELGVDLGQVKGTGLKGRIVGDDIKAFVKSVMQGGAAKPAAAGASLGSGLDLLPWPKVDFSKFGNVEVKELSRIKKISGQNLSRNWVVIPHVTVHEEADMTELEEFRKQLNKEWEREGVKLSPLAFIIKASVSALKAFPEFNASLDGDNLVLKNYFNIGFAADTPNGLVVPVIKDVDQKGLKQISQELTELSKKAREGKLKPQEMQGACFTISSLGGIGGTGFTPIVNAPEVAILGVCKSQIKPVWNGKEFAPRLMCPLSLSFDHRVIDGAAGMRFTVFLAKLLKDFRRITL

SEQ ID NO: 4844 - protein, 292 aa, Neisseria meningitidis
MMSQHSAGARFRQAVKESNPLAVVGCVNAYFARLATQSGFKAIYLSGGGVAACSCGIPDLGITTMEDVLIDARRITDNVDTPLLVDIDVGWGGAFNIARTIRNFERAGVAAVHIEDQVAQKRCGHRPNKAIVSKDEMVDRIKAAVDARVDENFVIMARTDALAVEGLDAAIERAQACVEAGADMIFPEAMTDLNMYRQFADAVKVPVLANITEFGSTPLYTQSGLAENGVSLVLYPLSSFRAASKAALNVYEAIMRDGTQAAVVDSMQTRAELYEHLNYHAFEQKLDKLFQK

SEQ ID NO: 4845 - protein, 108 aa, Neisseria meningitidis
LLVCGFPFSDNEIDYTDDGEIKKVSHQVHIYAGKCKKDDIGFFVEKEDKNVSFDCNGVSGGIVMRMIDGHSEWVGIAVRANNDIIRFIPYYLVAKSIIQNILNRNQQA

SEQ ID NO: 4846 - protein, 394 aa, Neisseria meningitidis
MGKHILLGVTGSIAAYKSCELVRLLKKQGHSVTVVMSRSATEFVSPLTFQALSGNPVLTDTHGGNGSNGMEHINLTRNADVFLIAPASMNTVAKICNGVADNLLTSLAAARKCPLAIAPAMNVEMWLNPANQRNIAQLVSDGITVYMPGLGEQACGENGMGRMPEPAELLDLLPDLWTPKILRGKKILITAGATFEAIDPVRGITNTSSGKMGVALARACRAAGAEVSLIHGQLQTELPFGISDTVQAVSAEDMHRAVHRLIEKQDAFISVAAVSDYKVKNRSTQKFKKDKNAKPLSIELDENPDILASIASLPNPPFCIGFAAETENVMAYAREKRIKKKIPVIVANDVSIAMGKPTNRITIIGDDGELSFPETSKDEAAMQIVERLAVYLNK

SEQ ID NO: 4847 - protein, 146 aa, Neisseria meningitidis
MPKATFYTHVAQVPIFTCCLIARAIRDGGRILVWSDSFGQLQELDKMLWQYEAESFIPHEIWETEEAMPSEPSVLLACGGNLPRIPEGMTVLNLSDGFWNTAPVLPARVLEIVGNSLEDLADARERFTAYRRSGFAIEHHGMEGKA

SEQ ID NO: 4848 - protein, 190 aa, Neisseria meningitidis
MTYEIQASVREAQGTGASRRLRREGQIPGILYGEGQEPVAIAVDHKTVFYALEKESFHTALIKLSLNGETKDVIVRDFQMHPFRREVQHIDFQAVKADQLVRIRVPLHIVNAENSQAVKLQGGRVSLLNTTVEVLALPANIPAFLDLDCAEVVAGDILHLSDIKLPEGVESVSLKRNENLAVATVTGKKR

SEQ ID NO: 4849 - protein, 377 aa, Neisseria meningitidis
MSTPALLVLADGSVFHGTSIGYEGSTSGEVVFNTSMTGYQEILTDPSYCKQIVTLTYPHIGNTGTNAEDEESRSVYASGLIIRDLPLLHSNFRASESLHDYLVRNQTVAIADIDTRRLTTLLREKGAQGGAILTGADATIEKAQELIAAFGSMVGKDLAKEVSCTETYEWTEGEWALGKGFVTPDEQPYHVVAYDFGVKTNILRMLASRGCRLTVVPAQTSAQDVLALNPDGVFLSNGPGDPEPCTYAIEAVQKLMESGKPIFGICLGHQLISLAIGAKTLKMRFSHHGANHPVQDLDSGKVVITSQNHGFAVDADTLPANARITHKSLFDNTLQGIELTDKPVFCFQGHPEASPGPQDVGYLFDKFIGNMKAAKRA

SEQ ID NO: 4850 - protein, 216 aa, Neisseria meningitidis
MPVTRPAKINTYTRIIDASLALFNEEGERNISTNHIAAHLGISPGNLYYHFRNKDEIIVQLFKRYSEALLAYLNEAVLPSDVEDSINYMAGIYDVMWEYRFLFSDVNTLLARSAELLGEHNTFTQAKVSPLLVNLLTQLNGLNIIQADQTAMNDLAVNMWMVTKYWFDFDSSLRGRTKLTEDSKARGIRRTLSLLRPYLLPEHRKKYDRKIGNGNP

SEQ ID NO: 4851 - protein, 281 aa, Neisseria meningitidis
MLSYRHAFHAGNHADMLKHFTLFLVLQYFNRKDKPYWYIDTHGGAGVYNLEGSEAQKVGEYRQGIALLRQAKNLPTELNGFIAHIQKILPSPELYCGSPWLAQSLTRVGDKLRLFELHPTDFVHLQNNMGEAGLGKRGQVLREDGYKGLISLLPPPPRRAAVLIDPPYEEKQDYRRVTETLKSALKRFESGCYLIWYPCLSREESRKLPEELKKLVPDNYLHAELHVHAPKADGFGMHGSGMFVINPPYLLAEQLAANLPALTRLLAQDEGARYLLDSKIC

SEQ ID NO: 4852 - protein, 383 aa, Neisseria meningitidis
MQTWQLPEHIADVLPTNARQLESAREQLLALFRVHGYELVQPPLMEYAHSLLTHIDAGLSLKTILVTDRLSGRQLGIRADITPQVARIDAHLLSANQGINRLCYAGPVLHAQPDGLLNMREPLQAGAEMYGFADIRGDIELIDLMLKSMKIADMGKVLLSLGHIGIFRALSDAAHLDAGQSATLLALMQDKDTGAVEAQVKAWKLDGMWAKAFSLLPRLYGGREVLSDARGRLPDLSAVGGALGELQAVCDAFPDCEIHIDLSELRVDNYHTGLLYAAYAADFHDAVARGGRYDGLGGYFGRARPATGFSFDLRSFIGRLPTIERQPAVLVDAEDAEAAREAVEALREQGQCVVIDYGIGHNVSEELAGRLKKTDGVWQVVKR

SEQ ID NO: 4853 - protein, 44 aa, Neisseria meningitidis
MKRTYQPSVTKRKRIHGFLVRSKTRGGRAVLAARRAKGRKRLAV

SEQ ID NO: 4854 - protein, 192 aa, Neisseria meningitidis; identical to SEQ ID NO: 746

SEQ ID NO: 4855 - protein, 141 aa, Neisseria meningitidis
MTQETALGAALKSAVQTMSKKKQTEMIADHIYGKYDVFKRFKPLALGIDQDLIAALPQYDSALIARVLANHCRRPRYLKALARGGKRFDLNNRFKGEVTPEEQAIAQNHPFVQQALQQQSAQAVVETPSVEAEAAESSTAE

SEQ ID NO: 4856 - protein, 107 aa, Neisseria meningitidis
MKKLLIAAMMAAALAACSQEAKQEVKEAVQAVESDVKDTAASAAESAASAVEEAKDQVKDAAADAKASAEEAVTEAKEAVTEAAKDTLNKAADATQEAADKMKDAAK

SEQ ID NO: 4857 - protein, 245 aa, Neisseria meningitidis
MIILDKVSKHYQTRDKTRFAAVEPTSLEIRDGEIFGLMGYSGAGKSTLLRLINLLERPDSGKVNVCGQELTALDAAALRQARQNIGMVFQQFNLLNNRTVAGNVAFPLEIAGWPSEKIKARVAECLEIVGLTERAGHYPAQLSGGQKQRVGIARALAPKPQVILADEPTSALDPATTRSVLECLEDINKRFNVTIVIVTHEMSVIRRLCDRAALLDKGKVVEIVEVRGNQIHARSDIGRELIRED

SEQ ID NO: 4858 - protein, 672 aa, Neisseria meningitidis
MNKSLSGSVEEYRELTLRGMILGALITVIFTASNVYLGLKVGLTFASSIPAAVISMAVLKFFKGSNILENNMVQTQASAAGTLSTIIFVLPGLLMAGYWSGFPFWQTTLLCIAGGILGVIFTIPLRYAMVVKSDLPYPEGVAAAEILKVGGHEEGDNRQGGSGIKELAAGGALAGLMSFCAGGLRVIADSASYWFKSGTAIFQLPMGFSLALLGAGYLVGLTGGIAILLGISIAWGIAVPYFSSHIPQPSDMEMAAFAMKLWKEKVRFIGAGTIGIAAVWTLLMLLKPMVEGMKMSFKSFGGGAPATERAEQDLSPKAMIFWVLSMMFILGVSFYHFIGDSHITGGMAWLLVVVCTLLASVIGFLVAAACGYMAGLVGSSSSPISGVGIVSVVVISLVLLLVGESGGLLADEANRKFLLALTLFCGSAVICVASISNDNLQDLKTGYLLKATPWRQQVALIIGCIVGALVISPVLELLYEAYGFTGAMPREGMDAAQALAAPQATLMTTIASGIFAHNLEWVYIFTGIAIGAVLIAADLVLKKSSGGKLALPVLAVGMGIYLPPSVNMPIVAGAVLAAVLKHIIGKKAENREGRLKNAERIGTLFSAGLIVGESLIGVIMAFIIAFSVTNGGSDAPLALNLQNWDAAASWLGLAFFVTGMFFFAQRVLKAGR

SEQ ID NO: 4859 - protein, 185 aa, Neisseria meningitidis; identical to SEQ ID NO: 313

SEQ ID NO: 4860 - protein, 864 aa, Neisseria meningitidis
MSKSAVSPMMQQYLGIKAQHTDKLVFYRMGDFYEMFFDDAVEAAKLLDITLTTRGQMDGVPIKMAGVPFHAAEQYLARLVKLGKSVAICEQVGEVGAGKGPVERKVVRIVTPGTLTDSALLEDKETNRIVAVSPDKKYIGLAWASLQSGEFKTKLTTVDKLDDELARLQAAEILLPDSKNAPQLQTASGVTRLNAWQFAADAGEKLLTEYFGCQDLRGFGLDGKEHAVAIGAAGALLNYIRLTQNLMPQHLDGLSLETDSQYIGMDAATRRNLEITQTLSGKKSPTLMSTLDLCATHMGSRLLALWLHHPLRNHAHIRARQEAVAALESQYEPLQCRLKSIADIERIAARIAVGNARPRDLAALRDSLFALSEIELSAECSSLLGTLKAVFPENLSTAEQLRQAILPEPSVWLKDGNVINHGFHPELDELRCIQNHGDEFLLDLEAKERERTGLSTLKVEFNRVHGFYIELSKTQAEQAPADYQRRQTLKNAERFITPELKAFEDKVLTAQEQALALEKQLFDGVLKNLQTALPQLQKAAKAAAALDVLSTFSALAKERNFVRPEFADYPVIHIENGRHPVVEQQVRHFTANHTDLDHKHRLMLLTGPNMGGKSTYMRQVALIVLLAHTGCFVPADAATIGPIDQIFTRIGASDDLASNRSTFMVEMSETAYILHHATEQSLVLMDEVGRGTSTFDGLALAHAVAEHLLQKNKSFSLFATHYFELTYLPETHAAAVNMHLSALEQGQDIVFLHQIQPGPAGKSYGIAVAKLAGLPVRALKSAQKHLNELEDQAAANRPQLDIFSTMPSEKGDEPNVESFVDKAEEKHFEGILAAALEKLDPDSLTPREALSELYRLKDLCKSVS

SEQ ID NO: 4861 - protein, 117 aa, Neisseria meningitidis
MSEIKIFHNPRCSKSRAALSLLEERGIAAEVVKYLDTPPDLSELKDIFNKLGLASARGMMRVKDDLYKELGLDNPNLDNDALLRAIADHPALLERPIVLANGKAAVGRPLENIEAVL

SEQ ID NO: 4862 - protein, 156 aa, Neisseria meningitidis
MLPRQPTIKEILMNFALSVIMLTLASFLPVPPAGAAVFTWKDGGGNSYSDVPKQLHPDQSQILNLRTRQTKPAVKPAQADAGKRTDGAAQENNPDTAEKNRQLEEEKKRIAETERQNKEENCRISKMNLKAVGNSNAKNKDDLIRKYNNAVNKYCR

SEQ ID NO: 4863 - protein, 238 aa, Neisseria meningitidis; identical to SEQ ID NO: 770

SEQ ID NO: 4864 - protein, 351 aa, Neisseria meningitidis
MPSETRLPNFIRVLIFALGFIFLNACSEQTAQTVTLQGETMGTTYTVKYLSNNRDKLPSPAEIQKRIDDALKEVNRQMSTYQPDSEISRFNQHTAGKPLRISSDFAHVTAEAVRLNRLTHGALDVTVGPLVNLWGFGPDKSVTREPSPEQIKQAASYTGIDKIILKQGKDYASLSKTHPKAYLDLSSIAKGFGVDKVAGELEKYGIQNYLVEIGGELHGKGKNARGEPWRIGIEQPNIVQGGNTQIIVPLNNRSLATSGDYRIFHVDKNGKRLSHIINPNNKRPISHNLASISVVADSAMTADGLSTGLFVLGETEALKLAEREKLAVFLIVRDKGGYRTAMSSEFEKLLR

SEQ ID NO: 4865 - protein, 139 aa, Neisseria meningitidis
MAYTVYSFEKKFLEKFGVYGLSVLNFRGSMYPLDIHCPKHGNQTVSNATSCLRSKLGCPACGREHQQSKASERLKQSNKSAKPLLILDTTTNETLTFPSVTAAGAALGVHFQQINHRLKGRTSPDNLISNRYKVLGYDR

SEQ ID NO: 4866 - protein, 513 aa, Neisseria meningitidis
MDGRRWAVWGAFALLPSAFLAVMVVAPLWAVAAYDGLAWRAVLSDAYMLKRLAWTVFQAAATCVLVLPLGVPVAWVLARLAFPGRALVLRLLMLPFVMPTLVAGVGVLALFGADGLLWRGRQDTPYLLLYGNVFFNLPVLVRAAYQGFVQVPAARLQTARTLGAGAWRRFWDIEMPVLRPWLAGGVCLVFLYCFSGFGLALLLGGSRYATVEVEIYQLVMFELDMAVASVLVWLVLGVTAAAGLLYAWFGRCAVSDKAVSPVMPSPPQSVGEYVLLAFAAAVLSVCCLFPLLAIVVKAWSAGESWRVLMESETWQAVWNTLRFSAAAVYAAAVLGVVYAAAARRSAWMRGLMFLPFMVSPVCVSAGVLLLYPQWTASLPLLLAMYALLAYPFVAKDVLSAWDALPPDYGRAAAGLGANGFQTACRITFPLLKPALRRGLTLAAATCVGEFAATLFLSRPEWQTLTTLIYAYLGRAGADNYARAMVLTLLLSAFALGIFLLLDGGEGGKQTETL

SEQ ID NO: 4867 - protein, 208 aa, Neisseria meningitidis
MYTGERFNTYSHLSGLILAAAGLALMLLKTIGHGDGYRIFSVSVYGISLLLLYLSSSLYHGIAAGKLKSILKKTDHCMIYVLIAGSYTPFALVSLRNGPGWTVFSLSWLLAAAGIAQELTIGRKSEKRLLSIAIYIVMGWMVLAVMKSLTASLPPAGLAWLAAGGMLYSVGIYWFVNDEKIRHGHGIWHLFVLGGSITQFVSVYGYVI

SEQ ID NO: 4868 - protein, 950 aa, Neisseria meningitidis
MKLSELFNPNEFAARHLSFGDEAALLAAVDEKSMDDFVGNTVPQSIRMPSELDLPEALTEADALAKLKGIASKNVINKSYIGLGYYPTRVPNVILRNVLENPGWYTAYTPYQAEIAQGRLEALLNFQQVCIDLTGFPVAGASLLDEATAAAEAMAMAHRVGKVKSERFFVDARVYPQTLDVMKTRAKYFGFELVVGDFAQADEGEYFGALLQYVGKDGDVQDLQDVIGRLKAKGTIVAVAADIMSLVLLKSPAELGADIALGNTQRFGVPMGFGGPHAAYFAFKDEFKRSAPGRIIGVSKDASGKPALRMALSTREQHIRREKATSNICTAQALLANLAGMYAVYHGPEGVKRIANRIHALASAFADALVSDGLNVVHKVFFDTVTVDFGNKEKADQVFAAALESGYNLRRVNDTQVAAAFHETSACEDLVDLYRAFTGKDTFAFADDVKGRLNAELLRQDDILQHPVFNSYHTEHEMLRYLKKLEDRDLAMNRSMISLGSCTMKLNATAEMLPITWAEFSDIHPYAPEAQTAGYRELLADMENSLKAITGFDAISFQPNSGAQGEYSGMLSIRRYQESQGEAHRNICLIPKSAHGTNPATAAMLGLKVVVVDTDEHGNVNIDDLKAKAEQHRDALSAIMITYPSTHGVYEEGIRDICRIIHENGGQVYMDGANLNAQIGIMQPAEVGADVLHMNLHKTFCIPHGGGGPGMGPIGLKAHLAPFAPGHALTDTHSASADQTAVAAAAFGSASILPITWMYLTMMGKQGMEQATRWALLNANYVAKRLSEDYPILYTGKNGRVAHECIVDLRPLKAESGITETDIAKRLMDYGFHAPTVSFPVAGTLMIEPTESESKAELDRFIAALKSIRREVQKVIDGEWPKDDNPLVNAPHTAADITGDWARPYSREEAVFPLPFVREHKFWPFVNRVDDVYGDRNLVCSCPPMENYED

SEQ ID NO: 4869 - protein, 404 aa, Neisseria meningitidis
MTVKTPVYLDYAATTPVDKRVAEKMIPYLTETFGNPASNSHAFGWEAEEAVEKARADIAALINADPKEIVFTSGATESDNLAIKGAANFYKTKGKHLITVKTEHKAVLDTMRELERQGFEVTYLGVQENGLIDLEELKAAIRDDTILISVMWANNEIGVVQDIPAIGEICRERKIVFHVDAAQACGKVPVDVEAAKIDLLSMSAHKVYGPKGIGALYVRRKPRVRLEAQMHGGGHERGFRSGTLPTHQIVGMGEAFRIAKEELEQDMAHYRKLRDIFLKGIEGIEEVYVNGDLEHRAPNNLNVSFNFVEGESLIMAVKELAVSSGSACTSASLEPSYVLRALGRNDELAHSSLRITFGRMTTEEEVQFAAELIKSKIGKLRELSPLWEMFKDGIDLNSIEWAAH

SEQ ID NO: 4870 - protein, 113 aa, Neisseria meningitidis; identical to SEQ ID NO: 995

SEQ ID NO: 4871 - protein, 104 aa, Neisseria meningitidis
MNKPFITQAQLALYKYPSSKYFGQSMAVIAQSEFVEFAKINKSENVIDCFSFFWNRRIKHDIWLISFSDNSEMVIKESLKDGHKIYKFEFCEIVDNCNFDDVFV

SEQ ID NO: 4872 - protein, 419 aa, Neisseria meningitidis
MCSNTPQAATKNRETRHMTGIIHSLLDTDLYKFTMLQVVLHQFPQTHSLYEFRCRNASTVYPLADIKEDLEVELDALCQLRFTHDELGYLRSLRFIKSDFVDYLELFQLQRRFVEVGTDDKGRLNIRIEGPMIQAMFFEIFILAIVNELYFRRLETPAVIEEGERRLQAKAARLKEIAAAQNPDEPPFLISDFGTRRRYKLAWQEHVIRTLLEAAPSIVRGTSNVFLAKKLGITPIGTMAHEFLQAFQALDVRLRNFQKAALESWVHEYRGDLGVALTDVVGMDAFLRDFDLYFAKLFDGLRHDSGDPYVWGDKAYAHYQKLKIDSRTKMLTFSDGLDIERSWALHQYFKDRFKTGFGIGTNLTNDMGHTPLNIVLKLVECNGQSVAKLSDSPGKTMTNNSTFLAYLRQVFDVPEPETP

SEQ ID NO: 4873 - protein, 206 aa, Neisseria meningitidis; identical to SEQ ID NO: 1725

SEQ ID NO: 4874 - protein, 421 aa, Neisseria meningitidis
MSKNQPAQPTRRTLFKTAIAAGAVGAIGGYLGGKKQGETAERTAESQHSPQAYPCYGEHQAGIVTPQQAFSIMCAFDVTAQSAKQLENLFRTLTARIEFLTQGGEYQDGDDKLPPAGSGILGKAFNPDGLTVTVGVGSSLFDGRFGLKDKKPIHLQEMRDFSNDKLQKSWCDGDLSLQICAFTPETCQAALRDIIKHTVQTAVIRWSIDGWQPKSEPGAMAARNLLGFRDGTGNPKVSDPKTADEVLWTGVAANSLDEPEWAKNGSYQAVRLIRHFVEFWDRTPLQEQTDIFGRRKYSGAPMDGKKEADQPDFAKDPEGDITPKDSHIRLANPRDPEFLKKHRLFRRAYSYSRGLASSGQLDVGLVFVCYQANLADGFIFVQNLLNGEPLEEYISPFGGGYFFVLPGVEKGGFLGQGLLGV

SEQ ID NO: 4875 - protein, 320 aa, Neisseria meningitidis
MQARLLIPILFSVFILSACGTLTGIPSHGGGKRFAVEQELVAASARSAVKDMDLQALHGRKVALYIATMGDQGSGSLTGGRYSIDALIRGEYINSPAVRTDYTYPRYETTAETTSGGLTGLTTSLSTLNAPARSRTQSDGSGSKSSLGLNIGGMGDYRNETLTTNPRDTAFLSHLVQTVFFLRGIDVVSPANADTDVFINIDVFGTIRNRTEMHLYNAETLKAQTKLEYFAVDRTNKKLLIKPKTNAFEAAYKENYALWMGPYKVSKGIKPTEGLMVDFSDIRPYGNHTGNSAPSVEADNSHEGYGYSDEVVRQHRQGQP

SEQ ID NO: 4876 - protein, 317 aa, Neisseria meningitidis
MTHTVHLHLEETDNLALQRLCGSFDNNLDLLAKALDIHISRRFEHFTFNGAFAHAGKRALLKLLETAQTRDLNDGDIRLAAVEAQTEDAGHQEKNHDHAYYFRTKRGSIGGRTPRQNGYIRALLNHDIVFGLGPAGTGKTYLAVAAAVDAMEKHQVERIILVRPAVEAGEKLGFLPGDLTQKVDPYLRPLYDALYDLMGFDRVTKLIEKGLIEIAPLAYMRGRTLNGAYIILDEAQNTTPEQMKMFLTRIGFGAKAVITGDTSQIDLPKNIKSGLKDAREKLHNVEGLYFHTFTGEDVVRHPLVQKIVEAYESAEHD

SEQ ID NO: 4877 - protein, 820 aa, Neisseria meningitidis
MTQKEKHFEEYAALATLPLRDVVVYPHMVLPLFVGRPKSIAALENAITREEPVFLLAQTDAAVEEPVAADLYQTGTVAQVLQVLKLPDGTVKVLVEGLYRGRVLTIEDTGGLFVSHIETVVEEDTGGNTDLEAVRRTLLAQFEQYAKLNKKIPAEIIGSINGIAENSRLTDTVAAHLQLKLAQRQQILEIPEIGKRMEFLLAQLESELDIMQAEKRIRGRVKRQMEKSQREYYLNEQIKAIHKELGEEDENGELDALEAGIKKAGMSKEAEEKCLSELKKLKMMPPMSAESTVVRNYIDTLLELPWKKKSRVSKDIAKAGLVLDADHYGLEKVKERILEYLAVQKRMDKLKGPILCLVGPPGVGKTSLGESIAKATGRKYVRMALGGVRDESEIRGHRRTYIGSMPGKILQNMAKAGVKNPLFLLDEIDKLGSDFRGDPASALLEVLDPEQNNKFADHYAEVDYDLSDVMFIATSNSLNIPTPLLDRMEIIRLSGYTEDEKINIAMQYLVPKQMKRNGVKEGELAIEESAVRDIIRYYTREAGVRSLDREIAKICRKVVMQITLDEDKKRLSETKKTSKAKPKAVKVNEKNLHDYLGVRRFDYGVAESENRIGQVTGLAWTEVGGELLTVEAAALPGKGVIQCTGQLGDVMKESVSAAWSVVRSRAESVGLAPDFYEKKDIHVHVPEGATPKDGPSAGIAMTLAMVSAFTKIPVRADVAMTGEITLRGEVLPIGGLKEKLLAALRGGIKHVLIPKDNLKDLEEIPENVKTGLTIHPVKWIDEVLALGLESQPEPWAEPSGAEAAAESASKPKPRSRATKH

SEQ ID NO: 4878 - protein, 405 aa, Neisseria meningitidis
MALIVHKYGGTSVGSPERIKNVAKRVAKARAEGHDIVVVVSAMSGETNRLVALAHEMQEHPDPRELDVVLSTGEQVTIGLLAMALKDIGVDAKSYTGWQVALKTDTAHTKARIESIDDEKMRADLDAGKVVIVAGFQGISSEGNISTLGRGGSDTSAVALAAALKADECQIYTDVDGVYTTDPRVVPEARRMDTVTFEEMIELASLGSKVLQIRSVEFAGKYKVRLRVLSSLQDGGNGTLITFEEDDNMERAAVTGIAFDKNQARINVRGVPDKPGVAYQILGAVADANIEVDMIIQNVGSEGTTDFSFTVPRGDYKQTLEILSERQDSIGAASIDGDDTVCKVSAVGLGMRSHVGVAAKIFRTLAEEGINIQMISTSEIKVSVLIDEKYMELATRVLHKAFNLG

SEQ ID NO: 4879 - protein, 465 aa, Neisseria meningitidis
MPRSWSWAVRWAATSSRRLFITQMRNLSVSTCPAGRLRRATPSLKKMGLKNVRLEEKDILTIDESFGKFDYIIVHGIWSWVPDAVKDKIFSICRNNLTKHGIAYISYNVYPGWKRQEQLREIMYFAGRDVLEEPLEARTRKGLDALKALAEILENDKGLGGGGKLPAIQKILNHNTYYVAHEYMEIFNDPIYVNGFIEWANRHRLAYIGDTDLYVSFVSWMAEHTRERILALAGGDYIAKEFYSDILSDRQFRRSLLCREEVGDNIRRDESVAVEVIESLNFRPARGETINFDENDTLLSGIRDVMKTGEPFKTEDVAENLARRFPGLEFDRMKINSQLLLQTILGRFSVSSDNAGKPFFEDHKTYVPARFTNYAAAFVEHGAEAFVRPANRYNESTPSFGYGHLYIMRQLSRPTSKQAVIDAVAENLNIVSTTPDGLTFHPPAEVYVEEILADLADRHFLVSAD

SEQ ID NO: 4880 - protein, 455 aa, Neisseria meningitidis
MPDLHTEFSRLLPADEIAELSPTLLKDQRNRFTSAPDIILQPRSVESVQTIMRFCYEHRIPVTPQGGNTGLCGAAVSENGVLLNLSKLNRIRSINLSDNCITVEAGSVLQTVQQAAAASNRLFPLSLASEGSCQIGGNIACNAGGLNVLRYGTMRDLIIGLEVVLPNGERVSHLHPLHKNTTGYDLRHLFIGSEGTLGIITAATLKLFARPSDKATAWVGIPDIESAVRLLTETQAHFAERLCSFELIGRFAAELSSEFSKFPLPTHSEWHILLELTDSLPDSNLDDRLVEFLYKKGFTDSVLAQSEQERIHMWALRENISASQRKLGTSIKHDIAVPIGRVADFVRRCAKDLEQNFKGIQIVCFGHLGDGSLHYNTFLPEILSNEVYRYENDINDAVYRNVLACNGTIAAEHGIGIIKKQWLDKVRTPAEIALMKSIKQHLDPYNIMNPGKLLP

SEQ ID NO: 4881 - protein, 371 aa, Neisseria meningitidis; identical to SEQ ID NO: 3554

SEQ ID NO: 4882 - protein, 206 aa, Neisseria meningitidis; identical to SEQ ID NO: 1164

SEQ ID NO: 4883 - protein, 117 aa, Neisseria meningitidis; identical to SEQ ID NO: 408

SEQ ID NO: 4884 - protein, 316 aa, Neisseria meningitidis
MKLQQLKYALEVYQHNLNVSEAAEALFTSQPGISKQIKLLEEEIGIQIFIRSGKRVVSVSQPGKVVLDIAERILRDVQNIKNIGSEFTGQDSGSLTVATTHTQARYALPLIVADFVKRYPKVNLTIKQGSPAAIARMVTSGEADLAIVTERIDDHPELGKLPCYDWTHAVIVPNDHPLLECRNPLRIEDLARFPLITYEFAFNTGSSIARAFSKARLEQPDVALAAADTDVLKTYVRLGLGVGLMAKMAYNPDTDGDLQLVDAAHLFEPSPTWIALRSDTYLRGYAYDFIQAFAPHLTREKVDRILYTPISEDFSI

SEQ ID NO: 4885 - protein, 598 aa, Neisseria meningitidis
MNTVSNYLSALREAMKAQGLDALVIPSADPHLSEYLPEHWQARRELSGFTGSVGTFVVTADEAGVWVDSRYWEQAAKQLAGSGIELQKSGQVPPYNEWLAANLPENAAVGIPSDMVSLTGKRTLAQSLTAKNIRIEHPNDLLDQVWTSRPAIPAETVFIHDPAYVSETAAEKLARVRAVMAEKGADYHLVSSLDDIAWLTNLRGSDVPFNPVFVSFLLIGKDNAVLFTDRCRLNAEAAAALQTAGITVEPYAQVADKLAQIGGALLIEPNKTAVSTLVRLPESVRLIEGINPSTLFKSCKSEADIARIREAMEHDGAALCGFFAEFEDIIGNGGSLTEIDVDTMLYRHRSVRPGFISLSFDTIAGFNANGALPHYSATPESHSTISGNGLLLIDSGAQYKGGTTDITRVVPVGTPSAEQKSDNTLVLKAHIALAEAVFPENIPSPLIDAICRKPLWQAQCDYGHGTGHGVGYFLNVHEGPQRIAFAAPATPETAMKKGMVTSIEPGLYRPGKWGIRIENLAANQAVAAPQETEFGSFLCFETLTLCPIDTRLMDTALMTDGEIDWVNRYHAEVRRRLEPLTEGAAKAWLIKRTEPLAR

SEQ ID NO: 4886 - protein, 375 aa, Neisseria meningitidis
MKHLLIDFENVQPQNLDKLPTENTHIWLFIGVLHKMLPISLVQSLLRFGERVHLVQLQKTGKNALDFYLSYYLGQITATDPNAQVGILSRDGGYDVLVEHILKNHQAKGIVRLANIDEVQHQKIATEPPSALRENTPQPETTLKPQQPLTSYFQAALTALRRPDAFRPCRLHNLRQNLRKHILSDLFKEKTDEECEITTANVINKLKAQNFISIDEQETVSYHLSDNDLLQRIQRHILSQRPKTYADFQAVVQNRADALHLTVGTNDIQSFARHLRDQNLIRQNNGKIEYAPFTEPKPQPTPKQPKKTAWEPDEIIWKKVIAALSLKNRPNKTKTLRNTIQALTKSNAQETDKLLQHLQDTQVLRIDGTKIVYIK

SEQ ID NO: 4887 - protein, 216 aa, Neisseria meningitidis
MPSEPPSDGIARHPKSTIKMAKKPNKPFRLTPKLLIRVVLLICITAIGALAIGIVSTFNPNGGKTLQTEPQHTDSPRETEFWLPNGVVGQDAAQPEHHHAASSEPAQPDGTDESGSGLPSPAAPKKNRVKPQPADTAQTDRQPDDAGTQAENTLKETPVLPTNVPRPEPRKETPEKQAQPKETPKEKETPKENHTKPDTPKNTPPKPHKEILDNLF

SEQ ID NO: 4888 - protein, 122 aa, Neisseria meningitidis; identical to SEQ ID NO: 2377

SEQ ID NO: 4889 - protein, 458 aa, Neisseria meningitidis
MKHIHIIGIGGTFMGGLAAIAKEAGFEVSGCDAKMYPPMSTQLEALGIGVHEGFDAAQLDEFQADIYVIGNVAKRGMDVVEAILNRGLPYISGPQWLAENVLHRHWVLGVAGTHGKTTTASMLAWVLEYAGLAPGFLIGGVPENFSVSARLPQTPRQDPNSQSPFFVIEADEYDTAFFDKRSKFVHYRPRTVVLNNLEFDHADIFADLGAIQTQFHHLVRTVPSEGLIVCNGRQQSLQDTLDKGCWTPVEKFGTEHGWQAGEANADGSFDVLLDGKTAGRVKWDLIGRHNRMNALAVIAAARHVGVDIQTACEALGAFKNVKRRMEIKGTVNGITVYDDFAHHPTAIETTIQGLRQRVGGARILAVLEPRSNTMKLGTMKSALPVSLKDADQVFCYAGGVDWNVAEALAPLGGRLHVGKDFDAFVAEIVKNAEAGDHILVMSNGGFGGIHTKLLDALR

SEQ ID NO: 4890 - protein, 331 aa, Neisseria meningitidis
MLKKMLKWSAVFLTVSAAVFAALLFVPKDNGRAYRIKIAKNQGISSVGRKLAEDRIVFSRHVLTAAAYVLGVHNRLHTGTYRLPSEVSAWDILQKMRGGRPDSVTVQIIEGSRFSHMRKVIDATPDIEHDTKGWSNEKLMAEVAPDAFSGNPEGQFFPDSYEIDAGGSDLQIYQTAYKAMQRRLNEAWESRQDGLPYKNPYEMLIMASLIEKETGHEADRDHVASVFVNRLKIGMRLQTDPSVIYGMGAAYKGKIRKADLRRDTPYNTYTRGGLPPTPIALPGKAALDAAAHPSGEKYLYFVSKMDGTGLSQFSHDLTEHNAAVRKYILKK

SEQ ID NO: 4891 - protein, 603 aa, Neisseria meningitidis
MKQIRNIAIIAHVDHGKTTLVDQLLRQSGTFRANQQVDERVMDSNDLEKERGITILAKNTAIDYEGYHINIVDTPGHADFGGEVERVLGMVDCVVLLVDAQEGPMPQTRFVTKKALALGLKPIVVINKIDKPSARPSWVIDQTFELFDNLGATDEQLDFPIVYASGLSGFAKLEETDESNDMRPLFDTILKYTPAPSGSADETLQLQISQLDYDNYTGRLGIGRILNGRIKPGQTVAVMNHDQQIAQGRINQLLGFKGLERVPLEEAEAGDIVIISGIEDIGIGVTITDKDNPKGLPMLSVDEPTLTMDFMVNTSPLAGTEGKFVTSRQIRDRLQKELLTNVALRVEDTADADVFRVSGRGELHLTILLENMRREGYELAVGKPRVVYRDIDGQKCEPYENLTVDVPDDNQGAVMEELGRRRGELTNMESDGNGRTRLEYHIPARGLIGFQGEFMTLTRGVGLMSHVFDDYAPVKPDMPGRHNGVLVSQEQGEAVAYALWNLEDRGRMFVSPNDKIYEGMIIGIHSRDNDLVVNPLKGKKLTNVRASGTDEAVRLTTPIKLTLEGAVEFIDDDELVEITPQSIRLRKRYLSELERRRHFKKLD

SEQ ID NO: 4892 - protein, 499 aa, Neisseria meningitidis
VFKKYQYLALAALCAASLAGCDKAGSFFGADKKEASFVERIEHTKDDGSVSMLLPDFVQLVQSEGPAVVNIQAAPAPRTQNGSSNAETDSDPLADSDPFYEFFKRLVPNMPEIPQEEADDGGLNFGSGFIISKDGYILTNTHVVTGMGSIKVLLNDKREYTAKLIGSDVQSDVALLKIDATEELPVVKIGNPKDLKPGEWVAAIGAPFGFDNSVTAGIVSAKGRSLPNESYTPFIQTDVAINPGNSGGPLFNLKGQVVGINSQIYSRSGGFMGISFAIPIDVAMNVAEQLKNTGKVQRGQLGVIIQEVSYGLAQSFGLDKAGGALIAKILPGSPAERAGLRAGDIVLSLDGGEIRSSGDLPVMVGAITPGKEVSLGVWRKDEEITIKVKLGNAAEHIGASSKTDEAPYTEQQSGTFSVESAGITLQTHTDSSGGHLVVVRVSDAAERAGLRRGDEILAVGQVPVNDEAGFRKAMDKAGKNVPLLIMRRGNTLFIALNLQ

SEQ ID NO: 4893 - protein, 159 aa, Neisseria meningitidis
MKHILPLIAASALCISTASAHPASEPSTQNETAMTTHTLTSKYSFDETVSRLETAIKSKGMDIFAVIDHQEAARRNGLTMQPAKVIVFGTPKAGTPLMVKDPAFALQLPLRVLVTETDGKVRAAYTDTRALIAGSRIGFDEVANTLANAEKLIQKTVGE

SEQ ID NO: 4894 - protein, 72 aa, Neisseria meningitidis; identical to SEQ ID NO: 113

SEQ ID NO: 4895 - protein, 126 aa, Neisseria meningitidis
MALLSCQLSHAATAYIPPNDFQPNCDIRRLGLTQSQHNELRKIRTAFKMAGDRARLKVMHSEHSRRRSVVEIISSDVFNRNEARDYVESRYLSGMDFAVDELEIQHRFFHILTPQQQQMWLSSCLK

SEQ ID NO: 4896 - protein, 753 aa, Neisseria meningitidis
MLQIEIDGKQVSVEQGATVIEAAHKLGTYIPHFCYHKKLSIAANCRMCLVNVEKAPKPLPACATPVTDGMIVRTHSAKAREAQEGVMEFLLINHPLDCPTCDQGGECQLQDLAMGYGKTTSRYTEEKRSVVGKDMGSLVSAEEMSRCIHCTRCVRFTEEIAGVQEIAMANRGEHSEIMPFIGKAVETELSGNVIDLCPVGALTSKPFRFNARTWELNRRKSVSAHDALGSNLIIQTKDHTVRRVLPLENEAINECWLSDRDRFAYEGLYHESRLKKPKIKQGGEWMDVDWKTALEYVHSAIKCIAKDGNQNQVGVWANPMNTVEELYLAKKFANGLGVKNFATRLRQQDKRLSDGIKGAQWLGQSIESLADNDAVLVVGANLRKEQPLLTARLRRAAKDRMALSVLAGSKEELFMPLLSQEAAHPDEWAGRLKNLSANAEHAVTASLKNAEKAAVILGAEVQNHPDYAAIYAAAQELADATGAVLGILPQAANSVGADVLKVNSGESIAEMVTAPKQAVLLLNVEPEIDTVDGAKAVAALKQAKSVMAFTPFVSETLLDVCDVLLPIAPFTETSGSFINMEGRLQSFHGVVQGFGDSRPMWKVLRVLGNLFDLKGFEYHDTAAILKDALDAESLPSKLDNRSTWAGEGVQTASDRLVRVGGVGIYHTDSIVRRSAPLQETSHAAVPAARVNPNTLARLGLQDGQTAVAKQNGASVSVAVKADAGLPENVVHLPLHTENAALGALMDTIELAGA

SEQ ID NO: 4897 - protein, 768 aa, Neisseria meningitidis
MAKNLLIVESPSKAKTLKKYLGGDFEILASYGHVRDLVPKSGAVDPDNGFAMKYQLISRNGKHVDAIVAGAKEAENIYLATDPDREGEAISWHLLEILKSKRGLKNIKPQRVVFHEITKNAVLDAVAHPREIEMDLVDAQQARRALDYLVGFNLSPLLWKKIRRGLSAGRVQSPALRLICERENEIRAFEAQEYWTVHLDSHKGRSKFTAKLAQYNGAKLEQFDLPNEAAQADVLKELEGKEAVVTAIEKKKRSRNPAAPFTTSTMQQDAVRKLGFTTDRTMRTAQQLYEGIDVGQGAIGLITYMRTDSVNLADEALTEIRHYIENKIGKEYLPSAAKQYKTKSKNAQEAHEAIRPTSVYRTPESVKPFLSADQFKLYQMIWQRTVACQMTPAKFDQTTVDITVGKGVFRVTGQVQTFAGFLSVYEESSDDEEGEDSKKLPEMSEGDKLPVDKLYGEQHFTTPPPRYNEATLVKALEEYGIGRPSTYASIISTLKDREYVTLEQKRFMPTDTGDIVNKFLTEHFAQYVDYHFTAKLEDQLDEIADGKRQWIPLMDKFWKPFIKQVEEKEGIERAKFTTQELDETCPKCGEHKLQIKFGKMGRFVACAGYPECSYTRNVNETAEEAAERIAKAEAEQAELDGRECPKCGGRLVYKYSRTGSKFIGCANYPKCKHVEPLEKPKDTGVQCPQCKKGNLVERKSRYGKLFYSCSTYPDCNYATWNPPVAEECPNCHWPVLTIKTTKRWGVEKVCPQKECGWKEQIEPPAPKE

SEQ ID NO: 4898 - protein, 147 aa, Neisseria meningitidis
MKWLLNMIMRPIKFSMVNTLLFIVICSSFFDLLVQLCTILFHSQKIYFITLFLLFIFNFVTKSIYMAIIYPILYFFTIKKYYPYSRKVIILLSLALSIYFSFMDFYFFSIYSDNLSYETEPLHLYIPIIINFFSLLVSNFILSFINK

SEQ ID NO: 4899 - protein, 97 aa, Neisseria meningitidis; identical to SEQ ID NO: 2609

SEQ ID NO: 4900 - protein, 98 aa, Neisseria meningitidis
MKKSLFAAALLSLVLAACGGEKAAEAPAAEAPAAEAPATEAPAAEAPAAEAAATEAPAAEAAATEAPAAEAPATEAPAAEAAATEAPAAEAPAAEAAK

SEQ ID NO: 4901 - protein, 404 aa, Neisseria meningitidis
MRKCRLKTDGPNTMLNTFLSPWPCFTQEEADAVSKVLLSNKVNYWTGSECREFEKEFAAFSGTRYAVALSNGTLALDVALKAIGIGVGDDVIVTSRTFLASASCIVNAGANPVFADVDLNSQNISAETVKAALTPTTKAVIVVHLAGMPAEMDGIMALAKEHNLWVIEDCAQAHGAKYKGKSVGSIGHVGAWSFCQDKIMTTGGEGGMVTTNDKTLWEKMWSYKDHGKSYDAVYHREHAPGFRWLHESFGTNWRMMEMQAAIGRIQLKRLPEWTACRQAHAAKLAESLGKFKSIRLVEVADYIGHAQYKFYAFVKPEHLKDGWTRDRIVGELNARKVPCYQGSCSEVYLEKAFDNTPWRPKERLTNAVELGDTSLMFLVHPTLTDDEIAFCKKHIEAVLTEAAR

SEQ ID NO: 4902 - protein, 460 aa, Neisseria meningitidis
MASIARDIFKAYDIRGIVGKTLTDEAAYLIGKAIAAKAAEKGMTRIALGRDGRLSGPELMEHIQRGFTDSGIDVLNVGMVATPMLYFAAINECGGSGVMITGSHNPPDYNGFKMMLGGDTLAGEAIQELLSIIEKDGFAAAGKQGSVTEKDISGEYHNHIVGHVKLKRPMNIAIDAGNGVGGAFAGKLYRALRCGVTELFCDVDGNFPNHHPDPSKPKNLQDLIAALKNGDAEIGLAFDGDADRLGVVTKDGNIIYPDRQLMLFAQDVLSRNPGAKVIFDVKSTRLLAPWIKEHGGEAIMEKTGHSFIKSTMKKTGALVAGEMSGHIFFKERWFGFDDGLYAGARLLEILSASDNPSEVLNNLPQSISTPELNIALPEGSNGHQVIDELAAKAEFEGATEIITIDGLRVEFPDGFGLMRASNTTPILVLRFEADTQEAIERIQNQFKAVIESNPNLIWPL

SEQ ID NO: 4903 - protein, 374 aa, Neisseria meningitidis
MTATTASSTKPYLQIQGLVKKFGDNYAVDNIDLDIYQHEIFALLGSSGSGKSTLLRMLAGMESPNQGKIILDGQDITKLAPYDRPINMMFQSYALFPHMSVEQNIAFGLKQDKMPKGEIAARVEEMLRLVQMTKFAKRKPHQLSGGQQQRIALARSLAKRPKILLLDEPLGALDKKLRQQTQLELVNTLEQVGVTCIMVTHDQEEAMTMATRIAIMSDGQLQQVGTPSDVYDYPNSRFTAEFIGETNIFDGVVIEDHADYAVIECEGLENHVRIDHGLGGPSEQDLWVSIRPEDIDLYKEKPEYLGDYNWAKGTVKEIAYLGSFAIYHIKLGNGRVVKSQVPAPYWYVRNITPPTWDETVYISWPENQPTPLFR

SEQ ID NO: 4904 - protein, 1204 aa, Neisseria meningitidis
MSAPIQAFDPLTVPIAGTNLIEASAGTGKTYGIAALFTRLIVLEQKNVERVLVVTFTKAATAELKTRLRARLDDVLQVLESKEIAELGDGALSDGIAAYCAEHHKGDTFLPALLKQALQKEGRTRLIVRLKAAIGQFDNAAIYTIHGFCQRILRDYAFLCQAPFDVELTEEDGDRLLIPAQDFWRERVSNDPVLAALAFKRKAVPQTVLAQIRAYLSRPYLNFRRPQADLKQAQRNAETSWQTVCRLLPELEAGFWRIHPDLNGNSYRKNSFGNLFKELAQKSAAGQLPFLDKDTHDRLLKLASDKLEAGLKKGKTPDAAVFAELQKLADFGYDLNALEEAEEATIIRLQLDLIGYLNRSLAEMKKSRRERGFDDLLLDVHTALTDNPHAETLARTVAENWETALIDEFQDTDPLQYEIFQKIFIAQNRPLFLVGDPKQAIYSFRGADIYAYLQAAEDARHRYTLATNYRSHAALIGSIGALFRLKERPFVLENIGYSEVGAARAESRLSPKRPAVQVRWLHENDNEKANKDVLRRRAADYCADEIAHALNEAAGGRLNFKGCPLQSGDIAVLVRTHNEAVMVSAALKKRQVQSVLLSRESVFASPEAAALSALIGFWLEPRRAGTLRFVLTSSIFGYNAQQLHDFNQNESEILHWAESARTALDNWNQYGIFAAMQQFSQTHGIETRLLSRNNGRSLTNYFQLLELLAAEDAQNRNPAALHKWLRDQISLAGNNGGDNRSIRLESDEDLVKIVTMHASKGLQYPLVYCPFAWDAQDTGPSDWQILHQSANRTELLAKAQLSEDEQKQYADEEMAERLRLLYVALTRAEEQLNIYAAYSSDTADNPLAYLIEGLPQDSRETVRRAYACEKDGIAMLKRNWQRVADNAPSGTNFSFTEDAPPPAVYCGNAGQTAEFAASDIPKRGFRFIRHTSFTALSRQTQTPDGGEEDACPSLDAAETSVAAMPSETPTASDGISIHNFPKGTQAGLCLHEILEDFKFGQAAAGQETLIADKLKKYGFEEIWLPAVAEMAEACRKTPLTGAYCLSDIPPECRCPEMGFTLHTEDFGLKRLRDWFARDDIRLPEVCRAAAETLDFHTVNGFLNGFADMVCQDPDGNICVIDYKSNHLGADASAYTQQAMDEAVAHHHYYLQALIYAVAAMRYFKLRGQPPAAVSVRYLFLRGFDGKGGGVWRWDIDAAALEQIK

SEQ ID NO: 4905 - protein, 306 aa, Neisseria meningitidis; identical to SEQ ID NO: 1708

SEQ ID NO: 4906 - protein, 151 aa, Neisseria meningitidis
MFGGAHELSIDSKGRLAVPAKFRDILSRLYTPAVVVTLESKHKLLMYPVAEWEKVAAQLLNLKVADNPVLRRFQNLLLHNAEILEWDSAGRVLVPAGLRKRVDFDREVVLVGRANRLELWGREQWEAEMVQALDDDPDELAFQLSQTDLQL

SEQ ID NO: 4907 - protein, 626 aa, Neisseria meningitidis
MNIFYEESGQFKIAAIIQKNDATYQVDTPHGKRTKVKANNVFAEFDGDMAAFLENAQAQAADIDTDLLWEVCGEEEFTAEAIAEEYYGHAPTKTELAATLIALYAAPMYFYKKAKGVFKAAPEETLKQALAAIERKKQQDAQIDAWAEALKRGEMPSEIAADLKTILHAPDKQSLTYKAFTKAADALKTSAYELAKKTGGITSIPQYLQDGFEIKYFPKGTGFPDLPLPEMPDLPKADVTAFSIDDESTTEVDDALSLTDLGNGIKRVGIHIAAPSLAIKQGDKMEKNIMERLSTVYFPGGKITMLPENWIAAFSLDAGTYRPSISIYFDVDNEFNVGAPTCKIEAVNIAENLRIQAIEPHFNAEAGLDEAGEMMFAHHQDLIWFYQFATALQKARGKYEPDRAPQYDYSIELDKEDNVSVVRRERGSPIDTLVSEMMILANSTWAQMLHDNDLPGLFRVQPTGKVRMSTKSEPHIGMGVRHYGWFTSPLRRAADYINQKQLISLIDDTAEPLYQNSDAELFAALRDFDAAYTAYADFQRQMEAYWSLVYLQQQGTSELTATILKEDLVRIEGLPLVTRATGIPFDALPKSQALFKITELDAEKQFVSLNYIKAVAPAGKTAGNAV

SEQ ID NO: 4908 - protein, 157 aa, Neisseria meningitidis
MSRNNEELQGISLLGNQKTQYPTGYAPEILEAFDNKHPDNDYFVKFVCPEFTSLCPMTGQPDFATIVIRYIPHIKMVESKSLKLYLFSFRNHGDFHEDCVNIIMKDLIALMDPKYIEVFGEFTPRGGIAIHPFANYGKAGTEFEALARKRLFEHDSQ

SEQ ID NO: 4909 - protein, 290 aa, Neisseria meningitidis
MSWLDKILPPKIKNRGKDGSSNVPEGLWHKCPSCSATVYSTELQQNNQVCPKCNHHNPLSARQRLNLLLDEDGREEVAGNVKPTDPLKFKDGKKYPDRLSAARKLTGEDDALVVMKGKMNGLPVVVAAFEFRFIGGSMGSVVGERFVQGIRRAVADNCPFVCVAASGGARMQEGVNSLMQMTKTSAALHLLTEKRLPFISVLTDPTMGGVSASFAFLGDVVLAEPNALIGFAGPRVIEQTVRETLPEGFQRAEFLLEKGAIDQIVDRRDMKRRISDLITLLCRQDKVSAA

SEQ ID NO: 4910 - protein, 367 aa, Neisseria meningitidis
MLILQAERDSLLKPLQAVTGIVERRHTLPILSNVLIEGKGGQTKLLATDLEIQIDTAGPEGGAGDFRITTNAKKFQDILRALPAGALVSLDWDDSRLTLKAGKSRFALQTLPAADFPMMNVGEDISATFSLEQERFKTMLSQVQYSMAVQDIRYYLNGLLMQVEGSQLRLVATDGHRLAYAACAIDADLPHAEVILPRKTVLELFKLLNNPDDPIQIELLDKQVRFQCNGTTIVSKVIDGKFPDFNRVIPLDNDKIFVLSRAELLGALERVSILANEKFRGARLFLQPGLLSVVCSNNEQEEAREEIEIAYQGGELEVGFNIGYLMDVLRNIHSDDMQLAFGDANRSTLFTVPNNPNFKYIVMPMRI

SEQ ID NO: 4911 - protein, 259 aa, Neisseria meningitidis; identical to SEQ ID NO: 588

SEQ ID NO: 4912 - protein, 223 aa, Neisseria meningitidis; identical to SEQ ID NO: 934

SEQ ID NO: 4913 - protein, 327 aa, Neisseria meningitidis
MWRIGGAGGRQTVRPAAALPYIITAKSASCFQTATAVKKKRRVYNTRIVCLGRIGKRMENIGRQRPIGVFDSGIGGLTNVRALMERLPMENIIYFGDTARVPYGTKSKATIENFSMQIVDFLLEHDVKAMVIACNTIAAVAGQKIRQKTGNMPVLDVISAGAKAALATTRNNKIGIIATNTTVNSNAYARAIHRDNPDTLVRTQAAPLLVPLVEEGWLEHEVTRLTVCEYLKPLLADGIDTLVLGCTHFPLLKPLIGREAHNVALVDSAITTAEETARVLAQEGLLNTDNNNPDYRFYVSDIPLKFRTIGERFLGRTMEQIEMVSLG

SEQ ID NO: 4914 - protein, 214 aa, Neisseria meningitidis; identical to SEQ ID NO: 3176

SEQ ID NO: 4915 - protein, 346 aa, Neisseria meningitidis
MNTPIPFSERLIRWQKQHGRHHLPWQVKNPYCVWLSEIMLQQTQVATVLDYYPRFLEKFPTVQTLAAAPQDEVLSLWAGLGYYSRARNLHKAAQQVVRQFGGIFPPERKDLETLCGVGRSTAAAISAFAFNRRETILDGNVKRVLCRVFAQDGNPQDKKFENSLWTLAESLLPSENADMPAYTQGLMDLGATVCKRTKPLCHQCPMAEICEAKKQNRIDELPRKKTAAEVPTLPLYWLIVRNRDGAILLEKRPAKGIWGGLYCVPCFESLNGLSDFAAKFSLTMADMDEQTALTHRLTHRLLLITPFEAQMPSESPSDGIWIKLAHLKDYGLPKPLEIYLNGNRLE

SEQ ID NO: 4916 - protein, 227 aa, Neisseria meningitidis
MFALLEAFFVEYGYAAVFFVLVICGFGVPIPEDLTLVTGGVISGMGYTNPHIMFAVGMLGVLAGDGVMFAAGRIWGQKILKFKPIARIMTPKRYAQVQEKFDKYGNWVLFVARFLPGLRTAVFVTAGISRKVSYLRFLIMDGLAALISVPVWIYLGEYGAHNIDWLMAKMHSLQSGIFIALGVLAAALAWFWWRKRRHYQLYRAQLSEKRAKRKAEKAAKKAAQKQQ

SEQ ID NO: 4917 - protein, 94 aa, Neisseria meningitidis; identical to SEQ ID NO: 3728

SEQ ID NO: 4918 - protein, 124 aa, Neisseria meningitidis
MIVLHGIPNCDTVKKAKNRLAGYGLEFEFRDFKKQVPSEAEICSWLEQVPLATLLNKRGTSWRKLDAETQQKALFSTAEAVKLMSEMPSLIKRPVLECGGKVYAGFSEETYDGIFNRQAPCRQG

SEQ ID NO: 4919 - protein, 139 aa, Neisseria meningitidis
MTSRLTEIRNAATDVLKTKFQRVYSGRGFAPAQSQLPCVVVYVDRRRTEQETFDFPPTYRHTVRLVTLVCVQAASGADELAEEMLSLIGQLFAEHSDLGVGDLENLVPDLLNIDSDESGEAVTVYYQQGWQAVYFEQAV

SEQ ID NO: 4920 - protein, 287 aa, Neisseria meningitidis; identical to SEQ ID NO: 1804

SEQ ID NO: 4921 - protein, 336 aa, Neisseria meningitidis; identical to SEQ ID NO: 1943

SEQ ID NO: 4922 - protein, 175 aa, Neisseria meningitidis
MKQKIWYTYDDIHRVIKALAEKIRNADIKYDAMIAIGGGGFIPARMLRCFLEIPIYAVTTAYYDSDNEGQVTEEVKKVQWLDPVPEALRGKNVLVVDEVDDSRVTMEFCLTELLKEDFGTIGVAVLHEKIKAKAGKIPEGIPYFSGITVEDWWINYPWDALDIDEHNRLAESSRG

SEQ ID NO: 4923 - protein, 283 aa, Neisseria meningitidis
MNTLKFTKMHGLGNDFMVIDAVSQDFTPEDAPIAAWADRFRGVGFDQLLVVGRSETEGVDFRYRIFNADGSEVGQCGNGARCFARFVADKGLTDKKEICVETANGVIFPKLSDNGMVTVNMGKPKFMPSEIPFVPESGEGDDACIYGVHLESGIQPVSCVNMGNSHAVIVVDDVECAPVRETGSLIEPHRQFPERVNVGFMQIVSRTAIRLRVFERGVGETQACGTGACAAVVAGIRLGLLDEGKTVEVILPGGTLYIEWACGGDVMMTGPAETVFEGELAYS

SEQ ID NO: 4924 - protein, 728 aa, Neisseria meningitidis
MGGPDGIDNRQAKQLANRTLWLKKQTEALQTASDDKAAASTAINAGGGLTGGGSLAQSRTIALGAPGQITATSQNAVQENSHTHAIDTATTTRAGIVQLDNTVSEAENTAATPKAVKTALDQALAAAAAANLKVSLSGDQTVNGQKTFTAQTQFQSGIHLSANQTNWNGGHKAYIGADADNAHIVFGDDTLRLHSANNRISYNNHDIFHKANKPRFAEDIEGKPNTLSGYGIGNFKVETFRGDLNTLKTDGIYSLPTAVGSSNLPVENTACHIQVIAGTQPGWCRQLGYPAYTSDVYERHQVSSANDNWSAWKKLNSDGIPVGAIVSFPKAVRNPAGYLRADGTTFAQNTFPDLYRALGNSNRLPDLSRTDIGITAWFPSDQIPTGWLAFDDIRTRVTETAYPELYRLLTGKYGSIQNVPQAEDRFIRNAGNSLAVGTKQEDEIKRHTHKVFSHWTSHTDVAAVGYEDGNERQRSALVSTWTDENLSDNGFLTPRLDSKMATGGDENRPKALVLKLCIKAADTLGEAVFWIKSHGETVNAGALDAGTLEQGLQDKADRDHTHTAAQIQGLDEKISTAVAAQFTRQTIGGVDIVRFPDGTMIQTGSYRFTRSGGPIENEVVFPVAFADGNVKCFVSERHSERVTGDRRQHNWLFIRAKNHAAAIITNWYEGSCDWMAIGKAASGNAASSPIVPEIPETNEEPQRESGRTSTGPRNRRRHRDGLLEALQD

SEQ ID NO: 4925 - protein, 302 aa, Neisseria meningitidis; identical to SEQ ID NO: 1790

SEQ ID NO: 4926 - protein, 119 aa, Neisseria meningitidis
MLSNIIPLSIGAAFGATARWLLNLAVPASIPPATGNLFANWIGAFLIGIFAETVNHPQWKLLLITGFLGSLTTLSGFSLETVTLLQSNRPASALANIFLHTAGSLLLTWLGLKIGAAVK

SEQ ID NO: 4927 - protein, 885 aa, Neisseria meningitidis
MTRHLRDIEKIMKTSELRQKFLKFFETKGHTVVRSSSLVPHDDPTLLFTNAGMNQFKDVFLGFDKRPYSRATTAQKCVRAGGKHNDLENVGYTARHHTFFEMMGNFSFGDYFKRDAIHFAWEFLTSPEWLNIPKDKLLATVYAEDDEAYNIWLNEIGMPSERIVRIGDNKGAKYASDNFWQMGDTGPCGPCSEIFYDHGEEIWGGIPGSPEEDGDRWIEIWNCVFMQFNRDEQGNMNPLPKPSVDTGMGLERMAAVMQHVHSNYEIDLFQDLLKAVARETGAPFSMEEPSLKVIADHIRSCSFLIADGVLPSNEGRGYVLRRIIRRAVRHGYKLGQSKPFFHKLVADLVKEMGDAYPELKEKQVQIEEALKNEESRFAQTLETGMALLENALAKGGKTLDGEIIFKLYDTYGFPYDLTADICRERNIELDEAGFEREMEAQRTRARAAQSFKANAQLPYDGQDTEFKGYSERQTESKVLALYKDGEQVNELNEGDEGAIVIDFTPFYAESGGQVGDVGYIFAGENRFEVRDTQKIKAAVFGQFGVQTSGRLKVGDSVTAKVDDEIRNANMRNHSATHLMHKALRDVLGGHVEQKGSLVTAESTRFDISHPQAVTAEEIAEVERRVNEAVLANVAVNAAIMSMEDAQKTGAMMLFGEKYGEEVRVLQMGGFSTELCGGTHVSRTGDIGLFKIISEGGIAAGVRRIEAITGLNALKWAQEQERLVKDIIAETKAQTEKDVLAKIQAGAAHAKALEKELARAKAELAVHAGAKLLDDAKDLGAAKLVAAQIEADAAALREIVTDLTGKSDNAVILLAAVNDGKVSLCAGVSKPLTGKVKAGDLVKFAAEQVGGKGGGRPDLAQAGGTDAGKLPAVLDSVKDWVGAKLV

SEQ ID NO: 4928 - protein, 240 aa, Neisseria meningitidis
VFPDKYKLSLKENIFLAKKVLVAQIHNLSRFENCQTTLLQTEQIIHGKNVASASLEDIQTILNLKRAYQYVISHISNGEPVDISLLKKINNIVAKDDSLAPGDFRTGSVGVTLLDGSRHAPNPVKEIEVARVLQNIGLQSGSTTEAAVRFMLYCMRQQVFWDGNKRTATLFANGLMMAGGCGILEISEMQMPQFNEKLSAFYRSGDDTDISKFVYQNCISGIDYFGTDEDIDFPDPPNMG

SEQ ID NO: 4929 - protein, 366 aa, Neisseria meningitidis
METQLYIGIMSGTSMDGADAVLIRMDGGKWLGAEGHAFTPYPDRLRRQLLDLQDTGADELHRSRILSQELSRLYAQTAAELLCSQNLAPSDITALGCHGQTVRHAPEHGYSIQLADLPLLAERTQIFTVGDFRSRDLAAGGQGAPLVPAFHEALFRDNRETRAVLNIGGIANISVLPPDAPAFGFDTGPGNMLMDAWTQAHWQLPYDKNGAKAAQGNILPQLLDRLLAHPYFAQPHPKSTGRELFALNWLETYLDGGENRYDVLRTLSRFTAQTVCDAVSHAAADTHQMYICGGGIRNPVLTADLADCFGTRVSLRSTAELNLDPQWVEAAAFAWLAACWINRIPGSPHKATGASKPCILGAGYYY

SEQ ID NO: 4930 - protein, 160 aa, Neisseria meningitidis
LVKTADGYKAIAHIRVGDRVFAKDEASGVTGYKPVTAQYGNLYQETVYIKVSDGIGNSQTLISNKIHPFYSDGKWIKAEDLKTGNRLLSESGKTQTVRNIIVKPTPLKAYNLTVADWHTYFVKGDKAETEGVWVHNECPPYKRPNNATRKCTRKTLRRMR

SEQ ID NO: 4931 - protein, 205 aa, Neisseria meningitidis
LSTDISVFWEVIDLEMPDCEVVLTAKGYKLDGAKGLKVVLRITDNAGNTPKSVDYLQPLDKIPLFVEFSDLQAQHIRCSATLESLDLGGLPKSERKRVSSKISSDMEILNELRGKIVDTDFIFREISDKALLDGLPELHGGHILVVWHPRSSLSRVDTAKLLDGLRGRLLAELSRYNLKFLNVPLHFLTVEAYVCRYGCPTASDT

SEQ ID NO: 4932 - protein, 283 aa, Neisseria meningitidis
MITHPQFDPVLISIGPLAVRWYALSYILGFILFTFLGRRRIAQGLSVFTKESLDDFLTWGILGVILGGRLGYVLFYKFSDYLAHPLDIFKVWEGGMSFHGGFLGVVIAIWLFGRKHGIGFLKLMDTVAPLVPLGLASGRIGNFINGELWGRVTDINAFWAMGFPQARYEDAEAAAHNPLWAEWLQQYGMLPRHPSQLYQFALEGICLFTVIWLFSKKQRSTGQVASLFLGGYGIFRFIAEFARQPDDYLGLLTLGLSMGQWLSVPMIVLGIVGFVRFGMKKQH

SEQ ID NO: 4933 - protein, 324 aa, Neisseria meningitidis
MIAKHIDRFPLLKLDRVIDWQPIEQYLNRQKTRYLRDHRGRPAYPLLSMFKAVLLGQWHSLSDPELEHSLITRIDFNLFCRFDELSIPDYSTLCRYRNWLAQDDTLSELLKLINRQLTEKGLKIEKASAAVVDATIIQTAGSKQRQAIEVDEEGQISGQTTPSKDSDARWIKKNGLYKLGYKQHTRTDAEGYIEKLHITPANAHECKHLPPLLEGIAEGTTVYADKGYDSAENRQHLEEHQLLDGIMRKACRNRPLSETQTKRNRYLSKTRYVVEQSFGTLHRKFRYARAAYFGLIKVSAQSHLKAMCLNLLKAANRLSAPAAA

SEQ ID NO: 4934 - protein, 180 aa, Neisseria meningitidis
VQSWKERRDFNIVKQDLDFSCGAASVVTLLNNFYGQKLTEEDVLKKLDKEQMPASFEDMRRIMPDLGFEAKGYALSFEQLAQLQISVIVYLKYRKDDHFSVLRGIDGNTVSLADPSLGHVSMSRAQFLDAWQTREGNLAGKILAVVPKGRDAGGDKAFFTRSPKRQTEFAVGQVKWWRAY

SEQ ID NO: 4935 - protein, 244 aa, Neisseria meningitidis; identical to SEQ ID NO: 1832

SEQ ID NO: 4936 - protein, 172 aa, Neisseria meningitidis
MRLFPIAAALTLAACGTVQSTQYFVLPDSRYIRPATQGGETAVEVRLAEPLKRGGLVYQTDPYRINTAQNHVWADTLDDMLEAALSNAFNRLDSTRIFVPASRSGSTEKWTVYIDAFQGSYTGKTLISGYAVLPDGMNRPFHIETEQQGDGYAAMTAALEQGLKQAAQQMVE

SEQ ID NO: 4937 - protein, 240 aa, Neisseria meningitidis
MNPRIKAMSGVMLQALSAAQQDVLVDLWQVDLRPLGGRVFYFCNQVNERGTAVVWQGQAYEPYPIKADGFESTSQGAGNRPTLTVSNLLGLITGAADQFGQLVGVPVVRRQTYAKFLDAVNFQSGRNPTADPMQEVVGKYLVERMTALNAETATFELAAPSESDGSVIPARIMLANTCCWQYRGEGCGYTRRAVADRFDMPTDDASKDVCSRTLTGCRARFGATAVLPFGGFPSSDKVTT

SEQ ID NO: 4938 - protein, 95 aa, Neisseria meningitidis
MNKEIVGIFFIPMGIISMCMAALWQMYVMMTETYTLNRFKDKELVWRVALLFISFSLAVYLLCPNSRKKGIVFFILGGGGAAMYLLARMWLPFSK

SEQ ID NO: 4939 - protein, 498 aa, Neisseria meningitidis
MFSNYLLSLAIWIPIAAGVLVLATGSDSRALLARVLAFMGALAGFLVTLPLFTGFDRLSGGYQFTEFHEWIPLLKINYALGVDGISVLFIILNAFITLLVVLAGWEVIQKRPAQYMAAFLMMSGLINGAFAAQDAILFYVFFEGMLIPLYLIIGVWGGPRRVYASVKLFLYTLMGSLLMLVAMVYLYYQTGSFSIVDFQNIKQIPLGVQQLLFAAFFLSFAVKVPMFPVHTWLPDAHVEAPTGGSMVLAAIMLKLGAYGFLRFILPIMPDAARYFAPVIIVLSLIAVIYIGMVALVQTDMKKLVAYSSISHMGFVTLGMFLFVNGQLNDWALKGAIIQMISHGFVSAAMFMCIGVMYDRLHTRNIADYGGVVNVMPKFAAFMMLFGMANAGLPATSGFVGEFMVIMGAVKVNFWVGALAAMTLIYGASYTLWMYKRVIFGAIHNPHVAEMKDINCREFTILAVLAVAVLGMGLYPNAFIEVVHQAANDLIAQVAQSKM

SEQ ID NO: 4940 - protein, 313 aa, Neisseria meningitidis
MAIQWFPGHMNKAKKAIAERAKSVDMVIEMLDARMPASSENPLLAQLSKGKPKLKILNKQDLADSERTKVWLDHYNSRPDTCAIALDSSETGAHGKITQACRAMIPHRQGIDKPLRVLICGIPNVGKSTLINGMIGKKSAKTGNEPGITKAEQRLFLADDFWLYDTPGMLWPKIIVEESGYNLAAGGAVGRNALDEEEVALELLDYLRRHYLPMLQERYQADKDPSSHWDENVWLEWIAKKRGAVLSGGRINYQKAAENILTDFREGKIGRITLETPNQWETWLKKARQKEAELKAIREARKAERKGQKPSEA

SEQ ID NO: 4941 - protein, 60 aa, Neisseria meningitidis
MFGGRLKNSPSITAKHFLKENIMKFINTCRKYGAKLAVVTAAPLALAAHANARHVLPSRK

SEQ ID NO: 4942 - protein, 122 aa, Neisseria meningitidis
MIDDELVALIHQTVLADEAGLKGRADMARLDGALSRIANWRQYENLEDIYEIAALYAQAIAKAHAFPDGNKRTALLTMLTYLDLQGISIAADQGLDDLIVSLAAGETDFKQLAETLRRLDKE

SEQ ID NO: 4943 - protein, 64 aa, Neisseria meningitidis
LKAGLRLDARLIESALDYIHYSERFLAFEILCTYIEDFDVRLTEQESREISFINKEFEIESTSD

SEQ ID NO: 4944 - protein, 157 aa, Neisseria meningitidis
MQVTKNFSLRELTRSETARRAGVPNEPSPAEMDNIYYTAQQLEKIREYVGRPIIVISCLRSEQVNKLVGGSPTSAHRHGLAADCDASGMTSPAFAKLLIKMRDEGALKFDQLILEFPELGDGAWVHIGFRRNSPQRNQILTATKKNGKTVYLPGLHP

SEQ ID NO: 4945 - protein, 229 aa, Neisseria meningitidis
MKRKNIALIPAAGIGARFGADKPKQYVEIGSKTVLEHTIGIFERHEAVDLTVVVVSPEDTFADKVQTAFPQVRVWKNGGQTRAETVRNGVAKLLETGLAAETDNILVHDAARCCLPSEALTRLIEQAGNAAEGGILAIPVADTLKRADGGNISATVERTSLWQAQTPQLFRAGLLHRALAAENLDGITDEASAVEKLGIRPLLVQGDARNLKLTQPQDAYIVRLLLDAV

SEQ ID NO: 4946 - protein, 221 aa, Neisseria meningitidis
MTFTAVLFDLDGVITDTAEYHYRAWKKLAEELGISIDRKFNEQLKGVSRDDSLKRILAHGGKTVSEAEFAELTRRKNDNYVEMIQAVKPEDVYPGILPLLETLKANGKKIALASASKNGPFLLERMGLTHFFDAIADPAAVAHSKPAPDIFLAAAEGVDADIRQCIGIEDAVAGVAAIKAAGALPIGVGKAEDLGSDIALVSGTAELTYAYLQNVWAQSGR

SEQ ID NO: 4947 - protein, 90 aa, Neisseria meningitidis
LNVFGFSADDFSEEETTFGVWPCNWQAVQLFIGVSTQWRIGMSGATGLDYSAVAAVMECGNIKPKKRKTLLEKIRMMELEVLSMWAGEHE

SEQ ID NO: 4948 - protein, 64 aa, Neisseria meningitidis
MSALLPAACQHVSDRHGKFRFQILHCQRRQTGSKKRRKRRRICPVPFAGQQDCRGVGIFPFTTL

SEQ ID NO: 4949 - protein, 140 aa, Neisseria meningitidis; identical to SEQ ID NO: 1638

SEQ ID NO: 4950 - protein, 948 aa, Neisseria meningitidis
MCNHHPKHSHDNDTIRIRGARTHNLKNVDLDIPRHKLVVVTGLSGSGKSSLAFDTLYAEGQRRYVESLSAYARQFLQMMDKPDVDLIEGLSPAISIEQKSTSHNPRSTVGTVTEIHDYLRLLYARVGTPYCPEHNLPLSSQTISQMVDAVLKLPEDTRVMILAPAVRERKGEFVDFFADLQAQGFARVRVDGEVYQLDEVPKLEKNIKHNIDVVIDRVKVKTEIKQRLAESFETALRHGNERALAMEMDSGEEHWFSARFACPVCSYSLPELEPRLFSFNNPMGSCPTCDGLGNTNFFDPEKVVAHPELSLASGAIDGWDKRNQFYFQMIQSLARHYGFDVQAAWETLPAKIKKVVLHGSGKEVIDFTYLSERGTTFNRSHAFEGIIPNLERRYRETDSETVREKLREYQNHRACPSCGGARLRKEARYVYVSGEPLHEVSAWPLTKTHQFFETLDLDGNKKQIAEKILKEITERLGFLINVGLDYLNLSRSAETLSGGEAQRIRLASQIGSGLTGVMYVLDEPSIGLHQRDNDRLLATLKRLRDLGNSVIVVEHDEDAIREADFVVDMGPGAGEHGGNVLIADTPENVARCENSVTGQYLSGKKSIAVPSERTPVNPERMLVLKGARGNNLKNVTLELPLGLITCITGVSGSGKSTLINDTLAKITARELNRAQEEPAPYDDIRGLEHLDKVINVDQSPIGRTPRSNPATYTGLFTPIRELFTGVPLSRERGYNVGRFSFNVKGGRCEACQGDGVIKVEMHFLPDVYVPCEVCHGKRYNRETLEIQYKGKNISQVLDMTVEEAREFFDAVPTVSRKLQTLMDVGLGYIRLGQSATTLSGGEAQRVKLALELSKRDTGRTLYILDEPTTGLHFADIALLLEVIGRLKGKGNSIVIIEHNLDVIKTADWIVDLGPEGGDGGGRIIASGSPEEVAKVKGSYTGKYLKNIL

SEQ ID NO: 4951 - protein, 253 aa, Neisseria meningitidis; identical to SEQ ID NO: 1532

SEQ ID NO: 4952 - protein, 223 aa, Neisseria meningitidis
VFPDKYKLSLEENIFLAKKVLVAQIHNLSRFENCQTTLLQTEQIIHGKNVASASLEDIQTILNLKRAYQYVISHISNGEPVDISLLKKINNIVAKDDSLAPGDFRTGSVGVTLLDGSRHAPNPVKEIEVARVLQNIGLQSGSTTEAAVRFMLYCMRQQVFWDGNKRTATLFANGLMMAGGCGILEISEMQMPQFNEKLSAFYRSGDDTDISKFVYQNCISGID

SEQ ID NO: 4953 - protein, 370 aa, Neisseria meningitidis
MSTFFQQTAQAMIAKHIDRFPLLKLDRVIDWQPIEQYLNRQRTRYLRDHRGRPAYPLLSMFKAVLLGQWHSLSDPELEHSLITRIDFNLFCRFDELSIPDYSTLCRYRNWLAQDDTLSELLKLINRQLTEKGLKVEKASAAVVDATIIQTAGSKQRQAIEVDEEGQINGQTTPSKDKDARWIKKNGLYKLGYKQHTRTDAEGYIEKLHITPANAHECKHLPPLLEGVPRGTTVYADKGYDSAENRQHLEEHQLLDGIMRKACRNRPLSETQTKRNRYLSKTRYSGLNLNQDKATKPQTVQIVRQGEATPYWFKFNPLYVVEQSLGTLHRKFRYARAAYFGLIKVSAQSHLKAMCLNLLKAANRLSAPVAA

SEQ ID NO: 4954 - protein, 250 aa, Neisseria meningitidis
MTSCEPVNEKTDQKAVSAQQAKEQTSFNNPEPMTGFEHTVTFDFQGTKMVIPYGYLARYTQDNATKWLSDTPGQDAYSINLIEISVYYKKTDQGWVLEPYNQQNKAHFIQFLRDGLDSVDDIVIRKDACSLSTTMGERLLTYGVKKMPSAYPEYEAYEDKRHIPENPYFHEFYYIKKGENPAIITHWNNRVNQAEEDNYSTSVGSCINGFTVQYYPFIREKQQLTQQELVGYHQQVEQLVQSFVNNSSKK

SEQ ID NO: 4955 - protein, 269 aa, Neisseria meningitidis
MTALPRYSVFGNPVAHSKSPQIHQQFALQEGVDIEYERICADIGGFAQAVSTFFETGGCGANVTVPFKQEAFHLADEHSERALAAGAVNTLIPLKNGKLRGDNTDGLGLVGDIVKVQHTEIEGKNILLLGAGGAVRGVIPVLKEHRPARIVIANRTRAKAEELSRLFGIEAVPMADLNGGFDIIINGTSGGLNGQIPDIPPDIFQNCALAYDMVYGCAAKPFLDFARQSGAKKTADGLGMLVGQAAASYALWRGFTPDIRPVIEYMKAM

SEQ ID NO: 4956 - protein, 151 aa, Neisseria meningitidis
MIIGGIGGARTQTGLRFEERTDLRTLFEEIPGYDLRKTYDNAGYEVWFNGELKAYCFKKYEFYRFLKRPGYNINWKDHLSKRLLPDNGLFIIIRDTLFIIEIKFQQTPGSVDEKLQTCDFKRKQYTKLVHSLGWRVEYVYVLNDWFTKPEY

SEQ ID NO: 4957 - protein, 288 aa, Neisseria meningitidis
MMKTLLPFFGVVRVSGEDRQTFLHGQLSNDINHLQTGQACYATYNTPKGRVIANMIVVNRGGDLLLIMAQDLLEATVKRLRMFVLRAKAVFEILEDYAVGAELEASAEPLAAQEPSLAFTAECGSDGICSVVLPHRGILHIAPKNALPPYDAAAENAWRLHEIRSGYPWICAATKETAVAQMLNQHIIGGVHFKKGCYPGQEIIARAQYRGQVKRGLAVLSGNSAAEAGILLAADGEEAGIVLDSVQDSENFTALAVIKFSAAQKTLSAPNGGSFKAVRTFFKTEGAE

SEQ ID NO: 4958 - protein, 322 aa, Neisseria meningitidis
MKLTLAIPSLNLDKDETRIPLCLHAFNKILQYGSLHRQSCTASAFYARYLWCGRLAERAAQSLNMPSETVALATPVWQKMGMHQANVLTAEYLDVGTDEAERLCRDLSAFYGDIPWRFVPVLPELWLVSLPRAYRWGAKPVLDLGGLLGADDQPDGEDALEWLRVQTEIQMWLAAHPVNHNRKKRGLPELNGLWLWDSLHGSSQGGTLFADTVWSRFHPDRRALPDNFRAYEETAAHLPDTHHILFMDDLRLTALTGDRERYASVLQQWEEHWFAPIYEAVRTGKIKRLDITTDGQHGGTLTFKPADRWKFWRGAKTFDGIW

SEQ ID NO: 4959 - protein, 139 aa, Neisseria meningitidis
MNLVKLLANNWQPIAIIALVGTGLAVSHHQGYKSAFAKQQAVIDKMEKDKAQALLLSAQNYARELEQARAEAKKYEVKAHAVGMALAKKQAEVSRLKTENKKEIENVLTQDRKNAGGGCIDGFGHHGLQLYKRALGYGN

SEQ ID NO: 4960 - protein, 188 aa, Neisseria meningitidis
MLLKNILPFAHCLLRQALPEGGNALDGTAGNGHDTLFLAQTAGIRGKVWAFDIQPQALSRTRCRLKEARYENVQLILDGHENLKQYVSEPLNAAIFNFGWLPGGDKSLTTHTETSIPALCATLSLLKEGGMLIAVLYPGHENGKQEAEAIEQWAKNLPQEQFAVLRYGFTNRKNSPPYLLAFEKLRQK

SEQ ID NO: 4961 - protein, 74 aa, Neisseria meningitidis
VGCRVCFSPLHQKFLENRRESAVLVSAGTVEMGNIDGIDGSGGLKPTLVYWNHRIIATNRPTATRAHPRQTTVA

SEQ ID NO: 4962 - protein, 151 aa, Neisseria meningitidis
MAYSADLRNKALNYSGLNLNQDKATKPQTVQIVRQGEATPYWFKFNPRYYEQCKNISQTAATFNLSRNTLYLWIRLKKQTGSLKHQVTGLNAVKSDRQKPAQYIGQHQDAYLHEIAKHFDCTAATVCYALKQMGITRKKRPPLTKNKTRPK

SEQ ID NO: 4963 - protein, 41 aa, Neisseria meningitidis; identical to SEQ ID NO: 1263

SEQ ID NO: 4964 - protein, 446 aa, Neisseria meningitidis
MTDTAGLRRRNLRQWIAEHYGGLQTRFAEAVALNTGELSALLKNKSFGEKKARKIEQAAKMPAFWLDTEHTARPPEHTGKHTMSHISPIPEILADIKAGKMVIITDAEDRENEGDLLMAAQFVTPEAINFMIKHARGLVCLPMDGEMVEKLGLPMMTQKNGAQYGTNFTVSIEAAHGITTGISAADRALTIQTAVSPTAKPEDIVQPGHIFPLRAQKGGVLVRAGHTEAGVDLAQMNGLIPAAVICEIINDDGTMARMPELMKFAEEHKLKIGTITDLIEYRSRTESLLEDMGNAPVQTPWGEFQQHVYVDKLSGETHLALVKGTPAADTETLVRVHEPFSVMDFIQANPRHSWSLPKALERIQQAESGVVILLHRAEDGASLLDRTLPKGANQAYKWDSKSYGIGAQILVGLNVKKLRVLGQPSSFTGLTGFGLEVVGFEEAENK

SEQ ID NO: 4965 - protein, 597 aa, Neisseria meningitidis
MKNIRNFSIIAHIDHGKSTLADRFIQYCGGLDLREMSTQVLDSMDIEKERGITIKAQTAALNYKARDGQVYQLNLIDTPGHVDFSYEVSRSLSACEGALLVVDASQGVEAQTVANCYTAIDLGVEVVPVLNKIDLPAADPERVEQEIEDIIGIDAVGAVQCSAKSGIGVEDVLEEIVAKIPAPTGDENAPLQAVIVDSWFDNYVGVVMLIRVKNGTIKLKDKVRFMSTKAETQVEQLGVFTPKSVQKQELKAGEVGFLITGVKELGQAKVGDTVTLVANPATEPLPGFQEVQSQVFAGLYPVESHDYEALRDALEKLQLNDASLKFEPEVSQALGFGFRCGFLGLLHLEIVQERLEREFDMDLITTAPTVIYEVVLKSGEKIEVENPSKLPDIGSIETILEPIITATILVPQEYVGNVMTLCNQKRGVQVNMQYMGRQVMLTYDLPMNEVVMDFFDKLKSTSRGYASLDYHFKEFQPSDLIKLDIMVNGEKVDALSLIVHRQSAVHRGRELASKMRELIPRQMFDIAVQAAIGSQIIARENVKALRKNVLAKCYGGDITRKKKLLEKQKAGKRRMKQVGNVEIPQSAFLAILQVSDK

SEQ ID NO: 4966 - protein, 122 aa, Neisseria meningitidis; identical to SEQ ID NO: 2347

SEQ ID NO: 4967 - protein, 160 aa, Neisseria meningitidis
MKYLNLAAITLAATFAAHTASADELAGWKDNTPQSLQSLKAPVRIVNLWATWCGPCRKEMPAMSKWYKAQKKGSVDMVGIALDTSDNIGNFLKQTPVSYPIWRYTGANSRNFMKSYGNNIGVLPFTVVEAPKCGYRQTITGEANEKSLTEAVKLAHSKCR

SEQ ID NO: 4968 - protein, 240 aa, Neisseria meningitidis
MPSAPSAPVQTALLFQPTKDIHTMQDNALTIALSKGRIFEETLPLLAAAGIVPTEEPEKSRKLIIGTNHENIRLVIVRATDVPTYVRYGAADFGIAGKDVLIEHGGTGLYRPLDLEIAKCRMMVAVRKGFDYEAASQPGCRLKIATKYPEIAASHFAGKGVHVDIIKLYGSMELAPLVGLSDAIVDLVSTGNTLKANGLEAVEHIVDISSRLVVNKAALKTKYALLEPIIQAFGGAVKAK

SEQ ID NO: 4969 - protein, 138 aa, Neisseria meningitidis
MAKLTEQDILNWNGPEDDYMNDEHLAFFRELLVKMQDELIENASATTGHLQEHESAPDPADRATQEEEYALELRTRDRERKLLSKIQATIRNIDEGDYGFCADTGEPIGLKRLLARPTATLSVESQERRERMKKQFAD

SEQ ID NO: 4970 - protein, 530 aa, Neisseria meningitidis
MVISNPRELEKLKDRIPNLINIARIAIVLPLLIMHIFGLEVSGHENLYASWTTWAFYLWLAISCWMIFFSTLNPQWQWQALRIPSFSAVADITMIGVLTYLFGGIDSGFGILILPFVGSSCLLSYGRYPLLYASYAAILLILNALADSNINMYPLILGAKTVAHTFILVAGSYFAAMIASLSVRYIDRAGKLAHENHAAYRRIRGLNQIVLNRVQEAVVVINVEHQTILFNKKAKDLLPMLEIGQHTALFDPVAVLWDKASSRTFERNIDTPALTARIRAVPMNKEQNKLLILYIRPQSEIQAEALSVKLAALGQLTANLAHEIRNPMSAIRHANDLLRENAEEEETDPFKVKLCEIIDGNVRRIDKMLEDISSLNKRNKTEREAIDLIPFWEEFKQEFLLGHPDVAGCIRPDIQGGSPTAYFDPAHLRQIMWNLANNAWRHSRKQPGSISVTIRPAQKNTVCILFADDGGGVPPEVQEHLFEPFYTTAENGTGLGLYVARELAHANFGDLTYLPETKCFKLTLPEKTND

SEQ ID NO: 4971 - protein, 305 aa, Neisseria meningitidis
MEKAEHLNSSRFVNLVKSGGGSYVEGSYRFDTLSNGISIHGGTVTARCDFCSSRLAEPYVSFVLLLEGSLNFGINRSRFQIDADGGKIVLIAVGEEVLFSRYLYRGGKTVKMTIKGMEQWLLRPEYACFTPILYREPVRIWNLSPNLRGLAASCLQAVPKGHLGETLRREADVLRLLSDLWDTVSDGIGPAAGQTAEADAMPSEDFSRTLNAAFADGAHQVNRLADALNISERTLQRRMRDHFGITASEWLHHKQMQHALYLLQNGGKSIGETAYLCGYRHVSSFTQAFRQYFGSTPAETKKENR

SEQ ID NO: 4972 - protein, 308 aa, Neisseria meningitidis
MNTTNLNPNITLPNGYNRIKHSKASEEYIVVEFKYQEIIWKGWIPLEYRRTGVSIPYNKTNQSDVNAYLNLVYENMNPVNHETWLNDQNGFWEDSKAKVTKPFFECLKTGGWKCVKCTLPSNPNWARRIQDLKEMGYTLSTNTNQFCNNCKENTTHLLLVPIKRGNLLGNGYETWSKELRKRILAVLNNIDVYENKFNTHVLPDHKFSEIRWDDNTKSQNPDDMTDDEIKQKFQLLSNQRNQQKREVCRTCFQTGKRGVIFGIPFWYKGTADWDKSIPTKGKNAEQGCIGCAWYDIEAWRNELVKRLK

SEQ ID NO: 4973 - protein, 432 aa, Neisseria meningitidis
LKISEVLVKVGDGVHTLLLDRPIVRDGRKFDAPLLWMVVLMTAFSLLMIYSASVYLASKEGGDQFFYLTRQAGFVVAGLIASGLLWFLCRMRTWRRLVPWIFALSGLLLVVVLIAGREINGATRWIPLGPLNFQPTELFKLAVILYLASLFTRREEVLRSMESLGWQSIWRGTANLIMSATNPQARRETLEMYGRFRAIILPIMLVAFGLVLIMVQPDFGSFVVITVIAVGMLFLAGLPWKYFFVLVGSVLGGMVLMITAAPYRVQRVVAFLDPWKDPQGAGYQLTHSLMAIGRGEWFGMGLGASLSKRGFLPEAHTDFIFAIIAEEFGFFGMCVLIFCYGWLVVRAFSIGKQSRDLGLTFNAYIASGIGIWIGIQSFFNIGVNIGALPTKGLTLPLMSYGGSSVFFMLISMMLLLRIDYENRRKMRGYRVE

SEQ ID NO: 4974 - protein, 476 aa, Neisseria meningitidis
MTWETVIGLEIHVQLNTKSKIFSGASAAFGAEPNAHAGVVECALPGVLPVMNREVVEKAIKLGLALDAKINRKNVFDRKNYFYPDLPKGYQISQLDLPIVEHGKLEIVVGDNVKTINVTRAHMEEDAGKSVHEGLNGATGIDLNRAGTPLLEVVSEPELRSAAEAVAYAKALHSLVTWLDICDGNMAEGSFRIDANVSVRPKGQEEFGTRREIKNLNSFRFLEQAINYEAEAQIEILEDGGKVQQATMLFDPEKGETRVMRLKEDAQDYRYFPDPDLLPVIISDAQMQKAKAEMPELPKEMAAHFVADYGVSEYDARLLTASRAQAAYFEEAAKESGQGKPTANWMNGELAAALNKAGLELADSPITAPRLAALVGKIADGTLSGKLAKKAFEAMWAEPEATIAEIIEKHGLQQMTDTGAVEAIVDEVLANNAKAVEQFKSGNEKALNAIVGQVMKASKGKANPAQVQELIKAKLA

SEQ ID NO: 4975 - protein, 158 aa, Neisseria meningitidis
MPIEIERRFLIENDNWRQYADEPLLLRQGYLSVEKERTVRVRIAGKRAWLTLKGYISEISRSEFEYEIPLADAEKMMETMCPFKMEKRRYLVRWGGSLFEVDVFLGENAPLVVAEIELPDENADFDRPDWLGREITADGMFTNAYLSKHPFSSWKNAV

SEQ ID NO: 4976 - protein, 201 aa, Neisseria meningitidis
MILLHLDFLSALLYAAVFLFLIFRAGMLQWFWASIMLWLGISVLGAKLMPGIWGMTRAAPLFIPHFYLTLGSIFFFIGHWNRKTDGNGWQADPEHPLLGLFAVSNVSMTFAFVGICALVHYCFSGTVQVFVFAALLKLYALKPVYWFVLQFVLMAVAYVHRCGIDRQPPSTFGGSQLRLGGLTAALMQISVLVLLLSEIGR

SEQ ID NO: 4977 - protein, 107 aa, Neisseria meningitidis
MNEHNLLIFCLKDNVSISEYTEMIDWAYKNIQSETVVEITESQIIEYQNRGLWRLVSEITDNWLFGPSEGDWLIDKESILAVKEKLQNSDFSTEPLVKNIIHVLEYA

SEQ ID NO: 4978 - protein, 217 aa, Neisseria meningitidis
MKITHCKLKKKVQKELLRFFVLEVTARSAADILGIHPNSAVLFYRKIRMVISHYLALAANEVFEGSVELDESYFGGRRKGKRGRGAAGKVVVFGILKRNGRVYTVVVDNAKSETLLPVIKKKIMPDSIVYTDSLSSCDKLDVSGFIHYRINHSKEFADRQNHINGIENFWNQAKRVLRKYNGIDRKFFPLFLKECEFRFNFGTPSQQLKILRDWCGI

SEQ ID NO: 4979 - protein, 354 aa, Neisseria meningitidis; identical to SEQ ID NO: 3126

SEQ ID NO: 4980 - protein, 314 aa, Neisseria meningitidis; identical to SEQ ID NO: 3488

SEQ ID NO: 4981 - protein, 702 aa, Neisseria meningitidis
MKISFHLALLPTLIIASFPVAAADTQDNGEHYTATLPTVSVVGQSDTSVLKGYINYDEAAVTRNGQLIKETPQTIDTLNIQKNKNYGTNDLSSILEGNAGIDAAYDMRGESIFLRGFQADASDIYRDGVRESGQVRRSTANIERVEILKGPSSVLYGRTNGGGVINMVSKYANFKQSRNIGAVYGSWANRSLNMDINEVLNKNVAIRLTGEVGRANSFRSGIDSKNVMVSPSITVKLDNGLKWTGQYTYDNVERTPDRSPTKSVYDRFGLPYRMGFAHRNDFVKDKLVWRSDLEYAFNDKWRAQWQLAHRTAAQDFDHFYAGSENGNLIKRNYAWQQTDNKTLSSNFTLNGDYTIGRFENHLTVGMDYSREHRNPTLGYSRAFTASIDPYDRASWPASGRLQPILTQNRHKADSYGIFVQNIFSATPDLKFVLGGRYDKYTFNSENKLTGSSRQYSGHSFSPNIGAVWNINPVHTLYASYNKGFAPYGGRGGYLSIDTSSSAVFNADPEYTRQYETGVKSSWLDDRLSTTLSAYQIERFNIRYRPDEQNDPYTWAVGGKHRSRGVELSAIGQIIPKKLYLRGSLGVMQAKVVEDKENPDRVGIHLNNTSNVTGNLFFRYTPTENLYGEIGVTGTGKRYGYNSRNKEVTTLPGFARVDAMLGWNHKNVNVTFAAANLFNQKYWRSDSMPGNPRGYTARVNYRF

SEQ ID NO: 4982 - protein, 60 aa, Neisseria meningitidis
MFWYVIGFCAFVVALLSLWVNASAFGMQEDDTPQSDYERRLGLGAKLKNKNTPKSGEKRQ

SEQ ID NO: 4983 - protein, 35 aa, Neisseria meningitidis
LDKPAFAACCSSLAIVVSALTDDLRTALHEGGFFV

SEQ ID NO: 4984 - protein, 384 aa, Neisseria meningitidis
MSTFFQQTAQAMIAKHIDRFPLLKLDQVIDWQPIEQYLNRQRTRYLRDHRGRPAYPLLSMFKAVLLGQWHSLSDSELEHSLITRIDFNLFCRFDELSIPDYSIVDQKPVRRCLALAQRERFSKVLKHQVNRFRTICTVCGFVALSFLLIHYTLCRYRNWLAQDNTLSELLKLINCQLTEKGLKIEKASAAVVDATIIQTAGSKQRQAIEVDEEGQISGQTTPSKDSDARWIKKNGLYKLGYKQHTRTDEEGYIEKLHITPANAHECKHLPPLLEGIAEGTTVYADKGYDSAENRQHLEEHQLLDGIMRKACRNRPLSETQTKRNRYLSKTRYVVEQSFGTLHRKFRYARAAYFGLIKVSAQSHLKAMCLNLLKAANRLSAPAAA

SEQ ID NO: 4985 - protein, 200 aa, Neisseria meningitidis; identical to SEQ ID NO: 321

SEQ ID NO: 4986 - protein, 636 aa, Neisseria meningitidis
MNLETLIALPRNIKKICFLIHDFLMIFIAFWFTQSLKADYSDEWFDFANWQSFLLTALLTITLFIRMGLYHAVTRFVSFRILTTVLAGSLASAVLFFLNTLIFEERLRLALPIVYFLLLFVSVTGSRMVLRGLLSEHPKKQMIPVIIYGAGRSGRQLLEAVKQMREYSAAAFVDDDPKLWHTVIYDLAVYQPDAIAFLIERYGVEKILLAIPGATQEQRRRIINKLEAYPCEVLTIPGMKDLMDGKISIGTLKKISVSDLLGRDSVAPDDRLMSADIEGKTVMVTGAGGSIGSELCRQIIRRRPEKLLLFELSEFALYAIEKELRETCIQKRLDTEILPFLGSVQNRTLLEHVMTAFSVATVYHAAAYKHVPMVEFNTVEGIRNNIFGTLECALAATTSGIRTFVLISTDKAVRPTNTMGASKRMAELCLQALAAEPGQKTRFSMVRFGNVLGSSGSVVPLFEKQIAQGGPLTLTHPEITRYFMTIPEAAQLVIQAGAMGTGGDVFVLDMGESVKIIDLARQMITLSGLKPNTPEQPDGDIEILITGLRPGEKLYEELLIGDNVRKTSHPRIMTANETMLPWHELSALLNRIRAACDRYDQQAIRTLLINAPTGFAPSDGICDLLWVRETHRKNAV

SEQ ID NO: 4987 - protein, 326 aa, Neisseria meningitidis
MGIAPYCRNLIIQEQKMKIANSITELIGNTPLVKLNRLTEGLKAEVAVKLEFFNPGSSVKDRIAEAMIEGAEKAGKINKNTVIVEATSGNTGVGLAMVCAARGYKLAITMPESMSKERKMLLRAFGAELILTPAAEGMAGAIAKAKYLVDAHPDTYFMPRQFDNEANPEIHRKTTAEEIWRDTDGKVDVFVAGVGTGGTITGVGEVLKKYKPEVKVVAVEPEASPVLSGGEKGPHPIQGIGAGFIPTVLNTKIYDSITKVSNEAAFETARAMAEKEGILVGISSGAAVWSALQLAKQPENEGKLIVVLLPSYGERYLSTPLFADLA

SEQ ID NO: 4988 - protein, 604 aa, Neisseria meningitidis
MSEHDMQNTNPPLPPLPPEITQLLSGLDAAQWAWLSGYAWAKAGNGASAGLPALQTALPTAEPFSVTVLSASQTGNAKSVADKAADSLEAVGIQVSRAELKDYKAKNIAGERRLLLVTSTQGEGEPPEEAVVLHKLLNGKKAPKLDKLQFAVLGLGDSSYPNFCRAGKDFDKRFEELGAKRLLERVDADLDFAAAANAWTDNIAALLKEEAAKNRATPAPQATPPAGLQTASEGRYCKADPFPAALLANQKITARQSDKDVRHIEIDLSGSDLHYLPGDALGVWFDNDPALVREILDLLGIDPATEIQAGGKTLPVASALLSHFELTQNTPAFVKGYAPFADDDELDRIAADNAVLQGFVQSTPIADVLHRFPAKLTAEQFAGLLRPLAPRLYSISSSQAEVGDEVHLTVGAVRFEHEGRARAGGASGFLADRLEEDGTVRVFVERNDGFRLPEDSRKPIVMIGSGTGVAPFRAFVQQRAAENAEGKNWLIFGNPHFARDFLYQTEWQQFAKDGFLHRYDFAWSRDQEEKIYVQDKIREQAEGLWQWLQEGAHIYVCGDAAKMAKDVEAALLDVIIGAGHLDEEGAEEYLDMLREEKRYQRDVY

SEQ ID NO: 4989 - protein, 751 aa, Neisseria meningitidis
MGQYKKLWYLLFAVLAVCFTILGYMGSEVYKKAPPYPEQVVSASGKVLMAKDDILAGQSAWQTTGGMEVGSVLGHGAYQAPDWTADWLHRELSAWLDLTAQQTYGKKFDEVSPEEQAVLKTRLADEYRNQSRIKEDGSVVISDTRVKAIESILPYYHGVYGDDPALQTTREHFAMKNNTLPSQEAREKLFDFFFWTSWSASTNRPDETFTYTNNWPHEPLINNVPTTENYMWSFTSVVLLLMGIGLLMWGYSFLTKHEEVEVPTEDPISKVQLTPSQKALGKYVFLTVALFVVQVLLGGLTAHYTVEGQGFYGIDEALGFEMSDWFPYALTRTWHIQSAIFWIATGFLTAGLFLAPIVNGGKDPKFQRAGVNFLYIALFIVVGGSYAGNFFALTHILPPEFNFWFGHQGYEYLDLGRFWQLLLMVGLLLWLFLMLRCTVSAFKEKGVDKNLLAIFVASMVGVGVFYAPGLFYGEKSPIAVMEYWRWWVVHLWVEGFFEVFATAAFAFVFYNMGFVRRSTATASTLAAAAIFMLGGVPGTLHHLYFSGSTSASMAIGACFSALEVVPLVLLGREAYEHWSYQHLSEWAKRLRWPLMCFVAVAFWNMIGAGVFGFLINPPISLFYIQGLNTSAVHAHAALFGVYGFLALGFVLLVARYLKPNVQFDDKLMTWGFWLLNGGLVGMIAISLLPVGVIQAYASITHGLWYARSEEFLQMEILDTLRWVRTAADLIFIGGAICVAIQATKIVFGRDK

SEQ ID NO: 4990 - protein, 119 aa, Neisseria meningitidis
MNIKHLITTTLIASAAFAAQAAPQKPVSAAQTAQHPAVWIDVRSEQEFSEGHLHNAVNIPVDQIVRRIHEAAPDKDTPVNLYCRSGRRAKAALQELKKAGYTNVANHGGYEDLLKKGMK

SEQ ID NO: 4991 - protein, 253 aa, Neisseria meningitidis
METAKPIMLIVRPSGRAKDDVETCRRAGWQAEVLSPIEIEADAAGLELLSEQYARADAVFWVSPTAVETAVPYLNLSDGIKIHIAVGQGSRRALERYLGRTVIAPHDGNDSEAVLRLPVWNSLPEGARVLFVRGHGGRDFLMNALQEKGFRTEMAEVYFRRHKPLNFQNFQTENIAAAYITSTELVRLLFGQLPPQFSRFFKSLLYFTHHPRIAEALKREGVCSVETVPTLEAALSHSSISVSDGMVFPGTSN

SEQ ID NO: 4992 - protein, 119 aa, Neisseria meningitidis; identical to SEQ ID NO: 958

SEQ ID NO: 4993 - protein, 123 aa, Neisseria meningitidis; identical to SEQ ID NO: 1024

SEQ ID NO: 4994 - protein, 658 aa, Neisseria meningitidis
MSKLKTIALTASGLSVCPGFLYAQNTSSHQIGLAIMRLNSSILDLPPTKQYFQSGSLWSELRQGFRMGEVNPELVRRHESKFIASHSYFNRVINRSRPYMYHIANEVKKRNMPAEAALLPFIESAFVTKAKSHVGASGLWQFMPATGRHYGLEKTPVYDGRHDVYAATDAALNYLQYLYGLFGDWPLAFAAYNWGEGNVGRAINRARAQGLEPTYENLRMPNETRNYVPKLLAVRNIIATPQSFGMNISDIDNKPYFQAVEPDRPLDNEAIARLAGITQSELLALNPAFNVPAFIPKSKRKLLLPVASVQTFQSNYLNAAPDSLFSWEVYTPAAKTSLSDISTATGMSIADIKRLNNLNGNLVNAGRSILVAKNGKTLQTASESVVSIDIDNTPDTYRSNMPAGTVNVGIARIRPAAAQTADITVAPLPQKTVRTEPDPLVRIAEPALATAAAQPQTEKQTAMPSETQTATLAQIVPQNDMQAADELMQLVARNNLRRQAEETISAVIGTPDTVAEHKISASPQHTVAADGKRRARLETRVAKAADGEAEISPLHASIHRVVEGDTLFNIAKRYNVSVADLIVANNIKGNTIQKGQVLRLAQAAPAQTRIEKVSYTARKGDTFKSIAARFNIHIDDIRRLNPNLNTINPGQRVKLIGS

SEQ ID NO: 4995 - protein, 245 aa, Neisseria meningitidis
MLSARYLHLHEALGLGPMWLKQAAAVLPPKNTPAPSAQARPQTVRAAPIRPSQPHNGQARLETMKALETAAVPTRKPAPETETPLPGLSDGIAPVPAASGITKLAVVSLCPPIEDAVYGQLFHGKAGILLDNILKAVGLDAAYVHKTCWVKTAAVGNPMPSEQAVANALGQIARELDGCRAPAVLFLGQAFVQPERQTMIETLCGSRPFFIIDHPARLLRQPELKARAWQVLKQLKRALRQGGGS

SEQ ID NO: 4996 - protein, 336 aa, Neisseria meningitidis
MNDNTHTLPPRRLSVAPMLDWTDRHYRYLARQITRNTWLYSEMVNAGAIVYGDKDRFLMFNEGEQPVALQLGGSDPSDLAKAAKAAEAYGYNEVNLNCGCPSPRVQKGSFGACLMNEVGLVADCLNAMQDAVGIPVTVKHRIGVDRQTEYQTVADFVGTLRDKTACKTFIVHARNAWLDGLSPKENRDVPPLKYDYVYRLKQEFPGLEIIINGGITTNEAIAGHLQHVDGVMVGREAYHNPMVMREWDRLFYGDTRSPIEYADLVQCLYTYSQAQIQAGRGTILRHIVRHSLGLMHGLKGARTWRRMLSDATLLKDNDGSLILEAWKEVERANTRE

SEQ ID NO: 4997 - protein, 159 aa, Neisseria meningitidis
MSKHTYPITPAVRVLRENGIEFEPFTYAYEEHGGTAQFARLFGKDEHLVIKTIVLQDENGNGLIVLMHGDKQISTRNLARHLGAKHIEPATPAQANKWTGYLVGGTTPFGIRTKLDIYVEQSVMDLDIIYINGGKRGFIIGIRPGDLNILNPKTIQAAV

SEQ ID NO: 4998 - protein, 264 aa, Neisseria meningitidis; identical to SEQ ID NO: 273

SEQ ID NO: 4999 - protein, 170 aa, Neisseria meningitidis; identical to SEQ ID NO: 1267

SEQ ID NO: 5000 - protein, 275 aa, Neisseria meningitidis
MKLDIYALLERALLSGDPDEKGRLTDEAFAAVQNADGAEANAPPADFPRAGRPDKPVLVAPSQLTPRKMNTTEGYAAMLHAIAHIEFNAVNLALDAAYRFRTLPFQFVRDWVKVAKEEVYHFRLMRDRLRAFGFDYGSFEAHNHLWDMAYKTAYDPLLRMALVPRVLEARGLDVTPGIRAKVEQRGDSETCGVLDIIYRDEVGHVAIGNHWYQHLCRERGLEPVALFRSLIARYDMFIFRGYVNIEAREKAGFSRFELDMLEDFEQGLKQGKKVV

SEQ ID NO: 5001 - protein, 222 aa, Neisseria meningitidis; identical to SEQ ID NO: 3618

SEQ ID NO: 5002 - protein, 75 aa, Neisseria meningitidis; identical to SEQ ID NO: 821

SEQ ID NO: 5003 - protein, 168 aa, Neisseria meningitidis
MPLLDSFKVDHTRMHAPAVRVAKTMTTPKGDTITVFDLRFCIPNKEILPEKGIHTLEHLFAGFMRDHLNGNGVEIIDISPMGCRTGFYMSLIGTPSEQQVADAWLASMQDVGNVKDQSKIPELNEYQCGTYQMHSLAEAQQIAQNVLARKVAVNKNEELTLDEGLLNA

SEQ ID NO: 5004 - protein, 384 aa, Neisseria meningitidis; identical to SEQ ID NO: 3994

SEQ ID NO: 5005 - protein, 393 aa, Neisseria meningitidis
MIIDVKVPMLSESVSEGTLLEWKKKVGEAVARDEILIDIETDKVVLEVPSPQAGVLVEIVAQDGETVVADQVLARIDTAATAAAEAPAAAPAEAAPAAAPAAAQNNAAMPAAAKLAAETGVDVNALQGSGRDGRVLKEDVQNAAAKPAAAAAPAVALPAGARPEERVPMSRLRARVAERLLASQQENAILTTFNEVNMKPIMDLRAKYKEKFEKEHGVKLGFMSFFVKAAVAALKKYPVVNASVDGKDIVYHGYFDIGIAIGSPRGLVVPILRDADQMSIADIEQAIVDYAKKAKDGKIAIEDLTGGTFSITNGGTFGSMMSTPIINPPQSAILGMHATKERAVVENGQVVVRPMMYLALSYDHRIIDGREAVLTLVAIKDALEDPARLLLDL

SEQ ID NO: 5006 - protein, 189 aa, Neisseria meningitidis
MAAGKHTKHSNRVRIIGGQCRGRKLSFTSADGLRPTPDSVREKLFNWLGQDLTGKTVLDLFGGSGALGIEAASRNAKRVLISDNNRQTVQTLQKNSRELGLGQVQIVFSDGIAYLKTVSEQFDVVFLDPPFAWQDWQILFDALKPCLNPRSFVYLEAGTLPDIPDWLTEYREGKSGQSTFELRVFQVAE

SEQ ID NO: 5007 - protein, 456 aa, Neisseria meningitidis
MPQNTLNIVILAAGKGTRMYSKMPKVLHEIGGETMLGRVIDTAAALNPQNICVVVGHGKEQVLDTVKRDVVWVEQTEQLGTGHAVKTALPHLAAEGRTLVLYGDVPLIDVETLETLLEAAGNEVGLLTDVPADPSGLGRIIRDGSGSVTAIVEEKDASAAQKAVKETNTGILVLPNAKLENWLNSLSSNNAQGEYYLTDLIAKAVADGIKVHPVRVRASHLAAGVNNKRQLAELERIFQTEQAQELLKAGVTLRDPARFDLRGRLKHGQDVVIDVNCIFEGEVEIGDNVEIGANCVIKNAKIGANSKIAPFSHLEDCEVGENNQIGPYARLRPQAKLANDVHVGNFVEIKNAAIGKGTKANHLTYIGDAEVGSKTNFGAGTIIANYDGVHKHKTVIGDEVRIGSNCVLVSPVKIGNKVTTGAGSTITRNVEDGKLALARSRQTIIDGWVRPEKNKQ

SEQ ID NO: 5008 - protein, 123 aa, Neisseria meningitidis
MIIQNEFNLYPSNMLPERFCYPEKYVRISNDTSLIPYIQPHNFHWFENYGTEGAEVAYIFRNSILPDLNLIPFASNGEWEAYFDGNDVTGNSRVIVINLDNIENHEFFNSFEDWLELAIKDTW

SEQ ID NO: 5009 - protein, 89 aa, Neisseria meningitidis; identical to SEQ ID NO: 1367

SEQ ID NO: 5010 - protein, 805 aa, Neisseria meningitidis
MVNYYSAMIKKILTTCFGLVFGFCVFGVGLVAIAILVTYPKLPSLDSLQHYQPKMPLTIYSADGEVIGMYGEQRREFTKIGDFPEVLRNAVIAAEDKRFYRHWGVDVWGVARAAVGNVVSGSVQSGASTITQQVAKNFYLSSEKTFTRKFNEVLLAYKIEQSLSKDKILELYFNQIYLGQRAYGFASAAQIYFNKNVRDLTLAEAAMLAGLPKAPSAYNPIVNPERAKLRQKYILNNMLEEKMITVQQRDQALNEELHYERFVRKIDQSALYVAEMVRQELYEKYGEDAYTQGFKVYTTVRADHQKVATEALRKALRNFDRGSSYRGAENYIDLSKSEDVEETVSQYLSGLYTVDKMVPAVVLDVTKKKNVVIQLPGGRRVTLDRRALGFAARAVNNEKMGEDRIRRGAVIRVKNNGGRWAVVQEPLLQGALVSLDAKTGAVRALVGGYDFHSKTFNRAVQAMRQPGSTFKPFVYSAALSKGMTASTVVNDAPISLPGKGPNGSVWTPKNSDGRYSGYITLRQALTASKNMVSIRILMSIGVGYAQQYIRRFGFRSSELPASLSMALGTGETTPLKVAEAYSVFANGGYRVSSHVIDKIYDRDGRLRAQMQPLVAGQNAPQAIDPRNAYIMYKIMQDVVRVGTARGAAALGRTDIAGKTGTTNDNKDAWFVGFNPDVVTAVYIGFDKPKSMGRVGYGGTIAVPVWVDYMRFALKGKQGKGMKMPEGVVSSNGEYYMKERMVTDPGLTLDNSGIAPQPSRRAKEDDGGAAEGGRQAADDEVRQDMQETPVLPSNTGSKQQQLDSLF

SEQ ID NO: 5011 - protein, 116 aa, Neisseria meningitidis
MTMLPNKVLGKYDWNVDGKTGIGAAWVVAAFILPILVWAIFMLSRMQGWLAPTKANPTWALVWLLICMPCLLIASKCLGWKGWRRVVNIFACLTVCAILSVPASLLIAFTLRDLLK

SEQ ID NO: 5012 - protein, 230 aa, Neisseria meningitidis
MTAFVHTLSDGMELPVEIKRRAKKNLIIRPAGTHTVRISVPPCFSVSALNRWLYENEAVLRQTLAKTPPPQTAENRLPEHIWFHGRQLALTAHQDTQILLMPSEILVPEGAPEKQLALLRDFLERQAHSYLIPRLERHARTTQLFPAPSSLTSAKTFWGVCRKTTGIRFNWRLVGAPEYVADYVCIHELCHLAHADHSRAFWALTRRFAPYTPEAKQWLKIHGRELFALG

SEQ ID NO: 5013 - protein, 382 aa, Neisseria meningitidis
MNTPPFVCWIFCKVIDNFGDIGVSWRLARVLHRELGWRVHLWTDDVSALRALCPDLPDVPCVHQDIHVRTWHSDAADIDTAPVPDVVIETFACDLPENVLHIIRRHKPLWLNWEYLSAEESNERLHLMPSPQEGVQKYFWFMGFSEKSGGLIRERDYCEAVRFDSGALRKRLMLPEKNAPEWLLFGYWSDVWAKWLDMWQQAGSPLTLLLAGTQIIDSLKQSGIIPQNALQNDGDVFQTASVCLVKIPFVSQQDFDKLLHLADCAVIRGEDSFVRAQLAGKPFFWHIYPQDENVHLDKLHAFWDKAHGFYTPETARAHRRLSDDLNGGEALSATQRLECWQILQQHQNGWRQGAEEWSRYLFGQPSASEKLAAFVSKHQKIR

SEQ ID NO: 5014 - protein, 428 aa, Neisseria meningitidis
MTAQHQTPLRFITAGSVDDGKSTLIGRLLYDSKALLSDQIKTLESGKSKGLKETIDFSILTDGLEAEREQGITIDVAYRYFSTAKRKFIIADTPGHEQYTRNMVTGASTASAAVVLVDASQLDFGAQPLQLLPQTKRHSAILRQLDCPHIVVAVNKMDLLDYSEDKFNAIVEAYRRLAGRLGLKDVHFVPVSALLGDNLVYPGGNMPWYRGEPLLAILENLPGADEVSRTADDFYFPVQLVVRQDADKADDFRGYQGRIERGSVAVGQTVRIEPNGLTAEVSEIITPKGEVAQAFAGEAATLRLDRDIDVSRGDLFVDKNSPLAPQKHLEATLCWFDERPLNTARKYLLKHGTQTVPAKVGEIESVLDVRTLEQEAGAESLKMNDIAKVRINLQKPVTATPYAENTAAGSFILIDEATYGTVAAGMIL

SEQ ID NO: 5015 - protein, 107 aa, Neisseria meningitidis
MIIDEKSTSDVLKQYQELGFDLTKPMIIGFFIGGSQKNLQSIESQLISYRQDFQISIEQNEFGEMWTCYCSVNIVPSLENILAIETTLFGIAQKNDCNYEGFGSYGN

SEQ ID NO: 5016 - protein, 134 aa, Neisseria meningitidis
MRKSRLSRYKQNKLMELFVAGVTARTAAELVGVNKSTAAYYFHRLRLLIYQNSPHLEMFDGEVEADESYFAERQNHINGIENFWNRAKRHLRKFNGIPKAHFELYLKGYERRFNNSEIKVQISILKQLVKSSLS

SEQ ID NO: 5017 - protein, 416 aa, Neisseria meningitidis
MPSESPSDGIARLRGTKAEKPFAPYFQTRYTCRRCFQPFDYPQPPSLRRRFACQRHCAAVNTKEHIMTVSPVALRRKTECKPHPTARYWKKCDVEALFGLPFLDLIYQAAEIHRQNFNPREIQLSTLLSIKTGGCPEDCAYCPQSAHHNTNLGKEQMMDVDEIVEKAKIAKSRGASRFCMGAAWRGPKPKDVETVSAIIKAVKGLGMETCGTFGMLEEGMAEDLKEAGLDYYNHNLDTDPDRYNDIIHTRQHEDRMDTLGKVRNAGLKVCCGGIVGMNETRAERAGLIASLANLDPQPESVPINQLVKVEGTPLADAEDLDWTEFVRTIAVARITMPQSYVRLSAGRSNMPEAMQAMCFMAGANSIFYGDKLLTTGNPDEDGDRILMEKLNLYPLQFELEGEVAEVEKASGIKVDY

SEQ ID NO: 5018 - protein, 208 aa, Neisseria meningitidis; identical to SEQ ID NO: 1121

SEQ ID NO: 5019 - protein, 280 aa, Neisseria meningitidis
MCQLLGMNCNTPTDIMFSFEGFRRRGGITDHHADGFGIGFFEGKGVRLFHDDKPSANSPVADLVRAYQIKSENVVAHIRKASQGQTSLANTHPFMREMWGGYWLFAHNGHLIDFFPEQGEFFHPVGTTDSERAFCHILNRLRTRFAARPDDDTLFDAIAGLTHEIRKFGLFNFMLSDGIALFAHASTLLHYIVRQAPFGKARLLDDDVMVDFAEVTTPSDRVAVIATLPLTRDESWSQLAVDELVMFREGNIVRHDRPENPVYMSAEEGLEIARAAGVSV

SEQ ID NO: 5020 - protein, 671 aa, Neisseria meningitidis
MMKLNPQQLEAVRYLGGPLLVLAGAGSGKTGVITQKIKHLIVNVGYLPHTVAAITFTNKAAAEMQERVAKMLPKPQTRGLTICTFHSLGMKILREEANHIGYKKNFSILDSTDSAKIIGELLGGTGKEAVFKAQHQISLWKNDLKTPEDVVQTASNIWEQQTARVYASYQETLQSYQAVDFDDLIRLPAVLLQQNSEVRNKWQRRLRYLLVDECQDTNTCQFTLMKLLTGAEGMFTAVGDDDQSIYAWRGANMENLRKMQENYPQMKVIKLEQNYRSTARILKIANKVIENNPKLFTKKLWSKLGEGEPVKVVACQNEQHEADWVVSQIVKQKLIGGDKTQYADFAVLYRGKHQARIFEEALRGARIPYRLSGGQSFFDKAEIKDVLSYVRLLANPNDDPAFLRAVTTPKRGIGDVTLGKLNTYAHEHECSLYEAAQNEEALATLNNTNRQHLQAFMDMFGSYRAKAETGEAGEFINSLLEEIDYENHLLASEEGKAGEIKWRNVGDLVSWFARKGGEDGKNIIELAQTVALMTLLEGKDEEETDAVSLSTLHAAKGLEYPYVFLVGCEEGVLPHNDSIEEGNVEEERRLMYVGITRAKRQLTLTHCVKRKKQGTWQFPEPSRFIDEMPQEDLKILGRKGGEPIVSKEEGRRNLADIIGRLDNLKKSGAAD

SEQ ID NO: 5021 - protein, 304 aa, Neisseria meningitidis
MDAVQLKSFVAVAHEGNLTQAAKRLFLSQPAVSAQIKALEEYVGTPLFRRTGKGMVLTRAGEILLPEAESLLQYKHKLEHFAKTLAGDYSEETSLGIIHPIDSAKLVALTDNIGQTAPKTRLHIQYGMSGEILSRIQHKTLHGGFILGNAAQRGIRSVFLQNLTYALICPRSQYPHLTRSLPQSLQECVWIEMSGVSGSRKHLHQFWRSNRLSPKKQILCDYPQTIIDLVAGGIGVAMVPGNKAEAAAKEGAGVAIIESCRHSMPLNFIYAEEYEDNPHVSLLLECIEKVWGVQAVQPPVVSDN

SEQ ID NO: 5022 - protein, 507 aa, Neisseria meningitidis
MTVIKQEDFIQSICDAFQFISYYHPKDYIDALYKAWQKEENPAAKDAMTQILVNSRMCAENNRPICQDTGIATVFLKVGMDVQWDADMSVEEMVNEGVRRAYTWEGNTLRASVLADPAGKRQNTKDNTPAVIHMSIVPGDKVEVTCAAKGGGSENKSKLAMLNPSDNIVDWVLKTIPTMGAGWCPPGILGIGIGGTPEKAVLMAKESLMSHIDIQELQEKAASGAELSTTEALRLELFEKVNALGIGAQGLGGLTTVLDVKILDYPTHAASKPIAMIPNCAATRHVEFELDGSGPVELTPPRVEDWPDLTYSPDNGKRVDVDKLTKEEVASWKTGDVLLLNGKILTGRDAAHKRLVDMLNKGEELPVDFTNRLIYYVGPVNPVGDEVVGPAGPTTATRMDKFTRQMLEQTDLLGMIGKSERGVATCEAIADNKAVYLMAVGGAAYLVAKAIKSSKVLAFPELGMEAIYEFEVKDMPVTVAVDSKGESIHATAPPQWQAKIGIIPVKS

SEQ ID NO: 5023 - protein, 590 aa, Neisseria meningitidis
MNKIYRIIWNSALNAWVVVSELTRNHTKRASATVETAVLATLLFATVQANATDEEDEEDLESVQRTVAVLIVNSDKEGTGEKEEVGASSNWAVYFDEKRVLKAGAITLKAGDNLKIKQSGKDFTYSLKKELKDLTSVETEKLSFGANGNKINITSDTKGLNFAKETAGTNGDPTVHLNGIGSTLTDMLLNTGATTNVTNDNVTDDEKKRAASVKDVLNAGWNIKGVKPGTTASDNVDFVRTYDTVEFLSADTKTTTVNVESKDNGKKTEVKIGAKTSVIKEKDGKLVTGKGKGENGSSTDEGEGLVTAKEVIDAVNKAGWRMKTTTANGQTGQADKFETVTSGTNVTFASGKGTTATVSKDDQGNITVMYDVNVGDALNVNQLQNSGWNLDSKAVAGSSGKVISGNVSPSKGKMDETVNINAGNNIEITRNGKNIDIATSMTPQFSSVSLGAGADAPTLSVDDKGALNVGSKDANKPVRITNVAPGVKEGDVTNVAQLKGVAQNLNNRIDNVDGNARAGIAQAIATAGLVQAYLPGKSMMAIGGGTYRGEAGYAIGYSSISDGGNWIIKGTASGNSRGHFGASASVGYQW

SEQ ID NO: 5024 - protein, 107 aa, Neisseria meningitidis
MMTESEFIRASEALFEHIEDQIDENGWDFDCRFAGNVLTIEAENGTQIIVNRHTPNQELWIAAKSGGYHFAEQNGKWLATRDGRDFYDVLNEVLSAASGEAVKIAEL

SEQ ID NO: 5025 - protein, 210 aa, Neisseria meningitidis; identical to SEQ ID NO: 48

SEQ ID NO: 5026 - protein, 301 aa, Neisseria meningitidis
MLTFQQIIFKLQTFWADKGCTVIQPFDMEVGAGTSHPATCLRALGPEPWFAAYVQPSRRPKDGRYGDNPNRLQHYYQFQVALKPAPANIQDLYLDSLRELGIDPKVHDIRFVEDDWENPTLGAWGLGWEVWLNGMEVTQFTYFQQVGGIDCTPVLGEITYGIERLAMYLQGVENVYDLVWAKTLDGNTVTYGDVYHQNEVEQSTYNFEYSDADWLLRQFNDYEAQAKRLLAEENASLALPAYELVLKAGHTFNLLDARGAISVTERATYIGRIRALSRAVAQKYVESREKLGFPLMKANAA

SEQ ID NO: 5027 - protein, 759 aa, Neisseria meningitidis
MNTPTDLKVTKRDGRLEAIDLDKIHRVVTWAAEGLENVSVSQVELKSHIQFYNGIRTDDIHETIIKAAADLISEDTPDYQYLAARLAIFHLRKIAYGEYEPPHLYDHVKKLTDAGKYDRHILEDYSREEFDELNAYIDHERDMSFSYAAVKQLEGKYLVQNRVTRQIYETPQFLYVLVAMCLFSKYPKETRLDYVKRFYDAVSTFKVSLPTPIMSGVRTPTRQFSSCVLIECDDSLDSINATTSAIVKYVSQRAGIGINAGRIRGLDSEIRGGEARHTGCIPFFKMFQAAVKSCSQGGVRGGAATLFYPLWHIEAESLLVLKNNRGVEDNRIRQLDYGVQINRLLYTRLIKGGNITLFSPNEVPGLYEAFFADQDEFERLYTKYEQDPDIRKRIIPAADLFSTLMQERAGTGRIYIQNVDHCNTHSPFDPRVAPVHQSNLCMEIALPTKPLDNINDPNGEIALCTLSAFNLGALNSLDELEGLADLTVRALDALLDYQGYPVEAARTSTMGRRSLGIGVINYAYYLAKNGVRYSDGSALGLTHRTFEAIQYYLLKASANLAKEYGACTLFNQTVYSQGKLPIDTYKKDLDAVCGEPLHYDWESLRAEIVKYGLRNSTLTALMPSETSSQIANATNGIEPPRGLVTVKASKDGILKQVVPEFETLKNAYETLWQLPGNEGYLKLVGVMQKFVDQSISANTAYDPGKFEGGKVSMKQMLKDLLTAYKYGVKTLYYHNTRDGADDTQTDIQDDGCAGGACKI

SEQ ID NO: 5028 - protein, 937 aa, Neisseria meningitidis
MSNRPTLLLVDGSSYLYRAYHAMGQNLTAPDGAPTGALYGVLNMLRRLRSEYPHDYCAVVFDAKGKNFRHQMFEEYKATRPPMPDDLRPQAEALPDLVRLTGWPVLVIGQVEADDVIGTLAKQGAEHGLRVIVSTGDKDMAQLVDERVTLVNTMSGETLDIEGVKAKFGVRPDQIRDYLALMGDKVDNVPGVEKCGPKTAVKWLEAYGSLQGVIEHASEIKGKVGENLRAALPRLPLSYDLVTIKTDVDLHAELSDGIESLRCTTPKWAQLVVDFKRWGFRTWLKEAESNMNTGSTDDLFGSDSIGEQAALNAEMPFEKQAEKATAPERLDYQAVTTEAQFAALLDKLSRADTIGIDTETTSLDAMNASLVGISIAFQAGEAVYIPVGHSLTAAPEQLDLQDVLGRLKPHLGNPALKKIGQNLKYDQHVFANYGIALNGIAGDAMLASYIIESHLGHGLDELSERWLGLETITYESLCGKGAKQISFADVAIGQATEYAAQDADFALRLEAHLRAQMDAKQLEMYEKMELPVAQVLFEMERNGVQIDRAELARQSAELGAELMKLEQEAYAAAGQPFNLNSPKQLQEILFDKMGIPTKGLKKTAKGGISTNEAVLEQLAPDYPLPKIILQNRSLAKLKSTYTDKLPEMISPRDNRVHTTYAQAVAITGRLASNNPNLQNIPIRTAEGRRVRRAFTAPQGSVIVSADYSQIELRIMAHLSGDKTLIAAFQNGEDVHRRTAAEVFGTAPENVSPEQRRYAKTINFGLIYGMGQYGLAKSLGIDNLSAKNFIDRYFARYPGVAEYMQRTKEQAAAQGFVETLFGRRLYLPDIRNKNANARAGAERAAINAPMQGTASDLIKRAMIDVSRWLSECEASLWDCLKSKLIMQVHDELVLEVPEAELDFVKEKLPQIMAKVDGGLLDVPLVAEVGVGENWEEAH

SEQ ID NO: 5029 - protein, 178 aa, Neisseria meningitidis
MTKAFWFDISNPSFGNAGGLRTAKLDSKDADYTGKRVQTASERHAVTRGLCRLDGEFRQAFALCEGDIVFFGGQDGSRCREYLFRLRRRRRLWGRCAIRLRNLQRCRCRERFGVRDCGCCRFGNSRGRGFGGFGFMGGFRNGSVFRRHNSCSDAVNSRSSGICSRQNWLHRASMPNLL

SEQ ID NO: 5030 - protein, 320 aa, Neisseria meningitidis
MPAKFQQETLKSRFAQAKVLVVGDVMLDRYWFGDVSRISPEAPVPVAKIGRIDQRAGGAANVARNIASLGGRAGLLSVTGDDEAADALDALMVQDGVASYLMRDKQIATTVKLRVVARNQQLIRLDFEEHPNREVLEQIKRKYREILPEYDAIIFSDYGKGGLSHISDMIDWAKHEGKTVLIDPKGDDYEKYAGATLITPNRAELKEVVGSWKNEGELTEKAQNLHRHLDLTAILLTRSEEGMTLFSEGEPIYQPTRAQEVYDVSGAGDTVIAGMGLGLAAGCTMPEAMHLANTAAGVVVAKLGTAVCSFAELVEALDGQ

SEQ ID NO: 5031 - protein, 896 aa, Neisseria meningitidis
MSDNRLDTARHHSLFLARQLDNGKLKPEIFLPMLDKVLTEADFQAFADWDKIRAEENEEELARQLRELRRYVVSQIIVRDINRISDLNEVTRTITLFADFAVNTALDFAYAYYRDMYGTPIGRDTKSPQHLSVVAMGKAGGYELNVSSDIDLIFVYPESGDTDGRRERGNQEFFTKVGQKLIALLNDITADGQVFRVDMRLRPDGDSGALVLSETALEQYLITQGREWERYAWCKGRVVTPYPNDIKSLVRPFVFRKYLDYSAYEAMRNLHRQIRSEVSKKGMADNIKLGAGGIREVEFIAQIFQMIRGGQMRALQLKGTQETLKKLAELGIMPSENVETLLAAYRFLRDVEHRLQYWDDQQTQTLPTSPEQQQLLAESMGFDSYTAFSDDLNVHRNKVNRLFNEILSEPEEQTQSNSEWQWVWQDKPDEEERQGRLKEHGFDAETIATRLDQIRHSHKYRHLSAHAQPRFDAVVPLFVQAAAAQSNPTDTLMRLLDFLENISRRSAYLAFLNEHPQTLAQLAQIMGQSSWVAAYLNKYPILLDELISAQLLDTAFDWQALAAALSDDLKACGGDTEAQMDTLRHFQHAQVFRLAVQDLAGLWTVESLSDQLSALADTILAAALLCAWADMPKKHRDTPQFAVVGYGKLGGKELGYASDLDLVYLYDDPHPEAGDVYSRLARRLTNWLSTATGAGSLYETDLRLRPNGDAGFLAHSIAAFEKYQRENAWTWEHQSLTRARFICGTPEIQTAFDRIRTEILTAERDQTALADEIIEMREKMFPTHPPADSNVKYARGGVVDVEFIVQYLILAHARKYPQLLDNYGNIALLNIATDCGLIDKTLAEQSRTAYRFYRRQQHNTKLRDAEKTEVSGELLAHYGNVRKLWREVFGEEAATA

SEQ ID NO: 5032 - protein, 242 aa, Neisseria meningitidis
MIKLTAQQIFDKLLDEEKILSANGQIRFFLGDVDIIVKQKDVVGNIIQEWLGGLRKREIEFDVSTNTQMPPDFFLNKKDRSRELLEVKAFNRNAGPGFDIADFKMYSDEIIHKPYMLDVDYLIFGYDMDDNGNVTIKDLWLKKVWQITRSMDGWAINLQVKKGVVHKIRPGVWYSINKKNMPMFECLEDFVSAIEETVYQNPATRHNASLWKKKFEEAYKKHYNRSISIPRWHEIAHKYKKK

SEQ ID NO: 5033 - protein, 162 aa, Neisseria meningitidis
MMSNKMEQKGFTLIEMMIVVAILGIISVIAIPSYQSYIEKGYQSQLYTEMVGINNISKQFILKNPLDDNQTIKSKLEIFVSGYKMNPKIAEKYNVSVHFVNKEKPRAYSLVGVPKTGTGYTLSVWMNSVGDGYKCRDKASAEAYSETLSADAGCEAFSNRKK

SEQ ID NO: 5034 - protein, 123 aa, Neisseria meningitidis
MKLLFILLVLFVAVEHFYIAWLEMTQIPSEKAAETFKLPYEFMEQKRVQTLFSNQGLYNGFLGIGLVWSRFAAPDNAVYGATILFLGFVLIAAAWGAFSSGNKGILVKQGLPAFLAAAAVLAV

SEQ ID NO: 5035 - protein, 308 aa, Neisseria meningitidis
MSFAFFFPGQGSQSLGMMNGFAEHAIVKNTFAEASAILGQDLWAMINGSDAEIIGQTVNTQPIMLAAGIATYRAYLEAGGKAPSVVAGHSLGEYTALVAAGSLDFADAVKLVRLRAELMQSAVPQGVGAMAAILGLEDEQVKAICAEAAQGEVVEAVNFNSPGQVVIAGNTAAVERAMLAAKEAGAKRALPLPVSVPSHCSLMKPAADKLAEALKTVEIKQPQIRVIHNADVAAYDDADKIKDALVRQLYSPVRWTETVNALVSDGIAESAECGPGKVLAGLAKRINKAAACSALTDAGQVAAFIEAH

SEQ ID NO: 5036 - protein, 230 aa, Neisseria meningitidis
MSNNLTLADVPDFSDWRLAPLWTLEQAALLWAGINPAFSTFEDIWKEHPRKQAWAKIALQAFLGGIVLKTLPVYELYLLDAGGWAYCDNQKTAIFRMNDIAPKDTTIMQDVLIGWTSEERVFSLRQTIQAEEQARREAAKAEAEKQEVRALPYCVIPEFETPEFETACLVVRDFWNRQAVGVAPPKAIIIQEFIKNTFKNITGVEPKEAAIRRIDSLTRPPLFKNQSKKQ

SEQ ID NO: 5037 - protein, 147 aa, Neisseria meningitidis
YISAQQTLQDINELGNSSPEAQLAAASLLQDSAFAVKDGINSAKQWADAHPNITATAQTALAVAEVAGTVWRGKKVELNPTKWDWVKNTGYKKPAARPMQTLDGEIAGRNKPAKQATPNGKAGVSTQQSLQNSLVPQKNYTHTTYNG

SEQ ID NO: 5038 - protein, 64 aa, Neisseria meningitidis; identical to SEQ ID NO: 631

SEQ ID NO: 5039 - protein, 394 aa, Neisseria meningitidis; identical to SEQ ID NO: 277

SEQ ID NO: 5040 - protein, 215 aa, Neisseria meningitidis; identical to SEQ ID NO: 1509

SEQ ID NO: 5041 - protein, 459 aa, Neisseria meningitidis
MLLDLNRFSFSVFLKEVRLLTALALPMLLAQVAQVGIGFVDTVMAGGAGKEDLAAVALGSSAFATVYITFMGIMAALNPMIAQLYGAGKTDEVGETGRQGIWFGLFLGVFGMVLMWAAITPFRNWLTLSDYVEGTMAQYMLFTSLAMPAAMVHRALHAYASSLNRPRLIMLVSFAAFVLNVPLNYIFVYGKFGMPALGGAGCGLATMAVFWFSALALWIYIAKENFFRPFGLTAKFGKPDWAVFKQIWKIGAPIGLSYFLEASAFSFIVFLIAPFGEDYVAAQQVGISLSGILYMIPQSVGSAGTVRISFSLGRREFSRARYISGVSLVLGWMLAVITVLSLVLFRSPLVSMYNNDPAVLSIAATVLLFAGLFQPADFTQCIASYALRGYKVTKVPMFIHAAAFWGCGLLPGYLLAYRFDMGIYGFWTALIASLTIAAIALVWCLELCSREMVRSHKVV

SEQ ID NO: 5042 - protein, 310 aa, Neisseria meningitidis
MQRSSAEESACANAFIAGIRWGKTCGFYHDSCVVGRRRRFGGTMCAVCSLKVFLYFWSMETHSGCFLRKTVMKDDVLKQQAHAAIQKRLGYAFRDISLLRQALTHRSHHAKHNERFEFVGDSILNYTVARMLFDTFPKLTEGELSRLRASLVNEGVLAEMAAEMNVGDGLYLGAGELKSGGFRRPSILADAMEAMFAAVSFDADFNTAEKVVRHLFAERVRRVDFQNQAKDGKTALQEALQARRFALPKYRIEEQIGHANDSMFVVSCDLGELGFVCRAKGTSRKAAEQEAAKEALKWLEEKLPLKKKKK

SEQ ID NO: 5043 - protein, 318 aa, Neisseria meningitidis; identical to SEQ ID NO: 46

SEQ ID NO: 5044 - protein, 107 aa, Neisseria meningitidis; identical to SEQ ID NO: 2314

SEQ ID NO: 5045 - protein, 179 aa, Neisseria meningitidis; identical to SEQ ID NO: 403

SEQ ID NO: 5046 - protein, 477 aa, Neisseria meningitidis
MPARNRWMLLLPLLASAAYAEETPREPDLRSRPEFRLHEAEVKPIDREKVPGQVREKGKVLQIDGETLLKNPELLSRAMYSAVVSNNIAGIRVILPIYLQQAQQDKMLALYAQGILAQTDGRVKEAISHYRELIAAQPDAPAVRMRLAAALFDNRQNEAAADQFDRLKAENLPPQLMEQVELYRKALRERDAWKVNGGFSVTREHNINQAPKRQQYGKWTFPKQVDGTAVNYRLGAEKKWSLKNGWYTTAGGDVSGRVYPGNKKFNDMTAGVSGGIGFADRRKDAGLAVFHERRTYGNDAYSYTNGARLYFNRWQTPKWQTLSSAEWGRLKNTRRARSDNTHLQISNSLVFYRNARQYWMGGLDFYRERNPADRGDNFNRYGLRFAWGQEWGGSGLSSLLRLGAAKRHYEKPGFFSGFKGERRRDKELNTSLSLWHRALHFKGITPRLTLSHRETRSNDVFNEYEKNRAFVEFNKTF

SEQ ID NO: 5047 - protein, 185 aa, Neisseria meningitidis
MNIIDTALPDVKILKPQVFTDGRGFFMETFRDGWFKENIADRTFVQENHSKSGKGVLRGLHYQTENTQGKLVRVVVGEVFDVAVDMREGSPTFGKWAGATLSAQNQCQLWIPEGFAHGFCVLGDAAEVVYKCTDYYKPEAEQVLIWNDPTVGIGWPLQTAPLLSPKDLAGKAWAQAEKLRLTLSR

SEQ ID NO: 5048 - protein, 594 aa, Neisseria meningitidis
MELMTVLLPLAALVSGVLFTWLLMKGRFQGEFAGLNAHLAEKAARCDFVEQAHGKTVSELAVLDGKYRHLQDENYALGNRFSAAEKQIAYLQEKEAESAHLKQSYIDLQEKAQGLAVENERLATQLGQERKAFADQYALERQIRQRVETDLEESRQTVRDVQNDLADVGNRFAAAEKQIAHLQEKEAEAERLRQSHTELQEKAQGLAVENERLATQIEQERLASEEKLSLLGEARKSLSDQFQNLANTILEEKSRRFTEQNREQLHQVLNPLNERIHGFGELVKQTYDKESRERLTLENELKRLQGLNAQLHSEAKALTNALTGTQNKVQGNWGEMILETVLENSGLQKGREYVVQAASVRKEEDGGTRRLQPDVLVNLPDNKQIVIDSKVSLTAYVRYTQAADADTAARELAAHVASIRAHMKGLSLKDYTDLEGVNTLDFVFMFIPVEPAYLLALQNDAGLFQECFDKRIMLVGPSTLLATLRTVANIWRNEQQNQNALAIADEGGKLYDKFVGFVQTLESVGKGIDQAQNSFQTAFKQLAEGRGNLVGRAEKLRLLGVKANKQLARDLTERANETTALSESLEYVAEDEAV

SEQ ID NO: 5049 - protein, 225 aa, Neisseria meningitidis; identical to SEQ ID NO: 1002

SEQ ID NO: 5050 - protein, 384 aa, Neisseria meningitidis
MKFIDEAKIEVAAGKGGNGATSFRREKFVPRGGPDGGDGGKGGSVWAEADENTNTLVEYRFVKRYQAKNGEKGHGSDRYGAGADDIVLKMPVGTLIRDLDTDEIVADLTYHGQRVCLAKGGKGGLGNIHFKSSVNRAPKQSTPGEEGETRSLQLELKVLADVGLLGMPNVGKSTLITAVSAARPKIANYPFTTLHPNLGVVRIDENHSFVMADIPGLIEGAAEGAGLGHRFLKHLSRTGLLLHVVDLAPFDETVNPAEEALAIINELRKYDEELYGKPRWLVLNKLDMLDEEEAQTRTAAFLEAVGWDYPKPDDRFQFDMETPRLFQISALTHQGTQELVHQINQYLTEKKRIEAEKAEAEKAAANVEIAEQQPKTDTGVFKPE

SEQ ID NO: 5051 - protein, 83 aa, Neisseria meningitidis
MGSIEQRLEYLEEANDVLRMQNHVLSTAFKALIRALPAETAEVAVESIQLAFEDALAELSYEDSPHTDLFHDVTYAFFREKER

SEQ ID NO: 5052 - protein, 153 aa, Neisseria meningitidis
MSDFPPVSRFLADEAATLDLGAAWSSRLNAPLVIYLEGDLGAGKTTLTRGILRGLGHQGAVKSPTYAIVESYPLERFTLHHFDLYRFSFPEEWEDAGLDELFAANSVCLIEWPQQGGEFTPPADITATLTHDGGGRKCLLTAHTERGRESLPL

SEQ ID NO: 5053 - protein, 249 aa, Neisseria meningitidis
MLIQAVTIFPEMFDSITRYGVTGRANRQGIWQFEAVNPRKFADNRLGYIDDRPFGGGPGMIMMAPPLHAAIEHAKAQSSQAAKVIYLSPQGKPLTHPKAAELAELPHLILLCGRYEGIDERLLQTSVDEEISIGDFVVSGGELPAMMLMDAVLRLVPGVLGDMQSAEQDSFSSGILDCPHYTKPLEFQGMAVPEVLRSGNHGLIAEWRLEQSLRRTLERRPDLLEKRVLIPKESRLLETIRQEQREIQS

SEQ ID NO: 5054 - protein, 166 aa, Neisseria meningitidis; identical to SEQ ID NO: 1240

SEQ ID NO: 5055 - protein, 562 aa, Neisseria meningitidis
MTKQKLELTWIGKHKRPKLEARILLEDPEKSYHAKVRSESVAFDNRLIFGDNLLALKALEQEFTSKVKCVFIDPPYNTGSAFAHYDDGLEHSIWLGLMRDRLEIIKRLLSDDGSLWITIDDNEAHYLKVLCDEVFGRGNFIANIVWNHRKSVQSDIVISLSHNHLLVFAKSKDKVTLNRLQLVDAEKYSNPDNDPRGLWYATPFDAPNIRPNLTYPITNPNTGEEYLPPKGRCWRTTQEEYLKALADNRIVFGKTGKSKPQMKRFLSEAQSKGSSVKTWWDDAGTATEGTKELQKMNFDFDTPKPERLLEKVLQIATNPGDLVLDSFAGSGTTGAVAHKMGRRWIMVELGEHCHTHIIPRLQKVIDGKDQGGISKAVNWQGGGGFRYFRLAPTLIVNDKWGNQIINPDYNPEMLAEALAKLEGFTYMPSENLWWQHGYSSENDFIYVTTQSLSAEQLQVLSDEVGAGRSLLICCSAWRGITADQAAERFPNLSLKKIPKMILKRCEWGHDDYSLNVANLPMAEEEPEPRPSENQPAAKTKSVKRKSAVENQGGLFDGEDSDG

SEQ ID NO: 5056 - protein, 58 aa, Neisseria meningitidis
MVDEKLAEYRKRAEAKRTTKKVSFNLETEKDILDVANNIDFSQWVKEKLREKLKKELD

SEQ ID NO: 5057 - protein, 380 aa, Neisseria meningitidis
MKVFKQQLEQLGAQNQYRSIPDLIHQGRYITRENCKMLNMSSNDYLGLASDENLRRSFLQQYGGNFPSFTSSSSRLLTGNFPIYTDLEELVAQRFQRESALLFNSGYHANLGILPALTTTKSLILADKFVHASMIDGIRLSRCAFSRYRHNDYEHLKNLLEKNVGKFDRTFIVTESVFSMDGDVADLKQLVQLKKQFPNTYLYVDEAHAIGVYGQNGLGIAERDNLIAEIDLLVGTFGKALASVGAYAVCNQVLKECLINQMRPLIFSTALPPFNVAWTYFIFERLPQFSKERSHLEQLSAFLRREVAHRTQIMPSQTCIVPYILGGNEATLAKAEYLQRQGYYCLPIRPPTVPKGTSRIRLSLTADMTMDEVRQFAACL

SEQ ID NO: 5058 - protein, 212 aa, Neisseria meningitidis
MKKINVAPENPQYRIVEIFESLQGEGWNTGMPAVFVRLGKCNLACGWCDTDYLTFGMMSLSDILGCLKTYAARNIIITGGEPTIQPHLDMLLDMLKAEGYFLCIETNGLNPAPPQIDYVATSPKACYAAKYEKSCIETADEVRIVADGDVVAFCENMERKIRAHHYYLSPCEQNGAMNIYDTIRQIGILNSRPDAPVHWQLSVQTHKWAGIE

SEQ ID NO: 5059 - protein, 199 aa, Neisseria meningitidis; identical to SEQ ID NO: 2856

SEQ ID NO: 5060 - protein, 313 aa, Neisseria meningitidis
MDTKANMDIETFLAGERAADGYRCGFVAIVGRPNVGKSTLMNHLIGQKISITSKKAQTTRNRVTGIYTDDTAQFVFVDTPGFQTDHRNALNDRLNQNVTEALGGVDAVVFVVEAMRFTDADRVVLKQLPKHTPVILVVNKIDKDKAKDRYALEAFVAQVRAEFEFAAAEAVSAKHGLRIANLLELIKPYLPESVPMYPEDMVTDKSARFLAMEIVREKLFRYLGEELPYAMNVEVEQFEEEDGLNRIYIAVLVDKESQKAILIGKGGERLKKISTEARLDMEKLFDTKVFLKVWVKVKSGWADDIRFLRELGL

SEQ ID NO: 5061 - protein, 56 aa, Neisseria meningitidis; identical to SEQ ID NO: 2179

SEQ ID NO: 5062 - protein, 165 aa, Neisseria meningitidis
MTALTLPEDIRQQEPSALLYTLVSAYLEHTAQTGDESLSCLSDDQHTLTAFCYLDSQVEEGGFVQLIASGYGEYIFRNPLADSLRRWKIKAVPKVLDKAKALYEQHGETIETLADGGADIESLRKQFPDFEEWDGAYYEAAEQDLPLLAEHIQSNWETFAHIGQA

SEQ ID NO: 5063 - protein, 436 aa, Neisseria meningitidis; identical to SEQ ID NO: 3761

SEQ ID NO: 5064 - protein, 313 aa, Neisseria meningitidis
MKTLLLLIPLVLTACGTLTGIPAHGGGKRFAIEQELVAASSRAAVKEMDLSALKGRKAALYVSVMGDQGSGNISGGRYSIDALIRGGYHNNPESATQYSYPAYDTTATTKSDALSSVTTSTSLLNAPAAALTKNSGRKGERSAGLSVNGTGDYRNETLLANPRDVSFLTNLIQTVFYLRGIEVVPPEYADTDVFVTVDVFGTVRSRTELHLYNAETLKAQTKLEYFAVDRDSRKLLIAPKTAAYESQYQEQYALWMGPYSVGKTVKASDRLMVDFSDITPYGDTTAQNRPDFKQNNGKNPDVGNEVIRRRKGG

SEQ ID NO: 5065 - protein, 333 aa, Neisseria meningitidis
MLAEEVFGFGIYKESKGSGGRFYERCWLMGSEDVLYGRVHFGGQNNTIFFELTGTGCGVAKEGWESRLFAFLTNAIRPKITRVDIAKDFFNCEYSPNQAREDRNKGMFTCHHVKPKGECLGSDWEEDDEAKMTKGKTYGIGSRESSKYVRVYEKGKQLGDKTSTWTRFEIEFKAKDIVIPFEVLQNPGEYFGGAYPICERFVQKATRIHAVKEDKVISADRYLEWVKKQFGRAANGLKFIFPELDKAKLFELIEPSHHKLPKSLAPEAYDCAFLKAQAIHEQPAFKPYKDPYYMYEYYENLEKQLEQQKHVNNEESYNNFIYDKFARLPISWA

SEQ ID NO: 5066 - protein, 318 aa, Neisseria meningitidis
MKEFDFIKRYLQTGTDNDVVLGIGDDAAIVRPREGFDLCFSADMLLKDRHFFANVKPEDLAWKVLAVNVSDMAAMGAIPRWVLLSAALPELDEVWLKRFCGSFFGLAKKFGVTLIGGDTTKGDMAFNVTIIGELPKGRALRRDAAVAGDDIWVSGRVGMAAAALNCRLKRCVLPDDVFAECEQKLLRPEPRVGLGLALLPFARAAQDVSDGLAQDLGHILTASGVGAEIWADSLPSLSVLKDILPRAQWLSYTLAGGDDYELVFTAPESCRSRVLDAAERCGVPVTRIGKINGGCRLKVLDAGGRELELHSLGFDHFG

SEQ ID NO: 5067 - protein, 282 aa, Neisseria meningitidis
MSAANRLPRLNGNNQQTGLHRPAQSFDYWKKGKNMSTQDLSGKIALVTGASRGIGAAIADTLAAAGAKVIGTATSESGAAAISERLAQWGGEGRVLNSAEPETVENLIADIEKTFGKLDILVNNAGITRDNLLMRMKEEEWDDIMQVNLKSVFRASKAVLRGMMKQRAGRIINITSVVGVMGNAGQTNYAAAKAGLIGFSKSMAREVGSRGITVNCVAPGFIDTDMTRALPEETRQTFTAQTALGRFGDAQDIADAVLFLASDQAKYITGQTLHVNGGMLMP

SEQ ID NO: 5068 - protein, 201 aa, Neisseria meningitidis; identical to SEQ ID NO: 3643

SEQ ID NO: 5069 - protein, 371 aa, Neisseria meningitidis
MKVGFVGWRGMVGSVLMQRMKEENDFAHIPEAFFFTTSNVGGAAPDFGQAAKTLLDANDVAELAKMDIIVTCQGGDYTKSVFQALRDSGWNGYWVDAASSLRMKDDAIIVLDPVNRNVIDNGLKNGVKNYIGGNCTVSLMLMALGGLFQNDLVEWATSMTYQAASGAGAKNMRELISGMGAVHAQVADELADPAGSILDIDRKVSDFLRSEDYPKANFGVPLAGSLIPWIDVDLGNGQSKEEWKGGVETNKILGRSDNPTVIDGLCVRVGAMRCHSQAITLKLKKDLPVSEIETILAGANDWVKVIPNEKEASIHELTPAKVTGTLSVPVGRIRKLGMGGEYISAFTVGDQLLWGAAEPLRRVLRIVLGSL

SEQ ID NO: 5070 - protein, 485 aa, Neisseria meningitidis; identical to SEQ ID NO: 2552

SEQ ID NO: 5071 - protein, 252 aa, Neisseria meningitidis
MNPKTPPDHTEDAVRLSKRMAQLGLCSRREADGYIEQGWVTVNGKTAVLGQKVSPADRIELNKKAHEQQAARITILLNKPVGYVSAQAEKGYKSAAELITSENRWESDTSRIRFDPKHKIGLAPAGRLDIDSVGLLVLTQDGRIAKQLIGENSGSEKEYLVRVRGKLDEKGLALLNHGLSLDGEKLRPAQVEWQNEDQLRFVLKQGKKRQIRRMCELVGLRVVGLKRIRMGKVKLGRLPLGKWRYLAPGESF

SEQ ID NO: 5072 - protein, 794 aa, Neisseria meningitidis
MADNYVIWFENLRMTDVERVGGKNASLGEMISQLTEKGVRVPGGFATTADAYRAFLAHNGLSERISAALAKLDVEDVAELARVGKEIRQWILDTPFPEQLDAEIEAAWNKMVADAGGADISVAVRSSATAEDLPDASFAGQQETFLNINGLENVKEAMHHVFASLYNDRAISYRVHKGFEHDIVALSAGVQRMVRSDSGASGVMFTLDTESGYDQVVFVTSSYGLGENVVQGAVNPDEFYVFKPTLKAGKPAILRKTMGSKHIKMIFTDKAEAGKSVTNVDVPEEDRNRFSITDEEITELAHYALTIEKHYGRPMDIEWGRDGLDGKLYILQARPETVKSQEEGSRNLRRFAINGDKTVLCEGRAIGQKVGQGKVRLIKDASEMDSVEAGDVLVTDMTDPDWEPVMKRASAIVTNRGGRTCHAAIIARELGIPAVVGCGNATELLKNGQEVTVSCAEGDTGFIYAGLLDVQITDVALDNMPKAPVKVMMNVGNPELAFSFANLPSEGIGLARMEFIINRQIGIHPKALLEFDKQDDELKAEITRRIAGYASPVDFYVDKIAEGVATLAASVYPRKTIVRMSDFKSNEYANLVGGNVYEPHEENPMLGFRGAARYVADNFKDCFALECKALKRVRDEMGLTNVEIMIPFVRTLGEAEAVVKALKENGLERGKNGLRLIMMCELPSNAVLAEQFLQYFDGFSIGSNDMTQLTLGLDRDSGLVSESFDERNPAVKVMLHLAISACRKQNKYVGICGQGPSDHPDFAKWLVEEGIESVSLNPDTVIETWLYLANELNK

SEQ ID NO: 5073 - protein, 437 aa, Neisseria meningitidis
MLTFIGLLIIGVIVWLLLTEKVSPIIALILVPLFGALLAGFDVSQLKEFYSGGTKSVMQIVIMFMFSILFFGIMNDVGLFRPMIGGLIKLTRGNIVAVSVGTVLVSVVAQLDGAGATTFLLVVPALLPLYKRLHMNPYLLFLLLTSSAGLINLLPWGGPTGRVASVLGADVGELYKPLLTVQIIGVVFILALSLLLGVREKRRIVRELGALPAVADLIKPVPLSEEEQKLARPKLFWWNVLLFLAAMSLLFSGIFPPGYVFMLAATAALLLNYRSPQEQMERIYAHAGGAVMMASIILAAGTFLGILKGAGMLDAISKDLVHILPDALLPYLHIAIGVLGIPLELVLSTDAYYFGLFPIVEQITSQAGVAPEAAGYAMLIGSIVGTFVTPLSPALWMGLGLAKLSMGKHIRYSFFWAWGLSLAILASSIAAGIVPLP

SEQ ID NO: 5074 - protein, 587 aa, Neisseria meningitidis
MGFPVRKFDAVIVGGGGAGLRAALQLSKSGLNCAVLSKVFPTRSHTVAAQGGISASLGNVQEDRWDWHMYDTVKGSDWLGDQDAIEFMCRAAPEAVIELEHMGMPFDRVESGKIYQRPFGGHTAEHGKRAVERACAVADRTGHAMLHTLYQQNVRANTQFFVEWTAQDLIRDENGDVVGVTAMEMETGEVYIFHAKAVMFATGGGGRIYASSTNAYMNTGDGLGICARAGIPLEDMEFWQFHPTGVAGAGVLITEGVRGEGGILLNADGERFMERYAPTVKDLASRDVVSRAMAMEIYEGRGCGKNKDHVLLKIDHIGAEKIMEKLPGIREISIQFAGIDPIKDPIPVVPTTHYMMGGIPTNYHGEVVVPQGDEYEVPVKGLYAAGECACASVHGANRLGTNSLLDLVVFGKAAGDSMIKFIKEQSDWKPLPANAGELTRQRIERLDNQTDGENVDALRRELQRSVQLHAGVFRTDEILSKGVREVMAIAERVKRTEIKDKSKVWNTARIEALELDNLIEVAKATLVSAEARKESRGAHASDDHPERDDENWMKHTLYHSDTNTLSYKPVHTKPLSVEYIKPAKRVY

SEQ ID NO: 5075 - protein, 368 aa, Neisseria meningitidis
MSLYPIYNFSAGPAVLPEAVLETARQEMLDYNGTGFPVMAMSHRSEMFLSILHHAEQDLRQLLKVPDNYKILFLQGGATTQFNMAAMNLAHGFRTADAVVTGNWSRIAYEQMSRLTDTEIRLAAHGGEQFDYLDLPPVETWDVAPDSAFVHFAVNETVNGLQYREVPRLSEGMPPLVCDMSSEILSREFDVADYGLIYAGAQKNIGPAGVTVVIVREDLLERCPNDIPDVFNYRSHLNREGMYNTPSTYAIYMSGLVFRWLQAQGGVKKIEAVNRLKAQTLYETIDGSGGFYINRIRPNARSKMNVVFQTGDEELDRRFVLEAELQGLCLLKGYKTVGGMRASIYNAMPLEGVRALADFMRDFQRRYG

SEQ ID NO: 5076 - protein, 240 aa, Neisseria meningitidis
MPETGFRAFLRQMPSETTKQRFRRHPFQKRTIMKNIVILISGRGSNMQAIVNAAIPNVRIAAVLSNSETAAGLQWAAERGIPTGSLNHKNFTSRLAFDTAMMEKIDAYQPDLVVLAGFMRILTPEFCAHYEGRLMNIHPSILPSFTGLHTHERALEAGCRVAGCTIHFVTAELDCGPIVSQGIVPILDGDTADDVAARVLAVEHKLYPKAVADFAAGRLIIEGNRVRNSENADAARFLTA

SEQ ID NO: 5077 - protein, 418 aa, Neisseria meningitidis
MKVLVLGAGVAGVSSAWYLAEAGHEVTVIDRAEGVAMETSFANAGQLSYGYTTPWAAPGIPTKALKWLFKSHPPLLFRPDGSLYQIEWLWRMLQNCTAAHYQTNKERMVRISEYSREMFRRFEAQTGMNFEGRKKGTLQIFRQAKEVEAAEQDIAVLERYGVPYRRLKPEECAEFEPALARVTAKIAGGLHLPADATGDCRLFTENLYKLCQEKGVRFHFNQTISRIDHNGLRIKTVETETGRFEADAVVCALGCFSRTVLAQLDLNLPIYPVKGYSLTLPVTNSDGAPVSTVLDESYKVAITRFDNRIRVGGMAELSGYEIKLPEKRRETLALVVNDLFPEGGDLSQASFWSGLRPMTPDSTPLIGRTRFDNLFLNTGHGTLGWTMSLGSAKLTADIVSGKDTEIRSDDLSLSRYQA

SEQ ID NO: 5078 - protein, 355 aa, Neisseria meningitidis
MGGKTFMLMAGGTGGHIFPALAVADSLRARGHHVIWLGSKDSMEERIVPQYGIRLETLAIKGVRGNGIKRKLMLPVTLYQTVREAQRIIRKHRVECVIGFGGFVTFPGGLAAKLLGVPIVIHEQNAVAGLSNRHLSRWAKRVLYAFPKAFSHEGGLVGNPVRADISNLPVPAERFEGREGRLKILVVGGSLGADVLNKTVPQALALLPDNARPQMYHQSGRGKLGSLQADYDALGVQAECVEFITDMVSAYRDADLVICRAGALTIAELTAAGLGALLVPYPHAVDDHQTANARFMVQAEAGLLLPQTQLTAEKLAEILGSLNREKCLKWAENARTLALPHSADDVAEAAIACAA

SEQ ID NO: 5079 - protein, 742 aa, Neisseria meningitidis
MRSAVLFIYFFLLNIFLFQPAVIHIQSNYILFMSIVSAPLPALSALIILAHYHGIAANPVDIQHEFCTSAQSDLNETQWLLAAKSLGLKAKVVRQPIKRLAMATLPALVWCDDGNHFILAKTDGEGEHAQFLIQDLVTNKSAVLSFAEFSNRYSGKLILVASRASVLGSLAKFDFTWFIPAVIKYRRLFFEVLVVSVVLQLFALITPLFFQVVMDKVLVHRGFSTLDVVSVALLVVSLFEIVLGGLRTYLFAHTTSRIDVELGARLFRHLLSLPLSYFEHRRVGDTVARVRELEQIRNFLTGQALTSVLDLAFSFIFLAVMWYYSSTLTWVVLASLPAYAFWSAFISPILRTRLNDKFARNADNQSFLVESITAVGTVKAMAVEPQMTQRWDNQLAAYVASGFRVTKLAVVGQQGVQLIQKLVTVATLWIGARLVIEGKLTVGQLIAFNMLSGQVAAPVIRLAQLWQDFQQVGISVARLGDILNAPTENASSHLALPDIRGEITFEHVDFRYKADGRLILQDLNLRIRAGEVLGIVGRSGSGKSTLTKLVQRLYVPEQGRVLVDGNDLALAAPAWLRRQVGVVLQENVLLNRSIRDNIALTDTGMPLERIIEAAKLAGAHEFIMELPEGYGTVVGEQGAGLSGGQRQRIAIARALITNPRILIFDEATSALDYESERAIMQNMQAICANRTVLIIAHRLSTVKTAHRIIAMDKGRIVEAGTQQELLAKPNGYYRYLYDLQNG

SEQ ID NO: 5080 - protein, 427 aa, Neisseria meningitidis; identical to SEQ ID NO: 146

SEQ ID NO: 5081 - protein, 451 aa, Neisseria meningitidis
MSIQSGEILETVKMVADQNFDVRTITIGIDLHDCISSDINVLNQNIYNKITTVGKDLVATAKHLSAKYGVPIVNQRISVTPIAQIAAATKADSYVSVAQTLDKAAKAIGVSFIGGFSALVQKGMSPSDEVLIRSIPEAMKTTDIVCSSINVGSTRAGINMDAVKLAGETIKRTAEITPEGFGCAKIVVFCNAVEDNPFMAGAFHGSGEADAVINVGVSGPGVVKAALENSDATTLTEVAEVVKKTAFKITRVGELIGREASKMLNIPFGILDLSLAPTPAVGDSVARILEEMGLSVCGTHGTTAALALLNDAVKKGGMMASSAVGGLSGAFIPVSEDEGMIAAAEAGVLTLDKLEAMTAVCSVGLDMIAVPGDTPAHTISGIIADEAAIGMINSKTTAVRIIPVTGKTVGDSVEFGGLLGYAPVMPVKEGSCEVFVKRGGRIPAPVQSMKN

SEQ ID NO: 5082 - protein, 1144 aa, Neisseria meningitidis
MTEPTYIPLRLHTEFSITDGMVRIKKLIAKAQEYGLPALGISDLMNEFGLVKFYKACRGAGIKPIGAADVWIGNPNAPDKPFRAMLIIRNDAGYLRLSELLTEAYVGKDRNVHHAELNPEWLENGDNSGLICLSGAHYGEVGMNLLNGNEDAARAAALKYAAWFPDAFYLELQRLPERPEWEACVSGSVKLAEELGLPVVATHPTQFMSRDDFNAHEARVCIAGGWVLTDKKRPRDFTPSQFFIPPETMAERFADLPEALENTVEIAKRCNLHITLGKNFLPLFPTPDGLSLDDYLIKLSNEGLQERMVQLYPDEAERAEKMPEYQERLDFELNIIIQMKFPGYFLIVQDFINWAKTHGCPVGPGRGSGAGSLVAYSLKITDLDPLKYALLFERFLNPERVSMPDFDVDFCQANRGRVIEYVREKYGAEAVSQIVTFGTMSSKAVIRDVGRVLELPFMLCDKLSKLIPLEANKPLGLDDAMKAEPQIQELIEAEEADELITLAKKLEDLTRGLGMHAGGVLIAPGKISDYSPVYQADESASPVSMYDKGDVEDVGLVKFDFLGLRNLTIIEMAQNNIKNTTGDIIDVGKIPLDDQVAYQIFRDANTTAVFQFESTGMKKMLKTAHTTKFEELIAFVSLYRPGPMDNIPDFVARMKGQEFQYIHPLLEGILAPTYGIMVYQEQVMQAAQIIGGYSLGGADLLRRAMGKKKPEEMVKHREIFAEGAAKQGISREKSDEIFNYMEKFAGYGFNKSHAAAYALISYQTAWLKAHYPAEFMAATMSSELDNTDQLKHFYDDCRANGIEFLPPDINESDYRFTPYPNMKIRYALGAIKGTGEAAVESITAARQSGGKFTGLLDFCERVGKEHMNRRTLEALIRGGAFDSIEPNRAMLLANIDLAMDNADQKAANANQGGLFDMMEDAIEPVRLIDAPMWSESEKLAEEKTVIGFYLSGHPFGPYAQEVRQIAPQKLSKLKPQDSVRLAGFVTAVRTMMGKRGKIAFVSLEDLSGQVEIMVGGQTLENCADCLKADQVLIIESKVSRDDYGGGDGLRILANQVMTLQTARERYARSLSLALAPHHDIGGLVQLLAAHQLPDTPRIPLQLSYANEKASGRLQVPPKWTVTPSSALFGELETLLGSRSVRVNW

SEQ ID NO: 5083 - protein, 405 aa, Neisseria meningitidis; identical to SEQ ID NO: 3566

SEQ ID NO: 5084 - protein, 430 aa, Neisseria meningitidis
MAVFPLSAKHRKYALRALAVSIILVSAAYIASTERTERVRPQRVEQNLPPLSWGGSGVQTAYWVQEAVQPGDSLADVLARSGMARDEIARITEKYGGEADLRHLRADQSVHVLVGGDGGAREVQFFTDEDGERNLVALEKKGGIWRRSASEADMKVLPTLRSVVVKTSARGSLARAEVPVEIRESLSGIFAGRFSLDGLKEGDAVRLMYDSLYFHGQQVAAGDILAAEVVKGGTRHQAFYYRSDKEGGGGGNYYDEDGRVLQEKGGFNIEPLVYTRISSPFGYRMHPILHTWRLHTGIDYAAPQGTPVRASADGVITFKGRKGGYGNAVMIRHANGVETLYAHLSAFSQAQGNVRGGEVIGFVGSTGRSTGPHLHYEARINGQPVNPVSVALPTPELTQADKAAFAAQKQKADALLARLRGIPVTVSQSD

SEQ ID NO: 5085 - protein, 159 aa, Neisseria meningitidis
MKKLNIWRDEGKVSALIIEKFAENLGVTFPRSYIYLISEHDYLYPEEDCFIFIDNNKNTDDRNILFLGYKKDASCHENIYTYSCIDDEYGYGNQVVAFGISANGDYICFDYRKNSSNPSIVLMYHDEFYEDELGNTKMITVPIAPDFDSFIDKLYQDVD

SEQ ID NO: 5086 - protein, 185 aa, Neisseria meningitidis
MFWLVLPYAVTINRPMTSERVSASDGIAPEQGGDMKKPKILFVCLGNICRSPMAEYILRRRAAEAGIPLEADSAGTSGWHDGEDMHRETAKILKKHGIDASGFTSRKIRQSDAAAFDCIIAMDGKNLSELERTFGRRPEKIFKLTDLIPESGYDHVPDPWYTGDFEETFRLADAGCRALLEKISK

SEQ ID NO: 5087 - protein, 176 aa, Neisseria meningitidis; identical to SEQ ID NO: 3632

SEQ ID NO: 5088 - protein, 119 aa, Neisseria meningitidis
MYFVDRTAVVLKPTVRFLEWLKSTDENMPDLTIEQLRANCSVFLVPQFNEPEAVVSYFDERYRQIFEAELAGWDIDKDKWPQDMGLKAFWEFFDIEIHDMVLDMEEAELNITPVFDNMM

SEQ ID NO: 5089 - protein, 268 aa, Neisseria meningitidis
MPTVFIFLTAVYAGLGAFAWHCQQQGRGRDYPWKTELPVLGAALTVHGAALLMPVIQDKIIIMGFGYSGSLIVWMMLFIYFAGSFFYPLRGVQLLLYPCAALMLLSGLVFPGKFSGYEITDLPFMLHIGTSLLAYGLFGIATLLSVLTLLLNRSLHRRSFSKLAGFLPSLLSLEKLMFQVMWAGFILLTYSVVSGTFFAEAVFGKPMTFTHKTVFGILSWLIYGGLLLKHSMTAWRGKKAAVWTIIGFVSLMIAYMGSKFVLEIILKR

SEQ ID NO: 5090 - protein, 335 aa, Neisseria meningitidis
MSTFFRQTAQAMIAKHIDRFPLLKLDQVIDWQPIEQYLNRQKTRYLRDHRGRPAYPLLSMFKAVLLGQWHSLSDPELEHSLITRIDFNLFCRFDELSIPDYSTLCRYRNWLAQDDTLSELLKLINRQLTEKGLKIEKASAAVVDATIIQTAGSKQRQAIEVDEEGQISGQTTPSKDSDARWIKKNGLYKLGYKQHTRTDAEGYIEKLHITPANAHECKHLPPLLEGIAEGTTVYADKGYDSAENRQHLEEHQLLDGIMRKACRNRPLSETQTKRNRYLSKTRYVVEQSFGTLHRKFRYARAAYFGLIKVSAQSHLKAMCLNLLKAANRLSAPAAA

SEQ ID NO: 5091 - protein, 410 aa, Neisseria meningitidis; identical to SEQ ID NO: 446

SEQ ID NO: 5092 - protein, 236 aa, Neisseria meningitidis
MPKISSIVSANLRYQKIFPDKELIVYTRSAAPTTIRCPIHGEVPSGTLDSLLRTKHGCPECNKLTRSEYLRGNPANAKVVRVFDSLSGKTLEFVSASAAARGLETNLGNIRSRLSGRVSVDNLIQDRYKVLLDSTDCVTQTPQKVLPEGFKLVEGFENYALNRLGQVYNVKYGRLLTPSFSNSANAVIISLYSNGEAVSIFLAKLMLQTFRPDEPLPKRITYKDGDRRNCSLDNLA

SEQ ID NO: 5093 - protein, 302 aa, Neisseria meningitidis
MNQTAINRADVRTRFIFDDMPVRGLHVRLENVWQHIVKQKNYPAAIRRALGELLAAGVLLSGNLKNEGTLIVQVQGQGRLKMLVAEATSDRTVRATARWDEAAEIGEDESLVDLLGEGGVFVLTLQPKDGEPWQGVVPLEGDGIAQMLMNYMKRSEQLDTHIVLSASDEAAGGLLVQRLPEEVLDEEAWEHVSTLARTLTAEELAELDAQHVLYRLFHETPPRVFEPETFEFSCTCSRGKVSDMLLMLGGEEVGGVVVEQGSIEVDCDFCHSKYVFDETDVNALFGEDVVGVAKGLPRHTVQ

SEQ ID NO: 5094 - protein, 344 aa, Neisseria meningitidis
MSLPAMDAGIYLEETAPRALIEHNNILDNSVGVYLHGSADAMVRENKIVGDATLRVNERGNGVTVWNAPGAQVVGNDISKGRDGIFSNTSTHNTYKNNRFSDLRFAVHYMYTNDSEISGNISVGNNMGYVLMFSERLKVFDNIAVGSRDQGIMLNYVNYSDIHDNIINKAGKCVFAYNANYDKLSANHFENCQIGIHFTAAIEGTSLHDNSFINNESQAKYVSTRFLDWSEGGHGNYWSDNSAFDLNGDGFGDSAYRPNGIIDQIIWRAPVSRLLMNSPAISIVKWAQAQFPAVLPGGVVDSKPLMKPYAPKIQTCYQAMKDELLKEAETRQSEWGRAENGSLN

SEQ ID NO: 5095 - protein, 321 aa, Neisseria meningitidis; identical to SEQ ID NO: 4494

SEQ ID NO: 5096 - protein, 1072 aa, Neisseria meningitidis
MNNETKIYITAETGGVVSGVEKAKQSIKSLGDVASYQGRRISDGLVHSGDGAEKSSTVVSAASKRTERSLASLENAIRRDIAVKIAGGKANREYYEELARQRGIDIARLNPLLSQLDRHNTQTNRATQSVKQFNNALRQTPAQITDIVTQLAGGQSPFLIMIQQGGQLRDMYGGFGGMLKGLATVISPMRLAVAGLGGGIAALGYAMYQGAEESREYRKALILAGDAAGITADRMQEIAVSVWAATGGYADARAAITALVSSGKVAADNYEQFARSITLQSQATGQSIDDLVEKYTEIAKDPLKAVVSLSATYRTMTADVYQQVKALQAQGREQDAVALVQRKFSEESEDMAKRVLGNLGLIERAWKDIKESASEAWDAVKSIGRDKTKLDEIAALDSFISQIETSKKHPVTQLFWGEEGERKLQEAYARRARLRAEIDKEAAAAETLRQKQKQNQNRTEGIAELEAVSERYATREQQRQRELLKNDKARKKALDGITDAKKRQEIINKHAANAKLINESFAEKKHERQKEKTDKTSYPTVSNGLRIKPGAEAGGKALGGTYAFAHAMQQMLGDRLFRFGAFRDRYHIGKNSLHNSGLAFDATPSPGMGMKQKQTVVAQMTRYLESLGFKNGQDFNLKLELAGQRNKNGTVATGDHWHFNWRSREAAARFAVGVDGQAKNMAHLGLFKEVEKEPLSGYEKWREDFNRRHAEAEAKKALQILNANRAVGEQLKLLADPTFGDWTKEQQAAARVLAEQVDAQDSLTAASKKYSDIVKQMTDDSKEKLDDRLFEISLIGKTREEIEKLTLARLWDRQIAKAREEGAPLESIDLLERGKAEGMSNLSQMQKARADSDNDWRGGIESGLKSYIDSFGTMRQAMENATVQTFDKMGDALADFVATGKLDFRSLTVSILQDLSKMLIKMAIVNAMKSALGYADGGIVGGGSTQFDALFSGGGYTGYGGKYEPAGIVHKGEVVFSQRDVRNHGGVAAVERLRLNGYAGGGAVGLPSVLTGVRSAGAGSMQVNITINRDGSTESDSSADTEMAKHLAAAIPGMVEQWYVKNVYRENGTYHK

SEQ ID NO: 5097 - protein, 265 aa, Neisseria meningitidis
MLKQRVITAMWLLPLMLGMLFYAPQWLWAAFCGLIALIALWEYARMSGLCKIKTNHYLAATLVFGVVAYAGGWMLPNLVWYVVLAFWLAIMPLWLRFKWRLNGGWQVYAVGWLLVMPFWFALVSLRPHPDDALPLLAVMGLVWVADVCAYFSGKAFGKHKIAPAISPGKSWEGAIGGAVCVAVYMTAVRSAGWLAFDTGWFDTVLIGLVLTVVSVCGDLLESWLKRAAGIKDSSNLLPGHGGVFDRTDSLIAVISVYAAMMSVLN

SEQ ID NO: 5098 - protein, 150 aa, Neisseria meningitidis; identical to SEQ ID NO: 2445

SEQ ID NO: 5099 - protein, 360 aa, Neisseria meningitidis; identical to SEQ ID NO: 2503

SEQ ID NO: 5100 - protein, 242 aa, Neisseria meningitidis
MPDYIRTSRAADSLRDIKITPHFLPHTDGSCLIECGNTKVICTASVDENVPPFLRGKNQGWVTAEYGMLPASTASRMRREASAGKQSGRTQEIQRLIGRSLRAVVDMEKLGERQILIDCDVIQADGGTRTASITGAFVALQIAVGKLVSDGILSENPIREAVAAVSVGVVNGVPLLDLDYPEDSGCDSDVNIVMTASGKIIEIQGTAEDAPFSLDELGKLVALAQKGIGELLQHQQNALSAA

SEQ ID NO: 5101 - protein, 78 aa, Neisseria meningitidis; identical to SEQ ID NO: 1622

SEQ ID NO: 5102 - protein, 469 aa, Neisseria meningitidis
MDTQIKTEADNQSNRRYLTVWRWHFYAGLLVMPFLTLLAVTGLGMLLFANITGKEGERIHVVPQATVQPLSVQAEAARSAVNPETSSVVQYIAPRAEDMVAVFRVNNEGKATMVAVDPYTAKVVNTMPRNQGWYHTMDEIHSDMMLGSTGDYLLETAASLTIIMIISGLYLWWVKRRGIKAMLLPPKGRARSWWRNLHGAFGTWVSLILLLFCLSGIAWAGIWGGKFVQAWSQFPAGKWGVEPNPVSVVPTHGEVLNDGKVKEVPWILELTPMPVSGTTVGKDGINPDEPMTLETVDRFAREIGFKGRYQLNLPKGEDGVWTLSQDSMSYDMISPFADRTVHIDQYSGKILADIRFDDYNPFGKFMAASIALHMGTLGWWSVLANVLFCLAVIFIGISGCVMWWKRRPSGAVGMVPPAQKIKLPVWWAMAVPLLLIALLFPTALLAIAVIWLLDTLLLSRIPVLRRWFK

SEQ ID NO: 5103 - protein, 475 aa, Neisseria meningitidis
MNMTTIYNTLTRQKEPFAPIDPENVRMYVCGMTVYDYCHLGHARVMVVFDMIARWLRECGYPLTYVRNITDIDDKIIARAAENGETIGKLTARFIQAMHEDADALGVLRPDIEPKATENIPQMIAMIETLIQNGKAYPAANGDVYYAVREFAAYGQLSGKSLDDLRAGERVEVDGFKRDPLDFVLWKAAKAGEPAWESPWGNGRPGWHIECSAMSENLFGDTFDIHGGGADLQFPHHENEIAQSVGASGHTCGHDHAQTHHGQSIASHVKYWLHNGFIRVDGEKMSKSLGNFFTIREVLKQYDPEVVRFFILRAHYRSPLNYSDAHLDDAKGALTRLYTTLKNTPAAEFGLSENANDYTRRFYAAMNDDFGTVEAVAVLFELAGEVNKTNDAHLAGCLKALGGIIGLLQRDPIEFLQGGAVSDGLSNEEIDDLIARRKQARADKNWAESDRIRDLLNEHKIILEDNAGGTTWRRG

SEQ ID NO: 5104 - protein, 256 aa, Neisseria meningitidis
VSETQNEQPVQPLVEHLIELRRRLMWTVVGILVCFFGLMPFAQQLYTFIADPLMANLPKDTSMIATDVIAPFFVPVKVTLMAAFLISLPHTLYQIWAFVAPALYQNEKRLITPLVLSSVSLFFIGMAFAYFLVFPVIFKFLAGVTPVGVNMATDIDKYLSFILGMFVAFGTTFEVPIVVILLTKIGVVTTGQLKYARPYVIVGAFVIAAIITPPDVISQTLLAIPLILLYEAGIWFGRFFTPRSEQDGDIQPPATT

SEQ ID NO: 5105 - protein, 358 aa, Neisseria meningitidis; identical to SEQ ID NO: 96

SEQ ID NO: 5106 - protein, 241 aa, Neisseria meningitidis
MRIPLLAPDNYAFPDPAYALARCDGLVGVSGDLDAGRLLEAYRNGVFPWFSRDGWFFWYAVGPRAVVFPDRLHIPRSLAKTLRNGSYRVAVNGCFAEVVAHCAAAARPNQDGTWIAPEFQTAYLKLHEMGYAHSFECHYPDESGETRLAGGFYGVQIGRVFYGESMFALQPDASKIAFACAVPFLADLGVELIDCQQDTEHMRRFGSELLPFADFAERLRMLNAVPLKEEIGRREVACRGL

SEQ ID NO: 5107 - protein, 182 aa, Neisseria meningitidis
LNLTEGDTVLDREGYRPNVGIILINERNEVFWGKRVREHSWQFPQGGIKPGESPETAMYRELYEEVGLLPQHVKIVGRTRDWLRYDVPNNWVRREWRGSYRGQKQIWYLLRLTGRDCDVNLRATRHPEFDGWRWHQYWAPVDEVIDFKRDVYLGALKELSSRFLRGMESYEDFAARQLSGNR

SEQ ID NO: 5108 - protein, 245 aa, Neisseria meningitidis
MALQDRTGQKVPSVVFRTRVGDTWKDVSTDDLFKGKKVVVFSLPGAFTPTCSSSHLPRYNELFGAFKENGVDAIYCVSVNDTFVMNAWAAEEESDNIYMIPDGNGEFTEGMGMLVGKEDLGFGKRSWRYSMLVNDGVVEKMFIEPEELGDPFKVSDADTMLQFVAPDWKAQESVAIFTKPGCQFCAKAKQALQDKGLSYEEIVLGKDATVTSVRAITGKMTAPQVFIGGKYIGGSEDLEAYLAKN

SEQ ID NO: 5109 - protein, 93 aa, Neisseria meningitidis; identical to SEQ ID NO: 3468

SEQ ID NO: 5110 - protein, 106 aa, Neisseria meningitidis; identical to SEQ ID NO: 2510

SEQ ID NO: 5111 - protein, 239 aa, Neisseria meningitidis
MTQQIKYKRVLLKLSGESLMGSDPFGINHDTIVQTVGEIAEVVKMGVQVGIVVGGGNIFRGVSAQAGSMDRATADYMGMMATVMNALALKDAFETLGIKARVQSALSMQQIAETYARPKAIQYLEEGKVVIFAAGTGNPFFTTDTAAALRGAEMNCDVMLKATNVDGVYTADPKKDPSATRYETITFDEALLKNLKVMDATAFALCRERKLNIVVFGIAKEGSLKRVITGEDEGTLVHC

SEQ ID NO: 5112 - protein, 81 aa, Neisseria meningitidis
LHEKPYKMMKNKYILIKAAIGITAISIFYLLTQESSGKTEEPSYFLMFMFLNLLWFEENKTVMAAATAMIAAHFIFVALSD

SEQ ID NO: 5113 - protein, 94 aa, Neisseria meningitidis; identical to SEQ ID NO: 2111

SEQ ID NO: 5114 - protein, 234 aa, Neisseria meningitidis
MLRSILAASLLAVSFPTAAEALNYNIVEFSESAGVEAVQDTMSARFQVTAEGRDKNAVNAEFVKKFNNFTRKSKNGSFKTELVSRSAMPRYQYTNGRRIQTGWEERAEFKVEGRDFDALNRFIADVQADAALEYTDFHVSRERRNEVIDQVSKDAVLRFKARAEKLAGVLGASGYKIVKLNLGHIGSHIAGGGAAQAKMLRAMPMAASYGVEGTDSVAPGVEEISISVNGTVQF

SEQ ID NO: 5115 - protein, 101 aa, Neisseria meningitidis
MSRKAETPLIFKPRSLTMNKLFITALSALALSACAGTWEGAKQDTARNLDKTQAAAERAAEQTGNAVEKGWDKTKEAVKKGGNAVGRSISHLGGKIENATE

SEQ ID NO: 5116 - protein, 285 aa, Neisseria meningitidis
MNYALDALWWKLTDPTVRDLASLLTAPPLWQSGCELGVRELLGERGFRYLLALDADPAPLTEHLARHAPFGHRLGIYAEELSAFWFANAPHAELLAHNLTVSGSDGNTQGAADFVARLNGKPYHIELTCKYYGGGTGRLEDMRGLDPKDTLLGKAAKLTAQLGLPHTSDGIRTLRQHSLPLDVKPVSIVRGIGFFPQGFHAFEPPLNPYGWRGIYIQDWAEYGFERQEVRYHLLDRMAYLAPARVAETETLNETEIRRIDQGLIAVLELRPDGFWHEIERIMKAV

SEQ ID NO: 5117 - protein, 242 aa, Neisseria meningitidis
MAGHSKWANIQHKKARQDAKRGKIFTRLIKEITVAARMGGGDPGANPRLRLALEKAAENNMPKDNVQRAIDKGTGNLEGVEYIELRYEGYGIGGAALMVDCLTDNKTRTVADVRHAFTKNGGNLGTDGCVAFNFVHQGYLVFEPGVDEDALMEAALEAGAEDVVTNDDGSIEVITAPNDWAGVKSALEAAGYKSVDGDVTMRAQNETELSGDDAVKMQKLIDALEDLDDVQDVYTSAVLNLD

SEQ ID NO: 5118 - protein, 298 aa, Neisseria meningitidis
LNPTNDLKAWQQRAQAQTELLLERFLPSENEIPHTLHEAMRYAALDGGKRLRPMLVLAASELGGVVADAVGQAMAAIEMIHVYSLVHDDMPAMDNDSLRRGKPTCHVQYDEATALLVGDALQTQAFDVLSRPTELPAARQLAMLSVLAKAGGSAGMAGGQAIDLANVGKQMVQADLEQMHSLKTGALIRAAVLLGAMSCPNLSEDSLAVLDDYAAKLGLAFQVIDDVLDCEADTATLGKTAGKDADNDKPTYVKLMGLEAARSYAHKLVAEAVALLEPFGDKALRLRQLAEFAVARKY

SEQ ID NO: 5119 - protein, 165 aa, Neisseria meningitidis
MPSESFRAETAAMKPQKSLRARAMDILSRQEVSRIGLKRKLAPYAESEEELENVLNEFAERNWQSDLRYAEAYIRSKSRKHGSLRLKQALAQQGIDEETSRNLLPDRSSEKQAAIAVLRKKFKHPAADLKEKQKQARFLAYRGFDADTVQTALKHAWDENWEDGC

SEQ ID NO: 5120 - protein, 365 aa, Neisseria meningitidis
MEVQLPKIKTVRVMLAGMTAQQESVFKMAFKMHNTTRYETVSPSDGSAVPDLVLADTDAEGGFELWKELAERYKDIPVAVCSEKVPDSEVPYLPKPIRFETLFPMLRKLLQGENVYGKSFIAPADRSAKNNGNVQRTVTIRQFNPNKGLLGALRFAEKNRQDIAILHGNKPVLIVFPSIQRVLLTESVQKLEELCKDENLQVSCKTVPDNPQWREKAKVGIMSCMWQFSIWTAQGRLIYPISPDTPFTLKSWPNLTRLANVPGSIRLSAFLTKASVNLNVLYKVMPLNLNDILNYLTATYTTGFLSVDLKTVSQQAYSDMADKINIGADSASDSEMMKKAEKITTPSQSQSRGLLQRLMKKLLGS

SEQ ID NO: 5121 - protein, 284 aa, Neisseria meningitidis
MPPIPAPSAPSEHTVAWVFGQPVTDLPQDLFIPPDALKVVLGSFQGPLDLLLYLIRKQNIDVLDIPMVKITEQYLHYIAQIETYQFDLAAEYLLMAAMLIEIKSRLLLPRTETVEDEEADPRAELVRRLLAYEQMKLAAQGLDALPRAGRDFAWAYLPLEIAVEAKLPEVYITDLTQAWLGILSRAKHTRSHEVIKETISVRAQMTAILRRLNGHGICRFHDLFNPEQGAAYVVVNFIALLELAKEGLVGIVQEVGFGEIRISLNHEGAHSDGISGTRGGRDVF

SEQ ID NO: 5122 - protein, 423 aa, Neisseria meningitidis
MKLLVIGNGGREHALAWKLAQSPKVETVFVAPGNAGTAIEPKLQNIALTAHQDLIEFCRKENIAFTVVGPEAPLAAGIVDEFRAAGLKIFGPTQYAAQLESSKDFAKAFMAKYNIPTAQYQTFENADAAHDYVNQKGAPIVIKADGLAAGKGVIVAMTLDEAHAAIDDMLLGNKMGNAGARVVIEDFLQGEEASFIVMVDGNHVLPMATSQDHKRLLDGDKGPNTGGMGAYSPAPVVTPVVYERAMNEIILPTVAGMKAEGYEFTGFLYAGLMIDQSGAPYTIEFNCRFGDPETQPIMSRLNSDLADLVEAAIDGKLDSVTAEWNPQTAVGVVLAAQNYPETPKKGDVISGLDAANQIGKVFHAGTTANEKGDVLTNGGRVLCVVGLGDNVVQAKAKAYGALEKISFDGMQYRKDIADKAINR

SEQ ID NO: 5123 - protein, 266 aa, Neisseria meningitidis
MSPSPFIEMKDVAFAYGDRPILKNINFSIPQGNFAAVMGGSGSGKTTLMRLITGQIRPQSGQVLIEGRDLAGFSADELYEHRRRMGVLFQHGALFTDLSVFDNIAFPMRELTRLPEAVIRDLVLLKLNAVGLRGVENLMPSELSGGMSRRVALARTIALDPEIMLYDEPFTGLDPISLGVIAHLISRVNKALRSTSVMVTHDIEKSLEIVDQVIFLAHGEIMFSGSPQEMRELDSPWVRQFVGGLADGPVAYRYPAQTSLQQDLLG

SEQ ID NO: 5124 - protein, 192 aa, Neisseria meningitidis
MSNTIKMVVGLGNPGKEYEQTRHNAGFWFLDELAWKWKASFKEEKKFFGEVARAALPDGDVWLLKPATFMNRSGQAVAALAQFYKIKPEEILVVHDELDIPCGRIKFKLGGGNGGHNGLKDIQAKLGTADYYRLRLGIGHPGDRNLVVGYVLNKPSTEHRRQIDDAVAKSLQAIPDILAGKWEEATRFLHSK

SEQ ID NO: 5125 - protein, 214 aa, Neisseria meningitidis
VLASAIDFILHIDQHLLALSAQYGVWIYAILFLIVFCETGLIVTPLLPGDSLLFAAGGIAALGGMDIHLMVALLSLAAILGDALNFTVGKYFGGRLFANPDSKIFRREYLDKTHRFYEKHGGKTIIIARFMPIVRTFAPFVAGMGKMHYAKFIRYNIIGGLLWVILFSYAGYFFANFPVVKNNLGLVMGSIIIVSVLPGAVEIARAKLAVKSKR

SEQ ID NO: 5126 - protein, 330 aa, Neisseria meningitidis
MKTHEISKDSVSLIGVAEHEAGQRLDNYLIKILKGVPKSHIHRIIRAGEVRLNKKRCKPDSRIAEGDTVRIPPVRVAEKEMPSERRAAVPARAFEAVYEDDALLVIDKPSGVAVHGGSGVSFGVIEQLRRARPEARYLELVHRLDKDTSGLLMVAKKRSALVKLHEAIRNDHPKKIYLALGVGKLPDDNFHVKLPLFKYTGAQGEKMVRVSADGQSAHTVFRVLSRFSDGILHGVGLSHLTLVRATLKTGRTHQIRVHLQSQGCPIAGDERYGDYQANRRLQKLGLKRMFLHASELHLNHPLTGEPLVLKAELPPDLAQFAVMLENGTKM

SEQ ID NO: 5127 - protein, 419 aa, Neisseria meningitidis
MSMALAQKLAADSIAAVAEGRNLQDVLAQIRTAHPDLTAQENGALQDIAYGCQRYLGSLKHMLAQMLKKPIDNPQLESLLLAALYQLHYTRNAPHAVVNEAVESIAKIGRGQYRSFANAVLRRFLREREKLASSCKKDDVAKHNLPLWWVAYLKNHYPKHWHNITAALQSHPPMTLRVNRRHGNAESYLEKLAAEGIAAKALDEYAVTLEEAVPVNRLPGFSDGIVSVQDFGAQQAAYLLNPKDGERILDACAAPGGKTGHILELADCRVTALDIDAGRLKRVEDNIARLGFQTASAACADARDLAAWYDGKPFDAILADVPCTASGVARRNPDVKWLRRPTDALKTARQQEALLDALWQTLKQGGRMLLATCSVFVEENDGQLQKFLNRHADAEPIESRVLLPNKHQDGFYYALIQKH

SEQ ID NO: 5128 - protein, 105 aa, Neisseria meningitidis
MNILPSWLRVGMNIAMLGMIHSDIRLITVDYEEGRRFLKIKNYLSREAITEDHEDMEYLITELWSMCGEYFDEADFECIYSNHSSMELNQINGAVFRRKELISQA

SEQ ID NO: 5129 - protein, 278 aa, Neisseria meningitidis
MQIIHTIRELRAWRKNAGKVAFVPTMGNLHEGHLALVREAKKRADSVVVSIFVNRLQFGQGEDFDKYPRTLQQDADKLEAEGVAVVFAPDEKELYPNVEQRYNVEPPHLQNELCGKFRPGHFRGVATVVSKLFNIVAPDVACFGKKDYQQLAVIKGLTEDLNFDVEIVPVDTGRAEDGLALSSRNQYLSAAERDEAPRLYRELKAVAESLAQGSLDYAGLERQAADHLTAAGWVVDYVEIRRADTLEVARAGDKKLVVLAAARLGTTRLIDNLEIKLP

SEQ ID NO: 5130 - protein, 630 aa, Neisseria meningitidis
MPILTIREVCNINHWGIGYYDVDDSGEIIVRPNPAQHNQTASLQKLTEAVQQKHQARLPVLFCFPQILEHRLRDINRAFQTAREECGYKGGYCLVYPIKVNQHRRVIESLMSSGQPHGLEAGSKAELMAVLAHAGTRQTLIVCNGYKDREYIRFALMGEKLGHQVYLVIEKLSEIQMVLEEAEKLGIKPRLGVRARLASQGSGKWQSSGGEKSKFGLSASQVLQLVDILKQKNRLDCLQLLHFHLGSQLGNIRDVATGVHESARFYVELHKLGVNIRCFDVGGGLGVDYEGNRTQSDCSVNYSLNEYAATVVWGISQACLEHGLPHPTIITESGRGITAHHAVLVANVIGVERYKPRRLDAPSPEAPRVLHSMWETWTDISASREKRSLRSWIHEGQFDLADVHNQYNVGLLSLAQRAWAEQLYLNICHEVGELFNEKHRSHRTIIDELQERFADKLYVNFSLFQSLPDAWGIDQLFPVCPITGLNEPIARRAVLLDITCDSDGTIDHYIDGDGIAGTMPMPDYPEEEPPLLGFFMVGAYQEILGNMHNLFGDTATADVVVGEDGQFTVIDYDEGNTVADMLEYVYQDPKELMKRYREQIEHSDLPASQAMSFLKELEAGLNGYTYLEDE

SEQ ID NO: 5131 - protein, 300 aa, Neisseria meningitidis
MDTAKKDILGSGWMLVAAACFTIMNVLIKEASAKFALGSGELVFWRMLFSTVALGAAAVLRRDTFRTPHWKNHLNRSMVGTGAMLLLFYAVTHLPLATGVTLSYTSSIFLAVFSFLILKERISVYTQAVLLLGFAGVVLLLNPSFRSGQETAALAGLAGGAMSGWAYLKVRELSLAGEPGWRVVFYLSATGVAMSSVWATLTGWHTLSLSSAVYLSGIGVSALIAQLSMTRAYKVGDKFTVASLSYMTVVFSALSAAFFLGEELFWQEILGMCIIILSGILSSIRPTAFKQRLQSLFRQR

SEQ ID NO: 5132 - protein, 394 aa, Neisseria meningitidis
MSLHSDILVVGAGPAGLSFAAELAGSGLKVTLIERSPLTVLQNPPYDGREIALTHFSREIMQRLGMWDKIPENEIYPLRDAKVLNGRSDYQLHFPQPTEARGEPADCLGYLISNHNIRRAAYEVVSQLDNITILTDTAVKEVKTSDNEAQVILENGKILTARLLLAADSRFSQTRRQLGISSDMHDYSRTMFVCRMKHTLSNQHTAYECFHYGRTIALLPLEEHLTNTVITVDTDKINSVQNLSPEELAASVKEQLKGRLGDMELVSSIHHYPLVGMIAKRFYGKRSALIGDAAVGMHPVTAHGFNLGLSSADILAKLILEAEQRGQDIGASSLLEKYSNKHMLHAHPLYHGTNMMLKLFTNETAPAKLLRGLVLRAGNNFPPLKKLITKQLTG

SEQ ID NO: 5133 - protein, 461 aa, Neisseria meningitidis
MIVASRWPLLEKVFLRFGMPVAVVDLESTGGNLYEDRVTEVALVKFEQGRVVRHEWLVNPQKPIPQFVAGLTGISDGMVADAPVFAEIAGELFSVLKGCVLVAHNSRFDYTFLKHEFHRVGIGFSSPALCSVQLSRCLYPQFYKHSLDSIIERLGIVVEDRHRAMADVSALCDYLEYSLSEHGVEAWIRQCFRLMNPKPLPAALPERLREQLYGLPDGMGVLACFDGGGKVNYIGTFERVYSEVSALLDSGKAPFDWCNTEEVRFFPALGSLHAYKIKAELVGRYHSGCYVSAKNLLKTFTTVRFEKGSDGMLNAKTAALKNGVTDNPPTGLFANKKAARRALSLWAETYGLCPAAAGILPDGYAEDEPCPVYVSGRCDKACGGSDEQVLAFAHKLPVLDWGKMHEVEITETDPLTGEKVVLHGMCGALEMDDGFWYFDKDLPDAFKAKFKTDRKNIKEIG

SEQ ID NO: 5134 - protein, 524 aa, Neisseria meningitidis
MFRRYLPNRQMNMVSKLDKYWQHPALYWPLLILFAAATPFTFAPYYHFWLMPLIFGAFVHLIELRPRFAASSAYLFGLTAYTAQFYWIHTALHDVSGLPDLYAVPLTFLLPAYLALYPALCFWLWKKFTLPRGIKIGLVLPILWTLTEFARERFLTGFGWGAIGYSQITPDSPLAGFAPLGGIHMVTLATAFLGVWLVLASDNTARSGKRLLPIILIAALLAAGYTARQTDFTRPDGSRSTVALLQGNIDQTLKWREDQVIPTIQKYYEQVGKTTADIVILPETAIPVMRQNLPENILAKFAEQAQNNGSALAVGISQYTSDGNGYENAVINLTGYQENNQDGIPYYAKNHLVPFGEYKPLPFLTTPLYKMMNMPLSDFRKGGGKQSALLMKNQKIAFNICYEDGFGDELIAAAKDATLLANASNMAWYGKSNAMYQHLQQSQARAMELGRYMVRATNTGATAIISPKGNIIAQAQPDTETVLEGHIKGYVGETPYMKTGSSWWLMGILTLAALILFIFRNKEH

SEQ ID NO: 5135 - protein, 237 aa, Neisseria meningitidis
MMVYIMNAFDIKSTKMDVLSISLHTSDLFDLEDVLVKLGKKFQESGVVPFVLDVQEFDYPESLDLAALVSLFSRHGMQILGLKHSNERWAAAAMKYHLLFCLSHSENVKELGQVEVQNTEDGQKARKTVLITSPVRTGQQVYAEDGDLIVTGAVSQGAELIADGNMHIYAPMRGRALAGAKGDTSARIFIHSMQAELVSVAGIYRNFEQDLPDHLHKQPVQILLQDNRLVISAIGSE

SEQ ID NO: 5136 - protein, 1902 aa, Neisseria meningitidis
MNEGEVVLTPEQIQTLRGYASRGDTYGGWRYLANLGDRYADDAAAIVGKDANLNGLNLWMKKGVENLWDDTVGKKTRLEKFDRVALQHFRQYARLINENNGRLPNTSEIERSYYKAVTDNGVSSSAAIDLVINRSLPDMADGYWALGLGIEAERIHNEQAVNNPNGSEWDNRKQLISALDKGFDGSFKEKPFTFLQSVIMDVTKLSVEYTIDGWQKIGGWGNGIINDLYKSVAKREWTGIFEIVNNNIKQFRDLFPNPEGWIDDGHQCFAPWVKETKKRNGKYHVYDPLALDLDGDGIETVATKGFAGSLFDHTNNGIRTATGWVSADDGLLVRDLNGNGIIDNGAELFGDNTKLADGSFAKHGYAALAELDSNGDNIINAADAAFQTLRVWQDLNQDGISQANELRTLEELGIQSLDLAYKDVNKNLGNGNTLAQQGSYTKTDGTTAKMGDLLLAADNLHSRFKDKVELTAEQAKAANLAGIGRLRDLREAAALSGDLANMLKAYSAAETKEAQLALLDNLIHKWAETDSNWGKKSPMRLSTDWTQTANEGIALTPSQVAQLKKNALVSLSDKAKAAIDTARDRIAVLDAYTGQDSSTLYYMSEEDALNIVKVTNDTYDHLAKNIYQNLLFQTRLQPYLNQISFKMENDTFTLDFSGLVQAFNHVKETNPQKAFVDLAEMLAYGELRSWYEGRRLMADYVEEAKKAGKFEDYQKVLGQETVALLAKTSGTQADDILQNVGFGHNKNVSLYGNDGNDTLIGGAGNDYLEGGSGSDTYVFGKGFGQDTVYNYDYATGRKDIIRFTDGITADMLTFTREGNHLLIKAKDGSGQVTVQSYFQNDGSGAYRIDEIHFDNGKVLDVATVKELVQQSTDGSDRLYAYQSGNTLNGGLGDDYLYGADGDDLLNGDAGNDSIYSGNGNDTLDGGEGNDALYGYNGNDVLNGGEGNDHLNGEDGNDTLIGGAGNDYLEGGSGSDTYVFGEGFGQDTVYNYDYATGRKDIIRFTDGITADMLTFTREGNHLLIKAKDDSGQVTVQSYFQNDGSGAYRIDEIHFDNGKVLDVATVKKLVQQSTDGSDRLYAYQSGNTLNGGLGDDYLYGADGDDLLNGDAGNDSIYSGNGNDTLDGGEGNDALYGYNGNDVLNGGEGNDHLNGEDGNDTLIGGAGNDYLEGGSGSDTYVFGEGFGQDTVYNYDYATGRKDIIRFTDGITADMLTFTREGNHLLIKAKDDSGQVTVQSYFQNDGSGAYRIDEIHFDNGKVLDVATVKKLVQQSTDGSDRLYAYQSGNTLNGGLGDDYLYGADGDDLLNGDAGNDSIYSGNGNDTLNGGEGNDALYGYNGNDVLNGGEGNDHLNGEDGNDTLIGGAGNDYLEGGSGSDTYVFGKGFGQDTVYNYDYATGRKDIIRFTDGITADMLTFTREGNHLLIKAKDDSGQVTVQSYFQNDGSGAYRIDEIHFDNGKVLDVATVKELVQQSTDGSDRLYAYQSGNTLNGGLGDDYLYGADGDDLLNGDAGNDSIYSGNGNDTLNGGEGNDALYGYNGNDVLNGGEGNDHLNGEDGNDTLIGGAGNDYLEGGSGSDTYVFGKGFGQDTVYNYDYATGRKDIIRFTDGITADMLTFTREGNHLLIKAKDGSGQVTVQSYFQNDGSGAYRIDEIHFDNGKVLDVATVKELVQQSTDGSDRLYAYQSGNTLNGGLGDDYLYGADGNDLLNGDAGNDSIYSGNGNDTLNGGEGNDALYGYNGNDALNGGEGNDHLNGEDGNDTLIGGAGNDYLEGGSGSDTYVFGKGFGQDTVYNYHVDKNSDTMHFKGFKAADVHFIRSGSDLVLSASEQDNVRISGFFYGENHRVDTFVFDDAAISNPDFAKYINAGNNLVQSMSVFGSNTAATGGNVDANIQSVQQPLLVTPSA

SEQ ID NO: 5137 - protein, 95 aa, Neisseria meningitidis
MDDLIAAFLGYLSGKYSEGKISRLEISLTAGSIFFAVFFIHELIIFIVDGNKENLWNFITEMIKDLFLFSCSVCLLFYFLLFIAETIGKTINKIK

SEQ ID NO: 5138 - protein, 214 aa, Neisseria meningitidis
MKLKHLLPLLLSAVLSAQAYALTEGEDYLVLDKPIPQKQSGKIEVLEFFGYFCVHCHHFDPLLLKLGKALPSDAYLRTEHVVWQPEMLGLARMAAAVKLSGLKYQANPAVFKAVYEQKIRLENRSVAEKWALSQKGFDGKKLMRAYDSPAAAAAASKMQQLTEQYRIDSTPTVVVGGKYRVIFNNGFDGGVHTIKELVAKVREERKRQTPAVQK

SEQ ID NO: 5139 - protein, 250 aa, Neisseria meningitidis
MTSCEPVNEKTDQKAVSAQQAKEQTSFNNPEPMTGFEHTVTFDFQGTKMVIPYGYLARYTQDNATKWLSDTPGQDAYSINLIEISVYYKKTDQGWVLEPYNQQNKAHFIQFLRDGLDSVDDIVIRKDACSLSTTMGERLLTYGVKKMPSAYPEYEAYEDKRHIPENPYFHKLYYIKKGENPAIITHRNNRINQTEEDNYSTGVGSCINGFPVRYYPFIREKQQLTQQELVGYHQQVEQLVQSFVNNPSKK

SEQ ID NO: 5140 - protein, 117 aa, Neisseria meningitidis
VNRQTAYLLTSFSLIALIILSLSWELWIAPLRPGGSWLALKALPLCLPLSGILKKKIYTYQYSSMLVLIYFAEAVMRLFDAYPAEQICAALSAVFSIIFFISCLSFVKQYKETNNAR

SEQ ID NO: 5141 - protein, 120 aa, Neisseria meningitidis
MTDRPNLLWIKPGQAEIMEYCEPEEASDPYATYRRANLMVGLPLFVVILVLLNIVFPLPAHPLAWLVPAGFMVLVGGFPLSLPLVALLVLTCCILLARCPPLSRLLCYPCPNHPMSKNSA

SEQ ID NO: 5142 - protein, 604 aa, Neisseria meningitidis
MPAETTVSGARPAAKLPIYILPCFLWIGIVPFTFALKLKPSPDFYHDAAAAAGLIVLLFLTAGKKLFDVKIPAISFLLFAMAAFWYLQARLMNLIYPGMNDIVSWIFILLAVSAWACKSLVAHFGQERIVTLFAWSLLIGSLLQSCIVVIQFAGWEDTPLLQNIIVYSGQGVIGHIGQRNNLGHYLMWGILAAAYLNGQRKIPAALGAICLIMQTAVLGLVNSRTILTYIAAIALILPFWYFRSDKSNRRTMLGIAAAVFLTALFQFSMNTILETFTGIRYETAVERVANGGFTDLPRQIEWNKALAAFQSAPIFGHGWNSFAQQTFLINAEQHNIYDNLLSNLFTHSHNIVLQLLAEMGISGTLLVAATLLTGIAGLLKRPLTPASLFLICTLAVSMCHSMLEYPLWYVYFLIPFGLMLFLSPAEASDGIAFKKAANLGILTASTAIFAGLLHLDWTYTRLVNAFSPATDDSAKTLNRKINELRYISANSPMLSFYADFSLVNFALPEYPETQTWAEEATLKSLKYRPHSATYRIALYLMRQGKVAEAKQWMRATQSYYPYLMPRYADEIRKLPVWAPLLPELLKDCKAFAAAPGHPEAKPCK

SEQ ID NO: 5143 - protein, 69 aa, Neisseria meningitidis
MPYVNIKVTGGKEAPTAAQKAELIGGVTELLARVLGKNPETTVVVIDEVDTDNWGIGGKSVSERRKEGR

SEQ ID NO: 5144 - protein, 49 aa, Neisseria meningitidis
MSAALWHKKLSWKGFTPQINFRYNKINSNMPAFYSRSGKERFVSIEKTY

SEQ ID NO: 5145 - protein, 351 aa, Neisseria meningitidis
MKTYAPALYTAALLTACSPAADSNHPSGQNAPANTESDGKNITLLNASYDVARDFYKEYNPLFIKTYQSEHPGTSVSIQQSHGGSSKQALSVANGLQADVVTMNQSSDIDLLEKKGLVEKGWQQALPDHAAPYTSTMVFLVRKNNPKQIRDWNDLAKDGVNIVIANPKTSGNGRYAFLGAYGYGLKTTNGNEQEAQKLVASILKNTPVFENGGRAATTTFTQRNIGDVLITFENEANYVSKKLTQGQFEIVYPSYTISAESPVAVVNSVVAKKGTQKTARAYLEYLWSEPAQELAASLYLRPRNPEVLARHKADFPDLDSFSPEEKFGGWDNIMKTYFADGGIFDRLTAQK

SEQ ID NO: 5146 - protein, 415 aa, Neisseria meningitidis; identical to SEQ ID NO: 846

SEQ ID NO: 5147 - protein, 175 aa, Neisseria meningitidis
MVLFYRLLKNMSSSVSSKTRYWVLALAAIVLDQWSKWAVLSSFQYRERVNVIPSFFDLTLVYNPGAAFSFLADQGGWQKYFFLVLAVAVSAYLVRAILRDEFATLGKTGAAMIIGGALGNVIDRLIHGHVVDFLLFYWQNWFYPAFNIADSFICVGAVLAVLDNIVHRKTQEEKY

SEQ ID NO: 5148 - protein, 1201 aa, Neisseria meningitidis
MFHFAFPAQTALRQAITDAYRRNEIEAVQDMLQRAQMSDEERNAASELARRLVTQVRAGRTKAGGVDALMHEFSLSSEEGIALMCLAEALLRIPDNATRDRLIADKISDGNWKSHLNNSPSLFVNAAAWGLLITGKLTATNDKQMSSALSRLISKGGAPLIRQGVNYAMRLLGKQFVTGQTIEEALQNGKEREKMGYRFSFDMLGEAAYTQADADRYYRDYVEAIHAIGKDAAGQGVYEGNGISVKLSAIHPRYSRAQHGRVMGELLPRLKELFLLGKKYDIGINIDAEEANRLELSLDLMEALVSDPDLAGYKGIGFVVQAYQKRCPFVIDYLIDLARRNNQKLMIRLVKGAYWDSEIKWAQVDGLNGYPTYTRKVHTDISYLACARKLLSAQDAVFPQFATHNAYTLGAIYQMGKGKDFEHQCLHGMGETLYDQVVGPQNLGRRVRVYAPVGTHETLLAYLVRRLLENGANSSFVNQIVDENISIDTLIRSPFDTIAEQGIHLHNALPLPRDLYGKCRLNSQGVDLSNENVLQQLQEQMNKAAAQDFHAASIVNGKARDVGEAQPIKNPADHDDIVGTVSFADAALAQEAVGAAVAAFPEWSATPAAERAACLRRFADLLEQHTPALMMLAVREAGKTLNNAIAEVREAVDFCRYYANEAEHTLPQDAKAVGAIVAISPWNFPLAIFTGEVVSALAAGNTVIAKPAEQTSLIAGYAVSLMHEAGIPTSALQLVLGAGDVGAALTNDARIGGVIFTGSTEVARLINKALAKRGDNPVLIAETGGQNAMIVDSTALAEQVCADVLNSAFDSAGQRCSALRILCVQEDVADRMLDMIKGAMDELVVGKPIQLTTDVGPVIDAEAQQNLLNHINKMKGVAKSYHEVKTAADVDSKKSTFVRPILFELNNLNELQREVFGPVLHVVRYRADELDNVIDQINSKGYALTHGVHSRIEGTVRHIRSRIEAGNVYVNRNIVGAVVGVQPFGGHGLSGTGPKAGGSFYLQKLTRAGEWVAPTLSQIGQADEAALKRLEALVHKLPFNAEEKKAAAAALGHARIRTLRRAETVLTGPTGERNSISWHAPKRVWIHGGSTVQAFAALTELAASGVQAVVEPDSPLASYTADLEGLLLVNDKPETAGISHVAALSPLDSARKQELAAHDGALIRILPSENGLDILQVFEEISCSVNTTAAGGNASLMAVAD

SEQ ID NO: 5149 - protein, 166 aa, Neisseria meningitidis; identical to SEQ ID NO: 1704

SEQ ID NO: 5150 - protein, 425 aa, Neisseria meningitidis
MRSSDILIVDDEIGIRDLLSEILQDEGYSVALAENAEEARKLRHQARPAMVLLDIWMPDCDGITLLKEWAKNGQLNMPVVMMSGHASIDTAVEATKIGALDFLEKPISLQKLLSTVENALKYGAAQTETGPVFDKLGNSAAIQEMNREVGAAVKRASPVLLTGEAGSPFETVARYFHKNGTPWVSPARVEYLIDMPMELLQKAEGGVLYVGDIAQYSRNIQAGIAFIVGKAEHRRVRVVASGSRAAGSDGIACEEKLAELLSESVVRIPPLRMQHEDIPFLIQGIACNVAESQKIAPAAFSEEALAALTRYDWPGNFDQLQSVVATLLLEADGQEIGAGAVSSLLGQNVPAEGAEDMVGGFNFNLPLRELREEVERRYFEYHIAQEGQNMSKVAQKVGLERTHLYRKLKQLGIGVSRRAGEKTEE

SEQ ID NO: 5151 - protein, 350 aa, Neisseria meningitidis
MWKEILLNYGIFLLELLTVFGAIALIVLAIVQSKKQSESGSVVLTDFSENYKKQRQSFEAFFLSGEEAKHQEKEEKKKEKAEAKAEKKRLKEGGEKSAETQKSRLFVLDFDGDLYAHAVESLRHEITAVLLIAKPEDEVLLRLESPGGVVHGYGLAASQLRRLRERNIPLTVAVDKVAASGGYMMACVADKIVSAPFAIVGSVGVVAEVPNIHRLLKKHDIDVDVMTAGEFKRTVTFMGENTEKGKQKFRQELEETHQLFKQFVSENRPQLDIEEVATGEHWFGRQALALNLIDEISTSDDLLLKAFENKQVIEVKYQEKQSLIQRIGLQAEASVEKLFAKLVNRRADVM

SEQ ID NO: 5152 - protein, 80 aa, Neisseria meningitidis; identical to SEQ ID NO: 1260

SEQ ID NO: 5153 - protein, 463 aa, Neisseria meningitidis
MSGHMGKGADAPDLVYGLEDRPPFGNALLSAVTHLLAIFVPMITPALIVGGALELPVEMTAYLVSMAMVASGVGTYLQVNRFGPVGSGMLSIQSVNFSFVTVMIALGAGMKEGGLTKDAMISTLLGVSFVGAFLVCFSAWLLPYLKKVITPTVSGVVVMLIGLSLVHVGITDFGGGFGAKADGTFGSMENLGLASLVLLIVLVFNCMKNPLLRMSGIAVGLIAGYIVALFLGKVDFSALQNLPLVTLPVPFKYGFAFDWHAFIVAGAIFLLSVFEAVGDLTATAMVSDQPIEGEEYTKRLRGGVLADGLVSVIATALGSLPLTTFAQNNGVIQMTGVASRHVGKYIAMILVLLGLFPVVGRAFTTIPSPVLGGAMVLMFGLIAIAGVRILVSHGIRRREAVIAATSVGLGLGVAFEPEVFKNLPVLFQNSISAGGITAVLLNLVLPEDKTEAAVKFDTDHLEH

SEQ ID NO: 5154 - protein, 566 aa, Neisseria meningitidis
MSVKIQTRSINTDVFNHLLTAGADPLIARLCASRGVQSPAELDDKLAALLPYQTLTNCEAAAGRLADAVGRKEKILIVADYDADGATACAVGLDGLAAMGAKVDFLVPNRFEHGYGLTPELAEIAAAQGVDLLITVDNGIASIAGVARAQALGLDVIVTDHHLPADTVPDCIIVNPNQKGCGFQSKSLAGVGVIFYVLTALRAELRRRNYFSDGLKEPNLGDLLDLVALGTVADVVPLDHNNRILVSQGLKRMRSGKMRPGIRALFEVARRDWRKAQPFDMGFALGPRINAAGRLDDMSVGIACLLARDDSEAQELAAQLNNLNIERREIEQSMLQDALNAFPETLPSGQTTLVAYRDDFHQGVVGIVASRLKDRFYRPTIVFAPADNGEVRGSGRSIPNLHLRDALDLVSKRHPDLILKFGGHAMAAGLSILEHNIPAFQTVFEEAVREMVCEDDLSQTFITDGSLKACDITLEQAQNLARHVWGQGFAPPSFTDEFHVVRQQPLGAEGKHKKAWLQKDGCEFEAMFWRCSEDIPEYIRTVYRPVANEWRNNLELQLYIDYWEAV

SEQ ID NO: 5155 - protein, 296 aa, Neisseria meningitidis; identical to SEQ ID NO: 396

SEQ ID NO: 5156 - protein, 89 aa, Neisseria meningitidis
MTLFVKYEDLDERIAEVRYHRVEGTTSTVCTVILHSGFVVVGHSAALNSEAFVAETGHELAYQDALQNLLALEAYRIKENAHDAQQKES

SEQ ID NO: 5157 - protein, 259 aa, Neisseria meningitidis
MKLVRPQKISDQVLSVLEGRIVEGVYAEGGKIPPERVLAEEFGVSRPSVRSALNVLVARQVLEARQGDGYYVSVKPQQDFLQSWQELLGKHSNWEQDVFDFSCHIEGCMAALAAERRTDADLKRIGFWLEKFEEACESGNLEHQSEADVSFHQTIADAAHNLLFSHLSGGLLKMLYRQTRSSLIYLNQEEDPRPKLMAQHRVLYEAISNRRPGEASEAAKAHLNYVASSILKDREYQSRNRHADTLAQNDLKRVQDWEV

SEQ ID NO: 5158 - protein, 97 aa, Neisseria meningitidis; identical to SEQ ID NO: 910

SEQ ID NO: 5159 - protein, 187 aa, Neisseria meningitidis
MKKIIFAALAAAAVGTASAATYKVDEYHANARFAIDHFNTSTNVGGFYGLTGSVEFDQAKRDGKIDITIPVANLQSGSQHFTDHLKSADIFDAAQYPDIRFVSTKFNFNGKKLVSVDGNLTMHGKTAPVKLKAEKFNCYQSPMEKTEVCGGDFSTTIDRTKWGVDYLVNVGMTKSVRIDIQIEAAKQ

SEQ ID NO: 5160 - protein, 335 aa, Neisseria meningitidis
MSTFFQQTAQAMIAKHIDRFPLLKLDQVIDWQPIEQYLNRQKNRYLRDHRGRPAYPLLSMFKAVLLGQWHSLSDPELEHSLITRIDFNLFCRFDELIIPDYSTLCRYRNWLAQDDTLSELLKLINCQLTEKGLKIEKASAAVVDATIIQTAGSKQRQAIEVDEEGQISGQTTPSKDSDARWIKKNGLYKLGYKQHTRTDAEGYIEKLHITPANAHECKHLSPLLEGLPEGTTVYADKGYDSAENRQHLEEHQLLDGIMRKACRNRPLSETQTKRNRYLSKTRYVVEQSFGTLHRKFRYARAAYFGLIKVSAQSHLKAMCLNLLKAANRLSAPAAA

SEQ ID NO: 5161 - protein, 181 aa, Neisseria meningitidis
MIIVEHLEHYLGEIENGIKCLDRRYHLSVSVFPSQPYKGVTTFSTLGLNRYDLNYKSRFELIFTCSEEWNKENIAAFLSGVAEYLIDNRKPILRGEIIRLPRVIIEGSKMDALYVSAPFYFDDDFQVCYGGHYNTVFPLLVPLYKQEAELVEKKGWNAFEQFLLDNEVDNLSDMNRKPFVW

SEQ ID NO: 5162 - protein, 103 aa, Neisseria meningitidis; identical to SEQ ID NO: 2880

SEQ ID NO: 5163 - protein, 204 aa, Neisseria meningitidis
MRITVIITTLQSAQRKPMPWNLPIFLTWLRVLLIPVMTALFYLPFPWFAEETINLAAAVIFAVAALTDWFDGFLARLWKQTSDFGAFLDPVADKLMVAVSLLLLVKLDRTYVLFAMIIIGREITISALREWMAQMGKRNSVAVATVGKFKTAAQMLAIFLLLLNIPDFYGFNLVVIGNILMFIASLLTVWSMLYYLKMAWKEIA

SEQ ID NO: 5164 - protein, 356 aa, Neisseria meningitidis
MTKHIAILRGDGIGPEIVAETVRVLDKLIAQGLDAGYEYAPLGGEAYDEYGHPYPEFTQNLCRKADAVLLGAVGSPQYDNLDRPLRPERGLLAIRKDLNLFANLRPAILYPELANASTLKPEIVAGLDILIVRELTGDIYFGEPRGIRVLENGEREGYNTMKYSESEIRRIAHVAFQSAQKRSKKVCSVGKANVLETTELWREIFEEIGKQYPDVELSHMYVDNAAMQLVRAPKQFDVIATGNIFGDILSDEASMLTGSIGMLPSASLDENGKGLYEPSHGSAPDIAGQNKANPLATILSLAMLLRYSLNDEARAQQVENAVQKVLQQGLRTSDIYEEGTKLVSCSEMGDAVLAAL

SEQ ID NO: 5165 - protein, 392 aa, Neisseria meningitidis
MTGKTGRNGSTQAQPERVMLVGVMLDKDGTGSSAARLNGFQTALAEAVELVKAAGGDSVRVETAKRDRPHTALFVGTGKAAELSEAVAADGIDLVVFNHELTPTQERNLEKELKCRVLDRVGLILAIFARRARTQEGRLQVELAQLSHLAGRLIRGYGHLQSQRGGIGMKGPGETKLETDRRLIAHRINALKKQLVNLKKQRALRRKPRESGTIKTFALVGYTNVGKSSLFNRLTKSGIYAKDQLFATLDTTARRLYISPECSIILTDTVGFVSDLPHKLISAFSATLEETAQADVLLHVVDAAAPNSGQQIEDVENVLREIHAGDIPCIKVYNKTDLLPSEEQNTGIWRDAAGKIAAVRISVAENTGIDALREAIAESCAAAPNTDETEMP

SEQ ID NO: 5166 - protein, 375 aa, Neisseria meningitidis
MLECTINYCSGEIMSQTIDELLLPHRNAIDTIDAEILRLLNERAQHAHAIGELKGTGAVYRPEREVAVLRRIQDLNKGPLPDESVARLFREVMSECLAVERPLTIAYLGPQGTFTQQAAIKHFGHAAHTMACPTIDNCFKQVETRQADYLVAPVENSTEGSVGRTLDLLAVTALQACGEVVLRIHHNLLRKNNGSTEGIAKVFSHAQALAQCNDWLGRHLPNAERIAVSSNAEAARLVAESDDGTVAAIAGRTAAEIYGLDMVAECIEDEPNNTTRFLVMGHHETGASGSDKTSLAVSAPNRAGAVASLLQPLTESGISMTKFESRPSKSVLWEYLFFIDIEGHRRDAQIQTALERLGERASFVKVIGSYPTAVL

SEQ ID NO: 5167 - protein, 473 aa, Neisseria meningitidis; identical to SEQ ID NO: 719

SEQ ID NO: 5168 - protein, 265 aa, Neisseria meningitidis
MDTAQKQRWAITLSYDGSRFYGWQKQADGVPTVQAALETALAQIAGESVATTVAGRTDTGVHATAQVVHFDTAAARPQQAWIRGVNAHLPEGIAVLHARQVAPEFHARFDAYGRHYRYLLESAPVRSPLLKNRAGWTHLKLDIEPMRQAAAYLIGEQDFSSFRAAECQAKSPVKTIYRADLTQSAGLVRLDLHGNAFLHHMVRNIMGALVYVGSGRLSVEGFAALIQERSRLKAPPTFMPDGLYLTGVDYPEAYGIIRPQIPEWL

SEQ ID NO: 5169 - protein, 245 aa, Neisseria meningitidis
MKKLSRIVFSTVLLGFSAALPAQTYSVYFNQNGKLTATMSSAAYIRQYSVAAGIAHAQDFYYPSMKKYSEPYIVASTQIKSFVPTLQNGMLILWHFNGQKKMAGGFSKGKPDGEWVNWYPNGKKSAVMPYKNGLSEGTGYRYYRNGGKESEIQFKQNKANGVWKQWYADGNIKTEMVMVNDEPAKILTWDESGRLLSELSIHHHKRNGVVLEWYEDGSKKSEAVYQDDKLVRKTQWDKDGYLIEP

SEQ ID NO: 5170 - protein, 63 aa, Neisseria meningitidis; identical to SEQ ID NO: 980

SEQ ID NO: 5171 - protein, 209 aa, Neisseria meningitidis
MNRQIRQEIFERFRAANPHPTTELNFNSPFELLIAVLLSAQATDVGVNKATAKLFPVADTPQAMLDLGLDGVMEYTKTIGLYKTKSKHIMQTCRILLEKYKGEVPEDREALESLPGVGRKTANVVLNTAFGHPVMAVDTHIFRVSNRTKIAPGKDVREVEDKLMRFIPKEFLMDAHHWLILHGRYTCKALKPQCQTCIINDLCEYPAKA

SEQ ID NO: 5172 - protein, 619 aa, Neisseria meningitidis
MPDYRSKTSTHGRNMAGARALWRATGVMETDFGKPIIAVANSFTQFVPGHVHLHNMGQLVAREIEKAGAIAKEFNTIAIDDGIAMGHSGMLYSLPSRDLIADSIEYMVNAHCADALVCISNCDKITPGMLIAAMRLNIPTIFVSGGPMEAGKVIGVANIQPERRLDLIDAMIESADDNVSNRQVEEVEQNACPTCGSCSGMFTANSMNCLTEALGLSLPGNGSYLATHAGRKELFLEAGRMIVEITKRYYEQDDETVLPRSIATKKAFENAMTMDIAMGGSTNTILHLLAVANEAGVDFKMADIDRLSRVVPCICKTAPNNHDYYMEDVHRAGGIFAILKELDKAGKLHTDVHTIHAPTLKDAIEKWDVTNPENTRAIERFKAAPGGVRTTQAFSQNRMWKTLDLDREKGCIRDVAHAYSQDGGLAVLFGNIAERGCVVKTAGVDESILKFTGRARVFESQEDAVEGILGNQIVVGDIVIIRYEGPKGGPGMQEMLYPTSYLKSKGLGKACALLTDGRFSGGTSGLSIGHASPEAAEGGAIGLVHEGDTVEIDIPNRSIHLVISDEELAARRAEMEARGSKAWKPENRDRYVSVALRAYGAMATSADKGAVRDVAQIER

SEQ ID NO: 5173 - protein, 89 aa, Neisseria meningitidis
MSVKELFKVILDKNKDFPIRTIHRTPMGVLPKPVALSIVQYEDDQGFYLFYLDETGREQTDTYHDTLDSAFKQAEFEFGIRKEEWIQSS

SEQ ID NO: 5174 - protein, 678 aa, Neisseria meningitidis
MTDNALLHLGEEPRFDQIKTEDIKPALQTAIAKAREQIAAIKAQTHTDWANTVERLTGITERVGRIWGVVSHLNSVADTPELRAVYNELMPEITVFFTEIGQDIELYNRFKTIKNSPEFDTLSPAQKTKLNHDLRDFVLSGAELPPEQQAELAKLQTEGAQLSAKFSQNVLDATDAFGIYFDDAAPLAGIPEDALAMFAAAAQSEGKTGYKIGLQIPHYLAVIQYADNRELREQIYRAYVTRASELSDGGKFDNTANIDRTLANALQTAKLLGFKNYAELSLATKMADTPEQVLNFLHDLARRAKPYAEKDLAEVKAFARESLGLADLQPWDLGYAGEKLREAKYAFSETEVKKYFPVGKVLNGLFAQIKKLYGIGFTEKTVPVWHKDVRYFELQQNGETIGGVYMDLYAREGKRGGAWMNDYKGRRRFSDGTLQLPTAYLVCNFAPPVGGREARLSHDEILILFHETGHGLHHLLTQVDELGVSGINGVEWDAVELPSQFMENFVWEYDVLAQMSAHEETGVPLPKELFDKMLAAKNFQRGMFLVRQMEFALFDMMIYSEDDEGRLKNWQQVLDSVRKEVAVIQPPEYNRFALSFGHIFAGGYSAGYYSYAWAEVLSADAYAAFEESDDVAATGKRFWQEILAVGGSRSAAESFKAFRGREPRIDALLRHSGFDNAV

SEQ ID NO: 5175 - protein, 67 aa, Neisseria meningitidis; identical to SEQ ID NO: 86

SEQ ID NO: 5176 - protein, 116 aa, Neisseria meningitidis
MAYSADLRNKALNYYEQCKNISQTAATFNLSRNTLYLWIRLKKQTGSLKHQVTGLNAVKSDRQKPAQYIGQHQDAYLHEIAKHFDCTAATICYALKQMGITHKKRPPLTKNKTRPK

SEQ ID NO: 5177 - protein, 192 aa, Neisseria meningitidis; identical to SEQ ID NO: 2909

SEQ ID NO: 5178 - protein, 94 aa, Neisseria meningitidis
MQPAVYILASQRNGTLYIGVTSDLVQRIYQHREHLIEGFTLRYNVTMLVWYELHPTMESAITREKQLKKWNRAWKLQLIEENNVSWQDLWFDII

SEQ ID NO: 5179 - protein, 289 aa, Neisseria meningitidis
MKRIFLPALPAILPLSTYADLPLTIEDIMTDKGKWKLETSLTYLNSENSRAELAAPVYIQTGATSFIPIPTEIQENGSNTDMLAGTLGLRYGLTGNTDIYGSGSYLWHEERKLDGNGKTRNKRMSDISAGISHTFLKDDKNPALIGFLESTVYEKSRNKASSGKSWLIGATTYKAIDPVVLSLTAAYRINGSKTLSSNTKYKAGNYWMLNPNISFAANDRISLTGGIQWLGKQPDRIDGKKESARNTSTYAHFGAGFGFTKTTALNASARFNVSGQSSSELKLGVQHTF

SEQ ID NO: 5180 - protein, 174 aa, Neisseria meningitidis
MLLLRRDNIDRAFKIVKNRRFDSPWWPGEYDAGMNFLGVQGELKVHELHHRTATLCFEWLGEVSAPRRKEDYKDLKPNVLYDFDGSGKHFANPDARYLLPVGSSGLILKHIQIDDEDTLLRLWCARNIPMPHRLSKIPMLRQYYLSKAWHEIYTINQHLRKTKLIVDVAYGPTD

SEQ ID NO: 5181 - protein, 216 aa, Neisseria meningitidis
MRKSRLSQYKQNKLIELFVAGVTARTAAELVGVNKNTAAYYFHRLRLLIYQNSPHLEMFDGEVEADESYFGGQRKGKRGRGAAGKVAVFGLLKRNGKVYTVTVPNTQTATLFPIIREQVKPDSIVYTDCYRSYDVLDVREFSHFSFAETSFSYQSQHTFCRTTKPYWNELLEPGKTSFTQVRHSQSAFAVFKGVRMAFQQDKSSCSILKQLVKSSL

SEQ ID NO: 5182 - protein, 80 aa, Neisseria meningitidis
MIPYVKRNPMKEYKVVIYQESPLSSLFFGAAKVNPVNFSAFLNKQTPEGWRVVTMEKDLRRMLLFFKREAYVVILERDRV

SEQ ID NO: 5183 - protein, 188 aa, Neisseria meningitidis; identical to SEQ ID NO: 2794

SEQ ID NO: 5184 - protein, 110 aa, Neisseria meningitidis
MSSELIVHTSDAAFEKDVLNADIPVLLDFWAPWCGPCKMIAPILDDIAAEFEGRLKVVKINIDDNEATPSRFGVRGIPTLMVFKNGEVVATKVGALAKGQLTTFVEASIA

SEQ ID NO: 5185 - protein, 443 aa, Neisseria meningitidis
MLFNHTASELLDLCRRTLDLAKATGATAAEADFSESLGQSVSVRLGEIEQIEFQQDKSLDITVYVGKRKGRASTADFSEKALQDTVKAAIDIARYTAEDDCAGLADASLMAQHIGDPDLYHEWDLDTEAAVGLAKQCEQAALNEDERIENSEGAAVQTGHYQYVYGNTHGFAAHRQGTHHSISCSVVAADENGMQRDYWYDSACRHPDMDSPETIGQTAARRTLRRLGSRSIPTGSYPVLFDTTVSGGLIGHLVGALSGGALYRQSSFLIDSIGKKVLPDFLNLREEPHIPRSFRSSYFDAEGVATAPRFVIQNGIVKGYFLSSYSARKLGMQTTGNAGGAHNLYLNHTHETQSDLLKEMGTGLLVTKLMGQGANTITGDYSRGAAGFWVENGIIAYPVHEITVAGRLQDMYRDIVGVADDALRRSSNKIGSILIAGMTVAGS

SEQ ID NO: 5186 - protein, 113 aa, Neisseria meningitidis; identical to SEQ ID NO: 118

SEQ ID NO: 5187 - protein, 429 aa, Neisseria meningitidis
MKKLNTQSPDFQAGLKALLAFETAQNPETERIVADICADVQKRGDAALIEYTNKFDQTNAKSIDDLILTQADLKAAFERIPNDVQTALQTAARRVESYHQRQKMESWSYTDEDGTLLGQQITPLDRVGIYVPGGKAAYPSSVIMNAMPAHVAGVKEIIMVVPTPKGERNDIVLAAAYVAGVTKVFTVGGAQAVAALAYGTETIPQVDKITGPGNAFVAAAKRRVFGVVGIDMVAGPSEILVIADGTTPADWVAMDLFSQAEHDEIAQAILIGTSQAYLDEVEAAMDRLIETMPRRDIIEASLGNRGAMILAKDLDEACEIANYISPEHLELSVENPQEWAKKIRHAGAIFMGRYTGESLGDYCAGPNHVLPTSRTARFSSPLGTYDFQKRSSLIQVSEHGAQKLGETASVLAHGESLTAHARAAEFRMK

SEQ ID NO: 5188 - protein, 279 aa, Neisseria meningitidis
MLVAFLIMLREGIEAALIVGIVAGFLKQSGHSKLMPKVWFGVVLASLMCLGLGYGIHSATGEIPQKQQEFVVGIIGLVAVAMLTYMILWMKKAARSMKRQLQDSVQAALNRGSGQGWALVGMAFLAVAREGLESVFFLLAVFKQSPTWQMPAGAVAGVLAAAVIGALIYQGGMRLNLAKFFRWTGAFLIIVAAGLLAGSLRALHEAGIWNALQDIVFDSSKYLHEDSPLGVLLGGFFGYTDHPTQGEALVWLLYLIPVITWFLCGSRPSETLTRKEELK

SEQ ID NO: 5189 - protein, 426 aa, Neisseria meningitidis; identical to SEQ ID NO: 85

SEQ ID NO: 5190 - protein, 867 aa, Neisseria meningitidis
MSKIVRYLKDYQTPAYRILETDLHFDIAEPQTVVKSRLTVEPQRVGEPLVLDGSAKLLSVKINGAAADYVLEGETLTIADVPSERFTVEVETEILPAENKSLMGLYASAGNLFTQCEPEGFRKITFYIDRPDVMSKFTTTIVADKKRYPVLLSNGNKIDGGEYSDGRHWVKWEDPFAKPSYLFALVAGDLAVTEDYFTTMSGRNVKIEFYTAEADKPKVGFAVESLKNAMKWDETRFGLEYDLDIFMVVAVGDFNMGAMENKGLNIFNTKFVLADSRTATDTDFEGIESVVGHEYFHNWTGNRVTCRDWFQLSLKEGLTVFRDQEFSGDRASRAVRRIENIRLLRQHQFPEDAGPTAHPVRPASYEEMNNFYTMTVYEKGAEVVRMYHTLLGEEGFQKGMKLYFQRHDGQAVTCDDFRVAMADANGINLDQFALWYSQAGTPVLEAEGRLKNNSFELTIKQTVPPTPDMADKQPMMIPVKVGLLNRNGEAVAFDYQGKRATEAVLLLTEAEQTFQFESVTEAVVPSLLRGFSAPVHLNYPYSNDDLLLLLAHDSDAFTRWEAAQTLYRRAVAANLAALSDGIELPKHEKLLAAVEKVISDGLLDNAFKALLLGVPSEAELWDGAENIDPLRYHQAREALLDTLAVRFLPKWHELNRQAAKQENQSYEYSPEAAGWRTLRNVCRAFVLRADPAHIETVAEKYAEMAQNMTHEWGILSAVNGNESDTRNRLLAQFADKFSDDALVMDKYFALVGSSRRSDTLQQVQTALQHPKFSLENPNKARSLIGSFSRNVPHFHAEDGSGYRFIADKVIEIDRFNPQVAARLVQAFNLCNKLEPHRKNLVKQALQRIRAQEGLSKDVGEIVGKILD

SEQ ID NO: 5191 - protein, 193 aa, Neisseria meningitidis; identical to SEQ ID NO: 1322

SEQ ID NO: 5192 - protein, 140 aa, Neisseria meningitidis
MSIMQVEVVSSEQNIYSGEASFVVVPTVQGELGIYPRHEPIMSLVRPGALRLTVPGEDKEVLVAVSGGVLEVQPDKVTVLADVAVRSAEMDQARAEEAKKAAEAGISQAKDDKALAEAHKALAAAIAQLKTLDYIRSHKK

SEQ ID NO: 5193 - protein, 197 aa, Neisseria meningitidis
LYGSHRLLCTQTDGDNAQKKTTTYKEQDPAKVTHYLTQLAEFSDYQRVYLDETGFDRYLFRPYARSLKGQIVKAQISGKRYQRLSLVSAQVGNWLIAPMVYQNTMTGVFFEAWFQQCLLPALTQKSLIILDNARFHRMSVLREMAEKLGHKVLPLAPYSPELNPIEKVWANIKRYLRTVLSDYARFDDALLSYFDFN

SEQ ID NO: 5194 - protein, 914 aa, Neisseria meningitidis
MQQQHLFRLNILCLSLMTALPAYAENVQAGQAQEKQLDTIQVKAKKQKTRRDNEVTGLGKLVKTADTLSKEQVLDIRDLTRYDPGIAVVEQGRGASSGYSIRGMDKNRVSLTVDGLAQIQSYTAQAALGGTRTAGSSGAINEIEYENVKAVEISKGSNSVEQGSGALAGSVAFQTKTADDVIGEGRQWGIQSKTAYSGKNRGLTQSIALAGRIGGAEALLIHTGRRAGEIRAHEDAGRGVQSFNRLVPVEDDHPYAHFVVEEECPNGYAACKDKPKKDIVGKDERQTVSTRDYTGPNRFLADPLSYESRSWLFRPGFRFENKRHYIGGILEHTQQTFDTRDMTVPAFLTKAVFDANKKQAGSLSGNGKYAGNHKYGGLFTNGENGALVGAEYGTGVFYDETHTKSRYGLEYVYTNADKDTWADYARLSYDRQGIGLDNHFQQTHCSADGSDKYCRPSADKPFSYYKSDRVIYGESHRLLQAAFKKSFDTAKIRHNLSVNLGFDRFGSNLRHQDYYFQNANRAYSSKIPTQNGNKKISPNGSTNNPYWVSIGGGNVVTGQICRLGNNTYTDCTPRSINGKSYYAAVRDNVRLGRWADVGAGLRYDYRSTHSDDGSVSTGTHRTLSWNAGIVLKPADWLDLTYRTSTGFRLPSFAEMYGWRAGVQSKAVKIDPEKSFNKEAGIVFKGDFGNLEASWFNNAYRDLIVRGYEAQIKNGKEEAKGDPAYLNAQSARITGINILGKIDWNGVWDKLPEGWYSTFAYNRVHVRDIKKRADRTDIQSHLFDAIQPSRYVVGLGYDQPEGKWGVNGMLTYSKAKEITELLGSRALLNGNSRNTKATARRTRPWYIVDVSGYYTIKKHFTLRAGVYNLLNYRYVTWENVRQTAGGAVNQHKNVGVYNRYAAPGRNYTFSLEMKF

SEQ ID NO: 5195 - protein, 210 aa, Neisseria meningitidis
MIVSIDVDAQKTFTPLCPKELPVNEGHLIVEELNAQAALADLRVMTKDAHHAAAKWLVDNPVDMLKPTGLPDADLTWVAHAMVGTRGYELLDGLPSAKEYDYCVWKGVDPELHPYGACFHDIEEKLSTGLIEWLRCQNTDMVIVGGLATDYCVKTTVLQLLKGGNWQVIVNEAACRGIAPETIETAWQEMRSSGAMILKNAKEIKKYINN

SEQ ID NO: 5196 - protein, 351 aa, Neisseria meningitidis
MTHHYPTDDIKIKEVKELLPPIAHLYELPISKEASGLVHRTRQEISDLVHGMDKRLLVIIGPCSIHDPKAALEYAERLLKLRNQYKNELLIVMRVYFEKPRTTVGWKGLINDPHLDGTFDINFGLRQARSLLLSLNNMGMPASTEFLDMITPQYYADLISWGAIGARTTESQVHRELASGLSCPVGFKNGTDGNLKIAIDAIGAASHSHHFLSVTKAGHSAIVHTGGNPDCHVILRGGKEPNYDAEHVSEAAEQLRAAGVTDKLMIDCSHANSRKDYTRQMEVAQDIAAQLEQDGGNIMGVMVESHLVEGRQDKPEVYGKSITDACIGWDATEELLALLAGANKKRMARAG

SEQ ID NO: 5197 - protein, 70 aa, Neisseria meningitidis
METLILDIGGMSCGGCVKSVTRILEGVKGVASVEVSLENKSATVGYDPAQTDAGALIEAVEDGGYDAALK

SEQ ID NO: 5198 - protein, 962 aa, Neisseria meningitidis
MSNTTVEQFAAELKRPVEDLLKQLKEAGVSKTGGGDSLTLDDKQLLNAYLTKKNGSNGGTISIRRTKTEVSTVDGVKVETRKRGRTVNIPSAEELAAQVKAAQTQAAPVRPEQTAEDAAKARAEAAARAEARAKAEAEAAKLKAAKAGGKAKAAAQKPTEAKAETAPVAAETKPAEESKAEKAQADKIPSKKPAEPKEKAAKPKHERNGKGKDAKKPAKPAAPAAPQPVVSAEEQAQRDEEARRAAALRAHQEALLKEKQERQARREAMKQQAEQQAKAAQEAKTGRQRPAKPAEKPQAAAPAVENKPVNPAKAKKEDRRNRDDEGQGRNAKGKGGKGGRDRNNARNGDDERVRGGKKGKKLKLEPNQHAFQAPTEPVVHEVLVPETITVADLAHKMAVKGVEVVKALMKMGMMVTINQSIDQDTALIVVEELGHIGKPAAADDPEAFLDEGAEAVEAEALPRPPVVTVMGHVDHGKTSLLDYIRRTKVVQGEAGGITQHIGAYHVETPRGVITFLDTPGHEAFTAMRARGAKATDIVILVVAADDGVMPQTIEAIAHAKAAGVPMVVAVNKIDKEAANPERIRQELTAHEVVPDEWGGDVQFIDVSAKKGLNIDALLEAVLLEAEVLELTAPVDAPAKGIIVEARLDKGRGAVATLLVQSGTLKKGDMLLAGTAFGKIRAMVDENGKSITEAGPSIPVEILGLSDVPNAGEDAMVLADEKKAREIALFRQGKYRDVRLAKQQAAKLENMFNNMGETQAQSLSVIIKADVQGSYEALAGSLKKLSTDEVKVNVLHSGVGGITESDVNLAIASGAFIIGFNVRADASSRKLAENENVEIRYYNIIYDAIDDVKAAMSGMLSPEEKEQITGTVEIRQVISVSKVGNIAGCMVTDGVVKRDSHARLIRNNVVIHTGELSSLKRYKDDVKEVRMGFECGLMIKGYNEIMEGDQLECFDIVEVARTL

SEQ ID NO: 5199 - protein, 324 aa, Neisseria meningitidis
MDTLTRFLPEHLQQNQLTEALGGVLLSVVSACTEINAKVRLGALAGVLGMAGTGNIQGEDQKKLDVIANNIMIDTLKANPAVAGLASEEEDTFVSAGENGRYLVLFDPLDGSSNIDVNISVGTIFSILEKPEGALATESFLQTGRQQLAAGYILYGPQTQLVFTFGHGVYMFTLNAENEFVLTKEKPKVPESTKEFAINMSNRRHWLPPVQQYIDELLAGETGTRGKNYNMRWVASMVAEIHRILMRGGVFMYPQDKRDPAKPGKLRLMYEANPMSLILEQAGASASNAYQAMLDIQPENLHQRVAVFMGSSEEVAYLDRLHAK

SEQ ID NO: 5200 - protein, 502 aa, Neisseria meningitidis
MQTDCDVLIAGNGLAALTLALSLPESFRIVILCKNRLDDTASRHAQGGIAAAWSGEDDIEKHVADTLEAGAGLCDEAAVRTILSQGKPAIEWLLSQGVAFDWNHNGLHLTREGGHTCRRIAHVADYTGEAVMQSLIAQIRRCPNIRVYERQMALDIQTESGAAYGLTVLDCRTQETYRIRARHTVLAGGGLGQIYAATTTPPECTGDAIAMAIRAGCAVENLEFIQFHPTGLARPSENGRTFLISEAVRGEGGILTNQSGERFMPHYDLRAELAPRDIVARDIAAEIAKQTQDFVSLDISHQPAAFVRQHFPSIHRHCLSQCGLDITRQAIPVRPVQHYTCGGIQTDPCGRTSLPQLYALGETACTGLHGANRLASNSLLECVVTARLAAQTIADGQAFQTVPSQRSSEHPSAEAGIFSDGIQSAFSRPVLQAFNQRHLGILRNDTGLHRAIAQLRLWKQNQTEPHTASEYENRNLLECSLAVAQAAYRRRQNIGAHFNSDC

SEQ ID NO: 5201 - protein, 147 aa, Neisseria meningitidis
MPLRLLLGILCCLPIFAPAHAQGQPDTVGDFIQKKKVIVDTSKAELCFADDRQCHPVLIGVATPKGTFGLTLNSTDKPGYGGEVIGFKQEGDFLFALHRVWNQIPSERRNERIASPSVSDRIMTNGCINVSDAVYEKLRHYFVLEVI

SEQ ID NO: 5202 - protein, 332 aa, Neisseria meningitidis; identical to SEQ ID NO: 155

SEQ ID NO: 5203 - protein, 239 aa, Neisseria meningitidis
MATLTDKTILVTGASQGLGEQVAKAYAAAGATVILVARHQKKLEKVYDAIVEAGHPEPFAIRFDLMSAEEKEFNQFAATIAEATQGKLDGIVHCAGYFYALSPLDFQTVAEWVNQYRINTVAPMGLTRALFPLLKQSPDASVIFVGESHGETPKAYWGGFGASKAALNYLCKVAADEWERFGNLRANVLVPGPINSPQRIKSHPGEAKSERKSYGDVLPAFVWWASAESKGRSGEIVYL

SEQ ID NO: 5204 - protein, 197 aa, Neisseria meningitidis; identical to SEQ ID NO: 2603

SEQ ID NO: 5205 - protein, 147 aa, Neisseria meningitidis
MSEELQPVFSIERLYVKDLSLEVPHAPQIFLEQGEPEVDMRVSTGSQKLEDGYYNVDVTVTVTAKLDNERTMFLNEVTQSGIFRLENIPEEDVQLLLGVACPNILFPYAREAVSSTVTRAGFPPVLLAPINFEAIYQQQQEAEAAGA

SEQ ID NO: 5206 - protein, 354 aa, Neisseria meningitidis
MASYDKISGGWYRVCPKRSSNRALITVKLPFSTLFRLKPMTDITPFANRLGKNIKHLMKWAKRNGIEAWRIYDRDIPQFPFAADVYGDRIHLQEYDTGWLMRPEEYEAWLAEVLEAVAFVTGFEPEQIRLKRRERQKGLQQYEKTGKAGDDFVITENGRKFWVNLDKYLDTGLFLDHRNTRKKVGETAAGKRFLNLFSYTGSFTVYAATGGAASSETVDLSNTYLDWAKRNFELNGIDTERHKIVRADVFQYLQTAYGEGRQFDLIVMDPPSFSNSKKMSDILDIQRDHKKLIDGAVKLLASDGILYFSNNLRSFVLDDSVSEQYAVKDISKQSVPEDFRNKKIHRCWEIRKKA

SEQ ID NO: 5207 - protein, 195 aa, Neisseria meningitidis; identical to SEQ ID NO: 1424

SEQ ID NO: 5208 - protein, 265 aa, Neisseria meningitidis
MRAVPPPHISITGLGYLGLPLAQKFYQHGSRVAAIKRSLTSDDINLPIHLDTIDLNQDSAFQSANLARDTSFWRHHANKPVWFCLLPPSSLTHYADTVKQWAELARACNVQHLIFTSSTSVYGDTARECDEIALPDPQTESARQILAAEQHLLDSGVPNIDILRLGGLYCAERHPVSRLVQKQNIPGGNRPINIVHRNIAVESLFQTAFNPSGRRLKNIIEPRHPTRREFFTEEAAKLGLPAPDFAPDDSVGKIIRTVCDNGLSL

SEQ ID NO: 5209 - protein, 208 aa, Neisseria meningitidis
MRKIRTKICGITTLEDAAAAAAAGADAVGLVFFQGSSRAVDIARAKKITAALPPFVSVVALFVNESAQNIRRILAEVPIHIIQFHGDEDDAFCRQFHRPYIKAIRVQTASDIRNAADRFPDAQALLFDAYHPSEYGGTGHRFDWTLLAEYSGKPWVLAGGLTPENVGEAVRITGAEAVDVSGGVEASKGKKDPAKVAAFIATANRLSR

SEQ ID NO: 5210 - protein, 194 aa, Neisseria meningitidis
MISRLTGKLVEKTPPQIVIDVNGVGYEADVSMQTFCNLPPVGESVQLFTQLIIREDAHLLFGFATAEERKTFRQLIKVSGIGAKTALGILSAMTADELARAVAEEDVKRLSSAPGIGKKTAERMVLELRGKLVAHTVTDGLFAAAPAADETEDIVGTLLALGYSEREAKAAVKGVPKGTDVGEGVRLALKNLLK

SEQ ID NO: 5211 - protein, 38 aa, Neisseria meningitidis; identical to SEQ ID NO: 2181

SEQ ID NO: 5212 - protein, 149 aa, Neisseria meningitidis
MSIYAVAHIVHLYCAIAFVGGVFFEVLVLSVLHTGRVSCEARREVEKAMSYRAVRVMPFVVGLLFASGIVMAANRYLSILGEPFATSFGTMLTLKILLAFSVLAHFAIAVVKMARSTLTVGWSKYIHAVVFTHMLLIVFLAKAMFYISW

SEQ ID NO: 5213 - protein, 484 aa, Neisseria meningitidis
MSIEHTPPTHDGETGQNHAERPSADFDRVHSLCEILEPAFEQIENGTPLEDAPLRDKLTELTVLLGELHPADVAAVLESLPPRERNVVWLLVKPEDDGEVLLEVSDAVRETLIESMDKDELLAAVDDLDADELAELADDLPHQVVYEALQTRDEEERAQVKAAMSYEDNQVGAIMDFELVSIRADVACEVVLRYLRRFDSLPDHTDKIFVVDENDVLQGVLPIRKLLVADPEDLVENVMAKDVVRFRAEDDVEEAAQAFERYDLVTAPVVDENKKLIGRITVDEMVDVIREESEADMLNMAGLQEEEDLFAPVWDSVKNRWMWLAVNLCTAFLASRVIGAFEGSIEKIVALAALMPIVAGIGGNSGNQTITMIVRAMAMGQLTGMQAGRLLKKEVGVALVNGIIWGTVMGAVSWLLYGSLGIGLVMVAAMTLNLLLAATVGVLIPVVMEKFGRDPALGSSVLITAVTDSGGFLIFLGLATLFLL

SEQ ID NO: 5214 - protein, 162 aa, Neisseria meningitidis
MTPLFRKAVWLLFAVSVCAFAGSLAAQYVLGMEPCVLCISQRLCVLATALCTAIVLMCRPRGRAGGLFGAVFISIPAVTGISVAAYQLWLQSLPPGTAPSCGAPWTFRLKGWPLFDWFEPVVRGFGNCAEPDYLLGIALPVWSVAYFLAVVLTVWWAWARAK

SEQ ID NO: 5215 - protein, 77 aa, Neisseria meningitidis; identical to SEQ ID NO: 707

SEQ ID NO: 5216 - protein, 157 aa, Neisseria meningitidis; identical to SEQ ID NO: 140

SEQ ID NO: 5217 - protein, 659 aa, Neisseria meningitidis
MSQLANAIRFLSADAVQKANSGHPGAPMGMAEMAETLWTKFLNHNPANPKFYNRDRFVLSNGHASMLLYSLLHLTGYNLSIEDLKNFRQLHSKTPGHPEYGYTDGVETTTGPLGQGIANAVGMALAEKILAAEFNKDGLNIVDHYTYVFMGDGCLMEGVSHEACSLAGTLGLGKLIVLYDDNNISIDGKVDGWFTENIPQRFESYGWHVVPNVNGHDTAAIQAAIEAARAETGKPSIICCKTLIGKGSANKEGSHKTHGAPLGADEIEATRKHLGWTYPAFEIPQEIYDAWNAKEQGAKLEADWNELFAQYQAKYPAEAAEFVRRMDKKLPDNFDEYVQAALKEVCAKAETIATRKASQNSIEILAKELPELVGGSADLTPSNLTDWSNSVSVTRDKGGNYIHYGVREFGMGAIMNGLVLHGGVKPFGATFLMFSEYERNALRMAALMKINPVFVFTHDSIGLGEDGPTHQPIEQTATLRLIPNMDVWRPCDTAESLVAWAEAVKAADHPSCLIFSRQNLKFQARSEQQLDDIKRGGYIISEAQGNAQAVIIATGSEVELALEAQKALAAQNIAVRVVSMPSTNVFDRQDAAYQATVLPEGLPRVAVEAGHADGWYKYVGLNGAVVGINRFGESAPADLLFKAFGFTVDNVVDTVKSVL

SEQ ID NO: 5218 - protein, 274 aa, Neisseria meningitidis
MKWLFTLLAVLNIAVFGGTVGYKLAVKATGGVPENRAVENTPPATPAADNAAASVEDTAALLKPGDILTEEQAEQLRLKKEAEQKKLREKKQREEKARREKLAAEKAQAERENGAADALCAAQASLTMDEDDYHRIKGLLGKWSHVASRSVEKRTAKAKPADKTYRVVLPVSADAENQAAELSAKGFNPIPFDGALSLGVGNSRENAQALQNRLAGAGFGGAHIVEHFAEADRQDDSLSVSRMTVLFTGVNAADADEIRKITSLYGKLNLKSCK

SEQ ID NO: 5219 - protein, 328 aa, Neisseria meningitidis; identical to SEQ ID NO: 991

SEQ ID NO: 5220 - protein, 932 aa, Neisseria meningitidis
MDSLATTLVDAQVDLNPHQVDAALFACKNPLSKGVILADEVGLGKTIEAGLVILQHWAERKRKILIITPANLRKQWHQELQEKFGLQGMILEAKSYNAIKKAGKNPFRQENPVICSYQFAKSKADNIKQIGWDLVVLDEAHRLRNVYKKNNVIGKTLKEALENVSSKVLLTATPLQNSLLELYGLVSMIDDRVFGDLESFRAQFGAKATEQTLSHLRQRLSPVCQRTLRRQVQAYVPYTQRLAILQKFTPSDQEREFSHLVAEYLRRPNLQAMPEGQRQLISLVLWKLLASSSRAIAGALDTMTKRLQGVLAESTTQDLVETLDEDYESLDETAEEWEEESESNILTADEYQAIADEIEELKHFKQLAENIREDAKSRALLTALSTAFTKLKELGAAQKAIIFTESKRTQAYLLECLAQTDYAGENGDGIVLFNGTNSDPQAQKIYKNWLKRHEGSDKITGSKTADTRAALVEHFKERGTIMIATEAGAEGINLQFCSLIINYDLPWNPQRVEQRIGRCHRYGQKHDVVVVNFVDETNEADQRVYELLEQKFKLFDGVFGASDEVLGAIGSGVDIERRIAEIYRQCRQSEDIKTAFDSLQSELSDEINQNMMKARQTLLENFDEEVRERLRIRAEESQVALNKYEKILMELTQSELGDSSDFYDGGFILNKLPENLSDGLNIPTGRYELPRKSGEAHLYRITHPLAQAIIDRAKKRDCPPVRLIFDYQGHNGRISTLEPYRGRSGQLIAKLISISALGDMEQHILIAAITENGEILQADDPEKLLRLPARIAETTIKTRFQTTLSDNITERRQTLLNQATERNLGYFEKEVQKLDDWADDLKQGLEQDIKETDREIKEVRRTAATSATLEEKLSWQKKQRELENKRSRQRRELFDKQDEIEVRRNQLIEKLEESLKQKVEEEELFFIEWEIV

SEQ ID NO: 5221 - protein, 282 aa, Neisseria meningitidis
MNAVQVLNFQQNSVRTVADNKGELWFLANDVCEILGYSNPRQAVQKNCKEKGVSNRYTPTRGGEQSMTYINEPNLYRLIIKSRKPAAEAFEEWVMETVLPTIRKTGGYQIGQRTTADDRTGLRQAVAALVGRKGIDYSSAYSMIHQRFNVEAIEDLPAEKLPEAVAYAHALTLHTGLTGEVLDREPLPAPQPALPISGNALYDLAVAVRYGAWAIQMGRDVSLPLKQLGCKQAVTMWTVWAETRSRLKAAANALEALNAHADAEHAAKIRPMLPEIRNLSSV

SEQ ID NO: 5222 - protein, 67 aa, Neisseria meningitidis
MDMTLKHKAEALLGEPLLDEPVRPESWECCGSDCGEACIQTIYWADKARYDAQRRKLKEAGWSDDAV

SEQ ID NO: 5223 - protein, 163 aa, Neisseria meningitidis
MSTETKNYITPAGWQALKNELYRLVNKERPEIVQIVNWAAGNGDRSENGDYLYGKRRMREIDRRIRFLTKRLEAAVVIDPELREATDQVFFSATVGLLRGDGREQTVKIVGIDEIDTAQNKISWISPLARCLIKAREGDEVVLNTPEGREEIEILSVEYIKID

SEQ ID NO: 5224 - protein, 433 aa, Neisseria meningitidis
MTESLRLPAASLKPSTVALPGSKSISNRTLLLAALSDNACEIHSLLKSDDTDRMLEALDKLGVEIEYLAEDRLKVHGTGGRFPNRTADLFLGNAGTAFRPLTAALAVLGGDYHLHGVPRMHERPIGDLADALRIAGADVEYFGKEHYPPLHIGKRQDNGERVIPIKGNVSSQFLTALLMALPLTGQAFEIRMVGELISKPYIDITLKLMAQFGVQVANENYRVFKIPADAHYHAPEHLHVEGDASSASYFLAAGLIAATPVCVIGIGANSIQGDVAFARELEKIGADVVWGENFVEVSRPKERAVQSFDLDANHIPDAAMTLAIVALATGQTCTLRNIGSWRVKETDRIAAMANELRKLGAKVVEEAEAIHITPPETLTPDAVIDTYDDHRMAMCFSLVSLLGVPVVINDPKCTHKTFPTYFDVFSSLTETAE

SEQ ID NO: 5225 - protein, 462 aa, Neisseria meningitidis
MNAVVVAVIVMLVLSLSRVHVVLSLTVGAFVGGAVAGMPLQNIADAAGQVSQAGIIPVFNKGLEGGAKIALSYAMLGAFAMAITHSGLPQQLAGAVVRKLNRGGMPDSVRSGEGAVKWLLLSIILVMGIMSQNIIPIHIAFIPMIVPPLLLVFNRLKIDRRLIACVITFGLVTTYMFLPYGFGAIFLNEILLGNIHSAAPQLDVKNINVMAAMAIPALGMLAGLLLAFVHYRKPRLYQSNNADTAGNADAANRPQPSAYRSLAAAAAIAVCFAIQLMYEDSLVLGAMLGFAVFMMLGVINRDKANDVFGEGIKMMAMVGFIMIAAQGFAAVMNATGHIQPLVESSMAIFGNSKGMAALAMLVVGLLVTMGIGSSFSTLPIIAAIYVPLCVGLGFSPLATVAIVGTAGALGDAGSPASDSTLGPTMGLNADGQHDHIRDSVIPTFIHYNIPLLIAGWIAAMVL

SEQ ID NO: 5226 - protein, 472 aa, Neisseria meningitidis
MNIHTLLSKQWTLPPFLPKRLLLSLLILLAPNAVFWVLALLTATARPIVNLDYLPAALLIALPWRFVKIAGVLAFWLAVLFDGLMMVIQLFPFMDLIGAINLVPFILTAPTPYQIMTGLLLLYMLAMPFVLQKAAAKTDFRHIAVCAAVVAAAGYFTGHLSYYDRGPMANIFGANNFYYAKSQAMLYTVSQNADFITAGLVDPVFLPLGNQQRAATHLNEPKSQKILFIVAESWGLPANPELQNATFAKLLAQKDRFSVWESGSFPFIGATVEGEMRELCAYGGLRGFALRRAPDEKFARCLPNRLKQEGYATFAMHGAGSSLYDRFSWYPRAGFQEIKTAENLIGKKTCAIFGGVCDSELFGEVSAFFKKHSKGLFYWMTLTSHADYPESDIFNHRLKCTEYGLPAETDLCRNFSLHTQFFDQLADLIQRPEMKGTEVIIVGDHPPPVGNLNETFRYLKQGHVAWLHFKIK

SEQ ID NO: 5227 - protein, 306 aa, Neisseria meningitidis
MTKLYAEIAKMETQDDDTVKVWGYASSEEIDSDGEVIAAAAMKAAIPDYMKFGAGREMHGSNAAGTAIEINVEDDGITFFGAHIIDPVVVSKVKTGVYKGFSIGGSVTARDDLNKSQITGLKLTEISLVERPANPDAVSTCFKADKGAEMVNNDTEHNATYFSHFPSKQKSTGGSRCPFLYRFPYFLSAGSTGLAGPFGAGAPTEAWSFSFANTAGPMPLTLVKSSTDLNAPFCARYSAMAFAFAGPMPGSASNSCSEAALMFTAAREKAQENSIQNSTNIFFMVFPLRVANNKPHLATIKRVILK

SEQ ID NO: 5228 - protein, 868 aa, Neisseria meningitidis
MAANQRYRKPLPGTDLEYYDARAACEDIKPGSYDKLPYTSRILVENLVNRADKVDLPTLQSWLGQLIEGKQEIDFPWYPARVVCHDILGQTALVDLAGLRDAIAEKGGDPAKVNPVVQTQLIVDHSLAVECGGYDPDAFRKNREIEDRRNEDRFHFINWTKTAFENVDVIPAGNGIMHQINLEKMSPVVQVKNGVAFPDTCVGTDSHTPHVDALGVISVGVGGLEAETVMLGRASMMRLPDIVGVELTGKRQAGITATDIVLALTEFLRKERVVGAFVEFFGEGARSLSIGDRATISNMTPEFGATAAMFAIDEQTIDYLKLTGRDDAQVKLVETYAKTAGLWADALKTAVYPRVLKFDLSSVTRNMAGPSNPHARFATADLAAKGLAKPYEEPSDGQMPDGAVIIAAITSCTNTSNPRNVVAAALLARNANRLGLKRKPWVKSSFAPGSKVAEIYLKEAGLLPEMEKLGFGIVAFACTTCNGMSGALDPKTQKEIIDRDLYATAVLSGNRNFDGRVHPYAKQAFLASPPLVVAYALAGSIRFDIENDVLGVADGKEIRLKDIWPADEEIDAVVAEYVKPQQFRDVYVPMFDTGTAQKAPSPLYDWRPMSTYIRRPPYWEGALAGERTLRGMRPLAILPDNITTDHLSPSNAILAVSAAGEYLAKMGLPEEDFNSYATHRGDHLTAQRATFANPKLFNEMVRNEDGSVRQGSLARVEPEGKTMRMWEAIETYMNRKQPLIIIAGADYGQGSSRDWAAKGVRLAGVEAIVAEGFERIHRTNLIGMGVLPLQFKPGTNRHTLQLDGTETYDVIGERTPRCDLTLVIHRKNGETVEVPVTCRLDTAEEVLVYEAGGVLQRFAQDFLEGNAA

SEQ ID NO: 5229 - protein, 420 aa, Neisseria meningitidis
MSNTQKQLALAKAAKKSVNTADTEEKNRALLAMADSLEAAAADILAANRLDLEAAAGNIPESMTDRLLLDGKRICTMADGIRAVAALPDPVGEILETSTLPNGLEIVKKRVAMGVIGIIYESRPNVTSDAAALALKSGSAVVLRSGKDAFQSARAIVAALKTGLAQTRIDPDALQLIEDTGRESSYEMMRAKDYLDLLIPRGGAGLIRAVVENAVVPVIETGTGIVHIYIDKDADWDKALRIVYNAKTSRPSVCNSMEVLLVHEDIAADFLPKLERLLVRDRIKAGLPPVRFRLDPQAARHIGGEAAGADDFDTEFLDYILAVKTVASVEEAVGHIETHGTHHSDGIVTENRHAADYFTTHIDSAAVYVNASTRFTDGGEFGLGCEMGISTQKLHARGPMGLKELTSYKYIVQGTGQVRE

SEQ ID NO: 5230 - protein, 248 aa, Neisseria meningitidis; identical to SEQ ID NO: 639

SEQ ID NO: 5231 - protein, 122 aa, Neisseria meningitidis
MDQYYMELKNKLSNRPILLDNTNDFLFVLVNTVKAMIENTDKSQLSELDKILDGVTSQELKLAYDFCQGKFGQAGFSYRRHPNYFYLSSLIATFPEFELSKADRDYLKGIINFDNYLLYELD

SEQ ID NO: 5232 - protein, 78 aa, Neisseria meningitidis; identical to SEQ ID NO: 1246

SEQ ID NO: 5233 - protein, 111 aa, Neisseria meningitidis
MFGKAGLGGLMKQAQQMQENMKKAQAKLAETEIEGEAGNGLVKITMTCAHEVRKIDISPDLIQEAADDKEMLEDLILAALKSARDKAEETANKTMGAFTQGLPPRVGDFFR

SEQ ID NO: 5234 - protein, 284 aa, Neisseria meningitidis
METQENMIKTALQAAQKPFFEFAPNNTPLVFTPDQDGGWRYKSHPELMQNPYRKCGKFLMHDTASLIKFVQKHKQDGTQIYIDADFKSGRIDVTAVINGHTQQAPGWLDFYAVYTPQHTTSASNWLNNNAHRMNQMEFSHFLTNNARNIVSKNPGNENSVYPTAAEVLDFALNLEYTEKTTFKQGYHEQDGRINFTFQSEDSGQTEKNLKMFERFGIEFTPHQGGASYFVEALLKFRIDKNSGALVLWYELQQIDAVIEQAAKDISEAVQKAFPEIDIYFGVIA

SEQ ID NO: 5235 - protein, 273 aa, Neisseria meningitidis
MDFLIVLKALMMGLVEGFTEFLPISSTGHLIVFGNLIDFHSNHKVFEITIQLGAVLAVVFEYRQRFSNVLHGVGKDRKANRFVLNLAIAFIPAAVMGLLFGKQIKEYLFNPLSVAVMLVLGGFFILWVEKRQSRAEPKIVDVDALRPIDALMIGVAQVFALVPGTSRSGSTIMGGMLWGIERKTATEFSFFLAVPMMVAATAYDVLKHYRFFTLHDVGLILIGFIAAFVSGLVAVKALLRFVSKKNYIPFACYRIVFGIAIIILWLSGWISWE

SEQ ID NO: 5236 - protein, 99 aa, Neisseria meningitidis
MHYFSIHDQSGRHIGFFILLADDESEARLQSGRFAVKLEGGMENHVLSPFGQTEIPQYWRVVKDRIELFFDEAPVGTLRNEYLTVSGQTFVLNDLTGNM

SEQ ID NO: 5237 - protein, 260 aa, Neisseria meningitidis
MESLTAINKSRIRQAFQKALNDYDRHALIQQKMTINLMAHLQDYLPDMPLENVLELGCGSGMLSALLQKQISANYWLFNDLCDVQPQLAEKLPQSFDFYCGDAENFPFQRQFDLIASASAVQWFHQPDAFIAHCKTGLKANGLLAVATFGKDNLKEVRQITNIGLNYPTLSQWQTWLAKDFELLWCEDFKAILDFDTPSDVLKHLKYTGVTATNQKNWTRKNLNGFIGDYLSAFSMPSGKVHLTYHPLFFIARYSAAGRQ

SEQ ID NO: 5238 - protein, 210 aa, Neisseria meningitidis
MTVWVGLTGGIGSGKSAAAQCFADLGVPRIDADAAAHSLTASDGIALPEIRRLFGDTVFDTQGLLRRDILRKEVFASPSRKALLESVMLPLIFSEIKKQQETFTDAVYGIVEIPLLTEKRQFVSLIRRVLTISAPLEKRIGRVMARSGLTRGEVADIISHQASESERLLLADDVLLNDGSLKSLCEKTMRLHAFYSGIFASKPTQGKHND

SEQ ID NO: 5239 - protein, 313 aa, Neisseria meningitidis
MPTPKAFALLGPTAGGKTALALKIAETLPVEIISLDSALVYRDMDIGTAKPSASERAFVPHHLIDIIPPTESYSAARFVEDCTRLVGEISSRGRFALIVGGTMMYFRALTQGLNDLPEADACLRADLDEQKQMYGLDFLYRTLQQVDPETACRLKPNDSQRIGRALEVYYLTGKPMSEHLGRQSPHTLPFDLHTAALIPENRARLHENIALRFHLMLEQGFIGEVENLRRRYPGLTADSPAIRCVGYRQAWEYLDGKTDFPAFVEKGIAATRQLAKRQLTWLRKTPLDCVADPFSDGTSCTRLIEAAKRFFGA

SEQ ID NO: 5240 - protein, 299 aa, Neisseria meningitidis
MWFKQISFYPLNKEKLPEADVLADKLAEAEFTHCQGLDWFSEGFAAPVSFSPELVFPADFTLRVALKKEEKVLPAGVIRDILEEKVAEIQNNEARNVGRKEKQELKEQITDDLLPRAFTRSGRTEAVFNTRHGYLLVNNAASAKAENILTKLREALGGLEASLPNTKQSPSSLMTGWLLQGHCEGGFELDSDCELKGTGDIVPVVKVSKQDLTADEVVQHVKNGKTVTQLGLVWREQIAFILTQDFTLKRIQYLDVLQEEAESNGDDAAGLAFASQILMAESVSTMLEELVSYLGGWQD

SEQ ID NO: 5241 - protein, 111 aa, Neisseria meningitidis
MYELSIVELELVSGAGPIADFTTGVGGAIGGGAGYIAGKAGGGTIGGILGSPFGPGGTIVGVAAGQQYGGKVGSVIGAGAGSAIGGVIGRGIESILDNDRSGNDYGDGTGY

SEQ ID NO: 5242 - protein, 421 aa, Neisseria meningitidis
MSEALAKETLNPFEIARKQVKTACDRLKTDPAVYEILKSPTRVLEVNFPVKLDDDTVKTFTGYRSQHNNAVGPYKGGVRFHPGVNLDEVKALSIWMAIKCCVAGIPYGGGKGGITLDPRDYSEAELERIARAYSEAISPLIGEKIDIPAPDVNTNGKIMSWMVDAYENVVKHSAPGVFTGKPVEFGGSLARTEATGYGVNLAAVQALEKLGKDVKGATYAIQGFGNVGYHTGYYAHQSGAKVVAVSTVDVAIYNENGLDMEALFKEFQEKGFITNEAGYGKEITNAELLALDVDVLAPCALENQLTSENAGKVRAKIVVEGANGPTTPEADVILRQNGVLVVPDILANCGGVVVSYFEWVQNLQGYYWEFDEVQEKETVVLRRAFRDIWNLAQEYDVDLRTASYMMSIRRVEKAMKLRGWY

SEQ ID NO: 5243 - protein, 139 aa, Neisseria meningitidis; identical to SEQ ID NO: 921

SEQ ID NO: 5244 - protein, 197 aa, Neisseria meningitidis
MASIQNLYETVVGVLGDQASKVISALGEITVECLPEHYISVMTALRDHEELHFELLVDLCGVDYSTYKNEAWQGKRFAVVSQLLSVKNNQRIRVRVWVSDDDFPVVESVVDIYNSADWYEREAFDMYGIMFNNHPDLRRILTDYGFVGHPFRKDFPISGYVEMRYDEEQKRVIYQPVTIEPREITPRIVREENYGGQ

SEQ ID NO: 5245 - protein, 207 aa, Neisseria meningitidis
MKRLTLLAFVLAAGAVSASPKADVEKGKQVAATVCAACHAADGNSGIAMYPRLAAQHTAYIYHQTIGIRDGKRTHGSAAVMKPVVMNLSDQDILNVSVFYAKQQPKSGEANPKENPELGAKIYRGGLSDKKVPACMSCHGPSGAGMPGGGSEIQAYPRLGGQHQAYIVEQMNAYKSGQRKNTIMEDIANRMSEEDLKAVANFIQGLR

SEQ ID NO: 5246 - protein, 335 aa, Neisseria meningitidis
MSTFFRQTAQAMIARHIDRFPLLKLDQVIDWQPIEQYLNRQRTRYLRDHRGRPAYPLLSMFKAVLLGQWHSLSDPELEHSLITRIDFNLFCRFDELSIPDYSTLCRYRNWLAQDDTLSELLKLINRQLTEKGLKVEKASAAVVDATIIQTAGSKQRQAIEVDEEGQISGQTTPSKDSDARWIKKNGLYKLGYKQHTRTDAEGYIEKLHITPANAHECKHLPPLLEGVPRGTTVYADKGYDSAENRQHLEEHQLQDGIMRKACRNRPLSEVQTKRNRYLSKTRYVVEQSFGTLHRKFRYARAAYFGLIKVSAQSHLKAMCLNLLKAANRLSAPAAA

SEQ ID NO: 5247 - protein, 120 aa, Neisseria meningitidis
MNLPRNRFILLSALWFAGSIYSLLFKAAETAPPPFPHFDKAAHLALFFAQIWLLTKAFKTGKLPIPYRSLMVFALCFALFSECAQAWFTATRTGSLGDVLADMAGTVLALFAARAADRPD

SEQ ID NO: 5248 - protein, 261 aa, Neisseria meningitidis; identical to SEQ ID NO: 3244

SEQ ID NO: 5249 - protein, 183 aa, Neisseria meningitidis
VNYCEFAASLPENTDNPNKHYHDTQYGFPIDSDNGLFERLVLEINQAGLSWTLMLKKRQAFQTAFEGFDIDTVAAFDDTDRERLLADAGIVRNRLKIDAAIFNARQIQALQQEYGSFKNWLDAHHPRSKDEWVKLFKKHFKFVGGEIVGEFLMSTGYLKGAHAESCPVYRETLKYHPKWLDAV

SEQ ID NO: 5250 - protein, 729 aa, Neisseria meningitidis
MIYHRIAVNVPLSDGLLTYSHSDPLPPGTRVLVPFRNKTVVGMVWETDIAPDMDTARILSVRTAFSDEPLLPESWRDLLAFTSRYYHYPTGQAVFAALPQGLKETRAVEMPQPPLFYALNEAGRAQTPPPARFNKKAALWDALLSGEMTMAALKQVNAQAAKLIEDWAVQGWIETTEAAKPVLRPYHGQASHSEFVLNANQQKASDAIQTVFGSFQPFLLYGITGSGKTEVYFDAMAKVLAQGRQVLFLLPEINLTPQLLKRVENRFADVPTAVLHSQMAAGRRTQDYLRAMLGQAKLVIGTRLAVFTPMDDVGLIVVDEEHDGSFKQDNELRYHARDLAVWRAKQGGCPIILGSATPSLESWHKAQSGAYRLLQLTERAHTAAQLPQVDILNVGRLKLDNGFSPQALQLLKQNFEAGGMSLVYLNRRGFAPALFCGDCGHTFGCPNCSAKMVLHQRARQLRCHHCDHREPIPYKCPDCGNQDLTAVGHGTQRVEETLRAFLPKAAVVRVDRDSTAHKNDWADLYRRIADNEIDILVGTQMLAKGHDFARLNLVIVLNADGSLYSADFRAPERLFAELMQVSGRAGRADKPGKVLIQTQLPEHPVFAAVKAQDYAVFAENELNERQMFAMPPFGFQTAVRADAPRVADAMEFLNAAKETLAPLLPESVSQFGAAPMLMVRLAERERAQIFLESTSRQDLHRAVSLWVQVLQQNRDGKIRWSVDVDPQEA

SEQ ID NO: 5251 - protein, 284 aa, Neisseria meningitidis
MAEITAKMVADLRAATGLGMMECKKALVEAEGNFDKAEEILRIKSGAKAGKLAGRTAAEGVLAYAINGNVGALVEVNCETDFVAKDAGFVEFANFVAKTAAEKKPASVEELSELVEAERKAIIAKLGENMSVRRFQVIDTANQLVAYIHGALATEGVLVEFKGSEDVARKIGMHIVAAKPQCVSEAEVDAETVEKERHIYTEQAIASGKPADIAAKMVEGRIRKFLAEITLNGQAFVMNPDQTVAQFAKENGTEVVSFVRYKVGDGIEKAVVDYAAEVAAAAKV

SEQ ID NO: 5252 - protein, 61 aa, Neisseria meningitidis; identical to SEQ ID NO: 965

SEQ ID NO: 5253 - protein, 211 aa, Neisseria meningitidis
LNIKYSGIENRFETTILKKNGVRYGFVSFAPNLAAVKLNDYAKVKKLIAKTKQKAEIVIVMFHGGAEGKQAEHLPFDTEIFYGENRGNVVEFARLAVDSGADVVFGQGPHVTRAVELYRDRFISYSGGNFATYGAINTSGISGIAPIFKIITDKQGRFVSGNIIPITQIGDKIPKIDPEKTVIERIIYLNRSDFPNGNGLDVSPDGSITRR

SEQ ID NO: 5254 - protein, 59 aa, Neisseria meningitidis
MAVQQNKKSPSKRGMHRSHDALTAPALSVDSTTGEVHRPHHISPNGMYRGRKVVKVKGE

SEQ ID NO: 5255 - protein, 149 aa, Neisseria meningitidis
LASSSRYRMYWLESDEQKKIIMWKIYKENSTDLNFALGSIYCQAINLTEFKMWVEKIIREMDLDEIPNYFFDLTDLQSLFHLIDIIGFVPENNLSKNQDNALTGIAFLRGIDVYDSPISKEKALKALKKHPEIYQRFQHFFPFVELPPL

SEQ ID NO: 5256 - protein, 266 aa, Neisseria meningitidis
MKKTIFNITKMDCPSEEQLIRMRLKDVSDIYELQFDIAGRCLTVYHDNQDTTILQVLEPLNFDSHIISTEVIVDKIVFNKPDEHLEKRLLYQVLMINFVFFIIECSVGIFANSMGLIADSLDMLADSFVYILALSAIGMTLAYKKRVAFLAGITQITLALFGVIEVIRRFIGAEQLPNYQLMIGTAFLALIANWLCLYLLSKNQNKEIHIKASMIFTSNDIIINIGVIAAGALTLLTHSSYPDLIIGMIVFVIVLFGARNILKLAK

SEQ ID NO: 5257 - protein, 223 aa, Neisseria meningitidis
MKTVSTAVVLAAAAVSLPGCATESSRSLEVAKVASYNTQYHGVRTPISVGTFDNRSSFQKGIFSDGEDRLGSQAKTILVTHLQQTNRFNVLNRTNLIALKQESGISGKAHNLKGADYVVTGDVTEFGRRDVGDHQLFGILGRGKSQIAYAKVALNIVNVNTSEIVYSAQGAGEYALSNREIIGFGGTSGYDATLNGKVLDLAIREAVNSLVQAVDNGAWQPNR

SEQ ID NO: 5258 - protein, 141 aa, Neisseria meningitidis; identical to SEQ ID NO: 26

SEQ ID NO: 5259 - protein, 447 aa, Neisseria meningitidis
MIKIKKGLNLPIAGRPEQVIYDGPAITEVALLGEEYAGMRPSMKVKEGDAVKKGQVLFEDKKNPGVVFTAPASGKIAAIHRGEKRVLQSVVIAVEGNDEIEFDRYAPDALAKLSGKEVRRNLIQSGLWTALRTRPFSKIPAVDAEPFAIFVNAMDTNPLAADPTVIIKEAAEDFRRGLLVLSRLTERKIHVCKAAGADVPSENAANIETHEFGGPHPAGLSGTHIHFIEPVGANKTVWTINYQDVIAIGRLFATGRLNTERVIALGGSQVNKPRLLRTVLGAKVSQITAGELVDADNRVISGSVLNGAITQGAHDYLGRYHNQISVIEEGRSKELFGWVAPQPDKYSITRTTLGHFLKNKLFKFTTAVNGGDRAMVPIGTYERVMPLDILPTLLLRDLIVGDTDSAQALGCLELDEEDLALCSFVCPGKYEYGPLLRKVLETIEKEG

SEQ ID NO: 5260 - protein, 152 aa, Neisseria meningitidis
MKTQISLAAAAITLLLSACGGSGIPSQPKGEISENRTAAFKSMMPEFTRMGKMVKDEEPYDVEKFKQAAASFAESSKKPFTLFESDPQGNGRALPAVWSDGAKFEAEKTKFAAAVEKLNAAAQTGKLDEIKAAYGETGASCKSCHDSFRAPE

SEQ ID NO: 5261 - protein, 66 aa, Neisseria meningitidis; identical to SEQ ID NO: 421

SEQ ID NO: 5262 - protein, 159 aa, Neisseria meningitidis; identical to SEQ ID NO: 929

SEQ ID NO: 5263 - protein, 612 aa, Neisseria meningitidis
MLPARFTILSVLAAALLAGQAYAAGAADAKPPKEVGKVFRKQQRYSEEEIKNERARLAAVGERVNQIFTLLGGETALQKGQAGTALATYMLMLERTKSPEVAERALEMAVSLNAFEQAEMIYQKWRQIEPIPGKAQKRAGWLRNVLRERGNQHLDGLEEVLAQADEGQNRRVFLLLAQAAVQQDGLAQKASKAVRRAALKYEHLPEAAVADVVFSVQGREKEKAIGALQRLAKLDTEILPPTLMTLRLTARKYPEILDGFFEQTDTQNLSAVWQEMEIMNLVSLHRLDDAYARLNVLLERNPNADLYIQAAILAANRKEGASVIDGYAEKAYGRGTGEQRGRAAMTAAMIYADRRDYTKVRQWLKKVSAPEYLFDKGVLAAAAAVELDGGRAALRQIGRVRKLPEQQGRYFTADNLSKIQMFALSKLPDKREALRGLDKIIEKPPAGSNTELQAEALVQRSVVYDRLGKRKKMISDLERAFRLAPDNAQIMNNLGYSLLSDSKRLDEGFALLQTAYQINPDDTAVNDSIGWAYYLKGDAESALPYLRYSFENDPEPEVAAHLGEVLWALGERDQAVDVWTQAAHLTGDKKIWRETLKRHGIALPQPSRKPRK

SEQ ID NO: 5264 - protein, 426 aa, Neisseria meningitidis
MENSLKEAALKFHELPVPGKISVTPTKSLATDKDLALAYSPGVAAPCMEIHADPQNAYKYTAKGNLVAVISNGTAVLGLGDIGALAGKPVMEGKGVLFKKFAGVDVFDIEIDEKDPQKLVDIIAALEPTFGGINLEDIKAPECFYIERELRKRCKIPVFHDDQHGTAIITAAAVLNALRFTGRKIEEATLVCSGAGAAAIACLNQLLDLGLKRENVTVCDSKGVIYQTREDKDRMDESKQFYAIEDNGQRVLADAVKGKDIFLGLSGANLLTPEMLNTMNEKPIVFAMANPNPEILPPLAKETRPDVVIGTGRSDFPNQVNNVLCFPFIFRGALDVGATTINEEMKRACVYALADLAMEEVTEEVVAAYGKKFEFGAEYLIPTPFDSRLLPRVATAAAKAAMESGVATRPIADLEAYAAKLSEWKL

SEQ ID NO: 5265 - protein, 357 aa, Neisseria meningitidis; identical to SEQ ID NO: 3038

SEQ ID NO: 5266 - protein, 97 aa, Neisseria meningitidis
MPTKAMTEHLEERQLLDGIMRKACRNRPLAEAQTKRNRYLSKTRYVVEQSFGTLHRKFRYARAAYFGLIKVSAQSHLKAMCLNLLKAPNRLSAPVAA

SEQ ID NO: 5267 - protein, 351 aa, Neisseria meningitidis
MMKIKALMIAAALLAAADVHAAPQKAKTASAKVAKVAKVAKVAKVAKVAKVAKVAATAQKEAAPAQQQGGIRFSDGIAAVADNEVITRRRLAEAVAEAKANLPKEAQISESELSRQVLMQLVNQSLIVQAGKRRNIQASEAEIDAVVAKNSALKNLSPAQRRDFADNIIAEKVRQQAVMQNSRVSEAEIDAFLEQAQKQGITLPEGAPLRQYRAQHILIKADSENAAVGAESTIRKIYGEARSGTDFSSLARQYSQDASAGNGGDLGWFADGVMVPAFEEAVHALKPGQVGAPVRTQFGWHIIKLNEVRDAGTPQERIRNSVRQYIFQQKAEQATVNLLRDLHSGAYVDIR

SEQ ID NO: 5268 - protein, 225 aa, Neisseria meningitidis
MQADFNRPVLAVDTGTSYLSLALRADGETRLFHQEAGSRQSELILPEIRTLFRNAGITAADLGAIVYTKGPGAFTGLRIGIGVAQGLATPFDTPLIGIPSLDAAASMPPPQSCILAAADARMGEVFYAWFDTLNRRRLSDYQVGRAADIRLPEGCAFSDGIGSAFALEETPPFSGKPDMPTAADFLNLAAEGGFPAVAAAHSELLYVRNKIALTAKEQAERKART

SEQ ID NO: 5269 - protein, 220 aa, Neisseria meningitidis
MNLKLVFESGDPVLIGVFVLMLLMSIVTWCLVVLRCIKLYRARKGNAAVKRHMRDTLSLNDAVEKVRAVDAPLSKLAQEALQSYRNYRRNEASELAQALPLNEYLVIQIRNSMAQIMRRFDYGMTALASIGATAPFIGLFGTVWGIYHALINIGQSGQMSIAAVAGPIGEALVATAAGLFVAIPAVLAYNFLNRGTKILTQDLDAMAHDLHVRLLNQKDS

SEQ ID NO: 5270 - protein, 245 aa, Neisseria meningitidis
MGGQKTHFGFSTVNEDEKAGKVAEVFHSVAKNYDIMNDVMSAGLHRVWKHFTINTAHLKKGDKVLDIAGGTGDLSRGWAKRVGKEGEVWLTDINSSMLTVGRDRLLNEGMILPVSLADAEKLPFPDNYFNLVSVAFGLRNMTHKDAALKEMYRVLKPGGTLLVLEFSKIYKPLEGAYDFYSFKLLPAMGRLIAKDAESYQYLAESIRMHPDQETLKQMMLDAGFDSVDYHNMSAGIVALHKGVKF

SEQ ID NO: 5271 - protein, 116 aa, Neisseria meningitidis
VLDGVFTVGALMAFMSYKSQFESKAGSLIDQFVQIKMLGLHAERLADIVLEETENEQNNDFRLPENLEHFDIQIENVSFRYAENEPYILQDFSLIIKQGTAKIPAATGIFVRLSPV

SEQ ID NO: 5272 - protein, 389 aa, Neisseria meningitidis
MTAHKILPVLLSIILGVSHATAASPAPNRPTVHAAPTLQTPETLTAAHIVIDLQSRQTLSAKNINTPVEPAALTQLMTAYLVFKNMKSGNIQSEENLKIPESAWASEGSRMFVRPGDTVGTDKLLKGMIALSANDAALTLAGRLGNGSIENFVQQMNKEARRLGMKNTVFKNPTGLSREGQVSTAKDLALLSEALMRDFPEYYPLFSIKSFKFKNIEQNNRNILLYRDNNVNGLKAGHTESGGYNLAVSYTGNGRHILVITLGSESAEIRASDNSKLLNWALQAFDTPKIYPKGKTVAQIQISGGSKKTVRAGFLKEAYITLPHKEAKMAEQILETIQPIPAPVKKGQILGKIKIRQNGYTIAEKEIVALENVKKRSRWQRLWACLTGQ

SEQ ID NO: 5273 - protein, 412 aa, Neisseria meningitidis
MAFYAFKAMRAAALAAAVALVLSSCGKGGDAAQGGQPAGREAPAPVVGVVTVHPQTVALTVELPGRLESLRTADVRAQVGGIIQKRLFQEGSYVRAGQPLYQIDSSTYEANLESARAQLATAQATLAKADADLARYKPLVAAEAVSRQEYDAAVTAKRSAEAGVKAAQAAIKSAGINLNRSRITAPISGFIGQSKVSEGTLLNAGDTTVLATIRQTNPMYVNVTQSASEVMKLRRQIAEGKLLAADGVIAVGIKFDDGTVYPEKGRLLFADPTVNESTGQITLRAAVPNDQNILMPGLYVRVLMDQVAVDNAFVVPQQAVTRGAKDTVMIVNAQGGMEPREVTVAQQQGTNWIVTSGLKDGDKVVVEGISIASITGAKKVTPKEWAPSENQAAAPQSGVQTASEAKTASEAE

SEQ ID NO: 5274 - protein, 37 aa, Neisseria meningitidis; identical to SEQ ID NO: 970

SEQ ID NO: 5275 - protein, 74 aa, Neisseria meningitidis; identical to SEQ ID NO: 2281

SEQ ID NO: 5276 - protein, 350 aa, Neisseria meningitidis
MTLEEQQAKEALDGIIKKSRVHLYKPIQIAEILYHDRCIKQLDFLNLDTYRNQSKRWRDEICRRFLGRISTSSAKFQDNLFEKNAMPPEKLAVLGTLNRQLDGGVESYIYKQFFNRFSQMSEALAYVGNTDRYSFQLSEFLNLFWLEPGLKRSIDKIYEIVVYALFDALVSELGITVSIDFPKENLFLWEEYQDFAEKIVSIPQNGHLKLPAKIHRVGVTNAADRGLDMWSNFGLAIQVKHLSLDEELAEDIVSSISADRIVIVCKKAEQSVIVSLLTQIGWKSRIQNIVTEDDLIRWYEKALRGQYPIAEALLENIKTEIMREFPAVNEANEFLDFAQSRGYDITVTHF

SEQ ID NO: 5277 - protein, 250 aa, Neisseria meningitidis
MTDILIDNTATETVRTLIRAFPLVPVSQPPEQGSYLLAEHDTVSLRLVGEKSSVIVDFASGAAQYRRTKGGGELIAKAVNHTAHPTVWDATAGLGRDSFVLASLGLAVTAFEQHPAVACLLSDGIRRALLNPETQDTAARINLHFGNAAVQMPALVQTQGKPDIVYLDPMYPERRKSAAVKKEMTYFHRLVGEAQDEAALLHTARQTAKKRVVVKRPRLGEHLAGQAPAYQYTGKSTRFDVYLPYGTGKG

SEQ ID NO: 5278 - protein, 167 aa, Neisseria meningitidis
MNTLQKGFTLIELMIVIAIVGILAAVALPAYQDYTARAQVSEAILLAEGQKSAVTEYYLNHGEWPSDNSAAGVASSSTIKGKYVKEVTVANGVVTAEMKSSGVNKEIKDKKLSLWAKRQDGSVKWFCGQPVTRTAADSDDVAAATDANGKIDTKHLPSTCRDASSAS

SEQ ID NO: 5279 - protein, 349 aa, Neisseria meningitidis
MSKQPTSKRQWRDGAAPSAKKTAKPFKSKARPKDETDKTAAQAYGQKASDGIKPQNLPKQRAAKAKKLVVRNPNQKIMEHARDLKERRSDLSRMEPERLQKVLAASGVGSRREMEEWINNGWVTVNGKTAQLGDKVTPDDHVTVKGSIIKLKWADRLPRIILYYKQEGEIVSRDDPQGRVSIFDRLPQAASSRWVAIGRLDINTSGLLILTTSGELVQRFAHPSFEVEREYAVRVLGGLTGEQMRVLTEEGVMLEDGLAKVERIREQGGEGANKWYNVVIKEGRNREVRRIFESQGLTVSRLVRVGFGPIGLPNRLKRGQFYELNPAEVANILKWAEMLLPGERRRKKA

SEQ ID NO: 5280 - protein, 544 aa, Neisseria meningitidis
MAAKDVQFGNEVRQKMVNGVNILANAVRVTLGPKGRNVVVDRAFGGPHITKDGVTVAKEIELKDKFENMGAQMVKEVASKTNDVAGDGTTTATVLAQSIVAEGMKYVTAGMNPTDLKRGIDKAVAALVEELKNIAKPCDTSKEIAQVGSISANSDEQVGAIIAEAMEKVGKEGVITVEDGKSLENELDVVEGMQFDRGYLSPYFINDAEKQIAALDNPFVLLFDKKISNIRDLLPVLEQVAKASRPLLIIAEDVEGEALATLVVNNIRGILKTVAVKAPGFGDRRKAMLQDIAILTGGTVIAEEVGLSLEKATLDDLGQAKRIEIGKENTTIIDGFGDAAQIEARVAEIRQQIETATSEYDKEKLQERVAKLAGGVAVIKVGAATEVEMKEKKDRVEDALHATRAAVEEGVVAGGGVALLRARAALENLHTGNADQDAGVQIVLRAVESPLRQIVANAGGEPSVVVNKVLEGKGNYGYNAGSGEYGDMIEMGVLDPAKVTRSALQHAASIAGLMLTTDCMIAEIPEEKPAMPDMGGMGGMGGMM

SEQ ID NO: 5281 - protein, 242 aa, Neisseria meningitidis
MLLGVNIDHIATVRNARGTTYPSPVEAALVAETHGADLITMHLREDRRHIKDADVFAVKNAIRTRLNLEMALTEEMLENALKVMPEDVCIVPEKRQEITTEGGLDVLAQQDKIAEFTKILTDAGIRVSLFIDADDRQIQAAYDVGAPVVELHTGAYADARSHAEQIRQFERIQNGAHFAGDLGLVVNAGHGLTIHNVTPIAQILAIRELNIGHSLIAQALFLGLPEAVRQMKEAMFRARLLP

SEQ ID NO: 5282 - protein, 79 aa, Neisseria meningitidis; identical to SEQ ID NO: 831

SEQ ID NO: 5283 - protein, 233 aa, Neisseria meningitidis
MSLKTVTVIGAMEQEIELLREMMENVKAVSFGKFAAYEGELAGKRMVLALSGIGKVNAAVATAWLIHQFAPDCVINTGSAGGLGKGLKVGDVVVGTEIAHHDVDVTAFGYVWGQVPQLPARFASDGILIETAKRAARTFEGAAVEQGLIVSGDRFVHSSEGVAEIRKHFPEVKAVEMEAAAIAQTCHQLETPFVIIRAVSDSADEKADISFDEFLKTAAANSAKMVAEIVKSL

SEQ ID NO: 5284 - protein, 148 aa, Neisseria meningitidis
MSGMAGRHPYGVRSGLRRNGLKLWDIHFRMTRFIVARCGLLFATLKGKTMKKMFVLFCMLFSCAFSLAAVNINAASLQELEALPGIGPAKAKAIAEYRAQNGAFKSVDDLTKVKGIGPAVLAKLKDQASVGAPAPKGPAKPVLPADKK

SEQ ID NO: 5285 - protein, 73 aa, Neisseria meningitidis
MRQDNRPRKTPYAGAAVFLIFGFAFAGMTHHAPENHTADIPPPVETQPQTPAIWETDPMAGVVLEPVSEEAEK

SEQ ID NO: 5286 - protein, 217 aa, Neisseria meningitidis
MFSVPRSFLPGVFVLAALAACKPQDNSAAQAASSSASASAAENAAKPQTRGTDMRKEDIGGDFTLTDGEGKPFSLSDLKGKVVILSFGFTHCPDVCPTELLTYSDTLKQLGGQAKDVKVVFVSIDPERDTPEIIGKYAKQFNPDFIGLTATGGQNLPVIKQQYRVVSAKVNQKDDSENYLVDHSSGAYLIDKNGEVAIFSPYGSEPETIAADVRTLL

SEQ ID NO: 5287 - protein, 333 aa, Neisseria meningitidis; identical to SEQ ID NO: 5065

SEQ ID NO: 5288 - protein, 574 aa, Neisseria meningitidis
VKPLRRLTNLLAACAVAAAALIQPALAADLAQDPFITDNAQRQHYEPGGKYHLFGDPRGSVSDRTGQINVIQDYTHRMGNLLIQQANINGTIGYHTRFSGHGHEEHAPFDNHASRSASKEQGNVDEGFTVYRLNWEGHEHHPADAYDGPKGGNYPKPTGARDEYTYHVNGTARSIKLNPTDTRSIRQRISDNYSNLGSNFSDRADEANRKMFEHNAKLDRWGNSMEFINGVAAGALNPFISAGEALGIGDILYGTRYAIDKAAMRNIAPLPAEGKFAAIGGLGSVAGFEKNTREAVDRWIQENPNAAETVEALVNVLPFAKVKNLTKAAKPGKAAVSGDFSKSYTCSFHGSTLVKTADGYKAIAHIQAGDRVFAKDETSGKTGYKPVTARYGNPYRETVYIEISDGIGNSQTLISNSIHPFYSQGKWIQAGRLKKGDTLLSESGAKQTVQNITLKQQPLKAYNLTVADWHTYFVKGNQAETEGVWVHNSCPPKRAPEYHAGTVSESNFLNVAEKWLGENYKSYPNGRYVSQDGMRQVRYGHHETNSSTHHGHFESYDKPNGRVIENSVVTIIQD

SEQ ID NO: 5289 - protein, 275 aa, Neisseria meningitidis
MKLIEQHQIFGGSQQVWAHHAQTLQCEMKFAVYLPNNPENRPLGVIYWLSGLTCTEQNFITKSGFQRYAAEHQVIVVAPDTSPRGEQVPNDDAYDLGQGAGFYLNATEQPWAANYQMYDYILNELPRLIEKHFPTNGKRSIMGHSMGGHGALVLALRNQERYQSVSAFSPILSPSLVPWGEKAFTAYLGKDREKWQQYDANSLIQQGYKVQGMRIDQGLEDEFLPTQLRTEDFIETCRAANQPVDVRFHKGYDHSYYFIASFIGEHIAYHAAFLK

SEQ ID NO: 5290 - protein, 88 aa, Neisseria meningitidis; identical to SEQ ID NO: 1100

SEQ ID NO: 5291 - protein, 118 aa, Neisseria meningitidis
MNEHNLLIFCLKDNVSISEYTEMVDWAYKNIQSETVVEITENQIIEYQNRGLWGLVSEITDNWLFGPSEGDWLIDKESILAVKEKLQNSDFSTEPLVKNIIHVLEYAIKNEKTVIFHF

SEQ ID NO: 5292 - protein, 375 aa, Neisseria meningitidis
LLIHYIDIAKRNFVIAVSSLSKTKTETNNPKGIAHTIEYLKKHKVALVVTESTGGLEIPAAKAIRRAGIAVIIANPRQTHQFAQSQPLTKTDAKDAKMPAFFAQMTAQKEDSQTMPYQPPTEAEEVLEALVNRRNQSADMRTAEKNRLHQVHETQVGSVKQLIAHFDRLIDELDKQIDDHTHTHFDGKAQVAEQIKGIGSITTATLMAMLPELGRLSHKRIASLVGIAPHPRESEETKFKAAALAEGLRCVRHCIWLPWQRHVLNRLFGISTNACCPRVSRIRLLLRHVCANCWRPLQNSFPSRQPKPKHRFSAVFSCFRPKYLLILPKYPLNPARIPDNQASGPPFRRKQAHLACWRLSTGSNTSPSDGFAHSL

SEQ ID NO: 5293 - protein, 378 aa, Neisseria meningitidis
MEMKQTDSSIKSRAAVAFAPNQPLQIVEIDVEMPRKGEVLIRNTHTGVCHTDAFTLSGSDPEGVFPVVLGHEGAGVVVAVGEGVSSVKPGDHVIPLYTAECGECEFCCSGKTNLCVSVRDTQGKGLMPDGTTRFSYQGQPIYHYMGCSTFSEYSVVAEVSLAKINPEANHEQVCLLGCGVTTGIGAVHNTAKVQEGDSVAVFGLGAIGLAVVQGARQAKAGRIIAIDTNPSKFELAKQFGATDCLNPNDYDKPIKDVLLDINKWGIDHTFECIGNVNVMRQALESAHRGWGQSIIIGVAGAGQEISTRPFQLVTGRVWKGSAFGGVKGRSELPKMVEDSMKGDIELEPFVTHTMTLDQINKAFDLMHEGKSIRAVIHY

SEQ ID NO: 5294 - protein, 714 aa, Neisseria meningitidis
MKTPLLKPLLITSLPVFASVFTAASIVWQLGEPKLAMPFVLGIIAGGLVDLDNRLTGRLKNIIATVALFTLSSLTAQSTLGTGLPFILAMTLMTFGFTILGAVGLKYRTFAFGALAVATYTTLTYTPETYWLTNPFMILCGTVLYSTAIILFQIILPHRPVQESVANAYDALGGYLEAKADFFDPDEAEWIGNRHIDLAMSNTGVITAFNQCRSALFYRLRGKHRHPRTAKMLRYYFAAQDIHERISSAHVDYQEMSEKFKNTDIIFRIHRLLEMQGQACRNTAQALRASKDYVYSKRLGRAIEGCRQSLRLLSDSNDSPDIRHLRRLLDNLGSVDQQFRQLQHNGLQAENDRMGDTRIAALETGSLKNTWQAIRPQLNLESGVFRHAVRLSLVVAAACTIVEALNLGYWILLTALFVCQPNYTATKSRVRQRIAGTVLGVIVGSLVPYFTPSVETKLWIVIASTTLFFMTRTYKYSFSTFFITIQALTSLSLAGLDVYAAMPVRIIDTIIGASLAWAAVSYLWPDWKYLTLERTAALAVCSNGAYLEKIAERLKSGETADDVEYRATRRRAHEHTAALSSTLSDMSSEPAKFADSLQPGFTLLKTGYALTGYISALGAYRSEMHEECSPDFTAQFHLAAEHTAHIFQHLPETEPDDFQTALNTLRGELDTLRTHSSGTQSHILLQQLQLIARQLEPYYRAYRQIPHRQPQNAA

SEQ ID NO: 5295 - protein, 617 aa, Neisseria meningitidis
MNRYPLWKYLLIVFTIAVAAVYSLPNLFGETPAVQVSTNRQAIIINEQTQFKVDAALKNAGIQTDGMFVVDNSLKVRFKDTETQLKARDVIENTLGEGYITALNLLADSPEWMAKIKANPMFLGLDLRGGVHFTMQVDMKAAMQKTFERYSGDIRRELRREKIRSGTVRQAGNSLTVPLQDAGDVQKALPQLRKLFPEATLNSDGSNIVLTLSEEAVNKVRSDAVKQNITTLHNRVNELGVAEPVIQQSGADRIVVQLPGVQDTAKAKDIIGRTATLELRMVEDDPAKLREALEGNVPSGYELLSSGGDRPETLLISKQVELTGDNINDAQPSFDQMGAPAVSLSLDSAGGSIFGELTAANVGKRMAMVLIDQGKSEVVTAPVIRTAITGGRVEISGSMTTAEANDTSLLLRAGSLAAPMQIVEERTIGPSLGKENIEKGFHSTLWGFAIVAAFMVVYYRLMGFFSTIALSANILFLIGILSAMQATLTLPGMAALALTLGMAIDSNVLINERIREELRAGVPPQQAINLGFQHAWATIVDSNLTSLIAGIALLVFGSGPVRGFAVVHCLGILTSMYSSVVVFRALVNLWYGRRRKLQNISIGAVWKPEAETAAGKE

SEQ ID NO: 5296 - protein, 65 aa, Neisseria meningitidis; identical to SEQ ID NO: 981

SEQ ID NO: 5297 - protein, 288 aa, Neisseria meningitidis
MKGIILAGGSGTRLYPITRGVSKQLLPVYDKPMIYYPLSVLMLAGIRDILVITAPEDNASFKRLLGDGSDFGISISYAVQPSPDGLAQAFIIGEEFIGNDNVCLVLGDNIFYGQSFTQTLKQAAAQTHGATVFAYQVKNPERFGVVEFNENFRAVSIEEKPQRPKSDWAVTGLYFYDNRAVEFAKQLKPSARGELEISDLNQMYLEDGSLSVQILGRGFAWLDTGTHESLHEAASFVQTVQNIQDLHIACLEEIAWRNGWLTKKDVETRAKPLEKTAYGQYLLRLIGK

SEQ ID NO: 5298 - protein, 167 aa, Neisseria meningitidis; identical to SEQ ID NO: 189

SEQ ID NO: 5299 - protein, 231 aa, Neisseria meningitidis; identical to SEQ ID NO: 3708

SEQ ID NO: 5300 - protein, 335 aa, Neisseria meningitidis; identical to SEQ ID NO: 4541

SEQ ID NO: 5301 - protein, 316 aa, Neisseria meningitidis
MSQHRKLIILGSGPAGYTAAVYAARANLNPVIITGIAQGGQLMTTTEVDNWPADADGVQGPELMARFLAHAERFGTEIIFDQINAVDLQKRPFTLKGDMGEYTCDALIVATGASAKYLGLPSEEAFAGKGVSACATCDGFFYKNQDVAVVGGGNTAVEEALYLANIAKTVTLIHRRSEFRAEKIMIDKLMKRVEEGKIILKLESNLQEVLGDDRGVNGALLKNNDGSEQQIAVSGIFIAIGHKPNTDIFKGQLEMDEAGYLKTKGGTADNVGATNIEGVWAAGDVKDHTYRQAITSAASGCQAALDAERWLGSQNI

SEQ ID NO: 5302 - protein, 163 aa, Neisseria meningitidis
MNSLFVDNTVFITRLKAGHIGRLVQALFEEWHGFEPWSSVDKIHAYYGRCLKDDELPLAFAAVDDFGTLLGSAAVKRHDMESFPQYEYWLGDVFVLPEYRGKGIGRRLVAHCIGAARSLGIKFLYLYTPDVQIFYESFGWAVVGRHFHNGEWVTVMRLDMDKV

SEQ ID NO: 5303 - protein, 414 aa, Neisseria meningitidis; identical to SEQ ID NO: 1660

SEQ ID NO: 5304 - protein, 205 aa, Neisseria meningitidis
MTFPPLKSPLKFYAVVPTADWVGRMVKAGADTVQLRCKALHGDELKREIARCVAACQGSHTQLFINDHWREAIEAGAYGVHLGQEDMDTADLAAIAAAGLRLGLSTHSVAELDRALSVHPSYIASGAIFPTTTKQMPTAPQGLDKLCEYVKQAGGTPVVAIGGIDLNNARAVLATGVSSLAAVRAVTEAANPEAVVKAFQALWDG

SEQ ID NO: 5305 - protein, 397 aa, Neisseria meningitidis
MFFKHIEAAPADPILGLGEAFKAETRPEKVNLGIGVYKDASGATPLVKAVKEAEKRLLESETTKNYLTIDGVADYNAQTQILLFGKDHEIIASRRAKTAQSLGGTGALRIAAEFAKRQLNAQTIWISNPTWPNHNAIAKAVGIQDKPYRYYDAAKHGLDWDGMIEDLSQAQKGDIVLLHGCCHNPTGIDPTPEQWETLAKLSAEKGWLPLFDFAYQGFGNGLEEDAYGLRVFLKHNTELLIASSYSKNFGMYNERVGAFTLVAEDEETAARAHSQVKTIIRTLYSNPASHGANTIALVLKNDDLKAQWIAELDEMRGRIKAMRQKFVGLLKAKGASQNFDFIIKQNGMFSFSGLTPEQVDRLKNEFAIYAVRSGRINVAGITDDNIDYLCESIVKVL

SEQ ID NO: 5306 - protein, 161 aa, Neisseria meningitidis
MTQIGIIMGSNSDWPVMRQAAQFLEEFGVEYEARVVSAHRTPDLMFQYAETARARGIKAIIAGAGGAAHLPGMVAAKTTVPVLGVPVPSKYLRGEDSLLSIVQMPKGVPVATFAIGEAGAANAALFAVSMLANENPELAQKLADFRAKQEQAVLSMELEQI

SEQ ID NO: 5307 - protein, 436 aa, Neisseria meningitidis
MYAKKGGLGLVKSRRFAPLFATQFLGAFNDNVFKTALFVMIGFYGLGQNGFLPAGQMLNLGALLFILPYFLFSSLSGQLGNKFDKAVLARWVKVLEMIIMAVAAYGFYIRSAPLLLACLFCMGAQSTLFGPLKYAILPDYLDDKELMMGNSLIESGTFVAILFGQILGTAVAGVPPYIVGILVLLVAVGGTVGSLFMPSVPAKAADTQIEWNIVRGTKSLLRETVRHKPVFTAIIGISWFWFVGAVYTTQLPTFTQIHLGGNDNVFNLMLALFSIGIAAGSVLCAKFSRERLMLAWVTVGALGLTVCGLVLVWLTHGHRFEGLNGIFWFLSQGWAYPVMLVMMLIGFFGGFFSVPLYTWLQTASSETFRARAVAANNIVNGIFMVSAAVLSAVLLFLFDSISLLYLIVALGNIPLAVFLIKRERRFLGAAAIGEKR

SEQ ID NO: 5308 - protein, 903 aa, Neisseria meningitidis
MSIRTQNYINGRLSLRAPQAESLAKLKQALDIAPEMAQKDRDVTAVLNTLKAEFPTLQDFEREFPSLCFALATGVGKTRLMGAFIAYLHLAHGINNFFVLAPNLTIYNKLIADFTPNTPKYVFKGISEFAVNPPKLISGDNYEQQDLSMGMDNLFGEITVNVFNISKINSEVRGGKEPKIKRMREVLGDSYFNYLANLPDLVLLMDESHRYRAQAGMRAINELNPLFGLELTATPFVESTKAPIPFKNVIVDYPLARAMDDGFVKMPAVVTQRNFDAKNYTPEEIEKIKLEDGVRVHENTKVELITYARENNVAVVKPFMLVIARDTTHAAQLLSLLESNNFYNGRYQGKVIQVDSSKSGKDEEEMIERLLAVESVDEPTEIVIHVNMLKEGWDVTNLYTIVPLRAANARTLIEQSIGRGLRLPYGKRTGVEVVDRLNIIAHDRFQEIIDEANKGDSVLKLKQVILDALGADDKKVSVQVYSGVETKLGLAETSSENTKQNTFQTNASVNYQPVFKTETEKRIAHTVMEAAAKYAVRPSEAPTSQALLTAEIREKIVQEVQTALQPVQGELLSDELDIVEIVAKTTEIMVNQTIDIPRITVVPGGEVSTGFHPFKLDLSSLHLQPSEREITIHNLHTNEQSSLSAELGMKEKRPEDYIVFSLMDFDDIDYSTQADLLYDLAGQMVAHLRDYLSEEEVLNVLDKERRLIAREIHAQMMAHFWEKAASYEARVSQGFSTLKPCNYTVSADEPIHSVRQTPKDVSRIKQLLFGSFSKCLYPLQKFDSDTERRFAVILERDAQKWFKPAQGQFQIYWKSGLDSKEYIPDFVVETKDSIWLVETKAGKDLKDPEVLAKADAAFEWCKHATDYALQHNGKHWRYVLIPHDEVAESKKLADFLRFEKKPV

SEQ ID NO: 5309 - protein, 367 aa, Neisseria meningitidis
MSSFIFPDNGFEWRNESLQKPPKGWHYVRESGANGILKAAYQNIATVWQGDFHNAKQVLSAMKKKVRKPAAVRSDADIAALFHAHRMKQAQQSRILNMLAVEIRPGFVLDNKRAPDIRAALLDVYGEADGKPFFLPLNLLLGFMGAHEWHKKGVAVPQLGGSIHVPFGVFSPLRGEYLDLLAHAPSTGFQTAFDIGTGSGVLAAILAKQGIPSVIGTDTNPKAVACARANIARLGFEKQVEIRETDLFPEGFVDLIVCNPPWLPAKPTSAVESALYDPESAMLAAFLRDAPKHLNPDGEIRLIISDLAEHLHLRPSDFLDKAFAQAGLRVADVLKTKPVHKKAADPNNPLAFARNRETTFLYRLKKA

SEQ ID NO: 5310 - protein, 196 aa, Neisseria meningitidis
MLLFIDNYDSFTYNIVQYFTELGQEVAVRRNDDITLEEIEALNPQYLVIGPGPCSPKEAGISVAAMRHFAGRLPIMGVCLGHQTIGEAFGGRIVRAKTLMHGKVSPVSHSGKGMFKGLPNPVTCTRYHSLVIDRNTMPECLEVTAWTEDGEIMGVRHKEYAVEGVQFHPEALLTEHGHDMLNNFLIEFQNFKPQKI

SEQ ID NO: 5311 - protein, 92 aa, Neisseria meningitidis; identical to SEQ ID NO: 752

SEQ ID NO: 5312 - protein, 102 aa, Neisseria meningitidis
LRKDRKWTQISAALYGQNKTRSAEAVTRSFKKNPAVNGKSKGAGAGYGGHLRAIQGFRYRAGTLRPTVTAQIKREHLKKQARLEESDRACFATVLSCREISA

SEQ ID NO: 5313 - protein, 633 aa, Neisseria meningitidis
MTTPKKTAKTSGNEARELADLSEDIGIRFKYPNSERVYLQGSRDDIRVPLREIRQDDTYTAQGTEANPPIPVYDTSGVYGDPAAHINLKQGLPHIRTAWLDERGDTEILPKLSSEYGIERAHDPKTAHLRFNQITRPRRAKAGRNVTQLHYARQGIITPEMEFVAIRERLKLDELSQKPEYAKLLKQHAGQSFGANIPTHPDQITPEFVRREIAAGRAIIPANINHPELEPMIIGRNFRVKINGNLGNSAVTSSLTEEVEKMVWSLRWGADTIMDLSTGAHIHETREWIIRNAPVPIGTVPIYQALEKTGGIAEDLTWDLFRDTLIEQAEQGVDYFTIHAGVLLRYVPMTANRLTGIVSRGGSIMAKWCLAHHRENFLYTHFDEICEIMKAYDVSFSLGDGLRPGCIADANDESQFAELHTLGELTDKAWKHDVQVMIEGPGHVPLQRVKENMTEELQHCFEAPFYTLGPLVTDIAPGYDHITSGIGAANIGWYGTAMLCYVTPKEHLGLPDKEDVRTGIITYKLAAHAADLAKGWPGAQLRDNALSKARFEFRWRDQFRLSLDPERAESFHDETLPAEGAKIAHFCSMCGPKFCSMKITQEVRDYADKQKAQRQGMEEKAVEFVKKGAKIYS

SEQ ID NO: 5314 - protein, 447 aa, Neisseria meningitidis
MSQNHTILQNLPVGQKVGIAFSGGLDTSAALLWMKLKGALPYAYTANLGQPDEDDYNAIPKKAMEYGAENARLIDCRTQLAHEGIAAIQCGAFHVSTGGIAYFNTTPLGRAVTGTMLVSAMKEDDVNIWGDGSTYKGNDIERFYRYGLLTNPALKIYKPWLDQQFIDELGGRHEMSEFLIANGFNYKMSVEKAYSTDSNMLGATHEAKDLEFLNSGIKIVKPIMGVAFWDENVEIEPEEVSVRFEEGVPVALNGKEYADPVELFLEANRIGGRHGLGMSDQIENRIIEAKSRGIYEAPGMALFHIAYERLVTGIHNEDTIEQYRINGLRLGRLLYQGRWFDSQALMLRETAQRWVAKAVTGEVTLELRRGNDYSILNTESPNLTYQPERLSMEKVEDAAFTPLDRIGQLTMRNLDITDTRAKLGIYSQSGLLSLGEGSVLPQLGNKQ

SEQ ID NO: 5315 - protein, 200 aa, Neisseria meningitidis
MTIYYKDRAFYDADTLDQAPEGARPITPEQHAGLLAALNSGCIVSDDLTVSPPRPSEYHEWDGKGWVLKPTAKKKMLQEAKSEKLAEINRAAQSYIDRAAGLDKVPEFEVATWTTQAFEAKAWHADPNAVTPTLDAIAASRGVPPDVLRQKAYEKTLKFELLTAHVAGLRQAAEDKINAAANLDELTDISLVIDLKAEAE

SEQ ID NO: 5316 - protein, 445 aa, Neisseria meningitidis
MTFQNKKILVAGLGSTGISMIAYLRKNGAEVAAYDAELKPERVSQIGKMFDRLVFYTGRLKDALDNGFDILALSPGISERQPDIEAFKQNGGRVLGDIELLADIVNRRGDKVIAITGSNGKTTVTSLVGYLCIKCGLDTVIAGNIGTPVLEAEWQREGKKADVWVLELSSFQLENTESLRPTAATVLNISEDHLDRYDDLLDYAHTKAKIFRGDGVQVLNADDAFCRAMKRAGREVKWFSLEHEADFWLARETGRLKQGNEDLIATQDIPLQGLHNAANVMAAVALCEAIGLSRNELLEHVKTFQGLPHRVEKIGEKNGVVFIDDSKGTNVGATAAAIAGLQNPLFVILGGMGKGQDFTPLRDALAGKAKGVFLIGIDAPQIRRDLDGCDLNMTDCATLEEAVQKAYAQAEAGDIVLLSPACASFDMFKGYAHRSEVFIGAFKAL

SEQ ID NO: 5317 - protein, 287 aa, Neisseria meningitidis
MRILLTGSKSQLARCLRDRLPEDWETIATDSASLDITDADAVCNMVKSFQPDAIVNTAAYTAVDKAEGDAAAAFAVNASAVYNLALAAHRAHARFIHISTDYIFDGKGKRPYQESDFTNPSNVYGQSKTAGELLALSANPDSLILRTSWLFSEYGDNFVRTMLNLARERSPLSAVHNQIGCPTYAGDLAAAIIRLLQQTSPVRGIYHYAGGKSVSWYEFAQHIFQAASQQQTSFPVPELTAVSDKEYPTAAPRPAYSILDCRKIENDFSIKPSDWQKALAQVVSKLL

SEQ ID NO: 5318 - protein, 723 aa, Neisseria meningitidis
MNAPFFRLSLLSLTLAAGFAHAAENNANVALDTVTVKGDRQGSKIRTNIVTLQQKDESTATDMRELLKEEPSIDFGGGNGTSQFLTLRGMGQNSVDIKVDNAYSDSQILYHQGRFIVDPALVKVVSVQKGAGSASAGIGATNGAIIAKTVDAQDLLKGLDKNWGVRLNSGFASNEGVSYGASVFGKEGNFDGLFSYNRNDEKDYEAGKGFRNVNGGKTVPYSALDKRSYLAKIGTTFGGDDHRIVLSHMKDQHRGIRTVREEFAVGDTKSRINIKRQAPAYRETTQSNTNLAYTGKDLGFVEKLDANAYVLEKKRYSADDKDNGYAGNVKGPNHTQITTRGMNFNFDSRLAEQTLLKYGINYRHQEIKPQAFLNGKFKISDKKPDPNDPTKEIDKDAAEKAKDKKDMDLVHSYKLSNPTKTDTGAYIEAIHEIDGFTLTGGLRYDRFKVKTHDGKTVSSSNLNPSFGVIWQPHEHWSFSASHNYASRSPRLYDALQTHGKRGIISIADGTKAERARNTEIGFNYNDGTFAANGSYFWQTIKDALANPQNRHDSVAVREAVNAGYIKNHGYELGASYRTGGLTAKVGVSHSKPRFYDTHPKKLLSANPEFGAQVGRTWTASLAYRFKNPNLEIGWRGRYVQKAEGSILVSGQKDRQGKLENVVRKGFGVNDIFANWKPLGKDTLNVNLSVNNVFNTFYYPHSQRWTNTLPGVGRDVRLGVNYKF

SEQ ID NO: 5319 - protein, 315 aa, Neisseria meningitidis
MEFFIILLVAVAVFGFKSFVVIPQQEVHVVERLGRFHRALTAGLNILIPFIDRVAYRHSLKEIPLDVPSQVCITRDNTQLTVDGIIYFQVTDPKLASYGSSNYIMAITQLAQTTLRSVIGRMELDKTFEERDEINSTVVSALDEAAGAWGVKVLRYEIKDLVPPQEILRSMQAQITAEREKRARIAESEGRKIEQINLASGQREAEIQQSEGEAQAAVNASNAEKIARINRAKGEAESLRLVAEANAEAIRQIAAALQTQGGADAVNLKIAEQYVAAFNNLAKESNTLIMPANVADIGSLISAGMKIIDSSKTAK

SEQ ID NO: 5320 - protein, 505 aa, Neisseria meningitidis; identical to SEQ ID NO: 2655

SEQ ID NO: 5321 - protein, 162 aa, Neisseria meningitidis
MTVLTVILALALIAVGTAGIVYPALPGLALMFAGTWLLAYAGGYQIYGAGVLWTVGLISLAGILADYVAGIWGTKYTGAGKLAVRGALVGSIIGIFFSLPGLILGPFIGAAAGELIDRRNMLQAGKAGLGTLLGLIVGTTFKIGCAVSILFILLVKYIAYLF

SEQ ID NO: 5322 - protein, 286 aa, Neisseria meningitidis
MSDLSVLSPFAVPLAAVFGLLVGSFLNVVIYRVPVMMERGWTVFAKEYLNLPLTEEESRTFNLMKPDSCCPKCRVPIRAWQNIPIVSYLLLRGKCASCQTKISIRYPLIELLTGVLFGLVAWQYGWSWITLGGLILTAFLISLTFIDADTQYLPDSMTLPLIWLGLIFNLDGGFVPLQSAVLGAVAGYGSIWLLCAVYKLIKGEIGMGNGDFKLIAALGAWLGISALPVLIFVSSLIGLVAAIVMRVAKGQHFAFGPALTVSGWIIFTANDSVWRAVNWWLTHPVL

SEQ ID NO: 5323 - protein, 79 aa, Neisseria meningitidis; identical to SEQ ID NO: 1083

SEQ ID NO: 5324 - protein, 133 aa, Neisseria meningitidis; identical to SEQ ID NO: 8

SEQ ID NO: 5325 - protein, 305 aa, Neisseria meningitidis
MSIIHYLSLHVESARTALKQLLRQPFGTLLTLIMLAVAMTLPLFMYLGIQSGQSVLGKLNESPQITIYMETAAAQSDSDTVRSLLTRDKRLDNIRFISKEDGLEELQSNLDQNLISMLDGNPLPDVFIVTPDPATTPDQMQAIYRDITNLPMVESANMDTEWVQTLYQINEFIRKILWFLSLTLGMAFVLVAHNTIRLQILSRKEEIEITKLLGAPASFIRRPFLYQAMWQSILSAAVSLGLCGWLLSAVRPLVDAIFKPYGLNIGWRFFYPGEIALVFGFVIALGVFGAWLATTQHLLGFKAKK

SEQ ID NO: 5326 - protein, 212 aa, Neisseria meningitidis
MKITHCKLKKKVQKELLRFFALEITARSAADILGIHPNSAALFYRKIRTVINHHLALAADEVFEGPVEPDESDFGGRRKGRRGRGRQEKWLSSAFNATDGSIPLSTMPSLKRYSLSSKRKSCRTVLFIPIVAAATSWTAVLSITASTIPRSVQTVRTTLTALRTFGIRQNASCENTTESIVNLSRCSKNANFDLTSAHRLNSLKSCGIGVEF

SEQ ID NO: 5327 - protein, 162 aa, Neisseria meningitidis
MKKYLIPLSIAAVLSGCQSIYVPTLTEIPVNPINTVKTEAPAKGFRLASSHWTDVAKISDEATRLGYQVGIGKMTKVQAAQYLNNFRKRLVGRNAVDDSMYEIYLRSAIDSQRGAINTEQSKLYIQNALRGWQQRWKNMDVKPNNPAFTNFLMEVMKMQPLK

SEQ ID NO: 5328 - protein, 415 aa, Neisseria meningitidis
MQLTAVGLNHQTAPLSIREKLAFAAACLPEAVRNLARSNAATEAVILSTCNRTELYCVGDSEEIIRWLADYHSLPIEEISPYLYTLGMQETVRHAFRVACGLDSMVLGEPQILGQIKDAVRVAQEQESMGKKLNALFQKTFSVAKEVRTDTAVGENSVSMASASVKLAEQIFPDIGDLNVLFIGAGEMIELVATYFAAKSPRLMTVANRTLARAQELCDKLGVNAEPCLLSDLPAILHDYDVVVSSTASQLPIVGKGMVERALKQRQSMPLFMLDLAVPRDIEAEVGDLNDAYLYTVDDMVNIVQSGKEARQKAAAAAETLVSEKVAEFVRQQQGRQSVPLIKALRDEGEKARKQVLENAMKQLAKGATAEEVLERLSVQLTNKLLHSPTQTLNKAGEEDKDLVHAVAQIYHLDK

SEQ ID NO: 5329 - protein, 262 aa, Neisseria meningitidis; identical to SEQ ID NO: 256

SEQ ID NO: 5330 - protein, 127 aa, Neisseria meningitidis
MTDTDTQADRFEQMMWQAVDKLFEQHNGKLESMDGREQELVLIWRAEADIGNGGILQFVCNWCFPAAEKTSSVLKKIGAIHSAMLIHRAADALDKEIRRLQSEGKNLKEMWDITSRQQNRLTAEQSG

SEQ ID NO: 5331 - protein, 562 aa, Neisseria meningitidis
MLQSENSKNLISCSIKALPIMISTNGITMQFGAKPLFENVSVKFGEGNRYGLIGANGSGKSTFMKILGGDLEQTAGEVAIENGVRLGKLRQDQFAYEDMRVLDVVMMGHTEMWAAMTERDAIYANPEATEDDYMKAAELEAKFAEYDGYTAEARAAELLSGVGISEDLHNAKMAEVAPGFKLRVLLAQALFSKPDVLLLDEPTNNLDINTIRWLEGVLNQYDSTMIIISHDRHFLNEVCTHMADLDYNTITIYPGNYDDYMLASAQSRERALKDNAKAKEKLQELQEFVARFSANKSKARQATSRLKQADKIKSEMVEVKPSTRQNPYIRFEADEKAKLHRQAVEVEKLAKRFETQLFKNLNFILEAGQRLAIIGPNGAGKSTLLKLLAGAYNPEYSDGLLPDEGTIKWAEKASVGYYPQDHENDFDVDMDLSEWMRQWGQDGDDEQVIRGTLGRLLFGSNDVVKKVKVLSGGEKGRMLYGKLLLLKPNVLVMDEPTNHMDMESIESLNMALEKYNGTLIFVSHDRQFVSSLATQIIELDGKGGYEHYLGDYESYLEKKGVA

SEQ ID NO: 5332 - protein, 419 aa, Neisseria meningitidis
MHVSELQTLHISKLLELAEEHGIENANRFRKQDLVFAIVRQMMKKGEGFTCSGTLEILPDGFGFLRSADTSYLAGPDDIYVSPTQIRRFNLHTGDTIEGSVRVPKDNERYFALVRLDTINGDHPEVCRHKILFENLTPLFPTEQLKLERDLKSEENLTGRAIDLISPIGKGQRALLVAPPKSGKTVMLQNIAHAITANYPEVELIVLLIDERPEEVTEMSRSVRGEVVSSTFDEPAQRHVQVAEMVLEKAKRMVEHKKDVVILLDSITRLARAYNTVVPTSGKILTGGVDANALHRPKRFFGAARNVEEGGSLTIIATALVETGSRMDDVIYEEFKGTGNMELHLDRRMAEKRLFPAININKSGTRREELLVPNDQLQRMWLLRKFLHPMDEIEAAEFLIGKIKASKNNDDFFELMRGK

SEQ ID NO: 5333 - protein, 41 aa, Neisseria meningitidis
LRKYNGIDRKSFPLFLKECEFRFNFGTPSQQLKILRDWCGI

SEQ ID NO: 5334 - protein, 146 aa, Neisseria meningitidis; identical to SEQ ID NO: 235

SEQ ID NO: 5335 - protein, 231 aa, Neisseria meningitidis
MKAMILAAGRGERMRPLTDTTPKPLLDVAGKPLIGWHLCRLKQAGFTEIVINHAWLGRQIEEALGDGSAYGVNIAYSPEPAGGLETAGGIAQALPLLGDAPFLVVNGDVLTDIDFTAAFQAASSLPEHISAHLWLADNPPHNPDGDFSLLPDGSVRPEVNGGNGLTFSGVGIYRPEMFDGIEAGSVAKLAPVLRGEMRQNRVSGQKHTGLWLDVGTVCRLKEAQALAGAWK

SEQ ID NO: 5336 - protein, 99 aa, Neisseria meningitidis; identical to SEQ ID NO: 3406

SEQ ID NO: 5337 - protein, 79 aa, Neisseria meningitidis
LEMFDGEVEADESYFAERQNHINGIENFWNRAKRHLRKFDGIPKAHFELYLKGYERRFNNSEIKVQISILKQLVKSSLS

SEQ ID NO: 5338 - protein, 416 aa, Neisseria meningitidis
MFVPLAMLAGMFSYYETFHETEALQDDLLRQAALYVAPDSKPETLPEGDGDTRILVQMPQQEDPVVSLPAHLADGLHTLQADGDDDYYRVYIRTTEQGRIAVMQENEYREDLAADAARQSVLPLLAALPLMILLTVWITHKAMRPVRKLSQSLEQRRINDLSALSVDNIPSEIRGFVTAINLLLKRADEDIRHRQRFVADAAHELRTPMTALSLQAERLNNMSLPPDAARQPAVLQQSIRRNKHLLEQLLALARSQSDETPLTKTTFGLQSRFRQVLQELMPLALEKRQDIGVAVRGDVEVSADETEIYTLIKTFADNAVRYTPPEGRIDLGFTDEGKYLAVWVEDNGNGIPESERARVLDPFYRILGMEQQGTGLGLSIADTLATEYGRYLELSDSRRFGRGLLIRALLDKESLK

SEQ ID NO: 5339 - protein, 155 aa, Neisseria meningitidis
MTELQHPVLVVDDETDILDLMEMTLMKMGLRVHTASGVAEAKNKLDSQRYSLVLTDMRMPDGSGLEVVQHINSRLLDTPVAVITAFGNADQAQEALRCGAFDPDTMQIQDYLDQIERDIIEQTLKQTEGNRTQAAKRLGISFRSMRYRMERLNIG

SEQ ID NO: 5340 - protein, 282 aa, Neisseria meningitidis; identical to SEQ ID NO: 1323

SEQ ID NO: 5341 - protein, 58 aa, Neisseria meningitidis; identical to SEQ ID NO: 2174

SEQ ID NO: 5342 - protein, 43 aa, Neisseria meningitidis; identical to SEQ ID NO: 3165

SEQ ID NO: 5343 - protein, 465 aa, Neisseria meningitidis
MSQGKIVQIIGAVVDVEFPRDMIPRVYDALKLDENGLTLEVQQLLGDGVVRTIAMGSSDGLKRGMTVNNTGAPITVPVGKGTLGRIVDVLGTPVDEAGPIDTDKSRAIHQAAPKFDELSSTTELLETGIKVIDLLCPFAKGGKVGLFGGAGVGKTVNMMELINNIAKAHSGLSVFAGVGERTREGNDFYHEMKDSNVLDKVAMVYGQMNEPPGNRLRVALTGLTMAEYFRDEKDENGKGRDVLFFVDNIYRYTLAGTEVSALLGRMPSAVGYQPTLAEEMGRLQERITSTQTGSITSIQAVYVPADDLTDPSPATTFAHLDATVVLSRDIASLGIYPAVDPLDSTSRQLDPMVLGQEHYDVARGVQSTLQKYKELRDIIAILGMDELSDEDKLTVMRARKIQRFLSQPFHVAEVFTGSPGKYVALRDTIAGFKAILNGEYDHLPEQAFYMVGSIEEAVEKAKTLN

SEQ ID NO: 5344 - protein, 157 aa, Neisseria meningitidis
MLSAESLKQIDIELAKYPADQRRSAIMGALRIAQTEKGWLAPEAIAFVADYIGISPAQAYEVATFYNMYDLEPVGKYKLTVCTNLPCALRGGMATGEYLKQRLGIGYGETTPDGKFTLVEGECMGACGDAPVMLVNNHSMCSFMTEEAIEKKLAELE

SEQ ID NO: 5345 - protein, 201 aa, Neisseria meningitidis
MAPVKEILMKHTVSASVILLLTACAQLPQNNENLWQLSEHISSFAAEGRLAVKAEGKGSYANFDWTYQPPVETININTPLGSTLGQLCQDRDGALAVDGKGNVYQAESAEELSRQLVGFKLPIQYLHIWADGRRVAGAPYRILPDGILEQYGWTVGRTADSGGQVRTLQLNNGNLNIRLVFTEIGMPSETETLERCAARTR

SEQ ID NO: 5346 - protein, 597 aa, Neisseria meningitidis
MQLDIDRLVAYFGGVNALAEALKQHDPENAATTAAIYKWRTRGSLPLAQLQKLTALAEAQGRPLDLNAFLQKNESLERTEMTQANRVIIFDTTLRDGEQSPGAAMTKEEKIRVARQLEKLGVDIIEAGFAAASPGDFEAVNAIAKTITKSTVCSLSRAIERDIRQAGEAVAPAPKKRIHTFIATSPIHMEYKLKMKPKQVIEAAVKAVKIAREYTDDVEFSCEDALRSEIDFLAEICGAVIEAGATTINIPDTVGYSIPYKTEEFFRELIAKTPNGGKVVWSAHCHNDLGLAVANSLAALKGGARQVECTVNGLGERAGNASVEEIVMALKVRHDLFGLETGIDTTQIVPSSKLVSTITGYPVQPNKAIVGANAFSHESGIHQDGVLKHRETYEIMSAESVGWATNRLSLGKLSGRNAFKTKLADLGIELESEEALNAAFARFKELADKKREIFDEDLHALVSDEMGSMNAESYKFISQKISTETGEEPRADIVFSIKGEEKRASATGSGPVDAIFKAIESVAQSGAALQIYSVNAVTQGTESQGETSVRLARGNRVVNGQGADTDVLVATAKAYLSALSKLEFSAAKPKAQGSGTI

SEQ ID NO: 5347 - protein, 83 aa, Neisseria meningitidis
MSLFITDECINCDVCEPECPNDAISQGEEIYEINPNLCTQCVGHYDEPQCQQVCPVDCILIDEEHPETHDELMAKYEKIIQFK

SEQ ID NO: 5348 - protein, 503 aa, Neisseria meningitidis
MSEQNHPQTEPQLDENQIIALRREKLHNIRQQRNAYPNDFKRDSFAADLHAQYGEIGKEELDPQGIPVKVAGRMMLKRQMGKASFATIQDVSGQIQLYLNNKGVSQEVLDDFNHWDLGDIVGAEGTLFKTNHGELTVRVSDIRLLSKSLRPLPDKHKGLSDQETKYRQRYVDLIANEESRNTFIKRSQIIQSVRNFMVGEHYLEVETPMMHPIPGGATAKPFVTHHNALDIPLYLRIAPELYLKRLVVGGLERVFEINRSFRNEGMSVRHNPEFTMIEFYEAFSDYERMMQMAEDIIRNASRTVNGTANITYNGKEVDLESPFERLTILEAIKKYNPHYTDEQLNDAEWLKKEIVKHGESLPPSPGIGSLQLALFEGCAEGKLWNPTFIVDYPVEVSPLARASDTKQGLTERFELFVVGRELANGYSELNDPEDQAERFKSQVAQKDAGDDEAMHYDADYIRAMEFGLPPTGGCGIGIDRLVMLLTDSQTIRDVILFPQMRPE

SEQ ID NO: 5349 - protein, 122 aa, Neisseria meningitidis
MLKTLTFAALHFSTAFSITYVLTGSIGVSGAVALVEPLINTVVFYSGLTKTSTALPRLSSTRTILGAEAPSESVPYYLYCLRLRRLVLIFVNPLYFHEKAWNLYEKNKTVQQTQPFQLHRCG

SEQ ID NO: 5350 - protein, 787 aa, Neisseria meningitidis
MQFSYSWLKTQADTELSADKLEHLLTMAGLEVEEIDTAAPAFSGVVVAEVKSVEKHPDADRLNVTRVDAGTGGLVQIVCGAPNVKAGIKVPCSLPGAVLPGNFKIKPTKMRGVPSNGMLCSTDELGLPDDGVNGLHILPEDAPVGTNIREYLDLDDTLFTLKITPNRADCLSIKGIAREVSALTGCAFRQPEIHTAPITGSRKQPVQINAPADCGRFISRVIENVNAKAATPDWMKQRLERSGIRSISALVDIGNYVMLEIGQPMHVFDADKISGSLIVRRAKNGEILECLNEKTVSLSDNTLVVADEKGALSLAGLMGGAASSVSDGTQNIVLEAAWFAPEIIAGKSRQYGFGSDSSFRFERGVDYRLQADAIERATELVLQICGGAAGEMVEAQGELPEAKQVGLRLDRLKTVLGVDIPAEQVETILQHLGLQPEKTAEGFRVTAPSFRFDIEIEADLIEEIGRVYGYENIPDDYTSGRLKMLELPETRRPRFAVYNEMAARGYREVVSYAFVNEQWEQDFAANADPIRLQNPLAAQYAVMRSTLIGGLVEILQNNLNRKQNRVRVFEIARVFGKGSDGRFVQNERIGGLWYGAAMPEQWGGKTRNADFYDIKADVENLLKNKAVEFVKTGHPALHPGRAANIVSDGKVIGFVGELHPKWLQKYDLPQAPLVFEIDMAAVLECGKTRYRVVSKFQPVRRDLAFVMPEAMSHDDLLLVLKGAANKLVQEISVFDVYRGTGLPEGMKSVAVKVILQDMENTLTDEAVEPLIGKLIGAATAAGARLRS

SEQ ID NO: 5351 - protein, 640 aa, Neisseria meningitidis
MIEIKNLTLQRGLKILLDKANATVNPGQRVGLIGKNGTGKSSLFALLKGEITQDGGDVSIPKNWRLASVSQETPDLDISALDYVLQGDAELQAFQTALRQAEAQNDGMKQAEYHAKLEEIDAYTAPARAAKLLNGLGFSQEEHSRPVKSFSGGWRMRLNLAQALICRADLLLLDEPTNHLDLETVLWLENHLASLPCTQIIISHDRDFLNAATTQTIELSQQKLTQYGGNYDFYQNERAQRLAQQQAAYVKQQAQIKHLQSFIDRFKAKATKAVQAQSRMKALAKLERIAPAHLDSEFSFEFYNPEHLPNPLLKLEHADLGYEGKTVLHDITLSLESGARYGLLGVNGSGKSTFIKALAGKIDLLSGSIVRSEKLNIGYFAQHQLDTIRADQNPVWHIQQLSPEVREQEIRNFLGGFNFVGDMALQKTEPFSGGEKARLALAMIIWQKPNLLLLDEPTNHLDLDMRHALTLALQSFQGALIIVSHDRSLLEATTDSFLLIDKGRLKNFDGDLNDYRQWRLAQENAAAAPAASAQSQSRKDTKRIEAQIRQEKARRGKPIQQKIDRAEKEMAQLSEIQTACEAFLAQEDAYLEANKEKLQNTLSLLAKVKTQLAQIEEVWLACQEELERIETEIEKQFAER

SEQ ID NO: 5352 - protein, 111 aa, Neisseria meningitidis; identical to SEQ ID NO: 233

SEQ ID NO: 5353 - protein, 201 aa, Neisseria meningitidis
MKKIGLFGGTFDPIHNGHLHIARAFADEIGLDTVVFLPAGGPYHKDAASASAADRLAMVELATAEDARFAVSDCDIVREGATYTFDTVQIFRQQFPSAQLWWLMGSDSLMKLHTWKKWQMLVRETNIAVAMRQGDSLHQTPRELHAWLGKSLQDGSVRILSAPMHNVSSTEIRRNLAGQGVSDGIPPAAARYIREHGLYEK

SEQ ID NO: 5354 - protein, 348 aa, Neisseria meningitidis; identical to SEQ ID NO: 2437

SEQ ID NO: 5355 - protein, 153 aa, Neisseria meningitidis; identical to SEQ ID NO: 750

SEQ ID NO: 5356 - protein, 1082 aa, Neisseria meningitidis
MAAFKPNPINYILGLDIGIASVGWAMVEIDEEENPIRLIDLGVRVFERAEVPKTGDSLAMVRRLARSVRRLTRRRAHRLLRARRLLKREGVLQAADFDENGLIKSLPNTPWQLRAAALDRKLTPLEWSAVLLHLIKHRGYLSQRKNEGETADKELGALLKGVADNAHALQTGDFRTPAELALNKFEKESGHIRNQRGDYSHTFSRKDLQAELILLFEKQKEFGNPHISGGLKEGIETLLMTQRPALSGDAVQKMLGHCTFEPAEPKAAKNTYTAERFIWLTKLNNLRILEQGSERPLTDTERATLMDEPYRKSKLTYAQARKLLGLEDTAFFKGLRYGKDNAEASTLMEMKAYHAISRALEKEGLKDKKSPLNLSPELQDEIGTAFSLFKTDEDITGRLKDRIQPEILEALLKHISFDKFVQISLKALRRIVPLMEQGKRYDEACAEIYGDHYGKKNTEEKIYLPPIPADEIRNPVVLRALSQARKVINGVVRRYGSPARIHIETAREVGKSFKDRKEIEKRQEENRKDREKAAAKFREYFPNFVGEPKSKDILKLRLYEQQHGKCLYSGKEINLGRLNEKGYVEIDHALPFSRTWDDSFNNKVLVLGSENQNKGNQTPYEYFNGKDNSREWQEFKARVETSRFPRSKKQRILLQKFDEDGFKERNLNDTRYVNRFLCQFVADRMRLTGKGKKRVFASNGQITNLLRGFWGLRKVRAENDRHHALDAVVVACSTVAMQQKITRFVRYKEMNAFDGKTIDKETGEVLHQKTHFPQPWEFFAQEVMIRVFGKPDGKPEFEEADTPEKLRTLLAEKLSSRPEAVHEYVTPLFVSRAPNRKMSGQGHMETVKSAKRLDEGVSVLRVPLTQLKLKDLEKMVNREREPKLYEALKARLEAHKDDPAKAFAEPFYKYDKAGNRTQQVKAVRVEQVQKTGVWVRNHNGIADNATMVRVDVFEKGDKYYLVPIYSWQVAKGILPDRAVVQGKDEEDWQLIDDSFNFKFSLHPNDLVEVITKKARMFGYFASCHRGTGNINIRIHDLDHKIGKNGILEGIGVKTALSFQKYQIDELGKEIRPCRLKKRPPVR

SEQ ID NO: 5357 - protein, 395 aa, Neisseria meningitidis; identical to SEQ ID NO: 1105

SEQ ID NO: 5358 - protein, 484 aa, Neisseria meningitidis
MTTQTIKFHMKPETFKQNAAISLQDKPLRKSLRTAMDMLMTKRKAVLTDEEELQSLRDLCEHIRQRSLSKLPALLEQLEENLTKLGVKVHWAETPAEACEIIHDIITAKNGKLMVKGKSMVSEEIELNHYLEAKGIKAVESDLGEFIVQMAGEKPTHIVMPAIHKTKEQVSELFHQNLGTPLTDDVDQLTGFARKALRDIYSTADVGLSGVNFAVAETGTLCLVENEGNGRLSTTVPPVHIAITGIEKVVAKLSDIPPLYSLLPRSAIGQNITTYFNMITGPRRSEELDGPQEMHLVLLDNGRSQAYAEDQMRRTLQCIRCGACMNHCPVYTRIGGAAYGTTYPGPIGEIISPHLLGLDATRDLPTACTMCGACVEVCPVRIPITEQMQRLRVEAQRSPTETVPHPIRGQGASHTFGEQMAWRTFNGIFSGSKTYRAFGWAATKFRNLTPRKQLGWTQNRVPMKPAKKTLHELMAEKMRQKEQA

SEQ ID NO: 5359 - protein, 72 aa, Neisseria meningitidis; identical to SEQ ID NO: 202

SEQ ID NO: 5360 - protein, 490 aa, Neisseria meningitidis
MNQTSRDLTRISHNTKIVATLGPGSNNVELLEDMIRVGGLNVVRFNFSHGTPEFHQENARIVREAAKRTGQEIAIIADLQGPKIRVGKIAGGGIELNKGETLVLDAALEGEGTREAVGLDYRDLPDDVAAGDVLWLDDGLLTLTVESVEGSRIITRVENSHVLKSNKGINKRGGGLSAGALTEKDFRDLKTAIAIGCDYLAISFVKSAEDLHIARAKVEEEMKGSTAVRPGLVSKIERVEAIENLDEIILAGDGIMVARGDLAVEVGHAAVPALQKRMIRRARELRRFSITATQMMESMITNPVPTRAEVSDVANAVLDGTDAVMCSAETAVGAYPFETVSQMAIICAAAEKEQDSLNGVAEQVEYPEAVSTNLAVAGGAVSVARAVHAKAIVALTESGSTAFEISRHNITLPIFALTPSVSAQRRMAMYRGVRPLILATSTDHDTALNEVETMLVEHNILHSGDQYIITSGSQMRESGSTNTLEVLRVK

SEQ ID NO: 5361 - protein, 351 aa, Neisseria meningitidis
MKNSKLKAVDFFCGGGGMSYGMQSAGIQVLAGIDYEPSCKETYEANINAKFIQADVFELQPETLEKELGLKKNDDDLILIGCSPCQYWSVIQTDKRKSEKSKSLLLEFQRFVEYFNPGYVVVENVPGILSRMKESRLDNFIKLLEEKGFTVHFGIHNTADYGIPQSRKRFTLIANRITKEKLEPVKYSGKRLTVRDVLGMENGFPKIMAGHQDETDFMHSCAGLSDINLKRLALIPKNGGNRLAFAHIPELQLECFIGKDNSFKDTFGRLWWDKPAPTITTKFFSISNGRFAHPEEDRALSLREGATLQSFPRNYVFKAGSRDKIARLIGNAVPPMYAEKIGRAIVDNIEC

SEQ ID NO: 5362 - protein, 295 aa, Neisseria meningitidis
MQKSKLSWFLKLMLALSLAFLYIPLVVLVIYSFNESKLVTVWGGFSTKWYGALLENDTILEAAWLSLRIAVVSSLAAVVLGTLAGYAMARIKRFRGSTLFAGMISAPMVMPDVITGLSMLLLIIQVQIFLQGSEWLQHLYFDRGFFTIFLGHTTLCMAYITVVIRSRLVELDQSLEEAAMDLGARPLKIFFVITLPLIAPAIASGFLLGITLSLDDLVITSFLSGPGSSTLPQVIFSKIKLGLDPQMNVLATILIGIIGTLVIIVNYWMMRQATKRDREAAEAYRQEKLAAEKAH

SEQ ID NO: 5363 - protein, 167 aa, Neisseria meningitidis
MHALHFSASDKAALYREVLPQIESVVADETDWVSNLANTAAVLKEAFGWFWVGFYLVDTRSDELVLAPFQGPLACTRIPFGRGVCGQAWAKGGTVVVGDVNAYPDHIACSSLSRSEIVVPLFSDGRCIGVLDADSEHLAQFDETDALYLGELAKILEKRFEASRQAV

SEQ ID NO: 5364 - protein, 92 aa, Neisseria meningitidis; identical to SEQ ID NO: 2137

SEQ ID NO: 5365 - protein, 101 aa, Neisseria meningitidis
MNIEQVHIEVMHARLTVNTPAEEKDTLLQAVGMLNGKAEAIREGGRVADSEKIVIMATLNVVHDLLKTSLNGGDLAIGDFARKIADMDNACQKALSRLAQE

SEQ ID NO: 5366 - protein, 199 aa, Neisseria meningitidis
MRKQNTLTGIPTSDGQRGFALFIVLMVMIVVAFLVVTAAQSYNTEQRISANESDRKLALSLAEAALREGELQVLDLEYDTDSKVTFSENCGEGLCTAVNVWTNTNNDNEEAFDNIVVQGKPTVEAVKRFCPANSTDLCIDKKGMEYKKGTRSVSKPPRYIIEYLGVKNGENVYRVTAKAWGKNANTVVVLQSYVSNNDE

SEQ ID NO: 5367 - protein, 294 aa, Neisseria meningitidis
MYAMLGDVRFELLNSFTSLEAEHSANFAKHEVLKGRPRLQALQNELTTLRFSLKLHWRLGNPDTAYKGLLSALEAQQAVSLVYGSGRFVGWFVLERLTERTLIQDAQGRTAARELDVELTQFVGDPNNPLPTPAVKSGRQNPLLSLLPESVRAQASDVVSAVEKGIKVYRAAESGIADMQNLIRAAKDLKNDPSGTLNLLGDALNVGGSTLGRLNTLPEVTAVFGDLKGAAEFAAQAGQAANRLGGAVGGYEGGSVGSWLDAVENGVAEASDALANGSAAAQALTGYLAARKDK

SEQ ID NO: 5368 - protein, 135 aa, Neisseria meningitidis
MEIRAIKYTAMAALLAFTVAGCQLAGWYECSSLSGWCKPRKPAAIDFWDIGGESPPSLEDYEIPLSDGNRSVRANEYESAQQSYFYRKIGKFEACGLDWRTRDGKPLIETFKQEGFDCLKKQGLKRNSLSERVRW

SEQ ID NO: 5369 - protein, 174 aa, Neisseria meningitidis; identical to SEQ ID NO: 3281

SEQ ID NO: 5370 - protein, 54 aa, Neisseria meningitidis; identical to SEQ ID NO: 2207

SEQ ID NO: 5371 - protein, 82 aa, Neisseria meningitidis
MLTPEQVKALIAGVAKCEHIEVEGDGHHFFAVIVSSEFEGKARLARHRLIKDGLKAQLESNELHALSISVAATPAEWAAKAQ

SEQ ID NO: 5372 - protein, 259 aa, Neisseria meningitidis
MMQKTQQTLPIIPWMGGKRRLAKHLLPMFPEHSCYVELFSGGAALFFMRPTPAKVEVLNDINGQLINLYRVVQHHFDEFVRQFDWTLTSREVFARLQSTPPDCMTDIQRAARFFYLQHNAFGGKTVHQHFGTATTSKAWDASQIRAKLTASQARLRGVFIENEPWERCFKRYDREHTFFYADPPYWQTAGYDHAFDWPQYELLAKAMVESKGKFMLSINDHPDIRELFKDFRITQLELAYTVGRDKTGKTNGELVICNW

SEQ ID NO: 5373 - protein, 408 aa, Neisseria meningitidis
MSGNASSPSSSAGIGLIWFGAAVSIAEISTGTLLAPLGWQRGLAALLLGHAVGGALFFAAAYIGALTGRSSMESVRLSFSKRGSVLFSVANMLQLAGWTAVMIYAGATVSSALGKVLWDVESFVWWALANGALIVLWLVFGARKTGGLKTVSMLLMLLAVLWLSVEVFASSGTNAAPAVSDGMSFGTAVELSAVMPLSWLPLAADYTRHARRPFAATLTATLAYTLTGCWMYALGLAAALFTGETDVAKILLGAGLGAAGILAVVLSTVTTTFLDAYSAGASANNISARFAETPVAVGVTLIGTVLAVMLPVTEYENFLLLIGSVFAPMAAVLIADFFVLKRREEIESFDFAGLVLWLAGFILYRFLLSSGWESSIGLTAPVMSAVAIATVSVRLFFKKTQSLQRNPS

SEQ ID NO: 5374 - protein, 206 aa, Neisseria meningitidis
MKPQFITLDGIDGAGKSTNLAVIKAWFERRGLPVLFTREPGGTPVGEALREILLNPETKAGLRAETLMMFAARMQHIEDVILPALSDGIHVVSDRFTDATFAYQGGGRGMPSEDIEILEHWVQGGLRPDLTLLLDVPLEVSMARIGQTREKDRFEQEQADFFMRVRGVYLDRAAACPERYAVIDSNRNLDEVRNSIEKVLDGHFGC

SEQ ID NO: 5375 - protein, 292 aa, Neisseria meningitidis; identical to SEQ ID NO: 1803

SEQ ID NO: 5376 - protein, 405 aa, Neisseria meningitidis
MTAPVPTCNMSGNPINLHKLTLIMPLPLPSPEARQFSLKLQTLIAEKIGKHGNWIPFSRFMELVLYAPQYGYYTGGSHKIGNTGDFITAPTLTSLFAQTLARQLQELLSQTAGNIYEFGAGTGQLAADLLGSISDGISRYYIIEISPELAARQKNLIQARAPEASQKVVHLTALPEAFDGIIIGNEVLDAIPVEIVRKDEGGSFEHVGVCTDNGRFAYSARPLHDPSLSTSASLYFPQTDYPYTSELHPQQYAFIRTLASRLEHGCMIFIDYGFDAAQYYHPQRNQGTLIGHYRHHVIHNPFDFIGLADLTAHVNFTDIAQAGTDAGLDLIGYLPQSHFLLNLGITELLAQTGKTNSAAYIREAAAVQKLIDQHEMGELFKVIVFGKNIGVDWAGFRFGDICHKL

SEQ ID NO: 5377 - protein, 107 aa, Neisseria meningitidis; identical to SEQ ID NO: 2467

SEQ ID NO: 5378 - protein, 153 aa, Neisseria meningitidis; identical to SEQ ID NO: 385

SEQ ID NO: 5379 - protein, 145 aa, Neisseria meningitidis
MDQTVYLYTDGACKGNPGAGGWGVLMRYGSHEKELFGGEAQTTNNRMELTAVIEGLKSLKRHCTVIICTDSQYVKNGMENWIHGWKRNGWKTAAKQPVKNDDLWKELDTLVGQHQVSWAWVKGHAGHAENERADDLANRGAAQFS

SEQ ID NO: 5380 - protein, 149 aa, Neisseria meningitidis
MSLIGEILPLSHIVLDMEVGSKKRLFEEAGLLLERESSLSHADVFECLFAREKLGSTGLGQGVAIPHGRHAGVKQATGAFIRTREPVGFDAPDGKPVSLVFILLVPENATGEHLEVLSKLAGKFSQKSIRESLMTVSSAEEARAILIEE

SEQ ID NO: 5381 - protein, 867 aa, Neisseria meningitidis
MNKKYATKAEINAAAHGRWREVLEACGIPSEILDKKHHPCPSCGGSDRFRFTDGSGSSRGSGVWICNQCKPDGGSPFDLLMDVCGYSFNEARDKVASLLGLAHGDLVDKAPKPLPPPAPVKEEERDLWKPIVPVPEYALNSMSFGNGFRKSDDLIFKSVFRDSSSAVLGGVARFRKSDGGKIDLPYTFCEHKKTGEKMWRWRCWDNPRPLYGLDSLAADPSLPVLVVEGEKCKNAADAQGYNYAVLTWHGGCNNWDKSDWSAVVDRDVVLWPDCDSLRQKLTKKERDDGVDPESKPFLPRNEQGGMKAMLGIADVLTKQNCRVWLVNIPAPGIWPHGFDIADAIADGGRIVDPSEVLSWMGAADWLVEYVPEAEMPSENFPAPIQGMEPESEQLHESLEATGNQGGAGDMDDEYLAKLQKLKSDFGLVEGKDHGVNRKTGVTYTRKAMTVHFGKDVVDAWYEWGRAPVLTMYEINRLKKDYALIQAVKDDDTQDMMERFIYLDGSASIWDNKLWRVVPEKAARLSMTPDGFKIWVNSPSRIVKRFDRLVFEPGRVLSDDYINIFRGMPIEPKFPIPKEDMPETNYELYRLFPEIKPILNLINHLCNGDYQQVEYILNWLAYPLQNVGAKMTTAVVMHGHIHGAGKSFFFEEIVKPMYGEYGATYGQEDLESNYTANRSGKMFGIFEEVYTNQQKYNKTGSQKHMITGKTMRVERKFQDAYEEANHMNCVFLSNESHPFKIEENDRRYFVVWPEKKLDKKLRDEVLDCIGNDGVRLFYSFLLCWNFYLTYGQQGAENEKGYEVIKLEEPVRFDPNTPPPMTAAKQNVISYGRYAWQTFYSEWAGGGIKDLPFCCCITDDLGFGFQVQH

SEQ ID NO: 5382 - protein, 190 aa, Neisseria meningitidis
MDNHAEAHWQDGWLQSVRHIPSPNFGPRESKEEVSLVVLHNISLPPFEYGTDAVEKLFANRLDPNDHPFFGLIHTLRVSSHFLIKRDGKTVQFVSCGDMAYHAGVSSFRGREKCNAFSIGIELEGCDFEPFAEAQYRSLEALLDAICRRYPITAVTGHQDIAPGRKTDPGHFFDWRRIRGKGFPVDRNAV

SEQ ID NO: 5383 - protein, 199 aa, Neisseria meningitidis
MSEKPEKIVLASGNAGKLEEFGNLFKPYSITVLPQSTFGIPECPEPYSTFVENALAKARHAAKYSGLPALADDSGICAAALNGAPGIHSARYAGSNPKSDTANNLKLAAELAGKADKSCCYVCVLVFVLHKDDPRPIIAEGVWHGQWNGVPAGENGFGYDPYFYLPGHGKTAAELDSEVKNRESHRAQALAELLRKLAL

SEQ ID NO: 5384 - protein, 96 aa, Neisseria meningitidis
LRIKKSFFGGQVVYLPRSIVNSTKMDALYVSAPFYFDDDFQVCYGEHYNIVFPLLVPLYKQEAELVEKKGWNAFEQFLLDNEVDNLSDMNRKPFAW

SEQ ID NO: 5385 - protein, 473 aa, Neisseria meningitidis
MRHLPLFSLMLFPASVYAADLDGANLNLLWSLPFALILLSIALGPLFFSHTWHHHYGKITAFWTLLFLIPFSLVFGASAGIHTVAHALVEEYIPFILLLLALYTISGGILVWGDLNGTPKLNTALLAVGTALASIMGTTGAAMLMIRPLLKANQNRTRRVHIVIFFIFLVANIGGGLTPLGDPPLFLGFLKGVDFMWTVKHMFAPVLISTAVLLTAFYFIDNRFFKQESIAQDTPAQQEKPEKIAIFGKWNFLLLSGVVGAVLMSGLWKPEHPGFEILGSRYALQNLVRDVILIALTAVSMAITPKQVRAGNEFNFEPIAEVGKLFLGIFITIFPVLSILKAGEAGALGGVVSLVHDTAGHPINVMYFWMSGILSAFLDNAPTYLVFFNMAGGDAQALMTGSLFHSLLAVSMGSVFMGALTYIGNAPNFMVKAIAEQRGVPMPTFFGYMMWSVAFLTPVFIVHTLIFFVFKLL

SEQ ID NO: 5386 - protein, 158 aa, Neisseria meningitidis
MEHLFGKWLPDLPADVSDGISLPMVRLLHTRSLTAALRALPHTFSVELLKLGELETECGGRLVREVLLKLDRIPVVEARSECRIGSAFWQNILDCGTRPLGERLFQADLEGARSVFEFAVFGEGCGRYFAARRSRFSRHGEEMLLTEYFLPELKRFIG

SEQ ID NO: 5387 - protein, 71 aa, Neisseria meningitidis
MTITEEYSIDIRVTAEQGKNDYGYPTERYGCDIINTDGELLVGIEPEYKTPFAAVKQALICLTKDNLKNAA

SEQ ID NO: 5388 - protein, 196 aa, Neisseria meningitidis
MSERIILPVLSLGGVRLEPLDVHHETGLREAVCDGEVWKLGVTSAPHPDRVADYIGTALATRLAFAVVDEEAGRVVGTTAYYHFEPQIPRLDIGFTWYAASARRTRINTCCKIMLLDYAFDVLACRCVGWRTDILNLASQRAIERLGAEKDGVLRMHILRKDGSVRDTVVYSMLRKDWCKNREILTGRLAGYGVQV

SEQ ID NO: 5389 - protein, 259 aa, Neisseria meningitidis
MKEHKARKRFGQNFLQDTRIISDIVNAVRPQADDVVIEIGPGLAAITEPLAKKLNRLHVVEIDRDIVCRLKTLPFADKLVIHEGDVLQFDFNGIAGKKKIVGNLPYNISTPLLFKLAEVADDVVDMHFMLQKEVVDRMVAAPKSNDYGRLGVMLQYFFDMEMLIDVPPESFDPAPKVDSAVVRMIPVKHRIGKADDFEHFAKLVKLAFHQRRKTIRNNLKELAGDDDLQAVGINPQDRAEHIAPEKYVALSNYLAGKAV

SEQ ID NO: 5390 - protein, 81 aa, Neisseria meningitidis; identical to SEQ ID NO: 1361

SEQ ID NO: 5391 - protein, 239 aa, Neisseria meningitidis
MDKDKGSYAGIPVQNTKELVWQKIQEIPISECGEPLVSVGNTGRIRVNPVYFSQGIEGAINTVLLRRSVADRLTQVVSLLPEVYGLEIFDGWRPVIVQRALRENMKQEIEKRHPEYDEVQVREALDCFSADPDRAGMPLPHLTGGSVDVGLFDIKSGKSLDMGSEFDATGHLSYSDALEKEGEYFSSARNLRRILIHAMREAGFSNLPTEWWHFDYGNQNWAYFTQQSNAVFGAVEEQD

SEQ ID NO: 5392 - protein, 380 aa, Neisseria meningitidis
MNTLYTLFATCPRGLETVLSQELESLGCTDVQAFDGGVSCRGGLEQAYAANLHSRTAGRILLRLTKGTYRTERDIYKLAKNINWFNWFTLQQTFKVKVEAKRANVKSIQFVGLTVKDAVCDAFRDIYDARPSVDKAAPDVRIHAFLDERNVEIFIDTSGEALFKRGYRLDTGEAPLRENLAAGLLLSAGYDGTQPFQDPFCGSGTIAIEAAWIATGRAPGMMRRFGFEKLQNFDKTLWADLRRRAEAQTRPVRAPIAGSDSDRRIVQTALDNARSAGVDDIVSFSVADAQSVRPNGENGIMVSNPPYGVRLEEVRALQALYPQLGTWLKKHYAGWRVGMFTGDREMPKFMRLSPKRKIPLYNGNIDCRLFLIDMVQGSNR

SEQ ID NO: 5393 - protein, 579 aa, Neisseria meningitidis
MAQERVKPLELELLCEKLNHDFSGKITGQGQNDESKRRNFLSKAIAAFVLHEETTASLDDAVSASVDGGLDHGIDAILIDSNHVIWLVQSKYIDTGAGEPELGDVSKFRDGIIDLLEGRFDRFNDAIKSKKTDIENVMNSGICKVKAILAYSGTAISDNKRDIFSDIERTFNDSSPDFIRCYAYGLSTLHELHKSCLEENSIDEEIELVNFGHIQQPYKAYYGQIKAEKLFSLWNTHKHKLVEKNIRRFKGETSVNQSLKKTLDDNPEHFFYFNNGITFLCNSIVEIGSRNSNRQTGKFKVQGLSIINGAQTVGVIGSKSFEFYQQHPIHVFATFLCLNGTPDDFSIEVTQARNRQNAVSLEDFASLDDNQIRLRDTLSIAGVTYLIKQGYDDSPDSDTCFNIRELVPLLACTVTSSDWQEYVIAAKSDKTRLFQQVALTSHRKKMKDAYQKLFSDSRTATEIWRIVQLGRIIKQIVKDRASGESIEHSVNLQAKDILNQGIWLIIHIVFLRTKLQNGNKLFITEDEKQRLSSEIDTISHKLVNVIQSEQWEKTAQAIFENQTDCNTIKNRLMAALASA

SEQ ID NO: 5394 - protein, 137 aa, Neisseria meningitidis
MMPAYAYAALAFSAFTSATLLPGTSEAAFALFVHRFPEHAYGALLCAGLANGLGSMVSYWMGRLLPSRKMPSEKTLNLMRRFGIWLLAFAWLPVVGDALPLAAGWLRLNPWTSGLMLVIGKTARYAFILWGMQYYAA

SEQ ID NO: 5395 - protein, 428 aa, Neisseria meningitidis; identical to SEQ ID NO: 82

SEQ ID NO: 5396 - protein, 106 aa, Neisseria meningitidis
MPHYSFYSSSRKMTDTKLNTKEILELKARAHHLHPVVMVGQQGLTDAVIKETDAALTAHELIKVRVFGDDRAERIEICTALCEAVDAQPVQHIGKLLVLWRKNIEG

SEQ ID NO: 5397 - protein, 223 aa, Neisseria meningitidis
MTFSAILFYILAAIVLYGAVRTVTAKNPVHAALHLVLTFCVSAMLWMLMQAEFLGVTLVVVYVGAVMVLFLFVVMMLNIDIEEMRAGFWRHAPVAGVVGTLLAVALILILVNPKTDLAAFGLMKDIPADYNNIRDLGSRIYTDYLLPFELAAVLLLLGMVAAIALVHRKTTNPKRMDPADQVKVRADQGRMRLVKMEAVKPQVESAEESEVSDDLKQKEEGKA

SEQ ID NO: 5398 - protein, 328 aa, Neisseria meningitidis
MQYRIRRENEAPEAKNAGETLWERDIMREVLLSAYRDRRRERMWKNIWRAVSTLILVALIAGIFRKDEAALQLAGNTPHTAVVNLYGEIGNGVEDQVKKLKDGMEAAYKNPQAKAIIIRANSPGGSPVVSNTAFEEIRRLKAQHPGIPVYLVAEDMCASGCYYIAAAADKIYADPSSIVGSIGVIGSSFDATGLMEKIGVKRRVKIAGSNKGMGDPFSPETPEQSKIWEEMLTGIHGEFIKAVKTGRGGRLKFRQYPDVFSGRVYTGADAQKVGLVDGLGNIYSVARDVVKAPDVVDYTPKDDFGRILGRRFGAELKASVREALQAVR

SEQ ID NO: 5399 - protein, 110 aa, Neisseria meningitidis
MTETFRWRVASDNKAVHKFDVRSVRFGDGYEQRQPKSLKPKLRSWEIKIVGQKALMGEIKAFFDARRGVEPFNWRPPDGVPVLVKVSEYQETAKGGKAYELSCTFEEVLS

SEQ ID NO: 5400 - protein, 61 aa, Neisseria meningitidis; identical to SEQ ID NO: 1836

SEQ ID NO: 5401 - protein, 180 aa, Neisseria meningitidis
MGKTVTLTAGHSNTDPGAVNGSDREADLAQDMRNIVAAILRDDYGLTVKTDGTGKGNMPLREAVKLIRGSDVAIEFHTNSAAGKAATGIEALSTVKNKRWCQVLSKAVAKKTGWKLRGEDGFKPDNAGHHSRLAYAQAGGIVEPFFISNDTDLALFKTTKWGICRAIADAIAMKLGAARV

SEQ ID NO: 5402 - protein, 82 aa, Neisseria meningitidis; identical to SEQ ID NO: 1233

SEQ ID NO: 5403 - protein, 456 aa, Neisseria meningitidis
MLDNLTGRFSNVFKNIRGQAKLTEDNIKEALREVRLALLEADVALPVVKEFVNNVKEKALGQEVAGSLTPDQAFIGVVNKALTELMGKENKTLDLSVSPPAIVLMAGLQGAGKTTTVGKLARLLKNDQKKKVLVVSADVYRPAAIEQLRLLAEQVGVDFFPSDTNQKPVEIATAAVDYAKKHFYDVLMVDTAGRLAIDEEMMNEIKALHAAVNPVETLFVIDAMLGQDAVNTAQAFNEALPLTGIVLTKMDGDSRGGAALSVRHVTGKPIKFIGVGEKINGLEPFHPDRLASRILGMGDVLTLIEDVQKGIDEEAAAKMAKKLHKGKGFDLNDFKEQIQQMRNMGGLENLMSKMPGELGQISKQIPEGTAEKAMGKVEAIINSMTPKERANPALLKASRKRRIAMGAGTTVQEVNKLLKQFEQMQQMMKMFSGNGLGKLMRMAKGMKGMKGMFPGL

SEQ ID NO: 5404 - protein, 138 aa, Neisseria meningitidis
MYLLDTNVISETRQANRADGNVRAWLNTIDPAEMYTSAIVMMELERGVLGMERKDGQQGGILRRWLEEVVKPTFKDRILPIDETTAEICARLHIPDKSPENDAWIAATAKQHGLTLATRNIKDFDHSGVKLINPFETV

SEQ ID NO: 5405 - protein, 358 aa, Neisseria meningitidis; identical to SEQ ID NO: 3679

SEQ ID NO: 5406 - protein, 374 aa, Neisseria meningitidis
MQNTSFDNESDYSDDSDFASASETENRIGLTVPLELAGGRLDAVLAKLLPDYSRSRLTSWIKEGAVIVNDKPSQPKDKMIGGEQICVTVRPSEENLAFVPEPMALDIIYEDDTVIVVNKPAGLVVHPAAGNWTGTLLNGLLAHCPELSQVPRAGIVHRLDKETSGLMVVAKTLPAQNSLVQHLQERTVKRIYRAVANGIVPFDGKIETQIGRDPHNRLKMAVVKFGGKPAVTHVKVLERYLAHSYIECSLETGRTHQIRVHMREANHPLAADPVYGNPRHPCGDTVKEAVKSLGARQALHAYRLSFTHPKTGETVSFEAPIPDDIYHLLSVLRLEAGLDSSLSNEEEWQDKFGADDDDDWNEDDYDVEVVYVRE

SEQ ID NO: 5407 - protein, 330 aa, Neisseria meningitidis
MENVNRIVAEGIAAVEAAKDFNALEQIKARYLGKTGELTGLLKTLGQMSPEERKTIGAHINECKNQFQMAFNNKRDALNEAKLQARLAAEALDITLPGRAQEGGSLHPVTLTLQRVVELFHGMGFEVADGPEIEDDFHNFQALNIPANHPARAMQDTFYVENGDVLRTHTSPIQIRYMLDKKEPPIRIIAPGRVYRVDSDATHSPMFHQAEGLWVEEGVTFADLKAVFTDFIRRFFERDDLQVRFRPSFFPFTEPSAEIDIMGENGKWLEVGGCGMVHPNVLKNVNIDPEKYTGFAFGIGLDRFAMLRYNVNDLRLFFDNDLNFLKQFAK

SEQ ID NO: 5408 - protein, 398 aa, Neisseria meningitidis
MSQKLILVLNCGSSSLKGAVLDNGSGEVLLSCLAEKLNLPDAYITFKVNGEKHKVDLSAHPDHTGAVEALMEELKAHGLDSRIGAIGHRVVSGGELYSESILVDDEVIAGIEKCIPLAPLHNPAHLLGLRAAQSIFKGLPNVVVFDTSFHQTMPEVAYKYAVPQELYEKYGLRRYGAHGTSYRFVADETARFLGKDKKDLRMVIAHLGNGASITAVANGESRDTSMGLTPLEGLVMGTRSGDIDPSVFGFLAENANMTIAQITEMLNKKSGLLGISGLSNDCRTIEEEAAKGHKGAKLALDMFIYRLAKYIGSMAVAAGGLDALVFTGGIGENSDIIRERVIGYLGFLGLNIDQEANLKARFGNAGVITTADSKAVAVVIPTNEELMIAHDTARLSGL

SEQ ID NO: 5409 - protein, 404 aa, Neisseria meningitidis
MEWAFNSYYTLIAATLVLLVGKVLVKKIKILRDFNIPEPVAGGLIAAIILFALHEAYGVSFKFEKPLQNAFMLIFFTSIGLSADFSRLKAGGLPLVVFTAIVGGFILVQNFVGVGLATALGLDPLIGLITGSVSLTGGHGTSGAWGPNFETQYGLVGATGLGIASATFGLVFGGLIGGPVARRLINKMGRKPVENKKQDQDDNADDVFEQAKRTRLITAESAVETLAMFAACLAFAEIMDGFDKEYLFDLPKFVWCLFGGVVIRNILTAAFKVNMFDRAIDVFGNASLSLFLAMALLNLKLWELTGLAGPVTVILAVQTVVMVLYATFVTYVFMGRDYDAAVLAAGHCGFGLGATPTAVANMQSVTHTFGASHKAFLIVPMVGAFFVDLINAAILTGFVNFFKG

SEQ ID NO: 5410 - protein, 102 aa, Neisseria meningitidis
MKTVPTILIGILLASALPASAHGMHKSKPLTMDELPPICQQYFKRAETCYNKAGNKADFARSNTKFLFQALPAADLGQRKQMCQIAMDSFAEKTRISNSNAV

SEQ ID NO: 5411 - protein, 168 aa, Neisseria meningitidis
MFRRHFPVREKALNITVLAVGTKMPRWVDEAVAEYAKRFGRDVAYVLKEIKPEKRGAGVNAAQGMAAEEKRILEAIPQGAFLVVLDERGKAPTSVELAEHLKSWQQNGEHVCFVIGGADGMTDRLKQQARMMMRLSSLTLPHGMVRVLLTEQLYRAASILHNHPYHRE

SEQ ID NO: 5412 - protein, 859 aa, Neisseria meningitidis
MRYDKLTAKFQQALAEAQSLALAADGSYLEAGFVLKALLDDQNSGAAALLAHAGVNVPQVKQRLQQHLNSLPKVSGQGGDILPSRELQAVLNLMDKAATKRGDAYIASELFLLALVQQNDAAGKILKEAGATEQNINAAIDAVRGGQNVNDANAEDQRDALKKYTLDLTQRARDGKLDPVIGRDDEIRRAIQVLQRRTKNNPVLIGEPGVGKTAIVEGLAQRIVNGEVPESLRNKRLLVLDLAALIAGAKYRGEFEERLKGVLNDLAKDDGNTLIFIDEIHTLVGAGKTDGAMDAGNMLKPALARGELHCIGATTLDEYRQYIEKDAALERRFQKVLVGEPSVEDTIAILRGLQERYEIHHGIDITDPAIVAAAELSDRYITDRFLPDKAIDLIDEAASRVKMEKETKPEAMDKIDRRLIQLRMEKAHVEKEKDDASKKRLELIDEEINGLQKEYADLDEIWKAEKAISDGAANIKKQIDEVKIKIEQAKRQGDLALASKLMYEDLEHLEKQRAAAERADTDSTKPANKLLRNNVGAEEIAEVVSRMTGIPVSKMMEGERDKLLKMEEVLHRRVVGQDEAVRAVSDAIRRSRSGLADPNKPYGSFLFLGPTGVGKTELCKALAGFLFDSEDHLIRIDMSEYMEKHAVARLIGAPPGYVGYEEGGYLTEQVRRKPYSVILLDEVEKAHPDVFNILLQVLDDGRLTDGQGRTVDFKNTVIVMTSNIGSQHIQQMGIQDYEAVKEVVMEDVKEHFRPEMINRIDEVVVFHGLDQANIRSIAKIQLKGLEKRLEKQNLRLTVSDAALDIIAKAGFDPIYGARPLKRAIQSEIENPLAKALLAGNYAPESEIRVEANGDRLKFA

SEQ ID NO: 5413 - protein, 1421 aa, Neisseria meningitidis
MGGKSGGGQRTPYEAPNSLSSAQSLRIIDAVSEGVVSGFANGDDAPFKSVYFDDTPVQNSDGSYNFNGVTGYFQRGEQDQSYVPGFDASERTVAVSAAVKQNQPMVRAVTDELVSRLRITVAVERNAQVEDNGDTVPADTLMRVELINSNGVQASNQVRFNEKSSGTYYQDVEFDVVPQVPFNIRVFRISPDSKTDKVSNNTYFSSYVEIVDAKLSYPHTAFAALSIDSAQFGNQIPRRNYLMKGRLVKVPSNYNPETRQYTGGTWDGSFKTAWTNNPAWVFYDVLTQPRFSTLARRLNVADIDKWSLYQIGKYCDEPVDDGFGGKEPRFVCNAYITDLMQAGEFLNNLASVFTGLPVWNGQQVSVVMDADADPVAQYTNANVKDGLFNYAGAALKSIHTAVHVQYIDKYDGYRAKTEYVADNEAIARYGLNIKQITAFGCDSRGQAARFGAWTLQTELRQQNAVTFEIGREGLKHLPYDIVQIMDNQYAGAELSGRVAAISGNVLTLDRPVSDAVGALVFYSEGGSLKSAKITAAAGNKVTLEREVPLQAGDTWVLSGKVKPRLYRAIGIKENTDAGTYTVTALLHDPKKYAAVDSFAHFDHEITTLHNTAPVLTDASVNTDGGTVVVTWDNLAANGQVLTYDIKIYRNNSLYRHIPDAQTAEIRLENLPNGNYRAEIRGRNARGVLSAPLVKAWSIDYTVTGLRTTPKTLSVTVDWVLPQTVVSDLVFELWYSKTNNLQTATKLASLAYPQNSYTLTGVGVADVYYFWVRIRDIAGNTGEFTAAVQGRADNNPAPIVQQIQGAIGKSALSRELIDTLNRDMAAAAGLKVSAEAAERAKALQEEARARTAAIQAESSARTAELARKSSEIGTRIAATEAVNEQQAQQIQTVTSVQGNTAAGLEAEKKARADGDRAEAQARETLAVRLGNAESGISALRETVTRQDAARSSEINTLTAKLENVEVGGRNYALSTGTAGKVLTASGNNQTKTVTIDVSSALDLKQGDSLIISCDIELVNATSPHGKPYPRIGAEFSVIYADNSVGYFAAWYGEAVSGTTKTLKQRIVAKRTVAKEVKALRSFIVQARYQTSESIKVSNVKLERGTVATDWSPAPEDSNADTSALTALSAKVQQASSAVAEIGGKIQSLYTLKTEAIAGGRRAVAGVAVGADGKTGSGEILLMADKVAYVDPKDKTVTPAFVTVIENGKAKQALNGDLFATGSILAKHIAANQTIEAPTLNGATVNAGLIKGGTIRGARIEAVDLEAANIIGDVVAVRTFELKQSPLGYQELICQIPDSRKTRRTVIVPPVFAVAENGAVVSLQLHMDGVIQREVTIQSPEKRIARNEKFSVWVPGPPPLYIGTPLEVPLSFSVPFHLPKTGSISFQKGIDGAAHSLHILCRISGNFDYSPLGDLSGIVCLIV

SEQ ID NO: 5414 - protein, 59 aa, Neisseria meningitidis
LIVTLNYAHSPLNILSPKLYPSEPYNESEAPGAITWLWYQSPKHRQVSIAEMMAYVLPV

SEQ ID NO: 5415 - protein, 129 aa, Neisseria meningitidis; identical to SEQ ID NO: 2209

SEQ ID NO: 5416 - protein, 459 aa, Neisseria meningitidis
MFAFKSLLDMPRGEALAVVVALIAAMGYTIISLEWLPHMSIIAAIVVLILYGLARGLKYNDMQQGMIGALNQGMGAIYLFFFIGLMVSALMMSGAIPTLMYYGFGLISPTYFYFSAFALCSVIGVSIGSSLTTCATVGVAFMGMAAAFHADMAMTAGAIVSGAFFGDKMSPLSDTTGISASIVGIDLFEHIKNMMYTTIPAWLISAALMLWLLPNVAAYDMGSVESFRSQLEATGLVHGYSLIPFALLVILALMRVNAVVAMLFTVMVAVAVTYLHSTPDLRQLGAWFYGGYKLEGEAFKDVVKLISRGGLESMFFTQTIVILGMSLGGLLFALGAIPSLLDAVRSFLTNAGRATFSVAMTSVGVNFLIGEQYLSILLSGETFKPVYDKLGLHSRNLSRTLEDAGTVINPLVPWSVCGVFISHALGVPVWEYLPYAFFCYLSLALTLLFGWTGLTLSKK

SEQ ID NO: 5417 - protein, 276 aa, Neisseria meningitidis
MPPETAQIRVLLYNVGLCAAFQDSLMAFASLFTLPDDITAVLDDVALMTKAAAKKTAGVVGDDLAPNANRVTGVSAERELPIVWSMAKGSFSNKPVLVPAALLLSAFLPQLITPLLTAGGIYLCFEGVEKLLHKFLHRHDAHARNGGNRHRHDCFGVRNRCRHRQTRRLRHAADAPPTNLFAQFGANADCLYALLYARFERGRHACHVSYRRRTGRPQPRPSARFPARATLGRWLGGVLRQPRCRAAFRFDCLRPRLAADESFRQALISFSNTDAV

SEQ ID NO: 5418 - protein, 90 aa, Neisseria meningitidis
MKKTGKYLIYTAAFTAFCFAFQENRSEAKQPDITLSASLCEQFNILNAKDMDAEQVSLSKECDIIESSHDWEKEYGNLNEQEMLAGIVYE

SEQ ID NO: 5419 - protein, 236 aa, Neisseria meningitidis
LPNINTKIEPFYFCKAYMDMLEILFRHQDFVAINKPGGISVHQDSGETGLARTLAIQLGVERVWLLHRLDKQTSGILLFALNRESASALSGQFAGKSIKKTYLALSDRKPSKKQGWIKGGMEKSRRGMWKLTRNTENIAVTRFHSISIAEKLRLFILEPHTGKTHQLRVAMKSLGSPILGDSLYGGTESETMFLYAWKIQFAYQNRQIEIVAPLKNEWQTENISHALEEFYMAKAG

SEQ ID NO: 5420 - protein, 213 aa, Neisseria meningitidis
MRCFMIQNVVTSIILYSGTAVDLLIILMLFFAKRKSRKDIINIYLGQFLGSVSLILLSLLFAFVLDYIPSKEILGLLGLIPIFLGIKVLLLGDSDGEAIAKEGLRKDNKNLIFLVAMITFASCGADNIGVFVPYFTTLNSANLIVALLTFLVMIYLLVFSAQKLAQVPSVGETLEKYSRWFVAVVYLGLGVYILIENNSFDMLWTVSGQEKIL

SEQ ID NO: 5421 - protein, 269 aa, Neisseria meningitidis
LPRLAGAHTIVSGYLAFGSDESYKNHWDIRDVYAIQLFGKKRWQLTAPDFPMPLYMQQTKDTDISIPEHIDMDIILEAGDVLYIPRGWWHRPIPLGCETFHLAVGTFPPNGYNYLEWLMKKFPTIESLRHSFSDWEQDRTRINDTAAQIAAMIADPVNYEAFSEDFLGKERTDTAFHLEQFANPNATLLSDDVRLRLNANNLDTLEKGYLIGNGMKISVDELGKKVLEHIGKNEPLLLKNLLVNFNQGKHEEVRKLIYQLIELDFLELL

SEQ ID NO: 5422 - protein, 218 aa, Neisseria meningitidis
MTIKIILIDDHTLFRSGIKALLSRQHGFEVIGEAADGLSGIKMISRLQPDVVLLDLDMPGMNGREALSQIISINPQQAVIMLTVSEDSDDLTECIRIGARGYLLKNINADFLLESIRKAAEGDNVFSPEMTAKLVKSLISPQPAQGTQALSSLTPRELEILGYLAAGHSNKIIARHLDLAESTVKVHVQNLLRKLNLSSRVQAAVYAIRHNVPQPVLE

SEQ ID NO: 5423 - protein, 201 aa, Neisseria meningitidis; identical to SEQ ID NO: 291

SEQ ID NO: 5424 - protein, 213 aa, Neisseria meningitidis
MKAFTKITAIVAPLDRSNVDTDAIIPKQFLKSIKRSGFGPNAFDEWRYLDHGEPGMDNSKRPLNPDFSLNQPRYQGAQILLTRKNFGCGSSREHAPWALDDYGFRAVIAPSFADIFFNNCYKNGLLPIVLTEEQVDRLFKEVEANEGYQLSIDLAEQTLATPGGETFTFDITEHRKHCLLNGLDEIGLTLQHADEIHAFEEKRRQSQPWLFNG

SEQ ID NO: 5425 - protein, 384 aa, Neisseria meningitidis
MADKKSPLIAVSVGEASGDLLGAHLIRAIRKRCPQARFVGIGGELMKAEGFESLYDQERLAVRGFVEVVRRLPEILRIRRGLVRDLLSLKPDVFVGIDAPDFNLGVAERLKRSGIPTVHYVSPSVWAWRRERVGKIVHQVNRVLCLFPMEPQLYLDAGGRAEFVGHPMAQLMPLEDDRETARQTLGVDAGIPVFALLPGSRVSEIDYMAPVFFQTALLLLKRHPAARFLLPAATEATKRRLAEILQRSEFAGLPLTVTDRQSETVCRAADAVLVTSGTATLEVALCKRPMVISYKISPLTYAYVKRKIKVPHVGLPNILLGKEAVPELLQHDAVPEKLAAALADWYEHPDKVAALQQDFRVLHLLLKKDTADLAARAVLEEAGC

SEQ ID NO: 5426 - protein, 291 aa, Neisseria meningitidis
MNLYDLLLAPFAEFDFMRYALASVFCLSLSAAPVGVFLVMRRMSLIGDALSHAVLPGAAVGYMFAGLSLPAMGLGGVAAGMLMALLAGLVSRFTTLKEDANFAAFYLSSLAIGVVLVSKNGSSVDLLHLLFGSVLAVDIPALQLIAAVSSLTLITLAVIYRPLVLESIDPLFLKSVGGKGGLWHVLFLVLVVMNLVSGFQALGTLMSVGLMMLPAITARLWAKHMGALILLSVLTALLCGLSGLLISYHIEIPSGPAIILCCSVLYLFSVILGKEGGILTKWLKNHRHHTT

SEQ ID NO: 5427 - protein, 626 aa, Neisseria meningitidis
MPYFALFDDAVSGRAKRYQNHVESRFFGPEELDALDGALQKGWQKGLHSVLFADYEFGLPLTGVESERGGNLALHWFADCADTDAASWLARHSDDLPAGISTPQSSVSETDYLDRIRQIHEAIRRGDTYQINYTTRLHLQAYGNPVSLYRRLRQPVPYAVLSHLPDAEGQSAWTLCFSPELFLNIASDGTISTEPMKGTAPILGDGQDERRAAELQADPKNRAENVMIVDLLRNDLGKIAQTGKVCVPEPFKVSRFGSVWQMTSTIQAQALPNTSFADILRAAFPCGSITGAPKKMSMQIIESLETEARGLYTGSIGYLKPCAGGLGFEGIFNVVIRTLSLKPVSASDGIVSGIGGPDSNAQARTAGQGGATPHPFDSNPPYRGVYGVGSGIVIDSDPAAEYRECGWKARFLNELRPDFGIFETLRAENGRCTLLDRHLCRLKTSAQALNLPLPDGCENQIKQYIADLPDGAFRVKALLASDGISLSRAVLNRLTDKQRVIISPTILPAQNYLRRFKTTCRTVFDQAWQTAETQGAFDSLFFNSDGILLEGGRSNVFVKHRGQWLTPSLDLDILNGIMRQAVLDEPQKYLQTNQVIETHITQKTLQEAEEIRLSNALRGVFAAALA

SEQ ID NO: 5428 - protein, 413 aa, Neisseria meningitidis
MSKFFKRLFDIVASASGLIFLSPVFLILIYLIRKNLGSPVFFFQERPGKDGKPFKMVKFRSMHDALDSDGILLPDGERLTPFGKKLRAASLDELPELWNVLKGDMSLVGPRPLLMQYLPLYDNFQNRRHEMKPGITGWAQVNGRNALSWDERFACDIWYIDHFSLCLDIKILLLTVKKVLIKEGISAQGEATMPPFTGKRKLAVVGAGGHGKVVAELAAALGTYGEIVFLDDRVQGSVNGFPVIGTTLLLENSLSPEQFDIAVAVGNNRIRRQIAEKAAALGFALPVLIHPDSTVSPSATVGQGGVVMAKAVVQADSVLKDGVIVNTAATVDHDCLLDAFVHISPGAHLSGNTRIGEESWIGTGACSRQQIRIGSRATIGAGAVVVRDVSDGMTVAGNPAKPLAGKNTETLRS

SEQ ID NO: 5429 - protein, 68 aa, Neisseria meningitidis; identical to SEQ ID NO: 531

SEQ ID NO: 5430 - protein, 207 aa, Neisseria meningitidis; identical to SEQ ID NO: 2101

SEQ ID NO: 5431 - protein, 289 aa, Neisseria meningitidis
MKERIVGQSGELFCFGQMPVWKAENLPEILLSGYSSEGGEWVCLNVLQGDVEVRTQDGAAEVWSAESGDCVFAPQQVFSVKLKTDDAEIRLSLYCAAADYFHKKYGMSATHSAVAAAQDTVPAGRALDMGCGQGRNALFLGLKGFEVTAVDHNPAALANVAELAEAEGLNVRTLEYDLNAAALQGEFDYIVATVVLMFLMPQRVPDVIADMQAHTAAGGYNLIVSAMDTADFPCPMPFPFKFKEGELKDYYRDWELVEYKEELGAMHAKDENGNPIRFKFVTMLAKRPE

SEQ ID NO: 5432 - protein, 758 aa, Neisseria meningitidis
MTTLHFSGFPRVGAFRELKFAQEKYWRKEISEQELLAVAKDLREKNWKHQAAANADYVAVGDFTFYDHILDLQVATGAIPARFGFDSQNLSLEQFFQLARGNKDQFAIEMTKWFDTNYHYLVPEFHADTEFKANAKHYVQQLQEAQALGLKAKPTVVGPLTFLWVGKEKGAVEFDRLSLLPKLLPVYVEILTELAAAGAEWIQIDEPALAVDLPQAWLDAYQDVYATLSQVNAKILLSTYFGSVAAHAGRLKALPVAGLHIDLVRAPEQLDAFADYGKVLSAGVIDGRNIWRANLNNVLATLEPLKAKLGDRLWISSSCSLLHTPYDLSVEEKLKVNKPALFSWLAFTLQKTQELRVLKTALNQGREAVAAELADSQAAADSRANSTEIHRAEVAKRLADLPADADQRKSPFAERIKAQQAWLNLPLLPTTNIGSFPQTTEIRQARAAFKKGELSDADYEAAMKKEIALVIEEQEKLNLDVLVHGEAERNDMVEYFGELLEGFAFTQYGWVQSYGSRCVKPPVIYGDVSRPNAMTVAWSTYAQTLTKRPMKGMLTGPVTILQWSFVRNDIPRSTVCKQIALALNDEVLDLEKAGIKVIQIDEPAIREGLPLKRADWDAYLAWASEAFRLSSTGCEDSTQIHTHMCYSEFNDILPAIASMDADVITIETSRSDMELLTAFGEFKYPNDIGPGVYDIHSPRVPTEAEVEHLLRKAIEVVPFERLWVNPDCGLKTRGWKETLEQLQVMMNVTRKLRAELAK

SEQ ID NO: 5433 - protein, 78 aa, Neisseria meningitidis; identical to SEQ ID NO: 3902

SEQ ID NO: 5434 - protein, 737 aa, Neisseria meningitidis
MTAISPIQDTQSATLQELREWFDSYCAALPNNDKKLVLAARSLAEAHYPADAATPYGEPLPDHFLGAAQMVHELDLLPDAVAATLLADIGRYVPDWNLLVSERCNSTVAELVKGVDEVQKLTHFARVDSLATPEERAQQAETMRKMLLAMVTDIRVVLIKLAMRTRTLQFLSNAPDSPEKRAVAKETLDIFAPLANRLGVWQLKWQLEDLGFRHQEPEKYREIALLLDEKRTERLEYIENFLNILRTELKKYNIHFEVAGRPKHIYSIYKKMVKKKLSFDGLFDIRAVRILIDTVPECYTTLGIVHSLWQPIPGEFDDYIANPKGNGYKSLHTVIVGPEDKGVEVQIRTFDMHQFNEFGVAAHWRYKEGGKGDSAYEQKIAWLRQLLDWRENMAESGKEDLAAAFKTELFNDTIYVLTPHGKVLSLPTGATPIDFAYALHSSIGDRCRGAKVEGQIVPLSTPLENGQRVEIITAKEGHPSVNWLYEGWVKSNKAIGKIRAYIRQQNADTVREEGRVQLDKQLAKLTPKPNLQELAENLGYKKPEDLYTAVGQGEISNRAIQKACGTLNEPPPVPVSETTIVKQSKIKKGGKNGVLIDGEDGLMTTLAKCCKPAPPDDIVGFVTRDRGISVHRKTCPSFRHLAEQAPEKVLDASWAALQEGQVFAVDIEIRAQDRSGLLRDVSDALARHKLNVTAVQTQSRDLEASMRFTLEVKQVTDLPRVLASLGDVKGVLSVTRL

SEQ ID NO: 5435 - protein, 492 aa, Neisseria meningitidis
MFSKLTPLAETGIPTLSCANAAGRLLHSDSRQIKQGDIFVACPGEYADGRSYIPAAVANGAAFVFWDDDGKFAWNPEWKVPNQGIKDLKHRAGILAAQVYGNVSDGLKVWGVTGTNGKTSITQWLAQAADLLGEKTAIVGTVGNGFWGALEETTHTTPAPVDVQTLLYRFRQQGATVAAMEVSSHGLDQSRVNGVSFRSAIFTNLTRDHLDYHGTMEAYGAIKSRLFYWHGLKHAVINVDDGYGAELIGRLKKDCPDLAVYSYGFSEHADIRIIDFTASSDGIAAVFQTPWGEGKCRTRLLGRFNAQNLAACIALLCANGYPLDKVLDVLAKIRPASGRMDCIMNSGKPLVVVDYAHTPDALEKALATLQEIKPQGAALWCVFGCGGNRDRGKRPLMGAAAVQGADKVVVTSDNPRLENPHDIINDILPAVPAPECVEADRAAAIRYAVEQAAANDIILIAGKGHENYQDVQGVKHRFSDLEIVGQALLTRK

SEQ ID NO: 5436 - protein, 764 aa, Neisseria meningitidis
MRRETKMAQTTLKPIVLSILLINTPLLAQAHETEQSVDLETVSVVGKSRPRATSGLLHTSTASDKIISGDTLRQKAVNLGDALDGVPGIHASQYGGGASAPVIRGQTGRRIKVLNHHGETGDMADFSPDHAIMVDTALSQQVEILRGPVTLLYSSGNVAGLVDVADGKIPEKMPENGVSGELGLRLSSGNLEKLTSGGINIGLGKNFVLHTEGLYRKSGDYAVPRYRNLKRLPDSHADSQTGSIGLSWVGEKGFIGVAYSDRRDQYGLPAHSHEYDDCHADIIWQKSLINKRYLQLYPHLLTEEDVDYDNPGLSCGFHDDDDAHAHAHNGKPWIDLRNKRYELRAEWKQPFPGFEALRVHLNRNDYRHDEKAGDAVENFFNNQTQNARIELRHQPIGRLKGSWGVQYLQQKSSALSATSEAVKQPMLLDNKVQHYSFFGVEQANWDNFTLEGGVRVEKQKASIRYDKALIDRENYYNHPLPDLGAHRQTARSFALSGNWYFTPQHKLSLTASHQERLPSTQELYAHGKHVATNTFEVGNKHLNKERSNNIELALGYEGDRWQYNLALYRNRFGNYIYAQTLNDGRGPKSIEDDSEMKLVRYNQSGADFYGAEGEIYFKPTPRYRIGVSGDYVRGRLKNLPSLPGREDAYGNRPFIAQDDQNAPRVPAARLGVHLKASLTDRIDANLDYYRVFAQNKLARYETRTPGHHMLNLGANYRRNTRYGEWNWYVKADNLLNQSVYAHSSFLSDTPQMGRSFTGGVNVKF

SEQ ID NO: 5437 - protein, 453 aa, Neisseria meningitidis
MLKKWLNKMLPSGRSSKKAESKTVIPAERHNIRAEMLSFAAENVIRRLKGAGFQAYVVGGAVRDLLLGIEPKDFDVATDATPEQVHKLFRRSRIIGRRFQIVHVMNGAEIIEVTTFRGGAKVHQNAHGRIMKDNTYGSIEEDAMRRDFTCNALYYDPEKEEILDFHNGIADVAARRLVMIGDAAERYQEDPVRILRAIRLSGKLGFDLSEETAAPIAESICRLKHEPVARLFDEIMKLLFSGHARECLKRLNGFDIPDDIHPLLNALRVSDGIAGKMTVLALKNTDERLRADKSVSVGFVLAALMWPELERHWKSNLQQGLKPVPALSDAINTMRETVERGWGVPQRFSATMREIWMFQPQFENRKGARPHKLFAQARFRAAYDFLLLRAETGNADRALAEWWTAFQTASQEQRTEMTKNEAAARHEKNEGQAKKRRRRRRKPKPKVEGTDWE

SEQ ID NO: 5438 - protein, 258 aa, Neisseria meningitidis
MNFIRSVGAKTLGLIQSLGSITLFLLNILAKSGTAFVRPRLSVRQVYFAGVLSVLIVAVSGLFVGMVLGLQGYTQLSKFKSADILGYMVAASLLRELGPVLAAILFASSAGGAMTSEIGLMKTTEQLEAMNVMAVNPVARVVAPRFWAGVFSMPLLASIFNVAGIFGAYLVGVTWLGLDSGIFWSQMQNNITIHYDVINGLIKSAAFGVAVTLIAVHQGFHCVPTSEGILRASTRTVVSSALTILAVDFILTAWMFTD

SEQ ID NO: 5439 - protein, 158 aa, Neisseria meningitidis
MNTIAPNLDGKHLRIGIVQARFTNEIGSEMLKVCCRTLKELGVADENITVATVPGALEIPIALMNFASSEKFDALIAIGVVIRGETYHFELVSNESGAGVSRVALDYNIPIANAVLTTENDAQAIERIEEKASDAAKVAVECANLVNLLLEEQFEDEE

SEQ ID NO: 5440 - protein, 203 aa, Neisseria meningitidis
MITTYKTITSSTQAEFKDKGSRFIVFAYPIRTLADVKKYLDPLKEEHHKARHWCYAYRLGVDGVQFRANDDGEPSGSAGRPILGQIDSVGITDVLVVVVRYFGGTLLGVPGLIHAYKEATAQALAVAEVVEKNIEKTVWLKCEYPFLNEAIRIAKQYQADILERDLQLDCRLTVSLSLANYEACVAAWKNTRQIEVNTEKPFE

SEQ ID NO: 5441 - protein, 463 aa, Neisseria meningitidis
MQLFLDNLKAFFETVSGWVWGSVMLMLLVGTGIVLTVMLKGLQFTMLGYALKQAFVPSKKYEGGEGHEGDISHFAALMTALSATIGTGNIAGVATAVVTGGPGAVFWMWMTAIFGMATKYGEGVLAVKYRVNNSKGEMSGGPMYYIENGLGKNWKWMAVAFALFGTFASFGIGSSVQSNSVAQAVQTSFGINPVYTGITLTVLTAIVVLGGIKGIAKAASFIVPAMAVFYVVGGISIIVINSDALMPAVNLIFSDAFSAKAVAGGAIGTVIRYGVARGVFSNEAGMGSAPIAAAAAKTDHPVRQALVSMTGTFLDTIVVCSITGIILVMGLLGAGGEFVKPELSGAALTTVTFQKMLPGIGGWIVTIGLIFFAYSTILGWCYYGEKCAVYVFGEKFAGLYRVGYVSSVMLGTVLSLDLVWLASDTFNGLMALPNLIALLLMAKVIVNETRDFKQKITNGELPH

SEQ ID NO: 5442 - protein, 121 aa, Neisseria meningitidis; identical to SEQ ID NO: 1865

SEQ ID NO: 5443 - protein, 299 aa, Neisseria meningitidis
MVAKIKKFSDSTLSVLNNGERRFYVYCLTDLKKDKVLYIGKGFGNRIFEHEWVASRSQDPVSGEIIDRKLKAISKCKKLGRYIISYHLTEVEALAAESALIHFVKSVLGKKLKNKIAGHGPGGISVEELDRRFGFSSLPLNEINPDGLILAIKIHNAFDLDTDEELDYLFDNQDDANLKSRTLGNWVIGKDVASKVKYVIGVHTGLQNAVVSAYEVDGFETMVEETKNGRKQSRYRFRTTSRSEEVLAKLGLQQKCLPELKFGSGGEKAYIRPKTETETEQENIQTTPNPKIKKEKTKS

SEQ ID NO: 5444 - protein, 314 aa, Neisseria meningitidis; identical to SEQ ID NO: 1612

SEQ ID NO: 5445 - protein, 100 aa, Neisseria meningitidis
MRIFKNQWIVKFAKKHKINDSELLEAVERADNGLIDADLGGGVIKQRIARQGQGRSGGYRSLILFKQADRAFSFTPLPRTTGKTFRIKNWTFTEKPPHII

SEQ ID NO: 5446 - protein, 410 aa, Neisseria meningitidis
MPSAHYPEMSEKLMAVLMAMLVTLMPFSIDAYLPAIPEMAQSLNADVHRIEQSLSLFMFGTAFGQVVGGSVSDIKGRKPVALTGLAVYCLAVAAIVFASSAEQLLNLRVVQAFGAGMTVVIVGAMVRDYYSGRKAAQMFALIGIILMVVPLVAPMVGALLQGLGGWQAIFVFLAAYSLVLLGLVQYFLPKPAVGGKIGRDVFGLVAGRFKRVLKTRAAMGYLFFQAFSFGSMFAFLTESSFVYQQLYRVTPHQYAWAFALNIITMMFFNRITAWRLKTGAHPQSILLWGIVVQFAANLSQLAAVLFFGLPPFWLLVACVMFSVGTQGLVGANTQACFMSYFKEEGGSANAVLGVFQSLIGAGVGMAATFLHDGSATVMAATMTASTSCGIALLWLCSHRAWKENEQSEYL

SEQ ID NO: 5447 - protein, 157 aa, Neisseria meningitidis
MKGDRLVIRELNKNLGLLLVTINQYFLHARILKNWGFEELGEHFFKQSIVEMKAADDLIERILFLEGLPNLQELGKLLIGESTEEIIACDLEKEKEKHEALIAAISVAEAQQDYVSRDLLEKQKDTNEEHIDWLETQQELIGKIGLPNYLQTAAQED

SEQ ID NO: 5448 - protein, 87 aa, Neisseria meningitidis
LFSGESAASEHTAHAHIDLPSLAHRVHRRPLRLKIKLPSVVGITTQKNELLDIPMFFICFYIVMRSDKRPPDICLDGIVLLNFYKYV

SEQ ID NO: 5449 - protein, 322 aa, Neisseria meningitidis
MKILLVRLSSMGDLIHTLPAIEDLARQCPDVELHWLCEAGFADIARLHPFVKKIHVMKWRQWRKHLFRAETWREMGHLKQTLRQEAFDFVLDSQGLIKSACFAKMAKSPIYGLDKNSAREGLAAVVYEKTYAVPKGKNAVWRNRELFAQVFGYAMPETQVFGLTVPEAGRLKNLAQPYYAALHATSRDSKLWPVENWRSLLQKLNEEQQCNIYLPWGSEVEKTRAEQIADGLPFAIVCDKMNLLQAAYLLKYAVGIVGVDTGLLHLANALEKPVVGIYTDTDPIKTGVQVSPIAKNLGNIGQIPTADLVYQTLMDCVAADKG

SEQ ID NO: 5450 - protein, 210 aa, Neisseria meningitidis
MDLHNIREDYSKRELSEGDCADNPIEQFERWLDEAVRAQVNEPTAVNVAAVDGRGRPNSRMVLLKEVNSEGFVFFTNYHSRKGRSLDAHPFAAMTFFWPELERQVRVEGRVERLAEKLSDEYFESRPYQSRLGAWASAQSEVIPNKAVLVAKAAAVGLKHPLHVPRPPHWGGYIVIPDLLEFWQGRPSRLHDRIQYRLLDGGWIRERLSP

SEQ ID NO: 5451 - protein, 365 aa, Neisseria meningitidis; identical to SEQ ID NO: 2620

SEQ ID NO: 5452 - protein, 91 aa, Neisseria meningitidis
MNEGEVVLTPEQIQTLRGYAFRGDTYGGWRYLANLGDRYADDAAAIVGKDANLNGLNLWMKKGVENLWDDTVGKKTRLMCISVFWIVVFNL

SEQ ID NO: 5453 - protein, 354 aa, Neisseria meningitidis; identical to SEQ ID NO: 3291

SEQ ID NO: 5454 - protein, 65 aa, Neisseria meningitidis
MPKMKTKSSAKKRFKVLGNGGVKRAHAFKRHILTKKTTKNKRQLRGTSMVNDRDLASVAKMLPYA

SEQ ID NO: 5455 - protein, 371 aa, Neisseria meningitidis; identical to SEQ ID NO: 2339

SEQ ID NO: 5456 - protein, 255 aa, Neisseria meningitidis
MALAKRIIPCLDVKDGRVVKGVNFIGLRDAGDPVEAAKRYNGEGADELTFLDITASSDNRDTILHIIEEVAGQVFIPLTVGGGVRTVADIRRLLNAGADKVSINTAAVTRPDLIDEAAGFFGSQAIVAAVDAKAVNSENTRWEIFTHGGRNPTGLDAVEWAIEMQKRGAGEILLTGMDRDGTKQGFNLPLTRAVAEAVDIPVIASGGVGNVRHLIEGITEGKADAVLAAGVFHFGEIAIREAKRAMREAGIEVRL

SEQ ID NO: 5457 - protein, 611 aa, Neisseria meningitidis
MHAHASDLANDSFIRQVLDRQHFEPDGKYHLFGSRGELAERSGHIGLGNIQSHQLGNLMIQQAAIKGNIGYIVRFSDHGHEVHSPFDNHASHSDSDEAGSPVDGFSLYRIHWDGYEHHPADGYDGPQGGGYPAPKGARDIYSYDIKGVAQNIRLNLTDNRSTGQRLADRFHNAGAMLTQGVGDGFKRATRYSPELDRSGNAAEAFNGTADIVKNIIGAAGEIVGAGDAVQGISESSNIAVMHGLGLLSTENKMARINDLADMAQLKDYAAAAIRDWAVQNPNAAQGIEAVSNIFTAVIPVKGIGAVRGKYGLGGITAHPVKRSQMGAIALPKGKSAVSDNFADAAYAKYPSPYHSRNIRSNLEQRYGKENITSSTVPPSNGKNVKLADQRHPKTGVPFDGKGFPNFEKHVKYDTKLDIQELSGGGIPKAKPVFDAKPRWEVDRKLNKLTTREQVEKNVQETRRRSQSSQFKAHTQREWENKTGLDFNHFIGGDINKKGTVTGGHSLTRGDVRVIQQTSAPDKHGVYQATVEIKKPDGSWEMKKGRGGKPMTNHSMFPKDWDEARIRAEVTSAWEKRKELEGQKWRGTSKSGVEIEGFTEPNRTAYPLYNSK

SEQ ID NO: 5458 - protein, 307 aa, Neisseria meningitidis; identical to SEQ ID NO: 983

SEQ ID NO: 5459 - protein, 195 aa, Neisseria meningitidis
MEHKLPQLPYELDALSPHLSKETLEFHYGKHHQTYITNLNNQIKGTEFEKLPLEEIVKKSSGGVFNNAAQTWNHTFYWLGFTPKGQGKPSGELAAAIDAKWGSFEKFQEAFNACAAGTFGSGWAWLVKTPAGGLDLVSTSNAATPLTTENTPLLTCDVWEHAYYIDYRNSRPNYLKGFWEIVNWDEVAKRFAALS

SEQ ID NO: 5460 - protein, 513 aa, Neisseria meningitidis
MKFLDREASIAKPGFNRWLVPPAALAVHLAIGQIYAYSVFNAPLTKLIGITESAAGDWKLTTVGWIFSIALAMLGASAALFGTWMERVGPRKAIFAAACCFSLGFFVSAFGVRTHNLFLLYLGNGVIGGVGLGLGYIGPVSTLMKWFPDKPGMATGLAIMGFGGGAMLASPLSVSLMNAFSNAASVGVAETFAVLGLLYLALMMFGAFTIRVPADGWKPEGYTAPKTQNKLVSSNHVNVSQAMKTPQFWLLFWVLCLNVTAGIGVLGQASVMIQELFSETSVGRQSAVGAGAAAGFVSLLSLFNMGGRFLWSSVSDKIGRKNTYTIFFILGSLLYFAVPSIGESGSKALFIIGFCVIISMYGGGFAAIPAYLKDLFGTYQVGAIHGRILLAWSTAAVIGPVLVNYIRQSQIDSGIPAAQAYSVTMYIMAGLLIIGLLCNLAVKSVHEKHHEKDIKTAAHSGNPDDETAISDAYLVGEKVSGGGISVWWRWALAVIPLAYGVVMVFVKALDLFS

SEQ ID NO: 5461 - protein, 117 aa, Neisseria meningitidis; identical to SEQ ID NO: 1331

SEQ ID NO: 5462 - protein, 371 aa, Neisseria meningitidis
MRLFKSLKNPKKTDAKLPKKSSGLNNRAAIGIDIDQHSIKMVQLSGRSLNQIQLEKYVIAKLPKNIIQGNKVQNYDQLVTYLQQAYAKLGTSCKNIIASVPQNLATIEQLTYTDKDAELDLQGFVESSISEVSSISLEEANYDYQVLSQSAAGEAVLAVASRKDEIEPLIDAFNAAGMKLSALDVDIFGQYNAYALWINHFAPELAAEKVAIFGVYAAQTYALVIQDGKILYKQETSVSEEQLNQLIQRTYQVTEEKAEEIINSPQKPSDYQESVANYFNQQITQEIQRVLQFYYTTQTADDMTDIKHILLTGEAVRQEGIAQTVASQTNADVQCVHPARYFADNLKTDKQQFELDAPTLTRAFGLAVRGL

SEQ ID NO: 5463 - protein, 95 aa, Neisseria meningitidis
MAKVYIANTPLILENEQGGQFRVEVGEAVELTAEQYESVAAHVTPTLTTGEEPDAQQNDTPPSEDTPSDDAGNAPTGEVEKPKRGKKPAAAEGAE

SEQ ID NO: 5464 - protein, 1832 aa, Neisseria meningitidis
MKTKRFKINAISLSIFLAYALTPYSEAALVRDDVDYQIFRDFAENKGKFFVGATDLSVKNKQGQNIGNALSNVPMIDFSVADVNKRIATVVDPQYAVSVKHAKAEVHTFYYGQYNGHNDVADKENEYRVVEQNNYEPHKAWGASNLGRLEDYNMARFNKFVTEVAPIAPTDAGGGLDTYKDKNRFSSFVRVGAGRQLVYEKGAYHQEGNEKGYDLRDLSQAYRYAIAGTPYKDINIDQTMNTEGLIGFGNHNTHYSAEELKQALSQDALTNYGVLGDSGSPLFAFDKQKNQWVFLGTYDYWAGYGKKSWQEWNIYKKEFADKIKQRDNAGTIKGNREHHWNITFGTNSKIGSTAVRLANNERDANNGQNVTFEDNGTLVLDQNINQGAGGLFFKGDYTVKGANNDITWLGAGIDVADGKKVVWQVKNPNGDRLAKIGKGTLEINGTGVNQGQLKVGDGTVILNQQADADKKVQAFSQVGIVSGRGTLVLNSSNQINPDNLYFGFRGGRLDANGNDLTFEHIRNVDEGARIVNHNTDHASTITLTGKSLITDPKTISIHYIQNNDDDDNGYYYYRPRKPIPQGKDLYFKNYRYYALKSGGSVNAPMPENGVAENNDWVFMGYTQEEAQKNAMNHKNNQRISGFSGFFGEENGKGHNGALNLNFNGKSAQNRFLLTGGANLNGKISVTQGNVLLSGRPTPHARDFVNKSSARKDARFSKNNEVVFEDDWINRTFKATEITVNQSASFSSGRNVSDITANITATDNAKVNLGYKNGDEVCVRSDYTGYVTCNTGNLSDKALNSFGATQINGNVNLSQNAALTLGKAALWGQIQGQGNSRVSLNQHSKWHLTGDSQVHNLLLADSHIHLNNASDAQSANKYHTLKINHLSGNGHFHYLTHLAKNLGDKVLVKESASGHYQLHVQDKTGEPNQEGLNLFDASSVRDRSRLSVSLANNHVDLGALRYTIKTENGITRLYNPYAENRRRVKPAPSPATNTASQAQKATQTDGAQIAKPQNIVVAPPSPQANQAEEAKRQQAKAEQVKRQQAEAERKSAELAKQKAEAEREARELATRQKAEQERSSAELARRHEKEREAAELSAKQKVEAEREAQALAVRRKAEAEEAKRQAAELARRHEKEREAAELSAKQRVGEEERRQTAQSQPQRRKRRAAPQDYMAASQDRPKRRGHRSVQQNNVEIAQAQAELARRQQEERKAAELLAKQRAEAEREAQALAARRKAEAEEAKRQAAELAHRQEAERKAAELAHRQEAERKAAELSANQKAAAEAQALAARQQKAFARQQEEARKAAALAAKQKAETERKTAELAKQRAAAEAAKRQQEARQTAELARRQEAERQAAELSAKQKAETDREAAESAKRKAEEEEHRQAAQSQPQRRKRRAAPQDYMAASQNRPKRRGRRSTLPAPPSPSFDSSAYAAPRALHNPDWYENDYEEIPLDALEDENVSESVDTSDKQPQDNTELHEKYENDYEEIPLDALEDEDVSESVDTSDKQPQDNTELHEKVETVSLQPRAAQPRAQAVAQADAVSTNTNSALSDAMASTQSILLDTGASLTRHIAQKSRADAEKNSVWMSNIGYGRDYASAQYRRFSSKRTQTQIGIDRSLSENMQIGGVLTYSDSQHTFDQASGKNTFVQANLYGKYYLNDAWYVAGDIGAGSLRSRLQTQQKANFNRTSIQTGLTLGNTLKINQFEIVPSAGIRYSRLSSADYKLGNDSVKVSSMSVKTLTAGLDFAYRFKVGNLTVKPLLSAAYFANYGKGGVNVGGNSFAYKADNQQKYSAGAALLYRNVTLNVNGSITKGKQLEKQKSGQIKIQIRF

SEQ ID NO: 5465 - protein, 590 aa, Neisseria meningitidis
MIPSDFIDELLAKTDIVDIIDEQVPLKKGGANYMACCPFHKEKTPSFSVSPTKQFYHCFSCGAHGSAIGFVMEHQGLSFPEAVQFLADRVGMVVPKVRGQNDNPEVRAERKKKQQTLEETTAAAADFYAQQLKFNPAAKAYLDKRGLSAEVIAHYGLGYAPDGWQPLAQVFQPYPNTALVDTGMVIDNEGRYYDRFRHRIMFPIRNPRGQVIGFGGRVLDDSKPKYLNSPDTPLFDKGKNLYGLYEGRAAVKEAGRILVVEGYMDVVALAQFGVGYGVAALGTATTAEHVKILMRQADSIYFCFDGDSAGRKAAWRALENALPQLKDDKSLHFLFLPEEHDPDSYIRAYGKAQFEDALLNQSKPLSEYFWEHLSDGIHLNTQEGKAELVKTSSPLLAQITAPALAYLLKQRLSELVGIDPDNLAQLLGQEAPKRHVKQKNYKLPPISVKQPVMPTLVQRQIRSLLINPDWAAYIDLPDYLALDGDFACLANLAETIKNHPSVPATAQVLEHMRGSPYEETINRIFRSALQSEEMEGGGEEDCENFQIGIKKLLNELKYSQIETLKQKSLQSGLNESEKKLLLSLLTAKQN

SEQ ID NO: 5466 - protein, 96 aa, Neisseria meningitidis
VEYFMLLATDGENVYEARMAARPEHLKRLETLKSEGRLLTAGPNPLPEDSNRVSGSLIVAQFESLDAAEAWAEDDPYVHAGVYSEVLIKPFKAVFK

SEQ ID NO: 5467 - protein, 462 aa, Neisseria meningitidis
MSIKFADLNLDKNILSAVSSEGYESPTPIQAQAIPFALEGRDIMASAQTGSGKTAAFLLPTLQRLTKRSEKPGKGPRALVLTPTRELAAQVEKNALAYAKNMRWFRTVSIVGGASFGYQTRALSKPVDLIVATPGRLMDLMQSGKVDFGRLEVLILDEADRMLDMGFIDDIETIVEATPTDRQTLLFSATWDGAVGKLARKLTKDPEIIEVERVDDQGKIEEQLLYCDDMRHKNRLLDHILRDANIDQCVIFTSTKAMTEVIADELYEKGFAANCLHGDMPQGWRNRTLMDLRKGRCKILVATDVAARGIDVPTITHVINYDLPKQAEDYVHRIGRTGRAGRTGIAITFAEVNEYVKVHKIEKYINRKLPELTIEGMEPTRKRKSAGGKPKGKGGWGDRKSGGRRGDHKPGKEGFGGKTRGESFKKEGFKKDGFKKTGEGFKGKRKAGDSFAGRGERRYKDR

SEQ ID NO: 5468 - protein, 175 aa, Neisseria meningitidis
IVDQKPVQRCLALAQRERFSKVLKHQVNRFRTVCTVCGFVALSFLLIHYTSANAHECKHLSPLLEGVPRGTTVYADKGYDSAENRQHLEEHQLQDGIMRKACRNRPLSEAQTKRNRYLSKTRYVVEQSFGTLHRKFRYARAAYFGLIKVSAQSHLKAMCLNLLKAANRLSAPAAA

SEQ ID NO: 5469 - protein, 544 aa, Neisseria meningitidis
MTKFIFVTGGVVSSLGKGIAAASIAAILESRGLNVTMLKLDPYINVDPGTMSPFQHGEVFVTDDGAETDLDLGHYERFIDSTMTRRNSFSTGQVYENVIAKERRGDYLGGTVQVIPHITDEIKRRIHEGAAGYDVAIVEIGGTVGDIESLPFLEAIRQMRSQLGRNNTLFAHLSYVPYIAAAGEIKTKPTQHTVKEMLSIGLQPDILICRMDRTMPADERRKIALFCNVEERAIVGSYDVDSIYECPEMLHDQGIDNIITEQLQLNVQQADLTAWKKIVHAIQNPKHTVKIAMVGKYVDLTESYKSLIEALKHAGVHTETDVQITFVDSESIEKNNGDVSMLKDMDAILVPGGFGSRGVEGKIAAVRYARENNVPYLGICLGMQIALIEYARDVAGLKGANSTEFDLKCAAPVVALIDEWQTADGSVETRDESADLGGTMRLGAQEVELKAGSLAAKIYGSEHIRERHRHRYEVNNNYVPTLEQAGLVIGGVSAGRERLVETIELPNHPWFFACQFHPEFTSNPRKGHPLFTAFVKAALNNKKA

SEQ ID NO: 5470 - protein, 231 aa, Neisseria meningitidis
MSELILKCEGVGKRYRDGGLDVRVLHGLDLEIHAGESTGIIGSSGSGKSTLLHILGGLDMPSEGRVLLMGEDLRTLNQRRLGDLRNRHLGFVYQFHHLLPEFSALENVMMPLLIGKKSREEAAETAMAMLEKVGLKHRSTHRAGELSGGERQRAAIARALVTQPKCLLADEPTGNLDRANARNVLDMMLELKTELGTGLVVVTHDDELAGRFERVMVMKDGSLHPKQGANA

SEQ ID NO: 5471 - protein, 281 aa, Neisseria meningitidis
MKNKTSSLLLWLAAMMLTACSPSKEDKTKENGASAASSTASAASSSAPQTDLQPAASAPDNVKQAESAPPSNCTDLHPATGIDDLMQQIAEHIDSDCLFALSHHELETRFGLPGGGYDNIQRLLFPDIRPEDPDYHQKIILAIEDLRYGKRTISRQAQDALMEQERRLREATLLLIQGSQETRGQGEEPKRTRYFEVSATPAYSSRHNNGLGGNFQYIGQLPGYLKIHGEMLENQSLFRLSNRERNPDKPFLDIHFDENGKITRIVVYEKNIYFNPNLGRR

SEQ ID NO: 5472 - protein, 308 aa, Neisseria meningitidis
MSTFFQQTAQAMIAKHIDRFPLLKLDQVIGWQQIEQYLNRQRTRYLRDHRGRPAYPLLSMFKAVLLGQWHSLSDPELEHSLITRIDFNLFCRFDELSIPDYSTLCRYRNWLAQDDTLSELLKLINRQLTEKGLKVEKASAAVVDATIIQTAGSKQRQAIEVDEEGQISGQTTPSKDSDARWIKKNGLYKLGYKQHTRTDEEGYIEKLHITPANAHECKHLPPLLEGVPRGTTVYADKGYDSAENRQHLEEHQLQDGIMRKACRNRPLAETQTKRNRYLSKTRYVVEQSFGTLHRKFRYARAAYFGLIK

SEQ ID NO: 5473 - protein, 696 aa, Neisseria meningitidis
MPSERRFRPIPTTRFVRKRITGKIMEVIRYPDSPFKLHQPFPPAGDQPTAIADLLEGLSDGLAYQTLLGVTGSGKTYTMANVIAQSGRPAIIMAHNKTLAAQLYAEMREFFPENAVEYFVSYYDYYQPEAYVPSRDLFIEKDSAINEHIEQMRLSATKNLMTRDDVIIVATVSAIYGIGDPTEYQQMVLSVKEGDTIEQRDIIATLVSMQYERGDLDFKRGSFRVRGDVIDVYPAESSENALRISLFDDEIDRLDMFDPLSGSLHQRVGRYTVFPSSHYVTPRDTVLRACDSIKEELRERIDFFTKENRPVEQQRIEQRTRFDLEMLYEMGFCKGIENYSRHFSGKKEGEPPPTLMDYLPSNAIMFIDESHVTVTQIGGMYKGDASRKQNLVDYGFRLPSARDNRPLKFHEFEKVMPQTVFVSATPAKYEEEHAGQVVEQVVRPTGLVDPQIIIRPVATQVDDLMSEINDRIQKGERVLVTTLTKRMAEQLTDYYSELGIKVRYLHSDIDTVERVEIIRDLRLGLFDVLVGINLLREGLDIPEVSLVAILDADKEGFLRSHRSLIQTIGRAARNVNGVAILYADKITDSMKAAIDETERRREKQIKFNEEHGIVPQQIKKQVKDIIDGVYHEEDSGKGRRQGKNKVKVGEIHNEEDAIKEIAKLEKAMQQAARDLQFEEAAVLRDRIRGIKENLLF

SEQ ID NO: 5474 - protein, 413 aa, Neisseria meningitidis
MLSEGSSGFGRHIPSGCQTGKNKMKRDLSKMTCIEDLRRVAKRKMPRMFYDYIDSGSWTETTYRENTSDFKDIRFRQKVLVNMEGRSLETKMIGQDVKMPVAIAPTGFTGMAHADGEILAARAAEKFGIPFTLSTMSICSIEDVAENTSAPFWFQLYVMRDREFMENLIKRAKDAKCSALVLTADLQVLGQRHKDIKNGLSAPPKPTIANLINLATKPEWCMKMLNTERRTFRNIVGHAKNVGDLSSLSSWTSEQFDPRLSWDDVARIKDLWGGKLIIKGIMEPEDAEKAAKSGADALIVSNHGGRQLDDTVSAIKALPDIVSAVGSDIEVWMDSGIRSGQDILKAWALGAKGTMIGRAFLYGLGAYGEEGVTRALEILYKEMDISMAFTGHRDIQDVDASILRGKDWGRETV

SEQ ID NO: 5475 - protein, 81 aa, Neisseria meningitidis
MIGGKEVNAIFDREFITDSGFGVAVANADPQIIVTEDDLPEDVKSVVVTVRGKRYAVAETDFDGCGMVVVQLRAIHDKPTY

SEQ ID NO: 5476 - protein, 602 aa, Neisseria meningitidis
MRTNYCGLISEQYLDQTVTVKGWVHRRRDHGGVIFIDLRDREGIVQVVIDPDTPEAFAAADSARNEYVLSITGRVRNRPEGTTNDKMISGKIEILAKEIEVLNAAATPPFQIDDENISENVRLTNRVIDLRRPVMQRNLRLRYQVAMGVRRYLDAQGFIDIETPMLTRSTPEGARDYLVPSRVHPGEFFALPQSPQLFKQLLMVAGFDRYYQITKCFRDEDLRADRQPEFTQIDLETSFLNEDEIMDITEGMAKQVFKDALGVDLGGFPRMPYAEAMFYYGSDKPDMRIGLKFTELTDLMKTEEFKVFRGAADMKGGRVVALRVPNGAKFSRKEIDEYTKFVGIYGAKGLAYIKVNDVGNLSNGEDSGLQSPIVKFLSENALKEIIARTGAENGDIIFFGADKAKVVNEAIGALRIKVGLEHGAENGYFTDEWKPLWVVDFPMFEYDEEADRYVAVHHPFTAPKEGHEDLMVSDPANCLARAYDMVLNGWEIGGGSIRIHRADVQEKVFAALKISPEEQQEKFGFLLDNLKFGAPPHGGLAFGLDRLVTLMTGAESIRDVIAFPKTQRAQCLLTNAPNSVDDKQLRELSLRLRQKAAETKEA

SEQ ID NO: 5477 - protein, 38 aa, Neisseria meningitidis
LIIIHYKSPSLRLDFADTAYPRKEAMIYYPAVLFQDPD

SEQ ID NO: 5478 - protein, 331 aa, Neisseria meningitidis
MSASHLRGLRGQLDPVLTNLALGYKQADFIAEKIFPVVFTEKEGVRVPVFGKGSFVEYQTERAVGAASNVITLDSPNFMPVVLEEHDLAAGVDYREQAESMYDERAKATRRAVKGVQLRQEIETAALLQNKSAYQSGFSKDLAATQKWSDKNSDPLADIETARETVRAGCGIRPSVLVVGASVLSALKRHEKLIGALGANERKSLLTVEQLKNLLELDDIIVGEAVSTPAANKATQDIWGKFASLIVRPHTASGGNDEGEPSFGYTFRRRGMPVVDRYEEVGGKVEYARYTDIRKAAVVGGACGRGCVIGKTPSERLQTAYGEKYDFIREV

SEQ ID NO: 5479 - protein, 671 aa, Neisseria meningitidis
MKSYPDPYRHFENLDSAETQNFAAEVNAETRARFLNNDKARALSDGILNQMQDTRQIPFCQEHRARMYHFHQDTEYPKGVYRVCTAATYRSGYPEWKILFSVADFDELLGDDVYLGGVSHLVEQPDRALLTLSKSGGDTAYTLEVDLEAGELVEGGFHFPAGKNHVSWRDENSVWVCPAWDERQLTESGYPREVWLVERGKSFEESLPVYQIAEDGMMVNAWRYLDPQGSPIDLIEASDGFYTKTYLQVSVEGEAKPLNLPADCDVAGYLAGHLLLTLRKDWHRANQSYPSGALVAVKLNRGEIGAAQLLFAPDETQALESVETTKRFVVASLLENVQGRLKAWRFADGKWQEVELLRLPSGALEMTDQPWGGDVVYLAASDFTTPLTLFALDLNVMELTVMRRQPQQFVSDGIEVRQFWAVSSDGERIPYFHVGKNAAPDTPTLVYAYGGFGVPELPHYLGSIGKYWLEEGNAFVLANIRGGGEFGPRWHQAAQGISKHKSVDDLLAVVRDLSERGMSSPQHIGLQGGSNGGLITAAAFVREPQSIGALVCEVPLTDMIRYPLLSAGSSWTDEYGNPQKYEVCKCRLGELSPYHNLSDGIDYPPALITTSLSDDRVHPAHALKFYAKLRETSAQSWLYSPDGGGHTGNGTQRESADELACVLLFLKEFLG

SEQ ID NO: 5480 - protein, 277 aa, Neisseria meningitidis; identical to SEQ ID NO: 3602

SEQ ID NO: 5481 - protein, 361 aa, Neisseria meningitidis
MTVPHIPRGPVMADIAAFRLTGEEKQRLLDPAVGGIILFRRNFQNIEQLKTLTAEIKALRTPELIIAVDHEGGRVQRFIEGFTRLPAMSTLGEIWDKDGASAAETAAGQVGRVLATELSACGIDLSFTPVLDLDWGNCPVIGNRSFHSNPEAVTRLALALQKGLAKGGMKSCGKHFPGHGFVEGDSHLVLPEDGRSLDELEAADLIPFRIMSREGMAAVMPAHVVYPQVDTKPAGFSEIWLKQILRRDIGFKGVIFSDDLTMEGACGAGGIKERARISFEAGCDIVLVCNRPDLVDELREDFRIPDNPALAQRWQYMANTLGSAAAQAVIQTADFQAAQAFVAGLASPQDTAGGVKVGEAF

SEQ ID NO: 5482 - protein, 718 aa, Neisseria meningitidis
MSVFRINMTAATVLAALSSSVFAAQTADLETVHIKGQRSYNAIATEKNGDYSSFAATVGTKIPASLREIPQSVSIITNQQVKDRDVDTFDQLARKTPGLRVLSNDDGRSSVYARGYEYSEYNIDGLPAQMQSINGTLPNLFAFDRVEVMRGPSGLFDSSGEMGGIVNLVRKRPTKAFQGHAAAGFGTHKQYKAEADVSGSLNADGSVRGRVMAQTVGASPRPAEKNNRHETFYAAADWDINPDTVLGAGYLYQQRHLAPYNGLPADADGKLPSLPQHAFVGADWNKFKMHSHDVFADLKHYFGNGGYGKVGMRYSDRDADSNYAFAGSKLGMKTPAGRPGCNTADDKACAVGLGTEIKQKALAFDASYSRPFRLGNTANEFVIGADYNRFRSTNEQGRTTLYARGGLALNEFRSIPQVDLIANARKGVRGYSHTVATENLDEFGIYGKSTFHPADGLSLIGGGRLGHYKIESGDGKTLHKASRTKFTGYAGAVYDIDGSNSLYASASQLYTPQTNLDADGKLLKPRQGNQFEVGYKGSHMDDRLNTRVSLYRLKDKNAAAPLNPKDRNTRYAALGERVMEGVETEISGVVTPKWQIHAGYSYLHSQIKTAANSRDDGIFLLMPKHSANLWTTYQVTPELTIGGGVNAMSGITSSAGMHAGGYATFDAMAAYRFTPKLKLQINADNIFNRHYYARVGGTNTFNIPGSERSLTANLRYSF

SEQ ID NO: 5483 - protein, 327 aa, Neisseria meningitidis
MKHFLSLFTSILMSALIAVWFSQNPINAYWQQTYHRNSPLEPLAAYGWWRSGAALQENAYAFSDGIKTFLSGETPPTAQDGGSADMPSEAATSEAVPQTGETEWKQDTDTAAVRTGDKVFFAGDSLMQGVAPFVQKSLKQQYGIESVNLSKQSTGLSYPSFFDWPKTIEETLQKHPEISVLAVFLGPNDPWDFPVGKRYLKFASDEWAQEYLKRVDRILEAAHTHRVQVVWLGIPYMKKAKLDGQMRYLDKLLSEHLKGKIILIPTAHTLSGGKDRYTDSVNVNGKPVRYRSKDGIHFTAEGQKLLAAKIMEKIVFEPSTQPSSTQP

SEQ ID NO: 5484 - protein, 628 aa, Neisseria meningitidis
MPSEAVFQIIDMNTENRSPEQFDIPLFLKNLPKLPGVYRFFDEGGKVLYVGKAVNLKRRVSGYFQKNDHSPRIALMVKQVHHIETTITRSEAEALILENNLIKALSPKYNILFRDDKSYPYLMLSGHQYPQMAYYRGTLKKPNQYFGPYPNSNAVRDSIQVLQKVFMLRTCEDSVFEHRDRPCLLYQIKRCTAPCVGHISEEDYRDSVRQAATFLNGKTDELTRTLQHKMQTAAANLQFEEAARYRDQIQALGIMQSNQFIDSKNPNNPNDIDLLSLAVSDGIVCVHWVSIRGGRHVGDKSFFPDTKNDPDPNGQDYAEAFVAQHYLGKSKPDIIISNFSVPDALKEALEGEHGKQMQFVTKTIGERKVWLKMAEQNAQMAIAQRRLQQSSQQHRIDELAKILGMDSDGLNRLECFDISHTQGEATIASCVVYDEQNIQPSQYRRYNITTAKPGDDYAAMREVLTRRYGKMQEAEANGETVKWPDAVLIDGGKGQIGVAVSVWEELGLHIPLVGIAKGPERKAGMEELILPFTGEVFRLPPHSPALHLLQTVRDESHRFAITGHRKKRDKARVTSSLSDIPGVGSKRRQALLTRFGGLRGVIAASREDLEKVEGISKALAETIYNHLH

SEQ ID NO: 5485 - protein, 122 aa, Neisseria meningitidis; identical to SEQ ID NO: 2373

SEQ ID NO: 5486 - protein, 693 aa, Neisseria meningitidis
MKSLKTFLIWGIVVLVGLASFTTLALSRGEQVSAVWMVTAAISVYCIAYRFYSLYIANRVMRLDPNRLTPAERHNDGLDYVPTHKGVLFGHHFAAIAGAGPLVGPVLAAQMGYLPGTLWIIFGVVFAGAVQDMMVLFVSMRRDGKSLGDIVKQELGTVPGVIASIGILMIMVIIMAVLALIVVKALVHSPWGTFTIAATMPIALFMGIYTRYIRPGKIGEISIVGFILLMLAVIYGEDVAKSSIGHWFDLDGIQLTWAIMIYGFVASVLPVWLLLTPRDYLSTFLKIGTIAALALGIVIVNPTLQMPAVTHFIDGSGPVFSGALFPFLFITIACGAVSGFHALISSGTTPKMLENETHVRMIGYGGMLMESFVAIMALAAAASLDPGVYFAMNSPAALIGTDANTAAEVITTKLQFPVDAATLLHTAKEVGENTILSRAGGAPTLAVGMAHIMSRLIPGEAMMAFWYHFALLFEALFILTAVDAGTRVARFMIQDLGSIFYKPFGNTDSIPANLIATFFAVALWGYFLYTGVTDPLGGINSLWPLFGIANQMLAGVALIMCAVVLIKMKRDRYVWVVLVPAVGVLFVTCYAGLQKLFHSDPRISFLAHAGKYSDALAKNEVLAPAKDIGEMAQIIFNDKINAGLTILFLSVVVIVAAYGLRTALKARKVGWPTAKEIPAVYRDGKQPEAQSEA

SEQ ID NO: 5487 - protein, 296 aa, Neisseria meningitidis
MFPVFHLSGESRRRMLQAASRFPYVFKARAEDSHKGTFGTLAVVGGSAGMSGAPVLAASAAMYLGCGKVWAGFNQDALPFAVIAGFPEIMLDTADGLTKRQDINAWVVGCGLGTGRAAVRTLAGILAEHTDKPVLLDADALNILSTDAETRNLARGCKNLILTPHPAEAARLLGTTVAQVQADRTAAVRKIGAIFGATVVLKGHKTLVASPDTEIYVNESGNAGLATAGSGDVLGGIIGSLLAQGVPVFEAACAGAWLHGAAADVIKESAGIAAGLLAGEIAPAARWLRNRITESM

SEQ ID NO: 5488 - protein, 456 aa, Neisseria meningitidis
MINPIASLSPLDGRYAQSVEALRPIFSEYGLMKARVKVELNWLKALAAEPKIVEVPPFSAETLAEIDKVIENFSLEDAAAVKAIEATTNHDVKAIEYWLKKRFAEVPEVAAVSEFIHFACTSEDINNLSHALMLQEAREAVLLPKLAEIIEKLTAMAHDLAAVPMMSRTHGQPATPTTLGKETANVVYRLQRQFKNLQAQEFLGKINGAVGNYNAHMVAYPDVDWETHCRNFVEISLGLTFNPYTIQIEPHDYMAEFFQTLSRINTILIDFNRDVWGYISLGYFKQKVKAGEVGSSTMPHKVNPIDFENSEGNLGMSNAVLGFLSEKLPISRWQRDLTDSTVLRNMGVGVGYAVLGFAAHLRGLNKLEPNPAALAADLDATWELLAEPIQTVMRRYGVADPYEKLKDLTRGKGGITPEVLKVFIGSLEIPTEAKAKLLELTPALYVGKAEALAKRI

SEQ ID NO: 5489 - protein, 87 aa, Neisseria meningitidis; identical to SEQ ID NO: 205

SEQ ID NO: 5490 - protein, 761 aa, Neisseria meningitidis
MCKPNYGGIVLLPLLLASCIGGNFGVQPVVESTPTAYPVTFKSKDVPTSPPAEPSVETTPVNQPAVGAAMRLPRRNIASYKQDGTEIPDKHQAEEHLPLKEKDILFLDGTLKEQADKLKKKINERYSDVRVITSKKEEEKYQYQFVRAGYVFTRAEGKDNEKEKTSDGKEFVNRFSYDGFVYYSGERPSQSLPSAGTVQYSGNWQYMTDAKRHRTGKAVSSTDLGYTTYYGNEIGATSYEARDADDREKHPAEYTVDFDNKTLNGKLIKNQYVQNKSNPNEPKKPLTIYDITATLDGNRFTGSAKVSTEVKTQHADKEYLFFHDNADQRLEGGFFGDNGEELAGRFISNDNSVFGVFAGKQKTDASNASDTKPALPSGKHTKILDSLKISVDEASGENPREFAISTMPDFGHPDKLLVEGREIPLVNQEQIINLADGRKMTVRACCDFLTYVKLGRIKTDRPAAKPKAQDEDSEDEIGESEENEDEISDEEGTEDEVVEDEGSEEDEVSEGDNGENEEEIAEEETEEEVDEAEEEKVEEPEEELPTEEGNGGSGSILPAPEAPKGRDIDLFLKGIRTAETNIPQTGKAHYTGTWEARIGTPIQWDNQADKEAAKAKFTVDFGGKSISGTLTEENGVEPAFHIEDGKIDGNGFHATAHTRDTGINLSGTGSTNPQRFKASNLRVEGGFYGPQAEELGGIIFNNDGKSLGITEGTENKVDVDAEVDAEVDAEVDVDVEQLKPEAKPQFGVVFGAKKDNKEVEK

SEQ ID NO: 5491 - protein, 177 aa, Neisseria meningitidis
VDAVIVTHTHEDHWGETAARSIPKNLPVYVQHQADAAKIRSQGFTDVRVLNGSTVFNGVTISKTGGVHGTEAMYANPQLAEILGDAMGVVFQSSGHKTAYIMGDTVWTADVNKALNRYKPDYLIMNTGYALISGITVHMDTVNHTAVSRTDMRKFIRGQGIESRVNVAEDGEILKLD

SEQ ID NO: 5492 - protein, 320 aa, Neisseria meningitidis
MQYAKISGTGSYLPANRVSNDDLAQKVDTSDEWITARTGIKFRHIAAENEKTSDLAAEAARRALDAARLDSGEIDLIIVATATPDMQFPSTATIVQQKLGITNGCPAFDVQAVCAGFMYALTTANAYIKSGMAKNALVIGAETFSRIVDWNDRTTCVLFGDGAGAVVLSASDTPGIIHSKLKADGNYLKLLNVPGQIACGKVSGSPYISMDGPGVFKFAVKMLSKIADDVIEEAGYTAAQIDWIVPHQANRRIIESTAKHLGLSMDKVVLTVQDHGNTSAASIPLALDTGIRSGQIKRGQNLLLEGIGGGFAWGAVLLQY

SEQ ID NO: 5493 - protein, 489 aa, Neisseria meningitidis
MEKHNGTYRDLHRPASEFATRDEYLEHELQIMQPKRWRPNLPFRDYRFEWEDLIPAMAGTIGKVVMVGAVAAAFAAPLGLPDSFVLENVRYELLIAAAFILLVSGFFLPGANLPGTHGPLIPMIPIVVSAGGHPLAFGISIAVLGLLMALFRGGSIMAKLTSNGVCGGLLLYLGFIGTTGQVKKLFSWAGGFNMPYIAFTVIIVTIVMYALLEHWKKRWLAVPLGCLIAGVAAFALGAPFEFHTAPGLPPMSPAYWWGENSGWHLGLPTAESFLVVFPFAVLAVAMWSPDFLGHQVFQKISYPEKTDKVLMNIDDTMTSCSVRQAVGSILGGANFTSSWGTYIVPASIAKRPIPGGAVLTAVLCIIAGLWGYPMDLAIWQPVLSVALVVGVYLPLLEAGMEMTRKGKTTQSAAIVVFSSALVNPVFGWALTMLLDNLGLIGCKERSAQLGFAGRVLIPAVGFLILCVAMGAVGMLPGIPPFLEHFKSLG

SEQ ID NO: 5494 - protein, 161 aa, Neisseria meningitidis
MFVNEKDPYAALFAGLVFLTLPFALAVHDALAFVFGRTGLLVSVSDGGFGWRGGWDGVVWFVYGVFAFLNLVVSAGLTKLAYKKMMRRHSRYALFLSGVAACAAAAVAWIFELLLGSAALGGLRGEAVSEYAFAVWLVSMLTLPKRLTRAPVQPVVFHRKK

SEQ ID NO: 5495 - protein, 328 aa, Neisseria meningitidis
VSGAESYRHITVLLNEAVDALAVREDGVYVDGTFGRGGHSRLILSRLGDAGRLIVFDKDPQAIAVAEELARSDKRVGVVHGGFASFQAALDGLGIGKVDGALFDLGISSPQIDDGSRGFSFRFDAPLDMRMDTTRGMSAAEWIAVASEQDLHEVIKNYGEERFSRQIARAIVAQRAESPIDTTRKLAQIVAQNVRTRERGQDPATRTFQAVRIFINRELEEVGAVLPQVMCRLKEGGRLAVIAFHSLEDRIVKQFVKKYSQHAPLPRWAAVREADLPELPLKIVGRALKPGEAEIAANPRARSAVLRVAERTAGSIPEQSQRKTSEWQ

SEQ ID NO: 5496 - protein, 705 aa, Neisseria meningitidis
MRRFLPIAAICAVVLLYGLTAATGSTSSLADYFWWIVAFSAMLLLVLSAVLARYVILLLKDRRDGVFGSQIAKRLSGMFTLVAVLPGVFLFGVSAQFINGTINSWFGNDTHEALERSLNLSKSALNLAADNALSNAVPIQIDLISTASLSGNMGRVLEHYAGSFTQLSLYNAASGKIEKSINPHKLDQPFPDKARWEKIQQAGSVRDLESIGGVLYAQGWLSAGTHNGRDYALFFRQPVPKGVAEDAVLIEKARAKYAELSYSKKGLQTFFLATLLIASLLSIFLALVMALYFARRFVEPVLSLAEGAKAVAQGDFSQTRPVLRNDEFGRLTKLFNHMTEQLSIAKEADERNRRREEAARHYLECVLEGLTTGVVVFDEQGCLKTFNKAAEQILGMPLTPLWGSSRHGWHGVSAQQSLLAEVFAAIGAAAGTDKPVHVKYAAPDDAKILLGKATVLPEDNGNGVVMVIDDITVLIHAQKEAAWGEVAKRLAHEIRNPLTPIQLSAERLAWKLGGKLDEQDAQILTRSTDTIVKQVAALKEMVEAFRNYARSPSLKLENQDLNALIGDVLALYEAGPCRFAAELAGEPLMVAADTTAMRQVLHNIFKNAAEAAEEADVPEVRVKSEAGQDGRIVLTVCDNGKGFGREMLHNAFEPYVTDKPAGTGLGLPVVKKIIEEHGGRISLSNQDAGGACVRIILPKTVKTYA

SEQ ID NO: 5497 - protein, 326 aa, Neisseria meningitidis
MQENPTVWLFDLDNTLHNADAGIFTLINRAMTRYMARRLKLSESAASDLRQDYWHRYGATLAGLQIHHPEIDIAEFLRESHPIDAILTRLHGMADTENTLCRLNGRKAVFSNGPSFYVRAVVGALGLENRFDALFGTDDFGLLYKPNPQAYLNVCRLLDVPPECCIMVDDSADNLHQAKALGMKTVRFGAKVHDLPFIDASVSDMAQLARYAETLSEHRQNHYNTRTPPPKIRKNVMRKTFLILMTAAALLSGCAWETYQDGNGKTAVRQKYPAGTPVYYQDGSYSKNMNYNQYRPERHAVLPNQTGNNADEEHRQHWQKPKFQNR

SEQ ID NO: 5498 - protein, 253 aa, Neisseria meningitidis
MTEFVVLIPARLDSSRLPGKALADIHGKPMVVRVAEQAAKSKAVRVVVATDHPDIQTACQAHGVEVVMTSNRHESGTTRLAEASAALKLPPHLVVVNVQGDEPLIAPELIDRTAEVLVENNVQMATAAHELHDFDELMNPNAVKVVLDKNRNAIYFSRAPIPYPRDAMRAGKREMPFETAVLRHIGIYAYRVGFLQRYTEMSVSPLETIESLEQLRVLWHGYPIAVETAKEAPAAGVDTQEDLDRIRAVFQTI

SEQ ID NO: 5499 - protein, 217 aa, Neisseria meningitidis
MKITHCKLKKKVQKELLRFFVLEVTARSAADILGIHPNSAALFYRKIRTVINHHLVLAADEVFEGPVEQDESDFGGRRKGRRGRGAAGKVVVFGILKRNGRVYTVVVNNAKSETLLPVIKKKIMPDSIVYTDSLSSCDKLDVSGFIHYRINHSKEFADRQNHINGIENFWNQAKRVLRKYNGIDRKSFPLFLKECEFRFNFGTPSQQLKILRDWCGI

SEQ ID NO: 5500 - protein, 561 aa, Neisseria meningitidis
MSMENFAQLLEESFTLQEMNPGEVITAEVVAIDQNFVTVNAGLKSESLIDVAEFKNAQGEIEVKVGDFVTVTIESVENGFGETKLSREKAKRAADWIALEEAMENGNILSGIINGKVKGGLTVMISSIRAFLPGSLVDVRPVKDTSHFEGKEIEFKVIKLDKKRNNVVVSRRAVLEATLGEERKALLENLQEGSVIKGIVKNITDYGAFVDLGGIDGLLHITDLAWRRVKHPSEVLEVGQEVEAKVLKFDQEKQRVSLGMKQLGEDPWSGLTRRYPQGTRLFGKVSNLTDYGAFVEIEQGIEGLVHVSEMDWTNKNVHPSKVVQLGDEVEVMILEIDEGRRRISLGMKQCQANPWEEFAANHNKGDKISGAVKSITDFGVFVGLPGGIDGLVHLSDLSWTESGEEAVRKYKKGEEVEAVVLAIDVEKERISLGIKQLEGDPFGNFISVNDKGSLVKGSVKSVDAKGAVIALSDEVEGYLPASEFAADRVEDLTTKLKEGDEVEAVIVTVDRKNRSIKLSVKAKDAKESREALSSVNAAANANAGTTSLGDLLKAKLSGEQE

SEQ ID NO: 5501 - protein, 115 aa, Neisseria meningitidis
MNRTKTCKECGEIKPITAFPKNGFDRKTGLQKYAPRCRRCHNVYQQDLLYKRREKEFEQKQAVMAALMDAEREKEEAAKARSIAQSLVLAKAACPILHIGLWTEPLFIPKGMLQI

SEQ ID NO: 5502 - protein, 308 aa, Neisseria meningitidis
MSTFFRQTAQAMIAKHIDRFPLLKLDQVIDWQPIEHYLNRQRTRYLRDHRGRPAYPLLSMFKAVLLGQWHSLSDPELEHSLITRIDFNLFCRFDELSIPDYSTLCRYRNWLAQDDTLSELLELINCQLTEKGLKVEKASAAVVDATIIQTAGSKQRQAIEVDNKGQVSGQTTPSKDSDARWTKKNGLYKLGYKQHTRTDAEGYIEKLHITPANAHECKHLPPLLEGLPKGTTVYADKGYDSAENRQHLEERQLLDGIMRKACRNRPLTETQTKHNRYLSKIRYVVEQSFGTLHRKFRYARAAYFGLIK

SEQ ID NO: 5503 - protein, 54 aa, Neisseria meningitidis
MAYFGGFVRALFDLGVFERGGVKGRGEMVFPLLAAVSEVLCLMCGGIFSVKLIL

SEQ ID NO: 5504 - protein, 197 aa, Neisseria meningitidis
MSELLNYVASCRLPTEWGVFTMHGFEEANGQEHVALTVGDFSDGNPVLTRIHSECLTGDALFSRKCDCGPQLEAAMRAVQTEGRGIIVYLRQEGRGIGLINKIRAYHLQDQGMDTVEANLALGLPVDARDFRLAQSIYEYLGIRSVKLLTNNPEKIQTLKDAGINVVERIPLHVGENLENKRYLQTKADKLGHLMSE

SEQ ID NO: 5505 - protein, 220 aa, Neisseria meningitidis
MDSQKFTEASKRRLSELLDAKSEQGNTMRCDEVQGFMTALLSGPDKLTPLDWLPEVLGDESQFTAAERSEIERLVLAMAMETTAAMSDKKLPDLWLYENEDGGSDFYTWCNAYLYGLDIVPTDWFEAVDDEAFEELFYPIMALGGIYDEEENGAIRLQFTEGELAELESELPYALADIYRYWQAVINKPQTVRREGEKTGRNDPCPCGSGRKYKACCGKN

SEQ ID NO: 5506 - protein, 354 aa, Neisseria meningitidis; identical to SEQ ID NO: 2527

SEQ ID NO: 5507 - protein, 193 aa, Neisseria meningitidis; identical to SEQ ID NO: 1378

SEQ ID NO: 5508 - protein, 125 aa, Neisseria meningitidis
MFYAAPISKHWQLAPEGSGVVQGEDDIDQCIRNILSTRKGADVTRPDFGSDHYKWLDTPEDVFIPNIVRSTMLAIQTWEKRAVVEDIIFDGVAPHLTMTVYWRIADEVAGEVYTTDIRLEQATWI

SEQ ID NO: 5509 - protein, 413 aa, Neisseria meningitidis
MPTKTPSLFGGAMIIAGTVIGAGMLANPTATSGVWFTGSLAVLLYTWFSMLSSGLMILEVNTHYPHGASFDTMVKDLLGRSWNIINGIAVAFVLYLLTYAYIFVGGDLTAKGIGNALGGNVSLTVGQLFFFGILAFCVWASARLVDRFTSVLIGGMVLTFIWATGGLIADAKMPVLFDTQAPAGTNYWIYAATALPVCLASFGFHGNVSSLLKYFKGDAPKVAKSIWMGTLIALVIYVLWQTAIQGNLPRNEFAPVIAAEGQVSVLIETLSKFAQTGNMDKILALFSYMAIATSFLGVTLGLFDYIADIFKWNDSVSGRTKTAALTFLPPLISCLLFPTSFVTAIGYVGLAATVWTGIIPAMLLYRSRKKFGAGKTYKVYGGLWLMVWVFLFGIINIAAQVLSQMELVPVFKG

SEQ ID NO: 5510 - protein, 44 aa, Neisseria meningitidis
MRVSRYASETGDIALFERAEKEIANYQMIQKRYATDGNNINKGG

SEQ ID NO: 5511 - protein, 558 aa, Neisseria meningitidis
MSFKTDAEIAQSSTMRPIGEIAAKLGLNADNIEPYGHYKAKINPAEAFKLPQKQGRLILVTAINPTPAGEGKTTVTIGLADALRHIGKDAVIALREPSLGPVFGVKGGAAGGGYAQVLPMEDINLHFTSDFHAIGAANNLLAAMLDNHIYQGNELNIDPKRVLWRRVVDMNDRQLRNIIDGMGKPVDGVMRPDGFDITVASEVMAVFCLAKDIGDLKERLGNILVAYAKDGSPVYAKDLKAHGAMAALLKDAIKPNLVQTIEGTPAFVHGGPFANIAHGCNSVTATRLAKHLADYAVTEAGFGADLGAEKFCDIKCRLADLKPDAAVVVATVRALKYNGGVERANLGEENLEALAKGLPNLLKHISNLKNVFGLPVVVALNRFVSDSDAELAMIEKACAEHGVEVSLTEVWGKGGAGGADLARKVVNAIESQTNNFGFAYDVELGIKDKIRVIAQKVYGAEDVDFSAEASAEIASLEKLGLDKMPICMAKTQYSLSDNAKLLGCPEGFRIAVRGITVSAGAGFIVALCGNMMKMPGLPKVPAAEKIDVDEHGVIHGLF

SEQ ID NO: 5512 - protein, 244 aa, Neisseria meningitidis
MTTRQIILDTETTGLYADGGDRLVEFAGLEMVNRQMTDKNLHLYVHPERDMPEEAARVHGLTIEVLEGKNAPPFAEVGRQIADFLRGAELIIHNAKFDVGFLNMEFRRMGLPTVEELGCTVTDTLAMAREMFPGQKASLDALCNRFSVDRSKRVLHGALIDCELLGEVYLAMTRRQFDLMGEAEEEEPAAKPVASAEMKLGAKLKVIKADEAELAAHGQYLDGLGEACIWRKEAVPSENGGTDA

SEQ ID NO: 5513 - protein, 389 aa, Neisseria meningitidis
MPQIKIPAVYYRGGTSKGVFFKRSDLPEAAREAGSARDKILLRVLGSPDPYGKQIDGLGNASSSTSKAVILDKSERADHDVDYLFGQVSIDKPFVDWSGNCGNLTAAVGAFSIEQGLVDKGKIPSDGICTVKIWQKNIGKTIIAHVPMQNGAVLETGDFELDGVTFPAAEVQIEFLDPADGEGSMFPTGNLVDEIDVPNIGRLKATLINAGIPTVFLNAADLGYTGKELQDDINNDAAALEKFEKIRAYGALKMGLISDVSEAAARAHTPKVAFVAPAADYTASSGKTVNAADIDLLVRALSMGKLHHAMMGTASVAIATAAAVPGTLVNLAAGGGTRKEVRFGHPSGTLRVGAAAECQDGQWTATKAVMSRSARVMMEGWVRVPEDCF

SEQ ID NO: 5514 - protein, 449 aa, Neisseria meningitidis
MKLPVMSPEHSAQLQAFEAKILSNHAKIEAWFRTQWSVHRPPFYGSVDIRNAGYKISSIDMNLFPGGFNNLNPNFIPLAAVAAQDAVQRACETAKSVLIIPENHTRNTFYLQNIYALGEILRSAGYEVRLGSLNPEVTEPTEFETALGDKILLEPLLRTRDRVHLADGFSPCVVLLNNDLSAGIPDILKGISQTVLPPLHGGWTTRRKTNHFGAYNQVTAEFAKLIGIDEWQINPYFEKIGGLDFQGREGEDALAEAVERVLAKIQAKYDESGITDKPFVIVKADAGTYGMGVMSVKSADEVRGLNRKNRNKMAKVKEGLEVSEVIVQEGIYTYETLNGAVCEPVVYMMDRFVIGGFFRVHEGRGADENLNAGGMVFVPLSNSIPTGNGDNSQEAPEACKRVFEQWDSLGMPRSEKDCDVDNEHNRLYVYGVMARLSLLAASIELEETA

SEQ ID NO: 5515 - protein, 87 aa, Neisseria meningitidis; identical to SEQ ID NO: 1364

SEQ ID NO: 5516 - protein, 308 aa, Neisseria meningitidis
MSTFFRQTAQAMIAKHIDRFPLLKLDRVIDWQPIEQYLNRQKTRYLRDHRGRPAYPLLSMFKAVLLGQWHSLSDPELEHSLITRIDFNLFCRFDELSIPDYSTLCRYRNWLAQDDTLSELLELINCQLTEKGLKVEKASAAVVDATIIQTAGSKQRQAIEVDNKGQVSGQTTPSKDSDARWTKKNGLYKLGYKQHTRTDAEGYIEKLHITPANAHECKHLPPLLEGLPKGTTVYADKGYDSAENRQHLEERQLLDGIMRKACRNRPLTETQTKHNRYLSKIRYVVEQSFGTLHRKFRYARAAYFGLIK

SEQ ID NO: 5517 - protein, 428 aa, Neisseria meningitidis
MIYIVLFLAAVLAVVAYNMYQENQYRKKVRDQFGHSDKDALLNSKTSHVRDGKPSGGSVMMPKPQPAVKKTAKPQDPAMRNLQEQDAVYIAKQKQAKASPFKTEIETALEESGIIGNSAHTVSEPQTGHSAPKPADAPAKPAPVPQTPAKPLITLKELSKVELPWFDVRFDFISYIALTEAKELHALPRLSNRCRYQIVGCTMDDHFQIAEPIPGIRYQAFIVGIQAVSRNGLASQEELSAFNRQVDAFAQSMGGQTLHTDLAAFIEVASALDAFCARVDQTIAIHLVSPTSISGVELRSAVTGVGFVLEDDGAFHYTDTSGSTMFSICSLNNEPFTNALLDNQSYKGFSMLLDIPHSPAGEKTFDDLFMDLAVRLSGQLNLNLVNDKMEEVSTQWLKDVRTYVLARQSEMLKVGIEPGGKTALRLFS

SEQ ID NO: 5518 - protein, 158 aa, Neisseria meningitidis
MLAVCQSGSAPKNAHTASADTPAGESCKVIRGDTAGSGKNIIYRCSNGQAAINAAIADGVLESEIPVSFGGGGVPVANGRNLVTRQAANGVGKSDSEACERALINAARKFQQTAGKLGGRSITGFHSYFDKQPLQGGQYDCQAGSFHVRVVMRANVVR

SEQ ID NO: 5519 - protein, 204 aa, Neisseria meningitidis
MKTSNFSKRTSAMKTFALILADGQASRMGGEDKGLALLGGKALIDHVIDRVRPQVSHIAISTNRNLEEYARRSPHIFPDARQWQHFGPLSALCTAANDLQLATADWLLVVPCDMPYLPDDLVARFETVSKRTPLCNAYYVETPITMHYNIMYIRPQILQSAIPYLFSGMKTLRSWLQQQRARSVRFEFDGHFADLNTQIDLQEG

SEQ ID NO: 5520 - protein, 1067 aa, Neisseria meningitidis
MAKFFIDRPIFAWVISIFIIAAGIFGIKSLPVSQYPSVAAPTITLHATYPGASAQVMEDSVLSVIERNMNGVEGLDYLSTSADSSGSGSVSLTFTPDTDENLAQVEVQNKLSEVLSTLPATVQQYGVTVSKARSNFLMIVMLSSDVQSTEEMNDYAQRNIVPELQRIEGVGQVRLFGAQRAMRIWVDPKKLQNYNLSFADIGSALSAQNVQISAGSIGSLPAVRGQTVTATVTAQGQLGTAEEFGNVILRANTDGSNVYLKDVARVGLGMEDYSSSTRLNGVNTTGMAVMLSNSGNAMATAKAVKERMATLEKYFPQGMSWKTPYDTSKFVEISIEKVIHTLIEAMVLVFVVMYLFLQNIRYTLIPTIVVPISLLGGFAFISYMGMSINVLTMFAMVLVIGIVVDDAIVVVENVERIMAGEGLPPKEATKKAMGQISGAVIGITAVLISVFVPLAMFSGATGNIYKQFALTMASSIAFSAFLALTLTPALCATMLKTIPKGHHEEKKGFFGWFNKKFNSWTHGYEGRVAKVLRKTFRMMVVYIGLAVVGVFLFMRLPTSFLPTEDQGFVMVSVQLPAGATQERTNATLAQVTQLAKSIPEIENIITVSGFSFSGSGQNMAMGFAILKDWNERTAPGSDAVAIAGKLTGMMMGTLKDGFGIAVVPPPILELGNGSGLSINLQDRNNTGHTALLAKRNELIQKMRASGLFDPSTVRAGGLEDSPQLKIDINRAAAAAQGISFADIRTALASALSSSYVSDFPNQGRLQRVMVQADEDARMQPADILNLTVPNKSGVAVPLSTIATVSWENGTEQSVRFNGYPSMKLSASPATGVSTGQAMAAVQKMVDELGGGYSFEWGGQSREEAKGGSQTLILYGLAVAAVFLVLAALYESWSIPLAVILVIPLGLIGAAAGVTGRNLFEGLLGSVPSFANDIYFQVGFVTVMGLSAKNAILIIEFAKDLQAQGKSAVEAALEAARLRFRPIIMTSFAFILGVVPLYIAGGASSASQRAIGTTVFWGMLIGTLLSVFLVPLFYVVVRKFFKETAHEHEMAVKHAAEAGITGSDDSQH

SEQ ID NO: 5521 - protein, 169 aa, Neisseria meningitidis; identical to SEQ ID NO: 219

SEQ ID NO: 5522 - protein, 291 aa, Neisseria meningitidis
MLQGSLVALITPMNQDGSIHYEQLRDLIDWHIENGTDGIVAVGTTGESATLSVEEHTAVIEAVVKHVAKRVPVIAGTGANNTVEAIALSQAAEKAGADYTLSVVPYYNKPSQEGMYRHFKAVAEAAAIPMILYNVPGRTVVSMTNDTILRLAEIPNIVGVKEASGNVGSNIELINRAPEGFVVLSGDDHTALPFMLCGGHGVITVAANAAPKLFADMCRAALQGDIALARELNDRLIPIYDTMFCEPSPAAPKWAVSALGRCEPHVRLPLVPLTEGGQAKVRAALKASGQL

SEQ ID NO: 5523 - protein, 142 aa, Neisseria meningitidis
MAILKLDEHLYISPQLTKADAEQIAQLGIKTVICNRPDREEESQPDFAQIKQWLEQAGVTGFHHQPVTARDIQKHDVETFRQLIGQAEYPVLAYCRTGTRCSLLWGFRRAAEGMPVDEIIRRAQAAGVNLENFRERLDNARV

SEQ ID NO: 5524 - protein, 267 aa, Neisseria meningitidis; identical to SEQ ID NO: 2269

SEQ ID NO: 5525 - protein, 174 aa, Neisseria meningitidis
VFGNHGLGGLPEEGAHGKSPKCHGGNLGNLGNFGEFCKGLGKYVKEVTVANGVVTATMLSSGVNKEIQGKKLSLWAKRQDGSVKWFCGQPVERDKADKADDGVTAANDKQIDTKHLPSTCCDASSAVCIETPRADFKHFQKISRHRVLPESRHMARRQQFCRRGIFFNNQRKIC

SEQ ID NO: 5526 - protein, 403 aa, Neisseria meningitidis
MNQLKLAVSGAQILFVAFGAMVLVPLLTGLNPALALLGAGLGTLLFQITTKRKVPIFLGSSFAFIAPIIYSVGEWGLPSTMFGLFAAGFMYFVFAALIRWRGLAAVHKLLPPVVIGPVIMVIGLSVAVAASSMAMGQADGKQVIDYTDSLILSGFTFAVTAIVSVFGSRMMKLIPILIGVASGYVLALLMGLVDTASIAHAPWFAVPHFETPQINWQAALFMLPVAVAPAIEHIGGIMAIGNVTGKDYTKDPGLDKTLAGDGLGVCVAGLIGGPPVTTYGEVTGAVMITKNSNPVIMTWAAVFAVCMAFFGKFNAFLASIPMPVMGGIMLLLFGTIASLGVKTLIDAKVDLMLPKNLVIVSSVLTTGIGGMTLKLGSFSFAGVGLCAVLAIVLNSLLPDPKES

SEQ ID NO: 5527 - protein, 1320 aa, Neisseria meningitidis
MSVVLPLRGVTALSDFRVEKLLQKAAALGLPEVKLSSEFWYFAGSEKALDAATVEKLQALLAAQSVEQTPKAREGLHLFLVTPRLGTISPWASKATNIAENCGLAGIERIERGMAVWLEGALTDEQKRQWAALLHDRMTESVLPDFQTASKLFHHLESETFSTVDVLGGGKEALVKANTEMGLALSADEIDYLVENYQALQRNPSDVELMMFAQANSEHCRHKIFNADFILNGEKQPKSLFGMIRDTHNAHPEGTVVAYKDNSSVIEGAKIERFYPNAAENQGYRFHEEDTHIIMKVETHNHPTAIAPFAGAATGAGGEIRDEGATGKGSRPKAGLTGFTVSNLNIPGLKQPWEQDYGKPEHISSPLDIMIEGPIGGAAFNNEFGRPNLLGYFRTFEEKFDGQVRGYHKPIMIAGGLGSIQAQQTHKDEIPEGALLIQLGGPGMLIGLGGGAASSMDTGTNDASLDFNSVQRGNPEIERRAQEVIDRCWQLGGKNPIISIHDVGAGGLSNAFPELVNDAGRGAVFKLREVPLEEHGLTPLQIWCNESQERYVLSILEKDLDTFRAICERERCPFAVVGTATDDGHLKVRDDLFANNPVDLPLNVLLGKPPKTTRTDKTVTPSKKPFHADDIDITEAAYRVLRLPAVAAKNFLITIGDRSVGGMTHRDQMVGKYQTPVADCAVTMMGFNTYRGEAMSMGEKPTVALFDAPASGRMCVGEAITNIAAVNIGDIGNIKLSANWMAACGNEGEDEKLYCTVEAVSKACQALDLSIPVGKDSLSMKTVWQDGEEKKSVVSPLSLIISAFAPVEDVRKTVTPELKNVEDSVLLFVDLGFGKARMGGSAFGQAYNNMTGDAPDLDDTGRLKAFYNVVQQLVAEDKLLAYHDRSDGGLFAVLVEMAFAGRCGLDIDLNLLLAQTFITNHTALSQSLRTEEVKALAEWQETIARTLFNEELGAVIQVRKQDVADIINLFYQQQLHHNVFEIGTLTDENTLIIRDGQTHLISDNLIKLQQTWQETSHQIQRLRDNPACADSEFALIGDNDRSALFADVKFDVNEDIAAPFINSGAKPKIAILREQGVNGQIEMAAAFTRAGFDAYDVHMSDLMAGRFRLADFKMLAACGGFSYGDVLGAGEGWAKSILFHPALRDQFAAFFADPDTLTLGVCNGCQMVSNLAEIIPGTAGWPKFKRNLSEQFEARLSMVHVPKSASLILNEMQGSSLPVVVSHGEGRADFALHGGNISADLGIALQYVDGQNQVTQTYPLNPNGSPQGIAGITNADGRVTIMMPHPERVYRAAQMSWKPEGWTELSGWYRLFAGARKALG

SEQ ID NO: 5528 - protein, 508 aa, Neisseria meningitidis
MNPMYITFAIYLVAVLLIGLAAYFSTRNFDDYILGGRSLGPFVTAMSAGASDMSGWLLMGLPGAIYLSGLNEAWIAIGLLVGAYFNWLLVAGRLRVHTEYANNALTLPDYFFHRFGAGGHLMKVVSALIILFFFTIYCASGIVAGATLFQSLFEGMTYNQAMWLGAGATIAYTFLGGFLAVSWTDTLQASLMIFALILTPVMVYLGLGGAEQMSAAIQSVAAGTGKEYGSLFAGTTVIGIISTAAWGLGYFGQPHILARFMAAESAKSLVSARRIGMTWMALCLAGAVAVGYFGIAYFGANPDKVSSMSGNHERIFIALSTLLFNPWIAGIILSAILAAVMSTLSCQLLVCSSAITEDFYKGFLRKNAQQSELVWVGRLMVLAIAVISILIASDPNSKVLGLVSYAWAGFGAAFGPIVILSVLWKRITAYGALSGMVAGALTVVVWAEWIKKPAQAAGESGLLTMYEIVPGFIVCLIIAVLVSLFNKEPSREIQERFEKADADYRAAR

SEQ ID NO: 5529 - protein, 112 aa, Neisseria meningitidis; identical to SEQ ID NO: 1765

SEQ ID NO: 5530 - protein, 321 aa, Neisseria meningitidis
MLRLTALAVCTALALGACSPQNSDSAPQAKEQAVSAAQTEGASLTVKTARGDVQIPQNPERIAVYDLGMLDTLSKLGVKTGLSVDKNRLPYLEEYFKTTKPAGTLFEPDYETLNAYKPQLIIIGSRAAKAFDKLNEIAPTIEMTADTANLKESAKERIDALAQIFGKQAEADKLKAEIDASFEAAKTAAQGKGKGLVILVNGGKMSAFGPSSRLGGWLHKDIGVPAVDESIKEGSHGQPISFEYLKEKNPDWLFVLDRSAAIGEEGQAAKDVLDNPLVAETTAWKKGQVVYLVPETYLAAGGAQELLNASKQVADAFNAAK

SEQ ID NO: 5531 - protein, 303 aa, Neisseria meningitidis
MDTLFSLKVFRQVVQSGGFTRAADALGISTAMASKHVSHLENTVQAKLLHRNSRNLSLTGAGEEYYRQCSYALDTLDDAAQKAAGGTEKPQGLLRVTMPLWFAGSQICNWLAEYRERYPEVALELILDNRHVDLIAEGVDLALRVSQTLSPSLIARPLAEIEFALLASPDFLRRNGVPETPEEVAGLPAVLPTYTNQQKLDLTRKSDGKKYRLELTPVIRTDNTLMMREMIKAGACIGYQPLWAAEHDLRCGSLVRLLPEYTVPTDRLNAVYADRAFLSAKVRSFIDFLNEKIASRKGCRNAV

SEQ ID NO: 5532 - protein, 345 aa, Neisseria meningitidis
MPFLNHRRQLDILMKIAIYGTKSYDREHFTRANRHFGFELEFFDFMLDVKTAKMAEGAEAVCIFVNDDGSRPVLEKLAQIGVKTVALRCAGFNNVDLKAAEELGLKVVRVPAYSPESVAEHTVGLMLTLNRRIHKAYQRTRDANFSLEGLTGFNMYGKTAGVIGTGKIGIATMRILKGFGMNLLAYDPFCNPEAEKIGGRYVELNELYAQSDIITLHCPSTPENHYMLNEAAFDKMKDGVMIINTSRGGLIDSAAAIEALKRRKIGALGMDVYENERELFFEDKSNDVITDDVFRRLSSCHNVLFTGHQAFLTEEALGNISEVTLSNIREVGQTSDCGNAVRADG

SEQ ID NO: 5533 - protein, 763 aa, Neisseria meningitidis
MLAPELEQILQQLYREARKAHYEFISLEHLLLVLIEEDASVPNVLKLCGADLKVVSEQLAASVAENTPLIPEHLLDTVETRPTLGFQRVMQRAMVHTQSAGKAAVEPLDVLVALMSETDSHTVYFLKLQSVTRFEVLRCIAHGSPDEDEDDGNYSSDGMDDDNENRTKPGKNPLSAYTVNLNAEVKAGRIDPLIGRKHEMERLVQILCRRRKNNPLLVGEAGVGKTALAEGLAHQIVNGGIPDALKDAEVYALDMGSLLAGTKYRGDFEARVKSVLKQLEKIPHAILFIDEIHTIIGAGSTSGGTMDASNLLKPALAKGSLRCIGATTYDEYRTIFDKDHALSRRFQKIDVVEPTVSETVQILRGLKPMFEAFHQVRYTQGALEAAAELSSRYINERFLPDKAIDVMDEAGAAQRILPKSKQKKVIGKAQIETVIAKVARIPEKTVSHDDKQVLQFLGRDLKNMVYGQENAIDALVAAVKMSRSGLGLPDKPIGSFLFSGPTGVGKTEAAKQLAYSMGVPLQRFDMSEYMERHAVSRLIGAPPGYVGFEQGGLLTEAVNKQPHCVLLLDEIEKAHPDIFNVLLQVMDAGKLTDNNGKSADFRNVILIMTTNAGAESLSRPSLGFTAKRERGDEMQAINKLFTPEFRNRLDAIIPFAPLSEPIIVKVVDKFLLQLEHQLLDKKVEAEFTPALHKYLAEKGFDPQMGARPMHRLIQEKIRKPLADELLFGKLTDGGFVRIDWDAAKEEAVLKFKKSKVKIKTASA

SEQ ID NO: 5534 - protein, 397 aa, Neisseria meningitidis
MSNQKNRRNALIGAAFLMATSAIGPGFLTQTATFTQALAASFGFVILLSILLDIGAQLNIWRIVAVSEKQAQDIANQVLPGAGYFLAVLIVMGGLAFNIGNVGGAGLGLNLLTGLSPETGAVISGVIAIGVFLFKEAGKVMDKFAQVMGFVMIALTVYVAWQANPPLADAAVHTFMPEKLDAMAIVTLVGGTVGGYITFAGAHRLLDAGIKGKSALPEVSQSSVRAILIASIMRIVLFLAVLGVVSQGVQLNPDNPASTPFEYAAGYIGLLIFGVVIWAASITSVIGAAYTSVSFFSGLSPSIERNKNKWIIAFIAVSTAVFSTIGKPAQVLVFVGALNGLILPISLGLILIAAYKTKIVGDYKHPLWLTVSGVIVVGLMAVLSAITISKYIGGLFG

SEQ ID NO: 5535 - protein, 472 aa, Neisseria meningitidis
MSIKNAVKLIEESEARFVDLRFTDTKGKQHHFTVPARIVLEDPEEWFENGQAFDGSSIGGWKGIQASDMQLRPDASTAFVDPFYDDATVVLTCDVIDPADGQGYDRDPRSIARRAEAYLKSSGIGDTAYFGPEPEFFVFDGVEFETDMHKTRYEITSESGAWASGLHMDGQNTGHRPAVKGGYAPVAPIDAGQDLRSAMVNILEELGIEVEVHHSEVGTGSQMEIGTRFATLVKRADQTQDMKYVIQNVAHNFGKTATFMPKPIMGDNGSGMHVHQSIWKDGQNLFAGDGYAGLSDTALYYIGGIIKHAKALNAITNPSTNSYKRLVPHFEAPTKLAYSAKNRSASIRIPSVNSSKARRIEARFPDPTANPYLAFAALLMAGLDGIQNKIHPGDPADKNLYDLPPEEDALVPTVCASLEEALAALKADHEFLLRGGVFSKDWIDSYIAFKEEDVRRIRMAPHPLEFEMYYSL

SEQ ID NO: 5536 - protein, 469 aa, Neisseria meningitidis
MTAQTLYDKLWNSHVVREEEDGTVLLYIDRHLVHEVTSPQAFEGLKMAGRKLWRIDSVVSTADHNTPTGDWDKGIQDPISKLQVDTLDKNIKEFGALAYFPFMDKGQGIVHVMGPEQGATLPGMTVVCGDSHTSTHGAFGALAHGIGTSEVEHTMATQCITAKKSKSMLIAVDGKLKAGVTAKDVALYIIGQIGTAGGTGYAIEFGGEAIRSLSMEGRMTLCNMAIEAGARSGMVAVDQTTIDYVKDKPFAPKGEAWDKAVEYWRTLVSDEGAVFDKEYRFNAEDIEPQVTWGTSPEMVLDISSKVPNPAEETDPVKRSGMERALEYMGLEAGTPLNEIPVDIVFIGSCTNSRIEDLREAAAIAKDRKKAANVQRVLIVPGSGLVKEQAEKEGLDKIFIEAGFEWREPGCSMCLAMNADRLTPGQRCASTSNRNFEGRQGNGGRTHLVSPAMAAAAAVTGRFTDIRMMA

SEQ ID NO: 5537 - protein, 88 aa, Neisseria meningitidis
MARMVFCVKLNKEAEGMKFPPLPNELGKRIFENVSQEAWAAWTRHQTMLINENRLSLADPCAREYLAQQMEQYFFGDGADAVQGYVPQ

SEQ ID NO: 5538 - protein, 269 aa, Neisseria meningitidis; identical to SEQ ID NO: 1709

SEQ ID NO: 5539 - protein, 152 aa, Neisseria meningitidis
MPMAKPLKYPVSALVVLYSGDGGILLIERTHPKGFWQSVTGSLEPGETVAQTAKREVWEETGILLADEQLQDRHDSTVYEIYHHWRHRYPKGVFENREHLFSAEIPRDTPIALQPEEHVSYGWFGLEEAAEKVFSPSNRRAILELGRFLGKR

SEQ ID NO: 5540 - protein, 219 aa, Neisseria meningitidis
MTPPKLIIFDWDGTLADTTQPIIDTMRRSFAECGFPPPEAERVRSLIGYSLPEIIRTLLEMPSETAVADIARTYSAHYLNPNNRNMTLFPDALPCLDKLKAQGYWLAVATGKGRAGLDNAISQTATGSYWLATACVGEYPSKPSPEMVFGLCGELGLDPKEALVVGDTAHDLHMAANAGAAAVGVATGAHSREQLLGAPHLAVLDGLSELPGFLAQHYA

SEQ ID NO: 5541 - protein, 116 aa, Neisseria meningitidis
MEAFKTLIWIVNIISALAVIVLVLLQHGKGADAGATFGSGSGSAQGVFGSAGNANFLSRSTAVAATFFFATCMAMVYIHTHTTKHGLDFSNVQQTQQAPKPVSNTEPSAPVPQQQK

SEQ ID NO: 5542 - protein, 335 aa, Neisseria meningitidis
MSTFFRQTAQAMIARHIDRFPLLKLDQVIDWQPIEQYLNRQRTRYLRDHRGRPAYPLLSMFKAVLLGQWHSLSDPELEHSLITRIDFNLFCRFDELSIPDYSTLCRYRNWLAQDDTLSELLKLINRQLTEKGLKVEKASAAVVDATIIQTAGSKQRQAIEVDEEGQISGQTTPSKDSDARWIKKNGLYKLGYKQHTRTDAEGYIEKLHITPANAHECKHLPPLLEGVPRGTTVYADKGYDSAENRQHLEEHQLQDGIMRKACRNRPLSEVQTKRNRYLSKTRYVVEQSFGTLHRKFRYARAAYFGLIKVSAQSHLKAMCLNLLKAANRLSVPVCA

SEQ ID NO: 5543 - protein, 85 aa, Neisseria meningitidis
MVLLLIVNKYWKVNDMKNEIQKIMDKYNPWHEDDFESYEDIAKDVSLMTDKTFIEHYLLEVYSEENGHFDQENIHAMIGEIKNAI

SEQ ID NO: 5544 - protein, 152 aa, Neisseria meningitidis; identical to SEQ ID NO: 2635

SEQ ID NO: 5545 - protein, 335 aa, Neisseria meningitidis
MSTFFQQTAQAMIAKHIDRFPLLKLDQVIDWQPIEQYLNRQKTRYLRDHRGRPAYPLLSMFKAVLLGQWHSLSDPELEHSLITRIDFNLFCRFDELSIPDYSTLCRYRNWLAQDDTLSELLKLINRQLTEKGLKVEKASAAVVDATIIQTAGSKQRQAIEVDEEGQISGQTTPSKDKDARWIKKNGLYKLGYKQHTRTDAEGYIEKLHITPANAHECKHLSPLLEGLPKGTTVYADKGYDSAENRQHLEERQLLDGIMRKACRNRPLSETQTKRNRYLSKTRYVVEQSFGTLHRKFRYARAAYFGLIKVSAQSHLKAMCLNLLKAANRLSAPAAA

SEQ ID NO: 5546 - protein, 237 aa, Neisseria meningitidis
MKIKLPLFIIWLSVSAACSSVSPVPAGSQTEMPTQENASDGIPYPVPTLQDRLDDLENRIIRLSNEVETLNGKVKALEHAKTHPSGRAYVQKLDDRKLKEHYLNTEGGSASAHTVETAQNLYNQALKHYKSGRFSAAAALLKGADGGDGGSIAQRSMYLLLQSRARMGNCESVIEIGGRYANRFKDSPTAPEAMFKIGECQYRLQQKDIARATWRSLIQAYPSSPAAKRAAAAVRKR

SEQ ID NO: 5547 - protein, 81 aa, Neisseria meningitidis
MLKSIELNSHIRNRLAEYLKSRGLDFQTAMQEEEGNKEIAAIVHSGLPTLVRKLYSEQKMQKFFWEKRDLIADYISHRMQG

SEQ ID NO: 5548 - protein, 483 aa, Neisseria meningitidis
VNYFPIFANLAGRPVLVVGGGAVAARKISLLLKAGAEVRVAAKHLNAELSALAAENKILWLAEEFRAEHIRTVFLIIAASSDQALNRRVFHLAESCQKPVNVVDDRDHCSFIFPSVIDRNPVQIAVSSSGSAPVLARLLRERLEALLPPSLGDMAEISGRWRDAVKGKLKSVTERRRFWEKQFNGRFATLVKNRQNTLAERELAGQLEQSRQNDQGGSVSLVGAGPGDAGLLTLKGLQEIQQADVVLYDALVSDGILSLVRRDAERIFVGKRARGGRTPQEDTNALMVRLAREGRRVVRLKGGDPFVFGRGGEELETLARHQIPFSVVPGITAAVGATAYAGIPLTHRDYAQSAVFVTGHRKADAPDIEWQTLARSRQTLVIYMGALKAALIAERLQQHGRSPDTPAAVISQGTLPAQKTATGTLANLAELAETAPNPALIVIGEVVGLHEKLAWFGENGEGENRVGQAYPALGGLNAGQRAA

SEQ ID NO: 5549 - protein, 418 aa, Neisseria meningitidis
MNAAQLDHTAKVLAETLTFKQPSDAVLSAYFREHKKLGRQDRHEIAETAFAALRHYQKISTALRCPHAQPRKAALAALVLGRSTNISQIKDLLDEEETAFLGNLKARKTEFSDGLNTAAELPQWLVEQLQQHWGEEEILAFGRSINQPAPLDIRVNTLKGKRDKVLPLLQAESADAEATPYSPWGIRLKNKIALNKHELFLDGTLEVQDEGSQLLALLVGAKRGEIIVDFCAGAGGKTLAIGAQMANKGRIYAFDIAEKRLANLKPRMTRAGLTNIHPERISSEHDTRIARLAGKADRVLVDAPCSGLGTLRRNPDLKYRQSAETVAKLLEQQHSILDAASKLVKPQGRLVYATCSVLPEENELQVERFLSEHPEFEPVNCAELLQSLKIDLDTGKYLRLNSGEHQTDGFFAAVLQRK

SEQ ID NO: 5550 - protein, 335 aa, Neisseria meningitidis; identical to SEQ ID NO: 5545

SEQ ID NO: 5551 - protein, 505 aa, Neisseria meningitidis
MLYFRYGFLVVWCAAGVSAAYGADAPAILDDKALLQVQRSVSDKWAESDWKVENDAPRVVDGDFLLAHPKMLEHSLRDALNGNQADLIASLADLYAKLPDYDAVLYGRARALLAKLAGRPAEAVARYRELHGENAADERILLDLAAAEFDDFRLKSAERHFAEAAKLDLPAPVLENVGRFRKKTEGLTGWRFSGGISPAVNRNANNAAPQYCRQNGGRQICSVSRAERAAGLNYEIEAEKLTALADNHYLLFRSNIGGTSYYFSKKSAYDDGFGRAYLGWQYKNARQTAGILPFYQVQLSGSDGFDAKTKRVNNRRLPPYMLAHGVGVQLSHTYRPNPGWQFSVALEHYRQRYREQDRAEYNNGRQDGFYVSLAKRLGESATVFGGWQFVRFVPKRETVGGAVNNAAYQRNGVYAGWAQEWRQLGGLNSRVSASYARRNYKGVAAFSTEAQRNREWNVSLALSHDKLSYKGIVPALNYRFGRTESNVPYAKRRNSEVFVSADWRF

SEQ ID NO: 5552 - protein, 93 aa, Neisseria meningitidis; identical to SEQ ID NO: 2808

SEQ ID NO: 5553 - protein, 436 aa, Neisseria meningitidis
VLTLDAFEQCLKDCFPQGLNGKKTAVALSGGLDSVVLLHLLVRAGKKGSFIPDALHIHHGLSPRADDWADFCQNYCDMLGVGLETVKVCVEKNGLGIEAAARQKRYAAFAEKGFDVLALAHHRDDQIETFMLAVARGGGLRALAAMPAVRPFGEKGIIWRPLLPFSRQDIWDYAQKHGLPNIEDESNTDTAYLRNRFRHRILPELSAQIPHFGRHVLNNVRALQEDLALLDEIIGQDCRWVCEEGSFDTVRWQAFSPRRKTHILRYFLKENGIPMPNQNALADIDRVLTEAKTGRWNLQGFELHHYAGRLFVFRLEKTDKLRFLKDRQISGNLREILTGQGFVLKRHPFGLPEHLLEQDGILRTVAASDTLAVGGIHKDVKKILQGKRVLPVLRPIWPLVADSGNRPLALANCCADFQYSVSDGILPVHPDFPILF

SEQ ID NO: 5554 - protein, 1071 aa, Neisseria meningitidis
MPKRTDLKSILIIGAGPIVIGQACEFDYSGAQACKALREEGYKVILVNSNPATIMTDPEMADVTYIEPIMWQTVEKIIAKERPDAILPTMGGQTALNCALDLARNGVLAKYNVELIGATEDAIDKAEDRGRFKEAMEKIGLSCPKSFVCHTMNEALAAQEQVGFPTLIRPSFTMGGSGGGIAYNKDEFLAICERGFDASPTHELLIEQSVLGWKEYEMEVVRDKNDNCIIICSIENFDPMGVHTGDSITVAPAQTLTDKEYQIMRNASLAVLREIGVDTGGSNVQFAVNPENGEMIVIEMNPRVSRSSALASKATGFPIAKVAAKLAVGFTLDELRNDITGGRTPASFEPSIDYVVTKIPRFAFEKFPAADDRLTTQMKSVGEVMAMGRTIQESFQKALRGLETGLCGFNPRSSDKAEIRRELANPGPERMLFVADAFRAGFTLEEIHEICAIDPWFLAQIEDLMKEEKAVSDGILSDLDFAALRRLKRKGFSDKRIAQLLGVKEKEVREHRYALKLHPVYKRVDTCAAEFATETAYLYSTYEEECEARPSDRKKVMILGGGPNRIGQGIEFDYCCVHAALALRESGFETIMVNCNPETVSTDFDTSDRLYFEPLTLEDVLEIVRTENPWGVIVHYGGQTPLKLANALVENGVNIIGTSADSIDAAEDRERFQKVLNDLGLRQPPNRIAHNEEEALVKAEEIGYPLVVRPSYVLGGRAMQIVHSAEQLQKYMREAVQVSEDSPVLLDFFLNNAIEIDVDCVSDGKDVVIGGIMQHVEQAGIHSGDSGCSLPPYSLSEEIQDEIRRQTKAMAYALGVVGLMNVQFAVQDGVVFVLEVNPRASRTVPFVSKATGVPLAKVGARCMAGISLKEQGVEKEVVPDFYAVKEAVFPFIKFPGVDTILGPEMRSTGEVMGVGASFGEAYYKAQLGAGERLNPTGKIFLSVREEDKERVIKTAKNFQVLGYGICATRGTAQYLTEQGLIVQTINKVPEGRPHIGDALKNGEIALVVNTVSSDPQSVSDSHIIRQSALQQRVPQYTTTAGGEAMSEGAKSRDHLGVYSVQELHGRLKNRS

SEQ ID NO: 5555 - protein, 878 aa, Neisseria meningitidis
MTMQEQYQPAAIEPAAQKKWDDARIFNVSEDASKPKYYCLSMFPYPSGKLHMGHVRNYTIGDVLSRFKLLNGFNVMQPMGWDAFGMPAENAAMKNNVAPAAWTYDNIEYMKTQLKSLGFAIDWEREVATCKPEYYRWEQWLFTKLFEKGIVYRKNGTVNWDPVDQTVLANEQVIDGRGWRSGALIEKREIPMYYFKITDYAEELLNDLDKLEHWPEQVKTMQRNWIGKSRGMTVRFAVSDDSKQGLEGDYANFLQVYTTRPDTLMGATYVAVAAEHPLATAAAADKPELQAFIAECKAGSVAEADMATMEKKGVPTGRYVVNPLNGDKLEVWIANYVLWGYGDGAVMAVPAHDERDFEFATKYNLPKKQVIAVGDNAFDENQWQEWYGDKENGVLVNSGDLDGLDFQTAFDAVAAKLQNQGAGEPKTQYRLRDWGISRQRYWGCPIPIVHCEQCGDVPVPADQLPVVLPENVVPDGMGSPLAKMPEFYETACPCCGGAAKRETDTMDTFMESSWYFFRYMSPKFSDGMVDPAAAKYWGAVDQYIGGIEHAILHLLYARFFTKLMRDEGLVNVDEPFERLLTQGMVVCETYYRENDKGGKDWINPADVELTFDDKGRPISAVLKADGLPVVISGTEKMSKSKNNGVDPQELINAYGADTARLFMMFAAPPEQSLEWSDSGVEGAHRFLRRLWRTVYEYLKQGEAVKAFAGSQDGLSKELKDLRHKLHSTIAKVSDDYGRRQQFNTAIAAVMELLNQYDKTDTGGEQGRAVAQEVLETAVRLLWPIVPHICETLWSELNGAKLWEAGWPTVDEAALVKSEIEVMVQVNGKLRGKITVAADASKADLEAAALATEGAVKFMEGKPAKKIIVVPGRLVNIVV

SEQ ID NO: 5556 - protein, 311 aa, Neisseria meningitidis
MNPKKLVIASRESLLAMWQAKHIQGRLKALYPDCEVEILGMTTRGDQILDKTLSKVGGKGLFVKELEQALYDGRADLAVHSIKDVPMDLPEGFALAAIGERANPFDAFVSNQYARLEEMPKGAVVGTSSLRREAQLRARYPHLLIKPLRGNVQTRLSKLDNGEYDAIILAAAGLQRLKLDGRIRMILSESDSLPAAGQGALGIEIAAHREDLYEVLKPLNHDTTHACVTAERALARALGGSCQVPLAAYCTEENGLLTLRGLVGHPDGSVVLQADAQASAEYADALGRAVAKKLADDGARELIGAVLNTEN

SEQ ID NO: 5557 - protein, 261 aa, Neisseria meningitidis
VKHISSTNNEHIRHLHRLLSQGKFRRQYAQTVLEGVHLLQVFLQSGRKPVGVYIPEAKMPSEEVRKLTAVLPEDRIFSVSDGILKKISSLSCADDILALIDIPLGGTLPDKGDCVVLDGVQDPGNVGTVLRSAAAAGVGTVVLGRGCADAWSPKVLRAGMGAHFLSGIYPQADLEIWLARYKGRVFATALREEKQAVLYGEDLCGPTAWVFGNEGAGVGKAVLDRADKYVRIPMHDATESLNVAMAATICLFEQMRQRSAY

SEQ ID NO: 5558 - protein, 443 aa, Neisseria meningitidis
MPSENTPDKVNIMIRPDFQEYLPSYYFSSVNPHTVYPKLQCRLKTDTCIIGGGLSGLCTALPLAEQGHETVVLEAARIGFGASGRSGGQVISDYACGMEEIEKQVGLERAQWFWQQSLQAVELVDERVRKHAVDCDWQRGYATVAVRPQHWEELQQWHEHAQRHYGASHYQLWDKAELKQQLDSDMYQGAQFDPLSGHLHPLNYTLGIARAAAEAGAQIFEQSPMTRIEPHQNGWLVYTPEGSVECKNLVYAVNTYAGLSPIFKPLERKAIAVSTFIIATEPLGARAKGLIRNNMAVCDNRHILDYYRLSADGRLLFGGKDHEFIDDPARMTELVRQDMLKVFPQLADVRIEYSWGGECDITANLVPHFGRLAANVFYAQGYSGHGMAITGIAGLAVAEAILGDECRLKPFERLRQPNIILQPFLRKLGSFLGSKYYQWKDSR

SEQ ID NO: 5559 - protein, 146 aa, Neisseria meningitidis; identical to SEQ ID NO: 660

SEQ ID NO: 5560 - protein, 227 aa, Neisseria meningitidis
MWLVGAARRIADTRTFTRIYTEIAVPVVLEQRQQQVPHSAVTARVALSREFVSFFEEHLPIAATSVVSIFGACIMLLVLEFWVGVSAVGILALFLWLLPRFAAISENLYFRLKNSLERDNHFIRKGDRRQLYRHYGLLARLRVLISNREAFGYLCVGTAMGILFGFAFVMMTLKGYSSAGHVYSVGTYLWMFAMSLDDVPRLVEQYSNLKDIGQRIEWSERNIKAGT

SEQ ID NO: 5561 - protein, 415 aa, Neisseria meningitidis
MFSLEAWIGLRYLRAKKRNGFMSFITMVSIAGIALGVTALIVVLSVMNGFQKEIRGQLLNVAPHAEIGYIDNTDTDWRNLLRFTENRKGILAAAPYVSNQALLANAGEIRGVQMRGILPSEERKVVEYGDKMPAGKFEDLIPGEFDIILGVGLAEALGAEVGNKVTVITPEGNVTPAGVVPRLKQFTVVGLVKTGVYEVDNSLAMTHIQDARVLYRLDKEVAGLRLKLADPQNAPALTATLIPEAQRDAVWVRDWTFSNRSYFEAVELEKRMMFIILTLIIAVAAFNLVSSLVMAVTEKQADIAILRTLGLSPAGVMKIFMVQGAFSGFFGTLAGVVCGVLLGWNVGRVVAFFENLLGVHLINSQVYFIDYLPSDVDMGDVALIACISLGLSFVATLYPSWRASKTQPAEALRYE

SEQ ID NO: 5562 - protein, 307 aa, Neisseria meningitidis; identical to SEQ ID NO: 3745

SEQ ID NO: 5563 - protein, 233 aa, Neisseria meningitidis; identical to SEQ ID NO: 1822

SEQ ID NO: 5564 - protein, 320 aa, Neisseria meningitidis; identical to SEQ ID NO: 1339

SEQ ID NO: 5565 - protein, 321 aa, Neisseria meningitidis; identical to SEQ ID NO: 4435

SEQ ID NO: 5566 - protein, 238 aa, Neisseria meningitidis
MASSNVNNEIKDKKLSLWAKRQDGSVKWFCGQPVTRTAADSDDVAAANGKTADNINTKHLPSTCRDASSAVCTKTPEYYPNHGEWPSDNSAAGVASSSTIKGKYVKEVTVANGVVTATMASSNVNNEIKGKKLSLWAKRQDGSVKWFCGQPVTRDKAATDDGVTAATDANGKIDTKHLPSTCRDASSAVCTKTPRADFKHFQKISRYRVLPESRQMAEKLRHSRAGGNLGLSVRKLIG

SEQ ID NO: 5567 - protein, 171 aa, Neisseria meningitidis
MSAINAIYNANVYIDGNSLLGNASEFKLPEFEFGQDDHTGLGMVGTIKLPNGVEALEGEVTWNSFYPEVAKKASNPFKAVQLMVRGNLQTFNAAGLAEEVPIVTTVTAMFSKNALGGYKPKEKAEFGSTYQTTEVHQVVGGREVLYYNAFKNIYRVDGQDVLNQMRKNIGA

SEQ ID NO: 5568 - protein, 112 aa, Neisseria meningitidis; identical to SEQ ID NO: 191

SEQ ID NO: 5569 - protein, 261 aa, Neisseria meningitidis
MNPFLNTAFKAARRAGQMMIRAAGNLDAVKTDSKAFNDFVSDVDRNSEIILVEALKEAYPHHKITCEEGGSHGKATAEYEWIIDPLDGTTNFLHGHPQYAISMALLHKGVLQEALVYAPERNDVYMASRGKGALLNDRRIRVSNRIELNRCLIGTGFPVVDQSMMDKYLAILKDFLAKTAGGRREGAASLDLCAVAAGRLDGFFEFNLKPWDIAAGALIVQEAGGIVTDMTGEDGWLESGDIVAANPKVLAQMLKIISAHV

SEQ ID NO: 5570 - protein, 319 aa, Neisseria meningitidis
MKPVFLDFEQPIAELTNKIDELRFVQDESAVDISDEIHRLQKKSNDLTKSIFSKLTPAQISQVSRHPQRPYTLDYIEALFTDFEELHGDRHFADDYAIVGGLARFNGQSVMVVGHQKGRDTKEKIRRNFGMPRPEGYRKALRLMKTAEKFGLPVMTFIDTPGAYPGIGAEERGQSEAIGKNLYELTRLRVPVLCTVIGEGGSGGALAVAVGDYVNMLQYSTYSVISPEGCASILWKTAEKAADAAQALGITADRLQKLDLVDTVIKEPLGGAHRDFGQTMKNVKAVLEKQLHEAQSIPLADLLSRRFDRIMAYGKFSEQ

SEQ ID NO: 5571 - protein, 287 aa, Neisseria meningitidis
MSEIGLVKIYSGKVRDLYEIDDKRMLMVASDRLSAFDVILDDPIPSKGEILTQISNFWFKKLVHIMPNHFTGDTVYDVLPENEAKVLEKRAVVAKKLTPVKVEAIVRGYLAGSGWKDYQKTGSVCGIRLPEGMREAQQLPEVIFTPSTKAAVGDHDENISFEECGRIIGKELAEEVRAKAVRLYTEAAEYAKSRGIIICDTKFEFGLDENGTLTLMDEVLTPDSSRFWPADQYKVGTNPPSFDKQFVRDWLEQSGWNKKAPAPKVPADVIQKTVEKYREALTLLTQD

SEQ ID NO: 5572 - protein, 177 aa, Neisseria meningitidis; identical to SEQ ID NO: 3350

SEQ ID NO: 5573 - protein, 154 aa, Neisseria meningitidis
MFTIVLYQPEIPPNTGNIIRLCANTGADLHLVKPLGFPLDSAKMKRAGLDYHEFASLTVYENFDDCLKALAGRRIFALTTKGTVRPDETAFQKGDVLLFGPETRGLPADILDSLPAAQKIRLPMQPGCRSMNLSNTVAVILFEAWRQHGYAGGV

SEQ ID NO: 5574 - protein, 64 aa, Neisseria meningitidis; identical to SEQ ID NO: 3483

SEQ ID NO: 5575 - protein, 91 aa, Neisseria meningitidis
MNASNWSLYLILCENSAFYCGISPNPQQRLAAHTTGKGAKYTRVFKPVAMRIVAGGMDKGTALRQEIAVKKLTAAQKRQLWEQAEKMPSET

SEQ ID NO: 5576 - protein, 149 aa, Neisseria meningitidis
MDVQLPIEAKDIQKLIPHRYPFLQLDRITAFEPMKTLTAIKNVSINEPQFQGHFPDLPVMPGVLIIEAMAQACGTLAILSEGGRKENEFFFFAGIDEARFKRQVIPGDQLVFEVELLTSRRGIGKFNAVAKVDGQVAVEAIIMCAKRVV

SEQ ID NO: 5577 - protein, 115 aa, Neisseria meningitidis; identical to SEQ ID NO: 2034

SEQ ID NO: 5578 - protein, 310 aa, Neisseria meningitidis
MYEIKQPFHSGYLQVSEIHQIYWEESGNPDGVPVIFLHGGPGAGASPECRGFFNPDVFRIVIIDQRGCGRSRPYACAEDNTTWDLVADIEKVREMLGIGKWLVFGGSWGSTLSLAYAQTHPERVKGLVLRGIFLCRPSETVWLNEAGGVSRIYPEQWQKFVAPIAENRRNRLIEAYHGLLFHQDEEVCLSAAKAWADWESYLIRFEPEDVDEDAYASLAIARLENHYFVNGGWLQGDKAILNNIGKIRHIPTVIVQGRYDLCTPMQSAWALSKAFPEAELRVVQAGHRAFDPPLVDALVQAVEDILPHLL

SEQ ID NO: 5579 - protein, 75 aa, Neisseria meningitidis
METWVQNYTAIGGSLYLTAAAALLPIVFFFAALTVLKLKGYQAGLYTLLIALAVAVFGFGMPASMAVSSLPPQPH

SEQ ID NO: 5580 - protein, 131 aa, Neisseria meningitidis
MDKNLLEAVKFDEKGLVCAIAQDAETKRVLMVAWMNAEALQKTVETGFAHYYSRSRQKQWMKGEESGHTQKVRELRLDCDGDAIVMLIAQNGGIACHTGRESCFYKVWRGGAWETADAVLKDEKEIYGSTH

SEQ ID NO: 5581 - protein, 206 aa, Neisseria meningitidis; identical to SEQ ID NO: 1193

SEQ ID NO: 5582 - protein, 926 aa, Neisseria meningitidis
MANNKTLFEVIENRKQIYLEDGDSDKFSIPKFITNNLKFPLFDWQKSALENFVIFDRASKLKDFPDIKNRPTHLLFNMATGAGKTMMMAALILYYFEKGYRHFLFFVNQNNIVDKTENNFIDPAHAKFLFTEKILQGDTVIPIRKVEMFSPHSDGIEIKFTSIQKLYNDIHTERENQTTLADLHKLNLVMLGDEAHHLNAQTKGKKQGELDLEKEINDRTSNAEIERKGWEHMVLELLLNKNGNPSQNVLLEFTATLPENADVQQKYADKIITKFGLKEFLQKGYTKEINLVSSTLGKKERVLHALLFAWYRHQIALKYGIANFKPVMLFRSKTIDESKADYSAFLNWAENVQADDFEFLDTFSGSLNNSDNANEQGKTRTEQALKFMQENGFEFAHLANWVKQNYQKHNVIITNSETNKNKTEKTDSETEKLLNNLEAADNPIRAIFTVDRLTEGWDVLNLFDIVRLYEGQNGGGSNKKSGKTAAATVSEKQLIGRGVRYFPFAFEGKQPNKRKFDNDMQHELRILEELFYYTHDEQSRYISELKNELRKDGYLPEKDDDKVLATFKLKSEFADNKDFRELLIWANKKIPNPNAKSNNADSLKANPQTLSFQVHGNQLLQETQFTADENDETARQIGTQNNFTQTIKMSEMERHIFNKALHIKGKNSQSLFHFNRLQSKLDIQNRNELQNNLLKDWQIEFLGLGQDKQVRLDDKLAGCLKILEMVEKHLNESDMPFIGTKEFTPKKLWEIFGTPKQKWVKKDDVKTTIATQNDWYVMDNFAGTSLEEALIQFISARLGDLKSQYDVHLIRNGEVFKLNNFADGEGFMPDFILLLKDKQKSSSNGVKDFLHYQIFIEPKGEHLVETDGWKEEFLEAITVEYGMDKILQKDTPHYRLIGLPFFTDHQKNGQFTESFPLGAASLEKIE

SEQ ID NO: 5583 - protein, 1161 aa, Neisseria meningitidis
MRLTHIKLSGFKSFTDPTTIHVPGQLVAVIGPNGCGKSNVIDAVRWVLGEASAKQLRGESMQDVIFNGAATRRPAPRASVELVFDNSDHSLQGAWGQYAEVSIKRQLTRQGESTYFINNQTVRRRDITDLFLGTGVGARGYAVIEQGMISRIIEARPEELRAYIEEAAGVSKYKERRKETEGCLKDTREHLQRLGDLQNELARQVEKLEKQAETAERYKSLTAQLNQQQDLLDYAQWQQSLAAADKATAQHQSLQAQQDETAAQVQALNDEVHALQTAEQSQQQAVHELGNKRGVLREQIARLEEQIRHQQNLHQRIERDKQAAQAQLQRIHQEQQQIRVQLEENELQVEEKQTELAEWAMQVAEHEERLPELEEAQATLNAAFQTQQDEANRIRRELALKQQQLAHAEQTVAKHEERKGRLKQENQALNLPDEAETAAAQEAAALLQSQQEHYEEQIIAAEEALHAAREAFQTASNRFQSLKQQHITLQAQQQALSQILSQQQEAADFWQVTGHAAAPQLWQHITAPAEWQHALSVILAERLHARAVPQGFVPPEPLPQGQAAWLSDGLSGGIKKSLPVQALLNQIQAQPPFQTALHHWLDGVLCAPDLSYALAHQSDLGAHQIWLTPEGHQVDKVSVLLYAKPAQESLIAQKARLDGIASELDNLAPELSADEAAFKQAEAAVRSSEVQHKNLMQQQQQHTRQYSQAQQRAAELLARTNQGQIRREHIERELAQLAEEQTVLQHASDGLSDDIATLQEAAAELEHQQQTTAHSRQEQQGRLKQAQLALLEANRQYGLAEVAVHKLNQQKQNYRQQIAQLEQQTLDWQERQQELALAYETEFQNDEQHIKLDELTEAVQTLDEEYIAVQEKLAQIQAQGRGQYARVQTLQTQLPQLQAATQTALLQQQEALINAKRYHQNLTERAADLDALEALAKESPKVLNTSIGSLTRQIEALGAVNLAALQELEEARERDGYYRSQSEDVQAAITLLEEAIAQIDDKTKARFKETFDAVNSKVQTFFPTLFGGGEATLKMIGDDLLTAGVSIMARPPGKKNSTIHLLSGGEKALTAMSLVFALFSLNPAPFCLLDEVDAPLDDANTSRFCNLVKEMSAQTQFLYISHNRLTMEMAEQLVGVTMQEKGVSRVVAVDIKQALEMAEAV

SEQ ID NO: 5584 - protein, 188 aa, Neisseria meningitidis; identical to SEQ ID NO: 477

SEQ ID NO: 5585 - protein, 317 aa, Neisseria meningitidis
MGFLIGLSRNLTRFTALVILLASAVAFIGPASFAWVKGDVQVLVLGIIMLGMGMTLGREDYRILAQRPLDVFIGAAAQYTVMPLLAIGIAKLFNLSPGLTLGLVLVGTCPGGVSSNIMSFLAKGDVAFSVGMTTVSTVLAPAVTPLWMTCLVGQTVDMDGWGMFRFMLLVTLLPVVLGSAANILLHGKHWFENVRAVMPGVAVLAFACIVGGVASVHGHRFAESALVMVLAIAVHNIAGYVSGYYAAALFGMDTAKKRTLAIEVGVQNAGLATGLSAKFFPGNPESAVAAAVACVWHSVSGTVLGNLFALWDKRRDA

SEQ ID NO: 5586 - protein, 283 aa, Neisseria meningitidis
MTLLGIKLKQTQQLNQRLQQSLRVLQMSGIELEREVENWLSDNPLLERKDTDEFSDAEFSHYTAPARQIGGDEGEDMLSNIAGEQDFKQYLHAQVCEHPLSDQESACVHILIDFLDEQGYLTDSIEDILDHTPLEWMLDEAMLKQALTALQKFDPAGVAAADLNESLILQIERLGECAAKPAALHIVRNALDSIDGNRSQTLARIKKHLPQTDSGTLEAALDLIASLNPFPAAGFASSTPTPYSDEALANLLAFRGMEVSRRTIAKYRESLEIPAAHKRKTAE

SEQ ID NO: 5587 - protein, 209 aa, Neisseria meningitidis
LVKTADGYKAIAHIQAGDRVLSKDEASGKTEYKPVTARYGNPYQETVYIEVSDGIGNSQTLVSNKIHPFYSQGKWIQADRLKKGDTLLSESGAKQTVQNITLKQQPLKAYNLTVADWHTYFVKGSQAETEGVWVHNACPPKRTGSSKNEKHGDGGRSQISAESRIAELKNKIIPGMSKNERLKIERTIRNITKNANRKAKGEEHGRRGR

SEQ ID NO: 5588 - protein, 325 aa, Neisseria meningitidis
MIYPWHNEQWRQIAEHWERRPNAWLFAGKKDTGKTTFARFAAKALLCETPAPGCKPCGECMSCHLFGQGSHPDFYEITPLSDEPENGRKLLQIKIDAVREIIDNVYLTSVRGGLRVILIHPAESMNVQAANSLLKVLEEPPPQVVFLLVSHAADKVLPTIKSRCRKMVLPAPSHEEALAYLRERGVAEPEERLAFHSGAPLFDEADGVRALRIKLLDILAEPRLLKILDYAALFDKEKLPLAVFVGWMQKWLVDLGLCLQHMKPVYYPAYEDRLLQTVSGFRPRNVFAAEDMLKQLAPYGFHTLNVKMQIEHLLINYLELKKENG

SEQ ID NO: 5589 - protein, 312 aa, Neisseria meningitidis
MDAYPEAEAPPQSIVELVPVLIAVTDGGLRVLTVAQGTLLPNGPLSPLRNSLQAGVKLWVAKQTSQPMGYVEQLYTFVDTHRRNEHGMPVLYVSYLGLVREAADSILHPDAKWQDCYGYFPWEDLRTDGGQRDAVVSRLRIWANSADTEEVRQMRLKRIHLCWGVEPENWSEEYVLQRYEMLYESGLIVEAAEPQANFDFALTGQPMRHDHRRVLATALSRLRAKIKYRPVIFELMPPEFTLLQLQNSVEAISGRLLHKQNFRRQIQQQNLIEPSDTGVSGSKGRPAQLCRFRDDVLPDRLISDIGLPLGSR

SEQ ID NO: 5590 - protein, 329 aa, Neisseria meningitidis
MKKSLIALTLAALPVAAMADVTLYGTIKAGVETSRSLDYQDGQVYSVETGTGIVDLGSKIGFKGQEDLGNGLKAIWQVEQKASIAGTDSGWGNRQSFIGLKGGFGKLRVGRLNSVLKDTGDINPWDSKSDYLGVNKIAEPEARLISVRYDSPEFAGLSGSVQYALNDNAGRHNSESYHAGFNYKNGGFFVQYGGAYKRHQNVDDVKIEKYQIHRLVSGYDNDALYASVAVQQQDAKLVEDNSHNSQTEVAATLAYRFGNVTPRVSYAHGFKGSFDDADIGNEYDQVVVGAEYDFSKRTSALVSAGWLQEGKGAYKFVSTAGGVGLRHKF

SEQ ID NO: 5591 - protein, 259 aa, Neisseria meningitidis
MHIIDSHCHLNFEGLKERLPEVLSNMEANGVGQALAISVSRESFAEVSAIAEVYEHIYCTIGVHPDSKEAEEFSIAEMVAAAAHPKVVGIGETGLDYYWCKGDLSWQHKRFADHIEAANQTGLPVIVHTRDAAADTLSILKECRVNSGVIHCFSEDIGFARAAMDLGLYISFSGIVTFKNAPLVQEAAKYVPDDRILVETDAPFLAPVPKRGRQNEPAFVRYTAEHIAKLRNQTLEQVAAYTTENFYRLFQKVPDMRVV

SEQ ID NO: 5592 - protein, 389 aa, Neisseria meningitidis
MSKKLHPQTLAIRGGKEQTGYREHNQALFLTSSFMWDNAQHAADLFSKKIKGFTYTRTANPTTAAFEKRIAALEGAERAVATSTGMSAIQAAFFTFLQAGDHVVSSRSLFGTTVGFINNIVTKFGIEVSHVSPTDINEWKAAVKANTKLLFLETPSNPLGEVADLEALAELAHGIGALLVVDNSLLSPVGSQPLKHGADISVSSATKAIDGHGRVMGGVLAGSEELMAQVAMYCNSCGLAMSPFNAWQLLSGVETLSLRMEKQFDNALKIAQWLQAQPQVQAVYYTGLPDHPQAALIRKQQNGGGIVIGFEVADQEAAWKVVDGVELFSRTANLGDVRSTITHPWTTTHGRMQPEEKLAANIRPGLVRLSVGLEYVGDLIDDLKQALAR

SEQ ID NO: 5593 - protein, 615 aa, Neisseria meningitidis
MHDTRTMMIKPTALLLPALFFFPHAYAPAADLSENKAAGFALFKNKSPDTESVKLKPKFPVRIDTQDSEIKDMVEEHLPLITQQQEEVLDKEQTGFLAEEAPDNVKTMLRSKGYFSSKVSLTEKDGAYTVHITPGPRTKIANVGVAILGDILSDGNLAEYYRNALENWQQPVGSDFNQDSWENSKTSVLGAVTRKGYPLAKLGNTRAAVNPDTATADLNVVVDSGRPIAFGDFEITGTQRYPEQIVSGLARFQPGTPYDLDLLLDFQQALEQNGHYSGASVQADFDRLQGDRVPVKVSVTEVKRHKLETGIRLDSEYGLGGKIAYDYYNLFNKGYIGSVVWDMDKYETTLAVGISQPRNYRGNYWTSNVSYNRSTTQNLEKRAFSGGIWYVRDRAGIDARLGAEFLAEGRKIPGSDVDLGNSHATMLTASWKRQLLNNVLHPENGHYLDGKIGTTLGTFLSSTALIRTSARAGYFFTPENKKLGTFIIRGQAGYTVARDNADVPSGLMFRSGGASSVRGYELDSIGLAGPNGSVLPERALLVGSLEYQLPFTRTLSGAVFHDMGDAAANFKRMKLKHGSGLGVRWFSPLAPFSFDIAYGHSDKKIRWHISLGTRF

SEQ ID NO: 5594 - protein, 178 aa, Neisseria meningitidis
MSATVRILGIDPGSRVTGFGVIDVRGRDHFYVASGCIKTPADAPLADRIAVIVRHIGEVVAVYKPQQAAVEQVFVNVNPASTLMLGQARGAALAALVSHKLPVSEYTALQVKQAVVGKGKAAKEQVQHMVVQMLGLSGTPQADAADGLAVALTHALRNHGLAAKLNPSGMQVKRGRFQ

SEQ ID NO: 5595 - protein, 208 aa, Neisseria meningitidis; identical to SEQ ID NO: 1448

SEQ ID NO: 5596 - protein, 90 aa, Neisseria meningitidis; identical to SEQ ID NO: 1115

SEQ ID NO: 5597 - protein, 70 aa, Neisseria meningitidis; identical to SEQ ID NO: 232

SEQ ID NO: 5598 - protein, 257 aa, Neisseria meningitidis; identical to SEQ ID NO: 780

SEQ ID NO: 5599 - protein, 558 aa, Neisseria meningitidis
MSQQYVYSMLRVSKVVPPQKTIIKDISLSFFPGAKIGLLGLNGAGKSTVLRIMAGVDKEFEGEAVPMGGIKIGYLPQEPELDPEKTVREEVESGLGEVAAAQKRLEEVYAEYANPDADFDALAEEQGRLEAIIAAGSSTGGGAEHELEIAADALRLPEWDAKIGNLSGGEKRRVALCKLLLSKPDMLLLDEPTNHLDAESVEWLEQFLVRFPGTVVAVTHDRYFLDNAAEWILELDRGHGIPWKGNYSSWLEQKEKRLENEAKSEAARVKAMKQELEWVRQNAKGRQAKSKARLARFEEMSNYEYQKRNETQEIFIPVAERLGNEVIEFVNVSKSFGDKVLIDDLSFKVPAGAIVGIIGPNGAGKSTLFKMISGKEQPDSGEVKIGQTVKMSLIDQSREGLQNDKTVFDNIAEGRDILQVGQFEIPARQYLGRFNFKGSDQSKIAGQLSGGERGRLHLAKTLLSGGNVLLLDEPSNDLDVETLRALEDALLEFAGSVMVISHDRWFLDRIATHILACEGDSKWVFFDGNYQEYEADKKRRLGEEGTKPKRIKYKPVTR

SEQ ID NO: 5600 - protein, 349 aa, Neisseria meningitidis
MPRGFVLPVSCFLFPAASIFCRIFLPAAISERQTAVCLRLQIQAVWLQSSALSSRKPTMPTVRFTESVSKHDLDALFEWAKASYGAKSCWKTLYLNRLPLGNLSPEWAERVKKDWEAGCSESSDGIFLNADGWPDMGRRLQHLTRTWNKAGLLHGWRNECFDLTDGGGNILFSLERAAFRPFGLLSRAVHLNGLTESDGRWHFWIGRRSPHKAVDPGKLDNTAAGGVSGGEMPSEAVCRESSEEAGLDKTLFPFIRPVSRLHSLRPVSRGVHNEILYVFDAVLPETFLPENQDGEVAGFEKMDIGSLVAAMLSENMMHDAQLVTLDAFCRYGLIDAAHPLSEWLDGIRL

SEQ ID NO: 5601 - protein, 321 aa, Neisseria meningitidis
MNLNKLKNKLFRRPGQRAVIAVPYIWLLVLFLIPFAIVLKISFAEQEIAIPPFTPLTSIDEDLGRLNIAISYQNYADIFQNFWHTLNPFGDSENSNIYLMTYWSSIKTALMTTVICLLVGYPTAYAISRANPSVRNGLLLAIMLPFWTSFLLRVYAWMGLLGHNGIVNNLLIKMGIISEPLDLFYNAFSLNLVMVYAYLPFMILPLYTQLVKLDNRLLEAASDLGAGPVKSFLTITLPLSKTGIIAGSMLVFVPAVGEFVIPELVGGSENLMIGKVLWQAFFDQNNWPLASAVAVVMVALLVVPIALFQHYENRELEEGAK

SEQ ID NO: 5602 - protein, 557 aa, Neisseria meningitidis
MLLTLSLRDFVIVENLNLDFQSGFTVLTGETGAGKSITLDAIGLLLGDKADYSQVRSGAKEAQLSALFDISHLPVLKAELYEQGLLNDGEEELSIRRIIDAKGKSRSFINNQAATLAQLKSVGSQLIDIHGQNAHHSLNQEAAQRELLDAFAGSREQAETVRQLYQNWANAKKALQEAQEHADAVIIERERLEWQFNELNQLDIKQGEWEALSQSHDSLAHSAELLQAAEEVGSKIDGDNGIQRHIYQCQKLLANLQNIEPRFAESLNMLASIEAELGEISANMRDVAGRSDINPNELAAQEQRMGELMGMARKYRIEPEELPAKLAEIEERLQSLQAAADLDALEHNVAHNFAEYQEAAHILSAMRHQAAERLSGETTEHMQHLAMKGARFDIVLLPSSPTAHGLEQVQFQVAANKGNPPRPLNKVASGGELARISLALQVVASQYTQVPTLIFDEVDTGIGGGVAEMVGKALRALGRKHQVLAVTHLPQVASCGENHWRVRKHSEGEQTVSEISILDEIQRIEEVARMLGGEVITDTTRQHAAELLQLASKNSLF

SEQ ID NO: 5603 - protein, 251 aa, Neisseria meningitidis; identical to SEQ ID NO: 3399

SEQ ID NO: 5604 - protein, 159 aa, Neisseria meningitidis
MPESIFKQISLDILKLHRDSVYSLLATSGCNCQVHEAAYVNIDGKYYISLSCEPEVGEVKTGILLIEDESRNLRLSWVGSARELDRKDNAYKRALSALSRKLGRCKDRLHTAVQPFLLELVPEKGRFSVGDEEVWISRNDLVRALYPVGYSMRQAMLQI

SEQ ID NO: 5605 - protein, 313 aa, Neisseria meningitidis; identical to SEQ ID NO: 5064

SEQ ID NO: 5606 - protein, 494 aa, Neisseria meningitidis; identical to SEQ ID NO: 2766

SEQ ID NO: 5607 - protein, 376 aa, Neisseria meningitidis
MTKHLPLAVLTALLLAACGGSDKPPAEKPAPAENRNVLKIYNWSEYVDPETVADFEKKNGIKVTYDVYDSDETLESKVLTGKSGYDIVAPSNAFVGRQIKAGAYQKIDKSLIPNYKHLNPEMMRLMDGVDPGHEYAVPFYWGTNTFAINTERVKKALGTDKLPDNQWDLVFDPEYTSKLKQCGISYLDSAAEIYPMVLNYLGKNPNSSNTEDIREATALLKKNRPNIKRFTSSGFIDDLARGDTCVTIGFGGDLNIAKRRAEEAGGKEKIRVMMPKEGVGIWVDSFVIPKDAKNVANAHKYINDFLDPEVSAKNGNFVTYAPSSKPARELMEDEFKNDNTIFPTEEDLKNSFIMVPIRPAALKFMVRQWQDVKAGK

SEQ ID NO: 5608 - protein, 410 aa, Neisseria meningitidis
MGLKHFLEKIEPHFLPGGKHEKWYALYEAAATIFYTSGAVTRKAAHVRDALDSKRMMILVWLALFPAMFYGMYNVGAQAFGALTPDLLQQSIANDWHYAFADALGINMSSEAGVLGKMLFGAIYFLPIYATVFAVGGFWEVLFATVRKHEINEGFFVTSILFALIVPPTLPLWQAALGISFGVVVAKEVFGGTGKNFMNPALAGRAFLFFAYPANLSGDAVWTAVDGYSGATALAQWAAHGADGLKNAVTGQTITWMDAFIGKLPGSIGEVSTLALLIGGAFIVFARIASWRIIAGVMIGMIAMSSLFNFIGSDTNAMFAMPWYWHLVVGGFAIGMLFMATDPVSASFTNVGKWWYGALIGVMCVLIRVVNPAYPEGMMLAILFANLFAPIFDYFVAQANIKRRKARSNG

SEQ ID NO: 5609 - protein, 120 aa, Neisseria meningitidis
MDIRYFGTTPRYSEAVGANGLIFLSGMVPENGETAAEQTADVLVQIDRWLAECGSDKAHVLDAVIYLRDMGDYAEMNGVWDAWVAAGRTPARACVEARLARPEWRVEIKITAVKKDAATA

SEQ ID NO: 5610 - protein, 193 aa, Neisseria meningitidis
MKIRWRYGIAFPLILAVALGGLSAWLGRISEVEIEEVRLNPDEPQYTMDGLDGRRFDEQGYLKEHLSSKGAKQFPESSDIHFDSPHLVFFQEGRLLYEVGSDEAVYHTENKQVLFKNNVVLTKTADGKRQAGKVEAEKLHVDTESQYAQTDTPVSFQYGASHGQAGGMTYDHKTGMLNFSSKVKATIYDTKDM

SEQ ID NO: 5611 - protein, 238 aa, Neisseria meningitidis
LVECRLKIISDGIFIWGESEVASVFLEGEAVEVGNIFCIGRNYAAHIEELKNEIPSEPVVFMKPSGSILNSGGTILLPEFSRDVQFECELVLLVGKDSDGTGEGKDILGCVAGYGVGLDLTARDIQCRLKEKGLPWLKAKGFRHSACVSDFAAAGRIGNPENVLFSLKQNGVLKQRGDTGLMIYPIREILHKLAADYGLGKGDLVFTGTPSGVGAIGAGDNLALELDGLVRASFTVGC

SEQ ID NO: 5612 - protein, 91 aa, Neisseria meningitidis
MTEQKNKTSLIEFPCTFPLKVMGAVHPEFEQAVLDTVRLHAPDTQAHHITTRPSSKGNYTGATVQVKVENQEQLDNIYRALTSHELVKVVL

SEQ ID NO: 5613 - protein, 304 aa, Neisseria meningitidis
MVQNGHLCKRFSQSTVMVAYRRNMPQGRQEKGEEMDKIRVAAVQMVSGVSPETNVAAMKRLVARAAEQGADWVLLPEYWVLMGANDTDKLALAEPLGGGRFQTALSETAKECGVVLFGGTVPLQSPEAGKVMNTLLVYGRDGKRTGLYHKMHLFGFSGLGERYAEADTIRAGGDVPHLSAEGVSVAAGICYDVRFPEFFRRQLPFDVLMLPAAFTHTTGKAHWELLLRARAVENQCYVVAAAQGGLHENGRRTFGHSMIVDPWGDVLDVLPEGEGVVTADIDANRLNSVRNRLPALKYRVLDAV

SEQ ID NO: 5614 - protein, 149 aa, Neisseria meningitidis
VDEVFKTESAGYLMNHIARQFAILLGEGLKPLGIAPAQFPILLELWQKDGLSQQELVERADLKQATIANTLARMERDGLITREPNPDDARSRLIMLTEQARALQQQSTEIAQAINQTALSDLSANEQKLFLEMAAKIVARQQEMITGEK

SEQ ID NO: 5615 - protein, 106 aa, Neisseria meningitidis; identical to SEQ ID NO: 853

SEQ ID NO: 5616 - protein, 432 aa, Neisseria meningitidis
MAKNVVVIGAQWGDEGKGKIVDWLAEEAGGVVRFQGGHNAGHTLVVGGKKTILRLIPSGILHESLDCFIGSGVVVSPEALLGEIDELNAAGVKNVEGRLKIAPTCPLILPYHIALDQAREASRGKGKIGTTGRGIGPAYEDKVARRAIRAADLLHPEKLREKLDAVLAYYNVQLQHLHNAEPVKAEDVMAVIEKVAPRIAPMITDVSRVLNEKNKNGEKLLFEGAQGALLDIDYGTYPFVTSSNCLAGAASAGAGVGPQMLDYVLGIVKAYTTRVGSGPFPTELFDEVGAGLAERGHEFGSVTGRARRCGWFDAAALKRSIQINGISGMCITKLDVMDGVETINICVGYELPDGGKTNILPCGSDAVEACKPIYETMPGWRESTFGVKDYGALPENAKAYLKRIEEVCGAPVAIVSTGPDREETIVLHHPFA

SEQ ID NO: 5617 - protein, 467 aa, Neisseria meningitidis
MDTTLKTTLTSVAAAFALSACTMIPQYEQPKVEVAETFKNDTADSGIRAVDLGWHDYFADPRLQKLIDIALERNTSLRTAVLNSEIYRKQYMIERNNLLPTLAANANDSRQGSLSGGNVSSSYKVGLGAASYELDLFGRVRSSSEAALQGYFASTANRDAAHLSLIATVAKAYFNERYAEEAMSLAQRVLKTREETYKLSELRYKAGVISAVALRQQEALIESAKADYAHAARSREQARNALATLINQPIPDDLPAGLPLDKQFFVEKLPAGLSSEVLLDRPDIRAAEHALKQANANIGAARAAFFPSIRLTGSVDTHSAELGGLFKSGTGVWLFAPSITLPIFTWGTNKANLDVAKLRQQAQIVAYESAVQSAFQDVANALTAREQLDKAYDALSKQSRASKEALRLVGLRYKHGVSGALDLLDAERSSYSAEGAALSAQLTRAENLADLYKALGGGLKRDTQTDK

SEQ ID NO: 5618 - protein, 121 aa, Neisseria meningitidis
LDYRFGRQYRLLKTDDFSSVFAFRNRRSRDLLQVSRSNGNGLDHPRIGLVVGKKTAKRANERNYMKRVIRDWFRLNKNRLPPQDFVVRVRRKFDRATAKQARAELAQLMFGNPATGCRKQA

SEQ ID NO: 5619 - protein, 51 aa, Neisseria meningitidis; identical to SEQ ID NO: 1536

SEQ ID NO: 5620 - protein, 146 aa, Neisseria meningitidis
MPTQSKHASINISLIQAREALMTQFRPILNQANITDQQWRIIRLLAENGTLDFQDLANQACILRPSLTGILTRLEKAGLVVRLKPSNDQRRVFLKLTAEGEKLYEEIGEEVDERYDAIEEVLGREKMLLLKDLLAELAKIEDALNS

SEQ ID NO: 5621 - protein, 331 aa, Neisseria meningitidis
VNLKNRHFLKLLDFTPEEITAYLNLAAELKAAKKAGREIQRMKGKNIALIFEKTSTRTRCAFEVAARDQGAGVTYLEPSASQIGHKESIKDTARVLGRMYDGIEYRGFAQETVEELTKYAGVPVFNGLTNEFHPTQMLADALTMREHSGKPLNQTAFAYVGDARYNMGNSLLILGAKLGMDVRIGAPQSLWPSEGIIAAAHAAAKETGAKITLTENAHEAVKNVDFIHTDVWVSMGEPKEVWQERIDLLKDYRVTPELMAASGNPQVKFMHCLPAFHNRETKVGKWIYETFGLNGVEVTEEIFESPASIVFDQAENRMHTIKAVMVAALGD

SEQ ID NO: 5622 - protein, 741 aa, Neisseria meningitidis
MTQKSTIVYTHTDEAPALATQSLLPIVQAFARHADIDVKTADISLSGRILAAFPEYLTEAQRVPDALAELGELVKQPDANVIKLPNISASVPQLTAAIKELQSKGFAVPDYPADPQTDEEKAVRERYDRIKGSAVNPVLREGNSDRRAPKAVKNFAKKNPHSMGAWTKDSKTHVATMQSGDFFHNEQSVTVPDATSVSIVFTDKQGNKKELRAPVALKAGEITDATVMSKKALLAFLAEQVQDAKAKGVLFSLHMKATMMKVSDPIIFGHAVKVFFAPVFEKFGDKLAAAGVNVNNGFGNLLANLDKLDADTRAAVEAEIAAVYAANPDLAMVDSDKGITNLHVPSDVIVDASMPAMIRNSGRMWDKNGKAQDTKAVIPDSSYAGVYQATIDFCREHGAFDPTSMGTVPNVGLMAQAAEEYGSHNKTFEIEADGQVQVIDAEGKVLMQHDVEAGDIWRMCQTKDAPVKDWVQLAVNRARLSNTPAVFWLDENRPHDKSLLAKVKAYLAELDTNGLDIRVLAPEEAAKFSLGRLKNGEDTISVTGNVLRDYLTDLFPILELGTSAKMLSIVPLMNGGGMFETGAGGSAPKHVQQFLEENHLRWDSLGEFLALAVSFEHLAQKTGNAKAQVLADTLDAATEKLLLNGKSPKRKAGELDNRGSHFYLTLYWAQELAEQDKDAELKAAFTPLAAALTADEAKIVAELSAVQGKAADIGGYYAANPEKAAQAMRPSATFNQALNAL

SEQ ID NO: 5623 - protein, 94 aa, Neisseria meningitidis
MNIRTAFAFALCAIALSAAAAAYAKEIKIDANNTPYSEADAQKLAATAVGMGVKEPISLNGGSGSITVSGSSATQCVFKVGNGGALQIQGLNCK

SEQ ID NO: 5624 - protein, 671 aa, Neisseria meningitidis
MSKSRRSPPLLSRPWFAFFSSMRFAVALLSLLGIASVIGTVLQQNQPQTDYLVKFGSFWAQIFGFLGLYDVYASAWFVVIMMFLVVSTSLCLIRNVPPFWREMKSFREKVKEKSLAAMRHSSLLDVKIAPEVAKRYLEVQGFQGKTINREDGSVLIAAKKGTMNKWGYIFAHVALIVICLGGLIDSNLLLKLGMLTGRIVPDNQAVYAKDFKPESILGASNLSFRGNVNISEGQSADVVFLNADNGILVQDLPFEVKLKKFHIDFYNTGMPRDFASDIEVTDKATGEKLERTIRVNHPLTLHGITIYQASFADGGSDLTFKAWNLGDASREPVVLKATSIHQFPLEIGKHKYRLEFDQFTSMNVEDMSEGAEREKSLKSTLNDVRAVTQEGKKYTNIGPSIVYRIRDAAGQAVEYKNYMLPVLQEQDYFWITGTRSGLQQQYRWLRIPLDKQLKADTFMALREFLKDGEGRKRLVADATKGAPAEIREQFMLAAENTLNIFAQKGYLGLDEFITSNIPKEQQDKMQGYFYEMLYGVMNAALDETIRRYGLPEWQQDEARNRFLLHSMDAYTGLTEYPAPMLLQLDGFSEVRSSGLQMTRSPGALLVYLGSVLLVLGTVLMFYVREKRAWVLFSDGKIRFAMSSARSERDLQKEFPKHVESLQRLGKDLNHD

SEQ ID NO: 5625 - protein, 437 aa, Neisseria meningitidis
MMNTPHPRPKIAVIGAGWAGLSAAVTLARHADVTLFEAGRQAGGRARTLAGNTDGFGFLDNGQHILLGAYRGVLRLMKTIGSDPRAAFLRVPLHWHMHGGLQFRTLPLPAPLHILGGVLLARRVPSAFKAKLLADMSDLQKSARLGQPDTTVAQWLKQRNVPRAAVMQFWQPLVWGALNTPLETASLRVLCNVLSDGVLTKKSGSDYLLPKQDLGAIVAEPALAELQRLGADIRLETRVCRLNPLPDGKVLVNGEPFDAAILATAPYHAAALLPEGTPEHVQTAYQNLRYHAITTVYLRYAEPVRLPAPLTGLADGTVQWLLCRGRLGLPENEVSAVISVSDRVGAFANRAWADKVHADLKRILPHLGEPEAMRVITEKRATTAADAPPPDLSWLHRHRIFPAGDYLHPDYPATLEAAVQSGFASAEACLQSLNDAV

SEQ ID NO: 5626 - protein, 366 aa, Neisseria meningitidis
MTRIAILGGGLSGRLTALQLAEQGYQIALFDKGCRRGEHAAAYVAAAMLAPAAEAVEATPEVVRLGRQSIPLWRGIRCRLNTHTMMQENGSLIVWHGQDKPLSSEFVRHLKRGGVADDEIVRWRADDIAEREPQLGGRFSDGIYLPTEGQLDGRQILSALADALDELNVPCHWEHECAPEDLQAQYDWLIDCRGYGAKTAWNQPPEYTSTLRGIRGEVARVYTPEITLNRPVRLLHPRYPLYIAPKENHVFVIGATQIESESQAPASVRSGLELLSALYAVHPAFGEADILEIATGLRPTLNHHNPEIRYSRKRRLIEINGLFRHGFMISPAVTAAAVRLAVALFDGKDAPERDEESGLAYIRRQD

SEQ ID NO: 5627 - protein, 136 aa, Neisseria meningitidis
MPVYFRTPSRKRLHKMNRRQHKKLHLGEFQTLIFGVQGSLHQAADDAEAFGRFMDELIAYLVVNGLEMAGGGDCGDFSCLFQKSGARSLGEIEKKAIISWLAGREDVATLYATPLVDGFYGDDGWENYSETYKQAD

SEQ ID NO: 5628 - protein, 332 aa, Neisseria meningitidis
VAAHIGHIDTDAPLKPLYVIHGEEELLRIEALDALRAAAKKQGYLNREVYTADNAFDWNELLQTAGSAGLFADLKLLELHIPNGKPGKTGGEALQDFAARLPEDTVTLVLLPKLEKTQLQSKWFAALAAKGEVWEAKPVGAAALPQWIRGRLDKIGLGIGADALALFAERVEGNLLAARQEIDKLGLLYPKGHTVNIDEAQTAVANVARFDAFQLAGAWMKGDVLRVCRLLDGLREEGEEPVLLLWAVAEDVRTLIRLAAALKQGQSVQSVRNSLRLWGEKQTLAPLAVKRISVVRLLDALKTCAQIDRIIKGAEDGDAWTVFKRLVVSLAE

SEQ ID NO: 5629 - protein, 450 aa, Neisseria meningitidis
MKDIRTVGSVCSGIEAASIAWQNLGFEFKWFSEILKFPSDILRNKYPHIDNLGDMNYIPELLKHNSISSPDLICGGTPCQAFSLAGWKNGLDDERGNLTLKFIDIINENDNLRLKEGKNRTVVFWENVEGVLTDKTNAFGCFISTLAGLDKVIENKKWGTAGLLRGKTRNVAWRVLDAKYFGLPQQRRRLYVVAGGKDTNPENILLELHDHKNNNIDGVSFPKSELIFYKDNVKFEIFREFTDCLYSAYGTKWNGNAAAYNGSLFIAQDDKLRRLSPLECERLMGFPDNYTLIDGAKKTNRYQAIGNSWAIPVIKWIGKRIKKPECYDLNNHINSMLLKQENSDFEYYDFSNGIIHLSDSFAINCSEIPEEVNFGHMYHIVSKEASDDIFISPTGCYGIIRRKNERNIKINPRLEKILLDISSQETLAEIEKKSLVQKRGKYSENRQFNL

SEQ ID NO: 5630 - protein, 852 aa, Neisseria meningitidis
MPANLSSALETFKQQRDAAEAHYLKANRVSVFFREYTAAVETLLAALWAEYFQNSALCLMAVGGFGRGELYPCSDVDLAVVSPAPLSDGIQEQIARFVQTLWDCKLMPSVKSGSVDELCESVRNDITGDTAFLEARFLFGNRQTADKLAEKMNAQRNVAAFVEAKLVEMEHRHAKSQGSGAVLEPNIKSCPGGLRDIHTLLWIAKAQGLATDLPDLLKQRILTRAEAGMLSHGYRRLAHIRIHLHLNAKRAEDRLLFDLQPQVAESMGYEGLNLRRQSEELMRVFYRAIKTVKQLGGILTPMLQSRVSSTPLRVTLRIDDDYIQVNNQIAARHTDIFFRRPEHIFKIVEIMQQRNDITALEPQTLRAWWGATRKINRSFYQNSENRHRFAGFFRNGNGLTQTLRFLNLYGVLGRYLPAWEKIVGLLQHDLFHIYPVDDHILAVVRNVRRLALDMHSHELPYASALMQSFEKQDILYLAAFFHDIAKGRGGDHAIQGISDARQFAADHFLTEEESDLLAWLVENHLLMSIVAQKEDIQDPDVLDAFCKRVQTHERLSALYLLTISDIRGTNPKLWNAWRASLLESLFHAAGRYLAGNGGNPHALFGRRQQEAADLLTRAAVPEKQQKKLWNALGSAYFARHQSREILWHAANLVHDFETPIVRSRILPKSDSFQVMVFMPNGPRLFARLCRIFSRHGFDILAARAFITEHDYILDTFIVQIPSQHAPEDYPDIQSALEAELNSFIHGHTVAETSNHSRRISRRSRYMPIAPSITITPEEDYPDWYSVEITAVNRPFLLADMAEVFFAHNVSLRYAKISTLDERAEDSFTVFSLDLKNPKIQSSLKQALLEQLT

SEQ ID NO: 5631 - protein, 71 aa, Neisseria meningitidis
VLWTMVEADDAALTGQVRFNISWPQHILNRVDACTAAVMKPERFFGESRFKGDAALTFSPIFSGFFIADAV

SEQ ID NO: 5632 - protein, 253 aa, Neisseria meningitidis
MCALNPFKEIKMSQITMRQMIEAGVHFGHQTRFWNPKMAQYIFGARNKIHIVNLEKTLPMFQDAQEAVRRLVANKGTVLFVGTKRQARDIIREEATRAGMPFVDYRWLGGMLTNYKTVKQSIKRLEEKTAALENAAESGFSKKEILEMQRDVEKLERSLGGIKNMKGLPDAIFVIDTGYQKGTLVEAEKLGIPVIAVVDTNNSPDGVKYVIPGNDDSAKAIRLYCRGIADAVLEGKNQALQETVAAAQEAAAE

SEQ ID NO: 5633 - protein, 248 aa, Neisseria meningitidis; identical to SEQ ID NO: 3755

SEQ ID NO: 5634 - protein, 75 aa, Neisseria meningitidis
MKNWKQFTFFVILVIACYQLLYFLSDMFLLDYINKYSWNLNFIQGTLNFFSIYLPYVFVSRIFRNTNQEKEYKND

SEQ ID NO: 5635 - protein, 56 aa, Neisseria meningitidis
MMFAKHYQFIALGIMLLLYMLILYTTDFSNLTYWMLFFICFITGKILARLLEKSFK

SEQ ID NO: 5636 - protein, 120 aa, Neisseria meningitidis; identical to SEQ ID NO: 1496

SEQ ID NO: 5637 - protein, 172 aa, Neisseria meningitidis; identical to SEQ ID NO: 601

SEQ ID NO: 5638 - protein, 169 aa, Neisseria meningitidis; identical to SEQ ID NO: 622

SEQ ID NO: 5639 - protein, 582 aa, Neisseria meningitidis
MIHYKITPSPLDHEWHILLTFTQDDDLPIEISLPNWVPGSYLIRDFSRHITSIHASCNGTSMPLEQIAKNRWHAAAVRGEWQIRYTVYAFDLSVRGSFLTTERGFFDGSCLFLKVEGTETLPHRLELTGIPSERRIATTLPETGRFVFQAASYAELIDRPVEMGLIEFLDFEAAGIPHTIALSGIYPDFDRNRLVSDIKKICETELAVFSSPAPFQKYLFLLHVGDHIYGGLEHTDSTALLADRHSLPPYGMTDADDTYTTLLGLFSHEYFHAWNVKSIKPAAFVPYDLDKENYTEQLWAFEGITSYYDDLFLARSRTISPESYLNLLAQGITRVQQTRGRLRQTLAESSFTAWNKFYKPDENSPNAIVSYYQKGALAALCLDLIIRNRSNGRHSLDTLMDKLYREWRDTHSGIPEKHWQIRCQEITGLDLEDFFQKALYSTEDLPLAECLATAGVGLTFLPLPRQHGGGYAEHICPVPSAGDFGARFKQNTDHIVLTHVFNGGSAESAALCPQDKIIALDGYACTDFTAQWARYHVNAKINIHFFRAGILRQTVLTVQAAAADTAILHITDWNLLDNWLFG

SEQ ID NO: 5640 - protein, 305 aa, Neisseria meningitidis
MSVYTSVSDDEMRGFLSGYDLGEFVSLQGIAQGITNSNYFLTTTSGRYVLTVFEVLKQEELPFFLELNRHLSMKGVAVAAPVARKDGRLDSVLAGKPACLVACLKGSDTALPTAEQCFHTGAMLAKMHLAAADFPLEMENPRYDAWWTEACARLLPVLSQDDAALLCSEIDALKDNLGNHLPSGIIHADLFKDNVLLDGGQVSGFIDFYYACRGNFMYDLAIAVNDWARTADNKLDEALKKAFIGGYEGVRPLSAEEKAYFPTAQRAGCIRFWVSRLLDFHFPQAGEMTFIKDPNAFRNLLLSLG

SEQ ID NO: 5641 - protein, 621 aa, Neisseria meningitidis
MIEKLTFGLFKKEDARSFMRLMAYVRPYKIRIVAALIAIFGVAATESYLAAFIAPLINHGFSAPAAPPELSAAAGIISTLQNWREQFTYMVWGTENKIWTVPLFLIILVVIRGICRFTSTYLMTWVSVMTISKIRKDMFAKMLTLSSRYHQETPSGTVLMNMLNLTEQSVSNASDIFTVLTRDTMIVTGLTIVLLYLNWQLSLIVVLMFPLLSLLSRYYRDRLKHVISDSQKSIGTMNNVIAETHQGHRVVKLFNGQAQAANRFDAVNRTIVRLSKKITQATAAHSPFSELIASIALAVVIFIALWQSQNGYTTIGEFMAFIVAMLQMYAPIKSLANISIPMQTMFLAADGVCAFLDTPPEQDKGTLAPQRVEGRISFRNVDVEYRSDGIKALDNFNLDIRQGERVALVGRSGSGKSTVVNLLPRFVEPSAGNICIDGIDIADIKLDCLRAQFALVSQDVFLFDDTLFENVRYSRPDAGEAEVLSALQAANLQSLIDASPLGLHQPIGSNGSNLSGGQRQRVAIARAILKDAPILLLDEATSALDNESERLVQQALERLMENRTGIIVAHRLTTIEGADRIIVMDDGKIIEQGTHEQLMSQNGYYTMLRNISNKDAAVRTA

SEQ ID NO: 5642 - protein, 333 aa, Neisseria meningitidis
MQFPYRNVPASRMRRMRRDDFSRRLMREHTLTADDLIYPVFVLEGSAREEDVPSMPGVKCQSLDRLLFTAEEASNLGIPMLALFPVVTTNKTECAQEAYNPEGLVPTAVRALRERFPELGIMTDVALDPYTVHGQDGLTDENGYVMNDETVEVLVKQALCHAEAGAQVVAPSDMMDGRIGAIREALEDAGHIHARIMAYSAKYASAFYGPFRDAVGSSGNLGKADKKTYQMDPANTDEALNEVALDIREGADMVMVKPGLPYLDVVRRVKDEFGVPTYAYQVSGEYAMLQAAIANGWLDGGKVVLESLLAFKRAGADGILTYYAIEAAKMLKR

SEQ ID NO: 5643 - protein, 89 aa, Neisseria meningitidis; identical to SEQ ID NO: 1473

SEQ ID NO: 5644 - protein, 268 aa, Neisseria meningitidis
MQNHVISLASAAERRAHIADTFGRHGIPFQFFDALMPSERLEQVMAELVPGLSAHPYLSGVEKACFMSHAVLWKQALDEGLPYIAVFEDDVLLGEGAEKFLAEDAWLQERFDPDSAFIVRLETMFMHVLTSPSGVADYCGRAFPLLESEHWGTAGYIISRKAMRFFLDRFAVLPSERLKAVDWMLFSSFLDKGGMTVCQLTPALCVQSETLPSQLKNGRQESYRNRRSPKVLLKRALGKIGREIERARERKRQKKLEKHLGRHVVPFE

SEQ ID NO: 5645 - protein, 279 aa, Neisseria meningitidis
MQNHVISLASAAERRAHIADTFGRHGIPFQFFDALMPSERLEQVMAELVPGLSAHPYLSGVEKACFMSHAVLWKQALDEGLPYIAVFEDDVLLGEGAEKFLAEDAWLQERFDPDSAFIVRLETMFMHVLTSPSGVADYCGRAFPLLESEHWGTAGYIISRKAMRFFLQHFVMLQPEQIKPIDLMMFSDFFDKEGMPVYQVSPALCAQELHYAKFHDQNSALGSLIEHDRLLNRKQQRRDSPANTFKHRLIRALTKISREREKRRQRREQLIGKIIVPFQ

SEQ ID NO: 5646 - protein, 504 aa, Neisseria meningitidis
MTTSKCPVTHLTMNNGAPVADNQNSLTAGPRGPLLAQDLWLNEKLADFVREVIPERRMHAKGSGAFGTFTVTHDITKYTRAKIFSEVGKKTEMFARFTTVAGERGAADAERDIRGFALKFYTEEGNWDVVGNNTPVFFLRDPRKFPDLNKAVKRDPRTNMRSATNNWDFWTLLPEALHQVTIVMSDRGIPAGYRHMHGFGSHTYSFWNEAGERFWVKFHFRTQQGIKNLTNEEAAKIIADDRESHQRDLYEAIERGEFPKWTMYIQVMPEADAEKVPYHPFDLTKVWPKKDYPLIEVGEFELNRNPENFFADVEQSAFAPSNLVPGIGASPDKMLQARLFNYADAQRYRLGVNFRQIPVNRPRCPVHSNQRDGQGRADGNYGSLPHYEPNSFGQWQQQPDFAEPPLKINGDAAHWDYRQDDDDYFSQPRALFNLMNDAQKQALFGNTAAAMGDAPDFIKYRHIRNCYRCDPAYGEGVAKALGLTVEDAQAARATDPALGQAGLL

SEQ ID NO: 5647 - protein, 407 aa, Neisseria meningitidis
VGRRKLWFALAAAGVIGGLVGIVLTELMHFIQHTAYGYGADGAYISFREGVARASEGRRLGVLILCGMLAGGGWWLLKRFGKPQIEIKAALKQPLQGLPFLTTVFHVLLQIITVGLGSPLGREVAPREMTAAFAFAGGRRLGLDEDEMRLLIACASGAGLAAVYNVPLASTLFILEAMLGVWTQQAVAAALLTSVIATAVARIGLGDVQQYHPANLTVSTSLLWFSAVIGPILGATAVFFQRTAQKFPFIKRDNIRIILLAVCMFALIGVISVWFPEVLGNGKAGNQLTFSGLTGWQYALELAAVKWPVVLMALAAGAYGGLITPSMMLGSTVSFAAAAAWNSVFPAMPSESAAVVGAAVFLGVSLKMPLTAIVFVLELTYAPLSLLLPLCIGMAGALGTSGKMGFK

SEQ ID NO: 5648 - protein, 406 aa, Neisseria meningitidis
MTLFCEQVPYPRLAEAFGTPLYVYSQSALTEAFEHYQTAFAALNPLVCYAVKANGNLSIIKHFASLGSGFDIVSGGELARVLAAGGDAAKTIFSGVGKSEAEIEFALNAGVKCFNMESIPEIDRIQKVAARLGKTASVSLRVNPDVDAKTHPYISTGLKANKFGIAYADALEAYRHAAQQPNLKIIGIDCHIGSQLTDLSPLVEACERILILVDALAAEGIVLEHLDLGGGVGIVYQNEKVPDLGAYAQAVQKLIGTRRLKLILEPGRSLVGNAGALLTRVEFVKYGEEKNFVMVDAAMNDLMRPALYDAYHHIEAVETKDIEPLTANIVGPICETGDFLGKDRTIACEEGDLLLIRSAGAYGASMASNYNARNRAAEVLVDGNEYRLIRLRETLEQQMANELACL

SEQ ID NO: 5649 - protein, 515 aa, Neisseria meningitidis; identical to SEQ ID NO: 654

SEQ ID NO: 5650 - protein, 165 aa, Neisseria meningitidis
MKKNILEFWVGLFVLIGAAAVGFLAFRVAGGAAFGGSDKTYAVYADFGDIGGLKVNAPVKSAGVLVGRVGAIGLDPKSYQARVRLDLDGKYQFSSDVSAQILTSGLLGEQYIGLQQGGDTENLAAGDTISVTSSAMVLENLIGKFMTSFAEKNAAGGDDAAKATE

SEQ ID NO: 5651 - protein, 242 aa, Neisseria meningitidis
MTKQLKLSALFVALLASGTAVAGEASVQGYTVSGQSNEIVRNNYGECWKNAYFDKASQGRVECGDAVAAPEPEPEPEPVPAPVVVVEQAPQYVDETISLSAKTLFGFDKDSLRAEAQDNLKVLAQRLSRTNVQSVRVEGHTDFMGSDKYNQALSERRAYVVANNLVSNGVPVSRISAVGLGESQAQMTQVCEAEVAKLGAKVSKAKKREALIACIEPDRRVDVKIRSIVTRQVVPAHNHHQH

SEQ ID NO: 5652 - protein, 158 aa, Neisseria meningitidis
MQKIPLTVRGAELLKQELQQLKSVARPEVIEAIAEARSHGDLSENAEYEAAKERQGFIEGRISELEHKLSVAHIINPTEIHAEGKIVFGTTVTLEDLETEEHVTYQIVGEDEADIKQGKIYVGSPIARALIGKEEGDTAEVQAPGGVREYDIIEVRYI

SEQ ID NO: 5653 - protein, 44 aa, Neisseria meningitidis
MPSERIFRSILRLVGVSSETVKQKFAGVELSYAGKAAGESLYCL

SEQ ID NO: 5654 - protein, 178 aa, Neisseria meningitidis
MSKKWYVVQAYSGFEKNVQRILEERIAREEMGDYFGQILVPVEKVVDIRNGRKTISERKSYPGYVLVEMEMTDDSWHLVKSTPRVSGFIGGRANRPTPISQREAEIILQQVQTGIEKPKPKVEFEVGQQVRVNEGPFADFNGVVEEVNYERNKLRVSVQIFGRETPVELEFSQVEKIN

SEQ ID NO: 5655 - protein, 138 aa, Neisseria meningitidis; identical to SEQ ID NO: 489

SEQ ID NO: 5656 - protein, 166 aa, Neisseria meningitidis
MADLQKTFQTSFRDAMASCAAGVHVITTDGAAGRYGITMTAVTPVTDEPPTVMLCINRSARIIPILSENGSLCINTLADEHQDVAEHFAGLTGLSPEERFAYHIWHYGKTGQPEIEGALAHLHGHIVGQHEIGTHFVFYVRLDEIKNCVGKRPALLYFRRQFRFLD

SEQ ID NO: 5657 - protein, 213 aa, Neisseria meningitidis
MSIPINFNNLKYLLNDMRNKNRIIEAFPFNYNQRQYAVILTRYKPDEPRPDDYAQAKLEFFNLNSENSIFAYADFYEVHFKSATDFINFFKINVQAGAAKIREIFQSFSNLFADFIPTQTKKDLDIIYKKIVATRLEPNSPNTIYCYDVRRNGKDKAGKPNRRSVENSEKAKILRPELYEKFKADSNYSFFFSDNPSDEKTDAEIIREVTNRQ

SEQ ID NO: 5658 - protein, 287 aa, Neisseria meningitidis; identical to SEQ ID NO: 2947

SEQ ID NO: 5659 - protein, 319 aa, Neisseria meningitidis
MSTFFRQTAQAMIAKHIDRFPLLKLDQVIDWQPIEQYLNRQKTRYLRDHRGRPAYPLLSMFKAVLLGQWHSLSDPELEHSLITRIDFNLFCRFDELSIPDYSTLCRYRNWLAQDDTLSELLKLINRQLTEKGLKIEKASAAVVDATIIQTAGSKQRQAIEVDEEGQISGQTTPSKDSDARWIKKNGLYKLGYKQHTRTDAEGYIEKLHITPANAHECKHLSPLLEGIAEGTTVYADKGYDSAENRQHLEEHQLLDGIMRKACRNRPLSEVQTKRNRYLSKTRYVVEQSFGTLHRKFRYARAAYFGLICARCRLKGSPDA

SEQ ID NO: 5660 - protein, 103 aa, Neisseria meningitidis; identical to SEQ ID NO: 1558

SEQ ID NO: 5661 - protein, 563 aa, Neisseria meningitidis
MIKCPSIPINGHFTKISWLILNKYFLRQKIFPPILPTKPKPEADRYAPIRTLNTPITMQLIDYSHSFFSVVPPFLALALAVITRRVLLSLGIGILVGVAFLVGGNPVDGLTHLKDMVVGLAWSDGDWSLGKPKILVFLILLGIFTSLLTYSGSNQAFADWAKRHIKNRRGAKMLTACLVFVTFIDDYFHSLAVGAIARPVTDKFKVSRAKLAYILDSTAAPMCVLMPVSSWGASIIATLAGLLVTYKITEYTPMGTFVAMSLMNYYALFALIMVFVVAWFSFDIGSMARFEQAALNETHDETAVSDGSRGRVYALIIPVLALIASTVSAMIYTGAQASETFSILGAFENTDVNTSLVFGGTCGVLAVVLCTLGTIKTADYPKAVWQGAKSMFGAIAILILAWLISTVVGEMHTGDYLSTLVAGNIHPGFLPVILFLLASVMAFATGTSWGTFGIMLPIAAAMAVKVDPALIIPCMSAVMAGAVCGDHCSPISDTTILSSTGARCNHIDHVTSQLPYALTVAAAAASGYLALGLTKSALLGFGTTGIVLAVLIFLLKDKKLANA

SEQ ID NO: 5662 - protein, 263 aa, Neisseria meningitidis
MARHPYRRLRPAKSCFPEVGISEEGNIRSLHLGSDTVQSSMNLDRPSELVLSYSRAMMGWLLFTDALPQHITQIGLGGGSFARWIDTYLPDTRQTAVDINPQVIAIARNLFELPFEGEKFEIIEADGAEYIKVFRHNTDIILVDGFDGEQIIDTLVEEPFFRDCRNALSSDGIFVTNWWSGDKRYQRFIERLLSVFEGRVLELPAKSHGNVAVMAFQSSPKEQNIDKLKKRADKLSNAYGLDFHRMLADLKASNPNNGKHFYL

SEQ ID NO: 5663 - protein, 249 aa, Neisseria meningitidis; identical to SEQ ID NO: 369

SEQ ID NO: 5664 - protein, 221 aa, Neisseria meningitidis
MMMHASVQSRFAPILYVLIFFAGFLTAQIWFNQKAYTEELPPLLSALSAVALVWLAWAFVSARSRAKAEKFYREKMIQNESIHPVLHASLQHLEHKPQMLALLVKNHGKGMAEQVRFKAEVLPDDEDARTIAAELAKMDMFALGTDAVASGETYGRVFADIFELSAALEGRAFKGMLKLTAEYKNIFGDACRSETALDLGALNQALQEISKTSEKSKRIFY

SEQ ID NO: 5665 - protein, 96 aa, Neisseria meningitidis; identical to SEQ ID NO: 2317

SEQ ID NO: 5666 - protein, 351 aa, Neisseria meningitidis
MITLAVDAMGGDQGLAVTVPGATAFLQAHPDVRLIMTGDETQLRQALTAAGAPMERIDICHTAQIVGMDEAPQSALKNKKDSSMRVAVNQVKEGKAQAAVSAGNTGALMATARFVLKTIPGIERPAIAKFLPSDTDHVTLALDLGANVDCTPEQLAQFAVIGSELVHALHPQKGQPRVGLVNVGTEDIKGTDTVKQTYKLLQNSKLNFIGNIESNSILYGEADVVVADGFVGNVMLKTIEGAVKFMSGAIRREFQSNLFNKLAAVAALPALKGLKNKLDPRKFNGAILLGLRGIVIKSHGGTDETGFRYALEEAYHEAKSAGLSKIEQGVAEQLAALETAKAVQNENVGGL

SEQ ID NO: 5667 - protein, 176 aa, Neisseria meningitidis; identical to SEQ ID NO: 2300

SEQ ID NO: 5668 - protein, 231 aa, Neisseria meningitidis; identical to SEQ ID NO: 1993

SEQ ID NO: 5669 - protein, 160 aa, Neisseria meningitidis; identical to SEQ ID NO: 236

SEQ ID NO: 5670 - protein, 548 aa, Neisseria meningitidis
MKHLHDLPAWSKLWNHFDDSKTLHMREMFEQDPQRAERYWLQVGGLTLDYSKNRINDETMSLLFELAREAGVPERMRQMFHGEKINTTENRAVLHVALRNRTNSPIVVDGEDVMPKVNRVLQRMGEFAHEVRSGSWLGYTNQVITDVVNIGIGGSDLGPLMMCTALKPFGHPRLNMHFVSNVDGSQLRDVLSKVHPETTLFIIASKTFTTQETLTNALTAREWFLNHAGDEEAVAKHFAAVSTNQKAVAEFGIDTANMFEFWDWVGGRYSLWSAIGLPIMLYLGEENFIEMLNGAHLMDQHFINTPLERNLPVILALIGIWYINYYGGGSHVIAPYDQHLHRLPKFIQQLDMESNGKQVTLDGKAVGHETSPIIWGETGINGQHAFFQLLHQGTHITPIDLIASLEKRSNLPGHHEILLANVFAQAEAFMRGKTPDEVRAELKAQGMDEARIEELVPHKTFSGNRPTNLILMDKVNPRNMGSLIAMYEHKTFVQGIIWGINSFDQWGVELGKQLAKTILGELTGETEPQKHDSSTERLINLYLQTNRK

SEQ ID NO: 5671 - protein, 177 aa, Neisseria meningitidis
MSRVAKNPVTVPAGVEVKFGTEALVIKGKNGELSFPLHSDVAIEFNDGKLTFVANNSSKQANAMSGTARALVSNMVKGVSEGFEKRLQLIGVGYRAQAQGKILNLSLGFSHPIVYEMPEGVSVQTPSQTEIVLTGSDKQVVGQVAAEIRAFRAPEPYKGKGVRYVGEVVVMKEAKKK

SEQ ID NO: 5672 - protein, 116 aa, Neisseria meningitidis
MALRTHFVISNVPSTPNLLRGRQLEGKLILEVPAQVNPIPQSVLRAAQEENVIIRDTTGRIYNRWWFSIRWLCRCTSCKKRIIDTNRENRGRCVSNCKCKHWISMDCQFVRAKRRS

SEQ ID NO: 5673 - protein, 296 aa, Neisseria meningitidis; identical to SEQ ID NO: 337

SEQ ID NO: 5674 - protein, 204 aa, Neisseria meningitidis
MSFDNYLVPTVIEQSGRGERAFDIYSRLLKERIVFLVGPVTDESANLVVAQLLFLESENPDKDIFFYINSPGGSVTAGMSIYDTMNFIKPDVSTLCLGQAASMGAFLLSAGEKGKRFALPNSRIMIHQPLISGGLGGQASDIEIHARELLKIKEKLNRLMAKHCGRDLADLERDTDRDNFMSAEEAKEYGLIDQILENRASLQL

SEQ ID NO: 5675 - protein, 239 aa, Neisseria meningitidis
LTLTRKTLFLLTAAFGTHSLQTASADAVVKAEKLHASANRSYKVAGKRYTPKNQVAEFTQTGNASWYGGRFHGRKTSGGERYDMNAFTAAHKTLPIPSYVRVTNTKNGKSVIVRVNDRGPFHGNRIIDVSKAAAQKLGFVNQGTAHVKIEQIVPGQSAPVAENKDIFIDLKSFGTEHEAQAYLNQAAQNFAASASSPNLAIEKRRYEYVVKMGPFASQERAAEAEAQARGMIQTVLTAG

SEQ ID NO: 5676 - protein, 131 aa, Neisseria meningitidis
KSIGCRTALCAKPAATVRRKIKPSVTDICRRPVIVDIIRTRRRSRRQYKYGTDSLGASAPRIVLFELRRGNAVLVISTICGRTELRYAAPQIPLRPGSLFRTDSECAKPSEGDVFEPVESRQQAKCARCRL

SEQ ID NO: 5677 - protein, 311 aa, Neisseria meningitidis
MELFKIKRDIPFMSYGKLTTFISLVTFIAAVFFLVTRGLNFSVEFTGGTVMEVQYQQGADVNKMRERLDTLKIGDVQVQALGTNKHIMIRLPNKEGVTSAQLSNQVMDLLKKDSPDVTLRQVEFIGPQVGEELVSNGLMALGFVVIGIIIYLSMRFEWRFAVSAIIANMHDIVIILGCFAFFQWEFSLTVLAGILAVLGYSVNESVVVFDRIRENFRKPAMRGHAVPEVIDNAITATMSRTIITHGSTEAMVVSMLVFGGAALHGFSMALTIGIVFGIYSSVLVASPLLLMFGLSRDNIGKEPKKKEEIVV

SEQ ID NO: 5678 - protein, 123 aa, Neisseria meningitidis; identical to SEQ ID NO: 3577

SEQ ID NO: 5679 - protein, 210 aa, Neisseria meningitidis
MENTNRVPEQARYDAERRQADEALAGVFPAVSIFGSARTPQNHADYAFACRLARRLSDSGIAVISGGGPGIMEAANKGAFAGKSVSVGLNIVLPHEQKPNPYQDIALRFSRFAERKAVFFRYSQAYVVMPGGFGTLDELFEILTLVQTGKVPPRPIVLVGKAFWSGLAEWINAQLLARGLISEGAVSLFAISDDEDEIVAYLSEHGLQTA

SEQ ID NO: 5680 - protein, 188 aa, Neisseria meningitidis
MSAFLPIINRLILQSPDSRSELAAFAGKTLTLNIAGLKLAGRITEDGLLSAGNGFADTEITFRNSAVQKILQGGEPGAGDIGLEGDLILGIAVLSLLGSLRSRASDELARIFGTQADIGSRAADIGHGIKQIGRNIAEQIGGFSRESESANIGNEALADCLDEISRLRDGVERLNERLDRLERDIWID

SEQ ID NO: 5681 - protein, 177 aa, Neisseria meningitidis; identical to SEQ ID NO: 3295

SEQ ID NO: 5682 - protein, 423 aa, Neisseria meningitidis
MFQWLYDVLWLLAPIWIRRYLDKRSGSAPAYRAHRDERFGKPYPNPVTGAVWIHAVSVGETRAAQPLIRELRQRFPDAPLLMTQMTPTGRETAQVLFPDAQCRYLPYDKKTWVRQFLREHRPMFGILMETEIWPNLMKECRKSGVPLFLANARLSEKSLNGYLKVRRLIRPAAASLTGCLAQTEADAARLAKLGAASVQVCGNTKYDIIPSEQMKTLAGQFEKRIGGRPVAVCGSTRVYRGEDEAEKLLAAWQQYRGDALLVVVPRHPEHFQTVFETAKRFGFKVQRRSDGLPVEPDTQVWIGDSMGELYAYYLCADVAFVGGSLVDSGCQNIIEPLSCGVPTIFGFSTYNFSEACRHALASGAAVQVESADAWREAVEKTLSSEGGGMQMQARVDGFIAQHRGAGARIAEAVREAVCGHRGR

SEQ ID NO: 5683 - protein, 481 aa, Neisseria meningitidis
MSTQTNFDLVLFGATGDLAMRKLLPCLYQAHVAGLLHPEGRILGVSRSELDTEGFLAKVETSSKIHVKENFSDEAWASFVERFAYLKVDVTQPDDFAALGDLVKARKETDNVVIYLSTAPKFFAQTCENLAKIGLNADNVRVVLEKPLGTDLASSQQINTDVARYFKEGQIYRIDHYLGKESLQNLLALRFANVMFEPLWNNKYIESVQLTIAEQLGVEERGEFYDITGALRDMVQNHLMQMLCMTAMEAPASLDADAVRDEKVKVIKSLKPLTVESVNENVVRGQYTAAKGMNGYLEEINVPQDSFTETYVAIKAEIENERWKGVPFYLRTGKRMAGKVAEIVLNFKDLNSHIFEGSRTAPNRLVIELQPHESVRLYTQMKTPGAGNKVETVPLATDLGKALEGRRAEAYERLLLDVINGKLALFNRRDELEAAWEYVMPILENWANNTTPPHGYGAHSWGPEAARELLAHDGHKWHEEQ

SEQ ID NO: 5684 - protein, 255 aa, Neisseria meningitidis
MSSNKASFFTRLRRLCRLTVWLFKTGKNLRGIDGGCPESRNRAVIELGKGALVALDIGLEVGRPAPEHPNGVLVAANHVSWLDIFAMSAVYPSSFIAKQEIKSWPVLGKMGQNAGTVFINRNSRRDIEPINRAVYETLQRGQNVSFFPEARTSSGLGLLPFKAALFQSAIDAGAKVLAVALRYYDETGKRTARPSYADVGLPTCLWRIVSMKKLTIKVDFVCVADAAESEDRYALKDKIEESIRAVVAGDADVAV

SEQ ID NO: 5685 - protein, 594 aa, Neisseria meningitidis
MSLVELKVPDIGGHENVDIIAVEVNVGDTIAVDDTLITLETDKATMDVPAEVAGVVKEVKVKVGDKISEGGLIVVVEAEGTAAAPKAEAAAAPAQEAPKAAAPAPQAAQFGGSADAEYDVVVLGGGPGGYSAAFAAADEGLKVAIVERYKTLGGVCLNVGCIPSKALLHNAAVIDEVRHLAANGIKYPEPELDIDMLRAYKDGVVSRLTGGLAGMAKGRKVDIIQGDGQFLDPHHLEVSLTTSEVYEQATPTGEKKIVAFKNCIIAAGSRVTKLPFIPEDPRIFDSSGALALKEVPGKLLIIGGGIIGLEMGTVYSTLGSRLDVVEMMDGLMQGADRDLVKVWQKQNEYRFDNIMVNTKTVAVEPKEDGVYVTFEGANAPKEPQRYDAVLVAAGRAPNGKLISAEKAGVAVTDRGFIEVDKQMRTNVPHIYAIGDIVGQPMLAHKAVHEGHVAAENCAGHKAYFDARVIPGVAYTSPEVAWVGETELSAKASGRKITKANFPWAASGRAIANGCDNGFTKLIFDAETGRIIGGGIVGPNGGDMIGEVCLAIEMGCDAADIGKTIHPHPTLGESIGMAAEVALGTCTDLPPQKKK

SEQ ID NO: 5686 - protein, 701 aa, Neisseria meningitidis; identical to SEQ ID NO: 1407

SEQ ID NO: 5687 - protein, 99 aa, Neisseria meningitidis; identical to SEQ ID NO: 1110

SEQ ID NO: 5688 - protein, 98 aa, Neisseria meningitidis
MACCLRFLTSLKRQTVNQATACVRTAHTLHVDFEVPCNSQVGCVAQPRTRCWVCRLRLAAAETPEEKAKDAAEEAKEEAKDAAEDAKEAAEDAKEEAK

SEQ ID NO: 5689 - protein, 90 aa, Neisseria meningitidis; identical to SEQ ID NO: 3546

SEQ ID NO: 5690 - protein, 500 aa, Neisseria meningitidis
MAKVLIVPVSAGLDASAAAQAFAKALDAEIFQAVDATAETLLAQGKSDDWFDALVGKVAALDAANLVIEGIAPDADKIYLAGKNVELALSLDAAAVFAVRSDNADADELANRLNLAKQFFAAAPGVLEGFVVDGAAASVAEAAAEKTGLTFFGSSDALKDVSVLAGREAKRLSPAQFRYNLIDFARQADKRIVLPEGAEPRTVQAAAICHEKGIARCVLLAKREEVEAVAKERGISLPDSLEIIDPASLVEQYVEPMCELRKSKGLTPEDARKQLQDTVVLGTMMMAQNDVDGLVSGAVHTTANTIRPALQLIKTAPGASLVSSVFFMLLPNQVLVFGDCAVNPNPTAQQLADIAIQSADSAKAFGIDPKVAMISYSTVNSGSGPDVDTVIEATKLAREKRPDLAIDGPLQYDAATVPGVGKSKAPGSPVAGQATVLVFPDLNTGNCTYKAVQRSANVLSVGPLLQGLRKPVNDLSRGALVEDIVFTIALTAVQAKQMEG

SEQ ID NO: 5691 - protein, 343 aa, Neisseria meningitidis; identical to SEQ ID NO: 614

SEQ ID NO: 5692 - protein, 181 aa, Neisseria meningitidis
LKTDTARMNNLIPEYLAAYAHSDSLQIEGGHRCFSLSCQGRDTFHIRYYGEPFDGLITDTDKAPVKIVAVEAVSGDEIVLFDGAEHGYNAMFCDKYSPNQKQNRTLTDLDEYTYRVLIHLYYNIDYEDEYEDFVNSEGQVPLIDGRIISFDSLKRNGFDAISVDLIDEKHSVRELLNEELS

SEQ ID NO: 5693 - protein, 447 aa, Neisseria meningitidis
MFHSVNVFTGETLYRCPAQDYAEFERQLAGLKMRGGAFAQLGVTERAARLRRFADRLEAEKERFAEMVCEEVGRCLHECRAEIGKSIELIRYYAHLAPELLAHKTIATQASLSQVRFEPLGVVFAVMPWNYPVWQVLRFAVPAMCAGNACAVKPAPSVARVSQALFDLASDGIPLAGAWLDEAGTLKAVEDTDAMAFTGSTHTGRILAAHAGANLKKTVLELGGSNAFIVMPDADLERAAAEACYSRFRDAGQSCNAAKRIIVTEAAADRFIPLFLAECAKLKMGDPKHPDTTLAPLHREDLRDRVHGQVEDAVSNGAVCLTGGKIPQGRGWFYPATVLDRVNPACRVWYEEVFGPVALILRAANEDHAIALANDSPFGLGACIYTADTERAWRFAEKIQAGSVFINRHTSSDLRLPFGGVKDSGYGRELSEFGLYEFVNVKTYWQK

SEQ ID NO: 5694 - protein, 256 aa, Neisseria meningitidis
LEADSDTAHDRTFSVLSFSSHISHTIMKLIKYLQYQGIGSRKQCQWLIAGGYVFINGTCMDDTDADIDSSSVETLDIDGEAVTVVPEPYFYIMLNKPEDYETSHKPKHYRSVFSLFPDNMRNIDMQAVGRLDADTTGVLLITNDGKLNHNLTSPSRKIPKLYEVTLKHPTGETLCETLKNGVLLHDENETVCAADAVLENPTTLLLTITEGKYHQVKRMIAAAGNRVQHLHRRRFAHLETENLKPGEWKFIECPKF

SEQ ID NO: 5695 - protein, 106 aa, Neisseria meningitidis
MMGNKLTLPAELPDEQDLRAVLAYNMRLFRVNKGWSQEELARQCGLDRTYVSAVERKRWNIALSNIEKMAAALGVAAYQLLLPPQERLKLMTNSADTRQMPSESGI

SEQ ID NO: 5696 - protein, 453 aa, Neisseria meningitidis
MLKKVLIANRGEIALRVLRACREMGIATVAVHSEADKDSLHVKLADESVCIGPAASAQSYLNVPAIIAAAEVSCADAVHPGYGFLAENADFAEQVEQSGFTFIGPKPDTIRLMGDKVSAKHAMIAAGVPCVPGSDGALPDDGEEILKIADKVGYPVIIKASGGGGGRGMRVVEKKEDLLQSVEMTKAEAGAAFGNPMVYMERYLQRPRHVEIQVIADEHGNAIYLAERDCSLQRRHQKVIEEAPAPFITEKERAKIGNACADACKRIGYRGAGTFEFLYEDGEFFFIEMNTRVQVEHPVTELITGVDIVQEQLRIAAGLPLQYKQKDIQVEGHAFECRINAEDPYNFIPSPGPIESCHLPGGFGIRVDSHIYQGYRIPPYYDSLIGKICVHGKTREQAMAKMRVALAELAVTGIKTNTPLHRDLFADAGFQKGGVSIHYLEHWLEDRKAKQDK

SEQ ID NO: 5697 - protein, 615 aa, Neisseria meningitidis
MYLPSMKHSLPLLAALVLAACSSTHAPSSKTLADNIETAGLSASVPTRPAEPEGKTLADYSSYPSALDAVKQKNDAAVAAYLENAGDSAMAENVRNEWLKSLGARKQWTLFAQEYAKLEPAGRAQEVECYADSSRNGYTRAAELVKNTGKLPSGCTKLLEQAAASGLLDGNNAWRRVRGLLAGRQTTDARNLAAALGSPFDGGTQGSREYALLNVIGKEARKSPNAAALLSEMESGLSLEQRSFAWGVLGHYQSQSLNVPAALDYYGKVADRRQLTDDQIEWYARAALRARRWDELASVISHMPEKLQKSPTWLYWLARSRAATGNTQEAEKLYKQAAATGRNFYAVLAGEELGRKIDTRNNVPDAGKNSVLRMAEDGAIKRALVLFRNSRTAGDAKMRRQAQAEWRFATRGFDEDKLLTAAQTAFDHGFYDMAVNSAERTDRKLNYTLRYISPFKDTVIRHAQNVNVDPAWVYGLIRQESRFVMGAQSGVGAQGLMQVMPATAREIAGKIGMDAAQLYTADGNIRMGTWYMADTKRRLQNNEVLATAGYNAGPGRARRWQADIPLEGAVYAETIPFSETRDYVKKVMTNAAYYASLFGAPHIPLKQRMGIVPAR

SEQ ID NO: 5698 - protein, 241 aa, Neisseria meningitidis
MPRFYLPENLSVGQTVALPDNIVRHLNVLRVRPNENITLFDGKGKAHAAQLTVLEKRRAEAEILHEDTTDNESPLNITLIQSISSGDRMDFTLQKSVELGVTAIQPVISERCIVRLDGERAAKRLARWQEIVISACEQSGRNTVPPVLPIIGYREALDKMPSESTKLIMSINRARKLGDIRHPSGAIVFMVGPEGGWTEQEEQQAFEAGFQAVTLGKRILRTETAPLAAIAAMQTLWGDFA

SEQ ID NO: 5699 - protein, 502 aa, Neisseria meningitidis; identical to SEQ ID NO: 2442

SEQ ID NO: 5700 - protein, 278 aa, Neisseria meningitidis
MIDLHCHSTVSDGMLSPAEVVRLAHQNGCTLLALTDHDHTGGIAEARAEADRLGLRLINGVEISVTWRGRTIHVVGLDFDEQDENLQNLLAQVRQGRLKRLEAIAAKLEKKGIGGAYDGALALAANKEMVSRTHVAEFLIKNGYVKNKQQAFTKYLGDGKSCAVRHEWATLEDCVSAVNGAGGMAVIAHPMRYDLSATAKRNLFEEFKNLGGAGIEVHSGNCCKNDRLNYALLAERFGMLASAGSDFHRLNDFSGGILGACPELPENCRPVWAHFSRH

SEQ ID NO: 5701 - protein, 71 aa, Neisseria meningitidis
MKTLLLTFGIFLTVIIGMAVGYIFSKRSIKGSCGGITALGMKKMCDCDIPCDTLQKKLDEEKQAGGIRVDR

SEQ ID NO: 5702 - protein, 77 aa, Neisseria meningitidis
MEAIVYLEDNEYIALCDLLKLVGLAESGGQAKAFIAEGLVLRNGETETRKTAKIRGGEVIEFDGARLEIADGYDPEA

SEQ ID NO: 5703 - protein, 444 aa, Neisseria meningitidis
MPPLIFATFPMKPFAENIPHSLRGNCRDEALPPHTVDCPECGCRADVPRLDRGEAAFCPRCGYKLFRVSRHPFSAPPAYAAASLILMAFAYGMTYIEVGIPGAASVLSLPEMMRLMVFQDYGFLAEVMFVLTFGAPVLFLLLCLYVYAALIRKQAYPALRLATRVMVRLRQAMMVDVFFVSTLVAYIKLSSVAEVRFGSAFYLMFALSVMLIRTSVSVPQHWVYFQIGRLTGDNAVQTASEGKTCCSRCLYFRDSAESPCGVCGAELYRRRPKSLSISSAFLTAAVILYFPANILPIMISSNPAATEVNTILNGIAYMWDEGDRLIAAVIFSASILVPVLKIAAMSVLIASARFALPTGAKKLSHLYRITEAVGRWSMIDIFVIIILMCSFHTYAARVIPGSAAVYFCLVVILTMLSAYYFDPRLLWDKRASDGIAFNETEKYD

SEQ ID NO: 5704 - protein, 512 aa, Neisseria meningitidis
MFHSIEKYRTPAQVLLGLIALTFVGFGVSTVSHPGADYIVQVGDEKISDHSINNAIQNEQADGGGPSRDAVFQSLLQRAYLKQGAKLMGISVSSEQIKQIIVDDPNFHDANGKFDHALLNRYLSQRHMSEDQFVEEIRDQFALQNLVNLVQNGVLVGDAQAEQLIRLTQVNRTIRSHTFNPDEFIAQVKVSEADLQKFYNANKKDYLLPKAVKLEYVALNLKDFADKQTVSETEVKNAFEERVARLPANEAKPSFEQEKAAVENELKMKKAVADFNKAKEKLGDDAFNHPSSLAEAAKNSGLKVETQETWLSRQDAQMSGMPENLINAVFSDDVLKKKHNSEVLTINSETAWVVRAKEVREEKTLPFAEAKDAVRQAYIRTEAAKLAENKAKDVLTQLNGGKAVDVKWSEVSVLGAQQARQSMPPEAYAELLKAKPANGKPAYVRLIGLPASVIVEVQAVTPPDDIAAQLPLAKQALAQQQSANTFDLLIRYFNGKIKQTKGAQSVDNGDGQ

SEQ ID NO: 5705 - protein, 234 aa, Neisseria meningitidis
MLSEGISDGIFRGEMLQFAPFLPTQGNRIMFTGIVQGLGKLTAIHRPSEAFHTYVVELPQEAADNLQRGASVANNGCCLTITEIEGNRVSFDLMAETLAKTNLGLLKEGDCVNIERAARFGDEIGGHVMSGHIMATVPIVEIERDGFNRTVWFSLPHELKPYILTKGFVGLDGCSLTIGKVEDGRFNVHLIPETLERTLFGSRKVGDRINIEIDPNTQAIVDTVERLMAQRYAK

SEQ ID NO: 5706 - protein, 335 aa, Neisseria meningitidis
MSTFFRQTAQAMIARHIDRFPLLKLDQVIDWQPIEQYLNRQRTRYLRDHRGRPAYPLLSMFKAVLLGQWHSLSDPELEHSLITRIDFNLFCRFDELSIPDYSTLCRYRNWLAQDDTLSELLKLINRQLTEKGLKIEKASAAVVDATIIQTAGSKQRQAIEVDEEGQISGQTTPSKDSDAHWIKKNGLYKLGYKQHTRTDAEGYIEKLHITPANAHECKHLSPLLEGVPRGTTVYADKGYDSAENRQHLEEHQLQDGIMRKACRNRPLSEVQTKRNRYLSKTRYVVEQSFGTLHRKFRYARAAYFGLIKVSAQSHLKAMCLNLLKAANRLSAPAAA

SEQ ID NO: 5707 - protein, 120 aa, Neisseria meningitidis
MLYKCKIKKLDNTIEEAVLIEINGYELHCFISYCPFKIFENQFYEVELSYEIFNDYILDKSTSNIEFRKIDDSFKYEITAELKNNHLTLQNIQFEEDEYLINYSYLDNCLVTLTVDRISV

SEQ ID NO: 5708 - protein, 273 aa, Neisseria meningitidis
MTFDEWLGLSKLPKNEARMLLQYVSEYTRVQLLTRGGEEMPDEVRQRADRLAQRRLNGEPVAYILGVREFYGRRFTVNPSVLIPRPETEHLVEAVLARLPENGRVWDLGTGSGAVAVTVALERPDAFVRASDISPPALETARKNAADLGARVEFAHGSWFDTDMPSEGKWDIIVSNPPYIENGDKHLLQGDLRFEPQIALTDFSDGLSCIRTLAQGAPDRLAEGGFLLLEHGFDQGAAVRGVLAENGFSGVETLPDLAGLDRVTLGKYMKHLK

SEQ ID NO: 5709 - protein, 100 aa, Neisseria meningitidis
MTAQHQSDTLLRRLNTLPPKRYGVFLLNDDYTTMEFVVEILTEIFMLGQEQAVAVMLLVHHEGKGLCGTYTRDIAQTKQQQVMQRAKAEGHPLQCIVEEI

SEQ ID NO: 5710 - protein, 141 aa, Neisseria meningitidis
MYIGADDLTAAMGKTELVQLTSDNARGTEPDAQVIDAAVRYACDLVDGYLRGRYVLPLKDTPTVLQPLCINIARHFLHSRRINRADFPKPLETAYNATIKTLEAIRDGKIHIGIAASDKPPQPELGAYHVRARDKMDLGGY

SEQ ID NO: 5711 - protein, 389 aa, Neisseria meningitidis
MSEYLFTSESVSEGHPDKVADQVSDAILDAILAQDPKARVAAETLVNTGLCVLAGEITTTAQVDYIKVARETIKRIGYNSSELGFDANGCAVGVYYDQQSPDIAQGVNEGEGIDLNQGAGDQGLMFGYACDETPTLMPFAIYYSHRLMQRQSELRKDGRLPWLRPDAKAQLTVVYDSESGKVKRIDTVVLSTQHDPEIGYEELKNAVIEQIIKPVLPSELLTDETKYLINPTGRFVIGGPQGDCGLTGRKIIVDTYGGAAPHGGGAFSGKDPSKVDRSAAYACRYVAKNIVAAGLATQCQIQVSYAIGVAEPTSISIDTFGTGKISEEKLIALVREHFDLRPKGIVQMLDLLRPIYGKSAAYGHFGREEPEFTWERTDKAAALRAAAGL

SEQ ID NO: 5712 - protein, 212 aa, Neisseria meningitidis; identical to SEQ ID NO: 324

SEQ ID NO: 5713 - protein, 725 aa, Neisseria meningitidis
MTRFKYSLLFAALLPVYAQADVSVSDDPKPQKSTELPTITVTADRTASSNDGYTVSGTHTPLGLPMTLREIPQSVSVITSQQMRDQNIKTLDRALLQATGTSRQIYGSDRAGYNYLFARGSRIANYQINGIPVADALADTGNANTAAYERVEVVRGVAGLLDGTGEPSATVNLVRKRPTRKPLFEVRAEAGNRKHFGLGADVSGSLNTEGTLRGRLVSTFGRGDSWRQRERSRDAELYGILEYDIAPQTRVHAGMDYQQAKETADAPLSYAVYDSQGYATAFGPKDNPATNWANSRHRALNLFAGIEHRFNQDWKLKAEYDYTRSRFRQPYGVAGVLSIDHNTAATDLIPGYWHADPRTHSASVSLIGKYRLFGREHDLIAGINGYKYASNKYGERSIIPNAIPNAYEFSRTGAYPQPSSFAQTIPQYGTRRQIGGYLATRFRAADNLSLILGGRYSRYRTGSYDSRTQGMTYVSANRFTPYTGIVFDLTGNLSLYGSYSSLFVPQSQKDEHGSYLKPVTGNNLEAGIKGEWLEGRLNASAAVYRARKNNLATAAGRDPSGNTYYRAANQAKTHGWEIEVGGRITPEWQIQAGYSQSKTRDQDGSRLNPDSVPERSFKLFTAYHFAPEAPSGWTIGAGVRWQGETHTDPATLRIPNPAAKARAADNSRQKAYAVADIMARYRFNPRAELSLNVDNLFNKHYRTQPDRHSYGALRTVNAAFTYRFK

SEQ ID NO: 5714 - protein, 613 aa, Neisseria meningitidis
MQTNYLSETDSIMKKLICLFAVFLMLCGRAFALDANDLLPPEKAFVPELAVADDGVNVRFRIADGYYMYQAKIVGKTDPADLLGQPSFSKGEEKEDEFFGRQTVYHHEAQVAFPYAKAVGEPYKLVLTYQGCAEAGVCYPPVDTEFDISGNGTYHPQTDEPASAKDRFLQPSSQNGSGALPPPKGDEGGDSRFKLSWDTLNANLLAFFLAGLGLSFTACMYPLLPIVSSIVVGDKKAGKARAFVLSVVYVQGLALTYTLVGIVAGLTGALLTVWLQQAWVVLAASALMVVLALSMFGLFNIQLPNAVQSYFQNQSSRLSGGKIVSVFIMGILSALIVGPCVAPPLAFALGYIGQTGDAVLGGLALYTLALGTGVPLIAIGTFGGHILPKAGDWMNAVKYAFGFILLAVAVYLATPHLPYYLVVALYTLLMLVPAFMLLVNGRRQKRRPKAVAFALGGILLIGGAWFGWQGANGKTTALHHFLTLNPPAEAGKSSEHGKMFADTAALKAAMDTALKEHPDKPVVLDFYADWCISCKEMAAYTLNQPEVHQAVDMERFFQIDVTANTPEHQALLKEYGLFGPPGVFVVRSDGSRSEPLLGFVKADKFIEWYEQNR

SEQ ID NO: 5715 - protein, 329 aa, Neisseria meningitidis
MKQKIFVLYTGGTIGMTQSSEGLRPDTALVGQALAPFSNGMDFDWHVCGTLIDSSAVQLQNWCAWLDIIAAALPQYDGVLVLHGTDTLAYTANLFALALQGLDKPIVLTGSQWPYNAVGSDAPRNLATAVAAFPLGLKQTLIAFDGKLYPAVGSSKVSTETASGFDNPHFGVIAEWDETQGWYNLRIPSQDAAAVSDGLKIRYPDPQAKIAVRTLIPGFAVQELADGLGQLPAQALILQSYGHGNTPADEGFIRAVQDFTQQGKLLLNISQVRQGRTAAVYAQGNAFRNSGIINGGKCNLETATALMTLAVSQGWGKEEVEKELARLKL

SEQ ID NO: 5716 - protein, 752 aa, Neisseria meningitidis
MYTRIMEISPWTLRSAKLEKEHKRLQESLTSLGNGYMGMRGSFEETYSADSHLGTYIAGVWFPDKTRVGWWKNGYPKYFGKAINALNFSKVKIFVDGQEVDLAKNDVAGFSVELDMQHGVLRRSFTVFGVRFNVCKFLSVAQKELAVICWEAVSVDGKTHQVRIDSIIDADVKNEDSNYEEKFWQVLDKGVSDSLSYIAAQTVANPFGVEQFIVNAEQTFAGSFKALGGRQTDWQVSNSFEAEVGGTPETFEKRVIVTTSRDYQGLEAVKAAGRALSEKVAGVAFETLLDAHKAGWLHRWEIADVVIEGSDEAQQGIRFNLFQLFSTYYGEDARLNIGPKGFTGEKYGGATYWDTEAYAVPLYLALAEPEVTRNLLQYRRNQLPQAQHNAREQGLAGALYPMVTFTGIECHNEWEITFEEIHRNGAIPYAIYNYTNYTGDESYLAKEGLEVLVEVSRFWADRVHFSKRNGKYMIHGVTGPNEYENNINNNWYTNTLAAWVLDYTREALAKYPRPDLNVRAAELEKWADISANMYRPYDEELGVFVQHDGFLDKDIRPVSALSPDDLPLNQKWSWDKILRSPFIKQADVLQGIYFFGDRFNIDEKRRNFDFYEPMTVHESSLSPCIHSILAAELGKEEKAVEMYQRTARLDLDNYNNDTEDGLHITSMTGSWLAIVQGFAQMKTWGGTLSFAPFLPSAWTGYAFHINYRGRLIKVAVGKENVVFTLLKGEPLDLQVYGKDITLDGSHTAALEK

SEQ ID NO: 5717 - protein, 144 aa, Neisseria meningitidis
MRRALIAKIKIAQKELGLDDGTYRAVLERVTGKRSCADMDVSELESVVADMRSHGFKPKAKGNPHGKPHLRRTSSAAMLDKVEALLTVGGKHWNYAHAMARRMFGKDKVEYLDDTQLHKLVAALQIAENRKTEKAGGDDGVRKS

SEQ ID NO: 5718 - protein, 169 aa, Neisseria meningitidis
MKKKLLSGIKFAVQTALVFLLVSLFLDWVRKPEEPAGAAGRPLTLLSGQRLTLGQFSRDKAVLVYFWGSWCGVCRYQSPIIDDLAADGVPVVGVAVRSGSASEVAAYMAKRGLGFPTVNDEDGGLARSWRIVATPAVVLVKNGKMVHYTTGISSYWGLRARIFQADVFG

SEQ ID NO: 5719 - protein, 432 aa, Neisseria meningitidis
MKSVIQDLQSRDLIAQTTDIEALDALLNEQKIALYCGFDPTADSLHIGHLLPVLALRRFQQAGHTPIALVGGATGMIGDPSFKAAERSLNSAETVAGWVESIRNQLTPFLSFEGGNAAIMANNADWFGKMNCLDFLRDIGKHFSVNAMLNKESVKQRIDRDGAGISFTEFAYSLLQGYDFAELNKRHGAVLEIGGSDQWGNITAGIDLTRRLNQKQVFGLTLPLVTKSDGTKFGKTEGGAVWLNAKKTSPYQFYQFWLKVADADVYKFLKYFTFLSIEEIDAVEAKDQASGSKPEAQRILAEEMTRLIHGEEALAAAQRISESLFAEDQSSLTESDFEQLALDGLPAFEVSDGINVVEALVKTGLASSNKEARGFVNSKAVLLNGKPAEANNPNHAAERPDDACLLNGEHKRFGKYTILRRGKRNHALLVWK

SEQ ID NO: 5720 - protein, 309 aa, Neisseria meningitidis
MIHVSAVQAPAHIQDTGRYGHRRYGIGHAGAMDTVALAAGNILLGNDEGTAAIEIALGGIMLVFERDTPFCLTGAVYQAELDGEPVYSYWRYTARKGQTLKMVRAVQGMYGYVCVAGGFDVPEVMGSRSTDLKAGFGGHQGRMLQKGDCLPIGKGAQELSKVGIAPIPFTDTVHLVPSSEYAAFSEKGRLNLERETWTLQSDSNRMGYRFDGQPLTLSQPLEMLSHAVQAGTVQVPPGGKPIILLADAQTTGGYPKIATVAAADLGRLAQVRFGSKVKFKIIGLKEATALRRKNQAYLNQIRRITHEAG

SEQ ID NO: 5721 - protein, 274 aa, Neisseria meningitidis
MDGTQSKPKFFERLISRLAGEPDSAEDVLTLLRQAHEQEVFDADTLLRLEKVLDFSDLEVRDAMITRSRMNVLKENDSIERITAYVIDTAHSRFPVIGEDKDEVLGILHAKDLLKYMFNPEQFHLKSVLRPAVFVPEGKSLTALLKEFREQRNHMAIVIDEYGGTSGLVTFEDIIEQIVGEIEDEFDEDDSADNIHAVSSERWRIHAATEIEDINTFFGTEYSSEEADTIGGLVIQELGHLPVRGEKVLIGGLQFTVARADNRRLHTLMATRVK

SEQ ID NO: 5722 - protein, 132 aa, Neisseria meningitidis; identical to SEQ ID NO: 1178

SEQ ID NO: 5723 - protein, 248 aa, Neisseria meningitidis
MNVLISNDDGYLSEGIAVLARVTAEFANVRVVAPERDRSGVSNSLTLERPLQLKQAQNGFYYVNGTPTDCIHIGQSVFSDFQADFVFSGINRGANMGDDTLYSGTVAAATEAYLMGIPAVAFSLNDASGRYWATAEQALWTLLAHFFKNPPQSPILWNINIPAVAPEDVRGIKIARLGRRHHGQNVIPARNPRGEQIYWIGPVGEVSDREEGTDFGECGAGFITVTPLQIDLTAYPDMAETAAFWHTD

SEQ ID NO: 5724 - protein, 309 aa, Neisseria meningitidis
MRITNQVTKNIIKRVIKSEDYRIEIVNLLNAEFLQFSIDFFKKVVTAKLNSKDITIDWYKEHFLAKNSPKGELIIYSGLNEKTITNMYGTAKKSVVIDASIEHFETLYSSIQMLVENEQNEIDLTLTIKLKNVSVDLSISESLIVINTLAVKRSQLRGGLWSTAGKSVEKYLMLTLCQLYQVPEDNYDASTFVKDKSKSVDREIDFYLIKNQNRYLCEVKLMGKGNPESADAIIARNTQIFIADTLSQQNKNQCDELKVEWVALREQQGFLKFEKILRTFDIPFISYQYEDGNKLDCNLDDILNRLLDD

SEQ ID NO: 5725 - protein, 384 aa, Neisseria meningitidis
MSCEHLVMSYSTFPKTKNDALNEPMFFGQPVNVARYDQQKYEVFEKLIEKQLSFFWRPEEIDVSRDRIDYANLPEHEKHIFISNLKYQTLLDSIQGRSPNVALLPLVSIPELETWIETWSFSETIHSRSYTHIIRNIVNDPSVVFDDIVENEYITARAEDIACYYDDLIEYTQYYNLLGEGMHNVGGKPITVSLRGLKKKLYLCLMCVNVLEAIRFYVSFACSFAFAERELMEGNAKIIKLIARDEALHLTGTQHMLNLMRSGVDDSEMAEIAAELQDECFQLFKKAAEQEKEWAAYLFKDGSMIGLNKEILSQYVEYITNLRMQAVGLPAGFEGANQNPIPWINAWLSSDNVQVAPQEVEISSYLIGQIDSEVNTDDLGDFEL

SEQ ID NO: 5726 - protein, 232 aa, Neisseria meningitidis
MKSRHLALGVAALFALAACDSKVQTSVPADSAPAASAAAAPAGLVEGQNYTVLANPIPQQQAGKVEVLEFFGYFCPHCAHLEPVLSKHAKSFKDDMYLRTEHVVWQKEMLTLARLAAAVDMAAAESKDVANSHIFDAMVNQKIKLQNPEVLKKWLGEQTAFDGKKVLAAYESPESQARADKMQELTETFQIDGTPTVIVGGKYKVEFADWESGMNTIDLLADKVREEQKAAQ

SEQ ID NO: 5727 - protein, 945 aa, Neisseria meningitidis
MNKKHGFQLTLTALAIATAFPAYAAQAGAAAPDAAQTQSLKEVTVRAAKVGRRSKEATGLGKIVKTSETLNKEQVLGIRDLTRYDPGVAVVEQGNGASGGYSIRGVDKNRVAVSVDGVAQIQAFTVQGSLSGYGGRGGSGAINEIEYENISTVEIDKGAGSSDHGSGALGGAVAFRTKEAADLISDGKSWGIQAKTAYGSKNRQFMKSLGAGFSKDGWEGLLIRTERQGRETRPHGDIADGVAYGINRLDAFRQTHDIQSQDKTGQFFLVEGENTLKPVAKLAGYGIYLNRQLNRWVKERIEKNQPLSAEEEAMVREAQARHENLSAQAYTGGGRILPDPMDYRSGSWLAKLGYRFGGRHYVGGVFEDTKQRYDIRDMTEKQYYGTDEADKFRDKSGVYDGDDFRDGLYFVPNIEEWKGDKKLVRGIGLKYSRTKFIDEHHRRRRMGLLYRYENEAYSDNWADKAVLSFDKQGVATDNNTLKLNCAVYPAVDKSCRASADKPYSYDSSDRFHYREQHNVLNASFEKSLKNKWTKHHLTLGFGYDASNAISRPEQLSHNAARISEHTGEYTDDDKDKYRLGKPEVVEGSVCGYIETLRSRKCVPRKINGSNIHISLNDRFSIGKYFDFSLGGRYDRKNFTTSEELVRSGRYVDRSWNSGIVFKPNRHFSLSYRASSGFRTPSFQELFGIDIYHDYPKGWQRPALKSEKAANREIGLQWKGDFGFLEISSFRNRYTDMIAVADHKTKLPNQAGQLTEIDIRDYYNAQNMSLQGVNILGKIDWNGVYGKLPEGLYTTLAYNRIKPKSVSNRPDLSLRSYALDAVQPSRYVLGFGYDQPEGKWGANIMLTYSKGKNPDELAYLAGDQKRYSTKRASSSWSTADVSAYLNLKKRLTLRAAIYNIGNYRYVTWESLRQTAESTANRHGGDSNYGRYAAPGRNFSLALEMKF

SEQ ID NO: 5728 - protein, 130 aa, Neisseria meningitidis; identical to SEQ ID NO: 425

SEQ ID NO: 5729 - protein, 399 aa, Neisseria meningitidis
MRKKLTALVLSALPLAAVADVSLYGEIKAGVEGRNYQLQLTEAQAANGGASGQVKVTKVTKAKSRIRTKISDFGSFIGFKGSEDLGEGLKAVWQLEQDVSVAGGGATQWGNRESFIGLAGEFGTLRAGRVANQFDDASQAIDPWDSNNDVASQLGIFKRHDDMPVSVRYDSPEFSGFSGSVQFVPAQNSKSAYTPAHYTTVYNATTTTTTTTFVPAVVGKPGSDVYYAGLNYKNGGFAGNYAFKYAKHANVGRDAFNLFLLGRIGDDDEAKGTDPLKNHQVHRLTGGYEEGGLNLALAAQLDLSENGDKTKNSTTEIAATASYRFGNAVPRISYAHGFDFIERGKKGENTSYDQIIAGVDYDFSKRTSAIVSGAWLKRNTGIGNYTQINAASVGLRHKF

SEQ ID NO: 5730 - protein, 283 aa, Neisseria meningitidis
MVGCVWQAGRFEIGLDKPKIMGIVNLTPDSLSDGGAYSQNAKTALAHAERLLKEGADILDIGGESTRPGADYVPPEEEWARVAPVLAEVAGWGVPVSLDTRHTAVMEKALALGGIDIINDVAALTDEGALELLARQADTGICLMHMQGSPKNMQINPKYQDVVGEVARYLKARAAECVAAGIAPQRITLDPGFCFGKTLQHNIALMRHLPELMAETGLPLLIGVSRKSMIGELTGETDAAARVHGSVAAALASVARGAQIVRVHDVKATADALKVWEALGINL

SEQ ID NO: 5731 - protein, 107 aa, Neisseria meningitidis; identical to SEQ ID NO: 1348

SEQ ID NO: 5732 - protein, 51 aa, Neisseria meningitidis
MEKRNTYAFLLGIGSLLGLFHPAKTAIRPNPADDLKNIGGDFQRAIEKARK

SEQ ID NO: 5733 - protein, 304 aa, Neisseria meningitidis; identical to SEQ ID NO: 3720

SEQ ID NO: 5734 - protein, 65 aa, Neisseria meningitidis; identical to SEQ ID NO: 127

SEQ ID NO: 5735 - protein, 500 aa, Neisseria meningitidis
MSREMLQLAEALASEKNVDAEVVFQALEFALSTAAKKKADREHMDVRVQINRDTGEYQTFRRWLIVADEDYTYPDVEKTIEEIQEEIPGTAIQIGEYYEEQLPNESFGRQAAQTAKQIILQRIRDAEREQNLNEFLAVKEDIVSGTVKRVERHGIIVEVVAGKLDALIPRDQMIPRENFRSGDRIRALFLRVEEIGNTGRKQVILSRTSGDFLVKLYANEVPEIADGMLEIRAVARDPGQRAKVAVKANDQRIDPQGTCIGVRGSRVNAVSNELSGERIDVVLWSPEPAQFVMSALSPAEVSRIVIDEDKHAVDVIVDENQLALAIGRGGQNVRLASDLTGWQLNIMTSAEADERNAAEDAAIRRLFMDHLNVDEETADVLVQEGFATLEEVAYVPAAELLAIEGFDEEIVDMLRNRARDAILTMAIAAEEKLGEVSDDMRNLEGIDADMLRSLAEAGITTRDDLAELAVDELIEITGVNEETAKAVILTAREHWFTEDK

SEQ ID NO: 5736 - protein, 71 aa, Neisseria meningitidis; identical to SEQ ID NO: 3375

SEQ ID NO: 5737 - protein, 512 aa, Neisseria meningitidis
MNMLGALAKVGSLTMVSRVLGFVRDTVIARAFGAGMATDAFFVAFKLPNLLRRVFAEGAFAQAFVPILAEYKETRSKEATEAFIRHVAGMLSFVLIIVTALGILAAPWVIYVSAPGFAKDADKFQLSIDLLRITFPYILLISLSSFVGSVLNSYHKFSIPAFTPTFLNVSFIVFALFFVPYFDPPVTALAWAVFVGGILQLGFQLPWLAKLGFLKLPKLNFKDAAVNRVMKQMAPAILGVSVAQISLVINTIFASYLQSGSVSWMYYADRMMELPGGVLGAALGTILLPTLSKHSANQDTEQFSALLDWGLRLCMLLTLPAAVGLAVLSFPLVATLFMYREFTLFDAQMTQHALIAYSFGLIGLIMIKVLASGFYARQNIKTPVKIAIFTLICTQLMNLAFIGPLKHVGLSLAIGLGACINAGLLFYLLRRHGIYQPGKGWAAFLAKMLLSLAVMCGGLWAAQAYLPFEWAHAGGMRKAGQLCILIVIGGCLYFASLAALGFRPRHFKRVES

SEQ ID NO: 5738 - protein, 298 aa, Neisseria meningitidis
MESENIISAADKARILAEALPYIRRFSGSVAVIKYGGNAMTEPALKEGFARDVVLLKLVGIHPVIVHGGGPQINAMLEKVGKKGEFVQGMRVTDKEAMDIVEMVLGGHVNKEIVSMINTYGGHAVGVSGRDDHFIKAKKLLIDTPEQNGVDIGQVGTVESIDTGLVKGLIERGCIPVVAPVGVGEKGEAFNINADLVAGKLAEELNAEKLLMMTNIAGVMDKTGNLLTKLTPKRIDELIADGTLYGGMLPKIASAVEAAVNGVKATHIIDGRLPNALLLEIFTDAGIGSMILGGGEDA

SEQ ID NO: 5739 - protein, 591 aa, Neisseria meningitidis
MSIVLHGVAAGKGIAVGCAHLIARGTEEVPQYDVAEADTDAEAERFDAAVKATRKELEQLRSAIPENAPTELGAFISLHLMLLTDVTLSREPVDILREQKINAEWALKQQSDKLAAQFDNMDDAYLRERKQDMLQVVRRIHNNLIGQGNELEVADNLFDETVLIANDLSPADTVLFKEQRIAAFVTDAGGPTGHTAILGRSLDIPSVVGLHNARKLITEGETVIVDGINGVLIIAPDESVLNEYRRRAREYRSHKRDLNKLKKTAAATADGVCIELVGNIESAEDVKPLHNLGADGIGLFRSEFLYLNRDTMPSEDEQYEVYSAIVKKMKGKSVTIRTVDLGVDKNPRWFGKNSTPNGSLNPALGMTGIRLCLAEPVMFRTQMRAILRAAVHGPVRMMWPMITSVSEVRQCLIHLDTAQRQLAERGDAFGKVGIGCMIEIPSAALTVGSILKLVDFISVGTNDLIQYILSVDRGDDSVSHLYQPGHPAVLKMLQHVIRTANRMDKDVSVCGEMAGDTAFTRVLLGMGLRRFSMNPNNILPVKNIILHSNVGQLESDIAKVIRCEDEEKAEKLIKQMNSVSVEEEADFKGRK

SEQ ID NO: 5740 - protein, 362 aa, Neisseria meningitidis
MSDYTQQLQDKKDHLKTLFAGLDVPEWEVYESPDKHYRMRAEFRIWHEGGEMFYAMFEKGQKAGGASLIRCDRFEAASEAVNRLMPELIAVAAQSAELRNRWYAVEFLSTLSGEMLVTMIYHKRLDNEWMQAAQALQQQLDISVIGRSRGQKIVLKQDYVTETLKVGNRDFRYRQIEGSFTQPNAAVCQKMLEWACGAAEGLDGDLLELYCGNGNFTLPLSEKFERVLATEISKTSVSAAQWNIEANRIGNIKIARLSAEEFTEAYTRKREFKRLKDGGIALTDYAFSTIFVDPPRAGIDEETLKLVSQFDNIIYISCNPETLRANLDTLAETHAVERAALFDQFPFTHHIESGVLLKKKIL

SEQ ID NO: 5741 - protein, 454 aa, Neisseria meningitidis
MGKANAFTAPITVVNYDEQALNNTEARTLVDAVAKKDASVWQFGGESNTLTGLYFRGYQLDARQSGTARLTDQYFRTLSMNLSARGEFETGPVTHNWSTAFDRVIRQRKTINGSGNGNSKIEVKANENIEHQLASFKADYPNSWAKTANLDANIKVNSLALSDTLGFVDNKYRLTLGGRFQAVEYTNKKKSQSGDAKRFSPMLMAAWVPQPDLVVYGNYMEDLERADIKTDDSGETTMAKPRVSRQFEVGVRKNWGDFVTTLNAFQIKRPGYWRGNTKKGTDFAAYKAAGGAAGDEQGMERNRGIEFNAYANLLNKTLRPTLGLMYLQSTVKEYPNSRDMLVNGVQVANPRVIAKAGLEWDTPFAKGLTLNGNVSYFGKSYQDTQKQYAFPSYTLIDVGARYKTKLGKNTLTVSSSVENLFNKNYWQVQRGQYDRSFAVVGMPRTYWLKAELDF

SEQ ID NO: 5742 - protein, 126 aa, Neisseria meningitidis; identical to SEQ ID NO: 3142

SEQ ID NO: 5743 - protein, 148 aa, Neisseria meningitidis; identical to SEQ ID NO: 1300

SEQ ID NO: 5744 - protein, 206 aa, Neisseria meningitidis
MKNNDCFRLKNPQSGMALIEVLVAMLVLTIGILALLSVQLRTVASVREAETQTIVSQITQNLMEGMLMNPTIDSDSNKKNYNLYMGNHTLPHTLSAVDGDFAIDAMKTKGQLAEAQLKRFSYELKNALPDAAAIHYTVCKDSSGNAPTLSGSTFSQNCDGSANGDTLIKVLWVNDSAGDSDISRTNLEVSGDNIVYTYQARVGGRE

SEQ ID NO: 5745 - protein, 473 aa, Neisseria meningitidis
MDTKEILGYAAGSIGSAVLAVIILPLLSWYFPADDIGRIVLMQTAAGLTVSVLCLGLDQAYVREYYAAADKDTLFKTLFLPPLLSAAAIAALLLSHPSLPSEILFSLDDAAAGIGLVLFELSFLPIRFLLLVLRMEGRALAFSSAQLVPKLAILLLLPLTVGLLHFPANTAVLTAVYALANLAAAAFLLFQNRCRLKAVRRAPFSSAVLHRGLRYGIPIALSSIAYWGLASADRLFLKKYAGLEQLGVYSMGISFGGAALLFQSIFSTVWTPYIFRAIEENAPPARLSATAESAAALLASALCLTGIFSPLASLLLPENYAAVRFIVVSCMLPPLFCTLVEISGIGLNVVRKTRPIALATLGALAANLLLLGLAVPSGGARGAAVACAASFWLFFVFKTESSCRLWQPLKRLPLYMHTLFCLASSAAYTCFGTPANYPLFAGVWAAYLAGCILRHRKDLHKLFHYLKKQGFPL

SEQ ID NO: 5746 - protein, 156 aa, Neisseria meningitidis; identical to SEQ ID NO: 681

SEQ ID NO: 5747 - protein, 289 aa, Neisseria meningitidis
MSANEYAQIGWIGLGQMGLPMVTRLLDGGIEVGVYNRSPDKTAPISAKGTKVYGNTAELVRDYPVIFLMVSDYAAVCDILNGVRDGLAGKIIVNMSTISPTENLAVKALVEAAGGQFAEAPVSGSVGPATNGTLLILFGGSEAVLNPLQKIFSLVGKKTFHFGDVGKGSGAKLVLNSLLGIFGEAYSEAMLMARQFGIDTDTIVEAIGGSAMDSPMFQTKKSLWANREFPPAFALKHASKDLNLAVKELEQAGNTLPAVETVAASYRKAVEAGYGEQDVSGVYLKLAEH

SEQ ID NO: 5748 - protein, 262 aa, Neisseria meningitidis; identical to SEQ ID NO: 3749

SEQ ID NO: 5749 - protein, 445 aa, Neisseria meningitidis
MSNHTSWSSKIGFVLAAAGSAIGLGAIWKFPYTAGTNGGAVFFLLFLIFTVLVALPVQLAEFYIGRTGGQNAVDSFRALRPSTQWLWVGRMGVSACFILLSFYSVVGGWVLNYVVHSFTGAVHTGADFEALFGATISNPAGSLSYQALFMLITVWVVKGGISDGIEKANRYLMPGLFILFIALAIRSLTLPGAMEGVSFLLKPNWSYFKADTMITALGQAFFALSIGVSAMITYASYLGKDQDMFRSGHTIMWMNLLVSLLAGLVIFPAVFAFGFEPSQGPGLIFIVLPAVFMKMPFGTVLFAVFMLLVIFATLTSAFSMLETVIASTIRQDERKRKKHTWLIGTAIFIVGIPSALSFGVWGEFKVFGKTIFDLWDYVISAVIMPVGALSVAVFTAWIQDKQSVLKDAGAGSTVPRAVLLLWLNTLRYLAPIAIIIVFINSLDIL

SEQ ID NO: 5750 - protein, 321 aa, Neisseria meningitidis
MRRKMLNVPKGSYDGMKGFTIIEFLVAGMLSMIVLMAVGSSYFTSRKLNDAANERLAIQQDLRNAATLIVRDARMAGSFGCFNMSEHTEKNVVSDVAQKNRLFSLKGSSANKLIPNGTDNKLIPITESLDIGYQGFTQRLNALVFQYGIDDLDASAETVVVSSCSKIAKPGKKISTLQEAKSALQITNDDKQNGNITRQRYVVNAYAVGRIAGEEGLFRFQLDDKGKWGNPQLLVKKINKMDIRYIYVSDCPEDDDAGKEEKFKYTGTFDSSTNAVTPAGVEVLLSSGTDTKIAASSDNHIYAYRIDATIRGGNVCANRTL

SEQ ID NO: 5751 - protein, 123 aa, Neisseria meningitidis; identical to SEQ ID NO: 1296

SEQ ID NO: 5752 - protein, 140 aa, Neisseria meningitidis
MTDIFTTSKRSFVMSKIHSKETKPEILVRKFLFSQGFRYRKNDKRYAGKPDIVLPKYKTVVFIHGCFWYGHSCNKGHIPKSNTDFWLEKITKNCERDIKNETELEKIGFKVIVVWECELKNKAICRERLNRLVREIKDAV

SEQ ID NO: 5753 - protein, 117 aa, Neisseria meningitidis; identical to SEQ ID NO: 4163

SEQ ID NO: 5754 - protein, 259 aa, Neisseria meningitidis
MFFVLSPAKNLNEKDPAPVSEFTQPDLLAESDILMQQLRELAPQQIAELMHVSDKIALLNAQRNAAWHTPFTPENAKQAVFMFNGDVYEGMDANTLDIGQIRYLQNHVRLLSGLYGLLRPLDLMQPYRLEMGTAFANLRGKNLYEFWGDIITNLLNDTLAQAGSNTLVNLASQEYFKSVNTKKLRARLITPIFKDEKNGKYKIISFYAKRARGLMVRYAAEHHITDPEMLKNFNYEGYAFNDAASNESEWVFMRSEQIK

SEQ ID NO: 5755 - protein, 161 aa, Neisseria meningitidis
LLIQSALCFEAEAHEYTNIQEMEWVSLFSDPQRDDDSLITLKDEKITVKNYIVPWWKKGENFRKLELITTGKNDNGNLTVNGIYGIQSFADSQLGYTPELLVKSNNDILFKNNFQSVDVKPHSGNIHLDAKGKIQFNLNVPDVDGVQDVASGKKYRQTIVP

SEQ ID NO: 5756 - protein, 307 aa, Neisseria meningitidis
MKKRNNPLPLLNGVKPSYLVLPHEKQFYGLSLLHFLCIRFPFVGADDWRRRLNSGFVVGSDGAALDEHTLFEPGKVMFYYRETSSEDEPRIPFEEKILHIDEHLIVVDKPHFLPVIPGGRFLRETLLTRLRLRPELQHLNVEDITPLHRLDKDTAGVMLLSHNPATRGAYQTMFQNKTVWKTYEALAPTRTDLPYPLDVVSRLVRGEKFFTTQEAEGEPNAHTTVELIENRGEFSLYRLTPHTGKKHQLRVHMMGLGMPLLNDALYPVPSEAGSEDYRKPLKLLAKKIAFADPLSGRERVFCSRFCL

SEQ ID NO: 5757 - protein, 194 aa, Neisseria meningitidis
MHILTAGVDEAGRGPLVGSVFAAAVILPETFDLPGLTDSKKLSEKKRDTLAEMIKDQAAAWHVAAATPEEIASLNILHATMLAMKRAVDGLVVHPEKIFIDGNRIPEHLGIPAEAVVKGDSKIIEISAASVLAKTARDAEMYALAQRHPQYGFDKHKGYGTKQHLEALKQYGVLPEHRRDFAPVRNLLAQQALF

SEQ ID NO: 5758 - protein, 581 aa, Neisseria meningitidis; identical to SEQ ID NO: 2972

SEQ ID NO: 5759 - protein, 74 aa, Neisseria meningitidis
MDAVQELEHRITELEIQSALQEDVIAGLNAMVAELRQTLDLQQAQLRLLYQKMQDRNPDAQEPYSLRDEIPPHY

SEQ ID NO: 5760 - protein, 203 aa, Neisseria meningitidis
MRRTALLLLALTAGTSLAAGFSQKDTPINTRYRETPEEAAAREFKEHTAKLPPLPDTHSDGWFDIYVDENYGKQPKILLDSLQIMPAPDGSIRYILNIRSDKGYDNLTAEGIFCARFSIRFGNGKPSSYKVFGYGDTVNRRWIQPRNAEWKPIGGTLSRNDALRTVLYQAFCEGGVPADTKGLVQRLKERAGRYAPSIKPHNK

SEQ ID NO: 5761 - protein, 305 aa, Neisseria meningitidis; identical to SEQ ID NO: 1198

SEQ ID NO: 5762 - protein, 183 aa, Neisseria meningitidis
MKVLNGWSDRKMWRVLSALPIGVVFFDLIYGFVLNVLQGLDLQRAVPDSEGVLAVRPDIAFNSLQIVANGGMAAVVCFGLAVVFLLNRSVRRRQVLEIGVFRMLGLVAVLAFSAPSVWEWANALPLLLKGADVVNTGNARYVLTALCMPFPAVSCVIGLVGRFRLQTASGRAAKSGGAGKADG

SEQ ID NO: 5763 - protein, 165 aa, Neisseria meningitidis
MNNLPVADILIFAIIAACIVLSAMRGVIAEAGSMAAWVVSFFFAKLFAASFADLAFASFQPRLFALALSFISLFVIACLIQKMLRSLLTGAVSAVGLGFANRILGGVFGALKGVLIVTLLIMLASKTDLPDTEEWRQSYTLPFFVSLSEAVLNHSGGTAETPEDD

SEQ ID NO: 5764 - protein, 72 aa, Neisseria meningitidis
MSAVIRYTTQDGDRWDLIAHKHYGNALLIDGLIAANPHLPLAEEFVSGLTVFVPVLETKPKNNQEELPPWMR

SEQ ID NO: 5765 - protein, 123 aa, Neisseria meningitidis; identical to SEQ ID NO: 130

SEQ ID NO: 5766 - protein, 172 aa, Neisseria meningitidis
MNLPIQKFMMLFAAAISLLQIPISHANGLDARLRDDMQAKHYEPGGKYHLFGDGRGSVKNRVYAVQTFDATAVGPILPITHERTGFEGVIGYETHFSGHGHEVHSPFDHHDSKSTSDFSGGVDGGFTVYQLHRTGSEIHPEEQGIYTAIMSKELQQKQRLILSLKPHFQTVG

SEQ ID NO: 5767 - protein, 129 aa, Neisseria meningitidis
MKNVQKGFTLLELMIAVAILGILTLITYPSYKTYIRRIRLSEVKSTLLMNAQTMERYYRQKGTFENYDTNKLKQNKYFKITLSEVSPDHFTLQADPNPTTNDGETCVVTLNDGGTIAASGTNQSCPGFD

SEQ ID NO: 5768 - protein, 322 aa, Neisseria meningitidis
MELISPITYWNGKVLLDLDSLYTRPQNINPLYSSRCFGTIPSQSTTLILCILMASKPFLKWAGGKHKLVPFIEHNLPTPTRKRLIEPFCGSAALSLALDFEHYLLNDINADLIGLFRILKEEKSGFIDYARSFFISENNSDSRFYELREQFNFSKNLHERSALFIYLNRHAFNGLCRYNSKGVFNVPFGRYKSPYFPQQEMEGFIQKSDRVELMCGDFQMILSQTDNTDTVYCDPPYAPLSPTASFTTYAKESFNLDNQIRLAQSAQQIAPDSQGVLISNHDTEFTRDIYSFAILKTIEVQRNIAAKGSSRKKVGELLAIYD

SEQ ID NO: 5769 - protein, 292 aa, Neisseria meningitidis
VIMSFSIALPLVYLFIGILIGKTPFRKIKGTFSVILSRWIIPFVIVYNITTYRDGMQYVMLWMIISMGLIILIGKRVDKDPVWNLCLCYLNIGWLGLPIVATLFGDEAAQVLISAYVGSSLFGNSVGVGLLLNNSNFISGLKKTLKSPPVVALVIGVSGIPLGHFVADYFGEVYFFSKMAMGILGMVILGIWLAEIKLNLNDLKKSIKPFLIKNILFIGIVFLFIQIAAYFDLKLIIENQKTLYLIPLLPPAANIIVLETAYLKTGRSASMIAYGTIFSLIAISIYILLVQI

SEQ ID NO: 5770 - protein, 57 aa, Neisseria meningitidis
VIIPDLPGCYPVGDTVADALADTKAAAMFHLEGLLQENLPIPGAQSIKVHRDNPDYA

SEQ ID NO: 5771 - protein, 281 aa, Neisseria meningitidis
MRRPYTASLAALPYFYVNLPHCGIEMNFTDTHCHLADAALRENLPHILTAARKVGVKRFIVPATCPQDWQSVAELSEMPSEHGQIRIALGIHPWFSDGIAERDCVRLEAMLARYPQAWVGEIGLDFYDKTQTPPQRERQIQVFVRQLAIAQTLRRRVIIHNLKATADIAAAVKQTGFAQGGIVHAFSGSAEEARVLTKLGFKIGIGSLLLNPNARKVRDTLKALNDGDFVLETDSPFMLKKEINTPANILRIAEIAAQIRGVGVADIAAITERNADSLLRP

SEQ ID NO: 5772 - protein, 475 aa, Neisseria meningitidis; identical to SEQ ID NO: 2942

SEQ ID NO: 5773 - protein, 208 aa, Neisseria meningitidis
MTQERLPEFFDRAPTLTVQDPLAAFLGAAENGILTYRYADAVRLCGHSCPTVAGAYLMVIKGLKALYGEELPERGGIEAAMQGARDEGTVGVTASVVQLLTGAAPETGFGGIGMQGRFARRHLLSFGVGEINGTLTLRRKDNGKTVAVSLNAALKPFAPQMRDIMPKAVSGSASTDELKHFGQLWQARVKAFLTESADDPQFVIVREV

SEQ ID NO: 5774 - protein, 487 aa, Neisseria meningitidis; identical to SEQ ID NO: 2121

SEQ ID NO: 5775 - protein, 317 aa, Neisseria meningitidis
MNHKKIVVLDADTLPGRVFHFDFPHELAVYGTTGADETAERVHDAHVVITNKVMISADIIAANPQLELIAVSATGVNNVDIGAAKAAGVAVCNVRAYGNESVAEHAFMLMIALMRNLPAYQRDVAAGLWEKSPFFCHYGAPIRDLNGKTLAVFGRGNIGRTLARYAQAFGMGVVFAEHKHAPDVREGYVSFEDAVRTADVLSLHCPLNAQTENMIGENELQQMKPGAVLINCGRGGLVDENALLAALKYGQIGGAGVDVLTNEPPKNGNPLLNARLPNLIVTPHTAWASREALDRLFDILLANIHAFVKGEAQNRVV

SEQ ID NO: 5776 - protein, 193 aa, Neisseria meningitidis; identical to SEQ ID NO: 1600

SEQ ID NO: 5777 - protein, 144 aa, Neisseria meningitidis; identical to SEQ ID NO: 1668

SEQ ID NO: 5778 - protein, 247 aa, Neisseria meningitidis
MPDAVKKVYLIHGWGANRHVFDDLMPRLPATWPVSAVDLPGHGDAPFAQPFDIEAAADAVAAQIDTPADILGWSLGGLVALYLAARHPDKVRSLCLTASFARLTADEDYPEGLAAPALDKMVGAFRTDYAKHIKQFLQLQLLHTHDADGIIGRILPDLARCGTPSALQEALDAAERADARHLLDKIDVPVLLVFGSKDAITPPRMGEYLHRRLKGSRLVVMEKAAHAPFLSHAEAFAALYRDFVEGV

SEQ ID NO: 5779 - protein, 704 aa, Neisseria meningitidis
MDLLSVFHKYRLKYAVAVLTILLLAAIGLHASVYRIFTPENIRSRLQQSIAHTHRKISFDADIQRRLLPRPTVILKNLTITEPGGNRTAVSVKETKIGLGWKNLWSDRIQVEKWVVSGAELALTRDRKGVWNIQDLIDNPKRKASVNRIIIENSTVRLDLPQDRLTLKEVRLNLQSPDSSGQQFESSGILVWGKLSVPWKSRGLFLSDGIGTPKISPFHFEAETALNGHRIAVSTTGSPTIRFNAGGADAADLALRADTAFHNLHLTAQIPALALRNNGIKIETVNGAFTAGGEYARWDGSFKLDKANLHSGIANIGNAEISGSFKTPRHQTNFSLNSPLVWTENKGLDAPRLYVSTLQDTVNRLPQPRFISRLDGSLSVPNLQNWNAELNGTFDRQTVAAKFRYTHEDAPHLEAAVALQKLNLTPYLDDVRQQNGKIFPDTLAKLSGDIEAHLKIGKVQLPGLQLDDMETYLHADKGHIALSRFKSGLYGGHTEGGISIANTRPATYRLQQNASNIQIQPLLQDLFGFHSFSGNGDAVIDLTAGGETRKELIRSLQGSLSLNISNGAWHGIDMDNILKNGISGKTADNAASSTPFHRFTLNSEISDGISRHIDTELFSDSLYVTSNGYTNLDTQELSEDVLIRNAVHPKNKPIPLKITGTVDKPSITVDYGRLTGGINSRKEKQKILEDTLLEQWQWLKPKEP

SEQ ID NO: 5780 - protein, 99 aa, Neisseria meningitidis
MKKMFVLFCMLFSCTFSLAAVNINAASLQELEALPGIGPAKAKAIAEYRAQNGAFKSVDDLTKVKGIGPAVLAKLKDQASVGAPAPKGPAKPVLPADKK

SEQ ID NO: 5781 - protein, 99 aa, Neisseria meningitidis
MKKMFVLFCMLFSCAFSLAAVNINAASLQELEALPGIGPAKAKAIAEYRAQNGAFKSVDDLTKVKGIGPAVLAKLKDQASVGAPAPKGPAKPVLPADKK

SEQ ID NO: 5782 - protein, 99 aa, Neisseria meningitidis; identical to SEQ ID NO: 5781

SEQ ID NO: 5783 - protein, 464 aa, Neisseria meningitidis
MTVKTRFAPSPTGYLHIGGVRTALFSWAFARHHKGEFLLRIEDTDLARSTAESVNIILDGMEWVGLDYDNADNVVYQTRRFERYKEVIAELLAKGDAYYCYCSKEELEAMREKAEKEGTATYDRRWRPEAGKTLPEIPADVQPVVRFKTPLDGVTKWADLVKGEISIPNEALDDLIIARSDGSPTYNFCVVVDDYDMGVTHVIRGDDHVNNTPKQINILKAIGANLPEYGHLPMILNEQGKKISKRSGDTVAITDFGAMGILPEAMLNYLARLGWAHGDDEFFTMEQFIEWFDLKDVSPSPSRMDLKKLYWINGEHIKITPNGKLAELIKPRLALRDIHETEKPALEDVLALVKDRAQDLNALTDECLYFYKKQVPAEADVAKHWDDEAAARMLRFAERLEGLEDWNAEAIHDLFKPFCDEEGIKMGKLGMPLRLAVCGTAKTPSVDAVLALIGKEEVLKRIRA

SEQ ID NO: 5784 - protein, 685 aa, Neisseria meningitidis
MTRKILVTSALPYANGSIHLGHMVEHIQTDVWVRFQKLRGHECHYCCADDTHGTPVMLAAQKQGIAPEDMIAKVREEHLADFTGFFIGYDNYYSTHSPENKQFSQDIYRALKANGKIESRVIEQLFDPEKQMFLPDRFVKGECPKCHAQDQYGDNCEVCGTTYSPTELINPYSAVSGAKPELRESEHFFFKLGECADFLKAWTSGNNPHDGKPHLQAEALNKMKEWLGEGEETTLSDWDISRDAPYFGFEIPDAPGKYFYVWLDAPVGYMASFKNLCDRIGVDFDEYFKADSQTEMYHFIGKDILYFHALFWPAMLHFSGHRAPTGVYAHGFLTVDGQKMSKSRGTFITAKSYLEQGLNPEWMRYYIAAKLNSKIEDIDLNLQDFISRVNSDLVGKYVNIAARASGFIAKRFEGRLKDVADSALLAKLAAESDTIAEQYENREYARALRDIMALADAVNEYVDANKPWELAKQEGQDERLHEVCSELINAFTMLTAYLAPVLPQTAANAAKFLNLEAITWANTRETLGKHAINKYKHLMQRVEQKQVDDLIEANKQSIAAAAAPAAEEGKYEKVAEQASFDDFMKIDMRVAKVLNCEAVEGSTKLLKFDLDFGFEKRIIFSGIAAFYPNPAELNGRMVIAVANFAPRKMAKFGVSEGMILSAATADGKLKLLDVDTGAQPGDKVG

SEQ ID NO: 5785 - protein, 441 aa, Neisseria meningitidis
MKKYLFRAALYGIAAAILAACQSKSIQTFPQPDTSVINGPDRPVGIPDPAGTTVGGGGAVYTVVPHLSLPHWAAQDFAKSLQSFRLGCANLKNRQGWQDVCAQAFQTPVHSFQAKQFFERYFTPWQVAGNGSLAGTVTGYYEPVLKGDDRRTAQARFPIYGIPDDFISVPLPAGLRSGKALVRIRQTGKNSGTIDNTGGTHTADLSQFPITARTTAIKGRFEGSRFLPYHTRNQINGGALDGKAPILGYAEDPVELFFMHIQGSGRLKTPSGKYIRIGYADKNEHPYVSIGKYMADKGYLKLGQTSMQGIKSYMRQNPQRLAEVLGQNPSYIFFRELTGSGNDGPVGALGTPLMGEYAGAVDRHYITLGAPLFVATAHPVTRKALNRLIMAQDTGSAIKGAVRVDYFWGYGDEAGELAGKQKTTGYVWQLLPNGMKPEYRP

SEQ ID NO: 5786 - protein, 338 aa, Neisseria meningitidis
MTVLITGGTGFIGSHTAVSLVQSGYDAVILDNLCNSSAAVLPRLRQITGRNIPFYQGDIRDRQILRQIFSEHEIESVIHFAGLKAVGESVAEPIKYYDNNVSGSLVLAEEMARAGVFSIVFSSSATVYGDPGKVPYTEDMPPGDTTSPYGASKSMVERILTDIQKADPRWSVILLRYFNPIGAHESGLIGEQPNGIPNNLLPYICQVASGRLPQLSVFGGDYPTPDGTGMRDYIHVMDLAEGHIAAMKAKGGVAGVHLFNLGSGRAYSVLEIIRAFEAASGLNIPYQIQPRRAGDLACSFADPSHTKQETGWETKRSLAQMMEDSWRWVSRNPNGYGD

SEQ ID NO: 5787 - protein, 463 aa, Neisseria meningitidis
MTPSALKKTVLLLGTAFAAASVHASGYHFGTQSVNAQSTANAAAAEAADASTIFYNPAGLTKLDSSQISVNANIVLPSIHYEADSATDFTGLPVQGSKSGKITKTTVAPHIYGAYKVNDNLTVGLGVYVPFGSATEYEKDSVLRHNINKLGLTSIAVEPVAAWKLNERHSFGAGIIAQHTSAELRKYADWGIMEKAKALKETPPNPTKAAQIKADGHADVKGSDWGFGYQLAWMWDINDRARVGVNYRSKVSHTLKGDAEWAADGAAAKAMWSTMLAANGYTANEKARVKIVTPESLSVHGMYKVSDKADLFGDVTWTRHSRFDKAELVFEKEKTIVNGKSDRTTITPDWRNTYKVGFGGSYQISEPLQLRAGIAFDKSPVRNADYRMNSLPDGNRIWFSAGMKYHIGKNHVVDAAYTHIHINDTTYRTAKASGNDVDSKGASSARFKNHADIIGLQYTYKFK

SEQ ID NO: 5788 - protein, 185 aa, Neisseria meningitidis; identical to SEQ ID NO: 357

SEQ ID NO: 5789 - protein, 199 aa, Neisseria meningitidis; identical to SEQ ID NO: 3649

SEQ ID NO: 5790 - protein, 105 aa, Neisseria meningitidis; identical to SEQ ID NO: 3792

SEQ ID NO: 5791 - protein, 394 aa, Neisseria meningitidis
MTPQVLTILGSTGSIGESTLDVVSRHPEKFRVFALAGHKQVEKLAAQCQTFRPEYAVVADAEHAARLEALLKRDGTATQVLHGAQALVDVASADEVSGVMCAIVGAVGLPSALAAAQKGKTIYLANKETLVVSGALFMETARANGAAVLPVDSEHNAVFQVLPRDYAGRLNEHGIASIILTASGGPFLTADLNTFDSITPDQAVKHPNWRMGRKISVDSATMMNKGLELIEAHWLFNCPPDKLEVVIHPQSVIHSMVRYRDGSVLAQLGNPDMRTPIAYCLGLPERIDSGVGDLDFDALSALTFQKPDFDRFPCLKLAYEAMNAGGVAPCVLNAANETAVAAFLDGQIKFTDIAKTVAHCLAQDFSDGIGDIGGLLAQDARTRAQARAFIGTLR

SEQ ID NO: 5792 - protein, 375 aa, Neisseria meningitidis; identical to SEQ ID NO: 3405

SEQ ID NO: 5793 - protein, 185 aa, Neisseria meningitidis
MINDIQKTAEGKMQRSVEVLKENLAKVRTGRAHTGLLDQVEVEYWGSMVPVSQVANVTLLDARTIGVKPFEGNMAAKVEKAIRDSNLGLNPAAVGDLIRVPMPMLTEERRKDLIKVVRGEAEEGRVSIRNVRRDANDHIKKLLKDKEISEDEARRGEEAVQKLTDKYITEADKLLTAKEEDLMAI

SEQ ID NO: 5794 - protein, 628 aa, Neisseria meningitidis
MIYPKTYDVIVVGGGHAGTEAALAAARMGAQTLLLTHNIETLGQMSCNPSIGGIGKGHLVRELDALGGAMALATDKSGIQFRRLNASKGAAVRATRAQADRILYKAAIREMLENQENLDLFQQAVEDVTLDGERISGVITAMGVEFKARAVVLTAGTFLSGKIHIGLEHYEGGRAGDPAAKSLGGRLRELKLPQGRLKTGTPPRIDGRTIDFSQLTEQPGDTPVPVMSVRGNAEMHPRQVSCWITHTNTQTHDIIRSGFDRSPMFTGKIEGVGPRYCPSIEDKINRFADKDSHQIFLEPEGLTTHEYYPNGISTSLPFDIQIALVRSMKGLENAHILRPGYAIEYDYFDPRNLKASLETKTIEGLFFAGQINGTTGYEEAAAQGLLAGANAVQYVRGQDPLLLRREQAYLGVLVDDLITKGVNEPYRMFTSRAEYRLQLREDNADMRLTEDGYKIGLVGEAQWRMFNEKREAVEREIQRLKTTWYTPQKLAEDEQIRVFGQKLSREANLHDLLRRPNLDYAALMTLEGAMPSENLSAEVIEQVEIQVKYQGYIDRQNEEIDSRRDIETLKLPDGIDYGKVKGLSAEVQQKLNQHKPETVGQASRISGVTPAAVALLMVHLKRGFKDAK

SEQ ID NO: 5795 - protein, 919 aa, Neisseria meningitidis
MKRMLFNATQAEELRVAIVDGQNLLDLDIETLGKEQRKGNIYKGIITRIEPSLEACFVDYGTDRHGFLPFKEVSRSYFRDYEGGRARIQDVLKEGMEVIVQVEKDERGNKGAALTTFISLAGRYLVLMPNNPRGGGVSRRIEGEERQELKAAMAELDIPNGMSIIARTAGIGRSAEELEWDLNYLKQLWQAIEEAGKAHHDPYLLFMESSLLIRAIRDYFRPDIGEILVDNQEVYDQVSEFMSYVMPGNIGRLKLYEDHTPLFSRFQIEHQIESAFSRSVSLPSGGAIVIDHTEALVSIDVNSARATRGADIEDTAFKTNMEAAEEVARQMRLRDLGGLVVIDFIDMENPKHQRDVENVLRDALKKDRARVQMGKLSRFGLLELSRQRLKPALGESSHVACPRCAGTGVIRGIESTALHVLRIIQEEAMKDNTGEVRAQVPVDVATFLLNEKRAELFAMEERLDVNVVLIPNIHLENPHYEINRIRTDDVEEDGEPSYKRVAEPEEDESAKPFGGEKAKAARPEPAVKGVRHTSPAPTAAPEKKTSWWDSFKAWLKRIFGGSETQAAPAAETSEKRSTANRSGSRANNRRQNPRRSKREGSKVEVREVAGKTAGQEARADKAETRNNGNRRRNERGDRAAGRADEAEIQDRNIQPAATVADAAPSETEVQTGKRRRNGSRSERGQTAPETATVAETTVQTAENTPSEPHTAEDKGSKPKSERNRRERDSRDAKERRERNNQRDRRQNGKKRNIPSAAKIEQYLNIHDTADKVRSAAAHVFGETDANAPITVSIADPVAERDLPTASPAVSNGDAPVYDAAEKIRRATAAILPEGATPKAEAQEMPSETATFTAAAEQARETAQTGGLVLIETDPAALKAWAAQPEVQAGRGLRRSEQPKPSEVATVPAEEMIQVETRQG

SEQ ID NO: 5796 - protein, 125 aa, Neisseria meningitidis
VNKTLILALSALLGLAACSAERVSLFPSYKLKIIQGNELEPRAVAALRPGMTKDQVLLLLGSPILRDAFHTDRWDYTFNTSRNGIIKERSNLTVYFENGVLVRAEGDALQNAAEALKDRQNTDKP

SEQ ID NO: 5797 - protein, 658 aa, Neisseria meningitidis
MNEFSLAPIVIVLLVSVITVILCRKFNIPSMLGYLLVGFLAGPGMLSLIPKSHATDYLGEIGIVFLMFSIGLEFSLPKLRAMRRLVFGLGGLQVGVTMLSVMGILMLTGVPFNWAFAVSGALAMSSTAIVSRILSEKTELGQPHGQMAMGVLLMQDIAVVPLMILIPALAGGGDGNIWAALGLAFAKMLLTLGLLFFVGSKIMSRWFRMVAKRKSSELFMINVLLVTLGVAYLTELEGLSMALGAFVAGMLLSETEYRFQVEDDIRPFRDILLGFFFITVGMKLDIQALIGGWRQVLMLLAMLLVLKALVVFAIAFKMKHSVGDSLKTALYLAQGGEFGFVMLAIAGQLDMVSPEWEQAATAAVLLSMIIAPFLLGGSDALVGRLVKSSWDMKSLDLHSMLVETMSKSDHVLIVGFGRGGQTVGRVLAQEDIPYFALDLDIARVQVARSAGEPVSFGDAKRREVLEAAGLGRAKMVVVTLNNMHETQHVLDNVLSMYPNMPVYVRATNDDYVKTFTDIGAEEAVSDTKETGLVLAGYAMLGNGASYRHVYQTMANIRHSRYAALEGLFVGSDDEAGFGETGETVRHAFPLAAEAYAVGKTVGTLPMAAYGIKLLFVRRRTGRIENPDASFTLEGGDVLVVAGKKEEIISFENWSLQGI

SEQ ID NO: 5798 - protein, 454 aa, Neisseria meningitidis
FKIGIGPSSSHTVGPMKAAAAFAAGLDAQAVRIVIDIYGSLALTGYGHGTFDALMLGLEGSLPHDIPLAGIPERLERIRTQHILRLNGQEIRFIPDRDLNILGNQVLPKHPNGLRFTAYASDGTVLNEQVYYSVGGGFVVTEEDFDRQAETEKAVPYPYTSCAELLARCRLNRLDISEVVLANEAALAGCGEAEIRRRAAAVAEVMEGCIKRGLGADGELPGGLNVRRRAPQLAAKLKVLRETEIVNTQLWPMVYAMAVNEENAAGGRVVTAPTNGAAGIIPAVLHYFRKFNPHATQERVENFLLTAGAIGILYKTNASISGADVGCQGEVGVACSMAAGAYAEVIGGTPKQVENAAEMAMEHHLGLTCDPVGGLVQIPCIERNGIAAEKALKLGTLALLEDGTDKKVSLDEVIRTMLQTGRDMKATYKETSLAGLAATLRKKAVPVSARVVEC

SEQ ID NO: 5799 - protein, 307 aa, Neisseria meningitidis; identical to SEQ ID NO: 3808

SEQ ID NO: 5800 - protein, 290 aa, Neisseria meningitidis
MEIWNMLDTWLGAVPIRAEAVESVAVVAALLLARALLLNIHFRRHPDFSIESKRRFLVASRNITLLLVLFSLAFIWSAQIQTLALSMFAVAAAVVVATKELIMCLSGSILRSATQQYSVGDYIEINGLRGRVVDINLLNTLMMQVGPNPLVGQLAGTTVSFPNSLLLSHPVRRDNILGDYVIHTVEIPVPIHLDSDEVVCRLKAVLEPLCAPYIPAIQRHLENVQAEKLFITPAARPRVTRVPYDDKAYRIIVRFASPVSKRLEIQQAVMDEFLRVQYRLLNHPAGSETL

SEQ ID NO: 5801 - protein, 42 aa, Neisseria meningitidis
MNEQDLDLDNLDNLLEDFDGVTVEGGVDSENDDGCEGGACKI

SEQ ID NO: 5802 - protein, 483 aa, Neisseria meningitidis
MLSFLSGLLSLGIEVLWVRMFSFAAQSVPQAFSFTLACFLTGIAVGAYFGKRICRSRFVDIPFIGQCFLWAGIADFLILGAAWLLTGFSGFVHHAGIFITLSAVVRGLIFPLVHHVGTDGNKSGRQVSNVYFANVAGSALGPVLIGFVILDFLSTQQIYLLICLISAAVPLFCTLFQKSLRLNAVSVAVSLMFGILMFLLPDSVFQNIADRPDRLIENKHGIVAVYHRDGDKVVYGANVYDGAYNTDVFNSVNGIERAYLLPSLKSGIRRIFVVGLSTGSWARVLSAIPEMQSMIVAEINPAYRSLIADEPQIAPLLQDKRVEIVLDDGRKWLRRHPDEKFDLILMNTTWYWRAYSTNLLSAEFLKQVQSHLTPDGIVMFNTTHSPHAFATAVHSIPYAYRYGHMVVGSATPVVFPNKELLKQRLSRLIWPESGRHVFDSSTVDAAAQKVVSRMLIQMTEPSAGAEVITDDNMIVEYKYGRGI

SEQ ID NO: 5803 - protein, 618 aa, Neisseria meningitidis
MLNKIFSWFESRIDPYPEAAPKTPEKGLWRFVWSSMAGVRKWIAALAALTAGIGIMEALVFQFMGKIVEWLGKYAPAELFAEKGWELAAMAAMMVFSVAWAFAASNVRLQTLQGVFPMRLRWNFHRLMLNQSLGFYQDEFAGRVSAKVMQTALALRDAVMTVADMVVYVSVYFITSGVILASLDSWLLLPFIGWIVGFASVMRLLIPKLGQTAAWQADARSLMTGRITDAYSNIATVKLFSHGAREAAYAKQSMEEFMVTVRAQMRLATLLHSCSFIVNTSLTLSTAALGIWLWHNGQVGVGAVATATAMALRVNGLSQYIMWESARLFENIGTVGDGMATLSKPHTILDKPNALPLNVPQGAIKFEHIDFCYEAGKPLLNGFNLTIRPGEKVGLIGRSGAGKSTIVNLLLRFYEPQSGTVSIDGQDISGVTQESLRAQIGLVTQDTSLLHRSVRDNIIYGRPDATDAEMVSAAERAEAVGFIPDLSDAKGRRGYDAHVGERGVKLSGGQRQRIAIARVMLKDAPILLLDEATSALDSEVEAAIQESLDKMMDGKTVIAIAHRLSTIAAMDRLVVLDKGRIIEEGTHAELLEKRGLYAKLWAHQSGGFLNEHVEWQHD

SEQ ID NO: 5804 - protein, 792 aa, Neisseria meningitidis
VLALGLCFGTHCAAADAVAAEETDNPTAGGSVRSVSEPIQPTSLSLGSTCLFCSNESGSPERTEAAVRGSGEASIPEDYTRIVADKVEGQSQVQVRAEGNVVVERNRTTLNTDWADYDQSGDTVTAGDRFALQQDGTLIRGETLTYNLEQQTGEAHNVRMETEHGGRRLQSVSRTAEMLGEGHYKLTETQFNTCSAGDAGWYVKAASVEADREKGIGVAKHAAFVFGGVPIFYTPWADFPLDGNRKSGLLVPSLSAGSDGVSLSVPYYFNLAPNLDATFAPSVIGERGAVFDGQVRYLRPDYAGQSDLTWLPHDKKSGRNNRYQAKWQHRHDISDTLQAGVDFNQVSDSGYYRDFYGNKEIAGNVNLNRRVWLDYGGRAAGGSLNAGLSVLKYQTLANQSGYKDKPYALMPRLSADWRKNTGRAQIGVSAQFTRFSHDSRQDGSRLVVYPDIKWDFSNSWGYVRPKLGLHATYYSLNRFGSQEARRVSRTLPIVNIDSGATFERNTRMFGGGVLQTLEPRLFYNYIPAKSQNDLPNFDSSESSFGYGQLFRENLYYGNDRINTANSLSAAVQSRILDGATGEERFRAGIGQKFYFKDDAVMLDGSVGKKPRNRSDWVAFASGSIGSRFILDSSIHYNQNDKRAENYAVGASYRPAQGKVLNARYKYGRNEKIYLKSDGSYFYDKLSQLDLSAQWPLTRNLSAVVRYNYGFEAKKPIEVLAGAEYKSSCGCWGAGVYAQRYVTGENTYKNAVFFSLQLKDLSSVGRNPADRMDVAVPGYIPAHSLSAGRNKRP

SEQ ID NO: 5805 - protein, 65 aa, Neisseria meningitidis
MPYDLSKRLVIGLASSVLFDLSESDNIFRTEGAETYRQYQREKQNHPLKKALSFHLSKNFCQSMK

SEQ ID NO: 5806 - protein, 174 aa, Neisseria meningitidis
MEMKQMLLAVGVAAVLAGCGKDAGGYEGYWREKSDKKEGMIAVKKEKGNYFLNKINVVTGKEESMLLSEKDGELSINTGIGEIPIKLSDDGKELYVERRQYVKTDAAMKDKIIAHQKKCGQTAQAYLDARNALPSNQTYQQRQAAIEQLKRRFEAEFDELEKEIKCNGKPTLLL

SEQ ID NO: 5807 - protein, 316 aa, Neisseria meningitidis
MTKQEKQEDREKKYKIISLFSGCGGMDLGFLGGFEFLNRTYDKHDFDIIWANEIDEHAVRTYRHNLGNHIVHGDIWQYLDEIPTSADIIIGGFPCQDISINGKGAGISGSRSGLYKAMLSAVERVRPKIFVAENVKGLLMKHHRKDLETVLSDFRNLGYQVDYYLLNAADYGVPQTRERVIIVGRLPEIPEIQIEKTNTSNSYVTARQAIGDLVDKVEDEIANHIWSRAEKSPDQGSRKLDAERAGYTIRAECHGNIQWHYELPRRISMREAARIQSFPDNFIFQAKLRATERQIGNAVPPVLGWHIAAAVSKALK

SEQ ID NO: 5808 - protein, 467 aa, Neisseria meningitidis
MNNPDLPYRQTLECLSQKQYNFTEVRRLLTEAALAGHPAAAFELAKHLMDADSPYQDREQGMEMLRIAAEQGHPYARYNLAYIQELEGAPPETLIPLYRPLAEEGLPEAQVRLMYLLYASRHFEEALKWAKTSAKNNNPHGQYLLAQYCRYGTPPDFETAHLLYRKAAAQGLAAAHWQLGLQYRFGQGTKADTAQAVNHLRAAAQQGYIPAYTPLAELILPTAPDEAVHWFQQAAQENDPDAHAALADIYLQGKHPERNYKLALHHAEAAAAERHPEGLRILGDIYRYGLGMTSDKEKALHYYRQAAEAGSLAAHQKLISDSALNHPEQYSGIKDSAIRWQRAEQLYQKAQALHYGLQCAPEYAAALKLYTEAAELGHSKAQTNLGSMYYFGQGMTADYNEARKWFEKAAAKKDSMAFYNLACIHYSGHGVGPDKEKACRYLQEAINNGYGQKSVLQELLQQWQNAV

SEQ ID NO: 5809 - protein, 109 aa, Neisseria meningitidis
MKTPLPICTLSALAACALSGQGGSRVYGEIKARDLCVTAPIRRQQGLRRNQSPRPLRYRSYPAFCFLSCLLSLSQAFLQARLHVGKHCTLSAFFSCCGWWFRLALYALH

SEQ ID NO: 5810 - protein, 96 aa, Neisseria meningitidis
LKVPAKRYFTLDELCGLLQISPYGFAQWQHDHGVVVGYGGERYTRLDVVKLLKLQSTFAPYAEGAESGSDGNRPVTLQEIGDGLKELLADLDKELC

SEQ ID NO: 5811 - protein, 257 aa, Neisseria meningitidis
MNTIADVQSSRDLRNLPINQVGIKDLRFPITLQTAEGIQSTVARLTMTVYLPAEQKGTHMSRFVALMEQHSEALDFAQLHRLTAEMVALLDSRAGKISVSFPFFRKKTAPVSGIRSLLDYDVCLTGEMKDGAYGYSMKVMIPVTSLCPCSKEISQYGAHNQRSHVTVSLTADAEVGIEEVIDYVEAQASCQLYGLLKRPDEKYVTEKAYENPKFVEDMVRDVATSLIADKRIKSFVVESENFESIHNHSAYAYIAYP

SEQ ID NO: 5812 - protein, 385 aa, Neisseria meningitidis
MKFATKAIHSSYDCDEHNRALMPPIYQNSMFTLHEIGENVPYRYSRLSNPTRQILEDTVADLEHGAAGFAFSSGMAGIDAVWRTFLQPGDTIVAVADIYGGAYDLLVDVYQKWGVNVVFADLGNPDNLDELLKAHKVKLVWLETPSNPLLRLVDIKALAAKAKATGALVGIDNTFATPYLQQPLDMGCDFVFHSATKYLCGHSDVLMGIVVAKTKELAQPLHDMMVHTGAIAGPMDCWLVLRGIKTLALRMEAHCKNALEIARRLEDHPAIEKVFHPGLPSHEHYELAQAQMPKGIGGVVTVYLKNDTREAANSVIKNMKLVKMASSLGGVESLVNHCYSQSHSGVPHNVKMEMGIKVGLLRFSIGIEDADDIWNDISAALDTTL

SEQ ID NO: 5813 - protein, 371 aa, Neisseria meningitidis
MGLKKACLTVLCLIVFCFGIFYTFDRVNQGERNAVSLLKDKLFNEEGEPVNLIFCYTILQMKVAERIMAQHPGERFYVVLMSENRNEKYDYYFNQIKDKAERAYFFHLPYGLNKSFNFIPTMAELKVKAMLLPKVKRIYLASLEKVSIAAFLSTYPDAEIKTFDDGTGNLIQSSSYLGDEFSVNGTIKRNFARMMIGDWSIAKTRNASDEHYTIFKGLKNIMDDGRRKMTYLPLFDASELKAGDETGGTVRILLGSPDKEMKEISEKAAKNFNIQYVAPHPRQTYGLSGVTTLNSPYVIEDYILREIKKNPHTRYEIYTFFSGAALTMKDFPNVHVYALKPASLPEDYWLKPVYALFTQSGIPILTFDDKD

SEQ ID NO: 5814 - protein, 68 aa, Neisseria meningitidis
MFDGAKVVRRMEGNLWVFGMVALEKTCFKGQMPSENRFQTAFSVYLKQTGKGSNILQSSYSHKRFIVN

SEQ ID NO: 5815 - protein, 125 aa, Neisseria meningitidis
MCELKNFRRNITCFEGYDENSFIGKWYDDGVWDDEEYWKLENDLIEVRKKYPYPMDIPRDIVIGISTIIDFLMVPNWELFEIKASPWLPDSVGIHERYERFTTMLRYIFTEKDIVNVRFDYYNKK

SEQ ID NO: 5816 - protein, 104 aa, Neisseria meningitidis
MINHIEKYIGTISHGSKSDLGSQYKLNIAAIPSSPNRDLKTYITLGLSKYNLNYKSRFEILFVCSLKYDENQIFPFLRWLAETIIENKKILLRGAGCLFAQKHC

SEQ ID NO: 5817 - protein, 160 aa, Neisseria meningitidis; identical to SEQ ID NO: 1762

SEQ ID NO: 5818 - protein, 124 aa, Neisseria meningitidis; identical to SEQ ID NO: 3797

SEQ ID NO: 5819 - protein, 553 aa, Neisseria meningitidis
MTESITRDSMQYDVVIVGAGPSGLSAAIKLKQLAEKNGREISVCVVEKGSEAGAHSLAGAVIDPIALNELIPDWKEKGAPLTRAVTQDKVLFLTEKKAFNLPITPNFDNHGNYIVSLGEVVRWLAEQAENMGVEIYPGFAAAEVLYHEDGSVKGIATGNMGIGKDGEPTDSFQPGMELWAQQTLFAEGCRGSLSKQIIERFKLDQNSQPQTYGLGIKEVWEVPSEQHQPGLVVHSAGWPLDSKTYGGAFVYHFDDNKVAVGFVVGLDYQNPYLSPFEEFQRFKTHPEIRKTFEGGRRIAYGARSLIEGGLQSLPKLSFKGGILVGDAAGFLNMPRIKGIHTAMKSAMLAAEAVFPLLENLEEVEGFDSGKEAADYQQRFEQSWLYQELYAARNVRPSFKWGVYLGSIYTGIDQMIFRGKAPWTLKHHGKDNEQLKKAAACKPIDYPKPDGVLTFDRLSSVFLANLAHEENQPDHLVLNNPQTMIDVNYKEYASPETRYCPAGVYEIVEENGNPRLQINAANCVHCKTCDIKDPTQNITWICPEGASGPNYGGM

SEQ ID NO: 5820 - protein, 162 aa, Neisseria meningitidis; identical to SEQ ID NO: 911

SEQ ID NO: 5821 - protein, 408 aa, Neisseria meningitidis
MTFLQRLQGLADNKICAFAWFVVRRFDEERVPQAAASMTFTTLLALVPVLTVMVAVASIFPVFDRWSDSFVSFVNQTIVPQGADMVFDYINAFREQANRLTAIGSVMLVVTSLMLIRTIDNTFNRIWRVNSQRPWMMQFLVYWALLTFGPLSLGVGISFMVGSVQDAALASGAPQWSGALRTAATLTFMTLLLWGLYRFVPNRFVPARQAFVGALATAFCLETARSLFTWYMGNFDGYRSIYGAFAAVPFFLLWLNLLWTLVLGGAVLTSSLSYWQGEAFRRGFDSRGRFDDVLKILLLLDAAQKEGKALPVQEFRRHINMGYDELGELLEKLARYGYIYSGRQGWVLKTGADSIELSELFKLFVYRPLPVERDHVNQAVDAVMMPCLQTLNMTLAEFDAQAKKQQQS

SEQ ID NO: 5822 - protein, 105 aa, Neisseria meningitidis
MVVRGGIYLVSLDQTVGSEIKKTRPCVVVSPPEIHNYLKTVLIVPMTSGSRPAPFRVNVRFQDKDGLLLPEQIRAVDKAGLVKHLGNLDNSTAEKLFAVLQEMFA

SEQ ID NO: 5823 - protein, 91 aa, Neisseria meningitidis
MQWSIETEWLGLNVIAHRNFGKQHAQVEFEAYFRDGQHRSAHHELSGFVNIGGQWYFIDPTVPHPAMKQPCICGSGKKFKACCGKYLKPVA

SEQ ID NO: 5824 - protein, 71 aa, Neisseria meningitidis; identical to SEQ ID NO: 1785

SEQ ID NO: 5825 - protein, 451 aa, Neisseria meningitidis
MSDFFHSDVLSVSELNAFAKSILENHLAGLWIAGEVSNLTRAASGHYYFSLKDSRAQVRCAMFKGAAARLAKPLKEGDHIEVSGKISIYEARGEFQITVNEVRLKGLGQLYEAYERLKAQLQAEGAFAAERKKPLPARPQCIGIVTSLAAAALRDVVTTLKRRAPEIPVIVYPTVVQGTGSELQIAQAIKTASQRAECDVLIVCRGGGSIEDLWAFNEEPVVRAIEACTVPVVSGVGHETDFTLADFVADVRAPTPTGSAELVSPNRQESLHRLAQVQGRLKTVLEQRYFDASQKLDWLARQIRHPRQKLDEQRASIGKLAQTLSYSMKQNLRAHTARFERQTQALKHCRPDVSVYKHNIDRFQTALSHAFHQLLTHRRQSLTAQAALLEAVSPQHILERGFSVVKNTRGQVIRNADVLKQGQKLHIIFADGETDVRVSKEQGQQDLFDCI

SEQ ID NO: 5826 - protein, 92 aa, Neisseria meningitidis; identical to SEQ ID NO: 3856

SEQ ID NO: 5827 - protein, 168 aa, Neisseria meningitidis
LKVVPERTVSADAKTRDPMWDNAALQTSEGVNFIARFLGFFSDGEYRYVDVLQPNHSDIIRYSDKDFPLNQTLNHIHPARYAVTFENNVDSKLRRHWVAGATIRIIDRQTDEVIAKKTIYVFEKGLDGTGGARMPWKFAILCNKERLTSSEPLSDFVLSVLKPYILRP

SEQ ID NO: 5828 - protein, 558 aa, Neisseria meningitidis
MLTYTPPDARPPAKTHEKPWLLLLMAFAWLWPGVFSHDLWNPAEPAVYTAVEALAGSPTPLVAHLFGHADFGIPPVYLWVAAAFKHLLSPWAADPYDAARFAGVFFAVVGLTSCGFAGFNFLGRHHGRSVVLILIGCIGLIPTVHFLNPAAAAFAAAGLVLHGYSLARRRVIAASFLLGTGWTLMSLAAAYPAAFALMLPLPVLMFFRPWQSRRLMLTAVASLAFALPLMTVYPLLLAKTQPALFAQWLDDHVFGTFGGVRHVQTAFSLFYYLKNLLWFALPALPLAVWTVCRTRLFSTDWGILGVVWMLAVLVLLAVNPQRFQDNLVWLLPPLALFGAAQLDSLRRGAAAFVNWFGIMAFGLFAVFLWTGFFAMNYGWPAKLAERAAYFSPYYVPDIDPIPMAVAVLFTPLWLWAITRKNIRGRQAVTNWAAGVTLTWALLMTLFLPWLDAAKSHAPVVRSMEASLSPELKRELSDGIECIDIGGGDLHTRIVWTQYGTLPHRVGDVQCRYRIVRLPQNADASQGWQTVWQGARPRNKDSKFALIRKIGENILKTTD

SEQ ID NO: 5829 - protein, 273 aa, Neisseria meningitidis
VNRTAFCCLSLTAALILTACSSGGGGVAADIGAGLADALTAPLDHKDKSLQSLTLDQSVRKNEKLKLAAQGAEKTYGNGDSLNTGKLKNDKVSRFDFIRQIEVDGQLITLESGEFQIYKQDHSAVVALQIEKINNPDKTDSLINQRSFLVSGLGGEHTAFNQLPGGKAEYHGKAFSSDDPNGRLHYSIDFTKKQGYGRIEHLKTPEQNVELAAAELKADEKSHAVILGDTRYGSEEKGTYHLALFGDRAQEIAGSATVKIGEKVHEIGIAGKQ

SEQ ID NO: 5830 - protein, 142 aa, Neisseria meningitidis
MTENAQDKARQAVETVVKSPLVEQILSDEYVQIMIARRFHSGSLPPPSDLAQYNDIISNGADRIMAMAEKEQAVRHETIRQDQTFNRRGQLYGFISVILILLFAVFLVWSGYPATAASLAGGTVFALACAFVIGRSRDQGKN

SEQ ID NO: 5831 - protein, 180 aa, Neisseria meningitidis
MINHIEKYIGTISHGSKSDLGSQYKLNIAAIPSSPNRDLKTYITLGLSKYNLNYKSRFEILFVCSLKYDENQIFPFLRWLAETIIENKKILLRGQVVYLPRSIVNSTKMDALYVSAPFYFDDDFQVCYGEHYNIVFPLLVPLYKQEAELVEKKGWNAFEQFLLDNEVDNLSDMNRKPFAW

SEQ ID NO: 5832 - protein, 161 aa, Neisseria meningitidis
MPIEKQKEKSMVDAVVKTPEFLPFTSVGIFRFGADITEYKNILETFMYEPPDEFRTEYYESPDSNLLISVKKNKIISIFCYQELYFMGVNIIGLNFEDFKQLFHHPKSYGVDKYYLSNESYPTYVYEFDEIGVQAWEAKGKIVTIIAGGKDNYSTEPYYDE

SEQ ID NO: 5833 - protein, 346 aa, Neisseria meningitidis
MKAMVYHGANDIRFEEKPRPQIIDPTDAVVKIVKTTICGTDLGIWKGKKTEVADGRILGHESIGIVEEVGDAVKNIKVGDKVIISCVSKCCTCDNCKIQLYSHCRNGGWILGYMIDGTQAEYVRTPYADNSLVPLPDNVNEEVALLLSDALPTAHEIGVQYGDVKPGDTVFIAGAGPVGMSALLTAQLYSPAAIIVCDMDENRLKLAKELGATHTVSPASGDVSKQVFAIVGEDGVDCAIEAVGIPATWNMCQDIVKPGGHIAVVGVHGQSVDFKLEKLWIKNLAITTGLVNANTTEMLMKAISSSSVDYTKMMTHRFKFSELEKAYDVFKHAAENQAMKVVLEAD

SEQ ID NO: 5834 - protein, 194 aa, Neisseria meningitidis
MNNMFAAKLSKLVYTASDHPDSLSEMEEFDRLILLIRKLYQILDGQHILSRVTVCLHHQNRRLIALDKAAAGCDAAMLRAQRWRIYTQIAERLSGSGGGFTVTAESVSAACPELEGRYLELVRRAAVSFGFTQGWENPAGGQEKTQAVPDAASGHSVRKPIKINIEAKVERYPAYRPTAALKVTRRRFFRLQNR

SEQ ID NO: 5835 - protein, 219 aa, Neisseria meningitidis
MDRHFGRRRFLTVAAVAAAGAAVSFLPNPFAADGEKRNGDEKRNENVFFWKGVALGSGAELRLFGVDDRQAADLVNKVLAEVARLEKMFSLYREDSLISRLNRDGYLTSPSADFLELLSLCRDIHALTDGAFDPTVQALWKLYADYFAAHPDAETPPPENSVKEALKRVGFGKVSFDDREIRFAEKGMGLSLNGIAQGYSGLTKTSTALPRLSSKRTIL

SEQ ID NO: 5836 - protein, 199 aa, Neisseria meningitidis
MGSLFLPGGALLFLSVVSTTLSARLGMPLLLVSPAGVLDGAAEALAIAAFLMLVARPPAVFGGLWKFNYSLREKAYSRIEMQSDTVLQADLAWYILPDGKVDKMSKYVTETDIGVREHFDFFGEFVVSPAARSDDLALAYGLRLEAGEEGLSLAELFDKRSDSQEPVECGRIDIGGFMLTAKEVDGDGNIGSMGLKVPR

SEQ ID NO: 5837 - protein, 337 aa, Neisseria meningitidis
MNTRPFYFGLIFIAIIAIFANYLGNTDFSHHYHISALIIAILLGMAIGNTIYPQFSTQVEKGVLFAKGTLLRTGIVLYGFRLTFGDIADVGLNAVVTDAIMLISTFFTALLGIRYLKMDKQLVYLTGAGCSICGAAAVMAAESVTKAESHKVSVAIAIVVIFGTLAIFTYPLFYTWSQDLINAHQFGIYVGSSVHEVAQVYAIGENIDPIVANTAVISKMIRVMMLAPFLLMLSWLLTRSNGVSENTSHKITIPWFAVLFIGVAIFNSFDLLPKELVKLFVEIDSFLLISSMAALGLTTHASAIKKAGLKPFVLGILTYLWLVVGGFLVNYGISKLI

SEQ ID NO: 5838 - protein, 228 aa, Neisseria meningitidis
MAGLTFEQTVSNIIGMKGEIVRALGETFVMVGLSTTFAVVFGTLLGVLLFVTSSRQLHYNKPVNFLLDNLVNLMRAFPFVILMIAMIPATRAIVGSTIGPVAASLVLSVSGLFYFARLVEQNLREVPKGVIEAAAAMGAPPVAIVRKVLLNEARAGMVSSITVLAIGLLSYSAAAGMIGGGGLGDLAIRYGYYRYQTEVIVFIVALLVLLVILIQSTGNALARKLDKR

SEQ ID NO: 5839 - protein, 463 aa, Neisseria meningitidis
MFPDFSQTLSKDRHFLQSAFKNPNKYGGLSKVEEKYRKSHEIFLKRLAALPKPEFDNTLPVHEKLDEIKKTVAEHQVTIICGETGSGKTTQLPKICLELGRGAAGLIGHTQPRRLAARSVAERIAEELKSEIGSAVGYKVRFTDHTSRDACVKLMTDGILLAETQTDRYLAAYDTIIIDEAHERSLNIDFLLGYLKQLLPRRPDLKVIITSATIDTEGFSRHFNGAPVLEVSGRTYPVEILYSPLTGKDEDDAEVELTDAIVDAADELAQYGEGDILVFLPGEREIREAAEALRKSTLRRNDEILPLFARLSHAEQHKIFHPSGAKRRIVLATNVAETSLTVPGIKYVIDTGLARVKRYSARAKVEQLHIEKISQAAAHQRSGRCGRVSAGVCIRLFSEENFNNRPEFTDPEIARSNLAAVILRMASLKLGDVAAFPFLEMPDSRYINDGFQVLLELGAVEAA

SEQ ID NO: 5840 - protein, 186 aa, Neisseria meningitidis
MNPLIHQAKESSMQTRILSAVLLAFSTAAFAGGAFTLQFDNPSEDGGFTQNQLLSAPYGFGCSGDNAPPALSWKNPPAGTKSFVLTVYDKDAPTGLGWMHWVVADIPADVRRRNAASLQLSRCANIADDQPAAISAVISLRICRIRLTPSYTAKPMPSCCNHANTPQSAASATLCGTFSSASTAAA

SEQ ID NO: 5841 - protein, 674 aa, Neisseria meningitidis
MKTDIQTELTQALLPHEKVWANEEKTILAKNILLDLVEKTDPTIIRLLLGNDELKRHFFVEVNGVLVFKLQDFRFFLDKHSVNNSYTKYANRIGLTDGNRFLKDNSDIVLDFPFKDCVLNGGQSTEEGEEIYFKRNNSQPQLYTKLTRKRQEIFFNQTLAFDEIDRLFDAKAFSKFSRYTADGKQAVGKIKRHSDGTPAENLIIKGNNLIALHSLAKQFKGKVKLIYIDPPYNTGNDGFKYNDKFNHSTWLTFMKNRLEIAKELLMEDGSIFVSIDDNEQAYLKILMDEVFGNENFICNFIWEKKTGASDAKQITTITEFVLCYSKNFKTVKLNKNTSSYDTERYKLSDKFEQERGKYYIDNLDRGGLQYSDSLNFAIQCPDGTFTYPNGRTEFVNDGWIWKWSKNKIDWAITNGFLEFRKSKSKKSGWSVCYKNYMLVDNENKPIERSAPYKNLIQDILNTHATDELKKLFGSKVFTTPKPESLLQYLIQIATSESDIVLDYHLGSGTTAAVAHKMNRQYIGIEQMDYIETLAVERLKKVIEGEQGGISKAVNWQGGGEFVYAELAPFNETAKQQILACEDSDGIKTLFEGLCERYFLKYNVSVNEFSQIIQEPEFQSLPLDEQKQMVLEMLDLNQMYVSLSEMDDEQFADRLNDDDKAVSRAFYQAEKKNGE

SEQ ID NO: 5842 - protein, 422 aa, Neisseria meningitidis
MQQIKFIDLFSGMSGIRKGFEQACRKQSVACECVFTSEIKPAALEVLKQNYPDEVPYGDITKIETGDIPDFDILLAGFPCQAFSFAGKRLGFEDTRGTLFFDVARILKAKKPKGFILENVEGLVTHDRKDPTQKIGRTLTVILETLEALGYYVSWKVLNAKDFGIPQNRKRIYLTGSLKSKPDLSFETSPSPKLKNILESGLPTESSPFIKKLLKKFPPSELYGKSVKDKRGGKNNIHSWDIELKGAVTEEEKQLLNILLKERRKKWASEIGIDWMDGMPLTKAQISTFYKHPNLQNILDSLTDKGYLVLEHPKQKIGGQRIKDESLPKGYNIVSGKKSFEINKILDPNDVAPTLVAMDMEHLFVVDNGGLRTLTGKEGLRLFGYPDDYSFDIPKKDRCDLLGNTVVVPVIKAVSERLLHTL

SEQ ID NO: 5843 - protein, 356 aa, Neisseria meningitidis
MKIVLTTSMAGLGGTETATVRLGRLLRQHGHDIMLASSDGPLLKEAQALGIRWQPVDFYRGGLFGYLKGMIAYARMLRREQPDIINCQMARVVPACAIAAKIVSPKTKIIYHSHGLDAATYPKIAKLFDKLGVYIIGNCKHEREKLIRHGFPADRIVYAYNAPPPPEFPFRKTEKECAVLGTLSRLDTVRAVHLMLDIFKKMVDRDMPVRLNVAGIGEEMDNLKAQAERLGIDGKVTFLGGVRDLTAYFKDVDILVNTPHCIGDHGAGVGNNILEAGLYDTPVVTYDMAGISEMVVNGETGYCIPFGEDEAFIEAVDTLIKHPELRGQMGKALHKHVETLCSDDEIYRTTMAAYTM

SEQ ID NO: 5844 - protein, 258 aa, Neisseria meningitidis
MNRPKQPFFRPEVAVARQTSLTGKVILTRPLSFSLWTTFASISALLIILFLIFGNYTRKTTAEGQILPASGVIRVYAPDTGTITAKFVEDGEKVKAGDKLFALSTSRFGAGGSVQQQLKTEAVLKKTLAEQELGRLKLIHGNETRSLKATVERLENQKLHISQQIDGQKRRIRLAESVAKTALGRQELSGLGMVSSDLAKSNEPVYLVKIKPDKPTITAYGEEKPLQIGMTLEADILHEKRRLYEWVLEPIYSISGKL

SEQ ID NO: 5845 - protein, 469 aa, Neisseria meningitidis
MNFPKTAASLLLLLASLAAHALDTGRIPQNEIAVYVQELDSGKVIIDHRSDVPVNPASTMKLVTAFAAFKTFGSNYRWATEFKSNGTVNDGTLDGNLYWAGSGDPVFNQENLLAVQRQLREQGIRNITGHLMLDHSLWGEVGSPDDFEADSGSPFMTPPNPTMLSAGMVMVRAERNAADSTDILTDPPLPHIFAQNNLKITASQAACPSIKKLMRASFSDNTLKLRGNIPESCLGKPVGVRMFALDELIRQSFTNHWLLGGGRISDGIGIADTPEGAQTLAVAHSKPMKEILTDMNKRSDNLIARSVFLKLGGNGKLPAVSEQAASAVRRELAVSGIDVADLVLENGSGLSRKERVTARMMAQMLETAYFSPFAQDFIDTLPIAGTDGTLRNRFKQSGGLLRLKTGTLNNVRALAGYWLGDKPMAVVVIINSGRAVSLLPDLDNFVANNIISGGDGWLDAKLMCKERRA

SEQ ID NO: 5846 - protein, 399 aa, Neisseria meningitidis
MWTGFFSKSGTGIAEERHQNRRACTDVPLLAERNSKHPDRPYGFAKYRQSGLDIYAWHGMYFFPRFPFIDIDRIRWVCAGLKAFKHYIRENGLPDLIHAHCMNYAGILAQKISEKYGIPYVLTEHSSTITRGLIRPHQWQPMEKAAAHASALLAVSRHFAHVLQHKYGCEWQYLPHILGGIFNRPFEQREKNNKPHFVFCTVSHLRRLKGHDVLLTAFARALAQCPQLRLNIGGSGQEEQRLKQQAADLGITHAVTFLGALQPEAVLDLMRNSDAFVLASRTETFGVVYIEALSQGLPVIATRCGGAESIVSDGNGYLVPVDDDDALADALIKMYEHHSDFEPARLRENCLNEFGENAVIGRLIGIFRQAIAEYGKKIPVKYSGLTKIRTRRRSRRQYK

SEQ ID NO: 5847 - protein, 102 aa, Neisseria meningitidis; identical to SEQ ID NO: 1826

SEQ ID NO: 5848 - protein, 389 aa, Neisseria meningitidis
MDNELWIILLPIILLPVFFAMGWFAARVDMKTVLKQAKSIPSGFYKSLDALVDRNSGRAARELAEVIDQQPQSYDLNLTLGKLYRQRGENDKAINMHQTLLDSPDTTGAKRARVLFELAQNYQSAGLVDRAEQIFLGLQDGEMAREARQHLLNIYQQDRDWEKAVETARLLSHDDQTYQFEIAQFYCELAQAALFKSNFDVARFNVGKALEANKRCTRANMILGDIEYRQGNFPASVEAYAAIEQQNHAYLSMVGEKLYDAYAAQGKPEEGLNRLIGYMQTFPELDLINVVYEKSLLLRGEKEAAQTAIELVRRKPDLNGVYRLLGLRISDMDPTWKADADMMRSVIGRQLQRSVMYRCRNCHFKSQVFFWHCPACNKWQTFTPNKIEV

SEQ ID NO: 5849 - protein, 380 aa, Neisseria meningitidis; identical to SEQ ID NO: 314

SEQ ID NO: 5850 - protein, 167 aa, Neisseria meningitidis
MGSKFFFLLLRFAGSVLPPSHMRGIVGRRVRGFLARRVSPHIGRGVNIERGAYVFPDTVLGDGSGIGANCEICRGPVVGKNVMMEPECLFYSNNHKFDRKRFEGYTEIRPITLEDDVWPGRRVIVMAGVTVGRGSVVGAGAVVTKDIPPYSLAAGNPAVVKKNLPEG

SEQ ID NO: 5851 - protein, 547 aa, Neisseria meningitidis
MSEEKLKMSFEPTVIEHLGVKMYSHTVPAIAELIANAYDACATEVEVRLFDKPEHKIVIKDNGIGMSFDEINDFYLRIGRNRREEKQASPCGRIPTGKKGLGKLALFGLGNKIEISTIQGNERVTFTLDYAEIRRSKGIYQPEFRKESVESNIESGTTITLTELTKKQGYPLDNYVEHLSRLFDFPAQDFKIKVSLNGSEPKIIDGNLKYDLVTPQFEWEYQDLATNISSLSSKFEQYEYSGLIQGKFITTEKPLKNNMKGITLFANGRMVNMPEFFTDSESSHFYSYLTGWLNVDFIDNDDEDLIATDRTSLDWKHSKTSKLRVFLGEIVRAIGQDWRKRRKKEKDDEVKGESGVDIEDWKNKLPKKEREPVEVILNRLDSELTNKEQAEVISALHSIIPEYPYYHWRHLHQDLHTACNDFYNEKKDYLSAAIEAVKVFEDKVQKQTGLHSIDGRELIEQAFGSKNSILLLTNNKTKAEQNLEDGLEQLACGTWTGFRNPVQHELRANLSPSIFNDKDALDLISLVSYLLRKVEQTKKRSKVVSSK

SEQ ID NO: 5852 - protein, 264 aa, Neisseria meningitidis
MIDFDKPAEEDAIYQSRLKKIVSDDLVLYNENSLNVMRKILEKYPNGCFDMIFSDPPYFLSNDGFSCQNGQMVSVNKGNWDKSKGMAADLEFYEEWLRLKPNGTIWVCGTFHNIYLIGYLMQTIGYHILNNITWEKPNPPPNLSCRFFTHSTETILWAKKNKKAKHTFHYEMMKAQNDGKQMKCVWTFPPPNKAEKTFGKHPTQKPLPLLERCILSASNIGDLIFDPFMGSGTTGVAALKHGRKFCGCELEEDFFELAKKRLEK

SEQ ID NO: 5853 - protein, 422 aa, Neisseria meningitidis
MDMQSKAKKLIEMIQTAPVEWKPLGEVGLLVRGNGLQKKDFTESGVPAIHYGQIYTYYGNQTDKTLSFVSPELAEKLKKVDKGDVVITNTSENIEDVGKALLYLGEEQAVTGGHATIFKPSKEIVGKFFVYFTQTEIFDKAKRKFAKGTKVIDVSATDMAKIKIPIPSLETQQKIVKIIDKFTELEATLEAELALRKRQYRYYRDFLLDFDNQIGGIADGYQCRLKDVVWKTLGEVFDLKNGYTPSKSNKEYWENGSIPWFRMEDIRENGRILDNSLQHISKSAVKGGKLFPANSIIMATSATIGEHALITVPFLANQRFTSLSLKPEFADKLSIYFLYYYCFNLSEWCKKNTTTSSFASVDMNSFKRFPIPIPPLPEQEKIVAILDKFDTLTHSISEGLPHEITLRRKQYEYYREQLLAFR

SEQ ID NO: 5854 - protein, 58 aa, Neisseria meningitidis; identical to SEQ ID NO: 903

SEQ ID NO: 5855 - protein, 434 aa, Neisseria meningitidis
MKKHIWAASLLPASLSAEPLNWWKPYSAVNSGDTAWVMTAAALVLLMTLPGLALFYGGMVRKKNLLSTMMHSFSIATLVGILWVAVGYSLAFTPGNAFIGGLGRVFLSGMQIDAAAQMLTVSPNAPTVPEPVFMFFQMTFAIISTAIITGAFAERMKYSAMMLFSGIWFLLVYVPGAHWVWGGGFMSKGGVLDYAGGTVVHINAGIAGLVAALVLGRRIGYGREAMPPHNMAMTLIGAAMLWFGWFGFNAGSALAADAAAGMAMAVTQVSAVFGAAGWLACEKIAGHKPSALGLASGAVSGLVGITPAAGFTGPSGAAAIGILTAAACFVSVTVVKHKLRYDDSLDAFGIHGFGGLVGGILTGIFFDNRIFGGDAAVWQQLWIQVKDGFVMVAYSGLMSWAILKVVGKICGGLRVGKDVEREGLDLNIHGERVE

SEQ ID NO: 5856 - protein, 416 aa, Neisseria meningitidis
MTKLTRRQIIRRTAGTLFALSPIASAVAKTVRAPQFTAARIWPSHTYTRLTLESTAALKYQHFTLDNPGRLVVDIQNANINTVLHGLSQKVMADDPFIRSIRAGQNTPTTVRLVIDLKQPTHAQVFALPPVGGFKNRLVVDLYPHGMDADDPMMALLNGSLNKTLRGSPEADLAQNTPAQTERGKNGRRPVIMLDPGHGGEDPGAVSPGGLQEKHVVLSIARETKKQLEALGYNVFMTRNEDVFIPLGVRVAKGRTRRADVFVSIHADAFTSPSARGTGVYMLNTKGATSSAAKFLEQTQNNADAVGGVPTSGNRNVDTALLDMTQTATLRDSRKLGKLVLEELGRLNHLHKGRVDEANFAVLRAPDMPSILVETAFLSNPAEEKLLGSESFRRQCAQSIASGVQRYINTSVLKRG

SEQ ID NO: 5857 - protein, 178 aa, Neisseria meningitidis
MDILLKYWKPVGVLLLIVLIFTAWHFDSAEKYRMGREAAAAEISNRLKDGYIEQAKQARSAEQAKQARSAEQKAAAAFAERQTKLEEEKQNAEKTVAAMRLELNRLRHYAAAQNRSRNLPATTTAATASDGASDSQGWLLFGQCAEKYAGLAETADGHAADLREWQAYGHAISSQRAE

SEQ ID NO: 5858 - protein, 119 aa, Neisseria meningitidis
MQCDFSQAVPSNQTQNIQNQATVTIPHKLANDAADACFYADRASENLAAILEAVEALIDISITTQTEQAQRHNLPLIARNLIKTAKNEVETLAEFPPFSLFETAMDLNNEIYSQTHGAK

SEQ ID NO: 5859 - protein, 63 aa, Neisseria meningitidis
LPKFGECPLPNPPPRGRGQVAADFAVAGGLRKNARNINSGNFSGSLYRKADGTNAASVFSDDL

SEQ ID NO: 5860 - protein, 1064 aa, Neisseria meningitidis
MRTTPTFPTKTFKPAAMALAVATTLSACLGGGTSAPDFNAGGTGIGSNSRATTAKSAAVSYAGIKNEMCKDRSMLCAGRDDVAVTDRDAKINAPPNLHTGDFTNPNDAYKNLINLKPAIEAGYTGRGVEVGIVDTGESVGSISFPELYGRKEHGYNENYKNYTAYMRKEAPEDGGGKDIEASFDDEAVIETEAKPTDIRHVKEIGHIDVVSHIIGGRSVDGRPAGGIAPDATLHIMNTHDGTKNEIMSAAIRNAWVKLGERGVRIVNNSFGTTSRAGTADHFQIANSEEQYRQALLAYSGGDKTDEGIRLMQQSDYGNLSYHIRNKNMLFIFSASNDAQAQPNTLTLLPFYEKDAQKGIITVAGVDRSGEKFNGSNHCGITAMWCLSAPYEASVRFTRTNPIQIAGTSFSAPIVTGTAALLLQKYPWMSNDNLRTTLLTTAQDIGAVGVDSKFGWGLLDAGKAMNGPASFPFGDFTADTKGTSDIAYSFRNDISGTGGLIKKGGSQLQLHGNNTYTGKTIIEGGSLVLYGNNKSDMRVETKGALIYNGAASGGSLNSDGIVYLADTDRSGANETVHIKGDLQLGGEGTLYTRLGKLLKVDGTAMTGGKLYMSARGKGAGYLNRTGQRVPFLSAAKIGRDYSFFTNIETDGGLLASLDSVEKTAGSEGDTLSYYVRRGNAARTASAAAHSAPAGLKHAVEQGGSNLENLMVELDASESSATPETVETAAADRTDMPGIRPYGATFRAAAAVQHANAADGVRIFNSLAATVYADSTAAHADMQGRRLKAVSDGLDHNGTGLRVIAQTQQDGGTWEQGGVEGKMRGSTQTVGIAAKTGENTTAAATLGMGRSTWSENSANAKTDSISLFAGIRHDAGDIGYLKGLFSYGRYKNSISRSTGADEHAEGSVNGTLMQLGALGGVNVPFAATGDLTVEGGLRYDLLKQDAFAEKGSALGWSGNSLTEGTLVGLAGLKLSQPLSDKAVLFATAGVERDLNGRDYTVTGGFTGATAATGKTGARNMPHTRLVAGLGADVEFGNGWNGLARYSYAGSKQYGNHSGRVGVGYRF

SEQ ID NO: 5861 - protein, 84 aa, Neisseria meningitidis
MNGIDYALELEEAREILNSLRKAYKEHAAGRGMTKRYKIKDREMEFSSLADLLKQIRFWQREIKRLEAAAGISPRRSGRIITRF

SEQ ID NO: 5862 - protein, 121 aa, Neisseria meningitidis
LHKQVQHITTKLFYFKITDISFFIDFKFHIFNILGILFQRKRNRLIKTIPAIHSDKTARNIRFPISTTIRYRTPRCRFRLHIRQNFIHKENVENKKNSLLEKRFNGNAGISHTFSIYLSSL

SEQ ID NO: 5863 - protein, 78 aa, Neisseria meningitidis; identical to SEQ ID NO: 3900

SEQ ID NO: 5864 - protein, 51 aa, Neisseria meningitidis
LYTGHYGGNTVWEAAASRGIGTAGDAPMPSGVKAGQSAVWKKAMESVGRRS

SEQ ID NO: 5865 - protein, 63 aa, Neisseria meningitidis
MNTNQDTIPFGGNLVICCSTGNGGDGRFSCLITDQIPDLNLVRSGQAFPMFIYEYETREKRKA

SEQ ID NO: 5866 - protein, 96 aa, Neisseria meningitidis
LRQAFQTAFLKCVYLWCSKRSSESAASAKLKRSINEVKICLNLKGSLHPNPLSRGRGLGRGWQTESLLGRHFQCAGCFYSGLTKIRTRRRSRRQYK

SEQ ID NO: 5867 - protein, 137 aa, Neisseria meningitidis; identical to SEQ ID NO: 1900

SEQ ID NO: 5868 - protein, 54 aa, Neisseria meningitidis
MAKICSIMFCIVVYHFRTFVRLKAGKHRNESTQRKCRLNMRSGGVLLGVSERNV

SEQ ID NO: 5869 - protein, 68 aa, Neisseria meningitidis; identical to SEQ ID NO: 3910

SEQ ID NO: 5870 - protein, 40 aa, Neisseria meningitidis; identical to SEQ ID NO: 1881

SEQ ID NO: 5871 - protein, 65 aa, Neisseria meningitidis
MPSEKIYYGVLIFLCIASMLLSPFFYAGALKPKKAALRKDGQWKLILLSNAVAAAVLFWMWWKWF

SEQ ID NO: 5872 - protein, 43 aa, Neisseria meningitidis
LTQINKVMPSEGLSDGILRYFVKVGMTVRVFLTGWIFKVLYRV

SEQ ID NO: 5873 - protein, 90 aa, Neisseria meningitidis
MFTTNDLRHFLESLVILFAIGYWDTMLLLLWFLVRFAYKKPRQNPFRQPDRRRYPDAVCLDYSQTIRPEQRRNTGTRRVGQKIQRSRSRV

SEQ ID NO: 5874 - protein, 73 aa, Neisseria meningitidis
MSGKVQHNKGKIRDNALKALVKSDLFRHKVERKRKGKGSYNRQEAKKWRDGFDTVPPFLCLKRGSFRRSRRSL

SEQ ID NO: 5875 - protein, 70 aa, Neisseria meningitidis; identical to SEQ ID NO: 3527

SEQ ID NO: 5876 - protein, 67 aa, Neisseria meningitidis
MPSEAAWAFRRHFLRLKQHIGNPAPPVHGNLHLKTICMPNHTPIPISVICTLPVLGNHRFFAYNSRI

SEQ ID NO: 5877 - protein, 59 aa, Neisseria meningitidis
MPSERTFCRSDGIFISFFRLPPLENPLRAALFETKQTPAANRTILIRSQSKSGGKLLNI

SEQ ID NO: 5878 - protein, 65 aa, Neisseria meningitidis; identical to SEQ ID NO: 1894

SEQ ID NO: 5879 - protein, 61 aa, Neisseria meningitidis
VPEQARARPIQTAMTLCRRFGAGWRHTRRLPRFISHRSSETRNPPGPTCGMKRLSWREVFY

SEQ ID NO: 5880 - protein, 137 aa, Neisseria meningitidis
LPSDKEARTGCLSLPANNGIIRALSPPFTGINIRLFAALGLLSLSGAAAQASVYHCNSNGKSVYTSAPAGSCADADLPKISSHQGGGYRLKIKKLSQEAKIHIESKKKNKKPAGKKNRQAAKAPKENQKQTTEKKSP

SEQ ID NO: 5881 - protein, 66 aa, Neisseria meningitidis; identical to SEQ ID NO: 3365

SEQ ID NO: 5882 - protein, 57 aa, Neisseria meningitidis; identical to SEQ ID NO: 735

SEQ ID NO: 5883 - protein, 426 aa, Neisseria meningitidis
MKLNDRQIKNAKPAEKPYKLNDGKGLYLYVNTSGGKLWRFDFSHNGKRKTLSIGKYPTVSLLEARQTAENARRLLAAGQDPGEAKQQEKRERQAAVSNTFRSIAAEWHKHRETGLTGNHAARVWDSLEKDVFPMLGGLPVSEIKVSQVKEVIEAVAARGALETAGRILQRIKAVFTYAIRTERAENNPAVPLVGLIKAPKQKHQPALPQSELTEFYRRLMLEQAERQTKIAMQLIMLTFVRNGELRAAEWVEFDLNGAEWSIPAAKMKMKAPHIVPLADWTLELLAELKEITGHSRYLFPSVKDPDKHMSENTLSYLMGRMGYKGIATPHGFRSLATDVLNENGFDSDVIERQLAHVEQNKVRAAYHRTEYIPQRKELMQWYSDFLRERYRQAEKELAGILPRRREQGGNRPRCRAVFFGFLKIPI

SEQ ID NO: 5884 - protein, 280 aa, Neisseria meningitidis
MTTENNAFENAKHIDETGNEYWSARTLQQILEYSEWRNFQRAIDKAITACETSGNDKNHHFVETNKMIALGKGGQREVPDYRLSRYACYLIVQNGDPSKSVIAAGQTYFAVQTRRQELQDEAAFRSLGEDKQRLLLRRQLREHNTDLAAAAKDAGVEKPVEYQNHGYRGLYGGLDKQGIHSRKGLKKSQKILDHMNASELAANLFRATQTEEKLRRENIQGKTQANRVHFEVGQKVRQTIEELGGIMPENQPVPEKSIKQLENEEQKRLAATEQHQNGKK

SEQ ID NO: 5885 - protein, 555 aa, Neisseria meningitidis
MQKWQTELYSTPLWLCLTPKSAVKVLLLITAMITLVLTEMRLNVLSTFMSKGLYDSMQDLNASAFWMFAAMNAGVVLIRAFNNVVNDFLDQGLAIKWSERLNEVLTARWLADKNYYRLQMRRHAPDNIDQRIQQDAQEFIASTIEFVRGMVNSVVTSLEFAVVLRGLAGILTVFGFDIPHGIVWFVYIFVILATFIAMIGNPLIRYNYENEKLNGDYRYSLIRVRDHAESVAFCNGEKHEYDQLSDRFKAIIRNRWRIARQSVCLSGFNDMFTNGIKLFPIILQAPRLFAGQIKIGDIQQTVQAFARLQNALSFFRMFYNKFTAYRARLKRLYGFLLSTEEQHSARQPEISEVSDGIALENVALFRHNGEVLLDGININLKNGDSLLIRGPSGYGKTSLLRALAGLWPFGSSGKVSRPPHQDILFLPQRPYTAQGSLRDAVCYPDIDKQHPELIEAMNTCRLGYLIDKLDKTDDWQHKLSLGELQRVAFVRALLSKPKIVLLDEATAALDEPAEAAIYRALKQKLPDSIIISIGHRSTLNAFHNMRLDVGNVACG

SEQ ID NO: 5886 - protein, 284 aa, Neisseria meningitidis; identical to SEQ ID NO: 1842

SEQ ID NO: 5887 - protein, 132 aa, Neisseria meningitidis
LFVCFEKCLFPDFAIPIRFCAVRCVLARTCSKSHVIPVFEALIRDADFQYIFCYNNEGLMSVGQVREIFERFGKYDLVQTEYRRFKADKTENRNHKANSIFEYLHILEKTFYSGLTKTSTALPRLSSKRTIL

SEQ ID NO: 5888 - protein, 375 aa, Neisseria meningitidis
MERKYFHENYLYKKPFIFKKSLDVSCISWKEINELYQRADPTDWQFKFRKGEIIPKEAYVESFNDVGRIRHRFNKTAVYQYLQDGATMVYNRIDNEPFVDSIAKQIAQFAQATVVSGYLAFGSSSSYRNHWDTRDVFAVQLIGKKHWTISAPNFDMPLYMQQAKDMPHITPPTTVDMEVILEAGDILYIPRGWWHNPMPMNCETFHLAIGTFPPNGYNYMEWLMKKIPDIQSIRQNFIGWEHDQKNLDDSAQAVTEMMNNPKNYQAFMQDFLGNQRTNTAFNMDLFGNAHNQTLPEHCFLRLNSNDCSTLSQGYFIANGIKVNIDEISMKFLTILVNKHIIPLTEMLSLFNTNEQESINKLVWQLGELDIIEIIR

SEQ ID NO: 5889 - protein, 357 aa, Neisseria meningitidis
MRPFFVGATVLAILGALVFFISPGAVVLHRQIFLELMLPAAYGGFLTAALLDWTVFSGNLKPVATLMAALLLAASAILPFSPQTASFFVAAYWLVLLLFCARLIWLDRNTDNFALLMLLAAFTVFQTAYAVSGDLNLLRAQVHLNMAAVMFVSVRVSILLGAEALKECRLKDPVFIPNIVYKNIAITFLLLHAAAELWLPAQTAGFTALAVGFILLAKLRELHHHELLRKHYVRTYYLLQLFAAAGYLWAGAAKLQNLPASAPLHLITLGGMMGGVMMVWLTAGLWHSGFTKLDYPKLCRIAVPILFAAAVSRAVLMNVNPIFFITIPAILTAAVFVLYLFTFVPIFRENAFTDDPE

SEQ ID NO: 5890 - protein, 336 aa, Neisseria meningitidis
MIFSIIVPIYNVEKYLRCCVDSVLAENFTDYEMILVDDGSPDGCGKICDEYAGKYPHIKVIHQENGGLSDARNAGIRAAKGDYLIFLDSDDYWADTNHSKNGGGILFDLQQLADKKVDLILHPSSLNYHVIPKGADFSDNDFVRHFETLVEGRYYIANAWTKIVRREIIIKNNLFFPKGYIHEDFPYSLQLARFIKTFAFYDNPFYQYRVLGNSISHNIKYKNFSDMLAHLDRGVDFLVENKNSPIYGGLQKFVFDNIGYLRSILVRLYFSKNIIVIYRKYFSFKEKCRKIFGAKAIRPVFIGKTAFIIGLPILRLLVPPMLYPAIKAVYQKFFSE

SEQ ID NO: 5891 - protein, 133 aa, Neisseria meningitidis
MANRFRQRKSAYRRLSGKPLFSDGIAANLCGGRKTLSYNLSRFKISIRSEMQKISFNLLKPATPKIGKRRPGLNGAPHIPMPSPRYLPASPEMPGNNIHPAKIRNNTPGGRQSQTAPQSIRHQKNKPPPRASS

SEQ ID NO: 5892 - protein, 218 aa, Neisseria meningitidis; identical to SEQ ID NO: 1913

SEQ ID NO: 5893 - protein, 430 aa, Neisseria meningitidis
MQFSAFGEKFTQHSGILQLMDDLGDALKSDKPVNMLGGGNPARIPEIDRAFADIFSKLAAEHAVENIGNYSNPQGDAALIDALTAFLNREYGWNLTADNIALTNGSQNAFFYLFNLFGGKFNLSDGTSAEKAILLPLAPEYIGYADVHIEGQHFVSVKPKIENVEHEGEAGFFKYRVDFDALENLPELKEGKIGTICCSRPTNPTGNVLTDGEMARLDALAREHGIPLIIDNAYGMPFPNIIYSDVTLNWHENIILCFSLSKVGLPGVRTGIIVAAPEVVKAVSSLNAIVNLSPTRFGAAIAAPLLNDGRLKQLADQVIQPFYRQQAQTAVSLLKRELGAYPLKIHKPEGAIFLWLWFENLPVSSQTLYEMLKAEGTLIIPGEHFFVGIDTQDYPHAHECIRMSIAQDAETLEKGIAAIGKTVRKLYDNV

SEQ ID NO: 5894 - protein, 127 aa, Neisseria meningitidis; identical to SEQ ID NO: 1080

SEQ ID NO: 5895 - protein, 171 aa, Neisseria meningitidis
MKRAKQYPFLTLQRQRFHLNFENASSAAGIPAERDFYRWAWSALKNEYRRADISLILLDEEEARAYNRDYRGKDYATNVLSFALNEGEILPCQVSEKLYGDLIICPQVVLKEAAEQGKTPERHFAHLTIHGTLHLMGYDHIEDDEAEIMEAEEIRLMLAAGFPNPYQEDEY

SEQ ID NO: 5896 - protein, 296 aa, Neisseria meningitidis
MNPKSPLFLRLSDRLDVYLRLMRADKPIGTLLLLWPTYWALWLASDGIPDPAVLAAFTIGTFLMRSAGCVINDFADRDFDGAVERTKNRPFAQGRVKKKEALLLTAFLCLLAALCLIPLNHLTWLMSLPALFLALTYPFTKRFFPIPQLYLGLAFSFGIPMAFAAVAGNVLPQAWILFAANVLWTLAYDTVYAMADKEDDLKIGIKTSAVTFGRYDIAAVMLCHGGFTLLMAVLGAVIGAAWAYWTAIPIVLLLQYRQYAAIKSRVRQICFETFLANNRIGWVWFTAIFAHTFFAK

SEQ ID NO: 5897 - protein, 227 aa, Neisseria meningitidis
MPSEKCSDGISYNLSFAAHNQSVFPIPFRNAYHAPVPNICEQGKKMARLTVHTLETAPEAAKARVEAVLQNNGFIPNLIGVLSNAPEALAFYQEVGKLNAANSLTAGEVEVIQIIAARTNQCGFCVAGHTKLATLKKLLSEQSVKAARALAAGEFDDAKLGALAAFTQAVMAKKGAVSDEELKAFFDAGYNQQQAVEVVMGVALATLCNYVNNLGQTEINPELQAYA

SEQ ID NO: 5898 - protein, 167 aa, Neisseria meningitidis
MSDPNLIDPEIFAAEGQNLQGSFLLEELDERVSLHDYPADRQTKISFTLTGGRDRLQRLFLDLNVKADMPLICQRCIKPMPFMLDESSRIVLFSNEESLDESMLADEELEGMLLEKELDLRTLVEDQILMSLPFSPRHEDCGDNGTLEEVNRDKPNPFAVLAGLKSS

SEQ ID NO: 5899 - protein, 451 aa, Neisseria meningitidis
MSSPSNTNRQTSSRLTYILTIAGATVGFGATWRFPYLVGENGGGAYVFLFCIAMLVIGIPMILVENVIGRRKGVNALDAFGGPMNGKPIAKIWKLVGWMGLGAFGIMAYYMVLGGWVISYIVNIIGGNLNISSPVDGVVTKGFFAEHINSPWEIAFYTLLFVAVNQWILVKGVIGGIEKAAKLMPLLFLFLIAMVVRNVTLPGAMEGVAFYLKPDFSKITAELFVFVLGQVFFALSLGFGVMITLSSYLDKNENLVQTAVITAITNTIIAILAGFMIFPSLFSFGVAPDSGPTLVFQSLPIVFSHMWARSVFAVIFFSLLLIAALTTSLTIYEVLITTIQEKTKIRRTAAITIVLAAIFIFGNIPSILSYGSWKDVVFGKNIFDAFDYISGNILFMLTALGFALFVGFVMKDEAKEELLYKGNHTTVNIWFAYVKYLVPLVILLIFVSNLF

SEQ ID NO: 5900 - protein, 141 aa, Neisseria meningitidis
MSEPIITPAAVYTFGGVVGAGYLLGMPVDAVVLGAVASAAVTMISEPKSRWMVVAYIVIGGLLGGAFAPPLTHFLIGEVVGSHPSLGEQRIQFAHAFAPVVVGLLWQVLLRFARAVWPSFEKHADDIVEWLLNLLPWRPKK

SEQ ID NO: 5901 - protein, 91 aa, Neisseria meningitidis; identical to SEQ ID NO: 3956

SEQ ID NO: 5902 - protein, 203 aa, Neisseria meningitidis
MNFTRLLNQVLSTVQKKGNTFSDSPLNSFGGGALVAGVASMLLNGKNRKTITKIGSTAALGYLAYRGYQMWQQNKGRATVTQSDFQPAGETEETYNRTVLRTMIAAAASDGMIDEAERRTIEQESGTDPETAAWLAAEYRLPASIEDIAAAVGNDEALAAEAYLAARLVCADLSRKETVFLARLSALELDDNLVENLERQLGF

SEQ ID NO: 5903 - protein, 677 aa, Neisseria meningitidis
MKLEASKQEQKFKKSFIISLFFSILYTSPLLAVDYVYDNSKLTNEQIDRLKKLRDKSSEYWKQETYLLKPTNGSSQNSLKVPALYSKTHQFENINNSKKISFYDKEYTEDYLVGFARGFGVEKRNGEEEKTLQQYFKDCVNTGNSNNDQCEQPSFGNSGPRLIKSDIFALAPQIKNSHINSEILSVGNYIEWLRPTLNKLPSWQEHLYSGLDPFHYIEVTDNSHVIGQTISLDEFRLENSLWEPRWDSDVGELKTTNADIRFNTKSESLLVKEDYAGGARFRFAYGLKDKVPETPVLTFEKNITGTSDIIFENPIDDLKSLDGHQIIKVNGTADKHAFRLSGKHQKGIYTLSLQQRPEGFFTKVQERDDISIYAQQAQAANTLFALRLNDKNSDIFDRTLPRKGLWLRVIDGHSSQWVQGKTAPVEGYRKGVQLGGEVFTRQNESNQFSVGLMGGQAEQRSTFRNPDTDNLTTGNMKGFGTGFYATWHQLQDKQTGAYIDSWVQYQRFRHRINTEDATERFTSKGITASIEAGYNALLAEHFTKKGNRVRFYLQPQAQLTYLGVNGKFSDSENAHVNLLGSRQLQSRVGVQAKAQFSLYKNIAIEPFAAVNALYHNKPFGVEMDGERRVINNKTAIESQLGVAVKIKSHLTLQATFNRQTGKHHQTKQGALNLQWTF

SEQ ID NO: 5904 - protein, 61 aa, Neisseria meningitidis; identical to SEQ ID NO: 2615

SEQ ID NO: 5905 - protein, 606 aa, Neisseria meningitidis
MPCMNHQSNSGEGVLVAKTYLLTALIMSMTISGCQVIHANQGKVNTHSAVITGADAHTPEHATGLTEQKQVIASDFMVASANPLATQAGYDILKQGGSAADAMVAVQTTLSLVEPQSSGLGGGAFVLYWDNTAKTLTTFDGRETAPMRATPELFLDKDGQPLKFMEAVVGGRSVGTPAIPKLMETIHQRYGVLPWGKLFDTPIRLAKQGFEVSPRLAISVEQNQQHLARYPKTAAYFLPNGVPLQAGSLLKNLEFADSVQALAAQGAKALHTGKYAQNIVSVVQNAKDNPGQLSLQDLSDYQVVERPPVCVTYRIYEVCGMGAPSSGGIAVGQILGILNEFSPNQVGYDAEGLRLLGDASRLAFADRDVYLGDPDFVPVPIRQLISKDYLKHRSQLLEQSDKALPSVSAGDFIHEWVSSQAIELPSTSHISIVDKAGNVLSMTTSIENAFGSTLMANGYLLNNELTDFSFEPIKQGKQVANRVEPGKRPRSSMAPTIVFKAGKPYMAIGSPGGSRIIGYVAKTIVAHSDWNMDIQNAISAPNLLNRFGSYELETGTTAVQWQQALNDLGYKTDVRELNSGVQAIIIEPSRLVGGADPRREGRVMGD

SEQ ID NO: 5906 - protein, 214 aa, Neisseria meningitidis; identical to SEQ ID NO: 3176

SEQ ID NO: 5907 - protein, 324 aa, Neisseria meningitidis
MPSEKNIGFMAGSSRPLWVAFALLLVSCVLFMTLNVKGDWDFVLHLRLTKLAALLMVAYAVGVSTQLFQTLTNNPILTPSILGFDSLYVFLQTLLVFTLGGVGYTSLPAVGKFGFELAVMMGGSLLLFYTLVKQGGRDLSRMILIGVIFGILFRSLSSLLSRMIDPEEFTAAQANMFASFNTVHNELLGIGALILLISAAAVWRERYRLDVHLLGRDQAVNLGISYTRNTLWILLWIAALVATATAVVGPVSFFGLLAASLANHFSPSVRHSVRLPMTVCVGGILLVGGQTVFEHFLGMKAVLSVVVEFAGGLVFLYLVLKHKK

SEQ ID NO: 5908 - protein, 268 aa, Neisseria meningitidis
MWHWDIILILLAVGSAAGFIAGLFGVGGGTLIVPVVLWVLDLQGLAQHPYAQHLAVGTSFAVMVFTAFSSMLGQHKKQAVDWKTVFTMMPGMIFGVFTGALSAKYIPAFGLQIFFILFLTAVAFKTLHTDPQTASRPLPGLPGLTAVSTLFGTMSSWVGIGGGSLSVPFLIHCGFPAHKAIGTSSGLAWPIALSGAISYLLNGLNIAGLPEGSLGFLYLPAVAVLSAATIAFAPLGVKTAHKLSSAKLKKSFGIMLLLIAGKMLYNLL

SEQ ID NO: 5909 - protein, 318 aa, Neisseria meningitidis
MILTPPDTPFFLRNGNADTIAAKFLQRPAPAYRRELLPDSTGKTKVAYDFSDGISPDAPLVVLFHGLEGSSRSHYAVELMLAVRDRGWHGVVVHFRSCGGIANTAPVFYHLGDTAEIAFTLDTFAARYREIYAVGVSLGGNALAKYLGEQGKKALPQAAAVISAPVDAEAAGRRFDSGITRLLYTRYFLRTLIPKAKSLQGFQTAFAAGCKTLGEFDDRFTAPLHGFADRHDYYRQTSCKPLLKHVAKPLLLLNAVNDPFLPPEALPRADEVSEAVTLFQPAYGGHVGFVSSTGGRLHLQWLPQTVLSYFDSFRTNRR

SEQ ID NO: 5910 - protein, 810 aa, Neisseria meningitidis
MPIPFKPVLAAAAIAQAFPAFAADPAPQSAQTLNEITVTGTHKTQKLGEEKIRRKTLDKLLVNDEHDLVRYDPGISVVEGGRAGSNGFTIRGVDKDRVAINVDGLAQAESRSSEAFQELFGAYGNFNANRNTSEPENFSEVTITKGADSLKSGSGALGGAVNYQTKSASDYVSEDKPYHLGIKGGSVGKNSQKFSSITAAGRLFGLDALLVYTRRFGKETKNRSTEGDIEIKNDGYVYNPTDTGGPNKYLTYVATGVARSQPDPQEWVNKSTLFKLGYNFNDQNRIGWIFEDSRTDRFTNELSNLWTGTTTSAATGDYRHRQDVSYRRRSGVEYKNELEHGPWDSLKLRYDKQRIDMNTWTWDIPKNYDLRGINGEVYHSFRHIRQNTAQWTADFEKQLDFSKAVWAAQYGLGGGRGDNANSDYSYFAKLYAPKILASNQAKITMLIENRSKYKFAYWNNAFHLGGNDRFRLNAGIRYDKNSSSAKDDPKYTTAIRGQIPHLGSERAHAGFSYGTGFDWRFTKHLHLLAKYSTGFRAPTSDETWLLFPHPDFYLKANPNLKAEKAKNWELGLAGSGKAGNFKLSGFKTKYRDFIELTYMGVSSDDKNNPRYAPLSDGTALVSSPVWQNQNRSAAWVKGIEFNGTWNLDSIGLPKGLHTGLNVSYIKGKATQNNGKETPINALSPWTAVYSLGYDAPSKRWGINAYATRTAAKKPSDTVHSNDDLNNPWPYAKHSKAYTLFDLSAYLNIGKQVTLRAAAYNITNKQYYTWESLRSIREFGTVNRVDNKTHAGIQRFTSPGRSYNFTIEAKF

SEQ ID NO: 5911 - protein, 299 aa, Neisseria meningitidis
MKTNSEELTVFVQVVESGSFSRAAEQLAMANSAVSRIVKRLEEKLGVNLLNRTTRQLSLTEEGAQYFRRAQRILQEMAAAETEMLAVHEIPQGVLSVDSAMPMVLHLLAPLAAKFNERYPHIRLSLVSSEGYINLIERKVDIALRAGELDDSGLRARHLFDSRFRVIASPEYLAKHGTPQSTEELAGHQCLGFTEPGSLNTWAVLDAQGNPYKISPHFTASSGEILRSLCLSGCGIVCLSDFLVDNDIAEGKLIPLLAEQTSDKTHPFNAVYYSDKAVNLRLRVFLDFLVEELGNNLCG

SEQ ID NO: 5912 - protein, 218 aa, Neisseria meningitidis
MLEILFRHQDFVAINKPGGISVHQDSGETGLARTLAIQLGVERVWLLHRLDKQTSGILLFALNKESASALSGQFAGKSIKKTYLALSDRKPSKKQGWIKGGMEKSRCGMWKLTRNTENIAVTRFHSISIAEKLRLFILEPHTGKTHQLRVAMKSLGSPILGDSLYGGTESETMFLYAWKIQFDYQNRQIEIVAPLKNEWQTENIHRALEEFCMENKID

SEQ ID NO: 5913 - protein, 107 aa, Neisseria meningitidis; identical to SEQ ID NO: 875

SEQ ID NO: 5914 - protein, 331 aa, Neisseria meningitidis
MLRKLLKWSAVFLTVSAAVFAALLFVPKDNGRAYRIKIAKNQGISSVGRKLAEDRIVFSRHVLTAAAYVLGVHNRLHTGTYRLPSEVSAWDILQKMRGGRPDSVTVQIIEGSRFSHMRKVIDATPDIGHDTKGWSNEKLMAEVAPDAFSGNPEGQFFPDSYEIDAGGSDLQIYQTAYKAMQRRLNEAWESRQDGLPYKNPYEMLIMASLVEKETGHEADRDHVASVFVNRLKIGMRLQTDPSVIYGMGAAYKGKIRKADLRRDTPYNTYTRGGLPPTPIALPGKAALDAAAHPSGEKYLYFVSKMDGTGLSQFSHDLTEHNAAVRKYILKK

SEQ ID NO: 5915 - protein, 147 aa, Neisseria meningitidis
LVMPVKKVEKNILVLHGADKMFELVDKVEDYPHFLPWYSKTEVIGRSGNELKARLFMDYMHVRQSFATHNRNIPGREIRMELLEGPFKTLRGTWKFIDLGDDMCKIEFNLEYDFSNAVLSALISPVFNHLSTTLVEAFVKEADRRYA

SEQ ID NO: 5916 - protein, 261 aa, Neisseria meningitidis
MKQTLKNWFAALLLAVPMSAAVASGGGHYEKVDIDLRDQVSLQHGAQIFTNYCLSCHSASGMRFNRLKDIGLTDEEIKKNLMFTTDNVGDVMHSAMNPKDAAKWFGAAPPDLTLIARSKGADYLYAYMRGFYKDPTRPSGWNNTVFDKVGMPHPLWEQQGVQAVELDAKGQPVMVKDEHGEMKPKLYWESTGLHSRRLPNGKVIQKEYDAYVRDLVNYLVYMGEPAQLQRKRIGYVVMIFLFAVMLPLAYFLNKEYWKDVH

SEQ ID NO: 5917 - protein, 526 aa, Neisseria meningitidis
MEPIMAKKNNKTKIQKPEAALQTDVAQITATGRVIAEHPSNFITPQKMRALFEDAESGDIRAQHELFADIEERDSDIAANMGTRKRALLTLNWRVAPPRNATPEEEKLSDQAYEMMDSLPTLEDLIMDLMDAVGHGFSALEVEWVFSDGLYLPRNFIHRPQSWFKWDKDNGLLLRTRENPEGEALWPLGWVVHTQKSRSVQQARNGLFRTLSWLYMFKHYAVHDFAEFLELYGMPIRIGKYGAGATKEEKNTLLRAVAEIGHNAAGIMPEGMEIELHNAANGTTATSNPFLQMADWCEKSAARLILGQTLTSGADGKSSTNALGNIHNEVRRDLLVSDAKQVAQTITSQIIGPFLQINYPHADPNRVPKFEFDTREPKDIAVFADAIPKLVDVGVQIPESWVRDKLVIPDVQEGEAVLVRQVPDNPVNRTALAALSAHTVPSKATGRHQEILDGALDDALVEPDFNSQLNPMVRQAVAALNACNSYEEADAALNALYPNLDNAKLRTYMQQALFISDILGQDHARA

SEQ ID NO: 5918 - protein, 252 aa, Neisseria meningitidis; identical to SEQ ID NO: 1597

SEQ ID NO: 5919 - protein, 356 aa, Neisseria meningitidis
MNLISRYIIRQMAVMAVYALLAFLALYSFFEILYETGNLGKGSYGIWEMLGYTALKMPARAYELIPLAVLIGGLVSLSQLAAGSELTVIKASGMSTKKLLLILSQFGFIFAIATVALGEWVAPTLSQKAENIKAAAINGKISTGNTGLWLKEKNSIINVREMLPDHTLLGIKIWARNDKNELAEAVEADSAVLNSDGSWQLKNIRRSTLGEDKVEVSIAAEENWPISVKRNLMDVLLVKPDQMSVGELTTYIRHLQNNSQNTRIYAIAWWRKLVYPAAAWVMALVAFAFTPQTTRHGNMGLKLFGGICLGLLFHLAGRLFGFTSQLYGIPPFLAGALPTIAFALLAVWLIRKQEKR

SEQ ID NO: 5920 - protein, 451 aa, Neisseria meningitidis
MSIQSGEILETVKMVADQNFDVRTITIGIDLHDCISSDINVLNQNIYNKITTVGKDLVTTAKYLSAKYGVPIVNQRISVTPIAQIAAATHADSYVSVAQTLDKAAKAIGVSFIGGFSALVQKGMSPSDEVLIRSIPEAMKTTDIVCSSINIGSTRAGINMDAVKLAGETVKRTAEITPEGFGCAKIVVFCNAVEDNPFMAGAFHGSGEADAVINVGVSGPGVVKAALENSDATTLTEVAEVVKKTAFKITRVGELIGREASKMLNIPFGILDLSLAPTPAVGDSVARILEEMGLSVCGTHGTTAALALLNDAVKKGGMMASSAVGGLSGAFIPVSEDEGMIAAAEAGVLTLDKLEAMTAVCSVGLDMIAVPGDTPAHTISGIIADEAAIGMINSKTTAVRIIPVTGKTVGDSVEFGGLLGYAPVMPVKEGSCEVFVNRGGRIPAPVQSMKN

SEQ ID NO: 5921 - protein, 253 aa, Neisseria meningitidis
MDANKEPNWEKRLENLRQTRRMKAVPTYAPLSRPSETGTDAPVPKLDDESRARVLKAYLKKWQEEHNAAVADCGEEVETDPMIVLQENWLNAQASLQMSVSEKHIESRRRIRFDTKKDSVEFETGQIESGENADEAESGTNEPAVSENGENDAEETLMPVQINILNPKAVNRREVFCLSEQELTERLIKRLRPHLTDTVNGIIRTAVQKQMAVFTYQLQQMLHEQAGAVVEDVLEHDVRKILNDIKYELKYKR

SEQ ID NO: 5922 - protein, 94 aa, Neisseria meningitidis; identical to SEQ ID NO: 973

SEQ ID NO: 5923 - protein, 114 aa, Neisseria meningitidis
MFLDDVNVFLDDLNVFLDDLNTNPITDEWYMSNFADKHIKILESYEAFDILKQFVDYMIEEYDEKSEYEIMEILRQLKYQADTNEKFYTNTQKQKIVELYKQEISQDILNEIFR

SEQ ID NO: 5924 - protein, 787 aa, Neisseria meningitidis
MQFSYSWLKTQADTELSSDKLEHLLTMSGLEVEEAETAAPAFAGVVIAEVKSVEKHPDADRLNVTRVDAGTGGLVQIVCGAPNVKAGIKVPCSLPGAVLPGNFKIKPTKMRGEVSDGMLCSTDELGLPDDGVNGLHILPEDAPVGTNIREYLDLDDTLFTLKITPNRADCLSIKGIAREVSALTGCAFRQPEIHTAPITGSRKQPVQINAPADCGRFISRVIENVNARATTPDWMKQRLERSGIRSISALVDIGNYVMLEIGQPMHVFDADKLSGSLHIRRAREGETLECLNEKTVSLSENTLVVADEKGVLSLAGLMGGAASAVSDGTQNIVLEAAWFAPEIIAGKSRQYGFGSDSSFRFERGVDYRLQADAIERATELVLQICGGAAGEMVEAQGELPEAKQVGLRLDRLKTVLGVDIPAEQVETILQHLGLQPEKTAEGFRVTAPSFRFDIEIEADLIEEIGRVYGYENIPDDYTSGRLKMLELPETRRPRFAVYNEMAARGYREVVSYAFVDEQWEQDFAANADPIRLQNPLAAQYAVMRSTLIGGLVEILQNNLNRKQNRVCVFEIARVFSKGSDGQFVQNERIGGLWYGAVMPEQWGGKTRNADFYDIKADVENLLKNKAVEFVKTGHPALHPGRAANIVSDGKVIGFVGELHPKWLQKYDLPQAPLVFEIDMAAVLECGKTRYRVVSKFQPVRRDLAFVMPEAMSHDDLLLVLKGAANKLVQEISVFDVYRGTGLPEGMKSVAVKVILQDMENTLTDEAVEPLIGKLIGAATAAGARLRS

SEQ ID NO: 5925 - protein, 135 aa, Neisseria meningitidis
MEIRAIKYTAMAALLAFTVAGCQLAGWYECSSLSGWCKPRKPAAIDFWDIGGESPPSLEDYEIPLSDGNRSVRANEYESAQQSYFYRKIGKFEACGLDWRTRDGKPLIETFKQGGFDCLEKQGLRRNGLSERVRW

SEQ ID NO: 5926 - protein, 916 aa, Neisseria meningitidis; identical to SEQ ID NO: 4091

SEQ ID NO: 5927 - protein, 129 aa, Neisseria meningitidis
MWKIIKEDSDDLEFAIKCLFSQSIDLNEFKLWIEQVIRDMPIEDIPFYIFDLADFDGGIADIDNIVGFVSSCRLSKSKKNALTGIAFLRGIDVYDPPISKEKALKALEKHPEIYQKFQHFFPFVELPPL

SEQ ID NO: 5928 - protein, 221 aa, Neisseria meningitidis
MTVLSKEQVLSAFKNRKSCRHYDAARKISAEDFQFILELGRLSPSSVGSEPWQFIVVQNPEIRQAIKPFSWGMADALDTASHLVVFLAKKNARSDSPFMLESLKRRGVTEPDAVAKSLARYQAFQADDIKILDDSRALFDWCCRQTYIALANMMTGAAMAGIDSCPVEGFNYAEMERILSGQFGLFDAAEWGVSVAATFGYRVQEIATKARRPLEETVIWA

SEQ ID NO: 5929 - protein, 445 aa, Neisseria meningitidis
LLFLYRDGTVLTLDAFEQCLKDCFPQGLNGKKTAVALSGGLDSVVLLHLLVRAGKKGGFIPDALHIHHGLSPRADDWADFCQNYCDMLGVGLETVKVCVEKNGLGIEAAARQKRYAAFAEKGFDVLALAHHRDDQIETFMLAVARGGGLRALAAMPAVRPFGEKGIIWRPLLPFSRQDIWDYAQKHGLPNIEDESNTDTAYLRNRFRHRILPELSAQIPHFGRHVLNNVRALQEDLALLDEVVVQDCRWVCGAGYFDTARWLTFSPRRKTHILRHFLKENGIPVPNQNALADIARVLTEAKTGRWNLQGFELHHYAGRLFVFRLEKTDKLRFLKDRQISGNLREILTGQGFVLKRHPFGLPEHLLEQDGILRTVAASDTLAMGGIHKDVKKILQGKRVLPVLRPIWPLVADSGNRPLALANCCADFQYSVSDGILPVHPDFPILF

SEQ ID NO: 5930 - protein, 306 aa, Neisseria meningitidis
MTKLYAEIAKMETQDDDTVKVWGYASSEEIDSDGEVIAAAAMKAAIPDYMKFGAGREMHGSNAAGTAIEINVEDDGRTFFVAHIVDPVAVTKVKTGVYKGFSIGGSVTAHDELNKSQITGLKLTEISLVDRPANPDAVSTCFKADKGAEAVNNDTEHNATYFSHFPSKQKSTDGGRCPFLYRFPYFLSAGSTGLAGAFGAGAPTEAWSFSFASTAGPMPFTLVKSSTDLNAPFCARYSAMAFAFAGPMPGSASNSCCEAALMFTAAREKAQENSIQNSTNIFFMVFPLRVANNKPHLATIKRVILK

SEQ ID NO: 5931 - protein, 311 aa, Neisseria meningitidis; identical to SEQ ID NO: 5677

SEQ ID NO: 5932 - protein, 281 aa, Neisseria meningitidis
MLSYRHAFHAGNHADMLKHFTLFLVLQYFNRKDKPYWYIDTHGGAGVYNLEGSEAQKVGEYRQGIALLRQAQNLPAELSDFAAHIQKILPSPKLYCGSPWLAQSLTRVGDKLRLFELHPTDFVHLQNNMGEAGLGKRGQVLREDGYKGLISLLPPPPRRATVLIDPPYEEKQDYRRVTETLKAALKRFESGCYLIWYPCLSREESRKLPEELKKLLPDNYLHAELHVHAPKADGFGMHGSGMFVINPPYLLAEQLAANLPALTRLLAQDEGSRYLLDSKIR

SEQ ID NO: 5933 - protein, 480 aa, Neisseria meningitidis
MNWSDLNLMPAMPEIVLLSLLVLLLLADLWVSDDKRPWTHYGALATVAVTAVVQLAVWEQGSTSSFNGMYIADGMSRLAKMVLYALTFALFVYAKPYNQVRGIFKGEFYTLSLFALLGMSVMVSAGHFLTAYIGLELLSLALYALIALRRDSGFAAEAALKYFVLGALASGLLLYGISMVYGATGSLEFAGVLASSFNEEANEWLLKLGLVFIVVAVAFKLGAVPFHMWVPDVYHGAPTSVTALVGTAPKIAAVVFTFRILVTGLGTVHHDWSLMFALLAAASLLVGNLAAIMQTNIKRMFAYSTVSHMGFILLAFMAGAVGFAAGLYYAITYALMAAAGFGVLMVLSDGDNECENISDLAGLNQHRVWLAFLMLLVMFSMAGIPPLMGFYAKFGVIMALLKQGHVWLSVFAVIMSLIGAFYYLRVVKVIYFDVPDHDQPVGSNYAAKFVLTVNAFLLLLWGIMPQTVIDWCAKALENTL

SEQ ID NO: 5934 - protein, 161 aa, Neisseria meningitidis; identical to SEQ ID NO: 896

SEQ ID NO: 5935 - protein, 289 aa, Neisseria meningitidis
MFMNKFSQSGKGLSGFFFGLILATVIIAGILFYLNQSGQNAFKIPASSKQPAETEILKPKNQPKEDIQPEPADQNALSEPDAATEAEQSDAEKAADKQPVADKADEVEEKAGEPEREEPDGQAVRKKALTEEREQTVREKAQKKDAETVKKQAVKPSKETEKKASKEEKKAAKEKVAPKPTPEQILNSGSIEKARSAAAKEVQKMKTSDKAEATHYLQMGAYADRQSAEGQRAKLAILGISSKVVGYQAGHKTLYRVQSGNMSADAVKKMQDELKKHEVASLIRSIESK

SEQ ID NO: 5936 - protein, 307 aa, Neisseria meningitidis; identical to SEQ ID NO: 526

SEQ ID NO: 5937 - protein, 122 aa, Neisseria meningitidis; identical to SEQ ID NO: 848

SEQ ID NO: 5938 - protein, 195 aa, Neisseria meningitidis
LNIKLKTLLLPFATLALCTNAFAAPPSDASLARWLDTQNFDRDIEKNMIEGFNAGFKPYADKALAEMPEAKKDQAAEAFNRYRENVLKDLITPEVKQAVRNTLLKNAREIYTQEEIDGMIAFYGSPVGQSVVAKNPRLIKKSMSEIAVSWTALSGKIAQHHLPEFTEELRRIICGGKNPDAGCKQAGQVGKRHQK

SEQ ID NO: 5939 - protein, 235 aa, Neisseria meningitidis
LVKTADGYKAIARIRTGDRVFAKDEASGKTGYKPVTARYGNPYQETVYIEISDGIGNNQTLISNKIHPFYSQGKWIQAGRLKKGDTLLSESGAKQTVQNITFKQQPLKAYNLTVADWHTYFVKGSQAETEGVWVHNDCPYDKGNQRYKDASYHGKNDNSVKSRAPTNGQAALDNSVQVKSTSPRRVGVDKANNEIVVLNKTQTFNNGSAEYHGHVRSWQDLHTDQKNALKKAGLD

SEQ ID NO: 5940 - protein, 428 aa, Neisseria meningitidis
MSAIVDIFAREILDSRGNPTVECDVLLESGVMGRAAVPSGASTGQKEALELRDGDKSRYSGKGVLKAVEHVNNQIAQALIGIDANEQSYIDQIMIELDGTENKGNLGANATLAVSMAVARAAAEDSGLPLYRYLGGAGPMSLPVPMMNVINGGEHANNSLNIQEFMIMPVGAKSFREALRCGAEIFHALKKLCDSKGFPTTVGDEGGFAPNLNSHKEALQLMVEATEAAGYKAGEDVLFALDCASSEFYKDGKYHLEAEGRSYTNAEFAEYLEGLVNEFPIISIEDGMDENDWEGWKLLTEKLGGRVQLVGDDLFVTNPKILAEGIEKGVANALLVKVNQIGTLSETLKAVDLAKRNRYASVMSHRSGETEDSTIADLAVATNCMQIKTGSLSRSDRMAKYNQLLRIEEELAEAADYPSKAAFYQLGK

SEQ ID NO: 5941 - protein, 657 aa, Neisseria meningitidis
MHPIETPDKTFHDGDGVSELGTILPAWWLNQVQSELLAVLTAAGIQPDKSQPNQLLAALNRLAVVITGDQTVNGQKTFTAQTQFQSGIHLSANQTNWNGGHKAYIGADADNAHIVFGDDTLRLHGANNRISYNNHDIFHKANKPRFAEDIQGKPNTLSGYGIGNFKVETFRGDLNTLKTDGIYSLPTAVGSSNLPVENTACHIQVIAGTKHGWCRQLGYPAYTSDVYERHQTSSANDNWSAWKKLNSDGIPVGAIVSFPKAVQNPAGYLKANGTTFAQNTFPDLYRALGNSNRLPDLSRTDIGITAWFPSDQIPTGWLAFDDIRTRVTETAYPELYRLLTGKYGSIQNVPQAEDRFIRNAGNSLAVGTKQEDEIKRHVHKVFSHWTNHTDAAALGYEDRNERQRSALVSTWTDENLNDNGFLTPRSDSKMATGGDENRPKALVLKLCIKAADTLGEAVFWIKSHGETINAGALDAGTLAQGLQDKADRDHTHTAAQIQGLDEKISTAVAAQFTRQTIGGVDIVRFPDGTMIQTGSYRFTRSGGPIENEVVFPVAFADGNVKCFVSERHSERVTGDRRQHNWLFIRAKNHAAAIITNWYEGSCDWMAIGKAASGNAASSPIGPEIPETNEEPQRESGRTSTGPRNRRRRDGLLEALQD

SEQ ID NO: 5942 - protein, 77 aa, Neisseria meningitidis
VPRAVSKTNRPACSVGISGVSPPICSGMAVNRLAVGKEAKPKHNQNLKAVFEDSVDATQSVGQNAFHPMEPVSDRTE

SEQ ID NO: 5943 - protein, 208 aa, Neisseria meningitidis; identical to SEQ ID NO: 4867

SEQ ID NO: 5944 - protein, 240 aa, Neisseria meningitidis
MPETGFRAFLRQMPSETTKQRFRRHPFQKRTIMKNIVILISGRGSNMQAIVNAAIHNVRIAAVLSNSETAAGLQWAAERGIPTDSLNHKNFTSRLAFDTAMMEKIDAYQPDLVVLAGFMRILTPEFCARYEGRLMNIHPSILPSFTGLHTHERALEAGCRVAGCTIHFVTAELDCGPIVSQGVVPILDGDTADDIAARVLAVEHKLYPKAVADFAAGRLIIEGNRVRNSENADAARFLTA

SEQ ID NO: 5945 - protein, 784 aa, Neisseria meningitidis
LKNNRQIKLIAASVAVAASFQAHAGLGGLNIQSNLDEPFSGSITVTGEEAKALLGGGSVTVSEKGLTAKVHKLGDKAVIAVSSEQAVRDPVLVFRIGAGAQVREYTAILDPVGYSPKTKSALSDGKTHRKTAPTAESQENQNAKALRKTDKKDSANAAVKPAYNGKTHTVRKGETVKQIAAAIRPKHLTLEQVADALLKANPNVSAHGRLRAGSVLHIPNLNRIKAEQPKPQTAKPKAETASMPSEPSKQATVEKPVEKPEAKVAAPEAKAEKPAVRPEPVPAANTAASETAAESAPQEAAASAIDTPTDETGNAVSEPVEQVSAEEETESGLFDGLFGGSYTLLLAGGGAALIALLLLLRLAQSKRARRTEESVPEEEPDLDDAADDGIEITFAEVETPATPEPAPKNDVNDTLALDGESEEELSAKQTFDVETDTPSNRIDLDFDSLAAAQNGILSGALTQDEETQKRADADWNAIESTDSVYEPETFNPYNPVEIVIDTPEPESVAQTAENKPETVDTDFSDNLPSNNHIGTEETASAKPASPSGLAGFLKASSPETILEKTVAEVQTPEELHDFLKVYETDAVAETAPETPDFNAAADDLSALLQPAEAPSVEENITETVAETPDFNATADDLSALLQPSEAPAVEENAAETVADDLSALLQPAEAPAVEENAAEITLETPDSNTSEADALPDFLKDGEEETVDWSIYLSEENIPNNADTSFPSESVGSDAPSEAKYDLAEMYLEIGDRDAAAETVQKLLEEAEGDVLKRAQALAQELGI

SEQ ID NO: 5946 - protein, 380 aa, Neisseria meningitidis
MKKSVLAVLAALSLAACGGSEKNAVQPQADAASAANAEAAATDTLNIYNWSNYVDESTVEDFKKANNLKLTYDLYENNETLEAKMLTGKSGYDLVVPGIAFLPRQIEAGAYQKVNKDLIPNYKNIDPELLKMLETADPGNQYAVPYFSGVNTIAITAKGKELLGGKLPENGWDLLFKPEYTHKLKSCGIALWDTPSEMFPILLNYLGKDPKGSNPEDLKAAAEVLKSIRPDVKRFSPSIIDELARGDICLAAGNGGDLNLAKARSEEVKNNVGIEVLTPKGMGFWIESWLIPADAKNVANAHKYINYTLDPEIAAKNGIAVTFAPASKPAREKMPAELVNTRSIFPNEQDMKDGFVMPQMSTDAKKLSVSLWQKIKVGTN

SEQ ID NO: 5947 - protein, 124 aa, Neisseria meningitidis
MQYLIVKYSHQIFVTITILVFNIRFFLLWKNPEKPLAGFWKALPHLNDTMLLFTGLWLMKITHFSPFNAPWLGTKILLLLAYIALGMMMMRARPRSTKFYTVYLLAMCCVACIVYLAKTKVLPF

SEQ ID NO: 5948 - protein, 92 aa, Neisseria meningitidis; identical to SEQ ID NO: 1287

SEQ ID NO: 5949 - protein, 180 aa, Neisseria meningitidis
VQSWKERRDFNIVKQDLDFSCGAASVVTLLNNFYGQKLTEEDVLKKLDKEQMPASFEDMRRIMPDLGFEAKGYALSFEQLAQLQIPVIVYLKYRKDDHFSVLRGIDGNTVLLADPSLGHVSMSRAQFLDAWQTREGNLAGKILAVVPKGRDAGGDKAFFTRSPKRQTEFAVGQVKWWRAY

SEQ ID NO: 5950 - protein, 286 aa, Neisseria meningitidis
LPVFPISLKIHAVKPTVRPYMSPSPFIEMKDVAFAYGDRPILKNINFSIPQGNFAAVMGGSGSGKTTLMRLITGQIRPQSGQVLIEGRDLAGFSADELYEHRRRMGVLFQHGALFTDLSVFDNIAFPMRELTRLPEAVIRDLVLLKLNAVGLRGVENLMPSELSGGMSRRVALARTIALDPEIMLYDEPFTGLDPISLGVIAHLISRVNKALRSTSIMVTHDIEKSLEIVDQVIFLAHGEIMFSGSPQEMRELDSPWVRQFVGGLADGPVAYRYPAQTSLQQDLLG

SEQ ID NO: 5951 - protein, 62 aa, Neisseria meningitidis
LTVKYTIFFSTSHHSNQTKATHRHTHVGSTAGQTTIRSGGDTTLKGAQLIGIGIQADPQLQP

SEQ ID NO: 5952 - protein, 397 aa, Neisseria meningitidis
MFFKHIEAAPADPILGLGEAFKAETRPEKVNLGIGVYKDASGATPLVKAVKEAEKRLLESETTKNYLTIDGVADYNAQTQILLFGKDHEIIASRRAKTAQSLGGTGALRIAAEFAKRQLNAQTIWISNPTWPNHNAIAKAVGIQDKPYRYYDAAKHGLDWDGMIEDLSQAQKGDIVLLHGCCHNPTGIDPTPEQWETLAKLSAEKGWLPLFDFAYQGFGNGLEEDAYGLRVFLKHNTELLIASSYSKNFGMYNERVGAFTLVAEDEETAARAHSQVKTIIRTLYSNPASHGANTIALVLKNDDLKAQWIAELDEMRGRIKAMRQKFVGLLKAKGASQNFDFIIKQNGMFSFSGLTPEQVDRLKNEFAIYAVRSGRINVAGITDNNIDYLCESIVKVL

SEQ ID NO: 5953 - protein, 118 aa, Neisseria meningitidis
MKKSLFAAALLSLVLAACGGEKAAEAPAAEAPAAEAPATEAPAAEAPAAEAPAAEAPATEAPAAEAPAAEAPAAEAPAAEAAATEAPAAEAAATEAPAAEAAATEAPAAEAPAAEAAK

SEQ ID NO: 5954 - protein, 309 aa, Neisseria meningitidis
MDSIIELRHLKTLLALEETGSVSLAAKRVFLTQSALSHQIRMLENHYGTPLFERKSTPLRFTPVGERLLRLAHELIPQVAVAEWDLARITEGEAGELRIAVECHTCFDWLMPAMGEFRPMWPQVELDIVSGFQADPVGLLLQHRADLAIVSEAEKQNGISFQPLFAYEMVGICAPDHPLAAKNVWTAEDFIGETLITYPVPDEMLDLPKKILIPKNINPPRRHSELTIAIIQLVASRRGIAALPYWTVMPYLEKGYVVHRQITADGLQSKLYAAIRTEDTDKSYLNNFCQIIRERGFADLPGLSELEPV

SEQ ID NO: 5955 - protein, 269 aa, Neisseria meningitidis
MTALPRYAVFGNPVAHSKSPQIHQQFALQEGVDIEYERICADIGGFAQAVSTFFETGGCGANVTVPFKQEAFHLADEHSERALAAGAVNTLIPLKNGKLRGDNTDGIGLTNDITQVKNIAIEGKTILLLGAGGAVRGVIPVLKEHRPARIVIANRTRAKAEELAQLFGIEAVPMADVNGGFDIIINGTSGGLNGQIPDIPPDIFQNCALAYDMVYGCAAKPFLDFARQSGAKKTADGLGMLVGQAAASYALWRGFTPDIRPVIEYMKAL

SEQ ID NO: 5956 - protein, 1069 aa, Neisseria meningitidis
MFYLYQSNRLETLAALFARIQKVKPLKSALQPEQIIVQSQGMRRYLNTCLARDLGVAANLSFSLPAGLTWKLMKKLIPGIPELSPFAPEVMRWRLLDLFRSEAFRNTAEFEDVRNVLQDYLGSGESADYQLAGQLADIFDQYLVYRPQWIDAWQQGRRLGLGDDEIWQSKLWRYLDDGRQSAPHRVALWEKLLESLSSDKLPERYFVFGISTMAPMYLQLLHKLSEHCDVFVFALNPSGMYWGNVIEAAQILKGGGDPDLTQAGHPLLASLGKQGRDFFDFLNEMEIEGETPVFEEGGRDTLLHALQTDIQNLKMPSEMAGSVNTGDGSIRIVSAHSPLRELQILKDKLLKILHEHPDWQPHDIAVLTPNIESYTPFIEAVFGQAQPGAQALPYSVSDVKISRRQPLFHALSCLFDLLESRFEVDKVLVLLETAPVLRRFGLTEDDLPLLHDMVADLNVHWGLDGEMRGGTDQLFTWKQAVERMILGWMLPKGGNPMWQDVSAWYADVNQTAMFGRFAAFLETLTDIVRIWRQPATVGEWVARCRDLLETLFQAEADDQKSVQNLENEWVKWQAETELAQFSGQLPPHTVIRHIRRFLDSESEAGFLRGGITFCSMVPMRSLPFKVICLLGLNDGDFPRNTKAAVFDLIAKHPAKGDRARRDDDRYLFLEALISAREILYLSYIGRDIRKDEELAPSSLLGELIDTVAAMAGIGSRQLAQNLIEQHPLQAFSRRYFQEGGRSDGIFGTRTDYAAALGQTPEPPQPFFDQPVENAEPVAEIGQDEFIRFWRNPVKVWLQQQLAWSEPHIGEAWEPAEPFEPQHADQIAEIYIEARREGRDFAQTAARIGAESLLPSGELGRLWQQDFQTAAKQIDTAVLNSPKLPPLSYAIPSDGQILKGSLGNLYRCGQVFYAYGKPNAPQRIAFLLEHLIFCAVMPSEAEMRQTFIVQSGETEILAEIAQDRALQLLSEWMAFFNIGQNRPLPFFAKTSLATAEAFAQKQDWEAALKKAQTAYHGSKVSKGQKDYTEVALVFGNASQNPLEQPLFENLVRLLADTLAAAEKKEEAGEA

SEQ ID NO: 5957 - protein, 262 aa, Neisseria meningitidis
MEDLYIILALGLVAMIAGFIDAIAGGGGLITLPALLLAGIPPVSAIATNKLQAAAATFSATVSFARKGLIDWKKGLPIAAASFVGGVAGALSVSLVSKDILLAVVPVLLIFVALYFVFSPKLDGSKEGKARMSFFLFGLTVAPLLGFYDGVFGPGVGSFFLIAFIVLLGCKLLNAMSYTKLANVACNLGSLSVFLLHGSIIFPIAATMAVGAFVGANLGARFAVRFGSKLIKPLLIVISISMAVKLLIDERNPLYQMIVSMF

SEQ ID NO: 5958 - protein, 118 aa, Neisseria meningitidis
MNEHNLLIFCLKDNVSISEYTEMVDWAYENIQSETVVEITENQIIEYQNRGLWGLVSEITDNWLFGPSEGDWLIDKESILAVKEKLQNSDFSTEPLVKNIIHVLEYAIKNEKTVIFHF

SEQ ID NO: 5959 - protein, 223 aa, Neisseria meningitidis
VFPDKYKLSLKENIFLAKKVLVAQIHNLSRFENCQTTLLQTEQIIHGKNVASASLEDIQTILNLKRAYQYVISHISNGEPVDISLLKKINNIVAKDDSLAPGDFRTGSVGVTLLDGSRHAPNPVKEIEVARVLQNIGLQSGSTTEAAVRFMLYCMRQQVFWDGNKRTATLFANGLMMAGGCGILEISEMQMPQFNEKLSAFYRSGDDTDISKFVYQNCISGID

SEQ ID NO: 5960 - protein, 230 aa, Neisseria meningitidis
MPSETASDGIVSTRRKPMKAFTKITAIVAPLDRSNVDTDAIIPKQFLKSIKRSGFGPNAFDEWRYLDHGEPGMDNSKRPLNPDFSLNQPRYQGAQILLTRKNFGCGSSREHAPWALDDYGFRAVIAPSFADIFFNNCYKNGLLPIVLTEERVDRLFKEVEANEGYQLSIDLAEQTLTTPSGETFTFDITEHRKHCLLNGLDEIGLTLQHADEIHAFEEKRRQSQPWLFNG

SEQ ID NO: 5961 - protein, 305 aa, Neisseria meningitidis
MEKAEHLNSSRFVNLVKSGGGSYVEGSYRFDTLSNGISIHGGTVTARCDFCSSRLAEPYVSFVLLLEGSLDFGINRCRFQIDADGGKIVLIAVGEEVLFSRYLYRGGKTVKMTIKGMEQWLLRPEYARFAPLLYREPVRIWDLPPNLRGLAASCLKAVPKGHLGETLRREADVLRLLSDLWDTVSDGIGPAAGQTAEADAMPSEDFSRTLNAAFADGAHQVNRLTDALNISERTLQRRMRDHFGITASEWLHHKQMQHALYLLQNGGKSIGETAYLCGYRHVSSFTQAFRQYFGSTPAETKKENR

SEQ ID NO: 5962 - protein, 655 aa, Neisseria meningitidis; identical to SEQ ID NO: 4008

SEQ ID NO: 5963 - protein, 228 aa, Neisseria meningitidis
MADLTFQQAVSTIVGMKDEIFRALGETFVMVGLSTTFAVIFGTLLGVLLFVTSSRQLHYNKLVNFLLDNLVNLMRAFPFVILMIAMIPATRAIVGSTIGPVAASLVLSVSGLFYFARLVEQNLREVPKGVIEAAAAMGAPPIAIVCKVLLNEARAGMVSSITVLAIGLLSYSAAAGMIGGGGLGDLAIRYGYYRYQTEVIIFIVALLVLLVILIQSTGNALARKLDKR

SEQ ID NO: 5964 - protein, 448 aa, Neisseria meningitidis
MSDNVPTIAAVATAPGRGGVGVIRISGKNLLPMAQALCGKTPKPRTATYADFTDTDGQAIDSGLLLFFAAPASFTGEDVIELQGHGGPVVMDMLLNRCLELGARLAEPGEFTKRAFLNDKLDLAQAEGVADLIDASSRSAARLALRSLKGDFSRRIHGLVEDLITLRMLVEATLDFPEEDIDFLEAADARGKLDGLRRAVDDVLANAQQGAILREGLNVVLVGAPNVGKSSLLNALAGDEVAIVTDIAGTTRDAVRERILIDGVPVHIVDTAGLRETDDVVERIGIERSRKAVSEADVALVLVDPREGLNEKTRAILDALPPELKRIEIHSKSDLHAHAAGGFGTGAETVIALSAKTGDGLDALKRTLLREAGWQGESEGLFLARTRHVNALKAAQEELSLAALCGNHQIELFAEHLRLAQVACGEITGEFTADDLLGVIFSRFCIGK

SEQ ID NO: 5965 - protein, 79 aa, Neisseria meningitidis
LHSAEADSVEAMMDLAVYGLAAMVAKHNKTRGEQLVLQAIAGHMRKLLAALPETESLVQTGKVYRRLEDLIFKTYLPEQ

SEQ ID NO: 5966 - protein, 116 aa, Neisseria meningitidis; identical to SEQ ID NO: 5541

SEQ ID NO: 5967 - protein, 465 aa, Neisseria meningitidis
MSQGKIVQIIGAVVDVEFPRDMIPRVYDALKLDENGLTLEVQQLLGDGVVRAIAMGSSDGLKRGMTVSNTGAPITVPVGKGTLGRIVDVLGTPVDEAGPIDTDKSRAIHQAAPKFDELSSTTELLETGIKVIDLLCPFAKGGKVGLFGGAGVGKTVNMMELINNIAKAHSGLSVFAGVGERTREGNDFYHEMKDSNVLDKVAMVYGQMNEPPGNRLRVALTGLTMAEYFRDEKDENGKGRDVLFFVDNIYRYTLAGTEVSALLGRMPSAVGYQPTLAEEMGRLQERITSTQTGSITSIQAVYVPADDLTDPSPATTFAHLDATVVLSRDIASLGIYPAVDPLDSTSRQLDPMVLGQEHYDVARGVQSTLQKYKELRDIIAILGMDELSDEDKLTVMRARKIQRFLSQPFHVAEVFTGSPGKYVALRDTIAGFKAILNGEYDHLPEQAFYMVGSIEEAVEKAKTLN

SEQ ID NO: 5968 - protein, 159 aa, Neisseria meningitidis; identical to SEQ ID NO: 38

SEQ ID NO: 5969 - protein, 334 aa, Neisseria meningitidis
MSGAAAALLAGIILYFKSDKKRQENGEWSSGLEYAYILTAVGVFAALSLFMSFTAVFLIFVVLCGTAWGVYKYRLKTHPEISESSHFGDYFGSFFPTVLVLFLIRSFIAEPFQIPSSSMRPGLIKGDFILVGKFSYGLRVPVLNNIFIPTGKIERGDVVVFNYPLQPEMTYIKRIVGIPGDVVEYRDKILTVNGKPTSDIPDGTYRYPDDTDPSEIHNTDMFRSGLDGKSFNILKKEGQPAVSLPVLGKYTSDIMSENGYSIEQSGLEHCQYADDGSGFVCKVPEGRYFAMGDNRDNSADSRYWGFVDDKLVVGKAMFILMNFGDFGRSGTAIR

SEQ ID NO: 5970 - protein, 197 aa, Neisseria meningitidis
MASIQDLYETVSRVLGNQAGKVISALGEITVECLPEHYISVMTALRDHEELHFELLVDLCGVDYSTYKNEAWQGKRFAVVSQLLSVKNNQRIRVRVWVSDDDFPVVESVVDIYNSADWYEREAFDMYGIMFNNHPDLRRILTDYGFVGHPFRKDFPISGYVEMRYDEEQKRVIYQPVTIEPREITPRIVREENYGGQ

SEQ ID NO: 5971 - protein, 126 aa, Neisseria meningitidis; identical to SEQ ID NO: 3371

SEQ ID NO: 5972 - protein, 760 aa, Neisseria meningitidis
MTVFRICFIIRLFLKYLGWGDVFRRWFLPCWVVGAAASFALPVVPHWLFWLAAFAVFAVFARRFAFAGLMLCVLAGAAYGVFRTEAALSSQWRAEAVSGVPLTVEVADMPRSDGRRVQFAAKAVDSGGRTFDLLLSDYKRREWAVGSRWRITARVHPVVGELNLRGLNREAWALSNGIGGAGTVGADRVLLHGGSGWGIAVWRSRISRNWQQADADGGLSDGIGLMRALSVGEQSALRPELWQAFRPLGLTHLVSISGLHVTMVAVMFAWLAKRLLACSPRLPARPRVWVLAAGCAGALFYALLAGFSVPTQRSVLMLAAFAWAWRRGRLSAWATWWQALAAVLLFDPSAVLGVGTWLSFGLVAALIWACSGRLHEGKRQTALRGQWAASVLSLVLLGYLFASLPLVSPLVNAVAIPWFSWVLTPLALLGSVVPFAPLQQLGAFLAEYTLRFLVWLADVSPEFAVASAPLPLLVLAVCAALLLLLPRGLGLRPWAVLLLAGFVFYRSPGVPENEVAVTVWDAGQGLSVSVQTANHHLLFDTGTAAAAQMGIVPSLNASGIRYLDYLVLSHHDSDHDGGFQAVGKIPNGGIYAGQPEFYEGARHCAEQRWQWDGVDFEFLMPSERKNIDDNGKSCVLRVVAGGAALLVTGDLDTKGEESLVGKYGGNLYSQVLVLGHHGSNTSSSGVFLNAVSPEYAVASSGYANAYKHPTEAVQNRVRAHGIKLLRTDLSGALQFGLGRGGVKAQRLRGYKFYWQKKPFE

SEQ ID NO: 5973 - protein, 131 aa, Neisseria meningitidis
MDKNLLEAVKFDEKGLVCAIAQDAETKRILMVAWMNAEALQKTVETGFAHYYSRSRQKQWMKGEESGHTQKVRALRLDCDGDAIVMLIAQNGGIACHTGRESCFYKVWRGSAWETADAVLKDEKEIYGSTH

SEQ ID NO: 5974 - protein, 473 aa, Neisseria meningitidis
MDTKEILGYAAGSIGSAVLAVIILPLLSWYFPADDIGRIVLMQTAAGLTVSVLCLGLDQAYVREYYATADKDTLFKTLFLPPLLSAAAIAALLLSRPSLPSEILFSLDDAAAGIGLVLFELSFLPIRFLLLVLRMEGRALAFSSAQLVPKLAILLLLPLTVGLLHFPANTAVLTAVYALANLAAAAFLLFQNRCRLKAVRHAPFSPAVLHRGLRYGIPIALSSIAYWGLASADRLFLKKYAGLEQLGVYSMGISFGGAALLFQSIFSTVWTPYIFRAIEENAPPARLSATAESAAALLASALCLTGIFSPLASLLLPENYAAVRFIVVSCMLPPLFCTLAEISGIGLNVVRKTRPIALATLGALAANLLLLGLAVPSGGARGAAVACAASFWLFFAFKTESSCRLWQPLKRLPLYLHTLFCLTSSAAYTCFGTPANYPLFAGVWAAYLAGCILRHRKDLHKLFHYLKKQGFPL

SEQ ID NO: 5975 - protein, 87 aa, Neisseria meningitidis; identical to SEQ ID NO: 1364

SEQ ID NO: 5976 - protein, 333 aa, Neisseria meningitidis
MIDRQTNEPKQKTRIILAPMQGLVDDVMRDLLTRIGGYDECVSEFVRITHTVHSRSIWLKYVPEIANGNKTFSGTPCTVQLLGSDADNMAANALEAVRFGANKIDLNFGCPAPTVNKHKGGAILLKEPELIFHIVKTLRGRLPAHIPLTAKMRLGYEDKSRALECACAIAEGGACGLTVHARTKAEGYEPPAHWEWIRKIRDSVNIPVTANGDVFSLQDYIGIKTISGCNSVMLGRGAVIRPDLARQIKQYENGGPVKDTDFAEVSKWIRQFFELCLTKEANNKYPLARLKQWLGMMKKEFAAAQNLFDRVRTVKDADEVRNILAEFEREMNT

SEQ ID NO: 5977 - protein, 149 aa, Neisseria meningitidis; identical to SEQ ID NO: 628

SEQ ID NO: 5978 - protein, 159 aa, Neisseria meningitidis; identical to SEQ ID NO: 4893

SEQ ID NO: 5979 - protein, 199 aa, Neisseria meningitidis; identical to SEQ ID NO: 1276

SEQ ID NO: 5980 - protein, 280 aa, Neisseria meningitidis
MDKERILTPAVVFSVALLHLAMVALLWQAHKLPVIESGNVIEFVDLGDFGGGDGAPEGAGAPAAPEPQPVPEPPKPVEPPKPVLKPVVTKKADADIQQPKEEPKPEEKPKPEEKPKPEPKPEAKPVPKPAEKPVEKPSEKPAEHPGNASAKADSEQGNGEDKGTGTKGDGTGRGEGSGKGSGGVKGEHGEGAGSSKGNPLRANGSIPRPAYPTLSMENDEQGTVVLSVLVSPGGHVESVKIVKSSGFSRLDNAARKAAQNGHFQANAWTEFKVPVKFELN

SEQ ID NO: 5981 - protein, 313 aa, Neisseria meningitidis
MPTPKAFALLGPTAGGKTALALKIAETLPVEIISLDSALVYRDMDIGTAKPSASERAFVPHHLIDIIPPTESYSAARFVEDCTRLVGEISSRGRFALIVGGTMMYFRALTQGLNDLPEADACLRADLDEQKQMYGLDFLYRTLQKVDPETACRLKPNDSQRIGRALEVYYLTGKPMSTHLGSLTSHTLPFDLHTAALIPENRARLHENIALRFHLMLEQGFIGEVENLRRRYPGLTAYSPAIRCVGYRQAWKYLDGKTDFPAFVEKGIAATRQLAKRQLTWLRKTPLDCVADPFSDCTSCTRLIEAAKRFFGA

SEQ ID NO: 5982 - protein, 56 aa, Neisseria meningitidis
MKYGVFFAAATALLLSACGYKGDLYLPKEGDKARFGVIQTGLQLQSKPQSAPQTQK

SEQ ID NO: 5983 - protein, 157 aa, Neisseria meningitidis
MTDFSVWETAPFGATVDHILQRYHNVHRAQFEELVPLAQKVAQVHADTFPAEIAELLAYMQNELLMHMMKEERMLFPMINQGVGRGAAMPIGVMMHEHEEHDRAIARLKELTDNFQPPEGACGSWTRLYALAKEMVEDLNDHIHLENDILFARVLDS

SEQ ID NO: 5984 - protein, 124 aa, Neisseria meningitidis
LAEGQKSAVTEYYLNHGEWPGNNTSAGVASSSTIKGKYVKEVTVANGVITATMLSSGVNKEIQGKKLSLWAKRQDGSVKWFCGQPVTRNAKAANDDVTAAAAANGKKIDTKHLPSTCRDASDAS

SEQ ID NO: 5985 - protein, 125 aa, Neisseria meningitidis; identical to SEQ ID NO: 3172

SEQ ID NO: 5986 - protein, 295 aa, Neisseria meningitidis
  misc_feature 3, 4: 'Xaa' is any amino acid
VCXXNRHKSTISREIRRHRTQGQQYSAEKAQRQSQTIKQRKRQPYKLDSQLIQHIDPLIRRKLSPEQVCAYLRKHHQITLHHSTIYRYLRQDKSNGSTLWQHLRICSKPYRKRYGSTWTRGKVPNRVGIENRPAIVDQKSRIGDWEADTIVGKGQKSALLTLVERVTRYTIICKLDSLKAEDTARAAVRTLKAHKDRVHTITMDNGKEFYQHTKITKALKAETYFCRPYHSWEKGLNENTNGLIRQYFPKQTDFRNISDREIRRVQDELNHRPRKTLGYETPSVLFLNLFQPLIH

SEQ ID NO: 5987 - protein, 169 aa, Neisseria meningitidis
MTDTQNRVAMGYIKGVFGIKGWLKIAANTEYSDSLLDYPEWHLVKDGKTISVTLEAGKVVNGELQVKFEGINDRDLAFSLRGYTIEIPREAFAPTEEDEYYWTDLVGMTVVNKDHTVLGKVSNLMETGANDVLMIDGEHGQILIPFVSQYIETVDTGSKTITADWGLDY

SEQ ID NO: 5988 - protein, 65 aa, Neisseria meningitidis; identical to SEQ ID NO: 127

SEQ ID NO: 5989 - protein, 150 aa, Neisseria meningitidis
MAKPLKYPVSALVVLYSGDGGILLIERTHPEGFWQSVTGSLEPGETVAQTARREVWEETGILLADGQLQDWHDSTVYEIYHHWRHRYPKGVFENREHLFSAEIPRDTPIALQPEEHVSYGWFDMEEAAEKVFSPSNRRAILELGRFLGKR

SEQ ID NO: 5990 - protein, 504 aa, Neisseria meningitidis
MTTSKCPVTHLTMNNGAPVADNQNSLTAGPRGPLLAQDLWLNEKLADFVREVIPERRMHAKGSGAFGTFTVTHDITKYTRAKIFSEVGKKTEMFARFTTVAGERGAADAERDIRGFALKFYTEEGNWDVVGNNTPVFFLRDPRKFPDLNKAVKRDPRTNMRSATNNWDFWTLLPEALHQVTIVMSDRGIPAGYRHMHGFGSHTYSFWNEAGERFWVKFHFRTQQGIKNLTNEEAAKIIADDRESHQRDLYEAIERGEFPKWTMYIQVMPEADAEKVPYHPFDLTKVWPKKDYPLIEVGEFELNRNPENFFADVEQSAFAPSNLVPGVGASPDKMLQARLFNYADAQRYRLGVNFRQIPVNRPRCPVHSNQRDGQGRADGNYGSLPHYEPNSFGQWQQQPDFAEPPLKINGDAAHWDYRQDDDDYFSQPRALFNLMNDTQKQALFGNTAAAMGDAPDFIKYRHIRNCYRCDPAYGEGVAKALGLTVEDAQAARATDPALGQAGLL

SEQ ID NO: 5991 - protein, 716 aa, Neisseria meningitidis
MKTPLLKPLLITSLPVFASVFTAASIVWQLGEPKLAMPFVLGIIAGGLVDLDNRLTGRLKNIIATVALFTLSSLTAQSTLGTGLPFILAMTLMTFGFTILGAVGLKYRTFAFGALAVATYTTLTYTPETYWLTNPFMILCGTVLYSTAIILFQIILPHRPVQENVANAYEALGSYLEAKADFFDPDEAEWIGNRHIDLAMSNTGVITAFNQCRSALFYRLRGKHRHPRTAKMLRYYFAAQDIHERISSAHVDYQEMSEKFKNTDIIFRIHRLLEMQGQACRNTAQALRASKDYVYSKRLGRAIEGCRQSLRLLSDGNDSPDIRHLRRLLDNLGSVDQQFRQLQHNGLQAENDRMGDTRIAALETGSLKNTWQAIRPQLNLESGVFRHAVRLSLVVAAACTIVEALNLNLGYWILLTALFVCQPNYTATKSRVRQRIAGTVLGVIVGSLVPYFTPSVETKLWIVIASTTLFFMTRTYKYSFSTFFITIQALTSLSLAGLDVYAAMPVRIIDTIIGASLAWAAVSYLWPDWKYLTLERTAALAVCSNGAYLEKIAERLKSGETADDVEYRATRRRAHEHTAALSSTLSDMSSEPAKFADSLQPGFTLLKTGYALTGYISALGAYRSEMHEECSPDFTAQFHLAAEHTAHIFQHLPETEPDDFQTALDTLRGELDTLRTHSSGTQSHILLQQLQLIARQLEPYYRAYRQIPHRQPQNAA

SEQ ID NO: 5992 - protein, 99 aa, Neisseria meningitidis
MTASMYILLVLALIFANAPFLTTRLFGVAALKRKHFGHHMIELAAGFALTAVLAYILESRAGSVHDQGWEFYATVVCLYLIFAFPCFVWRYFWHTRNRE

SEQ ID NO: 5993 - protein, 168 aa, Neisseria meningitidis
MVDAWSVPDFESKICPPEALAARLALLPRPLVFTNGCFDILHRGHVTYLAQARSMGDALVLALNTDASVRRLGKGGDRPVNPLENRAAVAAALESVDLVTWFDGDTPAALIEAVKPEILVKGGDWAADKIVGAAETLARGGQVFSIPFLHQTSTTKTLAKIRAAEGGK

SEQ ID NO: 5994 - protein, 344 aa, Neisseria meningitidis
MSLPAMDAGIYLEETAPRALIEHNNILDNSVGVYLHGSADAMVRENKIVGDATLRVNERGNGVTVWNAPGAQVVGNDISKGRDGIFSNTSTHNTYKNNRFSDLRFAVHYMYTNDSEISGNISVGNNMGYVLMFSERLKVFDNIAVGSRDQGIMLNYVNYSDIHDNIINKAGKCVFAYNANYDKLFANHFENCQIGIHFTAAIEGTSLHDNSFINNESQVKYVSTRFLDWSEGGHGNYWSDNSAFDLNGDGFGDSAYRPNGIIDQIIWRAPVSRLLMNSPAISIVKWAQAQFPAVLPGGVVDSKPLMKPYAPKIQTRYQAMKDELLKEVETRQSEWGRAENGSLN

SEQ ID NO: 5995 - protein, 474 aa, Neisseria meningitidis
LVFIMKISRPPEFTLLQQEYMQHLTERMTQIAKLLNSSANNPDIDIPDFLTEIKDYSEFSVTDENGTYLHWDKFRRIHTEDTRMKWRAVKESRKKIQKPIDFPFEHQFWFCIPDSLQARLHLIDKSCGSSIGTSSLGGFGRSEQNRFLLKSLIMEEAITSAQLEGAATTRKVAKDMLKSQRKPKTKDEIMIVNNYHLMKKAVELKNTPLSVEMILDLHRIATSNAIENKAEPGQFRQDDEIFIADINGNSLYQPPPHGQVHTLMEEVCAFANNTYDGVENPFIHPVVQAIILHFLIGYIHPFGDGNGRTARALFYWFMLKNGYWLFEYISISRLLKNAPAQYAKSYLYAETDDLDLTYFIYYQCDIIKRAVADLEHYISDKQKHQQEFKAAIAQYTEKIGKLNQRQIGILQKAVEESGKIFTAQEIANQYGISLNTARSDLSKLGEYRFLVPFKSGNALEYVAPQDLLERLEKK

SEQ ID NO: 5996 - protein, 106 aa, Neisseria meningitidis
MPHYSFYSSSRKMTDTKLNTKEILELKARAHHLHPVVMVGQQGLTDAVIKETDAALTAHELIKVRVFGDDRAERIEICTALCEAVDAQLVQHIGKLLVLWRKNIEA

SEQ ID NO: 5997 - protein, 317 aa, Neisseria meningitidis
MHQYYDAVILSVGNGLLKRFFKQNAQLNIASRPLIITLFPGVVFGDQASILSRMGADIVLYNNKHDFRIAEEYKKQYKLSCQNILYGYPIFRHASKGCHGEKIYFIDQVKIPFKKEERIYTLKKLIALAEKYPEKEFTILLRVADKDITVHQDKHSYIELAKQFQLPSNLTIERKSTAQAFQEMGYCLSYSSTMLFEAECKGIPVGVVADLGFSKSYANQHFLGSGVLVYFDQIDFTSPKIADPDWLDCYATKKVITTDEFNKLLKQVVPLQHDYQEYLSAVNSIESTKTIFLRKFKKLIRDPKKFFYDSKWLRKVI

SEQ ID NO: 5998 - protein, 263 aa, Neisseria meningitidis
MITVNTLQKMKAAGEKIAMLTAYESSFAALMDDAGVEMLLVGDSLGMAVQGRKSTLPVSLRDMCYHTECVARGAKNAMIVSDLPFGAYQQSKEQAFAAAAELMAAGAHMVKLEGGVWMAETTEFLQMRGIPVCAHIGLTPQSVFAFGGYKVQGRGGKAQALLNDAKAHDDAGAAVVLMECVLAELAKKVTETVSCPTIGIGAGADCDGQVLVMHDMLGIFPGKTAKFVKNFMQGHDSVQAAVRAYVAEVKAKTFPAAEHIFAD

SEQ ID NO: 5999 - protein, 593 aa, Neisseria meningitidis
MPYFALFDDAVSGRAKRYQNHVESRFFRPEELDALDGALQSGWQKGLHSVLFADYGFGLPLTGVESERGGNLALHWFANCADIDAESWLARHSDGLPAGISTPQPSVSETDYLDRIRQIHEAIRRGDTYQINYTTRLHLQAYGNPVSLYRRLRQPVPYAVLSHLPDAEGQSAWTLCFSPELFLKIGSDGTISTEPMKGTAPILGDGQDERRAAELQADPKNRAENVMIVDLLRNDLGKIAQTGTVCVPEPFKVSRFGSVWQMTSTIQAQALPHTSFADILRAAFPCGSITGAPKKMSMQIIESLEAEARGLYTGSIGYLNPCSGGLGFEGTFNVVIRTLSLTPLSDGIYQGVYGVGSGIVIDSDPAAEYRECGWKARFLNELRPDFGIFETLRAENGRCTLLDRHLCRLKTSAQALNLPLPDGCENQIKQYIADLPDGAFRVKALLASDGISLSRAVLNRLTDKQRVIISPAVLPAQNYLRRFKTTCRALFDQAWQTAETQGAFDSLFFNSDGILLEGGRSNVFIKHRGQWLTPSLDLDILNGIMRQAVLDEPQKYLQTNQVIETHITQKTLQEAEEIRLSNALRGVFAAALA

SEQ ID NO: 6000 - protein, 256 aa, Neisseria meningitidis
MTTTEHDNDDAFLLRYSRHILLDEIGIEGQQKLSAAHILVVGCGGLGAAALPYLAASGVGTLTIADSDTVELHNLQRQVAFDEGDVGKLKTEALAGRLKRINHTVNVRAVNEKLDGCRLTGLVQAADIVLDCCDNYATRQAVNRACVQTKTPLVSGAAVRFEGQLAVYRPDLPDSPCYACLFDGGSASDGICSLFGVFSPLVGIIGSTQAAEALKILLDAGEPSHGRLAVYRALEGGWQYFDLPRNPECPVCGTAR

SEQ ID NO: 6001 - protein, 514 aa, Neisseria meningitidis
MCGVLGLVSHEPVNQLLYDGLQMLQHRGQDAAGIATAEGGTFHMHKGKGMVREVFRTRNMRDLTGNAGIAHVRYPTAGNAGSSAEAQPFYVSSPFGIVLAHNGNLTNTAELYENVCNKHLRHVNTSSDSEVLLNVFAHELRREVSKNADPHRLNADNIFNAVAQVHRLVRGAYGVIAMIAGYGMLAFRDPYGIRPLVLGSQTDSEGRKSYAVASESVAFNALTYDLERDIRPGEAVFVGFDGTMIARQCSDRAKLSPCLFEYVYFARPDSVIDGVSVYQSRLDMGVSLAEKIKRELPVDGIDVVMPIPDTSRPSAMELAVHLDKPYREGLIKNRYIGRTFIMPGQATRKKSVRQKLSPMETEFAGKSVLLVDDSIVRGTTSREIVEMVRAAGARKVYIASAAPEVRYPNVYGIDMPTREELIANGRSAAEIAAEIGADGIVFQDLGDLEAVVKALNPKIESFDSSCFNGIYQTGDIDDAYLDRLSAEKSGCGGLKIHPSRMEHSISISDAGDEE

SEQ ID NO: 6002 - protein, 248 aa, Neisseria meningitidis; identical to SEQ ID NO: 4029

SEQ ID NO: 6003 - protein, 196 aa, Neisseria meningitidis
MTGFNDAAGVASSSDIKGKYVEKVEVKNGVVTATMLSSGVNKEIKGKKLSLWAKRQNGSVKWFCGQPVTRNDTATATDVAAANGKTDDKINTKHLPSTCRDDSSTGCIETPRADFKHFQKISRYRVLPESRQMAEKLRHSRKSGNLVRWFQLFRINFETLIPSFPRKWESRTQNLKKPFYPISFRTDRPGFPPARE

SEQ ID NO: 6004 - protein, 133 aa, Neisseria meningitidis; identical to SEQ ID NO: 825

SEQ ID NO: 6005 - protein, 394 aa, Neisseria meningitidis
MAKEKFERSKPHVNVGTIGHVDHGKTTLTAALTTILSKKFGGAAKAYDQIDNAPEEKARGITINTSHVEYETETRHYAHVDCPGHADYVKNMITGAAQMDGAILVCSAADGPMPQTREHILLARQVGVPYIIVFMNKCDMVDDAELLELVEMEIRDLLSSYDFPGDDCPIVQGSALKALEGDAAYEEKIFELAAALDSYIPTPERAVDKPFLLPIEDVFSISGRGTVVTGRVERGIIHVGDEIEIVGLKETQKTTCTGVEMFRKLLDEGQAGDNVGVLLRGTKREDVERGQVLAKPGTITPHTKFKAEVYVLSKEEGGRHTPFFANYRPQFYFRTTDVTGAVTLEEGVEMVMPGENVTITVELIAPIAMEEGLRFAIREGGRTVGAGVVSSVIA

SEQ ID NO: 6006 - protein, 141 aa, Neisseria meningitidis
MNFLGVQGELKVHELHHRTATLCFEWLGEVSAPRRKENYKDLKPNVLYDFDGSGKHFANPDARYLLPVGSSGLILKHIQIDDEDTLLRLWCARNIPMPHRLSKIPMLRQYYLSKAWHEIYAINQHLRKTKLIVDVAYDPTD

SEQ ID NO: 6007 - protein, 215 aa, Neisseria meningitidis
MKGVYFVSGIDTDIGKTVATGVLAKQLLQQGKSVITQKPVQTGCQNIADDIAVHRKIMGIPMQEADKRRLTMPEIFSYPASPHLAARLDGRALDLDKIRTATQELAAQYEVVLVEGAGGLMVPLTENLLTIDYIRQQGYPVILVTSGRLGSINHTLLSFAALKQYGIRLHSLVFNHIHDSRDAHIAQDSLSYLKCRLKADFSEAEWMELAKTDAV

SEQ ID NO: 6008 - protein, 140 aa, Neisseria meningitidis
MSIMQVEVVSSEQKIYSGEATFIVVPTVQGELGIYPRHEPIMSLVRPGALRLTVPGEDKEVLVAVSGGVLEVQPDKVTVLADVAVRSAEMDRARAEEAKKAAEAGISQAKDDKALAEAHKVLAAAIAQLKTLDYIRSHKK

SEQ ID NO: 6009 - protein, 367 aa, Neisseria meningitidis
MEAEVINQLNNTLNDLEKRSEDIRVYMDYQGKKDRLEEVIGLSEDPELWNDPKRAQEIGKERKILEGIVLTLDNIASGIEDNRMLIEMTVEENDEEGFAAVQEDVAGLEKQMADLEFKRMFNQPADPNNCFIDITAGAGGTEAEDWAGMLFRMYSRYAERKGFRIEILEEDDGEIAGINRATIRVEGEYAYGLLRTETGVHRLVRYSPFDSNNKRHTSFASVFVYPEIDDSIEIEINPADLRIDTYRASGAGGQHINKTDSAVRITHEPTGIVVQCQNDRSQHANKAAAMEMLKSKLYELEMRKRNEEKQALEEGKSDVGWGSQIRSYVLDSSRIKDLRTGYEVGNTKAVLDGDLDGFIEASLKQGV

SEQ ID NO: 6010 - protein, 194 aa, Neisseria meningitidis
MHILTAGVDEAGRGPLVGSVFAAAVILPETFDLPGLTDSKKLSEKKRDALAEMIKDQAAAWHVAAASPEEIASLNILHATMLAMKRAVDGLAVRPEKIFIDGNRIPEHLNIPAEAVVKGDSKIIEISAASVLAKTARDAEMYALAQRHPQYGFDKHKGYGTKQHLEALKQYGVLPEHRRDFAPVRNLLAQQTLF

SEQ ID NO: 6011 - protein, 718 aa, Neisseria meningitidis
MPAPQPSAPYDPLTAEARALLFHTASYLKPEEQAELEKAVAYAFRAHDGQTRKSGEPYITHPIAVATQLALWHMDIQGLCAGVMHDVLEDTGVTKGEMAAVFGNTIAEMVDGLSKLEKLKFEDHAEHQAESFRKLILAMTKDVRVIVVKLADRLHNMRTLGSMRPDKRRRIARETLEIYAQIANRIGLNNAYQELQDLSFQNLHPNRYETLKKAMDKSRKNRQDVVGKVLRAFGQRLVGANIEAKIKGREKNLYGIHQKMMAKKLRFAEVMDIYGFRVIVNSIPACYAALGALHTLYQPKPGRFKDYIAIPKSNGYQSLHTTLVGPYGLPIEVQIRTKEMDAVAEGGIAGHWSYKSYSKTVDQAVLHTNRWLKNILDLQASSANAIEFLEHVKVDLFPNEIYILTPKGKILTLPKGATPVDFAYAVHTDIGHKTVAARINNIMMPLRTKLKTGDSVEIITSEHAKPNPAWLNFAVSGRARSAIRQYIKNLNRHDAVVLGESLLQKALSSLLPKDVLLSDGIKEKYLADLNDKQTSFEEVLYNVGMGHTLPVYVAMHIAELAGEHFGSEVRLSSIKVDGQESGHIHFAECCHPVPGDSIRLLLVKGKGMIIHRDTCPTLLKSDPEQQLDADWENMNGQNYRVGLQVQSEDSHGLLALMAQAISDSGADIESVETPSKSQSGTEGFVEFKFLLKVKNLNQLNQIIQNLHSIPYIRKVIRS

SEQ ID NO: 6012 - protein, 139 aa, Neisseria meningitidis; identical to SEQ ID NO: 921

SEQ ID NO: 6013 - protein, 203 aa, Neisseria meningitidis
MGAIERRKTLKRKGNTVQDKNNLCWLDMEMTGLNPETDRIIEVAMIITDSDLNVLAQSEVYAVHQSDDVLNKMDEWNTATHGRTGLTQRVRESSHTEAEVEQKLLDFMSEWVPGRATPMCGNSIHQDRRFMVKYMPKLENYFHYRNLDVSTLKELAKRWNPPVAKSVVKRGSHKALDDILESIEEMRHYREHFLISAPRAEAQ

SEQ ID NO: 6014 - protein, 400 aa, Neisseria meningitidis
MKNYHAPDEKGFFGEHGGLYVSETLIPALQELADAYKAAKNDPEFWEAFRHDLKHYVGRPSPVYHAARLSEHLGGAQIWLKREDLNHTGAHKVNNTIGQALLAKRMGKKRVIAETGAGQHGVASATVAARFGMTCDVYMGADDIQRQMPNVFRMKLLGANVVGVESGSRTLKDAMNEAMREWVARVDDTFYIIGTAAGPAPYPEMVRDFQCVIGNEAKAQMQEAIGRQPDVAVACVGGGSNAIGLFHPYIGEENVRLVGVEAGGLGVNTPDHAAPITSGAPIGVLHGFRSYLMQDENGQVLGTHSVSAGLDYPGIGPEHSHLHDIKRVEYTVAKDDEALEAFDLLCRFEGIIPALESSHAVAWAVKNAPKMGKDQVILVNLSGRGDKDINTVAKLKGIKL

SEQ ID NO: 6015 - protein, 210 aa, Neisseria meningitidis
MDLHNIREDYSKRELSEADCADNPIEQFERWLDEAVRAQVNEPTAVNVAAVDGRGRPNSRMVLLKEVNSEGFVFFTNYHSRKGRSLDAHPFAAMTFFWPELERQVRVEGRVERLAEKLSDEYFESRPYQSRLGAWASAQSEVIPNKAVLVAKAAAVGLKHPLHVPRPPHWGGYIVIPDLLEFWQGRPSRLHDRIQYRLLDGGWIRERLSP

SEQ ID NO: 6016 - protein, 48 aa, Neisseria meningitidis
MKFVKSGRNPLKKMEKKLNIIKNIQEFMVKFVELALMAISEKSYIVVP

SEQ ID NO: 6017 - protein, 310 aa, Neisseria meningitidis
MLSQLEYGIAKENRPNRQADRFAGSVLPLAASLTHKPNIMKPIPTDTFQPAILPQAFETEIKSTCTGRIYRIQTATLGEIPSEGYPVLFVLDGEAFFPALFNIMQSLMNNPVTRSNAPCLIVGIGYTTGSVRDLAQRAADYTPPLGDNATADERQQFGQADRFAAFIDSELTAFLESRYTLNRNETAVFGHSFGALFGLYSLLSHRRFRRHWLVSPSIWWHNRRILDFMPSENRLNGIDVCLNIGALERGSDCKRREERDMAGQAEQMAAELDRHGAAVFFREYPNADHGNVPFYSLTDCVEYLRKAWQR

SEQ ID NO: 6018 - protein, 650 aa, Neisseria meningitidis
MRKVCASARTRSMIYGSMPSEKLTIFQTAFVMQVNIQIPYILPRCVRAEDTPYACYLKQLQVTKDVNWNQVQLAYDKWDYKQEGLTGAGAAIIALAVTVVTAGAGAGAALGLNGAAAAATDAAFASLASQASVSLINNKGNIGNTLKELGRSSTVKNLMVAVATAGVADKIGASALNNVSDKQWINNLTVNLANAGSAALINTAVNGGSLKDNLEANILAALVNTAHGEAASKIKQLDQHYITHKIAHAIAGCAAAAANKGKCQDGAIGAAVGEIVGEALTNGKNPDTLTAKEREQILAYSKLVAGTVSGVVGGDVNAAANAAEVAVKNNQLSDKEGREFDNEMTACAKQNNPQLCRKNTVKKYQNVADKRLAASIAICTDISRSTECRTIRKQHLIDSRSLHSSWEAGLIGKDDEWYKLFSKSYTQADLALQSYHLNTAAKSWLQSGNTKPLSEWMSDQGYTLISGVNPRFIPIPRGFVKQNTPITNVKYPEGISFDTNLKRHLANADGFSQKQGIKGAHNRTNFMAELNSRGGRVKSETQTDIEGITRIKYEIPTLDRTGKPDGGFKEISSIKTVYNPKKFSDDKILQMAQNAASQGYSKASKIAQNERTKSISERKNVIQFSETFDGIKFRSYFDVNTGRITNIHPE

SEQ ID NO: 6019 - protein, 151 aa, Neisseria meningitidis; identical to SEQ ID NO: 4206

SEQ ID NO: 6020 - protein, 223 aa, Neisseria meningitidis; identical to SEQ ID NO: 1391

SEQ ID NO: 6021 - protein, 230 aa, Neisseria meningitidis
VQADLAYAAERITHDYPKATGANNTSTVSDYFRNIRAHSIHPRVSVGYDFGGWRIAADYASYRKWNNNKYSVNTKELQKNNSSGIWQELKTENQENGTFHAASSLGLSAIYDFKLNDKFDKFKPYIGARVAYGHVKHQVHSVRKETTTTFSPPAQGATVPGKIVQGPTNKPAYHESNSISSLGLGVIAGVGFDITPKLTLDTGYRYHNWGRLENTRFKTHEVSLGMRYHF

SEQ ID NO: 6022 - protein, 284 aa, Neisseria meningitidis
MPPIPAPSAPSEHTVAWVFGQPVTDLPQDLFIPPDALKVVLGSFQGPLDLLLYLIRKQNIDVLDIPMVKITEQYLHYIAQIETYQFDLAAEYLLMAAMLIEIKSRLLLPRTETVEDEEADPRAELVRRLLAYEQMKLAAQGLDALPRAGRDFAWAYLPLEIAVEAKLPEVYITDLTQAWLGILSRAKHTRSHEVIKETISVRAQMTAILRRLNGHGICRFHDLFNPKQGAAYVVVNFIALLELAKEGLVRIVQEDGFGEIRISLNHEGAHSDGISGTRGGRDVF

SEQ ID NO: 6023 - protein, 208 aa, Neisseria meningitidis
MRKSRLSRYKQNKLIELFVAGVTARTAAELVGVNKNTAAYYFHRLRLLIYQNSPHLEMFDGEVEADESYFGGQRKGKRGRGAAGKVAVFGLLKRNGKVYTVTVPNTQTATLFPIIREQVKPDSIVYTDCYRSYDVLDVREFSHFSFAETSFSYQSQHTFCRTTKPYWNELLESGKTSFTQVRHSQSAFAVFKGVRMAFQQDKSSCSIL

SEQ ID NO: 6024 - protein, 589 aa, Neisseria meningitidis
MYPSALPRTADIHQPTPHPLAVYRKELYMSMENFAQLLEESFTLQEMNPGEVITAEVVAIDQNFVTVNAGLKSESLIDVAEFKNAQGEIEVKVGDFVTVTIESVENGFGETKLSREKAKRAADWIALEEAMENGDILSGIINGKVKGGLTVMISSIRAFLPGSLVDVRPVKDTSHFEGKEIEFKVIKLDKKRNNVVVSRRAVLEATLGEERKALLENLQEGSVIKGIVKNITDYGAFVDLGGIDGLLHITDLAWRRVKHPSEVLEVGQEVEAKVLKFDQEKQRVSLGMKQLGEDPWSGLTRRYPQGTRLFGKVSNLTDYGAFVEIEQGIEGLVHVSEMDWTNKNVHPSKVVQLGDEVEVMILEIDEGRRRISLGMKQCQANPWEEFAANHNKGDKISGAVKSITDFGVFVGLPGGIDGLVHLSDLSWTESGEEAVRKYKKGEEVEAVVLAIDVEKERISLGIKQLEGDPFGNFISVNDKGSLVKGSVKSVDAKGAVIALSDEVEGYLPASEFAADRVEDLTTKLKEGDEVEAVIVTVDRKNRSIKLSVKAKDAKESREALNSVNAAANANAGTTSLGDLLKAKLSGEQE

SEQ ID NO: 6025 - protein, 246 aa, Neisseria meningitidis
  misc_feature 242, 243, 244: 'Xaa' is any amino acid
MRKVCASARTRSMIYGSMPSEKLTIFQTAFVMQVNIQIPYILPRCVRAEDTPYACYLKQLQVTKDVNWNQVQLAYDKWDYKQEGLTGAGAAIIALAVTVVTAGAGAGAALGLNGAAAAATDAAFASLASQASVSLINNKGNIGNTLKELGRSSTVKNLMVAVATAGVADKIGASALNNVSDKQWINNLTVNLANAGSAALINTAVNGGSLKDNLEANILAALVNTAHGEAASKIKQLDQHYXXXHT

SEQ ID NO: 6026 - protein, 236 aa, Neisseria meningitidis
VKRGGSEQGTWLHPKLAIHFARWLNPKFAVWCDEQIEILLNGKISDGIKTVTPKPTRALPDGLTGEQIEAVKKLHNALTKSAPKEAQARIAITLWSAVKSKFGCSYKEVPAEQFPEVLSVMGRVAVENGVLYGEVLDREPLPAPQPALPISGNALYDLAVAVRYGAWAIQMGRDVSLPLKQLGCKQAVTMWTVWAETRSRLKAAANALEALNAHADAEHAAKIRPMLPEIRNLSSV

SEQ ID NO: 6027 - protein, 103 aa, Neisseria meningitidis; identical to SEQ ID NO: 1558

SEQ ID NO: 6028 - protein, 271 aa, Neisseria meningitidis
MPSEPPPNIQQTYARQASAMITIRNVSYRIGTRPILDNVSLDIPEGGITALVGPNGAGKSTLFSFMARLRPLESGSIAYRGKNLAGTPTAELARTLSILTQENSIMSRITVRDLLMFGRYPYHQGRPTAECRRIVNGAIEEFHLQDLSDRYLTELSGGQRQRAMIAMVFCQSTDYVLLDEPLNNLDMYHARSLMQILQKLTREHKRTTVAVLHDINQAAAYADYVVAMKNGQVAMQGKPNDIFTAENIKTLFDMDVNVLDYEGKKLVIHHI

SEQ ID NO: 6029 - protein, 552 aa, Neisseria meningitidis
LKEKCMDEIQIPKKVELQTKLENEKIVLSKGSTTIIVGANGTGKTRLAVYIEEQLKEKAHRISAHRALKLNPNVNKIPEKSAKTYLSYGQNWDGIDVSNRKNYRWDNNSYTHLLNDFDWLLQYLFAQQNNIAVANNQKLNRNEKVTNSKTKLDILQEAWETLLPHRKLHITADDIQVSAVDNEELYSASNMSDGERALFYILGQVLSVDDGSVLIFDEPELHIHKSIISNLWDKIEELRPDCSFLIITHDIEFAATRVAKKYVIRNYYPTPAWDISEVPESNFDEETITMILGSRKPILFVEGNNNSLDIATYRYCYPDWTIIPKGACKDVIQSVSSLKKLSNEMPLLNLKCSGIVDLDSRDEREIEQLNNLGIYILPVSEIENLFSLTDVAKEILKLNQYSDEELLNKLNGFKSELIKYIDNELKDDKLDEFVVKQVRRKIDNYLKNIDLSSKITSTDMKKSLLNEISTLTEQKIETWISEIKNEIQRCIEQQDLDKLLTIYDNKGLLAKSACVLKGMRNKHEFESWIMRTLKGRNKDFIDAIRQKLPILD

SEQ ID NO: 6030 - protein, 131 aa, Neisseria meningitidis; identical to SEQ ID NO: 1281

SEQ ID NO: 6031 - protein, 199 aa, Neisseria meningitidis; identical to SEQ ID NO: 1022

SEQ ID NO: 6032 - protein, 434 aa, Neisseria meningitidis; identical to SEQ ID NO: 2219

SEQ ID NO: 6033 - protein, 227 aa, Neisseria meningitidis
MFAFLEAFFVEYGYAAVFFVLVICGFGVPIPEDLTLVTGGVISGMGYTNPHIMFAVGMLGVLVGDGIMFAAGRIWGQKILRFKPIARIMTPKRYEQVQEKFDKYGNWVLFVARFLPGLRTAVFVTAGISRKVSYLRFIIMDGLAALISVPIWIYLGEYGAHNIDWLMAKMHSLQSGIFVILGIGATVVAWIWWKKRQRIQFYRSKLKEKRAQRKAAKAAKKAAQSKQ

SEQ ID NO: 6034 - protein, 344 aa, Neisseria meningitidis; identical to SEQ ID NO: 4579

SEQ ID NO: 6035 - protein, 182 aa, Neisseria meningitidis; identical to SEQ ID NO: 2877

SEQ ID NO: 6036 - protein, 140 aa, Neisseria meningitidis; identical to SEQ ID NO: 2533

SEQ ID NO: 6037 - protein, 494 aa, Neisseria meningitidis
MPYNQAPDFLCADTMHPTYSAVQARLLEANRLSPELLAKSLCIIGAHHVDYADIYCQRTAYESWHLEEGIVKSGSFQINQGVGVRAVSGDKTAFAYADSLCIDSINRSARAVRAIGAAGGKVSAKMPSETRGKPVCSASDPIAGLDSAAKVALLNKVEAIAKAADPRIVQVMAGLTCEYDMVYLARLDGKHAADIRPMVRLNVTVIAKQGERREQGSAGGGGRYDLAYFDENLVHRFVDAAVKQALTNLESRPAPAGEMTVVLGNGWPGVLLHEAVGHGLEGDFNRKGTSVFSGRIGERVAAKGVTVVDQGDIAGRRGSLNIDDEGNETRRTVLIEDGILVGYMQDETNARLTGTQSTGNGRRESYASAPMPRMTNTFMENGSYEPEEIIASIDKGIYAVNFGGGQVDITSGKFVFSASEAWWVEGGRLQYPVKGATIIGNGPEVLKHVSMIGNDTALDSGVGVCGKEGQSVPVGVGQPTLRIDAGLTVGGSAI

SEQ ID NO: 6038 - protein, 294 aa, Neisseria meningitidis; identical to SEQ ID NO: 171

SEQ ID NO: 6039 - protein, 242 aa, Neisseria meningitidis
MAGHSKWANIQHKKARQDAKRGKIFTRLIKEITVAARMGGGDPGSNPRLRLALEKAAENNMPKDNVQRAIDKGTGNLEGVEYIELRYEGYGIGGAALMVDCLTDNKTRTVADVRHAFTKNGGNLGTDGCVAFNFVHQGYLVFEPGVDEDALMEAALEAGAEDVVTNDDGSIEVITAPNDWAGVKSALEAAGYKSVDGDVTMRAQNETELSGDDAVKMQKLIDALEDLDDVQDVYTSAVLNLD

SEQ ID NO: 6040 - protein, 134 aa, Neisseria meningitidis
MANRFQQRKSAYRRLSGKPLFSDGIAANLCGGRKTLSYNLSRFKISIRSEMQKISFNLLKPANSPKIGKRRPGLNGAPHIPMPSPRYLPASPEMPGNNIHPAKIRNNTPGGRQSQTAPQSIRHQKNKPPPRASS

SEQ ID NO: 6041 - protein, 394 aa, Neisseria meningitidis
MTEPTSRRRFLKTCTAAAGAGLLQACGTSATSVPPLPSSHSVVKARTVPLQTPRRQSSDGNLLRVVASSGFAEDTNRVNTALTRLYNVGFTVTNQQAGSRRFQRFAGTDTQRAADFQEVASGRVATPKVLMGLRGGYGAARILPHIDFASLGARMREHGTLFFGFSDVCAVQLALLAKGNMMSFAGPMAYSDFGKPAPGAFTMDAFIKGATQNRLTVDVPYIQRADVETEGILWGGNLSVLASLAGTPYMPDIDGGILFLEDVGEQPYRIERMLNTLYLSGILKKQRAIVFGNFRMEKIRDVYDPSYDFSAVANHVSRTAKIPVLTGFPFGHIADKITFPLGAHARIRMNGNSGYSVAFEGYPTLDASALTLDTLLPPPDLPIFPESGVADISE

SEQ ID NO: 6042 - protein, 143 aa, Neisseria meningitidis
MNQLDQLGTRINLICNVFDKWIGQQDLNYNLFAVLYTLATEGSRTQKHIGEKWSLPKQTVSGVCKTLAGQGLIEWQEGEQDRRKRLLSLTETGKAYAAPLTESAQEFSDKVFATFGDKRTTRLFADLDALAEVMEKTISENKK

SEQ ID NO: 6043 - protein, 166 aa, Neisseria meningitidis; identical to SEQ ID NO: 1704

SEQ ID NO: 6044 - protein, 531 aa, Neisseria meningitidis
MKPLKTLEFGFVDAANYRRRENKDLFNRIFVKGEYLDELCEPNISFLIGEKGTGKTAYAVYLTNNFYKNIHATTKFVRETDYSKFIQLKKARHLTVSDFTSIWKVILYLLISNQIKCKENGILSSIFNKFKALDEAINEYYYGAFDPEIVQAITLIENSKEAAEMIFGKFVKLGEEESQQITFTESKFQANLGFIERKFKDALSQLKLKDNHILFIDGIDIRPSQIPFDEYHECVKGLANAIWMLNNDIFPSIKDSKGRMRVVLLIRPDIFDSLGLQNQNTKLQDNSVFLDWRTDYKSYRSSKIFGVFDHLLRTQQEKQDSLEKGNSWDYYFPWNAPNLHDEYKNLTSFISFLRKSYYRPRDILQMLTLLQKNKKSKEDYVVAEDFDNTSFQREYSIYLLGEIKDHLLFYYSQSDYQNFLKFFEFLNGKDRFKYSDFLKAFERLKKHLQTTSVEIPKFMSTANEFLQFLFDLNVIAYLDNPEDETKPYIHWCFKDRNYANISPKIKTETEYLIFSGLSKALDVGTPFKNKQ

SEQ ID NO: 6045 - protein, 128 aa, Neisseria meningitidis
MSNNIPAELKYVASHEWLRLEEDGTITVGITHHAQELLGDIVFVELPEVGANLAAEEQAGVVESVKAASDVYAPIAGEVVAVNEDLPSAPETANSDPYGAGWFFKLKPANVADYDSLLTAEQYAGEVD

SEQ ID NO: 6046 - protein, 469 aa, Neisseria meningitidis
LFEFKENKMIVASRWPLLEKVFLRFGMPVAVVDLESTGGNLYEDRVTEVALVKFEQGRVVRHEWLVNPQKPIPQFVAGLTGISDGMVADAPVFAEIAGELFSVLKGCVLVAHNSRFDYTFLKHEFHRAGIGFSSPALCSVQLSRCLYPQFYKHSLDSIIERLGIVVEDRHRAMADVSALCDYLEYSLSEHGVEAWIRQCFRLMNPKPLPAALPERLREQLYGLPDGMGVLACFDGGGKVNYIGTFERVYSEISALLDSGKAPFDWCNTEEVRFFPALGSLHAYKIKAELVGRYHSDCYVSAKNLLKTFTTVRFEKGSDGMLNAKTAALKNGVTDNPPTGLFANKKAARRALSSWAETYGLCPAAAGILPDGYAEDEPCPVYVSGRCDKACGRSDEQVLAFAHKLPVLDWGKMHEVEITETDPLTGEKVVLHGMGGALEMDDGLWYFDKDLPDAFKAKFKTDRKNIKEIG

SEQ ID NO: 6047 - protein, 172 aa, Neisseria meningitidis
MPSETPFSLSESRHYEFEGNSTIIRHSDFQTASRPSNRTQTKRKYMFRTMLGGKIHRATVTEADLNYVGSITVDQDLLDAAGIYPNEKVAIVNNNNGERFETYTIAGKRGSGVICLNGAAARLVQKGDIVIIMSYVQLSEPEIAAHEPKVVLVDGNNKIRDIISYEPPHTVL

SEQ ID NO: 6048 - protein, 169 aa, Neisseria meningitidis; identical to SEQ ID NO: 2049

SEQ ID NO: 6049 - protein, 144 aa, Neisseria meningitidis; identical to SEQ ID NO: 4528

SEQ ID NO: 6050 - protein, 118 aa, Neisseria meningitidis
MLSAYFPVFVFILIGLAAGVLFILLGTILGPKRHYAEKDAPYECGFEAFENARMKFDVRYYLVAILFILFDLEVAFMLPWAVVFKDLGAYGFWSMLVFIVVLTVGFVYEWKKGALEWE

SEQ ID NO: 6051 - protein, 155 aa, Neisseria meningitidis
MKIENIDIISPELFPQETFNETEAFGALVWLWAVSPIYQHAGVQEAAVNILPVLKNGQFALFSSNGHPVAYCTWAYFDEETEWQYLQSNDVLRHSENWCSGNRMWLINWFAPFGDSRMMKRILVHLFPKREIRWLYHRGSEKGKRIMRFPALSKQ

SEQ ID NO: 6052 - protein, 63 aa, Neisseria meningitidis; identical to SEQ ID NO: 980

SEQ ID NO: 6053 - protein, 921 aa, Neisseria meningitidis
MRIRRRLKNIYLLDKKNLARNHVQVINQFEQTGTHANRYDVTVLVNGLPLVQIELKKRGVAVREAFNQVHRYSKESFNSENSLFKFLQIFVISNGTDTRYFANTTKRDKNSFDFTMNWARSDNHPIKDLKDFTATFLQKSVLLGVLLHYSVFDANDTLLIMRPYQIAAAERILWKINSSAQAKNWSKPESGGYVWHTTGSGKTLTSFKAARLATESAFIDKVFFVVDRKDLDYQTMKEYQRFSPDSVNGSESTAGLKRNLEKDDNKIIVTTIQKLNNLMKGEDNLPVYHQRVVFIFDECHRSQFGEAQKNLKKKFKKFCQFGFTGTPIFPENALGAETTAGVFGRELHSYVITDAIRDEKVLKFKVDYNDVRPQFKAVEAEQDEKKLSAAENHKALLHPERIREITQYILNQFRQKTHRLNAGGKGFNAMFAVSSVDAAKCYYEAFKTQQAGSLHPLKVATIFSFAANEEQNAVGEIVDETFEPEAMDSSAKEFLQAAINDYNACFKTNFGTDSKAFQNYYRDLAKRVKNQEIDLLIVVGMFLTGFDAPTLNTLFVDKNLRYHGLMQAFSRTNRIYDATKTFGNIVCFRDLEQATIDAITLFGDKNTKNVVLEKSYEEYMNGYTDSQTGEARRGYLDVAKELRERFPDPDKIETEKDKKDFAKLFGEYLRAENVLQNYDEFAALRELQSVDAADEDAMKAFQEKYYLSDEDVQEMRQVPMPSERAVQDYRSAYNDIRDWLRRQKAGEQKEQSKIDWDDVVFEVDLLKSQEINLDYILQLVFEHHKKIKGKAELVEEIRRIIRASIGHRAKEGLIVDFINDTDLDKVPDVPAILETFYTYAQEVMRHEAAGLIAAEGLNETAAKRYLISSLKRGYASENGTELTETLPKMSPLNPQYLTKKQSVFQKIAAFVEKFAGIGTDI

SEQ ID NO: 6054 - protein, 265 aa, Neisseria meningitidis
MLKQRVITAMWLLPLMLGMLFYAPQWLWAAFCGLIALIALWEYARMSGLCKIKTNHYLAATLVFGVVAYAGGWMLPNLVWYVVLAFWLAIMPLWLRFKWRLNGGWQVYAVGWLLVMPFWFALVSLRPHPDDALPLLAVMGLVWVADVFAYFSGKAFGKHKIAPAISPGKSWEGAIGGAVCVAVYMTAVRSAGWLAFDTGWFDTVLIGLVLTVVSVCGDLLESWLKRAAGIKDSSNLLPGHGGVFDRTDSLIAVISVYAAMMSVLN

SEQ ID NO: 6055 - protein, 107 aa, Neisseria meningitidis
MQNETINLKQHLAAIKEYWQPEIINRHGFQFHLVKLLGDYGWHTHGYSDKVLFAVEGDMAVDFADGGSMTIREGEMAVVPKSVSHRPRSENGCSLVLIELSDPSEAV

SEQ ID NO: 6056 - protein, 324 aa, Neisseria meningitidis; identical to SEQ ID NO: 766

SEQ ID NO: 6057 - protein, 347 aa, Neisseria meningitidis
MIPATYTLSQITARLGGEWRGEDISVTAVRPLADAQAEHISFLANPKYKAEVHDSSAGAVIVSAKAADGFEGRNLIVADDPYLYFAKVARLFSPVVKARGGIHPTAVVEPGATVPASCEIGANVYIGANTVLGEGCRILANAVVQHDCKLGDEVVLHPNAVVYYGCTLGRRVEIHSGAVIGADGFGLAFAGDSWFKIPQTGAVTLGDDVEIGSNTNIDRGAMSDTTVGNGTKIDNQVQIGHNCKIGSHTVIAAKTGISGSVTIGSYCIIGGGVGTVGHIEIADKTTIGGGTSVTHSITESGKHLAGIFPMSTHKEWARNAVYIHRLSEMNKRLKTLEQQLSDGKDTQ

SEQ ID NO: 6058 - protein, 181 aa, Neisseria meningitidis; identical to SEQ ID NO: 1552

SEQ ID NO: 6059 - protein, 176 aa, Neisseria meningitidis
  misc_feature 172, 173, 174: 'Xaa' is any amino acid
LEDEDFIRAASMLAEEVFGFGIYKESKGSGGRFYERCWLMGSEDALYGRVHFGGQQNTILFELTGTGCGVAKEGWESRLFAFLTNAIRPKITRVDIAKDFFNGEYSPNQAREDRNKGMFTCHHVKPKGECLGSDWEEDDEAKMTKGKTYGIGSRESSKYVRVYEKASSWAIXXXHT

SEQ ID NO: 6060 - protein, 214 aa, Neisseria meningitidis
VTRPAKINTYTRIIDASLALFNEEGERNISTNHIAAHLGISPGNLYYHFRNKDEIIVQLFKRYSEALLAYLNEAVLPSDVEDSINYMAGIYDVMWEYRFLFSDVNTLLARSAELLGEHNTFTQAKVSPLLVNLLTQLNGLNIIQADQTAMNDLAVNMWMVTKYWFDFDSSLRGRTKLTEDSKARGIRRTLSLLRPYLLPEHRKKYDRKIGNGNP

SEQ ID NO: 6061 - protein, 278 aa, Neisseria meningitidis
MKNKTSSLLLWLTAIMLTACSPSKDDKTKEVGASAASSSASSAPSQTDLQPTASAPDNVKQAESAPPSNCTSLHPATGIDDLMQQIAEHIDSDCLFALSHHELETRFGLPGGGYDNIQRLLFPDIRPEDPDYHQKIILAIEDLRYGKRTISRQAQNALMEQERRLREATLLLIQGSQETRGQGEEPKRTRYFEVSATPAYSSRHNNGLGGNFQYISQLPGYLKIHGEMLENQSLFRLSNRERNPDKPFLDIHFDENGKITRIVVYEKNIYFNPNTGRI

SEQ ID NO: 6062 - protein, 301 aa, Neisseria meningitidis; identical to SEQ ID NO: 1112

SEQ ID NO: 6063 - protein, 280 aa, Neisseria meningitidis
MLVCNPYEVVIHGTTSSGKIFRPSDWAERLCGILSSFTKDHRLSYSKWVRPILVDNIRCVAVDKKLETDNPQMFRFLMDFAADNDLRVIDCKALLEEREQGGQNNPADEHVMLAQAIEEKHAAEKAQEQTASGASYVLREIGADDTATAFAALSVLRSALTDINRFTEQINKVQRPQGYRLLGIFEEGKHNAVAVCGFREACTLASGRHIHIDDIVTLPQSRRKGYASRLLEEVRKIGAETGVTKIHLNVHVNHDRADAHRLYFKNGFEICAYHFRCDPK

SEQ ID NO: 6064 - protein, 344 aa, Neisseria meningitidis
LEDEDFIRAASMLAEEVFGFGIYKESKGSGGRFYERCWLMGSEDALYGRVHFGGQQNTILFELTGTGCGVAKEGWESRLFAFLTNAIRPKITRVDIAKDFFNGEYSPNQAREDRNKGMFTCHHVKPKGECLGSDWEEDDEAKMTKGKTYGIGSRESSKYVRVYEKGKQLGDKTSTWTRFEIEFKAKDIVIPFEVLQNPGEYFGGAYPICERFAQKATRIHAVKEDKVISADRYLEWVKKQFGRAANGLKFIFPELDKAKLFELIEPSHHKLPKSLAPEAYDCAFLKAQAIHEQPAFKPYKDPYYMYEYYENLEKQLEQQKHVNNEESYNNFIYDKFARLPISWA

SEQ ID NO: 6065 - protein, 166 aa, Neisseria meningitidis; identical to SEQ ID NO: 1498

SEQ ID NO: 6066 - protein, 197 aa, Neisseria meningitidis
MEHYLSLFIKSVFIENMALSFFLGMCTFLAVSKKVSTAFGLGVAVIFVLGLSVPVNQLVYSLLKDGAIAEGVDLTFLKFITFIGVIAALVQILEMFLDKFVPALYNALGIYLPLITVNCAIFGAVSFMAQREYNFGESVVYGFGAGLGWMLAIVALAGITEKMKYSDAPKGLKGLGITFIAAGLMAMAFMSFSGIQL

SEQ ID NO: 6067 - protein, 299 aa, Neisseria meningitidis
LPSEKKMCIEMKFIFFVLYVLQFLPFALLHKIADLTGLLAYLLVKPRRRIGEINLAKCFSEWSEEKRKTVLKQHFKHMAKLMLEYGLYWYAPAGRLKSLVRYRNKHYLDDALAAGEKVIILYPHFTAFEMAVYALNQDIPLISMYSHQKNKILDEQILKGRNRYHNVFLIGRTEGLRALVKQFRKSSAPFLYLPDQDFGRNDSVFVDFFGIQTATITGLSRIAALANAKVIPAIPVREADNTVTLHFYPAWKSFPGEDAKADAQRMNRFIEDRVREHPEQYFWLHKRFKTRPEGSPDFY

SEQ ID NO: 6068 - protein, 41 aa, Neisseria meningitidis
MVYRENIRNDKIMKAIHCQIIIIILDILSNEKKYFSQCKPL

SEQ ID NO: 6069 - protein, 134 aa, Neisseria meningitidis
MNLVKLLANNWQPIAIIALVGTGLAVSHHQGYKSAFAKQQAVIDKMERDKAQALLLSAQNYARELELARAEAKKYEVKAHAVGMALAKKQAEVSRLKTERDLCKIPFPPDSRNPNTGFRLFSPQIPPNFTQIPP

SEQ ID NO: 6070 - protein, 57 aa, Neisseria meningitidis
MRFSRFELRGRLKTEKLFQTTFLLTSCHSNRTKAAYLHIHIGNTGEIFCKFYEYFTC

SEQ ID NO: 6071 - protein, 163 aa, Neisseria meningitidis; identical to SEQ ID NO: 1830

SEQ ID NO: 6072 - protein, 419 aa, Neisseria meningitidis
MLPVRFTRVSDGIKRLTPASNQTAFYHPFENPFCRYSSFYWSIAIMTATTASSAKPYLKIQGLVKKFGDNYAVDNIDLDIYQHEIFALLGSSGSGKSTLLRMLAGMESPNQGKIILDGQDITKLAPYDRPINMMFQSYALFPHMTVEQNIAFGLKQDKMPKGEIAARVEEMLRLVQMTKFAKRKPHQLSGGQQQRIALARSLAKRPKILLLDEPLGALDKKLRQQTQLELVNTLEQVGVTCIMVTHDQEEAMTMATRIAIMSDGQLQQVGTPSDVYDYPNSRFTAEFIGETNIFDGVVIEDHADYAVIECEGLENHVRIDHGLGGPSEQDLWVSIRPEDIDLYKEKPEYLGDYNWAKGTVKEIAYLGSFAIYHIKLGNGRVVKSQVPAPYWYVRNITPPTWDETVYISWPENQPTPLFR

SEQ ID NO: 6073 - protein, 254 aa, Neisseria meningitidis
LQRKIRPAENPPLQEQAGKHRQPPPKRRTRALQAVAGTGALSRGTGAFPPIFQYNATPDLPQSKGNAMKLIILDRDGVINQDRDDFVKSVDEWIPVEGSMDAVAFLTQAGYTVAVATNQSGIGRKYFTVQNLTEMHAKMHRLVRQAGGEINGIWFCPHTDADNCNCRKPKPGMIEDIIGRFNAQASETWLVGDSLRDLQAIDAVGGKPALVLTGKGKKTLSQHGHELPEHTQVFDTLLDFSQYIMQENTAPQAD

SEQ ID NO: 6074 - protein, 150 aa, Neisseria meningitidis; identical to SEQ ID NO: 2445

SEQ ID NO: 6075 - protein, 117 aa, Neisseria meningitidis; identical to SEQ ID NO: 408

SEQ ID NO: 6076 - protein, 505 aa, Neisseria meningitidis
MVISNPRELEKLKDRIPNLINIIRVAIVFPLMIMHILGLETGSRANLHASWTAWAFYVWLAIACWLIFFSIIHPHWQWQSLKMPRFSAVADITMIGVLTYLFGGIDSGFGILILPFVVCSCLLSYGRYPLLYSSYAAILLIFNAIADGDIGKYPLISDARTASATFILVAASYLSAIFTSLSVKYIDRAGKLAYDSHIAYHRIKGLSQTVLERVQEAVVVINAEGLAVLFNRKAKDLFPALEIGRRAGLSDSAAELWDQASPHTFEYVLGTPGLNAGIRAVPVNKGSDKLLILYIRPQSEIQAEALSVKLAALGQLTANLAHEIRNPMSAIRHANDLLRENMEAGAADPFNAKLCKIIDGNICRIDKMLEDISSLNKRNKTERETIGLIPFWEEFKQEFLLGHPDAADCIRPDIQGGSPTAYFDPAHLRQIMWNLANNAWRHSRKQPGSISVTIRPAQKNTVCILFADRPKCRNTCSNPFTPRRKTAPASGCMSPANWRTPISAI

SEQ ID NO: 6077 - protein, 1305 aa, Neisseria meningitidis
MTYPIPKPREKSRWPNLSQGSLPLALARYLPHKRLKVVLTQDAEQALRLQTAWRFFRPHDTAVFLPDWETLPYERFSPHQDLVSERLSALWQIKSGAADVLFVPVATAMQKLPPVPFLAGRTFWLKTGQTLDIGRLKSDLVDAGYNHVSHVVAAGEFAVRGGIVDLFPMGSEMPYRIDLFDDEIDSIKTFDTETQRTISPVSEIRLLPAHEFPTDSEAQKIFRSRFREEVDGNPNDAAVYKAVSNGHFGAGVEYYLPLFFENELETLFDYIGEDALFVSLDDVHAEANRFWSDVKSRYAMAQGDETYPPLLPQYLYLSADVFAGRLKNYGQVLPDVSGKEYTLPDLAVNRQADEPLQALKDFQTAFDGRILLCAESLGRRETMLGFLQQNGLKAKPVSDWQGFLSAHEPLMITVAPLAYGFKLGGLQSPNQQQPTPSPVGEGWGEGKAVAAQTEFSAAAINPLPSPLPQEREQSAAAVSDSLKAAAVSTESSLPLGTSNLHGQIRQQPAPSPVGEGWGEGKAVAAQTEFPASATNPLPSPLPQEREQSAAAVSDDLKTKSSLHPVANNLHGQIRQQPTPSPVGEGWGEGKAVAAQSAIAVITESDLYQYVARSRIHNRRKKHAAVSDGLLRDLAEINIGDPVVHEEHGIGRYMGLVTMDLGGETNEMMLLEYAGEAQLYVPVSQLHLISRYSGQAHENIALHKLGSGAWNKAKRKAAEKARDTAAELLNLYAQRAAQSGHKFEINELDYQAFADGFGYEETEDQAAAIAAVIKDLTQAKPMDRLVCGDVGFGKTEVALRAAFVAVMGGKQVAVLAPTTLLVEQHAQNFADRFADFPVKVASLSRFNNSKATKAALEGMADGTVDIVIGTHKLVQDDIKFKNLGLVIIDEEHRFGVRQKEQLKRLRANVDILTMTATPIPRTLSMALEGLRDFSLITTAPSRRLAVKTFVKPFSEGSVREAVLRELKRGGQVFFLHNEVDTIENMRERLETLLPEARIGVAHGQLRERELEQVMRDFLQQRFNVLLCSTIIETGIDIPNANTIIINRADKFGLAQLHQLRGRVGRSHHQAYAYLLTPEYITKDAEKRLDAIAAADELGAGFTLAMQDLEIRGAGEILGEGQSGEMIQVGFTLYTEMLKQAVRDLKKGRQPDLDAPLGITTEIKLHSPALLPEDYCPDIHERLVLYKRLAVCETVQQINTIHEELVDRFGLPEQPVKTLIESHHLRLMAKELGIDAIDAAGEAVTVTFGKNNNVDPTEIILLIQNDKKYRLAGADKLRFTAEMENIEVRINTVKNVLKTLQNRCLPK

SEQ ID NO: 6078 - protein, 222 aa, Neisseria meningitidis; identical to SEQ ID NO: 197

SEQ ID NO: 6079 - protein, 188 aa, Neisseria meningitidis
MSALLPIINRLILQSPDSRSELAAFAGKTLTLNIAGLKLAGRITEDGLLSAGNGFADTEITFRNSAVQKILQGGEPGAGDIGLEGDLILGIAVLSLLGSLRSRASDELARIFGTQADIGSRAADIGHGIKQIGRNIAEQIGGFSRESESANIGNEALADCLDEISRLRDGVERLNERLDRLERDIWID

SEQ ID NO: 6080 - protein, 231 aa, Neisseria meningitidis; identical to SEQ ID NO: 3708

SEQ ID NO: 6081 - protein, 96 aa, Neisseria meningitidis
MPLLAGLIPLLGILLKMLIVRIILATGLTFVTYAGYLIALEKFKDYTSNAINSMPSDILNLLLISGFGQGLGYLFGAFSFFIGMHAFKKLTFVFPG

SEQ ID NO: 6082 - protein, 85 aa, Neisseria meningitidis
MKEFPDLEKRLIMLEVAVQDLEDRSLADSFVLSWLLQRITRQEPTSIEQVRSFLQAQAKTFEPDSVQREHLESLLELVESAQELA

SEQ ID NO: 6083 - protein, 78 aa, Neisseria meningitidis; identical to SEQ ID NO: 1622

SEQ ID NO: 6084 - protein, 329 aa, Neisseria meningitidis; identical to SEQ ID NO: 247

SEQ ID NO: 6085 - protein, 411 aa, Neisseria meningitidis
MTISTMAQTHDTRLQKTLLFPSQQGWKSKTFLKPDSHIRLATVFSGIGAVEQAFHRLNLNHTIVFSGDIDPYVKKSYLGNYKLNEDFWHNDITQFDARKFRNQVDILVGGSPCQAFSMVGKRAGLEDTRGTLFYEFARVVDEVQPKIFIYENVKGLLNHDNGKTWKVVKSVFYSLGYDLYFQIMNSKDYGIPQHRERIFVVGFHTPPINGFQFPEKIELEHTMQDFLEDYTDSKYFLREKGAKFVTSSKNRQKRYTQINGEIALCQKANQQFNWHGDFIFQAARESEFDDFIFDVNNVEEKYYLSEKIKNYVLAGGTKNFKTSTETDLPVARPLLQTMHKMHRAGVDNYVTHNRGRIRKLTPRECLRLMGFRDDFKILVSDTQMYRQAGNSIVVDVLIAILKQMDITLYGE

SEQ ID NO: 6086 - protein, 312 aa, Neisseria meningitidis
MDAYPEAEAPPQSIVELVPVLIAVTDGGLRVLTVAQGMLLPNGPLSPLRNSLQAGVKLWVAKQTSQPMGYVEQLYTFVDTHRRNEHGMPVLYVSYLGLVREAADSILHPDAKWQDCYGYFPWEDLRTDGGQRDAVVGRLRIWANSADTEEVRQKRLKRIHLCWGVEPENWSEEYVLQRYEMLYESGLIAEAAEPQANFDFALTGQPMRHDHRRVLATALSRLRAKIKYRPVIFELMPPEFTLLQLQNSVEAISGRLLHKQNFRRQIQQQNLIEPSDTGVSGSKGRPAQLCRFRDDVLPDRLISDIGLPLGSR

SEQ ID NO: 6087 - protein, 380 aa, Neisseria meningitidis
MKVFKQQLEQLGAQNQYRSIPDLIHQGRYITRENRKMLNMSSNDYLGLASDENLRRSFLQQYGGNFPSFTSSSSRLLTGNFPIYTDLEELVAQRFQRESALLFNSGYHANLGILPALTTTKSLILADKFVHASMIDGIRLSRCAFFRYRHNDYEHLKNLLEKNVGKFDRTFIVTESVFSMDGDVADLKQLVQLKKQFPNTYLYVDEAHAIGVYGQNGLGIAERDNLIAEIDLLVGTFGKALASVGAYAVCNQVLKECLINQMRPLIFSTALPPFNVAWTYFIFERLPQFSKERSHLEQLSAFLRREVAHRTQIMPSQTCIVPYILGGNEATLAKAEYLQRQGYYCLPIRPSTVPKNTSRIRLSLTADMTTDEVRQFAACL

SEQ ID NO: 6088 - protein, 723 aa, Neisseria meningitidis
MANGNMKLSLVLTARDDGARRLLADTQRQLDRTAKSRAQLERQSHTYALTGIRSEKQIQREIMLTQAAFNRLARSGKASQNDLARAAVATRNRIRELNAELKQGTGFADKMGKIGRFGAAAVAGGAAAYTVLKPAMDNRKQLDENINRVSRQAFIEDNSKSAAWIATEGAQQIKDLALELVEKNGGTHDKALDLISGMMTTGLNFAQTKNEAQAAYAFALASEGSGEDTAKLIKTLKDGGMSGKDLQLGLEHVLQSGLDGTFEVRDMVRELPSLLSAAQQAGMNGVGGLDYLLSLLQSAANKSGSPAEAATNVQNLLSKTLSPDTIGRLKKMANPNDPKKGVDWIGSVVQGKQNGENAVQVLSRLADAMLVKDKQYQDYKKRAAAGDKTAAEQANMLKGALLAQLLPDLQAKQGLLAATDMTQIREYMASLAGVTLDNGKIAKNNEARMLSAAAQQEQQESLAMLRESLTGTLVDMETSFKKLAAEYPNATLALQALTTAATAASAAMLLTAGGGKGAGFLKDVGSKALGWGKASAGGVAAGATAAGGKLLSWGKSAGSGLMNNPALVKRAGLLGMLLYSESLGDGTLPKGLRGTKTTPEMINRLKNNGIRFEPAPKREQARGGVPQYLAAPSAQPTDKMLSPLFSTQTAAYQAAIQQQTAAYQAALAQDTAAVTTGLAQVQSAMASASQTINTNVSLNIDGRVIANEVSRYQVAMFGRGAGQ

SEQ ID NO: 6089 - protein, 382 aa, Neisseria meningitidis
MNTPPFVCWIFCKVIDNFGDIGVSWRLARVLHRELGWQVHLWTDDVSALRALCPDLPDVPCVHQDIHVRTWHSDAADIDTAPVPDVVIETFACDLPENVLHIIRRHKPLWLNWEYLSAEESNERLHLMPSPQEGVQKYFWFMGFSEKSGGLIRERDYCEAVRFDTEALRERLMLPEKNASEWLLFGYRSDVWAKWLEMWRQAGSPMTLLLAGTQIIDSLKQSGVIPQDALQNDGDVFQTASVRLVKIPFVPQQDFDQLLHLADCAVIRGEDSFVRAQLAGKPFFWHIYPQDENVHLDKLHAFWDKAHGFYTPETVSAHRRLSDDLNGGEALSATQRLECWQTLQQHQNGWRQGAEDWSRYLFGQPSAPEKLAAFVSKHQKIR

SEQ ID NO: 6090 - protein, 275 aa, Neisseria meningitidis
MQNHVISLASAAERRAHIADTFGRHGIPFQFFDALMPSERLEQAMAELVPGLSAHPYLSGVEKACFMSHAVLWKQALDEGLPYITVFEDDVLLGEGAEKFLAEDAWLQERFDPDTAFIVRLETMFMHVLTSPSGVADYCGRAFPLLESEHWGTAGYIISRKAMRFFLDRFAALPPEGLHPVDLMMFSDFFDREGMPVCQLNPALCAQELHYAKFHDQNSALGSLIEHDRLLNRKQQRRDSPANTFKHRLIRALTKISREREKRRQRREQFIVPFQ

SEQ ID NO: 6091 - protein, 100 aa, Neisseria meningitidis; identical to SEQ ID NO: 1023

SEQ ID NO: 6092 - protein, 322 aa, Neisseria meningitidis
MKLTLAIPSLNLDEDEIRIPLCLHAFNKILQYGSLHRQSCTASAFYARYLWCGRLVERAAQSLNMPSEAVALATPVWQKMGMHQANVLTAEYLNVGTDEAERICRDLSAFYGDIPWRFVPVLPELWLVSLPCAYRWGAKPVLDLGGLLGADDQPDGEDALEWLRVQTEIQMWLAAHPVNHNRKKRGLPELNGLWLWDGTNGGAQGGTLFADTVWSRFHSDRRALPDNFRAYEETAAHLPDTHHILFMDDLRLTALTGDRERYAAILQQWEERWFAPIYEAVRTGKIKRLDITTDGQHGGTLTFKPADRWKFWRGAKTFDGIW

SEQ ID NO: 6093 - protein, 492 aa, Neisseria meningitidis
MFSKLTPLAETGIPTLSCANAAGRLLHSDSRQIKQGDIFVACPGEYADGRSYIPAAVANGAAFVFWDDDGKFAWNPEWKVPNQGIKDLKHRAGILAAQVYGNVSDGLKVWGVAGTNGKTSITQWLAQAADLLGEKTAIVGTVGNGFWGALEETTHTTPAPVDVQTLLYRFRQQGATVAAMEVSSHGLDQSRVNGVSFRSAIFTNLTRDHLDYHGTMEAYGAIKSRLFYWHGLKHAVINVDDEYGAELVGRLKKDCPDLAVYSYGFSEHADIRITDFTASSDGIAAVFQTPWGEGKCRTRLLGRFNAQNLAACIALLCANGYPLDKVLDVLAKIRPASGRMDCIMNSGKPLVVVDYAHTPDALEKALATLQEIKPQGAALWCVFGCGGNRDRGKRPLMGAAAVQGADKVVVTSDNPRLENPHDIINDILPAVPAPECVEADRAAAVRYAVEQAAANDIILIAGKGHENYQDVQGVKHRFSDLEIVGQALLTRK

SEQ ID NO: 6094 - protein, 245 aa, Neisseria meningitidis
MGGQKTHFGFSTVNEDEKAGKVAEVFHSVAKNYDIMNDVMSAGLHRVWKHFTINTAHLKKGDKVLDIAGGTGDLSRGWAKRVGKEGEVWLTDINSSMLTVGRDRLLNEGMILPVSLADAEKLPFPDNYFNLVSVAFGLRNMTHKDAALKEMYRVLKPGGTLLVLEFSKIYKPLEGAYDFYSFKLLPVMGRLIAKDAESYQYLAESIRMHPDQETLKQMMLDAGFDSVDYHNMSAGIVALHKGVKF

SEQ ID NO: 6095 - protein, 597 aa, Neisseria meningitidis; identical to SEQ ID NO: 4965

SEQ ID NO: 6096 - protein, 469 aa, Neisseria meningitidis
MTAQTLYDKLWNSHVVREEEDGTVLLYIDRHLVHEVTSPQAFEGLKMAGRKLWRIDSVVSTADHNTPTGDWDKGIQDPISKLQVDTLDKNIKEFGALAYFPFMDKGQGIVHVMGPEQGATLPGMTVVCGDSHTSTHGAFGALAHGIGTSEVEHTMATQCITAKKSKSMLIAVDGKLKAGVTAKDVALYIIGQIGTAGGTGYAVEFGGEAIRSLSMEGRMTLCNMAIEAGARSGMVAVDQTTIDYVKDKPFAPEGEAWDKAVEYWRTLVSDEGAVFDKEYRFNAEDIEPQVTWGTSPEMVLDISSKVPNPAEETDPVKRSGMERALEYMGLKAGTPLNEIPVDIVFIGSCTNSRIEDLREAAAIAKDRKKAANVQRVLIVPGSGLVKEQAEKEGLDKIFIEAGFEWREPGCSMCLAMNADRLAPGQRCASTSNRNFEGRQGNGGRTHLVSPAMAAAAAVTGRFTDIRMMA

SEQ ID NO: 6097 - protein, 125 aa, Neisseria meningitidis
MSDATYADAVIMEMNGRDIEIVSIKPQTTTGRKPVKTMNRNGRVNGYCDGVTEHKLSVTAAIPIDGTEIDWDNITKAKITIYPINDEDRRTSYLDCFTVDTGEQYEVDNEARIDIEMIALHKIKE

SEQ ID NO: 6098 - protein, 378 aa, Neisseria meningitidis
MKNISLSPPAMLGILGGGQLGRMFTVAAKTMGYKVTVLDPNPNAPAAEFADRHLCAPFDNQTALEELAKCAAVTTEFENVNADAMRFLAKHTNVSPSGDCVAIAQNRIQEKAWIRKAGLQTAPYQAICKAEDITEESIQFLPGILKTATLGYDGKGQIRVKTVDELKAAFAEHRGVDCVLEKMVDLRGEISVIVCRLNNDNVQTFDPAENIHENGILAYSIVPARLSADIQQQARQMAQRLADELNYVGVLAVEMFVVGDTHELVVNEIAPRPHNSGHHTVDACAADQFQQQVRLMCNLPPADTKLLSSCCMANILGDVWQEDGGEPDWFPLQSRPDAHLHLYGKKTAHKGRKMGHFTVLSTDSDTAFQEAKKLHQSL

SEQ ID NO: 6099 - protein, 389 aa, Neisseria meningitidis; identical to SEQ ID NO: 1971

SEQ ID NO: 6100 - protein, 119 aa, Neisseria meningitidis
MASYVSIKGWIECSDDDIKIIQENINNFWNNCPFNIEEKESAKIYKSGWVFPTNSFNWSSYIFFGACVKSYFIIYFEKCIKTIMELDIEISGFFELDYYEDNYKVNWKINNGNLIQTTN

SEQ ID NO: 6101 - protein, 401 aa, Neisseria meningitidis
LKPCDTGGKIAVYPVRETGDSKDFPMIKISTRFDAGSVVVKDLTDPSNIRLALRPDNASDFAQWFYFRLQGAAYQNCIMHFENAAEAAYPKGWEGYQACASYDRRNWFRVPTSYENGVLTVNHTPLSNSVYYAYFEPYSEEQHLNLLGDAQGSGLCRIDDLGSTVQGRDINLLTIGNQVESDLKIWITARQHPGETMAEWFIEGLLGRLLDPQDPTARALLDRATFYIVPNMNPDGSALGNLRTNAAGANLNREWENPTVEKSPEVFFVREKMLETGVDLFLDIHGDEGLPFVFVAGTEGVPNYNPRIAALEAQFKNALLNASPDFQDEYGYEKDAPGEANMTLATNWVGNRFNCLAYTLEMPFKDNANLPDDDFGWNGQRSLRLGEAALSAILNVIGDLR

SEQ ID NO: 6102 - protein, 185 aa, Neisseria meningitidis
MFWLVLPYAVTINRPMPSERVSASDGIAPEQGGDMKKPKILFVCLGNICRSPMAEYILRRRAAEAGIPLEADSAGTSGWHDGEDMHRETAKILKKHGIDASGFTSRKIRQSDAAAFDCIIAMDGKNLSELERTFGRRPEKIFKLTDLIPESGYDHVPDPWYTGDFEETFRLADAGCRALLEKISK

SEQ ID NO: 6103 - protein, 229 aa, Neisseria meningitidis
LPGSRGIRANGTQFARVLHGTPNPSAGRMASVKEILMKHTVSASVILLLTACAQLPQNNENLWQPSEHISSFAAEGRLAVKAEGKGSYANFDWTYQPPVETININTPLGSTLGQLCQDRDGALAVDGKGNVYQAESAEELSRQLVGFKLPIQYLHIWADGRRVAGAPYRILPDGILEQYGWTVGRTADSGGQVRTLQLNNGNLNIRLVFTEIGMPSETETPERCAARTR

SEQ ID NO: 6104 - protein, 331 aa, Neisseria meningitidis
VNLKNRHFLKLLDFTPEEITAYLDLAAELKAAKKAGREIQRMKGKNIALIFEKTSTRTRCAFEVAARDQGAGVTYLEPSASQIGHKESIKDTARVLGRMYDAIEYRGFGQEVVEELAKYAGVPVFNGLTNEFHPTQMLADALTMREHSGKPLNQTAFAYVGDARYNMGNSLLILGAKLGMDVRIGAPQSLWPSEGIIAAAHAAAKETGAKITLTENAHEAVKNVDFIHTDVWVSMGEPKEVWQERIDLLKDYRVTPELMAASGNPQVKFMHCLPAFHNRETKVGEWIYETFGLNGVEVTEEIFESPASIVFDQAENRMHTIKAVMVAALGD

SEQ ID NO: 6105 - protein, 201 aa, Neisseria meningitidis; identical to SEQ ID NO: 291

SEQ ID NO: 6106 - protein, 337 aa, Neisseria meningitidis; identical to SEQ ID NO: 263

SEQ ID NO: 6107 - protein, 616 aa, Neisseria meningitidis
MYLPSMKHSLPLLAALVLAACSSTNTLPAGKTPADNIETADLSASVPTRPAEPERKTLADYGGYPSALDAVKQKNDAAVAAYLENAGDSAMAENVRNEWLKSLGARRQWTLFAQEYAKLEPAGRAQEVECYADSSRNDYTRAAELVKNTGKLPSGCTKLLEQAAASGLLDGNDAWRRVRGLLAGRQTTDARNLAAALGSPFDGGTQGSREYALLNVIGKEARKSPNAAALLSEMESGLSLEQRSFAWGVLGHYQSQNLNVPAALDYYGKVADRRQLTDDQIEWYARAALRARRWDELASVISHMPEKLQKSPTWLYWLARSRAATGNTQEAEKLYKQAAATGRNFYAVLAGEELGRKIDTRNNVPDAGKNSVRRMAEDGAVKRALVLFQNSQSAGDAKMRRQAQAEWRFATRGFDEDKLLTAAQTAFDHGFYDMAVNSAERTDRKLNYTLRYISPFKDTVIRHAQNVNVDPAWVYGLIRQESRFVIGAQSRVGAQGLMQVMPATAREIAGKIGMDAAQLYTADGNIRMGTWYMADTKRRLQNNEVLATAGYNAGPGRARRWQADTPLEGAVYAETIPFSETRDYVKKVMANAAYYAALFGAPHIPLKQRMGIVPAR

SEQ ID NO: 6108 - protein, 769 aa, Neisseria meningitidis
MNTKLTKIISGLFVATAAFQTASAGNITDIKVSSLPNKQKIVKVSFDKEIVNPTGFVTSSPARIALDFEQTGISMDQQVLEYADPLLSKISAAQNSSRARLVLNLNKPGQYNTEVRGNKVWIFINESDDTVSAPARPAVKAAPAAPAKQQAAAPSTKSAVSVSEPFTPAKQQAAAPFTESVVSVSAPFSPAKQQAAASAKQQAAAPAKQQAAAPAKQQAAAPAKQTNIDFRKDGKNAGIIELAALGFAGQPDISQQHDHIIVTLKNHTLPTTLQRSLDVADFKTPVQKVTLKRLNNDTQLIITTAGNWELVNKSAAPGYFTFQVLPKKQNLESGGVNNAPKTFTGRKISLDFQDVEIRTILQILAKESGMNIVASDSVNGKMTLSLKDVPWDQALDLVMQARNLDMRQQGNIVNIAPRDELLAKDKALLQAEKDIADLGALYSQNFQLKYKNVEEFRSILRLDNADTTGNRNTLISGRGSVLIDPATNTLIVTDTRSVIEKFRKLIDELDVPAQQVMIEARIVEAADGFSRDLGVKFGATGKKKLKNDTSAFGWGVNSGFGGDDKWGAETKINLPITAAANSISLVRAISSGALNLELSASESLSKTKTLANPRVLTQNRKEAKIESGYEIPFTVTSIANGGSSTNTELKKAVLGLTVTPNITPDGQIIMTVKINKDSPAQCASGNQTILCISTKNLNTQAMVENGGTLIVGGIYEEDNGNTLTKVPLLGDIPVIGNLFKTRGKKTDRRELLIFITPRIMGTAGNSLRY

SEQ ID NO: 6109 - protein, 408 aa, Neisseria meningitidis; identical to SEQ ID NO: 2386

SEQ ID NO: 6110 - protein, 419 aa, Neisseria meningitidis
MSMALAQKLAADSIAAVAEGRNLQDVLAQIRTAHPDLMAQENGALQDIAYGCQRYLGSLKHMLAQMLKKPIGNPQLESLLLAALYQLHYTRNAPHAVVNEAVESIAKIGRGQYRSFANAVLRRFLRERDKLVASCKKDDVAKHNLPLWWVAYLKNHYPKHWHNIAAALQSHPPMTLRVNRRHGNAESYLEKLVAEGIAAKALDEYAVTLEEAVPVNRLPGFSDGIVSVQDFGAQQAAYLLNPKDGERILDACAAPGGKTGHILELADCRVTALDIDAGRLKRVEDNIARLGFQTASTACADAQDLSAWYDGKPFDAVLADVPCTASGVARRNPDVKWLRRPTDALKTARQQEALLDALWQVLKSGGRMLIATCSVFVEENDGQLQKFLNRHADAELIESRVLLPNKHQDGFYYALIQKQ

SEQ ID NO: 6111 - protein, 334 aa, Neisseria meningitidis
MSIKVAINGFGRIGRLALRQIEKAHDIEVVAVNDLTPAEMLLHLFKYDSTQGRFQGTAELKDDAIVVNGKEIKVFANPNPEELPWGELGVDVVLECTGFFTNKTKAEAHIRAGARKVVISAPGGNDVKTVVYGVNQDILDGSETVISAASCTTNCLAPMAAVLQKEFGVVEGLMTTIHAYTGDQNTLDAPHRKGDLRRARAAALNIVPNSTGAAKAIGLVIPELNGKLDGSAQRVPVASGSLTELVSILERPVTKEEINAAMKAAASESYGYNEDQIVSSDVVGIEYGSLFDATQTRVMTVGGKQLVKTVAWYDNEMSYTCQLVRTLEYFAGKI

SEQ ID NO: 6112 - protein, 228 aa, Neisseria meningitidis; identical to SEQ ID NO: 380

SEQ ID NO: 6113 - protein, 487 aa, Neisseria meningitidis
MRIVEKAYTFDDVLLVPAHSTVLPRDVKLQTKLTREITLNLPLLSAAMDTVTEARLAISMAQEGGIGIIHKNMPPEMQARAVSKVKRHESGVVKDPVTVAPTTLIREVLEMRAQRKRKMSGLPVVENGKVVGIVTNRDLRFENRVDLPVSAIMTPRERLVTVPEGTSIDEARELMHTHKVERVLVLNEKDELKGLITVKDILKTTEFPNANKDSEGRLRVGAAVGTGGDTEERVKALVEAGVDVIVVDTAHGHSQGVIDRVRWVKETYPHIQVIGGNIATAKAALDLVAAGADAVKVGIGPGSICTTRIVAGVGVPQLTAIHNVAEALKGTGVPLIADGGIRFSGDIAKALAAGAYSVMLGGMFAGTEEAPGEIELYQGRSYKSYRGMGSLGAMSQGSADRYFQDKTDSTDKYVPEGIEGRVPYKGPIVNIIHQLTGGLRSSMGYLGCANIAEMHEKAEFVEITSAGMSESHVHDVQITKEAPNYHR

SEQ ID NO: 6114 - protein, 242 aa, Neisseria meningitidis; identical to SEQ ID NO: 1183

SEQ ID NO: 6115 - protein, 203 aa, Neisseria meningitidis; identical to SEQ ID NO: 352

SEQ ID NO: 6116 - protein, 160 aa, Neisseria meningitidis; identical to SEQ ID NO: 2526

SEQ ID NO: 6117 - protein, 71 aa, Neisseria meningitidis; identical to SEQ ID NO: 3375

SEQ ID NO: 6118 - protein, 322 aa, Neisseria meningitidis
MTAKPFSLNLTNLLLLAVLFAVSLSVGVADFRWSDVFSLSDSQQVMFISRLPRTFAIVLTGASMAVAGMIMQILMRNRFVEPSMAGAGQSAALGLLLMSLLLPAAPLPVKMSVAAVAALIGMLVFMLLIRRLPPTAQLMVPLVGIIFGGVVEAVATFIAYENEMLQMLGVWQQGDFSSVLLGRYELLWITGGLAVFAYLIADRLTILGLGETVSVNLGLNRTAVLWSGLIIVALITSLVIVTVGNIPFIGLVVPNIISRLMGDKLRQSLPAVALLGASLVLLCDIVGRVIVFPFEIPVSTVFGVMGTALFLWLLLRKPAHAV

SEQ ID NO: 6119 - protein, 263 aa, Neisseria meningitidis
MSEYRVNHEPVFMLASSPWRESSLWVEAFSRRYGRVALLARSARKRQSELRGVLVPFVPVSVSWYGSQELKTLHRAEWVGGWRQPQGRALFGGLYVNELVLKLTAREDPVPELYDALAEVMEAVCCKAAYIDDLRRFEWRLLNLLGVAPDLNRDGDGGTIAAGGTYLVRPETAVFPVGKGFAVPPHAAGVVAPGQSLIDLREGSFRTAESLQQALKITRLFIRHLLPEGLKSRQVLEQIRQFDRKETARETVPTSDGTASNAV

SEQ ID NO: 6120 - protein, 144 aa, Neisseria meningitidis
VKYEFTLPSSSGADFHSAEHLPLVVYFYPKDSTLGCTTEGLDFNARLEQFEALGYTVVGISRDGVKAHQNFCAKQGFRFELLSDKDETVCRLFDVIKLKKLYGKESLGIERSTFVLNKDGEIAHEWRKVKVAGHAQEVLETLSR

SEQ ID NO: 6121 - protein, 88 aa, Neisseria meningitidis; identical to SEQ ID NO: 1100

SEQ ID NO: 6122 - protein, 147 aa, Neisseria meningitidis
MSEELQPVFSIERLYVKDLSLEVPHAPQIFLEQGEPEVEMRVSTGSQKLEDGYYNVDVTVTVTAKLDNERTMFLNEVTQSGIFRLENIPEEDADLLLGVACPNILFPYAREAVSGTVTRAGFPPVLLAPINFEAIYQQQQEAEAAGA

SEQ ID NO: 6123 - protein, 291 aa, Neisseria meningitidis; identical to SEQ ID NO: 5426

SEQ ID NO: 6124 - protein, 413 aa, Neisseria meningitidis
MSKFFKRLFDIVASASGLIFLSPVFLILIYLIRKNLGSPVFFFQERPGKDGKPFKMVKFRSMRDALDSDGIPLPDGERLTPFGKKLRAASLDELPELWNILKGEMSLVGPRPLLMQYLPLYDNFQNRRHEMKPGITGWAQVNGRNALSWDEKFACDVWYIDHFSLCLDIKILLLTVKKVLIKEGISAQGEATMPPFTGKRKLAVVGAGGHGKVVADLAAALGRYREIVFLDDRAQGSVNGFSVIGTTLLLENSLSPEQYDVAVAVGNNRIRRQIAEKAAALGFALPVLVHPDATVSPSATVGQGSVVMAKAVVQAGSVLKDGVIVNTAATVDHDCLLNAFVHISPGAHLSGNTHIGEESWIGTGACSRQQIRIGSRATIGAGAVVVRDVSDGMTVAGNPAKPLPRKNPETSTA

SEQ ID NO: 6125 - protein, 260 aa, Neisseria meningitidis
MESLTAINKSRIRQAFQKALNDYDRHALIQQKMTINLMTHLQDYLPDMPLENVLELGCGSGMLSALLQKQISANYWLFNDLCNVQPQLAEKLPQSFDFYCGDAENFPFQRQFDLIASASAVQWFHQPDAFITHCKTGLKTNGLLAVATFGKDNLKEVRQITNIGLNYPTLSQWQAWLAKDFELLWCEDFTVILDFDTPSDVLKHLKYTGVTATNQKNWTRKNLNGFIGDYLSAFGMPSGKVRLTYHPLFFIARYSAAGRQ

SEQ ID NO: 6126 - protein, 157 aa, Neisseria meningitidis
MSRNNEELQGISLLGNQKTQYPTGYAPEILEAFDNKHPDNDYFVKFVCPEFTSLCPMTGQPDFATIYIRYIPHIKMVESKSLKLYLFSFRNHGDFHEDCVNIIMKDLIALMDPKYIEVFGEFTPRGGIAIHPFANYGKAGTEFETLARKRLFEHDAQ

SEQ ID NO: 6127 - protein, 196 aa, Neisseria meningitidis
MSEKIILPVLSLGGVRLEPLDVHHETGLREAVCDGEVWKLGVTSAPHPDRVADYIGTALATRLAFAVVDEEAGRVVGTTAYYHFEPQIPRLDIGFTWYAASARRTRINTCCKIMLLDSAFDVLACRCVGWRTDILNLASQRAIERLGAEKDGVLRMHMLRKDGSVRDTVVYSMLREDWCKNREILTGRLAGYGVQV

SEQ ID NO: 6128 - protein, 422 aa, Neisseria meningitidis
LTNRGGAKLKTNSKSSERMSEVEYFSHFISDGKGKLLEIPQRRGKQDGVFVDWISFTFHEDTLLKVSGCPLFSDAEYMYVLSRKLEEILGFGITRKCKSRGNKFYESMYRLGSDDVDYGEVHFGGQRNTVLVELKGTGCSVASPGWELRLKQFLDDSIRTRITRIDLALDFFDGEYTPDQALLDHDNGFFDNSNQRPKSETIGTAWRNEDGSGKTFYVGRKKNSRFVRVYEKGRQLGDKESKWVRFEIQFNYGDIEIPLDILINQGSYFCGAFPICRKFKNMPVPERFDQRKKKLNLTFEHKLHYAKNAVGKLVNFMIEMGFDNSEIVESLKADSGFPKGLEPEKYALEMLRDGLKHGFIHEQPDIDLEIELDELGVIAFKNSDKFDREKRLFSPDYDVEKERKYQEYLSKVYHQNVDYDYF

SEQ ID NO: 6129 - protein, 414 aa, Neisseria meningitidis
MTLFCEQVPYPRLAEAFGTPLYVYSQSALTEAFEHYQTAFAALNPLVCYAVKANGNLSIIKHFASLGSGFDIVSGGELARVLAAGGDAAKTIFSGVGKSEAEIEFALNAGVKCFNMESIPEIDRIQKVAARLGKTAPVSLRINPDVDAKTHPYISTGLKANKFGIAYADALEAYHYAAQQPNLKIIGIDCHIGSQLTDLSPLVEACERILILVDALAAEGIVLEHLDLGGGVGIVYQDENVPDLGAYAQAVQKLIGTRRLKLILEPGRSLVGNAGSLLTRVEFVKYGEEKNFVMVDAAMNDLMRPALYDAYHHIEAVETKDIATLTANIVGPICETGDFLGKDRTIACEEGDLLLIRSAGAYGASMASNYNARNRAAEVLVDGNEYRLIRRRETLEQQMANELACLQAEHQNAV

SEQ ID NO: 6130 - protein, 150 aa, Neisseria meningitidis
LVMYVVKSANDGGNSLFLSSSDIVNQLSKTETGKKHLKTLTGNLYPFKTPASFDKKQGVRWGNILSVNTQMIRFRSDCIYKGIEENRNKVSKEMVLALDYLINVIKNASDIQEFSAQDDGLIIIDNVNGLHARTDYTDKNRHYIRARITV

SEQ ID NO: 6131 - protein, 307 aa, Neisseria meningitidis
MPSEHPFSDGIPTPNPKETMNDTAQITASYGRRYIVRTPDGTTYEASTRKKRVDFACGDRVRISPVNAEQVVIEDFLPRQSLLYRQDAWKTKLIAANVTQLLIVTAAVPSPSVRLLQRALLAAEAAGIEAVIVLNKADLPETALWREKLKFYETLGYPVIETRALENAGSLRPALQGHSNILLGQSGMGKSTLTNALLGSQTARTGDISAALDSGKHTTTHARLYDLNGETQLIDSPGLQEFGLHHLQAADLPRYFPDFRHLVGQCRFHNCTHRAEPGCAFKAAAQTGAASPERLAFLQGITDELPG

SEQ ID NO: 6132 - protein, 100 aa, Neisseria meningitidis
LWSTIKDFSSDFEEKTEAFFILFKELLRRGHLKLQRDGQIIGHTPEEWEQIFREVWPEYEIEPNPLPGYAPFDIGMWLTVEAPAYAVWIDPEDGSEYWAG

SEQ ID NO: 6133 - protein, 422 aa, Neisseria meningitidis
  misc_feature 416, 417: 'Xaa' is any amino acid
MFIILGRNFLKIILCFSFFVSKFALASVNAPGKFDRVEVYDDGRYLGIRGSDDKRRRIWKGVFDRESGRYLTSEAQDLKVRHVSTGASSTGKVSSVVSSSVSRAGVLAGVGKLARLGAKLSTRAVPYVGTALLAHDVYETFKEDIQAQGYQYDPETDKFVKGYEYSNCLWYEDKRRINRTYGCYGVDSSIMRLMSDDSRFPEVKELMESQMYRLARPFWNWHKEELNKLSSLDWNNFVLNSCTFDWNGGDCVVNKGDDYRNGADFSLIRNSKYKEEMDAKKLEEILSLKVDANPDKYIKETGYPGYSEKVEVAPGTKVNMGPVTDRNGNPVQVVATFGRDSQGNTTVDVQVIPRPDLTPGSAEAPNAQPLPEVSPAENPANNPNPNENPGTSPNPEPDPDLNPDANPDTDGQPGTXXTHLIN

SEQ ID NO: 6134 - protein, 167 aa, Neisseria meningitidis
MSDPNLIDPKVFAAEGRSLQGGFLLEELDERVSSHDYPADKQTRVSFTLTGGRDRLQRLFLDLNVKADMPLVCQRCIAPLPFRLDETARIVLFSDEKDLDEAMLADEELEGMLLEKELDVRTLVEDQILMSLPFSPRHEDCGGNGTPEKTDRDKPNPFAVLAGLKSN

SEQ ID NO: 6135 - protein, 230 aa, Neisseria meningitidis; identical to SEQ ID NO: 1058

SEQ ID NO: 6136 - protein, 513 aa, Neisseria meningitidis
MVFDNNYHYNAMPVRLLVNIQDADSDGIQTASENNNGTRMGYNRPMEKNTLSARAPSPWLPLLLAIAIFMQMLDATILNTALPEIAADLNESPLDMQLAVISYTLTVALLIPLSGYLADRFGTKKVFFGSIAVFMLGSALCAASGSLFELTLSRVVQGIGGSMLVPIPRLTILRVYDKSKLLNAINYAVMPALIGPVLGPLAGGYLVEYASWHWIFLLNLPIGLLGFILGRNIMPDIKGSNISLDFKGYLIFSAAACLLLLSAESLSHALPPYFALLPLCGGLLFARRYFRHMKTASKPIYSADLFLIRTFRLGLAGNLFSRLGISSIPFLMPLMFQIAFGFGASLSGWLVAPVALSSLLVKPLIAPLMKRFGYRTVLLWNTKLLAAFIMLLALPDGNSPLWIWVFLSLAIGACNSLQFSAMNTLTLADLRPQQTGSGNSLMAVNQQLAISMGIVAGALILKNWTFLIPASSGLHSAFRMTLLSIGGITLASSLVFKRLHVSDGTNLTRNTPS

SEQ ID NO: 6137 - protein, 737 aa, Neisseria meningitidis
MCKPNYGGIVLLPLLLASCIGGNFGVQPVVESTPTAYPVTFKSKDVPTPPPAGSSVETTPVNRPAVGAAMRLPRRNIASYKQDGTEIPDKHQAEEHLPLKEKDILFLDGTLKEQADKLKKKINERYSDVRVITSKKEEEKYQYQFVRAGYVFTRAEGKDNEKEKTSDGKEFVNRFSYDGFVYYSGERPSQSLPSAGTVQYSGNWQYMTDAKRHRTGKAVSSTDLGYTTYYGNEIGATSYEARDADDREKHPAEYTVDFDNKTLNGKLIKNQYVQNKSNPNEPKKPLTIYDITATLDGNRFTGSAKVSTEVKTQHADKEYLFFHTDADQRLEGGFFGDNGEELAGRFISNDNSVFGVFAGKQKTETENAADTKPALSSGKHTKILDSLKISVDEASDKNPREFAISSMPDFGHPDKLLVEGREIPLVNKEQTIELADGRKTTIRTCCDFLTYVKIGRMQTERPAAKPKAQDEERDEEDTGVDSVEEGEDEIDDEEGTEDAAVKDEGSEEDEAVEGEDEAEEPEEESPTEEGGSGSDGILPAPEAPKGRNIDLFLKGIRTAETDIPKTGEAHYTGTWEARIGKPIQWDNQADKEAAKAVFTVDFGKKSISGTLTEENGVEPAFHIENGKIEGNGFYATARTRENGINLSGNGSTDPKTFQASNLRVEGGFYGPQAEELGGIIFNNDGKSLGITEGTENKVDVEAEVDAEVDVGKQLESEVKHQFGVVFGAKKDMQEVEK

SEQ ID NO: 6138 - protein, 300 aa, Neisseria meningitidis
MDTAKKDILGSGWMLVAAACFTIMNVLIKEASAKFALGSGELVFWRMLFSTVALGAAAVLRRDTFRTPHWKNHLNRSMVGTGAMLLLFYAVTHLPLATGVTLSYTSSIFLAVFSFLILKERISVYTQAVLLLGFAGVVLLLNPSFRSGQETAALAGLAGGAMSGWAYLKVRELSLAGEPGWRVVFYLSVTGVAMSSVWATLTGWHTLSFPSAVYLSCIGVSALIAQLSMTRAYKVGDKFTVASLSYMTVVFSALSAAFFLGEELFWQEILGMCIIILSGILSSIRPTAFKQRLQSLFRQR

SEQ ID NO: 6139 - protein, 96 aa, Neisseria meningitidis
MNIQLQGHIVGVKKINGQIEGKSFDYCCLIVATPLDSSQGNALGSSTTEYDFGGSANFEQFRNAQFPIEANLNVEIVTTGKTQKLKVIGFQLVKKG

SEQ ID NO: 6140 - protein, 87 aa, Neisseria meningitidis; identical to SEQ ID NO: 932

SEQ ID NO: 6141 - protein, 149 aa, Neisseria meningitidis
MKIGTTWQTASAMLVLRLFAAYEFLESGLQKWNGENWFSEINDQFPFPFNLLPDALNWNLAMYAELLLPVLLLLGLATRLSALGLMVVTAVAWAAVHAGSGYNVCDNGYKMALIYIVVLIPLLFQGAGGWSLDTLLKKRFCPRCRLKQD

SEQ ID NO: 6142 - protein, 249 aa, Neisseria meningitidis
MKALVAVKRVVDYNVKVRVKADGSDVDIGNVKMSMNPFDEIAVEEAVRLKEAGKVSEIVAVSLGEKKCEETLRTALAMGADRAIHVETDTKLESLAVAKLLKAVADKENPQIFFLGKQAIDDDANQVAQMLAALLNAAQGTFASKVQIEGDEVQIVREIDGGEETIALKLPAVISADLRLNEPRFVKLPNIMAAKKKPLEKLTPDDLVADISPRLKTVKFAEPKARQAGVKVASVAELVEKLKNEAKVI

SEQ ID NO: 6143 - protein, 64 aa, Neisseria meningitidis
MVLFKSIKQESISFLSEDLKKDWMFHKVKTGEKDGYGSDEMLSVPRVYLEMMSRKTGVPYSSIL

SEQ ID NO: 6144 - protein, 493 aa, Neisseria meningitidis
VAFYQTIQNLTNIIKPHTHTMKIIQIQNNHNVNDDRPEFDRALIASLPASGPRYTSYPTADRFHDGFREGEYIKALHLRGMGALNKPLSLYIHIPFCNTICYYCGCNKIITKDKSRADAYIEYLEKEMELLAPHLNGRHQLAQLHFGGGTPTFLSDEQIERVFRMIRKHFELIPTGEYSIEIDPRKVSRDTVLMLGRLGFNRMSIGIQDFDPKVQAAVNRIQSYEETKEVIDAAREAGFKSVSVDLIYGLPHQTSESIKTTIDTVLSLDPDRLALYHYAHLPHVFKPQRRIDTAAVPDSEEKLDMLQYCVQTLTERGYVFIGMDHFAKPDDELSIALKEGFLQRNFQGYSTYADCDLVAIGVSSIGKIGSTYSQNERDIDAYYAAIDEGRLPIMRGYQLNQDDILRRNIIQDLMCRFALDYRIYESMFGIPFDRYFKDELADLEKLAGLGLVRLNSHGLTVTPKGRFLIRNIAMVFDYHLRHKETKAKYSQTV

SEQ ID NO: 6145 - protein, 284 aa, Neisseria meningitidis
METQENMIKTALQAAQKPFFEFAPNNTPLVFTPDQDGGWRYKSHPELMQNPYRKCGKFLMHDTASLIKFVQKHKQDGTQIYIDADFKSGRIDVTAVINGHTQQAPGWLDFYAVYTPQHTTSASNWLNNNAHRMNQMEFSHFLTNNARNIVSKNPGNENSVYPTAAEVLDFALNLEYTEKTTFKQGYREQDGRINFTFQSEDSGQTEKNLKMFERFGIEFTPHQGGASYFVEALLKFRIDKNSGALVLWYELQQIDAVIEQAAKDISEAVQKAFPEIDIYFGVIA

SEQ ID NO: 6146 - protein, 488 aa, Neisseria meningitidis; identical to SEQ ID NO: 3695

SEQ ID NO: 6147 - protein, 287 aa, Neisseria meningitidis; identical to SEQ ID NO: 1286

SEQ ID NO: 6148 - protein, 88 aa, Neisseria meningitidis
MTESHGYLSNNLPVKIINDIIYATQLVEDLVLGKIKIVDFLKSYNNFYCWLGFDELPQSEKIKFLSYLNILSIHKEIQDETVNRVYTD

SEQ ID NO: 6149 - protein, 321 aa, Neisseria meningitidis
MNLNKLKNKLFRRPGQRAVIAVPYIWLLVLFLIPFAIVLKISFAEQEIAIPPFTPLTTIDEDLGRLNIAVSYQNYADIFQNFWSTLNPFGDGENSNIYLMTYWSSIKTALTTTVICLLVGYPTAYAISRANPSVRNGLLLAIMLPFWTSFLLRVYAWMGLLGHNGIVNNLLIKMGIISEPLDLFYNAFSLNLVMVYAYLPFMILPLYTQLVKLDNRLLEAASDLGAGPVKSFLTITLPLSKTGIIAGSMLVFVPAVGEFVIPELVGGSENLMIGKVLWQAFFDQNNWPLASAVAVVMVALLVVPIALFQHYENRELEEGAK

SEQ ID NO: 6150 - protein, 140 aa, Neisseria meningitidis
MKYMISFLKKTFELMSWVLVILIIGTFYDYYQIRQYAELEKKSISNILLYAQKEKFRLESKDKYMRGGYTKYKFIFSEYSNTTFLNFINDLKKDNYLPLDGYGHGFLCRKGESISINIYPEINKFILVWGYPENLCADSN

SEQ ID NO: 6151 - protein, 290 aa, Neisseria meningitidis
LRPSESLGQTMCQLLGMNCNTPTDIMFSFEGFRRRGGITDHHADGFGIGFFEGKGVRLFHDDKPSANSPVADLVRAYQIKSENVIAHIRKASQGQTSLANTHPFMREMWGGYWLFAHNGHLIDFFPEQGEFFHPVGTTDSERAFCHILNRLRTRFAARPDDDTLFDAIAGLTHEIRKFGLFNFMLSDGIALFAHASTLLHYIVRQAPFGKARLLDDDVMVDFAEVTTPSDRVAVIATLPLTRDESWSQLAVDELVMFREGNIVRHDRPENPVYMSAEEGLEIARAAGVAV

SEQ ID NO: 6152 - protein, 478 aa, Neisseria meningitidis
LENSLIIGLALAVLLMLLVMRAKQGKKTPKRKSQGVGNTQGQTPGSNDSDWVDQIGQSVSDGTQPDWSWNESAETASAAVSAQEVDPLTEYQVYKQFGYQGKAAESLAAYLDGIPDGEAKPENLIRELLDINLEVGDVDVLADNLQKYGKLILSELLAKYIEQALQRDSNHLRIRVLAEEGLGWGTQEIEKRAEGGSATAASASPPPDAGGKAYEAEEIKRIPIVRGKKDVSGISQEEIGAIAGLVRADQGAKILKDKVSYETASKQYDRAIQTSEKPANLIIDALKLDYQHADIDRFAGHLWKLYQTLGNYGRQVKERMLGWGYSLGYHEVFDDLEKGPNDRQIKDIGMGHGYLPKNIQKFKSQHRDLVLQDSSLINTGSSPADDAVKEVESLLMYGQIEAAMDVLEQAVLKYPDESQLYITLIDIYERTEDWDRLGQFLRVLRERADRLPEEVVMLMSRLLQRMNQNIKKIKRYGK

SEQ ID NO: 6153 - protein, 114 aa, Neisseria meningitidis
LRTHFVISNVPSTPAPLRGRKLTGKLILEVPAQVNPIPQSVLRAAQEENVIIRDTTGRIYNRWWFSIRWLCRCTSCKKRIIDTNRENRGRCVSNCKCKHWISMDCQFVKAKRRS

SEQ ID NO: 6154 - protein, 324 aa, Neisseria meningitidis
MRRRVNMPSEHMDTKANMDIETFLAGERAAGGYRCGFVAIVGRPNVGKSTLMNHLIGQKISITSKKAQTTRNRVTGIYTDDTAQFVFVDTPGFQTDHRNALNDRLNQNVTEALGGVDVVVFVVEAMRFTDADRVVLKQLPKHTPVILVVNKIDKDKAKDRYALEAFVAQVRAEFEFAAAEAVSAKHGLRIANLLELIKPYLPESVPMYPEDMVTDKSARFLAMEIVREKLFRYLGEELPYAMNVEVEQFEEEDGLNRIYIAVLVDKESQKAILIGKGGERLKKISTEARLDMEKLFDTKVFLKVWVKVKSGWADDIRFLRELGL

SEQ ID NO: 6155 - protein, 165 aa, Neisseria meningitidis
MTALTLPEDIRQQEPSALLYTLVSAYLEHTAQTGDESLSCLSDDQHTLTAFCYLDSQVEEGGFVQLIASGYGEYIFRNPLADSLRRWKIKAVPKVLDKAKALYEQHGKTIETLADGGADIPSLRKQFPEFEEWDGAYYEAAEQDLPLLAEHIQSNWETFAHIGQA

SEQ ID NO: 6156 - protein, 43 aa, Neisseria meningitidis
MGQQPVLITGLLIGTVIGVAFMGGIPVGPLIAAGILSFVVGKG

SEQ ID NO: 6157 - protein, 101 aa, Neisseria meningitidis; identical to SEQ ID NO: 705

SEQ ID NO: 6158 - protein, 169 aa, Neisseria meningitidis; identical to SEQ ID NO: 111

SEQ ID NO: 6159 - protein, 201 aa, Neisseria meningitidis
MTIMNINTSENKDAVAEHTGQWLEKAVIGLNLCPFAKAPHVKNLVRIAISEAKHLDGFLEDLDEELQRLGNTPATELETTLLVHPTLFPDFDVFNDMLDIADAAVVENGLEGIVQIAPFHPDFQFEGTDSDDIGNYTNRSPYPTLHLIREDSIAKAAQAFPDASAIFERNIALLEKMGHEGWAKLGITSCPYPHNKKNISK

SEQ ID NO: 6160 - protein, 502 aa, Neisseria meningitidis
MTTTPANVLASVDLGSNSFRLQICENNNGQLKVIDSFKQMVRFAAGLDEQKNLSAASQEQALDCLAKFGERLRGFRPEQVRAVATNTFRVAKNIADFLPKAEAALGFPIEIIAGREEARLIYTGVIHTLPPGGGKMLVIDIGGGSTEFVIGSTLNPDITESLPLGCVTYSLRFFQNKITAKDFQSAISAARNEIQRISKNMRREGWDFAVGTSGSAKSIRDVLAAEMPQEADITYKGMRALAERIIEAGSVKKAKFENLKPERIEVFAGGLAVMMAAFEEMKLDRMTVTEAALRDGVFYDLIGRGLNEDMRGQTVAEFQHRYHVSLNQAKRTAETAQTFMDSLCHAKNVTVQELALWQQYLGRAAALHEIGLDIAHTGYHKHSAYILENADMPGFSRKEQTILAQLVIGHRGDMKKMSGIIGTNEMLWYAVLSLRLAALFCRSRQDLSFPKNMQLRTDTESCGFILRIDREWLERHPLIADALEYESVQWQKINMPFKVEAV

SEQ ID NO: 6161 - protein, 311 aa, Neisseria meningitidis
MSVLIIVEHDNKQLNPTTLHAVTAAAKLGKVDLLVAGNGASAVVEFAKQVAGVKKVLVADAAHYAEGLAEELAPLVVKLAADYRYVAATATTFGKNLLPRVAALLDVPQISDLTEIVDNTTFVRPIYAGNAFETVQADSEKLVLTFRATVFDAVAAQGGNAEVINVEATPAQNLSRFVNRQLSHSDRPELTQAKVIVSGGRALGSAEKFNEVLTPLADVLGAAIGASRAAVDAEYAPNDAQVGQTGKVVAPQLYFAIGISGAIQHVAGMQDSKVIVAINKDADAPIFNVADYGLVGDLFEIVPQLTEVLKN

SEQ ID NO: 6162 - protein, 264 aa, Neisseria meningitidis
MTLPMQETRFSILLDELAAKQEAAIAPHLLADGTKVWIRKAGRHNARWRYALLGMVARYLKLGVLKPVPSLGGEPAIATESKRLYELRSAGIAVPELLAVRKNALMFGNLEGIPLDAQIRQEAEAGKSDAWLAGLEAIARVHKKQQFLSQAFARNMMWDGKNISFLDFEDDPSEVLTIAQCQARDWLCYIHSTALILKNGGLLEAAAEKWGGVLSDQPAEIQKLIAATVKPILPIRRLEHPRWGRDALRLAASISLISLADMPP

SEQ ID NO: 6163 - protein, 499 aa, Neisseria meningitidis
VFKKYQYLALAALCAASLAGCDKAGSFFGADKKEASFVERIEHTKDDGSVSMLLPDFAQLVQSEGPAVVNIQAAPAPRTQNGSGNAENDSDPIADNDPFYEFFKRLVPNMPEIPQEEADDGGLNFGSGFIISKDGYILTNTHVVTGMGSIKVLLNDKREYTAKLIGSDVQSDVALLKIDATEELPVVKIGNPKDLKPGEWVAAIGAPFGFDNSVTAGIVSAKGRSLPNESYTPFIQTDVAINPGNSGGPLFNLKGQVVGINSQIYSRSGGFMGISFAIPIDVAMNVAEQLKNTGKVQRGQLGVIIQEVSYGLAQSFGLDKAGGALIAKILPGSPAERAGLQAGDIVLSLDGGEIRSSGDLPVMVGAITPGKEVSLGVWRKGEEITIKVKLGNAAEHIGASSKTDEAPYTEQQSGTFSVESAGITLQTHTDSSGGHLVVVRVSDAAERAGLRRGDEILAVGQVPVNDEAGFRKAMDKAGKNVPLLIMRRGNTLFIALNLQ

SEQ ID NO: 6164 - protein, 602 aa, Neisseria meningitidis
MRTNYCGLISEQYLDQTVTVKGWVHRRRDHGGVIFIDLRDREGIVQVVIDPDTPEAFAAADSSRNEYVLSITGRVRNRPEGTTNDKMISGKIEILAKEIEVLNAAATPPFQIDDENISENVRLTNRVIDLRRPVMQRNLRLRYQVAMGVRRYLDAQGFIDIETPMLTRSTPEGARDYLVPSRVHPGEFFALPQSPQLFKQLLMVAGFDRYYQITKCFRDEDLRADRQPEFTQIDLETSFLNEDEIMDITEGMAKQVFKDALNVDLGDFPRMPYSEAMFYYGSDKPDMRINLKFTELTDLMKTEEFKVFRGAADMKGGRVVALRVPNGAEFSRKEIDEYTKFVGIYGAKGLAYIKVNDVSNLSNGEDSGLQSPIVKYLSENALKEIIARTGAQNGDIIFFGADKAKVVNEAIGALRIKVGLEHGKDNGYFTDEWKPLWVVDFPMFEYDEEADRYVAVHHPFTAPKEGHEDLMVSDPANCLARAYDMVLNGWEIGGGSIRIHRADVQEKVFAALKISPEEQQEKFGFLLDNLKFGAPPHGGLAFGLDRLVTLMTGAESIRDVIAFPKTQRAQCLLTNAPNSVDDKQLRELSLRLRQKATETKEV

SEQ ID NO: 6165 - protein, 367 aa, Neisseria meningitidis; identical to SEQ ID NO: 4279

SEQ ID NO: 6166 - protein, 460 aa, Neisseria meningitidis
MANIARDIFKAYDIRGIVGKTLTDDAAYLIGRAIAAKAAEKGMTRIALGRDGRLSGPELMEHIQRGFTDSGIDVLNVGMVATPMLYFAAINECGGSGVMITGSHNPPDYNGFKMMLGGDTLAGEAIQELLAIIEKDGFVAADKQGNVTEKDISGEYHNHIVGHIKLKRPMKIAIDAGNGVGGAFAGKLYKGLGNEVTELFCEVDGNFPNHHPDPSKPKNLQDLIVELKNGEAEIGLAFDGDADRLGVVTKDGNIIYPDRQLMLFAQDVLSRNPKAKVIFDVKSTRLLAPWIKEHGGEPVMEKTGHSFIKSAMKKTGAPVAGEMSGHIFFKERWFGFDDGLYAGARLLEILSASDNPSEVLNNLPQSISTPELNIALPEGSNGHQVIDELAAKAEFEGATEIITIDGLRVEFPDGFGLMRASNTTPILVLRFEADTQEAIERIQNQFKAVIESNPNLIWPL

SEQ ID NO: 6167 - protein, 1067 aa, Neisseria meningitidis
MAKFFIDRPIFAWVISIFIIAAGIFGIKSLPVSQYPSVAAPTITLRATYPGASAQVMEDSVLSVIERNMNGVEGLDYMSTSADSSGSGSVSLTFTPDTDENLAQVEVQNKLSEVLSTLPATVQQYGVTVSKARSNFLMIVMLSSDVQSTEEMNDYAQRNIVPELQRIEGVGQVRLFGAQRAMRIWVDPKKLQNYNLSFADVGSALSAQNVQISAGSIGSLPAVRGQTVTATVTAQGQLGTAEEFGNVILRANTDGSNVYLKDVARVGLGMEDYSSSTRLNGVNTTGMAVMLSNSGNAMATAKAVKERMATLEKYFPQGMSWKTPYDTSKFVEISIEKVIHTLIEAMVLVFVVMYLFLQNIRYTLIPTIVVPISLLGGFAFISYMGMSINVLTMFAMVLVIGIVVDDAIVVVENVERIMAGEGLPPKEATKKAMGQISGAVIGITAVLISVFVPLAMFSGATGNIYKQFALTMASSIAFSAFLALTLTPALCATMLKTIPKGHHEEKKGFFGWFNKKFNSWTHGYEGRVAKVLRKTFRMMVVYIGLAVVGVFLFMRLPTSFLPTEDQGFVMVSVQLPAGATQERTNATLAQVTQLAKSIPEIENIITVSGFSFSGSGQNMAMGFAILKDWNERTAPGSDAVAIAGKLTGMMMGTLKDGFGIAVVPPPILELGNGSGLSINLQDRNNTGHTALLAKRNELIQKMRASGLFDPSTVRAGGLEDSPQLKIDINRAAAAAQGISFADIRTALASALSSSYVSDFPNQGRLQRVMVQADEDARMQPADILNLTVPNKSGVAVPLSTIATVSWENGTEQSVRFNGYPSMKLSASPATGVSTGQAMAAVQKMVDELGGGYSLEWGGQSREEAKGGSQTLILYGLAVAAVFLVLAALYESWSIPLAVILVIPLGLIGAAAGVTGRNLFEGLLGSVPSFANDIYFQVGFVTVMGLSAKNAILIIEFAKDLQAQGKSAVEAALEAARLRFRPIIMTSFAFILGVVPLYIAGGASSASQRAIGTTVFWGMLIGTLLSVFLVPLFYVVVRKFFKETAHEHEMAVKHAAEAGITGSDDSQH

SEQ ID NO: 6168 - protein, 228 aa, Neisseria meningitidis
METFKDRLVFLWKSEARQAKIASDIEMTIAGFSRIWNEGGLPKSETLKKIKQLKGCSIDWLLTGEGNPFPDEAPKKSLAYDTLGNEVDTDEFVFVPRYDIRAAAGYGQFVDHEEPVFTMAFRRHWIENYVTRDTKNLSVISVKGDSMEGVLNDGDSILVNHGENTPRDGLYVLRINENLLVKRLQIVPGGIINVISANEAYPAFEINLNDLTDDVEIIGRVEWFGRTI

SEQ ID NO: 6169 - protein, 56 aa, Neisseria meningitidis
LGLGSTCVCCIFGRNSGFEKIGRILINGMRGVAVGTVAGGINGYAGSTGKNTDIRR

SEQ ID NO: 6170 - protein, 91 aa, Neisseria meningitidis
MNEGEVVLTPEQIQTLYGYASRGDTYGGWRYLANLGDRYADNAAAIVGKDANLNGLNLWMKKGVENLWDDTVGKKIRLMCISVFWIVVFNL

SEQ ID NO: 6171 - protein, 617 aa, Neisseria meningitidis
MNRYPLWKYLLIVFTIAVAAVYSLPNLFGETPAVQVSTNRQAIIINEQTQFKVDAALKNAGIQTDGMFVVDNSLKVRFKDTETQLKARDVIENTLGEGYITALNLLADSPEWMAKIKANPMFLGLDLRGGVHFTMQVDMKAAMQKTFERYSGDIRRELRREKIRSGTVRQAGNSLTVPLQDAGDVQKALPQLRKLFPEATLNSDGSNIVLTLSEEAVNKVRSDAVKQNITTLHNRVNELGVAEPVIQQSGADRIVVQLPGVQDTAKAKDIIGRTATLELRMVEDDPAKLREALEGNVPSGYELLSSGGDRPEILLISKQVELTGDNINDAQPSFDQMGAPAVSLSLDSAGGSIFGELTAANVGKRMAMVLIDQGKSEVVTAPVIRTAITGGRVEISGSMTTAEANDTSLLLRAGSLAAPMQIVEERTIGPSLGKENIEKGFHSTLWGFAIVAAFMVVYYRLMGFFSTIALSANILFLIGILSAMQATLTLPGMAALALTLGMAIDSNVLINERIREELRAGVPPQQAINLGFQHAWATIVDSNLTSLIAGIALLVFGSGPVRGFAVVHCLGILTSMYSSVVVFRALVNLWYGRRRKLQNISIGSVWKPKAEMAGGKE

SEQ ID NO: 6172 - protein, 60 aa, Neisseria meningitidis
MESLVQRRICYKAVGSFSSGRDVLKYSGLTLNQDKATKPQTVQIVRQGEATPYWFKFNPL

SEQ ID NO: 6173 - protein, 321 aa, Neisseria meningitidis
MSYTQLTQGERYHIQYLSRHCTVTEIAKQLNRHKSTISREIRRHRTQGQQYSAEKAQRQSQTIKQRKRQPYKLDSQLIQHIDPLIRRKLSPEQVCAYLRKHHQITLHHSTIYRYLRQDKSNGSTLWQHLRICSKPYRKRYGSTWTRGKVPNRVGIENRPAIVDQKSRIGDWEADTIVGKGQKSALLTLVERVTRYTIICKLDSLKAEDTARAAVRALKAHKDRVHTITMDNGKEFYQHTKITKALKAETYFCRPYHSWEKGLNENTNGLIRQYFPKQTDFRNISDREIRRVQDELNHRPRKTLGYETPSVLFLNLFQPLIH

SEQ ID NO: 6174 - protein, 119 aa, Neisseria meningitidis; identical to SEQ ID NO: 420

SEQ ID NO: 6175 - protein, 238 aa, Neisseria meningitidis
MLFRKTTAAVLAATLMLNGCTLMLWGMNNPVSETITRKHVDKDQIRAFGVVAEDNAQLEKGSLVMMGGKYWFVVNPEDSAKLTGILKAGLDKPFQIVEDTPSYARHQVLPVKLESPGSQNFSTEGLCLRYDTDKPADIAKLKQLGFEAVKLDNRTIYTRCVSAKGKYYATPQKLNADYHFEQSVPADIYYTVTEEHTDKSKLFANILYTPPFLILDAAGAVLALPAAALGAVVDAARK

SEQ ID NO: 6176 - protein, 215 aa, Neisseria meningitidis
MKALLLGAPGAGKGTQAQFITAAFGIPQISTGDMLRAAIKAGTPLGLEAKKIIDEGGLVRDDIIIGMVKERIAQDDCKNGFLFDGFPRTLAQAEAMVEAGVDLDAVVEIDVPDSVIVDRMSGRRVHLASGRTYHVTYNPPKVEGKDDVTGEDLIQRDDDKEETVKKRLAVYHEQTEVLVDFYSKLEGEHAPKYIKVDGTQAVEAVKAEVLGALGK

SEQ ID NO: 6177 - protein, 242 aa, Neisseria meningitidis
VNEKTDQKAVSAQQAKEQTSFNNPEPMTGFEHTVTFDFQGTKMVIPYGYLARYTQDNATKWLSDTPGQDAYSINLIEISVYYKKTDQGWVLEPYNQQNKAHFIQFLRDGLDSVDDIVIRKDACSLSTTMGERLLTYGVKKMPSAYPEYEAYEDKRHIPENPYFHEFYYIKKGENPAIITHRNYHRYGENDYSTSVGSCINGFTVRYYPFIREKQQLTQQELVGYHQQVEQLVQSFVNNPSKK

SEQ ID NO: 6178 - protein, 798 aa, Neisseria meningitidis
MIKKILTTCFGLVFGFCVFGVGLVAIAILVTYPKLPSLDSLQHYQPKMPLTIYSADGEVIGMYGEQRREFTKIGDFPEVLRNAVIAAEDKRFYRHWGVDVWGVARAAVGNVVSGSVQSGASTITQQVAKNFYLSSEKTFTRKFNEVLLAYKIEQSLSKDKILELYFNQIYLGQRAYGFASAAQIYFNKNVRDLTLAEAAMLAGLPKAPSAYNPIVNPERAKLRQKYILNNMLEEKMITVQQRDQALNEELHYERFVRKIDQSALYVAEMVRQELYEKYGEDAYTQGFKVYTTVRADHQKVATEALRKALRNFDRGSSYRGAENYIDLSKSEDVEETVSQYLSGLYTVDKMVPAVVLDVTKKKNVVIQLPGGRRVTLDRRALGFAARAVNNEKMGEDRIRRGAVIRVKNNGGRWAVVQEPLLQGALVSLDAKTGAVRALVGGYDFHSKTFNRAVQAMRQPGSTFKPFVYSAALSKGMTASTVVNDAPISLPGKGPNGSVWTPKNSDGRYSGYITLRQALTASKNMVSIRILMSIGVGYAQQYIRRFGFRSSELPASLSMALGTGETTPLKVAEAYSVFANGGYRVSSHVIDKIYDRDGRLRAQMQPLVAGQNAPQAIDPRNAYIMYKIMQDVVRVGTARGAAALGRTDIAGKTGTTNDNKDAWFVGFNPDVVTAVYIGFDKPKSMGRVGYGGTIAVPVWVDYMRFALKGKQGKGMKMPEGVVSSNGEYYMKERMVTDPGLTLDNSGIAPQPSRRAKEDDGGAAEGGRQAADDEVRQDMQETPVLPSNTGSKQQQLDSLF

SEQ ID NO: 6179 - protein, 81 aa, Neisseria meningitidis; identical to SEQ ID NO: 1361

SEQ ID NO: 6180 - protein, 197 aa, Neisseria meningitidis
MADGMGNLIGWEKTGLVVGKQWITAKDDKVSDVCNANGEMGVIGLYEPFSHGALTIPGHPNCRCEVVSVSGGELGEFAEKKELRKAAMQYARDNFIGKSYVNKNSGHELKVTWQGVKHAASKANQAELSIMTKLDDLLRYAKYEGSYSDRKGHPNIIAAHKYRAVAKVGNESLNIGVIVREFPDDHKHYDHFILKDE

SEQ ID NO: 6181 - protein, 66 aa, Neisseria meningitidis; identical to SEQ ID NO: 2062

SEQ ID NO: 6182 - protein, 193 aa, Neisseria meningitidis
MNLRDDLQLIYDRIPEGSRVLDLGCGDGELLAALVEHKKCSGYGIEIDTNSVIAAMSRGVNVIQADLEEGLTAFNDQSFDVIVLSQTIQAMQNTEKILRCLMRVAKQAIVSFPNFGYWRNRVQIALGGHMPVSERMPYHWYDTPNIHWCTLKDFDLLCAKNNIRILERAVMTGNRQVKHFPNLLGSLAFYRVG

SEQ ID NO: 6183 - protein, 136 aa, Neisseria meningitidis
MTTYTIPRKDYQFLYIIEGSLLSYTLKNDEFHIIVQNVDYPDFPQEIPTPNYIDWVKIKFKQFSYLKFIYGYATKSQDKDIDNILELGELKQDDEILDYGGTLELIGGRCDLLTGFSIDIVCREIELEFLDQESFN

SEQ ID NO: 6184 - protein, 477 aa, Neisseria meningitidis
MSQYDVVVIGAGPGGYVAAIRAAQLGFKTACVDAGVNKAGNAPALGGTCLNVGCIPSKALLQSSEHFHAAQHEFAEHGITVGDVKFDAAKMIERKDAIVTKLTGGVKFLFQKNKVTSLFGTASFAGKNGDAYQIEVDNKGEKTVIEAKHVIVATGSVPRPLPQVAIDNVNVLDNEGALNLTEVPAKLGVIGSGVIGLEMGSVWNRVGAEVTILEAAPTFLAAADQQIAKEAFKYFTKEQGLSIELGVKIGDIKSEGKGVSVAYETAAGEAKTEVFDKLIVAIGRIPNTKGLNAEAVGLEKDERGFIKVDGECRTNLPNVWAIGDVVRGPMLAHKASDEGVAVAERIAGQKPHIDFNNVPFVIYTDPEIAWVGKTEEQLKAEGVEYKKGTSGFGANGRALAMGKAKGTVKVLADAKTDRILGVHMIGPVVSELVTEGVTALEFFASSEDIARIIHAHPTLSEVVHEAALAADKRALHG

SEQ ID NO: 6185 - protein, 213 aa, Neisseria meningitidis
MTDFRQDFLKFSLAQNVLKFGEFTTKAGRRSPYFFNAGLFNDGLSTLQLAKFYAQSIIESGIRFDMLFGPAYKGIILAAATAMMLAEKGVNVPFAYNRKEAKDHGEGGVLVGAPLKGRVLIIDDVISAGTSVRESIKLIEAEGATPAGVAIALDRMEKGTGELSAVQEVEKQYGLPVAPIASLNDLFILLQNNPEFGQFLEPVRAYRRQYGVE

SEQ ID NO: 6186 - protein, 215 aa, Neisseria meningitidis
MRIEITPISESALVYRLNAPSELGKQQKLWAFAAALGQHDRIEEVVVGMNNLTVFTRFDTDLATLADELQYVWEHTAVTDHQGKLVEIPVCYGGEYGPDLAEVAAFHQTVISEIVRRHTAQTYTVFMMGFQPGFPYLGGLPEALHTPRRAVPRTSVPAGSVGIGGSQTGVYPFASPGGWQIIGRTELPLFRADLNPPTLLAAGDQVRFVAERIEP

SEQ ID NO: 6187 - protein, 183 aa, Neisseria meningitidis; identical to SEQ ID NO: 4319

SEQ ID NO: 6188 - protein, 355 aa, Neisseria meningitidis
MGGKTFMLMAGGTGGHIFPALAVADSLRARGHHVIWLGSKDSMEERIVPQYGIRLETLAIKGVRGNGIKRKLMLPVTLYQTVREAQRIIRKHRVECVIGFGGFVTFPGGLAAKLLGVPIVIHEQNAVAGLSNRHLSRWAKRVLYAFPKAFSHEGGLVGNPVRADISNLPVPAERFQGREGRLKILVVGGSLGADVLNKTVPQALALLPDNARPQMYHQSGRGKLGSLQADYDALGVKAECVEFITDMVSAYRDADLVICRAGALTIAELTAAGLGALLVPYPHAVDDHQTANARFMVQAEAGLLLPQTQLTAEKLAEILGGLNREKCLKWAENARTLALPHSADDVAEAAIACAA

SEQ ID NO: 6189 - protein, 135 aa, Neisseria meningitidis; identical to SEQ ID NO: 803

SEQ ID NO: 6190 - protein, 637 aa, Neisseria meningitidis
MNPSPLLDLIDSPQDLRRLDKKQLPRLAGELRTFLLESVGQTGGHFASNLGAVELTIALHYVYDTPEDKLVWDVGHQSYPHKILTGRKNQMHTMRQYGGLAGFPKRCESEYDAFGVGHSSTSIGAALGMAAADKLLGSDRRSVAIIGDGAMTAGQAFEALNCAGDMDVDLLVVLNDNEMSISPNVGALPKYLASNVVRDMHGLLSTVKAQTGKVLDKIPGAMEFAQKVEHKIKTLAEEAEHAKQSLSLFENFGFRYTGPVDGHNVENLVDVLKDLRSRKGPQLLHVITKKGNGYKLAENDPVKYHAVANLPKESAAQMPSEKEPKPAAKPTYTQVFGKWLCDRAAADSRLVAITPAMREGSGLVEFEQRFPDRYFDVGIAEQHAVTFAGGLACEGMKPVVAIYSTFLQRAYDQLVHDIALQNLPVLFAVDRAGIVGADGPTHAGLYDLSFLRCVPNMIVAAPSDENECRLLLSTCYQADAPAAVRYPRGTGTGAPVSDGMETVEIGKGIIRREGEKTAFIAFGSMVAPALAVAEKLNATVADMRFVKPIDEELIVRLARSHDRIVTLEENAEQGGAGGAVLEVLAKHGICKPVLLLGVADTVTGHGDPKKLLDDLGLSAEAVERRVRAWLSDRDAAN

SEQ ID NO: 6191 - protein, 280 aa, Neisseria meningitidis
MDIKINDITLGNNSPFVLFGGINVLESLDSTLQTCAHYVEVTRKLGIPYIFKASFDKANRSSIHSYRGVGLEEGLKIFEKVKAEFGIPVITDVHEPHQCQPVAEVCDVIQLPAFLARQTDLVVAMAKTGNVVNIKKPQFLSPSQMKNIVEKFHEAGNGKLILCERGSSFGYDNLVVDMLGFGVMKQTCGNLPVIFDVTHSLQTRDAGSAASGGRRAQALDLALAGMATRLAGLFLESHPDPKLAKCDGPSALPLHLLEDFLIRIKALDDLIKSQPILTIE

SEQ ID NO: 6192 - protein, 320 aa, Neisseria meningitidis
MNIPSKISSFIGKTFSLWAALFAAAAFFAPDTFKWAGPYIPWLLGIIMFGMGLTLKPSDFDILFKHPKAVIIGVIAQFAIMPATAWLLSKLLNLPAEIAVGVILVGCCPGGTASNVMTYLARGNVALSVAVTSVSTLISPLLTPAIFLMLAGEMLEIQAAGMLMSIVKMVLLPIVLGLIVHKVLGSKTEKLTDALPLVSVAAIVLIIGAVVGASKGKIMESGLLIFAVVVLHNGIGYLLGFFAAKWTGLPYDAQKTLAIEVGMQNSGLAAALAAAHFAAAPVVAVPGALFSVWHNISGSLLATYWAAKARKHKNPKRLSS

SEQ ID NO: 6193 - protein, 612 aa, Neisseria meningitidis
MRKVCASARTRSMIYGSMPSEKLTIFQTAFVMQVNIQIPYILPRCVRAEDTPYACYLKQLQVTKDVNWNQVQLAYDKWDYKQEGLTGAGAAIIALAVTVVTAGAGAGAALGLNGAAAAATDAAFASLASQASVSLINNKGNIGNTLKELGRSSTVKNLMVAVATAGVADKIGASALNNVSDKQWINNLTVNLANAGSAALINTAVNGGSLKDNLEANILAALVNTAHGEAASKIKQLDQHYITHKIAHAIAGCAAAAANKGKCQDGAIGAAVGEILGEALLDGRDPGSLNVKDRAKIIAKAKLAAGTVAALSKGDVNAAANAAAVAVESNALSKERMDKLTKCLSGKTCSTTMEKVNAIKKDEQFSKVIDTEIQKVCSRNPLGDGCRNGINMSIKYIAMPAAWKYMPTDVSRVAKEVFGYLYNSQGASTRFDKYFNTIDNRADFFAASNLYEQNLGSKARWFGGADFVSRAAITGLGADGEASYITFAAGKVVGNPPIYEWRAASGNALIVNGFYNFRDLFNKKTNPREWDIQQLKSEQKLLQPIHQKYLSNEKDYLSLIKGVTSNKIFSIIPNPLDERKKIEDGINMLDYKSRIKYGCKLMGYSEKQGCKP

SEQ ID NO: 6194 - protein, 475 aa, Neisseria meningitidis; identical to SEQ ID NO: 3229

SEQ ID NO: 6195 - protein, 56 aa, Neisseria meningitidis; identical to SEQ ID NO: 326

SEQ ID NO: 6196 - protein, 95 aa, Neisseria meningitidis
MKIEFDSEKNQRNIEERNLPFESVGQIRWTTAVIVPDVRFDYPEPRYVAAAYLGDTQRLHIVCFTPIKDGIRVISFRKANKREVKKYATSILNKR

SEQ ID NO: 6197 - protein, 206 aa, Neisseria meningitidis; identical to SEQ ID NO: 1164

SEQ ID NO: 6198 - protein, 256 aa, Neisseria meningitidis
MNFTDTHCHLADPALRENLPHILTAARKVGVKRFIVPATRPQDWQDVADLAEMPSEHGQIRIALGIHPWFSDGIAERDFVRLETMLAHYPQAWVGEIGLDFYDKTQTSQQRERQIQVFVRQLEIAQTLRRRVIIHNLKATADIAAAVKQTGFAQGGIVHAFSGSAEEARVLTKLGFKIGIGSLLLNPNARKVRDTLKALNDGDFVLETDSPFMLKKEINTPANIPGIAKIAAEIRGTCVEEIAKVTERNADALLGR

SEQ ID NO: 6199 - protein, 352 aa, Neisseria meningitidis
MMIGASLFSSAGIAETYLHNAGIKIIAANELVPERANLYKALYPESKMIIGDILHEEVFQNLIQSVPNRLDFLIASPPCQGMSVAGKNRNIQEMANDKRNHLIFRVIEFILLKRPTFVLIENVPFFLKIKLPYKGTLQTVEVILQDLFGCEYYIQTHIFDSADYGVAQHRKRAIIRMNKHSTIWGMPEKVTKTISVRDAISFLPSIESGQKSNVKWHFARTHAPEHIIWLKNTPTGRSAFDNIEHYPKKKNGEKIKSYNTTYRRMEWDAPAPTITIRNDAISSQLNVHPGRSMPDGTYSDARVLTPLELMLLTSLPIDWNIPDDTSELLIRQCIGESIPPLLIKKIVERIGK

SEQ ID NO: 6200 - protein, 141 aa, Neisseria meningitidis; identical to SEQ ID NO: 3635

SEQ ID NO: 6201 - protein, 92 aa, Neisseria meningitidis; identical to SEQ ID NO: 419

SEQ ID NO: 6202 - protein, 485 aa, Neisseria meningitidis
MKPTIALVGRPNVGKSTLFNRLTRTKDALVHDLPGLTRDRHYGHGKVGSKPYLVIDTGGFEPVVDSGILHEMAKQTLQAVDEADAVVFLVDGRTGLTPQDKIIADRLRQSPRPVYLAVNKGEGGNRAVLAAEFYELALGDPYVISGAHGDGVYYLIEDILEKFPEPEAEEADARHPVFAVIGRPNVGKSTLVNAILGEERVITFDMAGTTRDSIHIDFEREGKPFTIIDTAGVRRRGKVDEAVEKFSVIKAMQAVEAANVAVLVLDAQQDIADQDATIAGFALEAGRALVVAVNKWDGISEERREQVKRDINRKLYFLDFAKFHFISALKERGIDGLFDSIQAAYNAAMIKMPTPKITRVLQSAIERQQPPRAGLVRPKMRYAHQGGMNPPVIVVHGNSLHAISDSYTRYLTQTFRKAFNLQGTPLRIQYNVSENPYENAEDKPKKKPLRRVSLSNRIEKREGRKEEKNRFKKKTKVSVKKQFSK

SEQ ID NO: 6203 - protein, 92 aa, Neisseria meningitidis
LRGKTKVMTTQMGASRDVSKSAKGWSVGIGLNVGKQLTDSVGLEFDPYYRHKTIYKPREIVLDGDKTKMGRSKSNEYGFRVAATFYSQLKSK

SEQ ID NO: 6204 - protein, 470 aa, Neisseria meningitidis
MLLLPLLASAAYAEETPREPDLRSRPEFRLHEAEVKPIDREKVPGQVREKGKVLQIDGETLLKNPELLSRAMYSAVVSNNIAGIRVILPIYLQQAQQDKMLALYAQGILAQADGRVKEAISHYRELIAAQPDAPAVRMRLAAALFENRQNEAAADQFDRLKAENLPPQLMEQVELYRKALRERDAWKVNGGFSVTREHNINQAPKRQQYGKWTFPKQVDGTAVNYRLGAEKKWSLKNGWYTTAGGDVSGRVYPGNKKFNDMTAGVSGGIGFADRRKDAGLAVFHERRTYGNDAYSYTNGARLYFNRWQTPKWQTLSSAEWGRLKNTRRARSDNTHLQISNSLVFYRNARQYWMGGLDFYRERNPADRGDNFNRYGLRFAWGQEWGGSGLSSLLRLGAAKRHYEKPGFFSGFKGERRRDKELNTSLSLWHRALHFKGITPRLTLSHRETRSNDVFNEYEKNRAFVEFNKTF

SEQ ID NO: 6205 - protein, 71 aa, Neisseria meningitidis
VVIGYDEIKAKNHSLSAGQYFEVKIDYVDISADEFAQKMAGFSADLDKLFAESAELEKEIKDRLAMLKFNS

SEQ ID NO: 6206 - protein, 77 aa, Neisseria meningitidis; identical to SEQ ID NO: 3505

SEQ ID NO: 6207 - protein, 335 aa, Neisseria meningitidis
MSTFFQQTAQAMIAKHINRFPLLKLDQVIDWQPIEQYLNRQKTRYLRDHRGRPAYPLLSMFKAVLLGLWHSLSDPELEHSLITRIDFNLFCRFDELSIPDYSTLCRYRNRLAQDNTLSELLELINRQLTEKGLKVEKASAAVIDATIIQTADGKQRQAIEVDEEGQVSGQTTRSKDSDARWIKKNGLYKLGYKQHTRTDAEGYIEKLHITPANAHECKHLSPLLEGLPKGTTVYADKGYDSAENRQHLEEHQLQDGIMRKACRNRPLSEVQTKRNRYLSKTRYVVEQSFGTLHRKFRYARAAYFGLIKVSAQSHLKAMCLNLLKAANRLSAPAAA

SEQ ID NO: 6208 - protein, 122 aa, Neisseria meningitidis
MAAIGIGMTVLVYGIVAVIVKLDDLGMLLMRRPQTFSRSLGQMLTAFMPCFMRGLSVVGTLAMFLIGGVLVAHNLGLLHDFLHAQHWDAGWAEYFANLVVGLLSGSIACAPALPLMNRFGRH

SEQ ID NO: 6209 - protein, 391 aa, Neisseria meningitidis
MLNTFLSPWPCFTQEEADAVSKVLLSNKVNYWTGNECREFEKEFAAFAGTRYAVALANGTLALDVALKAMGIGAGDDVIVTSRTFLASASCIVNAGANPVFADVDLNSQNISAETVKAALTPTTKAVIVVHLAGMPAEMDGIMALAKEHNLWVIEDCAQAHGAKYKGKSVGSIGHVGAWSFCQDKIMTTGGEGGMVTTNDKTLWEKMWSYKDHGKSYDAVYNHEHAPGFRWLHESFGTNWRMMEMQAVIGRIQLKRLPEWTARRRENAAKLAESLGKFSSIRLVEVADYIGHAQYKFYAFVKPEHLKDGWTRDRIVGELNARKVPCYQGSCSEVYLEKAFDNTPWRPKERLTNAVELGDTSLMFLVHPTLTDDEIAFCKKHIEAVLTEAAR

SEQ ID NO: 6210 - protein, 397 aa, Neisseria meningitidis
LLTIAAEQGKFGGTRRQTRQDKPTRTETMKYKRIVFKVGTSSITHSDGSLSRGKIQTITRQLAALHHAGHELVLVSSGAVAAGFGALGFKKRPVKIADKQASAAVGQGLLMEEYTANLSSDGIVSAQILLSRADFADKRRYQNAGGALSVLLQRRAVPIINENDTVSVEELKIGDNDTLSAQVAAMIQADLLVLLTDIDGLYTGNPNSNPDAVRLDKIEHINHEIIEMAGGSGSANGTGGMLTKIKAATIATESGVPVYICSSLKPDALAEAADNQADGSFFVPRAKGLRTQKQWLAFYSESRGGVYVDEGAEHALSEQGKSLLMSGIAGIEGHFSRMDTVTVYSKATKQPLGKGRVLFGSAAAEDLLKLRKAKGVFIHRDDWISITPEIRLLLTEF

SEQ ID NO: 6211 - protein, 468 aa, Neisseria meningitidis; identical to SEQ ID NO: 2240

SEQ ID NO: 6212 - protein, 86 aa, Neisseria meningitidis; identical to SEQ ID NO: 4508

SEQ ID NO: 6213 - protein, 160 aa, Neisseria meningitidis
MTQQRQLPSHELIMSELMMPDTANFSGNVHGGELLLLLDQVAYSCASRYSGNYCVTLSVDKVLFKEPIHVGDLVTFYASVNYTGRTSMEIGIRVEAQNIRTGEIRHTNSCYFTMVAVKDGKPVPVPPLEILTDRQRCRYEKAKKRRDISLQASGDVSCGC

SEQ ID NO: 6214 - protein, 282 aa, Neisseria meningitidis; identical to SEQ ID NO: 1327

SEQ ID NO: 6215 - protein, 42 aa, Neisseria meningitidis
MQINKVMPSEGLSDGILRYFAKVGMTVRVFLTGWIFKVLYRV

SEQ ID NO: 6216 - protein, 126 aa, Neisseria meningitidis
MNIRFFALTVPVLSLAACAVPEAYDDGGRGHMPPVQNQAGTDDFRAFSCENGLSVRVRHLDSGKVALRLDGRRAVLSSDVAASGERYTAEHGLFGNATEWHQKGGEAFFGFTDAYGNSVETSCRAR

SEQ ID NO: 6217 - protein, 289 aa, Neisseria meningitidis; identical to SEQ ID NO: 657

SEQ ID NO: 6218 - protein, 573 aa, Neisseria meningitidis
MPSEAICSKKTMLNKDQFADNHFIRTIIEEDLESGKHTAVQTRFPPEPNGYLHIGHAKSICLNFGLAYIYDGLCNLRFDDTNPEKENDEYVNAIKEDVEWLGFHWAGEPRFASNYFDQLYDYAVGLIKDGKAYVDDLTPEEMREYRGTLTEAGKNSPYRDRSVEENLDLFTRMKNGEFPDGSKTLRLKIDMASGNINMRDPVIYRIRRAHHHNTGDKWCIYPMYDYTHCISDAIEGITHSLCTLEFEAHRPLYDCVLDNIPAPHATRPRQYEFSRLELLYTITSKRKLNQLVVEKHVSGWDDPRMPTISGMRRRGYTPEGLRLFAKRAGISKSENIVDMSVLEGAIREELENSAPRLMAVLNPLKVTLTNFETGRTQSRRAAFHPNHEEMGEREVPISQTIYIEADDFAENPPKGFKRLIPGGEVRLRHGYVIKCDEVVKDEAGNVVELKCSIDHDTLGKNPEGRKVKGVIHWVSAEHAAEIKVRLYDRLFTVERPDAVRGEDGEYLPFTDFLNPESVKEITAYAEPAAKDLPAESRWQFERIGYFVTDRKDHGKDTPVFNRTVTLKDSWQPK

SEQ ID NO: 6219 - protein, 326 aa, Neisseria meningitidis
LPFSTLFRLKPMTDITPFANRLGKNIKHLMKWAKRNGIEAWRIYDRDIPQFPFAADVYGDRIHLQEYDTGWLMRPEEYEAWLAEVLEAVAFVTGFAPEQIRLKRRERQKGLQQYEKTGKAGDDFVITENGRKFWVNLDKYLDTGLFLDHRNTRKKVGETAAGKRFLNLFSYTGSFTVYAATGGAASSETVDLSNTYLDWAKRNFELNGIDTERHKIVRADVFQYLQTAYGEGRRFDLIVMDPPSFSNSKKMSDILDIQRDHKKLIDGAVKLLASDGILYFSNNLRSFVLDDLVSEQYAVKDISKQSVPEDFRNKKIHRCWEIRHKS

SEQ ID NO: 6220 - protein, 531 aa, Neisseria meningitidis
MWGLLGTIATSVFQVGKAMDGRRWVVWGAFALLPSAFLAVMVVAPLWAVAAYDGLAWRAVLSDAYMLKRLAWTVFQAAATCVLVLPLGVPVAWVLARLAFPGRALVLRLLMLPFVMPTLVAGVGVLALFGADGLLWRGRQDTPYLLLYGNVFFNLPVLVRAAYQGFVQVPAARLQTARTLGAGAWRRFWDIEMPVLRPWLAGGVCLVFLYCFSGFGLALLLGGSRYATVEVEIYQLVMFELDMAVASVLVWLVLGVTAAAGLLYAWFGRRAVSDKAVSPVMPSPPQSVGEYVLLAFAAAVLSVCCLFPLLAIVVKAWSAGESWRVLMESETWQAVWNTLRFSAAAVYAAAVLGVVYAAAARRSAWMRGLMFLPFMVSPVCVSAGVLLLYPQWTASLPLLLAMYALLAYPFVAKDVLSAWDALPPDYGRAAAGLGANGFQTACRITFPLLKPALRRGLTLAAATCVGEFAATLFLSRPEWQTLTTLIYAYLGRAGEDNYARAMVLTLLLAAFALGIFLLLDGGEGGKQTETL

SEQ ID NO: 6221 - protein, 491 aa, Neisseria meningitidis
MISKQEYQAQAAQGYNRIPLVQELLADLDTPLSLYLKLANRPYTYLLESVVGGERFGRYSFIGLPCSHYLKASGKHVDVYQNGEIVEQHDGNPLPFIEAFHNRFKTPEIPSLPRFTGGLVGYFGYETIYNFEHFAHRLKNTTKADPLGTPDILLMLSQELAVIDNLSGKIHLVVYADPSQPDGYERARERLEDIRTQLRQSCAIPLSLGSKHTEAVSEFGEEPFKACVNKIKDYIFAGDCMQVVPSQRMSMEFTDSPLALYRALRTLNPSPYLFYYDFGDFHIVGSSPEILVRRERDDVIVRPIAGTRLRGKTPAEDLANEQDLLSDAKEIAEHVMLIDLGRNDVGRISKTGEVKVTDKMVIEKYSHVMHIVSNVEGRLKDGMTNMDILAATFPAGTLSGAPKVRAMEIIEEVEPSKRGIYGGAVGVWGFNNDMDLAIAIRTAVVKNNTLYVQSGAGVVADSDPASEWQETQNKARAVIRAAQMVQEGLDK

SEQ ID NO: 6222 - protein, 105 aa, Neisseria meningitidis
MQKRIDEIQSKYREWCHLLPQLEEDIRRWKHVVTLIRDMDNFYTHEYQACHQAIEDGVELDLSTEGEYSIMSEDALWNALGEFHQLAWLYLRSSVDALDKYTQED

SEQ ID NO: 6223 - protein, 300 aa, Neisseria meningitidis
MDSLMTLLSVLIPMFAGFFIRVPKPYLPALDKVLSVLVYAVLLLIGVSLSRVEDLGSRLDDMALTVLWLFVCTVGANLLALAVLGKLFPWRIKGKGKGVSVGVSGSVGQLGCVLLGFAFGKLMRDIWMPSESAGMYCLMLLVFLIGVQLKSSGVSLRQVLVNRRGIRLSVWFMLSSLSGGLLFAASTDGVSWTKGLAMASGFGWYSLSGLVMTEAYGAVWGSIMLLNDLARELFALAFIPLLMKRFPDAAVGVGGATSMDFTLPVIQGAGGLEVVPVAVSFGVVVNIAAPFLMVVFSALG

SEQ ID NO: 6224 - protein, 95 aa, Neisseria meningitidis; identical to SEQ ID NO: 589

SEQ ID NO: 6225 - protein, 431 aa, Neisseria meningitidis
MSVIQDLQSRGLIAQTTDIEALDALLNEQKIALYCGFDPTADSLHIGHLLPVLALRRFQQAGHTPIALVGGATGMIGDPSFKAAERSLNSAETVAGWVESIRNQLTPFLSFEGGNAAIMANNADWFGSMNCLDFLRDIGKHFSVNAMLNKESVKQRIDRDGAGISFTEFAYSLLQGYDFAELNKRHGAVLEIGGSDQWGNITAGIDLTRRLHQKQVFGLTLPLVTKSDGTKFGKTEGGAVWLNAKKTSPYQFYQFWLKVADADVYKFLKYFTFLSIEEIDAIEAKDKASGSKPEAQRILAEEMTRLIHGEEALAAAQRISESLFAEDQSSLTESDFEQLALDGLPAFEVSDGINVVEALVKTGLASSNKEARGFVNSKAVLLNGKPAEANNPNHAAERPDDACLLNGEHKRFGKYTILRRGKRNHALLVWK

SEQ ID NO: 6226 - protein, 151 aa, Neisseria meningitidis
MAYSADLRNKALNYSGLNLNQDKATKPQTVQIVRQGEATPYWFKFNPLYYEQCKNISQTAATFNLSRNTLYLWIRLKKQTGSLKHQVTGLNAVKSDRQKPAQYVGQHPDAYLHEIAKHFDCTAATICYALKQMGITRKKRPPLTKNKTRPK

SEQ ID NO: 6227 - protein, 125 aa, Neisseria meningitidis; identical to SEQ ID NO: 348

SEQ ID NO: 6228 - protein, 332 aa, Neisseria meningitidis
VAAHIGRIDTDAPLKPLYVIHGEEELLRIEALDALRAAAKKQGYLNREVYTADNAFDWNELLQTAGSAGLFADLKLLELHIPNGKPGKTGGEALQDFAARLPEDTVTLVLLPKLEKTQLQSKWFAALAAKGEVWEAKPVGAAALPQWIRGRLDKIGLGIEADALALFAERVEGNLLAARQEIDKLALLYPKGHTVNIDEAQTAVANVARFDVFQLAGAWMKGDVPRVCRLLDGLQEEGEEPVLLLWAVAEDVRTLIRLAAVLKQGQGVQSVRNSLRLWGDKQTLAPLAVKRISVVRLLDALKTCAQIDRIIKGAEDGDAWTVFKRLVVSLAE

SEQ ID NO: 6229 - protein, 171 aa, Neisseria meningitidis
MKSKLLLILINFSLISSPLGANAAKIYTCTINGETVYTTKPSKSCHSTDLPPIGNYSSERYIPPQTPEPVSSPSNGGQVVKYKAPVKTVSKPAKSNTPPPQQAPSNNSRRSILETELSNERKALVEAQKMLSQARLAKGGNINHQEINALQSNVLDRQQNIQALQRELGRM

SEQ ID NO: 6230 - protein, 252 aa, Neisseria meningitidis
MKKVSVLIVAKNEANHIQECIESCRFDKEVIVIDDYSTDNTAEIAEGLGAKVFRRHLNGDFGAQKTFAIEQAGGEWVFLIDADERCTPELSDEISKIVQTGDYAAYFVERRNLFPNHPATHGAMRPDSVCRLMPKKDSSVQGKVHETVQTPYPKRRLKHFMYHYTYDNWEQYFNKFNKYTSISAEKYREQGKPVRFVRDIILRPIWGFFKIYILNKGFLDGKMGWIMSVNHSYYTMIKYVKLYYLYKSGGKF

SEQ ID NO: 6231 - protein, 78 aa, Neisseria meningitidis; identical to SEQ ID NO: 1246

SEQ ID NO: 6232 - protein, 302 aa, Neisseria meningitidis
MNQTAINRADVRTRFIFDDMPVRGLHVRLENVWQHIVKQKNYPAAIRRALGELLAAGVLLSGNLKNEGTLIVQVQGQGRLKMLVAEATSDRTVRATARWDETAEIADDESLGDLLGEGGVFVLTLQPKDGEPWQGVVPLEGDGIAQMLVNYMKRSEQLDTHIVLSASDEAAGGLLVQRLPEEVLDEEAWEHVSTLARTLTAEELAGLDAQHVLYRLFHETPPRVFEPETFEFSCTCSRGKVSDMLLMLGGEEVGGVVVEQGSIEVDCDFCHSKYVFDETDVNALFGEDVVGVAKGLPRHTVQ

SEQ ID NO: 6233 - protein, 426 aa, Neisseria meningitidis; identical to SEQ ID NO: 1580

SEQ ID NO: 6234 - protein, 310 aa, Neisseria meningitidis; identical to SEQ ID NO: 714

SEQ ID NO: 6235 - protein, 257 aa, Neisseria meningitidis
MKPKIQRHGEILSLVRRHQFMSVDELAAALDVTPQTIRRDIRELEEVGSLKRHHGGASSGGNLPEGLPADRQTRCQNEKNAIARLIAEHIPDGSSLFVSIGTTMEAVVSELVRRRGSLRVITNNIHAASIASARTDYTVIITSGVVRPLDGGITGVATVDFINQFKVDYAVMSTHGVESDGSLLDDDYKEVSVMQAMIANARVRFLGVDHSKFRSNALVRLGDITAFDKVFTDRLPDTAMQKMLKEAGVECLIADAV

SEQ ID NO: 6236 - protein, 205 aa, Neisseria meningitidis
MLAKIPDGDTIKPIFHPNRTHMKKIIASALIATFALAACQDDTQARLEQQQKQIEALQQQLAQQADDTVYQLTPEAVKDTIPAEAQANGNNGQPVTGKDGQQYIYDQSTGSWLLQSLVGAAAGAFIGNALANKFTRAGNQDSPVARRARAAYHQSARPNARTSRDLNTRSLRAKQQAAQAQRYRPTTRPPANYRRPAMRGFGRRR

SEQ ID NO: 6237 - protein, 67 aa, Neisseria meningitidis
MPSEGLSDGMPARTDAAWSGCRFEGVFNAKGNLSYDVFAAGALKKPGILGRSARLPGSISAIYSKPY

SEQ ID NO: 6238 - protein, 375 aa, Neisseria meningitidis
MSNWKPNIPYNDLPPLPPKQDIESKTILKRCIAARASLARLKQAAELIPNQAMLINTLPVMEARASSEIENIVTTTDKLFQSLQMDTERQDPATKEALQYRTALFAGYESLTSRPLCTQTAIMVCNAIKHPYEMAIRKTGGTALKGGNSGNVVYTPPEGEETIRGKLANWERFIHESGDLDPLIIMAAAHYQFEAIHPFTDGNGRTGRILNSLLLIEKGLLDLPILYLSRYIIENRADYYRLLLGVTERQDWESWIIYILDGVADTADWTVSKIDAIRRLFEQTRQHIRTHAQGIYTHELVNLLFEQPYTRIANLEAAGIAKRQTASKYLKELSDIGVLQEIVIGRDKLFIHPRLMELLRGEGNSFTSFQSLVKA

SEQ ID NO: 6239 - protein, 163 aa, Neisseria meningitidis; identical to SEQ ID NO: 684

SEQ ID NO: 6240 - protein, 318 aa, Neisseria meningitidis
MNIIGLDISKDTIDATLHKTNGSIHYIKFKNNDDGLKQFRLWIKGNRIRKVYIGMEATGIYYEKAADMLSSYYTVYVINPLKIKDYGKSRFNRTKTDKADSNLIADYIKRHQDTLIPYQIPKNKALQKLINLKNQLHQHQKQIKNRLHSTEEDFIRNIHQDLIDTIQDKMEQVKIAISEQIKKQTDNNHYRNLQTIPSIGKDTASVLYAQLTEKHFKTANQFVSYAGLNPAIIQSGTSVRGRGRLSRYGNRRLKSTLYMPALCAYRFNAFPKLINNLKKAGKPKMVIIVAIMRKLAKLAYYIVKTGQPYDAERHRLNQ

SEQ ID NO: 6241 - protein, 149 aa, Neisseria meningitidis
MSIYAVAHIVHLYCAIAFVGGVFFEVLVLSVLHTGRVSREARREVEKAMSYRAVRVMPFVVGLLFASGIVMAANRYLSILGEPFATSFGTMLTLKILLAFSVLAHFAIAVVKMARSTLTVGWSKYIHAVVFTHMLLIVFLAKAMFYISW

SEQ ID NO: 6242 - protein, 859 aa, Neisseria meningitidis
MRYDKLTAKFQQALAEAQSLALAADGSYLEAGFVLKALLDDQNSGAAALLAHAGVNVPQVKQRLQQHLNSLPKVSGQGGDILPSRELQAVLNLMDKAATKRSDAYIASELFLLALVQQNDATGKILKEAGATEQNINAAIDAVRGGQNVNDANAEDQRDALKKYTLDLTQRARDGKLDPVIGRDDEIRRAIQVLQRRTKNNPVLIGEPGVGKTAIVEGLAQRIVNGEVPESLRNKRLLVLDLAALIAGAKYRGEFEERLKGVLNDLAKDDGNTLIFIDEIHTLVGAGKTDGAMDAGNMLKPALARGELHCIGATTLDEYRQYIEKDAALERRFQKVLVGEPSVEDTIAILRGLQERYEIHHGIDITDPAIVAAAELSDRYITDRFLPDKAIDLIDEAASRVKMEKETKPEAMDKIDRRLIQLRMEKAHVEKEKDDASKKRLELIDEEINGLQKEYADLDEIWKAEKAISDGAANIKKQIDEVKIKIEQAKRQGDLALASKLMYEDLEHLEKQRAAAERADTDSTKPANKLLRNNVGAEEIAEVVSRMTGIPVSKMMEGERDKLLKMEEVLHRRVVGQDEAVRAVSDAIRRSRSGLADPNKPYGSFLFLGPTGVGKTELCKALAGFLFDSEDHLIRIDMSEYMEKHAVARLIGAPPGYVGYEEGGYLTEQVRRKPYSVILLDEVEKAHPDVFNILLQVLDDGRLTDGQGRTVDFKNTVIVMTSNIGSQHIQQMGIQDYEAVKEVVMEDVKEHFRPEMINRIDEVVVFHGLDQDNIRNIAKIQLKGLEKRLEKQNLRLAVSDAALDIIAKAGFDPIYGARPLKRAIQSEIENPLAKALLAGNYAPESEIRVEADGDRLKFA

SEQ ID NO: 6243 - protein, 92 aa, Neisseria meningitidis
  misc_feature 2, 3, 4: 'Xaa' is any amino acid
VXXXLPESNPAEDLNLPSETVNVEFQKSGIFQDSAQCPAPVTFTVTVLDSSRQFAFSFENACTIAERLRYMLLALAWAVAAFFCIRTVSREV

SEQ ID NO: 6244 - protein, 328 aa, Neisseria meningitidis
MSSTPNKQAGYPRLVADIGGTNARFALETAPRVIEKAAVLPCKDYDTVTDAVRAYLNQSGATAVRHAAFAIANPILGDWVQMTNHHWAFSIETTRQTLGLDTLILLNDFTAQALAVTQTSSKDLMQVGGQKPVEFAPKAVIGPGTGLGVSGLVHSHAGWVALAGEGGHTSFPPFDDMEVLIWQYAKNKYGHVSAERFLSGAGLSLVYEALAAKQKAKPAKLMPSEITEKALSGTSPLCRQTLDIFCAMLGTVASNLALTLGARGGVYLCGGIIPRVLEYFKTSPFRSRFENKGRFEAYLAAIPVYVVLSEFPGISGAAAALDNHLRNV

SEQ ID NO: 6245 - protein, 393 aa, Neisseria meningitidis
MIIDVKVPMLSESVSEGTLLEWKKKVGEAVARDEILIDIETDKVVLEVPSPQAGVLVEIVAQDGETVVADQVLARVDTAATAAAEAPAAAPAEAAPAAAPAATQNNAAMPAAAKLAAETGVDVNALQGSGRDGRVLKEDVQNAAAKPAGAAAPAVALPAGARPEERVPMSRLRARVAERLLASQQENAILTTFNEVNMKPIMDLRAKYKEKFEKEHGVKLGFMSFFVKAAVAALKKYPVVNASVDGKDIVYHGYFDIGIAIGSPRGLVVPILRDADQMSIADIEQAIVDYAKKAKDGKIAIEDLTGGTFSITNGGTFGSMMSTPIINPPQSAILGMHATKERAVVENGQVVVRPMMYLALSYDHRIIDGREAVLTLVAIKDALEDPARLLLDL

SEQ ID NO: 6246 - protein, 295 aa, Neisseria meningitidis
MPYQQITVNVNDAVAERLADALMEHGALSAAIEDAYAGTQNEQAIFGEPGMPAEQIWQQSKVIALFGEHDEAAAIIQTATQECGLKDLAYTGETIEDQDWVRLTQSQFDPIRISDRLWITPSWHEVPEGSAVNLRLDPGLAFGTGSHPTTRLCLKWLDTQLKNGESVLDYGCGSGILTIAALKLGAGFAVGVDIDEQAVRAGKDNAAQNNVDAQFFLPDGLPQGQFDVVVANILANPLRMLGEMLAARTKQGGRIVLSGLLDEQAEELGGIYSQWFDLDPAETEEGWARLSGVKR

SEQ ID NO: 6247 - protein, 127 aa, Neisseria meningitidis; identical to SEQ ID NO: 1080

SEQ ID NO: 6248 - protein, 437 aa, Neisseria meningitidis
LPCRLKAVSDGICILIRLESIIEQAQNINKLNNGRTLRCRTDKTEESPMSKKLHPQTLAIRGGKEQTEYREHNQALFLTSSFMWDNAQHAADLFSKKIKGFTYTRTANPTTAAFEKRIAALEGAERAVATSAGMSAIQAAFFTFLQAGDHVISSRSLFGTTVGFINNIVAKFGIEVSHVSPTDINEWKAAVKANTKLLFLETPSNPLGEVADLEALAELAHGIGALLVVDNSLLSPVGSQPLKHGADISVSSATKAIDGHGRVMGGVLAGSEELLAQVAMYCNSCGLAMSPFNAWQLLSGVETLSLRMEKQFDNALKIAQWLQAQPQVQAVYYTGLSDHPQAALIRKQQNGGGIVIGFEVADQEAAWKVVDGVELFSRTANLGDVRSTITHPWTTTHGRMQPEEKLAANIRPGLVRLSVGLEYVGDLIDDLKQALAR

SEQ ID NO: 6249 - protein, 105 aa, Neisseria meningitidis; identical to SEQ ID NO: 895

SEQ ID NO: 6250 - protein, 235 aa, Neisseria meningitidis; identical to SEQ ID NO: 1248

SEQ ID NO: 6251 - protein, 136 aa, Neisseria meningitidis
MIEFVRAKKRLLWAFVLLLVWTCGYRYAADKAEAKQTALIATYRHSSMVAAEQYALQLKKAQDERQRWYDFSQKQGRKPVKKQYPPQTKKAGYLKTKEELLAELACLKAEMVALKKPDALIHGKEVRQKERNSSQG

SEQ ID NO: 6252 - protein, 231 aa, Neisseria meningitidis; identical to SEQ ID NO: 2473

SEQ ID NO: 6253 - protein, 275 aa, Neisseria meningitidis; identical to SEQ ID NO: 67

SEQ ID NO: 6254 - protein, 208 aa, Neisseria meningitidis; identical to SEQ ID NO: 1448

SEQ ID NO: 6255 - protein, 65 aa, Neisseria meningitidis; identical to SEQ ID NO: 127

SEQ ID NO: 6256 - protein, 221 aa, Neisseria meningitidis
MTFTAVLFDLDGVITDTAEYHYRAWKKLAEELGISIDRKFNEQLKGVSRDDSLKRILAHGGKTVSEAEFAELTRRKNDNYVEMIQAVKPEDVYPGILPLLEALRANGKKIALASASKNGPFLLERMGLTHFFDAIADPAAVAHSKPAPDIFLAAAEGVDADIRQCIGIEDAAAGVAAIKAAGALPIGVGKAEDLGSDIALVSGTAELTYAYLQSVWEQSGR

SEQ ID NO: 6257 - protein, 169 aa, Neisseria meningitidis
MDILLKYWKPVGVLLLIVLIFTAWHFDRAEKYRMGREAAAAEISNRLKDGYIEQAKQARSAEQKAAAAFAERQTKLEEEKQNAEKTVAAMRLELNRLRHYAAAQNRNRNLPATATAATASDGASDSQGWLLFGQCAEKYAGLAETADGHAADLREWQAYGHAVSSQRAE

SEQ ID NO: 6258 - protein, 737 aa, Neisseria meningitidis
MTAISPIQDTQSATLQELREWFDSYCAALPDNDKNLIGTAWLLAQEHYPADAATPYGEPLPDHFLGAAQMVHELDLLPDAVAATLLADIGRYVPDWNLLVSERCNSTVAELVKGVDEVQKLTHFARVDSLATPEERAQQAETMRKMLLAMVTDIRVVLIKLAMRTRTLQFLSNAPDSPEKRAVAKETLDIFAPLANRLGVWQLKWQLEDLGFRHQKPEKYREIALLLDEKRTERLEYIENFLNILRGELKKYNVHFEVAGRPKHIYSIYKKMVKKKLSFDGLFDIRAVRILVDTVPECYTTLGIVHSLWQPIPGEFDDYIANPKGNGYKSLHTVIVGPEDKGVEVQIRTFDMHQFNEFGVAAHWRYKEGGKGDSAYEQKIAWLRQLLDWRENMAESGKEDLAAAFKTELFNDTIYVLTPHGKVLSLPTGATPIDFAYALHSSIGDRCRGAKVEGQIVPLSTPLENGQRVEIITAKEGHPSVNWLYEGWVKSNKAIGKIRAYIRQQNADTVREEGRVQLDKQLAKLTPKPNLQELAENLGYKKPEDLYTAVGQGEISNRAIQKACGTLNEPPPVPVSETTIVKQSKIKKGGKNGVLIDGEDGLMTTLAKCCKPAPPDDIIGFVTRERGISVHRKTCPSFQHLAEHAPEKVLDASWAALQEGQVFAVDIEIRAQDRSGLLRDVSDALARHKLNVTAVQTQSRDLEASMRFTLEVKQVNDLPRVLASLGDVKGVLSVTRL

SEQ ID NO: 6259 - protein, 195 aa, Neisseria meningitidis; identical to SEQ ID NO: 1987

SEQ ID NO: 6260 - protein, 733 aa, Neisseria meningitidis
VLEYAARDRRSDGIPTHRQKHHDRNQEKNMAYQVLARKWRPKTFADLVGQEHVVKALQNALDEGRLHHAYLLTGTRGVGKTTIARILAKSLNCENAQHGEPCGVCESCTQIDAGRYVDLLEIDAASNTGIDNIREVLENAQYAPTAGKYKVYIIDEVHMLSKSAFNAMLKTLEEPPEHVKFILATTDPHKVPVTVLSRCLQFVLRNMTAQQVADHLAHVLDSEKIAYEPAALQLLGRAAAGSMRDALSLLDQAIALGSGKVAENDVRQMIGAVDKQYLYELLTGIINQDGAALTAKAQEMAACAVGFDNALGELAILLQHLALIQAVPNALAHDDPDSDILHRLAQTISGEQIQLYYQIAVHGKRDLSLAPDEYAGFMMTLLRMLAFAPLAAASCDANAVIENTELKSPSAQTAEKETAAKKPQPRPEAETAQTPVQTASAAAMPSEGKTAEPVTNQENNDIPPWEDAPDETAAGTAQASAKSIQTASEAGTPPKNQVSKNEAADNETDAPLSEVPSENPIQATPNNEALETEAFAHEAPAKPFNGYSFPNDDYLVEDGAEIPPPDWEHAAPADAEEENNADESSNNEDHTPYAPPPEFSTENWAAIVRHFARKLGAAQMPAQHSAWTEYHPDTGLMVLAMTAEARATADKKRLDKIRDTLAQAYGLQLTLQTQDWRDEAGRETPAMQDKRVQAEDRQKAQALLEADPAAQKILQAFGAQWQPESLELAANRP

SEQ ID NO: 6261 - protein, 261 aa, Neisseria meningitidis
MSRIRQAFAALDGGKALIPYITVGDPDIRTTLALMHGMVANGADILELGVPFSDPMADGPVIQRAAERALANGISLRDVLDVVRKFRETDTQTPVVLMGYLNPVHKMGYREFAQEAAKAGVDGVLTVDSPVETIDPLYRELKDNGVDCIFLIAPTTTEDRIKTIAELAGGFVYYVSLKGVTGAASLDTDEVSRKIEYLHQYIDIPIGVGFGISNAESARKIGRVADAVIVGSRIVKEIENNTGNEAAAVGALVKELKDAVR

SEQ ID NO: 6262 - protein, 112 aa, Neisseria meningitidis
MKKIEAIVKPFKLDDVREALTEIGITGMTVSEVKGFGRQKGHTEIYRGAEYAVDFLPKIKIELVLADDAVERAIDVIVEVARSGKIGDGKIFVLPVEEAIRIRTGERSDAAV

SEQ ID NO: 6263 - protein, 41 aa, Neisseria meningitidis; identical to SEQ ID NO: 2201

SEQ ID NO: 6264 - protein, 176 aa, Neisseria meningitidis
MQGFELEDLTLWLIRDAGEDQMWIDRWAISYPVVQMSEASAGQSIGEWQAGLQTAFERIRGKYVAVVAHGAGAAAFLAWLYQADILTRKKIANIILVPQRPDIFPDDAEHAFQRVRCPCRAALVVPEHGGVPHGWAQKQADLWNARLLVSPHSGSLNGMLGGWQWGMKLMQEMLLA

SEQ ID NO: 6265 - protein, 286 aa, Neisseria meningitidis
MAKVKGGLGRGLDSLLANGADNSSGDRLTTVAVKDIRPGRYQARVQIDDEALQELADSIKAQGVIQPVIVREHGLSRYELIAGERRWRAAQIAGLTEIPAVIKTISDETALAMGLIENLQRENLNPIEEAQGLKRLADEFGLTHETIAQAVGKSRSAISNSLRLLSLPEPVQEMLYQRRLEMGHARALLTLPVVEQLELAQKAVKNGWSVREVERRSQAALQNKRPEPKKTAAADIGRLNDLLTEKLGVNAEVKTANHKKGRIVLYFDTPETFGHLLEQLGIDYRP

SEQ ID NO: 6266 - protein, 92 aa, Neisseria meningitidis; identical to SEQ ID NO: 600

SEQ ID NO: 6267 - protein, 304 aa, Neisseria meningitidis; identical to SEQ ID NO: 3720

SEQ ID NO: 6268 - protein, 451 aa, Neisseria meningitidis
MSEYTPQTAKQGLPALAKSTIWMLSFGFLGVQTAFTLQSSQMSRIFQTLGADPHNLGWFFILPPLAGMLVQPIVGHYSDRTWKPRLGGRRLPYLLYGTLIAVIVMILMPNSGSFGFGYASLAALSFGALMIALLDVSSNMAMQPFKMMVGDMVNEEQKGYAYGIQSFLANTGAVVAAILPFVFAYIGLANTAEKGVVPQTVVVAFYVGAALLVITSAFTIFKVKEYDPETYARYHGIDVAANQEKANWIELLKTAPKAFWTVTLVQFFCWFAFQYMWTYSAGAIAENVWHTTDASSVGYQEAGNWYGVLAAVQSVAAVICSFVLAKVPNKYHKAGYFGCLALGALGFFSVFFIGNQYALVLSYTLIGIAWAGIITYPLTIVTNALSGKHMGTYLGLFNGSICMPQIVASLLSFVLFPMLGGLQATMFLVGGVVLLLGAFSVFLIKETHGGV

SEQ ID NO: 6269 - protein, 242 aa, Neisseria meningitidis; identical to SEQ ID NO: 4670

SEQ ID NO: 6270 - protein, 237 aa, Neisseria meningitidis
LGACSTSYRPSRAEKANQVSNIKTQLAMEYMRGQDYRQATASIEDALKSDPKNELAWLVRAEIYQYLKVNDKAQESFRQALSIKPDSAEINNNYGWFLCGRLNRPAESMAYFDKALADPTYPTPYIANLNKGICSAKQGQFGLAEAYLKRSLAAQPQFPPAFKELARTKMLAGQLGDADYYFKKYQSRVEVLQADDLLLGWKIAKALGNAQAAYEYEAQLQANFPYSEELQTVLTGQ

SEQ ID NO: 6271 - protein, 313 aa, Neisseria meningitidis; identical to SEQ ID NO: 1650

SEQ ID NO: 6272 - protein, 216 aa, Neisseria meningitidis; identical to SEQ ID NO: 1372

SEQ ID NO: 6273 - protein, 431 aa, Neisseria meningitidis
LLTKQMYLFVACMIFMFVNQYIDIIFRVRAAWNRAEDRYFPSLHKACCKPKIGRVIVQNQGCIMSLYPIYNFSAGPAVLPEAVLETARQEMLDYNGTGFPVMAMSHRSEMFLSILHHAEQDLRQLLKVPDNYKILFLQGGATTQFNMAAMNLAHGFRTADAVVTGNWSRIAYEQMSRLTDTEIRLAAHGGEQFDYLDLPPVETWDVAPDSAFVHFAVNETVNGLQYREVPCLSEGMPPLVCDMSSEILSREFDVADYGLIYAGAQKNIGPAGVTVVIVREDLLERCPNDIPDVFNYRSHINRDGMYNTPSTYAIYMSGLVFRWLQAQGGVKKIEAVNRLKAQTLYETIDGSDGFYINRIRPNARSKMNVVFQTGDEELDRRFVLEAELQGLCLLKGYKTVGGMRASIYNAMPLEGVRALADFMRDFQRRYG

SEQ ID NO: 6274 - protein, 259 aa, Neisseria meningitidis
MAASPEAKFTEEKILWVKHHTPKLITFAISRPESYRFKAGQFSRLGFYEGEGFIWRAYSIVSAEYADTLEYFAVLIQDGPMSARFAKMQQGNTILLDKNATGFLLPERFPDGKDLVMLCTGSGIAPFLSILEQPEIRQRFDTVNLIHSVSFPEELIFNDRLAALTEHPLVGEYGHSFRFVPVTTRAANPSGLSGKRIPELLKNNSIEQALHTKFTPESTRFMICGNPEMVKDTFQTLLDMGYAMHRNRIPGQIMMENGF

SEQ ID NO: 6275 - protein, 43 aa, Neisseria meningitidis; identical to SEQ ID NO: 2340

SEQ ID NO: 6276 - protein, 74 aa, Neisseria meningitidis
MRLATKDLAEAIRKGQVRKSSFNTEQLRAIEKGESKIPDYTWHHHQDTGRMQLIREGLHHDTGHIGWEAMNKGR

SEQ ID NO: 6277 - protein, 463 aa, Neisseria meningitidis
MQVFLDNPKAFFETVSGWVWGPLMLMLLVGTGILLTVLLKGLQFTMLGYALKQAFMPPKKHKSGEGHEGDISHFAALMTALSATIGTGNIAGVATAVVTGGPGAVFWMWMTAIFGMATKYGEGVLAVKYRVNNSKGEMSGGPMYYIEKGLGKNWKWMAVAFALFGTFASFGIGSSVQSNSVAQAVQTSFGIEPAYTGITLTVLTAVVVLGGIKGIAKAASFIVPAMAVFYVLGGLSIIAINSDALMPAVKLIFSDAFSAQAVAGGAIGTVIRYGVARGVFSNEAGMGSAPIAAAAAKTDHPVRQALVSMTGTFLDTIVVCSITGIVLVMGLLGAGGEFVKPEVSGAALTTVTFQKMLPGIGGWIVTIGLIFFAYSTILGWCYYGEKCAVYVFGEKFAGLYRVGYVSSVMLGTVLSLDLVWLASDTFNGLMALPNLIALLLMAKVIVNETRDFKQKITNGELPH

SEQ ID NO: 6278 - protein, 469 aa, Neisseria meningitidis; identical to SEQ ID NO: 2689

SEQ ID NO: 6279 - protein, 224 aa, Neisseria meningitidis
VQADLAYAAERITHDYPQATGANNTSTVSDYFRNIRAHSIHPRVSVGYDFGGWRIAADYASYRKWKESNSSTKKVTEEINNNYKETQTKHQGNGSFHAVSSLGLSAIYDFKLNDKFKPYIGARVAYGHVKHQVHSVETKTTTITSKPKNGSPQGGPIIQTDPSKPPYHESHSISSVGLGVIAGVGFDITPKLTLDTGYRYHNWGRLENTRFKTHEVSLGMRYRF

SEQ ID NO: 6280 - protein, 391 aa, Neisseria meningitidis
VSKVKFYIRHAVLLLCGSLIVGCSAIPSSGPSAKKIVSLGQQSEVQIPEVELIDVNHTVAQLLYKAQINQSFTQFGDGYASAGTLNIGDVLDIMIWEAPPAVLFGGGLSSMGSGSAHQTKLPEQLVTARGTVSVPFVGDISVVGKTPGQVQEIIKGRLKKMANQPQVMVRLVQNNAANVSVIRAGNSVRMPLTAAGERVLDAVAAVGGSTANVQDTNVQLTRGNVVRTVALEDLVANPRQNILLRRGDVVTMITNPYTFTSMGAVGRTQEIGFSARGLSLSEAIGRMGGLQDRRSDARGVFVFRYTPLVELPAERQDKWIAQGYGSEAEIPTVYRVNMADAHSLFSMQRFPVKNKDVLYVSNAPLAEVQKFLSFVFSPVTSGANSINNLTN

SEQ ID NO: 6281 - protein, 462 aa, Neisseria meningitidis
MSTRTEHDTMGNVEVPSEAYWGAQTQRSRNNFKIGGETLPQPLIYALALVKKAAAATNVSLGRIKPEQADLITQAADDVLSGKLDGQFPLVVWQTGSGTQSNMNMNEVLANRANEIAGTGLAAYQPVHPNDHVNHAQSTNDAFPTAIHVAAAIEINRHLIPAVKALRDTLDKKAQAFAPIVKIGRTHLQDATPLTLGQEFSGYVSQLDHGLGRLNDALKDLYELALGGTAVGTGLNSHPEYAEKAAAKLAELSGLPFVSAPNKFEALGGRDAAVAASGALKTLAASLNKIANDIRWLASGPRCGLGEIKIPENEPGSSIMPGKVNPTQCEAMTMVCCQVFGNDVTIGMAGASGNFELNVYMPVIAYNLLQSIHLLGDACNSFNEHCAIGIEPVPEKIDYFLHHSLMLVTALNRKIGYENAAKVAKTAYKNNKSLRETAVELGLLTGEEFDELVVPADMVHPR

SEQ ID NO: 6282 - protein, 74 aa, Neisseria meningitidis; identical to SEQ ID NO: 801

SEQ ID NO: 6283 - protein, 268 aa, Neisseria meningitidis
MKSSFVQTLTIAGSDSGGGAGIQADLKTFQMRGVFGTCVITAVTAQNTLGVSAVHLVPTETITAQIQAIREDFDIRAYKIGMLGTAEIIECVADKLKHCSFGRRVLDPVMIAKGGAPLLQDSAVAALTRLLLPDTDVLTPNLPEAEALTGVHIENRKDAERAAKILLDYGVKNVVIKGGHLNGSTSGRCTDWLFTQNETLEFDSPRFPTAHTHGTGCTFSACITAELAKGSDVCEAVQTAKAYITAAISNPLEIGAGHGPVNHWAYRD

SEQ ID NO: 6284 - protein, 278 aa, Neisseria meningitidis
MLALKTPGVLPGFKLSLGLTVLCLSLLVVLPFAMMAAKAAEIGWGGFWNTIAEPNVLAAVWLSLRMSFYAMLTNVVFGTLVAWVLVRYEFPGKGLANALVDLPFALPTAVTGIALATLYAPNGWIGRFFEPLGIKIAFTPVGIWIALVVVSLPFIVRAVQPVLEELSGEYEEAAATLGASRWTTFRRVLLPEITPALLTGAGMMFARATGEYGSVIFIAGNIPMVSEILPLIITGKLEQFDVQGASAVALFMLLVSFVILFALNVMQWALGRRSGAKG

SEQ ID NO: 6285 - protein, 225 aa, Neisseria meningitidis
MQADFNRPVLAVDTGTSRLSLALRADGETRLFHQEVGSRQSELILPEIRTLFRDAGITAADLGAVVYAQGPGAFTGLRIGIGVAQGLATPFDTPLIGVPSLDAAASLPPPQSCILAATDARMGEVFYAWFDTLNCHRLSDYQVGRAADIRLPEGCAFSDGIGSAFALEEAPPFSGRPDMPTAADFLALAAKGGYPAVHAAHAGLLYVRNKIALTAKEQAERRARP

SEQ ID NO: 6286 - protein, 94 aa, Neisseria meningitidis; identical to SEQ ID NO: 973

SEQ ID NO: 6287 - protein, 327 aa, Neisseria meningitidis
MSEIKTDDPKRGIKLRGADKTARIPIKVVPLQEKLKKPEWIRAKLPSRKFFEIKDILREQKMHTVCEEASCPNIGECFSKGTATFMIMGDICTRRCPFCDVGHGRPNMLDPDEPRNLAESVKAMNLRYVVITSVDRDDLRDGGAQHFADCIKAIRETSPNTKIEILVPDFRGRLDIALKILAETPPDVMNHNLETHPSLYRKARPGANYQHSLDLLKRYKEMMPHIPTKSGIMVGLGETDEDVREIMRDMRAHNIEMITIGQYLQPSDGHLPVLRYVTPEQFKIFEKEAYELGFSNAAIGAMVRSSYHADEQAAEALRESHGGCGHH

SEQ ID NO: 6288 - protein, 139 aa, Neisseria meningitidis
MKKMFLSAVLLLSAAAQTVWADTVFSCKTDNNKYIEVQKINRNLYEYSFGSAAKKEIAIRNSKADLLGRSDRWQGMGSGRWATMKFQNGEFMYTIWTGFDSVTHTESSGVVVERRGKEVARVGCTPKTAQANFNDDDFS

SEQ ID NO: 6289 - protein, 467 aa, Neisseria meningitidis
MNNPDLPYRQALECLSQKQYNFTEVRRLLTEAFSAGHPAAAFELAKHLMDADSPYQDREQGMEMLRIAAEQGHPYARYNLAYIQELEGAPPETLIPLYRPLAEEGLPEAQVRLMYLLYASRHFEEALEWAKTSAKNNNPHGQYLLAQYCRYGTPPDFETAHLLYRKSAAQGLPEAHWQLGLQYRFGQGTKVDTAQAVNHLRAAAQQGYIPAYTPLAELILPTAPDEAVHWFQQAAQENDPDAHAALADIYLQGKHLERNHKLALHHAEAAAAERHPEGLRILGDICRYGLGIAPDTEKARHYYRQAAEAGSLSAYQKLISDSALNHPDQYGGIKDSAIRRQRAERLYQKAQALHYGLQCAPEYAAALKLYTEAAELGHSKAQTNLGSMYYFGQGMTADYNEARKWFEKAAAKKDSMAFYNLACIHYSGHGVEPDKEKACRYLQEAINNGYGQKSVLQELLQQWQNAV

SEQ ID NO: 6290 - protein, 498 aa, Neisseria meningitidis
VRKFSFLPSVLMKETAFKTGMCLGSNNLSRLQKAAQQILIVRGYLTSQAIIQPQNMDSGILKLRVSAGEIGDIRYEEKRDGKSAEGSISAFNNKFPLYRNKILNLRDVEQGLENLRRLPSVKTDIQIIPSEEEGKSDLQIKWQQNKPIRFSIGIDDAGGKTTGKYQGNVALSFDNPLGLSDLFYVSYGRGLAHKTDLTDATGTETESGSRSYSVHYSVPVKKWLFSFNHNGHRYHEATEGYSVNYDYNGKQYQSSLAAERMLWRNRLHKTSVGMKLWTRQTYKYIDDAEIEVQRRRSAGWEAELRHRAYLNRWQLDGKLSYKRGTGMRQSMPAPEENGGDILPGTSRMKIITASLDAAAPFILGKQQFFYATAIQAQWNKTPLVAQDKLSIGSRYTVRGFDGEQSLFGERGFYWQNTLTWYFHPNHQFYLGADYGRVSGESAQYVSGKQLMGAVVGFRGGHKVGGMFAYDLFAGKPLHKPKGFQTTNTVYGFNLNYSF

SEQ ID NO: 6291 - protein, 39 aa, Neisseria meningitidis
LPDVLMLFVLFLYMLMLVTSRFFGKFNRQGVDTLFHLFA

SEQ ID NO: 6292 - protein, 412 aa, Neisseria meningitidis; identical to SEQ ID NO: 2406

SEQ ID NO: 6293 - protein, 143 aa, Neisseria meningitidis
LDKQIDDHTHTHFDGKAQVAEQIKGIGSITTATLMAMLPELGRLSHKRIAGLVGIAPHPREGGETKFKSRCFGGRSAVRKALYMATVAATRFEPLIRDFYQRLPSEGKPYKVAVTACMRKLLTISNARMRDYFAENDTAENGI

SEQ ID NO: 6294 - protein, 167 aa, Neisseria meningitidis
MHALHFSASDKAALYREVLPQIESVVADEADWVANLANTAAVLKEAFGWFWVGFYLVDTRSDELVLAPFQGPLACTRIPFGRGVCGQAWAKGETVVVKDVNAHPDHIACSSLSRSEIVVPLFSDGRCIGVLDADSEHLAQFDETDALYLGELAKILEKRFEASRQAV

SEQ ID NO: 6295 - protein, 162 aa, Neisseria meningitidis; identical to SEQ ID NO: 911

SEQ ID NO: 6296 - protein, 71 aa, Neisseria meningitidis
MTITEEYSIDIRVTSEQGKNDYGYPTERYGCDIINTDGELLVGIEPEYKTPFAAVRKALICLTKDNLKNAA

SEQ ID NO: 6297 - protein, 431 aa, Neisseria meningitidis
MIRPDFQEYLPSYYFSSVNPHTVYPKLQCRLKTDTCIIGGGLGGLCTALPLAEQGHETVVLEAARIGFGASGRSGGQVISDYACGMGEIEKQVGLEQAQWFWQQSLQAVELVDERVRKHAVDCDWQRGYATVAVRPQHWEELQQWHEHAQRHYGASHYQLWDKAELKQQLDSDMYQGAQFDPLSGHLHPLTYTLGIARAAAEAGAQIFEQSPMTCIEPHQNGWLVYTPEGSVECKNVVYAVNTYAGLNPIFRPLERKAIAVSTFIIATEPLGARAKGLIRNNMAVCDNRHILDYYRLSADGRLLFGGKDNEFIDNPERMTELVRQDMLKVFPQLADVKIEYSWGGECDITANLVPHFGRLAPNVFYAQGYSGHGMAITGIAGLAVAEAILGDECRLKPFERLRQPNIILQPFLRKLGSFLGSKYYQWKDSR

SEQ ID NO: 6298 - protein, 429 aa, Neisseria meningitidis
MMKSILTVSGNRMRKPRITYLDVWANDERIGTLEKGAMYRFAYDNPNSSLLGLHYQDRSKVYISNNMPHIFAQYFPEGFLDAHITSKYAFHDAPFEDNEMLRLAILCRETLGRIHVRCNDPLFNEWIDGLEMKNPRILTERDLLGINARQVFQQYMAEIFHHGRFVSVSGIQQKMSLDAIRRNTKQTASYIAKGFDASEYPCLAANEFLCMQTIKQAGIAVAQTSLSEDSSVLLVRRFDVSEQGYFLGMEDFTSLRQYSVEDKYKGSYAAIAQIIRQISGRPDEDLIHFFNQLAASCILKNGDAHLKNFSVLYHDEYDVRLAPVYDVLDTSIYRVGTQGIFDAYDDTLALNLTNHGKKTYPSKNTLLDFAEKYCDLGREDASFMIDTIVQAKEQVLVKYSDVLRENEWLAQKWHFIPDENEEGLPFTFR

SEQ ID NO: 6299 - protein, 354 aa, Neisseria meningitidis
MEKEFRILNIVSAKIWGGGEQYVYDVSKALGLRGCTMFTAVNKNNELMHRRFSEVSSVFTTRLHTLNGLFSLYALTRFIRKNRISHLMIHTGKIAALSILLKKLTGVRLIFVKHNVVANKTDFYHRLIQKNTDRFICVSRLVYDVQTADNPFKEKYRIVHNGIDTGRFPPSQEKPDSRFFTVAYAGRISPEKGLENLIEACVILHRKYPQIRLKLAGDGHPDYMCRLKRDVSASGAEPFVSFEGFTEKLASFYRQSDVVVLPSLVPEAFGLSLCEAMYCRTAVISNTLGAQKEIVEHHQSGILLDRLTPESLADEIERLVLNPETKNALATAAHQCVAARFTINHTADKLLDAI

SEQ ID NO: 6300 - protein, 163 aa, Neisseria meningitidis
MKYRRFYRNGGTYFFTVVTNKRQKILTDDAVRLALRQAVMAVRERYPFEILAWVLMPDHLHTIWRLPDNDSAYSERWRQIKRHSQYLIGGNLRLWQKRFWEYTIRDEADFAWHFDYLHFNPVKHGYVGQISDWGFSTFHRYVKQGIYPHNWGGGNADFSIGYD

SEQ ID NO: 6301 - protein, 102 aa, Neisseria meningitidis; identical to SEQ ID NO: 254

SEQ ID NO: 6302 - protein, 238 aa, Neisseria meningitidis; identical to SEQ ID NO: 3469

SEQ ID NO: 6303 - protein, 207 aa, Neisseria meningitidis; identical to SEQ ID NO: 243

SEQ ID NO: 6304 - protein, 351 aa, Neisseria meningitidis
MITLAVDAMGGDQGLAVTVPGATAFLQAHPDVRLIMTGDETQLRQALTAAGAPMERIDICHTTQVVGMDEAPQSALKNKKDSSMRVAINQVKEGKAQAAVSAGNTGALMATARFVLKTIPGIERPAIAKFLPSDTDHVTLALDLGANVDCTPEQLAQFAVIGSELVHALHPQKGQPRVGLVNVGTEDIKGTDTVKQTYKLLQNSKLNFIGNIESNGILYGEADVVVADGFVGNVMLKTIEGAVKFMSGAIRREFQSNLFNKLAAVAALPALKGLKNKLDPRKFNGAILLGLRGIVIKSHGGTDETGFRYALEEAYHEAKSAGLSKIEQGVAEQLAALETAKAVQNENVGGL

SEQ ID NO: 6305 - protein, 189 aa, Neisseria meningitidis
MVRRLIIGISGASGFQYGVKALELLRAQDVETHLVVSKGAEMARASETAYARDEVYALADFVHPIGNIGACIASGTFKTDGMLVAPCSMRTLASVAHGFGDNLLTRAADVVLKERRRLVLMVRETPLNLAHLDNMKRVTEMGGVVFPPVPAMYRKPQTADDIVAHSVAHALSLFGIDTPDSAEWQGMAD

SEQ ID NO: 6306 - protein, 1271 aa, Neisseria meningitidis
MYSNNAITNNRNNITLGAYRDAIISIFSDENVVRAIGTINSMYEEYLTRSHKIDQKEFLREGERLSAKAREFQRTAEEAQKSLKEGIGRAASKFRGNSKEAFVARKVQSDLQKALNASNYNKQQYARRAATALENASKSKVMAANLGKFTYGATVAMGTLSMGSAWWKALDGEGNWSDVGLSSASFLGGLMGVQWGAALGVGAFGLLTGGAGWLVVGAILGGGAGAWWGSLGAEKAWRWFEDFLNLNRSDKYHVYDPLALDLDGDGIETVATKGFAGALFDHRNQGIRTATGWVSADDGLLVRDLNGNGIIDNGAELFGDNTKLADGSFAKHGYAALAELDSNGDNIINAADAAFQTLRVWQDLNQDGISQANELRTLEELGIQSLDLAYKDVNKNLGNGNTLAQQGSYTKTDGTTAKMGDLLLAADNLHSRFKDKVELTAEQAKAANLAGIGRLRDLREAAALSGDLANMLKAYSAAETKEAQLALLDNLIHKWAETDSNWGKKSPMRLSTDWTQTANEGIALTPSQVAQLKKNALVSLSDKAKAAIDAARDRIAVLDAYTGQDSSTLYYMSEEDALNIVKVTNDTYDHLAKNIYQNLLFQTRLQPYLNQISFKMENDTFTLDFSGLVQAFNHVKETNPQKAFVDLAEMLAYGELRSWYEGRRLMADYVEEAKKAGKFEDYQKVLGQETVALLAKTSGTQADDILQNVGFGHNKNVSLYGNDGNDTLIGGAGNDYLEGGSGSDTYVFGEGFGQDTVYNYDYATGRKDIIRFTDGITADMLTFTREGNHLLIKAKDGSGQVTVQSYFQNDGSGAYRIDEIHFDNGKVLDVATVKELVQQSTDGSDRLYAYQSGNTLNGGLGDDYLYGADGDDLLNGDAGNDSIYSGNGNDTLNGGEGNDALYGYNGNDALNGGEGNDHLNGEDGNDTLIGGAGNDYLEGGSGSDTYVFGKGFGQDTVYNYDYATGRKDIIRFTDGITADMLTFTREGNHLLIKAKDDSGQVTVQSYFQNDGSGAYRIDEIHFDNGKVLDVATVKELVQQSTDGSDRLYAYQSGNTLNGGLGDDYLYGADGDDLLNGDAGNDSIYSGNGNDTLDGGEGNDALYGYNGNDALNGGEGNDHLNGEDGNDTLIGGAGNDYLEGGSGSDTYVFGEGFGQDTVYNYHVDKNSDTMHFKGFKAADVHFIRSGSDLVLSASEQDNVRISGFFYGENHRVDTFVFDDAAISNPDFAKYINAGNNLVQSMSVFGSNTAATGGNVDANIQSVQQPLLVTPSA

SEQ ID NO: 6307 - protein, 182 aa, Neisseria meningitidis
LNLTEGDTVLDREGYRPNVGIILINNRNEVFWGKRVREHSWQFPQGGIKPGESPETAMYRELYEEVGLLPQHVKIIGRTRDWLRYDVPNNWVRREWRGSYRGQKQIWYLLRLTGRDCDVNLRATRHPEFDGWRWHQYWAPVDEVIDFKRDVYLGALKELSSRFLRGMESYEDFAARQSSDNR

SEQ ID NO: 6308 - protein, 681 aa, Neisseria meningitidis
LPAPEPVPAFLRGFSFLPHAVSIPQNSDTWYKIPSFPTLKNRTRYRLKQPCLSDGIGTRKHTMPEYRSKTSTHGRNMAGARALWRATGVMETDFGKPIIAVANSFTQFVPGHVHLHNMGQLVAREIEKAGAIAKEFNTIAIDDGIAMGHSGMLYSLPSRDLIADSIEYMVNAHCADALVCISNCDKITPGMLIAAMRLNIPTIFVSGGPMEAGKVIGVANIQPERRLDLIDAMIESADDNVSNRQVEEVEQNACPTCGSCSGMFTANSMNCLTEALGLSLPGNGSYLATHAGRKELFLEAGRMIVEITKRYYEQNDETVLPRSIATKKAFENAMTMDIAMGGSTNTILHLLAVANEAGVDFKMADIDRLSRVVPCICKTAPNNHDYYMEDVHRAGGIFAILKELDKAGKLHTDVHTIHAPTLKDAIEQWDVTNPENTRAIERFKAAPGGVRTTQAFSQNRMWKTLDLDREKGCIRDVAHAYSQDGGLAVLFGNIAERGCVVKTAGVDESILKFTGRARVFESQEDAVEGILGNQIVAGDIVIIRYEGPKGGPGMQEMLYPTSYLKSKGLGKACALLTDGRFSGGTSGLSIGHASPEAAEGGAIGLVHEGDTVEIDIPNRSIHLAISDEELAARRAEMEARGSKAWKPKNRDRYVSAALRAYGAMATSADKGAVRDVAQIER

SEQ ID NO: 6309 - protein, 101 aa, Neisseria meningitidis
MRVSKIIGSMLLVTAVQTVFSANVYACRHNGKTSYSQTPGKHCTNAGLGRDRVYSSVRPAVKDRAEDAGVGDYSDTVRDEHVQNPKGNAQKDGSAAGIKPH

SEQ ID NO: 6310 - protein, 41 aa, Neisseria meningitidis
LRKYNGIDCKSFPLFLKECEFRFNFGTPSQQLKILRDWCGI

SEQ ID NO: 6311 - protein, 463 aa, Neisseria meningitidis
MSGQLGKGADAPDLVYGLEDRPPFGNALLSAVTHLLAIFVPMITPALIVGGALELPVEMTAYLVSMAMVASGVGTYLQVNRFGPVGSGMLSIQSVNFSFVTVMIALGAGMKEGGLTKDAMISTLLGVSFVGAFLVCFSAWLLPYLKKVITPTVSGVVVMLIGLSLVHVGITDFGGGFGAKADGTFGSMENLGLASLVLLIVLVFNCMKNPLLRMSGIAVGLIAGYIVALFLGKVDFSALQNLPLVTLPVPFKYGFAFDWHAFIVAGAIFLLSVFEAVGDLTATAMVSDQPIEGEEYTKRLRGGVLADGLVSVIATALGSLPLTTFAQNNGVIQMTGVASRHVGKYIAVILVLLGLFPVVGRAFTTIPSPVLGGAMVLMFGLIAIAGVRILVSHGIRRREAVIAATSVGLGLGVAFEPEVFKNLPVLFQNSISAGGITAVLLNLVLPEDKTEAAVKFDTDHLEH

SEQ ID NO: 6312 - protein, 64 aa, Neisseria meningitidis
MNIILNGGPAELHGTTVADLIAQTAPQKPFAVAVNTVFVPKGAYAETVLNENDKIDIVRPVVGG

SEQ ID NO: 6313 - protein, 218 aa, Neisseria meningitidis
MNRQKVIAIDGPGASGKGTVAARVAAALGYDYLDTGALYRLTALYAQKQGVGWHDEENVSELAKKLPAVFSGSRILLGGEDVSDGIRTEAIGMGASAVAQLPKVRAALLQRQRDFLTEKGLVADGRDTGSVVFPQAELKIFLTAESKIRAERRAKQIGIPCEGLAFERILSDIEARDEADRNRKVAPLKQQPDALLLDTSRLTIEETVKKVLDWYREV

SEQ ID NO: 6314 - protein, 652 aa, Neisseria meningitidis
MSERRQPHIYAIIHPDQTTDSGCRCSSRPTDMIEKLTFGLFKKEDARSFMRLMAYVRPYKIRIVAALIAIFGVAATESYLAAFIAPLINHGFSAPAAPPELSAAAGIISTLQNWREQFTYMVWGTENKIWTVPLFLIILVVIRGICRFTSTYLMTWVSVMTISKIRKDMFAKMLTLSSRYHQETPSGTVLMNMLNLTEQSVSNASDIFTVLTRDTMIVTGLTIVLLYLNWQLSLIVVLMFPLLSLLSRYYRDRLKHVISDSQKSIGTMNNVIAETHQGHRVVKLFNGQAQAANRFDAVNRTIVRLSKKITQATAAHSPFSELIASIALAVVIFIALWQSQNGYTTIGEFMAFIVAMLQMYAPIKSLANISIPMQTMFLAADGVCAFLDTPPEQDKGTLAPQRVEGRISFRNVDVEYRSDGIKALDNFNLDIRQGERVALVGRSGSGKSTVVNLLPRFVEPSAGNICIDGIDIADIKLDCLRAQFALVSQDVFLFDDTLFENVRYSRPDAGEAEVLFALQTANLQSLIDSSPLGLHQPIGSNGSNLSGGQRQRVAIARAILKDAPILLLDEATSALDNESERLVQQALERLMENRTGIIVAHRLTTIEGADRIIVMDDGKIIEQGTHEQLMSQNGYYTMLRNISNKDAAVRTA

SEQ ID NO: 6315 - protein, 371 aa, Neisseria meningitidis
MLKFTLHKKDGLARRGTLELNHGKIETPVFMPVGTYGSVKAMNPQNLHDIKAQIILGNTYHLWLRPGLEVIGQFGGLHGFIGWDKPILTDSGGFQVFSLSDMRKLTEEGCTFKSPINGDKLFLSPEISMKIQTVLNSDIAMQLDECTPGEATREQARKSLQMSLRWAERSKKAFEDLKNPNALFGIVQGAMYEDLREESLRGLEQFDFPGLAVGGLSVGEPKPEMYRMLRAVGPILPEHKPHYLMGVGTPEDLVYGVAHGIDMFDCVMPTRNARNGWLFTRFGDLKIKNAKHKLDKRPIDESCTCYACQNFSRAYLHHLHRTGEILGAQLNTIHNLHFYQVIMAEMREAVEQGKFADWQARFHENRARGTD

SEQ ID NO: 6316 - protein, 242 aa, Neisseria meningitidis; identical to SEQ ID NO: 3540

SEQ ID NO: 6317 - protein, 109 aa, Neisseria meningitidis
MGGLIIEDLQEGFGKEAVKGKEITVHYTGWLENGTKFDSSLDRRQPLTITLGVGQVIKGWDEGFGGMKEGGKRKLTIPSEMGYGAHGAGGVIPPHATLIFEVELLKVYE

SEQ ID NO: 6318 - protein, 671 aa, Neisseria meningitidis
MMKLNPQQLEAVRYLGGPLLVLAGAGSGKTGVITQKIKHLIVNVGYLPHTVAAITFTNKAAAEMQERVAKMLPKPQTRGLTICTFHSLGMKILREEANHIGYKKNFSILDSTDSAKIIGELLGGTGKEAVFKAQHQISLWKNDLKTPEDVVQTASNIWEQQTARVYASYQETLQSYQAVDFDDLIRLPAVLLQQNSEVRNKWQRRLRYLLVDECQDTNTCQFTLMKLLTGAEGMFTAVGDDDQSIYAWRGANMENLRKMQENYPQMKVIKLEQNYRSTARILKIANKVIENNPKLFTKKLWSQLGEGEPVKVVACQNEQHEADWVVSQIVKQKLIGGDKTQYADFAVLYRGKHQARIFEEALRGARIPYQLSGGQSFFDKAEIKDVLSYVRLLANPNDDPAFLRAVTTPKRGIGDVTLGKLNTYAHEHECSLYEAAQNEEALATLNNTNRQHLQTFMDMFVSYLAKAETSEAGEFINSLLEEIDYENHLMQNEEGKAGEIKWRNVGDLVSWFARKGGEDGKNIIELAQTVALMTLLEGKDEEETDAVSLSTLHAAKGLEYPYVFLVGCEEGVLPHNDSIEEGNVEEERRLMYVGITRAKRQLTLTHCVKRKKQGTWQFPEPSRFIDEMPQEDLKILGRKGGEPIVSKEEGRRNLADIIGRLDNLKKSGAAD

SEQ ID NO: 6319 - protein, 531 aa, Neisseria meningitidis
MSQEILDQVRRRRTFAIISHPDAGKTTLTEKLLLFSGAIQSAGTVKGKKTGKFATSDWMEIEKQRGISVASSVMQFDYKDHTVNLLDTPGHQDFSEDTYRVLTAVDSALMVIDAAKGVEAQTIKLLNVCRLRDTPIVTFMNKYDREVRDSLELLDEVENILKIRCAPVTWPIGMGKNFKGVYHILNDEIYLFEAGGERLPHEFDIIKGIDNPELEQRFPLEIQQLRDEIELVQAASNEFNLDEFLAGELTPVFFGSAINNFGIQEILNSLIDWAPAPKPRDATVRMVEPDEPKFSGFIFKIQANMDPKHRDRIAFLRVCSGKFERGMKMKHLRINREIAASSVVTFMSHDRELVEEAYAGDIIGIPNHGNIQIGDSFSEGEQLAFTGIPFFAPELFRSVRIKNPLKIKQLQKGLQQLGEEGAVQVFKPMSGADLILGAVGVLQFEVVTSRLANEYGVEAVFDSASIWSARWVSCDDKKKLAEFEKANAGNLAIDAGGNLAYLAPNRVNLGLTQERWPDIVFHETREHSVKL

SEQ ID NO: 6320 - protein, 119 aa, Neisseria meningitidis
METQEKKFVPASKQIPTVNSGWLDRELGEAMSEAVRACLAHGKQSEITVKLKIQPQNIQSGTVKISHDVATKLPKEKREGGIVFATPDGNIQADDPAQGKLKLKQVSNTSSTLKMVRSN

SEQ ID NO: 6321 - protein, 183 aa, Neisseria meningitidis; identical to SEQ ID NO: 3839

SEQ ID NO: 6322 - protein, 483 aa, Neisseria meningitidis
MPSERPRVFRRHQDFFMDTTLKTTLTSVAAAFALSACTMIPQYEQPKVEVAETFKNDTADSGIRAVDLGWHDYFADPRLQKLIDIALERNTSLRTAVLNSEIYRKQYMIERNNLLPTLAANANDSRQGSLSGGNVSSSYKVGLGAASYELDLFGRVRSSSEAALQGYFASTANRDAAHLSLIATVAKAYFNERYAEEAMSLAQRVLKTREETYKLSELRYKAGVISAVALRQQEALIESAKADYAHAARSREQARNALATLINQPIPEDLPAGLPLDKQFFVEKLPAGLSSEVLLDRPDIRAAEHALKQANANIGAARAAFFPSIRLTGTVGTGSAELGGLFKSGTGVWSFAPSITLPIFTWGTNKANLDVAKLRQQVQIVAYESAVQSAFQDVANALAAREQLDKAYDALSKQSRASKEALRLVGLRYKHGVSGALDLLDAERSSYAAEGAALSAQLTRAENLADLYKALGGGLKRDTQTDK

SEQ ID NO: 6323 - protein, 239 aa, Neisseria meningitidis
MLTTPPLAPKTVAALHRLGIRTLEELRQNGSVKAFLLLKASGLTLTKSTLWQLESLLDGTPPQEMSQAHKARLLAELKNHPPVAAFPPQEEMEHFMCEALRQAEQSSADGEIPVGAVIVSDGKIIASAHNTCIADCNVSRHAEINALAQAGREIQNYRLDGCDIYITLEPCAMCASALIQARIRRVIYGAAEPKTGAAGSIVNLFADKRLNTHTAIRGGILQEECRAVLSRFFQNKRKG

SEQ ID NO: 6324 - protein, 792 aa, Neisseria meningitidis
VLALGLCFGTHCAAADAVAAEETDNPTAGESVRSVSEPIQPTSLSLGSTCLFCSNESGSPERTEAAVQGSGEASIPEDYTRIVADRMEGQSQVQVRAEGNVVVERNRTTLNTDWADYDQSGDTVTAGDRFALQQDGTLIRGETLTYNLEQQTGEAHNVRMEIEQGGRRLQSVSRTAEMLGEGHYKLTETQFNTCSAGDAGWYVKAASVEADREKGIGVAKHAAFVFGGVPIFYTPWADFPLDGNRKSGLLVPSLSAGSDGVSLSVPYYFNLAPNLDATFAPSVIGERGAVFDGQVRYLRPDYAGQSDLTWLPHDKKSGRNNRYQAKWQHRHDISDTLQAGVDFNQVSDSGYYRDFYGNKEIAGNVNLNRRVWLDYGGRAAGGSLNAGLSVLKYQTLANQSGYKDKPYALMPRLSVEWRKNTGRAQIGVSAQFTRFSHDSRQDGSRLVVYPDIKWDFSNSWGYVRPKLGLHATYYSLNRFGSQEARRVSRTLPIVNIDSGATFERNTRMFGGEVLQTLEPRLFYNYIPAKSQNDLPNFDSSESSFGYGQLFRENLYYGNDRINTANSLSAAVQSRILDGATGEERFRAGIGQKFYFKDDAVMLDGSVGKKPRNRSDWVAFASGSIGSRFILDSSIHYNQNDKRAENYAVGASYRPAQGKVLNARYKYGRNEKIYLKSDGSYFYDKLSQLDLSAQWPLTRNLSAVVRYNYGFEAKKPIEVLAGAEYKSSCGCWGAGVYAQRYVTGENTYKNAVFFSLQLKDLSSVGRNPADRMDVAVPGYITAHSLSAGRNKRP

SEQ ID NO: 6325 - protein, 449 aa, Neisseria meningitidis
MANQTNSKAKALLGWVDARFPLSKMWKEHLSEYYAPKNFNFWYFFGSLSMLVLVIQIVSGIFLTMNYKPDGNLNAYHLPAAFTAVEYIMRDVSGGWIIRYMHSTGASFFFIVVYLHMFRGLIYGSYKKPRELVWIFGSLIFLALMAEAFMGYLLPWGQMSFWGAQVIINLFSAIPVIGPDLSTWIRGDFNVSDVTLNRFFALHVIAVPLVLLGLVVAHIIALHEVGSNNPDGVEIKKLKDENGVPLDGIPFFPYYVVHDILAVTIFLIVFCAVMFFAPEGGGYFLEAPNFDAANALKTPPHIAPVWYFTPFYAILRAIPSFAGTQVWGVIGMGAAVVLIALLPWLDKGEVKSVRYRGPIFKTALVLFIIAFIGLGILGAMVATDTRTLVARILSFVYFAFFLGMPFYTKLDTNKPVPERVTMSTTKQKIMFFVYVGITVVGAYLFATNI

SEQ ID NO: 6326 - protein, 73 aa, Neisseria meningitidis
MNFLLSKLLLVLIRFYQYCISPLIPPRCRYTPTCSQYAVEAVKKYGAFKGGLLAAKRISRCHPLGGHGHDPVP

SEQ ID NO: 6327 - protein, 138 aa, Neisseria meningitidis
MNKNILYIFSLLITIVIFFIFEKNVIRKISFNYNKKEFLISDITNFNWDYVKLYIINSDFQKIVFYHKSKIVFEELIELDKEGNVLPQYLFDSDLKNVEYYECDYKNGKMQLLKKEKSHFFDGYFYYYKPINCRPKLL

SEQ ID NO: 6328 - protein, 44 aa, Neisseria meningitidis
MKRTYQPSVTKRKRTHGFLVRSKTRGGRAVLAARRAKGRKRLAV

SEQ ID NO: 6329 - protein, 123 aa, Neisseria meningitidis; identical to SEQ ID NO: 1296

SEQ ID NO: 6330 - protein, 236 aa, Neisseria meningitidis
MPSETLRPALYKKGTHMIQAVLFDLDGTLADTALDLGGALNTLLARHGLPAKSMDEIRTQASHGAAGLIKLGAGITPDHPDYARWRTEYLDEYDSRYAQDTTLFDGVNELIAELGKRGIKWGIITNKPMRFTDKLVPKLGFIIPPAVVVSGDTCGEPKPSVKPMLYACGQIHADPQHTLYVGDAERDIQAGRNAGMTTVLAEWGYIAPEDDTGSWQADFHIRTPLDLLECLDKIQP

SEQ ID NO: 6331 - protein, 248 aa, Neisseria meningitidis; identical to SEQ ID NO: 3755

SEQ ID NO: 6332 - protein, 158 aa, Neisseria meningitidis
MEHLFGKWLPDLPAAISDGISLPMVRLLHTRSLTAALRALPHTFSVELLKLGELETECGGRLVREVLLKLDRIPVVEARSECRIGSAFWQNILDCGTRPLGERLFQADLEGARSAFEFAVAGEGCGRYFAARRSRFSRHGEEMLLTEYFLPELKRFIG

SEQ ID NO: 6333 - protein, 410 aa, Neisseria meningitidis
MGLKHFLEKIEPHFLPGGKHEKWYALYEAAATIFYTSGAVTRKAAHVRDALDSKRMMILVWLALFPAMFYGMYNVGAQAFGALTPDLLQQNIANDWHYAFANALGINMSSEAGVSDKMLFGAIYFLPIYATVFVVGGFWEVLFATVRKHEINEGFFVTSILFALIVPPTLPLWQAALGISFGVVVAKEVFGGTGKNFMNPALAGRAFLFFAYPANLSGDAVWTAVDGYSGATALAQWAAHGADGLKNAVTGQTITWMDAFIGKLPGSIGEVSTLALLIGGAFIVFARIASWRIIAGVMIGMIAMSSLFNFIGSDTNAMFAMPWYWHLVVGGFAIGMLFMATDPVSASFTNVGKWWYGALIGVMCVLIRVVNPAYPEGMMLAILFANLFAPIFDYFVAQANIKRRKARSNG

SEQ ID NO: 6334 - protein, 260 aa, Neisseria meningitidis
LQKVVRHIAQTEIMPRFLNTPSHRKEDGSMLSEADIAAQTAFAAALPLLIDSPMLGEEMSRQEQSALWEQYSGEKGLWIVDPIDGTNNFVNGLPHFAVSVAFVRNGRAELGVIYNPVSGECFYAERGQGAFLNGTRLPLRLVDKKLNEAIAGVEIKYLRSGKLSSRMSTLAPFGTIRSMGSSTLDWCYLACGRYDVYVHGGQKLWDYAAGALIFEEAGGRLTTLEGDGFWSGEHVFKRSVVAALEPKLFERWVGWIRENQ

SEQ ID NO: 6335 - protein, 422 aa, Neisseria meningitidis
VKPLRRLTNLLAACAVAAAALIQPALAADLAQDPFITDNAQRQHYEPGGKYHLFGDPRGSVSDRTGKINVIQDYTHQMGNLLIQQANINGTIGYHTRFSGHGHEEHAPFDNHAADSASEEKGNVDEGFTVYRLNWEGHEHHPADAYDGPKGGNYPKPTGARDEYTYHVNGTARSIKLNPTDTRSIRQRISDNYNNLGSNFSDRADEANRKMFEHNAKLDRWGNSMEFINGVAAGALNPFISAGEAVDQWMQENPNAAETVEALVNVLPFAKVKNLTKAAKPGKAAVSGDFSDSYKHNTASRLSQSVDGEMFQTRNVDFKAKSIGTKIHDGAQGKHISGHRNYIEGKSTLNQNINPQELLNGIHSGAYPVISKGARGNPVVDFGYPIGSDGKSGLSTNFGTIHSGKNGVHIVPANPKTIKKVQ

SEQ ID NO: 6336 - protein, 327 aa, Neisseria meningitidis
MKNFLSLFSSILMSALIAVWFSQNPINAYWQQTYHRNSPLEPLAAYGWWRSGAALQENAYALSDGIKAFLSGETPPTAQDGGSADMPSEAAASEAVPQTGETEWKQDTEAAAVRSGDKVFFVGDSLMQGVAPFVQKSLKQQYGIESVNLSKQSTGLSYPSFFDWPKTIEETLQKHPEISVLAVFLGPNDPWDFPVGKLYLKFASDEWAQEYLKRVDRILEAAHTHRVQVVWLGIPYMKKAKLDGQMRYLDKLLSEHLKGKIILIPTTHTLSGGKDRYTDSVNVNGKPVRYRSKDGIHFTAEGQKLLAAKIMEKIVFEPSTQPSSTQP

SEQ ID NO: 6337 - protein, 389 aa, Neisseria meningitidis
MSEYLFTSESVSEGHPDKVADQVSDAILDAILAQDPKARVAAETLVNTGLCVLAGEITTTAQVDYIKVARETIKRIGYNSSELGFDANGCAVGVYYDQQSPDIAQGVNEGEGIDLNQGAGDQGLMFGYACDETPTLMPFAIYYSHRLMQRQSELRKDGRLPWLRPDAKAQLTVVYDSETGKVKRIDTVVLSTQHDPSIAYEELKNAVIEHIIKPVLPSELLTDETKYLINPTGRFVIGGPQGDCGLTGRKIIVDTYGGAAPHGGGAFSGKDPSKVDRSAAYACRYVAKNIVAAGLATQCQIQVSYAIGVAEPTSISIDTFGTGKISEEKLIALVREHFDLRPKGIVQMLDLLRPIYSKSAAYGHFGREEPEFTWERTDKAAALRAAAGL

SEQ ID NO: 6338 - protein, 410 aa, Neisseria meningitidis; identical to SEQ ID NO: 446

SEQ ID NO: 6339 - protein, 222 aa, Neisseria meningitidis
MSLSKLAKKTAQTAKNIGETLRAAFRGKITLVVSSEPIQRVQLSGLADETLQDLEHLQEYGFASHPPDGSEAVVIPLGGNTSHGVIVCSQHGSYRIKNLKPGETAIFNHEGAKIVIKQGKIIEADCDVYRVNCKQYEVNAATDAKFNAPLVETSAVLTAQGQINGNGGMAVEGGDGATFSGDVNQTGGSFNTDGDVVAGNISLRQHPHTDSIGGKTLPAEPA

SEQ ID NO: 6340 - protein, 151 aa, Neisseria meningitidis
MDLRKLKKLIDLVEESGIAEIEVTEGEEKVRITRTIAAAPVYAAPVPAAAPAVTPAAAPVAASAPAAAPAARDLSDAQKSPMVGTFYRAPGPNAAPFVEVGQQVKAGDTLCIIEAMKLMNEIEAEKSGTVKEILVENGTPVEFGEPLFIIG

SEQ ID NO: 6341 - protein, 588 aa, Neisseria meningitidis
LSEIIKRIFYYKCLKICPSVSDGGAVMLQSENSKNLISCSIKALPIMISTNGITMQFGAKPLFENVSVKFGEGNRYGLIGANGSGKSTFMKILGGDLEQTAGEVAIENGVRLGKLRQDQFAYEDMRVLDVVMMGHTEMWAAMTERDAIYANPEATEDDYMKAAELEAKFAEYDGYTAEARAAELLSGVGISEDLHNAKMAEVAPGFKLRVLLAQALFSKPDVLLLDEPTNNLDINTIRWLEGVLNQYDSTMIIISHDRHFLNEVCTHMADLDYNTITIYPGNYDDYMLASAQSRERALKDNAKAKEKLQELQEFVARFSANKSKARQATSRLKQADKIKSEMVEVKPSTRQNPYIRFEADEKAKLHRQAVEVEKLAKRFETQLFKNLNFILEAGQRLAIIGPNGAGKSTLLKLLAGAYNPEYSDGLLPDEGTIKWAEKASVGYYPQDHENDFDVDMDLSEWMRQWGQEGDDEQVIRGTLGRLLFGSNDVVKKVKVLSGGEKGRMLYGKLLLLKPNVLVMDEPTNHMDMESIESLNMALEKYNGTLIFVSHDRQFVSSLATQIIELDGKGGYEHYLGDYESYLEKKGVA

SEQ ID NO: 6342 - protein, 355 aa, Neisseria meningitidis
MRKILVTGGAGFIGSAVVRHIIRNTRDAVVNVDKLTYAGNLESLTEVADNPRYAFEQVDICDRAELDRVFAQYRPDAVMHLAAESHVDRSIGSAGEFIQTNIVGTFNLLEAARAYWQQMPSEQHEAFRFHHISTDEVYGDLGGTDDLFTETAPYAPSSPYSASKASSDHLVRAWLRTYGLPTIVTNCSNNYGPYHFPEKLIPLMILNALDGKPLPVYGDGMQIRDWLFVEDHARALYQVVTEGVVGETYNIGGHNEKANIEVVKTICALLEELAPEKPAGVARYEDLITFVQDRPGHDVRYAVDAAKIRRDLGWLPLETFESGLRKTVQWYLDNKTWWQNVLNGSYRLERLGTGK

SEQ ID NO: 6343 - protein, 74 aa, Neisseria meningitidis; identical to SEQ ID NO: 2281

SEQ ID NO: 6344 - protein, 964 aa, Neisseria meningitidis
VLQYRFSFIFQAASIMCNHHPQHSHDNDTIRIRGARTHNLKNIDLDIPRHKLVVVTGLSGSGKSSLAFDTLYAEGQRRYVESLSAYARQFLQMMDKPDVDLIEGLSPAISIEQKSTSHNPRSTVGTVTEIHDYLRLLYARVGTPYCPEHKLPLSSQTVSQMVDAVLKLPEDTRVMILAPTVRERKGEFVDFFADLQAQGFARVRVDGEVYQLDEVPKLEKNIKHNIDVVIDRVKVKADIKQRLAESFETALRHGNERALAMEMDSGEEHWFSARFACPVCSYSLPELEPRLFSFNNPMGSCPTCDGLGNTNFFDPEKVVAHPELSLATGAIDGWDKRNQFYFQMIQSLARHYGFDVQAAWETLPEKVKKVVLHGSGKEVIDFTYLSERGTTFNRSHAFEGIIPNLERRYRETDSETVREKLREYQNHRACPSCGGARLRKEARYVYVSGEPLHEVSAWPLTKTHQFFETLDLDGNKKQIAEKILKEITERLGFLINVGLDYLNLSRSAETLSGGEAQRIRLASQIGSGLTGVMYVLDEPSIGLHQRDNDRLLATLKRLRDLGNSVIVVEHDEDAIREADFVVDMGPGAGEHGGNVLIADTPENVAQCENSVTGQYLSGKKSIAVPSERTPVNPDRMLVLKGARGNNLKNVTLELPLGLITCITGVSGSGKSTLINDTLAKITARELNRAQEEPAPFDDIHGLEHLDKVINVDQSPIGRTPRSNPATYTGLFTPIRELFAGVPLSRERGYNVGRFSFNVKGGRCEACQGDGVIKVEMHFLPDVYVPCEVCHGKRYNRETLEIQYKGKNISQVLDMTVEEAREFFDAVPTVSRKLQTLMDVGLGYIRLGQSATTLSGGEAQRVKLALELSKRDTGRTLYILDEPTTGLHFADIALLLEVIGRLKGKGNSIVIIEHNLDVIKTADWIVDLGPEGGDGGGRIIAKGSPEQVAKVKGSYTGKYLKVVLR

SEQ ID NO: 6345 - protein, 319 aa, Neisseria meningitidis
MSTFFQQTAQAMIAKHIDRFPLLKLDQVIDWQPIEQYLNRQKTRYLRDHRGRPACPLLSMFKAVLLGQWHNLSDPELEHSLITRIDFNLFCRFDELSIPDYSTLCRYRNRLAQDDTLSELLELINRQLTEKGLKVEKASAAVVDATIIQTVGSKQRQAIEVDEEGQVSGQTTLSKDKNARWTKKNSLYKLGYKQHTRTDAEGYIEKLHITPANAHECKHLSPLLEGLPEGTTIYADKGYDSAENRQHLEEHQLQDGIMRKACRNRPLTETQTKRNRYLSKTRYVVEQSFGTLHRKFRYARAAYFGLICARCRLKGSPDA

SEQ ID NO: 6346 - protein, 364 aa, Neisseria meningitidis
MKTNLLNYDLQGLTRHFADMGEKPFRAKQVMRWMHQSGAQNFDEMTDLAKSLRHKLNEQAGIEIPKLMMSQKSSDGTRKWLLDVGTGNGVETVFIPESDRGTLCISSQVGCALECTFCSTGRQGFNRNLTAAEIIGQLWWANKAMGVTPKNERVISNVVMMGMGEPMANFDNVVTALSIMLDDHGYGLSRRRVTVSTSGMVPQMDRLRDVMPVALAVSLHASNDEVRNQIVPLNKKYPLKELMAACQRYLVKAPRDFITFEYVMLDGINDKAQHARELIELVTDVPCKFNLIPFNPFPNSGYERSSNENIRVFRDILQQAGFVVTVRKTRGDDIDAACGQLAGQVQDKTRRQQKWQQILIGQQG

SEQ ID NO: 6347 - protein, 58 aa, Neisseria meningitidis
MKSRRFFKALLLIAALVGAFYAGMRTQAYLYEDLCLDLGGGKNPGSYPICVIEKVPAR

SEQ ID NO: 6348 - protein, 225 aa, Neisseria meningitidis
MPAALIKDFLLTQGLKLPLDEVRAAYLTAQTVMDMGTASIDRSVLWRSDEGWKLADYLSCDNVREDALKRLFMALDSVFSRSTGVRSAAVYALMPSENQAFQLICLSRQGEVLENLWDLDEAAGKVSLACRSAQSGWMNVASDVRRWLDLGELSGERNHASAAQISIPVCTESGGVLGVVHVEFECAECAGTAAQVEWVALALALSEPLKLLLGMSAGKDGSEDV

SEQ ID NO: 6349 - protein, 366 aa, Neisseria meningitidis
MTALKTTPFHQAHQDAGAKLVDFAGWELPIHYGSQIAEHEAVRTDAGMFDVSHMLVTDVAGANAKAFFRKLIANDVAKLAFVGKALYSALLNDNGGVIDDLIVYRTNEAETQYRIVSNGATREKDTAQFHKVGQEFGVAFNPRYDLGMLAVQGPKAIEKLLTVKPEWADVVHNLKPFQGADLGNDWFVARTGYTGEDGVEVILPGTEAVAFFKALQQAGVQPCGLGARDTLRMEAGMNLYGNDMDDDTSPLEAGMGWTVDLKDESRDFVGKAALLALKEKGVAVKQVGLLLEKGGILRAHMEVLTDKGQGETTSGVFSPSLKQSIAIARVPKDFDGDTAKVLMRGKEVDVRVLKLPFVRNGQKQFD

SEQ ID NO: 6350 - protein, 218 aa, Neisseria meningitidis
MTIKIILIDDHTLFRSGIKALLSRQHGFEVIGEAADGLSGIKMISRLQPDVVLLDLDMPGMNGREALSQIISINPQQAVIMLTVSEDSDDLTECMRIGARGYLLKNINADFLLESIRKAAEGDNVFSPEMTAKLVKSLISPQPAQGTQALSSLTPRELEILGYLAAGHSNKIIARHLDLAESTVKVHVQNLLRKLNLSSRVQAAVYAIRHNVPQPVPE

SEQ ID NO: 6351 - protein, 344 aa, Neisseria meningitidis; identical to SEQ ID NO: 6064

SEQ ID NO: 6352 - protein, 347 aa, Neisseria meningitidis
MQITDLLAFGAKNKASDLHLSSGISPMIRVHGDMRRINLPEMSAEEVGNMVTSVMNDHQRKIYQQNLEVDFSFELPNVARFRVNAFNTGRGPAAVFRTIPSTVLSLEELKAPSIFQKIAESPRGMVLVTGPTGSGKSTTLAAMINYINETQPAHILTIEDPIEFVHQSKKSLINQRELHQHTLSFANALRSALREDPDVILVGEMRDPETIGLALTAAETGHLVFGTLHTTGAAKTVDRIVDVFPAGEKEMVRSMLSESLTAVISQNLLKTHDGNGRVASHEILIANPAIRNLIRENKITQINSVLQTGQASGMQTMDQSLQSLVRQGLIAPEVARRRAQNSESMSF

SEQ ID NO: 6353 - protein, 258 aa, Neisseria meningitidis
MTLIHPTAVIDPKAELDSSVKVGAYTVIGPNVQIGANTEIGPHAVINGHTSIGENNRIFQFASLGEIPQDKKYRDEPTKLIIGNGNTIREFTTFNLGTVTGIGETRIGDDNWIMAYCHLAHDCVVGNHTIFANNASLAGHVTIGDYVVLGGYTLVFQFCHIGDYAMTAFAAGVHKDVPPYFMASGYRAEPAGLNSEGMRRNGFTAEQISAVKDVYKTLYHRGIPFEEAKADILRRAETQAELAVFRDFFAQSTRGIIR

SEQ ID NO: 6354 - protein, 273 aa, Neisseria meningitidis
MDFLIVLKALMMGLVEGFTEFLPISSTGHLIVFGNLIGFHSNHKVFEIAIQLGAVLAVVFEYRQRFSNVLHGLGKDRKANRFVLNLAIAFIPAAVMGLLFGKQIKEYLFNPLSVAVMLVLGGFFILWVEKRQSRAEPKIADVDALRPIDALMIGVAQVFALVPGTSRSGSTIMGGMLWGIERKTATEFSFFLAVPMMVAATAYDVLKHYRFFTLHDVGLILIGFIAAFVSGLVAVKALLRFVSKKNYIPFAYYRIVFGIAIIILWLSGWISWE

SEQ ID NO: 6355 - protein, 210 aa, Neisseria meningitidis; identical to SEQ ID NO: 48

SEQ ID NO: 6356 - protein, 216 aa, Neisseria meningitidis
LLKLINRQLTEKGLKVEKASAAVVDATIIQTAGSKQRQAIEVDEEGQINGQTTPSKDKDARWIKKNGLYKLGYKQHTRTDGEGYIEKLHITPANAHECKHLPPLLEGLPKDTTVYADKGYDSEENRQHLEECQLLDGIMRKACRNRPLSETQTKRNRYLSKTRYVVEQSFGTLHRKFRYARAAYFGLIKVSAQSHLKAMCLNLLKAANRLSAPAAA

SEQ ID NO: 6357 - protein, 311 aa, Neisseria meningitidis
MNPKKLVIASRESLLAMWQAKHIQGRLKALYPDCEVEILGMTTRGDQILDKTLSKVGGKGLFVKELEQALYDGRADLAVHSIKDVPMDLPEGFALAAIGERANPFDAFVSNQYTRLEEMPEGAVVGTSSLRREAQLRARYPHLLIKPLRGNVQTRLSKLDNGEYDAIILAAAGLQRLKLDGRIRMILSESDSLPAAGQGALGIEIAAHREDLYEVLKPLNHGVTNACVTAERALARALGGSCQVPLAAYCTEENGLLTLRGLVGHPDGSVVLRADAQAPAEYADALGRAVAKKLADDGARELIGAVLNTEN

SEQ ID NO: 6358 - protein, 124 aa, Neisseria meningitidis
VDEKQKIKILDFQIDLSSIFNSYKNQMGINIQDENLKNNFCSFMEELLNDGSIRLHDYTDGIGIPLTGTSKEQVQKLKDIWPTLEDAQAIWPEDPWYYLEWLWWDIACPIDLADLPNIDIYEQA

SEQ ID NO: 6359 - protein, 332 aa, Neisseria meningitidis
MSENKQNEVLSGYEQLKRRNRRRLVTASCLVAASCILLAAALSSGPAEQTAGETSGVENKAAGAAQTPALKSAADKPQDLAGEDKPSAADSEISEPENVGAPLVLINERLEDSNIKGLEASEKLQQAETAKTAPKQAKQRAAEKVPATADSTDTVAVEKPKRTAETKPQKAERTAKAKPKAKETKTAEKVADKPKTAAEKTKPDTAKSDSAVKEAKKADKAESKKTAEKDRSDGKKHETAQKTDKADKTKTAEKEKSGKKAAIQAGYAEKERALSLQRKMKAAGIDSTITEIMTDNGKVYRVKSSNYKNARDAERDLNKLRVHGIAGQVTNE

SEQ ID NO: 6360 - protein, 221 aa, Neisseria meningitidis
MPSEKPFRNTPMTLRYEIFPVTPFRQNCTLIWDDESGEAVLTDVGGDVPFLLQALANRKLTLTAIWLTHGHLDHAGGVVEMLKTHKVPVLGPHPDDEFLLQSLPQTTAQYGFPVSPAFAPNRWLEEGETLTVGRYAFQVLHIPGHTPGHIVFYCAEAELLIAGDVLFYETIGRTDFPRGNHADLINNIRNKLFTLPETVQVVAGHGRMTSIGHEKRHNPFF

SEQ ID NO: 6361 - protein, 199 aa, Neisseria meningitidis; identical to SEQ ID NO: 368

SEQ ID NO: 6362 - protein, 408 aa, Neisseria meningitidis
MPSETFRSKKMSQKLILVLNCGSSSLKGAVLDNGSGEVLLSCLAEKLNLPDAYITFKVNGEKHKVDLSAHPDHTGAVEALMEELKAHGLDSRIGAIGHRVVSGGELYSESILVDDEVIAGIEKCIPLAPLHNPAHLLGLRAAQSIFKGLPNVVVFDTSFHQTMPEVAYKYAVPQELYEKYGLRRYGAHGTSYRFVADETARFLGKDKKDLRMVIAHLGNGASITAVANGESRDTSMGLTPLEGLVMGTRSGDIDPSVFGFLAENANMTIAQITEMLNKKSGLLGISGLSNDCRTIEEEAAKGHKGAKLALDMFIYRLAKYIGSMAVAAGGLDALVFTGGIGENSDIIRERVIGYLGFLGLNIDQEANLKARFGNAGVITTADSKAVAVVIPTNEELMIAHDTARLSGL

SEQ ID NO: 6363 - protein, 394 aa, Neisseria meningitidis
MGKHILLGVTGSIAAYKSCELVRLLKKQGHSVTVVMSRSATEFVSPLTFQALSGNPVLTDTHGGNGSNGMEHINLTRNADVFLIAPASMNTVAKICNGVADNLLTSLAAARKCPLAIAPAMNVEMWLNPANQRNIAQLVSDGITVYMPGLGEQACGENGMGRMPEPAELLDLLPDLWTPKILKGKKVLITAGATFEAIDPVRGITNISSGKMGVALARACRAAGAEVSLIHGQLQTALPFGISDTVQAVSAENMHRAVHRLIDKQDAFISVAAVSDYRVKNRSTQKFKKDKNAKPLSIELDENPDILASIASLPNPPFCIGFAAETENVMTYAREKRIKKKLPMIVANDVSIAMGKPTNRITIIGDDGELSFPETSKDEAAMRIVERLAVYLSK

SEQ ID NO: 6364 - protein, 76 aa, Neisseria meningitidis
MNIVKKYAVKAALAAGIFTPAIVMADTFDPSAIGTQVANVIMGFVSMVSAVGMAAITVILAIQGFKMAWSMIKSVK

SEQ ID NO: 6365 - protein, 40 aa, Neisseria meningitidis
LSKHYFVSCCTVSDGIGLPRLYQVAREMPRLSHGLSQLQF

SEQ ID NO: 6366 - protein, 319 aa, Neisseria meningitidis
MMKVLFIADPMASFKTYKDTTYAMMREMAKRGWRLFHTLSGELSVNGGLVTAQASAFEFLGAKNDDDHAWFKSADKVQTALEAFDAVIMRTDPPFDMQYLYATQLLTLAEQQGAKVFNSGQAMRDFNEKLAILNFSRFIAPTLVTTRSADVRTFLKEHGDIIIKPLDGMGGMGIFRLTEKDPNIGSILETLMQLDSRTIMAQRYIPEIVHGDKRILIIGGEVVPYALARIPQNGETRGNLAAGGRGVAQELGGRDREIAETLAPELKRRGILLAGLDVIGSNLTEVNVTSPTGFQEIMKQKGFDVAAMFADAVAAWSVR

SEQ ID NO: 6367 - protein, 70 aa, Neisseria meningitidis; identical to SEQ ID NO: 5197

SEQ ID NO: 6368 - protein, 167 aa, Neisseria meningitidis
MSDKFNQFINRVLSHEGGYANHPKDPGGETNWGITKRTAQANGYNGSMRAMTREQAISIYRKAFWERYRADQMPEAVAFQFFDACVNHGYGNAARMLQRAAGVPDDGVIGAVSLKAINSLPENDLLLRFNAERLVFYTKLGTFTSFGKGWVRRVAQNLIHASADNTD

SEQ ID NO: 6369 - protein, 637 aa, Neisseria meningitidis
MLNITLPDGSVRQYESPVTVAQIAASIGAGLAKATVAGRVNGKLVDACDPIVEDSAVQIITPKDQEGIEIIRHSCAHLVGHAVKQLYPNAKMVIGPVIEEGFYYDIATEKPFTPEDVAAIEARMKELIAQDYDVVKIMTPRAEAIKIFQERGEEYKLRLIDDMPEVEAMGMYHHQEYVDMCRGPHVPNTRFLKNFKLTKLAGAYWRGDSNNEMLQRIYGTAWATKDELKAYIQRIEEAEKRDHRKLGKQLDLFHLQDEAPGMVFWHPKGWALWQVIEQHMRKELNAAGYKEVKTPQIMDKTFWEKSGHWDNYKDNMFVTSSEKREYAVKPMNCPGHVQIFNNGLRSYRDLPMRLAEFGSCHRNEPSGALHGLMRVRGFVQDDAHIFCTEDQIVSEARAFNELLIRIYKQFGFHDVSVKLSLRPEKRAGSDDVWDKAEQGLREALTACGVEWGELPGEGAFYGPKIEYHVRDALGRSWQCGTLQLDFVLPERLNAEYVTENNDRARPVMLHRAILGSLERFIGILIENHAGSFPLWLAPVQLVIMNITENQADYCREVAAKLQAAGFRAELDLRNEKIGYKIRDNSQYRFPYQIVVGDKEKQENKVAVRRKAEDLGSLDLDDFIAQLQQEITDALVNH

SEQ ID NO: 6370 - protein, 176 aa, Neisseria meningitidis; identical to SEQ ID NO: 3131

SEQ ID NO: 6371 - protein, 485 aa, Neisseria meningitidis; identical to SEQ ID NO: 2552

SEQ ID NO: 6372 - protein, 864 aa, Neisseria meningitidis
MSKSAVSPMMQQYLGIKAQHTDKLVFYRMGDFYEMFFDDAVEAAKLLDITLTTRGQVDGEPVKMAGVPFHAAEQYLARLVKLGKSVAICEQVGEVGAGKGPVERKVVRIVTPGTLTDSALLEDKETNRIVAVSPDKKYIGLAWASLQSGEFKTKLTTVDKLDDELARLQAAEILLPDSKNAPQLQTASGVTRLNAWQFAADAGEKLLTEYFGCQDLRGFGLDGKEHAVAIGAAGALLNYIRLTQNLMPQHLDGLSLETDSQYIGMDAATRRNLEITQTLSGKKSPTLMSTLDLCATHMGSRLLALWLHHPLRNRAHIRARQEAVAALESQYKPLQCRLKSIADIERIAARIAVGNARPRDLAALRDSLFALSEIELSAECSSLLGTLKAVFPENLSTAEQLRQAILPEPSVWLKDGNVINHGFHPELDELRRIQNHGDEFLLDLEAKERERTGLSTLKVEFNRVHGFYIELSKTQAEQAPADYQRRQTLKNAERFITPELKAFEDKVLTAQEQALALEKQLFDGVLKNLQTALPQLQKAAKAAAALDVLSTFSALAKERNFVRPEFADYPVIHIENGRHPVVEQQVRHFTANHTDLDHKHRLMLLTGPNMGGKSTYMRQVALIVLLAHTGCFVPADAATIGPIDQIFTRIGASDDLASNRSTFMVEMSETAYILHHATEQSLVLMDEVGRGTSTFDGLALAHAVAEHLLQKNKSFSLFATHYFELTYLPEAHTAAVNMHLSALEQGQDIVFLHQIQPGPAGKSYGIAVAKLAGLPVRALKSAQKHLNGLENQAAANRPQLDIFSTMPSEKGDEPNVGNFVDKAEEKHFEGILAAALEKLDPDSLTPREALSELYRLKDLCKSVS

SEQ ID NO: 6373 - protein, 344 aa, Neisseria meningitidis
MSTSLSYRDAGVDIDAGDQLVENIKPFAKRTMRPEVLGDLGGFGALVEIGKKYQNPVLVSGTDGVGTKLKLAFDWDKHDTVGIDLVAMSVNDILVQGAEPLFFLDYFACGKLDVPRATDVIKGIAQGCEESGCALIGGETAEMPGMYPVGEYDLAGFAVGVVEKENVITGRSIGVGDVVLGLASNGAHSNGYSLIRKIIERDNPDLDAEFDNGKTLREAVIAPTRLYVKPILAALEKFTIKGMAHITGGGITENVPRVLPENTVAQIDAKSWELPKLFQWLQKAGNVETQEMYRTFNCGIGMVVIVAAEDADAVQGLLGEQGETVYRLGLIRERQGDEHQTQVA

SEQ ID NO: 6374 - protein, 239 aa, Neisseria meningitidis
MATLSDKTILVTGASQGLGEQVAKAYAAAGATVILVARHQKKLEKVYDAIVEAGYPEPFAICFDLISAEEKEFEHFAATIAEATQGKLDGIVHCAGYFYALSPLDFQTVAEWVNQYRINTVAPMGLTRALFPLLKQSPDASVIFVGESHGETPKAYWGGFGASKAALNYLCKVAADEWERFGNLRANVLVPGPINSPQRIKSHPGEAKSERKSYGDVLPAFVWWASAESKGRSGEIVYL

SEQ ID NO: 6375 - protein, 881 aa, Neisseria meningitidis
LRDIEKIMKTSELRQKFLKFFETKGHTVVRSSSLVPHDDPTLLFTNAGMNQFKDVFLGFDKRPYSRATTAQKCVRAGGKHNDLENVGYTARHHTFFEMMGNFSFGDYFKRDAIHFAWEFLTSPEWLNIPKDKLLATVYAEDDEAYNIWLNEIGMPSERIVRIGDNKGAKYASDNFWQMGDTGPCGPCSEIFYDHGEEIWGGIPGSPEEDGDRWIEIWNCVFMQFNRDEQGNMNPLPKPSVDTGMGLERIAAVMQHVHSNYEIDLFQDLLKAVARETGAPFSMEEPSLKVIADHIRSCSFLIADGVLPSNEGRGYVLRRIIRRAVRHGYKLGQSKPFFHKLVADLVKEMGGAYPELKEKQAQIEEALKNEESRFAQTLETGMALLENALVKGGKTLGGEIIFKLYDTYGFPYDLTADICRERNIEPDEAGFEREMEAQRARARAAQSFKANAQLPYDGQDTEFKGYSERQTESKVLALYKDGEQVNELNEGDSGAVVIDFTPFYAESGGQVGDVGYIFSGENRFEVRDTQKIKAAVFGQFGVQTSGRLKVGDSVTAKVDDEIRNANMRNHSATHLMHKALRDVLGRHVEQKGSLVTAESTRFDISHPQAVTAEEIAEVERRVNEAILANVAVNAAIMSMEDAQKTGAMMLFGEKYGEEVRVLQMGGFSTELCGGTHVSRTGDIGLFKIISEGGIAAGVRRIEAITGLNALKWAQEQERLVKDIIAETKAQTEKDVLAKIQAGAAHAKALEKELARAKAELAVHAGAKLLDDAKDLGAAKLVAAQIEADAAALREIVTDLTGKSDNAVILLAAVNDGKVSLCAGVSKPLTGKVKAGDLVKFAAEQVGGKGGGRPDLAQAGGTDADKLPAVLDSVKDWVGAKLV

SEQ ID NO: 6376 - protein, 129 aa, Neisseria meningitidis
MWKIIKEDSDDLGFAIKCLFSQSIDLNEFKLWIEQVIRDMPIEDIPFYIFDLADFDGGIADIDNIVGFVSSCRLSKSKKNALTGIAFLRGIDVYDPPISKEKALKALEKHPEIYQKFQHFFPFVELPPL

SEQ ID NO: 6377 - protein, 431 aa, Neisseria meningitidis
MPAPDLGFALSLPPKKAIEWLESKKVTAESYRNLTASEIAKVYTIARMTDLDMLNDIKTSMVESAKSGQSFDDWRKGILNLLSNKGWLHPNGHNGKDIIDPATGEVFGSPRRLETIYRTNMQTAYNAGQYQGYMANIDARPYWMYDAVGDSRTRPAHSAIDGLVYRYDDPFWATFYPPNGYNCRCSVIALSERDVERQGRIVGQSTADNLVETHKIYNKKGDTYLTLAYKAPDGSLYTTDRGFDYNAGRMNYRPDLDKYDRALAHQFAKAEMGGADFKTSFKQLEKEFYEVKQRLDIDGKPDKEQKIKIRNALSRQLKFAAGVLSKETQELAGMTRATVWLSDDTLVKQVDSREGQNFDDSYYAFLPDMLQNPEHVIRDNRELIFTARYKGSALWAVLKYIKEVDEIYLQSYRISNDKEIAKFMAKKKVLK

SEQ ID NO: 6378 - protein, 119 aa, Neisseria meningitidis; identical to SEQ ID NO: 3366

SEQ ID NO: 6379 - protein, 1139 aa, Neisseria meningitidis
MQNMKNQVRGSGMDARSNPANVSDGLQNSSGHIGTNTRYRLTKLGEQIARLPIDPKIARILLAAKKHDCMAEILVIASALSIQDPRERPLEARDASAKAHERFTDKQSDFLAYLNIWDSFQRERDKGLSNKQLVQWCRQYFLSHLRMREWRELHHQLAQTAIEMGLTTKEAAFRRPPEVRQLTSSENAGDQDLSAKLKQKQLDKKQHRAQIRAAKEAGYEQIHRALLTGLIANVGMKSPDGNDYTGARGSRFHLFPASALFKAKPKWVMAAELVETTRLYARDVAVIQPEWIEQEAPHLVRYHYFEPHWEQKRGEVVASERVTLYGLTVLPRRPVSYGKVAPEEAREIFIRSALVAQECDLKADFFVHNKKLIKEITELEHKSRKQDVLVDDEALFAFYNERLPEMAWKDAQGSVWGSEDSVRIIESDKAERSSENERNEFRKNKRNGSRQNENHGNTVGWVENPTSAATAKTVGFDNPTYAAQQTTPSPVGEGRGEGKTVAAQTNFSATAANPLPNPLPQEREQSAAASTISDDLRPANLQQTAPSPVGEGWGEGKTVATQTNFSATSTNPLPQEREQSASASTFSDDLRPANLQQPSPSPVGEGWGEGKTVATQTNFSATSTLSDDSKPKKQPAPQKNRLKPLPLADIRTFQAWLKTAERDNPRLLFLSRDDLMQHAAAHITEEQFPKFWQTADGKFKLSYRFEPHHPLDGVTMTVPLTVLNRLHAPSLEWLVPGMIREKIQLQIKALPKQIRRICVPVPEFITQFLSQNPDRNAPILPQLAQAIAKTAGDIRIFEQINQDEWAAFRLPEHCYFNLRIIDDGGQELAGGRKLHELQQQLGQAAAVTFRDNTQEFERDNVTAWDIGTLPESIKFARGKQQLTGYLGLQKEKDGRIALRLFDTTEAAEQAHRQGVIELMKLQLKEQVKDLNKGIQGFTQAAMLLKHINADTLRDDLTQAVCDRAFIGEDELPRNEKAFKEQIKRARSRLPAVKEALSRYLQETAAVYAELNSKLGKHPLTHLLRLRLQTLLAAGFATRTPWAQWPRLPIYLKAMTLRLEKYSSNPARDAAREADIQELEQMWQEKTDSLIKQGLPISDGLAAFKWMIEELRVSLFAQELKTPYPVSVKRLLKEWEKIEK

SEQ ID NO: 6380 - protein, 60 aa, Neisseria meningitidis; identical to SEQ ID NO: 2815

SEQ ID NO: 6381 - protein, 462 aa, Neisseria meningitidis
MSIKFADLNLDKNILSAVSSEGYESPTPIQAQAIPFALEGRDIMASAQTGSGKTAAFLLPTLQKLTKRSEKPGKGPRALVLTPTRELAAQVEKNALAYAKNMRWFRTVSIVGGASFGYQTRALSKPVDLIVATPGRLMDLMQSGKVDFERLEVLILDEADRMLDMGFIDDIETIVEATPSDRQTLLFSATWDGAVGKLARKLTKDPEIIEVERVDDQGKIEEQLLYCDDMRHKNRLLDHILRDANIDQCVIFTSTKAMTEVIADELYEKGFAANCLHGDMPQGWRNRTLMDLRKGRCKILVATDVAARGIDVPTITHVINYDLPKQAEDYVHRIGRTGRAGRTGIAITFAEVNEYVKVHKIEKYINRKLPELTIEGMEPTRKRKSAGGKPKGKGGWGDRKSGGWRGDHKPSKEGFGGKTRGEGFKKEGFKRDGFKKTGEGFKGKRKAGDSFAGKGERRYKDR

SEQ ID NO: 6382 - protein, 256 aa, Neisseria meningitidis
MLKQAVTGMTKQERITTQAYNEMTKSVAGSNSIVLNDVQGDTTINNHHTHTHNHSDADGKALSMRLTPRPLLSDRQAAAFARTGKLTGSFDLFASVVAPSQYTFAVAMPDTSMSPVIEKGDLLVVEPRMCPADEDIALIELSDKRLVVAHLVIDIAGRMLIYQTGRPSEAFDLPEGSTILGVVLESKNGLCPPHRQEGVLIRITAPDVWTVGMISASKTSCTRPTAARKSAVCFLRFWQATRGIPKTRSWRNPNNA

SEQ ID NO: 6383 - protein, 415 aa, Neisseria meningitidis
LNTRRVAVTGIGGITAFGRDWQSIQAAFKAEKNAVKYMDWHERFPELEAQLGAPIENYAPPKHWTRKQLRSMGRVSYLCVDAAEQALADAGLLGDESITDGRMGVACGSSSGSTKDIGDVGELLLTGTSRNFSANTYVRMMPHTTAANIGIFFGLKGRIIPTSSACSSGSQGIGYAYEAIKYGLTDMMLAGGGEEFFPSEVYVFDSLYAASRRNGEPEKTPRPYDANRDGLVIGEGAGIFVLEELEHAKRRGAIIYAELVGYGANSDAYHISTPRPDAQGAILAFQTALQHANLAPEDIGWINLHGTGTHHNDNMESRAVAAVFGNNTPCTSTKPQTGHTLGAADAIEAAFAWGIADRQSNPEGKLPPRLWDGQNDPNLPAINLTGSGSRWETEKRITASSSFAFGGSNCVLIIG

SEQ ID NO: 6384 - protein, 104 aa, Neisseria meningitidis; identical to SEQ ID NO: 1772

SEQ ID NO: 6385 - protein, 398 aa, Neisseria meningitidis
MQNYLTPNFAFAPMIPERASGSRVWDTKGREYIDFSGGIAVNALGHCHPALVDALNAQMHKLWHISNIYTTRPAQELAQKLVANSFADKVFFCNSGSEANEAALKLARKYARDRFGGGKSEIVACINSFHGRTLFTVSVGGQPKYSKDYAPLPQGITHVPFNDIAALEAAVGEQTCAVIIEPIQGESGILPATAEYLQTARRLCDRHNALLILDEVQTGMGHTGRLFAYEHYGIVPDILSSAKALGCGFPIGAMLATEKIAAAFQPGTHGSTFGGNPMACAVGSRAFDIINTPETLNHVREQGQKLQTALLDLCRKTGLFSQVRGMGLLLGCVLDEAYRGRASEITAAALKHGVMILVAGADVLRFAPSLLLNDEDMAEGLRRLEHALTEFAATSDNP

SEQ ID NO: 6386 - protein, 436 aa, Neisseria meningitidis
MSAPDLFVAHFREAVPYIRQMRGKTLVAGIDDRLLEGDTLNKLAADIGLLSQLGIRLVLIHGARHFLDRHAAAQGRTPHYCRGLRVTDETSLEQAQQFAGTVRSRFEAALCGSVSGFARAPSVPLVSGNFLTARPIGVIDGTDMEYAGVIRKTDTAALRFQLDAGNIVWLPPLGHSYSGKTFYLDMLQTAASAAVSLQAEKLVYLTLSDGISRPDGTLAETLSAQEAQSLAEHAGGETRRLISSAVAALEGGVHRVQILNGAADGSLLQELFTRNGIGTSIAKEAFVSIRQAHSGDIPHIAALIRPLEEQGILLHRSREYLENHISEFSILEHDGNLYGCAALKTFAEADCGEIACLAVSPQAQDGGYGERLLAHIIDKARGIGISRLFALSTNTGEWFAERGFQTASEDELPETRRKDYRSNGRNSHILVRRLHR

SEQ ID NO: 6387 - protein, 258 aa, Neisseria meningitidis; identical to SEQ ID NO: 2774

SEQ ID NO: 6388 - protein, 145 aa, Neisseria meningitidis
MNQTVYLYTDGACKGNPGAGGWGVLMRYGSHEKELFGGEAQTTNNRMELTAVIEGLKSLKRRCTVIICTDSQYVKNGMENWIHGWKRNGWKTASKQPVKNDDLWKELDALVGRHQVSWTWVKGHAGHAENERADDLANRGAAQFS

SEQ ID NO: 6389 - protein, 642 aa, Neisseria meningitidis
LIECKNINRYFGSGENRVHILKDISLSIEKGDFVAIIGQSGSGKSTLMNILGCLDTAGSGSYRIDGIETAKMQPDELAALRRERFGFIFQRYNLLSSLTARDNVALPAVYMGAGGKERSARAEKLLQDLGLASKEGNKPGELSGGQQQRVSIARALMNGGEIIFADEPTGALDTASGKNVMEIIRRLHEAGHTVIMVTHDPGIAANANRVIEIRDGEIISDTSKNPEIPASNVGRIREKASWSFYYDQFVEAFRMSVQAVLAHKMRSLLTMLGIIIGIASVVSVVALGNGSQKKILEDISSIGTNTISIFPGRGFGDRRSGRIKTLTIDDAKIIAKQSYVASATPMTSSGGTLTYRNTDLTASLYGVGEQYFDVRGLKLETGRLFDENDVKEDAQVVVIDQNVKDKLFADSDPLGKTILFRKRPLTVIGVMKKDENAFGNSDVLMLWSPYTTVMHQITGESHTNSITVKIKDNANTQVAEKGLTDLLKARHGTEDFFMNNSDSIRQIVESTTGTMKLLISSIALISLVVGGIGVMNIMLVSVTERTKEIGIRMAIGARRGNILQQFLIEAVLICVIGGLVGVGLSAAVSLVFNHFVTDFPMDISAASVIGAVACSTGIGIAFGFMPANKAAKLNPIDALAQD

SEQ ID NO: 6390 - protein, 343 aa, Neisseria meningitidis
MGIKVAINGYGRIGRQVLRAIYDYQIQDQLQIVAVNASGSLETNAHLTKFDTVHGRFEADVSHDGGNLIVNGDKIPFFSTRNPAELPWKELGVDLVMECTGAFTSKEKAKIHLESGAKKVLISAPGGDDVDATVVYGVNDSVLTADMTVVSNASCTTNCLSPVAKVLSESVGIVKGAMTTIHALTNDQTVTDVRHKDLRRARSGVENMIPTKTGAAKAVGLVLPELKGRLDGLAIRVPTVNVSLVDLSFQAARDTTVEEINALMKAASEAGALKGVLGYNTLPLVSMDFNHTTEASHFDATLTKVVDGNMIKVFAWYDNEWGFSCQMLNTARRMFGLEVRPLK

SEQ ID NO: 6391 - protein, 290 aa, Neisseria meningitidis
VKGLDYCRQKAEESRSSFLSGFRFLTQEKRDAVTVLYAFCRELDDVVDECSNPDVAQATLNWWRGDLDKVFGGAMPEHPVNQALRQVKETFKLPKYELEALIDGMQMDLVQARYGSFEELKLYCHRVAGVVGCLIARILGFSDDQTLEYADKMGLALQLTNIIRDVGEDARRGRIYLPMEEMRRFDVPASVILQCSPTGNFAELMAFQIKRARETYREAVSLLPDADKKAQKVGLVMAAVYYELLNEIDRDGAQNVLKYKIALPSPRKKRIALKTWLFGFKPRPGTPERA

SEQ ID NO: 6392 - protein, 203 aa, Neisseria meningitidis
MITTYKTITSSTQAEFKDKGSRFIAFAYPIRTLADVKKYLDPLKEEHHKARHWCYAYRLGVDGVQFRANDDGEPSGSAGRPILGQIDSVGITDVLVVVVRYFGGTLLGVPGLIHAYKEATAQALAVAEVVEKNIEKTVWLKCEYPFLNEAIRIAKQYQADILERDLQLDCRLTVSLSLVNYEACVAAWKNTRQIEVNTEKPFE

SEQ ID NO: 6393 - protein, 423 aa, Neisseria meningitidis
MKLLVIGNGGREHALAWKLAQSPKVETVFVAPGNAGTAIEPKLQNIDLTAHQDLIEFCRKENIVFTVVGPEAPLAAGIVDDFRAAGLKIFGPTQYAAQLESSKDFAKAFMAKYNIPTAQYQTFENADAAHDYVNQKGAPIVIKADGLAAGKGVIVAMTLDEAHAAIDDMLLDNKMGNAGARVVIEDFLQGEEASFIVMVDGNNVLPMATSQDHKRLLDGDKGLNTGGMGAYSPAPVVTPVVYERAMNEIILPTVAGMKAEGHEFTGFLYAGLMIDQSGAPYTIEFNCRFGDPETQPIMSRLNSDLSDLVEAAIDGKLDSVTAEWSPQTAVGVVLAAQNYPETPKKGDIISGLDAANQIGKVFHAGTTANEKGDVLTNGGRVLCVVGLGDNVAQAKAKAYGALEKISFDGMQYRKDIADKAINR

SEQ ID NO: 6394 - protein, 295 aa, Neisseria meningitidis; identical to SEQ ID NO: 3063

SEQ ID NO: 6395 - protein, 251 aa, Neisseria meningitidis
MKYVRLFFLGAALAGTQAAAAEMVQIEGGSYRPLYLKKDTGLIKVKPFKLDKYPVTNAEFAEFVNSHPQWQKGRIGSKQAEPAYLKHWMKNGSRSYAPKAGELKQPVTNVSWFAANAYCAAQGKRLPTIDEWEFAGLASATQKNGSNEPGYNRTILDWYADGGRKGLHDVGKGRPNYWGVYDMHGLIWEWTEDFNSSLLSSGNANAQMFCSGASIGSSDSSNYAAFLRYGIRTSLQSKYVLHNLGFRCTSR

SEQ ID NO: 6396 - protein, 143 aa, Neisseria meningitidis; identical to SEQ ID NO: 2619

SEQ ID NO: 6397 - protein, 182 aa, Neisseria meningitidis; identical to SEQ ID NO: 3686

SEQ ID NO: 6398 - protein, 240 aa, Neisseria meningitidis; identical to SEQ ID NO: 1969

SEQ ID NO: 6399 - protein, 581 aa, Neisseria meningitidis
MERQTDEFAQAAARAAIRFLEHYAGSGDEVLANCTERLFQALQNGHSFIRLSGGEADALSALAPVVGTSAAPLILEGRRLFLGRMWQLEYDLAAEIKRLAAAGTSAPDAAGARQNLAKWFQGTGSEGQRDAAALALLQSFMVITGGPGTGKTTTVAKLLALICGEDENLPNIALAAPTGKAAAHMARALHRAINGFDAPEAVRRHLLKLEGQTVHRLLKLRPPKMQAAFNPVYPLPFDVLVIDEASMLDTALMLQLLKAVKTGARVILLGDENQLPSVGIGAVLSVLSQKTVLDGETHQRLAGFLPEHGFSVSANPPVLAQNTAHLSFSHRFGDNSGIGCLARAAVSGDEGAWALFDRFPDELEHSECSPNARVERLYRAHKAYWQAVKDGNIEAAYAGISDIVVLAAWRQDAEDFNEAYCRHVRRKMNIPEHLAYFAGEPIMIRQNDYALELFNGDIGLIMEDVGRQGSLAAYFADADGFKKVAVSCLPEFEPAFAMTVHKSQGSEYREVWLLPPSAAPSDEGDDALSGLSKELLYTAITRAREKFVFFGGEEAFRQAAATVKTRQTALGSMLERVFSQE

SEQ ID NO: 6400 - protein, 234 aa, Neisseria meningitidis; identical to SEQ ID NO: 5705

SEQ ID NO: 6401 - protein, 224 aa, Neisseria meningitidis
VQADLAYAAERITHDYPKATGANNTSTVSDYFRNIRAHSIHPRVSVGYDFGGWRIAADYASYRKWKESNFSTKKVTKEINDNYQETKTEHQGNGSFHASSSLGLSAIYDFKLNDKFKPYIGARVAYGHVKHQVHSVETKTTIVTSKPTQGAAQGGPIIQTDPSKPPYHESHSISSVGLGVIAGVGFDITPKLTLDTGYRYHNWGRLENTRFKTHEVSLGMRYRF

SEQ ID NO: 6402 - protein, 145 aa, Neisseria meningitidis; identical to SEQ ID NO: 1775

SEQ ID NO: 6403 - protein, 123 aa, Neisseria meningitidis
MNNSSFFGNRLKEERKKLKMTQAEIAEKCGVSGRMWGDYERGISQPKAELFFQFEKVGIDVQYVMHGRRGETAVMPSETLNAEEQELLVLFREAAAADREMILMVARRAEKKAQTALGKVSNG

SEQ ID NO: 6404 - protein, 160 aa, Neisseria meningitidis
MMKKILAVSALCLMTAAARAADTYGYLAVWQNPQNADDVLQVKTTKEDSTKSEAFSELEAFCKGQDTLAGIAEDEPTGCRSVVSLNNTCVALAYPKALGALRVDNAVVITSPRFTSVHQVALNQCIKKYGVQGQCGLETVYCTSSSYYGGTVRSLIQNLK

SEQ ID NO: 6405 - protein, 138 aa, Neisseria meningitidis
MAKLTEQDILNWNGPEDDYMNDEHLAFFRELLVKMQDELIENASVTTGHLQEHESAPDPADRATQEEEYALELRTRDRERKLLSKIQATIRNIDEGDYGFCADTGEPIGLKRLLARPTATLSVESQERRERMKKQFAD

SEQ ID NO: 6406 - protein, 249 aa, Neisseria meningitidis
MPDAVKKVYLIHGWGANRHMFDDLMPRLPATWPVSAVDLPGHGDAPFVRPFDIAAAADGIAAQIDAPADILGWSLGGLVALYLAARHPDKVRSLCLTASFARLTADEDYPEGLAAPALGKMVGAFRSDYAKHIKQFLQLQLLHTPDADGIIGRILPDLARCGTPQALQEALDAAERADARHLLDKIDVPVLLVFGGKDAITPPRMGEYLHRRLKGSRLVVMEKAAHAPFLSHAEAFAALYRDFVEGGLR

SEQ ID NO: 6407 - protein, 106 aa, Neisseria meningitidis
MFGKQLFEEVGSKISETIANSPAKDVEKNIKAMLGGAFNRMDLVTREEFDIQQQVLIKTRTKLAALEARLEKLEAAQNPERAALEAAEAAAEEAVAEIRQQTEAGE

SEQ ID NO: 6408 - protein, 461 aa, Neisseria meningitidis; identical to SEQ ID NO: 3158

SEQ ID NO: 6409 - protein, 269 aa, Neisseria meningitidis; identical to SEQ ID NO: 3572

SEQ ID NO: 6410 - protein, 522 aa, Neisseria meningitidis
MSQTDTQRDGRFLRTVEWLGNMLPHPVTLFIIFIVLLLIASAVGAYFGLSVPDPRPVGAKGRADDGLIYIVSLLNADGFIKILTHTVKNFTGFAPLGTVLVSLLGVGIAEKSGLISALMRLLLTKSPRKLTTFMVVFTGILSNTASELGYVVLIPLSAIIFHSLGRHPLAGLAAAFAGVSGGYSANLFLGTIDPLLAGITQQAAQIIHPDYVVGPEANWFFMVASTFVIALIGYFVTEKIVEPQLGPYQSDLSQEEKDIRHSNEITPLEYKGLIWAGVVFVALSALLAWSIVPADGILRHPETGLVSGSPFLKSIVVFIFLLFALPGIVYGRVTRSLRGEQEVVNAMAESMSTLGLYLVIIFFAAQFVAFFNWTNIGQYIAVKGATFLKEVGLGGSVLFIGFILICAFINLMIGSASAQWAVTAPIFVPMLMLAGYAPEVIQAAYRIGDSVTNIITPMMSYFGLIMATVIKYKKDAGVGTLISMMLPYSAFFLIAWIALFCIWVFVLGLPVGPGAPTFYPAP

SEQ ID NO: 6411 - protein, 868 aa, Neisseria meningitidis
MAANQRYRKPLPGTDLEYYDARAACEDIKPGSYDKLPYTSRILAENLVNRADKVDLPTLQSWLGQLIEGKQEIDFPWYPARVVCHDILGQTALVDLAGLRDAIAEKGGDPAKVNPVVQTQLIVDHSLAVECGGYDPDAFRKNREIEDRRNEDRFHFINWTKTAFENVDVIPAGNGIMHQINLEKMSPVVQVKNGVAFPDTCVGTDSHTPHVDSLGVISVGVGGLEAETVMLGRASMMRLPDIVGVELNGKRQAGITATDIVLALTEFLRKERVVGAFVEFFGEGARSLSIGDRATISNMTPEFGATAAMFAIDEQTIDYLKLTGRDDAQVKLVETYAKTAGLWADALKTAVYPRVLKFDLSSVTRNMAGPSNPHARFATADLAAKGLAKPYEEPSDGQMPDGSVIIAAITSCTNTSNPRNVVAAALLARNANRLGLKRKPWVKSSFAPGSKVAEIYLKEAGLLPEMEKLGFGIVAFACTTCNGMSGALDPKIQKEIIDRDLYATAVLSGNRNFDGRIHPYAKQAFLASPPLVVAYALAGSIRFDIENDVLGVADGKEIRLKDIWPADEEIDAVVAEYVKPQQFRDVYVPMFDTGTAQKAPSPLYDWRPMSTYIRRPPYWEGALAGERTLRGMRPLAILPDNITTDHLSPSNAILAVSAAGEYLAKMGLPEEDFNSYATHRGDHLTAQRATFANPKLFNEMVKNEDGSVRQGSFARVEPEGETMRMWEAIETYMNRKQPLIIIAGADYGQGSSRDWAAKGVRLAGVEAIVAEGFERIHRTNLIGMGVLPLQFKPDTNRHTLQLDGTETYDVVGERTPRCDLTLVIHRKNGETVEVPVTCCLDTAEEVLVYEAGGVLQRFAQDFLEGNAA

SEQ ID NO: 6412 - protein, 210 aa, Neisseria meningitidis
MTVWVGLTGGIGSGKSAAAQCFADLGVPRIDADAAAHSLTASDGIALPEIRRLFGDTVFDTQGLLRRDILRKEVFASPSRKALLESVMLPLIFSEIKKQQETFTDAAYGIVEIPLLTEKRQFISLIRRVLTISAPVEKRIGRVMARSGLTRGEVAAVISHQASESERLLLADDVLLNDGSLKSLREKTMRLHAFYSGIFASKPTQGKHND

SEQ ID NO: 6413 - protein, 216 aa, Neisseria meningitidis
MIRFEQVSKTYPGGFEALKNVSFQINKGEMIFIAGHSGSGKSTILKLISGITKPSRGKILFNGQDLGTLSDNQIGFMRQHIGIVFQDHKILYDRNVLQNVILPLRIIGYPPRKAEERARIAIEKVGLKGRELDDPVTLSGGEQQRLCIARAVVHQPGLLIADEPSANLDRAYALDIMELFKTFHEAGTTVIVAAHDETLMADYGHRILRLSKGRLA

SEQ ID NO: 6414 - protein, 716 aa, Neisseria meningitidis
LGSDWVSDGIHSGFHRLMPSERRFRPIPTARFVRKRITGKIMEVIQYPNSPFKLHQPFPPAGDQPTAIAGLLEGLSDGLAYQTLLGVTGSGKTYTMANVIAQSGRPAIIMAHNKTLAAQLYAEMREFFPENAVEYFVSYYDYYQPEAYVPSRDLFIEKDSAINEHIEQMRLSATKNLMTRNDVIIVATVSAIYGIGDPTEYQQMVLSVKEGDTIEQRDIIATLVSMQYERGDLDFKRGSFRVRGDVIDVYPAESSENALRISLFDDEIDRLDMFDPLSGSLIQRVGRYTVFPSSHYVTPRDTVLRACESIKEELRERIEFFAREQRPVEQQRIEQRTRFDLEMLYEMGFCKGIENYSRHFSGKKEGEPPPTLMDYLPDNAIMFIDESHVTVTQIGGMYKGDASRKQNLVDYGFRLPSARDNRPLKFHEFEKVMPQTIFVSATPAKYEEEHAGQVVEQVVRPTGLVDPQIIIRPVATQVDDLMSEINDRIEKGERVLVTTLTKRMAEQLTDYYSELGIKVRYLHSDIDTVERVEIIRDLRLGLFDVLVGINLLREGLDIPEVSLVAILDADKEGFLRSHRSLIQTIGRAARNVNGVAILYADKITDSMKAAIDETERRREKQIKFNEEQGIVPQQIKKQVKDIIDGVYHEEDGSKGRLKGKNKVKVGEIHNEEDAIKEIAKLEKAMQQAARDLQFEEAAVLRDRIRDIKENLLFGAE

SEQ ID NO: 6415 - protein, 346 aa, Neisseria meningitidis
MNTPIPFSERLIRWQKQHGRHHLPWQVKNPYCVWLSEIMLQQTQVATVLDYYPRFLEKFPTVQTLAAAPQDEVLSLWAGLGYYSRARNLHKAAQQVVRQFGGTFPSERKDLETLCGVGRSTAAAICAFSFNRRETILDGNVKRVLCRVFARDGNPQDKKFENSLWTLAESLLPSENADMPAYTQGLMDLGATVCKRTKPLCHQCPMADICEAKKQNRTAELPRKKTAAEVPTLPLYWLIVRNRDGAILLEKRPAKGIWGGLYCVPCFESLNGLSDFAAKFSLTMADMDEQTALTHRLTHRLLLITPFEAQMPSESPSDGIWIKPAHLKDYGLPKPLEIYLNGNRLE

SEQ ID NO: 6416 - protein, 498 aa, Neisseria meningitidis; identical to SEQ ID NO: 2733

SEQ ID NO: 6417 - protein, 69 aa, Neisseria meningitidis; identical to SEQ ID NO: 1621

SEQ ID NO: 6418 - protein, 437 aa, Neisseria meningitidis
MMSVTVETLENLERKVVLSLPWSEINAETDKKLKQTQRRAKIDGFRPGKAPLKMIAQMYGASAQNDVINELVQRRFYDVAVAQELKVAGFPRFEGVEEQDDKESFKVAAIFEVFPEVVIGDLSAQEVEKVTASVGDAEVDQTVEILRKQRTRFNHVEREARNGDRVIIDFEGKIDGEPFAGGASKNYAFVLGASQMLPEFEAGVVGMKAGESKDVTVNFPEDYHGKDVAGKTAVFTITLNNVSEATLPEVDADFAKALGIADGDVAKMREEVQKNVSREVERRVNEQTKESVMNALLKAVELKAPVALVNEEAARLANEMKQNFVNQGMADAANLDLPLDMFKEQAERRVSLGLILAKLVDENKLEPTEEQIKAVVANFAESYEDPQEVIDWYYADPSRLQAPTSLAVESNVVDFVLGKAKVNEKALSFDEVMGAQA

SEQ ID NO: 6419 - protein, 338 aa, Neisseria meningitidis
LIFALGFIFLNACSEQTAQTVTLQGETMGTTYTVKYLSNNRDKLPSPAEIQKRIDDALKEVNRQMSTYQPDSEISRFNQHTAGKPLRISSDFAHVTAEAVRLNRLTHGALDVTVGPLVNLWGFGPDKSVTREPSPEQIKQAASYTGIDKIILKQGKDYASLSKTHPKAYLDLSSIAKGFGVDKVAGELEKYGIQNYLVEIGGELHGKGKNARGEPWRIGIEQPNIVQGGNTQIIVPLNNRSLATSGDYRIFHVDKNGKRLSHIINPNNKRPISHNLASISVVADSAMTADGLSTGLFVLGETEALKLAEREKLAVFLIVRDKGGYRTAMSSEFEKLLR

SEQ ID NO: 6420 - protein, 108 aa, Neisseria meningitidis
MNIKHLLLTSAATALLSISAPALAHHDGHGDDDHGHAAHQHNKQDKIISRAQAEKAALARVGGKITDIDLEHDNGRPHYDVEIVKNGQEYKVVVDARTGRVISSRRDD

SEQ ID NO: 6421 - protein, 512 aa, Neisseria meningitidis
MFHSIEKYRTPAQVLLGLIALTFVGFGVSTVSHPGADYIVQVGDEKISDHSINNAIQNEQADGGGPSRDAVFQSLLQRAYLKQGAKLMGISVSSEQIKQIIVDDPNFHDANGKFDHALLNRYLSQRHMSEDQFVEEIRDQFALQNLVNLVQNGVLVGDAQAEQLIRLTQVNRTIRSHTFNPDEFIAQVKVSEADLQKFYNANKKDYLLPQAVKLEYVALNLKDFADKQTVSETEVKNAFEERVARLPANEAKPSFEQEKAAVENELKMKKAVADFNKAKEKLGDDAFNHPSSLAEAAKNSGLKVETQETWLSRQDAQMSGMPENLINAVFSDDVLKKKHNSEVLTINSETAWVVRAKEVREEKTLPFAEAKDAVRQAYIRTEAAKLAENKAKDVLTQLNGGKAVDVKWSEVSVLGAQQARQSMPPEAYAELLKAKPANGKPAYVRLIGLPAPVIVEVQAVTPPDDIAAQLPLAKQALAQQQSANTFDLLIRYFNGKIKQTKGAQSVDNGDGQ

SEQ ID NO: 6422 - protein, 149 aa, Neisseria meningitidis
MSLIGEILPLSHIVLDMEVGSKKRLFEEAGLLLERESSLSHADVFECLFAREKLGSTGLGQGVAIPHGRHAGVKQATGAFIRTREPVGFDAPDGKPVSLIFILLVPENATGEHLEVLSKLAGKFSQKSIRESLMTVSSAEEVRAILTEE

SEQ ID NO: 6423 - protein, 472 aa, Neisseria meningitidis
MENILSVLVGTVNRFLWDYLLIYALLGIGLFFTLYLGAPQITKLGAGFKSVFGGLFAKGDKDDKSLSQFQALAVAISAQIGTGNVAGVATAITAGGPGAIFWMWLSAVLGMSTIFAEALLAQKYRVVSHGKYIGGPAFYITHGLTPKIGRGAARFLSGFFSIALIVALGFIGNATQANSIASAVTIAFDVPSLAVGIVLAVLAGMVVIGGVNRIANIAQFVVPFMAVVYILCAVVILFEFSDHIVPMFNHIFTAAFNPEAVLGGAAGIGMREAVRFGVARGLFSNEAGMGSTPHAHATADVKHPVQQGMAAFVGVFIDTILVCTATALIILLTDANLSGEQGAAVTQFAFNKAFPGFGSQLLAVCLTFFALTTIIGWYYFGESNIRFLFRGRHLGIYRALVLLAIVLGTLGKVDLVWSLSDMFNGFMVIPNLIALFLLRKEIRAIYDDYLAQKKAGRDLSYPYEFHEFHDKG

SEQ ID NO: 6424 - protein, 791 aa, Neisseria meningitidis
MNKNIKSLNLREKDPFLSREKQRYEHPLPSREWIIELLERKGVPSKIESLARELSITEDEYVFFERRLKAMARDGQVLINRRGAVCAADKLDLVKCRVEAHKDGFGFAVPLTPAKDGDFVLYERQMRGIMHGDIVTVRPAGMDRRGRREGTVLDIVERAQSKVVGRFYMDRGVAILEPEDKRLNQSIVLEPDGVARFKPESGQVIVGEIEVYPEQNRPAVAKIIEVLGDYADSGMEIEIAVRKHHLPHQFSEACAKAAKKIPVHVRKSDLKGRVDLRDLPLVTIDGETARDFDDAVFAEKVGRNYRLVVAIADVSHYVRPDDVIDADAQERSTSVYFPRRVIPMLPENLSNGICSLNPDVERLCMVCDMVVTYAGNIKEYRFYPAVMRSHARLTYNQVWKWISDGIDHPYKAQIDTLYKLFKILQKKRFERGAVEFESVETQMIFDDNGKIEKIVPVVRNDAHKLIEECMLAANVCAADFLLKNKHTALFRNHLGPTPEKLATLREQLGLLGLQLGGGDNPSPKDYAALVEQFKGRPDAELLQVMMLRSMQQAVYEPHCDGHFGLAYEAYAHFTSPIRRYPDLTVHRAIKAVLNQQTYTPKKSWQALGVHTSFCERRADDASRDVENWLKTYYMRDKVGEVFEGKISGMTSFGIFVTLDGIHIDGLVHISDLGEDYFNFRPEIMAIEGERSGIRFNMGDRVAVRVARADLDDGKIDFVLIAGGSGRGRKVKSSASAKPAGTAGKGKPKTAAEKKTARGGKVRGRGASAAAESRKKAKKPVPIKVKKRKGKS

SEQ ID NO: 6425 - protein, 338 aa, Neisseria meningitidis; identical to SEQ ID NO: 2862

SEQ ID NO: 6426 - protein, 234 aa, Neisseria meningitidis
MLRLVLAASLSAVSFPAAAEALNYNIVEFSESAGVEVAQDTMSARFQVTAEGRDKNAVNAEFVKKFNKFIRKSKNGSFKTELVSRSAMPRYQYTNGRRIQTGWEERAEFKVEGRDFDELNRFIADIQADAALEYTDFHVSRERRNEVIDQVSKDAVLRFKARAEKLAGVLGASGYKIVKLNLGHIGSHIAGGGAAQAKMLRAMPMAASVNMEGADSAAPGVEEISISVNGTVQF

SEQ ID NO: 6427 - protein, 395 aa, Neisseria meningitidis
MTEHYKTLPEHELLIQKSLISNLNLWDWVFAVLVFAATVFVQTRSGMHMDIYETVMLWASAGIAVFLGWFFKPMRWFVPLSVLLAYAAVGLYGGDIKSAEIFLLRYFLSSQSAIMWQCAFVFFALFAYISGAVLASVKNVPTNTLLGMGTVFAWVSAVAGFTGLLVRWHESYLLRPDAGHIPVSNLYEVFILFLVITALMYLYYEGKFAIQKLGGFVFGFMAVVVGFVLWYSVSREAHTIQPLIPALQSWWMKIHVPANFIGYGAFCISAMLGIAELVSLRAEGKGGKLWLPPSALIDEVMYKAIAVGFLFFTIATILGALWAADAWGRYWSWDPKETWAFIVWLNYAVWLHLRLVAGWRGKVLAWWAIIGLFVTAFAFIGVNMFLSGLHSYGTL

SEQ ID NO: 6428 - protein, 257 aa, Neisseria meningitidis
MYRQIGMWDQKWVIGNWKMNGRLQNNNALMHRFRIHPTAERVLIGLAAPTVYLLQLHNAMQIVLNNRILTCAQDVSRFPNNGAYTGEVSAEMLADTGTDIVLIGHSERSLYFGEKNEIQRRKMENVLNVGLIPLLCVGESLEEREAGKEHEVIAHQLSILQGLDTKNIAVAYEPVWAIGTGKVATVEQIADMHAFIYKEILSLCGSDVKIRVLYGGSVKADNAADIFAVPYVDGALVGGASLSYDSFTAIISAAQNA

SEQ ID NO: 6429 - protein, 251 aa, Neisseria meningitidis
MIKIRNIHKTFGENTILRGIDLDVCKGQVVVILGPSGSGKTTFLRCLNALEMPEDGQIEFDNERPLKIDFSKKPSKHDILALRRKSGMVFQQYNLFPHKTALENVMEGPVAVQGKPAAQAREEALKLLEKVGLGDKVDLYPYQLSGGQQQRVGIARALAIQPELMLFDEPTSALDPELVQDVLNAMKELAREGWTMVVVTHEIKFALEVATTVVVMDGGVIVEQGSPKELFDHPKHERTRRFLSQIQSTKI

SEQ ID NO: 6430 - protein, 72 aa, Neisseria meningitidis; identical to SEQ ID NO: 292

SEQ ID NO: 6431 - protein, 233 aa, Neisseria meningitidis
MSARENILAKLKKADALPMEEPAVFDYYREMGVSWGSEVERLKHWAAAMRAVKTEIYWVTKSNWMQVFREAAEGKGLKNILLPLATEHGQIARAALADSNIEPIAFEREIDTWKTEFFTNIDAGFSGAQCGIARTGTLMLFSSPEEPRTLSLVPPVHFCLFDTSKMYNEFHNAVEGEKLVENGMPTNVFLISGPSKTADIQLTLAYGAHGPRDLVILAILPDHISPADLEENA

SEQ ID NO: 6432 - protein, 319 aa, Neisseria meningitidis
MSKKTKQELENNKLSKRLRHAVGDAINDFNMIEPDDKIMVCLSGGKDSYALLDILRQLQASAPIDFQLVAVNLDQKQPGFPEEVLPTYLESIGVPYKIVEEDTYSTVKRVLDEGKTTCSLCSRLRRGILYRTAKELGCTKIALGHHRDDILATLFLNMFYGGKLKAMPPKLVSDNGEHIVIRPLAYVKEKDLIKYAELKQFPIIPCNLCGSQPNLQRQVIGDMLRDWDKRFPGRIESMFSALQNVVPSHLADTELFDFVGLERGQSLKHGGDLAFDSEKMPERFSDGSEEDESEIKIEPQKAERKVINILANKPKTCGS

SEQ ID NO: 6433 - protein, 283 aa, Neisseria meningitidis
MTLLGIKLKQTQQLNQRLQQSLRVLQMSGIELEREVENWLSDNPLLERKDTDEFSDAEFSHYTAPARQIGGDEGEDMLSNIAGEQDFKQYLHAQVCEHPLSDQEAACVHILIDFLDEQGYLTDSIEDILDHTPLEWMLDEAMLQHALTALKKFDPAGVAAADLNESLILQIERLGECAAKPAALHIVRNALDSIDGNRSQTLARIKKHLPQTDSGTLEAALDLIASLNPFPAAGFASSTPTPYSDEALANLLAFRGMEVSRRTIAKYRESFEIPAAHKRKTAE

SEQ ID NO: 6434 - protein, 206 aa, Neisseria meningitidis; identical to SEQ ID NO: 355

SEQ ID NO: 6435 - protein, 351 aa, Neisseria meningitidis
MKTYAPALYTAALLTACSPAADSNHPSGQNAPANTESDGKNITLLNASYDVARDFYKEYNPLFIKTYQSEHPGTSVSIQQSHGGSSKQALSVANGLQADVVTMNQSSDIDLLEKKGLVEKGWQQALPDHAAPYTSTMVFLVRKNNPKQIRDWNDLAKDGVNIVIANPKTSGNGRYAFLGAYGYGLKTTNGNEQEAQKLVASILKNTPVFENGGRAATTTFTQRNIGDVLITFENEANYVSKKLTQGQFEIVYPSYTISAESPVAVVNSVVAKKGTQKTARAYLEYLWSEPAQELAASLYLRPRNPEVLARHKADFPDLDTFSPEKKFGGWDNIMKTYFADGGIFDRLTAQK

SEQ ID NO: 6436 - protein, 227 aa, Neisseria meningitidis
MELVFIRHGQSEWNAKNLFTGWRDVKLSEQGLAEAAAAGKKLKENGYEFDIAFTSVLTRAIKTCNIVLEESDQLFVPQIKTWRLNERHYGQLQGLDKKQTAEQYGDEQVRIWRRSYDTLPPLLDKDDEFSAHKDRRYAHLPADVVPDGENLKVTLERVLPFWEDQIAPAILSGKRVLVAAHGNSLRALAKHIEGISDEDIMGLEIPTGQPLVYKLDDNLKVIEKFYL

SEQ ID NO: 6437 - protein, 155 aa, Neisseria meningitidis
MQVFLTIPGYDVEAEIEKFVWMDAVIWQMPGWWMHEPWTVKKYIDGVLTAGHGKLYQSDGRHSVNPTEGYGTGGLLQGKKHMLSLTWNAPIEAFTREGDFFEGKGVDVLYMHFHKANEFLGMTRLPTFLCNDVVKNPQVEKYLADYQAHLEKVFG

SEQ ID NO: 6438 - protein, 383 aa, Neisseria meningitidis
MQTWQLPEHIADVLPTNARQLESAREQLLALFRVHGYELVQPPLMEYAHSLLTHIDAGLSLKTILVTDRLSGRQLGIRADITPQVARIDAHLLSANQGINRLCYAGPVLHAQPDGLLNMREPLQAGAEMYGFADIRGDIELIDLMLKSMKIADMGKVLLSLGHIGIFRALSDAAHLDAGQSATLLALMQDKDTGAVEAQVKAWKLDGMWAKAFSLLPRLYGGREVLSDARGRLPDLSAVGGALGELQAVCDAFPDCEIHIDLSELRVDNYHTGLLYAAYAADFHDAVARGGRYDGLGGYFGRARPATGFSFDLRSFIGRLPAIERQPAVLVDAEDAEAAHEAVEALREQGQCVVIDYGIGHNVSEELAGRLKKTDGVWQVVKR

SEQ ID NO: 6439 - protein, 589 aa, Neisseria meningitidis
MTVQTKTKGLAWQEKPLSDNERLKTESNFLRGTILDDLKDPLTGGFKGDNFQLIRFHGMYEQDDRDIRAERAEAKLEPLKFMLLRCRLPGGIIKPSQWIELDKFARENSHYRSIRLTNRQTFQFHGVPKAKLQTMHRLLHKLGLDSIATAADMNRNVLCTSNPIESELHRQAYEYAKKISEHLLPRTRGYLDVWVDGKKVQSSDDFLQEDEPILGKTYLPRKFKTAVVIPPLNDVDCYGNDLDFVAVSDGNGQLAGFNVLAGGGLSMEHGNTKTYPNISLELGFVPPEHALKAAEAVVTTQRDFGNRSDRKNARTRYTIQNMGLDNFRAEVERRMGMPFEPVRPFKFTGRGDRIGWVKGIDGNWHLTLFIESGRLVDEGGKQLLTGVLEIAKIHKGDFRITANQNLIVANVAEADKAKIEEFARTYGLIRNDVSKLRENAMSCVSFPTCPLAMAEAERVLPDFIGELDKIMAKHGTSDDYIVTRITGCPNGCGRAMLAEIGLVGKAVGRYNLHIGGDREGVRIPRLYKENITLPEILAELDDLIGKWAAERNIGEGFGDFAIRTGIVKPVLNAPVDFWDASKAVAIARA

SEQ ID NO: 6440 - protein, 125 aa, Neisseria meningitidis; identical to SEQ ID NO: 348

SEQ ID NO: 6441 - protein, 495 aa, Neisseria meningitidis; identical to SEQ ID NO: 2837

SEQ ID NO: 6442 - protein, 270 aa, Neisseria meningitidis
MSVGHYENFPVGSLILPRRLRKPVHAVYAFARTADDMADEGSMPSEARLAGLEGLQRELDVLASGGRSAHPLIARLDAEAVVPFGLDLQPFYDLLSAFSQDVVKTRYGNFGELADYCRRSANPVGRIMLALYGKTDAVCVAQSDGICTALQLVNFWQDVAVDWQKGRVYIPQDDLLKFGVSEEQIAAGRADAAFQRLMAYECRRAFRMLKAGSPLARELNGRIGLELRMIVLGAQLILQKLDACRYDVFAQRPVLDKKDWLIMLKKALWK

SEQ ID NO: 6443 - protein, 92 aa, Neisseria meningitidis; identical to SEQ ID NO: 510

SEQ ID NO: 6444 - protein, 603 aa, Neisseria meningitidis
  misc_feature 3, 4: 'Xaa' is any amino acid
VCXXIKRRLQAGDKMAGRHGNKGVVSRILPVEDMPYMADGRPVDIVLNPLGVPSRMNIGQILEVHLGWAAKGIGERIDRMLKEQRKAGESREFLNRLYNGSGKKEDLDALTDEEIIELASNLRKGASFASPVFDGAKESEIREMLNLAYPSDDPEVEKLGFNDSKTQITLYDGRSGEAFDRKVTVGVMHYLKLHHLVARLRGTKAEKPFAPYFQTRYTCRRCFQPFDYPQPPSLRRRFACQRHCAAVNTKEHIMTVSPVALRRKTECKPHPTARYWKKCDVEALFGLPFLDLIYQAAEIHRQNFNPREIQLSTLLSIKTGGCPEDCAYCPQSAHHNTNLGKEQMMDVDEIVEKAKIAKSRGASRFCMGAAWRGPKPKDVETVSAIIKAVKGLGMETCGTFGMLEEGMAEDLKEAGLDYYNHNLDTDPDRYNDIIHTRQHEDRMDTLGKVRNAGLKVCCGGIVGMNETRAERAGLIASLANLDPQPESVPINRLVKVEGTPLADAEDLDWTEFVRTIAVARITMPQSYVRLSAGRSNMPEAMQAMCFMAGANSIFYGDKLLTTGNPDEDGDRILMEKLNLYPLQFEPEGEVAEVEKASGIKVDY

SEQ ID NO: 6445 - protein, 236 aa, Neisseria meningitidis; identical to SEQ ID NO: 2130

SEQ ID NO: 6446 - protein, 161 aa, Neisseria meningitidis
MDALHTIARNLTKKCQTVSCAESCTGGMLAAAFTSVAGSSQWFDQSFVTYSNKAKEDRLGVLPETLLEHGAVSRQTVYEMARGAKAVAQADYAVGISGIAGPGGGSESKPVGTVWFGFAFPGGSCEAMRRFDGNRESVRAQAVAFALERLAGLIENGGDAV

SEQ ID NO: 6447 - protein, 119 aa, Neisseria meningitidis
MNIKHLITAALIASAAFAAQAAPQKPVSAAQTAQHPAVWIDVRSEQEFSEGHLHNAVNIPVDQIVRRIHEAAPDKDTPVNLYCRSGRRAEAALQELKKAGYTNVANHGGYEDLLKKGMK

SEQ ID NO: 6448 - protein, 433 aa, Neisseria meningitidis
MTESVRLPVARLKPSTVALPGSKSISNRTLLLAALSDNACEIHSLLKSDDTDRMLEALDKLGVQIEYLAEDRLKVHGTGGRFPNRTADLFLGNAGTAFRPLTAALAVLGGDYHLHGVPRMHERPIGDLVDALRIAGADVEYLGKEHYPPLHIGERQDNGERVIPIKGNVSSQFLTALLMALPLTGQAFEIRMVGELISKPYIDITLKLMAQFGVQVINEGYRVFKIPADAHYHAPEHLHVEGDASSASYFLAAGLIAATPVRVTGIGANSIQGDVAFARELEKIGADVVWGENFVEVSRPKERAVQSFDLDANHIPDAAMTLAIVALATGQTCTLRNIGSWRVKETDRIAAMANELRKLGAKVVEEAEAIHITPPETLTPDAVIDTYDDHRMAMCFSLVSLLGVPVVINDPKCTHKTFPTYFDVFSSLTETAE

SEQ ID NO: 6449 - protein, 154 aa, Neisseria meningitidis; identical to SEQ ID NO: 2266

SEQ ID NO: 6450 - protein, 257 aa, Neisseria meningitidis
MSANILAIANQKGGVGKTTTTVNLAASLASRGKRVLVVDLDPQGNATTGSGIDKASLQSGVYQVVLGDADVKSAAVRSKEGGYAVLGANRALAGAEIELVQEIAREVRLKNALKAVAEDYDFILIDCPPSLTLLTLNGLVAAGGVIVPMLCEYYALEGISDLIATVRKIRQAVNPDLDITGIVRTMYDSRSRLVAEVSEQLRSHFGDLLFETVIPRNIRLAEAPSHGMPVMAYDAQAKGAKAYLALADELMARVSGK

SEQ ID NO: 6451 - protein, 603 aa, Neisseria meningitidis
MKQIRNIAIIAHVDHGKTTLVDQLLRQSGTFRANQQVDERVMDSNDLEKERGITILAKNTAIDYEGYHINIVDTPGHADFGGEVERVLGMVDCVVLLVDAQEGPMPQTRFVTKKALALGLKPIVVINKIDKPSARPSWVIDQTFELFDNLGATDEQLDFPIVYASGLSGFAKLEETDESNDMRPLFDTILKYTPAPSGSADETLQLQISQLDYDNYTGRLGIGRILNGRIKPGQTVAVMNHDQQIAQGRINQLLGFKGLERVPLEEAEAGDIVIISGIEDIGIGVTITDKDNPKGLPMLSVDEPTLTMDFMVNTSPLAGTEGKFVTSRQIRDRLQKELLTNVALRVEDTADADVFRVSGRGELHLTILLENMRREGYELAVGKPRVVYRDIDGQKCEPYENLTVDVPDDNQGAVMEELGRRRGELTNMESDGNGRTRLEYHIPARGLIGFQGEFMTLTRGVGLMSHVFDDYAPVKPDMPGRHNGVLVSQEQGEAVAYALWNLEDRGRMFVSPNDKIYEGMIIGIHSRDNDLVVNPLKGKKLTNIRASGTDEAVRLTTPIKLTLEGAVEFIDDDELVEITPQSIRLRKRYLSELERRRHFKKLD

SEQ ID NO: 6452 - protein, 284 aa, Neisseria meningitidis
MAEITAKMVADLRAATGLGMMECKKALVEAEGNFDKAEEILRIKSGAKAGKLAGRTAAEGVLAYAINGNVGALVEVNCETDFVAKDAGFVEFANFVAKTAAEKKPASVEELSELVEAEHKAIIAKLGENMSVRRFQVIDTANQLVAYIHGALATEGVLVEYKGSEDVARKIGMHIVAAKPQCVSEAEVDAETVEKERHIYTEQAIASGKPADIAAKMVEGRIRKFLAEITLNGQAFVMNPDQTVAQFSKENGTEVISFVRYKVGDGIEKKAVDYAAEVAAAAKV

SEQ ID NO: 6453 - protein, 361 aa, Neisseria meningitidis
MTVPHIPRGPVMADIAAFRLTEEEKQRLLDPAVGGIILFRRNFQNIEQLKTLTAEIKALRTPELIIAVDHEGGRVQRFIEGFTRLPAMSTLGEIWDKDGASAAETAAGQVGRVLATELSACGIDLSFTPVLDLDWGNCPVIGNRSFHRNPEAVARLALALQKGLTKGGMKSCGKHFPGHGFVEGDSHLVLPEDWRSLSELETADLAPFRIMSREGMAAVMPAHVVYPQVDTKPAGFSEIWLKQILRRDIGFKGVIFSDDLTMEGACGAGGIKERARISFEAGCDIVLVCNRPDLVDELREDFRIPDNPTLAQRWQYMANTLGSAAAQAVMQTADFQAAQAFVAGLASPQDTAGGVKVGEAF

SEQ ID NO: 6454 - protein, 97 aa, Neisseria meningitidis
MKPSLLLQSRKKEILAVFGKYPLICNPRVFGSVSRGDDTENSDIDLLVDAKTGTTLLDLGGLQEELQKLLGIKVDLLTPDDISAHFRDKVLTEAVAL

SEQ ID NO: 6455 - protein, 322 aa, Neisseria meningitidis; identical to SEQ ID NO: 1760

SEQ ID NO: 6456 - protein, 628 aa, Neisseria meningitidis
MPSETVFQVIDMNKETRFPEHFDIPLFLKNLPNLPGVYRFFNESGNVLYVGKAVNLKRRVSGYFQKNDHSPRIALMVKQVHHIETTITRSESEALILENNFIKALSPKYNILFRDDKSYPYLMLSGHQYPQMAYYRGTLKKPNQYFGPYPNSNAVRDSIQVLQKVFMLRTCEDSVFEHRDRPCLLYQIKRCTAPCVGHISEEDYRDSVREAATFLNGKTDELTRTLQHKMQTAAANLQFEEAARYRDQIQALGIMQSNQFIDSKNPNNPNDIDLLALAVSDGLVCVHWVSIRGGRHVGDKSFFPDTKNDPEPNGQDYAEAFVAQHYLGKSKPDIIISNFPVPDALKEALEGEHGKQMQFVTKTIGERKVRLKMAEQNAQMAIAQRRLQQSSQQHRIDELAKILGMDSDGLNRLECFDISHTQGEATIASCVVYDEQNIQPSQYRRYNITTAKPGDDYAAMREVLTRRYGKMQEAEANGETVKWPDAVLIDGGKGQIGVAVSVWEELGLHIPLVGIAKGPERKAGMEELILPFTGEVFRLPPNSPALHLLQTVRDESHRFAITGHRKKRDKARVTSSLSDIPGVGSKRRQALLTRFGGLRGVIAASREDLEKVEGISKALAETIYNHLH

SEQ ID NO: 6457 - protein, 104 aa, Neisseria meningitidis
MKKTLSNLVLISFCSTMLTACPFWGSCADWNCSKLNPRWEKAVDTCETENLTFVLHELGNQLGYKSITEVSFSEIGQHISYQCIHHGGGYNIRKDKQYGHLFVQ

SEQ ID NO: 6458 - protein, 307 aa, Neisseria meningitidis
MKKRNNPLPLLNGVKPSYLVLPHEKQFYGLPLLHFLCIRFPFVGADDWRRRLNSGFVVGSDGAALDEHSLFEPGKVMFYYRETSRESEPRIPFEEKILHIDEHLIVVDKPHFLPVIPSGRFLRETLLTRLRLRPELQHLNVEDITPLHRLDKDTAGVMLLSHNPATRGAYQTMFQNKTVWKTYEALAPTRTDLPYPLDVVSRLVRGEKFFTTQEAEGEPNAHTTVELIENRGEFSLYRLTPHTGKKHQLRVHMMGLGMPLLNDALYPVPSEAGSEDYRKPLKLLAKKIAFADPLSGRERVFCSGFCL

SEQ ID NO: 6459 - protein, 72 aa, Neisseria meningitidis; identical to SEQ ID NO: 1579

SEQ ID NO: 6460 - protein, 520 aa, Neisseria meningitidis
LFEVMKKPLISVAAALLGVALGTPYYLGVKAEESLTQQQKILQEAGFLTVESHQYERGWFTSTETTVIRLKPELLNNARKYLPDNLKTVLEQPVTLVNHITHGPFAGGFGTQAYIETEFKYAPETEKVLERFFGKQVPVSLANTVYFNGSGKMEVSVPAFDYEELSGIRLHWEGLTGKTVYQKGFKSYRNGYDAPLFKIKLADKGDAAFEKVHFDSETSDGINPLALGSSNLTLEKFSLEWKEGVDYNVKLNELVNLVTDLQIGAFINPNGSIAPSKIEVGKLAFSTKTGESGAFINSEGQFRFDTLVYGDEKYGPLDIHIAAEHLDASALTVLKRKFAQISAKKMTEEQIRNDLIAAVKGEASGLFTNNPVLDIKTFRFTLPSGKIDVGGKIMFKDMKKEDLNQLGLMLKKTEADIRMSIPQKMLEDLAVSQAGNIFSVNAEDEAEGRASLDDINETLRLMVDSTVQSMAREKYLTLNGDQIDTAISLKNNQLKLNGKTLQNEPEPDFDEGGMVSEPQQ

SEQ ID NO: 6461 - protein, 171 aa, Neisseria meningitidis
MYTCTSCGENHEEMPAIGFTAPDPYNQLSEEERIAYQAECDSDFCIIRYPDQTDRFIRAVLPIPIIGHEETLEYGVWVSVSEKSFNDYQSRFYDNLENAVYFGMICNQLPPYETDTFGLHCNVVTQPDGQRPLLQLHQGGEHPLVRDFYHGIEYAEAQARIGAVSESDCSG

SEQ ID NO: 6462 - protein, 162 aa, Neisseria meningitidis
MTPLFRKAVWLLFAVSVCAFAGSLAAQYVLGMEPCVLCISQRLCVLATALCAAIVLMCRPRRKAGGLFGAVFISIPAVTGISVAAYQLWLQSLPPGTAPSCGAPWTFRLKGWPLFDWFEPVVRGFGNCAEPDYLLGVALPVWSVAYFLAVVLTVWWAWARAK

SEQ ID NO: 6463 - protein, 459 aa, Neisseria meningitidis
MLLDLNRFSFPVFLKEVRLLTTLALPMLLAQVAQVGIGFVDTVMAGGAGKEDLAAVALGSSAFATVYITFMGIMAALNPMIAQLYGAGKTDEVGETGRQGIWFGLFLGVFGMVLMWAAITPFRNWLTLSDYVEGTMAQYMLFTSLAMPAAMVHRALHAYTSSLNRPRLIMLVSFAAFVLNVPLNYIFVYGKFGMPALGGAGCGLATMAVFWFSALALWIYIAKENFFRPFGLTAKFGKPDWAVFKQIWKIGAPIGLSYFLEASAFSFIVFLIAPFGEDYVAAQQVGISLSGILYMIPQSVGSAGTVRIGFSLGRREFSRARYISGVSLVLGWMLAVITVLSLVLFRSPLVSMYNNDPAVLSIAATVLLFAGLFQPADFTQCIASYALRGYKVTKVPMFIHAAAFWGCGLLPGYLLAYRFDMGIYGFWTALIASLTIAAIALVWCLELCSREMVRSHKAV

SEQ ID NO: 6464 - protein, 351 aa, Neisseria meningitidis
MTHHYPTDDIKIKEVKELLPPIAHLYELPISKEASGLVHRTRQEISDLVHGRDKRLLVIIGPCSIHDPKAALEYAERLLKLRKQYENELLIVMRVYFEKPRTTVGWKGLINDPHLDGTFDINFGLRQARSLLLSLNNMGMPASTEFLDMITPQYYADLISWGAIGARTTESQVHRELASGLSCPVGFKNGTDGNLKIAIDAIGAASHSHHFLSVTKAGHSAIVHTGGNPDCHVILRGGKEPNYDAEHVSEAAEQLRAAGVTDKLMIDCSHANSRKDYTRQMEVAQDIAAQLEQDGGNIMGVMVESHLVEGRQDKPEVYGKSITDACIGWGATEELLALLAGANKKRMARAS

SEQ ID NO: 6465 - protein, 357 aa, Neisseria meningitidis
MKYKALSLLPLAAALAACAGGGVAEPHVPVSIPTATPLTGEVKLSSDNSKIENINTANTETHPPRRTRRSLYASPQNTSSGISIQQREVEKIYFGVKSPEKSFIFQTPGGAQYALSSYADPIVPSYSSPDFKIPDRHAGQRLADGSRIFICCSDSGATSYAEITKQDYMKFGAWIGPNGEIDLFAGGFPIGKTPPPAFSWGSPTTETALSKGKITYQVWGIRVRNGQFVTSSYTPPKGSSWSGYQNTPVLSFITANFNSNKLAGEIIGNSDYGPNVKIENATIDGLSFSGDATSNGKTGNLEGKFFGKFNSTRSSDTGIGGKITFKDDRSLDTVFGGVIYEKKLDDKTSQDTNHLKK

SEQ ID NO: 6466 - protein, 178 aa, Neisseria meningitidis
VDLREVKLGGETIYEGGFVSISRDKVRLPNGNEGQRIVIRHPGAACVLAVTDEGKVVLVRQWRYAANQATLELPAGKLDVAGEDMAACALRELAEETPYTADSVRLLYSFYTAVGFCNEKMYLFEAEGVRLGSTLANDEDEITETVLMSKEEVRQALANDEIKDGKTLIGLQYWLMKD

SEQ ID NO: 6467 - protein, 556 aa, Neisseria meningitidis
MEKIWLDSYEKGVSAEIDITQYNSVSDVFRQSVEKFADQPAFQNMGKTLTYAETGKLATDFASYLQNVLKLPRGERVAIMLPNVLQYPVALFGILQAGLVAVNTNPLYTPRELEHQLKDSGATAIIVLENFANTLELVLPRTQIKHVIVASVGEMFGLLKGSLINFVIRKIKKMVPEYRIRETVSFQTALKEGAKHVFQPVALNREDTALLQYTGGTTGVAKGAVLSHGNICANMLQAKEWIKNQLREGKETVIAALPLYHIFALTVNLMIFANAGSKIILITNPRDMKGFIGELKKQRVNVFIGVNTLFNAMVNRPDFAEVDFSELRLTLGGGMATQKAVAEKWKKITGTPIVEAYGLTEASPGVCCNPLNIESYSGSIGLPVSSTEVELRDANGKEVPVGQPGELWVKGPQVMQGYWNRPEETAKAIDARGFLETGDIAVMDEKGWLKLVDRKKDLVVVSGFNVYPNEIEEVIAHHGKVMEVACIGVPDEKTGEALKVFVVKKDPSLTKEELIAFCRTELTAYKVPKNIEFRDELPKSNVGKILRRELRQSTGK

SEQ ID NO: 6468 - protein, 227 aa, Neisseria meningitidis; identical to SEQ ID NO: 598

SEQ ID NO: 6469 - protein, 264 aa, Neisseria meningitidis
MKAYLDLMRHVLDNGTDKSDRTGTGTRSVFGYQMRFDLGKGFPLLTTKKLHLRSIIHELLWFLKGDTNIKYLKDNNVSIWDEWADENGDLGPVYGYQWRNWPAPDGRHIDQIANVLEQIKKNPDSRRLIVSAWNPALVDEMALPPCHALFQFYVADGKLSCQLYQRSADIFLGVPFNIASYALLTMMMAQVCGLEAGEFVHTFGDAHLYRNHFEQAALQLEREPRALPVMKINPEVKDLFSFKFEDFELEGYDPHPHIKAAVSV

SEQ ID NO: 6470 - protein, 365 aa, Neisseria meningitidis; identical to SEQ ID NO: 1845

SEQ ID NO: 6471 - protein, 319 aa, Neisseria meningitidis; identical to SEQ ID NO: 5570

SEQ ID NO: 6472 - protein, 480 aa, Neisseria meningitidis
MKQLAMYINGRFENDFNGEWRDVLNPSTEEAIAREPKGGKADVDRAVAAARAAQPAWERLPAVERGAYLRKIAQGIRERADELTDTIVAEGGKTKDLARVEVMFTADYLDYQAEWARRYEGEIIQSDRPRENILLFKRPLGVIAGILPWNFPFFLIARKMGPALVTGNTIVVKPSSVTPINCHIFAEIVDAVGLPAGVFNVVNGPGAEIGNALSAHPQVDMVSLTGSVEAGRQVMEAASANITKVSLELGGKAPAIVLKDADLDLAVKSILASRVGNTGQICNCAERVYVHSSLKDAFIEKMTAAMKGVRYGNPAEAEAGALEMGPLIEERAVKAVAEKVERAVKQGAKLVCGGKRAEGRGYFFEPTLLTDTDNSMDIMKEETFGPVLPVSAFDTLDQVIALANDCEFGLTSSVYTTNLNEAFYVTRRLQFGETYINRENFEAMQGFHAGWKKSGIGGADGKHGLEEYLQTQVVYLETDI

SEQ ID NO: 6473 - protein, 125 aa, Neisseria meningitidis; identical to SEQ ID NO: 1050

SEQ ID NO: 6474 - protein, 60 aa, Neisseria meningitidis
MGVLREMAEKLGHKVLPLAPYSPELNPIEKVWANIKRYLRTVLSDYARFDDALLSYFDFN

SEQ ID NO: 6475 - protein, 447 aa, Neisseria meningitidis
MIKIKKGLNLPIAGRPEQAVYDGPAITEVALLGEEYAGMRPSMKVKEGDAVKKGQVLFEDKKNPGVVFTAPASGKIAAIHRGEKRVLQSVVIAVEGNDEIEFERYAPEALANLSGEEVRRNLIQSGLWTALRTRPFSKIPAVDAEPFAIFVNAMDTNPLAADPTVIIKEAAEDFKRGLLVLSRLTERKIHVCKAAGADVPSENAANIETHEFGGPHPAGLSGTHIHFIEPVGANKTVWTINYQDVITIGRLFATGRLNTERVIALGGSQVNKPRLLRTVLGAKVSQITAGELVDTDNRVISGSVLNGAITQGAHDYLGRYHNQISVIEEGRSKELFGWVAPQPDKYSITRTTLGHFLKNKLFKFNTAVNGGDRAMVPIGTYERVMPLDILPTLLLRDLIVGDTDSAQALGCLELDEEDLALCSFVCPGKYEYGPLLRKVLETIEKEG

SEQ ID NO: 6476 - protein, 558 aa, Neisseria meningitidis
MSVGLLRILVQNQVVTVEQAEHYYNESQAGKEVLPMLFSDGVISPKSLAALIARVFSYSILDLRHYPRHRVLMGGVTEEQMVEFHCVPVFRRGDKVFFAVSDPTQMPQIQKTVSAAGIEVELVIVEDDQLAGLLDWVGSRSTSLLQELGEGQEEEESHTLYIDNEEAEDGPVPRFIHKTLSDALRSGASDIHFEFYEHNARIRFRVDGQLREVVQPPIAVRGQLASRIKVMSRLDISEKRIPQDGRMQLTFQKGGKPVDFRVSTLPTLFGEKVVMRILNSDAASLNIDQLGFEPFQKKLLLEAIHRPYGMVLVTGPTGSGKTVSLYTCLNILNTESVNIATAEDPAEINLPGINQVNVNDKQGLTFAAALKSFLRQDPDIIMVGEIRDLETADIAIKAAQTGHMVFSTLHTNNAPATLSRMLNMGVAPFNIASSVSLIMAQRLLRRLCSSCKQEVERPSASALKEVGFTDEDLAKDWKLYRAVGCDRCRGQGYKGRAGVYEVMPISEEMQRVIMNNGTEVDILDVAYKEGMVDLRRAGILKVMQGITSLEEVTANTND

SEQ ID NO: 6477 - protein, 297 aa, Neisseria meningitidis; identical to SEQ ID NO: 560

SEQ ID NO: 6478 - protein, 443 aa, Neisseria meningitidis
MSGWHTLLQDASYKGVGFDIEVVDESNGKALAEHARPFVQGIDLEDMGMTGRQVQINAVFWGKGYAGRLKKLLDALEQPGGGVLVHPVWGRMHNMIAASWSYRHEADYVDYAGIDITFREAAEAQEIFVFENAFLVELEALIANIDTYREAAIGFVDAVLAVDAGVSALWGSALGIWSAASGTFGAVRRLFDLDKIAFPDRGGYSAAAFKNGSAKLFADISVMVDTGIRREAGLADNAMHHAGWSPRQRFDGAAAVADRAAAIPDNLLTGRFSDGLQNRLNRLTAKQVQPVAQAVRLLSTSSLLSVATALIEAHGEEMTAPDLIEVNRAMRRRMQAEIAALRAVQTAAAESGGLTANAVYTEAYQTAESLRAAAGRLNALVAAVINQKPPLIVRQAPIDGTIHQIAHEFYGDIARAAELVRLNPHIHHPAFIKRGTLVNSYAK

SEQ ID NO: 6479 - protein, 197 aa, Neisseria meningitidis
MRKQNTLTGIPTSDGQRGFALFIVLMVMIVVAFLVVTVAQSYNTEQRISANESDRKLALSLAEAALREGELQVLDLEYDTDSKVTFSENCGKGLCAAVNVRTNNDNEEAFDNIVVQGKPTVEAVKRSCPANSTDLCIDKKGMEYKKGTRSVSKMPRYIIEYLGVKNGENVYRVTAKAWGKNANTVVVLQSYVSNNDE

SEQ ID NO: 6480 - protein, 318 aa, Neisseria meningitidis
MTACFTTYPNATMRIRLGRHNAPDFPQGAAVTIGNFDGVHLGHKHILQKLRLEADARGLPVVTVVFEPQPKEFFALRTGRMPPCRISPLRTKLELLEGTGCVDAVWVLRFDQNFSEISAQGFIDRLLRQTLNTRYLLVGDDFRFGAGREGCFELLAQQPDMQTERTPSVIVEDIRTSSTAVRQALSDGNLAYAKKLLGHDYVLSGRVVHGRKLGRTLNAPTANIRLPRHRYALGGVFVVEADGAFGTRRGVASFGFNPTVDSGCSQKLEVHLFDFQGDLYGQGLNVRFLHKLRDEEKFDGMEELKRQIEADMEAARRW

SEQ ID NO: 6481 - protein, 321 aa, Neisseria meningitidis; identical to SEQ ID NO: 2168

SEQ ID NO: 6482 - protein, 512 aa, Neisseria meningitidis
MNMLGALAKVGSLTMVSRVLGFVRDTVIARAFGAGMATDAFFVAFKLPNLLRRVFAEGAFAQAFVPILAEYKETRSKEAAEAFIRHVAGMLSFVLVIVTALGILAAPWVIYVSAPGFAQDADKFQLSIDLLRITFPYILLISLSSFVGSVLNSYHKFGIPAFTPTFLNVSFIVFALFFVPYFDPPVTALAWAVFVGGILQLGFQLPWLAKLGFLKLPKLSFKDAAVNRVMKQMAPAILGVSVAQVSLVINTIFASYLQSGSVSWMYYADRMMELPSGVLGAALGTILLPTLSKHSANQDTEQFSALLDWGLRLCMLLTLPAAVGLAVLSFPLVATLFMYREFTLFDAQMTQHALIAYSFGLIGLIMIKVLAPGFYARQNIKTPVKIAIFTLICTQLMNLAFIGPLKHVGLSLAIGLGACINAGLLFYLLRRHGIYQPGKGWAAFLAKMLLSLAVMCGGLWAAQAYLPFEWAHAGGMRKAGQLCILIAVGGGLYFASLAALGFRPRHFKRVEN

SEQ ID NO: 6483 - protein, 232 aa, Neisseria meningitidis
LPLLSVSRFGLHTTSVQRKTMFQNFDLGVFLLAVLPVLLSITVREVARGYTARYWGDNTAEQYGRLTLNPLPHIDLVGTIIVPLLTLMFTPFLFGWARPIPIDSRNFRNPRLAWRCVAASGPLSNLAMAVLWGVVLVLTPYVGGAYQMPLAQMANYGILINAILFALNIIPILPWDGGIFIDTFLSAKYSQAFRKIEPYGTWIILLLMLTGVLGAFIAPIVRLVIAFVQMFV

SEQ ID NO: 6484 - protein, 661 aa, Neisseria meningitidis
MAKNNQYSESSITVLKGLEPVKERPGMYTRTDSPTHICQEVIDNASDEALGGFATAIDVQIHEDGSLSVHDNGRGIPVGLHPEEGVSVVELVFTRLHAGGKFNKKDGGSAYAFSGGLHGVGVSVTNALSTRLEVTVKREGKIHRIVFAGGDVVEPLAQVGKCAVKDSGTEVRVWPDGKYFESPNYSIPELERLLRAKAVLLPGVRVSLTRPVKGEDEAHTQTWHYPDGLKSYLTDLIADAQEAVPLFSCENYISDEHNGDFSIGEGAAFALTWLEEGSCANESYVNLIPTPLGGTHEAGLKQAVFNAVNNFINLHNLLPRGVKVQSDDVFGKTAFVLSARVLDPQFQGQTKDKLTNRDALKLVATVSGDPLELWLNQNVDFGKKIAELAIRQAQARMRSVKKIEKKKGSGVAVLPGKLTDCESEDIRENELFLVEGDSAGGSAKLARDKATQAILPLRGKVLNSFEVHPDQLFGNAEIHDISVAIGVDPHGINDHPDLSGLRYGKIAILSDADVDGSHIQVLLLTLFYRHFPKLVADGHIYVAQPPLFRVDVNAQGKSKPARKFYALDQNELDSILERLQKEGVKETAYSISRFKGLGEMNPDQLKDTTMHPDTRRLLQVQIPEGADDETRDIFVKLMGKGEAAARRAWMEREGDTAELDI

SEQ ID NO: 6485 - protein, 273 aa, Neisseria meningitidis
MSSPRHVFYISDRTGLTAENIGEALLNQFGNLSFKRHTHPFVDTPEKARAVVEKVNRSRQENGQRPIAFVSVVDDEIRRIIKGADAFQINFFETFLGLLEKELNTEATASGQGHHSIGNTKRYDARMEAVNFSLNHDDGVSDKNLQEADVILMGVSRSGKTPTCLYLALQYGIRAANYPLIPDDLESADLPRMVKPYRDKLFGLTIQPERLQAIRQERRPNSTYAKIDTCRSEVADAQSMFRRHGIPFANTTDKSVEELAVHILQACKLKRRF

SEQ ID NO: 6486 - protein, 521 aa, Neisseria meningitidis
MTQDKILILDFGSQVTQLIARRVREAHVYCELHSFDMPLDEIKAFNPKGIILSGGPNSVYESDYQADTGIFDLGIPVLGICYGMQFMAHHLGGEVQPGNQREFGYAQVKTIDSELTRGIQDGEPNTLDVWMSHGDKVSKLPDGFAVIGNTPSCPIAMMENAEKQFYGIQFHPEVTHTKQGRALLNRFVLDICGAQPGWTMPNYIEEAVAKIREQVGSDEVILGLSGGVDSSVAAALIHRAIGDQLTCVFVDHGLLRLNESKMVMDMFARNLGVKVIHVDAEGQFMAKLAGVTDPEKKRKIIGAEFIEVFDAEEKKLTNAKWLAQGTIYPDVIESAGAKTKKAHAIKSHHNVGGLPENMKLKLLEPLRDLFKDEVRELGVALGLPREMVYRHPFPGPGLGVRILGEVKKEYADLLRQADDIFIQELRNTTDENGTSWYDLTSQAFAVFLPVKSVGVMGDGRTYDYVIALRAVITSDFMTAHWAELPYSLLGKVSNRIINEVKGINRVVYDVSGKPPATIEWE

SEQ ID NO: 6487 - protein, 241 aa, Neisseria meningitidis
MDFLSRWRRIADAPTIRRCVLCHGSSGVSDGICAGCRDDLAAYRTDAANSCPLCFRHIQGGSVCGGCQKKPPAFDRMWASLHYEPPVSNMIHALKHLADLSMVQPLADLMMQNPPDRLADECFDFVLPVPLSRERLLQRGFNQSESIVGLLAQRYGWQILPRHTVFRHHRPPQSTLKGGERRRNIKNAFEIRTPIPENCNILLIDDVFTTGATLDELAKTLKKSGANRICCWTLARTPMKK

SEQ ID NO: 6488 - protein, 52 aa, Neisseria meningitidis
VVEQSFGTLHHKFRYARAAYFGLIKVSAQSHLKAMCLNLLKAANRLSAPAAA

SEQ ID NO: 6489 - protein, 91 aa, Neisseria meningitidis; identical to SEQ ID NO: 4054

SEQ ID NO: 6490 - protein, 406 aa, Neisseria meningitidis
MAVNLTEKTAEQLPDIDGIALYTAQAGVKKPGHTDLTLIAVAAGSTVGAVFTTNRFCAAPVHIAKSHLFNEDGVRALIINTGNANAGTGAQGRIDALAVCAAAARQIGCKPNQVLPFSTGVILEPLPADKIIAALPKMQPAFWNEAARAIMTTDTVPKAASREGKVGDKHTVRATGIAKGSGMIHPNMATMLGFIATDAKVSQPVLQLMTQEIADETFNTITVDGDTSTNDSFVIIATGKNSQSEIDNIADPRYAQLKELLCSLALELAQAIVRDGEGATKFITVRVENAKTRDEARQAAYAVARSPLVKTAFFASDPNLGRLLAAIGYAGVADLDTDLVEMYLDDILVAEHGGRAASYTEAQGQAVMSKAEITVRIKLHRGQAAATVYTCDLSHGYVSINADYRS

SEQ ID NO: 6491 - protein, 764 aa, Neisseria meningitidis
MRREAKMAQTTLKPIVLSILLINTPLLAQAHETEQSVDLETVSVVGKSRPRATSGLLHTSTASDKIISGDTLRQKAVNLGDALDGVPGIHASQYGGGASAPVIRGQTGRRIKVLNHHGETGDMADFSPDHAIMVDTALSQQVEILRGPVTLLYSSGNVAGLVDVADGKIPEKMPENGVSGELGLRLSSGNLEKLTSGGINIGLGKNFVLHTEGLYRKSGDYAVPRYRNLKRLPDSHADSQTGSIGLSWVGEKGFIGVAYSDRRDQYGLPAHSHEYDDCHADIIWQKSLINKRYLQLYPHLLTEEDIDYDNPGLSCGFHDDDNAHAHTHSGRPWIDLRNKRYELRAEWKQPFPGFEALRVHLNRNDYRHDEKAGDAVENFFNNQTQNARIELRHQPIGRLKGSWGVQYLQQKSSALSAISEAVKQPMLLDNKVQHYSFFGVEQANWDNFTLEGGVRVEKQKASIQYDKALIDRENYYNHPLPDLGAHRQTARSFALSGNWYFTPQHKLSLTASHQERLPSTQELYAHGKHVATNTFEVGNKHLNKERSNNIELALGYEGDRWQYNLALYRNRFGNYIYAQTLNDGRGPKSIEDDSEMKLVRYNQSGADFYGAEGEIYFKPTPRYRIGVSGDYVRGRLKNLPSLPGREDAYGNRPFIAQDDQNAPRVPAARLGFHLKASLTDRIDANLDYYRVFAQNKLARYETRTPGHHMLNLGANYRRNTRYGEWNWYVKADNLLNQSVYAHSSFLSDTPQMGRSFTGGVNVKF

SEQ ID NO: 6492 - protein, 156 aa, Neisseria meningitidis; identical to SEQ ID NO: 4862

SEQ ID NO: 6493 - protein, 442 aa, Neisseria meningitidis
MKKVFIRTFGCQMNEYDSDKMLAVLAEEHGGIEQVTQADEADIILFNTCSVREKAQEKVFSDLGRVRPLKEKNPGLIIGVAGCVASQEGENIIKRAPYVDVVFGPQTLHRLPKMIVDKETSGLSQVDISFPEIEKFDHLPPARVEGGAAFVSIMEGCSKYCSFCVVPYTRGEEFSRPLNDVLTEIANLAQQGVKEINLLGQNVNAYRGEMDDGEICDFATLLRIVHEIPGIERMRFTTSHPREFTDSIIECYRDLPKLVSHLHLPIQSGSDRVLSAMKRGYTALEYKSIIRKLRAIRPDLCLSSDFIVGFPGETEREFEQTLKLVKDIAFDLSFVFIYSPRPGTPAANLPDDTPHEEKVRRLEALNEVIEAETARINQTMVGTVQRCLVEGISKKDPDQLQARTANNRVVNFTGTPDMINQMIDLEITEAYTFSLRGKVVEA

SEQ ID NO: 6494 - protein, 231 aa, Neisseria meningitidis; identical to SEQ ID NO: 2520

SEQ ID NO: 6495 - protein, 494 aa, Neisseria meningitidis
MNMKYKDLRDFIAMLEQQGKLKRVAHPISPYLEMTEIADRVLRAEGPALLFENPIKPDGTRYGYPVLANLFGTPERVAMGMGADSVSKLREIGQTLAYLKEPEPPKGIKDAFSKLPLLKDIWSMAPNVVKNAPCQEIVWEGEDVDLYQLPIQHCWPEDVAPLVTWGLTVTRGPHKKRQNLGIYRQQLIGKNKLIMRWLSHRGGALDYQEFRKLNPDTPYPVAVVLGCDPATILGAVTPVPDTLSEYQFAGLLRGSRTELVKCIGNDLQVPARAEIVLEGVIHPNETALEGPYGDHTGYYNEQDYFPVFTVERITMRENPIYHSTYTGKPPDEPAVLGVALNEVFVPLLQKQFPEITDFYLPPEGCSYRMAVVSMKKQYAGHAKRVMMGCWSFLRQFMYTKFIIVVDDDVNVRDWKEVIWAVTTRMDPVRDTVLVENTPIDYLDFASPVSGLGGKMGLDATNKWPGETDREWGRVIKKDPAVTAKIDGIWEELGL

SEQ ID NO: 6496 - protein, 134 aa, Neisseria meningitidis
MRKSRLSRYKQNKLIELFVAGVTARTAAELVGVNKSTSAYYFHRLRLLIYQNSPHLEMFDGEVEADESYFAERQNHINGIGNFWNRAKRHLRKFDGIPKAHFELYLKGYERRFNNSEIKVQISILKQLVKSSLS

SEQ ID NO: 6497 - protein, 240 aa, Neisseria meningitidis; identical to SEQ ID NO: 551

SEQ ID NO: 6498 - protein, 599 aa, Neisseria meningitidis
LEVGAKPAFFALQSAPDLLLNLPVWKNTFMKASQFFISTLKEAPAEAALASHKLMIRAGLIKANASGLYTWMPMGLRVLRKVENVVREEMARAGSVELLMPVVQPAELWQESGRWEFYGKELLRLKDRHDRDFCMGPTCEEVIADIVRKEINSYKQLPKNFYHIQTKFRDEVRPRFGVMRAREFVMKDAYSFHADYASLQTTYQDMYDAYCRIFTRLGLAFRPVAADTGSIGGTGSHEFQVLAESGEDVIAYSDTSDYAANVELAPTLPLKGERAAAQAELTKVHTPNVKTIESLVEFLNIPVEQTLKSIVVEGENEGEIVLLLLRGDHEFNDIKAEKLAGVKSPLTMADPAAIRAQFGANGGSLGPVGFTGKVYADFATEKDADWVIGANEDGYHYTGFNFGRDAAEPEFVDLRNVVEGDESPDGQGRLKLTRGIEVGHVFQLRDKYTHAMNVNFLDNNGKSQIMEMGCYGIGITRVVAAAIEQNNDEKGIIWTKAMAPFEVVIVPMNYKKSDTVREAADKIYAELLAAGADVLLDDRDERAGVLLNDSELLGIPHRIVIGDRALKEGNVEYAERRNNEAQAVAIGEIVARVTASLNA

SEQ ID NO: 6499 - protein, 187 aa, Neisseria meningitidis
MKKIIIAALAAAAIGTTSAATYKVDEYHANARFAIDHFNTSTNVGGFYGLTGSVEFDQAKRDGKIDITIPVANLQSGSQHFTDHLKSADIFDAAQYPNIRFVSTKFNFNGKKLVSVDGNLTMHGKTAPVKLKAEKFNCYQSPMLKTEVCGGDFSTTIDRTQWGVDYLVNVGMTKSVRIDIQIEAAKQ

SEQ ID NO: 6500 - protein, 407 aa, Neisseria meningitidis
MSGNASSPSSSSAIGLIWFGAAVSIAEISTGTLLAPLGWQRGLAALLLGHAVGGALFFAAAYIGALTGRSSMESVRLSFGKRGSVLFSVANMLQLAGWTAVMIYAGATVSSALGKVLWDGESFVWWALANGALIVLWLVFGARKTGGLKTVSMLLMLLAVLWLSAEVFSTAGSTAAQVSDGMSFGTAVELSAVMPLSWLPLAADYTRHARRPFAATLTATLAYTLTGCWMYALGLAAALFTGETDVAKILLGAGLGAAGILAVVLSTVTTTFLDAYSAGASANNISARFAETPVAVGVTLIGTVLAVMLPVTEYENFLLLIGSVFAPMAAVLIADFFVLKRREEIEGFDFAGLVLWLAGFILYRFLLSSGWESSIGLTAPVMSAVAIATVSVRLFFKKTQSLQRNPS

SEQ ID NO: 6501 - protein, 1306 aa, Neisseria meningitidis
LNYIIAFSNSPETDFSDGIQIKTAKHGHTMTTTTAPQRIREIPYNYTSYTDREIVIRLLGDEAWQILQDLRGQRKTGRSARMLFEVLGDIWVVVRNPYLVDDLLEHPKRRAALVREMRHRLNEIRKRRDDNRQVDVLVAAAEKAVERFDSSFDETSQKRRQILERLSKITKPHNIMFDGLARVTHVTDATDWRVEYPFVVVNPDTEAEIAPLVRALIELDLVIIPRGGGTGYTGGAIPLDANSAVINTEKLDKHRGVEYVELAGLDGKHPIIRCGAGVVTRRVEETAHQAGLVFAVDPTSADASCVGGNVAMNAGGKKAVLWGTALDNLAYWNMVNPQGEWLRIERVRHNFGKIHDEETAVFDVHTLDSDGINIVKTERLEIPGHKFRKVGLGKDVTDKFLSGLPGVQKEGTDGIITSVAFVLHKMPKYTRTVCMEFFGTVATATPSIVEIRDFLLAHESVRLAGLEHLDWRYVRAVGYATKAAGKGRPKMVLLADVVSDDEAAVEAAAEHICELARARDGEGFIAVSPEARKTFWLDRSRTAAIAKHTNAFKINEDVVIPLERLGEYSDGIERINIELSIQNKLKLCAALEQYLSGKLPIDKMGTDLPTAELLGERGKHALAHVSAVKTRWEWLLANLDTPLADYKARYGAAVHAAPEAKNNESCFIAFRDFRLRVSVKADVMKPLSEIFSGKTDTKIIQGLGKIHAKTVRSRVFVALHMHAGDGNVHTNIPVNSDDAEMLQTAYRSVERIMKIARSLNGVISGEHGIGITKLEFLSDEEMQPFWDYKNQVDPKHTFNRHKLMKGSDLRNAYTPSFELLGAESLIMEKSNLGTIADSVKDCLRCGKCKPVCSTHVPRANLLYSPRNKILGVGLLIEAFLYEEQTRRGVSIKHFEELMDIGDHCTVCHRCVKPCPVNIDFGDVTVAVRNYLADSGHKRFAPAAAMGMAFLNATGPKTIKALRAAMIQIGFPAQNFAYKIGKLLPIGTKKQKAEPKATVGKAPIKEQVIHFINRPLPKNVPAKTPRSLLGIEDGKSIPIIRNPAAPEDAEAVFYFPGCGSERLFSQIGLAVQAMLWHVGVQTVLPPGYMCCGYPQDAGGNKAKAEEMSTNNRVAFHRMANTLNYLDIKTVVVSCGTCYDQLEKYRFEEIFPGCRIIDIHEYLLEKGVKLDGVKGQQYLYHDPCHTPIKTMNATQMASSLMGQKVVLSDRCCGESGMFAVKRPDIATQVKFRKQEEIEKNLKELPQGEPVKMLTSCPACLQGLSRYADDNNMPADYIVIEMAKYILGENWLDEFVKKANNGGVEKVLL

SEQ ID NO: 6502 - protein, 392 aa, Neisseria meningitidis
LAAQTIQVVNKSDDLVASAIQTANKSIAVYCRYIRPNDVGTTGSHQSGFYIQKHFSDDLFDVVCQKGTNKTISIKINWQDGSVTNSNFKYYGQGTRNEARITGFGKNFEFLSDKYSGSLLVLCRACYKDLLFHAFVLSSDEDIEIFIAETNILPGSLYLPKKQEVEDNLTKLFSLFPNFPKTEEMAVLARENIALNKTNVSNVLKQWVSKEYELFSIFEKREFEIIKSKITDLDSFINFAHSFTNRRKARAGKSLELHLSRIFDEFSLKFETQAKTEGKKKPDFLFPGSEEYHAMDESGNFIFQTEKLTMLGSKTTCKDRWRQVLNEADRIPHKHLFTLQEGISDTQIQEMSDENLTLVVPKESVKTFGTFGKTHVLTLENFIKYIKSQQVS

SEQ ID NO: 6503 - protein, 595 aa, Neisseria meningitidis
MKLPLSYLPNIRFLSWCCLLAGIIAPATLLASPNPAEIRMQQDIQQRQREEQLRQTMQPESDVRLHQKNTGETVNQLMGDDSSQPCFAINEVVLEGEHHARFQFALKRALRETGFQAGKCLHAGNINQIMSLAQNALIGRGYTTTRILAAPQDLNSGKLQLTLIPSYLRSIRIDRSNDDQTHAGRIAAFQNKFPTRSNDLLNLRDLEQGLENLKRLPTAEADLQIVPVEGEPNQSDVVVQWRQRLLPYRVSVGMDNSGSEATGKYQGNITFSADNPLGLSDMFYVNYGRSIGGTPDEESFDGHRKEGGSNNYAVHYSAPFGKWTWAFNHNGYRYHQAVSGLSEVYDYNGKSYNTDFGFNRLLYRDAKRKTYLGVKLWMRETKSYIDDAELTVQRRKTAGWLAELSHKEYIGRSTADFKLKYKRGTGMKDALRAPEEAFGEGTSRMKIWTASADVNTPFQIGKQLFAYDTSVHAQWNKTPLTSQDKLAIGGHHTVRGFDGEMSLSAERGWYWRNDLSWQFKPGHQLYLGADVGHVSGQSAKWLSGQTLVGTAIGIRGQIKLGGNLHYDIFTGRALKKPEFFQSRKWASGFQVGYTF

SEQ ID NO: 6504 - protein, 182 aa, Neisseria meningitidis
LTGRLKTKRGTSDIQGTLMKKNILEFWVGLFVLIGAAAVAFLAFRVAGGAAFGGSDKTYAVYADFGDIGGLKVNAPVKSAGVLVGRVGAIGLDPKSYQARVRLDLDGKYQFSSDVSAQILTSGLLGEQYIGLQQGGDTENLAAGDTISVTSSAMVLENLIGKFMTSFAEKNADGGNAEKAAE

SEQ ID NO: 6505 - protein, 485 aa, Neisseria meningitidis
MSRHPAPTGEKTFFGHPFQLSTLFHIELWERFSFYGMQGILLIYLYYTADKGGLGIDKTLAGGIVGAYSGSVYLSTILGAWFADRVWGAEKTLFLSGIVVMLGHIVLAAAPGLYGLLIGLIFIALGSGGVKSTASSMVGALYEQDEMRPLRDAGFSIFYIAINIGGFLGPLLTGLLQENIGFHYGFGAAAVGMAFGLWRYSLGRKNLPHPTVPHPLSKGQGKTAAAVGIALIAALATAIKTGLVNLDNFSGILLSTVILAVIAYFARLLTNPRVSSDNKRHIIAYIPLFLTICMFWAVWFQIYTVATVYFDETVNRTIGSFTVPVAWKDSMQSLWVILFSGLMAAMWTKMGRKQPKTPLKFAMAVFVTGASFLGFVPFISSGTPMPIAVFALIVLAITIGELMISPIALSISTKIAPPLFKTQMVALNFLAFSLGFTLGGVLFEKGYQAGDEIGFYRLLFYIGAATGFLLLLLVPKLNKMLEGTD

SEQ ID NO: 6506 - protein, 126 aa, Neisseria meningitidis
MPSVELLLVIVGLPRGTFYYQLVVQSAEDKYADLKRHIHDIYQKQLKDNGLVQSMSRKGNCLDNAAMESFFGTLKSECFHTCKYDSVTELEAVLHEYIRYYNNDRIKLKLKGLSPVQYRIQSLKAA

SEQ ID NO: 6507 - protein, 57 aa, Neisseria meningitidis; identical to SEQ ID NO: 735

SEQ ID NO: 6508 - protein, 298 aa, Neisseria meningitidis
MKGFTIIEFLVAGLLSMIVLMAVGSSYFTSRKLNDAANERLAAQQDLRNAATLIVRDARMAGGFGCFNMSEHPATDVIPDTTQQNSPFSLKRNGIDKLIPIAESSNINYQNFFQVGSALIFQYGIDDVNASTATTVVSSCAAISKPGKQIPTLEDAKKELKIPDQDKEQNGNIARQRHVVNAYAVGRIADEEGLFRFQLDDKGKWGNPQLLVKKVRHMKVRYIYVSGCPEDDDAGKEETFKYTDKFDSAQNAVTPAGVEVLLSSGTDTKIAASSDNHIYAYRIDATIRGGNVCANRTL

SEQ ID NO: 6509 - protein, 252 aa, Neisseria meningitidis
MNPKISSDHTEDAVRLSKRMAQLGLCSRREADGYIEQGWVTVNGKTAVLGQKVSPADRIELNKKAHEQQAARITILLNKPVGYVSAQAEKGYKSAAELITPENHWEGDTGRIRFDPKHKIGLAPAGRLDIDSVGLLVLTQDGRIAKQLIGENSGSEKEYLVRVRGKLDEKGLALLNHGLSLDGEKLRPAQVEWQNEDQLRFVLKQGKKRQIRRMCELVGLRVVGLKRIRMGKVKLGRLPPGKWRYLAPGESF

SEQ ID NO: 6510 - protein, 548 aa, Neisseria meningitidis
MKQSARIKNMNQTLKNTLGICALLAFCFGAAIASGYHLEYEYGYRYSAVGALASVVFLLLLARGFPRVSSVVLLIYVGTTALYLPVGWLYGAPSYQIVGSILESNPAEAREFVGNLPGSLYFVQALFFIFGLTVWKYCVSGGVFADVKNYKRRSKIWLTILLTLILSCAVMDKIASDKDLREPDAGLLLNIFDLYYDLASAPAQYAAKRAHILEAAKKASTWHIRHVAPKYKNYVVVIGESARSDYMNVYGFPLPDTPFLSQTKGLLINGYQSTAHATNLSLPQTLGLPGEPNNNIVSLAKQAGFRTAWLSNQGMLGHFANEISTYALRSDYPWFTQRGDYGKSAGLSDRLLLPAFKRVLIGNAGTKPRLIVMHLMGSHSDFCTRLDKDARRFQYQTEKISCYVSTIAQTDKFLEDTVKILNENKESWSLVYFSDHGLMHVGKGGERTLTHGAWKRQSYGVPLVKISSDDTRREMIKVRRSAFNFLRGFGSWTGIETDELPDDGYDFWGNVPDVQGEGNNLAFIDGLPDDPAPWYAGKGKSTKNTSKK

SEQ ID NO: 6511 - protein, 159 aa, Neisseria meningitidis
MPESIFKQISLDILKLHRDSVYSLLATSGCNCQVHEAAYVNIDGKYYIALSCEPEVGEVKTGILLIEDESRNLRLSWVGSARELDCKDNAYKRALSALSRKLGRCKDRLHTAVQPFLLELVPEKGRFSVGDEEVWISRNDLVRALYPVGYSMRQAVFQI

SEQ ID NO: 6512 - protein, 245 aa, Neisseria meningitidis
MALQDRTGQKVPSVVFRTRVGDTWKDVSTDDLFKGKKVVVFSLPGAFTPTCSSSHLPRYNELFGAFKENGVDAICCVSVNDTFVMNAWSAEEESDNIYMIPDGNGEFTEGMGMLVGKEDLGFGKRSWRYSMLVNDGVVEKMFIEPEEPGDPFKVSDADTMLQFVAPDWKAQESVAIFTKPGCQFCAKAKQALQDKGLSYEEIVLGKDATVTSVRAITGKMTAPQVFIGGKYIGGSEDLEAYLAKN

SEQ ID NO: 6513 - protein, 407 aa, Neisseria meningitidis
VGRRKLWFALAAAGVIGGLVGIVLTELMHFIQHTAYGYGADGVYTSFREGVAQASGMRRVAVLTLCGAVAGSGWWLLKRFGKPQIEIKAALKQPLQGLPFLTTVFHVLLQIITVGLGSPLGREVAPREMTAAFAFAGGKRLGLDEGEMRLLIACASGAGLAAVYNVPLASTLFILEAMLGVWTQQAVAAALLTSVIATAVARIGLGDVQQYHPANLTVNTSLLWFSAVIGPILGVAAVFFQRTAQKFPFIKRDNIKIIPLAVCMFALIGVISVWFPEILGNGKAGNQLTFGGLTDWQHSLGLTAVKWLVVLMALAVGAYGGLITPSMMLGSTIAFAAATAWNSVFPEMSSESAAIVGAAVFLGVSLKMPLTAIAFILELTYAPVALLMPLCTGMAGAVWVAKKMGFK

SEQ ID NO: 6514 - protein, 262 aa, Neisseria meningitidis
MLTLYGETFPSRLLLGTAAYPTPEILKQSIQTAQPAMITVSLRRAGSGGEAHGQGFWSLLQETGVPVLPNTAGCQSVQEAVTTAQMAREVFETDWIKLELIGDDDTLQPDVFQLVEAAEILIKDGFKVLPYCTEDLIACRRLLDAGCQALMPWAAPIGTGLGAVHAYALNVLRERLPDTPLIIDAGLGLPSQAAQVMEWGFDGVLLNTAVSRSGDPVNMARAFALAVESGRLAFEAGPVEARDKAQASTPTVGQPFWHSAEY

SEQ ID NO: 6515 - protein, 95 aa, Neisseria meningitidis
MNKEIVGIFFIPAGIISMCMAALWQMYVMMTETYTLNRFKDKELVWRVALLFISFSLAVYLLCPNSRKKGIVFFILGGGGAAMYLLARMWLPFSK

SEQ ID NO: 6516 - protein, 517 aa, Neisseria meningitidis
MPSERSADCCPAHFVVKFRKSTLNCGRRFDRPPINGNRQRKPMIHTEPSAQPSTMDTAAFLKHIESAFRRIFSDGIDLMRYLPEDKWLALKQAGLLLPFLDKKYGGRKGSQFEIQEVLRIAGHYGVPVTLRTGIEGALVLQPLQEFGDEAQVAQGLEMIFKGEGGGLGVTEPETSGAAIAREMQSYYEYIDGQTIYVNAAKYWQGNSQSDFLLVAAKERKNGKLAKVIDLLLVPKTYIRCETLASEGLRAVRYAVNRIDAEMPATAVMKLSQSDAAGLRAFQNIFIRSRLQLIGMTHGIMEYILENLERYVRNDIKFVDYERREIRRRHQVSEILYRYVCHSVSPVAPVAHQLMEANIVKTLATEYTYAAAQMLQKLLGAKGFERGHTAGNIAIDIRPFTIFEGPNDMLYAEIYDQFVRATAEEKEAGMKLDKNQTLLDRLQTDARFAAVARDYTLPEDIRSFLQEHTLTDACALQKVFIGKIIARLFVFVQAKHEDTAAFLLNDIRKDILDCRYCG

SEQ ID NO: 6517 - protein, 307 aa, Neisseria meningitidis
MQYSTLAGQTDNSLVSNNFGFLRLPLNFMPYESHADWVITGVPYDMAVSGRSGARFGPEAIRRASVNLAWEHRRFPWTFDVRERLNIIDCGDLVFSFGDSRDFVEKMEAHAGKLLSSGKRCLSLGGDHFITLPLLRAHARYFGKLALIHFDAHTDTYDNGSEYDHGTMFYTAPKEGLIDPSRSVQIGIRTEHSKKLPFTVLSAPKVNEDSVEETVRKIKETVGNMPVYLTFDIDCLDPSFAPGTGTPVCGGLSSDRALKILRGLTDLDIVGMDVVEVAPSYDQSDITALAGATIALEMLYLQGAKKD

SEQ ID NO: 6518 - protein, 349 aa, Neisseria meningitidis
MSKQPTSKRQWRDGAAPSAKKTAKPFKSKARPKDETGKTASQPYGQKASDGIKPQNVPKQRAAKAKKLVVRNPNQKIMEHARDLKERRSDLSRMEPERLQKVLAASGVGSRREMEEWITNGWITVNGKTAQLGDKVTPDDHVTVKGSIIKLKWADRLPRIILYYKQEGEIVSRDDPQGRVSIFDRLPQAASSRWVAIGRLDINTSGLLILTTSGELVQRFAHPSFEVEREYAVRVLGGLTGEQMRVLTEEGVMLEDGLAKVERIREQGGEGANKWYNVVIKEGRNREVRRIFESQGLTVSRLVRIGFGPIGLPNRLKRGQFYELNPAEVANIIKWADMLLPGERRRKKA

SEQ ID NO: 6519 - protein, 380 aa, Neisseria meningitidis
MNTLYTLFATCPRGLETVLSQELESLGCTDVQVFDGGVSCRGGLEQVYAANLHSRTASRILLRLTKGTYRNERDIYKLAKNINWFNWFTLQQTFKVKVEAKRANVKSIQFVGLTVKDAVCDAFRDIYDARPSVDKAAPDVRIHAFLNERNVEIFIDTSGEALFKRGYRLDTGEAPLRENLAAGLLLSAGYDGTQPFQDPFCGSGTIAIEAAWIAARRAPGMMRRFGFEKLQNFDKTLWSDLRRRAEAQTRPVRAPIAGSDNDRRIVQTALDNARRAGVDDIVSFSVADAQSVRPNGENGIMVSNPPYGVRLEEVRALQALYPQLGTWLKKHYAGWLAAMFTGDREMPKFMCLSPKRKIPLYNGNIDCRLFLIDMVEGSNR

SEQ ID NO: 6520 - protein, 268 aa, Neisseria meningitidis
MPTVFIFLTAVYAGLGAFAWHCQQQGCGRDYPWKTELPVLGAALTVHGAALLMPVIQDKIIIMGFGYSGSLIVWMMLFIYFAGSFFYPLRGVQLLLYPCAALMLLSGLVFPGKFSGYEITDLPFMLHIGTSLLAYGLFGIATLLSVLTLLLNRSLHRRSFSKLAGFLPSLLSLEKLMFQAMWAGFILLTYSVVSGTFFAEAVFGKPMTFTHKTVFGILSWLIYGGLLLKHSMTAWRGKKAAVWTIIGFVSLMIAYMGSKFVLEIILKR

SEQ ID NO: 6521 - protein, 208 aa, Neisseria meningitidis
MNVNVINHPLVRHKLTLMREADCSTYKFRTLATELARLMAYEASRDFEIEKYLIDGWCGQIEGDRIKGKTLTVVPILRAGLGMLDGVLDLIPTAKISVVGLQRDEETLKPISYFEKFVDSMDERPALIIDPMLATGGSMVATIDLLKAKGCKNIKALVLVAAPEGVKAVNDAHPDVTIYTAALDSHLNENGYIIPGLGDAGDKIFGTR

SEQ ID NO: 6522 - protein, 167 aa, Neisseria meningitidis; identical to SEQ ID NO: 189

SEQ ID NO: 6523 - protein, 124 aa, Neisseria meningitidis
MIVLHGIPNCDTVKKAKNRLAGYGLEFEFRDFKKQRPSEAEICSWLEQVPLATLLNKRGTSWRKLDAETQQKVLSSTAEAVKLMSEMPSLIKRPVLECGGKVYAGFSEETYDGIFNRQAPCRQG

SEQ ID NO: 6524 - protein, 291 aa, Neisseria meningitidis
MSQHSAGARFRQAVKESNPLAVAGCVNAYFARLATQSGFKAIYLSGGGVAACSCGIPDLGITTMEDVLIDARRITDNVDTPLLVDIDVGWGGAFNIARTIRNFERAGVAAVHIEDQVAQKRCGHRPNKAIVSKDEMVDRIKAAVDARVDENFVIMARTDALAVEGLDAAIERAQACVEAGADMIFPEAMTDLNMYRQFADAVKVPVLANITEFGSTPLYTQSELAENGVSLVLYPLSSFRAASKAALNVYEAIMRDGTQAAVVDSMQTRAELYEHLNYHAFEQKLDKLFQK

SEQ ID NO: 6525 - protein, 57 aa, Neisseria meningitidis; identical to SEQ ID NO: 2122

SEQ ID NO: 6526 - protein, 513 aa, Neisseria meningitidis
MKIGIPRESLSGETRVACTPATVALLGKLGFETVVESGAGLAASLDDAAYQTAGATVADKAAVWVCPLIYKVNAPSEQELPLLNEGQTIVSFLWPRQNEALVEALRAKKVNALAMDMVPRISRAQALDALSSMANISGYRAVIEAANAFGRFFTGQITAAGKVPPAQVLVIGAGVAGLAAIGTANSLGAVVRAFDTRLEVAEQIESMGGKFLKLDFPQESGGSGDGYAKVMSDEFIAAEMKLFAEQAKEVDIIITTAAIPGKPAPKLITKEMVESMKSGSVIVDLAAATGGNCELTRPGELSVTGNGVKIIGYTDMANRLAGQSSQLYATNLVNLTKLLSPNKDGEITLDFEDVIIRNMTVTHDGEITFPPPPIQVSAQPQQTPSEKAVPAAKPEPKPVPLWKKLAPAVIAAVLVLWVGAVAPAAFLNHFIVFVLACVIGYYVVWNVSHSLHTPLMSVTNAISGIIVVGALLQIGQGNGFVSLLSFVAILIAGINIFGGFAVTRRMLNMFKKG

SEQ ID NO: 6527 - protein, 146 aa, Neisseria meningitidis
MGSSDSFKEKKEIFEIGTPAYRQKLIDVWKKSINGNEKSWVLFENGTCVILLEPEKDLAKQAKEMLSKWGKVQIGTPSADFGIITLDSGDGYAVSCHHPEIFTLILKEEGLDEDFKIGIEGRSHRDCDAEEPKVIHIEDKRTIETP

SEQ ID NO: 6528 - protein, 176 aa, Neisseria meningitidis
VPVENENMNPFETKSVTFAEPIEMLYACHGKVRRFCGQVAMLSDYIAENGCNQIVLQTIRQIAQYFNVAAPLHHEDEEENFFPLLLQYAPQAQESVDELLRQHIGLHDNWAAVSAEFAKLEADNAYVPDEEAFKRFVAGYDVHLAIEEPLFDMGNTFIPKEKLTEIGEIMAARRRK

SEQ ID NO: 6529 - protein, 323 aa, Neisseria meningitidis; identical to SEQ ID NO: 3380

SEQ ID NO: 6530 - protein, 157 aa, Neisseria meningitidis
MLSAESLKQIDIELAKYPADQRRSAIMGALRIAQTEKGWLAPETIAFVADYIGITPAQAYEVATFYNMYDLEPVGKYKLTVCTNLPCALRGGMATGEYLKQKLGIGYGETTPDGKFTLVEGECMGACGDAPVMLVNNHSMCSFMTEEAIEKKLAELE

SEQ ID NO: 6531 - protein, 566 aa, Neisseria meningitidis
MSVKIQTRSVNTDVFNHLLTAGADPLIAQLCASRGVQSPAELDDKLASLLPYQSLTNCEAAARRLADAVGRKEKILIVADYDADGATACAVGMSGLAAMGAKVDFLVPNRFEHGYGLTPELAEIAAAQGVDLLITVDNGIASIAGVARAQALGLDVIVTDHHLPAETVPDCIIVNPNQKGCGFPSKSLAGVGVIFYVLMALRAELRRRNYFSDGIKEPNLGELLDLVALGTVADVVPLDHNNRILVSQGLKRMRSGKMRPGIRALFEVARRDWRKAQPFDMGFALGPRINAAGRLDDMSVGIACLLARDDSEAQELAAQLNNLNIERREIEQSMLQDALNDFPETLPSGQMTLVAYRDDFHQGVVGIVASRLKDRFYRPTIVFAPADNGEVRGSGRSIPNLHLRDALDLVSKRHPDLILKFGGHAMAAGLSILEHNIPAFQTTFEEAVREMVCEDDLSQTFITDGSLPACDITLEQAQNLARHVWGQGFAPPSFTDEFHVVRQQPLGAEGKHKKVWLQKDGCEFEAMFWRCSEDIPEYIRTVYRPVANEWRNNLELQLYIDYWEAA

SEQ ID NO: 6532 - protein, 202 aa, Neisseria meningitidis; identical to SEQ ID NO: 597

SEQ ID NO: 6533 - protein, 234 aa, Neisseria meningitidis
MGFPMLGTTALAFIMPLSKVVALVALPSLLMSLLVLCSNNKKGFWQEIVYYLKTYKLLAIGSVVGSILGVKLLLILPVSWLLLLMAIITLYYSVNGILNVCAKAKNIQVVANNKNMVLFGFLAGIIGGSTNAMSPILLIFLLSETENKNRIVKSSNLCYLLAKIVQIYMLRDQYWLLNKSEYGLIFLLSVLSVIGLYVGIRLRTKISPNFFKMLIFIVLLVLALKIGHSGLIKL

SEQ ID NO: 6534 - protein, 483 aa, Neisseria meningitidis
MNLPIQKFMMLFAAAISLLQIPISHANGLDARLRDDMQAKHYEPGGKYHLFGNARGSVKKRVYAVQTFDATAVSPVLPITHERTGFEGVIGYETHFSGHGHEVHSPFDHHDSKSTSDFSGGVDGGFTVYQLHRTGSEIHPEDGYDGPQGSDYPPPGGARDIYSYYVKGTSTKTKTNIVPQAPFSDRWLKENAGAASGFFSRADEAGKLIWESDPNKNWWANRMDDVRGIVQGAVNPFLMGFQGVGIGAITDSAVSPVTDTAAQQTLQGINDLGKLSPEAQLAAASLLQDSAFAVKDGINSAKQWADAHPNITATAQTALSAAEAAGTVWRGKKVELNPTKWDWVKNTGYKKPAARHMQTLDGEMAGGNKPIKSLPNSAAEKRKQNFEKFNSNWSSASFDSVHKTLTPNAPGILSPDKVKTRYTSLDGKITIIKDNENNYFRIHDNSRKQYLDSNGNAVKTGNLQGKQAKDYLQQQTHIRNLDK

SEQ ID NO: 6535 - protein, 504 aa, Neisseria meningitidis
LYFRYGFLVVWCAAGVSAAYGADAPAILDDKALLQVQRSVSDKWAESDWKVENDAPRVVDGDFLLAHPKMLEHSLRDALNGNQADLIASLADLYAKLPDYDAVLYGRARALLAKLAGRPAEAVARYRELHGENAADERILLDLAAAEFDDFRLKSAERHFAEAAKLDLPAPVLENVGRFRKKTEGLTGWRFSGGISPAVNRNANNAAPQYCRQNGGRQICSVSRAERAAGLNYEIEAEKLTPLADNHYLLFRSNIGGTSYYFSKKSAYDDGFGRAYLGWQYKNARQTAGILPFYQVQLSGSDGFDAKTKRVNNRRLPPYMLAHGVGVQLSHTYRPNPGWQFSVALEHYRQRYREQDRAEYNNGRQDGFYVSSAKRLGESATVFGGWQFVRFVPKRETVGGAVNNAAYRRNGVYAGWAQEWRQLGGLNSRVSASYARRNYKGIAAFSTEAQRNREWNVSLALSHDKLSYKGIVPALNYRFGRTESNVPYAKRRNSEVFVSADWRF

SEQ ID NO: 6536 - protein, 205 aa, Neisseria meningitidis
MVIAAIMAMIALPNMSQWIASRRIASHAERIANLLRFSRGEAVRLNLPVYICPVQVKKDGTPNNKCDSGKKGQGMLAFGDKNGNKGYDNDTEDVLLRSVVLNDDINDKRINYAFNHIAFGQTQPTTDRVVWTFNQNGTFGYTKDQHLTKQSSFFYSDGYIQIVLTDAKAVSADEKKFRSAVVLINSSGRVEVCPRGDRRTMCQYK

SEQ ID NO: 6537 - protein, 66 aa, Neisseria meningitidis; identical to SEQ ID NO: 421

SEQ ID NO: 6538 - protein, 83 aa, Neisseria meningitidis; identical to SEQ ID NO: 3011

SEQ ID NO: 6539 - protein, 407 aa, Neisseria meningitidis
MKTVVWIVVLFAAAVGLALASGIYTGDVYIVLGQTMLRINLHAFVLGSLIAVVVWYFLFKFIIGVLNIPEKMQRFGSARKGRKAALALNKAGLAYFEGRFEKAELEASRVLVNKEAGDNRTLALMLGAHAAGQMENIELRDRYLAEIAKLPEKQQLSRYLLLAESALNRRDYEAAEANLHAAAKMNANLTRLVRLQLRYAFDRGDALQVLAKTEKLSKAGALGKSEMERYQNWAYRRQLADAADAAALKTCLKRIPDSLKNGELSVSVAEKYERLGLYADAVKWVKQHYPHNRRPELLEAFVESVRFLGEREQQKAIDFADAWLKEQPDNALLLMYLGRLAYGRKLWGKAKGYLEASIALKPSISARLVLAKVFDEIGEPQKAEAQRNLVLEAVSDDERHAALEQHS

SEQ ID NO: 6540 - protein, 597 aa, Neisseria meningitidis
MQLDIDRLVAYFGGVNALAEALKQHDPENAATTAAIYKWRTRGSLPLAQLQKLTALAESQGRPLDLNAFLQKNESLERTEMTQANRVIIFDTTLRDGEQSPGAAMTKEEKIRVARQLEKLGVDIIEAGFAAASPGDFEAVNAIAKTITKSTVCSLSRAIERDIRQAGEAVAPAPKKRIHTFIATSPIHMEYKLKMKPKQVIEAAVKAVKIAREYTDDVEFSCEDALRSEIDFLAEICGAVIEAGATTINIPDTVGYSIPYKTEEFFRELIVKTPNGGKVVWSAHCHNDLGLAVANSLAALKGGARQVECTVNGLGERAGNASVEEIVMALKVRHDLFGLETGIDTTQIVPSSKLVSTITGYPVQPNKAIVGANAFSHESGIHQDGVLKHRETYEIMSAESVGWATNRLSLGKLSGRNAFKTKLADLGIELESEEALNAAFARFKELADKKREIFDEDLHALVSDEMGNMNTESYKFISQKISTETGEEPRADIVFSIKGEEKRASATGSGPVDAIFKAIESVAQSGAALQIYSVNAVTQGTESQGETSVRLARGNRVVNGQGADTDVLVATAKAYLSALSKLEFSAAKPKAQGSGTI

SEQ ID NO: 6541 - protein, 140 aa, Neisseria meningitidis
MRPIFLSFVLFPILITACSTPDKSARWENIGTISNGNIHTYINKDSVRKNGNLMIFQDKKVVTNLKQERFANTPAYKTAIAEWEIHCNNKTYRLSSLQLFDTKNTEISTQNYTASSLRPMSILSGTLTEKQYETVCGKKL

SEQ ID NO: 6542 - protein, 41 aa, Neisseria meningitidis
MENIKTLLFLTAETNIPGKVILVSGRTDDTRHLVGLRPENT

SEQ ID NO: 6543 - protein, 123 aa, Neisseria meningitidis
MKLLFILLVLFVAVEHFYIAWLEMTQIPSEKAAEIFKLPYEFMEQKQVQTLFSNQGLYNGFLGIGLVWSRFAAPDNAVYGATTLFLGFVLIAAAWGAFSSGNKGILVKQGLPAMLAAAAVLAV

SEQ ID NO: 6544 - protein, 179 aa, Neisseria meningitidis; identical to SEQ ID NO: 403

SEQ ID NO: 6545 - protein, 334 aa, Neisseria meningitidis
MTIIVTGAAGFIGSNIVKALNQRGITDIVAVDNLSKGEKFKNLAECEIAHYLDKHEFIRQVREHILPYQNIEAVFHQGACSDTMNHDGLYMMDNNYQYTLDLLDWCQDERIPFLYASSAAVYGKGEIFREERELEKPLNVYGYSKFLFDQVLRRRMKEGLTAQVVGFRYFNVYGQHEQHKGRMASVAFHHFHQYREHGYVNLFGSNDGYGNGEQTRDFVSVEDVAKVNLYFFDHPELSGIYNLGTGRSQQFNELAAATVNACRAAEGKPEMSLKELVEEELIRYIPFPDALKGKYQSFTQADITKLREAGYKEEFFDVKSGVDRYVKWMLENLA

SEQ ID NO: 6546 - protein, 65 aa, Neisseria meningitidis
MSKIKVTAADGLRVPTEHNPHEYIGQEPVEVDGNSLYYRRMIDDGDLVVVEDAAPNTKTRNTKGE

SEQ ID NO: 6547 - protein, 349 aa, Neisseria meningitidis
MSSNQYIQSLELTNFTVLPNDTFEFSENLNVIVAENGCGKTHLLKILYSLLEVTSNTKNRLLKTELQKSFADKLLNVFRPDSLGRLSKRLQGRGRTEIVLKLQNGTTHSSLNFSSNSSSQVNVQSIGLKENEYTPTPIFLPSRELITLCPWFTSLYQNQSIPFEETWFDTCMQLNHPLAKGPRETKIRELLEPIENAMGGKVSEEQGRFYLSLTNTGGKIEAPLVAEGLRKFVMIARLIATGALLDKGYLFWDEPEANLNPKLIKVAARIIWSLSQQGIQVFIATHSLFLLRELELLKLENNTDLPVRFFSLIASDDGTKVEQGNSINDLNTLILLDENIMQADRYLNI

SEQ ID NO: 6548 - protein, 60 aa, Neisseria meningitidis; identical to SEQ ID NO: 3547

SEQ ID NO: 6549 - protein, 122 aa, Neisseria meningitidis; identical to SEQ ID NO: 66

SEQ ID NO: 6550 - protein, 77 aa, Neisseria meningitidis; identical to SEQ ID NO: 92

SEQ ID NO: 6551 - protein, 188 aa, Neisseria meningitidis
MLVHPEAMSVGALADKIRKIENWPQKGILFHDITPVLQSAEYFRLLVDLLVYRYMDQKIDIVAGLDARGFIIGAALAYQLNVGFVPIRKKGKLPFETVSQSYALEYGEAAVEIHTDAVKLGSRVLLVDDLIATGGTMLAGLELIRKLGGEIVEAAAILEFTDLQGGKNIRASGAPLFTLLQNEGCMKG

SEQ ID NO: 6552 - protein, 510 aa, Neisseria meningitidis
MCCSLSFAEPARIDDRIIKFRPSKLKFFESTGYRKINNEFSKFTEAANVEHIPTGAKARINAKITASVSRAAVLSGVGKLARLGAKLSTRAVPYVGTALLAHDVYETFKEDIQAQGYQYDPETDKFVKGYEYSNCLWYEDKRRINRTYGCYGVDSSIMRLMSDDSRFPEVKELMESQMYRLARPFWNWHKEELNKLSSLDWNNFVLNSCTFDWNGGDCVVNKGDDYRNGADFSLIRNSKYKEEMDAKKLEEILSLKVDANPDKYIKETGYPGYSEKVEVAPGTKVNMGPVTDRNGNPVQVVATFGRDSQGNTTVDVQVIPRPDLTPGSAEAPNAQPLPEVSPAENPANNPNPNENPGTSPNPEPDPDLNPDANPDTDGQPGTRPDSPAVPGRTNGRDGKDGKDGKDGGLLCKFFPDILACDRLPESNPAEDLNLPSETVNVEFQKSGIFQDSAQCPAPVTFTVTVLDSSRQFAFSFENACTIAERLRYMLLALAWAVAAFFCIRTVSREV

SEQ ID NO: 6553 - protein, 85 aa, Neisseria meningitidis
MKPRNLFFAGCLLTSATFAEDIGVPVELINVGNRIAMPSEGESLALLPFAEDVPPVRDAMPSEVPKSAAGGDVRGDRMRMPINIG

SEQ ID NO: 6554 - protein, 384 aa, Neisseria meningitidis
MKFIDEAKIEVAAGKGGNGATSFRREKFVPRGGPDGGDGGKGGSVWAEADENTNTLVEYRFVKRYQAKNGEKGHGSDRYGAGADDIVLKMPVGTLIRDLDTGETVADLTYHGQRVCLAKGGKGGLGNIHFKSSVNRAPKQSTPGEEGEARSLQLELKVLADVGLLGMPNAGKSTLITAVSAARPKIANYPFTTLHPNLGVVRIDENHSFVMADIPGLIEGAAEGAGLGHRFLKHLSRTGLLLHVVDLAPFDETVNPAEEALAIINELRKYDEELYGKPRWLVLNKLDMLDEEEAQTRTAAFLEAVGWDYPKPDDRFQFDMETPRLFQISALTHQGTQELVHQINQYLTEKKRIEAEKAEAEKAAANVEIIEQQPKTDTGVFKPE

SEQ ID NO: 6555 - protein, 437 aa, Neisseria meningitidis; identical to SEQ ID NO: 1149

SEQ ID NO: 6556 - protein, 91 aa, Neisseria meningitidis; identical to SEQ ID NO: 5612

SEQ ID NO: 6557 - protein, 456 aa, Neisseria meningitidis
MLDNLTGRFSNVFKNIRGQAKLTEDNIKEALREVRLALLEADVALPVVKEFINNVKEKALGQEVAGSLTPDQAFIGVVNKALTELMGRENKTLDLSVAPPAVVLMAGLQGAGKTTTVGKLARLLKNDQKKKVLVVSADVYRPAAIEQLRLLAEQVGVDFFPSDTNQKPVEIATAAVDYAKKHFYDVLMVDTAGRLAIDEEMMNEIKALHAAVNPVETLFVIDAMLGQDAVNTAQAFNEALPLTGVVLTKMDGDSRGGAALSVRHVTGKPIKFIGVGEKINGLEPFHPDRLAGRILGMGDVLTLIEDVQKGIDEEAAAKMAKKLHKGKGFDLNDFKEQIQQMRNMGGLENLMSKMPGELGQISKQIPEGTAEKAMGKVEAIINSMTPKERANPALLKASRKRRIAMGAGTTVQEVNKLLKQFEQMQQMMKMFSGNGLGKLMRMAKGMRGIKGMFPGL

SEQ ID NO: 6558 - protein, 459 aa, Neisseria meningitidis
MFAFKSLLDMPRGEALAVVVALIAAMGYTIISLEWLPHMSIIAAIVVLILYGLARGLKYNDMQQGMIGALNQGMGAIYLFFFIGLMVSALMMSGAIPTLMYYGFGLISPTYFYFSSFALCSVIGVSIGSSLTTCATVGVAFMGMAAAFQADMAMTAGAIVSGAFFGDKMSPLSDTTGISASIVGIDLFEHIKNMMYTTIPAWLISAALMLWLLPNVAAQDLNSVESFRSQLEATGLVHGYSLIPFALLVILALMRINAVVAMLFTVMVAVAVTYLHSTPDLRQLGAWFYGGYKLEGEAFKDVVKLISRGGLESMFFTQTIVILGMSLGGLLFALGVIPSLLEAIRTFLTNAGRATFSVAMTSVGVNFLIGEQYLSILLSGETFKPVYDKLGLHSRNLSRTLEDAGTVINPLVPWSVCGVFISHALGVPVWEYLPYAFFCYLSLALTLLFGWTGLTLSKK

SEQ ID NO: 6559 - protein, 211 aa, Neisseria meningitidis
MIVSIDVDAQKTFTPLCPDELPVNEGHLIVEELNAQAALADLRVMTKDAHHMVAKWLVDNPVDMLKPTGLPDADLTWVAHAMVGTRGYELLDGLPSAKEYDYCVWKGVDPELHPYGACFHDIEEKLSTGLIEWLRCQNTDTVIIGGLATDYCVKTTVLQLLKGGRWQVVVNEAACRGIAPETIETAWQEMHSAGAIILKNADEINKYINNQ

SEQ ID NO: 6560 - protein, 309 aa, Neisseria meningitidis
MIHVSAVQAPAHIQDTGRYGHRRYGIGHAGAMDTVALAAGNILLGNDEGTAAIEIALGGIMLVFERDTPFCLTGAVYQAELDGEPVYSYWRYTARKGQTLKLVRAVQGMYGYVCVAGGFDVPEVMGSRSTDLKAGFGGHQGRMLQKGDYLPIGKGAQELSKVGIAPIPFTDTVHLVPSSEYAAFSEKGRLNLERETWTLQSDSNRMGYRFDGQPLTLSQPLEMLSHAVQAGTVQVPPGGKPIILLADAQTTGGYPKIATVAAADLGRLAQVRFGSKVKFKIIGLKEATALRRKNQAYLNQIRRITHEAG

SEQ ID NO: 6561 - protein, 453 aa, Neisseria meningitidis
MLKKVLIANRGEIALRVLRACREMGIATVAVHSEADKDSLHVKLADESVCIGPAASAQSYLNVPAIIAAAEVSCADAVHPGYGFLAENADFAEQVEQSGFTFIGPKPDTIRLMGDKVSAKHAMIAAGVPCVPGSDGALPDDGEEILKIADKVGYPVIIKASGGGGGRGMRVVEKKEDLLQSVEMTKAEAGAAFGNPMVYMERYLQRPRHVEIQVIADEHGNAIYLAERDCSLQRRHQKVIEEAPAPFITEKERAKIGNACADACKRIGYRGAGTFEFLYEDGEFFFIEMNTRVQVEHPVTELITGVDIVQEQLRIAAGLPLQYKQKDIQVEGHAFECRINAEDPYNFIPSPGLIESCHLPGGFGIRVDSHIYQGYRIPPYYDSLIGKICVHGKTREQAMAKMRVALAELAVTGIKTNTPLHRDLFADAGFQKGGVSIHYLEHWLEDRKAKQDK

SEQ ID NO: 6562 - protein, 154 aa, Neisseria meningitidis
MFTIVLYQPEIPPNTGNIIRLCANTGADLHLVKPLGFPLDSAKMKRAGLDYHEFASLTVHENFDDCLKALAGRRIFALTTKGTARPDETAFQKGDVLLFGPETRGLPADILDSLPAAQKIRLPMQPGSRSMNLSNTVAVILFEAWRQHGYAGGV

SEQ ID NO: 6563 - protein, 259 aa, Neisseria meningitidis
MLKIISANVNGIRSAYKKGFYEYIAASGADIVCVQELKAQEADLSADMKNPHGMHGHWHCAEKRGYSGVAVYSKRKPDNVQIGMGIEEFDREGRFVRCDFGRLSVISLYLPSGSSAEERQQVKYRFLDAFYPMLEAMKNEGRDIVVCGDWNIAHQNIDLKNWKGNQKNSGFLPEEREWIGKVIHKLGWTDMWRTLYPDVPGYTWWSNRGQAYAKDVGWRIDYQMVTPELAAKAVSAHVYKDEKFSDHAPLVVEYDYAAE

SEQ ID NO: 6564 - protein, 507 aa, Neisseria meningitidis
  misc_feature 2, 3, 4: 'Xaa' is any amino acid
VXXXVLSAPGGYIVDIPKGNLKTEIEKLAKQPEYAYLKQLQVAKNVNWNQVQLAYDKWDYKQEGLTRAGAAIIALAVTVVTAGAGVGAALGLNGAAAAAADAAFASLASQASVSLINNKGDVGKTLKELGRSRTVKNLVVAAATAGVSNKLGASSLATWSETPWVNNLNVNLANAGSAALINTAVNGGSLKDNLEANILAALVNTAHGEAASKIKGLDQHYVAHKIAHAVAGCAAAAANKGKCQDGAIGAAVGEIVGEALVKNTDFSDMTPEQLDLEVKKITAYAKLAAGTVAGVTGGDVNTAAQTAQNAVENNAVKAVVTAAKVVYKVARKGLKNGKINVRDLKQTLKDEGYNLADNLTTLFDETLDWNDAKAVIDIVVGTELNRANKGEAAQKVKEVLEKNRPYIPNKGAVPNMSTYMKNNPFGKQLAQISEKTTLPTQQGQSVFLVKRNQGLLKTGDRFYLDGQHKNHLEVFDKNGNFKFVLNMDGSLNQMKTGAAKGRKLNLK

SEQ ID NO: 6565 - protein, 248 aa, Neisseria meningitidis
VQPETSAQYQHRFAQAIRGGEAADGLPQDRLNVYIRLIRNNIYSFIDRCYTETLQYFDREEWGRLKEGFVRDACAQTPYFQEIPGEFLQYCQSLPLLDGILALMDFEYTQLLAEVAQIPDIPDIHYSNDSKYTPSPAAFIRQYRYDVTDDLHEAETALLIWRNAEDDVMYQTLDGFDMMLLEIMGFSALSFDTLAQTLVEFMPEDDNWKNILLGKWSGWTEQRIIIPSLSAISENMEDNSPGQNHLSA

SEQ ID NO: 6566 - protein, 1431 aa, Neisseria meningitidis
MRFTHTTPFCSVLSTLGLFAVSPAYSSIVRNDVDYQYFRDFAENKGAFTVGASNISIQDKQGKILGRVLNGIPMPDFRVSNRQTAIATLVHPQYVNSVKHNVGYGSIQFGNDTQNPEEQAYTYRLVSRNPHPDYDYHLPRLNKLVTEISPTALSSVPLLGNGQPKANAYLDTDRFPYFVRLGSGTQQVRKADGTRTRTAPAYQYLTGGTPLKVLGFQNHGLLVGGSLTDQPLNTYAIAGDSGSPLFAFDKHENRWVLAGVLSTYAGFDNFFNKYIVTQPEFIRSTIRQYETRLDVGLTTNELIWRDNGNGNSTLQGLNERITLPIANPSLAPQNDSRHMPSEDAGKTLILSSRFDNKTLMLADNINQGAGALQFDSNFTVVGKNHTWQGAGVIVADGKRVFWQVSNPKGDRLSKLGAGTLIANGQGINQGDISIGEGTVVLAQKAASDGSKQAFNQVGITSGRGTAVLADSQQIKPENLYFGFRGGRLDLNGNNLAFTHIRHADGGAQIVNHNPDQAATLTLTGNPVLSPEHVEWVQWGNRPQGNAAVYEYINPHRNRRTDYFILKPGGNPREFFPLNMKNSTSWQFIGNNRQQAAEQVAQAENARPDLITFGGYLGENAQTGKAAPSYSKTNEAAIEKTRHIANAAVYGRPEYRYNGALNLHYRPKRTDSTLLLNGGMNLNGEVLIEGGNMIVSGRPVPHAYDHQAKREPVLENEWTDGSFKAARFTLRNHARLTAGRNTAHLDGDITAYDLSGIDLGFTQGKTPECYRSYHSGSTHCTPNAVLKAENYRALPATQVRGDITLNDRSELRLGKAHLYGSIRAGKDTAVRMEADSNWTLSQSSHTGALTLDGAQITLNPDFANNTHNNRFNTLTVNGTLDGFGTFRFLTGIVRKQNAPPLKLEGDSRGAFQIHVKNTGQEPQTTESLALVSLNPKHSHQARFTLQNGYADLGAYRYILRKNNNGYSLYNPLKEAELQIEATRAEHERNQQAYNQLQATDISRQVQHDSDATRQALQAWQNSQTELARIDSQVQYLSAQLKQTDPLTGILTRAQNLCAAQGYSADICRQVAKAADTNDLTLFETELDTYIERVEMAESELDKARQGGDAQAVETARHAYLNALNRLSRQIHSLKTGVAGIRMPNLAELISRSANTAVSEQAAYNTGRQQAGRRIDRHLTDPQQQNIWLETGTQQTDYHSGTHRPYQQTTNYAHIGIQTGITDRLSVGTILTDERTNNRFDEGVSARNRSNGAHLFVKGENGALFAAADLGYSNSRTRFTDYDGAAVRRHAWDAGINTGIKIDTGINLRPYAGIRINRSNGNRYVLDGAEINSPAQIQTTWHAGIRLDKTVELGQAKLTPAFSSDYYHTRQNSGSALSVNDRTLLQQAAHGTLHTLQIDAGYKGWNAKLHAAYGKDSNTARHKQAGIKIGYNW

SEQ ID NO: 6567 - protein, 357 aa, Neisseria meningitidis
MSITIQNLNKHFGNFHALKNINLNVPTGKLVSLLGPSGCGKTTLLRIIAGLENADGGNILFDGQDVTAKHVRERKVGFVFQHYALFRHMNVFDNVAFGLTVLPKSERPSKGQIRAKVEELLKLVQLSHLAKSYPHQLSGGQRQRIALARALAVEPKLLLLDEPFGALDAKVRKELRTWLRDIHHNLGVTSILVTHDQEEALEVSDEIVVMNHGKIEQTGSAEAIYRKPENAFVTEFLGETDAFEGRIEKGFWHYNGFAWKLDAQYKWQEQTATGYIRPHEWQIAAEHETPMICAEIEKIHAVGALTHILVKHDKQDVHITLAGSDAARYPIAEGKELKLIPKQVYVFSQNELIEYSI

SEQ ID NO: 6568 - protein, 418 aa, Neisseria meningitidis
MKVLVLGAGVAGVSSAWYLAEAGHEVTVIDRAEGVAMETSFANAGQLSYGYTTPWAAPGIPTKALKWLFKSHPPLLFRPDGSLYQIEWLWQMLQNCTAAHYQTNKERMVRISEYSREMFRRFEAQTGMNFEGRKKGTLQIFRQTKEVEAAKQDIAVLERYGVPYRRLKPEECAEFEPALARVTAKIAGGLHLPADATGDCRLFTENLYKLCQEKGVRFHFNQNISRIDHNGLRIKTVETETGRFEADAVVCALGCFSRTVLAQLDLNLPIYPVKGYSLTLPVTNSDGAPVSTVLDESYKVAITRFDNRIRVGGMAELSGYEIKLPEKRRETLALVVNDLFPEGGDLSQASFWSGLRPMTPDSTPLIGRTRFDNLFLNTGHGTLGWTMSLGSAKLTADIVSGKDTEIRSDDLSLSRYQA

SEQ ID NO: 6569 - protein, 98 aa, Neisseria meningitidis; identical to SEQ ID NO: 1735

SEQ ID NO: 6570 - protein, 371 aa, Neisseria meningitidis
MKIVIAPDSFKESLTAQQVAEAIKRGFQQSIADVECLLCPVGDGGEGTVDAIRHSLDLEEKCLQVTGPFGQKEVMRYFQKEQLALFEVADLVGLGKIPLEKRNPLQIQTRGIGELIRHLISQEIKEIYIGVGGTASNDGGIGIAAGLGYQFYDEDGNALPVCGQSLLNLASVSTENRYEIPEDVHIRILADVVSPLCGHQGATYTFGKQKGLDSTMFEAVDQAIQDFYEKVSPATLKLKGAGAGGGIAGGLCAFAQASIVSGIDTCLDLIDFDKKVSDVDLVIVGEGRLDRQSLAGKAPIGVAKRTPVGVPVVAICGSLVEDLPSLPFENIQAAFSILEKSEPLEDSLKNASLYLEHTASNIGHLLNMPKI

SEQ ID NO: 6571 - protein, 124 aa, Neisseria meningitidis
MIIQNEFNLYPSNMLPERFCYPEKYVRISNDTSLIPYIQPHNFHWWFENYGTEGAEVAYIFRNSILPDLNLIPFASNGEWEAYFDGNDVTGNSRVIVINLDNIENHEFFNSFEDWLELAIKDTW

SEQ ID NO: 6572 - protein, 113 aa, Neisseria meningitidis
MPKITVLPHTTLCPEGAVIDNAPEGKTVLDVLLDHDIEVDHACEKSCACTTCHVIIRKGFDSLEEPTELEEDLLDQAWGLEADSRLSCQAVVAGEDLIVEIPKYTINHAREEH

SEQ ID NO: 6573 - protein, 321 aa, Neisseria meningitidis; identical to SEQ ID NO: 4435

SEQ ID NO: 6574 - protein, 160 aa, Neisseria meningitidis; identical to SEQ ID NO: 1608

SEQ ID NO: 6575 - protein, 86 aa, Neisseria meningitidis
MNDLENQIKQLIIDSLALEDITAADIGSEDALFGDGGLGLDSVDALELGLAVQKHFGFRLDGEQENLREHFANVKTLAAFVKSRQA

SEQ ID NO: 6576 - protein, 261 aa, Neisseria meningitidis
MGFLQGKKILITGMISERSIAYGIAKACREQGAELAFTYVVDKLEERVRKMAAELGSELVFRCDVASDDEINQVFADLGKHWDGLDGLVHSIGFAPKEALSGDFLDSISREAFNTAHEISAYSLPALAKAARPMMRGRNSAIVALSYLGAVRAIPNYNVMGMAKASLEAGIRFTAACLGKEGIRCNGISAGPIKTLAASGIADFGKLLGHVAAHNPLRRNVTIEEVGNAAAFLLSDLSSGITGEITYVDGGYSINALSTEG

SEQ ID NO: 6577 - protein, 288 aa, Neisseria meningitidis
MWKMLKHIAQTHRKRLIGTFSLVGLENLLMLVYPVFGGRAINAVIAGEVWQALLYALVVLLMWLVGAVRRIADTRTFTRIYTEIAVPVVLEQRQRQVPHSAVTARVALSREFVSFFEEHLPIAATSVVSIFGACIMLLVLEFWVGVSAVGILALFLWLLPRFAAISENLYFRLNNSLERDNHFIRKGDRRQLYRHYGLLARLRVLISNREAFGYLCVGTAMGILFGFAFVMMTLKGYSSAGHVYSVGTYLWMFAMSLDDVPRLVEQYSNLKDIGQRIEWSERNIKAGT

SEQ ID NO: 6578 - protein, 306 aa, Neisseria meningitidis
MTLTELRYIVAVAQERHFGRAARRCFVSQPTLSIAIKKLEEELAVSLFDRSSNDIITTEAGERIVAQARKVLEEAELIRHLANEEQNELEGAFKLGLIFTVAPYLLPKLIVSLRRTAPKMPLMLEENYTHTLTESLKRGDVDAIIVAEPFQEPGIVTEPLYDEPFFVIVPKGHSFEELDAVSPRMLGEEQVLLLTEGNCMRDQVLSSCSELAAKQRIQGLTNTLQGSSINTIRHMVASGLAISVLPATALTENDHMLFSIIPFEGTPPSRRVVLAYRRNFVRPKALSAMKAAIMQSQLHGVSFICD

SEQ ID NO: 6579 - protein, 61 aa, Neisseria meningitidis; identical to SEQ ID NO: 1125

SEQ ID NO: 6580 - protein, 296 aa, Neisseria meningitidis
MNPKSPLFLRLSDRLDVYLRLMRADKPIGTLLLLWPTYWALWLASDGIPDLAVLAAFTIGTFLMRSAGCVINDFADRDFDGAVERTKNRPFAQGRVKKKEALLLTAFLCLLAALCLIPLNHLTWLMSLPALFLALTYPFTKRFFPIPQLYLGLAFSFGIPMAFAAVAGNVPPQAWILFAANVLWTLAYDTVYAMADKEDDLKIGIKTSAVTFGRYDIAAVMLCHGGFTLLMAVLGAVIGAAWAYWTAIPIVLLLQYRQYAAIKSRVRQICFETFLANNRIGWVWFTAIFAHTFFAK

SEQ ID NO: 6581 - protein, 659 aa, Neisseria meningitidis
MPKILQQTTLHRFFRANTHHPISPSVLQQAGDLIRWLCFSDGISDFRPCHLKPQNPIGGTVMNTVSNYLSALREAMKAQGLDALVIPSADPHLSEYLPEHWQARRELSGFTGSVGTFVLTTDEAGVWVDSRYWEQAAKQLAGSGIVLQKSGQVPPYNEWLAASLPENAAVGIPSDMVSLTGKRTLAQSLAAKNIRIEHPDNLLNQVWTNRPALPAETVFIHDPDYVSETAAEKLARVRAVMAEKGADYHLVSSLDDIAWLTNLRGSDVPFNPVFVSFLLIGKDNAVLFTDRCRLNAEAAAALQTAGITVEPYAQVADKLAQIGGALLIEPNKTAVSTLVRLPESVRLIEGINPSTLFKSCKSEADIARIREAMEHDGAALCGFFAEFEDIIGNGGSLTEIDVDTMLYRHRSVRPGFISLSFDTIAGFNANGALPHYSATPESHSTISGNGLLLIDSGAQYKGGTTDITRVVPVGTPSAEQKSDNTLVLKAHIALAEAVFPENIPSPLIDAICRKPLWQAQCDYGHGTGHGVGYFLNVHEGPQRIAFAAPATPETAMKKGMVTSIEPGLYRPGKWGIRIENLAANQAVAAPQETEFGSFLCFETLTLCPIDTRLMDTALMTDGEIDWVNRYHAEVRRRLEPLTEGAAKAWLIKRTEPLAR

SEQ ID NO: 6582 - protein, 220 aa, Neisseria meningitidis
MNLKLVFESGDPVLIGVFVLMLLMSIVTWCLVVLRCIKLYRARKGNAAVKRHMRDTLSLNDAVEKVRAVDAPLSKLAQEALQSYRNYRRNEASELAQALPLNEYLVIQIRNSMAQIMRRFDYGMTALASIGATAPFIGLFGTVWGIYHALINIGQSGQMSIAAVAGPIGEALVATAAGLFVAIPAVLAYNFLNRGTKILPQDLDAMAHDLHVRLLNQKDS

SEQ ID NO: 6583 - protein, 163 aa, Neisseria meningitidis
MNSLFVDNTVFITRLKAGHIGRLVQALFEEWHGFEPWSSVDKIHAYYGRCLKDDELPLAFAAVDDSGILLGSAAVKRHDMESFPRYEYWLGDVFVLPEYRGKGIGRRLVAHCIGAARSLGIKFLYLYTPDVQIFYESFGWVVVGRHFHNGEWVTVMRLDVDKV

SEQ ID NO: 6584 - protein, 304 aa, Neisseria meningitidis
MKHLKLTLIAALLTASATAAPLPVVTSFSILGDVAKQIGGERVSIQSLVGANQDTHAYHMTSGDIKKIRSAKLVLLNGLGLEAADVQRAVKQSKVSYTEATKGIQPLKAEEEGGHHHDHDHDHEGHHHDHGEYDPHVWNDPVLMSAYAQNVAKALIKADPEGKVYYQQRLGNYQMQLKKLHSDAQAAFNAVPAAKRKVLTGHDAFSYMGKRYHIEFIAPQGVSSEAEPSAKQVAAIIRQIKREGIKAVFTENIKDTRMVDRIAKETGVNVSGKLYSDALGNAPADTYIGMYRHNIKALTNAMKQ

SEQ ID NO: 6585 - protein, 575 aa, Neisseria meningitidis; identical to SEQ ID NO: 2951

SEQ ID NO: 6586 - protein, 55 aa, Neisseria meningitidis; identical to SEQ ID NO: 1895

SEQ ID NO: 6587 - protein, 129 aa, Neisseria meningitidis
MSTHEKLLTADNPVLHQRAKAMRQEMSEAEAKLWQHLRAGRLNGYKFRRQQPMGNYIVDFMCVTPKLIVEADGGQHAEQAVYDHARTAYLNSLGFTVLRFWNHEILQQTNDVLAEILRVLQELEKQYAQ

SEQ ID NO: 6588 - protein, 363 aa, Neisseria meningitidis
MNAQTLIANVAEFVKTKLKPIVDDIDRKGYYPEAFMRELGAIGGFGAVGTEAEGGNGLGLATQIAVLREIGKECGATSFSAWCQAACAWYLHQTPNRAVKDKYLADILQGKVLAGTGMSNTVKHLADIEKHNLQAERVEGGYTVNGALPWVSNIGEDHIWANTAQIGDGYVMFITGGQWEGVSLQNCPEFCALEGTRTFSLNFKDVFIPDEDIIAAPEQFADYIQSIKAGFILLQIGIGAGVIDGSLGIIRLANVVNAEVNNYLNDGYDSLKTRLDGAWAETERLAGLAWSGTPDNLATLKLREAAAVLALAAAQSAALHSGAKGYLMRSPAQRRVREAMFVAIVTPAIKHLRKEIAAIEAAK

SEQ ID NO: 6589 - protein, 351 aa, Neisseria meningitidis
MTILSDVKALGQQIWLDNLSRSLVQSGELAQMLKQGVCGVTSNPAIFQKAFAGDALYADEIAALKQQNLSPKQRYETMAVADVRAACDVCLAEHESTGGKTGFVSLEVSPELSKDAQGTVEEARRLYAAIGCKNAMIKVPATDAGIDALETLVSDGISVNLTLLFSRAQTLKAYAAYARGIAKRLAAGQSVAHIQVVASFFISRVDGALDTTLPDHLKGKIAIALAKAAYQDWAQYFGSPEFAALETKGANRVQLLWASTGVKNPAYPDTLYVDSLIGAHTVNTVPDATLKAFIDHGTAKATLTEGVEEAQAQLAETAALGIDVETLATRLQEDGLKQFEEAFEKLLAPLA

SEQ ID NO: 6590 - protein, 178 aa, Neisseria meningitidis
MQAISPELQARAAKIKLLILDVDGVLTDGRIFIRDNGEEIKSFHTLDGHGLKMLQASGVQTAIITGRDAPSVGIRVKQLGINYYFKGISDKRAAYEELRAQAGVEEAECAFVGDDVVDLPVMVRCGLPVAVPGAHWFTRQHAAYITEHAGGAGAVREVCDLIMQAQGTLGAALNEYIK

SEQ ID NO: 6591 - protein, 99 aa, Neisseria meningitidis; identical to SEQ ID NO: 1110

SEQ ID NO: 6592 - protein, 706 aa, Neisseria meningitidis
MRRFLPIAAICAVVLLYGLTAATGSTSSLADYFWWIVAFSAMLLLVLSAVLARYVILLLKDRRDGVFGSQIAKRLSGMFTLVAVLPGVFLFGVSAQFINGTINSWFGNDTHEALERSLNLSKSALNLAADNALGNAVPVQIDLIGAASLPGDMGRVLEHYAGSGFAQLALYNAASGKIEKSINPHKLDQPFPGKARWEKIQRAGSVRDLESIGGVLYAQGWLSAGTHNGRDYALFFRQPVPKGVAEDAVLIEKARAKYAELSYSKKGLQTFFLATLLIASLLSIFLALVMALYFARRFVEPVLSLAEGAKAVAQGDFSQTRPVLRNDEFGRLTKLFNHMTEQLSIAKEADERNRRREEAARHYLECVLEGLTTGVVVFDEQGCLKTFNKAAEQILGMPLTPLWGSSRHGWHGVSAQQSLLAEVFAAIGAAAGTDKPVHVKYAAPDDAKILLGKATVLPEDNGNGVVMVIDDITVLIHAQKEAAWGEVAKRLAHEIRNPLTPIQLSAERLAWKLGGKLDEQDAQILTRSTDTIVKQVAALKEMVEAFRNYARSPSLKLENQDLNALIGDVLALYEAGPCRFAAELAGEPLTVAADTTAMRQVLHNIFKNAAEAAEEADVPEVRVKSETGQDGRIVLTVCDNGKGFGREMLHNAFEPYVTDKPAGTGLGLPVVKKIIEEHGGRISLSNQDAGGACVRIILPKTVKTYA

SEQ ID NO: 6593 - protein, 213 aa, Neisseria meningitidis; identical to SEQ ID NO: 2136

SEQ ID NO: 6594 - protein, 1320 aa, Neisseria meningitidis
MSVVLPLRGVTALSDFRVEKLLQKAAALGLPEVKLSSEFWYFVGSEKALDAATVEKLQALLAAQSVEQTPKAREGLHLFLVTPRLGTISPWASKATNIAENCGLAGIERIERGMAVWLEGRLNDEQKQQWAALLHDRMTESVLPDFQTASKLFHHLESETFSGVDVLGGGKEALVKANTEMGLALSADEIDYLVENYQALQRNPSDVELMMFAQANSEHCRHKIFNADFILNGEKQPKSLFGMIRDTHNAHPEGTVVAYKDNSSVIEGAKIERFYPNAAENQGYRFHEEDTHIIMKVETHNHPTAIAPFAGAATGAGGEIRDEGATGKGSRPKAGLTGFTVSNLNIPDLKQPWEQDYGKPEHISSPLDIMIEGPIGGAAFNNEFGRPNLLGYFRTFEEKFDGQVRGYHKPIMIAGGLGSIQAQQTHKDEIPEGALLIQLGGPGMLIGLGGGAASSMDTGTNDASLDFNSVQRGNPEIERRAQEVIDRCWQLGGKNPIISIHDVGAGGLSNAFPELVNDARRGAVFKLREVPLEEHGLNPLQIWCNESQERYVLSILEKDLDAFRAICERERCPFAVVGTATDDGHLKVRDDLFANNPVDLPLNVLLGKLPKTTRTDKTVAPSKKPFHAGDIDITEAAYRVLRLPAVAAKNFLITIGDRSVGGLTHRDQMVGKYQTPVADCAVTMMGFNTYRGEAMSMGEKPTVALFDAPASGRMCVGEAITNIAAVNIGDIGNIKLSANWMAACGNEGEDEKLYRTVEAVSKACQALDLSIPVGKDSLSMKTVWQDGEEKKSVVSPLSLIISAFAPVKDVRKTVTPELKNVEDSVLLFVDLGFGKARMGGSAFGQVYNNMSGDAPDLDDTGRLKAFYSVIQQLVAENKLLAYHDRSDGGLFAVLVEMAFAGRCGLDIDLNLLLAQTFITNHTALSQSLRTEEVKALAEWQETIARTLFNEELGAVIQVRKQDVADIINLFYQQQLHHNVFEIGTLTDENTLIIRDGQTHLISDNLIKLQQTWQETSHQIQRLRDNPACADSEFALIGDNERSALFADVKFDVNEDIAAPFINSGAKPKIAILREQGVNGQIEMAAAFTRAGFDAYDVHMSDLMAGRIHLADFKMLAACGGFSYGDVLGAGEGWAKSILFHPALRDQFAAFFADPDTLTLGVCNGCQMVSNLAEIIPGTAGWPKFKRNLSEQFEARLSMVHVPKSASLILNEMQGSSLPVVVSHGEGRADFALHGGNISADLGIALQYIDGQNQVTQTYPLNPNGSPQGIAGVTNADGRITIMMPHPERVYRAAQMSWKPEGWTELSGWYRLFAGARKALG

SEQ ID NO: 6595 - protein, 146 aa, Neisseria meningitidis; identical to SEQ ID NO: 1069

SEQ ID NO: 6596 - protein, 229 aa, Neisseria meningitidis
MKRKNIALIPAAGIGARFGADKPKQYVEIGSKTVLEHTIGIFERHEAVDLTVVVVSPEDTFADKVQTAFPQVRVWKNGGQTRAETVRNGVAKLLETGLAAETDNILVHDAARCCLPSEALTRLIEQAGNAAEGGILAIPIADTLKCADGGNISATVERTSLWQAQTPQLFRAGLLHRALAAENLDGITDEASAVEKLGVRPLLIQGDVRNLKLTQPQDAYIVRLLLDAV

SEQ ID NO: 6597 - protein, 270 aa, Neisseria meningitidis
LTADATRFIIWSSRNDNLQRQMPSERKDMIKFKNVHKHFKDLHVINGVNLEIKKGEVVVVCGPSGSGKSTLIRTVNQLESIESGEIWVDGVNVADPKTDLNKIREEVGFVFQGFNLYPHLTVLENITLAPMKVKGQNAEQAEKKAMELLERVGLAHKKDAFPSQLSGGQQQRVAIARGLAMEPRVMLFDEPTSALDPEMVGEVLKVMKDLAESGMTMMCVTHEMGFAREVADRVIFVDKGQILEDETPEAFFTNPKHERAKQFLQQVMTH

SEQ ID NO: 6598 - protein, 786 aa, Neisseria meningitidis
MLPIAALVGSIFGNPVLAADEAATETTPVKAEIKAVRVKGQRNAPAAVERVNLNRIKQEMIRDNKDLVRYSTDVGLSDSGRHQKGFAVRGVEGNRVGVSIDGVNLPDSEENSLYARYGNFNSSRLSIDPELVRNIEIVKGADSFNTGSGALGGGVNYQTLQGRDLLLDDRQFGVMMKNGYSTRNREWTNTLGFGVSNDRVDAALLYSQRRGHETESAGNRGYAVEGEGSGANIRGSARGIPDSSKHKYHSFLGKIAYQINDNHRIGASLNGQQGHNYTVEESYNLTASSWREADDVNRRRNANLFYEWMPDSNWLSSLKADFDYQKTKVAAVNNKGSFPMDYSTWTRNYNQKDLDEIYNRSMDTRFKRFTLRLDSHPLQLGGGRHRLSFKTFVSRRDFENLNRDDYYFSGRVVRTTSSIQHPVKTTNYGFSLSDQIQWNDVFSSRAGIRYDHTKMTPQELNAECHACDKTPPAANTYKGWSGFVGLAAQLNQAWRVGYDITSGYRVPNASEVYFTYNHGSGNWLPNPNLKAERSTTHTLSLQGRSEKGMLDANLYQSNYRNFLSEEQKLTTSGTPGCTEENAYYGICSDPYKEKLDWQMKNIDKARIRGIELTGRLNVDKVASFVPEGWKLFGSLGYAKSKLSGDNSLLSTQPLKVIAGIDYESPSEKWGVFSRLTYLGAKKVKDAQYTVYENKGWGTPLQKKVKDYPWLNKSAYVFDMYGFYKPAKNLTLRAGVYNLFNRKYTTWDSLRGLYSYSTTNAVDRDGKGLDRYRAPGRNYAVSLEWKF

SEQ ID NO: 6599 - protein, 367 aa, Neisseria meningitidis
MAEICLITGTPGSGKTLKMVSMMANDEMFKPDENGIRRKVFTNIKGLKIPHTYIETDAKKLPKSTDEQLSAHDMYEWIKKPENIGSIVIVDEAQDVWPARSAGSKIPENVQWLNTHRHQGIDIFVLTQGPKLLDQNLRTLVRKHYHIASNKMGMRTLLEWKICADDPVKMASSAFSSIYTLDKKVYDLYESAEVHTVNKVKRSKWFYTLPVIVLLIPVFVGLSYKMLSSYGKKQEEPAAQESAATEQQAVLPDKTEGEPVNNGNLTADMFVPTLSEKPESKPIYNGVRQVRTFEYIAGCIEGGRTGCACYSHQGTALKEVTELMCKDYVKNGLPFNPYKEESQGQEVQQSAQQHSDRAQVATLGGKP

SEQ ID NO: 6600 - protein, 243 aa, Neisseria meningitidis
VSREINAGRHHFLYGGISGGGVHYWDNKDFSEQSLRLSFGYKNRSVTRSFGIVPFVEQNLLGGSRYNFVGGFNADFSQRLSERWRLTLNAGNMWKHYQEDRTAARYDSHMPLAGATLMYSAPKDWLLYGGADWSHNITKEAEQASIRKGLRVGAVKTFDGGLGLRANLRYTRRMFDAPGTIVYRFPRKDHEYQANLSLWHDKISWKGFTPQLNFRYLKIDSNMKSFYTRKNMQIFMSVEKDFK

SEQ ID NO: 6601 - protein, 470 aa, Neisseria meningitidis; identical to SEQ ID NO: 2364

SEQ ID NO: 6602 - protein, 177 aa, Neisseria meningitidis
MPVFASLPPQYMDTLPECPITNTASLLPHSGRMVLIDRITRYGDDFVEAGAQVSPNHILLLDDKLPYTAFIELMAQAVGAYAGIQARKNARSVRLGFLLGTRKLEIFAQSVPIGTHLLATAHMSIQDAGGMGVFDCELRWTDAPETSSETLPSDGILARASLNVYSPEHPAGTTDAV

SEQ ID NO: 6603 - protein, 67 aa, Neisseria meningitidis; identical to SEQ ID NO: 86

SEQ ID NO: 6604 - protein, 157 aa, Neisseria meningitidis
MKKLLAAVMMAGLAGAVSAAGVHVEDGWVRTTVEGMKIGGAFMKIHNDEAKQDFLLGGSSPVADRVEVHTHINDNGVMRMREVKGGVPLEAKSVTELKPGSYHVMFMGLKKQLKEGDKIPVTLKFKNAKAQTVQLEVKIAPMSAMDHGHHHGEAHQH

SEQ ID NO: 6605 - protein, 159 aa, Neisseria meningitidis
MSKHTYPITPAVRVLRENGIEFEPFTYAYEEHGGTAQFARLFGKDEHLVIKTIVLQDENGKGLIVLMHGDKQISTRNLARHLGAKHIEPATPVQANKWTGYLVGGTTPFGIRTKLDIYVEQSVMDLETIYINGGKRGFIIGIRPGDLNILNPKTIQAAV

SEQ ID NO: 6606 - protein, 54 aa, Neisseria meningitidis
MGQVAFYEKMIGLWSAKSREASEQADLAAFEFAEGELANYREMLKRHLQTKSVE

SEQ ID NO: 6607 - protein, 117 aa, Neisseria meningitidis
MKQIIILQSAVLSICAAVAFAVWGFAGFLSAVGGGLSYLLPTFVAVLLLKLFRGNPFLQSRMFVFGEILKVVLSLLSMLAVFAIWHQSLVFAPFLMGLLGVSHLVFLVLLRVKDYGR

SEQ ID NO: 6608 - protein, 238 aa, Neisseria meningitidis; identical to SEQ ID NO: 945

SEQ ID NO: 6609 - protein, 409 aa, Neisseria meningitidis
MAFGKSLFHAIGRVSLVRQIAAGLALGIVIGSVSPQLGLAAGLFGSLFVGALKAVAPVLVFILVAATIAQHQKGNKAHIRPIIVLYLIGTFSAALTAVIAGMVFPTHIVLAGAGDVSAAPPSGIVEVLKSLLMNLVANPINAIANANYIGILAWALVLGAALRNHGSDVTRQVVADLAEAVSTVVKWIIRFAPLGIFGLVSSTIAETGFGALAGYAKLLAVLLGCMAFIALAVNPAIVWWKIRRNPFPLVFTCLRESGVYAFFTRSSAANIPVNMALAKKLGLHEDTYSISIPLGATINMAGAAITITVLAMAAAHTQGITVDFATALLLSLVATVSACGASGVAGGSLLLIPLACSLFGIDNDVAMQVVAVGFIIGVIQDSAETALNSSTDVLFTAAADLGRQRNRAE

SEQ ID NO: 6610 - protein, 365 aa, Neisseria meningitidis
MNQTFTLPDTRPYPQNPIKNHLLLNAYQLAHNSSQASRKLSSGQLQTEIRGMLEQNHYINLSLALTMSPDAGTYAALLSSVNAVLDCEKEGEVQWFALPVVLVSGCKKERAIEMKLPTEALFACLQNYPHLRALTQETQWLPYLVHSSDLSAVAPDEWWRAKQNTEAAAQHLRRFAPRPLLLPEGQSVHVVYALGFGSGKVQTALGQNLLQAGLPLMQVWQENLASEGVTLFANPLSPDSPVRALSDGSHTRQRMAMDVFAANAIRAVRMQSPRVGVVAAAKAGGQILFGFNATDGAFEVVPQVFSWQLSFTDNIAVIQQNFLDLMAECRVEHVYLLHNPLGEQESIPSYAEALKREGHNPFFSA

SEQ ID NO: 6611 - protein, 316 aa, Neisseria meningitidis
MYLGIDVSKLTIDCCLIVDGQNYQKKFQNNKGGFEQLINWLQSHKVNDKLHCVCEATGTYYEALAEYLYSRYTITVENPRKIKGYAIAELQRSKTDTQDAKLIAQYCQDRKHKLKAWKPPTKEQKQLQEIARYLDYLKQQRATEKAKQHEAPDYIKSHIQTTISNLTAQIQIVKKQLLQFYKDNPSYNNLRKRLKTITGIGEQATAVLLSTYKRHEFKNARQFTAYLGLDPRKFQSGTSVNGKSRISKIGSSEIRKSLYMPALVAYRCNAFPEFVGRLKNKGKHIKLILIAIMRKLAVIAFTILQNGQDFQVERYK

(The sequence listing continues in the following parts.)
